United States Patent Application Publication US 2008/0066199 A1 - sequence listing, part 3

SEQ ID NO: 12194 - DNA, 478 bp, Glycine max
  Clone ID: jC-gmfl02220138e09d1
acccaagaaaaaaatttttttttaaaaaaaaccccgcgaggccccccctgggcccacccctctttgggccccccccccccggaaaaacccccccggcccgggggaaaaaaaaccccaaaacccccccccaggggggggggaaaaaaccccccccccccccttggggaaccccctattttttttttttggggggaaaaacccccccccccctattggaaaaacccctggtttctccccaaaaggccccgggggggccccaaaaggggggaccccggggggggcccccctgggccaaaaaccccctttggggccccatccttttaaaaaaggcagcgaaccccctttcttaaacaaaactcccattggtggaaaaggggggggcccccgcggggcttttccatcccctcccaaaccccggattttgtgttgggggccccccgggggggggaaaaaaaaaaaacctccccccccccccggg

SEQ ID NO: 12195 - DNA, 360 bp, Glycine max
  Clone ID: jC-gmfl02220138e10a1
ctatatcgatgatgctctcaacatcttatctatatttgcctttatcctgccgaccggcgcctacatgaggagtgagacatgatgctgttgatcgttaccaccctgttcaacacagttgttcgcgatgaatgaactgacgcacctgctggtgggactcaaagctgctggatctacttccatcgtgtcccatctcatccttggcctgattgcacacaacgtacccaccatcacatacaatggttcgactgacgactgcaatatcatcttccaatctgtgtgcaatggagggggactggacaagagcccagctctgaggtggcatcatttccataacgctcagggtcatatttccgtgattga

SEQ ID NO: 12196 - DNA, 502 bp, Glycine max
  Clone ID: jC-gmfl02220138e11a1
gatagctagaagcaataagatgaaaattaaagcgctcgattcgtttgctgctacagatgtggtcgcatatgaatgccatggctcatactaccagaagttccctctccaaatgaacactgggttcggcgggcaatacaacaatgaggtggcatgagccagttggaggctaggcgcggaagcaaacaacgtagtcaagcggctaactggtcctgcaacttgcggagagtacatcactgactacggtccaggagaccaatgtagactagattccaaaacagttaaccaacaagcttatttactatgctaaattcctcaaactcaccaacaaagatgtctttgtctcggacgtagacgacactactctatgtaatctccagtatttagctaaccatggattaggagtggaaccacacaatacgacggcgttcaagaactgggttcttgatggcgaagcattcgcactgccagagactcttaagatgtacaacaactgttggctctc

SEQ ID NO: 12197 - DNA, 397 bp, Glycine max
  Clone ID: jC-gmfl02220138e12a1
gtagagtggtgagcatgccaaaatcctcgcgaagggcaacctcactgactctcgagaccgacaaagtctgaggctccgactatgattccgaacacaagggcttgccctgcaaaggtgacctacacctcaagctccttcctggtgaccacggtaccgcattcactggctatcatcaagcttctgtgcagactactcatgaccatataggctaagagcacacgtgagactagctaggcgacacatacgtctctacaccccaagcaggttcttcgttggaccggcaacccagaacaaccattacatctatggttctagcccaccatggacatcgacacatactccgtacaatggactactgcaatcatactattctctgcggacggtacccctatatggg

SEQ ID NO: 12198 - DNA, 523 bp, Glycine max
  Clone ID: jC-gmfl02220138f01a1
ggtagaccaaggtaggttatttgccatggtcattggtggtgaagtggaagagaccgtgagagagttgaggcaatacttcaaaactggaaaaaccaagagtgtgacatggaggaaaaaccagctcacagctctcttagaccttgttcatgagaatgaagatgctatatttaaggccctccatcaagatcttgggaagcaccctgttgaggcttaccgtgatgaggttggaggggtagaaaaatccgccagcaatgctttgagctgcgttgagaaatggatggcccctaaaaagagtgatatcccttttcttttcttcccagctaaaggagaagtgttgtcagaaccacttggtgtggttctcatattttcttcttggaacttcccaatcatactgacattggatccaataattggggcaatatctgctggaaatgttgtagtcataaaaccttcagagcaatctccagcaagctcttcttttcttgccactaccatttctcgctacttggactctaatgccatc

SEQ ID NO: 12199 - DNA, 510 bp, Glycine max
  unsure (1)..(510): unsure at all n locations
  Clone ID: jC-gmfl02220138f01d1
tttnttttttttttttttgaattaattttttacgtttgtaggcactttattcatgggggggccacacgggtggacaaatgcaggtgaaagcgaagttaaaaatgtttgacattgtctggtctgttggacattagaagtaaaaacatcctattactagcaagaaaaataagagatacaaaggttcgtttattacaacgccaagttaaagttcaccacatgtgcaacttctgcaaataaggaccctttctcctattttcctacaactcatattcagtcacaataaagcttaattcttttttaatcaacgtgtatttgaggaatagatgaacactgtgctgaggtatttatctacttggatcttttcaagcccagcatgtgcagtaatagtccaaagtagttcagcctgtatgccaatctgataaactcgagcttgaacttactccaaggagggtaccttggctcaatttaaggaacagctttctatgcattacagctttttcatggctgaaa

SEQ ID NO: 12200 - DNA, 78 bp, Glycine max
  unsure (1)..(78): unsure at all n locations
  Clone ID: jC-gmfl02220138f02d1
ggatgagctanctnnnaggggnnnnngggggnnncacggctccactctagattctatnctcaatnnngggttaacggc

SEQ ID NO: 12201 - DNA, 489 bp, Glycine max
  Clone ID: jC-gmfl02220138f03a1
gcattccaatcgctcccaaatattttttttatttgttcataactcaataattctcatcatgggctccttgattgttccaggtgaacatgatcacaaactaaagcttgtttctcttccctttgtatcaaccagtcacctcattcccgtagtagacatagctaggctctttgccattcatggtgttgatgtcaccataatcaccaccacagccactgccgccattttccaaagctctatcgatcgcgaccgtgaccgcggccacgctattagaacccacgttgtcaagttcccatgtgaacaagttgggttgccagaaggagtagagagcttcaactccaacactcctcgggatttggtccacaaaatctaccagggactcaccattctccaagaccaataccaacaactcttccatgacttgcagcctgatttcttgttcaccgacatgttctacccctggactgtggatgctgctgctaagttgggaat

SEQ ID NO: 12202 - DNA, 504 bp, Glycine max
  Clone ID: jC-gmfl02220138f03d1
ggaaaagcaactaatcatttatttacctaattatgttgacactgataacatgattacagaaagaagtgtccagttgcaaaatctttcaaatcattggatcacactactctaatttaaccaaaaacatacaaacacttagaattcttttatttcataagtagtacaattactaggtaacaatactattatatttcacactatttttgaatgaggcatgtcacttatttagaatcacagtgctatgtcctgaattgattgcaattatccccaagagttggcctaacttttgtggttggccttctgcagtttgagtgacttcaactcctggatcagttctttcaaattgttgtgagaagaccctccaacctgaatagctttcttagcagcatcactaagtgcttttgctcttctcctcatttctatagactcttcaccacccatcaaaacaccaattgcatttcctatctcttccctttttaccacctcatcttcaaactcattcca

SEQ ID NO: 12203 - DNA, 435 bp, Glycine max
  Clone ID: jC-gmfl02220138f04a1
atgatacgtgggctccggggggctgttgatgtaagaaaaataaccaatttgacccttagtccaagtattatatttggatatttattaaaatcaccttttgggggagaagggtggattgttagtgtggacgatttggaagatataattggggggcatgtatggttgggttacatttgtatacttggtggaatctgtcatatgttaaccaatccttttgcatgggctctgcgtgcacttgtatggcctggagaagctctcttatcttatagtataggtgctttatctgtccgtggttatattgcttggagctaagactggttaaattataccgcttatcctagtgagttgtacaggcccactgggccaaaagctcttcaagcttaagcattcacttttatagttagagaccaacgtcttggggctaatgtaggatct

SEQ ID NO: 12204 - DNA, 345 bp, Glycine max
  Clone ID: jC-gmfl02220138f04d1
ggaaaaaaaagttttccctaaaaccaaaacgtcttttacaagggaaaaaccgccctggtggattaacaagggggtttaaaaggccctaaccaacaggggtgggtggcctcccccgaactacccagccaaaaagactttgggcaaggggcaattaaaccccccccgaaaccctgcttttttccccggggttggggcctccacaagatcttggccccgattcaaaaagtttttcaatttttggggcccattttatgaaaccccgggtccaaaaattggccctaggattcttaatccgctcaataaaagtaatggggggccccccggggggggggcgggtaacaattg

SEQ ID NO: 12205 - DNA, 536 bp, Glycine max
  Clone ID: jC-gmfl02220138f05a1
atcttcttatagcttcatcccaatatgctcttttccttctaaatttgattccttagttcagcattctattattatatatggcttcttcaccttcctcagaaaacaaaaacctagagggagtagctggtggtgccggagagaaacccattccacttggtgagaacgttctgcagaagcatgctgcattctttgacttgaataaagatggtgtcatctacccatgggagacttttaaagggttgcgtgaaatcgggactggggttttgctgtccgttggaggtgctattttcatcaatgcgtttctcagtcagagtactcgtcccggaaagtttccatctatactttttccaattgaaattaaaaatatccaacgcggcatacacggcagtgacactggagtctacgatactgaaggaagggttgtaccttcaaaatttgaagaaatttttaacaagcatgcacatacacatgcaaatgctttgacatatgatgagttaacggagactgataagggcaatagagagcctaaagatttc

SEQ ID NO: 12206 - DNA, 281 bp, Glycine max
  unsure (1)..(281): unsure at all n locations
  Clone ID: jC-gmfl02220138f05d1
ggggcccggggcccctttttttttttccccccggggggccccccccggggggcccggggggggttttggggcccccccccccctcccttggggggcctttcccccccccggtggggcccccttttgggtggggggtttccccccccccttttccctttggggggggccccccccctccctttttgctggggggggggggggcccccccccttggtccccccggggtgtgggggcttnngggcccccctttcccctctgggggcccccccccggcccccccc

SEQ ID NO: 12207 - DNA, 530 bp, Glycine max
  unsure (1)..(530): unsure at all n locations
  Clone ID: jC-gmfl02220138f06d1
ttnnnnnngnttttnncattttctcctttatagtaaataatcgacaagtaagccaaggggaaggagagaggagaaaattatgaacaaaacgatttaagcaaaaaacaaaaaaaaaaaagaaaatcctacatctcaaaatgcagggttaatcttttacccaaattatcaacatgactgtagcaaaacaggaccaactgataaactaagcatatcgctgagagcaacctggagatcctttgacccatgttcacaacgtaccaagctggagatgagagggaagaaatgagacaggttcttctcaaaagaagtatctcccaaactacaaatagcctgaatagtagccacaatgagaggncgatcgtgctgccaattctctcctcttcccagtgcctaagggaattgaccaatgttgctgtctaccatgagaagattcagatttttgtccaaaacctgcaacttcaatataaaactccaaaacctcctgacaaagccgaatgagatgcaattcaacctcatccgcctcgtaacta

SEQ ID NO: 12208 - DNA, 178 bp, Glycine max
  Clone ID: jC-gmfl02220138f07a1
tgccttttcaatacaaattttagtattcaataaagcaaaaagaaacacaaattttagtgtttaataaagcaaaatgcacacataccccaaacaaaacaagccttattcaatactaaaatttgtgcttctttctgccttttcaatacatcaaagaaaataaaaaaattcctacccatct

SEQ ID NO: 12209 - DNA, 455 bp, Glycine max
  Clone ID: jC-gmfl02220138f07d1
aaacattaattttcttatcaagaatttacttgacattctaaaacaagttgctctcacttttagaaccttccagaagaactactaacggggattcattggttcaaatatatgtacacatcgaattaaggggaataagcaacttcaaacaaacatcacctcactgcacatggaacggttttctcggggtagtagatgctcgattttccattgattgcaatctctgtttgagatgaaaaacttcatactgtagttggaatgctcttgctctttctcctgcaataactcctcttgttgagtgcaactccttctgtgtatcatctaaaacagccttgaggaaggccacattatgctcaagccgtacattgtcagagtgcacaatgtttgataggttgttggcctcttcctgggccaactctagactggtcagcttctctctcatcaattccatctcctta

SEQ ID NO: 12210 - DNA, 529 bp, Glycine max
  Clone ID: jC-gmfl02220138f08a1
agcattgctgaagcgtctccataatcctactcgatggccgagcgagccctgttgaccagggaaaccctagccaccgtgctccgcaacgactcgaaggccataatcggagctggaatagctgcatatactcattctcgggggttgcacgtgtacacgctccccgatctggattacgactatggcgctctggagccatccatcatcggtgaaatcatgcagctgcaccaccagaagcaccaccagacttacatcaccaacttcaacaagggcctcgagcagctccaagacgccgtcgccaagaaagattcctccgacgtcgttaagctccagggcgccatcgagttcaacggcggaggtcacgtcaaccattctattttctggaaaaatctagctcctgttcgcgaaggaggtggtgaaccacccaagggttcactgggatgggccattgacacacattctggctcttttgaagcattagtgcacaaagttaatgcagaatgtgctgcactacaggagtctggatgggtgt

SEQ ID NO: 12211 - DNA, 427 bp, Glycine max
  unsure (1)..(427): unsure at all n locations
  Clone ID: jC-gmfl02220138f08d1
ttnnnttttntnttttttttttttttttttttttttaagaaaaaaaacgctgggtatagggggtttcttctaaaaggagcccctaggacactcacatggacaacaattatggctctactctccaaatattacattcatactttgacatgctggggttgggcctccacaacattggttcatcaaaggtttctacaccaaccgcacgtccaaggatttggagctggttctataatctgactataaaccaaaaacttaactatcgacacctccttcctgatcctggccatatgcttctagcatgaaagcacttaaattcccatcttattcatccgaagcaaactctcattgagaatggttccaaggaattccaagaccacaccaaactccccattcaaccaaactagatgaactttggtgaaggaagaaa

SEQ ID NO: 12212 - DNA, 562 bp, Glycine max
  Clone ID: jC-gmfl02220138f09a1
ctggggatgtagactttgttcttgagttgttggggagagaccctcttttggtgtttggtgagggagagtatggtgtcactgacatgttttatgctgcagccaggggcatgaactgcgaggtctttaagctcctgcttcattctgctctttcaagaaaggagtgccttggtggcagtgaagcagaattggaagagaagttggatgaaggttctaaggttttcaagagggatgtgatgaatagggccattcatgctgctgccagaggagggaattgggaaatactgaagcagattctaggaagtgtttctgtttctcaggttttgtcttatagagatgccctaggatgtactgtcttgcatgcagcagctgcaagaggccaggttgaggtggtgagaaatctaattgaatcctatgatatcatcaactcagctaatgctcaaagcaatacagcattacatgtggcctcttacaaagttacttacccgtggtagagattctggttggagcatctgccttgttagcaacgttaaccaatcactatggagatacttttcttcacatg

SEQ ID NO: 12213 - DNA, 402 bp, Glycine max
  unsure (1)..(402): unsure at all n locations
  Clone ID: jC-gmfl02220138f09d1
tttntttttttttttttggttcatatttttgtatattgctgatttcattctggctttgggtgtaaagattcgtaatacacaagcctgctccagaagtagcaggaagtttggacaaaagattcaaaaaggaaaagtcatacacaaagtgtgcaaaatatatttcaaaagaaatacaaaatctttaatcacattcgcagggtggagagaattctaggacagcctcagtgccatttcatgaagaagagctcgcttttgagaagcattaattacattatgtgtttcagcattctcaagcacttcagcaattattgcagatgcagggccaaggggttcctcagccaccctcttcaacatgaaagcctggccatgatgggttatgttaattgtgcagggttgctgaaa

SEQ ID NO: 12214 - DNA, 563 bp, Glycine max
  Clone ID: jC-gmfl02220138f10a1
caatactacaacttctgaatcacttattagaattgaattatcttcaaaatgagagaaatccttcatgttcaagctggtcaatgtggcaaccaaattggaggcaagttttgggaggtgatgtgtgatgaacatgggattgatgccactggaaattacgtaggcaattcccatcttcaacttgagagggttaacgtgtactacaatgaagcaagtggaggacgctatgttcctcgagctgtgcttatggaccttgaaccagggaccatggatagcttgcgttctggtccttttggaaaaatattcagacctgataatttcgtgttcggccaaaatggagctggtaacaactgggctaaagggcattatactgagggagctgagcttattgattctggtcttgatgttgttcgaaaagaagctgagaactgtgactgcttgcaggggttccaaatttgtcactcactgggaggaggaactgggtctggaatgggtaccttgcttatctcaaagatcagagaagagtatccggataggatgatgttgacattctcagtgttcccgtc

SEQ ID NO: 12215 - DNA, 500 bp, Glycine max
  Clone ID: jC-gmfl02220138f11a1
cacctttctcctaaaacatctccaagttgttctacttcttctattacaacaacgtcgggcaagaccatgaccatggtcatggtcacgatcctgctcctgttcacggtcttcgcggtttcatcggccctagacatgtcgatcatctcgtacgacaacgcccacgccgccacgttgcgcagcgactaggagctgatgtccatgtacgagcagcggctcgtaaagcacggctcggtgtacaacgcgctcggagagaaggagaagaggttccagatcttcaaggactacctgcgattcatcgacgaccacaactcccaagaggaccgaacctacaagctcggactgaaccggttcgcggatctgaccaacgaggagtacagggccaagtacttgggaaccatgatcgatccctaccggaggctcggcatgaccccgatcaaccgatactcgccacgtgtcggcgacatactacctgaatcggctgattggatgaggaaggtgct

SEQ ID NO: 12216 - DNA, 469 bp, Glycine max
  Clone ID: jC-gmfl02220138f12a1
gttaaaatctcatcatataacggcatttagacacatcctctttccttgcacttgttctcaggaccactatacttcttgccactacatggcaagcagtcgctagacgccacattggtccaaaacactcaaacaatggggacaagaaagagcctcaattcttgttccctcctgaaggtaattcacattttcctggctttgggggagtagggttgccacctttctttgggttgacacctcaaaacccaaacactggcggcagcggactaaggctatgaccagctggtcatggctacgttccaggaggggatgacacgttcgtcccataccctggcttcgaggttccaaaccctgggagtggagatggagacccagttccagttacagattatacgtgagtgctctcaatcatgatgaggcatcatgcacttgttgcatgattgcacctgttcaagctgcgcagtattcaaga

SEQ ID NO: 12217 - DNA, 509 bp, Glycine max
  unsure (1)..(509): unsure at all n locations
  Clone ID: jC-gmfl02220138g01a1
cttcttctcctccggacactatcaagagctttaagctagagcgatacaacagctacatcaggagactcaacagcaccaaactcctcaacgcctcctccaaactcctcttccgtgccactatcttagtcgcactcatcctcgtcttcctcttcaccttcaactaccctcccctcgccccagacttcacctcccaccgccacctccactcccactcccacttcctctcctcctcctcctccttcgcctcctgggagaagcaggtccgccactcctccacccctcgccgccccaacggcctcaccgtcctcgtcaccggcgccgctggcttcgtcggcagccactgctcccttgccctcaaaaaacgcggcgacggcgttctcgggctcgacaacttcaacagctactacgatccctccctgaaacgctcccgtcaggcaatgctctggaaacaccaggttttcatcgtgaaggtgaccttaacgacacccncttgcttgagaagctcttcg

SEQ ID NO: 12218 - DNA, 492 bp, Glycine max
  unsure (1)..(492): unsure at all n locations
  Clone ID: jC-gmfl02220138g01d1
tttnttttttttttttttttttttttttttttttttttttttttaatngaaatatttgggtttctggggttcttggaaaaacaaaaacaagggcctggggggggaggataattaaggcttgggtacctacctaggggattattcattggcaaggggatattccttttttagcctttgctgggggccggaataaccgagggaccacttgacgaacttcctgagaccgggggcgaaatcgggggggggattggaaaaaaaatccctgtaggccaagctgacattggcgtgtgggaagggaacctccccgtttgatggcatcttaatgacgggcttcttggccttggggcttagcagaccttccagaatggacaccaagggcccaaccggcaccggtgaagtgttccccagattggatactctgagctgggcggggcccttcttcttgccgccgctcccggagcttttttgggcggggtccagggctcccaggca

SEQ ID NO: 12219 - DNA, 541 bp, Glycine max
  Clone ID: jC-gmfl02220138g02a1
gcctgtgccgtgtggtgttgtgttttttttttttgtttcatctccatctttttcttcaaatttcccagaagagaaactcacaaagatgaggttatcattgaggcatgctttggtgtttgcgttaattggggcgttgtggaacttgcagagggcagagggtatccgatttgtgatagacagagacgagtgtttctcccatgacgtaaagtacgagggtgacactgttcatgtctctttcgttgttattaaggctgattctccctggcattacggcgacgaaggtgtcgatctcgtggtaaagggaccttctggcgagcaaatacaagattttcgggacaagaccagtgagaagttcgattttgtggctcacaaatccggggtccataaattctgcttcaccaacaagtctccttatcatgaaactgttgattttgatgtacatgttggtcacttctcttactttgagcaacatgccaaagatgagcatttcacccctttgctggagcaaaattggaagttggagggaagctctatacaacat

SEQ ID NO: 12220 - DNA, 549 bp, Glycine max
  unsure (1)..(549): unsure at all n locations
  Clone ID: jC-gmfl02220138g02d1
ttnctttttttttttttatggggggagtttagatttggcctgncatattttagtttaccggaaaaagaaatcaactataatcaacattaaataacatatttccacatgtattatgagtaggattgaacaactagttatataaatatccatgtgatgacaacggaaaaaagtttaaaataacattctcatttgtactgttacagattcgcagaacctttcgtagctctaaactctcgaggtacccaactttcgttcaaacaatcgctgcagaaggtagacttgcagcgcactagccccaatcagtgctgctgattcaaaaattgccttgtgtactgctcttctgctcattgcatcgttcactattgcttggcggtcagtctgagcctctaaccaatgctgttcaaactgaatgttgtatagagcttcctccaacttcccaatctgctccagcaaagggggtgaaatgctcatcttttgcatgttgctcacagtaagagaagtgaccaacatgtacatcaaaatcaacagtttcatgataaggagacttgt

SEQ ID NO: 12221 - DNA, 494 bp, Glycine max
  Clone ID: jC-gmfl02220138g03a1
gagccacattttgtccctggtttactctttatgagtctttcataggacagttaattaaaattatagcctgaaataagggttcactagcaatggcctcaacctcttctgctctcactatatcctcttcttccacccttcatgattgcaaggctccaagacagtcaccagctgcttcaccacaatgtgtgagccttccctctccccttttgcactctcagaactgttcatggaagaccactgcttattgtcgcagtattgctcgaaatgttatggcaatggccacaggagaggcaccagctgaagctgccccgactgaggtgccagagattgtcaagactcttcaagaaacttgggacaaagttgatgataagtatgcagtgagttcactggccctggttggtgtggttgcattgtggggctcagttgggttgatctcaacaattgataggcttcctttgattcctgggattcttgagattgtaggcattggatac

SEQ ID NO: 12222 - DNA, 461 bp, Glycine max
  Clone ID: jC-gmfl02220138g03d1
caaacttcaatttcattgtattcagctcaatgaactcaattgggttttgttatccttgtaatcaatcactacacagataatggaggaaatgagtttgtcttaaaagtggatcaatatatataaaaagatacaattttttcagaacttattccattacttgggataaagtatggtcagaagcttatggcaacaaaatgaagcatggggacatcttcaacaggaagctgcaagatatgacactttcatgtcaacagcatctcagcatttcctaacactttcagttgctccccagtatttcgttgtatgtttcttttactttccgtaccaaagcttccctgtctggcttgaaaactatgttcttatatacaaaccacccagtgtatccaatgcctacaatctcaagaatcccaggaatcaaaggaagcctatcaattgctgagatcaacccaactgagccccac

SEQ ID NO: 12223 - DNA, 579 bp, Glycine max
  Clone ID: jC-gmfl02220138g04a1
atcttcttatagcttcatcccaaatttctcttttccttctaaatttgattccttagttcagcattctattattatatatggcttcttcaccttcctcagaaaacaaaaacctagagggagtagctggtggtgccggagagaaacccattccacttggtgagaacgttctgcagaagcatgctgcattctttgacttgaataaagatggtgtcatctacccatgggagacttttaaagggttgcgtgaaatcgggactggggttttgctgtccgttggaggtgctattttcatcaatgtgtttctcagtcagagtactcgtcccggaaagtttccatctatactttttccaattgaaattaaaaatatccaacgcggcaaacacggcagtgacactggagtctacgatactgaaggaaggtttgtaccttcaaaatttgaagaaatttttaacaagcatgcacatacacatccaaatgctttgacatatgatgagttaacggagatgataaaggcaaatagagagcctaaagatttctcaggaaggattggtagtgtggttggatggaaaattctttaca

SEQ ID NO: 12224 - DNA, 644 bp, Glycine max
  unsure (1)..(644): unsure at all n locations
  Clone ID: jC-gmfl02220138g04d1
aggggggaggacgggaatcgngngtatactcattnnnggtaagggcgactacccgtcggcggccgccctttttttttttttttagtggtaggagctatttttttattacaaaatgataagaccgagggtttttattattattttttgtttgttttatattttaaggcaacaagcaaagctctccaatctgcaagtgggaacatgaattatgccactcttccattgatgtcaatcaatgagattcaggtgctttctgctggaacaggaacctgactcaaaacatgaccaaagtttctgtttaagggttttggcctccattcggtcctgcccctcacaatctcagcaccatcatcaagtcgaagcaagtgcttgcactcaaaaaatccatcatctgctaagtttccaacatcagcaccggagagatcagagagggaatctagcacactgttcctgccacactccctcctgtactccaatgtcatggcacatagctcatggctctccaaaagtggctgcggagcactctccagaatccacccaacatacttcacattgttaacatgctgattcacatctagatcatgccatctgggacttaaaccagtgcgaatgaaattagctgaatcatcaagtttggttagttt

SEQ ID NO: 12225 - DNA, 534 bp, Glycine max
  Clone ID: jC-gmfl02220138g05a1
agaggttggggtgatactgctgaactggtattggaaatgatgcatctgctactggatattcttcaggctcctgatccttctacgctagagacttttcttgggagagtgccaatggtattcaatgttgctatattatctcctcatggctactttggacaagccaatgtcttgggtttgcctgacactggtgggcaggttgtttatatactagatcaagtgcgtgcccttgaaaatgagatgctccttcggatcaagaaacaaggacttgatttcactccaagaattctaattgttaccaggttaatacctgatgcaaaggggacaacatgcaaccagcggctagaaagagtcagtggtactgaccatactcatattttgcgagttccattcagatcagagtcaggaactcttcgtaaatggatctcaaggcttgatgtgtggccttatctagagacttatgcagaggatgttgcaagtgaaattgctgctgagttacaagggtatgctgatttcatcattggaaacttcagtgat

SEQ ID NO: 12226 - DNA, 394 bp, Glycine max
  unsure (1)..(394): unsure at all n locations
  Clone ID: jC-gmfl02220138g05d1
tnccgggaaaggcttttattgctctacgggaacaccttaaccggaaaatgggaaaattttttttggcacagtcattccttaccccccgccggcccccaaaaaaaatataaaaaaaaaaactcttttttgcacctaaaaatcttttggaagcgaacaaaatgaatgggagggggctatgaggcaaaagtctatctcattggggtccccaaatcatgcaagcaaacttgacttcaccaacttaacaaagaataacgaacgaggtggaacatgcagcgcctaagaccctttagaggggctccatcatcaacttggtggggggggcaccactttcaaacttggcatccattcacagaaactaggatcatcgaagggaacaaaactggctttcagcttt

SEQ ID NO: 12227 - DNA, 325 bp, Glycine max
  unsure (1)..(325): unsure at all n locations
  Clone ID: jC-gmfl02220138g06a1
ggtcccgtgtagctgngttacgnangactaatgctatagacgtctgaagtgcacggctgtcctgtaaggctgcggatattgggttgggagtgcacttattcaactagcagatttgttaggtacctccatagtaagagacaggaacatgaaatcatcaaagtgtgtagcggtggtagatataaagcaggaatggcatcacgatttccgccagcacacaagacagagcgcttacatcacatactcaaaatggtgagggctctttgtgcctttgcaatacctgatacaaaataaggtgcttactacccatgtaactagaagaaacaag

SEQ ID NO: 12228 - DNA, 480 bp, Glycine max
  unsure (1)..(480): unsure at all n locations
  Clone ID: jC-gmfl02220138g06d1
tttntttnnnnnnnggctgtttgatattcacatattttagggcagaataaatgttgaaatttacattctaaatacaccatattttgtgttttgaatgtcacggttcaaggaggcagagatggatagaccaatgacttttcttgtatccgctggatcaatgattccatcatcccaaagcctagctgttgagtaataaggacttgcttctctctcataagcctccactactttccctttaaacttatcctcttcttccttgctccactgaattccttgccttttcttgttgcctttctctatttgggccagcacaccagcagcctgagcaccacccatcacagaaattctagcattaggccaaaggaacaagaaattgggactataggcacgaccgcacattgcatagnttcctgcaccaaagcttcctccaaccattatagtgactttaggtacctttgcacaagaaacagccatcaccat

SEQ ID NO: 12229 - DNA, 510 bp, Glycine max
  Clone ID: jC-gmfl02220138g07a1
taatggttggcactaatgtggagtatatgtcagagtatattcctcgggaaccaagagagccttctggttctggagccgatcaagaaactacaaataaagatgttaataagatgctaagacgcctagctcagaatcgagaggctgcccggaaaagtaggctgcggaaaaaggcttatgttaaacaattagaatcaagccgtttgaagctcatgcaattggagctggaaattgggaaagcaagaaagcagggtctgtatatgggcactgcattagatgccggctatataggatcaacatcagaaacaataaatccagggattgctgcttttgaaattgaatatggacaatgggttgaagagcaagaaaggcggaatgaagaacttagacatgcatttcaaacacaagcacctggtgtacagctcaacgtagtggttcagagtgtcttaaatcattactcaaatcttttcagaatgaaagcagaagctgtaaaggctgatgtcctctatttac

SEQ ID NO: 12230 - DNA, 353 bp, Glycine max
  Clone ID: jC-gmfl02220138g07d1
ccattcggaaggcccccccttttttttaaaaacccccgggggaagagccccccccctaaatattttattttattttttccaccaggggtcccccccttgggattttacaaaaaaccccgggccccaacccccaaagggatctttttttgcgggggaacccccggcacccccttaggaacaaaggcctcccttttaaaccccgggggccatcccccgccaaaggaaaaaaaaaaatttccaggtttaaaaacccatgccccaaatgccctttttatcccggggcccaatttcccccccgccccgaagggaaaaaacccaaaaacttggccaaaaaaaccatggcccaaataaaa

SEQ ID NO: 12231 - DNA, 569 bp, Glycine max
  Clone ID: jC-gmfl02220138g08a1
caacttctccatgttatggttgaacctgatacctttcctcatgcttagccaatgcttctccataactgcctttccagcgtcgaacatctgaaggatccatgttatgaaaacccggcaaaaccaacagtccttttttcccattggcacagtcaaggataggttgcaagttcatctaagcaaaatgaggaagaagcatagtttatagagagcacaaatgcacaatgatggtaatcttggactcttgaattgcgttcacaagtgttggtgttatctcctctcctcttttaagcttctcatgatcaatgaaagtgtggattcccctgtcactaagagctttgtagagattaccaaaaaaaccaaggcgggtgtctgagcctctaaagctgaggaacacatcgttggtgaatgcatctgaacttgatcgcaaagccatgagaatacaggtagctttgacgtgctggagacttgcccgcatagcttggtatgaactggtgttctacatttggagctatttcaatctcactttttatatgaaactcacaggccttattgatgggttgactctctga

SEQ ID NO: 12232 - DNA, 357 bp, Glycine max
  Clone ID: jC-gmfl02220138g08d1
cccaaggcccccacttttttttaaaaatcccccggggaaaagccccccccctaatgttttgtttttttttttttccaccacgggtcccccctttgggatttaaaaaaaaccaccgggccccaacacacaaaggatttcttttttgcgggggaacccccggcacccccaaaaaaaaaaaggcctcccttttaattcctgggggccatcccccccccaaggaaaaaaaaaaattcccaggtttaaaaccccatgcccaaaaagccttttttaacccaggggcaaatttccccccccccccgaggggaaaaaacccaaaattttgtccaaaaaaacctattgcccaaaataaaacccccc

SEQ ID NO: 12233 - DNA, 412 bp, Glycine max
  unsure (1)..(412): unsure at all n locations
  Clone ID: jC-gmfl02220138g09a1
agcttatgctgtttgttcgcaattcgttcggaaccatcagtttcagctccaccaaaaccttgggagaaagcagcatcatcatctgggccagcaccttttaaacccccatcagcaggtagcacaagtgatgtagttgaggcttcagggactgcaaaacctggcgaaatagttccagcttccgataagactgcaactgtcaataggaatgctcttgggagaccccttcccacaaggccatgggagcagaataatggaagtaccagctatggaggttatggttccacaatgaattataattctggatatggatcttatggtggagtggagnggttgtatggcggaggaatgtatggcagcagtatgtacaggggaggatatgggggcctctatggttcctctgngatgtatggag

SEQ ID NO: 12234 - DNA, 546 bp, Glycine max
  unsure (1)..(546): unsure at all n locations
  Clone ID: jC-gmfl02220138g10a1
attctccttcgattcaattcaattccttatcttccccgttttcttgctcttcttgttccagttcttgaactcacccagctagctgaattccgaaaaagcccttttcttgtcccgaaatgccgaaccccttttcttccgcttagccaccaccaacccgccgtcgatccccgtttaagatgatcgtccgcacctacggccgccgcaaaggaaccctctcgggaacgtattcgggctcgtcctctctaaacgacgacgtttcggagccattcagggattccttatctcaggagattgacgaccctctctgcggcttcgcgttctcctcccaggactcgtcctcgcagcattggtccttcttcgattcggagatcggcgacttcggaaacggcaccggcgcatgcggagcaagggagtcgaagagggcgaatcgggcgccggcggaggggattccggcgacgtcgacgctgatggaggcgcangagttcggagagatgatggagcacgttgacgaggtcaatttcgctctcgacggtctccgcaagggtc

SEQ ID NO: 12235 - DNA, 430 bp, Glycine max
  Clone ID: jC-gmfl02220138g12a1
tgcatttctgcgcgtgtgtgtatgtgctcatactctctcaagtacgcacatacatacacgtacattcgtacataaatacttatatctcgttttacttcgccgctaattctctgaatccctagctcttctgatctccgatccgatcatggcctcagcttgtcaacaacgctaacggcgccgtcaatggttttcctggaatatcccagaagctcattatcgataccgaccctgggatcgatgatagcatggccattctgatggcttttcaaagtccagacgtggaggtgtctgggtttgacaaccatttttggtaatacaactaccgaacttgcaacactcaaagctttgcttttgtgtgacatgtgatgccgtgaagatattccagctgcacagggaagccatgagccattgaaggtggaaaggctagtgt

SEQ ID NO: 12236 - DNA, 265 bp, Glycine max
  Clone ID: jC-gmfl02220138h01a1
gagattgccttccaaatcagatttgctgtatgatgacccgcttctgtttctcttttctttttatccatcatccaccacctaataacgtatgaataaacacaccttcaccattacaacacgtaaattaaagagggtacatcaaatatgtgcacatacatagtacccctccaatttcattagcaaaaacacactttcattgtatgaaagtatatatgtaaatcccaaagcttcagtttcagctatgaaaataaatattcttcgtgct

SEQ ID NO: 12237 - DNA, 266 bp, Glycine max
  Clone ID: jC-gmfl02220138h01d1
agcacgaaaaatatttattttcgtagctgaaactgaagctttgggatttacacctatactttcatacaatgaaagtgggtttttgctaatgaaattggaggggtactatgtatgcgcacatatttgatgtaccctctttaatttacgtgttgtaatggggaaggggtgtttattcatacgttattaggggggggatgatggataaaaagaaaagagaaacagaagcgggtcatcatatcagcatatttgatttggaaggcaatctc

SEQ ID NO: 12238 - DNA, 500 bp, Glycine max
  unsure (1)..(500): unsure at all n locations
  Clone ID: jC-gmfl02220138h02a1
cttgcggagagggttgnctttttgttcattcttttcccaattcaataactctctctctctctcttgctccctacattttcgatcactttaaagtctcaaacgtaatggctgaaagcgcggtgacgaacaggaagcgcagcagcggggacgacgccgtttcggagaatgacaganagcggaagaatatggtggcacgcaacatggnacccgctgaggcgttggccttgacgcggcacgagttcggngagcacggtggcgtaaacatgtcgatcgaggcctcggcgacgttcacggtgatggagccggagaccctcggtcgcatgttcgccggcgagctgggcccggaccgcgatttcttcatttacagccgccacttcaacccgacggttgtcaacctgggccgccacatggccgccctggaaggcacggaggccgcctactgcacagccagcggcatggccgcgatctcctcggtactcctccagctctgtagcaccggc

SEQ ID NO: 12239 - DNA, 486 bp, Glycine max
  Clone ID: jC-gmfl02220138h02d1
ttttttttttttttttttttttttttctatttttttttttttttttttatttttttttgggttttgttttttttttttttctttttatcccctttccctttttttttttaaaaaaaaaaaaaaacacaccttaattgtattaaaccataccacgaagccgtaaaaaaaggttctttccccaaaaaaaaaaataaaaaaaaaaaaaaaaaaaaaccgggggctctctttccggaaaattttcgggggcccttacctaaagaccccttttttttcccaagggccccaagtttccaaaggaactcccaccccacccgggggaaaaaccacaaaacttatgttcccccccaaaaatttatactggggggccccccccaaaaaaaaacaaaaggggttaaaattccccccaaaaaacaccccaaaaacaaaaaacgcccccttttttgaacgggccccacaaaagggtcccccctcccccccccccccact

SEQ ID NO: 12240 - DNA, 467 bp, Glycine max
  Clone ID: jC-gmfl02220138h03a1
atttcggtgccactcaaaacaatcgctggtcctatctctcacacacccaaacccaacattattaatactcttccttctctttaccttttacttttcgaagcaaaaacaccataacaaaacacccagaatttgtgggttccattcccaaaacaaagaacaagaaggagagagagagagagagaatgcaacgggagaaacaaaaaacagaagtatttctgtgattgattctctgcaaccgaatcatcatcagccacttcttctcccagtttcagctctcccctctctcttcttttcctcggctctggttcggtaaggcgtagggggttgttattattcttcataatggttgcaacagctgctacggcgtcgtttctccctgtgccttcgccggacgctggaaaagggaaacccaagggtggtggtggcggcggcgtttctgtgaacctcggaggactcaaagagaagca

SEQ ID NO: 12241 - DNA, 598 bp, Glycine max
  unsure (1)..(598): unsure at all n locations
  Clone ID: jC-gmfl02220138h03d1
ngtgggaggctttggacttgnagtatncncatnnngggtaagaggcgactaccagtcggcggccgccctttttttttttttttagtggtaggagctatttttttattacaaaatgataagaccgagggttttggttattattttttgtttgttttatattttaaggcaacaagcaaagctctccaatctgcaagtgggaacatgaattatgccactcttccattgatgtcaatcaatgagattcaggtgctttctgctggaacaggaacctgactcaaaacatgaccaaagtttctgtttaagggttttggcctccattcggtcctgcccctcacaatctcagcaccatcatcaagtcgaagcaagtgcttgcactcaaaaaatccatcatctgctaagtttccaacatcagcaccggagagatcagagagggaatctagcacactgttcctgccacactccctcctgtactccaatgtcatggcacatagctcatggctcttcaaaagtggctgcggagcactctccagaatccaccccacatacttcacattgttaacatgcntgattcacatctagatcatgcccatttggggac

SEQ ID NO: 12242 - DNA, 456 bp, Glycine max
  Clone ID: jC-gmfl02220138h04a1
ctcagagtgtgctgcttcagtgtcctgatcaaagatggcaacattgactgcttcaagtaacttagtctctagaaattctcatgtccatcatggaccaacaactgcttcatatgagtctaaagcagtagcaatgggacttagatctctaaagcagacaaatactcatagtggacttagaatttttaacccggtggatgagctacttaacagaaccccaattaaaaccaatgcaatgcaagctatgaggaagggacctcaaggcaagaatgcctggcctaaaggtataatcacatgtggcatgactttcataattataggaacggaggtggctccatggtgcaaaactggcgggttaggagatgttcttggaggtctaccaccagcattggcaggtttcgggcatcgagtaatgactattgtgccacgctatgaccagttcaaagatgcatgggatac

SEQ ID NO: 12243 - DNA, 423 bp, Glycine max
  Clone ID: jC-gmfl02220138h04d1
ccctaatcaatttttcattatttcttgtgatacataggaatgcaacctctttttttttttcttcttccattttcactccttatatatcattggcattctttattcaactttgggcagcctcaggcttgcgatcatcatcagcatgtggaacaatctttgaccaaaaccaatgtgatctccagactgtatgcatttcttcaatggggatgttctttgtctgaggcaacaacatggcaatgaagatggtcatgatgagtacaaatgccgcaaagaagaagaaaaggccaaacttcaagtcgcaaagcatgactaggaaaacttgagcaatcgcaaaagtgaacagcatgtttacggcaacattgatggctggacctgctgaacgaacctcaagagggcatatttcactaggcaccaaccacccta

SEQ ID NO: 12244 - DNA, 518 bp, Glycine max
  Clone ID: jC-gmfl02220138h05a1
cactcttccttaaataccatcattcatcatcacacacatagtagctaatagctatactctctctagagtaattgcggaatcagctagaattttctaataatggccaaagacgttgagcaggttacagagcaaggtgaatactccgcgaaggattaccatgacccacctgcggcgccgttgatcgacccagatgagctcactaagtggtccttgtacagagccgccatagctgagttcatagcaacactccttttcctttacatgaccgtgttgaccattattggctacaagagacagagtgacaccaaaatccccggtaacaccgagtgcgacggcgttggcattttgggcatcgcttgggccttcggtggcatgatcttcatccttgtatactgcaccgccggcatctctgggggacacatcaaccctgcggtgacattcgggttgctcctgggacgcaaggcgtctctggtgatggcgttgctgtacatgatagcacagtgcgccggtgcaatctg

SEQ ID NO: 12245 - DNA, 484 bp, Glycine max
  unsure (1)..(484): unsure at all n locations
  Clone ID: jC-gmfl02220138h05d1
ttnntttttttttttgctgtttgatatttacatattttagggcagaataaaggttgaaatttacattctaaatacaccatattttgggttttgaatgtcacggttcaaggaggcagagatggatagaccaatgacttttcttgtatccgctggatcaatgattccatcatcccaaagcctagctgttgagtaataaggacttgcttctctctcataagcctccactactttccctttaaacttatcctcttcttccttgctccactgaattccttgccttttcttgttgcctttctctatttgggccagcacaccagcagcctgagcaccacccatcacagaaattctagcattaggccaaaggaacaagaaattgggactataggcacgaccgcacattgcatagtttcctgcaccaaagcttcctccaaccattatagtgactttaggtacctttgcacaagaaacagccatcaccattttt

SEQ ID NO: 12246 - DNA, 396 bp, Glycine max
  Clone ID: jC-gmfl02220138h06a1
catggacgtgggggagccgagagattactgacaaccaggaggtgctgtcgtgctatgcccatagcaactgtcggaccgtgccatcgtcccccatgagacggattacctccagactcctcccgttcgctcttactctccagacgacagcgtcaacattgccattgatacactacctgacctatgttctcgccctggagaataagagcaagcgccatctcaaacgcgatcgtgggttggaacaaatgtgatttctatacctgtgtcgctcgattgaccactctggggatgttagctcatgcacttattaagacgagtgtggtgtcagccatgatttggctgccttcaaggcacaaaaacctgctgatctagactggcattgtccttcctttaaatctg

SEQ ID NO: 12247 - DNA, 383 bp, Glycine max
  Clone ID: jC-gmfl02220138h06d1
cccccccccccctttggggggccccccccccccccgggggttttcctctctcctcgtccccccgttttccccccccccggggggggggggccccccccccccttggggccccccccttcccccccccccggggggggggggggggggtttttggggggcccttttccccccccccccccccttttaaaaagccggggggggcccccccagaaaatttcttctctgggcggggtttttcacccccccccctttacaaagaaaaaaaacaaggtgggcggcccccccccggattgtaaaacccctctttccccccatacccgggggcaaaaagaaaaatagggggggggcgaggccccgcccccatcttaaaaaaaggggggggg

SEQ ID NO: 12248 - DNA, 313 bp, Glycine max
  Clone ID: jC-gmfl02220138h07a1
gaagggtttgtaagagaacgaaatatgatgctcaagatgagtggtagggtttctgggacggtgaagtggttcatcgatcagaaggggtttggattcataacccctgtcgatggcagcgaggaactcttcgttcaccaatctcagatcaaatctgacggtttccgaagcctagctgaaggagagtccgttgatttcgctattgaatctgaatctgacggacgcgccaaggctgtagatgtcactggccccgacggcgcctgcttccagggaaccagactcggcggtaatggtggccgaagctatggcaacggac

SEQ ID NO: 12249 - DNA, 459 bp, Glycine max
  Clone ID: jC-gmfl02220138h07d1
gacattcaatgtaattggaacacaatgatattccttaatgataaggcacaagataaaattcagtttcatatcatcctaaatacgagtacaacaagtagtcacatatgaagtagctatgcgacatatcaatcaaactcgttattcatctctgtgattcccagctgcaaaagacaatgcaatgctgaactcacacggttgtacgttcactatgatttatggaacatgctatataatgatgttcccccatgcatgtgtgtattacactactagcccatagtataggaagggctgggtaagttgatcacagtcgttttgaccttggtcatcatgtttatgctgttggtaatcccttgagatccaatgccactgtcctttataccctgaaagggaaaatgatctggcccacgagctggggcagaatttatctgaactgtcccgtttccattgcatcactgatca

SEQ ID NO: 12250 - DNA, 612 bp, Glycine max
  unsure (1)..(612): unsure at all n locations
  Clone ID: jC-gmfl02220138h08a1
gtttgttgtgagctataagctagttctccgtgaggagaatatgaagttgtttgttttctttgttgctgcagtagttttggtagcatggccatgccatggcgcaggctaccaaaggttccctctccgaatgaaaactggctatggtgagcgttcttcggaggtaaaatgcgcaagttttaggcttgctgtggaagcacacaacatccgagcctttaaaaccattcctgaagagtgcgttgaaccaacaaaggactacattaatggcgaacaatttagatcagactctaaaacagttaaccaacaagctttcttttatgctagtgaacgcgaagtccatcacaacgacatatttatattcggcatagataacaccgtactctctaatatcccatactatgaaaaacatggatatggggtggaggaatttaatgaaaccttatatgatgaatgggttaacaagggcgacgcaccggcattgccagagactcttaaaaattacaacaagctgttgtctcttggcttcagattgtattctngtcaggaagatatcttgacataatggccgtatcagaagcatacctaaagaaggcttgctttcacacatgggagcag

SEQ ID NO: 12251 - DNA, 598 bp, Glycine max
  Clone ID: jC-gmfl02220138h09a1
agcaaagggaaaagcaaacagagtgctctatcgaagatagaagaagagatggctaaatctccagaaactgaacttcccgtcgaagctttcggttgggctgcttcagacacttctggcacccttgcaccttttcatttctccagaagagaaaatggcgttgatgacgtcactctcaagattctcttctgcggggtttgccactcggatctccacactctcaaaaacgactggggtttcaccacttaccctgtcgttcctgggcatgaaattgttggtgttgtgacaaaagttggcaacaatgtgaaaaacttcaaagtgggtgataaagtcggagttggtgtgatagcggagtcttgcaaggaatgtgaaagttgccaacaagatctggagagttactgtccccgccctgtttttacctataactctccttattatgatgggacacgaaccaaaggtggttattctaacatcatggttgtgcaccagcgttatgtgctccgatttcctgagaacttgcctcttgatgctggtgctcctctgctgtgtgctgggataactgtgtatagcccgatgaaatattatgggatgacagagcccg

SEQ ID NO: 12252 - DNA, 592 bp, Glycine max
  unsure (1)..(592): unsure at all n locations
  Clone ID: jC-gmfl02220138h10a1
agatggacaagaactcagatgaaatatttttccctcgggcagtagatcacagaacaaacgaaaatgaccatggtaaacagatgaatagtagtggagccaagaacattacggaggaacaacaggcactgttatctggaattccaatccaacaaaacctagtatttgaaaatgacatgctagaaagtgataacgtgtcatttactgaaaacattaaatcaggatcactgactacttcaaatgtctatcattgctatgaaagtaaattggcttccctgataaggaaaaatggaattctggagggacaattagcagcttccttagcaagcaaagaagccgcagagaaaagtttggcatctgttctcaaaagtagacaggaaatggagaggaaattggcggaatcacataaggagatggaattgatgagagagaagctgaccagtctagagttggcccaggaagaggccaacaacctatcaacattgtgcactctgacaatgtacggcttgagcatgatgtggccttcctcagggctgnttagatgatacacagaaggagttgcactcaacaagaggagttattgcacgagaaagag

SEQ ID NO: 12253 - DNA, 535 bp, Glycine max
  Clone ID: jC-gmfl02220138h11a1
ccgacacaccgcaggaccatgatgtcgtcctgtgatgtcttcaagctccaaacgtgtgtctaagtgcttcatttttgtgttcctggcttccctacactttggatccaacgctcaactcttaccacaagatgaaggtacttaattattttccattttattcttatcttatgggttttcatgtgttaatcatgtgcgtgttggaaatttcacttttgtaacttccaaaactataaactgaaactgtctttttggttttaacaccaacttcacaaagtttcaactttatccgttttagtgcaaacccatcttccagaatttagttcttcaacttgcattgctgcttctgtcacaagatccataaggaaatcgccaatgtcgttttttttttgttccctgcttcttccgtttacatttaattagtttttttaagaagttctgcatctaacttgctcaaaaataaaaataaatgaaattttttctattttttttaaaattttctgggattattttgggtcccagtgattggaatagagag

SEQ ID NO: 12254 - DNA, 491 bp, Glycine max
  Clone ID: jC-gmfl02220138h12a1
atatccccccctagctacagagcagcttaaggggtggaataataataagcctatattggaaggccggaaaaataaaaaaggaataacaaaaatgtctggaaaggtaattatctcggctgtttctctcatcctggtggttggagtggccataggtgtggtggtggccgtcaacaagaagggcgaggatcccacacttcaatctcaacaaaaatcagtaggggttatctgccaaaacactgatgaccagaagctctgccacgaaaccctaagctccgtgaagggcatggacaccgctgatccaaaggcttacatcgccaaggcggtgaaagccaccatggacagcgtgaccagggccttcaacatgagtgataggctcagtaccgagtacggaggcaacgataaccgaaccaagatggcccttgatgattgcaaggacctcttgcaatccgctatcgagagcctccaactcagcattgacattggttcacaac

SEQ ID NO: 12255 - DNA, 551 bp, Glycine max
  unsure (1)..(551): unsure at all n locations
  Clone ID: jC-gmfl02220139a01d1
gggtccgaactgagagncnaatnagggtagaccagatcacccgtcggcggccgcccttttttttttttttttttttttttttttttttttttttttttttggaagggataagaggggaattgggaaattattattttgacaagatcagcttttattaaacatgtttctgggaaaggaagttctaatagatgacagggttagactttaagcatcagatgccccctacaagactcctcaatgactgtatgcgcaatcatattaatcagtttgttgttccgttttctagggggggcaattcaacatcttggatagcttcaagcttagctcttccaccatacatttttgggagaactttttcaccaacctttcttacaaactcccttgtctcatcctcattggatacaattacaatcttttctaatgtagccttctttaggaagcgagaaactagtttccaaacactcacaaaaaaccatggcatgtgtaacatatagcattttgctaaacgttctgggtagtaagcctgtaaaaatggaaaacctgtgattaac

SEQ ID NO: 12256 - DNA, 511 bp, Glycine max
  Clone ID: jC-gmfl02220139a02d1
gcacttagaaaacaaccattttaattatggaatactgaatcaaatcattacatcacctttctccagattagaaatgcatttgcaaatgacatcgtattgatgtaaaataaatgctgcaatatgtgtgctcccccaatcacgtcccgcatcaaatgggcaaaagacttaaccaagaactcaaaatgtgttaggctaacgtcaattcccttattgatgtctctccaaaaacttctctattacgactgagaatgccgcaaagccagcacaaccagcacacgctgcttttgggccacctagaaccatgtgacaacaggggaaacatcgatggacatcatggagaaaaaacaaaggcggagaaagattcataaaaaggagtaacattgtggatttcaattcattatcattctattatacctcctcaacctcttcccatgtatcattttttttttcatgtcccgcccaaggtactactatcaaaaaccccatgaaaactggtgcttactcaacttta

SEQ ID NO: 12257 - DNA, 87 bp, Glycine max
  Clone ID: jC-gmfl02220139a03d1
gaaacaaaaattttggcattttaaaaaccaccaaaagaacaggggaaaaggggaaaatataaagccgcaaacgcccgcacgcccaaa

SEQ ID NO: 12258 - DNA, 350 bp, Glycine max
  Clone ID: jC-gmfl02220139a04d1
atggaaaagttttaagattttattaaaccaaaaaaaaaccaggggcaagggggaacattaaaaccaaaaacacccaaaaaccccaaaaccccaccacaaccaaccagggggaaaagacagaatgaccgtccccaagagcacagccttagaaaagacaaaaaaaagacgctacaaccaacaacccacaccaaggccaaacacgagcaaaacccccggagagaaaaaacagccacaacatatcgaggccacacacagcaacgaaacacacctggggccgaagcaaacaaaccaagactcccagttgctcaagaacggagacgaggtcgcgaccaaaaaaacccagattccac

SEQ ID NO: 12259 - DNA, 214 bp, Glycine max
  unsure (1)..(214): unsure at all n locations
  Clone ID: jC-gmfl02220139a05d1
gnnannanaaaaaaaaaaacagggaaaaggggnannnnnnnanncggggaggcccaaaggccccaagaccccaccacacccaaacaggggaaaaagacagaaagaccgccccaataaccacaccctaaggaaaaaaaagacaaagacgcatcatccaacaagccccaccatggacaaacacttctaaacccccattacaaacaatcctgacaca

SEQ ID NO: 12260 - DNA, 297 bp, Glycine max
  Clone ID: jC-gmfl02220139a06d1
aacaaaaaactaaaccaaaaggggaaatgggaaaacaaaaaacagcaaaaacccaaaaaccaaaaaaaaaaaaaacaacacaaaatccaaacaaaggaaaaagaaggaaaaactctcccaataaccacaacctttggcaaaaaaagaaaaagatgcttcaacaaaaaacccccatcaaggacaaactgtagcaaactcccattatagaaaaaccagtcagaaaataaggagtccaccaaaagaagggcagccacttggggctgaagcaaagaaaaaaagactcccagcagaacaaga

SEQ ID NO: 12261 - DNA, 209 bp, Glycine max
  Clone ID: jC-gmfl02220139a07d1
aacaaaaaattattctaaaaaaggaaatgtgtaaacattaaatattaaaacccccaaaatccaaatacaattatataattaattatcaaaacatatgtaaattatttaataattttccatattatcattattttttttttgacataaaaataattttttttgttacaactcatattataaaaaaaaattattaaatccccatttataat

SEQ ID NO: 12262 - DNA, 247 bp, Glycine max
  Clone ID: jC-gmfl02220139a08d1
atatcaatacattttttaatttagggtccttgtgaaattctaatgttcgaaaacccacaccccaatatacttttttttcattactattaggaccatggatagtataccagataacactcattctgtttactacttttattatattccaagccttatgattactatgactctgctattaacaagcaatcttatgagtattctggttgtggctattaaggtggctacaacaaaacttcttatactagtg

SEQ ID NO: 12263 - DNA, 133 bp, Glycine max
  Clone ID: jC-gmfl02220139a09d1
ggggagcaaactcatccaacaggggcaccgggagaacaaaaaaaagaaaaaaccccaacacccaaaaacccaaaaaccctaccccacccaaccagagcaaaaataaggaaggacttttctaatcaccacaacc

SEQ ID NO: 12264 - DNA, 445 bp, Glycine max
  Clone ID: jC-gmfl02220139a10a1
ggaaatgaaaggaaattttcaaaaatttaaaaaaaaaaaaaaaaaaaaaaaaaaaaaaggaagggcggccgctcgcgatctaaaactagcggctcgaggaagatctccattctctttatcacaatcttttcttgtggttttcttggaaatgttgtttcaaatgctagtcctcttccatatgaagctatttttaactttggtgactctataagtgatactggaaatgctgctcataaccacccacctatgcctggcaatagtccttatggttcaacatactttaaacatccttctggacgtatgtcaaatggacgactaatcatagattttatagccgaggcatatgggatgccaatgttgccagcctatttgaatctcaccaaaggacaagacattaagaaaggagtgaattttgcatacgctggttcaactgcacttgataagg

SEQ ID NO: 12265 - DNA, 365 bp, Glycine max
  Clone ID: jC-gmfl02220139a10d1
caatatattgttcatgtttatgggataacggtacaatggattcaagatgaaaatcttgaaacataatcctttgtttcacttcattttcatttcggtcccattatcctcaatattattccaaaacatacaaattataatacacaatagttaataatatattgcccatcatggaatacaagatgcttgttttagcaacactttgcttatgtcatccatgttacaaatatacacatgaaacatatggagaaaagcttattcttgctcatttccatccatgcttaaattctaagctatcttgaaaggaggggatctgagagatggattagcgaaagggccctcaactagtcccttagctattagcctat

SEQ ID NO: 12266 - DNA, 481 bp, Glycine max
  unsure (1)..(481): unsure at all n locations
  Clone ID: jC-gmfl02220139a11a1
ccatttccataatcactttttcctattttcttctccatccatcccttgactaattaattatccctcacaactaccaatggccgaagagaaacaccacaagcaccgcctcttccaccaccacaaggacgaggataataagccagtagaaaccgatactggttacgacaacacatcatattccaagccttctgatgactatgactctggtttcaacaagccatcgtatgagtcttctggcggtggctatgaaggtggttacaacaaaacatcttattctagtgatgagccagcttctggtggtggctatgaaggctgggtacaagaaaacaggttattctggtggcattgatgagacttctggtggctatggcgctggtggtgggtggatactctgacgtcactgatgggtggctacggcacaccaagtggntggctatggcgccgctggtggtggtnggtgtgtaccctgacactaccactg

SEQ ID NO: 12267 - DNA, 485 bp, Glycine max
  unsure (1)..(485): unsure at all n locations
  Clone ID: jC-gmfl02220139a11d1
tncnntnnnnnnnnnnntttaacnctttccatttgaggatatattattttaggtacttgacacttaacacaatacacatgcatatatagagcaacacatttcaaggaaacattctccaaaccatactgatctcccaaaataaactggaagatgattaacttaaagacacacatatatatataagccaaaagcatatatatatataagacaagtggaaggaatacgctcataattggttgctcatgcttcagccaaagagatggtggagcttctttccatgagcttcctcatcttgctcctttgcttcctttttctcatgaagctcatggaaggcaaacccaccagatcccactgcagctggtgctgcaacctcctcttctatcttgtgcctgtgagcatgctctgggtcattctctgccttgcgcttctcatgcaagggcgtaagcagcagcagatgcagcacctaactcaccaaggtgctcaag

SEQ ID NO: 12268 - DNA, 557 bp, Glycine max
  unsure (1)..(557): unsure at all n locations
  Clone ID: jC-gmfl02220139a12a1
gacaaaatgaaagtccatttggtccttttcttgctcctaattcttgtcagcttcactagcaatgttaacactctctcaaccaattccaaatccaactcttcaattcctcaattaacccaacagaaaaggcctgacaatgagacaatatatagagtatcaaagcagctatgttggggttgcattgcagagtcactggagtttgttcaggcacaacttggtgagagcagccaagtgggaactcccactgatgtgggacttccagctggagcaatacgcgaggtggtgggctggtcaaaggaaagcagattgcaagctcgaacattctttcccagaagatggtttcaagcttggagagaacatttattgnggtagtggctcggcgtggacgccaagtgatgctgtaagagcatgggctgatgaagagaaatactacacctacgccactaatacttgtgtgccaggtcagatgtgtggccattacactcagatagtgtggaagagcacctgaagaaatggatgtgctcgggtgcatgtgacgatgaagatgtgttcatgac

SEQ ID NO: 12269 - DNA, 463 bp, Glycine max
  unsure (1)..(463): unsure at all n locations
  Clone ID: jC-gmfl02220139a12d1
tnnnnnnnnnnnnnnnttttggggtttgataaatattttatttcactttgtatgagggctcaaagtttaacctcaggcaacagatctctaactactgataccctttaattactttttggtacttttatttattgacccaagtactaactaattattaaagccaatcccgtaattatcccacttcccacaagtatttacatatacactcgcacatactcactcataaggactgagaaactaattcacactcacataagctagcactattgtagtattatctaataccactagagtttcaatttcgctacatgaattaatgcacacatagtttataacaatttaatagggtcgctctccgacataattgcccacgggatcataattacaagtcatgaacacatcttcatcgtcacatgcaacccgagcacatccaattcttcaggtgctcttccacactatctga

SEQ ID NO: 12270 - DNA, 611 bp, Glycine max
  unsure (1)..(611): unsure at all n locations
  Clone ID: jC-gmfl02220139b01d1
tggattgaaagtttagtatanctattaccgggtagaccagcatactcgtcggcggccgcccttttttttttttttttgaaaacaacatatatatgttttcccatatttataagcacaatggtgttttgttgtaaggtccatataagggctaacaaagtgtagtaatgtgacaaatatttgaattctgttatgcttatctgaggaaaacaaaatgacagtaactataagaggacttgcagtgatttgaaacacaatattatataaaattaatcgcgtttgattggagtagcttgaactcgaagaggctgaaccttctttaatgttatcgcatattgctcctccatgttcatgtgttctggaattaacccatcagctagcttccattcaaagttgtgtacaagggatgctactattaaatgcattgtcctgtgagctaatggcaatcctgggcatatccttttaccagctccaaagggtatgagcttaaaatcgtgacctttaaaatcaatctcacatttcaaaaatctttcgggcataaaaattgntggattctcccaaatggttggatctcgtcccatggcccacacattgaccaagatttgtgcattttt

SEQ ID NO: 12271 - DNA, 601 bp, Glycine max
  unsure (1)..(601): unsure at all n locations
  Clone ID: jC-gmfl02220139b02d1
aaacatggacttgtaattttaacttgcaaatttccagttcaagaaaattggatcacgtttactaggcaacatgaatcattaaaacaaatcacaatatcactatcaaaactaaatatgctagtcaactgcgactaggacacttgcttaaccgctgttgggctaatagtcatcagattccacagctaataagacagattgatttaaaaccatctattttcaaattatatctcaagagtagcacggttggaagcagccaaccgcaaaatactgaagcatccaagccttgtaaggccgtatacaagtacatcatgggcaccagcggcaacaaataactcttcactgaataccaccccaagtaaaagcaaaataaataccgaaatgaatatatggtaaacttgatgctgtcaattatgcctcaaagctgccactccattaatttgggcaggaattcccgtcctcaagtcaaaattggtacaaattcacagaccagtgacttttcccacagcaacagtttttccttcagtgcgaagagtgaacnnctccagtggggaaaatcagagacttctcatgcaaaagagttattacctgacacggacataca

SEQ ID NO: 12272 - DNA, 284 bp, Glycine max
  Clone ID: jC-gmfl02220139b03d1
gaaaccaaaacttttagattttactcaccaaaaaacagaccgggggaaaggggggactttcactacgcaaacggcaacatacccacacatcccaccacctccaaccaagcgaaacatgcgacataaccccccctaggacaacagcctaaccgttgacgggccaaagatgctcaaacttaacaccccaatcaacagcaagaccgaccacccgcgctttacaaacaactaccgcaagagcatcacgagggcacgcaaacaaccgcaaacacctggagctgccacaa

SEQ ID NO: 12273 - DNA, 285 bp, Glycine max
  unsure (1)..(285): unsure at all n locations
  Clone ID: jC-gmfl02220139b04d1
gggggaaaaattttgagattttattaaacaaaaaaangcccgggggaaaggggaaacatcaaagccgcaaacgcccaaacaccaaaagacaacaccacccccaaacagggggaccagatggcaggaaccttccccatgaggacaaccttagggaggacgagacaaagatgcatcaccctacaacacccatcaatagcaaacaagaccaaacccccccgacagacacacccgacacacccaatccgacccaccaagagaagggcaaccacccggggccgctgcaaa

SEQ ID NO: 12274 - DNA, 285 bp, Glycine max
  unsure (1)..(285): unsure at all n locations
  Clone ID: jC-gmfl02220139b05d1
gcccccacaccaccaggggaattcccattttatnncaatcacaggataaccagcacacccatcggcggccgcccttttttttttttttttaaaaaaaaattttaacaatatatcncacaaacaaacaaaaggggaaaaagggaaaaataaaaacctataacaccaaaaaaccccaaaacaccaccaaaaccaaacaagagaacaatacagaaaaacgcaccaaaaaaacaccccctttaataaaaaaaaacaaaaaatcttcaaacaaaaacccccaccaagaac

SEQ ID NO: 12275 - DNA, 260 bp, Glycine max
  Clone ID: jC-gmfl02220139b06d1
aatataaaaatataagaaaaaaataaacaaaaaggagcaagtggaaaacaaaaaaaagaaaaacccccaaaaacaaaaaacaaaaaaaaaacaaaaaaaaaaaacaagagaaaaagaaaaaataactctccaaaaaagaaaaacctaagataagaaaaaaaaaagaagctacaaccaaaaaaccacaacaaggacaaacaggagcaaaaccctaatagaaaaacaccagacacaacaaaacgattccacaaaaagaaaaa

SEQ ID NO: 12276 - DNA, 174 bp, Glycine max
  unsure (1)..(174): unsure at all n locations
  Clone ID: jC-gmfl02220139b07d1
agccccaatcccatattcatgcatgcatcctcggaacancagctactagtcgaggaccgccctaaattttcatttttttttatataatttttctaaaaaaagtaatctaaaataggaaactggtacaacattttaaaccaaaaccccccccaaacccctataaacccccaaaat

SEQ ID NO: 12277 - DNA, 314 bp, Glycine max
  Clone ID: jC-gmfl02220139b08d1
taacctttttaactagattataaaattttaacaagacaagaacaccaaagggggacggggaaaaaccataacaggagacaaccctgacacccaaacaactaacatacctagctatgggatgcaaaggacagagaaggacataaaacaacaggagctgttactgcactaaagacagttgctgggaacaggctaccaagccacacgcctatacaatggaagggatggccatcgccacattcttctcagacatccaaaaggcacacagattgcctgaaaagactatagcactggtgactgagcaggacacagcattc

SEQ ID NO: 12278 - DNA, 234 bp, Glycine max
  Clone ID: jC-gmfl02220139b09d1
aacaacaaatcaaaccaacaggggccccggggaaacacaaaacagcaaaacccccaacacccaaaaaccccaaaaccccaccacccccaaccaaaccaaaccgaaggaatgaccctccccaagaccacacccttagggaacacaagacaaagacgcaacaaccaacaacccccaacaaggccaaactcgccgaaaccccccggggagtcactcccgccacagcatagcgactcc

SEQ ID NO: 12279 - DNA, 289 bp, Glycine max
  Clone ID: jC-gmfl02220139b10a1
gaaacatgcagagactatacaactttttcgcattttcgctatcaaccaccggaaaaggggggggggtgcaccgatactaaacctcccgcgttgaacgtgagatatctatcaatattatcccctctctcagtggtgcggatctgcacaaatccggaacgaacgctattgctagacaatctggagctgactcttcattggcggaccaagcactaaactcactgaatgctgaccacaatcatgaagcacagtcttcatgcacatttgaaccggctacaaacttaacttgtca

SEQ ID NO: 12280 - DNA, 202 bp, Glycine max
  unsure (1)..(202): unsure at all n locations
  Clone ID: jC-gmfl02220139b10d1
aacaacaaatccatccaacaggggcccgggggcaacacaaacccgcggaccccccaacacccccataccctaaaaccctccctcacccaacccggcccagaacacggaatgacngtcccaatcagcaccccctttgacaacacacgccaaagacgcaacacccaaccagccccaccaagggcaaacacccgcacaaccccct

SEQ ID NO: 12281 - DNA, 440 bp, Glycine max
  Clone ID: jC-gmfl02220139b11a1
ggcatatcaaccgcgttaactatatgttgcgttctgtatatgcttgtagcagcagttattgttggcttagtaccatattatgagttgaaccctgataccccaatctcctcagcattttctagctatgggatgcaatgggcagtgtaaggtatataataacaactggagctgttactgctctttttgccagtttgctgggttctgtgcttcctcagccacgcgtctttatggcaatggctagggatggtttattgcctcatttcttctcagacatccataaaggcacacagattcctttgaaaagcactattgcactgggtgtctttgcagctactcttgcattcttttgggacgtttctcaattacagggatggttaggtgtgggaacactgcttgcatttaccactgttgcagtttcagttttgataatcagatatgtg

SEQ ID NO: 12282 - DNA, 537 bp, Glycine max
  unsure (1)..(537): unsure at all n locations
  Clone ID: jC-gmfl02220139b11d1
nnnnnnnnnnnnnnaatattccngngttcatgttgnttagtatttcgtgagtatgttgactatacatggttaatgcctcatagggagaagtttgtaaaaggatggactcatccggttatggccacttgtttaaataaacaaataaataatcatagtaatcatccgtctgatagcggaaagaaagcattggtttagaataggatatttacaaattggtgtaagccatgtaatgtaatatgtcacaattatgtaacaaatggatatagacctgaagtgtggtaactttggtagctgccgtgcaaatactaggcaagatgacttgcttgagatcgatggatttcatcagcatatgctgagggaacatagattgcatgcaacagtgagctgtgagtgcggccatagaacaagtatacaagttctcctatcaacatccataccgaaactcgcagccatgtagcaactccaagatcgattagtaagtagggtgtttataagaatacatgcagcaggtaaagaatggaacaaatgggcaggcaa

SEQ ID NO: 12283 - DNA, 513 bp, Glycine max
  unsure (1)..(513): unsure at all n locations
  Clone ID: jC-gmfl02220139b12a1
cagctcactaacaccagctactactttttccccccaccccccactctctcacaaaatgtgccagggcctctccgccccatcgccgccgtgttcggcgcttctctccttcacgctcctcctcctcctcctctcggtggtgggcccggtttcggcatggcggccttggccccagagcaacaaaatgaacatcagcgattatgccttcggggactccaagaaatacgaggggtcctcggagttcgtgaagctgaggtaccacatgggaccggtcctgactaccaacatcaccgtccacaccatctggtacggcaagtgggagcggagccagaagaagatcatccgcgagttcataaattcaatctccgccgcgaactcgccgcacccctccgtggccggatggtggcgcaccgtgcagctctacacggaccaaaccggcgccaacatttncaaatcggttcgactcggcgaggagaagaacgaccggttctattcccacggcanatcactgacccg

SEQ ID NO: 12284 - DNA, 409 bp, Glycine max
  Clone ID: jC-gmfl02220139b12d1
atcaataactttaaaattacattatttgcattagggaacaaggttaactaacttaacaaaattaccagactcccacagaagcacaagaccaaacccaagaaagaaagaaaaatctagcacattgactgaggagatgatcagtgatcaagcgcattaggtccagtacagtaattgagaacgtgactccacagccactgaacaaggaatttccgtctgatcccattcatgttataggtggcgccatctcgagcgtcgaaaacctgaccggtgtaggatccaccgccaccggtgccgtaaatcccctcacagagatcggcaatctcgacggggaaagaggggtcctgacccgcataccaagcattcgccaacgggttcgttgccagttcagccatctcgtgtccaatcacac

SEQ ID NO: 12285 - DNA, 137 bp, Glycine max
  Clone ID: jC-gmfl02220139c01d1
cttaaataatctgatattattgaaaacatggggcaacaaattcaatatgaacaatatacatgaatataagaaatatatgtaagtacacgcatggtcagttcatatccgaagggtcctaaccaaccacaaaacggtcg

SEQ ID NO: 12286 - DNA, 390 bp, Glycine max
  Clone ID: jC-gmfl02220139c02d1
gggacaccaaaattgcacggggaaagggggaagttaaacatcacgagcatcattataaccatatagaatacaacttcgcacagggcagggggggccatatatgggctcttgggaccaaacaaggggggcattaaaatattagaccgcggaaggaaatgcctcctgggaccggtccctttcaaactcacatcaagacccttaaaaacccgggaggggaataagaataggagctggtttgccatatttggggggactgcttaggggggtgggtttgagagccagcaagggaggctccccttggattctgctgctgatgttccagagaaatcccagactgagaatggtacaaggtagggtatccaagggaccccaaatgttgttgtgagggct

SEQ ID NO: 12287 - DNA, 427 bp, Glycine max
  unsure (1)..(427): unsure at all n locations
  Clone ID: jC-gmfl02220139c03d1
gcccacacgannnacagcgggaagctttannatgcangctaataccagaaataaccagcacactcatcggcggccgccctttttttttttttttttaataaaaattttaagattttacccaacaaaaaaaaaacanggggcaaggggaaatttttaaaccacaaacgcaaaaatacccaaacataccaccaaaaataaacaagtgtaacatacaacaataactttccctaataccacaacctttgctttgataacataaacatgctttaaaataaaacccacaccaagaacaaaacccaccacacccgcattacaaaaaaaccagacacaatttaatgattctacaaaaataaacaaaacaatcttgtgctcattcaaaaaaaaaaacgtctctataaatgaccaagaaaagtgaaccttctacaac

SEQ ID NO: 12288 - DNA, 255 bp, Glycine max
  Clone ID: jC-gmfl02220139c04d1
atcaaacaaaaaaagggacggggacaaggggaaactgcaaacacgaagacggccaaaaacccaaaaacaccaccacacccaaacaggggcaaaataaggaagaacccctccatatcaccacacccttaggggggacgggaaaaaaaagcaacaaccaaagaggcaaaccaaggacaaacaggagcaaaaccccatgaaaaacaaaccggacacaacatagcgagtccccaaagagtagggcagcaacgtggggcc

SEQ ID NO: 12289 - DNA, 117 bp, Glycine max
  unsure (1)..(117): unsure at all n locations
  Clone ID: jC-gmfl02220139c05d1
aaaattggagtgaattcagagtcnatgtgtgctgctttgcatgaatgcgtacggtacgactcaggattactagttcgaggaccgcccttttttttttttttttttatatttattttt

SEQ ID NO: 12290 - DNA, 217 bp, Glycine max
  Clone ID: jC-gmfl02220139c06d1
ctattataatttttaaccaaacctaaaccaaaaaggggtccttgggaaatactaaagcccaaaaccccccaccacaaacaccgtctcttccatcaccacactgacaaggataataaatcaaaaaaaaccgatactgactactacaacacatcatattccaagcctactgattactataactctcatattaacaagcacatcatatgattcttcctcc

SEQ ID NO: 12291 - DNA, 202 bp, Glycine max
  Clone ID: jC-gmfl02220139c07d1
ttacattttttttttttatcttacctttacccaccactttataacaaaaggggccagggggtatcaaaaaaatctcaaccccccaaaatcctaatatcctaaaaactcctcatacccatccaatcggagatgatcccataaccttcatgatgaccactgccttagattaacaaaataaacaatctttcttataacaaccccc

SEQ ID NO: 12292 - DNA, 269 bp, Glycine max
  unsure (1)..(269): unsure at all n locations
  Clone ID: jC-gmfl02220139c08d1
ataacaaaaaattattcaaaaagggggaagggggaaacaataaaaaggaaaaaccccaagacccaaaaaccccaaaatcaaaccttcaaccactaaaaagcacataattaaataaccctctcccactaaaaacccttttaatatacatgataaaaaatttattccctaactccctcacacacgaacaaacttncttacaatctctcagtaataaaatggaatcccaaaaactgtatctcacaaagcttgacggacctaactgtgatggg

SEQ ID NO: 12293 - DNA, 246 bp, Glycine max
  unsure (1)..(246): unsure at all n locations
  Clone ID: jC-gmfl02220139c09d1
tnnntttgttgttttggttttgggattttaggaaacaaaaaaacaaacgggggcccgggggaaacaaaagaacgaaaaacccccaacacccaaacaccaaaaaacccccccaaacccaaccagggggggaaaacacaacaacgcgcccggaggccaccgcctgagggaagacgggacaaagatgctacaaccgacaagcccgcccaaggacaaacccccccaaactcccctggcagaatctcccgc

SEQ ID NO: 12294 - DNA, 329 bp, Glycine max
  Clone ID: jC-gmfl02220139c10a1
gaaacatgctaagactaaacaactttttcgcatttacgctatcaaccaccggaaaagggaagtttctgcaccgaaactaaacctcccgcattgaacatagcctatctatcaatatcaacagctctagcagtgatcaggatctgctcagaacctgaatgaaccctattgcaagacaatctacgacctgaatcttaattggcggcccaagcacaaaactaactaaatcctgaccacagtcatgaagcacagtcgtcatgctcattaggaccggataccaacttaacttgtcaatgggggagaacaaacttctcacgtggcacaaatacaaa

SEQ ID NO: 12295 - DNA, 238 bp, Glycine max
  Clone ID: jC-gmfl02220139c10d1
aacaaaatattattcaaaaaggggccccgggtaaacactaaaaagcaaaaacacaaacacccaaataccataacatcctacctaatccaaccatattaaaattatttaataaccttccttattttaaccccctttgacatgaaaaataattaattctattaactctacaacccccatcaataacaaactctttcaaatcccccttaaagacattcctctctcaatatatctatttctc

SEQ ID NO: 12296 - DNA, 578 bp, Glycine max
  unsure (1)..(578): unsure at all n locations
  Clone ID: jC-gmfl02220139c11a1
cgcagtcgtttgattgtgaagtgagttccgattgagcacgtcttggaggcaacgacgtctacggcagctcctcgttggtggttaagtcgcttgtcctttcagtccctcgatgagtccgccaacccctaaaaagcacttcttagttctccctctcccactaaaaaccatagtaatctagataataattaacatcagccctcactccttcgcacaccaaacccttccttcctatctctcactaatctaatggaatccgcagcactgtcgcgcataggcctggcgggcctggcggtgatgggccaaaacctagccctaaacatcgcagaaaaggggttcccgatctccgtgtacaaccgcacggcctccaaagtggaccagaccgtagtatcgtgcccgcaacgagggctccctccctctcacgggccaatacacccctcgcgacttcgttctctccctccagcgccccagatccgtcatcatcctcgtcaagccggctccccagtcgaccacaccatcgncgncctcttcgaccacctngaccccggcgactgcatcatcgacggcggcaacgagtggta

SEQ ID NO: 12297 - DNA, 488 bp, Glycine max
  unsure (1)..(488): unsure at all n locations
  Clone ID: jC-gmfl02220139c11d1
ttttatttttttttttttttttttttttggaagccaaatgacatgccttgggtttatggagattaaaaacagttatagcaagaaaacaatagctgctctctccctaccaaagatcctcaaagaaacaaacaattacaactcaaatgctgcactgcaatgcacgaccattaaacaaacaaccaaaacccaaaatcaatcaattgagtgcaccaactccagccccactattgcgagcgagtttcgtccactcggtatgaaaagccccagggcgatcaaccctctcgtaagtatgcgccccaaacaagtccctctgagcctggacaaggtttgccggaagtcttgccctccgataggtatcaaagtaagcaagactggcacacattccgggagtactaatcccagccgaaaccgtcaaccccacaaccctnctccacgcagcctgtctctgcaccatttcccttgaaactccgggtccacaatcaaactcg

SEQ ID NO: 12298 - DNA, 542 bp, Glycine max
  Clone ID: jC-gmfl02220139c12a1
gattccacaacagtgggagggagattcaaaaagagagagtggaaaagatggcgcggttgatcacagtggtgtggtgcgcggtggcggtgctattatgcgccgcggccggtgcgtcgtgggtggaggaggcggcgaacccgatacgaatggtgtctggcgtggaggcggaggtggttcgggtgatcggggagtgccggcgtgcgttgaagtttgctaggttcgtgagcaggttcgggaagagttaccaaagcgaggaagagatgaaggagaggtacgagatattctcgcagaatctcaggttcatccgctcccacaacaagaagcgtttgccctatactctctctgttaatcattttgctgattggacttgggaggagttcaaaagacacagactaggagctgcccaaaattgctctgccactcttaacggcaaccacaagctcaccgatgctgttcttcctccaacgaaagactggagaaagaaggtatagtgagttcagtaaagatcaggcagtgcggatcatgctggacattcgcacact

SEQ ID NO: 12299 - DNA, 474 bp, Glycine max
  Clone ID: jC-gmfl02220139c12d1
gctatcttataactgatattgggagcgggagcatcaatacaatacaatatgtaactatgaactatcaatatatgatcgttattatgtctgtgatacacacaattaaggccataatatacttatgtgatttacaacaacttctagcttattttatacatcatgccaacccaactaggagcaattttcatcatacaattacacttatctttaatcatcattcatcaatactggcatcagcaatacgctctaaactctgaagcatgacaaggtggtagtcaccagggaccatattgttatgcaatttatgccacaattggataagatgcacaagttgcaacaccacacatgttcttccccaattccatcttgaagtagccattttcaccccagctttctccccatgaaatttttatgagccaatatgggacaccattttcaactccatatccaacagcaagaacgggatggttcaca

SEQ ID NO: 12300 - DNA, 401 bp, Glycine max
  Clone ID: jC-gmfl02220139d01d1
acttgcagaaaaaatttcattacatggggatttacagcattttttttgctcatgtttacatgctttcaagttcattttgcttggttctttccaaagatacattgatgtacattaccaaaatttaattcgagtactttacctttttggatatcaaatacaagtttagtttaacttatatacactctctcagtgtaaaacagttttacataaacatccaataataatttatcttatcatcatattatattaatgaataagataccttgataaaacgatcaaatcttataggatatctatgtaaaaatgttttacattgacagggtatataaattaaactcataagagaaactttggttcatctgattgcaagagaactccatgttttccatttacttctactg

SEQ ID NO: 12301 - DNA, 519 bp, Glycine max
  Clone ID: jC-gmfl02220139d02d1
aagcccttccagcacaaccaaagggataaatgaatgaaattctaacccatcgataattaaatttgatgggaattatgatgtagcacaaaatgtctcaccattaaaatcaaaataacaagtcgaagttttaagtaacttaggacagaacttaaaaaaaaaaaactaggtaaaatgagagtagataacttggtacattatgtcacttagcacttaacctcctttaaggcatatgcaaagtataagaatgttggatcagcagcaccatccttgtagtatgcaaagaccaagcaagcatcatcattcatgctctccccaacaaaaaactggaaatccttaatcttagagagcaggtatttagttgctccctcaatgtgcttcttaaacaactcttgtttctctgcatcgagcttgggagtcaaattcttgataaacctcttcatgaaggtaacaaactgtttcttatcaaaagcgggttgctcctgaagtctgaatgtatcaacaatgtcaacaaccttaaca

SEQ ID NO: 12302 - DNA, 297 bp, Glycine max
  unsure (1)..(297): unsure at all n locations
  Clone ID: jC-gmfl02220139d03d1
gcaccccaggggccgggcctttttcatttgcatntcatccaaaaatacccggagaccccacgggggccggccttttttttggatttttacaccaaaattttgccattattttcaacacaaaaaaaaccgggggcaaggggggaatttaaaaacacaaaagcccaaaaaccccaacatacccccactcccaaacaagaggagcatacacaaagaccttccaaaaaaaaacaacctttggttcgacaacaccaagaagcattaacatacaacccacaccaagaacaaaacaggccagaa

SEQ ID NO: 12303 - DNA, 200 bp, Glycine max
  unsure (1)..(200): unsure at all n locations
  Clone ID: jC-gmfl02220139d04d1
annaaacaaaaaaannaaaggggaaaagggaaaaatttaaaaacacaaacacccaaaccccccaaaaccccaccacacccaaccaaannnaacagaaagaaaagacggcccacatcagcacccccatagggaggacaccccaaagatgctacaacaaacaacccccaacaagaccaaaccccagaaaacccccctgacag

SEQ ID NO: 12304 - DNA, 414 bp, Glycine max
  Clone ID: jC-gmfl02220139d05d1
tttggtttttttttttttatataaattttaacaaaaaacaataacaaaagggggacgggggccgctcttaatctagaactcccccctcgcggaagatctccattctctttatcacaatcttttcttgtggttatcttggaaatgttgtttcaaatgctagtcctcttccatatgaagctatttttaactttggtgactctataagtgatactggaaatgctggtcataaccacccacctatgcctggcaacagtccttatggttcaacatactttacacatccttctggacgttatgaaactggacgactaatcatagattttatagccgaggcatatgggacgccaattttgccagcctattagaatttcaccacaggacatgacattaagaatggagtgaattttgcatacc

SEQ ID NO: 12305 - DNA, 155 bp, Glycine max
  Clone ID: jC-gmfl02220139d07d1
aacaaaaaatttttcaaaatggggcactgttaaaacaataaaacgttaaacccccaataacaaaatacaaaaaaatacttaataatccataaatataaaaaatataaaataactttctatataaaaaaaatctttgatatgaaaaaataaaaatt

SEQ ID NO: 12306 - DNA, 200 bp, Glycine max
  Clone ID: jC-gmfl02220139d08d1
aaaatgaggcccttttaaacaaaaaaatttaaaccccaacaaaataaacaaaaaaattataatattccaacaaacatatatatgtataactttcaaataataaattctttattttaaaattataaattcattttttaaaacccccatcttggacaaacaaaataaatccccttataaacattctttttcaatttatttat

SEQ ID NO: 12307 - DNA, 215 bp, Glycine max
  Clone ID: jC-gmfl02220139d09d1
aacaaaaaattaatcaaaaaggggcacagggaaaacacaaaacaggggaaccgcaaacacccaaaaaccaaaaaaccccaccacccccaaccaaacgcagaggaaacaataacccccccaataagcacaccctgagagaggaaaacacaaaaacgctacggccgaacacccccatcatggccaaacccccccaaacccccctgacagacacaccc

SEQ ID NO: 12308 - DNA, 284 bp, Glycine max
  Clone ID: jC-gmfl02220139d10a1
gaaacatgttaagactaaagaactatgtcgcattttcgccagcaaccaccgaaaaggggaagtgtgtgaacagaaactacaccttcccccttgaatatggcttatctttgaatatcaaccgctctcgcagtgagccagacatgctcagcactgcattgaaccctatctgcccgacacctatgaagtgaatccatcttggcgacccacgcaccaacataactaattccagactacaatccttaagaacagtgatcatgcacattggcaccggataccaacttaac

SEQ ID NO: 12309 - DNA, 177 bp, Glycine max
  Clone ID: jC-gmfl02220139d10d1
accggggggaagtgtgaaactttaaaaaccaaaaccccgaaaacccccacacaagtcatactatagtaaataatttcatacagaagaaattactaaattaaaaaaaactttggtttaacaacaaaaaaaatcattaacatacaacccacaacaagaacaaaacaaaccaaaaagcca

SEQ ID NO: 12310 - DNA, 298 bp, Glycine max
  Clone ID: jC-gmfl02220139d11a1
gaaccatgctaagactatagaactttttcgcacttacgctatcaacaaccggaaaagtgaagtttctgacccggaactaatcctcccacactaaataaggcctatcttacaatgttatccgctctagcagtgacgcagacttgctcaggacagcatcgaaccctattgcaagctaatcatggtctgactcataattggcggcctacgcaccatactgactaatctctgaccacagtctataaccctagtcgtcgtgctcattggcaccggctaccaacttaacttctcgatgggggag

SEQ ID NO: 12311 - DNA, 289 bp, Glycine max
  unsure (1)..(289): unsure at all n locations
  Clone ID: jC-gmfl02220139d11d1
aacaaaaaatnagacaaaaaggggcccggggaaaacaaaagaccggggaaccccaaacacccaaaaaccaaaagaccccaccacacccaacccgggcaagaagaaggaataagggtcccaatcaccacccccttagacaagacgggaaagagaaggtacagccaacaacccccaccatgggcaaaccggaggaaaccccccagagagacacacccgccagaccagggggactccccccagggcgccgcagccccggggggcccctgcaaccaaaccacgnctcccacat

SEQ ID NO: 12312 - DNA, 445 bp, Glycine max
  Clone ID: jC-gmfl02220139d12a1
aagagcttccgtggcagtggtagtttccaaactagtagcaagaagtaagtcacgtgtttctccgttttcattcatcacaatattaaagctcttagtttccttcagtatgggggacacttacgttttggccacaccgaagcgcagccgttccgatgacgtggacggcggcgaggcgaacaagctgctgctgcagcagggcgaggcagacccggcggcggcgctggcgagcgcgcggcacgagttctgggagcacggaggtgtgaacatgtcgatcgaggcgtcggcgacattcacggcgatggagccggacaccatgcggcgcatgttcggcggagaactcggccccgaccgcgacttcttcatatacagccgtcactatcacccgacggtgctgagcctcagtcgcctcatggtccgcctcgaggcaccgatgccgcctactgca

SEQ ID NO: 12313 - DNA, 347 bp, Glycine max
  Clone ID: jC-gmfl02220139d12d1
gattagaaacttttgacacatattcatatccatggggcaggagggacgatcgagtagcaagacaagacataaagctgagcataaattattattatagataacataacattatgggagcaggaagaagacgagggtgcatgtgcatgtgcatgatgagaaaagcaattcaggcgatcttgctgtatccagagtcgtttagtctagtgagcgccttttggagctggctccacttctgctccaagggtccaatgtacccaatcgacatcctcacgagccccggcgagattccggcgagctccttctcctcagagctgagttcactgctggtgctgctgccggagcaggac

SEQ ID NO: 12314 - DNA, 496 bp, Glycine max
  Clone ID: jC-gmfl02220139e01d1
aaattaatagttcattggaaattcacggtatatgtgctaatcgaaagcaaatattcttttcactggagggaaacacacaagtagagatactgaacttcacagaattcattatactgtatagtacaaactaaacactggtaactacaaagaacacgaccaatatcacacccagatattgtaagagaaaaatgaggatagacaaaaagaatatgctgagccacattgtgaagtgacagacattatagaagcccggagcaaaatcctgaggagaaagtctcacttatgcccccggaaatacatgtatattttctgaagcacccaaaagcttagaagagcctccaagcaaaacatgccaaatccaatcaaatagaatatctgcatgaatagaaaacattgtatggatccaaacaagtcagaacagggaaaagggtatgaaacttgagatttcctagtgctttaaactaaaattccaaaataacaaagggttaggaaattt

SEQ ID NO: 12315 - DNA, 621 bp, Glycine max
  unsure (1)..(621): unsure at all n locations
  Clone ID: jC-gmfl02220139e02d1
tggccccggcttcccaccccagccaacaaaaagaatgggaaagggcctcagctcgagctnngtanancnaatnnnanggatagacccgcaaaaccatcggcggncgcccttttttttttttttttcatacagctgttgaagtttcgccgtaaaactaagcaaaaaagggaagtacaagtaatttcacaaagtatcttatcatcgccaccaaaaaagcaagcgcaggggacttcttaattcccagctatcataaaaatttaacagactccgactaatctagagctcatcgtgagaatcgtcctcgtcttcttcgcctgatgcaccaccaccgcctggggctcctccagatctctgatacacagcactaatgattgggttgcaaacggcttcaacctccttcagcttctcttcataatcttctttctccatactctggttgtcatccagccattccagtgcttctttcacagcagtctcaattttctccttttcatcagactccaacttgtcagcgagcttgtccttgacactgatctggttcttcatgttgtatacataggtttcaagactgttgcgagcatcgatcctctccttcaccttcttgtcttcctctgcaaactc

SEQ ID NO: 12316 - DNA, 614 bp, Glycine max
  unsure (1)..(614): unsure at all n locations
  Clone ID: jC-gmfl02220139e03d1
ggcagcggaggacacagcaccaaanaggcggaaaggggttacttgatctgtagcnccagtnaaggtagacgcgacacccgtcggcggccgcccttttttttttttttttaacaaaatcatttgggctttagggattcaacacagcttcacgggcaaacgggaatgttgatactattacacaatatgtaagcctttatgtattcaggacaagcagcattcttttacaagaataataactatcattttaaaggttatgaatgaagagtatcagcatactaaactacatattgggtaaatgaattcattttccaacacactaacaaatggagttgcttgagtactaactagtgatcctgtggaaacaaaccacagctccatgcctcttgtagaaaacagggaatgaggtgtctataggactaaacaacaacaccttgagtatatgatttatgggagctctgatggagagattaatgatcctatatgcatttattatcaggtgatgggatttcaaagactacgttgctctttcataaccacctccaacctgcatatgtaaccattctggcgatgaacctcggctatactctcttgtagcttgggaagcaaacggcatg

SEQ ID NO: 12317 - DNA, 221 bp, Glycine max
  unsure (1)..(221): unsure at all n locations
  Clone ID: jC-gmfl02220139e04d1
ttnttttgttttttttttttnnnntttttnnntttataaaannacannaaaannaangggggacaggggnaactaacnnnacaaaaacaccaaaaccccccaaaaccccaccagccacacccaggaagaacgaacaaaacaacccccccaatgaggagaacctcagggaggaaaagcaaaagacgcaacaacagaaaagccaaaggaaggccaaaaccacg

SEQ ID NO: 12318 - DNA, 197 bp, Glycine max
  Clone ID: jC-gmfl02220139e05d1
atataaatatataacaacacaccaacccaaagggggccctgttaaacataaaaacggaaaaaccccaaataccaaataaaaaaaataccttaataatcaaaaaaatcacaaaacacaaaaaaaaagtttcaaataagaacatactttatttataacaagaaaaagatgatttttcataaatgcctaattaaggaaaa

SEQ ID NO: 12319 - DNA, 207 bp, Glycine max
  Clone ID: jC-gmfl02220139e06d1
aacaaaaaagaattcaaaaatgggtactggtaaaacattaaaacttaaaaaccccaaaatcaaaaaataaataaataattcctccaacaaacaaaaagaacttacaaaattacccttctaaattaaaaaccattttaatctaaataataatcaacattaaccctaactccttctcataccacaaacttacttactatctcatactaa

SEQ ID NO: 12320 - DNA, 199 bp, Glycine max
  Clone ID: jC-gmfl02220139e07d1
gtatataaaatttaaacaaaaaactaaacaaaagagagaaaggggaaaacaaaaaaacgaaaaaaccccaaaaccaaaaaaaaaaaaaaaaacaaaaaaaccaaaaaaaagaagaagacaaaacgacactcaaaaaaagaacaaccttaaggaaaaaaaaaaaaagatgcaacaagaaaaaacacacaccaaggccaaa

SEQ ID NO: 12321 - DNA, 118 bp, Glycine max
  Clone ID: jC-gmfl02220139e09a1
caaacacgcaaacactaaacaacctgtatgcactttccccatccccaaccgaaaaaagggggtttctgcaccgaaactaaacctcccgccccgcacatgagctaaccaacaacattaa

SEQ ID NO: 12322 - DNA, 264 bp, Glycine max
  unsure (1)..(264): unsure at all n locations
  Clone ID: jC-gmfl02220139e09d1
aaacaaaaaaanaaacaaaaaggggcacggggagaacaaaaaaacgcagaacccccaacacccaaaaaccaaaagacccgcaagaacccaaccagggggagcaggagggcaaaacggcccctaagagcaccccctgaggcaggacgggacagaaatgcgacaacagaaaacccccaccaaggccaaaccgccccaaagcccccggacagacaaaccggtcagaacagggcgagtcccccaagagagcggccagacccggggggc

SEQ ID NO: 12323 - DNA, 317 bp, Glycine max
  Clone ID: jC-gmfl02220139e10a1
gaaacacgcatagaaaaaagaacattttcgcatttaagacagcaaccaacggaaaggggaagggggggaacagaaacgggaccgcccgcgctgaacaaggcagaagcaacaacgtcaacagctctcgcagtgagccggatatgcacaagaccgggaggaaccctatagcaagacaagcaggaacagacacataagtggcggaccaagcacaaaactgacgggatgctgaccacagtgaagaagaacagtcgacatgcacattaggaacggataccaacttaacggggcaatgggggggaacaaacgtccgacgtggc

SEQ ID NO: 12324 - DNA, 202 bp, Glycine max
  Clone ID: jC-gmfl02220139e10d1
agaccacaagaaaaacgaaagggggaagggggacaacctaacacagcaagcccacaaataaccaaagacaacaatacccgcactaacccaaccaagcataacatatatggtaactctccgtaacaccagaaccttcattaagaacagtggcacattcaaagcccgagccaccaaaccttgagcagggggctagaaacccgcc

SEQ ID NO: 12325 - DNA, 461 bp, Glycine max
  Clone ID: jC-gmfl02220139e11a1
gtgacacagaaattaagctagagcttcatagtttcttcttcttttctcaccttccttctctcccttcagacaaagggacaaaaaatcagtgtgtgagagagagagagagaaattccaaaaccatgtcccacagtcatctaagtttcgcctttgggattctaggtaacattgcctccttcgtgtgctttctggcaccactaccaacattttatagagtttgtaagaagaaatcaaccgaagggttccaatcaattccatatgtggctgcactcttcagtgcaatgctttggatcttttatgcctatgtgaagaccggagaaacgcttcttatcaccatcaatgcattcggttgcgtgattgagacaatttaccttgccgtatttatcacttactgcccgaagaaagctaggatgtcgacattgaggatgattgttttgttaaattttgggggattttgcaca

SEQ ID NO: 12326 - DNA, 520 bp, Glycine max
  unsure (1)..(520): unsure at all n locations
  Clone ID: jC-gmfl02220139e11d1
tcctttttttttttttttttgagtangaatggtgcttcatgcttggaataagcttttacaggtatagtccatataataacaatacatcaccatataggactctctttctatgaaattccctatatctaggggcacaattaattagcgtgggtaaacaaataacagaaattacataaacagtgaaccaaaataagttaaaataactgtagagagagatagaaatagctcgtataggcaacgatatctacaccgtctctgcctcttttcgcacgttctactaatttgacacgtgaaacatagagagatagagattgaggcatcatcactgatcttccaattccatcgaacttcgcagactcaccctgtcctctgatttggagatggatttgatgacgacgttcttgatgagttccgcttggtcatgagcaacttggttgcagatatgtggcgacacttaagatggtgatcttgctcattattctcttcctggatctcaccaatctctatatcttcaccctga

SEQ ID NO: 12327 - DNA, 460 bp, Glycine max
  Clone ID: jC-gmfl02220139e12a1
ctcgagccgtcgttgactttttcggttagggtgagaaggcgcttaccgggttttcttcaatcggtgaaccttaagtacgtgaaattgggttaccattatctgataaaccatggcatatacttgttcaccataccggttcttctcgtggtgtttagtgctgaggttggaagcctcagcaaagaggacctatggaagaagctttgggaagacgcgcgttacgaccttgctacggttcttgcttcctttggggtcttcgttttcaccttgtctgtctacttcatgtcgaggccacgtcccatttacctcattgattttgcatgttataaacccgatgatgaactcaaggtgtcaagggagcagttgatggaggtagcaagaaaatcaggcaagttcgacgaggcgagtctggagttccagaagaagatgctgatgtccttcggaatcggcgacgagacctaca

SEQ ID NO: 12328 - DNA, 566 bp, Glycine max
  Clone ID: jC-gmfl02220139e12d1
tccttttttttttttttttttttttaaatttggatgtatccatatgcctaatgaggaattgaaagtgtagaatttcaagccaggaataattaaatgagaaagaaacagaaaacagatgtaacatttttgaagaccaaattagtactacccttattgatcctaaccataccctcactgataataagattcataacactagtgccgtcaaattctgcttcagttgttgagaggtgcaggatatctgttgatgcaatcaagccaagggttcctagaaggcttggtgactcggcgcatggcgcgccaaaccacactgttgcacttgaagccagagccaaatgcgagttgccaaacacggtctcctcttctaacactctcttttgcttccatgtaagccaactcataccaaatgctgctgctagaggtgttgccaaagcgatgcagcgtcattctagacgcttcgatgttcttgtcactcagttccaagttcctttgaagctcatcaagaatggtcttgcttgcagcatgcacacaaaagtgctcaaaagctagtttgtagtcaggaatgt

SEQ ID NO: 12329 - DNA, 298 bp, Glycine max
  Clone ID: jC-gmfl02220139f01a1
cagaaaccaattacaaattacactctttgccttttacgttcaacttaaccttttctgctcataatcgtaacaacttgctagaagaagataaagaaagagaaaaagtgtgtgtgtgtgagagagagcaatggctggctcgtgggcacgccgttctctgattgatctggctatcatttccttcggatgtttatttgcaatttccattgctaaggaggaagccacaaaattggggacggtcatagggatcgatcttggaacgacctatttatgcgttggtgtttacaagaacgggcatgtt

SEQ ID NO: 12330 - DNA, 299 bp, Glycine max
  Clone ID: jC-gmfl02220139f01d1
acattcagctttagaagccccgacgaaaacctaagcgaaaaagggaagcacaagtaaccccacaaagaatcttatcatcgccaccaaaaaagcaagcgcaggggacccctaaattcccagctatcataaaaatttaacagactccgactaatctagagctcatcgcgagaatcgccctcgtcttcttcgcctgatgcaccaccaccgcctggggctcctccagatctctgatacacagcactaatgatggggttgcaaacggcttcaaccaccttcagctcctcttcataatcgtcttt

SEQ ID NO: 12331 - DNA, 443 bp, Glycine max
  Clone ID: jC-gmfl02220139f02a1
agggtcgtgaagaaccccaaaagattctttcgtttcactgcaaatctctccaagaggggcgaagctgctgctatgcgtcgtaccaatcaggagaagatcagggttgcagttttggtttccaaagcagcacttcaatttatcctaggtgtgcaactaagcgattacaaagtgccagaggaagttgaagatgcaggttttgaaatctgcggcgatgaattggggtctattgttgaaggccatgatgtaaagaagttcagacatcatggtggggttaatggcattgctgagaagctttctacatcaaccactgaggggcttaacaatgataccgagttactgaataggagacagcagatatatggaatcaacaaattcactgaaagtgcagctacaagtttctgggtttttgtttgggaagcctttcaagacatgactctgatgat

SEQ ID NO: 12332 - DNA, 158 bp, Glycine max
  unsure (1)..(158): unsure at all n locations
  Clone ID: jC-gmfl02220139f02d1
gattatagatttataatgacacngataaanataaagggggaagggaactgaggaaggctcgnaatttacttatttacagcaagtcatcaatcattctgctatcctagaaaataaacaacgtattaaataaaatggttaaatggntaatgctagtcaaa

SEQ ID NO: 12333 - DNA, 137 bp, Glycine max
  Clone ID: jC-gmfl02220139f03a1
gacaaatttgcccccgatgcaaacagtaaggttttgccagcatctgccatccctgagggctggatgggattggatattggtccagattctgttaaatcattcagtgaagcattggatactacccaaaccatcatatg

SEQ ID NO: 12334 - DNA, 463 bp, Glycine max
  unsure (1)..(463): unsure at all n locations
  Clone ID: jC-gmfl02220139f03d1
cgtttatggtaaaaaaangganaaaanannagtgaacacggacaagaatacttagttagcaatgctngttgcatgcatacgcccgaagaccagcaaactantcgggggccgcccctttcaaatttggatgttaaaagtttcgggccccaactaaaagaaacggggcaatgggtgggtctcactcagggttcacagatacacgcaatatatgagtgaagccaacaataactaaagcatgatacaatgaacactaacacactccgaagggtgctacaacaaatgctggaacacaagatggacaacacccaaatctgagggagggaaaagttaacgagctgaaaattgacgtacacggcaactgggacggctgaatcgagagcaaggactcctgaaagctgtttgccttccaataactccaaactggcaccaccaccggaagagggggggatcatgaccctagcaa

SEQ ID NO: 12335 - DNA, 440 bp, Glycine max
  unsure (1)..(440): unsure at all n locations
  Clone ID: jC-gmfl02220139f04a1
caaaaacacagagattagaattcattttagaagtttatcaaggcaaagaagaataatggaagtatgaaaatggcaagccaaaaatgtatggaaatggaaggagaaatcaagagcttaatgaaggtatggatttcaatcctagcctccctatgttactgttatttcatatcatcaagggtacccaaaggcttgttgaggtttttgaccctctccccagtgttgtacctattcaccatcctacctcttcaactcaccactgtcctcccaacaggtgtcactgccttcttcatcacttggctcaccaacttcaaactcctcctcttcactttntgattgggccctctcacaccaaactcaaactcccttcttcacttcctctcttttgcatgcctcccaattagactaacccccttaaattcaaatcaaaatcaaaatcaaaa

SEQ ID NO: 12336 - DNA, 314 bp, Glycine max
  Clone ID: jC-gmfl02220139f04d1
ataatggaaaatttgacataagggaaacaggtaatgttcaatgaaatgggactagtaaaattttcccatcacacactcaactacatcgttgaactccttgatggttctctcatctgtgccatcatgcatcaacggtggaaagaagagccacgcggcggtgactatcacaaacgccaccgtaatgggcccacacaaggcccaatgcagtctccatttagcgcccaaccactttaccgcaccaaacttcgcaacggcacacaccccatggagcaaaaagaagcacgtgacctcccacgtgggactaacacgtgtga

SEQ ID NO: 12337 - DNA, 307 bp, Glycine max
  Clone ID: jC-gmfl02220139f05a1
ggaaaacgcatacacaaatctactttttcgcatttgatcgagaaatagacgagaaagggaagtggcttcacagaagatagacatgccgcgggaaatgtgagtgataactccatcttgaacacagtggaggcgacttggatacgctcaactagtacatgaaaattttttctgaccagggacgaatatactgataacaggaactcgaaggttcatactgcttgtatgctgactacattgaagactaataacagccgtgctgcttgtgagcagatgccacatatacttgcaactgtgggagaacaaactt

SEQ ID NO: 12338 - DNA, 140 bp, Glycine max
  Clone ID: jC-gmfl02220139f05d1
aaaaccaaaaaaggcaaaaaggggaacgggggaacttacaaacactcaagccacaaaaatccactaagaacaaaaaaaacccacacacgaacctggtgaactgcacccaaaacacaccccgatcccaatccctgtagtaa

SEQ ID NO: 12339 - DNA, 129 bp, Glycine max
  Clone ID: jC-gmfl02220139f06a1
gaaacaggcaaagaaaaaacaacaatttcgcgctgacgagagcaacaaacgggaaggggaagggggagaaccgaaacgggaccgcccgcaaagaacaaggccaaagccacaaagtcaaccgctctggca

SEQ ID NO: 12340 - DNA, 207 bp, Glycine max
  Clone ID: jC-gmfl02220139f06d1
aacaccaaaatataccaaaagggggacgggggaaactcaaaaccgttaagccgcaaacaacaaaaaacccaaaaaccccaccacaaccgaccaggggtagaagaggcaaagaccgtccctattagcacaccctttgggaggacgcgttagtgatgtcttttctgaagagccccctcaggggcaaactgagcgacacccccctgggag

SEQ ID NO: 12341 - DNA, 281 bp, Glycine max
  Clone ID: jC-gmfl02220139f07a1
gaaaaaggaaaagaaaaaaaaacattttagcacttaagacagcaaaaaacggaaagggggagggggagaaccgaaaagagaccgaccgcaaagaacaagagaaaaccaacaaagtcaaccactctcgaagagaggaggatatggacaagaacgagaggaacgctaaagcaacccaggcaggaacagacacccaagtggaggccgaagcccaaaacagacgaaacgcggacaaaagtgaagaagaacagcggtcatgcagattaggaacggatacaaaatta

SEQ ID NO: 12342 - DNA, 221 bp, Glycine max
  Clone ID: jC-gmfl02220139f07d1
aaccccagacgaaaccaaaaaggggaaggggacaacacaagacagaaaagccccaaaccaccacaaaccggaggacacgaccgcaaccaacaagaactagacagatggaggacccgcccctaagagcagtgccaacgggggcggaaccaaacacaagcaccaacacaacagccccaccaggggcaaggtcgaggcaaacccccggggggaaccacccgacc

SEQ ID NO: 12343 - DNA, 162 bp, Glycine max
  Clone ID: jC-gmfl02220139f08a1
gaaacaggcatagacaaaagaacattttcgcatttacgacagcaacaaccgggaaggggaagggggggcaccgaaaccggaccgcccgcgaagaacatggccaaggcaacaacgttaaccccactagcagtgagccggatatggaaaggtccgggaggaacc

SEQ ID NO: 12344 - DNA, 230 bp, Glycine max
  unsure (1)..(230): unsure at all n locations
  Clone ID: jC-gmfl02220139f08d1
tatttccacctttctggtttaaacctttcaaaacacaaaaacccaaaagggggacagggggaaaaacagacccgacaaaccacaaaaaaaccaangacaggaaagcagaccacaaccgaacgagccnggangaacacaacaaccggaaaaacaccacacccaaagcgagcaagggacaaagaggcgaccaaaaaaacagccgacaaacgggaaagcccagaaaaacgcca

SEQ ID NO: 12345 - DNA, 163 bp, Glycine max
  unsure (1)..(163): unsure at all n locations
  Clone ID: jC-gmfl02220139f09a1
gaaacaggctttgacaaaagaactttttcgcactttcgcgagcaacaaccgggaaggggaagggggggcaccgaaaccggacctcccgcgttgaacgtggcctagcccaccacgttaaccgctctggcagtgnnccggatttgctcaaaaccggaacgaaccc

SEQ ID NO: 12346 - DNA, 200 bp, Glycine max
  unsure (1)..(200): unsure at all n locations
  Clone ID: jC-gmfl02220139f09d1
aacaccaaannaaacccaaaggggaacgggggaaacacaaaaccgcaaacccgccaacaaccaaaaacaaccaaaccccaccaaaaccgaacaagcgaagaagagagagaaagagcccccagcagcacaacctgcgtctagaagcgaaaaggatgcattgcccgaccacccccaccatggccaaacagacgcaaaacccc

SEQ ID NO: 12347 - DNA, 218 bp, Glycine max
  Clone ID: jC-gmfl02220139f10a1
gaaacaggcaaagacaaaagaacatttacgcattaaagacagcaacaaccgggaaggggaagggggggcaccgaaacgagaccgcccgcacagaacaagaccaaaccaacaacatcaacagcactggcagagggccggacatgcacaggaccggaacgaacgctattgcaacacaagcaggaacagacacgaaagtggaggaccaagcaccagaccga

SEQ ID NO: 12348 - DNA, 176 bp, Glycine max
  Clone ID: jC-gmfl02220139f10d1
aacaccaaattaaacaaaagggggaacggggacaacacaaaaccgcaaacccgcaaacacccaaaaaccacaaaaccccaccacacccaaccaggggtaggaagtggaatgaccctcccaatcagcacaaccattggtaagaagcgacagacaagcttttcccaaccacccccacc

SEQ ID NO: 12349 - DNA, 364 bp, Glycine max
  Clone ID: jC-gmfl02220139f11a1
attttgaccattatggttgtaatattagtctttatctttattatccagggtcctggtggtgttactgtgaagaagaccggtgcggccttgatcattggcatttatgatgaaccaatgactccaggtcaatgcaacatggtagttgaaaggcttggcgattatctcattgatcagggtctctaatctttgctttatgtcttgttatcgtgcatatttcattggcttctgtacaagtttttgcatcgacctggactggaatgctttgattgcagtgtaataatcttgttgtgagtatgaaaagtcacgggatctgcgtgtagtgagaaagtgtttgatgcttgagaaatgatgactataatctcta

SEQ ID NO: 12350 - DNA, 360 bp, Glycine max
  Clone ID: jC-gmfl02220139f11d1
aaaaaaaaccccccctttcaaagaaaagaataacaaattagagccgaccatcgaactccagatcgccccgaaaaactacgatccacagaaggacaagcgtctcagtggctctgacaagctgccccacatccctcgccccaagatcccaatttgcatgcttggcgaagctcagcatgtcccaagaggcaagagaagataggactggactggatggaaaaggaagccctgaagaagctaaacaaaaatcaaaaaccggagaaaaaactaactttaaagccccatgccatggtaacaactgaaacagtttttaaacacaatggtggaattcccgggactgatgggaacaaagaaaaagcccat

SEQ ID NO: 12351 - DNA, 381 bp, Glycine max
  Clone ID: jC-gmfl02220139f12a1
gtgggccccttcgaggattttacatttagtatgatccaaaaggaacatcgccatctgggtctggctctgctgaagaccagcaccatctgagtgatggagaaaatgctaccaccgaagacaactctaaactgtatggagatgtgtgacaggaaccaattagaactgcaaaggactcaacaatcctgaatgataacgggacactgacttcactgaatggaaactacaaggcacaagagtcaagtgaaaacgcaagagctgaggataacccacgatggatatcagtggaaaaagggggaagtggacagtgttactccaacttggctaggagaggtgggtctcaatgatatcgaagactatagctgagtatagatgtgttattca

SEQ ID NO: 12352 - DNA, 338 bp, Glycine max
  Clone ID: jC-gmfl02220139f12d1
ccccaaaggcccaaaaccacaaaaccctaaattagcccaaaaatttttaaaaatttggaagggcccccataaccccgtaaaaaactcaacaaaacccaaaaataacccaccccattttaataataaaaccggcccaaactataaacaaacccccaggggtaaaacccaaagccccaactggaaaaggcctaaaaacaaaaggggactaaaacagggggaaaaaaaataaaaaaaaaaggaaattaaaaccccaacaaaatttccaaaaacaaattttaaaaacacctttggaaaaaaaaattcgcaggggaccataaaacccaaaaagccaatgccaa

SEQ ID NO: 12353 - DNA, 464 bp, Glycine max
  unsure (1)..(464): unsure at all n locations
  Clone ID: jC-gmfl02220139g01a1
gttgcgttgtgtgtgccattcccatttccgccatcgctaccgccagcaccaccgatcgctctctcacccaccccaactgatacccgtaacctcttcaccttcctctccttccctaacctaatttaaaactaaaaaaaacacaaacaaataaaacaaatgtcccctaaggttggggcacgtcacccatgcttctgaattagggtttccatttggatttcgctgttctggtgcccaattgagcgacgcaaaagggtaagaggaaagggatgaggattatggtttggggatcggagaatcgtgttcgccatattgctctgtgggaccctctcatgcaccgctcaagctcatcantaatagggtttctctctcctccaccaccgccatctgtcccgctcgcccccttctcgatttcatcttagggttttcagattccacctgctcccttcccaattctcttggatcca

SEQ ID NO: 12354 - DNA, 149 bp, Glycine max
  Clone ID: jC-gmfl02220139g01d1
tcctttttttttttttttgatttaaattttttctatagaattatttttgaactgcaaatagggacgcaccaattacatcaacaatgcatccaatcagttttatgtgggatttacaaccatttcagtcccaacaaaaataaatttatgaa

SEQ ID NO: 12355 - DNA, 456 bp, Glycine max
  unsure (1)..(456): unsure at all n locations
  Clone ID: jC-gmfl02220139g02a1
caaaatacttaatagcatggcgatttatttatttaaaacttctaccccaagcacacgcgatggagccgtagacagtcaagtaaaatccaatccacgaaatcatttgatctatggacagcatcgttgtggtaaaggccgtaatgccagaggaatcattaccgcagggcatagagggggaggtcataagcgtctataccgtaaaattgattttcgacggaatgaaaaaaacatatatggtagaatcgtaaccatagaatatgaccctaatcgaaatgcatacatttgtctcatacactatggggatggtgagaaaaaaatatattttacaccccagaggggctataattggagataccattgnttctggtacaagaagttcctataaaaatgggaaatgccctacctttgaccgatatgcccttaagcacggcaatacataacatagaaatcacactc

SEQ ID NO: 12356 - DNA, 179 bp, Glycine max
  Clone ID: jC-gmfl02220139g03a1
caagatgcttagcaaccgcatatgtttgaggagagctttgatctccgcccggacctgattttctggctctgcttctcactcttcatcatcttcccatgcgatctcgcttcgcttcgccaaagctaatgctccttcttcttcacatgtcattttcaattttgcacgtgtggacagatatt

SEQ ID NO: 12357 - DNA, 436 bp, Glycine max
  Clone ID: jC-gmfl02220139g03d1
atcatgataaaaattcacagcggatttggatcaattttaaatgcttttgttctatttctcattggaatcaatatagtgattaaccatctaaattacaatttcaacaattcttccttcatgtaatgaaaatttcatttcaaatgcagcgtgaggagctcgggattatcaattaattgcttccactcgttgcaaaatcttgcaacggttgctccgtccaagactctgtgatctgcaccaatattaacattcacgagggatgcaggatacacatttccattatcagcaaaccgtggaactttctgaattctaccaacggcaataatggagacttcaggcagattgataaggggggaaccaaactttccacctattgctccaatgttgcttaaagtgatagtaccaccacacatatcctcagaagttaacttgctatttg

SEQ ID NO: 12358 - DNA, 137 bp, Glycine max
  Clone ID: jC-gmfl02220139g04d1
cgtcctttttttttttttttggcttaaagattttatatacatacatttcatcaaagggctaggggtatcatccaatgctttacagaggaagttttctgggatgtccaacggaaaatgatattttgggaaaactagca

SEQ ID NO: 12359 - DNA, 353 bp, Glycine max
  Clone ID: jC-gmfl02220139g05a1
cactcataacacaaagcacaaagcatagctcattcttgagttaaaaaatggcagcagcttcttccatggctctctcatccccatccttggctggcaaggccgtgaagctgggcccatcagccccagaagtgggaagggtgagcatgaggaagaccgtcaccaagcaggtctcctcaggaagcccatggtacgggccagaccgagtcaagtacttgggcccattctctggcgagcccccgtcctacctaaccggtgagttcccaggcgactacggctgggacactgctgggctttccgcagacccagaaaccttcgccaagaaccgtgaactcgaagtgatccactccaagtgg

SEQ ID NO: 12360 - DNA, 373 bp, Glycine max
  Clone ID: jC-gmfl02220139g05d1
aaagcatgtaacaccaagcaggatacggacgcacaaggggattcacattatcagaagtactccaccaaacacaaatctaaaaactctcaaaagtcatttcgttctttgacgcacacttaccggggacgaagatggtggcataggcccaggcgttgcagctgacaggggcagcaaggtgatcggcgaggttctccaatggaccctatccggtgacaatggcctgaacaaagacgccaaacatagagaacatggccaatcgaccgttcttgagttccttcaccttaagctaaacaaaagcctgtgggtcatcagcaaggcccaacgggtcgaaactgccacctgggaagagaggggcagtgacctcaccgagggg

SEQ ID NO: 12361 - DNA, 489 bp, Glycine max
  unsure (1)..(489): unsure at all n locations
  Clone ID: jC-gmfl02220139g06a1
cgacaacgctatcaaaaaccactggtactccaccttgaagcgcaagtgctcttcaacgatgatcgacgacaacacccaaccgctgaaaagatccgtgagtgccggcgcggctattccagtctctactggactctacatgaacccgcccacaccgggtagtccctccggatccgatgtgagcgagttcagcttaccgggnggannnnnannnnnngngnnnnnnnnnnnnnnnnnnnactggcaaggttataccacccgtagaaaccacgttgtccttcaatgacccttcaactttactttctctatcactccccggtgttggagttggtgactcatccgaagtctccaatcggacaactgagccgattcattgtacaccgtcaatgccacatcggtcgaatactatgcctttgctgccaatgatgacgttcggttttagcgacggtgatggcgccgtttaattgtagcgcatagattcggtcggtgatg

SEQ ID NO: 12362 - DNA, 278 bp, Glycine max
  unsure (1)..(278): unsure at all n locations
  Clone ID: jC-gmfl02220139g06d1
aaccccaagnnggaaaaaaaaggaaaaggggacaacataaatttcagattctatctaaagggcaaaaacaccaatctatccccctctttcttccgaataccattctccttcggagcgagcgagttatggcccacgggacataaaccataattattgcctaaaaacattgattaaaaataaaaaagaacagggaaaaaaacagatccttgttatttttttcccattaggaggagcaaaagaacaatcttttttccgatgatgctttttaccaataaacc

SEQ ID NO: 12363 - DNA, 273 bp, Glycine max
  Clone ID: jC-gmfl02220139g07a1
cagggttaatgcatttccttttgccttttcaatttttgaagttgattattgtggaaggggtattgatttgatcgattatcttttgttttgtgtttgtcgactttgaagaataccatgacaaatgtcatgaatctttcgtgtcaaatatttttagcttcagatcgagacatgtgtttgttatatcgcaaatcttatactcaggaagaacagctagtgtgactaattgtacttttgaataaaagacataataagaacagtgcataatgttatcgg

SEQ ID NO: 12364 - DNA, 262 bp, Glycine max
  Clone ID: jC-gmfl02220139g07d1
atgcactgttcttattatgtggggtattcggaggtacaattagtcacactagctgttcttcctgagtataagatttgcgatataacaaacacatgtctcgatctgaagctaaaaatatttgacacgaaagattcatgacatttgtcatggtattcttcaaagtcgacaaacacaaaacaaaagataatcgatcaaatcaataccccttccacaataatcaacttcaaaaattgaaaaggcaaaaggaaatgcattaaccctg

SEQ ID NO: 12365 - DNA, 363 bp, Glycine max
  Clone ID: jC-gmfl02220139g08a1
ctgatgcatatgatgactttgctgttgaaagatataactatgagcagacagagccagcaacatataacaatgctcctcttattggtattctggcaagactaggtggaggtcatggtggctataaccagcttcttccagttgttgttccagctcctaagcctgctgttaccaagcctcaaccaacccccagtcccaagacaactccttctccagcttcatggtcaggcccaatttccattgaacagaaaaggaccacctcatgggttgccaatggaaaaacttattacagatactcaacagtcgtgactaacaaatctaacaagagtctcaattctctcaatctttcaatatccaagctttatg

SEQ ID NO: 12366 - DNA, 291 bp, Glycine max
  Clone ID: jC-gmfl02220139g08d1
tattatggaaattcggtttcaccgccttgcacaaaaacataatacgagggggcacacgcgggaactatgtagggaaaaccaaacgctacaccgcttacaacatccaacacagaaaagacatgcaacgctgttgaaaaagacaggtgaggactcttctctgaaatattgagaagttcaccttgttttttttaacttctgaacaacactggatcactacccggatcgtaacacccactgcataaaagacgcaaagcggaaaagaaagagggagagccccgcctctaggatgtt

SEQ ID NO: 12367 - DNA, 259 bp, Glycine max
  unsure (1)..(259): unsure at all n locations
  Clone ID: jC-gmfl02220139g09a1
ctggtgcatggtgcgaccacactgtttaaggtttccagggagcacagaggcaggggcagggctgggaggtcataggctgcaatattgtacagatctaccagttactgggatgagtacgtttggggaggggccccggnggttcttttgttacggaagaacattgtaccttaaatttgctacggcttctgagctggtcaagcatgctggagccttctggggaggccctgattattgagaactcagacgggataacaagacg

SEQ ID NO: 12368 - DNA, 314 bp, Glycine max
  Clone ID: jC-gmfl02220139g09d1
aaggcattagatgaaactgtcgggcaatggggagctgttcagtttttcatgtgtaaagaatacacgatttgatttaaatacatatatactatatgtgaatgacaaaaatttaaagagacacactctcaagtaccacttaatcaattctgaatgctaaatcttgagtcgaacattggccccaggcagctatattcaggggggcaagctccattgcttctatttctcaaagctttgtttctgcaaaattaccttgatctttcagttgagacaaaacaacgaaggttaccggtgcactcaaatcatatgggatactt

SEQ ID NO: 12369 - DNA, 269 bp, Glycine max
  Clone ID: jC-gmfl02220139g10a1
gagaaacgcaaagaagaaagaaccttttagcatttacgccagcaacaaccgaaaaggggaagggggagaacagaaacggaaccccccgcaaagaacatgggaaaaggaacaaaatcaacagctctagcagtgggcaggatctggtcagaaccggaacgaacactactgcgaacacaagaaggaacaggctcccaattggcggaccacgcccaaaactaacgagaacgtgactacaatgaagaagaacagaggacgggcacagtgggaac

SEQ ID NO: 12370 - DNA, 312 bp, Glycine max
  unsure (1)..(312): unsure at all n locations
  Clone ID: jC-gmfl02220139g11a1
acatacatcatcaactgatatataattctagatttcttgcagtctattattagagagaagaattgagttggaagaacccagaaaaagaaacaaaaaataaataaaacgatgtggtggccattcancacaaatggaacttttgggntttcatcatattctactgccgaggaagttactcatggaatcgatggaagtggtctcactgctattgttacaggagcatctagtggtcttggtgctgagactgctcgtgtccttgctttgggtggtgtccatgtgattatgggggtgatagatatgattggtgcaaaa

SEQ ID NO: 12371 - DNA, 610 bp, Glycine max
  Clone ID: jC-gmfl02220139g11d1
tcctttttttttttttttctcttaaaaattttaacttcatatagattaacttaataacaggcacaatatgatcattggcatttttattctctaatacagtattccatttacattgacaattatcattatgcattttacttagtcaaatttatgctaaaatcccacaacttcttggccaaattcatgtcccttccatgtgagtatacttctgcaagattattatcttcaaaatacttgccgctgattccactcacttgtgggtgcaaggctacataacatgttgttgatgctccttgctgcacattttttgccatatatcccaatatcttctcgagtccaaatagccatgctattttgtgtaaaccatttaataaaccactatgaatgtgaatattggtggaaacagtggctcctggatgaacagaattagcagtaatatctattccatcttccttgagacgtcttgcgagttcattggcatgtaaaatgttagcaagctttgattggccatatgcacaccaattgttgtaacttgattggtcgttaattttgtcaaaaatgattccttcacgatacgtgaatcgataaccattgaggagacattaataat

SEQ ID NO: 12372 - DNA, 576 bp, Glycine max
  unsure (1)..(576): unsure at all n locations
  Clone ID: jC-gmfl02220139g12a1
gttcaaagatccatgtgttgctgctttattttgatgtcacaaaagaccggaactgggctcgaggcattagaagtcccaaattccccggcgttccctatactttcttctcacagaggcaaggatgtaaggtatctctgtaccaagatgctcatgtacctgataattttgtacctaacatacctcttgctggaggcaagaattatgaggctcataggtgttgggaggatatatttgatgcaatcactaatgctagacacttcatatacattactggttggtctgtttatactgaaatttccttggtgagggattctaggaggccaaagcctgggggagaccaaacacttggtgagcttctcaagaaaaggcaaatgatggggttaaggtattgatgcttggttgggatgatagacatcagttgggttgttgaaaaaagatggactaatggctactcacgatgaagaaactgcacagttctttgagggcctgaggtgcatngtgttttatgcccccgcaatcctgatgatggtggtagcattgctcaggatttacaaatntctaccatgttactcatca

SEQ ID NO: 12373 - DNA, 598 bp, Glycine max
  Clone ID: jC-gmfl02220139g12d1
tccttttttttttttttttttttttggggtagaatttgaaacattgattagaaaccagtgggagccggacccaccaacaacatcagataactaaaatctgtcactgaaatcttcagaaaaatagcagaaaaaacatcttcacaagacatcacagactatattaagattattactaagtagtaatgaaaacacagattaggatgtaagcaataacaagtttgtaacaaagtacaaaatcaaattaagtagtgagaataggggggaggtagtcagctttgccaccaagaatgcgagccttggtgtcgggaaagaattcaaatcctggcagctcggtgacatcttcttcactggcaaccccgatggggtagcggagaaggtgaccgggaaggtcatgctcaagtgactcggtagaatacagatcccaacatttgtcagcaacttggttcaccttgttaatgcattcatcactttctggctggaggaaagagtcatgaagcatgccaaggtgctcataccacaatgacatgcggaaaccgtgaatttgaccacgtgctggctgcctggtagccaaatgatagggctgataagcacccatggg

SEQ ID NO: 12374 - DNA, 469 bp, Glycine max
  unsure (1)..(469): unsure at all n locations
  Clone ID: jC-gmfl02220139h01a1
gggtgcggtgctgggaatatggcgtttgcgatttagggttccgttagtgttgaaactgaacaatattgatgttaccatggtctacccggagccttggtgtatgccacgactttttacggctggtatagctgaattctatgagggatattacgcaaataagggtgtaaatatcattaaaggaactgttgctgttggattcacttctaattctgatggagaggtaaaagaagtcaaactaaaggatggcagggtcctggaagctgatattgttgttgttggtgttggaggaaggcctcaaacagtcttagtcaaaggcangtntgaagaggagaagggtggaatcaagaccgatgctttcttcaaaactaatctctccgatgtatatgctggtgggggatggtgctactttccctttgaaatatacgggtgaatgagaagaagtgacatgttgatcattctcgcaaatcgc

SEQ ID NO: 12375 - DNA, 77 bp, Glycine max
  Clone ID: jC-gmfl02220139h01d1
aaaaccccggaaaacaaaaaaatattttataaaaaatccccggccaccccaaaaaaagaaaaaacccggttttggct

SEQ ID NO: 12376 - DNA, 339 bp, Glycine max
  Clone ID: jC-gmfl02220139h02a1
cttctactttcacctaaaccaagcacttgttgatgtagcttcggagcccactactgagaagccgattctcgttcttggtatcaatcacttaagttattttgggatcatgttggagcatgttttggctaaaatcatttcacgcaacaacagactgatatatctctaagaaggaacttagcaaaacaaaatgcataaatgtttaattttttcttaggataaattacgctgacacttcctgagatttttttaaattgcacataatctccctgcttttttaatttttacaacagccttccttttttttcaaacagataaaggggtgtagtgtaatatataaag

SEQ ID NO: 12377 - DNA, 390 bp, Glycine max
  unsure (1)..(390): unsure at all n locations
  Clone ID: jC-gmfl02220139h02d1
tnntatanantttttcaatctggaaattaaagagggatataattcaaccgggattcaaggaataaactacgtatcacattttcaagtgggttaatgacttaacgataagcatcaatcgacattctacaagataaaatcatttcctggcctccacactcgaacaagtttggcgtagaatgagcaagtagccaccagtggctcggtattctcacctatgcgaattgcttatcctttctgccaaactgctccataggcaagagaaacatgctacttgcaagtttacgacacggcggaattgccgcctataatggcgacaatagcaaaaccattgcgcatacaagcagacaaaaccaagcctggaatgaaggggtggtggctaacccttcaaac

SEQ ID NO: 12378 - DNA, 386 bp, Glycine max
  unsure (1)..(386): unsure at all n locations
  Clone ID: jC-gmfl02220139h03a1
aaggacttcaacagggccacagcaattgcatcctgagttctacagatgggtttggttgtaggattggcacttgcattcattcttggaacaggattgcactttggtgctaaaatatttacacaagatgctaatgtcctccacctcattcaaattgggatcccgtttattgcagtcactcaacccctgaattctttagcatttgtatttgatggtgtcaactttggggcatctgattttgcatattcagccttctccatggttgtggtggcaattcttagcatcatttctctgcttattttgtcatccgctggtggtttcattggaatttgggttgctttgaccatctnatatgggtcttaaggcatttgctggcttcttgagaattg

SEQ ID NO: 12379 - DNA, 325 bp, Glycine max
  Clone ID: jC-gmfl02220139h03d1
cgggccctataagggggccgaggtaaatttttcaaccaaatcccccaagcccaatcaagcggggggaatggcctagtttttcaaaaaaatttttcaagcgatttaacaacccagggggggcttatctcactttaagggaaacagcaaaccccactgaaacctgggcctaatgtgaacctataatttgggggtaggccatgggcacccatgagctccttaaaaactcccaagggcctgaacccgttccaattctaaagaagccgggaaatgccctaagacccatatggaggggcaaaggaacccaaattccaagggaaccaccccc

SEQ ID NO: 12380 - DNA, 343 bp, Glycine max
  Clone ID: jC-gmfl02220139h04a1
agatcatcgatacgctggtgggcctttccctgttggacgaggtgatgaagatcacgccggttcagaagcagacccgggccgggcagagaacccgtttcaaggccttcgtggtcgtcggcgacaacaacggccacgtgggtctaggcgtgaagtgcagcaaggaagtggccaccgcaattcgtggcgcgattattctcgcgaagctttcggttattcccgtgaggaggggttactgggggaacaagattgggaagccccacaccgttccgtgcaaggttaccgggaagtgtgggtccgttaccgttaggatggttcccgcgcctaagggttccggtattgtggc

SEQ ID NO: 12381 - DNA, 133 bp, Glycine max
  Clone ID: jC-gmfl02220139h04d1
agccaattaaattaaaactggggggaatggggatccatacagagacataccaccgtctatcaaaaccaaaagtaaagcacagaaccaacaaaggtaaataacaatgtctctaaaacatccataaaaccaaaac

SEQ ID NO: 12382 - DNA, 143 bp, Glycine max
  Clone ID: jC-gmfl02220139h05a1
ggttgaatagatctcggttcatatgtttctcatttttctctggtttttggcaaaattggtcggatggattcaatttctctctgtgtaaatacttcaacttttccaattctcaccttcgcatgttgattcgtagtcagattttt

SEQ ID NO: 12383 - DNA, 402 bp, Glycine max
  unsure (1)..(402): unsure at all n locations
  Clone ID: jC-gmfl02220139h05d1
ttntttnnnntttttgtgtttactatttttngcccccttcatttactctaggcggaggggaattattccattacaaaaaaacatcgctatttccactcttccgttactgctttgtagctttcccctcattgtcttcctttataagaaaaggttaaaataaaaatgaattgaaaaaaaaaaaagctgttattgattcctgacagaatatttcatgaatcatcctgcatattccagatttacaagccgaaaattatgtacagttacgaaaaaaactggcaggaagcacagcagcagaactatcatctcaagccaactctgctgaagatgagcatgtgtaagcccacaccatcaaatatgaagcattttgcattttagcgccttcattgctgcttttgcaaacac

SEQ ID NO: 12384 - DNA, 415 bp, Glycine max
  Clone ID: jC-gmfl02220139h06a1
aatctctgacctcttcttcacatctttctccattaatacccttccctctctctcccatggagttgatctacctactctatctggttccaacgttgtacgcgtgtttcctcatatggaagatgttggacgagagaagggacagggagtgttacatcttaaactaccaatgctacaagccccccaacgacagaatgctcggcaccgagttctgtggcaagcttatcagacgcaccgaaaacctgggccccagcgagtaccgctttctcctcaaagccatcgtcagctccggcatcggcgaacaaacgtacgccccaagaaacatcttcgagggccgcgaggccactcccacgttgcgcgacagcatacgagaaatggagggagttctttcacgacagcattggaaaactcctcgcga

SEQ ID NO: 12385 - DNA, 364 bp, Glycine max
  Clone ID: jC-gmfl02220139h06d1
atgcaagtatataataattaattaaaacccatgatctggggaacaagagctaaccaaaacaattacagatatttttgtcgttttctttttgtcagaaaaaaaagaagaaactcgttattataacacatttaaacaaataatgcaaaccaaagttaaaaaaaaaaaaccataatacgtacccttttgacggtgtggcaagaagcagcacacaccttattgggtaatgaaccctagaggcccgggttcaataataataatatataagtgtatagcttacagaaaaatttaatgcacaattacatcgatgcacctggtaagagagatctaaagaatcagaggggcccttcccttttaattttttttt

SEQ ID NO: 12386 - DNA, 384 bp, Glycine max
  Clone ID: jC-gmfl02220139h07a1
atttcaccctgacgcggcctcctttttcttcttctttctcacctcttagtccttttgacttccttcctctttcttcttctccttctcttcttcttccccgcgcaagctatgccgacatttactgcaatagcatttgatagattgatagagcctggagcttcaaaacctgcttataaatctgctccggtgccaatgcctgtcccaaagaagattgagaggcgaactagtgaaccaaccataaggaagaagccccgtcctcgtcctcaattaaagccagcactctatgccactcctgaggtgacaccgcttccggatgcaccctcttcgttccctccttctccgtacatcatcaatcacaaccgccgtggcccacgcctgctgaag

SEQ ID NO: 12387 - DNA, 104 bp, Glycine max
  unsure (1)..(104): unsure at all n locations
  Clone ID: jC-gmfl02220139h07d1
catggcgnataataatttcatggactcaggggtgaacccttccactaatgtactacctagagttacagagaatggcacgtgagagaaattatgcacaaactcaa

SEQ ID NO: 12388 - DNA, 296 bp, Glycine max
  Clone ID: jC-gmfl02220139h08a1
ggctgactcatgacaaacaactctgtattatatttagctgaccagaagcaagtgtagggattgtggcactaactaactaagcatgcttttttttgacaattaactatttgaacgccttacacttgtcttagcattacattgatggacactctccggtggactagaacctgcataatgagcattggcactgtctaagtgggtgccaaaatacattgagcgggggactagagtatcgctgatctagacaaaggctataaaacttcttcggtatgagacaatactggctctatcacctg

SEQ ID NO: 12389 - DNA, 340 bp, Glycine max
  Clone ID: jC-gmfl02220139h08d1
atggcgtattattatttcattggcttaggggtgaacccttccactaatgtactcatctagagttccagtgaatggcacgttagagaaattatgcacatactcaagatgccggaaaattgtaatgatcaagtaagagatatgtaacatgttagccacataatggcacatataacttttattctcctcctctaccataactcggcaatgaagttagtattaattgtatattagttggctgcatcatcatgttcaggaacctgatcatgaacagaaaaagttgatcctctacccacagggagataggaccacgcaatggctgcagtaccaactgcaatggcag

SEQ ID NO: 12390 - DNA, 347 bp, Glycine max
  Clone ID: jC-gmfl02220139h09a1
gcagcacagattagggaaaacggctttgccgccgtagaagaaaacaaccatggtgcgcgtctccttttacaggaactatgggaagacattcaagaagccgcgtcgtccgtacgagaaggagcgtctcgacgcggagttgaagctggttggtgagtacgggcttcggtgcaagagagagctgtggagggtgcagtacgcgctcagccgcatacgcaacaacgcgcggaaccttctcaccctcgacgagaagaacccgcgccggatcttcgagggagaggcgctgctccgaaggatgttccgttacggtctcctcgatgagacacagaacaagcttgattacgttctcg

SEQ ID NO: 12391 - DNA, 305 bp, Glycine max
  Clone ID: jC-gmfl02220139h09d1
tcctttttttttttttttaattaaaagttttaatactttaaaatatctaagtggacaaagggataatgtcactcaatattatctcaaacaaggaacggaaggatgaaaatgtataacaataaaaaaacaataaactaggtacgcaaagtaaaaggtggcataaggtctaatagcactagaaaaagacatgattaaaagtttaatcctcggcttcctcatctccatctccacctgcggccttcttagcagcagccctttgggttcttctcttcactcttccagggcgaccaccaccaaggggactt

SEQ ID NO: 12392 - DNA, 390 bp, Glycine max
  Clone ID: jC-gmfl02220139h10a1
aacgcgattatgaggaattaaagatttacaatttttaacgacgtgggtttcttccagggttaagcatgattagaggaacagagaatgttattttggcggtaatagattagaggctgaatgatgatggatgaatgagtgttagttgcagcaatttgactatcttccgtaagcaaagagcagtagctggaacaaacaacgaacgaacactgtaagcatgaacaagcgccaagaagatgtgcgcaacatagctactaccctcgacttcagattcaatcagaccctcataaatgggcaagggtaacccccaattcttctcttttttctcttttcagatcgaggggttattattgcttcgtcgaggacaattttttccattgtctattttctaac

SEQ ID NO: 12393 - DNA, 264 bp, Glycine max
  Clone ID: jC-gmfl02220139h10d1
tattatggaaatcggattttaacgcttttgaacaaaacacccaaaaagcgggcgccgggccagctgctaagggaacactgacacgaagcacagacggccgaaccagcaggaacggactcgcgctagtgaccaagctgcgcggggagcaccgtgacaaaaggttacaaggaaccgtacaaggagaagtgggcgaaaaaaatcccacgcagcaccacccgctgccccagcaccctcgtcgagaagaacccgcaccggaactgggaa

SEQ ID NO: 12394 - DNA, 372 bp, Glycine max
  Clone ID: jC-gmfl02220139h11a1
ttcagattcagttcctctttgcttttttctccattcaaaacaacagaaccaaactcggaaccaaactcagaaccaaactcgccaaaactagggttttgcattgatggcactgtgcaaccgcgtcagatcgggaatctctctcttcaccaaatccacgttccttacttgccagcgatccagtctccaacgatccctcgttgcccctttcatttccctcgcctccagaaattacgccaacgtgccggggcaaaaggaaaccaaagttaaggtccctctggctttgtttggaggatcaggaaactatgcctctgctttgtatattgcatctgtgaaagccaatgcaatggaaaaggttgagactgagcttctgca

SEQ ID NO: 12395 - DNA, 538 bp, Glycine max
  Clone ID: jC-gmfl02220139h11d1
tccttttttttttttttttggaaagaggtttctattatttgcaaaatgatggcattccatgccataaaaatctacatccacacaatttataatgaacaagaatgtaatacttctttctttaaaccatgataacacagattgtcaggagagattatagtcttctagatgttggcaatggacacgggctctcggaggatcctctccatctgttgtgccctggtcttaattgacatgtcaaagaccttctggctaaattcaagcacaagcccaccaagtatgcttggatcaatcttctgttcaagatgaaccttcgttccagaacctattatttcctgaagagtctccttcaatgccttttcctcttcagggggaagaggaacaacagtggtcacagtcgcttgcacttctcccttatatgccattgacaactgtgcaaatctctttgcaatggtgtctatgtttttaagccttccattctcagcaacaataacaaggaagttctttgtaacatccgaaaacttggctttcccacaaatat

SEQ ID NO: 12396 - DNA, 430 bp, Glycine max
  Clone ID: jC-gmfl02220139h12a1
ttcagatgcatcacctttttgcttttttctccaaacaaaacaacagaaccgaactcggaaccaaactcagaaccaaactcgccaaaactagggttttgcattgatggcactgtgcaaccgggtcagatcgggaatctctctcttaaccaaatccacgttccttacttgccagcgatccagtctccaacgatccctcgatgcccctttcatttccctcgcctgcagaaattacgccaacgtgccggggcaaaaggaaaccaaagttaaggtccctctggctttgtttggaggttcaggaaactatgcctctgctttgtatagtgcatctgtgaaagccaatgcagtggaaaaggttgagactgagcttctgcaatttgttgaggcagtgaagaatagtcccatatagtcacagcatataagggacttgtct

SEQ ID NO: 12397 - DNA, 492 bp, Glycine max
  Clone ID: jC-gmfl02220139h12d1
ggtaagaggtttcttttttttgcaaaatgatggcattccatgccataagaatctacatccacacaatttataatgaacaagaatgtaatacttctttctttaaaccatgataacacagattgtcaggagagattatagtcttctagatgttggcaatggacacgggctctcggaggatcctctccatctgttgtgccctggtcttaattgacatgtcaaagaccttctggctaaattcaagcacaagcccaccaagtatgcttggatcaatcttctgttcaagatgaaccttcgctccagaacctattatttcctgaagagtctccttcaatgccttttgctcttcaaggggaagaggaacaacagtggtcacagtcgcttgcacttctaccttatatgccattgacaactgtgcaaatctttttgcaatggggtctatgcttttaagccttccattctcagcaacaattacaagggaagttctttggaaca

SEQ ID NO: 12398 - DNA, 416 bp, Glycine max
  Clone ID: jC-gmfl02220140a01d1
atgtctgtcagattctatcgggaaatcatttggaatatatttcccggctactcgtcggcggccgcccttttttttttttttttttttttttttttttttttttttttttttttttagctgaaataggcatattcataaattttacacaaagggttgtcatcatggccccttacaacaacaaagtactacatctaactattctttaaaaatctaacacgatgattcaaaggaccccctgttgtcagcaggagaacttaaattctctcttgcacaacaaccaagccccctaaaccaaaacaattcccacctaaacacaaactttaaaacatggtagacaattaattagcttctatattacataatcagaccttgaaatattggcccccatggaaaaactaggcatcttatccaattta

SEQ ID NO: 12399 - DNA, 526 bp, Glycine max
  Clone ID: jC-gmfl02220140a02d1
caaattatgttcctgatttccttaattctcaagagtcgggaggcagcaatagaaggcaaatgtttcctaaaaactcaactgtaaaaccagtaaaaatgtaacaaggaattttcatcctcaatgaccaatagaatttttgaaaaagaaaatcacatttcttcaacaaacgacagtcataactcttcctcgtagtagccatctagttccttggtttattgatacaatagctgaatagcaatggatttccttgtagcaggccatactagattattaagaccaaagttaagaatcagcgccagtgagtgctatcaattcaacctgcaaacttggtttatatctgattcaatgtttagcattgaccatgtttctgatgacatattgtaagatgcctccatggttgaagtaagctagttcaacctctgtatcaaatctcagtgtagatacaaatgatttcccggcatctgtcaccactgtgacatcttggccgggtcgtatttcattcacattgcttggtagatcaatggtg

SEQ ID NO: 12400 - DNA, 239 bp, Glycine max
  Clone ID: jC-gmfl02220140a03d1
cttgggcaccatggaataaaacaaaaaacaaaaaccaaaaaaaaacaaaaaaacaaaaaaaaaaataaaccagcaacaacaaccagagcaaaaaaccacaacacaaaagaccaaaaccacggaacccaagaaaggacaggtacgccgcctcaaaacaccgaatggacacccaaagaatggcccccaaactgccaccaccaaacgagcacaaccgactggatccaaaccacgtgcaaaac

SEQ ID NO: 12401 - DNA, 397 bp, Glycine max
  Clone ID: jC-gmfl02220140a05d1
aaacgagtgacttcatcgcatgtatcatgcgtgcataaagtacaccaagtgtccatcataaggtctagctattaccatacacgatatcaatccatgacaatttcatagcccaacatcaacgacttatacttcagaactcagcctaaaagatctttgtttagctccacattcaacacctaccacctatttacattctacaactgaatgcagctcaactgctatcactcagaattatacgtttgctctcgctggctcctggcatctgctatcttggattctgtacgtccaatctcctcttatcacaggagccttccttctgcctcaagacggatcggaaaagaggagagttaacatgggtctatgcatggccgtatactgatcgctaagatgaaaccct

SEQ ID NO: 12402 - DNA, 258 bp, Glycine max
  Clone ID: jC-gmfl02220140a06d1
aaacgattgacttcattgcaggagtaatgcgtgcataaagtacacctagtgtacattataaggactagttataaccatacacaagatcaaacaatgacaatttcaacgcccaccatcgccgacatatacttcagaactcagcctaaaagatcttagtttagcaccacattcaacacctaccaactatttacattctacaactgattgcagatcagctgctatcactcaggaaattataggtccgatctcgctggcttc

SEQ ID NO: 12403 - DNA, 399 bp, Glycine max
  Clone ID: jC-gmfl02220140a07d1
attcataatttaaacgttttacttaattgcatggataatgcgggcataaagggcaccaagtgtacattataaggagtatcaattaccatgttatgattcaatgacttccaatatcatgatacacataactgggcctaaaccaaaagaatgcactctgatcgagcttcgtttccctccacctgcaatacaggggaggacattacaaccgacaagtgcaaactgccaacccgatatgaattccaaaccatagggactatgtctctgacatctgcaattcacattcttaactcttgtgatcaggatggaatgtgctgacacgtgcagtgattcatgagtcaaactgttacggaggctgtgacagtgaactgggtagcacagtcgaacatgatcatcctaaca

SEQ ID NO: 12404 - DNA, 303 bp, Glycine max
  Clone ID: jC-gmfl02220140a08d1
agtcattgcatgtataccgcgggcataaagggctccgagcggacattattgggagcatcatttcccatgttctgatttaatcactgccaatatgatgatccacataactgggcaaaaaccaaagaatgccactctgacagacacctcgtacctcaacacatgcaatccaggggaggacattacaactgacaagtgcatacagcctacccgagatgaatttcaaatctttgtgactatagctctgccgtctgcaattcagatttttaactcttcggatcagggtggactgggcatataagtgca

SEQ ID NO: 12405 - DNA, 187 bp, Glycine max
  Clone ID: jC-gmfl02220140a09d1
cttgattgtatgaattatgctggcatcaagggcaatttttgtacatgatcaggactatgaattatcatatccactattaaacaataccagttccataactcacaatatgctgagatatacttaagactactttctaaaagatcttagattatctccacattcaataccttccaactaattacactcc

SEQ ID NO: 12406 - DNA, 540 bp, Glycine max
  Clone ID: jC-gmfl02220140a10a1
cccgaaatttttagttctgctgaaacttttgatgaatggtctcaaatctctggtgaaaatgaccatcaggaggttgctcaacaattacacaaggtcctccgcccatttctccttcgaaggttgaagtcagatgttgagaaagggttgccaccgaaaaaggaaactattcttaaggtaggcatgtcccaaatgcataaacagtattatagagcactacttcagaaggatcttgaggttgtaaatgctggtggtgaacggaagcgcctcctgaacatagctatgcaactactcatatgttgtaatcatccatatcttttccaaggtgctgaacctggtcctcccttcactacaggagatcatctaattgaaaatgctggtacaatggctcttttggataagttacttcctaaattgaaagagcgcgattctagggtccttatattttcacagatgactaggctactagacatactcgaagattatttagtgtttcgtggatatcactattgtcgcatcgatggaaatactggttgcgatgat

SEQ ID NO: 12407 - DNA, 384 bp, Glycine max
  Clone ID: jC-gmfl02220140a10d1
gctggccggcctgattttgcaaacgttcagcatatattcatttcacttgcggaacaaaaccaaggaatttttagtagacttgcgtactggcatgtccacatcccatttgtccaagatatcctttaactatccctacgacagatttttggggcctacataagtcaggtgggactccaggcttttggaaaacaagcctgaccaaaagttgtcaagtcccggccccatgaaaaatcccaaggctttgaaaacccaacaacccttttttgcacccaatatagaacattgggtcaactaatagctttttattccccggggttgcaaaatcgtccctgggtacacagttgggcttttttaaaaaaaagggactctttgggtgccttggcc

SEQ ID NO: 12408 - DNA, 548 bp, Glycine max
  unsure (1)..(548): unsure at all n locations
  Clone ID: jC-gmfl02220140a11a1
aaaaaccttctcttttctcaattgggtttccatctttgatttgatttcattgccatggctccaaaggatcccaagcaagttgctgatgctgcttcttctggtggtgggggtggcttttttgcttctattgcttccagcttgtccaatttcggtagtgccatgtccaaatccgttaatggtttggtgggctacgaggggctggaggttgttaatccagatggaggaactgaagatgctgaagaggaagcaagaaagggacgatggaaacaagaggagcgagatagttactggaaaatgatgcaaaagtatgttggctctgatatcacatcaatggtgacacttccagttatcatttttgaaccaatgacaatgcttcagaaaatggctgagcttatggagtactcttacctgttagatatggcggacaagactgaggatccatacatgagactagtatatgcttcatcattctntatatctgtctactatgcctatcaacgaacgtggaagccattcaatccaattcttggtgagtactatgaaatggt

SEQ ID NO: 12409 - DNA, 417 bp, Glycine max
  Clone ID: jC-gmfl02220140a11d1
gaaaggaagataacttgaatttccctactagcatttatccatgcaaagggaactgatgaactaacatagctactattaattaatcaaatactacagtgataaaacaacccaaaaacaaaaccaaatttcaagcattccaatcaagattacattacaaacttaataacaaaatgatatttaaaaaaaatagaaagaattccacaaggatgctcactattcagcatccaaattatcatattgccaagggttgaattctggtctgatgtcaggcacttcaatgcactcagaactatcaacggcagcacaatgttgggtatatttaccgttgtattggtaaacttccaagtcaccccaaggggtaggagttacttcatctggtaaatcaaaccatctaggagtgaacttatggcccttggc

SEQ ID NO: 12410 - DNA, 506 bp, Glycine max
  Clone ID: jC-gmfl02220140a12a1
tttggactgaaagaagagcaagtacctctaattatcattcaacataatgatgggaaaaagttttttaaacccaatttggaagctgatcacattccaacctggttgaaggcatacaaggatggtcatgttgcaccatttgttaagtctgaacccattcccgagactaacgatgaacctgttaaagtggtagttggggccagtcttgaggacattgttttcaaatctgggaagaatgttctgctggagttttatgctccctggtgtggtcattgcatacagttggctccaatattggatgaagttgctatctaatatcaaaatgaacctgattgtggtattggcaaaactggatggcacttgcaaacatattccaaggggaacctttggtggtccaaggtattcctacgtggtccttaagtcagccaggggaaaggtatccacattacgacggcggtaggaccatggaagacatcttagaattcatcgaaaagaaccgggataaacct

SEQ ID NO: 12411 - DNA, 303 bp, Glycine max
  Clone ID: jC-gmfl02220140a12d1
aggtgatctaaaaacatccattaatttagctcggataccagctacaacttttccagcactaaactctaatccgccaaataaaagctcccgtttttattaaggaaaaccatacataaagaaaaccaaacagatcaaaagatcaaaggaagatagatgcacctatggttcactaaattctgataacgagatacaaaagggtgtgcaacccacatgtaactttgtgcctatatatcccatgagacgaaaagcttctttaaagctcattttttccttgggcttgctcatcttttccttgttcttgct

SEQ ID NO: 12412 - DNA, 566 bp, Glycine max
  Clone ID: jC-gmfl02220140b01d1
cgccacacatttagtatttaatttcgtcaagatttccacgttctttgcaatagggaaagaaaaattatctccatacacattgaataatccatcataattccaaatgtccacaaataataataaataacagaccctcgaaattagctgaatttccatgatgtttatgccttgctgtcgatattcatcggttgggcatccttcgacgctggtttattactgtcaagagaatctagcttgtgcagtttgttgaacatatttccataaaattttgcctcttttttgttgtactccttcatcttttccttcaaagtcttgtactcaagcttgacatccctgttgttagggtcaatctcaagcgctttcttaatatcaaattcggccaagtctaaatcagccaactggatatatgcctgggcccttctatagagagccttcacattagtactctcaaggtccagtacctttgtgcacaatttctctgcttgtttataatcttttaatttcaacttgcatgctgcattgtctagattacaggcaaccctcaaggctttggagctcttcttctc

SEQ ID NO: 12413 - DNA, 466 bp, Glycine max
  Clone ID: jC-gmfl02220140b02d1
agaattgccaaatgggcttattttatcaacatataagcttacaaatttccacattttcaggaaacaaatgaaggaaattcatcccagttttgacttctgattgagtgaatccacaagacacgtatcgaagttcccaaatttacacaaattgcttggtcagatgacccaaaaccaagctataacagacccagcagctagaccaaaaactaagaataatacactcacaatccctgcagtctctgcatgctgcaacattacaattttaggaatcagaatcatcaatgcactggttaggtagccattagtaagccctaacaggcaagtcagtattgtcacgggaatctcagtccggaagaatttgggaccatgcaagcaacctaagaagagagggaaaaacaacaatcttgctatgcaaccacctatggcaacttttgcattctgtaggaagtaaactgcagtcagacac

SEQ ID NO: 12414 - DNA, 496 bp, Glycine max
  Clone ID: jC-gmfl02220140b03d1
gtaaaaagcaagtaacattaagttggattgggatacacaagataattcacattatctgaagtacattgcaataacatatacttcaccaaacacaaatctaaaaactctcaaaagtccacaagtcatccttttctttcatgctcacttgccggggacgaagttggtggcgtaggcccaggcattgttgttgactgggtccgcaaggtgatcagcaaggttctccaatggacccttaccggtgacaatggcctgaacaaagaacccaaacatagagaacatggccaatctcccgttcttgagttccttcaccttaagctcagcaaaagcctctgggtcatcagcaaggcccaatgggtcaaagctgccaccagggtagattgggtcagtgacctcaccgaggggcccaccagcaatacgataaccctcaacagcacccattaggataacttgggtggcccagatggcgaggatgctctgggcgtggacaaagcttggg

SEQ ID NO: 12415 - DNA, 407 bp, Glycine max
  Clone ID: jC-gmfl02220140b04d1
aaacgagtgacttcattgcatgtgtcatgcgtgcatcaagtccaacttgtgtccattataagttctcgttataaccatatccaaaatcaaaccattacaataacaaagaccaacatcgccggcatatacttcagaacacagccaaaaagatcttagtttagcaccaaatacaatacctaccacctattttcattctacaactgaatgcagctcagctgttatcactcagtcattataggtttgttctcgctggctttgggtttctgctcttttggcttctgttcgtccgatttcctcttatcagaggagcctcccttctggctgaggaaggatcggaaaagaggagagtcaacgtcgtaaatcattgtcgtttactgatggcaaagatgaaaccctagttctagttc

SEQ ID NO: 12416 - DNA, 227 bp, Glycine max
  Clone ID: jC-gmfl02220140b05d1
atcgattgactttattgcaggggtaatgcgtgcataaagtccaactagtgtacattatcaggtctaattattaccatatacgctattaatcaatgacaatatgatatcccatgatcgaccagttatccttatgagcacactcttaaagacctttggttacctccacattcaatatctacctcctatatagactctacatctgaatgcagctcaactgctatcactta

SEQ ID NO: 12417 - DNA, 227 bp, Glycine max
  Clone ID: jC-gmfl02220140b06d1
aaacgcttgacttcatcgcaggaatcatgcgagcataaagtccaacaagtgtacatcatcaggtctatctattaccatacacgatatcaatcaatgacaattacatagcccaccatcgccgacttacacttaagaacacagcctaaaagatctttgtttagctccacattcaacacctaccaactatttacattctacagctgattgcagctcaactgctatcactc

SEQ ID NO: 12418 - DNA, 228 bp, Glycine max
  Clone ID: jC-gmfl02220140b07d1
cttaattgtatgaataatgcgggcatcagggccaccttgtgtacattataaggtcaaattataaccatatacgatattatacaatgacaatttcataacccatcattcatcggattatcctaaagatcacaccctaaaggacctttggttagcaccactttcaataccaaccaactatttacattctactgctgattgcagatcagctgctctaacttagaaatgtat

SEQ ID NO: 12419 - DNA, 205 bp, Glycine max
  Clone ID: jC-gmfl02220140b08d1
acttaattgaatgaaaaatgcgggcataagggccaacttgtgtacataatcaggacaaattataaccatatacgatattaaacaatgacaatttcaaaacccccaatcgatcggttaatcctaaagaactcaccctaaaggatctctgtttaactccactttcaacaccaagcaactatttacactctacaactgattgcagcac

SEQ ID NO: 12420 - DNA, 194 bp, Glycine max
  Clone ID: jC-gmfl02220140b09d1
cttaattgcatgaaaaatacgagcataagggcaacctagtgtacattatcaggactagttattatcatatacaatattaatccatgacaagtagactgcccatcataatcggtttatacattagaactctgacaaaaagatctttgattagcaccactttcaactcgtaccaactattcagattctacacctga

SEQ ID NO: 12421 - DNA, 195 bp, Glycine max
  Clone ID: jC-gmfl02220140b10a1
gcacaagatcttgggtctgatctttgtcatgacttaacgacagcgatctccgacgtgaactaccaggacctccgagccctgctgatacacaagggaggctaccattatgtcaggatcacggacaagccatatccaatcgagaggacaccccctgcaaaggagaacacacccataactaccgagtgataacagctg

SEQ ID NO: 12422 - DNA, 151 bp, Glycine max
  Clone ID: jC-gmfl02220140b10d1
attgcataaaaaacacgggcattagggccacattttgtacattatccggactatttcttatcatatacgatattaaacaatgacaatttgattgcccataatatctgacttatccataagccctctcacaaaaagatctatgaccacctcc

SEQ ID NO: 12423 - DNA, 557 bp, Glycine max
  unsure (1)..(557): unsure at all n locations
  Clone ID: jC-gmfl02220140b11a1
gttgatgagtctctagcccaagtgtgctccgagagtggtgcaatggatcctcttatgaattcttactttgagagaatgcaagctacgactaggaaatggtacctgaatattttggaggctgatagaacacagcccccaaagaaaactgaagatgggaagctatataccccagctgctgttgatctcttcaggatacttggtgagcaagtacaaattgttcgggataatagcactgatctcatgttatacagaattgccttggcaaccattcaggtaatatctgataagacatagatgtagagtaactgatgcttattataaatttatcttttcgaaaaataaactctaggtaaataaaggtaaactggacagaacttggaagttggaaagcaatttttttgagtttaacaatgtgttcaagtttcatcattattgggaggatatcacgagaaatccatgaagtgctcctcacagcacaatgtgtagtgcttactgcttaactcagtagcttggtatcctagggtatactatatatttntacaggtgatgatngattt

SEQ ID NO: 12424 - DNA, 496 bp, Glycine max
  Clone ID: jC-gmfl02220140b11d1
gttcaggagaaatgcatcatccttgctctctttgtaatccattatcttcttaattaatttcatcttttatcagataataataataatcaaaataataacaaaaaatatctaaattgtagccagatgacaacagatagttggccacaacattttacacaatacttaacatacagtgatttacaactttatttataaagagtgtaattactaattacaagatactaaaaatatttaaacaaaatccaggaagaagagattatggcatatatacggaagaagccaaatctgtcattcacagctcttgatcatttctaaacagctagacaagtccatccataatcaatttgtatttgacagaaaatgcaccataacaggtttccatgcataatcgtgtgatctcatgatttgtatcacatggaaacacttgagatcattaaagcaaaaactgtgaggaaactgatacatacaaatatgttataaagataatttcaggaaa

SEQ ID NO: 12425 - DNA, 412 bp, Glycine max
  Clone ID: jC-gmfl02220140b12a1
gaagaagaaagatccgtaaattaacattctctccctcccttcgctataatagcaagcttttcaagcatatttctggggtttggtcccttttccttgtttggggttttcttgggaaaaaagaagtaattaggtataataatagtataactaaagcaaaaaaaaagacagtaatatgggaaggggtagggttcagctgaagaggatagagaacaagatcaatcggcaggtaactttctccaaaaggagagctgggttactcaagaaagcacacgagatctctgtgctctgtgacgctgaggtcgctttgattgtcttctcccacaaaggaaagctctttgaatatgccaccgattcttgcatggagaagatactggaacgctatgaaaggtatgcctatgcagagagacaactt

SEQ ID NO: 12426 - DNA, 534 bp, Glycine max
  Clone ID: jC-gmfl02220140b12d1
aaattaattatatattgtatatactgttattagcaattagcaaacaaggacaaactcaacgcttaattagttcagatacgagacctgtctttcagcaacttaactatatatagcaaagctttcacttaagaaagcctagccttgtgaccaaattataaacttacaacacacaataaacattaacgtctgcagagtagggaaaaccacaaaacatagaggcatatataagccctcaaatatgttgtcaaatgccataccaaagctatataatatcatccacctcaaagaaagtattcaaaagcatccaaggtgacaggaatataatggttccagagtcaggtcaagttcattcctccctacttctgatgcttcctcacggtaattgccatataacgaagatgtaacataattataatatcttgttattgaaaggtcaccccatgttcaaaagtggctgcggtagcaagaaagatgcattaactccgtggtttggatgctcccattgtgcttgctgcgctgcaaccttttctttct

SEQ ID NO: 12427 - DNA, 397 bp, Glycine max
  Clone ID: jC-gmfl02220140c01d1
aaggagaaactgacatgataggatataattatataaaattgtacataggaagtggaaatgtgaatgtgtggcagggtgataaaaatgaaaagagaagcaacaataataaagtgaatgagaaatttaaatatcacggactaaaatatctattcactcgaaatttaaatgtcacggtctcttttgcactcaggaggagagatatgaggatagcgtttagtgtcagtgcagtagttgtagatggtgtatttctggcgcacccatctgagcctacgccactgggcggcgtcaaggtcacggaactcaggctggtcccaccacctcttgccctgcgtgtcgcagaacttggcgttcaccgaagcctcgcacccgtcgatgtgaaaccccttgtacgctgcta

SEQ ID NO: 12428 - DNA, 399 bp, Glycine max
  Clone ID: jC-gmfl02220140c02d1
cattgttaatttacattgaggatatataaaagctagttttaatatgcagtagtcacaatttccatcttctgttacaaccaatcacagcacaaagtctaatctcaattaacagaagatctttattctgaagtaaatgtgacagccatcaccaaatgtttcagtttctcattctgagctcatgagacaggcaaaggatgatatggaaaaggaaccaagaatagattatcttttcttatagctgtgactccaaaatcctcactcatgtccagttctccacttctcattccacttggaagcttccaatcaaagtgatacaacaacattgcaagggctagttccgcagctctcaaagcaaatgtgcttcctgcgcatatccttcttccagcaccaaagggattg

SEQ ID NO: 12429 - DNA, 555 bp, Glycine max
  Clone ID: jC-gmfl02220140c03d1
ggtgacttgcgagtgctacgtgatagatcagatgcgttcatgcctcgtcgtaagctcagaatactactcgggggccgcccttttttttttttttttgtttaggattattcacattatgaaagattatctggaatcatgtctatttaatattacactggtgactaatatcaaataaaaatataatcaatcttacattgaactatggtcgctttggtttgatctaaccccacgcttactcagtagcgttatgacgtatgccatggcaactttagcacctaggctagagtgaccacgtgacaggcatatagctgtatcaccccctagaagcaacaaaccattggctatcaactgtattgatggccttcttaggatcatactaatgtgagattcatcagtaacttgatcatgtaagacggtcgcatctgctggacagatgttactcgaaataaggtccaaacaagcgggtaccttctgcattaaatccaccgaagtgctaactgaactcaatagatgatcgcttataacagaatatcttctacgtgcattatccatctt

SEQ ID NO: 12430 - DNA, 237 bp, Glycine max
  Clone ID: jC-gmfl02220140c04d1
aaacgagtgacttaattgcatgtgtcatgcgtgcatcaagtccaacttgtgcacattataaggtctctctataaccatatacaatatcaaacaatgacaattacatagaccatcatcaacggcttatacttcagaacacagcctaaaagatctttggttagcaccactttcaatacctaccacctattgacattctacagctgaatgcacctcaactgctatcactcaatcattata

SEQ ID NO: 12431 - DNA, 463 bp, Glycine max
  unsure (1)..(463): unsure at all n locations
  Clone ID: jC-gmfl02220140c05d1
tgcatatgagctatgtgtgtcatcgtcggctttcnaggtcatgcagtcagtccggaatactctaccagggtacgatccagtctcatctagtcggcggcctgccctttttttttttttttttcttcttgatcttttcagtcgacagactgtacatcacaggtgtcatagggtgcataaaggctcaccaatgtgcccaataaccacggcctcacatacttaccatatcacgatactaaggcaattgacaattctcatatgcccaccgatcagctgtcgtacactaacagatcccatgtctaaaagaatctttggttaacaccactttctacacctacctactatgtacattctacaactgattgcagctcagctgatctcagtcagtcattatagcttggcactctagtacctttgggactcagctctctactcttcggcacttcccactatctattatccctgg

SEQ ID NO: 12432 - DNA, 247 bp, Glycine max
  Clone ID: jC-gmfl02220140c06d1
aacgcttgactttatcgcagggatcatgcgagcataaagtccaccaagtgtacattatcaggactaactattaccatacacgataccaaacaatcacaacttcatttcccaccatcgacgatttacacataagatctcagcctaaaagatcttagtctatcaccacattcaacatgaaccacctattgacactctacatctgattgcacctcaactgctatcaactaaaaattatactccttgcaat

SEQ ID NO: 12433 - DNA, 208 bp, Glycine max
  Clone ID: jC-gmfl02220140c07d1
aatcaaacctttaacaatttagctgattgcatgaaatatgcgggcatcaagggcaccaattgtacatcataaggcctaagtattaccatacacgatattatacaatgacaagctgaaaccccaccatagcagacataaacaactgaacacagtccaaaggctcattggatacctacacattcaacctctgcacacaaaggagactcca

SEQ ID NO: 12434 - DNA, 200 bp, Glycine max
  Clone ID: jC-gmfl02220140c08d1
cattattgaatgaatcatgcgggcatcaaggccaccatgtgtacatcataaggtctagctattaccatacacgctattatacaattacaatctgacagaccaccgtattcgatttacccatcagaacacagtctaaaggcacactgtttacctccacattcaacacctgccaactaaggacagtccactgctgattgcag

SEQ ID NO: 12435 - DNA, 229 bp, Glycine max
  Clone ID: jC-gmfl02220140c09d1
aaacatatatttaacacttttcataatcgaataaataatacgggcataagggccaacttgtgtacattatcaggtctatctattatcatatacaatattaaacaatgacaattacataacccaccattaaacgacttatacataagaactcaccctaaaagatcattgtttataaccacattcaacaccttccaactatttacactctacacctgattgcagctcaact

SEQ ID NO: 12436 - DNA, 294 bp, Glycine max
  Clone ID: jC-gmfl02220140c10a1
gtacaagaactagggcttgatccttttcatcacttaacgacaatgaacgccgacgttaactaccgggacctccgagccttgctgagacagaagggaggctaccatggcaacaggataacagacgagcaacaaccaacagagaagacacccagtgcaaaggagatcacacccataacgaccgagtgatagcagctgtgccgaatgaagacgcagaatgaaaataagtggtcggtaccgtgtctggtgctaaagtaaaagcttaacgggtgcaagatgaagcatctgcagctgatg

SEQ ID NO: 12437 - DNA, 229 bp, Glycine max
  Clone ID: jC-gmfl02220140c10d1
acggatccatttaactattttccctattgcgagtaagacacgaggatcagggcacccatcacaccaacttgagccctaagaactatcatatccgatattaccacaggacaattagactgcacactatacaccgtactacccataagaactcacacaaaaagatcattgtttatcaccactttcaacaccatccaacaattgacactctacacctgaatgcacctcaact

SEQ ID NO: 12438 - DNA, 415 bp, Glycine max
  Clone ID: jC-gmfl02220140c11a1
gcacattaactatcatggctcatctgctaccacttaatctcgtcttggacttgcggtccagtccacaagtctcgatggtatctcttctgcttcactacagtagccacccaatcgtgtgcattcccgctatagtcaacagacattgctgccagatgtaggcagttctcagactgaagaacagcatcagcatcggtacttccctgatgattcaacaatagaatctattgctagcactgggattggcaagaatctcataaatgaagatgattcaaaatcagcatatactgtacattctcctgcagcagcgtctgcctctctttcagaatctgatcaaacttacagggatcttgatttgactcctgaccaaccattacaatctaatgaaccaactggcaaccttggtgtcatcggaaga

SEQ ID NO: 12439 - DNA, 185 bp, Glycine max
  Clone ID: jC-gmfl02220140c11d1
attgcatgaggattatgggcataaattcagacatgattacaggatctgaaaaaaataataccatataagatattgatggaccccatttagataacactggagttaccctattgtacgcagatttttagatttatggatctctcattaaaaccactttccttcttacccaactaattacaccttaa

SEQ ID NO: 12440 - DNA, 397 bp, Glycine max
  Clone ID: jC-gmfl02220140c12a1
agagggacaagcataattttcagaactaggaggcgtggagtgtaattaatccaaaaccttgtttcagttactaagaagcaaaaggagcaccgcaccgcacagcggatgcagagaaaaacctaaagtggcggaagatgacggaggtggcgagatcagtggtgcacgacgttttggggcaaagggtggtcgacgtggaccagccaatcgtcgattacatcgtaaacgtcctcgccgacgatgacttcgatttcggcctcgacggccaaagcgccttcgaagccctcggcgagctcctcgtcgccgtcggctgcgtcgacgatttctcccactgccgctccgtgtgcagcacgcctgtgcgacaagttcgggaagcacggtttggtgaaggagaagcccg

SEQ ID NO: 12441 - DNA, 229 bp, Glycine max
  Clone ID: jC-gmfl02220140c12d1
ttttttttttttttttttttttttttttttttttttttttttttttttttttggttttttttttttttgaaaaggagggaaaggttaaattatccattttataattataagggttttacaaaattttttaataggtaatttaaccctggggtaataaaatcataaaatggccttgaaatacatagggttggataaattgcaaaattggttgacagctgagaggaaccgc

SEQ ID NO: 12442 - DNA, 345 bp, Glycine max
  Clone ID: jC-gmfl02220140d01d1
caaagttaattttcattgaagtaatacaatggctattcatatcggcataagtaacaatttacagattaagttgcaaccgatctgggctcagagtctagatgcatttaacagagggatctgtatacagaagaaaatgtgacaggcatcaccgatatggagacatggtcattctaagcgaaccaaacaggcatagggggaccagtccaaggacccgggaagcgaaaggcctggaagatagtcgtgaccaaagggccttcactgaggtgcagcactagagttttcattggagtcggaaactaccaatggagggatacaacaacctggcaagggcctaccccggatttc

SEQ ID NO: 12443 - DNA, 494 bp, Glycine max
  Clone ID: jC-gmfl02220140d02d1
aagccaaacctttcaaaactttattacaaacttctttattgtacatccatgtccttctcttcacggaggacagaatcataccataactttatttcaacttaaactagtattaggaattaattgaagtaaaactgtataaaaccgcaatatcaaggtgttaatattttacttattatgcaccttaatataccccacatgtgaggaattggcccctctagtaagggtttgaagatcataagctacccaacaccttgaattctccttgtggcagaaataacccacacacttgcaatccttggtgcatttgtttccacaagtactctcactcactctatcccctgtagtgtatttgctcatgtaatgctcaacttcttcaattctgtagaagtggaaatcactagcctcgcatgatgtcacagccttggcagtgcaattggtgctccaaccatgtagtccattttccaatggacaagccacacattggttatcttcac

SEQ ID NO: 12444 - DNA, 333 bp, Glycine max
  Clone ID: jC-gmfl02220140d03d1
agaaatagtgttataagcccaggatgaccagcttcatgatgtcctataagggaacaataccagtccaccatgtcaccactgcaagaattagccaactgccaactcattgaacccaggcaatgtggtatccaaaagcactcggggaatagaacgataggctaccccgacttattgtcctatcctactattgagctctcaatgctgatatgaacactggtaacatacgcctggtacaaaaggatcgctatccctgcccaatggcctctgcaatctataaagtgtcttagatcaccttgctggatccaacgacggtaaccattgtatgcaaatgac

SEQ ID NO: 12445 - DNA, 223 bp, Glycine max
  Clone ID: jC-gmfl02220140d04d1
aaacgactgactgaatcgcaggagtcatgcgtgcacaaagtgcaagctgtgcacattacaagctgtctgtatgcccacacggacggtcatgccacgccatttgcaaagcccgaactcattggcgtatccaacggtgcacatgctaaaggatctttggttaccaccactttcagtccctgccaactattcagattccactgctgactgcagctcaactgctatc

SEQ ID NO: 12446 - DNA, 213 bp, Glycine max
  Clone ID: jC-gmfl02220140d05d1
agctgaaatagggcatatgggaacttttagtccaatgggtgtacattataaggcctaattattaccatacacgatattaatcaatgacaattacaatgcccatcatcaacgacttacacttaagatcccagcctaaaggatctttggttatctccactttcaaccccttcgcgctatttagattctacatctgattgcagctcatgggctatc

SEQ ID NO: 12447 - DNA, 327 bp, Glycine max
  Clone ID: jC-gmfl02220140d06d1
gatccttgaatcgcttgacacttattgaagggatattgtgtgcttgaaggccaatgtgtgctcataacccggccgaacaatcagcaaacacgatactaggcaatgtcattctgaatgaccaatataatcgttgtaccctaaagttccatttcttaaagatctgagtgtaataactccttcctcgtagtagccatctagttccttggattattgattccacagctgaagatcataggatttacttgtagcttgccactctatatcattgggaccaaacttaatagtgatcggcagtgacagctatctattctacctggaaacttggtt

SEQ ID NO: 12448 - DNA, 231 bp, Glycine max
  Clone ID: jC-gmfl02220140d07d1
aaacatatatttaacgctttttttaatcgcatataaaacacgggcataaggggcaacttgtgtacataataaggactatttattatcatatacaatattatacaaccacaatttgaaaacccataagttcacgtttaatccattcgaacactgactaaaagatctttggttaacaccactttcaacatcaacaaactatgtatactcaactcatgattgcagcacaactgc

SEQ ID NO: 12449 - DNA, 230 bp, Glycine max
  Clone ID: jC-gmfl02220140d08d1
aagcatatatttaacgcttttcttaatcgtaagaaaaatacgggcataagggccaacatgtgtacattatcaggtctatttataaccatatacgatattaaacaatgacaattagataacccctgattgacgtcttatactaaagaactcagtctaaaggatcattgtttaacaccacattcaataccaacaaactatttacactctacatctgattgcagctcaactgc

SEQ ID NO: 12450 - DNA, 240 bp, Glycine max
  Clone ID: jC-gmfl02220140d09d1
attcatatatttaacgatttactatatcgacaaagacgatcgtgcgaccgggaaagaaaggctctactgtacagggatcccgaacccatactcgacctctgtccatgacgccatgctagcagatgttgtgtctcctgcacagaatgtctctgcccgaacgatctatggaattgatcactcacaaatactgcaggctatctagaaccccaaggtgcgtaccaacaatgagttctcactgga

SEQ ID NO: 12451 - DNA, 297 bp, Glycine max
  Clone ID: jC-gmfl02220140d10a1
gtacaagaactagggtttgatctttgtcatcacttaacgacaatgatcgacgacgttaactattctgacctccgatccttgctgagacagacgggaggctactatgatgacaggataactgacgtgcaataaccaaccgagaagacacccagtgcaagggagatcacagccataacgaccgagtgatagcaggtgctctgaatgcagtcgctgaatgaaaatgggtggttggtatcgcatctgctgctaaagcaaaagcttagcgggtgcgagatgatgcatctgcacgtgatgttc

SEQ ID NO: 12452 - DNA, 233 bp, Glycine max
  Clone ID: jC-gmfl02220140d10d1
atacatatatttaacgatttattctattgaataaaaaatacgggcatcagggacaccttgtgtacattatcagcactaactcataccatatacaatatgaaacaatgacaataagattgcacacgatcatcgatgtacacatatgattacgctctgaaagatctttggctatcaccactttcaaccccttccagctatgtagaatctacagctgattgcagatcatgcgttct

SEQ ID NO: 12453 - DNA, 276 bp, Glycine max
  Clone ID: jC-gmfl02220140d11a1
gaacattaactaggattggagctatgccatcacttgacgacaatggggacttacgttgactacgctgacttacgatccttgctgtgctgggccgcagcctcatataccaacaggatatctttcgaacaataatctacatgcaatacgaccagttcaaatacgatctcaagcttaactaccgggtgagtgaaggtcttgcccacaagatctgcgattgacttatattggtaggtatctcattggctgctacaacaaatgcttcgccgttgcaccatg

SEQ ID NO: 12454 - DNA, 171 bp, Glycine max
  Clone ID: jC-gmfl02220140d11d1
aacgaatgattttattgaatgagaaatacgggaaaaaatgccaccatgggtacatgataagaacagaataaaaccatatacaatattaatcaaggacaataacatagcacatcgtcaaacggtttagtcaaaggaactcggactgaaggatcttagactataaccacgttc

SEQ ID NO: 12455 - DNA, 492 bp, Glycine max
  Clone ID: jC-gmfl02220140d12a1
ctctgaccctctccttgtggattggatcaaataccctgggaaccccgttttggtgccaccaccaggcattggggccaaggactttcgtgacccaacaacagcgtggctcacctcagaagggaagtggcgaatcaccataggttccaagctcaacaaaaccggcattgcgttggtttatgacactgaggacttcaagaactatgagctcaaggaggggctgcttcgtgctgtcgctggcaccggcatgtgggagtgtgtggacttcttccctgtgtccaagggaatggaaatggattggatacttctattaaatgggcctaaggggaagcttgtaatgaaggtaagcctgatgatgatagacatgattactattcaattgggacttatgatgagaagaatgttctgttcacaccagatgatgctaagaatgatgttggcgttggattgaagtatgactatgggatattctatgcatccaagacgttttatgat

SEQ ID NO: 12456 - DNA, 437 bp, Glycine max
  Clone ID: jC-gmfl02220140d12d1
atgtaaatatttttagcatagaattggataacattaacatcatatttctttgaacagattctcttgtaagcatcatttcacatgatatgataaaattacaacaaaaattctgataaacataactgggcaaaacatgaaggaatgcgctttgagcaagaaccataaccttatgtcggctattcaggggaggacattacaactgataagtacaaattgccaacccaagatgtattccaatcctttgtgactatagctcttctatcttcaattcaaatttttaactcttctgatcagggtggaatgggcgtataaatgcagaattcatttgccaaacttttagcgaggctgtcacagtggcctcggtagcattgttgaacaagaacaacctagcaggtccatagattgcctttgttggataaacccgagatgtcacaacc

SEQ ID NO: 12457 - DNA, 395 bp, Glycine max
  Clone ID: jC-gmfl02220140e01d1
ggggtgaacgaattttttgcaaaaaattttaagtttttcaaacagccgcgttcggacttcaaactccaaaagggctacaaatttaagagccttccagaaaaaatggctttcaaccttagataccaaataagtaaccttggattcttccaattatgggatgattaataagaaacaaatgcttcaaaaccaagcctaaatggctaatttcttgacttcctaatactcgggctcgggagcctgtttaccaccctgagaacctccggctgaggaaccgccacttgaaccacctgtaatgggccctccaatcttggagacaggtttgtttgccgcattaagctttgccttaatttcggcagccttggctcccggcattggtgttctcaaatcccataccg

SEQ ID NO: 12458 - DNA, 480 bp, Glycine max
  Clone ID: jC-gmfl02220140e02d1
actccaattactgattatcattgcactaaaggaactataaacaaccagatatattggtcaaaaacaagaaccacggtaacacgaaaccataaagaaactcgaactcaaaccacaacaactaaaaatacggggcataatcataaaccctaattgacgacatcaagccttagtttctccagccttcatcaccaccattaccaccacgagagtaaccacggtctgtgccaccggcataaccaccaccaccaccagcaccatagccaccggcataaccaccgtcacggctacggtatccaccaccgacaccgtcaccgtcactacgaccaccatattcaccgccaccacgattggatcctgctgctccttcggcgacgtcgacgacgacaccgcgggactgagcttcattgacagtgatattacggccgtccaagttctgtccattcatcgctccgatcgcatctttcatggactgctccgagg

SEQ ID NO: 12459 - DNA, 300 bp, Glycine max
  Clone ID: jC-gmfl02220140e03d1
gtggctgatttttatatcacatgtctgcaatacgtgtaatacgggatcatctagtgcccctagtgaacaggaccaggccacaatacactgaactcgaatatgatgcgaagcccataccattgcccatactcgaagaaccacccatcctagctacatggatatgatgaatacatcatacgctatatactccagacctcctgatgagaatctacggacttgtggactacgaatgctatcctgacgtcataacaggtccactctgattggacagtggcatctgcagtctgcaggtggcggaga

SEQ ID NO: 12460 - DNA, 219 bp, Glycine max
  Clone ID: jC-gmfl02220140e04d1
aaacgagtgacttaatcgcatgtataatgcgtgcataaagtccaacaagtgtacatcataaggactatttattaccatacacaatattaatcaatgacaataacattgcccctcatcgacggcatatgctttagaacacagcctgaaagatctttggctatctccactttcaataccttccaactatttagattctacaactgaatgcagctcaactgt

SEQ ID NO: 12461 - DNA, 233 bp, Glycine max
  Clone ID: jC-gmfl02220140e05d1
aaacgcttgacttcatcgcaggtatcatgcgtgcataaagtccaacaagtgtacatcatccggtctatctattaccatacacgatatcaaacaatgacaataacaacgccccccatcaacgacatatacttcagagctcagcctgaaagatctttgattatcaccactttcaacacctaccaactatgcagattccactgctgaatgcagctcaagtgctatcagtcaaacat

SEQ ID NO: 12462 - DNA, 237 bp, Glycine max
  Clone ID: jC-gmfl02220140e06d1
aagcatatatttaacgcttgactttatcgcatgaaacatacgggcataaaggccaacatgtgtacattataaggcctaactataaccatatacgatattaaacaatgacaatttcatagccccccatcgacggcttatccataagaacacagtctaaaagatctttggttaacaccacattcaacaccttccaactatgtagattctacaactgaatgcagctcaactgttatcact

SEQ ID NO: 12463 - DNA, 338 bp, Glycine max
  Clone ID: jC-gmfl02220140e07d1
tgatcatgtcatgatccctgcggttggggacagatcatgtattccaataccgggtttacgcgctcactcctcggcggccgcccttttttttttttttttttaaacatatatttaacgcttttcataatcgaataaataatacgggcatcaagggcaacttgtgtacattataaggtctaactataaccatataaaatattaaacaatgacaactacaaaaccccaaagttctcgttttattcttaagaacacagtctaaaggatctctggttatcaccacattcaacacttaccaactatttacattctacaactgactgcagctcaactgctatcac

SEQ ID NO: 12464 - DNA, 239 bp, Glycine max
  Clone ID: jC-gmfl02220140e08d1
aagcatctatttaacgcttttcttaatcgaaagaaaaatacgggcataaaggccaacatgtgtacataaaaaggactaactataaccatacacgatattaaacaatgacaattagatagcccatcatcgaaggcttatccataagatcacagactaaaggatctttgattatcaccactttcaacaccaaccaactaagtacactctacatctgattgcagctcaactgttatcactta

SEQ ID NO: 12465 - DNA, 295 bp, Glycine max
  Clone ID: jC-gmfl02220140e10a1
gtacaagaaatagggtttgatccttgtcatcacttaacgacaatgaacgacgacgttaactatcctgatttccgatccttgctgagacagaagggaggctactatgatgacaggataacggacgaacaatagccaatcgagatgacacccagtgcaagggcgaacaaagccataacgaccgagtgatagcagctgcgctgaattaagttgctgaatgaaaatgggtggtaggtatcgtacctgctgctaaagtaagagcttaacaggtgcaagctgaagcatctgcatgtgatgt

SEQ ID NO: 12466 - DNA, 216 bp, Glycine max
  Clone ID: jC-gmfl02220140e10d1
acttaatcgtatgaataatgcgggcatcagggccaccatgtgtacatcatcaggactatttattaccatatacgatattaaacaatgacaataagatagcccatcatcgctcggtttacccttaagaacacactcttaaggatctttgtttatcaccacattcaacaccaaccaactatttacattctacagctgattgcagctcaactgctatca

SEQ ID NO: 12467 - DNA, 254 bp, Glycine max
  Clone ID: jC-gmfl02220140e11a1
gtacaataactaggtttggagctttgccatcacttggcgacaatgggcgcctacgttgactatgcggacttacgagccttgctgagccagtcgggaggctcctatggcgacaggatatcgtacgtgcaataatccagatgggatacgaccagttcacaggcgatcacaaccttaactaccgagtgattgcaggtgatgcgaactggagtgcagaatgaaaatgggtggtaggcatcgcacttgctgctaaagca

SEQ ID NO: 12468 - DNA, 213 bp, Glycine max
  Clone ID: jC-gmfl02220140e11d1
accgaatgactttattgaatgagtaatacgggcaaaaattcctccatgtgtacatgatcaggcctaattataaccaaatacaatattattcaatgacaataacacagcacaacagtcaccgatttgtccttaggaccacggactaaaggaactctgactatcaccacgttcagcaccagccaactatggacactctacacctgattgcagctc

SEQ ID NO: 12469 - DNA, 505 bp, Glycine max
  Clone ID: jC-gmfl02220140e12a1
ctcaatcttgctcatgggaaagttctgccctagcttatatcctgtcgggccttctctggaacttgtgcactccgatcaatgatcttgcttgtccatattgcccttacccttgtgccaagcctccaaaaatagcctccgtagtgaaaccaccggttcacaaaccaccaaaaccatgtgcaccacccaagtcatcttcaaaacacaccccatgtacaccatacctatgttccaaaacctcctcactaccctaaaccaccatttcatacacacacaccccatgtgccaaaacctgatgcaaagcctacagtgcattcccatccacctcatgtcccaaaaccaccaattgagccagttacaccaccatatggtccaaaaccaccaattgagaaccctccctatgtcccaaaacacgctgctgagccagttacaccaccttatatccctaaaccaccagtagtgacaccaccatatgtgcctaaaccaccagtagtgccagttacaccac

SEQ ID NO: 12470 - DNA, 357 bp, Glycine max
  Clone ID: jC-gmfl02220140e12d1
accgaaatcggctgcttattaggatgtagtggaaaaattctttccctggtcatttgagctcagctgattccatgcatgggttatattcttcagggagaagagttccgaagtgtgacatatatcagtatttccccccatgttctttatgtaagtatactttgaacacggaaggaaccggaacatggtgaatgacatgacgaaaaaagcaagacatatatgtaaagttgatgtgaaaactgattaaagaagaaacgccagacagagagggatgaaaaatatcactttgggcctgggagcattaccatcataattaatgatatattaactaactttcagcacactcgaacccatctggtg

SEQ ID NO: 12471 - DNA, 601 bp, Glycine max
  Clone ID: jC-gmfl02220140f01d1
caataccaactttgtcccttaacaagagttattattaagacattttagagtggggacttaagtaattttatccaactaaactacatcaaaactaggaaatggaaagattccttcatgaatatagcagacgcgataaaagttctatagtgcatttaagagacaaaattcaacggataaaatctcaaaagacaaattaaattacaaaccaaaaacattgaataaaaactaccaagcactcaaagtctattcatatcctaaagatttaagcagcagttgcttgttgggcggcaatccttttcctagcttcctcaatgattgatagcttaatacctttacccttgggaagagatatccacggttttgttcccttgccaatggtgaacacattgcccattcgagttgcaaattcatgcccagtagcatcctgaacatggatagtctcaaagcttcccttatgcttctctctgttcttgatcactccaacacgacccctattccttccacccgtcaccatgactacattcccaacatcaaatttgatgaaatcaacaatcttgttcttctccaaatccagcttaatggtgtcattagccctgatgag

SEQ ID NO: 12472 - DNA, 496 bp, Glycine max
  Clone ID: jC-gmfl02220140f03d1
gagctgtgtttaaatcttttaacggctttgtattttagttagttcaagattaaaatcttgacctgctatttcaaacaatcaaataattttgttccaacggcctcatcactgagaatgttgagtaccgaagaaaaaaaatattaaaccagatacactagcgggagctgcccaattcacagaacaatgtacattgtgctgaacaagagcaaatgcaattctcttacaacagacctaataaactcccatccattgagtaccttaggctctgagaagccaaacttttcgtcaatagccactgcattaggattgaatagaagcactttctacttctgggcattgctcttctggtcttcaccatcaaaataataggcatccacaaattttcctggctaactaatttgtctgcattgatttcagacagatcccacagggatcatctttagagctgctgcaattggcatgccaaggactccaaagagaacactaccaaaccact

SEQ ID NO: 12473 - DNA, 228 bp, Glycine max
  Clone ID: jC-gmfl02220140f04d1
aacgcttgactttatcgcatgtatcatgcgtgcatcaagtccaacaagtgtacatcatcaggcctcactattaccatacccgatattataccatgacaattacatagccccccatagcagtgttacacttcagttcacagcctaaaggatcactggttaactacacattcatccccttcatcctattcacactctacatctgattgcacctcaactgctatcactcag

SEQ ID NO: 12474 - DNA, 284 bp, Glycine max
  Clone ID: jC-gmfl02220140f05d1
tctgccctttttttattttcttttttttattgcatatatttataacgacatgcacataactcgcatggaagtcatagcggtgcatacaagtcactacaatgtgtacatttatacaggccataactatataccattactacgactatcaaatcacatgacaatatacaaagcaccaccagtcgcacgacttactacttaagaacacatgcctaaaagatctatgtttatcaccactttcaacaccaaccaactattgagactctactactgattgcagctcaact

SEQ ID NO: 12475 - DNA, 205 bp, Glycine max
  Clone ID: jC-gmfl02220140f06d1
attgtatgaataatgcgggcatcaaggccaacatgtgtacattataaggcctaaatataaccatatacgatattatacaatcacaatttcatatcccagcatcccacggcttatacataagaacacagactaaaggacctttggttaacaccactttcaatacctacctacaatgtagattctacatctgattgcacgtcaactg

SEQ ID NO: 12476 - DNA, 330 bp, Glycine max
  Clone ID: jC-gmfl02220140f07d1
agtctatatcatgagtgcgtcagtatcgactacgcaagatcattaaagtaataccacggtagatcacgctcactactcccttttttttttttttttttaaacatatttttaactattttttttattatataaataatacgggcatcaagggcaacatctgtacattataaggacaaaatataaccatatacgatattatacaatcacaatttcatattacagaaatccctgtcttatacataagcacacagactaaaagatcaaaggttaacaccaccttcaatagttacctacaatttaaattctacatctgaatgcaggtcaaatgct

SEQ ID NO: 12477 - DNA, 329 bp, Glycine max
  Clone ID: jC-gmfl02220140f08d1
gctcaaatgctgatcgtgcgtacgtctacgatcaggagtccagtacccgggtctacgcgctcacttgctcggcggccgcccttttttttttttttttttaagcatatttttaacgattttcgttatcggatgaatgatgcgggcataaaggtcaacaagggcccatcataaggacaaagtataacgagatgcggtattgttcaagcacactaagatgctgcctcagtggctgacgcatgcatcagaacacaggcttactgatcattagatgtcgccaaattctatagctgactacgatatagatgcgacaggtgactgcaagttagcgg

SEQ ID NO: 12478 - DNA, 318 bp, Glycine max
  Clone ID: jC-gmfl02220140f09d1
agctcatctgcagcgggttgggcgatacgcatccatcccggtctaccgctcactagccggggtcgccctttttttttgctatgcaaaggaacatttcagactttttgaagccgtcgagcctcgcgtctcaggggaagcaaccgtccaggaaaacgactcataataaccatacacgatattaaacaacgacaattacaaatcccatacatcatccaagtatccatacgaacactgtcaaaaggatctcaggctagctccactttcaacaccaaccaactatttacactccacaacggaatgcagctcaacggttatcac

SEQ ID NO: 12479 - DNA, 388 bp, Glycine max
  Clone ID: jC-gmfl02220140f10a1
gtactagaactagggtttgagccttgtcatcacttgacgacaatgatcgacgacgttgactatcctgacttccgagccttgctgagccaggagggaggctcctatgatgagaggatatcggacgagcagtagccaaccgagcagaaacccagtgcaagggagaacaaacccataacgaccgagtgatagcaggtgagctgaattccagcgctgaatgaaaatgggtggtaggtatcgtgtctggtgctaaagtaaaagcttaacgggtgcgagctgaagcatctgcacgtcatgttgggcttcgatattggaatggtgcgaatttggatatcgatataacgagcactgataatggagacatgatgagacttgttgcacgcattacaca

SEQ ID NO: 12480 - DNA, 345 bp, Glycine max
  Clone ID: jC-gmfl02220140f10d1
aagcatacttttaacgcttttcttaatcgcatgagtaacgcgggcatcagggccaacttgtgtacatgatcaggcctcactattaccatatacgatattaaacaatgacaattacaaagcccatcatcgacgacgtatactaacgaacacacactacaagacctttgcctagcaccacattcaataccaacaaactatttagactccacatctgaatgcagctcaactgttataactcagtatgtaacgtctgcaatgagtggctccgggcatcagcactttcggagttcagtacgtgcgagctcctcttatcacaggagccatcactcccggctcaagaaggat

SEQ ID NO: 12481 - DNA, 234 bp, Glycine max
  Clone ID: jC-gmfl02220140f11a1
gtacaagaaataggtgatgagctatttcatcacttggcgacaatgaacgacgacgttgactatgctgacttacgatccttgctgagccagacgggaggctcctatgacgacaggataacggacgagcaataatcgagagagcagaagccgagagcaagagagatcacagccataacgaccgagtgatagcaggtgatccgaacttaagcgttgaatgaaaatgggtggtaggta

SEQ ID NO: 12482 - DNA, 272 bp, Glycine max
  Clone ID: jC-gmfl02220140f11d1
aacgcatgactttattgaaagaatgacgcgggcataaaggccaacaagtgtacatgatcaggccaaactaataccatacacgatattaaacaaagacaataacaaagcccctcgtcgccgactcatccttaggcacacacactaaaggatctcaggttatcaccacgttcaacaccaaccaactaagtagactctacagctgaatgcagctcaactgctataagtcagtaatcaaaggccagtactgtgtgccttcgggcactcacgctctt

SEQ ID NO: 12483 - DNA, 567 bp, Glycine max
  Clone ID: jC-gmfl02220140f12a1
gagcaatcatttctgcctgggccatttgctgtggagatgtcttcggcagtttacaaggggtgggttttcactgatcaagcccttcctgcggatcttatcaagagaggaatggcagtggaggatccatcctctccctatggccttcgccttgtgatagatgactacccttatgctgttgatggactagagatatggagtgctatccagacatgggttaaggactacgtctccttgtactatgccacggatgatgcagttaagaaagactcagaactccaagcttggtggaaggaagctgttgagaagggtcacggtgacttgaaagacaagccatggtggcctaagttgaacactcttcaagatctgattcacatttgctgcattattatatggactgcttcagcactccatgcagctgtgaatttcggacaatacccttatggcggtttcatcctaaatcgtccaactctaaccagaagattgctcccagagccaggaaccaaagaatatggtgaacttaccagtaatcatcaaaaggcttatttgagaacaattacaggaaagact

SEQ ID NO: 12484 - DNA, 546 bp, Glycine max
  Clone ID: jC-gmfl02220140f12d1
gacatagagaaatttgatttgacattcatagatcagaatatcagacttacatacgggtgaacatgatacgggtgaacatgataggagcacaatactatacataaaaactgacacaacaccctattagatatgaaaaactagatagcatccaattacaaaacttaagcatacataagaaaattatgcacacataagtttgcacgtttatttgtcaatgagaggtacgttggaaggaaagaaaaccacacaccacacaccacacactctcattagatagagatgctgttgggaattcctctgaaagtaaggccttccccactggtaggaagaagcacagtgtagggcatctgcgccggtccattacggttcctaaggcttgaattcttgttcctccctgagattttgtcctcaatttccttcagcttgtttccaaacttcttaaaggcttgaattgcctttgtgtcatcagtccaatttggattgtccctctgtccaaggtagacctcatcagaagcatgccttgacaatatctctatcactgttagg

SEQ ID NO: 12485 - DNA, 565 bp, Glycine max
  Clone ID: jC-gmfl02220140g01d1
gaattccaacactgccccttaacaagagttattcttaagacattctagagcggggacttaagtcattgcatccaactaaactacatcaaaactaggaaacggaaagatcccttcatgaatatagcagacgcgatataagctctatagtgcacctaagagacaaccttcaacggataaaatctgaaaagacaaattaaagtacaaaccataaacactgtacacaaactaccatgcactcaaagtctatccatatgctaaagatttaagccgcagttgcttgttgggcggcaatacttttcctagcttcctcaatgattgctagcttaatacctttacccttgggaagagatatccacggctgagctcccttgccaatggtgaacacattgcccattcgagttgcaaattcatgcccagaagcattctgaacatggatagactcaaagcttcccttatgcatatatatgttcttgatcactccaacacgaccgctattccttgcagccgtcaccatgactacattcccaacatcaaatctgttgaaatcaacaatcttgttgctctc

SEQ ID NO: 12486 - DNA, 240 bp, Glycine max
  Clone ID: jC-gmfl02220140g02d1
aaaaacagaaaaaggcaattaaattacattaaaaaaggcccgggtttaattcccggtgggtctaggttttgcaacccaatcaaaggggccgggacaagtttcccccaggggaagcgttcgttttgtaaaaaaccgcattcgggggggaaggggctccaaagggaccggaaaactttggggcgggggccttccaaatttcatttttggcaaaggggaatttcccagggcccggtaaatggt

SEQ ID NO: 12487 - DNA, 529 bp, Glycine max
  Clone ID: jC-gmfl02220140g03d1
ggttacatatttattattattattgtgagacattaatatttgtagcatttaacctaaagttcctatagctaacaacagctacactaactagctaactacagcttcttcagaagacagaggaaccagacaagggatcattcaccaaattgaatatgttattccagcaatgcttattattctcatcgaggctgttcacgttgcagaggcttccgcccccgttgattattgccaggttgtctgcttcctccgtgcccaagtcatcgttcgagtcatacacaaccaaagcagccttactatgatcatcattgtcgttattgagtccttcaaggatgacactggtggagagtgagggaggaacaacaacattgggattattatatttgttcgtactgctgatgttgtctgacgctctaaatgcttgcactgccggcataatatcgtcatcttgcatttgcaaattcaacattgaggtggtgtcgtcttttatgaacacaccatcgtcgatgagttgcgctagaggatacatgtt

SEQ ID NO: 12488 - DNA, 387 bp, Glycine max
  Clone ID: jC-gmfl02220140g04d1
gaacttcaaagcagtcaaaagggagtcacgaaagccaaaacagcacaaatacagacacttcacacacatccacgattatcagtaaggcacgtatcatatcaccctgtattaatatgccttctttttcttcacacatgctaacagctcaagtatctgtactaccgggccatcgaaacacagacacttcaaacaccaacagtaatgatggaactttgaagacacagctacaagttctactgagactgcccaaacacggaaaatcctgcatttacatcagtgtaccctccatctatcacaagattgtgaccactgacatacttggactcatcacctgccaagtatagagcagctatggccgcatcgttaggcacaagatgagcccctttt

SEQ ID NO: 12489 - DNA, 186 bp, Glycine max
  Clone ID: jC-gmfl02220140g05d1
aaacgaatgactttatcgcaggcaacacgcgagcatcaagtccaacaagtgtacattaccaggactaagtataaccaaacacgaaatgaagcaatcccaataggatatcccccgatcaacgaccaaccctatagaacacagccaaaaggaccacagttcaacaccacttccaacaccagcaaccaa

SEQ ID NO: 12490 - DNA, 227 bp, Glycine max
  Clone ID: jC-gmfl02220140g06d1
aagcatatatttaacgattgacttaattgcatgaataacacgggcatcaagtccaacatgtgtacattataaggcctaattataaccatatacgatattaaacaatgacaataacaaagcccatcattgaaaggcttatcttaaagaacacagactaaaggatcactgtttaacaccactttcaacaccaaccaactatttagattctactactgattgcagctcaa

SEQ ID NO: 12491 - DNA, 219 bp, Glycine max
  Clone ID: jC-gmfl02220140g07d1
acatcattgcatgaatcacacgggcatcaaggccaacaagtgtacattataaggcctatatataaccatatacgatatcatacaatgacaataacaaagcccatcattcatcggtttacccttaagaacacagcctgaaggatcattggttatcaccaaattcaacacctaccaactatttacattctacaactgaatgcagctcaactgatatcactc

SEQ ID NO: 12492 - DNA, 345 bp, Glycine max
  Clone ID: jC-gmfl02220140g08d1
gttcatcgatgctcatgcgaatttcgtatcagcagtcagtcccgggtttacgcgctactagccggcggccgccctttttttttgtttttttgataacaatttttattgatttttgttatatgatgtaggatacggaggtaaagggtaaataggacccagcaataccacaaagcataaagagaggctgttatgttatggcaggcaaaggtgtcggttcagtggctaaagctgcagcagaatattagcatccttagcgtgagaagttggcaaaatataaagatgagtacgctaaagatgcgacgggatactgcgagccgggggcatggaagccgcttaacatttgtg

SEQ ID NO: 12493 - DNA, 285 bp, Glycine max
  Clone ID: jC-gmfl02220140g09a1
gtactataactagggcttgatccttttcatcacttgacgacaatgatcgacgacgttgactatcctgatttacgatccttgctgagacagacgggaggctcctatgacgacaggataactgacgtgcaaaaaccgactgagcagacacccagtgccagggagatcacagccataacgaccgagtgataacaggtgatctgaattaagtcgttgaatgaaaatgggtggtaggtatcgtgtctgctgctaaagtaaaagctctacgggtgcgcactgaagcatctg

SEQ ID NO: 12494 - DNA, 224 bp, Glycine max
  Clone ID: jC-gmfl02220140g09d1
aatcacatgaataatcagagttacatgggaactacgatgacaaggaaggatatcattataaccatataaactattaaacaatcacagttagaaagctcaaagtcctcggatgacacatgggatcacacacttaaagagcactggttagcatcacattcaacatcaacgaactaattacaatcacacatctgatagcagttcagctgttctaacttgaaattaat

SEQ ID NO: 12495 - DNA, 396 bp, Glycine max
  Clone ID: jC-gmfl02220140g10a1
gtacaagaactagggtttgagccttttcatcactagacgacaatgatcgacgacgttgactatcctgacttacgagccttgctgagccagtcgggaggctcctatgatgacaggatatcggacgagcaataaccaagagagcagaagacgagtgcaagagagatcaaagccataacgaccgagtgatagcaggtgatgcgaatgacgtcgccgaatgaaaataggtggttggcaccgtatttggtgctaaagtaaaagcttcacggttgcgcgctgaagcatctgcacgtgatgttggactttgctattgaaatggtgcgaatatggatatcgctgtagcggagactgataacggagacatgatgagacttgatgcccgcatgacacatgcaatga

SEQ ID NO: 12496 - DNA, 215 bp, Glycine max
  Clone ID: jC-gmfl02220140g10d1
cttaaacgaatgaaagattcgggcataatggccaacttgtgtacatgataagtcctatttattaccatatacaatattacacaatgacaataacactgcaccaaatcatgcgctcatccttacggccactctctaaaggagctctggttatcttcacattcaacaccaaccaactattgacactctacaggtgaatgcagctcaactgatctcac

SEQ ID NO: 12497 - DNA, 232 bp, Glycine max
  Clone ID: jC-gmfl02220140g11a1
gtacaagaagtaggttttgagcgatttcagcactagccgacaatgatcgacgacgtgggctatgctggcctccgatccttgctatgccggtcgggaggctactgtgatgacaggatgtgggacgagcagagaccagagaggtgctaagacgagtgctacagagatcaaacctcttaggaccgagtgatagcaggtgatgaggacgacatcgtcgaatgcaaattcagtggtg

SEQ ID NO: 12498 - DNA, 266 bp, Glycine max
  Clone ID: jC-gmfl02220140g11d1
aaacaaaattttaacgcttgacaaaattcaaaaaaacacacgggcaaaatttccaacaagagaacataaaaagcccaaaaaataaccaaacacaatattaaacaaacacaataacaaataccatcgtcaccgatttacccttaggaacaaacactaaaggaactcaacacatcatcaaattcaacaccaaccaactacttagactcaacacctgaatgcagcacaaatgatctaactcagataatcaaaggtaagtaatccatgtg

SEQ ID NO: 12499 - DNA, 573 bp, Glycine max
  Clone ID: jC-gmfl02220140h01d1
atcaccaaacttttcatttttttgctgttctaaacagaattccaagacaatggagtaaagatccacaccaagacatcctctcaacaaaaagacttcttattttctttacctatcaaacatgggagtagtaaaaacactagaccatatagatagataagatacggtctgatacaattcattctttagttaaagtcatctgtcttcctcacaggtcctctgggccattaatttccttgtctacaatggcaacaccgtcgggaacttccagctttacaccgggctttgatacaatgctgactttccccttgaggataacaccagctccaaaccatacatcaccagccacttttagactgtcaagctcaacgatactaggaattgacttgaagcggcccaagaagttgctaaccttcttaaattctggtcccagttcaatagaagggttttcaggattttccctagctttgttccgaatgacatatccgtcttccaagtgtagaggtcagactggacaagaagcaaatctgaagttgccttcacaggaaggaatcgtgatcgaggaacattaatccc

SEQ ID NO: 12500 - DNA, 394 bp, Glycine max
  Clone ID: jC-gmfl02220140h02d1
aattattaagaagtaataggattgttcctaccattaagtgtactcaaatattgctcaaagttgatcattcatcattctgtccaacagtgaattctccaaaactgagatattaaatgccgaaactgacctgagatagacagtaaccaatatagaagccgccaacttcgcactgacagtaactaacatagaagaagcctactttgcacgtaaaagtgacttaatgatagcatcactcataccatcagcatgagcaaacatgtgaccagaaccttggagttcatgatagtgaatccatggaagcttttgcgctatgtatcgttgcaatgtaactggaaccatgagatcctgatcttcatgccaaagatggacagagccttcattatttggaaatggg

SEQ ID NO: 12501 - DNA, 555 bp, Glycine max
  Clone ID: jC-gmfl02220140h03d1
aattattaagaagtaataggattcttcctaccattaagtgtactcaaatattgctcaaagtcgaccattcatcattctggccaacagtgaattctccaaaactgagatattaaatgccgaaactgacctgcgatagacagtaaccaatatagaagccgccaacttcgcactgacagtaactaacatagaagaagcctactttgcacgtaaaagtgacttaatgatagtatcactcataccatcagcatgagcaaacatgtgaccagaaccttggagttcatgatagtgaatccatggaagcttttgcgctatgtatcgttgcaatgtaactggaaccatgagatcctgatctccatgccaaagatggacagagccttcattatttggaaatgggtctccaagatcaaggggactatattcccagttaccgaaaccaatatttaagtcgcggtggagggtttcataatcaccttgctgccttacctgtgccacataactctttctattagacatcttatgcacaagttctttgtcttgatgagaaaggttttccgg

SEQ ID NO: 12502 - DNA, 270 bp, Glycine max
  Clone ID: jC-gmfl02220140h04d1
agggagccacgataaccattattggactgatacagacactttacacacaaccacaatagtaaataaggcaggtttcttaaaaccctgcctaaaaatgcctacttgggctataagatgctaaacagacactgacctagacttaaagggacaacaaccacagcaaaggcctttacctacaaggaggagggtacattgaagacacagcctcaaaaacaactgagactgcccataagggggaatttatgccactatacaagtggaacctccatg

SEQ ID NO: 12503 - DNA, 483 bp, Glycine max
  Clone ID: jC-gmfl02220140h05d1
tgcttatcagcgtgaaagcgaagttagcttcagatcatgcatttcagtacagaattatagtctcaggatcgatcatgctcactatgtcggcggctcgccctttttttttttttttattttaatcttttaaagtttttgaacttcaaagcggtctaaagggagccacaaaagccaaaacagcactaatacagacactttacacacatccacaattatcaataaggcaggtttcatataaccctgaattaaaatgcctactttttcttaacacatgctaacagcacaagctcatgaactacagggccctcgaaacacagacactgcaaacaccaacaataaggaggcaactttgaagacacagctacaaatacaactgaaactgcccaaacacggtgaatttctgcatctacatcagtgtaccctccatgtatcacaagattgcgaccacttacataacttggactcatcacctgccaagggaag

SEQ ID NO: 12504 - DNA, 236 bp, Glycine max
  Clone ID: jC-gmfl02220140h06d1
aacgcttgacttaattgcaagaatcatgcgggcataaagtccaacaagtgtacattaaaaggcctaattataaccatatacgatattaaacaatcacaataagatagaccctcattatcggcttatccttaagaacacagcctgaaggatctttggttatcaccacattcaacacctaccaactatttacattctacaactgaatgcagctcaactgttatcacttaatatgtaaa

SEQ ID NO: 12505 - DNA, 207 bp, Glycine max
  Clone ID: jC-gmfl02220140h07d1
aagcatatatttaacgattgacttaattgaaaaaataatacgggcataaaggccaacaagtgtacattaaaaggcctaactattaccatatacaatattaaacaatcacaataacatagaccaccatcgtcgacatatccttaagaacacacactaaaggatctttgtttatcaccactttcaataccttcaaactattcacattct

SEQ ID NO: 12506 - DNA, 237 bp, Glycine max
  Clone ID: jC-gmfl02220140h08d1
aacgcttgacttgattgaataaattatgcgggcataaaggccaacaagtgtacatgatcagggctatatattgccaaagacgatattaaacaatcacagttgcacatcaccctgtatacgacttatactaaagctctcactctcaacgaggattcactagatgcaatgtcaatacctgccgacaaattagactccacatctgagtgcagcacaactggtacatgtcaataggataat

SEQ ID NO: 12507 - DNA, 285 bp, Glycine max
  Clone ID: jC-gmfl02220140h09a1
gaacaataaatagggctcgatccttttcatcacttgacgacaatgaacgacgacgctgactctcctgccttacgatccttcctgagccagtcgggaggctcctatgacgacaggatatctgacgaacagaaaccgactgagtagatgccgactgctaactcgatcaaagccataatgaccgagtgataacaggtgctctgtactaagtcgttgaacgaaaatgggtggtaggtaccgtgtacgctgctaaagtacaagcttttcggttgagatctgaagcatctg

SEQ ID NO: 12508 - DNA, 214 bp, Glycine max
  Clone ID: jC-gmfl02220140h09d1
acatgattgaataaaatatacgggcataaaggccaacttttgtacatgataagagctaaatattaccaaagacgatattaaaaattcacagtagcacattaccctgtataacagtttataccaaagctcacactctcaactaggatacacaagaagcaatgtcaaaacctgcccacaaattacacaccactgctgaggacaatacaaacgatat

SEQ ID NO: 12509 - DNA, 182 bp, Glycine max
  Clone ID: jC-gmfl02220140h10a1
gtacaatgaatagggttggagccttttcagcactagacgacaacgaacgacaacgctgactctcctagcctacgatccatcctgagccagccggcaggctcctatgacgacaggagaaatcacgagcagaaacccactgggtatgatgacgactgctacactagatcaaaggcataatgacc

SEQ ID NO: 12510 - DNA, 251 bp, Glycine max
  Clone ID: jC-gmfl02220140h10d1
aacgcttgacttaattgaatgagtgacacgggcataaagtccaacaagagtacatgacaaggcctcggtattaccaaacacactatgaaacaatcacaataagaaagccccggctcaccgatctaccctaaggctcacgccctgaaggatcactggtgatcaccaccttcaataccaaccgactacggagatgccaatgctgattgcagctcagccgatatcactcgaaatgaaaggcccgcaatgtgtgc

SEQ ID NO: 12511 - DNA, 300 bp, Glycine max
  Clone ID: jC-gmfl02220140h11a1
gaacaatgaaaaggcttggagcctttttagcactagacgacaacgaacgacaacgctgactctcataccatacgatccatcctgagcccaccagcaggctcctatgacgacaggagaactcacgaactgaggtccactggatagatgacgactgctacctatatcaaaggcttgatgaccaagagatcaaaggtagtgactattaaaccgttgatgcaaaatgcgaggtaggtatcgtgaacgatgtgattgtacaaccatttaggacgagctctgaaacatctgcagaacatgtcgatc

SEQ ID NO: 12512 - DNA, 282 bp, Glycine max
  Clone ID: jC-gmfl02220140h12a1
ggacaatgaaagtgcttggtgcctttttagctctagacgtcgacgcacgacaacgcggtggctcataccatgcgcaccatcctgggcacacctaccggatcctacctctacaagcgaaaacaggcactgaggtccactacattgatgacgactcctgcctatgtcgaaggcttgatgaccaagagatcaacggcattgactacaaaaccgttgctcataaatgcgaggtatatatcgtgaactacgtgcttggagaaccatttaggtcgaactctgaaacat

SEQ ID NO: 12513 - DNA, 416 bp, Glycine max
  Clone ID: jC-gmfl02220140h12d1
acgcttgacttaatagaatgaaaaacacgggcataaagtacaacaagagtacattacaaggcctcagtataaccaaacacacaatgaaacaaacacaataagaaagcccagtctcatcggactacccataggctcacaccctaaactaacaaagcgtataaccaacttcaaaacccaccgacaattgagactccaacgatgatagcagcacagacgatgtaactagaaatgaaacgtccgcaatgctgggcttcgggcatcagcagacatcgagtcagaaagtgcaatgctcgcggatcagagaagcctagcttcggacccaggacggaacgggggctcagagctataacgttgtactatcatggtggatatctgctctgaacaatgaatggctagtaacaggtccatgagccgaa

SEQ ID NO: 12514 - DNA, 493 bp, Glycine max
  Clone ID: jC-gmfl02220141a01a1
tttgatcgttaacaatttctcttcttatttgtttaatgtttttggtttcttaggtgaattattcaagaggacccgacaatcccacaaagcagaaagagaggttgttatgttatggcgggcaaaggtgttggttcagtggctaaggcagtagcagaatatcagtatccttggcgtgagaagttggcgaaatataaggatgagtttgctaagggtgtgtggggatactgggagctgggggcatggaagccgctgagcatcggtgctcggcatcgcgctagaattcgcaaggaagtcctccttgctggggaagattggccgtatgatcctgaaaggaaggagatgaagaccaggaggaaaggacacaaatgtgataggatatccgctgagaagcgcgcaaacactgccaagttgatggagaagatgccccagatgttgctggattacaagaagagaaggtggcagaagaagatgaaggaagaagaccagggaaaac

SEQ ID NO: 12515 - DNA, 337 bp, Glycine max
  Clone ID: jC-gmfl02220141a01d1
ctgtagtaaagcccttttgcccgatactcacaaggccatactctagaaaggggttattagggatcgaaaaacgtaaccaaagttaataatccatttggcccccaaaacaggtgtaacatgtcatgattaaatactacatttctcaatggcacagcttaatgctaaacctggccaaaacttgaggaggagcaaaatcaaagttttcccttgtctctctacttcatcttcttctgccaccttctgttcttgtaatccagcaacatctggggcatcttctgcatcaacttggcagtgtttgcacgcttctcagcggatatcctatcacatttgtgtcctt

SEQ ID NO: 12516 - DNA, 629 bp, Glycine max
  unsure (1)..(629): unsure at all n locations
  Clone ID: jC-gmfl02220141a02a1
ctcgagccgctttgaggtttcttccgttttttagagtggtgagaggatggtgggtgttatttcgttggtaacagggatggctggtcctagtgggtttggatcagcttccactgcagaacaggttactgatggaattgatgccagcaacctcactgcaattatcacaggaggagcaagtggtataggcttggagacagcaagagtgttggctcttcgaaaggtccatgtgatcattgcagttcggaacatggtgtctgcaaaggaggctaaacaacaaatactagaggagaatgagtctgcacgagtggacgtaatgaagctcgacctttgctcagtgaattctattacatcatttgtggacaacttcatagctcttgatcttcctctcaacattttaataaacaatgctggagtaatgttctgcccattcaagctctcagaggatggcattgagatgcaatttgcaacataccatcttggtcatttccacttgacaaacctgcttcttgacaaaatggcacanactgcataagccactggaatagagggcaggatcattaatctgtcatcaattgcccataactacacttattgaaggggattagatttaatagatcaatgaacgaaag

SEQ ID NO: 12517 - DNA, 464 bp, Glycine max
  Clone ID: jC-gmfl02220141a02d1
aagccaggaaattgcaaacaattttatttgattggaactacacaactaacttatgggtgaaacgaaacctttggtacaaaaatgcttggatgaaaagaaatgaatcacctcctgggggttcagtggggaataaaatgctgggaaacatcctgatacaacgacggattatgactttaacgggaacgggctttttattgcataacgggctggttttcataaactggtgaccacaacgaaggcttttaatttccctaaggggaaaaccacctttctgcaagggcactcaagctttcgaaattggttcgaccaaatcgttactggaatcccagagttcctttgcaagctgattgcttttggcgtgtgaacttggtttgcattgtttgcaatccacaatggacttcccagttgcacctttcacgcttgggaggagagcaacataacatggcgtggctgctccctggggg

SEQ ID NO: 12518 - DNA, 635 bp, Glycine max
  unsure (1)..(635): unsure at all n locations
  Clone ID: jC-gmfl02220141a03a1
cgatggaattggaagttgtcgagaactacttgaaagccgccggcgctgaactcttcgccgaaggtggccggcgaggcattcgtatcaatggctggttgatcgagactcggaggcactccatactgaactcttccacattccaagagtgggaacagaaactcgatacgtctcatttaccagaaatggtttttggggaaaacactttgattctaaaacacttgagcagtggaaccaacattcattttaatgcatttgatgctctacgtggctggaaacaggaagccttgccgccagttgaagttcctgcggcggctaaatggaaatttagaagcaagccctctcagcaagtaatactagattacgactatacatttacaacaccttattgtggaagtggcactattgagattgataaagatctgaatgagggagagacttctaaggaaaccagtgatatccattgggaagactgcaaggatcaaattgatgtagttgcacttgcatccaaggagcccatacttttctatgatgaggtggtgttatatgaggatgaactcgctgataatggagtatcacttcttactatnaaagtgagagctatgcctagctctcggttcttctgtgcgtttctggct

SEQ ID NO: 12519 - DNA, 392 bp, Glycine max
  Clone ID: jC-gmfl02220141a03d1
ttgtttgttttgtttgttgtctttatctttttgttttgttctttttttcgaatctacttggagctagtttgtcagcaatgaactcgtcaatttggcaggtaaaacgaatccctgaggctattacttagagctcaccccaacccttcctgaaaccttcagacaagaacagagcatgtttagcatgcatggatgagcttatctcctctgaagcaatttatgggtccaaacaggcatggcaaagatgaattaatgtgaacgaggaccctcttggcttatggggatttacagttgtagtccgttgaagggaaagctccagcttttgggtcttatgcattctggcggggtgcccctggctgactaaactcggactaccattcgcaccaaaattaaag

SEQ ID NO: 12520 - DNA, 554 bp, Glycine max
  Clone ID: jC-gmfl02220141a04a1
gtcgtggccgtgtcgcagcaaaaccaatccacatattaacttgtttgctctaagtcatggctctgatcttgcacgcaaccaaagcaaacaagaatgctttcaagactctgattgcggcagagtacagtggcgtccaagtggaattggcccctaatttcgagatgggtgtctctaatagaactcctgaattccttaaaatgaatcccataggaaaggttcctgtcttggaaacgcccgatggtccagtctttgagagcaatgccattgctcgttacgttgctcgactcaagggtgacaacgctttgttctcatcttctgccattgataatgcccacattgaccagtggattgacttttcatccttggagatcgatgctaatattatgaaattatacctaccaagacttggatttgccccataccttcctccagttgaggagggtgcaaattctgcattgaagagagcatgtgaggccttgaacactcatcttgcttgcaatacatacctggatggccattctgttaccctggctgatatcataacgacgtgcaac

SEQ ID NO: 12521 - DNA, 420 bp, Glycine max
  Clone ID: jC-gmfl02220141a04d1
tttctttttcttgttttattttatcttttctatttattaactttgttgtttttatttatggcttttgttttgtactctacctatgcaaacaagaatgctaaaaagactctgaccgcaatagagcactttggcgtccaagcggaattggcccctaataccgagatgggtgtctctaatagaacccctgaatggcttaaaacgaatgccacacgataggaaactgccctggaaacgcccgacggttcaggcggggagagcaatgccattgctcgttacgaagctcgactcatgggagacaacgcttcgccctcatggtctgccattgccaatgcccacattgaccacccgattgacttgtcatccttggagatcgacgctaggactacgaaatgatacccaccaagaactggatttgcccca

SEQ ID NO: 12522 - DNA, 561 bp, Glycine max
  Clone ID: jC-gmfl02220141a05a1
tcataccagagactccatctccctctcgcacgcgacgagggagtcccgcttcggaatctcaccccctctttctgctaattcgcaagatggttgctcagaaattcgttgtcgacttgaacaagccccttgtattccaggttgggtatcttggggaagcctacgatgattgggttcacgatcctatcgtaagcaaagaaggtcctcggtttttccaaagcggtttcctcgagttgttcacacgcactgcatggtgggtgattccaaccgtttgggtgccggttgcgagttggttcatttccaactctgtcaaatcaggcctcccttctcttgatgtagctctgctcgtctttctcggcatctttgtttggactttggctgaatacaccttgcaccgtttcctcttccatgttaaaaccaagagctactggggaaataccttgcattatcttctccatggctgccaccacaagcaccccatggatagctatagacttgttttcccccctgtagcagcagctatattagccctcccgatctggaacttggtgaagctgatatgca

SEQ ID NO: 12523 - DNA, 499 bp, Glycine max
  Clone ID: jC-gmfl02220141a05d1
gtgcacagggaggcacgctttatacaataaatttgataaatgtatcaaattttacaggatgtttgacacaagatggtggcacgttaaccctcagaaacatcaattggggagcaaaataattagacaatcaagacatgaataatgaattatcaacatatctcgtttgaagctcctgaatgaactatgcttaaccaatgaacaaatgcaaccttgacagtaacttatctacttttggcatccccctttgattgaggaggaggaaccgttccaaaaactttatcccacagtggtgatgtgatcccaaagccatagttctggagccgataatgatgattcaagtgatatttcttgagacttttgggcacatcagactttggttgaccatggtgtaagtagtaatgggtgcaatcatacatcacatagcccaacaaaatacctacaaacaccgcaggagcaactgaaggggtgcatatcagcttgaccaagttccagatcggga

SEQ ID NO: 12524 - DNA, 570 bp, Glycine max
  Clone ID: jC-gmfl02220141a06a1
ggttttgagaagccatctgccattcagcaaagggggatagttcccttctgcaagggacttgatgttattcagcaggctcagtctggaactgggaagacggctactttctgctctggtattctgcagcaacttgactatagcttgacgcaatgccaggccttggttttagcaccaactcgtgagcttgctcagcagattgagaaggttatgcgagcacttggagattatctaggtgtgaaggttcatgcttgtgtgggaggtaccagtgtgcgtgaagaccaacgcattctatctagcggtgttcatgttgtggttggtacccctggtcgtgtgtttgatatgctgcgcagacagtcacttctgccagatcacatcaagatgtttgtattggatgaggctgatgaaatgctttcccgaggttttaaggatcagatctacgatatatttcagctgctgccatctaagattcaagtgggagttttctctgctacaatgcctcctgaggcccttgagatcactaggaagtttatgaaccaacctgttaggatccttgtgaagcgtgatgagctc

SEQ ID NO: 12525 - DNA, 461 bp, Glycine max
  Clone ID: jC-gmfl02220141a06d1
aaattaaattactaagcctattaaacaaagtttaagagcggaagttcatccaatgaaacgaaaggggggggagactggttagagtgagaaacattacataacagtttccaaacgcatactaatttcatctactacgacggaggacaaaatctgatcaaaggagctcatgatcatttgaaggctgctcctcaacttgcacgttgtaaaacttctggatgtcaaacagcattttctcgtcatcctttgggacaaaattgatcgcaacacctttccttccgtacctcccactacgaccaatacggtggagatagttctcaggctgtgtagggagatcaaagcttataactagagacacttgttgcacatcaataccacgagccaaaagatcagtggttatcaagacacgggaagacccataacggaattcacgcataataatgtccctggtattctggtccatg

SEQ ID NO: 12526 - DNA, 646 bp, Glycine max
  unsure (1)..(646): unsure at all n locations
  Clone ID: jC-gmfl02220141a07a1
caaactcaagctagcctttgggggatatgatagagaagaagacacagtgtgagaaaaaggaaaaaatggaaggtgaagaaactgagatgaaacaacaatccaggttcaaaaggatttgtgtgttctgtggcagcagccctgggaacaagagtagctataaggacgctgctattgagcttgggaaagagttggtgtcaagaaatattgatctggtttatggaggaggaagcattggtttgatggggttggtttcccaggctgtttatgaaggaggtcgccatgtaattggagttattcccaagacactgatgccaagagagattactggagagacagtgggggaagtgatggcagtagcagacatgcatcaaagaaaagcagagatggctaagcactctgatgcctttattgccttgcccggttcgtacaacatggttccaccaatattccctcttaaaaagtcacgtatcattagacatcaattcaatattatgcactatctaatctacataaatttggcacattaaataaaaattacatcatttagatgattatgcattcttagntaaatacananaacacccatcatgcattattaaacctgttgatttaatttgatttgctcttcaaggacaatgtggtgtac

SEQ ID NO: 12527 - DNA, 367 bp, Glycine max
  Clone ID: jC-gmfl02220141a07d1
ggagatatggtaacggttataaagcacagcatctaaactgagataacccgtcggggcatgttcaacagggagtgaatgatcttgggcaatcgaccgggtgtcttgaaactctatatcgactctactattgaactggtgaaagactcaaagtaaggaaagcttgtgcttgacgatggtggaaaaatctctgatgggacatgggaattttgccccaatgatgtttatagacctcctatggatgagggtttatgtccacagattctatcacctaaagatttgcctgtgacaagtcgtatgtgcaaaaatagcgacatgtgacatgatgcaatgcttagcagttaaagataaaacctttgatgactatatt

SEQ ID NO: 12528 - DNA, 418 bp, Glycine max
  Clone ID: jC-gmfl02220141a08a1
gagcctcaagctgcactttttggaatgtgtgaatggggtcgcccccctgggaccaaatgggtctgatggagggggaagagacccaactgacacatctggccaagaccatgaggatctgggcgaacgatcttcacagacaggatatcgagcatacgtttagtgtcactggattggagctggtcaaagccatggcagagagaatgattgactgcgaagacctgggtagatcgataggcttgactgtgaaggtcatctactgtgcacatggaagcagacaggcattattaggagctacacttatggcgctggtgctgctaatgagtacatcagcttacatactggaacgtacacatccggtacacttacacagtatagagctcaagcacagcagagctcacagcagagcagagaggctttg

SEQ ID NO: 12529 - DNA, 443 bp, Glycine max
  Clone ID: jC-gmfl02220141a08d1
cctctatatggggatccatagtggatatgatttacaaacgaatccaatgaacgcctcacacagttatatatcaactgcatcaactgggagggaaactggcctgtgcacagagtgtcgatacactgagcccgcgtaatacctctttgctggtaccataccttctccaggggatgaaatcgccacacaatggtgggcccttcggttgtccgaattggggctgctttcacggacatgatggtgcctcctgtaatgacaattccacttggccgcaaagggtttcacctgatgcccattgttgcctccctataatgttcctgtcagtgaaggtgacacatggccattttctgttctgtgctcactgatacatctatgcgaacattgcccatactgtcgatccttgtgaccgcttacctacatttggtactaagctgtgagccatctga

SEQ ID NO: 12530 - DNA, 607 bp, Glycine max
  unsure (1)..(607): unsure at all n locations
  Clone ID: jC-gmfl02220141a09a1
aggcccttgagcttttctttctttctctgctctcttttcttttaggtttccactctcacacactctccctcttctctttctctgcaataatctctcttctcttcttcactctctcaactcctgccaaacccccatttccgcagttcttaaatttggagtctgatgtctccgccattgctggttaccgaagatgaagggcagtgccatgcctcgatggtagcatctgcatcttcaccatccctgaactgtttctccctaaatgaggccggatttaaagaatgcaattacctgggattgtcagattgctcttcggtggacagttctactgtcccgaatttgtctgatgagaaaaaggagaatctgaatttgaaggctactgagttgaagctcggccttccgggatcccagtcacctgaaagggagacagaacttttctcgttgagctcaacataacttgatgagaaaccactgttccctttgcttcctacaaaggatggaatctgctcattgtcttcaaaaactgtggtcttcggcaacanaagaggttttgctgacacaatggaccctgagtttcctgggcatgcanggataaacatgatgctatcac

SEQ ID NO: 12531 - DNA, 546 bp, Glycine max
  Clone ID: jC-gmfl02220141a09d1
tttgtttttttttttttttttgattgcaacatacattcaacttatccaaacaaacatgttcctataaagattacaagctccacaattactaatattcaaggtagcttcataaggtattatagtagaaacaaatgtaacacaaacaaaagaccaagacactattatgatacttgtaaccatagacaacatcttgaatagcagttaaccatcaaaacccggcattcagtcatttatatcataagttctctttccacactcttcatgttccaataccaactagcacctgctcctggatttttccatggccctgggagctaagccaatggcatcagaacccttcatgattttcagtcttttgcatgtgtcaatgaacatatcccatggtacatctccgacaagcatccagtcaccatctttatcttcataagtgagtacatattctgaaccatgcaggaggtccttcagcttgctctgactcaacatttctcttcctggagctccatgggaaccacattgacctagagtgaaacagctgaacattttctc

SEQ ID NO: 12532 - DNA, 383 bp, Glycine max
  Clone ID: jC-gmfl02220141a10a1
gatgagggcaactatgatagccctaaagctagtgggcgtagccacagccccagcaggagccctagggaagatgacaggagccccattgatgaagatgatgacaacaaccgtcgctcagggtcaccttgaaaaaagaactttctgataaaatgagatcaggatgtgacccaatttgtatctgctttgtttataaaatgcactccaggttaattatgtgacaattatttatgaaaacattttatatatgctatttttcagattcttgcggtcaagcaacatgtgtggcttacctagaatatgaagtgcatggatttgtttcaatgttttggcataatttaaaccaatatgaattattgtgagaaatttaaatttgacatgttttg

SEQ ID NO: 12533 - DNA, 386 bp, Glycine max
  Clone ID: jC-gmfl02220141a10d1
caaaacatgtctaatgtaaatttctcacaataattcatattggtttaaattatgccaaaacattgaaacaaatccatgcacttcatattctaggtaagccacacatgttgcttgaccgcatgaatctgaaaaatagcatatgtaaaatgccatcataaataatggtcacataattaacctggagtgcattttataaacaaagctgatacaaattgggtcacattctgatctcattttatcagaaaggccttttttcaaggtgaccctgatcgacggttgttgacatcatcttcatcaatggggctcctgtcatcttccctagggctcctgctggggctgtggctacgcccactagctttagggctatcatagttgccctcatcctg

SEQ ID NO: 12534 - DNA, 589 bp, Glycine max
  unsure (1)..(589): unsure at all n locations
  Clone ID: jC-gmfl02220141a11a1
ttatcaacccactcttagtactgaaatgggttctttacaagaaagaatcacttctaccaaagaggggtccataacttctattcaagcagtttatgtacccgcagacgatttaaccgatcctgcgcctgctacgacatttgcacatttagatgctactactgtactatcaagaggattagcggccaaaggtatctatccagcagtagatcctttagattcaacctcaactatgctccaacctcgaatcgttggtgaagaacattatgagactgcgcaaagagttaaacaaactttacaacgttacaaagaacttcaagacattatagctatccttggcttggacgaattatccgaagaagatcgcttaaccgtagcaagagcacgaaaaattgagcgtttcttatcacaacctttattcgtagcagaagtttttaccggttcgccggagaaatatgttagtctagcagaaacaattagagggtttaaattgattctttctggagaattagatggtcttcctgaacaagccttntatttggtaggtaatatcgatgaagctactgcgaaagctaccaacttagaaatggag

SEQ ID NO: 12535 - DNA, 365 bp, Glycine max
  Clone ID: jC-gmfl02220141a11d1
agttattccgatattcggacgcatcaacttgttctgaaatcacattgatagcctttactcgtgtcctagctcgtgtaagagctagatttgcctcaattgttcgtattgtgccttacggcttattcaaattaggttgtgctatttcaagagtttgctgcgcttcttggggatcaatgatactacccttttgcgtctaatttactaaaccagcgatctcagtagtgagtatcctagcaaaaccgctcatcaacaagatcgttaaccactgggcgttatgaagacctgtggcaaaaatccctattgccagcggtgctgcggcagacgcaccatctgtggttgatgagattactgcgttcgacgtggag

SEQ ID NO: 12536 - DNA, 494 bp, Glycine max
  Clone ID: jC-gmfl02220141a12a1
ggccccagttggaacccacttccggagtccaaaccccagagaacgtagccacaagggcaaaacccttccccccgccatggcacgcgtatcccggtcctcccccgcgcgcctcctctactccctctgctgcaccactgcactcgcggtcaccggcgtcgtccctcatcggcggcgccttccatctccggcacttttcagccgggaacgcggtgcgcacgatgccggacaaggagccgcggcggaaggagtcaatggagcggctccgcaacatcggaatctcggcgcacatcgactccgggaagacaactctgacggagcgggttctgtactacactggtcggatccacgaaatccacgaggtcaggggcagggacggcgtcggcgccaagatggactccatggacttgcagagggagaagggaatcaccattcagtctgctgccacctactgcactcggaaagactatacgattaacattattgacacgcctggt

SEQ ID NO: 12537 - DNA, 505 bp, Glycine max
  Clone ID: jC-gmfl02220141a12d1
ggtgatataatgagtgcaatagatagtatatcatttgtacggttcgagacgctactcgacatcggccgcccttttggatgtcatgtctttctttgctaggatcagtgttatattgtgattgaatgacagagacaaattagggcacattgcaataactcctgttgcagagctcaaacacgtatacattctaccgacttagcaccagcaataaatgatgatcctaaatgtcagcactccaagcaatatacccaatgagaagttcgcatgagcactcaagagccgccctcatgacatcatgtacatgggcaccctatggtagtggaaattaaaataggatattgaagctgatactaaatcagctgtatgggtaccatacgagtactcatgagctaaggcagtggacattgggctccagggatacagtgacgagccaagttacatgactcggtctctggcgcactctggagagacttgaggccagcgaccgcggtcggagctttagttg

SEQ ID NO: 12538 - DNA, 590 bp, Glycine max
  Clone ID: jC-gmfl02220141b01a1
ctcgagccgattaaaggtttgttccgttttccacagcgacgagagcaaggggggccctgggtccctattaacacggatggcccatcctagcgacctaagatcagctatcactgcagaacaagatactgatggaaatgatgccaacctacctaactgtaattatcacaagaggagcaagacagatacgcttggcgacagcaagagtgtaggctctccgaaaggcacatgtgatcattgcagtacggaacactggtgtctgcaaaggacgctaaacaacaaatactataggagaatgagtcagcacgagtgaacgtaatgaagctcgaccttggctcactgacatctattacagcactatgtagacaactccatgaactctcgaacgtcctctcaacaattcaaaaaacaacgccggaacaaatgacctgcccattcaagctctcagaggatagcacagaaatgcaatttgcaacaaaccatcttgatcattaacaagtgacaaacatgcctcctgacaaaatgcaacaaactgcaaaagccacaggaaaacaaggcaagatcataaatctggcatcaattgcccataactg

SEQ ID NO: 12539 - DNA, 512 bp, Glycine max
  Clone ID: jC-gmfl02220141b02a1
gagaagggaatcaaatttgccaaccagtaattgaacatgttatcacatacatgtctggtaggttactggatattcctttaagaaccaaatcaaattttgcattctcagaaccattgatgtattgttgtcggcagtggtgtggcggttctgttgttttatttagtgtaggtatacgccatggtttaataattaaagtctgagagctgtttgttgccaaagggattgaacgatcttaaaaccaggtttaggatttggcattccattaataatggtcccttttaactgtatggtttcacttaatgtaattgcagggtgttgtaccctttattcaaaaaaaaaaaaaaaaaaataaaaaaaaagaaaaaaaaaaaaaaaaagataaaaaaaaaaaaatataaataaaaaaagataaaacaatgaataatcaaaataaagcaaataaaaaaaaaagggggggcccccctttagggggccccatgccccggaatttaattcgggcccgtgtcctgggg

SEQ ID NO: 12540 - DNA, 518 bp, Glycine max
  Clone ID: jC-gmfl02220141b02d1
tttttttgtttttttttttgttttcttttttttttttattttttttttttcattttttttgggttatttgtttttttttttttatctaatttatattttgtatttttataaccattgatgaaaaaaaggggcgccacccccgcggcggtccgtagggcaaaccaccccaggaaaacgcccccctttaatagggagggcccgacagcagcccggggacaaaagagacgaaccacccttgggaccaaaaccacgataaggctttacattaaaaacggggcgggttccccgcccggaaaaacacaaagaaaccgccccccgctgggccccccattcacaaaggggggccaaaaaaacaaaaatcggggggggcccaaaaggggatcccccgcacccccccaaacaggtggggacaccccggcaaaaaacggggggggaaaaatttaccccccccgggggggccccaatcgggggtattcaccccggggagggaaaaacaagcctttttcatagggggcccc

SEQ ID NO: 12541 - DNA, 607 bp, Glycine max
  unsure (1)..(607): unsure at all n locations
  Clone ID: jC-gmfl02220141b03a1
ggttaaaggacttctcattgacaggaaattggaaacactagtagatgcagatttacatggtaactacaatgatgaggaggtagagcagttaatccaagtggccttactatgcacacaaggatctcctgtggaaagacctaagatgtctgaggtggtaagaatgctagaaggtgatggtttggctgagaaatgggagcaatggcagaaagacgagacgttccggcaagactttaacagcaacatacatcaccctaatgcaaattggatagtagattcaacttcccatattcaggcagatgaactatcaggtcctagatgataacattctaaggacaggtgaatacacaatactgccggctttctgttggaaagagatatacttctgatttgtgcatatgattttcgccctctctaccttttctcttgttttcatccttgtgcgcagattccatgcccattggtcagttgtgattattaaagatagataattgtaatttcttttgcgttgtcaagttgcaggatcaagtgtatgttacaacttactagcaactnttgtcattgtaggtatgaaaaattagatagagctttatggaaataaatacaattc

SEQ ID NO: 12542 - DNA, 406 bp, Glycine max
  Clone ID: jC-gmfl02220141b03d1
attgacttgattttgtttacactattttatgcatatttacatggtaacttcaatgatgattgaggtgagcatgtttaatcaagttggccttactatgcacacaaggatctcctgtggaaagacctaagatgtctgaggtgagaagaatgctacaaggtgatggtttggctgagaaatgggagcaatggcagaaagacgagacgttccggcaagactttaacagcaacatacatcaccctaatgcaaattggatagtagattcaacttcccatattcaggcagatgaactatcaggtcctagatgataacattctaaggacaggtgaatacacaatactgccggctttctgttggaaagagatatacttctgattagagcatatgattttcgccccctctaccttta

SEQ ID NO: 12543 - DNA, 574 bp, Glycine max
  unsure (1)..(574): unsure at all n locations
  Clone ID: jC-gmfl02220141b04a1
tcagaagcttcattatggctactcaaccgttacccttctcatcagcttcttctatagtaccaagtagtaacaatcctcacaatgatgagctacgcttcttgagcgacccgaaattcgagcgccatggcgaaatcttgttgctggtttttgttcttcttttcagtgtctttcttctggtaattgctatgttgatgtacttgaagagaattcggagtaacctccaacagaatgaagggtccaaattggaggcttagctggtgtatatcatcttatggtagatactgcagtctccaactgggatagaagttgcaagctattcaactctcactgaattgctgggttggtgctccaacactcgattgatttctaagagaaatgtaatttaatacaattctattagatattttatttcattgtgtgattagttttgttttaaatttaattttgatttacttttatttaaagcaactttaatagtaactntatctgcataggggcactcaagtaattntggtattttgccacatattaatctccaaagatatcaccttgttcgtccttctngatgagaatt

SEQ ID NO: 12544 - DNA, 451 bp, Glycine max
  Clone ID: jC-gmfl02220141b04d1
tttatattctttattatggattataagattaatccatctcatagttaataactaatccttactaaactaatcaatatggtcatagggaatgtggcatatgggtacggcccattaattaagggctgtacaaattgatgggtgatagtgttgggataaagcatctattcactatcattgattatggccactatgtaattgatctgacgtctaacttaagaactgctgccttttgcaactacttcatcctctgcatatcaagggatccatacacactgaaggacactgtccaagccgactgcgtcagcaagtacgaaatgtccaatcttctcgggttggctcaccccaatctaattctcatcaagaaggactaacaaggcgatatctttggagattaatatgtggcataataacaaattgacttgagtgcccctatgcagataaagttactatt

SEQ ID NO: 12545 - DNA, 603 bp, Glycine max
  Clone ID: jC-gmfl02220141b05a1
gggcttttccccttctctctcgctctctttcgctgcgtcctcggttatggcttctcgcaggctctcatcatctctgctccgaccattcctccgtccatctctgccggaatttcaagctccgacccctttccggctattctctgtcccaaacttttccactcgcgtttctccgatcgccattacaaaattacctgggactgaggtattctcacaatttgagtccggtaatggtttagcatcagtgctgagaagctctggaatgggcttgtaccagccagctggggggcttgtaccgccttttgctagcaggtttatgtcaacagaggcaacttctgttgattcttcttctcaagatagttcgatgctggagcctgaagttcctcctcgtatcaaatttaagagattagacaaaactgccaggcacattatgcagattttagacaaggaggcagtagaggaggtgagagggcaaagagagatacctgacataaagcccggttatattgtgcaactcacagtggaagtacctgaaaataaagagcgtgtctctattataaaaggcattgttatttgcaagacgtactgctggactcaatactacat

SEQ ID NO: 12546 - DNA, 392 bp, Glycine max
  Clone ID: jC-gmfl02220141b05d1
attacaatctcttgcgtattaccgtttcagatcatgtcaggttctatggatcgaaatctaactgcataatcttaattcttaggaggtaataaccctcattgaatcatatatgctagttgacgacacaccaaaggcaaacaaatacactgtacatactaagcttgacagatcatgaatcatcaaaaatgtcccccaagatgatgatcgatgtcaatctttaagtgggtccattccctgcctcagatcagctagttcggcccttctcactctcgttttgacaagcacctctatatactttatgtcaggtgaatacactggtaattgtgattcaatgccaacccctgcgatttacctcctaactccgaatgtcacattgagtccaacttctcggc

SEQ ID NO: 12547 - DNA, 572 bp, Glycine max
  Clone ID: jC-gmfl02220141b06a1
ccaatttactgctgatctttttgcaatgaaccacacagactttatcatcaccagcaccttccaagagattgctggaagcaaggacactgttggacagtatgagagtcacactgccttcacccttccaggactttaccgtgttgttcacggtattgatccatttgatccaaagttcaacattgtctctcccggtgcagacatgggtatatacttcccatacactgaaactgagcgtaggttaacagaattccactctgacattgaagagcttctttacagctcagtggagaatgaggaacacatatgcgtattgaaggaccgcaacaaaccaataatcttcaccatggcaaggcttgaccgtgtgaagaacatcacggggcttgtcgagtggtacgggaagaacgcactgcctcgcgagttggtgaacctggtggtggtggctggagacaggaggaaggagtcgaaggacttggaagagaaggccgagatgaagaagatgtatggcctcatcgagacctacaagttgaacggccaattcagatggatatcctctcagatgaaccgtgtgagga

SEQ ID NO: 12548 - DNA, 445 bp, Glycine max
  Clone ID: jC-gmfl02220141b06d1
ttcattttactgttgttttttttttttttgactggacaaaggcttatatttaaagggacttgctggagaggaaaacccgcatggacagagttgcactctttcacaatatcgctgcatcaacccgaactggactttaccaagacgttctctgtttacttccattacccaaaacctaagccatttgtaataacaaacgacacttggttttagactctctaaaccctagaagctgatcacaatgcaaactcaatggcgctattgatgaaagctgcataagactctaatcagaccaaaagcgcggtttctccattgatgatcgattgacccatgcattccctcttcaatagccaggggcacagactaacgcaatttgaggatctcgagaccattgaacatgtacaggtaacactcgctcttacgggattcaatattggtcacgtgcttc

SEQ ID NO: 12549 - DNA, 603 bp, Glycine max
  Clone ID: jC-gmfl02220141b07a1
ctcgagccgaatcggctcgagcggctctaggggagatagaaagagagagagaaagagagagagagaaagacccttacccttctctatcgctcgctttcctttgacgcttctgacccttgctttgtctgcgtcttccttctttctttctttctttctctgcgtgtcgtaatggctctcccagactcttcttcccgtcgcaactccctgatcccctccttcatctactcctcttcctccaaaacgctccctctccaccacatgctcaacaccgcctccgctgccgccgccgccgctccctccccgccgccggccaatctcgacgccggatcgcgtggcctcatgattccctctcccagcgagtcacgcaagatcgagttgtactcccccgccttctacgccgcctgcaccgccggtggaatcctcagctgtggcctcactcacatgaccgtcactcctcttgacctagtcaagtgtaatatgcagattgaccctgctaagtacaagagcatctcgtctggttttggagttttgcttaaggagcatggattcaggggcttttttcgtggctgggtgcctaccttgcttggtatagtgctcaggtgc

SEQ ID NO: 12550 - DNA, 491 bp, Glycine max
  Clone ID: jC-gmfl02220141b07d1
tctctatcttttttttttttttttgttttttggttgagatgtattgatacagatatggagagagagatattgacccttacccttctctatcgctcgctttcctttgacgcttctgacccttgctttgtctgcgtctttcttctggctttctttctatctctgagagacgcaatggctctcccagactcttctttccgtcgcaactccctgatcccctacttcatctactcctcttcctgcaaaacgctccctgtccaccacatgctcaacaccggctccgctgacgacgacgccgctccctacccgacgacggccaatctcgacgccggatcgcgtggcctcatgactccctctcccagcgagtcacgcaagatcgagttgtactgccccgccttctacgccggctgcaccgacggaggaatcctcaactgtggcctcactgacatgaccgacactcctcctgacctagtcaagtggaatatgcaaatcga

SEQ ID NO: 12551 - DNA, 572 bp, Glycine max
  Clone ID: jC-gmfl02220141b08a1
ctcgagccgaatcggctctagcggctctaggggagatagaaagagagagagaaagagagagagagaaagacccttacccttctctatcgctcgctttcctttgacgcttctgacccttgctttgtctgcgtcttccttctttctttctttctttctctgtgtgtcgtaatggctctcccagactcttcttcccgtcgcaactccctgatcccctccttcatctactcctcttcctccaaaacgctccctctccaccacatgctcaacaccgcctccgctgccgccgacgccgctccctccccgccgccggccaatctcgacgccggatcgcgtggcctcatgattccctctcccagcgagtcacgcacgatcgagttgtactcccccgccttctacgccgactgcaccgccggtggaatcctcagctgtggcctcactcacatgaccgtcactcctcttgacctagtcaagtgtaatatgcagattgaccctgctaagtacaagagcatctcgtctggctttggagttatgcttaaggagcacggattcacgggcttttttcgtggctgggt

SEQ ID NO: 12552 - DNA, 408 bp, Glycine max
  Clone ID: jC-gmfl02220141b08d1
tttctatcctttttttttttttttttttttggggagatttgatttgatatatatatggatagatatataatgacccttacccttctctatcgctcgctttcctttgacgtttgtgacccttgctgggccggcgaatgctccgggctttatgccccacccagaaagacaaaagggcccccccagacaaagggtaccgaaaaaccccctagatccaaaaatttattaactccccccccaaaaaatcgcaccctgggcaggacatgctcaacaccgcccccgcaagaagtcaaagacgctcccatcacaaaaacgggcaaacaggacccaagatcgaaaagactcttgacaccctctcccagggagccacgcaagatcgagatgaactcccccgccttctacgcgggggcc

SEQ ID NO: 12553 - DNA, 593 bp, Glycine max
  Clone ID: jC-gmfl02220141b09a1
ctgtaattcctccgatgcttcctcgtctggcttggtggactggtcgatccctctctcactccttgctgttgcctactcccacctccagcaccaggtttattgccaagtgtttgaataagaacatgggcgtggacaataatttgcttgccaaacctagaaggcgtgctaattttcggttatgcaatgtgtcatgttacacttctgaagtattggagattcaatctgatgctcctacactgcatgttctgtttgttcctggaaacccaggtgttattttattctacaaggactttgcggaatttctatatgagtcgctggagggaactgcttctgtcacagctattggccatgtctctcactcaagaacgaacttggaacatggacgcatgttttctttacaagaacagatcgatcacacagattgacttcatcagagaggaattggaaaatgttgagattcctatattactggttggacactctattggttcatacatatctattgaaatgttcaagaagtctgcagagaaggcgaaatattgcattgtactttatccatttttgacgttaaacccacactcaacaacacagta

SEQ ID NO: 12554 - DNA, 495 bp, Glycine max
  Clone ID: jC-gmfl02220141b09d1
agcttttatcacggtcagtaagatatgtatgctacatcatcaatttccggttcgacacctcactagtctgtcggccgccctttttatttccttttttgctttcttattttttttgttttatctgttcgttcctttttttactgggggaatgaagccaactaaaacttctgcaccatgttaattgtcaaaatttttaagaggatcaatgccttgtgcaattatcagttagccaaaactattacggtgagctaagccattgacatacggtgtaacctgttagacttgaacaatccatgtgattcttgatcaagcttcccccctggttgtccccccattttgtgccaacccatgtgctacagaaaccccgggggacgttgtctctttcctatattaggggctttccggaaccactcctggaacaccttttgaccatgtttatgggtccccaatgatcgtgaacccccgactcaaagtgcccattacaccttcctttct

SEQ ID NO: 12555 - DNA, 471 bp, Glycine max
  Clone ID: jC-gmfl02220141b10a1
ctttcctgaaagactttgacctacagataatccggttcacctgctccaaattagtccctcaagtgaaccggttcgttggttcaatcatcgccgaccaccaggccgacacaacccaaaccaaccgcgatttcgttcatgttttgctctctctccaaggtcccgataaattgtctcactccgacatgattgctgtcctctgggaaatgatatttagggggaccgacacggtggcggttttgattgagtggatactggcgaggatggtgcttcatccggaggtgcaaaggaaggtacaagaggagttggacgcggtggttaggggtggcgctttgacggaggaggtcgtggcggcgacggcgtatcttgcggcggtggtgaaagaggttctgaggctgcacccgccgggcccgcttctctcgtgggcccgcttggccatcactgatacgaccattgatgggtatcacgtgcctg

SEQ ID NO: 12556 - DNA, 505 bp, Glycine max
  Clone ID: jC-gmfl02220141b10d1
tcttttctgtttgactttgctttccattataacatttcaagttaataacgtagataggcttaagtatatcatcattaagtgcttaatccatgcctagggcgaactttaacaatgagtgggttagccatttcacacgagagcctgatcaccttcgatagatcaaccttggcttcatcagacggtatgccattcaaactcatgcaaaagccaagccacccagaaggttacggtgctcaaacccaaagtcttcccggtgcatgttctccgacccgaaccgaatggagcgagtctcagatccgacccgtaaacagaaaactcgttttccagacccatgaacctctcgggcttgaactcaagtgggtccagccacacctccgggtcccttgctatggcccacatattaaccatagcggtggtccctcgaggcacgtgatacccatcaatggtcgtatcagtgatggccaaacgggcccacgagagacgcgggcccggcggatgcagcctc

SEQ ID NO: 12557 - DNA, 494 bp, Glycine max
  Clone ID: jC-gmfl02220141b11a1
tagtttttcactccttctcccagtgtcggtgtgctcttcttctggggcattcgttttttgcttcttcagctccaacttcacacgcgcttttggtggacgaagcttcactgggatcactatggcgggtgtgtgagagagggattacggattagtgagtttttgtcactaagttagagctatgtcgattcatgattgatgggtggtagcagtttggtgttgggattaaaggtggggctttatttggattctgtgtttgttgaaggagctggcgtaggtggagcgaatgtgcttgagttattttttacaccacaattgaaacttacctttctatgagtctcttctgtatcgtattggcggcttaatttggagtagctgttgcctcagaatgctgcacgatcagagaacaaagggctcaatggagatggaatctttctccgattatggcgatgccagcaggtccaaaattcacgaggccattgcgaaaggaagctctg

SEQ ID NO: 12558 - DNA, 583 bp, Glycine max
  Clone ID: jC-gmfl02220141b11d1
gactcaaattcggttgtacagtttattgataactgaaaccaatgttcacatggtttgcccagagaaagctggctctttctggggaagcactaactcatgtcatcatcatcgtcttacacaaagcaccaccagagactgctacttcttcactatgaagaacctttacttattctccacaaggattgctccacctggccaaactattcacaagacaacattcttctagaacaaccttgtcatgccatactgaacaggtccaacctttctatgagcagtggtactaatcccaccatattgatgagcctttgactgcagcaactttgtctcaatggctattcggtcatcctgctctatcttgttcactcctgctcgtgtcatgaaaaaagggttggtgtcaatattgatagctgtgtctggtgctattttggcattcacaccacattgctgagcaagttttgattgtaaagatacacccttgtcagcttctgttgctgaccttatctgttctccagaggttgatcgctgatcatgattcgtcgggaggataggctgagatggaagaacagaacctctcataaatgtc

SEQ ID NO: 12559 - DNA, 309 bp, Glycine max
  Clone ID: jC-gmfl02220141b12a1
aagggccttcaactcggcgacggcggcgaggtcgaggtctcctgcgcgcaggaagccatcgttagggttttcgagagggtttggggcctcgaggccgagaaaggcgtcaattctaacagagccgttaacagcgaggttttctcgaagttgctagctcacacttcgcagattggtgctgttgttggcaaaggagggaagaacataaccgccattaggaacagtacctgtgccaaaattagggtttgtccttcctccgcattgcgcactaatgaccaagagttaagtctaataactggtggaattttggct

SEQ ID NO: 12560 - DNA, 510 bp, Glycine max
  Clone ID: jC-gmfl02220141b12d1
ctagagcaaaatctgtgttatagtctattaggaggcaagcatcatctttaagaaaaaaagagtgaatccgtattcacaaggggaaggttgtcagtgtgacattgacataactttatacaccattcacggcatcaactgatgatgaaatgcatgctgccatcatcttacttgtccctttcgaataaaggcttggcgcaagctctgctctgcctaggttcgaactgacgctccatatatgacatctctgctttcacttgtaccaacggatggatcatataccgtatcagttgcacctgaaatctgtctgattccatccacattgccaccatgttcaccataaacagaaccaatgacgtgttcagcaactattatctccacagtggtatttgtcaccggatcagacatgttccctgtccgacgttgcaaattctcacttaaatacgtatgcaattgtccattttgcaatactgtttcagcatggacccctgcataccgtggcaaaaaccctcc

SEQ ID NO: 12561 - DNA, 611 bp, Glycine max
  unsure (1)..(611): unsure at all n locations
  Clone ID: jC-gmfl02220141c01a1
gcatttgagcggtcaaaagaaaaagcttaattggcggagaagactacggatgctgcgtgacatatgcaagggtttgatgtgcatacaccgaatgaaggttgttcaccgtgatctgaaaagtgcaaattgtctagtgaataagcattggaccgtcaaaatatgtgattttgggctttcaagaataatgacagaatctccaatgagagattcttcctcagctggaactccagaatggatggctcctgagcttattcgaaatgaaccattcacagaaaaatgtgatatctttagccttggggtgataatgtgggaactctgcaccttgaacagaccatgggacaggagtaccacctgagagggtggtttattccgttgcgcatgagggttccagattggagataccagaaggccctctaggcaggctgatttcagagtgttgggcagaatgtcatcaacggccaagctgtgaggagattctttctcgtttggtggacatcgagtactccttgtgctgaagcaatatctnttgtacatagaaaactttgggtagagttgttacattgtattatcggctgatgttgtgactatctgtgaaatttgtcttttttcgc

SEQ ID NO: 12562 - DNA, 479 bp, Glycine max
  Clone ID: jC-gmfl02220141c01d1
aaaaaataatatttttttgaaaaaaaaaattctcaaaagttcttctcttggattccaacctccagcatggagaacttttaagcaagaatagcgatagatatgataaacaaagattcttgagttcaaaaaccccattaaagaagctctaacatcattccacttctttagtttagctcttccttgcctactttgttatacgtaaaaatgcaagatttataaccaattcggccaaaacgattctacacttggacactgctcttctcattgcacagaaaaatatgttgagagacggattggtctcatgtttctccttgccccccgaaagagacgagctgcagcacagggatacgaaattgattcatatttcgcattttctgcgaaaaaagaacaaaatgcacatatagtccacaacatcagccgataatacaatgtagcaactctacccaaagctgtctatgtacaaaagatattgcttcagc

SEQ ID NO: 12563 - DNA, 524 bp, Glycine max
  Clone ID: jC-gmfl02220141c02a1
gctgaaatgattggtcctgttgattttaacaagagtgttgagtattggcagcaagacaagtggaatggctgctttcctcttaagtggcacgttgttaaggatgttcctaacaatttgttgaggcacattaccctggataacaatgagaacaaacctgtcactaacagtagggatacacaagaggtaatgttggagcctggcctgaaattaatcaaaattttcaaggaatataccagcaagacatgcattctggatgattttggcttctatgaggcccgtcagaagactattttggagaagaaagcaaagcaacaattcccaaagcaggtatgggaagggaaacctgctgatgagaagattgagataaatggggaagtcaatactcaaaaatctgaagttagctcggaagtgctcaaggagtcccttgctgaaaaggatagtgatgaccacaaagttcccgagaatggatgtgctacaaaaactggagatgccccaaagggtgctaaaccagttgttcctgagag

SEQ ID NO: 12564 - DNA, 504 bp, Glycine max
  Clone ID: jC-gmfl02220141c02d1
caaacttaaaatccaactatatttttcagtatttcccaccttgcttctacccctgttgaaagtaacaaagtaaagctgctctgcatcaaagtagatctaaatttacaagacaggaaacgaccaacaaagtaaaataaaagaaagaaaaaagaaaaagggcaaagagaaggataaacccgaacaaaaaccaaaagatataagcatcttaggcagaaaccctaaaacccaaaaaaccctaggagtaaagcctgttaggagctaaccactgtaaacaaaacccaatgagaagggattggtgctagcattctatgaagtaactgcggccagccaatctcaatatacagatctttatcttcactaggcaaccaatctctatcttcagactgcaagagaagaggcaagaaagataaaatcaggcggtcccaagtttctgataaaatacttgtaagaaccaatatatgccactgaaatggattggaccgcctccttcaaacacagtagagc

SEQ ID NO: 12565 - DNA, 587 bp, Glycine max
  unsure (1)..(587): unsure at all n locations
  Clone ID: jC-gmfl02220141c03a1
atccaatgttcggaaggatctcaatgattttcaggagaagcatgccactctcgttttaactactgtcaaggaaatttcaagattgagatatgaactatgtccacgtgctatgaaagaaagacacttttggaagatatatttcacacttgtcaacactcatgtggctccgtatgagaagcaatatatgcaggaggttcagcttagagcggcagcagagcagaatgtagatcctaaggaagagcaacctgctgttactggaggaactggaaaggcagaagcaattgggggcaatgtgaagagtaggccttctaattcatcctctactgaacaagacttagatacatttcttcttggagatcttgaagacagtgatgaagctccagatgacggtgagggcagttttgatgatgattttgacaagattggcaattcagatgttgaagatgagaagcatgtgaagaaaactgctgcaacagtttaggattcccccaattacttttggttgagagactgaagtcaaaatgaactttgctgcttgcaactatccctgagatatcagtgaaaccataaagacaaacggntgtagc

SEQ ID NO: 12566 - DNA, 484 bp, Glycine max
  Clone ID: jC-gmfl02220141c03d1
gatatgatcattttgacattaaacaaaaatgtgattatacattgggactgaatgaaaaagaagcgataatacgttcgaagagttctaaaacagtttacaattgaaagcaatatcaaagaataaggtcaactgtacaaggcatcagggctcagaaccaccattttatccaaaatcaatctgccactatatagggtattaaggtaaacaaataaacaatgaccagttacttcagttttttccgaccaattcgccaaatctacacactgctacagccacttttctttaattccaggctgctacaaccgtttgcctttatggattcactgatatctcagggatagttgcaagcagcaaagttcattttgacttcagtctctcaaccaaaagtaattgggggaatcctaaactgttgcagcagttatcttcacatgcttctcatcttgaacatctgaattgccactcttgtcagaatcatcatcaaaac

SEQ ID NO: 12567 - DNA, 632 bp, Glycine max
  unsure (1)..(632): unsure at all n locations
  Clone ID: jC-gmfl02220141c05a1
aaaactacaacctttgtcaatttctttcttgttcgactctgcttctttctccaacttcacacacacacacacacaaaaaaaaaaaaacatggcaaaggatagaacaattggtgtggctctggatttctccaaaagcagcaagaatgctctgaaatgggcacttgagaacttagccgataaaggtgacaccatttatgtcattcacattaactccaactctctagacgagtcccgcaacaagctatgggcagaatctggttctcctcttattcctttggtagagttcagagagcctgagattatgaaaaagtatgatgttcaaattgatattgaggttcttgatttgcttgacactgcttcaagacaaaaagagatccacattgttacaaaaatatactggggggatgcaagagagaaacttttggatgctattgaagatttgaagctggattcgctggttatgggaagcaggggcctcagcacaatccaaaggattatattgngaagtgctagcaactttgtgatgacccatgccttttgccctgtgactatcgtcaaggaaactagcaaggaaactagcagcagcaagtaaagatgatcaatttgggagagaacatttaatttcacatata

SEQ ID NO: 12568 - DNA, 406 bp, Glycine max
  Clone ID: jC-gmfl02220141c05d1
tatatctactttctttgtcgagatgtttattgtcaacatatcataaatcacacaaattcattgactccaatacacttttggaggcctgatggccttatgtatggcactcaaattaaattattgcctcaatcaaaaggagtgaaaactatatgagacagcaaatcataaatttatcttatacaccaaaatcctactataggaaagggaatatggcccaacttgatcacgtacaatgcaagaagctatataactatgtgaagagtaaacgttatctcccaaagtgatcatctatacgtgctgctgctagaatccttgctaggttccttgaccatagtcacagggcaagatgcatggctcagcacaaagctgctacactttcccaatataatcctttggatcgtgctga

SEQ ID NO: 12569 - DNA, 614 bp, Glycine max
  unsure (1)..(614): unsure at all n locations
  Clone ID: jC-gmfl02220141c06a1
aaaactacaacctttgtcaatttcttttttgttcgactctgcttctttctccaacttcacacacacacacacacaaaaaaaaaaaaacatggcaaaggatagaacaattggtgtggctctggatttctccaaaagcagcaagaatgctctgaaatgggcacttgagaacttagccgataaaggtgacaccatttatgtcattcacattaactccaactctctagacgagtcccgcaacaagctatgggcagaatctggttctcctcttattcctttggtagagttcagagagcctgagattatgaaaaagtatgatgttcaaattgatattgaggttcttgatttgcttgacactgcttcaagacaaaaagagatccacattgttacaaaaatatactggggggatgcaagagagaaacttttggatgctattgaagatttgaagctggattcgctggttatgggaagcaggggcctcagcacaatccaaaggattatattgggaagtgtcagcaactttgtgatgacccatgcctcttgccctgtgactatcgncaaggaaactagcanggaaactagcagcagcaagtaaagatgatcaatttgggagagaa

SEQ ID NO: 12570 - DNA, 451 bp, Glycine max
  Clone ID: jC-gmfl02220141c06d1
gtcaacataacataaatcacagaaattcattgactacaataaaattttggaggcctgatggccttatatatggcactcaaattaaattattgcctcaataaaaaggagtgaaaactataaagtacagtaaatcataaatttatcttagacaccaaaataatacttaggaaagggaatatggcccaactagatcaggtacaatgcaagaaaaaaaataatatgtgaaatttaaatgttctctcccaaattgatcatctttacttgctgctgctagattccttgctagtttccttgacgatagtcacagggcaagaggcatgggtcatcacaaagttgcttacacttcccaatataatcctttggattgtgctgaggcccctgcttcccataaccagcgaatccagcttcaaatcttcaatagcatccaaaagtttctctcttgcatcccccc

SEQ ID NO: 12571 - DNA, 564 bp, Glycine max
  Clone ID: jC-gmfl02220141c07a1
ctaaattaaataaacaaaatacaaaaaataaagttaaaacttgcgtgtctgatttagtgtcttctctctctctccctctccaccccaattcccattgtacgttctacttcttcttttctttctttccaaaatccaatcttttacccttcacacccgcacccctttgggtttctctcctcaattttgcatctggcggcttctcagttctcaccaccatcatggcttcacttggagctacctgtgctctgtgctggtctatggtcatggtgcttgtcactctgagttcggctggtgacatagtacaccctgatagtattgctcccagaaggcctggctgtgacaacaactttgtcctggctaaagtccctacttggatcgatggtgtgcaaagctgtgagtatgttggcgttggtgcaagatctggccctacattagaatcaaaagagcaacatgctaaccatactagagttgcgatagcggaccctcctgattgctgcagcaagcctaagaaatagctcactggcgagatcatttggtgcaccgaggacaatgtagtttcacaac

SEQ ID NO: 12572 - DNA, 503 bp, Glycine max
  Clone ID: jC-gmfl02220141c07d1
cttgaatctcctcacctcagtccatcttctattttagaacaagatctattcttacaataaacagttcggcatggggtcttccaacatccaacagttgtggggtatctcaagtctaaggtgtcgattttaagtacatgctataatcatttggctgaaatttggttatgacaaagttacagatgttacaaagtcttctaagatttgctataagtctcctgtaaactaacacctaggatgctattcctgctggggattactggtttgttgattgattctcttgcatgtgagggcaaggtatttttggttcccctcttgtccataaaaccttgagttcacctcttttctttcccaatgacaaaaaggttccaagtgtaaatgggactatataaagcaaagctggttgaccatgtccatccattaagttcaaagccacgtctgtgataaggagacctagaccatatgcagtcattgcccacatgatgtacccatctcgaaggttcttc

SEQ ID NO: 12573 - DNA, 71 bp, Glycine max
  Clone ID: jC-gmfl02220141c08a1
ctcactaaaaaacagattagcaagttagcgacaacttggtgtccgagaactggctactctcactcgctcga

SEQ ID NO: 12574 - DNA, 401 bp, Glycine max
  unsure (1)..(401): unsure at all n locations
  Clone ID: jC-gmfl02220141c08d1
tgctatgcggacangcantgcgatgcatttaatatcaattcacgcacccacagcgctcactagtacagcggcctccctttttttttttttttctgaatttttttttcctctgtacatcttgtattccagaaggagaggtttcttttcaactatcaatccaggcccaattgccatacaacgccataatgcaaggggcatcccaactataacgcattgctgcaccgtacatgctagcacctcttggcttaaatctgctcattacagaatcacacattttacgacgtctcatctcaatcgctggatctctcgaaggctctagcacctatgtactcacctatagcggcagagctcagcactgttgattcatcagactacacctaaccacatggtataattggttc

SEQ ID NO: 12575 - DNA, 606 bp, Glycine max
  Clone ID: jC-gmfl02220141c09a1
gatttttaagtgacgggaacaactgaatagagaatagccagatccagacagacactgccagtgcgagaagcctatcagcaaacagagtcttcttttctttttcttttttctctacacacagtgaaggaaggaagagagtatcatccatggcggccaccagagcagtaaccattgccagcaactccacatgctctctgcttgcaaagaaaacctttgtgggtggcactgctctttccctcaacaacctcaaattttgtcgtactaggaggtcttacacctgcagagccatctacaatcccctggttgtcgtcaaggaagaaggccaacccgaaacctttgattatagagttttctttgttgacaaatctggcaagaaggtttctccctggcatgatattcccttgcggttaggtgatgatatctttaacttcattgtcgagattcctaaagaatccagtgcaaagatggaagttgccactgatgagtctttcactcccataaaacaggatacaaaaaaggggaagctccgatattatccctataatatacactggaactatggcttacttccacaaacattggaagatccatcttttgcaaactctg

SEQ ID NO: 12576 - DNA, 562 bp, Glycine max
  Clone ID: jC-gmfl02220141c09d1
cacatacgcaagatggatttattgaactaatgcctgaccaaatggacattgatgtcaaagatataactgggaagctcaatagaaaaattcgctacttcataaatacgaattgtagaaaatgcaagctatggcatgaacaatagacattcgcacaatacatctctacacaagtgacaacttttctgcaggaattgatctcttgataagtttattccaggactcattggtctctgcgataaccttaagcgcataatccttatttgctgccttgatgccaagtccaaatttattatcaggttttccatcaaggatcttgtagtctctaaaccagtccctaattgcaggtagagttcctggaaaatgctgtctcatcatcatcaacatcatttacaaatggcgccttcggatcatctaatgaaattgcaactattttccaatcaagttctccttcatcaatcatgggtaatgcacccaagggtttgaccttgagaaccttacctattttcctgtgagcttcaccaatctcaaccacatcaactggatcactatgtcccaatgctcc

SEQ ID NO: 12577 - DNA, 576 bp, Glycine max
  Clone ID: jC-gmfl02220141c10a1
ctcctaaaacatctccagtgggttcttcttcttctattacaacaacgtcgtccaagaccatgaccatggccatggccacgatcctgctcctgttcacggtcttcgcggtttcatcggccctagacatgtcgataatctcgtacgacaacgcccacgccgccacgtcgcgcagcgacgaggagctgatgtccatgtacgagcagtggctagtaaagcacggcaaggtgtacaacgcgctcggagagaaggagaagaggttccagatcttcaaggacaacctgcgattcatcgacgaccacaactcccaagaggaccgaacctacaagctcggactgaaccggttcgcggatctcaccaacgaggagtacagggccaagtacttgggaaccaagatcgatcccaaccggaggctcggcaagaccccgagcaaccgatacgcgccacgtgtcggcgacaaactacctgaatcggttgattggaggaaggaaggtgctgttcctccagtcaaagaccaaggaggctgtgggagcttgtgggcattctcagcaatcggtgcagtggaaggggataaataga

SEQ ID NO: 12578 - DNA, 541 bp, Glycine max
  Clone ID: jC-gmfl02220141c10d1
aacagcaatcaaatatgttcgtcatttggaattggaatttgaatacaaatacagtgcatgaataatataaccctatgtacacagccaatatctgactgaaattcgatacagaatagtatcaatttgtatcataataaaatggcacagagaaattcatgtgaaggtaacggggaagtgtatcagctggtgttttaattcttcgtctttcattgacttaatcattggctccttactgcacgttcacatttactttatctgcttaagcactgctgaccttgttcttactcccaaaggtccaatggggtttagccggagtactcctcaatgccttgactccgaatgggttgatcttgctcttgagacaagttccagcataagtgttgcagatgggatagtcgttagggcagcaactgtcctggtcatcacagcaggtagcacccttatgaggacatcaaccgcactcaaagcaagcattttcgaactcgaaaatacagccacaagtagcactatcagcacatctgcagtagttgtcacagacatt

SEQ ID NO: 12579 - DNA, 614 bp, Glycine max
  unsure (1)..(614): unsure at all n locations
  Clone ID: jC-gmfl02220141c11a1
atttctcatcatcacttcccacttacgctcggtaatgtctcatttctcacgcatcaacccctaataataatcccccaaacagaacctttcccacccaatccaaacacagccctaaacccccccaccatcatcatgagtgccgtgaatttgaacacatggccacgccccagcttcattttgaaccaaaccgccacaagaagatccagatcctccccaacctctcatttctttcacggcgtcaataagttaccgtcacccatttcctgcctcaccgttgccaaacgctcatttacgctctcggcggtgctgacgaaagaggacaccgtggagacggaagagaagccaccgattttcgacttcaagaactacatggtttccaaagcgagcgcggtgaacaaggccctcgacgacgccgtttcgctccgcgagccgcagaagatccacgaggcgatgcggtactcgctcctcgccggcggcaagcgcgtgaggccggttttgtgcgtggcggcctgcgagctcgtcngcggcgaggaggccacggcgatgtccgtcgacttgcgcatcgagatgatccacaccatgtcgctcattcacgatgacctnccctgcatgga

SEQ ID NO: 12580 - DNA, 524 bp, Glycine max
  Clone ID: jC-gmfl02220141c11d1
tatttttttatttatcacttttctatcttactcttttggttattgttttattgtttttacgcattatacctcttgattatgaattctcccaaacatgaaccttttcccacccaataccaaacacagatcctaaactccccacaccatcatcagggagcgcacgtgacattagaacacagtggccatcgctcgaacattcatctatgaagccaaacacgccacaagatagatccaggatactaccccaacactttcagtaactatcaacggcgtcaataagttacacgtcacaccattatcctgcctaacgcgttgccaaagcgctccatttacgcgggtcggcggcgctgacgataagaggacacacgtggagacggaagagaagccaccgattttcgacttcaagaactacatggtttccaaagcgagcgccgtgaacaaggccctggactactccgtttcgctccgcgagccgcagaagatccacgaggcgatgcggtactcgctcctcgccggcggcaagc

SEQ ID NO: 12581 - DNA, 577 bp, Glycine max
  unsure (1)..(577): unsure at all n locations
  Clone ID: jC-gmfl02220141c12a1
aagtggacgaggggcttctcaacaaccttattaaggttaacgttgttggaaccactaaggtcacgcaagctgttctgccagggatgctcaggagaaagaagggggcgattgttaacattggttctggagctgctattgttattccttctgatcctctttatgctgtttatgccgccaccaaagcgtacatcgaccagttttcgagatgtctctatgttgaatacaagaagagtgggattgacgttcagtgtcagattccattatatgtggcaaccaagatggcatcaatcaggaaatcttcattctttttccatcaacagatggctatgccaaagcaggtgtgaaatggataggctatgagcctcgttgcacaccatactggccgcatactcttctttgggctgtggcattctcattgcccgagtttgttgctgatgcttggcgcctgtggttttgcttgggtattcgaaagaagggacagcgcatagagtccatgaagaatgaataaaagatgctnggttctgatgtgtaggccaatagacgctactcatctgataatatatatgcagattgtagc

SEQ ID NO: 12582 - DNA, 567 bp, Glycine max
  Clone ID: jC-gmfl02220141c12d1
tttgttttctatttgaaaccgggctaagcgatatgccaatatatgatatcagctcatcacactactaaaacagtgatcagaaacacccaaaacaggtgagtgaaaagaatatgccacacaactgatactaacaaaagagtaattacagcaagatgaaaatcaggagcacatgaggtacttggaatcctcaatgagctaacaatctgcatatatattatcagatgagtagcgtctattggcctacacatcagaaccaagcatacttttattccttcttcatggactctttgcgctgtaccctctttcgaatacccaagcaaaaccacatgcgccaagcatcaacaacaaactcgggcaatgagaatgccacagaccacagaagagtatgctgccagtatggtgtgcaacgaggctcatatgctatccatttcacacctggtttggcataggcatctgttgatggaaaaagaatgaagatttcctgattgatgccatcttggttgccacatataatggaatctgacactgaatcgtaatcccactcttcctgcattcaacatagagaca

SEQ ID NO: 12583 - DNA, 622 bp, Glycine max
  unsure (1)..(622): unsure at all n locations
  Clone ID: jC-gmfl02220141d01a1
acgagctttccactttgattctttccttaatcgaagctgtaacgaaatctctgccacgggacagcgacaccgtacgaccttcccattgtttcctcaacgtgaacaatacaacaccacaccaccacccactaacaatacctaaagcctaacgaaccctaattcttgatcattgctcaattctttgttcccttcccatctcggagacacgaattcgccttcttcctcatttcccaaacaaatttcccctccgcactcccccaatttattctttttttcgcattttattttacccttttgaacctgtggcttcttttcgacgccccccatgtatcagaatggattagtgtaaattattggaaggtacctatataaaagcatgggcagtagtgacatggacaaaaccccgaaagaggagtctaagacacctccagctacgtcacaggagcagtcatcaacaactggcatgccaacaactaatcctgactggtctaactntcagacgtattctcctatacctncacatgggttcttggcatcaagcccccaagcccacccatatatgtggggcgtccagcatattatgcctccctatggcactccacctcatccctatgttgcaatg

SEQ ID NO: 12584 - DNA, 540 bp, Glycine max
  Clone ID: jC-gmfl02220141d01d1
tgctagtacattatagtcatgcatacagatataattcccgggccgatcagttactgcggccgccctttttttttttttttcggtaatcatactttttgttgctaacactaacttacgaagtagcagagaaggtctgaccaagtaagtattcacaccctacctacaatacaagttttttgccatcataaacatgactaattaggaatgagggatcatatgacataaatagatcctaatactacatatgatcacctttaatacaatttgaaccaaagctatccaaaaactagaacttgctgttgctacatggctaggttatcttcctaaaaagcaacatgcagcaggaagcaagatcctaatgaacaccatgcacaacatctgtctgaccactttgttgagtgtcattactcacatgctgatcattctggccagacctaagatcctccttcccaggggtcgtgacaccaggtatcttcccaagtctatccttgagggcagcattctcagaacgcagctgctcatactcactactgatccggc

SEQ ID NO: 12585 - DNA, 643 bp, Glycine max
  Clone ID: jC-gmfl02220141d02a1
acgagctttccactttgattctttccttaatcgaagctgtaacgtaatctctgtcacgggacagcgacaccgtacgaccttcccattgtttcctcaacgtgaacaatacaacaccacaccagcacccactaacaatacctaaagcctaacgaaccctaattcttgatcattgctcaattctatgttcccttcccatctcggagacacgaattcgccttcttcctcatttcccaaacaaatttcctgtgcgcactcccacaattcattctatatttcgcattgtattatacccttttgaacctgtggcttgttttcgacgccccccatgtatcagaatggattactgtcaattattgaaaggtacctatataaaagcatgggcagtagtgacatggacaataccccgaaagaggagtctaagacacctgcagctacgtcacaggagcagtcatcaacaactggcatgccaacaactaatcctgactggtctaactttcagacgcattctgctatacctccacatgggttcttggcatcaagcccccaagcccacccatatatgtggggcgtccagcatattatgcctccctatggcactccagctcatgcctatgtggcaatgtatccccatggtggcatatat

SEQ ID NO: 12586 - DNA, 528 bp, Glycine max
  Clone ID: jC-gmfl02220141d02d1
cggtaatcatacttcttgctgctaacactaacttacgaagtagcagagaaggtatgaccaagtcagtattcacaccctacctacaatacaagtttttcgccataataaacatgactaattaggactgagggatcatatgacataaatagatcctaatactacatatgatcacctttaatacaagtcgaaccaaagctatccaaaaactagaacttgctgctgctacatggctaggttatcttcctaaaaagcaacatgcaccaggaagcaagatcctaatgaacaccatgcacaacatctgactgaccactttgctgagcgtcattactcacatgctgatcattctggcctgacctaagatcctccttcccaggtgtcgagacaccaagtatctccccaagtctatccttgagggcagcattctcagaacgtagctgctcatactcactcctgatccggctcacttatgatcggagactggcatgatcttctctcaaagcttcagcacgctgagcttgtccatcacat

SEQ ID NO: 12587 - DNA, 561 bp, Glycine max
  Clone ID: jC-gmfl02220141d03a1
aggagatatggttataaacatggagtggggtaatttccgatcatcacatcttcctctaacagaatatgatctagctctggatgctcagagcttaaaccctggagaacagatttttgagaaattgatttctggcatgtatttgggggaagttgtaaggagagctttattgaagatggccgaagaagctgacttttttggcgatactgttccccccaaattgaaagttcctttcatacttaggacgcctgacatgtcagccatgcaccatgacacaagttctgatctgaaagtggttggaaacaagttaaaggatatattagagatctcaaacacatcccttaaaatgaggaagatcgttgttgaactgtgtgacattgttgctactcgcggagctcggcttgctgctgctggtattttgggcatccttaagaaaataggaagagacacagttcaggttgcggagaagcaaaagtcagtgatagcgctggatgggggttggttggacactacaccaaattagagaatgcttgagagtgcactgaaggattgctggagatgagc

SEQ ID NO: 12588 - DNA, 588 bp, Glycine max
  Clone ID: jC-gmfl02220141d03d1
gaaataaaaacatatttaggcttgtcaatacattaagtcctgctttattctcgttggctacattccgcaaaaggtgtctagtcactcaagatgaagtttatatctttgatattattccttaacgaaggagaaacaaacactgaaaccaaaataatgaatgcccccccagtcaccagctgcaaggcaccattgcttcaatgtgttgatctaccacctatgcaaaaaatgaaactagtattacacgtctttcccttgtttggcaataaaatttaagactcctccactcccaaatattgggagtgagaagctgccaggagggctgcaccaatgccagagccatcattagcatgctcaatgacaatggtctcagcagcctcatctcccagcaattccttcagtgcactctccaagcattctctaaatttggtgtactgttcaaacaaccccccatccaacgctatcactgacttttgcttctccccaaccttaactgcgtctcttcctaatttcttaaggatgcccaaaataccagcagcagcaagccgagctccgcgagtagcaacaatgtcacacagttcatcaacgatc

SEQ ID NO: 12589 - DNA, 693 bp, Glycine max
  unsure (1)..(693): unsure at all n locations
  Clone ID: jC-gmfl02220141d04a1
gtctatttgtcgttggctgagtacttcagactacgttaaaccattatgcccgcgtacgcacgctcgcattagcgctcgagcttccaccgcctcaacatcaaacacgactctcgcctcgaaggcctcatcaagatggcagatctcactattaatctggctgccatttgcactcccgcggattacaacacccgccctctcgacaccatttacagcaatttcatcgacgcgctccccgtggtgaaatactgttccgagaacaacaagcgccttatccatttctctacttgcgaagtgtacggaaagacgattggagcctttctccctaaagatagtcctcttcgtaaggatccggcatactatgttcttaaagaagacgagtctccttgcatttttggttctattgaaaaacagaggtggtcttatgcctgtgcgaaacagttgattgagaggctgatttatgctgagggtgctgaaaatggcttggagttcacaattgtgaggccttttaactggattggacctcgaatggatttcattcctggcattgatggtccaagtgagggtgttcctcgggttcttgcatgctttagcaataatcttctcagaggagagcccctcaagctgtggaccgtggccagtcccagagaacctntgtttacattaaagattgctattgaagctgctngctgatga

SEQ ID NO: 12590 - DNA, 431 bp, Glycine max
  Clone ID: jC-gmfl02220141d04d1
attcattaaataaattaatgacaataatttagaacacatggcttaaggtcaaacagaatgatagaatgatacaacttacagctgacctggaaagacaacaaagcaatgaatcgagagatccttaaaaacacagaaaaaagtcttccctaggtaatatataaagtgtctcaacatgtttagcagcgcatggtctctacattaaaattacatagagcacagattgcccttgtataaattcctacttctccatgtgggggctatattgcctacaggctaacgaaaccaataggaggaaaatttacgattttatataaaatcaaccagtataatatggcagaacacttgggcaagacaagaacacccttctcaaaggtagcacatcaccatcactgtaaaaagcttaacttgcaacgggttttgcaatgactttt

SEQ ID NO: 12591 - DNA, 616 bp, Glycine max
  Clone ID: jC-gmfl02220141d05a1
gtaaaagacgtgagtctcagccggggcatgttctgaagtcttcttctctgcttgtatgcaacggccacagccatagtcgcctgaaaccgattgttgttgcagggaaaacacagagatccgggtcgacccgttgcagatccgatccaaataagaaaagatgaatattttcaggttagccggggacatgacccatttggccagcgtcctcgtccttcttctcaagatccacaccatcaaatcctgcgccggtgtctcattgaagactcaagaactctatgcactcgtttttgcttgtcgctacctagatatctttactaattatgtatctctctataataccactatgaagttgatattcttgggaagctcattttctattgtgtggtacatgaggtaccacaaggttgttcgtagatcatatgacaaagatcaagatacctttcgccattactttcttgtattgccctgcttactattggccctattaatcaatgagaaattcacattgaaggaggtcatgtggacattttccctgtatttggaagcttgtgctatacttcctcaactagtacttttacagagaactagaaatattgacaatttgacttgacagtat

SEQ ID NO: 12592 - DNA, 479 bp, Glycine max
  Clone ID: jC-gmfl02220141d05d1
gcattgcgccactttctagatctaaatactttttcaagtgaaaatggcaaattacaatcacaaacaaattgatgctttttgtctataatcttcctagtcattagtacagtagtatttgaggtggcaagaacgaacaaataggcaattgtaaatcagaaaccactatgtccagacaaatttgtgaatcctctctgcttactgttaattgtccacttagacccttgttttcaagaacagaagaataaactcatgctggcaaatgaagctttttgttggccttccagctttggaaatagtaatagaagaaatcagcatagagtagtgtctgaacaaggccagaaatccatgttatccaatggacaaagtggggctcagttaagtagcgatagatccagctgagaatgtatagtcctctgtatgcaccgtggagaaagacatactgtccagtcaaattgtcaatattgctagttctctgtaaa

SEQ ID NO: 12593 - DNA, 607 bp, Glycine max
  unsure (1)..(607): unsure at all n locations
  Clone ID: jC-gmfl02220141d06a1
tttgaattctacgatgcgggttcggtatcatgggtcccggacccttggctcactcattggtttctacaatgatgttactgggattatgattgattcacttgatcagctatcacttgagaaaattggtcgttcatctgccgatgagagtcatggtaacaccgagccagaaagttgtccattttcatgggctagatctccagaaaacttactacgtcaggaaacttatttggctctggccactacatttgtggttttgagattactatacttgtttttccctacgctgcttatatgtattcaatatacttggagaagggtcatccaaaatattagaatatggagcttgcttgaacatcctttggtttatttgaagcgcctaacacagtcatttaactgtttgaaagagccatgcaagagacgtaatctgcaggaaggagcaatgaatgctagagcatgggcttgcaagtcccttgccaccgtttcaattggagaggaaagcagcagccgtgggatgcatctgatcatcttcacacgctctggcctcgtgcttagtgangtcaattatgttactgaatgatgtaaacgtcccttatatgtncatatgatc

SEQ ID NO: 12594 - DNA, 334 bp, Glycine max
  Clone ID: jC-gmfl02220141d06d1
aaattacttatatcattttgatcagattatcaccatgttatgatttttgaaccacaaataaccacgcaccgagtatatcaacaatgcatccaatcacttttttgagatttacaatcatttcattcccaacaaaaataaattcaagaactgacgatcaaatgatttgaccttcaagaaaacgtacaagtcaaagaattgcagatttcagctcgagtttgctacatttaaactatacacattgaagtctcaatcttctagaacgctgaatgaagtatttcttgatcatatgatcatataagggacgtttacatcattcagttacataattgacccc

SEQ ID NO: 12595 - DNA, 576 bp, Glycine max
  unsure (1)..(576): unsure at all n locations
  Clone ID: jC-gmfl02220141d07a1
gttctagatcgcgggcggccgctcgcgatctagaactaggttcacacacacaaaagaatcagcatggctttcaatcaagagttagaagctgtaacccaagctttctcagggcatggagtggatgagaaatcattggtaacattactgggaaaatgggatcctctggagagagaatctttcaggaagaagacaccacatttgttcagtgaagatcatgaacgccattttcagaggtgggatgatcaatatgtccgtcttctcaagcatgaattcgtgcgttttaagaatgctgtggtgctttggtccatgcacccttgggaaagagatgcccgtttagtaaaagaggccctaaagaagggtccaaatgcatatggagtgctgattgaggtttcatgcactagatcctcagaagagctattgggagctaggaaggcataccattccctctttgaccactccattgaagaagatgttgcctctcacatccatggcattgaaagaacgctattggttgccctactaagtgcctatagatacgaanggacaaaggctaaagatgacactgcacaatcagaa

SEQ ID NO: 12596 - DNA, 399 bp, Glycine max
  Clone ID: jC-gmfl02220141d07d1
gggttggaaaaaattacctggacatttttattggattccacttttccttttttggttttgtgaccaccgtattaccggatgcagaactgtcatgccgggaaaaggatcagagacaaatcaagggaaactgggaggaaaaaattttccttttttatttgaacctccaaggtctggggctctttgaaaattctgcaattagcctcctgtaacaatcaaggctagcaagaaatgcttgggggcccctttagaaacccctctaactttctggggcaaagaaaccccattttgactttgggaccgtgcccttatggctttcatatcaatatgaaggcgagttccctcgaccctagtaagcgatttcgtaagcttcttgggcacatcaattcctaatggtgcatt

SEQ ID NO: 12597 - DNA, 400 bp, Glycine max
  Clone ID: jC-gmfl02220141d08a1
gtgcctgacaagatccaaacctctgcccactgaggaacctctctctctcactcttcaactactacagcttctacgccggcgtcagatctgatccctcagatcaccgctacacagaacgcgaccgcgaacctatctacgccaacacagttggcccgttacacaaccgtaacgaaacctaccgtgactacgaccttaccttttgtgaaccaggagacttgacagagatgaaggaggcgctcggagaggtgctgactggggaccgagcgggtagcgcgccatacaagctggagttccatcgcgacaaggagtcgccctccgtgtgcaacaggaagctctgcaaacaggacgtgtctcggtgcagatccgccgtgaggaaggactactactgccagatgcacta

SEQ ID NO: 12598 - DNA, 262 bp, Glycine max
  Clone ID: jC-gmfl02220141d08d1
aacaaaatcgccgtcgttaaaaatggtcattcagaccaacatttctggcaaggggacggctaaagtatcggcggcaccaaagcctttccccgaaaaggacccttggcaatctaacgagaagctgagggaaccaaaagcccccccaaaccaggttcgccaattatcagacgaactatccgaagtgctgcattaagcccgtttaaaaatcccctcttacaagaaatcctttgatctcgaggacgagacaggtcaaaattcctac

SEQ ID NO: 12599 - DNA, 617 bp, Glycine max
  unsure (1)..(617): unsure at all n locations
  Clone ID: jC-gmfl02220141d09a1
tcgtgagtttccttttttgttatcttgtaaccgaccaaacaacaaaaaaacaactgagtcttgttcacactgattctgttacatggaatgagcatatattgtttgtgttcctagaaaacttagaccttgaattgttggtttgctacttactaggctcgtagttgacgcctttaggaatctctcaaggatgggtttctcagcggcagcttcgttgggtacctatgttgtgctgcgagacactcatgaaacaagaatcaagtgccaatttttgtgccaaacagaacagaatagtcgaattggtttcaagttttcaaagcacatggccattcaaagtgcaattttttttagcaagcatgagttcactgatctggatcagaggaatagctcacatgatgttaacgaagagattactcaatgttatgaactcataaacagattagggagaggagttgtgcatctgggctctataaggatgggacctatccattcacattatgtgcaagcacaagagctggctaaagagatagcacatcttttggactgcactacttggtcaggggctggaccanggctaatggacgctgntactcaaggttctatgctagcacgaaaaccag

SEQ ID NO: 12600 - DNA, 523 bp, Glycine max
  Clone ID: jC-gmfl02220141d09d1
gtattatacttggaattgttgtatgaatacaggcagggttcattccgtacaaggccctggggcacagtccaggttctcactgaaaaaagaaacactatagaaggaggctgcgcaagactaacacgtcctacctggaacccatgttaaaggcaacgggaaggatcactgcgggtgctctatcatcacgtgttatcatgactgaatcagaggctgagtcgctgacagccaccttccacttctatgccaacgcactgttgaccctgaatcacaacccaaggaccattggggtttccccggagtactgcacaaagccttcactcggaccgggacggtaatggaaccgagacctgtgacacaatccgcgttacccacagcattgccaatatgactgaaactgtattcaaagttgcaagatgacaaaagacgcttatgccatcactttcagatgaagatgataaccctgtagcagcttcagacattgctgctaaaattcagagtcaagcaagtttgacttccacgtacc

SEQ ID NO: 12601 - DNA, 539 bp, Glycine max
  Clone ID: jC-gmfl02220141d10a1
ctcctagaacatctccagtgggttctttttcttctattacaacaacgtcgcccaagaccatgaccatggccatggccacgatcctgctcctgctcacggtcttcgcggtttcatcggacctagacatgtcgatgatctcgtgctacatctcccactccgacacgtcgcgcatcgacaaggagctgatgtgcatgtacgagcagcggctagtaaagcacggtatggtgtacaacgcgctcggcgagaaggagaagaggttccagatcttcaaggacaacctgcgattcatcgacgaccacaactcccaagaggaccgaacctacaagctcggactgaaccggttcgcggatctcaccaacgaggagtacagggccaagtgcttggcatccatgatcgatcccaaccggatgctcggcgagaccccgagcaaccgatacgcgccacgtgtcggcgacatactacctgaatcggttgattgcaggaaggatggcgctgttcctacagtcaaagaccaaagtggctagatgagctgttgtgca

SEQ ID NO: 12602 - DNA, 458 bp, Glycine max
  Clone ID: jC-gmfl02220141d10d1
aacagcaatcaaatttgtttgtcatttggaattggaatatgaatacagatacagtgcatcaataatataaccctatgtacacagccaatatgtgactgaaattcgatacagaatagtatcaatttgtatcataataaaatggctcagagaaattcatgtgaaggtaaaggggaagtgtatcagctgatgttctaattcttcatgtttcattgacttcatcattggctccgtcctgcacgttcacatttcctttatctgcttaagcactgctgaccttgtacttacacccaaaggtccaatggggtttagccggagtactcctcaacgccttcactctgaacgggatgatcttgctcttgagacacgttacagcataagtgttgcagatgggatagccgtttgggcatcaactgtagtggacctcacaggtcgtagcaccctgctaagacagcaacccc

SEQ ID NO: 12603 - DNA, 601 bp, Glycine max
  Clone ID: jC-gmfl02220141d11a1
ttagaaaatcgtcttataatccttaaaatattttattttttttaaaaaaataaaatacattcaaagacagttttttagagaaccgtcttagaatgtctatattttaagacgtttttttggaaaacctgtcttagaatcctcaatttactggaaattcttttaaaaaataaatacattctaagatggttctctgaaaaatcgtcatagaaggtctactcttctaagatgatttttaactaaaaaccatcttagaaagatattcttctaaaacggtttttagcaaagaattgtcgtagaaaagtaccttttttctaagacagttttttatgaaactatcatataaagtaaagactttctacgacgttgcctacgatgatggtggttgataatcgccatcaaatgtgtcttttaaccgacataaaaagcgctttgtgtagtagtgtattaaggagtgttaaaattgatttctgaaaaatacagaacaatggatttagacaaacaaaattgttagaattgagtgctctgtgctttgcatttctaaattctatcagtgatgtgtgacatttatatatatattgataattatttctgtacgcactct

SEQ ID NO: 12604 - DNA, 547 bp, Glycine max
  Clone ID: jC-gmfl02220141d11d1
gtcaaagtcaaagggttgaatttgacttagtcaacacagacggattgctggggtgcatatatgaaggaggggatgtaaccatcaacatttattatatttcaggattcacaaaaacaatgggctaggcccaacatgaaaaaggtgcatgtgttaataaggtgtaaataaatgttttattttatttcagacttcataaaaaatgggctagaaccaaaataagaaaagagtgcatatttgaaaaatagggcgtaaatagcaattttttctggttaggttgtaaccgggtcagggtgacccggcttaacccgtaattagacaacatggttggaaaatcctacatgtcctaaccttgaaacggtgcaacaaaagggggaaccaccacagagggtggtgtgccccctcagtggtgtacggcgctactacgcgaggccgacacgtgggggacagcggctacagtggcatgcgatacttcacttgcaaatggaaaatgaaggaagaaatagaacattagaacataatgattatggaatgcataaaagatcatgaa

SEQ ID NO: 12605 - DNA, 576 bp, Glycine max
  Clone ID: jC-gmfl02220141d12a1
ttagaaaatcgtcttataatccttaaaatattttattttttttaaaaaaataaaatacattcaaagacagttttttagagaaccgtcttagaatgtctatattttaagacgtttttttggaaaacctgtcttagaatcctcaatttactggaaattcttttaaaaaataaatacattctaagatggttctctgaaaaatcgtcatagaaggtctactcttctaagatgatttttaactaaaaaccatcttagaaagatattcttctaaaacggtttttagcaaagaattgtcgtagaaaagtaccttttttctaagacagttttttatgaaactatcatataaagtaaagactttctacgacgttgcctacgatgatggcggttgataatcgccatcaaatgtgtcttttaaccgacataaaaagcgctctgtgtagtagtgtattaaggagtgttaaaattgatttctgaaaaattacagaacaatggatttagacatacataattggtagaattgagtgctctgagttttgcatttctaaattctatcagtgatgtgtgacatttatatatata

SEQ ID NO: 12606 - DNA, 499 bp, Glycine max
  Clone ID: jC-gmfl02220141d12d1
gtcaaagtcaaagggttgaatttgacttagtcaacacagacggattgctggggtgcatatatgaaggaggggatgtaaccatcaacatttattttatttcaggattcacaaaatcaatgggctaggcccaacatgaaaaaggcgcatgtgttaataatgcgtcaataaatgttttattttatttcagacttcataaaaaatgggctataaccaaaatatgaaaagagtgcctatttgaaaaatagggcgtatatagcaattttttctggttaggttgcaaccgggtcatggtgacccgtcttaacccgtaattagacaacatggttggaaaatcctacatgtcctagccttgaaacggtgcaacaaaagggggaaccaccacggagggtggtgtgccccctcagtggtgtacggcgctacgactcgaggtcgacacgtgggggacagcggcaacagtggcatgcgatacttgacttgaaaatggaaactgaaggaagaa

SEQ ID NO: 12607 - DNA, 622 bp, Glycine max
  unsure (1)..(622): unsure at all n locations
  Clone ID: jC-gmfl02220141e01a1
cggctcgagcggctcgagcttactggttgccttgttgtgagtaagagaaaaggcttcctgcaccgagcacaccaacttgatacctctgattctttctttgcttagaattccacagaatatggagactgttcttttcaatcactccccacctttggaattcaagggtttgagcaaggaggaggaagactcattgctagggcaagtggaaatatggaggtacatgacatgcttcacggactccgtggccttgaaagctgtcatagagcttcgtatagcggacatactagaccgttatggtaaaccactatccttgtcgcaaattgtggagaacatagaagacgcaccctccccagatgcctctcttctccagagagtcctgagagtgatggtgcgcagaaagatcttcagtgcacaagaatcagagacaggagaaaccctcttcggcttgacacgagcctcgaagtggatccttcgcgacacgaaaatgaccctagcacccatgttgctgctggagaaccacccaattcacctgaaccctgcgcactacatcagtgagattattagagaaggcacaaaanatggcactgcttttctttagtgccatggacatgagcaatttgag

SEQ ID NO: 12608 - DNA, 383 bp, Glycine max
  Clone ID: jC-gmfl02220141e01d1
cacaccaaaggatctgatccattaaaagcaattaattcttgaaaaccacacaccattcactcggcatttttggaacacttccctaatccatattgcattacttagtgggggggcattgattactcatatttaaggcacaaacataacaagggcaggatggaaaaccccaaaattataaacgagcatcatatagctgttaataataacaacaacacatgcaacataaaaaccacatgcaaccggggtactggcatctttttcagatgggaaacgcctaaatgatggaaggaaaagccttgatcttgatgatagtgcaacgcgcgaaaccggtttccttgaacagccacttccagttctcttcggccctttttttgccaccgggc

SEQ ID NO: 12609 - DNA, 461 bp, Glycine max
  Clone ID: jC-gmfl02220141e02a1
gaggaatgggaagaagagtctgaccactgtgcaagggctgaagaaggagttcagctacgagaagatcctcaaggacctcaagaaggagttctgctgcaacggaaccgtggtgcaggacaaggagcttggcaagatcatccaactccaaggcgaccagcgtaagaacgtctcccacttcctcgttcaggctggccttgtcaggaaggaccagatcaagattcatggtttttgaccaattggtcttgtttttgttagtagtaatttcaagttgttcttgagtttgtgagttttgaaagtttggattgtttttctgtttgatgagtggtgttggaataagtttggtttggtttggtttggtttgggttttccaatttttaatgattggatttcatggatgttgttagtgaacttgaattgttccaaagcaagttacagttaataaatgataattcggttttcag

SEQ ID NO: 12610 - DNA, 460 bp, Glycine max
  Clone ID: jC-gmfl02220141e02d1
ctgaaatccgaattatcatttattaactgtaacttgctttggaacaattcaagttcactaacaacatccatgaaatccaatcattaaaaattggaaaaccaaaccaaaccaaaccataccaaacttattccaacaccactcatcaaacagaaaaacaatccaaactttcaaaactcacaaactcaagaacaacttgaaattactactaacaaaaacaagaccaattggtcaaaaaccatgaatcttgatctggtccttcctgacaaggccagcctgaacgaggaagtgggagacgttcttacgctggtcgccttggagttggatgatcttgccaagctccttgtcctgcaccacggttccgttgcagcagaactccttcttgaggtccttgaggatcttctcgtagctgaactccttcttcagcccttgcactgtggtcagactcttcttcccattcctc

SEQ ID NO: 12611 - DNA, 630 bp, Glycine max
  Clone ID: jC-gmfl02220141e03a1
aaacctctgtcttgtacaaaggagaagttacgggtatcggataagtagcctggtttcctcgtcctgaaagaaacaccagcaaaccactctcaacctaagagtgttgcacgtttactgaaagcaatggatttagtggcaccagtcgaacaggtttgctcatttcaccacttgcacataaccagagctagggtttctgataactccatttctcggcctttcgttctatatcctgatagtagcgttagtcatcatttttcaaaattgaaggcaactaggtctagaaagcgtttagaaaatcgcgtttctgctgcttccaagtccgaagcttctggctcgaacgatggatggcatcatgctgacaactccccaaacggggacttgaacgtcatacgcatggcatctttgcccattggggtgaacggttcccggagcttcgaggagtttgcgagtgacattcatctccggaagttggttagaaatggagagttagaagaagggcttaagtttctggagcgcatgatttaccaaggagatatccctgatgtcatagcatgcaccagtttgaatcacgggttttgcacgcatggaaagactatgaaggccacatgaatcatggagattctggagaat

SEQ ID NO: 12612 - DNA, 538 bp, Glycine max
  Clone ID: jC-gmfl02220141e03d1
tttttctttttttttttcataaaatatttatcagaattaaatataaccgtactgaattacaatgacctcctaacaaaattgacacacatttgactagcccctctccctcctcaaaataacaatccaaaatccagaacaagtaactaaagcgaggggctcaacaaaatctatgtgctcaaaaatggcactcagccatctaggcgtataaggtaaaaaggcatatcatcctacatcttgactactacctgttcagccgaacttttcttcacaaatcctctggagcacaactcattcaacaactccaaagcttgctcggctaatccttcatcagcaatgccttctataagaatggcatatgtagcttcggtaggtctgcatcctttttctaccatataagccagaaaatcaattgcacgactagtctgctgagccttacaaagtcccaacatgattgcattgcaagtgacaacactgggcttaatacttaatccttccatgtcatggaaaatttttatagcctcatcaacctttccttcac

SEQ ID NO: 12613 - DNA, 637 bp, Glycine max
  Clone ID: jC-gmfl02220141e04a1
atttacatactcaggtgccatgtaaatggaaagttttcagagaagtcagatgtttttagttttggcgtattggttcttgaggttataagcggccagaaaaatagtggcatttggaacggagagaagaaggaggatctactaagtattgcatggcgaaactggagggaaggaacagctgcaaatattgtagatgccaccttgatcaatggttcacaaaatgaaatagtgagatgcatccacattgggttactctgtgttcaagaaaatgtagctgccagacccaccatggctttcgttgtaaccgtgtttaatagccattctcaaactctcccagtacctttagaacctgcatattatgatgatagtgcacaattaccagagtttaattccggggcaacaatcgagtatacaactagatcaacatcgggggaagaaggccaatgaggctgctgaaaagtatcacatcactgaattcctctaatacagctaatatttatgaatttcaattaattttaagatggcatatactgagttgtaacttataaatctattcattcgtagtttggtgcaaactgtttgtcctttgtgttatgtctacgggagtgctagtaagtactctttactatatttcaataaa

SEQ ID NO: 12614 - DNA, 162 bp, Glycine max
  Clone ID: jC-gmfl02220141e04d1
aacactcttgatcattgatcgcaagaatagttagagtgcttactagcactgccctaaaacatatcacaaggacaaacagtttgcaccaaactaccaatgaacagattgataagctacaactcagtatatgccatcttaaaattaattgaaattcataaatat

SEQ ID NO: 12615 - DNA, 542 bp, Glycine max
  Clone ID: jC-gmfl02220141e05a1
gtcatagcaacaaacaggcaactgagtttggttcaccctatttacaaacttctgtttactgactaccgtgacaccatgaatattaattcacttgcccggaaagccctggtcaatgcagatggtattatagagaaaacattctcgtggggtaggtactctatggaaatgtccgctgtcattcacaaggactgggttttcactgatcaagcattacctaatgatcttgtaaagagaggagttgctgcataaggacccatctgctccccatggagtacgacttttgattgaggactatccttatgcttctgatgggctagagatatgggatgccatcaagtcctgggtgcaagagtatgtctcactctactacaagtgatatcaggaactccaaaaagaccctgaactccatgctcggtggaaagaacttgtacaggtgggtcatggtgatttgacagaaagccatggtggcatatgatgcaaactcgtgatgagttgggtgaagcttacgctatgctcatatggattgctacaacccttcatgc

SEQ ID NO: 12616 - DNA, 571 bp, Glycine max
  Clone ID: jC-gmfl02220141e06a1
gcaatttctgcggcacctgtgacagaagcctgcaagacccataccacttctgctccctctcttgcaagatcaattatctcgaacgagacagcggtccttcttctaccgctgagcctcaatataaatcatttgtgctgtgaatttgcttttcttcgccataacgagcgagatctagtcccaaattttggaaccctaaaatgggaattggggatctgcacgccgagctcgtcttttgtgtgtgctgtgtttggtttgtgaggaaatgtagggatcgtaatggcgttcagatcgcggggtttacgttttgcggcgattagatcgagcaagttccgatcttttttcactcgggaacggcgaatctggacttgtttgagcctgatttgagaatttgggttcgggaatcttagacattttcaatttttgctgaatttgtgattttggtatttttctcatttttcaattaaattgcatggtgttttgtctatctggaatttaatttccccgttgaagtgtttgtgttttattagctcatggtatatgctgctcgtctgtttagattattttaatggtg

SEQ ID NO: 12617 - DNA, 531 bp, Glycine max
  Clone ID: jC-gmfl02220141e06d1
cacaaaaaatcatagcattgaaaaatcttaacaattttaaattaaaatgtgaaggagaattatccaaagctagtctatctagttataactcatctacataaatgttgatgccatacaacatggttgtcccttatcacataaaagccgaagagggaaaaagaacaaaagaaccggaatatccaaattttaggtagaagtaccacaacagaaaaatcttggataacaaataactcaacatctgtgtgaaagaccacacaggtgtatatacaggtgaaacagaccaaatgtcatgcgtctcaacagcacctatctacctgatagtgacaaacttgttggcgccgtgtctggcccaatgagtcttcagatcaatagggttagcaaagttataaccttcagcagcaagtttctctaaaaccttgttaaaagcaccttggctcattttccgcccagctatccttgcaccacgccttttcatgctcattgggcaaggatatattgacacatttgtggtgcaacaagccgattgccaac

SEQ ID NO: 12618 - DNA, 579 bp, Glycine max
  Clone ID: jC-gmfl02220141e07a1
gtagaatgcagcaccaatgaagtctcttcaaaccattatgggggtcttcctgctgatagtactctgtagcagcagcaccaatgcaggaaaagaaacaaggcacgaccatgcaaacataaagacctacataaaccacatggactagaccaccatgcccttaaccttgagcgaccacctcaactggctcgacgccttcctcaaatcagcgtagcacttcgcagagatgctgtacacttacaaacacgtgggccatggcttgtccgctagacttactcccaaggacgtagacacacttgcaaaacaacccggaatcctctccgtcatccccgaactcaaatacaaactgcacaccacaagaactcccaacttacttggacttgacaaagccaccaccttgtacccgaagctagcctctacggcttggcgtcaggtacggcgcgtggaatggccacacgagcgcgtgtggcggataacagagtgtgctggcatcgcggatgctgtactttcgacatagtcgcgggaatcgacaaggccataaaagacggcgtgaatgttctgtccatgtccataaggggaagc

SEQ ID NO: 12619 - DNA, 366 bp, Glycine max
  Clone ID: jC-gmfl02220141e07d1
cggaagggacactcttgcattaataccaacaacaaactacacacctgaaattatcatcccaaaataaaaaccgccaggagacaaaggaactacaccagcaagccctagacgatacggaccaggcccaaaggctaaccacgtatatcattcaccagttcacttgcgccttccttttgggcacttcctttcgcgcggcccatgattgccaggggaaccccattggaataccaagcttctgattcgcattgggccattgaaaacctgccatgatggtcgtcctaaaaagcattctacggtccaaaagcgatcccatataagccgctctcgacaccgtgaccatgaaacacaaggtgtttggatcttcca

SEQ ID NO: 12620 - DNA, 487 bp, Glycine max
  Clone ID: jC-gmfl02220141e08a1
ttttcttaaagtgtttatcttagattgaaataatttttttattagttcttttgcacagaaaatgttaattttgactactatatcaaacacatttaaagcataacacgtttcacagtttatcatattgcagtaaattggtgtgataaaaaaagatcaacttagtttaatagaaacactttaatagatcaaagtgatgtttttcaaacttaagaaactaaattggaaaaaaaaaaatcaagcaccaaaaatatatgtatgttaattattcaaatgaaatgggtaatttgaactatagatatgaaactaaaaagattagtgttgcaggaactgtgcgccactagaagtaaaggggagatttcaagggatacagaattggctagtcagaaaggagcacaggcacagcaacaaaacgtggcaatggagaacacggcattggagatgagtgtgacggaccgagcgggcctactatcagagctatcagcagtgc

SEQ ID NO: 12621 - DNA, 325 bp, Glycine max
  Clone ID: jC-gmfl02220141e08d1
gtgcatggtttgttaattttgacttctatattatacacatttaaagcataacacgtatcacagtttatcatattgcagtaaaacggcgcgataaaaaaagatcaacataggggaatagacacactggaaaaaaacaaagcgaagcccccaaacaaaacaaaccaaattggaaacaaacaaatcaagccccaaaaatacacgcacgggaattatccaaaggaaaagggaaaaaagaactatagatatgaaacaaaaaagatccgtgccgcccgaactgtgcgccactacaagtacaggggagaaaaaaagggacccagaagtggct

SEQ ID NO: 12622 - DNA, 545 bp, Glycine max
  unsure (1)..(545): unsure at all n locations
  Clone ID: jC-gmfl02220141e09a1
attcacaaccgaaacagtttccatctctctcacaaaatgacaacaatatcaaattgctcccttctcttcctcttcctcttcctctccaccctccacatagcttccaccctctcaacccccaccaacttcatcaagtcctcctgcagcaccacccagtacccagccctctgcatccagtccctctccgtctacgcctccaccatccagcaagacccccacgagctcgtccagacagccctctccctctccctcaaccacaccgaggccaccaaaaccttcgtcgcaaaatgcaacaaattcagaggcctcaaaccgagagaatacgctgccttgaaggactgcgctgaagaaatcagtgacagcgtcgaccggctcagccggtcgctgaaggaactcanattgtgtaaggtgaagggtgaggacttcacgtggcacatcagcaacgttgagacgtgggtgagttcggctatgaccgatgagagcactngcggcgatgggtttcgcgggaaggcgctgaatgggaagactaaggaggcgattagggc

SEQ ID NO: 12623 - DNA, 458 bp, Glycine max
  Clone ID: jC-gmfl02220141e09d1
cgtccggactaaggaacattactttactgaatcaaaggtagagagaagagcaacaaagaaaatcatacaaaaacagaactcatatttcacatttgatcagaagcaacacaagatccatatctctataaaaactcacaattacatacaccacacaaaacacaaaattaaccattaaccaaccacatagaactgtttgttctttttttttttcccctcaaaggaaaaaacgaaaacaaaaaacaaaaactttcttcccaactccccctagtgttgtgcagcatactgattaataagcgagagagcattgctagtaacctgagcaacattgaccattctagccctaatcgcctccttaatcttcccattcagcgccttcccggcgaacccatcgccgcatgtgctctcatcggtcaaagccgaactcacccacgtatcaacggtgctgatgtgccacgtga

SEQ ID NO: 12624 - DNA, 585 bp, Glycine max
  unsure (1)..(585): unsure at all n locations
  Clone ID: jC-gmfl02220141e10a1
cgaatacccgataacatcggtaaccttacccgattagatgtactcagtttaactggtaaccggttcatcggacccgtaccgagttcaataaccaagttgactcagctcactcagctcaaactcggtaacaattttctcaccggaacagttccccaaggaattgccaagctcgttaatttaacctatttgagtctcgaaggaaaccaacttgaaggtaccataccggattttttctcttccttcacggatcttcggattcttaatttttcttacaacaaattttccgggaatatccccaactcgatttcttccctggcgccgaaactgacgtacttggagcttgggcacaactcactttccgggaaaatccctgattttctgggaaaattcaaggcgcttgacacgcttgacctgtcatggaacaagttttccggaacggtccctgcgagtttcaagaacctgacgaaaatcttcaacctgaacctctncaacaacctcctggtggacccgttccccgagatgaacgtgaaagggatagaatcgttggacttgtcgaacacagttttacctgggagcattcccagt

SEQ ID NO: 12625 - DNA, 483 bp, Glycine max
  Clone ID: jC-gmfl02220141e10d1
cacaaaaagagcaaattatattaattattatacccattcaacttactgttttaaagtaaatatatatagtatatattgaaagttaaaattacaatttacttattaaattacataattattggaaaacttagcagtaaaaggaaagtaagcacttgaaatcatcaacaactaagcttactacacttatgctttgttgcaaggtggcataggagaaccacagagacaattatttgcaacaaaagcacttgccggaaacttattcttgggaagctgaccactaagatggttatagctaacattgaacttctcaagcccaacaacactgtttggaaccttcctaaacacccaattacgagacagatccaataacttaatcctctgcgcaaaccttaacttgcccaaatcaaactcaaacttgttgcccgaagcccaaaaccttaccagatactcagtactatttaccaacccaattgcactccctga

SEQ ID NO: 12626 - DNA, 573 bp, Glycine max
  unsure (1)..(573): unsure at all n locations
  Clone ID: jC-gmfl02220141e11a1
catcttcttcactttcttttccccctttcggtttcgcacctcaaacccgacatcaatcttcatcccgttcctgttccccttcctctctgtttctccattcccactcgtggagttactctccttacttttcttttctctcccgtcgcttccacagcaaccacgaccctgaattttaggctttgggattgagattctttcttcttctttttttgattttttttaacttctgtgagggagaaaggggagaatgtcgaagaagaaagttagcggcaacaccatgacgctgaaggacttccatggcggttcaattccctctgatctccctctaccttctgctcccggcgtgactgtgaggacttcagatcgtgctggttttgatcggccgtcggcgtgggggacaccgatgggccggtcggatcattggtctcggccgcacacgtcgccggcaactaggcattatgatgacaaaaccccgtttttgtcacacactgccccaattggcaggaattntgatgaggatganaggaagccccctgatggtggttcgatgccacgtaggacaatcagtgatga

SEQ ID NO: 12627 - DNA, 508 bp, Glycine max
  Clone ID: jC-gmfl02220141e11d1
gatgaaactaatacgaacaattttatggcgttaatcatgctacaatgttttcattaggtaacagccttttcagctccaccacaaagaaagaaaaaaaaattagtgttctggcagcaaatgatatggggcaatcaatgaaaactaaatacagcatggtaattgtaagaaggtattgtcacaaccaaggctatgtaacttgagaaatcattaatttctcactcaattgttgtgaatgaggagaaaataactaaaaccacagccactacatgaagtgctctgcaattccacattgcatgaattcaatgctatctcatagaaattggtcttgagtgagtccaattatccaccagatattttaatgaccattgatctgaggccttgatgtacgaccaacaagccgtgaaaatggaacttgtgtcctgctgctgttgccagtgttcagacccctttgacctgaaaacctatgattcactcttggatctgatacagatcttgagaatgcttgtgc

SEQ ID NO: 12628 - DNA, 509 bp, Glycine max
  Clone ID: jC-gmfl02220141e12a1
caaacttgaagcattgcattctgctatttaattccactacgtacacgcacattctcctcaaagacaacaatggcaccaacagccaagactctgacttacctggcccaggagaaaaccctagaatcgagcttcgttcgggacgaggaggagcgtcccaaggttgcctacaacgaattcagcgacgagatcccagtgatttctcttgccggaatcgacgaggtggatggacgcagaagagagatttgtgagaagatcgtggaggcttgcgagaattggggtatattccaggttgttgatcacggtgtggatcaacaactcgtggccgagatgacccgtctcgccaaagagttctttgctttgccaccggacgagaagcttcgttttgatatgtccggcgccaaaaagggtggattcattgtcttcagccatctccaaggggaatcggtgcaagactggagagaaatagtgacatacttttcgtacccaaaaagagagagggactattcaag

SEQ ID NO: 12629 - DNA, 532 bp, Glycine max
  Clone ID: jC-gmfl02220141e12d1
aataaagacagcgccacttattttcatttataatagaggcaaatataaggcatacatagatgagccagctagctaataagacataggcaactgaacacaacacatgatatccccacaaaggataaaccataagacgtacaaaagcacaaaggtcaggactattattaattcatggcccttaaaaaatactaaaaacaccaagggggcatgcaaatgatacatatgtaattattattaattaagcaagaatctccttcaaaggcttggcctcaagttttgcctatcgatcaagttcttgcaaatgctttgcattctcaaggtcctgcaaatgcttgtccttagccagcttattgatccttgcaatctcaatgtccttgctcatcttcctcctgtacatttcagcaaaagtgattggttcctacatcacaggcttctctgcttgtcttatcatcagagggtaaacagttgcattaggtgctgggttttgcaaagtggctatggacaaaccgctatggtttgagttcaccaccgc

SEQ ID NO: 12630 - DNA, 562 bp, Glycine max
  Clone ID: jC-gmfl02220141f01a1
aaagcagagaagtgagatacactaagttatcctcataaatacactctaattaggtggcaagataagtgtctaaccttagtaacattgccacatattgtgttcattttggaattgtgccactaaaattctattcaattcatctatggctgcctcttcttatgctatgcaatcaatcctggcaaaccctttgatccgcatttccagcgggtctagggtgaaccaatttggcgttcctgctttgcacatgagaaggaatgttggcctgagagttaggtccatggctaaggaagaacaaccaagtgagcctgcaaccccagttacaccgccaccatcagtagaacccaagccacagccagtctctgctccttcaccaaaggtgagcactaagttttctgatgtgttggcattcagtgggccagcacctgagaggatcaatggaaggttggccatgattgggtttgtggctgcaatggcagtggaagtagccaaagggcaaggtgtgctagaacaaatatccaatggtggcatcccatgtttcttggggacaagtgtggtccttacc

SEQ ID NO: 12631 - DNA, 569 bp, Glycine max
  Clone ID: jC-gmfl02220141f01d1
atgattaacgatttaattttgatatgtagattaaataaacacacgaagtacaaataaacattggtctctctaatcacaaaggagattaagtccattgtggtgtgccttcatgactgaattataccaaagtactacccttaacatactcagtaaaagccagagcaatcaaacccaacatagcaaatctcccattccacaggtctgcatctgaggacatgaaccctttggacttagactccacgctgacaccttggaagagtggaatcaaggaagcaagggtaaggaccacacttgtccccaagaaccatgggatgccaccattggatatttgctctaacacaccttgccctttggctacttccactgccattgcagccactaacccaatcatggccaaccttccattgatcctctcaggtgctggcccactgaatgccaacacatcagaaaacttagtgctcacctttggtgaaggagcacagactggctgtggcttgagttctactgatggcggccggtgtactggggttgcaagctcacttggtagctcttcttagccatggacctac

SEQ ID NO: 12632 - DNA, 316 bp, Glycine max
  unsure (1)..(316): unsure at all n locations
  Clone ID: jC-gmfl02220141f02a1
gatctagtcagggtgcctttcacgatttagcggtagaagtgggcgcaactgggccagaggctcatttccganggggcccacctggggccaatggtagagcggaaaagtgaacgacatgcttcaggcgccgactcctgattctcaagatggtggactaggtcacgctggagaccatggaagaacccaattgatgcatgaatctcagaatgtgaggcatgatcaacagcgaccagttcaacggctctgatgccgttacggccatcaagagaaagatcaatcacatgagcccagatgttcagaccctcagccttgacct

SEQ ID NO: 12633 - DNA, 423 bp, Glycine max
  Clone ID: jC-gmfl02220141f03a1
gcatacttacatgggcgctaccgccgtagcgtagatcatcacgcacatttaccgaagctcgcaattcctctcgaggcttctctagagggcctcgccctgcttttatcttctcttccatctggcctgttagcactgggggctcacgcactacacagcgcctcactgatctccaagcccctcatttcgattctgcactctgtcaccgcgcaccaagcccagagttgcagatacatcacatagaaggcatgtcatggcccacgtcaggtgactagcgatcctaaaggtcatcaccatgcctcgatgtggccgtctggaccttcaccatccgtgagctgagcctccctactggagagcgcattagtgatatgcctacacctgagattgccagagtggtcttcggtggacaatactactgtcccgaat

SEQ ID NO: 12634 - DNA, 544 bp, Glycine max
  unsure (1)..(544): unsure at all n locations
  Clone ID: jC-gmfl02220141f04a1
gattctctattgtgcgttgccctgcttcagcttcagcttcatagggcttgttggcggtgtcagaatcagaagaacacaaagctcactgaatcgaagcccttcattttgattttcttcctcgtcactgcgcatcatgtacagagttgcagcttcatcattcagaaggcatctcaagggccatggaggtaacttgggatccattaggttttcaacttcggccgcggtagctgcaaggacttcatctggtggtttgtttagctggcttactggagagcgttctagtgctcttcctcctcttgacataccccttggtggcgttgctctcccagattcacttccagatttcgtcgaacaaagcaagaccaagatcacaacactctccaatggactcagaattgcatcagagacctcgcctaaccctgcagcttcaattgggttatatcttgactgtggttccatctatgagacgccattttcaagcggcgcttcacacttgctagagcgaatggctttcaaaagcacatcanaccgtagtcactttcgc

SEQ ID NO: 12635 - DNA, 188 bp, Glycine max
  Clone ID: jC-gmfl02220141f05a1
cccttgtgtagaaaggcaacattgttatatttcgctttcgaatcattttggttaatcataagcatgcactatagttatagcatatgtagggagtgatgtttggcaattggcatatagcgacctcaagtatagcctgcatgtttccaataatgtctttgcattccaatataatcatttttttcttctcc

SEQ ID NO: 12636 - DNA, 449 bp, Glycine max
  Clone ID: jC-gmfl02220141f05d1
agctagtaaacacgtacagcatatcatattaatgccctgctcgacgccatgcgtctactagtcgtcgggcgcccttcgatgggctaataacaacacttatttttggagacgaaaactgaaactctatgggcacgcaaacacatcatcgaaaacagccaagctgaacgagagggccgattatgcccattgccaaacgtgacgccctagctatgccttaacaaccgcgccaggctatgaatgcccacaccgaagcgtacacgaaccataacacgggatgcctctatcacaaagactcgaacagagggactgacgtacagactcagacttgatactatgtagcaaccaaaatgggatccctaaagtcatctcaattgccgtggcatcaacacatggctattgcaaaaaccctggcatatcccatggcaatgagcctggatgcacaccatact

SEQ ID NO: 12637 - DNA, 607 bp, Glycine max
  unsure (1)..(607): unsure at all n locations
  Clone ID: jC-gmfl02220141f06a1
gaccgataccgtttctttcaccttcaacaagttcaacccagtccaaccaaacattatgctccaaaaagatgctagtatttcatcctctggggtgttacaactcaccaaagttggcagcaacggcgtgcccacctcgggatctctcggtcgtgccctttacgctgccccaatccagatttgggacagcgaaaccggcaaggtagccagctgggctacatcctttaaattcaacattttcgcacccaacaaatcaaactcagctgacgggcttgccttcttcttggcacccgtcgggtctcagccccaatccgacgatggatttcttggtcttttcaacagtcccttaaaggacaagtctctccaaaccgtggcgattgagttcgatactttctcgaacaaaaaatgggatcctgcaaaccgacacatcggcattgacgtgaactcgatcaagtccgtcaaaacggcatcngtggggttgtccaatggacaagtggcggagattctcgttacctataatgccgncacgagcctcttggttgcttctctgatccacccttcaaagaanacaagttacatcctctctgacacagtgaacttgaagagtaat

SEQ ID NO: 12638 - DNA, 458 bp, Glycine max
  Clone ID: jC-gmfl02220141f06d1
agacggagtaaaacacctattattatataatttttgtgacaaacattattagtagcaccagcctctagcaagctagggcgttattacatttttcttttgtcacatttaactacgatgtttgaagctagatggcctcattgagcacaaagcttggaagatccaaagcatcattgctgctaccatctgacaacttggaagcaaaagaccaagaaatcacatcatgggtttcaacggagccttcatgcaacccggtggtggcagagaacccaacgctcacccattcgggaagattactcttcaagttcactgtgtcagagaggatgtaacttgttttctttgaagggtggatcagagaagctacctagaggctcgtggcggcattataggtaacgagaatctacgcacttgccattggacacccccacgatgccgtttgacggactcgatcgagttcacgt

SEQ ID NO: 12639 - DNA, 479 bp, Glycine max
  Clone ID: jC-gmfl02220141f07a1
atccaacgagctcatcttcaatcctttcgttattctcttattcatccttctcttctgaataatccagatctctttctgcccttttctccgtcacgcttttcgtgaccggatctgtatggatttgatccagatctacacgccgatggtgggtttggcccgggtctttcatagatctggtgcgtagaggctcagatctacggtaccgaggtacaacagagaatcgatgacaagaacgcagatccgacggtagatccagccgattccgctggttcgatcgctacagacccctgtatcggatcattaagcagcgtgtctcgcgcgttctacacgtgttgccgatctcggatgttgcaaaactagtttatgatgtgaagctatggactggaaaatctgtggatgtaggagatttcaggatgaatgggctcaaaacgcttagtcgtccgtggttattgagtcctgagtgatcttgtcatccgacc

SEQ ID NO: 12640 - DNA, 582 bp, Glycine max
  unsure (1)..(582): unsure at all n locations
  Clone ID: jC-gmfl02220141f07d1
acgctgaataacttaattatactgaataatcgcagcagaaatatcaaaataattgcagcacaagggaattaaaacaaacaaacatacatactgaataacttgataccaagaaaaaatatcattctatgcttgtgtaaagagccgaagttatcttcaccttaaagaattgtagaagcctaaccagattctttgtaaatccacaatatttcttcaaaaataccttgacaaccacaatgatattgtcatagcagaagccatatagcgccttcacattgatattccaatcatcgccagaagatttacaatgttaatgacctaattctgcattacaaatgttgtcgcccgaatctgaacttcttacaagtagataattgtacaattatacaaagcccccgcaatacaaatggcccatcttatttggatacaagtaaccggagtttaccaaatcaagtaagatgaacaagggaacaatttacatgacatttacaacagtatagcttcacaatntctataaacagtaaaattatgcataaggaagtcgcagcaggcagctaatatgaaatgaagacaattattaataaa

SEQ ID NO: 12641 - DNA, 400 bp, Glycine max
  Clone ID: jC-gmfl02220141f08a1
caaggtttgctcgtaaattgctgtcgctgatgcagcattcgtatcattgaaaggctatgcagctgcaagctctttggcctttcttctcttatcattctctgcaaggaaaaaaaaacttagatatagacattttacctatgttctcctatcaaaatcttagattgattgcattttacccatgttattggtttatagaaaccattattgcatgaatcatcgaggtgggatatccaattctgattagagaataataccgaaagtacatacgatattgcatctaagttttgtactttttgaaaattccaaggactcacgttaagcaaattatgaaacatatttcaattctcactggtacaagattgaattgatagatatgttgcttggtctttctgggggatga

SEQ ID NO: 12642 - DNA, 300 bp, Glycine max
  Clone ID: jC-gmfl02220141f08d1
attgacaacagggaaaggtcttctatagagtcacctacaatccataaaatattatcatgctttcattaaacctttaagccgtgccaggttaaaagtcaacgtaggtgactacagactgggaaaaattggcctatctaaattagtgaaacatcataaggaactttgcaagcccactagggatctaccttcactcctacaaaagcactcagacccaggggccttaaccagatgtaactgacttccaaaggttgacccactcttccatggcttaagcagactgtgaaagcactggatcaacct

SEQ ID NO: 12643 - DNA, 418 bp, Glycine max
  Clone ID: jC-gmfl02220141f09a1
cgaatacccgataacatctgtcacctttcccgcttagaggtactcagtttaactggtaaccggttcatcggacccgtaccgagttcaataaccaagttgactcaactcactcaactcaaactaggtaacaattgtctcaccggaacagttccccaaggaattgccaagctcgccaatctaacctattggagtcttgaaggaaaccaactggaaggtaccataccggacttactgtcttccttcacggatcttcggattcttaattcttcttacaacaaattgtccgggaatatgctcaactcgatttcttccctggcgccgcaactgacgtacttggagctcgggcacaactcactatacgggaaaacgcctgatcctctgggaaaatgcactgcgcttgacacacttgacctgtcat

SEQ ID NO: 12644 - DNA, 417 bp, Glycine max
  Clone ID: jC-gmfl02220141f09d1
cacaaaaagaccaatttacattacttatcttacccaatcaacttactggttaatagtaaacataatccagcatatatctgaaagttaaaattacaatctactaattaaatcacatacttcttgaaaaccttaacagttacaggtagttaaacacttgaaaccagtatcatcaacgttgactacacttatagctctctgaaaggtgccaaaggataaccacagtgacactcatttccaacaaaagcacttgacggaaactaactctcgacaagctgtccacaaatactgttataggtaacattgaacttcgtaaggccatcaacactgtttggaacactgcgaaacacccagttacgagtctgatacactgactaaaatctctgcccaaaccttatcttacccagataagactttacc

SEQ ID NO: 12645 - DNA, 554 bp, Glycine max
  unsure (1)..(554): unsure at all n locations
  Clone ID: jC-gmfl02220141f10a1
cacctttgttcactcttcttctcttgcggctagggttttagcgcagcttcttctagatttaaggaagatgggtaaggaaaaggttcacatcagtattgtggtcattggccatgtcgactctgggaaatccactaccactggtcacctgatttacaagcttggaggcattgacaagcgtgttattgagaggtttgagaaggaagctgctgagatgaacaagaggtctttcaagtatgcctgggtgctggacaaacttaaggctgagcgtgaaagaggaatcaccattgatattgctttgtggaagtttgaaacaacaaagtattattgcacagttattgatgcgcctggacatagggatttcattaagaatatgattactgggacatcccaagctgactgtgctgttcttatcattgattcgacactggtggttttgaagctggtatttccaaggatggacagactcgtgaacatgctctgctntcattcacccttggtgtgaaacagatgatttgctgctgtaacaaaatggatgctactacacccaagtattc

SEQ ID NO: 12646 - DNA, 503 bp, Glycine max
  Clone ID: jC-gmfl02220141f10d1
tttgtttttttttttcttgaacactacaaattgaaagttgacatttaataaaccaaagcaacacaacgcagcaaagtcctgaaactcgctgcgcttaacaaaaatgtgatcaggggttccgacaaacacaacacattaaaacacagatgaataaaagcaattttgccaccgtcgatcaagaacccagttctgggaacaacagttgcgagatgatggtggagacttcaaactttgtccgaaaaacaagctacctagaaaagaggacacaagagtacagaaaagaaaccaacatttattgtaaccaacatcccctgatgaaccagcccgcacgattcacttgttgttctgggcagccttggtgaccttggctccggtaggatccttcttctcaacgttcttgatgactgccacagcaacagtttgacgcatgtccctaacagcagacctaccaagtggaggatactcggagaaagtttcagcaaccatgggtttggttggaatca

SEQ ID NO: 12647 - DNA, 54 bp, Glycine max
  Clone ID: jC-gmfl02220141f11a1
gtgcttcagcgtggctcttattgatgctggctacgaagaccatctatgacgttt

SEQ ID NO: 12648 - DNA, 464 bp, Glycine max
  Clone ID: jC-gmfl02220141f11d1
gttactgcactgactcctgtgctcacaaatcgcatgcattgtcaaggccatgtggcggctgctctaacgagaggcggcgtggatatcactggaccttacgcgcatactattaatgattatgggacaactgacaccctgccatttgctgcaatgggatcaggtttacaggctggaatgcctgtgttcgaggctaagtacagtgaacgccaggagtagcgatgaaggcattgggctagatgatgacgcgatctgtgctggtgtatttaatgagctaggacgtgataggcatgttgatgttggcgtgattgccaagggacataacgaatatcacaggaaccaccttctaccaggtcctcgtacctatgataatccacacggcgttagatttcccaagcagacagctgttctattaacatagattacaccgtcgaaggagaaggttgaagtgattgaaggatatgcta

SEQ ID NO: 12649 - DNA, 519 bp, Glycine max
  Clone ID: jC-gmfl02220141f12a1
agataaggaagttcaaagagatatgaagcttgttccttataagattgtcaacaaggatggaaaaccttacatacaagtgaaaattaaggatggtgagaccaaggtgttcagccctgaggaaatcagtgccatgattctgactaagatgaaggaaactgcggaagcattccttggaaagaaaattaatgatgccgtggtcactgtcccagcttacttcaatgatgctcagaggcaggccaccaaggatgctggtgtcattgctggtctcaatgttgctagaattatcaatgaacccactgctgctgccattgcctatggattggacaagaaaggtggcgagaagaacattctagtctttgatcttggtggtgggacctttgatgtcagtatcttgacaattgataatggtgtttttgaagttcttgccacaaatggagatactcatcttggaagtgaggactttgatcagagaataatggagtacttcattaaattgatcaagataaagcatggaaagga

SEQ ID NO: 12650 - DNA, 493 bp, Glycine max
  Clone ID: jC-gmfl02220141f12d1
ttgattttgttttttatagaagtgaaacatgggtcattcatacagctgaagaagtttcttgggaaaactacgcacaaaagtaaagtacaggtgatttgacaaaggatcttatcatcgccaccaaaaaagcaagcgcaggggacttcttgattgccagctatcatagcaatttaacagactccgactaatctagagctcatcgtgagaatcgttctcgtcttgttggtctgatgcaccaccaccgggtggggcttctgcagatctgtgatacacagcactaatgattgggttgcaaacagtgttaacctccttgagctggtatgatcatgatctgtgtccatactctggttgtcatccaggcattccagtgcttgtctcacagcggtctgaatttgccacttgacatcagactccaactagtcagcgagcttgaccttgtcactgatctgggacgtgatgacgtatacatagagattcaagactgttgcgagca

SEQ ID NO: 12651 - DNA, 601 bp, Glycine max
  unsure (1)..(601): unsure at all n locations
  Clone ID: jC-gmfl02220141g01a1
cgcgtcgactgcgtcatctccgacgacgactcctcttcctccgccgccgcctccgacaagtcccgcggccccttctggaacctcctccgcctcgtcttcggcggaatcgtgaaacccatccaaaccctcggtcagttcctcggccccaaacgcccctcctactcctccgtcacgttcccttgctccaccacctcctcctccaccctcgccgtcggaaccgacgacgactccgacgccggcgtcacccaccactccccgacgcaagtcctcaaaaacttcaacgagattcgcctcctccggatcgagctccccagcggcgagctaggcatcgaagacggcgtgctcctcaaatggcgcgccgatttcggatcaactctcgacaattgcgtcatcctcggcgcctactgcgtcttccaccccaaagacaacctaaccgaccccatccacaccaccaattgcaacgcatacgacgacaacggaagcatccctgattccttctacaccaacggcggtctcaaactgcgcgttgcgtggaccatcagtttcctcatcgctgcctgcgccaggcattacttgctccaacccattatctncgagcacg

SEQ ID NO: 12652 - DNA, 502 bp, Glycine max
  Clone ID: jC-gmfl02220141g01d1
gcaggaacaagttttgcatttggcatgattgactcatccagaagtgatttaaaattacagaagcaaagtacattgctcatttaacttgagaaaaatatatcataaaggcaaaccaaactgatacctagaatattcacagagagatctgatagggacagatgactacaaacttaaagctcttacatgatcattcctagttgcaggggtgcactcttacaagcattgcctcaaattaaaaaaaccagcagatgcattcagttctcagttcaagcatgattggtgaatgatttgcagctcctttagtaactactcaaatgtgggccatagtttcagaagctggaaagagcaagattccagcgaccaagctgcttccacttcatgtccgcccaagaaaatttgagttcagtgattcccttctatgaagaacttaacattttctaccttttcaaatgattctgcattccctcacatacgcattataatgagttcatctcatggcaat

SEQ ID NO: 12653 - DNA, 522 bp, Glycine max
  Clone ID: jC-gmfl02220141g02a1
gaagaagtttagtgggaaggatgttgtcttgattgccacaaggaggatcgtgcgaccgccaaagaaaggctctgctgttcagcgaccccgaacccgcactttgaccgctgtccatgatgccatgctggaggatgttgtgtatcctgcagagattgttggcaaacgggccagatatagaattgatggctcaaaaataatgaaggttttcttggaccccaaggagcgcaacaacactgagtacaagctggagaccttttctggagtttacaggaagcttactggaaaagatgtagtatttgagtatccaatctcagaagcctgagatgctgctgcttggtttaatggagtattgtttttttggcagatttttctgttagaattacatatttatgttaaacaataaccaaaattttgacttctggaattttatttgatgcttcttcaccttgatgacattaaaatcaccaagggagagtattttctgtggctatacttggatttagattggttttcctttaggat

SEQ ID NO: 12654 - DNA, 514 bp, Glycine max
  Clone ID: jC-gmfl02220141g02d1
atcctaaaggtaaaccaatctaaatccaagtatagccacagaaaatactctcccttggtgattttaatgtcatcaaggtgaagaagcatcaaataaaattccagaagtcaaaattttggttattgtttaacataaatatgtaattctaacagaaaaatctgccaaaaaaacaatactccattaaaccaagcagcagcatctcaggcttctgagattggatactcaaatactacatcttttccagtaagcttcctgtaaactccagaaaaggtctccagcttgtactcagtgttgttgcgctccttggggtccaagaaaaccttcattatttttgagccatcaattctatatctggcccgtttgccaacaatctctgcaggatacacaacatcctccagcatggcatcatggacagcggtcaaagtgcgggttcggtgtcgctgaacagcagagcctttctttggcggtcgcacgatcctccttgtggcaatcaagacaacattcttcccactaa

SEQ ID NO: 12655 - DNA, 535 bp, Glycine max
  unsure (1)..(535): unsure at all n locations
  Clone ID: jC-gmfl02220141g03a1
ggaaccagtaccacgatttcaaccttgttagtgcaaggagctgcttcgttttcatccctttcatcagcattaaattctgcgatggattctgctgaaagattagttgaggaccttgagtcatatattcataatcacccaacaaatggtgtcaatacaaattcaactcatgatgggaatgttgctgcaactgattccacacctgcagcttctacatctcattttagtaggaatgttgacaccactgctgatattggcttagaaattcagacaacagatagtaacatacagactgagactagtccattggacccttcttcttcttcatctcacagaggaagcactcgtgtttcaacttcaaggcaagtttcaaatgatcgcagaagaaggagatcaaggtgaaggtcttttatgtaaggagatgtaaatcatattaccagaaggttcccaatttatagaaagcgacaatttgctttttatagaaaattntctgtctatttaagcaattggtttgtataaaggaatanacaaccatttt

SEQ ID NO: 12656 - DNA, 489 bp, Glycine max
  Clone ID: jC-gmfl02220141g03d1
aaaatggttgtttattcctttatacaaaccaattgcttaaattgacagaaaattttctataaaaaacatattgtcgctttctataaattgggaaccttctggtaatatgatttacatctccttacataaaagaccttcacctcgatctacttcttctgcgatcattcgaaacttgccttgaagtcgaaacacgagtgcttcctctgggagatgaacaccacgaagggtccaatggactagtctcagtctgcatgttactacctgctgtctgaatctctaagccaatatcatcagtggtgtcaacattcctactgaaacgcgatggagaaactgcaggtgcggaatcagttgcagcaacattcccatcatgagttgaatttgtattgacaccattgggtgggtgatcatgaatctatgactcaaggtcctcaactaatctttcagcagaatccatcgcagaatttaatgctgatgaaagggatgaaaacg

SEQ ID NO: 12657 - DNA, 578 bp, Glycine max
  Clone ID: jC-gmfl02220141g04a1
cgagatgctggggaagacgaggaaggtttcggcgcgtggcgaagccgtggcggcgaactacgccttcggtccctccgaagatgacgtaatcatcaaacacaggcttctcacgcgcaccaccaccaccaggggtgaccctcccttgaagaagcttcagaagaagttcaccacgttcgtctccgaagtcgacaaagacgaagacatcaactacaacgactgcgagaagctggctagagcgtttctgcaggagctgacgacattcgaaattccgcttctgaagagcaaggcgattgtggaggcgaacgttagggagaaggagaacttcaacgagttgaaggaggaaatgaatcgccagatcctgctggcgcagtccgacattgaggatctcaagaagcagcttgaggagagcaaggttgagaggaagcacaaggaggagtgcgaggctattaggaagttgattgccatgcagcccccgagatccgagacaatgaaggttatttcggagttggagaaggaaattgccgcgttggatgccgagaacacggctggttcgaggttgctggagctcaggaagaagc

SEQ ID NO: 12658 - DNA, 411 bp, Glycine max
  Clone ID: jC-gmfl02220141g04d1
aaaatccaatcgaaatgcatttaggatttccattttttttagggaaaatgcattaacttttactaaggtctaagcactagcataatactgatgtttcattttggtatgtttcctactcactatcgaaaaaaaaaacatgactgagatgtatgaaatgttgccacaggcagactgatattctacctagatactgggaaattgcctttggttcggcccccccatttgtgtataccatcccattcttaagctcctacgttggcattctcatatgctaaacatgggtcttttgctcttcctctattgcgttctgcaactcatgcaccacatgttacagctgcgcaaattgcttcttcctgagctacaacaacctctaaccatccgtgttctcggcatccaacgcggcaatttcct

SEQ ID NO: 12659 - DNA, 294 bp, Glycine max
  Clone ID: jC-gmfl02220141g05a1
tgttcacatagtctcatacaagcataacagtgtcacatagactcgataacatcagtgcgcgtgccatgtggcgggttttatgcaactgggtgtgcctcaagtgcttggaagtttgtttccaatgactgttgaaccacattgtgagtatcactactgatacgcaggatgatcgcattctgaaggtatataatacgcttcagacctggacagagtctgcacctcggagtctggcttcactgggaccttatccacttcctctgctagggctgacgtatcatgtgcatcggcaccgtg

SEQ ID NO: 12660 - DNA, 475 bp, Glycine max
  Clone ID: jC-gmfl02220141g05d1
aaatatataagttggaacatcaacacaatggataatcagttgttcacatagtctcatacaagcatgactgaaccaaagacgcttctttggaaaacctgacttagaatcctcaatttactggaaattcttttaaaacatgaatacatgctaagatggctctctgaaaaatcgtcatggaaggtctactcttctaagatgatctttaactaaaatccatgttagaaagatattcctctaaaacggttcttagcatagaatcgtcgcagaaaaggaccttttttctaagacagtcgcttatgaaactatcatataaagtacagactttctacgacgttgcctacgatgatggcggttgataaccggcatcaactggggctttgtaccgacataagcttgcgggtggtgcattagtgtcttaaggagtgttaacagtgagtcctgaagaatgaccgaacactggatctagtcctacaga

SEQ ID NO: 12661 - DNA, 580 bp, Glycine max
  unsure (1)..(580): unsure at all n locations
  Clone ID: jC-gmfl02220141g06a1
attatattaatcttgcaattggctagttctctgtcttcaaattccaacaacaccaaacaccatgaacaaagttcacatcctggcgttcccatacccagcacagggccacatcctcccactcctcgacctcatccaccacttagccctacgaggcctaaccgtcacaatcataatcacaccaaaaaacgttcctatcttaaaccctctcttatcctcgcatccaaacacggtccaaactttagttctcccattccctccccaccctaacatccccgctggcgcagagaacgtccgtgaggtcggcaacagaggaaactaccccttcatcaacgccctctccaaactccaaccagaaattatccactggttcgcaacccacagtaaccctcctgtagcactcgtctccgatttcttcctcggttggactcagcaactcgcttcccaactcagtattcctaggatcacgttctactgctccggcgcgtccttaatcgccatcctccagcgctgctgganaaatctacacttttacaattcacagggagataataatattattaattttcccgaaattcccgga

SEQ ID NO: 12662 - DNA, 414 bp, Glycine max
  Clone ID: jC-gmfl02220141g06d1
aatgatgagcgtatattaataagattttatcaacaaaaaaaattacacttttcattgcataatcattaattgctccgaaaatacaagtcacattcgaagtttctttcctaataaaatttgtattctcacttaggacttacactctcttcatgctcatccaccaaggctagaacattacgagctctttccaatcagtgggctgccatcgtgcagcttcagatctggaaggtttgaccacactgattacgataatatattcagaccttcatgtgcctgagcaccagaggcttgacactgatgcatctgttgcatccttacttgctgcatgctaacaccggatgatcccaagggccttcatggccagataccaaccgacctatcactcatcttggatgcatgtctcagatggacttt

SEQ ID NO: 12663 - DNA, 340 bp, Glycine max
  Clone ID: jC-gmfl02220141g07a1
cttaggcagaaaccctaagatgcttatatcttgagggttatgatcagatttatccttctctatgactcattgcttgttactatctattattatactatgtaggtcgtttactgacttgtaaatagagatctactatgctgcatagcagcattgctaagttactacaaacaagagtagaagcaaggcgggaaatactgataaatatagatgtggatctaagatatgagtatttgcaacttagttgatccttgtgcatatatgctatctgttgattgacttggacatagtggcaaaagaattatatgggtggacatttaatgaataacacatcctctataag

SEQ ID NO: 12664 - DNA, 314 bp, Glycine max
  Clone ID: jC-gmfl02220141g07d1
ggtccacgaagataatttttttgccagtgtgcccaaggcaatcaacaggttgcaaataaacggaggactaaattaagaccagaatcggaaactcaaatgcccactgtagttcacagggttgacgaccttgcttctacccctgccgaaagtgactaagtacagctgcgctgaacaaagtggatccaaatgtacaggactgggaacgagccccaaggtaagacaaatgaatgtaagaggatagacggctgctatacggactaacccggccttgtacccagcgttctaatcctgtgagggcacctgcctaagatggt

SEQ ID NO: 12665 - DNA, 387 bp, Glycine max
  Clone ID: jC-gmfl02220141g08a1
gggaggatgctgatgattccactaagctttcgcaaaactccctgtgtctctgtcacacacacacatatgtgttcttcaaaaatcatggtgggtggtggttgctaatgatgcttaccattccgtcttttctatttaatatgcatgatatgggatctacaacagtgtggccttacggcaacgttcaaggatcactatctaaaggagtgcaagcgatccagagcaggcgtccatactgcatgtcctggcatgggtcttacagatctgctcataagtggctcaacggtccgaaacaggcagaagttgaacatcatctgtgagctgcccgaaactgttgctagaacactatgtgcacagatgcaggttgttcatggaacatgcaaagctatc

SEQ ID NO: 12666 - DNA, 431 bp, Glycine max
  Clone ID: jC-gmfl02220141g08d1
ttttattttttttatgtttttttttattttttttttacattcaaataaatatattgggcacaaactttgaaattccactagactacaattcaatgaaggctgttcataataccatcctatgactataaacaacttaatgaagaatgctgattgtcacgggagcctatatacatcgtacatggggagcctaatgactgagctaaaggtgacaaatgataagtgttcatgtggacatggcgggaaaaaaacagacccactttgtttataacttatactttagactcattctattgacttgatgattcaagggaccaattacctgtccacaaaatcaaacgcttttttgcattgtccgcaatacataggcatgttgcagggatattgctgactgtactggaaagaattatgaaggcgcagacaactgtgcgtga

SEQ ID NO: 12667 - DNA, 551 bp, Glycine max
  Clone ID: jC-gmfl02220141g09a1
taagaattaagaaaataagatgaaagactaaaaatgttttttagtcttattttttatgtaggagtttgaaagtgaaataaaattaaattaaatggacaaattttcaaagtaaatattatctttaattatttggactttagaaaaagatgggagtaataaaatgagtttaatacatgaatttttaatattttcttatacatttttagggcattatgtggtttgttaatttttttaaacagtaaccctctttttttcttagtctaaatgattttttaatttttaccaaattatattattttcattttgattatttttttcatatttctgataatttttttggttgcattttagcctttatgtttagtgatgacgttattaataaaaattaaacaaaaaacctaatatttcttaaatagggaaactaaatgtaaaattttcaaaacaagagttatttttggtcctattaaattaatattttttcatttctgatctacgtaagtttgtttttttcttttttgaaatttagtgtatgtcaattggtgcttgtttaa

SEQ ID NO: 12668 - DNA, 456 bp, Glycine max
  Clone ID: jC-gmfl02220141g09d1
ggcttcctgtctatgccgcctccgatatgtgtctaattcatcaattacgggtcgacacctcactcgtcgtcggccgcccttttttgtttttatttttttttttgtgttttttttttttttttattcttataagggctggatcagccaaaaaggctattgataaacaatcaaatggaatgtttaccaaattgcaattgttcagtatttactatgggtttctcaaactcggatcaaatattttgtgagtctaagtattcaaaccgttaataagtacataacccttattacctgataaaactgtcactggtacttaactcaaccttatagtctctaaagattgtagagggcatgattctttaataaattccaaatactgttaatattcattgagattaatagtgccttcaggggcatgatctttttggtgggttactaaacatttggcttctaaaggcc

SEQ ID NO: 12669 - DNA, 497 bp, Glycine max
  Clone ID: jC-gmfl02220141g10a1
gagagaggtaggacacatgaggaggtagtggggtgcaatgaaaaagggaagggaaggggggtgggattggaatgagtatactatacatgttgttgtggtgtggatgaagaagacacctcactgaattaaattaaccagggaaaacccactcttgctcatttgccttctctttctctaaaacaccaaacccctctatacttctttctatcaaacacagtgcgtgcttttttgttcgtgttcttgttctttcgttctcctaattgtttcagtttatgagtgaatgaaatgggggacaagcaccagcagcaccaggaagactgcagcgatttcaccttcgaggacgaatgcaccgaagattaccggcgctgcggctaccacgccgtccgaatcggcgacaccttcaacgccggtcgctacgtcgttcagagtaaactcggttgaggccatttctccactgtctggctcgcttgggacaccagacattctagatacgtggc

SEQ ID NO: 12670 - DNA, 413 bp, Glycine max
  Clone ID: jC-gmfl02220141g10d1
cctcaaaacatgaagctttgaaaatcggtccaactggcacaatcaaataagatcaacaaaatttactttaagaacttcatactcctcattcctagtttctgtgctccttcattactagactctgtgacagaccgttaccattgtccgagactaattgaccctgcatctgctgaaatatcaaaggacatgattcgaactacaagaaacatagccaccattgattccaacattctggttactataaactcaaaaatgaatttactaatagatgaaacaggacacatttcccatataccactaatcgcagactgactggtaacatgtctatcataatatcattcagcatcagagtacatgattgtgaacactgttcacaatcaagtcgatggctccaatagacctaggcctctttg

SEQ ID NO: 12671 - DNA, 369 bp, Glycine max
  Clone ID: jC-gmfl02220141g11a1
cacctctgctgttcatcatgcagcattctgaggtgatactgctatgtagcagctcaatgaggtggtccgcgagaccggtggcgcctgtaacggtccaaccaacatgcaccgtcccgtcaatagtgctactcatagcacttgacctgctcctgctcgcaccaagtacctgagtccattctcagagcagattccgtcattcgtgaccggagaattcgctggtgactacagatgggacactgctggactatacagctgacccggaaaccttagacaggaaccaggcgctggaggtgagccacagcacattgtccatgctcggtgcacttggctgtaccttgccagagatgcttgcgaataatggcctgaaat

SEQ ID NO: 12672 - DNA, 415 bp, Glycine max
  Clone ID: jC-gmfl02220141g11d1
aatggtcactttaaacagggtcatcctgtactaaaggctgtcaatcaaaggctcaaattgctgttctgatcagcaaaatgggctttttacataatatgagatggagcttacaattgcacatacttgactacttacactgtgcacacaccaacatgtgctcataagctaaaaggatgttcataatgaggatgctcgatggaagaatcaagcccacagttggcggatacatattaaccagagacttgacaatataatcacactgagaactgcactggctgccaatctccaagtatgcttgtacatttacctcagtcgcatcaatatgttcaatatgctcgcccttgtgattgaagtcacacaaaccatttacatgagtcttatcaccatagatgggtgccttaaatgtgtgatgctt

SEQ ID NO: 12673 - DNA, 559 bp, Glycine max
  Clone ID: jC-gmfl02220141g12a1
caccggtgactctcattcaccttcttttctctgcctcactgcctctctttcttaatacagcgctcttcccaaccgctcttccattctccttctccaactccaacccctgcttccctccgttcattgtgtcactccccatcttctgagagtgccgggtgtttgctaccgctggtcccacacctcccacatcaccgccatcatcatgaccagcttcttccgccacaagccttagaattatactattgccaccctacctgtttcttcaacaacaaccggtgacttcactacaggcacgtggtctttctctgaggatccaaccatggcggctggaactgtcttctgcgctgctgctactgctgcttctaatttgacaacaaccactcttcttgacaaccgatcacctacttacaccttctgtcagactactctcgatcctctgttactctctgcctgttcccgtttcctcggttcaagatctatagtgagtttcggagatgctcaaggagggcaggggtgcaatgattcattcttgcggccctatgatgagaatggggatgag

SEQ ID NO: 12674 - DNA, 428 bp, Glycine max
  Clone ID: jC-gmfl02220141g12d1
gagcacaatggtattaactggcctcaaattgaaaacataacccttttttatctgcccatttttgtcaattaatttgctatgtaaattcatcctgggagggatattctgagctactttctcaacaagaagatctttgccattttcatttgaaccaaattttaccttggcaagcaaaaaaattatactattaaagccggcgataaacctccattgggaaccaaccacttgagtgccatttcttgtttgggctattatgaaccaacccttttctaccgcatgtgtctaagttgaaacagaacaacttgatagtaaaagggaaagacctgctttttatgctatcgagaaaattcagttaggccacatccaaatggtttggactttcttcggaattccgaattttcctgaaccctgggggggagaggtataat

SEQ ID NO: 12675 - DNA, 573 bp, Glycine max
  Clone ID: jC-gmfl02220141h01a1
gctattgattgagactgagtatgatttttgcgatgctgagattcttgttgaagacatgcgtgtgggtattcatcgctgcatattggcgtcgcgtagtctgtttttccatgagctttttaagaaagggactgatggatcaggcaaggaaggaaagccaaggtatctcatgtcagatttggtgccttatggcacagttggatatgaagctttccaagtgttcttgtactatttgtatactggaaggttaaaggcttcaccaacagaagtgacaacatgtgtcgatgaaacatgtacccatgatgcatgccggcctgctatcaattatgccttagagctgatgtatgcttctgccacttttcagatgaaagagctggttatactttgtcagcggcatctactaaattttgttgagaaggctcttgcggcagatgtcattcctattcttatggctgctttcaactgccaactagaccagcttgtctctcagtgcattcgtagagtagcaaggtctgactttgacaacacatgtttggaaaaagagcttcctcgtgaagttgtgactgaaatcaaatt

SEQ ID NO: 12676 - DNA, 453 bp, Glycine max
  Clone ID: jC-gmfl02220141h01d1
ggcttttgtttgttactgtgtactattttgaagtcacgggtgactccttgcaactcaaagcgtgaggttagtaatcatatgacctcaatatacacaatgactgtggcgcacaaccgacatacaattgggcctggttaatcaagcagaaacgacttgcaaatagccccgcatgtcagatttaaagcaataagtaccggtggtgagaaagcaattctagaacaattgacgatcatataacatggcagaaaatacacactatagcgtcttggacaaggtactatgatattactaagccaaatgatgtaccattctctccttctaattattcctgatacaacatctataagaaactcaatcaagctaggaaaaagctgccatgaccatcagcaaaaacccctattttaactgatcatctgatttgccaaatataccacttgctctacttgcaagctg

SEQ ID NO: 12677 - DNA, 389 bp, Glycine max
  Clone ID: jC-gmfl02220141h02a1
atttgactttaatagaagttgatacctttgaggggatgaaccgaggatttgcactctcggaggcctcttctcgttcagatgctaaggaagcctataagcgactgcagaagagagatgttgcatttggagttgatatgcctgcataggtttcctttgccgactctcttattgaactgggtgatgaaattatggcacaggttaaaactgtatttattgattcgctgcctccttcatggaatgaagattatgtccgagatcttctcatgaaatatggagagattgaaaaagtcgagcttgctaaggacatgccatctgctctgacgaagaattatggatatgttacacttagtatcacatgatgctgctgctgaatgtgctgatagcattac

SEQ ID NO: 12678 - DNA, 589 bp, Glycine max
  Clone ID: jC-gmfl02220141h03a1
tcgagctgatgctaaagtaataagccttggaattggtgatacaactgaacctattcctgaagtcataactgatgcaatgtcaaagagatcacatgcattgtcaactatagaaggatacagtgggtatggagctgaacaaggtgaaaagccattaagaagggcacttgcttcaacattttacagcgatcttggcatagaagaggatgatatatttgtctcagatggagcaaagtgtgatatatctcgtctccagattgtctttgggtcaaatgtaaaaatggctgtgcaagacccttcatacccggcatatgtagattcaagtgtaattatgggccagactggcctctaccagaaggatgttgagaagtttgcaaacattgaatacatgaggtgtaatccggaaaatggtttctttcctgatttatcttcaatttctcgaccagacataattgttatctgttctgcgaacaatcctactggtgttgcggcaacaagggaacaactgacccaactcgttcagtttgctaaggacaatggttctatagtaatccatgaatcagctcatgcaatgtatatttctggtgacaac

SEQ ID NO: 12679 - DNA, 376 bp, Glycine max
  Clone ID: jC-gmfl02220141h03d1
aaaaggaacggggccccatgtgataaacaccgcattcacagtttactataaatggctagggaaaacatggggctttttcaaagtgaacgccccctagattgagtccaggtgaaaccaactactgaaacctagggatatataaagacgaaattcccgtgttaaacggctcaaaccgtgatatatcccgcaaaaaaattgccctggggccaaaggccctaaccgctgtgaaacaccctccacacggggcatatccggttccaagagttgttaccacccggactttcctctaaatctaagcggttgcatcccatggactcagggcggaaatgaggtcccatccctatggggcatttttccctgcataaactttaaaccc

SEQ ID NO: 12680 - DNA, 486 bp, Glycine max
  Clone ID: jC-gmfl02220141h04a1
cgagatgctggggaagacgaggaaggtttgggcgcgtggcgaagccgaggcggcgaactacgccttcggtgcctccgaagcatgacgtagtcattaaacacaggcttctgacgcgcacgaccaccaccaggggcgaccgtgccttgacgaagcttcagacgaggctcaccacgttcgtctccgaagtcgacagaggcgaagacatcatctacaacgactgcgagaagctgggtagagcgtttctgcaggagctgacgacattcgaaagtccgcttctgaagagcaaggcgattgtggaggcgaacggtagggagaaggagaactatagcgagtagaaggaggaaatgaatggccagatcctgctggcgcagtccgacattgaagatgtccagaagcatcttgtggagagccaggatgagaggaggcacattgaggagtgcgaggctattaagaagttgattgccatgcagtcctcgagatccgaga

SEQ ID NO: 12681 - DNA, 243 bp, Glycine max
  Clone ID: jC-gmfl02220141h04d1
aaaatccaacccaaacgctttcaggggacgcattcattttagggaaaatccataatttgtactaagggatctgcactaccacagtactgacgggccattgtcgcgacttatccactcactatcgagaataaaaacacgactgaaccgtcaaaaatgttacaacaggaatactgatcatcaacctagagactggccaattgccattgattcgggccacccatttgagagcaccctaccatgctt

SEQ ID NO: 12682 - DNA, 563 bp, Glycine max
  Clone ID: jC-gmfl02220141h05a1
aacaccatggcctccccaacactaatatcccccaaatcagtcaaatcactttcacccatcaagcccaaagccaccaccaccaccaccaccatcgccgccactctcacaccatccaccaccacccaccctcgccgccgggaattgttgtccatcatcaccaccacatggttgctccctctgagcccggcactggcatcctcggacgaggaatacgtgaaggagacagaggaagtgatcaacaaagcgaggacgacaatcgtgatggacaagaatgaccccaacgtggcaaccgcggtagcggagttacgagaaacctcgaactcctgggtggcaaagtacaggagggagaaagcgcttcttggacgcgcttcctttagggacatatattccgcgctcaacgctgtgtcgggacactacattagcttcggaccaaccgctcccattcccgccaaacgaagggcaaggatcttggaggaggtcgacactgctgaaaaggcgcttctaaggggaagatgattgacggggaaaaaaggtgttctttctttttttctttgtaatgcatc

SEQ ID NO: 12683 - DNA, 473 bp, Glycine max
  Clone ID: jC-gmfl02220141h05d1
tctttctttttttttttttttttattttttttttgatcgattgaatttagtaataaaactggctccatcatgtccatcacggaaaacagcctccatatttgttcatgactatatgactgcatacatgcatctcttcccctgcgaatgaacggcataagcgagagcccatgacagttacctccgtgtgctacattacaaagatagcacgaataaaccccttttttccccctcaatgatattccccttagaagcgccttttcagcagtgtcgacctcctgcaagatccttgcccttagttcggcgggaatgggagcggctggtccgaagctaatggaatggcccaacacagcgttaaccgcggaatatatgtccctaatggaagcccgtcctagaaggcctatctccctgctgtactttgccacccaggatttccaggctgctcttatctccgctacccgggttgccacgttggg

SEQ ID NO: 12684 - DNA, 562 bp, Glycine max
  Clone ID: jC-gmfl02220141h06a1
agcaccatggccttgccaacagtaatatccccgaaatcagacaactcactctcacccatcaagccccaaggcaccaacaccaccagcaccatcgccggcactctgacaccatccaccaccacccagcctcgtcgccgggaattgctgaccatgatcaccaccacacggtcgctccctatgagcccgggactggcattctcggacgaggaatacgtgaaggagacagacgaagcgatcaacaaagcgaggacgacattcgcgatggaccagaatgaccgcaacgtggcacccgcgggagcgcagctacgagagaccttgcactcctgtgagggcccgctcaggacggagaacgcgcttattggactgcgcttgctttaaggacatatattccgcgctcaacgctgtgccgggacactacattagctctgaccaaccgcttccattcccggcaaacgataggccaggatcttgtaggaggtcgacactgctgaaaaggtgcttctaagtgatgatgattgctgcggaaatacggggcacagggagattatcttagtaatgaatc

SEQ ID NO: 12685 - DNA, 406 bp, Glycine max
  Clone ID: jC-gmfl02220141h06d1
tctttttttttttttttattgattttttttttttgatcaaatgacatcaaaaataaaactggctacatcatgtccttaacggaaaatgcctccatattcaccaatgacaatatgactgcatacccgtatctattcgccttctaatgttcggcataagcgagagccacgctcagtaacttcagtttgatacattacaaagaaaaaacaaagaaacccctttcttccccctgaatcatatcaccattggaagccccctttgagcactgtaaaacatctacaagatcctggcccttagctcggctggattgggaccgatgggtccgtagcttacgtactggcccaacactgcgataagcgctgactaaatgtccctaaaggaagacacccccagaaggatcatctccct

SEQ ID NO: 12686 - DNA, 595 bp, Glycine max
  unsure (1)..(595): unsure at all n locations
  Clone ID: jC-gmfl02220141h07a1
cttcctcttcctcgtacacagagtttatcacaggtgagcgactgaaaggtagcaatggcgaacaggaacctggaaaagatggcatccatcgatgcacagcttaggcaattggctcctgccaaagtgagtgaggatgacaaactgattgagtatgatgctcttctgttggatcggttccttgatattcttcaagatttacatggggaggatctgaaggaaacagtccaagaagtatatgaactttcagctgagtatgaaggaaagcatgaccctaagaaactggaagaacttggaaatttgataaccagtttggatgctggggactctattcttgttgctaagtccttttcccacatgcttaatttggccaacttggctgaagaggtccagatttctcgccgccgaagaaacaagttgaagaaaggggattttgcagatgagaacaacgcaactacagaatcagacattngagaaactctcaaaaacttgtatttggcttgaagaagtctcctcaggaagtttttgatgcactgaanaaccagactgttgatctggttcttactgctcaccctactcaatcaattcgtagatcttt

SEQ ID NO: 12687 - DNA, 487 bp, Glycine max
  Clone ID: jC-gmfl02220141h07d1
gttaagcataatttccgtcttgaaacataacacatcaatggcatgcctcatttgcgtggtagctgactctttcagcgcagaaaggtggtgtagcataataacaaaacaaaacaaaacaaagtgcatctgagaacaaaactagagcactaactttcagcgctgcaaccatattcatgctatcttgatagtaataaaaaaaaggaaaatacaagtaataaatgactcaaacaaacttaaccagtgttctgcatgccaacagcaatacccttcatagtgagaatgagggtgtcttctaaaccaggagcatattcactagtcgggttcagatttataagttcatcagctgatttgcttgcctctgcagattcctttgatatgcgggggcgcaccttcacatcgtagttaggatcacggatacgtctcaatgtgtaagctcggacaatattgagggcggtaatgggagcatgacgaatcctgagtctttgct

SEQ ID NO: 12688 - DNA, 572 bp, Glycine max
  Clone ID: jC-gmfl02220141h08a1
caacagcacaaagcgggttactgtctgttcaagctaccatctctctctctctttcttagtgcctccttgccagaagttaaaatggcccaagaaactttcctattcacatctgaatcagtgaacgaggggcaccctgacaagctctgtgaccagatctccgatgctgtgctcgatgcatgcttggagcaggaccctgacagcaaggttgcctgtgaaacctgcaccaagaccaacatggtgatggttttcggagagatcacaaccaaggccaacgtggactatgagaagattgcgcgtgacacatgcaggaacattggttttgtctctgatgatgaaggtcttgatgctgacaactgcaaggtcctcgtcaacattgagcaacagagtcctgatattgctcaaggtgtgcacggccacctcacaaagaggcctgaggagattggtgctggtgaccaaggtcatatgttcggctatgccactgacgagactcccgagctcatgcccttgagccatgtccttgccacgaagctcggtgccaagctcaccgaggtttcgaagaacgggacatgccc

SEQ ID NO: 12689 - DNA, 425 bp, Glycine max
  Clone ID: jC-gmfl02220141h08d1
ttttcttttcattttcgttttactgtttgtttatgcttccattttttttttttttttttagtgcgttcttgccagaagttaaaatggcccaagaaactttcctattgacatctgaatcagtgaacgaggggcaccctgacaagctctgtgaccagagaaaccaagctgtgctcgatgcatgcttggagcaggaccctgacagcaaggttgcctgtgaaacctgcaccaagaccgggtggtgatggaaatcggagagatcaacaaccaagccaacgtggacttgggaaggaagcgcgtgcaaattgcggaacattggttttgcctccgatgatgttggccaagatgctgacaactgcaaggtcctccccccattgatcaacagagtcctgatctcgctcaaggtgtgcaccgccaccttacaaaga

SEQ ID NO: 12690 - DNA, 511 bp, Glycine max
  unsure (1)..(511): unsure at all n locations
  Clone ID: jC-gmfl02220141h09a1
ccttctttctaaactaaccaactttttttcaaacaaattcgattctttcttcatttttaacctaattttcttttcgatccaaaaaatggctctctcgcgcgttgttgctcaatcgtcgcaatcgaatcttctgaaacccctagcgtcgtacttatcactacgacgccgttcggtttcgacttcgtcagacccactcacgatagagacctcggtgcccttcacctcccacaactgcgacgcgccgtcacgcgccgtggagacctcctcggcggagctctttgcgttcttccacgacatggcgctgatgcggcggatggagatcgcggcggactcgctctacaaggcgaagctgatccgcggcttctgccacctctacgacggtcaggaggctgtcgccgtcggcatggaggccgccatcacgcgcaaggactgcgtcatcaccgnctaccgcgaccattgcaccttcctcgcccgtggcggaaccctatcgagatcttctccgagctcatgg

SEQ ID NO: 12691 - DNA, 433 bp, Glycine max
  Clone ID: jC-gmfl02220141h09d1
aactgtccaatgactcttatagccaaaaaatggtatcaattggaacacaatcttgtgaatacctaaaaataaaataatggccaaattttgccaatcatggaggtcttgcataacgaaatccttcaaatttgcaggacactagttgcatgcttaatcaattgaggtcatatgagtgttagatccttcaaaattacatggcaaaacattaatttcctgcccattgctactgaagaatcaatttcatatacaattcggggaaagctcaacaaattggcagagatgatcttctgaaccttttattcttcattattttgatcggttcaaaactaatgctaagaaattcataggaaaagctttacatcagggcaaaatatctctaacttctttcctatgagcgccacatgcctatagaccaaagccttttacatataca

SEQ ID NO: 12692 - DNA, 502 bp, Glycine max
  Clone ID: jC-gmfl02220141h10a1
gtccccagttggaacccatttccgtagtcaaaaccccagagaacgtagccacaagggcaaaacccttccccccgccatggcacgcgtatcccggtcctcccccccgcgcctcctctactccctctgctgcaccactgcatcgcggtcaccggcgtcgtccctcatcggcggcgccttccatctccgccacttttcagccgggaacgcggcgcgcacgaagccggacaaggagccgtggtggaaggagtcaatggagcggctccgcaacatcggaatctcggcgcacatcgactccgggaagacaactctgacggagcgggttctgtactacactggtcggatccacgaaatccacgaggtcaggggcagggacggcgtcggcgccaagatggactccatggacttggagagggagaagggaatcaccattcagtctgctgccacctactgcacttggaaagattataagattaacattattgacacgcctggtcatgttgat

SEQ ID NO: 12693 - DNA, 387 bp, Glycine max
  Clone ID: jC-gmfl02220141h10d1
acatatcgaagagctcttaatcaacaatctaagaagtcatcttcatcgacaaatacgaacatgtgtaacttacacaggagttaggacccataaccatttaactacctgagatataaataaatgattcgtacaccatattatcgaaactacagtaactattatttgatttccaaaattggttgaccctctaaaaaatgaatcaattcaagcctatatcctatattattgtcacaactttgttgtcttttagtaagtgattgtcataaaatttctttatcatgtacttggacaaaagctgattattcaccttgcttattacccttgtacgtgtttatcagttgcgtctgtacatcatgagaaactggtaaatgttgcttggattccatg

SEQ ID NO: 12694 - DNA, 560 bp, Glycine max
  unsure (1)..(560): unsure at all n locations
  Clone ID: jC-gmfl02220141h11a1
gcaatttctgcggcacctgtgacagaagcctgcaagacccataccacttctgctccctctcttgcaagatcaattatctcgtccgaacaacgggctctctctgcaactatctcttcgagtgcaactacctgccactaccggaatctggactcgacgacggattgatgacccctgactcggttctcgaaccggccggttcggcccgaacctcgtccggttcgggagggtacggaggggtggattgcagaaccaccttggcttgcactgccaccaccgaaattgtgagaaagaagaggaccggcggctccactttccggccaccgtgccggccggcgtgctcgccagtctcggaaatctcagcgggtctcatgaaccggaggaaagggaacccccagcgggccccactctattgaagaacttgcgagagagggtgaggagggttcttttgaaatgaaaacangaaaaaatactttatcaaatattatattctaaatatcggtatattatggaggttaaatctggggctggaaccttgaacctactataccttacaggggaag

SEQ ID NO: 12695 - DNA, 373 bp, Glycine max
  Clone ID: jC-gmfl02220141h11d1
gcccaaagacaaattaaactctaatttcttaattttaaactacctttttaactgcaacgagctgacaccaccaaattcatgtttaaagaccggatagatgacccctgaatcggaacaacaaacgaaggggtgatcccgttcccaaaactgggggggttttttctttcttccctgtaaggggaaacaagttccaaggcacaacccgatatttaaacgccagactgataacgatcttaagaaaaacaatacgtgcaaaaaggctttatccgggctaaattttaaaagaaccccttgagcttctcttgaaaggttttcaatggaaaggggcccgatggggggctccttgcccacgttgcaagagaccccgtggagg

SEQ ID NO: 12696 - DNA, 547 bp, Glycine max
  Clone ID: jC-gmfl02220141h12a1
gcaatttctgcggcacctgtgacagaatcctgcaagacccataccacttctgctccctctcttgcaagatcaattatctcgtccgaacaacgggctctctctgcaactatctcttcgagtgcaactacctgccactaccggaatctggactcgacgacggattgatgacccctgactcggttctcgaaccggccggttcggcccgaacctcgtccggttcgggagggtacggaggggtggattgcagaaccaccttggcttgcactgccaccaccgaaattgtgagaaagaagaggaccggcggctccactttccggccaccgtgccggccggcgtgctcgccagtctcggaaatctcagcgggtctcatgaaccggaggaaagggaacccccagcgggccccactctatcgaagaacttgcgagagatggcgaggaggttcttttgaaatgaaaacaagtaaaaatactttatcaaatatgattaatctaaatattgctattattatggagcttaaatctggggttggaactcggatactactata

SEQ ID NO: 12697 - DNA, 415 bp, Glycine max
  Clone ID: jC-gmfl02220141h12d1
gtgttatttctgctgcacctgttacagaagcttgctttacctatactactttttgaatttctctagcatgaccaattatctagtacgaacaacgggctctttctgcaactatctctttgagcgcaacttcctgccaccaccggaacctgtactccaagcccgatagatggcctcctagtcatgctgaatgagccacatttctcgctgaagcttcacgctctctgcaacctcacggacgggctgattgcgtaacgacctgggattgcacctactccacctaaaatggaatgcttgcatgaacctgaggagtcagttcaccatcaaagggcacttgctggacttcttgtatcaaaggacttttattacctgtgtgaacctagtgactcggtgactcatgcccttggagcttgtcctg

SEQ ID NO: 12698 - DNA, 455 bp, Glycine max
  Clone ID: jC-gmfl02220142a01a1
gtaactgacctttggtttccattgtcacttagaatggctacagggactggtactagagctagggatgccgggatcgaccagttactcggggtggtgccacgcatcttctgcatctgctatgctatctgtggctatgagccattcagcggtgcgctcactgccatagagaggatacgttataggagtcttacactgaaggactggctagatgacatatcacagcatgctactatcatgattgctcagatgaccaccggcacgttgtctatcattgacagtgctatggctatgactgaggcctactgggcccttgacgtagagactcttgtctggcctgaggcctggggatccatggaccgcccgtacgctgatgctaatgttaacgtgcatagacggtttagggatagagaatactcagttcaccttgtaccagtgaacgatcttgatgccacata

SEQ ID NO: 12699 - DNA, 494 bp, Glycine max
  Clone ID: jC-gmfl02220142a01d1
cgaacccgtcgtagcagaaaaacttgtcaccatggtttcttccgacaaggatccacgagaggatgtccttcaagcctggtacatggatgatagtgatgaagatcaaagactcccccaccacaaagaacccaaggagtttgtctcgttggaccaacttgctgaacttggagtccttagctggaaactagatgctgataaccatgaaaatgatccagagctgaagaagattcgtgaagagcgtggttacacctacatggatgtttgtgaggtctgcccagaaaagttgccaaattatgaacagaaaatcaaaagcttctttgaagagcatcttcacactgatgaggagatccgcttttgtgctgctggaagtggctattttgatgttagggatcgcaatgaagcttggattcgtgtgtgggtcaagaaaggaggaatgatcatcttacctgccggaatttatcatcgctttacgctagatgaagagcactacatta

SEQ ID NO: 12700 - DNA, 554 bp, Glycine max
  Clone ID: jC-gmfl02220142a02a1
aaaaaaccttcacctaccactttataaaacccgtcccttctcttctcctttcccaaatcatttgatcactctgtattgtgttttgttccttccttggttcgttccctccacaaaccaaaaacccaacaaaagaacgttcatttttcattttcgtttctaataaagagcatggccggtggttctatcaagagacattctttctccgaagaggaccatggtttcgcttcttccatggagcctgggtattctgggcacaaccaccacttccatcatggtttcgtgtctaggactttgggttatggcactttctacaaccgaggtgttaggagccattcgattttctcgccgagatctgggagattttatgatgcaagattcgaagatcaccaaccccactttcttcaagcttgttctctttgcaagaagcgtctcggggataatagtgacatcttcatgtacaaaggggacacgcctttttgcagcgaagagtgtagacatgagcaaatggagagagacgaagcccaagagatgaataataacctttcttcttcgat

SEQ ID NO: 12701 - DNA, 517 bp, Glycine max
  unsure (1)..(517): unsure at all n locations
  Clone ID: jC-gmfl02220142a02d1
gtttcctctgatcgtgtcagaaatataaaagtttatttcctctgatcgtgtggtttctgagttctaagcactcacctctttcatacacgtttgttcgcttgttgagaagccatgggcgaggatttcgagttcccaagtgctggcaacatggaaatgcctgaggaggaagagtttgagagtccgatcctgaaggttggggaggagaaggagattgggaaaatggggctgaagaagaaattgctcaaggaaggtgaaggttgggacacccctgacagtggagaccaagttgaagtgcattatactggaaccttgcttgatggaaccaaaatntgattctagccgcgataggggcacccccttcaagttcaagctaggccaagggcaagtgataaagggatgggatgaaggtatcaaaccatgagaaaggtgagaatgcccttttcacatacccccgaattgcttatgagagttgggtctctccactatcccccaatgcaacttgagttgagtgagtgct

SEQ ID NO: 12702 - DNA, 585 bp, Glycine max
  unsure (1)..(585): unsure at all n locations
  Clone ID: jC-gmfl02220142a03a1
aacacaacaaaaaaagacaacccagagagcgcgtcttaataaacgctcttctctgaaaacccccatttcttttcttctttcttcttctctttcgcttcttcgatcttcgatcttcgtcgctgaaaatgagagagtgcatttcaatccacatcggccaggccgggattcaggttggaaacgcctgctgggagctttactgcctcgaacacggcattcagcctgatgggcagatgccaagtgacaagaccgttggtggaggtgatgatgctttcaacaccttcttcagtgaaactggggcaggaaagcacgtgccccgtgcgatttttgtagatcttgagcccactgtgattgatgaggttaggactgggacataccgccaactattccatcctgagcagctcattagtggaaaggaggatgcagcaaacaactttgcccgtggccactataccattggaaaggagattgttgagctntgcttggaccgcatcagaaagcttgctgacaactgcacaggtcttcaaggttttctggttttcaatgctgtgggtggcggaactggctctggactnggttccctttgct

SEQ ID NO: 12703 - DNA, 459 bp, Glycine max
  Clone ID: jC-gmfl02220142a03d1
gaaaataattagatgcatatatttgactttggtgttattttgggatttttgtaattaaataacacaaacactgacgttcatcacacatgtgtagggcctgtttcaacttaaaattaaaggaataacattggcccatgacgcgacaggtgcaccacctagtaatcataattttacatctttacatacaaaaaacaaagactttaaattttaaaaagaagaaaagagataaacagatcatcttaatgaaatgaaaccaaaacccacaaacattggctagatttttgtagttgttgttgaggccaacatgattaatcatgaaccgagagaacgaatcactttgactttaagggaatggccctgattaccaactgccgtttgagtgctgcaagagctgaacttgtgaatggtgccacccaaaacatccacagtttatgcgaaacaggggacttgttgaagatg

SEQ ID NO: 12704 - DNA, 590 bp, Glycine max
  unsure (1)..(590): unsure at all n locations
  Clone ID: jC-gmfl02220142a04a1
ctttgtatcacgaaaactatacgattcgattccttgttttcaatggacaccttcttcaattctcaatcttcttcttcttcgagaagccgctggagttacgatactctcaagaatttccgtgagatctctccgctggttcagaatcacatcaaacgggtttattttacgttatgttgcgctgtggtggctgctgctgttggagcttttcttcatgttctgtggaacattgggggttttctcaccacgttggcttccattggaagcatggtttggttgctatctacaccccctgttgaagagcaaaagaggttgtctctgttgatggcttcggccttgtttcagggcgcttccattggacctctgattgatttggctattgccattgatcctagccttattgttagtgcatttgtggcaacttctttggcttttgcttgcttctctgcggcagctntagttgcacggcgtagggagtacctctaccttggtggtttgctttcttctgggctgtccattcttatgtggttgcactntgcttcctctctctttgggggctcaatggcactcttcaagtttgagctgtactttgg

SEQ ID NO: 12705 - DNA, 368 bp, Glycine max
  Clone ID: jC-gmfl02220142a04d1
gttggttggggaaaaacatatgaagagggttaaaaaaaaatctggcctttaccattaccgcaaacacaaagttaacttacctcacagggggcccacatgttttaaaccgctgattgttgtttttccacaaactaaattactggagaaaaacccgggctcgaggcgggcggtcagcctactaaaacccccttttcttctttttctcacttccctcagaggaatttttcaccatttttattagaattcttccaaagattgccgcccaattagggaacaaaggcaatgggtgtttcacaaaattccgggcaccaaagggggcccttccaagatattcttgggggggtactttaacgtgggccacaaacccc

SEQ ID NO: 12706 - DNA, 552 bp, Glycine max
  Clone ID: jC-gmfl02220142a05a1
gttacggcactgactcttcttaagaaacacctgttcaattatcaagggcatgtctcagctgctttagctctcggcggcgttgatatcactggacctcatttgcatactatttatcctcatgggtcaactgacaccctcccatttgctacaatgggatcaggttcacttgctgcaacgtctgtatttgagtctaagtacacggaaagtttgagtcgggatgaaggcattaagctcgttgttgaggcgatatgtgctggtatatttaatgacctaggaagtggaagtaatgttgatgtttgtgcgataaccaagggacataacgaatatctcaggaaccaccttctaccagatcctcgtacctatgtcaatccaaaaggctttgatttccccaaatagacagaggtcctcttagcatagattacaccgctgaaggagaaggtggaagtgattgcaggagatgctatggaagagtaacaatcattgcaaataaatatggtgtatgagtttgagacttgattagtgcaatggctgtgatatttgatttgtactttc

SEQ ID NO: 12707 - DNA, 458 bp, Glycine max
  Clone ID: jC-gmfl02220142a05d1
gaaagtacaaaatcaaatatcacagccattgcactaatcaagtttcatactcatacaccaattttttttggaatgattgttactcttccatagcatttccttcaatcacttccaccttctccttcaacggtgtaatctttgttaagaggacctctgtctttttggggaaatcaaagccttttggattgacataggtacgaggatttggtagaaggtggttcctgagatattccttatgtcccttgggtatcacacaaacatcaacattacttccactttctaggtcattaaatataccagcacatatcgcctcaacaactagcttaatgcctttatccctactcaaactttccttgtacttagactcaaatacagacattgcagcaagtgaacctgatcccattgtaacaaatgggagggtgtcagttgacccatgaggataaaatagttgcaaatga

SEQ ID NO: 12708 - DNA, 607 bp, Glycine max
  Clone ID: jC-gmfl02220142a06a1
gctaacaagagattcaagaccggcatggctaatgaagaggaacagaaaaaccacctcttcggcatcaaagatctcggtcacaagactctccttcagagtgatgcactctatcagtatatacttgaaaccagtgtctatccaagagagcacgagtgcttgaaagagatacgcaagatgactgcaaaacacccactgaacatcatggcaacaccagcagacgaaggacaacttctgagcatgcttgttaagctcacgaattcaaagaacgccttggaaattggtgtattcactggttactctctgctctccactgccctggctcttccccttgaggaagaacctggctttggatgggaatcgcgaatactatgagttaggattgccaataattcaaaaagctggagtggctcacaagattgatttcagagaaggacctgctcttccgtttcttgacgagatgcttaaagatgaaaataaaaaggggtcgctggatttcgttttcgtggatgctgataaggacaattacttgaactaccacaagagggtactagagcttgtgaagatggaggactgatcggatacgataacaccctatgggctggatctg

SEQ ID NO: 12709 - DNA, 475 bp, Glycine max
  Clone ID: jC-gmfl02220142a07a1
ctcgagccgattcggctgagagcacttagtgctattcaataattacgaaaaaccaacagcgagtgttgtttttgtttggtccaggctggaccagggaatgaatagagatgagaggctttcggttgaagagaactgagttaagcggcgaagccaaacgcagaatcggcggcagaaattgccaccggaagcacgtcgaagacgggtgaaccaaacacaaaattccatccaccacttctcttttcaatccccaactcaaatctgtgaagaaaatctcaatttctaaattgtaattcttagcactactgctagtagtagtaaaaaaaaacaattagaaagtagtagagtgatttttttttctttttttcgtttgttttacttttaagatgggtgagaagagcaacgttggcggcgacgcgattaacacgacactgcttacgggaagtacgagctgggccggctgttaggccacggaacc

SEQ ID NO: 12710 - DNA, 381 bp, Glycine max
  Clone ID: jC-gmfl02220142a08a1
gaagcaaaactgagatgtctatctatgaagaaaagggaactcaacaacatttatgtcttaccccgaccatattcccccaaaatatcaaacgcggtaaaaataaagcacaaggaggaacaggcttcaagggatacatgaccgtatgaagaacaacctaaatttacacttttaaggcataaaattaaatgaaccttctaatccaggaaatccaattaccatagttcctttcctgcttaagttcaaataagagaacccacaattgaaaataggacagagatatgtcaaaagggttctgggaaggcctcacttggcactcaaggttgggaaatgcccggcatcttcaatggatggagcaggtgcattgttggtggcacttccatg

SEQ ID NO: 12711 - DNA, 338 bp, Glycine max
  unsure (1)..(338): unsure at all n locations
  Clone ID: jC-gmfl02220142a08d1
taagctgatctaatgaaatctccgatcnatttccgggaaccgatggcctatataaaacaaatattccattcatatacaacattttttccccttattactgaaaatgtggaattgggatcctcttgaatatcaactcattctctagatatcagatatgcctaacatgaaatcaaataatcccaaattatataagaacattttgcctccttatttctgaaatagtggaattggaatcccccatgaaatctcacctcattttcattggttaaaggattccccttctttgaaaacaatattatttcaatttcttctattaacattttcgcctctcatatttc

SEQ ID NO: 12712 - DNA, 133 bp, Glycine max
  Clone ID: jC-gmfl02220142a09a1
aaggaatgtagtttataataggcagtgtttgtttagaagtctagccattgagattatgcagtgatacaaaaacaatccttttcttttgccatatttatgtaattttaacattagtaaaatttctatttctttt

SEQ ID NO: 12713 - DNA, 383 bp, Glycine max
  unsure (1)..(383): unsure at all n locations
  Clone ID: jC-gmfl02220142a09d1
ctcaaatctctactgagctacacganatatatgggggacttcaggaaggcctaataagaaaacaaataattccaattcatatatgaacatttttgcctccttatttcttgaaaaagtggaatggggatttttcgaggaaatcccccctcatttcctttggcttcaggataggcctaataagaaaacaaattattccaattcatatatgaacatattagccttcttatttcttgaaaatgtggaattggaattccccgaggaattccgatctcatttcctttggcttcaggataggcctaataagaaaacaaataattccaattcatatatgaacatttttgcctacttatttcttgaaaatgtggaattggaattccccgagg

SEQ ID NO: 12714 - DNA, 406 bp, Glycine max
  unsure (1)..(406): unsure at all n locations
  Clone ID: jC-gmfl02220142a10a1
attcattccaatgggatcagtttgtgaagagcgatggataacagttaccatcacaacggtggcattggtgatagcttcttcagcaccattattattggcggcatgcccttacacctccatcttcagcttcggtgattcacttgcagacactggcaacttgtatttcagcccctacccacccaccaaccactgccttttccctccctacggcgaaaccttctttcaccatgtcactggacgctgctccgatggccgcctcatcatcgatttcatcgctgagtcactggggattccacgggtgaagccgcatctgggaatcaagactatngggagatggagtgtggaagaaagggggacccaattttgctgttattggagccacggctttagatttcagcttctttga

SEQ ID NO: 12715 - DNA, 373 bp, Glycine max
  Clone ID: jC-gmfl02220142a11a1
ccgcaattgcgaaatctctggaacaattgatttcattttcggatactccaccaccttgatccaaaactcgaagatcttggtgaggaagcccatggcaaatcagcagaacatagtggtggcagatggcacagggcagaagaacatgcccacaggaatagtcctccataactgcgagatcatgccggaccctaccctcttggcagaccgcttgagcgtgaagacttacttggccaggccatggaaggcattctcaagggcagtgttcatcgagaatgttatcggggacttgattcagccagatggttatattccatggaacccaattgaaccaaacacacaggattgctacttcgctgagtttggcaacactgga

SEQ ID NO: 12716 - DNA, 468 bp, Glycine max
  Clone ID: jC-gmfl02220142a11d1
agcccccgtaggccggcgtttagtctgattgtatgtcagatacaggttagagcaactaccagtcggcggccgtccttttttttctttttttttttttttcttttgatttttattcatggatgcctttaacttggccagaggccctgttcattgaatcagtgaaaaccgggaaaaactcgttaaaaaaaagagagacaaagaagatctacactgcaacctttacgtcgcacggtgcaccaaacatgaaaaggggctctgccaaaatcaagaacaacccacgaaaaacatacgcttaatccaccccctcaattgtgggaccaaccccacattacaatggccgctgcaggaccctcctaaatcaagggtccacccagtataacaaccaacaccgcggcgcaccatttggtttgaagggatctccaatgctgtccaaatccttcatcttattccaaaaagctggaccctcaa

SEQ ID NO: 12717 - DNA, 405 bp, Glycine max
  Clone ID: jC-gmfl02220142a12a1
ccatggactggttctcctggctatccaggaccagcctagagccatccctcatctacgaatacggactcgccttcgcgcgcaacgagctccagctggaggatgccatctacttcaaccacgagtttctccagagcatgggagtgttccatagcaaaacacaggctggaaatcatcaagctcgcaaagaaagacgttggcggcggtggggcggcgatgatgatgaggagcagcatcagcatcaagtgttctatcaagaagtgcctgaggaagtgcttcagctagctcgcttcgcgtgaagatcaccaccaagcgacgattgcgacaacagcgatgatggcgaccgagccgtaatggtaccaagggaagtggaggaaggcaaggcacaatgggaacaatgaggatctc

SEQ ID NO: 12718 - DNA, 512 bp, Glycine max
  Clone ID: jC-gmfl02220142a12d1
tgctaccttggagtttaaaatccggcagatatccattttgaagcacaacaaaaaagaaagggatatacaacacatacgacaacggatttatggctctacatgcatttcagagcaaacaaaaggtaatagactccttaagaagtgcagacattgcaactcttcatacagcttcctcttactccttccccaccaaccatataaagtggattcttgtcacattcacctactttagcccacctagggcaattctcattctcatcaacacactcttcattatccacttgcttgaatggttattcaaagtcactcacgtgaatccacttggttgcagaccacttctcgccctcaatgactggacagcttccatgcaagctcttagtatctgtacttgcattcagatggagactgaagaacaacaaggcatcacccttctgaggctttactgcatatcccttgtgagcacattcagaccaactctcatcttctggctgcaacaactttgcctcggccct

SEQ ID NO: 12719 - DNA, 459 bp, Glycine max
  Clone ID: jC-gmfl02220142b01a1
tatgaagacactaagtcttttttgatagaaattgtgaagatgtactgttatcattgtatcaactatattgtgcccttctttttttatttgatttggcaaacacggctacttttctccaaataagatggatcatttgtattgccggctttgtgcacaattatctacttgtaagaagtccaatttcgggcaacaacgtttgtaatgcagaaataggtcattagcattgtaaatctccaggcgataaatggaatatcaaatggaagacgccgcatagcttctggtgtgacaatatcattgtgttgggcaaagcattttcgaagaaattacgtggatttaggagattctgattattcttctacatctacaattattaaggtgaagataatttcggctctttacaagtaaagaatgaaattttcatatggtagatttagttgatcaatataattattgctttaa

SEQ ID NO: 12720 - DNA, 542 bp, Glycine max
  Clone ID: jC-gmfl02220142b01d1
cggcttcaaccttgtagttattctctttcttcttttttagctatccctctcttgaaaaatctagatctcgttcttccttgatctacgttacgcttttagtgaccggatctgtatggatctgaaccagatctacacgccgatggtggttttggcctggtctttcatagatctgatgcatggaggctcagatctactgtacagagatactgtagataatcgatgagaagaacgcagatccagccgcttccgcttgttcgatcgctacagacgcttgtatcggattattcatgattgattcataagcagcatgtcttcctccggctatagttgttgcagatctcggatgttgtaaaattagtgtatgatgtgaagctatgggctggaaaatgtggatgtaggagatttcgggacgaaaggcctcaaaacgcttcgtcggttgtggttactgagtcctgagtgatcttgtcatccgacctttgccatgacaggtgcgcttgcttggcaggtcaaatatgttaataaaaaagtttattggttagggg

SEQ ID NO: 12721 - DNA, 575 bp, Glycine max
  unsure (1)..(575): unsure at all n locations
  Clone ID: jC-gmfl02220142b02a1
cttctcataagctttacttaattagcaaatccaaatatggcactttcttcttcatcatcttcaacatccatatttgctttagctttgttcactcttttgcttataggaagttcttcagctcaactctctgagaacttctatgatagtaaatgtcccaaggttttctatgccgtaaaatccgttcttcaatctgctttggctaaagaacctcgccagggagcatctatcgttcgcctcttctttcatgactgctttgtcaatggttgtgatggatcagtactacttgatggcccttcctcagagaagactgcacctcccaacaataactctttgagaggttatgaagtcattgatgccatcaagtctaaggtcgagacagtatgccccggagtggtgtcatgtgctgatattgtaaccattgctgctcgtgactctgttgcaatccttggagggccatattgaaggttaaacttggtagaagggattccacgactggattnttcaaccttgctagcagtggtgtgctcccaggacctggttcttccctcagcgacctttatcaaagatttgatgat

SEQ ID NO: 12722 - DNA, 445 bp, Glycine max
  Clone ID: jC-gmfl02220142b02d1
tatggattgcttcagctcttcatgctgctgttaactttggacagtatccatatggaggtttaatcctgaataggccaactattagcaggagattcatgcctgagaaagggtctcctgaatatgatgcgttagctaagaaccctgagaaggagtttttgaagactattactggcaagaaagagaccctcattgaccttacaattatagaaattttatcaaggcacgcatctgatgagttctaccttgggcagagagatggcggtgactactggacttctgatgccgggccattagaggcctttaagaggtttggaaagaatcttgaagagattgaaaagaagcttatagagaagaacaataatgagacattgagaaaccgctatgggccggctaaaatgccttacactttgctctatccttctagtgaggagggattgactttcag

SEQ ID NO: 12723 - DNA, 503 bp, Glycine max
  Clone ID: jC-gmfl02220142b03a1
aaagaatcccaggcgaggagaaagatggaggggaaggagcaggatgtgtcgttgggagcgaacaagttccccgagagacagccgattgggacggcggcgcagagccaagacgacggcaaggactaccaggagccggcgccggcgccgctggttgacccgacggagtttacgtcatggtcgttttacagagcagggatagcagagtttgtggccacttttctgtttctctacatcaccgtcttaaccgttatgggagtcgccggggctaagtctaagtgtagtaccgttgggattcaaggaatcgcttgggccttcggtggcatgatcttcgccctcgtttactgcaccgctggcatctcagggggacacataaacccggcggtgacatttgggctgtttttggcgaggaagttgtcgttgcccagggcgattttctacatcgtgatgcaatgcttgggtgctatttgtggcgctggcgtggtgaagggtttcgaggggaaaac

SEQ ID NO: 12724 - DNA, 421 bp, Glycine max
  Clone ID: jC-gmfl02220142b03d1
gaaaataaatagatgcatatatatgactctggtgttatttgggattttgcaaattaaattacacaatcacagccgtacatcacacatgagttgggcctcttccaacttaaaagcagaggataacattggcccatgacgcgacacatgcaccacctaataatcataattttacatttttacatacaaaatacaaagactttaaattttaaaaagaagaaaagagataaacagatcatcttaatgaaatgaaaccaaaacccacaaacattggcttgatttttgttgctgttgttgttcccaacttgattaagcatgaaccggttgattgaatcacttggacttgaagggaatggccctgattacgaccttgtggtagagtgcttgaagagctgcaccgattaatggtcccccccagaagatc

SEQ ID NO: 12725 - DNA, 599 bp, Glycine max
  Clone ID: jC-gmfl02220142b04a1
aaaccaactccttcctgcttgccccttctcagatcgccggttccggtaagtcccaaaactcgaaccctagccctaaccctaaccataaccctaaccccagctattcgaattcccctcctcttcgcgcaatcatggcgacgtctttggtgagctccgcgggtgggatgctggcgatgctgaatgagccacatctctcgctgaagcttcacgctctctccaacctcaacaacttggtcgacaccttctggccagagatctccactagtctcccaaagatagagagcctgcatgaagatgaggagtttgatcaacatcaaaggcaacttgctgcacttcttgtatcagaggtcttttattacctgggtgaacttaatgactcgttgtcttatgcccttggagctggtcctctgtttgatgtttcagaggattctgactatgcgcacactcttcttgctaaagccattgatgaatatgccagccttaagtctaaggcagcagagtcaagtgatgaatctatcatagtggacccaaggatggaagcaattgtggagaggctgatggataagtgatcgtggatggatataccaacagctatggga

SEQ ID NO: 12726 - DNA, 69 bp, Glycine max
  Clone ID: jC-gmfl02220142b04d1
aatgggttctgaatttattaacaccgggggtcataattgttcaacgttattaaatatactaacaaaaag

SEQ ID NO: 12727 - DNA, 146 bp, Glycine max
  Clone ID: jC-gmfl02220142b05a1
gtgcagagactatgggatcgaatagcagaaagcgagctttctgactgtgttatgttgtctgtcgttaccaccagcaacgcggttgacatgaagctaaccgaacagggatcatacataaacctgactgttttgggcatgatggaaat

SEQ ID NO: 12728 - DNA, 215 bp, Glycine max
  unsure (1)..(215): unsure at all n locations
  Clone ID: jC-gmfl02220142b05d1
ctgccctgtatgtcaattgacatctacccaanaatatccggggagaccaccgcacactactccgcggccgccctttattaattttttttctttcttttttataaaccataatgcataatagagatcatttggggaataagtattcaccaagcaatttatggatacaaaaggcggctcctctaaaatttaatgttattaagcacacaaggggaaaa

SEQ ID NO: 12729 - DNA, 487 bp, Glycine max
  Clone ID: jC-gmfl02220142b06a1
tcgaaacaatgatttgagcggtgagattccccaaacggggtcgttttcgaaccagggccccactgcgttcctcaacaacccgaacctgtgcggatttcctttgcagaagccctgcgcaggttcggcgccgagcgaaccggggctcagccctggttctcgtggggcgcaccggcccacaaagaggctgagccccagttcgattatcttgatctcggtggcggatgccgccggggtggccttgattggacttgcggtggcttatgtttattggaagaggaagggcaagtccaatgtgtgtagttgcactttgaaagggaagtttggtggggagaggaggagttgagcttggcttgttgtgaagaggggggaaatggccacagacatggggagctaatggtagcttaagatttgaaattgagctgaaacatggagccaatgctggacttgcaaatgcatttgaacttctcagccgatcaaagacaaatat

SEQ ID NO: 12730 - DNA, 448 bp, Glycine max
  Clone ID: jC-gmfl02220142b06d1
aaaatcataatgcataatagagatcatttcataaataagtattcagcaagcaatttatggatacaaaaggcggctccgataaaatttaatgttattaagcaaacaaggggaaaaaagaaaaagagtagcagagtcggttttccacgagacgagaagagacacgcaactcgataagtatcacaaaagattacagaagaaaaggaacattctcttctcaactatatcctatttgttgctgttgctgaggtggttggtaaccaggataccccggataactgccatacatgttgggatcctgtccagcagcaggagcatacccataattttcataaccttgtgcagcatacccatagtatccaccaccagaaccagcaccaccattccactggtttggatctgcctgagcctgtttgttagaaggactgcggccccatgaaagacgaacatt

SEQ ID NO: 12731 - DNA, 131 bp, Glycine max
  Clone ID: jC-gmfl02220142b07a1
gtctggctcttgaattgatttcggcatgctatacacttgaacaccacacgacaaccggaccatgactatctggcatggtcattgggagagccttgagaaggcccgacgccactcacgatatgtagcaccca

SEQ ID NO: 12732 - DNA, 463 bp, Glycine max
  unsure (1)..(463): unsure at all n locations
  Clone ID: jC-gmfl02220142b08a1
gaaccaaaactggagcgtgttggcccccttgcagtncaaccttaaatttaccggcacgacccgctcactagggctcgggcgccctctcaactctctccaacaatttctttttttcttttgggctgctcaaattcaagcagggggatttgtatgctcggcctcacagaattactcagaatgctccctcttctcccccggattctgtaagtccagactgcaatgcttgcactcctctgctcaaatatcgcacctatttctcactcaccaacaattaacagggcatgacaatggaggcaaattccaagctgtgtcacccccaacaactgctgcgtaatgagccagaccgagcgcagagcgccagaaaagatatcaaggagcttctcaaagcaccaattgccctgctggtcttatccgatccggacggggtgatgctggtacttataataagaatattgccgagtgg

SEQ ID NO: 12733 - DNA, 532 bp, Glycine max
  Clone ID: jC-gmfl02220142b08d1
agaacaagtgtgcaaaatgccaatgcaattatagtaaaaatcagaagaacaaaatccaactagtttccaagcagtgatgtcaaaaatgccaaaacagcaataataattatgatatttagaaaatagtttgactgtagaggcttatctgggcttccaccaatcgcctcatattcagcccgtatcttctgcttcataccgtcagacagttctctctttccagtggagtacttggctgctacaaacttctctgcccctgcatttggagaatcatctatcacaatgccctctggaggatcaaatttggctccaaggttgctaagttttgcatgggcttcagcataatctttaaagaatgcttcctgatcttcagcatatttctcagcatataccttgaaggatgggtcttcaaaaagagcagcatcagttggcaataccaatagatcttcatcctttttttctttgatgtccttgaagtaagagttgtcaaatttcaaccattgcactgtccaggattgtccttcgggtgctcctg

SEQ ID NO: 12734 - DNA, 500 bp, Glycine max
  Clone ID: jC-gmfl02220142b09a1
aaaaaatcgtagttggaggcgccgcactccactccactccaatcaatcagatactagcgatggggaggaagcgaaaggtagcaccgaaatcttctgtatccgccgagcccccgctgaagcaacaccaaccaaaacccgaaaatgccgctcaggaatacgaagaagaggtcgaagaggaagttgaggaagaagaggtagaggaagaggtcgaagaggaagaagaagaagaggaggacgaagaggacgaggaagaagaagaagaagaccaaaaagaccaataccagcaccaacaacaacagcaagacgaagacgacgacccgatctccaagcttctggaaccgttgagcaaggaccagctcctcatccttctctgcgaggcggcggccaagcaccaagacgtggctgagaggatccgaagggcggccgacgaggatccggtgcaccggaagatatttgtccacggattgggctgggacacaaccgccggaaccctaatcagt

SEQ ID NO: 12735 - DNA, 451 bp, Glycine max
  unsure (1)..(451): unsure at all n locations
  Clone ID: jC-gmfl02220142b09d1
cgccctatttttttttttttattttttttttatttttttttnttgcaaaaaaaataacacccatggggagggatttttccaaagataatttgttaaatattttacaactaacaagaccctttcagaattcaattcacttttccttaaagaaaaaaaagaatttcaaaattacatcttttgtactttgccttttccctctttattggggggcaacactaccaaacttaactgaataacattgtccataaaatgcccaaaccgaaaatatctctttggccatcctttttgggcccctattttttattcccttatcataaccatttggtattactggttttatcccacaagtctccaaaaaaagttctggcggaaaccaagcttggaaaaaacggaggttcaaggaaaaaatgagttaacgagccctcccagttttaactcaacccaagtcggt

SEQ ID NO: 12736 - DNA, 326 bp, Glycine max
  Clone ID: jC-gmfl02220142b10a1
ctccagtccgaagtctgcgcctttaccgagggtcgcattgaattggaagaaatcaaagaagaacgaatcaataacacgaatacctcaagtgagagggagaaatggaatcgcctccgcagctgggttcaagaggggcagaaacacttaaacatatagctcctggatcatcaatttctgttgcatatcacccatcttttggaccttatgatgacctcctctttctagagcttgatgagaaacttctcccagatgttctgaatgaaagggtggtcttgagaggacagcctgatgaagatgccgttctttgtactctatccaaaacctat

SEQ ID NO: 12737 - DNA, 449 bp, Glycine max
  Clone ID: jC-gmfl02220142b10d1
accagaaattataaactttaatttagaagtcctaaacattgcccatttgaagggggggagaaaaaaaaaagttctgttgaagattcacaagtccattctattttgccctgaaaactggttttgtgtcaggggatggttgggtccttcgagggtatttgagtagcaacccttttgaaaaaagacctggtcccttcaaatttttgatataggggtgcaaaattttccattcccattttggcctttttttgaaaaaaatggaaaaaccctcggttggagggggagggaaaaaccccaccttgaaggccccaacccctgtttaaactccaagtttttttgttaaaacctcttctttcacaaaaaaaaagggggaagccttccgtgtggaaatttttgtttccattcatccatgaaactttttaactttttcttacccccttttaggaattttt

SEQ ID NO: 12738 - DNA, 432 bp, Glycine max
  unsure (1)..(432): unsure at all n locations
  Clone ID: jC-gmfl02220142b11a1
ctccagtccgaagtctgcgcctttaccgagggtcgcattgaattggaagaaatcaaagaagaacgaatcaataacacgaatacctcaagtgagagggagaaatggaatcgcctccgcagctgggttcaagaggggcagaaacacttaaacatatagctcctggatcatcaatttctgttgcatatcacccatcttttggaccttatgatgacctcctctttctagagcttgatgagaaacttctcccagatgttctgaatgaaagggtggtcttgagaggacagcctgatgaagatgccgttctttgtactctatccaaaacctatgctatgaagtttgttggaacttccaattctgttctgcttgtacctncagcaaatcattcgggaatttagtgaaaatccacaaaagaatgatagtactaatgatgaa

SEQ ID NO: 12739 - DNA, 452 bp, Glycine max
  Clone ID: jC-gmfl02220142b11d1
tgtgagttttttatcttttgtttgcagattataagccccctcatagaaaacaagagaataggtgacaaacaacacgcagaaccaagaaccggcatgaagaacgagcgcacaggactggatgccatgagcaacaaacaggcctgctatcgtgaccaagtctgcactaaaactcaatgcagaaaatggcatgcggacatcataaaacgaacgaaaggtagagactctcggtcatggtaacatgaacatcgcccaatcaccacttgagaggccgaacattatcaacggccgcacacagaaggaacgccaccaaaagctggccatatacatgaataagaggaaccacaggaatttcgggaggaaaatcaagaatgactgcacgaaggcacttgctgacagtcactcaggaatccggggaaaatacgcgaggactgaagaatcagcatgtcacacac

SEQ ID NO: 12740 - DNA, 494 bp, Glycine max
  Clone ID: jC-gmfl02220142b12a1
gtgctgcccatctcttagatcgacttgttaaggatattgtgactgaaagtgatcagttcagtattgaagaatttataccattgttgagggagcgcatgaatgtactgaatccatatgtccgtcagtttttggtaggatggattactgtattggacagtgtcccagatattgacatgcttggttttcttcctgattttcttgatggtttgtttaatatgttgagcgattcaagtcatgaaatacgtcaacaagctgattcagctctttctgagtttcttcaagagattaagaattcaccatctgtagattatggtcgaatggctgaaatactggtacaaagggcaggttctccagatgaatttactaggttaacagctatcacatggataaatgagtttgtcaaacttggtggagatcagcttgttccatattatgctgacattcttggagcttgtttgccttgcatatctgataaagaagagaaaattagagtg

SEQ ID NO: 12741 - DNA, 500 bp, Glycine max
  unsure (1)..(500): unsure at all n locations
  Clone ID: jC-gmfl02220142c01a1
aaaaaatagtagtactattgtaacgttgtgacttgtagggagggaaatggagggaggtgacgttgggcattgggtgttggagttccttctccgggctcggtacccattcgtttccagtaacctactcaagaaagtccttcgaatagtcccactttcagactttgattccaggcttcagaagacgcttcttctacgaacccttcaagaccacttgttcgctgtctctgtccccgaatccgttctcgaaaccctcgagctcctcgaggaacttcaccgtcgcgacgactgcgctctgatcaccgtcgccgccatgagcgccgtctactgcgccattgcggcggactgcactctcaagcacctgctggtggaactccacatcaaccctgcctacctcggcgccgtgaacaggatatggcgtggtagggttcggcacatgagcggttccagngagggcagacttcttctctcgctggagttggaactgtggagaaccgacatcg

SEQ ID NO: 12742 - DNA, 443 bp, Glycine max
  unsure (1)..(443): unsure at all n locations
  Clone ID: jC-gmfl02220142c01d1
ttttctgggttttctctgttgcttcatctttttgttcttttgggttgcttaaattttgaaactttttgcactttcgatttccatatgcatctggggcatcactattcactacatatttatgtttttcttctttctagatggtaatggtatcgaggggatttattcttgacaggcattgtttttgttgaattgatagcaggatgatcagagactgtgcataagaattatagctaattgtttatgcaatgaaatgcttttactattcactaaattgttgcgcttttcttctttctaggtggcaaggatattatgggttttattcttgacagacattttttatttgtgatttgttgaattgataacaggctgatcagagactgtgcacaagaatcatagctgatntgttatgcaatgaactgcttttactatttcagagacaaatc

SEQ ID NO: 12743 - DNA, 427 bp, Glycine max
  Clone ID: jC-gmfl02220142c02a1
ctcacctgatagatctactggcgcggtgtaacttgcacgtagggacactaccggaagtgagttcgaccactagttcgatcgcgaacgcgtagacagagatcgcgactacgagcacaatcgtctactccacaaccgccatcaacgtagagaattctcatactgagggtcatgggtaccggtcaccatagctttatccaccgctatcagacgatgtcgcagccgtctccgcggatcgcaagcagaatgccagcgtgttcttccgtataggcattccacgctgcagaagaactgcgttctaatagacaagtcagcgatgatcgcacaacagagcctgccggtggcgctgccgatgtcgacgccgctgccactgcctattcggcacacctgatgactatgtcgaacgggtactacggatgtaggaagatca

SEQ ID NO: 12744 - DNA, 120 bp, Glycine max
  Clone ID: jC-gmfl02220142c02d1
gttacaacaaggatttctttaacttataataagagttttaactttccatggcgcaataatggaaaattgtggggatctggtgacagaaacggagaaccatgcctatatggccgcatgcga

SEQ ID NO: 12745 - DNA, 561 bp, Glycine max
  Clone ID: jC-gmfl02220142c03a1
cctccctcaaatcccaaaccagcaaaaacctttcttcacaaaatggcctcaacaactctaacaaccctcaccctccgcacgctatcttatcctacaccctcctcttcttaccctacgcacctctccgccaaaccctcctccctccaattccccaatctctcccaccgcgccgtcaccacgcgccgcccccgtgtcgtcgtctccgccgttgaggcgccggagaaaatcaccaagctcggcgacgaaatcgccggactcacgctcgaggaggccaagaacctcgtcgacttcctccaggacaagctcggcgtctccgcggcggcgttcgcccctgtggcagtcgccgcgggtgccggcggcgctgtggcggacgcgccggcggtggttgaggagaagacggagttcgacgtggtgatcgaggaagtgccgagcaacgctcgaatcgcggtgattaaggcggtgagggcattgacgaacctagcgctgaaggaggcgaaggagttgatcgaagggttgccgaagaagttcaaggaagggatttcaaggacgaagctgaagatg

SEQ ID NO: 12746 - DNA, 471 bp, Glycine max
  Clone ID: jC-gmfl02220142c03d1
ttcttttttttttttttttttttctttttttttttttgttttataaaaaaaagaactcgtgtttccttattacaaaaaaaagattgaaattcctacaaaatggaaatgaaaattcaggggtctggtgaactcaacttcaaccaacaaaagaagaagcacaacatttttgctgtacctaaacagggtttaaacaaaggtaaccttggcaccagctttttcgagttgcttcttcgcattttcagcttcgttctttgaaatcccttccttgaacttttttgggaaccctttgatcaactccttcgccttctttaaggcttggtttgtcaatgccctcaccgccttaatcaccgggatttgagcgttggtcggcaccttcttgatcaccacggcgaactccgtttttttcttaaccaccggcggggcgttcagcacaaggcctccggcacccgcggtgaatgccacatgggcaaa

SEQ ID NO: 12747 - DNA, 549 bp, Glycine max
  Clone ID: jC-gmfl02220142c04a1
ataaattctcaaatttctctcagcagcttctttgtactcttccttggctgagcttcttttattacaattatctctctaagtacacccacccagtctgtgctatatacttgtattatctctatattattacactgatcttgaataagcatggcagagaataccacgaacacggtggaggtccaattgggttgcggttcgatgggaagaattttgcatctcaaaacctatcacaggactagaaaatcctctgctcattcactacccgtgaaggcttgcaacaacactgctcagtaacagacggatcaggccaataacgaagccaaaccctctccaaaccatgaatcaaatgttccaagagatagctgcattggaaccattcctacactgaaagtggagcagaatccagcgagagagagcagctatagtcaccgtgcaccttcagcataccagatcactcaaaacgggagagcctcggacgctgcacgaacctcaattcaacgaagccacgactcatatgaagagagtatacatcatcagattgagcacgct

SEQ ID NO: 12748 - DNA, 445 bp, Glycine max
  Clone ID: jC-gmfl02220142c04d1
ccaaaccattatgcactgagtgggaggaattaaagacctcccaaacattcaaaagtattaataaagtcaatttctaacacaaaggatcactttttctatacctttttctacagcttttaacaatgctatgtttcatctatggattcctctgacttgggagcaaggtgaccaaatttatgaagcagatataatcagcttgattaattttcggcaatcttcctttccattcataaaaatctaacctccctcggctcttcctatatgttgggaatcaaaaaagggtgaataccttccgctgctctataatttaactaatttggccaacaaaacgcggttgttaactggaattactttaatccgtgatccattctcgaatattataaaggctgggatgtagtttacaccttttgatttagccaaaatgggtggacttcaatcttcacct

SEQ ID NO: 12749 - DNA, 469 bp, Glycine max
  Clone ID: jC-gmfl02220142c05a1
gaagcctatctccgagtgctcactacccatccatgccgaaatattccacgggcgatagtgtcagcaccgtacaagagctctctgagtccaccgctgctctctacgtagcatgaatgagctgcgctgactgcaccggatgcgcgtagaaggccgtaacacgcctccgaggcatgcgtgtagccatcgaatgcgtcctgaacgtcctagctcacatcctgttcgacccttccttcctgaacgtggagactattcacgaggcaactgaggacgctaggatcaaagtcgagtatctcacagactacgtagaatccattcaagtatgcctgatccagaccataggattgatctgcagctcctgctcgtacagtctggaatccgtactgcaagcccttgacggagtccttgaagcccgcgtgggccttgccaccgaagaggcccatgtacactacaacccaattctcctcaccac

SEQ ID NO: 12750 - DNA, 383 bp, Glycine max
  Clone ID: jC-gmfl02220142c05d1
gtgcagaagagaggaagtataaatttttaaaggaaagaaaagagcccttggaagttgttacacctttgttcactaggctaaaatcatgacgagacgacacttataaacatgattacatacaaaagtggctttaagccaaaccatcaatcgtgatgcgttatatatcactgggtgacgcaacccttgtgccacgtatcttgaggttgtatagcttcctgggtctcctgggataatacaacatcggagaacagtagaccatgctgacagaggaggcacccatagaagacccagctgtccggggtggcaatcagaaccgtgcatgggggggaagagctccatacacatttgggatgccaagcaggttataacccaaagcccgaaag

SEQ ID NO: 12751 - DNA, 478 bp, Glycine max
  Clone ID: jC-gmfl02220142c06a1
gataattctgcagccgtaggtgaagacgtgggtgaggttaagtgtggcattgctgacatagaagtgaccatggtggaaagccatgcaaatctcaaaataagatccaagaagcgccccaagcagctcttgaagttggtttctggtttgcataccatgcgcctcacaatcttgcacctaaatgttactaccaccggtgaagttgttctctactctcttagtgttaaggtagaagatgattgcaagttgggatcagttgatgatatagctgcagctgtgtaccagatgctagataaaattcagcaagaggcaatgttgaattaagatcaaaccttgaccaaatatgccttgccccactttggttttaacctcatgtcaacaccttacttcatggtggggatcatgtctctcgctatttttctctataaggatgtacctaattattgcactttctgttcacttcaccctttgttaatctact

SEQ ID NO: 12752 - DNA, 509 bp, Glycine max
  unsure (1)..(509): unsure at all n locations
  Clone ID: jC-gmfl02220142c07a1
gttagggttgtgagtcttcctttaaaggggcatcgagactcaatctctttctctctctttctttgccctctctttctctctctagaattctcagatttgcggggcgagatgatgcagcagccaggacccggcatggcacctcccaccatgggccagcagccgccgcaacagtaccagcagcctccgccgcagcagcagcaaccctacgtcatgatgccgccgcaggcccaggccccgcaggccatgtgggccccctccgcccagcctccgcctcagcagcagcccgccagcgccgacgaggtccgaaccctctgggatcggggatctgcagtactggatggacgagaactatctctatacctgctttgctcacaccgcggaggttacatcggttaaagtaattcgaaacaagcaaactagtcaatctgaagggtattgggttatttgagtttaataagtcgtgctggagctgagagaattcttcaaacatataatggggcantaatgcc

SEQ ID NO: 12753 - DNA, 543 bp, Glycine max
  Clone ID: jC-gmfl02220142c07d1
gaacactaacaacaatcctttttccatcaacaggtaaattgttggaatacaagtgaaaaataaagtttcatattaaataaaaataagaaaattgaacaccatataaataaagataaaattcataaatatgagtcttcaagtttttgattaaggtatgatgttaatcaaaagtttcaagaagtgttatttaactaggtagtagtacttttcttttcattattgttatcatcactgtcaactttttctcctttaccaccatcatcaatttcctttctctgctggtcctctttggcctcttgttccttctttttagcctccaatttctgagtttctttcttctttctcatgaaatctataagctgttcgaggctagtttcgatgtggctgctcttcagaagctgttctgctacctcagcaggagtcacctgggttttctgcatctcttcctcgatcttttcgaagagagaatgctctttgattccgaggtaattggaagctagctgcctgaaaccacagggagtgcaataggacatgtgaatgtga

SEQ ID NO: 12754 - DNA, 499 bp, Glycine max
  Clone ID: jC-gmfl02220142c08a1
tctggccaccgtcattactgtgtttcggcggcggactcagcggctgtcaccgcagtggtggtccgatccgtggcgagcgacctcctcccgtcggagctccggtcctacatcaccaacggcatgcacagcatgtcctggcgcttatactaccatataaccctgcaaattgacgagctcgacggcctcctcaacaacctaatgtacgaggccgacgaaacctacctcggggccaaaatgtctgccaacacacgcagacttaaagtcagcaagcccgagacagacacaaccttagccctgacaatggagcgcaacgagtccttaaccgacgttttcagaagcatgaaagataacagagttctcgtctgccgtcatgtcaagtccagaggcttgcacaaccctcgcgacctcaacgccaccatgaaatccgaggttcgctccctcgaactcacttttaacaagaagcataaagacatggtgctccagacctatcttccctata

SEQ ID NO: 12755 - DNA, 551 bp, Glycine max
  Clone ID: jC-gmfl02220142c08d1
gaacactaacaacaatcctttttccatcaacaggtaaattgttggaatacaagtgaaaaataaagtttcatattaaataaaaataagaaaattgaacaccatataaataaagataaaattcataaatatgagtcttcaagtttttgattaaggtatgatgttaatcaaaagtttcaagaagtgttatttaactaggtagtagtacttttcttttcattattgttatcatcactgtcaactttttctcctttaccaccatcatcaatttcctttctctgctgttcctctttggcctcttgttccttctttttagcctccaatttctgagtttctttcttctttctcatgaaatctataagctgttcgaggctagtttcgatgtggctgctcttcagaagctgttctgctacctcagcaggagtcacctgggttttctgcatctcttcctcgatcttttcgaagagagaatgctctttgattccgaggtaatatggagctagctgcctgaaaccacagggagtgcaataggacatgtgaatgtgaacatccat

SEQ ID NO: 12756 - DNA, 520 bp, Glycine max
  Clone ID: jC-gmfl02220142c09a1
tgataaggtccttcaaccctttgatgaaaacaaattcaactttaccaaagtcgggcaagaagaggtcctcttccaatttgaagctagcgaggatggacaagtccagttctttccaaatgctccagttgatgttgacaattctcccagctttgttgccatcaatgtcagtcctattgagtatgggcatgttttgctgattccgcgcatatttgagtgtttgcctcaaaggattgaccgtgagagcttcctccttgcacttcagatggcagtggaagccgataatccttattttcgattgggttacaacagcttgggtgcttttgcaactatcaaccatcttcacttccaggcttattatttggctctgcccttcccaattgagaaggcccccactaagagaattgcaagtgtaaatggtggggtgaagatatctgaactgttgaagtatccggttagaggctttgtctttgagggcggcgaaaatgctggaagatctatcaaacgttgtttcagatgcatg

SEQ ID NO: 12757 - DNA, 143 bp, Glycine max
  Clone ID: jC-gmfl02220142c09d1
ttattttttttttttttcatgcttcgatttattccagatttatattcattaaaaattaacgggaagaacttggttattttcagttatagtaactacaaacataaaagtggccaataaacaattaacaaaaacatgatatgacc

SEQ ID NO: 12758 - DNA, 408 bp, Glycine max
  Clone ID: jC-gmfl02220142c10a1
ggaaaatagcaaggggcaaattcgtcattagatataaaaccctaatgcccctcgttcggtgcttccatttatagtctcagtcttcttctcttcttctcttcttctcttcttctcttctcttgtctcacgatctcaacggagcacctctcttcaggtcgccatctagactgcaatcatggctgatggaccacagcatccatcagttgttcagaagctagctggacagtcttacctggtgtcccaggctagccccaactttaactctgggaattattcctcgactggttcttacttcaatggaggactgcactcttctgggttggctgttgtgtcgcctggatctccagttactgtgcatgctccagcagaaaaggagtgagtggatttctagtggattttctgatgggt

SEQ ID NO: 12759 - DNA, 510 bp, Glycine max
  Clone ID: jC-gmfl02220142c10d1
gagcaatcaaacctagtcttaattatttcaaccggggggggttctcaaacttcaggattataagctgatggcatgaaatgaaacaaccaaaatgaaaattcttgtttccaaaactatgatttctacgtatcaaggtcctaaatttgggaaaatatcaataccaatatttctcatccaaaattattcaaatgacaagggaatcggcatgattatcccaggaaattgtcgtcatcatcttagccacctccaccagatccgtatttctttccgaacaagacaagctgcagcttgtcataaccagcaagcacaccagcacctgcaacagcacgcaatatgtttgcaccagcacctttgaagagtgacttggcaccctcatttgcgacgattgtttggaatgcatgcaaagagctcttgtacttcacagcctctccagaagtcatcatcatccttctacgaacagtgtcaatggggtaagaagccaaccagcaccaattgtgattccccatccca

SEQ ID NO: 12760 - DNA, 316 bp, Glycine max
  Clone ID: jC-gmfl02220142c11a1
aaaatgtaatgaacacatgagattttaataaattcttaagcattttaatggagcattcatattaattttaattcaataattgaattctcatatttttcatatatacatatacctctttattaactgacaagctaaattcttcttctaaattcttgtaggatggaactagtcttcgggtcacgtctgtgtcaacagggaaatatctatgtgccaagcctggagggggaaatgtcctacttgcgaacggcacaagcgcttcaacggcttgggaaacaattacattgtggaggataaacgaagatactttcagactaag

SEQ ID NO: 12761 - DNA, 481 bp, Glycine max
  Clone ID: jC-gmfl02220142c11d1
tcctttttttttttttttttttttttttatattttttttagaagtgaaacaaggctcattgatacaggtgaagaagtttcgtcgtaaaactaagcaaaaaagtaaaggacaagttatttcacaaagtatcttatcatcggcaccaaaaaagcaagcgcaggggacttcttaattcccaggtatcataaaaatttaacagactccgactaatctagagctcatcgggagaatcgtcctcgtcttcttcgcctgatgcaccaccaccgcctggggctcctccagatctctgattcacagcactaatgattgggttgcaaacggtttcaacctccttcagcttctcttcataatcttctttctccatactctgggtgtcattcagccattccagtgcttctttcacagcagtctcaattttctccttttcattagactccaacttgtcagcgagcttgtccttgtcactgatctgggtcttcat

SEQ ID NO: 12762 - DNA, 455 bp, Glycine max
  Clone ID: jC-gmfl02220142c12a1
caactgtactccatatcatatcaactggagctggggaacctcgtctctactcgcgctcgtccccgccggagatccaccatggccggcaactccgccaccgccaccgccacctcctccgcattgtctcccgagaatttgaaattcaatttctcccccgataacccctcccgaatcatcctcacttcggatcaggtcaaccactgtacccaagccctcaaccttctgaaggagaagctccacgatcctcacgtgatcactcaggagttcgcacacttgcaggcgaacaggataactccgagtgagatgagaagaagatgcaccgtcgcgtatgacgccgtcaatttgagcaaaaaccgatacacggacgttttgccatttaacaagacagggttgttctcaaatcaagtactgattataggcctgaagcacaggggtatatcaatgcaagccttatc

SEQ ID NO: 12763 - DNA, 521 bp, Glycine max
  Clone ID: jC-gmfl02220142c12d1
gaccctactgcgtctgggcttcagtctagagctgtatgcccagttagaggttacacgagcatactcgtcggcggccgtcctttttttgacttttcaaaatgaaattttaccatttctaaccccaaccctacattaagggggtaggtgaaattgatgtgttctcgtggtctcaccgtacacgcttatgattcttgttgatgatgctggcggactcattcctgcactcaatcattcaccatggaatggcttaacgctagctgattatgtcatgccatatagcctatctattgtgggtgcttcgcttgcactcacatacaagaaactgcatcgcggagactatgcatctacgaaagcaagtcaactgactctacaacttccagagtcaggccttttcattcgcgaggtaactaccatgccctgaacgatcggacctatagcatggactcgaaacagatgagatggatggcactacctgacacaattcatgtagcgcatctggtttcctcactgcgcgcaatttg

SEQ ID NO: 12764 - DNA, 608 bp, Glycine max
  Clone ID: jC-gmfl02220142d01a1
ggcggctgctgctgcggctgccaccgccgctcccaagaaggcgccggctcagcagatcaagccggctcagctccctagcaagcctcttcctccggctcaggctgtgagggatgccagaaatgagtctgttcgtggaggccgtggaggtggacgaagtgggggacgtggatttggacgtggtcgtgggtttagtcgtgactcttccaatgacgagaactcattccctaccagcggagctccttataatcaggtttcttttgaaggagatgctgggaagtcttctgaaagacgcggttatggtggaccacgaggtccttaccgtggtggtggtggtcgtcgtggaggtttcagcaatggtgaaactggtgaagctgaagaaggacgacctcgaagagcatttgatcgtcgcagtgggactggacgaggaaatgaattcaacgtgaaggctcaggacgtggtaactggggagcccaaactgatgaacttgctcaggtaactgatgaagttgcgaatgaaactgaaaagaatcgggtgatgagaagcctgcagttgaaggagatgtaactgatggtaccaggacagccctactaatgaaactgaagaaaaga

SEQ ID NO: 12765 - DNA, 517 bp, Glycine max
  Clone ID: jC-gmfl02220142d01d1
gcttccaaaaccacattttcaggcttcttagtaattccaaaagcttgttgacgagaatggcttccggtgaaaaccagtttccccgccagaagcaagacacacagcctggcaaagagtatctcatgaatccaccaccccaatacaacagccccgattacaagccatcaaataaacttcatggaaaggtagctgtagtaactgggggtgactctggaattggacgagcagtgtgcaacttgttttcattagagggtgctactgttattttcacctacgttaaggggcaggaggagatagatgcaagggacacgcttgagattataagaaaggctaagactgaagatgccaaagatccaatggctgtagcggttgatcatttgggttatgaagagaattgcaagagagtggtggaccaggtggtcaacgcttatggcagcatccacattctggtcaacaatgcagccgtgcagtacgagagtgattcacttgaagagattgatgataaaagactcgagat

SEQ ID NO: 12766 - DNA, 208 bp, Glycine max
  Clone ID: jC-gmfl02220142d02a1
tctcgctctcacctggtccacaattgaattgaatgtatgtatcattattcgggtctggatggttgttccatttcactagtacttcttactttctgcggtatcctctgttcccgtcacaattgagattagataaatgttaattagtgtcttaacaaagagttggacgtggatatggacttggacgtgggtttagccgtgactataacaa

SEQ ID NO: 12767 - DNA, 275 bp, Glycine max
  Clone ID: jC-gmfl02220142d02d1
tttttttttttttttttttcatatcttttttttttttttttgtactcatatttttttgagggcactttttaacacactcccacctttttattgcgaggggaacagcgcgttcccgataaagtaaaaagtcctactgaatttgggccaccaacaccccccgaataaagacacataaattcaacttttttgtggaccattgtaggaccatattcatgcccaaaaaccatcttccctacttctgagtgtgcataatttaacttattatccgggggcct

SEQ ID NO: 12768 - DNA, 496 bp, Glycine max
  Clone ID: jC-gmfl02220142d03a1
cttcagaacgtcgaaattcgcctctgggttcaaccctctgcaacggaagcctttggatttgggccggatatggtccacggcggaggatttgggccgtaacagggcccgggtgctgtcgctgtaccggcaaatactgcggggcctgaactcgccggagttgcggctgggcttcgcggcgaggctggcgaagaaggcggaggcgcgggcaatgttctgggtgggttctgatgaacgctcgttgcacaacattgcggatctcattgatgctgcagagtactctctctcctttctcagaaaaggacaactccctcctcgttacatcaactgatcaacgttgttttccatcaacgacccttctcagaaaattaacaaaccttattaccttaaggattttgttagcaagtagtggagcaagcaagggctgtcctggcaggaggtagtgcgccaaggatccctctgtcggctgagcagtacaattccgttgggattgcttttc

SEQ ID NO: 12769 - DNA, 423 bp, Glycine max
  Clone ID: jC-gmfl02220142d03d1
aaaggagaggaaattctgattatattgcttgcttccatttgagtacattgtttgctatatacaagcttttctgctaacacttcgctaatggtgctttggcatattgccttggaggaaaaaacaaaaagcaaaattacaaaaagtgaaaagcaatcccaacggaattgtactgctcagccgacagagggatccttggcgcactacctcctgccaggacagcccttgcttgctccactacttgctaacaaaatccttaagggaataaggtttgttaattttctgagaagggtcgttgatggaaaacaacgttgatcatttgatgtaacgaggagggagttgtccttttctgagaaaggagagagagttctctgcaggatcaatgagatccgcaatgttgtgcaacgagcgtttattagaacccac

SEQ ID NO: 12770 - DNA, 566 bp, Glycine max
  Clone ID: jC-gmfl02220142d04a1
cttcagaacgtcgaaattcgcctctgggttcaaccctctgcaacggaagcctttggatttgggccggatatggtccacggcggaggatttgggccgtaacagggcccgggtgctgtcgctgtaccggcaaatactgcggggcctgaactcgccggagttgcggctgggcttcgcggcgaggctggcgaagaaggcggaggcgcgggcaatgttctgggtgggttctgatgaacgctcgttgcacaacattgcggatctcattgatgctgcagagtactctctctcctttctcagaaaaggacaactccctcctcgttacatcaactgatcaacgttgttttccatcaacgacccttctcagaaaattaacaaaccttattaccttaaggattttgttagcaagtagtggagcaagcaagggctgtcctggcaggaggtagtgcgccaaggatccctctgtcggctgagcagtacaattccgttgggattgcttttcactttttgtaattttgctttttgctttttccctccaggcaatatgccaaagcaccattagcgaagtgtag

SEQ ID NO: 12771 - DNA, 495 bp, Glycine max
  Clone ID: jC-gmfl02220142d04d1
aaaggagaggaaattctgattatattgcttgcttccatttgagtacattgtttgctatatacaagcttttctgctaacacttcgctaatggtgctttggcatattgccttggaggaaaaaacaaaaagcaaaattacaaaaagtgaaaagcaatcccaacggaattgtactgctcagccgacagagggatccttggcgcactacctcctgccaggacagcccttgcttgctccactacttgctaacaaaatccttaaggtaataaggtttgttaattttctgagaagggtcgttgatggaaaacaacgttgatcagttgatgtaacgaggagggagttgtccttttctgagaaaggagagagagtactctgcagcatcaatgagatccgcaatgttgtgcaacgagcgttcatcagaacccacccagaacattgcccgcgcctccgtcttattcgccagccttgccgtgaagcccagccgcaactccggcgagtt

SEQ ID NO: 12772 - DNA, 429 bp, Glycine max
  Clone ID: jC-gmfl02220142d05a1
gaaccctatcgccgagtgctcactagccctccatgcccacatattcgacgggcgctagtgtcagcaccgtacaagagctctctgagtcctccgctgctctctccgtcgcctgaacgagctgcgctgcctgcaccggatgcgcggtgaaggccgtcacacgcctccccggcatccgtgtagccatcgactgcgtcctgaacatcctagctcacgtcctgttcgacccttccttcgttgacgtggggactattcgcgaggcagttgaggactctaggttcgatgccgagtgactcacagacgacgtcgaatacgatcaagtatgcctgatccagatcataggaatgagctgcagatcctgctcctacagtctggaatccgtagtgcaagcccttgacggagtacttgaaacccgcgtgggccttgccaccg

SEQ ID NO: 12773 - DNA, 460 bp, Glycine max
  Clone ID: jC-gmfl02220142d05d1
gactgtatcgtagtgaagctcgaataatttccgggtcgacagcgggggggcggcggccgccctttttttttttttttgtgcagaagagaggatgtataactttttaaaggaaagaaaagaaccgtaggaagctgtcacacctttgttcactaggctaaaatcatgacgcgatgacacttataaacatgattacatacaaaagtggcttaaagcagaaccatatattgtgatgcgttatatatcactgggtgacgcaacccttgtgccacgtatcccgaggttgtatagcttcctgggcctgctgggaaatttcaacaacggagaacagtagacaacgctgacagaggaggcagccatagcacacccagcagttcagggtggcagtcagaaccttgcatagggggaaagagctccatccgcaattgggatgccaagctggttattacccaaagccggaaag

SEQ ID NO: 12774 - DNA, 407 bp, Glycine max
  unsure (1)..(407): unsure at all n locations
  Clone ID: jC-gmfl02220142d06a1
atcctttcgttattctcttattcatccttctcttctgaataatccagatctctttctgcccttttctccgtcacgcttttcgtgaccggatctgtatggatttgatccagatctacacgccgatggtggttttggccgggtctttcatagatctggtgcgtagaggctcagatctacggtaccgaggtacaacagagaatcgatgacaagaacgcagatccgacggtagatccagccgattccgcttgttcgatcgctacagacccctgtatcggatcatntaagcagcgtgtctggcgcgttctacacgtgttgccgatctcggatggttgtaaattagtttatgatgtgaagcttggagtgaaaatatgtggatgtggaagatttcggatgaatggcctcaaacg

SEQ ID NO: 12775 - DNA, 478 bp, Glycine max
  Clone ID: jC-gmfl02220142d06d1
gaacactacaaatagaaagttgacatttaataaaccaaagcaacacaacgcagcaaagtcctgaaactcgctgcgcttaacaaaaatgtaatcaggggttccgacaaacacaacacattaaaacacagataaataaaagcaattttgccaccgtcgatcaagaacccagttctgggaacaacagttgcgagatgatggtggagacttcaaactttgtccgaaaaacaagctacctagaaaagaagacacaagagtacagaaaagaaaccaacatttattgtaaccaacatcccctgatgaaccagcccgcacgattcacttcttcttctgggcagccttggtgaccttggctccggtaggaaccttcttctcaacgttcttgatgactcccacagcaacagtttgacgcatgtccctaacagcaaacctaccaagtggaggatactcggggaaagtttcaacaccatgggtttggttg

SEQ ID NO: 12776 - DNA, 398 bp, Glycine max
  Clone ID: jC-gmfl02220142d07a1
gtttcctctgatcgtgtcagaaatataaaagtttatttcctctgatcgtgtggtttctgagttctaagcactcacctctttcatacacgtttgttcgcttgttgagaagccatgggcgaggatttcgagttcccaagtgctggcaacatggaaatgcctgaggaggaagagtttgagagtccgatcctgaaggttggggaggagaaggagattgggaaaatggggctgaagaagaaattgctcaaggaaggtgaaggttgggacacccctgacagtggagaccaagttgaagtgcattatactggaaccttgcttgatggaaccaaatttgattctagccgcgataggggcaccctcttcaagttcaagctaggccaaaggcaagtgataaagggatg

SEQ ID NO: 12777 - DNA, 408 bp, Glycine max
  Clone ID: jC-gmfl02220142d07d1
acaatggaggtcccacacttgccacacaagttaaaagtgtattgcactccaaacattggaagagcccctattaacttaaacttataaagggattgcaccctcacatttatatgcccataaatcaaataaatttaaaaatttaaattctgtttgcaaaatgggttgaaaggcccctggttactaagttgatgatccaaaggggcccatcttgttttatgccaaaaccaacaaggttaagataaaacatgttatgggaaaccattttgtgaatttactccacatcaccttgcccacaaacaccgtgcccatatagaatgtgtctttgcgggacaaatacggggacccgcctgtacgaagtggcatttttggtggggttccaactaacaaaaaatgcttgttaagaacagg

SEQ ID NO: 12778 - DNA, 431 bp, Glycine max
  unsure (1)..(431): unsure at all n locations
  Clone ID: jC-gmfl02220142d08a1
aatggcacgtcgctacgtngacagctctgacgttaatgtcacgcgtgcgtacgcgctgacttcgggtcgggctccctccgttttatcttttgacgtaacaaagtgcacactacccaacagaggtgttacctagctataacggcacttacagagacattcatgacgtaggtcacacactgctcgtggcaagatcaaacataaatcggtgaagacctgctgctataacaaaagacaggctgcatgcatatatgaatttacagtgaaacaagctaccttatcgccagtcgttatatatatatatatatagatatagatatatatattcacgatccttagctcttaaaagagaacaaaacgcgatctacgcctacgtgcatggggacacaccgccacgaattcatggttggggatccctctgtgaactaatgacc

SEQ ID NO: 12779 - DNA, 319 bp, Glycine max
  Clone ID: jC-gmfl02220142d08d1
catgtaccttttggatcaacttacttacatgcatgctcctgcgggtcgtaggtaaggttcaaactatttgtttatagagtcatgcattctgaatcagattgtgactcttaatctgttttacatataagaaaattaaaatccagttaattaagcgcgagcattcctaatcttctcttttaatctgtgaatatacatagagaaattaagtatatagtttctcaaaattcatcttgttggtggagaaagttgtgcctgaatgaggaagcttcggcttacctgtaatagcaccacatccactgacgatgttgttaccgtcctt

SEQ ID NO: 12780 - DNA, 345 bp, Glycine max
  Clone ID: jC-gmfl02220142d09a1
gataattctgcagccgtatgtgaatacgtgggtgaggttaagtgtggcattgctgacatagaagtgaccatggtggaaagccatgcaaatctcaaaataagatccaagaagcgccccaagcagctcttgaagttggtttctggtttgcataccatgcgcctcacaatcttgcacctaaatgttactaccaccggtgaagttgttctctactctcttagtgttaaggcagaagatgattgcaagctgggatcatttgatgatatagctgcagctgtgtaccagatgctagataaaattcagcatgaggcaatgctgaatcaagatcaaaccttgaccaaacttgcc

SEQ ID NO: 12781 - DNA, 472 bp, Glycine max
  unsure (1)..(472): unsure at all n locations
  Clone ID: jC-gmfl02220142d09d1
ttcccctgtatcctantgtaatctacccaaaatttaccggggacgccccgctctactaactgcggccgcccttttttttttttttataatacattatttttacatggttgttatccaactcaggatcggggggaataaattgccggctatgcttgtcttctgctggcccaaaggaattcgttctacgttttacttttacattactacccccctttctttgccccatgttcctatccttaacttatatcgtcataatggtttgcataaaaatcctacttttgaaaataaccatcttgcgtgtatatattgatcacaaagttcaacaatggaaaatttaatcctctaaagtttaaatatttgctcttttctaaaaatcaaacctctcaaagcttttctaaaatgatacattcttacaccccacactggttcgccaacaatccttcattactaactgtcttataaagcttttata

SEQ ID NO: 12782 - DNA, 428 bp, Glycine max
  unsure (1)..(428): unsure at all n locations
  Clone ID: jC-gmfl02220142d10a1
ttgatgaagatttggctgaggaacttcagaatcagatggaacaagattatgacattgggtcaacaataagagacaaaattatccctcatgctgtatcatggtttactggggaggctgttgagggagacgagtttgaagacctggaagatgatgaggatggagatgacgatgaggatgatgaagaggaggatgaggacgaagatgatgatgacggcgatgaagaggaggaagacagtaagactaaaaagaagtcatctgctgttaagaagagtggaagggcacaggctggtgatggtgagcgacctccagagtgcaagcagcagtaattgtttatttcttcggagtgtcatgtggctgatgggtgtttttgaggtcctatggtgcgcctgatnaaaagtgggttttcagtttcatgcaatttttcatgg

SEQ ID NO: 12783 - DNA, 444 bp, Glycine max
  Clone ID: jC-gmfl02220142d11a1
tgggcataagcatgaacttagtgacctacttggttggagttttgaatctcccttcagctgattctgccaccatagttaccaatgtcatgggaactctcaacctgcttggccttcttggtggcttcatagctgatgccaaacttggcagatacgtaactgttgccatatctgcaatcatagctgctttgggggtgtgtttgttaactgtggctacaaccattcctagcatgaggcctcctgtgtgcagcagtgtcagaaaacaacaccatgaatgcattcaggccagtggcaaacaattggctttgctatttgcggcactttacacagtagcagtgggtggtggaggaataaaatccaatgtctcaggttttggatcagatcagtttgatacaacagaccccaaggaggaaagaaggattggtgtttttcttaacaggttctact

SEQ ID NO: 12784 - DNA, 595 bp, Glycine max
  Clone ID: jC-gmfl02220142d11d1
tccttttttttttttttttttaacatagtttctcttttaattttattaaaatcatttttgggcaactgtattccaaagctgaatacaggattagcaagtagataaataagataaatgttgatttgtatcctttcagctaaatttctagcgtgacaagaaacacacaaagatctagaaaagacagtcgaacatttgagaactccaccattcacgcaacctgttttaatgaaaggaatatctgtcatgaaaaatctagatgaagagaaaatgatcagatgatgcggcggcacagggtaatcccatcacccacggggagctggcaaatctcgatcctcgaatcttgagccagatacttgttgagctccatcacatggccgcgaagaggcttaatgtaatccatcaatggtgcatcgggtggtgcagccacagatccagcccatagggtgttatcgtatccgatcagtcctccaatcttcacaagctctagtaccctcttgtggtagttcaagtaattgtccttatcagcatccacgaaaacgaaatccaacgacccctttttattttcatctttagcattttgtcaagaacggaagaa

SEQ ID NO: 12785 - DNA, 462 bp, Glycine max
  Clone ID: jC-gmfl02220142d12a1
tgggcataagcatgaacttagtgacctacttggttggagctttgaatctcccttcagctgattctgccaccatagttaccaatgtcatgggaactctcaacctgcttggccttcttggtggcttcatagctgatgccaaacttggcagatacgtaactgttgccatatctgcaatcatagctgctttgggggtgtgtatgttaactgtggctacaaccattcctagcatgaggcctcctgtgtgcagcagtgtcagaaaacaacaccatgcatgcattcaggccagtggcaaacaattggctttgctatttgcggcactttacacagtagcagtgggtggtggaggaatcaaatccaatgtctcaggttttggatcagatcagtttgatacatcagaccccaaggaggaaagaaagatggtgtttttcttcacaggttctacttcttcatcagcataaggtc

SEQ ID NO: 12786 - DNA, 613 bp, Glycine max
  unsure (1)..(613): unsure at all n locations
  Clone ID: jC-gmfl02220142d12d1
tgcctccttgtgtcgggcgtctatctgtatctgnangtgcagtnaaggttagagcgactaccagtcggcggccgtcctttttttgtgttttttatttaaaaatttaacttttacagcatcccaaactcctcatgggtgctggtaaaacttgaatttgcagcccagaaacagctccacaggaatgcttttgtggatcaaccaaaaatgaaaattactacaatatatttgctatgaagggaaagagacccgggtagggcgggaacccctatcggaaattcattgggcttggatttaagactcccaaggaagccacatatggatcctacctcgacaagaagtgccccttcactggcaatgtttccatccgtggccgcatcttggctggaacatgtcacagtgctaagatgaacatgaatagccccgtgtagaggaattatccaccatcatttagccctcttccggacgcacactgacctatcttgcgacattgatgctgatatatgaactgcacctgcaaccccagctgattcccatattcttcaacaacaccgggacttatattctgttgatcactggtaccaccctgcaccggagcccctgcataaggcacacc

SEQ ID NO: 12787 - DNA, 537 bp, Glycine max
  Clone ID: jC-gmfl02220142e01a1
caagtccttctcctcacacacataaaaacaaatatcctccacttcttctacccccagcagtagaacaagaggtgccggagcaagtttcgtcacgccggaacgatgaccggcggcggatccacggggaggttgccgacgtggaaggagagagagaacaacatgaggagagagagaagacgaagagcgattgcagctaagatctacactggccttcgagcccaggggaactacaagcttccaaagcactgcgacaacaacgaggtcctgaaagctctctgcgccgaagctggctggatcgtggaagaagatggcacaacttatcgaaagggatgtaagagacccacgagtgagattggaggaacaccactgaacttaagcgcgtgttcttccattcaggcaagtccacaatcctcgtcatacccgagtcctgtaccatcctaccatgctagcccaacctcttcctcgttcccaagccccacgcgcattgacggaaaccacccttcttcctttctcatcccattcatccgcaacataact

SEQ ID NO: 12788 - DNA, 487 bp, Glycine max
  Clone ID: jC-gmfl02220142e01d1
aaaaaatcgtagttggaggttccgttctccactccactccaatcaatcagggactagggatggggaggaagcgaaaggtaccaccgaaatcttctgaatccgccgagcccccgctgaagcaacaccaaccaaaacccgaaaatgccgctcaggaatacgaagaagaggtcgaagaggaagttgaggaagaagaggtagaggaagaggtcgaagaggaagaagaagaagaggaggacgaagaggacgaggaagaagaagaagaagaccaaaaagaccaataccagcaccaacaacaacagcaagacgaagacgacgacccgatctccaagcttctggaaccgttgagcaaggaccagctactcatccttctttgcgaggcggcgggcaaacaccaacacgtggctgagaggatccgaagggcggtcgccaggatccggggcaccgtagacatttgtcacggattggctgggacacaaccgccgaaccc

SEQ ID NO: 12789 - DNA, 551 bp, Glycine max
  unsure (1)..(551): unsure at all n locations
  Clone ID: jC-gmfl02220142e02a1
ccgagtttgcccacgcaaacgtatcgagccagcctctcaagctagggttcttcaccgcgctccaaccttcttctctctcccttcgtcccctccaattggaatgtgattgtgacttcacatgctggtagctgacattttgaaattgtaactgtggtgggagcaatattatatattttgcgacatcatggagatacagacttgtggcaggccgattgactccttgctagagaaagtgctttgtatgaatattctctcgtctgattacttcaaggagctctatcgattgaaaacgtatcacgaagttattgatgagatctacaatcaagttgatcacgtggagccatggatgacggggaattgtcgtggtccttcaactgcattctgtcttctgtacaagttttttactatgaagctcaccgtcaagcaaatgcatgggctgttaaaacacctcgattctccttacataagagcggttggatttctctatctgagatattgtgctgatccaaagacactatggaatnggtttgagccatatgtaaaagatgatg

SEQ ID NO: 12790 - DNA, 316 bp, Glycine max
  Clone ID: jC-gmfl02220142e02d1
gtaaaacatgatagttcaggaatgatctttagtctaaaacttgcgattacaaagcatgaaattcaatgcaccaggaataagttttagtatacattatctataaatgttaatgatagcattcaccaatctaaacatctggcaacaaaagggctagtcccaatatttttctccatgaaatccatccaacatctgatacaagcattccatgataactttcaatacttccaagtagacccgccaagtctaataacctcttcacctccactatcctttctaggaattctttccatgttggcatctcctttattatccccta

SEQ ID NO: 12791 - DNA, 514 bp, Glycine max
  Clone ID: jC-gmfl02220142e03a1
agcaaaatgaacagggcgaggagtgggagaatcctgtctaccaaccacgtcttctatccaggggacacacattccatgagctaaggaccatacttcaatctttgtgtacccatgggtgtattggcaacagggcctgctataagaggcggggtgctggaccagcctggtattgaaaatgtcacccctgtccgtgagtgtgaatgtgatgtaccgaactcacggagctctgacccgacctatcgcgtaatattgcacaacgacagactcaatatacgggactactatgctccaggtgctgatgaaggtcatacgtggcatgacccttgataatgccgataatctcatgcaagaagcacactacattggatcgtcagtggtgatcatgagcgaccaatgcctgtgctgaggatcactgcatgcatctaagatgcattggattgctcatgtcaattgaacctgcatatgggggtcgcagctgacaagtctaacttgaaatcacactggctctgatgct

SEQ ID NO: 12792 - DNA, 184 bp, Glycine max
  Clone ID: jC-gmfl02220142e03d1
aataagttgtgcacttcttttttaaaaatggcctctctcacacgttctaaagataggatctttgttcatcataaacataaggccgaggtgtacacaaaaggtaacgttttttattttctgggttttataaggccttcatgaggagggaacttatgtacacctgcaaaaagtttcatctcacctt

SEQ ID NO: 12793 - DNA, 442 bp, Glycine max
  Clone ID: jC-gmfl02220142e04a1
agcaaaatgaacagtgcgatgtgtgggagaatcctgtctaccaaccacgtcttctatccaggggacacacattccattagcaaaggtccatacttcaatctttgtgtacccatggttgtattggcaacagggcctgttataggaggcgagttgctggacaagccagttattgaaaatgtcacccctggccgtgagtctgaatttgatttacagaactcacggatctcggcaccgacctatcgcgtaatattgcacaacgacaactacaataaacgggaatactatgctccaagtgctgatgaaggtcatacctggcatgacccttgataatgcagttaatctcatgcaagaagcacactacattggatcgtcagtgatgatcatgtgcgaccaagcctatgctgaagatcactgcatgcatctaagatgcattggatagctc

SEQ ID NO: 12794 - DNA, 493 bp, Glycine max
  Clone ID: jC-gmfl02220142e04d1
aatatgttgtgcacttctttattcaaagggacaactattacatgttttaattataggttttttgttcatttaaaacataaggccaagttttacacaagatatatctttttttttttactggtttctctaaggcctttatgaggagggaacttatgtacacctgcaaatagtttcatttcacctttcaatagcataaaagcccgtgagatttgaagttaaacttgtcatcagcaaccaccatttgtaggttcaattgaactgagcaatccattgccttttaactgtattcagtgatctttaacatagggttgggcacagtttatcaccactgacaatccattgtagtgtgctttttgcatgaaatttactgtatatatcaagggtcatttccgggattaccttttttagaacttgtaccacgtttttccgtatattaaaattgtactctcgcaatttttcaccataaggcggtgccgaatttcgggatttttta

SEQ ID NO: 12795 - DNA, 389 bp, Glycine max
  Clone ID: jC-gmfl02220142e05a1
ccgtagttgcgatatctctggaacatttgatttcattttcggatactccaccaccttgatccataactcgaagatcttggtgaggaagcccatggcaaatcatcagaacatagtggtggcagatggctcatggcagtagaacatgcccacaggaatagtcctccataactgcgagatcatgccggaccctaccctcttggcagaccgcttgagcgtgaagacttacttgtccaggccatggaaggcattcttaagggcagtgttcatcgagaatgttatcggtgacttgattcagtcagatgggtatattccatggaacccaattgaaccaaacacacaggattgctacttagctgagtttggcaacactggaccaggtttcgttgctc

SEQ ID NO: 12796 - DNA, 389 bp, Glycine max
  Clone ID: jC-gmfl02220142e05d1
tgacctgtatctgtttgtgactcaccgaaatattgggggacgagcgcggagtcggcggccgcccttttttttttttttttattttttttatttggcaaaaaaagaagtttccattaaatagcgggggcaaaattcccattggttttcccatcatcagtgtatgttatatgccttctgaggacaaaaatgaattggttgaagcaaaaaggcttaaagtataaatatgaaacgcttcttgtttgattacaaaatagcttcattagacaagggggtggatatgcgtgactgcattgaaattaggtaatacggttcctgcttatagttttattcagttagggaggctaaaaaagagagtttaacgctcttgatgctggtttgtagcggattct

SEQ ID NO: 12797 - DNA, 493 bp, Glycine max
  Clone ID: jC-gmfl02220142e06a1
cccatttgattcccttccctctcaccaagttttatgatctctgtcatttcctcaactacttttattttccatttatatctactcacaaagcaacatcatttccacttgcatttcacacgcatgtgagacacgacccaaataacacacaaagcaaagtaaggttgctttgcattgtgttaacaaacaaggcaacctcattatttgttgccactttggttctgaaaaagtttcttactttagttgtgggtttgctccgttctctctgttctggaaaacagaaaaacaaaaaaatatgagagcgacacagattgtgttggttctgttttggttgctctgcattcacagtcccacgttgttctgcgccaatgtggagtatgatcatcgagcattagtcatcgacggcaagcgcagggtcttgatctctggttccatccattaccctcgtagtactccagagatgtggccagaccttattcagaaatccaaagatgga

SEQ ID NO: 12798 - DNA, 335 bp, Glycine max
  unsure (1)..(335): unsure at all n locations
  Clone ID: jC-gmfl02220142e06d1
gctgcacgangcggcggccgccctttttttttttttttttttttttttttttttttttttgggttaaaaacagcttttttttcgggatcaataatacaacattccttgggatacataggaacccaaccccttttttttctccttcttccattttcaccccttataaaaaaagggcgttttttattcttttttgggcaccctcaggcttgcgatcatcataaacatgtggaacaatttttggcctaaaccaatgtgctctccaaaatgtacgcattacttaaatggggatgttctttggctcagcccacaacctggtaattaaaaggggtattcat

SEQ ID NO: 12799 - DNA, 418 bp, Glycine max
  unsure (1)..(418): unsure at all n locations
  Clone ID: jC-gmfl02220142e07a1
cagagacagagagtgcttacgcagttttcactcactgtttcagtagtagggtttttctttatccccttttttcttctctcttctctctttcgttcaccacttcgacgctaagctaatatttcattcgttttcgtgaacgcgctaacggagaacgatttcggttatagagagagaaactaggagagatagagagcgattgatcatatatggatacgcacgcggtgcatttggccttggcggcgatcgccgagcctccgtcgtggccgtgtcggcgtattacatgcaccgcaagacgctcgcgcagctgctggagttcgcgcgcacggtcgagagggaagctgacggcggcggcagttccgacaccgaaccgcctacggngcatttgaagaagcgcctgggcagctccagaaggcgtggc

SEQ ID NO: 12800 - DNA, 544 bp, Glycine max
  Clone ID: jC-gmfl02220142e07d1
aaacaaaatttttatttcattatatgaatgatacatgaccaaagtaaaactaaaaatcagacaaaacctggtggcacattgaattagtatctccattacagttatgggcgttgcatccaaacccaatagaaagctcagagtattacacatcccaaaaagtaaaatcctactacagtttagcaccgagatgtcctaaaccacattacatgaacacaaattcgagttgtcttggaagaggaccaagaaataaaagctagataatgttcaaccctgcatccagaaataccaatccgcaagactcccgtctcccaaaggcattaagccttattggcaatgttgttggaaagccagtccagaccttcgtaaaggccctccccagaggttgcacaggtgctctgaatgtaccagtgacgctgtctcagagagtggagacccaacttgttagtaatttagcagaatcattgcattaggaagatcttgtttgtttgaaaacacagcaatacggcatttcttagttcatcctcattcacattctatgtaacta

SEQ ID NO: 12801 - DNA, 588 bp, Glycine max
  unsure (1)..(588): unsure at all n locations
  Clone ID: jC-gmfl02220142e08a1
ccatggactggttctcctggctatccaggactagcctagagccatccctcatctacgaatacggcctcgccttcgcgcgcaacgagctccagctggaggatgccatctacttcaaccacgagtttctccagagcatgggagtttccatagcaaaacacaggctggaaatcatcaagctcgcaaagaacgaagttggtggcggtggggcggtgatgatgatgaggagcagcagcagcatcaagttttctatcaagaagtgcctgaggaagtgctatagcaagctcgtttcgcgtgaagatcaccacgaagcgatgatggcgacaacagcgatgatggcgaccgagccgaattggtaccaaaggaagtggctgagggcaaggcacaatgggaacaatgaggatctcaagggagataataattagaatgatcctaataacaataagggagttcaaagaagtagaactattgcaatatcagggcctttggatggggatggcagaataattcacgagaagatgatgaacaacacggggngatgaaactatttggtcctcttgatgggaaaatgaatggtggaacaatgagaga

SEQ ID NO: 12802 - DNA, 502 bp, Glycine max
  Clone ID: jC-gmfl02220142e08d1
gcgaaagggtgttgaaacttcaaacacagaacactcaagtggacaaggttataaaagaaacaaacaaaaagttgcagtaaacatcacatttcattttcacaagctactaatcattattgtaccaaaaaacgttgctgtcactcgccatcaaggtgtaataatataataataagccatgagaaaacaaatacaaaataataataataatctaagttggtttaagatcctcaaacaatgtaggccacattgcataatcatcatcataatcagcagcatcagctctgaccttattgtagggactataacccattgggctctcagtcctatcatctaaaggcctagttaaccttgggcttctactattaaccatgggtggtcttgcatcaagtggcccagaaagcctagggctttttactgagcccatgaacctaccatcaagaggcctagtaggggtattagcactcatcaatggacttctatttgcacttgcatacatattcac

SEQ ID NO: 12803 - DNA, 526 bp, Glycine max
  unsure (1)..(526): unsure at all n locations
  Clone ID: jC-gmfl02220142e09a1
cccatttgattcccttccctctcaccaagttttatgatctctgtcatttcctcaactacttttattttccatttatatctactcacaaagcaacatcatttccacttgcatttcacacgcatgtgagacacgacccaaataacacacaaagcaaagtaaggttgctttgcattgtgttaacaaacaaggcaacctcattatttgttgccactttggttctgaaaaagtttcttactttagttgtgggtttgctccgttctctctgttctggaaaacagaaaaacaaaaaaatatgagagcgacacagattgtgttggttctgttttggttgctctgcattcacagtcccacgttgctctgcgccaatgtggagtattgatcatcgagcattagccatcgacggcaagccagggtctngatctctggttccatcattaccctcgtagtactccagagatgtggccagaccttagtcagaaatccaaagatggaggattggatgcgattgagacttatgttttctgga

SEQ ID NO: 12804 - DNA, 362 bp, Glycine max
  Clone ID: jC-gmfl02220142e09d1
aaaaaataaaaaatgggtttttaacggataaaaacgggttttattattgtctacacccaaatatggtaaggtgaccctacccagacccgaaatgttatataaatggccaaggggttttgattcttaaaaaaaatattcaacccgtcttggaattggtctgtaaaaggttacattacaaggggaaagccaaggtcctacttgagaaaattacactaggcactgatcttacttttctttttctcatttcacaagaaggccaacctgtttaacaaaacccaagccaggtgattacatagggtaacctctcccttctttatatatctctccccctcccactatttaaaaacaggtctttctttttt

SEQ ID NO: 12805 - DNA, 407 bp, Glycine max
  Clone ID: jC-gmfl02220142e10a1
cggactacagctggtgttgttcagcagtttccaaacaatacatgtagtgtatatattacttactcgaaggaagaagaagcaattcgctgcattcaaaatgtgcatggattcgtcatggagggtagacctttaagggcttgttttggaaccactaaatattgtcatgcatggctcagaaacatgccttgcagcaatccagattgtctatatcttcatgagattggctctcaagaggatagtttcacaaaagatgaaataatttcagcatacactagaagtcatgttcaacaaattactggtgctgcagacaatatacaacgacaagcagggaatgtattgcctcctccattggatgattgcatggataactcatcaggaaaaccaattgtgaaaaattcatcaagtac

SEQ ID NO: 12806 - DNA, 578 bp, Glycine max
  unsure (1)..(578): unsure at all n locations
  Clone ID: jC-gmfl02220142e11a1
ctcagtctcaactctctccaacaaccacaatggctctcttgggcgccgcctcctcctccgctcgcatcattccctccgtctcactctcttcctcttctcgctccttcttctcactctcatcctcttcttccaaactccaatgcttgcgctcctctcctcgtatttcgcacctctttctcaatcagcgaagagcggaggttcgcgtttcgagtggaggatacggaactgtgtcggcaccgaagtcagttgcgtctgatcctgatcagttgaagagcgccagagaagatatcaaggagcttctcaactccaagttctgccatcctattctcattcgtttgggatggcatgatgctggtacttataataagaatattgagggagtggccacagagaggtggagctaatggtagcttaagatttgaaattgagctgaaacatggagccaatgctggaccngtaaatgcanntgaactcttcagccgatcaagacaatatctggtgtgacatatgcagactatttcagttgcttgtgctcagctgtggagaagctgagcccaaaatcctatgaatatggagag

SEQ ID NO: 12807 - DNA, 557 bp, Glycine max
  Clone ID: jC-gmfl02220142e11d1
tgctttttttttttttttcactacggagttgagattttagcgcatcatacacaagattgggtccgggtacctaagtaataacaagtgatattgtgaaattatcgtaatcagacccaagttgaaatgagatcagaacaaaacttaaatatatctatcaactgccttgatttgcccaaaaaagaacgagatgggctgagacctgtgatggtgatagccgtcaaaaaaattgctttaacacagaagggcctgagggcctagatggagatggaaaattatttggaacaccttcttgatgcccccacaagataaacatgccagtgctttcacacgaaaatgcatcatggagctgcaatgcatcttcctcgagtgccattggaattcaagtctcaggtgcactactttaagctggtgaacatttgaacattaatatgcaatcctttcaagattttcggagacagttatcattctaggcctgacttcagggtctacctcagtgcattgtaatgctacatgaaacacagccagtacctctttcttggcatgcacttcatggagca

SEQ ID NO: 12808 - DNA, 534 bp, Glycine max
  Clone ID: jC-gmfl02220142e12a1
ctcagtctcaactctctccaacaaccacaatggctctcttgggcgccgcctcctcctccgctcgcatcattccctccgtctcactctcttcctcttctcgctccttcttctcactctcatcctcttcttccaaactccaatgcttgcgctcctctcctcgtatttcgcacctctttctcaatcagcgaagagcggaggttcgcgtctcgagtggaggatacggaactgtgtcggcaccgaagtcagatgcgtctgatcctgatcagttgaagagcgccagagaagatatcaaggagcttctcaactccaagttctgccatcctattctcattcgtttgggatggcatgatgctggcacttataataagaatattgaggagtggccacagagaggcggagctaatggtagcttaagatttgaaattgagctgaaacatggagccaatgctggacttgtaaatgcattgaaacttcttcagccgatcaaagacaaatattctggtgtgacatatgcagacttatttcagttggctg

SEQ ID NO: 12809 - DNA, 471 bp, Glycine max
  unsure (1)..(471): unsure at all n locations
  Clone ID: jC-gmfl02220142e12d1
gctccccttggccggctttctntgtactgtangcaaataccggtaagagcaacatacagtcggcggcgtccttttttggcttttttctttgttttttttttttttttttttttttctttttttttttggtctggggcaaattgcccgccgtttatggagcttgcttgaccaccttcgaagactccgagaatgagagtgaatacgggtacgttcgcaaggtatcaggaccagtcgtcgttgcagatggcatggctggggctgctatgtatgaactcgcgcgtgtcggtcatgataatcacattggcgaaactattcgtctcgaagggaattctgcttccatccaagtttatgaggaaactgccggcttgaaggctaatgatccggggttaccgactcaccagcctataacccccgcagtcgggccctggaatactggggaatcttccccatggaaatcagaggcccttggaa

SEQ ID NO: 12810 - DNA, 601 bp, Glycine max
  Clone ID: jC-gmfl02220142f01a1
gatggatgaagttgatacaccttatgtttgaatccaccaacactggactaagacttctgctgagcagcactatggggctatttctgtgggaaagagaaccgtgactcacttgcatagccgcaagatcgaggcgactcaggctacatagagaaactggtacatagtccgcatagcttggtatataagaacactgctggacattgacataaaccagctgaccatgagaggctgcatgagacagattgacaccaagaatgacggaaacaccgagtgcgacggcgttggcattttgggcatcgcttgggccttcggtggcatgatcttcatccttgtttactgcaccgacggcatctctgggggacacatcaaccctgcggtgacattcgggttgttcctgggacgcaaggtgtctttggtgagggcgttgccgtacatgatagcacagtgcgccggtgcaatctgcggtgctgggttggccaaagggttccagagatcgtactacaacaggtacggaagtggagttaacactgttagcgatggctacaacacaggtaccgctttgggagctgagataattggtacctttttcttgtctacaccg

SEQ ID NO: 12811 - DNA, 418 bp, Glycine max
  Clone ID: jC-gmfl02220142f01d1
tacacaccgaagcactgctactactactactttctctctagatatgggcactggtgctgtgcaactagtttctgatcttggggctcttggatagcatcatgcttagcccaagcaccattgtgctggaccggtacaaccgccgcagtacaacacccattaccaccaccacccagatcagcacctgcaccagcaccgaccagaccagcaacctcaccaccagcaaccacaccaccagcagcaacttcagacagcagcatcagactcagcaccagcagcaacaccaacaccagtaccagcaccaccaacggttgaacctacacctgcttcctgtcattcagcctgtactgcttcacgctttcctacagtgacacctagcgccacctcttctaacactagaccaggacccttagccggaccc

SEQ ID NO: 12812 - DNA, 304 bp, Glycine max
  unsure (1)..(304): unsure at all n locations
  Clone ID: jC-gmfl02220142f02a1
gaaggatgaaaatgagataccttatatttctctccaccaacacaataatagccctcctgctgaacagaactatggccctctttatgtggtaaattgacttgtgtatcactagcatagttgcaaattgtggtgacacaagcttcattgagaaaaggctntctaattcgcattggttgttatgggagaattttgctggacaatgtaatagaacaactctttgtgagaaaaagaatattattgcttttgattttgaatgagttaaaaaaaaaaaaaaaaaaaaaaagggcggacgacatctaaaaga

SEQ ID NO: 12813 - DNA, 250 bp, Glycine max
  unsure (1)..(250): unsure at all n locations
  Clone ID: jC-gmfl02220142f02d1
aggaaaagaggaaagagggaaggaaaaaaaaaaagaggaagagagaagagaaaaaaaaggaagaggggaagaaataaaaaaagaaggaaaatataaaaaaaaaaaaaggggagaactgatggtaacacnacnaanaatatcggggagaccagcagagggagaaggaaaaaaaaaaaaaaaaacaaaagaaaaaaggaaaaaatataggaaaagaagaaggaggaaaaagagagaaagggggggggaaaga

SEQ ID NO: 12814 - DNA, 393 bp, Glycine max; identical to SEQ ID NO: 8055
  Clone ID: jC-gmfl02220142f03a1

SEQ ID NO: 12815 - DNA, 387 bp, Glycine max
  unsure (1)..(387): unsure at all n locations
  Clone ID: jC-gmfl02220142f03d1
ctaaatgtagtcgtanntgaatcttccaacaaatttccttggctccggataggcctaataagaaaacaaataattccaattcatatatgaacatttttgcctccttatttcttgaaaatgtggaattgggattccccgaggaattccgatctcatttcctttggcttcaggataggcctaataagaaaacaaataattccaattcatatatgaacatttttgcctccttatttcttgaaaatgtggaattggaattccccgaggaattccgatctcatttcctttggcttcaggataggcctaataagaaaacaaataattccaattcatatatgaacatttttgcctccttatttcttgaaaatgtggaattggaatttcccgagg

SEQ ID NO: 12816 - DNA, 393 bp, Glycine max
  Clone ID: jC-gmfl02220142f04a1
cctcggggaattccaattccacattttcaagaaataaggatgcaaaaatgttcatatatgaattggaattatttgttttcttattaggcctatcctgaagccaaaggaaatgagatcggaattcctcggggaattccaattccacattttcaagaaataaggaggcaaaaatgttcatatatgaattggaattatttgttttcttattaggcctatcctgaagccaaaggaaatgagatcggaattcctcggggaattccaattccacattttcaagaaataaggaggcaaaaatgttcatatatgaattggaattatttgttttcttattaggcctatcctgaagccaaaggaaatgagatcggaattcctcgggggtaccgagctcgaatt

SEQ ID NO: 12817 - DNA, 231 bp, Glycine max
  Clone ID: jC-gmfl02220142f05a1
gagatatcctccatggttcttatgaagatgaaggagattgcggaggcgtatctaggttccaccataaagaatgcggttgtcactgtgcctgcttacttcaacgactcacaacgtcaagccaccaaggacgctggtgtcatttctgggctcaacgtgatgcgaattatcaacgagcctaccgcggctgccattgcttatgggctcgacaaaaaggccactagctctggggag

SEQ ID NO: 12818 - DNA, 438 bp, Glycine max
  Clone ID: jC-gmfl02220142f05d1
tatttttttttattttttctttttctttttattctcttttttcatttcccctctctacggtgtgtttttttctaatcctcctcctctcatatataactatacttcacacaccacacaccccccaatcaccctctaccacccacccccacaaacacaccgccactaaaacagcccccacacacccaacccccacaaaacatacccacccaacaaagaacatttaaaaaacccccccacccgccccccccccccaccacaaaaaccatagggaaccaaccccgctcccctgattaaaacccccccaaaatcctataaatcacaccacgaccaaaagccacccacccccccaaaaagtgtaggcgacaaaaacacaaaccccccccccgatgaaaacaccaaattcctttataacgaaaaacatccccccccccccccccc

SEQ ID NO: 12819 - DNA, 416 bp, Glycine max
  unsure (1)..(416): unsure at all n locations
  Clone ID: jC-gmfl02220142f06a1
cagagacagagagtgctcactcagttttcactcactgtttcagtagtaggggttttctttatccccttttttcttctctcttctctctttcgttcaccacttcgacgctaagctaatatttcattcgttttcgtgaacgcgctaacggagaacgatttcggttatagagagagaaactaggagagatagagagcgattgatcatatatggatacgcacgcggtgcatttggccttggcggcgatcgtcggagcctccgtcgtggccgtgtcggcgtattacatgcaccgcaagacgctcgcgcagctgctggagttcgcgcgcacggacgagagggaggctgacggcggcggtggttccgacaccgaaccgcctacggngcatttgaagaagcgccttggcagctccaggaggcgt

SEQ ID NO: 12820 - DNA, 333 bp, Glycine max
  Clone ID: jC-gmfl02220142f06d1
ggcaaaataagtagtttccattaaatagccaaaagcaaaattcccattgcttctcccatcatcagtctatgttatatgcatactgaagacagagatgaagtggttgatacaaaaaggcataaatcataaatatgaaaagcttattgaatgattacaaatcagctcctcagacaatggagtggctatgtgtgactgcattgaaattaggtaatcgatttcctgtttatagttttattaatttaggtaggctaaaaaagagattataacactcaagatgctggtttgtctcggatccttaagctttggtgaagctagcattgaaaggaacgccag

SEQ ID NO: 12821 - DNA, 436 bp, Glycine max
  Clone ID: jC-gmfl02220142f07a1
cagagacagagagtgcttacgcagttttcactcactgtttcagtagtagggtttttctttatccccttttttcttctctcttctctctttcgttcaccacttcgacgctaagctaatatttcattcgttttcgtgaacgcgctaacggagaacgatttcggttatagagagagaaactaggagagatagagagcgattgatcatatatggatacgcacgcggtgcatttggccttggcggcgatcgtcggagcctccgtcgtggccgtgtcggcgtattacatgcaccgcaagacgctcgcgcagctgctggagttcgcgcgcacggtcgagagggaggctgacggcggcggcggttccgacaccgaaccgactacggcgcatttgaagaagcgccttggcagctccaggaagcgtggcaactgcggatatcggcg

SEQ ID NO: 12822 - DNA, 415 bp, Glycine max
  Clone ID: jC-gmfl02220142f07d1
gaaaggttgatggaacttcaaacaccgaactgttaattggacccgggtataaaacaaacaaacaaaaagttgcagtaaacattacatttaattttcacaagctactgatcattcttgccccaaaaaacgttgttgtcactctccatccaggtggaataatataataataagccatgagaaaacaaataccacatcataatagtaccctgagttggactaagatcctcaaacaatggagggcacattgcataatcctcttgataatcagcagcatcagctctgaccttattgtagggactattacccattgggctttcaagcctatcatctaaaggcctagttaaccgtgggcttctactattaaccatggttggtcttgcgttaagtggcccacaatgcccagggctttttactg

SEQ ID NO: 12823 - DNA, 370 bp, Glycine max
  Clone ID: jC-gmfl02220142f08a1
ggttcctctgatcgcgtcaaaaatattaaagtttgtttcctccgaccaggatccacgagagggggaacctctaacctggttcatggacgatagtgatgaagatcaaaaaccccccccccacaaagaacccaaccaagtgctggcaacatggcaacgccctgggcggagaagccttagatggacactcctgaaggttggggaggagaaggagactgggcaaatggggcatgcagaagaaagcgttgatacgaccgacataggtggttacacacgtctgcccagaaacgctgccaaattatgaacagaaaagcaccttgctcgttggaacccaatttgacactggccaggagaggcgctcccgcgctgctgg

SEQ ID NO: 12824 - DNA, 513 bp, Glycine max
  Clone ID: jC-gmfl02220142f08d1
gacgtcacctatttttaaggctaggttctcccgcttcaatttgatctcgtaaaatttaaatacagcccaagcatacataaatatacatcagcatactaacatatgcttatgtttattctgtacccaattctaataataatacaatgcaatctttatacagggacaggcaacaaaaacactggcgagggtacatcaaggcataacaagccaggaccctttatttaaagacaccattattttctttttttcaaaccttactttagcaacaaagtcttggtccttttcatgtggtactatgattaggcagaaccagatcttacgcggcggcatcaacagcatggttgctaacatccttttccacaaaatccttgacatattgttgtcttgcagggagatggtcatttggacgattgtatggagtccaaactggctcaccaacaaaaaaacgcaaagccttaatgtagttgctctcatctagccgaaagcgatgataaattccggcaggtaagatga

SEQ ID NO: 12825 - DNA, 421 bp, Glycine max
  Clone ID: jC-gmfl02220142f09a1
aaagcaagaatttgaaggaagaggggatatgaatacaaggagctagttgtctatttgcaataacataacatcatcaagcaggatcatcgatccaaccttagtattcaacccagagagatttgtagtaataattactacaacaacttaaaacaatggcaggaggaggttatgtagattcgggaaatgcaaagcaatttgaagggaaggtcactgcattcgtattggttacatgctttgtggcagccatgggaggcttactcttcggttatgatcttggaataaccggaggagtgacttccatggaaccatttctcatcaaattctgtcccggtgtctataaacaaatgcaagatgatgtcggccatagaagccaatattgcaaatctgacaacgagctccttacactatttacctcttctct

SEQ ID NO: 12826 - DNA, 462 bp, Glycine max
  Clone ID: jC-gmfl02220142f09d1
cccagctgccttaatcttctcttgtgtattcagatcccacgggggctttttctttacaaaggaaagcagctcaactttttagtacacagtggaattaggaggaacattacccaattcctgagaggacccatgatggaccaaaagcatattcaggctgtatgatcagcaatgcaatttcccctttcttcatgttcttcacaggttggtcaagtccatcaattacttgctcttcatcaattttgaactcaaatggctgttcatcaacgtagccctttttaacgaaaacagtttcatcttgcgacttgccaatcagtattacttgaactacaggtccatcattggggcgttcatatccctcccgttccttcaaagtcttcttgagaaccattctatccttggtaatgtcagacacggtcttccacgagacctacttaagatccagatgaagattagcatttggag

SEQ ID NO: 12827 - DNA, 370 bp, Glycine max
  Clone ID: jC-gmfl02220142f10a1
gaagcctatcgccgagacctcactagccctccatgcccaaatatacgacgggcgagagtgccggcaccgaacaagagctctctgtgtccaccgatgctctctccgtcgcttgaacgagctgggctgcctgcgccggatccgtggagaaggccagtacacgcctccccgggatccgggaaggcgtcggcgacgtccttgacagccgagcgcacgtaatcttctacccctgcttcgttaacgtggagactattctcgaggcggtctaggacgctgtgttcgaagccgagtgactcacagacgacaacgaatacggtcaagtgtgccgcacccagatcaaggaatgagctgcagctcctgctcctgcactctg

SEQ ID NO: 12828 - DNA, 395 bp, Glycine max
  Clone ID: jC-gmfl02220142f10d1
cccagctgtttttttcttctcttgtgtattcagatcccacgggggctttttcttaacaaaggaaatcaactcaacttagtagtacacattggaatttggaggaacattagtcaatttctgagaggacccaaatggaccaaatgcttattcaggctgtttgatcagcaatgcaatctccccttttttcatgttcttcacagtttggtcaagtccatcaattacttgctctttattaattttgaacttaaatggctgttcatcaacgtagcccttcttaacgaaaacagttcctttttgcaacttgccaatcaggttcacttgaactacagctccatcatttggtcgttcatatccctccccttccttcaaagttttttagagaacctttctatcct

SEQ ID NO: 12829 - DNA, 385 bp, Glycine max
  Clone ID: jC-gmfl02220142f11a1
ctccaacctggccaccgccaagacggtgctctcggcggcggcctcggtggctgccaccgcaatggtggtccgctccgtggcgagcgacctcctcccgtcggagctccggtcctacatcaccaacggcatccacagcatgttctggcgcttctcctccgagataaccctggtcatcgacgagttcgacggcctcctcaacaaccaaatctacgaggccgccgaaacctacctcggcgccaaaatctctcccaacacacgcagacttaaagtcagcaagcccgagacagacacaaccttcgccctcacaatggagcgcaacgagtccttaaccgacgttttcagaagcatgaaattaactgggttctcgtctgccgtcaggtcgagt

SEQ ID NO: 12830 - DNA, 244 bp, Glycine max
  Clone ID: jC-gmfl02220142f11d1
tccttttttttcttttttattttttttatgtctaatttttaatcctttttttattcacctgggacttggtataatttaattttaattcaccacaacaacaacaaaaaccatataaccaacccaaacactcataaaacaaaggacacttataaaaataccaaaaaccacacaaacctaaacaaaaaaaaaacaaccaccaaaaaaaaaacaaacaccaaacccagaaccaaaccccaagacaaaa

SEQ ID NO: 12831 - DNA, 523 bp, Glycine max
  unsure (1)..(523): unsure at all n locations
  Clone ID: jC-gmfl02220142f12a1
ctccaacctggccaccgccaagacggtgctctcggcggcggcctcggtggctgccaccgcaatggtggtccgctccgtggcgagcgacctcctcccgtcggagctccggtcctacatcaccaacggcatccacagcatgttctggcgcttctcctccgagataaccctggtcatcgacgagttcgacggcctcctcaacaaccaaatctacgaggccgccgaaacctacctcggcgccaaaatctctcccaacacacgcagacttaaagtcagcaagcccgagacagacacaaccttcgccctcacaatggagcgcaacgagtccttaaccgacgttttcagaagcatgaaatttacctgggttctcgtctgccgtcaggtcgagtccagaggcttncacaaccctcgcgacctcaacgccaccatgaaatccgaggttcgctccctcgaactcacttttaacaagaagcataaagacatggtgctccaaacctatcttncctatatnctcaacgaagcccag

SEQ ID NO: 12832 - DNA, 649 bp, Glycine max
  Clone ID: jC-gmfl02220142f12d1
gccccccttggctggttctatttcgtactgatgtcagttgagttacatcaaatacccgtagctggcattctgtttaggctaacattacaatttgaatttcagctaaagcaaactgcgaaacgctgaagatttgaagcaaattaaaaaaaataaaagagaagaaatcatcgttgttgtggacattgtgtttgttttctaagaagaatggaaactgtgtgtttaaaatctgggatggttcccacgatctctattagtgggtcgctggatgcacgtgccaatccttctcaggtgagcacggtggggcgcgccgccggggataaaccgccgcagaggtcggtgttttcgaggttttccttttggtaccctttggaatctctctggcctcgggggaacaacagcaggtacaaagggctggccctcgacgacgccgttttggcggacaacaacgccgaagcgaaggccgttagagatgacggccagggtgacggaacggaaaggcagaccggaaactgggttttgaagattctgcatgtgaagttcgcgtgggaagggaaacagcgcaatgaagaggatggtacggttcatgatcaaactcaaaccaatttcgacgaggaagaggtgtgtgaatgtgatgcttgcggtgttgatg

SEQ ID NO: 12833 - DNA, 523 bp, Glycine max
  Clone ID: jC-gmfl02220142g01a1
caattttactttgccataacggtgagtttagagagggaataatggatggaagaggaggctgttgcatcgccaggtatgtacccggtgcatcccacgggtccaccgtcgacaaaataatgcttaggtttcgtccaatcgctcccaaacccgccgtcgcggccaccgcttccgacggctcttcgtccgagagcagtgacgcttttctcaaaaacggaaccactaaaagaaagtacgtaagagataacaactacaccagcaaacgaagaatccgccggagaaagaacacttcctcgccggagaaaaagcagaagccggtggtgactcttccgttgcttccggaaactcccgatcggaaggattctcgggcaaaggatctaactccatcaccagctaaaccagtacgaaacaacatcaacaacaacaacatgagcaagaacttgaatattattaacaagaacgtgccggtgtgggtgagttttgagaatcgaagccttacgatgatgggagggtggtgttcgtgtgt

SEQ ID NO: 12834 - DNA, 421 bp, Glycine max
  Clone ID: jC-gmfl02220142g01d1
tattgatattggtatggtctttctttgaaccccatttgcaaaaaggaagaagaagaacatgaagattcagtgtgatgtgtgtgagaaagcccctgcaaccgtgatttgttgcgcagatgaggcagctttgtgtgccaaatgtgacgttgaagttcatgctgcaaacaagcttgcaagcaagcaccagaggcttctccttcaatgtctatcaaacaagcttcccagatgtgacatatgccaagataagccagctttcatattttgtgttgaggacagagcactcttctgtaaagactgtgatgagccaattcatttagccagtagcctttctgcaaaccaccagcgcttcctcgctactggtatcagggtggctctgggttctaattgcaccaaaggccatgaaaaaggtaacatggaacca

SEQ ID NO: 12835 - DNA, 571 bp, Glycine max
  Clone ID: jC-gmfl02220142g02a1
gaaaaatttagtaactaccgataccatataataataagaatagtattattaaaagagaaagggaagggaaggtaacacgctatggcggcggaatcgggtggtacgccgacaaactttgatcttcccgaggaggtggtgcaagtgctaccgtccgatcccttccagcagctcgatgtggctcgcaagatcacttccattgctctatcgacacgtgtcaacaccctcgaatcagagctgtcctcgcttcgcgcccagatcgccgacaaagacaacctcatcgccgaccttcaatctcagctcgactccctcgacgcttccctctcccaaatcgccgacaaactcctccaaaccgaacaagataaggagagcttgctccaggagaatgcttcgctttccaacaccgtcaaaaagctcaatcgagatgtctccaagttggaagttttcagaaagacgcttatgcaatcacttcaggaggaggatgataactctggagcagcttcagacattgttgctaaaatacagagtcaagcaagtttgacttccacgtcgcagactggagataatgatgttt

SEQ ID NO: 12836 - DNA, 479 bp, Glycine max
  Clone ID: jC-gmfl02220142g02d1
ggcctgccaagactgtcattcggttttcatgttcaaaaaaaagtattgtattatacagaggggagaaaaaaaagttgctataaataaggagacatgcacgatagtatccgttattacaaatttggaaagaatcttttaagcacaatgtcaatggagattgcgattaatcaatccctcaaatatagtgtacagatccttgttttcaggcccaaaaattttatcagctttccgtagcgtttcctcttttgtttgtttatgggaattcaattctttaacattagccaagaatgcaccaaattgctcataagacaaacggttcctgacttggcgaaagaactctttcccatccacccgtgttcgtccagattgtgatcctgttcctgcatcagagcttgatattgaaccatgagttaaggacattgaggaaaacattgaagacctgtcatcatacatgccttttgtggttgcaaaggaaattg

SEQ ID NO: 12837 - DNA, 455 bp, Glycine max
  Clone ID: jC-gmfl02220142g03a1
gaaaaccgttatttcggtcttgcaggtccattcagagggacagaggttgagccaaagcgggtcgggtcggaatagcgatgataacgaaccgggtgcggttatatgtagggagagtgttcacacggtgagggagttccggaagctgtatgggcttttgcgtttgggaagtaggaggaaagaggagtcctattcggggcccatagagaaagaggctccacgtatctagactcgggtcggataaaagtaatcgggttttctttcctttttttattttctacaaaaaaatgtatagttgcttgccaagttgcccgagtttttttttttgcagttagaaattatattgttgtatctacaaagaaaaataatggtaggtcggtaaggtcgaagcaactacacctcacatttttgtttagtccgttgataagaacacatatcaaatgcatcacttattcttt

SEQ ID NO: 12838 - DNA, 489 bp, Glycine max
  unsure (1)..(489): unsure at all n locations
  Clone ID: jC-gmfl02220142g03d1
ctaaatgtggcgtaangaantctacccaaattttccgcggcacgaccgcactactactcgggcgcccttctttttttttttttttttataaaaatttttatgatgcctttgacatgatttctaaaaaacggactacacaaaaaagctaggtgtcaaggcttggtgcttacaaagccaccactatatttatattgtatgatcaacaaaaaaaagtttgactgtagaggataaaatgggctttcatcgatcggcatatattcattccgtagcttaagataaaaaccggaagacaaatctgttttttcttaggcgaacttggctgatacacacttagctgcttctgcattgggccaataatctaacacaatgttctttgtaggatcaaaattggataccccgttcatatttcgtgactggccttccgtgtgaacactatggattgctttcatgcgcgtccggatatttatcatcattattcctgctcgatcg

SEQ ID NO: 12839 - DNA, 515 bp, Glycine max
  Clone ID: jC-gmfl02220142g04a1
aaacaaaattaatcatcttacttatgtattctccgaaaatggttgatttacattggaaatcaaagatgccaagttccgacatgccttccaaaactctaaaactctctctctccgacaacaagtccttaccctctttgcaactacccttccgcaccacagatatctctcacgccgcaccttctgtttgcgccacttacgactactatctccgtcttcctcaactcagaaagctttggaactcctcagattttcctaattggaacaacgaaccaatcttaaaacctatcttgcaagctctcgaaatcaccttccgctttctctccattgttctctccgatccaagaccttactccaaccacagagaatggactcgcaggatagagtctcttatcacacatcaaattgaaatcattgccatactatgtgaagatgaggaacataattccgacacacgtggcactgcaccaaccgctgatctcagcaggaacaatagcagcgagagcagaagctacagc

SEQ ID NO: 12840 - DNA, 107 bp, Glycine max
  Clone ID: jC-gmfl02220142g04d1
aaacgaaaaaaaatttttaatttttattaaaaaatttatccggggacccccaaagataaatgccaagaaaaacaaattggtacccgggttttgacccttaaccttgg

SEQ ID NO: 12841 - DNA, 458 bp, Glycine max
  unsure (1)..(458): unsure at all n locations
  Clone ID: jC-gmfl02220142g05a1
agaaggagcaaaagcaatggcgccgaagaagccgagaaccacgacaaggaaccctgatttggttagggggattggcaagtattcgaggtcgcagatgtaccacaagaggggcatctgggccatcaaggccaaaaacggtggcgttttgccccgccacgatcccaagcccaagcccgaggccccggcccagaagccgcccaagttctaccccgcggacgatgttaagaagcccctcgtcaacaagcacaagcccaaacccgcgaaactcagggctagcattactccagggactgtgttgatcctgcttgctgggaggttcaagggaaagagggtttgtttacctgaagcagctcccatctggattgcttcttgtaactggtccctttaagatcaatggngttcctctcagaagggtgaaccaatcgtatgtcattggtacatccacaaaggtggacatc

SEQ ID NO: 12842 - DNA, 850 bp, Glycine max
  unsure (1)..(850): unsure at all n locations
  Clone ID: jC-gmfl02220142g05d1
aaaaaaacaaaaaaagaaaaaaaaagaaaataaaaaagatagaaaaacaaaacaaagttagagagaagaggtaaaaaaataagaatatacaaagaaagaaaaaaacaaaaaaaacaaatgaccaagagcggaantgaaaaccaacananaattaangggaaaaacaacaaaggaggaaaanaaaagaaaaaaaaaaanaagaaaaaaaaaagaaaatttgagaaaaagaaaaaaagaaaaaaaaaaaagggggggaaaaaaaaaaaaaaaaaaaagagaaaaaaaaaagaaaaaaaaaaaagaaaagagggaaaaaaaaaaaaaaaaaaaaggagaaaaaaaaaaaaaaaaagaaaaatagaaaaaaaaggaaaaaaaggaaaaagaaaaaaagacaaaagaagaggaaacaaaaagaaagagaaatagaaagaaaaatacacaacaaaaaaaaaaaaaagggaaaaaaaataagaaaaaacaaaaaaaaaagaaacgaaaaaaaaaataaaaaaatcaaaaaaaaaggaggtaaataaaaaaaaaaaaaaaaggaataaaacaaaaaagaaagagaaaaaaaaaaggaaaaagaagaaaaaaaattaaaggaaagaaaaaaaaagaggaaataaaaaaagaaggagaaaggagaaaaaaaataaacaaatagaaaaaagaaaaaaacacgggggaaaaaaaaccagaaggaaaaaatgaaaagactaacaaacaaaaaaaaaaaaaaaaaaaaaataacgaaaaaaaacacaaagaagaaaggaacaagtgaacaaaagaagaggaaaacaacaatagaaaacaaaaaagaaaaaagaagaagaagtgg

SEQ ID NO: 12843 - DNA, 365 bp, Glycine max
  Clone ID: jC-gmfl02220142g06a1
ctctttccctctttatcttcctctttcagattcaccctcgttttccctctttcgcataaataaataaataaatataaacaccatgagcgttcctccgccgtctacggcggcgatgtggacgccgttcacggcagcgcagtggcacgagctggagcaccaggccctcatcttcaagtacctcaaggcgggtctctcggttccccctgacctccttctccccattcgcaagagcctccaattgatatcgtctcacccatcgatggggtattatgggaagaagatagaccctgaaccgggtcggtgcatgagaaccgatgggaataagtgaaggtgttcgagggatgcacaccctgactccaagtact

SEQ ID NO: 12844 - DNA, 148 bp, Glycine max
  Clone ID: jC-gmfl02220142g06d1
acaagaaatttttaactttaatttaaaagtcctaaaccttgccaattttaagggggggaaaaaaaaataagtcctgttgaagaaacccaagttcattctattttgccctgaaaactggttctttgtcacggggatgggtgggcccttc

SEQ ID NO: 12845 - DNA, 453 bp, Glycine max
  unsure (1)..(453): unsure at all n locations
  Clone ID: jC-gmfl02220142g07a1
gccgaggcaaagttgttgcagccaaaagatgagagctggtctgaatgtgctcacaaaggatatgcagtaaagcctcagaagggtgatgccttgttgttcttcagtctccatctggatgcaagtacagatactaagagcttgcatggaagctgtccagtcattgagggcgagaagtggtctgcaaccaagtggattcacgtgagtgactttgaaaaaccattcaagcaagtggataatggagagtgtgttgatgagaatgagaattgccctaggtgggctaaagtaggtgaatgtgacaagaatccactntatatggttggtggggaaggagtaaaaangaaagctgtatgaagagttgcaatgtctgcacttcttaaggagtctattaccttttgtttgctctgaaatgcatgtagagccatacatacattgtcaaatatattgtatataaca

SEQ ID NO: 12846 - DNA, 350 bp, Glycine max
  Clone ID: jC-gmfl02220142g07d1
actaaatcaaatatctccctctagcccacatggtttttaataaataaaaaataacataaccacgtgggaatcacgttgtacaaagtcaaaagaatagcctaggaaaagcccaaacttatcttgattcaaaaacccaatttttgccatcccaacttctataacaagtggaataaaacgagctactatgatttacaattttacaaatcataccgaccctttcaaagttgacatactttaacttagaccccatgggcagaagcaatattaaaattataattgtagctgccctggacctctctttgatgatgatcttgaaggaggaacattaacttaaataaactgaggttttt

SEQ ID NO: 12847 - DNA, 387 bp, Glycine max
  Clone ID: jC-gmfl02220142g08a1
cggcttcaaccttgtagttattctctttcttcttttttagctatccctctcttgaaaaatctagatctcgttcttccttgatctacgttacgcttttagtgaccggatctgtatggatctgaaccagatctacacgccgatggtggttttggcctggtctttcatagatctgatgcatggaggctcagatctactgtacagagatactgtagataatcgatgagaagaacgcagatccagccgcttccgcttgttcgatcgctacagacgcttgtatcggattattcatgattgattcataagcagcatgtcttcctccggctatagttgttgcagatctcggatgttgtaaaattagtgtatgatgtgaagctatgggctgaaaat

SEQ ID NO: 12848 - DNA, 413 bp, Glycine max
  Clone ID: jC-gmfl02220142g08d1
aaagggatccggaaaaaaaaagggtaaccgcaaaaaagtcccatggggaaagactaaaaaaattgggcaaaaaaataattttggtggtaaaaaaaataatatttttcggggtaaagggggggaaaacaatattttaattatttcaggggattaaatccaacccatattttttttggtccactaaaatccccctgggaaaatttcttttttttcttgtaaagggcccgaattttttcccccttaaaaatgggggagggggaagaaaaaataaaattttcctaaatccccgtaatttttttaaaaatgctttgcccaacacaatggatttggcaccccaaaagctgtgcgggggttcccatttgatatttcatttatcggctggaggataaaaaggtaatgacctatttttgtat

SEQ ID NO: 12849 - DNA, 481 bp, Glycine max
  Clone ID: jC-gmfl02220142g09a1
tctggcctgcttcacataatcatgcttctgcttactttggacagactccgtatcgcgggaggatgctgaataggccaactattagcatgagattcatgcctgacaaagggtctcctgaatatgatgcgttagctaagaagtctgggagggccaacttgctgaccttgactggcttaaatgagaccctcattgacctaaccatgataatgatccaaagctggcaaacatttgttgagagctaccttgcgcctacagatggcggtgactactgtacttctgatgccgggccattagaggcctttaagaggtttggaaagattctagcatagattgacatgaagctgatatagaagaacaataatgagacattgagaaaccgctatgggccggctaaaatgccctacactttgctctatccttctagtgaggagggattgactttcagaggaattcccaacattatctctatctaatggctcta

SEQ ID NO: 12850 - DNA, 462 bp, Glycine max
  Clone ID: jC-gmfl02220142g09d1
taaacggatgctattgacatctcccaaaatattcccggtacaccggcgcgtgtcggcggccgccctttttttttttttttttgttaaaaattttaaacctgcatgattgcatttattatttggggttccattacacaaacatggtttattaatgacaaatacaagtacattcagccactccaaatacataacttaaacatacacaactgatgaaggaatcagattccttctatttcacatttatttaaagccagggacagtacttcagcaaccatagagcccttaaatagagatactgttgggaattcctttgaaagtcaatccctcctcacttgaaggatagagcaaagtgtaaggcattttaacccgcccaatacggtttctcaaaggctcaatattggacttctctataagcttcttttcaatcttttcaagattcttttcaaaccttttaaaaggctt

SEQ ID NO: 12851 - DNA, 510 bp, Glycine max
  unsure (1)..(510): unsure at all n locations
  Clone ID: jC-gmfl02220142g10a1
cctttgttcactcttcttctcttgcggctagggttttagcgcagcttcttctagatttaaggaagatgggtaaggaaaaggttcacatcagtattgtggtcattggccatgtcgactctgggaaatccactaccactggtcacctgatttacaagcttggaggcattgacaagcgtgttattgagaggtttgagaaggaagctgctgagatgaacaagaggtctttcaagtatgcctgggtgctggacaaacttaaggctgagcgtgaaagaggaatcaccattgatattgcttgtgggagtttggaacaacaaagtattattgcacagttattgatgcgcctgacatagggatttcattaagaatatgattactgggacatcccaagctgactgtgctgttcttatcattgattcgaccactngtgggtttgaagcttgtatttccaggatggacagactcgtgaacatgctctgctttcatcacccttggtgtgaacagatgatttgc

SEQ ID NO: 12852 - DNA, 308 bp, Glycine max
  unsure (1)..(308): unsure at all n locations
  Clone ID: jC-gmfl02220142g10d1
ctaaactcattgttantgaaatctacccagaaatatttcccgggacgacgcgcggccgtngtcggcggcacgccctattttttttttttttttctctactttttttaaattttttattttgcaagtctaagcgggggttctctatttaaaattttaactcaaaaccatgggaattaaaatatcgggagattaacattttttctcttaaaggatccatactttatattattcacttcccccggcctcatattttcttttaaccttctacgttactactatttctataaaattacccatactttaaactt

SEQ ID NO: 12853 - DNA, 346 bp, Glycine max
  Clone ID: jC-gmfl02220142g11a1
ccttgctttccaggctgcaattaggagatggatgacaccaatgaaaaagacacaggcctctgctcatgatgcttctgccggcagctggaagcctaccaagaatgacactatggagaatcgggttcctggatttggcactacaatgaacattctctatggggatggtgtttgaggacaaggcgatgtggactcaatgaacaatatcgtttcccattacctgtattatcttgaccttctaggagacggccgagaacaggctgggccccatgacatgcttacatgcgctgagcaggttcctttcaacccatcttgcgaacctgcttcatcatcctaagattattatatt

SEQ ID NO: 12854 - DNA, 575 bp, Glycine max
  unsure (1)..(575): unsure at all n locations
  Clone ID: jC-gmfl02220142g11d1
tcctttttttttttttttttttaagaactttaactttacatgcattaatttaatcagtatgcaaatggcagcaaaataactgtatagaaaacagaaaaaaccatttatactatacagaattactatgtaaactacagaataactatatatatacaaagaataattatgtatactgaataacaatgtactaaataactgaatatacgctgaataacttaattatactgaataatcgcagcagaaatatcaaaataattgcagcacaagggaattaaaacaaacaaacatacatactgaataacttgataccaagaaaaaatagcattgtatgcttgtgtaaagagccgaagttatcttcaccttaaagaattgtagaagcctaaccagattctttgtaaatccacgatatttcttcaaaaataccttgacaaccacaatgatattgtcatagcagaagtcatatagcgtcttcacattgatattccaatcatcgccagaagatttacaatgttaatgacctatttctgcattacaaatgttgtcgcccgaatctgaacttcttacaagtngataat

SEQ ID NO: 12855 - DNA, 531 bp, Glycine max
  Clone ID: jC-gmfl02220142g12a1
ctcgagccgctcgagccgcaggttcaaagaagtgcagatgacaaaacagtgttgataacaagctacgaaggcaatcacaaccaccctctgccgccagccgacaccgccatggcaaatactacatcagcagctgcagccatgctgctatcaggttcagcagcaagcaaggaatcgctaacaaactctgcaggatattactcttctacaattccctatgcttcaatggcaaccctatcagcttcagctccattcccaaccatcactctcgacttgacccaaaaccccaacaacgccgccatgcagctgcaccgagtaccaccaggccatggcggcgccacgttccctctgccactgcatgcggcagcatctggtggtccccaccttctagggcaccccttgttcttccaacagaagctgcttccaccgcaagcattaatgccccttcttcaacgacaaccttcgtcgatggtcgaaacggtgagtgcagccattgcttctgatccgaactcactgagctttgcagcagcatct

SEQ ID NO: 12856 - DNA, 439 bp, Glycine max
  unsure (1)..(439): unsure at all n locations
  Clone ID: jC-gmfl02220142g12d1
acacangtaggcggccgtccttcttttgttttttttttttttattttttattttttttactatcttgcatcaacttggagactggtctcttttaatgcatgtgagactaaactgttttagttgactatatattcctggacgctcctaaaattaccaagttacctttgcttaatagaaggaatcaccttcacaaaatggagaactgttatgaaagaaacctgtctggctacgcacacgttgctgccactgcttaacctcttgccactacaatacaccggattccgaatgtctaacttgatacctcaacactacgactgcatgatccaatgcatgccttatgcacagtagaaagagcctagttgccgactgcaccatccctggtagaagataccacaagctccaaagggcgctgcacagctagcaaatcacacggaagaaa

SEQ ID NO: 12857 - DNA, 508 bp, Glycine max
  Clone ID: jC-gmfl02220142h01a1
gtgttgttcagttcttcttcctctcttttaacaacatctcacaattcattcaccttttaattcatctcactcacaaatcacaatgctcttcctttcttccttaataataataccataataatctgttacgttacggggcccaaatgtctgttacggagctcaaggagcgtcactctgctgccaccgacaccgtcaacaatctcagacaccgtttaaagcagaagcgcctttcgttgctcgacacagatatttctgggtatgcaaggtctcagggtagaacgcctgtgacctttggacctacggatctggtttgctgtagaaccttgcagggtcacacgggaaaggtgtattcattggattggacttctgaaaaaagtcagattgttagtgcatctcaagatgggcgattaatagtgtggaatgctctaactaggcagaaaattcatgccataaagctaccttgtgcatgggtcatgacctgtgctttttcaccaactggtcaagtctg

SEQ ID NO: 12858 - DNA, 482 bp, Glycine max
  Clone ID: jC-gmfl02220142h01d1
cccataatgagtggttgccaactgttcagtcagagcctgatgtgatctcaatgtcgttcattccaattacgtgtgttttgaatggagtgccagggagtggattcttgagccatgccataaacctttattagcgatataaaccaccgatcgtagagctccaccaattcttggaattccagctgccaaggcagtgggcacctgtattcagtgacctttctcttggtccccaactaaagcaccggagttctgcatctgtacagtttagcttgatgggcccaaagctttatgttaactccacacaggttgatgtaagtaagaggccagtgactggtctacgtctttatcttgaaggtacgaaaagcaatcggttggccatgcatatgcaacagctttcatgacttccaaaagtcttccagcatggagatgatccaaatgaaaacttatggcggaagtcttatgataggagattctttgagaaggtt

SEQ ID NO: 12859 - DNA, 622 bp, Glycine max
  Clone ID: jC-gmfl02220142h02a1
tgaatgtccatgatatgacatacaatatttacattttggttcttctagaacgtagcaccaccttattctacatgaatataaattgtgagatcagatactctttgataacatcctaagtacttatagtacgttgttccccccattgcacatatttcttaatcatatgattttcaagtgatgcaatacatcatgttatttattatatgacagttatttttacaatgagaagtttaactttgatctgtttataggtggcaactgcggtgcggatccgtagttctctttcttttgcaacccacacatttttcaatgagcatgcatttattgatgtgcaagtacctattataactagcacagactctgaagggtttagcaacatgttgaaggttaacaccctggaacagaaagcagagaaggagaaactagacacaatttatgagactgaaggtgttagccttgaacatgtgaaggcagctgcaaaggagaaaagcaacattattgagcatttgaaaagaactgagagcaatagggaagcactggctgctgcagtataggatctgaggacaacgaatgaactcgcattgaaatggaagcatgagaaaagagacagtaggagctcttt

SEQ ID NO: 12860 - DNA, 481 bp, Glycine max
  Clone ID: jC-gmfl02220142h02d1
caattatacgtttccatatatacatcaggcacacaagtaatccattcatatgttaaattgttacacaagcatacaacagtgtcatgatttcctcaggtccacaaatattggaagtttgaatgccaatagcctcgaatatgcaacttgaatcttagcccaaaacttttacttagttattggctttgccatagcttcttgggaaagggataacgtccctaacattgccaaggccagttgcgaagaggaccatcaggtcaaaccttagagtgaacccagagttcttcactgttccgtttcgacgaagatctaggtaccattcatacttctctcgcggcaagcctaactcatcaatcctggagcttatcatgttaagacgttcctcgttttggctaccagatattattgttccaagctttgggacaaccaagtcaaacgcagctacagttccatcatgattctggcgagcataaaatggcttagc

SEQ ID NO: 12861 - DNA, 615 bp, Glycine max
  Clone ID: jC-gmfl02220142h03a1
cacctttccttttttcccacagaaaaaaacaccacctttctttttccgactaaaggttcgccggaaaatgcctctatcctcctcttcctcctccgccgtagactccgccgtctccggcgagatcatgctctttggcgttagagtcgtggtggactccatgcggaagagtgtgagtatgaacaacctctcgcagtacgagcttcctcgcgacgctgccaacgccaaagacgacgccgcaggatacgcctccgccgatgatgcagctccgatcaactccgacaagaaccgcgaccgcaagcgagggattccatggactgaggaagagcacaagctattcttggtggggttgcagaaagtggggaaaggtgattggagagggatctcaaggaactatgtcaaaacgaggacgccaacacaggttgctagccatgctcagaagtactttctccgccgcaccaaccttaatcgccgtcgccggagatccagcctctttgacatcaccaccgactcggtctctacaacccctatggaggaaggagtacagatccagcatcaagatatgtgtctctctttcatcagtgtaccctgtacccctgaaggaacaacatgaatgga

SEQ ID NO: 12862 - DNA, 501 bp, Glycine max
  Clone ID: jC-gmfl02220142h03d1
gatatagtccagatttatattcattaaaaattaacaggaagtacttggttattttcagttatagtaactacaaacataaaagtggccaataaacaataaacaaaaacatgacaggacctttccatggtctgtacaaggaacaaaaggatcaaattggtctcatgacttattaccttgccttcagaaggatctaattcatcatcttttcctttaacatgttttatatttctcccgccaaaaagagaaagtagattagtgataaacatctttgtgaatccaaagtagctatagataatgggccaaagatatatgtttatctttttcaagcagcacttatgatgctatcttgattgttgaagtatggcattgcatgtaaagctgcatgtattgatgatgatgtttgtcttggactggatgacaaagataaccccagagacagtgttggtgtgatcaaaggaacttaaacttgcagtgatataagacactgtggagcctctatga

SEQ ID NO: 12863 - DNA, 595 bp, Glycine max
  Clone ID: jC-gmfl02220142h04a1
cacctttccttttttcccacagaaaaaaacaccacctttctttttccgactaaaggttcgccggaaaatgcctctatcctcctcttcctcctccgccgtagactccgccgtctccggcgagatcatgctctttggcgttagagtcgtggtggactccatgcggaagagtgtgagtatgaacaacctctcgcagtacgagcttcctcgcgacgctgccaacgccaaagacgacgccgcaggatacgcctccgccgatgatgcagctccgatcaactccgacaagaaccgcgaccgcaagcgagggattccatggactgaggaagagcacaagctattcttggtggggttgcagaaagtggggaaaggtgattggagagggatctcaaggaactatgtcaaaacgaggacgccaacacaggttgctagccatgctcagaagtactttctccgccgcaccaaccttaatcgccgtcgccggagatccagcctctttgacatcaccaccgactcggtctctacaacccctatggaggaaggagtacagatccagcatcaggatatgtgtctctctttcatcagtgtaccctgtacccct

SEQ ID NO: 12864 - DNA, 285 bp, Glycine max
  Clone ID: jC-gmfl02220142h05a1
accaattacaaattacactctttgcctcgcaccttcaacttaaccttttctactcataatcttaacaacttgctagaagaagataaagaaagagaaaaagtgtgtgtgtgtgagagagagcaatggctggctcgtgggcacgccgttctctgattgttctggctatcatttccttcggatgtttatttgcaatttccattgctaaggaggaagccacacaattggggacggtcatcgggattgatcttggaacgacctattcatgtgttgggtgtttacaagaac

SEQ ID NO: 12865 - DNA, 102 bp, Glycine max
  Clone ID: jC-gmfl02220142h06a1
gttgagggtcatagtccgtgtgacaatttgttattctttgcatttatctttggaggtctccggataatatttttaataaaaattagataatttatttcgatt

SEQ ID NO: 12866 - DNA, 373 bp, Glycine max
  Clone ID: jC-gmfl02220142h06d1
gagcaattaattttttttttaattattttaaccgggggtggggtggtaaactttatgaatttaatctgatggcatgaaatgaaacaaccaaaatgaaaacttttgtttccaaaactatgatctcgaaaaaacaaggtcccaaattggggaaaaaatcaataccaatttcttggatccaaaatatcaaaaggacaagggaatcggcatgatcatcccaggaaattggagaaactcagcaagccaccttcaccagatccgcctttctttccaaacaagacaagctgcatcttggcataaccttccagcacaccggaatcagcaacagatgcaaatgtttgcaccaacacctttgaagaaagactttggaccctca

SEQ ID NO: 12867 - DNA, 349 bp, Glycine max
  Clone ID: jC-gmfl02220142h07a1
aagacaattaaatctattacatataataggaatataaacaatccaagacaccagagtgataagttgtggcaaactgatgaaggaaacggaaaacaaggtatatctaaccacatacgagaaacaacagattgaaagaaatcgagaaatgtcacccataaactgaatagaggtgaaagaagcacaatccaagacataaaacaagaataaaatacagcctgaaacaaaatctgatgaaaacagagctgagcaggcgcactgatgcctaacatcaactgcccgagggactccagttctagtgacaccctaccattgtgccttgggcacttgcaaccttatatatggctgaaat

SEQ ID NO: 12868 - DNA, 198 bp, Glycine max
  Clone ID: jC-gmfl02220142h07d1
agaaagcttataagataaatccaaatatactgcaaattagttctgccaaaaacatcctaaaagttatgatcttcatcataaaatgaaagagggaggtgggggcgtggagggtgaggggaggttataaatttctcccccaatagcctcttcccaatcattccttctttggatcacgtcaatccctgtactcaagccttt

SEQ ID NO: 12869 - DNA, 488 bp, Glycine max
  unsure (1)..(488): unsure at all n locations
  Clone ID: jC-gmfl02220142h08a1
agaaggagcaaaagcaatggcgccgaagaagccgagaaccacgacaaggaaccctgatttggttagggggattggcaagtattcgaggtcgcagatgtaccacaagaggggcatctgggccatcaaggccaaaaacggtggcgttttgccccgccacgatcccaagcccaagcccgaggccccggcccagaagccgcccaagttctaccccgcggacgatgttaagaagcccctcgtcaacaagcacaagcccaaacccgcgaaactcagggctagcattactccagggactgtgttgatcctgcttgctgggaggttcaagggaaagaggggttgttttcctgaagcagctcccatctggattgcttcttgtaactggtccctttaagatcaatggggttcctctcagaagggtgaaccaatcgtatgtcattggtacatncacaaaggtggacatctctgggtgtaatgttgataaaattgatgac

SEQ ID NO: 12870 - DNA, 517 bp, Glycine max
  Clone ID: jC-gmfl02220142h08d1
gacaaaataaaactgaatgatgatatacagagaacaagttgtgatggatcaaatacttttgaaaagaaaaagaaagagaatttacaagctatataccatagaatcactttctagtttctatattaacaatgaaaaggccactaaaatatttttctctcattcaaatcaaacaaaatatatggccactcaaaagatcattagcaatgtattgcagttagtgttccccattctatacatcaaccatagagaactttgcctgctttgtcaatcatcattggctgagaatgagagaaattattacatgatctagagctatgcgatcccgatgaatatataggtgacatatagccacattcttcaatttatgaaaaagagttaatagcatatcaggtaaagattggccgagaccacatagacccatataacaatttctcctaggatggaccctgttcccagttagttacactgaagccagaacgaaattttgttagggatgaaactatgaagacacattggc

SEQ ID NO: 12871 - DNA, 448 bp, Glycine max
  Clone ID: jC-gmfl02220142h09a1
ccgcagttgcgaaatctctggagcatttgatttcattttcggatactccaccaccttgatccataactcgaagatcttggtgaggaagcccatggcaaatcagcagaacatagtggtggcagatggcacacggcagaagaacatgcccacaggaatagtactccataactgcgagatcatgccggaccctaccctcttggcagaccgcttgagcgtgaagacttacttgtccaggccatgggaggcattctcaagggcagtgttcatcgagaatgttatcggtgacttgattcagccagatggttatattgcatggagcccaatcgaaccaaacacacaggattgctacttcgctgagtttggcaacactggaccaggttccgttgctcatgcaagagccatgtttggaaaggtcttattagctagcggaggctgtacaatacactgc

SEQ ID NO: 12872 - DNA, 461 bp, Glycine max
  Clone ID: jC-gmfl02220142h10a1
gctatgaagttcggggtgagtggcgaaggctcgttttcctccggagaagccaaccttattttgttctttatatgtgcatttgttgctgcatttgcatggtcttggggtccactagggtggttggtgcctagtgaaatatgccctcttgaggttcgttcagcaggtcaagccatcaatgttgccgtaaacatgctgttcacttttgcgattgctcaagttttcctagtcatgctttgccacttgaagtttggccttttcttcttctttgctgcatttgtactcatcatgaccatcttcattgccatgttgttgcctgagacaaagaacatccccattgaagaaatgcatacagtctggagatcacattggttttggtcaaagattgttccacatgctgatgatgatcgcaagcctgaggcttgccaaagttgaataagaatgccaatgatatataaggagtg

SEQ ID NO: 12873 - DNA, 450 bp, Glycine max
  Clone ID: jC-gmfl02220142h11a1
tgcaaagcatccttcgcttcaatctctctctctctctttgcgctttctgcaaaccgaacatttcatctccaaagggatcaacaggtcgaaggagaaatggggctgacattcacgaagcttttcagccggcttttcgcgaagaaggaaatgcgaattctgatggttggtcttgatgctgctggtaagaccactatcctctacaagctcaagctcggagagatcgttactacaattcctaccattgggttcaatgttgagactgtggaatacaagaacattagcttcactgtttgggatgttggtggccaggacaagattcgtcccttgtggaggcactacttccagaacactcagggtcttatttttgttgtagacagcaatgatagggacagagttgctgaggccagagatgagttacataggatgttgaatgaggatgaactgagagat

SEQ ID NO: 12874 - DNA, 494 bp, Glycine max
  Clone ID: jC-gmfl02220142h11d1
tccttttttttttttttttttttttttttttttttttttttactatcttgcatcagcttggggactgttcttttttattgcatgtgagactaaactggtttagttgactatattctcttggatgttcctaaaattacaaatctacttttgcttattagaaggaatcatcttcagaaaattgggaagtgttattgaagaaacatgtctgtctacgcacaagtagcttcaactgctaaactttttgccactcctctacaagggtttccgaatgtctcacttgatactccaacactacaactgcttgatccaatgcaggccttttgcacaatagaaagagccttgttgctgctgcaacgtccctggtagaagttaccacagggtccaaggggtgttccatagctagcaaatttaatggaagagatgacctgggtatcaagagggcaagtgagtgatagcacaggacctacttttcttcctgattctggatctgagtt

SEQ ID NO: 12875 - DNA, 521 bp, Glycine max
  Clone ID: jC-gmfl02220142h12a1
ccatggactggttctcctggctatccaggaccagcctagagccatccctcatctacgaatacggcctcgccttcgcgcgcaacgagctccagctggaggatgccatctacttcaaccacgagtttctccagagcatgggagtttccatagcaaaacacaggctggaaatcatcaagctcgcaaagaaagaagttggtggcggtggggcggtgatgatgatgaggagcagcagcagcatcaagttttctatcaagaagtgcctgaggaagtgcttcagcaagctcgtttcgcgtgaagatcaccacgaagcgatgatggcgacaacagcgatgatggcgaccgagccgaattggtaccaagggaagtggaggagggcaaggcacaatgggaacaatgaggatctccagggagataataataataataataataataacaataagggagttcaaagaagtagaactattgcattatcagggccctttggatgggaatggaagaataattcacgagaagatgat

SEQ ID NO: 12876 - DNA, 484 bp, Glycine max
  Clone ID: jC-gmfl02220142h12d1
aaatggcaagtatatcaaattggttttttgtcttcctcctcatctctacactactgggcatagagcccagcctctcaagcccaagcccaagcccaagcccaagcccgttcataaaatcctcctgcagcaagcacccagtacccagccctctgcgtctcatccctctccgtctacgcctccagcatccaacaggaccctcaccaactggttcagacagcactctccctctccctgaaccgcacccaagccaccaaaaccttcgtggctaactgcaacaaattcagaggcctgaaacccagagagcacgctgcactcaaggactgcgccgaggaaatcagcgacagcgttgaccgcctcagccggtcgctgaaggagctcaagttatgtaaggctaaaggtgaggacttcacgtggcacattagcaacgtggagacatgggtcagttctgctttgaccgatgagagcacttgcggcgatggattct

SEQ ID NO: 12877 - DNA, 569 bp, Glycine max
  unsure (1)..(569): unsure at all n locations
  Clone ID: jC-gmfl02220143a01a1
ctcagccattaccacctcttcactttttctctctcttcccaaactaaacataaacatacattacacatttctagggttctctcacacaccaagattctcctagctgcagctgaaggactgtgaagatgttggagaaagttgaagaatttaacacggagaggatgatggaggaatttgagagggtgacaaaggatgctgagaggattcaaagggaaaccctgaagaggattttggaagataatgcttctgctgagtacttgctgaatttgggcttgaatgggaggacggatcctgagagtttcaaggcctttgttccacttgttactcataaagatttggagccttatatcaatagaataattgatggtgatttttcttctgttctcactggcaaacccatcacaaccatgtctttgagttctggcactactcaaggaaagccaatatatgtaccatggaatgatgaattgtttgacaccacattgcagatatatcacacctcttttgccttcagaaacagggaatttcccataaacaatggcaaggcncctgggcttatctacagcagc

SEQ ID NO: 12878 - DNA, 583 bp, Glycine max
  Clone ID: jC-gmfl02220143a01d1
atgttttgaaagcttgctacgtcagctgttttcccctttctccaggaatggcttatgttccacatggaaatgcaaatttcaactctttattcctaaaatttgcaatttctcatgtgggtatttcttctttgcccttcttgcacccgggactgaaatcttgtacagtcttcaacagaggaacactcattcgccagtgtttaaatggaaagcggaatttttctctatcagaaaagcgatttaattgcaagttttcaaagaaagacagattctttatccctagaagtagtagttcttctaactctagtggaagtacggatgaaccctctaatgagacagagaagacaccatttggatatacaaggaaagatgtcctattaattggacttggagttactttacttggcattggcttaaaaagtggactggagtttgttggagttgactcactgcaagcaggaaatgtagttcagctagtgctggttttgggccttacagttgggtggatctcaacatatatcttcagagtttcaaacaaggaaatgacatatgcacagcaactacgtgattatgaaagcaaagtgat

SEQ ID NO: 12879 - DNA, 578 bp, Glycine max
  unsure (1)..(578): unsure at all n locations
  Clone ID: jC-gmfl02220143a02a1
ctcagccattaccacctcttcactctttctctctcttcccaaactaaacataaacatacattacacatttctagggttctctcacacaccaagattctcctagctgcagctgaaggactgtgaagatgttggagaaagttgaagaatttaacacggagaggatgatggaggaatttgagagggtgacaaaggatgctgagaggattcaaagggaaaccctgaagaggattttggaagataatgcttctgctgagtacttgctgaatttgggcttgaatgggaggacggatcctgagagtttcaaggcctttgttccacttgttactcataaagatttggagccttatatcaatagaataattgatggtgatttttcttctgttctcactggcaaacccatcacaaccatgtctttgagttctggcactactcagggaaagccaatatatgtaccatggaatgatgaattgtttgacaccacattgcagatatatcacacctcttttgccttcagaaacagggaatntcccataaacaaatggcaggcctngggctttatctacagcagcaagcagttc

SEQ ID NO: 12880 - DNA, 544 bp, Glycine max
  unsure (1)..(544): unsure at all n locations
  Clone ID: jC-gmfl02220143a02d1
tctagatcgcgagcggccgccctttttttttttttttgaccatatgcaacttatatcattggtaagttgaaacggggaaaagtacattaaaaaaacgagaaaagtaaaatccaaatccaaaacataatgacaagacaggttattatctaaacttcaaaagggtcttcgcaaaatcaagaacaacccatgacaattggtctgcttaatcgacttcctcaattttgggtccagcaccgcttccactgccagcagcaggaccatcctcatccatggctccacccgcatcaccaccagctccttggtacatctttgctatgatggggttacaaatgctctccaactccttcatcttgtcctcgaattcgtcagcttcagcaagttggtttccatcgagccattggatagcctgctcaattgcatcctcaattttcttcttatcatcagcagacagcttggaagcaatcttatcatctttaattgtgttcctcatgttataggcgtaattctccaatgtatttttggcctncactttcttcttatgctc

SEQ ID NO: 12881 - DNA, 488 bp, Glycine max
  Clone ID: jC-gmfl02220143a03a1
gggagaggaagaagaaggtgcgagtcaacaagagtctcatgttgatgttagtttggctgagacataagaagctagattccgaggagtttacaaggtattcgcatctacaatatttgcagcaatatgtctgattcgggtgtaccgagtggcaaacatactcacagttgctagtgggagatggacttggattagtgctatggtgtcagagttatgttttggaatatactggatcatcactcaatctgttcgttggaaaatcgtatatcaaacgcctttcaaacacaggctcttacagagatatgatgatgagagtttaccagcagtggacatttatgtgtgcacagctgacccaacacttgagccaccatgcatggcgatgaatacggccttatcagcaatggcgtacaattatcctgcgaataaagtgagcgtgtatctctctgacgatggatgctcagagctgacatgctatgctctcttataagcct

SEQ ID NO: 12882 - DNA, 275 bp, Glycine max
  Clone ID: jC-gmfl02220143a04a1
gattgtgagtttctaagtttaacatttgatgcactggaacaagtataggggatcggggagcattaaccgacgttgactagaacaacaccattaagagaagttatgagccacaaggctgctaagaatcatcatgatgatgaggatgctgataacgatatgacagtggcactaacacatcactctagcagggaaagaataactggaactgtctcgaagcacatcggccaatgtacgaacagtcacaaaatgcgcattatgtgcctgtcatacgaaga

SEQ ID NO: 12883 - DNA, 219 bp, Glycine max
  Clone ID: jC-gmfl02220143a04d1
gccacccatctgcccgattttctgattcgttctgtatgtcaaatacccgttagaaccaaaaccagtcggcggccgcttctactttttttttttttactttatcatttttaatttttaacccctgaaaaacccccaaagccactgggacaatataactccccaaactccacacaaaaacaccaatccactcaaacccaatgcaaaccattcacgaacgca

SEQ ID NO: 12884 - DNA, 570 bp, Glycine max
  Clone ID: jC-gmfl02220143a05a1
gacgaacattaaacaaccgtgaagttgcagttaaagcaaactgcgaaacgctgaacatttgaagcaaattaaaaaaaataaaagagaagaaatcatcgttgttgtggacattgtgtttgttttctaagaagaatggaaactgtgtgtttaaaatctgggatggttcccacgatctctattagtgggtcgctggatgcacgtgccaatccttctcaggtgagcacggtggggcgcgccgccggggataaaccgccgcagaggtcggtgttttcgaggttttccttttggtaccctttggaatctctctggcctcgggggaacaacagcaggtacaaagggctggccctcgacgacgccgttttggcggacaacaacgccgaagcgattgccgttagagatgacggccagggtgacggaacggaaaggcagaccggatctgggttttgaagatctgctgtgaagtccgtgtgggaagggaaacagcgcaatgagaggatggtacggtcatgatcaaactcaaaccaatttgacgagaagaggtgtgtgaatgtgatgcttgcgggttgatga

SEQ ID NO: 12885 - DNA, 635 bp, Glycine max
  Clone ID: jC-gmfl02220143a05d1
gctccactagtgtgaccgtctttcagccttgatgttgtattgctacataccgggtaaacccgcataccagtcggcggccgccctttttttttttttttttttttcaattttttaatctttgaataaagaatcgtctaaatgggtaatgtcctacaaagcatgtgccctcgccctatacaattgtgtcccccatgcttaataatgaatcatcttataaattcatttgaggttaattacgctatatgttcccaagagcaacaaccgagcagggaacaaaagcaacacaaacaaatgcatatgttgggatgtaacaatcctactgaaccttttcagggactctctccctgtttgtatcacgctggagaagggtgactggcgttgacccacattgattgatatcatggacctcccagcaacaatgctggtatcagctccacgagataacagaagaggccaccacaccttacgccgttgctccctcttagctttacggatctggttaagttctttgcgaatcacagttcttaaagactttaagtaagagttcatgtcatgatctcgttgcatacttcctccagatccataagcagatcggtcacttaatatctcaagtggatgaggtgagtttaagaaga

SEQ ID NO: 12886 - DNA, 545 bp, Glycine max
  unsure (1)..(545): unsure at all n locations
  Clone ID: jC-gmfl02220143a06a1
gacgaacattaaacaaccgtgaagttgcagttaaagcaaactgcgaaacgctgaacatttgaagcaaattaaaaaaaataaaagagaagaaatcatcgttgttgtggacattgtgtttgttttctaagaagaatggaaactgtgtgtttaaaatctgggatggttcccacgatctctattagtgggtcgctggatgcacgtgccaatccttctcaggtgagcacggtggggcgcgccgccggggataaaccgccgcagaggtcggtgttttcgaggttttccttttggtaccctttggaatctctctggcctcgggggaacaacagcaggtacaaagggctggccctcgacgacgccgttttggcggacaacaacgccgaagcgaatgccgttagagatgacggccagggtgacggaacggaaaggcagaccggatctgggttntgaagatctgcatgtaagtccctgtgggaagggaacagcgcatgacaagatgtacggtcatgatcaactcaaccaatttcacgagaagaggtgtgtgatgt

SEQ ID NO: 12887 - DNA, 537 bp, Glycine max
  Clone ID: jC-gmfl02220143a06d1
gaataaagaatcgtctaaatggggaatgtcctacaaagcatgtgccctcgccctatacaattgtgtcccccatgcttaataatgaatcatcttataaattcatttgaggttaattacgctatatgttcccaagagcaacaaccgagcagggaacaaaagcaacacaaacaaatgcatatgttgggatgtaacaatcctactgaaccttttcagggactctctccctgtttgtatcacgctggagaagggtgactggcgttgacccacattgattgatatcatggacctcccagcaacaatgctggtatcagctccacgagataacagaagaggccaccacaccttacgccgttgctccctcttagctttacggatctggttaagttctttgcgaatcacagttctcaaagactttaagtaagagttcatgtcatgatctcgttgtatactttctccagatccataagcagatcggtcacttaataatctaagtggatgaggtgagtttaagaagaccatctgagcagcttcgagccg

SEQ ID NO: 12888 - DNA, 539 bp, Glycine max
  Clone ID: jC-gmfl02220143a07a1
caaagcctccaccaatgtttttgctgctttcgccgccgaaacctcaccggagctccggtaactcccctggcgacagcattccagactggatctccgaatcaatcaacggcggctccctccgccgcgtcgacctcaactccggcaccaacggctgggcgtcgccgccaggctccgtgttctccctccgctccgaaagttactttcagaaccgccaaaaatctcccgccggcgactacctcctctcgccggcgggcatggactggctcaaatccgccgcgaaactcgaccacgtgctctcacgcgcggacaaccgcgtgatgcacgcgctgcgaagatgtcaaaccctaggtcgctccctaaagagcttcgtcttcgcggtgaatctccagatcccgggcgcgaaggagcaccacagcgcggtgttctacttcgcgaccgaggaaccggatccggtccgaaccggttcactcttaaaccggttcgtgcacggcgacgacgcgtttcggaaccagcggttcaagctggttgaccggatcgcg

SEQ ID NO: 12889 - DNA, 573 bp, Glycine max
  unsure (1)..(573): unsure at all n locations
  Clone ID: jC-gmfl02220143a07d1
gcaccacctccggcccatttctnntagtactagaagccaaatacccgatacacccacataccagtcggcggccgcccttttttttttttttttttacttttttttttttattttttattttttttttttttcttttgggtcttggtttaatttattttcattatttttctttttacctttttttcaaaggccccaagaaaaaaaatttaaccccagaaaacccaccccaaaaaaccccccaaggggccaaaaaacggggccaaaacccaaaataaaagaaaaaaccttgcggggaaaaaacccccaaaaacgggggaaaaaaaaccaaaaaccgcccccaaatcccgaccttccaaccccggaaaggcaaatcaaaccccttctaaaggggcccccaaaataaaaacctggggccgcttttaaaaaacggcgaaaggggaaaaccccgggggtccccaaaaaaaaccccttgggaaaaaacccccttttcccacgcggggaaaaaacaaaaaggcccccccccgaggcccctaccaaaaagtggccccccccaaagggcaaagggcccccccc

SEQ ID NO: 12890 - DNA, 549 bp, Glycine max
  Clone ID: jC-gmfl02220143a08a1
catcatcactcacacctcgttgactgaattgcgatggacaacaaaaagtcaaaatggagttggagttcagcaataatcggagcagcatccgcagtggcagcatcagccctaatatccgcgaaacccaaggacccaacatttcacctcatttacataaacttcacctctttaaaactcaatttccctctcttagacgcagaggttctcctcacggtccacgtcaccaaccctaatatcgcccccatccactactcctccacttccatgtccatcttctaccaaggttctcttctcggctcggctcaggttcaagccggctcccagccgccccgctcctgccagctcctccgcctacccgcacgcctccacgcgctcgagctcgctcaccacgccacgcgcttactccacgacgtcgcgcgccgcgagatgttcctcgacgccgcgtgttgatatcgccggcaccgccagggtcatgtggtgggaccataacttcaaggtccacgtggacagccacgtcaccgtctatcccgtgttactcgacgtcattga

SEQ ID NO: 12891 - DNA, 425 bp, Glycine max
  Clone ID: jC-gmfl02220143a08d1
tatttttttttttttatttttttttttttttttttttttattttttttttttgggtttgggtttatttttaattttttttttattttattttttttttttttttttttaaaaggcaaaaaaaaaaattataaaaaaaaaaaaatacacaaaaaaaataaaactaagggataaaaaatcgggataaaaaaaaaaaaaataataaaaaaaaatgggggaaaaaaaaaccaaaaaaaggggtaaaaaaaaagaaaaattgacccaaaatccgaagtttacaaaccgggaaaaaaaaattaaaaacttttaaaaggggaaaaaaaaaaaaaaaaaaaggggggtttttaaaaaaaggataaagggaaaaaaccgggggttccccaaaaaaaaaaccatggaaaaaaaacacccttaaccaagttgagat

SEQ ID NO: 12892 - DNA, 375 bp, Glycine max
  Clone ID: jC-gmfl02220143a09d1
ggaaaaaaaaaaagaagccctatattcattctttgaaaaagcaaatggcaaaaaccacctaggatttcaaagggggaaaccctagattccaacttataagcctcattttgaaacaaaatcctaattaacagggatatagcccaaggccaaacaaaacagggaggccacaccacacacaattttccccagagattctgagtctcacatcccggaatctattttgaagccggggggctttcataaaagcctttaacaaacccctaattcttaaaaataccaaggctcaccccccatcatcaaatctattttgaacccaaaggggtttcatagagacccttgaaaaaggggaaaaccggatctctagggggccaactt

SEQ ID NO: 12893 - DNA, 605 bp, Glycine max
  unsure (1)..(605): unsure at all n locations
  Clone ID: jC-gmfl02220143a10a1
ngctccccggccccccccccaggcccccnactgcccgggacgtaaatagcatatattcgcancgcctcatgcgcgattnaccggggacaagccactcactagncgggggacgccctctttggcagtgatacattttttgaacgtttatcaaaccaaagaactagccggggggttagggctcactggctcacctaacatcccggttctgaacgacccatccaatctctctgccaaagctgagttggaaagagcattgccaaaagggcattgggaaagagagaagaataggggagtggtgcacagtggttggtttcagcagcagcttgtgctgaaacactcaagtgtggggcgctatgcatgccatggtggctctagcccactgattgaagctatggtcaacgagtgtcaacaggcgctgctgcctttcaagggtgaccagcgtgtcaattctaaactcattgccaatgattcaaaggcaggggtagaggtgaataggattgatgaagacgggtgcttccacagagaggatatactggaggcattgaaaactgtcatgttggaggataacagagagcaagggaagcaaacaacagaaaaccacatgc

SEQ ID NO: 12894 - DNA, 562 bp, Glycine max
  Clone ID: jC-gmfl02220143a10d1
aagacaacttcttggtcttgaccaaaatgagtaggaatacaataacttcaagttacaaaagcaatttttagcttttttaaggtgaatctcctaactgcattaattgatcgggagaaaggagacacagaataaaacctacaacgggaaagcaaaatcacaagaacaacgagactgaccacgcatatctcaattgatatatgataatatgatcattttgaactatagtttatactttctagtcttggtagactttattttccattggaagagacaagactaagccatagactttaactgggcaaccagatctgtgatgaatttgttctgaatttccttatttgataaaaacttgctccattgcatgtggttttctcttatttgcttcccttgctctttgttatcctccaacatgacagttttcaatgcctccagtatatcctctttgtgaaagaacccatcttcatcactcctattcacctgtacccctgcctttaaatcattggcaatgagtttagaattgaaaaactggtcacccttgtaaagcaacagcaccagttgacac

SEQ ID NO: 12895 - DNA, 438 bp, Glycine max
  unsure (1)..(438): unsure at all n locations
  Clone ID: jC-gmfl02220143a11a1
gnnctnnnnnncnttaacactcaaaagtttcctgacatatgaaaaaaataacgggtttttgggaataatcacgtggttttaaataacttaaacacaagcgtacaggtaaattacaaggctaagaattttgcaattggcctttgctacaagcagcatgaatcacacaggcaaaaaactgctttgaaatgtattatacagatacagaaccacatatactatggtccatgtccaacaatggaaacaagccagcaacccaaacctaaattttgcacgttagtccaaaacagcatcgaatatgggacgtaattagctaccctcaaccgcacacgggtgctgcacaaaacaagccatcaatcatcatggtcatccaaagatgtgtagatcatccaaaacaaggatcggaaaaggatcaaaacaatatagaagagtttgaaaagc

SEQ ID NO: 12896 - DNA, 435 bp, Glycine max
  Clone ID: jC-gmfl02220143a11d1
gggggagcaatacggcaaaaatattttatcagggagggaccaagtccatttttttttaaaattaccccaaaagacattcaaggctaaacatcattggcagaacataaaattgtgacaaattccaaggccctttaaactggaaatttacatttcccaaagattccctttacccacgcccaatccactatgggggaacccctatatctaattcaaccccaatggggaccctaccaaaagacgttattcacgagccgttggggccaaaacctacaaggcccaacaaccttgggccttccaaacgagggttaaactaaaaggtattcaagggaatatgcccgaaaggcccggaggttggaaatgtcccccataaaccattaatgggaacatccccttctttaagggttgaaacggcaaccaggtccttggggaacgggc

SEQ ID NO: 12897 - DNA, 628 bp, Glycine max
  unsure (1)..(628): unsure at all n locations
  Clone ID: jC-gmfl02220143a12a1
cgcccccgggccccccncagcnccnnntgtgcccccaggatgcgcaccagcaactatcgtaacctatcatgcgcacatacctaagctcggcattcttattaaaatgaaattcaaatcatttcttttataaatttaaaaaaaattctttaattaaatattcaatgaaattaaatatttaaattaataaaattagtcctgtcttattccattgcttgaattggtttctttttacagcagctaatgctagtcaccgcacttagtcaatgagctagaatgggttctaaagatatccatagacatatatagatatatttatctatacatatctttagaaaaacaaaaggagggatatctcctaggacgtatcatcctatgcatagcagtggggaattatgggacaaacaataaatccgctggggttcagactaggctcaactcagagccatgacactattgggttagctcagccaacacattattccgagactatacacgaggatatagaagtacgacattgtatcaaaaatcatctacaaaaaaatataagactatcctctggcgttgagggaattggccagctgctgattcagagacgaattgatcctattcaaggtataatatatatggg

SEQ ID NO: 12898 - DNA, 427 bp, Glycine max
  Clone ID: jC-gmfl02220143a12d1
gggaaacaaaacggcacaaatattttatcagggagggacccagtccatttttttttaagattacctcaatagatatccaagtctaaacaacattggcagatcataaaagtggtacaaaatccaatgccctttaacatggaaatttacatatcccaaagattccctttacccacgcccattacactatgagggaacccatatatctaattcaaccccaattgggaccctaccacatgacgttattcacgaaccgtttggggcaaaacttacaagtcccaacaactttggaccttccaaacgaggattaatctcaaaggtcttcaagggaaaatgctcgaaaggcccggaggtaggaattgtcccacataaatcattattggggacatccactactttaaggcttgaaacagcaaccagttccttgggg

SEQ ID NO: 12899 - DNA, 482 bp, Glycine max
  unsure (1)..(482): unsure at all n locations
  Clone ID: jC-gmfl02220143b01a1
ctcagccattaccacctcttcactttttctctctcttcccaaactaaacataaacatacattacacatttctagggttctctcacacaccaagattctcctagctgcagctgaaggactgtgaagatgttggagaaagttgaagaatttaacacggagaggatgatggaggaatttgagagggtgacaaaggatgctgagaggattcaaagggaaaccctgaagaggattttggaagataatgcttctgctgagtacttgctgaatttgggcttgaatgggaggacggatcctgagagtttcaaggcctttgttccacttgttactcataaagatttggagccttatatcaatagaataattgatggtgatttttcttctgttctcactggcaaacccatcacaaccatgtctttgagttctggcactacttanggaaagccaaaatatgtaccatggaatgatgaattggctgacaccaca

SEQ ID NO: 12900 - DNA, 583 bp, Glycine max
  Clone ID: jC-gmfl02220143b01d1
caaaaacatagtactatacagccccactttctctttctttttctcttcactctaaagtctaagcatccatggccatggcgtctgcaaagctcaacaccttgtcttcccagtggatcgcccacaattccttctctcctcgccgtggatcctcttctcgccgagtctctcttccgatccgcgcttcttcttaccaacacgaactcgtccaaaccgccaaatctattgcatctcccggtcgtggaattcttgcaattgatgaatcaaatgccacatgtgggaagcgtttagcatccattggattggacaatactgaggtgaatcgccaggcctataggcaacttctgctcaccacacctggccttggtgaatacatctctggtgcaattctttttgaagaaaccctttaccagtcgacaacagatggaaataaatttgtggattgcctccgcgatcagaacattgtgcccggcatcaaagttgataagggtctggtccctctgccagggtcaaacaatgagtcttggtgccaagggctggatgggttggcttctaggtctgctgaaactacaagcaaggtgctcga

SEQ ID NO: 12901 - DNA, 376 bp, Glycine max
  Clone ID: jC-gmfl02220143b02a1
gctctgtttctgtctctgtgtttgctgctgaggattccgaacgagcgaccttcttcgtttctcgcaaagtttaagtcatcatgggtaaggaaaagactcacatcaacattgtcgtcattggacatgtcgactctgggaagtcaactaccactggtcatttgatctacaagcttggaggtattgacaagcgtgtgattgagaggttcgagaaggaggctgctgagatgaacaagaggtcattcaagtatgcctgggtgcttgacaagctcaaggctgagcgcgaaagaggaattaccattgatattgctttgtggaagtttgaaaccaccaagtactactgcacagtcatcgatgcccccggacatcgtgactttat

SEQ ID NO: 12902 - DNA, 174 bp, Glycine max
  Clone ID: jC-gmfl02220143b03a1
cttaaatagattaagcatttgagttttgtaagcatagaggaacctcaaggactgggggcaaacataaagacgacaagggcatgaagcgggaaggcggatcgactcgcagagtagggatggacttctactcaaaccgaacaggcagcaccggcaacatctacggcgcgctttgca

SEQ ID NO: 12903 - DNA, 588 bp, Glycine max
  Clone ID: jC-gmfl02220143b03d1
ggcaatgtcttaccaaattagaaattcttttgtcttctttttcctttgtgttcttctctttggtgtgtctgctctgggtcgaccagccacttttctgcaagactttcatgtcacgtggtctgactcccacatcaagcaacttgatcaaggcagggcaatccaactcagacttgaccaaagctctggatgtggatttgcttccaaggtgaagtacatgttcgggcgtgttagcatgaagatcaaactcgtccccggagactctgctggcacggtcactgcattttatttgaactctgacacgaactacgttcgcgacgagcttgatttcgagttcttgggcaaccgtactgggcaaccttacacagttcaaacaaacatctacgctcatggaaagggtgacagagaacagagggtcaacctctggtttgaccctgctgcagacttccacacctattcaattctctggaaccatcaccatattgtattctacgtggatgattttccaatcagagtatacaaaaacaacgaggctcgggggattccatacccaaagatgcaggcaatggggtgtattcgacattgtgggaa

SEQ ID NO: 12904 - DNA, 562 bp, Glycine max
  Clone ID: jC-gmfl02220143b04a1
gccgccatgggaaatgccttcctcttccagggcggagactgtgctgagagcttcaaggagttcaatgccaacaacatccgtgacaccttccgcatcatcctccagatgagcgtcgtcatgatgttcggcggccaaatgcctgtcatcaaggtggggagaatggcggggcaatttgcaaagcctcgttcggattcgtttgaggagaagaatggcgtgaagcttccgagttacagaggggataacattaacggagactctttcgacgagaagtcgaggattccggatccgcagaggatgattagggcttattgccaagccgcggccacgctgaatcttctcagagcttttgccaccggtggttatgctgctatgcagagggttactcagtggaatttggacttcacggatcacagcgaacagggagataggtaccgagagcttgctatccgagttgatgaggcccttggattcatggctgctgctgggctcacggtggaccatcccataatgagaaccacttgattctggacatctcatgagtgcttattgctgccttatgaac

SEQ ID NO: 12905 - DNA, 666 bp, Glycine max
  Clone ID: jC-gmfl02220143b04d1
gtcctaatctctgccggctttacgttatcgagctgcatgtccgatgcccgttagaaccaataccagtcggcggccgctctttttttttttttttgagttgccaacgttttcgtttcgatttcgtttctttattatcagggaaaggactcttgtccttggcagttcaaacgcattactagatagtatacacatacaaacacagaacacaacatcaaagtgacaaccatcgattaataataaatatgtagggcaaataaaaaacgaacaaagatatctttctcttgttgctttttgaaggtgacttttacagtactcctagaggggcaagaggttgctgcgatctgatcctgctctttctcaaacgctcagcgatgatgaaagcaagctcaagagattgtgaagcattgagccttgggtcacagtgtgtgtggtaacgtgagctcaagtcatcaaatgtgaccgtccttgacccaccaatgcactcggtcacattctgacccgtcatctctagatgaacccctcctgggtggcttccttcttgctcgtgtacgtcgaagaatgctctcacttcggccctgatggaatcgaaggggcgagttttaagaccacagggagccttaatggtgtttccatgcataggaacactgacccaagtgacaatttggc

SEQ ID NO: 12906 - DNA, 324 bp, Glycine max
  Clone ID: jC-gmfl02220143b05a1
ctatatcactaatagctggtgagagtacagattatctcgaaccattcagcagctatgaatcacgattagatacttcaactaggacacattgttcatgttcttcagagctgaagcaagctcacattcacataagatcgaagagctgaatgaaacacatattaaaactaggagtataacacggggctgaagctatactatagagccatgatgccatctgccgacttctctgcagccatattcaggaacttgcccagaaaaccctatgatgaatgacactctctctcgtttggtgacagcatacaagatcatgcatcatgatagcaa

SEQ ID NO: 12907 - DNA, 537 bp, Glycine max
  Clone ID: jC-gmfl02220143b05d1
gacatctcaactgacccgactccgactctgatgttgtagtgccaataaccgttagacccgataccagtcggcggccgctgtcaaatgtgactttattatcctacttttcattttttcccgggaactgatgacacagtccgaaggaaggactatgcatctgactgtgacataaacagaggagtatgtaatgtgcttcttcctgaaatactacattctgattcttcgcgctggtgtaacaccagaagaaggaatcgttgtagaagcctcagaactttgaggagcattgaaacacttggccacaagctgctcaatcggatccactgcacaaccgtgcagaacaaggtcagagaattcagcaacatagggagcatacttgtagaaaaccctgtatttgcccccattggtagcccaatcagatgcatcccatattgatgcatacaaagtcataggcttagaagggaaatgccctcccatagattctgtacgagtaacttatctaataagaacattgtccacataaaatatgatctgagagtc

SEQ ID NO: 12908 - DNA, 605 bp, Glycine max
  unsure (1)..(605): unsure at all n locations
  Clone ID: jC-gmfl02220143b06a1
aaataaatatcacggagaatcatattagcaattgggattcagttgagtgcagttgtaggtcagaggatctgaatagcaagttttcctttgaaaatgaaagcaacgttcaccaaactaggcgtattaggaagagccagtctcttcaaagtgggcttgaccaaggcataagggaaggtgatgaagatcttgggttgtcttgtgatggtgccaaaagccagaatgagtcaacaatttctattagaaggtatcataatccaaatgttgagtttcaagtctgttcaggtcttctaaatgatgtctcaattttttcaattggagaccctataccttcagataaagatgcccatgaaatttctgatactccattatctggtgaatttgctggtaacattcctgaccaggacttctgtcctggtatcgtatctctangcagtcacgttctttacccaatatcagagcttctatactntcttctgaaaaagatgcttttaaacatgcaatgtcaaagatcttctgatgatcttcatgctttacgcatgangcanaaagaggaattcatcactgagtttcatgatccaataggggagatcaaganagagagaatg

SEQ ID NO: 12909 - DNA, 557 bp, Glycine max
  Clone ID: jC-gmfl02220143b06d1
ggaatagtataacttttgcataaagcagcttattaggcggtacaggccacaaatcaatgtatcaatatctagtgcaccaaacttaatcaaaagagaggggataaactgtgctaacagaaaaacatgacaaatacgaaataacaaagtaaatagatgcatatactgaaagaaaggcggtgaacaaatcaatttggtatggaacagcctcttacagaactccaaaatttccctcactgcgactcttgcgcatggagagctctgaaaccaagttcaatgctttgtcgggagcatcaaaatgatagcgactttgggttgatactttggttctagttggtggcaggagaggctgcttacccttggacagttttggtgaatccacacttctgcgagcatgagtagacgtgattgatggcctccgtgtggctgcaacaccttggctgcccttccttgtggtcttgcgatccgctctaaagccgcgatcaaactgatgggaattcattcctaaccgaactgaacgttctgctccatccttcaaagagctcactttcataggctgc

SEQ ID NO: 12910 - DNA, 512 bp, Glycine max
  Clone ID: jC-gmfl02220143b07a1
attgtctcttccttcgttctcatctccattgctccagctcctccactgcaagtgtcaagagagagagtgtgtgtgtgtgagtgaatttcgaaaccccaacctctctttctctctcttccaccaagtgacacagtcggtgggcttatacatacatacatacagggaccccaacgggtctttcccttttagttttatctgcttcgcctcgtgactccctttctctctgttactgaatttaacactgctcagctttcatacacttcaatcccattttattggccacctttcccttattcacagtactactacttccttattcaacagacaccaattccagtttctcttttcaggtttcggaatcaatcaatgccgtgtttttagatacctgcctgctttagctaccctacgaacaaccttttcacataattggtaatagtcataaaatagcaagtcccagatttttattttacacgattctcctctggaagcgtctatttctggcttctactctc

SEQ ID NO: 12911 - DNA, 282 bp, Glycine max
  Clone ID: jC-gmfl02220143b07d1
ctacagggcccaggtacaaatctaaaacccacactaaacaacacaaaaaacaaaattatatctacaaaaaaaaaacatacatccacacacccaattacaaaccagacattaaatattacaaccacagacaaacaaccatcattgaacgaaaaacaaatcaaacacaataaaaatctcaccacaggactaaaaaccaggcactctgcaaaaaaacccccctaacaacgaaggatcccacacaacttacccaagtaccatacagcccccaaaaaataacaccaa

SEQ ID NO: 12912 - DNA, 350 bp, Glycine max
  Clone ID: jC-gmfl02220143b08a1
ggtgcttctgtgtaacattttccagcgttttttctctgttacctgtccttctcaacctcttacagttcatttttcattctgcagaggattctgggttggggggttgatcctcttatcattttttacttatataagttatatttacttattgatagagggcgtcaatattcgccctacacaggtttttttttttcctacccaattttggtggtgaatgtgatatagggatttgtgcagtgagtttctagggccaatttttcgcaaatgtagtaaggagaaaacatgatccgatgtaaagctatattggattgtaacgcatgcattagacttcccatattgtcatcgtaact

SEQ ID NO: 12913 - DNA, 552 bp, Glycine max
  Clone ID: jC-gmfl02220143b08d1
agtactatgggatcaacattagggatacagcttctccccatgcagagcaggaagtgggacagtagttataattaacacacacaactgctaccgttaaacggttagtgattacaaacaacattgcgaaagtaaattggatcaaggtcgtcatatcagtggttaccatcttcaagggttgtcatttctatcggtagtaagcctgctgataagtgggagccaaaacatttccatagccaccatatgcaggaggatagttcatgggagctgccgggtaagaccctgcaatagccggtgccggctcaggtgaataagcagcataaggatttgtcgggggacttctgctgccatacatgtggggtgcggaagggtaatgctggaagagcagctgggtattggccgtgtgatggagacctgacaaatgtaggagcagcagggaaagatgatacatatgcattaggcaaacgcccagctttggctggaggcattggacctccattgctgttgcttgctcgagttcttttaatggcaggaacagcaatccgtttccttttc

SEQ ID NO: 12914 - DNA, 477 bp, Glycine max
  unsure (1)..(477): unsure at all n locations
  Clone ID: jC-gmfl02220143b09a1
ttngttttanccgttttttttgaggccattttagaacacgcattcatgagtaaaaacaaagggggcaccaaaaacagcgcatatcattatcaaatgttcgaacatgaacacgaacacgaaacactaacataaaaatccagccaacaaaactgtaacaagatgatagtgggtatctagctattaagataatcaatgtatcaagcgcgatcacaaatccaccggattaaaaaaaaaattcctcaaaagacacggtaagatttccccattgtactctacagatacaagcacctgacatttagccaggcctttttcaacaaagagacaaggaaattaacactcagttgaacattgtggaagattggcttttcctccatactaacattccccacagctactcccatgcagagcaccttcttaagttgaaatttaaccatggccttggactcagaaaccttcgactcaagagtttcctggtga

SEQ ID NO: 12915 - DNA, 448 bp, Glycine max
  unsure (1)..(448): unsure at all n locations
  Clone ID: jC-gmfl02220143b09d1
gccaaacaacacgagcgcttcaccccagtctacgatgtcacctaatgatacagagcaaaaccagacagcagccgccggccgccctnaaattaaaccagaacctttacacttttacagaacgaaaccgcaaagaagggcccagagaaacaagcagacataggaacgaccacaaacaaacgagaaagaggacaaaccgaaacacaagaaacacaaagcaacaacaaaaaaccggaaatcaaagctcacattccagtaaaagccttctttgcaccgctagaagaaccagctgggatcactatcaacacagagaacctcacagcctaagaaagaggccggcaaggaccacaaacaacgaggccggataagcctagaggaaagccacaagaaacgagccaatcaagatcagaccaaatgaaacaaggaagaaacccagcagagacaaaacgca

SEQ ID NO: 12916 - DNA, 538 bp, Glycine max
  unsure (1)..(538): unsure at all n locations
  Clone ID: jC-gmfl02220143b10a1
tgcccgccccccgggcnnnncgtgcccgaaagaaaacaaatagagacancttccnaacaattnccgggaaaggcgcgaacgaggcggcagccgccctagatttcgtatattaacatttaaaagttttctgagagatgaaaaaaacaacggggttttgggaataatcacgtgttctcaaatagcttaaaatcaagcgtacagggaaattacaaggttaagacttttgcagtgggcctttgctacaagcagcatgaatcaaacaggcaaaaaactgctttggaatggattatacagatacagaaccacatatactataggccatgtccaacaatggaaacaagccagcaacccaagcccaaattttgcacgttagcccaaaatagcatcgaatatgggacgtaattagctaccctcaaccgcacacggatgctgcacaaaacaagccatcaatcatcatggtcatccaaagatgcggagatcatccaaaataaggagaggaaacggatcaacacaacatagaagagtgtgaaaagcctgt

SEQ ID NO: 12917 - DNA, 523 bp, Glycine max
  Clone ID: jC-gmfl02220143b10d1
ccatagtcatgttcaatattgaaggatgaatatgtacacaacaatggaaccaaacgagaaaagcagatatccaaacgggctaaaagcaaagagtcacacactcatcatattaggttacacttttaaccacttagaaagaaaaatgctggactaagaatcagctaagcttgttagccccaagttgcccaattagcttcacttccaacacgtggcatcacctggatctttgactgagagtcaacattgaagttggccccgcacataaccccctcgctgtcaatccgaggcattgctttcatcttctgtgttggatgctcaaagttcatgagaccgtgttcactatgaaacatacacccagctggaaatggtgcaaatgatttagcacaacttgcttttataagctccagattttcagaaattataacagaaccatcacctgcaataccccagtagagctcaatatggccattagaaccagatgcaacaaaaactgttccatccttggtgtcatagatcacaaatg

SEQ ID NO: 12918 - DNA, 539 bp, Glycine max
  Clone ID: jC-gmfl02220143b11a1
gggaggctagccgtcggtgaagaatcgtttgattcgcctggaaatcgcgattcaagcacgattcatccccgatacagagattcaaccacaattcaggaaagaaaaacgagacaaactccgtttcgtatcaatagaagctggaatcgtatcgaatcgcgagatacggatcgtgaatcattattgtagaagtctctgggtgatggctggttcagaacctgtaagtgcagagggagagagtatggctgtggatgctgccccaaggaagccccggattctacttgctgctagtgggagtgttgctgctgtcaaatttgcaaatctttgtcattgtttctctgaatgggcagatgtaagagcagtttcctcaagtggatctttgcatttcattgatagagcatcaatgcccaaggatgtaattctatacacggatgaggatgaatggtctagttggaagacattaagtgatagtgtgcttcacattgagcttcgcaaatgggcagatatcatggtcatcgctccattatcggcaaacacccttg

SEQ ID NO: 12919 - DNA, 287 bp, Glycine max
  Clone ID: jC-gmfl02220143b11d1
ggatcctagccagccctcttctagcctgttacttggaggtcagtcaagggttaacggcaaagacccgcgcactaatcggtggccgcccttaatttctgaatccctgttttttcattttttttactttttttcgccaccgcggggcaggggcatcttttggaaaccaaaacgacgcaaaaatgcacgcagggagggaccaaggccatatctgtttactgtgacaacaagggatccgcacacattaacacacagcggacaacccaaaagcgtaacgaattccaacggcc

SEQ ID NO: 12920 - DNA, 582 bp, Glycine max
  Clone ID: jC-gmfl02220143b12a1
caaaaacatagtactatacagccccactttctctttctttttctcttcactctaaagtctaagcatccatggccatggcgtctgcaaagctcaacaccttgtcttcccagtggatcgcccacaattccttctctcctcgccgtggatcctcttctcgccgagtctctcttccgatccgcgcttcttcttaccaacacgaactcgtccaaaccgccaaatctattgcatctcccggtcgtggaattcttgcaattgatgaatcaaatgccacatgtgggaagcgtttagcatccattggattggacaatactgaggtgaatcgccaggcctataggcaacttctgctcaccacacctggccttggtgaatacatctctggtgcaattctttttgaagaaaccctttaccagtcgacaacagatggaaataaatttgtggattgcctccgcgatcagaacattgtgcccggcatcaaagttgataagggtctggtccctctgccagggtcaaacaatgagtcttggtgccaagggctggatgggttggcttctaggtctgctgaatactacaagcaggtgctcg

SEQ ID NO: 12921 - DNA, 506 bp, Glycine max
  Clone ID: jC-gmfl02220143b12d1
ataattaggctaagcttatcatgtataaagtgtatgtaacatttgaaatttattacatgctttattttgtggcaaattaaccatccctcagaaattgcctaagtctgaagtttaattcaaaaaaatagaaaatccgacaacacatgatttttaagaatataaacacaagaatttgatgagtgcagctagctcacaagaatttatccaaatattttccaagaagagaagctatgagccttctataaacgctttcagtaggatgaaaactgtcccaaaacacatactctaaatcgttgggacacaagggagtgaaacggttgcataataacacaacctctattgttcccgtgccacagcaacccttgtctccgactttatagccatattttttgtagtttataatgatgtcaaagagagggttgtaaacatcaatgtaaactatcctgctatcttgaaagttgtgattgagagaatccagctcctttgacaatttgctgttaaataac

SEQ ID NO: 12922 - DNA, 389 bp, Glycine max
  Clone ID: jC-gmfl02220143c01a1
attcttagcttctccgagtgtctctgtctgtctgcggaatccaaaccctccaaggtttctttcctgtgctcctcctcgtgtggtgcacctacgcacgaggtttttgtagctaccaccgtgcccaattcacatcgcatgtttcgaacgctttgtgctgcaactgaaatcgaaaatcagagaaagcggagaagagagagagagcatggctgatctctttgcgtggctcatctccttcttcattcttattgccttaattgtactcgtcatttaccagttaatgtgcctggcagacctagaatttgattatataaatccatatgattcctcatctcgaataaacaaagtgatattgcctgaatatattataggtaggtgtcctattcggcttc

SEQ ID NO: 12923 - DNA, 578 bp, Glycine max
  Clone ID: jC-gmfl02220143c01d1
ctatcacttccctcaccatggccgagtcttgcctcctctcttctccctcctcactcttccacaccaaaaccaaaccctctctctttacacccccctccaaacccctcacactccaattttcatgcctcaactcctccgtctctctctccctcgccgcaccaactcaccgttctccccttgtaactttcgtggcccaaacttccgattgggctcaacaagaagaagaacagagcctcgctgaaaccgaagcgggcctggaaagttgggagcccaacggcgaagacgccggcgatgagagcttcgtcgaaccgccggaagaggccaagctcttcgttgggaacttgccttacgacgttgatagccagaaattggccatgcttttcgaacaggccggaaccgttgaaatcgctgaggttatttataacagggaaactgaccagagtcgcgggtttgggtttgtgacgatgagtactgttgaagaagctgaaagcgctgtggagaaattcaaccgctatgatatcgatggaagactgctgactgttaataaggcttctccaagagaactcggcccgaacgcc

SEQ ID NO: 12924 - DNA, 483 bp, Glycine max
  Clone ID: jC-gmfl02220143c02a1
attcttagcttctccgagtgtctctttctgtctgcggaatccaaaccctccaaggtttctttcctgtgctcctcctcgtgtggtgcacctacgcacgaggtttttgtagctaccaccgtgcccaattcacatcggatgtttcgaacgctttgtgctgcaactgaaatcgaaaatcagagaaagcggagaagagagagagagcatggctgatctctttgcgtggctcatctccttcttcattcttattgccttaattgtactcgtcatttaccagttaatgtgcctggcagacctagaatttgattatataaatccatatgattcctcatctcgaataaacaaagtgatattgcctgaatatattatagtatgtgtcctattcggcttctaccttgtaacagggcattggataatgtcattgatctgtgctccttacctctactacaatgtgagattgtacagacaaggaaaacttctggctga

SEQ ID NO: 12925 - DNA, 557 bp, Glycine max
  unsure (1)..(557): unsure at all n locations
  Clone ID: jC-gmfl02220143c02d1
ggcaatgtcttaccaaattagaaattcttttgtcttctttttcctttgtgttcttctctttggtgtgtctgctctgggtcgaccagccacttttctgcaagactttcatgtcacgtggtctgactcccacatcaagcaacttgatcaaggcagggcaatccaactcagacttgaccaaagctctggatgtggatttgcttccaaggtgaagtacatgttcgggcgtgttagcatgaagatcaaactcgtccccggagactctgctggcacggtcactgcattttatttgaactctgacacgaactacgttcgcgacgagcttgatttcgagttcttgggcaaccgtactgggcaaccttacacagttcaaacaaacatctacgctcatggaaagggtgacagagaacagagggtcaacctctggtttgaccctgctgcagacttccacacctattcaattctctggaaccatcaccatattgtattctacgtggatgattttccaatcagagtatacaaaaacaacgaggctcggnggattccatacccaaagatgc

SEQ ID NO: 12926 - DNA, 67 bp, Glycine max
  Clone ID: jC-gmfl02220143c03a1
aaataaaaaataaaaaatttaaaatttaaaaaaaaaaagacagacagaagagagagaaagagagaac

SEQ ID NO: 12927 - DNA, 274 bp, Glycine max
  Clone ID: jC-gmfl02220143c03d1
ggggaaagcagcctaggatcaatcatgttcattaaggttataaagttcaagaaaagtactagtccacagccatcatttctgggacaatattccaatggtttaccttcaagctaatatggtatccttaagtctgatgaaaatagttttaagtagtgcactagaggtcctgagcttgatttatgtaacagaagtcatcttatagatgtttttgtctttgagtttgactcttcttcctttcaatatttagcatattgactacattataccttaatac

SEQ ID NO: 12928 - DNA, 55 bp, Glycine max
  Clone ID: jC-gmfl02220143c04a1
gtcactctgttctgtctgggagtccagctcagcacctagaaggacgagctatgac

SEQ ID NO: 12929 - DNA, 210 bp, Glycine max
  unsure (1)..(210): unsure at all n locations
  Clone ID: jC-gmfl02220143c04d1
gcaaatctgtgaccccttgtacccgtctgcangcaaatgccngtacaaccaataccagtcggcggccgcccttttttttttttttttttttttttaatttatcattttttatccactaatatccaccagggggacgggtccacactccaaacgcaccatacaccaaagcgaaaaagggcgaaacaaacacccgggacctccaaacttcac

SEQ ID NO: 12930 - DNA, 601 bp, Glycine max
  Clone ID: jC-gmfl02220143c05a1
aaatggcaagaatatcaaattggtctcttgtcttcctcctcatctctacactactccacatagagcccagcctctcaagcccaagcccaagcccaagcccaagcccgttcataaaatcctcctgcagcagcacccagtacccagccctctgcgtctcatccctctccgtctacgcctccagcatccaacaggaccctcaccaactggttcagacagcactctccctctccctgaaccgcacccaagccaccaaaaccttcgtggctaactgcaacaaattcagaggcctgaaacccagagagcacgctgcactcaaggactgcgccgaggaaatcagcgacagcgttgaccgcctcagccggtcgctgaaggagctcaagttatgtaaggctaaagggtgaagacttcacgtggcacattagcaacgtggagacatgggtcagttctgctttgaccgatgagagcacttgcggcgatggattctccggaaggcgctgatgggaagatcaggactctattaggctaggatgtcaatggtgtcagttactagcatgctctctgcttataaccatatgctgacacactagtgggaacatgatct

SEQ ID NO: 12931 - DNA, 680 bp, Glycine max
  Clone ID: jC-gmfl02220143c05d1
agtaacatctcatgtgtctggtcttctagtctctgatgcctgtatgctaaatcgcggatagacgcgctaaccagtcggcgggcgatcttcgtttattttttttttttttttttatctatgatttactcacatatataataatgacatggagcacgtaaaagaagaaaagtaaagcattaagcaaccaagatcattgttcccaactagtgttgtgcagcatagcggttaataagcgagagagcattgctagtaacctgagcaacattgagcatcctagccctaatagagtccttgatcttcccattcagcgccttcccggagaatccatcgccgcaagtgctctcatcggtcaaagcagaactgacccatgtctccacgttgctaatgtgccacgtgaagtcctcacccttaaccttacataacttgagctccttcagcgaccggctgaggcggtcaacgctgtcgctgatttcctcggcgcagtccttgagtgcagcgtgctctctgggtttcaggcctctgaatttgttgcagttagccacgaaggttttggtggcttgggtgcggttcacggagagggagagtgctgtctgaaccagttggtgagggccctggtggatgctggaggcgtacacggatagggatgagacgcagagggctggggactgggtgctgctgca

SEQ ID NO: 12932 - DNA, 514 bp, Glycine max
  Clone ID: jC-gmfl02220143c06a1
aaatggcaagaatatcaaattggtttcttgtcttcctcctcatctctacactactgcacatagagcccagcctctcaagcccaagcccaagcccaagcccaagcccgttcataaaatcctcctgcagcagcacccagtacccagccctctgcgtctcatccctctccgtctacgcctccagcatccaacaggaccctcaccaactggttcagacagcactctccctctccctgaaccgcacccaagccaccaaaaccttcgtggctaactgcaacaaattcagaggcctgaaacccagagagcacgctgcactcaaggactgcgccgaggaaatcagcgacagcgttgaccgcctcagccggtcgctgaaggagctcaagttatgtaaggttaagggtgaggctttcacgtggcacattgcaacgtggagaatgggttcaagtctgctttgaccgatgagagcacttgcggcgatggattctcggggaggcgctgaatgggaagatcaggactc

SEQ ID NO: 12933 - DNA, 696 bp, Glycine max
  unsure (1)..(696): unsure at all n locations
  Clone ID: jC-gmfl02220143c06d1
ggccctgagtgtggtagtcagcnctgagctgtcatatacattcccggtaagacccgtctaccagtcggcggccgctcttttttttttttttttttttttttttttttataattactcacatatataataattacatggagcacataaaagaagaaaagtaaagcattaagcaaccaagatcattgttcccaactagtgttgtgcagcatagtggttaataagcgagagagcattgctagtaacctgagcaacattgagcatcctagccctaatagagtccttgatcttcccattcagcgccttcccggagaatccatcgccgcaagtgctctcatcggtcaaagcagaactgacccatgtctccacgttgctaatgtgccacgtgaagtcctcacccttaaccttacataacttgagctccttcagcgaccggctgaggcggtcaacgctgtcgctgatttcctcggcgcagtccttgagtgcagcgtgctctctgggtttcaggcctctgaatttgttgcagttagccacgaaggttttggtggcttgggtgcggttcagggagagggagagtgctgtctgaaccagttggtgagggtcctgttggatgctggaggcgtaaacggagagggatgagacgcatagggctgggtactgggtgctgctgcatgaggatttttgaacgggcttgggctt

SEQ ID NO: 12934 - DNA, 561 bp, Glycine max
  Clone ID: jC-gmfl02220143c07a1
tactctcgcagtctagctttcctgcacttcctaagtacttttgtgcccttaagctttgtctttgtaagttggttgtcatcgtgaagcacaccagcagtgtcgtcgtgaagcacgccagcagtttcatcattgtcatcaaccattctccatcattgtcgtgggtcattttccatcattgtcgtcgaccattctccatcactgtcgtgggtcagcttccaggtcatgttcctttctccctttctttcttatacatagtctctaaggtaaaagggctttgtggtgcccttctttgaatttggttgtatctgcacccctgttctttgcgcaaccatatagcttactgcatttcaaagaaactagcactcgattagggttagaagtatgatggaactgtgtaaatgcaacgaggcatccgttctgtctacgaaatatttaatctttattggagactaaaagtctagattcccttttgatgagattcaaccaacaatctgcgcaaacatatatgactcttggagaacttgttaaaatactaattaggtggacttaatttatttaact

SEQ ID NO: 12935 - DNA, 525 bp, Glycine max
  unsure (1)..(525): unsure at all n locations
  Clone ID: jC-gmfl02220143c07d1
gctccatactgacctcttttctnttagagcttgcatgtcaaatacccgttagaaccaataccagtcggcggccgctctgaaattgaaattttctttccgaaaattttacattttctacaacctgagatcacgacatgggactggcacaaatcttgaaagagcattaacttttggctgatcatatataatatatacgacatgaacgaacacatacagagtacacataaaaaggggggacattcagcactaaagccacagctgaaagaacagaattgaataagagggaaggaaacatagagaaaataagcacaatccgatgactgaatgccaatggatgcgcaaaaggaccgtgccaagagtgtcggaaccccgatgagttaaacacgtaccttgagccccttgagtggctgacaccacttacgatgtgaaggcatggacattgctgccaaaacgcacatatgcacaagcccacaagaacctgccaattacacccctgttgagatcaatgttgaagcagatcatgcc

SEQ ID NO: 12936 - DNA, 563 bp, Glycine max
  Clone ID: jC-gmfl02220143c08a1
gaagattatcgtgaatgcttataaaaggtaaataaagaaattagcgtcaaaatgttgggtgtgttcagcagctccatagtgtcgccgccggacgagctcgtggccgccggcagccgtactccgtcgccgaagatgacggcggcggcgctgcggaagcggttcgaggagaagaacccctccgccgtgtcggtggaggtcggagagcatgtccagctcgcttatacccaccacaacgagtcgccgtttcagcccagatcctttgctgtcaaggatgaggtgttctgcttgtttgagggagcccttgacaatttgggaaacttgagacaacaatatggactggccaagtcagtcaatgaagtattgttggtcattgaggcttacaaagctttgcgtgaccgagcaccctaccctgctaatcatgttgttggccatctcagtgggagctttgctcttatagtttttgacaaatctacttctaccctctttgtggcatctgatccatatggtaaggtacctctgtattggggaataactgctgatggctacgtaacatttgctgatga

SEQ ID NO: 12937 - DNA, 534 bp, Glycine max
  Clone ID: jC-gmfl02220143c08d1
tctttttttttttttttttttttttaacttttactataatttgtatttatcatagtaacaggatacataaactgtattttttatgggggaataaacacaatcagtctttattactctaataattctaatcgctttggaaaacaacttgagagatcaatagagataatcaaaagaagggattgattgattaatttactttgtctctctccaatttcaactactcttcttagatggaacagtaccgtctgttcctgcaaggatgacatacttgtccttcctagtcaaattggtgcactcaaacccgagagtccctgcaagaaccctctgaatataatttgcgacctcgatcgcagatttccctcccttgcaggtgagttctgcaggcaactggttcaagaaagtgatctcataagttggcatgggattcatgaatacaaaataaggatccaacagcttgtggccgcgaacggatgtcccgtataacacgctttgcttggtgttgatggcgaccgggacaattctatcggttagctc

SEQ ID NO: 12938 - DNA, 468 bp, Glycine max
  Clone ID: jC-gmfl02220143c09a1
tgttttttttttctttttttttttgcttttttttttctcgttttttttttttggtgaaaccggggcaaacaaaaccaaaaataattaaaccccccgaaaaaaccacaggccgagccctgggtcaaaacgggagcccaaataataccaaaaagaccggtttttttttatgcaagttttcccccacaattggggatttctagccttaaaccgggttaccccggggaaaaagaccccaaaagggatggccgaaataccacctttgcattttacccttgacccttcaagaacacaagagcccccaggacccacttttggtattccccacatttgaaaaccattggaggattatgcaaccccccacccccctgggggggggtgggtaaccaaacaaaaaaccccggaccttcccctgaaagggggccagaaaattgggaagcccttcccttcaccctttttggcggggcctaa

SEQ ID NO: 12939 - DNA, 467 bp, Glycine max
  Clone ID: jC-gmfl02220143c09d1
ctcaacgggaactgggtccctgtataacttatctgctcgctcgtcgggtgcatacaaatatgctcgggtttcaggaatggaaatcgctcccctgatatccaaagctttaattctccgggtgtgtcacagttatgaacaaatgtggcgctttacatgacaaaccctaaccaccatccaccatgcagggacccaagttcaaagaaacagtcagaattcatttcattgcaaaaagaaattacccaagtatcataatccattcatttcagggggaaaaaaggattacttcaggatcaacctactgcgggtaaagctaatctaagttctcaaaggtgaggtgagttcaccaaccaccggcagaatttccagacccccatccgttcccagatgctgctttctttgtggcagatccccaaccagagcttccttgttcaccatcacttggaccagaaccaccacttgcttgttcc

SEQ ID NO: 12940 - DNA, 538 bp, Glycine max
  unsure (1)..(538): unsure at all n locations
  Clone ID: jC-gmfl02220143c10a1
ttnntnctctnccttttttttgaggccattttagaacacgcattcatgagtaaaaacaaagggggcaccaaaaacagcgcatatcattatcaaatgtttgaacatgaacacgaacacgaaacactaacataaaaatccagccaacaaaactgtaacaagatgatagtgtgtatctagctattaagataatcaatgtatcaagcgcgatcacaaattcaccggattaaaaaaaaaattcctcaaaagacacggtaagatttccccattgtactcttcagatacaagcacctgacattttgccagttctttttcaacaaagagacaaggaaattaacactcagttgaacattttggaagatttgcttttcctccatactaacatgccccacagctactcccatgcagagcaccttcttaagttgaaatttaaccatggccttggactcgttaacctttgactcaagagtttcctggtgaggaacaagtgtagggaactttcctgccttgttgagaccaggacccaaaagacgaggaatct

SEQ ID NO: 12941 - DNA, 519 bp, Glycine max
  Clone ID: jC-gmfl02220143c10d1
ctcaacgggaactgggtccctgtataacttatctgttcgctcgtcgggtgcatacaaatatgctcgggtttcaggaatggaaattgctcccctgatatccaaagcattaattctccgggtgtgtcacagttatgaacaaatggggggctttacatgacaaaccctaaccaccatccaccatgcagggacccaagttcaaagaaacagtcagaattcatttcattgcaaaaagaaattacccaagtatcataatccattcatttcagggggaaaaaaggattacttcaggatcaacctactgggggtaaagctaatctaagttctcagaggtgaggtgagttcaccaaccaccgccagaatttccagacccccatccgttcccagatgctgctttctttgtggcagatccccagccagagcttccttgttcaccatcacttggaccagcaccaccacttgcttgttcccagccaccattgccacttgtactagcttcacctccaccggttccaccaccac

SEQ ID NO: 12942 - DNA, 524 bp, Glycine max
  Clone ID: jC-gmfl02220143c11d1
ctaacttctgattttcacattagttgcaggtaaagaacgtaactgatacaacaatacatatgtttttgtgtgactgctacaaccaaaaccaaaatagagaacatgcaatgctgaaatgttcaatcttctagcttctttgcagttgaaactttgtcagctgatatacctgtatgtgctcaactacttgttttggcatcagttactgaagcccctgagccagcattttgctttacttctggttgaggacccttgtgagcaagcttctccagcttcttttgccatcatcgagcacgaacctctactgatgtagataaacagtaccaacaaaagctagcatctctctctacagtaattgagagaattggcaaaaaaatatggatgtatactgtcttttatagtttcatcaacagtacaagaagatatcgaagttaaacaacaatctatttactaagtaagtgaggtagactaaaattgaagattaacagagctcaacagtgaaaaataattgtatccttatgttagca

SEQ ID NO: 12943 - DNA, 588 bp, Glycine max
  Clone ID: jC-gmfl02220143c12a1
gaagcaagtgttagttaaatagaagacgttgaagacatttctggtcactgggggattcttgtttcagatccatggcttcagaatcagttcacacaagtggagcttcgtagcttaaagtcccatttcatgagcatgaggagggaaagtgggaggcttgtgattgcggatttggcttccaagatgtcaaggttgaaggtggtgggagagaatctgagtgaggaagagagagcttcttgcgtgaaggatgtgtatcagaacactgaagaggaggctgattttgaattgtttctcaaggtctacttgaaactccaaacatttgtgaattctagaaccggaagtagtccaaagaactcgtcagcgttcctcaaggcagctacaaccacattgcttcacacaataagtgaatcagagaaagcatcatatgtagcacatataaatcactatctagcacaagatgagttcctcaagaaatatcttcctattgacccttcaaccaatgagctctttgaaactgcaaaagatggtgttcttcttttgcagcttatcaaatgagcagttccagggaccatcgacgaacggcgatcaata

SEQ ID NO: 12944 - DNA, 301 bp, Glycine max
  Clone ID: jC-gmfl02220143c12d1
gggacttaaactgagattttagtgcactttttaacacatgccaactttagggcttaggacaaacatgaatcacaaaacattgggcggggggtatagatatcaggggccccaatgaatgataccgatgacactggggttaattctcacatatcaaccaaggccaaatggtggtgcctaaaaaagcttgaccccctgcgcccagatgggataaaccaacagaagcattatgccaatggaatttgatatgccgggagccttagtgaaggagtttctgaaaccaccagaagcccgaatgggttct

SEQ ID NO: 12945 - DNA, 604 bp, Glycine max
  unsure (1)..(604): unsure at all n locations
  Clone ID: jC-gmfl02220143d01a1
attcttagcttctccgagtgtctctttctgtctgcggaatccaaaccctccaaggtttctttcctgtgctcctcctcgtgtggtgcacctacgcacgaggtttttgtagctaccaccgtgcccaattcacatcgcatgtttcgaacgctttgtgctgcaactgaaatcgaaaatcagagaaagcggagaagagagagagagcatggctgatctctttgcgtggctcatctccttcttcattcttattgccttaattgtactcgtcatttaccagttaatgtgcctggcagacctagaatttgattatataaatccatatgattcctcatctcgaataaacaaagtgatattgcctgaatatattatagtaggtgtcctattcggcttctaccttgtaacagggcattggataatgtcattgatctgtgctccttacctctactacaatgtgagattgtacagacaaggaaaacatctggttgatgtcacagagatattcaacttgctccctaaggaaaagaagcaaggcttttcaactcttctataatgttntatccttttctatccttatttgatgatcacacatctttgatgacatgatgat

SEQ ID NO: 12946 - DNA, 538 bp, Glycine max
  Clone ID: jC-gmfl02220143d01d1
agattatcctaagtctttgggaatagtgttgcaatggcttcaagtcaggaggaggtgacccttttgggagctactggaagcccatttgtgtgcagggttcatattgccctcaagttgaagggagttcaatacaaatatgtcgaagaaaatttgaggaacaagagtgaactgcttctcaaatccaacccagttcacaagaaggttccagtgtttattcacaatgagaagcccatagcagagtctcttgtgattgttgaatacattgatgagacatggaagaacaaccccatcttgccttctgatccttaccaaagagccttggctcgtttctggtccaaattcattgatgataaggtttttggtgctgcatggaaatccgttttcacagctgatgagaaagagcgtgagaagaatgttgaggaagcaattgaggctctgcagtttcttgagaatgagataaaggacacgaagttctttggaggagaggagattgggttggtagatattgctgctgtctacatagcattttgggtcccta

SEQ ID NO: 12947 - DNA, 579 bp, Glycine max
  Clone ID: jC-gmfl02220143d02a1
aggaggaggagggtggttttacgcgacttgcctcattcgtctgcgattgcgagcctttgacggaggatgatctggaagccatcgaagcctctctttccaataacaaaaaacgtccattcaacgatcacactcacactcctcgtcgtcgcttgcccaaatcgcttatcgctcttcaacacccaaacgcttcttctttctcgccccatccccgtccatgcgattcaagaatgacattgcctgtaatgaagtttagtggtcaaatttcttatagcaggacttttgatgctgtagagaaagctgcaacaaagctcttacaaattctccaagaaaaaacgaccgacatgatgcaaactgcaattggatttgacattgagtggaaacccaccttcaaaaaggtgttcctcccggaaaggtagcagtgatgcagatatgtggtgacactagacattgtcatgttctacatctaattcattctggaatccctcaaaatttacagcttttgcttgaagatcccacagtcttgaaggttggagctgggattgatggtgatgctgtgagggttttagagaattatacata

SEQ ID NO: 12948 - DNA, 591 bp, Glycine max
  Clone ID: jC-gmfl02220143d02d1
tattatgctcctttggcagtgagacatttttgagtgattatcaaatcaaagaactagccagtgggttagaactcactggcttacctttcattttggttctgaatttcccatccaatctctctgccaaagctgagttggagagagcattgccaaaagggtatttggaaagagtgaagaataggggagtggtgcacagtggttggtttcagcagcagcttgtgctgaaacactcaagtgtggggtgctatgtatgccatggtggctctagttcagtgattgaagctatggtcaatgagtgtcaactggtgctgctgcctttcaagggtgaccagtttttcaattctaaactcattgccaatgatttaaaggcaggggtagaggtgaataggagtgatgaagatgggttctttcacaaagaggatatactggaggcattgaaaactgtcatgttggaggataacaaagagcaagggaagcaaataagagaaaaccacatgcaatggagcaagtttttatcaaataaggaaattcagaacaaattcatcacagatctggttgcccagttaaagtctatggcttagtcttgtctct

SEQ ID NO: 12949 - DNA, 412 bp, Glycine max
  Clone ID: jC-gmfl02220143d03a1
ctaaaagatatgatagcacgacaattattctactacagggaaggacgtctttaccaaggggagtatgcactggaagccattgggaatgctggaactgggctagggatcttgtccataagatggggtagttcaggtcggtgaaaagactggcacatacaagctgctggagacatcaagctacacctgagaaaatgtacaagatcgatgaacatgtagcctgtgctgtggctggaatgtatgtgctgatgccaacatgctaactcatactgctagagttcaggtccatggctatgcatatgcttaccaacatgcaatgcctgctgagcagatggatcaatctctgtgcgatactaggcaaggttacacacagtctgctggtcgtcgtccatttggagtcttattactgtttgct

SEQ ID NO: 12950 - DNA, 507 bp, Glycine max
  Clone ID: jC-gmfl02220143d03d1
gaacttcgtcctccctctgcttctttctttcttagtttcagcgcgattgctgcatcgtcctccaataagagctcgctgctagtgaaccctaacacggcggcaacgagaggtgttcggttgaagctcagatcagcgatggcagcagcaacccgcacttctctgcggttcctcctctcagtctccgtaaccctaactctcgctcacctcgccgcctcaaattccgaaggcgacgctctctacacgctgaaacggagcctctcggaccctgacaacgttctccagagctgggatcccactctcgttagcccctgtacttggttccacgtcacctgcaaccaggacaaccgagtcactcgagtggatcttggtaactctaacctatctggacatttggtacctgaacttgggaagctggagcatctacagtatcttgagttgtacaaaaacaacattcaaggaactattcctccagaacttggaaacctgaagagtctagttagcttggac

SEQ ID NO: 12951 - DNA, 574 bp, Glycine max
  unsure (1)..(574): unsure at all n locations
  Clone ID: jC-gmfl02220143d04a1
cactaactctctctgacttttgatttctatccatggaggccaagaacttgtggcgcttcctggttctttcaatcggtgtggtactagttttacttgtcacttggctgcccaacaaggaggctctagactgcaacctttactctggatggtgcacctcaaagaaccggttctactcttcagcacatcctaataatccgattaagaaaccatcattttccacatatcatcatcacaagaaccaacaccatgaatccgagattcctcaacaccctcttgaccctctaaccatccaagagttcaacaaggtccgcaccatccttttgaactaccctctcttcaagtcctcatccagctacactctcaactccgttgtccttgaagagccagacaaaaaacttgtcctcaaatggaaaagggtgatctacccttgcctaggaaggcttccgtggttgcatatgtgaagggagactcacatgtgctcacggtggaccttcgaaaccgccangtggtgagccaggaagccatacctgttcggtctcggttaccccacatgaccctagggacatgtgggagt

SEQ ID NO: 12952 - DNA, 510 bp, Glycine max
  Clone ID: jC-gmfl02220143d04d1
atctatatattttttcttatacataagaattaaacgtggtatcaaaaggttttacaatatttatacattctgtttaatcaacagaactagaccctctttactttaagttaggtttaaagttcagtttgggcatcatcatttgctacatgcataaataaagcatgtatctaattagactaaaaaccaactgatgggatctcaagctgaatcacgagccttgcaaacaggtaaatcatcttcgaaattgggagggactccaaggattggatttctctcaagaaattagcaggcttcaaatcaaaacttgatgatacagtaggcatgacaggatagtcctcttgacagggtatatgatggaaccctattgtgtaccacaaaacaatgtctttattctcaattggacgatccctgttggaccagacttgaagagtatcatcccctttgctctggtaagcaaataaaccaccagcccattgctcacttttgttgtaaggagtaacccatatttga

SEQ ID NO: 12953 - DNA, 464 bp, Glycine max
  unsure (1)..(464): unsure at all n locations
  Clone ID: jC-gmfl02220143d05a1
gccgtcccgcctgagcgtatatttctgttgacgtcggatntcacgttgcagggtcacatccacagcgcccggaactcggcttgtggctctagaattggacctcttcacgttttggacttttgccttcctgctacataaacaggcattacacatttctagggtcctctcacacaccaggactatcctaagccgaagcccgttcatagaatcctgctgccgagcacccaagacccagccctctgcgtgtcatacctgtccgtctacacctgcagcatgcaacaggaccctgaccaactgggtcagacaggacactacctctacctgaaccgcacccaagccaccaaaaccttcgcggctaactgcaacaagattcaaaggcctgaaacccagagagcacgctgcactcaaggactgcgccgaggaaatcagcgacagcgatgaccgcctcagacggtcactgaatg

SEQ ID NO: 12954 - DNA, 674 bp, Glycine max
  Clone ID: jC-gmfl02220143d05d1
gctcttgtgtgccggctttcttttgagcttgtatgccaatacccgatagaagcgtataccagtcggcggccgcccttttttttttttttttttttttttttttttataattactcacatatataataattacatggagcacgtaaaagaagaaaagtaaagcattaagcaaccaagatcattgttcccaactagtgttgtgcagcatagtggttaataagcgagagagcattgctagtaacctgagcaacattgagcatcctagccctaatagagtccttgatcttcccattcagcgccttcccggagaatccatcgccgcaagtgctctcatcggtcaaagcagaactgacccatgtctccacgttgctaatgtgccacgtgaagtcctcacccttaaccttacataacttgagctccttcagcgaccggctgaggcggtcaacgctgtcgctgatttcctcggcgcagtccttgagtgcagcgtgctctctgggtttcaggcctctgaatttgttgcagttagccacgaaggttttggtggcttgggtgcggttcaaggagagggagagtgctgtctgaaccagttggtgagggtcctgttggatgctggaagcgtaaacggagagggatgagacgcatagggcttggtactgggtgctgctgcaggaggat

SEQ ID NO: 12955 - DNA, 570 bp, Glycine max
  unsure (1)..(570): unsure at all n locations
  Clone ID: jC-gmfl02220143d06a1
gctgtcaaggcttatggaattcacctgggaactgaaatgtgcaaaaagattttagctcatggaattaatacattgcatctttatacactaaatatggagaaatcggcattagcgatactaatgaaccttggcctaattgaagagaccaaagtttctaggtccttaccttggagacgccctgcaaatgttttccgtgttaaagaagatgtccgtccaatcttttgggcaaatcgtccaaaaagctacatatcaaggacaataggatgggatcaatacccacacgggcgttggggtgattcctgtaatccatcatatggtgcattatctgattatcagttcatgcggccacgtgcacgggacaagaagcttgttgaagaatgggcagttcccttgaaagcattgaagatatatatgagaggtttagactgtattgtctggaaagttgagagcaatcctggtcagactagatggtcttcagccgagacaagatataaagagctgtgganagattacacaagggcttctcacatcatagccagcactgtcatgggaaaagcagatctctactgt

SEQ ID NO: 12956 - DNA, 648 bp, Glycine max
  Clone ID: jC-gmfl02220143d06d1
ggccctaggtgacgaatcattgaacagtactgaaagcacatacccgttaaacccgcataccagtcggcggccgctcttttttttttttttttaaaatataactttcaagatttcgatattctactttcacagttaggaaacgtcgaattcaaaggaaggagtaacttgtccttaagtcaacgtacaggttactcatgcgactcagaagaatgaaaaaataaagatgtttgggacaaagcccagaaaaataatttggtacttcaacttagaaccacgtgtaatatgaaccatcctactgagaagaaaacaaaagaaaggaaaggaacatgacaacgaacagaagtgacataactaaagaactaataaataataagctcatgtcagaaatctgcaaagacggtgaaaagatcaccattgatgtaatcattgtcgaccaaactcaccaagaagtagctgcccccaacctcttcaaccaatttcctggatgcatcaccctcagggtacaagcttgcccatcctcttgaccaaatttcaaatgcctcatccttccatacattgaagctgacaggatcaacaatggttggttgaattatctccttagctgggaagacaccccatgtcacagcattaacatcagtttgacccaca

SEQ ID NO: 12957 - DNA, 487 bp, Glycine max
  Clone ID: jC-gmfl02220143d07a1
cgagaagagacgaaaactttcgtgacatttttgcccctcacactttcccgtggggactccaggcccctcactaccttgttccttcataaaaacaacacttcctcctcttgcattcggcaaccaaaccatgcagcgcacggcgacggcgacagatgaaccacggcggcgctccggcgacgcggagggggagaaggcgttcaaggggagcgaggtgatcggtgacacgtcaccaaattacttgaagaccatttcggccctggcgttgcggctcggaaccattcattacaacgacgagtcggagctcttcgcaatcttcttcctctctctccacaaagcactattgcttttcggttagcttttcgtgctcacgggaattcctgctgatgaaaagagcaaattcggtcgaaaattatccaggtacatatgcaagcacgtgtgcgcttacttttccatcacgctccatgtggaggacatgaaagcctttcat

SEQ ID NO: 12958 - DNA, 459 bp, Glycine max
  Clone ID: jC-gmfl02220143d07d1
tctttttttttttttttctttctgtgccttttacgtttaatgcaacctaacataacgacatgggacgggtgcagttgtattatcggcaataactcttggctgcacttgcatcatctctacaacagcaacttcttggcctggctctattctttctggatgaacattctgctctagagcagctgctgaatggactggttctatctttcctggatgaactttacgctctaaagcagcagccgctgcctgactccgtagggattcattctctgattgcagattagctatctgatccttgaggatttcgaactcttcaaagagaacctcattttttgattcttccaaagccttctggcatagaacctggttctcggactcaaggcttgacaaactcaaatctaatcgttcattagactcctgaagttgtgtcgctttaagctgtgctgcttctgcctctttcag

SEQ ID NO: 12959 - DNA, 480 bp, Glycine max
  Clone ID: jC-gmfl02220143d08a1
attgactcttccttcggtttcatctccgctgctccagctcctccactgcaagtgtcaagagagagagtgtgcgtgtgtgagtgaatttcgaaaccccaacctgtctttctctctcttccaccaagtgacacagatcagtgggcttatacatacatacatacagggaccccaacagccctttcccttttagttttatctgcttcgcctatggactgcctttctatctgcaactgaatataacactgctcaactctcatacacttcaatcccatgatattggccacctttcccttattgacagcactactacttccttattcaacagacaccaattccagctgctcttttcaggcttcggaatcaatcaatgccgtgttgctagatacctgcctgctgtagctaccctacgaacagcctttacacataattggcaatagacatagaacagcgcgtcccagatttttattttacacgattctc

SEQ ID NO: 12960 - DNA, 534 bp, Glycine max
  Clone ID: jC-gmfl02220143d08d1
tacttttttaattttttactttttaatttttaaaccccagaaacaaccccaggggccccgggcaaatttaatacccgacatcccttcttggggcaaaaaaaaaaaaaacccaaaaaaaaaacggcaacaaattttctttccttcaaacaccacaaccttttaattggggaacagccctctaccccccaaaatcaaataaaaaaccaatcttaaaaaacagggaaaaaaaaaaactcccaaaaaaaggaaaaaaaaacaaccaaaccggggactacttaaaaaaaaagggcccccccaccccctggctccaccaaaacaaaaattccggagtacttgacacgcggaaccccaaccccgtcccccagaccaactacattggctgcaaccccaccggcaaaaccccccggaaaacctaaaaaaaggccccccccgaaaaatctcaccccggataacccccaaccccatccggggaaaaaacctgcacccccccccaaaggaaaaaaccccaaaaagttcccctaaaaaaaatgcccc

SEQ ID NO: 12961 - DNA, 317 bp, Glycine max
  Clone ID: jC-gmfl02220143d09a1
tgtagtaataaactgacattttgaatggtttttcacacagagcacctaaaagggccagggggggcaacacaaaaccgggcaaggggggtgaacgcaaaacggccagaggactacgaaagggaagaccaggacccccccaatagggtgacatgacccccgaccagaaggtgacctgctcacaagcaacattacccgactacaaaagaaaaggtagcagcgctcccagaaaaaaaaagggcccgaactgacacgaaaaagagggcagacaaaccgagggacgggcgccaaacaccgcgccgaccggagaaccccacagg

SEQ ID NO: 12962 - DNA, 527 bp, Glycine max
  Clone ID: jC-gmfl02220143d09d1
ctcaacgggaactgggtcccggtataacttatctgttcgctcgtcgggtgcatacaaatatgctcgggtttcaggaatggaaattgctcccctgatatccaaagcattaattctccgggtgggtcacagttatgaacaaatgtggcgctttacatgacaaaccctaaccaccatccaccatgcagggacccaagttcaaagaaacagtcagaattcatttcattgcaaaaagaaattacccaagtatcataatccattcatttcagggggaaaaaaggattacttcaggatcaacctactgcgggtaaagctaatctaagttctcagaggtgaggtgagttcaccaaccaccgccagaatttccagacccccatccgttcccagatgctgctttctttgtggcagatccccagccagagcttccttgttcaccatcacttggaccagcaccaccacttgcttgttcccagccaccattggcactggaactagctccaccttcaccggttcaccaacaccccaacccc

SEQ ID NO: 12963 - DNA, 519 bp, Glycine max
  Clone ID: jC-gmfl02220143d10a1
gaggccattatagaacacgcattcatgagtaaaaacaaagggggcaccaaaaacagcgcatatcattatcaaatgtttgaacatgaacacgaacacgaaacactaacataaaaatccagccaacaaaactggaacaagatgatagtttgtatctagctattaagataatcaatgtatcaagcgcgatcacaaattcaccggattaaaaaaaaaattcctcaaaagacacggtaagatttccccattgtactcttcagatacaagcacctgacattttgccagttctttttcaacaaagagacaaggaaattaacactcagttgaacattttggaagatttgcttttcctccatactaacattccccacagctactcccatgcagagcaccttcttaagttgaaatttaaccatggccttggactcgttaacctttgactcaagagtttcctggtgaggaacaagtgtagggaactttcctgccttgttgagaccaggacccaaaagacgaggaatctgc

SEQ ID NO: 12964 - DNA, 430 bp, Glycine max
  Clone ID: jC-gmfl02220143d10d1
gggtcttgggtttttttttaaaaaaaaaccgggccccttattttcatttataaaaaaggcaaatataagggatacataaaaaaccccgcttgctaataacacctaggcaactgaacccaacacatgaaatccccacaaagggtaaaacataaaacgtacaaaagcccaaagggaaggacttttattaaatcatggcccttaaaaaaaactaaaaacccccagggggcctgcaaacgatccatctggcattactattaattaagcaaaaaactccttaaaaggcttggccacaaatttagccttttgaccaaattcttgcaaatgcttttaattctcaagggcccgcaaaagcttttccttaaccagctttttaatccttgcaattcaaaagtccctggtaaaattccccctggacatttcaacaaaaggg

SEQ ID NO: 12965 - DNA, 486 bp, Glycine max
  unsure (1)..(486): unsure at all n locations
  Clone ID: jC-gmfl02220143d11a1
attacagttgaatcaacactgatttaggtatgtaatgcttcaagatgctatgacatatattctagtttgaaacccagattcaagacacctagtgtcaacttcatgtatgatttatgatgataaataatttttccttgtgccttgnataaaaacttattgatagagggagtaaatattagacctacacaaggttattatttaaaactacccaaaaaagaaggagaaagagaaataagaaaaaaaaacaaaaaagggggggggcccccttttagggagctgtagccccgggaaaaaatttccgccccgtcccccgagggggccccgtttttccttttagggagtcgaaaaaaaggtgggggaaactagggaaaaacttgttcccgggggaaaatggttatcggtccacatttccccaaaaattaataccggaaagaaaaaagggaaaacccggggggcccctaggggggggctccttcccatttttgg

SEQ ID NO: 12966 - DNA, 337 bp, Glycine max
  Clone ID: jC-gmfl02220143d11d1
atatgggaagtctaatgcatacgtgacaggccaatatagctttacatcggatcatgttttctccttactacatttgcgaaaaattggccctagaaactcactgcacaaatccctatatcacattcaccaccaaaattgggtaggaaaaaaaaaaacctgtgtagggcgaatattgacgccctctatcaataagtaaatataacttatataagtaaaaaatgataagaggatcaacccctcaacccagaatcctctgcagaatgaaaaatgaactgtaagaggttgagaaggaaaggtaaaagagaattattgctggtgaatgttacacagaagcaac

SEQ ID NO: 12967 - DNA, 485 bp, Glycine max
  unsure (1)..(485): unsure at all n locations
  Clone ID: jC-gmfl02220143d12a1
attacagttgaatcaacactgatttaggtttgtaatgcttcaagatgctatgacatatattctagtttgaaacccagattcaagacacctagtgtcaacttcatgtatgatttatgatgataaataatttttccttgtgccttgcnaaaaaaaccaangncaaaaaaaaaacaaaaaaaaaaaaaaaaaaacaaaaaaaaaaaagaaaaaaaaaaaaaaaaaaaaaaaataaaaaaaaaaaaaaaaaaaagggggggggcccccccttaggggcttcccccccccggaaaaaaattccgcccgggcccctgggggggccccagttttcctttaaggggggcgaataaaacctgggctaaaacggggccaaaagtgttcccgggggaaaatggttttccctaaacaatcccccaaaaaatcaagccggaaagcttaaagggtaaacccggggggccccaagggggggcccaccccccttaattggg

SEQ ID NO: 12968 - DNA, 533 bp, Glycine max
  Clone ID: jC-gmfl02220143d12d1
aggcaactagtgtttagaaattttatatttctactatatccagggaacaagaaattaaaatccattgaagaataattaaaatataaaaaaaatcataaacttcgtactactatcactaaacaaatatctaatcatccaaagcaagctcatccgcagacttatgatgattcaccttggcccacccaaccccgcgcggcacgtgcaacgcctcaaccaccgtggccgacgccatctccatctggcaaaccctaatcgcaccgatcaaccgctccggcaactcatcctccgcctgtgcctccaccacaaaccccatatcgatcgtcaccgtcgtcacgcaccccaacgcgaggtgcagaatcgcgttcgcgatcgcgctgcttccgatatcgacgtcaatttcgaggtaattcgaacctttgtagtaagcgcaattcaacgctttccctaacaagcacgcgctgtggctccccacggccttcttcacgatccacgggcccttcgcgatccggttcaccagcttgaaccgctggttc

SEQ ID NO: 12969 - DNA, 597 bp, Glycine max
  Clone ID: jC-gmfl02220143e01a1
tcgagctctgcgagatcttcattcttcgattttaaaagatgagtaagcttcagagtgatgctttgcgtgaagccatttcaggaatcatggccgattccaaggagaagaatcgcaaatttgtggagaccatcgaactccaaatcgggttgaaaaactacgatccacagaaggacaagcgtttcagtggctctgtcaagctgccccacatccctcgccccaagatgaaaatttgcatgcttggtgatgctcatcatgttgaagaggcggagaagataggactggactggatggatgtggaagccctgaagaagctaaacaaaaataagaagttggtgaagaaactagctaaaaagtaccatgcctttttagcttctgaagcagtcattaagcagattcctcgtcttttgggtcctggtctcaacaaggcaggaaagttccctacacttgttactcaccaggaaactcttgagtcaaaggttaacgagtccaggcgcatgttaaatttcaactatgaggtgctctgctgggagagctgtggggatgtagtatgaggaaaagcaatcttcaaatgtcactgagtgtattccctgctcttgt

SEQ ID NO: 12970 - DNA, 472 bp, Glycine max
  Clone ID: jC-gmfl02220143e01d1
gcgagcggccgccctggctcggcactccttgctcttatttctccgcctctaccaacgccctggacaccggggcgatggcagtggccgggcaccacgccgacgacggcccgatccgtcaggtgctgccagaagctggcgaagcggcccaggaggacaacctgctggacgcctagcaccaatccgggagctgcaaggtcgtggtggccatgacctaggcctacaaagcggagcacggatgatccgccaagcgtgttcaacacaacgcacgcagagcgcagcctgaacgccaagctcggcccctcccacgaacacggcgtgaccaaattatgcgcactgactccgggcgacttaagccgtccgaatgttggccgcgagccaattgggtttccgaaggacgcccaaaacgcgcacatgcaacccacccaagatagagccatggaacccgataggcgagacaaaggagccgtccctt

SEQ ID NO: 12971 - DNA, 588 bp, Glycine max
  unsure (1)..(588): unsure at all n locations
  Clone ID: jC-gmfl02220143e02a1
tcgagctctgcgagatcttcattctccgattttaaaagatgagtaagcttcagagtgatgctttgcgtgaagccatttcaggaatcatggccgattccaaggagaagaatcgcaaatttgtggagaccatcgaactccaaatcgggttgaaaaactacgatccacagaaggacaagcgtttcagtggctctgtcaagctgccccacatccctcgccccaagatgaaaatttgcatgcttggtgatgctcagcatgttgaagaggcggagaagataggactggactggatggatgtggaagccctgaagaagctaaacaaaaataagaagttggtgaagaaactagctaaaaagtaccatgcctttttagcttctgaagcagtcattaagcagattcctcgtcttttgggtcctggtctcaacaaggcaggaaagttccctacacttgttactcaccaggaaactcttgagtcaaaggttaacgagtccaaggccatggttaaatntcaacttaagaggtgctctgcatgggagtagctgtgnggaatgttagtatggaggaaaagcaaatcttccaaaatgttcactg

SEQ ID NO: 12972 - DNA, 571 bp, Glycine max
  Clone ID: jC-gmfl02220143e02d1
actaaatctcattcttcatctgcagctatttggattgctgattattgttaactgatattggtgcttttctttgagaaagtgtgtacactttttggataagagaaaacaagagaggtgacattggaagctaactcagagagaggcaaagatgttgggaattttcaagcagaagttggttaatgcacccaaggagctgaacagtccagcttctttgaattcatgcattaagcctaagctaagtcatgaaatcctgaaggatttcatgtcctgcaattcctccaatgctttctcaatgtgctttgggaatgatgctttgctagcctattccacttcatacaagccctccattaatcataggttattctctggattggataacatatactgtgttttcctgggtggcctgcacaaccttagcatgctcaacaagcagtatggactatcaaagggaacaaatgaggccatgtttatcattgaagcatatcgtacacttcgcgacaggggtccataccctgctgatcaagtcctcaaagaacttgaaggcagttttgcatttggatctatgacaaca

SEQ ID NO: 12973 - DNA, 554 bp, Glycine max
  Clone ID: jC-gmfl02220143e03a1
caaggttccttttctgaattttgattagaacacaattcaagaaaacaagccatttactgacatgcaattagcaaagagtgtcagctcaggaagtttgagctcaatggactggatgcgtggagctgcaatgaagcctgctttcattgatatctctgcaatagatttcaatgcagattatggcatgcggagatcatttagtgaaggagatataaagactcttggtaatggtaacatgaacatcgtccaatcaccccttgagaggccccttcttatcagcaactgcaccagtgaggaacgcttccaaaagctctccagatacaggaataagaagacaaagaggaattttgggaggaaaatcaagtatgcttgcaggaaggcacttgctgacagtcagccaagaatccgtggaagatttgcaaggactgaagaatctgatgtcaagagggaatgaatgacttaaaactgatttagtaggaagaaaatagagttgagtagctatatctgatcaagctatatggaaaaactcagcagtaatatgtgattagaacttatgt

SEQ ID NO: 12974 - DNA, 515 bp, Glycine max
  unsure (1)..(515): unsure at all n locations
  Clone ID: jC-gmfl02220143e03d1
agccctcacacctggcgctttacgattagagcctatcaacncatgcccgttacacccaaaactcgtcggcggccgccctctttttttttttttttttctttttttttatcttttttttttattttatttcctccacgggctctggttctacatttattttcttttcaaacaaaaaaataaaaacccaataaaaacccaaaactccctttcccaaaccaactatatgggcccaccccaatctactgaacaattaaaaaccaaatccccccctttttatttttatgccattttccaacaaacccttctcccaacatggaaagtttcccccgacctataaacccgaaatcccctaaaaaacaaagaacccaccctaaaaacttgcgggcccggtttttccacaaaaattttagtaaaacaaccaggaacccccccaataagacctaaccccctattacggcagattcttcccaaaagccctgaacaaatataacccccgacctttattttcccccccc

SEQ ID NO: 12975 - DNA, 564 bp, Glycine max
  Clone ID: jC-gmfl02220143e04a1
caaggttccttttctgaacattgattagaacacaattcaagaaaacaagccatttactgacatgcaattagcaaagagtgtcagctcaggaagtttgagctcaatggactggatgcgtggagctgcaatgaagcctgctttcattgatatctctgcaatagatttcaatgcagattatggcatgcggagatcatttagtgaaggagatataaagactcttggtaatggtaacatgaacatcgtccaatcaccccttgagaggccccttcttatcagcaactgcaccagtgaggaacgcttccaaaagctctccagatacaggaataagaagacaaagaggaattttgggaggaaaatcaagtatgcttgcaggaaggcacttgctgacagtcagccaagaatccgtggaagatttgcaggactgaagaatctgatgtcaagagggaatgaatgacttaaaactgatttagtaggacgaaactagagttgagtagctatatctgatcaagctatatggaaaaactcagcagtaatatgtgattagaacttatgtggggagtctct

SEQ ID NO: 12976 - DNA, 577 bp, Glycine max
  Clone ID: jC-gmfl02220143e04d1
agcaccatcacctgaccgctcctgcactcgctctgcaggcaaatgccagtacacccaatacccgtcggcggccgccctttttttttttttttttttccttttttatatcattttttttttttttttttttttttcgggcttttggtttttttttttttcttttttgaaaaaaaaaaaaaaaaccaaaaaaaaacctaaaactgcccttccccacccaaatattgggggcaccccggcacaccaccatgcatagaccaataccccccccctttttttcctttcccattttccaacaaacctttttcccaaccgggacgggatcccccccccaaaagacccgtacccccaaaacaacaacagcaccccccccaaaaacttgggggcccggtttatcccccaaaatttggccacaacaaccagagcccccccccaaaagtcctaaccccacataaccgcgggggcttcccaacaacccggaccccaaataccccccccaccgattttcctcccaccaaaaaccaggcaaacgattacttcccccttggacaacaaaaccttaaccccttggaaaatcccc

SEQ ID NO: 12977 - DNA, 562 bp, Glycine max
  unsure (1)..(562): unsure at all n locations
  Clone ID: jC-gmfl02220143e05a1
gacacgtggtaccctagttagagttccattctgtggtttctttctttctttctttctgcatcacatcacaatttgcattgcctcgtgtcctttttcttctttgctctccaaaaatctcacacacacaggtatctagcanatgggttctcaccaacaagaaccatggctattggagaatgggaaaccaagggttttgaccaaggagaccaggcatggccgttctgcacacagaatgtcctccacctctttgcgcaagaaatctagccgaactcttgtctcaaaggttccatgtgccactctcagaaactttctttcaaatttgcaagaggttattcttggcaccaagctttccattctcatccctgctattccagctgccatcgttgctgagtgctttggctttggaagaccttggatttttatattaagcttacttggacttacaccacttgctgaacgtgtgagcttcattacagaacaatttgccttttacactggtcccacagttggaggacttcttgatgctacatgtgngaatgttactgagctcattatagcaata

SEQ ID NO: 12978 - DNA, 674 bp, Glycine max
  unsure (1)..(674): unsure at all n locations
  Clone ID: jC-gmfl02220143e05d1
gccctctaattgacgcttctacncagagctgtatgtaaataagaggtaaatgcgcacaccagacagaggccgacctgacatttttttttataaattaaaattttttaaattttgatttcccacgatacctagtggagatatatagtaacacaataaatacaagagattctgcaaactgaaaaagggattcttactaaagcaaactcaaacaagaacaacttccactcatttggcatctaccgtagtaacacaagatcaaaagcagcttctctgatagaacacacgtacgtatgattcaacatctttcacagtagtggttcatttctaacagctagctattgcaacttaaaataattgcaatgcttctgcaaagtgctaactttttttcccccccttctttatggatatgacaatgtgatcagaatgaaacaataaccaatccattgaatttgaatctgattttgggtttggatcgataccaccattcttcatctcaggaaaggacaagaaataggccaaagcctactaattaagcgcttaaaactgcattagtggctggtttaagtgtgatgttagtaacatcagcttggatattaaagggtgttctttgtacgaagaagcatgccccaataacaatgtagcacagcatgagaacaaggccttcatgtagtgag

SEQ ID NO: 12979 - DNA, 431 bp, Glycine max
  Clone ID: jC-gmfl02220143e06a1
gactcatggtaccctatttgtagttctatcctgtggtttattactttatgtctttgtgcatgacatcagaattcgcactgaactggaaaccttggacttgtatgctctgcaactgtgtcactcacacaggtatttgaccaaatggcttacaaccaacaagaaccatgggtattggagagtgggaacaccaagggttatgaccactgagaccaggcttggccactctgaacacagaaagtgctccacctgtaggcgcatgaaatcaagccgagctcttgtatcacaggctgcatgagccactctgagaaactgacttgcacattggcactgggctcttcttggaaacacgctctgcattctcatccctgcttgtccaggtgacatcggtgctgagtggattgactttggcggaccgtgcacctatatatgaa

SEQ ID NO: 12980 - DNA, 547 bp, Glycine max
  unsure (1)..(547): unsure at all n locations
  Clone ID: jC-gmfl02220143e06d1
gggcccctctgacgaatttcagcangtactagatgttaaatacccggtacagacgcgcataccagtcggcggccgcccttttttttttttttttaaattaaaattttttaattttttatttcccacgagacctattggaatatggagtaacacagtaaatacaagatattctgcaaactgaaaaagggattcttactaaagcacactcaaacaagagcaacttccactcattaggcatctaccgtagtaacacaagatcaaaagcaggttctctgatagaacacacgtacgtatgattcaacatcattcacagcagtggtacatttgtaacagctcgctattgcaacttaaaataactgcaatgcttctgcacagggctaacttttgttcccccccttctttatggatatgacaatgcgatcagactgaaccaataaccaatccatcgaagtagaatctgattttgggtttggatcgataccaccatgcttcatcttaggaaaggacaagaaataggccaaagcctactaattaagcgcctaaaact

SEQ ID NO: 12981 - DNA, 358 bp, Glycine max
  Clone ID: jC-gmfl02220143e07a1
ctagatttgaggagcctcttgaaaattattttcaggatgcctattgacttgagatgaaactgttcctttatgaagcaaagcaacagacagatgctatcaggtgaacggaccttcttgaacgtgtagttaacgctctccctcacacaacttgcatgagacatggagggggatgaacccaccttaaggactatcttgatgacatacaagctcaagacacatgctgatgatagtgaagggtaaactacatccactgccgatttaaagtattatattggggatgactcggaccatgttatggtgccttagcctgccaaccgggatcgggacaacgtcatgagtctaattggcaagctcgacc

SEQ ID NO: 12982 - DNA, 657 bp, Glycine max
  unsure (1)..(657): unsure at all n locations
  Clone ID: jC-gmfl02220143e07d1
ggacacagtgtgtcctctttcattccngtactatgttgtatataaangttaaaggcgactaccngtcggcggccgctcttgatttaaggttttttgttttgactttttcatttgaacaaganaaaccgaagcgacggggcgggggtcagctctaaacaaattcatttatacgatgaaccggtttataaatttgttaaattggaaccgttctaaaaaactaacgagtcgcacactaagcatagcaatactatcaatatgaaatgattcatttcattttttagtcgattcaatcttataaaattgatcattttggagaaataaaaatcgagtaatttttcattttttgttttctaaaaaaaaatatagcacatttaagataaaatatagcacatttaagataaagaataatatatttttctttatttagaaaatatccaaactttgatccctaaaaccccataaatagttcgaactgtatagcaacaataatcgattttcgctcgaatggtttgtagaggaactctaccttctctgatccattcaacacgtgcaatttcttttccgtcgatacgtcctgcaatttgtacttgaacctcttttgtacccgcctgttcagttaattcaatagcttttttcattgctttacgaaacgaaact

SEQ ID NO: 12983 - DNA, 559 bp, Glycine max
  Clone ID: jC-gmfl02220143e08a1
aaagttctggactgtcacctttgcttcctttatataccagatagggatgattagtttgaccctatcggcagtgctaccacagtttaggccacctccctgcaagggtgaagaggtgtgccagcaagcaagtgcaggacagctggcaatcctctacatctcactcctcctcggggcactcgggtcgggtgggatccgaccctgcatcgtggcgttcggggcggatcagttcgacgagtctgatcccaagcagacaacaaggacatggacctacttcaactggtactactttgtcatgggtgtagcaattcttgtggctgtgactgttttggtgtatattcaggacaatattggttggggaattggccttggaatccctaccattgcaatgttcctctcaattattgcattcattgtcggatacccgctttaccgtaacttgaacccgtccgggagcccgtttacccggttagtgcaagtggctgtggctgcatttcgtaagagaaaggtcccaaatgtgtcacaccctagtttactctaccaaaatgatgaactagatgcc

SEQ ID NO: 12984 - DNA, 592 bp, Glycine max
  Clone ID: jC-gmfl02220143e08d1
tctttttttttttttttttgtttttactttctctttagatctagataatccgaagcgatgcgttggttattagttcttttttaattcatttatacgatgaaccggtttataaatttgttaaattggaaccgttctaaaaaactaacgagtcgcacactaagcatagcaatactatcaatatgaaatgattcatttcattttttagtcgattcaatcttataaaattgatcattttggagaaataaaaatcgagtaatttttcattttttgttttctaaaaaaaaatatagcacatttaagataaaatatagcacatttaagataaagaataatatatttttctttatttagaaaatatccaaactttgatccctaaaaccccataaatagttcgaactgtatagcaacaataatcgattttcgctcgaatggtttgtagaggaactctaccttctctgatccattcaacacgtgcaatttcttttccgtcgatacgtcctgcaatttgtacttgaactccttttgtacccgcctgttcagttaattcaatagcttttttcattgctttacgaaacgaaactctattctttaa

SEQ ID NO: 12985 - DNA, 429 bp, Glycine max
  Clone ID: jC-gmfl02220143e09a1
aaaaaccccaaattttttcccaaaaataaaaggccccccccccaatcaaaaaaataaagggggaaaagggggacccccccaattggggggaccccacccataaccaaaacccccccttcccaagaaaaacccccccgaaaaaggggctttcaaaatttttgcccccccccattttctaatcaaaccgcccccttgaaccccggggacaaaaacaacaaaacacctttgaaccccgggggaaggaaatatgaaccctttcggggcctccccctattgtcttgaattccaaagggggggtctccaaagccttcccccctttttattgggggccggatatgcaaaaccgcccgcccttttacccattttgggggacgccaaaagaagggcccctccgggggggggacaaccccccgggtatgaggggccccc

SEQ ID NO: 12986 - DNA, 591 bp, Glycine max
  Clone ID: jC-gmfl02220143e09d1
ttctttttttttttttttaaaattttggattctctacgcagacaactaaccagcggtaacaggggccgttttttagaaaagaaaacacaggtatgtaaatgacataatgcaataaatagaattccgtattacactttaaacaattatttagtcgaataataaataactgagcggtggcgtctagcaagcagaaagcaaaaataagtttagaaaacaattaattagtaaattgcaggcaatagagaagcatctacatctttcaccattattctttataatcaacctcactaccttatattatatacacgttttcaatgtcagcaatctttggccagtcttcgcctccgggttcccggcaacgttgattgagcaacggacaatagtaagtcctcaaagttgaaatggatttgggcagaccctcctctggtaagcattggagcctggggcagttagtaagaaacaatgtcttgagagaggagaggtggcagagacctttgtagtccaggctttttagatctggacagttcctgatctctagacaaacaagagagtgtggcagtacaccttcgtcaggaagacactaacatccac

SEQ ID NO: 12987 - DNA, 414 bp, Glycine max
  Clone ID: jC-gmfl02220143e10d1
cacagaatgctaaaaattgtgtctcggggtgataaatgtatacatgacaaagaacttcaaaaatgtaaagaggcaatgaatcagtcacccataacatacgacaataggtaacaacaacaaaaaattactaaaatacaacgtataccattcttgtaaagtagctagacagtaaatacaataaatgcactaaaatcaaggaaatgtgctgcagaatccagactccagatatagtcacacctaaatgtttgctgcaaaattcttaactagaagctcatttgaaggttcccataccgacaccagtctcgccgccagcataaggttggaagctttcccttgcccttgagtagttgatatagtagaattcagagattatggcagtgaagaaaacaggaccatcttcggggagaatcctcc

SEQ ID NO: 12988 - DNA, 317 bp, Glycine max
  Clone ID: jC-gmfl02220143e11a1
ggtacagacgaatcaacactgagtgagttttgaaaagttgcaagatgctatgacatatatggtagtttgaaacccagattcaagacacctagagccaactacaagtatgattgaggctgatgaataacatttccttgggcctcgaaagaaaaaccactgcagcgaagtacaaggaggaaaacaaccccacagcatagtgagaggaggaaaaaacagagggaacaacaaagagtaaacacaacaaaaaaagaaatggggggggcccaaaacatcctctatcatggctgcggggataatgaagggcctggacccggaag

SEQ ID NO: 12989 - DNA, 617 bp, Glycine max
  Clone ID: jC-gmfl02220143e11d1
tctttttttttttttttagagtttccaatttcagattttattagattgaaaagcgtaactggacattgatagaaacagtaaatcctttatctgatgaacagagttaccacccctacaatccccattccagtgatgactccccgtgccaattcaattacattgcccctcatgcataccttttacagtctccactaatcatcatatagcatctcaccagcagaaaggaaagtctactgtctggctgcgacaactggcccttccacctgatatatcatctcaccaatttgaaaatcagtaaaagtaattggaagtggagagctgaatacacaagattatgcatgcaagaaatactggaaaccaagtggtatgaaaattaaacagaaattaattagattaaaagacaatagaagcgcttcctacatgtaaataaaggacattaagtgagcacgaggatgattccctgagattattacccaaatggaatttaattacaatcttggtggcatcctatatgactctagttttaaagatattctataggacaactaccatttggttcagtgaaatttcgttcacatgagttctaaggttaactttaaagactttgagaatttatg

SEQ ID NO: 12990 - DNA, 598 bp, Glycine max
  unsure (1)..(598): unsure at all n locations
  Clone ID: jC-gmfl02220143e12a1
gcccccccccaggccccccgtgcccccgggctgggaaaacctnnnatnntgtangncntccnggacaattacccgagcacggcaaacggctcgagggtatggctgccgctaggaggaaacagattccgaagcttgcgctctcgctcggtctcgctcagcaaatgggggatatgattgaagagttgatcagcaaagggcagcagcttgatgcggctcactttacatatgaagtgggtcttgggaaaagtccctcccgtccccttgttgaagcctttactcaaggatgctaagaaagatgcggcttctattttggaagatcctaacaatgcaggccgagctgcgtacctagctgcaaggaaagagcagtctgcactcagggctgtgattaaatgcattgaagaatacaaacttgaggatgagttcccaccagagaatctgaagaagcgacttgaccagttggagaaggtgaagacggtgaagaccgagaaaaggaaaccggctgctgttcctgccaataagagaactcgagcaagcaacagcaatggaggtccaatgccaccagccaaagctgggcgttagactaatgcatatgtatcat

SEQ ID NO: 12991 - DNA, 615 bp, Glycine max
  unsure (1)..(615): unsure at all n locations
  Clone ID: jC-gmfl02220143e12d1
gcaccgtagcctgagcntcttcgaataatntggggaaaccgccactgtcggggccgcccttttttttttttttttatataaatgtcgttcacattaagaaatctgtaaagtcgggtgagttcaatacccaacaatcaccgttaacttttgtgtgggctagttttttttgtcctcttgataacggatgtcagagccatggctatcctttgccttcaacttagaactcattaacacgaagacttcgggttcctaattaaagtggaagggaagaaataacgcgtgcgttattaataattttatttggtagtagtattactttgcttacgagaatgtatagaccacatggggacgaagaatctccctgaagccataacgcgaagaagagaatcaagtgcaatagaatcttaggtaatttgcttggactagttcgttgcttatctcatccagcaatttcccccatatcttctagtgaagaagaacccaaaaagtaaaggttacaaaaaatatagataaactctctttgccttttatttatatgtgctattctaaaaagagagccccaaaaagcatgtgttttactgctcctacatactatcatcagtgtgcatttgcgct

SEQ ID NO: 12992 - DNA, 589 bp, Glycine max
  Clone ID: jC-gmfl02220143f01a1
tcgagctctgcgagatcttcattcttcgattttaaaagatgagtaagcttcagagtgatgctttgcgtgaagccatttcaggaatcatggccgattccaaggagaagaatcgcaaatttgtggagaccatcgaactccaaatcgggttgaaaaactacgatccacagaaggacaagcgtttcagtggctctgtcaagctgccccacatccctcgccccaagatgaaaatttgcatgcttggtgatgctcagcatgttgaagaggcggagaagataggactggactggatggatgtggaagccctgaagaagctaaacaaaaataagaagttggtgaagaaactagctaaaaagtaccatgcctttttagcttctgaagcagtcattaagcagattcctcgtcttttgggtcctggtctcaacaaggcaggaaagttccctacacttgttactcaccaggaaactcttgagtcaaaggttaacgagtccaggccatggctaaatttcaacttatgaaagtgctctgctgggagtagctgtggggaatgctagtcatgaggaaaaagcaatcttccaaatgttcactgagt

SEQ ID NO: 12993 - DNA, 591 bp, Glycine max
  Clone ID: jC-gmfl02220143f01d1
gtgagactgaagagacccttgctgaaggttaaatcgttcaagtcacagttcgcagagtgcaagcccagaaagcaatatgcgggcttgaatctggaatgactggaatcctcttgaaagaagactatacagatgactggagagatataattgaattatctgataggctacatgaaggtgacatgctcacttgtaaaattaagtcaatccaaaagaataggtatcaagtcttccttgtatgtaaggatagtgaaatgagaagtaatcggttacagaataaccgtgatattgacccctattaccatgaagaccgaagctgttttcagagtgatcaagacaaagctaggaaagaaaaggagcttgcaaaaaagcatttcaagccaaggatgattgttcatccacgctttcagaacataactgcagatgaagcaatagagttcttgtctgacaaagatcctggagaaagtattatccgtcctagttcacgaggaccttcatatcttactttaactctcaaaattaatgatggagtatatgcccataaggatatagttgaaggtggaaagaacacaaggacattacaagcttactccg

SEQ ID NO: 12994 - DNA, 559 bp, Glycine max
  unsure (1)..(559): unsure at all n locations
  Clone ID: jC-gmfl02220143f02a1
gagaactcttatcattcttttttccacttgacattgccgacgccaccaaatacacaaccttaactttcccacaacactacccatccatcattcgttttctctctagattttttcagttagttattgctgtcttctttttgtgtgtgccaacaacacagaaagagagagaaagacatggctctgaaccaatcaaaggccgtgttgttgagggtgagtttggtggtggtggcgctgtgtatagcaggatacatagtgggtccccctctctactggcatttcgttgcagtgaacaaccactcttcatcttctacttgtgcaccctgcatctgcgattgctcttcacaacccattctttctattccacaaggacttagcaacacttccttcggagattgtgcaaagcctgacccagaagtgagtggagacactgaaaagaattttgctgagctattgacagaagaactcaagcttcaggagagccaagctgtggaaaaatcagcacgtgctgacatggcattgcttgaggcaaaanagattgcatctcagtattcagaggaag

SEQ ID NO: 12995 - DNA, 609 bp, Glycine max
  unsure (1)..(609): unsure at all n locations
  Clone ID: jC-gmfl02220143f02d1
gtgagactgaagagacccttgctgaaggttaaatcgttcaagtcacagttcgcagagtgcaagcccagaaagcaatatgcgggcttgaatctggaatgactggaatcctcttgaaagaagactatacagatgactggagagatataattgaattatctgataggctacatgaaggtgacatgctcacttgtaaaattaagtcaatccaaaagaataggtatcaagtcttccttgtatgtaaggatagtgaaatgagaagtaatcggttacagaataaccgtgatattgacccctattaccatgaagaccgaagctgttttcagagtgatcaagacaaagctaggaaagaaaaggagcttgcaaaaaagcatttcaagccaaggatgattgttcatccacgctttcagaacataactgcagatgaagcaatagagttcttgtctgacaaagatcctggagaaagtattatccgtcctagttcacgaggaccttcatatcttactttaactctcaaaattaatgatggagtatatgcccataaggatatagttgaaagtgggaaggaacancaggacattacaagcttactccgaattgggaagacactaa

SEQ ID NO: 12996 - DNA, 573 bp, Glycine max
  unsure (1)..(573): unsure at all n locations
  Clone ID: jC-gmfl02220143f03a1
caaggttccttttctgaatattgattagaacacaattcaagaaaacaagccatttactgacatgcaattagcaaagagtgtcagctcaggaagtttgagctcaatggactggatgcgtggagctgcaatgaagcctgctttcattgatatctctgcaatagatttcaatgcagattatggcatgcggagatcatttagtgaaggagatataaagactcttggtaatggtaacatgaacatcgtccaatcaccccttgagaggccccttcttatcagcaactgcaccagtgaggaacgcttccaaaagctctccagatacaggaataagaagacaaagaggaattttgggaggaaaatcaagtatgcttgcaggaaggcacttgctgacagtcagccaagaatccgtggaagatttgcaaggactgaagaatctgatgtcaagagggaatgaatgacttanaactgatttagtaggaagaaaatagagttgagtagctatatctgatcaagctatatggcaaaactcagcagtaatatgtgattaggacttattgtgngagtctctgtttgttg

SEQ ID NO: 12997 - DNA, 462 bp, Glycine max
  Clone ID: jC-gmfl02220143f03d1
agcacatccgcctgtccattccagttcccagcactccaccatcagctacccgttagacccacataccagtcggcggccgccctttttttttttttttttatcctttattttttcttttttttttctttctttttttctccgggccctggttttttttttttttccttttggaacaaaaaaaaaaaaaccaaaataaaacccaaaatggcccttccaaacccaaatattgggggccccccgggccaccccacatattagacccaagcccccccccttttttttccttcccatttttaaacaaaccctttccccaaccgggacgggtttcccccactaaaggaccgttacccccataacaaaaactggaccccccccaaaaacttggggccccggttaaacccccaaacaaacgcctaaacaaccagaaaccccccccaaaagcccaaaacccaaatcccgggg

SEQ ID NO: 12998 - DNA, 540 bp, Glycine max
  unsure (1)..(540): unsure at all n locations
  Clone ID: jC-gmfl02220143f04a1
acaacacataatcgcaaggcaccatcctcaaccccaacccaaatctccccgtctagtttctcttgatgtttttcgtggtctcaccgtcgcgcttatgatacttgttgatgatgctggcggactcattcctgcactcaatcattcaccatggaatggtttaacgctagctgattatgtcatgccatttttcctatttattgttggtgtttcgcttgcactcacatacaagaaactgtcttgcggagttgatgcatctaggaaagcaagtttacgggctctaaaacttcttgtgttaggccttttccttcaggaggttatttccattcgggtgaatgatctgacctatggagtggatttgaaacagataagatggatgggaatactacagagaattggggtagcatatttggttgccgcactgtgtgaaatttggctaagagtgatgatactgttaattcaggaccatcccttgttaggaagtatcggtaccagtgggctgtggctttgattctttctttcctttatctntgcttgctatat

SEQ ID NO: 12999 - DNA, 590 bp, Glycine max
  unsure (1)..(590): unsure at all n locations
  Clone ID: jC-gmfl02220143f04d1
gccccttctgcccatactgacgaactcgatatacatacccgttagacgcacataccagtcggcggccgccctttttttttttttttttgacatttcttttctaattttaacaataaattaaaaaatctaaggctaaattttacatcaatatcgtgtccaatggttactctcttgaaatcatttcaaggatatgaagtaaaagtacacattatattgcagtggtgctattataaacaaaagctgctttccatatatagaaaggttatgccatcaagagatatagcgaactctaaactatatccatcatccatgcaggtgacgtcatcaagagattagaggaatatgatacacccgttcttgttcttgatcaaaagattagctccaaaactcgggtaataatcaataaacaccgcgtggtagccaatttcttttacagtaaaacatgtctcactgtcttactgcatataatctttatccacgagcatgtgtatgtgcctctcttcaagtaccaactccaattaacttgagaatgttattgtgaggacttcccccaataaatcctntgaggaaaattggaaaaacattgcaag

SEQ ID NO: 13000 - DNA, 365 bp, Glycine max
  Clone ID: jC-gmfl02220143f05a1
gactcatggcaccctagttagagtttaaccctgtggtctcattctttatgtctgtgtgcatgacatcacaattcgcatagactgagagtcctttttctcactttggtatccaaaaatgtaacacacacagggctctaacaaatggcatatcaccaactagaaccatgtgtattggagaatgggaaaccatgggtcatgaccacggagaccaggcttggccgctctgacacagaatgtccttcaactatgtgcgcatgacagctagccggactcttgctcataggttccatgtgccactctgagaaactgacctgcacattggcatgacggtcttattgacgccagactctgcattctcatccctg

SEQ ID NO: 13001 - DNA, 527 bp, Glycine max
  unsure (1)..(527): unsure at all n locations
  Clone ID: jC-gmfl02220143f05d1
agcactccgccgcgaccgctctgatnccgagctgcatgtcaatacccgatacaaccaaaaccagtcggcggccgcccggttttttttttttttaaaccaaaatttttcaaattttgacaacccacaaaacccaaagggaaacggggtaacacaagaaacacaaaagacccggcaaacagaaaaagggatactcactaaagcacactcaagcaagaacaaccaccactgagaaggcaactaccgaagggacacaagaccaaaagcagcaccactgacagaacacacgcccgtatgacgcaccagaagacacagcagtggcacatttggaacagcacgctagagcaactcaaaacaacagcaacgctaaggacagggcaaaccattgagaccaccctacaagatggatatgacaccgcgaaccgacagaaccaataaccaacccatcgaagcagaaagagaatctgggtatggaccgacaccaccatgcatcatcgcaggaaaggacaagaaagaggccaaagactact

SEQ ID NO: 13002 - DNA, 534 bp, Glycine max
  Clone ID: jC-gmfl02220143f06a1
gtttatgctcctgtggattttgttgctatgaatgttgtcttgagtggaggagatccagattatgttgccctgctcccctcgggctttgctattcttcctgatgggcctcctgcattaaatggtgggcccatgcatgaagttggatctggaggttctctactcacagttggattccagatcttagttgattcagctccaaccgcaaagttatctctgggttcagtggccactgttaacagtttaattaagtgcacagttgaaaggatcaaagttgcagtcatacgtgacaacaacaacacctgatttcaattcagaactttcatatacatgtcagaagagcaaattaaggtagagaaagtaatgatcgagcttggcgtggtgcctatttcgtttccaaaacaagggcaagaagtcaatgaacgcacctcggagtatcacttaaacgtaggagtttgcagaacttcaggttcggtattgactttcacttatgacttgaagactaaaatggttccatccagctgtagtattttaact

SEQ ID NO: 13003 - DNA, 617 bp, Glycine max
  Clone ID: jC-gmfl02220143f06d1
ttcttctttttttttttttatctttctgtgatgaagtttacaatacaataggaaaagccagggtaaccacacttaggaaagtttgctcaagcctacaaatactactccaaaattctacgctaaaataaatagcgagtccgaaatttgcagtttttctaagttaaaatactacagctggatggaaccattttagtcttcaattcataagtgaaagtcaatacccgaacctaagattcttcaaactcctaacgttgaagtgatactccgaggtgcgttcattgacttcttgcccttgttttggaaacgaaataggcaccactccaagctcgatcattactttctctaccttaatttgctcttctgacatgtatatgaaagttctgaattgaaatcaggtgttgttgttgtcacgtatgactgcaactttgatcctttcaactgtgcacttaattaaactgttaacagtggccactgaacccagagataactttgcggttggagctgaatcaactaagatctggaatccaactgtgagtagagaacctccagatccaacttcatgcatgggcccaccatttaatgcacgaagcccatcaggaagaatgccaaacccgagg

SEQ ID NO: 13004 - DNA, 276 bp, Glycine max
  unsure (1)..(276): unsure at all n locations
  Clone ID: jC-gmfl02220143f07a1
tggcttgcnacgcctccatttttcccctttttcccccccggcccaagaaagaccaggcagggcacatatcaacgggagaaagccacccatagcaatatctcaagagggagatagatcgatggccatcgcgcacccgacaccgcaattgagggcagtcctgaacagaggcacgcccacccgcccgtgcaaaaatggcaacccgaaggtgtctgtagcgcccacccaacttgatggccagaacgggcccacagacacccccattgcccgggaatgccc

SEQ ID NO: 13005 - DNA, 668 bp, Glycine max
  unsure (1)..(668): unsure at all n locations
  Clone ID: jC-gmfl02220143f07d1
agatacactacctggcgacttccagcccnacgtagtctgtatggctacataccggtttaagacccgaataccagtcggcggccgccctttttttttttttttgtgtttagactttttcactttatctagaaaatccgaagcgatgcggagggggttaactctttttcaagtcatttatacgatgaaccggattataaatctgataaattggaaccgctctaaaaaactaacgagtcgcacactaagcatagcaatactatgaatacgaaatgatccattccatttcttagtcgattcaatcttataaaattgaccattctggagaaatcaaaatcgagcaatttttcattttctggttcctaaaaaagaatatagcacatttaagataaaatatagcacattcaagatacagaatgctatatggttctttattcagaaaatatccaaactttgatccctaaaaccccataaatagttcgaactgtatagcctcaataatcgattttcgctcgaatggtttgtagaggaactctaccttttgtgatccattcgacacgtgcaatttcctttccggcgatacgtcctgcaattcgtacttgaactccttctgtacccgcctgttcagctcaatcaatagcgtttttcattgctttacgaaacgaaactct

SEQ ID NO: 13006 - DNA, 410 bp, Glycine max
  Clone ID: jC-gmfl02220143f08a1
ggaaatggggggagcaacgtttgatctctttttatacgaaatggggctgattgacatcgcctccattgccgctgccccacagggtaggccccgcgccatccaccttgcatgggctaacctcattggtcaagccggacatcccgagaaacagataatggaaccggcgataaaaggaacgggtaatgtggggaacgcagccaacgaagcaggggtggagcccgagcaggccacctaatctgatcccacgctgacgccaaggactaagtggcccgctgacaagatctacggagacgagggtgggacggaccttgaatactgcactcaaaaggggtagaatcatgccattgcagagactctagcagagcaagcgggccgggacattgcgaaggagacaggaattgatgctgtca

SEQ ID NO: 13007 - DNA, 558 bp, Glycine max
  Clone ID: jC-gmfl02220143f08d1
tcttttttttttttttttttttttttcactatattatctgaatttaaaagaagcagttatcagcatatcttacagagttgcttccatctggaatttttttgtgaacagaacactaaggattttgaagtctcacccttttgtctggagtaaactaaagaaagcatcactaaaatctttcagaactagtagtccatataggttgaaatttctgtttcaattactttggcaaaacttcatttcagtgtatatatacaaacaagctactccaattcacctgtgtaccactagctagcgactcttctcttcctcaacttcttcaagcagtgcttgtagctctgcttctgttaaggactctaaccgcttctccatcactttgctttcataatcacgtagttgctgtgcatatgtcatttccttgtttgaaactctgaagatatatgttgagatccacccaactgtaaggcccaaaaccagcactagctgaactacatttcctgcttgcagtgagtcaactccaacaaacttcagtccactttttaagccaatgccaagtaaagt

SEQ ID NO: 13008 - DNA, 572 bp, Glycine max
  Clone ID: jC-gmfl02220143f09d1
tcattgcttatggactcgacatgtttgccttttgctctggggagaagaatgttctgatcttggacctcggtggtgggacttttgatgtctcccttctcaccattgaggagggtattttcgaagtgaaagccactgctggtgatactcacttgggaggtgaagattttgataacagaatggtgaaccattttgttcaggaattcaagaggaagaacaagaaggatattagtggaaatgccagagcattgaggaggttgagaacagcatgtgagagggccaagaggactctctcttccactgctcaaaccaccattgagattgattccttgtatgagggtattgacttctacacaaccatcacccgtgcccgtttcgaagagcttaacatggacctattcaggaagtgcatggagcccgtggagaagtgtttgcgggatgctaagatggacaagagcaccgtccatgatgttgctcttgtcggtggttctactaggattcccaaggttcaacagttgttgcaggacttcttcaacgaaaggagctttgcagagcattacccagatgaactgttg

SEQ ID NO: 13009 - DNA, 357 bp, Glycine max
  Clone ID: jC-gmfl02220143f10a1
tgtcttttatctttttttatttcatcctttttccacccatggcacccaaaaggccaagggggggaaacacaaaaccgcacaaccccgccccacccaaaacgggcacacggctcgcaaagggaataacaataaccccccaaaacgaaaacatgcccccagaacaatgattaaactcaccaaaaacagtatcaccccgctaaaccagaaacgggacaagccacccaagacaaaaaaaagtgcccaactaccactaaaaaacaggtgaacacccaaattgtagccggccaccccacgccccaaaccgaaaaccaccaaggcaagaccattttccccaggttttccacccacacaccgcaa

SEQ ID NO: 13010 - DNA, 519 bp, Glycine max
  Clone ID: jC-gmfl02220143f10d1
tctttttttttttttttaatatttttacttttctggccaaacttggaacggacaagtttctggatggaacaagagctcataattcatgaaagcctcgaaaagggaaaacaacattgttcagtgcccctacatgactaagtaataatactcaggatcttatttcatagaaattaaggagcaacttagaggcttgatttgagagcttaatcatagtacaagggattaggcagcttaaaagtcctagtccctttgttgcttcccaggaggtcactccattggtctccaacgtttccaatgattctgtatccctccttctccagcttctctctctcagctgatttgtattcaaatgataacttaccagagtactcagatggatccctgagaattaacttctcccatgtgttgaatccaacctcctttaagttcttggctgttacatcccctagactcaatggtctttctgataagaatacaatcttgatgccgagagccaacagttttgttgtacattttaag

SEQ ID NO: 13011 - DNA, 449 bp, Glycine max
  Clone ID: jC-gmfl02220143f11a1
gcagacagcacaaccgcacagagcggatttctggctgttcaaacgaccatcggcctcaacgtaacttagggccccctggccagaagccaaaacggcccaagaaaccaaactatacacaacagcatcagtgacccaggggcgcccaggcagagcctgagaccagaggaacgaggctgtgctgcatgcaagcgcggagcaggaccctgacgccctggaggcccgagaagcctgcaccaagaccaacatggaggaggttacacggagagaacacaaccaaagcgcacaggggcactgagaaggaagagcgtgacgcacgcaagaacaaaggttgcgacacgcatgacgagagacgagaggctgacaacaggaaggccctgctgcacatagaccagcaaaagactgagcttgcacagggagtgcacaggcaccacccaaaaaggcctagagga

SEQ ID NO: 13012 - DNA, 414 bp, Glycine max
  Clone ID: jC-gmfl02220143f11d1
atgatcacattaaaaaatctggagagacgggtcaattacaatacccaacaatcaccgataactttagcagagggctagttttacatgtcctattgataacggatgtcagagccatggctatcctacgccttcaactaagaactcattaacacgaatactttgggcacctaattaaagcggaagggaagaaatgacagcgtgcgtgtattaataattacatttggtcgtagcatcactttgcttacgagaacgtatagaccacatggggacgaagaatctgcctgaagccataacgcgaagaagagactcacgtgcaatacaatcttacgtaatttgctaggactagaccgatgcttatctgattcagcaacttcccccatatcttctagagaagaagaaccgacattgtaaagg

SEQ ID NO: 13013 - DNA, 527 bp, Glycine max
  Clone ID: jC-gmfl02220143f12a1
attcttcagttagctcccccaacctattttcttcaccttcacaccacaaccctaccctctctctctgtcatggtcattggaggagccttccctcgtttcgacccaatcaccaaatgtagcacccaagaccgctccaaccagaccatcgcctcggacctcgatggcaccctccttgtctcccggagtgccttcccctactacttcctcgtcgccctcgaagccggcagcgtcttccgagccctccttctcttaaccttcgtccccttcgtctacttcacgtacttcgtcctctccgaaaccctagccatcaaaaccctaatcttcataaccttcgcggggcttaaactaaaagacgtcgagctcgtgtcccgctccgtgctgccgaggttctacgccgaggacgtgcaccccaccacgtggcgcgtgttcaacgcgttcggggggaggcggtgcattgtcacggcgagcccccgggtgatggtggagccgttcgcgaagacgtttctcggcgcggatacggtgctcgg

SEQ ID NO: 13014 - DNA, 578 bp, Glycine max
  Clone ID: jC-gmfl02220143f12d1
ggttaccgatatctctttatattctatttatttatacatatgtggggatagagggtgtcacagcaccaatgtagaaagcactgctttctacatcgttgctggcgtaagcacgacttcatttgtcacgtgttctacgacggtccttttacgaccgatgtagaaagctttgttaactgcagcagcactagatgatatccccacccaattgctccctcgtggtatagtcgtgcttgttcttcctgactcccttcatcaattgaccaccaacctaataatctagaaccatgatgcaagaacccaaagcaatcatgagctcttgaagaaaatataaaatatattcctccaccaactccacttcgtagcagtaaaagtgaaagagaatcaccttgattaatgcctaacatgcaatctgcaaatccttcaattagctgattacttaattcaattgactattgtatgtataatgagactagatacctaacagtaaaagtgtaacaatatactagtgacaagcattttcaaaacaatgcataaacaaacattatatgaagtgaatatttggtagataatttcctacc

SEQ ID NO: 13015 - DNA, 446 bp, Glycine max
  Clone ID: jC-gmfl02220143g01a1
tatttggatgctcttgatgctcatttcagtgtcaattttattgaggaggtagaaaatcagccaagaagtgagaagaatcgcggaaaaggcacgggtggtgttaagaatcgtctgaaggaggctagaagtggcctatctacatcaaagaagcttctaaaggtgctaaatcaaatgtgccttagagagcagcaaacatcaagcatgcctcttgtcttggctctggggagtgagcttgatcgagtgtgccaccaaattgatcagctgatccacgaacagcgctcgaaccagaacgatgttgagtttgtcatgaagcattttgcagaagagaaggctgcttggaaaagaagagaacgagaaaggattcatgatgccatataacacgtggctgaagagcttgcggtggagaagaagttgaggaggcaaactgaaaggctgaacaagaagat

SEQ ID NO: 13016 - DNA, 608 bp, Glycine max
  Clone ID: jC-gmfl02220143g01d1
gtgagactgaagagacccttgctgaatgttaaatcgttcaagtcacagttcgcagagtgcaagcccagaaagcaatatgcgggcttgaatctggaatgactggaatcctcttgaaagaagactatacagatgactggagagatataattgaattatctgataggctacatgaaggtgacatgctcacttgtaaaattaagtcaatccaaaagaataggtatcaagtcttccttgtatgtaaggatagtgaaatgagaagtaatcggttacagaataaccgtgatattgacccctattaccatgaagaccgaagctgttttcagagtgatcaagacaaagctaggaaagaaaaggagcttgcaaaaaagcatttcaagccaaggatgattgttcatccacgctttcagaacataactgcagatgaagcaatagagttcttgtctgacaaagatcctggagaaagtattatccgtcctagttcacgaggaccttcatatcttactttaactctcaaaattaatgatggagtatatgcccataaggatataattgaaggtgggaaggaacacaaggacattacaagcttacttcgaattgggaagacacta

SEQ ID NO: 13017 - DNA, 383 bp, Glycine max
  Clone ID: jC-gmfl02220143g02a1
tacttagatgctcttgattctcattgtagcgccacttttatagactacgtcgacaatcaccccatacgtgacaagactctcggaaaccgctcggctggtggcaacaatcgtacgatagaggctagaaatggtctatgtacatgacagaatcttctaaaggtgctaaatgaactgtgccgtacagagcaacaaacattcagcatgcctcctgacttggctctggcgagtgagcctgaccgagtgtgacaccgacttgatcagctgatccacgaacaccgctcgaaccagaacgacgtcgagtatgtcatgaaccatcttgcataggagaaggctgcttggcatagatgagaacgagaatggattcatgatgccataaaacacat

SEQ ID NO: 13018 - DNA, 659 bp, Glycine max
  unsure (1)..(659): unsure at all n locations
  Clone ID: jC-gmfl02220143g02d1
ngccccgcnnnggggnnnnccgaggggnnggaggggcattgnnacatcngtanncnctaagagaagtaccggggganaccaggaagagagagggtggactcgctgattatagaggttttgttggggaattttagcaggactggacctaaaaagggccctccggggcggacccaaaaagagagagggactatccgcggtggccagacacgccagaagggtggagatcggtgactgaggaatacagcgacaaagaaatgggtctagcttgcaagctcatggaggtgttgtccgaagcaatggggatagagaaagagggtttaagcaaagcatgtgttgacatggaccagaaggtggagggtaattactaccccaaatgccctcaacctgacctcactcttggcctgaagcgccacacggatccgggcactatcaccttgctgcttcaggaccaagtgggtggacttcaagccaccacggacaatggccaaacatggatcaccgctcagcctggggaggctgccttcgtcggcaatcttggagatcatgctcattatctgagcattggaagggtcaagaatgctgaacaccaagcggtggtgaactcaaaccatagccggttgtccatagccccctttcaaaacccagcaccaaatgcaact

SEQ ID NO: 13019 - DNA, 517 bp, Glycine max
  unsure (1)..(517): unsure at all n locations
  Clone ID: jC-gmfl02220143g03a1
agatattagggtttttgagtgcggtgcggcgatcctagcactctcttctgcagctttcgccgacagcttcattcaccatggctgagcaaaccgagaaggcttttttgaaacaaccaaaagtgtttctcagctcgaagaaaactgggaagggaaagagacccggaaagggtgggaaccgcttttggaaatccattgggcttggatttaagactcccagggaagccatcgaaggaacctacattgacaagaagtgccccttcactggcaatgtttccatccgtggccgtatcttggctggaacatgtcacagtgctaagatgaacaggactattattgttaggaggaattatctccattttatcaagaagtaccagaggtacgagaaaaggcactccaacattcctgctcatatatcacctgctttccgtgtgaaggaaggagatcacgttattattggtcaatgcaggccactttctaagactgtgagggtcaatgtgtngaaagtgatcccagctgg

SEQ ID NO: 13020 - DNA, 616 bp, Glycine max
  Clone ID: jC-gmfl02220143g03d1
gactcaccttctgatcgactactgaaatagtactgtatgttacatacccgttaaacgcgaataccagtcggcggccgcccttttttttttttttttaacaagatccttatcatattgccagaacgaaacctcaaagaagagccaaaattgacaaggttttcatatttgttatcatccagaaaagaaatcagatataataattaataaggtaacatttatcttcaataaaaactggaaatcaaagctcacattccagtaaaagccttctttgcaccgctagaagatccagctgggatcactttcaacacattgaacctcacagtcttagaaagtggcctgcattgaccaataataacgtgatctccttccttcacacggaaagcaggtgatatatgagcaggaatgttggagtgccttttctcgtacctctggtacttcttgataaaatggagataattcctcctaacaataatagtcctgttcatcttagcactgtgacatgttccagccaagatacggccacggatggaaacattgccagtgaaggggcacttcttgtcaatgtaggttccttcgatggcttccctgggagtcttaaatccaagcccaatggatt

SEQ ID NO: 13021 - DNA, 482 bp, Glycine max
  Clone ID: jC-gmfl02220143g04a1
agatattagggtttttgagtgcggttcggcgatcctagcactctcttctgcagctttcgccgacagcttcattcaccatggctgagcaaaccgagaaggcttttttgaaacaaccaaaagtgtttctcagctcgaagaaaactgggaagggaaagagacccggaaagggtgggaaccgcttttggaaatccattgggcttggatttaagactcccagggaagccatcgaaggaacctacattgacaagaagtgccccttcactggcaatgtttccatccgtggccgtatcttggctggaacatgtcacagtgctaagatgaacaggactattattgctaggaggaattatctccattttatcaagaagtaccagaggtacgagaaaaggcactccaacattcctgctcatatatcaacctgcttccgtgtgaaagaaggagatcacgttattattggtcaatgcaggccactttctaagact

SEQ ID NO: 13022 - DNA, 678 bp, Glycine max
  unsure (1)..(678): unsure at all n locations
  Clone ID: jC-gmfl02220143g04d1
gctttcccgtctgatgcgcttcagtcatagcagtctgtatgttaaattacccngttagaaccgaataccagtcggcggccgcccttttttttttttttttaacaagatccttttcatatatccagaacgaaacctcaaagaaggtccaaggttgacaaggttttcatatttgttatcatccagaaaagaaatcagatataataattaataaggtaacatttatcttcaataaaaactggaaatcaaagctcacattccagtaaaagccttctttgcaccgctagaagatccagctgggatcactttcaacacattgaacctcacagtcttagaaagtggcctgcattgaccaataataacgtgatctccttccttcacacggaaagcaggtgatatatgagcaggaatgttggagtgccttttctcgtacctctggtacttcttgataaaatggagataattcctcctaacaataatagtcctgttcatcttagcactgtgacatgttccagccaagatacggccacggatggaaacattgccagtgaaggggcacttcttgtcaatgtaggttccttcgatggcttccctgggagtcttaaattcaagcccaatggatttccaaaagcggattccaccctttccgggctttttcccttccaggtttttcgagctgag

SEQ ID NO: 13023 - DNA, 597 bp, Glycine max
  Clone ID: jC-gmfl02220143g05d1
aaacacgtcaattttcagctttacataacattgtgacaaaatgcgatcctgtttacactttcaaccagcttgacataacttaaggacaaaaaagttacaactaaacttgttgcagaccatgtgacagtgactgcattcctccatgactcgtgcatgttcatgaccaagagaggcttatagtcttcattttacatatggttgatactagtaagcaacacctccatcagttgtagagctgagtctaccattcattttcattggattagcgtctcataatcctaagagcttcaaaagttgcatatacagacagcaggtataaaactctaaagcctagctacagatagattcagagccccctgagaactatatagggctatcttcacaacttgatccattgtcgctcatacgttggaaatcagggggactgattcctgtctgagttttgatgggcttctgtccaaccaggttcatatgcttctagaaaacccagctttgccttgttaggtaagtcatgaagatggacaaatggaacgcccagtggccaccctatctccattcgtatatttgcacatgggctatctacgctgtgaatgtgac

SEQ ID NO: 13024 - DNA, 573 bp, Glycine max
  Clone ID: jC-gmfl02220143g06a1
gggaggctagccgtcggtgaagaatcgcttgattcgcctggaaatcgcgattcaagcacgggtcatccccgatacagagattcaaccacaattcaggaaagaaaaacgagacaaactccgtttcgtatcaatagaagctggaatcgtatcgaaatcgcgagatacggatcgtgaatcattattgtagaagtctctgggtgatggctggttcagaacctgtaagtgcagagggagagagtatggctgtggatgctgccccaaggaagccccggattctacttgctgctagtgggagtgttgctgctgtcaaatttgcaaatctttgtcattgtttctctgaatgggcagatgtaagagcagtttcctcaagtggatctttgcatttcattgatagagcatcaatgcccaaggatgtaattctatacacggatgaagatgaatggtctagttggaagaaattaagtgatagtgtgcttcacattgagcttcgcaaatgggcagatatcatggtcatcgctccattatcggcaaacacccttggcaagattgctggagggttgtgtgacattctac

SEQ ID NO: 13025 - DNA, 684 bp, Glycine max
  unsure (1)..(684): unsure at all n locations
  Clone ID: jC-gmfl02220143g06d1
gctcctgtgcgcccttctacgaatagtacttgcaggtcnattaatgataccacaaatancagacggcggccgctttttgttttttttttttttttaggatattttataattttgnaatgcgtaaaggaataaagggtcaaaacaggggtaacttttttgtaaatttttacccaaacaatgatgtttctggagtaaatatagaatttgaagtctaatattatggcagtgcgctgtagcacccgaaaagctgtatttagaccactattgcagccgctacagcggttattgaaaatcgctcagcgatttcgacttccatagtaactcagggctgctgcgctccgttatcctgctatagagtgctattgactaccatgaatgggggcgtaggactaccccttcattcaccttaaggttaccacagctctacctatgacaacaggtaaagttcatatagatggatagtagtataaaatgaagttgagattcacataatgcacaaggaagatgatttgccaagattttttacatgttcatttcatgcttaccgtttggttattaacaggtttgcattttgtagcgttaaaaggtcattatctgcatataatctgattttttctgcataaaaagttcatcttgtggatgcggtctgattgctagcacttcagatttgtggctgctgttaat

SEQ ID NO: 13026 - DNA, 351 bp, Glycine max
  Clone ID: jC-gmfl02220143g07a1
tggcttatacaacctcactttttctgcgtttttcacctcccacccaaaaaaaaccaggcaggggccttattcaagggggaaagggaaccatatcaacccatcgaaacatcgacagatcgatcgatcctgcccttctaaccacccaatggcaggccgccctgacaaagcgcgcgacaacatacccacacaaacttggccacaccgtggagtctgtagggcccccccatcgtggggtcctggaccggcccacagcaacccctaaggcaaggggatgcccacgttaccttggggaaggcacccctccggacaacccggaggccgagggcccccatgcgctcgcctcagcgggcc

SEQ ID NO: 13027 - DNA, 588 bp, Glycine max
  Clone ID: jC-gmfl02220143g07d1
agcactcacaccagccgcttttcgaccccgttactagtttgttagttaaccgttagaaccaataccagtcggcggccgctcttaaatttttttttttaaactttttttttttcagttcaggcaaaaaaacaaaaaccagggggcaaaggtaagcctcacggccgcacaacccccaagccccaagcccaaccgggggaacaccaacccccaaccaacaacaaaccaagaaaaccctcctggccagctccaattaattcaaactcatttgctagaagttgaaaaaaaataaaatacagcacatctaagtccccttcgaattcactgctaagaaggaatgataaataactaaaagaaaacaactgaaagccaaagactccaaaagttttagtaggcatagcccttgacaaacattcccttcttggcctcttcactctcaccctcagcagagtatcttccaagttgagccaaggagtttgctttagcacgcaccaaaagggacttttgagcagcttccacattctcagggtgtccttgccatgtcttaagcacagtgttctgaaaagcccgtgcatatgagaaagaaacatg

SEQ ID NO: 13028 - DNA, 558 bp, Glycine max
  Clone ID: jC-gmfl02220143g08a1
gaacttcgtcctccctctgtttctttctttcttagttgcagcgcgattgctgcatcgtcctccaataagagctcgctgctagtgaaccctaacacggcggcaacgagaggtgttcggttgaagctcagatcagcgatggcagcagcaacccgcacttctctgcggttcctcctctcagtctccgtaaccctaactctcgctcacctcgccgcctcaaattccgaaggcgacgctctctacacgctgaaacggagcctctcggaccctgacaacgttctccagagctgggatcccactctcgttagcccctgtacttggttccacgtcacctgcaaccaggacaaccgagtcactcgagtggatcttggtaactctaacctatctggacatttggtacctgaacttgggaagctggagcatctacagtatcttgagttgtacaaaaacaacattcaaggaactattcctccagaacttggaaacctgaagagtctaattagcttggacttgtacaacaaccacatatcaggcaccatcccaccttcattggggaaattg

SEQ ID NO: 13029 - DNA, 558 bp, Glycine max
  Clone ID: jC-gmfl02220143g08d1
gaacaggcaaataaacaatggctatggggtaaactttgtttttcttctgttcttttctcatgttcttttcccatttgggtttttactaatccccaacctccattttaccaagaaaacctttctttctagcttcaatttattcaaactcatttgctagaagttgaaaaaaaataaaatacagcacatctaagtccccttcgaattcactgctaagaaggaatgataaataactaaaagaaaacaactgaaagccaaagactccaaaagttttagtaggtatagcccttgacaaacattcccttcttggcctcttcactctcaccctcagcagagtatcttccaagttgagccaaggagtttgctttagcacgcaccaaaagggacttttgagcagcttccacattctcagggtgtccttgccatgtcttaagcacagtgttctgaagagcccgtgcttatgagaaagaaacatgccatgggttgggactttggttcatggcatttagatttagtggtgcttccacttgggattgccaccagacaaaaacatgattccgg

SEQ ID NO: 13030 - DNA, 222 bp, Glycine max
  Clone ID: jC-gmfl02220143g09a1
agttcaaaaggtttccaacccacaaaaaaacaagggggcccaggggggaaaaaacaggaaaaaagaccggcacaccaccaaaaaaaaaaaacaaaaaggacaccagaagccacacaaacggaaacacaggcccacacaaccgcccacaagacgcggaccaagcaaaggaaaggggacgggggcggaaccaaaaaacccagcacgcccgccccagaggaaccc

SEQ ID NO: 13031 - DNA, 443 bp, Glycine max
  unsure (1)..(443): unsure at all n locations
  Clone ID: jC-gmfl02220143g10a1
tgtcttntnnncttttcttttttttttttttttttccccgcnntcttaaaaaagccaggcgggggttttattcaatggagaaagggaaccatataaatatatctatatatagatagatagatagatatagcttttcttacaacccaattgaaggccgtactgagatagttcttgacaacattttcattcaatatttgcaacactttggggttgggagggcccacccatcttgatgtcttgaaccggctcacagcagctcctagggcaagggaatgcccaagaacctccgggaatggtcctctccgaacaacccggagttcgggggcccctatgccgttgactttgcgtgagcctgggtagccagcatcaacaagagacttggccaaacaggtggagcatccaccaagcacctcttgacttgcttcaccacttatttcccaaaa

SEQ ID NO: 13032 - DNA, 541 bp, Glycine max
  Clone ID: jC-gmfl02220143g10d1
tctttttttttttttttttattttttttttttttttctttttttttttttttttggttaggggtaaatttcatttcatttcatcaaaataatgggtacattacaaagctttcttatatcacaaccaataacgcgccctaaaataccaacaaagagggccccaagaggtttattttaacccaaacaacctatgccccgtctgattcaaacccaggcttcggccaacgtacgaactcggacccatggaataattcgttatatgcccaatgggtacataacacaacaaaaacaaattaacagggtaagaaacaaaataacaaacatgtactacgtattagcgaggcatgcctgaatggtgggaaccactgaaaatttaattaaattaaatgccaccaagggactctgggggggccactgggaaccctgacttatccctacaatagccatagataacatggttcaaacgaacccacctgtacctttttggttcaatggagttaagggcttggaatgctggcccttcccaacagttacttgggttg

SEQ ID NO: 13033 - DNA, 561 bp, Glycine max
  Clone ID: jC-gmfl02220143g11a1
gttgagagcattagcagcacgaaatgattttaggaacataagaagaacaaaggcttcaacaaaaattcagacacaatggagaagagcccaagctctttctgattacaaacagcaaaagaaagcaactgttacacttcaatgtctatggagagctaaagtggcaaggaaagagctcagaaagcttcggatggctgcaagggaaactggggcacttaaggaagcaaaggacaagttggacaaacttgttgaggagcttacatggagaatagatatcgaaaagcacatgaggacggatcttgaagaagctaaagggcaagagattgcaaaattgcaaaatgctttacaagaaatgaaagctcagttagatgaagcccatgctgcacttatacatgaaagagaagcagcaaaaatagcaattgaacaagcaccaccagtaattaaagaggtaccagttgtggacgaaaccaagctagagttactgacaaataaaaatgaggagttggagactgaagtagatgagctgaaaaagaagattaaagagtttgaagaaagttgctctga

SEQ ID NO: 13034 - DNA, 581 bp, Glycine max
  Clone ID: jC-gmfl02220143g11d1
attaatattagtatttattattgatatacagcacgtgagactcccaatctctaagcatggacactaaaagggtaagaaactctaaatctaaaccacttaatccctacaacaccacacttaaaccgtggtagagagctcaatttggttcccttctgaattgctatcccctttgtcatggacctgaattggcttgtaggtgtacaatttggcacaaaccaagtagtaaataagattgagaaactgcaatatggtgataagccagtaaaagtactccaacttccctttgttgaggttgttgtcagggagccaatttgacccattagacccagcactgaacttgtggaccaaagtaaccataatggtactcacatagttcccagcagcgatagcagtccaaaataatgccatggcagtgctcctcatactctcaggggcctggtcatagaaaaactccaagtgtccaattgacataaaggcctcagccattccatgaaggctgttttgagggacaagccagaacactgagaatgggattatggcatgtgggtggtcaaaagcccatgggccacagctgccttttt

SEQ ID NO: 13035 - DNA, 589 bp, Glycine max
  Clone ID: jC-gmfl02220143g12a1
acttacttgaagttgtgctattcaatctttaagccacataaataatattattcagattttagagactgaaaacatcatggccaacctcgacctcgacccattccagacaagcatcttaatcctcgtcccaatagcactcctggtggcgttactatctcgtactcgtcgaagagcaccctacccaccaggcccaaagggtttaccaatcataggaaacatgttaatgatggagcagctaacccaccgcggcctcgccaacctggccaaacactacggcggcatcttccacctccgcatggggttcctccacatggtcgccatctccgaccccgtcgccgcgcgtcaggttctccaagtccaagacaacatcttctccaaccgcccagccaccatcgccatcagctaccttacctacgaccgcgccgacatggcttttgcccactacggccccttctggcgccagatgcggaaactctgcgtcatgaagctcttcagccgcaagcgcgccgagtcctggcagtcagtccgcgatgaggtcgacgcccgcgttcgcgccgtcgctagcagcgtcggaaagcccgtcaacatt

SEQ ID NO: 13036 - DNA, 395 bp, Glycine max
  Clone ID: jC-gmfl02220143g12d1
cttgtgttgctggtttaaaccaaactgaaaattataaaatgggggggtttaaatgggtcacggcctcataattggacgtttacaatttccatgactaattaccagtgggacttgctagacaacaaggaaaaccccttgtccaatcaatcaacagtattaattgccctgaccccattcaaatcctagtattcatgaaccgatcaccccactgccttttaaaaactcccaaattatgcctaacctatgagaacaaaaggctatctacccccacgaaactttgggtcgaagctacaaccatttgaaacaattccaaactcaaggatgggatatccagcccgagcttcgtgacgtgctaatacaaactgaaacgctctaacaaattggctgtttatttt

SEQ ID NO: 13037 - DNA, 414 bp, Glycine max
  Clone ID: jC-gmfl02220143h01a1
tacttggatgctcttgatgctcattttagtgttacttttattgacgaggtagacagtcaccgtgtaagtgacaagactcgcggaaaacgctcggctggtgttaacaatcgtccgatagaggctagaaatgggctatgtacatgacagaagcttctagaggtgctaaatgatatgtgccttatagagcatcaaacatgaagcatgcctcttgacttggctctggcgagtgagcttgatcgagtgtgccaccgacttgatcagctgatccacgaacagcgctcgaaccagaacgatgtagagtatggcatgaaccactttgcatgacagaacgctgcttggcatagatgagaacgagaaaggattcatgatgccataaaacacgtgggtgaataacttgcagtggagaacaagttg

SEQ ID NO: 13038 - DNA, 590 bp, Glycine max
  Clone ID: jC-gmfl02220143h01d1
gttcatttacgtccttggaatctttgattttccacagtttgaaggaatgggaagaatgggaatgtaaaggtgtgacaggtgcttttccacgtcttcaacgtctttctatagagtattgtcccaagctgaaagggcacttgccagagcaactatgtcatttaaattatctaaagatttatgggtgcgaacaacttgtaccttctgctctcagtgcccctgatattcatcaattatccctaggagactgtggaaagctgcaaattgctcatccgacaactttgaaagagcttaccattacaggtcacaacgtggaggcagccttactcgaacagattggacgcagttactcttgttcaaataacaatattcccatgcacagttgctatgatttccttgtaaggttggtcatcaatggtggctgcgactctctaacgaccattccactagatatcttcccaatactcaggcagcttgatatcaagaagtgtcctaatctacagaggatttcacaggggcaggctcataatcatctccagcatctgagtattggagagtgcccccattagaatcattgcctgaaggaatgcatg

SEQ ID NO: 13039 - DNA, 578 bp, Glycine max
  Clone ID: jC-gmfl02220143h02a1
ccattattggcccccattttactgttcatgaaggaagaatttatcaattgaagctgttttgtgataaagactacccagaaaagcccccaagtgttcggtttcattcacgagtcaacatgacttgtgttaatcatgaaactggagtggttgaaccaaagaaatttggtcttcttgcaaattggcaaagagagtacaccatggaggacatactgacccagctgaagaaggaaatggctgctcctcataaccggaagcttgtccagcctccggaaggtacctacttttagcatccaacaagatggtatagatgtcggatcgtattgcatatgctgcatgcaatatatagtgtgtaatgctttgtagatccttccttctgaattcaagaacataggggaatgccccgaaaagcttcatatttccatctccatggcttcagagttgttttgctgtctttgtcaacggtgctgaaggggactgtttgattgaaatattggtgtgtcaaaaattttcgaagcaactctttaagtagtattttatgtaatgtgtgctttggctatgtttggtcactctaatagtgg

SEQ ID NO: 13040 - DNA, 414 bp, Glycine max
  Clone ID: jC-gmfl02220143h02d1
ggaggattctccccgaagatggtcctgttttcttcactgccataatctctgaattctactatatcaactactcaagggcaagggaaagcttccaaccttatgctggcggcgagactggtgtcggtatgggaacctacaaatgagcttctagttaagaattttacagcaaacatttaggtgtgactatatctggagtctggattctgcagcacatttccttgattttagtgcatttattgtatttactgtctagctactttacaagaatggtatacgttgtattttagtaattttttgttgttgttacctattgtcgtatgttatgggtgactgattcattgcctctttacatttttgaagttctttgtcatgtatacatttatcaacaagagaaataatttcttgcattctctg

SEQ ID NO: 13041 - DNA, 588 bp, Glycine max
  Clone ID: jC-gmfl02220143h03a1
agatattagggtttctgtttgcggttcggcgatcctagcactctcttctgcagctttcgccgacagcttcattcaccatggctgagcaaaccgagaaggcttttttgaaacaaccaaaagtgtttctcagctcgaagaaaactgggaagggaaagagacccggaaagggtgggaaccgcttttggaaatccattgggcttggatttaagactcccagggaagccatcgaaggaacctacattgacaagaagtgccccttcactggcaatgtttccatccgtggccgtatcttggctggaacatgtcacagtgctaagatgaacaggactattattgctaggaggaattatctccattttatcaagaagtaccagaggtacgagaaaaggcactccaacattcctgctcatatatcacctgctttccgtgtgaaggaaggagatcacgttattattggtcaatgcaggccactttctaagactgcgaggttcaatgtgttgaaagtgatcccagctggatcttctagcggtgcaaaaaaggcttttactggaatgtgaagcttgatttccagttttattgaagataatg

SEQ ID NO: 13042 - DNA, 634 bp, Glycine max
  unsure (1)..(634): unsure at all n locations
  Clone ID: jC-gmfl02220143h03d1
tgctaactatatgtgcgcttagttaaagactgtatnttaaatgccngtacaaccaataccagtcggcggccgccgttttttttttttttttaacatgatccttttcatttttccagaacgaaacctcaaagaaggtccaaagttgacaaggttttcatatttgttatcatccagaaaagaaatcagatataataattaataaggtaacatttatcttcaataaaaactggaaatcaaagctcacattccagtaaaagccttctttgcaccgctagaagatccagctgggatcactttcaacacattgaacctcacagtcttagaaagtggcctgcattgaccaataataacgtgatctccttccttcacacggaaagcaggtgatatatgagcaggaatgttggagtgccttttctcgtacctctggtacttcttgataaaatggagataattcctcctaacaataatagtcctgttcatcttagcactgtgacatgttccagccaagatacggccacggatggaaacattgccagtgaaggggcacttcttgacaatgtaggttccttcgatggcttccctgggagtcttaaatccaagcccaatggatttccaaaagcggattccacccttt

SEQ ID NO: 13043 - DNA, 559 bp, Glycine max
  unsure (1)..(559): unsure at all n locations
  Clone ID: jC-gmfl02220143h04a1
ccctttctctctgcttagggttttgatcgcatcggatcttcactctcttctccgatctcaaaatgcccgccgtttatggagctcgcttgaccaccttcgaagactccgagaaggagagtgaatacggttacgttcgcaaggtatcaggaccagtcgtcgttgcagatggcatggctggggctgctatgtatgaactcgtgcgtgttggtcatgataatctcattggtgaaattattcgtctcgaagggaattctgctaccatccaagtttatgaggaaactgctggcttgatggttaatgatccggtgttacggactcacaagcctttatccgtggagttgggacctggaatactggggaatattttcgatggaattcagaggcctttgaaaactattgctanacgatctggtgatgtctatatcctcgtggtgtctctgttccagcactcgacaaagatacactttgggaatttcaacctaagaaaattggtgaaggcgaccctttaactggtggagatttatatgctactgtttttgagaacagtctaatgcaacac

SEQ ID NO: 13044 - DNA, 569 bp, Glycine max
  Clone ID: jC-gmfl02220143h04d1
cgaataaatatgtatagatattcattgctacaagaagtccatctatgaaatacaggattcaagataatccacttccaccaaaaattccacctatatgaatccagaatccgcttgctgtaggcacttcatgtcctaagataattttattctcctaaatacatattgaaagagcaagtctcgtttcttattctcaataaacaaactgaggatgactgaaacacatgattatagctacacatgagactagatcaaaagccaaaccagcaccaagaaaggaaataaatgtgatatgaatgaatcgaacagtcaaatatgagaacactcgggacgttgcaaccctgcgatgctagactgcgtcttacaattggaaataacacaatatttgagcaaactaccaaatcttcaatcatcaatcatcgggtttcgtcctcaaggttgcggaaaccattagtcaggtcctcatgtaacttctgaaatttcgcaaccaaagcagcttccccttctgctggatcctcaaatttctgagacactaatcggtagaacagatcttccatacgatgcttgatagg

SEQ ID NO: 13045 - DNA, 592 bp, Glycine max
  unsure (1)..(592): unsure at all n locations
  Clone ID: jC-gmfl02220143h05a1
gggaggctagccgtcggtgaagaattgcgcgattcgccaggaaatcgcgattcaagcacgattcatccccgatacagagattcaaccacaattcaggaaagaaaaacgagacaaactccgtttcgtatcaatagaagctggaatcgtatcgaatcgcgagatacggatcgtgaatcattattgtagaagtctctgggtgatggctggttcagaacctgtaagtgcagagggagagagtatggctgtggatgctgccccaaggaagccccggattctacttgctgctagtgggagtgttgctgctgtcaaatttgcaaatctttgtcattgtttctctgaatgggcagatgtaagagcagtttcctcaagtggatctttgcatttcattgatagagcatcaatgcccaaggatgtaattctatacacggatgacgatgaatggtctagttggaagaacttaggtgatagtgtgcttcacattgagcttcgcaaatgggcagatatcatggtcatcgctccattatcggcaaacacccttggcagattgctggagggttgtgtgacaatctacttacatgtatcgntcgagcct

SEQ ID NO: 13046 - DNA, 571 bp, Glycine max
  Clone ID: jC-gmfl02220143h05d1
gtaatgtgtaaaggaataaagggtcaaaacaggggtaacttttttgtaaatttttacccaaacaatgatgtttctggagtaaatatagaatttgaagtctaatattatggcagtgcgctgtagcacccgaaaagctgtatttagaccactattgcagccgctacagcggttattgaaaatcgctcagcgatttcgacttccatagtaactcagggctgctgcgctccgttatcctgctatagagtgctattgactaccatgaatgggggcgtaggactaccccttcattcaccttaaggttaccacagctctacctatgacaacaggtaaagttcatatagatggatagtagtataaaatgaagttgagattcacataatgcacaaggaagatgatttgccaagattttttacatgttcatttcatgcttaccgtttggttattcaacaggtttgcattttgtagcgttaaaaggtcattatctgcatataatctgattttttctgcataaaaagttcatcttgtggatgcggtctgattgctagcaacttcagattttgtgcttgctgtt

SEQ ID NO: 13047 - DNA, 506 bp, Glycine max
  Clone ID: jC-gmfl02220143h06a1
ctttttgattacgaaaatgttgaagagatcgggttttgaagaagaagcagttcaattgatcaactcagatttcagggacctaagtctagctgctaatagactcgcccatcatgccatcaaacttggtggcattggctttggagcctcttttttcggattgtttgctgccattgctgctatttatctgttgattttggatcgtacaaactggaaaacaaatattctcacagcactactcattccatacattttcttcagcttgccttcattaattttcgacgtcttcaggggagagcttggaaaatggattgctgcagttgctgttgtattacgccttttccttccaagacacttccctgattggctggaattgcctggtgctctgattcttcttatcgttgtagctccttctctaattgcaagcacctttagagacaacattgttggggtggtagtgtgcctcatcattgcatggtatttgctgcaagaacacattcgggcttctg

SEQ ID NO: 13048 - DNA, 636 bp, Glycine max
  Clone ID: jC-gmfl02220143h06d1
agcacacacacgtgacctatcattgaatagcagctgtatgctacatacccggtaaacgcgaataccagtcggcggccgcccttttttttttttttttaaaggaaaaattttatatttatatatatttctctatgatacagtgtatataccaaacatcggtattccctgactaagttatccatccccatgttgagggggagaagccactagcatctcttccactttatccatgtcccgtgcctagtaaaaccaatctccacaagccattcgctaattggctaacataaaataatgcactctctcaagctatttgcatgctaatgagagtttgcttttctgcaactaaagaagaatctagtacaaaatatgtattctgccaacaatgacaggtttagaaacagaacttttggttggcaggatatcaagcgatgatgaaaaatcccgaatatgcagtatttattcaagtcgtgaatcaaatcatatatatgctagtgagccacgatcaaagtccggctgaggtcgaccccgagtaggagttggtggcctctgaatattaagctcctgcatccatgtttcatccataacacgctcaggagatgtctcaggagactgaaagggaagtggtatgggatgaat

SEQ ID NO: 13049 - DNA, 506 bp, Glycine max
  Clone ID: jC-gmfl02220143h07a1
gaacttcgtcctccctctgcttctttctttcttagttgcagcgcgattgctgcatcgtcctccaataagagctcgctgctagtgaaccctaacacggcggcaacgagaggtgttcggttgaagctcagatcagcgatggcagcagcaacccgcacttctctgcggttcctcctctcagtctccgtaaccctaactctcgctcacctcgccgcctcaaattccgaaggcgacgctctctacacgctgaaacggagcctctcggaccctgacaacgttctccagagctgggatcccactctcgttagcccctgtacttggttccacgtcacctgcaaccaggacaaccgagtcactcgagtggatcttggtaactctaacctatctggacatttggtacctgaacttgggaagctggagcatctacagtatcttgagttgtacaaaaacaacattcaggaactattcctccagaacttggaaacctgaagagtctagttagcttggac

SEQ ID NO: 13050 - DNA, 555 bp, Glycine max
  Clone ID: jC-gmfl02220143h07d1
aagggcaccgaaaccattaaattgactagggtcatacattgatcttttgatcaactaaaaagagtggttatatatatatataacggtttcactcaaggcatatatttatatggtcccattctcatctagtgatgaatcagaggcagagtcatctagtgttgagtttgatgtagtctccaattgacccccactctcgttatcggaagttcccactgtcctttcttcatgagggtgttttaggcaccaagacattatactagctgttagtgtaaggatcatttttggattcacctcagtgatgtcttcaggaagcaggaatatagaacatccaagctttcttgcaatactgataatgtaggtggcgttcatctttttctcttggtaggttactccctttgttacaagaccccaatttacagctctgggtgtcactgaacttagaagctcaaggaaaaatattccatctgataaacttttatccttaaaactgtccatgcggctttggcttctggagctgctaaccttgcttgtgcccactctaaaatatcagcatca

SEQ ID NO: 13051 - DNA, 486 bp, Glycine max
  Clone ID: jC-gmfl02220143h08a1
ctcgagccgctcgagccgattcggctcgttctcaaccaacaagtagacaaaaaccccagttataatatatggttctttttatgaagctcccttttcctcctcatcttccttcctcactgctccatttcacattattattattgttttttattgtgtgtaaaacaagggcagttgtgaaacttccgccaaatgtttcagttccagcagtgttggtgtttggagattcaatcgtggacactggcaacaacaacaacaacttaggaacaacagctcggtgcaattacccaccatatggtaaagattttgagggaggcaaaccaactggtcgatttagcaacggaaaggttccatctgactttatagctgaagaattgggcattaaagagtatgtaccagcatacttggatccacatctccaacctggtgaattggccactggtgtgtgctttgcatctggtggtgcaggatacgatcctttgacatcgc

SEQ ID NO: 13052 - DNA, 499 bp, Glycine max
  Clone ID: jC-gmfl02220143h08d1
ggaaaaaggccaccacaaagtattacttatctccaatctccggagtcaggaattacaacttaactttcatctggacattaaattaataacaacgaaatacttaaatctaatctgaaattggccccccaaaaaaggattttcctttaaacaaaaattgacactataggatatcctcagcttttaaaaaaatgccagaaaactccagcagctgacatggggaactacatatgctaacgctcaaaaggagccacgccttggcctgtcctcagcaacactcaccttaattgcccttccgtccaaacttttgccatcaaaagcagcaccggcatcattcatttctggctcatcagacattgggacaaagccaaagccacgtgatcgacctgactccctgtcataaactacccgagcatttacaacattaccgtgtttactgaaaatttgcttcagccgggtattggcaacatcccatggcaaattacccacattgattgataag

SEQ ID NO: 13053 - DNA, 393 bp, Glycine max
  unsure (1)..(393): unsure at all n locations
  Clone ID: jC-gmfl02220143h09a1
cccccnntccttatctggggccccggggggcggtgtttgcccttgtctttgcccctgcgacaccgtcacgcaaaaaaacgcccctggccggccacggacaacgccgggagggggccaaccctggccaaccccaacccaagggccgggcgcggcatccccccaaaggcggggggcaaaaccaagaaggggcccgtgacgatcgccccccccaccggaggcgcaaccggaaaggggaccggcacgcgcccggccccggcccctcacccccggcgggaggggcgggaacgcccaccgtgggcggcccccccgccacagccccaacgccggcgcctagcgggggtgccccccgccccgggccccgggcacaggccgcccccctcaagcccgaccccg

SEQ ID NO: 13054 - DNA, 429 bp, Glycine max
  Clone ID: jC-gmfl02220143h09d1
tttctttttttttttttattttttttttttttgtctttttttttttttttttgggtagcggtaaagttcatttcatttcatcagaaaaatgggtaccttacaaagcttttttatatcacaaccaataacgcgccctaaaattcaaagaaagagggccacaagaggtttaatttaaccaaaacaacctatgccccgtctgattcaaacccaggcttaggccaacgtacgagctcgggcccatggaacaattcgctatatgccccagggggacataacacagcaaaaaccaattacccggggaagaaacaaaattacaaacatgtaccacgtattaacgagggctgcctgaatggtgggaaccactgaaaatttacttacattaaatgccaacaagggactctgggggggccactgggaaccctgacttat

SEQ ID NO: 13055 - DNA, 489 bp, Glycine max
  Clone ID: jC-gmfl02220143h10a1
ataaaacttcgttataaatgaaatgcggcttaaaacatccctcagcagcaaaggaaatggactaaaaccctatagctgcttgtgaaattcgaaatatctcagactcttcttaccatcaaaacaaaaaacagtactcatcaaaaacaaacagcaatgaaaattgaccaccgccgatcaagaacctagttttgaaagttacggctacatgaaatcggcagaaacttaaaaatataacttaaacaaaacacctaagactctgcaaggataaaactactataaaggagtaaccacgatgatgatcacatgtgctagcaaaattgcccaaatgcaatcacttcttcttggcagcggccttggtgaccttggctccggtggggtctttcttctcaacactcttgatgactccgacagccacagtttgacgcatgtccctcacagcaaaacgaccaaggggaggatactcaaagaaagtttcaaccaccatgggct

SEQ ID NO: 13056 - DNA, 261 bp, Glycine max
  Clone ID: jC-gmfl02220143h10d1
atgtagtcaatatgctaaatatggaaagggagaagagtcaaactcaaagacaaaaacatctataagatgacttctgttacataaatcaagctcaggacctctagtgcactacttaaaactattttcatcagacttaaggataccatattagcttgaaggtaaaccattggaatattgtcccagaaatgatggctgcggactagtacttttcttgaactttatctccttaatgatcatgattgatcctaggctgctttcccc

SEQ ID NO: 13057 - DNA, 616 bp, Glycine max
  unsure (1)..(616): unsure at all n locations
  Clone ID: jC-gmfl02220143h11a1
ggccccgaccccacccagcncnccttggccccngggtaatactgattactatagnanncttacggcaataccgagcacggcanncnnannaaaaggaaanncaaancatnncnnnnataaatttaaaaaattttctttaattaaatatttaatggaattaaatagttaaattaataaaattagtcgtgttttattcgattttttgaattggtttttttttacagtagctaatgctagtcaccgaacttagtcaatgagctagaatgggttataaagatatctatagatatatatagatatatttatctatagatatctttagaaaaaaaaaaagaaaataaacaaataagacgtatcattttatgtatagtagtggggaattatgggacaaaaaataaatccgcttggtttcagacttggtacaactcaaagtcatgattctatttggtttgctcaaccaacaaattattccgagaatatacaagaagataaaaaaatacgagattgtatcaaaaattatatacaaaaaaatataagaatatcctctggtgttgagggaattggacagataaagattcaaaaaagaattgatcctattcaagttataatatatatg

SEQ ID NO: 13058 - DNA, 355 bp, Glycine max
  Clone ID: jC-gmfl02220143h11d1
attaatgaaataggacccgtgtgactactaacggaaacgcatggcccctacatgggcaaaaggctttgaaggaaaaccacttaatgcctacaacgccacactaaaaccgaggcagacagctcaatacggatccctgctgaagtgcaatccactttgcgaaggacctgaattggcttgcaagcgcacaaccaggggccccccatttaggaaatcagattgacacactgctgcacggcgctaggccattgggagaaccccaactggcctgagcagagggtgaaggcagggggccaacaagacccataacacccacacctgttgttgcggaccactgaaaccctatggggactcacat

SEQ ID NO: 13059 - DNA, 668 bp, Glycine max
  unsure (1)..(668): unsure at all n locations
  Clone ID: jC-gmfl02220143h12a1
gccctgcccccccaggccnnctggccaggagccacgcactctcgtaancnctatgggcaatacctaagctcgccattcttattaaaatgaaattcaaatcatttcttttataaatttaaaaaattttctttaattaaatatttaatgaaattaaatatttaaattaataaaattagtcgtgttttattcgattttttgaattggtttttttttacagtagctaatgctagtcaccgaacttagtcaatgagctagaatgggttataaagatatctatagatatatatagatatatttatctatagatatctttagaaaaaaaaaaagaaaataaacaaataagacgtatcattttatgtatagtagtggggaattatgggacaaaaaataaatccgcttggtttcagacttggtacaactcaaagtcatgattctatttggtttgctcaaccaacaaattattccgagaatatacaagaagataaaaaaatacgagattgtatcaaaaattatatacaaaaaaatataagaatatcctctggtgttgagggaattggacagataaagattcaaaaaagaattgatcttattcaagttataatatatatgggatttccaaagttttaatagagggtagtctcaaaaatcgaagaatacagacgaattgc

SEQ ID NO: 13060 - DNA, 523 bp, Glycine max
  Clone ID: jC-gmfl02220143h12d1
aacttctgtaagttcttttttgaaacaataaatgggtaagttaagggggaaatccaagtcggggaaagaaaattttagaattacatgtagaaagctaactacatcctgcacctcaaaacagactcctcagcaaaaactccgcctggagagcaagttgaaagggaaacccacaacggaatactaccatatcctttagcatcttataggcagtaactcactctagctttataccgtccatctcattgatcaccccttcaagcttgacaatctgacgcaaaaagtaatccccataacgtttggcaggcttagactccataacatgaattgtgtcatcattaatatagaaatctaaatcggcattggatgtaattttcccatcactatcaacagcatgtgtcttgtgcttgtatgtcatcaagatagtccttaaggtgggttcatccacttccatgtaacttgcaagttttgtgagggagattgttgaatacactttcaagaaggtccggacacctgatagcaactg

SEQ ID NO: 13061 - DNA, 530 bp, Glycine max
  Clone ID: jC-gmfl02220144a01a1
caccgattcattaacttcacacacagtcttctgtgtttccaccacaccatagcatatagtactagtagattaaacgccaaagaaataaattactcactttcacgtaaaccataacgtgcttccaccgcaaccaaccacaatgggtgccgttaggtccataacggtgttgctactagtgttatttatggccatgagctccggcgtgcgctcgtgtccgccgtcggacagggcggcgctgctggcattcaaggcggcgctccacgaaccctacctgggaatcttcaactcgtggaccggcgccgactgctgccacaagtggtacggcgtgagctgcgaccaggagacccgccgcgtcgccgacatcaacctccgcggcgagtcggaggagccgatcttcgagcgcgcccaccgcaccggctacatgaccggctacatctcgccggcgatctgcaagctcgcgcgcctctccagcatcaccatcgccgactggaagggaatctccggcgagatcccgcgctgcatcacgaccc

SEQ ID NO: 13062 - DNA, 588 bp, Glycine max
  unsure (1)..(588): unsure at all n locations
  Clone ID: jC-gmfl02220144a02a1
atttgaaattaacaagtagcaaagatgtttggaatcatcggaggaaacaagggtcacaagataaaggggaacttggtgattatgcgaaagaatgtgttggatatcaacagcattaccagtgttaagggtgtcatcggaaccggcattaacatcattggaggagtcgtcgacaccgttactgctttggcgtcccacatctccatccagctcattccatatttgaggaaaataaatgcaactaccacaaagacttacgctacaagaaccatatttttcttgaaaagtgatggaaccttgacgccattggccattgagttaagtaagccgcatcctcagggtgaaggatatggtcctgttagcgaagtctacgtgccttcgagcgagggagttgaagcttacatttggttactggcaaaggcttatgttgttgtgaatgattcgtgctaccatcaactcgtcagccactggctaaacactcatgcggttgttgagccattcgtcatagcaacaaacaggcatctgagcgtggttcaccctatttacanacttttgtttcctcactatcgtgacaccatgaacattaattca

SEQ ID NO: 13063 - DNA, 506 bp, Glycine max
  Clone ID: jC-gmfl02220144a03a1
ctgattgttcatctgtggacagctccgttctgtccttctcagatgagactaaaagcaatctgaaccttaaggctactgagctgagactggggcttccgggattgcagtctcccgaacgagattcagatctttgcttgagaagttcaattcagtttgatgaaaaaccactgtttcctttgcatcctgctactgatgatcaccattcctcatcaaagcctgctgttttgggtaacaaaagagggttctcagatgtcatgagtggattcgccgaggagaaattgcttgttagttctgaggtcaacacaatattgtcaccaaggccttcttctaatgtggcattgaaaccaagctctatgcttgagaatgttggggctcagcaatccaaagccaaagaactcgcaacagcgaaggttggtcttgagaggtctcatgttttcaatgatagcagaacaaatctgaatgattctgctaataacaatagcagtgcaccagctaccaaggcacag

SEQ ID NO: 13064 - DNA, 566 bp, Glycine max
  Clone ID: jC-gmfl02220144a06a1
acagcacaaagcgggttactgtctgttcaagctaccatctctctctctctttcttagtgcctccttgccagaagttaaaatggcccaagaaactttcctattcacatctgaatcagtgaacgaggggcaccctgacaagctctgtgaccagatctccgatgctgtgctcgatgcatgcttggagcaggaccctgacagcaaggttgcctgtgaaacctgcaccaagaccaacatggtgatggttttcggagagatcacaaccaaggccaacgtggactatgagaagattgtgcgtgacacatgcaggaacattggttttgtctctgatgatgttggtcttgatgctgacaactgcaaggtcctcgtcaacattgagcaacagagtcctgatattgctcaaggtgtgcacggccacctcacaaagaggcctgaggagattggtgctggtgaccaaggtcatatgttcggctatgccactgacgagactcccgagctcatgcccttgagccatgtccttgccacgaagctcggtgccaagctcaccgaggttcggaagatcggacatg

SEQ ID NO: 13065 - DNA, 576 bp, Glycine max
  unsure (1)..(576): unsure at all n locations
  Clone ID: jC-gmfl02220144a07a1
gaattcctcgcatgaagctctaactcattgttttcagttggctttttccttaaggaacatttctctcaatgaaaatgtaaagctgcaaccatcacgccgcagatctctctttacactggcaacatccatgattatcttcgcatccaaggcctacaacatcctctctctaatttctattgctaaaacgacattgacagatagaacagttgatccattcctgcaactggttaatgatagcaagttacaagcggttactgatacagataagcagccaagtaaagtttatggatcaaaagaggatgatgaagatgctttaaagtcactttcagcaataaagttaactgagagccagtctaaagaatcatttgctaccatgatagtgcagagtctgggaaaatcgtctaatgaatcatccatcttaagagaacggctgctgaatgatttctcacctgatgatgcctgtcctttgggagcccagttatctgccgagacaacaggaaatatgtaccagtctggactaaaagaagataaacttcctgatatggntgaaatttcattatttactattgacgatga

SEQ ID NO: 13066 - DNA, 553 bp, Glycine max
  Clone ID: jC-gmfl02220144a08a1
gtcctgctgtgaatatgagaatttcttgacattcgtcatcagaagttatcaactgctgccaactttgtgaaaagattgcatgatcttgcagttcagaagaggggttatgttgacttgcaagagatggtcagggaggacagtatcacatgctcatatggatccactcttccacaagatcctacttgtacattaccatgtagtttgacagaaacagatccttatactttcctgatacgtggagaaaattatcttgaagaccgccagaaggttaaagcaaagggaaccttgatgaaaatggttgctgcagattgggtgagatctgacaaaagggaagatgaccttggtggccgtcctgggagcattgcgcagaaatatgctgcacagggaggacccgagttctttttcattgtaaacattcaggttccaggttctactacatatagtctagcactatactatatgatgaatactcctgtggaagatgctcctttgctagagagttttatcaagggtgatgatgccttcagaaatccagatttaaactatccataca

SEQ ID NO: 13067 - DNA, 529 bp, Glycine max
  Clone ID: jC-gmfl02220144a09a1
agacaaagcaagtgatggtgattggtatcgacgacagtgatttcagcacgtacgctctccaatggactctggatcacttgctatcccctgcaaatgttcctaagttcaagatttttcttgtttatgccaagccttctgttgcctctgctgtcggttttgttggccctggagccgctgaggtgttacctgttgttgaggccgatttgagaaaaacagctgccaaaatcactgaacgtgctacagaactatgcaagaagaaatccgtaaatgacgtagcagtggaagtgctagaaggtgatcctagaaatgttctttgcgaggcagtggaaaagcaccaagcttcaatgttggttgtgggtagtcatggttatgggactttaaaaagagcggctctaggtagtgtaagtgactattgtgctcatcatgctcactgcactgtcatgatcgtgaagaaaccaaagcacatacactgatctcaatcgttggctccgattaaatagcagtgcacataaatcttttcagcaacagg

SEQ ID NO: 13068 - DNA, 541 bp, Glycine max
  unsure (1)..(541): unsure at all n locations
  Clone ID: jC-gmfl02220144a10a1
aagaagaagggggagctaaagtcaatttttcttcctttcctttccactagtcacataatcccggtagtggacatggccagactcttcgccttgcacgacgtcgacgtcaccatcatcaccaccgcacataacgccaccgtttttcaaaagtccatcgatttagatgcgagtcgcggtcgccccatcagaacgcacgttgtcaacttccccgccgcacaagtgggtctccccgttgggatcgaagccttcaacgtcgatacgcctcgggaaatgacccccagaatctacatgggcctatcccttctccaacaagtcttcgaaaaactcttccatgacttgcaaccggatttcatcgtcaccgacatgttccaccgttggagtgtcgatgctgctgctaaactcggcattccaggatcatgttccacgcgcatgttatctcgctcgcttcgctgcgcactccgtgaacagtacgcacnccacttggaagcaaaattcgacaccgccagttcgtggtacctgggttacccgataacttggagat

SEQ ID NO: 13069 - DNA, 440 bp, Glycine max
  Clone ID: jC-gmfl02220144a10d1
acaataaaactctatttttttattaaaagcattgtcaggaaatcgctaggttgtgaacacgatcgtagattcgtagtacatactcaccaaaatgatgatggacatcctgagtgctagaagttacaaaaaccaatgaaactaagaaaaaagacaatgatggatttccctgggatactgatactgctaagactaataagagtgtcccaaaatacattactcttgttcaaaagatggaaaagcagaaccagtcttaaggattgggtgcggtctcttgagcctccttggaaagcttgatctccttgagctcccgaatcaattccttcatgttgttgtgcgaagatccaccaacctttatagcactctatgccgcaacgcttagctccttggctctcttcctcattcctccatcttcttcttcctcactcatcaacgaagcaatc

SEQ ID NO: 13070 - DNA, 350 bp, Glycine max
  Clone ID: jC-gmfl02220144a11a1
ggtttgagggtctcttctttatacggatggcagcaccattggcatgtcttgttgggagtggtttatctatacagagtaataaattaactcttggcaaggacgtcaatggaagatatctcttctcatatcataggctttcagcacaagagtagggagtcaaagacaatatgcataaaggcatccttggatcaaaggaagcatgaagggagaagaggatttctgaaattgttgaatgtgggagttggcttacctgtattattaggaggtgggaaagcgtatgctgatgaacaaggaccttcctcctccagaatgtcttattccagatttcttgagtatttggataaggtaga

SEQ ID NO: 13071 - DNA, 465 bp, Glycine max
  unsure (1)..(465): unsure at all n locations
  Clone ID: jC-gmfl02220144a11d1
tggacaanaaggtatagctagatgcatncncnnataaattataagaaacaaaccaaaaaaanaaaaaaaannaaannaaannnnnnnnannnnnaattttattttttnatnnnancaaataattacaatgagggagggggttaatatgattactattcactaaggtgacattatgtactaattgtgaagaaacatacattttctgttgccaacacaagaataaaggaattgcagaagcaagctaggatcttttgtgattactaaaataaagagtcaggggtatattacaaatattttacaattatagaaaaattcagtatgtggagagctacactacattgcagtggcatataggctattcaaacaacatctggtgagggagtataaggagggacccgattttcaagaagaatattaacagactcggacaggagagctcggaattcatctacagacattgtctac

SEQ ID NO: 13072 - DNA, 563 bp, Glycine max
  unsure (1)..(563): unsure at all n locations
  Clone ID: jC-gmfl02220144a12a1
aggccccnnnatgaaagttgctcttattgcaaatcnannnntnnngttcgcgnncccnngcccggnnnnnggntcgngggggganccttggctggnggggcaccctttgaagtgcatttggtgttacaggtactactgttccagggttcagtcctggcctgagcttgccacaagcactttccaacacaagaactgatgggctaggagcactctacagagaaggcacagcttccttcctcaactccatggtgaacaacaagttcccttacactaccaaccaagtcagggacaggtttgtggcctcactcaactccaacaaggccgcagaagcacaagcccagctcttcaagatggccaatgaaggaagaatgaagcctagaccatgatgagcaagatagattattaagtaatcttaattagtttaattttggtgtgttgattcactctaagaacatttatatttaagatttctgttagtttgtatcatttaaggctctacatgtgttcattaatatgtcttgagatggatatcatgtttcttcgaactttaatgcaaactttat

SEQ ID NO: 13073 - DNA, 505 bp, Glycine max
  unsure (1)..(505): unsure at all n locations
  Clone ID: jC-gmfl02220144a12d1
tgganaaaattgtacaattgaagcatgcacnnttnnttgnaggaacnancnnanagaaaaaaaaaggagggannaaaannannnnnaanttttttaatttttaaaanaangnnnnnnnnanaaaaggggggggggataaataaaanaaaaaannagaaaaaaaccccccaaaaaaccaaattttccttctacgactttttattgaacccctttaagacccctttttcttgccaccctacccaaaatcttaaatataaaggtttttacagggaatgacccccccaacttaaacctatcaaaaatccttaaaaatctttcccggtcattaaggacaaagcttaattcttccttcattggccattttaaaaaacctgcctttttctcttccggcctttttggaattagaagaggccccaaaccctcccctttcattgttctaaaaagcaagggaactttttgtccccccttctgatgaacaaagacactttcccttctttgtacaagg

SEQ ID NO: 13074 - DNA, 557 bp, Glycine max
  Clone ID: jC-gmfl02220144b01a1
aagaaatatttaattggatcttttgaattgctgagtaaaactgctcccattcaagcgctttttcttcttattcttggtccatttgtcgattactacctcagtggcaaattgataaccagctataagatgtcttctggtgccattttatgcattcttctttcatgctcactagctgtattttgcaatgtgagccaatacctttgcatcgggcgcttttcagctgtttccttccaggttttaggccacatgaaaacagtatgtgttttgacgctgggatggctgctatttgattcagagctaactttcaagaatatcatgggaatgattatcgcagttgttggcatggtaatttacagctgggctgtagagcttgaaaagcagtcaaatgcaaagaccttacctcacgtgaaaaacagcatgacggaagaagaaattagatcattgaaggttggagtagaaaacagtcctctgaaggatgttgaacttggtgaggcccaaggatagattgactcagatttggcggtgaaattgatgagaaatgaattgcaggcattata

SEQ ID NO: 13075 - DNA, 585 bp, Glycine max
  Clone ID: jC-gmfl02220144b02a1
ctccacaacccaattttcttttcctatgtatccaattccaaatccaaatcaccaattctaattccattcttcaggagttgaattgaattcgtgatgaagagggaccacaaagatagctgcggcggcggcggcgccgccggagggactgtgaagggtgagtgttcctcaatgcagtcaaacgggaaggcgaagatgtgggaggaagagcaacagcagcagcagcagcaacaacagcaacaacaacaacaggggatggacgagttgctggcggcgttggggtacaaggttcgtgcttccgacatggctgacgtggcacagaagctggagcagttggagatggtcatgggttgtgcccaggaagacggaatttcccacctggcctccgacaccgttcattacgaccctacagatctctattcctgggtccaaagcatgttaaccgaactcaaccccgaacccaacaacaacctcgatccatcttctttcttgatcgacaacaacaacaacatcatcaacagcacagcccctgttttcaacgacgattccgtatatgacctcagagccattcctggcatagcagcctac

SEQ ID NO: 13076 - DNA, 539 bp, Glycine max
  Clone ID: jC-gmfl02220144b03a1
tctcattggattctgtcacaaggtttgctgaagcatggaatgcacgctcagcacccttgcatgttctcatcaataatgctgggattttttctattggagagccacaaaagttttccaaagatggttatgaacagcacttgcaagtgaatcatcttgctcctgccttgctttcgatacttcttttgccatcccttattaggggttctcctagtcgcattgttaatgtgaattccataatgcatcatgttggctttgtagacaccgaagatatgaatgtcacatctggaaaaaggaaattttctagtttggtagggtactcaagcagcaagttagcagagattatgtttagtagtattcttaataaacgactccctgcggaatctggcatcagtgtattgtgtgtatcacctggaattgtccagaccaatgtggcaagagatcttccgaaacttgttcaagctgcgtatcatttgatcccttacttcatctttagtgctcaagaagggtgcaggagtgctctctttgctgccactgatcct

SEQ ID NO: 13077 - DNA, 563 bp, Glycine max
  unsure (1)..(563): unsure at all n locations
  Clone ID: jC-gmfl02220144b04a1
aaaaaatgaccaagatcttctttgtattgctgctatgtctaatcatagcatcttcttctgggtttgtgaattgctctgatgttgagaaggaggaaaagattggaatatttgagctcaagaaaggtgacctttctttgagggtcaccaactggggtgcttcaattttgtccctggtgattcctgataagaatggaaagttgggtgatgttgttcttggatatgattctgttaaggattacagtaatgatacaacatattttggagctactgttggccgggttgctaacagaattggaggagctcagtttactctaaatggaatctattacaaattagttgctaatgaaggaaacaatactcttcatggtggagccagaggatttagtgatgttctttggaaagtgaaaagatatcaaaaagaaggtccaagtcccagcattaccttcagttaccatagtgctgatggtgaacaaggattccctggtgatctcctagtaactgtgagctacattctaacggngaaaaatcaattgggtatacttatgaaaggaaaagccctaaac

SEQ ID NO: 13078 - DNA, 547 bp, Glycine max
  unsure (1)..(547): unsure at all n locations
  Clone ID: jC-gmfl02220144b05a1
tataagcaagccctagaacacagcttctctgtctatgagagaaatccgctccgtactgacaacttactactcctgggtgcagtttattatcagttgcatgattttgatatgtgtgttgcaaaaaatgaagaagcactgaggattgagccacactttgctgagtgttacgggaatatggcaaatgcatggaaggagaaaggaaacattgaccttgcaattcgctactacttgattgccatagagctccgtcccaattttgctgatgcatggtcaaatctagctagtgcatacatgcgtaaaggaagactcactgaagcagcccagtgttgtcgtcaagcacttgctataaatcctctaatggttgatgcccatagcaacttgggtaatcttatgaaagctcaaggcttggtgcaagaattcgatacagatatgaagttgttgtcttcaagccagggctcagatgatggttgctcttgttgtaacttccatctccaagactgcaaatagtcagaatctaacattntttgcaggcatacagttgttacct

SEQ ID NO: 13079 - DNA, 552 bp, Glycine max
  unsure (1)..(552): unsure at all n locations
  Clone ID: jC-gmfl02220144b06a1
ctcgtatgcttgaattttcacgtgttttgtgtgtaatccgtagaaatcatgttggtgactggggaacacagtttgggatgctgattacaaacctctttgaaaaatttccaaacccagatgatgttagtgaagcagacattggagatcttcaggcattctataaggcttcaaaagtgaggtttgatagtgatcctgagtttaagttgagggcacagcaggcagttgtccgcctccagagtggagaaatcaagtatcgcaaggcatggaaacaaatttgtgatgttagtagggctgaatttgataaagtctatcaacgccttggagttcaattggaggaaaggggagagagcttctataatccatatattcctggggttctggagaaactagataatttaggactgattgaagagagtgatggcgcgcgtgtgatttatgttgagggtgtagacataccacttattgctgtgaaaagagatggtggatacaactattttacaactgatctagcatcacttttgtatncgctaaatgaagaaaaaactgagtgga

SEQ ID NO: 13080 - DNA, 554 bp, Glycine max
  Clone ID: jC-gmfl02220144b07a1
tggtcccacagtcggaggacttctttatgctacatgtgggaatgttactgagctcataatagcaatatttgcccttagcagtaacaaaattgctgtggtcaagtattctctgttgggttctattctttcaaaccttcttctggttcttgggacctctctattatgtggtggcattgcaaaccttaaagtggaacaaaaatatgacagaagacaagcagatgtgaactcacttatgctgttgttgggattgttgtgctacttgcttccaatgctgttcaaatacagtggtgcctcagctgctctcactgtagacccttcactccacttgtcaagagcttctagcattgtgatgttgattgcatatgtagtctacattgtctttcaactgtggacacacaggcagttatttgaagccgaaaatgaaggtgaggatggtgaggaccgtgaagaagaacaagctgtgattggattatggagtggcattgcttggttggtagggatgactgtgttcattgctgtgttgtctgaatatgtggtggatacaattgaggatg

SEQ ID NO: 13081 - DNA, 343 bp, Glycine max
  Clone ID: jC-gmfl02220144b08a1
tggtgccactctcaatggacttctgtattctacatgtaggaatgttacttaacacatacgtctctctattctcgctcatcatcaaccgaattggcgtggtcaagtagtttatgatgactctattcgataaaacttgtctgatctggggacctatctatgatggagtggcactgcgcaccgtaaagggcaacattaacacgacggaatacacacatctgtgatggctcatacactgcggcggggattgttgctgcacatggattctgggctgagaatacacacgagggcctctactgctctcactgtagaccctgcactgagctggcgctgagcgcttagcatt

SEQ ID NO: 13082 - DNA, 418 bp, Glycine max
  unsure (1)..(418): unsure at all n locations
  Clone ID: jC-gmfl02220144b09a1
tgcatctaaagcattagcnatctttaaacgtcgaagaaaaccncgaatctaaaattcggcttatagacaaagcttttacccccattgcattcttccacactgattacaacacgcacgcgggggggttgactctagatcacttgctatcccctgcaaatgatcctaaatacaagattttcctcgaatatgccaagcctcctgctacctctgtagacggttatagtgggccctggaaccacagaggagtcacctgcagttgatgcccatccgagaaacacatctgccaaaatcaccatacgtgctacagaactatgcaagaagaaatccttctaagacgtaccagcggaagtgctaaaatgataacctaaaaaagtactattcgaggcactgcaaaagcaccaaactctaatgttggcag

SEQ ID NO: 13083 - DNA, 606 bp, Glycine max
  unsure (1)..(606): unsure at all n locations
  Clone ID: jC-gmfl02220144b10a1
ggcnccnnccgggctgatgnctattgcagtcnacnnntnngntcncggncccnnccnnnnnnnnnnnnnnnnnnggnagngngngatgntcgcatattcgttctttttaatgtgtcaaaaaatacagggggcacgcagatgccaatcaatctctatctgggtctggtaatggcgatgctatagtcacggcctccttggatcatacagctcaggatacgaggtcggaaggtggtagtgagcatcacctgcatatgaaatgaggttatcaatcactctaagcgaaggcaacctgcatgcgaaatgaggatatcgatcatctaagcgaagttgctttatagagatgaacatgctcctttgttaatgaactcggaggctagttgatactctacataagttaaatagctgtcatcttagggtatctaaacctttgataatgattgtgatgttcaacggctgagcggacatatttattgcagacaatcagatttatgagctagcacggaagcaaaaaaagatgtctataagacatgagttcctgcttgtggaaccgtacaacatctgtgataacattattgatgaggtccttggaacttgtgaaatttttga

SEQ ID NO: 13084 - DNA, 145 bp, Glycine max
  Clone ID: jC-gmfl02220144b10d1
tttttttttttttttaataaataaatagtttttttttgtagaacaagatttataatttcacactggggggttttttttaaacgatttttcctaaagacaaaagctcgaaaattgcaaacctatgttgatcagatgatgctcccag

SEQ ID NO: 13085 - DNA, 633 bp, Glycine max
  unsure (1)..(633): unsure at all n locations
  Clone ID: jC-gmfl02220144b11a1
ganannaaatggtcgatgcctatgcaancaannantnnnntnncnnncccncncccnnnnnnnnnnnnnnnnnnnnnnnnnnnnnnnnnnnnnnnnnnnntttntttnncttttttttntaatgattggggaccgtagacaactacctatttggcctaaacgccttatctggtctggatatgaccatacgaggcattttttcattttcatcaacatggttttatatctggtgtgtcattgatatatgtaagaaatcttgacctgcatgtgcacttgcacacacattaaatcttaggatctaagaaaccaaagtctggctaagtatataatgtagacaggaaatccttagaatagaggtgcatactatcccagctttctttcacaagcagaatgatggatatgttggtttggaagtttaccttcttgaactaccttgtctgctagcgttctctagtgttttgattccgcacacatgggttgcttaaacattgtttgctctcatttgattattggtttcttggatataagagatactaacnatgcaggttgttgtaaccatttggtatcgtgcaccttgagtgcttcttggagcanaacattataccagtgctgntgatatgtgggctatgggat

SEQ ID NO: 13086 - DNA, 539 bp, Glycine max
  unsure (1)..(539): unsure at all n locations
  Clone ID: jC-gmfl02220144b11d1
gaanaaaaagtatctagactgaggcatgcacggataaattgccagggccccgaccacactagnnggaggaggggcngganaaaaannaaanaaaanaattttttttttttaaaantntatttttttttttttggggttgggttacaaaaacaaaggggcctttttttcatttaataaaaaaaagcccccttttgaaaaccttatgggatatcaacctttgggtttcctgcccttgaatctgccccagatctttaatactcactggcatggctttggtgtactcacgatatccatttgtttcaaggaacttaacccttttatccctttattcccttttatgggttcattggtgttccaccatacatttggcttttttgcattaaaattccagagaagaatgccccctttttttgtttggaataaagtgaggctttcaagttttgaagggaaacccttcccaaaaatgtcccgcaggagttcagggcctgaagttttgaccccaaaactctcttcccttatgctttcttccaacagaaacc

SEQ ID NO: 13087 - DNA, 511 bp, Glycine max
  unsure (1)..(511): unsure at all n locations
  Clone ID: jC-gmfl02220144b12a1
aataaacttatatattcattccgataaagtaaacgtagaagaaaacattttatcatctaatctgaaattgtgctctcaattgaagcaatggaagtaacagctgctccagtgccttatgtccaagaaattgcaaaggaggcattgaccatagtgcctgagcgttatgttcgaccagttcatgaacgtcctatattatctaactctacacctttacctgaaattcctgtcattgacttgagcaaattgttgtctcaagaccacaaggagcatgaactcgacaggcttcactatgcatgcaaaagaatggggtttctttcagctaattaatacnggagtggactcttcattggtggaaaaagtgaagagaggtgctcaagggattattcgatcttccaatggaagagaagaaaaagtttgggcagagagaaagagaagctgcagggtatggtcaaccttccgtggtttcagaggacaagaattagagtgggcagattttgtnttcatgttcact

SEQ ID NO: 13088 - DNA, 542 bp, Glycine max
  unsure (1)..(542): unsure at all n locations
  Clone ID: jC-gmfl02220144b12d1
ggaanncaaaagtgtctagcatacgatgcacgctcncgattaaatttccgggcgccgnccnnccnnnnnngngggggggcggggnnnnnnnnnnnnnnnncnngttttgtttcnnnnnataaaggccttattctcatcttggatgtactattttacaatgatttaatggatagatactcaacttacacaaaaagttgtgaatagttttgttcaaatacctctaaaagtctccaatgtttaatgatcaagcaattggaagagattgaaccggaatccacattccatcttaataatttgtataataattatctttattaatgatttattaactttgtttaaaagcctctcatttttggacatggcctcaatttactcatacaatagctgttggaatgacatgcttcactgcaaaagtaaatgcattgccaaatacagaagcctgtgtcgcacattaaaatttaatgttttccatccatttttgaagttctatgagctattctcattttcagcatgaattcttatggtgtcaagaaagatttccg

SEQ ID NO: 13089 - DNA, 514 bp, Glycine max
  Clone ID: jC-gmfl02220144c01a1
aacattaagcttggttcatcaaaaggcttcatcacttgaagggttactatatactacttctgtgactgaaaagtgagctgaggtgtataactgcaaatgggtgtttggtggtggaagctgtttgttgctgctcttgctgggattctcttctcaacccaacattgtgcttcccaaaaagttccaaactacacatttatgcacaatgcaacgacagcaccagacgtatcatactacgactacatcgtaattggcggcggcaccgcagggtgtcctttagctgcgacactgtcccaaaattacagcgtgttgctccttgaacgcggtggttcaccctacggcaaccctaacatctccgacttagctgctttcggtgctgccctctcagacacctcccctacctctcccgctcagcgtttcatctccgaagacggtgtcatcaactcaagagctcgcgtcctcggtggtggaagttgcttgaacgctggcttttacactcgcgctagccctcaatatg

SEQ ID NO: 13090 - DNA, 560 bp, Glycine max
  Clone ID: jC-gmfl02220144c02a1
tgccaaactcaaaaactgaattcaatggcttctctttcattgcctctgaatttgaaatggacgccgtcgtatgtgaaggccaccgctcccgccaccaccaccgggatggtccccgaggtgccgctgccggagatgatccgcatctcgagaatcctcgtcctcggcggaacgggtcgggttggaggctccaccgacactgcgctctccaacttatgtcccgatcttcaaatcctcgtcgccggccgaaacagggagaaaggtgaagctctcacagcaaaacttggcggcaattcacaattcgcttgtgtcgacatcgacgacgtgaattcgctggaaacggcgttgaagagtgtagatctcgtagttcatgccgctggtcccttccaacaagcagaaagatgtagcgtgctagaagctgcaatacatactaagactgcgtatcttgatgtttgcgatgacacgagctatgcatggcgtgcgaaactcttgatgaatatggcgttggatgcaaatgttccggctataacaaccggaggaatataccctggagctagcaatgt

SEQ ID NO: 13091 - DNA, 555 bp, Glycine max
  Clone ID: jC-gmfl02220144c03a1
aaaaaaaatcgtagttggaggcgccgttctccactccactccaatcaatcagatactagcgatggggaggaagcgaaaggtagcaccgaaatcttctgtatccgccgagcccccgctgaagcaacaccaaccaaaacccgaaaatgccgctcaggaatacgaagaagaggtcgaagaggaagttgaggaagaagaggtagaggaagaggtcgaagaggaagaagaagaagaggaggacgaagaggacgaggaagaagaagaagaagaccaaaaagaccaataccagcaccaacaacaacagcaagacgaagacgacgacccgatctccaagcttctggaaccgttgagcaaggaccagctcctcatccttctctgcgaggcggcggccaagcaccaagacgtggctgagaggatccgaagggcggccgacgaggatccggtgcaccggaagatatttgtccacggattgtgctgggacacaaccgccggaaccctaatcagttcgttccgccagtacggcgagatcgaggactgctaggccgtcaccgacaggtc

SEQ ID NO: 13092 - DNA, 423 bp, Glycine max
  unsure (1)..(423): unsure at all n locations
  Clone ID: jC-gmfl02220144c04a1
tgctctccttcagctgccaagaagaggcctgtgtaagaaacgtgctgcggatgctacgtgaggagtttgagctaaccatggccttgagtggttgcacctcactcaaggatatcactcgtgatcacattgtcactgattgggaccaacctcgcattcttccccgcgcattgccaagattatgaaaaatttgctcctcatttgagccaagntngnntaatgnngngcanaacaaaggaggaaacagnnnganatgnggngaaggaacctnctttatttggctgtgtggagaactcatttatggttgtatttggaaaactctatgcttaacttcttttatgcattatatgatgatactttgggtgactactgctgctgctgcatttaattcactctttggttacttctacatctgcgaaatttatt

SEQ ID NO: 13093 - DNA, 578 bp, Glycine max
  Clone ID: jC-gmfl02220144c05a1
ctcaacaaaaccttgcctccctcttttttcttggcggcagctggggcaaccaagctctgtgtgcaacgacgccgtttcgacctcctttcttcactctttggcgagcaagcaagcaagtaacaatggcgactcgcgacggcggcatgaagtcgacgtcaataaacggcgttaagatgtacacgatagcgtcgcagcaaccctcactcgcttcctggctcccctcctccaagaagcagaactctcatcgcaacgtcaaaagttacacgcagaacctgcaacttctcgaagacttgcgcttcgccaccgccgccaccaaaatcaaggccactcccgacggcgagtacatcattgcttccggcatctatccgccgcaagtcaaagtctacgaggtcagggagctaggcttgaagttcgaacgccacttggattccgagatcgttgattttcaggttctgtcagacgactattcaaaacttgcatttttatgtgctgatcgctctgtttatttgcatgcgaaatatggaaagcactacagtttgcggattccgaggatggggagagatatttcttatgactgc

SEQ ID NO: 13094 - DNA, 553 bp, Glycine max
  Clone ID: jC-gmfl02220144c06a1
atttccttggcggcgcaggggtgatagggttgaatattcaagaagaatttgtgaagttcacgggaataggtgtttatttggaagacaaggccgtgtcatcactcgctgccaaatggaagggcaagagtgcagctgaattgctcgactcccttgacttctacagagatatcatcaaaggcccctttgagaagttaattcgagggtcaaagttaagaacattggatggtcgtgaatacgtaaggaaggtatcagagaactgtgtggcacatatgcaatctgttgggacttacagtgatgaggaggaaaaagctattgaggaatttagaaatgctttcaaggatcaaaatttcccaccaggctccactgttttctacaaacaatcacccactggaacattggggcttagtttctcgaaagatgagacaataccagaacatgagcatgcagtgatagacaacaagccactttcggaggcagtgctggagactatgatcggagagattcctgtttcccctgctttgaaagagagtttggctacaggtttcatcagttc

SEQ ID NO: 13095 - DNA, 505 bp, Glycine max
  Clone ID: jC-gmfl02220144c08a1
ctcagtttctccaaacccaaactttctctacaggtgcgtttggttttactttaaactatgcaatattcatctgatcctctagcttcattcattcattcattcatcttcgttcagatcatgatctgtgccttgcaccatggaaaaattgaattagcttaatttcactgaatttatgcatgattaacgggaatctaatgttgattcttttttatggccagatttcgtttgaaattttgtttgttttattttgttctgtttttggtttgcttgattggctttaatttattgagatgtaaaaaaagtgttcacaaggaagaggcaattcagctacgtgtacggaggaattcattcttggatatttatgattaaaaataaattttggattttgtactgctatgacagagatttgcatgttttagcatattaggatgtgtagcattgatgcgttccctgtttggcgtcttttgtgcttcgatgggccttggataggaataggttattagtg

SEQ ID NO: 13096 - DNA, 376 bp, Glycine max
  Clone ID: jC-gmfl02220144c10d1
aaaaaataattttttttttaaaaaaggattattaggcccccccaaaagggagtgtttggatctctctttctgggcgatctctcccaaaaattttcccatgacctagtatgaatatcattccccggtattgaattaagtttttccaccctacccaacccccatgctgttcaacacgcgagttgctaatgacatctttcttgcatacccacaccgttacgtttcagaacagacactgaaatggctcacttgcactcaaaatgatcctattgtattaccgttcataaacatcttggctgaacagactgcttttgcgaaccgagcatcgtgatctactggaacgggccgcaactgggcccctgattggagccacgcccat

SEQ ID NO: 13097 - DNA, 630 bp, Glycine max
  unsure (1)..(630): unsure at all n locations
  Clone ID: jC-gmfl02220144c11a1
tgcnccccnnaatggtctgatctcctaatgcagaccanaaantnnnttnncnnnnnccnnnnccnnnnnnnnnnnnnnnnnnnnnnnnannancananaananannnatttattttttttttncnattatcatctccctattttgatttttatttttattttttcatataccaaaagagtgaagttttctcacgaggttgatctttccccaattcgtaccacctttttttttcggttcatcgtttcattggctctttttttttttttttgttggctttttgagaaaggagaaccaaaacacttgcaagtgaagttcttagttaaaagaaattatttgtttcaggaaaaaaaaagctaaaaatggggtcgaagtggatgtggttgatattacactttgcatcggttttggtgtttgtttggggagatagaacaattttgaaggtggaagggcctatgttgttggataattcacagagatatgaaggcagtttcattagcaaagcagtgaacttcttatggcaaccagnggaatcaggttatcaacacgtttggccagacatggaatttgggtggcaaattatcttgggtaccattgttggattctttggagcagcatttggaagtgtaggt

SEQ ID NO: 13098 - DNA, 614 bp, Glycine max
  unsure (1)..(614): unsure at all n locations
  Clone ID: jC-gmfl02220144c11d1
ggaaaaanaatggctatctcttatgcacncnnnnnntnnatttnnnnnnccnnnnccnnnnnnnnnnnnnnnnnnnnnnnnnnnnnnnnnnnnnnnnnnnntttnntttnnnnnnnnnnnnnnnnnnnnnnnnnggggnnngtttatgttcatattatacctnttaacaagagcccaggcacacacagagcacaagtgagtgtttgaaatagtgtcccacaatttaacatttttttccttacagaaaacccagataaatacatagaagcatgtatgcattgctttcaagtccactgttttttacgggaatccaagcataccttaagtcaattttggcgacctaggttctcttggctcctttattgggaacttgagacaaaacaaagcataaaataatttagtgaaatgggctatgaatcatatgtgcagaggtcatcaaatcccatatactcgtgattttcaatctttttgaccattgctacaatgccaactccacctagtgagactgcgctgacaagtattgtgaaggctagaacaaagatgattagagatgctctcgcaagcacatcgatcagctttctcacaatatgctgccctacaattgctgaaatagc

SEQ ID NO: 13099 - DNA, 523 bp, Glycine max
  Clone ID: jC-gmfl02220144c12a1
aaacactgtcgtttcgtgggtcagaaatcttttccacgattgcgtggttaagtcatgcgatgcatcattactgttagcgacggtgagcgatgtagtgtcggagcagacatcggatagaagttttgggatgagaaacttcaagtccgtaaacactatcaaagcagcgggtgagaaagaatgccccttcacagtgtcatgcgctgacattgttgctctttctgccagagatgccattgctttgttgggaggaccaagcattgaatgaagacagggagaaaggacagcacagaaagctatgcaatggaggtggaagacttgattccaaaccacaatgattgcatgtcctcagcgctgtctcgttttcaagccattgtcattgacgttgaagccacagtcgctcttttaggagctcactcagtgggaagagttcactgcaagaatctggtgcacagattataccccaccatagattcaacactggaccctgcacatgctgagtacctaagacgtccgtgcccaacac

SEQ ID NO: 13100 - DNA, 514 bp, Glycine max
  unsure (1)..(514): unsure at all n locations
  Clone ID: jC-gmfl02220144c12d1
gccagnaatggatagctcatgcacncncgattaatatngggncnnncnnnnnnnnnnnnnnngnnnnnnnnnnnnnnnnnnnnnttttttttnnnnnnnnnnnnnnnnnnnnnnnngggggggggagtnctttataaacctttaatatgactgaggctttgtaagctgaagtcaagtaacattcacatctatgaacaacgccaacctcaagggtttttatatacgataggcccaatagctttctgcactgaatatgtatggttacccaagcccaattcgtttcacaccctctttattttgacacactcctgcattataatcttatgctaattatacatattattatgcacaactgcacgcttatctcatatatctaattggcattgaggtggctacaatcctttctgatttgtccttcatctactgcaaaaggatgtgactccgataacaaaataacggcccttgagaactgctggttgaaatattcattgtcattgcgccatcttttggacat

SEQ ID NO: 13101 - DNA, 594 bp, Glycine max
  Clone ID: jC-gmfl02220144d01a1
gtttgcttatgtatttatcatgttctttccatattaatatatgcaggttgatatttgtacctcattaccaattgtcaataataagtgctatgcatattcaaatgtcagatgtttacccaaactctgctacatactgtgcatttgtgtttaatattttaaagttctctctctcttccctgttatcttgtctagagtgaaataatggaattttgatttatttgaagaaaaggaaagaaagggggctatgagtaagtaacaaatagttaatttaccgagtttcaacaggtgtaccttttggttcatacaaatgaagtaaagctgaaggactggcagagaactaaaattgaaatgatgcaaaaagctaaagctaataaggaatttgaggcaaaagaatcacatggggatcctcaaatatcttcaagggggagttcacctgattcctcacttggtacaaaaagtagtggactggaaatagactcaaaccagaataagtcaattatggatcacgggtttgaaatttattctagtgctgaaagtaatacggccaattgtaaacttccattcaatcaaaatggagacgtctctgagaaaaca

SEQ ID NO: 13102 - DNA, 557 bp, Glycine max
  unsure (1)..(557): unsure at all n locations
  Clone ID: jC-gmfl02220144d02a1
gcctcaagttagtaacccttcctctctttttcttcttattctgtttcaaaaaccattttttattattttccggatggcgtccggtactgtgaaaccttcttctcggtaccgttcctacgattcacgctcctccacttcctctcatttctccgacccttcctcctcccatgaattcaacaatctcaaaaccaaaacctcttcttcttcttctcgcgctctcgtcaaggccaaaccctcaaacaccgccaaggtggaccccaccttcaccaccatggtcaagaagttcatggacaggaaacccaaatcctcctcctcggccgccgccaccgccaccaggttgattattccctccgattttctcgcgaaggatttgaagaaggacgcgaagaaagtggcggggttctccgcgctgcagaagaagctcttcggaaagggcgcttccgagaagaaggagaaggtgaaggccttgaccgaggtgaagaacaacaccaggacattggccatggtgctcangagcgagagggagcttctcagcatcaacaaagagcaggagcagc

SEQ ID NO: 13103 - DNA, 389 bp, Glycine max
  Clone ID: jC-gmfl02220144d03a1
ctctcttcagcatccaagaagaggcttttgtaagaaacgtgctgcggatgctacgtgaggagtttgagctaaccatggccttgagtggttgcacctcactcaaggatatcactcgtgatcacattgtcactgattgggaccaacctcgcattcttccccgcgcattgccaagattatgaaaaatttgctcctcatttgagcccttggagaaaaatgatatacgtatcactagtgagcatgtagaaaactatagtggatgaacatcacaattaccacaggagtgagacacacgtggttagaaatggattcaagtgatgttgcaccctctttaccaaagcatactgctgtgaacatatctgcaatgacgctcatgatgaatgctgttgcat

SEQ ID NO: 13104 - DNA, 480 bp, Glycine max
  Clone ID: jC-gmfl02220144d05a1
tcttcccaaccactactactcactctcttcagatctcaattgcatcgctgtccatggctaccatcgttagcatcaaggcccgccagatcttcgacagtcgtggcaatccaactgtcgaggtggatttgacttgctccgatggtacttttgccagagctgctgttccaagtggtgcatgcactgggatttatgaggcccttgaattgagagatggaggatctgactaccttggaaagggtgtgtcagaggctgttgacaatgtgaacaccgtcattggccctgctttgatcggcaaggacccaactgagcagactgctattgacaacttaatggttcaacagcttgatggaactgctaacgaatggggttggtgcaagcataagctaggagcacatgccatattggcagtgtctcttgcagtctgcaaagctggtgctagcgtcctgaaaattcctctatacaagcatattgctgatatcg

SEQ ID NO: 13105 - DNA, 344 bp, Glycine max
  Clone ID: jC-gmfl02220144d06a1
atttccttggcggtgcaagggtgtttgttttgaacatacaagaataattggccatggctaccgtaattagcgtctatgtggaacacatggtcgtgtgatcactcgctgccactgggaagggggagagggcttgctacttggtccactccctcagactcttacagagatatcatcacatgcccctttgtgaatgtagccctagggtcaaaagatagaacatcggacggccgtgaatacggtgggtaggtatctgagaactgtgtggcccatatgctatccgctgggacttacagcgatgacgcggctgaagctactgaggtagtcagctatgcggtccaggatca

SEQ ID NO: 13106 - DNA, 583 bp, Glycine max
  Clone ID: jC-gmfl02220144d07a1
caaagatttgtaagaaaaaaactgttttcaactttctttttttctctgtacaagtatgtggattttccattattggtaccaatgggggtattggagtgccccagttaaacctatactgaagaagtatctgagatttcgttttctgggctactttctgaattaactaagctttctgacaccaaatagatgaagtagtttgttgattctaagattgttctatggatttaaaatatttcatcttcctgtgaaacaatactactactactactactactaatcttgcgatttatgtgtgtatcttagattctttttacataagtgtgcataaatatcttactatcttctctatatttcattcatgtttttttaatccgcatttctttcaattcaagattccagtatggatagtttttgttcctctctagcagaggtgttctccccaagagtttttaaaaacaatttctataagccagaaaactctattaaaacaaaacaatattaaaggtgtcgtttcgctagttcattcatatttcaaggttcttccccgtcttttttattcttatgtaaataaaaatcaaactta

SEQ ID NO: 13107 - DNA, 530 bp, Glycine max
  unsure (1)..(530): unsure at all n locations
  Clone ID: jC-gmfl02220144d08a1
ctctagcgttgttgcattgcagaagcgtctccattttctttcgcgatggccgcgcgagccctgttgaccagaaaaaccctagccaccgttctccgcaacgacgcgaagcccataatcggagctggcatagctgcagctactcattctcgtgggttgcacgtgtacacgctccccgatctggattacgactatggcgctctggagccagccatcagcggcgaaatcatgcagctgcaccaccagaagcaccaccagacttacatcaccaacttcaacaaggccctcgagcagctccaagacgccgtcgccaagaaagattcctccgccgtcgttaagctccagggcgccatcaagttcaacggcggaggtcacgtcaaccattctattttctggaaaaatctagctcctgttcgtgaaggaggtggtgaaccacccaagggttcactgggatgggccattgacacacattttggctcttttgaagcattagtacanaaagttaatgcagaaggtgctgcactacaggggtc

SEQ ID NO: 13108 - DNA, 703 bp, Glycine max
  unsure (1)..(703): unsure at all n locations
  Clone ID: jC-gmfl02220144d10a1
nggggnnnnaaggggatgagtactctaaggcatnccannnnntatngtcgcgnncgccagccngggannnggggggagcgcnnctcaannctcatattccaatggcaaatcctcaaacaaacaataaccgccaccagcccagccgcctgcagcgccgcgccccctcctccctgcaaataaaccgcgccgtcgagtggaacgtcgccatccccctcctcttcccggctcgcatcctctccgccgccgatggagctaaaaccgccgcaagagccgccgcagcgggaggcggagaaggtcaccgtgtcgttcaagaagtggcagcaccccgccgcacctttctgttacgagcccgctcccatggtgcctcccttcgttcccgtgtagatatacaaaccaaagaaaaagaagaagatgaaggaacagagagagttttaggatgctgctatctaatggttcatactactatttagatagaatgaagaaagatctaacgctgtatttttaattaattattattggtcctttttttttggtggggagaaggcntgccttgctttgcacacggggattaccatgttcatgcctcattcattcatgtgatatgaatgaacattacaccccctctgngntntnttctctctctcttttttagcctttccccgtttttttttatgcctttcatnttggggctaaataaactact

SEQ ID NO: 13109 - DNA, 434 bp, Glycine max
  Clone ID: jC-gmfl02220144d10d1
ggggcggaaaaaaaaaaaaaaaatttcccctggggggcagggggggattttggccccccaactgaaggggcacaaaaaaaacggggggcatcttccgacaccgaggcaaacaaaacccccccgggggggggcgctcctttcttcttcccccccggtaagggggcgcctcccttttttcccccggggggaaacaaaggggagaccccccccccccccaaagaagggggcccgctttttgtttctgaaatccccggggtgattcttctttttttctctaaagaggggggggccccccctgataccgcgccccccaaaaccgttccggggccctagtttgttttttttttttggggggggccctctcccgcaccccggggggggcccccggggcgggcctccacaccaaagagggggggggggggggtgcctttttt

SEQ ID NO: 13110 - DNA, 517 bp, Glycine max
  unsure (1)..(517): unsure at all n locations
  Clone ID: jC-gmfl02220144d11a1
ggggnnnnnccgggtagatgtcgtataccanncnannnnntnnnttccccncnccnanncnnnnaaatagntcnagggggngctgaaactgcagaagcggctggtcgcatgcgtgctcaagtgtggcagaggaaaggtgtggcttgaccccaatgaagtcaacgaaatctccatggccaattctcggcaaaacatcaggaagttggttaaggatgggtttatcatcaggaagccaaccaagattcactcacgctcgcgtgctcgtaggatgaaggaggcaaagaagaagggccggcactctggttatggtaagagaaagggtacaagggaggcgaggcttcccaccaagatactttggatgagaaggatngcgtgtgctcaggcggttgcttcgtaagtacagggaatcaaagaaaattgacaagcacatgtaccatgatatgtacatgaaggtgaaaggtnaatgttttcaagaacaagagagtcttgatggagagcattcacaagtccaaggctg

SEQ ID NO: 13111 - DNA, 542 bp, Glycine max
  unsure (1)..(542): unsure at all n locations
  Clone ID: jC-gmfl02220144d11d1
tgaanannnacggggtgagcatacatgcacnncccggaagtaattnnccgggccacgaccccactagaaggagggcggccggganaaanaaaaaaaanaaaaattttttttttantattnccgcaaccagatgaatggggggggcaaattcagtaaaccccacccaacaaaatatataatttaaaatatgcaagatatgaagtttttatacatccaaaacttaccaaggtctaaaaccaacaaaaagagattcgtcacaactactttagcagactaaagattttgccagagctattaaagactccacgtccttggaattccaggatatgctactcactttttgaatttctttggcgcttgggtaaactggggtgctggggcacctggggcactgggggcaaaaaatgtcttgtcaataggaccttgggctaagcgctcctccctccgagcaagattgctttccctgctagccttgttctttgcacgcttagcctcaaactgatcagacaaagtcttctttcttgccttctcagccttggact

SEQ ID NO: 13112 - DNA, 131 bp, Glycine max
  Clone ID: jC-gmfl02220144d12a1
gtgtcggtgaacctggagctgcatctgttttttttttttggggccctcagatgacgaaaagtgtggtgagtctccttggcagtggaggaaaaatccatggaccattcaccgacacacatcaagacattgga

SEQ ID NO: 13113 - DNA, 588 bp, Glycine max
  unsure (1)..(588): unsure at all n locations
  Clone ID: jC-gmfl02220144e01a1
atttgaaaacaaaacctaacagtaacactcttgtagagcttgttttccattccatctgcaccgaactgcggtgtagtgtttgttggtgtcttgagcatggcgacgcaactgagcgatgcggaactcataaccagcttgcaagccagggtcaaggaattagaaactgagaatgcaaagttattgtcccaacttgctgattgccgcagtcacgagatggagaaaaaagtatatgtccctgatgagagaggcgggaaatcaaaaaaaggcaacaggaaatctgaagagaagatagagaaaatgccaggctataacacaaggtttatgagtcatcatagcaggagatatgtagctttaaaagtcatgtactttggaaaaaggttttatggttttgcttcagaggcacaaatggaaccaactgttgagtctgaactttttaaagcttttgagaaaacaaggctattggttggcaataagaaggaatcacagtattcaagatgtggtagaacagacaaggnggtttcctctgttggacaagtgatagctcttttnctaagatcaaacctcaagatatctgaaacaaataatgga

SEQ ID NO: 13114 - DNA, 515 bp, Glycine max
  Clone ID: jC-gmfl02220144e02a1
cttcaaaagattgcagcattggaagcacttaagagaatgagtctgcagatggagaggaagaagcctgaggagaagaccttgagtagttttggacacactgcgaggtacagaagatacaccattgaggaaatagaagaggcaacaaacatgttctcggagtctctcaagatcggggaaggagggtatgggccagtatacaggtgcgaactagattgcacccaggttgcaataaaggtgttaaagccagatgcagcacatgggagagagcagttccagcaggaggtggaagtgctgagttgcataaggcatccaaacatggttcttctgctgggtgcgtgtccagagtatgggtgtctggtgtacgagtacatggccaatggaagcttggacgactgtctgttcccaagaggaaaatcacggccacctctcccatggcagctgaggttccaaatcgctgcagagatagccacaggtctccttttccttcatcagactaaaccggagccactggtcca

SEQ ID NO: 13115 - DNA, 539 bp, Glycine max
  unsure (1)..(539): unsure at all n locations
  Clone ID: jC-gmfl02220144e03a1
attgaaaggaagacaaaacacaagactttttcattcagcaaggcttgaaacgagaagcgaggatgcccatcagatgtattctgcattggcaaccgaaccaaggaagcgttgtgaacagccaagtcctgaatgagatctcgcagtgcgtcgaaagccttaacggcgtcaaagaaggaagatgcaaagcctccctcactttctacagacccaatttacgagaccaatcggtgaccatcgattttcctcgcgattttctggggatatcgatgctggagcagccgaacaaatactacttaatcattcgcggccagaagattgttctcgaggccgattcttctatcttgcttatcatggagaaactccagtcctacaagtccaaagtcgcccttcatttcagggagtgctgtataagttgggtgactctcagatcagggtgattaaagttgttcccagtcaagcggagagtctcagaggaattatgattgagattgagtatctncctatctcgtcagttggaaaatccaagcaaattttggaag

SEQ ID NO: 13116 - DNA, 515 bp, Glycine max
  unsure (1)..(515): unsure at all n locations
  Clone ID: jC-gmfl02220144e04a1
gagtgagtgtgttgcaattgcgattgttttaagctccataaaaatgccagagttagggtttcaggaacgaaggtcgtggaggcggagaggcggcgacaccagccccgactccgtcatcttcactctcgaatccaacttgagcctcttctcctccgcctccgccagcgtcgaccgctgctccttcgcctccgacgcccacgaccacgactccttagcctctgaaatctcactccatttggcagtgcaggatcacgacggcgatttcgctcgtagcgaaagctggagcggtcaagatccggatccggatctgaataaacgacaacaacaacaacaacaacgacacgcagatacagattcagatgcagtacatgggaagcatcgccgaaatcgtttctctggaaaaagagagaaagcgaaagttcataaggaagaggacagtgatggtggtgacactgaggacggaaatcaacacttagaatntgattcggccagaaactctttctctctggctctca

SEQ ID NO: 13117 - DNA, 566 bp, Glycine max
  Clone ID: jC-gmfl02220144e05a1
gtcaacattcctttgttggttgatgcttaacacacttctgttcaacctgctattgactacttcacatactcctctgccatcttgcacaacaaaggtgacaaccccattgtgtttgggaccatgcagacctacctcaaggatgccaaggagagactcttgctggctgcagaggctgcagacaacatgggaatcccaatgggcttcaaacttgtcaggggtgcttatatgtcaagtgaaacaaaattggctgagtctttgggctattcttccccaattcacgacaccatcgaggacacacacaagtgcttcaatgactgctcctctttcatgcttgagaaggttgctaatggccctggtggacttgttcttgcaactcataatgttgagtcagggaaactggctgctgcaaaagcacatgagctagggattggaaaggtgaaccacaagcttgaatttgcacagctgcatggaatgtcagaggcactttcctttggtttgagcaatgcaggatttcaggtgagcaagtatatgccatttggaccagtggagactgttatgccatatct

SEQ ID NO: 13118 - DNA, 528 bp, Glycine max
  Clone ID: jC-gmfl02220144e07a1
ggaaaggtgggtgatgaagtgaagtgttctgcgattgcgaatggaagtgagcgcgaaggtgaaggtgggtgggtttctatggttggagggtttggttgaggcgtgttgccttcatcgcgttgttattctgtgtatgaggtcaaacaacctattgatgcgaactggtcagtgtttcctcttaaatggtttcatcttcttaggaagtatattcgtcctaaactcggttgtcatccctgcattgtggtggatattacctgaccaaagctcacagtttgtttctcataaactctgtgacttaggtggcactttgaaattttattctttcgtacgtcttgcactcattcagctcttttatgtgctttggttttacccattatacgtgtttatcatagttcttagcacaatttggtacaacgacattgcgaagtatgggtatgctgcaatgggaagatctaaatttactgtaaagaaaggctcaagccataacaactcaccaactttacaaaatgctcatcatgtaaaaggacc

SEQ ID NO: 13119 - DNA, 592 bp, Glycine max
  unsure (1)..(592): unsure at all n locations
  Clone ID: jC-gmfl02220144e08a1
ggaaaggtgggtgatgaagtgaagtgttctgcgattgcgaatggaagtgagcgcgaaggtgaaggtgggtgggtttctatggctggagggtttggttgaggcgtgttgccttcatcgcgttgttattctgtgtatgaggtcaaacaacctattgatgcgaactggtcagtgtttcctcttaaatggtttcatcttcttaggaagtatattcgtcctaaactcggttgtcatccctgcattgtggtggatattacctgaccaaagctcacagtttgtttctcataaactctgtgacttaggtggcactttgaaattttattctttcgtacgtcttgcactcattcagctcttttatgtgctttggttttacccattatacgtgtttagcatagttcttagcacaatttggtacaacgacattgcgaagtatgggtatgctgcaatgggaagatctaagtttactgtagagaaaggctcaagccaaaacaactcaccaactttacaaaatgctcatcatgtaaaaggaccattctgcttgggaggggtcatgattggaataggacagcangtctattcaatactncctttgagt

SEQ ID NO: 13120 - DNA, 609 bp, Glycine max
  unsure (1)..(609): unsure at all n locations
  Clone ID: jC-gmfl02220144e11a1
agggcnnnnaagggctgatccttattgcagaccannnnntnnnntgncnnnnccnnncccnnnnnnnnnnnnnnnnnnnnnnnnnnnnnnnnnnnnnnnngnnntttnattgagcgtgtttnnttccaaaccgcactggggaaatgactaaagaagaagactttaagctccttaaaatccagacttgtgttctcaaagtgaacattcactgtgatgggtgtaagcagaaagtgaagaaactccttcagagaattgaaggtgtttaccaagttcaaatagatgcagaacagcagaaagtaacggtttcaggttgcgtggattccgcaactttgatcaagaaactggtcagagctggtaaacatgctgaactttggtctcagaaaacaaatcagaaccaaaagcagaagaacaacaatgccaaggatgacaagaacaaagggcaaaagcaagcactggtcaggggacttgaggccttcaaaaaccagcagaaatttcctgcttttagttctgaagaagatgaatactactccgaatatgatgatgacgatgacgaggacgaagatgaagagatgcggnttctgagggagaaagcccattcactncaaatgc

SEQ ID NO: 13121 - DNA, 613 bp, Glycine max
  unsure (1)..(613): unsure at all n locations
  Clone ID: jC-gmfl02220144e11d1
gggcaccnaaaggagagagcttagatggcagnncncctaaataaattaacaggnaacanaccccnaaaaannnaaaaaaaanaaaannnnannnanaaaaaaaaaaaatttttatttaaaaannnnnaaaaaaaaannaaaagggggggggtatntttanacagtacactgatatgattcactctaagcctcacacatccatccatccatccatcactaacacattcatatggccccaccaaattacagtcaaacactatactagcttggtaaatggtaaatagaacttttaaggtcaaaccaccatccgttttttgttttttttttaaaataaaataaaaaacttttggctctacaacctatcattacattattgaacaactgctgctagtattgacatcactgaacatgtgagctgcagagtgatgatcatcacctcctgctgcagggtaaccaggcaagccatacgaggagtaggagtaatgtgcagggctgtagctactactgtggttgtagtaatagccagtgttagggggaacaaaaggtgacctgtgatacatcatctggggttgctgctgcatcatggctngccttgcctgctgctgcatgttca

SEQ ID NO: 13122 - DNA, 583 bp, Glycine max
  unsure (1)..(583): unsure at all n locations
  Clone ID: jC-gmfl02220144e12a1
gctgattccacagacacacaccgctttactattatgcaagacccttctcgccccgcccctcctcccttctaccaccaaaacggcggccagcctcctccccccgccgcctccgccgccatcgccaccggctacccctacgcttgcccacaacaatactacaacaccacttaccctcctcctcgctcctacgcctcccgctccttcttccgcgctttcttcgccaccatgatctgcctcgccgtcgtcttcggcgtcgtcctcatcatcacctggctcgtcctccgcccctccctcccccacttcaccctccactccctctccgtttccaacctctccagcacctcccaatccctctccgccacgtggcacctctccttcctcgtccgcaacggcaacaagaagatgaccgtctcctacaacgccctccgctcttccatcttctaccgccaaaactacatctncgagtctcagctcgcttccttcaggcaggacaccaggtcccagaccacactcaatgccaccctcaccggcgncggcacctacctngagcccaaactgatcgacaatctcaacgccgagagga

SEQ ID NO: 13123 - DNA, 547 bp, Glycine max
  unsure (1)..(547): unsure at all n locations
  Clone ID: jC-gmfl02220144e12d1
tgggaaanntttgacacacttacatgcattncncnaaataaataaaaaggaacaaaccaaaaaaaaaaaaaaaaaaaaaaaaaannnaaanannnaaaannatttatttttaaananaanaanaanaannnananggggggggggnaaataaaaaaaaaaaacaattgnaaattttccactaacaaagtttcaaatctccactgagtgctctaaaaaggcaagccaaccaatataaggttgctgataactatatacaatcatataaactaccaacaaaattccattgaaacctaaaccaaatcgcataaatataaaccgtcgaaagcatcaattaactatatataataaaatcagaaaattaaatttccccccattaccaaacctagggttttgaaaaacatcaccctcagaaaattcacgtccacacctgacattcccgatctccgccgaccaaatcaccggagctggacttggacgaaacgccgacgggtactttgcggcacagaaccttgagaaccctcgtcctgaacctccacgagccggaac

SEQ ID NO: 13124 - DNA, 577 bp, Glycine max
  unsure (1)..(577): unsure at all n locations
  Clone ID: jC-gmfl02220144f01a1
ggaaattggaagcaaaacctaaggaatcttggttgaacaaggtgtccatgaaagtgacaaaaggggtgtctgagactgataaaaattcatgtgtgattgatataaaccgtggcagctgtgatggctttagcgagaatttggaaggtgaaatgatttgtaggatttgccatctggcctctgggcaacgattggaagcagcagatgttggcactgcaagtagtgctactactaatacagatttgattcagctcggttgtgcatgtaaagatgagctagggattgtgcatagtcattgtgctgaggcatggttcaagcttaaaggaaacaggttgtgtgaaatatgtggtgagactgcaaaaaatgtttcggatgttacggataatggatttattgaagagtggaatgatactagattcatggacagtgataatacctcatccagaaggtttggtggatgcttgtgcggacaaccattttgtaacttcttaatggcatgcctggtaatagcttttgntctgccatggttcttccgtgtaaatatgttctagntgaggagtcaaacactattctttccttc

SEQ ID NO: 13125 - DNA, 592 bp, Glycine max
  unsure (1)..(592): unsure at all n locations
  Clone ID: jC-gmfl02220144f02a1
ctctgcaaccaaaatctgaatcttagggttccaacacctttgatccaatgggttcggctgccgcagaagaactgaacttagatttaagatcctccttcgtccccaaaaccatcaccgatttcctccgccacctctccgccaacaacaaccaccctgccaccctccgcgatttcctctcccgcctcgaagacgagctccgcaagatccacgccttcaaacgcgaactccccctctccatgctcctcttaaacgacgcaatttccgttctgaaggttgaatcgcagaaatgctgcagggtggcgcgcgattcgccgccggtgctggaggagttcattccgttgaagaaggagcttggtgatcagagcgaggaggaggaggagaatgatgatgacaaggacgataacgaatgcagggataagaggaattggatgagttccgttcagctctggaataacaacactaccaccactactactaataacaacaacaatgcctctgatcgncaacaactacttcataaattacaaaccaagataagtgaagaagggcagtctgtggctgaggatccctttcagacctgagtaatagaaat

SEQ ID NO: 13126 - DNA, 560 bp, Glycine max
  Clone ID: jC-gmfl02220144f03a1
ttttcctttcccttttgaaggatgaatttcctgacgtacgcctaaacattatcagcaagcttgatcaagtgaatcaggttataggaatcgatctgttatctcagtctttgttaccagccattgttgagcttgctgaggataggcattggagggtccggcttgcaattatagaatatatacccttattggcaagtcaattgggggttaggttttttgatgacaaacttggtgctctttgcatgcagtggttacaggataaggttcattcaattcgcgaagcagctgctaacaacttgaaacgccttgctgaagaatttggacctgagtgggctatgcagcacataattcctcaggttttggagatgaacaacaatccacactatttgtatcggatgaccattcttcgtgctatctctctgcttgctcctgtgatgggccctgaaatcacttgttcaaacttgttaccggttgttcttgctgcatctaaagacagagtgcccaacataaagttcaatgtggcaaaagtattagagtccatcttccccatcgttgatcagtcg

SEQ ID NO: 13127 - DNA, 564 bp, Glycine max
  Clone ID: jC-gmfl02220144f04a1
tggcttcttctgtgtgccaccccctcttttattttttttttctttagcttttggagtttggagtctcttgaaccatggctaagaatagaggagagttgaggattcatgagagtgtggatgagctaaggactgatttggcagactatgttgctgagttatcagaggcatctgtgaaagagcgaggagtctttgccattgctttatctggtggttctctcattggcttaatggggtatttgtatcttatcttttccatataatagtttctttgctttcatgatttagtgttggtttaaaacttctgattgcaaacagaaaactctgtgaagctccttataacaagacagtggactggtccaagtggtatatcttctgggctgacgagcacgttgtggcgaaaaaccatgccgatagcaattataagcttgctaaagatggccttttgtccaaggtgtaggataggggcacagggttatataccatagaccacataagtttgaattctcaaaaagatgctgtccataacttgtctttagtagaggaaaggattatgctgatacttga

SEQ ID NO: 13128 - DNA, 569 bp, Glycine max
  Clone ID: jC-gmfl02220144f05a1
tacaattactactttctctctctttgtttcttgtaagcatggagtcctcaaagatctatgcttacctcttcctttgcatgctcttcctctcctccgccactcccattctcggttgtggctactgtggcaaaccccccaaaaagcacaagcctggtaaaacaccaaagacacccacagtacccgttgttaagccaccagtcacaatccctcccattgttaagccaccagtcacaatccctcccattgttaatccaccagtcacaatccctcccattgttaatccaccagtcacaatccctcccattgttaatccaccagtgacagttccacccgttgtgcttccaccaatagtgaagcccccgggttttctccctccaattcttaacccaccaagtacaccaacaccgtcgccggggaagggagggaacactccatgtccaccaccaaagtctcctgcacaggctacatgccccattgacacgctcaaactaggtgcttgtgtggatcttcttggtggctcggttcacattggctggggagaccctgttgcgaaccagtgctgccccgtg

SEQ ID NO: 13129 - DNA, 551 bp, Glycine max
  Clone ID: jC-gmfl02220144f06a1
ctcgcgatttcggaagggtcgtgtttccttgcttcagtttcagcttcggcttcgagaagcgtcgattgggtccttaagctgttccttctctgtttctgacaaactgtataactcctatcaaacatgagcggtcgcttttctcgcacaatttatgtcggcaacctgccctctgatataagagagtcagaaattgaagatctattctacaagtatggccgtataatggatattgaattgaaggttcctccccgccctccatgttattgctttgttgagtttgataatgctcgagatgccgaagatgcaattcggggtcgagatggatacaactttgatggttgtcggctaagagtggagcttgctcatggtggtagagggccatcatcaagtgatcgacgtggatatggaggaggaggtggtaatggtggagcaagcgggggtcgttttggcatctcacgccattctgaatttcgagttattgttcgtggactcccatcttctgcatcttggcaagatttgaaggatcatatgcgaaaagctggggacgtgtg

SEQ ID NO: 13130 - DNA, 556 bp, Glycine max
  Clone ID: jC-gmfl02220144f07a1
gttcctataattttttttctccattttattaccaagctctgcaactttgcttctcaacatggagtatcgtctcctacccatttttactttactcaatattgcactggtggcaacccatgctgctttaccccctgaagtttactggaagtcggtgcttcctactacgccaatgccaaaagccatcactgatatcctttactctgattgggtggaagagaaaagcagctcagcgcatgttggaggtggaggcgtgaacgtgcatacaggaaaaggaggtggcagtggcaccactgtcaacgttggtggaaaaggaggcggaggcgtaaacgtgcatgcaggccacaagggaaagccagtgcatgtttcagttggctcaaagtctccatttgattacgtctacgccgccacggaaactcaattacacgatgaccccaacgtggcactcttcttcttggaaaaggacttgcattctggacaaagttggacttgcacttcacaggagtacatctaatcaagccacgttcttgtcacgccaagtgcggattcgatacccttt

SEQ ID NO: 13131 - DNA, 557 bp, Glycine max
  Clone ID: jC-gmfl02220144f08a1
caatcagtgaaagattctttgggattcttgagcttctttttgatgtttgtgaccgctcttgttggagtcacggcaaatcagaatgcatacttcaaaggattattttatgcatcttctactgcagctaccgctatgagtaatctgataccggcattaacgtttgtaattgcagcaattgcgggatttgagaaagttgacataagcttaagaagcacggccaagatattagggacagtttgttgcgtggctggagccttaaccatggcattggtcaaaggacagaagctgttacacacggagttccttccttctatacatctcaccggcagtcaaggtgatgattggctgctgggttgcctattgctcttagcaagcagtgttttttggtcatgttggatgatcctgcaggtaccaatcacttcgtgctgcccagaccatttattatcaaccttttggatgtgtctgttttcaacaatacaggctgccctatttgccctgctttcagagtcggatcttcaagcatggattttgcaatcacctttacagatttcatgttc

SEQ ID NO: 13132 - DNA, 393 bp, Glycine max
  Clone ID: jC-gmfl02220144f09a1
tggaggaccatctaaagtatggagactatgttaagaatttgtcattacaattcttgaaccagaacaattccgtgcaggggaatattcctgattcaagctatgaagcaggacttgaattgtcggttcaatcttcaggtttgggtaacccagaaatcggcaatcgaacctgccaaggagtgccttaagatgacaaggaggatgggtccttcaccaaccaagaatgctgctaacttatcaattacattatcaaagtttgtgccttataggaccgaaatagaatggtacaaagcttggtgtcaccagcaagttgatcaaatgggatactacgacttattcaagaggagaaggagcacttcaaaaatggctatgaaagtcaacatgaatcgtcacaaa

SEQ ID NO: 13133 - DNA, 569 bp, Glycine max
  unsure (1)..(569): unsure at all n locations
  Clone ID: jC-gmfl02220144f09d1
gcaantactgtctgatgcgtangcacgcccaattnccgtgggaggagcataccagncggnggncgcccctnntttnttttttttttagaacaagccatttttattctaggtattttgcaaacaaggagttcgtaggggtattacagattacagagccaagcttatttattgatttcatttaaaattactaaggaattacttctccatccaaaaacggggttaaaaggggtgtgaaaacgtcttcacctttgctatgagttccctcagtcctcttaaatcttccatccatatactgtaacttgagttcttagcaagaacatcttcagacacctccttattatcaataagttccatagcatacttctcaaatttctcaatgttatcccacagcacagccaactttgttgtgtcactctcacttctaacactattcagccagtcccttgcttcctccacccttgcccaaaagcatgaatcttgggtcaaacttgcaaacttgctcctcctctcattattttcttcggtgttgcccattgcattcctccaccacctatcaaaaatctcatacc

SEQ ID NO: 13134 - DNA, 444 bp, Glycine max
  unsure (1)..(444): unsure at all n locations
  Clone ID: jC-gmfl02220144f10a1
gtggtgtttcatttgtgaaactaacaacaacacaaggccatcatcatggcagctgcttccccaatggcaagccaactcaagtccaccttcactaggactcttgtagctcccaagggcctctctgcctcttcaccacttcacctcggtgccttctagaaggcaatttagcttcactgttaaggccatccaatcagagaagccaacctatcaagtgattcagccaatcaacggtgacccattcattggaagcctggaaaccccagttacatccagccctttgatcgcatggtacttgtccaacctgcccgcatacagaaccgcagtgagcccactactaaaaggatcngaggtgggcctggcccacggataccttcttgtgggcccattcgtgaaggccgggcctcttaggaacaccgagatcgccgtgcaagcgggctctctggc

SEQ ID NO: 13135 - DNA, 391 bp, Glycine max
  unsure (1)..(391): unsure at all n locations
  Clone ID: jC-gmfl02220144f10d1
tgacagagttcgtagccattccnnnntnnntgtgaaannccnnnccnnnnnnnnnnnnnnnnnnnnnnnnnnnnnnnnnnnnnnnnnnnntttttnttttnnnnnnnnnnntnnnnnnnnntnnnnggggggggttttttttttnnnttttttttttttttttttttgtttgttttgtnttttttggtgatttaataagaaaaaattaaaaaaacctagtaagcacattcatcatttgatgtaaaatggaaggcccaaaacgtagaggaggaagtaggcccaaataacacccgaaatgcctccaaagaaaaaacctccggtgaacttggcccacccatcaccagtttgcagctgatcgggctccttcttgccgcccgtcaaagtcagcgac

SEQ ID NO: 13136 - DNA, 502 bp, Glycine max
  unsure (1)..(502): unsure at all n locations
  Clone ID: jC-gmfl02220144f11a1
ggcancaaaagggtatgatctttanagcagaccaananntnatttnnccnncccnaanccnnaaaaaaanncngggnnaaattaacacacacacaccgcgngttttccttaccatagcatatagtactagtagattaaacgccaaagaaataaattactcactttcacgtaaaccataacgtgcttccaccgcaaccaaccacaatgggtgccgttggtccataacggtgttgctactagtgttatttatggccatgagctccggcgtgcgctcgtgtccgccgtcggacagggcggcgctgctggcattcaaggcggcgctccacgaaccctacctgggaatcttcaactcgtggaccggcgccgactgctgccacaagtggtacggcgtgagctgcgaccaggagacccgccgcgtcgccgacatcaacctccgcggcgagtcggagggagccgatcttcgagcgcgcccaccgcaccggctacatgaccggctacatct

SEQ ID NO: 13137 - DNA, 526 bp, Glycine max
  unsure (1)..(526): unsure at all n locations
  Clone ID: jC-gmfl02220144f11d1
aggaccnaaacggggtgatccgtatggcacnncnccngaatnaatttnccggggacanagcccactaaanannagangnncnnaanaatttnttttattaaaacatttgtttttatanatttagcgtagcgnaggcccagggatggagtactacatttactatatcacgatcgcgataacaaacaacaaattgatacatgaaacggaccgatgagttaactaagggtgggtccacactggtctaactgcaaatatacatatatttttccaagatatttgagtttgcatgtaatggtgagctagtagcaaggtttgaggggcttcccgcagagacaatcgttgtagacaaaggaggaggcttcgagatgatcaaaaggagagccaaggggaatcttgccacagagatggttatgactcaaatccaagtgcccaatataggaagcagaggatatggacttaggtatggccccttttaggttattatacgacaaatccagagcagtgaaataagacctcacgccgaacg

SEQ ID NO: 13138 - DNA, 95 bp, Glycine max
  Clone ID: jC-gmfl02220144f12a1
cttatcatctgacgagggcttttaaatgactgttttaatacctaagaaagtttcaactattaaaatgtatttcaatctcatctccatattttggt

SEQ ID NO: 13139 - DNA, 222 bp, Glycine max
  unsure (1)..(222): unsure at all n locations
  Clone ID: jC-gmfl02220144f12d1
agcaccaaaatgaagagctgcatgcatnnctctnttaaataaaaagaacaaaccanaaaaaaaaaaaaaaaannannaaaanaaaaaaaanaattttttttttanaanaantananaaaaaaaaaggggggggggttgtataaaaattaaataggtgaacctttcttaggttttaaaacagggatttaaaagccctcgttagattataaggttggggccatt

SEQ ID NO: 13140 - DNA, 583 bp, Glycine max
  Clone ID: jC-gmfl02220144g01a1
gtggcatttacagattgcccaggtcctcagtctgaatctgctggaaaatccgatgcatgtgaagggtgcccgaatcagcaaatttgtgccactgcccccaaaggccctgaccctggtactcttcatctttatcttattattttatgcttcttcccagaaaccatcaacttcttcaaaatggcattatttatctatgtgaaatatatgatttgatatgttttaattacaacagtttagtatggaattattttccttattactcattatttagtttccttattttgtaaacctccttcattataaataagagtatttcatgtggtctgatatgacaacacacaacagtaaataatccttacgatctatataagcatgctgtgatgccacagctaatgattctagaatttgggactgtttctcagtatgttgtgaccctagcgtgcctatttagtagacaatgctagtagtatgatttctccccagctttgtttatgtggtttgattagcccaggaagtgagcaaatcatttccttcacagtcaagatgtttgcagcactgcattgagagcattcttgcactgctc

SEQ ID NO: 13141 - DNA, 557 bp, Glycine max
  Clone ID: jC-gmfl02220144g02a1
gtggcatttacagattgcccaggtcctctgtctgaatctgctggaaaatccgatgcatgtgaagggtgcccgaatcagcaaatttgtgccactgcccccaaaggccctgaccctggtactcttcatctttatcttattattttatgcttcttcccagaaaccatcaacttcttcaaaatggcattatttatctatgtgaaatatatgatttgatatgttttaattacaacagtttagtatggaattattttccttattactcattatttagtttccttattttgtaaacctccttcattataaataagagtatttcatgtggtctgatatgacaacacacaacagtaaataatccttacgatctatataagcatgctgtgatgccacagctaatgattctagaatttgggactgtttctcagtatgttgtgaccctagcgtgcctatttagtagacaatgctagtagtatgatttctccccagctttgtttatgtggtttgattagcccaggaagtgagcatatcatttcctccacaagtcagatgtttgcagcact

SEQ ID NO: 13142 - DNA, 538 bp, Glycine max
  Clone ID: jC-gmfl02220144g03a1
ttctcttcacttttaagttaaatagtttttcattgtttcatttaatctacaatggctgcttcaacaatggctctctcttcatcatcattggctggccaagctatcaagcttgccccctccacccctcagcttggtgttggaagggttagcatgaggaaaacagcctccaagactgtttcttctggaagcccatggtacggcccagaccgtgtcaagtacttgggcccattctctggtgagcccccatcctacctcactggtgaattcccaggtgactatggttgggacactgctgggctttctgctgacccagagacctttgccaagaaccgtgaacttgaagttatccactccagatgggccatgttgggagccctgtgctgtgttttccctgaactcttggcccgcaacggtgtcaagttcggtgaagccgtgtggttcaaggccgggtctcaaatatttagtgagggtgggcttgactacttgggcaacccaagcctgatccatgcacaaagcatccttgccatctgggccactc

SEQ ID NO: 13143 - DNA, 586 bp, Glycine max
  Clone ID: jC-gmfl02220144g04a1
atcattcatttttttttttgtagcacatgtagtgcaaggatcagcactagcccttcttggattatggcacaccatccacaccatcagatcttacctggtgaagggccctgccaacttcactgtaagattctggtaccagtttaacactacccctcagtctagacttaaacacttagaacttgtttctattttatccttttccatccttgcatttttcgatcaaattctagacttccctcatttccactatgcctttaagcttgacaactttgagcatgcaactatgttcatacaccttgctttgtttgctggtttctccctctccactgagttgactgattcacttgacctcttctccggctttgttgggatacttgcatcctcggtgtttagtcaagaactattccttctccattttcactccacagaccatgttggacttgaaggccattaccactggctgctgcagctcatagtgcttgtctcactagtatcatctttggctgcaactatttttcctaacaatttcaacgcggctctcgtgctttctatttcactcatcttccaaggatgttgtttataaaca

SEQ ID NO: 13144 - DNA, 511 bp, Glycine max
  Clone ID: jC-gmfl02220144g05a1
cttgccagatggacgtcaaataattatttgaggaagaagacaattcaactacgagttttaccccaagacacaagccaagaatacttacagtttaccttttcttgctcaaaccaacgacgctaacgctgaaaacaatctctacccgtttgtttttctaaacgtcgatggcaacctttttatctttgccaacaaccgcgctatcttgttcgattacaataagaacagtgtcgtgagaacctaccctcaaatacccggtggagatccacggtgttatcctagcaccggttccgcagttttgcttcctcttcgagaacctaatgtggaggctgaggttctgatttgtggtggagccccgagaggggcttttcggaatactctctcgggtaagtttgttggagcgttgagaacttgcgctcggattaaaataaccgacccgaaagcgaattgggtgatggaaaccatgccgggtgcgagagttatgagtgacatggttttactccccaacggcgac

SEQ ID NO: 13145 - DNA, 553 bp, Glycine max
  Clone ID: jC-gmfl02220144g06a1
atttgggagttaggttctgcacgctcttcttccagcgagtgttctttcttcgtttcaacaccttaatttgcacacgctgcttcttcagcttgagaaatggcacaagaaacctttctattcacatctgaatctgtaaacgagggtcaccccgacaagctgtgcgaccagatctctgatgcagtgctcgatgcgtgccttgaacaggaccctgacagcaaggttgcctgtgagacatgcaccaagaccaacatggtcatggtctttggagagatcacaaccaaggccaacgtagactatgagaagattgtccgtgacacatgccgcgaaattggattcatctctgatgatgttggtcttgatgctgacaaatgcaaggtgttggtcaacattgagcagcagagccctgatatctgccatggtgtgcacggtcacttcaccaagcgcccagaggaggttggtgctggtgaccagggtcacatgtttggctatgccactgatgaaacccctgagtacatgcccctcagccatgtccttgcaaccaaactcggtgctc

SEQ ID NO: 13146 - DNA, 564 bp, Glycine max
  Clone ID: jC-gmfl02220144g07a1
gattccaatacggcgccgttttccttctccatcaagcgcaacgcataacaatcgtcagcgccaccatttcccttcggttcccaagaatcaatggcgactcgtgcgttgctcggagcaatcaagaaacgcaccgtttcgttccccgcattccgcggccattccatttatcgacacggtagcacgcttgtggtggcggaacacgaaggtggttttatcaaacccccttctctctcagcactggctgctgccacgtgtcttcccgatcctgactcttccgtttctgtgctcttggccggttcgggtccttctcttcatcaagctgcttcacatgctgcttcgtgccacccttcaatctccaaggtgcttgtggcagattcagataaattcaagaaccctctggcagagccctgagctaaattagtccatttggttcaccagagtggcggctactctcatataattgctgctgcaagttcttttgggaaaaatgtcgtgccacgtgcggctgcccttttagatgtttctccaattactgacgttactggaatttctgattccaatact

SEQ ID NO: 13147 - DNA, 598 bp, Glycine max
  unsure (1)..(598): unsure at all n locations
  Clone ID: jC-gmfl02220144g08a1
gttcatgatgtgagtgtgagatgtgatgctcattattatttcttttttaccacaaataaagcaaatttccacagtaaacccctctcttttcccttcaatactcacttcttctctttctcgttgcactgatcttagaggggtttgtgttcttggtttcctcccctttctctctctctctgccttgcatttttgtgtgtttttctcaataggggtttcgaaaatgccgatgtttcagccttgtcggaaggacttggttgccgggtacgagggtggtggcgacggccagattctagatctggacaccgccgtgaaagacggcgttttgggcggcgtggagggcggcgtcctgggaggtggggttggtgagaaggtggatctggaaganatattggagggagcttgagttatgtgaagtgccgagtgtgttcatttgcccaatctcattggaaccaatgcaagaccctgttaccctctgcacaggccaaacctacgagaggtccaacattcttaaatggttcaacttgggacacttcacctgccccaccacgatgcaggagctctgggatgattccgtcactcaaacaccacccttacagct

SEQ ID NO: 13148 - DNA, 567 bp, Glycine max
  unsure (1)..(567): unsure at all n locations
  Clone ID: jC-gmfl02220144g09a1
gannnnnaatggcgactcctatgcanncccnnntntnnnntgncnggnncnnnncnnnnnnnnnnnnnnnngngnnngnccngnnngnnctnanggaatttttgttggctctgctgctaactacagcacctgaaacagtgaaatttgaaagctctctttctttaaaaaagtcttctttctttctttctttgtagtactatggagactagagagagagaagactgaagttcttgccagccaggcctcaatacattgtgttcagtttttcacctcctttgttttctgttcctttttccttctgtttcatcatcttcatggatccacagtaattcaccacaaatcttgcttcttcttcttctccttcttcttcatctcctactcgattatcttcttgatgaaaagctttcagaatttaattttcggactcaattttcagtttctaaaaagctccttaatttctcttcttattcttctgaaagactggtacttgttcatgtttatgtcctaagttgttaaattgctaaattcctccctagaaagtttagtttctgggtcttattcttctca

SEQ ID NO: 13149 - DNA, 602 bp, Glycine max
  unsure (1)..(602): unsure at all n locations
  Clone ID: jC-gmfl02220144g09d1
atgaaatgacttcgtaggcntctcnnnnnttnnnttgnaaannncnnnncnnnnnnnnnnnnnnnnnnnnnnnnnnnnnnnnnnnnnnnnnnnnntnttttttttttntnntnnnntnnnntntttttnntgggggggggtttttntttntttttnttttatcccctcataatgctatctagggttcaaactacataatcaatataaacattatgcaatataagaaagactagacttctgaatagtttagtagaacatgcatgcatgtagagcaaagatcttgatcaaagaaagagcacaacagattggggagaaactaacttatgcctactatgtcacaagaaacttgacaagggaaaaaagtacaccatgtctgatacttgccttggcctcttcacacagtctcagcagcaaaaatatgtacacagcaagtcctccaaaatggttaatatactcccagagattctcatcattttgctaaattttcactgtgactggtgaaaagagaaatcggtcacatcaaacaccacggtttaccatttccctgaaacgctggtaagactccagcctctgcagcttcatttgagtgttgatcttcttat

SEQ ID NO: 13150 - DNA, 402 bp, Glycine max
  Clone ID: jC-gmfl02220144g10a1
tgcctacccagtaagtactaatggaatttttgttggctctgctgctaactacagcacctgaaacagtgaaatttgaaagctctctttctttaaaaaagacttctttctttctttctttgtagtactatggagactagagagagagaggactgaagttcttgccagccaggcctcaatacattgtgttcagtttttcacctcctttgttttctgttcctttttccttctgtttcatcatcttcatggatccacagtaattcaccacaaatcttgcttcttcttcttctccttcttcttcatctcctactcgattatcttcttgatgaaaagctttcagaatttaattttcggactcaattttcagtttctaaaaagctccttaatttctcttcttattcttct

SEQ ID NO: 13151 - DNA, 646 bp, Glycine max
  unsure (1)..(646): unsure at all n locations
  Clone ID: jC-gmfl02220144g10d1
gaattaaatgttggatgnggtctgcactccaaaaatnncgtgggaggaccacaccagacggaggacgcccttttttttttttttttttaaagctcaattttttgtttaactattagggccgcctatatagaagagcagggattatacattcgatttaaataatcccctcataatgctatctagggttcaaactacataatcaatataaacattatgccattataagaaagactagacttctgaatagtttagtagaacatgcatgcatgtagagcaaagatcttgatcaaagaaagagcacaacagattggggagaaactaacttatgcctactatgtcacaagaaacttgacaagggaaaaaagtacaccatgtctgatacttgccttggcctcttcacacagtctcagcagcaaaaatatgtacacagcaagtcctccaaaatggttaatatatctcccagagattctcatcattttgctaaattttcactgtgactggtgaaaagagaaatcggtcacatcaaacaccacggtttaccatttccctgaaacgctggtaagactccagcctctgcagcttcattagattgttgatcttcttaatgaaggcttctgccctgcgattcaattcctctggactcatg

SEQ ID NO: 13152 - DNA, 392 bp, Glycine max
  unsure (1)..(392): unsure at all n locations
  Clone ID: jC-gmfl02220144g11a1
tggacannnaagggctgatctcgtagaccataccacgnnttatgttcgcgnaccccagcccggaaaaaaggtcgagaaaagaagagaaagacccgattgaccccctaccgttgtgccttgggacaaaaattggaaagggggctcattggagggtatctgaaggaagggctatcgagcagactgacgcgattaaaggtctgcatcgcgggggtactcacggaagaaagagtggcaattgagaatcgatgagctcggcaagttgatatgatggctggcgtccaccatgagaaacaggcgagggggagtagaggctatgattgcgatctgtctgcaattatattactatctatatgatgactcatcttagtgtcatggaggtccacacctgacat

SEQ ID NO: 13153 - DNA, 541 bp, Glycine max
  Clone ID: jC-gmfl02220144g12a1
ctctcatgttacaatcctcttgccgctgagctccctttctcctcggtccacagagacaaaatgtaagacaggtgccaacagttcatcacgaaagaaaggactagctgagccgagatcactaactaaaacgaatttaatacttaatcgaaaatactaatagaatagaaatagaactgtcttttcatatagatatcccttcaacacaacataggtcatcgaaaggatctcgaagacccaccaacgcacgaaagccgggatctttcagaaaatggattcctattcgaagggtgcataaccgcatggataagctcacactaacccgtcaatttgggatccaattcggttccttagggaggtatcgggaaggaattttggaatgtaataatatcgattcatacagatacagaaagaagggttctctattgattcaaacgctctacctacgagatagggatagagaaagaggaaaaaaccgaggatttacatagtacttttggtcgaaaatcgatctgattttttcgtacttttcgctcatgatgaa

SEQ ID NO: 13154 - DNA, 537 bp, Glycine max
  unsure (1)..(537): unsure at all n locations
  Clone ID: jC-gmfl02220144g12d1
gaactaaatgtacgctgcaagcaancaaaataattaaaggaccaancnnaaanaaaaanaaaaaanaaannnnnannnnnnaattttttttaaaaaaaaaaaaaaaaaaaagggggggttttattaagttattttattagactttgtattccaaggctatctgctttaccacttacctgtgcctttagaaggcaaattagcttcactgttaaggccatccaatcagagaagccaacctatcaagtgattcagccaatcaacggtgacccattcattggaagcctggaaaccccagttacatccagccctttgatcgcatggtacttgtccaacctgcccgcatacagaaccgcagtgagcccactactaagagggatcgaggtgggcctggcccacggataccttctggtgggcccattcgtgaaggccgggcctcttatgaacaccgagatcgccgggcaagcgggctctctggccgcccgtgggcttgtggtgatcctcagcctttgcctcacaatctatgggatttcatccttc

SEQ ID NO: 13155 - DNA, 604 bp, Glycine max
  Clone ID: jC-gmfl02220144h01a1
atcgagataactagaaacagtgtgatgataaatgaaggtccttgttttcttcgttgctacaattttggtagcatggcaatgccatgcgtacgatatgttccctctccgaatgaacactggctatggtgcccgtactccggaggtgaaatgcgcaagttggaggcttgctgtggaagcacacaacatctttggctttgagaccattcctgaagagtgcgttgaagcaacaaaggaatacatccatggcgaacaatatagatcagactccaaaacagttaaccaacaagcttacttttatgccagagacctcgaagtccatcccaaggacacatttgtgttcagtatagatggcaccgtactctctaatattccatactacaaaaaacatggatatggggtggagaaatttaactcgaccttgtatgatgaatgggttaacaagggcaatgcaccggcactgcccgagactcttaagaattacaacaagctggtgtctcttggcttcaagattatattcttgtcaggaagaacactggacaaacaggccgtaacagaagcaaacttaaagaaggctggctaccacacatgggaaaaattaattctc

SEQ ID NO: 13156 - DNA, 406 bp, Glycine max
  Clone ID: jC-gmfl02220144h02a1
tgatcgtaataacttttaacacagcgatcatgattacagatctcgatcgctccgaccacagggggatgttatcgtggcattaccgtgcgtacaagactgaccctattcgaacgaacacaagccttgaggcccgcactaccgaggtgtaacgcacacctcgtacggccgccgcagaaacacacaccaaattgagctcccataccatgcctgaacgacgccctataccaacgaaggactacatccttggcgaagaatttagatcagactcccacacagttcgcccgctaactaacctgcaagccagagaccccgtcgcccatgctaaggacacattcatgctcaatatcgagggcaccgcactggctaatgttccatactacaacacacacgtatctgatgtcgagaa

SEQ ID NO: 13157 - DNA, 578 bp, Glycine max
  Clone ID: jC-gmfl02220144h03a1
tgaatctgcactctctttgaaaactgtctcgctttcaccggcgtcggaaacatcgtccggttagggttccggctatcgctaagggcacggatcataaaatcttccagaagcttctatgctattactcagtattattaccatttgccaaggtgttgttaggcaccatttttatcacttgaagtcagtcagcaacaacttttctgcgaatttttcaggaatattttcgcctgaaaaagttggagcaaatgtctttgcaaaacaagggattttggatggtaaagggttctggacacattaatgacagagatacagtatttgataatcccaccaaaattgaaccaaaacgacctcatcaatggtttgttgatgctgctgaagtagatttttttccaaacaagaaacaagccgtagaagatgcagatgaaaaatctagtcctggattttcaaatgtaaatattcctccctgggagaacaatcccaattttcattcagtcccaaaccaatttattggccggttatttgggtctgaaaccaggcctgtcaatttcactgaaaagaatactatgttttggctgatg

SEQ ID NO: 13158 - DNA, 586 bp, Glycine max
  unsure (1)..(586): unsure at all n locations
  Clone ID: jC-gmfl02220144h04a1
cattggcattgcctgggagtgactgattagtaagtggcgcttcccttccattccaacacgttcgttcgttcgttcactgccttctcctccttaggctacgttcgccgccgcagcccggaaaggattcaaccttctgtcatgtcaatggagtatgatatacctgattctgaaatacaacaaaatagcaggagaagaaagaaatctactgtctgggaacacttcactgtgaaaatggatggacctggatgtgccagggcttactgtaaaagatgccaaaaatcatttgcttatctaaaagattcaaaacaatctggcaccagtcatctcaagagacacattactttgggaatctgtcagaaaaatcaacgaataccatgttccaaaaccgatgccaatccaccaaagaaacgagcaagagcaaaaccttgttttgctgctatctcatttgatcaggagcgttgcaacagtaagattgctaaaatgattattttacatgactatccacttcatattgtggaacaccaaggtttcattgattttgttcgagcactacaaccccagctcaatccactgagncttaatgcta

SEQ ID NO: 13159 - DNA, 549 bp, Glycine max
  Clone ID: jC-gmfl02220144h05a1
caatttaatacctcaaaaatggttttctctctgctcctacttcttctcctcctcactctcactgcaacctctgctcaacatgacggcccttcgatcacagccaccatggagcaattctccggttacaaaatccacgaacctgactctttccaaccctcttcactctccgttgatgctcaggctcttcagaaccagattgatgagcttgcggcgttttctgactcacctgctccatcagtaaccagggtcttgtatactgacaaggatgttttaggtcgcaggtatgtaaaaacccagatggaacttgctggcctatctgtgagagaggatgctgttggtaacatatttggtcgttgggatggccttgaacctgagcttgctgcagttgcaacaggttcgcacattgatgctataccttactcgggaaaatatgatggagttgtcggtgttttaggtgctattgaagccatcagagtcctgaaaaggtctggctctaaacctagaagaccattggaagtcatatcattcacatcagaagaaccaacacgc

SEQ ID NO: 13160 - DNA, 459 bp, Glycine max
  Clone ID: jC-gmfl02220144h06a1
gtatcttaaacgatcatcgagggtttttttcttaactgaactctgtcttctttctgtgtgcatgttaacaagcccaatattgacgctcctaggccaacatgagaacataacccatgtggcaggtaccatttctctttggccaactcctatctcacctgcttatactgcgtcattgattaggctgacattactctgatctcagagcaagaatggcgtaatggcattcttggcagatctatcaacaatgattcatgtgctgacttgttggctattgactatacaattcaagtttgggattccgggcgcgctgatctctacaattgagacgttgcggattcctactattgggcaagtaataatgaccacgagcgggtggtgccatgaaacacggcaaggtctctcattgatagcatacatagatcttgagcctgttgtcaagctgtccctttcatatggggc

SEQ ID NO: 13161 - DNA, 578 bp, Glycine max
  unsure (1)..(578): unsure at all n locations
  Clone ID: jC-gmfl02220144h07a1
cggctcgagtttagaataaaaaattttttatattttaggttgatttcagttttttaagaaaataaatcaaaatgatgttgtattaagaattttttgttgactcgctataaattgtttttttttctctcgatttttttatttggtttctcggtttttcagttcattgacctttcttcaggccaattttgtgtcttatttgaaccgatcacctgaccgattttccagtccaaccggccagttcggtctgattttggaacacaagtatattgcattatagaggatcatgtgagcttactcatcctcttgaaggacttggtctgagggattttagatcatggttttacttctttacttggctattattattgtgatggactgtgtgccctaaacataagataaccatagtattaatttgttattctatcaattgatggntctgcttttatgtattggttttcaggatttgcattttagacacgttctggactcttccatccttggtgagatgaaaggatctggngtagaaacaattcctcgatggccattggtcgttttcttagctggaggaatgggatgct

SEQ ID NO: 13162 - DNA, 508 bp, Glycine max
  Clone ID: jC-gmfl02220144h08a1
ctttgagatggctctgagcacagcttatgccacattccaaaaccttgattcatcagaaatctccctcactgatgtcagtcattactttgactcagatccaacaaacctggttcaaagtctaagaaaagatgggaagaagccaagtgcatacgttgctgacacaaccactgctaatgctcaggtgcgtacccttgctgagacggttcgacttgatgcaagaaccaagctattgaaccccaagtggtatgaaggcatgctgtctactggatacgagggtgttcgcgagatagagaagaggctcactaacacagttggatggagtgcaacctcaggccaagtcgacaactgggtgtatgaagaagccaacacaactttcattcaagatgaggaaatgttgaagaagctaatgaacacaaatccaaactcctttaggaagctggtgcagacattcttggaagccaatggacgcggttactgggagacttcagaagacaacattgacaagctc

SEQ ID NO: 13163 - DNA, 368 bp, Glycine max
  Clone ID: jC-gmfl02220144h09a1
ggcattcgtattgtcgcagagaaagaaaaccctagctcaccgtttcaagatgcaaatcttcgttaagaccctcactggtaagaccatcactctcgaagtcgagagttcagataccatagacaatgtaaaggccaaaattcaagacagggaagggatcccaccagatcagcaacggctcatttttgctggcaagcagcttgaggatggacgtacccttgctgattataacatccaaaaggagtccactctccacttggttcttcgtctccgtggggggatgcaaatctttgttaagaccttgacgggaaagacaatcacccttgaggtcgagagctccgacaccattgacaacgttaaggctaagattc

SEQ ID NO: 13164 - DNA, 407 bp, Glycine max
  Clone ID: jC-gmfl02220144h09d1
tggcttttttttttttttaaagtttttttttttttttttttccacgaaccaaacagaatttatggaaggacctgaacaaacaacagttttttaaaggccactattgtccatggaaacaattcaacaagagtaaacctttccggaacctttaaaaaaaaaaaccccaaagatcttcggaacttccacatgcttagacttcaagacacctacagaacattctcagactttaaaaacccaccaggaagacccaacacagggggaaaagtagactctttctgaatgttgaagtaagaaagagcccttccatcctcaaattgcttcccagcaaatatcaacctctgctggactggtgggataccctccttgccctggattttggctttgacattatcgagagggtctgagct

SEQ ID NO: 13165 - DNA, 402 bp, Glycine max
  unsure (1)..(402): unsure at all n locations
  Clone ID: jC-gmfl02220144h10a1
gannnnattgggcgtgtcgtangcaaccccnnntnnntnnnnggnncnnncnnnnnnnnnnnnnnnnnnnnnnnnnnnnnnnnnnnnnnnannattattttttgtnnaattaagagagaataaaaaaataagaagcgagatctaaaagacttttaatcagagattttccataaattaaccttctacataaaaatatacatagtgtcttaacaaaggaccgtgtcactaacatatcatcgacataaagtgactagtgtcaatgcagtcgagagatcgacattactctggctgaaatatactactcaccgggggatttcacttcctgtgccttgtggttaaaatgaatgtgaactactgagatgagaaaccaagacatgtgtgactaactcccgttgggcgtct

SEQ ID NO: 13166 - DNA, 614 bp, Glycine max
  unsure (1)..(614): unsure at all n locations
  Clone ID: jC-gmfl02220144h11a1
agcncnnaaaggaatgatcccgtttgcagtncnannnntnnnngtcnncnnnnncnnncccnnnnnnnnnnnnnnnnnanannnnnnnnnnnntnncccncngnngatttttttgaaagcatttacaatttccatttgggttcaattgaatcaacatgagcaacagaaaagataatactgatgatgagtctagtgaaagaggtatattttcacatctaggctatccaagtgcaccaccctaccctcctccacatggatacccaccatcaggctatccacctccaggagggtatcccccaacagcctatccaccaccagcatatccgcctcccggagtatatccgcattccggttactatccttccgaatatccacctgcatatccgcctccgggagggtatccacccactacttatcctcattcaggatatcatccaccagcttatcctgccccacatggctatccacctgctgcacctccatatcctgcanggcgtggagctggcatgggaggattgctggaggnggtgttgctgctgctgccgctgcctatggtgctcaccacatggcacatggatatcatcgttttggacacggagcctaccatggtcatg

SEQ ID NO: 13167 - DNA, 454 bp, Glycine max
  unsure (1)..(454): unsure at all n locations
  Clone ID: jC-gmfl02220144h11d1
gaanaananaagtggacgactttacattgcacngcnccggattaantgccggggcccacacctcactagnnggngggcggccgggnnnnnannnnnannaaaaaatttttttttttnnaanaaaaanaccaccaaaaaagggggtggttttaaatacaaaagccaaacatgcaaaatgttgttgaaggcttacattgttcaccctatgccaaaagctccatgaccgtgctgaaaaatcagctttccaacatataatgcattgtatcacttccactatctccaacgatgcttatacttgccaaatccaaacctatcatgcttacaacgcttgcggaattcaccgcacatgaactttccatgaccatggctggctcctgagccaaaacgaagaatctcatggacgaaggggtgagcacaataagcagggggactaaaatcaaaaccccttgaaaac

SEQ ID NO: 13168 - DNA, 388 bp, Glycine max
  unsure (1)..(388): unsure at all n locations
  Clone ID: jC-gmfl02220144h12a1
cagggagccaccaaccatggcttccaagctctgtgactcatgcaaatcaaccactgctacctggtactgtgcgcccgacgcggccttactctgcggcgcctgtgactctaaggttcatgccgacgacaagctcgcattgcggcaccccgtgcgtcntgctctgcgaggtgtgcgagcaggcgcccgcgcatgtgacctgtaaagccgacgccgccgcgctctgccttgcctgcgatcgcgatatccactccgccaaccccctcgccagccgccacgagcgcatccccgtcacgccgatcttcgagtccgtacattcagtcgaggcctcctcgccgatcaacttccaccaccgattcttctccgacgccgacgctgatgctgacgtcag

SEQ ID NO: 13169 - DNA, 526 bp, Glycine max
  unsure (1)..(526): unsure at all n locations
  Clone ID: jC-gmfl02220144h12d1
gcncccaaaggtagagttgaatgcaccccccggataattnccgngngcannccnnnnnnnnnnnnnnnnggnnnnnnnnnnnnnnnnnnnnnnnnttttnnttttnnnnnnnnnnnnnnnnnnnnnnnngngggggggnttanttgatacacagcaagagtttttttgcaactttacattgcataattcaaacaaaagaaggcgtagtccatatattcagccgcaaaacgcagccatcagaaatcaaaacagtgagcattcatattcatatatgatatatatgataatcatcaacacgacggaacgacgccgtatccagccagagggtccgcatcagtgcgtttcgcgaacctctcctttgattcttggcctcgcttcggcatactcttttctggatgcgtcacgaatggtctactcgaactttcggatctttctcttctacctgaacctcaacactctagcctccctatccggcgccaagaactgcgccgtcaccgtcacctgtgccactttgctgtagctgcag

SEQ ID NO: 13170 - DNA, 472 bp, Glycine max
  unsure (1)..(472): unsure at all n locations
  Clone ID: jC-gmfl02220145a01a1
gacaaaaatgcagagtgaacgcaaccncnnntnnttnnggggcannccncnnnnnnnnnnnnnnnnnnggggngnggnnnnnngggggttttttttttttngggggngnggnnnnntntgggggngggggttttttttnttttcttcccaatgtcctccctctatatatatgcataacaggcctgaatttcaacaaaccacatggttactacacataccaatccgcttcagccgccattacgaccgataatgctggcatcacaaaaacactaccacattctgagattaatgactacgactttgagccatgtggttattcaatgaactctgatgaaggaactggtgctactaccattcatattaccccacaagatggattcagtcatgcaaaccttgagactgtagggactgacttcaaacagctgaatcacaacgaaatggttaacaaggtatcggcctgttctctcccaac

SEQ ID NO: 13171 - DNA, 668 bp, Glycine max
  unsure (1)..(668): unsure at all n locations
  Clone ID: jC-gmfl02220145a02a1
ggtcctnaatgtatgatgcctctgcataccacttntngnntnatgaagcgcatccccagctnggaaatngggtggagggtggaaagacaaacacaccgaatttcacttttnctaatgatttgcggccgggtnttggggtgtgtccttgttgcctttggagggtacagggcctccaacgcgccacatgctgacgtgtcatcgccagcatcgaacgatgaaccaccctagtcccacatcggtgccttctccgaaatggtacccggtttcacggggtgtttcttctggggtgtcggagaagtcatcaagcatgttgtttgcggttaaagatggagcttcggaagcatttccttgggacaatagcatgctgtcgtggcagagaactgcttttcatttccaaccagagaaaaactggatgaacgatcctaacggtcctatgtactacaagggatggtatcacttcttctaccaatacaacccgaacggtgcagtttggggtgacatagtttgnggacacgcagtgtcaagggacatgatccactggcttcaccttccactagcaatggtggctgatcaatggtatgacatgcaaggtgtgtggacaggctcagccacgatcttaccaaacggtgaaatcatcatgttatacacgggttccaccaacgagtcag

SEQ ID NO: 13172 - DNA, 635 bp, Glycine max
  unsure (1)..(635): unsure at all n locations
  Clone ID: jC-gmfl02220145a03a1
tgcagatacgtaagcataccaaaattaaattnaaagncaanncnnnnaaaanaaanaaaaaaaaaaanaaanannaaaaaaattttttttttaanaaaanaannnataanttntagggttgggtttttattttttaaaatatttttattattataagtttgatgagaaataaaaaaacccttctaatggaaaaactctaaaattagggtttgttttccccaaaaggagagaagaagaaaaaagaaggaaggagggaggggatgatgaagcggctgttgggtgggcccgggacgattagcgggttcctgttgaggtttgggcaatgcgcatttggtgccgcttcgattgctattatggtcacttcctttggcttctctagctacaccgctttctgctatttaattgcatcaatgggacttcaagtgctctggagctttggacttgcatgtcttgatatttatgctttgaggagaaagagagacctacaaaatcctattcttgtcagcctgtttgttgtgggtgattgggtaacagcgactntatcacttgccgctgcatgctcatcagcaggaattgtagtattatacacaagagacctgactgcatgcgcgactagtaagcatctcacatgcaac

SEQ ID NO: 13173 - DNA, 169 bp, Glycine max
  Clone ID: jC-gmfl02220145a04a1
gaaggatgaaaatgagataccttatatttctctccaccaacacaataatagccctcctgctgaacagaactatggccctctttatgtggtaaattagacttgtgtatcactagcatagttgcaaattgtggtgacacaagcttcattgagaaaaggctctctaatttgt

SEQ ID NO: 13174 - DNA, 338 bp, Glycine max
  Clone ID: jC-gmfl02220145a05a1
tttcaaggtttcgtcttttttggtatttttcttttcacggttggattctttcatagctcacccatcttcgattttcttttctcaacctatatcctcttatgtttcaatagggtttctatattatttcttccccccccccccccccagaaattcataaattcgtggaagttcgcaggctcgtttggtcccctccccctttctctccctcttctctctattcttcctccgctcatccccttctccccctttcacccctccctcttccctcttctcattctttctatcctctctttcttctccttatccctcttccttttctttcccttcatccccctttg

SEQ ID NO: 13175 - DNA, 408 bp, Glycine max
  Clone ID: jC-gmfl02220145a06a1
tttcaaggactcgtctcttttggtatttttcttttcacggctggattctttcatagctcacccatcttcgattttcttttctcaacctatatcctctcatgtctcaatagggtcactatatcattggttccccccccccccccccagaaatgttattacatcgaggaagtctcgaggctcgatttgggtacgtttgtttcatgctagggttagggctaggcgtccattaggcaatggatctgcggcatgcaaatgggagtggtgatttacgtacccgattcaaatctatgtttggccctgctgcactgagcaagggacactggctgtttttcatctatacggagacaaagcatcaaaaggttaactttttcattttattctcccaacaggaagtcgattttaggatga

SEQ ID NO: 13176 - DNA, 530 bp, Glycine max
  Clone ID: jC-gmfl02220145a07a1
ggaggagcttcctgtttccatttcctctcacttaaatcacttattatgaacacacgaaaagacatggaccggatcaaaggcccatggagcccggaggaggacgaggctctgcagaagctggtggagaaacacgggcccaggaactggtccctcatcagcaagtccatcccgggccgctccggcaagtcctgcaggctccgctggtgcaaccagctgtccccccaggtggagcaccgggccttcacccacgaagaggacgacaccattatccgggcccatgcccgcttcggcaacaagtgggccaccatagcccgcctcctccacggcagaactgacaacgccatcaaaaaccactggaactccaccttgaagcgcaagtgcacttcaaccatgattgacgacgacaacactcccccgctcaaaagatccctcagtgccggcgctgctattccagtctccactggactctacatgaaccctcccactcctggtagcccctctggatcagatgtgagtgagtccagcgtact

SEQ ID NO: 13177 - DNA, 180 bp, Glycine max
  Clone ID: jC-gmfl02220145a08a1
gtttgattgtcctagctttgagcaacatcatgaagatctccattctctttatcacaatcttttcttgtggttttcttggaaatgttgtttcaaatgctagtcctcttccatatgaagctatttttaactttggtgactctataagtgatactggaaatgctgctcataaccacccaccta

SEQ ID NO: 13178 - DNA, 185 bp, Glycine max
  unsure (1)..(185): unsure at all n locations
  Clone ID: jC-gmfl02220145a09a1
gttgagggtcatagtccgtgtgacaatttgttattctttgcatttatctttggaggtctccggataatatttttaataaaaattagataatttatttcgattaaaaaaaaaaaaaaaaaaaaaaaaaaaaaaaaaaaaaaaaaaaaaaaaaatagncccccnngcccctgggggcggcccccttt

SEQ ID NO: 13179 - DNA, 550 bp, Glycine max
  unsure (1)..(550): unsure at all n locations
  Clone ID: jC-gmfl02220145a10a1
catggctacggctgcgtaggataacatctaacaaacctagcgcacgatagtcttccttcacccatgcttggagtactctgcgccactcgccccaaaccttggcttctctccctcgtccacgtccacgcttccctgcctcgcctacctcattcccctctatcaccttcagcctcgccgncgccccgtcgccgccattccaccgcctgcanactttttctctccggcggctctgtctgcctcctccttttccctctttnttccctttttttctcttttntttctttctttctccttttcttcccccttccctcccccccagggatcgtggaatgtcgcttgggacgcgcggccggcacggtggctccaccgccccgactccgcgtggctcctctttggtgtctgtgcttgtctggcgccgccgccgggttgcgtggatgctgacactaattctgctggaatcgctgtggatgaaagttgcggccttctcgatcaggaacgggaggaggatgaggtttctgctgattacagagtcactggggtacctgctgat

SEQ ID NO: 13180 - DNA, 178 bp, Glycine max
  Clone ID: jC-gmfl02220145a11a1
ataaaatcctcttaacaagttgttgctgctgcgttgagcatcagtttacagctatcgaagatggctcctcccagaggtcgtggtggtggaagtggtggtggccatggtggctatgttccctaagaactactcttcaatgcacaatagatgtgcaagtgtcccctttcgcgtatcaaga

SEQ ID NO: 13181 - DNA, 612 bp, Glycine max
  unsure (1)..(612): unsure at all n locations
  Clone ID: jC-gmfl02220145b01a1
tgacattacttngtanagcaancacnnnnntnnnttggnnnaannnncnnnnnccnnnnnnnnnntnnnntnnnnnnnnnnnnnnnnnnnnnnnntnnnnnnnnnnnnnnntttttttttntnnnnncnnnnnnncnnnnnntnnntntnnntgggggggggtttttttttntttttttttttttttttccctcttcttttttccaccatttacaccacttgacaattcttaaaggccaaaaaatccaaggaccaaggaaaggcatcccaccggaccagcacaggctgatttttgctggcaagcaactcaaggatggaaggaccctctctgactacaacatccagaaggaatcaacccttcaccttgtcctccgtatccgtggggggttataagctcattgtgtaatgttggatgtgttcccaaaacatttgaagaactttgatgtttaatgggtctgtaataatgacccttgaaacataaatcggaatgtgttgaactcaattgtgtcccataaataatagcactctaatatcccacctacgtttgatatgaatgtgtgaaatatgaaatgattaactgtcaaaataaaaaaaaaagggcggccgccgact

SEQ ID NO: 13182 - DNA, 613 bp, Glycine max
  unsure (1)..(613): unsure at all n locations
  Clone ID: jC-gmfl02220145b02a1
gccnacacgctgtgctatatgcaaacacatgtcgnttatgtccgcatacccccagctcggaaacggtttgagggngcaaaanccaaaaacacactttttgtttgtgttttgatctgcttcctactgcgatagttggtctactgttacatggccatggcggtttccgcaattggttttgaaggtttcgagaaaaggttggaaatatcctttttccagcccggacctttttgctgaccctgaaggcaggggtctaagggctcttacataatcccagttgggtgagattctaacaccagctgcttgcaccattgtttcttcgctcaaaaacgataatgtcgactcctatgttctatctgagtccagcctctttgtttatgcctacaagatcatcatcaaaacctgtggtactactaagctattgcttgcaatcccacccatattgaagttcgctgaaatgctttcccttaatgttaagtctgtgaattacaccaggggaagtttcattttccccagtgctcagccatatccccatcgcaacttttctgaggaagttgctattcttgatggctactctggcaacttggtgcaggaagcaatgcttatattttgggtg

SEQ ID NO: 13183 - DNA, 387 bp, Glycine max
  Clone ID: jC-gmfl02220145b03a1
gaaggatgaaaatgagataccttttatttttcttcaccaacacaataatagccctcctgctggacagaactatggccctctttatgtggtaaattgacttgtgtatcactagcatagttgcaaattgtggtgacacaagcttcattgagaaaaggctttctaatttgtattggatgttatgggagaattttgctggacaatgtaatagaacaactctttgtgagaaaaagaatattattgcttttgattttgaatgagttaaaaaaaaaaaatatagtgcataaccgataaaaataaaagaataaattgggccttcggtggcatgagatgtggcctccctcactgataaagctggtatctcaaggggacacataaccccggggggcg

SEQ ID NO: 13184 - DNA, 197 bp, Glycine max
  Clone ID: jC-gmfl02220145b04a1
atgagaataggtttaccccaagggttgactttttatatggcacatcctagagccagtgcctcattgaattcttttttcaaatgatatagtgatagttgatgaatcaagagaaggactaaattccaaagttaattgtggagagaagcttaccaatggtttttttattaagttcgattaatacctcttttactcctttt

SEQ ID NO: 13185 - DNA, 163 bp, Glycine max
  Clone ID: jC-gmfl02220145b05a1
gagttgcccaagtgggaagaagatcccaatttttactctaaggctagatttaagcaaataattaaagaccttgcagacaaatatcatactgagaacttgctgcttgtcacacacggagaaggagatgcagtggctctgtcttcattcaaacaggatgcttcag

SEQ ID NO: 13186 - DNA, 460 bp, Glycine max
  Clone ID: jC-gmfl02220145b06a1
gttagaagtgggggaatggaagagaaatactctagcctggaaattgtggaggagagcccaaactcgggtgtgttctttcttatcttaaatcgtccgtcacgacggaacgctctctcgcgcgaattcttcagcgagttcccgaaagctctgcacgcactggatcacaacccggaggtgaaggtgatcgtgttgtccggcgccggggaccacttctgctccggcatcgacctctccctcctgggatcaaccgccgcgagttcgggttcctccggctccggcgaaaccctccggcgagagataatggcgatgcaagacgcggtcacggccctggaacggtgccggaagccggtgatcgcaagcgtacatggggcgtgcatcggcggcggaattgatatagtgacggcgtgcgacataatgatgtgcagcgaggaggcgtttttctcggtgaaggaagtggatt

SEQ ID NO: 13187 - DNA, 548 bp, Glycine max
  Clone ID: jC-gmfl02220145b07a1
gattccacaacagtgggagggagatccaaattgagagagtggaaaagatggcgcggttgatcacagtggtgtggtgcgcggtggcggtgctattatgcgccgcggccggtgcgtcgtgggtggaggaggcggcgaacccgatacgaatggtgtctggcgtggaggcggaggtggttcgggtgatcggggagtgccggcgtgcgttgaagtttgctaggttcgtgagcaggttcgggaagagttaccaaagcgaggaagagatgaaggagaggtacgagatattctcgcagaatctcaggttcatccgctcccacaacaagaagcgtttgccctatactctctctgttaatcattttgctgattggacttgggaggagttcaaaagacacagactaggagctgcccaaaattgctctgccactcttaacggcaaccacaagctcaccgatgctgttcttcctccaacgaaagactggagaaaagaaggtatagtgagttcaattacagatcaaggcagctgcggatcatgctggacattcagcacaact

SEQ ID NO: 13188 - DNA, 479 bp, Glycine max
  Clone ID: jC-gmfl02220145b08a1
tgttagcctgttttcagcagcatcttcttctgatgggagcagtactaatggtggaggacgacacggtcctaatattaacaaacctgagaatgttcaactggttgatctgcgcatagcatataattgtgaaataatgctctctaaaatcaaaattcctttgccagatatgcttcaggacaattttttctggatcattccaccccctattgaatctcttttttttaccgctacttggagtgggaactttgacccatttggtgaattgattactttatattgaatcctcaagcaaaaatggaatgataacaagttccgtggccgattggatttactccttttttaattgaatagcaaatccaagcattagtattgcaatataggcacaaatgtcactcattgatgcttctaattttcttcgaattgcaactctggcattggattctgcagttctcgatattgatcaagctgcgaatctcatc

SEQ ID NO: 13189 - DNA, 191 bp, Glycine max
  Clone ID: jC-gmfl02220145b09a1
cttcttgcaagcatctcatttctctctttctctctttctctctctttgggagaaaacccactcttcttttctctctcttgcacacatatacacactcctcttttttattcccttcttcactccactgcccagcttcgccctgtgcatcgctcaccgtttgcagtagcttctctactacctacttttctcct

SEQ ID NO: 13190 - DNA, 134 bp, Glycine max
  Clone ID: jC-gmfl02220145b10a1
gccgaggacgcagggagtgggtgaaaacggtttttctttcatgataccacgggttaccagtggcgaaggatggtacaaccatggactgggccataaaaccgcttccactgagaaaagacatacaatgtctcatc

SEQ ID NO: 13191 - DNA, 563 bp, Glycine max
  Clone ID: jC-gmfl02220145b11a1
aaacctctttggaactctgaaaagaaacttcttttggaacagaatggggctcatgttgcaagaatttctgtcttcgagaccaaccgaatgtccagcaatactcttgttggatactgtgaggttgatctacttgaatttctgaccaaggattctgattctgacgtcgaggtattcaaccttttagatccatcagtgcctggaaaagtggttggcaacatttccatttcatgcactgtagaggatccgattgaaacggagaaaggcttcgttagacgcattttatctatagtggactacaatgaagatgggatgctttcactttctgaattttctgacctgattgatgcttttggcaatcaagttgcaaccagcaagaaagaagagctgttcaaagcagctgacaaaaatggagatgtgtgttgtgagcatggacgagttggcttcccttcttacttttcatcaagaacgggaaccattattgaattgctgtcctgtgtgtggtgaggttcttcagatttctgaccagttgaacagcatgatccacttaactctcttgtttgatg

SEQ ID NO: 13192 - DNA, 483 bp, Glycine max
  Clone ID: jC-gmfl02220145c01a1
gtggagggtagatatttccgccacataattttatttttttccagaacccactctatttatgagggggggggttgacaagaacaataacgttggtctcccatcataagatggtagatatgccatattgaaggtgcatgccatgaataaattttttcctgctgaggaggaagaggagactctacttcaggaaattgctgatctgacagaagattttgctggggcccagctacaaaatatactgaatgaagctggaattgtgacagccaggaaggatgtggactacattggacaatatgagctgcttgaggcattaaagaggcaaaagggaacatttgaaactgggcaagaggataataccgaaattcctgaagaattaaaactgacattggcatacagagaagcagctgttgctgctctagcatgttattatcccaagccccaccgaccttttattgagactgctatgaagtctatacgcaggca

SEQ ID NO: 13193 - DNA, 171 bp, Glycine max
  Clone ID: jC-gmfl02220145c03a1
atttccctacctctcccttcaagatgcagatcttcgtcaagaccctcaccggcaagaccatcacccttgaggtggaaagctctgacaccatcgacaacgtcaaggccaagatccaggacaaggaaggaatccccccggaccagcaacgtctcattttcgccggaaagcaac

SEQ ID NO: 13194 - DNA, 163 bp, Glycine max
  Clone ID: jC-gmfl02220145c04a1
atttccctacctctcccttcaagatgcagattttcttcaagaccctcaccggcaagaccatcacccttgaggtggaaagctctgacaccatcgacaacgtcaaggccaagatccaggacaaggaaggaatccccccggaccatcaacgtgtcattttcgccgg

SEQ ID NO: 13195 - DNA, 190 bp, Glycine max
  Clone ID: jC-gmfl02220145c05a1
aaattgcgctgtatgtagtgagggtcctttggttcagtttcatcaaccataaattttctctgtgcgttccatcttctttaggccattcttccataaaaacacaaaaagacccacagagaggaacatggcatgtccagcaatggcaaatgggaacggctcattgaagaacctgaagctaaatgtcacccac

SEQ ID NO: 13196 - DNA, 371 bp, Glycine max
  Clone ID: jC-gmfl02220145c06a1
aaattgcgctgtatgtagtgagggtcctttttttcattttcatcaaccataaattttctctttgcgtgccatcttctttaggccattcttccataaaaacacaaaaagacccacagagaggaacatggcatgtccagcaatggcaaatgggaacggctcattgaagaactcgaagctaaatgacaccaagggaaagaccatcacttgcaaagctgccgtggtatatggtcctggagagccctttgtggtggaaaacattcttgttcatcctcctcagaaaatggaggttcgaatcaagatcctctacactctcatttgtcacaccgatcttatcgcatggcgaggcgtgaaccaagctcaacgtgcttatc

SEQ ID NO: 13197 - DNA, 425 bp, Glycine max
  Clone ID: jC-gmfl02220145c07a1
atcaaacatggttcgtgattcttcaaaatctttgactcggacgtcaaaggttatgaaactggctgagggagggagcacccctatctctgcacggatttcggatatgcctgtgaccaatggatcatctcatatgcttgcaagatgctcattacctgaacatgcagctgctaatgcggaagggcattactctgagcaacactcttatgagctcccacccgatgaggagtctgctctgctgcaacaagtattgaatctgactccatagcaattaagctccttgccaccagatcagcaacatcaggtccttcagctccagcaggctctttggcgagatcagatacagtcctcataacagggaactcatctacgatgtaaaaatagcatcaacttatttgtatactagcattcgctagatattagctcca

SEQ ID NO: 13198 - DNA, 401 bp, Glycine max
  unsure (1)..(401): unsure at all n locations
  Clone ID: jC-gmfl02220145c08a1
aacaaacatggttcgtgattcttcagaatcttttactcggccgtcaaaggttatgaaactggctgagggaaggagcacccctctttctgcagggattttggatatgcctgtcaccgatggatcatctcatatccttggaagaagctcattacctgtacatgcagctgctaatgcggaagggcattttctntgnnttnnnnnnnnnaaaancccacccgatgtggagtcctgtttgctgcaacaagtattgaatctgacaccagagcaattaagttccttgccaccagatcagcaacaacaggttcttcagctccagcaggctctttggcgagatcagatacagccctcataacagggaactcatctacaattcaaaaatagcatcaacttatttgtatact

SEQ ID NO: 13199 - DNA, 318 bp, Glycine max
  Clone ID: jC-gmfl02220145c09a1
tattgatattggtatggtctttctttgtaccccatttgcaaaaaggaagaagaagaacatgaagattcagtgtgatgtgtgtgagaaagcccctgcatccgtgatttgttgcgcagatgaggcagctttgtgtgccaaatgtgacgttgaagttcatgctgcaaacaagcttgcatgcaaactctatttttttttatttttttcttcttcctccttattttcatctttttttacattatgtcaagataagccagctttcatattctgtgttgaggacagagcactcttttgtatagactgtgatgagccaattcattt

SEQ ID NO: 13200 - DNA, 563 bp, Glycine max
  Clone ID: jC-gmfl02220145c10a1
tattgatattggtatggtctttctttgtaccccatttgcaaaaaggaagaagaagaacatgaagattcagtgtgatgtgtgtgagaaagcccctgcaaccgtgatttgttgcgcagatgaggcagctttgtgtgccaaatgtgacgttgaagttcatgctgcaaacaagcttgcaagcaagcaccagaggcttctccttcaatgtctatcaaacaagcttcccagatgtgacatatgccaagataagccagctttcatattttgtgttgaggacagagcactcttctgtaaagactgtgatgagccaattcatttagccagtagcctttctgcaaaccaccagcgcttcctcgctactggtatcagggtggctttgggttctaattgcaccacaggccatgaaaaaggtaacatggaaccatctaatccaaatgcacaagaagttcctgtgaaaactccttctcagcaagtgcctagcttcacatcctctagggcagttgatgacttgttggaattaacagactttgaatcgccagacaaaaagcaatccctggaatttggag

SEQ ID NO: 13201 - DNA, 158 bp, Glycine max
  Clone ID: jC-gmfl02220145c11a1
atataatcctttttggaggcgccgattttgtcttaactgcagtcaatctgattctaacgggggggcggtatgcattggtcactccgtcgccttctggatccgtcgatccctctctgtagcttcacctacgcacaccctgtaatggcgaccacgagata

SEQ ID NO: 13202 - DNA, 543 bp, Glycine max
  Clone ID: jC-gmfl02220145d01a1
ctttagccgaggtcaggaggagcactagctaagttcacaatttcaaaatggctaggggactaaagaagcatttgaaaaggctcaatgctcctaagcattggatgcttgacaaactgggtggtgcatttgcgcctaaaccctcatttggaaccacacaaatcgagggagtgcctccccctcattcttattctgcgaaaccggctgaagtatgctctgacataccgtgaagtcattgctattctgatgcagcgccatgttcttgttgatggcaaagtcaggactgacaagacttaccctgctggtttcatggatgttgattcaatcccaaaaacaaatgagaacttccgcctgctctatgacactaaaggccgattccgtcttcattccatcagggatgatgaggcatagttcaagctctgcaaggttaggtcagtacagtttggccagaaaggtatcccatacctgaacacctatgatggtcgcaccatgcgatacccagaccctctcatcagggccaatgacactgttaagctggatctggag

SEQ ID NO: 13203 - DNA, 600 bp, Glycine max
  Clone ID: jC-gmfl02220145d02a1
ggaatatcacgattttcgtttcgcttatttttgaaatcgaaagattcccacagaattgtgcgaattattgttcatttttttgtctctactgtcgtgctccaacttggtaaactagaagttcatttattgttttcattcttcaatgggggatgctgagaatgcccttccacctacaaagaaaagggctgctggaagggagctcactcgagacactcccattgatgatgaggaagatgcccccgagcttgagactggcactttcaagagagccagtgaagaggttctggcaaccagaaggatggtcacaattcgtcgcaaacagactaattctgctccttctgcaaatccttttgctggaatacgcctggttgctcccactgaatcatgtgataatcctgctgagattactactgaagtacaatcagctggtgagaacgctgtttcacatgattcaaaaagtgatgaaggtatagctaaggattccaagaaagctgaagatgggaaaactaagcagtcagagttcaaatctgatgaggcagaggataaagctacttgaggtaaggatgctgcagaagaaaagcatgcaaacaaagagcatac

SEQ ID NO: 13204 - DNA, 174 bp, Glycine max
  Clone ID: jC-gmfl02220145d03a1
gacaacaacaactattggagcatggaggatatctggtcaatgcaattagccaattactgaacgggaattaaacctataaacataaatataaataatatatataaacctaagtgtctaagttccataaattaagctgtagtctctggcttaaaacatgttaggtttgtttataca

SEQ ID NO: 13205 - DNA, 135 bp, Glycine max
  Clone ID: jC-gmfl02220145d04a1
gccttattaaagaccaatggttaacttttgttttgaagggcggtcttgctagaataaacagtgatgagatcactgttttagataatgatgcggacaatgggtgtgacattgatccacattaagcacattaaactc

SEQ ID NO: 13206 - DNA, 164 bp, Glycine max
  Clone ID: jC-gmfl02220145d05a1
ggttgatgggtcggcgaaagaacaacagcatctacaatcagtgctcctcaagcaaggaagacgctgacatgaatagcaaccaccttcggtttgaagaagctgacgaggctgtcgacgagagttccaacctcgaccaatccatgtgcgacatcgaagaatccgat

SEQ ID NO: 13207 - DNA, 460 bp, Glycine max
  unsure (1)..(460): unsure at all n locations
  Clone ID: jC-gmfl02220145d06a1
caggatagaaaatttgaatggagagtggtgaagactattccctgtttgagactaggaaagacaaaggaaggcacattcgaaggatctatgcaatctctttgtttgtggccatatgcttcatctgggcttacagattgagccacatacccgcatatggcaaatgggcttggcttggtttgtttgctgcagaactctggtccggtttctattggctctttggtcaagccctccgctggaacatgctgttcagaaaaaccttcatcaatagactctctgaaagatatgagaatagcttgccgagagtggacatgtttgtgttcacggcagacccaatcattgagccacccatgatggtgattaatacagtgttatctgtgatggcttatgactatccagcagagaagctcagtgtgtatctctcggatgatgcaggctcagacataactttntatgctctttt

SEQ ID NO: 13208 - DNA, 416 bp, Glycine max
  Clone ID: jC-gmfl02220145d07a1
ccattttgaagcatgcaaagccaaaactagattgtaggtttattttggatgttaatgtgatagatggtacaatgatggctccatctactgcatttacaaagatctggcggatgcgcaataatggcactatagtctggcacaagggaactcaacttgcttggattggaggagacaagtttagtgactctcattcagttgacttagaggttcctgaggatggtgtccctttggagaaggaacttgacattgccgttgacttcacagcacctccattacctggtcgttacatatcatattggaggatgacaactccatctggacatcaatttggccaacgtgtttgggtccttatacaggctgatgcctctctcaaggactcattttatgataactctcaaggtctgaacttgaatatt

SEQ ID NO: 13209 - DNA, 471 bp, Glycine max
  unsure (1)..(471): unsure at all n locations
  Clone ID: jC-gmfl02220145d08a1
taaaaacaccaaattacatagaatttttaggcgtaaccaaagtacgtaccaaaccatggcattgacaagtcaattgagaaaccttcttgcagctctagaggctgaggaagcagcccaaaaatccaaaggtaaagtgaacacatacaccaaccatggcgatgggtttcagaacattactgggtttnanattattanttattnnttttatatttttaanaattaatttttattaattttatatatactgtggtggtcccgctataaataataggggcaatttccagggacatggcaatggaggctttattggtggtaatttcgatgcctcaacgaggaactactgattaatttatgtatgatcaacttcatgtattaaatactcgtgttctgcgctacgcntactaattaataataaaattagagctgcatgctgcagctctacagngtgtgatatgaataattacttgagag

SEQ ID NO: 13210 - DNA, 177 bp, Glycine max
  Clone ID: jC-gmfl02220145d09a1
gggaagcctcgtttctctgacttcatcttgtttcctgccaattggggtgctgatattcattcttggcttgtggtgttagctgagaagtacccttggcttgaggagttgaggctcaagagaatgactgttactgatgagagcttggagtttctggctctcaaattccccaatttcaaa

SEQ ID NO: 13211 - DNA, 482 bp, Glycine max
  Clone ID: jC-gmfl02220145d10a1
caaaaatggcacctgcaacactgtctctgtctctcctcctcctgttctcactcagcatcgccgtaaccgttagatcgagcgactactactacgattgtgtgtacactgcatacgttagaaccgggtcggtgtcgaagggcggaacggactctaagatcgggctgaagctgtacgacaagtacggctactacatctacattaaaaacctcgaagcatggggcggcttgatgggcaagggctacgactacttggagcgcggcaacctcgacatcttcagcggaaggggaccctgtcttgacggacccgtctgtgccgtttacgttacttctgacggatcgggttctcaccacggctggtaccttaactacgtccaggtcacctccactgggccccacctttcctgcgctcaggatcagtacgaagtggagcagtggctcgctctcgacacttcgccttaccagctttgggccgttaggaaccac

SEQ ID NO: 13212 - DNA, 559 bp, Glycine max
  Clone ID: jC-gmfl02220145d11a1
cttctttagcaccaaagaggccaaatatcccaacggaaatcgctctaacagagccacaaattcgggttattggaaggcaactggcttggacaaacaaattgttacttcaaaagggaaccaagttgtggggatgaagaagacacttgttttctacagaggcaagcctcctcatggatccagaactgattggatcatgcatgagtatcgcctcaacatccttaacgcctctcagagccatgttcccatggaaaattgggttctatgtcgcatatttttgaagaagagaagcggtgctaaaaatggggaggagagcaacaaggtgaggaactctaaggtggttttctatgacttcctagcgcagaacaagactgattcctcatcctcggccgccagtggaattacacatgaacatgaatcagatgaacatgaccatgaagagagcagtagctccaacaccttcccttatactattagaacgaaaccttaacaaccaagtcaacaaccaccttccttaaaaaagtgattatcacctagtttttttttttttaattctctttcc

SEQ ID NO: 13213 - DNA, 568 bp, Glycine max
  Clone ID: jC-gmfl02220145e01a1
cagcaacaagcaaaggaaaacaatgtctgctgtcatgcctgtgaggccaaataaacctgtaacagctgattccgggcctggcagacccccaaaatcaaatgtgcagcgaaaaagtaatatggagccaaagatgcagcaaaaaatggagaacaattcaatcactaggaggcctccaactgctcagttagataaatccaagcgttcagatgacgatgcagtccaagtaaagctagaagccaccaagagaaaacttcaggagagctatcaacaagctgaaaaagccaagaggcagagaacaatacaagttatggaaataaacgatcttcccaagcaaggtttgcaccgaaatacacatttcaaacctggatatcacagtaggcattgggctaatggtcgaagataaagctattattctatggtggaccttcagatttaacagtatttccaagctgtttgttccaatgggttgaagattggtccccttgattgtagaaaataacaaaatccattcaccatttggacttgcatagaaatattccaattgagagggaagtaaacctttaaacac

SEQ ID NO: 13214 - DNA, 418 bp, Glycine max
  unsure (1)..(418): unsure at all n locations
  Clone ID: jC-gmfl02220145e02a1
cagcgacaagcaaaggaaaacatggctgtttttatgcctgcgaggccaaataaacctggaacagctgatttctggcctggcagacccccaaaatcaaatgtgcagtgaataagttatatggagccagagatgccacaaacaaatggagaacaattcaatcactaggaggcctgcatctgctcagttagataaatccaagcgttcagatgacgatgcagtccaagtaaagctagaagccaccaagagaaaacttcaggagagctatcaacaagctgaaaaagccaagaggcagagaacaatacangttatggaaataaacgatcttcccaagcaaggtttgcaccgaaatacacatttcaaacctggatatcacagtaggcattgggctaatggtcgaagataaagctattattctatg

SEQ ID NO: 13215 - DNA, 241 bp, Glycine max
  unsure (1)..(241): unsure at all n locations
  Clone ID: jC-gmfl02220145e03a1
tgcaaaaaaatgccggagttgnagcnattcagcatgtttgatgtagactccgaggatcccctcggggaattccaattccacattttcaagaaataaggaggttttatttgttcatatatgaattggaattatttgttttcttattaggcctatcctgaagccaaaggaaatgagatcggaattcctcggggaattccaattccacattttcaagaaatatggaggcaaaaatgttcattta

SEQ ID NO: 13216 - DNA, 248 bp, Glycine max
  unsure (1)..(248): unsure at all n locations
  Clone ID: jC-gmfl02220145e04a1
tgganaaattatgggcgacatagcagtgcatgncagcatgtctgcatgtcgactgcagaggatcccctcggggaattccaattccacattttcaagaaataaggaggcttatatgttcatatatgaattggaattatttgttttcttattaggcctatcctgaagccaaaggaaatgagatcggaattcctcggggaattccaattccacattttcaagaaataaggaggcaaaaatgctcatatatg

SEQ ID NO: 13217 - DNA, 185 bp, Glycine max
  Clone ID: jC-gmfl02220145e05a1
gtgccagcgtcagagagactcatcagttctcactcgtacggcgcttttgctttgctttgcttcatttctttcatcgtcatcataaagttcgttcctttctcagttttcacccatacccagatgagtaacagcaccatctcggatctgtgtccctcctttgagtgaaaaagggtcaatctctggcc

SEQ ID NO: 13218 - DNA, 351 bp, Glycine max
  Clone ID: jC-gmfl02220145e06a1
gtgccagcgtcagagagactcatcagttctcactcgtacggcgcttttgctttgctttgcttcatttctttcatcgtcatcataaagttcgttcctttctcagttttcacccatacccagatgagtaacagcaccatctcggatctgtgtccctcctttgagtgaaaaaggttcaatctttggtctctggggctgttggggttccgtcattgaagaagaagaagaagatgggtattattgctattataatcatgtacccgaggctcatacacccccacgatgggattgtgacccacgatgagttgcagggtggtgctgcttccaacctctctcacgctcacaagggggacc

SEQ ID NO: 13219 - DNA, 519 bp, Glycine max
  Clone ID: jC-gmfl02220145e07a1
gggtgatgcaaaacttttttgcggcaatggtgtgaagactggctgccaggaggacacttcaagatctgagcagtctttaaggagaagaaatggtttggctgacttaaatgaacctgttccggtggaagaaacatataattctccatatgttcacctactgaatcgtaatccctgtcaaggggcaactgaatgctctgatatctctgctgatgctgccaaacaaaagtcagacttttttgctctgtctagggagcaattgctcaactctgatcatggaactgaaagttggactcgaagtcatgaatatttggagagctatgggggcggaaaagggcggtatcaatcagtggctgagtcagggctagctaaaagcaacacgcaccctgttccacaactgctcatatcagtatcttcccagacaatacatgatgcacttagcatagttcgtgaacctgcatctgattatctacatggtcgaaacatggctgacatgtggagggacaagacagttagtgatta

SEQ ID NO: 13220 - DNA, 165 bp, Glycine max
  Clone ID: jC-gmfl02220145e08a1
gggtgatgcaaaacttttttgcggcattggtgtgaagactggctgccaggaggacacttcaagatctgagcagtctttaaggagaagaaatggtttggctgacttaaatgaacctgttccggtggaagaaacatataattctccatatgttcacctactgaatcg

SEQ ID NO: 13221 - DNA, 474 bp, Glycine max
  unsure (1)..(474): unsure at all n locations
  Clone ID: jC-gmfl02220145e09a1
gaattgagttgaaatcgaaagggaagcggtggtttaggttaggatttggtgagtgagtggggatggcgaagttcaatgtggtgcagaagcgaaggagagctctaatagcagagaagaagagacagcttcacggagaccctttaaccggcaagctcaagatcaaggaccaaccccttttcctatncntaaatntntntctctttcctcttttctttttccttcttttttcttcttcctccctcctaaatggtttggtaaccatggaagatgttcaaatggcagttgctgaagcaggggataccaaagatacccctagaccttcaccaaaaattcacttatagaagaaggccttgaaacttaaacagctcaagcgcaaagggaagaacacaagaaaatctgatgtgcctgctgatgtttcggctgatgcaatggtggaataaatatgaaaagttttgatatcctacatacttggta

SEQ ID NO: 13222 - DNA, 556 bp, Glycine max
  unsure (1)..(556): unsure at all n locations
  Clone ID: jC-gmfl02220145e10a1
gaattgagttgaaatcgaaagggaagcggtggtttaggttaggatttggtgagtgagtggggatggcgaagttcaatgtggtgcagaagcgaaggagagctctaatagcagagaagaagagacagcttcacggagaccctttaaccggcaagctcaagatcatggaccaaccnctttccctatccggaaaacgcaaacgcaagctcttcaaaaaatggcgccgggaccaaaaggacgccttacagaatggtttggtaaccatggaagatgttcaaatggcagttgctgaagcaggggataccatagatacccctagaccttcaccaaaaattcacttaaagaagaaggccttgaaacttaaacagctcaagcgcaaagggaagaacaaaagaaaatctgatgtgcctgctgatgtttcggctgatgcaatggtggaataaatatgaaagttttgatatcctacatacttggtagggtggaggatagaagaggccgatgtctgatggtatataatgttgcaatcctcgagtgaatatgctattcctatattttcttc

SEQ ID NO: 13223 - DNA, 581 bp, Glycine max
  Clone ID: jC-gmfl02220145e11a1
gcaaactgatgatgttgtgaagatttttaagcaactcttggatttgggcattgttccagatgtttacttctgctgttgtcttctgaatgttatgactcaaacaccaaaagaagagtttggtaagctaacagactgcattgagaaggctaatacaaggcttggttctgtggtaagatatttggtggaagggcaggagggtgatggagattttagaaaggaagcatcagaacttcttaattcaattgattttaaggtaaaaaagccgttatgcaattgtctaattgatctttgtgtcagcctgaatgcgccgaacagagcacgtgacgttctggaccttggactgatgcttgagatatataaaaatatacaatccagatctgaaacccagtggtctttgcatttgaagaaactctcagttggagctgctataaccgcattacatgtttggataaatgacttgtctaaggcattggaatcatgggaagaccttccaccactgcttggagttaatactggacagggaaaacacatgtattcagaccaagggtttgctagtgtatttgaatacatttgagggaact

SEQ ID NO: 13224 - DNA, 450 bp, Glycine max
  Clone ID: jC-gmfl02220145f01a1
catcactagaagacaagatcatcttttgttttcccctgccctgggcgtgctatatactgcaagggtagactttacaatcaaccacagctcctttcctcgatcactttctttcatgctttttatgctttcaacgagctccctttaccccacttaattttactctctactcaccattctttgtgtcaggcctaacacaattcaatctaatcgaccagtggactctcatctaccacctatactataggccccggtataaccctgtttcactcaccctcattgtattgttccctctgcatcaaccatcgacgtgcgacatgagaccacgcatgttgactacaggatgtcagccaagaccgactaaagatagtcctcatcaaagacgaaagtgggctgttatggctacaaagtaatctgcactgcagcatatgaaggctatgaacctgatgtgtc

SEQ ID NO: 13225 - DNA, 621 bp, Glycine max
  unsure (1)..(621): unsure at all n locations
  Clone ID: jC-gmfl02220145f02a1
caatatttgtcaacaaaaacaacctttgactcacccttccctctccttgcttgagcatgaaagcttccactctacccttttgcccaacccatctccccaaaacctctcatttctctcttcatctccttccaatggcttccattcccacactctcttcacccctacccacaatctctgctcactcctcaccccattcaaacccaaacaaccactgcactctctctcccacctctctcttcggcaccaggatcaccctcctacgcgccacctcatcgtctcgttccctccccaacaccaattgccgtgcgacatcagccaccgtgtcgtttagcctccccaccccgaaacccctttcagatacgcctgagaaaaccccaaagtggtcggcgagggctataaagtcatatgcaatgggggaattggaagcgaggaagctcaagtatccaaacacgggaaccgaggcacttctcatggngattttggttgaaggaacaagtaaagctgcaaaattcttaagagctaatggaattactctcttcaaagtacgtgaagaaacagtagagctactagggaaatctgatttgtatttcttcagccctgagcatcctncattgactgaac

SEQ ID NO: 13226 - DNA, 168 bp, Glycine max
  Clone ID: jC-gmfl02220145f03a1
ggccacaccagcatccatcaccaatgtcactgtggtgttccttcaattccccgcggtggtgacacctcctgcctctaccaaatcctatttccttggtggcgcaggggtgagagggttgaatattgaagaagaatttgtaaagttcacgggaataggtgtttatttgga

SEQ ID NO: 13227 - DNA, 88 bp, Glycine max
  Clone ID: jC-gmfl02220145f04a1
gttcagggaacaacccgaacactctctcttatataagcgcaacataatagatgaagaggccgttcaatacatagccgtcgaaaagccc

SEQ ID NO: 13228 - DNA, 185 bp, Glycine max
  Clone ID: jC-gmfl02220145f05a1
gcggcgcacagaacccgttgaaggcttgaagtctcaccccgacgccgtcgaaggtaagttaccttctttattgttttccaaacgtttttccgaagtcttctagcactggtagaagagataaaaacaagtgttctgcgtttgcgttgcttaaaccttagaaagagtttgattttgacgttctcgac

SEQ ID NO: 13229 - DNA, 166 bp, Glycine max
  Clone ID: jC-gmfl02220145f06a1
gctagcttcttcgctctccttcctccattcttgcacatccccctcttcctcttccttattgtcaatttcacctccaaaccccaaaccctctcacttcctacctttcgtggtcgaagccaaagacaggacccgcagggaagacaggaccgctcgccacactcgcatc

SEQ ID NO: 13230 - DNA, 322 bp, Glycine max
  Clone ID: jC-gmfl02220145f07a1
gtcttcttaaagaccaatggttaacgatggctctgatgggcggttttgctagaataaacaataatgagatcactgttttagtaaatgatgcggaaaagggtagtgacattgatccacaagaagcacagcaaactcttgaaatagcagaagctaatttgaataaggcggaatgctaaactcctattcttttcttttttttatctttcttcctctttcccttcatatcttctcttatcttttttctctttctacattctttttttcttcaactttttcttttttttaatatatatctattctttttttttcaatattttaattt

SEQ ID NO: 13231 - DNA, 185 bp, Glycine max
  Clone ID: jC-gmfl02220145f08a1
ctctcttctttcccctctctttcgagggtttttctttttcttttttccctttttttatttttcctttatttaggttttttctttctcttgtttttcagttttgcttccatttcctttgaatccccatttattcttcttcttctgcaaccctaaccctagaattgaagatgcagccttataggttt

SEQ ID NO: 13232 - DNA, 175 bp, Glycine max
  Clone ID: jC-gmfl02220145f09a1
gttattaagagcttttgcttttctttctgcgcgcttttcccaattaagtagttcttccttttctcaaagcaaaaaaaatgttcatcgagagtttcaaggttgagagtcctaacgtgaagtacacagagactgagattcagtccgtgtacaactatgaaaccactgaacttgttca

SEQ ID NO: 13233 - DNA, 527 bp, Glycine max
  Clone ID: jC-gmfl02220145f10a1
cggcgcggcacccacacacacagttcgtcggaatgggaagggtgattcgcgctcagcgtaagggtgctgggtcggtgttcaagtctcacactcaccaccgcaagggtccggcgaggttccgcagcctcgacttcggcgagcgcaacggctacctcaagggcgtcgtcaccgacatcatccacgaccccggtcgcggcgcccctctcgccaaggtggcattccgccaccccttccgctacaagaagcaaacggagctcttcgtcgccgccgagggcctctacaccgggcagttcgtctactgcggcaagaaggccaccctcgtggtcggcaacgtgttgcccatccgatccatccccgaaggtgccgtcatctgcaacgtcgagcaccacgtcggcgaccgcggcgttttcgccagagcctccggtgactatgctattgttataagccacaaccctgataacgacacctctaggatcaagcttccttctggtgcgaagaagattgtgccagtgggtgcagggcgatga

SEQ ID NO: 13234 - DNA, 578 bp, Glycine max
  Clone ID: jC-gmfl02220145f11a1
gcaatggaagctcaatcacaccaccgtctcaatgtcctttttcttccatatccgacacctggccatttacttcctatggtagacacagcaagactatttgccaagcatggtgttagtgttactattctcactacccctgctattgcttcaacattccaaaatgccatagacagtgacttcaattgtggatatcacatcagaactcaagtggttccattcccttcagcccaagttggtctcattgatggacttgaaaacatgaaagatgccactaccctagaaatgttggttaaaatcggttatggactatcaacgctccaagatgaaattgagcttcggtttcaagaccttcaaccagattgtatagtgactgatatgatgtatccttggacagtggaatcagctgaaaaactaggcattccaaggattttcttttacagctcatgctacttctccaactgtgcttctcattttatcaggaagcatagacctcatgagagcttagtctctgacagccacaagtttacaattcctggtttgcctcatagaatagagatgaccccttcgcagctagcaga

SEQ ID NO: 13235 - DNA, 400 bp, Glycine max
  unsure (1)..(400): unsure at all n locations
  Clone ID: jC-gmfl02220145g01a1
gtgatgttcactgcttgaccctctttttttacaacatctgacaaataattcgcctcatgaggtatttcactcacaaagcacaatgctgctcctgactttcttagtccaaataccttactacatctatacnaaagggggccccatggcccggtggcctagggcaaggagcgtcaatttaatgccatccatcaccctaacaatttcaaacaccttatatatcctaatcacactctatcactctacacttatttttctggttatgcactgtgtaatggtataactccttatacctctgcacctacagatctgagttgccatagaaccttgaacgggcaccccccaacggtgaatatatctgactgtacatgtgaaaacactctgatggctgttgcataccaag

SEQ ID NO: 13236 - DNA, 334 bp, Glycine max
  unsure (1)..(334): unsure at all n locations
  Clone ID: jC-gmfl02220145g02a1
ggggtgttcacngcttgttccgcttttttctcaacctctgatacacctttcgtagcatgggagatttcagtctcggaggaaatggtcgcaacagccttcgaatgcccacacaccgaatttaactgtttcttatggggtccccaaccacggcttactgaaggcgacggacggtgataaactgcaacctattactgttaaggcttctaacagtggttactgtttcagcgccatatcctgctggatactgattaaccgtactatgcacggccacaacggcgtactcctgccacttccacaattatagaacgacgtgggccaagaagtaggggaggcc

SEQ ID NO: 13237 - DNA, 309 bp, Glycine max
  unsure (1)..(309): unsure at all n locations
  Clone ID: jC-gmfl02220145g03a1
cacctttccttttttcccacagaaaaaaacaccacctttctttttccgactaaaggttcgccggaaaatgcctctatcctcctcttcctcctccgccgtagactccgccgtctccggcgagatcatgctctttggcgttagagtcgtggtggactccatgcggaagagtgtgagttttcaccaccctctctannatctctctatcatttttgagattctcacttaatttatcctttcagaggaaatgccttccgcgatgatgcagctccgatctactccgtcaagaaccgcgaccgcaagcgagggatt

SEQ ID NO: 13238 - DNA, 174 bp, Glycine max
  Clone ID: jC-gmfl02220145g04a1
cacctttccttttttcccacagaaaaaaacaccacctttctttttccgactaaaggttcgccggaaaatgcctctatcctcctcttcctcctccgccgtagactccgccgtctccggcgagatcatgctctttggcgttagagtcgtggtggactccatgcggaagagtgtgag

SEQ ID NO: 13239 - DNA, 171 bp, Glycine max
  Clone ID: jC-gmfl02220145g05a1
caaaaaacgcgtttggtgtgtgtgttcgctctcaccactctcatgccactggttaacggaggcgatacttaaaacaagcgttgggggggctttaagacggcgtcgttttgtatgagacataggatatcgtatttgatggacgagatctgggagagagctatggaaacggcg

SEQ ID NO: 13240 - DNA, 485 bp, Glycine max
  Clone ID: jC-gmfl02220145g06a1
caaaaaacgcgtttggtgtgtgtgttcgctctcaccactctcatgccactggttaacggaggcgatacttaaaacaagcgttgggggggctttaagacggtgtcgttttgtatgagacataggatatcgtatttgatggacgagatctgggagagagctatggaaacggcgttggacggcgagatggaccacgcggtgtgtcggacgcttaccctatatctgttccgtttattgcttgtaagttattttatctttcttagtcttcttgagcggttccagaacctgctgcacctatcgatagcgaacgtctgcgtttcgtcgctggagcagtttccgcggctgaggaatttgcagaagctgaacctctccgacaaccggatcgccagcgggctggattttctcgtgcaggcagtgctggattcgctgcgcgacctcgatttgtcgaacaatcggattcagtacattgaggatctcgcgcccctcgc

SEQ ID NO: 13241 - DNA, 335 bp, Glycine max
  Clone ID: jC-gmfl02220145g07a1
agagaatgaaaaaattatctactcatttccttgaatgtactatgcccacaatcccaaaggattaatcaataatcagttaatcaccaccatttatcatgacatctgaagcatatgtgcctaaaagatatgagtctctagagaacccttttgctcataaaccgccgcgttagcgttctcttttttttttcttcttcctcttctcttcttttctcttttctccctctctttctcttcttcccttttttcttttttccttctcttcttctttctcctctttttttttttttctttcttttctttttttttctctttctcctttttccttcttccctctc

SEQ ID NO: 13242 - DNA, 183 bp, Glycine max
  Clone ID: jC-gmfl02220145g08a1
agacaatgaaaaaattaattactcatttccttgaatgtgctatgcccacaatcccataggatcaatcagataatcatataatgcaccaccatatatcatgacaactcacgaagcatatgtgcctataagatatgagggtctagagatcccttttgttcataaaccgccgggattgattttttt

SEQ ID NO: 13243 - DNA, 200 bp, Glycine max
  Clone ID: jC-gmfl02220145g09a1
ctttgaagttcacacacacttgttcacccctgaaatggaacacaacctcacaatgaagtgtcgtagaaatgaaaaccttctaaccagtggcactcatttgccagaaagccctcgagtaccaatggagtttctgtcaagatcatggagtgcctcttctcttgaggactctaaagcccttactactttatatttctattttt

SEQ ID NO: 13244 - DNA, 427 bp, Glycine max
  Clone ID: jC-gmfl02220145g10a1
ctttgaagttcacacacacttgttcacccctgaaatggaacacaacctcacaatgaagtgtcgtagaaatgaaaaccttctaaccagtggcactcatttgccagaaagccctcgagtaccaatggagtttctgtcaagatcatggagtgcctcttctcttgaggtctctaaagcccttacacttacaccacctccacctctttcttgttacataccttccaagcctcctaatgcaccctcttctgtgactaactccatttccgaagaaacttcagaggaattctcaaccatgtgtggcaaccagttctcttttgcttcctctgccacctcacaacttgtccttgaccgcataatgtcacagtccgcaagagaggaagtgtctccattaacgtcaggtagattgtctcatagtagtgaacctttgaac

SEQ ID NO: 13245 - DNA, 410 bp, Glycine max
  Clone ID: jC-gmfl02220145g11a1
tgggaaaaaatgggcgagcttacgatgcatgcactgtgatcttgctctgctcccttacctcagctctgagttcgagccgagcccatttgatgtacgtccatcggaccttactttatgcatcgtctgtcatctaggctaagcacacatggaatggcatccattctatatgatactatacaaatgcctcatgcattgtggacttacgcttcacacgatgtgcgacacgagccacataacacacataatggcaagtgggcttggttggatttggttgccacacaacgctgcctcattatctattgcctctctggttctgacctagtctgttacttgcggtgtagataagccccgatctctatgctctgtaaaacatatgaacatagcttgccgagagcgacccagattgtgtt

SEQ ID NO: 13246 - DNA, 650 bp, Glycine max
  unsure (1)..(650): unsure at all n locations
  Clone ID: jC-gmfl02220145h01a1
atgaacaggagttctgtactgcnatnancaaaaaataaaaattganaaaannccccnaccaaaaaaanananaaaaaannnnnanaaaaannaaaaaanaaaanaaaaaaatttttttttttnnatanaananaaaanataataattatggggggggatttataaatttaatgttaagtgaattttaaagaataagactcctaacattgtccaaagaccaattggacagattttaaccaacagagtgcagtattgttgcatcactttcaaacgattatgttgactcttatgttctgtcagagtcaagcctgttcatctatccttataaaattatcatcaaaacttgtgggactaccaaattgcttctgtccatccctgtcatcctcaagttggctgatgctcttgacattgctgtgaaatctgtgaggtacactcgtggaagtttcatttttcctggggcacagtcttttcctcaccgcagtttttcagaggaagtttctgttcttgacagctatttcagcaaccttggttctggtagcaaagcttatgttatgggtgacccttcgaagtcacagatttggcacatctactctgcaagtgcacaaaccaaagggtcatctgaagttgtctatggccctgagatgtgcatg

SEQ ID NO: 13247 - DNA, 617 bp, Glycine max
  unsure (1)..(617): unsure at all n locations
  Clone ID: jC-gmfl02220145h02a1
cgcattttctttgtcaatgatacatatcttccaagtgccacaccagctccactacttaggtacagaaaagaagaattggaggttttaagaggagatggaacagggaagagaaaggactttgacagaatctatgattatgatgtcctttaatgatttgggcaatccagatggtggtgatcctcgcccaatccttggtgggtctagcatctatccctaccctcgcagggttagaacaggaagagaaaggaccaggacagatcccaacagtgagaaaccgggcgaggtttatgttccaagagatgaaaattctggtcacttgaagtcatcggatttccttacatacggaatcaaatccttatctcacgatgtgatacctttgttcaaatctgccatttttcaattaagggtcacatcgagtgagtttgaaagcttctacgatgtgcgtagtctctatgagggtggaattaaattgccaacagatatactgagccagattagccccttaccagccctcaaggaaatcttccgcactgatggtgaaaatgatctttcatttccaccacctcatgtagccaaagttgtangtctgggtggatgactgatgaggaatttgctag

SEQ ID NO: 13248 - DNA, 172 bp, Glycine max
  Clone ID: jC-gmfl02220145h03a1
ctttctctcgtttccccttcgcaatttcccctctcgtaagagacacgcatcgaagaaaatcacatcacggcaatggaggaaaagcacgcagcagccatcgaatccgcacacgccgaatctaacggcgtctctcacggcgccgaccacggctggcagaaggtgacctacgctt

SEQ ID NO: 13249 - DNA, 157 bp, Glycine max
  Clone ID: jC-gmfl02220145h04a1
ctcatctttagtctgttcttcagaactttagtgtgttatgtaaccccaagactttgagaatgccgagctgggtttgttgaaatcgctgcaactgtgaccgcaactgcggttagcacaagtactattttgactagagctatgtcgataagacaaccac

SEQ ID NO: 13250 - DNA, 439 bp, Glycine max
  Clone ID: jC-gmfl02220145h05a1
ctcagagagcacattgcattggcgacaccgtttgcgacgacggaaattgaattgctcgtgcgcgtgggtgcgtgatcgatcgaaggacgaacgatgtcggagatggcgagcccagatcccgagggactcgacggagtccgcatgacgtggaacgtgtggccccgtacgaaggttgaatcgagcaagtgcgtgatccctctggcggcgacggtggctctgatccgtccccaccctgacatcccccgcctccagtacgcccctctccggtgcaagacctgctgctccgacctcaaccctttctcccgcgtcgacttcaccgccaagatctggatctgccccttctgctaccagcgcaaccactttccccctcactaccacgccatctccgaaaccaatcttcccggcgatctctacccccaatacaccaccgtcgagtacc

SEQ ID NO: 13251 - DNA, 439 bp, Glycine max
  Clone ID: jC-gmfl02220145h06a1
ctcagagagcacattgcattggcgacaccgtttgcgacgacggaaattgaattgctcgtgcgcgtgggtgcgtgatcgatcgaaggacgaacgatgtcggagatggcgagcccagatcccgagggactcgacggagtccgcatgacgtggaacgtgtggccccgtacgaaggttgaatcgagcaagtgcgtgatccctctggcggcgacggtggctctgatccgtccccaccctgacatcccccgcctccagtacgcccctcttcggtgcaagacctgcttctccgacctctaccctttctcccgcgtcgactttaccgccaagatctggatctgccccttctgctaccagcgcaaccactttccccctcactaccacgccatgtgcgaaaccaactttcccggcgaactctacccccaatacaccaccgtggagtacc

SEQ ID NO: 13252 - DNA, 174 bp, Glycine max
  Clone ID: jC-gmfl02220145h07a1
tttcagtgagtgatcggtgttcacttgatctcatcataatcgtcagcgtcaattgaagaagatgccgatcagaaacatcgccgtcggaaggcctgaagaggcgactcaccccgacacgttgaaggcggctttggctgagttcatctcaaccttcatcttcgtgttcgccggctc

SEQ ID NO: 13253 - DNA, 170 bp, Glycine max
  Clone ID: jC-gmfl02220145h08a1
aattccctttggagggtacaaaatgtgtggtctaggaagagaaaaaggagaatacagtctcaagaattacttgcaagtgaaggctgttgttacatccttgaagaacccagcttggctttgaacatcattagctttagatttatttgatgaaaagattaataaattggctc

SEQ ID NO: 13254 - DNA, 240 bp, Glycine max
  Clone ID: jC-gmfl02220145h10a1
gtgccagcgtcagagagactcatcagttctcactcgttcggcgcttttgctttgctttgcttcatttctttcatcgtcatcataaagttcgttcctttctcagttttcacccatacccagatgagtaacagcaccatctcggatctgtgtcccttccttgagcgaacaaggttcaatctctggtctttggggctgttggggtgtcggccttgaggatgaagaagatcaagggtattattg

SEQ ID NO: 13255 - DNA, 525 bp, Glycine max
  unsure (1)..(525): unsure at all n locations
  Clone ID: jC-gmfl02220145h11a1
cgctcccctcattcttctttcgttgctacttctactgtttcttcctccgatccctcattgccgcaaatgactcctcctgctagtgttaggtgaattccctcgcttcacatgcatgatcgcaccttcaactctcttcttcttcttcttctccatggctttttttcaaggtacgttgagttaacctctgcttgctctgtgtgattaagtattctcggcaacccattaggagaacggaaattggagtatagtggcagagatagtaattctgaagtgttgttgtgatatatacactaattgtagttctttccgcgtttgaaaggttttggcgccgtggagttcgttttgtagcatcaccgtatcatcagcttcagcttgctttcaccaaaacggctntactatttggtgtgttccatgtcacaaaaaacgaaaggagatattccttttacccactcctcgtcagggaagatctgaagcagcgctagcagcacacgtcctctaatggacgccgactcctctggagaagaa

SEQ ID NO: 13256 - DNA, 551 bp, Glycine max
  Clone ID: jC-gmfl02220146a01d1
agtcttcgaaggaactggtgccttggctctctgtgctggcacaggtgactttgcaaccggtgtcggaatgggtgccttggcaccttgtaatgatgacataggagctttggcaccctgtgcagcaacgggagcattggctccttgtgaggattgtgcaccacatgatgaggctggggtttgtgaatcaacacctgggactaggatgggtttggcgacttggagaatggagatgttgtagggctcgctggtgacggtcctcatgagctcggtggcgtcgactggggcgccactcacggccgagccgaaggcgatctcgccttcgccgacgagtgcaaccttgaggaagccttgttggttcactgcaatgcctgaggcctggaatagggttgtcaactgttggctattagcttgagccttcatgagcttcttctcatcaaagaagtcatggatgacatgggtgctaatgatggccttaatggcttctggtgactcgggcagcatggaattcatggctgagtcttcaacggcgaggacagtgatggtgttgcggc

SEQ ID NO: 13257 - DNA, 414 bp, Glycine max
  Clone ID: jC-gmfl02220146a02d1
ggaaatactaagaaacactctacttacggtgaaggggaactaacttttacaccatacacatttgtttcccactatccaaaaaaaaaaacacccccccaacccgaaaaaagaaaagaatgaatttctacccctactttaccccttatcttaacccctttaaaagtagaaaaattttaaaaactacttaaattcaagcccaatgaccaccccggggaactgaaacaccagggggttttgttctttacacaactatggcttcttttatcattggcaggttttggagaacctttttccctatatgatccactgcaccacccggaggggttgggcccatacccccgggatggcccttatcatatacaaagatgggctgcacccgatccatattttgggggaacctgcctttctgctctt

SEQ ID NO: 13258 - DNA, 104 bp, Glycine max
  Clone ID: jC-gmfl02220146a03d1
ttgtattttttttttagatttttcttttttttttttttttttttttttttttttccaagaatcttttttcttttaaatattttattgtcacaaaatttttcttt

SEQ ID NO: 13259 - DNA, 471 bp, Glycine max
  Clone ID: jC-gmfl02220146a04d1
gacttaagttaaaatgttcagatccatatgagcatatacttcgaaataagatgaatattacaacaaaaaggcgattgaaaaatacgaattacaataagcagtaacctaattttaattctagatcacacaatgaaacctaattttaagctctctcgcctctgattctgcgagcaagttgaatatccttgggcataatggtgactctcttggcgtgaatagcgcaaaggttggtgtcctcgaagagtccaacgagataagcctctgcggcttcctgaagcgcagaaacagcgctgctctggaaacgaagatctgttttgaaatcctgagcgatttctctgacgagcctctggaatgggagttttcggatcagaagttcagtgctcttctggtactttctgatctccctcagagccaccgttccgggcctgaagcggtggggcttcttcactccgccgggggccggagctgact

SEQ ID NO: 13260 - DNA, 116 bp, Glycine max
  Clone ID: jC-gmfl02220146a05d1
agcaataaatttcatttcatttcatccaaataatggggaccttacaaagctttcttatttcccaaattatgctcacattaagaaccgaacattttaatagcatttttcttaaattc

SEQ ID NO: 13261 - DNA, 537 bp, Glycine max
  Clone ID: jC-gmfl02220146a06a1
aaaaggtttctatcagtgcctgtgttggcagtgtttttgttgatgctttttgtgtattactcttcaatcttcgtcttcctccaagattggctcggtttgcagagttcccctggcactttgaatgcgttccttttctctctctttgcttctctatccctcttctcttttttctcttgcgttctcactgaccccggccacgtcccttcttcctacgccccagatgttgaattctccaaagataatgcagaacagaagaaatgtgacaagtgctttgcatacaagcctcccaggacccatcattgtcgagtttgcagaaggtgtattctgaaaatggatcatcactgcttgtggataaataactgtgttggttattggaattataaggctttctttgtttttgtattctatgccaccacggcaagtatttattctacggtatatttccaatctggcatctactggttctgtagtgaacaggattcctatttgacataagcttttacaatgtgcagatcatatttatgagctgtgtatttc

SEQ ID NO: 13262 - DNA, 561 bp, Glycine max
  Clone ID: jC-gmfl02220146a06d1
agaagtcattatacaataagatgaacagaaaatacatagaagtcatataatcatcaatcatcaattttacacacaggaaattgaagatcatttctcaataacgaaatgaacataaaagatgccacaaccaatatggctaaacctacaaacaaaatctaaaactctcctttaacactatgaaaaggcctttgtgacatacctgcaattactctaaatatgtgctaagactgaattctactgtcaggaataaaattggagtaaaattgtgttacctgatttacaagctctaaataaagtttccattttcaacaatctacgatgaagccaagctgttgaaagacagacattgaaacatttttggtaaagatatctatcaacgcgttgcataagctttactttctcaaagcttgttgatcaattgtcttttctctttaaactcttttctgaatatcaaattcagatgaatgagttcttaattcctcatttcaagatccatatgcatgacctgctttggttcatgacttggccaagaccagaagttttaagaattatcacgtaacg

SEQ ID NO: 13263 - DNA, 624 bp, Glycine max
  Clone ID: jC-gmfl02220146a07a1
acaagccaagtgaaagagagaagaaaagtcaaagacaatgtcagggatcattcacaagattgaggagacccttcatgtgggaggccacaagaaggaggaggagcacaagggtgagcagcaccatggtggagaatacaaaggggagcatcatggtgaacacagtactgaatacaaaggagagcatcatgttggtgagcacaagccggagcaccatggaggagaagagcacaaagaggggttcctagacaagatcaaggacaagatccacggcgaggagggtggcgccaccgccgagggcgagaagaagaagaagaagaaggagaagaagaagcatgaacatggccatgacagcagcagcagcagtgacagtgattagattatctcccactgctgcatcacctatatatcttataaggtgtatgggaccatagtagtgagggctgtgtctttctctttttttcctacttgtcatttatatttatgagcgagagaaatagtgcgtgtatctggttgctaattcgagtgctattagtctgtggtttcgttggtttgtaacccctctggcttgttatgctggatttgtatatatccttaaagaaataaaagaataaattattcatgcgt

SEQ ID NO: 13264 - DNA, 490 bp, Glycine max
  Clone ID: jC-gmfl02220146a07d1
ggccgccctttttttttttttttttattttttttttttttttttttttttttttttttttttttttgatttttgttatttttttttttttatttttttttaccgatggggaaataaaagttgaatttctttaaggggaaatatccatccgggaaaaccaaagcgaagggggtacaaaccacagagagcccccatctaaaaggccccaaaataacaaccaataacccgccctatatctcccggcaaaaaataaaaaagaccagggggaaaaaaaaaaaaagacccaggcctaaatacaaggggcccaacccccttaaaaaaaatatgggggatcccaccgggggaaaaaatgaaaaccctggcacaggtgctggggcagacaagggcatagtaaggactgttgcatcccctatatattttataatgtgccccctaggaggggggcccacccttttgcggggggaatcgtcccaaaaattgtttagaaaccc

SEQ ID NO: 13265 - DNA, 99 bp, Glycine max
  Clone ID: jC-gmfl02220146a08a1
ggagactagagtacgtactacctagtccactactgcttaattatgtacgtacgtgtctgttatttcacttttataagtaatgaatatgaatattatgtt

SEQ ID NO: 13266 - DNA, 99 bp, Glycine max
  Clone ID: jC-gmfl02220146a08d1
aacataatattcatattcattacttataaaagtgaaataacagtcacgtacgtacataattaagcagtagtggactaggtagtacgtactctagtctcc

SEQ ID NO: 13267 - DNA, 615 bp, Glycine max
  Clone ID: jC-gmfl02220146a09a1
gtccgatcccccagcgccaaacgcaccaccgaagcaaatcaatattaagggcctgtccgtcgtcaaaaattacttatctgactacggctacattgaatcctctgggccatttaacgattctttcgaccaggaaataatatcagccattaagacctaccagaatttttccaatcttaatgttaccggcgacctgaacaaacagcttattcagcaaatgttgtccatacgatgcggtgtccccgacgttaacttcgactacaacttcaccgacgacaacatttcctatcccaaagccggacaccgctggttcccaaacagaaacctcacatacggttttcttcccgaaaaccaaatcccagacaacatgactaaggtgttcagagattcctttgcgaggtgggcccaagcctcggggactttgagtctcacggagacaacctacgacaacgccgacatccaggtagggttctacaacttcactaactcgaggattgaagtgtatggtggcagccttatatttttgcaaccggattctagtaagaaaggggtggtacttctgaacgtaacatgggctggttactttcagtgaaaacgccacactgtctaaagatgatg

SEQ ID NO: 13268 - DNA, 498 bp, Glycine max
  Clone ID: jC-gmfl02220146a09d1
aaaattagaattctcaaaatgatcttttatttaatattggaggtcgaaaggcctataagaaacagccacgtgagaataaaccgaaaagtcaccacaggttggggagcacatacaataaacattgaacaatcagaaatataaaaagctcataatgtgggacaggaacgactaatacaaaaggagcactacgtaagcaaatccaagagagaaagcggtaactaaaagcacatccaaacccccaccgtggcttgctgagtcatgccagtttggcagcagagaacatcctaagcatgcttagcaaactgatggtgaatgatggccttgtcagaattggaaagctgcacctttcgttgctgagaggacaatatgtaaggatacataacagagtcctctttgtgagagtgatcaagtccaagtagatgccctatctggtgcatcgcccgagtcttcaagtccaaaactccatcatctttagacagtgtggccgtttcacttgga

SEQ ID NO: 13269 - DNA, 602 bp, Glycine max
  Clone ID: jC-gmfl02220146a10a1
tctcacttcacaacacctcacccattttccactctttcccttctaccttgttccacctcttaatttttctaacaaaatggaggaaagtgtgctaacaaagaggccaagagaagaagaacccctagagaacaaagatagtacttatgaattactagagtccttatcaaagaggcacaggtcatacaaccacatactctccctccttgaatcagaggaagatgactccacacaagacctatcttctctcatcacttccctccaacaagaaatcaccaattgtgcctctgattcggacacccttttgaaccaacacagcctcaccaacaccaccaccaccaccacaacaaatagtaatttagaggattgttcatcctcaacaactaaatattctagtgacatgatggaggaacatgatgacaaagaaggggtcatgagacaccttcttgaagcttctgatgatgaacttgggattccaaataaagaggatgaatcactcgatcttggtgaagatgggttcaagttcaacggtggagacatgttttcttcaatctgtgatgggttggtgtgggagcttgaagatgaagctgctaactactatgatc

SEQ ID NO: 13270 - DNA, 459 bp, Glycine max
  Clone ID: jC-gmfl02220146a10d1
aaaaagaagtaattttcatttacccttaaaagtcaataaaattaacatatgaaatagtttagaagatcattactagctaattaattactttgtgtaatgtgaatatataagcctagctgctttttctacagatcgacatattgccaagtagtaaccaaccacacataaacgtcccatgattttaatttacaaaaagaggggacaaaaaaatgaaaaaataaaaactagtaaatttttcatttttttcctccttggatttcatcttgaacgcatgaaaactatggtttttcactttctatcccccaccaaaaaaaaaaaactagagaaagagttgagactgcaaaagatcatagtagttagcagcttcatcttcaagctcccacaacaacccatcacatattgaagaaaacatgtctgcaccgttgaacttgaacccatgttcaccaagatcgagtgatt

SEQ ID NO: 13271 - DNA, 611 bp, Glycine max
  unsure (1)..(611): unsure at all n locations
  Clone ID: jC-gmfl02220146a11a1
cctgaacctgtctgcatccattcccatttcttcttccgtatgcatgttcccaccgtctaaaaaacctagcaaagcaacaaaacggcgtcatgcttgggaagtagcatgcaatggtaaccctagaaataggagggacattctgatcggccttggaggactctatggtgctacaacaagtctcacaagtaacaacactggttctgcatttggtgcttcattgtcgcctccagatccaactaactgcgttcaaccggacccagaaaaagaccctttttgcccaccaccccccttcaaagactacgagctccctccacacgatgacaagacattaccccttcgaattagaccagctgctcatttggtcactgatgattacatagccaagtacgaggaagccgtgaggcgcatgcaagaccttccacctgatgatcctcgcagtttcatgcaacaggccaatgtccaccgtgcctactgcgatggtcgcggctataatcaaaagggcttcgctgactacaagcttgacgttcacggctcctggatattctttccttggcaccgctggtatctctatttctatgagaaaatcttggngaagatgatcgatgacccca

SEQ ID NO: 13272 - DNA, 519 bp, Glycine max
  Clone ID: jC-gmfl02220146a11d1
aacaaacatttattataacaatatcatagtatccctcaaagatgaaagggatctattaagttccaaggcaaataactacaacacactaattaagaaacaacaaatgacaaatagagtatccccggagaaacaaaccctagcagtagcacacacataatttagatttattcatcgtctacctcaggataaacacgctttatccttacgtccttaattgtaacaggcttgtctccatatatgggagccagtgtgacagaaatactatcatcgtcttttgttactcccaagtctttcaactgatacgttaatggcaatttgaaagaagctctggtgatgttgatatggttgacatgcggcgagtgaggcaaagtcacaaagcttcccgcaaactctgaatcctgtggtccaatctcattatcgccttggtcgttgatgaacacatcaaacctcacaccatcagtgctatcgtactcaacatctatcactaacacctcttctacgccttcttcttcttcattc

SEQ ID NO: 13273 - DNA, 458 bp, Glycine max
  Clone ID: jC-gmfl02220146b01d1
aaaatgaaaaaagtcttatccataggaacggaggtacttatgcgtaagggctaaaccaaatattttgaatgtagagactaaaacaaagactatacaggtttagagatctaaacagtaattaaacttaaatgaattaatcaaaacagtctaggacagtttaaatgcaattttaccggcattgcaaaacatcgaaagtctgctataaaatgcagaatacacaacatatacgaacttgtgttcacaaaaaattatttaacaacgcaaactcaatcgttgttccttctgccgggatctcaaaacagcaaaaaggatgacaactaatgtcaattgcctcatggcttcataagtttgggctcttctccaaatttgatatagctatgtacaacaatataacaggcttaacactttggaacagaactcggcgctccaatagttctgataaaacacccctcattttg

SEQ ID NO: 13274 - DNA, 521 bp, Glycine max
  Clone ID: jC-gmfl02220146b02d1
ggctggtctcaaatcataatcaaattgccataacaatgaaaacaaccaagttaaaaactgtaagtcaagactgtttcccagaccatatataacataattgataatccttatggacatcaaacagaaaatcccctgaaaacgaagtctcttgagtttcacacaaaggataccctataaaaacctatatatagtcctatactgcattagctacaagataaataaactccacatatgctttaagcaggttggttttcttgctgtggattccatcaccaacatcacgatcacaattcttgtagctgtatttacataaaaagggatatgaaggtgttcagaagactcctgccatggaaggcaggtcgtcgaagctccaaaggttcatagggtttccagcagcatcctgagatgcatcttcactgagcaaagacgccaatgcagcatcagcccaggcttcatcaagaaaagaaggggtctcaaagaacttcagctgggattcaatgtctgcaagctcctcaaaagag

SEQ ID NO: 13275 - DNA, 493 bp, Glycine max
  Clone ID: jC-gmfl02220146b04d1
attaaatactacggtacaggcttctgcggactggaaaaataacacactggtgcgtgcatcatttccatgatgattagtggtacactgctagaacgtacgtttatggcctcatgagcccttaagtgataagggctatgccttgtacaatcaaagcatcggctaaaacttggttagcagcttgtgaaggatggacactgtcccaaaacacatattgggttgcattagagcaagttcctagtgattttggattgcacaataaagatgttgtctccactatcccagtaccacagcaacctttccttgcctccgcaaaaccaaattttgaaggggactgaacaaggtcatagagaggtttgaaaatatcaaagactacaatcttaagaccaggaagttgcttttggagatttgctgccactgacttgatttcttgttaaatgcttgggtgtcattgatgatcctcgagacacaaccttttttatggaaactaaataaa

SEQ ID NO: 13276 - DNA, 540 bp, Glycine max
  Clone ID: jC-gmfl02220146b06a1
aaatggcacttcagaggttgagtgcataaatctcttggctgatgccaaaacaaagtatggtgtgaaatcttcaagtcgagaacaacagaatctaaaatgcaaaattgattcttgacatggaggccctgatattcccaatgatacaaaatccttgagcatgcccaagtgggatccaggaaaggaagaagaaactactgcttcattggcactcataattgatggaaccagtttggtttatattttatagaatgaattacagtcagagcttttcgaccttgcaacttcctgtagggttgtgctatgctgccgggttgcacccttgcagaaagcaggaatcggtgatctgataaaaagccgcacagatgatctgacattaactataggggatggggcaaatgatgtttcaatgatccacacggcagatgttggtgttggaatatgtgggcagggagggcgccaagcaccgatggcatcaaattttgctatgggacaattacagttcttggataaattacttctagttcatggacactggaatta

SEQ ID NO: 13277 - DNA, 337 bp, Glycine max
  Clone ID: jC-gmfl02220146b06d1
atgacatattattttttcttcaaaaaagggggaaaaaaagccccggatcataacaactcaatggagccaaagagcacccccttttgagcccccctcataaaaaacgggatccccaaggcccaggagtaatacatactgtccctagccccctgtatatgctataccccccaataacgggaggaacccggacactggtaaccccccccaacacgaggttttccaaaccggggggaaagttatatcccacatgggtccattaggcggggcccaccacccggcatggttaacccaccaaggccaaaaaaaagaacaccggaggcccaaaatctgggcaccc

SEQ ID NO: 13278 - DNA, 99 bp, Glycine max; identical to SEQ ID NO: 13265
  Clone ID: jC-gmfl02220146b07a1

SEQ ID NO: 13279 - DNA, 102 bp, Glycine max
  Clone ID: jC-gmfl02220146b07d1
aacataatattgatattcattacttataaaagtgaaataacagacacgtacgtacataattaagcagtagtggactaggtagtacgtactctagtctccctt

SEQ ID NO: 13280 - DNA, 581 bp, Glycine max
  unsure (1)..(581): unsure at all n locations
  Clone ID: jC-gmfl02220146b08a1
agaaaaagcaaggaagaataataagggagagagagtgagaggaagaagggaaaaccaaagacacttcctagttacttccctctgcagccataatagaataaccagcaccaccaaaggtgaatcatggttatttgcttgaagctcataataatgtggaatgtggcactgcttctggttttttctctaattggttctgctaaggcctcagtgtcctatgactcaaaggctatcaccattaatggccagagaaggatcctcatttctggatccattcattacccaaggagcacccctgagatgtggccagatcttattcaaaaggccaaggatggaggtttggatgtgattcagacttatgttttctggaatggacacgaaccttcacctggcaagtattattttgaggggaactatgatctggtgaagttcataaagctggtgcagcaagcaggcctttatgttcatctcaggattggcccttatgtctgtgctgagtnggaacttggtggtttccctgtttggctaaagtacattccaggaatcagtttcagaacagacaatgaaccatttaagcatcaaat

SEQ ID NO: 13281 - DNA, 525 bp, Glycine max
  Clone ID: jC-gmfl02220146b08d1
gactgaatctgatctttatcatcttgagaagtttcttacaggaagaaagaaactaaatcactatgaatgcagcttacaagggaaaactaatattgcaggaagcaagaggcttccacacctaagtctaaaacactagcacatggactcaattcagtatcgtctcatagtgcaccaagcaaatcatcacctttcacctctgtataacatgcagaacacaagtatatacacatatccacaatcatctcagcaatctttacaggctttcaaccatatggcgtgttgtgttttctgcaacttcaccttggtaaagccaaaataataatgctcgtgttgatcagattcagaagtgcagactttggttgacccaaaagaactgtattgaaatgaatagtggtgggaaaaatcaatctggagagtttaatctatttattttctgaggttaaaatgatcaggaacatatagctcccactgagagtttcttcaagacatttggacatggatctcctccaaaattttcaggtgaca

SEQ ID NO: 13282 - DNA, 452 bp, Glycine max
  Clone ID: jC-gmfl02220146b09a1
ggcgtgttgggtgagaaggaaagagatgagactaatctacgactaagagggaggacacacacacatcaaaagtgattgctcaccaaatgggaggggcccaaaacgacgcgcttacaatcagtctccatactctcaagaccgacatcagtggctctcaccctgatcaatattcactccaatccacgcggagactggatgaacctatgaatatgccatgcaaacgacacctgtaccgaactgcttttcccatgaatgaggagctcgacaggcaaaccctgttcagtgtgcaccggcctcctggaccaattgcttcttgaatgctggactgggagactgatgcaggaagtgctgaccactttggtcatgaggatggactaaccgacccccgtgagtctgagactttccgggcattagacacgcatcatgggatggaacatcagcttgctctatat

SEQ ID NO: 13283 - DNA, 444 bp, Glycine max
  Clone ID: jC-gmfl02220146b09d1
ataccgtataattcataattcatatgtggctagtttttttggtttcaccaaaagccttttacaaaattttaacaggggagggcaagtggctactcgccacaatgataaggcaaatgtaacatataacccccaaaccagtaatatatgatatgtgaaaaacaggtaaccgatcctaataaatgcttttaattgaagtttgcatccaatgtagatatgaagaggtatatcgagacctcttttgcaccatccaaaaaattgtggcataaacagcagaagaattccttgtaatgggggtgatcattttacagtcaagatcttgatgatagatgcactgcccacacgatgcagtgccaccactgaatccccgttgtggcagagacccttggccttggcatgttgcatggcgaattctattgcttcctcagatgtttcagcatgagaagc

SEQ ID NO: 13284 - DNA, 540 bp, Glycine max
  unsure (1)..(540): unsure at all n locations
  Clone ID: jC-gmfl02220146b10a1
tgcaaagtgtgagagaaagacaatgccgaagtctcaatttcgaaccccatttctggtttctcttccccttttgttattcatcttcaacctcaccccttcgcacgcactctatggagcatcctcacccgtgcttcaactcactccctctaacttcaagtccaaggttctgaattcaaatggagttgttcttgttgaattctttgctccatggtgtggacactgtcaggctctgactcctatatgggagaaggcagctactgtgttgaagggtgttgttactgtggcagcaattgatgctgatgctcatccgtctttggctcaggaatatggaattagaggatttccaactataaaagtgtttgcacctggaaagccacctgttgattaccaaggagcaagagatgtcaaaccaattgctgaatttgcacttcaacaggtaaaggctcttttgaggatcggttaagtggaaaagcaacaggaggatctagtgacaagacagaaaccagttcttcagtagaatngaactctcggcaacttgat

SEQ ID NO: 13285 - DNA, 506 bp, Glycine max
  Clone ID: jC-gmfl02220146b10d1
agctgaaagctcattgatagggaaaagaaaataccaaaacatgctaacattttccggagatatatcagtacgtacccactgaatgacatatatcaaaatcctcagagaagatcactcatcactagactggttttttaacttggaacatggaaaaacagaatagtgatcacaataatcatgagaaacaagttgcctgtaacgtaaaaatcggtggttgaaactttaatttggtataaattccttataaattgatcatagctcatccttgcttgaagcatcttcccccattagttcttcaagagaaaattcatcctcctcaattatttctccatcttttccatcccatggttctgtctttacaatggttggagtgccttgcaggggcaaattccctttgcctgcacgtccagcttctttcacaaattctataatctggtcaagttcaaaagcactcttgagaggagcataaacagctttcttaggttaagggccactaagctggataa

SEQ ID NO: 13286 - DNA, 587 bp, Glycine max
  unsure (1)..(587): unsure at all n locations
  Clone ID: jC-gmfl02220146b11a1
ctgaaatcggtggagaacgcgcacgatgattcggtgtgggcggtcacctgggtacccgcaaccgccaaccgaccaccgctcctcctaaccggttccctcgacgagaccgtcaggctctggcgctccgacgacctcgttttggaccgcaccaacaccggccactgcctcggcgtcgcctccgtcgccgcccaccccctcggctctgtcgccgcctcctcctccctcgacagcttcgtccgcgtcttcgatgtcgattccaacgccaccatcgccaccctcgaggctcctccctctgaagtttggcaaatgcgcttcgatcccaagggtgccattctagcagttgctggcggaggtagtgcatctgtcaagctttgggacacttcctcatgggaacttgttgccactctgtcaattcctcgtccagaaggacagaagcccacagacaaaagtggcagcaagaaatttgtgctatcagttgcatggagtcctgatgggaaacgactngcttgtggttcaatggatggcaccatttcagttnttgatgtgccccgcgccanatttctgcatcaccttgaaggtcacttcat

SEQ ID NO: 13287 - DNA, 342 bp, Glycine max
  Clone ID: jC-gmfl02220146b11d1
ggaaaccaaaaagaaaacaacattccccaaagcggccaaaaccccgccccaatatgtaaaacaggaataactgacccgggataagctccgggcatctgaacccccggcaaggcgaccccccctcaaaataccccctccgggggggccaaatgggaccccccaaacccggcgcgaacaaaggcacaatggctgcacaaaagccccaaggttaaaaacccctagcctaacaaaactatgccttgaacccggatcaaggggtgccccaatcgggcgcaaggccacacaacactcccaaatggcaagacccgacaagggcccaaataaagatttccccccgacata

SEQ ID NO: 13288 - DNA, 609 bp, Glycine max
  unsure (1)..(609): unsure at all n locations
  Clone ID: jC-gmfl02220146b12a1
gtttgacttattatatttggaaaattatatcaaacccgaaaccgattcggttttccgctggacagacaaagatcgctctcatctctgttcaaatttcaatttcaaacttagtattactccaaatttcaatctctccccattttcacttctaattttcaattcccacttatttcggaatcacgctcactcactctagactagtattaccccaaatttcaattcccactcatccacctagggttttctttcccacttcgaagctatgctcaatttcaattcttctctcgctccgcgtttcggcgaacgaatgacgccgttctggtgagctttggattcgtttcctttcgttccccaacgcggattcgttgctctcgtttctcacgcgattgttggaggagtcgtatcgtgttgcgtttgttgaccgaggaggttcaattagggtttctcgattcggttttgtgatggggatttaggttttgcgaacgttggtgttgttgtttttgtggagtgggaattcgtgaagctaaagggatgttttactcacagnttattttggccaagaaaggccactngcgactatatggatagctgcgcatttggagaggaagc

SEQ ID NO: 13289 - DNA, 574 bp, Glycine max
  Clone ID: jC-gmfl02220146c01d1
actcgaaattttaaaaacaatgctagcagttggagcgaagatcagggaagaagtcttcatagacatggtagtgaggagagaattaaattacaccgtacatattataacataagttaaaaaagccaattagatcagtgatggctgctttaataaattcgcaatgataaataaaagcactgaattacaagtccttaatggcaaagagaaaatatataactaacactggctcgtgctttccatataaaactgcacactcttcacatcttagttttctcagatcctaactttactttctctttatataaacactgaacaggaaaggaaaccacatcgctttgatgcacagagaaaggtagccttgaaaacctaatccccgaaacagcgagaaggaaattttacctatattaaacagctatgttagagggatgagaattagctcttccacatagtcttggttgcaactaggattttctccctgccatgtgattcaggttctctattatatatggtgggctttcaccttactgtacgcacaacccgagcttctttctcaattacttcaggggaatccctc

SEQ ID NO: 13290 - DNA, 508 bp, Glycine max
  unsure (1)..(508): unsure at all n locations
  Clone ID: jC-gmfl02220146c02d1
agactccgctttatcattgcaacnccnnnnantncgggacatacatcgaattcgctcgagcttcatcatcataagtaagactttttattttaacggggcacgagctacaagatgaggtctttttcgcaaagcatccccatcatccgttggaactccgtctcgtgcaaggctcaactctttacacttatatcttatactcaaaaggatctaatgatccacactaactgaccctgaccctccgccggcttttccctccaggccatggactccaaccacaggccatcgctgacctttactcctccgacccgagggcttagacctcataccaatacacccgcatgataatgcatggggcatgaacgctcaacaacataggccaagatgcttatagtgagctggcaatgacctacatgatcaccatcaaggtcctcgaccgcagcgacactgtcactttcatgacctaaagccatacacaagacaaggattttgattctgaaatgaagccgat

SEQ ID NO: 13291 - DNA, 590 bp, Glycine max
  Clone ID: jC-gmfl02220146c05d1
tttttttttttttttttttttttcacgagaaagtagagtttttgtgaagattaatcaaccaaataatgtgcaaatgtcatagtgagaagcatataactaaagaaattgataaaatccttcaccaattgggattctactagaccaaggcgtaaaagatgttgcagaacaaatcacttgagcagcatgagcagatgagttggctggctttctgccaattatttcttaaactgccaaagttgtatcctctctcactcattgctcagatatactaatttttagcatttctgcacagaagaaccaaattctccaaattaagaaacgaagatccatttgggccagaagcagcactttttgccaattccttccattgcaaacctttcttcttcatctgcttacccttttcaccatccatcaactccctcacaaggctctctattttatccctcttaacatcttcaatctccaatccaatcccccattccttacaacagaatcgacaattggtttgttgctccgcaaagaaaggccaacatatcattggaacacctccacacacactttccaacgttgaattccaaccactgtgcgtc

SEQ ID NO: 13292 - DNA, 566 bp, Glycine max
  Clone ID: jC-gmfl02220146c06a1
gcgaagatctgaagtcaaggtccttctaagaatgcttccagactatcatcatcatgtgaagtcatatgaaaatacacttatcacaaaattttttggtctgcacaggattaaaccttcaagtggtcaaaagtttcgctttgttgtaatgggaaatatgttctgcacagacttaaggatccatcggaggtttgatttaaaaggttcttcccttggaagatcatcagacaagatagaaattgatgagagtactacgctcaaagatttggatctgaactacagcttctacctggaaccatcttggcgagagtctttactaaagcagattgaaatagacagcaaatttttggaagcacagcacattatggattacagccttcttctaggtgttcactatagagctccccagcatctacgttctcacgtttcatacaaccaaagtagaagtgtggatggattagcaatgcttgcagaggaagatcctctagaggatgaagtattctatccgcaggccttgttctagttcctcgagaggagatgatgacagtgttgttgttggctcacacatg

SEQ ID NO: 13293 - DNA, 582 bp, Glycine max
  Clone ID: jC-gmfl02220146c06d1
aaatataacactttttttttattatatatttactcactttacatgagataaatctatttacctcattattcacttgattcctattaccaccatcaacaaggtgcccacgtggccacctactataaaaattctggagcaagcatgaaaagtgcaatattcacactttctaaataaacttactggttaaatataaccccaaaattatcttgattaacctgtcgtcgcatttggtggaaacaccttctgaataaattccaggaagcgatgcgaatagaacgtagggtccacagctgagatagacaatgaatcaaactgaagagatttataagcatgttcaatcctcttagccatgttgaagtcctgcaatatgtcaatgataccaaggtacagcaccacatcgtacacttcatgaaacatttgcttttcttgtatctgttttcctgaaatctgatctgcccttgatggcatgttcacaccaagctgtatttggagtcttgctgtaccaggtagaagtagatccaccttctcatacccgcagatgaagcttgaacccgctacccttatggtgagccaacaacacac

SEQ ID NO: 13294 - DNA, 608 bp, Glycine max
  Clone ID: jC-gmfl02220146c07a1
gtgcaaaactgggatgatatgtgtcatgtttgggatcacgcgtttttcaatgaattgaaggttaatccaccagactgtaagattttactcactgatccgcctcttaatccttccaagaatcgcgaaaaaatggttgagacaatgtttgagaagtacaattttgctggagtgtttatccaaattcaagctgttctaacattatatgctcaaggtttgctgactggattagttattgactcaggcgatggtgtcactcatgtggttccagttgttgatggctattctttccctcatctaactaaacgaatgaatgttgctggtcgacatataacctcctatcttgttgatttgctttcaaggagggggtatgcattaaataggactgctgattttgagactgtcagggaaatcaaagagaagctatgctatattagttatgactacaagagggaatatcagttggggcttgagaccactatccttgttaagaattatactcttccagatggaagggtcattaaagtatgcactgaaaggttccaggctcccgaggctcttttcactccggaacttatagatgtagaaggtgatggaatggctgacatggt

SEQ ID NO: 13295 - DNA, 528 bp, Glycine max
  Clone ID: jC-gmfl02220146c07d1
atataatccactagttggctattgccgacttatatgtgtaaagtattccttactacaagctctctcgacagagtaaaacgaacatggaacagttagaaaaatttacaatttactctttattcaacattatgccacatagttgccacaattcttgttacaaaaacaagatacaagaattctcttggcgtacctatcacaaaaacataagtgtgtatacaatcacaactagcctctagtagccatagggacagctatacaaggccagcagcaattaatgcaagctattttaggaggaggcagttttaacagctttgaatattcatcactcagcctctggtgcgcttttgcttcccaaaattgatatcccattttcagagcgatcatggacctcaaagtcatgcctggccacacctgcttagacaagcaattcctttttctagataatcttccctgttaatccaaaactctggtgcatccttcattattcctgcaagcacaggaccttccaggtataccatgtgctttcta

SEQ ID NO: 13296 - DNA, 612 bp, Glycine max
  unsure (1)..(612): unsure at all n locations
  Clone ID: jC-gmfl02220146c08a1
cccttctccgatttaagctctttccggtcccaattttgcagattcgaccgatctcgcaacaggtttttctgtattcccttacttgatctcgcaatttgcttttcattttcatttgccggattgattcctcaattgcgcgctcatttgttagttctttttttttttcctctcaattttctggaatattgtgatgatttatgaatctgcctttaaaattatgacgcagcgtaatgggcccttcttgattggtttcttttttctgccatttcggcagtgtttaaggttctagaaaaggtttcggaccaaagcatagaggttttaggtttttatagtgccagttcttttcacttgtggcattagggtttttgtgacgtttggttgaagactttctgtctccatggatctttcagaccttaattccgctgaaatgcagaagttctactcttaggtaagcaagttcacactccaaattccatttcgaaacttcaccagcttcaacgctcgacactntntttctctctctctctctctctctctctctcaaacattcgctggtatgtgagattgaaaaaaagacagtgagttttgagcgcaatgcaactcttaatgaca

SEQ ID NO: 13297 - DNA, 427 bp, Glycine max
  Clone ID: jC-gmfl02220146c08d1
ccgttggggttgtttgtttttttgttttttttttcttgcttttttttttttgtttaaaaattggggccccaaaattgttcctagggcgctcgcaccccggggggcccccaaaaaaagccctttataaattctgcattaccgcccccataaaagaaactgggggtaaaaggaagactcaccgggatggggaaaattagacaggaaaaaaaaaaaagacagggaaaaaaagtttaaagttttagggtccgctataggaccggtagcccctaggatgggaaattcgggggtcccagggctccccaaaaaagcggggcccaaaaagggggggggggcccaaaaaaaaagggcccccctggggggcacaaaccaatttcccccaaaaaagccggggccccctttaaggggccccgggggacacttaggcccc

SEQ ID NO: 13298 - DNA, 615 bp, Glycine max
  Clone ID: jC-gmfl02220146c09a1
attttctctccctcaaaaaacccttcactcctttccctctcttttctaattttttttttagattcacccaaaacccgacaacccacacatggggaagtacatgaagaagtccaaaatcgccggggacgtcgcccccgtgatcatggaggctccgccgccgcactcccacctcggcgtccgcacccgcgccaagactctcgccctccagaatacctccccggactcctccgcctacctccagctccgcagccgccgcctcctcaagctcccccctaccccgccggaaaatccccgccgctccgccgccgaaaccgccgccaattcccgcctcgccaaaacgacgtcgtcccgtaacgccgaaaagttcgcatctttcgatgacgacaacaataccgaatgctctttcggcgaaaatttcttagacgccgaacccagggaggaaaggagcaccagggaaagcaccccttgtagttttataagggactcaaatgccattcatacccctggttcaaccacaaggccaaggactcgccaaataatccatgagcacatccaaagaaacattccaacggcttatgagatggaagagttctttgcttatgccgagaagcagca

SEQ ID NO: 13299 - DNA, 465 bp, Glycine max
  Clone ID: jC-gmfl02220146c09d1
gtctaatccccgctgaattatataaacagaaggtaatgaaattacattaaagatgacttacaaactagatataccatatacacccccctacaccctacagatcagaaagacactactaaactactaatcggatattggaaatttctaaacagatcctttcccttgtagcttgccaaacaagagcctcaagcaatctaaatggttagccaaagcttcttctagttgttaaaattaaaatacaagtctaatggctcttgaaatcccatattatcaccatatgacactcctagtggagtactgggacccactcgtaccgttcaggcagaggtacttcattgacaatgtcgaaattgtacttgtccatcaatattgttagttgctgcttctcggcataagcaaagaactcctccatctcataagccgatggaatgcccctttggatgtgctcatggattatttggcgag

SEQ ID NO: 13300 - DNA, 495 bp, Glycine max
  Clone ID: jC-gmfl02220146c10a1
ctcgatcccattttaacacatacacttctctttatctgtgtcggatcgcatgaacagcacttggaggaggaagaagatcaccaccgtgcgggtgctagtcgtggaccaaatctgaagagacggggcggggggggtggactgtttctctgtgaccctacatgaacaagagtccatggaccgtgaccattcacctgtgactagacaattttttccggcggaagatgctgacgcggcgggtgccaccttcggtggtggacccggtctcacctccacgatcccttgtgctcactggctacgtgtgaaattttgccactcatattcactttgcaccggaaaatcatgaggggaagtttttctccctatgaagaagagtcgtcgaggaccatagtcaatgagctctcagtttagaggagtcaccctctaccatataacgggccgctgggagtctcatatatggcattggggaaaacaagtgtatctatgtggatcttacac

SEQ ID NO: 13301 - DNA, 609 bp, Glycine max
  unsure (1)..(609): unsure at all n locations
  Clone ID: jC-gmfl02220146c11a1
gctaacaagagattcaagaccggcatggctaatgaagaggaacagaaaaaccacctcttcggcatcaaagatctcggtcacaagactctccttcagagtgatgcactctatcagtatatacttgaaaccagtgtctatccaagagagcacgagtgcttgaaagagatacgcaagatgactgcaaaacacccactgaacatcatggcaacaccagcagacgaaggacaacttctgagcatgcttgttaagctcacgaattcaaagaacgccttggaaattggtgtattcactggttactctctgctctccactgccctggctcttccccctgatggaaagatcttggctttggatgtgaatcgcgaatactatgagttaggattgccaataattcaaaaagctggagtggctcacaagattgatttcagagaaggacctgctcttccgtttcttgacgagatgcttaaagatgaaaataacaaggggtcgttggatttcgttttcgtggatgctgataaggacaattacttgaactanccacagagggtactagagcttgtgaagattggaggactgatcggatacgataacaccctatgggctggatct

SEQ ID NO: 13302 - DNA, 330 bp, Glycine max
  Clone ID: jC-gmfl02220146c11d1
gatgttgatttgtatcctttcagctaaatttctaacgggacaagaaacacacaaagatctagaaaagacagttgaacatttgagaactccaccattcacgcaacctgttttaatgaaaggaatttctgtcatgaaaaatctagatgaagagaaaatgaccagatgatgcgggggcacagggtaatcccattacccacggggagctggcaaatctcgatcctggaatcttgagccagatactggttgagctccatcacatggccgctaagaggcttaatggaatccatcaatggggcatcgggtggggcagccacagatccagcccatagg

SEQ ID NO: 13303 - DNA, 550 bp, Glycine max
  Clone ID: jC-gmfl02220146c12a1
agttcctccaaacaccaccatccatcagaaacttcaagtccacgtcagcaaaccaaagccaagtgcgagagtattggagagtgttataataaagggcaccaaaactgcacagactggtttggaggtgaagaaggattatagaaggtctaaatcggatattgttgtgaagcgcgtggagagtgagaaggtgcctccacgcgtgttgcagaggtgtgagactgagaaagttcttgttaataataactcgtaccctgaagatggcatgagcaacgacgactttcgtcgcaaggttgaggctttcattgctcgcctacagaggctacgaactacagaactctgtaattaattaataggagtataggactatgagtattggaaaaaaaaatataaaaaaactcaaatgtctagatattattgcttatactattggggtcaaaagtgaaaaaactatacacatgcagtgctattgcttcggtttaatcaataaacaaacaaaatatgtgatgtatgtactgtatagattaaatgaaagtgagtaaaataatgcttt

SEQ ID NO: 13304 - DNA, 452 bp, Glycine max
  Clone ID: jC-gmfl02220146d01d1
aaaaagaacaggacggactaatttaactaaacatttgggggggcttaatagccaaaaaaacacccttttttcataacagatggtccaaaaataaaatcttttttccacttcgcccaattcaatcaacagatggaaaataaacatgagccttctttaaaacgaaaaactcaaacttaaaacccaactttttttttgagtttttcccaccttgcttttacccctgttaaaagtaacaaaataaagctgctctgcaacaaatggaatttaaatttccaagacagggaacgtcccgcgctgtatttttaaggaaagaaatgagaaaaacggcccagggaaggattaacccgaccaaaaaccaaaagatataagcttcttaggcagaaaccctaaaacccaaaaaacccttggagtaaagcctgttaggagctaaccactgtaaacaaaacccaatg

SEQ ID NO: 13305 - DNA, 510 bp, Glycine max
  Clone ID: jC-gmfl02220146d02d1
ctcaaactctattttatagaaggcgtccaaattgtacgcatatgcgtatattccctctcatgcatgtctcccacaattaattccaccttgaaccagctatgcacagaagacaaacgcacatgagacgagaatcacagcgcaggaatatctaattttacaaagcaatgcttcttcttctatacacaaataataactctcgtgcacaaatatatataacatcaaatcaaaagaaatcattcaaatccatctacataactggctacatccaataccatatacatcatatatataccccctccccaacttttatgaaccctataagtaaggaagctaactgaaatctctgcaggtataaccctatactactatccaatctttacagggagctagcaacccctcccattccaggaattgcagtgtaccaaaatcacggtacatttcataattagtgactgcatatgcatgtgcatgttatatatgtgaaaacaacaagaccctctccttttcttt

SEQ ID NO: 13306 - DNA, 554 bp, Glycine max
  Clone ID: jC-gmfl02220146d03d1
actataagaaaaaagattatatatactatattttacaataaatttattaatttttacaataattacataaaaaaatcataccaataattatttgtaacaacccaacttcattacaagtttattatactaatacaaccccgatactttaaagtcctatgaaaatacgtaagatatgcaagcattcgatcgcataatatccattaccataacataaaagagttaagccttgtgtctttacaaaactaaaaagagccataagatgaaaaacaatgtcttaacgtttgttgacatggctttgcctttttatgggcacaacttttcaaattaaacttcagtggatggcaagggaaccaacctacgatattcagctagagcccacattggataaatattcctgtacattgggtaatgcagcatgcacgtactattgaatactccagcgagttcctgttgaggccaatcaccctctttcaactgataaatgatgagcaattttgcagcacggtgaagagaagtagtatctctctctgcctgtccagcaagaatttgaccca

SEQ ID NO: 13307 - DNA, 450 bp, Glycine max
  Clone ID: jC-gmfl02220146d04d1
gatatgattcaagaaacaacttttaaacttaaattggtgatcacaatcattccacatacaacaaaagattacaaaggttcaacccattataataaccatccataattgaaattctaagggccctaacaaagataagcttgttctacaaatggagaccaatatgatctaaaagagtagtttaatggccgcaattgacataaactacattctattgggaagaaacttgctgggaaaaatattgaagatcttcaaaaggtttatcaaaatcatcaaaccttttgccagccctttgaaaccccttacgtacaatatttgttacccggctgaatccatcttgtaaaccttgcgtgctagagaaaattcaaattaacctatcactatcaggagttacttgaggtgcccaaggttgactaccttgaggcttttcagcactttctgagtcaccaccct

SEQ ID NO: 13308 - DNA, 272 bp, Glycine max
  Clone ID: jC-gmfl02220146d05d1
cttgatatattttttttttctttattattcattttgcaaaaaaaaacaccccagaacccggtgatcacgtggacgccttctaaaaaaaatctggtgcaagcaggggaagccccaagggggggctttcccttttaacccacaagacaaaaaaggggcctaaacccaccctgttccacacgggggtgggataaggcggacccaccttccgaaaaaaagccctgaaactacgccaattgaacctagggggggcaaatgggagcccccctgaacgg

SEQ ID NO: 13309 - DNA, 621 bp, Glycine max
  unsure (1)..(621): unsure at all n locations
  Clone ID: jC-gmfl02220146d06a1
cgttccgtttcacctttcctcttcccgccggagccgccgtcacccgccgccggcaatcgtatcagaccctcccaatacaccgtctccgacttccacgcagaattgcacgattcattgatttcaattttcaagtcttgaggatttcgtttcaacagcgcttcaatttgacgcagaaaaactgagtcaaaccaattctcccagagttcgtgacttggattctcaatttatcgttcattccgaatagaatttgaaactccgaagaaaactgcaccgaacactgaatctcagttaccgaggagcttcttctacgaaccgtgcttaattccacacagaaacaccgagtcaaactggttcgtgctgtgttcgtggttcagattctcaatcgaaatttgaaattcagaagaaaaccgcaccgaacacagaatttcagaatctgaacaagtttctttcgttaacagcacttcaacttcacgtggaacaagaatcaaaccgtttcgtggttcggattctcaattcctcgtncattcgcaatcgattntcaaattcccgagaanaaccgctcgaacactgaatttcagactcttgacagcgaacagtacttcaagtcacgttggacgagtc

SEQ ID NO: 13310 - DNA, 415 bp, Glycine max
  Clone ID: jC-gmfl02220146d06d1
aaaagacctattattatttatttatatttttaaacaaccggatcggacttttttggtaccaaatcacttaattaccaatttggaacttacatttcttttaacctaccaattagaattattattattattattaccttaggccattttcctggggcttccgggattggaacccagcccgggattaaccgggccaacctttattggaccaaccggcacttgatggaaaccgggaaaacccggcccctggtcctggtgccttaagaattcacccggaaccaccagcttacctggacctttggaaggcccggtgggagccttggtaggaagaaggcccttcctggcacgcgccggcaatggcttcttttccttcaattcttggaagcccctgaaggaacccttggaaaggttgacctaa

SEQ ID NO: 13311 - DNA, 567 bp, Glycine max
  Clone ID: jC-gmfl02220146d07a1
cccttctccgacttatgctatttccagtcccaattttgcagattcgaccgatctcgcatcaggttttcctgcattcccttacttgatctctcaataagcttttcattttcatttgccggattgattcctcaattgcgcgctcatttgctagtccttttttctattcctatcaatttcctggacaatcgcgatgactcatgaatcggccttccaaattatgacacaccgtattgggcccttcttgattggtttcttctttctgccatttcggcagtgtttaaggttcttgaaaaggctttgcaccaaaccatagaggctgtaggggtttatagtgccagctctttcctcttgtggcatatggggttttgtgacgctcggttgaaaaccttctgtctccatagatctttcagaccttaattccgctgcaatgaagaaaatctactcttacgtaaacaagttcacactccaaattacatttgtaaactccaccatcttcaacgctcgacactttgtttgtctctctctctctgtctatatctatgaatcattcgctggtctgtgagattg

SEQ ID NO: 13312 - DNA, 143 bp, Glycine max
  Clone ID: jC-gmfl02220146d07d1
tgcaacagaacactactcgcactccatccgtattatatcctcgaacgaccagctcactatgactactcgccggccgccctttttttttttttttatcttttattttttttcatttcttctttttttccctggggttttttttt

SEQ ID NO: 13313 - DNA, 567 bp, Glycine max
  Clone ID: jC-gmfl02220146d08a1
gacggttgattttcggaaaggggcatgcggcgctggactaccattcagacgagagaagaaaaaagattaggaaatttaaggaatcagcttggaaatgtgtttattatctttcagctgagattcttgctttgtctgtaacatacgatgaaccatggtttacaaatactagaaacttttgggtgggcccagggacccaggtctggccagatcaaaagatcaagttgaaattgaaggcagtctatatgtacgctgctggattttactcatactccatttttgctttgatattttgggaaacgaggcgctccgactttggagtgtccatgagtcatcatgttgctactgtaattctcattgttctgtcttacattttcaggtttgcacgtgttggatcagtggttttagcacttcatgatgctagcgatgtgtttctggagatagggaaaatgtccaaatacagtggtgctgaaactatggctagctttgcttttattctatttggtttatcttggatcatattgcgtctcatttactacccattctggattctttggagtacaagctatg

SEQ ID NO: 13314 - DNA, 479 bp, Glycine max
  Clone ID: jC-gmfl02220146d08d1
aaaaaagagttcactacatgcattaaaagaggcaaagactttaaacattttttgggggcagtttcctccaaacctttagctgatacaatgaactagcataaagaagaaaaacttataagtttctagtttacaatataattatggacaaactgactcttttttatagaaaaaaataaaataaaatatggacaaactgactcttttttatataaaaaataaaataaaatatggacaatttaacataaaataaatccacataacatacgacaatattcatcatgtttgagtgtaaaaccatttgccatcattttaaattcacctttgcctaaagaatacattgcgcttttgcttccctactcaatcttcatgttcatattcatcttctgaatcagatcgaacatgttcactaacttatcctcttgcttggatttgtttaacaagcattcgaaatatagcacccaccaataaatatgcataac

SEQ ID NO: 13315 - DNA, 560 bp, Glycine max
  Clone ID: jC-gmfl02220146d09a1
atcaaatctcccattattcttcaatttctctccaacgttataaaccaccttcaatcggcgttatatatatatcggttattattaattccattttcacgtaatgggcaactacgtttcatgcactttggcgcctcctttcatgaagaactccaaggccacgagggtcatcattcccaccggtgaagtgaatcaattcatagagatcgtgaaggctgcggagctcatgctcgaacaccccagctatttcctcggtaattctcgttctttgcatataggaagaagattctctgctctcggtgctgatgaagagttggagtctggcaacgtgtatattttcttcccaatgaggagagtgaactccgttgtcacccccaccgacatggcggtactctttttggccgccaactccgccgccaagagattgtctggtggaaaggcacgtgttctcccggacaactgcgacggcggagcatggcaacataaagaagagagttcaaaagatggaagtttaagtgagattccaaggttgagtttggaaggagtcgagtcagggtttcagt

SEQ ID NO: 13316 - DNA, 591 bp, Glycine max
  Clone ID: jC-gmfl02220146d10a1
tcgagacaacgccaacgattaaagacacatagttttgtctatagtacggtgacaggggactcattcacaaggacggagggagaccgattaatgatgagaaagccgacctgaaggatggatggagcacaataggtgtatctgcacccatggcgggagagattcaaagggggacgcatcatcggtgaacacagtacctgattcctaagggagagcatattcgtcctggagctcaaccctggatctccatggaagaaaacagacctctaaggggttcctagacgagatcaaagacaggatccactgccaggaggttggccccaccgccgagggctgaaattttaacaataagaagcacttgatcacgcatgatcatgggcaggacatgctgtagcctcttgaaacagagatttcaatatctcccagctgatgagctcttatatttcatgtgaggcgtattgcaccatagcggtgaggggtgagacttagatattgtttcctacttgacatttatatttatgagccagagaaatagtgcgtgtatctggttgctaatacgagtgctattactctgagttttcgtggtttgaaccc

SEQ ID NO: 13317 - DNA, 535 bp, Glycine max
  unsure (1)..(535): unsure at all n locations
  Clone ID: jC-gmfl02220146d11a1
attaagctgggcagcatcttcctggaaatgggacctcccaaggaaatggctctgccactgttgctgacattttcatctcccagaatgtggtcagcttgagcaggtccgggattgagaatttggcgaaattagagaaccgaaaagaacactggcttgttgtgctctatgcaccatggtgccgcttctgtcaggctatggaggagtcgtatgttgatctggcagagaagttagcaaggtcaggagtgaaggttgcaaaattcagagccgatggacagcagaaggaatatgcatagagtgaactgcagttgggaagcttccccacaatacttctctttcccaagcactcttctcaaccaattaagtacccttcagaaaagagagatgttgattcattgacggcattcgtgaatgccttacggtgatggtcaattgagtatcttgctcaatgttccgtcgtaccataccggcgataaatttcttcacagattcgggcaattcactgaaaatgggaatggcagtntttgatagcaaaacg

SEQ ID NO: 13318 - DNA, 577 bp, Glycine max
  Clone ID: jC-gmfl02220146d11d1
ggcaaaatctaaaaaagtagattatgatagtgaagaaacaacataatacaaccataactctactcatctaacaaaacaggaaatcacatcctcctcatagaatgactactacaattatatttgtgaggaaggttatctaaatctatacagggatactgctagctgagaatcttcgttctgctatcaaaaactgccattcccattttcagtgaattgcccaaatctgtgaagaaatttattgccggcatggtacgacggaacattgagcaagatactcaattgaccatcaccgtaaggcattcacgaatgccgtcaatgaatcaacatctctcttttctgaagggtacttaattggttgagaagagtgcttggggaagagaagtattgtggggaagccttccaactgcagcacactctttgcatattccttctgctctccatcggctctgaattttgcaaccttcactcctgaccttgctaacttgtctgccagatcaacatacgactgcatcatagcctgacagaagcggcaccatggtgcatagagcacaacaggccagtgtccttttcggtctct

SEQ ID NO: 13319 - DNA, 396 bp, Glycine max
  Clone ID: jC-gmfl02220146d12a1
agcacactcaaaccctatcagcggaacaaacccgcaacaacccaaccgaccataaaacagctgttccgatgtgatcactgggagtaaaaattataaatgacccgcccacaagatgcaatccgagcattctttcgttctggaaacgcttctaggatgatttcgcccaaaggcccaagaacgtcttcacagctggcgacaatagtacatgcttttgaagccaccgtggatgaaaggctgaaaaaacttattcccccaagcttggatgacatcctacacctgacttggatggctttgtgctagcaggcactgtgtaagagtcataatgactttctaacccccgagccacagactgagcttactggacctgagtgtgatgagaaacggatagatgagtac

SEQ ID NO: 13320 - DNA, 374 bp, Glycine max
  Clone ID: jC-gmfl02220146e01d1
gggcccttttttttgtattcaccagtctctgcttcgggctcgggatctgtgcgcatccatatcaggcgccacacatgttctcgccatgccgatctactttgaggcacgatgagcttgaggatatgctggcttggctctagagccatactcactgtgcatggcatcccatttgaccggcatgacgccaagattgctttgtttcgtacatctatacgccgcttgaacgggaggctgcctagactttctctctcggccatgtggaccactgcacattgtctggcgcctgcaaaggatgtgtgacaggactcagctctcgagctcgagcgatagagacgcacgcctgtacgatatgacaggaaccttgcggagaacgt

SEQ ID NO: 13321 - DNA, 347 bp, Glycine max
  Clone ID: jC-gmfl02220146e02d1
gcacaaaactggtaaaattccagatcaataaggattgcggcgaagccgaaaagatacaccattcattagggaaaacaggaggggggaaaaataaggggggagggcttgaggaacatataatcgctcaccgatgatgctagaacacctaatgatcccacacacgcatattgtaaccacccatgataaacaaaatgcctcatgggcgttttatagtataaagcccctccgaatgactagggggactccactttcttataccatccactggaggagatcacagaggacgaatcttgctggtgcgaccaagtgagagacgggtgtgttcaacttaacgtgcttactgcggt

SEQ ID NO: 13322 - DNA, 500 bp, Glycine max
  Clone ID: jC-gmfl02220146e03d1
gaattcaacatcattctgtgattcaataaaattagtttacgaacccttgtaaacaaagtactcatcttagtatgcaacaattttgatctctaaggaacttattttgttttgtaaattattcttcctagaatcctatatataattttacaattgagtttcacccctctgtagtatctatatatcccccaaataataaagaaattctaaaaacactagctgaatatataaccaagggatgaagaaaaggatcaatttgtatggggccttcaccttcatttggtgagagctgcatataggagctggttccaagtgtccggtaatcctggtaggcaccagtggctgcagtcattgcctgcatggtccccactataagcagaagggtgagcatcctttcttaattgtgagaggagtgttatattaagtagataaactggagtaatcattttccttacacattgttcaattggtagttgctggaggtagacctgctgatatgttga

SEQ ID NO: 13323 - DNA, 502 bp, Glycine max
  Clone ID: jC-gmfl02220146e04d1
atcttcaagttttgaaataatgaattattgtgggtcattccttatacattccatacagatgaaaataatttcttaggagttggataccattctatgaaactaatgaaatttgcagatagctatggaagaatggatctattctattaaggtaactttcaactgaattatgaaataacaatcctgatgaataataaaaaaagactatctaaaatatagggcaatgatatcaccaaataaccactcaacatgtctaagcagaacggatatgatatatgaaactgctaaatcctgcaggatctggcagaaaggctggctcctgaatggaggccagagcaaatgattatgattaaagttgataacctaacaacctaatcccactgaatctctgtgtaaaaaggccactcagaaggattcagcgtagttttcccatcagcagctacaagatcatatggtgagtcttctgcaaattcagtaggcatggatttccagtggaggcatggct

SEQ ID NO: 13324 - DNA, 560 bp, Glycine max
  unsure (1)..(560): unsure at all n locations
  Clone ID: jC-gmfl02220146e05a1
gtcgccgtctccgtcggcgccaacatctccggcggccacgtcaaccccgccgtcaccttcggcgccttcgtcggcggcaacatcaccttcctccgcgcatcgtctacgtcatcgcccgctcctgggtcatcgcgcctccctctcctggccttcgtcaccgcctccactgttccagcattcggactctccgctggagttggagttggcaacgccttggtgttggagatcgtgatgaccttcggtctggtgtacacggtctacgcaactgccattgaccccaagaagggtaatttgggaattattgctcccatcgccattggtttcattgtcggcgctaacattttgttgggtggggccttctctggagcggccatgaaccccgctgtgacatttgggcctgctgtcgtgagctggacctggaccaaccactggatctactgggccgggcctctcatcggtggtggaatcgctggccttgtttacgaggttgtctttatcagccacacccacgagcagcttccaccactgactactagagggggggaaatganaaataaaaa

SEQ ID NO: 13325 - DNA, 498 bp, Glycine max
  Clone ID: jC-gmfl02220146e05d1
gacccgaataatgatactacattcaattcaattgttgtggaccaagtgagagagagagagcatgcacaaaatgataataatttaactttaaagagaacttcatgatcatcaaccatccaaggatttaagactaaaggaacaagtacaaccctcgaaagtgaattaggaagaaaacacatggaaggaaaaccatacacagaagaagattccagagaaattcaataatacacaatttttttttttttattttcatttccccccctctagtagtcagtggtgggaagctgctcgtgggtgtggctgataaagacaacctcgtaaacaaggccagcgattccaccaccgatgagaggcccggcccagtagatccagtggttggtccaggtccagctcacgacagcaggcccaaatgtcacagcggggttcatggccgctccagaaaagccccacccaacataatgttagcgcccgacatgaaaccaatggcgattggaagca

SEQ ID NO: 13326 - DNA, 606 bp, Glycine max
  unsure (1)..(606): unsure at all n locations
  Clone ID: jC-gmfl02220146e06a1
gtcgccgtctccgtcggcgccaacatctccggcggccacgtcaaccccgccgtcaccttcggcgccttcgtcggcggcaacatcaccttcctccgcggcatcgtctacgtcatcgcccagctcctcggcttcatcgtcgcctccctcctcctggccttcgtcaccgcctccactgttccagcattcggactctccgctggagttggagttggcaacgccttggtgttggagatcgtgatgaccttcggtctggtgtacacggtctacgcaactgccattgaccccaagaagggtaatttgggaattattgctcccatcgccattggtttcattgtcggcgctaacattttgttgggtggggccttctctggagcggccatgaaccccgctgtgacatttgggcctgctgtcgtgagctggacctggaccaaccactggatctactgggccgggcctctcatcggtggtggaatcgctggccttgcttacgaagttgtctttatcagccacacccacgagcagcttcccaccactgactactagagggggggatatgaaaataaaaaaanaaaatgtgtatattgaattctctggatctcttctgga

SEQ ID NO: 13327 - DNA, 531 bp, Glycine max
  Clone ID: jC-gmfl02220146e06d1
gacccgaataatgatactacattcaattcaattgttgtggaccaagtgagagagagagagcatgcacaaaatgataataatttaactttaaagagaacttcatgatcatcaaccatccaaggatttaagacgaaaggaacaagtacaaccctcgaaagtgaattaggaagaaaacacaaggaaggaaaaccatacacagaagaagattccagagaaattcaataatacacaatttttttttttttattttcatttccccccctctagtagtcagtggtgggaagctgctcgtgggtgtggctgataaagacaacctcgtaaacaaggccagcgattccaccaccgatgagaggcccggcccagtagatccagtggttggtccaagtccagctcacgacagcaggcccaaatgtcacagcggggttcatggccgctccagagaaggccccacccaacaaaatgttagcgccgacaatgaaaccaatggcgatgggagcaataattcccaaattaccctttcttggggtcaat

SEQ ID NO: 13328 - DNA, 452 bp, Glycine max
  Clone ID: jC-gmfl02220146e08a1
ggccacagtgtgcttcccaagagcacaaatgatgcaaggctcaaggaaaactttgatctctttgattggtccatacctgcagatttgcttgccaacttctctgacattaagcaggagagaatagttactggagatggttttttagcaagacatctcccgggtacaaaacaattgaagaactctgggatgagtaatggacagtttccatattggccacatccccccctcttgcttaatgcaaaaatgagcctatctttatgattattgtaataatctacgatgtgtttataattttggacttgagatgtgtcaagggagatttcgagtttacattaataacgtgtcattttggaattcagttgtttgagtcttgaccttattgtgtgtttgacaaaactattgttagaagtctaatatcgtttagatcggaaaatgttagttattaatatgtt

SEQ ID NO: 13329 - DNA, 453 bp, Glycine max
  Clone ID: jC-gmfl02220146e08d1
aacatattaataactaacattttccgatctaaacgatattagacttctaacaatagttttgtcaaacacacaataaggtcaagactcaaacaactgaattccaaaatgacacgttattaatgtaaactcgaaatctcccttgacacatctcaagtccaaaattataaacacatcgtagattattacaataatcataaagataggctcatttttgcattaagcaagagggggggatgtggccaatatggaaactgtccattactcatcccagagttcttcaattgttttgtacccgggagatgtcttgctaaaaaaaccatctccagtaactattctctcctgcttaatgtcagagaagttggcaagcaaatctgcaggtatggaccaatcaaagagatcaaagttttccttgagccttgcatcatttgtgctcttgggaagcacactgtggcc

SEQ ID NO: 13330 - DNA, 306 bp, Glycine max
  Clone ID: jC-gmfl02220146e09a1
tgaacattcatcttcaattttgtcttatttttcttcaagaagagagtctgttgcttacttgaagcaaaagctgacaggtagtaggaagttttatatcgaagggaaaagagtgcgattggcatcaaagagaagctgaaattttgatacttctttttcttggcctcttctaattcattatattttaggagagaaagggggcagtttggaatttagtctaaggtaaatttgcattggttagctttatcaacgtatgttgtagtattaaatagcattttatgaaatttaataattttttcttttaagttt

SEQ ID NO: 13331 - DNA, 306 bp, Glycine max
  Clone ID: jC-gmfl02220146e09d1
aaacttaatttaaaaaattattaaatttcataaaatgctatttaatactacaacatacgttgataaagctaaccaatgcaaatttaccttagactaaattccaaactgccccctttctctcctaaaatataatgaattagaagaggccaagaaaaagaagtatcaaaatttcagcttctctttgatgccaatcgcactcttttcccttcgatataaaacttcctactacctgtcagcttttgcttcaagtaagcaacagactctcttcttgaagaaaaatcatacaaatttgaagatgaatgttca

SEQ ID NO: 13332 - DNA, 572 bp, Glycine max
  unsure (1)..(572): unsure at all n locations
  Clone ID: jC-gmfl02220146e10a1
aggcacttagcactacttcaatatcttatctcaagtcttcacttgttcttgacaagtctgagtgggtgaagggacaaacacttcgccaaccttctgctgcatcagttgtgagatgcaaccccaccaccccatcaggcctcacaatcagagctggttcctatgctgatgagctcgttaagaccgcgaaaacagtggcttcaccagggaggggtattttggccatggatgagtccaatgctacctgtgggaagcgtttggcttcaattgggctagagaacactgaagctaaccgccaggcgtaccgtaccctccttgtgacagttccaggacttggtcagtacatctctggtgccattctctttgaggaaactctctaccaatccacaactgatggcaggaagattgttgacgtgctcctcgagcaaaacattgttcccggtattaaagtcgacaagggtttggtaccccttgctggttccaacgatgagtcatggtgccaagggtctgatggtcttgcctctcgcttcgctgcatactanccagcaggtgcccgtttcgccaaatggcgtact

SEQ ID NO: 13333 - DNA, 606 bp, Glycine max
  Clone ID: jC-gmfl02220146e10d1
aagtacacaattcacagcaaaaaggtttataagctgtaaaggtacatgtaaccataaacaaaaatagtctccaagactataaaaacattacattttagacaaattagtcttcttccacttgatcctccgtcaacacctactacaactgctggtgttgctgctgcctaacatgtatcatattcactacaaacatcttagtaggagtagcctttgacgaacaactccttcttggcttcctcagattcaccctcaccggtgtacttcccaagctgggcgagcgagttggacttggcacggaaaagaagtgcatcttgtgccgccttcacattctctgggcggcctccccatgtcttcaaggcagtgttttggagggctctggcatacgagaacgacacgtgccacgggtttggagattggttcatggcattcaagttgaaggtagcttcaacctcagactgtccaccagacaaaaacataattccagggacagcagggggaattctcctgtgaaggagcttgacggtgtaatcagcaactgtctgaggactggccttgtccttgactcagctcaggtgtaccatgctggcttaagaagataccctcaaa

SEQ ID NO: 13334 - DNA, 587 bp, Glycine max
  Clone ID: jC-gmfl02220146e12a1
gtttacacactgacacactccttcatccaactccaacagaacaagaaaacatagtacacaccacacagtgaaaaagagagaaactccatcttctttctttctttctcactcaccacagaacacaaaaaaacatttccaaatttcaggtttgggaaatgcacgaaacacattccatcggcggcggcaggttctacggcggcggcgaccggaggctgaggccgcaccaccagcagcagcagccgccgccgctaaagtgcccacgttgtgactcactcaacaccaagttctgttactacaacaactacaacctttcccagccgcgccatttctgcaagaactgccgccgctactggaccaagggtggcgtcctccgcaacgtccccgtcggtggcggttgccggaaatctaaacgctccaacaaacccaaaacaaccaccaccaccaccaccagcaacactaataacaaccgttcttctttctcggcaaccgcaccggccaccgcaccaacgccaccggcaccagagctggagcatcattctcattctcactccagcagtgaaagctccactttaaccgtgaccgcgacg

SEQ ID NO: 13335 - DNA, 523 bp, Glycine max
  Clone ID: jC-gmfl02220146f01d1
atagagagggagaccaattaattagtccccttataacattagcatcacaaacactcgaaaattgaataaaaaattaatttaataacctcccccaacaaattaaaatagaatctggtgaatggggggcttatgtaaaaaagtgtggcaagaactcacgtaagttattctaaaaccacaattaatactttattatataacatataattatatatcatatatatttccctctccagcttcatgacttgttcatctagctggggtctctagcacaatgggggattttggggcaaccacgattgtaagggttggctcgacccctctgctggcaattgtggtaggatcttccacggttaccacatggcacattggtggcatttggggcaccatagctaatgtaccgttgtcgcccggtgagggttcggggattggattcggaatctagcaacatctcattggcatctgcaatgagatcatggcccacagcactaacatggaagccattttcatgatgaacactagaagc

SEQ ID NO: 13336 - DNA, 383 bp, Glycine max
  Clone ID: jC-gmfl02220146f02d1
aacagccagtgatccagattacacatcacatattgaaacatgtacggaaaagactgaaacgaaattcattcccatcagcagagcatacacaacttgtcagaagctaaatattaactttatgagcgtatataatttatcaacgtccttcatggtcaggcacagtcattcttcacacataaaagacataagtcaattatgacctcagaaccttaaatcatcagtcccccataagaaaaacacggttctgcgtcctatatgtgatgatttctaaagcagagtgcctattaagcacttcttaaagctctggagcgggagcaaagtttaggccattcattgcagtggatggctgcataggaacgccctgagcttggttccagaaatgt

SEQ ID NO: 13337 - DNA, 316 bp, Glycine max
  Clone ID: jC-gmfl02220146f03d1
tttttctttttttttttttttttataatctcatcccaaccacaaatattaaaataataatactaattacttatgcgattctaactactcatactacttactcaggggttggatgggggggcatctacctggggaaatttaacaattttcatggaacaaaggccctattttacaaaggtaatttcctcctacattatcacaataccataccgaagcatatctaaatactattaactacggtttaaaaccatgatatacctccaaccttcgcacgcaatttcttatcagaacgtttaaaatccactactctagcaaaa

SEQ ID NO: 13338 - DNA, 435 bp, Glycine max
  Clone ID: jC-gmfl02220146f04d1
aaaggaaaaaaccaggaattttttttcccccccccaaaaaaaaatctggggcccgccctttttcatagggaacccccccccgaaaaaaacggcttggggtcggggcaggggccccaaacccttcccaaaccaaataaaccccctttaatagccttagccccccctaggggaaaatggggcccccggaaaaactaaaaaaaggaaattgtcccccccaaaaaattgggaacccaaagcctttttaacggggggggggctggactccccccataaacgggccccgggcccttaacattattcggaaaaaaccctgaacaatttcgaccctggcgggccaaaattcgggttcattcggaaccccggaaaaaataagggttggaaaacgcacccgggttttcttaggaattcccccacttaggggggggcccccccttt

SEQ ID NO: 13339 - DNA, 374 bp, Glycine max
  Clone ID: jC-gmfl02220146f05a1
cgggtttctatctgctgtttgaggaccatcatgaagttccaagccccggcctttgggtccagatggtgtgaaattgggaattcttgtttctgcctgctcgtcaacttcgttcgtatatggtctttttattcaagctatttattgctgcgaatgtctgggagtgaacagattcttgagtgagtatttaaactgtcagatatgggaagataaaattcagcataaagccatttatagcctatggggcgtgtgaataatgccctaggaaggctgtaatgatatgtcacggatattgctttgcaaggcttaacattgtgctctgtcagaagtgtatacagaaaatgtggacaaaaaactgtaaatgaggttattttatt

SEQ ID NO: 13340 - DNA, 373 bp, Glycine max
  Clone ID: jC-gmfl02220146f05d1
aataaaataactgaattttctatttttttttcaaatttttgggttacacttttgaccaaacacaatgttaagaattgcaaagaaatatccatgaactataattacaaacttcctagggtattatttacacgccccataggccataaatggctttattggaattttatcttaccatatcttacagtttaaatactcactcaagaatatgttcactcccagacattcacaacaataaataacttgaataaaaagaacatatacgaacgaaattgacgagcaggcagagacgagaattcacagtttcacaccatctggacccaaataccgtggcttggaacttcttgatggaccacacacagcagatagaaacccg

SEQ ID NO: 13341 - DNA, 555 bp, Glycine max
  Clone ID: jC-gmfl02220146f06a1
ccttttccattttccttcctttgggttgtgttctgtgttattgggttggattgtgttgtgtgttccatacaactccaactagtcagagattcttgtctgggctacattgcactttgcaccccaaaaagggaaagggaagagaggcataaacaccccataaaatggagagagctctcactaaagtcagcagcttgaaggtggggttggggagttcatggatctccaagaaggccaaggaggagttctctaacatctctgaagacatctctagtttctcaaataccgttgaagaaaaggcgaaatggatcttcaacaaattaaaaggtaagccacagaaaagcctaccggatctcctccgagattacaatttgccaccaggtctatttccacagaacataatctgttatgagtttgatgaaaccaagggcaagctgattgtctacttgccatcagcatgtgaggtcagcttcaaggactcctctgtgctgcgatacgcaacccgagtcaaggggttctcacaaggggaaagctttcggcgatagatggaatgaaaac

SEQ ID NO: 13342 - DNA, 312 bp, Glycine max
  Clone ID: jC-gmfl02220146f06d1
ggattgttggtgtgtgtttcatatttttttttctgttatagattttctgttcgggcttacatagaaaaaagcaaccaaagggcgcatgggggcgaggcaaaaaaacccgggaaaagggggagagaaaggaccaaaaccgggaggccccccgggaaaaaggaaaaaaaggggaaaaggggcccgccaacgaagaggtttggggcaacactgcacacaccggaagcatttcaacccccgtcgaggaaggggggaaaaggaaaccccccacattgggaggccagaaacagagaaccctggaggaccccccggggg

SEQ ID NO: 13343 - DNA, 575 bp, Glycine max
  Clone ID: jC-gmfl02220146f08a1
ttttcaattttaatttcctctcaaaccctaaccctaaccctaaccctccccgtcacaaaagaaaaccctctttgtccgatcatcgtcgtcaagatgttggaactccgtctcgtgcaaggctccctcctgaagaaaggttttggaatccgtcaaggagctcgtgaacgacgcgaacttcgactgctcctccaccgggttctccctccaggccatggactccagccacgtcgccctcgtcgctctcctcctccgatccgagggcttcgagcactaccgctgcgaccgcaacatctccatgggcatgaacctcaacaacatggccaagatgcttaagtgtgctggtaatgacgacatcatcaccatcaaggccgacgacggcagcgacactgtcactttcatgttcgaaagccctacacaagacaagatttctgattttgaaatgaagctgatggacattgatagtgaacaccttgggattccggaggcagagtatcatgctattgttaagatgccatcctctgagtttgctaggatctgcaaggatctcagtagtattggtgacactgttgtcattt

SEQ ID NO: 13344 - DNA, 539 bp, Glycine max
  Clone ID: jC-gmfl02220146f08d1
cgaattgttcttaacaatcaaatcgagggaaaataaggtggtaggtaaccaatacacatctaagaaatccacaaaatgtgaattcattgctcacacggttaaaatatcttcaacagaagatgtatgacgaaagctacaagttcaaagacattaaaatcctaatatcctaacccaaccatctaataggtagattaaacttgaggtttcgtatcttcttcatcctcttctatcttgggagccaaatagaaccgcacataacccatctcagcaatcttgtactcaacaacaactggcaactcatttgaaagactaatggtaactgtgttagacaatggcgttgcctttgtaaaagagttcatatatcgcaaagcaaatgtcaaggacacgggctcattcatctcaatgacagttgcttcttcaggcttgtccacagaagtattctgcctacaaactatattggcagttccaatatctcctttggtggaaaacttcacaccctccttagtaaccgaaatgacaacagtgtcaccaatactact

SEQ ID NO: 13345 - DNA, 586 bp, Glycine max
  Clone ID: jC-gmfl02220146f09a1
tttctagcatccttcaagtaagacttcagtaaaggaatgggtgaaggatgctagaaaaatttcttctcctgtcagaagtgttaactcatctcccactgcacagattgatgttaatgatcgagaactgattgcacttaaagctgtaattaagtgtattgaagatcacaaacttgatgaccagtaccctctggatcctctccagaagcgagcgacccaactcgagaaggccaaggctgacaagaaaagggtaactgaagcaacaaagcctcaacccaagagaccccgtgctaatggtgtgggatatggcccgcgtgtcactaacattctatctgacaaaacttcttatgctagagttgctgacaggtatcctcaatacgtgtatgaccgaccttacatgtaccctgcaccaactgacaatcactgccctcctctcatgggttctgcaacttataacatctctcctaatcctggcaactactttggaaatggctatcagtaccaagctacatatctccactagttagcacagatgatggtgaactgatgactaagaagctacatatccctttgttaatatttagtctta

SEQ ID NO: 13346 - DNA, 405 bp, Glycine max
  Clone ID: jC-gmfl02220146f09d1
aaccaaaaacaaaacccagaccaaacaataagggaacaaaaaatcttccaacccagaagttaaaaattaacatgacatttcacctgattacaaaatttttaaagactaccttaaggaggggcaccctaacccagctaaagggctaaaacttaacaccaaatacaaaacaaggggatatgtagcttcttagccattaatcaacccacatcgggccaaaccaggggaaaattgcacctgggtcccgaaccccctatccaaagaaattgccaagattagggaagaagtcataaattgcaaaacccttgaaaggggggcctcgattgcccattggggccgggaacatgtatagggcggccaaacacgctttggggatccccgcgataaaccttaacctaacaagttttg

SEQ ID NO: 13347 - DNA, 607 bp, Glycine max
  unsure (1)..(607): unsure at all n locations
  Clone ID: jC-gmfl02220146f10a1
cttctcgtgtcttctctctctttgcagtgcaaacgtggggcgggatcccgtttcaaaccccgtttttgatccgactccgatcccatttgaagaaataacttgattaccttgcttttctccctctcctggagatgcataaaaggaaaagctttagtttccccttttggtcacgggacacaccgtttacggcatgcctaggaactaaaggcacattgattcagaaattgtatccaagttgaacagcatgctagattagcataacacatgcaaaatcctttcgaatggctagagatagatttaaagatggatttgtgcatgatcttaaattgaagttgatcttggatagagttaaggatgatagaatatataacatgtctcaagtttatgaagtagctgcacttattgaaggtgacgcggacagagtataaaaaagatacataatcttggaatcacaaaatggacaactccaaagactagatgattttcatgcangttattcgggactctagtatctacttttattctcgtatgttaaggatgggtatagacatgatgtccctaattgagctacacatactttagaaaattgcataagagaccaccttac

SEQ ID NO: 13348 - DNA, 489 bp, Glycine max
  Clone ID: jC-gmfl02220146f10d1
aaagatcctcaaaactttttcaagatgatcaacaactttcaaatggatcaactcaagaaagccaaccctttggtttgggacttacatgtaaatgtcacaaatcaatgtcacaaacaaatcaagaaagccaacactaccacaaatcaccatcccattaaaggccaattgattcatatttctacaacctcaaacaagtgtggaagggaatatgactctttttccactgtttgaaccttggctttgggcattggtagttgatcgatgccggttgcagaatttgtcaacctgtaactttaatggagtgatcctaataaaaaaaagtcttttagactctagcatagtataaccatcaattaccaactactgaacatgttttcttgaccaaaatatggtttgagcttcggttcagcttgaacgaatcctaaaataaagttcttttgagatactaggtggtctcttttgcaaattctgagtttgtgtggctcaatt

SEQ ID NO: 13349 - DNA, 402 bp, Glycine max
  Clone ID: jC-gmfl02220146f11a1
gcgccctacggctttgagaaaaccacattgtccgagggccattgagcatacgcaggggagatatagagaaaaatgcggtgcataataatcataagctgttagagaggaagaatggactcgacaccacccacgagaagaagaataggaagctcgccattctgagcgtgtcttccctcctcctgtgggcgatggtggacgcggcggccgtcggcataagagaaggcgccgatgaggtcgaggaaggcggcgactcgatcgtgaaatctcaaaggaacgtgcaagtgatatgcgaatccgaggaatacatagagacaggccacaggagtctcggcaaagcttacgaaacttacgatctgggcgagctcatcataaccgtgttcaacgccacggccgatgagatcg

SEQ ID NO: 13350 - DNA, 360 bp, Glycine max
  Clone ID: jC-gmfl02220146f12a1
gaacgggaagaggagagagaaacgataaagaagaggggatctcacatcacatggtctgcttgcccttggggcgccaccaccaccaccacaaaccggcggcggcggctatacatccgtcccaaccgccgcagactcagccgaaacccgtagttcctcgccggagctccgatgtggagaccgagctggatatgacagctactgccattgacgggaacgatgctgtcactggccacataatcttcaccacaatcggaggcaaacagggggaacctaaggagaccatcacctacatggcacaacgggtcggtggcactggatcatctggagttggtattcaggcacagcgcttggagactggag

SEQ ID NO: 13351 - DNA, 531 bp, Glycine max
  Clone ID: jC-gmfl02220146g01d1
ccatatgtaaatatttttagcatagaattggataacattaacatcatatttctttgaacagattctcttgtaagcatcatttcacatgatatgataaaattacaacaaaaattctgatgaacataactgggcaaaaatgaaggaatgcgctttgagcaagaaccataaccttatgtcggttattcaggggaggacattacaactgataagtacaaattgccaacccaagatgtattccaatcctttgtgactatagctcttctatctccaattcaaatttttaactcttctgatcagggtggaatgggcgtataaatgcagaattcatttgccaaacttttagtgaggctgtcacagtggcctcggtagcattgttgaacaagaacaacctatcagctccatagattgcctttgttggataaacccgagatgtcacaaccgtccttccaccttgagcaaagctttcaacaatagaatggtccaccagtatccgcaaggaaaacttttcgcctttaagaactggaacagcgc

SEQ ID NO: 13352 - DNA, 330 bp, Glycine max
  Clone ID: jC-gmfl02220146g02d1
ttatttttttttcattttttttttttttttttttaacttatttattctaaacaacttgaattgtttttatcataatgacacagaagtccccaaaaaaaaataaagacaataaaaatagactacaacagtcaaatacacatcattcgaaaacaaagaccaaacaacaaaaacatactgaccctacctaaagccagaatggcaaacaggacaaaactaacaacaagacaaacagagcaagaaaaaaacaaaaacctaaaaccccaacaagaacgactatcaatacaaaaaaaaaaaacagccaatcaaacatcataaacaaagggaataaat

SEQ ID NO: 13353 - DNA, 398 bp, Glycine max
  Clone ID: jC-gmfl02220146g03d1
ctgccacatgagcaggctcagtactctacaccatccggtattaattcccgaccagctcagcacactacggccgccctttattgatgtatcgctttgaaacatcttgatatttttttatggcttgttgaatcttcggtatataatcattatattttgtgatactgttccattgcatagacaagcaactcaaaacaaagtggaaccccgtggagagaaagtccgcctgctcaacaaatcctgcaagccaagacagatcacagccaccagaacaagggaactctgaaactctgcgcccagaggaaaagccagaaaacaccacacacagagaatcaatttaaaaaggcccccgcgaagaaaagagaggctgctctatcccaatgggctatgacagaacttgg

SEQ ID NO: 13354 - DNA, 546 bp, Glycine max
  Clone ID: jC-gmfl02220146g04d1
caaagaaaaacacttttatcattgtgagcagtagaatcatctgctccatgtaagtagggtacttcaaaataacagcattaatatcctcaacataagattttacatgcctctcccatcttaagaaaaatacatatgaatgtcaattttgtatcaaaaaggggggaagggggggacacaataattgatataaatagagtacagaacaccccaactcgaaagagataaacttaatgataatttaatgaagcgtaagttgtattttgctaattccttccccatcctctgattctctaatcatctgtatgcgaagcctttttatctcattgactagtgcagatccaatagtaccgcaatcttatagtgaactaggtgtaataacacttaaaaaaaaattaagatgaggccaatgggagtaatttaaataactttcaccaaaactttttatgtcttcaggtcatcagacatcgcagaaggtatacaatgcgtggtgaggatgtctaaagttgcggtcttagcagtgctagtcttcaacactaccttctgttg

SEQ ID NO: 13355 - DNA, 483 bp, Glycine max
  Clone ID: jC-gmfl02220146g05a1
ctcgagccgattctaacacatacactactctctctctctctgttattgcatggccgccaattccagtagccgagggatcaccgccttaaggaagcgagtcggcaaccggatctggacttccaacgcacctactctcacgttaaggaggggagcatacagctgcgggtcagtgtacgacaagaaccctgatgatgagatccagtctgggcaggtcccagacgacgtgatccaagcggcaacacagttcggcaaatactgggccccacatacacagactggggtatttgggccccccggaggaggtgaccaaactgcttctgacattcactctgatgcgctggaagagaaggctctggcttcgccccaccaatcttgtggatttcgagaagcctcacacccttccttcacaaccggtggaggacatcatattctaatactgaattacattaacactgcgtcacactctcaagcgtggtcttggtt

SEQ ID NO: 13356 - DNA, 443 bp, Glycine max
  Clone ID: jC-gmfl02220146g05d1
ctataataatactatgtgtaacattaaagtggcatgaaatgagaaatccatgatgcataaggtagttcatgtgactggtatgctccggtacagcgtagcatgcagtgcagattgaagctgaggagttattaaacagctagttggaggaaggaaaccaaggacacacctgataggctgacacagtgtttatttaatgtagtattataatatgatgtcctccaatggttgttaaagaagggcgtgaggcttctcgaaatcctcgagactggtggggcgaaaccaggccttatcctacagcgcatcacagtgaatgggctaagccatttggtcacctacttcggggggcccaaataccccattctgtggatgtggggcccagtatttgccggattgtgttgccgcctgaatcacattgtctgggacctgcccagactggatctcat

SEQ ID NO: 13357 - DNA, 539 bp, Glycine max
  Clone ID: jC-gmfl02220146g06a1
ggacgaacaaaaaagaaagatggccctgtataagaagggactgcagaggatgtttcaaaggtgacagctagtgattcagaagccaaacctgccaggcggtcagtgaaaaaggcacttggtcagaaggctgatgtgaaaaaaactagtgtcgtagtttcagtaaaaaaaggaagttgggctgcaaatgatgcagatgcaaaaaagcactcagccaagaaatttgatgaaaacaaaaagggtagtggtggatcctcttcaaggcagatggaggacaagaaaaagggaggtcgggggaaagctaactctgaagcagatgttgcaaaatcatctgctattgatgtggacaaggaaatggtttcttctccaacgtctggtacaaaatcaactaaagatggaaagtcagaggagactcccaagacaaatctgaaaagggaacgcactccaggaaaagataatgagtctggtgtgaaggagtatggtgaaaaccttgtcggtttacgggtcaaagtttggtggcctaaggatcgtgagttctacat

SEQ ID NO: 13358 - DNA, 382 bp, Glycine max
  Clone ID: jC-gmfl02220146g06d1
gattgttacattctgctttttttatgccaaacctcctcattcgctcctttacaattggggcaagcccacaagcccccgcctccccaacaagaggcggccccccccaaaaaaacccccgggggcccccaaaaaacccccccccagcgcaaacaaccccaagaacccccccgaaccccccaacaaaaggggcccacccaatcccagggaaacccaggacatccccccccggggactccccccccaagcctcaaacgccccccctacccccgcatcagctactgccccccaggaggaaaaaactaaagcccccacaaaaaaaccccccgcgggaccaaaaaaaagccccccctatagggaaaacccggggggcaaaaaccccccc

SEQ ID NO: 13359 - DNA, 610 bp, Glycine max
  unsure (1)..(610): unsure at all n locations
  Clone ID: jC-gmfl02220146g07a1
gaaacaatacatgtttgtttctttagtgctgcagatattgttttgtagaattcagaatataatctgattaaaaagaaaagaaaatgtcatccaaccaaatatctgcagcactaaagaaacaatacatgtttgttttctgatttaaatgccatttaattatgtattttttattatttctattatcttcaacatttagtggaactttcgcagtgatttatgatgtcaacttgcatttttctctaattttacctaagaaatcaaggttctgatatatataacacaatattattatagggctctactagtttttagagtctaagatagaccattaataactaatcactcctcaccaaactgtataaatttgatctaggtatccttataaccaaaaatcatgaaagtaactttcactaaagtaggttttgcatgataatttcgtttagtgttccaaaaaccatgcatctatgttttcagcagccttgtattgcaccttacttgtccctctatcatgcattaggagttaggaaactagttacactaanttgaaaccgtttaatttggttttatacagcttgaaacgtcgagggtaagtctgatatagatgcataat

SEQ ID NO: 13360 - DNA, 586 bp, Glycine max
  unsure (1)..(586): unsure at all n locations
  Clone ID: jC-gmfl02220146g07d1
aaaaaatgacactaactggtcattcagtcagataaaacttgtccttccaaaatattcaaattaaatactataaccttcatgccacatcctatgtctatggctaaagttttaatagttttaagtcagtcactgctgtttttatgccaaaacaaattaacagaagaacaagcagcatttacacatttccaacagcaagaggcattttgactttggccttaggtgtttgctaattttatttatgtagccatctaaaatactgagatcttaggtcaaagcatccatccaggaataaatccattgacttgttgagcttgagttgtggcagctagctgctgctctgaggcttcagggatgtacctgtagtcagaacctatctgcaatgtggggttgcactccaaaggctggaagaagccttgagagtgagcattttgggttccatatggcatactttgctcaccagcttcccatgtttgcctatactggtttcttgaattgatttcttccagcttcatggtcaaagatctgtttgctttcaccaacatatgnctccttatctgaagatcagctaactggntcagcatgaact

SEQ ID NO: 13361 - DNA, 503 bp, Glycine max
  Clone ID: jC-gmfl02220146g08a1
ggaataggaaccctcatattccatagtttctcaatcagggtgtagcaagtttggctcgggtgtgtgtcactattcctgctgaggaaacacctctatatcgttttatccttttgctatttcactgtgtctctcctgccggtgggaggtagacatgcacattggaatgatggtgatgatgactcaagcattgaagaccattgtgtcatcctatcatgactatgacaagaattcccgtctatgtcctttgcctatcagtcgatccagaagccgtcagtggcgccaatgccgcattggaacctttgctgtagccatagcagcacttcttatatctaccactgcttggctttccgttgtcttctctgatgcaactacctgttgctttcatcacttaaaggattgggaaagtagcccccactctttcaattggaagaagtgcatctctcatcgccttgcgaaagtaaaacctccaccagctctccaatttgagaccatgaatgatcatc

SEQ ID NO: 13362 - DNA, 592 bp, Glycine max
  Clone ID: jC-gmfl02220146g08d1
ataagttcaagaaagctcaattcatgtggtaaaaaatggcgcatggaattagctcttcacaaaaaggccaaatcaatgtacaaaccataatcaatcaatagacagaactaaaagttcccttcccacactctccaactgagatttggagtatttctttgccagcttggctttgtcggcaacagagacgtcgtggaacctgatgccaattcttgctcaaaggttgcactgctacccggatctctcccacattgcgcagaggggggaggagaggaaagcataaaattctctttttgaaatcatctttatctctaccccgaacatatgaaccccaagaagcattaccctctcttccagtatctttcaagaagaatcgagtgggccctttacaaacagatttgtatggttccctggcatcgaaatcaaattcatttgtttgactaataccattccaagcagagtaagttctttcagagcgctccagttctcgaggaaaaacaatgttaggcaggacttgtacgacataacccagtgacaccgaatatgttagatgccgtgcatggtcgtaacatattgaacgctgcaaaaagctttg

SEQ ID NO: 13363 - DNA, 568 bp, Glycine max
  Clone ID: jC-gmfl02220146g09a1
agaaaaaggggttagggtttgttcttgtgatcgaagctaagcgaagcaaaatgggtggatcagtgagggacgtgaagtcgaagggcgaggtcgacgaggtggtggcgagtggctctccggttatcctccacttctgggcgtcgtggtgcgaagcttccaagcacatggaccaactcttctctcacctttccactgatttccccaacgcccgcttcttaagggtcgaggccgaagagcaacccgagatttctgaggcttactccgtctccgctgttcctttctttgccttctgcaaggatgggaagacctttgatacattggagggagctgatccgtcaagcttagccaataaggttgctaaagtagcaggctcaattaaccctggagaatctgcatctcctgccagtcttgggatggctgcaggggcttctgttcttgatacggtgaaagaattagcaaaagacaatgattcttcaaggagaaaaatcaagttcaaccagggcttagtggtcctctgaaaaagagaattcagcagctttgtgactctaatcctgtcatgcctttcatg

SEQ ID NO: 13364 - DNA, 436 bp, Glycine max
  Clone ID: jC-gmfl02220146g09d1
ccaccaaataattatgtaatatataacaatttctaatctgatgggaattcatgcatgttcagtataccattagttgaggctccacactaacattttaaaaatcactgacgggggcttataaaaaacccatgtagttaatgaggggcataaaacacaaccttcaaaaatggcttctaggacataacccatgttatttgagggaataataataatcctactcagataaagtggactttggctccccattatttcgcaggtcccttacaatatcatgaccaccaatcagctcacttttgaaggaaagttgaggataggttggccaattgggggatcccttaaatcccggtgtcactttctaataggccaatttatcaatggacccaaaattcaagcccttttgtcgaagggcatcagcaactttggaactaaaaccaca

SEQ ID NO: 13365 - DNA, 578 bp, Glycine max
  unsure (1)..(578): unsure at all n locations
  Clone ID: jC-gmfl02220146g10a1
attcttcaagattcaggtactgcgtttcggaagcagacacagatggctcgtacgaagcaaaccgctcgtaagtccacaggaggaaaggctcctaggaagcagcttgcaaccaaggctgcacgtaagtctgcaccaactactggtggtgtgaagaagccccaccgttatcgtcctggtaccgttgctcttcgtgagattaggaaataccagaagagtaccgagcttttgatccggaagctccccttccagaggctggttcgtgaaattgctcaggacttcaagactgatctgcgtttccagagccacgccgtgcttgcattgcaagaagctgctgaggcataccttgttgggctctttgaggacactaacctgtgtgccattcacgccaagcgtgtaaccattatgcccaaggatattcagctggcaagaaggattcgtggtgagcgtgcttgagttggtggttggaaagatgaagatgattggtggctgcggttggtgtttttgtttttcagattcctttttttattcaatagatggngttgttagggagggtaggttttctgctggtagtagcatta

SEQ ID NO: 13366 - DNA, 374 bp, Glycine max
  Clone ID: jC-gmfl02220146g10d1
gttgaattggtttctaggccccaaaacgaactcaagccaaactaaagggcgcaccaactactgccaaagcgaagaataaagggggggaaaaacccgggagggaaaaaccaagaggggggggatttaccccaaacagtggggcaaaaaagaaccgcaagccaattttccaaagggggaaaaacccaaccgcggacccctacaagactgagccgaattcccaaagaaaggccccgcccgcaaaaaaccaacccgccgaaacacccccagttgtggaaaaaaaaaggggctccgaaaaaaaaaaaccccgcccggggcgcccaaataatgcccaatgtccaacccccgactcgagggcccccacccgaaaacccttt

SEQ ID NO: 13367 - DNA, 179 bp, Glycine max
  Clone ID: jC-gmfl02220146g11a1
aaatggcacttcagaggttgagtgcagaaatctcttggctgatgccaaaacaaagtatggtgtgaaatcttcaagtagagaacaacagaatctaaaatgcaaaattgattctagacatggagggcctggtatttccaatgatacaaaatcctttagcatgcccaagtggaatccaggaa

SEQ ID NO: 13368 - DNA, 398 bp, Glycine max
  Clone ID: jC-gmfl02220146g12a1
ggtgtgttgtgtggtttggtttggtttttcacttttcttcatctttttgcgagaagacacacacacagagagagatggctcccacgaggattggggcacagaacaacccgcttacaaagagcgtgtgcactctgagcaccgcatcacggtcgtgtccaatgatcgataatcttttgcgagcacgcatgaacgtggcgcgcttcaacttatgccatgggtcccacgagtaccaccggcatgccctcgacatcctgcgggccgtcgtggagaacaccgtgattctctgcgccgtcatgctcgacaccaaggcgcctgagattctgaactggtttactcaaggacggaagagcctatccaactgatacatggtgatgaaataaccatcccactgactatga

SEQ ID NO: 13369 - DNA, 327 bp, Glycine max
  Clone ID: jC-gmfl02220146h01d1
aaaaaaaggccttcccatttttgctttataataaattaaggggaggggcccaggggggggggggtgttttgtaaaacctttccattaaaaaaaaacctaaattcaacccaaaaccggggtttctccgctctgattttaaaaaaaaccccctcctttttttccaaacaaaaagccaaccccttttaaagctttgggggaggaccaacccaaatggaaaagaaaaacccccgggaaaaaaaaatcctttttgacaattggcaccccgttttttattcccccttttgattagatttattgtcaacccaaccccaccaccttggggctaaa

SEQ ID NO: 13370 - DNA, 507 bp, Glycine max
  Clone ID: jC-gmfl02220146h02d1
gaatgaaaaatttcattcttcaaagtatataaataaatttagtgcaggacttacagattctaaatttctagtggtaaataaaaaatcatccaacctagagatctttaacaacggaccgagtggaagagatatgcacacctagcacagcacctaccataaacttaggcagaaaatctttgagcattattttgaatgcaagtggcgtttacagcttacaacaaacacttgccacactttttatgctaaaattagagagaagtgtagggtcaatctccccatttccagcatgaatagcatcaatgaacttgcatgagtcagcacattggaaatttcttacaaaccacaaattgctgcaactatggaaccaaactatcctcagtgtgtaattcaaggcacacaagcaatcaatgagaagaccatcaaccaacctctttgcattagaaaccaaaaggttgcattgtggcttatgtgaatgattcctgcaacagttccttaaatggatatgtt

SEQ ID NO: 13371 - DNA, 405 bp, Glycine max
  Clone ID: jC-gmfl02220146h03d1
caaatgaaaataatttgtgaataaagccctgccatatagggaccatttaacatttttattgcactacaacggaagaaaactactagaatgatacatctcttgctcactgtcaagcaccatgatgaacataccgtacaacggttggcaccaaaccaagctaaacaaaaggatgaaaataagtttaacatgaatagatccttaacccatggaggtatactcctggctttaaggaaaacctagcatccccctggccactttatctcaggtacagtttctatggcctataacatacctgtgtccaagggatggtggacattcatcatactttggctaagcacattaaatttgttctaaggtgcttaaggaactcaccttggacccttgaatccaaacacttgacttcct

SEQ ID NO: 13372 - DNA, 526 bp, Glycine max
  Clone ID: jC-gmfl02220146h04d1
attagacttaatcttgtttttactatcactcaaaccacatcgatttggtgatgttatcacatagttttaaaacaaacatagtcatcgatagattatgctaatcttctgtgtcaaaggattttagaacaagcatcattatagatagatcatgccacttgccatatagttttgaaacaaggataattgtatagagattatgcccctcacctataactcagttctacaattaacattatgtatcaatacacatgtcgatagatacattacttctctaatgaacaggaccctctcaaagcatgtgtaaacacagaagaccttgcacagcatatataggtaaagacatacctgggtgtcacatctctaattttgcaccacctgaatgtcgacacgtcagagcgacagaacatatatacaaacatactgccttcgattatggatcggaactggacatttggcaatgacatttgcagatacctactaccaatgcatgtagtaaaacgtggcacagggatgaatatgactgctt

SEQ ID NO: 13373 - DNA, 461 bp, Glycine max
  Clone ID: jC-gmfl02220146h05a1
tctgtttccaattcaagctcttcagctgtagtcatcggagacgggtcagatgaagagtacgaggaggaagaagaagatgaagaaggtgttggtgttggtggtggaagaagtgtgatgaaacatagcggcgagattttcgggttctctgtgacccaaaatgaagaagagtgcatggacagtgaccatccacctgtgactagacaattttttccggtggaagatgctgacgtggcggttgcaaccggtggtggctggtaccggcgtaagctcaacgttccctcgtgctcactgggtaagtgtgaaattttgccaatcagaaacacttggcaccggataatcatcagcggaagtttctcagcctatgaagaagagtcgccgaggaccgctgtcaatgagctctcagtatagaggagtcaccttctacagaagaacgggtcgcttggagtctcatatatgggatt

SEQ ID NO: 13374 - DNA, 309 bp, Glycine max
  Clone ID: jC-gmfl02220146h05d1
atctagttaaagattttgtccggttggtagtttgactggccccagaccagtggaaagaccccaaattgggatttcccttctttttgagagtctttccgaataacccttcgtttttcaccccaaaagaaaagttgggggcctgggtgaccagggggctgggatggacatggacccgatctaacccgggatcctatttaacgtgcgtagaaaagaaaataataatttttggggggggaaaacctggaaggggtacaataataagtttactttgggggcccattacgataatttgaaaggaaccagaacttg

SEQ ID NO: 13375 - DNA, 548 bp, Glycine max
  Clone ID: jC-gmfl02220146h06a1
tctgtttccaattcaagctcttcagcagtagtcatcggagacgggtcagaagaagagtacgaggaggaagaagaagatgaagaaggtgttggtgttggtggtggaagaagtatgaagaaacgtagcagcaagattttcgggttctctgtgacccaaaatgaagaagagtccatggacagtgaccatccacctgtgactagacaattttttccggtggaagatgctgacgtggcggttgcaaccggtggtggtggaaccggtgtaagctcaacgttccctcgtgctcactgggtaggtgtgaaattttgccaatcagaaacacttggcaccggaaaatcatcagtggaagtttctcagcctatgaagaagagtcgccgaggaccgaggtcaaggagctctcagtatagaggagtcaccttctacagaagaacgggtcgctgggagtctcatatatgggattgtggaaaacaagtgtatctaggtggatttgacacagcacatgcggctgctcgtgcatatgatagagcggctattaaattccgaggagt

SEQ ID NO: 13376 - DNA, 323 bp, Glycine max
  Clone ID: jC-gmfl02220146h06d1
agtgctgttaaagattttaaccgtgtgttagtttgactggccccagaccagtgataagaccccaaattggaatttcccttctctctgtgatccattatgattaacctttcattttcaaccacaatagaaaagtggcgggcctgtgttaccagggggctgggctggacattggacccagtttacgactggaggctaatttacatgcttagaaaagaaaataatgatttttggggggggaaaccctggaagggtaacaataattatgttccttagggggctcattaccattttttgaatgtaactagtacttggggaggggaaaa

SEQ ID NO: 13377 - DNA, 582 bp, Glycine max
  unsure (1)..(582): unsure at all n locations
  Clone ID: jC-gmfl02220146h07a1
gcaagaatggcacttcgttgcttggtgatgtccctttctgttctcttcactcttggtcttgcgagagaaagccatgccagagacgaagatttttggcatgctgtttggccaaacactcccattccaagttcattgcgagatcttctaaagcctggccctgcaagtgttgaaatcgatgatcaccctatgcaaattgaagaaacacagtacccgaaaaccttcttctataaagaagaccttcatccaggcaaaacaatgaaagtacaattcagcaagcctccctttcaacaaccatggggtgttggtacatggttaaaggaaattaaagacactactaaagaaggatatagttttgaagagctatgcatcaagaaagaagccattgagggagaagagaagttttgtgcaaaatccttgggaacagtaattggttttgccatttcaaagctgggaaagaacattcaagtactttcaagttcctttgtcaataagcaagaccaatacactgtggaaggagtgcagaatcttggagacanagcagtgatgtgtcataggctaaatttcagaactgcaagtatttac

SEQ ID NO: 13378 - DNA, 507 bp, Glycine max
  Clone ID: jC-gmfl02220146h07d1
aggcacgagataaccactttttaccatatatatatagagagagagaatacgaagcacactgatcacaggatgatgctctctttaagtagggaagcagatcttatcagtacacataggtaggttgaaattctagctctagcaatctagctagagaaggtagtacttgcacaacacacagcacatgataatttattttatacacaatctcattctcatggtgctcaagatgcatggactaattaagcaacaatgttggtctgataggcagtgtccacagataaattgggtacccataaaatggccttgcttccaaggaaatggcaaacagggttagttccaggatcaactcccataagatgatgaagcatttgatgattcattccagacgtatttgagtggcaaatagcaagtgcctgagttttggttccatcaccagccaccaatggaaccatgaaagctgttgtttcacggacttcatggcagtaaatactgcagttctgaatttag

SEQ ID NO: 13379 - DNA, 467 bp, Glycine max
  Clone ID: jC-gmfl02220146h08a1
gttttcctcttctgaatccaccgccactgcagcgtggacggaatcggagtgcagccatatcagcagcagcagaagtccttgaagtgctgctctagtttgaggcacaatgagattggagaaatgctggttttgctcttcaaccatataccctggacatggaatccagtttgttcgtaatgatgcaaagatttttcggttttgtagatctaaatgccacaggaactttaaaatgaagagaaatcctcgtaaggtaaaatggaccaaggcatatcgtcgagtgcatggaaaggatatgacacaggactcaacttttgagtttgagagaaagagaaacaggcctgaaagatatgacaggaatcttgcggagaatgtcctcaaggccattcctaagattgataagatcaagcctccggggggaagagagacaccttttgaacaggatgaaaggcaaagaggaaaaattgctg

SEQ ID NO: 13380 - DNA, 559 bp, Glycine max
  Clone ID: jC-gmfl02220146h08d1
ataatagttgactatctcagagaaccatagtttcaagagacaaatacatcaaatgtttgaaatcttgtttgagaatcacatcattcacactaatgatcacaacgaaactggtaaactggaccttacaggcaactaatttagcaacaaatattaaaatagcaaaaattaagtgcagcattgttagaattactcttccatggcatgattctcctctgattgctgttgggaaaccttgactttgatctttggtaaagtgagagatggatcctgttgaagcacagaaggagctttgaccaaactgatgccctgctccaactccttcactgcctccttcagcaatttttcctttttgcctttcatcctgttcttatggtgtctctcctccctcgagactctgatcttatcaatcttaggaatggccttgaggacattctccgcaagattcctgtcatatctttcaggcctgtttctctttctctcaaactcaaaagttgagtcctgtgtcatatcctttccatgcactcgacgatatgccttggtccattttaccttacgagga

SEQ ID NO: 13381 - DNA, 498 bp, Glycine max
  Clone ID: jC-gmfl02220146h09a1
gcttcttgtaactggtccctttaagatcaatggggttcctctcagaagggtgaaccaatcgtatgtcattggtacatccacaaaggtggacatctctggtgttaatgttgataaatttgatgacaagtactttgccaaggaagccaagaaaaagaaaacaaagggcgaaggcgagttcttcgaggcagagaaggaggagaaaaatgtgcttccccaagaaaagaaagatgaccaaaaaaccgtggacactactctgttaaaggccattgagaatgttccagacctcaagtcttacttgggtgctaggttttctttgaaggccggagtgaagccccatgagctagtcttctagagtgctaaattcattttcttcattctgtttttgtcgaagcttggtcccaatagttgcactgttttttcatcatgataatgaacattgttcaagaagttcttattccagttgtggttctaagtattttatacttctatagttctact

SEQ ID NO: 13382 - DNA, 497 bp, Glycine max
  Clone ID: jC-gmfl02220146h09d1
agtagaactatagaagtataaaattactagaaccaaaactggaataaaaaactcttgaacaatgttcattatcatgatgaaaaaacagtacaactattgggaccaagcttcgacaaaaacagaatgaagaaaataaatttagcactctagaagactagctcatggggcttcactccggccttcaaagaaaacctagcacccaagtaagacttgaggtctggaacattctcaatggcctttaacagagtagtgtccacggttttttggacatctttcttttcttggggaagcacatttttctcctccttctctgcctcgaagaactcgccttcgacctatgatttctttttcttggcttccttggcaaagtacttgtcatcaaatttatcaacattaacaccagagatgtccacctttgtggatgtaccaatgacatacgattggttacccttctgagaggaaccccattgatcttaaagggaccagttacaagaagc

SEQ ID NO: 13383 - DNA, 450 bp, Glycine max
  Clone ID: jC-gmfl02220146h10a1
gctttttgtaactggagccttgaagatcaatggggttcctttctgaagggtgagccaataacctgtcattggtacatacacagaggtggacatctttggcgttaatgttgataaattagatgacaagttctctgccatggtagccaagaaaatgaaaacaaagggcgaaggcgaggtcttcaaggtatataaggaggagaaaaatgtgcttccccaagaaaagagagaagaccaaaaaaccgcggtcactactatgttaaaggccattgacaatgttccacacctgaagtgttacttgggagctacgctgtgtttgatggccggaatgaaggccgatgatctagtcttgtagagcgctgaagagattatcttcattctggttcagtcgaagcttggctccaatagtggtactgatttttcatcatgataatgaacattgtttagagagtt

SEQ ID NO: 13384 - DNA, 498 bp, Glycine max
  Clone ID: jC-gmfl02220146h10d1
attatatctattgaagtataaaattactagaaccaaaactggaataaaaaactcttgaacaatgttcattatcatgatgaaaaaacagtacaactattgggaccaagcttctacaaaaacagaatgaagaaaataaatttagcactctagaagactagctcatggggcttcactccggccttcaaagaaaacctagcacccaagtaagacttgaggtctggaacattctcaatggcctttaacagagtagtgtccacggttttttggtcatctttcttttcttggggaagcacatttttctcctccttctctgcctcgaagaactcgccttcgccctttgttttctttttcttggcttccttggcaaagtacttgtcatcaaatttatcaacattaacaccagagatgtccacctttgcggatgtaccaatgacatacgattggttcacccttctgagaggaaccccattgatcttaaagggacccagttcaagatgc

SEQ ID NO: 13385 - DNA, 440 bp, Glycine max
  Clone ID: jC-gmfl02220146h11a1
gcgaacatctgaagtcatggtccttttttgattgcttacacactatcatcatcatgggaagtcatttgaaaatacacttatcacataatttttgggtctgcacaggattaaaccttcaagtggtcaaaatatttctctttacttttttgagaaatacattctgcacaggactgaaagttccatcggaggctcgatttaaaatgttttttccttggttgatcatcagacaagatataaactgatgagagtactacgctcatggaattggcatctgatctacagcttctacctgcatccatcttggagagagtgtttactagaggacatagtattacacagcatattgttggaagcacatcacatgatggattacagtcttcttctacgtgttcactatagaactgcccagcatttacgttctaacgtttgatacaaccaat

SEQ ID NO: 13386 - DNA, 443 bp, Glycine max
  Clone ID: jC-gmfl02220146h12a1
ctacaaaagctctctctgtcgctcttggcacctgaatccaagctctgggtcgcggatgtgacgcaacatcaaagatgaggctaacatactgcaggggcgcacctgcctcaacgctagttcacacaaaccaggatcacaccgagagccttctcattacgcatgacctcagcctgcccaaagactatatggatgttgaaaggacacctccaaaggaacatgcatagacgaccactgtggatagtatgcagcagatggcaaaacaattcagtgaaaggacgcgcatcaccggacatcttccactgggaagcaagggtaacatgctcaatagaacagggagctggatggctgatgcaacactcaccaaatcccttgccacgggtggatattcaatgactctacccgaactgaaactgatcaagctgaccacggacttgactgaagaa

SEQ ID NO: 13387 - DNA, 291 bp, Glycine max
  Clone ID: jC-gmfl02220148a01d1
aacccaaatcatgggccctcaaaacaaaaacttgggtaccaattaggaaccgattttaaacaatattacgcacaagtacactaacgagctaaacattctgaaattcccagggccctagtaaaagatattaccacagatctcttaagcccaagggatggttttccaaaaggcctaacctgagacccacgtttcttgggaaacttcttctatcaaagaccctgatgctaaacattgctaaattctgattaggaaacggtacctaaaatgggcttgcttaggacctattaaaag

SEQ ID NO: 13388 - DNA, 507 bp, Glycine max
  Clone ID: jC-gmfl02220148a03a1
gaagatatattatggcattctctatcttcaaacatgttctgtcgttattccttctttgcattatcttgcaggaacctaccaatgcccttagaaagacctacattgtgtacatgggaggacattctcatggtccagaccctatgcctagtgatctggaaacagccacaaattcccatcatgatttactcgcttcttacttaggaagtcacgagaaggccaaggaagcaattatatactcgtacaataagtacatcaatggctttgctgccctacttgaagaggaagaagcatcacagattgcacaaaatccaaatgtagtttctatgatcttgagcaaagagcgcacattgttcactaccaggtcatgggattttcttggactggaaaaaaatggaaaagtcactgcaaactccgcttggaggaaagcaagatatggagaaaatataatcattgctaatattgatcaagggtttggcccgaacaccccaggttcagcgacataggata

SEQ ID NO: 13389 - DNA, 554 bp, Glycine max
  Clone ID: jC-gmfl02220148a04a1
cttttgccaaaaaatacagacctagaccaaaggtctagcaatggcgtcaggacacatggaagctctggttgggtatccgggcaagctcacccttagggtggtcctaacatgtgtcatggcagccactggtggattaatttttggttatgatcatggggtttcaggtggagttacctccatggattctttcttgaaggaattctttccttctgtctatgaacaagagtctaccatgaaagcttcaacagatagttactgcaaattcaacagtcagatattgactttattcatttcatctttgtatctaactgctcttgtggctggtctagtggcatccagcataacacgattgatggggaaggcgtgcaactatgattataggtggcatattctttgtgttaggtgcattactcaatggattagctacaggtttatggatgcttattgttgggagaatgttgcttggttttggtattggatgtgccaatcagtcggtaccaatctatgtctcagagatggccccctataagtacagaggaagtctcaacatatgc

SEQ ID NO: 13390 - DNA, 365 bp, Glycine max
  Clone ID: jC-gmfl02220148a05a1
ggcggagctgcccgatgggtataaacatattaatgcctggaggatgtgaaactgacacggatctccttagtgacggtgatcgaaccgggaaaagcgtaccatgagaacgctctgtcctgcgagttcgaaatgtagtctggagaagctttgtaagcgctggaccacacccaagtggtgtgggaggtcgcgccgtacagggtgagagaccagttgtgctcggaccttgtcgtatcactaggggctgcaagcgactcgagttgtttgtgattgcagtcccaataagccgttcaattacagacaaggctgaatactgacgagagaccggtcgcgaacaagtgccgcgagggcaaagatgaaaaggactc

SEQ ID NO: 13391 - DNA, 539 bp, Glycine max
  unsure (1)..(539): unsure at all n locations
  Clone ID: jC-gmfl02220148a06a1
ctcactctcaacctttctaccttcttcgaatcgggtccttctctcaaagttgcgtatcgacccaacgactcaaagaaccctttttccttcatagtgaaaacgggaaccggacccttcggttcccctctcaagagctccatgctcatgagctgcgagtttaaccttcccggtacaaccggtaccccgttgtttatgcttcacttcaaaccccgcttcggcgactttactttcaagaagacgcagtcttcgatttttgatgggaaagggtttgggtcttttaacacgcaaaacgacgccgttgagaatgggaataatgctgaaacgccgttgatggaatcggccaaggtttcgattcttgactccggcgcctcgatgttctccggatggaggtggctgcgcggacgactctgccggtgcggngaccgtgctgcgtgaagttccggtggggagttaggattccggcggagttcaaggggacaacgcgtttcagaaattccgttctcgtaatggatagatcgcgtggacacatgatggatgcg

SEQ ID NO: 13392 - DNA, 498 bp, Glycine max
  unsure (1)..(498): unsure at all n locations
  Clone ID: jC-gmfl02220148a07a1
ccagaaaagaggctgtacccaggtggcagttacttcgacccactgggcctggcctcagatccagagaagaaagccacccttcaattggcggagatcaagcacgcccgtctcgccatggtgggcttcttgggctttgcagtccaagctgccgccactggcaagggcccgctcaacaactgggccacccacttgagtgacccactccacacaaccatcattgacaccttctcatcctcctcttaagaagaagcaaaagaagaagaatagtctttcttgtgcctggtcattctagttatattgtaaaagtctgtttcttcttcttcggctttgggttgtaattaaacattttctacatagctggattagtagtacttgtgaaaaacttgtaacgtgaaattggagaggctaagcagaaatgcttctgcttgatgttaagtgttctcctgtgaatgttaactatgcacgaaatcgatagggatgacgacggtanagaatact

SEQ ID NO: 13393 - DNA, 493 bp, Glycine max
  unsure (1)..(493): unsure at all n locations
  Clone ID: jC-gmfl02220148a08a1
ctctactctcttattctcaacgtcaaacccaaaaccccttcttcttcttcttctctcgcgccgcaataataatactaaaacatgtccaactctgatggagccactaacgccgtccctcccaacgacgccaacaacaacacaatcgttgagtaccagcagcgaaccaccaccaccaccaccgccgacgccgccgccctcgccgtcaagaaaccgccttgcaaggaccgccacagcaaggtcgacggccgcgggcgccgcattggcatgccgatcatctgcgccgcccgcgtcttccagctcacgcgcgagctcggccacaagtccgacggccagaccatcgagtggctcctccgccaggcggaaccctccatcatcgccgctaccggctccggcaccactccggcgagcttctccactgtctccacaaangcgcccctncctncctccccctacccncttcatcctcggcaaaacgcatcgacctgacgacgac

SEQ ID NO: 13394 - DNA, 371 bp, Glycine max
  Clone ID: jC-gmfl02220148a09a1
aaaagaatcgcattttctttgtgtaagttatgtatcttccaagtgccacaccagcttcactacttaagtacagaagagaagaattggaggttgtaagaggagatgggacagggtatacagaggactatgacagaatctatgattatgatgactataatgagttgagcaatccagatggtggtgatcctagcgcaatccttggtgggtgtagcagatatctataccctcgcagggttagaacaggaagagatgggagctggactgataccaacagtgagaaaccagtcgatgcttatgtaccgagagatgaagatcttgatcacttgaagtcatatgatgcccttacatacgggctcagatccttatctcac

SEQ ID NO: 13395 - DNA, 533 bp, Glycine max
  unsure (1)..(533): unsure at all n locations
  Clone ID: jC-gmfl02220148a10a1
tctaccaccacctagtatctctctaactttgagaaagtgtgtgttgtgtgttctcttctctcactaaaaaaggtttcattaattctatattatggctcagaccacagcgaatcacacagtgaccgtatctgggtgggcagctcatgattcttcgggcaagattaccccctacactttcaaaagaagggagaatggtgtgaacgatgtgacaataaagatactgtattgtgggatctgccacacggacctccactatgcaaaaaatgaatggggcattactatgtatcctgtagtacccggacacgagatcattggnggtggtaactaaggtggggagagacgtgaaggggttcaaggaaggagacagagtgnntgtgnnggtgtttggcggcttcatgtttgnaatgtgagcactgncagaccgatcagganaattactgtgaaaagttgcaatttgtctacacggagtattctgggatggcagcatcacctatggnggctactctcaaattttgtcgcagattacagatatg

SEQ ID NO: 13396 - DNA, 572 bp, Glycine max
  Clone ID: jC-gmfl02220148b01d1
gtggaggcgattactttatgttttttgatcaaatctcctgaagttaataattggctccactttacaaaaaatagcgtacaaagagaagctggcaaattcacaacagagcacgaaccagaaccattcacttgttgatcaccgtgtttgacaacacagcacgaactatactggaccacatgaaactgtgcatagctgaaagcccaacctacaccaaattcaaacacttgctggattttacaaaactaacttacatttcctccttcttatgcttctgcctcatttcttcccacccctttgaactgattggtattagtgttacaagtatgtaaaccctagattttatttcaatgttttaataaacaacccaagaaatatgttacaagttacatgatacataatcatagcctcacggtccatacgctactccaaacctttaaacatttcaccccgtagtttagatcagatcatccacccttccgtttaaaaaaatcacagtcgggtcagaacttcaaaccgggacgggcgtaacgggaacggttacggagaggataagagaaagagaagattctaga

SEQ ID NO: 13397 - DNA, 298 bp, Glycine max
  Clone ID: jC-gmfl02220148b03a1
gtaaaagggtagtcatgaaatggattgtgattgcaatgataggcccaatgtgaggtatgatcgtggcattagtgcaatcctttatcgggaattctttttacatgttgacattggggcatttcttttattgagcccctgaaagaaaacaaggacactaagaaggtcattgcctgtgatttgtacatttttttaaaaaaaaaatattcctcccaaaaaaaaaaaaaaaaaaaaaaaaaaaaaaaaaaaaaaaaaaaaaaaaaaaaaaaaaaaaaaaaaaaaaaaaaaaaaaaaataaaaa

SEQ ID NO: 13398 - DNA, 588 bp, Glycine max
  Clone ID: jC-gmfl02220148b04a1
ctcgagccgaatcggctcgaggggatgtttgactgcttacacatgtgctcagatgcgcatgaatgcgtttagtagaaaatgtcctgttaggtagtcatcagcaactgtcttctctgggttccatgccctcgttggcatgcaccataggatgccgagtaaatgctgatgcagataattgcagtttctcagtattctctcaatctcttgaagaaaatggtgtggtcttgcctctatgcatctgcttaccttctgtgggcctcctgtgtgataataatttctttctttagtacccaattgctttgtccggcctagggcagcacaaaatgctgcagatgaagcaaaagctagtttaggacacattgatggggatcatctcacgctcttgaatgtataccatgcctacaagcaaaataggcattgaaatcagcggacagtgttagacaacaacttgtgcgaatcatggctcggtttaacttgaagttatgcatcactgatttcaatagccgtgactactatgtcaacattagaaaggcaatgctggcaggatatttcatgcaggtggcccatctggagcggacaggacattta

SEQ ID NO: 13399 - DNA, 520 bp, Glycine max
  Clone ID: jC-gmfl02220148b05a1
gggaacactccatgtccaccaccaaagtctcctgcacaggctacatgccccattgacacgctcaaactaggtgcttgtgtggatcttcttggtggcttggctcacattggcttgtgagaccctgttgcgaaccagtgctgccccgtgcttcaaggcctgattgagcttgaagctgcggtgtgtctttgcaccactcttaagctgaagcttctcaacctcaacatttatgtcccacttgcccttcagcttcttgtggcttgtggcaagtctcctcctcctggctacacctgctacctctaaaccagtgaaaggattgaggaaaatatggtcaaaatcgacatgagaggatgtcgagccacactatctgtcttctgtcctgattggaactgactgtgtttgctttgctattatttgaaaaaccgatcttgctgtaattgagattgttgcatgtatgttgtaatcctaggcaagtagcagcaaagatgcttctctgagacatgttcaattattaatgtatatg

SEQ ID NO: 13400 - DNA, 585 bp, Glycine max
  Clone ID: jC-gmfl02220148b06a1
gtgaatattaaatgttctacatcattgtcttctgctccggctatatgcgccattgacacgctcaacctctgagctagcgcggatctcttcgtagggtagactgacaccggatcgtgagaccctgctgtgaacaactgcatgctcatgctctacggcctgaaccttctcgaagctgccgggtccctgtggaccatgcttaacttgaaactcctctacctcgactttactgtcccgatgacccttcatctgattgtggatggtaacgggtctgcttcttctgacaccccctgctacgtctaagccaatgagaggattgctgaaactccggtcatggtctacatcagaggatgtatagtcgaattatgtgtcttgtggcctgactgcatctgctggtgtgcgctgacctattatgtcgaagcacagacgtgctgtcatggagattcgggatgagtgaggaaatcctaggcgtgtagcgggaacgacgcttctctgagacatgcgcaactagtaatggatatgaactgcgcgatcacatgatggattgcggagattcaagaagggaaggggacgccgagagaaaccgag

SEQ ID NO: 13401 - DNA, 546 bp, Glycine max
  unsure (1)..(546): unsure at all n locations
  Clone ID: jC-gmfl02220148b07a1
aaataatcgggtcgggtcgagatttggtttataaagaaacggactcagtagcgggttacggcccaattcccagcccgcagtccctacggctgctccattaacaatcaaataatcgggtcgggtcgagatttgaggttcaaacatcgtctgatattccgagaatgtaccactccagtgccgttttgcttcgtgacggtcgcgttctggttgctgggagcaaccctcacatttattacaaatttacgaatgttttgttcccaacggagttacggatggaagcgttttctccttggtatcttgagcctggattctctagcgtgcgtcccacaatagtgattcctgcgtcccaaacaaaactcaagtacggtcagacgttgaggcttcggtttgaggtgatgagcgcgactntggttggggattcgggttncggtacgatgctgtcgccgtcatttaacacgcactcgttctccatgaatcagaggatgctggtgctggagccacacgatttgagtaatggttgggaatcgacgtacgaaggtgaagtta

SEQ ID NO: 13402 - DNA, 505 bp, Glycine max
  Clone ID: jC-gmfl02220148b08a1
ccaccccagaaatagagagtaagcctgagatcatggaaaaagttggtgtggctgtaaatagcaaaaatcaagaatccaaagcaacttccaccattaccattaagggtttcatgagccttctaatgaaaagtgtagatgagaatggtgatggtagcaagagagttatttctctgggtatgggtgacccaactctcaccacttattttcccatctcaaatgtagctgaaaaagctgttgctgaagcacttcagtcacacaggtttcgtggctatgctcccactgcaggtcttccacaggccaggattgcaattgctgaatacctgtctcgtgaccttccttaccaattatcaagtgatgatgtttacatcacttgtggatgcacacaagccattgatgtttcagtggcgatgcttgctcgccccggtgcaaacatcattcttccaaaccaggtttcccactctatgaacttagcgcttcattagaggagttgaagtgaggcattatg

SEQ ID NO: 13403 - DNA, 515 bp, Glycine max
  Clone ID: jC-gmfl02220148b09a1
aatcattacaactagagataaacacctgtttacgggacttaaagttgattatgttcacgaaatgaaggaaatgcacgcaaatgagtcccttgaacttcttagttggcatgcttttagagaagcaaaaccaaaagaagacttcaatgaacttgcaagaaatgtagttgcttattgtggaggactaccactagcacttgaagaccttggtttatatttaactaataggactacaaatgagtggagaagtgcattgtcaaaactagaaacaactcccaatcctcatgttcaagagatattaaaaataagctttgatgggttaaatgatgagaaggaaaaagatatatttcttgatggtatgttgcttctttattggtaaagacatagcctatgttacggagatactaatggttgtggactacattcggactgtggaataccagtcctcatggaccgtagcctcataaagttgaaagaacacaaacttgaatgcatattttgtaccagaatgggagaga

SEQ ID NO: 13404 - DNA, 545 bp, Glycine max
  Clone ID: jC-gmfl02220148b10a1
ctaatatttttctcactgtcttgtctctccagagaactgtatagagagagatggcagctgcaacatctggtgctgtgttaaatgggttgggatcttccttcttgagtggaggaaacaggagccaaacccttctggccactgctattggaggcaaagttggtgctgctgctgttactgttagtcctagaagactcattgtggtagctgctgctgcaccaaagaagtcatggctccctggtgtcagaggtggtggcaacctcgtcgacccagaatggcttgatggatcgctaccaggtgactatggctttgacccactaggccttgggaaggacccagcattcctcaaatggtacagagaagctgagctgattcatgggagatgggcaatggctgcagttctaggaatctttgtgggccaggcatggagtggagttccatggtttgaagctggagctgacccaaatgcaattgctcctttctctttggtactcttctgggacccagttgattctcatggggtgggttgaaagcaagagatgggtgga

SEQ ID NO: 13405 - DNA, 412 bp, Glycine max
  Clone ID: jC-gmfl02220148c01d1
gaagagagaaagagacacctgttattaatcagaagagttatgtttacatggatacagatttcaacagaggtctcttagaaatcaaattctcaccattcatgttactttcttttccctaaacatcgaaggttctccctccctctctgttgtctctacccaaagaatttgtactagtggcttttctgtacctagaatgactctagagtgtatgattgctttcgaacccattcatcataatcttgcatcgtctgctgaagtaggaatggctccagcttgtccaccaaagcttgcatcattatatttccaggaccctcaacagctgaagtaggcatcatggtaaatggttgtgtgtagatctgcaggcagagatctttctttacagatgagagaggcaaatgcaaaaatccataat

SEQ ID NO: 13406 - DNA, 546 bp, Glycine max
  unsure (1)..(546): unsure at all n locations
  Clone ID: jC-gmfl02220148c02a1
tcctcctacaccaacaaaaatggcaccttctccacaagaaatcatcttccgatccccactccccgatattcccatccccacacatctcccattgtactcttactgcttccaaaacttgtcaaagttccatgaccgtccatgcctcatcgacggcgacaccggcgagaccctcacctacgccgacgtcgacctcgctgctcgccgcatcgcctccggcctccacaaaatcggcatccgccagggtgacgtcatcatgctcgtcctacgcaactgcccgcagttcgccctcgccttcctcggcgccacccaccgtggcgccgtcgtcaccacagccaaccccttctacacgctcgcggagcttgcgaagcaagcgacgggcacgaaaaccaggctcgtcataacgcaatncgcgtacgttgagaaaataagagtttcgcggacagcaacagcgatgtcatggtgatgtgcattgatgatgatctttcttatgaaaacgacggcgttttgcatttctcaacgctcagtaacgccgacgaaacggagccc

SEQ ID NO: 13407 - DNA, 555 bp, Glycine max
  unsure (1)..(555): unsure at all n locations
  Clone ID: jC-gmfl02220148c03a1
gattgatgatttgagcgtgcatgggtgagatgataagcacgcaacgcaattaaaaagaattaatatgcaacgaatggatgtgtttgaagctggcctcatatatcaataatggatttgatctgattctggctcaacgttcatgacgatcaccacccactactccattccgggaagctctgggtatctggacatatacccagagaggaaagtctctgcctttcaaaacccttacattatgggcttcactgctgtcgctagcattggtggattgctctttggctacgacactggtgttatatctggagcccttctctatatcaaagatgattttccggaggtcaggcacagtaattttctccaggaaacaattgtcagcatggcagtggctggtgcaattgttggggcagcagcangtggttggattaatgacgtttatgggagaaagaaggcaaccctcattgcagatgttatctttactctgggagcaattgtaatggctgctgccccagatccttatanttctcataatggcccgtgtttggttgggttgggtgt

SEQ ID NO: 13408 - DNA, 399 bp, Glycine max
  Clone ID: jC-gmfl02220148c04a1
cggctcgagttgccctaaatcaccaccacatagctcgagccacctagaaccaccacaccatcaacatgccacccaaaaacaccaccaccaaccaaatcaccaaccactgcgccacccatctgcctcatcagctccgacgtcgtttacctgaagggatttctcaatctatgggtaaattacacaacttatggcattctcaggattaataagagctaggaaggtgttgagcaatgttctcttgttattattcccaatatttgatattggattattcatagcataattaaaccctacctattcattgttgtttagttatttgtcggcatgagttactacctagatcaaggttctgatggatggaagaattaaaaaaaattatattaattgtagaattttctc

SEQ ID NO: 13409 - DNA, 500 bp, Glycine max
  Clone ID: jC-gmfl02220148c05a1
caggatagaaaatttgaatggagagtggtgaagactattccctgtttgagactaggaaagacaaaggaaggcacattcgaaggatctatgcaatctctttgtttgtggccatatgcttcatctgggcttacagattgagccacatacccgcatatggcaaatgggcttggcttggtttgtttgctgcagaactctggtccggtttctattggctctttggtcaagccctccgctggaacatgctgttcagaaaaaccttcatcaatagactctctgaaagatatgagaatagcttgccgagagtggacatgtttgtgttcacggcagacccaatcattgagccacccatgatggtgattaatacagtgttatctgtgatggcttatgactatccagcagagaagctcagtgtgtatctctcggatgatgcaggctcagacataactttttatgctcttttagaggcttctacctttgccaagcattgggtgccattctgc

SEQ ID NO: 13410 - DNA, 552 bp, Glycine max
  unsure (1)..(552): unsure at all n locations
  Clone ID: jC-gmfl02220148c06a1
gttattatgttggatttgcgagaattggaaataggttaaagcttattgaaaccgtagtttattttctaccttgctgcagttggaacaccttccagccatggttactggtgttttcaccgatgacaataacatgcagtttgaggccacaactcagtttcggaagttgctttcgattgaacgtagcccacctatcgaggaggttattcaagctggtgtagttccacgctttgttgagttcttgatgagggaagattttccacagctgcagtttgaggcagcttgggctttgacaaatatagcttctggaacttctgaaaacaccaaggtggtaattgatcatggtgctgtcccaatttttgtaaagctccttggttcacccaatgatgatgtccgtgaacaggctgtttgggcattaggaaatgttgccggagattcacccaatgccgtgatctntgtctcggtgatggagctttgcttcctctactggcacaattgaatgagcatgccaagctttctatgctaagaaatgctacctggacactatcgaatttc

SEQ ID NO: 13411 - DNA, 491 bp, Glycine max
  unsure (1)..(491): unsure at all n locations
  Clone ID: jC-gmfl02220148c07a1
gcaacttttcatttgagaatcagccctgtctgtctgtctctctgtgttcgactcgatcgatcacagctagaagatttagtagttcatatcacgctaacggactatccaactaagaaaaaacagagccgccgaatcacaattttgctcgatgcttcttcagatcagattgcttatagatccagtcgtcgattcgtgatctgagctgcagattggcaaataaaaaccctaacatcggtaatcggggaattttgaaggtggctcagcccttgcgtcatgctcttgcgcgtgtttgtcagattgatggtagtagtatgagagatatgcaccggaattctacgggtagtactaacactaataagatatcatcatcggcaataaggctgccctcacctcaacaatctctaagacgctnngggattgngttcccagatagctacggnggagcactcttctctatcgtcttccctgaaaacgtggcnagtcaagcgact

SEQ ID NO: 13412 - DNA, 503 bp, Glycine max
  Clone ID: jC-gmfl02220148c08a1
ggtgtgaagaaaatattaattgttgattgggatgtccatcatggaaatggtactcagaaaatgttctggaatgattctcgagttttattcttttccgttcacaggcatgagtttgggagtttttatccagctaatgatgatggattttataccatgattggagaaggagcaggtgctggatataatataaatgtcccctgggagaatgggcgatgtggtgatgcagattactttgcagtgtgggaccacatcttgcttcctgttgctaaagaatttaatccagacataattatagtttctgctggatttgatgcagctgttggtgaccctctgggaggatgccgtgtcacaccatttggttattctgttctgttagagagttgatgaattttgctgaaggtaggattgtactgattttagaaggaggatataaccttgattccatcgcaaaatcaatgcatgcctgcttggaagttttgctagaggacagcctgttattggat

SEQ ID NO: 13413 - DNA, 502 bp, Glycine max
  unsure (1)..(502): unsure at all n locations
  Clone ID: jC-gmfl02220148c09a1
ctcgagccgtttttttttgccgttgaaaaaaatggaaaaggtggctccgcctccgattctgatgcaccggaagcgcgatctatcgtacgacatcgtttcggcgggtccgaacgagagctggaggtgggagtgggacagcgtgcgtttcgcaggaaaaccaccgccgccgccaccactgtccccaaacaacgacgtcgttttcgaggcggaaagtgtcgttcctcctctacagttaaagctcggaggaacaacaagagtgaataacaataacatcaatatcaacgttagcaacaagagagttaggtcggggtcccccggaacggngtcgtatccgatgtgccaggtggacaactgcagggaggatctgtcgaaggcgaaggactatcaccggaggccaaggtgtgcgaggctcatagcanagcctcgaaagcgcttctcgcgaatcaaatgcaaagattctgcagcagtgtagtaggtttcacccgctctcgagttcgatgag

SEQ ID NO: 13414 - DNA, 342 bp, Glycine max
  Clone ID: jC-gmfl02220148c10a1
ctaaagccgacaatttcgaggctgagaagaaagtggggtcagtggatgagcctccgcttctgatgtaccggatgctcaagctatgaagacacttacatgaataacatccaaattagatctgaagaggctagcgacacaagttcgcagtctcgaccgataacatagtgcgagatggaaccaatgcgatgaaaaaaccagcgccgactataagttgaaagcgtactctcatcctcgtaattcaagacttagatgagctcaaataggatgcaacatgaagattaatatgaacgttagcatcaagagaattatgggatttgcaacctgaataagcgtatgtatatg

SEQ ID NO: 13415 - DNA, 275 bp, Glycine max
  Clone ID: jC-gmfl02220148d01d1
gtattataattgggggacaggcaacaaaattagaacgaagaggggcttagaattaaacaggattccccaaaaacgacaagtaaaaaaagaaaaaatacccaaaaaagatggagagcaacaaaaaaaaaaaaaaaatgaaaaaagaaagcaaaagagaaccattactcaaggaaatgagaaccacaacagcaatcggatagcggacaaaactgaaataaccccaatgattgtggaaaaaggtagaatgaggccacaggtaacaaaaccctaaaaga

SEQ ID NO: 13416 - DNA, 533 bp, Glycine max
  unsure (1)..(533): unsure at all n locations
  Clone ID: jC-gmfl02220148d02a1
ataacatagcatagagtgagaagtgagaagagaaaaatggcaatctccatacccagtagacaacttttcatagatggagagtggaaagtccctcttctcaacaatcggtttccgatcatcaaccccgctactgaagacatcatagggcatattccagccgctactaaggaagatgttgaccttgcggtggatgctgctaaaagagccttttcccataacaaaggcaaagattggtcttcagctcctggctctgttcgtgctcgctatcttcgagccatcgcttcaaagataacagagaaaaaggatgaactaggaaagcttgaagcaattgattgtggaaaaccactagatgaagcactggcagacctggatgatgttattnggttgttttaactactatgccgagcttgcagaaggattggacgcaaagcaaaatgctcctgtatcccttcctatggaaaccttcagagttatgttctcaagagcccatcggagtttgtgcttaattactccatggaactatnctctattga

SEQ ID NO: 13417 - DNA, 606 bp, Glycine max
  unsure (1)..(606): unsure at all n locations
  Clone ID: jC-gmfl02220148d03a1
gaaaaagagaagagcttatggtggaaggttgaagaaagagatgagtggaactggaacattcttctacggttcggtaattcagccgttgattcgctaccactatctatcaccaccaatccctattcgtcccttatgctgcatatcccctctcatcacctccattcactccaacgacgccgtttctccgcaaaacggaacgcttcgcttccagacagagcatcagcagcacagcgaagaaccgcttcccgttccgtcactctctgccgctgaagaaaacaaagcaacaacgaagcttcgaaagaagaaagaagacgacgtcgtttccgataaccgcttcaagctccgcaacggaagagaggtttttgaagaaaaagcgtacctcgtaggcgttgagcgcaagaacgatgttcaggatttcggcatcgaagagtctctgagcgaattgtcgcagttagctgacactgctggattattggttgttggctctacttaccagaagcttacttctncaaatcctangacgtacattggctctggcaaggtttctgaaattaagagtgcaattcatgcaatgngcgttgaaaactgtatctctgatgatgagct

SEQ ID NO: 13418 - DNA, 555 bp, Glycine max
  Clone ID: jC-gmfl02220148d04a1
ctcgaacccttgagagcgagaaaccacgtttctctcttgaggttaattattattattattgagtattgagcatggaggcgccatctctcaccaaacccaacgacccaacaaaaccttccaacacttccagcacccttagtctggagggggggccgggcgaagcgagcccactccgaaaaatgtttgcggtggcgtccatcgccgccggcatacagttcgggtgggctctgcagctgtctctcttaaccccctacgttcagctcttaggagtcccccacgcggcggcctccttcatctggctctgtgggcccatctcggggctggtggtgcagcccattgtgggctactacagcgaccactgcacctctcgcttcggccgaaggcgccccttcatcctcggaggcgccttagccgtcgccatcgccgtgttcctcatcggctacgcggccgacataggacactccgctggcgacgacataactaaaaaaacccgaccccgtgcagttggggtcttcgtcataggattctggatcctagacgtggccaacaacatgc

SEQ ID NO: 13419 - DNA, 592 bp, Glycine max
  unsure (1)..(592): unsure at all n locations
  Clone ID: jC-gmfl02220148d05a1
accttgtgatatctctctcttttaatttctaggatcaaaccaaaaaatggtcttagaagagagtgtagtgcatgatgtgaggctatcctcagttgggccgggccgggccaccgggtcggacgtattccacaacccgggtggcttggacttggccatgaagcttcactaccttagagtggtgtacttctttgatagtgaggctgcacaagacctaaccatcatgaaaattaaggatggcatgttcactttgttcaaccattacttcatcacctgtggccggttccggcgatcggattccggtcgacccttaatcaagtgcaatgattgtggagcaaggttcattgaggccaagtgcaacaaaaccctagatgagtggctagccatgaaggattggcccttgtacaagttgctcgtctctcaccaagtcattggcccagaactatctntttctcctcctgttttgttccaggtgactaaatttaagtgcggcggaatttcattgcgtcttagttgggcccacgtattgggggatccttctgtcgcttcagaattcattaactcttgggtctaatattgaaaaatatggcctaaa

SEQ ID NO: 13420 - DNA, 532 bp, Glycine max
  Clone ID: jC-gmfl02220148d06a1
ctcgagccgtatcggtttgagcgttcgaggggagatgcccgagagagatatcgagagagagagaaagacacttagccttgtatatctctcgatgtcctttgacgctcatgacccttgatgtgtgtgagaaatcgttcgatgtccattggttcatctgagtgtcgtaatggatatcgcacacctttcttgacgtcgaagctacgtgataccttgctatatctactactgtggctgccaagcgctctctgtacaccacatgactaataccgtctgcgctgacgccgtcatcggtctctgcgcgtcgccggtcaatagttcacgccgtatcgagtgggctcatgagacgctctcacgctgagtaacgcaagatcgagttgtactctcacggctttgacgcacgctgcaccggcgatggaatcactaggtgagggctcaatcacatgaccgtgactcaccttgacctagtcaagtgtctaaatgcagattgaccctgcttaggacaggagcttagcggctggcaccggaggaatga

SEQ ID NO: 13421 - DNA, 237 bp, Glycine max
  Clone ID: jC-gmfl02220148d07a1
atctcattcttcacctgcaactatttggattgctgatttttggtacattctccactttttagagtttttttccttccaatttgttcatatggatgatcattaattattgtccaaaagttgatatttttttcatgttctttctgcagttaataccatatttactgatattggcgcatttctttgagaaagttactaattcctagatagaggcaaaaatgttgggaattttcaaggaga

SEQ ID NO: 13422 - DNA, 521 bp, Glycine max
  Clone ID: jC-gmfl02220148d08a1
gggaacactccatgtccaccaccaaagtctcctgcacaggctacatgccccattgacacgctcaaactaggtgcttgtgtggatcttcttggtggcttggttcacattggcttgggagaccctgttgcgaaccagtgctgccccgtgcttcaaggcctggttgagcttgaagctgcggtgtgtctttgcaccactcttaagctgaagcttctcaacctcaacatttatgtcccacttgcccttcagcttcttgtggcttgtggcaagtctcctcctcctggttacacctgctccctctaaaccagtgaaaggattgaggaaaatatggtcaaaatcgacatgagaggatgtcgagccacactatctctcttctgtcctgattggaactgctgttgcttgttttgctattatttgaaaaaccaatttgtttttaattgagattggtgcatgtatgctctaatcctaggcacgtagcagcacagatgcttctctgtgacatgttcaattatttaattatatga

SEQ ID NO: 13423 - DNA, 574 bp, Glycine max
  unsure (1)..(574): unsure at all n locations
  Clone ID: jC-gmfl02220148d09a1
ggcaaatatggtctctttaaggccatgctttcttttcattcttatctgcatcgcgataattaatcatgcacattccaacaatgatcggaagacttacattgtctatatgggtgatcatcctaagggcatggactccacttccataccttctcttcatacatccatggctcaaaaggttcttggcagcgacttccaacccgaagctgtacttcacagctacaaaaactttaatgcattcgtcatgaagttaacagaagaggaggcaaaaagaatggcagaaatggacaacgttatctctgttttcccaaacaagaagaatcgtcttcacacaacaaggtcgtgggacttcgtgggccttcctcagaatgtgaaaagagcaaccacagagagtgacataattgtgggagtattagacacgggagtttggccagagtctgagagcttcagtgacaaaggatttggtcctccaccaaccaaatggaaaggatcttgtcataacttcacctgcaacaacanaataattggtgcaaagtacttcaatctggaaatcactttaccaaagatgatatcatat

SEQ ID NO: 13424 - DNA, 462 bp, Glycine max
  unsure (1)..(462): unsure at all n locations
  Clone ID: jC-gmfl02220148d10a1
atttctcagcgcgtaaagcatggctttgttggtggagaaaaccacgagtggtcgcgagtacaaggtcaaggacctttcccaggccgacttcggccgcctcgagatcgagctggccgaggttgagatgcccggcctcatggcctgtcggaccgagttcggcccctcccagcccttcaagggggcccgcatcaccggctccctccacatgaccatccagaccgccgttctcattgagaccctcaccgcccttggcgccgaggtccgctggtgctcctgcaacatcttctccacccaggaccacgccgccgccgctattgcccgcgacagtgcncgncgtcttcgcctggaaggggtgagacccttcangagtaactggtgggtgcaccgagcgcgcctcgactggggccccggtggtggacccgactcatcgtcgagaccgtggtgacgctacccttctcatcc

SEQ ID NO: 13425 - DNA, 434 bp, Glycine max
  Clone ID: jC-gmfl02220148e01d1
atactgtgaatgtgaatcatgtgtatctttatataccttacagttaattacatgtatgtatgcgtatatatatatacatatcagcctgtaaaattgaaagctcctaatatatacttatacctatgtatatttcctattatggacaaaagtcctgaaatcgtcaacacggactgataccatgctgatgaagccagacgtcactgcatccaagagctaggaacaatttgcagagccttagaaccacctacatgttgttgcagtttacttgttgactcaactgtgtgcattagaactgtaaccactggagtcaatgcactaattattggtaatccatatctgatagggccatgttgattatcatatgaatcatgatcactttcattagccaagatctgtcctgaggacgtaactgaaggcttcccaagtgctgtaag

SEQ ID NO: 13426 - DNA, 553 bp, Glycine max
  Clone ID: jC-gmfl02220148e02a1
tttattttatttctatttcaaataaaatcgtgtcttctcctctgtactgagacatggccgaagaagaagaagaagaagaatcagagctcagcgataagcagaaagtggaaatcgcgaaatggttcctcctcaattctcctcccggagaaatccaatacgttgccaaagatgtgaaatccattctcaacaacgacgatttgtacaaggaagccgcttccgaggcttttctcttttacaacaaatcgcacttgatttcccttccaatgtccaaccgaagcggagacgtactggttacttcttttggtgagcttgagggtaatgcatttcttgaacctaggactgcgcaagtagcaattgttgatcatgttaaacaagtttgtacagaggtgagacctgccacagacgaagaacttccatctccatatatcgaagaatttcgatgcaatctggatgctgaaatacttaaatatgttgaagaaacttatccaaaggtttctgctctgtctactgtgtagtgggaaggatgtagaggggcccgggtgctgatttgagc

SEQ ID NO: 13427 - DNA, 432 bp, Glycine max
  Clone ID: jC-gmfl02220148e03a1
ctctactctattgttatcagcgtctttcacagaaccacatcgtcttcttatggtctcgcgccgtaataataagactaacacatgtccaactatgctggaaccgctaacgccgtccttgctaacgacgtcaacaacatcacaatcgttgagtaccagcagcgaaccaccaccaccaccaccgccgacgccgtcgccctcgccgtcaagaaaccgccttccaaggaccgtcacagcaaggtcgacggccgcgggcgccgcattcgcatgccgatcatctgcgccgcccgcgtcttccagctcacgcgcgagctcggccacaagtccgacggccagaccatcgagtggctcctccgacaggcggaaccctccatcatcgacgctaccggctccgggaccactccggcgagcttctccactgtctccgaccacaag

SEQ ID NO: 13428 - DNA, 530 bp, Glycine max
  unsure (1)..(530): unsure at all n locations
  Clone ID: jC-gmfl02220148e04a1
tgaagcttttgcgtcaaattagatgaattgtgcaaccatggacttgtaacacaagctgcctccctcatatctaacagcagttctgggggtggtcaggcttctctcagcatgctgacatatactggaggaaattcaatcggaaatcagtccttccatggagaaaggaagaaaagcagcacgtggttctaagagaaagcgccgaagtttcaaggataaggatcactatataagttcaattccaaaaaatcaacatatggaggctggcctttcagtaaaagctaatgaagactttgcttctaatagattggaagcagctgtcctcgatctagtggcagatgatggtgctggcattcagaacaaagatctatgtatcactgggataagaagggtaaaaagtgcatcaagttaaacaatggtgatncgtgttgctgcaaatggaaagaataagacgaagagtggtgcaaaaacaaaggcaaacaagactggtatatataagaagtggaaagagcgctcacatggtaggatatcac

SEQ ID NO: 13429 - DNA, 546 bp, Glycine max
  Clone ID: jC-gmfl02220148e06a1
agttggcattcggctcgagcaaaatcgccctgtagactgtacactgagactggttttaaagcaacgccacttgttccagccatgcctcctcaagagacccaacaacctctgttatcggaggagcaagaagagacagcctacgattcctcggagaaggttgtggtggtcggaatcgacgagcacgacggcgacttggaggcgccgccgttctcatggcggaagctgtggctcttcaccgggcccgggtttctgatgagcatcgcttttctggatcccgggaacctcgagggggatcttcagtccggtgccattgctgggtactcgctcctgtggctcctcatgtgggccacggctatgggccttcttatccagcttctatcggctcggctcggcgtggctacggggagacacttagccgaactctgcagggaagagtatcccacatgggctaggattgttctgtggttgatgactgaggttgctcttattggcgctgacatacaagaggttattgggagcgctattgctatcaggattctcagtaac

SEQ ID NO: 13430 - DNA, 441 bp, Glycine max
  unsure (1)..(441): unsure at all n locations
  Clone ID: jC-gmfl02220148e07a1
ctcccctgaagaagaaaaaataaaataaaataaagaaagcaagcttcaaagtttcaaactttgcaccaccccacctccaatttcaaggaccagaactcatttttccccaatttaaatcctttttcgctacccattttgggttttggttcgtgtaacttctacttctggaactaaagttgagctttttaccttatttgggttctttgtgtttagcttttttttttttttccttctttttcatggcgattgggcttcttctgtggctgttactggccaagggtcttgccatggagggtgccgtgggggtcacattttcttctaggctcattcaccgtttctctgaagaggctaaggctcatttggcttaaggggcagcgacggntctgtgcttcttcaagcgtggcctgagaggaacagctctgagtatttcaggttgcttct

SEQ ID NO: 13431 - DNA, 581 bp, Glycine max
  unsure (1)..(581): unsure at all n locations
  Clone ID: jC-gmfl02220148e08a1
ggctcgaggcattgcatcgcatttgatttttaaacgatgcgccactgctagcgcatactctgaactctcaccatatatatataatgcgccggcggtgcgcatggagataacctacgcatcccctagcttctccgacctccgcgccatgccgtcgacggcgaccgccgcgcgtcccgtcaggatcattcccctgcagcacccgaccgccacgacgtcgtcgccgcagccgaacgccgccttctcgcgctggacggcgaagctccggcgaatgacgtggctggagtggattgaattcttcctcccttgcctccgctggattcgcatctacaactggcgcgagtatttccaggttcgatctcatggccggaatcaccgtcggcgtcatgctcgttcctcagtcgatgtcgtatgcgaaattggctggacttcaaccgatatatggactctagtctggnattgtgcccctatntgtatatgccatatttgggtcttctcgccagcttgcagtatgtccagtggcattggttactctctcggtctctatgtgctggtagcatagctgatcatccactgaatataca

SEQ ID NO: 13432 - DNA, 593 bp, Glycine max
  Clone ID: jC-gmfl02220148e09a1
cacccttataaaaagaaactcattttaactcagactttgcatttcaccttatctatctatcttttctaacatggctgctgggactggactctttgcagagattttggatggagatgtgtacaagtactatgctgatggagaatggaagaaatctgcttctgggaaaagtgttgccatcatcaaccccactaccagaaagactcaatacaaagttcaagcttgttcacaagaggaggttaacaaggtcatggacttggcaaaatctgcccaaaagttatgggcaaagaccccactatggaaacgtgctgaacttcttcacaaggcagctgctatccttaaagagcacaaagcaccaattgcagagtgcctggtgaaagaaatagcaaagccagccaaagatgctgttacagaggttgtaagatctggggatctggtttcttatactgctgaagaaggtgtaaggattctgggagagggaaagttcttggtgtcggatagctttcctggaaatgaaaggacgaaatattgcctcacatccaagattccacttggagtgattttagccatttcaccttttaactatcccgtcaatc

SEQ ID NO: 13433 - DNA, 528 bp, Glycine max
  unsure (1)..(528): unsure at all n locations
  Clone ID: jC-gmfl02220148e10a1
attttgttttctaatatataataactcctctgcttcaacacactacttctcactctccctctctaatagtaatagtaatatacataagtaacataaccaatggaagcgcgtgcaggagccaatcagcgtattgcaagaatctctgctcatcttcagcctccaaatttccaggaagggagtgatgttcttcttaagagtgctgagtgcagagcaaagggtggggcacctggattcaaagttgcaattttgggggctgctgggggaattggtcaacccctttctttgctgatgaagatgaacccattggtttcagttcttcatctttatgatgttgtcaacacccctggtgtcactgctgatgttagccacatggacactggtgctgtggttcgtggctttctggggcagcaacaacttgagagtgcactcactggcatggacttggtaatcatacctgctggggtaccaaggaaacctgngatgacaagagatgatttatttaaaataaatgctggaattgtgaggacc

SEQ ID NO: 13434 - DNA, 549 bp, Glycine max
  Clone ID: jC-gmfl02220148e10d1
ggagggtgctagtcggggggggggcgggcttttttttttttttgttataaatattttaatattaaagaaaataagatctggaattagtacaaaaggctgatattttagtatctttctgagattattaagcagttccactgatgtcaaatccgttatcatcaagcaattacggatgacaccaaaaatatagagtactattcttaagaagaagaaaaaaatctatgaacaaagagaagcattacacatggtccttatgtataagagacaaaaactagtttttccttatcacatttattttctgatgaactctacacccttctggatgcttcctgctaactctctctttggcttttccaatccaatcctttcatactcattcaggggacccagttgataaacctcttctgctccagcacgacctagacgtaccttggatgcaaagaagggaagctccgtaacctgagaatcaacgaaagcacactccactaccccagcttatggttttaagccacggaggcatgcaccatcaaacttggcagctgcatatgc

SEQ ID NO: 13435 - DNA, 397 bp, Glycine max
  Clone ID: jC-gmfl02220148f02a1
ggaggccaaggagaaggaacttgccaatgggagattggctatgttggcattcttgggattcatagttcaacacaacgtgacaggcaaaggaccatttgagaacctattgcagcacctctctgacccgtggcacaacaccatcatcaatacaattcgtggctactaagtttgtatccaatgacatggataagcctgtgtccttctcgtgtaatcctgaatggatgaattttgagagtgatttgggcatgattgttatgatccgtctattttcatgtacagaggaactacgatggttttacattgttatttagactgtccatcaatcagtaatcaagcatgatactttctaaaaaaaagatgcagatgaaatggaataagagaaacgaaaaaatgaaaa

SEQ ID NO: 13436 - DNA, 536 bp, Glycine max
  unsure (1)..(536): unsure at all n locations
  Clone ID: jC-gmfl02220148f03a1
tgaagcttttgcgtcaaattagatgaattgtgcaaccatggacttgtaacacaagctgcctccctcatatctaacagcagttctgggggtggtcaggcttctctcagcatgctgacatatactggaggaaattcaatcggaaatcagtccttccatggagaaaggaagaaaagcagcacgtggttctaagagaaagcgccgaagtttcaaggataaggatcactatataagttcaattccaaaaaatcaacatatggaggctggcctttcagtaaaagctaatgaagactttgcttctaatagattggaagcagctgtcctcgatctagtggcagatgatggtgctggcattcagaacaaagatctatgtatcactgggataagaggggtaaaaagtgcatcaagttaacaatggtgatcgtgttgctgcaaatggaaagataaagacgagagtggtgcaaaaacaaaggcaaacaagactggtatatataagaagtggaaagagcgctcacatggtangatatcacttanaggga

SEQ ID NO: 13437 - DNA, 582 bp, Glycine max
  unsure (1)..(582): unsure at all n locations
  Clone ID: jC-gmfl02220148f04a1
gcaaatgcgtgcgtgccacttgatcaaatgcaatgctattccactccaccctctacacacggctcaaaacacaaccctgttactgatgccatgtcataagtgcttcctctcctttccattttcttggttacaataataccattgcagagttccttcgcacttttcagattctcacgattcaaaatcaccactcgctacgcaccgtttcgatcccgtggactcttcttcgggagcttcagagaggaacggagcagagttcgaagtgcgtgcactctagctagcgcttatagaagatgtcactttatattggtaatctgtcagaacattctcgaagagatgatctcgagcgtgttttccgtcgatttggacattgtaatgttcagctgaaaagaaatggctatggctttgtagtatttgatttccctctcgatgctgaaaaggctctgagagcactgaaaggtagaaatatatgtggtgaatcgctgacactacgtggtccagtaaacagcctagttcgcatttttctagaattcctagtggtgtcagaagaaatgcatatgagttgggacatgcgangaatgc

SEQ ID NO: 13438 - DNA, 423 bp, Glycine max
  Clone ID: jC-gmfl02220148f05a1
gctagctgctctgctcaccgtactccattattgcacatacagctattcctcttgcttaatgccaatctcacctacagaccccacaccctctgacttcctaccattcgtggtcgaagccaaagacaggacccgcaaggaagacaggaccggtcgtcacactcgcataagaaagaaggtcgaagggacgcccgagaggccgaggctgtgcgtgttccggtcgaacaagcatctctgatgagcaagcgattgatgacaccgcaatgcgcacgcttgctatcgtgacgacaatgcaaaagacgggtgctgacgagtgtaactactccggtggccctacagtagaagccgcaaagaggatgggcgagatcattgcataatcctgtttgcagaaagggatcacacacgtatgctttgatcgaagtggat

SEQ ID NO: 13439 - DNA, 598 bp, Glycine max
  unsure (1)..(598): unsure at all n locations
  Clone ID: jC-gmfl02220148f06a1
gtcatagcaacaaacaggcaactgagtgtggttcaccctatttacaaacttctgtttcctcactaccgtgacaccatgaatattaattcacttgcccggaaagccctggtcaatgcagatggtattatagagaaaacattcttgtggggtaggtactctatggaaatgtccgctgtcatttacaaggactgggttttcactgatcaagcattacctaatgatcttgtaaagagaggagttgctgttaaggacccatctgctccccatggagttcgtcttttgattgaggactatccttatgcttctgatgggctagagatatgggatgccatcaagtcctgggtgcaagaatatgtctcattctactacaagtcagatgaggaactccaaaaagaccctgaactccaagcttggtggaaagaacttgtagaggtgggtcatggtgatttgaaagatagccatggtggcaaagatgcaactcgtgaaagttggttgaagcttccgtatcctcaatggattgttcagccttcatgctgctgtaaacttgacagtatccatatgaggttaatcctaacangccactatagcagagatcatg

SEQ ID NO: 13440 - DNA, 446 bp, Glycine max
  Clone ID: jC-gmfl02220148f07a1
atgaaagctggacttgtgcaataaacgaacaacaataacagagacagtggatctcactttgcgcacaagcgaatcaattacgccacgccaaagccacaatttcacctatccaattatgcacgacatgtaacaaaacgacaacaccactttcgtcgttcgccgtattcgatttcagagttccgtggcgtccggccatggccctgcgaaacggcggcagaaaaatctacttcgaggtccttagcgtcgaggacgaatctgatccaacggaacgcaaccgcaagaagcgcaggcaccgcgcttcgaagaagaagaagaagcttctcgatcgggccgattccgattccgcggatccgcgttcggcgccgttggagaatggaggagcctgtaacggattctagctcgacgctagcaggtactgcggcggcggcggcggatgaggatgaagc

SEQ ID NO: 13441 - DNA, 528 bp, Glycine max
  Clone ID: jC-gmfl02220148f08a1
gaagaaagcagcgattgtgaagtctctgcaaaccattatggatgtcttcctgctgatagtactctttagcagcaacaccaaagcagaaaaagaaacaatgcacgaccatgcaaacaaaaagacctacataattcacatggacgagaccaccatgcactgaaccttcaccgaccacctcaactggttcgacgcctacctcaaatcagcgtacccctccgcggagattctctacacttacaaacacgtggcccatggcttctccgccagactcactcccaaggacgtagacacacttgcaaaacaacccggcatcctctccgtcatccccgaactcaaatacaaactgcacaccacaagaactcccaacttccttggacttgacaaagccaccaccttgtacccgaagctagcctcttcggcttggcgtcgggtacggcgcgtggaatggccacacaagcgcgtgtggcggattacaaagtgtgctggcttggcgggtgttttacttacgacatagccgcgggaatcgac

SEQ ID NO: 13442 - DNA, 554 bp, Glycine max
  unsure (1)..(554): unsure at all n locations
  Clone ID: jC-gmfl02220148f09a1
gttctacacttgcaatctcctttcacacccacccacccttcaaccatttcaattccttccctcacccaaaccgcactatcgttcttcgacacggtcctgtttattaagcggtttggataaaagaatagaagcgtaaaatggccttcgtagcacatcaacctcagggtttgtttgtgacatcttcctcgaggcgtttgccatggagcaaaaggctgaagttgaagcagtgtttaacaaaacatcacatgattggaagaactgaccggcattgcctagtaaagtggaatgcttgtttaagtttagggcctccttgcttttgtgtatccaagttcaaacctttaaggatttcaggcttcaaaggcagcacccaaaatgatgattcaggaatcagagctaatcggttgaaggcacccaatacttctgttagattaggagagagcgnngaggctcacaatgttccactgtcttatgcatctgaaacaaatgatagcattgcaacatcatctgctattcatagacttttcaataaatggctgacaatgttgcgcacgcaa

SEQ ID NO: 13443 - DNA, 535 bp, Glycine max
  Clone ID: jC-gmfl02220148f10a1
aaagaaagaagaatggaggaggaaggtgacatatacgacggtgttcgagctcagttccctctctcattcgggaagcaatcgaagcctcaaacccctcttgaagccatccacaatgcgacacgtcgttccaattccaatcccaaaacagccaacgaccttccttctgtctcctcctcttccagggattggctcaattccctccgccctcccaaaacccctactcctcctcctccgctgccgccgccagatcacgacgacggcccaatggtgggaccgccgtcgcctccgcccacagctgccgacgaagaagaagacgacgacgacgccgagatgattggcccgcccccgcctccgccgttcgcgtcggagtccgaagacgattcggatcaagatgaggtaggaacccgcttccggattcccctcagcaacgagattgtactcaagggccacaccaggttgtgtcagctcttgctgtggaccacacgggatcaagagtgctttctggaagctatgactatatggtacgaatgtatga

SEQ ID NO: 13444 - DNA, 471 bp, Glycine max
  unsure (1)..(471): unsure at all n locations
  Clone ID: jC-gmfl02220148f10d1
ttgttgggggttttttaaaattcntaaatttatcattttatagtttgcaaaattcaattttacatgactaatttacagacatgaggtactaaaacattagaggtgttacaatttcaacagcatcattgccttaaccgaaactttttccagccctctcgaaaataaagtacagttcactcttgcctaccgtccccttgttagccatctttgtgatacaataacttggtaacccgatcatttctcctcatcctcagaatctgactttgcaaaaactggctcaggttgggtttctgcatatgctggagcaatgaactttggatcctttgctgcagcatcagcatatttcaggatagcttcccttggatcttactccatccatgtctccttgatcataccacctttctttaaaagatactgggtcagtaagcttccttgactagtaccaactcgtccaccaaagccaggacctgt

SEQ ID NO: 13445 - DNA, 607 bp, Glycine max
  unsure (1)..(607): unsure at all n locations
  Clone ID: jC-gmfl02220148g02a1
gtggatctctgccatcaaaatttgactgtgattacgcatatgttcttggacacatctgctaccacatacttgccgctggtctaaatggatacatggcaactgtaactaacctgaagaatcctgtaaacaagtggcgatgtggggctgctccaatagcatctatgatgactgtgaagcgctggtctccaaatccaggagccacatcaattggaaaaccagctattcatccagctactgtggacttgagaggcaaagcatatgagctgttgagacaaaaggcacaaagctttcttatggatgatatctacagaaatccaggtccacttcagtttgatggtcctggtgcgggtgcgaaggttataactctttctgttgaagaccaggactacatgggccgcattaagaaacttcaggagtaccttgaacaggttcgaaccattgtgaagccaggatgcccncaggaggttttgaaagctgctctaagtgtcatggcgtcggttactgaagttctagctgcaatgtcaacatcttctactaacaccctgtcagccatgtgagagtaacanatggatnngtgatctttccaaaattttctggcacgagggtt

SEQ ID NO: 13446 - DNA, 574 bp, Glycine max
  unsure (1)..(574): unsure at all n locations
  Clone ID: jC-gmfl02220148g03a1
gcactttcttgtgcagagagaacaaaatctgttgatgcgattcctgaattagaccatctgtcaatattgacaaatggtgaaattgacggctttagtgttggacaactcttactttctaatgcggagtcatattctggatccctttatggccatgcttctgaacgccatggaacgtacgtgtggtgtgatggttgcgtatacgagggtgaatggaggatagggatgataaatgcttatggaaaactaagatggccttcaggagcagcgtctgaaggtgatttctctggtggatatatccatggtacgggcacatacattcgttctgataaattgacatcttaaggtagatgtgacgttgaagtcttaaacatggttgatcagtttcaagtttatgctaatggagatacctctgaatggtcttggatgcaaggaacacaataggggcctgtcaagtatacctggaccaatggtaatgtgtatgtanggaatatgaaaggcgggataatgtcatgcataggaactcttacttggataaatggtgactcatacgatggaaactggttaaaatggatga

SEQ ID NO: 13447 - DNA, 431 bp, Glycine max
  Clone ID: jC-gmfl02220148g04a1
ctcgagccgattcggctcgagggcataacctaaacttacccttcttctctctgggtgcgtgcgcattatacgcatccataagcagctatggccactgtaagaactgtgatgacgttctcctcatgagttcatcaaagcttactcttatgacctgaagcgatctgacgagatggagctgtgagagtggactgatattgagaaaactgggcgagttatggagttggctccttatgatcctgactggtactatctaagagatgcttgcatggcaggaaagatctactcgagaggatgacttggtgtctgagcctattagaggattgatggtggaagcaagatgaatggctgtcgccctgctgatttctgcaagagcagcggtgctgatgatagtcacagtcttaatcattgcagaacatgagcatgattgaact

SEQ ID NO: 13448 - DNA, 423 bp, Glycine max
  Clone ID: jC-gmfl02220148g05a1
acggaaaggcccatggtattggacaaccaggtagcgataactgactctgacatgatagtgcgtgttggttacatgatcgaacgcccgtacctgcactgtgcgaaccgggcattctagcatcggacgcgctacacactggactgatgacctggatcgctcggtcacgtatgactgcagcgagtagactgggtccgatctgtatggatgggagctcctgtgctcagcagcgctgccctgaaatggcgagctggcgagacaatgttctacgctgcgtgaggtgttgctgcgtctggcggaggaagcacagcgtaaagctcggcacaatgatcgaggagagtgctgataagcgaagtgctggttcgatacaaagactgctaggaatcgctgaggaaggacctctaggccgaagcagtgtaagctctt

SEQ ID NO: 13449 - DNA, 425 bp, Glycine max
  Clone ID: jC-gmfl02220148g06a1
gccattctcatcctcctctgtctctctctctccaccattgccatggatccttacaagctccggccatccagcgccttcaattctcccttctggactacaaattctggtgctcctgtttggaacaacaactcctctttaaccgttggagctagaggtccaattctgcttgaggattatcatcttgtggagaagcttgcaaactttgacagggaacgtatcccagaacgtgttgtccatgccaggggagctagtgcaaagggtctctttgaggtcacacatgacatttctcacctgacatgtgcagatttgcttcgagcccctggagttcagacgcctgtaattgctcgttgctcaactgtcattcatgagcgtggtagccctgagaccttgatggacccttgacgtttcgccgagaagttttacac

SEQ ID NO: 13450 - DNA, 497 bp, Glycine max
  Clone ID: jC-gmfl02220148g07a1
agaaaaagaaaaaaaaatatgaagttcgctataatcacaatattgttctctttatttcttcttgactttggttttgcacaacagggggatcttgacatatcaagatttggaggaaaaccaaatacaaatataggccaggctatcttaagtgcctggactcaagcatgtgcatcaccaactgctgtcaaaattgtgattccagctggcacataccaaatgggtgcagttgatgtcaaaggtacttgcaaggctcctattgaggttcaagttgatggaacaattcaagcacctgcaaacccaactgaccttaaggcggctcatcaatggtttgatgttcaatatgttaactctttcaccctgtcggcaaaggtgtttttgatggtcaaggggcaactgcttggaaacaaaatgattgtacaacagacaaggactggcagatgctttgcatgaattttggttataatttcctcactaattcaattgtccgtgacattact

SEQ ID NO: 13451 - DNA, 538 bp, Glycine max
  Clone ID: jC-gmfl02220148g08a1
ctttcttcctcttcctcagtagtgcgattttcgattctcttctctgcaactatgcctaaccctaaggtcttcttcgacatgaccatcggcggtcaacctgccggccgcatcgtgatggagctctacgccgacgtgactccgagcaccgccgagaacttccgcgcgctctgcaccggcgagaagggcgccgggcggagcggcaagcccctccactacaaaggctcgtccttccaccgcgtgatcccgaacttcatgtgccagggcggcgacttcaccgccggaaacggcaccggaggcgagtcgatctacggcgccaagttcgccgacgagaacttcgtgaagaagcacactggtcccggcatcctctccatggcgaacgccggtcccggaaccaacggatctcagttcttcatctgcacgacgaagacggagtggctcgacggaagcacgtcgtgttcggacaggtcgtcgagggatggacgtcgtcaggagatgagaggtcggatccagctccgcaggaccgtcaagctgcgtcgtc

SEQ ID NO: 13452 - DNA, 533 bp, Glycine max
  Clone ID: jC-gmfl02220148g09a1
gcctcccatttgcggcaatgcaaatgcacctcctctttccctcattaattgaaatcgctgccccagatcgtgcaagtgaagaagctgctagctattagctatggctagaggaaagatccagatcaagaggatagagaacaacaccaaccgtcaggtcactgactctaaacgacggaatggccttttcaagaaggccaacgagcttaccgttctctgcgatgccaaggtttctattattatgttctccagcactggaaaactccaccagtacatcagcccctccacctcaacaaagcagttcttcgatcaataccagatgactctgggagttcgatctctggaactctcattacgagaatatgcaagagaacttgacgaaactgaaagaggtgaataggaatcttcgtaaggagattaggcagagaatgggagattgtctgaacgagctgggcatggaaggatctcaagctccttgacgaagaaatgggacaggccgacagtggtgctcgtgagcgtaaggtgtgattaatata

SEQ ID NO: 13453 - DNA, 541 bp, Glycine max
  unsure (1)..(541): unsure at all n locations
  Clone ID: jC-gmfl02220148h02a1
cgcgtcgactgcgtcatctccgacgacgactcctcttcctccgccgccgcctccgacaagtcccgcggccccttctggaacctcctccgcctcgtcttcggcggaatcgtgaaacccatccaaaccctcggtcagttcctcggccccaaacgcccctcctcctcctccgtcacgtccccttcctccaccacctcctcctcccccctcgccgtcggaaccgacgacgactccgacgccggcgtcacccaccactccccgacgcaagtcctcaaaaacttcaacgagattcgcctcctccggatcgagctccccagcggcgagctaggcatcgaagacggcgtgctcctcaaatggcgcgccgatttcggatcaactctcgacaattgcgtcatcctcggcgcctcctncgtcttccaccccaaagacaacctaaccgaccccatccccaccaccaattgcaacgcanacgacgacaacggaagcatccctgattccttctacaccaacggcggtctcaaactgcgcgttgtgtggaccatca

SEQ ID NO: 13454 - DNA, 578 bp, Glycine max
  Clone ID: jC-gmfl02220148h03a1
tctctctctctcatgtctttgtcttgattccgatgcgaatgggtatcctattttatctggagacctgacatggtaaaacagtaacacacagatggtcgtgttttaagctgatttatagactttgccctctggttccattggattctgaaccatatttatgatgggcaaagggcggtggtaatttaagtcagatgaaaattcagaacatttttgtgggcaaagaggctgaagttatcactaatggctttgagggttatagcaatttcagtggtttctacagtattaagctttgtgggtctgcagttttgcacagacttgtctttggataaacttacatcagatgggctagtcggctggaatctaattcacttggacaatgccagccaagacattgagttgcctttgggtttgtacaccaccatagggctactggtgaattgcatgatcaatgtatttatccttctcaatctttgcctcaggctgtgtttttacggagttatatgcttctgaactcgtaactggtgaacgtctcattatttgtcatttacagggatgttctaccatgatgtgcaccaaca

SEQ ID NO: 13455 - DNA, 608 bp, Glycine max
  Clone ID: jC-gmfl02220148h04a1
ggcttccttatgctgcttagtgctgttccttgcagctataattctatcccctcaagctgttgcccactatgagaatcccacagtgtacaagcctcccactgagaaaccaccagcttataagcccccagttgagaagcctcctgtttacaaaccttcagttgagaaccccccaattgataagcctacagtcgagaagccaccaatgtccaagcacccagctgagaagcccccattgtacatgcccccagttgagaaaccaccagtgtacatgcccccagctgagaaaccaccagtgtgcatgcccccagtgtgcaaaaccgtcagtttacaagccccacattgaaaaacctccagtgttcaagtccccagtagaaaaaccacgagtgtacaagccctcagttgacatgcccccaggttacaagccctcagttgagaagtgaccagcttgcatgccgccagttgagcatccaccagtatgcaagccaccagttgagaagcctgcagtgtacaagcctgcagctgagaagcctccagattacaagccaccagtagagaaacctccaggttacaagcccccagtgataaacctactattacaagccacctgt

SEQ ID NO: 13456 - DNA, 541 bp, Glycine max
  Clone ID: jC-gmfl02220148h05a1
gccattgctattgagaaaggaaaagaacattcacaaacattgccgatgttgtttgctcaatattctcgatttgtatatttggcttctgggaatgcagagaaggcaaggcagattctagttgaggggcttgagaatgttttgttgtcaaagccactacttgaggctttattgcattttgaggctattcaacctttgccaaagcgtgttggtgtcgactttttggagtcatgggttgtcaaattcataatgcctaactcagagagtgctggtgtagcaagtccaacagagcgtgaggaactttctagtattcttctggagtttttaaatctctttggtgatgttcaatctatcaagagagctgaagataggcatgccaaattgtttttgcctcacagaagcatgtcagagttgaaaaaacgtcatgctgaggatgtcttagtttcggacaaaacaaacgtgcctagatcgtattctgctcagtcacctgcgcaatctgcgatgggtgcatatccaaatgcgcagaaccagtggactaattatg

SEQ ID NO: 13457 - DNA, 394 bp, Glycine max
  Clone ID: jC-gmfl02220148h06a1
gccattgctattgagaaaggaaaagatcattcacgcacattgcctacgcagtatgctcaatattctcgatgtgtatatgaggcttctgtgaatgcacagaaggcaaggcatactctacctgaggggctagaaaatgatatggcgtcaaagccactactactaaggaatatggcgaccttacgctgtaagctcgttgacaaaccttgtcccagaacacttgctggaatcatgcgtcggctactggatatggcctagctcactatgtgctagcgatgcatgtacagctgaccgagaggaacgatgaactatgaaagctggaagcaatagattgtgggatgcacgctcatgaatcactgagagacctggatgagcttgtcggatggtttaactacta

SEQ ID NO: 13458 - DNA, 338 bp, Glycine max
  Clone ID: jC-gmfl02220148h07a1
cattgttgtttgcttaagatatatttgctttactaaagtaatttttctctttgcgtgtaggattaataattagctcatagtttttttggaagagttgtgaaaatgggacttgtggagctttttggggtggcatctatgcccgtgatcatagtactactaatcactgctgttggcttgcttcttgcactggacaacgtaaatttgttgggaacagatgcagggatacaagtgaatcatctggtgcatcatgcgatcaatcctgcactggtgggtggcaatctggccgacacgattacttttgagaacgttgatctattgagggtcatgcaccacaatat

SEQ ID NO: 13459 - DNA, 484 bp, Glycine max
  unsure (1)..(484): unsure at all n locations
  Clone ID: jC-gmfl02220148h08a1
ttcagggatactcatctcatgattttatataggactgggaggaggaaatctgagttatacaaccatacattgatggttaagattaaatgttatgtaatttatagaagtcatttaatttttttaagttggaagtcaacctaattttgaacatggcgaattaattacaagttacaacaaatagtggaaggtcacctgagttaaattcttatatgatctgttatatactcattgtaatatgcagttctttgtgcttgtatgttaaaatttgcttgtggttgaatgttaaaactacatgcatactggctccaaattttatgaattactaatattctatttgtaaggcagcattgttggctagcacttaacactttccaaccaatcagtaccagcaacttcttgctggtactcaagttgtcctgcatcttctgtggnggatgacatgactcanaacagcatactgaatcacagtagagctctgagggtg

SEQ ID NO: 13460 - DNA, 329 bp, Glycine max
  Clone ID: jC-gmfl02220148h09a1
gggagggacagggttgagagttttttcggctctagcgtgtctcatgctgggactctactactcgtgattgtggagcttcaggagactagcactgctattccggctggttacactcgataacgacagaagtcttatgcatatcgtgatccacgctaccgacccgtctcctactccatatgcgagcttgacctattccttgactccatctagctcattatcccttgctgttccagccatattagccttgggtgctcatcatgcggattcctttactcgtactttggccagatctgctcatgaactccattacagattgcatacctattgac

SEQ ID NO: 13461 - DNA, 236 bp, Glycine max
  Clone ID: 700863080H1
gcttgtggccatagtctcattatttatccttttgcttccaaatatccatgggtggggagacgatgggcatgtcattgtttgcaagattgcacaggctcgcctcagtgaagcagctgcagaggctgtgaagaaactgtgccaatatccgcaggaaatgatttgtccacaaagtgttcttgggcagatcatgttcatcatatctatccttgggcctctgctttgcactacgcaaatac

SEQ ID NO: 13462 - DNA, 241 bp, Glycine max
  Clone ID: 700863082H1
attctttgagggaatttgacaaaaaagtagccactgccccaacgatcccatttcccttgacttctctacgtgaagctccttgttttgcataggagctagttgaaatgtccgagggaaatgcagggaaaggaaagaaaatcgcatcattggtgtctcaaccttattgttggtggctatggttgtggcggtcacaattggggtcaatctcaatgagaatggttccaacaatgatatagaggac

SEQ ID NO: 13463 - DNA, 240 bp, Glycine max
  Clone ID: 700863083H1
gggaggtgggaatagcgtgggaccgacgaagcaaagcagatagaaacataaaatttccatggcgtgacgggggagagagccaaatcgaactgaaacgtttcgaaattcattttttttttctaacatacttaaagagagagaagagagagagagagaggggagggttgcaaattccatgagagcagaagaggtgcctcttactcgtctcgtctttcaccgttacgagtgagttcgacccct

SEQ ID NO: 13464 - DNA, 239 bp, Glycine max
  Clone ID: 700863084H1
tcctacaccaacaaaaatggcaccttctccacaagaaatcatcttccgatccccactccccgatattcccatccccacacatctcccattgtactcttactgcttccaaaacttgtcaaagttccatgaccgtccatgctcatcgacggcgacaccggcgagaccctcacctacgccgacgtcgacctcgctgctcgccgcatcgcctccggcctccacaaaatcggcatccgccaggg

SEQ ID NO: 13465 - DNA, 236 bp, Glycine max
  Clone ID: 700863085H1
aagttcgatgagcacgctcctccttttgctaaacacattgcggatcaagccaagggtgtgattcagaaagtgacttgtgaggcagggaaagtagcaagtgaagcacaatctggggggccaagagcagctgttcattatgttgctacagaatcaaagcattttgtgttgataaattcagtaaagttgtggaatggactcaaccactatccaccattccatgcactgtcagagatggc

SEQ ID NO: 13466 - DNA, 236 bp, Glycine max
  Clone ID: 700863086H1
tttgatttctctctcctcgactcgatcccaattccactagggattcaattccgatgcgattccgagcttgttagatccacgacaaggtttcgtttcccagattcttttgtaaaaaaaaattcttcctctgcccaacaggaagttgtaaaaaaatggaccatgacaagactgggtgccaagctcctcctgaaggtcctatattgtgcatcaacaactgtgggttttttggaagtgca

SEQ ID NO: 13467 - DNA, 240 bp, Glycine max
  Clone ID: 700863087H1
gcgaacacatgactgatctgcaagaaaagttcaagcgcatgtgtgaaaagtccatgataaagaagcgatacatgcacctgacggaggagtttctgaaagagaacccgaacatgtgcgagtacatggcgccatcgctggactgagacaagacgtagtggtgatggaggtgccgaagctgggaaaacaagccgcaacgaaagcgattaaggagtggggtcaaccaaagtcaaagatcacaca

SEQ ID NO: 13468 - DNA, 240 bp, Glycine max
  Clone ID: 700863088H1
ctgaactttctaatgtcaaacgttggactcaaggaacctatgctttcatcagggttcttttgagttccaacacctttgctttggaaattgattccacctgatcaagtgaaagagattcttcaggcttcatctttgtttcttcacgtaagaacattgctctccggttttgtaacttaaaatattaccataattttcgttgagtttaacatgtagccttcattggtgccaataacatgtagt

SEQ ID NO: 13469 - DNA, 242 bp, Glycine max
  Clone ID: 700863091H1
acatgctcatgtttggaagcgaaggaagttgcagtacttcctctgacggaagctgcactcaaggcagagaaattatcaagcaagaagaaattggttaccacagctacaataatgattataactttatgcttaatcacagcacaatattaatgatggagaaaagtcatgttttggtgagtggtttagccaaacactactaacaccgttggattatgatcttgaggatattaagcaattgatta

SEQ ID NO: 13470 - DNA, 240 bp, Glycine max
  Clone ID: 700863093H1
ctaattcagaaggcaaaagaagggatttctccactttcaccaattgggatattatctaagatacacaagattggaagccatcttgggcgtgggaaggaagaagacgctcatgaatttttgaggtgcgcggttgatacaatcaatctgtttgtctcaaggaagttggtgtttcaagtcctttggcagaagaaacaactctagttggttacacctttggagataaagtgcttaagatgcctg

SEQ ID NO: 13471 - DNA, 234 bp, Glycine max
  Clone ID: 700863094H1
gcaggaccttgagaatgaaaagcatttgcaagaacttgatcagaaggcaaaacttgaggccaagcctttgaaggagattcttgcttaattaataataattacatatgtatcatttgcatgcccccttggtgttttagtattttttaagggccatgaattaataatagtccttacctttgtgcttttgtacgtcttatgatttatcctttgtggggatatcatgtgttgtgttca

SEQ ID NO: 13472 - DNA, 241 bp, Glycine max
  Clone ID: 700863095H1
ttggccaacggttaacttccctccgaacctagagagagtagtagtctcttgtaatcaaagcaaagttcagtagtcgattcttggtcaccttctgagactctaacttcaccttcctgacatacccttcataccaatcttcctttctgtttccttttcctaccttccttctatatacacttcatctccacctcttcttcacactcactagattttttcacctccaagtctttctgttcactat

SEQ ID NO: 13473 - DNA, 240 bp, Glycine max
  Clone ID: 700863079H1
gcaaaacaacaactcaattaagaaattcttctccggagccatggcagatctcaagtctacattcttgaacgtctattccgttctcaaatctgaactcctccacgaccccgccttcgagttctccgatgatgctcgccatgggtcgaccggatgctagactacaatgtgcctggaggaaagttgaaccggggactgtcagtcattgacagctacagattgttgaaagaaggacaggcatta

SEQ ID NO: 13474 - DNA, 237 bp, Glycine max
  Clone ID: 700863041H1
tcttcgtggcgagggaagaagggggcgaggaagatgatgggtacttggtgagttacgtgcacgatgagaggaagggggagtcgaggtttttggtgatggacgcgaagtcgccggagctagatgttgtggcggcggtgagcttccgcggcgggtgccgtacgggttccatgggctgtttgtgaaggagagtgagctgaggaaagtgtcgttgtcgtgaagctgagacatgatggttcg

SEQ ID NO: 13475 - DNA, 241 bp, Glycine max
  Clone ID: 700863042H1
atcctctgtcctctcgaagctttcatcgttcaacatattctcaccatctcagtcatgggcctgctatcttgttttaggtctaccgtcctgagaaaatgttccaaaggaagctctggcatgtcaagattcctgtatacgaacattttcaacgaaacttgatttcgtctggtggcaatgaatcgtattatgggtattttaacaggagatcatacacttcactttatatgggaactggaactgt

SEQ ID NO: 13476 - DNA, 242 bp, Glycine max
  Clone ID: 700863044H1
ttccaatatattccattctctctgtgtatttccctacctctcccttcaagatgcagatcttcgtcaagaccctcaccggcaagaccatcacccttgaggtggaaagctctgacaccatcgacaacgtcaaggccaagatccagacaaggaaggaatccccccggaccagcaacgtctcattttcgccggaaagcaacttgaggacggccgtacccttgctgactacaacattcagaaggaga

SEQ ID NO: 13477 - DNA, 242 bp, Glycine max
  Clone ID: 700863045H1
tctcgagccgattcggctcagtaaaagagaaagacaaagaaaaaacgagtgatgaaagcggagatgaaggatggagctcctcaagttgtgatgaatcataatggtaaccacggcaaattctcacacctacttgcttcccaaatcgtgactatcttctctctccaactggggctcaggtgaaagtttctgatcttgaagggaaagtagtgggtctattattcgctgcgaattggtacccacct

SEQ ID NO: 13478 - DNA, 239 bp, Glycine max
  Clone ID: 700863046H1
attggtgtataagacccaaaccattctcattttccatcaagcaaacgataagaaatgttatcagaaacattggccatccctgcagtactccttgtaatactcattttgattctatcctctgtcttgttccatcttcaagataaagaacaaatccaccaggtcctaaacccctcccaattattggtaaccttcacatgctggggaaactcccacatcgttcccttcaagcccttgccaaa

SEQ ID NO: 13479 - DNA, 246 bp, Glycine max
  Clone ID: 700863048H1
atttgtgtccttcacacttttcagaacacccagaagctctagcctcaccagcaccacatattgctagctagcgactccgagatgccaagcaaagaggattcacctttagtagaagcaaagcttccactattagaagctcaccctttaacagatgaaagagaacaagaccaaagtttcccacgaaggttttggcttgagtcaaagaggctttggcacatagtaggcccttcaattttcagccgtatt

SEQ ID NO: 13480 - DNA, 246 bp, Glycine max
  Clone ID: 700863049H1
gcaaaaacacatacagaacagaatctgagaaccagaccctctcaaaccggaaccgcaaatgaagcccaagagcattcgcatccgtaacttaccaacgcacctgctgctaatcgctgtttgtctgttcacctcttcgtccgcttccagatcggagaaaattgtgggtcagacaacaaatgcgacgctggactcagctgccaaacatgtcctgccaatggaaatacccgaccaagctgttcgcggaca

SEQ ID NO: 13481 - DNA, 244 bp, Glycine max
  Clone ID: 700863050H1
tgccatcaaaataatcgctggccctatcacattattgttaatattcttcccttctttaccttctactttccgaatccagaaaacaccacaacaccacccagaattgttgggttccattctcaaaacagagaacaagaagaagagaaagagagagagtgaaaacgggaaaagcaaaaagttgtttctgtgattgattctctgcaaccgaatcatcatcagccacttcttcccgtttcatctctcc

SEQ ID NO: 13482 - DNA, 241 bp, Glycine max
  Clone ID: 700863053H1
gctctctcttctttcagtttgtattttctaagaagacaaagcaagccatctcaatcttgaatcctccatcagatctccctgcgaatgctgctgcccaagaaaacaacccaaacccaaaacgcacccacaacgcagaaaacgggtcgtatgcaacccccaaatgaagtgcaagaaacatacctcagaccttagcagcaccgttggcgtctgcgcctcctgtctaagggaacgcctcatagcc

SEQ ID NO: 13483 - DNA, 240 bp, Glycine max
  Clone ID: 700863057H1
gaaagagataagcaaagcacgaataagattaatggagtctttggtgaaggggtctgctggtctggactaccttaggaatgcctttgctaacaaatatggatctccatctgatgccaatacctctctgccttcaacactgagatggatttcatctgtttggaattgcaaaggtcaggaatgggaagagcatgtgagttcctcatcaggattggcttctaattcatcccaagaatggcttcc

SEQ ID NO: 13484 - DNA, 238 bp, Glycine max
  Clone ID: 700863058H1
tggaaaatctcttgcctttcctgatggtctccttatcaatggccaagctcatacaaccataaatggggaccagggaaagacctatatgttcagaatctcaaatgtgggcatgtcaacatcaattaacttcagaatccaggtcatcctctgaagctagttgagattgaaggatcacacattgtccagaacacgtacgacacgcttgatgtgcatgttgggcaatcagctgctgtgttgg

SEQ ID NO: 13485 - DNA, 243 bp, Glycine max
  Clone ID: 700863059H1
aaaaaaaaaacaactttgcggctgcgctgctgctaatagcgcgttgcatctgctacctatcatacatattttcgccaaaccgccgattccgttgagcgtttctaccgtagcgctcaggaaggaggcagtggctggtggtgttgttgtggtggaggtggttttgctgatcatttgtggtagagggtaggaaagaaaaaaaagttgaaaatgagttcagacagccgcagcaggagcagaagcagg

SEQ ID NO: 13486 - DNA, 242 bp, Glycine max
  Clone ID: 700863060H1
tgcaagctgacccttcccttcctcatgctttatgggaatctgctgcctcggttttgtcaagtattctgcagtttagctctgaattctacttggaagttcctattgctgtattggtaaggttgcttcgatcaggctcagatacacagttgttggtgctttaaatgctcttttggtgttggaaaatgatgacggaactagtgcagaagctatggctgaaagtggtgctatagaggctctcttgg

SEQ ID NO: 13487 - DNA, 241 bp, Glycine max
  Clone ID: 700863061H1
gtaggattgtgaggaacaagaccacaaataaggaactcacaatagagtggaatttgaagggcccctctctcactcaaccctgtcaaaggtgtcaagcacattcttttgtttgtattttgtgagcaaagggtggtgtggtgggcttcttgtggttggtgttggggtgcgcaggataatcggcaaagtaaggtgaaggttagggagagaaagaatcaaatcaaacaaacaaccccatttaaaa

SEQ ID NO: 13488 - DNA, 195 bp, Glycine max
  Clone ID: 700863063H1
aaccagcaggagaaaataccaagatggaaactgatgaagctcctgccaatgttgctgcacctcctagcaccaatgacaatgatgttaacatgcagatgctaattccaaggcaactgctgatgcccctgggtccgaaaatgggacccctgaggcaggagataagcctgtgcaaatggatactgataccaaggttga

SEQ ID NO: 13489 - DNA, 241 bp, Glycine max
  Clone ID: 700863064H1
ctgtggcagaagtcctaggagtgtaaaacagagacgcaaaatgaagacgatcttgtcgtctgagaccatgaatattcccgacggcgtgagcatcaaggttcacgctaaggttatcgaggttgagggccctcgtggaaaactcgtgcgagacttccaccatctgaacttggacttccaacttattaccgacgatggcggtaaaaggaagctcaagattgattcttggtttggttctcgtaaa

SEQ ID NO: 13490 - DNA, 244 bp, Glycine max
  Clone ID: 700863066H1
gagtcattgaactttgactatatttttcagagttcagattattcttctcttttgtattttgattttgggggtttaagtttctgagagaaaaaaaaaaatgataaaggtcgttctttttttgttctgctttgcctctgcactgccctttcagtatcggagtccaaatctgcttctgtgcaacctcatgcagctgaatctttctctgttggatatattcagactgcagcgaactgttcttacctgg

SEQ ID NO: 13491 - DNA, 242 bp, Glycine max
  Clone ID: 700863067H1
aagagatgaaaacttcggtcacttgaagtcatctgatttccttacatatggaatcaaatccttatctcagaacgtgatacctttgttcaaatctataatatttgacttaagggtcacatcgagtgagttcgatagcttcgagaagtgcgtggtctctttgaaggtggaatcaagctgccaacaaatatactgagccaaattagccccttaccagtcctcaaggaaatcttccgcactgatgg

SEQ ID NO: 13492 - DNA, 235 bp, Glycine max
  Clone ID: 700863069H1
gtgtcaaggcaactaaagcttctctcgctttgcaagagagggaggagtgagtgagatggaaggagtgatacacagaacagtggaagtgaatggcataaaaatgcacatagcagagaaaagagagggtccagtggtgtgttcctccacggcttccctgagctctggtactcatggcgccaccagattctctctctcagctccctcggctaccgcgccgtcgctcccgatctccgtg

SEQ ID NO: 13493 - DNA, 236 bp, Glycine max
  Clone ID: 700863070H1
gccctatagtattcatttgtgggcaaaacaaagttcagtcaggatcaaaggagaaagaagaattcacaatgattcttccaaactttggacgtgttgctaagctgcctctttctctgaagcgtttgactgagggaataaaggggacaagacatcagaagatgatgaaattaacaagctcttctccaatgttttgagtatgcatccacctaaggatgagaatctgctggcaacattca

SEQ ID NO: 13494 - DNA, 237 bp, Glycine max
  Clone ID: 700863071H1
gcaaaattctcttccgtttcaggattagcgtttcaccgttacagtgaaacatggcaaaaccaaagcgaatctctctgcgtatctttgcgctgctcctcttgatttccacctcttcgtttcagcttctccgcgcttccgatacgccgatgatgatgcgatcttctatgattcgttcgacgaggattttgaagaccgttgggttgtgtctcagaaagatgagtacagtggtgtctggaa

SEQ ID NO: 13495 - DNA, 238 bp, Glycine max
  Clone ID: 700863072H1
gatcagatcctcatcttctaccatttcaggtgctcactttcttcgcccatttttatttgtttgttgttttaacaaaacccataatcagatccgatcctcttgagattgggatcaacgccgagtccatgagcacgccagcctttcagggggcacgggcctcttctctgggttcactcggttatgcaagggccttgcggtggtgcttgtttgcggtcacattgcggttcagtttttccct

SEQ ID NO: 13496 - DNA, 238 bp, Glycine max
  Clone ID: 700863074H1
aaagaatcatagaagatggtactgcaaatcaaaatctaggaaacaaagaatcatttccagagagatacgatgttgatgtacaatgtttatctccaaaaaagcaatgtactgtgtataaatatgacgcatttgtccctgtgttggcaagccagtcgattcatcttggaatacattaacacagaaagataaagatgctctttctaaaggtgcagattgttttcctagcaagacttgtgat

SEQ ID NO: 13497 - DNA, 241 bp, Glycine max
  Clone ID: 700863075H1
ctttctgatctctctccccctctctctaacaataaccctcgctgtcgctggttccaattcaccatgaccgtgatgatgcccgctcccattgatcagcaagaggacgaggacgtgctcgtgccggacgcggatttgcctgagacaatcaccaacccatggaagttgtagctcaacctgaaaatgccaatactgtggagagtcagcccgttgaagatcctccgtcatctagatttacatggag

SEQ ID NO: 13498 - DNA, 242 bp, Glycine max
  Clone ID: 700863076H1
acttggacaggcgttgactgcgttgattaaccagggagctggattggggcttgggaatctgcttggagggcttgggggtgccccagttaaccaggcgggacctcctgctccgtatgcgaatcagcctgctatgagggtatgggaaccagccagcaatgcaacccggataccagaatcctcaaatgggacagggcagtggtgtgagacctcatcctggtgctggtgctccttacatgggtcat

SEQ ID NO: 13499 - DNA, 240 bp, Glycine max
  Clone ID: 700863077H1
ctcatctctctctcgccggcgtcgctacgaaggaaagcaatttactgtgaagaacaatgaggaagctaaagtttcatgaaaagaagcttttgaagaaggttaattttttggaatggaagagggaagggggtcacagagagacctcattatgcaacgctaccatgttactggacgggacgattacaaaaaatattcaggtttatgccatatggttcagaagttagtaaacatattgaaaca

SEQ ID NO: 13500 - DNA, 238 bp, Glycine max
  Clone ID: 700863039H1
caggcttatctataaatgatgataatgaatcctcaatgtttccttcttctaagggaagtagatatatactaaatgagcagctggaactgtctccacagcaccttaatggcaatacttttgctgataaattaaggttttcaattcaacctacagggaggagccatcttcaggaagcattttgaactcatcagcaaagccttgggataggcaaattgggaataccgatttgcacgttacc

SEQ ID NO: 13501 - DNA, 251 bp, Glycine max
  Clone ID: 700863001H1
aaatgaaaacccaaagtgcttctctcctctgtctttttctctctcttgctatccttttggctagtggcactgctgcaagtgcaactccaagaagcgcagtgccaagccaccatgtttcaacattcaacagaagcctttttccttccattttctctttggaattggttcttctgcttaccaggcagaaggagcagcaagtgtagatgggagaggaccaagcatatgggacacctacactagacagcatactg

SEQ ID NO: 13502 - DNA, 252 bp, Glycine max
  Clone ID: 700863004H1
ggctcgagctcatctctgacgccccagacgccgccatcgcctcccgcgaccccatcatcgcccccaacgtcatcaacgccaccttccgcaacttcatcgaagtcatcctcgagaaccccaccaaggtcacccagtcctacaaccttgatggctctctttcttttccgtcgcggttgaggcggggcagtggagcccagagaagaggaagtgctacaaccttcttgatgctgtcagcaggcacaccatccaggt

SEQ ID NO: 13503 - DNA, 226 bp, Glycine max
  Clone ID: 700863005H1
ctttgcagcaaagagaaaaaagagagaaatcaagaagagcatatggtggtgcctgagtctcagatgaattcccaaaacgaggtagaatcgccgctacaattggaggagcagcctcaacaacaaaacaacacaacaacaagaaccacccattctcatcactaggaagacaatcttcttcaatatactcgctcaccctcgacgagttccaacacactctatgggagaa

SEQ ID NO: 13504 - DNA, 240 bp, Glycine max
  Clone ID: 700863006H1
ccaagttgggtttcattgtttcatgagcactttcattatgttggagtctttagcttggtgccaaagctttaagggatatgaccttaccaaacagaagagtccgggttactcccatgccatttcacgagtttatagaaatttattttcatgctttactcagttaaaaagcaagtgccactactaccacatggtgctagtcatgggatatttcataggacgtgtgtgtcagaaaaattcttt

SEQ ID NO: 13505 - DNA, 198 bp, Glycine max
  Clone ID: 700863007H1
aaaataaataaagggcattaggggtgcaatggccattgcaaagagtgcttccattcttattattttgtgctttgcattggcctgcaatgcggataatcctggaaaaccagacccagttgctagtcctgacatgttcagcaataacaatgtggctaaggatgtgctccttcccggggaacaaatagttaacgtccagga

SEQ ID NO: 13506 - DNA, 196 bp, Glycine max
  Clone ID: 700863009H1
tccatggctaccattgttagcatcaaggcccgccagatctttgacagtcgtggcaatccaaccgtcgaggtggatttgacatgctccgatggtactttgctagagctgctgttccaagtggtgcatccactgggatttatgaggcccttgaattgagagatggaggatctgactaccttggaaagggtgtatcaaa

SEQ ID NO: 13507 - DNA, 242 bp, Glycine max
  Clone ID: 700863010H1
ggaggaggaggaggaggagagagaagaagagaaaaagaagcataagcaggctcctccttctctcttccctattagtgtgagaaaggggtttagtggtgaaagagtgaagagagatgagtggagtgaaggggcagtgtcaacccacttgaggcctatgaggccaaatgggtgctaagaaacagagccaagctcaagggccatgactgggaggacgtggcccggcacgtgtcatcacgtgccaa

SEQ ID NO: 13508 - DNA, 199 bp, Glycine max
  Clone ID: 700863011H1
agtcccattcccactaccgaagcaaattaagaagatgaagcagcagagagtggagtttatgggcatgggcatgggcatgggcatgggcctgggccttttgtggtgatgatggcatgtgggtcggcgagtggtgcggatgatttggcaaccaagtgttcagcggtgattcagaaggtaataccgtgtttggatttcgcga

SEQ ID NO: 13509 - DNA, 244 bp, Glycine max
  Clone ID: 700863013H1
cgagacccactgtattgtttccctctgtttctcttctccctttattccctgcctgccatttttatttttatttcttaaccatttatttatttaattagtgcttccccctcctccattctcattctccctgcatcacatacacagtcattctctctctccttttgacctaaatcatcttctgctgattccgcgcatttttctgtgacgaattgctcccaaattgtttcggttaacagtgctcgtg

SEQ ID NO: 13510 - DNA, 252 bp, Glycine max
  Clone ID: 700863014H1
ttcggctcgagcctcactctctctctctctaaccccaacaaacaaaccccttctctctctaccacctctactttctctctctagggtttcgtcgcgaactctcactctcgctttcgctctgcttgtcacgattgtagggttccaatcctcgcgcaattgcatcacagtctgtgatcgaccgagttttgattcttccccttcctcgggctaaaggattgttgtcatcactgacacaaaccaaatgttgctgta

SEQ ID NO: 13511 - DNA, 195 bp, Glycine max
  Clone ID: 700863015H1
gctcattttcgcgttctgcgccgtcgccgtcgccgtcgccgtcgcgggctcctccttcgatgatgccaaccctatccgtttagcgtcggacttggagtcgcaggtgctggacgtgatcggacagagccgccacgctctctccttcgcccgcttcgctcgccgccacggcaagcgctaccgttccgtcgacgagat

SEQ ID NO: 13512 - DNA, 245 bp, Glycine max
  Clone ID: 700863016H1
cttatcgctgtggttatcatcttcttcttcctctttcttagatctcttctttctctacgccgcacgccgaaaccatggccggaaaaggagagggtcctgctatcggaatcgatctcggaaccacctactcttgcgtcggtgtgtgcaacatgaccgcgttgaaatcatcgccaacgaccaagggaacagaaccacgccgtcttacgtcggattcactgacaccgagcgtctcatcggtgatgcgg

SEQ ID NO: 13513 - DNA, 209 bp, Glycine max
  Clone ID: 700863018H1
cttccaccaccatagtctatcatgcgtgatccaccccgaccagaaatcaaacatgaaacccttgacactctctgtttctgaccttccaatgttgtcatgtcactacaccaaaagggcgtgttactcaccgccccgccctcctcttttgacgacttaatactttcttttaaacacactctttctatcgcgctctctcactttcccgctct

SEQ ID NO: 13514 - DNA, 244 bp, Glycine max
  Clone ID: 700863019H1
caggttgtcaactaatatgaatgactaaggtggcttcaaattgaagaaccaaagttcaagttgcagggaaacagcaatgagcatttacaactgccgaatgttgttttttgacttaagaatcaaatagtctgtgcagattttggtggcaagaagcgttcactccctggtaatggtttctgcgaaagaagagccagattgcagcataccgcctgctgttgatggtttgttaagggttcataaacaa

SEQ ID NO: 13515 - DNA, 242 bp, Glycine max
  Clone ID: 700863022H1
gttttgtttatttgaaattaacaagtagcaaagatgtttggacatcatcggaggaaacaagggtcacaagataaaggggaacttggtgattatgcgaaagaatgtgttggatatcaacagcattaccagtgttaagggtgtcacggaaccggcattaacatcattggaggagtcgtcgacaccgttactgctttggcgtcccacatctccatccagctcattagtgccaccaaggctgatgg

SEQ ID NO: 13516 - DNA, 242 bp, Glycine max
  Clone ID: 700863023H1
gctgctgcaagtttcgctgctacattttggccgtatgcaaatccagaaacttcagcaaattctcctaggtgctcccaaggaggttttacaaatagacaaattggttcccctccatgcgttgcagctattgcagctgctactgagcagctgcaactgcatggtgggcagctcatggattgcttcctttgtgtgctcctcttcatacttcttttgcctgtcctgcatcagtgactacagttcca

SEQ ID NO: 13517 - DNA, 236 bp, Glycine max
  Clone ID: 700863025H1
tctcctctcactttcatttctacatccctggctctgttccgtcgatgacgatggcgtttagggtgcgaaaccctgacctccgctttctcattcttctctctctcttgtccatcacttccgccaaggtcttcttcgagagcgtttcgatgacggatggggaaatcgttgggttaaatcagattggaaaaaagatgagaacctggctggggagtggaaccacacctctggccaatgga

SEQ ID NO: 13518 - DNA, 246 bp, Glycine max
  Clone ID: 700863027H1
ctcttctccaatctcaccccagaaaaaacttgcaacaaaccaaaaaccatgcttgatgaatcagtctcatccaccccaacattcttgggcagcctgtacagctggttcacccccactgtcttcttcctcctcctccaactagtcattggcaccattttcatcatctcaaaccttgccaacacccacaaacaccaacaacaagaaccacaacaagcacatgactttccacaccaccatcttcccaga

SEQ ID NO: 13519 - DNA, 242 bp, Glycine max
  Clone ID: 700863029H1
cttcctctctttcacactcacctatggctcccatctcaaaactcattcctttcctattcttaacaacccttttagtgtctctccaagttaatgccagagacagccaattcttcagcaaagtcacccctctcaacaacaacataaagagactgaggttcccaaaaatgaaggccaagtaaacaagccagaacaacaaccagttttcaccccagaaacagaaaacagctatggtctatatggtc

SEQ ID NO: 13520 - DNA, 241 bp, Glycine max
  Clone ID: 700863030H1
gattagctcacagtcgtttcggggcattcttgtgcactcagttactctctctctctctggagcgtcgtcgtttcgttagggcacaaaaccccttttcggatcggtggagcaaggcctcgccggcgagattcccgaggctgtcaatcagcgatcgagcaccggcgaaaagcggcgaagatgaaggttttcgtgaagactctcaagggcacgcacttcgaaattgaagtgaacccttcggaca

SEQ ID NO: 13521 - DNA, 240 bp, Glycine max
  Clone ID: 700863031H1
tcagaagattggagtcgatgcggtttttttaccaggtgatgttcagaagaacattgatgaagttcagacaaagattaattcttctgctgcagaactttccagcaagactaaagaaaattcagagacaattaaagatgtatagatgcaatgcgactggctctggttattgttgctgctgttatgctctttcttgcatttctcggattcttattttcaatatttgggctgcaaggtcttgta

SEQ ID NO: 13522 - DNA, 246 bp, Glycine max
  Clone ID: 700863032H1
aacggcgccctcctcaaaggaaccattaccgttaacctcttatggtacggcagcttcaccccaatccaacgctccataatcctcgacttcattaactcgttaagttccaccgcgggggccccacttccctccgtagcatcgtggtggaagaccacggacaagtacagggggggatccactacaatcgtcctagggaaacaaatcctagaacaaacttattccctcggaaactacctcaacggaaca

SEQ ID NO: 13523 - DNA, 249 bp, Glycine max
  Clone ID: 700863033H1
aaccaccacacaattcctacacatttctactctttagtttctccaattttctttctcaattctcaacaatggccactacaacacaacttcacttaccccctggattcagattccatccaacagatgaagaactcgtcatccactactttgtcgcaaatgcgcttcgcaacatatcgcggttcccataatcgccgaaattgatctgtacaagtacgacccttgggaccttccaggaatggctttgtacgg

SEQ ID NO: 13524 - DNA, 243 bp, Glycine max
  Clone ID: 700863035H1
gcggttatatcttcgttgaggaggttgaaaccgaggatcgtgacggtggtggaggaggaggctgatttggacattggattggaagggtttgagttcgtgaaagggtttgaagagtgtttgaggtggtttagggtttactttgaggccttggacgagagttttccgcggacgagcaacgagcgtttgatgcttgagagggcggcggggagggcggtggtggacctggtggcgtgttctccggcg

SEQ ID NO: 13525 - DNA, 239 bp, Glycine max
  Clone ID: 700863036H1
gactgggccaatgaccggttcaggctagccaagtgcggcaaagggttcggaagacgggccaccggcgggctcggtggtcccatctatgtcgtcaccgataattccgatgacgacatggtgaaccctaagccgggaactatcgtcacgctgtcacccaaaaaggccccttgtggatcatcttcggacacagcatgatcatcagtttgaggcaagagctgatgatttcctccgacaagacc

SEQ ID NO: 13526 - DNA, 215 bp, Glycine max
  Clone ID: 700863038H1
atgggaattgcgcttcaaggcgtctcgtagggctaatccgcctcacgagggtcaccaacggcacgtgcctttggggggccgaggccccctactgctggtcggcaaacggacggcggcgcacgcgtcgcttctagcccggattctgacttagaggcgttcagtcataatccaacgcacggtagcttcgcgccactggcttttcaaccaagcgcgat

SEQ ID NO: 13527 - DNA, 317 bp, Glycine max
  Clone ID: 700862996H1
gtgatttcagtgagtgatcggtgttcacttgatctcatcataatcgtcagcgtcaattgaagaagatgccgatcagaaacatcgccgtcggaaggcctgaagaggcgactcaccccgacacgttgaaggcggctttggctgagttcatctcaaccttcatcttcgtgttcgccggctcaggctccggcatcgcctacaacaagctcaccgacaacggcgctgccacccctgccggcctcatctccgcctccatcgcccatgcattcgccctcttcgtcgccgtctccgtcggcgccaacatctccggcggccacgtc

SEQ ID NO: 13528 - DNA, 334 bp, Glycine max
  Clone ID: 700862956H1
agagaaggtgatcctgtaccaaggatggtgttcgttgtccgagggcgcataaaacgcaaccaaagccttagcaaaggcatggtagcctcaagcatccttgatcccggaggtttttgggtgacgagctactttcatggtgccttcgtcggccgtttatcgacagacttccggcctcctccgccacatttgtatgtcttgaatcagcagaagcctttggccttgatgccaataacttgaggtacatcactgatcacttccggtacaaatttgcatatgagaggctgaaaagaacagcaagatattactcatccaattggagaacttgggctgctgt

SEQ ID NO: 13529 - DNA, 293 bp, Glycine max
  Clone ID: 700862958H1
cgaccacctccggcgccgttgatcgacccagatgagctcactaagtggtccttgtacagagccgccatagctgagttcatagcaacactccttttcctttacatcaccgtgttgaccattattggctacaagagacagagtgacaccaaaatccccggtaacaccgagtgcgacggcgttggcattttgggcatcgcttggtgcttcggtggcatgatcttcatccttgtatactgcaccgcctgcatctctggtatagtggttctcacaaatcccacatcagctaatcatat

SEQ ID NO: 13530 - DNA, 321 bp, Glycine max
  Clone ID: 700862959H1
ctgtgacatggggtgtcttcccagctaaggagataattcaaccaaccattgtagatcctgtcagcttcaatgtatggaaggatgaggcatttgaaatttggtcaagaggatgggcaagcttgtaccctgaggatgaggcatccaggaaattggttgaagaggttgggggcagccacttcttggttagtttggtcgacaatgattacatcaatggtgatctttttgccgtctttgcagatttctgacatgagcttattatttattagtactttagctatgtcacttctgttggttgtcatgttctattcctttcttttgttt

SEQ ID NO: 13531 - DNA, 324 bp, Glycine max
  unsure (1)..(324): unsure at all n locations
  Clone ID: 700862960H1
ctgaaattcctcatcatgtcnccaaagttcttgagcttcactttataaggtgggagctacagggcctgaatagcttctacaaggatccttaccanatcagcatagatgttagaggttctttatacccagaaaggaagggaaaacatagttggctcaagaatcaaatggtgatgacgataaccttttgtgcttctccagcaatagctttcattcctgaaaatgtcttacaagatgccatagagctgattntcaaaacagtgtgggatgatatgaagcatgaattccatggtagactattggaagattataacaggttcaagagaa

SEQ ID NO: 13532 - DNA, 328 bp, Glycine max
  Clone ID: 700862962H1
atttcgcagtgtggaggatcgtcttcttcatccctcccacaccgagttcagttcagttagggtatctattttttaatggctaatagatccgatccggatattgatgatgattttcttgagctttataaggagtacactggccccctggggtctgctactacaaacacgcaagagagggcaaaatcaaataagaggtctaatgcagggtctgatgaggaggaggaagcccgggaccctaatgctgttccaaccgatttcaccagccgagaagctaaggtttgggaggctaagtcaaaggctacggataggaattggaagataaggaaag

SEQ ID NO: 13533 - DNA, 326 bp, Glycine max
  Clone ID: 700862963H1
ctcttatttgcagctttatatggagactatacaagatctgcttgaccctgccaatgataacataaccatcgtagaagatcccaaaactggtgatgtttcattacctggagctagcctagttgacattagggacaagcagagttttgtagaactattaagattaggagaggctcaccgctttgctgcaaatacaaaactgaatacagaatcttctcgaagtcatgctattctgatggtgcatgtaaagagatccgtgaaaggaagagatgcggctctttcaagtgaaaatggcaatcattcacacgtggttaaatcaataaagccgc

SEQ ID NO: 13534 - DNA, 327 bp, Glycine max
  unsure (1)..(327): unsure at all n locations
  Clone ID: 700862969H1
ggagtccaatgccacggcaaggctgctgactcggttggaggttgcgagctcnccacagaagaagataagtctgtcgtggttgttaagaggctacatcanaggcggccattttaacgaggcggcagagacgatcatgaaaatgcttgatttgggattctatccagagtacttggacagggcggctgtattacaaggtttgagganaagaatccagcaatatgggaatctagatacttatgtcaggctctgtaagtccctctctgatgcaaaccttataggacctgtcttgtacatntagtatatagacaatataagcttatgggtgtg

SEQ ID NO: 13535 - DNA, 214 bp, Glycine max
  Clone ID: 700862972H1
tgaccaagaacaacatgaattttctaaccttcgttactgttctactcttcatactaccagcaacctcatcttcccagtatttggggaacaaccttctcactcatcgcaagatattcctaaaaaaagacaacattattacctcgtacgctgtcatctttgacggtggtagcacaggaacccgtgtgcatgtcttccattttgaccagaatttgga

SEQ ID NO: 13536 - DNA, 167 bp, Glycine max
  Clone ID: 700862973H1
cgagttgagtggttaattagttgtgaactactaagattcgtttagttggttgagagtgctgttgttagttgtgaattacttcatagattcgtttggttggctgcgagtgtctgttctgtataggcaagtgtaggagtgtccgtgttagttgtgaactagtactaaga

SEQ ID NO: 13537 - DNA, 325 bp, Glycine max
  unsure (1)..(325): unsure at all n locations
  Clone ID: 700862974H1
cattctcctctctgaattcctcttattcaggaatttggagagtattgatatatcaaggtaggataaaccagtagccaaggaagatatggagttttctatgattttcattgttagcaacattatgctgcttttcagttcagcatttgccaaaactgctagtcctccctctctgagcccaactccagcaccagccccggcaccagacttcgtgaacctcactgagttactcagtgttgctggtccgtttcacaccttccttggataccttgagtccactagagtgattgacactttccanaaccaagccaacaacactgaagaaggt

SEQ ID NO: 13538 - DNA, 325 bp, Glycine max
  unsure (1)..(325): unsure at all n locations
  Clone ID: 700862978H1
atcaattctcaataatctgaaattcttcagaggctgtctggtangtacggtgtggtggtgtntcttcatcaatctattatcatcagccacctaagacaaattcacatttcattagacttcctactttctagggtttgtcacgtattcatatttatgctattaaattaaatggccggcaccggcgaccttgatgccgatgcggtactcagcgacgtcgaggacgacggcggcgatccgattccgctcgagacgaaggctccctcgccggaagacgtctccgtcgagaaactccgggatgttctcgccgaactcgatagggagcggt

SEQ ID NO: 13539 - DNA, 323 bp, Glycine max
  unsure (1)..(323): unsure at all n locations
  Clone ID: 700862979H1
ctgttaatccaggggatctgtggtcgggttcagaaggaggaggtataaaaatatggcctttggaggctgttgaaaaatctattcatcttacaaaggaggaaaggcacagtgctgccatatttgtggagaggtcctatgttgacttgaggagccagctatctacaaatggcttcagtaacatgctaacttcagatgtanagtacttagtatctgataattcgagagcanaggtgtggagtgctggctatttttcatttgctttgtgggatgctcgtacaagagagctactgaaagttttcaattcagatggacagattgagaat

SEQ ID NO: 13540 - DNA, 134 bp, Glycine max
  unsure (1)..(134): unsure at all n locations
  Clone ID: 700862981H1
accgtgaccatggcggctgcgtttacaagtacaagtgcaacactgagactgtcanatgttggagagagcagaggtttgcagctgcgtaagtgtaaccctaatcctaataagctgaaggttattggggggttttg

SEQ ID NO: 13541 - DNA, 333 bp, Glycine max
  Clone ID: 700862984H1
gatctctgacctcaggaatcttgaagttgaaagacacaggttgccgagcttgacgaactcgtcaatggcggagagggcaaaagaggctgagaaattaaatgaacaagctgcagtggctaacccagaggaagtggtttcaatggttgagatgagcatccaaaacagcacagagaggaggaagttgggatttttctcttgtggaactggcaaccccattgatgattgctggcgttgcgaccccaactggcaacgcaatcggaagcgtcttgcagattgtggcattggttttggccgaaacgccatcggtggccgtgatggaaaatctatgtggtg

SEQ ID NO: 13542 - DNA, 171 bp, Glycine max
  Clone ID: 700862985H1
gcctattggtaatccaggtatagtaccagcagttgcaccagctgtcccaacacaaattatgcctatcccagtgactgaacctgttggaaaccccagtgagtgtttactgttgaagaacatgtttgatccaaacactgagaccgaaccagattttgatctagacattaaaga

SEQ ID NO: 13543 - DNA, 329 bp, Glycine max
  Clone ID: 700862988H1
atgggtgcatgaatatagtgttgggaaatcttagaataatgattagtgattctgtgggattattaggggaaaaaaggtgaagagacgatgggtgcatgaatatagtgttgggaaatcttagaataatgattagtgattctgtgggattattaggggaaaaaaggtgaagaatcgaatcggtacgaacgcgattcttagctggagcgcgatgggaagattattgtgaagatttgtctcgatcgaccagaaaagcccgtttacttttaaagggggcttctgttccatattcacctcgtgtagaattagaacctgtactgtaaactcttttc

SEQ ID NO: 13544 - DNA, 319 bp, Glycine max
  Clone ID: 700862991H1
cgggcatcaggaactctatccactttatttgatgttggaggggtgctcggtggaattctagctggccacatttctgatcacttagaggctagagccattactgcagcaagtttcatgtactgtgcaatccccgctctcttcttctatcgaagttatgggcacgtttctttgattgtaaatggagcattgatgtttgtcactggcatgtttgtgaacggaccttatgctcttataactactgcagtttcagctgacctgggaacacataaatcattgaagggtaattcacgagctcttgcaactgtcacagcaatcattg

SEQ ID NO: 13545 - DNA, 275 bp, Glycine max
  Clone ID: 700862992H1
atttcattgatttctccctcttcgctctctctcagtgaccagagacagatgatgatggagatggcgaacgataacgctgtcgttgcggcactcgcggcgttggtgctactcgcggcgagtgtggcggtggatgctcaggagaactcggacgtgaagacgctggtgaagtacaagcacgggaagaagtactgcgacaaaggatgggaatgtaagggctggtcaatttactgttgtaacctcaccattaccgattatttccagacctaccagttcga

SEQ ID NO: 13546 - DNA, 325 bp, Glycine max
  unsure (1)..(325): unsure at all n locations
  Clone ID: 700862993H1
agtctgaggtcaagcagatgataanaaaaatatctaggcatgcctcatcttcaaaagttacaaatttaaatgaagtgcttatatctcttattagtactattgtatgtagaattgttttggggagaaggtatgaagaggagggatctgaaggtagcagattccataagttgttcaatgagtgtgaagctatgttgggtaacttctttgtttcagattatattcctttcatgggttggattgataaactcaggggactggatgcacgtcttgaacgcaatttcaaggagatggataagttctaccaagaagccattgatgaacacat

SEQ ID NO: 13547 - DNA, 324 bp, Glycine max
  Clone ID: 700862994H1
ggatttctgataacacagaccaactcatttgggcacatgtttagggcttataatgatgctgaaagtgagaggcatgaaggagtggagaacttctacagaaaaaatcacacttaccaatcaattgatttcgtgaagaaaatgagagaggagtacgcaaaattgaacagggtagagatgagcatatgggaatgttgtgaactccttaatgaagtggtggatgagagtgaccctgacttggatgaacctcagattgaacacttgctccagacagccgaagctataaggagggactaccctgatgaagattggttgcacctaactggc

SEQ ID NO: 13548 - DNA, 294 bp, Glycine max
  unsure (1)..(294): unsure at all n locations
  Clone ID: 700862995H1
acgcaacatatgtccttatctcttattctanactctgaataaacctgaagtatactactagggaagcatcagattttcatgctcctcctttcattanattaaagtgcagaacnagttctaggtatgganactctntcatatgggtcagcaccatgctgccaagtcgtgaactcatagtggacattagttgaatcagagttgagttcacgtcaatcaagagttcctctataggaaacttggagttattacacaggtactattctgcatgtgcgctgtgagatttatgagatggta

SEQ ID NO: 13549 - DNA, 242 bp, Glycine max
  Clone ID: 700862954H1
tctcgagccgattcggctcgagtatctttcaggaactcgtctgccatctcatgcagcaattatatgtggactggtaaagaataaggtaatacaccctaatccctgttaacttcttggcttacttagtccttatggtagacttgtgttttggcttgatattgacaatttcttattgatagcactgacatgaatgttttacaggtttatccggatttagaagtagcttttgtcatttcagaaga

SEQ ID NO: 13550 - DNA, 329 bp, Glycine max
  Clone ID: 700862927H1
gaaagtgagaggagagagaaagtagctgatcctccatggcctccaccaaggaacgcgaaaactttgtctacaccgccaagctcgccgaacaagccgaacgctatgaagaaatggtggaagcaatgaagaatgtggcgaactgaacgtggaattgacggtcgaggagcggaaccttctgtcggtagggtacaagaacgtggtgggtgctcgtagggcttcgtggaggattctatcgtcgattgaacagaaagaagaagctaaagggaacgatgtgagtgtgaagaggataaaggagtataggcagaaggtggagtctgagttgaccaata

SEQ ID NO: 13551 - DNA, 329 bp, Glycine max
  Clone ID: 700862928H1
ctttgttcttctaccttattttctttccctagtcaaggagattcatctctgcagcaggttgttttagaaaagaaaaaatgctgaagatttgctgcattggggctggatatgtggggggtccaacaatggcagtcattgcactgaaatgcccctcaattgaagtggctgttgttgacatctctaaatccaggattgcagcatggaacagtgaccagctccctatctatgagccaggccttgatgatgtggtgaagcaatgtcgtggcaagaaccttttcttcagcactgatgttgagaaacatgtctatgaggccgacatagtgttcgtc

SEQ ID NO: 13552 - DNA, 333 bp, Glycine max
  Clone ID: 700862929H1
tactcgagccgaatcggctcgagggtgagctcattgacaatggctgacccaaagtgggtcatacacggacaaaagatggtctctccatggaatgacagctctagtcacaggaggcacccgaggcatagggcatgccattgttgaagagttagctgagtttggagcaactgttcatatatgtgcacgtaatcaagatgatattgataaatgtttagaagagtggaaaaacaagggacttaatgtgactggttcagtatgtgatttactatgttctgaccaacgtaaaagattaatggaaattgttggctccatctttcatggaaagctcaatat

SEQ ID NO: 13553 - DNA, 334 bp, Glycine max
  unsure (1)..(334): unsure at all n locations
  Clone ID: 700862930H1
gtgatatgtatagcaatgatccaacctctgccaaacaagccatgtgcttctttcttgatcctgaaacgtccaaatatattgcatttgttcaattccctcaaatgtttcacaaccttagcaaaaaagacatctatgataatcaatctagaactgcttttaagactatgtggcaaggcatggatggactaagaggtccaggtctttcaggcagcggcaattacttaagtagaagtgctttactatttggaagtccaaaccanaaagacgactatctgaaggatgcacaaaagtactttggcaagtctaccgcatacattgaatcactgaaggccat

SEQ ID NO: 13554 - DNA, 309 bp, Glycine max
  unsure (1)..(309): unsure at all n locations
  Clone ID: 700862931H1
ttctacgcaacctttttcctntctccaatggcgcctctcttccaatgccaccatacccatcaccccctttttcgtctccgcttcacctaacatagtgatccaagattcaggttttgcttgatgctgatgggggtctttttcacttgtggtgatcactgaggtggtgatgctgtgagaagtatatgatttggtctttatctcgtgtgtttgtggagtttgctatttgaagagagaggtttatgaatttgacaagtggtagattttgttctttttgtggtaaagatatgttcttgggtggacgggggaatt

SEQ ID NO: 13555 - DNA, 334 bp, Glycine max
  unsure (1)..(334): unsure at all n locations
  Clone ID: 700862932H1
ttatgatggtagaagatcccttgaagagagcaacagtgaggcaaatcccatttcaagtggtaaaaaggaggattctgccatgggtgaaattatatattttcgtgattcagatgatgagatgccagattctgatgaggacccggatgatgatttagatatatgaatatactcttgttggtaacttttgtatccctaggtgacatgaaaggatagattaggtttatgactgaacaaaatgggaaaaaaataatctgatactgtttaattgcttagaagtgaaatgcagtgtgcatcacattccanaatattgtacaacctactgaggaacctgact

SEQ ID NO: 13556 - DNA, 271 bp, Glycine max
  Clone ID: 700862933H1
gaaagaatggatctcatgcgagcagctattgttggtgcatctggaaccccttatcatgaagggttgtttttctttgacatatgcttccctccggagtatcccaacgaaccacctatggtgcactacaattctggagggctccgattaaatcctaatctgtacgagtcaggaaaaatttgtctgagtctcctgaacacttggacaggcacaggtactgaagtgtggaccctggagcctccactattcttcatgtccttctctctctacaggc

SEQ ID NO: 13557 - DNA, 272 bp, Glycine max
  Clone ID: 700862935H1
ttctgagagtaacaatcaaagtttggaaaaaaaaaaagttttgagggaagaaaagaccaatatgctgggtgtggccactcttactttgggttcatccaccacaatggtggctcagaaccatgctcaacaacatgccaccactcttgcctcagccaatggaaacagaaggcacagtgtttccaacaggactcactccttgcctatgagtttggtgtctcccaccaaccaaagtttcacctttctctcttcctttaaagaacaacacttgaagg

SEQ ID NO: 13558 - DNA, 344 bp, Glycine max
  Clone ID: 700862936H1
tatgaacaaattgttcatagtttcttattaacaagttctttatcagaacttcaataagaatgatctcaaaattcttattaagaacatggagtatgggtatattagtttttatcaccttgagacaccactttctccttcatttccatctcttttccactcacgaatttgctgctctcaccattccaccttatttctgctcctctgccctgtttaaaaatcacagttacataccgaatttgtcagcaatacttttaccgttgggtcagttttttgttgattttgcgaaaattaattgtgactttttggattcaattgtaatatttttgctgtattttgcattctat

SEQ ID NO: 13559 - DNA, 176 bp, Glycine max
  Clone ID: 700862937H1
gtgtgattcctggacaaagagctcttgcattgcatctcctgtcgtctgtgcttgataaggcattacactatatttgcaaagacagaacagggtatatgacaaaaaatgagaacaaagttgacaaatcagttgactgggaagctgtctgggcttttgcactgggcccagaacctgag

SEQ ID NO: 13560 - DNA, 124 bp, Glycine max
  Clone ID: 700862938H1
gattaccacaggtaccttgctgagttcaagaccggggcagagaggaaagaggctgcagagagtactttgcatgcttacaaatccgctcaggatatagctcttgctgacttggaccgcactcacc

SEQ ID NO: 13561 - DNA, 334 bp, Glycine max
  Clone ID: 700862941H1
cacaaagcacaaagcaaagctcatccttgagttaaaaaatggcagcagcttcttccatggctctctcatccccatccttggctggcaaggccgtgaagctgggcccatcagccccagaagtgggaagggtgagcatgaggaagaccgtcaccaagcaggtctcctcaggaagcccatggtacggcccagaccgagtcaagtacttgggcccattctctggcgagcccccgtcctacctaaccggtgagttcccaggcgactacggctgggacactgctgggctttccgcagacccagaaaccttcgccaagaaccgtgaactcgaagtgatcca

SEQ ID NO: 13562 - DNA, 186 bp, Glycine max
  unsure (1)..(186): unsure at all n locations
  Clone ID: 700862942H1
acaattactactttctctctctttgtaacttgtaagcatggagtcctcaaagatctatgcttacctcttcctttgcatgctcttcctctcctccgccactcccattctcggttgtggctactgtggcaaaccccccaaaaagcacaagcctggcanaacaccaaagacacccacagtacccgttgt

SEQ ID NO: 13563 - DNA, 328 bp, Glycine max
  Clone ID: 700862943H1
aacgcaacaacgcaaactaacaacaaccaccaccaccaccacaacaacaacgtttgtgtctggtcgtgttgtgttgttagggattcatggcaacaataaacccttgattcctctccccattctcccaagagaagggccattttgttacagtgtcggacacttgcaaatggatttagaagacaagttcctcgctaaagggagggttctgggttctagtgcaggtcctctagctactgctgattgatgcatacatgataaatagtttctggtgttcaaagcctttcatccagtgcacaaagtactccagataaaaatggccattcagatg

SEQ ID NO: 13564 - DNA, 328 bp, Glycine max
  unsure (1)..(328): unsure at all n locations
  Clone ID: 700862944H1
gcaatgctgaatgaatcaaggattcacataattgacttccaagttgcacagggcactcagtggctgttgcttattcaagctcttgcatctcgtccaagtggagcacctttcattcgtgtaaccggagttgatgattcacaatcatttcatgcaaggggtggaggacttcacattgtaggaaaacgcctctcagattatgccaaatcttgtggagttccatttgaggtccacagtgctgctatgtgtggaagtgagcttgaacntagaaaccttgtaattcaacccggggaagctctagttgtgaacttccctttntgtttgcaccaca

SEQ ID NO: 13565 - DNA, 325 bp, Glycine max
  Clone ID: 700862945H1
attggttcctagcagatttgagccttgtggtctcattcagttacaagctatgcgctatggatctgtaccaattgttgcctcaacaggtggattagttgacactgtcaaagaaggtttcactggatttcagatgggtgccttcagtgttgaatgtgatgctgtggatccagctgatgtggatgctatagcaaagactgtcaaaagggcccttgcagtctatggaactccagcttttacagaaataataaagaactgcatggctcaagatctttcctggaaggggcctgctaagaagtgggaggaagtgctgctaagcctgggagtt

SEQ ID NO: 13566 - DNA, 329 bp, Glycine max
  unsure (1)..(329): unsure at all n locations
  Clone ID: 700862946H1
atttgtctcttctttgagagtttatgagaaagcgtccattgaaggaacagaagattcacatgagggaagatatgattctgatggttcagagaaaagccttgattcatttgttatccagctgtttgaactcatgttgaccattgtgggtaatccaagactgggaaaggtggttgtggctaatatcagagaattggtgtactatactattgcttttcttcaaatgactgagcagcaggttcatacatggtctgtggatgctaaccagttcattgctgatgaagaagatgccacttatagttgccgcgtctctggtgtgcttntactggaag

SEQ ID NO: 13567 - DNA, 332 bp, Glycine max
  Clone ID: 700862948H1
gcacccctaaagcactgacaactcttcttcttcacacttctctttcagatctacacaacacacaccaaaaaataaataaaatgcaactccaactcacactctccagtctcttcctctcccttttgttaacaataacattaacatctccaaccttggcagcacaaagcaagccgcaggatctggtccggtcctcgtgcgtgcacgcgcggtacccgcgtctgtgcctgcacaccctctccaactatccgggctccgccaacacgccattagacgtggcccggacagcgctgaaggtgagcctagcgcacacacgccgggcctccaagttcctg

SEQ ID NO: 13568 - DNA, 341 bp, Glycine max
  unsure (1)..(341): unsure at all n locations
  Clone ID: 700862950H1
gtggtaatggcagcgtcactacaagcagcagctactttcatgcaacccaccaagttgagcaggagcaacactttgcagcaaaagtctactcagtccatttccaaggcttttggtttggaacctgttggagctaaaaaggtcacatgctcccttcaggctgatcttaaggacttggctcacaagtgtgttgatgctaccanaattgcaggattcgcccttgccacctctgccctcgttgtctctggggcaagtgctgaaggtgttccaaagaggctaaccttcgacgaaatccagagcaagacctacttggaagtgaaggggacaggaacagcaaaccagtg

SEQ ID NO: 13569 - DNA, 286 bp, Glycine max
  Clone ID: 700862952H1
gatcacataacatggcatcattggcatgcaacacgtttattgttagcagcacgttaagatcagttgttactcgtgcggaaccacctaaacctggtcctcttttcgatcttagttcattcaatcgccacagctttccggcaggcttcactttcggggcatcatcttccgcgtaccagtttgaaggtgcggcaaaagaatatggtagaggaccaagtatatgggatactttcatcaatcaacatccaggtaagatagcagatggaacgaatggagatcgcgcacttga

SEQ ID NO: 13570 - DNA, 315 bp, Glycine max
  Clone ID: 700862953H1
gcagacttgcagatgccattgcagacatttcagacttggcgaagttggaaggatggtcccttcatattcaatactcgacctatgagctctgacccgtgccagcagccagctaggtttttcctggatcaggctacaaaggtgggaaaaagtggaagtatcactatctacaagagacatgaaggcaaggaagcaaagtgcaacagagaaggcactaataatgaggaagtgcaaagaattagagtttctgccttgaagctggatccagaatattggaagaatgtaccccgtaggcattgctgtcaacttttgggtggt

SEQ ID NO: 13571 - DNA, 306 bp, Glycine max
  Clone ID: 700862926H1
ttcccttgcacgtgaggcacttattagtgcaaatggggtcattgaaatttcattccttactaataaatattcaatggaattaagctctgtggcatacgatcaactttggcaatttgattcgcaagcacttcccaatgatcttatttccaggggaatggctgtggcagatcctaatgcaccacatggcctaaagctaacaattgaagattatccttttgccaatgatggtcttctcatatgggatgccatcaaacaatgggtcaccgactatgtcaaccattactatccaaccccaagcatcataga

SEQ ID NO: 13572 - DNA, 371 bp, Glycine max
  unsure (1)..(371): unsure at all n locations
  Clone ID: 700862902H1
ctcggaatcggctcgaggtgagaacgataatggagcattgtaactgctacatgttcacgctgagccttcttcttcttcttcttcttactccgccttctctctccgacgatctcggattcgattttccggcgaagaagctgataagagaccttaacctttttccttctgaagatgtcaacatcgttcctcgccactccaattctcacgccaacaaaatcgtcgagaaaccgcttaggttcccanacttagtgccttcagactccggcatttccctcgacgacttggctcaccgcgctggctattatcttattcctcattctcatgctgccaaagatgtctacttnttctttgaatcaaaggacagcaagaag

SEQ ID NO: 13573 - DNA, 344 bp, Glycine max
  unsure (1)..(344): unsure at all n locations
  Clone ID: 700862903H1
attgcccctggaggagaaaactgcgttgtcatttacaccaccacgttacgggggatcagaanaacgtttgaggagtgcaacaaggtaaggtccattgtcgagtcctattgcgtgcacgtggtggagcgtgacgtgtcaatggattcggggtttaaggaggagttgcggaagctgatggggaccanacaagttaaggttccggttgtgttcgtgaaaggaaggttggtcgggggtgctgaggaaattgtgaagttggaagaagagggataattgggtgttctctttgaagggtttcccacaaggctttgggggagtgtgaagggtgtggtggtgtgaagtttgta

SEQ ID NO: 13574 - DNA, 347 bp, Glycine max
  unsure (1)..(347): unsure at all n locations
  Clone ID: 700862904H1
ctccaaagtgtcatgaaaatagagaatgcttgctttggtgttcatgtgagagggtcagagtatattccacttcttggatccaacgatccaagttctttcttagtgggagttccagatattgaactatgagttatgcattggacgctttgtgagatccatgtanatgagagaatagtctgctagaaggttttggaggttgatatcactgcatggaccaatcttgactatattttgcgtttgcacatgatcatcgaagagganaattaagacgattcttaacaaagatgagaatgtacgcttctcattttatttgaaaaggttgataattttcacatgatgttattgaa

SEQ ID NO: 13575 - DNA, 138 bp, Glycine max
  Clone ID: 700862906H1
atcgagagtgtcttgtgttgctagtgcaagaggctgcaatatagatagatacgttcgtgcgtacgtaagaagggtacgtacgcggtagtacacaagacacgacgccgttttgcactctgttcttatttccgatcatga

SEQ ID NO: 13576 - DNA, 336 bp, Glycine max
  unsure (1)..(336): unsure at all n locations
  Clone ID: 700862910H1
caacggtatattgaacgtgtctgcggaggacaanaccactggacagaagaacaagattacaattaccaacgacaagggcaggctttctaaggaggagattgagaagatggtgcaggaagctgagaaatacaagtctgaggacgaggagcataagaagaaagtggaggccanaaatgcattggaaaattatgcctataacatgaggaacacaatcaaggatgacaagattgcttccanactgtcttctgatgataagaagaaaattgaagatgcgattgagcaggctatccaatggctangatggaaccacttgctgaggctgacgaaattgaggat

SEQ ID NO: 13577 - DNA, 324 bp, Glycine max
  Clone ID: 700862911H1
ccgattgatacacccttcttcgttcctcactcaccagccacagattctctcttctctattcagtaaacggctgttttgtatacgagctgtcccggtctcagcctctacatcccaaaacatcaaaacaactggttgggctccttgtatggcttcttcctcagttggtagaagagctacatattcaacacaatctgtatcgacaaatgagccagttgtatctgtagattggctttatgataacctgaaggagccagatatcaaggtactagatgcttcgtggtacatgccggatgagcagaggaatccaattcaagaatatcaggt

SEQ ID NO: 13578 - DNA, 325 bp, Glycine max
  unsure (1)..(325): unsure at all n locations
  Clone ID: 700862912H1
cgctagctanagctgatatgattatcacatagaacttgccaaaaaaaaaaagtactgcaaaaaaagggaaaaatagttggataaaaaacaatgattattaatttctcaaagttgaggaagaggagcttaaggggcaggactttaattatattagtattaatttacagtagctgtggcggtggttaatcatcaaaagctctctttttgatgcgagcgtgagtcaaaggcaggtttgttatggaacgaggagggggtttgaagaaccccaaattgaataaagtggttttgattggagggaaaagcttgaatggaaggatagggttcc

SEQ ID NO: 13579 - DNA, 360 bp, Glycine max
  unsure (1)..(360): unsure at all n locations
  Clone ID: 700862914H1
cgtagtaactcggaatcggctcgagattctcactcgtcgtcttcgtctgcgccctaaccaaattcaattcaaactcttctcatcaaaatccaaggctcgttcttgaaaccctaattcgatatcctcctcctcagaagaagaaggatcgatgtgggcagcttcttgcctggcgtcatgctgcgcggcctgcgcatgcgacgcctgcaggaccgtcgtatcgggaatcagccgccgttccgccaggatcgcctactgcggcctcttcgccttctctctcgtcgtcgcctggatcctccgtgaggtcgccgctcncctcatggaatcccttccctggatcaatcacttcaaacacacacctag

SEQ ID NO: 13580 - DNA, 334 bp, Glycine max
  unsure (1)..(334): unsure at all n locations
  Clone ID: 700862915H1
ctgaagaagagaggtatggcanaaagggtcttcttgtacaaggatttggttccttttggggccatggtgaccatggaatgcctcaacgtagccttgaatactctgttcaaagcagctaccttgagagggatgagttaccatgtctttgttgtttatgcttatgctgttgctgctattgttctcattcctggaccctttatctcccaaaggtgcagatcaagagtgcttcctccgctcagtttccccctactacgcaaaattggtcttctcgggctaatagggtgtgcttctcagatcgtgggatacacaggcatcagtttcagttcncccactc

SEQ ID NO: 13581 - DNA, 331 bp, Glycine max
  unsure (1)..(331): unsure at all n locations
  Clone ID: 700862916H1
cgcattcgtgagaanactcaatattcgtcgctcatggcactctcttctcgtctcttttccaaatccaaattgatctatggcagtcaaatacttctacaaaaggagcatgctattccagttcgtcactttgctanagagtctgcccctcctgcccttaagggagacgagatgctgaagaacatttttgtggaggtgaagaacaaatttgagaccgccataggaatattaaagaaggagaaaatcaccattgacccagaagatccagctgctgtttctcattatgcaaaggtcatgataacaattagagagaaggcaagcttattgtcggagt

SEQ ID NO: 13582 - DNA, 349 bp, Glycine max
  Clone ID: 700862917H1
cggctcgagcaaaattggtggtattggtaccgtgccagtgggacgtgttgagactggtgtcatgaagcccggtatggtggtgacttttggtcccactgggctgacaactgaggttaagtctgttgagatgcaccatgaggctctcacagaggctcttccaggtgacaatgttggctttaatgtgaagaatgttgcagtcaaggatctcaagcgtggttttgttgcatccaactccaaggatgaccctgccaaggaagctgccaacttcacatctcaagtcattatcatgaaccaccctggccagattggaaatggatacgcaccggtgcttgattgccacacttctcac

SEQ ID NO: 13583 - DNA, 350 bp, Glycine max
  unsure (1)..(350): unsure at all n locations
  Clone ID: 700862918H1
cgagccatatggaatttgacgagcacgaggaccaagagcaagaagaggaggaggaggaggaggaaatgggattctcagtggcggcggcggcgagttacgactcgctgggaaacgccgcggtgaggtctanaattagcggcggcgatggtgttgcggccaccgtgaattccggtcgcaaagggacggtgagatacagagaatgtcagaagaaccatgccgtcagcatcggcggccacgccgtcgacggatgctgcgagttcttggctgccggagaggaaggcacgctggaagccgtaatttgcgccgcctgtaactgccaccgcaacttccaccgcaaggagatcgacggc

SEQ ID NO: 13584 - DNA, 341 bp, Glycine max
  unsure (1)..(341): unsure at all n locations
  Clone ID: 700862919H1
cttcattctagaatataactgagggaagtatttggcncatgcttgctcaagaaagtttaaaggcattaggtggattgggtctgctttctcttggggcaaagtacattctcagaagagtttttgaggttgttgcagatacaaggagctcagaggcttttgttgctctttgcttgctgactgttgcagggacttcactagtcacacagaatttgggatttagtgacacgcttggggcttttttagctggagcaattttagcagagacaaacttcaggacccagattgaagcagacataagaccatttagaggcttgcttcttgggttgttatttctactacgg

SEQ ID NO: 13585 - DNA, 345 bp, Glycine max
  unsure (1)..(345): unsure at all n locations
  Clone ID: 700862920H1
ctcgagccgttcttcccaaccactactactcactcactgcagatctcaattgcatcgctgtccatggctaccatcgttagcatcaaggcccgccagatcttcgacagtcgtggcaatccaactgtcgaggtggatttgacttgctccgatggtacttttgccagagctgctgttccaagtggtgcatccactgggatttatgaggcccttgaattgagagatggaggatctgactaccttggaaagggtgtatcaaaggctgttgacaatgtgatcancgtcattggccctgctttgattggcaaggacccaactgagcagactgctattgacaacttaatggtt

SEQ ID NO: 13586 - DNA, 298 bp, Glycine max
  Clone ID: 700862921H1
gcactggacttggagaaagaaccacttccagagaagcataatgtcgacctaaggccaacgactgtaaaagaaaataaggacggaagctgcttaaacgtatttaccattatccaagaggcaccctgttcatctgtatcttccgccaacaagaattcaacatcaatatcagtgccactgagaaattcatgtgccctaagggagtttataccttcggtaaaagaggtaataactcgagatgataccaacgaatctttcgttactgatgagcttgaaaatcagaagtaggagatagatgatg

SEQ ID NO: 13587 - DNA, 336 bp, Glycine max
  Clone ID: 700862923H1
ttgccctctccttttctctctctagaattctcagatttgcggggcgagatgatgcagcagccaggacccggcatggcacctcccaccatgggccagcagccgcagcaacagtaccagcagcagcctccgccgcagcagcaacaaccctacgtcatgatgccgccgcagcatcaggcgccgcagcctatgtgggccccatccgcccagcctccgctgccgcagcagcctgctagcgccgacgaggtccgaaccctctggatcggggatctgcagtactggatggacgagaactatctctacacctgctttgctcataccggcgaggtttcgtcagtt

SEQ ID NO: 13588 - DNA, 336 bp, Glycine max
  Clone ID: 700862925H1
caaactctttcttccaaaactttgttattcctaatgggacacagcctgagtacattcatccttacctcatccaatcctcaaactcttcactctcagcctcattccctcttctcctcttcaccacagcactcctgtaccaagcttttgtgccagatctcactatctctgcctctaaaacatactcatcatatcaacaaaaccgtgtagtctcatcctacagtgaccttggtgtcactttggacattccaagctccaaccttcgattctttcttgtcagaggaagcccttatataactgcttctgtcacaaagccaacacctctttccatcaaaacag

SEQ ID NO: 13589 - DNA, 147 bp, Glycine max
  Clone ID: 700764650H1
ttcaaagttagcattgcagtacagcttgttaaataaggcaatcacatcagtgcttgtaggcatgaagtctgttgaacaggtggaggaaaatgttgctgccgcaagagaacttgcaacttctggaattgatgaagagactctgtctga

SEQ ID NO: 13590 - DNA, 146 bp, Glycine max
  Clone ID: 700764651H1
taataataaacctatattctaaagccggccaaataccaaaaggaataacagcacatgtctggaaaggtaattatctcggctgattctctcatcctggtgcttagagtagccatatgtatagttctgaccgtcaacaatacgggcga

SEQ ID NO: 13591 - DNA, 142 bp, Glycine max
  Clone ID: 700764652H1
atcagatctaccacctcgcgtgtcccgcgtcgccggtagcactacaaatacaaccccatgaagaccatcgacgaatgtgatggacacgcttaacatgcttggccttgcgaaaagaattggggctaggtttctgcttactagt

SEQ ID NO: 13592 - DNA, 140 bp, Glycine max
  Clone ID: 700764653H1
ggcgaagggtgaagacgctttgattcgcaagaagactaataagcttcgaatgaagaacagcagcggctcttcctctgtctccgccaaggttgccgtcgtaatcgtcggcaagacgcgccgtaatgccggtaaacgccgct

SEQ ID NO: 13593 - DNA, 140 bp, Glycine max
  Clone ID: 700764655H1
ccttggatgaatctcaatctgaatcagtcctcctcctcgtcgtatcaggaataaataatcatcggaagaagaatcaggtatggatgttgggaccgtgctgctactttgttgggtgactctgatcccggggattttatcag

SEQ ID NO: 13594 - DNA, 90 bp, Glycine max
  Clone ID: 700764656H1
attcacccttcacacgtggtggtggtgttgttcttcttctcttcccctttctttttcttcttctgagcttgtttaagctctttctatttg

SEQ ID NO: 13595 - DNA, 139 bp, Glycine max
  Clone ID: 700764657H1
caaagtttcttcctttctctgctctttgccttctctgactcatttggtgccttgtagagcgtgttttggcaggaaggtggtatggcgaaggacgttgaggttgctgagcgtggctccttctctgggaaggactaccagg

SEQ ID NO: 13596 - DNA, 140 bp, Glycine max
  Clone ID: 700764658H1
actaactcctcttcacacattttcttagctctctccaacaatccctctcgttcacatgattcagattgtgtgaagatgggggctggtggtcgaactgctgttcctcctgccaacaggaagtcagaggctgaccctttgaa

SEQ ID NO: 13597 - DNA, 140 bp, Glycine max
  Clone ID: 700764659H1
atggtgatgaaccaccatcaagatatgtagttaatggaaatagctttggatctaaagattcttctgtacagtttccaatacccatcattgatgtgcgtctcctctcatcagaagatgagctagagaagcttagatctgct

SEQ ID NO: 13598 - DNA, 145 bp, Glycine max
  Clone ID: 700764660H1
ctagtaacctcttgttggggcaagcagtcaaaaaatgaaccagagcaaatgaaattcgaatggctattcctcacgattgctccttgcgcggcggtcaccattaacagtccgctggatcgatttgagataatcccattgattgata

SEQ ID NO: 13599 - DNA, 102 bp, Glycine max
  Clone ID: 700764661H1
cgtagtacgtcggcttcggctcgaggaaggctgaggtggcaaaactaagtgttggaccaccagaggatgactgtgatatcaccccggttgtgtcagaatcat

SEQ ID NO: 13600 - DNA, 146 bp, Glycine max
  Clone ID: 700764662H1
agcatgtgaatgcgaagtgtgtctctctccgaattcagcaacctcgttgaggactacaggtgcagctcatagtgccagcttgctagagctggaagttgctgactagagcatgagctgcgttgaaattcttggtgtatatagagggt

SEQ ID NO: 13601 - DNA, 145 bp, Glycine max
  Clone ID: 700764667H1
atcgtgtcctcgacttgaatcagtacatatcgtgtggagtgaacctgacacctccgtcagataatcttttaaaatttctgcatcacgttgtaaagtccaagtctaaagatggaagatatgtgaaattgaggtttgatatcaacaa

SEQ ID NO: 13602 - DNA, 148 bp, Glycine max
  Clone ID: 700764668H1
agtgggttgagtagttctgcatcatagtcttaaacattaaagcttcgtagacgtcgacaatgctagacatcaaaggccaactggtactcttcttcctatggctcatatcaacgattctgatacgttccatcttcaagaaaccacagcg

SEQ ID NO: 13603 - DNA, 141 bp, Glycine max
  Clone ID: 700764672H1
ggcagtgataatagatgtgcatccattgggtacgtggatgtgcacgtgtgggaatttggagtgcatgatgagccacattcagagggataaaataatggttcttatgttgatttggagtggggtggtttaatttgttggggc

SEQ ID NO: 13604 - DNA, 140 bp, Glycine max
  Clone ID: 700764674H1
agcatcacttgggtcaatagatttcatcacctctttatgtcaatctgaagatgagtcagaaaagatcaaggaagctgttaatacatcttcttatggaagtgaatatcttcatgctgccctttcagttaatcagaaggtaa

SEQ ID NO: 13605 - DNA, 141 bp, Glycine max
  Clone ID: 700764676H1
tacaaacatggcaatgaagcagttcttgtgggttgttctgtccctttctttggtccttggagtggccaatagctttgattttcacgacaaggatttggagtccgaggaaagcctgtgggacttgtacgagagatggaggag

SEQ ID NO: 13606 - DNA, 148 bp, Glycine max
  Clone ID: 700764678H1
gccctatttggaggaaaaaaggacaataatgggacaagtgatgatgttccttctaaggccggaattctaggaaacatgcacaatctttatgagactgtgaagaaggcacaaatggttgtccaagttgaagctgtgcgtgtgcagaaag

SEQ ID NO: 13607 - DNA, 148 bp, Glycine max
  Clone ID: 700764679H1
gcaagaatggcacttcgttgcatggtgatgtcgcttctgttctcttcactcttggtcttgcgagagaaagccatgccaaagacgaagatttttggcatgctgtttggccaaacactcccattccaagttcattgcgagatcttctaaa

SEQ ID NO: 13608 - DNA, 158 bp, Glycine max
  Clone ID: 700764681H1
tcggtcttcggctcgagcttgatctacgttacgcttttagtgaccggatctgtatggatgtgaaccagatctacacgccgaaggtggttttggcctggtctttcatagatctgatgcatggaggctcagatctactgtacagaggtgtgcgattcatg

SEQ ID NO: 13609 - DNA, 144 bp, Glycine max
  Clone ID: 700764682H1
gttctagatcgcgagcggccacccttttggattagcataacagagagatccatcctcagtcattcgcaatggcccgacgactccttcgacttacctccctctgtcagctctccatcgccgactcgcgtcgcctcctctcctctg

SEQ ID NO: 13610 - DNA, 144 bp, Glycine max
  Clone ID: 700764683H1
gagaaaagttagggttcacaacttttccttttccttttgcttgcgaatctgaatcaaataatcaatcatccattcattattcatcaagtcgtcggcgaagaaaatcacgctgaagagttcggacggcgaggctttcgaggtgga

SEQ ID NO: 13611 - DNA, 147 bp, Glycine max
  Clone ID: 700764685H1
cgctcgagcgaatcggctgagcaccctacaacaacaacacaaccactcctcacacaactaatggaagaagggcaaagaaaaacaacaacactacttctatgctcccacattgtggttcttcttttactctccctagtggccgagact

SEQ ID NO: 13612 - DNA, 144 bp, Glycine max
  Clone ID: 700764649H1
ataccaatatttaaagacgagtaggtttcatgtgtcatgggacaagatatttctttgatggaattcttttccccttattcctgtttgttttttcaattcatccatgcctgctcattgtaaacgattttatagctgtttgatgaa

SEQ ID NO: 13613 - DNA, 147 bp, Glycine max
  Clone ID: 700764686H1
atttctcattctcccatttcctctcagaaccctcgatcactcccacgcgctcctctatcctctccttcaccgtcgctctctccaacgatcacaacaacatcgtcatcccatggcaaacgccgcatctggtatggcagtccatgatga

SEQ ID NO: 13614 - DNA, 145 bp, Glycine max
  Clone ID: 700764687H1
ggaggaaatccgcttcatggtcagtccagaactgatggttggcatgcttttcttgccagctatggcagataatgaggctatagaaattgttggtgtggaaaggttctcaagttatacagggtatgcttcatcatttcgattttct

SEQ ID NO: 13615 - DNA, 142 bp, Glycine max
  Clone ID: 700764688H1
tttcacccttcacacgtggtggtggtgttgttcttcttctcttcccctttctttttcttcttctgagcttgtttaagcgctttctatttgattgccattaacatatattatcacaatgtgtggtattcttgctgttcttggt

SEQ ID NO: 13616 - DNA, 104 bp, Glycine max
  Clone ID: 700764689H1
gcacgcacgcgcacggaagcccggacgacggctcgagagatccagtggcttcacctcccacgtcgcaatggcaatggactcaagggtacgtcaagcaaggagtg

SEQ ID NO: 13617 - DNA, 140 bp, Glycine max
  Clone ID: 700764691H1
gttcgattcttttggtgttccagggagatcgattgataccgtcccgttgattttccaattcgacgaataagggtatcacatctcttaatcaaccatgtttacccgaatttttggtaaacctaaaccggaagtcaatactc

SEQ ID NO: 13618 - DNA, 140 bp, Glycine max
  Clone ID: 700764692H1
gtgaactatgcctgagcggggcgaagcagaggaaactctggtggaggcccgcagcgatactgacgtgcaaatcgttcgtctgacttgggtataggggcgaaagactaatcgaaccgtctagtagctggttccctccgaag

SEQ ID NO: 13619 - DNA, 71 bp, Glycine max
  Clone ID: 700764693H1
cacctctccaaaacttgtatctgaggatattattactcagcaaaaattcatggaagttccacacagcatac

SEQ ID NO: 13620 - DNA, 148 bp, Glycine max
  Clone ID: 700764694H1
ttggatatctgctgtacttctaaaaagaatggcatgctgttgcttcatggacttgggatgcccaggatgagacctgtgggatttgtaggatggcctttgatggatgttgtcctgactgtaaacttcctggagatgactgcgcattgat

SEQ ID NO: 13621 - DNA, 150 bp, Glycine max
  Clone ID: 700764695H1
caacaatgggaggtgcttatcaagaatctggtcgagtgtggtatgcaaaagacatagcaatcccagaaagggcttgtgcatggatgtctcatggtttcatgagtgtaaatacaaagttgggagctgggaaagcttttttgagatcccttt

SEQ ID NO: 13622 - DNA, 151 bp, Glycine max
  unsure (1)..(151): unsure at all n locations
  Clone ID: 700764696H1
ctcacttccttgtccgattcctcccaacgatgccagttaancagatctatctgcttctacgtcatggccaccggacaactattctcccgcactacacaggctttgttttacaactataagccacttcccatacagcggatgcttgattttg

SEQ ID NO: 13623 - DNA, 231 bp, Glycine max
  Clone ID: 700764589H1
atgtgaactctgaggatataaaggaaactggatacacctatattatgccaaagaacattttgaaaaagttgatatgcatagcagatcttcgaacacaaatttctgggtacatgtatagcgtaagtcctccagataatcctcaggttaaagaacttcgctgcattgtgatgccaccacaatgggggacacatcaacaagttcatctgccatcagctcttccagagcatgatt

SEQ ID NO: 13624 - DNA, 232 bp, Glycine max
  Clone ID: 700764590H1
cgaacattgttgaggtgtttccactcatcctaattcaccaagcagggctcctgcgtcgacctctgcagctcagaggggggatgatgactcaactcctacaattgatgttgccaatctgtctccaactcctgaaactggagaagaatcatcgcatccgactgtagtggcgcctgttcaagcagaacaggtatctgcgtccggctctggaactactgcgctagcgacagcgcaa

SEQ ID NO: 13625 - DNA, 234 bp, Glycine max
  Clone ID: 700764592H1
tggaacctccgagttggtttcgccagagcggcctaacaagacagctaggagattatataaggcatgtttgaataagcttgtgagtgtgtggtaaataagctttctggaactactatggcacaggtttacattatagatctcaagaatgtacttgtgaaactatgcaccttgatgtattgtgttgtatttgaagggaccatttgcattaaaaaaagtggaaaaggggggccgccg

SEQ ID NO: 13626 - DNA, 233 bp, Glycine max
  Clone ID: 700764593H1
agaggatgggtgcagaagcaaatggcggcgagaagcaattgaaatttctgatctacggtcgcagcggttagattggtggtctactggataagcgctgcgaagagcgcgggatccaatatgagtacggcaccggcagattggagaaccgctcgtcgttagaggcggacatagcggctgtgaagcccagccacgtgttcaacgccgcgagtgtcacgggtagaaccagtgtggac

SEQ ID NO: 13627 - DNA, 233 bp, Glycine max
  Clone ID: 700764594H1
gttgctttctgtggaggtggtgctcgaggggaagctagggtcgagtcgagattcagggaacttcgcctccactccaagtagcttgtaaaaaagaagtggctgtttggaatcctggatgattttatcacaaagcaacttccacataatgtgacgttgcggctgagcttaatatatgccatggaacacacgggagatcgcgcatcagtaacgactcagggggagctggcacatgc

SEQ ID NO: 13628 - DNA, 226 bp, Glycine max
  Clone ID: 700764596H1
tcggctcgagcaaacaatggagagatctagatgatgagtgcgatttgtgggactgcgctctctcccaaccacgtcttcaaaccaggggacacacattcaatttgtaaaggaccatactccaatctttgtgtacccatggttgtattggcaacagggcctggtataggaggttgggtgctggaaaagccagttattgaaaaagtcacccctagccgtgagtctgaat

SEQ ID NO: 13629 - DNA, 157 bp, Glycine max
  Clone ID: 700764601H1
ctcagtgaaagagaatccgaggcgaagagaagagaaaaattaagatggaggggaaggagcaggatgtgtcgctgggagcgaacaagttcccggagagacagccgattgggacggcggcgcagagccaagacgacggcaaggactaccaggagccggc

SEQ ID NO: 13630 - DNA, 149 bp, Glycine max
  Clone ID: 700764603H1
gtggaattcatgcctttcagtttgtccttctttttgaccataaatgctgtcatgtggttcttctatggccttctcctcaaggactactacatcgcactcccaaatactcttgggtttctattcggcataatccagatggtgctgtattt

SEQ ID NO: 13631 - DNA, 143 bp, Glycine max
  Clone ID: 700764604H1
gagaaaagttagggttcacaacttttccttttccttttgcttgcgaatctgaatcaaataatcaatcatccattcattattcatcatgtcgtcggcgaagaaaatcacgctgaagagttcggacggcgaggctttcgaggtgg

SEQ ID NO: 13632 - DNA, 145 bp, Glycine max
  Clone ID: 700764605H1
gaacgagagagagaggttaggctatggctgatgacagcgttcttgagtccccagtgaacaggcagagagatgatggtgaagaaaatggtgtctctgtttccatggacgcggagggtgacgaagaccctcttagtaacggtttatc

SEQ ID NO: 13633 - DNA, 93 bp, Glycine max
  unsure (1)..(93): unsure at all n locations
  Clone ID: 700764606H1
ggaattcggctcgtgctctgagtgactcggtatggcggcggtatcgggtggtacgcagacnatctttgatctacccgaggaggtggtgcaagt

SEQ ID NO: 13634 - DNA, 159 bp, Glycine max
  Clone ID: 700764608H1
attcggctcgtgggaggacattcgcttcatggtcattccaggactgatggatggcatgtctcttcttgccaaatatggtagatattagtaggctatatgtattgttaagtgtagaaaggttctcaagttatacaggggatgcgtcatcatctcggttgt

SEQ ID NO: 13635 - DNA, 145 bp, Glycine max
  Clone ID: 700764610H1
gatttgtaggcttctgtacattctatcaagagtcgatatcccaagatctcaagtttacgtgaatttttcattgccaaataccaagaaaattctccgagttttaaacttgcccagaggaacttcgttgaaagtatggccggatatt

SEQ ID NO: 13636 - DNA, 148 bp, Glycine max
  Clone ID: 700764611H1
cagaacgatgaggatggtaaggtggaggatgtcaatgaggagaaggagaaggaagaaaaaacacaaaagaagatcaaggaagtgtcacatgaatggaccttggtgaacaagcagaagcctatttggatgaggaagcctgaggagatca

SEQ ID NO: 13637 - DNA, 152 bp, Glycine max
  Clone ID: 700764614H1
aagagagatagggagagcgagcgtgagaggaagatcttcgatttagggttttcaatttcgtattcagcaaggcggcgagttgagagatttttagagagagagaggtgagaacgctgagtgctctgctgagagattccattgccccaagagaa

SEQ ID NO: 13638 - DNA, 164 bp, Glycine max
  Clone ID: 700764615H1
cggctcgagtacagattaatgtatctgtgattagacttgaattgaaagtacgctactatttaaatgattcgtgaatatcgtaatcactatacaatctccttcaaaagagatcaatgtagctagctcgctcttgactgtatgatggtttacacccatgtatactg

SEQ ID NO: 13639 - DNA, 156 bp, Glycine max
  unsure (1)..(156): unsure at all n locations
  Clone ID: 700764616H1
ttctactactaccttacttggtaactttcataacctagnantaagagcgtctcagattttggtaacaatgctggccattggggcacatggcactagtatccgcacaagctctacttgcactgctttgctcagagaacttgagcaaatatggaacga

SEQ ID NO: 13640 - DNA, 169 bp, Glycine max
  Clone ID: 700764617H1
gcgtacgtaagcactcagctcgaggtcatcactggatttggcatcgactctctttgacgtctcttgctacatgatgtacctctgattgaagttccttcccgcttattcctggctgggctctacaattcgtccataccggctcatggtcactcggtttctaacgggagac

SEQ ID NO: 13641 - DNA, 141 bp, Glycine max
  Clone ID: 700764620H1
ggctcgagcgatctcggctcgagtgtgtcaggattagcaggtgcgtcgctctcgaacgcagctgtagaatttcggtcaacaggattcgtacgtcaggcttctgatggcgtccgaagaggatggggcccgtttctgaaggga

SEQ ID NO: 13642 - DNA, 142 bp, Glycine max
  Clone ID: 700764621H1
cttacttgcatgttatttgatcaggtgaccagcagccagaatagtaaaggagaacaacttgatctaggtgtgaggcttggtttgctgaaattagtaagtggaatatctggcttgacacaagatgatctcccagaaactttat

SEQ ID NO: 13643 - DNA, 135 bp, Glycine max
  Clone ID: 700764622H1
gagcaactcaccatgaatgatcggcgtggaccacccccggccgcactatcaccaattgatgcaatgcctactattaagataacacaggcgcatcttcgcttggattcacactgtccagtttgtaaagaaaaattt

SEQ ID NO: 13644 - DNA, 142 bp, Glycine max
  Clone ID: 700764623H1
acggccatgatgaaaatcctcttcattcacatcggggaatgactactcagattcatgtatagggcaaaacgtaagagacatcgacgcattacaaatgttgataatagatatgtttgaattagaattataggtgattttattt

SEQ ID NO: 13645 - DNA, 87 bp, Glycine max
  Clone ID: 700764624H1
gtgtccaattccgacaaattgaggctctactcgacagaacaactacccatgatttcaatcgaccttcgattcctcttccgcatcaaa

SEQ ID NO: 13646 - DNA, 143 bp, Glycine max
  Clone ID: 700764625H1
gtctgaaataaaccagagccttagaggaggagtttctggttggacaatagcagaggagaaaatcaggcctaaatgtacaactcatcaatttgcagttttatggttagtactaatattttgcagcctaggatggtaattgcgag

SEQ ID NO: 13647 - DNA, 234 bp, Glycine max
  Clone ID: 700764588H1
gaattgttgatcagaaaaggttgagggtgaagaaagagactagtgaaaagcaagtatggggatggactactatgggattttggaggttgacaggaatgcctcagatgaagagttgaagagagcctacagaaagcttgcaatgcaatggcaccctgacaagaacccaaccaataagaaagaggctgagactcaattcaaacagatatctgaatcctacgaggttcttagtgatcc

SEQ ID NO: 13648 - DNA, 143 bp, Glycine max
  Clone ID: 700764626H1
accaatttactagggttgtatacattttccgatggcttctgcagatgttgagtaccgttgctatgtcggtgggctcgcttgggccactgacgaccatgccctcgagagaggcttctctcagtacggcgaaatcgttgaaacga

SEQ ID NO: 13649 - DNA, 123 bp, Glycine max
  Clone ID: 700764627H1
aaataggggatagaactttgaactatcgggcggtggagagtatgagcttcggatctatgtgtacctaagcccagtccgtatcagctcaatctgctctgcgacgccattcactagatctgcagt

SEQ ID NO: 13650 - DNA, 154 bp, Glycine max
  Clone ID: 700764630H1
atttcagtggttttttaagttttgtcttttctatggtgcagtcttatattgtatacttaggatcgacattctcatggcccaaacccttcagcaagtgatctgtgagtctgcgacgaattgccattacaaattattatgctcacacttggggaag

SEQ ID NO: 13651 - DNA, 153 bp, Glycine max
  Clone ID: 700764633H1
acacaactagccttcttcaagtgttcttcctctttaatttctctatagaatacttacccttttctcaagactaacctctcgatccttctcaaaagaagaaaattaaaatggcaactgaaaagcttagaggttgtgcaaagttttttgcaagct

SEQ ID NO: 13652 - DNA, 148 bp, Glycine max
  Clone ID: 700764635H1
caccagtcaccacctctgaactctctctctcatctataagtcaacatggcgacatcatgacgattcaagtgcatggaattcgagtaaacctcaccctaagctcaatgaaagaattctgtcttctctgtcacggagaactgttgctgct

SEQ ID NO: 13653 - DNA, 142 bp, Glycine max
  Clone ID: 700764637H1
ctttcattcctttttttttactcttggaaagcgtagttcggtgttggagaaccagcttccagttccagaatactgctgaacagagttcggcttcgctttattgggactcagttgtgtttctactaggttatcttctctgaat

SEQ ID NO: 13654 - DNA, 137 bp, Glycine max
  Clone ID: 700764638H1
taacacgctatggcggcggaatcgggtggtacgccgacaaactttgatcttcccgaggaggtggtgcaagtgctaccgtccgatcccttccagcagctcgatgtggctcgcaagatcacttgcattgctctatcgac

SEQ ID NO: 13655 - DNA, 140 bp, Glycine max
  Clone ID: 700764640H1
ggcagtgacaatagatgtgcatccattgggtacgtggatgtgcacgtgtgggaatttggagtgcatgatgagccacattcagagggataaaataatggttcttatgttgacttggagtggggtcgtctaatctgttgggg

SEQ ID NO: 13656 - DNA, 143 bp, Glycine max
  Clone ID: 700764641H1
ctcataacgcaaagcacaaagcaaagctcatccttgagttaaaaaatggcagcagcttcttccatggctctctcatccgcagccttggctggcaaggccgtgaagctgggcccatcagccccagaagtgggaagggtgagcat

SEQ ID NO: 13657 - DNA, 144 bp, Glycine max
  Clone ID: 700764643H1
atgtggatcaaaatatttaccaaattccgcaagagccacactgcattgattgtccaagactgcctgactcttgggtgcgtacggggatgattattgattcagatctgcaacaagactcaactacaacggagacggaattactat

SEQ ID NO: 13658 - DNA, 144 bp, Glycine max
  Clone ID: 700764644H1
cgcgtcgctgctccgtaccagtttcactgcataaatttgagagacaactctgcaaacatgttggtttatcatgacctccttacaggcgatgagcttctctcggactccttccgttacaatgaaattgagcatggaatgctgtgg

SEQ ID NO: 13659 - DNA, 142 bp, Glycine max
  Clone ID: 700764645H1
ttcagatttttctcctgggaaaacgtgttcaaaatttgttcgcgtttagtaatacagaaatgtcttagaagagattttgaacacggtttcccaggagaaaacgtgttcaaaatttctttgaagacatttctgtattactaaa

SEQ ID NO: 13660 - DNA, 148 bp, Glycine max
  Clone ID: 700764647H1
caacgattgatggtgtgtcacaccaccgaagaaggcttcaggaatctacatagcttttgcctcagagcgttgaaaattcccagagtctctcgcttcgtcaaaatttcgccctctgtcattcaattctcttctctgctcgtctcttctg

SEQ ID NO: 13661 - DNA, 235 bp, Glycine max
  Clone ID: 700764543H1
aattttccacgagtatctttaccaggctatgattgatttaggtctcgagaatgaattgctagagtatgggggtcctgacctgttgccatttttgcaaagtgccggtcgtaattctctacacgaggttcgtgctgtgacagccacaatttctccagtgggacaatcgggagcacctatgtcatctaatcaagtcaagtactatgaacttttggcacggtattatgttttgacacgc

SEQ ID NO: 13662 - DNA, 234 bp, Glycine max
  Clone ID: 700764544H1
ggcgatgagtgtgggtattatgtgatgcattggatgtggaacataattggcgcagagttgaagagtgattggagtgtgtggttcggtgatggctcggcactagacccggaggcgatcacaacattacgtaaaaaatgggatatgtagcgccaaatgtaagacaaaaatggatgtaggattatgtctttgtaggtgttatcttcatctatgagaggtcgcaaacatacaatagtt

SEQ ID NO: 13663 - DNA, 235 bp, Glycine max
  Clone ID: 700764546H1
caaagagggagtatcaactcttgatacttcatttaactgctttcgtgcttatggaggttgctgtggaactggaaaatgacctatgttgtgcagacttgagcaagcaaatttctctcctaattatggatgaagatgaagacccccttgctacttgtcctcctgactctcttcagactttttctggatcaatctatcatcctccacaatctgcgttcctctatgagcaggctttgat

SEQ ID NO: 13664 - DNA, 227 bp, Glycine max
  Clone ID: 700764549H1
gtgacacagaattaagcgagagcttcatagtttcttcttcttttctcaccttccttctctcccttcagacaaagggacaaaaaatcagtgtgtgagagagagagagagcaattccaaaaccatgtcccacagtcatctaagtttcgccttgcggattctaggtaacattgccgccttcgtgtgctttctggcaccactaccaacattttatagaatttgtaagaaga

SEQ ID NO: 13665 - DNA, 235 bp, Glycine max
  Clone ID: 700764550H1
ggagcgtgttgtacaaggggcaattttttcaaaacctttatctctctcggaagctcacctcttcctccttcaagctctttcggaatttcccaaaatccttaatgggaggaagagatggttctgactcagaagcttcacgaagccttcaaaggcaccgtcgagaggattactggcccccgaaccgtgtccgccttcaaagaaaaaggaggtctcagtgtctctgacttcgtcaccg

SEQ ID NO: 13666 - DNA, 234 bp, Glycine max
  Clone ID: 700764551H1
gaacattgcacctgcaacgtcaacttcacttctccgttctaacactcgccatgttccttagcaagacatggagacagacggctttcggtgtttttaggtacctgaatttcaccaaagctggcttccttgatcattctaagaaattcaacccagaggacatggaattacgaataccagggaagaattgcattgttactggagctaactctggaattggctatgcaacggctgagg

SEQ ID NO: 13667 - DNA, 234 bp, Glycine max
  Clone ID: 700764558H1
tagggcgtatggtcgacgcgttgcgagtacctattgatggaagaggggctctaagcgatcacgagcgaagacgtgtgcaagtgaaagcccctgggattattgaacgtaaatctgtgcacgagcctatgcaaacaggcttaagagcagtagatagcctggttcctataggccgtggtccacgcgaacttataatcggggaccgacacactggctaaacagctattgctatcgata

SEQ ID NO: 13668 - DNA, 231 bp, Glycine max
  Clone ID: 700764559H1
cagactcgtgaacatgctctgctttcattcacccttggtgtgaaacagatgagttgttgctgtaacaagatggatgctactacaccaaagtactccaaggccaggtatgatgaaattgtgacggaagtttcttccgattcgaagaaagtaggatacaaccctgacaagatgccttttgatcctatatctggttttgagggagacaacagagtgagaggtccacaaaccttg

SEQ ID NO: 13669 - DNA, 82 bp, Glycine max
  Clone ID: 700764561H1
ccaatttgcagagtggagtctgcttgcggggcgcactgtgactccgtaggcgctcttcaaccgtctaaaacaccaccctcgt

SEQ ID NO: 13670 - DNA, 237 bp, Glycine max
  Clone ID: 700764562H1
cctttccttggccaaccttatttcggtccaaatgagattgggtatgttcgacggcgaaccgtcaacccaaccatacggaaacctaggcccaagagatgtgtgcacctcggcccctcaataattggcccttgaagcagctagcgcgtgtatagtcttactacatgacataggtaactccctaccattcatcccctgtcaagacttcgtactatacgtgtcggtggacccaatactgat

SEQ ID NO: 13671 - DNA, 238 bp, Glycine max
  Clone ID: 700764563H1
ctcattgctttgctcacattcaatttcgaaggcgtagagtgagatccgaacgatgaagagagtatccggcgtcaagaagaacaaggatccacccccttccattcaggatgcttccgaaaggattacaaaacgaggtgacacggtggatgacaagattaagaagcttgatgccgagccccgtagatataaagagcagattaagaaaactagacctggtcctgcccaggaagctgttaaa

SEQ ID NO: 13672 - DNA, 61 bp, Glycine max
  Clone ID: 700764565H1
gataattgaaatgtgagagtgagaaggagagagcgagaattcggaaaggctaatttcggaa

SEQ ID NO: 13673 - DNA, 229 bp, Glycine max
  Clone ID: 700764566H1
cagtcatgcgatgcatcactactgttagcgacggtgaacgatgtagtgtcggagcaggcgtcggatagaagtgttgggatgagaaaccgcaagtacgtaaacaccatcaaagcagcggttgagaaagaatgccccttgacggtttcatgcgctgacattcatgctctttctgctaaagatggcattgccttcttcggaggaccaagcattgacatgaagacagggcgaa

SEQ ID NO: 13674 - DNA, 234 bp, Glycine max
  Clone ID: 700764568H1
attctcttcagtttaaagttacatagtttgtcaatgtgttacttaatctacaatggctgcttcaacagtggctctctcttcatcatcagtggctggtcaagctatcaagcttactcccctccaaccctgagctgtgtgttggacgggttagcatgcggaaaacagcctccaaaactgtttcctcaggaagcccatggtacggacgagaccgtgtcacatacttgggcccatgct

SEQ ID NO: 13675 - DNA, 223 bp, Glycine max
  Clone ID: 700764569H1
caaacatcgaggaggagatgggtcaactgttgcaaattgctatggcgtgcgcttccgccgtgctggatcagaggcctagcatgctagacgtggtgcgtatgattgaggacattatccgtggcgaggcttatgatggcttgggataagcggcggatgagccttcctaaggatccgagggtcaggcaccagccccagagtcaaggactccaactagggcactcag

SEQ ID NO: 13676 - DNA, 223 bp, Glycine max
  Clone ID: 700764570H1
gcggcttctttcgccaagattaagtttcaccagtaatgggtaagccgaaggttcacatgaacatcgtggtcattggccatgtcgactctgggaagtcaaccaccaccggtcaccttatctacaagctcagaggtattgacaagcgtgtcatcgcgagattcgagaaggcagctgctgagatgcataagaggtctttcaagtatacctgggtgcttgacaagct

SEQ ID NO: 13677 - DNA, 230 bp, Glycine max
  Clone ID: 700764571H1
tgtgattccagaccttaatttttctctcattcgcttcaaatgtcaggaaatcaagtatggctcaaccctccacaagagtaggccttgctggactggctgttatgggcccaaatctagcactcaatattgctgagaaaggctttcccatttctgtttataaccgaaccacttccaaggttgatgagactgtagaacgagcaaaacctgaaggcaatcttccagtttatggc

SEQ ID NO: 13678 - DNA, 235 bp, Glycine max
  unsure (1)..(235): unsure at all n locations
  Clone ID: 700764572H1
cacacttccacgtcaccaacaagggaatggaaggtngagcgtgaggctgtttccggtaaccgctcccggcggcgctgagtcgtgatcaaggaaatggggcagacgctgagttgcgtgcaacagcacgaggaccatggtgtgctcttccctgcacttgcaaatggagaattggagcttgttgaggccatggtggagggagaccccactgtgttggaacacaccattggctgtgaca

SEQ ID NO: 13679 - DNA, 233 bp, Glycine max
  Clone ID: 700764576H1
gatggagtgaactagatgctgcaattttagtacgaggagacatattcagcatcaagttaggagagatcattccggctgacgctcgtcttcttgagggtgatcctttgagtgttgatcagtctgctttgactggagaatctcttcccgtaacaaagagcccctcggatgaagtgttttcgggatcaacagttaagtagggtgagatagaagcagttgtgattgctactgggggg

SEQ ID NO: 13680 - DNA, 235 bp, Glycine max
  Clone ID: 700764577H1
cgtatatccattggagaagttgaccgtggaaggcgagttttaccgcaaatcatgctttaggtgtgcacatggaggatgtttcctgaccccttcaacctatgctgctctagatggatatctttactgcaagccccacttctctcagttgttcaaggagaagggtagctacagttatctgtccaagcaagcttcattgaagaaaagtgaaatgcaacaacaagaacgcgaggctgtg

SEQ ID NO: 13681 - DNA, 234 bp, Glycine max
  Clone ID: 700764578H1
attgaactgaaccttaaattaattatagaaccatgtttgcacataccaattcctccactttgtcacctttattctctttcagtagaacaacagcaacctctctgccttccaaacccacattctggaatttggttccaatgaaacaatcttcttctccggggcacttggccttagccttagacaatccacgtagaacacttcacgtgtcttgtggctccacatcaccacatgctt

SEQ ID NO: 13682 - DNA, 236 bp, Glycine max
  Clone ID: 700764579H1
ctcagccattaccacctcttcactctttctctctcttcccaaactaaacataaagctacattacacatttctagggttctctgacacaccaagattctcctagctgcagctgaaggactgtgaagatgttggagagcgttgaagaatttaacacggagaggatgatggaggaatttgagagggtgacaaaggatgctgagaggattcaaagggaaaccctgaagaggattttggaa

SEQ ID NO: 13683 - DNA, 70 bp, Glycine max
  Clone ID: 700764580H1
caacgttcacataccacgtagaaacagttcaatcatgcttagcgctgagcagacttcagctactcatcca

SEQ ID NO: 13684 - DNA, 232 bp, Glycine max
  Clone ID: 700764581H1
caaacctaaacaaccccttttgcctaaagctccttccttttctccaatggcaacctgggttttatcagaatgtggcttaaggcctcttccaccagtgtttccacgctcaacaagacctctttcgtgccaaaaaccttcaaagtctagatttttaagcacaaacaagggtgtgccagatctgaatctccaagcaagagggttaacatgctgtagttttaaggatagatagtgg

SEQ ID NO: 13685 - DNA, 238 bp, Glycine max
  Clone ID: 700764542H1
tcaagaagcagactcaggattctgaatccacgcctccaagaatcacatccaacgtcaaacaaaacctccgcttgctaaagctatggaagagcttccagaatagaaattctagcactcctaggccttctaccagttaccgcaagaagaaggtcgagaaggaagatgatgttgttgacacagacctctatcgtgatcccaccacctccctctactacacaaaccagcagggtatattaga

SEQ ID NO: 13686 - DNA, 230 bp, Glycine max
  Clone ID: 700764582H1
caagatttctgatttctatgtgcagaaaggtcgtctatcagaggatgaggcacgattctatgcagctgaagttgttgatgctctcgaatacatacataatttgggagtcatacagcgtgatattaagccagagaacttattacttacagctgccggacatattacaatagccgattgtgggagtgtgaagcctatgcaggatagccctataactgtccttccaaatgcag

SEQ ID NO: 13687 - DNA, 202 bp, Glycine max
  Clone ID: 700764584H1
ctcgagccgattcggctcgaggggccgcaccgcagtcaacgtcgctagaatctacgatccaattaccagcacgtctcaagtaagaccgccggtgcactgactcgagatgttacggtctcaaaggaggccatgtggaatcggtacacatcaacagaggtctatgcaagcgtcacttagagctgtaacctctgcggcgaataat

SEQ ID NO: 13688 - DNA, 232 bp, Glycine max
  Clone ID: 700764585H1
attccttgaagcctatgctgctgcctcgcaatgggaagagtgccgccaatgccactggggcttctctcaaattgccgcctctggcctcttactctgatgtttatggtgatttgattaggcagaaagagggcaactgtgccctctgcgctcaccaatgtggttctggacattaccgatgtacacaggataattttattatttgtgcaaattgtgtcaaaagtgggaattatgg

SEQ ID NO: 13689 - DNA, 217 bp, Glycine max
  Clone ID: 700764586H1
ggggatgtgcgaagaacacagaacgacgcaaatccaagactgaaagtttctagattcgtcacctgcgaattcaatatgccccacaaattcatggcgttcttgtatatctcctgtgaatccatttcagataatttgcgtggctctgggtgctttcgggacttaggaggtggagacatattttgtgataagccgatacccaatttggatcagtggtttg

SEQ ID NO: 13690 - DNA, 241 bp, Glycine max
  Clone ID: 700764511H1
gaacaagagataaccgaataaacccacaaaacaacacaaagcagcacaagaaggtgttccattttcaacactcatcagatcccagtcatcaattgcgttaacaactcgtaaggcaaccatgaggggcattctttctgtaaggacagccttggttcaacatcgtagtgagaaattgggccttggtttcaggctatttagcactcagggtgcttccactgctagtaccccacagccgccgcca

SEQ ID NO: 13691 - DNA, 241 bp, Glycine max
  Clone ID: 700764513H1
caaaaaccaatccacaccctataaaataacactcctttgtgtgtctgcattttgattgattccctcattcttcatccatagacatggccaccgtcacttctgcagccgttgctattccctcattcactggcctcaaggcaagcgcaggcaaagtgagtgccgcagttaaagtctcagctccccaagccacaaggttgggcatcaaggcttcgctgaaagacgttggagtcgctgttgtggc

SEQ ID NO: 13692 - DNA, 239 bp, Glycine max
  Clone ID: 700764514H1
caactggctccagacagtggcttctaatcctgaagcaatcctcttcaagtttgtacctatttcctcacttctcacaggaattcctggaagtggctatcttagtcatgcaatcaatttgtatttacgctataagccccctccggatgatttacaatgcttcttggagtttcaaattccaaggcaatgggcacccatgttttatgaccttcctctgaggcatcaaaggaaaaagtgttctt

SEQ ID NO: 13693 - DNA, 244 bp, Glycine max
  Clone ID: 700764515H1
acgaaacagaaaatgccaggactcacagcaccttccgattactcccaagaacccccccgccactcttctcttctcatcaacgccaaggaccctttcaatgcggagccaccgcgtgctgcgttggttgcttcctacgtcaccccttccgatttcttctataagaggaaccacggtccaatccccatcgttgagaacatcaacagatattccgtgaacgtgtccggcttggtggagcgtcccaaac

SEQ ID NO: 13694 - DNA, 244 bp, Glycine max
  Clone ID: 700764516H1
ctctttctctcttcatcatcgtcccctctctctcttcctttgccttgtctccgtgtgaaagatcacaactccaccgtcaccgatttccaaggtttcttggtgctgctggtgtattatacatgcttacatctgcatgtgctggtgagatgtgcttgcgttggaaattctccttcattctctctattccccacttttctgtagcactttacccttcacggatcttttcaagcattttttggttatg

SEQ ID NO: 13695 - DNA, 236 bp, Glycine max
  Clone ID: 700764518H1
aaaaaatgggttcttctctgtggacctgtctgattttgttatcacttgcttctgcttccttcgccgccaacccaagagcaccaattgatgtgtcatttggcagaaactatgtgcctacctgggcctttgatcacatcaaatacctcaatggtggttctgagattcagcttcatcttgataaatacacaggtactggcttccaatcaaaagggtcctacttgtttggtcacttcagc

SEQ ID NO: 13696 - DNA, 152 bp, Glycine max
  Clone ID: 700764519H1
gttctagatcgcgagcggccaccctttttttggttaggttttgcttaaaagaggggaaatggtaggttgacaagttaggaagcagaatgaggattttttattttatcattcttgaagtgtcattgcaactcccccctttctcacaaattcac

SEQ ID NO: 13697 - DNA, 237 bp, Glycine max
  Clone ID: 700764520H1
gcacgaacaaacaatcacattacacacttctctctcttcaatggccggaatccgcttgctgccggaagactcccacgtctcccaacaatcccgcgcggtgcctctctccgccgccgatctggtctccgacgacgaccgctccgtcgccgctgactcctggtccatcaagagcgagtatggcagcactctcgacgacgaccagcgccacgccgacgccgccgaagctctctccaacgc

SEQ ID NO: 13698 - DNA, 237 bp, Glycine max
  Clone ID: 700764521H1
gcagaagaagaagaacaacaacaaagggcttctgaattatcgtgttttgatcagaatctgaggagaaaatcacataatttcgaatttgagttttcgtgtagaaaaaggaagagaagaaaatggaatcggaggatttggtcaaacaggaattggaggaattgcagaaacaattggggaagaagcaaaagtgtgaagcttctgtttcgtctcttaaaacccgtctccaacgcacttacc

SEQ ID NO: 13699 - DNA, 87 bp, Glycine max
  Clone ID: 700764522H1
gtgcaagagcggttcataaaccgcacttacacgcacttgacagctgtgttccgcaatccttcacgagacgtgttgtaaaatgttgtt

SEQ ID NO: 13700 - DNA, 240 bp, Glycine max
  Clone ID: 700764523H1
gatgacagcaaagtggtatctcattgtgtgtgttgtagcgatctgggccgttgatctgggttcatcatcacaccatgcccgtgccccagcaccagcaccgtcagtggagtgttcaaacctggtattgaccttatcggattgcctcaccttcgttagcaacggcagcaccgtcaccaacacacagggaacatgctgctcttccttgaaaactgtgctcaacacagcccctaagtgcctttg

SEQ ID NO: 13701 - DNA, 240 bp, Glycine max
  Clone ID: 700764524H1
gtttactctggttatacttgttatactggcgttgcagggtttgtgcctgctgacattgaaactgttagataccgagtattcttgggacacaaacaatactttgtatcttcagatgttggtgcgggaaagatgcaatggtatgcatttcacaaagaacctcctggtggtgttgatgagcccaacggaaaaaaggtcaggttgcttaggatatttgagggctggtgtgataatgctgtagat

SEQ ID NO: 13702 - DNA, 240 bp, Glycine max
  Clone ID: 700764525H1
ccagtttataagcctattccaaaaccaattcctattgttaagcctattccaaagtcaattccagttgctaagccaattcctaatgaagaagaaaaattcaaaggatttattccaaagccaattcctataattaagcctattccaaagataattcctcattacgaaacctattccaaagataattcctattgttaaacctattcctattccagtttataagcctaaaccaaaactaattcc

SEQ ID NO: 13703 - DNA, 109 bp, Glycine max
  Clone ID: 700764527H1
cagagcttcaggaagccagtgctagtgatggaggggcacaggacaatggtcggagagttccctcaaagtgcctgcccaaatacgcgtgctgcatgcgagcaggcactcg

SEQ ID NO: 13704 - DNA, 237 bp, Glycine max
  Clone ID: 700764528H1
aggaggaggatggtgtccccgatgtcaacggttctggtgacgggaggggcaggcttgatcggatcccacacggtgcttcagcttctgaagcagggcttcagggtttccatcatcgacaaccttgacaattccctcatcgaagccgttcacagggttcgccgcctagtcggtcctcatctttccaacaacctcaccttcttccacggagatctccgcaatgttcaggatttggaggca

SEQ ID NO: 13705 - DNA, 225 bp, Glycine max
  Clone ID: 700764529H1
attagtctcatattcattcggagatgagtggttgcaatcacaaaggtaatggatagcagaactgttgtgtgatagtccataagttacggcgttaacatatggatatcggacaacagttctgctactgagtacctttgtgagtgcaaccattattctcatattcaggcggagattatgcaaccaaacctcagaatcagaatatgcaaagcttccaccagggcctcg

SEQ ID NO: 13706 - DNA, 236 bp, Glycine max
  Clone ID: 700764530H1
tttcgggggagtttcttcttggatcttaccctcttgtttgctaatattctcattcttctgtctctgcttcttctccttgtaagttctctcgctcgctctctccgcctgtttcttctccttgtggactgtaagagctgaactaagagatggggttgtctttcaccaagctttttagccggctctttgctaagaaagagatgcgtattctcatggtaggtcttgatgctgctggtaag

SEQ ID NO: 13707 - DNA, 241 bp, Glycine max
  Clone ID: 700764531H1
cccctcccaatcctctttttctcttaatttctcatcatatcatatctattaatcttacacatatattaagacatagatataatttttttcgttttatttttccttgcatgggctgttaagataagatgtctcgcacgtgctcacagtgcggcaacaacggccacaactcgcggacatgcaccgacggtggcgccgccgcttcctgcggcgggtctcccagggcgaacggcatcatgctgtt

SEQ ID NO: 13708 - DNA, 161 bp, Glycine max
  unsure (1)..(161): unsure at all n locations
  Clone ID: 700764532H1
catccacttagtggcagtgttgtctctctgttactaccgcatcacccacttcttcctccaacctccaacagtcgncatggcttctcatgactgctgcggagcttcttctctcgctgctctagttcttcaaccaagccttccggtggcgaccggtgtcgcgg

SEQ ID NO: 13709 - DNA, 226 bp, Glycine max
  Clone ID: 700764533H1
gaagagggggtcagagtgagaaagagaaagagagaattcgtaaaccctaatttcggaaagatcggcgatgactgcctccaaggatcgcgagaacttcgtctacatcgccaaactcgccgagcaggccgagcgttacgaagagatggtggaatcaatgatgaacgttgcgaatctcgacgttgaactgacggtggaggagcggaatttactttctgttgggtacaag

SEQ ID NO: 13710 - DNA, 235 bp, Glycine max
  Clone ID: 700764534H1
ctcttttacaccacttcaacttctagtgaaatatctgatcaattaatggctcagtatttctctttgtatgttttggtgtttgccagcctagagatggctggattcaatgcaccgctaccgctaccatctccgtcatatggaaatcatacaaccattctcagcatagacggtggtggtatcaggggcattattcctgcgactgttcttgaatacttagacaaggctcttaaggcta

SEQ ID NO: 13711 - DNA, 233 bp, Glycine max
  Clone ID: 700764535H1
tccgggcagacattgctcttgagttggcctggatgaacaatatgattgactttgccttaccatatctcctgcagtttatccgtgagtacactggcaaagttgatgaactggtgaaggataaaatagaagcgcagaaccaagtgaaagctaaagagcaagaagagaaggaagtaattgctcaacagaatatgtatgctcagttgttgcctcttgctttgcctgcaccgccaatg

SEQ ID NO: 13712 - DNA, 235 bp, Glycine max
  Clone ID: 700764536H1
ggtaaatggggttctcttcactggtggatgggctaaaagtggtttatattttgaaactgtcacaaaaatatttaagaaaattttagagaagaatgatgctggagatcatttcccattatttgccacctgcttaggctttgaactcataacgatgatcataagccaggacaataatattcttgaagagtttagtgcatcaaatcaggcaagtactcttcaatttgtggagaatgca

SEQ ID NO: 13713 - DNA, 234 bp, Glycine max
  Clone ID: 700764537H1
cgtcaggttcatcgtcccactttcttctccttttagggtttcctttttgtttctcctttccagatctgcatcttccattttttaggattaagcggtgagattcgtgaatctgagaaatgtcggattcttctcgggaggagaatgtttacatggcgaaattggcggacaggccgagcgttacgaggagatagttgagttcatggagaaggtagcacagactgtggaggttgagga

SEQ ID NO: 13714 - DNA, 238 bp, Glycine max
  Clone ID: 700764538H1
gttcttttcttctctgtcttcctttaccaaccccaaacatttcttatgtgttaaatttactgattctactcagcaatcagcaatcagcaatcagcaatcagcaatcagcatcattacttttcctttgatttataatcaaaaagcaagggacagacacacagaagttgttatcttgaatcagaaaacatgatgctaagaagctcttcaacaccagttcttggatccctcctctcttcct

SEQ ID NO: 13715 - DNA, 240 bp, Glycine max
  Clone ID: 700764539H1
agtctgtaaaagatattacgaaccttataaaagagccatagtgagtcctactttgtggatgctcagcctcatgacaaagagcatggagacccgggaagaaagggccctttttcttcaattttgagggctttttactgaataagtttgtagtactaaaatgtatgctgtaatagctcatattgagcgatggaaagtatcgggctatttaactatgacttgagctccatgctagtataaata

SEQ ID NO: 13716 - DNA, 229 bp, Glycine max
  Clone ID: 700764541H1
ctttcgctctcttctctgcaaatgcttcagtccaagatggttaggactgtgtaggctgataaagacaacacgcataccgttggaaagaaggatgctgctggccatgttgctgaatttagttcttgcttcctttgtcttcttgagttttatcagagacgggagtgcagggatcactagctctttcattcggtcagagtggccggcaggtgacatcccccttgatcatgaa

SEQ ID NO: 13717 - DNA, 237 bp, Glycine max
  Clone ID: 700764510H1
caagacattactatgttatgggacataatagctgcggcgagaacagaaagcaatagagtagtgatatcttggaacataataccttcaatgcaaaagaccaaacatcttggccctgtaacaaatgggaatggaggctcctaaaatgaccctcagaaccttggcagctctggttgtaactccaaaatatcactactctattactatctgtcgttgcagcaggtattatgttcgaagaca

SEQ ID NO: 13718 - DNA, 246 bp, Glycine max
  Clone ID: 700764501H1
caatgccagtgttcccgaaatcgtgggcggcgattctgttatcattcgataacgttggggtgtggaacttgaggtccgagcttgctgagaatcgctacttgggacaacaattgtacatcagtgttctacactcctgagcgttctctgagggacgagtacaacatcccggagtacgcgttgctttgtggcgtagtgaagggtctgccaaagccagagccatatcactgatgttgggccactatgaag

SEQ ID NO: 13719 - DNA, 239 bp, Glycine max
  Clone ID: 700764502H1
gttaatttgagcataaaccataaacgaatcttgtgctttttccgtgggtttgagatggatgagaatgatgatgatgaaggaaaactatgtgatacgtctctctcttcaagaatcaaaggaaaattagattaattgtgacgatgatgatcagagaggaaaagggtgtgaagcctgttctactaaaatttggtttggctttggctctttcatttgctggatttatctactcacgcctcaga

SEQ ID NO: 13720 - DNA, 89 bp, Glycine max
  Clone ID: 700764503H1
cctaaatacaattaactaaaccaacaaacgcaaactcaattcctggtttattcgaaggcacgaaagcatacagaaaagaaaatgggggc

SEQ ID NO: 13721 - DNA, 237 bp, Glycine max
  Clone ID: 700764504H1
cgcgtcgctccgcaccagtttcaccgcacgaatatcttattgtttggagcgatccgagaaaaactctgtaaacatgttggtttaccaggacctccttacaggtgatgagcttctctctgactccttccgttacaaggaaattgagaatggaatgctgtgggaagttgaggggaagtgggttgttaaaggagcagttgatgtagacattggtgcaaacccgtctgctgagggtggagg

SEQ ID NO: 13722 - DNA, 241 bp, Glycine max
  Clone ID: 700764505H1
aaacgatccaaactcttttttcatttgcagcatcaaaatgagtggtagcaacgatggtagcggcagctggagctctaggtttttgaaggtggctagtgcagctgccgctacagccgccgttgccggcggtttatatgccattctttcatcctcaacctctgctagctctgagatggaagtgccgtttggcagcgcacggcgtgagagcaaagaacgtgacgatcgtggctccgggtctcat

SEQ ID NO: 13723 - DNA, 240 bp, Glycine max
  Clone ID: 700764506H1
gaaagaaagaagttctaaggaagagggaatatgcagaatacaaggtgctaattgcctatttgcaataacaacatcagcgatccaaccttagtattcttcaacccagagagagttgtaataataaatgacaacaacttaaacgatgacaggaggagcttatgtagattcgggaaatgcagagcaatttgatgggaaggtcacggcattcgtattagttacatgctttgtggcagccatggg

SEQ ID NO: 13724 - DNA, 240 bp, Glycine max
  Clone ID: 700764509H1
ctcgagccgctcgagccgcgcaaactcattctgggcggcgatagttttatcgttctctatctccaagataggtcggagaacacggtacgatgtcacttgcctccgatgatcagaatccaccacttcttcccgtgcacgagccaatggaaggaacacgcaccagcgtctccttcagcatcaaaacaattctaacactggaaaacttgtagtggattctaggacctatgctgtctcttttca

SEQ ID NO: 13725 - DNA, 247 bp, Glycine max
  Clone ID: 700965264H1
ccttgatagtgtgctcaattataagccaaaagctgggcttctgaagcctgcatttaccattatacgtgatacacaatcaaaatgtttacttctattgatccggggtactcatagcataaaacgacaactgacagctgcaactggtgctgttgtccccttccaccattcagtgttaaatgatggtgggataagcaacttggttttaggatatgcacactgcggtatggttgctgcagctcgttggatt

SEQ ID NO: 13726 - DNA, 256 bp, Glycine max
  Clone ID: 700965265H1
gtctcaatatcgtgcagtttgtgctagtctcttcaatctcttattgctaacgacacctcttcctgttccacgctgcatcagcctcagagcacccgctagggtttcttctgcacacccaaccaaatggcggatcctgagttggaagcaatcagacagagaaggttgcaggagcttatggctagccatggtggcgtgggaaatcaacagaaccctgaacaggagaaagctcaggatgatgcaaagagggaggctgagg

SEQ ID NO: 13727 - DNA, 242 bp, Glycine max
  Clone ID: 700965267H1
gtctgggaccattcgagtgcatgatgacctgcttctggctgcctctgaggctttggctgcacaagtgagccaagagaactttgataagggactcatatacccaccattcaccaacatcagaagatttcagcacacatagctgccaatgttgctgctaaggcttatgaacttggcttggccactcgccttcctcaacctaaagatttagtgaagtttgcagagagctgtatgtataccccagc

SEQ ID NO: 13728 - DNA, 241 bp, Glycine max
  Clone ID: 700965268H1
tgattgccaagcctgctgggtctgattctattgaagggtatggcacaaagcttcagaaagaggtgaatggcaagaaagggtgggtggatcatttgttccacattgtgtggcctccttcctcatcaactacagtttctggccccaaaaccccccttcttacagggaagttaatgaggaatattgcaagcacctaagaggagtggtagacaaattgttcaaaagtatgtcggtagggttgggg

SEQ ID NO: 13729 - DNA, 240 bp, Glycine max
  Clone ID: 700965269H1
ctggatttgtctaataatcatctatcgggagtggttcccgataatggctccttctcattattcactcctatcagttttgcaaacaacatggatctatgtggacctgtcactgggcaccctgtccaggctctcctccattttctcctcctcccccttttgtccctccacctccaatttctgccccagggggtaatggtgccactggagcaatagccggaggtgttgccgctggtggtgctc

SEQ ID NO: 13730 - DNA, 243 bp, Glycine max
  Clone ID: 700965270H1
atgcacagttgctgtggttgacagggggagtccctcaattcttgcactttctaggcaaaagttgacccaacttgcaggaacttctattgatggagttgcaaaaggtggctacagcatttcagacgcctcatcaggtaaccagcctgatgctattttgattggaactggttctgcagctggaacttgctgctgctgctgctgaagatctaacgtatgaacgaacagctgttagcgttgtatctc

SEQ ID NO: 13731 - DNA, 242 bp, Glycine max
  Clone ID: 700965271H1
ggactgtttaaatattcatggaaaacaaaagcaacatgccaggactactacgttcttcaacttctgcaaagcagaaaaggggatcttgctctgtactgatgttgctgctcgtggacttgacaacctgatgtggactggattgtgcagtatgatcctcctgatgaaccaaaggaatatatccacagggttggtagaacagctcgtggggaaggtggaaaaggaaatgctttacttttcctgat

SEQ ID NO: 13732 - DNA, 244 bp, Glycine max
  Clone ID: 700965272H1
ctcttcctcaccgattgctagaatggaatttcgatgctcagtcatctcttttaccattctcttctctcttgctcttgcaggagagagccatgtccatgcatcgctacctgaggaagattattcggaagctgtttggccaaacactcccattcccactgcactgcgagagcttctaaagcctctccctgcaggtgttgaaatcgaacgaatccctaagcaaattgatgatacacagtacccaaaa

SEQ ID NO: 13733 - DNA, 240 bp, Glycine max
  Clone ID: 700965274H1
caaattcgcaagggagctgcacttaacgcaatctagattgctgagatgttgctatgagttctggtttttcaaggatctggtacttaaagattatgattcttttgaaacagttttgtatgtgctagttgtatgtggttattcatttcttttgtgatgtttaactagtccaagtatcttttcaacgatgtggtagcacactagctggaaacagtttttttaaggtcttggtgcgtaatatct

SEQ ID NO: 13734 - DNA, 239 bp, Glycine max
  Clone ID: 700965276H1
gattgtggacacacaggctgattgtaataaccggaagataactgcttttataggaggtcttgatctatgtgatggtcgctatgacacacccgagcatcgtctgtttcgtaatcttgacgatgtatttgatggtgatttccacaatcctacattttctgctggaacaagagttcctagacaaacatggcatgatttgcactgcagagtagatggagctgctgcatatgatgatcttatta

SEQ ID NO: 13735 - DNA, 243 bp, Glycine max
  Clone ID: 700965278H1
atcacaaccagaaaacaaagaaacagaggcagagatatatgattatgaatttctcaacagaaccctctgcctcacgcttaccattctgatctccacttcttcgctgtgcgacgaagtgaaattcgttgctgcaaatagtgagaatttgctgtctttggtcagagttgctccgagtgatcgcttcccctggtgcgacgaagtgaaatttcgttgctgcaaatagtgagaatttgctgtctttgg

SEQ ID NO: 13736 - DNA, 246 bp, Glycine max
  Clone ID: 700965280H1
gtcaacggcatcatcgaagggtttcaacggtttccaacacttgtagcttcggttctggcgtgggaaagttctcttctttgaagatgaagtctcaggttctcagatcttggtcctcttcttctggtttcagggtataaagcttgtctttcatgtaaatagaggattacccaatagggtcaattcgcgcttgagagcttcaactggggctcagatgagctttagactagggaaagttcagaaatggtg

SEQ ID NO: 13737 - DNA, 263 bp, Glycine max
  Clone ID: 700965281H1
attcggaattcggctcgagagagaaggaaagggaaaatgggtaaggatctgagcgaggaacaagtgtcttccatgaaggaagccttctctctattcgacactgacggagacggtcggatcgctccgtcggagctggggatcctgatgaggtctctgggaggtaacccgacgcaggcccaactcaaagccatcgtggctgaagagaacctcacggcccccttcgacttcccccgattcctcgatctaatggccaaacacattaa

SEQ ID NO: 13738 - DNA, 240 bp, Glycine max
  Clone ID: 700965283H1
cgcaaagagaagagatctgcctcctttttatcaaatctatctcttcttcaagaatagttgaaaatggggctgtctttcaccaagttgttcagccgactgtttgccaagaaagagatgcgatactgatggtgggtctcgatgctgcgggtaagaccaccattctgtacaagctcaagcttggagagattgtcaccaccattcccaccattgggtttaatgtggaaactgtggaatataaga

SEQ ID NO: 13739 - DNA, 240 bp, Glycine max
  Clone ID: 700965284H1
caaaaaccagcaactatatacattgccatattctgctactcctcaattcaacacacgcatatatatccatggcatcacctcaaacagacctcagaaagattgctctagaaggcttcgattaatagacaagctctacggtcgaaggggccctgccaacaatgatgcgttccccggccgacgagaaggcttttgggtggttcatcaagtccctaatggcgacatggatcaaaagcctcggaa

SEQ ID NO: 13740 - DNA, 238 bp, Glycine max
  Clone ID: 700965285H1
tgcagctgcttccagtttctctctctaaaactcgcaaaagcgagttactgaaaccctagcctctgtttctgtgtttatttacttcgattctacgcatcgaattcaattctctgtgatctaacccgtgaaatcaatgtgcctctttcggaatcgcagagcgagcaacggtgaccgccatcatcatcgatgaagcgatcgggtcggtggcagaggactctgatcctcgctcttctctttc

SEQ ID NO: 13741 - DNA, 239 bp, Glycine max
  Clone ID: 700965286H1
tctcgagccgaatcggctcgaggttcacttccccttccagaattctgcgtttcacacatctcactttctttatcagtcagtttttggcttctaggttttcagtgatttgttctaaagtttagattgtgttattatcccactacagttcacactctgtaacaatacgtggggaaagcctagtgcttgtggaaattcaacaactgttggagttttcttcattgattgaactttgtgtcgtc

SEQ ID NO: 13742 - DNA, 233 bp, Glycine max
  Clone ID: 700965287H1
ctctcttgtgttagtgagagaaagttctctctgcttctctctcttagactcaaaaccctattgcgcgctttgcaatcgaccccgattatggccaacagtaacctccctcgaagaatcatcaggagacgcagcgttcgctcagtgagccagcacctggagttagtgcgtccccttcggaagacagtatgcggtatttcaatgtgatgatccttggcccaactcagtcgccttat

SEQ ID NO: 13743 - DNA, 238 bp, Glycine max
  Clone ID: 700965289H1
atcggagagtttgagtatgttgatgaccacagggctggtaaaatcgtggttgaattgaacggtagactgaacaagtgtggggttattagtccccgttttgatgtgggcgtcaaagagatgaaggttggactgctaggcttctcccctcaagacagtttgggtatattgtattgactacctctgctggcatcatggatcatgaagaggctaggaggaaaaatgttggtggtaaggtatt

SEQ ID NO: 13744 - DNA, 239 bp, Glycine max
  Clone ID: 700965290H1
agcgcctagggttttccaaggcggcggcggtggcgaggccggtgcagtggttcatcggagaccccgccgcagcaacaacaaccaggcaagaaggcggcggcgaagatagtgagggaaggggtggagttttacagcaatggggatttctacgaaggggagtttcacaagggaagaagcaacgggagtggggtctaccattacttcgtgaatgggaggtacgaaagggattgggtggatgg

SEQ ID NO: 13745 - DNA, 237 bp, Glycine max
  Clone ID: 700965291H1
gattttattttcctcttcaagctccggccatggcgtctggatcctcgggtcgcggcaactctgcctcgaaaggcttcgatttcgcttccgatgacatcctctgctcctacgacgactagccaaccgcgattccagttccaacggcaatcacaccgatccggattttcacaaatcaaggaggatgtttcccactactgcctataatccacctgaagattctttgagccaagatgtgat

SEQ ID NO: 13746 - DNA, 237 bp, Glycine max
  Clone ID: 700965292H1
tacctattcactattccttaaaaaactcgaggagatggcaacaccaagagaactaatcatcaattctcatcttttttgggcttgattttggagggatcagcctctcgtgatcaacatggcttgatctccacaagattatccctttgacacttcaagtactaccaacattgattaaatcagactagtgaaatgtcaaaagaaaaggactcagctgacaatcaagtggatacattttct

SEQ ID NO: 13747 - DNA, 238 bp, Glycine max
  Clone ID: 700965293H1
gaattgctgaagtgaggatctgtgcttcttgctgaagattaatcctcaacaatttgaccatcgatcagctacagacttttacccaaatggaaggacaaataagtgattcattaagtaacaacaatgtttgaagacaaaattaaccaacgagcttcaaaatgtccaacctccagaaatgtatgcattcgatatgcaatgcatttatagagtaccaccagtcattcgtgaaactaatccc

SEQ ID NO: 13748 - DNA, 241 bp, Glycine max
  Clone ID: 700965294H1
tttcaacccaattcgtgcaacagatgtgcaacttcctgctggtgggacttttgtgatagctcattctttggcagagtctcaaaaggctgttactgctgccacaaattataataatagggtgtcgaatgccgtttggcttctattgtgctcgctataaagctagggatggatccaaaagaggcaatttcaaaagtgaacacactgtctgatgttgaagggttatgtgtatcatttgctggta

SEQ ID NO: 13749 - DNA, 247 bp, Glycine max
  unsure (1)..(247): unsure at all n locations
  Clone ID: 700965263H1
aacgaatcgaaaaaagaaagatcatggcgatggcaaacttggctcgacggaagggttacgccgtcgttttgtcgtcgaggtcgtcgctttgtctgacaaggtggagggggttcgcgtccggatctgacgaaaacgacgtcgtggtcatcggcggcggtcccggcggctacgtggcggccattaaagcggcgcagtgnggtctgaaaaccacttgcatcgaaaaacgtggcagtctcggcggtacctg

SEQ ID NO: 13750 - DNA, 244 bp, Glycine max
  Clone ID: 700965295H1
tgcaaaaacacatacagaacagaatctgagaactagaccctctcaaaccggaaccgcaaatgaagcccaagagcattcgcatccgtaacttaccaacgcacctgctgctaatcgctgtttgctgttcacctcttcgtccgcttccaagatcggagaaaattgtgggtcagacaacaaatgcgacgctggactcagctgccaaacatgtcctgccaatggagatacccgaccaagatgttcgcgg

SEQ ID NO: 13751 - DNA, 240 bp, Glycine max
  Clone ID: 700965228H1
aattggtagtgcaagtcaagtccatttcaccacccttcaacactaccacaacaattctgggtattatcccccccacattctgcatccgtccaatctttcagtcgcaaaattttcagtgtttcccactctcccttaaatcattcccacccttctcacactcatggatctgtctgtccagtaacccacacagaaaaaaccctgaagaaaaacaagaccatatcatacatttcatttacagag

SEQ ID NO: 13752 - DNA, 247 bp, Glycine max
  Clone ID: 700965229H1
acgacgaatacgctcaggcactccccgcccgctgcaatgtcagcgtcccttacaagatcagccgatccaccaactgcgactccatcaagttctaaaggagcgggtagctttgccaatttcttccgcggataatgaggcaacgtatgctgtaacacttgttatcgttatcattaaaatgcaagaaagcgagtgtgactcgggttccactcatgtgagcctgttattgtattagtttctgtttcagata

SEQ ID NO: 13753 - DNA, 248 bp, Glycine max
  Clone ID: 700965230H1
agaaatttaagtgaggagctagagaatgatgatgaagtctgctatgtgtgcagtggtggttgtagcacttcttcttctggcggaggtggggcccatggctgaggctgtgacatgcaccccaacagagtgagtccgtgtcttccagcaatcacttccggtgctaaaccttccaatgcttgttgcacgaagctgaagcagcaaaaaccatgcttatgtggctacctcaaaaacgctagcttgaagcagta

SEQ ID NO: 13754 - DNA, 251 bp, Glycine max
  Clone ID: 700965231H1
tttgaaataggactgtcattggttttacaaagtatgttggcttgcaattcactcaatctaaggattgatgaaattaatatggttgagttactacctcatctatgtggtgtggccaggtggcttgggggttgctgtcctaggcaacctgagtcagagcgaggaggatacatcatgcaattttggcaagattacctctgctacattggtagagtttgctaagaaaggttggatctgactggaaaagactgaat

SEQ ID NO: 13755 - DNA, 250 bp, Glycine max
  Clone ID: 700965234H1
caaattcattttaatcctaattctgcacttcttgatcattcgatttttctcctcaagatgcagatattcgtaaaaactttgaccggcaagaccatcacccttgaggtggaatcctccgacaccattgacaacgtaaaagctaagattcaagacaaggaagggatcccacctgaccagcagagacttatctttgcgggtaaacaacttgaggatggtcgcacccttgccgattacaacatccaaaaggaat

SEQ ID NO: 13756 - DNA, 247 bp, Glycine max
  Clone ID: 700965235H1
ccaaactctaacacaaaaccaaaaatatggactgagggttataccggatggtttcttgcatttggtgatgctgtgcctcacagaccagtggaagatcttgcatttgctgtggcacgcttttaccagcgaggtggaacttttcaaaattactatatgtaccatggagggactaattttggccgggcttctgggggaccttttgttgctagtagttatgattatgatgcaccaattgatgagtatggat

SEQ ID NO: 13757 - DNA, 242 bp, Glycine max
  Clone ID: 700965237H1
cggcaggcagtgatagcaaagagaagatcatttcataatcagactcacctaactccgccatggctgctgttccctctactttcgctctaaccaaatctgcattgtccataaacaagctggaccatctctggtcaagatcaaaccatacagcttctctctgaatctaaaccgtctagggaggatggaaacatctttaaccagaaggcctctaacaattcaagccacatatagtgatggtggaa

SEQ ID NO: 13758 - DNA, 246 bp, Glycine max
  Clone ID: 700965238H1
gaaaagattatgagcattatgccaatacatgcttcaaagcttttggagacagagttaagcactggattaccttcaatgagcctcataactttgcactccatggttatgatttaggcattcaagcacaggaagatgttcccttttgggtcatcttctatgtaagaaaggagaatcatccactgagccatacattgttgctcataacattctcttgtcacatgctgctgcctatagaagctaccaact

SEQ ID NO: 13759 - DNA, 246 bp, Glycine max
  Clone ID: 700965241H1
caaacatccatcatcattattattttactccgaacgagttgacaccgattccactcactcaaccatgagccgattcaggcgttttgagctcatagaacaaccacctttcttccactcctgctacttttcccttccttcgtcctccaagactcactctctctcgacctcgacctcttgccacttcccagccacttcgacgctttcgcagatctggtgcacgcgccgtcgttcgcttaccggcgcgtg

SEQ ID NO: 13760 - DNA, 245 bp, Glycine max
  Clone ID: 700965242H1
acttgccttatttttggttttgagattgagctaaaggccaactcaaccatcgaatttgttggtgattgaaagagaaggaagaagaagcaggaaatggaagcagtgagagctggtcgagaaggagcaataggtctaggtcaaggtgatggcgtagcagaggacagcactgagactgaactcaccaaaatccgtctcctcagggcaattgttgaaacccgtgatccctcttccaagatctattgtag

SEQ ID NO: 13761 - DNA, 68 bp, Glycine max
  Clone ID: 700965243H1
tggtaattgtgatcattattcacgagttgtgctgattagtgaaataaagacaactgctttcatttcag

SEQ ID NO: 13762 - DNA, 244 bp, Glycine max
  Clone ID: 700965244H1
acgatttattgctgctattgatgaatccacaaaacccccactccaaatggggttctttattcactatagtgctgatgatatattaaaacaagcaactgaatcaactcttcgatatcagagagggaacctatctccctgctagacggagttcctgttgctatcaaggatgagatagattgtttgccatatcccacaacaggaggtacgacatggctgcacaaagaaaggccttgtagcgatgatg

SEQ ID NO: 13763 - DNA, 241 bp, Glycine max
  Clone ID: 700965245H1
actatcctatcgtagcaaagaaataaagaaagaaaaccctagcttagcttttgaagtttcaagatgctgatcttcgttaagacactcactggtaaggcaatcacccttgaggtggagagttcagtaccatagataatgtaaagtccaagattcacgacaaggaagggatcccaccagaccagcaacgtctgatttttgctggcaagcagcttgatgatggacgtacacttgctgattacaa

SEQ ID NO: 13764 - DNA, 246 bp, Glycine max
  Clone ID: 700965246H1
gtgtaaggcaaaccaacccaaccaaattaccaaagttacaaacttcccaagagaagaaaacaaaaataaaaaataaaaaataaaacgtgtttttgttcactaaacatcaaagaaaaaaaaaatgcttcttaaccacattggcgccggattctactggatcgacccgccacgacccgatccgaaacgtcaaacccgaatagtctcctctagtttaaaccgccggcgggcgtcgccgccgtttccggc

SEQ ID NO: 13765 - DNA, 248 bp, Glycine max
  Clone ID: 700965247H1
gttacggtttgtcttggagcccttttaagaacgggtatcttttgagtggttcgcatgaccataaggtttgcttgtgggatgtgcctgctgctgcctctcaagataaggtgcttgatgcatttcatgtttatgagggtcatgagaatgtggttgaagatgtgtcctggaatttgaaggatgagaatatgtttgggtccggtggagatgactgcaaattgatcatttgggacttgcggacgaacaaaccc

SEQ ID NO: 13766 - DNA, 244 bp, Glycine max
  Clone ID: 700965250H1
attgacacaacacgaaacacacacatgacacagcaacaacagcatagccacaacacaaccaaatgacacccacaaaggaggagagaaagagagacgctactactactactactactactacttcccctctctcgcacagccctgaagctccagaaccccgttttggaattaattcgcttctctttaatctaaattcgttgattctttccgttgacatgttggagggtccaacctttcttgtttc

SEQ ID NO: 13767 - DNA, 244 bp, Glycine max
  Clone ID: 700965252H1
ctaacaccctcagaaccgttccccacttgcttttcaattttctttttttgcccttttcgccgccctcaaagagttcaaggatttatacaattaatagttttttaatttggaatggctggaatttgctgtggagttgttggagaatccggagagacttcttcctcttcaatcgaacccacctcgcgcccctccgctcgccggagtttggaccttttgcctttgagatacatagctgctgacgtgt

SEQ ID NO: 13768 - DNA, 244 bp, Glycine max
  Clone ID: 700965254H1
ccgcgtctcgccgtcttctcggcaaggatgggttgcccacttggttctctgctgctgatcgtaagcttttgagtcgtggatggagatcacgtgtcaagcccaatgttgtggttgcccaggatgcactggtcagttcaaaaccgttgccgatgctattgcttcctacccaaaggataacaaaggtagatacattatctacgttaaggctggtgtctatgacgagtacatcaccgttcccaagagt

SEQ ID NO: 13769 - DNA, 243 bp, Glycine max
  Clone ID: 700965255H1
caccatcatcaattgattcaattcaattacgataagaatgggtaatatctgcgctcgtttgaagttgaagccggcgccgcaaccctctacgaagaagcgttcctcttcccgccgagagaggaggtcgacgacgacgccgccattcgtgagcaggccatcgccgccgcgattctctttaagcagcaccagcaacaacagcaacagcagcagcagcaattcgatcgctctgcatcgcttcggtat

SEQ ID NO: 13770 - DNA, 245 bp, Glycine max
  Clone ID: 700965256H1
gtgaacccagcagaagttggagacattgttgtgggcactgtactggcacctggatcagatagaggaattgagtgcagaatggctgccttttatgcaggtttcccagagacagtgcctcttcgaactgtcaataggcaatgttcatctggacttcaggcggtttctgacgtagctgcttatataaaagctgggttctatgaaattgggattggggctggattggagtctatgacagtagatcgtgt

SEQ ID NO: 13771 - DNA, 245 bp, Glycine max
  unsure (1)..(245): unsure at all n locations
  Clone ID: 700965257H1
ggattcttcatcgagtagcggattgacgttcaagctgcaccctctggtgatcgtaaacatctcggaccactacaccagggtcaagtctcagatgaacccaacccacgcgccaccgcacaacaacaacaacgccaacggtcncgacggcgtcgtttcgccgctctccccgcgggtctatggctgcgtcataggggtccagaagggccgcaccgtggagatcttcaacagcttcgaactcctctacg

SEQ ID NO: 13772 - DNA, 242 bp, Glycine max
  Clone ID: 700965258H1
gtcttgagtaatggcgaaggacatcaacctcagctctcgaacccctctgctcttgctgttatgtttcaccactctcaccgaggctgtatggttaaccatccccagcaagggaaccaagtgcagtccgaggaaatccagacacacgttgtcgttttagcagattactatgttgtagccgatgatgtccagggtcaccaacttcaaactatttccgccaaggtgacatccccttatggaaataa

SEQ ID NO: 13773 - DNA, 242 bp, Glycine max
  Clone ID: 700965259H1
cagaattctccagggaggaactggaattccaaatgtcagatggtttggagtggagggagattacaatgttttagtgatggatctgcttggaccgagtcttgaagatctttttaacttctgcagtagaaagctatcactaaagacagttctcatgcttgctgatcaaatgatcaaccgtgttgagttcattcattcaaaatcgtttctgcatcgggatatcaaaccggataattttctaatgg

SEQ ID NO: 13774 - DNA, 240 bp, Glycine max
  Clone ID: 700965260H1
tgaagattcatcttctaagtctgatgccaaccctgatccagctaaaggtagacgttcaagacctgcaaggaaaagtgagatgcctcctgtaaagaatgaggatttgatacctggggcaactttactgggaaagtgagatctgtccagccatttggtgccttcgttgatattggtgctttcacagatgggcttgttcatatttcgatgttgagtgatagctatgttaaggatgttacaagt

SEQ ID NO: 13775 - DNA, 244 bp, Glycine max
  Clone ID: 700965227H1
agttatcaaacctaagagaatcatattcatacacaatcaacagtagtggtcactcctgttttgcagccatgactagtgttttggtgtttggctattgtttagtaataagcttggttgtagcactagttctgtttctgctcaaccaacaagggctttcttcgtatttggtgattcactcgtggacagtggtaacaatgatttcttggtaaccacagccagagcagacgctccaccctatggcatt

SEQ ID NO: 13776 - DNA, 245 bp, Glycine max
  Clone ID: 700965261H1
attttgcatgttataaacccgatgacgaactcaaggtgtcaagggagcagttaatggaggtggcaaggaaatcaggcaagttcgacgaagcaagtctagagttccagaagaggatgctaatgtcctccggaatcggcgatgaaacctatataccgaaggccgtcatcgcctccaccgagaacaccgcaacgatgaaagagggtcgggccgaggcctccatggtaatgttcggagccctcgacgag

SEQ ID NO: 13777 - DNA, 246 bp, Glycine max
  Clone ID: 700965262H1
atccccccaccgagtcaccaaccatggacgttaagtttggcaccacattaatagttattttctccgtaatgtggctcatgagggtgaatgccattgacccttgtgcctctcaaccggataattcggacctcaacgtgattcccatctacagcaaatgctcaccgttcaaaccacccaaggcagacacatgggacaacagaattataaacatggcctcaaaagacccagtccgagtgaaatacttgt

SEQ ID NO: 13778 - DNA, 246 bp, Glycine max
  Clone ID: 700965194H1
attagcactgagtaacacgcccgaatatggcaccctcaatctccgacgaaatgccaagcaccaccagctctctcctccgccgcaaccgatggctcccctctagcatcaaactgaaaacaagccttttctcagagctctccggcgcggtgtgtgacctaggcacctacatccccatagttctagacttatccttagtgaacaacttggcactcaccaccacactggtctacactgctctctacaaca

SEQ ID NO: 13779 - DNA, 256 bp, Glycine max
  Clone ID: 700965196H1
ctccctcgctctatttctcagtctctgtgtttgcggctgaggattccgaacgagtgaccttcttcgtttctcgcaaagtttaagtaatcatgggtaaggaaaaggttcacatcaacattgtcgtcattggacatgtcgactctgggaagtcaactaccactggtcacttgatctacaagcttggaggtattgacaagcgtgtgattgagaggttcgaaaagggcttccgcgatttacaagaggtcattccagtatg

SEQ ID NO: 13780 - DNA, 257 bp, Glycine max
  Clone ID: 700965201H1
catattcctagttccagaattcagattgattaattcaaaccccatagatcatacataccctctcccaatcctcattgaaccctctctctccatgcttatttagtgccctttttgttttgcatcacccaatcaatcactgaccccttggtcttcattgcccacatatctttttctctcaaagtttgcgactttgtgttgcgaagatgagcggtgcggggtttagggcttcaattccgagcagtgtgaggaggacgatc

SEQ ID NO: 13781 - DNA, 240 bp, Glycine max
  Clone ID: 700965202H1
atataattaagtgtggattgctgtgcaggtcaaggcccttttagttgctcgtccggttgttcccatcttctctctcgtactaatcaaatcacacttttgtgttgtgttgggaaacccaaaccccgttttcggtgagatcgagatcgatcgaacatggatgaggagtacgatgtgatcgtgttgggcacgggtctcaaggagtgcattctcagcggtcttctctccgtcgatggcctcaag

SEQ ID NO: 13782 - DNA, 258 bp, Glycine max
  Clone ID: 700965203H1
caggttgagcataccatgcgacctttcgtggctgcggctgttttgttgttgttgttggtggtggtggtggttgttgatgccaggtttgtggtggagaagagcagtataactgttctgtccccgcataagctgaaggcgacgcgatggcgccatcggtaacttcggtcttccggactacggaggattcatcgttggctctgtggtgtatcccgctaaaggctcacacggatgtgagaacttcgagggcgataagccttc

SEQ ID NO: 13783 - DNA, 250 bp, Glycine max
  Clone ID: 700965204H1
aaagtttcttcctttctctgctctttgtcttctctgacacatttggggccttgttgagtgtgtttttgcaagagggtatggcgaaggacgttgaggttgctgagcgtggctccttctctgggaaggactccaggaccctccaccagcaccactcattgatgctgaggagctcacaaagtggtccttttacagggctcttattgctgagttcattgccactttgctcttcctctacattactgtgctcaca

SEQ ID NO: 13784 - DNA, 241 bp, Glycine max
  Clone ID: 700965205H1
ctgtgctgtgctgccatgggtgtgacacagttgaaccccacttgctcaaaacctcgtcttcactcatctcagctctcttttctatcaaggactcttcctagacatcgccactgcacttttgcgccacttatagaactcaacaagctaggatttcctgttctgttgcaccaaatgaagtgcaggtgccaactgtgaaaacccaggatcccaagagtaagcctgagtgctatggtgtcttctg

SEQ ID NO: 13785 - DNA, 252 bp, Glycine max
  Clone ID: 700965206H1
ctggatttaaggaagttcgaatggttgaaacaaagccagggattgcctttgtggaatatggagatgaaatgcaatccacagtggccatgcagacactacaaggtttcaagataaccccacaaaaccctatgttgataacttatgccaagaaatagacagcggtttctttaacttatgagaaaggcaggaatcacatcttccgcaaagagttgttaatccatttaatgcagtggtgtatcttaattgatatct

SEQ ID NO: 13786 - DNA, 253 bp, Glycine max
  Clone ID: 700965207H1
agagaagctagcgtgctgcgctacaaggagaagcggcgaacgcgcctcttctcgaaaaagatcaggtaccaggtgaggaaagtcaacgcagatcgacggcccagaatgaaggtacgagtcagttcacagttgagtagaggacacttgaagaaatttgatttatgtcagataaagaaaaagaaaagaaaaaggcaaatctgctttatgatttggtgatgataattggataatgaggtgcgtgcgtgggtgcgtc

SEQ ID NO: 13787 - DNA, 246 bp, Glycine max
  Clone ID: 700965208H1
aaaactacgaaatgtagttattttgttgtaaaagaatgatagtggcttctttactatttttgagatttgtcaaataaaaaagaatctagaattgtgtatgagaatgacccattagtcaaacttgtgatataaaggtaaaagataaattatcttattatattgatggggaatgaccatatgaaattgaacatgcaatttcttatttagttaaatattttattttttgagctgattaatttttttctt

SEQ ID NO: 13788 - DNA, 259 bp, Glycine max
  Clone ID: 700965211H1
tcggaattcggttgattgcagcgaatcggctcgagtcgtttttatattcatattttatctgttttcatttcattattttcttcttctcccttcgatttctccagaacagcaagggagaatcaattcctcatcgttgcaattttctttcactctctagattctcatctttcctctcttctaccccttcagaaaaaaccatgtcttcatattatatgtatatctagctcttcattttttcttgctcaagattatgctgtaa

SEQ ID NO: 13789 - DNA, 246 bp, Glycine max
  Clone ID: 700965212H1
gaaaacgatgaggtggccaggttgaggaaggtggtgagggaggtcggggagttgcttggggcgtttaacttgggggatgttattgggttcatgaggcctttggatctgcaagggtttgggaagaagacatgtttgatgtaggcattcataattgcttcaactgcaactgaggaagaaatgcttcaatggtaagtagcgatgtgaaatctattacatagcttttacgaaggtattgatcttattatt

SEQ ID NO: 13790 - DNA, 247 bp, Glycine max
  Clone ID: 700965213H1
gtccagtcatgatttctactctctttactctttagtttttttgttttgtatatattaaggcggcacagcactggcctaagtgggtgtaagtgagtcttgggagtgagtcactcttcctgcagaacccgatctgtagacaatatgggaagcactggtttgctacatttgatatgccttgtcattgctttagtaagtgtgtcgcttgtgcaagcagaagatgcgtataagtatttcacatggacggtga

SEQ ID NO: 13791 - DNA, 247 bp, Glycine max
  Clone ID: 700965214H1
attttacaatcagaaattggagagcagaaagaaagggccttggcagcagcagctaccgaacttgaaagatttttcaagaaggaagacttcagcagaatgaaggtgattgggcaattcaatcttggattttcatttgtaaattggatcaagatttattcattgtggaccagcatgctgctgatgagaagtataattttgagcgtttatcacagtcaaccatcttgaaccaacaacctcttcttaggcc

SEQ ID NO: 13792 - DNA, 254 bp, Glycine max
  Clone ID: 700965215H1
gatagagagagacgcttcgcaaatctcaatcgaatctcagaaaaatgagagaaatcatcagcattcacataggtcaggccgggatccaggtcggaaactcctgctgggaactctactgcctcgaacatggcatccagcccgacggcatgatgccttctgactccaccttcggtgtagcccacgacgccttcaacaccttcttcagcgaaaccggatctggcaagcacgtcccccgtgctgtcttcgtcgacctc

SEQ ID NO: 13793 - DNA, 253 bp, Glycine max
  Clone ID: 700965216H1
acttcccctacccttccgtgatgatgtagatagagaataaaaagagaccagtgtgcagtgagaaagagattgctcacttcttgtgtgggtttgttttgttctttgtgttggaatttgttcatgggtgaagaggagaagaggtgtcaagagagaaggaacaatacatgggagtttatggaaatgagtggttgtattgtggttgctctgcaaattggcgccgtttaagacaccagaattcctgttccatgccttt

SEQ ID NO: 13794 - DNA, 247 bp, Glycine max
  Clone ID: 700965217H1
tactcgtcccgttcgtgccactctcttcaaaatggccgttaccttctcaaatctccacacagaatcaggtctcaagtccctcgacgacttcctctctgggaaggtctacgtttctggggatcagtcacaaaggacgacatcaaagtgtatggtgctgttttggagaagccaggtgactcttttcccaatgctgccaagtggtacgaggttgtctcatctcagcttgctgcaagcttccccggcaatg

SEQ ID NO: 13795 - DNA, 229 bp, Glycine max
  Clone ID: 700965218H1
taaggaagttattgctaatggactaagtgtgaatgtgacgctgatattctctcttgcaagatatgaagctgtaattgatgcatacttggatggtcttgaggcatctgagttaaatgacctctctagagttacaagtgttgcctctttcttcgtcagtagagtggacaccctcattgacaaggcccttgaggaaattggcaccccagtggcccttaatctacgcgggaag

SEQ ID NO: 13796 - DNA, 249 bp, Glycine max
  Clone ID: 700965219H1
gtttcagaatcgcacccaacccaaccccgttttttctcttcactcacttgtcttgtgttgcattcgttaattaccagagctcaactccttcccccaagctttctggcatctcaatgatgacacaagaatcatcagaggtgttgggaaaacatgcaagctcaggttctcatgtgagggggagtagtgaatatattagactggtcatatccgatgaacaaagggtggttgaagctgaaaccttgctgactc

SEQ ID NO: 13797 - DNA, 249 bp, Glycine max
  Clone ID: 700965220H1
aaaacacgcgaaaaacttgccagcacagaacttgtccccaacacagcgcttaaaaagcttatccagaaattctgttccgaaaacggcgttatagtcgtgaatccgattgatcataatcaaacagtaacaaaacaagcgacgcaggcagccccgccgcagcacacgccatgcagtttttgtcatggtttctctccaggaggctcgtgttcggaaccgaggaacagaaaaccaaagcagcgtacgagattc

SEQ ID NO: 13798 - DNA, 247 bp, Glycine max
  Clone ID: 700965221H1
atgtttgtcttcaaacccacctcttctcttctctttctcctcctcagtatttcatactctgcttcttcagttacctcactcaccgtaccgccgcgagggggggccccactcgacctcaccactactcgcaacaacaaaccgatggcgatgatgattccctcacctacctctggcccctccccgcagagttcacttccggcggcgacactctctccgttgaccccgcgctcaccctctccgtcgccgg

SEQ ID NO: 13799 - DNA, 245 bp, Glycine max
  Clone ID: 700965222H1
cttctttgactgttctcccacaccacacccatgaacctcctccagctccttattctcctctttcacgcggcggaagcaagggacagtggcagctcctccacaaaaacatcggcactgtcgccatgcaatgcagcttctccacaacgaccgcgtcatcatcttcgaccgcaccgacttcggactctccaacctaaccctccccgacggaagatgccgcaacaacccaaacgagttggtcgtcaaac

SEQ ID NO: 13800 - DNA, 250 bp, Glycine max
  Clone ID: 700965223H1
ccctaaaccaccaccatcaacgaaaccttcctatctcattttccctccaatttccttctgggttttgcaatttggccaattgggtccccaaagctgtgaccttttcctctgatcaacgcgaaggagagagaaacacccagagagagaaagagaaaaagaaaagttgttgttttcttttgttctttgggggtgttggtttaaaacccggggttgaagcattgcagacatcacggctattcaaggagttcgc

SEQ ID NO: 13801 - DNA, 250 bp, Glycine max
  Clone ID: 700965224H1
agataaaataatgaaggaaccattgaactgattattgggggaaattctagaatctatgaagttactgattcagattacaattgtcatttgttgtttggatatacacctgttcgttcagattcagttgtcggagaacttgtcttatctgatccaactaacattgttctcccagagcttccatatgtggagatgcttgctctgactggaaacacagttgaaggtgacatacttacagctgttgaagtgattc

SEQ ID NO: 13802 - DNA, 247 bp, Glycine max
  Clone ID: 700965225H1
cgaagagatggatacagagttgggtgataaaattggctatgctatacgttttgaggatgtgaccgggccaaataccattataaagtacatgactgatggggtacttctacgtgaaacactcaaagatctgatctagacaagtatcgggttattgtcatggatgaagcccatgaaagatcactaagcacagatgttctttttggaatattgaagaaagttgtagcccaacgtcgtgatttcaagctga

SEQ ID NO: 13803 - DNA, 259 bp, Glycine max
  Clone ID: 700965193H1
tggcagtccaattgtaatttgcaacaagggcatctaaacccagaacccaatcatcttttattgcaaacttttgtgcattggaatttggaggccataaaaaagatgcgatgctacacgcaaacaagtagtacaagtccaataagaaaagcaagatagaaagattggctagttcacacacctcaattaatacaacaacaccctgttgctgatagttattatagagagagttcgatcaattcaagcttgcaagcttaaccat

SEQ ID NO: 13804 - DNA, 259 bp, Glycine max
  Clone ID: 700965159H1
gctggctggcaggttagcccagatttatatggtgataacaacacgcggctattcacctactggacgagtgatgcatatcaagctactggctgctacaatcttctttgctctggatttattcaagtcaacagtgaaatagcaatgggtgcaaccatttccccagtttctgcataccgaaactcccaattcgatatcagtatacttatctggaaggtaaaatcccaggaatcttcctggttattaatctgcagatggaaac

SEQ ID NO: 13805 - DNA, 260 bp, Glycine max
  Clone ID: 700965160H1
ctcagaagcgaagaagaagccacagagaactagtctcctactctcacccgcaagaaaaaaatggcatctcacatcgttggatacccccgtatgggtcccaagagagagctcaagttcgctctcgagtctttctgggatggcaagagcagcgccgaggatttgcagaaggtgtcttctgatctcagggcatccatctggaagcagatggctgatgctgggatcaagtacatccccagcaacactttctctcactatgacca

SEQ ID NO: 13806 - DNA, 262 bp, Glycine max
  Clone ID: 700965161H1
gccagccatccaaaccccgctgcgattgtcctcgttctcgttctcgtcctctctcagccgcggaatccgtccccccggaatctgccatggaagatgtatcgaatattatcgacgccggcgtcgaagttccgccagttccggcgactccggtctcgaccgaaggcagcgacagcgacagcgacagaggaggagcacgcgttccagatcctatggcgttaccagatcctggaccccgacagcgacatcgtggcctattggaacc

SEQ ID NO: 13807 - DNA, 65 bp, Glycine max
  Clone ID: 700965164H1
gttgtggtcgttgacctcaaacaatgggagcaaggagaggaaaacgctcagagggtttctggcct

SEQ ID NO: 13808 - DNA, 270 bp, Glycine max
  Clone ID: 700965165H1
caagcctatggtgatcatacctgtataatagcaaaagaacatttggagcctaacttaggtgggctcactgttgagcaggctatccaaaacaagaagttgttcatcttagatcaccatgactatctcattccttatttgaggaaaataaatgcaaataccacaaagacttatgctacaagaaccatatttttcttgaaagatgatggaactttgacaccattggccattgagttaagtaagccacatcctcagggtgaagaatatggtcct

SEQ ID NO: 13809 - DNA, 265 bp, Glycine max
  Clone ID: 700965166H1
cccaaagggataaaagaaaaaacttaatagtacatgggagttgatgatgaacaagagatggaggaggaggaggaggaggagagagaagaagagaaaaagaagcataagcaggctcctccttctctcttccctattagtgtgagaaaggggtttagtggtgaaagagtgaagagagatgagtggagtgaaggggcagtgtcaaccctacttgaggcctatgaggccaaatgggtgctaagaaacagagccaagctcaagggccatg

SEQ ID NO: 13810 - DNA, 262 bp, Glycine max
  Clone ID: 700965167H1
gattctcaaagacagattgagattttacacagagagagagagagagagagagagagagagagagagagagagagatgggaagagctccatgttgtgacaacgcgtgtgttaagagagggccatggtcaccagaagaagacacaaagctgagggtgtacatagagacgcatggcactggagggatctggatcgctcttcctcagagagctggacttgagatatgtggaaagagttgtagattgagatcgctcatctatctcag

SEQ ID NO: 13811 - DNA, 261 bp, Glycine max
  Clone ID: 700965168H1
aggtgattgtgatgagactctaggtgaggtaactgggaacaaaggcaagagctgtggttctgagtctcttggagtggtcatgggagagggatgcaagtagaagcccttttcagctatggctttatcctcctctgacgagttccccaatgaaggggaggacttgtcaaaagggtcatcattcaatggtgtaacagggcttagagcaagtctagggaagtcaagaaggcttggggagaggatctcaggcatgttgtttcttgg

SEQ ID NO: 13812 - DNA, 260 bp, Glycine max
  Clone ID: 700965169H1
aatctggacactgctcagattagaaccctaacctaacccaaccctctctctctctctcttcaattcatggacgccgtcgactcaaccccaaatccacctcccctccctacctacgatccatcagagtatcacaacccgccgcaacatcaatcggaaaccgggcaaaacggtaacggcaccaacctcggaaaaccatcggagaacggcagtcaggtcgctgccgacaacaacggcttgaatcctcagatttcgaagccatt

SEQ ID NO: 13813 - DNA, 260 bp, Glycine max
  Clone ID: 700965170H1
ctgcagtgtgacatgttccagacaacttacgagataaaaatgcctacatccaacttacagtgcctgtcactcggtgaaatttgactggagattatcaagcgtggagaatttcagacaaacttcttacacaagttacaagttcttactctgtgctttcatattgggtcgaatgtatttccatatgaaattctacaactggcgcccaatatagagaagcttgtggtgtatgatggttccttcaaggagattttctgctttgt

SEQ ID NO: 13814 - DNA, 260 bp, Glycine max
  Clone ID: 700965172H1
gacagatgatgatggagatggcgaacgaacacgctgtcgttgcggcactcgcggcgttggtgctactcgcggcgagtgtggcggtggatgctcaggagaactcggacgtgaagacgctggtgaagtacaagcacgggaagaagtactgcgacaaaggatgggaatgtaagggctggtcaatttactgttgtaacctcaccattaccgattatttccagacctaccagttcgagaatctgttctccaagcggaactcgccg

SEQ ID NO: 13815 - DNA, 257 bp, Glycine max
  Clone ID: 700965173H1
cgggttttctcctttgttatcttgatatgtttgggttcccttaaaaatgtacaatgtctccttgttccatagtttccaggagataaatctagtcatgctgaaaatccggcttcacaaccattggaaccaggtgaggctaaaagaggacaaaatccacttcccaaactaaaaatgggagagaagcaacaaaatcacaagatgcctatggttccaacgccaggacctgatgctgatgggcatgccaagatggaaagtaa

SEQ ID NO: 13816 - DNA, 256 bp, Glycine max
  Clone ID: 700965175H1
gatctagtacggttcattaagacggtgcagaaggtggggctttatgccaatcttcggattggaccttatgtatgcgctgagtggaactttggaggaattcctgtatggttgaagtatgttcctggcgtaacttcagaacggataatgagcctttcaaggcggcaatgcaaggtttcacgcagaaaattgtccagatgatgaagagtgagaagttgtttcaatctcagggtggtccaatcattctctctcagattga

SEQ ID NO: 13817 - DNA, 240 bp, Glycine max
  Clone ID: 700965177H1
gagatagtggccgccacaatttcagttcgtgttcgtggaccttggtatacgcatctgactgataacctgtgatatagttgctacgttcatgcgtaatagtactaataataatactaataaatatgcacatttctacataggactgcgtaggcttgtaagctctggatcttaggtttggagagctgtggcagtgtgtgtagtctgcttttgatgtagccaacagagttgcagagaggtgcc

SEQ ID NO: 13818 - DNA, 259 bp, Glycine max
  Clone ID: 700965178H1
gggaaaagaaattctctgtagtaatatgtagcttaaaattattcacctgtaagcttttattgctaactttgagggtggtttttgtatgaaggaatatttcagggaaaaagggcacatatcaagttagaattcatgtttattgtgagaaaatgagaactataaatttggctcatagtgtatccaaccatatatggatggtaagattagaagttagttaatgcttacatggtcacttaaagtcatgtgcatttattttcaa

SEQ ID NO: 13819 - DNA, 261 bp, Glycine max
  Clone ID: 700965179H1
gtagttgcaaattccaggttttcttcctttagcctagcttttactcattatctctctttctctctctctcagaggttctagaaagatccactccgaaatggacggtgcgccacaatccgccggtgccggaggtccggcgccgttccttctgaagacctacgacatggtggacgatgcctccaccaacgacatcgtttcgtggagctctaccaacaacagcttcgtcgtgtggaaccctcccgagttcgctcgcctccttct

SEQ ID NO: 13820 - DNA, 79 bp, Glycine max
  Clone ID: 700965180H1
gctgggaactcggctcgcgcagcgcgcacataatcagagaggtgacatgagtatcgatttcagttgcgccgttgaatgt

SEQ ID NO: 13821 - DNA, 266 bp, Glycine max
  Clone ID: 700965181H1
cttccattgggcaatcaatctactacccctaataatgctgtagttgaaatgcaacaatatggaaaagccattcctggtcaatcatccaatgaagttgcaaaaccaactagtggcagtaatgcacctgtgaacctctctcagaatcttgtaacatatccaaggatgctgccacctggaaacccccaagccttacagatgtcccaaggacttctctctggtgtttcgatggcttcaagaccacaacatatggactcacatcaagccat

SEQ ID NO: 13822 - DNA, 262 bp, Glycine max
  Clone ID: 700965183H1
ggggtacatcaaattctttatttatgagatgaagtacactggggaagctttgggaagagatcttgagaacgtgaggaagtactacgggagtggaaaaacaaaggaagcatcatggagagaatcacagcttaaagggttgcacaattttctcgttgaaaaagaggaagaaattttgagggccctcaagcatgatttggggaagcattacgttgaggcttttagagacgaggttggaacattaatgaagaccttaaacttggca

SEQ ID NO: 13823 - DNA, 259 bp, Glycine max
  Clone ID: 700965184H1
gctattgagtatgaagaaccagccggggatgcatttaaagctaatcatcctgaggcattggtgttcattaacaattgcaatgttattcttagggctgtaatggagaagtgtggggacacagatgattgtatctcaacatctgaggctgcagaattggctgcaaagcttgatgagaaggaaataagtagtttaccaatgcctggacaagttgatttcattaatggtggtcctccatgccagggtttctctgggatgaata

SEQ ID NO: 13824 - DNA, 258 bp, Glycine max
  Clone ID: 700965185H1
tccaagtattgctgggttgggagtaacatatgggatcaatctgaatgtgttgcaagcttcagttatatggaacatatgcaatgcagaaaacaagatgatatcagttgaaaggatccttcaatatacaaatataacaagtgaagcacctcttgtgattgaagacagcagaccacctagcaactggccagaaactggaacaatatgtttcaaaaatttgcagatacgttatgctgaacatctgccatctgtgttgaaaaa

SEQ ID NO: 13825 - DNA, 258 bp, Glycine max
  Clone ID: 700965186H1
gtgatttcagtgagtgatcggtgttcacttgatctcatcataatcgtcagcgtcaattgaagaagatgccgatcagaaacatcgccgtcggaaggcctgaagaggcgactcaccccgacacgttgaaggcggctttggctgagttcatctcaaccttcatcttcgtgttcgccggctcaggctccggcatcgcctacaacaagctcaccgacaacggcgctgccacccctgccggcctcatctccgcctccatcgccc

SEQ ID NO: 13826 - DNA, 259 bp, Glycine max
  unsure (1)..(259): unsure at all n locations
  Clone ID: 700965187H1
gtggaacttcaaacaaacttgagtttccaacacatgtttagtttcacacagcatacgacatgcgngnaaattccacaatacttaaataatcaggtctagcaatgcattgctagtagatcattacttgcagaggtgatagtagtggtagaacattcttattgatggtttgatattgtgagaggtgagggtttgattcaagagcaacacagcaaatggaggtatgttgaacccttaacacacagaaaacaacccaaaacga

SEQ ID NO: 13827 - DNA, 258 bp, Glycine max
  Clone ID: 700965189H1
aggaaggccacctgtgcttccatccaacaaactttctaacacagagaacttcctatacatgctagattcttttggcaatcgatcatataaacctaatcctcggctaactcgagcactggacattatcttcatcctgcatgcagaacatgaaatgaattgctctacatctgctgtacgacacctctcatcaagtggtgttgatgtatatactgctattgccggggctgttggagctctatatggacctcttcatggtgg

SEQ ID NO: 13828 - DNA, 258 bp, Glycine max
  Clone ID: 700965192H1
tgagaagatagttttttctctctccaagttcatggattcttcaaactccaatggagcatcacagaggctcctggacttggctcaacggctccgcctgtacaaacccccaccattccctgaagacatcttggatcagatcatggaagagaagggagataaggttgtctcagaagtgagttacacgaaatcagccaccccaattgctcaaaacacagcaaaaatcggatacaagagagctgctgttttgatctgcatctt

SEQ ID NO: 13829 - DNA, 261 bp, Glycine max
  Clone ID: 700965156H1
ttccgctactcgcgtcccgttctgcagagcacgctccagctcatgggttgcaaagcgcgtcacgccttcaagatcagccaaagagtgtttgaactcacaaggaaagagaattctactgatgttttgaagccggaagtagaggccctatcagattttgatgttttcaagaggaattttgtaaagagagatggtaaaagtgtaccatttgagttgtacaaaaggcgcacatctgcatttgttcggagagaaatttttctagat

SEQ ID NO: 13830 - DNA, 264 bp, Glycine max
  Clone ID: 700965120H1
tttctttcactctctcagaaccaaaattttccaaactcctcaactctcatcagatatcaaccatctctctctctccaaactcaaatacctttctgttctgctcttcaatttattcatctctgacaccctcttaattctgcttccagttcctctgagtgatgggtatgatctctcctcactcccacaattcccacattatagtaatcctcatcacctgcttctttcgtcataaattctagatcaaactccactccctgatcctcc

SEQ ID NO: 13831 - DNA, 262 bp, Glycine max
  Clone ID: 700965122H1
tgggaacgatctttatgattctgctacaagactaaggctaccggaccttcctgcttttgctttggaatgtctcccaaatcgcaattcattacttttaagggatttgtatggaataactgaagcatcgaccattttccgtggaaccctccgctatgaaggatttagtgagatcatggggacactgtctaggattggcttatttaacaatgaagctcattcgttgctaatgaatgaacagagacaaactttcagaaaattctta

SEQ ID NO: 13832 - DNA, 264 bp, Glycine max
  Clone ID: 700965123H1
ctttgaaaacgtgcaagcaaaccccacacccccacgcaacaacaatccccatttgttccccagcaaaacaaaaacaccgcgtcttccccgtgcgggaaaaaaaaaagaatcctcaattttccgggaaaacccttcagaatggtttcccgggaaaataccaattggctcttcgattacggcttgatcgacgatattcccgttccggatgccacctttggcgtcaattcctccgccttcacatggccccctaacgccctcgacgct

SEQ ID NO: 13833 - DNA, 262 bp, Glycine max
  Clone ID: 700965125H1
ctctcttttcctaacctcaccggcggtggcgggtggtgttcgtgctgctgtcatgcctagaaggactgcggttatcgtgtcggcggcgacggcggagacgccgaagaagaagggcgagtcgaaagggttcgtggaagagatgaggtttgtggcgatgaggcttcacacgagggaccaggccagggagggcgagaaggaggtcaagcagcccgaggagaaagccgttaccaagtggaacccatccgtcgaagggtacctgaaa

SEQ ID NO: 13834 - DNA, 261 bp, Glycine max
  Clone ID: 700965126H1
gaatcttctttgctttctctcctttgcactttccttctcctcgtgattttttgtttgcatcaaagggagaaactgggagacacagaagatgagagagataattagtattcatattggacaagctggaattcagtgacacctctgttggcattgcacacgatgctttcaacaccttcttcagcgagaccggattcggcaagcatgtgccaagggctttatttgttgatttggaacctagtgttattgatgaagtaagaactg

SEQ ID NO: 13835 - DNA, 260 bp, Glycine max
  Clone ID: 700965127H1
caacaacaacaaaaaaaagccctagaaaagattttggagaagcaattcctcactcctgaaaatctcatcctcttcttttacatttgttttggataaaacattttgctgatattgaatttttattttctcttgttttcgtttcttttcgacattttcttcttcttcttctgcttcggtgttttcagggagatagggataggagtaacaaagggagagtgcaatcagtttggttcttcgcttcgggactcgaatcttcgatg

SEQ ID NO: 13836 - DNA, 262 bp, Glycine max
  Clone ID: 700965128H1
caccttcctctccttctttctttctgcttaaggtctacacaagttctctgcttcttctccccctattgacctttggtcatcacaagcgaaaacccacttctggatcttctggtgtaaaggccattagaagctttagaaattttctaattgagttggtgtatagtgttgaagggggtgaaatctggagcccagtttgttagttgttactcacttcatctgtaagctcataggttgaaccctctttttttggagacttacctgg

SEQ ID NO: 13837 - DNA, 265 bp, Glycine max
  Clone ID: 700965129H1
gccctttctctcgctactcctcctaccccaaacaaaactttcccattacaaattgtggaatgaagaaagaatggcaagacaagtgagtagtagtatagtagtaattgacccatcaaacaaacaagcataacccatgtacttgttattgtagatagatagagtgagtgagtgagcactgtgttgtgtatatagtagtgtgtaaactctccccaacagacagacacgccactcaattatttctgtccatttcttcttcccatattgt

SEQ ID NO: 13838 - DNA, 263 bp, Glycine max
  Clone ID: 700965130H1
ctcgagccgaatcggctcgagatgaaccgtttattgcagattcagtggactttgttgtttctcaggtagaaaccctctctagagaagacttggcctctaggttgtctctgacaactgatgctgcttcagtgggaccacttcttctttcagtttcatttatcactataatggatactaatgactactgtgcaattcctcaacaacttaaagatcaactgggtgaaaggtatcccgaggcaaggcgtgcatatttgaaaacaggg

SEQ ID NO: 13839 - DNA, 271 bp, Glycine max
  Clone ID: 700965132H1
atcactgttcacacatagccatagattccccttttggcagccacaaagcaacaccctttctttttctctctaccctccaacgtgctctcttccctcctccacttcatccaaatctttctcatttcctctccaaattaaaatctcaattaccattacacacactcaacttgagaattttccccaaaaatcccaagagctcgcgccatggtttccccggaaaacagcaattggctgttcgattacccgttgatcgacgacgacgttattcccg

SEQ ID NO: 13840 - DNA, 271 bp, Glycine max
  Clone ID: 700965133H1
caaaatcttcatattcatcaaactcatcaaaatgaatctgtaccactcctccaccaccaccaccaccaccaccatcttcaccgtcatattcctcctccttgcaatattattcactctcacaccccacaaggccaacggtgccacgtgtcaccctgaggaagaagcgggcctgttgggcttcaaatccggtatccgatccgacccgtccggcctgctcagtaactggatatcgggtacggactgctgcacatggaccggagtagaatgccac

SEQ ID NO: 13841 - DNA, 263 bp, Glycine max
  Clone ID: 700965135H1
ccctatggctcgtcactccttgctcttagccctcctcctcttcgccgccgtggccaccgccgcgatggcggtggccgcgtccgacgccgacgacatcctgatccgtcaggtggtgccagatgttggcgaacgaagaggaggacaacctgctgaacgccgagcaccacttcgcgagcttcaacgccaagttcgccaagacctacgccaccaaggaggagcacgatcatcgcttcggcgtcttcaagtccaacctccgcagagcc

SEQ ID NO: 13842 - DNA, 128 bp, Glycine max
  Clone ID: 700965136H1
ctctctctctctctctctctcattcacacgaatcacactctccacagtgcgattcattcaccaatggatcgcaacggtgttctctctcttgcattcatctgcattgtagtcgccggcgtcggaggcca

SEQ ID NO: 13843 - DNA, 262 bp, Glycine max
  Clone ID: 700965137H1
cttcatcctcatacgaataataacaaataaataaaaggagggaaaaagaaaaacaaaaaaaatctaatagttattttgcttccgcaccaacagttttgtgcttgaagcctttccagtgtgcagctgcagctggttcaatgattcaaaattgttaagttctttgttttggagcattcatcattgtccaaattgcaattttttcagaagaatagcaacaatttaggaagtttctgaagcaatagggagtagtggacacagttta

SEQ ID NO: 13844 - DNA, 258 bp, Glycine max
  Clone ID: 700965139H1
ggccaactctggtcaccctggtctccccatggggtgtgctccaatgggtcacattctctacgatgagataatgaggtacaatcctaagaaccccgcttggttcaaccgtgaccgtttcgttctctctgctggacatggctgcatgctccaatatgctctccttcaccttgctggctatgacactgttcaggaacaagaccttaaggaattccgacaatggggaagcagaactcctggacatcctgagaactttgagac

SEQ ID NO: 13845 - DNA, 262 bp, Glycine max
  Clone ID: 700965140H1
aattaagttcatgaattgcttattgctagctatatggtgatcgacaacttcaaattttgagtctgtcactccctcagttaaagctcacatcacattagattactatttgaaaccttcaagctagcgagtctcatatatctgttctttgtctctttactctttgttttcaaggattccttctaacgagcaaaatgtcggctaactgtgagaaaatggtagccatccctccaacgaccaaccaatggccacaggtggatgatca

SEQ ID NO: 13846 - DNA, 260 bp, Glycine max
  Clone ID: 700965143H1
ccccaatggggctttcgcggaagtccaagcttccacatttaaccaactttttcacctctgaaacccgcttttcttgtttcagtggaaatggccgaaactcgagacgccgccgccgatggggtgcccggaactcccgccataagggaaatgagacccgagaccgcgacccatgcgggaatcgggtcgggtgggattcggagggtgaatttccgagcggagattgatacgtcaccgccgtttgggtcggtgaaagaggccgt

SEQ ID NO: 13847 - DNA, 260 bp, Glycine max
  Clone ID: 700965144H1
gcgacaacaacaacagcagtggcatgggtatgctcctggtgttattcccccaagacaaatcctcaacctcaacctcaaacaccgacattaaacccatgttcaacttcccttccccctccaaatctctcttctccaaagcacaatccactatctctatttgcctccttctcctcttcacaacgctcctcctttttactctctccaccctcccaaacgcccttcccagccctcccgctccccctccgagctctaaacccacc

SEQ ID NO: 13848 - DNA, 257 bp, Glycine max
  Clone ID: 700965145H1
cttccctctctctctcactgtctttctctccttttccgtgtttatgcttcaccctttcatagatctgcctgaaaaaaacccctcaattccaaacccttgcgatccgatccaggtcaattaatttctctctctctcgctctctctctagaatgtcttctcaacgcgcagatccagcgtgccggatcttcccggaacccgatgcctccgagatcgaccacttcgaccggttaccggactcgcgcctccttctggttttc

SEQ ID NO: 13849 - DNA, 268 bp, Glycine max
  Clone ID: 700965150H1
ctcgagccgaatcggctcgagcgtcactatcgggagaagtaatcgagcttcagcaatggtgatacgtcaaggctcagaaatcacaagcctacttcaagagatatcaagtcaagttcaagagaagaagagagggagaaaccgattaccgtgccaggattcggttgattaatcaggacaagaacaaatataacactccgaaataccgatttgtggttcgctttagcaacaaggacattgttgcacaaataatatctgctagcattgccgg

SEQ ID NO: 13850 - DNA, 263 bp, Glycine max
  Clone ID: 700965151H1
tcttggcatattgtgccctccctctttctagctatttccctctcttaacacaattaacaaagatatatcatatcatatcaactccaaatgatgaaaaatattgggttgtttcttcttgtggtggtggctacttttgtggtggcagccacagctggtagcttttaccaagactttgaaataacatggggtggtgagcgtgccaaaatctatgaaaatggaaatcttctcaccctctccctagacagagcctctggctctggctt

SEQ ID NO: 13851 - DNA, 259 bp, Glycine max
  Clone ID: 700965153H1
gagcgaatatggaggaggagtggttgaaacttgtgaaaggagagcgagacgaacagcgtctggctgggcttcttctggtaaccaagttctgcaaagctgaggatcagtcctcagtccgtagggtctacgatgcgcttggacctcactttctctatcgcctcctcagaaccgctatggcaagtggaggaggaggcctcaacgataaccgcaacgcctacttaagcttatccatcacgcttcttgccgcattttgtcgtgt

SEQ ID NO: 13852 - DNA, 261 bp, Glycine max
  Clone ID: 700965154H1
caacattccacctagctccccaatcacatcttcaccacaccataaaccttcttaatttctctcttcattttctcctctattgtcataatcatggggaccttccctcgcttcgacccaatcaccacccaagaccggtccaaccagaccgtggcctccgaccttgacggcaccctcctcgtctcccggagcgccttcccctactacctcctcgttgccctcgaagccggcagcgtcctccgcgccctcctcctcctaacctca

SEQ ID NO: 13853 - DNA, 262 bp, Glycine max
  Clone ID: 700965155H1
acaaaatacctataaataacacaccaattaaacattttagcaacataataaagcaaaataattaaccctaaattccacaatacttaaataatcaagtctagcaatgcatcgttactagataattacttgcagaggtgatagtagtggtagaacattcttattgatggtttgatattgttagaggtgagggtttgattcaagaacaacacaccaaatggaggtatgttgaacccttaacacacagaaaacaacccaaaacgag

SEQ ID NO: 13854 - DNA, 267 bp, Glycine max
  Clone ID: 700965118H1
aggagatgcgggcggcccgccgccgaagccgaaggagaaggcggaggaccggtaccgcgacgacgaggacgacgatcccatggagagctttctgatggcgaagaaggatttagggttaactctcgcgtcggacgcgctgcacgctgggtatgattccgatgaggaggtttatgctgccgcgaaagctgtagacgctggtatgattgagtatgattccgatgataaccctattgttattgacaagaagaagattgaacccattcctgc

SEQ ID NO: 13855 - DNA, 246 bp, Glycine max
  Clone ID: 700965079H1
gggcactgactcacacccacaatagtcgggggcagcttcaaagtacctccacattgtctcctactcttactgttctcttctcttctcatcatttttattttttccaatcaaaccatacaaaacatagcaccgctcttttctctccgaaatccccatctcccttcacttctgagctctggacgagatcccagatctcaccatctttcacgcactcttccatcagattcatcctttcgtttaacgcaa

SEQ ID NO: 13856 - DNA, 248 bp, Glycine max
  Clone ID: 700965080H1
acacaaacacatacattgtagtatcacttttgtctcggaatttgttcttttgagttatggcaagcttaaaggttgcatgtgtggttttgatgtgcatggctgtgatgagtgcaccaatgatggtgcagccgtgtcatgcaatgatgtttctgtgaacctagcaccgtgcctatcttacctgatgcagggtggagatgttccagaatcgtgctgtagcggagtgaggaacattctgggttctgccagca

SEQ ID NO: 13857 - DNA, 244 bp, Glycine max
  Clone ID: 700965081H1
ggcaaagatagtggcagagctccaagctgtgaagcacaacagtggcaagtcctacaatcagttagcggaggagactggactcaccaacgtctatgttgctcagcttctcaggagacaggctcagtcaatccccaaactgcccctctacttcgggcagcgctgcccgacctgccccaagaccttgtttctgagatgatgagaccccctttgaggtcttatgaccctaatctcatccaagacccca

SEQ ID NO: 13858 - DNA, 239 bp, Glycine max
  Clone ID: 700965082H1
cctctgtcttatatcaggagattgattacaccaaggaggctgctaatgcagaattgtttgcaagtaactttaagaacatggattatgtgaaagttcctacaatctactgggattataccacccacagattctgtaaatggagtatgttccagggattaaaataaacaacatactagctttagatcaactgggtgttgtccgcgtaaggttagggttatatgcggtggattcatactttg

SEQ ID NO: 13859 - DNA, 238 bp, Glycine max
  Clone ID: 700965085H1
acttaacagcttcaaaattatcaacttactgtttagcctgtgaactaacacacgcgaacaatgactcatggctggagctcaaagtgtcattaatgccgtagtcctcattagtgacactttagctccagccatgagtcattgttcgcgtgtgtcccttaacagcttcaaaatgtcactaatgaggactacggcattaattagctagttttgttgtcaataggaatttaagtttatttct

SEQ ID NO: 13860 - DNA, 238 bp, Glycine max
  Clone ID: 700965086H1
aacattaaataaagctaaggagaaatattgagaagcaggaagaagcaagttatggcgacgaagcagcttccgcagatcgccattctgggagctggtatctttgtgaagactcagtaccttcgagactctccgagatctctcatcttttcattctgaaatccatttggagccgcactcaggaatcagctacagctgccgtagacatagctcgtaagcattttccccaagtagagactaa

SEQ ID NO: 13861 - DNA, 133 bp, Glycine max
  Clone ID: 700965087H1
ctttcctacaaatccaaaatattagttttagtttacaaaatggctgtggaactcatggggttcccaaaactagacgaacaaaaggccattcaagaagccgcatcagaaggcctcaagggcagaaacacctgat

SEQ ID NO: 13862 - DNA, 239 bp, Glycine max
  Clone ID: 700965088H1
gaaagaaatgtgggagaagttgagaggtaaaaggctaatgtttgttggagattcactaaatagagggcaatggatatctatggtatgtttgttacaatcagtaattcctgctgataagagacaatgtcaccaaatgcccatctcaccattttcagagcagaggagtacaatgcgactgtggaatttctctgggctcctcttcttgctgaatctaattctgatgatcccagtaatcacag

SEQ ID NO: 13863 - DNA, 237 bp, Glycine max
  Clone ID: 700965089H1
ccttcactcaatcaagttttgactttatttggagtttctccaaaatgagccggccaatggaggaagatactgtgggtaagaatgaggaagaggagttcaacactggaccgctgtccgtaccatgatgagtgttaaaaataatactcaggtactgataaattgtcggaacaacaaaaagcttctgggtcgtgtaagggcttttgataggcactgcaacatggttcttgaaaatgtgag

SEQ ID NO: 13864 - DNA, 237 bp, Glycine max
  Clone ID: 700965091H1
ctttcttgcgaaaccgagagagcgaaggggcaaacacaatttttatttatcttcttttttattttttgtagagagagagagagagaaaatgttggggatcttcagcagttcagtggtgtcccgccggaggagctggtggccgctggcagcagaacgccgtcgccgaagacgacggcggggaagctgctgaaccggttcgtggagagcaaggcgtcggcggtgtcgctgcaggtgggg

SEQ ID NO: 13865 - DNA, 235 bp, Glycine max
  Clone ID: 700965092H1
cgctctcccgagggctttgtcggaggattcttacgcctgaacgagtcctctccttgcgtactaggttggtgctcaattaaaaagaatggggggagatgcacagaagaagagaattgccaaattggcgtgtctaccttcttgctggtggccatggtggtggcagtgacagttagcatcaacctcaataacaagggatcaaggctatgattcaaaggaagaaagcaagtccagtgta

SEQ ID NO: 13866 - DNA, 274 bp, Glycine max
  Clone ID: 700965101H1
gtctggatatcacatccaacggcttggcattcatgttgaaatggtttcagatttaaaacaaggtttgtcaaccataagcaatgggaatgtagttgttaatatggtcctgattgagcaggaggtttgggatagagatttaggcttgtcatctcactttgtcaataacacgaggagaattgatcatggggttcctccaaagctgttcattcttgttaattctagtagttcttttaaagctagcgtaaacttgggtgttcataatcctactgtgatc

SEQ ID NO: 13867 - DNA, 270 bp, Glycine max
  Clone ID: 700965102H1
ctctggagaagaaaacccgcgtttccttgggtagtcgaaaggaagcagaatgggatccaaaattcttccaaaatgggcatcgaagccttgcgtaatgggaatcgacgaagctggaagaggccccgttttagggcctatggtctacggttgcttatactgctctcagtcctatctgaagaccctttccacgttgagttttgcagattctaagacactcaaggaagagaagagggaagaattgtttgacactttaaaactcaatgattctat

SEQ ID NO: 13868 - DNA, 265 bp, Glycine max
  Clone ID: 700965104H1
gatgacgaattttacagtgtctatgatggagaagtgtctacaggtcatgcagatgaaattggagaggacagaaagctgtcccttgaccattgtgggattctgccaaataactgtttgccttgcctcacttccaatgcaattgctgttgaaaaaagaaggccaatgagtcctgatacaccaagttcacggagaaagtcactttctaaactctcccccaaatggagagaagggtcttcagatatgactttactttcccccaaggcat

SEQ ID NO: 13869 - DNA, 266 bp, Glycine max
  Clone ID: 700965105H1
ggcaagtaccatttttctcaaccttatcacccttttgcataaaagggccaccccttcttcttcttcccttctcaacttgtactacaatttctggattgaattatcttcaaaatgagagaaatccttcatgttcaagcctggtcaatgtggaaaccaaattggaggcaagttttgggaggtgatgtgtgatgaacatgggattgatgccactggaaattacgtaggtaactttcatcttcaacttgagagggttaacgtgtactaca

SEQ ID NO: 13870 - DNA, 262 bp, Glycine max
  Clone ID: 700965107H1
cagaaattaagctagagctacatagtttttttcttttctcaccttccttctctcccttcagacaagggacgaaaaatcagagagagagagagagagagagagagaaattccaaaaccatgtcgtcccacagtcatctaagtttcgcctttggggttctaggtaacatcgcctccttcgtgtgctttctggcaccactaccgacattttatagagtttgtaagaagaaatcaaccgaaggttccaatcaattccatatgtggc

SEQ ID NO: 13871 - DNA, 265 bp, Glycine max
  Clone ID: 700965108H1
gagaaagagaaatcgagagaaagagtgaggagagaattacagagcattttccaacacgattacatcacagaatcaaaccctctctttctctccgaagctgcgttaatatcttactcgccttagattgttcttctctttcattatactgttctcttttcgatttgagggaacagtacaagagtgtgaggatcggttaacccaactgcacaggtgaggtgtctctttcgtgttccttttttgtgtttttgctttcgatttctccgcg

SEQ ID NO: 13872 - DNA, 265 bp, Glycine max
  Clone ID: 700965109H1
ctttgatttcttttctctttagctgcttcttttgtctctccaaactaacatccagattgctctgttactatcaaaaggccttctttcctcatttcggacgcacgctccccatccatgtctacttgtgtaaaatcccgagatgtttgtattgttggtgttgcacggacgccaataggtggtttacttggcaccctatcatctctttctgccacagagttaggctcaattgctattaagactgctctcaagagagcaaatgttgatc

SEQ ID NO: 13873 - DNA, 261 bp, Glycine max
  Clone ID: 700965110H1
agcctgctgtcgtgagctggacctggaccaaccactggatctactgggccgggcctctcatcggtggtggaatcgctggccttgtttacgaggttgtctttatcagccacacccacgagcagcttcccaccactgactactagagggggggaaatgaaaataaaaaaaaaaaaattgtgtattattgaatttctctggaatcttcttctgtgtatggttttccttccttgtgttttcttcctaattcactttcgagggttg

SEQ ID NO: 13874 - DNA, 275 bp, Glycine max
  Clone ID: 700965111H1
ctcatacacacgttgtcgcgcacacattccttcattccgcagcaacaaacaaacatcttttaccttaaacaacaatggccgatgccgaggatattcaacccctcgtttgcgataatggaaccggaatggtcaaggctggttttgctggagatgatgcaccgagggctgtgttccctagcattgtggggcgtccacgtcacactggggtgatggttgggatggggcagaaggatgcgtatgttggggacgaggctcaatccaagaggggtattttg

SEQ ID NO: 13875 - DNA, 262 bp, Glycine max
  Clone ID: 700965112H1
gattgctagaatggaatttcgatgctcagtcatctcttttaccattctcttctctcttgctcttgcaggagagagccatgtccatgcatcgctacctgaggaagattattgggaagctgtttggccaaacactcccattcccactgcactgcgagagcttctaaagcctctccctgcaggtcttgaaatcgatgaactccctaagcaaattgatgatacacagtacccaaaaacattcttctataaagaagaccttcatcca

SEQ ID NO: 13876 - DNA, 264 bp, Glycine max
  Clone ID: 700965113H1
gcagggagctctgccgcctccaacaaaacagagttcagaacacaaaccctcgaaccgaacgtttttgagggttgatagagcacgatggttcagtacaattttaagaagattaccgtggtgccaaatgggaaggatgtgctcgacattatcctctctcgcacccagcgtcagacaccaaccgttgtgcacaaaggatatgcgatttcacggctgcgccaattctacatgcgcaaagtgaagtatactcagcagaattttcacgac

SEQ ID NO: 13877 - DNA, 265 bp, Glycine max
  Clone ID: 700965114H1
gaaaaagaagcaaaacaaaacataaaaggaaaacccttgcttgcattgcattgcactgcagcacctcctccctaccaaccccctcttgccttgtctccgacccgccctgactcgttgagctcgccggaaactttggccaaaagggtctccgaattcgcccatggcccttgatttccgaccttagagacccttcaagttttcgcctttatcttattcgcttttcccctttctttgggtcctcaatttctgaatactgcaactgaga

SEQ ID NO: 13878 - DNA, 272 bp, Glycine max
  Clone ID: 700965117H1
tatctactcttttctgcatgtttgttctctcaacgactcctccgcgaaagagtattattcaatattttggttgggttgaatcccggggttgaagcgttgcagacatcacggctattctaagagtgtctcgctccctcattcatgtccgatctgtacgacggaggacgggtagttgcgtaactgccgttaacccttcgccgcacggtgggcgtggtgctttgccttctgaaggtggtagcccttcagacttgctcttcctcgctggtggtggt

SEQ ID NO: 13879 - DNA, 242 bp, Glycine max
  Clone ID: 700965078H1
ctcgagccgctcgagccgttcggaagcagacacagatggctcgtacgaagcaaaccgctcgtaagtccacaggaggaaaggctcctaggaagcagcttgcaaccaaggctgcacgtaagtctgcaccaactactggtggtgtgaagaagccccaccgttatcgtcctggtaccgttgctcttcgtgagattaggaaataccagaagagtaccgagcttttgatccggaagctccccttccag

SEQ ID NO: 13880 - DNA, 248 bp, Glycine max
  Clone ID: 700965049H1
gcaatggcaatggcaattgcaatggttcctcaacctctgctgacccttttcctctttttctccctactctcaattgccaactcttctccttcccaacaccttcagatcgccaatgccgaacgcaggttgatttgacttctcacattattaaggtgtacttgacattgaaggttgaaaatttggggacatctcctgcttcagaagtacatattgccttttcgcccactgaagtagaacatctagcaata

SEQ ID NO: 13881 - DNA, 242 bp, Glycine max
  Clone ID: 700965050H1
aacggatttcatttggttcgaaatgtttatttttcaaggttatgcgcagggtttgaagagttattaaatgactttgaaatatgttattatatttgtggatagtctgaaatagttcagaccaaatagaaagagtggttgttttagtttaaaaataagtaaagataaataaaaatatgtagacaatgtagttactttaaaattagcagtgcgtgacttctaagtccaactttaggggtatctaa

SEQ ID NO: 13882 - DNA, 242 bp, Glycine max
  Clone ID: 700965051H1
cgcaggggagagcttggaaaatggattgctgcagttgctgttgtattacgccttttccttccaagacacttccctgattggctggaattgcctggtgctctgattcttcttatcgttgtagctccttctctaattgcaagcacctttagagacaacattgttggggtggtagtgtgcctcatcattgcatgttatttgctgcaagaacacattcgggcttctggtggtttcagaaactcctt

SEQ ID NO: 13883 - DNA, 240 bp, Glycine max
  Clone ID: 700965053H1
tcggtggtggaagttgcttgaacgctggcttttacactcgcgctagccctcaatatgtaagggaagcggggtgggatggaagggtagtgaatgagtcgtacgaatgggtggagaagatagtgcatttgagccacaattgaagcagtggcagtcatctgtgcgggatggactaatagagataggtgtggtgcctaataatggcttcacttatgaccatattgatgggactaaagtaggggg

SEQ ID NO: 13884 - DNA, 238 bp, Glycine max
  Clone ID: 700965054H1
gttcattggtggaaatccaagttcccgggcagaagtttgtgaacggagttccgttccccgctgtggtgtctcctccacctgcaactgcaagtgcggttcctcttacggactccgtcaaaaccagaaagctttccttgaatcattgctactccaatcgggtgctgtccttttcaggggattcccactctccaccgcttctcacttcaacgacgtcgtcgaagcattcggctacgacgag

SEQ ID NO: 13885 - DNA, 241 bp, Glycine max
  Clone ID: 700965055H1
cacttctgtgtttctctcttcacctacactttcctctttcaattcaattcaattcttctttttggttcagaaactctgtacagttaatcaaaccctacctcacctcaccggttttagctgttatttaatatatagatagaaatccaaggaagaagatgaagcattttgccgtccaaaacgtcgtcgttccatcccacgatgagattagcgttgtttgccccaagccccgccgcctcggcct

SEQ ID NO: 13886 - DNA, 241 bp, Glycine max
  Clone ID: 700965056H1
ctttggtacattctgtaggattctgtcccagaacaagctgagtggtccaatacctgcagcagttgcaaaacttactaacctgcgaactgtggatgtatcgtttaacagtctcactggaaacctcctaagcaattggccaaccttgccaatcttcttaccttcaatttatctcacaacaaccttcagggtgagctgccggctggtggttttttcaacaccatttcgccttcctctgtttctg

SEQ ID NO: 13887 - DNA, 240 bp, Glycine max
  Clone ID: 700965057H1
ttcccgaaccgcgcgcttcactcctcttataaaaaaccccaagctcgacaccttctactacctcgagctcctcgggatcagcgtcggcggctcgccggtgcgcggcctctccgcctcgctctccgcctcgacgcagcgggaaacggcggcgtcatcatcgactcgggcacctccgtgacccggctcacccgacccgcctacattgccctccgagacgccttccgcgtcggggcctcgcat

SEQ ID NO: 13888 - DNA, 240 bp, Glycine max
  Clone ID: 700965058H1
caggaatcacattagctgagtatttcagagatatgggttataatgtcagtatgatggcagattctacatctagatgggcagaagcattgcgtgaaatctctggacgactggcagaaatgcctgcagatagtggatatcctgcataccttgctgcacgtttagcctcgttctatgaacgtgctgggaaggtaaaatgtcttggaggccctgaacgtacaggtagcgtaactattgttggtg

SEQ ID NO: 13889 - DNA, 236 bp, Glycine max
  Clone ID: 700965059H1
ctagaactgaagagcattcacattatagtacaaaaggtgggaataatggcatcctatctggcactgctacttcaaattctagaaactaacttagtatcagcaactgcatgtggcagacatcactttctgatgctaagttagtttctagaactgaagagcattcacattatagtacaaaaggtgggaataatggcatcctatctggcactgctacttcaaattctaaaaatgacctg

SEQ ID NO: 13890 - DNA, 239 bp, Glycine max
  Clone ID: 700965060H1
cagatccatctgtatcttcccgagctcctttgttttcgacaaacctcccttccttgtaaactctcaccctctcttctttttcacccttttctctattccatatcaatcacaaaccctaattcactttctacagattcattcggaaacaccttttccaatttccaacacacaccaaccatgggttacgaagacaatccgtatcgcgacgaggacggagagcccttgatggactacgacga

SEQ ID NO: 13891 - DNA, 243 bp, Glycine max
  Clone ID: 700965061H1
tttctctctctctctgcaacgaaaaatggcttccctcacgtgctcccccacctcgctacagctccgattggccttagccgcccctaaattcccacacaccccgcaactgcgaatgcgcaacttaagctcaaccgagttcgccctctacgcgccgcgcaagacggcgggcccgggcccgggcccaaactcgacggcttctcgggctggtccgacaccgacgccgagcagcggcccaacaacgcc

SEQ ID NO: 13892 - DNA, 248 bp, Glycine max
  Clone ID: 700965062H1
agcacaaccaacacctccacagcctctcctacctcccggagccatggccgccgccgactcctccgccgctccatcgcaccagttgtcgcagagggagacggacatccagatgatgctcgccgccgacgttcacctcggcaccaaaaactgcgactttcagatggaacgctacgtcttcaagcgcagaaccgatggtatttacataattaaccttggcaagacatgggagaagctccagctcgctgcta

SEQ ID NO: 13893 - DNA, 251 bp, Glycine max
  Clone ID: 700965063H1
gacagtgaaaagtagaagcagattttaggattcttgatcctaggtgtttgctccagacctcattagtcaaaggcatgtaaaagtttgaattgacattaatggtgatatttcctaggaatataatttttattgaaggatcaaattagtttaatacttgtactgaaatatatagatattattttgtttatcatgatagctgtctttttactagaattgcagcgtgttttgaaatttttggtataccttcgatt

SEQ ID NO: 13894 - DNA, 248 bp, Glycine max
  Clone ID: 700965064H1
gagagaaagaagagagatttgaattgagtggtattccaacgtcgaaagcagagaggagaaacaataaggtttctcctaaagtgctctgttttgttttctctctctctgtctatatgtgactccgccctcacactctgacctgtggtgtccctcatgtgacaattcgggagctgcaaggtttcggtcttgggttggaatattgggagaacccctccttcgaaaaatcaaggaaaacgaagaagctcgtt

SEQ ID NO: 13895 - DNA, 247 bp, Glycine max
  Clone ID: 700965065H1
agaaaactttaggaaaacctatttaaagaaatcttgctttaaatggatttaatgaaaaaaattgatagagattagagcccaccagcattgtggatctgtttatctgactccatctagtggaataagcttggtgtttttgtttgaaatagaattacctaattactggacactattctttctcattctattctgcctaatgcctatataattatacttataatattcttattcattgttgcagtggttt

SEQ ID NO: 13896 - DNA, 244 bp, Glycine max
  Clone ID: 700965066H1
acatattcttcagttagctcccccaacctatacacttcaccaccacaccacaaccctaccctctctctctgtcatggtcattggaggagccttccctcgtttcgacccaatcaccaaatgtacacccaagaccgctccaaccagaccatcgcctcggacctcgatggcaccctccttgtctcccggagtgccttcccctactacttcctcgtcgccctcgaagccggcagcgtcttccgagccc

SEQ ID NO: 13897 - DNA, 240 bp, Glycine max
  Clone ID: 700965067H1
gttagtgatgcagttaatattggaagtgatgctgttatggacaagggtgagagtagtataatttcaaatatattatcgatggagtttgatgcctgggatgactcgctggcatcacatgaggtttgaccaagttgttgggtgacaacactgacagccagaatggtccgttaaaaaaatctagttctaggaaagttcaaagtaacaatcaatcaagattttcttttgcatggcaggaggaat

SEQ ID NO: 13898 - DNA, 236 bp, Glycine max
  Clone ID: 700965068H1
caagtcagaacacaacacaacacaactaaacaacaatgtcgatcgctttttccttcttcactccactctcttccaaatccgttccatccttttccctctctaccccttctctctgttttcgctcactcccctccgccgccccaccgatcgcttttaccctctctgctcctccgccggaggacctggcggcggatccttcggaggccacggcggtcccggacacggaggacatggtg

SEQ ID NO: 13899 - DNA, 237 bp, Glycine max
  Clone ID: 700965069H1
gttcccttttcaatctataagatgctttcactttatccaataatttattgatgcatctaaaaaagagtttgacgtgacaaccatggcacaaacaaaggctttgttgttgtttgtttgttactgaaaattgtgagaattacttccttgtagtgttgatttgtttagttttaacattaggcattgttcatgattttgataggttcttcttgtgtgttaaaacatagattgcggaagtta

SEQ ID NO: 13900 - DNA, 237 bp, Glycine max
  Clone ID: 700965070H1
tccatcttgactgtggacaaggttggaagaaaagttttattccttgaaggtggtgttcaaatgttgatttgccagattgctactggagtcatgattgctatgaagttcggggtgagtggcaaggctcgttttcctccggagaagccaaccttattttgttctttatatgtgcatttgttgctgcatttgcatggtcttggggtccactagggtggttggtgcctagtgaaatatgcc

SEQ ID NO: 13901 - DNA, 237 bp, Glycine max
  Clone ID: 700965072H1
cttgatcggtggtgtatttggtgtgttgatgttttattaaacttttgtactcttgctttgaaactagttggttagatttgaaattcttctaagatggatacttcttataggactggtgggtcaagtacgagtgcttgctttttgatatggatgacactctttacccattgagcttaggtctcaatttgttttgtcgcaagaacatacaagagtatatgttagaactcttgcatattg

SEQ ID NO: 13902 - DNA, 236 bp, Glycine max
  Clone ID: 700965073H1
tatttttcttcctcagtagtgtcatttacgcttctcttctctgcagcaactatgcctaaccctaaggtcttcttcgacatgaccatcggcggtcaatctgctggccgcatcgtgatggagtctacgccgacgtcactccccgcaccgccgagaacttccgcgcgctttgcaccggcgagaagggcgtagggcggagcggcaagcccctccactacaagggctcgtccttccaccgc

SEQ ID NO: 13903 - DNA, 234 bp, Glycine max
  Clone ID: 700965076H1
aaacactcttcttcatattcttcttcttcttcttgttcttgttctatctgtgacgagcatcatggcctcgagagcagtgctattgttggctatgtgtgtgcttccggccatggttgtgccattcgcccagcaaagaaccctttttgcgtgaagggtcgcgtctactgtgacccttgccgtgctggttttgagacctcagcaaccacctacattgccggtgctgagattatgttg

SEQ ID NO: 13904 - DNA, 253 bp, Glycine max
  Clone ID: 700965048H1
gaaaaatatggagggaaaagaagaggacgtaagagttggagccaacaggtacggagagaggcagccaatagggaccgctgctcaggctaaagactacagagagccaccgtcggcgcctctcttcgaaccggagagttgtcatcgtggtctttctatagggctggcatagcagagtttgtggccactttcttgttcctctacatcacagtgctgactgtgatgggtgtgttcaaatctaagagcaagtgttcca

SEQ ID NO: 13905 - DNA, 238 bp, Glycine max
  Clone ID: 700965077H1
aagaaacccaaaatctcttcggctctctctcttttccatatccatatatatctccaaaccctaccgttaggttccccaattcaacaccccgtgggccgttgcgctgcttctttgttcgtacgtttccgtcgattgcctccgaaacgatgtcgtatcgcccaagcgggaactccaggaccgaggtccgccgcaatcggtacaaggtggcggtggacgcggacgaaggtcggagacgacg

SEQ ID NO: 13906 - DNA, 242 bp, Glycine max
  Clone ID: 700965014H1
tcaagacaaaatgactgcaaaggaaagtgcaacctggcttgccatcatcaaccaagaggaagccttggctagagagctttaccctgactattgccctccattttcctctgctggaggtaatggatcttggtgatcaatgattgcagcgagtatgatgttgatggggccgaagaagagctgaactttgatgtggaggaccggaagcctgaccatcttcttccatcaaacctcgggatggagag

SEQ ID NO: 13907 - DNA, 249 bp, Glycine max
  Clone ID: 700965015H1
gtggcttatgacaatatgagcccctccgtcttcctcctgtggcttgtcattatttctgtcctcgcccactctgccctagcttcaatccctctagcttatttcttagactgtgggggcaccaaagaggtacggtagacaatctcacatacattcctgatgaaagttacatcaaggtgggcaaaaccaccaccatcaacaagccagacttgttgccaatactctcaacattgcgatactttcccgacacgt

SEQ ID NO: 13908 - DNA, 255 bp, Glycine max
  Clone ID: 700965016H1
ggagattgtcagagcatcaggtaagtttgaacttctagaccgtttgctcccaaaacttcgcagagctggtcacagagtcctccttttctcacaaatgactcgacttatggacactctcgaagtctatttgcgacttcatgattttaagtatcttagacttgatggctcaacaaaaactgaggaaagaggcaatcttctacgaaaatttaatgctcctgactccccgtacttcatgtttcttttgagcacccgtgc

SEQ ID NO: 13909 - DNA, 251 bp, Glycine max
  Clone ID: 700965017H1
gggtattctttttcaattgtttctaaggatgaaattcctacagacgaatatgctttggaacttaatggcgttaccataaaagaaacagcaaaattaggccctcgcccagagaagcctattgaaatatataatttgagagctgtccattttgccgaaaggttagagaaattgttgccattttggatcttgatgttcttttctatccttgtccaagaaatggcccaaatttccgtcaaaaggttctagagatg

SEQ ID NO: 13910 - DNA, 246 bp, Glycine max
  Clone ID: 700965018H1
cgtgtctcaagtcggcagctcgcagtcgcagagtttcccattcctggtttcctcaccctcgtgtcgatcgttctagggttagggttaggtccctattcaattcgcttcaatttctgcaagagacgccctcccgagagacgccatgggaggtgacagtgccgttgaggaatccgaaggggtcaacgtcaacatcaacgttcgctgctccaacggttccaagttttccgttcagattgccgtcgattc

SEQ ID NO: 13911 - DNA, 242 bp, Glycine max
  Clone ID: 700965019H1
tgctgatgcgtgtggtggggttggcattcttggcattgcatgggcctttggtggcatgatcttcatccttgtctactgcactgctgggatttcaggaggtcacattaacccagcagtgacatttggctgtttttggctcgcaaggtgtctttgatccgagccatcatgtacatggtggctcagtgcttgggtgctatctgtggagttggtttagttaaggctttccaaaagtcttacttcaa

SEQ ID NO: 13912 - DNA, 243 bp, Glycine max
  Clone ID: 700965020H1
ttaagatcaccaaagtacttgtgagtgtatacccaacacaaactaagatcaacatggactactacacccgcgtttcagaagttgagagggaacctatcatggagtattccacaccacgaccaatatgggcaactaccaccaccctaatgctcaccgtgtcctcaacgagaagattgtttatgaggaggatgtgattggaggatcccgccacaaccacatgcatcaccaccaccctgagactca

SEQ ID NO: 13913 - DNA, 243 bp, Glycine max
  Clone ID: 700965021H1
ggcttggttagtcaagaaccagcactatttgcaacaacaatagctggaaatattttatttggaaaagaagatgcagacatggataaagtcatacaagctgccatggctgcaaatgctcattcttcattcaaggattacctgatggttatcaaactcaggttggagaaggtggcacccaactttcagggggccaaaagcaaagaattgccatagcaagagcagtgctaagaaacccaaaagtat

SEQ ID NO: 13914 - DNA, 241 bp, Glycine max
  Clone ID: 700965024H1
gtagatatctccaaatgagcctcagttggcatttaattctcggattgccttttgtcttaacatgcacaatgaggcagttcgagcactgcgttttccaccaaacacacagaaggaaaaggaaagtgtgagaagaggagagagaggcatcaacaagagcaagaattggctaaacatatcgcagaggaagatgatgatgacttttgataatgatttgctctttttatcttaccagtttgttgtc

SEQ ID NO: 13915 - DNA, 240 bp, Glycine max
  Clone ID: 700965025H1
gtgtaccaagaagaaactggaagaagcatggaatgttttgcataaaatggtggcttctggcattcagcctgatgttgtaacatacaacaccatggcaagggcatatgctcagaatggtgagacaagaaggctgaaaggctaatattgaaaatgccgtacaacatagtgaaacctaatgaacgaacttgtggcatcataataagtggttattgcaaggaaggcaatatgccagaagccttg

SEQ ID NO: 13916 - DNA, 241 bp, Glycine max
  Clone ID: 700965026H1
cttctttgttgcatatcttggaattgtgaggagaaaagagtggcctcatttcttcagatttcatgttgtgatgggaatgttattggagtttaccccagtagagtgatagcggcatccagcggctacagtccctataacctgcagggcaatctccaataacatttttggactgccgtatcatttggttatctatttaccgtcttggagtccataaggtgtgctcttgccggtatgtatgctg

SEQ ID NO: 13917 - DNA, 238 bp, Glycine max
  Clone ID: 700965027H1
atcgttctccctctccctccctctctctctctctctctctctctctctctctctaagctctttcttgttgacactgtgagtctatgttatgtgtggcggacatgaactccaccaccaacactcgaattctcagtcaatggctgcagcagcaccgagtgatggttctgggaagaaggtgagagagccttacaccataaccgagtccagagagagttggactgaggaagcacatgataag

SEQ ID NO: 13918 - DNA, 243 bp, Glycine max
  Clone ID: 700965029H1
tgctgctcctatgatggatttattggatggatttgcccccatcccgccaacagaaaacaatggaccggtttatccatctgtaactgcatttgagagcagctccttgaggttgacattcaatttctcaaaacaaccaggaaacccacaaacaacagttatccaggctacttttatgaatttgtcctccaatacatatacagattttgttttccaggcagcagttcctaagtttcttcagttgca

SEQ ID NO: 13919 - DNA, 252 bp, Glycine max
  Clone ID: 700965031H1
ctcaagggttgctgtttttttcctcgtgacatgatttgatttccaccttcactcaagtttcaattgggaatctgatgtaggctttggaggttcttctacttcccaggatgctttcaatttatcaattatccacaccacagaggattccagtgattgagtgagtggatatgaatatggaaggaccttatgatttatcatgcaatggagaagctggtaacaaaagccttcagatcattaaatactctccttata

SEQ ID NO: 13920 - DNA, 253 bp, Glycine max
  Clone ID: 700965032H1
ccctcaaaccctagccagggtcgcaattcacttgcggctgcagtagagaagcactcttcgttcttcgactgtctacgatctgctttctctgaattgtgaaaatgtcgctcggagaaactgcttgttcatacgcagctctcatccttcatgaagatggaattagtgtaactgctgacaagatcagcaccttgttgaaaactgcaaaggttccagtagactcttattggccaaccttgtttgctaaacttgctga

SEQ ID NO: 13921 - DNA, 245 bp, Glycine max
  Clone ID: 700965034H1
gtttgcgtcatcatcaccaacgttgggggtttaattctctaccttatcatcatcggagatgtgctatctggaaagcaaaatggaggggaagtgcatttgggcattttgcaacagtggtttggaatcactggtggaattcccgggaatttgctttgcttttcaccttggtctttgttatgcttccattggtattgtacaaacgtgtagagtccttgaagtacagctctgcagtgtcaactcttctt

SEQ ID NO: 13922 - DNA, 238 bp, Glycine max
  Clone ID: 700965036H1
ccaaaatgccagggcttgtctgaggttgagggctgcctgcgagaagctgaagaaggtgcttagtgctaatccggaggcccctttgaacattgagtgcttaatggatgagaaggatgtcagaggtttatcaagcgtgatgagtttgagcaactaagtcttccaattttggaacgggtgaagggacctttggagaaggcacttgcagaggcaggtcttacagtcgaaaatgtgcacatgg

SEQ ID NO: 13923 - DNA, 240 bp, Glycine max
  Clone ID: 700965037H1
gcatgtttgttctctcaacgactcctccgcgaaagagtattattcaatattttggttgggttgaatcccggggttgaagcgttgcagacatcacggctattctaagagtgtctcgctccctcttcatgtccgatctgtacgacggaggacgggtagttgcgtaactgccgttaacccttcgccgcacggtgggcgtggtgctttgccttctgaaggtggtagcccttcagacttgctctt

SEQ ID NO: 13924 - DNA, 241 bp, Glycine max
  Clone ID: 700965038H1
aacgcacccttcatctcttccctttcactcattctttgatcccctttttcttcacgccaactctctcttctgggtttctttcattttcagaatctcattatcacctcactgtgattatcttctaattccaaattggtgtttggttgctgagaaactccaagaaaagaaaaatagagcttttccgtgtattgatgatcctctgttcactcagaaaacttttctcttttgtgtgtagagtcta

SEQ ID NO: 13925 - DNA, 242 bp, Glycine max
  Clone ID: 700965042H1
ctcaaccccgaaagtttcctcgttatcaggattcccgatgcgcttgttttgcgcattctgtctcgctcattgttcgtggccatggttcttgctgccttgcctttcttgggaactgttctcaaaggttctatttctcttccagttttgttcccaatgtcgaaactgcagccgcatctgggtctctcgatgtgggactattgaattcgattctacatgatttcgctcatgagggtctcctcaga

SEQ ID NO: 13926 - DNA, 240 bp, Glycine max
  Clone ID: 700965043H1
tgacttttggcccagagcaaaggcatccggaggaagaggcacttcttccaccaccacagaataaagaagcagggaaatctcagctggattctgatgaagtgatactgagcgagttggaagatagaagcctaaggaagtggacatgctccctgcatcagagaggcagaaacgtatcgcgcacttgcaacaaagactgctccaagcagctgcagaaggagcagtgagggttaagagaaggag

SEQ ID NO: 13927 - DNA, 237 bp, Glycine max
  Clone ID: 700965044H1
tctgactcctatagtttcctctgctaattccatatccccgttttccttcactcttgaaccccgattcatttccaccagcacaagaagcatggctgcaatatcaataccttctcacatgaaagcttggacatactctgagtatggaaaatccaaggaagttctcaagtttaatcagagtgtggctttgcctgaggtgaaggaagaccaggtcctcatcaaggtcgctgctgcttccct

SEQ ID NO: 13928 - DNA, 238 bp, Glycine max
  Clone ID: 700965045H1
attccatcatcaatggagaacaccgagggatccggatctgcgacgaacggggtgctggctccgccgcgcaaggtggcattgataaccggaattaccggacaagacggttcgtacctgacggattcctcctggacaaggggtacgaggtgcacggcctgatccgccgctcgtcgaacttcaacacgcagcgcatcgagcacatatacgtggatccccacaacgcccacaatgcccgcat

SEQ ID NO: 13929 - DNA, 245 bp, Glycine max
  Clone ID: 700965046H1
ggatttgtgacaacacaacgctgtaaagtactcctcaattcgaaaacgcagtgttttagcattgttcctcaacacacacacaaaaaaaactcccttgtatattgttgcagctctagctagggttcgcaagtgcgatcgaagaagaacaacgacgatggcgatggctgcagctctgcgtcgcgaaggaaggcgtttgacccaaccaatcaacgccctccactcttctctcaattcctccctcatct

SEQ ID NO: 13930 - DNA, 233 bp, Glycine max
  Clone ID: 700965012H1
gttttgtggaagaaagagaggaggaagggaggacaaaattgactaaaaacaaacgggggaagctagatgagacgaggggtagagaagaagatgacttgtaagacaggagaaatataaagagagaagagaggaaattggcgtggcgtggcgtgatcggggcacagtctgaatctgaaatccatcttcaaaatctcaattcaatataggagggagctgtgccctgccctgacgtt

SEQ ID NO: 13931 - DNA, 249 bp, Glycine max
  Clone ID: 700965047H1
ctggttgtttgcactttagattcaaacctgataggcgtcgttgtaaaaggaaaaaaaagttcagtgtttttgtggtctcgtatcagaactcagaagttatcatccttaatatcttcaaacaaggttttcacagcacatcgatacgaggatgttgcggctgtcgattcaacgagtgaggaagttgaactttctcagtccccagatctctgctttgggaaggtcccatttgtcaactgctgctgaaccatc

SEQ ID NO: 13932 - DNA, 266 bp, Glycine max
  Clone ID: 700964978H1
ttcacaccctcaccaaatggaaaaggaggcaaggaatttgcaacgttgaaaatcctcacccccctcctttcacatttttggtgtcgacatgatccgctagcactaattggaatattaggagtaaacccttcgaggggggaaaaccaaaccaattcaaccaaatgcataccatgcctcctaaaggcaccctaactttaatattccttcaccatgatgtcctttctttcaacaacagagaacacacgttaatcacaccctctccccac

SEQ ID NO: 13933 - DNA, 266 bp, Glycine max
  Clone ID: 700964979H1
ccccaagcagcatgaagattaaggtggttgctccacctgagagaaagtacagtgtctggattggtggctctatcttggcttctctcagcactttccaacagatgtggattgcaaaggctgagtacgatgaggctggtccttcaattgtacacaggaaatgcttctaaatgctgcacagcctacagggtagcttggtgaaagaaattaaaatacggcgttctcgttttatatgatgaaaaaatgtgttgttaaatcagataactgag

SEQ ID NO: 13934 - DNA, 260 bp, Glycine max
  Clone ID: 700964980H1
caactataaatcaaaagctcagagaacccatcccgccgccgccgtgtgctccgaccgccacctccattcgccgtgtactctcactcccttaataattattgatttcttctcttactttttgctctcgctggagttgagtgtgatggtataggttaataggaaagaaaaactaagtgaggaaaggtgaaaaaagaattaattagagtggaagagtgtggttattttctgatttgagaagcaaataccaaagagtgaagaac

SEQ ID NO: 13935 - DNA, 261 bp, Glycine max
  Clone ID: 700964981H1
ggcccacaacctcatcgttcactacggcctccaccgccgcatgcaggtcaaccgccccttccccgcggcggaggccgacatcggccgcttccacgccgacgactacgtcgacttcctctccaccgtctcgccgcaaatcctctccgagaattcccactcccactaccgtcagctcaagcgcttcaacgtcggcgaggactgccccgtcttcgacggcctcttcgacttctgccgcgcctccgccggcggctccatcggcgt

SEQ ID NO: 13936 - DNA, 259 bp, Glycine max
  Clone ID: 700964982H1
cttttcatgccggcggcatttccccggaataccaacactccaacttcacccacccgcaagaccaacgtcgccgcgccggtgccgcgattgggtaacctatgcaagccgtcaaaaaccgccgattccaatttctagtaacatcgacgagagggccttatgttttgatatcttgtggagatggctttctagacttatctccttttacttgctatctctcaatctcgctgctgcagcctctgattacccagctccctctact

SEQ ID NO: 13937 - DNA, 255 bp, Glycine max
  Clone ID: 700964983H1
tttttacttcccctatggctcgtcactccttgctcttagccctcctcctcttcgccgccgtggccaccgccgcgatggcggtggccgcgtccgacgccgacgacatcctgatccgtcaggtggtgccagattctggcgaagcgaagaggaggacaacctgctgaacgccgagcaccacttcgcgagcttcaaggccaagttcgccaagacctacgccaccaaggaggagcacgatcatcgcttcggcgtcttcaa

SEQ ID NO: 13938 - DNA, 257 bp, Glycine max
  Clone ID: 700964984H1
cggctcgagcactcgcaagcaaaaagaaagaatcccaggcgaggagaaagatggaggggaaggagcaggatgtgtcgttgggagcgaacaagttccccgagagacagccgattgggacggcggcgcagagccaagacgacggcaaggactaccaggagccggcgccggcgccgctggttgacccgacggagtttacgtcatggtcgttttacagagcagggatagcagagtttgtggccacttttctgtttctctac

SEQ ID NO: 13939 - DNA, 254 bp, Glycine max
  Clone ID: 700964985H1
gcttcagtgtagtctgtaatcatgtcaggcaagtatatcatttctgctattcttggatcatttggagttgcatgggtttgtgattattatgtttcagacaaaaagctatttggaggttctacccctggaactattacaaacaatgagtgggcagaagagactgacaaaaaattgcaggcatggcctcgtactgccggtccaccagtggtcatgaatcccataagtcgccaaaatttcattgtcaagtctcgcgc

SEQ ID NO: 13940 - DNA, 257 bp, Glycine max
  Clone ID: 700964987H1
ctcgagccgctcgagccgttcggaagcagacacagatggctcgtacgaagcaaaccgctcgtacgtccacaagcggaaaggctcctaggaagcagcttgcaaccaaggctgcacgtaagtctgcaccaactactggtggtgtgaagaagccccaccgttatcgtcctggtaccgttgctcttcgtgagattaggaaataccagacgagtaccgagcttttgatccggaagctccccttccagaggctggttcgtgaa

SEQ ID NO: 13941 - DNA, 124 bp, Glycine max
  Clone ID: 700964988H1
cgataattgtgatcattattcacgagttgtgctgattagtgaaataaagtcaactgctttcatttcaaaaaaaaaaaaaaaaaaaaaaaaaaaaaaaaaaaaaaaaaaaaaaaaaaaaaaagag

SEQ ID NO: 13942 - DNA, 258 bp, Glycine max
  Clone ID: 700964990H1
gagaaagcacagttttcgtgccctccttcgtttcctgtgggagcaaagtctttaatacacacaatgctggacccaaatcctgaacgtcgtataaccattgagcagataaggaatgatgagtggtttcaaaaggaatatgttccggtcagtctcatcgagtatgaagatgtaaatctggatgatgtaaatgctgcatttgacaatgatgaggatcagaggactaaccagcaatgtgagaatgacgacatgggtcctcta

SEQ ID NO: 13943 - DNA, 260 bp, Glycine max
  Clone ID: 700964991H1
caataacatagcatagagtgagaagtgagaagagaaaaatggcaatctccatacccagtagacaacttttcatagatggagagtggaaagtccctcttctcaacaatcggtttccgatcatcaaccccgctactgaagacatcatagggcatattccagccgctactaaggaagatgttgaccttgcggtggatgctgctaaaagagccttttcccataacaaaggcaaagattggtcttcagctcctggctctgttcgt

SEQ ID NO: 13944 - DNA, 260 bp, Glycine max
  Clone ID: 700964992H1
caaaaaccctttcgcttattttattatcgttttcctttctcccgagtgttctcctttcttgcttccttctccggccatctttatcctgatggcgtcgtctctgggaattgcttgcggtggaaacaacgccaaattagggatcccaaagcagcggtgtggttcggttcttcagccgccgtgctccctcgctatggggcgctcgacggcgagggtggggaggatcacgatggcgatggccacggccacggcggtgatgacca

SEQ ID NO: 13945 - DNA, 71 bp, Glycine max
  Clone ID: 700964994H1
cgagaacaaaaaaaaaaaaaaaaaaaaaatccggaattcgtcttcacggaaaaagtgaaacccaaatacga

SEQ ID NO: 13946 - DNA, 261 bp, Glycine max
  Clone ID: 700964995H1
cttccaaccccaagaagggttcttcatttttgtcgtgcatttctttgtggtggccgggttaaacttcaattaataattatttggagtccaaaccttggcagctggcatcaataccggccaccaacaaagaaaaaaactaaacaatattatggcgaactgtcagcaatattattttcttttgctttctctggcaatttttattcctaccctgaatgccaattccttagagaaagatgagtattggcagagccatgtctatga

SEQ ID NO: 13947 - DNA, 253 bp, Glycine max
  Clone ID: 700965001H1
gaactggagaaggcattacagaagtctgccttagtgggtttattgcttttgatgttcctcctccaaagggtccattgtggattcttggcgatgttttcatgagggcatatcacaccgtctttgactatggaatctccaagttggctttgccgaagcagtctaattacgctttctggaggattttctttgtaaatttgttaagcgtgttgtaaataagctgttataattgtagctctggttactttttgaaacc

SEQ ID NO: 13948 - DNA, 262 bp, Glycine max
  Clone ID: 700965002H1
gtcgaggtaggatgcagaggcgcggagaagacgtggttcaccctctcaaggtctctttggaggacctttatcttggaacttccaagaagctctccctctccagaaatgttatatgctccaagtgcagtggcaagggttctagtctggtgcttcgatgaagtgtgctggttgtcaaggaactggtatgaaggtttctataagacatcttggcccatccatgattcagcagatgcagcatgcctgcaatgaatgtaagggtact

SEQ ID NO: 13949 - DNA, 241 bp, Glycine max
  Clone ID: 700965003H1
ccgccaccgccgacgggtcgttccggtgcagagcaacttcgagccgttcacctacggttacaagtacaacactactctctcacagtcacagtctcatatgagccagagtgtatcttctccgtcgcgatggaagttggacttgtgccggacgggaacacgatgtcggagatatcgaactgcagctacagcaaagtggcaccggtgacggtgacggcgcagttctcggcggcggatagggagg

SEQ ID NO: 13950 - DNA, 243 bp, Glycine max
  Clone ID: 700965004H1
ctcatacaaattctccacacgatacttctgggctgttgatggagagggtagatgagggtccccttgatgatcaatatgcttcggctatcagaaactgtgatcctgagggtcctctgatgctctagtctcaaagatgattccagcatctgacaagggcagattttttgcttttggtcgtgtattctctggcagagtttcaactggtttgaaggtgaggattatgggaccaaattatgtccctgg

SEQ ID NO: 13951 - DNA, 243 bp, Glycine max
  Clone ID: 700965005H1
atcagcccaaggaagctgattttccaaagcaaaatgtccccgaggtggcacctgaagccaaaaagagagcagcagaatcaaagtcaagaggggatgaggcttttaaaagaaatgactatcatatgctatagattcttatacccaagcaattgatctgaaccccactgatgctactttgctatccaatagaagtctttgttggattaagttgggtcaagctgagcatgctttagctgatgcaaa

SEQ ID NO: 13952 - DNA, 244 bp, Glycine max
  Clone ID: 700965006H1
gctcgaggcgacgatgatctgtatcgacaattctgaatggatgcgtaacggagattactctccttctcgatttcaagctcaagcagacgctgtcaatctcatatgcggtgctaaaacgcagtctaatccggaaaatacagtgggagttctcacaatggctgggaaaggcgttcgtgttttggttacccctaccagtgatctgggcaagatcttagcctgcatgcatggactagatataggtggt

SEQ ID NO: 13953 - DNA, 241 bp, Glycine max
  Clone ID: 700965008H1
gtttgtaagagtagaagagctgtatattgattcaatttcttgtttttccttcagaactcataagaattgagcaagtattgattttgattactaatgctgtggtgggttttggtcaaaatttcagatcttaatggaaaactcagaccacgacgaacccgaaaagatcaggcctcatctcacctctgtctcttcccgcactcctcgaaactccatcaactctcctaccaacaacaaaactgct

SEQ ID NO: 13954 - DNA, 241 bp, Glycine max
  Clone ID: 700965009H1
gtctcatcgaataatttcagatctcgtcgatctgagctcaaaacaatggcgaaaccaaggtactctcgtcttccacctcgcaagtcatcgtcgtcttccacgctgattctgactctgttcctggtcttcaccttcctcgttctaattctcctggctctcggcatcctctccattcctagctcctcgcgtggaaatttgcccaaacctaacgatctcgcatccattgctcgcaacacaatcc

SEQ ID NO: 13955 - DNA, 241 bp, Glycine max
  Clone ID: 700965010H1
gaaaacagatctcaactacaatactggctatcttagtgttgatgaaggtgctgaaagtgttgtaaggttggctctgctacctaatggaggtccttctggtctattcttttctcgaagtgaagtgcaccattctgatccaaagactgttgtgtacttgaagaggataaataataagcatggtttcatgataagacatgtatcaaatttgtacctagcacaacaagaaaataagccacatgtc

SEQ ID NO: 13956 - DNA, 238 bp, Glycine max
  Clone ID: 700965011H1
tgatagtagaaatggataaaatgtctgctccttcatcaagggagcgtgcacaacgcctctatgaaaagaacctggagttggagagtaagcgtcggaggtcggctcaggtgcgtgtcccatcagtcctaatgcttggcaacagatgcgtgagaattatgaagcaataattcttgaggatcgagctttctctgagcagcacaatattgaatatgctctttggcagttgcattataagcag

SEQ ID NO: 13957 - DNA, 251 bp, Glycine max
  Clone ID: 700964977H1
gttgaattagacgaacgccagttacagtttccgggttgttcaataaggagaatgagtgctggagagtgattcaacttgtgctcctgaacctcacaaaatgtctggccaaaatcgctctatattttctgccaaatcgggatttgtcatccctaaaaacgagttgtcagggtcactggtgcctattttccgatgggctaaaaagcatggggtcactgttggtgccaccaatgaagaaagttcaaaacaaattg

SEQ ID NO: 13958 - DNA, 264 bp, Glycine max
  Clone ID: 700964949H1
gaggagaaaattgaatacaatgatcttgtaaagtcagttcccgatgggaactcttcaaataatgaagaacacaccaatatccagacagttcagccagataaacaaaaggatgtgccccccaaaaatggatctaaatcgaattcaaaagatcgtggagatcccaatgatccttgtgtcagactaaagcgtgattgtgttggaattatggctgcattcaaactcaaagatcgctctcatcatattgttattgtggccaacacacat

SEQ ID NO: 13959 - DNA, 261 bp, Glycine max
  Clone ID: 700964951H1
gctgcgactctctttccttccctctttttccgaatctgaatcgaaatggcttcggagactgagacgtttgcttttcaggccgagatcaaccagctcctcagtctaatcatcaacaccttccacagaacatacgaggggtttcttcgtgagctcatcagcgatgcctctgatgctttggacaagattcggtttgagagtgttacagacaagagcgagcttgatgctcgcggggagttgttcattcacattattcctgacaag

SEQ ID NO: 13960 - DNA, 259 bp, Glycine max
  Clone ID: 700964952H1
gacaaaaacacgttcagaaccgcttcatcaataacatgccgaccgaaactctgtagtaagaggacattttctgcatcagacacacacatagatagaaaatacaacaaaaatgttggtgtccatgtccgtgtgcggccaagatgagattgagttgtcaagagatggcagccactacagtctctcaactggaatactaccttcccttggagccaaaagtaaccgcagactcaagctcaaacccttcattatatctccctat

SEQ ID NO: 13961 - DNA, 258 bp, Glycine max
  Clone ID: 700964954H1
gactcacttataggtctctcttctctttcttctcctttctttctgcggcgaaggagggcgcagaccacgccagcagttgtaggcgcccaggcggcgctagggtggcagcaacagccgcaaggcgggtttggcctcaacggaatcatacgcatggtcgttttctggtacttcgcttccaaattgctttcccccaaaaaccctaccgaaccttccgctctcatctccaatctctttcagaacgcacagcctctggatatg

SEQ ID NO: 13962 - DNA, 260 bp, Glycine max
  Clone ID: 700964955H1
cgcgtcgctgctccgtaccagtttcactgcataaatttgagagaaaactctgcaaacatgttggtttatcaggacctccttacaggtgatgagcttctctcggactccttccgttacaatgaaattgagaatggaatgctgtgggaagttgaggggaagtgggttgttaagggagcagttgatgttgacattggtgcaaacccttctgctgagggtggagaagatgagggagtcgatgacgcagctgttaaggttgttga

SEQ ID NO: 13963 - DNA, 263 bp, Glycine max
  Clone ID: 700964956H1
ggctgccacaaagcatgtaaccaatacgaatgccgtgaccttcggttatgatcttggaataaccggaggagtgacttctatggaaccatttctcatcaaattctttcccggtgtttataaacaaatgcaagatgatgttggccatagaagccaatattgcaaattagacaacgagctccttacactcttcacctcttccttgtatcttgctgcattagtagcttctttctttgcttccaccactacaaggattctgggacgca

SEQ ID NO: 13964 - DNA, 264 bp, Glycine max
  Clone ID: 700964958H1
tgtggtttttttttctttcttttctctctctctctctctgtgaaatggagccgtttgcttagagctgcttcttctgatctttgaatcttgatctagatatctagatacagaattggaaatggattcaaatgggagcctacgtgctaacacctgggcaaggtcgtcgtccttgacctctcctgcaagtggtttatcctcagatcctctttctttcccaggttttggtttgcagcataatcaacaaaaatgggatgttccctcaaa

SEQ ID NO: 13965 - DNA, 267 bp, Glycine max
  Clone ID: 700964959H1
tgtgaatgttacttgacttcagctgacaaagcctcaaacatcttaaaggtttatgaagtactttgttcttcgctgtcgatctataatggaaaatgtttgatcaacatttcatatgttatcctacattcctacctctagagagaaagaaaaaagaaaagaaaaagtataataggatttataatgtaaaagaaagagagatataaaaaaaaaaatgagagatgtttgtgaaatgttttcaatgaaaagtgatttatggattattactct

SEQ ID NO: 13966 - DNA, 268 bp, Glycine max
  Clone ID: 700964960H1
ctttgatttcggttccgaagggacaaccaacgaccaccctctcttctgactcacttctcgaaccttccaaacatggaacgcatcgttggcggcaagtacaagctcggccgcaagatcggaagtggatccttcggcgaaatctacctcgcgacgcatattaataccttcgagatcgtcgccgtcaagatcgagaatagtaaaacaaaacatccacaactgctttacgaggcaaagctatacaatattcttcaaggaggaagtggcattc

SEQ ID NO: 13967 - DNA, 267 bp, Glycine max
  Clone ID: 700964961H1
ctatgatgttcacttcacatataacaggatcaatatgagaaggttatatcaagcagctgaggctgcagaaaagttggtaactgattttctttttccatctacatccagaaagagacacattaaaaccacttctctgcttcccatatctggtacttttaacgaggagcaaattagttcaatcaaaatgattcttggttgcaaaggtgcaccaccctatatgattcatgggcccccaggtacgggaaagacaaggacaatggtagaagc

SEQ ID NO: 13968 - DNA, 272 bp, Glycine max
  Clone ID: 700964962H1
gttcttctctctctctctctctctctctcgtgaatcatcacttcgttttccccgctttcaacaccgctcatcttctcttctcttttctctgctaatcatggcaaccttgtctactaatcattgcacattacaaactgcaagcaaaaatccatccattgttgccaccatagtgaagtgtccttcttctttaaggtctgtgaagagcgtttccagatctttcggcttgaagtcggcctcttcatttagagtcactgccatggcttcttacaagg

SEQ ID NO: 13969 - DNA, 258 bp, Glycine max
  Clone ID: 700964963H1
ctccgccgccgcacaaccaccacctcctccgttcggatctccggcggacctactatccctactcctactctactctatttacacggaagaacaaaaaactatccccctcccccaaaaaaaaccccaaagcggctcggttagggtttagttttgtaccatttcgtgtaatctaatttttcatccgtaaaaatctaattttgaggcggcgagatggcggagattcaggtgcagcatcagagtccggtgtcggcggctcct

SEQ ID NO: 13970 - DNA, 269 bp, Glycine max
  Clone ID: 700964964H1
tgaagattccacaacagtgggaggcggatccaaaaagagagagtggaaaagatggcgcggttgatcacagtggtgtggtgcgcggtggcggtgctattatgcgccgcggccggtgcgtcgtgggtggaggaggcggcgaacccgatacgaatggtgtctggcgtggaggcggaggtggttcgggtgatcggggagtgccggcgtgcgttgaagtttgctaggttcgtgagcaggttcgggaagagttaccaaagcgaggaagagatgaa

SEQ ID NO: 13971 - DNA, 263 bp, Glycine max
  Clone ID: 700964965H1
tggaatgcttcttcaacattaagaccttctttggcagatgtcttaatgttgaagaagcattccaatgcatagcaaagaatgccctgaaaagtggagaagaagaagaattgtaagttcttaaatctgggcatctctttcatatatgtgaactgaccaactgaactcactaagacataaatacaataagctacatctctcagatttatgagattgcgttcattggttgagggagtgtagtttggttttgtcagagttctaattca

SEQ ID NO: 13972 - DNA, 260 bp, Glycine max
  Clone ID: 700964966H1
cttttctcttctttcttcttcttccatctctttttttctgcttaagcgtctacaaaagttctcttcttcttctcctcctattgaactttggtcatcacacgagaaaacccacgtctggatcttctggtgtaaaggccattagaagccttttagaaattttcaaattgagttggtgtatagtgttgaagggggtgaaatttggagcccagtttgttacttcatttgaaaggtcatagtttgaaccctctttttctggagat

SEQ ID NO: 13973 - DNA, 260 bp, Glycine max
  Clone ID: 700964967H1
ggaaattcaaggaagctctgaaagattttcagcaggtcaagaaaatgtgtccatatgatcctgatgcaacaaagaaattgaaggaatgtgaaaaagcagtaatgaaacttaaatttgaagaagcgattgctgcaccagagtctgaaaggcgttcaatagctgaatccatagatttccgaacaatagatgttgagccacaatattcaggagcaagaatagagggggatgctgttactttggattttgtgaaaaaaatgata

SEQ ID NO: 13974 - DNA, 258 bp, Glycine max
  Clone ID: 700964968H1
aatgggttcttctttgtggactttgtgtctaattttggcttcactagcctcttctgcattctgtgcctttccacggaggccagtggatgttccattcggcagaaactacgttcccacttgggcttttgatcacatcaaatacttcaatggaggttctgagattcaacttcatcttgacaagtacactggtactggcttccagtccaaagggtcatacttgtttggtcacttcagcatgaacataaagatggttcctgg

SEQ ID NO: 13975 - DNA, 254 bp, Glycine max
  Clone ID: 700964969H1
gaagcaatggcttggctttaaagctgctggcactgtggagcttggtcatatagttacgtcccctgttattcgaactgcaacttcaattgttcctttgggatggaatgatggactaggagcaaaaaatggagaacctctgaaagttgatattactggttttgggttgcatttatgtacacttgttcatgctcaagtgaatggtaactggtgctcaactactgttgaatcatttccttctccaccaaactattctt

SEQ ID NO: 13976 - DNA, 256 bp, Glycine max
  Clone ID: 700964970H1
tgacctcggatggggtgaacaagtccccaagacacccgagatctcatccatgctttctgctgctcctttggacggtgaatctcagtttgtgcagggtgctgctgatcagaatcagaagaagaacaacctgctggatatggcatctgtgcaagatgattctgcaaaaactctttctgaggagcttgcagacattgaatcccagctgaagttctttgagaccccttcttttcttgatgaagcctgggctgatgctgca

SEQ ID NO: 13977 - DNA, 258 bp, Glycine max
  Clone ID: 700964971H1
gttttgagtatgctaatctttttcacactgttacagacttggtacagtgcttatgtttcttctatagtgactggtctgcctaatcgcccacatttgatctttgttgacggccattgtgcggtatgcatgatcagttttgtttatttgtttcatttaatttcaacattctaatgctgttggtttgcattctaagaaagcatagaaagtgtaaagcatgcagtatctattgtgatgttggtttgcatacattttacctct

SEQ ID NO: 13978 - DNA, 260 bp, Glycine max
  Clone ID: 700964973H1
cagaaccatatttttcttgaaaagtgatggaactttgacgccattggccattgagttaagtaagccgcatcctcaaggtgaagaatatggtcctgttagcgaagtctacgtgccttcgagcgaaggagtttgaagcttatatttggttattggcaaaggcttatgttgttgtaaatgactcgtgctaccatcaactcgttagccattggctaaacactcatgcggttgttgagccattcgtcatagcaacaaataggcat

SEQ ID NO: 13979 - DNA, 260 bp, Glycine max
  Clone ID: 700964974H1
cacacatcattttctacgactggaatgctctaaacattcttaatattcccacactatacggaccatgttctcttcctcaacttccttctttctttgccttctcctcttctctgtaaccttttgtcatgttttgggggataaagtatttacaggaacatatggagtaaactacggtaggatagcagacaatctaccttctcctgagagtgtggttactcttctgaaagctgcaaagattaggaacatcagaatatatgatg

SEQ ID NO: 13980 - DNA, 263 bp, Glycine max
  Clone ID: 700964976H1
ctcaacccgcctcaatattcctaaactcatacgagcttgtgatgaacaacagcattggaaagaactgacctatttgtatatacaatatgatgagtttgataatgctgcaactaccatcatgaaccattcacctgaagcatgggatcacatgcaattcaaagatgttgttgttaaagttgctaatgtggagttgtattacaaggctgttcacttctacttggaagagcatccagatcttatcaatgatgttctgaacgtccttg

SEQ ID NO: 13981 - DNA, 273 bp, Glycine max
  Clone ID: 700964948H1
gtggtgccttatcgctgtggttttcatcgtcttccttctcttatatttcttttgtttttttgccttcgccgaacgccgaaacaatggccggcaaaggagagggtcctgctatcggaatcgatctcggaaccacctactcttgtgtcggtgtgtggcaacatgaccgagttgaaatcatcgccaacgaccaagggatcagaacgacgccgtcttacgtcggcttcactgataccgagcgtctcatcggtgatgcggctaagaaccaagtcgcca

SEQ ID NO: 13982 - DNA, 267 bp, Glycine max
  Clone ID: 700964922H1
caaaaacatttccctgctacttcatcttcttcttcttcttcttcatcaccggtggttctgttcattcttccttgcaccttcttctttgaagatcgaaattgtgtttttgaaaaaatgggagttccagagaaagaccctctttcccaattgagtttgcctcctggttttcggttttaccccaccgacgaggagctcctcgttcagtatctatgccgcaaggtcgctggccaccatttctctcttccaatcattgctgaaattgatttg

SEQ ID NO: 13983 - DNA, 264 bp, Glycine max
  Clone ID: 700964923H1
tgaatattagtggttaaggttgttggaggagctctaacaagagatatggagacacaaaattggttcgagagattgaagcctttcgcagctgtggtatcaatacagtttggatatgcagctatggatgttctatccaaggctgcaatgaacaaagggatgagcaattatgtgttcgtcgtttatcgccatgctgttgcattctttgttatggcccctttggcatggttttctgacaagacagtaaggccaaagatgacattctca

SEQ ID NO: 13984 - DNA, 263 bp, Glycine max
  Clone ID: 700964924H1
tggagttcatgctttcatactgctttctagtactactttctgctgttggtgtaaaggcttgcatgtaggccacatggcaaacaatgtgacaatcatatgagatcaatttcacatgggcttgtttgttgtggagattttattttggataaataaaaaataaaggagaattgagggaaaaaaaaaaaaaaaaaaaaaaaaaaaaaaaaaaaaaaaaaaaaaaaaaaaagggggggccccccaataaaaaccccccgccccccggg

SEQ ID NO: 13985 - DNA, 224 bp, Glycine max
  Clone ID: 700964925H1
gtccatttccgcgaggagagagaaagtgcaagactcggcatagagaggtgagcgtttgtttagtttgtgatgtggtagctttgaagatctagttcactgttgcacatatgagtgtgtaactaatcgaagacgagggacgagtacggatgacgtcactcagtagggaattggtgttcttgatcttgcagtctctcgatgaggagaagttcaaggagactgtgcac

SEQ ID NO: 13986 - DNA, 267 bp, Glycine max
  Clone ID: 700964926H1
cagaaatttaagtgaggagctagagaatgatgatgaagtctgctatgtgtgcagtggtggttgtagcacttcttcttctggcggaggtggggcccatggctgaggctgtgacatgcaccccaacagagttgagtccgtgtcttccagcaatcacttccggtgctaaaccttccaatgcttgttgcacgaagctgaagcagcaaaaaccatgcttatgtggctacctcaaaaacgctagcttgaagcagtatgttaactctcctaatg

SEQ ID NO: 13987 - DNA, 272 bp, Glycine max
  Clone ID: 700964928H1
ggtgtttttaggctttgcttttgctttggggctttcattaatggtcttattttttttaataaattgaccctttcttctgatattcaggcggaagtggtgctcttggtgcagggctcagtaaattcagcactgctgctgccattgaagaaccaattaaaccaccacttaaagttgaacacacccagctcttaattgatggaaaatttgttgatgctgctactggcaaaacttttccaacgttggaccccaggacaggagatgtgatttctcat

SEQ ID NO: 13988 - DNA, 274 bp, Glycine max
  Clone ID: 700964929H1
gtgcctcaccgcacggatacttgctgaaccgcgtcgccgagtacgccaccgccgcggctgctgctaccactcctccctctcctcctcctccggggaagaaggagctcggcggcggcgggaagatcaccgatgaattcaccgggcagggcgcgatcgggcaggtctgccaggtcattggtgccgtcgtcgatgtcagattcgacgagggtttgcctccgatcatgaccgcgctggaggttctggatcactcgtcgaggcttgtgttggaggtggc

SEQ ID NO: 13989 - DNA, 275 bp, Glycine max
  Clone ID: 700964930H1
tagccatagaatttcacattttatcttttgcattgagcaactaactcactcgcgccatggctgctaccatcatcaccacatgcaagctctcactgcttttgagtcttctctcagtttcacttttgctgggtgtgaggtctgatacccttcagaatgtaggcgcaattccccccacatgcaagcgcatagagtgtcccagctatgatgtcattcacgtaggcaacggctacgaaatccgtcgctataattcacccgtttggatttcaaacagcccc

SEQ ID NO: 13990 - DNA, 277 bp, Glycine max
  Clone ID: 700964931H1
acggaaaagagcatttacctatttatataacagatcgtatggtaggccataaattaggagaattttcacctactctaaatttccgaggacatgcgaaaaatgataatagatctcgtcgttaacgttaattttaacataaatttttaaatcgtaatttataactaaatattacaaaatggaattcttattaaaatgaaattcaaatcatttcttttataaaaaagaaaaaaattctttaattaaatatttaatgaaattaaatatttaaattaataaa

SEQ ID NO: 13991 - DNA, 279 bp, Glycine max
  Clone ID: 700964932H1
gaaaatggcttagaataatgttttggtggcattgttggtgaaggactcagagtaagagttattgaagccgcagtgagtcagtgatctttcgctctagcctttgtcctcaaacactgaccgtggagtagtgaagaggcaagaaattgaaggggatgttgatgatgagaaaaagactagcatgctgcacaagggaaaggaaatttagcatcgatcatgatgagcaagagaggattatgacatataatggccttgagagttgcatgctgaacaaccagtctt

SEQ ID NO: 13992 - DNA, 267 bp, Glycine max
  Clone ID: 700964933H1
ctcaaatactcaactcattagcccttatcttgcccttattccacttcatgattctgatcctaaaactagggagaaaactcaagagaactgaattgtctctaaacataccccgaggaccatggaaactgcctattataggaaatttacaccagcttgttacatcgacaccacaccgaaaattaagagacctggccaaaatatacggacccatgatgcatctccaacttggggagatcttcacaatcgttgtttcctcagcagagtatg

SEQ ID NO: 13993 - DNA, 264 bp, Glycine max
  Clone ID: 700964934H1
ctcactacaacgagccatgggtgtccaaaacaagggagctcctcatagagagctccaaagtttgtctcttcgccatcttcttcgtggcaggaaaattctaattgtagacgacaatggtgtgaaccgtgcagtagcagctggtgcattgaaaaagtatggagcagatgtggtttgtgttagcagtggaaaagatgccatctcttccttgaagccaccccatcagtttgatgcctgtttcatggatattcaaatgccagagatgga

SEQ ID NO: 13994 - DNA, 261 bp, Glycine max
  Clone ID: 700964935H1
cccaattttctagggttttattcattttccgatggcttctgcagatgttgagtaccgttgctttgtcggtgggctcgcttgggccactgacgaccatgccctcgagagagccttctctcagtacggcgaaatcgttgaaacgaaggtctgtttgttgcaggcatcacatctgatctcacacgattcggattcggaattttctcgatcccgtactgatctgtgatctctgatctgtttgcgttacttgatcttatgatactt

SEQ ID NO: 13995 - DNA, 263 bp, Glycine max
  Clone ID: 700964936H1
gcaaaaagtcatggtgacagcataagtgttgagacttgtcctcattacttagctttcacgtctgaagagataccaaatggggatactcgttttaagtgttccccacccattcgtgatgcatacaacaaagacaaattatgggaggctgtattagagggacacattgacctattaagtactgatcattcaccaactgtgcctgaactcaagcttatggaggagggtgacttcttaaaagcttgggggggcatatcatctttgca

SEQ ID NO: 13996 - DNA, 261 bp, Glycine max
  Clone ID: 700964937H1
ccgcgttgccattgctgaagctggtgcaatacctctccttgtcagtctcttgtctgtgcctgactcccgcactcaagaacatgctgtgacagcgctcctgaatctttccatatacgaaaataacaaaggaagtattgtttcttcaggagcagttccaggtatagttcatgtgctgaagaagggaagcatggaagctcgggaaaatgcagctgcaacacttttcagcctttcagttatagatgaaaacaaggttacaattgg

SEQ ID NO: 13997 - DNA, 260 bp, Glycine max
  Clone ID: 700964938H1
ggcctgcatatgctgtggagtatgattatttacctgctcatcaatgtgctaggtctctaatgacaaagaaaatacaaggattgttcttctctggtcagataaatggaactacaggctatgaagaagctgcggcccagggtattatttctggtatcaatgctgctagacatgcagacggtaagccagttattgttcttgagagggagagcagttatataggaacattaattgatgatctagtaaccaaggacctgcgagag

SEQ ID NO: 13998 - DNA, 257 bp, Glycine max
  Clone ID: 700964939H1
gttgcattatcacaaacacctcgtccctcacaatgcatctagcaatggcggccaacgctgtcgtttcaccgtcgccgttccgacctcagccctttctccggtcatccttctccggcgtctccgtcaagctcactccccaatccataacgctttcacgctccaagcccctcaccgtcttcgccgccaccaagaaggccgtcgccgtcctcaaggggacctccgccgtcgaaggcgtcgccactctcatccaagaagac

SEQ ID NO: 13999 - DNA, 265 bp, Glycine max
  Clone ID: 700964941H1
tgaaattgcgcaagacttcaagaccgatttgaggttccagagtcacgctgttcttgcgcttcaggaagctgcggaggcttacttggtgggtttgtttgaggacaccaacttgtgtgcgattcacgccaagagggtgaccatcatgccaaaggacattcaactcgcacgccgcatccgtggagaacgtgcttaggctaataataagagtaataacgtagttgctgctgctttttttcgttttgcaatacatttcttgttttagggt

SEQ ID NO: 14000 - DNA, 266 bp, Glycine max
  Clone ID: 700964942H1
cttatctcacccttctttgactgttctcccacaccacacccatgatccctcctcctgctccttattctcctctttcacgcggcggaagccaacggacagtggcagctcctccacaaaaacatcggcactgtcgccatgcacatgcagcttctccacaacgaccgcgtcatcatcttcgaccgcaccgacttcggactctccaacctaaccctccccgacggaagatgccgcaacaacccaaacgagttggtcgtcaaacgcgactg

SEQ ID NO: 14001 - DNA, 266 bp, Glycine max
  Clone ID: 700964943H1
ctagtaagctcttttaaagttctggcccgaaccctttctttcgtcacaatcacaacttggtaaaggtactccgtgcaagaaagatgaagctcgagttcgcaaatgtgctacttctgtgccttgtccttagctcttctttcttggaaatctcaatggctggttctcctttctgtgactcaaagtgcgcgcagaggtgtgccaaagctggggttcaggacagatgcttgaggttttgcgggatctgctgcgagaagtgcaactgtgtc

SEQ ID NO: 14002 - DNA, 100 bp, Glycine max
  Clone ID: 700964944H1
cacgcacacgcacacttgtcattctcaaaacacgcccaaattcgaatcaaattagggttagggtttccaactcccctcgaattatccctgtaatgcagtt

SEQ ID NO: 14003 - DNA, 270 bp, Glycine max
  Clone ID: 700964945H1
aaccaatctattcaaattttgcaaccttttcacaattcaaacataggaaccttggaattttgctgtttttttttatcaatgtctcataccttgcaattttcatttcttttcaagtgcattcaattctccaatgaaggtagagaagatgaacagagttaggcctcgtggctttcaaattctatgctcttctgagcattccagtttcaaagatgaagatgatgctgaaaatggagggtctgatacttctttgtttggttgttttgttttgct

SEQ ID NO: 14004 - DNA, 270 bp, Glycine max
  Clone ID: 700964946H1
cttcagtcaatgtctctgtatccatatttcaggttggtaaaaacgctgcaataatattctattttcaaagggaaacccaaaaactgaagcgcgaggaagctaaaagtagcaacgagggatgagagaacaagaggattggaggattacgacagcgctgttaacgttgttgttggtgtttgtttcttcttttccggcgttgagctacggagttgttcctcctcgtactctgctcaataagctgtctcagggcagttatctcaccactcagga

SEQ ID NO: 14005 - DNA, 271 bp, Glycine max
  Clone ID: 700964947H1
gtgggttagccgtggtagtcaacgcagacctaatagcagaagcactccattcaggatgtgcattcttcaacagagccaccaccccggaagcatgagggcaggccatcgacgttcccgacatcaaattgtattcagtatttaaaaccacatttgggccaattcgggccgcgggcacatccggaatccaagcggccaaaatggacgagccaggggccacgacgtcgggcttcaatacccacgggcactccgaagacgggcctctggaactgta

SEQ ID NO: 14006 - DNA, 265 bp, Glycine max
  Clone ID: 700964921H1
caaggagtaggaggcgaagagcagcaaggtcatgtcggttgaaatcgaggatatccgcgatgctgaagagtccaaagctgttgatgagttccgtcaagctcttgtcttggacgagctactccctgagaagcacgatgattatcacatgttgctcagattcttgaaggccaggaaatttgaacttgagaaatctaagcaaatgtggtctgacatgcttcaatggaggaaggaatttggtgctgacaccatcagtgaggattttgaa

SEQ ID NO: 14007 - DNA, 192 bp, Glycine max
  Clone ID: 700964882H1
actcatatgattcttctttaaaattacactacaacaatgtgcaaaagacaaggcgatttgcgtaattgtcaaccaccacaccaaccaagccgcgtcgttctttttagtcactgataagaacaaacttccaccgtccgcggccacagcaacgctgtcttccgccgtcactctcgccgctaaacccctctcact

SEQ ID NO: 14008 - DNA, 145 bp, Glycine max
  Clone ID: 700964884H1
gagaagaagggggttaccgtgtttgtttcttcaccgaacgaacaagcatgtggtagcttaaagccctagtttcaatgcgaacatcctataatcttgttcttcttcgctctcgcttccgcagctctcacaatttccacgcataccg

SEQ ID NO: 14009 - DNA, 247 bp, Glycine max
  Clone ID: 700964885H1
ggttgatgaacattttcagttgttcagtttagtttgattcttttccatcatttgttagtatctttatctgatatgattctgcaacagaaaccacgagaacattccgcccgaaaaaaagtactccttctggaagtaagggagctcaaccttagaaaacacattgatgccacgttgggtagtggaaatctgagggaagcagtaaagctacctcctggggacgacttaaatgagtggctagctgtcaaca

SEQ ID NO: 14010 - DNA, 244 bp, Glycine max
  Clone ID: 700964886H1
gtgttgctaagccctggtcttctgtttcaattgccagggaagagcaaagtggtggagtttgggaacatgcaaaccagggcagtgtctatcttggtccacacaatcatcttctttggtctcattaccatctttcttgttgctattggctaaatgcttggaaactggcgagccagtggccattaagaaggttttactggacaaaagatataagaatcgtgagctacagttaatgcacttgatggat

SEQ ID NO: 14011 - DNA, 244 bp, Glycine max
  Clone ID: 700964888H1
gttgctcaaccaaaaatacatagagtggccaagctttagtagtacgctgaggactgcgattctgactcttatacttgttgcaatgcttattgttgcattatcatctgttgattcggctctcagctatctattggctttagctcttcggaaaagaccataaccgtgtggtgtgcctatgtcaccatgtgtaagcagttgatttctgatgcttgtaatttgtttagctctatcctcatatacgtgt

SEQ ID NO: 14012 - DNA, 244 bp, Glycine max
  Clone ID: 700964890H1
acgccattgaattcttcttccatttctcttttttctgcatacccatttcgtttttcttcccaaatggccctttcttgctccaaagttttaagcttttatctctcgcccgttgtgggtggtggtgatgttccgaaaaagctcactttttcttcttttttgggtctttctaagggtgttggtggaagcaggagctcgagggtgtgtgctgcttcaaatgcacccgcaccactcgctggggtcatat

SEQ ID NO: 14013 - DNA, 246 bp, Glycine max
  Clone ID: 700964891H1
atcaatttttctctcaaccggcccaatttagcataagcccagcatggccaccgcaaccagcagcagccacctcgtccttcatggggacgcgcctcctggaggcccactccggggcggggcgggtgcaggcccggttcgggtttggcaagaagaaagccgccgccccgaagaaagtttccagggggtcgggctctagctccgataggcccctgtggtatccgggcgccaaggcgcccgagtacctgg

SEQ ID NO: 14014 - DNA, 246 bp, Glycine max
  Clone ID: 700964892H1
gaagaaacaacctcaaaatccctttcttgtgtcgattagattactttcacaccagagtcgttcgagtacttcaccttctttctctctaagcgcaaaacctcgtactgtttttggcggttaaggatgtcggggaaaggagcgaaggggttgatcacaggcaaaacctccgccgccaacaaagacaaggacaagaagaaacccatctcgcgttcttctcgtgccggccttcagttcccagttggtcgt

SEQ ID NO: 14015 - DNA, 247 bp, Glycine max
  Clone ID: 700964893H1
aggatattgtaggctagcaaggctgaactaatcaccaacatgtcccattcactttcaagtactaatgtgcaggaacaggaaggaatgcagaacccatttgaattcagtgaagacaagatcctggatgatgtttacagaacccatttcgattgttttgagaagtgcgatgtgacatctctgcaaacggttgcttcaaatgttatcaaccactcgatcgatatctcagagaaggtcattagtaagggtg

SEQ ID NO: 14016 - DNA, 248 bp, Glycine max
  Clone ID: 700964894H1
agatcctctgtactctcgaagctttcatcgttcaacatattctcaccatctcagtcatgggcctgctatcttgttttaggtctaccgtcctgagaaaatgttccaaaggaagctctggcatgtcaagattcctgtatacgaacaattttcaacgaaacttgatttcgtctggtggcaatgaatcgtattatgggtattttaacaggagatcatacacttcactttatatgggaactggaactgtgggt

SEQ ID NO: 14017 - DNA, 249 bp, Glycine max
  Clone ID: 700964895H1
attaattgcaagaatggcacttcgttgcttggtgatgtccctttctgttctcttcactcttggtcttgcgagagaaagccatgccagagacgaagatttttggcatgctgtttggccaaacactcccattccaagttcattgcgagatcttctaaagcctggccctgcaagtgttgaaatcgatgatcaacctatgcaaattgaagaaacacagtacccgaaaaccttcttctataaagaagaacttca

SEQ ID NO: 14018 - DNA, 68 bp, Glycine max
  Clone ID: 700964896H1
cacacactctcatagctgtagcggcgacactaagatcggagaaagaatggcggaaacgacgtccgttg

SEQ ID NO: 14019 - DNA, 270 bp, Glycine max
  Clone ID: 700964901H1
gagagtgagagagtgagtgagatagagagagacgcttcgcaaatctcaatcgaatctcagaaaaatgagagaaatcatcagcattcacataggtcaggccgggatccaggtcggaaactcctgctgggaactctactgcctcgaacatggcatccagcccgacggcatgatgccttctgactccaccttcggtgtagcccacgacgccttcaacaccttcttcagcgaaaccggatctggcaagcacgtcccccgtgctgtcttcgtcga

SEQ ID NO: 14020 - DNA, 269 bp, Glycine max
  Clone ID: 700964902H1
ctcactttctctatcttcaaccagccaaaaaaaaaaaaaaaaaccccaaaaccaaaccctaattccccgaaatttgattcctttcaggaaatttctcccaaaatccaggcctcctgcagacccataccgttttccttctcctttcaaatcctcggccacaaattttgggatctttctgggcctccgaatcatggaaaaggaagagaaggaaccccaggttcagaaaagtgggggcgaaagcgaagacgctgaacccatagggctcgttc

SEQ ID NO: 14021 - DNA, 271 bp, Glycine max
  Clone ID: 700964903H1
atcctctcctctcaaaccaattcccacttttcctctcttcgcctcccctcaggaatcaatgtccataatcaccccacgccgtcatcctcaaacgacacccttccgctagcaaaacgactgcggtttggtcgtcgtcttccccgaggcatgctcttgggatattattattcatcatcgtaatcacaccctacagagacgttgactttgtgctttttctgggaggggaacaaatggaccaagctcttctggacgacataattaatcgccttct

SEQ ID NO: 14022 - DNA, 91 bp, Glycine max
  Clone ID: 700964904H1
gttaacagttcatcactgtttgatgattgccagctctggaactgtagatgaggggccagtttgatatcaattggtgaatgcaggtttgaat

SEQ ID NO: 14023 - DNA, 266 bp, Glycine max
  Clone ID: 700964906H1
cgaacctttaatgatgtttagcacagatggcactggaacccttacgtcaccatctaaccagttgtgggatgataaggatcttgaattgcaggctgatgtggatcgctttgtggaggatggatctctagatgaaaatgttgagtcttttttgtcccatgatgacacggaccctagagatactgttggccgttgtatggatgtaagcaaaggcttcacattttctgatgtaaattctgtacgggcaagcacaagcaaagtttcctgtt

SEQ ID NO: 14024 - DNA, 265 bp, Glycine max
  Clone ID: 700964908H1
aaaagtagctctagtatatggtcaaatgaatgaaccgcccggagctcgtatgagagttggtttaactgccctgactatggcggaatattttcgagatgtcaatgaacaagatgtacttctatttatcgacaatatctttcgcttcgtccaagcaggatctgaagtatctgccttattgggtcgaatgccttctgctgtgggttatcaacccactcttagtactgaaatgggttctttacaagaaagaatcacttctaccaaagag

SEQ ID NO: 14025 - DNA, 270 bp, Glycine max
  Clone ID: 700964909H1
ggaatttgctagggagactttggcaggtgtcaacccatatagcatccaattggttaaggaatggcctttaacaagtaaactagacccgcaaatctatggtccacaggaatcaacaataactagggaagtcattgagccacaaattatcacttatggaacaattgaagaggcccttaaagaaaagaagttgttcatgctggattaccatgatttattcttaccatatgtaagcaaagtgagaaaaattaagggcaccacattatatggatc

SEQ ID NO: 14026 - DNA, 270 bp, Glycine max
  Clone ID: 700964910H1
aaggaaaccccaacccaataatcatactcgtacttgggatgatattggatcgtctcaacctcaattttctacaatattaaataaacaatcaccttcattttttttttctcctcttcatttctgatctcatccccatggatccctttgatttaatacgcgaagggtttggttgaggctgactggacatgcgctgttactacttttaaagtctgtttatgctgtagttattttgtccatattttagttaataatgaacttatccaagaaagg

SEQ ID NO: 14027 - DNA, 271 bp, Glycine max
  Clone ID: 700964912H1
agtcgttgcacaagtgagagaggttgaaggcggcgtgagaatgttggacatcaacctattcagagaggagaagggccacaaccctgaactcatacgcgaatcccaacgccgtcgtttcgccagcgtcgaaatcgtcgacgaggtcatcaatctcgacaaagaatggcgaaaacgtcaattcgagttggaaaatctccgcaaggaattcaacaagatcaacaaggaagtctccaaactcaagcgtgctggggaggatgcttctaagttcatt

SEQ ID NO: 14028 - DNA, 276 bp, Glycine max
  Clone ID: 700964914H1
atcagtgcgagtactgactttgtgttattagatgagacaactttaatcaatatcattaagcatccagatctgacagtaacgtctgaagagaaagtccttaatgcaattctaatgtttggcatgaatgcaaaacagttgtttgggtgggaagtggtggatcagttaatggaaaattcaaaaccagaactcctttttggtgagaggcttcagttaatctatgacttgttgccatttgtgcgatttccactactacaatattccttacttgagaagttg

SEQ ID NO: 14029 - DNA, 276 bp, Glycine max
  Clone ID: 700964915H1
tgaaattgcctctttcaagaagcatctgagtgcttattatttgtaatatatatagtcactcaagcttctaggatttgtgccagctacatgaaaatgggaagcaacttcaggtttttgagtctttgcctcttggcattgattgcatcaacccatgctcaacttcagcttggtttttatgccaagagttgcccaaacgctgagcaaatcgttttgaaatttgtccatgaccatatccacaatgctccatcactagcagctgcattgataagaatgcac

SEQ ID NO: 14030 - DNA, 250 bp, Glycine max
  Clone ID: 700964879H1
atcttgaaagtgctatagagcagaacatggtggtgaaacaaaatttacgtggtttgccgttgtatgttggtaagaatgataaactttggaaatgtgtaaatcctttaggtggtactcgtaagcagcattcaaaagaaacatgggatcaaattggaaagttttcaacaactcctgctggaagatcagcactaatgggtacacagtccaagtatgaagcaggcattgtgattaagagtatgtgctttaaaga

SEQ ID NO: 14031 - DNA, 279 bp, Glycine max
  Clone ID: 700964916H1
aaaaaatgaatttgaagacttgccattttcttcggaagttctagctgacacttggcacgtgcaaatgggtcactctaagtgggttgatcttgctatcatgtttgccatgattgttctgtatcgagttctattcttggccatcagtaagtgcaaggagaaatcaaaacaagttagtgttggcattaaacccgaaactaaaattttctccagaatcaacatcagtgaactccaaatgaggggaattgatgatcataatgctgtctaagcagtagttcgact

SEQ ID NO: 14032 - DNA, 270 bp, Glycine max
  Clone ID: 700964917H1
caaagcaagaaaaaatggggtccgcaaaatttgctttgatattaacaattgttattatctcaatgtgtagcatttccttggcacaaaattcgcccaaagatttccttgacgcgcacaatgcagctcgtgcagaggttggtgttgagccactcgcatgggacgacaccgtcgcagcctacgctcagcaatatgcggactcgaggatcaaagagtgccaagtagtgcactctcaggggccttatggggagaacctggtggccagtcccggcg

SEQ ID NO: 14033 - DNA, 252 bp, Glycine max
  Clone ID: 700964844H1
ttttcttgaaagatgatggcaccttaaagccattggccatcgaattaagtttgccacatcctaggggagatgagtttggtgccgttagtagagtcgtcttgcccgcagaccaaggtgctgaaagtacaatttggctaattgccaaggcatatgttgttgtcaatgactcctgctatcatcaactcatgagccactggttaaacactcatgctgtgattgaaccacttgtcatagcaacaaacaggcatctta

SEQ ID NO: 14034 - DNA, 257 bp, Glycine max
  Clone ID: 700964847H1
cagctgcgatcctctgcttcgatggccaccgtgcaactccaatccccaacccttgttcgctcctcagcacttccttccgccaccttctcccctccgatcgcagtctccggccgcagcaactccgccgcgctgccgcgctactccggcctccggctccgacccgccgctgagaccagtttcccgactcacgccagctcgagaaccgcttctcgcggcggacgtgtcaagtgcgacgcacgagacaccgctgttgaagt

SEQ ID NO: 14035 - DNA, 257 bp, Glycine max
  Clone ID: 700964848H1
atgaggtgtgcatgctttttaaatggtagagaggaagtttgtagtgtgggcagatgataggggatatgaattacggagaatctgaaactttgataatgttatgacagaagtgatgaacataataaggtatttaatgataatgacagctttgtgactttagttaagtcgtcgtttaagagacttcaatagccatttccgtcggtccatcttaaaccaaagaaaggtgcctttgacggagtttcttttgctatcataaa

SEQ ID NO: 14036 - DNA, 254 bp, Glycine max
  Clone ID: 700964849H1
cgtagtgtgcaaaagaaaactcaagctcccagattctgttccaatgcatcccgtaccaatttcccccatcaaagttgggcacattgatgatgtccaagagctaagaaaaaccaagccaaggacaattcctcaaagatttgtacgagacttgacagaaagaccaacactcactacacctcttcccccaccacatagtgacatgccagtcattgatttctctaagcttagcaaagggaacaaagaggaagtcctca

SEQ ID NO: 14037 - DNA, 248 bp, Glycine max
  Clone ID: 700964851H1
gaagaaatcactgtgtgtgattcaattgcatcggtttcttcaattccagcaccggtgcgtgcatctgatttatataaccttgtttgttcactcttatttttatgttatggctatttcatatttgaggtcagcatcataagcagttgttgtttcggaaacacaagatgaattctggtgggtacgctgttgaggttacgggtctctcgccaaaagccacggacaaggatgttcgtgacttctttgcttta

SEQ ID NO: 14038 - DNA, 250 bp, Glycine max
  Clone ID: 700964852H1
atgacattgaaatcttgaagatggttcaaaatggcgaaggaaaatgcaagaggaaaaccttatctgggattgaagagaaaacaatcattcaagatgaaatagcatgccaaaaggaacacgatcctttcaacaaagaatctgtgcaactcggcgctgttccagaagtcgcctttgtcccagtgattgacaagcaagttaatgcatcttgggaaaaagcggtacaaaataatcaacttgcagcttctaaaga

SEQ ID NO: 14039 - DNA, 247 bp, Glycine max
  Clone ID: 700964853H1
attggttgcagtgttgggcaaccatgactacaggggtgatgttgaagctcaattgaatccaatccttcagaaaattgatcctagatggatctgccaaagatcatttattgttgatactggtaaggtgacttctcggaatctcaatagaggttttatcctgaatagtaagttaagtagccttctaatcttaaaactccccagaaattgctgagttcttcttcattgattcaacaccttttgtggacaa

SEQ ID NO: 14040 - DNA, 248 bp, Glycine max
  Clone ID: 700964854H1
accacttttatatctatcctcttcctcctcttatctctcctcaccccgaccctcatttcctcttcccctgtccaagaccctgaatttgtggtccaagaagttcacaggaaaatcaatgcttctgtagctagaaggaatttggggtacttgtactgcgcaacagggaaccccattgatgattgctggaggtgcgacccaaactgggagaagaaccgccagaggctagcggattgtgcgattggtttcgg

SEQ ID NO: 14041 - DNA, 248 bp, Glycine max
  Clone ID: 700964855H1
agattcagtaactaatcattgaaagtagacttatgcatcataggctcactatataagaccatgcacccgagtcctagaatgcacagaagcacaacattgatcactataacataataactaatggagctggtgacgatgtcaagaacaagagtggtcctcatgaccctcaccctggtggtggtgacagttctgaacaacacagagagtgcagaaagtgctcgcactttctatgtgttcggggactctct

SEQ ID NO: 14042 - DNA, 251 bp, Glycine max
  Clone ID: 700964856H1
accaattctaattcctaactaatcgatttctctgcttctactcagtagttcgttcaattcaccggtttgttcaactcaaatcgtgcaatccttctttcaagctcgcgatttcctcttctggaattctcaagatcttgataatggcaaccactgcctgtttcatcactgttagcagaaatgacattcctacacatgaagctgaagttggagtagctgctaaaagggaagatgctgctcaactgcatcaattt

SEQ ID NO: 14043 - DNA, 247 bp, Glycine max
  Clone ID: 700964858H1
aaaggatcgaaatggaaatagacgggaatagagtggtaatcctaggaggtggcgttgcgggatccgtcgtcgctaaatctcttcaattccatgcccatgtcacactcgttgatccgaaggaatattttgagattacatgggcgagtttgaggtcaatggttgagccatcttttgcagagaggtcagtgatcaatcacagagatcactttaccaatggcgacatcgttacgtccaatgccgtcaatgt

SEQ ID NO: 14044 - DNA, 250 bp, Glycine max
  Clone ID: 700964859H1
tttgtacctcagttccaggttaacaccaaacaacacatatagtgcagattcataagcttccaaccatggaggatccaaatcaagctccagaagcgtcttctcagaagaaaatgggaagagggaagattgaaatcaaacggatcgagaacaccaccaataggcaagtcaccttctgcaagcgccgcaacggtttgctgaaaaaagcttatgaattatcagttctgtgtgatgctgaagttgcccttgttgt

SEQ ID NO: 14045 - DNA, 250 bp, Glycine max
  Clone ID: 700964860H1
tcaagtttcaagcacttgttcgtggaggaacagttagacactctgacgttggatctgaaatccaagagaagtgcaacatattgaaccctctggatggcaagcttgtcaagccaattgctatatccatgaaaattaccaagctgtctgcaaatgctttcattcgtaagcttctcacttcatcaaccagaacaatggtgctgcagctgcaacatgttcctggtgatccaaattctgtcctaagttggttgga

SEQ ID NO: 14046 - DNA, 252 bp, Glycine max
  Clone ID: 700964862H1
gacacaacatatcttgagtactgagtttccgaagcgcttacgacgatcaaattcacgttttgttccgaatgcagcattgtcgttgaacttcaggatgtccagtccagcttcaaaagcctcttggacacctgaattccacagaatatttgttgatttatgccttggagaaatgctgaagaatgagcccgggtcaatgcgaattactaaggctggttggaggaacattgttggattcttttatgcgaagacagg

SEQ ID NO: 14047 - DNA, 254 bp, Glycine max
  Clone ID: 700964863H1
ttttcacttccaaccagagaaaaactggatgaacgatcctaacggtcctatgtactacaagggatggtatcacttcttctaccaatacaacccgaacggtgcagtttggggtgacatagtttggagacacgcagtgtcaagggacatgatccactggcttcaccttccactagcaatggtggcagatcaatggtatgacatgcaaggtgtgtggacaggctcagccacgatcttaccaaacggtgaaatcatca

SEQ ID NO: 14048 - DNA, 152 bp, Glycine max
  Clone ID: 700964866H1
aaattgcagaaatcctacgggttgtagtttgtagttctccgtggtaacggatattttctgttgaattcaagctttttgagcacattgaacaatttgttggctgggttgtagccctttttggcaactaaataccaacggagctgaccattttt

SEQ ID NO: 14049 - DNA, 247 bp, Glycine max
  Clone ID: 700964867H1
agtggccgcaacctcgccgcgcaggaactgtggtccgagcttgaccctttctctgacctccttggcttcgataccaccaccaccacaaccaaccaaccaccccttccagacaaaaaagtggtgtcatcatgtgagaagaagaagaagaaaagtgtgagtgcagaaaagaagagtggtgggcgagctcggaagaacgtgtacagaggaatcaggcaaaggccgtggggcaagtgggccgcggaaataa

SEQ ID NO: 14050 - DNA, 249 bp, Glycine max
  Clone ID: 700964869H1
cgaggaaatgaaataattactctaattttgtaattcattgtttggttctgcttcacaggaatggtagatttgaggtgaaaaggttccacattggtcaggttcagatctcacaatggggaagtcaccaggaaaatggatcaaaactgtactgtttgggaaaaagtcatccaaatcaaatacttcaaaaggcagagagaagcttgttaatcaagaagaaggagttgtagttacctccaaggtgctagaaac

SEQ ID NO: 14051 - DNA, 246 bp, Glycine max
  Clone ID: 700964870H1
ctcgtgcttcccgaggttgttgcttcgtaatttgtccgtcaagggaggaggcggataaggccgtcaatgcgtgtcacaataaaaggacgttacccggggcatctagtccattacaagtgaagtatgcagatggggacttggaaagattagaacacaaactcttcattggcatgcttccaaagaatgtttctgaagttgaaatatctgctcttttctccaagtatggaactataaaggatttacaaa

SEQ ID NO: 14052 - DNA, 247 bp, Glycine max
  Clone ID: 700964872H1
ttccttctctccgtgcttccccgcacgtgccaacagtgaaaaacaatggagtcagatctcgagcaacagccgcaggtgaattcctcgggtttaactcggtaccgatcggcgccgagttcttatttctcgaacatcattgaccgcgagttctacgagcacgtcttcaaccgtccctcgagtcccgaaacggagcgagtgttctcacgcttcatgaacagcttaaacagtgaagaagaagattcgctcc

SEQ ID NO: 14053 - DNA, 249 bp, Glycine max
  Clone ID: 700964873H1
cgctctgttggttgtattgttcttaattttgcttccattggtcttgtaccgtcgcgtagagtcgttgaagttcagttctgcaatatcaactcttcttgctgtggcatttgttacatatgtaccgtgttagcaacagttgctattgttgaaggaagaacacagtcccctagactgattccttgtttggaccaacatacctctttttttgatctgttcactgcagtgccggtcgcagtcacagcctacaca

SEQ ID NO: 14054 - DNA, 247 bp, Glycine max
  Clone ID: 700964874H1
acgatcctcgatggcggcggcgtcgcggaggctccgggacctgcagtccgaggccgggaacaagatctgcgttgactgctcccagaagaacccgcagtgggcctccgtctcctacggcgtcttcatgtgcctcgaatgctccggcaagcaccgtggcctcggcgtccacatctccttcgtccgatcggtcaccatggactcctggtccgacatccagatcaagaaaatggaagccggcggcaacgac

SEQ ID NO: 14055 - DNA, 247 bp, Glycine max
  Clone ID: 700964876H1
tgaacatcaatggactcgcaagacaatcactcatcaatgcaggtggcattattgagcaatcatttctgcctgggccatttgctgtggagatgtcttcggcagtttacaaggggtgggttttcactgatcaagcccttcctgcggatcttatcaagagaggaatggcagtggaggatccatcctctccctatggccttcgccttgtgacagatgactacccttatgctgttgatggactagagatatg

SEQ ID NO: 14056 - DNA, 241 bp, Glycine max
  Clone ID: 700964843H1
gttttaataggtataggcttgcaaaggtgttgttgattgagccataagtgctttaagtaatgaataccaagacattggtttaccttgccacacaaaaaactaccaccccaggcaaaataatagtaaaaaaaagagaaggcttggagccaagaaaataaacacaaagcacaagtcatggaaagaataatggttggaagtgcaagaaaggttgctttcaacctgttggtcactttcggcattg

SEQ ID NO: 14057 - DNA, 246 bp, Glycine max
  Clone ID: 700964877H1
cggttgctttgcttgctatcttgttggaggactttgtgttcaagagaagatggtaactagaattgtggatcttcgttcagacacagttacaaagccaactgaagcaatgagagctgctatggcaagtgctgaagttgatgacgatgttctaggctatgatccaactgcttttcgcttagaaacagagatggcaaagacaatgggcaaagaagctgctctttttgttccatctggcactatggggaa

SEQ ID NO: 14058 - DNA, 251 bp, Glycine max
  Clone ID: 700964878H1
caagagacctacactagttatcttaaagaaccaaataaaacatttgaggttttatggcacagccaaattccaacatgaaggtttggttcttttgctttcttcttcttagcatgactgcaatcaaccatggcaaactagacgataaaaatatacaaaaagaaatgcatgggccgagcgagcataaactttccgatcagaataatgacaaacctgttgctgccaacccctacaatcgtggctgctccataata

SEQ ID NO: 14059 - DNA, 257 bp, Glycine max
  Clone ID: 700964810H1
attttgttgaaattgctgtttcttcctctgagctccaactttcacctcagccaaatacacaacaaaatggggtttcagaagataagggtgggcaaccccatcgtcgaaatggatggggatgaaatgacccgagtgatttggaaactgataaaagataagcttactttcccttatttggagctggacattaagtactttgaccttggccttcttcatcgcgatgccactaatgatagagctactactgaaagcgctga

SEQ ID NO: 14060 - DNA, 258 bp, Glycine max
  Clone ID: 700964811H1
cgacaaaagcctttcacagtgagatagccctacaaatgtttcgtgaatctttgtttgctctctttctactttctgcattctcctcctcactcctacctttaaccactgctcaagattacgttctcgacacggacggtcacgcggttgaaaatcacggtacatactatttgctgccagcgaaatcaggaagcggcggtggtggaatagaggcagccgcaactggcaaagaaagttgcgctctcactgtagtgcaatctc

SEQ ID NO: 14061 - DNA, 256 bp, Glycine max
  Clone ID: 700964812H1
cagttgattccttctagaaaggtggctacgaataccaatccacatgagactgtagttgttgagcatcctgctcacattcttgcatattactctcttgcagggcagagatcagattttccagacactgttgtgcctttggacactgccacatgcgttgatacctagaggccagagctgtgtacacataccagttttcttttgtttttcttctcccctttcatatgctgtttctatgttcctgctctatttgcagttc

SEQ ID NO: 14062 - DNA, 256 bp, Glycine max
  Clone ID: 700964813H1
gtcaatccacgcctaattgagcgccttcaagtgttccctccaaagagcaagctagatcccacagtgtatggtgatcaaactagtacaacaaccaaagaacacttagagatcaaccttggtggactctctgtggaacaggcactgagtggtaacagatcgttcacattagatcaccatgatgcattcatcgcatatctgaggaagatcaatgacgttcccactgcaaagtctcatgccacaacgaccatccttttct

SEQ ID NO: 14063 - DNA, 255 bp, Glycine max
  Clone ID: 700964814H1
gtttggttttcgggacggaacaagaacaaaacgaaaagatgaacagctacagctactatgggtaccaagagaagaacaccttgacaagctgtgaggagacgaggatggaatcagtgatttgccccaaacctcgccgattgggtctcataaaccactcttccatcaacacagaagtcagaccctcgaggcaccccatcatcaggaaattctctgttcttttttctttttggtttttcaagcaaatcggttacaaaa

SEQ ID NO: 14064 - DNA, 261 bp, Glycine max
  Clone ID: 700964815H1
gttaattaagatgaaggaggacaatgggatagaggaactgtggagggaagtgagggatttgagtttgggaaacggcggaagagtacagagactagagtctccaccaaccccagttcagttcctgagagacttcatcacaccaaacaagcaatgcataatctccaacgccattacgcactggcccgcactctcttcctggaccaacccttcccacgtctcccaatccctctccggcgccaccgtctccgtccacctcacccc

SEQ ID NO: 14065 - DNA, 254 bp, Glycine max
  Clone ID: 700964819H1
tgatgatgaagcgtcggttccttttggttctcttggttctgtacgtcacagtggagcagagtaagctactccaccacgtagaagcagatggtgggtttgtaaaaacaagaggagtgcagcttatgctgaatgggagtccctactatgctagtggcttcaatgcctattggcttatgcaccttgcctctgatccttcccacagaaacaaaatctcatcggtatttcaacaggcttcaaatcatggactcaacatt

SEQ ID NO: 14066 - DNA, 253 bp, Glycine max
  Clone ID: 700964820H1
agatcactcgtgctttggcatcaactgtttcatgccgtcactttttatcctggcagctgttgcttttcttgcgtttttggttggtttggcattactcttccggacccggaggttctataagcaagttgtgcttagaagattaaaacatcatgcaagatgatggagattgcatttgcctgcatttcaacactaggcaaaggctgaggaaaccagtcttgttttctctggtctgtttggcataaatacagttaat

SEQ ID NO: 14067 - DNA, 253 bp, Glycine max
  Clone ID: 700964821H1
atcagatctgacctcattcacagaacacaaaccacattcgcccccacaatcaaccacccggatcggttacatgtttcgcgagcgcgtgccgttcctcctcgtgggcgtggccatcgccaccgccttcttccagctcctcccatctccatccactgtggcggctcctcacgagtcgttccttgagaccgactcggctctgcagactcggcgggtgctgttggaagggtcgacggcgattcaggagaagacggga

SEQ ID NO: 14068 - DNA, 231 bp, Glycine max
  Clone ID: 700964823H1
cgcaagggaagtcggcaaaacggacccgcaacctcgggaaaaggactggctctgagggctgggcacgggggtcccagtcccgaacccgtcggctgtcggtggactgctcgagctgcttccgcggcgagagcgggtcgtcgcgtgccggtcgggggacggattgggaacgggcccttcggggcctctaccccgggcgtcgaacactcaactcagaactggtacggacaaggg

SEQ ID NO: 14069 - DNA, 256 bp, Glycine max
  Clone ID: 700964824H1
cagcaacagtcacaacaagccttaacgagacagagagtgaagttggtatgagggaagaagacaaggagttgcaacaacaagatcactccatgttcaacatcaagagcttcctctggcatggaggctctgtttgggacgcatggttcagctgtgcttcaaatcaagtggctcaagtgctgttgacactgccctattctttctctcaactgggcatgctatcaggaatcttgcttcagattttctatggaatcttggg

SEQ ID NO: 14070 - DNA, 254 bp, Glycine max
  Clone ID: 700964825H1
agaacataccgaagttactggaccaaatatttgaactttgacctccctattttgcaacgttgcaatctccaggcgtacccaaaatttaaatattattactctacctggcaggttttatttgatcaatttgcatgcttcagtcgattctttattgttctttggcgattcatcctgtaaagcccttcatagatgcatagaatttccgacatatatctttttagaagcttagctaaattgtagtgacattgagatga

SEQ ID NO: 14071 - DNA, 254 bp, Glycine max
  Clone ID: 700964827H1
actccaagcaaggtccacaaagctgttgatgcatgcaagaatgttcttagaggcctgcatagcaacaaaactactgagagggaattggacagggctaaacggacccttcttatgagacatgaagctgaaattaagtcaaatgcctactggttaggattattagctcatttacaagcttcttctgttccaaggaaggacatatcatgtatcaaggatctaacatttctacatgaagttgccactactgaggatat

SEQ ID NO: 14072 - DNA, 162 bp, Glycine max
  Clone ID: 700964829H1
cacatcatctagctagctagctagctagcaaacagcaacgttaaaaaaccaaccacaaccagattggcgtgagcccattgtccgggttcagtgcttatccgaaaactgcgaagattcaatccctgaaacgtacatcaagccttctactgatagaccatccat

SEQ ID NO: 14073 - DNA, 257 bp, Glycine max
  Clone ID: 700964830H1
agaggaggagcgatctgaggtgaggagattaaaagagcaatgctagcacagggattcgaggacgaagagaaatggctcgccgaggggatcgccggcattcagcacaacgcactctcactgcatcgcgcagtggacgataacaatctcagagacgctctcaaatactccgcgcagatgctatccgagcttcgaacttgcaggctctcacctcacaaatactaccaactttatatgagagccttcgatgagctcaggag

SEQ ID NO: 14074 - DNA, 262 bp, Glycine max
  Clone ID: 700964831H1
cagacgaaaccaaaacaaagggtcctaaaaagaaatcccattcaaaaccaaaagacaagatggatcatcttaatgggaagagtgcacatggaaagaaaggcgcagttggtgggaggaaaattgcaagggaattgaatgatttacaaagggaaaatgagtctgtcacagccagcaataatcttactcataaatgcatcattaactcagaaaggaaaaatatcgatatgactgagatggctcatctttgcggtaccaaacagcg

SEQ ID NO: 14075 - DNA, 261 bp, Glycine max
  Clone ID: 700964832H1
cgtccccacaccagaaaccggcacggaacactatgacactgccttggcatatccagtgcagtcaccaggcgtgctaggaaaccaaccagacattgtcatggacagcttggctgtacatggccttggcctagtgcacccaaagaaggttttcaatttctacaacgagctccatgctcacttagcttcttgtggagtacatgtagtgaaggttgatgtgcagaacattactgagacccttggtgcgggacatggtggccgagt

SEQ ID NO: 14076 - DNA, 255 bp, Glycine max
  Clone ID: 700964833H1
atactttggcttggctttctgaattttggtttttcagtgctgagagctgaacaagaagatggggggtggaaatcaagaggcagtcaagcagctgcagaccctgatggaaaatgtggatgatgagcagctgaagaatacattccagattatgcaccacggttatcagacggaaacgttaatacggtttctcaaagctagggactggagtgttgccaaagcgcataaaacgtcaattgattgtttgaactggagggt

SEQ ID NO: 14077 - DNA, 191 bp, Glycine max
  Clone ID: 700964834H1
cggcaccttatcaacatcctttacctcttaatttttgtcatcagttcaaaactactactcttcagaaaaaggttacaaaacccagcaccaagtccaccatctcttccaataatcggaaacctccatcagctgaagaaacagccacttcaccgagccttgtacgacctctcacagaaatatggccctaataa

SEQ ID NO: 14078 - DNA, 177 bp, Glycine max
  Clone ID: 700964835H1
cactggtccattatctatcgttaatggaagtggaagtagcacttccattttccattttgcatttcccagtagagtacgcaaagccaaatccacagggaacacgttcattcaattgcaattatccatattaattaataataattcacaaactgtgcgtggccagcactccaataccct

SEQ ID NO: 14079 - DNA, 251 bp, Glycine max
  Clone ID: 700964837H1
ggacttatttgtacttcattagcttctacttaattactgttttgctgcttttgaacttgattattgcttttgtattggaggcattctttgccgaaatggaacttgagtcatcagaaacttgtgaaggaaatggcaaggaagttgaaggagataaatatcgaaagcgatctactggcacaaaaacacgaagccagagggttgatgctcttcttcatcatatgctgagtgctgaattgtgtcaaaatgagcct

SEQ ID NO: 14080 - DNA, 158 bp, Glycine max
  Clone ID: 700964838H1
gaaattgccaagttcggcgtctatgtcaccgctcatgtacactttcgccgacaatcccagcaacctccgcaagttcatgggacatgaagcaaatcagagagtttgattgggaagtatggtgtggaagcttttgggagcacgccctctctgctcatatt

SEQ ID NO: 14081 - DNA, 251 bp, Glycine max
  Clone ID: 700964839H1
atcaacactaataacagcaaactaaaggtgaagttcgccagaaacaagatgggaaggaaccattttcagcagcaacactgtgctgatgggagcatgtggatggagagtcagggtcagcaacagagctatgccttccaagaagagtcttggagccctgataacaactatggccacaaccacaagcaattcccaggcatgcacatgaacatgaacaacaacaacaacaacaaaaggcttggtgcttttgctgc

SEQ ID NO: 14082 - DNA, 253 bp, Glycine max
  Clone ID: 700964840H1
cagacggcgacaagcatatcttcttccctcatgaagcttcccccaagcgaccacgctgtccattctttgccaccctcaatctctgtcctttggcgacctccatccatccatgaacttctccgacaacctccttcgacattggagtaacacaataagatggaccagcaaaaccacaacaacactccagatggttcaggagaggtgcctttgaagcgtaaacgtggtcgtccacggaaatacccaaagccagatt

SEQ ID NO: 14083 - DNA, 254 bp, Glycine max
  Clone ID: 700964841H1
cgaaagttttgaatctctgtggatgtgttaaagctgcatctgacactgcgttacaggcaattgggcactactgcaatcagttacagtttttgaaccttgggtggtgtgaaaacgtcagtgatgttggagtgatgagtttagcatatggctgccctgatcttagaacacttgacttatgtggttgtgtccttacaacagatgacagtgcaattgtcttggcaaacagatgtcctcatctgaggtcccttgggctg

SEQ ID NO: 14084 - DNA, 259 bp, Glycine max
  Clone ID: 700964809H1
agagagcacaaagaaactgccatggacgctctgaggaaacaagccagcaagctcagagagcaagttgccaaacagcaacaggctgtaataaagcagttcagtagtagtggttatgagagttcagatgttgtggtcatcgatgaggtcgaaatgcagagacatcaccagctggaaaagttgtatagggccacacgttcagggaaggacttccagaaggaaattgttaaagcagcagaaacatttacagctataggttata

SEQ ID NO: 14085 - DNA, 257 bp, Glycine max
  Clone ID: 700964770H1
ttccaatatattccattctctctgtgtatttccctacctctcccttcaagatgcagatcttcgtcaagaccctcaccggcaagaccatcacccttgaggtggaaagctctgacaccatcgacaacgtcaaggccaagatccaggacaaggaaggaatccccccggaccagcaacgtctcattttcgccggaaagcaacttgaggacggccgtacccttgctgactacaacattcagaaggagagtactcttcacctc

SEQ ID NO: 14086 - DNA, 255 bp, Glycine max
  Clone ID: 700964771H1
gccaactttgcttcccataatgcgtagaatgttaacaactgatggtcaagaggttttcgaagaagttttggagattgtatcatatatgacttttttctctccaacaatatcattggatatgtggagtctttggccattgatgatggaagcactggcagattgggcaattgatttctttccaaatattttggttcctttggacaactatatttcaaggggaactgctcatttccttacttgcaaagaacccgacta

SEQ ID NO: 14087 - DNA, 255 bp, Glycine max
  Clone ID: 700964772H1
aattatacataaattttggatttcgcacgtagctagctacagaagacaaaggagccttgagtctcgagatcttgtcagatcggaacgcaaccgcaactgccaccgagattgctttgtgtgttatgggcagggaagttactggcatacaggttatggaaaagaagccaaatggtgccatagcggcttcaaatggcagtttaagtgatagaatgcgtgtttctcccaaaattgcagcaatggttcaagcaatggatc

SEQ ID NO: 14088 - DNA, 253 bp, Glycine max
  Clone ID: 700964773H1
tacttttacaatggagatatggaatagttggtgggttttgcaaattatgcaatttctgggcttttttagtttttggacttcatttgcaaagtttaggactttattctcaagagcttttggctatggccacaaggttgtgaagggtgactgcagtacttggatctttgtgtccttcaatgggttggtcacagttggttctttcatattcttcctcttggtcctttcctgggcttatctatacgcatttcccagt

SEQ ID NO: 14089 - DNA, 252 bp, Glycine max
  Clone ID: 700964777H1
ctttctcttgttcaaccttcccacaaacactgcatgcgtctttgaccacaactgcttcttcaatttccaatctttttggacaccctctattgctattcctcccttggtgttgtttgtgttaaagggtatctctctacttaatataaagttccattgtctcttgaggcaattttcaaccttagttgtgtgttttggagagtttttttgtgttgttttgttgaggttgggtttgtgagtgagagaatggtgggt

SEQ ID NO: 14090 - DNA, 256 bp, Glycine max
  Clone ID: 700964779H1
aaaaacgatctccaacggtcatgaacggcggcgctgaggcctccgtcaatcacaggcgcagacaccaagcagcttccgctaacggcgttaagatagcaaacggggccatggcgaagcgtcctcgacgctctgctacgacgcctcgttcatgaaatggaccgtggcggatgctgtccacgtggcgacgcatcattggatgccgtgcttattcgcattagggcttctcttcttcatggccgtggaatacacgctcctc

SEQ ID NO: 14091 - DNA, 256 bp, Glycine max
  Clone ID: 700964781H1
aagtcaacttaaaaacaaaataattataagatccaaaccatgtgtataagttaacacccatcgacaagaatcttcagcaaatgaacaaagtgttaaaaattttgctagtatatacacttttaacaatactaatgaatcgagttattgatttttcaaccttaaaaagctattttcagttgacttaaagggaaggggggttaattttggtaatttcctcatttaatcctgcatactcgttaaataattagatgtacta

SEQ ID NO: 14092 - DNA, 257 bp, Glycine max
  Clone ID: 700964782H1
atttataggaaaaaaatatagagtgaggaagaaacaaacatggaaaggatatagattatagaatacagaggcaccgacgtagcgacggtcaaggtccacaatccacaatccgcaaccgaataacccactacccacagatttctctctctctctctctgttggattggatcctaatatctgtgttccactttcagaggttgctccttcattcacgcccttgctctcttcaaatctattttcttcctctgctctatcta

SEQ ID NO: 14093 - DNA, 257 bp, Glycine max
  Clone ID: 700964783H1
gttcttttcttctctgtcttcctttaccaaccccaaacatttcttttgtgttaaatttactgattctactcagcaatcagctttcagcaatcagcaatcagcaatcagcatcattacttgtccttgtagccatgtcaatttgtggtctgtttcaaaaaccaatatgtcttactctctttctagtgtttctctgatcttcctgaagtaggtaattggcagttttgttctattctcccagtgatttataatcaaaaagc

SEQ ID NO: 14094 - DNA, 253 bp, Glycine max
  Clone ID: 700964785H1
ttcgtttctcactcacaccaacaacacaacacaagctacagcacggcactactactagcatcaccctccaccattgacgcgtcctttgcttgctccgcacgtcacttcgcgtttttctcagattcactctcgccgtcgcagatcccaaccaccatggatggttacgacgccaccgtcaggctcggcgccatcaacctcaagcacggtcgcgccgccgattttgactccgcctcccccgacgtatccgtctcct

SEQ ID NO: 14095 - DNA, 256 bp, Glycine max
  Clone ID: 700964786H1
ggcaactaagaaagaaagatgaagctgaaggtatatgcggaccgcatgtcccagccatcccgtgcggttctcatattttgcaaagtgaatggaatagattttgaggagatcaaagtcgatttatccaaacgtcagcagttatctcccgaattccgagcggttaaccctttaaggaaagtccctgctattgttgatggaaggttcaagctatttgagagtcatgctattctcatatatcttgcttctgcatttccag

SEQ ID NO: 14096 - DNA, 251 bp, Glycine max
  Clone ID: 700964787H1
ctcctctgtctctctctctccaccattgccatggatccttacaagctccggccatccagcgccttcaattctcccttctggactacaaattctggtgctcctgtttggaacaacaactcctctttaaccgttggagctagaggtccaattctgcttgaggattatcatcttgtggagaagcttgcaaactttgacagggaacgtatcccagaacgtgttgtccatgccaggggagctagtgcaaagggttt

SEQ ID NO: 14097 - DNA, 250 bp, Glycine max
  Clone ID: 700964789H1
attattattgtctgagaaattatcaataaaataaaacagagattgtatttgcatatctttgtaggttttgttagtaaacaaaagaaaaggaaacatgaaggacgcagatgtgtcaaggcagatccagcagatgatcaggttcatccgtcaagaggctgaagagaaagctaatgaaatatctgttgctgctgaagaggaattcaatattgagaaactgcaattgcttgaagctgaaaaaagaaagatcagg

SEQ ID NO: 14098 - DNA, 251 bp, Glycine max
  Clone ID: 700964790H1
ctcactttcttttcaaccagaactatgattaagctttttaaagtaaaggaaaaacagagagaactggcagaaaatgcgagtggcggaccacccgttaagaagcaaagtgccggcgagttgcgtcttcacaaagatataagcgagctgaatctaccaaaatcatgtaccatgcaattccccaatggcaaagatgacctgatgaactttgaagtttcaattcgacctgatgatggatattacttaggtggcac

SEQ ID NO: 14099 - DNA, 251 bp, Glycine max
  Clone ID: 700964792H1
gcattacaaccttaaattctccgagcgagcgagaaacagaaacctatttttattttctctctttatatcactgagagtgatagtgagagtggtagcttttgtatccatgatatgaatatgatgattattgatttgattatgcgtccagattttcagttcaggtaggatcactttgacagtttgacttgtccagcaccaatttctggtattactgttgtctgagttctcaagagttctttcacagaaggtag

SEQ ID NO: 14100 - DNA, 252 bp, Glycine max
  Clone ID: 700964793H1
cttcgaaacacactaaattctccttgctaccactctcattctcaacgatggaagctcctccagaaggttatcgtaggaacgttggtatctgtctcatgaacaatcacaaaaagattttcgcggcttcgaggctcgacattcccaatgcttggcaaatgcctcagggtggtattgatgaaggtgaggatccaagaaatgcagctatcagggagttacgagaagagacaggagttaattcagtagaagtgatcg

SEQ ID NO: 14101 - DNA, 248 bp, Glycine max
  Clone ID: 700964795H1
gtacaatgaagttgttagagtttgtagcttggagaaggacttggaaatgatggaacatggggaccagacagagattggagagcgcggaatcaacctaagtgggggtcagaagcagcgcatacagcttgccagggctgtgtatcaagactctgatatatatcttcttgatgatgtttttagtgctgttgatgcacacactggcactgaaatattcaaggaatgcgtgaggggggctctgaaaggcaaga

SEQ ID NO: 14102 - DNA, 259 bp, Glycine max
  Clone ID: 700964796H1
cttgcttccgtagttcatatggcgtgtgttcaagtcatcacagttattctctttgcattggctctagctaaaatttacccctcaacatgtcaagtggtgcagggaaaagtctcctgcgttgactgcactcacaactatgacttatctgatattaaggtttcggtgaggtgtgatggtgtgaaaaaactggctttggctactacagaaaatgatggctccttcaaggttgatcttcccctagaccacacaaaaccttctt

SEQ ID NO: 14103 - DNA, 261 bp, Glycine max
  Clone ID: 700964801H1
cgtagaaacgtgaaccagaaccagaatggatcttcaacaacgaccactgaaacttcactttattccttacctgtcaccggggcatgtgatccctctctgcggcattgcaacactcttcgcctcacgcgggcagcacgtgacggtgatcaccacctccctactacgcccaaatcctccgcaagtcaagcccctccctccaactccacgtcgttgactttcccgccaaagatgtgggccttcccgacggcgtcgaaatcaagt

SEQ ID NO: 14104 - DNA, 248 bp, Glycine max
  Clone ID: 700964802H1
cagaagaaaactaccgtacccaagcctaccaacaaccacaccctctctacatcatcctacctctgattagctagggccacagcaccttcctcttcacttcgttcttcaggactctacaaatgagcaacgacaaggacacacttcaacgtggctgatctcactatcgctctcaacgaggacaatacaccacaccttgtcaatgctctcaagagcaagatacagagcttggctggacagcattctgatat

SEQ ID NO: 14105 - DNA, 250 bp, Glycine max
  Clone ID: 700964804H1
aagaagtggaaattgaaggatgtaatgagaaagaagttgaaaccaagactacagagttatgcaaccttcttgatatgttgagaagtgcttctggagacaatggtggaggatctagtagtacatcacacgctgattggaaactaaaacaggataatgaagagtttcgtgttatgtatcgtgaaggaccacagggaactcccattcatacattgctagttgaaggctatgtagatgggcctctagatctttc

SEQ ID NO: 14106 - DNA, 257 bp, Glycine max
  Clone ID: 700964806H1
gaaagagatcacatagcagaatggcttctactcaatgtttcttgcaccaccatgctcttaccacccctgccagatccccatcacaacgcatcatggttagcaccaagcctaaccagcttgtttgcaaggcacagaagcaagaggatattgatgtcagcccaatctctcgccggttagctctaaccgtgctcattggtgctgctgctgttggctccaaagtccaacctgctgatgcagcttatggggaagctgccaat

SEQ ID NO: 14107 - DNA, 255 bp, Glycine max
  Clone ID: 700964807H1
caaacacatcacgcacgagcagcagctggcagatctgtctcggcagattcttagggggctggcgtacctgcaccggcggcacatcgtccacagggacatcaagccgtcgaatctgcttataaactcgcggaagcaggtgaagatcgctgacttcggggtgggtcggatactgaatcagacgatggatccgtgcaattcgtcggtggggacgatcgcctacatgagtccggagaggatcaatacggacataaacga

SEQ ID NO: 14108 - DNA, 257 bp, Glycine max
  Clone ID: 700964808H1
gttttcaaaggctatcactaaatctcattcttcatctgcagctatttggattgctgattattgttaactgatattggtgcttttctttgagaaagtgtgtacactttttggataagagaaaacaagagaggtgacattggaagctaactcagagagaggcaaagatgttgggaattttcaagcagaagttggttaatgcacccaaggagctgaacagtccagcttctttgagttcatgcattaagcctaagctaagt

SEQ ID NO: 14109 - DNA, 256 bp, Glycine max
  Clone ID: 700964769H1
ccagtttcttcttcaacgtcctcttacgagcagatcccaattctccttcccagtttcaaaccctaattccctcattcccatggcctcagaagagcccactgtcgcggtggaacctgctcccgaacctgccaccgccgagcctcccccggaggagaaggaggagcccaaacctgaagccaaggctaagaaaaccaaggaacccaaacctaaaaaggtttccagaccacgcaaccctcccactcatccttcctacgag

SEQ ID NO: 14110 - DNA, 263 bp, Glycine max
  Clone ID: 700964725H1
ccctcgagccgaatcggctcgagctaagcaaaaccataagagagaaccatgaagcacaagaaccatgccagagacttctctacggagaagctagttttccaacaacaacaacaacaagcagctcctgtgtctggaatttcaagcatcgaagatgagccaagaagaggaattgactccaacaatggccactcattatcagattgtgaagagagcattgtttcctctccagtcattgaccatttacctcaacctcaacctcaaac

SEQ ID NO: 14111 - DNA, 258 bp, Glycine max
  Clone ID: 700964729H1
caagccccaccttcatatggttctagatggcaaaaccaagttcagctgatggtaggactagaagttctgtgcagatctttatagtagttggtctgtgctgtttcttctatattttaggtgcgtggcagagaagtggtttcggaaagggagatagcatagcattggagattactaagactaacacagaatgtaatatagttccaaatttaagttttgattcccaccatggtggagaagttaacgaatttgatgaagctg

SEQ ID NO: 14112 - DNA, 262 bp, Glycine max
  Clone ID: 700964730H1
ctcagtgaaagagaatccgaggcgaagagaagagaaaaattaagatggaggggaaggagcaggatgtgtcgctgggagcgaacaagttcccggagagacagccgattgggacggcggcgcagagccaagacgacggcaaggactaccaggagccggcgccggcgccactggttgacccgacggagtttacgtcatggtccttttacagagcagggatagcagagtttgtggccacttttctgtttctatacatcactgtctt

SEQ ID NO: 14113 - DNA, 263 bp, Glycine max
  Clone ID: 700964731H1
ctctgcgagagagaaagagagaggcggtgatgtcttcaattagattcctatggatcctgatggtgtctttgacggcatcatgcgcgttaagccaaccgcagaagctatcggcgtacgatgttctgatggagtacgggttcccggtgggtcttcttcccaagggagccatagggtattcgctcaacagagacagcggcgagttcgcagtgtatttccaaggagcgtgcagcttcgacatagagtcctacacgctcaagtacaaa

SEQ ID NO: 14114 - DNA, 266 bp, Glycine max
  Clone ID: 700964733H1
aaggggcgtgtggttcgtgttggtctttcagtacgacgggagcgttggaaggagctcattatctggccactggtgagctcgtgagccttagcgagcaacagcttgtggattgcgatcacgtgtgtgatccagaagaatatggagcgtgtgactcaggctgtaatggtgggttgatgaacaacgcatttgagtacatacttcagtctgggggagtacagaaagaaaaggactatccatacaccgggagagatggcacctgcaaattt

SEQ ID NO: 14115 - DNA, 264 bp, Glycine max
  Clone ID: 700964735H1
cgatcaccaaagtttggtgagtgctataaagcaggtcgatgtggtaatttctactgtaggacacctgcagctagctgatcaagataagatcatttctgcaattaaagaagcaggaaatgttaagaagttctatccatctgagtttggaaatgatgtggaccggactcatgcagttgaaccagccaagtctgcatttgcaacaaaggccaaagttcgccgagctattgaggctgaaggaattcccttcacttatgtgtcaagcaa

SEQ ID NO: 14116 - DNA, 262 bp, Glycine max
  Clone ID: 700964736H1
ccacctccaaaaccgtaacacacacaacattctatactcctttcaagcttattagccgcagctagggtttccttctcactctcccagggattgagtaacatctgttcattgatcgtgattggaaggttacaattcggtttatttgatggttgcaacttcgtaccagccgttgaagtgactgtgcatgtccgtgaactgtttttttcagaaattctattgaaattcttaatgggaagaacagttttggcacgccaaaaggatg

SEQ ID NO: 14117 - DNA, 260 bp, Glycine max
  Clone ID: 700964737H1
ttctcattcaccaatggcgttcaccgtcgccagtggcagtggcgtggctataatcccctgcggcaacaccggcaccgccgcactcttccctcaccgaacgagaacaaacctccacgtggcgcgcgcgaagaagcccctcaacggcgacgacgtttccgtttacgctgagctcctcaaagccgaagtttccgttttggaaaataataagcctctcgacgacaacgatgccgctttgaagttcctagagaagatagaccgtc

SEQ ID NO: 14118 - DNA, 261 bp, Glycine max
  Clone ID: 700964738H1
atagactctacagagaggtttgcagaagtattagcacagagaataatgcagtggatcagttaaaacaaatagttcatgcagatagacatttggaatataataaagctgagatgaagcatttagaaatgttcaacatggtaaatactcatcatgcaaccactggttataagtgtttgaagttgaaatggaggaaatttggtcacttggctggtcaagttggtggagcaaaaggtatattttgtgggttgtttggacttgaag

SEQ ID NO: 14119 - DNA, 260 bp, Glycine max
  Clone ID: 700964739H1
caaaaaacaaactaacaccgtctttctcttttctcgcgtgtcgtacggatcgtgcattttccttgaacgcgatcgtcgaatgaaaatgaaaaagaaacgaaaggaaagcgaggccagtggacggtcgaacttgccggatgagatttcgaagtcgcattactcccttgagcggcgttcgcggttgatcaaacggtgcagggaagacggcgtcgtggcgacggtgccgccgtcacgcggcgcgtcgttattcctaacgccgt

SEQ ID NO: 14120 - DNA, 258 bp, Glycine max
  Clone ID: 700964740H1
ctcacttaacttaaaaaacactcactactacttacgcacgcccttactttctctctctaaaacccttctcgttttctctctctaattgcagatcaggccgcaccaaccgttgcggttgtggattcggttggggttcggagtcgccatggcttcggcttcgtcttcgtcctccaagctatgcttcaattctgactgcaaagaattgaagtccgaaagacctaagaaagggtggagactccgcagcggagaactagcaga

SEQ ID NO: 14121 - DNA, 256 bp, Glycine max
  Clone ID: 700964744H1
cacgaccacaacctccaaccgccgtcgaagcttggtcgtcctcccaccgccgtcgcacgagggagcaccccacgccactgtacgtcgtcgcgccaaccatcaggccgccgccgccttgatttttgcagtgattgttactgctgctgctgctgctgttgttgttatggcagttgtggagaaggaaaagcttcaggaagaatctgtaatccgccgcttctaccagattatgcttagttgggactactttgctctcctc

SEQ ID NO: 14122 - DNA, 265 bp, Glycine max
  Clone ID: 700964748H1
tcaagcgtggttttgttgcatccaactccaaggatgaccctgccaaggaagctgccaacttcacatctcaagtcattatcatgaaccaccctggccagattggaaatggatacgcaccggtgcttgattgccacacttctcacattgctgtcaagttttctgaaatcttgaccaagattgacaggcgatctggtaaggagcttgagaaggagcccaaatttttgaagaatggtgatgcaggtatggttaagatgattccaaccaa

SEQ ID NO: 14123 - DNA, 266 bp, Glycine max
  Clone ID: 700964749H1
gttgctacttgctagtatccaatattagcttactactagggtgtttgaaagagatggggaagacaagcaaatggcttagaaacttgttgacaggtaagaaagacaaggaaaaagagaagggaaaatctacaaccaacctgaattgttcttcaaatggaacagaaaactcaaccactccaacttgcacaaccccaaaggagaaaaagagatggagttttagaagatcatcagcctcagccactactgccacaaccacaccaccaaca

SEQ ID NO: 14124 - DNA, 261 bp, Glycine max
  Clone ID: 700964750H1
gaagaaagaagcaaatggcaaactttccagttgttgacatggggaagcttaacaccgaagagagactcgcagccatggagattataaaagatgcctgtgagaactggggtttctttgagttggtgaaccatgggatatccattgagcttatggacacagtggagaagctcacaaaagagcattacaagaagactatggagcaaaggttcaaagaaatggtgaccagcaaaggtcttgagtcagttcagtcagaaatcaatg

SEQ ID NO: 14125 - DNA, 264 bp, Glycine max
  Clone ID: 700964751H1
gaaaaggccgtggtttccgacgagaaatgctaaatcctcctacaggtgaagaccttacagcgttcacagtacacacaccttacagatgcctgtggcggtaacaatacccagttatcagcaccgcatctacgcttcactcatctacatcgccaaggctaagaaaaccaccatggccagcaccagcagcagcaatcctggtggggccttcaccaccctccaagagagggtcactttcgagaaggagataaaaaagagcaagttcat

SEQ ID NO: 14126 - DNA, 255 bp, Glycine max
  Clone ID: 700964755H1
gtcgaatctattagccacaaaacacacacacacatattctcacacaaactgcaactatggctactaccttatgttacaattctcttaacccttcaacaaccgttttctcaagaacccatttctcagttcccttgaataaagagcttccactggatgcttcaccttttgttgttggctataactgtggtgtaggatgcagaacaaggaagcaaaggaagaaagtgatgcatgtgaagtgtgcagtggtggaggctc

SEQ ID NO: 14127 - DNA, 259 bp, Glycine max
  Clone ID: 700964756H1
attattgttattattattattttgtttttccatttcaccactttcttctccctccgatttctccagaacagcaagggagaatcaattcctcatcgctgcaattctcatctttcactctctagattctcatctatctttcttccaacctcttctcttctatacccttcagaaaaaaataaaatagaaaccatagcttcagattattctagctcttcattttttttccttgttcaatattatgctgtaaaattctcaaact

SEQ ID NO: 14128 - DNA, 255 bp, Glycine max
  Clone ID: 700964758H1
ctcttcgctcccactcccacaagcctagaagacgtatacgcaattcttagagtttttcagattctcggaatcgaagagaagaataatcctgtgagcgaggacacttgtcagaaagtggttgaaaatctagcctcgtcttctcctctcaaggatttgttctataccttgttaaggccattttaaaatgcaatgtcaatggaaacgttttcaaggaaatgccaactcttgttgcagatggtcatgatgcactcactg

SEQ ID NO: 14129 - DNA, 256 bp, Glycine max
  Clone ID: 700964760H1
acgactccgaacccgaaccaagcgctgccgatttgttgaaatccgatgaggaattggcccgactcttgcaggcagaggaggaagcgcttatgttgcagcagtatgtggcgagcgaaaatcctcgagaatttgatagtagagtacggccccacgttagtcaagtccgcatgtatgaggatgcaacgcggcaggaggctgctcggaagtccgttcctatggaagagctcgaggagaaagctttggtctctttggccaa

SEQ ID NO: 14130 - DNA, 259 bp, Glycine max
  Clone ID: 700964762H1
ctcttcttccccaccatcacaccaatcaaacctcactctccctttctcccctgaccctctccctgccatggtcatgggagcctttggccacttcgaaccggtctccaaatgcagcaccgagaaccggtctaaccaaaccgtggcctcggacttggacggcaccctcctggtgtcccccagcgcatttccttactacatgctggtcgccatcgaagccggcagcttcctccgtggccttgtcctccttgcctccgtccct

SEQ ID NO: 14131 - DNA, 262 bp, Glycine max
  Clone ID: 700964763H1
tagctcgagccgcaaaacactattttattatcttcttcgtctgttctttgcattgaagaaaatatctttgaattgaagaaaacttgaaatcgaattgtgaaacagaaaataaaccaaaggaaatttttactgattgaattgcagagattggaaaaatggcgttgagtatgactcaacagatcgggaccctagctggtgcgacggtgccggattcctcggccggagaatcgaccgcggcggtgagtgccgccgcggtgtggaa

SEQ ID NO: 14132 - DNA, 233 bp, Glycine max
  unsure (1)..(233): unsure at all n locations
  Clone ID: 700964765H1
ctccaaataaggagactttgtccagacactcatttttaggaccaaatggccttcggggccaatggcttggacctagtgcggaaataaaggttcaatatccaagcagtggtgagctcacacaggccaaggattcaagcccgaatcaggctgggctatatgatcttgtggcaattanagatggcgatcaaggaccagttacatccacaatggactcagttctctctttggatgat

SEQ ID NO: 14133 - DNA, 260 bp, Glycine max
  Clone ID: 700964767H1
cgaggcgaagagaagagaaaaattaagatggaggggaaggagcaggatgtgtcgctgggagcgaacaagttcccggagagacagccgattgggacggcggcgcagagccaagacgacggcaaggactaccaggagccggcgccggcgccactggttgacccgacggagtttacgtcatggtccttttacagagcagggatagcagagtttgtggccacttttctgtttctatacatcactgtcttaaccgtcatgggagt

SEQ ID NO: 14134 - DNA, 262 bp, Glycine max
  Clone ID: 700964724H1
gagcatacgaaggtaccaaagacgaggagacaggtgaaagggcttcttttgatctcaacaaggcatattcaagctgtgacctttttcttctaagaacctccagagagcttgaaggagactggttggattatcttgctggtaattacaaggttcctgtggttccagttgggttgcttccaccatccatgcagataagggacgttgaagaggaagacaataaccctgattgggtcagaatcaaggatcggttagacacacaaga

SEQ ID NO: 14135 - DNA, 256 bp, Glycine max
  Clone ID: 700964687H1
ccaggtggaacatgttagagctgagaggaatttgctggctgaagttgccagtcattgcattgtgaaactttactactcatttcaggatgctgagtacttgtatttaattatggagtatctgcctgggggtgatattatgactttgctgatgagggaagacacgttaagtgaaaatgttgctagattttacattgcacaaagtgttctggccatagaatctattcacaaacacaactacattcacagagatattaaa

SEQ ID NO: 14136 - DNA, 252 bp, Glycine max
  Clone ID: 700964691H1
tacaaacatggcaatgaagaagttcttgtgggttgttctgtccctttctttggtccttggagtggccaatagctttgattttcacgacaaggatttggagtccgaggaaagcctgtgggacttgtacgagagatggaggagtcaccacacggtttcgcgaaccttggtgacaagcacaagcggtttaacgtgttcaaagcgaatgtgatgcatgtccataacaccaacaaaatggataagccttacaagctg

SEQ ID NO: 14137 - DNA, 253 bp, Glycine max
  Clone ID: 700964693H1
gctatctgcttcctcgtagtacttcattgagagagacatggacactgtactaagtactacgctgctactcatgttggcatgctccatcgtgcatgttcttcgttcactacaagcaagaatgagaagaaaatcaaactacaatcttccaccaggaccctctcttctcaccatcattagaaactctaaacaactctataaaaagccacagcagacaatggccaagcttgccaaaacctatggccccataatgcgt

SEQ ID NO: 14138 - DNA, 260 bp, Glycine max
  Clone ID: 700964695H1
tatctctcttcgttttgttcttccttgcgctcctcctcgttcgttcgttctccctcgcgtagatcggcaatggcggagaccgagacgtttgctttccaggctgagatcaaccagctcctcagtctcatcatcaacaccttctactccaacaaggaaatcttccttcgtgaactcatcagcaacgcctctgatgctttggacaagattagatttgagagtttgacggacaagagcaagctcgatgctcagccagagttgtt

SEQ ID NO: 14139 - DNA, 259 bp, Glycine max
  Clone ID: 700964696H1
ccaagcttctctgttaaaaaaaaatttaggcgtctaaagggccaaagcttagaaagttgaagctttttttgttgaggtgaaagtgaaatggttggcaaggataatctgagggctgaggacttgaacttgtgctttaagaagcttatgatggtggccgggagtgggaacagtgagaaaggggtgaacttgaaggttggggtgatcaccgagtggaaggatattcctgtggagcttctgatgcaaattctgtcccttgtgg

SEQ ID NO: 14140 - DNA, 270 bp, Glycine max
  Clone ID: 700964702H1
gcacggtggggctgataaatttacccctgacaaggggactgactggttgaccttgaattcaggctcaactccaaacccttacggtctccctgttggctgtgaatatttcctagtgacagtagccatgttacctgataccaccattcattcatcctctccttcctgatcctgcttcatccctggcagattagacgtgatggaagaatttaattgtacataaactacattcaaaatccaaatgctcttttcttatggtcggttaaccatttg

SEQ ID NO: 14141 - DNA, 272 bp, Glycine max
  Clone ID: 700964703H1
caagacacaaacataacaacataagaagagagagaaagagaaaacagagaaaaagaatgaatgaataaaataatcattcactctgtttctattcttctttctaccatagcataactatgatatgaacaccatataataattaacaacaataatttaataatactctcttcattgtaaattccatcttcacttcacttctcttctctgttctgtggagtatttaatcatttcgtaacaacatactttagttttcattctctcaaatttttttt

SEQ ID NO: 14142 - DNA, 266 bp, Glycine max
  Clone ID: 700964704H1
caggtattggcaaacagaaacaccctttctagcatagggatttgatctctccaccttggtgaaagccttgtgacccataaggcttttacagaaggtgggattttgactagctgggtgtttggctgttgagtttatggagggccaagttccttgttgaacagtgtttgtgttgcctttatctgcagcttttaattgaaccaatcctaccctctttgtttccatatgaaaagatcggttttttgtgattcctccgctcattgttgttg

SEQ ID NO: 14143 - DNA, 265 bp, Glycine max
  unsure (1)..(265): unsure at all n locations
  Clone ID: 700964705H1
tcttcatttgccaccaaaacattttctgtcaactggtttagatgtaccagtcattcaagagcggtgtgaattactggataaatatttgaagaaactcatgcaactaccaacagtttcggaatcaattgaagtatgggactttctcagtgttgattctcagacgtacatattctcaaattctttttctatcatggaaacattatcagttggcttgaatgccaaaccatttcagaagactanaaacacttcgaacttctctgcacct

SEQ ID NO: 14144 - DNA, 264 bp, Glycine max
  Clone ID: 700964706H1
aaaattaggagtagggttttgctaccaaaacttagcaaaacagacagcgatcagccttatcagcttagaagtcatcattttgaatacttctaactgaaaaaatgtaaatagtataggaaaaataggttttcccgcaaatatgtgtttgccattaaagaaattaagggttcttttccccttgttttctgttttttctttcttttttctatgtactgatgagagaaagaattagctagataaagtagtatgtgtatgactaaggca

SEQ ID NO: 14145 - DNA, 265 bp, Glycine max
  Clone ID: 700964708H1
accaccacaacagaaacaacaacaagcagcaccttcttcgctccaacgtcggaaccctcagccttagggttttcgcagtgtctggaaactccgcgttcaaaatgaacctcagcgagtacctcgtcactctggagaaacccctcggcatccgattcgcgctaacttctgatggcagaatcatcgtccactctctcaccaaagggggaaatgcggagaggtccaggataattatggtgggcgacacattgaagaaagctggcgattc

SEQ ID NO: 14146 - DNA, 264 bp, Glycine max
  Clone ID: 700964709H1
ggaaattccacctttgcttgaaggagatgggaagatagaggtatggcgaatcaatggaaatgccaagactgcattgccgaaggaggagattggtaaattttatagtggagattgctacattgtattgtacacctaccattctggtgagcggaaagaagactacttcgtgtgctgttggtttggcaaagacagtgttgaggaggaccaaacaacagctactaggttagccaatacaatgtctacctcattaaagggtagacctgt

SEQ ID NO: 14147 - DNA, 261 bp, Glycine max
  Clone ID: 700964710H1
gattgccactgtggaatgcttctgtctagctgttcatcaggctgtaaatgtgggagctcctgtctcaacaaaccatttcagaaccgtcctgtgaaaaaaatgaaattggtcaagaccgagaaatgtggttctggaattgtggcggatgaagatatcaagcttggggagtttgtcattgaatatgttggagaagtcattgatgacaaaacatgcgaggaaaggctttggaacatgaaacatagtggggaaacaaacttctac

SEQ ID NO: 14148 - DNA, 263 bp, Glycine max
  Clone ID: 700964711H1
caaagttgcaggtgcatggccaatacttggtcacctaccactattgagtggttcagagacacctgatagggttttgggtgctttggctgataagtatggacccatattcaccatcaactatggtgtcaaaaaggctttggtaatcagcaactgggaaattgctaaggaatgcttcaccaaaaacgacatcgtcgtttcgtctcgccccaagcttcttgccattgaactcatgtgctacaaccaagccatgtttgggtttgcac

SEQ ID NO: 14149 - DNA, 262 bp, Glycine max
  Clone ID: 700964712H1
agccgctattctactcgcaagcaaatcagaacaagagaagagaatggcaggagcagaggggctaaacagagaacagtacgtgtaccttgcgaagctgtcggagcaggcggagcggtacgaagagatggtggagttcatgcagaaggtggtggtggggtggacgccggcgtcggagctcacggtggaggagcgcaacctcctctcggtggcctacaagaacgtgatcgggtctctgcgtgccgcgtggcgcatcgtgtcctcc

SEQ ID NO: 14150 - DNA, 261 bp, Glycine max
  Clone ID: 700964713H1
ctcagctgtgcaagttgatgtttctgggaaccgcaaggctgttgttattcatgtcccttacagattaaggaaaggtttccgtaagattcatgtcaggcttgtcagggagcttgagaaaaagtttagtggcaaggatgtaatcttggttgccacccgaaggattttgaggccaccaaagaagggttctgctgctcagcgtcctcgtagtcgcactcttactgctgttcatgaagcaatgctggaggatgttgtattgcctgc

SEQ ID NO: 14151 - DNA, 266 bp, Glycine max
  Clone ID: 700964715H1
aacgaggttttaacgctatcatatcatctgtcctctttcttctctctggatttttctccatcatttcagggctttctttcttctcttttgcctcccatattccattctcctcaaaatatctctacattttcctctctaccccaacaaaattccaaaaatttcccctcctatctccttttcacgtcacttaccacaactgggatgctccactttcttaaggattatttgttaactgagtcctaagtgtaattgagatggacggtgat

SEQ ID NO: 14152 - DNA, 266 bp, Glycine max
  Clone ID: 700964716H1
atggatcttcttgacatcgactccattgccgctgccataaagggttgttccggcgtaatccaccttgcatgtcctaacatcattggtcaagtcgaagatcccgagaaacagatattggaaccggcgataaaaggaacggttaatgtgttgaaggcggcgaaggaagcaggggtggagcgcgtggtggcgacttcatcgatttcgtcgattatgccaagtcctaattggccagctgataagattaagggagaagagtgttggacgga

SEQ ID NO: 14153 - DNA, 266 bp, Glycine max
  Clone ID: 700964717H1
ctcttttctgcatgtttgttctctcaacgactcctccgcgaaagagtattattcaatattttggttgggttgaatcccggggttgaagcgttgcagacatcacggctattctaagagtgtctcgctccctcattcatgtccgatctgtacgacggaggacgggtagttgcgtaactgccgttaacccttcgccgcacggtgggcgtggtgctttgccttctgaaggtggtagcccttcagacttgctcttcctcgctggtggtggt

SEQ ID NO: 14154 - DNA, 267 bp, Glycine max
  Clone ID: 700964719H1
ctctgattctctccatatattatctcaaacccctctcacagaatgggaagtgctggaggaactgactatggtgcatacacttatgagaatcttgagagagagccttactggccatcagagaagcttaagatttccatcactggtgctgggggttttatcgcgtcacacatagctcggcgcctcaagacagaggggcattacattattgcttctgattggaagaaaaatgagcacatgactgaggacatgttctgtgatgaattccat

SEQ ID NO: 14155 - DNA, 263 bp, Glycine max
  Clone ID: 700964721H1
gataattttataaagagcccctaacggttttgttggagtgagatcaaggaaacagagaaaaaatggcatcctcaagagcttgtaccaaacccatcatcttcctctctgccttcaccaagtcaaagttctctcatcaatatcatgtctccttcatcaacaccacctcccacatacccatctacccaaagctctctcagcaacgttccttggtggtcaacaacgtattgaaaacagttgagccgacagaaagctctttgcggagt

SEQ ID NO: 14156 - DNA, 261 bp, Glycine max
  Clone ID: 700964722H1
ggagttttcagtgaatagggaaatgtctttccacaatcgagcatttttgatggggaagagtcctgagggtttgaatgatggtgacatgacaaaggattcttctagaattgagtccaagcgtgctcatcagtggttcatggatgaccctgaagtggatatgtttcccaataagaaacaagccgtagaggctccgaacaatttgttatctggaatgctcaactccaatatttctttgtggggaaattcctcaggatttcactc

SEQ ID NO: 14157 - DNA, 261 bp, Glycine max
  Clone ID: 700964723H1
ctcctgcccactgaagtcgaacccctaatggcttctcaagttcttcttcaacaggcactgtttgcccccaagctaagtttcccttcttcttctcgtaacgtcgcgttaatttctagggttccttccaccccaatttcatggcgttgcactcctctcattgctaagcctagtttcgctgtgagagctgactccaacgtcgaaggcgctggtgaagccaccgaggatgttccttcgtataatgttgatgaagtttcggaaggc

SEQ ID NO: 14158 - DNA, 259 bp, Glycine max
  Clone ID: 700964686H1
gcggtcgttgacggcaaagagagacacaaacgtaatctgtgagtttggaacattgattcgttgtttcctctgcaaaatcaaatcctcattgtgattgttgatgaacaattgaagtatccctccgatttgaagattccggtgacggcgagccatggccaccggcggcgacggtgacacttccaaacaagagctcttccagctcatcaaacgcttcggagcttacgtcactttcaagatctccaatctcttccctctctct

SEQ ID NO: 14159 - DNA, 262 bp, Glycine max
  Clone ID: 700964657H1
gtgaattatcgattccaatattgaaatttttggatatatacgaaaaaatacggaccatctcatcatctacgttttgccaattgagaaatcctaatcctattattcgatttgaacccatcaccaatagaatacctagattatagatatgaaagaatatttttggtaaaagtaattattgataatttgtaataaaagactcgactcttactacaaatccattttcgaaacttatcttatatatctcctcacaaaaatttaattt

SEQ ID NO: 14160 - DNA, 261 bp, Glycine max
  Clone ID: 700964658H1
caccgtacaacatattttggaagtagagatcatggagaagaaaaaagatacaattataaagacagatccttaaatgcagctgcctacaaggatttgataaattcatacttgaagaatattaatactagaccaaccaatgaagaaccagctattgctgaccagtggaagcaaacggaaacaccaagcagcattgggcaaaagacagaaactgaggtgctccgcaaagaggaggcggaagaagaatctgaaatggatatgctg

SEQ ID NO: 14161 - DNA, 244 bp, Glycine max
  Clone ID: 700964659H1
ctctctccctctccctctccctccaaattttccttcattctcacgcgccgccgtggtttccgccggcggctactccctatccaccgcgcatccatcccgcttccctctcctcgcttttctcacaaaacaaaaaaaattaaaaatttctccgaagactgtgtattatcgttatcgatcactgagttaggttttgctgttcttcctagggttttattgtgtccaataacaagaggagggggaagag

SEQ ID NO: 14162 - DNA, 260 bp, Glycine max
  unsure (1)..(260): unsure at all n locations
  Clone ID: 700964660H1
gaaatttccaaattctcaattgtttcttccattcttgttgttgttgttcttcgcgataactccctttcgcggttcagggcagcaaacggattggaacatcgaagagactcaacatggaaatggggttcgccgcagagttcttctgagtttcaaagagaagccctcaggaagtaacgttacctttgaatgtactccttcgggtccttgtgtgccctgtctnctatctgagaaggttccttttttttttaaacccctcaaat

SEQ ID NO: 14163 - DNA, 257 bp, Glycine max
  Clone ID: 700964661H1
cccaatctcaaagttcctacaaaccccagaaggtggatgaaggtgaagatggatggcagactgttggtagaaagccttcaaggcatccacataaggttcaaaaggacaactggaacagctataaacgacctgctgatgagcaagaatactctaatgaggttgaagttggtgctgatgtggagccctcagaagatgaacttgctgatctgtcaagagcttgtgaaaaactctgggctcttgatttaaatcgtttggta

SEQ ID NO: 14164 - DNA, 264 bp, Glycine max
  Clone ID: 700964663H1
gaagaaatcaaccgaaggttccaatcaattccatatgtggctgcactcttcagtgcaatgctttggatcttttatgcctatgtgaagaccggagaaacgcttcttatcaccatcaatgcattcggttgcgtgattgagacaatttaccttgccgtatttatcacttactgcccgaagaaagctaggatgtcgacattgaggatgattgttttgttaaattttgggggattttgcacaattgtcctcttaacccacctactagca

SEQ ID NO: 14165 - DNA, 278 bp, Glycine max
  Clone ID: 700964664H1
attcagctcgataaaaacacaaaaagacccacagagaggaacatggcatgtccagcaatggcaaatgggaacggctcattgaagaacttgaagctaaatgacaccaagggaaagaccatcacttgcaaagctgccgtggtatatggtcctggagagccctttgtggtggaaaacattcttgttcatcctcctcagaaaatggaggttcgaatcaagatcctctacacttccatttgtcacaccgatcttagcgcatggcgaggcgtgaacgaggctca

SEQ ID NO: 14166 - DNA, 268 bp, Glycine max
  Clone ID: 700964665H1
tttgctattacctctttttccaaactctaaaaatttttagttccacaaaaccagaccataatggcagcagcctcggcctcatccaccatgatatcaacaccagccttatctccaagcacaagcatccaaaagcaccatcatttgaagccatccaacgtgtgctttcaaggccttagacccctcacaaggttcacaaccagagtgagcagcaccaccaaaagggttattccaaagggtggtgtcggtgttagagctgaactcaactcag

SEQ ID NO: 14167 - DNA, 258 bp, Glycine max
  unsure (1)..(258): unsure at all n locations
  Clone ID: 700964667H1
gggatgcttcaggttgggcaagcaatggtggcaaatatagagcacattgaacgtggggtccctgnggtgctgagttctctgacctggtcctgcatggttgtgcagttgatcccattgagcatgtggccaagtgtgacagtgccctaggttctgaagaatttccctctggtgtcacccaagtacagatgaccaaaatgagaaacttcaggttgaggcacatgacatattcttactgctatgacactgttagatacaaag

SEQ ID NO: 14168 - DNA, 262 bp, Glycine max
  Clone ID: 700964668H1
cgcttttgtcaaagagtatattgctgaaagcaagcctcttgggggtttaatatttttgcttccccgaatgttcagttttgagaacaaagatggtatgggaagtaatcatcaagatgagagtaaagaaccgctgaagaatgtattggatgaacttgaaaaaatacttatacatgccaacttaccttatcctgtgtattttgcattcgaggatgatagcattgatgctgtgttaactgatatcaagaagaatgatgtcactggt

SEQ ID NO: 14169 - DNA, 259 bp, Glycine max
  Clone ID: 700964669H1
gataattcagtggctcaccatatcaaatttaaaaaggataagatccgtgaatcgttgaaagttctcgagaatttaattcctggtgcgaaaggaaaggagccactgttagtcattgatggcactattgagtacttgaaaattttgatgtcccaaactggtgctcttggggtgaaatatcactaagtagtactcacagtcacagccactgatgttacagtatattggttgaaggacaattcatggtgaaaagatgtagctc

SEQ ID NO: 14170 - DNA, 257 bp, Glycine max
  Clone ID: 700964670H1
tgatcagtgcagagctggactcatgaccctttccatgtgatgagacgtgacaatcagaactgaagatagagactgaggaaaaccagtagctagtggttgagagtcaagagtgatggatatctccgacatcaagtcaccagcagaaggctcccaacaagggacaccaggggattcactgcgtagaaagaagctagccatatacctcatgtgagtctgaggatagaaggatggcctcaggtcgtgggtacacagcagga

SEQ ID NO: 14171 - DNA, 260 bp, Glycine max
  Clone ID: 700964672H1
gaatgattaacggtaacggaagaaacgagatctcgtcgtttcagtcgttatctgctcagctctggagagcggtgacacgtgcgaggaaattcaacgacccggccaaaacgtcgacgtttcggatggcggtgaattgccgccaccgtctggagccgaagatggacgcgttctacttcggcaatgcgattcagagcatcccgacggtcgcgaccgtcggagacattctctcgcgcgatctgcgcttctgcgcagatcttctg

SEQ ID NO: 14172 - DNA, 259 bp, Glycine max
  Clone ID: 700964673H1
atgagaatgatctgaaatagcttttgggggaccagggagtgactaacattctggatttgcattctttccccagtttactagttatttcctaaatatcaatgcttgttattccgtgtgtcaattttcttgggcaatagcagtgtttgtttgttctctatatcatacatttgacttcatttgtactaggaagaagaattgagaaaaggggaattggaagcagatgcagataggatgatgagagagtacagagctcaactag

SEQ ID NO: 14173 - DNA, 261 bp, Glycine max
  Clone ID: 700964674H1
attcaaacacaacacaacacaaagtgtcacaaacacacactccaaaactcagatctcgcctcacctctcttgttctcgttcccccaccccactccctcattttccttcctctacccccatttttctctaaccacccctcacacacttcacttacacatagagagagagaaagttcggtgcttttgtatagaatcatcaccccattaccctgcattcaccatttcatgcattgattctatctgggatctctctcaaaagaaa

SEQ ID NO: 14174 - DNA, 258 bp, Glycine max
  Clone ID: 700964675H1
ttttcctctttcgcagctcaaactcaaatccccatctattctctctccgtacttgatgtcagttttgttctcaatcattcgatctactcttagactggtcaggacagtagcacataatcttcttctataacatcgaccggggtcgtcctctcgataaatgctacctctgcgtccacaatcacaggttggagcaccaaaaacatcgctgtctcttgtttcctcagactccctcctgtctcctgatgaacctaggtcaaa

SEQ ID NO: 14175 - DNA, 258 bp, Glycine max
  Clone ID: 700964676H1
ggagaagaagaagggtgagctaaagtcaattttccttcctttcctttccactagtcacataatcccgctagtggacatggccagactcttcgccttgcacgacgtcgacgtcaccatcatcaccaccgcacataacgccaccgttttccaaaagtccatcgatttagatgcgagtcgcggtcgccccatcagaacgcacgttgtcaacttccccgccgcacaagtgggtctccccgttgggatcgaagccttcaacgt

SEQ ID NO: 14176 - DNA, 240 bp, Glycine max
  Clone ID: 700964677H1
cacaaataatgatattagtcctgctgttataccttcttcggtgagcattttggaagcccggagttgtcgaatatgtggaacgcaagttgaagctggatcttgtgatccttctgcggtggctgtaggatcgatattgggctccgtatctaatcttcgtaaagatttatcgctcctttcagctccctctaaaactggaaggagtgtgcaatgggactctgacatgtcatcactgccgtgtgg

SEQ ID NO: 14177 - DNA, 257 bp, Glycine max
  Clone ID: 700964678H1
ctcttctcacttccttgtcttcctctctctcaccctttgaaattctctcacttctattttagattctcaattcgttattgtttttggttcacttggttcatattcaagcccaattttggtgtctcacttattggttttccaattggagtgattaaaaagttgattttgggaaatgggtatgtgaagtttggttttttgatttctgggtcttgaaattgaggtaaaaaagttgtcaaattggagagaaaattcggggt

SEQ ID NO: 14178 - DNA, 262 bp, Glycine max
  Clone ID: 700964679H1
gatcaactttgtttaggaattttacacttcaagaaagaaatttcatccttctctgtagataattccatgacttgatagttgatacttattgatcaccagtctgctgactaagaaatgccctggacagcctttttgtaaagccacatcattaccaaaaaccttcctctcaacctctctgaactttacacaggaagttcttttccaagccattttttcttgattgggttaactaaatttcaaataaaaatgataattcctacaa

SEQ ID NO: 14179 - DNA, 264 bp, Glycine max
  Clone ID: 700964680H1
ctcgagccgctcgagccgtaccaatcactacataaactcttcatacttcacaacacaacacaacacacacaaatcttctttcaaggtttttttttttttttttaaaaaatttctcatcgtatctgaaacaacgaatgatccatggccccttcattcgacacaagtcctcatacggtatgcgtaatggatgcttcgggccacttgggcttaagcctggtccaaagactcctccaaaggggctacaccgttcatgcctccgttcaa

SEQ ID NO: 14180 - DNA, 282 bp, Glycine max
  Clone ID: 700964681H1
gctcaggttcggctctgaggctttaattggtataggcgtgccaaggtcttgttaattttgagcgttaagtgctgcaactaatcagatcccaagaccttggcctaccttgccatacagaaaaaaaaaaagcaaaaataaaagccaaggtttggagccaacaaaaataaacacaaagcacaagtcatgcaaagaataatggttggaagtgcaccaaaggttgctttcaccctcttggccactttcgccattgtcattccatgccttgaggctggcattgctgag

SEQ ID NO: 14181 - DNA, 258 bp, Glycine max
  Clone ID: 700964683H1
gaaagggtgagagagaaagaagaaggaaaggaaagatggatggttctgggcagcagcagttccagctcacccgcttaggtcggatctattttctgccactcttcactttcctccttcggtttcgtcagaagccacttggaactccaacacctttccatcatcccaagtaacacacaacacaacacaacacaacacaacacagcaacaccaacttcctctttctttcttttctcaaacacataaaaccataactagttc

SEQ ID NO: 14182 - DNA, 99 bp, Glycine max
  Clone ID: 700964684H1
gcagagcaaagcagcagtaatgaagcgattattgattagtacaaagcacaagagaaaaacaagggattttggggggcccctcatcacccctggggcttt

SEQ ID NO: 14183 - DNA, 262 bp, Glycine max
  Clone ID: 700964656H1
ctggatattttgtgggctaaaagttgcgaggggttgcaatgggtaaaatcagtagagcgtgaagaaaaagtgggctcaatagtatgttcaaatgtatatcacttcagtgtcaatggttgcaacctgtatgatgattttttttcaacaggtttcgtgcagcttgatcatgtgaaaactttaagcctaagggacaataatttcacattccttcctgatagcattcgagaattgcaatttttaagaaaacttgatgtgagtggtt

SEQ ID NO: 14184 - DNA, 270 bp, Glycine max
  Clone ID: 700964622H1
gtgctctctccaccctctattatattataaacattttgccatgacataactaaaaacttcaaaaggcagggtcatcttcagcttctctcactttgatgcaacctttaaattagtccaatttcaattattcaaagacagtcccacccacttcccatctttctctcttcttttctgtgcagttgaggaaaaaaaactatgctccaatccaacaacaagcaaagaagcttctcctcacttttcttctttatcttttctctctaagccttttgt

SEQ ID NO: 14185 - DNA, 270 bp, Glycine max
  Clone ID: 700964623H1
gtatgtaacatgtacagtcatacaagtggtgtaaataatttattcatagcctaagagcttgtatctcaattggggtgtgacatttatgacggaagtttgatcctccgccaagctaccccttcttgtaccaaggtatatatattgaaaaaatcaatctacataaaatgtaatatatcattattttactcctccaaaaaaaaaaaaaaaaaaaaaaaaaaaaaaaaaaaaaaaaaaaaagaaaaaaaaaaaaaaaaaaaggggggggccccc

SEQ ID NO: 14186 - DNA, 269 bp, Glycine max
  Clone ID: 700964624H1
aaacttgtagcctctcatggaggctgataatggaactacactcaatgtgttgatgaaagcatggactaaaaacgagcttagagagtggaagccctgtgccaacgcaagtcttcctgaaacagaattgccaaagtcaaatgggttccttataattgaagcaaatggtggattgaatcagcaacgcttgtcgatatgtgatgcagttgctgtggctggactactaaatgcaactcttcttattcctatatttcatttaaatagtgtatggc

SEQ ID NO: 14187 - DNA, 267 bp, Glycine max
  Clone ID: 700964625H1
ggagtgctggctatttttcatttgctttgtgggatgctcgtacaagagagctactgaaagttttcaattcagatggacagattgagaatcggttggatgtgtcctcaattcaagacttttcagtggagcttatttcaagttcaaggaaagacaaaacacaaagttccattgggttctttcagcgttcacgtaatgccataatgggggcagcagatgctgttcgtcgagttgcagcaaagggaggctttggggatgataaccggagaa

SEQ ID NO: 14188 - DNA, 265 bp, Glycine max
  Clone ID: 700964626H1
gtaagattaaacaccaaaaagatccagattctcctggtcttactatgaactatgaagggagcttgaagtgatgttcggataaaaggtttaggtagtggccaaccttaacaaatcaaaagaagttagcaattgataaaaaaaactcacagatgcatcatcaacttgctctacctaccaccttattttcggccttgtgaggaacaaagggtctaaataaatagccttgtataacgactctaattaactcaccctttttgtcaaaact

SEQ ID NO: 14189 - DNA, 263 bp, Glycine max
  Clone ID: 700964628H1
cttgaaagcgagaacacccttgtttgttttagctcctaagttggaagcttgtagattgattttcactgccaagcaaaagaaagtgagggaatctaacccttaattgaacacaatgagttcattttacatgtctctgaacccttcaatttctcaatcgtgttacaaacccaagcaatttttcaatttggagagagagagtactttggtgggaagaagtcctgttattcagattagatgccggagggttgtgagtgcgtgtctta

SEQ ID NO: 14190 - DNA, 267 bp, Glycine max
  Clone ID: 700964629H1
ccttctgaggttaaagcaaaaaacaaagagagagagagagagaaaatgatgaagccatcgatgctcagatctctccactccgccgccacccgcggcgcctctcatctcttccgccgtgggtacgcctccgagccggtgccggagcgcaaggtagccgttctcggcgccgccggcgaggatcgggcagcctctctcccttctcatgaagctcaatcccctcgtttcgagcctctccctttacgatatcgccggaactcccggcgtcgc

SEQ ID NO: 14191 - DNA, 266 bp, Glycine max
  Clone ID: 700964630H1
gggagttcctaaggattacgttggtgaagatgttactgttgacaacttttttgctgctatacttggaaataagtcagctcttactggtggcagtgggaaggttgtggatagtggccccaatgatcatatatttatatactactctgatcatggcggtccgggagtgctagggatgcctactaatccatacatgtatgcatccgatctgattgaagtcttgaagaagaagcatgcttctggaacttataaaagcctagtattttatc

SEQ ID NO: 14192 - DNA, 270 bp, Glycine max
  Clone ID: 700964631H1
gacgagtttcatgcttacgtgcatggaaggttaccatacgagaaactgaagcctgatccagtattaaggaaccttctgctttccatgcctcagcgtaaaataatattcaccaatgcagatcatgcacatgcagttaaagttctcaacagattgggtttggaagattgttttgagggcatcatatgctttgaaacgcttaatcctcccaaacaaatcaattgcatggatgtaccaaatgataatcatgtgctcacagatttaacagaaaat

SEQ ID NO: 14193 - DNA, 272 bp, Glycine max
  Clone ID: 700964632H1
gctcatcacagccgatcttacatcaattattgttcaattgatctctactgctggtagtcttctcccctctgttaggcacaccctcacaaacgcaaatcccttggttggccagcttgaccagcttcatgggattaacctcccttttgaatcagaaccaagtagtggtattaggccacaaaataacagtggaaataaactgtttgatcagtccattcagaatgatctaccaaataaattggaaatggagcaaaactacaatatggaagagcatg

SEQ ID NO: 14194 - DNA, 274 bp, Glycine max
  Clone ID: 700964633H1
ggcctagccagctagcgcttcttctctcgcattccgtggagatctagtgctgccaaacctcgctgaaaattagggtttcgtttcggaggtagacgaagatgttcggaagggcaccgaagaaaagcgacagcaccaggtactacgaaatcctcggcgtttcgaagaacgcttcgccggatgatttaaagaaggcttacaagaaagccgccattaagaaccaccctgacaaaggcggtgatcctgagaagttcaaagagcttgctcaagcctatga

SEQ ID NO: 14195 - DNA, 264 bp, Glycine max
  Clone ID: 700964635H1
aacgggcgtgtggttcgtgttggtctttcagtacgacggcagactatggaggacgtcattatctggccactggcgagctcgtgagccttagcgagcaacagcttgtggattgcgatcacgtgtgtgatccagaagaatatggagcgtgtgactcagactgtcatggtgggttgattaacaacgcatttgagtacatacttcagtctgtgggagtacagaaagatgaggactatccatacaccgggagagatggcacctgcaaat

SEQ ID NO: 14196 - DNA, 261 bp, Glycine max
  Clone ID: 700964637H1
cagctatctagcttgttctcttttattttttttcggttcaccggcggcatggggaactgcaacgcctgcgttcgagtcgatgacgtggcagactcaaaccgcggcaaaaagaataagaaaaccaaaccgaacccctacgcggaggaagagatacgctccggcgttccgatccgtgtgctgaaggacgtgacgtcacggagcctcatcggcgacaagtacgtgataggccgggagctaggtcgtggcgagttctggataacg

SEQ ID NO: 14197 - DNA, 264 bp, Glycine max
  Clone ID: 700964639H1
ctggatctattgaagaagagtgccgcagttgcagagatcacgagatagttctcaacaaatgagaacacttttacagtaggagggtcttttgctgttgaccctctgacacaggtcaaagcaaggctcaacaatcatggaaagctcggggccctcctgcagcacgagatcataccaaagtcagtgtttactgtttctggtgagattgacaccaaggccctggataaaaatcccaggtttggattggcaattgcgctcaaaccttga

SEQ ID NO: 14198 - DNA, 264 bp, Glycine max
  Clone ID: 700964640H1
gttccatggagcaaaggagctgtttttgtctgaccattatgatgttcagagtgctcacacaattgaagggaagtgtgttgtgcactcttttaagaactataccaagcttgagaatgtaggtgctgaggattactatactaggtttgagtacaaggctgctactggggctttcacgcctgaccgtgttgctgtgtattgcaagtgcgagatgccttataacccagatgacctcatggtgcagtgtgaggggtgcaaggattggta

SEQ ID NO: 14199 - DNA, 255 bp, Glycine max
  Clone ID: 700964644H1
gacaagcagctcaagaaaaatctgcaaagaataaaacaagaggaggaaatgcaacttacttgttgatataaacttcagacagagcgagttgttgtaaagctagccttgttgcagccatggccacccacgcggctctagcttctacaaggatccccactaacaccaagttcccatccaaggcttcacactctttcccaacccaatgcgcctcaaagagacttgaggtgacagaattctctgggctaagatccactt

SEQ ID NO: 14200 - DNA, 267 bp, Glycine max
  Clone ID: 700964648H1
gagaaagatagagagaataacagcacctctttctctctgtctctctcccctcgttgatcccaaatctactagggattctcattcgatgcgattcggccggaagctttcgttttgcggatttttttaattattatttttcctggctatcaggaaagttgaaaaaaagatggaccatgacaagactggatgccaagctcccccagaaggtcctatattgtgcatcaacaactgcggattttttggaagtgcagctaccttgagcatgtg

SEQ ID NO: 14201 - DNA, 273 bp, Glycine max
  Clone ID: 700964649H1
gaagcaggaacaagcagcaatggcgccgaatgtacacacgcaaggttagcagaaaccccgaattgataaggggaattggaaagtactcgaggtcgcagatgtaccacaagaggggcatttgggctatcaaggccaaaaatggtggcgttttacctcgccacgaccctagacccaaacctgaaacacccgctgaaaaaccacccaaattttaccctgctgatgatatcaagaagccccttgtcaacaagcacacacccaaacccgctaagctca

SEQ ID NO: 14202 - DNA, 265 bp, Glycine max
  Clone ID: 700964650H1
caacctcgatgctcgccaatcctctctcctcgctctcctcaacctcgctgttcgcaacgaacgaaacaaggtcaaaatagtgacagatggtgctatgcctccactggtggagctcctcaagatgcaaaatagcggtatacgagaattagctacagctgcaatcttgacactctcagctgccacatccaacaagcccattattgctgcttctggagccggacctctccttgttcaaattctcaaatctggaagtgttcaaggaaaa

SEQ ID NO: 14203 - DNA, 262 bp, Glycine max
  Clone ID: 700964651H1
gaggacttcgacatgccgacggcggaggcaatgggcgaggacttcgacttcgccggcgccaccggcggcgacctcgacggcagcagcagcaaccccatcttgaaggtcggcgaggagaaggagattggaaaagagggtttgaagaagacactacttaaagaaggtgaaggatgggacactcctgaagttggtgacgaagttcaagttcactatactgggacgttgcttgatggcactaagtttgattccagcagagataggg

SEQ ID NO: 14204 - DNA, 167 bp, Glycine max
  Clone ID: 700964653H1
ccataatcatttagctattaagagaatatgtttttaatgaccaaattgtcctcaacctcaaatatacttcctcctcttcatactgcaaacacaaccaacttcttcaaccacaaccacaaccactttgtgcattaaaacccccacccctctcagttccacacaacata

SEQ ID NO: 14205 - DNA, 263 bp, Glycine max
  Clone ID: 700964654H1
cggcaactcacaaaattggaggtaaaggagatagcagacataatgttgaatgaggtgtttgatagactgaaagccaaggaaattgatctctcagtaacagaaagatttagggagagggtggttgacgaaggatataatccgagttatggggctaggcctctaagaagagctataatgcgacttttggaggacagcatggctgagaagatgcttgctagagagattaaagagggtgactcagttatagttgatgctgactccga

SEQ ID NO: 14206 - DNA, 262 bp, Glycine max
  Clone ID: 700964655H1
gcttttccctcgttgaaatgaaaatgggttcttctttgtggactttgtgtctaattttggcttcactagcctcttctgcattctgtgcctttccacggaggccagtggatgttccattcggcagaaactacgttcccacttgggcttttgatcacatcaaatacttcaatggaggttctgagattcaacttcatcttgacaagtacactggtactggcttccagtccaaagggtcatacttgtttggtcacttcagcatgaa

SEQ ID NO: 14207 - DNA, 268 bp, Glycine max
  unsure (1)..(268): unsure at all n locations
  Clone ID: 700964621H1
cttatggacaaaggatgggtttcctctcaatctcttcttcctcccacacccgacaatcatccgnttcctctcctcggattccccgtcaaactcagccgccccaccatggaactccaccatgataaccgcaaacttgtcgctgaagtcgacttcttctctcatactccgccacccaacctcgtcaagaaggaacttgatcaaacacctcttcacattaatactggtttacaactccttactgctaacaccaggagtgaccaatctaccg

SEQ ID NO: 14208 - DNA, 235 bp, Glycine max
  Clone ID: 700964584H1
ctaatccaccccaacccaaccctattgaattgaattgggggaagaagaacatagaaagaagaagaaaaatctgcacaattgttgtaattgaacgatgtctgctgcggtgtgcggaagcaagagatctttgttcgaagagcttcccccttccccgccagtatccaagaggctccgctgttcctcctcccctattcgcctctctctcccttctctcatcgagcaccttcgccctctc

SEQ ID NO: 14209 - DNA, 234 bp, Glycine max
  Clone ID: 700964586H1
aaaccccgttttcagtgacatcgagatcgatcgaacatggatgaggagtacgatgtgatcgtgttgggcacgggtctcaaggagtgcattctcagcggtcttctctccgtcgatggcctcaaggttctgcacatggacaggaatgactattacggaggagaatccacttcgctcaatcttattcagctttggaagagattcaggggagatgacaagcctcctccacatttggga

SEQ ID NO: 14210 - DNA, 222 bp, Glycine max
  Clone ID: 700964587H1
gtccttcgcttggaaccgcagtgtctgagacgatcaatgcactagtagccgccgcgagttcgatctccggcaatctaactaaaacggcggcgtatagcgagaactgcgagcatggagcatgagaacgcgagcaagggggtcgaattagtgaacgagatagccagcatctccgagtacaggcctccgattagaaatcagtactgcaacttggcgcggaggctg

SEQ ID NO: 14211 - DNA, 232 bp, Glycine max
  Clone ID: 700964589H1
ctgttctcgcgatttcggaagggtcgtgtttccctgcttcagtttcagcttcggcttcgagaagcgtcgattgggtccttaagctgttccttctctgtttctgacaaactgtataactcctatcaaacatgagcggtcgcttttctcgcacaatttatgtcggcaacctgccctctgatataagagagtcagaaattgaagatctattctacaagtatggccgtataatgga

SEQ ID NO: 14212 - DNA, 237 bp, Glycine max
  Clone ID: 700964591H1
cacagacaaatgccttttctccttcaccagtgtttggtcaatcatcagccaatcctttctctagcacagcacctaattctaacccttttgcgcaaaagagttcacctttttcttctggatttggaacttcggctgctcctgccttcagttcatcagcttttggttcttcaacgtcagcagcagcaccttctctttttggctcatcgccatctccatttggagctaactcttcttcaa

SEQ ID NO: 14213 - DNA, 201 bp, Glycine max
  Clone ID: 700964592H1
agtgaccagactgggccaccttgtgaatgctggcagtatctgaagccgtgcacagatctaccttgagtcgctcccgcactaggtgcaccagattctcgacccgctcttgggtcccaccctgctctgactaggtgatcaagctcacgtcggtccagcatcaaacccgggtccagtacaggacgctgttcagggccttcgtcg

SEQ ID NO: 14214 - DNA, 240 bp, Glycine max
  Clone ID: 700964593H1
atccaatgattgttgcttgtcactgtgagggaaggggatggaagttttgggcagattctaatttgaaaggaaaattctgggggcgttctatccagttagatcctgtgggtgtcctcactctacagtttgaggatggtgcaacatttcagtggagcaaggtcaccacttcgatttacaatatcatactaggtaaaatttattgtgaccactacggtaccatgcacatcaagggcagtggca

SEQ ID NO: 14215 - DNA, 248 bp, Glycine max
  Clone ID: 700964595H1
ctcactctttcttcccaccttcctctccttctttctttctgcttaaggtctacacaagttctctgcttcttctccccctattgacctttggtcatcacaagcgaaaacccacttctggatcttctggtgtaaaggccattagaagctctagaaattttctaattgagttggtgtatagtgttgaagggggtgaaatctggagcccagtttgttagttgttactcacttcatctgtaagctcataggtt

SEQ ID NO: 14216 - DNA, 251 bp, Glycine max
  Clone ID: 700964596H1
ctgcttcattgcattattgcagataagatcaaccctactcccttcagattcgggccaagatggcatcacttcatgctaatgtgacatcagttgtttgcaagagtggcaaccatgcttctcaatcgaaatttccaagctcttcattcttgcctgggtttgatgttgttggtcgtgcttcaaatgcttggaagaaagaacttgtcccatcttccatttccttggtgcctagagccacactaacatttgatccc

SEQ ID NO: 14217 - DNA, 278 bp, Glycine max
  Clone ID: 700964601H1
gggactgataggagtaggcttgtattttttgatcggaggagtgagtgtgagttggaggatttgcttcgagcttcggcggagatgttagggaagggtagtttagggacggtttatagggcggtgcttgatgatgggtgcacggtggcggtgaagaggctcaaggatgcgaacccttgcgcgaggcatgagtttgagcagtacatggatgtgattgggaagcttaagcatcctaatgttgtgagactcaaagcttattactatgccaaggaggaaaagct

SEQ ID NO: 14218 - DNA, 260 bp, Glycine max
  Clone ID: 700964602H1
cttttaattggtataggcgatgtaccgtctgctaaactttctctgaggtgcaaccacaaatgcataaataccctgacactattttcgcagatccagcaaatgatcccattgtccctgtgactgtggctccaaaacattatttattcaattctaaacatccagatatgaaacatatgcatggtgaaaattggaacaacactgtacttgtagatggtaatgctggtgccaagttccaagtaggaatagcaacgttcccaagt

SEQ ID NO: 14219 - DNA, 264 bp, Glycine max
  Clone ID: 700964603H1
atctatcgagacggtttaacacttagcatctgctgagggtaccttggtagacaccacactacccataatatggtcgaaaacaacaacccaagggtttttggttcttctatgtttctatgtttgcttgtgttgatgatttggaacaagattgttgttgttgttccacaagccgaggctcgagcattttttgtttttggtgattcgctagttgacaatggcaacaataactacctattcaccactgctcgtgccgactcatatcct

SEQ ID NO: 14220 - DNA, 273 bp, Glycine max
  Clone ID: 700964604H1
caagaaccctaatcccaatcagccatgcagcaaggagactacacctccgctccatctccatattatcaattccctcatctccaaaaccccaatcccaatcccaatcccaatcccgatccacacccaaacaacccttacgcttctgcacctcccttcacccccaattacgctccctccgattacaccccttacccttcctaccctcaaaatcccgatccttctccacccactgctccttcctttcctccctcttcttccaaccctaatttaccc

SEQ ID NO: 14221 - DNA, 270 bp, Glycine max
  Clone ID: 700964605H1
gttgctttcagctaactgatagttgtgtgcaattatttgaattcaagaatgtctcaacccgactcgttggtggctgagattgaggtgaaaacctctgctgatcacttttacgacaccttgaagggtaagaaacagcatcgtattcatgatgttgcccctcatcatatccataaggtggaagttcatgaaggtgagtgggataaatctggcaatatcaaggtgcttacattcgctgatggggacactgttgagaccttaaaggagagagtt

SEQ ID NO: 14222 - DNA, 272 bp, Glycine max
  Clone ID: 700964606H1
tggctatgctgggggaggacggtcgcggctacgaactggcacggaagcttgacacgtgcggcgtgtggcgaacctggctcggcgacgccacctacgccaacttcgcacccttcctctcttccccttccgcctgggactccttcacctccaccactcacatccctctccaactcagagtccgcgccctcctcttcgacaaagccaccgcttccctctccccaaaccctaatccctctctctctatccaacgcctcaaccctagttacctccaa

SEQ ID NO: 14223 - DNA, 271 bp, Glycine max
  Clone ID: 700964607H1
acggactttagttccatccccataattgatattagtccccttttggctaaggcagatgatccaaaaatggctgaggatcctggtgtgcttgaggttgttaaacaattggataaggcttgtacagaggcagggttcttctacgtgaaaggacatggttttcctgagactctccttaaagaagttagagatgtaacgcgcagattctttgaactttcatatgaagaaaaggcgaagatcaaaatgactccagctgctgggttcagaggttatc

SEQ ID NO: 14224 - DNA, 268 bp, Glycine max
  Clone ID: 700964610H1
ggtaaatagtagtagggaatacgcatgcccttggttcctctacaaaatcaaaagggtttatctgagaaacctagacagtagacacggcagatgttgtccttggtcttctccacaaccacggatattccaaaacccagttacctgtctttgtggcaataggttaacttcagtgttgttatgccaaatctgacaacgttcactgaaatctgtgagtgaataaatggttcctaattttctcattgcaaggttaactgcatcattatcatcg

SEQ ID NO: 14225 - DNA, 266 bp, Glycine max
  Clone ID: 700964612H1
agagacaccactacacatcagcatattccttacagagagaacaagaatttgactggaactgctaggtatgctagtatgcatactcatctaggaattgagcaaagccgtagggatgatttagaatcacttggatatgttcttatgtactttttaagaggaagtctaccttggcagggattgaaagctggtactaagaagcagaagtatgagaagattagtgagaagaaagtttctacttctattgagtctctctgtcgtggctatcc

SEQ ID NO: 14226 - DNA, 266 bp, Glycine max
  Clone ID: 700964613H1
aaacacatcacgcaggagcagcagctggcagatctgtctcggcagattcttagggggctggcgtacctgcaccggcggcacatcgtccacagggacatcaagccgtcgaatctgcttataaactcgcggaagcaggtgaagatcgctgacttcggggtgggtcggatactgaatcagacgatggatccgtgcaattcgtcggtggggacgaacgcctacatgagtccggagaggatcaatacggacataaacgacgggcaatacga

SEQ ID NO: 14227 - DNA, 267 bp, Glycine max
  Clone ID: 700964615H1
cttcttctcttgcggctagggttttagcgcagttcttctagatataaggaagatgggtaaggaaaaggttcacatcagtattgtggtcattggccatgtcgactctgggaaatccactaccactggtcacctgatttacaagcttggaggcattgacaagcgtgttattgagaggtttgagaaggaagctgctgagatgaacaagaggtctttcaagtatgcctgggtgctggacaaacttaaggctgagcgtgaaagaggaatcac

SEQ ID NO: 14228 - DNA, 282 bp, Glycine max
  Clone ID: 700964616H1
tcggctcgagaacagaatctactctctttttttctaccttagattccttctccaacaatggctctcgccgtttccactacttcttcctcttcagcagctgctgcagcttctagctccttcttctctcgtctcggatcttcctccgacgcaaaagctcctcaaatcggttcgtttcggtttccggagaggtcgcttgtttcgtctgttgttgtcaatgtaactcaacgacgctccttggtgaggccactcaacgccgaaccgcaacggaacgattctattgtt

SEQ ID NO: 14229 - DNA, 269 bp, Glycine max
  Clone ID: 700964618H1
attttcatagcattttcagaggaaaatggcgggtacggtttcgacttgtttcttcttcgtgtttcttctttctctccttcttccttttcagatctccgctgaggaatcctcggagaaggagttcgtactcacattggatcactctaactttcacgacactgtcagcaagcacgatttcatcctcgtcgattcctacgccccatggtgtggtcactgtaagaagcttgctccggagtatgagaaagctgcttctatcttgagtagtcatg

SEQ ID NO: 14230 - DNA, 265 bp, Glycine max
  Clone ID: 700964619H1
gaggaattcatttgaattagggttactctttttcttcgtttcatcatggacgctcagagagctctactcgacgaactcatgggtgcagcgcgcaacttgacggaggaagagaggaaggggtacaaggaagtgagttgggacgataaggaagtgtgtggattctacatggtgcgcttttgccctcacgatctctttgtcaacacgcgcagtgatctcggaccttgccccagaatacatgacccgaagttgaaagaaagttttgaga

SEQ ID NO: 14231 - DNA, 264 bp, Glycine max
  Clone ID: 700964620H1
ccgatggccgcatgtatacattccgttgctgtttttcagtggagtagattatattgatgctcctacaccatatatgatgggactctattcgggtgttgatacttctgctctggcaattgatggggttgttgttgtggaccttgagtataatcgtatcactacctcagaggaaattcctcctattcctgagccagaattcagccttttgcgtggtgagataatgaagctattatatcccaatgtaattggaattgatgagatgaa

SEQ ID NO: 14232 - DNA, 92 bp, Glycine max
  unsure (1)..(92): unsure at all n locations
  Clone ID: 700964583H1
ctttccctaacctccttcttcttcactactaatcttcacaaccatatcatccccaaaacaaatgaaaatccacgtatttngaagatccgacg

SEQ ID NO: 14233 - DNA, 240 bp, Glycine max
  Clone ID: 700964550H1
aaaaaacttgtcttttaagttttaactctaagccatggctcttcccctgttcctcctctgcttcatgctctgcatttcactcacacaccaaacgattctgttacccctaacacactcaatttcgaaaacccatttcaacagtacccaccagcttctcaaatctacctccactcgctcagcctcacgcttccaccgccaaactcatcataactccgtagtctctctcccactttcttcagg

SEQ ID NO: 14234 - DNA, 241 bp, Glycine max
  Clone ID: 700964551H1
gcagcgcattatagcacaccacacaaaaaagcaaaacagagagaacaactgttactcacacacgccatgggtaaatgaatggtttttgagcaacagcagttaaaagagaaaagggattcagcgaagatgacatcggttggtgtggcaccaacttcgggtttgagagaagccagtgggcatggagcagcagctgcggatagattgccagaggagatgaacgatatgaaaattagggatgata

SEQ ID NO: 14235 - DNA, 235 bp, Glycine max
  Clone ID: 700964555H1
gtaagaagcaatgaagttaattttgagaatttatgcatgaattttgtcttggtgttacttaatcagagttacatttgattatatataaggtaaaaattgaaatattattttgttgcagcttcttcgcacaaagtatagttgcgccaaattatccaattgtactagtagaactgaaaggattcttaaagaaagtggaagtcaaggaattttattgtacgactttgtgattgtgagc

SEQ ID NO: 14236 - DNA, 238 bp, Glycine max
  Clone ID: 700964556H1
tcgatgttgatcgtatagctgccggattaccttgtggtagtgaagggtttctattaatgtatgctcggtggaaaaagctggaaagggacctgtataacgaacgcaaggagcgctttgacatcacccaaattcctgatgtctatgattcatgcaaatatgatctcttgcataatgcccatcttaatctagaaggattggatgagcttttcaaggttgctcaggcacttgctgatggtgt

SEQ ID NO: 14237 - DNA, 239 bp, Glycine max
  Clone ID: 700964557H1
gccccatatcacaaaccacattaaaaaaagactaccacgtattcttctctctccgtctctctctctctctctctctcttcacagtgccaatggcggatccaatcgcgaaggttctgatcgcgtttgcgctcttagcttccctcttgctgtgttcgcacgcttcctccgacgttcccttcatcgttgctcacaagaaggcctccctcaacagactcaagtccggcgccgaaagggtctcc

SEQ ID NO: 14238 - DNA, 235 bp, Glycine max
  Clone ID: 700964558H1
ctcatttctcgtcttcactgagaacaatccttcttcgtgcatgctcctcgtttctatctaaaggggcgaaagagtagattataagggggtaagtgagaaagagagtaaaaacaaaattaaaacatgactatggaagagggcagggtcgagaacgaggactacacacaagatggtactgtcaacattaaagggaaacctattcttagatccaaaagtggtggttggaaagcttgct

SEQ ID NO: 14239 - DNA, 239 bp, Glycine max
  Clone ID: 700964559H1
ttgcttttcgacaaaaccgttacccttcgtcgtcttatacctgattcttcatctccgttcgagggtcaacacttgaagatcttagctcgtggcaatggccgattctccaccgagaaggaattcaaggtccccttccccatggagggctgagtcaaggtctaggtcaaggtctagatctaggcctaggtctaggtcccggtcaagatcttttgagaaacaaaggccaagatcccggtcga

SEQ ID NO: 14240 - DNA, 238 bp, Glycine max
  Clone ID: 700964560H1
aattaacaaacctgggggaagaatttgataattatcacaccaaatattacagtatataatacaataggaccttcctgctgaaatatatactgtaatatttggtgtgataattaacaaacctgggggaagaatttgataaaaaaaaaaaaaaaaaaaaaaaaaaacaaaaaaaaaaaaaaaggggggccctccaaaaaggagccgaggaccccgggaattatttccgggccgggttttg

SEQ ID NO: 14241 - DNA, 247 bp, Glycine max
  Clone ID: 700964562H1
agcctctatccctttctattggcaacgagtgcggaaaaaaggtatggtgactatcttgtggactacttgaccgacttggagcatcataacctgatccttctaaacaagttaccacagaggttgccagccaagcccctcgttttagtcttcaagtcttcaattatttttaaggacttgaatggtatgttttctttctctttagcatttcttgattaatactacaatgttatttacttagtttattttg

SEQ ID NO: 14242 - DNA, 248 bp, Glycine max
  Clone ID: 700964563H1
ctctaacggtgaaacgtatggggcagcaatatggcagatccccgagctatatggcgagttaaattcacctcagctagagagaattacctcacttgacacagattctggcaagattaaatgtattctatggtggccatctggaagacatgataaattgatcagcatcaatgaggaaaacctgtacttgtggaatttagacgtttcacagaaaattgcactggtacaatcgcaagattccgctggtatgc

SEQ ID NO: 14243 - DNA, 245 bp, Glycine max
  Clone ID: 700964565H1
tgtttgagaaacaccaaaggcttcaccctccaagtccttaccggttgttggttcatggagttctcctcattcatgatcatgtcagtgtcaggagcaagctacatgtttagtctttactcaagggatatcaagtcagttttggggtatgaccaatccaccctcaatttcttaagcttcttcaaagacttggggtccaacataggcatcatttcaggcctaatcaacgaggtaacacccccttgggt

SEQ ID NO: 14244 - DNA, 243 bp, Glycine max
  Clone ID: 700964566H1
attcagttcataatttcttccaacaaattatatttttcttacaaaaaaaatggcaggtgaggtggtgaagaaggaagagtctctcaacctgaaagtcactaacaagagccatgttcaatcagaggagaaaattggaagaaaagagtaccaattggtcacttttgatcttccctacttggccttttactacaaccagaagctcttgttttacaagggtgaagatttcgagggcatggtccaaaa

SEQ ID NO: 14245 - DNA, 240 bp, Glycine max
  Clone ID: 700964567H1
cctagtaatgccgccgatggggaggaagcgaaaggtagcacccaaatcttctctatccaccgagccacctctcaagcagcaacaaccaaaacccgaaaatccccctcaagaatacgaagaagtcgaagaggaagttgaggaacaagaggtagaggaagaggtcgaagaggaagaagaagtagaagaggtggacgaagaagaacatgacgaggtagaagaagaggaagaagatgacgacgt

SEQ ID NO: 14246 - DNA, 237 bp, Glycine max
  Clone ID: 700964568H1
gccgaaaatagaatctgaaattcaagaagagggtggatcagaggcaaacccacttaacaaaaatgatcatgtagatggatatgtaagagagaaggacatggaaaaggcacttgaacaccaggcccaacttattgaccaatatgaagcaatggagaaggctcaaagagactgggaggagaaatttagagagaataacagcacaacaccagattcgtgtgatccggggaatctctcaga

SEQ ID NO: 14247 - DNA, 235 bp, Glycine max
  Clone ID: 700964570H1
ctggactctgacgttccaccagtccccgctcccgcccgcaaccaactggtggctgcaatgctggccgttgaaaatgacgcttctctcacccaacacgacaagacccgaaaacgtcaatagcttttgactggataggctcccgcatacgacgacgacgacgacgaacaagagaataaatcatccttatcggatattctctccagatctctcaactgatccatctgtatccagttac

SEQ ID NO: 14248 - DNA, 234 bp, Glycine max
  Clone ID: 700964571H1
tgtttataaaggagttccaaaggattacaccggcgaagatgttactgttgataacttttttgctgctttacttggaaataagtcagcactgactggtggcagtgggaaggttgtggacagtggtcctgatgatcatatatttgtatactatactgaccatggaggtcctggggtgctcgggatgcctgctggtccttacttatacgcggatgatctgattgaagtcttgaagaa

SEQ ID NO: 14249 - DNA, 225 bp, Glycine max
  Clone ID: 700964572H1
gctgtatttcaccgccgtagatgcgcattttccagtaaccggtgaccttccaacgcggcgtgaggcgctgggataccggaatggtagtgtatgacgaaagcggcctcgaaggaggtacgcgattcagattgcgataacacttcacgcgacctacctaggaggctcgtctcctcgatgttctctgcgctacagcggcgtcacgttcggagaacgtcgtgatacact

SEQ ID NO: 14250 - DNA, 236 bp, Glycine max
  Clone ID: 700964573H1
ctctctctttcgatctgggtactaaccctaacccgcttcgaaccgtggcttcctcaggctcgcagaacctctctcgaagaaaaccttcttcttcttcgtcttcgtcttctcaacaaacacccgggtcgacccggatcgtttaccgagaatctcggatcccatcggaatccgatttcccgatctggcagcagaactggttcatcgcattgctcttcgtcatggctctcggattcttc

SEQ ID NO: 14251 - DNA, 238 bp, Glycine max
  Clone ID: 700964574H1
gtagttcttcatcatagtcttaaacattaaaccttagcaaaactcaacaatgctagacatcaaaggctacctcgtactcttcttcctatggttcatatcaaccattctgatacgttccatcttcaagaaaccacagcgtctaagactcccaccgggtcctccaatttcaatacccttgctgggacacgcgccatatctccgttcactgctccaccaagcattgtacaagctatcactg

SEQ ID NO: 14252 - DNA, 237 bp, Glycine max
  Clone ID: 700964575H1
gggatgcttcagattgggcaaccaatggaggcaaatatagagtatattacaagtatgcaccctatgttgctgagttctctgacctggtcctgcatggttgtgcagttgatcccattgagcatgtggccaagtgtgacagtgccctaggttctgaagaagttccctctggtgtcacccaagtacaaataaccaaaatgagaaacttcaggttgaggcacatgacatattcttactgct

SEQ ID NO: 14253 - DNA, 238 bp, Glycine max
  Clone ID: 700964576H1
gcagcttggagatctgaacaaactcatgcatctggaaattatgggactcctcaaggtaatggtgggcaagttggttatggtgttggctatgggggtgctcagtctcgacaagcccaacagcagtaattttggtagatgaatctcttgctggatcttaaacttcaacttgaggatccctggcttttaaaagtcttaaatcatgaggtcacaatgaattcttccagcagcaatggagtgg

SEQ ID NO: 14254 - DNA, 242 bp, Glycine max
  Clone ID: 700964577H1
ggctaatctctcactcttgttcttcggtctcctcctattctccgctgccgtagccaccgtcgaacgaatcgacgatgaagacaaccttctgatccgtcaagtggtgccggacgcggaggaccaccacctgctcaacgcggagcaccacttctccgccttcaagacaaagttcgccaagacctacgccacgcaggaggagcacgaccaccgcttccgtatcttcaagaacaacttgctccgcg

SEQ ID NO: 14255 - DNA, 244 bp, Glycine max
  Clone ID: 700964578H1
caccgctcgctttcttaactagagccctctccgttgagggtttctccaggtgtggtttgatttacagtttctgatgctgaagaaataaaaaagcttgaaggcttttgctcttctgtgtgaaaaatgttggaaagtggtgcgaaattcccaggaataatagatctcaacagaaataataacaactactatgatttctctcaaggcttttaccataagcttggggagggtaccaatatgtcaattg

SEQ ID NO: 14256 - DNA, 247 bp, Glycine max
  Clone ID: 700964580H1
cttcgtagtttgatgatggcttccacacacaagcacacatcaatacgatgatccccgtgtcctgtttctgcgtttcaacttcttcctttcaggagcaatttgcagccgagccaggaaagcgaggagcattattctgaatcgaagattaaagaggttaaggatgcaatcgagcccttatctggacgaagcttgaagtactgcactgataattgtctgaggagatatctggaagctcgtaattggaatg

SEQ ID NO: 14257 - DNA, 243 bp, Glycine max
  Clone ID: 700964581H1
caccaacttcgtccccggaaagtgagcgtcaaagaacgaaatgacttttgagagtttttagatttgtgtttggtgaagtacttcagataatgtgaattatcttgtgtatccgaatccaacttaatgttacttgctttttacaaaactcaagtgtcaatttgttctctcattttatacttctaagcttttgacgccacattgaatttgaactctaattgaactaaaaaatgtttcccttcaaaa

SEQ ID NO: 14258 - DNA, 249 bp, Glycine max
  Clone ID: 700964547H1
gcacatcttttccttagacatggaaagggaatcctccaatcacaaggaaggttattaaggaaaatgaggtttatgccatcttccttgtcatcaaattctcatcggcctgctgactgcccttgttgactcaaggcataagaaggcttttaaggttaaaaactgcattactgacattgatcctgagcgggaaaaagaagaaaaagagaaggctgaaagtcaaaatatccgtgctaatgtgcttcttaaccg

SEQ ID NO: 14259 - DNA, 237 bp, Glycine max
  Clone ID: 700964582H1
ttttgacctgagttaatgatcattaatgctgttttgaaattctacttttccattacttttcttgattagttattcctctttatgcagcttctttactccttgggatgaatgatgttagatctgacagggcaagaaggcaaagatcagatagccctttctcctttcctcgccaaaaacgttcagtaaggccccgcttgtacctttccattgattcagattcagagtaaaggtcatacc

SEQ ID NO: 14260 - DNA, 156 bp, Glycine max
  Clone ID: 700964510H1
ctaacctacctctttttcttctctctcaacaacttcaccttcttcctcctcgatcatgtctcacttcaagggcaagtaccatgatgagcttatcgccaatgctgcgtacattggcactcctggaaagggtattcttgctgctgatgacgtcaacag

SEQ ID NO: 14261 - DNA, 240 bp, Glycine max
  Clone ID: 700964511H1
tgaatatgaatcatggagagaaagcttggggcataatgcacatggttggaagataaagtactataagggtttgggtacaagtactcctcaggaagggagagagtactttcaagatcttgataagcataagaaagactttgtttgggatgatgagcaagatggaggtgcaattgagatggcattcagtaagaaaaaagctgaggataggaagatctggattcgtaattttgagcctggcac

SEQ ID NO: 14262 - DNA, 242 bp, Glycine max
  Clone ID: 700964512H1
gagctaaactcatatgtggcattgagaaaaacgtacatgaataccattggaaataaaaaacttgaactttttgacaatggagcaggagcaagtgtatctacagctgaagaaaatgttcaactggcatcagaaatgtcaaatcaagaacttatcaatgctgggacgaagacaatggatgaaactgatcaggctattgagagatctaagcaggttgtacatcaaacaattgaagttggcaccca

SEQ ID NO: 14263 - DNA, 239 bp, Glycine max
  Clone ID: 700964515H1
catatataaattttggatttcgcacgtagctagctacagaagacaaaggggccttgagtctcgagatcttgtcagatcggaacgcaaccgccaccgagtccgttttgtttgtgggtgtcgtgcgcgagattaattcattggcgtcacttagcttgggccacaagatgctttcaagcgttatgggaagggaagttactggcatacaggttatggaaaagaagccaaatggtgccataggg

SEQ ID NO: 14264 - DNA, 249 bp, Glycine max
  Clone ID: 700964517H1
aatatattcattttttgcaagagaaggtgcacaagtatgaaggttcatttcaagggtggagtaacgagccagaaagattgatgccatggagaaataatgacaagccagcagaaagttttcaacctcgtggcaccgataatgggtcaagtccatcaccaacaattcctgggagtacccagaatgtagaatctggcttgagcacagcaactacctccaagacaatggatcatcaggctggaaaaatgaaca

SEQ ID NO: 14265 - DNA, 244 bp, Glycine max
  Clone ID: 700964518H1
cctaagaaccctttctggttcaaccgcgatcgcttcgttctctctgctgggcacgggtgcatgcttcagtacgcgcttctgcacctcgctgggttcgatagcgtcaaggaagaggatttgagggaatttcgccaatgggggagcagaactccgggacaccctgagaattttgagactccgggaattgaagttacaacaggtcctcttggtcaggggattgccaatgctgttggtttggcccttg

SEQ ID NO: 14266 - DNA, 149 bp, Glycine max
  Clone ID: 700964520H1
cttttccggcactcacactgttgtcaattcaatcgttcatgctcgcattgcattttcgccttgctttcgtctgcttccatcgtgctaacatagggttgcttctcttctctctgtactctggtcgagcctgtcggcatgtcgagcgctgg

SEQ ID NO: 14267 - DNA, 240 bp, Glycine max
  Clone ID: 700964521H1
ctatcttctctcggagccgctattatccccagacgccaccgccgcagcaccagaagaagaagaagagtgatggctgagtacgacctaactccgcggatggcgccgaatctcgacaggcaccttgtgttccctctcctggagttcctgcaggagcggcagctctacgacgacgaccacatcctgaaggcgaagatcgaccttctcaacaacaccaacatggttgactacgctatggacatc

SEQ ID NO: 14268 - DNA, 239 bp, Glycine max
  Clone ID: 700964523H1
gcgttgcttgcttgagtgatttgactcgtgtcgagtgtattgtatttagtttaagcgtggctgatcgagtgagtatcagaatcaattcaattttgagctagtcatgaagatccactgcgacgtgtgtaacaagcaccaggcctctttcttctgcaccgccgacgaagctgccctatgcgacggctgcgaccaccgcgtccaccacgccaacaagctcgcctccaaacaccaacgcttct

SEQ ID NO: 14269 - DNA, 242 bp, Glycine max
  Clone ID: 700964524H1
atggatctgcttgccatcgcctccattgccgctgccatagagggttgttccggcgcaatccgccttgcatgtgctaacatcattagtcaagtctacgatcccgagagacagatattggaatcggcgataaaatggccggttaatgtgttgaaggtggcgaaggaagcagtcgtagagcgcgtctgtatcgacttcatcgattacgtcgattataccacgtcctaattggtcagctgataaga

SEQ ID NO: 14270 - DNA, 241 bp, Glycine max
  Clone ID: 700964525H1
atattttgctagtcattataacttccttcacatttggtttcattgagaaagttgtttcaaatccaagttctcgtccatatgcggcaattttcaactttggtgactctctaagtgacaccggcaatttccttgcatctggtgccattttattcccagttatcggaaagcttccttatggtcaaaccttttttaaacgtgcaaccggtcgttgctcagatggacgactaatgattgattttat

SEQ ID NO: 14271 - DNA, 239 bp, Glycine max
  Clone ID: 700964526H1
gacatctctaagctagctgcaacacaactctgcaatttttgtgagtatttggatgatgaattctcgtgtcgttcgaagtgtttcagaatgttttatcaaaccgttgggccaagctacagagtcacacctaatatgtcatttaacaccatgggatattgctatgatgtctttgcactacatccagaaaggtctactcttcaagaagcctgcaacacttgttgatccacaagatttcatgg

SEQ ID NO: 14272 - DNA, 240 bp, Glycine max
  Clone ID: 700964527H1
gaagaacgaatcgaaaaaagagagatcatggcgatggcaaacttggctcgacggaagggttacgccgtcgttttgtcgtcgaggtcgtcgctttgtctgacaaggtggagggggttcgcgtccggatctgacgaaaacgacgtcgtggtcatcggcggcggtcccggcggctacgtggcggccattaaagcggcgcactgggtctgaaaaccacttgcatcgggaaacgtggcactctcg

SEQ ID NO: 14273 - DNA, 243 bp, Glycine max
  Clone ID: 700964528H1
aaaaaacaaaaccatttgatccaacagacacactccctctctctcttgatcattctctctcagtgctctcgatctccatctgcaacttccttgtctgacagatcctgtgttccggagaaaggaaaggaaaggaaagatgtcggggcaaacgcagcgtctgaacgtggtccccaccgtgacgatgctgggagtggtgaaggcccgattggtcggcgccacgcgcggccacgcctacctgaagaa

SEQ ID NO: 14274 - DNA, 236 bp, Glycine max
  Clone ID: 700964529H1
cttttgttatgcctcatggctgcaactgcaaccgcaaaaaccaacaatgacaacaaccctgaaataacaagggaggaaatccaaactgccatagccaaagcagtggaattaagggcccttcatactgcattaacacaaggaagtagtccaggcacaaacaatgctagatttccgtcaccttccccggcttctcacttctctgcccaagactaccctgttttcacagcaagttatga

SEQ ID NO: 14275 - DNA, 244 bp, Glycine max
  Clone ID: 700964530H1
attcaaacaaaacaacttatgatagtaaaagggtagaattcgaaaaaaaaaaattgcagatattacaaagaagaagaaatgctcgattaactcgtaaatcacattcttttttaaaatttttcatgaaaaggatatacagagatatatttctatatatcagttgtattccgaggatcaatatacaactttttcttgaattaacaaaaaatttttaaataaatccatttacgataatgaagcaaat

SEQ ID NO: 14276 - DNA, 245 bp, Glycine max
  Clone ID: 700964531H1
gcaccacttcaggcgtggacatgcccggagcagattaccagctcacgaagcttctcggcctgaggccctccgtgaagcgcctcatgatgtatcagcagggctgcttcgccggcgggaccgtactccgcctcgcgaaggacctcgccgagaacaacaagggtgcgagggtgctcgttgtctgctccgagataaccgccgtgacgttccgcggcccctcggacacgcacctcgactcgctcgtggga

SEQ ID NO: 14277 - DNA, 246 bp, Glycine max
  Clone ID: 700964533H1
gcatattgaagagcaaggaagaaagtggagaagataagggtctaaattgggaagatgcaaaaaagatgccaataacttcaagggtcattcaggagactctaagagttgcttcaattttgtcttttactttcagagaagcagtagaggatgttgaataccaagggtatcttattccaaaagggtggaaagtgctacctctatttaggaacatacaccacagtccagacaacttcaaggagccagaaa

SEQ ID NO: 14278 - DNA, 236 bp, Glycine max
  Clone ID: 700964534H1
gtgctgctcttctgcttcatccttagaccggagctttgagtctcagtctcttcttctgtgttgtttgcaaaacatgttttcttttttgtttacctgagtgaaggaagacatagacatacctagttgttattgctgttttttgttgttattgttattgaatttagatggagccttcactcctactttcttcaccttcatcatccacccctttacccgtcttcctctcaaacacactt

SEQ ID NO: 14279 - DNA, 238 bp, Glycine max
  Clone ID: 700964536H1
cttcttctcttgcggctagggtttcagcgcagttgcttctacatttaaggaagatgggtaaggaaatggttcacatcagtattgtggtcattggccatgtcgactctgggacatccactaccactggtcacctgatttacaagcttgcaggcattgacaagcgcgttattgagaggtttgacaaggtagctgctgagatgagcatgaggtctttcaagtatgcctgggtgctggacaa

SEQ ID NO: 14280 - DNA, 238 bp, Glycine max
  Clone ID: 700964537H1
ttctgaattgcactgacccgagctcccatgcctttgttagagataacaaatgcgcaactatccttccggtattcactgacaatcccaatgccacaccatcatgctaatggaggagggtcttggatttccttccgcagccttagaattagaaacttgaatgtcattaaggctgtagccaccttggatgctaaacctcgcttggatttggatgcacctcacccgcctggctttttgctcg

SEQ ID NO: 14281 - DNA, 238 bp, Glycine max
  Clone ID: 700964538H1
attgcgcttcacaaattctcagtctacgacttgggtgttggatttcattaagttgtgataaacatgggaaaagactcaaagccaaaggagtcgggaggcaagggaaaggggaaacaggctgcaagtggaagtgatgagaatgcttctaagggaaaaggaaaaggtgggaaaggtggagatgggcttggtacttgcacctatgtcaaagctaggcatatcctatgtgagaaacaaggta

SEQ ID NO: 14282 - DNA, 236 bp, Glycine max
  Clone ID: 700964539H1
aaaaaaaaaaaacagaacaacacagaaactcaaaaccaaaataaaattattatggatcacattcataggttacgttgttttgggacaatacccaaaattccttttctattgctactttccctgcttctcttcagtttcgttaacgcatccttcgacctcgctactatacccttcaacgacggctattctccgctcttcggagctagcaacgttgttcgctccgaggatggatacgg

SEQ ID NO: 14283 - DNA, 229 bp, Glycine max
  Clone ID: 700964542H1
gtgattgacgtcaaccgcagaccatctccacttcttatctccggtctccgacgaactctccttggaatttgtagtgcagaggtgctgccttttacactaccaggttttgtggattgtagtgtctgcggttatgcgctgcgggttctgcgactagtgttaacgatgatcgtcactgcgctcatcactgcgatacttgcgggactttgcattggcccaatcaacggcaggc

SEQ ID NO: 14284 - DNA, 203 bp, Glycine max
  Clone ID: 700964545H1
gagctattgtagtatgtacaaataactattgttaattgtaatgcatgaagaaactgaattcacttaatagcttgtagatttcaaaggctatttcatatctgtatattatgctatatctatacaggtatgcaacatactctgcaatgcattatagtgtcagactggaatttcagcaagtatttactcacaaaacgatctcgtta

SEQ ID NO: 14285 - DNA, 243 bp, Glycine max
  Clone ID: 700964546H1
cggctcgagcttggttgagagtgagtttggaacttgaaagaaactagaatggccactttagacgaacgcccttctgcgaaaaggtggcttcctctcgaagctaaccctgacgtcatgaaccagttcctttggggtcttggccttccagtggatgaggcagagtgcggtgatgtgtttggcttagatgaagagcttctggaaatggttcccaagccagttctcgccgtgctttttctttatcca

SEQ ID NO: 14286 - DNA, 239 bp, Glycine max
  Clone ID: 700964509H1
attattattattattgagtagtgcgatctagtaggaatgttgctaacacgaattgttacgaattcaaaaacagacaatcaaattaattgtattaacatccaggtagagagcggataataactatctgcaataaattttagaatccttacattttgtgcagcttggtatgataactgttcgtactaaactactaattatcatcatccttttgttttactcttttcattttgttccgtgag

SEQ ID NO: 14287 - DNA, 247 bp, Glycine max
  Clone ID: 700964467H1
aaaagaacaccaaccttggtgcctatttattatactagaagaaagaagggtagaatggattatcattcacaatacagtagtgctagtgaatcaggttggactcattatttggaccaatcctctcttcctgaaaattactaccagaggagaggtggtgttgtggagtgtgatgaaggaaaaggagcaagaatggaagagtactctgaggaagatttgtccatggtctctgatgcttcttctggacctc

SEQ ID NO: 14288 - DNA, 239 bp, Glycine max
  Clone ID: 700964468H1
cagatcgccaatgccgaacgcaggattgatttgacttctcacattattaaggtggtacttgacattgaaggttgaaaatttggggacatctcctgcttcagaagtacatattgccttttcgcccactgaagtaggacatctagcaataatcaaagctgctgcaacttctgggaagagggagaaggaaacttatggtcctctagatgtcagatctgctgagctacctgatggaccaaatg

SEQ ID NO: 14289 - DNA, 244 bp, Glycine max
  Clone ID: 700964469H1
ggagtaccctggaagccttactccttttgtgacggtaacatgtatagttgcagccatgggtgggttaatcttcggttacgatatcggaatttcaggtggggtgacatccatggatccgttatctgctcaagtttttcccgtcggtgttccggaagaagaattccgacaaaacggtgaaccagtactgtcaatacgacagccagacactgacgatgttcacgtcgtcgctgtatctcgccgcgtt

SEQ ID NO: 14290 - DNA, 243 bp, Glycine max
  unsure (1)..(243): unsure at all n locations
  Clone ID: 700964471H1
aanacacctctctttctctctcttccaaaacctaattttcattttttctcttcaaacaaattttcaaaatgcgtgagatccttcacatccagggtggccaatgcggcaaccagatcggcgccaagttctgggaggtggtttgcgcggagcacgggatcgaccccactggaaggtacggtggggactcagagcttcagctcgagaggatcaatgtctactacaacgaagccagctgcggccggt

SEQ ID NO: 14291 - DNA, 240 bp, Glycine max
  Clone ID: 700964473H1
cttgtgcaatttggccactatgaacacagggcttgctgcaggtgcagccttgcttgcactcttggctatcaccttctccttgttgagccctcaaaccctgttttctccgcctgagattccgggctcgaaggaccaccttcacgctgctcggttactccatgtcaccggagccgtcgggccggagagtcttgtcttcgacgctgacggcggagggccctacaccggcgtcgccgatggccg

SEQ ID NO: 14292 - DNA, 235 bp, Glycine max
  Clone ID: 700964474H1
atacgttttcctcactcctctgtatcccattcctctgccatatcctgaaatacgttttcacaacactcacctttgccatatacagaacaatcatcaattttctgaaatgagccagcgtgtccccaactgcgatgtggacgacaataacaacattcccacaaccacaaaaatccctcttcttcccaatttcaatttcatatcccatgaagttcctatgttgggctaccaagctgct

SEQ ID NO: 14293 - DNA, 240 bp, Glycine max
  Clone ID: 700964477H1
caaaatcttaacttaggaataagtaaccccaataaaaaaattactccaatagggcaaaacaccaaatgggagaggaaaaagagcagcctaagaatgaaaccgagaagaagcccgaggaggccgccgcagcccccaagaaagacgacggacccatccctgtcgtttacaaactcgacttgcattgcgagggatgcgtcaagaagatcaaacgcacatgtcgccacttccaaggtgtggaaa

SEQ ID NO: 14294 - DNA, 243 bp, Glycine max
  Clone ID: 700964479H1
tatttatatgggataagaataacataaatagtctccgtggggtgatcgattctgacgaacagtgccctctacttgttcctctgcgaatgtgacaaacaccaaccaacgaggattcgaaatcacagaggcaaaggaagatctcacaatgttcaatgttatcggtatctcgatgttgacgatggattcggtggcgtacaggggattgctctacacattcttcatactcaattttgtattggtctg

SEQ ID NO: 14295 - DNA, 247 bp, Glycine max
  Clone ID: 700964480H1
tctcgagccgaatcggctctagatttcgagagtccttgcgtaaatatgccattgctcatcaatttgcctttaaatataagagaaatgatagtcatcgtgtaactgttaaatgcaaggcagaaggttgtccttggagaatacatgcatcaaggctgtcaactactcagttgatatgtatcaagaaaatgaattcaactcataactgtgaaggggcttttgcaacaacagggcatcaagcaactaggag

SEQ ID NO: 14296 - DNA, 243 bp, Glycine max
  unsure (1)..(243): unsure at all n locations
  Clone ID: 700964481H1
agaagatggagatgtatcagatctggagcaggagaatagcgttgggagcgttcgcgtttgatctgcttttcctatcggcctcagcagacgacgtcgttgtgctctctgaagataacttcgaggaggaagttggtcaggacagaggagctctcgttgagttctatgctccttggtgtggacactgcaaaaagcttgctccagaatatgaaaagcttggtagcagcttcaagaaagccanatctg

SEQ ID NO: 14297 - DNA, 245 bp, Glycine max
  Clone ID: 700964483H1
ctttctctctgcgttcttcttcaatgcaactctattctgttcggtagacacaacatcactctgaagaacgtcgcacgcaccacccttctctctcttcaacaactcagctctcagaacagatacagtttccactgagtaaatcgcaatgcaggtaactgagacgaggactgttcaagttaagcagctttcagatctagctggtgtgagagagattcacgagttcttctccttttctggagaaatcg

SEQ ID NO: 14298 - DNA, 241 bp, Glycine max
  Clone ID: 700964484H1
agaaaactggttctttttttcgcgttgcgttttcttggtgtctctgtcgattcttcttctgaattttaatacttaggaagtttagttttctctcttggcttctccggttggagtttccggcgaccttgtcggagattttgttgtttatttttcacaccacttgtgaaacttctcaagaaaaagaaaaaggatgtttcttgttgattggttctatggaattttggcgacccttggcctgtgg

SEQ ID NO: 14299 - DNA, 243 bp, Glycine max
  Clone ID: 700964485H1
ccaactaaccaaaccagctatggcggcgatgcagaggccactcaagagaaccattgcaatcgccaagctacgcgcgtgcttttcctctctccgacccgccgccgccgccgacatcgtcgtctctcctccgccgcagctcccgccgttcgatcaccagccgcacccttacaacggtcccttcgccgatgaagtcctcgccaagcgcaaaacgttcctcggtccttccgtcttccactactataa

SEQ ID NO: 14300 - DNA, 239 bp, Glycine max
  Clone ID: 700964487H1
cgctctgttacctggcatcgcatcaatggcgaatcactcaagcagcttcggcggtcgcagtggagttcgagtggtggtcgccggcgaccgctccaccggaaaatcgagcctgatagccgccatagcgacggagtcattcgccgaggccgttccgccggtccttccgcccaccctcctggcccctgatttgtaccccgacaccgttcctctcaccgtcgttgacacaccttccagcttgg

SEQ ID NO: 14301 - DNA, 66 bp, Glycine max
  Clone ID: 700964489H1
gaacaaactatattatgccatgccggtgcttttacgagaaacttactaagccttccttgaccagtt

SEQ ID NO: 14302 - DNA, 179 bp, Glycine max
  Clone ID: 700964491H1
ccacaaagacaattttccatttaccattcttatgcaatcccaccctccaatcccacatttgtgcatttgttccattccaatttcgaacttcccatgtacaatatccacctagcatagctataacatacacatcatttatgcatcagcaacatcattcacatatctatacacaagatcga

SEQ ID NO: 14303 - DNA, 239 bp, Glycine max
  Clone ID: 700964492H1
atttctctcttctcttctcgcgtctcactctccaccgatacagtttcggactctctctctctccgattaccgcacaacaccgtatcgccgttcagggtttcttcgctcctctttggatcttcctcccttcgcgtcgttcgctttgattcgttaattttttttcttgcttctcctgtcttggctcgagatccgggccaagcacagaagaatccgattctgatttgcatttcgtactcact

SEQ ID NO: 14304 - DNA, 242 bp, Glycine max
  Clone ID: 700964493H1
agtcatcaacgaaacccccgtgatcttcgcgcctcactgcttcttaacattcattattcacacgtaacagcctcaacctcaacctccaaactcacttcatttttggccgcaaaaaacccaaatcaccctctcaacgatgcaagtttcatcctcatggttcggaacaatagtactttccaaccgctactcacgcaaccgctccctccctctggaaccgtgttccaccacaaccacatcatcgg

SEQ ID NO: 14305 - DNA, 243 bp, Glycine max
  Clone ID: 700964494H1
gttgccttggggaatgaaacgaagagatctcttgttgcggcgttattggaggagagaagatgatggaacttatgttattctttaccattccgtgtttcacaagaagtgccctccccagaaaggctatgtgcgtgcttgtcttaaaagtggagggtatgttatatcaccagtgaacaaaggaaagcaatcagttgtaaagcatatgcttgctattgattggaaatgctggagatcatatcttaa

SEQ ID NO: 14306 - DNA, 247 bp, Glycine max
  Clone ID: 700964496H1
cacggacccaacagagtctcggtctcgcgccgccgcgccacgccgtaaacgatgctagatggttgggtgtgtgctttccttttggagctttattgttctgtggaggtaattgatgcaagtgctggtgatgctgatccgcgctatagggtttgtataacacagtgtcaggaaactggatgcgttgcgcaaagatgctttccaaactgtaaattttcttctgatggagaatttattgatcgcccatggt

SEQ ID NO: 14307 - DNA, 253 bp, Glycine max
  Clone ID: 700964501H1
attaccctaaaacatcctccatctacaacacacactcttactcttactaatccaacctcctttgcccctcatgcactaccattaacattaccctctcttttttttctccctcacgaaccttcatttcttctcccgccatggatccttgccctttcgtgaggctcacagtcggcaacctcgccctcaaaattcccgttgcttctaaacccgcgctctccgttgttcatccttcttcttctccttgtttctgcaa

SEQ ID NO: 14308 - DNA, 243 bp, Glycine max
  Clone ID: 700964503H1
gtgcaacaaggtctgtggaattgataggaagtttggaaagtattgataaggcagaaaaactaatgaatgctgtgattgcagaggctgatgctgggggttctccttcacttgtagctcgaggcctctcccctgctcaagctactgtgggatctgaacaaattcagatacaagttccaaatgaaaaggttggattaatcatagggagcagtggggagacaattaaaagcctgcagaccaaatccg

SEQ ID NO: 14309 - DNA, 241 bp, Glycine max
  Clone ID: 700964504H1
ataattgttgttgttgtggcggcggcggtcgtggtggtgatagtgatatttggaatttgaggattgagtggggggcgtgaaaaatggctgccaggagtgatcaccaaacggttcctctttcagttctcctgaggcgtgaattggcgaacgagaaaattgagaaacctgagattgctcatggtcaagcatgccagagcaagaaaggggaggatttaacactgctcaagacggaatgccagag

SEQ ID NO: 14310 - DNA, 239 bp, Glycine max
  Clone ID: 700964505H1
gtcacttccaaaaggtgttgacatccattggtaacttttgtatctgctcaattgctgtgggcatgttgattgagctcgttgtcatgtaccctatccagaagaggtcttacagagatggtattgacaacttgttggtgcttctcattggaggaatcccaattgccatgccaactgtgctgtctgttaccatggctattgggtctcaccgcttgtcccaacaaggagccatcacgaagagg

SEQ ID NO: 14311 - DNA, 239 bp, Glycine max
  Clone ID: 700964507H1
taagaatccactctcgattgctaccattccaaattcaagcttcttacgagagattcgttcattgcttcttctttttttcctttcattttatacggcatacagcaccagactttccttcatgggcatggcaatttttccataaaaattcgttttttatttcctctctttttttaattttttatttgggtcttttcgatcactttgattgaaagacctttttcttcttggttagtttttgt

SEQ ID NO: 14312 - DNA, 254 bp, Glycine max
  Clone ID: 700964465H1
aactgacaatttgtcaccatactttaactttactacttacttgcccaattaactatgtcatcgtcatatgccaaaaagcttcccactttaaagttaaccataaagaataactctctgtgaaagaaaaaaagcagcaaccaaattgatcttcggtctgggctgcaattgaaatgctgaagctctacgaggcttataagtgaacccttggtcgttcatgacatacaggcaattcagaatttgtcgctacttgctaa

SEQ ID NO: 14313 - DNA, 217 bp, Glycine max
  Clone ID: 700964508H1
gtgcaattcacatttttgtacatccttatcagcatttcaacttcaacagtaacttaattacaggagagagagaaaactatgatatttaacacattgcagtttgatagaaggtggattgaagaatatacaccttaattgatttttctctctcctgtaattaagttactgttgaagttgaaatgctgataaggatgtgcaattcacatttttgtacaat

SEQ ID NO: 14314 - DNA, 253 bp, Glycine max
  Clone ID: 700964434H1
aattgttgtaactttttgattcctaaattctctaaaattcgaaattctaatttcgttaggggaaagagattgtttgtgtgtgagtgagtatagctggaaaaggcgagggtcctgctatcggaatcgatttgggaacgacgtactcttgcgtcggcgtgtggcaacacgatcgtgttgaaatcatagccaacgatcagggtaacagaactaccccatcctacgtggctttcaccgacacagagaggttgatcgg

SEQ ID NO: 14315 - DNA, 251 bp, Glycine max
  Clone ID: 700964435H1
ctcattcacacattcacagttatactctctctctctttgtcgcttggatcactgatctcatctcaattttcagatatgtcgacatctgataagccagaagtggtggaaaggggtagcaaggatgaaaaacacaaggaagatgatcaagaggaggggaagggtggattcattgagaaggtgaaggatttcattcatgacattggtgagaagattgaggaagctattgggtttgggaagccaactgctgacgt

SEQ ID NO: 14316 - DNA, 249 bp, Glycine max
  Clone ID: 700964437H1
aaaatcttcatattcatcaaatttatcaaaatgaatctgtaccactcctccaccaccaccaccacctccaccatcttcaccgtcatattcctcctccttgcaatattattcactctcacaccccactaggccaactgtgccacgtgtcaccctgaggaagaagcgggcctgttgggcttcaaatccggtatccgatccgacccgtccggcctgctcagtaactggatatcgggtacggactgctgcaca

SEQ ID NO: 14317 - DNA, 245 bp, Glycine max
  Clone ID: 700964438H1
atcagactcttgagaatcagaaggtttcatctgacgagaggcagaatgagttacaaggccttctatgtggttgcttgcaggttatcatacagaagttaggatcatctgaaccaacaaagtatcatttcatgcagtatgctgaccaaataatgggtttatttttgagagtgtttgcttctcgaagtgcaacagctcatgaggaggctatgcttgccattggagctttggcctatgcaactggtgct

SEQ ID NO: 14318 - DNA, 247 bp, Glycine max
  Clone ID: 700964440H1
gccatttcaatccccagtttcttcttcaacgtcctcttacgagcagatcccaattctccttcccagtttcaaaccctaattccctcattcccatggcctcagaagagcccactgtcgcggtggaacccgctcccgaacctgccaccgccgagcctcccccggaggagaaggaggagcccaaacctgaagccaaggctaagaaaaccaaggaacccaaacctaaaaaggtttccagaccacgcaaccc

SEQ ID NO: 14319 - DNA, 246 bp, Glycine max
  Clone ID: 700964441H1
gtcactttcgccattgtcattccatgccttgaggctggcattgctgagtttgatgactttctcaaagcccaagctgatgaagcacaaaaaattgctcttgaggcctatgtcccagtgccagaagatgtcaccgacgaactcaatttccatgttcatttgtcattagaaaactccacaaggagggaactaaggcaaaggaagggtagatcaggaaaaaaatgtgttgccagcaaccctattgacact

SEQ ID NO: 14320 - DNA, 242 bp, Glycine max
  Clone ID: 700964442H1
aaaatcatggccaccacagccaccgaacctctcccttcctccgctgaaatgcctcctgccccgcctcctccgaagcaaccgccgcaaccggtggcggcggcgtcagcagtgaagcctgaggctccattgtccgattcgaaagcttcggcggaggcgaacgtaatagtggtcccgagctactctcgttggttctcgtgggattcgattgacgaatgcgaggtgcgtcacctccccgagttctt

SEQ ID NO: 14321 - DNA, 240 bp, Glycine max
  Clone ID: 700964443H1
ggaacaattcaagcacctacaaacgtttgtaaccttaagggggcagaccaatggttaaaggttcaacatgttaactctttcaccctgtcagggaaaggagtttgtgatggtcaaggaccaactgcttggagacaaaatgattgtacaacaaacaagaactgcacgatactttgcatgaatatcggttttaatttcctcaataattcaattgtccgtgaccttacttccaaggatagcaaa

SEQ ID NO: 14322 - DNA, 244 bp, Glycine max
  Clone ID: 700964444H1
tctacctcttaacaataatcagatagaaaaacatagccaaacaactcagcaatgaaattcacttccttaccagcaacgagatacacaacggagagcgcgaaaacgatcatggagggaataaacacaaccatccagtaataatcagcaatctcctggtccgtaagataaaaagcgccagggaacagatccgaatcgggaccacctttcatacctaactgtatggattgaagccttcgatcgacgc

SEQ ID NO: 14323 - DNA, 246 bp, Glycine max
  Clone ID: 700964445H1
gtccagcacgccggcaacattttgccccgattgtacctcctctgtacgttaggatcagtatacatcaaatccaaggaagctcctgcaaaggatgttcttaaggatcttgtggagatgtgccgtggcattcagcaccctgttcgcggactctttctcagaagttacctttctcaagttagcagggacaaattgccagatattggttcagagtacgaaggggatgcagatactgtagcagatgctgta

SEQ ID NO: 14324 - DNA, 246 bp, Glycine max
  Clone ID: 700964446H1
tttctgagaaaataattgtcttgctccttactgttgatgccattgagggagctgatattatggtaagatctgccaagaggtcaatggtggatgagctggaagcaatgcttgatgtggtagatccccagcctggtggaagatcagcatcactctcctccttcaaaagaaggacatttgatatgcctgatggagtcatccggaaggaaattgaagaaggggttgcacaggttgtgcaaatgcttgaag

SEQ ID NO: 14325 - DNA, 252 bp, Glycine max
  Clone ID: 700964449H1
gcggctcgtgatgatttgggtaaaggtgctattgacaaagaagtggtggagaaggtgtgggaccgaattgctcctggtttagcttcccaatttgactcaccttattcagttccaactatcgcaccacgtcctttgcttattgttaatggtaagacccttgtatatattgtacattaaacattttcaaaatgaatcaggctatcttattcatatacaacggcatatattgacaattcaggtaaccactctgct

SEQ ID NO: 14326 - DNA, 248 bp, Glycine max
  Clone ID: 700964450H1
gtgtgggtttcctagggaatccattctcattctcacagatgatatggaggagagaaacccacaaaaattcccgacgaaatataacattctgaaggccatgaggtggctaattgagggtagccagtcgggggattcattggtgttccagttctcaggacatggttgtcaggaactggatacgaatggggatttcgatgagcttgatgagcgtgacgaagcaatatgtccggttgattgggaaaagcagg

SEQ ID NO: 14327 - DNA, 250 bp, Glycine max
  Clone ID: 700964451H1
atcgagtgtgggaggccattacaaaggcttttgcaagccaaatgaagtctgctttcactggatcaagttttgttaaagagatttttacaatgggatatccaaagctttactccatgatagagaatctacttgaaagaatttcacatgacacagatatcaaaggagtgttaacagctatcaatttgtctggaaaagagcagataatttcagctgtcgaaatattccagaatgcatttttggctcattgctt

SEQ ID NO: 14328 - DNA, 247 bp, Glycine max
  Clone ID: 700964453H1
aaacgacacaatttttttctcctctctctctaaattcaattatggcgtttaagaaaacgctagcccagcggcttctcaacatcacaaaaatctccaattaccgcatttcctcctccgtagtcctatccccgaacccgacaaaacctgacattgctccggatcccggagacagccgcaggttcctccacaagagggcctccgtgctcccgccggagctccgcccgccgctgcccgccggcagcctcct

SEQ ID NO: 14329 - DNA, 248 bp, Glycine max
  Clone ID: 700964454H1
ctccgccttcttttatctctctctccactcccatatcgaaacaaagtcgttttgagttccgccgaaggtaccgataggtatgcagcagctatggatttggcatccaatctcggtggcaagattgacaaagccgaagttctctctgccgttcagaagtatgagaagtatcatgtttgctatggaggtcaagaggcagagagaaaagctaattataccgatatggttaataaatactatgatcttgttac

SEQ ID NO: 14330 - DNA, 244 bp, Glycine max
  Clone ID: 700964455H1
ttttcccttcatcgtcttcctcttgaaggtattgaagttgttttgttatgtgtttgccagagggagagagagagccatggcactagaggcagtggtatttccacaatcacaagacccttttggtggtagtggttacggatcagtgaataataaggacttctacaactgcaccttgttggctgctacttcacccaactcatggggggactatgagcaacacatcaacatcaacaaagaagaagaa

SEQ ID NO: 14331 - DNA, 244 bp, Glycine max
  Clone ID: 700964456H1
cgtgtccatagttgcaagttatctaagcccagtttgtgtttcactcacacaccgtttccggcaacaacattatatattcacgcccctcacatcacttcttccatttctgagatccgcaccttctcttcactttcagatggttctgtctctgtagcttggaatcagacgaaaggagaatttgctgggggggagagtttcaattttcaaatcttgtcggtgattcatttggtattgtattgcactc

SEQ ID NO: 14332 - DNA, 241 bp, Glycine max
  Clone ID: 700964457H1
ggtggtcaggatcctggcaaacaacatgcatacttaaagaagtctgaatcaggacacttgcataaatctgcttactctgattcaggtaagaatggtgggagtatgtcagacatcaacaatccatctttggataggcatgctgagctacaaaagtgtgctgttcctcccaataactcatacttcaagggatcacctacctcagcttttagtggtggaggtggcgtgccttctcagtactcgc

SEQ ID NO: 14333 - DNA, 241 bp, Glycine max
  Clone ID: 700964459H1
cttaatttgcgcttcccattttcttcttcctttcccccaaaagttaattaaacattaattcccgtccgttactgtaatagttacgatattaatctaattttggtggggtgagagatgttgatcaatgtgaagcaatccaccatggttcggccggcggaggagacgccgcggagggcgttgtggaactccaacgtggatttggtggtgccgaacttccacacgccgagcgtgtatttctaca

SEQ ID NO: 14334 - DNA, 242 bp, Glycine max
  Clone ID: 700964460H1
accgcgcaaggtaacgaacgtagctgagcaaaagcaagcagtaacaatgccattgtcaacggtcgtttcccccttttgttcttcctcagccaccttcctatccacagttatcgcgcgctcttcactccctccaaaacgcaacgtctccccttccccattttccactctctctcgcagaggcattgctctgctttccttcctctccctctccctctccctctcagcaccagcctccgccattg

SEQ ID NO: 14335 - DNA, 245 bp, Glycine max
  Clone ID: 700964461H1
atcgtgcattttccttgaacgcgatcgtcgaatgaaaatgaaaaagaaacgaaaggaaagcgaggccagtggacggtcgaacttgccggatgagatttcgaagtcgcattactcccttgagcggcgttcgcggttgatcaaacggtgcagggaagacggcgtcgtggcgacggtgccgccgtcacgcggcgcgtcgttattcctaacgccgtcgcggggcttgaagcggaagataggttgcatcg

SEQ ID NO: 14336 - DNA, 245 bp, Glycine max
  Clone ID: 700964462H1
caggacaaggagggaatccccccagaccagcaacgtctcatcttcgccggaaagcaacttgaggacgggcgcaccctcgccgactacaacatccagaaggaatcaacccttcacctcgtcctccgtctccgtggtggcatgcagatcttcgttaagaccctcaccggcaagactataaccctagaagtcgagagctccgacaccatcgacaacgtcaaggctaagatccaggacaaggagggtat

SEQ ID NO: 14337 - DNA, 254 bp, Glycine max
  Clone ID: 700964432H1
gtcggcctcgacgatcctgacaaggccgccgtcctcaaatggctctcctccggcgcccggacgccgcgcaacgccttttccatcgccctcatcaatggccaaatccacgagctcaccgtcaaccttctctccccgcgaaacgttgtcttggacaaaatccacacagggaacgggttccccaccttaacggaggaggaacaaaccgaagccctagagcttcttcccaagtacggtccctttcttgagtccttgaa

SEQ ID NO: 14338 - DNA, 249 bp, Glycine max
  Clone ID: 700964463H1
ctgacgatatgtgatttgccagagttaaagtgtttttttgcagtgtgaactgttgaagacattttcacatgtagaaccaaatactaaaaatcaaatctgtattgaaaagcttacaccgagtgctcggtgctgcaaattgggtgtaagcttttcaatacagatttgcagcacctgacactcggtgaaaatgaactgaagatgattccgcatggagaatttccaggaaacgtcttgcacaatttaaaagct

SEQ ID NO: 14339 - DNA, 276 bp, Glycine max
  Clone ID: 700964464H1
acgcaaaatcggaatccagctcgagaacaacttgttttcctcatctagatggtggtacgtggtctgtctctggtgaaagcggcaaatggtccttcacatccggccctcttgagaagaacgtgtatgaacccctatatgaagaagcaggatggggtcctactggattctctgttgatcttatagcagcacaagcagttagatcactccatattgcaaaggaggcggatgaagcaaggattatcttctaaaggaatgctgaatgaagtcttgtttgtg

SEQ ID NO: 14340 - DNA, 211 bp, Glycine max
  Clone ID: 700964393H1
aatcaatcaaggcgtttttaattaaaaaaagaagaagaagacattttagaaagaaagaaagagaagagaagagaagaatccctcttgtaaattctcatttccccgtatttgtaggggccattttgattttgatcccaacccacgttaattgttggtccttttttcgatgttcatgaaagaaaagcattgaattgaatcattccacacaaca

SEQ ID NO: 14341 - DNA, 248 bp, Glycine max
  Clone ID: 700964394H1
acaaaaccctgaagaaagacacagccattgtttgtttactttccattgattgagcgaaagcgttgttttttctgcgatcattttccattgggtggaagaaagtctcaacctttagtcgaaagagcaaggatctgagtgagtgagcgatcatgtgtggtggtgcgattatctccgacttcattccagcgggtcccgccggcggggcgcacgcgtgaccgccgacatcctgtgggcgaatttgaggaagc

SEQ ID NO: 14342 - DNA, 259 bp, Glycine max
  Clone ID: 700964395H1
gcggaatcagctagaattttctaataatggccaaagacgttgagcaggttacagagcaaggtgaatactccgcgaaggattaccatgacccacctccggcgccgttgatcgacccagatgagctcactaagtggtccttgtacagagccgccatagctgagttcatagcaacactccttttcctttacatcaccgtgttgaccattattggctacaagagacagagtgacaccaaaatccccggtaacaccgagtgcga

SEQ ID NO: 14343 - DNA, 262 bp, Glycine max
  Clone ID: 700964396H1
agagaatctagagagagagagagagggtttttattttattttaataagattgtgttgtgtttggttctttatttgttgtttactttgaagtggggtgtgtggggagagaaagttgggtttctctcgcttgtatctggaaaaagtctcgattttttcaagtggggtttgagggatttagggtttgggttgttgggtcgtgagtggaatcagcaaccatgaatatgatgcgaaggttgaagagcattgcttctgggaggacttc

SEQ ID NO: 14344 - DNA, 263 bp, Glycine max
  Clone ID: 700964401H1
cttttccctcgttgaaatgaaaatgggttcttctttgtggactttgtgtctaattttggcttcactagcctcttctgcattctgtgcctttccacggaggccagtggatgttccattcggcagaaactacgttcccacttgggcttttgatcacatcaaatacttcaatggaggttctgagattcaacttcatcttgacaagtacactggtactggcttccagtccaaagggtcatacttgtttggtcacttcagcatgaaca

SEQ ID NO: 14345 - DNA, 259 bp, Glycine max
  Clone ID: 700964402H1
cggctcgaggatcttggaactgtgacgagatgccacattgattaacaacaacaacaataacaacattagatctcaagttggagtctttgtttggagacacccattatggggggtgtgagtctgagggaatcatggtgtttctgcaaaggggtgagtaagtctgagagaatgaaagctgctatttttacagggaaggctcaggccatggccacaatcgccgccaccgccgcgcctaatggggcttccggcaccgggtttt

SEQ ID NO: 14346 - DNA, 254 bp, Glycine max
  Clone ID: 700964403H1
gacgacgttttagctcttgtttccggacttgaatttgcgttgtggacttgtggtttgtatgagtagtttcagcgtgagttcgagagaaagggaaggtgtagcgcttgctgagtttggaggcttgtagaatctaaacgtactatgctgacgtggcatcggaaactgcacggggcttctttcagagttgtgtgttgaaggatgttctcagttaacatgatcgcattgattttttgaatgaatgtagatttggtgtt

SEQ ID NO: 14347 - DNA, 250 bp, Glycine max
  Clone ID: 700964406H1
cgcaaggcttgtacaattaaacgcctttgcttcaaatttcataccacttgagttcttgcttcagcctttgagctgctgctgctacatattaattaggcacaccggaaaataaacttgatggtcttgctcattttgatgaattgtatttttctttctttcttttaccgtaaattttttaaaaacatttaatcttgaattgtaatcttgcactaactgcagtggggtggaatatacttgcatagaattgtgt

SEQ ID NO: 14348 - DNA, 249 bp, Glycine max
  Clone ID: 700964407H1
ctggtacacattgggccctctgcttcctccaagaatcaattcaagcatggctgtgcttgttagtgttctcaaagggggcaaagagacctacgaggacttctttatgggaacggctcacttcaaagacatagcattggcacatattttggcacttgagaacaagaaagcagcaggaaggcacttgtgtgtggaatctattcgtcactttagtgatcttgtggacaaggttgctgagttataccctgaata

SEQ ID NO: 14349 - DNA, 250 bp, Glycine max
  Clone ID: 700964409H1
attgaacaaaatgccaccaatcatattggcagcacaaacgatgcagacaaggaagatatctatcagttgggtattattctacttgaagttatcactggcaaacaaattacatcctcgagtgaaatagaggagctgaaggaagagctggagaatggttcatcagaagcaacatcagtaattagaagcgcaattgatccttcactgaggggaacttatgcatatgaatcaatgacaactgcagttcagatca

SEQ ID NO: 14350 - DNA, 245 bp, Glycine max
  Clone ID: 700964410H1
caaattcaacgctgcggttttcttgttccttcttcttcctcgatttttgtttgcatctgaatatatacatttttttgtctgatttatgctttcgttttacgaatcatgacgcaattacaatctaataccgttgtgttcattcgcagattcttgacgctactcacgacttttgacagaagatggcttcaagattctggactcagggtggaagtgattccgaggaggaggagagtgattatggtgag

SEQ ID NO: 14351 - DNA, 246 bp, Glycine max
  Clone ID: 700964411H1
ttcatctacgagcctccgcagcagggttcggaggacaatctcgtctttttcagggacccagaagaggagaagtttgttgaagctattgcggtggggttggggatgaggaaggttgggtttattttcacgcagacgattactcaggataagaaggattacactttgtcgaatagggaggtgcttcaggctgtggagtaccatgccgagagtgggttgaaggagtgggctactgcggtggttaagctt

SEQ ID NO: 14352 - DNA, 251 bp, Glycine max
  Clone ID: 700964414H1
aaaaacacctcacgaaagcgtcattggattcaatgcgagagagacaagtccagaaaagtaaaattaaatagcaacacatcaccgaacagaaggcaatgggtggagagagagaaatggcgaatggtgaatggtgaatggtgaatgaccccacagaaggaataaaacaggctgtggtagagctgtaaacgttccatttcaccactctttatgatatgatatattttctccgaaagcatagctttgagcaaaca

SEQ ID NO: 14353 - DNA, 257 bp, Glycine max
  Clone ID: 700964416H1
cgagtgtgttgttggatggatgttcattctccaacttgataccgcgttcgctcactctctactcaacttcaattaatcaaatccctcactttctctctcttgtcttcaaatctcaattctattttggaaaatcagaatcaaagacagttaaaaatacagaacaaacatctcactcaacatcaacacttcagatctacgtttccactctcacaacaacagaaaaggaaagaaaaaccgattctacagcgacaacaagg

SEQ ID NO: 14354 - DNA, 261 bp, Glycine max
  Clone ID: 700964417H1
gcgcaaccggtccacccaaacatactatttgtttctcagtttaaccagtacgctagctgaagatgggaagttccttcttgctgcacgcaaatgcagacgtccaacctgcacagattatatcatctctcttgacgcagatgatatgtcaaagggaagcaactcctatgttgggaaactaagatcaaactttcttggaacaaagttcacaatctatgatagccagctgcctcatacaggagcaaagattatgaaaagtcgctc

SEQ ID NO: 14355 - DNA, 257 bp, Glycine max
  Clone ID: 700964418H1
ggtccttcttccgccgccccaaggagatcgagaccgccgacaaagttcccgacttcgtcgacaccttctacaatctagtcaccgacatctacgagtggggctggggccagtccttccacttctccccctccatccccggtaagtcccaccgcgaggccacgcgcctccacgaggagatggccgtcgatctcatcgaggccaagcccggcaacaaaatcctggacgtgggctgcggcgtgggcgggcccatgcgggca

SEQ ID NO: 14356 - DNA, 250 bp, Glycine max
  Clone ID: 700964419H1
ctgctcacaatggtgactgtgaagcctgatgcttgcattgtggatttctttaatgaggttgcttcttcttcccccccttttttttttgtgggggtggtgaggtggggggtatattggtgtcagatttgcttacataactaggtattgctatcgtctgtagggtgagcactcacatcccaacaattggcctccttggtttggaaggcctgtttatacacttttcctgactgaatgtgacatgacttttggg

SEQ ID NO: 14357 - DNA, 248 bp, Glycine max
  Clone ID: 700964421H1
gcaactcccggtggttgagaaaccctaaccaccgttgaaacgccgttgtttcactcccaaacctcgctattcacgcgcgtttcccgccaccgttccgaagagaagtgatttccacacagtataaaatatgtaaatcttcttcaatcccgaaattgggagattcgtgaatcaattttcgtcagctcgtaataatttatagtcgttgctggttaaaggcctaaggaatgcagtccatggtctgtacattt

SEQ ID NO: 14358 - DNA, 248 bp, Glycine max
  Clone ID: 700964422H1
cgtatgtgactgttgcgactcgatcttctacgtcgttctcttcttctcgcgtcgtttgtgcgtccgtcttttctctcacctgaaaatgtcttgctgcggtggtaactctggttgcggaatcgcctgctagtgcggcaatggctgtggaggttgcacgatgtacccagacttgagctacttcgagtcaaccaccaccgagaccttggccattggagcggcaccagttctggctcaattcgagagtgctg

SEQ ID NO: 14359 - DNA, 246 bp, Glycine max
  Clone ID: 700964423H1
aaacactctctctctctctctctctctctctctctctttctctctttctttctttcttttttttctctgatgcgtttctacaaaaacacaaccttttaactgttttatcttcttctttgcttgctccttatttcttccttcgccgaatcctagaatgtcctcgtcggggttccctggcggcggtggtgcgtcggagtttttcgccggggtatgtggtttcggcggcagatccattccggcgaccag

SEQ ID NO: 14360 - DNA, 248 bp, Glycine max
  Clone ID: 700964424H1
agaagctcctccagtgccacctgcaccgcccatagtggccatgctgccatcccctggcatgggccacctaatcccaatggtcgagttcgccaagcgagcggtgcgctaccataacctggccgtcaccttcgtcatccccactgacggcccaccttctaaagcccaaaaggccgtcttccaggccctcccggactccatttcccacaccttcctccctccggtcaatctctccgactttccaccgggca

SEQ ID NO: 14361 - DNA, 244 bp, Glycine max
  Clone ID: 700964426H1
ccgtcactcgccgcatgcagcattttgcttcctcaaaattctcttcattctaacttccattttcgcaaagttaggaatcactattcctctccgcttcagttcctgtgatttccggtgaatcggagaattcggaactgtagtgtgattctactgctgcctcttctcgcttttccgaaatgcttctcctcagccctgttactcccggtcaggtctcgttccttctcgggatcattccagtcgttgt

SEQ ID NO: 14362 - DNA, 245 bp, Glycine max
  Clone ID: 700964427H1
ccattactaacttcctctctctttgtaacttgtaagcatggagtcctcaaagatctatgcttacctcttcctttgcatgctcttcctctcctccgccactcccattctcggttgtggctactgtggcaaaccccccaaaaagcacaagcctggtaaaacaccaaagacacccacagtacccgttgttaagccaccagtcacaatccctcccattgttaagccaccagtcacaatccctcccattg

SEQ ID NO: 14363 - DNA, 246 bp, Glycine max
  Clone ID: 700964430H1
ggagagatcgcacgggagttgcccggggtctctctctcgtgtggtgtgtggtgtatgctgtgctctcctgttcgttatgcctgctattattacctatctgtcgctccactccgtattacgaccctggatcagagggatacatcagaggattcgctccaactcctatcgggtaaggtattatctgtcaatgtagattggacagggttaggatattcaatttgacataattacagctacaatcagcga

SEQ ID NO: 14364 - DNA, 250 bp, Glycine max
  Clone ID: 700964392H1
cgacgcgcccacgtcatctctgagttccacgcgtcctacaaagacctcttccacgagctcgaagccaacctggccgaagctggcaaagccagcttcggggacgccaacgaccaagccgccttcaacttcttggcacgctccctcttcaactccaaccccgccgacaccaaacttggccgcgacggccctaaaatcgttcagaaatgggtcctatttcagctcgacccaatcctccgcttggggctccctc

SEQ ID NO: 14365 - DNA, 258 bp, Glycine max
  Clone ID: 700964361H1
atacaccacaccacacctggctttctctttatcattcgttccttcctttcttcgcattgacaaaccctaacatagcatcatcctaaggcacatgcttctccccctgaatactttgtcctccaggggaacacaacttataaagacgatctatatttaaggaagaggacagggatgcgtcggtggctttgttgcacatgtcaggtggaagagtcttacccatcggatgaaaatgagcacctgaaaagcccaaggaattat

SEQ ID NO: 14366 - DNA, 254 bp, Glycine max
  Clone ID: 700964362H1
gcggagagagagtttaggccttagtgagaaggataacgccatttggttttggcttggaatacgtcatccactatcaatcaactgggctttgaaatggtgaaggagaccgaatactatgacgtgctgggtgtcagccctacggcatccgaagccgagattaagaaagcttattacattaaggcacggcaagtgcatccagataaaaacccaaatgaccctcttgctgcacaaaattttcaggttttaggtgaggc

SEQ ID NO: 14367 - DNA, 262 bp, Glycine max
  Clone ID: 700964363H1
gaacagtgtgactaacactatatggtgacaagatttccctcatgccacttctgttgattttgcatcacttctcccaaaaattggcaatgctgacattcatcaaggctcaaactgtggggacaagttcaaattttgggaggacagatggatgggctgggaggtttcgttgattgcaagataccctaggttgtatgttatatcttcacaacaaaaccatatcatacaacacatgggggtcttccgagataaagggtgggaatgg

SEQ ID NO: 14368 - DNA, 113 bp, Glycine max
  Clone ID: 700964364H1
atctctctctatctctttgtctctcatccagatcttgcaaaaaggtagaggcacaatggaagagagggctccgactcaaggggaagagtccgtgtaattggagaagtgggggt

SEQ ID NO: 14369 - DNA, 257 bp, Glycine max
  Clone ID: 700964367H1
ctctctgttcccttcttctgtctcatgcacacaccactgtaccttgttctcaccgaaaccttcaactaggaatcgatcgagagtgtcttgtgttgctagtgcaagaggctgcgatatagatagatacgttcgtgcgtacgtaggaagggtacgtacgcggtagtacacaagacacgacgccgttttgcactctgttcttatttccgatcatgagggcgcacaagaagggtgttaccgtggggatcactgttgctgct

SEQ ID NO: 14370 - DNA, 254 bp, Glycine max
  Clone ID: 700964368H1
tgtaattcctgagtttccatttcaggtgtggagtttgagacctcgtgaccgtggcatgctggggaaaggagtttcagtagggacttttttctgcactagttgttggaacaatggagatgagctatctgttgtgtgcttgaagaacctaaatcgtgtgctgccagcaatgccacgcctccaccaaatacatgcacttatagagcattatggtcctactgttttctttcgtcctgaggaagtatacttgccctctt

SEQ ID NO: 14371 - DNA, 254 bp, Glycine max
  Clone ID: 700964369H1
ctagaagcaataagatgaaaatgaaagtgcttgttttgtttgttgctacagttttggtagcatatgaatgccatggctcagactaccagaagttccctctccaaatgaaaactgggtttggtgggcaatacagcaatgaggtggcatgtgccagttggaggcttggcgtggaagcaaacaacgtagtcaagtggcaaactgttcctgcagcttgcggagagtacatagctgactacgttctaggagaccaatat

SEQ ID NO: 14372 - DNA, 250 bp, Glycine max
  Clone ID: 700964370H1
gacagaaattgttgtccctgactggcgtgggcgtctgtgtatgaatgtgtttgtgagaaaatggaagctgcgatgggactgatgcggaggattcctccgaaacacacagaaacagctctgtcagcgcttctgagccttatgcctgacaactcctccgatctcctctctcaagtcgatcagcccctccaggttctgtgcgatgtggaatgcggcaaggagttcattttgtgcgaatacaatagagatgccg

SEQ ID NO: 14373 - DNA, 251 bp, Glycine max
  Clone ID: 700964371H1
atttgtagctgttgaaaatgtcaaaagttctgatataactgacaacggatcactttctactgatctgagcaaagatacgacgcttacatccattgttggggatgatcctgtatcgacggcagattcagagaagcaatgcaatgtaaaacaggttgctgaacctgaactgaataatgatgccccaagtgctgcaagtgtgagttggaagtggaacgaggaggatattgatgccccatcaattcttgaagcat

SEQ ID NO: 14374 - DNA, 253 bp, Glycine max
  Clone ID: 700964372H1
ctagcaaatgggttctcaccaacaagaaccatggctattggagaatgggaaaccaagggttttgaccaaggagaccaggcatggccgttctgcacacagaatgtcctccacctctttgcgcaagaaatctagccgaactcttgtctcaaaggttccatgtgccactctcagaaactttctttcaaatttgcaagaggttattcttggcaccaagctttccattctcatccctgctattccagctgccatcgtt

SEQ ID NO: 14375 - DNA, 250 bp, Glycine max
  Clone ID: 700964373H1
ccgggaaagtgtcctccagggtatggtgctagtgctaatgatcattacgtggagccagggtacgtgaaccagggttatcctctgcagccacctctaccgtactacatgcacccgcacgctcctcctccgcagatgttcagcgatgaaaaccccaatgcatgttcaatcatgtgatgatcggtgattaattttcggtgtacacttacacacgtacgggatacggatacggaatacgcatggtgtaatttgt

SEQ ID NO: 14376 - DNA, 214 bp, Glycine max
  Clone ID: 700964374H1
agcgcatctcagttcttcacttttatacgctaatctcatgtacagattatacatttaagatgcagaactttgctatcgtaatagtataataagtactacccaattccaaatatcccatgggaacccatattagatttggtatactatatactatacgatacaatctatatggctccatagataagggtgcatgttttcagtatgtgcagagcgt

SEQ ID NO: 14377 - DNA, 254 bp, Glycine max
  Clone ID: 700964376H1
gcgaaggtgctttcttagttgtgctgctaacgacaatccatggaaatgataagctccaaattcttcttcttcttcttttcaactctctgtcttctctacggattttccaacgccaccgatattcactattgcgataagaaagctgactatgatgttgaggtcaaaggggttgaaatatctcctgatcccatcgcacgaggccagcctgctacattcagcattgctgcaactacaggtaaagctttatctggagg

SEQ ID NO: 14378 - DNA, 257 bp, Glycine max
  Clone ID: 700964377H1
atctcgcccaactcttagaaggaatcccagacgttttgtataccagatacctttacatctatctttacaaaagaatttctcaactgcatcaaaaccaggggtttcctcagcttctgggtctccgggcaagccacctgagtctaatggcactctatcaaagtttttcattggaagtgtagctttaggtgctgcttttctggcagcttatcagactggttatttggatcaatatcttaagaaggagcattatagtgttc

SEQ ID NO: 14379 - DNA, 256 bp, Glycine max
  Clone ID: 700964378H1
tttggatctgtattcaacaagttagggaaggagcttggagaacctgtagactttgaacttccagattggtttaataaatcaaagccaatgcagtacacctatataaaacgcaatatatatctcactaagaaggtcaagagatcccgatttgatgatgatggcatattctgttcatgtactccttcccctggatctactagtgtatgtggtagagattgccactgtggaatgcttctgtctagctgttcatcaggct

SEQ ID NO: 14380 - DNA, 251 bp, Glycine max
  Clone ID: 700964379H1
cagcattcccatattagaatcctcatcttatcatttgtactctcccccacccagttaatttatcgtatctctttgcagtgaagtctgagcgttgcacacaaagatatttaccaatataatataaggctgtaatttgtaagcaaagaaaatggtgaagatatgtggaattggagccgggtacgtagggggtccaacaatggctgtgattgccctcaaatgcccctcaattgaagtggctgtggttgacatct

SEQ ID NO: 14381 - DNA, 263 bp, Glycine max
  Clone ID: 700964380H1
caaccacacacactctctctcccctctctgcaccaaaaccacttctccggcgacatctccggtcaggttccggcaacctcatcggcgaatcggcatgccaacacaatgaatgcggaacctccgctgccgccggcgctcctcatgtcggtttcctgcctctccgactacgacctcctctgtggcgaggacacctccggagtcctctccggagagtcgccggagtgctcctcatccgacatcggctcctcagcacttccgccgtc

SEQ ID NO: 14382 - DNA, 250 bp, Glycine max
  Clone ID: 700964381H1
agctcaggattcggctcgggattaatcttatatacatatatataaagacatagataatagtcatgtagatataattatttcgttatattttccttgcatgggctgttaagatgtctcgcacgtgctcacagtgcggcaacaacggccacaactcacggacatgcaccgacggtggcgccgccgggtctccgagggagaacggcatcatgctgttcggcgtaagagtcatgacggaagctaactcctcctt

SEQ ID NO: 14383 - DNA, 257 bp, Glycine max
  Clone ID: 700964382H1
gacgacaacgaacccgacgatttcgacgacgacgaagctgaaaacggttacgacgacgaaaacaacatcgccgcgtatcctcggatcccgaagaagcgcaaggtagtcggcactgcagcggcaggaggttcttacgagttcgcgccacgtgtcaatttctcctacggaaactcccgcggttcgggttcgggcaaggagtggaacgagcacgagactttcgtactgttagaagtttggggagacaagttcctccagct

SEQ ID NO: 14384 - DNA, 252 bp, Glycine max
  Clone ID: 700964384H1
gctcgttcccagggatggacgtgtcaaaatcagagccatcaagacacggcttcttgcagagtgaaggaaatacttatgcatataaataaatttgtggggtgtaatacttgtattataggttaattttgttactgctttttaaattatggagacaatttataattgtgcttgtattttatattaagagaaatttaaaagcttgtgaggtcagttgtcccaaaattcaccaagtacctaatcttatttgtgttg

SEQ ID NO: 14385 - DNA, 251 bp, Glycine max
  Clone ID: 700964385H1
accaccacctgttgcatcattggagcatggtgaaggtgctcatcatgaaggagaggccaaggagaagaaaggtatattagaaaagataaaagagaagcttcctggttatcactccaagacagaggaggaaaaggaaaaggaaaaggagagtggtgctcattgatatttaagattgagacaaggcttttttgttggttggagatgcatgattgtggtgtgctttgttttcatttcatcatatgacagccttg

SEQ ID NO: 14386 - DNA, 251 bp, Glycine max
  Clone ID: 700964388H1
gtaaaaagtgcagaacatctcaaaatttcaagtagcagtatacctcctacctaccttttgtgtctgctctttaatgattctatctccttttctcatagactaatcatgttgaaatatatcacactggctagctacactacttaaattgtatttgatgtaaagattcagcaaatacattttgaatttcaatattctctgattgcttcttgtgtccctgaatgtctcattgaggatgacctggttttgtctct

SEQ ID NO: 14387 - DNA, 247 bp, Glycine max
  Clone ID: 700964389H1
taaccattgaagaagtgcaatttcgtcctctaacactcttccagatcatggctagctcactgcttgtgagggttgccagctgcatggttgtggtgtggatgtttagttttgggcacataattcccttggcagaagctgaaattccatgtggcagggtgcaaatcactggggctccatgcatagggtacctaaggggtcctggtggaggtgtccctgcaccatgctgcaatggggttaagagcataaa

SEQ ID NO: 14388 - DNA, 251 bp, Glycine max
  Clone ID: 700964360H1
tgcggttcaagcgcagggtcgatggtggtgccagtgccgagttgcagactgctcttgtcagctacaggaagaggttcccttggtcccttttgcgccctttccttcaggttgacttggtttccacaattcacatcgctgatgaagagtattttctggccctccaaaaggaactcgagagctatgattgtgtcctttacgaaatggtagctagcagggaaagtttagaaaatagaagaaatgctactaataca

SEQ ID NO: 14389 - DNA, 242 bp, Glycine max
  Clone ID: 700964390H1
accaattctagttttttgttctcactacttcttcatacactcacaaaacaataatagattaatatcctaatatcgtattcatattcctgagaaagtgtttgtgtctctctatctatatggcagccttcatcctcatctccaagtccaagcttcaatccacagtacttgttcttgtcctaaacctatctttcttcttcctcttctgtctccttctaaaggcttattatctccaccctcctaac

SEQ ID NO: 14390 - DNA, 255 bp, Glycine max
  Clone ID: 700964391H1
cttcggcaacagcgagcacttcaacaattgggaatgatccagcacaatgcttggagaccccagagaggattgcctgaaagatccgtttctgttcttcgtgcttggctcttcgaacacttcctccatccttatcctaaggattcggacaagcacatgctagcaaaacaaacagggctaactaggagccaggtttcaaattggtttataaatgctcgagttcggctttggaagccaatggtggaggaaatgtacatg

SEQ ID NO: 14391 - DNA, 271 bp, Glycine max
  Clone ID: 700964332H1
tttagagtagagtagagcatcgcgttatgttatcatttgatgaacaaacctctacaaacaacgtaacatggagaatatccatatacagcacagcctatggatcaaatcacattcaaatttagataaatactaaaatcaaatatgaccgaccgtctactgaaacataggaagcaagaatttccattcctaggttggttctctattataaatatacacatctatgctaggtatgtcggtcatctaaataacaggccggtcttttaagtgtccg

SEQ ID NO: 14392 - DNA, 264 bp, Glycine max
  Clone ID: 700964333H1
ctcaatattcgagaaaccgccacgtggcttctggaagcagcaagtttggtctagaaagatcccaaggagtcggtccgaacgaggatccacccccttccttgacgaacacagagacgtgtgttttggattctatttgtgccgtggtttgagatttagatgcgaatagatatataccctgtcttgtgccgtgtcccctttaagccaattgcaatcaaacaaagtttcggttattggtgttcatttttcttcctcgatctttctcta

SEQ ID NO: 14393 - DNA, 262 bp, Glycine max
  Clone ID: 700964334H1
gtaaagctatgggatgtggaacttgggaaactcatctacagcttggatggacacaggcatcctgtatattctgttgctttcagtcccaatggcgattatctagttagtgggtctcttgacagatccatgcacatatggtcattgagggacggcaagattgtcaaaacatacacaggcaatgggggcatttttgaggtctgctggaataaggagggtgacaagattgctgcatgttttgctaataatacagtttgcgttttgg

SEQ ID NO: 14394 - DNA, 254 bp, Glycine max
  Clone ID: 700964335H1
gcaaaaacatcctacgcttgacatgccagtgatcgactacgacttggcacttcttttccaaccagtgctggtgcttggaatcagcattggagttgccttcaatgtgatttttgctgattggatgatcacagtcttgttactaataattttcgtaggaattgcaaccaaggcattcttaaaaggagttgagacatggaaaaaagagaccattatcaagaaggaaactgctagacaatcacaatttaatggcactg

SEQ ID NO: 14395 - DNA, 256 bp, Glycine max
  Clone ID: 700964336H1
ctgcgctcttcagccaccataccatagatccttcattctctgcaacgatcaaacccaaaaaacactgcacctcttcttctggttttcctcgttttgagtttaaattcacagtattttgaggaaacaaattaaagggtaatcgctcgcttaatccaccgagctcaattcccacatccccacaaaagaatcaacaaaatcagatttggtgaagaagagagtgtgatttgatgattatgaattgaagtttgaggtggag

SEQ ID NO: 14396 - DNA, 258 bp, Glycine max
  Clone ID: 700964337H1
ctcgagccgcgcaaaaatggcacctgcaacactgtctctgtctctcctcctcctgttctcagtcagcatcgccgtaaccgttagatcgagcgactacgactacgattgtgtgtacactgcatacgttagaaccggttcggtgttgaagggcggaacggactctaagatcgggctgaagctgtacgacaagtacggctactacatctacattaaaaacctcgaagcatggggcggcttgatgggcaagggctacgacta

SEQ ID NO: 14397 - DNA, 255 bp, Glycine max
  Clone ID: 700964338H1
ttccatttgactcttgttctgaacgacttttcaagagaatcaaaccatggcagtgaaagtatacggtccccactgtgcttccaccaagcgggtgctggtttgtctggttgagaacgaagtcgaatttgaggttgtccctgttgatgtcactaagggggagcataaggatcctgagtacctcaaactacagccatttggagttgttcctgtcatcaaagatggagattataccttatatgaatctcgtgctataat

SEQ ID NO: 14398 - DNA, 248 bp, Glycine max
  Clone ID: 700964339H1
ctgacccttcttcttcttcttcatctacattagtagttcttgttattcattattcttcatactcacacagcttcttctgggggcaaaaggggtcatttttcagatccgaggttgagctcctctacccatcatgatggagctcggatacctgaatcagggtcagccttctagaggaacaacaccacttgtcactcttccattgttgctttcaacacttgtgttcttctccactttcacacatgccttct

SEQ ID NO: 14399 - DNA, 254 bp, Glycine max
  Clone ID: 700964341H1
gacagatgatgatggagatggcgaacgaaacgctgtcgttgcgggactcgcggcgttggtgctactcgcggcgagtgtggcggtggatgctcaggagaactcggacgtgaagacgctggtgaagtacaagcacgggaagaagtactgcgacaaaggatgggaatgtaagggctggtcgatttactgttgtgacctcaccattaccgattatttccagacctaccagttcgagaatctgttctccaagcggaact

SEQ ID NO: 14400 - DNA, 253 bp, Glycine max
  Clone ID: 700964342H1
tgaaagttggagtgttttctcgtttgctgtgctcagctccttatggagctctcactctctccaacttcacatcgagttccttccacaattcccactttggattccgctaaactatcatccactaaggccaccaagtcacaacaacctttgttcttaagattttccaaacacttccgctcaattgggttgcaccatcacagtcacagatgctgctcaaatgctgttcccgagagaccccagagacccagttcca

SEQ ID NO: 14401 - DNA, 255 bp, Glycine max
  Clone ID: 700964343H1
ctcgagccgattcggctcgagaatggaacaagctgggaagcaaagaattatggtggcgtctcagagtcaaaaccccattgagcaaatccaagcgcgcttcaaggacttggaaactggattccgcctctggctctccaagcagtccctccccgtcgaggccgccgtcgtcaccaccaccagcgccgcccagggcgccgccatcgggccttcatgggcaccctcaccgccgacgcctcctccaccttccccacccct

SEQ ID NO: 14402 - DNA, 261 bp, Glycine max
  Clone ID: 700964345H1
gaaagattttgatttggtgatgaaggttggagcatttcactgagttatataaaaggcgtggcttgtgggctgtgtagaactcaaatcgatcaaataaatggctactgaacatgaagacgatttcaaggatgagaagaatccccgccccctcgacgaggatgacatcgcccttctcaaaacctatggtttggggccttattccacaagcataaaaaaagtcgagaaggaaatcaaagacatggcaaaaaaggtcaatgattt

SEQ ID NO: 14403 - DNA, 258 bp, Glycine max
  Clone ID: 700964346H1
ggaaagtgatcgttttctaaagcaagtcacttttcatctccttcggcttgcagtcttccgagatgaaaacatcaggcaaagggcagttgttggtcttcaaatacttgtgaggagttcgtttcgttactttatgcatacagctagattgagagtcatgttgattgtcacattatcagagctaatgtctgatgtgcaagtgactcagatgagatctgatggaagcttagaagaaagtggtgaagcacggagacttaggaa

SEQ ID NO: 14404 - DNA, 279 bp, Glycine max
  unsure (1)..(279): unsure at all n locations
  Clone ID: 700964347H1
tcgggatccggctcgagcacctggtggtggacccttcggaggtgtgattggtgccttccgccacatgattcacctcnagggcttcttttctctttacaagggtttagtaccctccattatcagcatggcaccttcaggtgctgtctgctatggtattgatgatgttttagagtcagcatatctgcattcacctgaaggaatgaaaagaatccaacacatgaaagaagacggtgaagagctgaatgcactggaacaactggaattgggtcctgtcagaac

SEQ ID NO: 14405 - DNA, 266 bp, Glycine max
  Clone ID: 700964348H1
cgcaacaataagaaagaatcccaggcgaggagaaagatggaggggaaggagcaggatgtgtcgttgggagcgaacaagttccccgagagacagccgattgggacggcggcgcagagccaagacgacggcaaggactaccaggagccggcgccggcgccgctggttgacccgacggagtttacgtcatggtcgttttacagagcagggatagcagagtttgtggccacttttctgtttctctacatcaccgtcttaaccgttatggg

SEQ ID NO: 14406 - DNA, 256 bp, Glycine max
  Clone ID: 700964349H1
tcttcaaagacttgaattcttcttacttaggttctgaatggctggaatttgctgtggtgttgtcggagaaggtgacactccggctccactcgagccaactactcgcccctccaggcgccggagtttggacatcttacccttaagatacatcgctgacatggcggtgccgccgtcggatggttcacggaaacgtcccaagctggatctcagggaccgcgataacgtagttcaaaattgcgacgaatccactggacac

SEQ ID NO: 14407 - DNA, 255 bp, Glycine max
  Clone ID: 700964350H1
tagaggttgaagcagcggcttcttagtgagtgcttttctgagattcaatggcgttcattggtgcagtcaaattcttgctgcagtacttagttctattatgcctcctcaactatctacctctttctcaaggtaagcagaactggaatgaagggtacccatttataagaagagcaagttcattgggttataatgggaaaagtggagggtatgattatataatagtggggggtggaacagcagggtgtccattggctg

SEQ ID NO: 14408 - DNA, 256 bp, Glycine max
  Clone ID: 700964352H1
tgcacgcaaatatatatgtgtatgaatctgcacttcatttcaaatcccaacaaaaaaccaaagtaatctaacaaagtaagcacaatgagggagatattgcacgtgcaaggtgggcaatgcgggaaccaaatcggttccaagttctgggaagtgatatgcgacgagcatggcatcgaccccaccggaaagtacaccggcgacgaggcctccgatctccaactggagaggatcaacgtctactacaatgaagcctccg

SEQ ID NO: 14409 - DNA, 255 bp, Glycine max
  Clone ID: 700964354H1
atcttctatctctctcactaactcatactctgtttgctctgtttcagtgtttctctcccctgctatctctaaattgaacgtgttttctgctacttttgcgcgtgtgcattcctcttcccttcaaagctagcactttacccaccaccacaacaaccccttttgctcccacgtgcacagagtcaaacccaaagctctttttttctctccaaacccacaacaacaaaaacagagcttctctgttttctccattcccaa

SEQ ID NO: 14410 - DNA, 251 bp, Glycine max
  Clone ID: 700964355H1
tgtagctgttggaactctggcgtttcttggagcctttttcccttattacactgtcaacgaggagggagtttcaataatcttgaaggttattgcttccttactttcacctacagcctttgctttgggttcgatcaactttgctgattatgagcgtgctcatgttggactccgttggagcaacatatggcgggaatcatctggagtgaactttttggcatgtcttctgatgatgatacttgatacactgctat

SEQ ID NO: 14411 - DNA, 251 bp, Glycine max
  Clone ID: 700964356H1
ccgagatacgagcaggtggtggttgtggtgaggagggtgggaataatattactctgtctgggttgctgaattttactgatggcttgtggtcttgttgtggaagtgagaggatttttgtgtttaccaccaaccacattgagaagcttgacccggctctgctgcggagtgggagaatggatatgcatattttcatgagttactgttcgttcccggcgctgaagattctgctgaagaattacttggggtgtgaa

SEQ ID NO: 14412 - DNA, 253 bp, Glycine max
  Clone ID: 700964357H1
aaaaattggaacctgcctctcttaaagtttgtatttttttgagtgggtgggttgattgagagtactgtgcaagctttggaactttgtcccaacctgctacttcaatggctactgaagaggttaacaaacctcaatcacttcctccataccctgagatgatagtgaaagcacttgaagcactgaatgagccaaatggatcgaacaagtcagcaatatcaaagtacatagaaaccacctacggtgagttgccaga

SEQ ID NO: 14413 - DNA, 252 bp, Glycine max
  Clone ID: 700964358H1
tcttcttcgttgcgctttttcccaaaaccaattgcatcactctcgtccgttaccgccgctgccctagaccaccgcaagcgacgtcgcacaccgccttcatccgttagggcaaaaatgagtcgaggaagtggaggtggatacgatcgtcacatcactattttctcccctgaaggacgtctctttcaagtggagtatgctttcaaggctgtgaaggctgcaggaatcacctcgattggtgtccgaggaaaggat

SEQ ID NO: 14414 - DNA, 259 bp, Glycine max
  Clone ID: 700964359H1
ccctcattttcattgcgcaaagaagtaaaaccccaacttccctttcgtctctgccctcacctgcagaacagaacgcgtcgtctcatttctctccgcatcgccgtcgcaacaacaccgccgagaagataacctcttcaatcggaaaatgaacgctgataacggttccagagacgccaaactcgacaaccaacacgcaaaagacaaagaaaaggaggaactcaccgagaatatgaacaagttgcatattgaaggatcttcg

SEQ ID NO: 14415 - DNA, 267 bp, Glycine max
  Clone ID: 700964331H1
gggttcttgagtttgactctagattttgacaaattcaaagtgtgcatgcactgatgcaacccccttcccctttttctacattaaaaaactatgaatgagatttttcttgcgatcatcattgcttgaattgaatcatattaggtttacattctgaattcgattagatttagcatttagggcctattaggtgttggtgtgattgtttgtaccttctggtggtggagcttgttggaaattggagatgagtcagaggggtttaatatatag

SEQ ID NO: 14416 - DNA, 263 bp, Glycine max
  Clone ID: 700964296H1
gaactttgacgccattggccattgagttaagtaagccacatcctcagggtgaagcatatggtcctgttagtgaagtctacgtgccttcgagtgaaggagttgaagcttacatttggttactggcaaaggcttacgttgttgtgaatgatgcttgctaccatcaaatcattagccattggctaaacactcatgcggttgtggagccattcgtcatagcgacaaacaggcatctgagcgtggttcaccctatttacaaacttctg

SEQ ID NO: 14417 - DNA, 272 bp, Glycine max
  Clone ID: 700964301H1
attccttttctctttctccggcgacgatctcagattccggccactcctctcgccggcgagcccttactcttccctcctccgtcgagccctctccgattcgaatcgttcccagcctcgcaccaccatgaatcccgaatacgattatttgttcaagcttttgctgattggagattctggtgtaggcaagtcatgtcttctcctgaggtttgctgatgattcataccttgacagctatatcagtaccattggagtggactttagaatccgcactg

SEQ ID NO: 14418 - DNA, 192 bp, Glycine max
  Clone ID: 700964302H1
accaccaccacttctctccctccgccgtcgccgcctccgtgccgcccaagcccgttgccgaagctgaggacttcgccaaccccttcgaagacgacgacggtagcgccacgtagaagcgcaaggagtgcgacgagatcggtgagggagccgcctcgtacggattcaacaacaagagatctaaggcgactccgt

SEQ ID NO: 14419 - DNA, 263 bp, Glycine max
  Clone ID: 700964303H1
atatatttgtcattttaaactataaccatcttgtgctgcaggatgttgtgaatgatagaatcaaacattgcttaaagcatgtggctggagatgcagatgagtgttcagtttgttctgggactggtaaatgcaggctctattaatttgtgaaactagattgttttggatgctattaaatgaggctggaagtcgaggaatctgtaaattgggttgcaactgttctgaagttgttattacgacgcacttgaactttgcttcatgtt

SEQ ID NO: 14420 - DNA, 248 bp, Glycine max
  Clone ID: 700964304H1
tggagagtagtgcaataactcattgtacgttcctagtgtgtgggagacaaagaaagatggctaagtggtgtgttttggtgttggttcttgctctggctctggccacaagtgccagagatgttcccgatcccaaggatgctggtctcaaggaccagaagaacttcatcagctatggtggagttggtgcttattcggggattggtagcaatgggctaccttttggaggagttggtgccggaataggtggt

SEQ ID NO: 14421 - DNA, 267 bp, Glycine max
  Clone ID: 700964305H1
aaaagcagaacgcaacatcatcaacatcacagaggtagagagtaagacgccggcaatgtccgctgtgagagttcaagtttcggcgtgtgcggtttccgccaccgtcaaccaccttcgcctccgccaaaacgccgtcgtttccttcaggaagaagaagcctctcactctcagagtggtctcaatgtcttccgttcctccttcccaacccttcgaaatcgccgttaaagcttccgtcaccacacccaacaggctcggcgactgcccttt

SEQ ID NO: 14422 - DNA, 266 bp, Glycine max
  Clone ID: 700964306H1
gctccagatacaattgggacactactacgattgggaagaagggtctttacatttatagtttggcaaatagatattgcaactacctttgtataattctatttctgaagaagcaattacaatttacaagggatggtgccatttacggcataaggattaaggagggataaagggaccaattgctttggaatatccactcattacaatgcatgtatgacaacacatagtaatatgatgtgtgtttttattcagtgggcaactggcagatc

SEQ ID NO: 14423 - DNA, 261 bp, Glycine max
  Clone ID: 700964308H1
ctacaagagaagaaaaaaaaaaagagagaaaagaaaaaatttgttttataactttttaacttattgttcacttcttcttcttcttcttcttcaatatcttggttctttgatattattctattgagcaaaaaatgggagttccagagagagaccctcttgcacaattgagtttgcctcctgggtttaggttttaccccacagatgaggagcttttggttcagtacctttgccgcaaggttgctggccatcatttctctcttc

SEQ ID NO: 14424 - DNA, 261 bp, Glycine max
  Clone ID: 700964309H1
gaatgatttacaatcaaaatcctctgaaattcaatgtgcaaatgaagctctcattctaaaagtagaatcacaattacaagaagcattgcagaggcatactgagaaggaatccgaaaccaaagaattgaatgagaagctgaatacactagaaggccaaataaagcttttcgaagaacatgcacgtgaagcagttgcaacttctggaactcataaagctgaactggagcagagtctcataaaattaaagcatcttgaaattgt

SEQ ID NO: 14425 - DNA, 265 bp, Glycine max
  Clone ID: 700964312H1
ctagcaatggaggcgattaggaacagtaggattcttatatttggaggaactggttacatagggaagtatatggtgaaggcaagcgtcacgttaggccatccaacttttgtctacactcgccctcttgatgcacaaactccttcctctaaggcacagctttgcaaggagttcaactctatgggggtcacacttgtccatggagaacttgagcatgaccagattctggcagtgattaaacaagtagacattgtgatatgttctcttc

SEQ ID NO: 14426 - DNA, 264 bp, Glycine max
  Clone ID: 700964313H1
tttggagtgaaaaagatatagaagaaaaattaagtgtatgtttacaattgtccaaaatatatcacaaattaatgcaagtctaataagtagaaaggattaaacgcttgaggagtggttgacattatcactaccatagaaaaagactttattgtgatttcttatttgatgaccaaatatagtgagtatgaagtaactatttcaagcgagcatccttggataaaagaaggtcatccactttccgggcattgcatagctcatcagcac

SEQ ID NO: 14427 - DNA, 266 bp, Glycine max
  Clone ID: 700964314H1
cattaaccgctttcccttttggcagcacttgagaattgagaactccacgagatcctttcttttcctcagccaaagcacaaaaccaaaacagaaaccttttgatataatttctgttattcacttccttttagacaccacactaatccagattagacattgtacaaatgggttctctgttgttcttgcttttggttattgttcttccattgtgttattgtgttgactgcacttgctctaatggaaactgcaaggtaaatgatgagtgc

SEQ ID NO: 14428 - DNA, 269 bp, Glycine max
  Clone ID: 700964315H1
caagaagcagcagagttcgccgctgctccgcaaccttaccctatcaattttcgtccttgttttggtaattgcagcgaagaatggggaagcgtaaggagcggattcagaacccggaacccttcgatccgtacggcgccgaccccgcgaaaacgaagaagcgctcgaaggcgccgaagcggcaccagcaggaggagcagttcatcgctcccaaactcagctccaagatcatgaagcaggcgctaatccagcagaaggaggaggagaaggag

SEQ ID NO: 14429 - DNA, 166 bp, Glycine max
  Clone ID: 700964316H1
gggctgcttcataatcgaatcgaaacgaagctgcagaatggaggacgtgccgttgccggcgctctttgagcaagcccgcaagatccacaactcagccaccgccaccgcctccgccgccgaccaggtacgctttagtcttctcattctgtctctttttttttttttt

SEQ ID NO: 14430 - DNA, 261 bp, Glycine max
  Clone ID: 700964318H1
cgcgagcgacaaccagactcaagaagaaaacgtgttgtgttagtgttacccctttctctttttctctctttcttgaatttggcgcgtgcgtttcgattcttcttccgaatcagagggattctggatttcttgttgaagatgcgacgctcttctgcatccaaaaagtcgggtcaatccaattccactcccaacgccgccgatctcttccgctctgcttcaagtaaggcaagctccaaggaatcagaacgaattgatagtcta

SEQ ID NO: 14431 - DNA, 263 bp, Glycine max
  Clone ID: 700964319H1
tataaaccctagtaatcgcgtttctcggagttagacagagacggttcgctttccagtgacaggcaatagctgcaagcaactcaatctcagagcttaagcaatggcggcgaagaagcatgacgccggagacaccgagaagagaaagcgactcagtactgaaactcacgaggctcccaaggcttcgaagctcgttgcctcaaagaagcacaaaccagactccgttgctaaagacaacgaagacaagaagacggctcctcttaccg

SEQ ID NO: 14432 - DNA, 261 bp, Glycine max
  Clone ID: 700964320H1
gagaaaaagagatttagggtcttaagggtttcattctgcggcatcagacatgggaggaggcaatgggcaaaaggcaaagatggcacgcgagaagaacctcgagaagcagaaggccgcctcaaagggaagccagctggattcaaacaagaaagcaatgtcgattcagtgcaaggtgtgcatgcaaacatttatgtgcaccacatcggaagtgaagtgtacggagcatgctgaagccaaacaccctaaatctgatgtttatgc

SEQ ID NO: 14433 - DNA, 258 bp, Glycine max
  Clone ID: 700964322H1
cttgtgttgtgtccctcttttaagctatttccttctcttaacacaattggttgtgccaattgccatagtcaccaaccaattaacaaaggtatatatatcatcatatcatcaccaaatgaaaaatattgggttgttttttcttgtggtggtggctacttttgtggtggcagccacagctggtagcttttaccaagactttgaaataacgtggggtggtgagcgtgccaaaatctatgagaatggaaaccttctcacact

SEQ ID NO: 14434 - DNA, 259 bp, Glycine max
  Clone ID: 700964323H1
ggctaagacagagcactgtctgagtgaaacatccattcttttcctccacctcgtgattcccaaacattctcttcttattcccagctccacgcgctcgtttctatattctcatcactcgcgctcttcttcttcttcttctccctccattagggttttcttaatgctgaatgtggcttccctcgccgcacattgacccttgacacaccacaatgtccggccctctcgaccgtttcgcaagaccctgttttgaaggtttctc

SEQ ID NO: 14435 - DNA, 260 bp, Glycine max
  Clone ID: 700964324H1
gtcctcttttctctgtttctccctttctctctgtctctctctcgctcttcttctcatccagcaccgagtcacagactcaccgatcttccgattccctttcgtcttggtttatgagctcgaaggagagacccactcttggtggcacgcggattaagacccgcaaacggaatattgctgcgccgctggaccctgcagcattctcggatgcagtggtccagatttatttggataatgctggtgatctggaacttattgctaag

SEQ ID NO: 14436 - DNA, 258 bp, Glycine max
  Clone ID: 700964325H1
ggttatcatttctccatttccattttctctctcacttttcaagaatcgtaagctatgggaaagtcttacccaactgtgagtgctgattaccagaaggccgttgagaaggcgaagaagaagctcagaggcttcatcgctgagaagagatgcgctcctctaatgctccgtttggcatggcactctgctggaacctttgacaagggcacgaagaccggtggacccttcggaaccatcaagcaccctgccgaactggctcac

SEQ ID NO: 14437 - DNA, 257 bp, Glycine max
  Clone ID: 700964326H1
aagggtcagaagaatgatgcttgccgctattttgaggaatgaagttggatggttcgatgaggaggagcacaactcaagccttgttgcagctcgccttgccacagatgcagctgatgtcaagtctgccattgctgagaggatatcagtgattctacagaacatgacatcgctccttacttctttcatagttgctttcatagttgaatggagggtttccttgctcatcttggcaactttccctctccttgttctagcca

SEQ ID NO: 14438 - DNA, 237 bp, Glycine max
  Clone ID: 700964327H1
gggattcggctcgagctttgttgggaggatcagggagaagagggagatggttgatgttcgcagcagcagcagcagcagcaaccactaccaatggtggggccatggaggagttgctttcacagctccaatctcatctccagaaggctcttgctggtggaggacccgaggcagtgaagaggaacacgagtaggaacgagtgtctgccccgtgagagaatcgatcgcctccttgatcccg

SEQ ID NO: 14439 - DNA, 263 bp, Glycine max
  Clone ID: 700964329H1
atatactctctcttcaatgcttgtgttttgaacacttcatacttacttccattactatgatttggtgcatagaaagcctctaaatatggcagccacaagcacggataagttggaggcaggaacggtttcaagttatgacaggaaaagtgaaatcaaggcatttgatgattcaaagactggtgtccaaggactggtagaaaatggtgtaacaaaagttccacttatgttctattgtgaaaactctaatctcaatgatggcataa

SEQ ID NO: 14440 - DNA, 257 bp, Glycine max
  Clone ID: 700964293H1
accccccctctcatacactctctaatccaaagagaacaccaccctttttcctcattctcttcctcactaaaacatcactctttttttcatttcaccaaacaaaacagtaacaccacacagccatgacagacagggtgtacccatcggccaagcccgccgcggttaacggcgccgcctccaacccatctttcccggcgactaaggctcaactttacggcgccacacgccccacctaccgccctcagccccaccaccgg

SEQ ID NO: 14441 - DNA, 256 bp, Glycine max
  Clone ID: 700964261H1
gagaaaacagaagaaaacaaaatggaagacacagtttctgcgttgaggtctttgatggtttctcactctccgccgctggccgccttagtggtgccctctgaagattatcacctgagcgaatatgtgtctgcacgagagaagcgccgcgaattcgtttccggcttcactggaagtgccggcttggcacttataacaaagaaagaagcactgctgtggacggatggacggtattttttggaggctgagaaagaactta

SEQ ID NO: 14442 - DNA, 257 bp, Glycine max
  Clone ID: 700964262H1
gggaaaaagaaaaataaaatgggttccgataataccaacttggagttcttgaaggagatcggtttgggctcctccaacattggttcttacattaatggccaatggaaagccactggttcttctgtcacttctgttaatccttctaacaatcagagcatagctcaagtgactgaagcgactttgcaagattatgaggagggattgcaagcttgcagtgaagcagccaagacatggatgactattccggcaccgaagag

SEQ ID NO: 14443 - DNA, 262 bp, Glycine max
  Clone ID: 700964263H1
cagaatgatcaatcattttcccctagatttaagaagattggcaattcttcatctcatgatattgcgaatgctcctgcaaacacattcaatgtaggatatgatagagatagaattgccccagctgataaggagcaacaggattttgggcaaaataatcagttgaaagctcggaaaaaatcacaaggtaaacaagaggtaaaagcattgcaggagttttatggtagctggtctccttcatcaactacatgtggacaatttcaga

SEQ ID NO: 14444 - DNA, 240 bp, Glycine max
  Clone ID: 700964264H1
cttttcctgaaaatatgcaggtagaatgattgatgtcttgttcattattgcctcacttttgtgtggaatgaggagaaggatttaaatggtagcttcaccaaatatactaaacttatctacctgcaaaagaaattgcctggggtttagatcaatttttagttagtgttctgctcaacaattgatatggcctctttgtagacttcaacttcctaactggtggtagtttatcgctgattgttt

SEQ ID NO: 14445 - DNA, 258 bp, Glycine max
  Clone ID: 700964265H1
tatggttgttagtacctatcaggctgctagtggtgcgggtgctgctgcaatggaagagcttcagctgcaaactcgtgaggtgttggaaggaaaaccgcccacttgtaaaatatttaaccgacagtatgcttttaatctattctcgcataatgcgtctgttctttcaaatggatataatgaagaagaaatgaaaatggtcaaggagaccaggaaaatctggaataataaggacgttaaagtaactgccacatgcatacg

SEQ ID NO: 14446 - DNA, 254 bp, Glycine max
  Clone ID: 700964266H1
ctcgttgttcttcgctttcctgttttcaatttcgattctttcgttaatttaataagatgtttgggagggcaccgaagaagagcgataatacgaggtactacgaaatcctcggcgtctccaagaacgcttcgcaggatgatctgaagaaggcttacaagaaagccgccattaagaatcaccccgacaagggcggtgatcccgagaagtttaaagagctggcgcaagcttatgaggttctgagtgaccctgagaag

SEQ ID NO: 14447 - DNA, 251 bp, Glycine max
  Clone ID: 700964268H1
ggatcaaacgccatttttctctcttcactcttcacctctaaacaaaataaagaaacacaacactcactcccacctctaaacaaaataaagaaacacaacactcactcccacctctgtccctcttcttcttcttcttcttctttttttctttctcttcccatttcagttttcacctatgtgacttgctccatctttatgcaaaccgttaaagttaaacttgctctctgactagcttctcttctctctctatt

SEQ ID NO: 14448 - DNA, 251 bp, Glycine max
  Clone ID: 700964269H1
caattttacactccctccctcctcccatacccatcatcttataatacacaaaggttttgaatatcacaatacatgacaattcacaacaacaaaatgacttcaattgccaccaatagcactgttgtcgccactagaatgctagttgtgatcactttagtccttgcactagtatgttgtgtcacatccgcgcaatcaccggcagcagcaccagccccggagagcaacgggtgcttgatggcactaacaaacat

SEQ ID NO: 14449 - DNA, 247 bp, Glycine max
  Clone ID: 700964271H1
ttcttagcacacttgttgctgtttgtggttctttcacatttggcacttgtgtgggatattcagcacccactcaagcggctatcagagcagatcttaatctatctcttgctgagttttccatgtttggttcattagtgaccattggtgcaatgcttggagctataacaagcgggcggattacagatttcattggccggaacggggctatgaggatttcaacaggattctgcattactggatggttagc

SEQ ID NO: 14450 - DNA, 71 bp, Glycine max
  Clone ID: 700964272H1
ccgtttctgccatttataaatataataaattaagaaccaaaaaaaaagagaaagaagagaaaaaaaaagaa

SEQ ID NO: 14451 - DNA, 250 bp, Glycine max
  Clone ID: 700964273H1
atcattttttcacatgtcttcaacattttcaaatcttattatctctaccttgatgcaaaacccagccgcccatgctgcagcaagtttctcgctttgcatagggccaaaatgtagcagcgaaacttgctgcagcatgggctgctgggttttgctgctacattttggccctatgcaaatccagaaacttcagcaaattcccctaggtgctcccaaggacgttttacaaatagacaaattggttcccctccaa

SEQ ID NO: 14452 - DNA, 252 bp, Glycine max
  Clone ID: 700964274H1
ctcccttatttttaattgctgtaacagtagtagtatttattttgagctttccatttttctctctttttcaactttcaattcaagcagctttggaaaaaccaaccagccaacgggtttttttcacctcctgaaatttgtgttggtttggtaatataggccttggagtggaaattcaatatttgtatggcagccagagaaggtattagttctggggttacagtgataggtgcagaagctccatcagcttaccat

SEQ ID NO: 14453 - DNA, 252 bp, Glycine max
  Clone ID: 700964275H1
gcagaaagcaagctcatcctagagttttaaaaatggcagcagcctcctccatggctctctcttccccatccttggctggcaaggccgtgaagctgggcccatcagcccccgaagtcgggagggtcagcatgaggaagaccgtcaccaagcaggcctcctccggaagcccatggtacggcccagaccgcgtcaagtacttgggcccattctctggcgagcccccgtcctacctcactggcgagttcccaggtg

SEQ ID NO: 14454 - DNA, 253 bp, Glycine max
  Clone ID: 700964276H1
caaaaaccctaggtagagagctcttcctccctttctcacagcaatggccgccgcagcacgccctctcgtcaccgtgcaggccctcgacggtgacatggcaaccgatgcctccgccaccgttcccatccctgacgtcatgaaggcctctatccgccccgacatcgtcaatttcgtacactcgaacatctccaagaacagccgccagccatacgccgtcagtcgtcgcgctggtcaccagacctccgccgaatcc

SEQ ID NO: 14455 - DNA, 257 bp, Glycine max
  Clone ID: 700964277H1
aggtaagactaggttgttcttttcatgcgctcatatagtatctaagcaagaggcacgctaccaccgtcaaacccttctccttgttaccattctaatggcttggttttttcacatcacactttctttgtgttgtgtgtcgcgcgcgctcgcgtgttgtgtgtgagtttgtgaagtgagttggaggtatagacaacggtttgagatggctgtggtgagtcctatggctgcaacaacacaaaggatgggttcagtgaggt

SEQ ID NO: 14456 - DNA, 257 bp, Glycine max
  Clone ID: 700964278H1
gagagagagagggtttttattttaacgttttttgttgctattcctttacagctcaacctgcatttctctctcacacactcgcatctcagatcgaattcgaggtcactgactgattctgcgctgttgatgtttcatatcaactagatagctacatggtggagagagacatttttctcatatgacttctattaaccatattattattgagcagtgctgctatgggcatttgtcttttgaaatggcaatggccgtggctt

SEQ ID NO: 14457 - DNA, 248 bp, Glycine max
  Clone ID: 700964279H1
ctcaacacacacacaaaaaaaactcccttgtatattgttgcagctctagctagggtttcgcaagtgcgatcgaagaagaacaacgacgatggcgatggctgcagctctgcgtcgcgaaggaaggcgtttgacccaaccaatcaacgccctccactcttctctcaattcctccctcatctctcaagaccaagcccctcatggcgcgcgctccatttccactcaagttgtgaggcaccgaatgaagagtg

SEQ ID NO: 14458 - DNA, 256 bp, Glycine max
  Clone ID: 700964281H1
atttcttatacagaaaagcattgtctgcagcacccaaacgaaacgacagtgaccaaaacagcaaaacgacattacagagagagagcgacgatgccggaagaaacgacgtcgatcgactacgtgatggaggcggcatctgggccccacttctccggcctgagacttgacggccgtatgccgtcctccgccaccgccgccgccgcgtcctcctctgccgattctaccctaacccccgatttcctccccaatcaaccct

SEQ ID NO: 14459 - DNA, 252 bp, Glycine max
  Clone ID: 700964283H1
ggctaaccaaccctgacactccttcttctccgcttcctcttcgatcatcgcttcagaatgccgccgaagttcgacccctcccagatcgtcgacgtcttcgtacgcgtcaccggcggtgaggtcggcgcggcgagttccctcgccccgaagatcggtcccctcggtctctcccccaagaagatcggagaagatatcgccaaggaaaccgccaaggactggaagggcctccgcgtcaccgtcaagctcaccgtg

SEQ ID NO: 14460 - DNA, 250 bp, Glycine max
  Clone ID: 700964284H1
catctttttccttttcccaagcaattgtactttttaggggcatacacgtaaagcagttggtttctggagtagttagagttacatgtgttttgcaggcacatggcaacacatgaaatggatcccgatgttgttcgctggggtcttcatctcctagatgtctgcacactttctcaccatggttcccctagtattgtaactcaatatgatcctgatttaagtcgagttgaatatgttaccgaagcttttgtca

SEQ ID NO: 14461 - DNA, 249 bp, Glycine max
  Clone ID: 700964287H1
aagattggaggtattggaactgtgccagtgggacgtgttgagaccggtgtcttgaagcctggaatggtggtgacttttgcaccaactggactgacaactgaagtcaagtctgtggagatgcaccatgaatctcttacagaggcacatcctggtgacaatgtgggattcaatgttaagaatgttgctgttaaggatttgaagcgtggttatgttgcctcaaactcaaaggatgaccctgcaaaggaggct

SEQ ID NO: 14462 - DNA, 250 bp, Glycine max
  Clone ID: 700964288H1
aatttctctctcctctctctctctacaaatccttctttctttcttctcttcgctgctcactgtagccatggctttcagagtaggaggagcgggagggggaaatgcctcttctggcatgggtgttgctgagcatagtgtaaacaccttcctggaattgcagaggaagaaagttcatcgctatgtgatttttaaaattgatgagaaacagaaagaggttatcgttgaaaaaactggaggccctgctgagagc

SEQ ID NO: 14463 - DNA, 251 bp, Glycine max
  Clone ID: 700964289H1
taaccattgaagaagtgcaatttcgtcctctaacactcttccaaatcatggctagctcactgcttgtgagggttgccagctgcatggttgtggtgtggatgtttagttttgggcacataattcccttggcagatgttgaaattccatgtggcagggtgcaaatcactgtggctccatgcatagggtacctaaggggtcctggtggaggtgtccctgcaccatgctgcaatgaggttaagagcataaacaac

SEQ ID NO: 14464 - DNA, 253 bp, Glycine max
  Clone ID: 700964290H1
caaagagagagaggaagaggaaggtggaaaagccctagtgtgtgttctgctgagagtccgatacacatctaggaaacgctatctatggctttttacggaggcgcgaaacgcgtttgtgtatccataaggcactattgttcgaattcagcgtcagagaaggtgaatctgataaagcagctgagagagagaacaagcgcagctatgaaggacgtgaaagcggctctggtggattcgaattgggacatagaggaag

SEQ ID NO: 14465 - DNA, 255 bp, Glycine max
  Clone ID: 700964292H1
atcaaatgtatataattcaaaatgagtacacatataaacaggttaaagtttcactatgaccacgaggacctcccctcagcctgatcagtcacttatgacaccaacgtttggtttgatttgcccacctaccttgtaccatgtcaagcatagtcctagaaaaggagcatcaatcaaatcagtcttctgttaagtgttaatggttgaaactcaagcatttcaattctatcctcttgaacttcaagccttcttttcatt

SEQ ID NO: 14466 - DNA, 256 bp, Glycine max
  Clone ID: 700964260H1
ctgaaacagctgaacatgcagcagaaagagagaccaaagctaaaagggaggagcaggacaagctcagggaaagagaacgggagctgcgcaaaagaaaggaaagagaagaacaggaaatggaaagggtgcgactaaaaattcggagaaaggaggcagttacttcttttcaagctttacttgtggagacaatcaaagaccctctggcatcatggacggaatctaagcctaaattagaaaaggatcctcaaagacgtgt

SEQ ID NO: 14467 - DNA, 255 bp, Glycine max
  Clone ID: 700964230H1
gtgtcacaagtcataactcgttagagagagtttgtgtgtgtttttgtgtgtcaccttggtgcatacaacacaagatggaggaccaaaatggtagtggtaagttgagccaagggcttcgcaaggtgaagccttaccttgctatattgtcccttcagtttggctactcagggatgtatatcatcactatggtttctttcaagcatggcatgagtcattggatactctcagtgtaccgtcatgtagttgctgctatta

SEQ ID NO: 14468 - DNA, 259 bp, Glycine max
  Clone ID: 700964231H1
attccgtgtgccgccgttaccgccggtggagaggatgggggtgctggacggtagcggcgtgatgacggaggattccaaggtgggggagttagatcccggtttcgaggaagattctctaaacgacaccttttcgagcgtttcaggtggtgggggtgtgagggagaaggtggagaagtataaaatgtgtgatgtgagaatggtggattatgtgccgtgtttggataacgtgaaaacgatgaagaaatacatggagagtttg

SEQ ID NO: 14469 - DNA, 256 bp, Glycine max
  Clone ID: 700964232H1
cggccttgctatgagtatgaaaggcgtgaagggatccaggcttgtcctcagtgcaataccagatataaacgtatcaaaggtagtcccagggttgaaggcgatgaagaggaagatgacactgatgacttggacaatgagtttgattatggggatgttgatgctctgggcccacaaccaatgtcggaatccttgtattctggacgccctaatactgggcgaggtgctgataacggatcttgcatggcgacaaacttgg

SEQ ID NO: 14470 - DNA, 262 bp, Glycine max
  Clone ID: 700964233H1
caacaacaacagcaacaacaacaacaacagcaacaatttcaacaacagcaacagcagcagcagccgcaacagcagttgtttttgtttactaacgatagaacccccgctagttatagtaccaattgggcggatcttcatcctgattcccagaagattctccttcagatcgaggagcggatattggagtttagggatgaaagccagagactagatcagtgtagtcgtctttatgattcttcagtttccaacgatggatttgagc

SEQ ID NO: 14471 - DNA, 256 bp, Glycine max
  Clone ID: 700964234H1
cgcacgcagaccataagcttctcaactgctagactaagtttgttaataaaatgaagatttctgtagcaaatgtgactgggtgtggggtttgccagtttgtgtatggattttaagagtaatccaggatgaggcatctccgttattctgtgccggtataattaagccagcactccggcttggtcttgtagccagagtctgattctggctagaatagtagtttgctgaggctttcagaagcagtcaagaatcaagatag

SEQ ID NO: 14472 - DNA, 252 bp, Glycine max
  Clone ID: 700964235H1
cccttttcagtttataccaaataaatgatgttacaagcttcttttttgcgcttgatctctttcttctttctcatcgcactccctcttggaagaagctctaccaccttgaatgtaccaaaggacataatcaaccaaacatgccaaaaatgtgccaaccaatccatcatcttgagctacaacctatgctccacttctcttccggcggttccggtgagtcactccgcaaatctcgaagggttggcgttggttgca

SEQ ID NO: 14473 - DNA, 253 bp, Glycine max
  Clone ID: 700964237H1
gtcgccgccagatctcagacgagactcagtcacactttctctctttctcttccacaatgcagctcctcccggcggtgctcgcggcggcgctgctcctcctcgccactctctccgacgcccacaacatcacaaccatcctctcaaagcaccctgagttctccagcttcaaccactacctgaccctgacccacctggccccggaaatcaacggcaaaaccaccatcaccgtctgcgccgtggacaacgccgccat

SEQ ID NO: 14474 - DNA, 251 bp, Glycine max
  Clone ID: 700964238H1
aaaaaaagtgttccaattccccaagaattcgaacacgagattagttcctagctctctctgttcgagttctttggaccttggattcgttgcctctccgcaatgctgctatcgtgagttctgtgattctatttgatggtgagatcgtggagttcttaacatgggaacttcggagaaatagatttgtgcagtaaattggctttgaacttgacgactcagcaatactctgaatttgtgtaaaatctgctcgtgca

SEQ ID NO: 14475 - DNA, 252 bp, Glycine max
  Clone ID: 700964239H1
cgaaaaagtaacaaaatcgtaagacacagacgcataagtgaaccactgaaaccctaaacgcatcagcctcagccgtcgttgccgtcgagcaagtgaggtcgcaccgccgtcgcaggaccaccacccgggcgccgtcacaatttggcctcaaagtcacaagcaaattcataagcaaaaccctagcaagcagtgagtgaaagagtaaagtttggacgatgagggaggaagagatggagaagcttcgaggagtgg

SEQ ID NO: 14476 - DNA, 252 bp, Glycine max
  Clone ID: 700964240H1
ctcttctccattgcctccctcgtcttaccatcctggttataggctgaaaagggaaggggggagagagagtgtttgcggcaatggaggaaccgagcaaactgaagcgtgccatgattgattccttggctggggcaatttctggtggaatatcacggactgttacatcgccccttgatgttattaagattcgattccaggtccagctagagcccacatcttcatgggcattactacgcaaggatttggcttcag

SEQ ID NO: 14477 - DNA, 253 bp, Glycine max
  Clone ID: 700964241H1
atttacttgtcaatctgggcgatcctgagcgacctgtatgtaaggttggagattttggcctatccagaattaaacgcaacacacttgtttccggtggtgtcagaggaacccttccatggatggcgcctgaattactagatggtaacagttgtagggtatctgagaaggttgatattttctcatttggcattgcaatgtgggaaatgttgaccggggaagaaccatatgctaacatgcactgcggggctatcat

SEQ ID NO: 14478 - DNA, 252 bp, Glycine max
  Clone ID: 700964242H1
gtggttttcccatgatgtcacgttttatgcatgcgccttctcccgttctgtcttcttcgcatcctcatttgggagttggccacaagagagagcgtgaagatgacactggcgctggtgcgagtggaggtgttgctattgcagcagcttcttcacaaacgcaaacacaagagattgacagtgctggcggcgacaggaggaggagatacaggggagtgaggcagaggccgtgggggaaatgggcggcagagattc

SEQ ID NO: 14479 - DNA, 254 bp, Glycine max
  Clone ID: 700964243H1
cagggaacatatgtatacacacatgtagtgagagagaaaaaaaaagggtggtttttggtttctcttttggttcctttcttatatgccatatttgcatctgatgcagcaattcctctgtaacggttattatttttgtgaaggggttggagagaaacactgatcagtgactactgcttggttgctactactgaaaatggattacagcaatgacaacaaggagccatgggattggcatagggaggattattgtctct

SEQ ID NO: 14480 - DNA, 256 bp, Glycine max
  Clone ID: 700964244H1
gaagaaacttaatcgatcatcacttcacttcactaatacatcatggcagacgagacccagaacaagtatgagagctctgaggttgaggtccaggatcgtggtgtttttgactttctcggtaagaaaaaggatgaagaagacaagcctcatcctcaggaggaggtcatcgccaccgagtttcaaaaagtcactgtctcagaccaaggagagaacaagcacagcctcttagaaaagcttcaccgatctgacagcagct

SEQ ID NO: 14481 - DNA, 255 bp, Glycine max
  Clone ID: 700964246H1
cgcgtgcgtgcctctccggcgaggccgtaacaatccactcacaacaagcttttaaatttctccttcgtttcgcttccaatggcatcaaatagccattcaccatctctcgagatattagttcgaggaccagaggatttctcgctctggaccggaccccccttcgcgaacgatcaaccaagcgtcaagctcgagagagtgaactgcatcaatgcgacattcagcgacgacggatccaatctcatggtgacgaaatcg

SEQ ID NO: 14482 - DNA, 259 bp, Glycine max
  Clone ID: 700964247H1
aattaattcatttttctgaatagccattcccagaatccaaacatggtcttttgaggttttggtccccgatcaccatgattcttttcagtttcacctccatcgttttaatcgcgtttggggcgacgctgttccagacggggcatgcgacgaagctatggagaagaatcgaagactggttccacgtgtaccagttcttcaaagtcccagaactcaacgacacgacgcagcacaaccacctatacaggaaggtctccctcta

SEQ ID NO: 14483 - DNA, 250 bp, Glycine max
  Clone ID: 700964248H1
cctacttactgattccaaccatatactactaaaatggcttccttccgtgtgcatctcttatcattcttcttcattgctttgtcacttttatccattagcaatgtccaagccagtagacaacttctggcacccacaatgcccaatatgggaaattatcctcctcgcgtgatatatcctccattccccccagtaacagactggccagagtataggttgccagcacccttaattcgcacacttccatccttct

SEQ ID NO: 14484 - DNA, 256 bp, Glycine max
  Clone ID: 700964249H1
cagaataaatcctaacccttaatttttaattggagaggatcctcccccggtgggtgacatgaacgacttgaggaagaagagaaaagccgcaggggcagagtgagagccgaaacttctcatggaatcgcaaacggatctgcagaaccgacccggaatcttcattatcggatcctccaacgtcggcaaacgcaccctcctatcccgattgacctctgttgatgttgatgatgcttttgattcggcttctcaagtgaat

SEQ ID NO: 14485 - DNA, 253 bp, Glycine max
  Clone ID: 700964250H1
ctcagtctctgtgtttgcggctgaggattccgaacgagtgaccttcttcgtttctcgcaaagtttaagtaatcatgggtaaggaaaaggttcacatcaacattgtcgtcattggacatgtcgactctgggaagtcaactaccactggtcacttgatctacaagcttggaggtattgacaagcgtgtgattgagaggttcgagaaggaggctgccgagatgaacaagaggtcattcaagtatgcctgggtgctc

SEQ ID NO: 14486 - DNA, 252 bp, Glycine max
  Clone ID: 700964253H1
gaaggacacggttcgaggctggacccggcggcatggcccaacaagcgaaccagcaatacgcacagcaacagcaccaacaacaacaacaagcctacatgatgatgccgccgcagcctcagccccctcagatgtgggccccatcggcccagcctccgtcccaatcggtagctcctccgcaacccaccagcgccgatgaggtccgtaccctctggatcggcgatttgcagtactggatggacgaaaattatctct

SEQ ID NO: 14487 - DNA, 249 bp, Glycine max
  Clone ID: 700964254H1
agcagtgcgaagagaaagaaagagaagaagcgcttatcgaactcggacggaagcactgagttaactcagagcgagtgaaagtgttgctgcgtgatgtctggtggtatcgcccgtggacgcctcaccgaggagcgcaagtcgtggcggaagaaccatccccatggttttgttgcgaagcggagacgctgcccgatggaaccgtgaacttgatggtgtggcattgcactattcccgggaagactgggactg

SEQ ID NO: 14488 - DNA, 250 bp, Glycine max
  Clone ID: 700964255H1
ctctaacgttttctctctttttggtcagagggagagtggggtgtgtgtgtttttgttgggatttgtgaggaatccattgaaggaggaagagtgggagatttatgtcgtcttggttttatttggaagtagtgattggagctttgttgaagctcgggttcggttacgcttgtatttgctgcatgctactctggctggtgttgaattctgctgtttcgatgagtttgaggtcaaaaaggacatgttatggagc

SEQ ID NO: 14489 - DNA, 252 bp, Glycine max
  Clone ID: 700964257H1
gaaaaatatggagggaaaagaagaggacgtaagagttggagccaacaggtacggagagaggcagccaatagggaccgctgctcaggctaaagactacagagagccaccgtcggcgcctctcttcgaaccgggagagttgtcatcgtggtctttctatagggctggcatagcagagtttgtggccactttcttgttcctctacatcacagtgctgactgtgatgggtgtgttcaaatctaacagcaagtgttc

SEQ ID NO: 14490 - DNA, 256 bp, Glycine max
  Clone ID: 700964258H1
cgctttactaggcttgaatatgaatatcttcagcagtttgtattcaagcctagtaaagcttttatcctcaaagcaggtactgagctacgtacacccatgcacgataatatacgataatgacgaacacaacataacaaccgcaacaactgttcaaacgtttcacaacttctgctacttcctactccaaccgcacttctgctccgcaattatcatgggcaaggtcaagatcggaatcaacggatttggaagaattggc

SEQ ID NO: 14491 - DNA, 256 bp, Glycine max
  Clone ID: 700964229H1
gctcgatctcgtgagcatggctttgcggcttttggtatcgcgggttgcaagacgacagattaaaagtgtgtttgctacaagctatttttctgtcaataagcttggagatcgtgcaggaaatagacttttgggtgctcaagagagatttcaatctagctaccttggcagtattgctcgtcgagcacgtgatgcagatgaagccgctgaagttgcttatctcaaagaactttaccatcagactgatcctgaggctgtg

SEQ ID NO: 14492 - DNA, 242 bp, Glycine max
  Clone ID: 700964188H1
gtcggaacccaagatacgtgatgtgctgatcagctgcgccgaagacacacaccaaggttttgtgggccatctctttaaatctctcacagatctcggattctccgtgaaggtagtctcaggagaccatcgggatcttaaggaagaggaaattgaatgcttcagggttttcattattgttttttcccatcactatgcaacttcttcatctcgcttggataaacttaccgagatcataaataagt

SEQ ID NO: 14493 - DNA, 242 bp, Glycine max
  Clone ID: 700964189H1
atctctgtctaccttaccttacctcacctcacaagggacaaagataaaaaatgaagatcattgagaaaattcacgcagcctcggctgatccaaacagggtggtgttctcatttgagttcttcccgcccaagactgaggatggggtggacaatctgtttgagaggatggaccgcatggtggtgcacaacccctcgttttgcgacatcacttggggtgctggagggacaacggctgatcttaca

SEQ ID NO: 14494 - DNA, 242 bp, Glycine max
  Clone ID: 700964190H1
ctcacttttcattcttcgatcatacacttagttgcttccaattaagatggttctgctagagaagctctgggatgatgttgtggctggccctcaacctgagcgtggccttggcaagctcagaaaactcaccaccctcaaaactattgatgaaggagaaagtagcaagctgcagaagacgttgtcgatgccgtcgacaccaacaaccccgatgactccgacgactccaacgacaccgggatcgg

SEQ ID NO: 14495 - DNA, 244 bp, Glycine max
  Clone ID: 700964192H1
gttggttattggatctctcactagttttagagagagagagagattcagaggaagagaaaaacgtgtggttatgtgattgtggaagagagaactgagacggcattgccaattctcccttgatctatgaaactgaccctgcaatctgaggccacaatcggtagagattgtttcattttcataacaaaaaaaaaaagaacatttcagctctaagcctctaaccttatgagttttgagctggtttggt

SEQ ID NO: 14496 - DNA, 245 bp, Glycine max
  Clone ID: 700964193H1
gactcactctggcagcggcactctcggtggctataatctttctgtggtgagttgtcaagatgtacacatcaaggaagaaaatccacaaggataaggatgctgagccaactgaatttgaggaatcagtcggacaggcattgtttgatctggaaaataccaacaatgagctgaaaagtgatctgaaagatttatacataaactcagctgtccaaattgatgtttctgggaaccgcaaggctgtggtt

SEQ ID NO: 14497 - DNA, 244 bp, Glycine max
  Clone ID: 700964194H1
gtgctccttctccattttctatctatcgtcaacgttagtgctttgtttaggtgaactaattcggagaccttgcaagacttcatcaatggctgtcaaagtttatattgtgtactactccatgtatgggcatgttgagaaactagcagaagaaataaagaaaggggcttcctctgtggaaggtgttgaggccaagttatggcaggtacctgagacactgctggatgaggtgcttggtaagatgagt

SEQ ID NO: 14498 - DNA, 247 bp, Glycine max
  Clone ID: 700964195H1
gaaaaagaactcaagtaccttggaaatggcgatgccaattcccatgtttgtaaagtatgttttgaatctccaactacagtaattctgctttcatgccgacatttttgtttgtgtaaatcttgttcacttgcttgttttgagggtccaatatgccgcacaagtattactgataggatttttgcttttacataacagagggctttatcccattgaattaatatactccatgctattacgggtgcaattc

SEQ ID NO: 14499 - DNA, 264 bp, Glycine max
  Clone ID: 700964201H1
attctatagaaagtgcttttagtgttgttagtgggttaagtttccatggattcagtactagtgcatgttatatcttgtcccaatgcttcagccacaactggtggaaatctctggcggagtaaacattccactgagaaaatatactctacaagttcttgtgcatcaaaagctttgcaaaacaaaaggaaaattcaaatggaatacaatcttttgaggttccaacaaccaactttgaatcatcattacaagtctactgagagaggg

SEQ ID NO: 14500 - DNA, 260 bp, Glycine max
  Clone ID: 700964202H1
cgctaaccaaaccaaagctctctcaatggcttcggagcaacacgacgccgttttccgcgaagaagacatggacgacgacgacgacgagtctcaggaggacgaagagtacgaagaagacgacgacgaagaaaacgtgccctctccctccaccgctctcgctgtcaccgtcgccgtccccggttccgccgtctccaacggcggcggtggctctccaatttcgaagcccaccgccaccgccaccaccgccaccatcgtcctcg

SEQ ID NO: 14501 - DNA, 254 bp, Glycine max
  Clone ID: 700964203H1
ctgggactagctttactaaaccaagcaaggaacatgatttcatcgggagataatccgatgaaagctcttgaattatctcttcaagcaatgaaattgtttgagagagctgctgcttatgggaaaccaagtttggatttggccatgtgtttacatgttactgcagcaatatattgcagtttgggacatttcagtgaagcgattccaattatagagcgctcaattgagattcccactattgaggaagaccaccaaca

SEQ ID NO: 14502 - DNA, 254 bp, Glycine max
  Clone ID: 700964204H1
actccctcctcttcacacattttcttagctctctccaacaatccctctcgttcacactttcagattgtgtgaagatgggggctggtggccgaactgctgttcctcctgccaacaggaagtcagaggctgaccctttgaagcgggtaccatttgaaaaacctcagtttagtctcagccagattaagaaggccattccacctcactgtttccagcgctctgttctccgctcattctcctatgttgtttatgacctc

SEQ ID NO: 14503 - DNA, 253 bp, Glycine max
  Clone ID: 700964205H1
caccgtggaaggtggagcgtgaggctgtttccggtaacctctcccggcggcgctgagtggtgatcaaggcaatgggtcagacgctgagttgcgtgcaacagcacgaggaccatggtgtgctcttccctgcacttgcaagtggagaattggaggttgttgaggccatggtggaggaagaccccactgtgttggaacacaccattggctgtgacaggctttctcctctgcatgtcgctgctgccaatggtcggat

SEQ ID NO: 14504 - DNA, 253 bp, Glycine max
  Clone ID: 700964206H1
cggctttaatgatcctatcagcaatagcggcctatttaatatggttcaccttggtcactcgctccctcaaaggtccacgtgtctggcccctattgggcagcctccctggcctcatccaatacgccaaccgcatgcacgactggatcgctgacaacctccgcgcgtgcggcggcacgtaccagacctgcatctgcgccctccccttcctcgcccgaaaacagtgcctggtgactgtcacgtgcgaccccaaaaa

SEQ ID NO: 14505 - DNA, 249 bp, Glycine max
  Clone ID: 700964207H1
gagatcggattgaattgaatgggtggaaagtgaaagagtaagacaccacaaagtgtaacttgagtgattatatctgatgagtgcagaaagaagggaggattgttggtgatcgatcatcgatcatcgatcatcgatcatcgatggcgtctgctagccttggaagtggtggggtgggcagttccaggtctgttaatggtggcttcaggggttcttccagttccgtcgattggcttggcagagagatgcttg

SEQ ID NO: 14506 - DNA, 255 bp, Glycine max
  Clone ID: 700964208H1
caaccaccaaattaatccatatatagagagagttaggaaaacaatggaagccatttctcctaagcatcttatgacatcccttgtaataattatagcttctagtttgaccgcacactgtggctgtgccaagagagggggtgaaagaccatacaaagaagccaacacactgttcataagaacatcttgcagctccacaacatatccaagactctgctacagctccttagtgaagcatgcagacttgatccaaacaaa

SEQ ID NO: 14507 - DNA, 260 bp, Glycine max
  Clone ID: 700964215H1
ggtacattgagacttgaaaatgtgttaacattctttgcaggagttctactagagaagcagatagttgttgtctgttctaatttgggaatcctatctgcttcagttttatcagttattccgctaatccagccttaccggtggcaaagcctgttaatgccagttttaccaaatgacatgcttgagtttttagatgcacctgtcccttatgtagtcggtatgcagaacaagaccagtgaagttcagtcaaagtttaccaatgt

SEQ ID NO: 14508 - DNA, 262 bp, Glycine max
  Clone ID: 700964216H1
aaacctcagtttctacctttgattacacgttgaaactttggtctaatttcgcgttcccgccgacccacttctctctctatctgtatctctccctctctttctctagaaaaagaggaaaaaaaaaagaagaaaaaaagactttgaatgaaaacttgcttgattgaggctcttttaaaaccaaaccaaactcataatctctcattatctttgattatggtcttcttcttctgaaggaagataagaagttcagaacaagaacgca

SEQ ID NO: 14509 - DNA, 257 bp, Glycine max
  Clone ID: 700964218H1
ccagcacatgatggactcagtatagccaacttctctatctgcttcattaaatcctattcctatttcctagtactataaaaggtcgcattagcacggcaggttccctagctcaccaaagaaccaaaccaaaccaaagcatgccatcattcatggctttcctttcagatccttatttctttgcagctttgtctgcatctttgactcttttggtggtccaacttctgttcagaaaactgaacaaaaggcatagtagaaag

SEQ ID NO: 14510 - DNA, 250 bp, Glycine max
  Clone ID: 700964221H1
gcaagccgtagtgtcgggctccatcccgtcctactcactcgagtcgcggctcggtgacacccgtcgggccgccaccatccgccacgaggtggtgcagagactgacttcccgatccctgtcaggtttacctctggaaggtttcaactacgactcgatattggggcagtgctgcgagatgccgatagggttcgtgcagatccccgtgggagtagcggggccattattgttggatggaaaagaattcaccgtg

SEQ ID NO: 14511 - DNA, 251 bp, Glycine max
  Clone ID: 700964222H1
gacaccaattccctcccactccctctctattttcctctccacactccacattccgccatggacgacagcttgtacgacgagttcggcaactacatcggccccgagatcgagtccgaccgcgactccgaccgcgactccgacgccgatgacaaccccgacgaccaatccgacgccgtaggagccgcccactccgatggagaggacccgagcaacgggtggatgacgacaatctccgacgagctggagaacca

SEQ ID NO: 14512 - DNA, 252 bp, Glycine max
  Clone ID: 700964224H1
cgcttccatcccacggatgaggagttggtgatgtactatctgaagcggaagatttgtgggaagaggctgaagctcgacgtgattcatgaaaccgatgtgtataagtgggatcccgaggatttgcctgggcaatctatattgaaaacgggagataggcaatggttctttttctgtcacagagataggaaatatcctaatggtggaaggtctaaccgagcaaccagacgtgggtattggaaagcaacaggaaag

SEQ ID NO: 14513 - DNA, 256 bp, Glycine max
  Clone ID: 700964225H1
cctctttcttcctcttcctcagtagtgcgattttcgattctcttctctgcaactatgcctaaccctaaggtcttcttcgacatgaccatcggcggtcaacctgccggccgcatcgtgatggagctctacgccgacgtgactccgagcaccgccgagaacttccgcgcgctctgcaccggcgagaagggcgccgggcggagcggcaagcccctccactacaaaggctcgtccttccaccgcgtgatcccgaacttca

SEQ ID NO: 14514 - DNA, 255 bp, Glycine max
  Clone ID: 700964226H1
ctttctctagtcctgttatttctcagcgcgtaaagcatggctttcttggtggagaaaaccacgagtggtcgcgagtacaaggtcaaggacctttcccaggccgacttcggccgcctcgagatcgagctggccgaggttgagatgcccggcctcatggcctgtcggaccgagttcggcccctcccagcccttcaagggggcccgcatcaccggctccctccacatgaccatccagaccgccgttctcattgagacc

SEQ ID NO: 14515 - DNA, 87 bp, Glycine max
  Clone ID: 700964227H1
gtcctcaatttctaattctctctctctttttttatagtgcaaaatgctttttcctttgtcttatgatgcttgaatttgggtttcacc

SEQ ID NO: 14516 - DNA, 257 bp, Glycine max
  Clone ID: 700964228H1
ggtgcattttacataaagaacttcttgcaagttgagttctatctcaagtctctaactctcgaagacattccaaaccacggaaccatccacttcgtatgcaactcctgggtttacaattcaaaaaactacaagactcatcgcattttctttgccaacaatacatatcttccaagcgagacaccagctccacttttgaagtacagagaagaagaattgaagaatgtaagaggggatggaactggagagcgcaaggcatg

SEQ ID NO: 14517 - DNA, 218 bp, Glycine max
  Clone ID: 700964185H1
attgtttcgtccaaccccaagaatggttcttcaattgtctagttgcgttcgttgtggtggacgggttagacttcaattagataattattgggagtccaaaccttcgcagctgggatcgataccggccaccaacagagagaaagagtaatcaagtgtatggcgaactgtcagcaatattagttgcgtgtgctttctctggcaatttgtatgcctagcct

SEQ ID NO: 14518 - DNA, 244 bp, Glycine max
  Clone ID: 700964156H1
gtttggaacaacaactcctctttaaccgttggagctagaggtccaattctgcttgaggattatcatcttgtggagaagcttgcaaactttgacagggaacgtatcccagaacgtgttgtccatgccatgggagctagtgcaaagggtttctttgaggtcacacatgacatttctcacctgacatgtgcagatttccttcgagcccctggagttcagacgcctgtaattgttcgtttctcaactg

SEQ ID NO: 14519 - DNA, 248 bp, Glycine max
  Clone ID: 700964157H1
aagaaatttaagtgaggagctagagaatgatgatgaagtctgctatgtgtgcagtggtggttgtagcacttcttcttctggcggaggtggggcccatggctgaggctgtgacatgcaccccaacagagttgagtccgtgtcttccagcaatcacttccggtgctaaaccttccaatgcttgttgcacgaagctgaagcagcaaaaaccatgcttatgtggctacctcaaaaacgctagcttgaagcag

SEQ ID NO: 14520 - DNA, 247 bp, Glycine max
  Clone ID: 700964158H1
gccttggggaatccagagttctttaatatggtttttcccttgttgtttgatctatgcaattcagagcccctaaagtccgggcaagcacctttggccagtgatgctgctggatagttgaacagtgttgaagagatttctgttccacataacaaaatagttgactgtttaacctcttgtatccatgtggcacatataaatgatattcttgaaaagcaaaagggcttagcacacatgtatacagcattct

SEQ ID NO: 14521 - DNA, 245 bp, Glycine max
  Clone ID: 700964159H1
cagcggaataacgaagcctcctcgttcttcttcttccgccctttctctctctagaaccgtacggtcgtttctttctctctcctcaaccggagacagcgtcgccttcttttctgaatctcgcggtgttgttagttctgcggcggttgtagttccggcggcgatgggacagcaatcgttgatctacagcttcgtcgctcgcggcaccgtgatcctagcggagtacaccgagttcaccggaaacttca

SEQ ID NO: 14522 - DNA, 200 bp, Glycine max
  Clone ID: 700964160H1
acgaaatcttcacctttgcaccatttgcgtaaatttcgtcattaaaaataaattagcaggattggatgaaatcgaaaaataaaaattatgagctgaaattttgtgggagaaaatactaatatgtgagttttgagaagaagaaaaaaatagatgggaaaatattgtgcagaaagaaagagtgaaattgttctagatcgcga

SEQ ID NO: 14523 - DNA, 213 bp, Glycine max
  Clone ID: 700964161H1
gtcatattggtttattgcaaggtcggtggcaacccaaccctacccttgtctcctttctcatatgctatatatcagcctcctccacctagcacttgctccaattcactaccaccaaacacaacacaacacagcataccgtgtttcattttctctcacacacaaacctccttcgttttcattgacttctcaggaggtataactactatttgtcgc

SEQ ID NO: 14524 - DNA, 227 bp, Glycine max
  Clone ID: 700964162H1
cttcattctcctcggagctttgctcgttattcttctttttcttttctttctttcgtttcgttcggaaaacgcgtaggctgtgccgtcgtttttagtgggtggatgggaacgacgtcgtgtgagtacgtgagctgggaggaggtgtttatgtcgaacgacaaggggaggagggaggttcattacttgcttaaacgacgaggcggtggctcggatctggccgttttggg

SEQ ID NO: 14525 - DNA, 250 bp, Glycine max
  Clone ID: 700964163H1
gaatttggctggtgttgtgagtggaatccagctatgacgaagttaactggatggaagcgagaggaggtgctggataaaatgcttttgggagagctttttggcacccatatggctgcttgtcgcctaaagaatcaagaagcttttgttaatttgggtgttgtacttaataaagccatgactggtttggaaacagagaaggttccttttggtttctttgctcggaatggccaatatgtggaatgcctgcttt

SEQ ID NO: 14526 - DNA, 255 bp, Glycine max
  Clone ID: 700964164H1
atactctcctaccacggtcataattaccccataaagaaggacctgcaatgtgaaactgacaggttaactcatttctacacattcattctcaggccagatgccacatacagtgtcctggttgataatagagagagagattctggaagcatgtatacagattgggatattcttcctccacgaaaaatcaaagatgtcaaggccaaaaagcctgcagactgggaggaaagagaatacattgaagaccctgatgatgtc

SEQ ID NO: 14527 - DNA, 247 bp, Glycine max
  Clone ID: 700964165H1
gggagagtgcaatcagtttgtttcttcgcttcgtgactcgaatctgcgatgcctctctgtttgttcttctctgccgccgctttttctggtctgaaatgatggtttctgttagagtgcctcttttctcgattctccgcatactatcatcattgtaagggaaagcgatttgcgttttgacataatgtcgccaaaatatcagagtctccacaatcgccccatcaatcagtggtaggtgacagagctgaaa

SEQ ID NO: 14528 - DNA, 247 bp, Glycine max
  Clone ID: 700964166H1
ctccaaaccctagcggcactacacactagttctatcgctatctccccaagatgtcgagcgccgatcccgagcacagagaagaggaggaggcacccgccgttggcgacgacgaggacaccggagctcacgtcgctccaatcgtcaagctcgaggaggttgctgtcaccaccggcgaggaggacgaagatgcaatcctggatctcaaatcgaagctttaccggttcgacaaggacgggaaccagtggaa

SEQ ID NO: 14529 - DNA, 247 bp, Glycine max
  Clone ID: 700964167H1
aaacaacattggcatcatcactactcaccagcacttgtttcagtttcgctctcgtgtctctgcacacttagccaccctcaccaccaccatgttttcctctagaggcaacatggctatggcttcaccctcctcaatcttctctgtttatgcttccatgacagcctccatcatgctcctgcgttcagtaaccaacgacctcattcctcaaccatttcgtggctacctcaccaacgccttccgctacttc

SEQ ID NO: 14530 - DNA, 246 bp, Glycine max
  Clone ID: 700964168H1
atgtcctccttgttttaggggggtaagggaaagaaaacatttccattgtttctcagatctgcgaaacctcgtagcccccgaacatgggaaactgctgcgccacgccgtccacggacgaaacggcgaacaagaagggcaaaaagggaaaaaaggaaaaccccttcgcgatcgattacggttttaacgccgccgccgccgccaacgggtcgaagctcaccgttctgaagtccccgacgggccgcgaga

SEQ ID NO: 14531 - DNA, 244 bp, Glycine max
  Clone ID: 700964169H1
agcctccacagcactactgttatatatggattcgatgcttcttcgatcttttcctaatattaacaacgcttcttctctcgccaccactggttcttatttgccaaatgcttcatggcacaataggaaaatccaaaaagaatataattttttgaggtttcggtggccaagtttgaaccaccattacaaaagcattgaaggagggtgtacatgtaaaatgtgtaatataaaatttgttgtgaaagcg

SEQ ID NO: 14532 - DNA, 245 bp, Glycine max
  Clone ID: 700964170H1
cacacaccccaccaccaccaacactgagttttagcagaaggatagagagcagaatgattcaaagaactgtgtcctttcccagtttaaggaaattgcttcttcgggctggttgttctaaatctgcttcgtccaagatcggaacttacaattgctttgcttctcagtcctcccctctaccgagccacaaccctagttaccgtgatgacgagtatgctgatgtggactgggacagtcttggatttgga

SEQ ID NO: 14533 - DNA, 245 bp, Glycine max
  Clone ID: 700964171H1
gggtctaagaaaccaaatatccccctacctaaatgggtatctcagattggtgaatctcaacccagtattttcttcacagataggtcaggacagcattataaagaatgcctgtccatggcagttgataatcttcctgttcttgatgggaagactccagtccaagtgtaccagagtttctgtgagagcttcaagtcttcattctctccattcatgggctctacaatcacgagcatttccatgggttt

SEQ ID NO: 14534 - DNA, 244 bp, Glycine max
  Clone ID: 700964172H1
caaccttcacgactctgttgttgtgcacggcggcggcgaaggagagcgtgtacgagatactccccaagtacgggctcccgagtggtctgttaccggataccgtcaccgactacaaactcgacgaggatggccaattcgtcgtcgttttgccgaagccctgctacatacagttcgattacttggtttactacgagagcaagatctccggcaagctcagctatggctccatcaccaatctcaaggg

SEQ ID NO: 14535 - DNA, 247 bp, Glycine max
  Clone ID: 700964174H1
gtgattgtgttgggagatgtcgtgtttctcagacccgaacaggaaattgaaactatgttgtttcgcacgtttgaggtggttaattagggctataaaggactgcaaaagcccatcagctttcatccatcaccatcattcattcaattttatcattctggggccttcactaatggaaaatttgggatttttttggaaaaaaaaaacaagaaaagaaaattcaagagtttggttcaattgtaatctgctt

SEQ ID NO: 14536 - DNA, 244 bp, Glycine max
  Clone ID: 700964175H1
gaggaattcaatgtcaacaaaagtagtatgccctggcttgctgtcccatacgaggacaggacaaggcatgaccttcgaagaatctttgatgtaaagggcattcctgctttggttctcattggaccagatggcaaagtcattagtgtgaatgggaagttaatggtctcctcatacggtgcagaagctttcccgttcaccgaatcacggataagagacctcgaagcagctcttagaaaggaaggag

SEQ ID NO: 14537 - DNA, 245 bp, Glycine max
  Clone ID: 700964176H1
agttacgcaagtacatactttccgtctcaattcaatttcccataaactttctttgaggttctatcgcttcgttaaattctcttgtcttcttctgcccccttttccacttcaattaggtatatcgccgattcgattaccaatttgcttaaactcaatcaagcttcgcagcgtcaatcattctattagaggtgatcataatccatgtaattctcgtacttcatccctagttatattttgtatcaaaa

SEQ ID NO: 14538 - DNA, 247 bp, Glycine max
  Clone ID: 700964177H1
cagcattcccatattagaatcctcatcttatcatttgtactctcccccacccacttaatttatcgtatctctttgcagtgaagtctgagcgttgcacacaaagatatttaccaatataatataaggctgtaatttgtaagcaaagaaaatggtgaagatatgtggaattggagccgggtacgtagggggtccaacaatggctgtgattgccctcaaatgcccctcaattgaagtggctgtggttgac

SEQ ID NO: 14539 - DNA, 247 bp, Glycine max
  Clone ID: 700964179H1
gcagacaaaatgaagagttttttgttgtggcgtgtggccattgtggaaaaaaatagaccctatgttgcaatgttgttcattcagtttgtgtatgctggaatggccttgctttccaaggctgcaatttccaagggaatgagcccttatgtgtttgttgtttatagacaagcctttgcatcagttgctctatctccatttgctttctttgacagcaagcaaccagctcctttgtcatgcaacttgttgt

SEQ ID NO: 14540 - DNA, 253 bp, Glycine max
  Clone ID: 700964180H1
ttggttttaattggtataggcttgccaaggtcttgttgattgagcgttaagtgctttaactaatcaatcccaagaccttggtttaccttgccacacaaaaaaatatataaaaaggcaaaataataataaaaaaaagagaaggcttggagccaagaaaataaacacaaagcacaagtcatggaaagaataatggttggaagtgcaacaaaggttgctttcaacctcttggtcactttcgccattgtcattccat

SEQ ID NO: 14541 - DNA, 248 bp, Glycine max
  Clone ID: 700964181H1
tgtcgctctgtgtctgtctctgggtttgcggctgaggattccgaacgagcgaccttcgtcgtttctcgcaaagttgaagtcatcatgggtaaggaaaagactcacatcaacattgtcgtcattggacatgtcgactctgggaagtcaactaccactggtcatttgatctacaagcttggaggtattgacaagcgtgtgattgagaggttcgagaaggatgctgctgagatgaacaagaggtcattcaa

SEQ ID NO: 14542 - DNA, 245 bp, Glycine max
  Clone ID: 700964182H1
gaagcatattcaaatacaatcaacagtggtcactcctgttttgctgctatgactagtgttttggtgtttggcttttgtgtaacagtaagcttggttctagcacttggttctgtttctgctcaaccaacacgggctttcttcgttttcggtgattcgctcgtcgacagtggtaacaatgacttcttggcaaccacagccagagcagacgctccaccctatggcattgactacccaacacacagacc

SEQ ID NO: 14543 - DNA, 248 bp, Glycine max
  Clone ID: 700964155H1
acagagagtccccagctcagctcaggtcaactctctagttgtttgttgcattgttcattttctaggcttagtcattagatagaaagagaaggaaaaaagggctattatggcaggaggaggagctccagctaaagcagatgagccacagccacatccaccaaaggatcagttaccaaatatttcttactgcattactagtcctcctccatggcctgaggccatacttcttggttttcaacattttcttg

SEQ ID NO: 14544 - DNA, 249 bp, Glycine max
  Clone ID: 700964121H1
gtggttttctgattccatttgggaaagttttgacttttcatggttcaatccctcctcagttgttgttgttgttgtagatgagtttgaggaaatctagttccctgtaagtgtctgtgaaattagtctcagaaggtttgtttttggggacctccctttttggctttgagacttgttctcagtttgtggataaagtgatttgtaaggtgtttctagttttcttcttctgaagggtaaaagatggataaagat

SEQ ID NO: 14545 - DNA, 251 bp, Glycine max
  Clone ID: 700964122H1
gcgaaaacccacttctggatcttctggtgtaaaggccattagaagctttagaaattttctaattgagttggtgtatagtgttgaagggggtgaaatctggagcccagtttgttagttgttactcacttcatctgtaagctcataggttgaaccctctttttttggagacttacctgggaaaagatgatgatgtttgaagatatggggttttgtggcgatttggatatgttatgtgtctctcttggagaggg

SEQ ID NO: 14546 - DNA, 240 bp, Glycine max
  Clone ID: 700964123H1
gccgaagaaggtattgacgtcgatgatgataatgaaattggtgaaaacattactgcttctcctttgtgtgaaactcttctgttatgcagtgattggtgctcctcaaacttgtcctgctaacaatgaggataaatgcggcgattcagatgaatggaaaggggagttcttccctgacattcccaaaattaaatatgagggtccgtcaagtaagaatgtgctttcatttaaatggtataatgc

SEQ ID NO: 14547 - DNA, 252 bp, Glycine max
  Clone ID: 700964124H1
agcgcactccttcgagagatagttcaaacatggaggacgtggaagaaaactcagatcttttagacatcggcctggacaagggaacctcaaatccttcattgatgctttctttaccgcatgtacttgtggcgaccatttcttcattcctttttggataccatcttggagttgttaatgaaccacttgagagcatttctgtggatcttggtttccgtggaaatacattggcagaaggtctggtggtgagcatat

SEQ ID NO: 14548 - DNA, 253 bp, Glycine max
  Clone ID: 700964126H1
tatcttttggtttcctgaatccatttctttctacggttatcttatcttattggctaccatcttccctatcttcctcaactgggttctgcgtattgttttaagtttaggcttgtttcattttagtatttgattgctaattttatatttctgtattcatttgtttatttatttatttattactttgtttcattcacgattctagatgagctctaaggttagtgagggggttatttcctttatgttagatttaatc

SEQ ID NO: 14549 - DNA, 250 bp, Glycine max
  Clone ID: 700964127H1
aaagggatcgccggcggcaccctccgaagacggagatacacccactcacaaccactttcccggaaaataaccaccgaccacaatttcttggaatttattttgcggtgagggagctcgtctcgtgtgtcgtttagggctagaaatggggtttaagtgggtgcactgatgtcattgttcttgcttgagattcgtcaacttgcagaaatcgaggcaatggctgcatctaagaaactgataacaagagaagagt

SEQ ID NO: 14550 - DNA, 65 bp, Glycine max
  Clone ID: 700964131H1
caagtttgaccctctctgagttaccttacgttccgttccctttcctccatgatgcttccacacac

SEQ ID NO: 14551 - DNA, 259 bp, Glycine max
  Clone ID: 700964132H1
ttctctcaaaattttgataagaaagtcttgaccttgaagagagagagagggagaaagaacctactattcttcttcttcttcttcctgcatagctaattaatttccatggaggacttcaacaactacaacaaatcaaggtctcatggaaataatgggcaaatgatgcagcagatggagaggtactatggaggagcaccaccacaaccaacaaggccttatgatctcaggtcatacagtgtttcttcatatacacaagctc

SEQ ID NO: 14552 - DNA, 171 bp, Glycine max
  Clone ID: 700964134H1
gtcgccggaaagtgagcgtcaaagaacgagatgacttttgagagtttttagatttgtgtttggtgaagtacttcagataatgtgaattatcgtgtgtatccgaatccaacttaatgtgacttgctttttacaaaactcaagtgtcaaaaaagagaaagaatagagaagggg

SEQ ID NO: 14553 - DNA, 242 bp, Glycine max
  Clone ID: 700964137H1
ctgtacttcacaagtcacattaattattaggaaataatcgaattagagctgtagctatgagtgcgacagaaggtctaatgagaggaatggaagtgattgacacaggagctgccctaagtgttccagtaggtggagcaactctaggacgaattttcaacgtgcttggagagcccattgataatttaggtcctgtagatactcgcacaacatctcccattcatagatctgcgcctgcctttata

SEQ ID NO: 14554 - DNA, 249 bp, Glycine max
  Clone ID: 700964138H1
gtttcgaaacgcaatgtccactctgcttcactccgctcccacttcttctccttccttctctcggatcatcactcctcgtttcgctttcgctccaatcactcgcatctctctccgaaacggcgtccgtagcaaggcgatcgaagcagtgaagttggagaatggaaggccgagcgcgaggtagttcgtagtcagcggaagcgtaaacgcaattccgagttacgtcgtggcgccaaacgcgcgtgttcagga

SEQ ID NO: 14555 - DNA, 247 bp, Glycine max
  Clone ID: 700964139H1
gtcaagctcgtggacttacatggttcattcctaacgatgagccaactctgatctccaaacaacaactctttgcaagaattgttggcggactaggtgggagggctgcagaagaaattatggtcggtgagcctgaagttacaactggcgcagctggtgatttgcagcaaatcaccagtttggcaaaacagatggtgaccacatttggaatgtctgatattggtccttggtcacttatggaaccatcagc

SEQ ID NO: 14556 - DNA, 244 bp, Glycine max
  Clone ID: 700964140H1
gccatttcaatccccagtttcttcttcaacgtcctcttacgagcagatcccaattctccttcccagtttcaaaccctaattccctcattcccatacgctcagaagagcccactgtcgcggtggaacccgctcccgaacctgccaccgccgagcctcccccggtagagaaggaggagcccatacctgaagccaaggctaagaaaaccaaggaacccatacctaaaaaggttaccagatcacgcaa

SEQ ID NO: 14557 - DNA, 251 bp, Glycine max
  Clone ID: 700964141H1
ctcgagccgtgattgttgtgactcgttcttcttcgtcgttatcttcttcttttgttctttgtgtgtttgttgtttctctcacctgaaaatgtcttgcttcggtggtaactgtggttgcggaagcgcctgcaagtgcggcaacggctgcggaggctgcaagatgtacccagacttgagctacaccgagtcaaccaccaccgagaccttggtcatgggagtggcaccagttaaggctcaattcgagagtgctg

SEQ ID NO: 14558 - DNA, 243 bp, Glycine max
  Clone ID: 700964142H1
gagagtcctttggaggttgctcatgcgttttctctgtaaaaataaaaaagtaatagatttttctcattttttgtcttcggttcttctgtgccttgtccgagtcttctttaccggtcaaatcagagactctgttgatgagagaagagatttcatcaatcaccggaatgtgaaaacattaggaaaattaatttcaatcaaagcaagtatacaataatacgatggtcgagtttgggacgagaatgg

SEQ ID NO: 14559 - DNA, 246 bp, Glycine max
  Clone ID: 700964143H1
acaattttgactagaataagtgcagcacagagagaagtgcgaatcagagtgagaaagagaggcatggctgctgcaggtccagaaaacgtccctcctttcatcgccgctcagcttagccacctcctctcccacttcggtcttacagtcaaggttgaacaaatgtggtcgagtgacaaatacaactcaacccccctcgatcgcttcaccctcctcatcccctactgcttagacttcatcaaatgtatg

SEQ ID NO: 14560 - DNA, 250 bp, Glycine max
  Clone ID: 700964144H1
aaaattttcaaagtcgaagcgagaacttgccatttcgagggttttagggttagggttttctcaaattgcaagaacatgggtttcaacattcaaccctatgggattcagtccatgctcaaggaaggccataagcacctttctggcctcgatgaagcggttctcaagaacatcgacgcctgcaaacaactttccactatcactcgaacttccctcggtcccaatgggatgaataagatggttataaatcact

SEQ ID NO: 14561 - DNA, 243 bp, Glycine max
  Clone ID: 700964145H1
ctttctccgatggctaatccctcactcttgttcttcagtctcctcctattatccggcagcgtagccgccgccgaacggatcgacgatgaagacgaccttctgatccgtcaagtggtgccggatgcggaggaccacccgctgctcaacgcggagcaccacttctccgccttcaagacaaagttcggcaagacctacgccacgcaggaggagcacgaccaccgcttccgtatcttcaagaacaac

SEQ ID NO: 14562 - DNA, 243 bp, Glycine max
  Clone ID: 700964146H1
agcagctatggcatctctcaaagaaatatggtcctttatgttcccttcaatttggattaaggccagccatagttgtttcctctccaaaattggccaaagaggtaatgaaagacaatgaccttgagtgctgtggacgacctaaattactaggccaacagaaactaacctataatgggttagacatgggattttcctcatacgatagttattggagagaaatcagaaaaatttgtgttgtccatg

SEQ ID NO: 14563 - DNA, 253 bp, Glycine max
  Clone ID: 700964147H1
ttgccatggaagcaagattgcttccccatatgctccgagtcaagccctttgtaccacacaagcaacaaacccgagcctcttaccccagaggaagaaaaagaccttcaacttgccatccagagattccatgagctttgccataagtgtgtgcaagtcaacattcctttgttggttgatgcagaacacacttctgttcaacctgctattgactacttcacatactcctctgccatcttgcacaacaaaggtgaca

SEQ ID NO: 14564 - DNA, 256 bp, Glycine max
  Clone ID: 700964148H1
gttcagacggagaaagtgagaatggagttggaggagcagcgagtgaggcaatcaagaatgttgatagcggcgattcaagaagccgtggcgaagaaattgaaggagaaggacgaggagattcagcgcgtggggaagctgaattgggttctgcaggaacgagttaagaacctctgcgtggagaatcagatttcgaaggagttagcacaaacaaacgaagccacggcaaataatcttcgaaacaatctagaacaagttc

SEQ ID NO: 14565 - DNA, 252 bp, Glycine max
  Clone ID: 700964149H1
tcataagctttacttaattagcaaatccaaatatggcactttcttcttcatcatcttcaacatccatatttgctttagctttgttcactcttttgcttataggaagttcttcagctcaactctctgagaacttctatgatagtaaatgtcccaaggttttctatgccgtaaaatccgttcttcaatctgctttggctaaagaacctcgccagggagcatctatcgttcgcctcttctttcatgactgctttg

SEQ ID NO: 14566 - DNA, 251 bp, Glycine max
  Clone ID: 700964150H1
tgaaaatgagagaaatcttgcacatccagggagggcaatgcgggaaccagatcggagcgaagttctgggaggtgatatgcgacgagcacggcatcgaccacaccggaaagtacagtggcgactctgaactccaattggaacgcatcaatgtttattacaacgaagcgagtggcggaaggtacgttccacgcgccgtcctcatggatctagagcccggcaccatggactccgtcagatccggcccctacggc

SEQ ID NO: 14567 - DNA, 245 bp, Glycine max
  Clone ID: 700964151H1
ttggcatattgtgccctccctctttctagctatttccctctcttaacacaattaacaaagatatatcatatcatatcaactccaaatgatgaaaaatattgggttgtttcttcttgtggtggtggctacttttgtggtggcagccacagctggtagcttttaccaagactttgaaataacatggggtggtgagcgtgccaaaatctatgagaatggaaatcttctcaccctctccctagacagag

SEQ ID NO: 14568 - DNA, 248 bp, Glycine max
  Clone ID: 700964152H1
tgggtattttgagaatctacgggacaattctttctcctctaatgcttggtatcatgctcttcatattcctgatgttgatgtgatactggatgagcaaaatctccatcttgccaaagtcttatctcagactgacagaagcttggtgtacacagtttcgaatcctggttcagaattttcactttgtgattgttcctggtctaggctggggaacctctgtaaacatgtcatcaaggtggcaactttctgta

SEQ ID NO: 14569 - DNA, 254 bp, Glycine max
  Clone ID: 700964120H1
ctcaaatccaaaccctaaaataccaccgccgttctcatctctcttcccagccctcacctcaacgctgcatcttcacgtcgtctcacgaggtgcatatagtagagagggaaaatgagtcgaggaggcgcagtagcagcagcgaagggaaagaagaagggtgctacattcaccattgactgtgcaaagccagtggaagataagatcatggacattgcttctctcgaaaagtttcttcaagagaggatcaaggttgg

SEQ ID NO: 14570 - DNA, 248 bp, Glycine max
  Clone ID: 700964154H1
agcagtttctgataatacatgtcttcagcgtaaaaggaaggctgttcttcaggaagttactaatgtttgccgtgaaaatgcatacaagggttgtttcaactcaactaaaattcaggctaagaaaagcaagctggctaaggctggtcaaattaatgtgtccaaagtggctccttctgttactgttgactccaaagcaaaggaaacagcattgcaatcggaagatactatgtgctcaattaatttggaaa

SEQ ID NO: 14571 - DNA, 228 bp, Glycine max
  Clone ID: 700964079H1
cttaatttatatgaatgttgtcacagaggcctttcttttccttatgatgttgctcttgttcctaccaaagcagcaacattaaaattaaaacatggcatcttcaccggacaccagcaaaaccataaagctggtgcgtaacaacagctacctccgcagactcaacatatccttcaaaatcctcttcctcctccacgccctccttctcctttacactctttccacacaaca

SEQ ID NO: 14572 - DNA, 272 bp, Glycine max
  Clone ID: 700964081H1
cattgttgttggagcgagccacaccaacatcacagccacaacaacaaccaatgcaacttcatcatcatcagcagccgatagcagtgtctcaaccattgggatgcaaggacaacaaggagcagctcctcagttgagggggaagagacaaggaatagtgctgtagatggatgaatgaatgaatgtcccttcatgctaactagaaaactttcacgtgatgtgttccccatcaatgttgttggtgtgggggcacctgacacagtgatgggggttgg

SEQ ID NO: 14573 - DNA, 257 bp, Glycine max
  Clone ID: 700964082H1
caagccacagcaacatcacagccataacaacaaccaatgcagcttcatcatcatcagcagccgatagcagtgtctcaaccattgggatgctaggacaacaaggagcagctcctcagttgagggggaagagacaaggaatagtgctgtagatggatgaatgaatgagatgtcccttcatgctaactagaggactttcacgtgatgtgttccccatcaatgttgttggtgtgggggcaccctgacacagtgatgtgggt

SEQ ID NO: 14574 - DNA, 256 bp, Glycine max
  Clone ID: 700964083H1
tgtgaaacggacatactggtttgacatttataagaacgttgataaaattccattggtgaagtgtccagtgctagtaattcatggaactgctgacgaggttgttgattgctctcatggcaagcagttgtgggagctatgtcaacagaaatatgaacctttgtggctcaaaggaggaaatcactgtaatttagaactctatcccgaataccttcgacatctcagaaaattcatatcctcggtagaaaagccgccatca

SEQ ID NO: 14575 - DNA, 256 bp, Glycine max
  Clone ID: 700964084H1
aaaaaacagatggccaaatacttggaagtagtgttgcatctatttctatccaacttttgaggaaaggtggtccagatgcagtttgtcagcatctatgcagtttgcagaaggggtcaatatgcatagttaatgcagctagtgaaagagacatgactgtattttcacttggaatgatcaaggcagaattgatgggaaaacgtttcttgtgtcgcactgctgctagttttgtttctgcccttatgggaatcatctctaa

SEQ ID NO: 14576 - DNA, 258 bp, Glycine max
  Clone ID: 700964088H1
cagacacaacacaacaaggttgcaaagtgaagaaggattaagccatgaaagctctaattttaatcctcacgctatgcatcattgctgtcaccttctcatcacaagcagcaacctccatagtcactcaaccccaacccaacgaatttttcaagctcaaccaaaccaagccacagaatgatggtagttcctgtagttacacggtgagcataaaaacaagctgcagttctccctcctacaccagagattacatcggtcttg

SEQ ID NO: 14577 - DNA, 257 bp, Glycine max
  Clone ID: 700964089H1
ctaaaatggccactctttcctcctacgaccacttcatcttcactgccttagctttcttcatatctggcctaattttcttcctcaaacagtaatccaaatccaaaaagttcaacctccctccaggaccccccgggtggcctattgttgggaacctcttccaagttgctcgttctgggaaacctttctttgagtatgtgaacgatgtgagactcaaatatggctcaatcttcaccctcaagatgggaacaaggaccatg

SEQ ID NO: 14578 - DNA, 256 bp, Glycine max
  Clone ID: 700964090H1
gcaaaatccctccttcgttccgctccgcaatcgcaaaccctaacctccgtaacccctcttcactcttccgtccccaaccccatcacttcccaaacaaacaccaacaacctcgaaaaccctctaagcaacaacaaaaaccttcttctcttcctctcttcaaatccccaaacctcgaagacgccaaaaaactcttcaactccatcgccaactcttcctccgacccccgcttccccaactccctcctccactcctacgc

SEQ ID NO: 14579 - DNA, 253 bp, Glycine max
  Clone ID: 700964091H1
ggaagaaacgtcttctgatcttcgaaactcagcagaagagagcagcagagctgaagtgccagtaactgcaaatgcacaacaaaatgcaggagttgcattgaacgaacggatgttgcagaccattaataggaatacacaaacccaatacaatactacgatggacctgagaaatgtagctgatgattctgcagtagaatcttcaagtggtaccaggagagaaagggatggaggtttagttccagtatggtctcca

SEQ ID NO: 14580 - DNA, 259 bp, Glycine max
  Clone ID: 700964093H1
attcatatctctctctctctcccccaagaaattcaacagagttttgattaacttgaaattgttcaacaagaaatggagaattcattgggaaagtacggaaaagagcttaatctcgaggctacagagttgaggttggggttgcctggaagcgatgagcctgagaaacgttctgctgttagaagcaacaagagatcttcaccagaagcaagtgaagaagagtgcataagcaagggcaacatgaattcttctgatggttctg

SEQ ID NO: 14581 - DNA, 262 bp, Glycine max
  Clone ID: 700964095H1
atcattcaaaagtttttgaaatgttgtcaccccttcttctatttctatgcctaactcttcttttgtttttgttgtccttcttcaaataccgtaaaaccttcaagaatccaccacttccaccaggtcctagaggacttcccataatagggaatcttcatcaactagatagtccttctcttcatgagcagctatggcatctctcaaagaaatatggtcctttattttcccttcaatttggattaaggccagccatagttgtttc

SEQ ID NO: 14582 - DNA, 261 bp, Glycine max
  Clone ID: 700964096H1
acaaagtatagagtgaaagaatgggtgagaaaagcaagattttgatcataggaggcaccggctacatcggcaaacatatagtggaagcaagcgcaaaggctggaaatcccacttttgctttggtgagggaatccacactctctgacccctccaaggcacaactcatccacaattttgaggctttgggcgttaatttggtccgcggggatctgtacgatcatgagaagttggtgaaagctatcaagcaagtagatgtcgtca

SEQ ID NO: 14583 - DNA, 230 bp, Glycine max
  Clone ID: 700964101H1
caactgtattggaggtgtactttgcttgtaacaaaaatgaggagctggctgccaactaccttttagatcacatgcatgagtttgatgaataattagatctcctttacaatttgtcaaaatatttgttttatgtttccttttgaatggtctttgttatgtaatgaaggtaatatttgataatgacaagtctcgaatggacaaggaatattttaatcaccgcattgttgcac

SEQ ID NO: 14584 - DNA, 258 bp, Glycine max
  Clone ID: 700964103H1
tacaagcacttgtgagagggtacttggtgcggaagcaagcagcagcaaccctgcatagtatgcaggctctaattagagctcaagcaacagtaaggtctaagaaatctcacggactcagcagcacaaagaatgaagcacatttgtttcaaacacaagcacgaagatccatggagagatttgatgacataaagagtgagtacatagctcccatccacagcagaaggctatcatcttcttttgatgccacaatgaataatg

SEQ ID NO: 14585 - DNA, 257 bp, Glycine max
  Clone ID: 700964104H1
cacaagccaagtgaaagtgagaaagaataaaaatcagagagcataatgtcagggatcattcacaagattggggagacccttcatgtgggagggcacaagaaggaggaggagcataagggtgagcaccatgctggagaatacaaaggggagcaccatggtgaacacagtagtgagtacaaaggagagcatcatggtgaacacaaagctggagagtaccatggtgagcacaagccagagcacaaagaggggttcctaga

SEQ ID NO: 14586 - DNA, 255 bp, Glycine max
  Clone ID: 700964105H1
gagagagagagagagaggcacttggaatccaaaaatgagagaaatcatcagcattcacataggtcaggccgggatccaggttggcaactcctgctgggaactctactgcctggaacatggcatccagcccgatggcatgatgccaagtgactcctccttcggtgtagcccacgacgccttcaacaccttcttcagcgagaccggatccggcaagcacgtccctcgcgccgtcttcgtcgatctcgagcccaccgt

SEQ ID NO: 14587 - DNA, 255 bp, Glycine max
  Clone ID: 700964107H1
ctgaactaacaaagcaaccctatgtcgaaggtggtttgtgtcaccggagccagcggcgccatcggatcatgggtggtcctactcctcctccagcgtggttacaccgtccatgccaccgtccaagatatcaaggatgaaaatgagacgaaacatttggaggaaatggaaggagcaaagagtcatctccatttttttgaaatggatcttcttgacatcgactccattgccgctgccataaagggttgttccggcgta

SEQ ID NO: 14588 - DNA, 254 bp, Glycine max
  Clone ID: 700964108H1
gttgtgcctaaagatgttaatgcagctgtgggaattatcaagaccaagcgcactattcaatttgttgactggtgccccactggtttcaagtgtggaatcaattaccagcctccaactgttgttcctggcggtgatcttgccaaggttcagagggctgtgtgcatgatctccaattccaccagtgttgttgaggtcttctctcgcatcgaccacaaatttgacctcatgtatgccaagagggcttttgttcattg

SEQ ID NO: 14589 - DNA, 252 bp, Glycine max
  Clone ID: 700964110H1
gcatttaccatttacaaatgtcttctccactggaaatcatttgaggctgaaagaacaagtgtatttgatcgtcttatccagatgattggttctgcaattgagaatcaagatgacaatgatcttatggcctattggctgtcaaatttgtctacactattgtttttgctccagcaaagtctaaaatctggtggtgcagctgatgcaactcctgtaaagaaaccgccaaatccgacatccctctttggaagaatg

SEQ ID NO: 14590 - DNA, 237 bp, Glycine max
  Clone ID: 700964114H1
tgtacgttcaggatttctgcacgtcggtgtgtgggttccactacttcacgtttccctcgttggttgggtatactcttccgtacgcttgggtgggtaactcggcaaagttctgccctggacagtgtgcttatccgttttcggtgcccgcgtatatccctaaccggaaaccgtttaagtccccaaacggcgacgttggggttgacggcatgataagtgtgattggacacgagatggctg

SEQ ID NO: 14591 - DNA, 243 bp, Glycine max
  Clone ID: 700964115H1
gtaaaaggagggaagagtgggagcaacgggtgagtgaaaagtgtgagaaaatgtctaaccctcaagaccagaaaccatggaaagcggaatacgcgaagtctgggagatcttcatgcaggacgtgcaagagccccattgccagcgaaacgctgcgtctcgggaagatggttcaatccaccaaattcgatggcctcgtgcccatgtggaaccatgctgcttgcgtattgaagatagccatcagat

SEQ ID NO: 14592 - DNA, 258 bp, Glycine max
  Clone ID: 700964116H1
aaatgcttggacatgaaaaatggcactgcatttgctggcatagcatccatcaatgcccatcctcagtgcagcaattgcttggacatgaaaaatggcactgctcagaaggaaccccgggcttctttcatctcagagctagtcattgaccactcagcgacaggtggtgtgaaacgggaacaagaatgtgtgatgtgcctttcagaggagatgtctgttctgttcatgccatgtgctcatcaggttgtttgcaaaacatgt

SEQ ID NO: 14593 - DNA, 255 bp, Glycine max
  Clone ID: 700964117H1
agataatatcatttccgttctcaaaatcataacagtacttcgcgtgccctagctcactccgtcgctcctcacccttccggcagtgcttggtcgtggccgtcacggttcaaacttcaaaagttataattggttcagcttgatcaggaaggagggtcatctgcagttcaaaaggtgtgaaagcaaagaagatgcagcatagaaaattgacttctggaaggccttctggaactgatggctctgattactcctaccgta

SEQ ID NO: 14594 - DNA, 254 bp, Glycine max
  Clone ID: 700964119H1
aaagaaaagaagaagaggttttgatcggatgcgatgagcacacaggggcaagtgattattgatgaggcggttctggatgacataatccggcgcttaacggaggtccgactggcccgacccggcaagcaggttcagctctccgagtctgagatcaagcaactctgcgtcgcttccagagacatcttcattaaccagcccaatttgcttgaactcgaagcccccatcaagatttgtggtgacattcatgggcagta

SEQ ID NO: 14595 - DNA, 263 bp, Glycine max
  Clone ID: 700964078H1
ccttctcgctttctttcttcccaccttttctctgtttcttcttcttcttccattagttcctgctgaaagtcctaacacaacaccacccttcttcatcttcttatgtttttgacttgtggccaccactgtgacccatttctgtatcttctggcaaggttctatccgtttcttcttttggatcacccttttcactgttcgactccttcttgctatctgcttcgtcaatctgattattcatgggtgaaaagctaatttgttcactt

SEQ ID NO: 14596 - DNA, 265 bp, Glycine max
  Clone ID: 700964042H1
aacaaaaacaccaattctccaccctctcattgaaaaaaaaacaaccaaacaaaaaaaatcaatcattttattttatttttctacgaaaatggttgatttacattggaaatcaaagatgcctagttccaaaacaccaaaactctctctctccgacaacaagtccttaccctctttgcaactacccttccgcaccacagatatctctcccgccgctccttccgtttggcccgcttacgactactatctccgtcttcctcaactcaga

SEQ ID NO: 14597 - DNA, 262 bp, Glycine max
  Clone ID: 700964043H1
gttttcattttctaatttctctctctcccacttcaccaatcaaacctctttttttctcaacaaaaatacacccttcttcatggcgagtgaagctgagatcgaatacgaagaggcgagtgaagctgagatcaaatatgatgaggaatacgtttggaattctcgaggcttgaagctttttgcatgccgatggcttccagcgaatggaagtccaaaagcgttaatcttcctctgccatggctacgccatggaatgcagcatcacc

SEQ ID NO: 14598 - DNA, 263 bp, Glycine max
  Clone ID: 700964044H1
aatcttcacaccatatttgcattcgctctttctaatctatccccatgatctgctaatgcatcaaatatttgcaagtcattgatatgaaatcactgaagaagatgctgcccattcatgcattttcttaaccaattgaagtttatagcacacagtacatctgcatgaaagattcttattcaaggactcaaatttctgtggagtaacaggtacgttttttttttcttttttgtaagaggagtggtcatggatgccaatgatgacag

SEQ ID NO: 14599 - DNA, 263 bp, Glycine max
  Clone ID: 700964045H1
cacacctttctcctttcgtgaagacaccttgccaatggcagcatcactatcacactgctaaagtcttggtctctgcctctggcaatacccaaattgaccaaaatcccgactctggacttcttcaacgccctactcctccagacccactcgatgacgctcgtcaggctcggtagagatcgtcagattggaaggctgcaaagacatatcaagatagtaaagtcatttataatggtagggttgaaggttttaattctggaggcctg

SEQ ID NO: 14600 - DNA, 262 bp, Glycine max
  Clone ID: 700964046H1
agagcgagagagagagagaaacaaagcagcacccatttggatcctctcttctcttctttgatctccgttaccctttttgttttctcaacagagagagagagagagaatctttcgaagttcgtttgcgtgtgttgtgtggtcagtcaccgatggcagcaccacctgcgagggcacgtgccgattacgattacctcatcaagcttcttcttattggcgatacggtgtgggaaagagttgtctgcttttgcgatttctgatggtt

SEQ ID NO: 14601 - DNA, 267 bp, Glycine max
  Clone ID: 700964047H1
gttgagttagctttcactttcagtgtgagatcttcgtctcttctcttgcttccttcttcaattcatctccgaaccgcgtttctatttttgactctctctctctactcagtaagaatgtatactaatattggtatgccaccgggggtacctcagcatcatcctcaacctccaacgagctcacaacctaatctgttcgggaatgcattcaattctgctggttctggactcattcgaggtgcattgggtgcgtatggagaaaaaatatta

SEQ ID NO: 14602 - DNA, 267 bp, Glycine max
  Clone ID: 700964049H1
gtgattaatcaagtccgacaacgggttttacaacaagccttacagggagctctaggaactctaaagagttgcttgaacaacgagttacatttacgtactgtcagtgctaatattggcatgtttgggacgatgaaagaaaaaataactgattagtctttctattataaaatagagtataggcattatttttttcttctaaaaaaataaaattaagaaattttcatggtaaccattcgtgcagatgaaattagtaaaattatccgtgaa

SEQ ID NO: 14603 - DNA, 263 bp, Glycine max
  Clone ID: 700964050H1
aggaaaacatattggctgaagttatttttgacgcgtgaaataggcgccggcgttcatcgttgaaaagcgaaaatggatatacctcgtctgaaacttggaacccaaggcctggaggtttccaagttgggatttggttgtgcggggcttagtggagtgtttgacggccctgttcctgacgaggttgtcatctctctaatcaagtatgcattcagtaatggaatcactttctttgatacttccgatttttacggtccctacactaa

SEQ ID NO: 14604 - DNA, 264 bp, Glycine max
  Clone ID: 700964053H1
cctcgagccgattcggctcgagaatatgggttcttcttcccctccacacactagcaagagcccaaagctagagcgatacaacagctacatccggagactcaacagcaccaagctcctcaacgcctcctccaaactcctcttccgcgccactctcttggtccgcactcatcctcgtcttcctcttcaccttcaactaccctcccctctccgccaccgactccacccaccgccacctccacgcccactcccactacttcctctcct

SEQ ID NO: 14605 - DNA, 257 bp, Glycine max
  Clone ID: 700964054H1
cgcctccattatcagtcctttttcaggcgtggtttttacctaaccctacaattcgccgatccttccagttagggtttttcgctctcagcgaaaacggtgtatatagaaaccctatctattcctccgatgcaccaggggaattgaatatatataataagaaaaaggcaaaaaaaagaggtgaaaaaaatttgtctggtaaattgttaattctgttgttttgcgtgtttctggactcaggtaatttctagagcttatct

SEQ ID NO: 14606 - DNA, 260 bp, Glycine max
  Clone ID: 700964055H1
tttcgcttattttattatcgttttcctttctcccgagtgttctcctttcttgcttccttctccggccatctttatcctgatggcgtcgtctctgggaattgcttgcggtggaaacaacgccaaattagggatcccaaagcagcggtgtggttcggttcttcagccgccgtgctccctcgctatggggcgctcgacggcgagggtgcggaggatcacggcggcgatggccacggccacggcggtgatgaccacggccacgg

SEQ ID NO: 14607 - DNA, 260 bp, Glycine max
  Clone ID: 700964057H1
cacgttatcgtctcttcctcaaactctgaacctaccgtgcagcgcagagctatgctggcatacccaccgtgacgaaattaacctctctacgtaacagcacacagcgatttccccaaatcatcgaaaccctaactcgcgattcccaatcgaaaccctaactcgggatggcgattttgctgggcgaaattcttcaatcgctggagctgtggctgaagctgatcaagaacccgcagccgcagccctacgtaaaccctaatctg

SEQ ID NO: 14608 - DNA, 263 bp, Glycine max
  Clone ID: 700964060H1
cacaaattttatgtgattagtcgcggtatttaaaataaaaaatgaaagtagacaaataaaaaaggaaaggagatgtttgaataaaaataattccccttcaagttcttattttttgagaggacaggacaatatgaatgttttattatgctctatcaacacattaaaaagattatatgatatatctgctgtggaagtaggtcaacatttctattggcaaatagggagtttccaagtacatgcccaagtacttattacttcttggg

SEQ ID NO: 14609 - DNA, 263 bp, Glycine max
  Clone ID: 700964061H1
gtttcgctgtttgaaattttcagattccatggccaaaagctccttcaagcttgaacatcccttggaaagaagacaggctgagtctgctcgcattagagacaagtatcctgatagaatacctgtgattgttgagaaagcggaaagaagtgacatcccagacatcgataagaagaagtaccttgtcccagcggatttgactgttggtcagtttgtttatgttgtccgtaaaaggattaaggtcagtgcggagaaggctatttttg

SEQ ID NO: 14610 - DNA, 265 bp, Glycine max
  Clone ID: 700964063H1
atttggtgacaagctctggcttgaaaccaggaagttatggctcattgtggggccctctatattcagccgcctcgcgtcgttcaccatgaatgttgtcacccaagccttcgccggtcacttgggtgatgtcgaactcgctgccatttctatcgccaacaacgttcttgttggcttcaatttcggcctccttttggggatggcgagcgcgttggagacactgtgcgggcaagcgtttggggcgaagagataccacttgttggggata

SEQ ID NO: 14611 - DNA, 269 bp, Glycine max
  Clone ID: 700964064H1
atcctctttaccttccactttttcctcctctcaaattcacatccccccccgaccctttaagtaaacaccaaaaacacacatacacactcacgcatattgacaccctttgcacattcttcttcttcttcatctctttctctctctgaagcaagtgtgcagagcaattaataaatctagttttgggtcaccccgtgaccgtgatgatcataaggttattgtcttttgagtgatgggtttgtgttcttcggtccccagaaacgctagcgcag

SEQ ID NO: 14612 - DNA, 278 bp, Glycine max
  Clone ID: 700964065H1
tcgaagagatagccagcagcaagcagaaggatccccccggaccagcaacgtctcatcttcgccggaaagcagctcgaggacggccgcaccctcgccgactacaacatccagaaggaatcaacccttcacctcgtcctccgtctccgtggtggcatgcagatcttcgttaagaccctcaccggcaagactattaccctagaagtcgaaagctccgacaccatcgacaacgtcaaggctaagattcaggacaaggagggaatccccccagaccagcagag

SEQ ID NO: 14613 - DNA, 261 bp, Glycine max
  Clone ID: 700964066H1
caaccatcatggccacctctgctattcagcaatcagcattcactggtcaaactgctctgaagcagctcaatgagttcgtccgcaagaccggtggcgccggcaaaggtcgcactaacatgcgccgcaccgtcaagagtgctcctcagagcatttggtatggccctgaccgtcccaagtacttgggtccattctcggagcagattccatcatacctgaccggagaattccctggtgactacggatgggacactgctggattat

SEQ ID NO: 14614 - DNA, 256 bp, Glycine max
  Clone ID: 700964068H1
tctgcctttccttttccagggagctcattgacaatggctgaaacaaagtgggtcatgaaggacaaaagatggtctctccatggaatgacagctctagtcacaggaggcacccgaggcatagggcatgccattgttgaagagttagctgagtttggagcaactgttcatatatgtgcacgtaatcaagatgatattgataaatgtttagaagagtggaaaaacaagggacttaatgtgactggttcagtatgtgatt

SEQ ID NO: 14615 - DNA, 257 bp, Glycine max
  Clone ID: 700964070H1
ctccttttgtattacacactgactgtccacattactggcggtatcatcttccaggtgagacagaggaagaattttcaaccagattagccaataatttggagcagttgattctgaaagagggaccagagactattgctgcatttattgctgaacctgtaatgggggcaggaggtgtaatacctccaccatcaacttattttgagaaggtccaagccgttgtcaagaagtatgacattctttttattgcagatgaggta

SEQ ID NO: 14616 - DNA, 257 bp, Glycine max
  Clone ID: 700964074H1
acttgaactatcgggtcttcttcttggctctctctgtttagggtacgcaacctctgtctccttttcctccatactctctttttcttaattgtttttctttcaacttcatatcataattgtgttcatatgctaacttttcatactttttcgtcacttttctatagtttatttggtcaaattaatgggaatatccttatatgctcttgttttgaattttgttgtgcaaactgtgtctgagttttttatttcttggagga

SEQ ID NO: 14617 - DNA, 258 bp, Glycine max
  Clone ID: 700964075H1
ctcgagccgcttgcatcatgagttggatcagtctccgacaatatccgacgtttcagatcggtatcggcattctcccctttcatcgttgcatttgtcaccgacgctcctttcttcgccggagagagagttgaactctcagcctcagccaccaccttctcggaaacactgggagattcctgacttgttgacaccaattggcgaacaccaaatttttcagttccacagaggaaacaatgggaaattccggttctttcagta

SEQ ID NO: 14618 - DNA, 260 bp, Glycine max
  Clone ID: 700964077H1
ggaattatagggtccaccaagattgagttgaacaactctattatttttttaactattggatatgctattaagatccattttgcacatcaactagagagtttttttattattttcttatataaatttaaattgtgctacaagtgaagagttggaaacaaaagatggcaggtttgggaatatggatgggtttcgttagcctgtgtcttctgtctgtatcagtatcaggtctgctccaacgcctagagcaccctgtcaaagct

SEQ ID NO: 14619 - DNA, 264 bp, Glycine max
  Clone ID: 700964039H1
ctcaatttttctctcaaccggcccaatttagcataagcccagcatggccaccgcaacagcagcagccacctcgtccttcatggggacgcgcctcctggaggcccactccggggcggggcgggtgcaggcccggttcgggtttggcaagaagaaagccgccgccccgaagaaagtttccagggggtcgggctctagctccgataggcccctgtggtatccgggcgccaaggcgcccgagtacctggatgggagcctagtcggaga

SEQ ID NO: 14620 - DNA, 90 bp, Glycine max
  Clone ID: 700964010H1
cacagcctctcttggttgatgacaccaagagacagcacaaagacccttcgtttcaatcccacaacacactcattcttcattcttccacac

SEQ ID NO: 14621 - DNA, 267 bp, Glycine max
  Clone ID: 700964011H1
acgacacactatcctgttcttttctattgcccttttccttcactttactccttgcatccaattctctcgcgaaattaataaaggaactttaactttcgcgagcgacacaaacgcaatcaaatcaaatcatagattgatttggcaaccccaattcccttttgattattttttttttttatgaattaaagcaatgggtttggttgcttagtgtttttttggacgcacgaaagatgattccttggggtggcctcagttgctgtttgagtg

SEQ ID NO: 14622 - DNA, 270 bp, Glycine max
  Clone ID: 700964014H1
agatggtggaaagataatgtggatctgattcaaaccacacgattccacgaccttattttggagccgcggtggcggtagcggtggccggcgattgtagcggcgtaggagcaagaaatggttttatgttgtgaggaagattgttaagctgtgggaatatgtcattgagaagcatagtccgtgaactcaaggagatgagagatggaataggaagcacatcaaagcggggtgcagaaagcaagcatcggctcagtcggacaaagtcacatgtag

SEQ ID NO: 14623 - DNA, 245 bp, Glycine max
  Clone ID: 700964015H1
cttttgaagtacagagaagaagaattgaagaatgtaagaggggatggaactggagagcgcaaggaatgggataggatctatgattatgatgtctacaatgacttgggcaacccggatagcggtgataaatatgcacgccccgttcttggtggttcagccttaccttaccctcgcagaggaagaaccggaagaggaaaaactagaaaagatcccaacagtgagaagccgagcgattttgtttacct

SEQ ID NO: 14624 - DNA, 273 bp, Glycine max
  Clone ID: 700964016H1
gctgaatcaagatggatgctactacaccaaagtactccaaggccaggtatgatgaaattgtgaaggaagtttcttcctatttgaagaaagtaggatacaaccctgacaagattccttttgttcctatatctggttttgagggagacaacatgattgagaggtccacaaaccttgactggtacaagggtcctactctgctagatgcacttgaccagatctctgagcccaagaggccttctgacaagcccctcaggctaccccttcaggatgtgt

SEQ ID NO: 14625 - DNA, 292 bp, Glycine max
  Clone ID: 700964017H1
gcgtacgtacactgctcgttcggatagatggaagcagaggcagaaggtgaagaaggtgcgaagtagagcatttacaaggcggcgagaagcataaagcgaagagagaacagtttgtacaacgcactgagatccatctaccaagactccatcttcgtctccgagatctctcttctatggcctcagctccctctcctcgccaacctccgctgcggcctctggtactcccgccccgccgccttccactccacctgctacttcaagtccaccgacggccacaccaacaactgctcct

SEQ ID NO: 14626 - DNA, 266 bp, Glycine max
  Clone ID: 700964018H1
cgtgtgaatcttttggtgctgctcaagagcactgcaaagtttgatataatggagtttttcttcaccgtgttaattattctgagtgtgattacacccggattgagcagcacaacaactagtttcaatgtgttgcagtatggagcagttggaaatggacaaaccaatgattccccagcctttctaaaggcgtggaaagccgcatgccagagcaactcacatatatctcgcctcatcataccagcaaaacggacattcttgctgaagcc

SEQ ID NO: 14627 - DNA, 266 bp, Glycine max
  Clone ID: 700964019H1
gtctgatacacactctctctccgtcgaaatggccgcttcttcttcctcttccgacgagcctcctcgctctgtcttcctcggcgtcgacgtcggcaccggcagcgctcctgcaggtctatttgacgaggaaggaaagctccttggttcatctagcagcccaatacagatatggaaagatggtgcctgtgttgagcaatcctctacagatatatggcttgcagtttgtgcagctgtaaaagcagcttgttctaaagctaaagttgcat

SEQ ID NO: 14628 - DNA, 264 bp, Glycine max
  Clone ID: 700964020H1
cactttcctaatttttcacagtattcgatgctgtagagcacaatatagtttatctacacactcttactccgatttttgtcctacccttttcgctattttatctcttttctccgaagaagaggaagaaggggtttctttgaatgatccccagaatcgcgtttgtgctttgattcaacgagcaatgggtgttttgtagattctagtttttgatcttatttttgctgatcaaatttttatttgttgttgatttttgaggtattgggg

SEQ ID NO: 14629 - DNA, 264 bp, Glycine max
  Clone ID: 700964021H1
gataataacaagtattctttttccttgaaggcatacatggtggagttgtatcaggatacccttatagatctgttgttaccaaagaatggaaagcctttaaaattggatatcaagaaggattcaacgggaatggtagttgtggaaaatgtgacagttatgtctatttctacaattgaagaattgaatagtataatacaaagaggatctgaacggcgacatatatcaggaacccaaatgaatgatgaaagttcaagatctcatctc

SEQ ID NO: 14630 - DNA, 266 bp, Glycine max
  Clone ID: 700964022H1
ctctctcagaatccaaaccctaggaaatttccccttcagacgataccctagatttcctctcacaaatctctctcagcttccccattctcgggattcggcgtccagatcacagatcccgttcaattttttttccgcatcccccgatcgggtttggattctgaagaaagttcaattccgcacaaattcgagacaattgctgctgtcgaggctcgcgttgcgcatgggtaagattctgagagaaaccgcgaggccgttctcgaattgtt

SEQ ID NO: 14631 - DNA, 265 bp, Glycine max
  Clone ID: 700964024H1
gggagttcaagaatttggagacaaaaggggttcctttcccaaagaaccaacccatgagaatatactctagcctttggaacgctgaggattgggccacaaggggtgggcttgtgaaaacggattggagcaaggccccattcacagcctcatacagaaacttcaatgccctaacctcttcctccactggccaatcactggacgccacggggctggccaagatccattgggtgcaaagaattacatgatttacaactattgcactgat

SEQ ID NO: 14632 - DNA, 265 bp, Glycine max
  Clone ID: 700964025H1
atacaacgttgcttttgttttgttttgttttgtctctctctaatcattccaatggccaaagaaggacccaactgggacgggttgctcaaatggagcattgctcattccgatgggactcgccccactcgcaatttaagtgaggaggatcggagatggtttatggaagcgatgcagtcacagaccattgatgttgtaaaacgtatgaaagagatcacacttgtgatgcaaactccagaacaagtcttgaaagaccaaggagttaccc

SEQ ID NO: 14633 - DNA, 266 bp, Glycine max
  Clone ID: 700964026H1
aaaaacaccaaattacatagaatttttaggcgtaaccaaagtacgtaccaaaccatggcattgacaagtcaattgagaaaccttcttgcagctctagaggctgaggaagcagcccaaaaatccaaaggtaaagtgaacacatacaccaaccatggcgatgggtttcagaacatcactggcactaagaccaacagtggtgcatattctggtgatggtaacactcatcacgccaccaacaactacggtggtggtcctgctataaataa

SEQ ID NO: 14634 - DNA, 264 bp, Glycine max
  Clone ID: 700964027H1
caaagtgtgtgtgtgcaagagtcattggatgatgatcagtctaacattgctgctgcatggtgctaatgttttgcaaatgaaagcattagatcttttagatgggaaaaatgtctgtgaagctctggtggcagaatcaccttccaatcaagccactaatagaagccatggggttgatttccagtgtgctgatgaggttgtcaaaacagctgacatagttaaacaaactgacttagattttgaaactatggaagtgtctgcaaatgc

SEQ ID NO: 14635 - DNA, 265 bp, Glycine max
  Clone ID: 700964028H1
aaaagaaaactcaagctcccagattctgttccaatgcctcccgtaccaatttcccccatcaaagttgggcacattgatgatgtccaagagctaagaaaaaccaagccaaggacaattcctcaaagatttgtacgagacttgacagaaagaccaacactcactacacctcttcccccaccacatagtgacatgccagtcattgatttctctaagcttagcaaagggaacaaagaggaagtcctcactgaacttttcaatcttgcaa

SEQ ID NO: 14636 - DNA, 270 bp, Glycine max
  Clone ID: 700964030H1
aaaaataaaaaatggggataggggtactatttgttgggtttttcttgctatcttgtgttgtgtgtgtgaagggtgtggagccaaaagcctcacccacttgtacatttccggcagtttacaactttggggactcaaactcagacactggaggcatatcagcttcatttgtgccaattcctgcaccttatggcgagggcttctttcacaagccttctggaagggactgtgatggccgtctcattgtagatttcatagctgagaagctaaact

SEQ ID NO: 14637 - DNA, 270 bp, Glycine max
  Clone ID: 700964031H1
cctctttgctagttttgattagatctacaacaagaaattaaagaaatggctttcagggcagcgagaaatgtaggattgaggttgggaggaggaaggcgatcaattgctactgccagcgctaaaaagcatgatgattgggcgactctgaaggcagagttagcaccggtgtacatggtgtgcggaatggtggcaatggctgtggcaattggatcacacactgcgtttcaacaactggcgcgttctccaactgttcatataaacaagaagaga

SEQ ID NO: 14638 - DNA, 272 bp, Glycine max
  Clone ID: 700964033H1
gctcggcccggtccatctcggtcgaagcgcttcgaccgagcgacaccttcccccggcggcacaactctgccaccccggaggagcagagcaagatggcagagtcgtgtggcttcgagtagcctcgactccctcgtggacgccaccgtgcctaagtcgatacgccttaaggatatgaagttcgggaaattcgatgcagggcttacagagaaccagatgatagagcacatgaaggacttggcctcaaagaacaaggttttcaagtcctacattgg

SEQ ID NO: 14639 - DNA, 99 bp, Glycine max
  Clone ID: 700964034H1
atattgtatacttaggatggcattctcatggcccaaacccttcagcaagtgatcttgagtttgcaacaaatccccattacaaattattagggtcacact

SEQ ID NO: 14640 - DNA, 265 bp, Glycine max
  Clone ID: 700964035H1
gagtaacaagcctttaacttccattaaacagaacagacaactctcttactcttacctgttaccactttttttttttttttttccgggttctctaaacttaacaccactttttgcatcatcatcatgctttcacttcccatttcctaatccctctttcctttgttgccacaaatttccattaatttcccttcacgctgaaaccagctacagaaacacctgtttcaaaggaaaaaactcccgggttaaaggaaaccacaacaacact

SEQ ID NO: 14641 - DNA, 263 bp, Glycine max
  Clone ID: 700964036H1
gatcactggggcaaatcctacaattcctggaatgtttccaaatatgtttccgttggctacaagtcagatgcagcaatttagtgctctccctgtcatgccagtgcaggctatgactcaacaggctacacgacatgctaggcgggtgtatgttggaggcctccctcctacagctaatgagcagtctgttgcaactttcttcagtcaagttatggctaagattgggggaaacactgctggcccaggtgatgctgtggtcaatgttt

SEQ ID NO: 14642 - DNA, 262 bp, Glycine max
  Clone ID: 700964037H1
atttttgctacttggaatggagttcttgaggacatgagtgatgtaaaggaattggttcctgagctattttacctacctgaggtcctcacaacttacgatttttttgattttggcacaacacaaatgggaggaaagcttgatactgtaaagcttcctgcttgggctgaaaatccaattgattttattcacaagaccggaaggctctagagagcgagtatgtatctgctcatttgcatgagtggattgcctcataatttgggta

SEQ ID NO: 14643 - DNA, 264 bp, Glycine max
  Clone ID: 700964038H1
cccaattcttccccctccacccacccagcatatccctctattcctatttattagcacccctcacattaccttgtgtcaccaactactttgactcctttaccataccattacaataattatcaaacctaaccagtaaaaatggtgaccgtggaggaaatccgcaacgctcagcgttcccatggacccgccaccatcttggccttcggcaccgccacgccgtccaactgcgtctcccaagccgattaccctgactactacttccgc

SEQ ID NO: 14644 - DNA, 268 bp, Glycine max
  Clone ID: 700964008H1
cataaattcaatgctctcatcgttttccctcataaaccgctttctcgtgttgtaacacactcatcactcatcatattcattcacacttcccactttccaatatggaatgctgcataatcgccaggctcaagacccaacctttatggttcgcgctgctcttcgttgtcggattgttaacgattctcaaattggctttcgttgttttcagatgggtctacgtcaatttcctccgaccaccgaagaatctcaaaaagtacggatcttgggc

SEQ ID NO: 14645 - DNA, 247 bp, Glycine max
  Clone ID: 700963973H1
tgacacaccaaatcaaagacacctgagccattcaattcccctcctttattgctttcaagtttcaacactaattttattatctgaaaaaatggctttcaaagtttcgtttttccttgcacttgttctagtttccaatatcctcctccttgatacaacagctgctggacgcagcattggcgaaaactccaactcagaggaaaagaaagagcctgagttcttgttcaagcatgaaggtggggtgtatatt

SEQ ID NO: 14646 - DNA, 247 bp, Glycine max
  Clone ID: 700963974H1
attcaaatccaaatggccctttacattacactaataattggcctcctagtaaacaccctagtactctataaatagcatttgcatgcaccttagtcttcaccaaaatactcctcttggcatcttgtgttgtgtccctcttttaagctatttccttctcttaacacaattggttgtgccaattgccatagtcaccaaccaattaacaaaggtatatatatcatcatatcatcaccaaatgaaaaatatt

SEQ ID NO: 14647 - DNA, 249 bp, Glycine max
  Clone ID: 700963975H1
gtaagacgaaaagcaacaacgaagaccattgcccctgccatcaaaattttgattctctgattccactttgtgggatcagagggtcaccattgtcgttttctttctcaccctttcagagagggagaggaaaatggaagggtggctctatctcattcgggccaatcggtttggtcagcattattcacgtaagaggtacttcatcctcaaaggcaatgtcctccgaagcttcaagatcaaacccacttctca

SEQ ID NO: 14648 - DNA, 252 bp, Glycine max
  Clone ID: 700963976H1
cagaaagcaagctcatcctagagttttaaaactggcagcagcctcctccatggctctctcttccccatccttggctggcaaggccgtgaagctgggcccatcagcccccgaagtcgggagggtcagcatgaggaagaccgtcaccaagcaggcctcctccggaagcccatggtacggcccagaccgcgtcaagtacttgggcccattctctggcgagcccccgtcctacctcactggcgagttcccaggtga

SEQ ID NO: 14649 - DNA, 254 bp, Glycine max
  Clone ID: 700963977H1
gtgcttcacaatttttcaattttcgtattggtgcttggaacagatcttcctttggaatagtttggttgacttgaataaaccaagctaaagccaaatatcgaacctcataatttcctctctgatttctattcctggatttgttgttttgttttctggcttcatcacttgctaatttggttcctttctttcgttttctacatcgactgttttccaatctttccctttgtttttggcctttctaatggttcggagca

SEQ ID NO: 14650 - DNA, 257 bp, Glycine max
  Clone ID: 700963978H1
tctcgagccgaatcggctcgaggctctctactgctacaggaaacgatccaggatgttccgcagccaccaaggcatgcatataaggcatccagtacggcgacagttccttctcagttggctacttcagccgcgagcgcctcaccgtgaccgccaccgacgtcgtcgacaacttcctcttcggctgcggccagaacaaccagggcctcttcggcggctccgcggcctcattggcctcggccgccaccccatctccttcg

SEQ ID NO: 14651 - DNA, 259 bp, Glycine max
  Clone ID: 700963979H1
cgcaagcaaaaagaaagaatcccaggcgaggagaaagatggaggggaaggagcaggatgtgtcgttgggagcgaacaagttccccgagagacagccgattgggacggcggcgcagagccaagacgacggcaaggactaccaggagccggcgccggcgccgctggttgacccgacggagtttacgtcatggtcgttttacagagcagggatagcagagtttgtggccacttttctgtttctctacatcaccgtcttaacc

SEQ ID NO: 14652 - DNA, 248 bp, Glycine max
  Clone ID: 700963981H1
agaatccacacaaactcagggtagggcagagagagagagagagagagagagagagagagagaatgggagggtgggctatcgcggtgcatggtggcgctggtgtcgaccctaatctcccactcgagcgccaagaagaagcgaaacaacttctcacgcgctgtctcaatcttggaatctctgctctaaattctaatcttcccgacatagatgtcgtcgaacttgtggtgagggaattggacacggatccg

SEQ ID NO: 14653 - DNA, 245 bp, Glycine max
  Clone ID: 700963982H1
gtttatcattcttcaagataagctgagagagggagaagagccagataaatattattttcaaatgtataactatgtagatgattatgataaaggggatagtggtgtctctgttgaagagctcataaagaaagcaaatgaaaagtactggcaaccaggagaagaccgatttgtaaataatcgttttgaagggccagtaaagttatatgagcagatatttggtcctaatggacctcaaaccatagagg

SEQ ID NO: 14654 - DNA, 242 bp, Glycine max
  Clone ID: 700963983H1
ctttccaacaattagcaaaacatttgttaaacgatggaagtaatgtgtggtgccaaagttggcaatatggtccataaggccaagccttatgtgttaactgtggggttgcaatttgggatggctgggacatacctcttcaccatggccagtttgaaccatggaatgagccgtttggtgttcattgtgtatcgcaatgccattgctgcattggcccttgcgccctttgccttgatctttgaaag

SEQ ID NO: 14655 - DNA, 242 bp, Glycine max
  Clone ID: 700963984H1
gaaacgtggaaggtcacgaaaaacaaaggtaactcccatccaaattcactgcattgtctttgacatctttgaattacataaaactcactacattgtctttgacatctttgaattccatcaaactcgctgcattgtcttttgttgaatttcttcttcctcacagcctaccaaccacataattaaccagaaatccaataccccatcaacaccccgaagatctaaaagaataaagcatgtggcag

SEQ ID NO: 14656 - DNA, 240 bp, Glycine max
  Clone ID: 700963985H1
caaaatcagaactaccaaagcttccatctgatttgcagagcgttttttttttttttttttccttcccaagggaccaacaggggcaaccaaggacactgtagaaagaggaaaggggtcctgtcctttcggcccttgattttcctgggggggattaaaggttgtggcgtcccgggatcgttcttccctgtggcggaaacatgttggacggccgtccctgcgttgtcccgaggatgtttcccg

SEQ ID NO: 14657 - DNA, 243 bp, Glycine max
  Clone ID: 700963988H1
agaagacgttactctctctctctctctctctctctctctctcatgaacgacgcacttcccatgtttcctcggttctatagatgaggattgaagctctgaatctcgctttcgccgaatctcgtcttctgtgttcagatttcgctattctccgtttggattgatgaaaaaaaaagccttttctcttcccgatatttttttctcgtcggatttggaattcgatcttcacctcatccactcgtaatc

SEQ ID NO: 14658 - DNA, 244 bp, Glycine max
  Clone ID: 700963989H1
ggatatagttcaccatgatgatgttgcccccagaagacctggttgtgagaacaactttgttttggtaaaagtccccacttggattgatggtgtggaaaacagtgagtacgttggtgttggtgcaagatttggccctacattggaatcaaaagaaaaacgggccaatctttctagagttgtcatggctgatccgcctgattgctgtacaaagcctaagaataagctcaccaacgagatcattttg

SEQ ID NO: 14659 - DNA, 245 bp, Glycine max
  Clone ID: 700963990H1
ctcgagccgattcggctcgaggtgcaccttaactatagcttcgcaatgacaaccttgatcgactgtgtaggataggtgggaactgatgacacagaacgaccaatcctgaaagaccactctttcgtctaaggatgcctaaccgccgcaccgaaaattcgggggggggcgggacactgcgaggtgggtagtttatctggggcggatgcctcctaaagagtaacggaggtgtgcgaaggtaggctcaa

SEQ ID NO: 14660 - DNA, 247 bp, Glycine max
  Clone ID: 700963991H1
tctcgctaatggtgttgcccagcatgctgagcagagaagggcagaaattgaaaaggagaaaatagagaagtcaacggctgccacagcttcttaagcttctgaatgtacattattactgttgcttttttaattctcaagttctcagttacccattctttaggaaaatcagagggttgcctatatttgaggcatttgtcggctttctggtcaccagttgttggtctttgatcatgaagagtttgcagta

SEQ ID NO: 14661 - DNA, 252 bp, Glycine max
  Clone ID: 700963992H1
cacaagccaagtgaaagtgagataaaataaaaatcaaagagcataatgtcagggatcattcacaagattggggagacccttcatgtgggagggcacaagaaggaggaggagcataagggtgagcaccatgctggagaatacaaaggggagcaccatggtgaacacagtagtgagtacaaaggagagcatcatggtgaacacaaagctggagagtaccatggtgagcacaagccagagcacaaagaggggttc

SEQ ID NO: 14662 - DNA, 254 bp, Glycine max
  unsure (1)..(254): unsure at all n locations
  Clone ID: 700963994H1
attctgctgggcctgggcttgctcttcgtccgctggtggtggcggcgctggtccaccaccggcggcggcccgaagaacctccctccaggccctcccgggtggcccatcgttggtaacctcttccaagtgatnctgcagcgccgtcacttcatctacgtgatccgcgatttacgtaaaaaatacggcccaatcttcagcatgcagatgggccagcgcacgctgatcatcgtgagcagcgcgcactaatccacgag

SEQ ID NO: 14663 - DNA, 258 bp, Glycine max
  Clone ID: 700963996H1
acaaagtatagagtgaaagaatgggtgagaaaagcaagattttgatcataggaggcaccggctacatcggcaaacatatagtggaagcaagcgcaaaggctggaaatcccacttttgctttggtgagggaatccacactctctgacccctccaaggcacaactcatccacaattttgaggctttgggcgttaaatttggccggggggtttctgtacgatcatgagaagttggtgaaagctatcaagcaagtagatgtc

SEQ ID NO: 14664 - DNA, 275 bp, Glycine max
  Clone ID: 700964001H1
gatgactggggggggtatcactatgcaatcgacgccgggaagctcaggatacttggatttgtatccagagcggaagatgtcctttttcaaaaatccttacattctcggactggctgctgtcgccggcatcggtggtctcctcttcggctacgacactggtgtgatatcaggggctcttttatacattaaggatgattttgaggaggttagaaacagcaatcttctccaggaaacaatagtcagcatggctattgccggggcaatcgtgggagcag

SEQ ID NO: 14665 - DNA, 257 bp, Glycine max
  Clone ID: 700964002H1
caaaccacaccaacatcacagccacaacaactaccagtgcaacgtcatcgtcatccgcgacggtatcagtgactcaagcattggggagccgggacctgcaggacgttgacacggcagcgctgtcgcgtcccttggatgagtacctcagagctggctccttggccccggcgagcagaagaagaagaagtacgtcgatctcggctgcatcatcgtcagccgcaagatcttcaagtggaccctcggcacaatcctcttcg

SEQ ID NO: 14666 - DNA, 288 bp, Glycine max
  Clone ID: 700964003H1
gcgtacggaagcacgattccacgagccctaaggcggtgcagtacgtgagaaacgaccgtggcactcccatgattctagacaacaactactacagaaacatattagacagcaagggtctcttgatagtggatcaccaactagccaatgacaagaggaccaagccttatgtgaagaaaatggccaagagccaagactatttcttcaaggagttctctagagccattaccttgctctcagagaacaaccctctcactggcacaaagggtgaggtcagaaagcagtgcaatg

SEQ ID NO: 14667 - DNA, 267 bp, Glycine max
  Clone ID: 700964005H1
gagaagggtcacggtgacttgaaagacaagccatggtggcctaagttgaacactcttcaagatctgattcacatttgctgcattattatatggactgcttcagcactccatgcagctgtgaatttcggacaatacccttatggcggtttcatcctaaatcgtccaactctaaccagaagattgctcccagagccaggaaccaaagaatatggtgaacttaccagtaatcatcaaaaggcttatttgagaacaattacaggaaagact

SEQ ID NO: 14668 - DNA, 266 bp, Glycine max
  Clone ID: 700964006H1
aatctctctctctccaatggccaaagacctcgaaacggagattcaaagtgggttgcctcacaaggactaccacgacccaccccccgccccattctacgaccccgccgagctccgaaagtggtccttcttccgagccctcatcgccgagttcgtcgccaccctcctcttcctctacgtcaccatcctcaccgtcatcggctacaaccaccagacagccaccgccgccgagccctgcagcggcgtcggcgtcctcggcatcgcttggg

SEQ ID NO: 14669 - DNA, 244 bp, Glycine max
  Clone ID: 700963972H1
ggacaacaccattgctatggggagcagaatgagtaagaccgatgacaatcttctttcaatggctcacaccttcaataaaggggatgagggctataagctgctgggccacaattatggcaagggagatgaaagtatcatatcaatgggtcatccctttgacaagggacatggatatttcatatcaatgggtcaatcatatgataagggagatgtccattttatatctctgagcacctcagatacc

SEQ ID NO: 14670 - DNA, 251 bp, Glycine max
  Clone ID: 700963942H1
cacaaagagatgatagctattgggaccatgaacgtagttggttctttcacctcttgctacctcacaactggaccattttcgcgttcagctgtgaactataacgctggatgcaagacagcagcatccaacatcataatgtcaattgcagtaatgttgacattgttattcctaacaccattgttccattacactcccctggtggtgctatcagccattattgtatctgcaatgcttggcctcatagattatga

SEQ ID NO: 14671 - DNA, 251 bp, Glycine max
  Clone ID: 700963944H1
tgctactagcatcttcttccatcaccactttcatataaattaatgttctctagtggtgcttcccaatcaatatcctttagttttgtctcaattcctttctttctcattcaccaatccatacttcattttgttaatttcttaatccaacaccaccaagatgccaactgacacatcatcagtttccggcggcgaaatcgtgtgtgtgaccggtgccggcggtttcatagcctcttggcttgtcaaacatctct

SEQ ID NO: 14672 - DNA, 255 bp, Glycine max
  Clone ID: 700963945H1
ctgatgcacttaggtatttggtgttcggctgctgttttctcctagttgcttctgctgttttatggaaagatgtcttatcagttaactggcgaggtttgctctagttctctctgtctcattttcgtatactctttaatattgatgcatctgttaaagctaggcagacatctaagtcctctattatctaatgaatttatttgacatgataatgtctgcttgtgtttaaggaccagctggtcagcagactggattcag

SEQ ID NO: 14673 - DNA, 264 bp, Glycine max
  Clone ID: 700963947H1
ctcaaagccaaaccaaattttctctctttcacttatttattgactccccaaaagcttttcaaatatctctgttcctctctcacgtaccttctccctatctttcactccacttcttaacaccacaaaacagaacaaccgccgagcaaacaacaagaaaaatggtgttgttgtccaaagcaacaacagaacaatactcctacattaagaactgcatgccaaccaaattttcctcaacaattcccatagtgaacctctccaaacctg

SEQ ID NO: 14674 - DNA, 261 bp, Glycine max
  Clone ID: 700963948H1
tgtgagaacaagataaagaggcgcaagatgagtggtagggtttctgggaaggtgaagtggttcaatgatcagaaggggtttggattcataagccctgacgatggcagcgacgatctcttcgttcaccaatctcagatcaaatctgacggtttccgaagcctcgccgaaggagagtccgttgagttcgccattgaatctgaatctgacggacgcgcgaaggctgttgatgtcactggccccgacggcgccacgtccagggaa

SEQ ID NO: 14675 - DNA, 255 bp, Glycine max
  Clone ID: 700963949H1
ttttaatctttcaatctctcagactttgttattatattcttgagagtgagcataattaatggctaccaagcattcactaatgtctctctttcacagaacttcatcaatgaggtgagcacaacccgttaaacatgtccgatgagcagatattggaccaaatttactcaacccatgtccacagtcacacaaagtttgatgtagactctcttttcattcttgttgagaacacccttaggcgttcaactctcattgttg

SEQ ID NO: 14676 - DNA, 250 bp, Glycine max
  Clone ID: 700963950H1
tacgcttctcttctctgcagcaactatgcctaaccctaaggtcttcttcgacatgaccatcggcggtcaatctgctggccgcatcgtgatggagctctacgccgacgtcactccccgcaccgccgagaacttccgcgcgctttgcaccggcgagaagggcgtagggcggagcggcaagcccctccactacaagggctcgtccttccaccgcgtgatcccgagtttcatgtgtcagggtggcgacttcacc

SEQ ID NO: 14677 - DNA, 245 bp, Glycine max
  Clone ID: 700963952H1
acaaaacccgaccctgatacaatgcagccactggatgaaggttttggcgcaattgttcagtcttgcaggcgactcaggcgcctatccctctcggggcaattgaccgaccaggttttcctttacataggaatgtacgctgagaagcttgaaatgctgtccattgcatttgctggggcgagcgacaagggaatgctctatgtgttgaatggatgcaagaagcttaggaagcttgagattagagactg

SEQ ID NO: 14678 - DNA, 245 bp, Glycine max
  Clone ID: 700963953H1
cctttatctgttggatagagcttcttgccttgtgttctacgttctgcattcttctcagcccgtaatctagctcctgtttgcagaaacaaggacctgtcatcaagatggtgaagttcacaactcacaggcttcggcacataatggactgcaaacacaatattcgtaacatgtctgttattgcacacgtcaatcatggccagtctaccctcactgattctcttgtggctgcttctggtaatatcata

SEQ ID NO: 14679 - DNA, 244 bp, Glycine max
  Clone ID: 700963954H1
acaaaacccgaccctgatacaatgcagccactggatgaaggttttggcgcaattgttcagtcttgcaggcgactcaggcgggtatccctctcgggggacgtgaccgaccaagagtggctctacatagggacgaaggctgactcgctgccgataacgacccttgcatcagcagcggttacatgacatacatgtttctatacgacagtgttcatggacactggaagcatcacgatgtcaccgttaa

SEQ ID NO: 14680 - DNA, 246 bp, Glycine max
  Clone ID: 700963955H1
gaagtgacatttctagagcaacaactgattatggcttccgaccaagcagcaacaacagtccctttggattgttgggaggacaacgagaaaaaacgtgtagtcttggcggaagcaagtggagacttcatagatgttctctttagtttcctcactcttccattgggaactatcgtccggcttgggatcaattttcaactatcagtagagatgggtagcatcaagaaactgtacgagagtgtgcaaaat

SEQ ID NO: 14681 - DNA, 246 bp, Glycine max
  Clone ID: 700963956H1
tggtcctggaatctggaaaatcatggttggacttggtgtgagtgtaagtctcaaggttggacatgtgtgtagttgcagcaatggttttggcacggtgactatggaagctcaaaaacaaaaactctctccctccaaaacccgcaggaaatcctcctacggaacttctagaaggtccgttctgaagaaatccttcagccaagagcaagtcaccttcacctctcctctctccgccgaccccctcgtcgc

SEQ ID NO: 14682 - DNA, 248 bp, Glycine max
  Clone ID: 700963959H1
cagaaatttaagtgaggagctagagaatgatgatgaagtctgctatgtgtgcagtggtggttgtagcacttcttcttctggcggaggtggggcccatggctgaggctgtgacatgcaccccaacagagttgagtccgtgtcttccagcaatcacttccggtgctaaaccttccaatgcttgttgcacgaagctgaagcagcaaaaaccatgcttatgtggctacctcaaaaacgctagcttgaagcag

SEQ ID NO: 14683 - DNA, 252 bp, Glycine max
  Clone ID: 700963960H1
gcattaaactacatagaaaaataaaaccaaacctttcttcctactactcccattcccacatttcgacaacatggacgaggccttcgacatgccgacggcggaggcaatgggcgaggacttcgacttcgccggcgccaccggcggcgacctcgacggcagcagcagcaaccccatcttgaacgtcggcgaggagcagggtgttcacaaagctggtgtgtagcatggtgtacacaaaccaggtgacggatgggg

SEQ ID NO: 14684 - DNA, 256 bp, Glycine max
  Clone ID: 700963961H1
ccttggtggagaaagtaaagttggagattcaggatttcttcaagcttccaatgtcagagaagaaaaagttttggcagagtccacaacatatggagggttttggacaagcatttgttgtgagtgaagaccaaaaacttgattgggctgaccttttctttatgactactcttccaaaacatttaagaataccccacttatttccacagctccctcttcctttcagggacgccttagaaatttactcacaggaacttaa

SEQ ID NO: 14685 - DNA, 258 bp, Glycine max
  Clone ID: 700963962H1
acaaagttcccgttttcaaaattgaagcttttgggtctctgaggtttgatctctgcacaagaaccttgttttctcatctgggtgtgttgcttttgcctctgctggctcgatatggctgtggaaaaccaaagggaagatgggggttgtgatcgttttcctgtgggtatgcgtgttcttgctgtggatgacgacccaatttgcctcaaggtgttggagaatctccttcgcaaatgccagtatcatgttactacaactaat

SEQ ID NO: 14686 - DNA, 261 bp, Glycine max
  Clone ID: 700963963H1
caaggttacaaccaactgattgtagcagtgaagcagatcgggaaatcaacgttggaatgttgcatccatcaggtggtagtgcttgttctggctctgaactaatacatgcttcttcatcaaggagctcaaaatcagcttccaacaattcatcatcaaatggggatagcaaggcatctatattgactctggaaggttctcatgatgattccactgggaagaaagaattgtgcaatggagagccaattgaaacttctcctgcag

SEQ ID NO: 14687 - DNA, 261 bp, Glycine max
  Clone ID: 700963964H1
ccggcagaaagcaagctcatcctagagttttaaaaatggcagcagcctcctccatggctctctcttccccatccttggctggcaaggccgtgaagctgggcccatcagcccccgaagtcgggagggtcagcatgaggaagaccgtcaccaagcaggcctcgtccggaagcccatggtacggcccagatcgcgtcaagtacttgggcgcattctctggcgagctcccgtcctacctcactggcgaattcccaggtgactacg

SEQ ID NO: 14688 - DNA, 248 bp, Glycine max
  Clone ID: 700963965H1
acttgctccctcagaagcgaagaagaagccacagagaaccagtctcctactctctctcacccacaagaaaaatggcatctcacatcgttggatacccccgcatgggtcccaagagagagctcaagttcgctctcgagtctttctgggatggcaagaacagcgccgaagatttgcagaaggtggctgctgatctcaggtcatccatctggaaacagatggctggtgctgggatcaagtacatccccaac

SEQ ID NO: 14689 - DNA, 248 bp, Glycine max
  Clone ID: 700963966H1
agacgatccgaagaatattaccctctttcatctctctctataacattattcataagttcagtttgatcttatgtcaatgaaggatttttagacaaaacccagattcacaggaaaaacccttaaagcggagaataaaaggcaacgacttttcatctctacgcaagtgattatggcggttgttgagaatgttggggccaaaatcggttcttcgagccagagtttggagaacggtgtagtgtcagcggatt

SEQ ID NO: 14690 - DNA, 242 bp, Glycine max
  Clone ID: 700963968H1
gaatatccatgtgtcccatgtgaaacgccgtaacattcctaactacatatttcctggtggtgtccgacctaccttcccatcaaaagtaactgccgagaataaacaaagttccaaatcaagggttcctggccatggtcaagctgaaaagcctcaaggaggtaaaacagttgtagttggagcagatgatgtaaggaagagaaagagatcagaggacataatggataataacccaaggaattcca

SEQ ID NO: 14691 - DNA, 241 bp, Glycine max
  Clone ID: 700963969H1
ggatcttcaagattccctatgattcaggtgccccaaatgcaaggaactcatatccctgttgcacatatgtctggatctacagcttttcatgggatggccagagcaaatcctccagggtttgggcttcctggacaaggacatcccatgccaatgccgcgagctcctatgtttcctttttcaggaggacaaatgccaaatgttgacccacaagttaagcaaagcactggtggccgtgactcaa

SEQ ID NO: 14692 - DNA, 243 bp, Glycine max
  Clone ID: 700963970H1
ggaagcatgacacccagttcttttgaagctgcacttcgtcagaaggagggtgaacttgcttcatacatgtcacgcttggcatcactggaatctattcgcgattctcttgctgatgagttggtcaaaatgacagaacagtgtgagaagttgcgtggggaggctgctgtattacctggcttacgatcagagctagaagcactaaggaggaggcactctgctgctttggaattgatgggcgaacgt

SEQ ID NO: 14693 - DNA, 244 bp, Glycine max
  Clone ID: 700963971H1
tataaattcaagaaagcataagagtctgaaaattgcttctcatcttaagaatcagtgtactgcccgaaaggatgaaaatgaggaacacaataacaacgtgttagaggaaaagactttgcacgtcatcaagatggaaagtgaaaacaaaactttgcaatctgatcaaaatgcaagctatgatgatgaatcatacctccctcagttgtcatcaccaaagtcttcagtatcctcaatttctaaatcc

SEQ ID NO: 14694 - DNA, 250 bp, Glycine max
  Clone ID: 700963941H1
gttttcggagcaacacagatatttagcaaatgaggaatcccatggtagaatgaatagccagtggaaatcacagcattctcgtaggatgccaaaaaatatgcaggccaatagaccggcagagaaatcccatgggactgatgctgtgatgtgggcacctgttaaacctcagagcaagagtgagatcgtggatgaattgagtgagataagtaaaattgaggcagttaatcctctaaagagtgagcagcaggtg

SEQ ID NO: 14695 - DNA, 257 bp, Glycine max
  Clone ID: 700963910H1
tgtaggtatgtccctagaaaagatgtagcaattgacaatgtggtaacaagggtcttgtttcttttgatatgaataaaagcgtctcttctgtgtttcttccccatgaaaaagagccaccgtacgcatcaagtaagatcctaagaagatttcacatgttcagtttgggaacgaagtttgttaattaatttgtgtcgttccatttcaatgatgggagaaaaagggagctacgaagcaaaatatacaccaagagattgtgc

SEQ ID NO: 14696 - DNA, 257 bp, Glycine max
  Clone ID: 700963911H1
ctatgaagcaattgtttacattttccgtcaaccaaaatgctacatacgaaaccagagattcgtaattgcacattctcttttgttgtctccagctcatagaatattataaactcagattcattcagaatttcagattcacctttttcttttcttctctaccttctttttcctctgacagctttttgcagaaagttgtgatttttccttgaaagatggcatctttgagcatgatccagatcagaactgggaattgtgca

SEQ ID NO: 14697 - DNA, 259 bp, Glycine max
  Clone ID: 700963912H1
ataaaaaaaaaacccttagccaacacaaccatcatggccacctctgctattcagcaatcagcattcactggtcaaactgctctgaagcagctcaatgagttcgtccgcaagaccggtggcgccggcaaaggtcgcactaacatgcgccgcaccgtcaagagtgctcctcagggcatttggtatggccctgaccgtcccaagtacttgggtccatcctcggagcagattccatcatacctgaccggagaattccctggtg

SEQ ID NO: 14698 - DNA, 262 bp, Glycine max
  Clone ID: 700963913H1
tgaacttttaaaaatgactgggataaacttaagaattcaattattgaaattgaataagtaaacaatttaattggattggtcgaatggtatcaaaaaatggagtactaactcccatttcttatttattattgaattaaccgatcaacttgctttgttatcgaacatttctttttgatttcaaaaattttccggaaaaaatttgaatctatttttatatgcgaatcaatcctactacttctggtcccgaagtttctgcgcttga

SEQ ID NO: 14699 - DNA, 264 bp, Glycine max
  Clone ID: 700963914H1
aaccaacctcactctctctttctctctgtattctggtaattcatcaattgattcaaaatgcagaggctcaaactgcaactagtgctattcctctcaatctcaacttgtcacactgttttctccttcactgatgggttgttgccaaatgggaacttcgagcagggcccaaagccatcacaattgaaggggtccgtagtgacaggccacgatgccataccgaattggacaatttcggggttcgttgaatacataaaatcaggacaa

SEQ ID NO: 14700 - DNA, 238 bp, Glycine max
  Clone ID: 700963915H1
gctagtttagttatctactcttttctgcatgtttgttctctcaacgactcctccgcgaaagagtattattcaatattttggttgggttgaatcccggggttgaagcgttgcagacatcacggctattctaagagtgtctcgctccctcattcatgtccgatctgtacgacggaggacgggtagttgcgtaactgccgttaacccttcgccgcacggtgggcgtggtgctttgccttct

SEQ ID NO: 14701 - DNA, 268 bp, Glycine max
  unsure (1)..(268): unsure at all n locations
  Clone ID: 700963916H1
ctctctctgttcatatatataacgcccattgtaattgtacatggaaggaggagtacctgacgccgatatctttganctcagagaatgcctctccctctcatggaagaatccctatgtccttcgcctcgctttctcagctggaatcggtggccttctttttggctatgacaccggagtgatatctggagctcttttgtatataagggatgaattcccagctgtagataggaagacttggcttcaggaatctatagtgagtacagcaatt

SEQ ID NO: 14702 - DNA, 274 bp, Glycine max
  Clone ID: 700963917H1
gtaagctcggtacttcagtcaaccaaccccttcactctctctctctctctcttgcaatggctgccattgttttcatccacattgcatcattggtctctctttttgttgcaacaagtgcaagaatccctggagtttacaccggtggcccctggcagagtgctcatgccaccttctacggtggcagtgatgcttctggaacaatgggtggtgcttgtgggtacggaaacctgtacagccagggctacggagttaacaccgcggcgctgagcactgc

SEQ ID NO: 14703 - DNA, 89 bp, Glycine max
  Clone ID: 700963918H1
ggaagaatcgacaaaagaaagatcatggcgatggcaaacttggctcgacggaagggttacgccgtcgttttgtcgtcgaggtcgtcgct

SEQ ID NO: 14704 - DNA, 86 bp, Glycine max
  Clone ID: 700963919H1
cccccactttcaagccatattcttcttcagcttcggccttagttcccgaacttgatattcaacccgacactccccagaaccctaat

SEQ ID NO: 14705 - DNA, 245 bp, Glycine max
  Clone ID: 700963921H1
ggacaattatcttgacgaagcaatgaaaatgaggaatcttctggaggagttccatgcgaatcatggccttcgccctccaagcattcttggagtgagggagcatgtttttacaggaagtgtctcttccttggcttggttcatgtcaaatcaagaaactagctttgtaaccttggcccaacgagttttagcaaatcctctcaaagttcgcatgcactatggacacccagatgtatttgaccgaatat

SEQ ID NO: 14706 - DNA, 250 bp, Glycine max
  Clone ID: 700963922H1
atgaggcatcactgtcccatttgttacgagtacctttttgattcattgaaagatgtcattgttatgaaatgtggtcacacaatgcaccatgaatgttacctggagatgataaaaaatgacaaatattgttgtcccatatgctccaagtcagtgattgacatgtctaagacatggaagagaattgatgaagagattgaagcaaccgtcatgcctcaagattatcgaaacaggaaggtttggatactatgta

SEQ ID NO: 14707 - DNA, 251 bp, Glycine max
  Clone ID: 700963924H1
gggatctagaaaccaatgtcttccaaaatgtctctggagaagttgccatcagcactcactgcattgatgttgaagggcaaaatgtgcaaaacaatcaataggagcatgatgatgcaaaactctttcaggtgtatcaagttgataatcaattctactatcaaaatgatgaaatccagatatattgacaaacttatcccttccaactcagttgaatgaagcctccagagtgtgcgcagaactgcacagattga

SEQ ID NO: 14708 - DNA, 252 bp, Glycine max
  Clone ID: 700963925H1
ccggaacataaggcgggcaagagagtttgtttcttctctcttcaatggaaggcggcgaacaggttctcccttcggccaccaccgtcgccgccgccggctatcccaacgtctctcctcctccgctcgctgatcctgtcggtgcttccgatctcgctgctgctgcctcggacgacgttgttgcggaacctgaaattcacgcgctgatttcagacgaagagcacgatcacgatcacgatcacgagcatgagcatg

SEQ ID NO: 14709 - DNA, 253 bp, Glycine max
  Clone ID: 700963926H1
gaaagggacgccaaagcgaaaccctaaccctaacggagagatggcggacacttggcatcgatattcgggacggagaaggacagggtgaactgtccgttctacttcaagatcggcgcgtgcaggcacggcgaccggtgctcccggcttcacacgaagcccacaattagcccaacgttggttctgtcgaacatgtaccagaggcccgacatgaacatgaacatcatcaccaaccccgatcagccccagccccaat

SEQ ID NO: 14710 - DNA, 256 bp, Glycine max
  Clone ID: 700963927H1
ggttatcatttctccatttccattttctctctcacttttcaagaatcgtaagctatgggaaagtcttacccaactgtgagtgctgattaccagaaggccgttgagaaggcgaagaagaagctcagaggctccatcgctgagaagagatgcgctcctctaatgctccgtttggcatggcactctgctggaacctttgacaagggcacgaagaccggtggacccttcggaaccatcaagcaccctgccgaactggctc

SEQ ID NO: 14711 - DNA, 261 bp, Glycine max
  Clone ID: 700963929H1
gcattgcagtttcctgtgatgcccacatgcaaagctaccatggatttgtctgctactgcaacatctgcctcacccgtctttgttgctgctccagcagagaaaggccattttcttttagactttctcatgggaggtgtttcagcagctgtctccaaaactgctgctgctcccattgaacgtgttaagcttttgatccagaaccaggatgagatgatcaaaactggtaggctttctgagccctacaaaggtattggtgattgt

SEQ ID NO: 14712 - DNA, 266 bp, Glycine max
  Clone ID: 700963931H1
aaaagcatcattagaagtggtacacaaacatgggccatgctcccaactaaatgatcatgatggcaaagctcagtctacaacaccacacagtgacattctgaaccaagacaaagaaagggtgaagtacattaactcaaggctctctaagaacttgggccaagatagtagtgttgaggaattggactcagctaccctaccagccaaatctggtagccttattgggtctggaaattactttgtggttgtgggtcttgggacacccaaga

SEQ ID NO: 14713 - DNA, 269 bp, Glycine max
  Clone ID: 700963932H1
tgtttcccatgaacataacattctcaattgtaggatttggctacgttggcaccatcgtgtaaacctcgttgagccaaatttctcaagttacttaagtttcatcaatgttgtgtccatatttttctagtttctcctaaaaaaaaatacatcaaaagaggctgatttcttcaagcaacaaactctgtaccaaatcatctacagctagtttagctcaaataattttcaattcggaaagaaaaaaaaagtcctttccaaaatttcattgtcat

SEQ ID NO: 14714 - DNA, 255 bp, Glycine max
  Clone ID: 700963933H1
gctatttctaggtttcgttttatttggctttgattttcttctgcaaccttatctactgcaaagctttgattactgagtctaacttaccctgccacagtttgccttgtttacctgagctctgtttttaactggtctttgatcaaggatggccataaaggcaattgagttgttgaaaggaagcggaaaccatgaagagatatttgaagttcttgcagcagtggctgcatctttgggggatgtaatagatgatgtgaa

SEQ ID NO: 14715 - DNA, 250 bp, Glycine max
  unsure (1)..(250): unsure at all n locations
  Clone ID: 700963934H1
ctctcacacaactcccaactcccaattcacaaaaccgtcactatttaccaacccacttcacttcccccactcaacaacagtcgattccattccacaatgcattttcccccactttcccagcaaccaaacagcacataattccttcccantcgagcctctttctctgtcatgtaccgcttgtcgcagatttcatcgtacaccgcctctatagtcggaaacaccgttcgactcatcgcgaaccgctccctgc

SEQ ID NO: 14716 - DNA, 193 bp, Glycine max
  Clone ID: 700963935H1
cactcataacacaaagcacaaagcaaagctcatccttgagttaaaaaatggtagcagcttcttccatggctctctcatccccatccttggctggcaaggccgtgaagctgggcccatcagccccagaagtgggaagggtgaccatgacgtagaccgtcaccaaccaggtctcctcaggtagcccatgcatacg

SEQ ID NO: 14717 - DNA, 247 bp, Glycine max
  Clone ID: 700963936H1
cttcattaccctcgtaactcgtaacggcttcataccggacctttccttttctgtttttctctcaacttcaaagttagaatcttttgttcactcactgagccatgcatggcgccgagttcgacgccgcgtttgggttcccatctgagtttccctacgagtttgactcggtcgggactgtcccggttgattccggttcgaccgggactgataatagcgacgattaggtcttcttcgccggcttgactcg

SEQ ID NO: 14718 - DNA, 244 bp, Glycine max
  Clone ID: 700963937H1
ggttgattggtcccattgattccgaagagaaaagaaaagatgtttgagccacaacagctatacactcgcgcgaagaccgaggaattcgacctcgaatcaggagaaaccctctacccagggctgagcgtcggcgagaaccagctccgatggggtttcatccgcaaggtctacggcatcctttccgagcagatcgtcctcaccatcctcgtctccgacatcagcgtattctatactccaatcaatg

SEQ ID NO: 14719 - DNA, 254 bp, Glycine max
  Clone ID: 700963909H1
ctttctcattattttctctcctattgataaagaaacagagagagcgagaaaaaaatgcctgcggtaggaggtattagcaacggagggggcaaggagtaccctggaagcctcactccttttgtgacggtaacatgtatagttgcagccatgggtgggttaatcttcggttacgatatcggaatttcaggtggggtgacatccatggatccgtttctgctcaagtttttcccgtcggtgttccggaagaagaattc

SEQ ID NO: 14720 - DNA, 77 bp, Glycine max
  Clone ID: 700963938H1
ctgaaaagggttatcaaggtgcagcaaaagttgcaggcttagatggacaaattacctaaggccaggcatccagagcg

SEQ ID NO: 14721 - DNA, 247 bp, Glycine max
  Clone ID: 700963939H1
agcattgtaactgctacatgttcacgctgagccttcttcttcttcttcttcttactccgccttctctctccgacgatctcggattcgattttccggcgaagaagctgataagagaccttaacctttttccttctgaagatgtcaacatcgttcctcgccactccaattctcacgccaacaaaatcgtcgagaaaccgcttaggttcccaaacttagtgccttcagactccggcatttccctcgacga

SEQ ID NO: 14722 - DNA, 243 bp, Glycine max
  Clone ID: 700963871H1
cactcggaaatttctggcgatctctgcgttttcccctattttttctgaatctaacaacaaacattcctctggcaacaatcaatactattaataagagttccttccttcactctcacccaagccaaagaaaggaacaagaacaagaccaacaaagtaacgtgaaagagaaagagatggaggaaattgttccagtggtggatttccagaggctttcagaggaagaggagcgcaagaagctgagaa

SEQ ID NO: 14723 - DNA, 242 bp, Glycine max
  Clone ID: 700963872H1
agcaaaccgagagcgtgcaataatatatataagaagaaaccccacattttatattgtttcagcgaagaaggaagaaattggtgttctttaatgtgaaagggttggaacggtttttgattttaaccctgcaaagagccttcctttgcggtttttcttcttgagaagaagaaggctctttgttgttgttgattttgaagaaggaaagaaggaaggaagaaaatgatgaggctatggatttctta

SEQ ID NO: 14724 - DNA, 241 bp, Glycine max
  Clone ID: 700963873H1
gagaggagagagaaagtagcagatcctccatggcctccaccaaggaacgtgaaaacttcgtctacgtcgccaagctcgccgaacaagccgaacgctatgaagaaatggtggaagcaatgaagaatgtggcgaactaaacgtggaattgacggtagaggagcggaaccttctgtcggttgggtacaagaacgtggtgggtgctcgtagggcttcgtggaggattctttcctcgattgaacag

SEQ ID NO: 14725 - DNA, 240 bp, Glycine max
  Clone ID: 700963875H1
attccaagtatcgaaacatttggaatttgtatcacggttggtttggaagaatggcacttttctttgcagcattgaatatagtgttggggatgcgagctgcgggggcagggaatgattggaaggcaggctatggattccttcttagcattgtacttgtggcagttatcgttctggaagtgttggcgtatttgaaaaggtcagaaaagcgttctcttcctcagactttccaaatggacccag

SEQ ID NO: 14726 - DNA, 241 bp, Glycine max
  Clone ID: 700963876H1
gaaaaaacctgaagtatactactagggaagcatcagattttcatgctcctcctttcattaaattaaagtgcagaacagtttctaggtatggaaactctttcatatgggtcagcaccatgctgccaagttgtgaactcaaagtggaaattagttgaaaagagtttgagttcacgtcaatcaagagtttcctctataggaaaacttggagtttattacacaggtactatttctgcatgtgcgc

SEQ ID NO: 14727 - DNA, 243 bp, Glycine max
  Clone ID: 700963877H1
caacaatggcttctgtgcctcaaccaaaaatctcccttctaaccttattcttcttctcgtccttcaccatcattgcgcatgcaattgttcctcaaaacgaaaccttcaaatttgagaactcaggtgaacttggaccctacatcgttgagtacggtgcagattacagaatgataagcatcttcaactcaccattccaagttggtttctacaacaccaccccaaatgccttcactctagctttgc

SEQ ID NO: 14728 - DNA, 243 bp, Glycine max
  Clone ID: 700963878H1
ctcataccgcataacctaacctttcctcattctcctctccgttctctctttctccggtcacccgccggcgacagaggcacacagaacggggttgagaagctgcgctgcgtttagcgtgttacgtgaataatgcggcagacaaaaacagattgtgctgttgcgacaatcgcaatcgtgcgtgtaaggcgaataatgcgttaagtgatggtgaagacgagagatacagcagcgtcaatgacggac

SEQ ID NO: 14729 - DNA, 247 bp, Glycine max
  Clone ID: 700963879H1
cttggtcctcccgtcaaccggatggaccaggctacactctcgatgaccacagtatcagctgggccaattggaagttccacataggttttgatgtacgagctggtgcggtaatttcaactgcatcaatttacgaccctgagctgcataaatcacgttcagtactatacagagggtacatttctgaactattcgtgccatatcaagacccaactgaggaatggtactacaagactttctttgatgctgg

SEQ ID NO: 14730 - DNA, 247 bp, Glycine max
  Clone ID: 700963880H1
gttatttttctttttttctcatttgcactgcaaattgcaatggcttccaacaaggttattgccaccatcatggtgctttctctccttgcctactcaacatcattcaccaatgcatgtggcacatgccacccaaaacctaccccttctcctcctcctccatcaggaaagtgccctaaggacacattgaagctaggggtgtgtgcagatattctaggtcttgttactgttgttgttggctcccctgtct

SEQ ID NO: 14731 - DNA, 251 bp, Glycine max
  Clone ID: 700963881H1
gtttttcaaaaatgggtttggcctgtcatatcgcgaagattcatagtgaggcgtcagttgagaaaaatgccagagagctaaaagagtacattgaggaaatttattggggttcaaataaacgtgttatgcttcttggacatagcaaaggaggagtagatgcagcagctgctttatctttgtattggtctgatttgaaagataaagttgctgggttggcattagcacaaagtccctatggtggaactcctata

SEQ ID NO: 14732 - DNA, 244 bp, Glycine max
  Clone ID: 700963883H1
gccacatcttctctttctcttcccatggcattctgactcatacccaaatcattgattgtttgtctatcgaatcggtgagaaaatggcagtggagctgatggggttcccccaaatgggcgaacagaaggcaattgaagaagcagccgccgaaggcctcaagggcatggaacacctcctctgtctcctctcccatcgaccttcccacctccgcactcaccacaccgacgccaccgtttccaacttc

SEQ ID NO: 14733 - DNA, 248 bp, Glycine max
  Clone ID: 700963884H1
cctcagcctcagcctctatttattttctattcatttccattttctctcgagtatcctctgctttcatcatgtggagacttcgtcgagcttcttttcgtctcagtacgaggcgaggagttaacgcgggagctagccgtgcttctgctgtcaaattagtggcaaccactagtgtggaatatgaggctggtatccctcagtctcgtcaaatcacttattgtagatttctgtcggctggcatgggtcgtgtg

SEQ ID NO: 14734 - DNA, 245 bp, Glycine max
  Clone ID: 700963885H1
caaccagttctgctgttggggtgtattcctcttcaacagatccagttcatgtgccctctcctgattctagatcaccaggtgttgttggagccattaggcgtgaagttgggtttgttggtgttcggcgacagtcttcagacaacaaagcaaagcaatcatttgctcctagtagccctcatgttgtgggtaaagatggtacatctgcagattcttttcaatcagttggggctgtctcaaagactgaa

SEQ ID NO: 14735 - DNA, 215 bp, Glycine max
  Clone ID: 700963886H1
cctctcaagtggagcattcaggttgttagagcgtccattgagctttcaatctgtggctggattttgatctctctgagtttaaaatggatccaaaaggaagcttatgtgctacaaggtcctcttccttaacctctcctgggaatggactacaaacaaatttgtcgtcagatcctccctctttctatggggtcaggattgaatcacctttcgaagaa

SEQ ID NO: 14736 - DNA, 243 bp, Glycine max
  Clone ID: 700963888H1
gaagaagatacgaaacctcaagtttaatctacctattagatgttgggttaggatattaggattttaatgccttttgaacttgtttttgttatacatctttgaagatattttaaccttgtgagcaacgaattggcattttgtggatttcttatgtgtattagtttcctgccaccttattttctcctgaatttattgtttattgtttagaacaatgtgaaaaaaaaaaaaaaaaaaagggcggcc

SEQ ID NO: 14737 - DNA, 241 bp, Glycine max
  Clone ID: 700963889H1
gattgaacagatgcagatcttcgtgaaaactttgaccggtaagaccatcacccttgaggtggagtcctccgacaccatcgataacgtgaaagctaagattcaagacaaggaagggatcccacctgaccagcagagacttatctttgcgggtaaacagcttgaggatggtcgaacccttgccgactacaacatccaaaaggaatccactctccacctcgtgcttcgcctcaggggtggcatg

SEQ ID NO: 14738 - DNA, 240 bp, Glycine max
  Clone ID: 700963892H1
caaagatgacaggtgggatgtttggaaggaaggggcaaaagataaaggggacagtggtgttgatgccaaagaatgtgttggacttcaacgccataacctccgtcggaaaaggcagtgctaaggacaccgccaccgatttcttgggcaaaggcttggacgcattaggtcatgcagttgatgctctcactgccttcgctggccatagcatctccttgcagcttatcagtgctactcagactg

SEQ ID NO: 14739 - DNA, 244 bp, Glycine max
  Clone ID: 700963893H1
tcaccctgaacatgacaaaactgttcgttttggagagtatcagaactcgggacctggtgcagaccccaaagggcgtgctactataactaagcaactaagtgaaacggaggttaaaccttacataacacttgcgatgattgaaggctccaaatggctacttcctcctccaactcccaaggtttaattaattaccacatttttgtctggcttgaggaataatgcaccccatgttttagtggatggt

SEQ ID NO: 14740 - DNA, 247 bp, Glycine max
  Clone ID: 700963894H1
cacgagttacgcacagtcccggtgccgccaccaccaccattggtttcagtcaactaatggcaaccactctcactccaatccaaaccctcaaattctgttctcccaatcccaaacctctcttcactcccaaacctctcttctctcccaaacctccttccatctccacacctcacaccttccgcgccgataaactctctctctccgtctccgccgccacctcctcctccaacggtcctccctctcctcc

SEQ ID NO: 14741 - DNA, 263 bp, Glycine max
  Clone ID: 700963901H1
caacaatatacgaacgtgctggaagaattgaggggcgaaaaggctctattacacaaattccaattctaaccatgcctaatgatgatattacgcatccaactcctgatcttacaggatatattactgagggacagatatatatcgacagacagttgtataacaggcagatatatcctccaatcaatgtccttccatcattgtctcgtttgatgaagagtgccattggtgagggaatgacacgaaaggatcattctgatgtgtcc

SEQ ID NO: 14742 - DNA, 85 bp, Glycine max
  Clone ID: 700963902H1
ttaggaggtgtcagagcctgcagtgagcatgatagagcaatctcaagttgctcccccacaagattccctggattcaaccattctc

SEQ ID NO: 14743 - DNA, 256 bp, Glycine max
  Clone ID: 700963903H1
ataatttcaggaggaactgaatcaatcactactactcttacatgggcagtatgtttgatattgagaaatcctattgtattggaaaaagttatagcagaacttgacttccaagttggaaaagagagatgtataactgagtctgatataagtaagttaacataccttcaagctgtggtcaaagaaactttaagattataccctccaggtcctctctcagcacctcgtgaattcatagaggattgcactttaggtggct

SEQ ID NO: 14744 - DNA, 94 bp, Glycine max
  Clone ID: 700963904H1
caaagtagtactacttggtttcaatcaaaacaaaaactcacactttggtggccacagcaacaataacaatggcagcctcactacatgctgcagc

SEQ ID NO: 14745 - DNA, 253 bp, Glycine max
  Clone ID: 700963905H1
cacacacacagagacatttttctttcttagaagcgtccaccacacggaacctcgcaattccttcacacccaccataataataatatcttcattgttcttttcttctttgttaccattaaaaacacacacacacacacaacaacactctgaaactaacaacaacaataaaagaccatgtcggtcaaggagtgcgagcaccacaaggggaagaagaggaagatcttccggcaagtgttctggtgcttagtggtgt

SEQ ID NO: 14746 - DNA, 243 bp, Glycine max
  Clone ID: 700963870H1
cgcagttctctcttctcttctcactccgcagaagagagagcattatccaatacctagcgttagcgttagcgtactctcccaatcccaatcccctctctctctttatcccttcttttcttcttcttcttcttctattccctctccctccgctttttctcttcatcgttgtggttcggcgtcgctgaatccgtcacgttgttgtttgtgtcgaatcggacggcgaagattgcatcgcgacgtatt

SEQ ID NO: 14747 - DNA, 249 bp, Glycine max
  Clone ID: 700963907H1
gaagaatcttagttgcaatatagttgtgcagttgttgaaatgggggctcctttatcagcatggcctttggagaactttggaacatacaagtatctattgtatgggccgtttgtgggaaaagtcctgtatgaatggttctatggtgaagaacactcctactacaacctcagctggtgccttcatttgctcatacttagtggtctcagaggcctaattcatgtgctttggggttcctacagccacatgttt

SEQ ID NO: 14748 - DNA, 253 bp, Glycine max
  Clone ID: 700963908H1
cggtactactccaagtatgattatggaaagctaaaaaatctgatagagtacggcaagttcaatccaccaaagttcgaccttagtcgcatacccaaatcattgcctctgtggatggcctatggtggagatgatgcattggcagatataactgatttccagcacacactcaaagaattgccatccacaccggaagtggtttatcttgaaaactatggtcatgttgacttcatattaagcttgccagcagaacaag

SEQ ID NO: 14749 - DNA, 252 bp, Glycine max
  Clone ID: 700963834H1
gcatgtacaaagttactttgacattatcaatttatgaatgcaaacagttatctcatggtaccaccctgtggccagggcaaaagccttagaggggttatataactacaaatgatcatatataacggtcatcctagttatgtgtgtgctaagttccacatctcatattcgttgtgggtaaatgttatgacatggaaacttcctagtttttaaaaaaaaaaaaaacaaaaaaaaaagaaagaaagacaaactagc

SEQ ID NO: 14750 - DNA, 253 bp, Glycine max
  Clone ID: 700963835H1
ttacattaaacactgcaaaattcgtaggaaccgcacaattgagatagttgcaaccagcaagtcaccaccatggcacttgttgaagcctctgcttctctttcaatctcttctgttgctcgtcttttcactccaccaaaatgctctcccaccgctcactttcctcatcggaattttgttgcaactcgaccatcattcatcgctggttccccactcttgattcggagaaatcatggaaggaaagctgcatgcaaag

SEQ ID NO: 14751 - DNA, 250 bp, Glycine max
  Clone ID: 700963837H1
cacacacgtaacttcatctgggtttcaggaaaaaagaaaaaggaaaacaatgggttccgataatcaccagaacttggagttcttgaaggagatcggtttgggctcttccaacattggctcttacattaatggccagtggaaagccactggttcttctgtcacttctgttaatccttctaacaatcagagtatagctcaagtgaccgaagcaaccttgcaagattttgaggaggggttgcgagcttgcagt

SEQ ID NO: 14752 - DNA, 247 bp, Glycine max
  Clone ID: 700963838H1
ctactccactcgctctctctctctcgctccgtcgccgttttaccaggacacgccaaccctctcttccaaactaactaatctctctatcttcttctcttcgcgtaggcgtcgtcccccgcaacgacgtcgtttcatggttacgctattgttgttgtgctgattctctctccgaaaatcttctgagggcttctcggcgatgagtggagtaatacattctctggtgtttgattccgcgtttccatttttc

SEQ ID NO: 14753 - DNA, 245 bp, Glycine max
  Clone ID: 700963839H1
ggttgggatcttattcaactgctgaagcagcagcaagagcctatgatgctgcacttctatgcctcaaaggctcctcagccaatctcaacttcccttcttcaagctcctcctcacaacactatatcatccctcaagacactgccatgatgtccccaaaatcaatccaaagagttgctgctgctgctgccaacaatttcttggacaataatgctattgctattaataatgctaccaccccaccttct

SEQ ID NO: 14754 - DNA, 244 bp, Glycine max
  Clone ID: 700963840H1
gaaaagagtgcgagtgatgaaattgaatccaaatacctaagcggtggacgaggcctacctgagccactgcttcgcccccgccggcgaggtggtctccatcaaaatcatccgcaacgagctcacgggccagcccgagggctacggcttcgtcgagttcgtctcccacgccacagcggaaagggttctccagacctacaacgccaccgaccagaccttcaggctcaattgggcctccttcggcatc

SEQ ID NO: 14755 - DNA, 240 bp, Glycine max
  Clone ID: 700963841H1
ctttctcactccctcactccctccgttgacgtttttgttttctttatctctgtgttctgaagaagttttagggtttcgttttgtttctctcttcggccacttcaggctatggattcatttgagccagctggaaatgggaaggagtcactgccaccaccacctcctgttgttccctctgatattgtacctctcaaagcagaggaggtgctctgtacccctaccgagcataataagaaaaag

SEQ ID NO: 14756 - DNA, 79 bp, Glycine max
  Clone ID: 700963842H1
gaaaaaaaaaaaaaaccggaccaacccggaacctcaaacccaaaataaattttttagggatcacattcatgggttacgt

SEQ ID NO: 14757 - DNA, 244 bp, Glycine max
  Clone ID: 700963846H1
ctgggaggagtagcgattcggcggttgaagatgcgaaggaaggcaccacactaagtaaggttgcgtgaatggaaagcattttagagagtgtcatgggggcacaaaaaaagttttatttttgttgatagagggttttactcgattgaaacgtcgctgcttctgctcgctcttaaggacccaactgagcatactgctattgacaacttaatggttcaacagcttgatggaactgttaacgaatgag

SEQ ID NO: 14758 - DNA, 249 bp, Glycine max
  Clone ID: 700963848H1
taaattctctcatttgtaatgtgatcatttaatttaatgaaagtataaaatacttcaaatgcttccaattctgtggtaataacaaatcaacagcattgcatgtaatgattagaagcaattttgtcatgttagaaattctcaaatcttgtgtcatttcgtgttttcttttgtagtatacttttacttaaacttggtagcaattatatttcagacatcttgtgtctgatcatactctctttgtatataaat

SEQ ID NO: 14759 - DNA, 251 bp, Glycine max
  Clone ID: 700963849H1
gtttagttttgttagtagaggggatcgaatccaagattttttcctcaaagcttctcccttaatcatccaacatatcttatatcttttcttttttatgtaaattaataaattaatttataataaacatttatggatgcaggagatattgagtccatgccatttattcaggcattaggacaattctcatacagagtaggtgctggcaacttttgcttagttcatgtcagccttgttcctgttttgaatgttgt

SEQ ID NO: 14760 - DNA, 250 bp, Glycine max
  Clone ID: 700963850H1
cgcagacgccccagatcagatcctctctcttcaattcaacttcaagccaagccaagcaacatggctcaacaacaggaggacgaaatggagtatgttgctgatgataatgaaatggcggaagtagaagatgacatgtatttccgtggtagagtgtttggtgattcagagtccgaatcagatgacgatgatgaatatgactccatggaaaatcggatgacagatacctctgctgcagaagccaggaaaggaa

SEQ ID NO: 14761 - DNA, 251 bp, Glycine max
  Clone ID: 700963852H1
cacaaattttatgtgattagtcgcggtatttaaaataaaaaatgaaagtagacaaataaaaaaggaaaggagatgtttgaataaaaataattccccttcaagttcttattttttgagaggacaggacaatatgaatgttttattatgctctatcaacacattaaaaagattatatgatatatctgctgtggaagtaggtcaacatttctattggcaaatagggagtttccaagtacatgcccaagtactta

SEQ ID NO: 14762 - DNA, 249 bp, Glycine max
  Clone ID: 700963853H1
gttgagttatctcttatgaatttatctggaagcttgtctcttataatttttccaacgtgccttgttcccatcctcacggtcatgggattgaaagttgaaagaaataagcattggattgggtatgagtgagtcggagaatagagagatagatggcgaaatcggggaataagaatatgggatcaaccgcaaaagttcacccttccaatgatcccgaactggatcccgattcttacgccctggagaagttca

SEQ ID NO: 14763 - DNA, 244 bp, Glycine max
  Clone ID: 700963854H1
ctgggacttcaggctatacaaatccaatatggcattcctcacaagagcacatttaatcggcaatttttgacaagtgaagtttcaagaatcaattatttaggatatagactttatcgtgctctgcctttcctttatgaattaagatgtgttcttgactggtcatgcacaactacgtccctcaccatgtatgactggctaaagctggaggacataaatgcaagtttgtaccttgtcaaatgtgatt

SEQ ID NO: 14764 - DNA, 244 bp, Glycine max
  unsure (1)..(244): unsure at all n locations
  Clone ID: 700963855H1
aacgataacactttctctccgattcttagcatccaatcagaggttccatttctcttccttctttcgcatcgaagttccaatcggtaaattgcttctctctttcgtcaatcttcattccttctctctgaacaataactgtaataacgctcatgctgcgtgaaccagggttagggctttttctcgttgtcgntccgttactccttttgcggttttttggtcttgacttcgatcctcttcgcgatcg

SEQ ID NO: 14765 - DNA, 245 bp, Glycine max
  Clone ID: 700963856H1
gctctgtcttatatcaggagattgattacaccaaggaggctgctaatgcagaattgtttgcaagtaactttaagaacatggattatgtgaaagttcctacaatctactgggattataccacaccacagattctataaatggagtatgttccagggattaaaataaacaaaatacaagctttagatcaactgggtgttgaccgcaaaaggttagggagatatgcggtggagtcatacttggaacaa

SEQ ID NO: 14766 - DNA, 241 bp, Glycine max
  Clone ID: 700963857H1
gtactggaccgttgggttgttcttcgagaccctctctgactcgccgggttgactcgctcgagtttgggggtttctgattcacccggggacggatctcaattttgtctcagactgttctttctaatttaagttaccatctttagctgcattcgtgtcacgctcctttgaatgcccgtcacctcaggaaaagcaaagggcatcatattactatgaaggcactaattcttgttggagggtttgg

SEQ ID NO: 14767 - DNA, 240 bp, Glycine max
  Clone ID: 700963858H1
gcattttcagtcttgtggaacagtaaacagagtcaccattcgaactgataagtttggccaacccaagggttatgcctatgttgagttccttgaggtggaggctgttcaggaggcccttttgctgaatgaatctgaacttcatgggcgccaattaaaggtaacggctaaaaggaccaacataccagggatgaaacagtatcgtccccgtcggaccatcaatccttacatgggggggtttcg

SEQ ID NO: 14768 - DNA, 243 bp, Glycine max
  Clone ID: 700963860H1
gtaaaactccacctaagatgcttgtaattttaaacccacgatcaggtcggggtcgttcaagtaaagttttccatggcattgtggaacccatattcaagcttgctgggtttagattggaggtagtcaaaacaacatctgctggtcatgcgagaaatcttgcatcaagtgtagacatcagctcttgccctgatggaattatctgtgttggtggtgatgggataatcaatgaggtcagcacactat

SEQ ID NO: 14769 - DNA, 247 bp, Glycine max
  Clone ID: 700963863H1
gaacctaccctcaaatacccggtggagatccacggtgttatcctagcaccggttccgcagttttgcttcctcttcgagaacctaatgtggaggctgaggttctgatttgtggtggagccccgagaggggcttttcggaatactctctcgggtaagtttgttggagcgttgagaacttgcgctcggattaaaataaccgacccgaaagcgaattgggtgatggaaaccatgccgggtgcgagagttat

SEQ ID NO: 14770 - DNA, 250 bp, Glycine max
  unsure (1)..(250): unsure at all n locations
  Clone ID: 700963864H1
gcctcatgctatatgccggcccgtgtttaaatgtttcaaagctttaggggactatattgaaacattaccacacgtngacgcttngaatggctgctactgctccatggtgccagaatgggaatattcatacattgattacaactgtctcaaagcacctctgaaaaacatttccaagtttagagagctaaacgagtcaccaccaatggcatccacatcgctaggtctccgaagagaagttaacactctatag

SEQ ID NO: 14771 - DNA, 248 bp, Glycine max
  Clone ID: 700963866H1
caaaacacaaatgcagattgtttcctaggcgtcttaaattctatcttcgagcttgcctctgccaactacatttgaattttgcgcaacctcattcttatttgttatattaaattaaattgatccaggggaaatcagaaatactctgattgacttatatatggatcttattaattgaaacgaaattgagttgtctgtagcgacgatgagttgcttttcgtgctttgtttctcgtgggaaagatgtgagaa

SEQ ID NO: 14772 - DNA, 246 bp, Glycine max
  Clone ID: 700963868H1
ctgatagtattcattgatatcttttacactgtgtatggtgcatttgaattggaatgtagttgcagtaagactttttaccgctgcatgtaatgtcaatgtgcaatctctaattgcttaaaattgaatcagtgctgtaactttttcttttatggccaggggataaggtggttggattgttataaattgctctttttaaggtttaggaagacattttgtgcaaggttctgaaaggtcatagtcaaataa

SEQ ID NO: 14773 - DNA, 247 bp, Glycine max
  Clone ID: 700963869H1
ttcagtacataatatatcaaggttctcaagctcctatagggtcgttaaactgtggtaagaaaattggacttggtaatgttgttcacatgtctgtttactaatgcgagcccaaataaccttaatagagtcacataaacatcgccaaacttaaattattattgtcaatggtcatgtagaacagccaagcaaaatattatacaacaagtctgttagtttaataactcattggcatcgtaatcaagattat

SEQ ID NO: 14774 - DNA, 253 bp, Glycine max
  Clone ID: 700963833H1
ccacattcaaatccaaatggccctttacattacactaataattggcctcctagtaaacaccctagtactctataaatagcatttgcatgcaccttagtcttcaccaaaatactcctcttggcatcttgtgttgtgtccctcttttaagctatttccttctcttaacacaattggttgtgccaattgccatagtcaccaaccaattaacaaaggtatatatatcatcatatcatcaccaaatgaaaaatattgg

SEQ ID NO: 14775 - DNA, 257 bp, Glycine max
  Clone ID: 700963789H1
cggctcgagttctttggcaacacacccaaatgcaataatattcccattaggttcctcagcacaagccttttatgggcaccagcctcagcaaaacaacccagttttccataataacatacctaacagaacggtgacccactgctcagtggacccattagatacttctttgtgccaaaatcttgccatgcagttatctccgctagatgtgtttaatgaaggtggctctcagtttccattagcattcttagaggatgatc

SEQ ID NO: 14776 - DNA, 256 bp, Glycine max
  Clone ID: 700963790H1
taagaaaaggcacaaaaactggtgtagctactgccctagaagaggagcttcatagtgcaagatctacatttgagcaagctcggtttaatctggttactgccttgtcaaatgttgaagcaaagaagagatttgaatttttggaagcagtcagtgggaccatggatgcacatcttcgttacttcaaacaggggtatgaattgttgcaccaaatggagccatatattaaccaggtcttgacttatgctcaacaatcaag

SEQ ID NO: 14777 - DNA, 257 bp, Glycine max
  Clone ID: 700963793H1
tgaatctgaacatgatgtgcctgtacgcattggaggttatcaagtctccagacctggtgctgacattgccggtcgtgctactattgcttcgcatcgcagtgcaacgatggttgctgctgacataacgcgtgcgatgcatgtaggctccgaatgtcctcttcgctcgtcctactcgcaaagactaatcaattactacagtaatgtctcgcttggggtatgctcccccccatggccctacggctggtgacttagtccgt

SEQ ID NO: 14778 - DNA, 256 bp, Glycine max
  Clone ID: 700963795H1
atggaatttcgatgctcagtcatctcttttaccattctcttctctcttgctcttgcaggagagagccatgtccatgcatcgctacctgaggaagattattgggaagctgtttggccaaacactcccattcccactgcactgcgagagcttctaaagcctcgccctgcaggtgttgaaatcgatgaactccctaagcaaattgatgatacacagtacccaaaaacattcttctataaagaagaccttcatccaggca

SEQ ID NO: 14779 - DNA, 256 bp, Glycine max
  Clone ID: 700963802H1
atttattaaaaagaaaccgagaagaccgccttagctgcattcacgccatggactcactttaaccttctctcacactcaccgctgccaccaccgccttccaccatggactccgttccgtttcgcgatggtaacatacacaccattctcgactcccgttatcttcactctccactggatgttaatcatagtttgcacactcattcctcgtcgattcggaggctttctcaagaaagggagttagagggccacactggct

SEQ ID NO: 14780 - DNA, 255 bp, Glycine max
  Clone ID: 700963803H1
atttgtcatcccctccttttcttcactactatcacatatatatatatatatgcccccttgccctctctttcccttcaacccattccatcttctctctaactctctctctctctcaaaaatctctctcaaatcagaaaaatctctcgctctctctaaaattcgaaataacctaaaacaaatagatatggaaagcaatacaccagtaatagcaaagaaagtgttgagcataatacgtgtggccttcttcatgctgag

SEQ ID NO: 14781 - DNA, 254 bp, Glycine max
  Clone ID: 700963804H1
taaaaaatgaaatgaatcatttcatattgatagtattgctatgcttagtgtgcgactcgttagttttttagaacggttccaatttaacaaatttataaaccggttcatcgtataaatgaattaaaaaagaactaataaccaacgcatcgcttcggattatctagatctaaagaactagtcaaaacaaaaaataatataaaaaaagatatattatagcaactgaactattgtgaagcataaaagaacaaaaatct

SEQ ID NO: 14782 - DNA, 80 bp, Glycine max
  Clone ID: 700963805H1
tgtgtggtagaaagttaagaagtagcaaagatgtatccattcgggcacaagggggaaaagataaaggggactatggtggt

SEQ ID NO: 14783 - DNA, 246 bp, Glycine max
  Clone ID: 700963807H1
ggaacggtggagatggaggctagcatcatggatggtccaaaacgacgatgcggcgccgtttcgggtcttaccaccgttaagaacccgatctcgctcgctcgtttggttatggacaaatccccacattcctatctcgccttctccggagccgaagaaattgctaggcaacagggtgtggaggttgtggacaacgagtactttatcacacctgataatgttggcatgctcaagctggccaaggaagca

SEQ ID NO: 14784 - DNA, 246 bp, Glycine max
  Clone ID: 700963808H1
ggaggatccctgtgctagctcgatcaaagatcaaagatggaggagcggactcgcagcattctgattttgatgaccttgctttccatctccattgctggcggcaatgcaggtggcttgcagcatcataagggtaggcatggtaagcatggtcgtcatatgtctgctcgtaatgtgacttacgacggtaagtcactgttcattaacggaaggcgcgagatccttttttccggctccgtccattacaca

SEQ ID NO: 14785 - DNA, 244 bp, Glycine max
  Clone ID: 700963810H1
cttccctggcggcttccaccgcagctatgtcagaaatgcttggaaaccccgtgagcctgagaggcgccaccaggtctgctccatcaccgtctacacctgttactttcaagaccgttgcgcttttctccaagaagaaggcagcaccacctcctccaaagaaaaagcctgctgctgtatcccccgccaatgaggaactcgccaagtggtatggtcctgacagaaggatcttcttgcctgagggtct

SEQ ID NO: 14786 - DNA, 242 bp, Glycine max
  Clone ID: 700963812H1
ctcagttcatgaatagatgggcaaagctggctcgaggagaagaacttaaccctaatgaaattccttttctcgatcgaacactactcaaatttccacaccagccatcatcccaacgcgttgatcaaccagagttgaagcctgtactacaattagagcaaaagaagaatgcaagatggagcggtgcattgttaaaactcaagtcaagccaagtggagaggctaaagaagaaggctaatgatgaa

SEQ ID NO: 14787 - DNA, 246 bp, Glycine max
  Clone ID: 700963813H1
tagggtttctccttcgagtgagggaaatggctcccaaaccgcctagtacgggtctgtttgttggactgaacaagggtcacgtcgtcaccaagaaggaattgcccccacgcccctcagatcgtaaggggaaaacaagcaagagggtgcactttgtgaggaacctcataagagaggttgctggttttgcacccgatgaaaagcgtataactgagttgctgaaggttgggaaggataagagggcactga

SEQ ID NO: 14788 - DNA, 246 bp, Glycine max
  Clone ID: 700963814H1
gcacactatcaacaacatcctccgcatctgcacagagaccccaatgtcttgattgtcagatacaagcttcctcatgctcttcaatacaaaattattgtcaggtgatattcttggtcgcacagttcacaagtttcaccaatatggaacttagaaaatagccaacggccatagatcaccaaaggaagcatgttgatgttgatggtttcttggtaagataacttgccgtcatacgggcaggacacattc

SEQ ID NO: 14789 - DNA, 251 bp, Glycine max
  Clone ID: 700963815H1
aatcaacccttcacctcgtcctccgtctccgtggtggcatgcagatcttcgttaagaccctcaccggcaagactattaccctagaagtcgaaagctccgacaccatcgacaacgtcaaggctaagattcaggacaaggagggaatccccccagaccagcagaggctgatcttcgccgggaagcagctcgaggacggacgcacccttgctgactacaacatccagaaggagtcaactctccacttggtgttg

SEQ ID NO: 14790 - DNA, 252 bp, Glycine max
  Clone ID: 700963816H1
aaaaaaaaatgggggcttcacaatcacaggaagagctacaatcacaacaacagtttcaacaacaccaacacccaaatgaactcaccagaagggaatcattgttgttgtctcctgcagctagtaacaacacaaaacaattcagcaacagcagcaaaggtagtagataatgtcacagctgccaacagcaccaacaccaactgtttcatgttgaatgcgagagcactctcaatcacctgggcagaaaatccagac

SEQ ID NO: 14791 - DNA, 258 bp, Glycine max
  Clone ID: 700963817H1
gggcaatgaagatctctaattatgcaaatgtagctctgttgatattaaagatttatgccactgtaaggagtgggtcaatagctattgcagcatcaactctagattctctacttgatctaatggctggtggtatactttggttcactcacctctcaatgaagaacataaatatttataaatacccaattggaaagctaagagtgcagccagttggaataattatttttgcagcaatcatggcaacacttggctttcagg

SEQ ID NO: 14792 - DNA, 252 bp, Glycine max
  Clone ID: 700963818H1
cctagtttcaattctgtccaatttccaaaaccaaaacaagccacacaagttcatggcaactcccaataacagactctctcttgccatggagagaactgggcaatgggttttctctcaagacataccaactgatgttatagtggaagttggagaaacaactttctctctgcacaagttcatgctagtggcaaaaagcaactacataagaaaactgatattggaatcagatgagagcgaactcaccagaatcga

SEQ ID NO: 14793 - DNA, 254 bp, Glycine max
  Clone ID: 700963819H1
aaaaaatgttttgaaaacagacaagtttctcgaggaagcgatccaaagcccaatgaatgaatggttatcgttttgaagaagcttttgatggcagtgctctgagactgaatcattgaaactagattcaatttattcgctcctttcttcaccaaaattgaattgaatggatgctatcagaaagcaagcctccaagcttcgagaacaggtcgctcgccagcagcaggctgttctgaagcagtttgggggtggcggtt

SEQ ID NO: 14794 - DNA, 253 bp, Glycine max
  Clone ID: 700963820H1
tttgtgtttttgtagatagaagccatcagtcatggataggcttctatcatcgtcttcacccccttcttttacatttctcactcgattcgaatctgcaactgcaagattcaatttctctccgtcaacacgttctcactctcacttgaagcggctctcctcaatttgttgccagcatgcaaatccatctcctttttcctcttccactccctttctcgcttcttccaaccaccccattaattttccatccttttcc

SEQ ID NO: 14795 - DNA, 252 bp, Glycine max
  Clone ID: 700963821H1
ctttgagggaatttgacaaaaaagtagccactgccccaacgatcacatttcccttgacttctctacctgaagctccttgtttcgcataggaggtagttgaaatgtccgagggaaatgcagggaaaggaaagaaaatcgccatcattggtgtctcaaccttattgttggtggctatggttgtggcggtcacaattggggtcaatctcaatgagaatggttccaacaatgatatagaggacaacaagaaagatc

SEQ ID NO: 14796 - DNA, 245 bp, Glycine max
  Clone ID: 700963825H1
tgtattttttctgtgtgagggacagaaaatacccaactggtcaaaggactaatagggccactggtgttggctactggaaggcaacaggcaaggagagagagatatataaggcaaaggcactgattggaatgaagaaaactcttgttttctacaaaggaagagctccaagtggtgaaaaaactagctgggtcatgcatgaatacagattagaagatgaacattctgtgcacaatccacccaaaaag

SEQ ID NO: 14797 - DNA, 243 bp, Glycine max
  Clone ID: 700963826H1
gatacatcagaggattcgctccaacccctatcgagtaaggtattatctgtcaatttacattcgaaagggttaggctattgaattttaaataattacagataaaataatcgatagctttgattttaaaaattaatcataatcatcggttaggttgcaacataatacttaattcgcttaattttttaactgcgcctcagagtattcataacatattctattaaattaataagctggtgatgtaat

SEQ ID NO: 14798 - DNA, 249 bp, Glycine max
  Clone ID: 700963830H1
caagtcgctaatcctagttccttcaactcctcgctggcaacaacagcagtactaccattagccgcgtttttcaaaagtgattttcgagaattagcgatgggaattgaaagaggaggcttcaagggattcaggagcgcctggagcgtgccgcccaagccgtgcgattcctgcaagctggcctcggcggcgcttttctgccgccccgattccgcgtttctctgcatcgcctgcgattccaacattcactgc

SEQ ID NO: 14799 - DNA, 252 bp, Glycine max
  unsure (1)..(252): unsure at all n locations
  Clone ID: 700963832H1
gcctcatgctatatgccggttcntgnttaaatgtttcaaagctttaggggagtatattgaaacattttaacacgaacccgccgcgaatggctgctactgctccttggttttttagttgttgtgttgttgtcttcaactccacacagttccctcacttctcttccctttgaccattcaaccttcctcgcctttgcctccgtttccgtgactgagatggctggaggtgttattcagcagatattgaggaggaaa

SEQ ID NO: 14800 - DNA, 258 bp, Glycine max
  Clone ID: 700963787H1
atcagattgctcgaagagtttggaaagattactatgcccaggtggatgcagtggtgtacttggttgatgcttatgacaaggaaagatttgctgagtcaaaaaaagagctggatgctctactctctgatgaatctttagcgaatgtccctttccttgtccttgggaataagatagatattccatatgctgcctctgaagaagaactgcgttaccatttgggcctgactaacttcaccacaggcaagggtaaggtaaatt

SEQ ID NO: 14801 - DNA, 255 bp, Glycine max
  Clone ID: 700963758H1
gcagaaattggctactacggcgagaaagaatggtacttcttttctcctcgggatcggaaatacccgaacggttcacggccgaaccgtgccgccggaagcggctattggaaagccaccggcgccgataaggcgatcggaaaaccgaaagcgctagggatcaagaaagctctggttttttacgccggaaaagcccccaaaggagtgaaacccaattggatcatgcacgaatatcgcctcgccaatgttgaccgatct

SEQ ID NO: 14802 - DNA, 257 bp, Glycine max
  Clone ID: 700963761H1
ggtacttagcattccaatcgaggaaggtaattcattaagtgtactgatgggaaaggaaaatggtgagattgtagaaacagatagtgaagagattgttgagattgagatggatgtcaacaaaatgcatgaccttccagttgaggaagatggtacaaagagtgtactgaaggacagaatgaatgcatatatacgctcagatgtgagacatgctctagaaacaatagagagggttatttcagtggttagagaatgtggat

SEQ ID NO: 14803 - DNA, 259 bp, Glycine max
  Clone ID: 700963762H1
ggacaggtaaggaaatttcttgttgagttacgtgcttacttaaacacgaataaacctcaattcaaagaaatcatatcttctaccaagacattcactggggaagcagaagtccttttgaaggaagctattcaagaacagatggaactctttttactacaggaacaggtagaaaaaaattgattaatcatttaataactttataatttcactttcaaattcttataattagtatcttttaatatctttttatttcatttga

SEQ ID NO: 14804 - DNA, 258 bp, Glycine max
  Clone ID: 700963763H1
cagctaattggtatttaattagacaaccaaagccgcaagagtcagtcagcaaggaagatggcaacaaccttcaagtactttacttccatcctcttcctcaccctcgtcatcaaagggtcatgtgatgactgttccttgaacaacatcaatattggcacatcaagaactgggagagaaatccagggccagcctgagtggaacgtgaccgtgatcaacaattgcaactgtgaacagagtcagataaagttgtcttgcaaa

SEQ ID NO: 14805 - DNA, 261 bp, Glycine max
  Clone ID: 700963764H1
aggatttggcaaaaagtagccatcgccccaacgatcccatttcccttgacttctctacgtgaagatccttgtgtcacatagagatagttaaaatgtccgagggaaatgcagggaaaggaaagagaatcgccatcattggcgtctcaaccttattgttggtggctatggttgtggcggtcacaattggggtcaatctcaatgagaatggttccaacaatgatatagaggacaacaagaaaaatcatgttgcttcttccataa

SEQ ID NO: 14806 - DNA, 259 bp, Glycine max
  Clone ID: 700963765H1
attaaattgccaacagatatactgagccaaattagccccttaccagccctcaaggaaatcttccgcactgatggtgaaaatgttcttcaatttccaccacctcatgtagccaaagttagtaagtctgggtggatgactgatgaggaatttgctagagaggtgattgctggtgtaaacccaaatgtgatccgtcgtcttcaagaattcccaccaaagagcacacttgatcccacactctatggtgatcaaaccagtacca

SEQ ID NO: 14807 - DNA, 256 bp, Glycine max
  Clone ID: 700963766H1
ggtgtttgctgtagattcacaatcatctggttatggactatgaagcagacactctcactcatacgtttattattgtatacataagctccaagatttataatttataatatcttagtatatgtcatatgtgccaattaaggttttagactgcattgtttcgtcatgatccttgacattgcagcctaaattgttgttgaagaccaattttaaaaccttgttgccaatacttgtttgttactaagcccctctggaacaa

SEQ ID NO: 14808 - DNA, 258 bp, Glycine max
  Clone ID: 700963767H1
gtgaggaactggagagaacctgagcttacatggacaaagttgtgcatgtgaaaactaatttttaattttgctgcctaatttcttgatcttttgcaggctcaagagagatgttcacattttcataatattcatgttttgattatcttatttgttccatgagttaactgatgtctggctgtctgagtttaatgtgacttgtgcaggttttgaagcatatgctaccaaggagcattcaaaacatttgtgttgcaatactga

SEQ ID NO: 14809 - DNA, 257 bp, Glycine max
  Clone ID: 700963768H1
gcggcgaggaggatatggacgacgacgacgagatccagtcgcatccttcgccggcgagcggatcccctccgtcgtcgccgaggtcgaacggtcggataacggtgacggtcgcggctccggcgccgcaggcagccaccaccgccgaatagtctggcattagcgcttccgattcagcagccggcgaaggggaacggcggaggaggaggaggaggaggaggcggtggagagagggatgattgctggagcgaaggcgcgac

SEQ ID NO: 14810 - DNA, 256 bp, Glycine max
  Clone ID: 700963769H1
gaattttcgtggaacctattgtgttgagctgcgattgcatgtgggaatcgatttctgcagattaatcttggaagtttgatgtgattgcttggttttggtttgaagtggttttaatggggaatatactgaatctaaacaattcaaagactagacggaatgattcccatggggtcttgcaaggtgaatcctgcaagagacagaggttgtcaccaaactcttgtgaggacaacccaagactgattccgtcccttcctga

SEQ ID NO: 14811 - DNA, 258 bp, Glycine max
  Clone ID: 700963770H1
atgataaggtgctcaagcttgggtgcacaccatccattgacactcaaataccttaacatcccaaaaaagtcaaacctcccattcgtgaatttgaccagcaattccttccttcttccatctcttccccctaaagcacacaacaaccctcttcaaatcccttcacagaagcttgcaaaacccttaaactctacaccaccctcatcgatcatggcttcaactaccacagaagacgacagcgaagtaacctacgacctttcc

SEQ ID NO: 14812 - DNA, 257 bp, Glycine max
  Clone ID: 700963771H1
ctggttttggaattcgacgatggagcagaagaggagcagtagcaagatgtacaacctgtttgtgaagcacttggacgggaaaaccctaaccctcctattcccctctccgatcctctacgcgagttccatcagggatcgcctcttccaactcaccggaatccccgcccaccaccagcgccttgttaccggctgccgccacctcaacgacgacaaatctgccatccaatgcctcccggaggacggcaacatgttcccct

SEQ ID NO: 14813 - DNA, 258 bp, Glycine max
  Clone ID: 700963772H1
gagctagtttagttatctactcttttctgcatgtttgttctctcaacgactcctccgcgaaagagtattattcaatattttggttgggttgaatcccggggttgaagcgttgcagacatcacggctattctaagagtgtctcgctccctcattcatgtccgatctgtacgacggaggacgggtagttgcgtaactgccgttaacccttcgccgcacggtgggcgtggtgctttgccttctgaaggtggtagcccttca

SEQ ID NO: 14814 - DNA, 109 bp, Glycine max
  Clone ID: 700963773H1
caaacactagcaaagggaaggaaaagtaccttccccaataacccttctctccgatttggcttctctcatcggagggaaacaatcaataaaagataaaaaaaacccacaa

SEQ ID NO: 14815 - DNA, 255 bp, Glycine max
  Clone ID: 700963774H1
aagagatgatgatgatgatgttgtcgtcgtcatatgttacatgttccaattacctcggtggcaatcagtgaacaacgccaaatcttaaacttgttcttttgtttctcttttgtactactagttctgaacatggagctgttgtctctgagactcaccccttcaccttctgcttcgacttcatcgcttcctgcagcacttgctcactgctccaagctatgtgagtttcaaccgcggaagaagaagaaggtgtgtttc

SEQ ID NO: 14816 - DNA, 253 bp, Glycine max
  Clone ID: 700963775H1
gattcaatgtgttcagaagttcgacgtctgtggcgcagtcgaatgatgaagtccgagtcattgaggagtccgttgagctgtataataataataagaaggaacaaaataagcaactcgagcgggacgcaatattcagaaagcaacacaacattcatgtctctggttatagcgtgccgtctccgcttcaaagctttgatgagttgaaatcaagatataactgtccttcatatttgttgcgcaatctgaaggaact

SEQ ID NO: 14817 - DNA, 254 bp, Glycine max
  Clone ID: 700963776H1
ggaaaaggaaaaatccaaaatatattcttcctaatgactcatgcggtgttctctgaactttcctctttctttgtctgtttcctctttccttccacccatcttcctttataaattctgcatctctcagtctcataataataaatcatctctctccaaaaccaactcttcttcttcttactccactcttctcacttccactatcgccatggcctcccactcaaaccaaccaggtcccggagctgaagggctaggag

SEQ ID NO: 14818 - DNA, 255 bp, Glycine max
  Clone ID: 700963778H1
ctaaactagaaagtgatcgaacagcatgttcaagcttttggttagtagagcagctagggtttcaactccacacaaccacaatgcttttgcttctttcgctttctctaggtatgctcattcattaccatttgcaactgtagaagcagaagagatatcaggctctagggctgctgaagttttgaacctggtgcaaggtaaatgggtaggatcttcaaattggaatacagttgtagatcctttaaatggagactcatt

SEQ ID NO: 14819 - DNA, 250 bp, Glycine max
  Clone ID: 700963779H1
cgaacaaagaagggagaggaaacataggagattatcatttccgccattttgcttggaggaacacataatcgagcatatgtcttctcccttgaaaattagtgaaccaatagcatccactcatacaaatgataatgaggtgaaccaatagcatccactacaagtagaagctaacaatcaagaaaatgaacatgaagaaccagttgtcgggagaagtaggacagaaacttcagttgtttggacatgatttgat

SEQ ID NO: 14820 - DNA, 78 bp, Glycine max
  Clone ID: 700963780H1
tgttaaacagcacaacgagccactctgaagccgctcacgttatccacaacactctcaaccctccttaaaccctaacca

SEQ ID NO: 14821 - DNA, 231 bp, Glycine max
  Clone ID: 700963781H1
atttgaaacaatgttacagaattatggcgcttttcttgagaaggatggagcagggattagaggtaaaataaagatcactggatttgaaaatggagatatagatctttcaaaatcattatggacctatcaggttgggcttcaagggtgagtttttaaaattttacagtgaagagattgaaaattcagaagggtagagttgaccctgatgccatcccatccaatttacagggt

SEQ ID NO: 14822 - DNA, 260 bp, Glycine max
  Clone ID: 700963782H1
agagaacaaagcacttagtgctattcaataattacgaaaaaccaacagcgagtgttgtttttgtttggtccaggctggaccagggaatgaatagagatgagaggctttcggttgaagagaactgagttaagcggcgaaccaaacgcagaatcggcggcagaaattgccaccggaagcacgtcgaagacgggtgaaccaaacacaaaattccatccaccacttctcttggtcaatccccaactcaaatctggtgaagaaaa

SEQ ID NO: 14823 - DNA, 260 bp, Glycine max
  Clone ID: 700963783H1
caatcatccatggccgaggaaccccaaaaaccagcctccgctgaagaagtggtgcctgttcctgcggacacgccaccaactacccaatctgaagctgaagctgaagttgaagcaaatgcagaaagcatcgaacaagtggtggcggaagcagagaaggcccagagtggtgtagaagacaagatttcccaatctgaagctgaagctgaagctgaagttgaagcaaatgcaaaaagcatcgaagaagtggtggcggaagcaga

SEQ ID NO: 14824 - DNA, 259 bp, Glycine max
  Clone ID: 700963784H1
ccacaatcaaacctcttctttcaggtccaattcactcgcttattctcttctttccatacacatgcagacacaaaattcgaacaagttcaggactggcatggacttctttcaccgcgcgaaggcggtgcgcctccgcagccaccacgacaagtacctcctcgcggaggacgacgaggattcggtgacgcaggaccgcaaaggctcctcgaaaagcgcgcggtggacggtacaatacgtggctgaatacgatcacataatt

SEQ ID NO: 14825 - DNA, 94 bp, Glycine max
  Clone ID: 700963785H1
ataactttcaaactcaacaacaagggatttcctttttccccttctggattcaagtcccaagtatttgcttaaattggggtattttttttatatc

SEQ ID NO: 14826 - DNA, 258 bp, Glycine max
  Clone ID: 700963757H1
tggctctgttctaccatggccttaaccagacagaacttgcacttcgccatatgtcccgtgcttttctattattaagtttgtcatcggggccagatcatcctgatgttgcagcaacatttatcaatgttgcaatgatgtatcaggatataggaaagatgaacacagctcttcgttatctgcaagtagctttaaagaagaatgaaaggcttcttggcgaggaacatattcaaactgctgtttgttatcatgctctggcta

SEQ ID NO: 14827 - DNA, 254 bp, Glycine max
  Clone ID: 700963786H1
tttacaccttcctttcttactctgctcatcttcttggccatcctaggtagttagtagtttttggaggatgaggttgttgtgtttgtgtttaacgttgttgctgtttctggctagtgtggcaatggcagaagaagattcagatcataataagcactccctaaaagccacgtcacacgcgcagatccagtgcacaatgtgttcctcttgtaacaacccttgcaaccaagttccatctccgccaccaccttcaccac

SEQ ID NO: 14828 - DNA, 258 bp, Glycine max
  Clone ID: 700963728H1
cggctcgctaaccccagctacttctccctcatccactcacaaaatgtgccaggccctctccgccccatcgcctccgtgtacggctcttctctccttccttttcttcctcctcacggtggtgggcccggtctcggtctcggcatggcggccgtggccccagaaaaacaatatgaacaccaccgattacgccttcggggactccaagaaatacgaggggtcctcggagttcgtgaagctgaggtaccacatgggaccggt

SEQ ID NO: 14829 - DNA, 262 bp, Glycine max
  Clone ID: 700963729H1
cgctcttgtccttttgccacgcttaagatcacccaagagagaacctaagacacacaacacaacacacagagagagtttgaggaagaaatcatcatggcttcagcagcatctgggtttgtgctgtctcttaatgttgcagcttccaccacaaactcaagggtggtcttgttcaacacaaagaaccacgcttctaggcttcttgtgagggcttcagacgagcctgcagcggcggcacccgcaaccaccacccctccagctgaag

SEQ ID NO: 14830 - DNA, 259 bp, Glycine max
  Clone ID: 700963731H1
ggaattgatgatgggaacttcctcaatgtttggtcctaaacacaccactcttgattttctaggattggggatggctgccggtggcactgctggtggaggcttatctgcacttatcacatctattgggggtggtttggatgtaactgcagcctttggcaatggagatttttctggcaaagatattggaagtagctcttgatatgatatcttttggtagtaagcaagaactgcacttatcagggcaaaagtatatgatggg

SEQ ID NO: 14831 - DNA, 81 bp, Glycine max
  Clone ID: 700963732H1
gtagccaatcagtgtttgggctctttttcttttagacccaccctttctcttctcttccctttcaacttcaactcaacaggc

SEQ ID NO: 14832 - DNA, 261 bp, Glycine max
  Clone ID: 700963733H1
aaatcacatagctagttgtttaaagtaagagagaagaaagaagcaaatggcaaactttccagttgttgacatggggaagcttaacaccgaagagagacctgcagccatggagattataaaagatgcctgtgagaactggggtttctttgagttggtgaaccatgggatatccattgagcttatggacacagtggagaagctcacaaaagagcattacaagaagactatggagcaaaggttcaaagaaatggtgaccagcaa

SEQ ID NO: 14833 - DNA, 261 bp, Glycine max
  Clone ID: 700963734H1
aaaataggaagcaacaacagcaacagcagcagctatagaccctagggaaatgatacaggaagatcaaggacagtgttcttctcaagcgatcaataactaccaccaagcctatcaagagcagcttctccttcagcaacagatgcaacaacaacaacaaaacaatgatatctttggtggaggaggaggattgaacatgtaccctggtgctgaagtttctccaatcatgaatcatcatcatcaaccatggtctatgactatgcc

SEQ ID NO: 14834 - DNA, 260 bp, Glycine max
  Clone ID: 700963735H1
atccacttatctgaaattctgaacagtacagttcttgcgttgtttcggaggatcaattgtttgattaagcaaaaaacttaatagtagttaaaagcaaatggggaatcttttttgttgtgtgcaagttgatcaatcaacagtggctataagagaaggatttggacgatttgagaaggtacttcagccaggatgccattgcatgccatggttccttggaaaacaacttgctggtcatctctctcttcggctacagcaactgg

SEQ ID NO: 14835 - DNA, 260 bp, Glycine max
  Clone ID: 700963736H1
atcttgctctatatcaaggcataataatgtttggtctgaggccacttcctcggaatctgttgaaatgctattaaaatctgttggacaggaggaatttatccctagagaaactgttatacaggagtctgatgcctgtgatgaactggtatgcttagctaagcaaatggagcccgatccaaaacctgatggtagaaatgaatttaaaaataatattactgatttacagcctacaggttttattgatgagaacttggctggat

SEQ ID NO: 14836 - DNA, 260 bp, Glycine max
  Clone ID: 700963737H1
caaatttgtagttgaacaacgatggtgctgccgctatttgctgctttcattctcttttttgcttttattccgaatggattgttagcagttccttccaccgtccccgcattctattggtcatcacattatgaactggcctctgaaaatggattgaaggaatctgtaaattaccaagtcatttctccaaaagatctagcaaaatctgttttttctgaagcaggctggtcaaattttctgtgcaaaggaaagaaacttcatga

SEQ ID NO: 14837 - DNA, 258 bp, Glycine max
  Clone ID: 700963738H1
gccataaagaagtttaatgttgcgaagaatgcccttgcacaagttgcatggaactttgttaatgatgggctgaggacatcgctctgcctgcaatttaagccacatcatattgcggcaggtgccattttccttgctgccaagttcttgaaagtgaagcttccatcagatggtgagaaggtttggtggcaagaatttgatgtcaccccacgtcaattagaggaagttagcaatcaaatgttggtaatctacgagcagaat

SEQ ID NO: 14838 - DNA, 259 bp, Glycine max
  Clone ID: 700963739H1
tcctcactcaagggttagggatgcgtcggaacagccctgcatactacagtcctccgcggcgaggatacggcggtggtggccgaggaggaggaggaggaggaggaggaggagggtccggcaggagggggttcggtggaggcaggcgcagggacagcaatgggagcctcttggttcgtaacattcccctcgattgcagacccgaggagcttcgcgtccctttcgagcgatttggacctgttcgtgacgtttacatacccaa

SEQ ID NO: 14839 - DNA, 257 bp, Glycine max
  Clone ID: 700963740H1
atccacttatctgaaattctgaacagtacagttcttgcgttgtttcggaggatcaattgtttgattaagcaaaaaacttaatagtagttaaaagcaaatggggaatcttttttgttgtgtgcaagttgatcaatcaacagtggctataagagaaggatttggacgatttgagaaggtacttcagccaggatgccattgcatgccatggttccttggaaaacaacttgctggtcatctctctcttcggctacagcaac

SEQ ID NO: 14840 - DNA, 259 bp, Glycine max
  Clone ID: 700963741H1
gcaggaacttatgatgagaagagattgtttggtgttaccacccttgatgttgttagggcaaaaactttctatgctgggaaagccaatgttccagttgctggtgttaatgtacctgttgtgggcggccatgcaggcattactattctgccactattttctcaagccacaccaaaagccaatcttgatgatgatgtcattaaggctcttacaaagaggacacaagatggaggaacagaagttgtagaagctaaggctggaa

SEQ ID NO: 14841 - DNA, 258 bp, Glycine max
  Clone ID: 700963743H1
gacagcgaacagagtttgagtgagtagtatggatcccgacggcgtggtcgcggcggaggcgcttatggcgtcgggtcggagttcggagaagctgagccttccatcactccaatccaaaatgaagtgcgatcccgaaggctacgaatcggagctactccttctctacaaccaattcaattcctcgctcgaactctttcagaaacaagccgccatgaacttcacctccatctccggcatcggcagcgaccccaccgtcgc

SEQ ID NO: 14842 - DNA, 256 bp, Glycine max
  Clone ID: 700963744H1
gcgctccgtttggttacagaatacaaacaaacaaatagaaaacccaaaataaccgagaaaagaaaattagatagagagaagaagaaagcgtatctggaattttcgtttcgttggtgtgtcgtgtgcgtgtggaggttcttttctttgagactttccttcaaattctagattgcttccctttcttttctttcccttataaccaccaacctctccctttcccccttttcatttcttcctcgattttccatttccataa

SEQ ID NO: 14843 - DNA, 259 bp, Glycine max
  Clone ID: 700963745H1
gcagagaggactttttcgctatgatgttaccgcctgtgaaaccaaggtgattcctggtgaatatggtttcgttgcccagcttaacgagggtcgtcacctcaagaagaggccaactgagttccgagttgataaggtccttcaaccctttgatgaaaacaaattcaactttaccaaagtcgggcaagaagaggtcctcttccaatttgaagctagcgaggatggacaagtccagttctttccaaatgctccagttgatgtt

SEQ ID NO: 14844 - DNA, 245 bp, Glycine max
  Clone ID: 700963746H1
aatggtttgagcaaaagccgaaaacctctgttgaagccttgccagatgagtgtctctttgagatctttaggaggttgccttctggggaagacaggagtgcatgtgcctgtgtttccaagcgatggcttatgcttctaagcagtatttgcaaaaatgaaatctgtgttaacaaaaatgccactgtagagaccattgaaaaggagggtgatgatgtagaatttggaggtgagggatatctctctcga

SEQ ID NO: 14845 - DNA, 262 bp, Glycine max
  Clone ID: 700963749H1
ctgaattctgaaaaaactggaacatgtcttcaactactgtggtaggctctatttctacaacagcagctttgacacccttgttgccatcatcacgtacaagtagaagcacatttggcgccaattccacctccacaagcttccccgctactccactctcctccaatctcctcttcttcaagctcaatcacacttcttcttcttcttccaaacgaacctcaaccttccatggcttcaagcgcttttcacccgtcatggagtggca

SEQ ID NO: 14846 - DNA, 258 bp, Glycine max
  Clone ID: 700963750H1
caaagacaccgatttaggggttaaaaaatatcgattaacctctgatatttctcttagctgcagtctgcagtgagaatcggaaaatctccgaacccgctacttcctatcctttcaaaagagtgtgactgtaatagtgagctaaacaacatcggcagctagatcgtcgaagaaaacgaaaaagaaaagctttgaaaatggctcaggagtcactctcagaaacccccgatatctcgcccccttcgtctactgcacaatcgc

SEQ ID NO: 14847 - DNA, 261 bp, Glycine max
  Clone ID: 700963751H1
taccactattcaattctctatatttaacctctttccctcattctcttctttcactttcacttcctcatggcatcaacaaagagcatgttcatgtccttcgccatcctcctcctcctcgctctcttctccgccaccgtgtccgctcagggctctccaacaccggctccggatgctggagcagctggatcagtctcgagctctgcctccgtcatcggtgctgcggttgtgttgtccatgcttgccatcttcaagcactgagtg

SEQ ID NO: 14848 - DNA, 261 bp, Glycine max
  Clone ID: 700963752H1
ttcaattccaactcctctgatcaaaatcctaggctcgttcttgaatccctaattcgatctcctcctcctcctccgaagaataaaaggaggatcgatgtgggcagcatcttgcctggcgtcgtgctgcgcggcctgcgcatgcgacgcctgcaggaccgtcgtttcgggaatcagccgtcgttccgcccggatcgcctactgcggcctcttcgccttctcccttgtcgtcgcctggatcctccgcgaggtcgccgctcctct

SEQ ID NO: 14849 - DNA, 258 bp, Glycine max
  Clone ID: 700963753H1
gtggctgtattgtttgatgatggagctaaatgtgatatcactgccttggaaagagagaagcttttaccactgactggtaattttcctgaagattcgcagtttccgtactatccagggcagagagtaaaggttaagtcctccagtgcttctaaatcaactagatggctatgtgacacttggagagacaatcatgatgaaggaactgtttgtgctgtggaagcaggcttggtgtatgttaattggatttctcatgttcta

SEQ ID NO: 14850 - DNA, 262 bp, Glycine max
  Clone ID: 700963754H1
ttcatatcatatcattcacattcatctctcttcttccatccatcatcgaagatataacaacattcgcgcgctcttcgtattttccttcttcaatccgcgcgacaccaaaaccctagatccggcgcaatcatcgggagagagaaagtttttgactttgagacaatattgctagagagaggaccggtggtgggcttggcaagaaatggatcctggtcgctatgctctgcatcaaggctgggataataacagcgctcttgaggga

SEQ ID NO: 14851 - DNA, 258 bp, Glycine max
  Clone ID: 700963756H1
gcgcaagtgaggaacaagcaagtgcttctaaaggactatgttaccggttttcccaaagaatccgacatgaatattgtcgaaagtaccataacattgaagcttccacaaggttccaatgatgtcttgctcaaaaatttgtacttgtcttgtgatccgtatatgaggaatctcatgaacaagcccgaaggccctcccaatagtcgtgcttacactcctggctctccattaataggatatggtgtgtctaaagtcctggaa

SEQ ID NO: 14852 - DNA, 259 bp, Glycine max
  Clone ID: 700963727H1
gtgaattcttatacttatctatgtagtattcttttgattatcttttactcatataatacttccaagaattccatcaaagctaaatctttcaaggtaatttaaggtatttaaatctgtgattgcagttcattggaatttttcaagaaacaattgtgcaagaactggttggggagctggtaagtacacattgattttgaatgctgatgacaaattgtaatgttttataattagggaactaaaaacaaggttaacagaacga

SEQ ID NO: 14853 - DNA, 283 bp, Glycine max
  Clone ID: 700963681H1
gcaagctcatcctagagttttaaaaatggcagcagcctcctccatggctctctcttccccatccttggctggcaaggccgtgaagctgggcccatcagcccccgaagtcgggagggtcagcatgaggaagaccgtcaccaagcaggcctctccggaagcccatggtacggcccagaccgcgtcaagtacttgggcccattctctggcgagcccccgtcctacctcactggcgagttcccaggtgactacggctgggacactgctgggctttcggccgaaccag

SEQ ID NO: 14854 - DNA, 245 bp, Glycine max
  Clone ID: 700963682H1
gtttgtagggaagacaatatgaaactgctattattttaaagctctaaatgttcaatccaactaaatgcccgatgattggtgtttcttttttaaaaaaaaaaaaaaaaaaaaaaaaaaaaaaaaaaaaaaagtaaaaaaaaacaaaaaaaaaagggggggggcccccaaaaaggagccctccccggcgggatatatcgcgggggggggtagggaggggggcacatttttcccaagaaggggccctt

SEQ ID NO: 14855 - DNA, 281 bp, Glycine max
  Clone ID: 700963684H1
cccgtttcgccttcgatcaaagggaagaacaaacattcaattcatggcggctgcaaagcttcaagctttatggaatcacccagctgggcctaaaaccattcacttctgggcacctacctttaagtggggcatcagcattgccaacattctgatttctcaaaaccacctgagaaactttcctatcctcagcaaatagcggtcacagctactggaattatctggtctcgttacagcactgtaatcaccccaaaaaattggtacctgtttagtgtaaacattgc

SEQ ID NO: 14856 - DNA, 280 bp, Glycine max
  Clone ID: 700963686H1
gttgcacacggcgcaaaggggaacaagaagaagaagatggtgtccttgaagcttcagaagcggctcgccgctagcgtcctaaagtgtggcagaggcaaggtctggctcgatccaaatgaagtcaatgaaatctccatggccaattctgacaaaacataagaaagttggttaaggatgggtttattatcaggaagccaactaagattcactctcgctctcgtgctcgtcgaatgaaggaggccaagaggaagggacgtcactctggctatggtaagcgtaa

SEQ ID NO: 14857 - DNA, 282 bp, Glycine max
  Clone ID: 700963688H1
gccaaagcatggcttctctctcttgctccgccaacgaccttgccccactcttcaacgacaccgccgccgccaactacctctgcgcccaattcgattccatttctagaaagctcgccgaaacaacctacgccgtcgacaacacctaccttctgttttcagcgtatcttgtcttcgccatgcagctcggcttcgccatgctctgcgccggctccgtcagagccaaaaacaccatgaacatcatgctcaccaacgtcctcgacgccgccgccggcggtctctcct

SEQ ID NO: 14858 - DNA, 278 bp, Glycine max
  Clone ID: 700963689H1
cgcatgatagaggcatgacatttgaggaagaacaataactaagcactaaccttcaaagttttccttcagagaagcttgatgctattgtacaaatcattaagaagagaaattcagcacttcacaccatgacgacgacattgaagtggcattgatagtgtggatgctgagactcgctgggagcttgatagatttgttaccaactataagaaaagtttgagcaaaaacaaaaggaaggctgaacttgctcgagctagagcagaagctttgcagcagaatgc

SEQ ID NO: 14859 - DNA, 280 bp, Glycine max
  Clone ID: 700963690H1
aaaaccgtgaccgtgtgtagaaccgacccgtataagaggtcaaatgatatcattggtaataaccaagtgatatgcaaggttgaggttgaaagtgaatgctcaattgtagacactgatttgacaatcttagctagcatgcttgtggataaggagtggatgagaggaagcaaattgaggaagccattgagaaagaccaaggtgtgagtgatttctttgtgtatggtgtcaatttgacatttctagacttggaagacaccaatgtgtatgacttgcaattgaa

SEQ ID NO: 14860 - DNA, 291 bp, Glycine max
  Clone ID: 700963696H1
acgtatttgcctcgtagtaatgcaagtttgagcgacagatccaaccttttcggctgaaagagcttcccttcatctcttccacatttcaatattgtcttttcttcttttatgtcatcaaaacacaaaaaagcatagtcaaaagctatcacttatacgcttatagttgttccaacacacaaagtgtgtgtgagtgtgagagagagacaaagagagtagtgatgggtggttgtgaagtagagtttgaggcagatcagtgcaagataccaaaactacccttgttgaaccctccaa

SEQ ID NO: 14861 - DNA, 250 bp, Glycine max
  Clone ID: 700963702H1
cgctcttgttcctccatttgtcttgcaaactttctgtcgcacaaataactctaaactaagcacttccatacacaaattttctctcccagaagaaatattttcatttcatttcgagtaaaagtaaaacacagttcctgatccatggcatctcgccgccgcatgttgttgaaggtcataatcctcggagacagcggggttggtaaaacatcactgatgaatcagtatgtgaatcgtaaatttagtaatcagt

SEQ ID NO: 14862 - DNA, 261 bp, Glycine max
  Clone ID: 700963704H1
gaagcaataagatgaaaatgaaagtgcttgttttgtttgttgctacagttttggtagcatatgaatgccatggctcagactaccagaagttccctctccaaatgaaaactgggtttggtgggcaatacagcaatgaggtggcatgtgccagttggaggcttggcgtggaagcaaacaacgtagtcaagtggcaaactgttcctgcagcttgcggagagtacatagctgactacgttctaggagaccaatatagatcagatt

SEQ ID NO: 14863 - DNA, 262 bp, Glycine max
  Clone ID: 700963705H1
aaggacacgggcattgaagatcctgaggttggaccagctattgcctttgctatcagagagcagctttatgagattgcaattcaaagtgtggtttcagcaagagaaagcagaatgagcaagaagggtcgtcgaggggctgaatatactccagtcagtaaaggaggtgcagcagcagtggacttggtcaagttgtttggtccgaaatctagtgtagttcggaaaagaaaggagtgggacgtatatgaacctattgtggacctac

SEQ ID NO: 14864 - DNA, 263 bp, Glycine max
  Clone ID: 700963707H1
cggctcgaggtatatattgatatatgtgtgtatttcctttgggcttgaaactcaaaactataataatgggttcttcttctcctccggacactagcaagagcataaagctagagcgatacaacagctacatcaggagactcaacagcaccaaactcctcaacgcctcctccaaactcctcttccgtgccactatcttagtcgcactcatcctcgtcttcctcttcaccttcaactaccctcccctcgccccagacttcacctcc

SEQ ID NO: 14865 - DNA, 262 bp, Glycine max
  Clone ID: 700963708H1
caccactttatatacccacgcaatagaagggagtgctactctcttcgccgctctctctctccttctcgctctttcagctttgacttttgttggaaactaaggcctaatcaaaatggtgaagttcacagctgaagagctacgtcgtattatggactataagcataatatccgtaatatgtctgtcattgctcatgttgatcacggaaaatcaaccctcactgattctcttgtggctgctgctggtattattgctcaagaagtt

SEQ ID NO: 14866 - DNA, 259 bp, Glycine max
  Clone ID: 700963709H1
ccttgagctaataattttgcacttatattcctgcctttacttggattctgtcgcaaaaggcaaatacatagcatcttgagcagttgagcaattgagctatcatacaaaagcaagcgaagagatcagttatgatgagcaattccaaacaaaagaagaaattgaaggcacacaagaaaaaggatgaatggttgaaggacatgaggggtaacctaagtttgctggctaccgtaattgcaactatgacctttcagagtgctat

SEQ ID NO: 14867 - DNA, 261 bp, Glycine max
  Clone ID: 700963712H1
ccctccttctatctttctgtgcttcaattctctcttccacagatgggcgttgccgttctttaccctcaagattctctcccacacaaaccatctactcattaccagaccataatccctcactttcccagcatgaaccccaagtctcatcggacttcccgaaaccgtaagaagcggcccgttcccggcccagctcggcccacaacatcctcgaaatcccaagtcaacaacaagccgccgcagcagcttgtcatgggtcaggtc

SEQ ID NO: 14868 - DNA, 260 bp, Glycine max
  Clone ID: 700963713H1
taaacatgagttttcagaactggtaaagcgggggtctacagcagaggacttaggtgcaggtcatgctgaagctgcaagggttcaaggtcttggttttgcaagagaaccacgcccttgggaagaatccggttcttctaagctttcacttagtgacacaccagctgaggtggaaaatgtatctatgccaaatcaaccagcaccaaagactgaagatgattcagaagatgaaagtagaagaaagagaagacgtgaggagagga

SEQ ID NO: 14869 - DNA, 254 bp, Glycine max
  Clone ID: 700963714H1
gaaaaatggcaacaatcatcgccggcaccccaactacatcaatcactcgcacaggtcatgtgctcaaacgacctgttggggcctcatcctctaccgttcttggtaagttttctccttaagagaaatgatattatgatttaaggctttagggagataataatatgatttctttctatttctagaataaaagagtaattaatctcttcccatttctgattgatttccttgtgctcaaaacgatgcatactcatgtt

SEQ ID NO: 14870 - DNA, 52 bp, Glycine max
  Clone ID: 700963716H1
gctgtaacaagatggatgctactacaccaaagtactccaaggccaagtatga

SEQ ID NO: 14871 - DNA, 261 bp, Glycine max
  Clone ID: 700963717H1
gcggttagcttcttcattcaatcctggtgcatctcagaaagacgtcccctgtactgtgcaatgttcaaccctttggcaacagtcatcactgcattgataagtgcaactttcctagaggaataggtgtacgttggaagtttggtaggggctgttggagttattgccggtttatatgttgtgctttggggtaaagccaaagagtttgctgagattaaaccagaggcaccacaatcatcaaacttactagatgatgagataagt

SEQ ID NO: 14872 - DNA, 261 bp, Glycine max
  Clone ID: 700963718H1
ggaaaagggtgtcatctttttagggtttccttgtgattcttgagactttaccttttctgggtttctttctcatgactctctttcttctttcttgtgcttagagataaaggggtgtttttgtttttttgaaatttgtttccttttaactggtggggttttagtgcagtctgtttttgttcagataaagtttgtattttttttggtttttggtttttgttttaatgtttttcagggctttttctctctctcactagagttgac

SEQ ID NO: 14873 - DNA, 251 bp, Glycine max
  Clone ID: 700963721H1
caaggttgaaccatgctcatttgctcaaccttctagggtattgcgaagaaggtgaagagaggcttcttgtgtatgagttcatggctcacggatctttgcaccaacacttgcatggaacaaaccaagtgttgagagagcaactagattggataagaagggtcacaattgcagttcaagcggcacgtggaatcgaatacttgcatggatatgcttgccctccagtgattcatagagacatcaagtcctcaaac

SEQ ID NO: 14874 - DNA, 184 bp, Glycine max
  Clone ID: 700963722H1
cttattccctcccaaacattaatctctttcgatttttctcctaaagctgcttcctttcgctttttttctctactgggtacgcctccacctctccctttcttttccctctttttggctcaattctcgttcttccgttctgatctcaaacacctaactttatgtttctccaattgttttcaccagt

SEQ ID NO: 14875 - DNA, 260 bp, Glycine max
  Clone ID: 700963725H1
aaaaaaaaagaagagaaaaacaaaatgggcagggtttggacttcgatgatagcattgttgctttgcctgatgacatcatcggttcggggcgaggacccttacatttactacacatggaacgtgacctacggcaccattgccccattgggtgtcccccaacagggtatcctcatcaatggtcagtttcccggccccgaaatcaactccaccagcaacaacaacgtggtcatcaatgtcttcaacaacctcgatgagcctct

SEQ ID NO: 14876 - DNA, 259 bp, Glycine max
  Clone ID: 700963726H1
ctatcttcttcaccttgctctcaccttctgggtaatgtttgaaacttggtgttagctgagctgtttgacaaaaatgaatattgcacaagttacagcatggcagcctgggatttgtgtgaaaaatatgtctcagttgcaccggcttcaatctaaaccatgtgttataccaaagagttttggtcctctcacttgtgttctactgagcttaagagcaagacaatcgtttagctcgaaatgttggcccattatacaatctcgg

SEQ ID NO: 14877 - DNA, 283 bp, Glycine max
  Clone ID: 700963679H1
tggaatgtagagtggagcttcttcccttgttgctgttgttgttgatgttggtgaacgatcaatgttggaaatggagaaggatgttgattccaagctgaagattcacgggaattcctcatctaccaatggtgctgggaatgtacgaggatcaaaagctttacttttagggcaccccaggagaattacactatccaggactttgaattggagcatatctatggtgttggctcttattctaaggttgtgagggcaacgacgatggacactggaattgtgtacgcat

SEQ ID NO: 14878 - DNA, 286 bp, Glycine max
  Clone ID: 700963649H1
cagttccatcaatgaataccggtgaagcaccggctctgaaggcagagcaagaaaaaactactctacaaaatcctcctcttcaagatcagatgctggatccagaatactcggtagctcaacaagctcaacattcagcttcaaagtcaccagctgcattttatcagattctgagagtggagatgccaagttaaatacttcatcaaaggttactgatcatgagacgaacaaaacaatttctgagcaccttgattccaacaaaacaaagggaagaaaaccggttgaccgt

SEQ ID NO: 14879 - DNA, 284 bp, Glycine max
  Clone ID: 700963651H1
aatacgtgcatacatagctatctatttatctatagcaagtacgtcaagagacacgtggtacccttgctagagtgccattctgtggtttctttctatctttctttctgcatcacatcacaatttgccttgcctcgtgtcctttttcttctttctctccaaaaatctcacacacacaggtatctagcaaatgggttctcaccaacaagaaccatggctattggagaatgggaaaccaagggttttgaccaaggcagacaggcatggccgttctgcacacagaatgt

SEQ ID NO: 14880 - DNA, 285 bp, Glycine max
  Clone ID: 700963652H1
gattaaagcaagtgtagagcattggagctctgctgtagcaagaacttggaagccgattgaacccagcatctggttgtaatatggagcaaagcactatggccatagttatcgcaaatgttggatggcattctctgtatcattggaatcgcaaaattctgattccctagtatgtgctttccttcccttcccccccccccccctcctttgctaggggttttggaatttggggctttcctaatatccaaatttcagttttaggaacaacaatggatcttggttttagtt

SEQ ID NO: 14881 - DNA, 217 bp, Glycine max
  Clone ID: 700963654H1
ggagtacagcgccacgggtgctccagtctatcgcggagtcctgcatggacgtagtctcgtcatcgctccccaagcttactccaccacgtaacgttaccagtttcctccatctgatacataccacacactctctattatcgctactcttactccctagtgagatgccggatgtggtagcatgatcaatctgagtgctgccaaatcacaacgctgggac

SEQ ID NO: 14882 - DNA, 274 bp, Glycine max
  Clone ID: 700963655H1
tctctctctgcttcacttgcttgaagcaatggccaaagccttggcatcagtgctgctgtttctcctcgtagctgtgagtaatgtgtttgctgtagagcttgaacttgaaactcttccaccctcttagcctcaccctcaccctgttcactccccacaccagcacctcttcacccaccagcagatgctcctcacccacaccaccagcaccaccaccagcaccctccatcaccagcaccagcagcagcacctgttccttcaccttctcaccacaatt

SEQ ID NO: 14883 - DNA, 284 bp, Glycine max
  Clone ID: 700963656H1
cttcttcccaaccactactactcactcactgcagatctcaattgcatcgctgtccatggctaccatcgttagcatcaaggcccgccagatcttcgacagtcgtggcaatccaactgtcgaggtggatttgacttgctccgatggtacttttccagagctgctgttccaagtggtgcatccactgggatttatgaggcccttgaattgagagatggaggatctgactaccttggaaagggtgtatcaaaggctgttgacaatgtgaacaccgtcattggccctgc

SEQ ID NO: 14884 - DNA, 283 bp, Glycine max
  Clone ID: 700963658H1
aaaaagtttgctgcgccctgatttccatgtttctgcacaaaactgttgggttcgcaaaggtggtgcttataccggtgaggttagtgctgaaatgcttgttaatttgggaattccttgggttattattggtcactctgaacggaggcagctttaaatgaatcaaacgagtttgtgggagataaagttgcctatgcacttcaacaaggtctaaaagttattgcatgcattggggagactctcgaacagcgtgaagctggtacaacaacggctgttgtttctgagc

SEQ ID NO: 14885 - DNA, 282 bp, Glycine max
  Clone ID: 700963660H1
cttaagtataagtctgaagaaggggtgagagtgttgttgctggtttcggatgataaaacttcgcacgataaggttttcctcaagacggctggtgtgatggggactcatgatgaggaaaccaggaagttttttaagcattcttctgttatggtgttctgtcgcctcggtatgccagcagcaagatgagcttcttgaagcaacaggagataggattctttgtgagctagttttcagtggagtcaaatgtgaaatgccctgtattttgtggcctaagctctaaac

SEQ ID NO: 14886 - DNA, 281 bp, Glycine max
  Clone ID: 700963661H1
agagggagtaacccctccaagcttcaattatctacattatccacattcctagctagctttatccacatctacaaaatagtccttagatttccctctctctttcttttgtataactgtgtcatatcttagatctcctttcacttccttcaaaaacaaaatcatgggtctgagagacattggtgcttcactgcctcctgggtttcggttttatccgagtgatgaggaattggtctgccattacctctacaaaaagatcgcaaatgaggaagttctgaagggta

SEQ ID NO: 14887 - DNA, 289 bp, Glycine max
  Clone ID: 700963663H1
gaaataccaagatgtacacatgtgcaatttttggtaccccaaaatgcttggagtatgcatgtatgtgaatttagccgaggagatgtgtgtgatgtaagtaacaaatacaccttggaagtacgtgtaaataatctaggtaacaaagctgccttgttgtatatgggtgcattttttcggttaataggatgtcttccgcaagtgaacgttcgtaaggaaacatgcgcataagcttgctctaaatttacattgatgtttgtatttatgggaggaggttatatgccatttttgc

SEQ ID NO: 14888 - DNA, 288 bp, Glycine max
  Clone ID: 700963664H1
agcaaatgcaatactactaaggcaaactaaagaaccaaacacaaatcctctcatttaccttgtctctctgccttcaaaattttcaaacaagaaaagaaaggaattctgctccaatataattacctctatatctattccacaatctcagattctgtcctagctcacaatggttacattcttcagaaatttggctttcagctatgcttttcttgcaatttttctctcagcaggtattggagtttttctaggtgttgaatctttcggaatcaactatggccaagtggccaa

SEQ ID NO: 14889 - DNA, 282 bp, Glycine max
  Clone ID: 700963666H1
taaacccctctctcttatcgaagaagctgagcgcaaagcagcagaaaatgggtcttgtgatgcaatgctcaagctatggcacttgtatttctatttgtatctctcatcgtttcccccaaacctctctatcttttcacggtgagttccttgctccttcaatcaactaaccgaacattacacttaattcgtatttctttccagttccagctcaccactggaaccgattcaagagtgcacgaaggaatcagaggatgatggttctttgtagcgtggacgaccgaa

SEQ ID NO: 14890 - DNA, 282 bp, Glycine max
  Clone ID: 700963668H1
tatctctcctctatccttcgtgcccacagtcaataatgtctcttccaactccatcgctcccccttctccgttgcatccattttcacgattccaatccattaaaaatagaaagccaaaaccccatcatattcctagaatcacatgcagtgaaaccaaaacaatccaacaccaaaccctaattcccagggagaacctccacatattgtaggacataggaggaacgttctacttggcctaggagggctttgtggtgctgttactcttaacaacacaacccttttg

SEQ ID NO: 14891 - DNA, 282 bp, Glycine max
  Clone ID: 700963669H1
accaacgcggccagtcccactcgctcccaacaacaagccacccaaagcccaagaacaccctcgtcaaggcccagtcccaggcccacctctttctccgacaacccctccacctcctacagcagcaacagcgcaccctacagcggctccacggctatcgcctctcctccgacaccaccatctcaagcttctcctccctcacctccctccgtgacactctccccgaaaaccctcacatctatgacttctccgaaatctgtgccgccaccaacaacttcctcgcca

SEQ ID NO: 14892 - DNA, 278 bp, Glycine max
  Clone ID: 700963670H1
ccaaaccaaagcatgccatcattcatggctttcctttcacatccttatttctttgcagctttgtctgcatctttgactcttttggtggtccaacttctgttcagaaaactgaacaaaaggcatagtagaaagaagtaccaccctgttctggcaccatcttcaatcagatgctcaacttcaacaggctgcaccattatatgactgatcttgctgccaagcacaggacttacaggctgctcaaccctttcagatatgaggtttacaccactgagccaact

SEQ ID NO: 14893 - DNA, 275 bp, Glycine max
  Clone ID: 700963671H1
ctgagctttgattagtgtggcctagttgttgttttctcgatgagaaaggcatcttccactatgcattgcgcacttctgcgcttttgggttcccttgttgctgcttgctagcttcagctatgctccttctgtttcggccacaactgaatttcagggaatgaagtgaacacagatgggaaggtgataaatgaagagttagcaaaaccaagtctaaaaggacatgatgaagaagcaaagttcaaaggattttttccaaaaccaattcctatagttaaa

SEQ ID NO: 14894 - DNA, 278 bp, Glycine max
  Clone ID: 700963672H1
gtcaagctccttttactccccgcaacaaaacatttcctagttgcagattttttcttcttcaaaaatttgtttatctttatcctaatttgatttggctttaaggttttccattatagcggttttctttttattatttgttgttattatatgacgtaatttcaatccttttcataatgactccataatggcgattagtgaagtttctgagctgtgtgaacgatttagtataaagtatacgatgcatcgtttctggttctggatgttcatgttcgagcaaa

SEQ ID NO: 14895 - DNA, 277 bp, Glycine max
  Clone ID: 700963674H1
attcaattcaacttccaaccattatttaatccgcaactataaattcaagtcagagtcctaccgaaaaaaaaaaggtggcgaatcggaatcgagttacaatgaaatcaaatgatgttacacgttggttatgttcgatactattttgcaagttttagtttgtgttcaatttgaaggatgtgtgggatccaagactaagaaaacggacgaggcatacgtcactcttttgtacggggatgaattcttgttgggtgttcgagttctgggcaaatcaatacgg

SEQ ID NO: 14896 - DNA, 279 bp, Glycine max
  Clone ID: 700963675H1
gtgagagaagaaaagtggaataaattcacccttgatgtgtaaatttgactgtttttagtgctttgtgatcaatgtagccgacaacttgtagaataaggcctttgttgttgttgttgttgttgtagtgctttgtgagtgttaatttatagcctatagcacagatgaagatttgttgtgtattatttaagtatgcttaactattttcatttcttgtttcaacaaatcaaacattgacaatcaaatagaggttagagaagctactattttccattcaacctt

SEQ ID NO: 14897 - DNA, 277 bp, Glycine max
  Clone ID: 700963676H1
attttctctacaccaagtctcatgcctcaaagtttctgcgtttaactcggctgctatatcttttctcagctctcctttgatatgtttaagctctgatttggaccttattgaggatatctttggttagggcgagtgattgtctaagaactcctcattctccttctccacaaaatttgtcctcctaaaagaggattgtcccacttctaccaatatcatagcatctgatccatatgaaagtcaaaaaggggtctcacctattgtcgactgtagagtgtaa

SEQ ID NO: 14898 - DNA, 223 bp, Glycine max
  Clone ID: 700963677H1
ttcatcaccaaagcgttcaatccagacgcagggcgagatacgcactgacggtacctatacctgacgatgtgacatacgtatatcttctaactagccaggtccgtagtacctggtctgccgcggtagccctgatccgaagatcgtgaatcatgatgatcgtatgcagtagacgggtgcacatggagttcgctcctaaggccatctcgccagtagggcgtgctca

SEQ ID NO: 14899 - DNA, 278 bp, Glycine max
  Clone ID: 700963678H1
atcattaaccaataaccaataaatacattaatcaccatggggaagtactttgctgttgttgctctctttgtctcagctttgtgcttctcctctatcttggctcgtaagacacctgcccttgataaattcttcgttgagggcaagatttctgtgacccttgccacttcgcatttgagtccaggctcagtttccccttggaaggtgttaaggtaagcctgcaatgtctgaggagtgagaatgataccgtgacatatgtgaaggagggcaaaactgatgca

SEQ ID NO: 14900 - DNA, 284 bp, Glycine max
  Clone ID: 700963646H1
aagagagtgactgatgttctctcttttccgtatggtattactttctctgatgagctagcatctataattctgtttgaaccagatactcctgaggaaaagggtactttattctcatattggtagtagaggacgttatgatcctgtatggatattgcattttcaattcatagtctctcaaaggcttatgtagcgcctgtggaagttgctggttcagggtggcttgcgattgcatttgttagcttgactacccagaccataggataagaagattagcgtatggcact

SEQ ID NO: 14901 - DNA, 290 bp, Glycine max
  Clone ID: 700963618H1
aaaccaccaagccctaaaaaagcattatcctccttctttgttctttgcttttctcttttctcttttcctctgaaaacacaccctctttacagatcctgttatttctctctctctctctccacaatttcttttctttcttgctttgtagctaccaaacaatttgctcaatatttctaaaggtttcagctttagatctgagggagctaaggttgtttgaagcaatggagacaccccatgtctcttgatctttcacatgagatgaaagtttcttgctttcttcttctttgacc

SEQ ID NO: 14902 - DNA, 286 bp, Glycine max
  Clone ID: 700963619H1
ctgcaccgtaacgtcgtcgctcatgatgacgctacggtgcgccggcgaattgaggactggtagagtgcgccaaggctgtttcctctcggaaactttgacgacgcgatgatcaccatgggaagctctccgcggtttcccatgtacgaaaacgacttggctggggcagacccgttgcgattcggagtgggaaagcgaacaagttcgacggaaagatctccgcgtttccggggagagagggaaacggcagcgtcgatttggaggtcgttttggccccggcgaccatggc

SEQ ID NO: 14903 - DNA, 288 bp, Glycine max
  Clone ID: 700963620H1
gtgaggtctcttatatcattgtattctgaagtgggaagaagtgcagactctttgtcccagtactttggggaggatccagctagatgcccttttgaacaagtgacgcaaatccttgttgtctttgtcaagatgttcaacaagtcaagggaggagatgaaaggcaggcagatgctgaaaaaaagaaattagagaaagaagcattgaaggaaaggacagcaaataactcgctttcaaaaaaagatggcgttcgatagatgcctaaacaagcaagccgcatggttactttca

SEQ ID NO: 14904 - DNA, 287 bp, Glycine max
  Clone ID: 700963621H1
attctcactatagagcccaaactccattccttttctttcttttttagtcacaagtgtagtgttgcattgagaaattaactaagactaattaaccaattagcaccaatggcgtcgaagaagaacacggttgtttttgaggactacttccctgcaagatggagaaactgggcactgaggggttcatgaaggagctgacaaacggatttcagttgctgatggacagagagaagaaggtgataacgtttgagagcttgaagaagaactctgcattgcttgggttggaaggg

SEQ ID NO: 14905 - DNA, 287 bp, Glycine max
  Clone ID: 700963622H1
atcggtgttcacttgatccttcataagtcgtcatcatcatcatcatcatcaccgttgattgaagaagatgccgatcagaaacatcgccatcggaaggcctgaagaggctactcaccccgacacgttgaaggcggggttggctgagttcatctcaccttgatcttcgtgttcgccggttcaggttccggcatcgcctacaacaagctcaccgacaacggcgccgccactcccgccggcctcatctccgcttccatcgcccatgctttcgccctcttcgtcgccgtctc

SEQ ID NO: 14906 - DNA, 190 bp, Glycine max
  Clone ID: 700963623H1
gattagttagctacgtgtcagggagtagttgtgtgcatcgaatgttcctatgaatggaacgcgtgctttaagtaaacgctgtagcagtcaaagtgggaatggatatcgattgggatggatttgcgaagttactgatctccgattaagatcataggtgtgctcaaatgctacgtcgcactattcgacgatg

SEQ ID NO: 14907 - DNA, 249 bp, Glycine max
  Clone ID: 700963624H1
agtaccctccttaatatgccttctctagttgggggaaaccatcagcagttttctgcccagcagcaaaatccccttttgcagcagtctggtattggacttggggtccagtccacaagtctcgttggtatttcttctgcttcactacagcagttaccaatcctgtccattccccctctagtcaacagccattgatgccaggtgtttctatagatgcagatgttggcaattctaagattgacgaacagcagc

SEQ ID NO: 14908 - DNA, 287 bp, Glycine max
  Clone ID: 700963625H1
attttgatgatgttgataatctatggcttgaacctctatcctggcagggaataggatgtacaaaaatcacaaaagcaagaaatgaaggttccatcaatgggaattcagaatcaagatcatatcttgaaaagaagcttgtgttttgttttggttctatgttgcatcccaaatgttacttccttttagggacgatacttactctctacatctgagatacagcaggcataagagatagctacacgaatggtcattcagtatgggagtggacctgatgacagtcctgcaat

SEQ ID NO: 14909 - DNA, 284 bp, Glycine max
  Clone ID: 700963626H1
gtttggcagaaagctgtttttgtgtaccagaactaatttcctcttcatttgctttaatcaggaaggacagtcgttatactgaaagagacgcagcggtggttgtaaggcagatgctcaaggttgcagctgagtgtcatttacatggtttggtacacgggacatgaaaccagagaattttctttttaaatcaaccaaagaagattcacctttaaaggccactgattttggtttgtcagatttcataaaacctggaaaaaagtttcatgatattgttggcagtgctt

SEQ ID NO: 14910 - DNA, 285 bp, Glycine max
  Clone ID: 700963627H1
attcacccgcacaacaaagtaaattacagtgcaggggctcaattatggagaaagcaattcaaagacagatagttctgcttgaacatcttcaacccatttcttcaagttcaaatttttcctctcaaacccatcaatctacggatctctcagcttcttatgttttgctgggaattcttcgcatggtcaaacaggtggatcagatgatgacgtggtgattgtagctgcatatcgtactgccatctgcaaagcaaagcgtgggggctttaaggatacccttccagatga

SEQ ID NO: 14911 - DNA, 289 bp, Glycine max
  Clone ID: 700963629H1
attccattttccaattcaaaaccctaactccgttcgaagcaccaaatcgtgatggcaccaaaggcagagaagaagccagcagagaagaagcctgtggaggagaagaaatcgacggtgggagacaaggctccggcggagaagaagccaaaggccggaagaagcttccgaagagggaggcgccggcggagaaggtaagaagaagaagagaaacaagaagagcgtggagacatacaagatctacatcttcaaggttctgaagcaggttcaccctgacattggtatctcaagc

SEQ ID NO: 14912 - DNA, 203 bp, Glycine max
  Clone ID: 700963630H1
acaattttcagcttggaaaatttttccatcctcagatttcggtgttgtcaatcttgtaaaagagcatatgttgtaggacccttcggagtctgttagtgtaaattttatcatgcttgagttattattggcttcacacataaattgcgtgtaactgtaaccctggctgagagccataaattcgaataaatcttttagttgctgcc

SEQ ID NO: 14913 - DNA, 289 bp, Glycine max
  Clone ID: 700963631H1
caacactttccacttgtctccgaattagttatcttgagaaacattattcccattgctatatattatggctagcatgaaggttacatgggtggttgtgatcatgtgcatggccgtggtgggtgcaccgatgatggcgcaaccatgacatgcaatgagtgacggtgaacatggcacagtgcctatcctacctgatgcagggaggaacaccttcaacactttgctgcagcggagtcaagaacattcttggctctgctgtcaccaccgttgacaaacaaactgtgtgcaactg

SEQ ID NO: 14914 - DNA, 249 bp, Glycine max
  Clone ID: 700963632H1
cccctgcttctgtcaactgcaatggttcctcaacctctgctaacccttttcctctttctctcccttctctcaattgtcaactcctctccttcccaacaccttcagatcgccaatgctgaacgcaggattgacttgacttctcacattattaaggtcgcttgacgttgcagggtgaaaattcggggaaatcttggacttcagctatgcgtgtcgcgcgatctatcgctcaggtggtatttctagcaatag

SEQ ID NO: 14915 - DNA, 284 bp, Glycine max
  Clone ID: 700963635H1
gcaaaatgctcctgtatcccttcctatggaaaccttcaagagttatgttctcaaggatcccatcggagttgttgcattaattactccatggaactatcctctattgatggctacatggaaagttgctcctgctctagctgctggttgtacacaatattgaagccatctgaattggcatctgtgacctgtttggagctggctgaaatatgcagagaagttggccttcctccaggggtattaaacattgttactggattaggcaatgaagctggtgctcctttgtc

SEQ ID NO: 14916 - DNA, 285 bp, Glycine max
  Clone ID: 700963636H1
aaaaaatttaaaattaaaaaaaagtgctctttttgtgaattttgagccatttgccaccgacagatttcgatcttctccgtgccaaagttgtaatcttttcgaattttggcgaggtgggtcgatctgatttcgctcgaataattgcgggttcattttgatctgaaaaaggaaaagagaaaaaaagattgggttatttctgattcaagattttgtccttttttgaaatggtctatttccatagctcaatctctctctgcaagttcgttgatcaatcatctttcatgg

SEQ ID NO: 14917 - DNA, 278 bp, Glycine max
  Clone ID: 700963638H1
tccacatctccagaagctgatatggacaatgaagagagaataatctacacttatcagaatgcttttcatggagttgcagccaagttaactgaaggagaagctaagaagctagaggctgaagaaggtgttgtggccatattccctgatacaagtatgagctacacaccacaagaagtccaatattccttggtcttgaaccagcaaaaagcactaacatgtggtcagagaagctagctggccatgatgttatagtgggagtggtagacactgggatttgg

SEQ ID NO: 14918 - DNA, 282 bp, Glycine max
  Clone ID: 700963639H1
cacagatcaacatttttttttttggtgggtagcagtgaggataaaaaatggctatggccacagctgtcgtgtgtcctcagaacatcaccggagccatcgtgagctcacctagcaagaccaagaagagagtggtacacgggagaggcataaatcatttgggggactgaaggctaacaatggtgttgtctctttggggattcctatgagcactgagaagtgctttgctaaggttgtgagctcagtgaaagcagctaacatcaaatgggaaaggaaaaggagggg

SEQ ID NO: 14919 - DNA, 285 bp, Glycine max
  Clone ID: 700963640H1
gtcgtttccccgatcccggcgaatcgaactccaacggttctagaaatcggcgaagaccaactgcgactagcgccaatgcggagttcgaattccgaatcctaagacggaaactggaatcgctggttccgcgatcctccgtctccggcgccgggatgactccgcaggtcgcgttgtagctcgcgactgatctcgccgaagcagaggttcgccgtctccagcttccggccggaattgcgtccctgaattgttccgtttttttatttgttgttttcgagagttgaaatt

SEQ ID NO: 14920 - DNA, 280 bp, Glycine max
  unsure (1)..(280): unsure at all n locations
  Clone ID: 700963641H1
attagttttgggccaaatttcgaacaccaaggaaaaaaatgatcttgctgactcaacaagtgcacccacttctcaccttttcctctacctataagtcttattctccattgcacccccatgttcaactcaagtcaggggctggtgnggttacccatgttcccaagtgcccattatgcccttttgcaaaggaaggtcttacaggatgatgaggatagggagcaggtgttcctcttctgctgcagcacaggctccgttgccatctgacccagataaggaaaat

SEQ ID NO: 14921 - DNA, 284 bp, Glycine max
  Clone ID: 700963642H1
gcagaatcttggagacaaagcagtgatgtgtcataggctaaatttcagaactgcagtattttactgccatgaagtccgtgaaacaacagctttcatggttccattggtggctggtgatggaaccaaaactcaggcacttgctatttgccatcaaatacttctggaatgaatcatcaaatgcttcatcaacttatgggagttgatcctggaactaaccctgtttgccatttccttggaagcaaggccattttatgggtacccaatttatctgtggacactgccta

SEQ ID NO: 14922 - DNA, 282 bp, Glycine max
  Clone ID: 700963643H1
gtttgaaagcaaaagggttgaggaacagaatgaggcaaaggcagctacaactgaaacagtagagagtgtgaaagttgataatgatagctcaatagttgatgacaagaaggaagagaaaactgactcaaaggtggaagaaatctctagagctttaatgaacctgttagagaaacattggcatctaaatttgaagaggaaactgttgaacctggagcggataaggtagagaaagaacaaactgtggagcctgagaaaactgaggaggttcaagccaccaaggaa

SEQ ID NO: 14923 - DNA, 293 bp, Glycine max
  Clone ID: 700963617H1
tagagctgctgcgttgctaaaacgcaccggtttgttcctgttctcgttcaaaagaaaactgacacaagtgaggcttggtgcataaacatcaatggcagaaaaaccccaaccggttcgggttctctactgcggcgtgtgcagtttgccccccgaatacgcgaattcggatccgatttcgagaaatgcaaaccctggttgatccaaaacgtccctgacctataccctgatcttctcaaagagaaggaagctgataaagttgctgacaaactacaaagtacgggtatatctggagc

SEQ ID NO: 14924 - DNA, 260 bp, Glycine max
  Clone ID: 700963589H1
agcggttgatcacagtggtgtggtgcgcggtggcggtgctactgtgcgccgcggcgggcgcgtcgtgggtggaggaggcggcgaacccgatacgaatggtggcgggggtggaggcagaggaggttcgggtgatacggcagtgccggcgcgcgctgaagtttgctaggttcatgagcaggttcgggaagagttaccgaagcgaggaagagatgagggagaggtacgagatattctcgcaaaacctcaggttcatccgctcc

SEQ ID NO: 14925 - DNA, 259 bp, Glycine max
  Clone ID: 700963590H1
attcactctttctctctcccatccctttctctatgctcaaatatatatacaataaaactctacaactggccaaaaaaatcagcttttgctccctgacatattagtatacaatacatagtttttatgtgttgtgtagcactttagattactacttactagagtgaaaagcgagaggcagaagagaggaagggagacatatggaggaggtgtttgtagcaatgaaactggttttttcagttgctgtagtggggattctaag

SEQ ID NO: 14926 - DNA, 260 bp, Glycine max
  Clone ID: 700963591H1
agtaattgttcggctctcgcaaatacgagaaggaacaaaacaccgcggaagcaaccatggccgaagcagaacacaacgatcccacctcgccggagcgcgaggtccaaaccaaaagcaacaagaagaaactccgcaagaggaaaaggcctcacaagaccgagcagaaacgagatgaggacaagaacgatgctaacattgatagtgcccaaacacaaaccgaagatgaagaagaagaacaaaaagaagaagacacaaacaac

SEQ ID NO: 14927 - DNA, 261 bp, Glycine max
  Clone ID: 700963592H1
actttcaacccaatccaatcctcgcacacatgcatgctgtatctgccaaagttggggccaagtcataactacatttccattgttacgattctttctttccatcccaaccacttacacagcgtctgatccaatttctttctctcaccatggatcatcgcaaaccattgttacccacttcctctgacgatgctccaaatccacgcactcggaaggaccttgttctaatgatttgcggtttgtttttgctctcttcccttgttg

SEQ ID NO: 14928 - DNA, 260 bp, Glycine max
  Clone ID: 700963593H1
attctagctctttcagctttgacttttgttggaaactaaggcctaatcaaaatggtgaagttcacagctgaagagctacgtcgtattatggactataagcataatatccgtaatatgtctgtcattgctcatgttgatcacggaaaatcaaccctcactgattctcttgtggctgctgctggtattattgctcaagaagttgccggtgatgtccgtatgactgatacccgtgcagatgaagctgagcgtggcattaccat

SEQ ID NO: 14929 - DNA, 263 bp, Glycine max
  Clone ID: 700963594H1
agcacctgacttgatataaagacggagagggtttctagttaggtttaagcgtcgagcctctgttctgttcatttgcatttccatttttcacactctctctgcccatgaaccatgtggacacttcgtcgagcttctcttcgtctcagtacgagccaaggacttaacgcgggagctacccgtgcttcggctgtcaaattagtgccaatcactgttgaagaaaatgaggctggtatccctcagtctcgtcaaatcactcacagtag

SEQ ID NO: 14930 - DNA, 262 bp, Glycine max
  Clone ID: 700963595H1
gtgagtgatcggtgttcacttgatctcatcataatcgtcagcgtcaattgaagaagatgccgatcagaaacatcgccgtcggaacgcctgaagaggcgactcaccccgacacgttgaaggcggctttggctgagttcatctcaaccttcatcttcgtgttcgccggctcaggctccggcatcgcctacaacaagctcaccgacaacggcgctgccacccctgccggcctcatctccgcctccatcgcccatgcattcgccct

SEQ ID NO: 14931 - DNA, 265 bp, Glycine max
  Clone ID: 700963596H1
atacgaccagtagattcagcttacaacgctatcaatctcatcgtgaaggaaactgtaaaagtacttgagtactcactaagtacagttacagaaggcactgatgcaattgcaactacacgtgttgtaattcgtagagagaataagcaatcaccaactcctgctttgaatggaaacgtaatttatccaacatttagtggaaccggagaacgggtggatgttgttacttcaagtgtagaggcttatcttactgcactaaacaaaatgc

SEQ ID NO: 14932 - DNA, 283 bp, Glycine max
  Clone ID: 700963601H1
accgattccactcactcaaccatgtcgccgattcacgcgttttgagctcatagaacaaccacctttctaccactcctgctactctttcccttccttcgtcctccaagactcactctctctcgacctcgacctcttgccacttcccagccacttcgacgtttcgcagatctggtgcacgcgccgtcgttcgcttaccggcgcgtggagaggcatctcgagaatgagttgcgtttgcagagcctctctgaccgtgtggcggactggagtcgcggttcaccgtgtg

SEQ ID NO: 14933 - DNA, 291 bp, Glycine max
  Clone ID: 700963602H1
caaagaagaaaaaatgggttcctctttgtggacttgtctgattttgttatcacttgcttctgcttccttcgccgccaacccaagaacaccaattgatgtgccatttggcagaaactatgtgcctacttgggcctttgatcacatcaaatacctcaaggtggttctgagattcagcttcatcttgataagtacactggtactggcttccaatccaaaggatcctacctgtttggtcacttcagcatgtacataaaattggttcctggtgattcagctggcacagtcactgct

SEQ ID NO: 14934 - DNA, 291 bp, Glycine max
  Clone ID: 700963603H1
ctcgagccgcttcaacacagtcggcaaaatctttcaccaccaacacacagccatggcaggctctcaccttctttctcactcaccctcccttcccaaaacctataactactccttaaaccaaaaccctttatcccaaaatcttttttttccacccctagattcaatagctccacaaaatcgcgtgttctcagagctgttctctcccaaaacgctgcaaaaaccgcggtagaggacacaaagaacgctcattttcagcattgtttcaccaaatccgaagatgggtatctgtac

SEQ ID NO: 14935 - DNA, 279 bp, Glycine max
  Clone ID: 700963604H1
agactacgtcattacggtcccaaacaaagaacaaccctttctagcaagtaaacccaagttcccttctctcttcacggttacattgctctctctctctctacacatatatttctctctctctctctacacgttcgatctctcgcttctgaatctcaacgatggtgctcgatgcgactattatctatatagacaattcagaatgtatgcgtaacggggatcactctccttctcgatttcaagcacacacagacgctgtcaatcttatgtgcggtgataaaa

SEQ ID NO: 14936 - DNA, 283 bp, Glycine max
  Clone ID: 700963606H1
cgttacacaaactatcatggccacggcaacagcagctgccacctcgtcctttatggggacgcgtctcctggaggctcactccggagcggggcgagtgcacgcccgattcggcttcggcaagaaaaaggctcccgccccaaagaaagcctccagggatcgggccgagacaccgacagacccctttggtatccgggcgccaaagcgcccgaatacctcgatgggagtcttgtcggagactacgggttcgatccgtttgggctagggaagcccgcggagtacctgc

SEQ ID NO: 14937 - DNA, 285 bp, Glycine max
  Clone ID: 700963608H1
attctactcactcacacacacacacactctctttccatgggtccgtttcgtaaacccttccttgcatttctctcggttgttctatttctgggtctctatgaggcagcagcagaacagactcagactcacaagagtacttacattgtacacgtgggaaatcggagatgcccgagagcttcgagcaccacgctgtgtggtatgagtcgtcactgaagaccgtgtctgactcggcggagatgatttacacctacgacaacgccatccacggctacgcgacgagattaa

SEQ ID NO: 14938 - DNA, 289 bp, Glycine max
  Clone ID: 700963609H1
cacaaggaccatccttttcttgaaagatgatggcaccttaaagccattggccatcgaattaagtttgccacatcctaggggagatgagtttggtgccgttagtagagtcgtcttgcccgcagaccaaggtgctgaaagtacaatttggctaattgcaaggcatatgttgttgtcaatgactcctgctatcatcaactcatgagccactggttaaatactcatgctgtgattgaaccatttgtcatagcaacaaacaggcatcttagtgtgctccaccctatttataaac

SEQ ID NO: 14939 - DNA, 284 bp, Glycine max
  Clone ID: 700963610H1
tttgattttggtggctatgagaaggccatgaaggaaactgccaaggatttggatgagatttttggtgagtggttagaggagcacaaacaaaatagggcttttggtgagaacaacgttgatggaattcaagacttcgtggacgtcatgctttcctgtttgatggaaaaacaatttatggcatagatgcggataccatcatcaaatccaatttactgacaataatttcaggaggaactgaatcaatcactactactcttacatgggcagtatgtttgatattgaga

SEQ ID NO: 14940 - DNA, 283 bp, Glycine max
  Clone ID: 700963611H1
cgaaaaataaaaccacataaacaggcgagcgtatgtagcagagcgaaagccacccaccagctcagatcagcagcagcagcagcagcaccccctatttctccgttctctttgtttttacactctttctatgcaatttcctcccccctaaatttcagcttttattcttgtccctatctttctagtccattcttttgttagaacactctgattacccatttcaggacttcttcacttttcctcatcattcctctctgtattttacatttcatcttaaaggatctgt

SEQ ID NO: 14941 - DNA, 289 bp, Glycine max
  Clone ID: 700963612H1
cttggagtggtacttcttcagcgcgctggatcgcaagtacggaaacggctccaggaccaaccgcgccaccgagaggggctactggaagaccaccggaaaagaccgtcccgtcacccacggcgaccgcaccgtcggaatgaagaagacgcttgtttccacagtggccgtgccccacagggccgtcgcaccaactgggtaatgcacgagtataagatgctcgacgatgaattggcacgttccggcacagtgctggatgtgtttgttgtgtgtaggattttcgagaagagtg

SEQ ID NO: 14942 - DNA, 288 bp, Glycine max
  Clone ID: 700963613H1
gtgtttctgaagggttacctgtcactaagcgatcaggagatgatagtgaaaagatgcagggagttgggggtgggaagtggaggattctaccagcctggttacggggaagacaccaaaatgcatttgaaaatgatgtgcctcggaaagaactgggtcctcagtccggtcaatacggagaccgacgcccatttgacggagcaaagccaccgcaaattcctcccgagttccacagccatgtccacagtgcactcaaggattccaatgccctccttccctccatctcccctg

SEQ ID NO: 14943 - DNA, 290 bp, Glycine max
  Clone ID: 700963614H1
ttctccaaacactctagaatttgcatgcactgttcttcatacaatggcattacgcgagcttcttatgatggggatattgctgctggtatgtcttgctaaggtttcatctgatgttaacatgcaaaaggaagaagatgaagaacttcgctttcctatcaccctcttatcgtgagagacgggaacagaaggctaatgcaagacatagattgcggaggattgtgcaagacaaggtgcagtgcccattcgaggccaaacgtgtgcaacagggcttgtggcacgtgttgtgtgag

SEQ ID NO: 14944 - DNA, 292 bp, Glycine max
  Clone ID: 700963615H1
attgaagcacaagagaagagaagagaagagaggagagggggggagaaggggttgcagagagagagagagagagatgtcatcatcttcagacctggacaggcaaatagagcagttgaagaggtgtgagcctcttaaggagtctgaagtgaaggtcgttgcctcaaagccatggaaatccttgtcgaagagagcaacgttcaaagggtcgacgcccctgtcaccatatgtggtgatattcacggtcagttttatgacatgaaggagcttttcaaagtaggaggggattgcccca

SEQ ID NO: 14945 - DNA, 290 bp, Glycine max
  Clone ID: 700963616H1
ctcagtttctctccataaagaggctgtttaccttcggttctctcagccaaacctgaaaagacccttttgttaaaatcccattagggtttcaactactgtgctcttgaaggcagctcagggaattgcattgaaggttgcagcgttgaaacgcatacatgtgaaatctgaaactggcttacaaactctccaacggggtcagtttaaaaacccccaatggcccaaatgctgttcttgacactctcaaggactatggattctccaaaactgaggttgcaaaacttgtggagaag

SEQ ID NO: 14946 - DNA, 262 bp, Glycine max
  Clone ID: 700963587H1
tggtaagagtcccctctcgctcgcttctattcgttccaccattccttcgtcctactcctctattttatttactatcatccattcccaacacacaatacccttctgggtacctcaaaaaacatttattttttcgtttttgtttgggtcccattagattatatttcattgggtcttcgttaattgaaagaccttgttggttcttacttgttttatggatttctaacccttgttcctgtgatataccaattcaagtaaagcagca

SEQ ID NO: 14947 - DNA, 266 bp, Glycine max
  Clone ID: 700963557H1
aggcaagcaaggtttctgtttcagtttcagagggagaaatgggtcgttgccgagctgcgtcgcgccccggtgacgatgaccccaagtacagatcaaagagaaaaagggctgctctgaatgtagaaaattcagaaactttacctactggccaaggagtaactaatagcaaggtatctccttatcactgcaattattgtaacaaagacatttcggggaagattcgcatcaagtgtgctgtttgtcaagactttgacctctgcatagag

SEQ ID NO: 14948 - DNA, 263 bp, Glycine max
  Clone ID: 700963558H1
aatctgtactcaagttcaagtgcttccatctgccgttagctgaatatttagttgagcagagcaatgatgaacatcgtgccttttgtccttagttttcaaacaagaaaaggagactgacctcttgtgttcttttctgcactgggtaaaatacaactgggagtattgcattctcttcctcttctgtttaatttcttaactagcatattttttatgttaaattttattgttggctaaggctagagcatctgtatctatcaaaaaca

SEQ ID NO: 14949 - DNA, 264 bp, Glycine max
  Clone ID: 700963559H1
attttgaagtaatcgatggagtttcagtctctttccagattctaccttcttctttccttaaccattctcttccttgcaccctttcacgctcaagctaaaattaaagtcacttactgcgataagaaggcagactatcctgtgaaggtgtctggagttgaaatatcaccagaccctgtggagagtggcaagcctgctacctttaagatctcggctacttctagtaaagctatttatggtggagaagttgtaattggagtttcatac

SEQ ID NO: 14950 - DNA, 265 bp, Glycine max
  Clone ID: 700963561H1
atttcatgccaatttgttcggacacaaaaccaagtttttcttcctttgggaagatattgaagagatacaagtgcttcctccatcattggcaacattagggagccctacattggtcatagttctgcgaagaggccgaggtctcgacgcaacgcatggtgcaaagacctcaagatgaagaagggagacttagatttcattttcaatcttttgtttcatttagtgctgcctccagagcaacaaaggccttgtggagaacaagaatact

SEQ ID NO: 14951 - DNA, 143 bp, Glycine max
  Clone ID: 700963562H1
cgttggagctgtcggtatgggtgtgggtgggaaaacgcttgggcaggaatagaggaatattcagcatttacagcttgtattgtaaaaatttcatgttgtgtaattcaatattctcaatgtacatcaatacacatcatgctttt

SEQ ID NO: 14952 - DNA, 163 bp, Glycine max
  Clone ID: 700963563H1
cagcaagtagtagctcttgacccttctttccaccttttctggtccctccctccagaaatggcttctaattccattcttcttctttgtatctttcttgtggttgccactaaggttttttcctatgatgaagatctcaagacagtggttcctgcacctgctccac

SEQ ID NO: 14953 - DNA, 137 bp, Glycine max
  Clone ID: 700963564H1
gtgatttcagtgagtgatcggtgttcacttgatctcatcataatcgtcagcgtcaattgaagaagatgccgatcagaaacatcgccgtcggaaggcctgaagaggcgactcaccccgacacgttgaaggcggctttg

SEQ ID NO: 14954 - DNA, 265 bp, Glycine max
  Clone ID: 700963566H1
attctgactccgtgccctaacttcttcttcctcctcctcctctgacattgcagcaaggcacacacctcaggctccaacccatttcacgagggatcggattcgctcgccatcatggggaagaagaagaacagagtttcctcgaaggtgtggtgtcattactgcgatcgcgaattcgacgacgacaagatcttggtgcagcaccagaaagccaagcactttaagtgccatgtctgccacaagaagctctctaccgctggcggcatgg

SEQ ID NO: 14955 - DNA, 272 bp, Glycine max
  Clone ID: 700963567H1
aaacactcaagtaatcatccagtgcaagaagtgttacatcacagaaaggttttgagtttttacaagccagaagatgtttcaagcctctatgtgggtctatttgcttctaaatttccacgctcaattctccaagcttttcaagcagcagagatagatacttcaactgattcaaaagggtacaagaattctgagttcaacaattgcaattcttggtgtttttgaagtggctgacacaagataatggctcttcaccaccgcttgttgcttgtcga

SEQ ID NO: 14956 - DNA, 201 bp, Glycine max
  Clone ID: 700963568H1
atttgcttggtaaacgcaacagcgatagaactctagacatagaatagtaaacggtgttagcttcgatagattaaacgaacacagagcgagcgaaagtacgaatctgaaaaacaatggcggcgaactacgacacccacgccgtggcttccgatctgatcgacttcctcaacgcttctccaacggctttccacgccgtcgacg

SEQ ID NO: 14957 - DNA, 272 bp, Glycine max
  Clone ID: 700963569H1
caaaacgctcaagcttcacaagtctccggccaaggaatttttctctctatgcctcgtttctgattgtgccggagatgcatttggggaagcaccgtgtggagcagatgaggttgcttcctctcactctccaggaggaggcgagttccacaattccttcaacatttttttgttttctaattaactttgacttactttcattaaattaaccacatttacgttttaacaagcacatcttaaactgtcacattatctaattgaaagtggaatcaaaa

SEQ ID NO: 14958 - DNA, 266 bp, Glycine max
  Clone ID: 700963571H1
aattctgatacagcaatttccattgctgaggagatggtggaacatctggaactcacaaatgaggatgtatctgtcattgcagagctaataaatgacatgattgctaagcttgtccccaacttgaaacccttaagtgagaaactctcatccggaacagatcaattgtacaggccttcttcggaagttcagaatggtgaacaattcaactgccactggccattacaatcaagtgattacgatatgaagcctgtgtttaaggatctagt

SEQ ID NO: 14959 - DNA, 265 bp, Glycine max
  Clone ID: 700963572H1
acacatcggcggaaagagcagcatccagtggctggacacggagggccacctcccgcacttgagtgctccttcatacctggctcgccagcttgagattgcgctttcccagtagcgcgtggggaggcgcgtgctagtcctggcgcgtgggtctgcttgttaatttaagtaatttaactctactagtactagtactaccagtacaggagaagaataggcagggtcctagaaaaacaagtgtacgaaaggctctgaaagtggacacctg

SEQ ID NO: 14960 - DNA, 265 bp, Glycine max
  Clone ID: 700963573H1
caacaacacaaacctatgcttaaaacttaaaattatccatcttcaacttcacaatggtgcgtgtcaaagaagctctcgttgtcaccccttccgagcccacaccgaataccgttctctcactctcagctcttgactcccaactcttcttgcgcttcaccatcgagtatctttttatttacaggcccggcccgggcctggacccaacttccaccgcggctcgtttaaaagctgcattagccaaagcgcttgttccttattatccatt

SEQ ID NO: 14961 - DNA, 264 bp, Glycine max
  Clone ID: 700963574H1
acgatacgtaataagttctatcattgaggaagtttcctgtgcatcgtctccgaaaatgaacgacgcagatgtctcaaagcaaatccagcagatggtgcagttcatccgccacggaagctgaggaaaaggccaacgagatctctgtctccgccgaagaggaattcaatatcgagaagctgcagttggtcgaagccgacaagaagaagatcaggcaagaatacgaacgcaaagagcgccaagttgaaattcgcaagaagattgagt

SEQ ID NO: 14962 - DNA, 259 bp, Glycine max
  Clone ID: 700963575H1
gttgaggcaagggatgagctgcacagaatgttgaatgaggatgaacttagagatgctgttttgcttgtttttgccaacaagcaagatcttcctaatgcaatgaatgctgcagaaataactgacaagcttggacttcattcactccgtcaacgccactggtatatccagagcacttgtgcaacttctggagagggtctctatgagggtttggactggctttctaacaacattgccagcaaagcatgagacatttgaaaaa

SEQ ID NO: 14963 - DNA, 186 bp, Glycine max
  Clone ID: 700963576H1
tagcagcgtaaccagaaagacaagaggtgtcactccaccggagcaaaggaacacataacataacccacttctccttttctctctctctctctctcactatagggtttctgttagggttccgctctgttaagccacactggacagacacagaggagaacgttacaacaacaatgatttccacacaac

SEQ ID NO: 14964 - DNA, 266 bp, Glycine max
  Clone ID: 700963577H1
actcgagccgattcggctcgagcaagcaaagaagccattgagggacaccagaagttttgtgcaaaatccttgggaacagtaatatggttttgccatttcaaagctgggaaagaacattcaagtactttcaagttcctttgtcaataagcaagaccaatacactgtggaaggagtgcagaatcttggagacaaagcagtgatgtgtcataggctaaatttcagaactgcagtattttactgccatgaagtccgtgaaacaacagctt

SEQ ID NO: 14965 - DNA, 258 bp, Glycine max
  Clone ID: 700963579H1
atagaattctgtatgatatttacgtttacggcgtgtgataaaaagatactatatagaactaaaggagattcccgtttcagttacattcaattcaacgattgaccaaaagagaattcaaaaaataacatttagatcacccaaattccaatatttctatgaaacaataattaaatctaacgaatttatttcgattgattgtatccatatggggtaataacaaaagggggaggagagcttaaaaaaacaagataacaaata

SEQ ID NO: 14966 - DNA, 266 bp, Glycine max
  Clone ID: 700963580H1
agaaagcttgttgtttacattcctcaagtatgtgaagttggctacaaggattcatcagtcttgcgtttcttcaccaccgtgactggttatctggagaaaggaaagttagcagacatagaaggaatgaagacaaaagtattgatctgggtgaaagcaacaaccattttgtcagagggatcgaagctctatgtgacagctggcatgaagaaaacaaggagtacggaagcgtacgaggttacaagagatggtgtatgcatagataagtt

SEQ ID NO: 14967 - DNA, 262 bp, Glycine max
  Clone ID: 700963581H1
attttatccaattgaaattttaaaaatgactgggataaacttaagaattcaattattgaaattgaataagtaaacaatttaattggattggtcgaatggtatcaaaaaaatggagtactaactcccatttcttatttattattgaattaaccgatcaacttgctttgttatcgaacatttctttttgacttcaaaaattttccggaaaaaatttgaatctatttttatatgcgaatcaatcctactacttctggtcctgagg

SEQ ID NO: 14968 - DNA, 269 bp, Glycine max
  Clone ID: 700963582H1
caaccaaaccagtttggtgccttgaacaattccaattctcacaattcagcagcatttgagagtatcaacatgcagaacccgaagaggtttgctgcacaattgctaccagactttgtggcctaaacaagacattgaagaggggatagatcatagttggtgacattggttatatgggtctctcatattttcttctaatccatgtgcttgtttcttgggagtagtgacaaaatcttagtgtaaagaaagaaggaattttactctagtatagg

SEQ ID NO: 14969 - DNA, 99 bp, Glycine max
  Clone ID: 700963583H1
gttctaattcatttctgaaatagaactccgttattctctctctgtctctcttgtttcatcgatgggtggcacagttgttgctgaagtagccacaaagag

SEQ ID NO: 14970 - DNA, 269 bp, Glycine max
  Clone ID: 700963584H1
ataattttaatagctttcctttgccaatatgtaagttgtaactcaacgtcattgtaggtttttatattttgtattttttatggaaatgtcaaagataactcataaattttggttgacagccacaacatacatatcaactttcttgagttggcctggattaatcctttgcaattttaagattttgttgtattcactcacatgcattttagaattgctacactttgaaacgcacaatacagtttcaataatagttttatgacatctcatat

SEQ ID NO: 14971 - DNA, 266 bp, Glycine max
  Clone ID: 700963586H1
cgcaaaaccaaaccacatattaacttgtttgctctaagtcatggctctgatcttgcacgcaaccaaagcacacaagaatgctttcaagactctgattgcggcagagtacagtggcgtccaagtggaattggcccctaatttcgagatgggtgtctctaatagaactcctgaattccttaaaatgaatcccataggaaaggttcctgtcttggaaacgcccgatggtccagtctttgagagcaatgccattgctcgttacgttgctc

SEQ ID NO: 14972 - DNA, 270 bp, Glycine max
  Clone ID: 700963556H1
cgaattctctaaaagagatctttttctgctctttgaagaaagaagggtctttgcttgattttggagatgtctctgctctcagatctcatcaaccttaacctctccgataccaccgagaaggtgatcgcagagtacatatggatcggtggatcaggaatggacctgaggagcaaagcaaggactctcccaggaccagttagcgacccttcagagcttcccaagtggaactatgatggttccagcacaggtcaagctcctggtgaagacagt

SEQ ID NO: 14973 - DNA, 269 bp, Glycine max
  Clone ID: 700963527H1
agggcttcgtcggaggattgtcacgcctgaacgagcccttttccatttcagccttgagcagctcctgttcttgtcaagttggtgtgaattaggagctgcttaattcaaagaatggggggagatgcacagaagagaaacgtcatcattggcgtctctactttcttgttggtggccatggtggtagcagtcacagtcaatgtcaacttcaacaacaacggatcaagcagtgattcaaaggaagaaagcaaatcccatgtagcttcctcgat

SEQ ID NO: 14974 - DNA, 269 bp, Glycine max
  Clone ID: 700963528H1
attttgctttgttgtgttctcttcggaagcggaatcgatcaatccctcacctcattgctgagatctgcaaactggctatggactacgaaccctacgacagtagcggaactgatgatgaccttccaccaacccatcaacagagaatttccaggggaggaggaggacgtctggctgggaatgggagatctgctgttgcttcaattccttacacaaggatgtacggtgaaattgatatggagacccaaattcatcagcttgagcaagaagca

SEQ ID NO: 14975 - DNA, 273 bp, Glycine max
  Clone ID: 700963531H1
caaagaaattgtgacggccctcaagcatgatttggggaagcattacgtggaggcttttagagacgagcttggaacattaatgaagaccttaaacttggcaaccaagtctttgaaaaattggatggcggggaaagaggcaaagctgccacgaatagcactgctctcaagtgcagaaatagttcctgagccacttggtcttgttctcataatctcatcatggaactttccctttggactttccttggagccactgatcggagcagtagctgctgg

SEQ ID NO: 14976 - DNA, 267 bp, Glycine max
  Clone ID: 700963532H1
cattccattctctctgtgtacatccctacctctcccttcaagatgcagatcttcgtcaagaccctcaccggcaagaccatcacccttgaggtggaaagctctgacaccatcgacaacgtcaaggccaagatccaggacaaggaaggaatccccccggaccagcaacgtctcattttcgccggaaagcaacttgaggacggccgtacccttgctgactacaacattcagaacgagagtactcttcacctcgtcctccgtatccgtggt

SEQ ID NO: 14977 - DNA, 266 bp, Glycine max
  Clone ID: 700963533H1
caaacagcgtacgtgacacatttcctcaagtcagtttaaacttcatgggcggacatctatggttttgaatccagaacattacctcatgcattatggtttccttgatggtgctgcaatgtggtgcattggcttccaaaaagtggagcagggattcacaattttaggagatcttgtcctaaaagacaagatacttgcacatgacttagctaatcaacgaattggatgggccgattatgattgttccttgtctgtgaacgtctctctgg

SEQ ID NO: 14978 - DNA, 257 bp, Glycine max
  Clone ID: 700963534H1
aaagatccaagtgctgttgctgtaattgaaagcgcatcagatggtcagtgcaagatcattggagaaatttctgcacgtaagttatggaaatgtgattacttatccgcagcatgggctttagcgaatctctccgcgggacagtttgttatgggagttgaagataatgtcaccccaaggtcactgcatgagttcagtttagattcaccatctggagacattgacttagttaatagtgggggttcaaggaaaccaaggaa

SEQ ID NO: 14979 - DNA, 107 bp, Glycine max
  Clone ID: 700963536H1
agctcatttattgcgccttccttcatctgacacccctgaacagttgccaccatatccattattcccacctggcctcattcctggaatggttagaaagatgcagattg

SEQ ID NO: 14980 - DNA, 276 bp, Glycine max
  Clone ID: 700963537H1
tgccagcagatgctgctgcaccacatattgttaaagaagctgtacaagcaaagggacttagagatgatacaacctgcattgtagttgatacattacctcaggagaaaccacctgtttctgcgccacaaacaaagaggccagtaaagggaatgctcaagtccatgtttcgtaaaaaatcttctgaatcatcttcttatattgacaaagagtacatggagccagatgtagtagaagaattgtacgacgaaggatctgccatgctttcagagaggttag

SEQ ID NO: 14981 - DNA, 275 bp, Glycine max
  Clone ID: 700963538H1
aaatcaaaagcaaagaagtgaagagagagagaaagagatcattctagagacagagagaaaaattagcttcagtagatattagtggtgggtttgggtttcaagagaggagacatgcctaacttgaacccaacacttcaagtacttgcttcttcatacccttaccagatcccaaaggttacatgaagccatttctctttttaaatcttcccaacaccgagttcaattcttcacaagttgactgtaatcactcaatggctcattcttcttatccctac

SEQ ID NO: 14982 - DNA, 272 bp, Glycine max
  Clone ID: 700963539H1
agcaaacgcaagagcaagagcaagagcgaaacgccagagaagatggaaggagaagagggttctcagcagccacagttggtgctcgcggacaagctattccttctccggcaacccgatgtgcaagacattgacaaggttcgctacaaagaggatgtcttcactcatgtcaaggaaaacgatatggtccctctgtacgaaaccctagtcgctgattccgtgttggacttggatcgtgcgcttttggactctatgcgcgctaaaattgacgacga

SEQ ID NO: 14983 - DNA, 270 bp, Glycine max
  Clone ID: 700963540H1
tgcaattgaagttgaagtcttgcgcttctctcttcaactccaaacacaagacatcatcatccatggctgcatccgtctccactgtcggagctgtcaacagagctcttttgaacctgaatgggtctggacctggggtttcagctcccagttcatccttctttgggagcagcttgaagaaggttactggctcaagggtccccaacacaaagacttcctctggaagcttcaagattgttgctgcacaacagaacaaagagattgaagacaccc

SEQ ID NO: 14984 - DNA, 129 bp, Glycine max
  Clone ID: 700963541H1
taattcccttgtgctgcaattattttgatatttctgctgcgatcattcagtataatcaagtcattcagcgtatattcagttatctagtacattgtcattcagtatacataatcattctttgtacataac

SEQ ID NO: 14985 - DNA, 267 bp, Glycine max
  Clone ID: 700963542H1
tgtctatatcttcaaaggaactttcgatggaagagctggggttgagtgctgtcccatcagaagtatgggaatcaggggaggtcataaaacttaatctatcgagaaacctccatccaggagttgcctgttgagctttcttcttgtgtttccctccagacattgattttatctaagaatcaaattaaagattggccaggttcaattcttaaatcactttcgagcctttcatgtttgaagctggataacaatcccctcagacagatacct

SEQ ID NO: 14986 - DNA, 267 bp, Glycine max
  Clone ID: 700963543H1
taccaacctatgaagacaaagatgctgactggatgctcgttggtgacgtaccgtgggaaatgttcgtggaatcatgcaagcgcctgcgtataatgaaaggatctgaggcaatcgggctagcaccaagagcagtggaaaagtgcaagaacagaagctagagtcaaatttgtaaattccactttcgacaacaatctgctctatctgttgctcttgggcgtccacggaaagcattaatgctaatttctcgagcaaggggtagtctaatat

SEQ ID NO: 14987 - DNA, 268 bp, Glycine max
  Clone ID: 700963544H1
cacaataaacacaacacccctaaaatagtgttattaaccaattaactatgattctgtaaaaaaaattaactatgatttattacataatactataataaggtcgagtataaaatataatttaaatgagaaaaaattgataagttattcgtttgttttttttttgtaccaaagttattcgtttcttatttctccaaagaaactacattaacaacaaaaaataatcagtaacaatgagttatacatagattaatatgcactttttgctttc

SEQ ID NO: 14988 - DNA, 269 bp, Glycine max
  Clone ID: 700963545H1
aatcaggtctactcattagtcatggatagcagcaagaagggagccctcatgagtaatgaaagcgcaaaagatttatcagtcatggttctgaaacagcatcagtacaagaagaaccaaccaaagttaagttctaccccgcaagagagacgtgatcaatcccactgccttatctgtaggggaaacaacagttgtcaaacagttcatgcaagaacaaaactgatgaatactttgattggaaaagggaagccacatgaagctcaggccgtctt

SEQ ID NO: 14989 - DNA, 267 bp, Glycine max
  Clone ID: 700963547H1
ttcaccacaccaccacaacaattatcaaacctaaccagtaaaaatggtgaccgtggaggaaatccgcaacgctcagcgttcccatggacccgccaccatcttggccttcggcaccgccacgccgtccaactgcgtctcccaagccgattaccctgactactacttccgcattaccaacagcccacacatgactgatctcaaacaaaagttcaagcgcatgtgcgaaaagtccacgacaaagaagcgatacatgcacctgacggagga

SEQ ID NO: 14990 - DNA, 266 bp, Glycine max
  Clone ID: 700963548H1
attggatcttaccctcttgtttgctagtattctcattcttctgtctctgcttcttctccttctgaactaagagatggggttgtctttcaccaagctttttagccggctctttgctaagaaagagatgcgtactctcatggtaggtcttgatgctgctggtaagactaccatcttgtacaagctcaagctgggagaaattgtcacaaccattcccacaattggattcaatgtggagactgcggaacataagaatattagcttctact

SEQ ID NO: 14991 - DNA, 271 bp, Glycine max
  Clone ID: 700963549H1
aggctcgagggataagctgtggcctatgctgcaaaagcttggggtcaccatgaaatctgaggagaaggacctcatgggtaaagcattgatgaagcgtgtcatgcaaacctggcttccagcaagtagtgctctattggaaatgatgatatttcatctaccctctccatcaacagcccagaagcatcgtgtggagaacttgtatgagggtcctcttgatgatcaatatgcttctgctatcagaaattgtgatcctgaaggtcctctgatgctc

SEQ ID NO: 14992 - DNA, 272 bp, Glycine max
  Clone ID: 700963550H1
atttcactttgccattactaccctgcatgccctgaaccagatttaactttgggaaccacaaagcattctgataattgtttcctcacagtgcttctccaggatcatattggtggcctgcaggttctttaccagaacatgtggattgatataaccccagaacctggggctcttgttgttaacattggtgatcttctacagcttataacaaatgacagattcaagagcgtagaacatagagtacaggcaaatctcataggtccaagaatatctgt

SEQ ID NO: 14993 - DNA, 271 bp, Glycine max
  Clone ID: 700963551H1
agaacattgagaagagtcttgttgaagcttttgagcccatcgggatcagcgactggaactctatcttctggatcacacatcccggtggtcccgcgatcctcgatcaagtcgaggagaagctccggctcaagccggagaaactccagtccacccggcatgtgctgagtgagtacggaaacatgtcaagcgagtgtgttttgttcattctggatgaaatgaggaacaagtctaaggaggaagggaagagtaccactggagaagggctagagtg

SEQ ID NO: 14994 - DNA, 66 bp, Glycine max
  Clone ID: 700963552H1
aggacgacaaaaagcgaagaaaaacgcggtttttgttcccctgctctatctgactctgtctctctt

SEQ ID NO: 14995 - DNA, 271 bp, Glycine max
  Clone ID: 700963553H1
tacgagcacaaggttgagtttcaatgtagttttcttaaatacgaataagttggaaaaataaatacaaagtggtgtcccgtgtccatttggagcaaggtatcataaatgcttagcaaagtgcataaacgctcctacaaatcatttcagaaataaagcagtatggatattggatgatatataaagtactatgtaatatgcagtgaaggtataacaaatgtcaaatagcaattattcttgcgtacttttaaatacactatatggatggatgttt

SEQ ID NO: 14996 - DNA, 270 bp, Glycine max
  Clone ID: 700963555H1
gctatggcttccttatccaatatcttgcttatgttttgtttgttgaatcttctagcattcccagtttcagttcattcagctggtgaagttccaattaatgtgaccaagcacttttctttctaccaacttcagcttcagcaacaaccccagattagtccatgatatgaagctcctaggcagtgccaagttctcaaatgaaaagggtgctcttcaaatcccaaatgaatcagaagaagacataagacaccaagctggaagaggcatctattc

SEQ ID NO: 14997 - DNA, 267 bp, Glycine max
  Clone ID: 700963526H1
agaaccaggcaggtgctctggttcaagtctatacagatggaactgtttcagttacccatgggggtgtcgaaatggggcaaggtttgcacaccaaagttgcccaaattgctgcttcagctttccatatccctcttagttctgtctttacatcagatactagtactgacaaggttcctaatgcttctccaacagcagcttctgcaagttctgatatgtatggagcagcggttttggatgcatgtgagcaaataatggaacgcatggaac

SEQ ID NO: 14998 - DNA, 240 bp, Glycine max
  Clone ID: 700963490H1
gtgagagacaagttgaataaagttcccgactccaaggttcagcaactttattcaacttgtctctcacattctgcaacaatcgtggaaggtcatcatcccatttgtagaatgtgagagacaagttgaataaagctgctgaaccttggagtcgggaagaaaaggaccactgtctggaagaaacagaaaaatcattcaagctctctggagagattctccgtttgattttatcatgataataga

SEQ ID NO: 14999 - DNA, 247 bp, Glycine max
  Clone ID: 700963491H1
ctaagaatcaccacagcaagagcaagaaaaaaaaggaaaaaaaaaaaagactttctcttgaatcatcatgaccatgaaagattccattgttctatattcagctttgggaagaggacaccttgtttcaatggtggaactaggtaaactcatactaagccaccacccttcactttccatcaccattcttttcctatccccttcccccaaccaagacacccccacctcccccaccgccttcacctgggac

SEQ ID NO: 15000 - DNA, 246 bp, Glycine max
  Clone ID: 700963492H1
attactttttggtagtagcaacaagcaaagggaggaaagaaggaaagaaagagagagaatcttcattcatttttttctgctcattttctgtgtacacctttatcgtttctctcactaactttggagtctgctttactccacactccacaacaaacatcgtctgcattccctttcccttctcttttcaccccccttttttttttctctcttcttcttttttctttttctggtgggggcacctcattt

SEQ ID NO: 15001 - DNA, 249 bp, Glycine max
  Clone ID: 700963494H1
ggattgtggagtgaagagacgtgagagtgtgagagaggaagatgatgaagtgatgatagtaacaccattgggggctggaaacgaagtgggtcgttcatgcgtgtacatgtcctataagggtaaatccatattgttcgattgtggaatacacctaggtttttcaggcatgtccgccttgccctatttcgacgagattgacccttccaccctcgatgttcttctcatcactcactttcacttggatcatgc

SEQ ID NO: 15002 - DNA, 249 bp, Glycine max
  Clone ID: 700963495H1
ggaagaacgaagcctcctcgttcttcttcttctgcgctttctctctccctctctagaaccgtaaccgtcgtttctttctttctctctcctcaaccagagataaagagtcaccttcttatttttctgaatctcgcggcgttgttctttctgctgctgcggctgtggttccggcggcgatgggacagcaatcgttgatctacagcttcgtcgctcgaggcaccgttatcctcgcggagtacaccgagttca

SEQ ID NO: 15003 - DNA, 252 bp, Glycine max
  Clone ID: 700963496H1
gtaggaccagtagattcagcttacaaggctatcaatctcatcgtgaaggaaactgtaaaagtacttgagtactcactaagtacagttacagaatgcactgatgcaattgcaactacacgtgttgtaattcgtagagagaataagcaatcaccaactcctgctttgaatggaaacgtaatttatccaacatttagtggaaccggagaaggggtggatgttgttacttcaagtgtagaggcttatcttactgca

SEQ ID NO: 15004 - DNA, 280 bp, Glycine max
  Clone ID: 700963501H1
accttattgctcccatcaccttttcacctggtttagatgcagaagctcttagaaaagctttccaaggatgggggaccgatgagaaaaccgttattgcaatactgggtcatagaaatgttcatcagaggcaacaaatcagaaaggtttatgaggaaatttaccaagaggacctcattaaacgcctggagtctgagctctctggtgactttgagagagctgtgtaccgttggatgctggaacctgcagatcgtgatgctgttttggccaatgttgccatcaa

SEQ ID NO: 15005 - DNA, 282 bp, Glycine max
  Clone ID: 700963502H1
agattctggttcatttttatttgtatgaatcgaacacacgtgagtatgtctgatcacgaagaccatgcagactacgcagacaatgaatcctttgcaaagcgtacgttcagggataggtccaaggaggcattgtccaaacaagccgttaagttagccaaacaagctgaagagcatgaaaggttcatcaacaaggtgactcatcttttgggggttcttggctttggttggttttgcttcatctttggggcaaggcgacaagccgttcccttggtatattgtttg

SEQ ID NO: 15006 - DNA, 192 bp, Glycine max
  Clone ID: 700963504H1
aaaaaaccgaagcaaagcaagcaaagcaagccaatcaagactcaccttcgtgttccaatcagaggatatacacagagaattacgagttggttgaacaaaaataaaagtacttgtagtgatggtagtgccaataatgaatcttcttcaagtggaatagttggagaaagggataatcatcttgatcatgaaatt

SEQ ID NO: 15007 - DNA, 73 bp, Glycine max
  Clone ID: 700963506H1
gcacatctgcagagggacttcagaatcttaaatgcctgctaaaacaacaaagcacttttgcatgcaaacaaac

SEQ ID NO: 15008 - DNA, 279 bp, Glycine max
  Clone ID: 700963507H1
aaagaacaacatgaactttctaaccttcgttactgttctactcttcatactaccagcaacctcatcttcccagtatttggggaacaaccttctcactcatcgcaagatattcctaaaaaaagacaacattattacctcgtacgctgtcatctttgacggtggtagcacaggaacccgtgtgcatgtcttccattttgaccagaatttggatctccttcccattggtgatagtcttgagcttaataaaaagatcacacccggtttaagtgcttacgagga

SEQ ID NO: 15009 - DNA, 276 bp, Glycine max
  Clone ID: 700963509H1
caatcttctgagagtgtttggttgaaagtagcaaagatgtcacctttcgggcaacacggtcaaaagataaaggggactatggtggttatgcagaagaatgtgttggatacacaacagcatcaccagtgttggagggatcgttgaccaaggcttaggcttcataggcagtgcagtcgatgcacttactcttgtagccaccaaaatctccatccagttgattagtgctaccaaggctgatggtgggaaaggaaaattagaaagagtacagatttaaga

SEQ ID NO: 15010 - DNA, 273 bp, Glycine max
  Clone ID: 700963511H1
cagaacaacgtgtcctattgtacctggaattatgcccattaataattacaagggctttatccgcatgactgggttttgcaaaacaaagataccagctgacattatggctgctttagagcctatcaaggacaatgaagaagctgtcaaggcttatggaattcacctgggaactgaaatgtgcaaaaagattttagctcatggaattaagacattgcatcttcatacactagatatggagaaatctgcattggcaatactaatgaaccttggcct

SEQ ID NO: 15011 - DNA, 272 bp, Glycine max
  Clone ID: 700963512H1
aacgtttgtctctagcagcgaaaacggaggagtcccatgtgcctttcttactggacctgcaattgtttgagcccaagttcgtcttcgagcccaaaacgattcagagaatggaactctgggttatgtctaatctcaaatggagactccgctctgtcacccccttcgattatcttcattatttcatctccaagcttccttcttcctcttcttcccaatccttgaatcactttttctccacttcctccaacctcattctcagcaccactcgtgtg

SEQ ID NO: 15012 - DNA, 273 bp, Glycine max
  Clone ID: 700963513H1
cattcattcctattccttctttctcttccaattccaaatcacaacccttcactttccctctctagaatcttcttctccattcaattcctactccttttttcctctctgtccctctctctctccctctctcatggcttccgatctcgaagcaaaagccacagaagccttcgtcgaagaccacttcgaactcgccgtggaccttctctctcaggccattcatctcgaacccaacaaagccgaattctacgccgaccgcgcccaagccaacatcaa

SEQ ID NO: 15013 - DNA, 271 bp, Glycine max
  Clone ID: 700963514H1
attcaacagtgaactcataccatcaacagacagaactttcaaaaagcttgttatatgtcacatctattgtgtgtcaattgtcaactctctactatgctaaataaaataaaggacaacttgtgctttgcttcagctctgtctgtaatttcttgttttataataatggagcagatgttctttgccacttcaacattgcatgtccgcctcatgcaatgggatgatgataacttggttgagcaagctgttaatcgatgcaaccagatttgggaat

SEQ ID NO: 15014 - DNA, 274 bp, Glycine max
  Clone ID: 700963515H1
agaaagccaacaaacattaaagatgctacagcatactcttttactcttgaagaagacaccacaaattatggtacgtatgagaaaggtggtattgtgacgcaggtcaaacaaccaaaggtattgaactttaagccactcaaggaagcaatcactgatcctggtgattttcttctgagtgatttttcgaagtttgatcgcccacctctccttcacttagcattccaggctttggataaattcatttctgagttaggtcgcttccctgttgctggtt

SEQ ID NO: 15015 - DNA, 273 bp, Glycine max
  Clone ID: 700963516H1
tcaaagttcagctaatggaaatacaaaacaggttattaattgtacatggaagcatcctgatgcacggacagtgtatctaacctgcaacatgctggtcaggaagagatccttgttaatgtttctgaaacctttggggcctaaatacatgttgataaagccaagtattcgtaatgttttgagaatctagcacttactgtgcctgaaatcctctgaagatccaacttctcgtttccgcttgtttgatggatctcaaaatttatatgaaagagcaag

SEQ ID NO: 15016 - DNA, 281 bp, Glycine max
  Clone ID: 700963518H1
aacactctcatagctgtagcggcgacactaagatcggagaaagaatggcgaaaacgacgtcgttgctgctctttacactgctcatcttcggaaccctagctctcatccaggcgaagaaatcgaaggaggatttgaaggaggtgacccacaaggtttactttgatgttgagattaatggaaaagaagcaggtcgtattgtaatgggtcttcatgggaacgctgttccaaaaactgcagaaaacttccgagcactttgcacaggggaaaagggaactggtaaa

SEQ ID NO: 15017 - DNA, 275 bp, Glycine max
  Clone ID: 700963519H1
aggcgttggcgacagatgaaccacggcggcgctccggcgaccggagggggagaaggtgttcaaggggagcgaggtgttcggtgacacgtcaccaaattacttgaagaccattttggccctggcgttgtggctcggaaccattcatttcaacgtcgcgttggtgctcttcgcaatcttcttcctctctctccacaaagcacttttgcttttcggtttgcttttcgtgctcatggcaactcctgttgacgaaaacagcaaattcggtcgaaaactat

SEQ ID NO: 15018 - DNA, 72 bp, Glycine max
  Clone ID: 700963520H1
attccaatatattccattctgtctgtgtatttccctacctctgccttcaagatgcagatcttcgtcaagacc

SEQ ID NO: 15019 - DNA, 279 bp, Glycine max
  Clone ID: 700963521H1
catgaaacacaattcaatgaagatcaacagttagaacaacttataaatggacaaatatgctttaaaatttacccatttgaaaatgagatatcagccgaaaggaaaataataatgcctggttctttcaatccattacatgatgggcatctgaagcttatggatgttgctactcgcatttgtggtgatgggcatccttgctttgaaatatcggcagtcaatgcagacaaacctccattatcagtgtctcagatcaaagatcgcatcaagcaacttgaaaaa

SEQ ID NO: 15020 - DNA, 276 bp, Glycine max
  Clone ID: 700963522H1
aaaattagttcattctctttgcgcagttccctacctctcctttcaagatgcagatcttcgtcaagaccctcaccggaaagaccatcacccttgaggtggaaagctctgacaccatcgacaacgtcaaggccaagatccaggacaaggaaggaattcccccggatcagcaacgtctcatcttcgccggaaagcagctcgaggacggccgtaccctcgccgactacaacatccagaacgagtcaacccttcaccttgtgcttcgtctccgtggtggca

SEQ ID NO: 15021 - DNA, 258 bp, Glycine max
  Clone ID: 700963524H1
agcttatgttgttgtaaatgactcgtgctaccatcaactcgttagccattggctaaacactcatgcggttgttgagccattcgtcacagcaacaaataggcatctgagtgtggttcaccctatttacaaacttttgtttcctcactatcgtggacaccatgaacactaattcacttgcccgcaaatccttggtcaatgcagacggtactatagagaaaacatttttgtggggtaggtacgctttcgaaatgtctgctg

SEQ ID NO: 15022 - DNA, 272 bp, Glycine max
  Clone ID: 700963525H1
atggactagacttgaaactttcagcaaaagaaaaggaagcaacacatgcaaatagggttcttttacttcttcatgccaacaagaatgagcaggcacgagaacttgtttctgcattaccagacatgtttccagaaagtgtcataccaatatttctgcaagctgccctcttggttagagagaacaaagctggaagggctgaggaaatactagcacagtttgctagtaagttccctgataagtccaaagttgttcacttagcccgggctcaggta

SEQ ID NO: 15023 - DNA, 244 bp, Glycine max
  Clone ID: 700963489H1
cagcttttgttctagcacttcgctgtctgaggttctggattctcagtgtttgcggacgcagcatcatcttttagggaagaatggatcatcaagggcatagccagaacccatctatgggggttgttggtagtggagctcaattagcatatggttctaacccatatcagccaggccaaataactgggccaccggggtctgttgtgacatcagttgggaccattcaatccaccggtcaacctgctgg

SEQ ID NO: 15024 - DNA, 252 bp, Glycine max
  Clone ID: 700963444H1
taccaacctatgaagacaaagatgctgactggatgctcgttggtgacgtaccgtgggaaatgttcgtggattcatgcaagcgcctgcgtataatgaaaggatctgaggcaatcgggctagcaccaagagcagtggaaaagtgcaagaacagaagctagagtcaaatttgtaaattccactttcgacaacaatctgctctatctgttgctcttgggcgtccacggaaagcattaatgctaatttctcgagcaa

SEQ ID NO: 15025 - DNA, 254 bp, Glycine max
  unsure (1)..(254): unsure at all n locations
  Clone ID: 700963446H1
cttaccttatctcacccttctttgactgttctcccacaccacaaccatgatggtcctcctgctccttattctcctctttcacgcggcggaagccaagggacagtggcagctcctccacaaaaacatcggcacaatcgccatgcanatgcagcttctccacaacgaccgcgacatnatcttcgancgnaccgacttcggactctccaacctaaccctcccgagannnanatgccgcaacaacccaaacgagttgg

SEQ ID NO: 15026 - DNA, 261 bp, Glycine max
  Clone ID: 700963449H1
gtttttatatcatttcattattttcttctcccttcgatttctccagaacagcaagggagaatcaattcctcatcgttgcaattcttccctctctagattctcatctttcctctcttctatctccttcagaaaaaaaaaaacaaaaaaaccacagcttcatattatatatctagctcttcattttctcttgttcaatcaaggttatgctttaaaattctgaaactcacagtttcaggcaaattttagcctaaagatctgtgg

SEQ ID NO: 15027 - DNA, 253 bp, Glycine max
  Clone ID: 700963452H1
gcatgaaaacgttgtcgagcttgttaactattgtgttgatggtcctttccgtgcccttgcctacgagtatgctcctaaaggatcccttcacgatattctacatggacgcaaaggtgtcaagggtgcacaacctggtccagttctctcatgggctcagagagttaaaattgctgttggagcagccaggggacttgaatatcttcatgaaaaggcagagattcatatcatccatcgttacattaagtctagtaac

SEQ ID NO: 15028 - DNA, 119 bp, Glycine max
  Clone ID: 700963455H1
cttgttttaaaatgaatgtttggcctgtgttcatggtacttgtagaagattagatgtgcagttattgttaccaaagttatactttgatataatgatgcgattttcgtctgtggttgctc

SEQ ID NO: 15029 - DNA, 250 bp, Glycine max
  Clone ID: 700963456H1
caaacaaacaagcgctgtcgttggatctcacacaacccgattcttgtgcttttatggatttgcgtcgccaagagagtttgtgattttcatcttgcgaacgccttgcggatctgtgatcggaatacaggatcgtttcaatggctgggagtaacgagcttaaccccaacgattctaagatggtggttccgctgaatatgtgggttctgatctcaaatttcaagttggcatacaatcttctccgtcgccctga

SEQ ID NO: 15030 - DNA, 253 bp, Glycine max
  Clone ID: 700963457H1
cacaaggacccttgtttcagtttgccatggaagcaagattgcttccccatattctccgagtcaagccctttgtaccacacaagcaacaaacgacgagcctcttaccccagaggaagaaaaagaccttcaacttgccatccagagattccatgagctttgccataagtgtgtgcaagtcaacattcctttgttggttgatgcagaacacacttctgttcaacctgctattgactacttcacatactcctctgcc

SEQ ID NO: 15031 - DNA, 245 bp, Glycine max
  Clone ID: 700963458H1
gaagatactcacaaagagggagattgaaggagggatatcagatccctatttgtatttcgggttgtctttctgaacaaccccatcatatatcattaagaggggtatcaagatcaatccttgattagcaagatcataaattttcattcatatacacaatttacatatcgtaacaagatcacatttgttttgttttgtgttgtttgtgttgttgttgtgttgttgatctcataataacaacatggagg

SEQ ID NO: 15032 - DNA, 250 bp, Glycine max
  Clone ID: 700963459H1
gcgccacggcaatgggaaggagcactttggctttggttctcgcgattctgatctctttgcagggaaccccccacgttagatccgatgcctccgatcatcgttacaaggacggagactccgttcctctttacgccaacaaagtcggtccctttcacaaccccagtgaaacgtatcggtactttgacctgccattctgtgtaacaggtcatgagaaagataagactgaagccctcggtgaggtgttaaatgg

SEQ ID NO: 15033 - DNA, 249 bp, Glycine max
  Clone ID: 700963460H1
aagaaaaaaaaaaaattgttcaaccttgaaagatgtcggtttctgaggttgctgtgagaccgattttgaaaaaatcggtgcattggcaagggcgttgctctggcgaatctatccggatatatctaaccgtagacggtgcgttgagaccaatgcgtgtattggagtctgactccatagcttcggtgaaaatgaggattcaagcatgcaaaggaatcgcagggaagaagcacaagctggtctatggtggca

SEQ ID NO: 15034 - DNA, 253 bp, Glycine max
  Clone ID: 700963461H1
gacgcaatgtgatttctgcccagtgctctgaatgtcaaagtgaagaaattcaaccaagcgcgggtaaacggcgggagtaactatgactctcttaaggtagccaaatgcctcgtcatctaattagtgacgcgcatgaatggattaacgagattcccactgtccctgtctactatccagcgaaaccacagccaagggaacgggcttggcggaatcagcggggaaagaagaccctgttgagcttgactctagtccg

SEQ ID NO: 15035 - DNA, 255 bp, Glycine max
  Clone ID: 700963464H1
cagagagtgatttcagtgagtgatcggtgttcacttgatctcatcataatcgtcagcgtcaattgaagaagatgccgatcagaaacatcgccgtcggaaggcctgaagaggcgactcaccccgacacgttgaaggcggctttggctgagttcatctcaaccttcatcttcgtgttcgccggctcaggctccggcatcgcctacaacaagctcaccgacaacggcgctgccacccctgccggcctcatctccgcct

SEQ ID NO: 15036 - DNA, 256 bp, Glycine max
  Clone ID: 700963465H1
gaattgttgtaactttttgattcctaaattctctaaaattcgaaattctaatttcgttaggggatagagattgtttgtgtgtgagtgagtatggctggaaaaggcgagggtcctgctatcggaatcgatttgggttcgacgtactcttgcgtcggcgtgtggcaacacgatcgtgttgaaatcatagccaacgatcagggtaacagaactaccccatcctacgtggctttcaccgacacagaacggttgatcggcg

SEQ ID NO: 15037 - DNA, 255 bp, Glycine max
  Clone ID: 700963466H1
aaaaagcgtgaaggacagtgataggtttggtttggaaggaagaagaaaatgaaggccatagtgataacgaggccaggaggtcccgaagtgctccaacttgaggaagtggaagatcccctagtcggagacgacgagcttctcatcggagtccacgccacttcccttaacagagccgatacctttcagaggaaaggctcctaccctccccctaagggcgccagcgttacctcggtctcgaatgttccggaactgtcc

SEQ ID NO: 15038 - DNA, 251 bp, Glycine max
  Clone ID: 700963469H1
tcgggaaaaggattggctctgagggctgggcacgggggtcccagtcccgaacccgtcggctgtcggtggactgctcgagctgcttccgcggcgagagcgggtcgtcgcgtgccggtcgggggacggattgggaacgggcccttcggggcctcttccccgggcgtcgaacagtcaactcagaactggtacggacaaggggaatccgactgtttaattaaaacaaagcattgcgatggaccctgcggatgttg

SEQ ID NO: 15039 - DNA, 251 bp, Glycine max
  Clone ID: 700963470H1
tctcagcatactgggaaactttctgagggtagcaactatatacaaacaagaatcttcaacaaggatcaaaatccaagcttggagttcaccttagggagatcaaattggcacaacagtgaacatgcctaattttaattggtttacatatatgatcactttattactagccaaattaatagaaaagattaatatgcacaggtatataaattaatatataggtagtgcttttgtcaagacaaagatgtctgcac

SEQ ID NO: 15040 - DNA, 250 bp, Glycine max
  Clone ID: 700963471H1
ctccgtttggtttaggattgagtgttggatctagtcatctagataaaaaaaataaaaatgaagatcattgagaaaattcgcgcagcttctgctgatccaaacagggtggtgttctcatttgagttcttcccccccaagactgaggatggtgtggacaatctgtttgagaggatggaccgcatggtggctcacaacccctctttttgcgacatcacttggggcgctggagggacaacggctgatcttacat

SEQ ID NO: 15041 - DNA, 249 bp, Glycine max
  Clone ID: 700963472H1
cagaaacttgcacttgctgcattcatcttactggggagaatatattagcgtttgtttctcttagtcttattcagttcaaagtgttgctgcgtttgaagatgacggaggaacacgagaatggcgccaacgcaagcgaggaggaacaggtcataggcccgggcccggcccctcgtgcccggcccaagcgaccccttcagttcgagcacgcctacctcgacgccttaccctctgccaacatgtacgagaaaa

SEQ ID NO: 15042 - DNA, 247 bp, Glycine max
  Clone ID: 700963474H1
gaattgaaccaactcgaaaatagttcggaactcgattcaataatcagctcgttgaatttggttcatgaaccaaatgagctgaatttgagctcgttaaataaatgacccaaacttgagctgctaatagttcaactcatttgattcatgaattggctcaatatatatatatatataattgattgggtattctattattttatatatatctagggcagggtagtttttatttatgcagactttggttata

SEQ ID NO: 15043 - DNA, 248 bp, Glycine max
  Clone ID: 700963477H1
gtagttcttcatcatagtcttaaacattaaaccttagcaaaactcaacaatgctagacatcaaaggctacctcgtactcttcttcctatggttcatatcaaccattctgatacgttccatcttcaagaaaccacagcgtctaagactcccaccgggtcctccaatttcaatacccttgctgggacacgcgccatatctccgttcactgctccaccaagcattgtacaagctatcactgcgctatggac

SEQ ID NO: 15044 - DNA, 253 bp, Glycine max
  Clone ID: 700963481H1
cataaattgattgaataacgaaatcttcaatgaccggccattttctccggacacccctcacactcaagatcgctgctttcttcttcatcgcagtcaccttcttctacttcggcaagcactggtccgatggctaccagcagctcgtcttcttcacccagcgatccgacccggattcgaactcgaacccgtttgtttccacgtccccgaataacgccaagtccttcaacgtctccgccctaattgagaacaacac

SEQ ID NO: 15045 - DNA, 252 bp, Glycine max
  Clone ID: 700963482H1
caacaacagagaacacgagtttgcagccataaaaaaaccccacacattcagacattgttgtgttgtgtaatgctatctccgatggctctctctgcgcatatttgccgtttccccgccacacgcgctgacacttctttgccggagagtctcaccagaatccggtgccggaaacctctctccgtccgatgctccggcgattccacttccggctctgtgggttcggagttcgatccgaaggtgtttcggaagaac

SEQ ID NO: 15046 - DNA, 250 bp, Glycine max
  Clone ID: 700963483H1
caaaaagttctgttctttttcccacccaattcagttttctcaaatggctcgtacgaagcaaacggctcgcaagtccaccggcggcaaggcgccacgtaagcagctggccaccaaggcggctcgtaagtctgctccggctaccggcggcgtgaagaagccgcacagattccgtccgggaaccgtagcgctccgcgagatccggaagtaccagaagagcacggaacttctgatccggaagctcccgttccag

SEQ ID NO: 15047 - DNA, 139 bp, Glycine max
  Clone ID: 700963485H1
gaaaaaacctgaagtatactactagggaagcatcagattttcatgctcctcctttcattaaattaaagaacagtttctaggtatggaaactctttcatatgggtcagcaccatgctgccaagttacgtgaatctcaaag

SEQ ID NO: 15048 - DNA, 247 bp, Glycine max
  Clone ID: 700963488H1
ggatatgctcgattcgagggtgacgagggatagcagatctgaatctcatcttcccaaaaccctctttcttctttttctcctctgatctcatttcaaacctaaccctaaccacaacagaggaagatgttgacgaaattcgagacgaagagtaacagagtgaagggcctgagtttccacccgaagcggcaactaaagctggcgagtctccacagcggcgtcatccagctctgggactaccgcatgggaa

SEQ ID NO: 15049 - DNA, 256 bp, Glycine max
  unsure (1)..(256): unsure at all n locations
  Clone ID: 700963443H1
attaggaggaacctccagctatcgttgctgccggacggngncattagtcgccgccaaccgaaactacgagagttacgtcgtcgttttgaagctcaagccgccgcacgtacacgaaaacgtcgcgtcgtgctccaattgacctcatcgccgtgctcgacgtcggtggcgccatgtccggcagcaagctccgtctcatgaaaagctccatgcggcaagtgatctcgtcgctccgtccaaccgatcgtctttccatcgt

SEQ ID NO: 15050 - DNA, 257 bp, Glycine max
  Clone ID: 700963407H1
cttaagcgaaaagcaatagaattcaaagagagagtttcttgttctgtattttttgatttgatcatttcaatcttcaatttttttttatatatccaccaatccgcaaagtgcaaatttctaatctttcacgtattgggttcttctcttttccctcttcgtctccgatcgatccaattctcttcccatggctacgatcggacacaacaatctcaatgccaaattggttcttctcggggacatgggtgctgggaaatcca

SEQ ID NO: 15051 - DNA, 261 bp, Glycine max
  Clone ID: 700963408H1
ctgttgcagagacagtggttgagaatcactgctcaaaagaataataataccaaattccaaccagataaggagtagtggaatttggaagcttcacttctttcttgtattacttgatgcccttttcccttctctccctccctcttctcttattctcattgtttagttacctaccgtggatcaaagtcaattccctatctcgcttctttttgtagttgatttcttttgggtttcgcagtctccccaaaagggttgtttttattt

SEQ ID NO: 15052 - DNA, 258 bp, Glycine max
  Clone ID: 700963409H1
caaaatggttttctcgagttgttcacgcgcaccgcgtggtgggtgattccaaccgtttgggtgccggttgcacgttggttcatttccaactccgtaaaatcaggcctcccttctcttgatgtagctctgctcgtctttcttggcatcttcgtttggactttggccgaatacacattgcaccgtttcctcttccatgtcaaaaccaagagctactggggaaataccttgcattatcttctccatggctgccaccacaag

SEQ ID NO: 15053 - DNA, 256 bp, Glycine max
  Clone ID: 700963410H1
gatggaaatcggtttggagaggggtttccgaactgcacttagtgagttcatattaatgcaactgcagcttgccccagtattcttcacattttcacttgggacaaaaactcattattttggaagaacattacttcatggaggtgcgaaatatagacccactggtcgaggatttgtggttttccatgctaaatttgctgacaactatagactttactctcgtagccactttgtcaagggtattgagctcatgatatta

SEQ ID NO: 15054 - DNA, 257 bp, Glycine max
  Clone ID: 700963411H1
aatggcttgtagaccttcttctttccttgcacttcttctcatcaccactatccttcttgccactacatggcaagcagttgctagacgccacattggtccaaaacactcaaacaatggggacaagaaagagcctcagtttttgttccctcctgaaggtaatttccattttcctggctttgggggagtagggttgccacctttctttgggtttacacctcaaaacccaaacactggtggtagtggactagggtcaggac

SEQ ID NO: 15055 - DNA, 260 bp, Glycine max
  Clone ID: 700963414H1
ggcagtgaaagctagaatccgccgagagaacaccaactctagaaggtactcaggatcttacatgagaagctttagagaagacacaaggtcatttagatcaaacataaccatttctagcactgcttcttcacccggataccccttaaaagatgatatagacccttcaacatattctttcacaactgctcttaaagcattgcaagcaagggcaggctataacaggtggggatgcttatctccagatggttttgctttaaatt

SEQ ID NO: 15056 - DNA, 271 bp, Glycine max
  Clone ID: 700963416H1
accccatcaggatcgccgagggttacgaaatggcgtccaggatcgccgtcgagcatctcgagcgcgtcgccaacaagttcgagttcgacgagtctaatttggagcccctcattcaaacttgcatgaccacactctcctccaaaattgtgaatcgctgcaagcgtagcttggctgagattgctgttaaggctgttcttgctgttgctgatctggcgaggaaggatgttaatttggatctgattaaagtggaagggaaagttgggggtaaatt

SEQ ID NO: 15057 - DNA, 259 bp, Glycine max
  Clone ID: 700963418H1
ctaggaggggtgctcatgtaggaaatgataatgtgggttctggtgctagtggtaatgttaatgctaatgctgcctctgctgtgctggctggtgcgaggggggagtctagtaagaaggctgcattgggtggtttgaggaggcggggggcaggaaacttggggaagttggatttgaatgtggagtttagcaatgaggtggaggagccttcccgtggagtgcacaaccgcgaagggaatgctgctggacatgctgaggataa

SEQ ID NO: 15058 - DNA, 258 bp, Glycine max
  Clone ID: 700963419H1
tccgtttttctctctctctcgccaaacgcttcttccactatgccttcccaatcggttctggttaccggaggagccggttatatcggtagccacaccgtccttcagcttctcctcagcggttaccatgtcttcgccgtcgacaacttcgacaattcttccgaaaccgccatcaacagagtcaaggaactcgccggagaattcgcaaataacctttccttttccaagctagacttgcgggacagagctgccctcgagaaa

SEQ ID NO: 15059 - DNA, 256 bp, Glycine max
  Clone ID: 700963420H1
aatgatttatgtggtatcaaggagtctgatactggtttagctgcaccaagccagtgggatcttgtttctgataaacaaatgatgcaggaggagcagcctcttcaggtagcaaggtgcacaaagatcataaatccaaattcagaagatgccaaatatgttatcaatgtgaagcagattgcaaagtttgtcgttgggctgggtgataaagtttcacctaccgacattgaggaagggatgcgtgttggggttgatagaa

SEQ ID NO: 15060 - DNA, 255 bp, Glycine max
  Clone ID: 700963421H1
cacctttcccttggcgacgccgtgagaaacgaaaagcgaacaaaaaaaaaacagagtggggtgggaggcacacgcacaaacgcagagtcagaatctccaatcttcaatcggagacaaagctagctcgaacgaacgaagtagagtagtgtgctacgaaaaatgtggcggtgcatcgcacgtggtctccgtggacctgcttccaccagatccacctgacatcactcacttggatctcaactttctagattcttctct

SEQ ID NO: 15061 - DNA, 245 bp, Glycine max
  Clone ID: 700963424H1
ctttaaaatttgaatcaaaacgttcagtaactgctggtaatcgattaccattcttgtgtaatcgattacacagtgtaaagtttgaattcaaatttctaatagctgttataagtcattttggccattggtaatcgattacatcctctggtaatcgattacgagagagtaaatctcttgaaaaagacatttttacttaaatttcttggccaaaccttttgcagtttcaatttgggattcccttccta

SEQ ID NO: 15062 - DNA, 254 bp, Glycine max
  Clone ID: 700963425H1
aaaagatggaactggaacatgtgaccagcttgtcaagaagagatcatgaaagaccaaatcccttttttcgagtgagagcagttagcttgggtggttcgttggttactgaaggttggatcaaaccttctctcttcgatggcattccaaacaaagacttattcgatggaactagtcttcggttcaagtctgtgtcaacagggaaatatctatgtgccaagtctggagggggaaatgtcctacttgcgaacggcaca

SEQ ID NO: 15063 - DNA, 256 bp, Glycine max
  Clone ID: 700963426H1
gaaaattgttattttgatagggtttacagcaaatgcagcatagcctgcctcgtcacaaaatactgaacgccgcagctctgtggttgatcgacgcattcttcacttcaatcccacaatgtctataacgcacagcctcaccacttcactctcttcttcttcctctgctttcttagctccctcttccttcaattccagaggacaggtttcgttgcctgtgaagagcgtgagcatttgcaaatgcgttgccacacccgaa

SEQ ID NO: 15064 - DNA, 199 bp, Glycine max
  Clone ID: 700963427H1
aaggaattgtcctatttgtgactctgacatggatgctagcgtgcatgtcaatctctcttagtacaactttttttcttttttctttttacataattttcattgtagagtttagaacaacagaaactagaaacaaaatagtttatcttgtcaaaaagacagttagaagaaaaaaaaaatagaatttggaattcttttgttc

SEQ ID NO: 15065 - DNA, 257 bp, Glycine max
  Clone ID: 700963430H1
gtttgtttgttttgtttctatgtcttgtcatatgttctaagaaggcaatgttgggctactagccccactctgctgacaattggcgtgaccgacatctgtagcttttatgtccacggaggaatcaatgcacctgtttttggtgggtcttgttcgtcttcaactggaaactattacctactttggtagacacaaatattatctctaaagcttgtttacaatgctcctttaatcttattgatacaatatatgcaacaagg

SEQ ID NO: 15066 - DNA, 259 bp, Glycine max
  Clone ID: 700963431H1
cggcaacttcgagctgggtccgaagccctccgccctgaaaggaactgtggtgattggtggcagccactcgatcccagaatgggagatctctggcttcgtggagtacataaagtccggccagaagcagggcgacatgctgctcgtggtccccgagggggcctacgcggtgcgcctcgggaacgaggcctccatcaagcagaggatcaaggtgatcaagggcatgtactactccatcaccttcatggtggcccgcacctgc

SEQ ID NO: 15067 - DNA, 261 bp, Glycine max
  Clone ID: 700963432H1
caagaaggcatatgtcaggttgacacctgattacgatgcattggatgtggcatacaagattgggattatctagggtagtactagtacttaggcagctctatggttattcttgaagaaaacttttttaaaaagcatagattctatattttgtgttttgttattttgtatcttttgtctcagttgacactaagcagaccttgtgtttcaattttgactagagagttgtttaaattgaagatttaaatgatcatgttaaaattt

SEQ ID NO: 15068 - DNA, 129 bp, Glycine max
  Clone ID: 700963433H1
aaggactataataccgtcagccacactttacaccccatcctcactcacacactccaatgaagtcataacaagaagaagaaaaagaagaaaaaaaaacacttcccagagttcaaagacctcaaattccac

SEQ ID NO: 15069 - DNA, 258 bp, Glycine max
  Clone ID: 700963434H1
caagcagcgtaggtggtatatttcctcaagtcagtataaacttcatgggctgagatctatggttttgaatccagaacattacctcatgcattatggtttccttgatggtgctgacaatgtggtgcattggcttccaaaaagtggagcagggattcacaattttacgagatcttgtcctaaaagataagatatatgtatatgacttagctaatcaacgaattggatgggccgattatgattgtaccttgtctgtgaacg

SEQ ID NO: 15070 - DNA, 257 bp, Glycine max
  Clone ID: 700963435H1
tgaggattgagccacactttgctgagtgctacgggaatatggcaaatgcatggaaggagaaaggaaccattgaccttgcaattcgctactacttgattgccatacagctccgtccccattctgctgatgcatggtcaaatctagctagtgcatacatgcgtaaaggaagactcactgaagcagcccagtgttgtcgtcacccacttgctataaatcctctaatggttgatgcccataccaacttgggtaatcttatg

SEQ ID NO: 15071 - DNA, 254 bp, Glycine max
  Clone ID: 700963437H1
ccttcccagaaattaggttttagtatttctttctttctttatttatcagcgattcgtggcaatttttcgaaggtacggtttgatgggtgatcgcggttcgggcgtggcgaaccgatttggatgaagcaggcggaggaggcgaactgaagagcgaggcggagaaggacgcggcggcgaaggcggcgttcgaggccaccttcaaggctttggagaacaaacatgacaagggaggaggaggaggaggaggagggagc

SEQ ID NO: 15072 - DNA, 255 bp, Glycine max
  unsure (1)..(255): unsure at all n locations
  Clone ID: 700963439H1
ggtaggagatactctcattcacctcccatcatcattataatcattcattccaacctacccttattcttcttcttcaatttcacacccatcatgatacattttccgatcctctttctcgtcgccaccctcatcaccctcgcctccggtgcccgccacgatattctccggttaccctccgaagcttccagttncttcaaagcacctgctaatgccgatcaaaacgatgagggcaccaggtgggcctttttagttgcc

SEQ ID NO: 15073 - DNA, 250 bp, Glycine max
  Clone ID: 700963441H1
gtttctatcaacactactccctccaccatgcaacactgcatgcagaatgcttccaagtatggataatacttgcccatgtatgtcggatattacgcagatcattaggaaagctctcattccatgctattgtttgtattttccttgcatcttctgtgtctccccaaatgaaagagcgacattgcacactaacacagatcttgtagcaatggcgagcgctcccactccacgcgaagagttcgtgtacatggcg

SEQ ID NO: 15074 - DNA, 267 bp, Glycine max
  Clone ID: 700963402H1
gtttgctttgttctctttctctctcctcaaattttttcctctctctctagggttccaagagtgtcttgaactactccagaaccctctcttgtttttcacaaatttgggtttagtagagtactgacccagaaaagaaggttcaacaggtacctaagagaggggatagaaagaaaaaaatagaaactgtacgtataaaagaagaaagaaacaaagatataaggaaaaagggaaaatattttgaataaggaagatataaggcaatatata

SEQ ID NO: 15075 - DNA, 264 bp, Glycine max
  Clone ID: 700963368H1
catcatcaaagattcaggaaagtgtgtgcgatgcagccggagatgaacttggggaggatattgaatacattgatttatacaatatttatgctccactatgcaagaatgcaaatctcacagccctgcccaaaaggaacacaattgtgactgatccatgtagtgagaattatgtgtacgcatatcttaatagaaaagatgttcaagaggctctccatgccaatgtaaccaacctcaaacatgactgggaacctgcagcgatgtcat

SEQ ID NO: 15076 - DNA, 98 bp, Glycine max
  Clone ID: 700963369H1
atggatccgtgccccttcgtgcggatcctcgtcggaaacctcgccgtcaagtccccggcatcatcaaagccctcttctttctccggcaaagtccaccc

SEQ ID NO: 15077 - DNA, 265 bp, Glycine max
  Clone ID: 700963370H1
aatcaacaacaacatggctaatttgcaaggagggcctgactttgacaaaatcttccacttcctctccatttgcatccttgctttcatcaatgaaggctcttcctccctctcaagtgcattcatgaacgagccatggtcatggggcataagcattcccattagtttgtacgtgaaatttgcacttgagatccacactcaccttggaatctgtgttggggttggagtaccctctttggtctattggggtgcacacgtggtgccattg

SEQ ID NO: 15078 - DNA, 262 bp, Glycine max
  Clone ID: 700963371H1
gaaaaaacgacattcattcatctatggctacccttattgctcccagcaaccactctccccaagaagacgctgaggctctcagaaaggcttttgaaggatgggggactgatgagaaaactgtcatagtaatattgggtcatagaactgtttatcagaggcagcaaatcagaagagtctatgaggaaattttccaggaggatcttgtgaaacgcctagagtctgagatcgtcggagactttgagaaaccgtgtaccgatggata

SEQ ID NO: 15079 - DNA, 263 bp, Glycine max
  Clone ID: 700963372H1
gctgcttcttcagctagctccgttcctcctccatctcattctcattctcccaaatcttcattcacaagacaaaatgggttgtcatggtagcaaggagaaaaaatcaaacacttcctatggatcagcagccactggcagtggtagtggtagtggcagtggtggtggttacaacactgttcagccatcaccacctactaccgatcaggttcaagcatcagcacagactccagaaaaccgaaaagcttctcctacagtgcagaaga

SEQ ID NO: 15080 - DNA, 260 bp, Glycine max
  Clone ID: 700963373H1
gtccatgctcttcttggatggatgtgcttctctgcatttcttttctagaatgtgccccagcttctccttcttgtatttttccagaagaaataatctgattcgccctagccctgccattctgcattccctcagcattcattgctttttcattcctcatgacttttgctcagtgttcaatttccaacatgtttcaacatagaaaccatgatgatttcgcaactgtggcaggtgttgtggtacttcatgacgagttttatgtt

SEQ ID NO: 15081 - DNA, 255 bp, Glycine max
  Clone ID: 700963374H1
cttgcctttttctttttcctttttctctgcccagctatatgcttgtgtaagaaggggaactactaagccattctaaagggagctgaagaatgtggaatctgaatgactctcccgatcagagaaaggactatgaatctgaaggctgttcttcttctctgaatgatgataaaggcaagagagtgggatctgcttccaatcagtcctctgcggtggtattgaagatgggatcggaaggaagagacagtgaaagaggtg

SEQ ID NO: 15082 - DNA, 256 bp, Glycine max
  Clone ID: 700963375H1
cttttccctcgttgaaatgaaaatgggttcttctttgtggacttcgtgtctaattttggcttcactagcctcttctgcattctgtgcctttccacggaggccagtggatgttccattcggcagaaactacgttcccacttgggcttttgatcacatcaaatacttcaatggaggttctgagattcaacttcatcttgacaagtacactggtactggcatccagtccaaagggtcatacttgtttggtcacttcagc

SEQ ID NO: 15083 - DNA, 247 bp, Glycine max
  Clone ID: 700963376H1
cttattcaaatcctctctcatctcttccttttcgctggcaattaactcacgagggctgcacatcgacaatgggtggggagcggaacaaggtcttctctttggccgaggtctctcagcacaacaatgccaaagactgttggcttgtcattcatggcaaggtttataatgtgacaaagttcttggaggaccacctggaggggatgaggtcctgtgtcctccacaagggaagatgcaaccaatgattttg

SEQ ID NO: 15084 - DNA, 123 bp, Glycine max
  Clone ID: 700963377H1
agagtctccattgtgaagagagagagagagagagtgatggggaattcatttgcggtgttcggcttccggcgagaggtctggtgtcggcggcgaggtgacggacgatttcggcttgaggcgaag

SEQ ID NO: 15085 - DNA, 151 bp, Glycine max
  Clone ID: 700963378H1
tgcacgcacttaaccctatcttcttagttacatatttcaattttaaaactccaattacaatgatccttccaaacatcaaagttcgtcttttcttactcttttgccttattgggatagtgtcagctcagttatcctctaccttttatgccaa

SEQ ID NO: 15086 - DNA, 129 bp, Glycine max
  Clone ID: 700963379H1
gacatatatcttagtcagtctcagctaggtactggtgtgggcgttattcggtcatggatctgtgacaagtatgcgatacggacttatgcttctcgactgaagatatcagggtgaactgatcatcctcta

SEQ ID NO: 15087 - DNA, 189 bp, Glycine max
  Clone ID: 700963380H1
aattctgatacagcaatttccattgctgaggagatggtggaacatctggaactcacaaatgaggatgtatctgtcattgcagagctaataaatgacatgattgctaagcttgtccccaacttgaaacccttaagtgagaaactctcatccggaacagatcaattgtacaggccttcttcggaagttcag

SEQ ID NO: 15088 - DNA, 268 bp, Glycine max
  Clone ID: 700963381H1
tgacacacaacacgaaacacacacatgacacaacacagcacgctgcaagaacaacaacaacaacatagccacaacacaaccaaatgacacccacaaagagggagacaaagagagacgctactacttcttcctcctctctgctcgcagaaccctgaagctccagaagccccttttcgaattaattcgcttctctcatatctaaattcattgattcttgtcgtggacatgttggagggtccaaggtcacttgtgtcgagggacatacaga

SEQ ID NO: 15089 - DNA, 267 bp, Glycine max
  Clone ID: 700963382H1
gggcactcaacattttacactcttttcttcttctcgttgttgcttcggtgttgaatcatggatcagaaagtcgatttcagtgctccgcattccatgggaaccactatcatcggcgttacttacaacggcggtgtcgttctcggagccgactctcgaaccagcactggagtgtatgttgccaaccgagcatcggccaaattcaaacggttaattgttattgttaacgtgtgtcgctctggatcggctgctgattctcagattgtctct

SEQ ID NO: 15090 - DNA, 266 bp, Glycine max
  Clone ID: 700963383H1
gctgaagcaagtaaatgagtttgctgcaaagggtcgcggtcctccaagaaagaatggatttgccagggcatcctccatgtcaccaaatgcaagaatggccagaatagcttcacttgagaacatgctgagcatatcatctaattcacttgtagcaatggcttctcaactttctgaggcagaagaaagagaacgagccttctctaatcgtggacgctggaatcagttgcgctctatgggagaagccaagaatttgcttcactatatgt

SEQ ID NO: 15091 - DNA, 250 bp, Glycine max
  Clone ID: 700963384H1
aggagctttcctccatacgaatccaaggaggagagaggagacacagacacaaaggaaacggaaaaagcaacacacacaaaaaaggtctgtgcctcctcttatatgtaatagatagtttctgaaacaaaagaaaaaaataaaataaaaataaaaggaccacatggattatgaaaacaacagttgaatttgggagggggtactcttatacccgcgtgtgtgtggtggactagtggatacagcatccgggctg

SEQ ID NO: 15092 - DNA, 260 bp, Glycine max
  Clone ID: 700963386H1
atggctcccaagggtttaacctttctggctgtgttaatatgcgtttcagcactgtcactgagtccttctgttgcgggggaagggcaaaataatggccttgttatgaacttctacaaggaatcatgccctcaggctgaagacatcatcacagaacaagtcaagcttctctacaagcgccacaagaacactgctttctcctggctcaggaacatcttccatgactgtgctgttcagagttgtgatgcttcactgttgctgga

SEQ ID NO: 15093 - DNA, 258 bp, Glycine max
  Clone ID: 700963387H1
aaacgtatgaattggtcggtttttctccggagtcgtcttcacttttctccgagtttttattatcatcatctctctcgtgtccctgtctccatctccatctcttagtttcttcttcaaatggcagaagttgaagacatagacaaccctcatcacgaccaccatcattacctttcttcttctacaacacaacctcaagggataatttccccgcgatatctgtaaagaaccttcgtgggagtgaacaacaacagcaataaa

SEQ ID NO: 15094 - DNA, 95 bp, Glycine max
  unsure (1)..(95): unsure at all n locations
  Clone ID: 700963388H1
tttaatacttaattcgtctttgttatctgtctttctgactttccccttttatatttctgggngcgatattgttatcggttaatgtgtgcacaact

SEQ ID NO: 15095 - DNA, 250 bp, Glycine max
  Clone ID: 700963390H1
accccccacgaagcaccaattatggctctgaatctttgtatctcacctaagtttaaatgggttccttccttagatagtgcttcctattctttgagaccttcacttgggcctggttttggtaccataaccattgcaagtgtgagcctaggtcctacaagagtttgagtttgaaggaggagtgggagtgttagtgtaagatctagtttagaactgcggggcccacagtcacagtgggacaggtcactgaggt

SEQ ID NO: 15096 - DNA, 247 bp, Glycine max
  Clone ID: 700963391H1
gcatcaacaaaaccaactcctggacttgctgtcaatatcacaccataactgctattgaagctctgctctctgacttgcttgcatactctctctgttctttctgttcacaaagatttgtaaatttatatttatcataccatatatactatataatatattgtatgctccacttgtttaaacctgtgtcgcatactctggaccataacatcgtggggctgatgtctagagcattggggcatgagtacat

SEQ ID NO: 15097 - DNA, 255 bp, Glycine max
  Clone ID: 700963392H1
gtttttggatgaaggtcccggtaactctttcccccgtaagatgggacgtgttgatggacacaatcctcatatcaggaaggatttgccgttgacctggactaatgtctatgaggaggccactaattcatctgtatcattagagacttcaagtaaagatgagactggtcagtttttggatccaaagaaggtacacattcaaaggaacctaatgcaagtgaaagaaaattcaaagagttcatttgtggtgggggagcc

SEQ ID NO: 15098 - DNA, 244 bp, Glycine max
  Clone ID: 700963394H1
atcaagattcaagcacatagttatcatcaattccccagctagttttggccacgcctgcatcttcttctgctttaagctatggcctctaacttcagcttgagaactttgatgatatttgcccttgcattttctctcgccctgcaaggcactcttggagggatagaatgtgagagtctgagccatgacacatgctcattcgccgtgacatctgctggcaaacgatgtgtgcttgagaagcaggtga

SEQ ID NO: 15099 - DNA, 194 bp, Glycine max
  unsure (1)..(194): unsure at all n locations
  Clone ID: 700963395H1
aaaatcccttgatttccttccttcaccgcacccacttaaatancnnaaattagttntccaatgcagaaagcaggttacggtggcgatggaatatacaggtctctaaggccttgtttggttctcccaaatgaccccaacctctccctcgtctcattcctcttccaaagcgtttcctctttccaatccaaaatcgc

SEQ ID NO: 15100 - DNA, 190 bp, Glycine max
  Clone ID: 700963396H1
gttcttgttattcattattcattctcagcttcttttcttctggggggcaaaaggggtcacttttcagatccgagattgagctcctttacccatcatcatcatggagctcctcgggtacctgaatcagggtcacccttctagaggaacaacacttgttattactctttcattggtgctttcgacacttgtg

SEQ ID NO: 15101 - DNA, 248 bp, Glycine max
  Clone ID: 700963366H1
cttttgctggataacaatgaatttcttgttggtttatctcccgaactaaatgaactgaggatgctttccgaatgtcaagtagatgaaaatcagctgactaatgctgctaaaatgccagcttgtacagaaagagctaccacaaggcatattggtcaagtaaaggtactcgtggctcacaacattctaatacttctcctgctgctaatcattaccagtttaatcgtgtggctgctccacctcttgagagc

SEQ ID NO: 15102 - DNA, 269 bp, Glycine max
  Clone ID: 700963401H1
gaagcaaacaagaacaagttcatagaggattggggcactgccagagagaatctggagttcaatttccgttggactcgccgcaaccttgctcttgttggcatcttcggcatcgctattcccgtcctcgtctacaagggcatcgtccttgaattccatatgcaagatgaagataatggtcggccgtacaggaagttcatgtgagagagtatggagagtcttttgtaataattcgtcaagttagaccttgatattatgaggctacaaaccat

SEQ ID NO: 15103 - DNA, 133 bp, Glycine max
  Clone ID: 700963332H1
ctcttcttcgtctcaaatatcttcgttccttcgattcgttccatttcttccaaaatggccaaagacacagttcgcgttctcgacactggagctgctgggtgaattggttacgaagttggccccaagattgaaa

SEQ ID NO: 15104 - DNA, 216 bp, Glycine max
  Clone ID: 700963334H1
gctaacatgggtagctccgaattattattattattaacaaaatcatacattggcgaccagggtcgaagattaaagaaatggaagtgctgcggatgagggagttattgacactttggtcaacgttgcaaattaacaacgttgccctagtggggggaaaccacaccgccgccagattttgcactcgctaagtccccgttgttcttccccccctttccc

SEQ ID NO: 15105 - DNA, 264 bp, Glycine max
  Clone ID: 700963336H1
gagaaattactcactcgtggcaggaaagtactttctgacatttcaaactctgggaagccacaggttcctgagataaaaaataagaagaccctgaaaccaatagaggagtctcttccccccagtgcaattgccgaagaacaaatcttgcacgatcataagaaatgcatccattcacagtttgaaactgcatatggcatcaatttttcaagactgttggacttgacgatggtacatttatatattctatgtggtgcatttttttgg

SEQ ID NO: 15106 - DNA, 100 bp, Glycine max
  Clone ID: 700963337H1
ctttcaaccccatccaatcctcacatgcatgctgtgtctgccaaagtgccaagtcacataacatttccattgttaccagtctttctttccacaaaacata

SEQ ID NO: 15107 - DNA, 269 bp, Glycine max
  Clone ID: 700963338H1
ctttgaagagctgactgcagcctataaaagtggagagttacatcctggtgaccttaaaccagcattggcaaagtcgttgaataaaattctggagcctgtaagggaacactttaggaaggacagcaatgctaaagagctattgaaaagggtcaaggcttacagagtcaagtaatatgctgattaaggacttcaggctaatatctattctttgccaatcagccatagaattttcacgttgagattatgcacttgtggacttgtaaaatgtg

SEQ ID NO: 15108 - DNA, 265 bp, Glycine max
  Clone ID: 700963339H1
gtggaatatatgagagaggcgtgtgctttgaaaagtagcgtttgtatataaactatgtgagatgtggcctcttttgatgttatctttgtctctaataaaaccacgatttcatgccacgtggcctgtgttatttggttatggtggatcagttatgaacttatttagggtttaattatggtaaaacattgtttttcttaatttctcttgattcctgatctttggctttatggtggagtttgcactttgcggcatgcatgcatttgaa

SEQ ID NO: 15109 - DNA, 262 bp, Glycine max
  Clone ID: 700963340H1
acatcacatccatccttttgagtccctcctgaacctgtctgcatccattcccatttcttcttccgtatgcatgttcccaccgtctaaaaaacctagcaaagcaacaaaacggcgtcatgcttgggaagtagcatgcaattgtaaccctagaaataggagggacattctgatcggccttggaggactctatggtgctacaacaagtctcacaagtaacaacactggttctgcaatgggtgcttcattgtcgcctccagatcca

SEQ ID NO: 15110 - DNA, 263 bp, Glycine max
  Clone ID: 700963341H1
cttcaattcatatcatatcaattagatttagagctaaacataaaattgttttcacataccatggacaacaacaatgacttttggaaattcagtgaccagttgaggcttgaatctggtttggccaatctgtctctgaatgattattccatttggagcaacagctacagctccaagaggcctgatcagaggaggaatttgatgtcaagggagtgatttcaacaacaacaacaactcatcaaaggcttttgatgatgatttcaatg

SEQ ID NO: 15111 - DNA, 244 bp, Glycine max
  Clone ID: 700963342H1
gaagattcaatcggagctcagtctcaagaaacctaatcgccgatcgcgtcgccgtcgcgccgaaagttcgttgttgtactgtgaaattgccggttttaatttttcgttttgtgataattctgagaattagtaacaattattgtggtttttttttctgttaggtaacgttgctgtggttctttttttttcttttttcttttttataatttcgttgccgttttgtaggtgaagatagtcgttttgg

SEQ ID NO: 15112 - DNA, 259 bp, Glycine max
  Clone ID: 700963343H1
tccaactccaagtcacattggtgacaaagttagaaacaaggagaaagaaagaagatggcaggaaagaaaatcccagatgtgttgctgaattcaggacacaaaatgccagttataggcatgggaacttcagtggagaatcgtccatcaaatgagacccttgcttctatctatgttgaagccattgaggtgggttaccgtcattttgacactgctgcagtgtatggaacagaggaagccataggcctagccgtggccaaag

SEQ ID NO: 15113 - DNA, 262 bp, Glycine max
  Clone ID: 700963345H1
gtggattgatgatagtcatagcattaatattgggaaggctgtaccagtgcaccctcaaaagccagaggaacccagaaagccatccaagaagagggctaggccgggggagagtactcgaccgcggccaaaagatcgtcagcagatccaagactgtatcaaagagttgagacgaattatccccaatgatggaaagtgtagcattgatccttggtagaccggaaccatcagatacatgcttttcttacaaagtgtcctcaagtat

SEQ ID NO: 15114 - DNA, 172 bp, Glycine max
  Clone ID: 700963346H1
gaaaaggagaaggtttgggattttagagcgtatgtggttttggttggtaactgaagagtgtgtggaggaagaagaaggaatcggcggtgttcaactgacgatcgcatctcaaagtttggtcacgatcgttgctttgcttattcgacatttttttcccttttggtttttctga

SEQ ID NO: 15115 - DNA, 141 bp, Glycine max
  Clone ID: 700963347H1
ctttctcgcattttccctcttctttctctctcacgttttccgcttcagttttctcgggaaaatcatggtgaaaggtccaggcctctactctgacattggcaagagagctcgcgatcttctgtccaaggattatcagaatga

SEQ ID NO: 15116 - DNA, 226 bp, Glycine max
  Clone ID: 700963348H1
tttctgtagtctcaattatagtaacagtgcaagatctattttccacatcttggatatcattggctaaaagattgaatattgtgttattccttctagtagtcaaggggaacaatgaatgcactagcagccaccaacaggaactttaagttggcctctaggcttctgggattggattcaaagcttgagaaaagtttactgattccattcagggaaatcaaggttgaat

SEQ ID NO: 15117 - DNA, 240 bp, Glycine max
  Clone ID: 700963349H1
gcagcgtttggaaggacgcatcctgttgtgacgtacttgcccaagtcaaaagcagataaaaagaaaagtctgctgggaagttcaccagattctagtgaggctcaagtggcatccaaggtggttgatgaatctgaagatgatgatgattctagtgatgatggtgattctaatgatgatggtcctgtggagtgggcttcatattggccacctattataacaatctacgtggttgcttacttc

SEQ ID NO: 15118 - DNA, 272 bp, Glycine max
  Clone ID: 700963350H1
aacaaacttggttttaattggtataggcttgccaaggtcttgttgattgagcgttaagtgctttaactaatcaatcccaagaccttggtttaccttgccacacaaaaaaatatataaaaaggcaaaataataataaaaaaaagagaaggcttggagccaagaaaataaacacaaagcacaagtcatggaaagaataatggttggaagtgcaacaaaggttgctttcaacctcttggtcactttcgccattgtcattccatgccttgaggctg

SEQ ID NO: 15119 - DNA, 270 bp, Glycine max
  Clone ID: 700963351H1
atgggattgacctcacaactcctcctttctttgttcatcagtacccttcttcttcttcttccctcttccctttcacaatctaaccagttttgtgacgctggaacttcatccaagctgttgatcaagggcggcaccgttgtgaatgctcaccaccaacaggttgccgatgtctatgtcgaagatggtatcattgttgccatcaatcccactattacggttggagatgaggtgacggtcatagatgccactggcaagtttgtcatgccaggg

SEQ ID NO: 15120 - DNA, 270 bp, Glycine max
  Clone ID: 700963352H1
cacacacagaagatcgatctggtagaaacgatgaaggaactatgggcacaaatggggtcactaatggccactattgtgttcatgtacacaatctttgagcgcttcttccctccacacttgcgtgaaaaacttcaagcctatactcaaaaactcaccaaccatttcaacccttacatccaattaggcttccctgagttctcaggggaacgactgaagaagagtgaagcatacacagccatccaaacctacctgagtgcaaactcatcccag

SEQ ID NO: 15121 - DNA, 263 bp, Glycine max
  Clone ID: 700963354H1
ggcctgctcttgccagtgtaattgtggaagctctcaaggtggacagtttgcagaagctttgctcatctttagaacccattcttcgtagagttgtcagtgaagaagtggagcgtgctttggcaaagttaggtcctgcaagacttagtggaaggtctcctcctaaaatgattgaaggccctgatggtagaagcttacagctgaaatttaggtcccggctgtctcttcccctattcacaggaggaatagtggaaggcgaccagggg

SEQ ID NO: 15122 - DNA, 150 bp, Glycine max
  Clone ID: 700963355H1
ggggaaggaatggacgaaatggagttcactgaggcagagagcaacatgaacgatttggtggcagagtaccagcaatatcaggatgctactgctgatgaggatgagtacgatgatgaggttgaggagggggagcatgctttcgaggacccg

SEQ ID NO: 15123 - DNA, 120 bp, Glycine max
  Clone ID: 700963356H1
caggcgaggagaaagatggaggggaaggagcaggatgtgtcgttgggagcgaacaagttccccgagagacagccgattgggacggcggcgcagagccaagacgacggcaaggactaccag

SEQ ID NO: 15124 - DNA, 262 bp, Glycine max
  Clone ID: 700963357H1
aaaaaaatggatgagaaaaaagatatagtatataatatatggaaatgatttgggtggcggggaattgtctttcatctggtaagactgatgacgaagttgttatcaccttcagcaccaccatgtccatgtctaagggttccaattccaaatccaaccgtaaaatatcgatatgcatacagtcacagagggcaattgcgtgttcgatgcagtgatatagtgatgaagagaaggagaaggagaagaagaagaagaaggaaaagcg

SEQ ID NO: 15125 - DNA, 107 bp, Glycine max
  Clone ID: 700963358H1
gaaaatcctttctttcctagcaagcttaccaagataatagaaaaaacatttcgatcatttccatatggacaagctctgtttcaactactgtttcgttggatactgcc

SEQ ID NO: 15126 - DNA, 206 bp, Glycine max
  Clone ID: 700963359H1
agaaaaaggaggaacgcagaccgaggcgtttccagttcgaaagggaaatgaaagtgtctttgttggtgaagggtaggtgagagaaacgaaaggggtgtgtgttgggttgaataggtatagataggatcaatgagcaacaacaacgcaggaaaggtggtgtgtgtgacgggtgcttctggtttcatagcttcatggatcgtcaaatt

SEQ ID NO: 15127 - DNA, 221 bp, Glycine max
  Clone ID: 700963331H1
gagataactagaaacagtgtgatgaaaatgaaggtccttgttttcttcgttgctacaattttggtagcatggcaatgccatgcgtacgatatgttccctctccgaatgaacactggctatggtgcccgtactccggaggtgaaatgccgaaatttggaggcttgctgtggaagcacacaacatctttggctttgagaccattcctgaagattgcgttgaag

SEQ ID NO: 15128 - DNA, 78 bp, Glycine max
  Clone ID: 700963360H1
atcgcgagcggccgccctttttttttttttttgaacaagacttatatgttatttaaagatagagattccaaactttac

SEQ ID NO: 15129 - DNA, 257 bp, Glycine max
  Clone ID: 700963361H1
ggcctcaccttgactttggatgggtaaataaagctacatatcatccaaagtgaaagatttgtgctgttctcttcttcttgtgtgaagccaaagccacaacaacaaccattggaacaacccaacaacaacaacatagtgaacaacaacaaccttggtaataataataacaaccatggagagcaccgaagactcatccacgagttcacaacaacaacaaccgaacctgccacccgggtttcggttccaccccacggacg

SEQ ID NO: 15130 - DNA, 153 bp, Glycine max
  Clone ID: 700963362H1
ggcggcttggtttgttctacttcctcttacactgggattagaacaaggcgtttgtgcacttctaacaacaccacctttcccttcccccaacaacctcaattactctctttcgctaaacctctcaaactcatgtctcaacctttgaccaccaat

SEQ ID NO: 15131 - DNA, 218 bp, Glycine max
  Clone ID: 700963363H1
aatacaaccaagcaggcaaaactgtctggcggaggaaagttgcatcacttatagcaatggcaaagttatccaagatcttgtccttagattgcgacacgtggaaagcggtgaagtggaaatccaattgcaatggattaatcttcctggctccaagggtttatgattccttaaccatatgcatgcattcaactttcaagcaggggtgggttttatatatc

SEQ ID NO: 15132 - DNA, 141 bp, Glycine max
  Clone ID: 700963364H1
ctttctcgcattttccctcttctttctctctcacgttttccgctatcagttttctcgggaaaatcatggtgaaaggtccaggcctctactctgacattggcaagagagctcgcgatcttctgttcaaggattatcagattg

SEQ ID NO: 15133 - DNA, 286 bp, Glycine max
  Clone ID: 700963303H1
ttcggctcgagatccaatatgacggaggaacggaacgtgcggaagacacgtgtggtcgacgtggtcctcgactgcgtcatcccttacatcgacgaccccaaggaccgcgacgccgtttcccaggtgtgtcgacgctggtacgagctcgactcgctcacccgcaagcacgtcaccatcgcgctctgctacaccaccacccgggctcgtctgcggcggcgtttcgcgcatctagtgttgcaaattctaaggggaaacctcgaggcgcaatgttcaacttgatacccga

SEQ ID NO: 15134 - DNA, 234 bp, Glycine max
  Clone ID: 700963304H1
tgcagcctcaaagcgctgcaggtggattccctccttacggttcttctgcctatagtgctcctgggtatggttatggtccggctaataatggcattggttatggtgcatatggaagttatggtagtgccactgctgggtatggtggacctgctggtgcaacatatgggaatcctaatgtccctaatgctgcttatgctggtggtccacctggtggcccaagaagttcatggcctg

SEQ ID NO: 15135 - DNA, 274 bp, Glycine max
  Clone ID: 700963305H1
ctttctctgcgtgatagatgtgtttctcctgatcttcagctctggattctgggcttggttgcaaaaaggtcattttttattggcttatgagggtgcaggttttcagcatctaagtagcttagcttccttgttcataagccttgaaggtttttgatgctgtttttctgcactttttgaaccttttaaccttggttgtgcatctgggtgttgttttggaactatctcccactgttggcatgtgagttttttttacatgtgtggattttagatatgg

SEQ ID NO: 15136 - DNA, 273 bp, Glycine max
  Clone ID: 700963306H1
cgacaacccaaacaaacactcacagcagcaagcacgcgacaaactttaaacgggttttctttgaccgtccgcaaccttctactaaaatcctccttcacttcaatctttttccactttccaccgaatccaagtcaagtctagaatttccaacgaaccgaacaaaggaaaatcccctcttagatccaatccaaattaatatttgtacatctagtcaagacccaagtccaacgcgtggtcgatcgaatttctcatttggggttctcttttttattt

SEQ ID NO: 15137 - DNA, 260 bp, Glycine max
  Clone ID: 700963307H1
atccaccttggcctagccagctagcgcttcttctctcgcattccgtggagatctagtgctgccaaacctcgctgaaaattagggtttcgtttcggaggtagacgaagatgttcggaagggcaccgaagaaaagcgacagcaccaggtactacgaaatcctcggcgtttcgaagaacgcttcgccggatgatttaaagaaggcttacaagaaagccgccattaagaaccaccctgacaaaggcggtgatcctgagaagttc

SEQ ID NO: 15138 - DNA, 263 bp, Glycine max
  Clone ID: 700963308H1
ttttgttttttcactctttggccatttttcctattcattcttttgagtcccgaccaaaaccctaatcgagttcgattgcaaaacatctcagtttttgaattccaccttctccgaccacccgctgccaaacctcttactaccgaggcgattgcgcttacggaaaagaagatggacatgacactagatgacataatcagaatgtctaaaaacccgaggaataagacgcaaagaagggttccgaacaaaagtcaaaagttttcaaa

SEQ ID NO: 15139 - DNA, 267 bp, Glycine max
  Clone ID: 700963309H1
gctttgcatttctcagctccagttctgttgttgagcaaagggtttgtatttcagaatgcctaactaacacgtcaaatgtaaatgcaattgctggagattctcccctttgctttggacatgatgttaaagagttggattgcaagcctgtagagggtaaaagggcaggtggaacaattggtcttggggcatttgggttccacaacaggggaacccggacatttgacattgttaattttgagcaacttgatcttgtggtgactgaatctg

SEQ ID NO: 15140 - DNA, 267 bp, Glycine max
  Clone ID: 700963310H1
gaagcgaatggtaggattgaatgtgtctcagccatttttgtcaccgatttgcaagacggcaccttacccacttgatctcatagccaccgccgcgtgcctccacttcggccaccttctccgccgccgcgccacccaccatccccgccttggggttcttcttcactcctgtttcaagattgaaggattagtggtgtcagagatgccttcaactcaatgggttgaactatcttcaactatcaactggcgatttggcttcctcatgttcaa

SEQ ID NO: 15141 - DNA, 268 bp, Glycine max
  unsure (1)..(268): unsure at all n locations
  Clone ID: 700963311H1
cccccttgtccctctctttctctcttctttctcctctcagcttccttttccttttgaaattatcacataaaagaacaaaaactcccccttaaactgataaggtatataagccacccttcagagcaatttgtccatcttcttcaatttattagccgaagatgtggtgcattagaccttagtctttgtcatagtttcttccacaacaacttggtagcanactttccaaaaattcacataagagcaatagttctctccctagaaactgata

SEQ ID NO: 15142 - DNA, 264 bp, Glycine max
  Clone ID: 700963313H1
gcacaagtcatggaaagaataatggttggaagtgcaacaaaggttgctttcaccctcttggccactttcgccattgtcattccatgccttgaggctggcattgctgagtttgacgattttctcaaagcccaagctgatgaagcccataaaattgctcttgattcctatgtcgagagccccaagatgtcgcccatgaactcaatttccatgttcatatggcatgggaaactcccccaaggaggaactaaggacgaggaaacttag

SEQ ID NO: 15143 - DNA, 130 bp, Glycine max
  Clone ID: 700963314H1
ccctgatgaagatctccgtctacaagggccccaccactccctcctgcgtcttcacctccgccaaactattgggcaaagtttcaatacccctcgatctcaccttggccgagtcacgcccctgcaccttcca

SEQ ID NO: 15144 - DNA, 263 bp, Glycine max
  Clone ID: 700963315H1
atcaagtggaaatgttgggaaatcaactttttcacgcatcacaagtaatttcggattgaggttgtctccaaagtctcctgtagcagatgacagttccaatgaaacagctggacaatctaatttgtttggaactattacgaaaggcctggtcgactcttctaagaatgcagtgaaagctgtgcaggttaaggcacgccatgttgtttcacagaataaacgcagatatcaggaaggaggttttgatttagatatgacatatatca

SEQ ID NO: 15145 - DNA, 238 bp, Glycine max
  Clone ID: 700963316H1
ttttacttcccctatggctcgtcactccttgctcttagccctcctcctcttcgccgccgtggccaccgccgcgatggcggtgccgcgtccgacgccgacgacatcctgatccgtcaggtggtgccagatgttggcgaagcgaagaggaggacaacctgctgaacgccgagcaccacttcgcgagcttcaatgccaagttcgccaagacctacgccacaaaggaggagcacgatcatcg

SEQ ID NO: 15146 - DNA, 276 bp, Glycine max
  Clone ID: 700963318H1
gccccctctcttcctcgcctccgccctcatcggactcctcaccggcctcgacgactacctctacgcctgcgggtggctcgccttccggtctccactttctctctaatccaagcctcccacctcgccttcaccgccgtcttcgccttcctcctcgtccgccacaggttcacgccctactccgtcaactccgtcgtgcttctcaccgtcgccgctgtggttctggctctgcgttccagcggggaccgccccgccggtgagtcgagtcgccagtacgtg

SEQ ID NO: 15147 - DNA, 274 bp, Glycine max
  Clone ID: 700963319H1
gaaagtggtatatattgatatatgtgtgtatttcctttgggcttgaaactcaaaactataataatgggttcttcttctcctccggacactagcaagagtataaagctagagcgatacaacagctacatcaggagactcaacagcaccaaactcctcaacgcctcctccaaactcctcttccgtgccactatcttagtcgcactcatcctcgtcttcctcttcaccttcaactaccctcccctcgccccagacttcacctcccaccgccacctcc

SEQ ID NO: 15148 - DNA, 223 bp, Glycine max
  Clone ID: 700963320H1
ggattgaagagtaaacataggatccacgatcaactcgatcttatacttttgtatctatttctctggaggcagctatctagggtcatactcatggggagcttcaaaggagacattggacatgccaatggcgaaaatcttaccgaagcttctgttgccaacacgagatgcacaacaacagcatcagacagacgacgtggaacaaagattcggtgacaatccctgg

SEQ ID NO: 15149 - DNA, 154 bp, Glycine max
  Clone ID: 700963321H1
gcacacaattgatatcatcaatggcattctattgctagccattttctcctttcgctaattcttcttctacgctctctctgcaatagatgccttccaaggacaaaatcgcttacttctacgacggtgatgtcggtagtgtatacttgggggcgac

SEQ ID NO: 15150 - DNA, 262 bp, Glycine max
  Clone ID: 700963322H1
aagaaatctgactccttcgcgtcacgaccgccaatggaaccttcttgacggccatgtctttgaaggaactactattgaaaggtgggcactaattagttttgggggcacacctgagcagaagtccaatgtccccagatttataaaccagttatgtcaaaggtgtgaacaattgggcatttttctcaacaagaacactgttattagtccccagtttgaatctatccaaattcttaacaatgtcacccttttggaatctaggctc

SEQ ID NO: 15151 - DNA, 164 bp, Glycine max
  Clone ID: 700963323H1
gggaggaagaccattagccggttgaaaatcaatgacctgctagagtcacactttaaggagaactgtgaggagtcctctgatggcgttttctttgactcagaagatgatgagaatgccttgacagcttgtgaaaccccgagaacagcaccttccgagaggaagag

SEQ ID NO: 15152 - DNA, 261 bp, Glycine max
  unsure (1)..(261): unsure at all n locations
  Clone ID: 700963324H1
gcaggcagtgtcatctctcctttgacgacaagatgagcatcccaattccccatcggcagttattcatagacggagactggaaagtccccgtcctcaagaatcggattcccatcatcaacccttccacccaacacaatgaganagatatcccagcagctactaaggaanacgttgatctcgctgtcgctgccgcaaaagctgccctctcccgcaacaagggcgccgattgggctccgtgtttccggctccgttcgggctcgc

SEQ ID NO: 15153 - DNA, 267 bp, Glycine max
  Clone ID: 700963325H1
attttgatgatgttgataatctttggcttgaacctctatcctggcagggaataggatgtacaaaaatcacaaaagcaagaaatgaaggttccatcaatgggaattcagaatcaagatcatatcttgaaaagaagcttgtgttttgttttggttcttatgttgcatcccaaatgttacttccttttggggaagaaaacttactttctacatctgagatacagcaggcacaagagatagctacacgaatggtcattcagtatgggtggg

SEQ ID NO: 15154 - DNA, 250 bp, Glycine max
  Clone ID: 700963326H1
caatttcaggagttggctcaagtactccttggcttgttcgtatttcaacaatggctaagaaatctgtgaagtactatgtggttgacgcattcactgattcagcgtttaagggaaaccctgcagcagtgtgtttcttagaagaggagagggatgaagagtggttgcaagctgttgccaccgagttcagtgcccgtcacatgtgtacttaactcgcattgccgagtcccatcacaaccttaactcgttccgt

SEQ ID NO: 15155 - DNA, 250 bp, Glycine max
  Clone ID: 700963328H1
caagagccctgcaggaactcatgatcccaccagtggtggtttgcttggaccaagctatgcttcatgcacatgtgctcctcacaagcttgtttctgattctgatatgaaaagttctggtatttcaccatcactgttatggaaaagtactacatctggccctaatttagatcgtcgatactatatccaccaattaagccccgggacctaaaaccggtgacactcttgctcatcatcagctggccatgagctt

SEQ ID NO: 15156 - DNA, 232 bp, Glycine max
  Clone ID: 700963329H1
caaagactgaaggcaaaaaaaacagagaaaggtctggctctgaatgatggatagaaggcactgttacaaggatttgctgccattggtggtgcttgttgccaatgaatgcaacaacacaggcttgttcactctcttcaaagcagccacactgcaagggatgagtaactatgtctttgtcacctatgcctattctgttgcctttcttgtacaactccctgacacttttttctac

SEQ ID NO: 15157 - DNA, 208 bp, Glycine max
  Clone ID: 700963330H1
gtattcttgaaaggaccatctttatatgcttttcaaggacttgctggtcgtctggcccctgttggagtccatatagcattgctactgataatggctggaggaactcttagtgcttgtgggagcttcagaggttcagtcactgtgccccaggggctgaattttgttgtatatgatgttctggctccttctggctttctatcctctcaaa

SEQ ID NO: 15158 - DNA, 207 bp, Glycine max
  Clone ID: 700963302H1
ccatgttcttaggaggcttgtttttccttgtgggggcattattaaacggcttcgcgtcaacattgaaatgctgatcataggccgcctcttgcttggtttcggtgtcggatactgtaatcagtccgttccggtgtatttgtccgaaatggctcctgcaaatattagaggagtacttaaggggggcaacgatgttatcaattggaatct

SEQ ID NO: 15159 - DNA, 264 bp, Glycine max
  Clone ID: 700963265H1
gaaaaatagcaaggttctcgatttgttatcagacacaaacatcaacaaaatccaaattctcgtgtcacggtggcgctggatgtaagaatgggaaatcgacgcttcactcaggtcgcaaccagcgacgacgaggacgaagcgccgccggcgccggcgcctcctcccaagcagcaatcgtccgtcagtgcctccgaagaaaactgttcgaagcagcagcagcagcagcagcgcaagaggaagaggatgaagctccaagaagaagag

SEQ ID NO: 15160 - DNA, 261 bp, Glycine max
  Clone ID: 700963266H1
cgtgattcgaagctaactggaagggtggccatctggcacatcatccgaaacaaaaggagtggagaacgaaataaccaaaaaaatacaaatatataaataattaaagcagcctcgacccacaaaatggcagagcgtgtgttactcctcactccatctcagtctcatcactctccaaccacaatggctgtcttgggcggcgcgcctccgctcgcatcattccctccgtctcactctccacctcttctcgctccttcttctcct

SEQ ID NO: 15161 - DNA, 259 bp, Glycine max
  Clone ID: 700963267H1
gagaattccaactgataaaaagaatattcagagaattccaaagacagagatgactgtcattaaggaagagcaacaaccaaaccaaatagctggccacaaagaacttggtcacaaaagcctccttcagagcgatgcactctatcagtatatacttgaaaccagtgtgtacccaagagagcatgagagcttgaaggagctacgagagttgacggaaaaacacccttggaacctgatggctacaccacctgacgaaggacaa

SEQ ID NO: 15162 - DNA, 253 bp, Glycine max
  Clone ID: 700963269H1
ggaaaataacaggaagacagataaagagtggcttagtccaaaacctcacacgactccctttgttgcgttgtgtttcctttcgccgaaaccctcgctcgcaacttctacagaatccctttcaccatggatattgaggaggacatccgttctttacagctcgattcagcagaagacaataatggggtggtaaatgcagaggattctcggccagaagaagttgagaaatctgataagatggatgaagatccaaagc

SEQ ID NO: 15163 - DNA, 250 bp, Glycine max
  Clone ID: 700963271H1
aactctacccattgcttcaaattcaatatgctttttggtttcgtttcgtctcggcttgtctttcactttctcaaccacccaacacaacacaaattcgctttcttcttcttcttcttcttctaaatagatagaaggaatttagattaattaaaacaacctttcattcattctgttgtgttgggaaatatgatgttcgactttgccaggatttggacccgaaacacgttaataggtctcggcttgggtcagt

SEQ ID NO: 15164 - DNA, 57 bp, Glycine max
  Clone ID: 700963272H1
tcgagtttcacagccaagtcgtaaaagggtttcaagggatggaaaacatgcacgagc

SEQ ID NO: 15165 - DNA, 247 bp, Glycine max
  Clone ID: 700963273H1
ctctcatagaatgtgaaagaatctaccaacattccattggcattattattattatcccaatcagaaaaagaagaagaaagaaataaagttgatagtatttcagatctcagaatgcgtttgatggaaatcatcggaatccgagttggttagcattgctattaaagtataacacactgcaacaccgtgccattctgaagttgaacggcggagaagaagatgttgtgcgcttgttcttccggggagcagt

SEQ ID NO: 15166 - DNA, 231 bp, Glycine max
  Clone ID: 700963274H1
ctcgagacgtatcatggtgtctttacgtcttcctcggaggcggtactcgcgacccgtatcagctggtacaatgggatgcacgagctcatagaagacggtcgccggagccggtgattctaggtcggagggacgtgcgtggtgcctacatgttctcggaggcgaagcaataatgggttggggagacaccaaaacggcgtcgtcgaggatgcgcgtcacggggatgcgcgtgag

SEQ ID NO: 15167 - DNA, 246 bp, Glycine max
  Clone ID: 700963275H1
gagaatccgaggcgaagagaagagaaaaattaagatggaggggaaggagcaggatgtgtcgctgggagcgaacaagttcccggagagacagccgattgggacggcggcgcagagccaagacgacggcaaggactaccaggagccggcgccggcgccactggttgacccgacggagtttacgtcatggtccttttacagagcagggatagcagagtttgtggccacttttctgtttctatacatcac

SEQ ID NO: 15168 - DNA, 246 bp, Glycine max
  Clone ID: 700963276H1
ggagaaccagcaatgcatggtcaccgccggtggaaggaccaagatcgacagccccagtgcactggtcttccagagctgcatcttcaccggcgaacccgacgtgtttgccttgtcccccaagattgcttacttgggaaggccgtggagggtttacgctaaggttgtcatcatggactcgcaaatcgatgacatctttgtccctgaagggtacatgccgtggatgggaagtgctttcaaggacacaag

SEQ ID NO: 15169 - DNA, 202 bp, Glycine max
  unsure (1)..(202): unsure at all n locations
  Clone ID: 700963277H1
gcgcgatgagattgatcaattgctccatgcccagggagagcaactgcggcgggcattggcggagaagaggcagagacattaccgcgcgctgctgagcgcggacggaggaggcggtggcgcgacagctctagagagaacggaagcgggaagtgcgaaatgtgccaacgcgcaagataccgcggagnnttggacagctacgcgc

SEQ ID NO: 15170 - DNA, 247 bp, Glycine max
  Clone ID: 700963278H1
gcggtttcgaacattcggaggaatttctctctcgctctctctcttcaattcaacacttcgagaatcgaaggcacagtaggtaaagagatttttcatcacacaccctactcaatcaaaaacttaagatttctgtatggtgggatcttaaaaaatatagtgattccaaatattaaatggggtgtctttgaactgatgatgaggtatgtatatactgggacagtaaatgtcaatttggatattgctgagg

SEQ ID NO: 15171 - DNA, 251 bp, Glycine max
  Clone ID: 700963279H1
ataacctgctggtgcagcttttcttttttaaaaacagaaaaatttaagttaaaagggataagaaaaatacaaatagctcaatacgcttctcttcagggttgaagacttgtgctagggcctttgtataacgagtaggcaatttgcaatttaattgcatccgttactattaagtgttagagtgaaatttgtgtgtactgtaaattctggtggaagtgtaagtacccataagttttgttaacttttgaaatgta

SEQ ID NO: 15172 - DNA, 247 bp, Glycine max
  Clone ID: 700963280H1
gcgaactatccatcgctcccgctcccaaagttcacattggcgcccgatgcagctgagttcgtaacaacgttgttaatgacttcattcccaaccccagtgaactatcaaccgctcccaaagttcacattggcgcccggggcaggctcagtttgtcaccgcgttaccaccgttgcgtagggctcgggaagctcggcatttggccattctcgctctgtgtgtttttctctctttcctcaagctttgtttt

SEQ ID NO: 15173 - DNA, 264 bp, Glycine max
  Clone ID: 700963281H1
taaaatggcaagcaacaccaccatggtagacgagcgtgcaggggcggagatcgtgtatggcgcggaggaatgccaccgcagactccatcggacctcctggaagagcttggattccccaaaggggtgatgccattgaaggaccttgtggagtgcggccgggttcgcgaaacggggttcatttggatgaagcagaaggcgccaagccagcacttcttcgaggcaaccaagaccctcgtgagctacgcggcggaggtcaccgcctat

SEQ ID NO: 15174 - DNA, 253 bp, Glycine max
  Clone ID: 700963283H1
ggtttttaagacctatatttgaacttctagttccattgtttcaaaatatcctgtattcaaatgctggatcatttcctaaagggtgaagattgtaacttatgtatcaaccagagtataataaattagatagaagtctacatggtggaaagcttatattgattagtattcaaggtaatatggatatcatgactatttagtgactctctctgcctttctgcaagggtctattatctttttaaattatttttgttga

SEQ ID NO: 15175 - DNA, 255 bp, Glycine max
  Clone ID: 700963284H1
gcgaggcagcacgaaaggccattgaagaagcacctccagttgttaaggagactcctattataattcaagatactgaaaagattaattcattattggctgaagtcaatagtttgaaggaatcactcctattggaaaaagaggctaaagaagaggccagaaaagctcaggctgaggctgaagctagaaataaagagatggttaaaaaggttgaagattctgaccgcaaagtggatcaacttcaagaattggttcaga

SEQ ID NO: 15176 - DNA, 247 bp, Glycine max
  Clone ID: 700963286H1
ttgaaatgatgaggatcggcatgaagactttctctgtatgaagggacgtttgtgcggtagagagggtccacatgatgaaggtgatctctttcataatccctctcataaggatcgagtgtaggattaacttgaggggctggtatcgcattccttttatctccttggagaccataagctcggtaactcttctcagtaagaaataaatcacggggaatttcttcttgccgttcgatttggggatcccttt

SEQ ID NO: 15177 - DNA, 250 bp, Glycine max
  Clone ID: 700963287H1
gtgaagataagcacagagagtgtcatctactcacctctactaccataaaaaaagaaaaacaaaaagccttcagagtcgactattcatcctttcttattcttaattaccgtgccttatccacccccaactatatttcagccagccgcggcgacacaacaacgccgacaccctcatttccactaccaactatacccgctcgttctctgatttctgaaatccctcacccatggcttcctcttccctctctctc

SEQ ID NO: 15178 - DNA, 246 bp, Glycine max
  Clone ID: 700963288H1
gagagagagagatggaggatctcgaggaggaagagaacggagcggaggaggtgttggggtcaagcttgaccatggagaaggtggcggcggcgaagaagttcattgagaatcattatagggctcagatgaagaacatccaagagaggaaggagaggcgttgggttttagaaagaaaattggcgtcatcggatgtgccaaatgaggaacggatcaacctcatcaaagatttagagaggaaggagactg

SEQ ID NO: 15179 - DNA, 247 bp, Glycine max
  Clone ID: 700963292H1
ctccacaccatgtcctaatctttctgcaccatcgttctccatttttcgctttacaaaaccactgtgtctgattaagggttctttaatatttccaatatttcttgtagtgaaaaagttgttagctaaaagaagaccaagtttttggtgttgtagaaggaagagaagaattaacatgaaaattcagtgtgacgtgtgtgagagagctccagcaacagtgatttgttgcgcggatgaggctgctttgtgt

SEQ ID NO: 15180 - DNA, 249 bp, Glycine max
  Clone ID: 700963293H1
caggaaggtccaaaaagtcagtgcagcgaaaacggacgatccgaagaatacccttttcatctctctctacaataatcatcatcttcctcttcttcttcagtaaattattgtacctgacgatcttctcggtttgatcttatatcaatggaatttttttagacagaactcggattcacagggaaatctgattgcataggaacaaaaaagacaacacctttttatctctacacaagtgattatggcggttgc

SEQ ID NO: 15181 - DNA, 270 bp, Glycine max
  Clone ID: 700963295H1
ctcggcatcggctcgagtttcgatagatgttatccaattgaaattttaaaaatgactgggataaacttaagaattcaattattgaaattgaataagtaaacaatttaattggattggtcgaatggtatcaaaaacatggagtactaactcccatttcttatttattattgaattaaccgatcaacttgctttgttatcgaacatttctttttgatttcaaaaattttccggaaaaaatttgaatctatttttatatgcgaatcaatccta

SEQ ID NO: 15182 - DNA, 259 bp, Glycine max
  Clone ID: 700963296H1
ctcctccgaagccactgttgctactaccttaccatcatcaccgcgctggcagtgttccttgcaacgacgtcgtccgccgacgcccaatcctgcaacggcatcctcgtctcctacgcccacaccggcggcgtgcggctgccgccgaatgtctccgacccggcaaagcagccttaccggttcgagtcgacggtgacggtactcaacaacggcctcgacgagctcaagtcgtggaaggtcttcgttgggttcgaccacgacg

SEQ ID NO: 15183 - DNA, 281 bp, Glycine max
  Clone ID: 700963301H1
caaactagtgaccaacagggttctagccacaagaaatacaaacctggagtgtgagggaaaaaaaaattactgtttggcttctgatatatgcagcgaatgccaaacataccaagtccaagatgagagttaagtatagattaacattgtaattccaataaatagtaatcttagttgcatcttagagagagaggctattagtttaaaccaggtaaaattaggtaaaactattaatatttggagggcttccttagcattgtataaaatcattagagttaatatat

SEQ ID NO: 15184 - DNA, 261 bp, Glycine max
  Clone ID: 700963264H1
tcgagctgctacgaagccactgttgcaactatcttaccatcatcaccgcgctggcagcgttccttgcaacgtactcgttccgccgacgccctatcctgcaacggcatcctcggctcctatgctcacaccggcggcgtgcggctggcgtcgtatgtctccgactcggcaaagcagccttaccgggtcgagtcgacggtgacggtactcaacaacggcctcgacgagctcaagtcgtggacagtcttcgttgggttcgcccac

SEQ ID NO: 15185 - DNA, 265 bp, Glycine max
  Clone ID: 700963233H1
gtgttttaacaagagtgatgaggtgggagggggttcttctgtgttccatgtggatttcaaagatggctcttctgatagtgactcaagcgcgatcttgaacgaggagaacaacaaccacagccccaacaataacgcggcgatttcgtcgtgtggggttctgcaaagtcacgggcttttgttgtcgccttcttcgtcgtcgatgaacaactgtttccagttccagaaacagtaccagacgacgacgacgcagtacgtaaagatggag

SEQ ID NO: 15186 - DNA, 264 bp, Glycine max
  Clone ID: 700963234H1
atcgattggtcaatcaaacaagctcgttcaataaggacaaacttgacagcgagtggaccaaggccaaatccacaaggctcctaccactatggattaataaacattagtaggacaattaccttggtgagctcaacagcacaagtgaacaagaaacaaagatacgcagtgaacagtgtttcattcacacctgctgacactcctttgaagctagcagattactttaacattggagggattttccaagttggaagcatcccagatagc

SEQ ID NO: 15187 - DNA, 262 bp, Glycine max
  Clone ID: 700963235H1
cttacttgaagttgtgctattcaatcccaaagccacagaaataatattattcagattttagagactgaaaacatcatggccaacctcgacctcgacccattccagacaagcatcttaaccgtcgtcccaatagcactcctggtggcgttactatctcgtactcgtcgaagagcaccctacccaccaggcccaaagggtttaccaatcataggaaaacatgttaatgatggagcagctaacccaccgcggcctcgccaacctg

SEQ ID NO: 15188 - DNA, 257 bp, Glycine max
  Clone ID: 700963236H1
gatttcccttcctttttaacttatagcctctgctccccttttgcggggtccttcaatctcacttggggaacctccgtgcattaacccataagagttcatggacccttaattaaaaaatattttgcctagaaccaaaacctgcccttactctataacatttaccaaccgggaattcttcctggacgttttgttttttgattctagacacttggaagaagaatgagttgttttccttgtttttcaaagactaagagaac

SEQ ID NO: 15189 - DNA, 252 bp, Glycine max
  Clone ID: 700963238H1
aatccatccctgtcaaacaaaccatggcttccgaaacaaaccagtccaagaatgtgtgtgtaattggagctggaccctcggggctattggcagcgagggagctgagaaaagaaggtcacaaggtggttgtgttggagcagaaccatgatattgggcggtcaatggctatatgacccaaatgtacaagaggaggatcccttaggaagagacccttggctaaaggtgcatagcagcatctatgagtctttaagg

SEQ ID NO: 15190 - DNA, 250 bp, Glycine max
  Clone ID: 700963239H1
taagtccctttggtcttcatcttctgttctgatccaggtatggcttctaaacgcatcttgaaggagctcaaggatttgcagaaggatcctcctacctcatgcagtgcaggccctgtggctgaggacatgtttcactggcaagccacaatcatgggacctgctgatagcccatatgcaggtggtgttttcctagtttcaattcattttcctcctgactatcccttcaagccaccaaaggttgcttttcgga

SEQ ID NO: 15191 - DNA, 246 bp, Glycine max
  Clone ID: 700963242H1
caaaattccacacaagatacgacttctagcaaactcaagactctagcctctttataaaggaccgtctctttttctcgatagtccgttagtatgctctgcggttgttgaatcttttttagattattcctgaacccttcaaaaccctcttatctctcttctatcgcttggcctggtattctttttggctgagagatcaagcaaaaatgagcgtggttggatttgattttggtaatgagagctgcattg

SEQ ID NO: 15192 - DNA, 79 bp, Glycine max
  Clone ID: 700963243H1
gtgtagtactagtactacttttatttccccaattttcaattcatagtcagcaattctgatattgtcaaattgcacccgc

SEQ ID NO: 15193 - DNA, 248 bp, Glycine max
  Clone ID: 700963244H1
gtctacacggaactcgttcgagcctcaccccatggttgccgatgcctgggaatccctcagaaaatctctagtctattttagaggccaaccggttggcacaattgcagctgttgatcatcaatcagaggaagttctgaactatgatcaggtttttgttcgagattttgtgcccagtgctctagcctttttgatgaatggtgaaccagagatagtcaggaacttcttgttgaagacactgcatcttcagg

SEQ ID NO: 15194 - DNA, 249 bp, Glycine max
  Clone ID: 700963245H1
caaaaacggaaatttcttcctcaaatgccttctgggtcgctcttctttgcatccagattacgaagtttttggtcgccagtaaggtctgtgattcaagtgctattttagcattttttttttttcctggacggtgagggtcaacttgcatgcacatgttagtgaaaaaccacaataagggggatggatctaagtccctcgccgatacactggcgaaatggaaagaatataatgcttggctggagtctaaca

SEQ ID NO: 15195 - DNA, 255 bp, Glycine max
  Clone ID: 700963247H1
tgaaaattccccacaaatcatagaaggaccaaaggtcaatactgctatgaatgggagctgtagcagtaccagtaccagcactaccagctcaacaagcaacagcaacagtggtgctagcagcagtgtatttgcaagcttgtttgcctcatcatcagcatccgcaactgcaagcctccactctcaaacaccagcattcactgacctaattagggccatggggcatccggatcatccagcagacctctcaaggccttc

SEQ ID NO: 15196 - DNA, 268 bp, Glycine max
  Clone ID: 700963249H1
caataaaagtatccactttcaccacatctgtcttccatttgtggatttctcaaaagtgagtatcagcttccgggacttccacagtgatcaatacgccccctataaagacctggattacccaaacgggaagatgccattgtcaggaccttttggatcgcggccgggttcgcgaaacggggttcatttggatgaagcagaaggcgccaagccagcacttcttcgaggcaaccaagaccctcgtgagctacgcggcggaagtcaccgccta

SEQ ID NO: 15197 - DNA, 261 bp, Glycine max
  Clone ID: 700963250H1
gacgaaaatcttcaacctgaacctctccaacaacctcctggtggacccgttccccgagatgaacgtgaaagggatagaatcgttggacttgtcgaacaacagttttcacctggggagcattcccaagtgggtggcttcgtcgccgataatattctctctgaagcttgtgaattgcggaataaagatgaggctagaggattttaagccttcggagacttatttctatgattttattgatctttcggggaatgaaatttcagg

SEQ ID NO: 15198 - DNA, 258 bp, Glycine max
  Clone ID: 700963251H1
gcgagaggtacttactcacagatatattttttttttttgtctccatcattttctcgagagctttcagtttgtgtggttcatctttcttcttctccttccctcccccctctgtaacaccccgcttctctgaatccctttctgttaatcatctgtctttcaagctaagattttcgggtttgtctattaattcaccaagaagcaaacttagaaggatttttcgaaagccaggtgttttcagaaacgagatccaggttttat

SEQ ID NO: 15199 - DNA, 257 bp, Glycine max
  Clone ID: 700963252H1
accaaacaatcgaatttcaatttcaatttgatcgctccgataacttccatctatggcggcggcgaaaccccaacgcactccgcaggaagtggaagacatcgtcatccgcaaaatctttcttgtctcgatcaccgaaatcgccaccactacggattcgagaatcgtgtatttagaactgaccgtggccgagattctcagcgaggacaaggagctccgcctctcgcgcgattgcatggagagggttttaatcgaccgtc

SEQ ID NO: 15200 - DNA, 254 bp, Glycine max
  Clone ID: 700963253H1
accttctcgatcgtgtcgagcttttcatcccctctgtccctctttctttagtcctttctcacctcttttgttgcctttctttcacgttttttcgtttcgctcgcgttgaaatcgcagagaccaccggcacgccaccgtgaaccaccgccgccgcctccgtcagtcactgtgccaaaaatgttgccggcgagcgactagatgattctttcttatgttgtggaagctgtgggagggtgttggaagattactttttt

SEQ ID NO: 15201 - DNA, 252 bp, Glycine max
  Clone ID: 700963254H1
cttatatttgcttcatttgtaccctttttctttgacattccagtatcaacacggtttcgtgtgtttagcttcctcttctcagacaagtcattcatatatctagctggtcttcagcttcttttgtcatcatggaaaaggtctatcttaccggggatgtgtggcatccttgctggttccttgtaccgtttgaatgtcttttacattcgcaaagcaaagttcccagagatgatctcatcattattttcaagaatt

SEQ ID NO: 15202 - DNA, 252 bp, Glycine max
  Clone ID: 700963255H1
gttcttaacctttcaatccattcggctgaggttaccttccccttggccataatcacccaaaaaataaaaataaagaaaagaaaagaaaaaagaaccttcatggcaaaaatgcataatttcttccttttaacgtgtttgatagtcatcatacctaccttgcatgccaatgtcaaggaggatgaaatatattggaagtggcaaagtcaaatacttaatgattcatattggacgcaaaaagcatcagttgcagaa

SEQ ID NO: 15203 - DNA, 251 bp, Glycine max
  Clone ID: 700963256H1
gccaaaccaaattttctctctttcacttatttattgactccccaaaagcttttcaaatatctctgttcctctctcacgtaccttctccctatctttcactccacttcttaacaccacaaaacagaacaactgccgagcaaacaacaagaaaaatggtgttgttgtccaaagcaacaacagaacaatactcctacattaagaactgcatgccaaccaaattttcctcaacaattcccatagtgaacctctcc

SEQ ID NO: 15204 - DNA, 241 bp, Glycine max
  Clone ID: 700963257H1
ccaaattcctcttaggtcccaacccagtaactatgattccatcggaaaccgttaattttgctcgaaatttcgcagctatggtcagagttcgtggccctttctggtggaacaactctttcagcttctgggatgctcgtacctgataccctgtgtgatgctcaagtagctggatgtctctatggtgataactgtgtggatacggtgttggttatgacggttgcttcagttattgagcctcgtc

SEQ ID NO: 15205 - DNA, 247 bp, Glycine max
  Clone ID: 700963258H1
gctgatgacaaagctggaacagaagagagtaaaacatccaaagatgagacttcatctaaagattctccagcagaacaaagagcgacagctacttttggacctagacctggacctgctgggcatccaggcaacccttttgatctctcagcaatgtctggtctgctcaatgatccaagtatcaaggaattggctgaacagatagcaaaagatccatcgttcaatcagatggctgagcagcttcagaaaa

SEQ ID NO: 15206 - DNA, 248 bp, Glycine max
  Clone ID: 700963259H1
ggccatcacaaacctcactgagcatctcagggaacagaatagggcagaggatttgcacagccttcttacacagttgaggcccttcttttccttgattcctaaggcaaaaactgcaaagatagtgaggggcataattgatactgttgcaaaaataccagggacttctgatctacaaattacactatgcaaagaaatgatgcaatggactcgtgctgaaaagcgtacctttctgaggcagcgagttgagg

SEQ ID NO: 15207 - DNA, 248 bp, Glycine max
  Clone ID: 700963260H1
cctactttcagctcctaagagcacgcatcactgttgcacttcttactcgttctccctcttttttttcttcttcttcttcttcgctaaaccccccctttatttttcctatctcactaacatcgatgggagacgagaataagaccaagtcccctgcttccggcgtgtggtccaccatcaagcctttcgtcaatggcggacctccggcatgctcgccacctgcgtcattcaacccatcgatatgatcaagg

SEQ ID NO: 15208 - DNA, 260 bp, Glycine max
  Clone ID: 700963261H1
gaaaaagatggaactggaacatgtgaccagcttgtcaagaagagatcatgaaagaccaaatcccttttttcgagtgagagcagttagcttgggtggttggttggttactgaaggttggatcaaaccttctctcttcgatggcattccaaacaaagacttattggatggaactagtcttcggttcaagtctgtgtcaacagggaaatatctatgtgccaagtctggagggggaaatgtcctacttgcgaacggcacaggtg

SEQ ID NO: 15209 - DNA, 255 bp, Glycine max
  Clone ID: 700963263H1
cttttcctgtgtttcttcctcgtttgagtttgtgtttgtgctatcttcttcgctcttcacttttgttgtctaacatggctttggtgaatccgtttctgtgtaccactcgaacgtccctccctctgcgagtttcaggtccaccaaaccaagtcctaccacgttggactctctgctcccaatattcattcaaaacatcatcactaagatcgaagcaactcaggtgtggcgccactgcagacatcaaagcagatcacg

SEQ ID NO: 15210 - DNA, 251 bp, Glycine max
  Clone ID: 700963232H1
ctccgccgccacttgtaccgcctgttagttctcagtcaaacagtgttgttgtaccatcatctagcttgcagacacaaaaaccaggtagataatacccgaatctggaaaacattgaaatcttctcggtcgtttcttttgtcgcgtttgatagggttaaaactagaccaacaaaacatttgttgtttttgtgggtggtgtttttcttcttttttttttttttgcccctgggatcttggagcttacgggttttt

SEQ ID NO: 15211 - DNA, 262 bp, Glycine max
  Clone ID: 700963203H1
tgagaaaaaaatatgggattctcaattccctaaaccagttgatgtgtgtcagacatatgccttgtgtggtgcaaatgctatttgcgatttcaatggaaaagctaaacactgtggatgcttgagtggattcaaagccaactctgctggttcaatttgtgctcgaactacccgtctagattgtaataagggaggtatagataaatttcagaagtataagggaatgaaattgcctgacacatcttcatcttggtatgataggact

SEQ ID NO: 15212 - DNA, 255 bp, Glycine max
  Clone ID: 700963204H1
caatgccgaagatctcgggggtggtgaaactcgacgtgtcgaagggggaggagcggagggactgcacggtggggtgcaggatgtacggcgagggttgctacggcggagaaccgttcttcgtggcgagggaagaagggggcgaggaagatgatgggtacttggtgagttacgtgcacgatgagaggaagggggagtcgaggtttttggtgatggacgcgaagtcgccggagctagatgttgtggcggcggtgaggc

SEQ ID NO: 15213 - DNA, 255 bp, Glycine max
  Clone ID: 700963205H1
cagaacctcttctctccgttcacgccttccacaacaaccaacaaggcagggtttcgttcttgtaactcgaattggcgtcgagtgaagtgaagggcttcaaaaaccagagggaaactatgagcaatctcagaaccctatgtagacctcagacggtgttctctttcattagtttccaacaccaatttcgttctagggtttcctttcgaaaccctaattgcaagccccgtttgccatcgccgtttctgtattctacaa

SEQ ID NO: 15214 - DNA, 254 bp, Glycine max
  Clone ID: 700963207H1
gcttgttgcacgaagctgaagcagcaaaaaccatgcttatgtggctacctcaaaaacgctagcttgaagcagtatgttaactctcctaatgcccgaaaaaccgttgcttcttgtgggattccctttccaacttgttaattaattaagccttcttataattaaagtgtgggatatatatatatatatagataaacagtttaatttatacacactttgatcctacaaagcatcttgacacaagcattcaataggat

SEQ ID NO: 15215 - DNA, 253 bp, Glycine max
  Clone ID: 700963208H1
tgaaagacaagccatggtggcctaagttgaacactcttcaagatctgattcacatttgctgcattattatatggactgcttcagcactccatgcagctgtgaatttcggacaatacccttatggcggtttcatcctaaatcgtccaactctaaccagaagattgctcccagagccaggaaccaaagaatatggtgtccttaccagtaatcatcaaaaggcttatttgagaacaattacaggaaagactgaggc

SEQ ID NO: 15216 - DNA, 252 bp, Glycine max
  Clone ID: 700963209H1
gctatttcttacctcttggcatggccattcaaatgtcttcttttgtctttgtttctcttacaattttattttgcttctcttccttggagaagagttttgcctttcaaacaacaaaggaggccacagaaagcaacaatcttcatcaatatactcatcttgttcacctcagctcactccttccttcatcttcctgcagctcttctgccaaaggtcccaaaagaaaagcatcattagaagtggtacacaaacatg

SEQ ID NO: 15217 - DNA, 247 bp, Glycine max
  Clone ID: 700963210H1
gaaagccgtcgctatcctagtctcttcttcccctctacccatttcagtttcaggatggaatctcaggtgaagcacgcccttgttgtcaaagttatgggtcgtactgggtctagggggcaggtgactcaggttagagtgaagtttttggatgatcaaaaccgacacatcatgaggaacgtgaagggacccgtgagagaaggagacattctcaccctacttgagtctgaaagagaagcaagaaggttgc

SEQ ID NO: 15218 - DNA, 246 bp, Glycine max
  Clone ID: 700963211H1
gtgccactgcatggttgatggatactgaaatgactgatcatgatgatcgtgttgtgccactgcacacattgaagctattagcgaccatgcaatatgtcctctgtacgagcttggaaaaaagtccccagacaaacgctataattggtcgcattgactgcaagtctggtcatggagctggtcgtccaacacagaaaatgatcgatgaagctgctgaccggtacgttttatggctaaagtgttggaagt

SEQ ID NO: 15219 - DNA, 198 bp, Glycine max
  Clone ID: 700963212H1
ctttattatacacagacaatcgcacaccgtatcccctgttttgagtttccgagagtcagaacatggcctgcgccgaaaacagagaatggaagttcctgttttcctctgcctcttctcattgacgcttgttgcagcgcattgctgaattggaatcgggtctccgggcagacatccgtggtctacgcctgcgacgatgcg

SEQ ID NO: 15220 - DNA, 250 bp, Glycine max
  Clone ID: 700963213H1
tttgtcagctttttcttgcttccatagttcatggcgtgtgttcaagtcattacagtacttctctttgcattggctcttgcagaaattgacccctcaacatgccaaatggtgcagggcagagtcttctgcgttgactgcactcacaactaggacttatctgatattaaggtttcagtgaggtgtgctggtgtggaaaaactggctttggcaactacagaaaatgatggctccttcaaagtctatcttccct

SEQ ID NO: 15221 - DNA, 255 bp, Glycine max
  Clone ID: 700963215H1
aataaaataaaaataacagagcaattatgaaatagcttttgtgtttggtgaggttatgcgccatttctcccttgctaccaacaacagagtttccatcctctatatttcttcaatcttctctcccttctacttctagggtttcgcttctgcaacggacgaccttcttcaactcatcaaagttgactttgtgagccaattcaatcaggcttgagaaggtatcctagtgttgtttgttcaccttcatctccatgatgg

SEQ ID NO: 15222 - DNA, 260 bp, Glycine max
  Clone ID: 700963216H1
ctccgagccgcgagcgagcagtttcaaagagaggatttgggattgggaaggcgagggattgcgctgcgtctcttcctcttctctttcgattcatccctcattcataatcttccaatccaacaacctcagcctcacactcacacatacacacatctgaacgcgtatcgtccctcccatggcttcaaagcgcatcctcaaggagctcaaggacttgcagaaagacccaccaacttcttgcagcgctggtccagtagctgagg

SEQ ID NO: 15223 - DNA, 269 bp, Glycine max
  Clone ID: 700963217H1
gacccactgaacgctctcatcaccttcacgtggctccccttcggcttcatcctctccatcataagggtctacttcaacctccctctcccagaactcattgtccgctacacctacgagatgctcggcatcaacctcgtcatccgcggccaccgccctcctccgccttcccccggcacccccggcaacctctacgtctgcaaccaccgcaccgctctcgaccccatcgtcatcgccattgccctcggccgcaaggtctcctgcgtcaccta

SEQ ID NO: 15224 - DNA, 85 bp, Glycine max
  Clone ID: 700963218H1
ctatcttcaggcaaatcaaattaaaatcacaacacccccaattcccgaaaccctaaccctacctcctcgcagccatggctaagaa

SEQ ID NO: 15225 - DNA, 141 bp, Glycine max
  Clone ID: 700963219H1
ctagtgttggtatcaatactgcgtgggggcttctaatggctagcatctcagtagatacgggtcgtgaaacaccattgcagttcgcttatatgtgagtactttcatcggtatgagactatgtgtgtatgtctaattgtactg

SEQ ID NO: 15226 - DNA, 258 bp, Glycine max
  Clone ID: 700963220H1
caacattttacactcttttcttcttctcgttgttgcttcggtgttgaatcatggatcagaaagtcgatttcagtgctccgcattccatgggaaccactatcatcggcgttacttacaacggcggtgtcgttctcggagccgactctcgaaccagcactggagtgtatgttgccaaccgagcatcggacaaaatcacacagctcactgataatgtttacgtgtgtcgctctggatcggctgctgattctcagattgtct

SEQ ID NO: 15227 - DNA, 202 bp, Glycine max
  Clone ID: 700963221H1
tagcgtgcaaaattatattcaaaaaaaaaaaaaaaggggaggctgcagattagtgagttcgtcaacccggaaattatttcgggcccggaacttgaaggggtacaagttttcccaaaagggagccgtattaaagcttggggaaatcatggccaaagctgttcccagtgaaaaattgtaatccgttcaaaattccaaacaacat

SEQ ID NO: 15228 - DNA, 252 bp, Glycine max
  Clone ID: 700963222H1
gagagcacttcaagtgagggtgagagtgacataaatctagagagagcaccagtactctaaaagtctattatattcttcataatatgaccatgcatcgcgagtcttgggcttttgtcttcggcgttatgggcaacatcatctcctttagagtgttcctcgctccattgccaaccttttaccatatctacaagaagaaatccactgaaggtttccagtcacttccttatgttgttgcactgttcagtgcaatgc

SEQ ID NO: 15229 - DNA, 253 bp, Glycine max
  Clone ID: 700963223H1
tctcgatcgcgcgtcgtgaagccaccgatcatctatggtgatgtgagccgcccaaagccaatgaccgtcttctggtcatctctggctcagagctttaccaagcgcccaatgaagggaatgcttaccggtcctgttaccattctcaactggtcctttgttagatatgaccaacctagatctgagaccacctagcagattgctttgtctatcaaggacgaactggaagacctcccttaggctggcatcactgtta

SEQ ID NO: 15230 - DNA, 253 bp, Glycine max
  Clone ID: 700963224H1
ctcacgagggctgcacagcaatgggtggggagcgcaacaaggctttcactttggccgaggtctctcagcacaacaatgccaaagactgttggcttgtcattcatggtcaggtttataatgtaacaaagttgttggaagatcaccctggtggggatgaggtcctgttgtcttccacagggaaaggtgcgaccaatgattatgaggcatagtggtcaccgcagcattgccgtagccatgatggatgagctctatg

SEQ ID NO: 15231 - DNA, 256 bp, Glycine max
  Clone ID: 700963225H1
cggctcgagtcagctttgactttggtggaaactaaagactagtcaaaatggtgaagttcacagctgaagagctgcgtcgcattatggactataagcataatatccgtaatatgtctgtcattgctcatgttgatcacggaaaatcaaccctgactgattctcttgtggctgctgctggtattattgctcaagaagttgcaggtgatgtccgtatgactgatacccgtgcagatgaagctgagcgtggtattacaat

SEQ ID NO: 15232 - DNA, 240 bp, Glycine max
  Clone ID: 700963226H1
agttagggtttaacttataattgcgtgatcgattccgattcgattgattctcttctctctcaaacggagtaggaacacggaactcaggattcatggcgacaacagcgacgacgagcggaaaaccggtgttcgtgacgttggatcggttaaaacctgccaccaacggcaatacactgacggtgaaggtggtcagttccaagccggtgaagacggtgagcaccgcggcggtcgacgacggtg

SEQ ID NO: 15233 - DNA, 250 bp, Glycine max
  Clone ID: 700963227H1
gcaaaatcttatcttagcaatagctacccctatcacaacaatactctattaggcaaaaacaccaaatgggagaggaaaaagagcagcctaagaatgaaaccgagaagaagcccgaggaggccgccgcagcccccaagaaagacgacggacccatccctgtcgtttacaaactcgacttgcattgcgagggatgcgtcaagaagatcaaacgcacatgtcgccacttccaaggtgtggaaaccgttaaggc

SEQ ID NO: 15234 - DNA, 79 bp, Glycine max
  Clone ID: 700963228H1
gcataatcgtgctggaatgggccacaattatgccatttgggttaccaaagaaaatggcataattgtggccaattccaaa

SEQ ID NO: 15235 - DNA, 250 bp, Glycine max
  Clone ID: 700963229H1
attttcgacatggcggcgcaacatctcatcgttgccgtcgctaacaccgctgctatgcgatcctattggaacaccagtctaatggattatctctataacatgctcaggtgtttcggtggaaatgactcaactggacagctattttctgcttccaatgtagagtttgctctagtcacctatcatactcatggatgttattctagttcccgtgtgcaacgggctggttggcacagcgctccagaagttttct

SEQ ID NO: 15236 - DNA, 258 bp, Glycine max
  Clone ID: 700963231H1
tgttgctgctcatcctccgtaacctccgagctctgcaccgaagaacgaagccatggggaagacacatggaatgggatctgctcgcaagctcaagtcccaccgcaggaggcaaaggtgggctgacaagtcatacaagaaatcacatcttggaaatgaatggaagaaaccttttgctggttcatcccatgccaagggaattgtccttgaaaagataggtattgaggctaagcagcccaactctgccattcgtaagtgtgc

SEQ ID NO: 15237 - DNA, 262 bp, Glycine max
  Clone ID: 700963202H1
ctgcgattattcagtataattaagttattcagcgtatattcagttatttagtacattgttattcagtatacataattattctttgtatatatatagttattctgtagtttacatagtaattctgtatagtataaatggttttttctgttttctatacagttattttgctgcgatttgtatactgattaaattaatgcatgttctgtttaagttcttacctgtatacttgaaatgcttattgagaacctacagtaaacagaag

SEQ ID NO: 15238 - DNA, 239 bp, Glycine max
  Clone ID: 700963169H1
gtaccatcttataactaggtatttattttctcatatgctcttcttaaacttctctatggtagtgtgttcacatacatatctacggatagtgattagtattgtcaccacatacaataatgggttccattagtaacaccgagagtcataatcagcacaatgatgatgacgacgatgatcatcgtcatcgggtgaatttctcgatccagagaggatatgggacaatattgtaggaggcattg

SEQ ID NO: 15239 - DNA, 243 bp, Glycine max
  Clone ID: 700963170H1
aattgctggagtggcactctactcgttcatcaaagccaggatggaggaagagaagcgacaagcgaaagcagcataagaagttgtcaacctggaggatgtcttgcactgtaaatcaccacaaatttccttcaaaataattgagtgactggttcagtgttgtactatccttgtgatagcgcgcttttatttttccttctatttttgtcaaatatgttctttttttcctttttctctcttcattca

SEQ ID NO: 15240 - DNA, 239 bp, Glycine max
  Clone ID: 700963171H1
aataaattatgctactgggtgcatatttgagtatgacaaagctcatccagagggttctggcattggctttaaggaggaagacaaacccaacttcattggttctttctattccaaaactaaggctatggtcgaagagctcttgaaagaatatgacaatgtgtgcaccctcagggttcgcatgccaatttcatctgacttgagcaatccgcgcaatttcatcaccaagatttctcgttata

SEQ ID NO: 15241 - DNA, 240 bp, Glycine max
  Clone ID: 700963172H1
tcccaactcgccctcgactcacatccttgtccgattccgcgaacgagtcgagtcaatcgggttggtaagatctattctgtttcttcgtcatggcaaccggacaactattctcgcgtactacacaggctttgttttacaactacaagcaacttcccatccagcggatgcttgattttgacttcctttgcggcagggaaacaccatcagttgctggaataattaaccctggttctgagggat

SEQ ID NO: 15242 - DNA, 236 bp, Glycine max
  Clone ID: 700963173H1
aaaaaaaatgggttcttctctgtggacctgtctgattttgttatcacttgcttctgcttccttcgccgccaacccaagagcaccaattgatgtgccatttggcagaaactatgtgcctacctgggcctttgatcacatcaaatacctcaatggtggttctgagattcagcttcatcttgataaatacacaggtactggcttccaatcaaaagggtcctacttgtttggtcacttca

SEQ ID NO: 15243 - DNA, 236 bp, Glycine max
  Clone ID: 700963174H1
atttggatcactggttttcatggaagatgatgatgttggattcttttggcctggcagtttcagacaggtagaccaacaaggagctggtgatgttaatgtaggacatgctcaaagttcaaatgctagtttagctccaatggtgcctcctccaccacaagcttctgcatctcctgatctcacattgaagctttaagtttaaggcttaagaaaatgacgatacatacacaagcaaaggc

SEQ ID NO: 15244 - DNA, 236 bp, Glycine max
  Clone ID: 700963175H1
caagaagcaaaggctcctttgggcctcaaccagtgtaaagaaccctgcctattctgacaccttatatgttgctcctcttattggacccgacactgtatcaaccatgccagaccaagcccttcaagcatttattgatcatggtaccgtatccaggacaatagactcaaatgcatctgaagctgaaggaatatacaatgctctccagaaattgggtattgactggagctttgttggtt

SEQ ID NO: 15245 - DNA, 230 bp, Glycine max
  Clone ID: 700963176H1
gccttgtccacgcccagagcatcctcgccatctgggccacccaagttatcctaatgggtgctgttgagggttatcgtattgctggtgggcccctcggtgaggtcactgacccaatctaccctggtggcagctttgacccattgggccttgctgatgacccagaggcttttgctgagcttaaggtgaaggaactcaagaacgggagattggccatgttctctatgtttggg

SEQ ID NO: 15246 - DNA, 236 bp, Glycine max
  Clone ID: 700963177H1
caacaaaggaatacatccatggcgaacaatatagatcagactccaaaacagttaaccaacaagcttacttttatgccagagacctcgaagtccatcccaaggacacatttgtgttcagtatagatggcaccgtactctctaatattccatactacaaaaaacaaggatatggggtggagaaatttaactcgaccttgtatgatgaatgggttaacaagggcaatgcaccggcactg

SEQ ID NO: 15247 - DNA, 234 bp, Glycine max
  Clone ID: 700963179H1
attgtccatcattttagtccttacttgcaagattggggtacatttgaccatttgcagaaacaacatttggataatccaaaggatgataatattgctcagcaagctgcaaagcagagattcacactggaaaattttgttaggctttcagagtcgcttaagacaagttcttgtggagagagaataaaggacattatcctggagaagggtataactaaaactgcaatgacacatttg

SEQ ID NO: 15248 - DNA, 238 bp, Glycine max
  Clone ID: 700963180H1
gttcgttggcttgcaaggatctggtaaaacgacgacgtgtacaaaatacgcgttttatcatcagaagaaaggttggaagcctgctctggtgtgtgcggatacgttcagagctggtgcttttgatcagttgaagcaaaatgctactaaagcgaagatccctttctatggaaggtacacgctggtttcttttcttgttggagaatttcagagctggttggatttaactgtagacttattg

SEQ ID NO: 15249 - DNA, 263 bp, Glycine max
  Clone ID: 700963181H1
gttcggaattcggctcgagatttcggtagacggtagctattaacattacaacacctttttattatttcacctctctctctctctctctcattgccatagatctgaaacacagatcacagggttaacgctttttgacccttctctccattggtcattcccccgaatacgccgcacctataatctagcaccgaccggaccctccatacccgttttcgcgcggatctaggagctcaggtaatccccgaggaattttcaattgttat

SEQ ID NO: 15250 - DNA, 245 bp, Glycine max
  Clone ID: 700963182H1
gcaaactcatccgaacattactattattggagaagaggttgctgccaagaagatgacactgaaggatgtcactgactacattgttaatatcatttctaaaagagctgaggataattataactatggggtcattcttatccctgaaggtctaattgatttcattcccgaggtccaacaccttattgcagaactcaatgaaattctggcccatgatactgtggatgagggagggctatggaagaaga

SEQ ID NO: 15251 - DNA, 215 bp, Glycine max
  Clone ID: 700963183H1
aagggtacgggaattatccggtttatccgagaaaaactccacagaaagagttactaggattatattattattatataatatgaaaagtttcttttttcttttttgaatttatttatcgtcaaaggagtttgttttctatttttgttcaggagacaacgttttcatgtatatttatgtcagacatgtgcctctggttattctaggccctctctgtt

SEQ ID NO: 15252 - DNA, 240 bp, Glycine max
  Clone ID: 700963184H1
aagacaacgataaatcctgcggcgggacagtaccaactgacgcacatcatttcctctctctacggatcttaccgccgacgcgcagggcggtgccaccgtcacttcgatctccctctcatactgagaaggtaaagtcgttaagcatggccgtagccctggtataaagagttgtgaaagcttggctctttctggaggttgaagaagcttgtgatatcaggtgagatctccgatgtagcagca

SEQ ID NO: 15253 - DNA, 241 bp, Glycine max
  Clone ID: 700963185H1
tcgatttgtaataccatgaagtttttttcagcaatagagtttctaagttcatttcttgtgctgatgttcttctaccctttttgccactcactcgacaacagaataaccataaaccaccccattagagacggcgacgttttggtctccaacggtttaggaaactttgcgctcggtttcttcagcccgcgaaactccacaaaccgttacgttcggatttggtacaacaaaatctcggaacaaa

SEQ ID NO: 15254 - DNA, 240 bp, Glycine max
  Clone ID: 700963186H1
agcttcctcttgtttacgctgggaacgcgagtaactcttctgtagggtatctatgtttgcaagattctctgattcctgagaaagtttcagggaaaattgttatatgtgagagaggtgggaatccgagagtggaaaagggtttggtggttaagcttgctggaggtgctggaatgatattggcgaatagtgaagcctacggagaagagttagttgctgactctcatcttcttcctgctgcgc

SEQ ID NO: 15255 - DNA, 238 bp, Glycine max
  Clone ID: 700963187H1
gaataaaagaaccttcaactggtaaatattttacagatgtccaaaagaataaaagaaccttcctttgatctgctgtcattctttcaacaatctcccaaaaccaagatatgtgaatatctgtatctttatagccattatactcagtatgtgctttccaatcttcaacagaaacggtatcttcactcccatgcagcatccaatccagatcttcgaggtctaaactttggaagaagtactg

SEQ ID NO: 15256 - DNA, 239 bp, Glycine max
  Clone ID: 700963188H1
gccgccgttgccggcggtttatatgccattctttcatcctcaacctctgctagctctgagatggaagtgccgtttggcaacgcacggcgtgagagcaaagaacgtgacgatggtggctccgggtctcatcctcgcgagggtgccaccacggtcagtcgttggaagaaacctgagattggttgggtgaagctgaacgtggatggttcacgcgacccatacaaaagttcctccgctggttg

SEQ ID NO: 15257 - DNA, 235 bp, Glycine max
  Clone ID: 700963189H1
aagtgaacagagaaataaatggagaatgcggaagagcagcagcagcaaaacgaggaggttttgtcggttgaacttccgggtccttccggttggaataaactgttcttccctaagaaagtgggaacaccaagaaaaagtgagattgtattcattgctccaactggggaggagatcaataccataaaacaattggagcagtacctataggcacatcctggcaatcctgtcatttcag

SEQ ID NO: 15258 - DNA, 150 bp, Glycine max
  Clone ID: 700963190H1
agtaagtggaatcggtcgagatattataggattaaatatatttcaactataaaattaagaggttaaaatatgaattattgaaactaaaaattttacgtttaaactatagggactacaaaatataaatcatgaaactatagaaaacaaaat

SEQ ID NO: 15259 - DNA, 235 bp, Glycine max
  Clone ID: 700963191H1
cgctctgtttctgtctctgtgtttgcggctgaggattccgaacgagcgaccttcttcgtttctcgcaaagtttaagtcatcatgggtaaggaaaagactcacatcaacattgtcgtcattggacatgtcgacactgggaagtcaactaccactggtcatttgatctacaagcttggaggtattgacaagcgtgtgattgagaggttcgagaaggaggctgctgagatgaacaaga

SEQ ID NO: 15260 - DNA, 236 bp, Glycine max
  Clone ID: 700963194H1
acccaattcccttcgtcgttttcgattaagagagcaatggcacgtaccaagcaaaccgctcgcaagtccaccggaggaaaggctccgaggaagcaattggcaaccaaagccgctcgcaagtcagccccggcgaccggcggagtgaagaagccccaccgcttcaggccaggaacggtggctctgagggagattcgaaagtaccagaagagcaccgaacttctgatccgaaaactccc

SEQ ID NO: 15261 - DNA, 236 bp, Glycine max
  Clone ID: 700963195H1
cacagaaatgggtgaaaacaaggaagaagaaaagaaagaagagaccacagaggaaaagaaggaaaaagagcctccagagatagtgctcaaggttgatatgcactgtgaagcttgtgcaaggaaagttgcaaaagcattgaaaggatttgaaggagtggaggaggtgactgcagatagcaaggcaagcaaagtggtagtgaaaggaaaggcagcagaccccataaaggtgtgtgaga

SEQ ID NO: 15262 - DNA, 237 bp, Glycine max
  Clone ID: 700963196H1
cttactcacagatatatttttttttttgtctccatcattttctcgacagctttcagtttgtgtggttcatctttcttcttctccttccctcccccctctgtaacaccccgcttctctgaatccctttctgttaatcatctgtctttcaagctaagattttcgggtttgtctattaattcaccaagaagcaaacttagaaggatttttcgaaagccaggtgttttcagaaacgagatc

SEQ ID NO: 15263 - DNA, 170 bp, Glycine max
  Clone ID: 700963201H1
aaaatggctggaaaagaaaaagacattaagggtcaaaactttggtcattcctcttctcccccactctgtatctctcactcagccacattaaacactaaagtcgcttgctgtgtactcactttaatttataccttcttaataagtcgcgatccagagcttagcatttaaat

SEQ ID NO: 15264 - DNA, 240 bp, Glycine max
  Clone ID: 700963168H1
cgaatacataatcgttggatctgccaatatcaaccaaaggtcaatggatggtgctagggactctgagattgccatgggtgcttatcagccctatcatttggctaccaggcagccagcacgtggtcagattcacggtttccgcatgtcattgtggtatgagcaccttggcatgcttcatgactccttcctccagccagaaagtgatgcatgcattaacaaggtgaaccaagttgctgacaa

SEQ ID NO: 15265 - DNA, 247 bp, Glycine max
  Clone ID: 700963139H1
atctgagatagagctacagcaccattatcattcatctccattactttcctattcgatcctcgatccctctcccacatagaagattcataaccccaaaacccaattttttttaataatacaactgcaattatttttattttctcagtaaaaaaaaaaaaaagagaaaggagtccgattcattggttaaaaactcttgctgtcccgcttcgtcctttttctcctccgtcgctctttccgcaatgccatt

SEQ ID NO: 15266 - DNA, 244 bp, Glycine max
  Clone ID: 700963140H1
ctttgtgtaggtgctcaaccctagtaagccgcaatggtgaagtactcaagggagcctgacaatccaactaagtcttgcaaggctagaggcgccgaccttagggttcattttaagaacacaagggaaactgcctttgcaatcaggaagttgcccttggtcaaggctaaaaggtacttggaagatgttcttgcccacaagcaggcaattccattcagacgtttttgtcgaggtgttggaaggacag

SEQ ID NO: 15267 - DNA, 245 bp, Glycine max
  Clone ID: 700963141H1
actcgagccgattcggctcgagaagagggagttataagatattcacagaagcagcaaaaatgcttatgcaacaagttcatgtatcaaatccaagttcatcttgtctcatccttcaaaagccatgcctccgtgacattactcacccatcttttcagctttggtcaaggccatcatcgttcccataccaaaggacgcaggaagggtttctcatggatgcaggtcttatggcatcaatatcttagctg

SEQ ID NO: 15268 - DNA, 241 bp, Glycine max
  Clone ID: 700963143H1
gacagttgtaaagacacggttcagtgacgatggcaaagctgccttccaatgccaacgagcatggaggccaaattcacttataaccctgtctgctgaatatgactccacaaagatctttggttcatccaccaagttcggtcttgctcttgctctcaagccttaacttgccctggctattaaatcttgtttggcgacatcaacttttttcatatcattgtacattgtttccaaaacccatgtt

SEQ ID NO: 15269 - DNA, 239 bp, Glycine max
  Clone ID: 700963144H1
ctcataacacaaagcacaaagcaaagctcatccttgagttaaaaaatggcagcagcttcttccatggctctctcatccccatccttggctggcaaggccgtgaagctgggcccatcagccccagaagtgggaagggtgcgcatgaggaagaccgtcaccaagcaggtctcctcaggaagcccatggtacggcccagaccgagtcaagtacttgggcccattctctggcgagcccccgtc

SEQ ID NO: 15270 - DNA, 238 bp, Glycine max
  Clone ID: 700963145H1
taaatttctaatgtctttgtcctgtccttccttttccttgcaaagtagaaaacgaaagcatctccctctctcctaagcaagcaattgcccttaaccctcaaaatcttcctctttctctcacagccattgattctccatggacgaatcggagcaatacccgaaggagtattaccctaacgatcaaacaatcaccagaagagtctcctcgtcctcttcgacgaccagcgtccacgtgaca

SEQ ID NO: 15271 - DNA, 241 bp, Glycine max
  Clone ID: 700963146H1
atgagtttgagtttgagtttgagtttcagtctgagtgtgtgtgtatgagagagagagagagagagagagagagagacgcacaagcacatatactataagaatatcacacattacagtattctgagtatctctctgctgcgcagttatgaccgagaatacataggtgagatttctacagtagtgtagctgggtgcagttctcatggctgtctagcagacactcatcttccgagccataagtg

SEQ ID NO: 15272 - DNA, 242 bp, Glycine max
  Clone ID: 700963147H1
ttccctcttcccactccccagatcccaaaggagtgtcttttctttttttatcaagtttgttgtttatatttaacaacctagagttaaggattttttttgtgctaattagatttaaggatttttaataatggacataaaagtgctttcttccggagttcagtactcaaatctgccggagagttacatccgacccgaatcggagcgacctcgtctttccgaggtttcggagtgcgaggatgttc

SEQ ID NO: 15273 - DNA, 251 bp, Glycine max
  Clone ID: 700963149H1
gtggtagtgcccaaacatgtaaccaatgaccagcaagatatctcacgatcatggatgaaacttgcttactttgtacaagggctgaaccctcaaaagagagagagaggtcaacatatagaacatggaaatgagcatgaccatttgcctattattttagggcaatcgattgccaatattcatgctctataggtggatgggtgagtgtctgaagctagcaagggggaaatggatgaagaaatagatgagagcgc

SEQ ID NO: 15274 - DNA, 249 bp, Glycine max
  Clone ID: 700963150H1
agatgttgcacattttttgtttggcatctttgggaatgcttccgctctgttcctattcttggctccagtgatcacattcaagaggattattaagaacagatccacagagaagttctcgggcattccatatgtcatgacactgctcaattgtctcctttcagcttggtatggtttgccttttgtgtctccccacaacatattagtgtcaacagtgaatggcactggatcattgatagaaatcatatacgt

SEQ ID NO: 15275 - DNA, 169 bp, Glycine max
  Clone ID: 700963151H1
ctcttgtgtactggattggaatatatatgtacttgatgttttctatgtaatgaaggtcttaataatataattaatcttacaaataataatattgagaccttcattacatagaaaacatcaatattattatttgtaagattaattatattattaagaaatggttcgcttt

SEQ ID NO: 15276 - DNA, 243 bp, Glycine max
  Clone ID: 700963152H1
ataaaagaccatgtcggtgaaggagtgcgagcaccacaaggggaagaagaggaagatcttccggcaagtgttctggtgcttagtggtgttccttttcatcgtgctggtcacaattcttttgatatgggcaatccttagacccaccaaacccaccttcacgctccaagacgtcaccgtctactacttcaacgccaccgtggcgaacttcctcacttcgaattttcaggtcacgctcatctcgcg

SEQ ID NO: 15277 - DNA, 242 bp, Glycine max
  Clone ID: 700963153H1
atacgtgaacagtgaagatgatttcttttcacatcctattgctaagcaacattacaaaaaccatattaaggctgtgttgacaagaaaaaacacaataactggggtcgcatataaggacgatcctgccatatttgcgtgggaacttatcaatgaaccccgttcccaacacgacaactccggaaaagttatttagcaatgggtgattgagatggctgcctacgtcaaatccatcgacaacaatc

SEQ ID NO: 15278 - DNA, 242 bp, Glycine max
  unsure (1)..(242): unsure at all n locations
  Clone ID: 700963154H1
ctcccatcctttcgcattctcaatacccttttgatttgtgaaaggaaagcaaacatggttgatcaggtccaacaccctacaatcatggacaacgttcctagtcaactccatctcagacctggtctttcatctggtattagaagttatgatggagcctaccgccacccagctatgtaccaaagaccctcttttgggaattactcggctngtgccttgcagtttcctgtgatgcccacatgcaa

SEQ ID NO: 15279 - DNA, 242 bp, Glycine max
  Clone ID: 700963155H1
attcaagtaaaatttcacttaagcttggtaaagttgaagagaatggcatagagaaggaatctgaccccagaaagaaggctgcggttttaattcttggagctggtcgggtctgtcaaccagctgctgaaatgttatcatcatttggaaggccatcatcgagccaatggtataaaacattgttggaagatgattttgaatgtcaaactgatgtagaagtcattgtgggatctctgtacctgaag

SEQ ID NO: 15280 - DNA, 241 bp, Glycine max
  Clone ID: 700963156H1
gttccagaggcccgtcttcggagtgcccgtgggtattgaagcccgacgtcgtggcccctggctcgtccattttggccgcttggattccggatgtgcccgcggcccgaattggcccaaatgtggttttaaatactgaatacaatttgatgtcgggaacgtcgatggcctgccctcatgcttccggggtggtggctctgttgaagaatgcacatcctgaatggagtgcttctgctattaggtc

SEQ ID NO: 15281 - DNA, 241 bp, Glycine max
  Clone ID: 700963157H1
ctcacagccgccgctcgcggtggtgccaccgttgcactctccgctagctctctattcgatctccctctcaccgatactaagaaggtaaagtcgttaacgatggacgaagtctctggtagtaagagttgtggcactttggctctatctggaggttgatgaaggctatagttggatgaacacaactgaaatgaatggaaaccagcaccgttacaatcctttgctaatcagtaagcattgacaa

SEQ ID NO: 15282 - DNA, 238 bp, Glycine max
  Clone ID: 700963158H1
gattcaacatacaattctctggtaaaggggttttgtaaggcaggagatcttgtaggtgctagtaagattcttaaaatgatgataagtaggggtttcctcccaagtgctaccacttataactacttttttaggtacttttcaagatgtagaaaaatcgaggaggggatgaacctgtatacaaagttgattcaatctggttataccccagatcggttaacttaccatcttctggtgaaga

SEQ ID NO: 15283 - DNA, 237 bp, Glycine max
  Clone ID: 700963159H1
aaataaaaaaggaaaggagatgtttgaataaaaataattccccttcaagttcttattttttgagaggacaggacaatatgaatgttttattatgctctatcaacacattaaaaagattatatgatatatctgctgtggaagtaggtcaacatttctattggcaaatagggagtttccaagtacatgcccaagtacttattacttcttgggttgtaattgctctcttattggtttcag

SEQ ID NO: 15284 - DNA, 236 bp, Glycine max
  Clone ID: 700963160H1
gttcgtgtccactattaaaaaaatcaacaagagtagtaacgctcccaagtccgttgcgagcaccggagcgacaatatcaccattgaacttccgaaccggggttgatcatttttgccttcacaccggaggaaaggcggtgatcgacgggatcggaatgagcttggatctgagcgagtatgacctggaaccggcgaggatgacgctgcaccggttcgggaacacgtcggcgagtagct

SEQ ID NO: 15285 - DNA, 239 bp, Glycine max
  Clone ID: 700963161H1
gcaggaagagagaaaggcgatggacctcggaacctatgaagtgccagaaggagtggacattctaggaagatacgatgcagagtttgcaaaaatcctcacaaaagacgctttgacattcgttgctgagctggaacgtgagttccaggagcgatatcaagcatgcattagggagcagtagagaggcaaagaagaagtacaatgaagggactcttccggggtttgatcctgccaccagtcaa

SEQ ID NO: 15286 - DNA, 239 bp, Glycine max
  Clone ID: 700963162H1
aaagcagatgatgagaatatacgtcgccagtccagtaagcgactgggaagatagtgacgctgagagatatgtggaccacactttatctctttgggacgaatatgaagccgaactgtcacattttgtatctcaattatatgattcattattcaaggactgtgctagtatcaatgttgctttgcaacatagctcttgcctcatatcgaagaatgacgtatgtgtgtcatctccccggcgta

SEQ ID NO: 15287 - DNA, 237 bp, Glycine max
  Clone ID: 700963163H1
acagggcatgatgcaatggcaatatctcacttaacaaaggtgggaatgctgtttgtgcgttgtcgcggaggcataagtcactctccacaagagcatgtgctagataatgatgtctgggcagctggtttagcaaccttgtcatttctggaaaacctatcataagtgatacggtaactgtgtaaagcaataaatagatgatagcttgtaattataggttaatttattgagttaattcat

SEQ ID NO: 15288 - DNA, 252 bp, Glycine max
  Clone ID: 700963165H1
tgcgtattcagctcgagatgtggatgaaagtaaagaagtagcaaagatgtttccattcgggcacaatggtcacaagataaaggggactatggtggttatgcagatagaatgcgttggatatcaacagcatcaccagtgttgacgggatcgtcggtaccggcttagacttcttaggcagtggactcgatacagttacttgtttagcatcctgcatctccatccaacttagtagtgctaccaaggctgatggtg

SEQ ID NO: 15289 - DNA, 247 bp, Glycine max
  Clone ID: 700963138H1
cattccaatcgctcccaaaatattttctaatttgttcataactcaataattctcatcatgggctccttgattgttccaggtgaacatgatcacaaactaaagcttgttctctcttccctttgtatcaaccagtcacctcattcccgtagtagacatagctaggctctttgccattcatggtgttgatgtcaccataatcaccaccacagccactgccgccattttccaaagctctatcgatcgcgac

SEQ ID NO: 15290 - DNA, 243 bp, Glycine max
  Clone ID: 700963166H1
aaccaagcttctctgttaaaaaaaaattaggcgtctaaagggccaaagcttagaaagttgaagctttttttgttgaggtgaaagtgaaatggttggcaaggataatctgagggctgaggacttgaacttgtgctttaagaagcttatgatggtggccgggagtgggaacagtgagaaaggggtgaacttgaaggttggggtgatcaccgagtggaaggatattcctgtggagcttctgatgca

SEQ ID NO: 15291 - DNA, 246 bp, Glycine max
  Clone ID: 700963167H1
aacactgcagtgttgactatgctgctagctcaacccattttcctctctcgcaactttcccactctcaacaaccgaaactcgagaacttctcttcaacttcacaaccctcctgcactcataagagtttcaccgcaaagaacgccaataatagcctcttctggttgttttggttgcttcgtaaaaccgcttgatgtcagaaccaaaacctcgctgggtgcgttttttaagaaaagaaagggttgtgca

SEQ ID NO: 15292 - DNA, 245 bp, Glycine max
  Clone ID: 700963111H1
tcttcaattgtcgatgatcttggccttctgctaagagaaaaaggatttaattatcacggtttggaggttctatatagtggtgtttatggaacggaactaacatgtgagatatttattggacctgtttattatcaacggctgcgtcacatggtttcagacaaatttcaggttcgatctactggcacaattgaccaggtcacccggcagccaataaaaggacgaaagcgtggtgggggaattcgatt

SEQ ID NO: 15293 - DNA, 209 bp, Glycine max
  Clone ID: 700963112H1
atctggatgagcttgagaatagacttgatgacatagatagcatagaggctgaggaggaacggaaaagatcaagtcaagcaaatagaaagacatccaatcgtggtgttacaaaagcagctaagaagtacacggaaatacggtagacaagtagtaaagagaaaagagttaagtcagataatgataattattcaatggaaattgagaatgtt

SEQ ID NO: 15294 - DNA, 241 bp, Glycine max
  Clone ID: 700963113H1
gtttgtcagctttttcttgcttccatagttcatggcgtgtgttcaagtcatcacagttcttctctttgcattggctcttgcaaaaattgacccctcaacatgccaaatggtgcagggcagagtcttctgcgttgactgcactcacaactatgacttatctgatattaaggtttcagtgaggtgtgatggtgtgaaaaaactggctttggcaactacagaaaatgatggctccttcaaggtt

SEQ ID NO: 15295 - DNA, 243 bp, Glycine max
  Clone ID: 700963115H1
tatggttcccgttgcgtgaagccaccgatcatctatggtgatgtgagccgcccaaagccaatgaccgtcttctggtcatctctggctcagagctttaccaagcgcccaatgaagggaatgcttaccggtcctgttaccattctcaactggtcctttgttagaaatgaccaacctagatctgagaccacctaccagattgctttgtctatcaaggacgaagtggaagaccttgaaaaggctggc

SEQ ID NO: 15296 - DNA, 243 bp, Glycine max
  Clone ID: 700963116H1
aaacggatcgccgtgatgcgcaggagtatcttgagctgggacaattgtaaattctttctgacacgggagctgcactggatgcattcaaaactgctcgtactctatttaagaagggaggtcaagaagtaccaattgaattactcaataatattggtgtgcttcagtttgaaaggggggaatttgagcttgctcaacaaacatttaaggaggcactaggtgatggtgtttggctatctttcatca

SEQ ID NO: 15297 - DNA, 266 bp, Glycine max
  Clone ID: 700963117H1
ttcggctcgagcacatataaactccgatgttttacgccttttaatttctttgcaccatactctttcattcaattcaacgccacacttcatagaaaagaaaagcgatggagtcttccggtgcagcgaatgagaagctcttagaaaatggcacttcttctgataaacccacaaagggaaagggtggtttaagaaccatgcccttcatcatagtgaacgagtgtctggagaaggtggcgagctacgggatcatgcctaacatgatactg

SEQ ID NO: 15298 - DNA, 251 bp, Glycine max
  Clone ID: 700963118H1
gcggaagctctagcttgggtagcgaatcacaatggcgagaggattaaagaagcatctgaagaggcttaatgccccaaagcattggatgcttgacaaactgggtggtgcatttgctcctaagccctcatctggaccacacaaatcgagggagagcctgccactcatactcattttgcgaaaccggctgaagtatgctctaacataccgtgaagtcattgctattctgatgcagcgacatgtccttgttgatg

SEQ ID NO: 15299 - DNA, 250 bp, Glycine max
  Clone ID: 700963119H1
cacacacactacagcaccaaaaaccgaagcaaagcaagcaaagcaagccaatcaagactcaccttcgtgttccaatcagaggatatagagagagaattatgagttggttgaataaaaataaaagtacttgtagtgatggtagtgccaataatgaatcttcttcaagtggaatagttggagaaagggataatcatcttgatcatgaaattgcacagctcacaaaacttaggtcaagtcctcatgagctttt

SEQ ID NO: 15300 - DNA, 248 bp, Glycine max
  Clone ID: 700963120H1
aaaagggacaacattgaagacaacgttatcatatccttctttgcttggaatggaacaagctgggaagcaaggaattatggtggcgtctcagagtcaaaaccccattgagcaaatccaagcgcgcttcaaggacttggaaactggattccgcctctggctctccaagcagtccctccccgtcgaggcagccgtcgtcaccaccaccagcgccgcccagggcgccgccatcggcgccttcatgggcaccc

SEQ ID NO: 15301 - DNA, 247 bp, Glycine max
  Clone ID: 700963121H1
gaatgttgcgagggaaatcataaaccatagaagtcttcggcaccccaatattattcggttcaaggaggtggttctgactccaacccatctgggtattgttatggagtatgcggctggtggagagctctttgagaggatttgcagtgctggaagattcagcgaagatgaggctcgatatttcttccagcagctcatctcaggagttagctactgtcattccatgcaaatctgtcatcgagacttgaag

SEQ ID NO: 15302 - DNA, 247 bp, Glycine max
  Clone ID: 700963122H1
agactcatgtatacaagaggccacctgtcttttcaagatcattgatttttgctactgcattcatgagcttcttctctgtagttatagcactgtttaaggatatacctgacattgaaggagataaagtatttggcatccaatctttttcagtgcgtttaggtcagaagccggtatgttgttcaaatgtaccatctcagcagaattagttgtgccctcctgtatcccttggttgttactaactactctt

SEQ ID NO: 15303 - DNA, 248 bp, Glycine max
  Clone ID: 700963123H1
caaaaattatggacccataatgttcataaagttgggacaagtcccaaccgttgtagtttcctcccctgaaactgcagagctattcctcaaaacccatgacacaatctttgctagcaggccaaaaactctagcttcagaatacatgtcttatggaagtaagggcctagcgttctctgagtatggaccctattggcgtaacgtgaaaaagttgtgcaccacacaacttctgagtgcatcaaaggtcgaga

SEQ ID NO: 15304 - DNA, 245 bp, Glycine max
  Clone ID: 700963124H1
cactagatgaatagataggtactgtttcgttcgtaatttgcaatttggtgagattcttcattcttatgctgtgcgggtttcctcttcagattcatggcggcaacccaaccaccgcagggtccggatcgtaccaccgatcatactgtcaattgagcttattgatcatgcatgcagaagagataccggccgaaccagataacttgaaggagcagggtacaacaactataggtcattcaagggagacc

SEQ ID NO: 15305 - DNA, 235 bp, Glycine max
  Clone ID: 700963125H1
ccatggcttcccacgttgctcttcttcgtgctcctcatcctctttcaatctccactcaacgcttccatgccaaacagatttccattaacggactcaaattcacttcttcttcttcttgttttccatgttccataacaacacagagagagtcttgttcctctgtgattacatgttcatcttcgaatgacagagacccgaattcggtggatgatgaagatgtaaaacaagtggagcg

SEQ ID NO: 15306 - DNA, 241 bp, Glycine max
  Clone ID: 700963126H1
ttgggagttaggttctgcacgctctgcttccagcgagtgttctttcttcgtttcaacaccttaatttgcacacgctgcttcttccacttgagaaatggcacaagaaacctttctattcacatctgaatctgtaaacgagggtcaccccgacaagctgtgcgaccagatctctgatgcagtgctcgatgcgtgccttgaacaggaccctgacagcaaggttgcctgtgagacatgcaccaag

SEQ ID NO: 15307 - DNA, 241 bp, Glycine max
  Clone ID: 700963127H1
ctaaagtaagcgtagatcctttgccaacaagtgggtttcaaagggtcttgcaaggtcaagaactttcgaccttgagaggtaattttgctgaaagaacgaatctgatacggcagagaagtctggtgtgtggccacctgccacggatgatgaaaagattgatgtttctacctcaagaaggtatgggtcagacagctggatgtcaatgggaaggcatgaaccaacatatccagatctactttca

SEQ ID NO: 15308 - DNA, 241 bp, Glycine max
  Clone ID: 700963128H1
tctgagggccccagaagctcatttgatctgggtttctcttgtttttgtgttgaaggagagtcttttgttttttgtggcgagtttgttgcacgtttaagaagcaatggcacgcaagaagatcagagagtatgactccaagaggttgaaggagcactttaagagaatctctggccaggagttgcccatcaagtctgcacaggttacagaatccaccaatttcagtgagctagcagagaaggaa

SEQ ID NO: 15309 - DNA, 242 bp, Glycine max
  Clone ID: 700963129H1
tagtacttgaattagagggtggaggtaaacaggagccacacttttgggattagagtttctctttgttttccaaaaaaaaaaaaaaaaaaatcatttggtgttgtgtgttacccccttgtttaaggctacggcttcaaaaatggggtactttagagggcagtgttttaacgtgttgaaatccccatcttgttgatttgaaattgtacctagaaatgtctccaattaggatttagagttgtaaa

SEQ ID NO: 15310 - DNA, 243 bp, Glycine max
  Clone ID: 700963130H1
ctatgttaaaggacaaaagagatgcagtgagggtgattgctgagagatggaagcttgcagtgaatgcagctggtcgggagccaaagcatttcgtagttgttcatgttaccccaaaatcaagagctcctgctcgtgtgctagggtttaagggtactacaactgtaaatgtaccccttcctccggcatttgatcctttggttgatatggatcctcgacttgttgtctcttttatagacttaccaa

SEQ ID NO: 15311 - DNA, 221 bp, Glycine max
  Clone ID: 700963131H1
cgccattagtgaaccttgaaaccttaacagagtaaacttgcttgcagcgaatccagattcggaggaggagtgagtggtccttgttgctgatttggcaacaacaaataaagatgatagtttgagtttgagtttgtgtgaatccagatctgagtttcatttcgcagttttgcggagaagagaacaatggagtcagcaacggtatcatcatcggagtcggagac

SEQ ID NO: 15312 - DNA, 253 bp, Glycine max
  Clone ID: 700963133H1
ctccacagcactactgttatatatggattcgatgcttcttcgatcttttcctaatattaacaacgcttcttctctcgccaccactggttcttatttgccaaatgcttcatggcacaataggaaaatccaaaaagaatataattttttgaggtttcggtggccaagtttgaaccaccattacaaaagcattgaaggagggtgtacatgtaaaaaatgtaatataaaatttgttgtgaaagcgacctctgaaaaa

SEQ ID NO: 15313 - DNA, 250 bp, Glycine max
  Clone ID: 700963134H1
cgagattccaactgaggaaagtgacagtgctctacgagcttctctctgcttgtctatcagatttaggtgaaaataacaagaaatttagccggaggagaaagggctatgatgctcaacaacgtgtcactctgcggctgctagcaacttggctcgatatcaagtgggcaaaaatggaggccattgagacaataggtgctagttctgcaatggttttattaaagagcaagaggcaagtaaagaagaaattcaa

SEQ ID NO: 15314 - DNA, 248 bp, Glycine max
  Clone ID: 700963135H1
cttgcattttcctacttccacgacatagattcacgcttcagccatggacttgacttgcctcccgaagaaaccgagaagggtttcctaggaaaaatcatgcccaggctcgtcaaatccatctctggcgacaggacacacgtgcttcgcttcgagaccccagagactatgagcagggacaggtttttctggtttagggatgaggagtttgctagacagactgttgctggtctcaacccgtatagtatacg

SEQ ID NO: 15315 - DNA, 243 bp, Glycine max
  Clone ID: 700963136H1
cgaatacataatcgttggatctgccaatatcaaccaaaggtcaatggatggtgctagggactctgagattgccatgggtgcttatcagccctatcatttggctaccaggcagccagcacgtggtcagattcacggtttccgcatgtcattgtggtatgagcaccttggcatgcttcatgactccttcctccagccagagagtgatgcatgcattaacaaggtgaaccaagttgctgacaaata

SEQ ID NO: 15316 - DNA, 246 bp, Glycine max
  Clone ID: 700963110H1
ctttctctctcccttagtcaaagggactcgttgttcttctcccagcgttatttagaaaagcaaaatggtgaagatttgctgcattggtgctggatatgtggggggtcctactatggcagtcattgcacttaagtgcccatccattgaagttgctgttgttgatatctctaaatcccgcattgcagcctggaacagtgaccagcttcctatctatgaacctggccttgatggtgttgtgaagcaatg

SEQ ID NO: 15317 - DNA, 245 bp, Glycine max
  Clone ID: 700963137H1
ggtgggaggtcgaaaactagaaaagtagcaggggcttacactgtaccattaccatagtcactttttgtctcttgtatttcttttccttttttccttttttttttttcattgacttgttgagggggtcttctttatctagctggagaaacaataatggttgctgtctagttctgtgaaattcaaccccatcatggatcttgagtctgtgatccacaggatcacaatttccgatgaatcatggaaga

SEQ ID NO: 15318 - DNA, 272 bp, Glycine max
  Clone ID: 700963083H1
gaagctttgttggcggcaaagcaaatctgcatagcgatggcgcctccgaagctcttcgtatttgcgctttcagtaaccctgatttttgccatcgttggggccgaagccgatgtttccgtcgaaggagccactccagagcctgatacctccgccatcaagatccaattagatcaactcaattccaagatccaaattctcgagtctcaaatcagtgaaaagttggaagaagtgaagaagaaggacaaaattatagcagaaaaagaaaattccat

SEQ ID NO: 15319 - DNA, 270 bp, Glycine max
  Clone ID: 700963084H1
ggaatatagaagcataaaactgaaactaacatatacatgccattaaaatactaaaattttcatgttgtctctagcctcaaggatcagatagcaaatctacaatcagagaatgaatccctacggagtcaggcagcggctgctgctttagagcagaaagttcatccagaaaaaatagaagcagaccattcagcagctgctctagagcagcaacttcttggtctggttctattttttctggatgaactttctgctctagagcagcaagttcat

SEQ ID NO: 15320 - DNA, 240 bp, Glycine max
  Clone ID: 700963085H1
gatttcatgtaccatcttcagttagcaaattagttcaaatggtaggggaattagagtgattcaaacaacatattgaaatatggctttaactgtatcttgattattttcatcaggttagtttccatagaggaaattcatgccaaaaattacacactgggttcattggtttgtttcatgaacaagacagggttgtagatttgaagtatgctgctgaaacaaatattctttttacgaacgaat

SEQ ID NO: 15321 - DNA, 270 bp, Glycine max
  Clone ID: 700963086H1
gctgtttccccatggagatctcactgaaataggtgagaggggagttaacttgagtggaggtcagaagcagcgaattcaacttgctcgtgcactttatcagaatgctgatgtatatctcttggatgatccatttagtgctgttgatgcacatactgccactaatctgtttaatgaatacatcatggatggtcttaaagagaaaactgttttactcgtaactcatcaagttgactttcttccagcgtttgattctgttttgttgatgtcaaa

SEQ ID NO: 15322 - DNA, 269 bp, Glycine max
  Clone ID: 700963087H1
agttccacgttgttgtccgctctgtggctctctacatttcatcattcatcggaaaaatggctctcgaggttgctgttaaggctgctgttggtgctccaaatgttctcggagattgtccattttcccaaagggtcctcttaactttagaggagaacaaaatcccttacaaactccacctcatcgatctcagtagtaaacccgaatggtttttgggtgtgaatcccgaagggaaggtgccagtggttctttttgatggcaaatgggtggct

SEQ ID NO: 15323 - DNA, 274 bp, Glycine max
  unsure (1)..(274): unsure at all n locations
  Clone ID: 700963088H1
ctcgagccgaatcggctcgaggtaaattgcgctgtatgtagtgagagcgctttggttcagtagcatcaaccataaattttcgctttgcgttccatcttctttaggccagtcttccataaaaacacaaaaagacccacagagaggaacatggcatgtccagcaatggcaaatgggaacggctcattgaagaacttgaagctaaatgacaccaagggaaagaccatcacttgcanagctgccgtggtatatggtcctggagagccctttgtggtgg

SEQ ID NO: 15324 - DNA, 271 bp, Glycine max
  Clone ID: 700963089H1
ataaaactctagggttacatacattactaacctgtccgcgttctctctctctctctgtatcttgcgaaatccgttcccctatctgcttttcgagttgttgctaaagagtgatggactcaccgcccagcaatcaccacgcggtcgacggagacgccaacgacgtcgttagatccttttcccaccgcgacgacgatgaagacggcaagccccaacccctcaccggggacggcgccagtcctggaaagatattcatagggggtttagcgagaga

SEQ ID NO: 15325 - DNA, 269 bp, Glycine max
  Clone ID: 700963090H1
ctcaactagatcatggcctcttctaactcctctctttctctccttctaccttctctcacaaccctcattctcctccaaattcaaacatgtgtctcctcatcacaattaacacaaaaacccctccttctgcctctcaaaacacaaacacaaacaccttcacgtaagctctcattccaccacaacgtcacatcaaccgtctcactaaccgtaggctcgcccccacagaacgttaccatggtcttcgacacaggcagcgaactctcctggct

SEQ ID NO: 15326 - DNA, 270 bp, Glycine max
  Clone ID: 700963091H1
aaagcgtgactgggcgcggagaaggaaacgccaaacacttcggcctaagcctaacgggaatgagcaacaacacatttagaaagaagggtcgaaggttttgggcctgtactctaaacattaatgtcatattcttttcttattatttatgatattcattttttaagcaatttttattgcatttatgatttttttttttgttttaaacatgacttgatttatataattttctccgctccaagtcgtcgaagaaggagttcactgtgttctctc

SEQ ID NO: 15327 - DNA, 259 bp, Glycine max
  Clone ID: 700963092H1
ctctgaaccagttttttgtggaaatcgatagctctctcaattaggggctcgcgataaatggcacggttggttctgccatcgaagacattgattttttcgaggaacactcttctgggtttgatctcccctgctcctaatacagcaagagggagcatcagattcaagcatttccttgcatcagaggtcattttccgaaagaagtattgcccattatattcttcactaccaacggtatagcaagtaagtaggcgactaattt

SEQ ID NO: 15328 - DNA, 266 bp, Glycine max
  Clone ID: 700963093H1
gtagtttcttcatgttgggtagttggaactccttaagcagcttcagagtctgagaagtgagaagcggaagaagaagcgatgcgtttttgcccgtgttttggatccgaggaggccaagggggtggcggatcgcgacccggtcctgctggtttcgggcatgggcggctccattgtcaattccaagcccaagaaattcgggttcaccactcgggtttgggtcagactcctcctcgctgacgtcgagttccgaaacaagatttggtccct

SEQ ID NO: 15329 - DNA, 272 bp, Glycine max
  Clone ID: 700963094H1
gcggaaacttcaaaaccatctctgaagctttggctgccatcccaccaaaatacgacggaaggtacgtggtttatgttaaagaaggagtgtacgatgagaccgtgacagtgacaaagaaaatgctaaacgtaaccatgtacggtgacggacagcaaaagagtatcatcactggcaacaaaaatttcgtggatggagtcaggactttccaaactgcatcattcgttgtacttggaggtggattcttggcgaaagacatgggattcagaaacaca

SEQ ID NO: 15330 - DNA, 272 bp, Glycine max
  Clone ID: 700963095H1
gcaaaacaccccataaaaaaaatgatgcatctaagcttatattttaccgttgttgccatagcgctcctattttcatttacatcttcttcagcagatactcatgaaaactttgttcaatgtctttataattatcccaatagcggaacctcaatctccaaagttgtttacacccagaccaactcctcatacacgtctacactagattcttccattcaaatttctaggttcttaaacgcaagctcaaaaccccttgtcattgtgacacctttggt

SEQ ID NO: 15331 - DNA, 270 bp, Glycine max
  Clone ID: 700963096H1
tttagctttgcagaggttggccttggcaggcacacgcacatcccacattacaacaaacagatttcattttttttattctttctcctttgtcatcctcaaaatccccgaccttaattgctccgaccccaacaaaaaacaaaacaagcaagccatggattcctcccagatccatggcttgtcctcgtaaattcagaactttacaagtcaaacttagaccaccattaactgaaaaaaccgcagaagaagaagaggatcaatctcagaagggtt

SEQ ID NO: 15332 - DNA, 258 bp, Glycine max
  Clone ID: 700963101H1
agttccctttatgctgttcaaaaacatgtcttttttctcccccttggtctgacacaagatttttcggtgaatgagactctagcatggaaagaaggaagtgagtttcttttcttattttgaacaccacagtgatgaacgaacacccatttgaggactgttaacgttccatattaacatctttgctggttacacttgaagttagaagcctcaagtgaagtgtacttgcatcttgttcttggaaaagttcagttgaatggg

SEQ ID NO: 15333 - DNA, 254 bp, Glycine max
  Clone ID: 700963102H1
aatagacacagccattgtttgtttactttccattgattgagcgaaactttgttttttctgcgatcattttccattgggtggaagaaagtctcaacctttagtcgaaagagcaaggatctgagtgagtgagcgatcatgtgtggtggtgcgattatctccgacttcattccagcgggtcccgccggcggggcgcacgcgtgaccgccgacatcctgtggccgaatttgaggaagcggttctcgaagtcgctgctg

SEQ ID NO: 15334 - DNA, 254 bp, Glycine max
  Clone ID: 700963103H1
cacattcttcctgtggatgatactattgaaggagtaacaggaaacctctttgatgcctacttaaaaccttatttcctggaggcatatcgaccagtgaggaagggtgaccacttccttgtgagagggggaatgaggagtgttgagttcaaggttattgaaactgacccttctgagtactgtgttgtcgccccagacacagagatcttctgtgaaggagagcctgttaaaagggaagatgagaatagattagacga

SEQ ID NO: 15335 - DNA, 247 bp, Glycine max
  Clone ID: 700963104H1
aaaaaaaacaagcattatatgaacttaatgacccttgacatttcttttgattttgtgtattaaattgttttggtggatcaattgatctcttgagtactcagatcagtgctggacaaggacaagtaaccaaaattccaagaagggttcattaatacatggccttagagcactacctttcgcaggaatggaaaaccagccccagcccgatcccgagccccatgacagtgacagataaccttgatgggtg

SEQ ID NO: 15336 - DNA, 250 bp, Glycine max
  unsure (1)..(250): unsure at all n locations
  Clone ID: 700963105H1
ccttgagcttttctttctttctctgctctcttttcttttaggtttccactctcacacactcatcatcttctcnttctctgcaataatctctcttctcttcttcactctctcaactcctgccaaacccccatttccgcagttcttatcacttgcagtctgatgtctccgccattgctggttaccgaagatgaagggcagtgccatgcctcgatggtagcatctgcatcttcaccatccctgaactgtttct

SEQ ID NO: 15337 - DNA, 253 bp, Glycine max
  Clone ID: 700963106H1
taccaactacatttcaaggaacaacaaggaggtcaaataggaatagcactagatgtcatttggtatgaacctataacagaacttgatgaagacaaagacgcagcagcaagacgctatggacttttcacttggatggttccttgacccacttttctttggaaaatatcctctctcaatggagaaacttgtagctaagagattgccggagatttctgatacagcctcaaaatttcttgtgggatctttggatttt

SEQ ID NO: 15338 - DNA, 250 bp, Glycine max
  Clone ID: 700963107H1
actgcttgttctttaattttgcttcatggaactgcacaaatccacacatgtggttcttcactcaagccctggtctgggccatctcatcccaacgattgagcttggaaagcgcttcgtccatcaccacaacttccaagtcactgttctcgccgttacttcccaaacctcaaaaaccgaaactgagatattaaactcatccctctgccacatcatcgacatcccttcaccagacctcactggtcttgttaac

SEQ ID NO: 15339 - DNA, 250 bp, Glycine max
  Clone ID: 700963108H1
ctccgatggctaatccctcactcttgttcttcagtctcctcctattatccgccaccgtagccgccgccgaacggatcgacgatgaagacgaccttctgatccgtcaagtggtgccggatgcggaggaccaccacctgctcaacgcggagcaccacttctccgccttcaagacaaagttcggcaagacctacgccacgcaggaggagcacgaccaccgcttccgtatcttcaagaacaacttgctccgcgc

SEQ ID NO: 15340 - DNA, 245 bp, Glycine max
  Clone ID: 700963109H1
cttcaatttataagaatggcactttctcctattcgttcttcttctttctcttcatcagctattgttgcattggctgtgttactgcttcttacagggacctcttcagctaacctctcaaagaacttctattccaagacatgtcccaacgttttcaacactgtaaaatctgtagttaaatctgctgttgtcagagaacctcgcattggggcatctattgttcgtctcttcttccatgactgctttgt

SEQ ID NO: 15341 - DNA, 275 bp, Glycine max
  Clone ID: 700963082H1
cacacaattcctacacatttctactctttagtttctccaattttctttctcaattctcaacaatggccactacaacacaacttcacttaccccctggattcagattccatccaacagatgaaagactcgtcatccactacctttgtcgcaaatgcgcttcgcaacatatcgcggttcccataatcgccgaaattgatctgtacaagtacgacccttgggaccttccaggaatggctttgtacggagagaaagagtggtattttttcacgccgagg

SEQ ID NO: 15342 - DNA, 274 bp, Glycine max
  Clone ID: 700963057H1
gaaggttacattttccgtggaagattcgtagggtcttggcttgttaagcttctttcttctttctaaaggctacattttccatggaactgtcagaagacgtgctactctgaaatatcaacacttgctcaaactccacggagcactctcttcaaggcagatttcttgaattacgaatctctttgctcagcaatttctggatgcactgcagttttccatcttgcttgccctgtaccctcaattattgttcccaaccctcaggcaattctttttatat

SEQ ID NO: 15343 - DNA, 274 bp, Glycine max
  Clone ID: 700963058H1
ctttctctctcaagaaccatcaaatctcgatcctcccctctccctgcaagatccggtggtggttccgattgctcacatagggtttggtctcgggtcggtcaaggctggcgggtatttgggtgaagtaaatggcggatccggccggaatccggctccgtgagtggtgcaagcgtggtgttgcggcggcggcgttgatagggttacagtgcggtgacgattgttgccaacaagagtgaagcatgctgagcgtgctgcgcgtgcaccttccttctga

SEQ ID NO: 15344 - DNA, 271 bp, Glycine max
  Clone ID: 700963059H1
agagagaaagagaaccaaaccaaataaagctcttggttggttcacccttgtgcttattttttgttgctgagaaagagcaaagaagaagaataagaagaaggttttgatcggatgcgatgagcacacaaggacaagtgattgatgaggcggttctggatgacataatccggcgcctaacggaggtccgattggcccgacccggaaagcaggttcagctctccgagtctgagatcaagcaactttgcgtcgcttccagagacatcttcattaa

SEQ ID NO: 15345 - DNA, 263 bp, Glycine max
  Clone ID: 700963060H1
gtggtgccttatcgctgtggttttcatcgtcttccttctcttatatttctttttttttttttgtcttcgccgcacgccgaaacaatggccggaaaaggagagggtcctgctatcggaatcgatctcggaaccacctactcttgtgtcggtgtgtggcaacatgaccgagttgaaatcatcgccaacgaccaagggaacagaacgacgccgtcttacgtcggcttcactgataccgagcgtctcatcggtgatgcggctaagaa

SEQ ID NO: 15346 - DNA, 273 bp, Glycine max
  Clone ID: 700963061H1
cacagtcacaatggtttcttctaattgctactatcttgcattggtatgctgctgtgttctgctgctgctgaaccccaccgtgggggagcaggacgagcagaacttggtgctccagtaccacaaaggcgcgctcctcaaggggaggatcaccgttaacctgttatggtacggcagcttcaccccagatccaacgctccacaatcgttgacttcataaagtcgttaagctcctccccgggggccccacttccctcggtggcatggtggtggaaga

SEQ ID NO: 15347 - DNA, 271 bp, Glycine max
  Clone ID: 700963062H1
gttggtggaacgttggagaagatcgttgaccggttatctgtagtttggggcatgatcaatcatctaaagtctgttaaggatagttcggagctacgttctgctattgaagatgtacaggcagaaaaagttaagtttcagcttagactgggtcaaagcaaacctatttataatgcattcaaagccattcaggagtctcctgattggcagacactcagtgatgctcgaaaacgtattgttgaaagccaaataaaggaggcggttcttaatggag

SEQ ID NO: 15348 - DNA, 113 bp, Glycine max
  Clone ID: 700963063H1
gaaaagaattctgaaaaaaaaaattaaactaagaggttccctttcgcagttagtggcactgcatgtgaataacaatttgacatttcatcagtctcgattcataggacaaatgg

SEQ ID NO: 15349 - DNA, 263 bp, Glycine max
  Clone ID: 700963064H1
ttcgttaaaaatagaaagcacaacacataagctacgcacacgtagcttccttcatttcggaaattctaagcaatcaataaaagatggcagatggtgaggatatccaacctcttgtttgtgataatggaactggaatggtcaaggctggatttgctggagatgatgctccaagggccgtgttccctagcattgtgggtcgtccacgccacactggtgtgatggttggaatggggcaaaaggatgcatatgttggtgatgaggct

SEQ ID NO: 15350 - DNA, 252 bp, Glycine max
  unsure (1)..(252): unsure at all n locations
  Clone ID: 700963065H1
cttgtttcggagcttctcagggaccaaattacaggggattcttccatgttcaaagatctccaattgtccagcatattcacattgttttcatgttaattgtggtggaaagaatgtaaaggtgatggaaaatgatgaaaatattcactatgtaggagatggaggtgtgttaggtagcggtgctgctaatatttcattgatcatganaatcactggggatttcttggatgatggtgatcgattaaattcacgtta

SEQ ID NO: 15351 - DNA, 269 bp, Glycine max
  Clone ID: 700963068H1
aacctgtcacgactacggggcaggagatagatgtattgtatcaaaaggtggacaacatcaacgatctgaaaggtttcaattgggaatctgatgtaggctttggaggttcttctacttcccaggatgctttcaatttatcaattataccacaccagaggattccagtgattgagtgagtggatatgaatatggaaggaccttatgatttatcatgcaatggagaagctggtaacaaaagccttcagatcattagatactctccttataaa

SEQ ID NO: 15352 - DNA, 264 bp, Glycine max
  Clone ID: 700963069H1
accttatcaggttgggaatatgcctttagggcccgattttggcaatcaagctggaaatgctatgcaagtagatagagggtcttcttggttgcctggtccctcagaaaacctagcacatctttctggtcctcctggtcagatgagtgctgctgctaatcagcttcgttcggctcctggggtgacaccagagatggagaaggcactgcttcagcaggtcatgagcctcacaccggagcagataaatctcctgcctccagaacaaag

SEQ ID NO: 15353 - DNA, 272 bp, Glycine max
  Clone ID: 700963070H1
aattgctggagtggcactctactcgttcatcaaagccaggatggaggaagagaagcgacaagcgaaagcagcataagaagttgtcaacctggaggatgtcttgcactgtaaatcaccacaaatttccttcaaaataattgagtgactggttcagtgttgtactatccttgtgatagcgcgcttttatttttccttctatttttgtcaaatattttctttttttcctttttctctcttcattcagaaaacaatgtctcgctgctgatttgcag

SEQ ID NO: 15354 - DNA, 272 bp, Glycine max
  Clone ID: 700963071H1
aaaacattcccaataacaataatatacacatcttcaattaagctccttctcctatagccatggctctttctaagcttataattgcttcccttcttgcgtcgcttctccttcttcatttcgttgatgctgatcaatcggcacatgcacaaacgcaggggtctcttcttcagcagatagattgtaacggagcatgtgctgcgaggtgccgtttatcatctcgtccacgcctctgccaaagagcttgtggaacttgttgtagacgctgtaactgc

SEQ ID NO: 15355 - DNA, 275 bp, Glycine max
  Clone ID: 700963072H1
ctcgagccgcatccatcgaatccaaataataccaaaaaacaccatgatgcttggggagacccaccgcccaaatccaaccgtacacgtgccaccgtgggcgccggagatcttctcaccatacaccggcaatgccgattactctccgtactccatgcaagaagcacttagtgcacttcagcactacgaatccaccgatgctgagtcagactcggaggttccgtctcgggaaccggaagtcccggtggacgcttactccctgcgacatttccgcatgt

SEQ ID NO: 15356 - DNA, 273 bp, Glycine max
  Clone ID: 700963073H1
ttaagagatcaatatggccaccaccactacccagcctccctctaatatctgttttttccttctgttgttgcttctagcacactttcatttgggcataagccaacttgagctgaattactactctaaaagctgcccaaaagctgaagagatcatcaaggaacaagtcacacaactatataacaagcatggaaacactgccgtttcgtgggtcagaaatctcttccacgattgcgtggttaagtcatgcgatgcatcattactgttagcgacggt

SEQ ID NO: 15357 - DNA, 272 bp, Glycine max
  Clone ID: 700963074H1
tagacacagacaccctcagaacctgaccaaaatacttactactatatcctactcacattttacattcccacctctttcctttcccccttaccattctcgagattctcgcttttactacattactctctccttcatactgggtttaaggtagggtttatttaactaggaagaaagtttttaaagagagagataggcaaaccgaaaagacgtggtctttctcattgatatatacatacacagatccctatggaatgaagagggtgctccccaat

SEQ ID NO: 15358 - DNA, 274 bp, Glycine max
  Clone ID: 700963075H1
tgaattggaaaatctaagaggagatggaaaaggagagcgcaaggaatatgataggatctatgattatgatgtctataatgatttgggtaacccagacaagagcaatgatctagctcgtcctgttcttggagggtctagtgcctatccatatcctcgcaggggaagaactggtagaaaaccaacaacaaaagactctaagagtgagtcaccatccagcagcacctacatcccaagagatgagaactttggtcacttgaagtcatcagatttcctt

SEQ ID NO: 15359 - DNA, 270 bp, Glycine max
  Clone ID: 700963076H1
caccaccttaatgtaattcatgagcctaagttccccatccaccaacattccccgccacaacctacccttttgaggttcggttgcttggcactcacgtaacaccaccatgagttttaattgccttacctgtggccaaattcttcaaagggtaaattctgatagggatgatgaatgtctcccaccacaagaaacaaagaaacctaacaggaaagtggcaatgcaagttgatagaagctggtcaaggaacatgaccccacccaaatatgcacg

SEQ ID NO: 15360 - DNA, 178 bp, Glycine max
  Clone ID: 700963077H1
agtaaattctttttggtattttatttattcagtctttcaaaatctgaaataatacagtaccagtcagtcatattttttgttcatgttttaccaaagaaaaaatatgactgactggtactgtattatttcagattttgaacgactgaataaataaaataccagtaaattctttttggct

SEQ ID NO: 15361 - DNA, 273 bp, Glycine max
  Clone ID: 700963078H1
gtgctcatccctttagggtgaaagaagaatggtgctttcggaggaggaaatcggtcgtctataccgaataaggaagacggtgatgcagatgctgagggacagaaattttctggttggtgacttcgagatcaacatgtccaagcacgagttcaagtccaagtacggcgaacacatgaagcgcgaggacctcgtcatcaacaaatccaagaaggacaactccggcgaccagatctacgttttcttccccgacgaacccaaggtcggcgtcaagac

SEQ ID NO: 15362 - DNA, 275 bp, Glycine max
  Clone ID: 700963079H1
cattctcagagtcacacacacgcacatatattttcttcatcttcgtacaccactgtctcatcatctccttttccttgttctggtggcgctcttgattttcagatgacaacagcaattgggtgaaacgtgaacgccaccaccgatcggggtttgccaaaaccttacaatggaggtcgaaaggatgagacagttgatgctgatgtggtgtagaatacgaagcaaccgtgtcgctcttgtgggtggaaaccataccgctgcaaggttttgcagtcgct

SEQ ID NO: 15363 - DNA, 272 bp, Glycine max
  unsure (1)..(272): unsure at all n locations
  Clone ID: 700963080H1
aaaggaccacctcaccctccccctccattactcccactgcatcttcttcaaattcctgtcctgaagatgacagcaaagtggtatctcattgtgtgtgttgtagcgatctgggccgttgatctgggttcatcatcacaccatgcccgtgccccagcaccagcaccgtcagtggagtgttcanacctggtattgaccttatcggattgcctcaccttcgttagcacggcagcaacgtcaccaagccacagggacatgctgctcttccttgaaaa

SEQ ID NO: 15364 - DNA, 294 bp, Glycine max
  Clone ID: 700963081H1
ctcggggttcggctcgagaaagcatttagtgacggtgttctgtttatgggctttaacatgttcccttcttccatctttctcctttggaattctgagaattggtttgaagaagagacctctagatcttgatagtattaatgctgctagaaaggcaagagaaggtctaagatctgtaagaccaatgatgggtgcacatgatcagtttattggtaagtcaaaaggtgaagatatagtacctttgaagaattatttggacgctcaatattttggtgagattggaattggcacaccccc

SEQ ID NO: 15365 - DNA, 277 bp, Glycine max
  Clone ID: 700963056H1
ctagctagctagctagctagcaaatagcaatgttaaaaaaccaaccacaaccagattggcctgagcccattgtccgggtacagtccttatccgaaaactgcgaagattcaatccctgaaaggtacatcaagccttctactgatagaccatccataaaaagttgtaattttgatgatgccaatattccaatcatcgaccttgggggactatttggtgctgaccaacatgtctcagcctcaattcttaagcaaatctcagatgcttgcaaagaatgggg

SEQ ID NO: 15366 - DNA, 277 bp, Glycine max
  Clone ID: 700963031H1
acctcgttgaaatgaaaatgggttcttctttgtggactttgtgtctaattttggcttcactagcctcttctgcattctgtgcctttccacggaggccagtggatgttccattcggcagaaactacgttcccacttgggcttttgatcacatcaaatacttcaatggaggttctgagattcaacttcatcttgacaagtacactggtactggcttccagtccaaagggtcatacttgtttggtcacttcagcatgaacataaagatggttcctggcga

SEQ ID NO: 15367 - DNA, 280 bp, Glycine max
  unsure (1)..(280): unsure at all n locations
  Clone ID: 700963032H1
ggcattcaccatctcctgtgggacacaggtatagcaggaggagcagaagagacagaagcagatctccttattcatcctactcttacaacaggcgaaaaagtcgttctatttcaccaagaggtcacagaagtccttctactactccaagacgtcgtagaagccgaactccatctgctanacgatacagaagacatagaagtaggagttcctcgttgtctcctactcgtaaatcttccagtcaaagtcttgggtcaatagagcacaaagtgcaactgaaaac

SEQ ID NO: 15368 - DNA, 176 bp, Glycine max
  Clone ID: 700963033H1
ctcgagccgagaacttcatgcaaaacgagttctacctcaagtctttaattctcgaagacattccaaaccatggaacctagaacttcatatgtaactcctgggtttacaattcaaaacactacaagactgatcgcattttctttgccaacaatacatatcttccaagcgagacaccg

SEQ ID NO: 15369 - DNA, 284 bp, Glycine max
  Clone ID: 700963034H1
caacaagcaaagtacatggttgatttggaaatccaggtccccaccccattcgacccgtttgccgaggcgagagaatcggatgcccccggagcaaaggagtatgtgcatattcgaattcagcagaggaatgggaagaagagtctgaccacagtgcaagggctgaagaaggagttcagctacgagaagatcctcaaggacctcaagaaggagttctgctgcaacggaaccgtggtgcaggacaaggagcttggcaagatcatccaactccaaggcgaccagcgtaa

SEQ ID NO: 15370 - DNA, 278 bp, Glycine max
  Clone ID: 700963035H1
cttcaaagttcacacacacaaaagaatgagcatggctttcaatagagagttagaagctgtaacccaagctttctcagggcatggagtggatgagaaatcattggtaacattactgggaaaatgggatcctctggagagagaatctttcaggaagaagacaccacatttgttcagtgaagatcatgaacgccattttcagaggtgggatgatcaatatgtccgtcttctcaagcatgaattcgtgcgttttaagaatgctgtggtgctttggtccatgc

SEQ ID NO: 15371 - DNA, 277 bp, Glycine max
  Clone ID: 700963036H1
caattatggagaaagcaattcaaagacagagagttctgcttgaacatcttcaacccatttcttcaagttcaaatttttcctctcaaacccatcaatctacggatctctcagcttcattatgttttgctgggaattcttcgcatggtcaaacaggtggatcagatgatgacgtggtgattgtagctgcatatcgtactgccatctgcaaagcaaagcgtgggggctttaaggatacccttccagatgaccttcttgccacagttctgaaggctgtaat

SEQ ID NO: 15372 - DNA, 276 bp, Glycine max
  Clone ID: 700963037H1
aattgttgtaactttttgattcctaaattctctaaaattcgaaattctaatttcgttaggggaaagagattgtttgtgtgtgagtgagtatggctggaaaaggcgagggtcctgctatcggaatcgatttgggaacgacgtactcttgcgtcggcgtgtggcaacacgatcgtgttgaaatcatagccaacgatcagggtaacagaactaccccatcctacgtggctttcaccgacacagaacggttgatcggcgatgcggcgaagaaccaggtcg

SEQ ID NO: 15373 - DNA, 276 bp, Glycine max
  Clone ID: 700963038H1
tgaatttcaatttccctaggggcttaatatctcccctcacttgtgcctagccttatgtcatagtattatcattcattctcatctttctctcttctctctccacccaaaccctaactcccgaccctgttcccctctcgtatccgtcatgaaaggaggaaagtccaagaccgaatctaagagagccgatcccaaacttgctgtgaataagaagggagccgccaccaaggctaggaaacccgccggcaaggggaaggcagcgaaagaccctaacaagcc

SEQ ID NO: 15374 - DNA, 275 bp, Glycine max
  Clone ID: 700963039H1
tgcattcttacagagtgggatgagttcaagaacattgattttcaaagagtgtatgacagcatgcagaaaccagcatttgtgtttgatggaagaaacatattgaatgctgagaagttgagggagattggattcattgtgtactcaattgggaggccattagagcaatggctaataagcatggcctaacaggcttgaagattatgaattgagcagagctatcaattatgttatcctttgtgacatttcaccacttgctatttttcatgatttcaagc

SEQ ID NO: 15375 - DNA, 274 bp, Glycine max
  Clone ID: 700963040H1
ggccaccgtcacttctgcagccgttgctattccctcattcactggcctcaaggcaagcgcaggcaaagtgagtgccgcagttaaagtctcagctccccaagccacaaggttgggcatcaaggcttcgctgaaagacgttggagtcgctgttgtggccactgccgcgagtgcagtgctggctagcaacgccatggccattgaagtgttgctgggtggtgatgacgggtctctggctttcgttcccaacaatttctccgtggcctctggggagaag

SEQ ID NO: 15376 - DNA, 280 bp, Glycine max
  Clone ID: 700963041H1
ctgaaagtgtgaagagtgaagatggccgaagaaaaagaatcaacgtcaattcctcttagtcaaggggaaaatgcatctcgcgacgatcccgaagacccagccaagtctccaccaagctcgcccaactcctccactcgcaaggcttgctgctttgttctccagagttgggtctctaagaaatttatgactggatgcgtagttctttttccagttgctgttaccttcttcattacatggtggtttattcagtgtgttgatggtttctttagtccaatatact

SEQ ID NO: 15377 - DNA, 275 bp, Glycine max
  Clone ID: 700963042H1
gtcaagataccagtgatctacatgagaaagtcgattttgtggcatgcttgggtggagatggcgttatactgcatgcgtcaaatctattcagagatgctgttccccctattgtgtcatttaaccttggctcccttggttttctgacttctcatgattttgaagattacaagcaagacctacgacaagtcatccatggaaataatacacgagatggtgtgtatattactcttagaatgcgcctccgatgtgaaatttttcgtaaaggtaaagcaatg

SEQ ID NO: 15378 - DNA, 278 bp, Glycine max
  Clone ID: 700963043H1
aagccaagtgaaagtgagagaaaaataaaaatcaaagagcataatgtcagggatcattcacaagattggggagacccttcatgtgggagggcacaagaaggaggaggagcataagggtgagcaccatgctggagaatacaaaggggagcaccatggtgaacacagtagtgagtacaaaggagagcatcatggtgaacacaaagctggagagtaccatggtgagcacaagccagagcacaaagaggggttcctagacaaagtcaaggacaagatccatg

SEQ ID NO: 15379 - DNA, 277 bp, Glycine max
  Clone ID: 700963044H1
aaaacaagttctggatctttgttctactggagaagctcgcgttcttgagctccagaatatcgtagaagaacgtgatatggcatgccaatctgagcttgagtcttccaaaaagcagctctcagttgagtctgctgccctggcctctgcaacgaacgaaattcagatgctcaaggcgcaacttgaattggtagctaattgtgagagtgtgcaatctcaacacgcagaatcagcagacattgagcttcttaacctgaagcagaacttgtccgaaacgctt

SEQ ID NO: 15380 - DNA, 275 bp, Glycine max
  Clone ID: 700963045H1
agcaacttcacttccagtgttagcgaactcacaattggcaagaaggatttacgaaggaacttgaagggaaaatatcgtggtgacggtccatgcatagccacaaaccccatcgacaggtgttggaggtgtgaccccaattgggccaacaatcgccagaagctcgcagattgcgtccaaggcttcggtagaaacaccgttggaggcaaaggtggaccattctacgtggtcaccgatccctccgacgatgatatggtgaaccctaaacccggcacgct

SEQ ID NO: 15381 - DNA, 274 bp, Glycine max
  Clone ID: 700963046H1
caaacacagatgctgcacagcttgctgaaacatttgctgtagcaaaatgccccacaaaggtggttggtgttcctgtcactctaaatggagatcttaaaaaccagtttgtagaaactaatgttgggtttgacacaatttgtaaggttaattctcagctcatcagcaatgtctgcaccgatgctctctctgcagagaagtattattatttcatccgtcttatgggacgcaagcatcacatgttgctttggaatgcaccctccagtcccatccaaac

SEQ ID NO: 15382 - DNA, 276 bp, Glycine max
  Clone ID: 700963047H1
gttcttctgtctctcaagcagccagcatttgttctctcatcaccacaccatccagatccagatcaaatggcagccatggctatgttgcgtttgtcaccactctctggtcaaaaccatgttctttctttcccatcatcgccatcaccaccaccacctaagcttcataaccgtcctctgtatctcaccaatttgcctcatttgccccaaaggttgaaactttccttcgccggagggcccggcggagatggggtcggacgtggtggtggcagtggtggc

SEQ ID NO: 15383 - DNA, 278 bp, Glycine max
  Clone ID: 700963048H1
atcgagccgattcggctcgagctttttcctcagtggaacaaacagcagaaaaagattttagaaattaaatattgtttacaggaaagatgtcaagtggagcaacacactggtgttatgcatgcagacagccaattgtgcttgatgggagagatcctgtttgcgcttactgtgatggaggatttgtgcaagaacttgacgagttgcgaggaattgcacccaaccataaccataccttttcgtcacagtcaggagactttcatcaaatgcctgacattttc

SEQ ID NO: 15384 - DNA, 279 bp, Glycine max
  Clone ID: 700963049H1
gtaacaacaacaacaacgaccgcggcggcggtcaccggagaacaacacattcccgatcagtttcctggaccgaccggtctccggttacccggaaaccgccgcgtccgcttcagcctctcgccatcaacaaacgcagcgttatggagtggccgagcgccggctgcgacgatctcggcgattggtctcttccaccgaccccaagagtgtccaccataacaccagatgagggttcgggtaaagtatttcaattcaagaaagactattatgcgttctacgaca

SEQ ID NO: 15385 - DNA, 279 bp, Glycine max
  Clone ID: 700963050H1
aactgaggagagtgagagaaaagagaagagaagatgacaacacgcttcaagaagaacaggaagaagaggggccacgtcagcgctggccacggtcgaatcggaaagcacaggaagcaccctggaggacgcggtaacgccggaggcatgcaccaccacaggatcctcttcgacaaataccaccctgggttcttcggcaaggtaggaatgcgctattttcacaagcttcgcaacaaattctactctccgatcctcaacatcgacaagctgtggtccctggtc

SEQ ID NO: 15386 - DNA, 275 bp, Glycine max
  Clone ID: 700963051H1
aaacatctcaatgggttcttcttctattacaacatcgcctgaaaccatgaccatggctgcgatcgtgctcctgttcacggtctttgccgtttcctccgccctagacatgtcgataatctcgtacgacagcgcccacgcggacaaggccgccacgttgcgcaccgaggaggagctgatgtccatgtacgagcagtggctcgtgaagcacgggaaggtgtacaacgcgctcggcgagaaggagaagcgcttccagatcttcaaggacaacctgcgat

SEQ ID NO: 15387 - DNA, 265 bp, Glycine max
  Clone ID: 700963054H1
actctctctcaccaaagccttcctagaacgatgaaatcaaacaagagcaattttccctcaccaaacaagaagaaccaaacaatggccgatcaacttaccgatgaacagatctccgagttcaaggaaccattaagcttgtccgaaaatgacggcgaaggatgcatcacaaccacggagcttggaactgttatgcgttcattggggcaaaacccaactgaggcatacctccatgacatgatcaatgaagtggatccagatgggaatg

SEQ ID NO: 15388 - DNA, 278 bp, Glycine max
  Clone ID: 700963030H1
atccttttctccttttctttttcgtattcggggttgctgctttctttcgactctattgtcttcttaataaatacagaaagaaacaaaaaagaaaaaagtttataggtgcctagaagaaaagacaatatagtgtggagcaattacgtttgatcacaagggaaattagggtgcaacggttttgcaagatagcatagaagattttgaagaatcttagttgcaatatagttgtgcagttgttgaaatgggggctcctttatcagcatggcctttggagaact

SEQ ID NO: 15389 - DNA, 279 bp, Glycine max
  Clone ID: 700963006H1
tttgtcagctttttcttgcttccatagttcatggcgtgtgttcaagtcatcacagttcttctctttgcattggctcttgcaaaaattgacccctcaacatgccaaatggtgcagggcagagtcttctgcgttgactgcactcacaactatgacttatctgatattaaggtttcagtgaggtgtgatggtgtgaaaaaactggctttggcaactacagaaaatgatggctccttcaaggttgatcttcccttagaccacacaaaaccttcttctgtgaag

SEQ ID NO: 15390 - DNA, 282 bp, Glycine max
  Clone ID: 700963007H1
cttactttcaaatgttgccatgggagacacagaaactaaatctgattctgagctccacaccatcattcatttcctctgtttcaggcatagctgaaggtgctcgattgctgctttcccaaacatatcatggtgatagagttattgctgtctatgacgatgattactctagcataatatcatatgcccttagttccaaggaatatgaagattgggtgtctggtaagtcagatatgcaagagagtaactggattgctcgtgagagaagcaaagaagatttagctg

SEQ ID NO: 15391 - DNA, 280 bp, Glycine max
  Clone ID: 700963008H1
ggcgacaccgtgagtttgcccaacttatcgaccaaagtagtagctattgctgcaggggaagcacacactctccttcttacaggggatggacgtgtttattcctggggaagaggaatactgggacggcttggtcaaggttctgaacatgacaagcattttcctgttgaagtcaagtttggatcagaagaagacagcgtaagaatagtgggaattgccgctggtgcttatcatagtcttgctctagcaggcttctccacagatgtcgataatgctcctggct

SEQ ID NO: 15392 - DNA, 249 bp, Glycine max
  Clone ID: 700963009H1
agatgacaagttgaagttgcgcaacagcgattgggcggagaaacagtctcaacacacaaacacccagacacccacgttgtgttatgttatgtcttatgtctcctatattcatcatattaataattaaaccaatctaattaaataataataatttaacttcaccggaatcaacgctctccacttggcttcacaaatctgaaagaacacattaaccactcctctctttgttctcttctttccacacaacat

SEQ ID NO: 15393 - DNA, 284 bp, Glycine max
  Clone ID: 700963010H1
tacttggtgtcttgcaattcccaatggcctccattttcaagctctcaacgccatctccagctgcttccttatcagaagcgcttcgccccagagattctcgcttcctctccttcaatccttcttccaacgctattaattacaaaattaacctctccgcttccctccgatccattcactccctccctcttaaaacctccttgcggatcaaatgctcccaaacagatgggaatggaagtcctgcaaagaggacagtgcttcatgatctttatgagaaagaagggcag

SEQ ID NO: 15394 - DNA, 282 bp, Glycine max
  Clone ID: 700963011H1
tgattttaaaaacgcgacccatcactgtgtgtttaacacacagcagaaaagaacaaaccgcagttcttcctaatcgaaacggttccaaagtagtgaataaacaaattctcgtgcctagggttttcccttttcttcgattcacactcccagagcgaacgaaccgtcatgggaggaggcgaggagaagcgacaccagatgatgcagaacctcttcggagatcaatcggaggaggaggaagagctcgacgtcgattccgagcacgaatcgaacccgcaacaaaat

SEQ ID NO: 15395 - DNA, 253 bp, Glycine max
  unsure (1)..(253): unsure at all n locations
  Clone ID: 700963012H1
ctcctaatgctacctccttagaaattgcttaatctttttcattcattcaattacttagcaaattgttacgaaatgcaacacaacatcttcgcctcaccgcgtacnttgaagatcatggacggttgcaagggcactcaggtctacgccatcaacccctccagcgccaccggcggtggcaattggcgagaagcttctccaacagcttcacgaccacatcaaaagccacacccttagaaccaaatcggttcggaac

SEQ ID NO: 15396 - DNA, 283 bp, Glycine max
  Clone ID: 700963013H1
tggcgtggtggtttttctggtgcaaatgatgaacgtgaaagtactttaaatcagctgttggtggagatggatggttttggaaccacttctggagttgttgtgttggcaggaacaaataggcctgatatcttagacaaagctcttcttaggcctggtggatttgaccgccagataacaattgacaaacctgatattaaaggtcgtgaccagatatttcagatctacttgaagaaaatcaaacttgatcacgattcttcatattattctcaaaggcttgcagccc

SEQ ID NO: 15397 - DNA, 281 bp, Glycine max
  Clone ID: 700963014H1
tggaaataacaccagagaccatccaggaatgatccaggttttcttgggccaaagtggaggacttgacactgagggtaatgaacttccacgtttagtctatgtttctcgtgaaaagcgtccagggttccaacatcacaagaaagctggtgccatgaatgcccttgttcgagtatctgcagtccttaccaatggacctttcttattgaatcttgattgtgatcactacataaacaacagcaaggccttgagggaagctatgtgctttatgatggatcccaatc

SEQ ID NO: 15398 - DNA, 285 bp, Glycine max
  Clone ID: 700963015H1
atcaaatggaaaagctccatgcttctgtgctcgcccttgtattccttcttgtcatactatttcaggaaggattggtaacatgtatgaagaatgaagacggatcagaagaatggggatatgtgcaagttagaccaaaagcccacttgttctggtggctttacagaagtccatacagagtggagaatccctccaagctttggccaatcattctctggcttcaaggaggaccaggctcttcaggagttgggtttggaaattttggagaggttggtcctttggatgcta

SEQ ID NO: 15399 - DNA, 285 bp, Glycine max
  unsure (1)..(285): unsure at all n locations
  Clone ID: 700963016H1
atgtgacaatctgtgcaagaactgcaagagacctggtcattatgcaagagaatgccctaatgtcgcaatttcgccacaactgtggcctccctgggcatattgcttctgaatgtacgacaaagtcactgtgctggaactgtaaagaacctggccacatggccagcagttgtccanatgagggtatttgccacacctgtggtaaagctggacaccgtgctagggaatgctcagcccctccaatgcctccaggggacttaaggttgtgcaacactgttataagcaggg

SEQ ID NO: 15400 - DNA, 284 bp, Glycine max
  unsure (1)..(284): unsure at all n locations
  Clone ID: 700963017H1
gagatcatttgtccgcagcaaaacagacaagatcattcatctttccgaagatgggaaattagaagagattatgcatgcaaaatcatgttctgatctttataaagttattggtgaggatttttggttggctacctggtgcaacagtactgcatttgaagggaagcagcttgaaggaactaggataaaccttgtaaaaatgggagagcatggttttgactttgcaatcanaacaccttgtacccctgctagatgggaagattttgacgaagaaatgacagtggcat

SEQ ID NO: 15401 - DNA, 284 bp, Glycine max
  Clone ID: 700963018H1
tattaattcaatattcatagacttcactgtctgattgtctttgtttaataccatataggattcattaaggattctctaatgttggcacaaatggacatggaggagcttgtctcatgtaacaacaacgatgccaccaacatagccaaagggaagcgcacaaagcggcgcttgaggcctttgtctccttgtgctgttgtcgctgctaccactatcaccaccaccaccactgctatcaccgctatcaccaccgtcatgacatctagctgttcaagtgcttctgccgg

SEQ ID NO: 15402 - DNA, 280 bp, Glycine max
  Clone ID: 700963019H1
gcaaaaagaaagaatcccaggcgaggagaaagatggaggggaaggagcaggatgtgtcgttgggagcgaacaagttccccgagagacagccgattgggacggcggcgcagagccaagacgacggcaaggactaccaggagccggcgccggcgccgctggttgacccgacggagtttacgtcatggtcgttttacagagcagggatagcagagtttgtggccacttttctgtttctctacatcaccgtcttaaccgttatgggagtcgccggggctaagtc

SEQ ID NO: 15403 - DNA, 277 bp, Glycine max
  Clone ID: 700963021H1
ccgaccttgaacgcttcccatcttggtgagtaacacgaatctgaggaaaaaaaatgtcgattatgcaactttacgggcgcacaagagcgtggtgaagcggtcgaagaagtacttggaagaagcgctttacatgaagctcttcaaagatggaagctcccagctcatcgttcgccagagcctcaacaacttcgtcaagagccgaaagcgcgtttacaaatgggaggtaggcgacacgctcaagaagcttcgcgatcgcaagctctatcaacccgctctt

SEQ ID NO: 15404 - DNA, 279 bp, Glycine max
  Clone ID: 700963022H1
gtttgtcagctttttcttgcttccatagttcatggcgtgtgttcaagtcatcacagttcttctctttgcattggctcttgcaaaaattgacccctcaacatgccaaatggtgcagggcagagtcttctgcgttgactgcactcacaactatgacttatctgatattaaggtgtcagtgaggtgtgatggtgtgaaaaaactggctttggcaactacagaggatgatggctccttcaaggttgatcttcccttagaccacacagaaccttcttctgtgaa

SEQ ID NO: 15405 - DNA, 279 bp, Glycine max
  Clone ID: 700963023H1
aacaaacctcagaagcagaaaaaggtcttctctctttctctctccttttccctcaagctcagaatctcccgaacgaaagttgaattttggtgcatattttacaaattaagaatcttgttaaaaagaagaaggatgtcaagcggagcaacacactggtgtcatgcatgcagacagccagttgtgcttgatgggagagatgctgtttgcccttactgcgatggaggatttgtacaagaacttgatgagttggaaggaattgcaccccaccataccttttgc

SEQ ID NO: 15406 - DNA, 279 bp, Glycine max
  Clone ID: 700963025H1
gcacaacacaacaattcactaagctaaaatcacttcatcatggcttcctcgtgtgcttcctctgccattgcagctgttgccatctccacaccaagttcccagaagaatggatcactcttgggaagcacaaaagcttcttttcttagtgggaggaaactgaaggtgaacaactttacagcaccagttggagcacgatccagcactacagtttgcgcagttgctgagcctgataggcctctgtggttcccaggcagcacccctcctccatggctagatggc

SEQ ID NO: 15407 - DNA, 283 bp, Glycine max
  Clone ID: 700963026H1
tagggcctttgaggtctccttgaggagaagggaagaagaagaaggaggaggaccccaccaacctccagcttttaattccatttttcgttgattcttccttccttcttcatttctctttaatcccaaacaaacgctgccttctcgtttcttctattttgactttcaaatcgcgtgcacttctactttccttcccttcacttatcgtctctgcaattgtcaatgatcttcagtcttcgctttcccattcgtttttgaactattcctcttttaccttaaaacacac

SEQ ID NO: 15408 - DNA, 281 bp, Glycine max
  Clone ID: 700963027H1
caaaatcttcatattcatcaaactcatcaaaatgaatctgtaccactcctccacaaacaacaccacacaaaacatcttcaccgtcatattcctcctccttgcaatattattcagtctcacaccccacaaggccaacggtgccacgtgtcaccctgaggaagaagcgggcctgttgggcttcaaatccggtatccgatccgacccgtccggcctgctcagtaactggatatcgggtacggactgctgcacatggaccggagtagaatgccactataacagca

SEQ ID NO: 15409 - DNA, 279 bp, Glycine max
  Clone ID: 700963028H1
cacagtcatcgtctgttcaggatcatattcacgccccctctctctctctctctctctctctctctcttactttgtgtctttctatctctctcttcaattccaaaaccctacccccatccaattccaattcaccctcaatcatgggttctgaaggttccactgtcgtcggtcattattcaacctcttcacttccatcttcatttcctaatatcttttttccttctctctatcaattactcttgtggttcgctaattataattatgagtttttggttgttc

SEQ ID NO: 15410 - DNA, 286 bp, Glycine max
  Clone ID: 700963029H1
tcgagagaaaacaaaacaagaagaaggaaacgcgcaacgcaacacaaaaaaccacactttcaattgcatttctctctctttctcacaatttccactttccgggttttcgattcgatattcgttgttccaatgagcgatcacttggtggtgttcgttgaccgtctcgcgcgccctgtccccgttgatccggtggcgcagacggcgcaggtgccttccgaaccatctccacctccggccgccgtggatgccgacgccgccgggagctccggcacctcaccgtcggagg

SEQ ID NO: 15411 - DNA, 278 bp, Glycine max
  Clone ID: 700963005H1
ttcacagcgaagtcgtaggagggtttcaaaagatggagaacatgcagagcttctggcaattgggcgatgaactccgtggacactcaaaagcatcggaggatcacaaatggttaatggttgcttcgaaattggcggaacagacaagattgaagggggagcgtgtgaacaaccttgatctttcaaagggccccattgaaataaggtcaagggataaatttgggttccaggaagagaacaaatttgattctcttaacttaagcatgttgaacctggactct

SEQ ID NO: 15412 - DNA, 244 bp, Glycine max
  Clone ID: 700962976H1
agaagacatgtggagaatttgttacaaccaattaaaaatgcatggagccagaagggtgtgagcattgttagtgatggatggagtgacctgcaaagaagatctcattaatttcatggttgtcccggagagtggacctatgtttttaaaggccattgattgttcaaatgagatcaaagacaatgatttcattgccaaacatatgagggagtaattatggaggttgggcactcaaatgttgtgcgaa

SEQ ID NO: 15413 - DNA, 247 bp, Glycine max
  Clone ID: 700962977H1
cttcttcccaaccactactactcactcactgcagatctcaattgtatcgctgtccatggctaccatcgttagcatcaaggcccgccagatcttcgacagtcgtggcaatccaactgtcgatgtggatttgacttgctccgatggtacttttgccagagctgctgttccaagtggtgcatccactgggatttatgaggcccttgaattgaagatggaggatctgactaccttggaaagggtgtatcaa

SEQ ID NO: 15414 - DNA, 251 bp, Glycine max
  Clone ID: 700962978H1
aaagccagttccgcaaaaaactttccaacaatccatccttgaacgtgcctttagatctgcaaacttcagcttagagcaaaacaataaataaaaaatccaccttttctatcaacctctagctatatccatttttatccaaatgacagaaaaactttccaacaatccatccttgaacgtgcctttactatccgagtggaatcaccatgatgagggaaagccatagcctctcatccttctaccaaaaatactgt

SEQ ID NO: 15415 - DNA, 251 bp, Glycine max
  Clone ID: 700962979H1
aaagaaagaagttctaaggaagagggaatatgcagaatacaaggtgctagttgtctatttgcaataacaacatcagcgatccaaccttagtattcttcaacccagagagatttgtaataataaattacaacaacttaaacgatggcaggaggagcttatgtagattcgggaaatgcaaagcaatttgatgggaaggtcacggcattcgtcattgttacatgctttgtggcagccatgggaggcttactctt

SEQ ID NO: 15416 - DNA, 224 bp, Glycine max
  Clone ID: 700962980H1
cttcttgttgattctgtgaaagaactagcaaaggaagcactaatcaaagttcctgagcgatacgttcatccaaatattgaaccccccattttatttcataaagacactttgccacagctccctatcatcgacctaaacaagttattgtctgaagatgttaaggaactggaaaagctagactttgcttgcaaggaatggggcttttttcagcttgttaatcacgg

SEQ ID NO: 15417 - DNA, 256 bp, Glycine max
  Clone ID: 700962981H1
aatcggctcgagataattgcgtgttcgcaggccaggcaactgagagagaaagaatacagagatagagagtagcatcaataatgtattgtgactgaaaacaaaataagggaagaggagcacaaacaaaaccaaacaaacctcataagttagggattcctttttggttcgttgctgtggaatcgattcctttgccacatattaaacgtgcgtcgctgtgaagtaaagcatgatcgcagcattgtctgctagttatgac

SEQ ID NO: 15418 - DNA, 248 bp, Glycine max
  Clone ID: 700962982H1
cacaagccaagtgaaagtgagaaaaaataaaaatcaaagagcataatgtcagggatcattcacaagattggggagacccttcatgtgggagggcacaagaaggaggaggagcataagggtgagcaccatgctggagaatacaaaggggagcaccatggtgaacacagtagtgagtacaaaggagagcatcatggtgaacacaaagctggagagtaccatggtgagcacaagccagagcacaaagaggg

SEQ ID NO: 15419 - DNA, 243 bp, Glycine max
  Clone ID: 700962983H1
gtggtgccttatcgctgtggttttcatcgtcttccttctcttatatttcttttttttttttgtcttcgccgcacgccgaaacaatggccggaaaaggagagggtcctgctatcggaatcgatctcggaaccacctactcttgtgtcggtgtgtggcaacatgaccgagttgaaatcatcgccaacgaccaagggaacagaacgagccgtcttacgtcggcttcactgataccgagcgtctcat

SEQ ID NO: 15420 - DNA, 244 bp, Glycine max
  Clone ID: 700962984H1
acaattcggaaattcgtaaaaaactctagaagcgttttcggttgggtttccgggtcaagctttttattgaaccgaaccgaaccgacctgaatccacagtgtgcttcctcgtcatctcaagttttgctcatcattctcactgcagctattattgactctgtttccaaagacgcaatggcatccttagatattcattcactgcttttattctctgccattttccgtgttattttgattgtgtatgg

SEQ ID NO: 15421 - DNA, 244 bp, Glycine max
  Clone ID: 700962985H1
attttacatggtctaaaagaaccaagacttatcatagtggagatcaaataaattgtgtgcagacttcaaatcaaagcaaaagttatattatatagcatacagtttgctatacagtttatattacaagttcttgaaaagaatcagtgccaaaaacttgacaccaggagaggaatggggcttgtaaaaaaaattgggaagtatcagctggtaggacaattggagaaggtacattctctaaggttaa

SEQ ID NO: 15422 - DNA, 245 bp, Glycine max
  Clone ID: 700962986H1
cttgaggtcataaccaatggcaagtacaagagtgtcatgcaccgagtgattgcccaagccgatgataccagaatgtccatagcttctttctacaaccctggtgatgatgctgtcatttctcctgcaccggctttggtgaaggaattagatgagacaagccaagtgtacccgaaatttgtgtttgatgattacatgaagctctatgctggtctcaagtttcaggctaaagagccaaggtttgaagc

SEQ ID NO: 15423 - DNA, 237 bp, Glycine max
  Clone ID: 700962987H1
cgataatttcatttataaataagcatctgcagatattgatcaggatgcactcaaattagtctcatcgaaatgggagaacagaatgacattacgctgacatgggagactttggaagctactgttacaaatggaaagaaccgaaaactaattcttcatgggcttacaggttatgcccagccagggagacttttggctataattggtcctctggcagtggcaaatccacacttcttgatg

SEQ ID NO: 15424 - DNA, 244 bp, Glycine max
  Clone ID: 700962988H1
ctttttcttcttcttcttttccttttttttttccccaaagaaaatcgcttagattttcgtctttcaagatttcgacgtccttcttcttattgcgccaaagttattgattttctcctttcccgtatttgaatcgtttattggtcattttcgtgtcggttaatttcttgtcgaaaaaaaaaagaaagaggaaggattaggagacgctttaatgacctagattagtttaataatatcacgtttgaaa

SEQ ID NO: 15425 - DNA, 243 bp, Glycine max
  Clone ID: 700962989H1
ctctcgctcttcaatggccgtatcctctattcgaatcgccgtcgtcggtgatgtggtaaagtatcctcttcccactgtcgttacagttccaattttcctaacacaactttcacttaacatgttttccaattttggaacgattccaattacctgattttggggggttttctgaagcatgattgctggaaccttgaacaagattcgaaagcacttgagctcttgcagccagacttggtgctgttt

SEQ ID NO: 15426 - DNA, 242 bp, Glycine max
  Clone ID: 700962990H1
cgacgccgtccaacaacaacaacgacgctactactaatgtcgcatctttttcctccttcgatgagcactccaccttagcctccaagttccgcaaccaccagatcacctccaataacaacgcgcccaaaaacgccgcggcggcggctctcatgctccaacaccaactcctcagagactctggtcttctcaacatgcctctttccttgcccggaaacgacgtcgtggttgacgcttctaccttc

SEQ ID NO: 15427 - DNA, 242 bp, Glycine max
  Clone ID: 700962991H1
ctttgagctgcatgaggatgaggatgagcgtgatgtgcattgtgaggtccaagtgatttcgtggagggagcgcaaagttaacgcccaaatcacggttgatgctgacactgagtccgtttggaatgctctcactgattatgagcatcttgctgacttcatcccaaatcttgtgtggagtgggagaattccttgtccgtacccaggaagatatggttagagcaaaggggattccaaagggcaat

SEQ ID NO: 15428 - DNA, 245 bp, Glycine max
  Clone ID: 700962992H1
ctgaaattggtaaacaatttaggaatgagggcatagatttgacccataatcctgagtttactacctgtgagttctatatggcttataaggactacaacgacttaatggatataacagagcaaatgttgagtggtatggttaaggaacttaccaaagggagctataaaatcaagtatcatgctgatgggattgacaaggaacctattgaaattgactttactcctccttttagaaggattgacatg

SEQ ID NO: 15429 - DNA, 246 bp, Glycine max
  unsure (1)..(246): unsure at all n locations
  Clone ID: 700962993H1
attccatagttctcagatagggcacgtctctcgcggcctcttctctccctcgcgccgcccacactaaaaggttattgctctattattgtttgacgatggctgatgctcatgggactgataagaacattgaggtgtgganaatcaagaaattgatcaaagctcttgaggctgccagaggaaatgggacaagtatgatttcccttatcatgcctccacgtgatcanatatctcgtgtcaccaagatgc

SEQ ID NO: 15430 - DNA, 245 bp, Glycine max
  Clone ID: 700962994H1
aaacttctttctggttatgtcaatcagaagaagtttggtggtgataccccttatagtttgatgtttggaccagatatatgtggttcacagacaaagaagctccatcttatactatcataccaggggcagaattaccccattagaaaagatctgcaatgtgaaacggataagttgactcatttctatacatttattctaaggcctgatgctcttatagtatccttgttgataatcgggaaagagat

SEQ ID NO: 15431 - DNA, 250 bp, Glycine max
  Clone ID: 700962995H1
gagaataatcatatttattattaaatagaaaaaatggcccgatcatttatcaaaggccaatcttcggtagaagagaaggttcctttggaacacttatttctatttcagtataccgggtctctttctttcatttcaaaaaatttatagaatttcgattttgaaatgaaagttaagtgtggggataaatataaatgacaaaaagatattggaaataatcttggaagagatgatggaagcaggagttcatttt

SEQ ID NO: 15432 - DNA, 253 bp, Glycine max
  Clone ID: 700962996H1
gcatcatcaatggttgcatcgtcttcgccctcgagtcaacccttttgttccttttcaaaccccaactcatcatcatcatcgctctctttcaaaaccaaagctattaccaggacaagaccaagaacaaaaaccagaactagaacaacgaggttaacatggctgaatcctcaccctcgtggtgctttggttgaggcaacaccaccaccaacaagtcacctccttccccaaaagatggatctctcaaggtgcttgc

SEQ ID NO: 15433 - DNA, 246 bp, Glycine max
  Clone ID: 700963001H1
gtttaattcattttactttcttaatttcttctccaacaagtatttactgagaacccagtaagagacaacagacaaggcgggaagctaagcataaaaaaacgagcactgtttagcacaacctgcttgcgatacaaactaagccaaaaatttctccttccagagagtgaaaagttcaaattcaaattcaaaatggtagaattgattgaaatgcaattcgattatccagaatgaaagaaagacttggtg

SEQ ID NO: 15434 - DNA, 279 bp, Glycine max
  Clone ID: 700963002H1
tgcgtcgcactcgcaggcaacaatttactgcgaggtacggaatccgtgaattttccggcgaggtaagattccgttgaaattttgctttggtccgagggggagggtggaactttgtggaattaggatcgatttggctccagatctgggaattagggtttagttttggttgcgggtgatgttaattttgggggagaggctttggtagatggaatccggcttgagatcgggtggttctggggttgtggtgaagagcagaaactcatctggttgtttaattgt

SEQ ID NO: 15435 - DNA, 311 bp, Glycine max
  Clone ID: 700963003H1
tcgcacgcacgcgattcggctcgagctttctctcgttttttctcagaaccttctgaggttaaagcaaaaaaacaaagagagagagagagagaaaatgatgaagccatcgatgctcagatctctccactccgccgccacccgcggcgcctctcatctcttccgccgtgggtacgcctgcgagccggtgccggagcgcaaggtagccgttctcggcgccgccggcgggatcgggcagcctctctcccttctcatgaagctcaatcccctcgtttcgagcctctccctttacgatatcgccggaactcccggcg

SEQ ID NO: 15436 - DNA, 245 bp, Glycine max
  Clone ID: 700962975H1
ctgcatttggggatggtaatgggacaacagaaaatcgccctcgcccctccctcttcgtccttccgcctccgcagccgcagcctcaactccctccgcctccgccgcatcttcgacatgttcgacaagaacggcgacggcaccatcaccgtcacggagatcagccaggcgctgagcctcctcggcctggacgccgacgtggcggagctggagtccatgacgaaactctacataagacccggcaacga

SEQ ID NO: 15437 - DNA, 251 bp, Glycine max
  Clone ID: 700962950H1
caaggaagtaacttagatcgcgatttggttgcaatctcaagtccagatatggttgcatgcaagaaaatagagtctgaaagcaaagattttagcactaaggaaagttctaatggcctaattaagaatcctgtttcaatgagaaacaggaaatttgccagtgatgtgaaatttgattcaaagtgccaacaagctaccaaagtggttgatcaagaatgcactcttggatctagtgaggatcctagtaatttggc

SEQ ID NO: 15438 - DNA, 244 bp, Glycine max
  Clone ID: 700962951H1
ggaaaagaaaattctctcaattcgagacagaggtatcggtatgacgaaggaggatttgataaagaatttggggacaatagcgaaatctggaacttctgcatttgttgagaagatgcaaacaagtggagatctcaatctgattgggcagtttggagtcggcttctactctgtttatcttgtggccgactatgtcgaagttattagcaagataacgatgataagcagtatgtatgggaatcaaaag

SEQ ID NO: 15439 - DNA, 248 bp, Glycine max
  Clone ID: 700962952H1
gagcccttccccttcttcttcttctcctccaaatcctccttctttttctcttctctctaccacacaaaaacccttaccaagttctttctttctaattcccttgataatgtaaaatcacagaaaaagaaaaagctactaaaaacttggctctaaacctttctttttttgaggaaaacctgaaaagttccacacaatgtcttctagagcttctctagagctttcttcttcttcatcttctttcttatcaa

SEQ ID NO: 15440 - DNA, 246 bp, Glycine max
  Clone ID: 700962953H1
ccagctgggacttacaaaaacgttactggatctgataaatcactttgtcacagttgtcctgttaatgagcttcctcatcgtgctgtttatatttcagtccgaggtggtattactgaaaccccttgtccctaccaatgtgcttcagacagatatcttatgcctgactgctatacagcccttgaagagttaatttacacatttggtgggcttggctatttggtcttttccttattggtctcttgatct

SEQ ID NO: 15441 - DNA, 246 bp, Glycine max
  Clone ID: 700962954H1
gaaggtttcagcggttggcactagcagtgttaccctttcttccctcttccgatttgaatctggttcggtttcgctgttatcaaaatccaaatcatcatttggcgtagatgctctttggcttcttcttcacctgcgaaggcgcttcgcagaatcctggactccccaggggtccaccaaggtcctgcttgcttcgacgctctcagcgccaactcgttgagaacgccggcttccaattctgcttcagca

SEQ ID NO: 15442 - DNA, 246 bp, Glycine max
  Clone ID: 700962955H1
cagatcctcatcttctaccatttcaggtgctcactttcttcgcccatttttatttgtttgttgttttaacaaaacccataatcagatccgatcctcttgagattgggatcaacgccgagtccatgagcacgccagcgctttcagggggcacgggcctcttctctgggttcactcggttatgcaagggccttgcggtggtgcttgtttgcggtcacattgcggttcagtttttcccttcagctgtta

SEQ ID NO: 15443 - DNA, 247 bp, Glycine max
  Clone ID: 700962956H1
ctcgagccgaatcggctcgagttgcactgatgtggctggagaaaaagttgagatcggaactacaagtcaaagatttcaaagatggcgaccaagtccttgctaaactcactcatcaatatggaggtgggtttgccgagtttgctgtggctagtgagagcttaacagcagccagaccatctgaggtctcagccgctgaagctgcagcattgccaatcgccgggcttacagctcgtgatgccctcactca

SEQ ID NO: 15444 - DNA, 244 bp, Glycine max
  Clone ID: 700962957H1
gtggccgtgtcgcagcaaaaccaaaccacatattaacttgtttgctctaagtcatggctctgatcttgcacgcaaccaaagcaaacaagaatgctttcaagactctgattgcggcagagtacagtggcgtccaagtggaattggcccctaatttcgagatgggtgtctctaatagaactcctgaattccttaaaatgaatcccataggaaggttcctgtcttggaaacgcccgatggtccagtc

SEQ ID NO: 15445 - DNA, 246 bp, Glycine max
  Clone ID: 700962958H1
caacaagccaaacaaacttggttttaattggtataggcttgccaaggtcttgttgattgagcgttaagtgctttaactaatcaatcccaagaccttggtttaccttgccacacaaaaaaatatataaaaaggcaaaataataataaaaaaaagagaaggcttggagccaagaaaataaacacaaagcacaagtcatggaaagaataatgttggaagtgcaacaaaggttgctttcaacctcttggt

SEQ ID NO: 15446 - DNA, 245 bp, Glycine max
  Clone ID: 700962959H1
gtaagagcagaacctaggcagtaccagtgttcctcttcgaacatggtgtattggaagcgagaagtgaaggcatatgggactggatagaatctcatactaagctgccataatccttctattgtttattatgtgtccgttttatgttgtcatggcgtttatgatttagtaagcttcttttcaagattgttgtgataaaacttaacaaaatctaagacttgcatgtgggagtagctatattttatgta

SEQ ID NO: 15447 - DNA, 248 bp, Glycine max
  Clone ID: 700962960H1
gcttgaacactcagcgtgtgagtgtgtgtgtgtacaagtgtgcctcgtacaaactaaggataccttatcatcgcttcgcaccaaaaactactacttggatactacgaccatcgccatctgtgatactgtgatatttcgtctgcttcgagcggcggatacgtacactagagtacaaaagaaaaagactttaccgtggaggcacagtacctataaattgttgccaccacgatgacgccaaacccaaagca

SEQ ID NO: 15448 - DNA, 249 bp, Glycine max
  Clone ID: 700962961H1
ctcatcgtcatcgtactactactacccacgttctgctcctttgcggatcgtgtccacaaaagatggcagacaatgaggatggaagggataagactactcgtgggaatgaatgggaggttgtatctctgacagcatcgacatatgcagctgctcctggtcctgatgaagttgagatgaaggatgatgggaacgaagatgtatatggacaagtgaaggagaaacgtcacatgctttatttatgtctcgtca

SEQ ID NO: 15449 - DNA, 250 bp, Glycine max
  Clone ID: 700962962H1
gccgcttgcaaaaccgattcttgacgctactcacgacttttgacagaagatggcttcaagattctggactcagggtggaagtgattccgaggaggaggagagtgattatggtgaggaagatgaacactcggcgggtgaacaagctccgaatcaagacgtgacaagcaagtactttgtggacaatgcaagtgacagtgatgattccgatggccaaagcgcgttgtgaggtcggcgaaagataagcgattcg

SEQ ID NO: 15450 - DNA, 254 bp, Glycine max
  Clone ID: 700962963H1
agcgagtcaggttcagcaaagacggttctgccctccaactaaccgcggttgacggccgtcgcgcctccgttattgtccccaatgacccggacctcatcgacatcctcgccatgaacggcgtcgacatttccgtcgcggaaggcgaatcccccaacagcttgttcaacatcgttggcaacttgctcttccccttgctcgcgttcgcgggtttgttctcctcttccggagagctcaaggcgggcccggtgggcctg

SEQ ID NO: 15451 - DNA, 256 bp, Glycine max
  Clone ID: 700962964H1
atcgatctgggtgggctacaagtgtctcaaatatcaacattcaacaaagtatggggcacctatggcggcggaccggacaatcaaggcttcaccatgtttgaagcatcaggaattcctcaaggtttctttatgttaggtagctactgccaacccaacaacaagcctctttttggatgggttcttttggcaaaagatgtgtctaaaagcacaagcaacccactttaaagcaaccaatcgattacacgcttgtatggaa

SEQ ID NO: 15452 - DNA, 251 bp, Glycine max
  Clone ID: 700962965H1
agtgatttgatttgcatcaatatggatcactaaccttgctggtggctggtgcatacaatagtatttgtaccaaacctcttttttcttttgggcacgtgtattgttttttatttatgaacccaactccatccatcattgttgcaacgaactcaacaagctagatcagtagtatatatcatcaaattcaatagtctcttctccatttaatagatggttgaaaaatcttccagaaccaaccttggccaccatca

SEQ ID NO: 15453 - DNA, 248 bp, Glycine max
  Clone ID: 700962966H1
acatttatactgatcaaagaaactcaaaaaatggtgtcctacttggtgcccctaaggcttgcaaattgggtcatgaaccaagtgcttgttaaatcatgttatggattttctaggaaacttaaaagccttgggtttcgttggggtgatctttcatccaaacccttgcatcaaccctcccctttccctaatattaccaagtgcgatttggaggtagagggtcacaaaccctagcttgtgtatttcacaaa

SEQ ID NO: 15454 - DNA, 246 bp, Glycine max
  Clone ID: 700962967H1
caggaaaatatccttttggagactacatttcttattccaactttacttttacggtgaaagaaatcaagcatttgtggagacacaaagggtgtgaaagcaaatatgggaggaaactggttatgaggattgatgattttatgaaaccagtagaaacaaatgttatctgtagcaattggaagaaatggaagcaacctatcatatggtttcaggaacagtagattctgtggcggcacagtttttcttaaa

SEQ ID NO: 15455 - DNA, 245 bp, Glycine max
  Clone ID: 700962968H1
gctctttgtccctcacttctcttcctttatattactgtagttcttgtttgttggagctaccttgaccaaatagctctggtctttatagtagttaatattttctcttttgttcaaagaatttgttgctaaatgccgattatatgttctgggtatttatttattcatctctcgaaatatccctaattgttctggtgttcaaccatggagcaatatagaacaatagacaggatagttttcaagtatgt

SEQ ID NO: 15456 - DNA, 246 bp, Glycine max
  Clone ID: 700962969H1
ctctgcttcaacttgctccctcagaagcgaagaagaagccacagagaactagtctcctactctcacccgcaagaaaaaaatggcatctcacatcgttggatacccccgtatgggtcccaagagagagctcaagttcgctctcgagtctttctgggatggcaagagcagcgccgaggatttgcagaaggtgtcttctgatctcagggcaccatctggaagcagatggctgatgctgggatcaagtac

SEQ ID NO: 15457 - DNA, 235 bp, Glycine max
  Clone ID: 700962970H1
cagtgaactcattgttggatttaagggttatccccattttcaatgaaaatgatgctgttagtactaggaaggcaccatatgaggattcttccggtattttctgggacaatgatagtttggctggtctattagcccttgaacttaaagctgacctccttgttttattgagtgatgttgaggggctctatagtggtcctccaagtgaccaaactcaaggttgatccatacatatata

SEQ ID NO: 15458 - DNA, 107 bp, Glycine max
  Clone ID: 700962971H1
ctgtttattatttatggtcactcgttacaaaaaatgcactatcttgctttcaatccaagttcactttggtggcagttgaacgagtttgcaaccccacacaacatacg

SEQ ID NO: 15459 - DNA, 234 bp, Glycine max
  Clone ID: 700962972H1
gaggccaggcaagccccactcaaccaccacacctctcctcgttcacgctacccctttctgctcttcttctacctttcaagttttaaaagtataaagatggcagagacattcctatttacctcagagtcggtgaacgagggacaccctgacaagctctgcgaccaaatctccgatgctgtcttcgacgcttgcctcgagcaggacccagacagcaaagttgcctgcgaaacatgc

SEQ ID NO: 15460 - DNA, 246 bp, Glycine max
  Clone ID: 700962973H1
gcgatgcaagcacagaccattgatgttgtaaaacgtatgaaagagatcacacttgtgatgcaaactccagaacaagtattgaaagaccaaggagttacccctgcagacattgaagatatgttggaagagttgcaagagcatgttgagtcgattgacatggccaatgatctccactcaattggtggtttggttcctcttcttggttaccaaagaattctcatgccaatattcgagcaatggctgctg

SEQ ID NO: 15461 - DNA, 251 bp, Glycine max
  Clone ID: 700962949H1
atcaaaacaaaccactatgactaatactaacgataataatagttacaacaatacactctagcttctagcctgctacctttccttatcaccagcaccaatggcttcagacgccaaactctcctcttctgagtccctcaacggtttcaaattcggccaaaaaatctattttgaggatgttggtcttgctactccagccacctctcttacttcttctcttcttcttcttctgctgctactgttacttcttcttc

SEQ ID NO: 15462 - DNA, 245 bp, Glycine max
  Clone ID: 700962974H1
tgaagctccatattatcaaatcagccctgctggtcactgccctcatgatgaagttcctgagatcataaatttcttacttcgcgggtggatcagaaacctagagtctcagggttctgtgtcattaccattgcttgaagatctagacagtatgaagcactctattattgacagggaattagaatttcccagagaaggttcaaaaaagtcagtgatggtcagatatttcgcttccaatttctcacttt

SEQ ID NO: 15463 - DNA, 252 bp, Glycine max
  Clone ID: 700962919H1
gcaacgttagtggcggtgtgcataaaattgaccattgttcttcatgacattgtttacgctgctgttcctgcttcctcactgagtgaagaaaaaggacgttacaaaagcgcacacgatttttcaagagccaaacagagtgccctaaattcaagcgcaacgagtcaaacaaacaaagagagaagaagaagaagcaaaataaagccattgaacatgtcttcagcaaccaagggtgataggaagactgcacttgat

SEQ ID NO: 15464 - DNA, 250 bp, Glycine max
  unsure (1)..(250): unsure at all n locations
  Clone ID: 700962920H1
ccacatccatctttgccttctgcatgttggttctctgtaaacagatactgcaaaagaagaataatattgaatatttggttgggttgaatccctgggttgacgcgttgcagacatcacggctattctaagagtgtctcgctctctcattcatgtcccaactgtacgacggaggacaggttgcgtaactgccaccaacccttcgccgcacgngtggcgtggtgctttgccttctgaaggtggtagcccttca

SEQ ID NO: 15465 - DNA, 251 bp, Glycine max
  Clone ID: 700962922H1
gcagcactcaaaaccctagagaggacgagagagcgtgcaactttcggcaaccacagaccatgacattcaagcgcaggaatggaggtcgcaacaaacacggccgcggccatgtcaaattcatccgatgctccaactgcggaaaatgctgccccaaggacaaggccatcaagaggtttttggttaggaacattgttgaacaggctgcagtcagaatgtgcaggaagcttgtgtctatgaacaatatacacttc

SEQ ID NO: 15466 - DNA, 250 bp, Glycine max
  Clone ID: 700962923H1
agctgaatgaaccacaggttaaaataacacacaaagaatcacccgagttaatgtgtagtaggaacactcccaggcactgtaatttcatttcctacccttggatatgtagtagtgtagattcttagtcctttattgttacagatataatttgaagtcattgtacagctggagcattacccagagaaagcatgcacagatgaagtggtataatctaattgcagagttgtataactacaaggctgtttcaaat

SEQ ID NO: 15467 - DNA, 245 bp, Glycine max
  Clone ID: 700962924H1
gcaacggtggtcttgtatttgtttcttttggagacagagagtgagagagaagaactgtgtgttgtgtgtgtaagagagccatggggaaatctacctcctgcttcaaactagtcacttgcggtggcgatgcggcggagaatgatgattaccaccaagtctctgagatcaaggcatctaacgataaacgtggttggagtttccgagagaaatctcaaggcatcgtgtgcttagcaatactgtgatag

SEQ ID NO: 15468 - DNA, 250 bp, Glycine max
  Clone ID: 700962925H1
gttattcggtgtgtgcgtgtccaactttgaacgcactttgatactgccactttctccaccacaaagagaaaaaagagagaagaaaagcgaatcccctgtgatctctcacacaattccaattcctctggatctcgtctcgatcgatagatctcgaacatgagcactggggagcttctcaacatcgaacctctcgaactcaagttcccctttgagctgaagaagcagatctcatgttctcttcaattgtcca

SEQ ID NO: 15469 - DNA, 248 bp, Glycine max
  Clone ID: 700962926H1
attcaaatccaaatggccctttacattacactaataattggcctcctagtaaacaccctagtactctataaatagcatttgcatgcaccttagtcttcaccaaaatactcctcttggcatcttgtgttgtgtccctcttttaagctatttccttctcttaacacaattggttgtgccaattgccatagtcaccaaccaattaacaaaggttatatatcatcatatcatcaccaaatgaaaaatattgg

SEQ ID NO: 15470 - DNA, 246 bp, Glycine max
  Clone ID: 700962927H1
gactctctctctggtttttttttaggattccaactcatcacacctccgcgcacgttagccaacagctcccagtcccctcacacagtgactctcccaaatccctaatgcgaatctcaccctaatccctctctcctcgtccatcatcatccatcttgcaagcagcaagctgcaagctccatcaacacttgcctcactttcgcttccagaatttccaaattctcattcaccaaccacaatgatggagga

SEQ ID NO: 15471 - DNA, 250 bp, Glycine max
  Clone ID: 700962928H1
cttgaggctagggttaccggattcttgcgttttaatatctgcaattcagaagcatggggcactccaatgtgtggaattctcaccctaagaactacggacctggttctcgcacttggtatgttactcatcttcgccaaatggtgattcaggatgagttgatccttttccctctttgttccttctcaatttgattatgcgattattattaaggttttgcttttaatttgaagcatttaattttatcccccat

SEQ ID NO: 15472 - DNA, 253 bp, Glycine max
  Clone ID: 700962929H1
ccctcaacgaaacgcaagaactggtatatagtcatggtcggaaattggaattaacttcccagaaattaaacgaaagtatgtaccctaaaaaataacagtataaaatttgcaaagttacatttttaatttaactttagccgcggaaaaggtttttgcgttgcgttgcactagcccctgcacagtagtgtggtacgatgatttgattttgataagaaggtctgtgctgtggggatcattggaagcatcgatcgga

SEQ ID NO: 15473 - DNA, 254 bp, Glycine max
  Clone ID: 700962930H1
aaaaatcttctctcttccctaggaaggttgaatgatttggaaaaatgagttctggcaatgtgaagccagaagaagaagccctagaaaaggagaatgtaggtattcctgtccctgaaatttcagaaccaaaagagcacaaggctggaagtaactgcaagggaattgagcagattcctttgtctggggaaaatgaagaggatgtgctagttaatatactgggagtgggtccataatttctggtggcaaggcagtgg

SEQ ID NO: 15474 - DNA, 256 bp, Glycine max
  Clone ID: 700962931H1
atcctttgtttcgatgccaaaacagacccttgacaaccccattttttcttcttattttttttatctatttgtttttcagttaatctcattctttgaatttttatggcaataatattgcctttcagttttctctcttgcccccgaagtcactgaaaattcttgggaaaatctcaaaatcaggtttttctctcttttttttcttcccttttctgtttcggggcttaaatttcacttgagaattcattgaacccagata

SEQ ID NO: 15475 - DNA, 260 bp, Glycine max
  Clone ID: 700962932H1
tttcctttttatctctatctttcttcacatcttaaccttgttcttaccagatggctgcctcagttaaactcttatttttgtcctttctctcgttgttcatctctttctccatagctcaaacctctttcagaccaaaggcacttgttcttcctgtaaccaaagatgtttctgcctcagttcctcagtatgtcacacaaatcaaacaaagaaccccacttgtggcagtgaaactaactgttgatcttggtggtggctacttg

SEQ ID NO: 15476 - DNA, 255 bp, Glycine max
  Clone ID: 700962933H1
atcatatagaaaccctaatttgttacacctagcttcttccttcattttctcatcatcaatattcaacaacatggctaatttgcaaggagggcctgactttgacaaaatctttcacttcctctccatttgcatccttgctttcatcaatgaaggctcttcctccctctcaagtgcattcatgaatgaaccatggtcatggggcctaagcattcccataagtttgtacgtgaaattcgcacttgagattcacactca

SEQ ID NO: 15477 - DNA, 251 bp, Glycine max
  Clone ID: 700962935H1
ctagccgcagcagcctcaggaggagaataaggatgtctcacaggaagttcgagcacccaaggcacgggtcactgggatttctccccaggaagcgtgctgctcgtcacaggggaaaagtgaaggcattccccaaggatgacccatccaaggcacccaagctcactgcattcttgggttacaaggctggtatgactcacattgttagagaggtcagaagccaggatcaaagcttcacaagaaggaaacatgtg

SEQ ID NO: 15478 - DNA, 249 bp, Glycine max
  Clone ID: 700962937H1
ctttcttccttcactcttgtttcctcctcttctgtctcctctcggctccttcctgtgtttccatgttctctggtattgagacaggagatttagaaaaaagagatgatttgtttccacagattctaagagccaaggcagtggcaaggctttatgagcttgggaaggtgagtgatgctagcggttatttggagaggacattcttgagtcctgcatccatgagggcaatcaatcttattcgtaaatggatgg

SEQ ID NO: 15479 - DNA, 249 bp, Glycine max
  Clone ID: 700962938H1
cttgaacttgaactatcgggtcttcttcttggctctctctgtttaggatcgatatggatttgtattttcctttggcaatacttgtgctgatattaggcacaccatactctagtgcttttgggaagagtgaaagtaatgtgaaaacagctgtttttctgtctcccaagtttgaacttggaccgggttcggtagccaataaatttgattatgatattgattttccaagaggtcatattgccctcaagagtt

SEQ ID NO: 15480 - DNA, 251 bp, Glycine max
  Clone ID: 700962939H1
aaaaaccttcccttctcttctcacccccacactcccatctcacacacccctcgcatccaacaatgtctctcaccattccctccaacctctccaagcccgccgccctccgccccaacctaagcccaaagctaaggtccgccgccacaaccaccatcgtctgcagcaccaccaacaacaacaacaacaacaacgtgtcctccgacctgaaggcgtctccgccgcgctggccctctcctccatcctcctctccg

SEQ ID NO: 15481 - DNA, 247 bp, Glycine max
  Clone ID: 700962940H1
aaaggactcagcagcacaaacttcaaataagtgcaatgaagaaatttcttgtagtccaggtgagcctcaggaagttgattcagatgtaagagcctgcaacaattctatgtccagttccggagatgtaatacatggctcatcttctagggaggaatctgcaacagtgagctcactgactgaaactagtggttcaccatatagtgattctcagatacaattaaggaggctggaaaggaggacagtgcaa

SEQ ID NO: 15482 - DNA, 247 bp, Glycine max
  Clone ID: 700962942H1
gatcagccaccctaaactcggaaactgccacagatctttgaaaaagatagaggaaagaaatgtgattgaaaataagctgaaagaggaagcaagagagccaggaaggaagcaaattattgctgaatttaaatctttggtttcttcatttcctgatgaaatggggtctatgcaaagccagcttagaaaatataaagaatctgcttcagataccattctctgcgtgcagatgtgaagtctgtttctagta

SEQ ID NO: 15483 - DNA, 246 bp, Glycine max
  Clone ID: 700962943H1
cgtcggagctgtgtctggggaaatttgcgttgtttttcgcggtacagctcacacacactgaacggtaagtatggcggacaaggctgttacaatccgaacccgaaagttcatgaccaacaggcttctttccaggaagcagtttgtcgttgatgttcttcatccagggagggcaaatgtttccaaggctgaacttaaggagaagctagctagatgtatgatgtgaaagaccctaatactgtatttgtc

SEQ ID NO: 15484 - DNA, 248 bp, Glycine max
  Clone ID: 700962945H1
cccaaatcaccgtcacaccatgggctcctccgcgatggtgttggacccgaaaccctcatcggagcctccgccgttcctcccgtcgacgaaatcggactaccttcaaggcagcttcggcggcgacgccaccgcctccgacgaggacgacctctacagccgcctgaaatccctccagcgccactggcagttcatcgacatccaggaggagtactgaaggatgagcagaagaatctcaagcgcgagtagct

SEQ ID NO: 15485 - DNA, 253 bp, Glycine max
  Clone ID: 700962946H1
ttcaaaagtcacatgtaaacaggaacaaagaggtgttccaagaaactacaaaactagtactcaatcccatctttttgcaatcccagtttcaccgatctctaggagaggatggattatcagtacattctaggagggattatggcttgtagttttgcttttttgtatgttgtgtacagttttggagcaaaggtcacagattcaagttcaatacatgtaaagagtaatgaatgtgcaaagatatcatcagagaatg

SEQ ID NO: 15486 - DNA, 251 bp, Glycine max
  Clone ID: 700962947H1
ccacattcacctgagctttttgtgaggattccaaagcatggcttcccttgcagcatccactgctgctgcttcccttggcatgtcagacatgcttggaaaccccatcaacctcagtggtgccacaaggccagctccatctgcctctagccctgcctccttcaagactgtggctcttttctccaaaaagaaggctgcacctccaaaaaaagctgcactgctgctcctgccaatgatgagcttgccaagtggta

SEQ ID NO: 15487 - DNA, 253 bp, Glycine max
  Clone ID: 700962918H1
cccatttcttctgtgtctgaaaaatttctctttcttgtcttcgtgttgtctccttcttcttcgcttcatcgcttgccaattcaagttgcttgacatggctacgcatacgcccaaaaatatcctcattactggagctgctggattcatcgcatctcatgttgcgaaccgtcttatccggaattatccccagtacaaaattgttgttcttgacaacttgattattgctcgaatctgaagaatctcattccttcaa

SEQ ID NO: 15488 - DNA, 253 bp, Glycine max
  Clone ID: 700962880H1
gagaagagacaatggatcacttgagattcaacaaaaccacccttgtcctcatcggaaccctctcttgcctcctcctgtccatcactgccgtcccctcaactcgcgtcttggaactcgctcccagcgaagcccccaccgcggagcctatagcctccggcatcagcctcttcgacaatcttcttgccaaggaatcaagccccatgattctgaaattctgcaccggcaccgagaaccccaccctctgcgccgaaac

SEQ ID NO: 15489 - DNA, 255 bp, Glycine max
  Clone ID: 700962881H1
gttattgatcatttttgtatatacatgttcgatttttctctcggttgttcctttggctctcgtcaaaagcaacaactgcattcaaagggagggctaaaaaacaatgttgccatcattaacacacatggtttcgctctccattttgaatctcctccacactctcaaatcattttacatagatagatagctcctttattatacacaaacaatcacacaccgtatcccttgttttgagtttccgaggtcagaacatgg

SEQ ID NO: 15490 - DNA, 78 bp, Glycine max
  Clone ID: 700962882H1
caagcctctctcgtaaccccatgccgcaccggtctcgaagccagcgactgcgcctccgtgccatggtagcaaaactcc

SEQ ID NO: 15491 - DNA, 252 bp, Glycine max
  Clone ID: 700962883H1
gggtgagatgctttcgtctaagcttgctcaaactggcctcgtctatgctgtattgggcagttgtggaatacaaagatctttgaacatctcctttactacatttttgcaacacctacctctttctctctctctctttcactcgtcctaggtttgattttttcttccctcaattcccaacctcgcatctcccattattttattctcaaaccacgacaacagaaacacaacacaccccaacacacgcacacaaac

SEQ ID NO: 15492 - DNA, 76 bp, Glycine max
  Clone ID: 700962886H1
ctcatcctcgtggtgggtatgctaattggcgcgcttactgtagttccacgtccatagggcttgaaccacaacaccc

SEQ ID NO: 15493 - DNA, 246 bp, Glycine max
  Clone ID: 700962890H1
gttgtaactcgttcttcttcttttgttgttctgtgtttgtgtttgttttttctctcacctgaaaatgtcttgctgcggtggtaactgtggttgcggaagctcctgcaagtgcggcaacggctgcggaggctgcaagatgtacccagacttgagctacactgagtcaaccaccaccgagaccttggtcatgggagtggcacctgttaaggctcaatttgagggtgctgaaatgggtgtgcccgctga

SEQ ID NO: 15494 - DNA, 121 bp, Glycine max
  Clone ID: 700962891H1
gctcagcactacactgaggcagctatggatgagataacaattttgcagcagattgcggagggagatcctgatgataagaagtgtgtggtgacgcttttggaacatttcaagcatgctggtc

SEQ ID NO: 15495 - DNA, 247 bp, Glycine max
  Clone ID: 700962892H1
cgaggcccttgaagttcccggtgctcatagaagtgactatgaggacatcagtgtgggtaagaaaattgtattggcttttcagacacttggtgttgtctttggtgatgttggaacaagtccattatataccttcagtgttatgtttagaaaggcccctattaatggaaatgaagacattcttggagctttatcacttgtcttgtacactttaatcttgtttcctttattgaagtatgtcctggtggtt

SEQ ID NO: 15496 - DNA, 248 bp, Glycine max
  Clone ID: 700962893H1
atcgttttggaagaacaagggcatgtgagaaaaaacatactaatcaaattaaacagcgaagaagagtttcaaatttattgcttcgaatctccagcttcgtcagggaaggaaaacagcataacgtgtggtctcgggggaaccaaaaactgtgaaattctgaagccactaggccttttaaaaaccaaactaaggaagacggtttagacagagagtacttcaagctaagaaaatggaaagtggggttgtgg

SEQ ID NO: 15497 - DNA, 154 bp, Glycine max
  Clone ID: 700962894H1
ggagaagaagaagaaggagcatggccatgagcatggccatgacagcagcagcagcagtgacagtgattaaactgctgcatcacctatatatttaaaaggtttatgggaccatagtagcgaaggctgtgccttaatttctctctctctctctctc

SEQ ID NO: 15498 - DNA, 248 bp, Glycine max
  Clone ID: 700962896H1
cagattttcatgctcctcctttcattaaattaaagaacagtttctaggtatggaaactctttcatatgggtcagcaccatgctgccaagtcgtgaactcaaagtggaaattagttgaaaagagtttgagttcacgtcaatcaagagtttcctctataggaaaacttggagtttattacacaggtactatttctgcatgtgcgcctgtgagattttatgagatgggtactagggtgcagctaagaagct

SEQ ID NO: 15499 - DNA, 266 bp, Glycine max
  Clone ID: 700962902H1
ttctgctcgatcggctagctatcggggttattttcaaggatgaaaatgggaagcagcatgaggcgtatctaggaaatgacaggcagagtgaggtgattgtgtctagtggggcacttgggactcctcaattgctattgctgagtggaattggcccaaaagcagagcttcagaaattgaacatccctgtggtgcttgacaaccaatttgttgggaaaggcatggctgataccccatgaacacaatttttgttccttccaaaagatcag

SEQ ID NO: 15500 - DNA, 253 bp, Glycine max
  Clone ID: 700962903H1
attaaacccaatgggccgaatttggacaatggtagctgggggaggtgctagtgtcatctatgctgatacggtaggggatctcggttatgctcctgagcttggaaactatgcagaatatagtggtgcacccaaggaagatgaggtcttgcagtatgccagagttgtgattgatgtaatcgattcttatctcaaacatcattgttggcatatttatggataaactatttttgctttatgcgatcagccatttctc

SEQ ID NO: 15501 - DNA, 251 bp, Glycine max
  Clone ID: 700962904H1
agctcgagccgattcggttcacggctcgagggaaaaagttggcactcttcacagcacttactttctctcagaagctgtcaggtctcccaccagaaactgtgttccaaccacttcttaaagataaccttgtggccaaagggctagttctgtcatttatgactgacttctttaaggagtatctgattgacaacagccttgatgatcttatttcattctaaaacggggaaaagtagaggaggatcttttggaca

SEQ ID NO: 15502 - DNA, 250 bp, Glycine max
  Clone ID: 700962905H1
gttcattcaattcgcgaagagctgctaacaacttgaaacgccttgctgaagaatttggacctgagtgggctatgcagcacataattcctcaggttttggagatgaacaacaatccacactatttgtatcggatgaccattcttcgtgctatctctctgcttgctcctgtgatgggccctgaaatcacttgttcaaacttgttaccggttgttctgctgcatctaaagacagagtgcccaacataaagttc

SEQ ID NO: 15503 - DNA, 251 bp, Glycine max
  Clone ID: 700962906H1
gcatgcagttactggtgcttatgctaaacccatcttcgttgataaactcggtgctagtctggattcaatttcaaatggaatccctttggaagattttggacatggccatcctgatcctaatctaacatatgcgaaggatcttgtcaacattctgtatgctgaaaatggacctgattttggagctgccagtgatggggatggtgatagaaatagattttaggaagaagtttctttgtaactccttcagactc

SEQ ID NO: 15504 - DNA, 253 bp, Glycine max
  Clone ID: 700962907H1
ctagtagctaccagaatttagccgtacttgttttaccttgcttgttgtatggttttttagtatgtaaataaacctttatcatattcctctaggctaaatatgtatttaaaataatacttttattttaaatacatatttagcctagaggaatatgataaaggtttatttacatactaaaaaaccatacaacaagcaaggtaaaacaagtacggttaataatgtatttaaaataaaagtattattttgaagccta

SEQ ID NO: 15505 - DNA, 252 bp, Glycine max
  Clone ID: 700962908H1
ataaagaggattctttgaccgtgtcagtgactgagccttatgtgttgcaaagctcaaggcgtagtatactgccttggaggaagaggaagttgagtttcagatctcctaaatctaagggggagccattgttgaagaaggcttatggcgaagaaggcggtgatgacattgattatgatcgcagacagcttagctctgatgaatccctttcactcgggaagactgaggatgattcaggtgcaaatcgatcatcgg

SEQ ID NO: 15506 - DNA, 253 bp, Glycine max
  Clone ID: 700962909H1
ctgattcagaaactcttaggcattccacattctcaaccccgaaccctaagagcagagcgaaaatgacaaccaccttcgcgaccgtcgcaggactcggtggcgcattactgtcatccacctcatctcgtctcacctcagggtttgtgaaatccccagtgattgctaggaatcccttgaggcaagctgtggcaatgggaaatgggaggattacatgtttgaccggaattggctgcgggcagattacagtgtgatt

SEQ ID NO: 15507 - DNA, 250 bp, Glycine max
  unsure (1)..(250): unsure at all n locations
  Clone ID: 700962910H1
cttcttcttcatctacattagtagttcttgttattcattattcttcatactcacacagcttcttctgggggcaaaaggggtcatttttcagatccgaggttgagctcctctacccatcatgatggagctcggatacctgaatcagggtcagccttctagaggaacaacaccacttgtcactcttccattgttgctttcaacacttgtgttctctccactttcacacatgccttcaggagntctgtgtttc

SEQ ID NO: 15508 - DNA, 103 bp, Glycine max
  Clone ID: 700962911H1
cttgagcaagtgtacttcctagttgttatgatcattatctcttgcaggctaattttatatttggcatggactgcaatatccaaattgccaaaaattttatggg

SEQ ID NO: 15509 - DNA, 251 bp, Glycine max
  Clone ID: 700962912H1
ggaaatcgttcctatcatcacttctcaaatctcgaaccctctcgttcgtgccgatcactaggtcacacttcatcaatggcgggtagaggcaaaaccctaggatccagcgccgctaagaaggccacctcaaggagcagcaaagccggcctccaattccccgtcggtcgtatcgccaggttcctcaaggccggaaagtacgccgagcgcgtcggcgcggagcccccgtctacctcgccgccgttctcgaatat

SEQ ID NO: 15510 - DNA, 253 bp, Glycine max
  Clone ID: 700962913H1
ctttcacatgacacttctctttctgcgtcaaacacacctacctaccagtttgagctccggccatggcgtctttaccttcgggtcgcagcaacggtggttccaacggctttgatttgggttccggtgacatcctttattcgtacgacgaggaggactataccaaccacgattcttctaacggcactcacatcgatcccaccaaggattctcatgcatcaaggatgggaagaacatcaatagttcctgctactgc

SEQ ID NO: 15511 - DNA, 252 bp, Glycine max
  Clone ID: 700962914H1
attgagaatcgttcgagactgcaaaatccaaaaccaaaaccaaacacaacacagcattcgtcattcaccgccttgtctcgtcttcttctgtctccgaacacggaatctctctgaatcgcgggattaagagaggaatatgcaacagaggcttaagttgcagcaacaacaacaagccctcatgcagcaagctttgcttcaacagcagcagatgtaccacctggcatgctcgccgctgctatgtctcagatggag

SEQ ID NO: 15512 - DNA, 251 bp, Glycine max
  Clone ID: 700962879H1
atttcaatttccctaggggcttaatatctccccgcatttgtgcctagcctcattattatcatagtagatattcattccccttatctttctctcttctctctccccgcccaaaccctaactccctaccctattccgctttctctcatccatcatgaaaggaggaaagtccaagaccgaatctaagagagccgatgccaaacttgctgtgaataagaagggcgccgccaccaagactaggaaacccgccggaa

SEQ ID NO: 15513 - DNA, 180 bp, Glycine max
  Clone ID: 700962915H1
caaatatactgataaagatagaataagagagagagagagagaatggaagggagagagagttgtcacccattgctgagaggaggtaggagaagagaggagaaaggttacaaccatggcttatccaccactcagatgcatctcatggctgccatatgtgatgccctcattccttcccttcca

SEQ ID NO: 15514 - DNA, 258 bp, Glycine max
  Clone ID: 700962916H1
aagagaagaagtgaaagacagcatcagccgcggcggtgttaggtaggcggaccatggcggcgcctgaatcccctctctgttacgtcggtgtcgccaggcaatccgctgcttttcgcctgatgaagcaaatggggtgggaagaaggagaaggtcttggaaaagagaagcaggggatcaaaggacacgttcgagttaaaaacaaacaggacactattggtattggccttgagaagccaaacaactgggccttcgacacca

SEQ ID NO: 15515 - DNA, 257 bp, Glycine max
  Clone ID: 700962917H1
gtgagttgcaggcagtgtcatctctcctttgacgacaagatgagcatcccaattccccatcggcagttattcatagacggagactggaaagtccccgtcctcaagaatcggattcccatcatcaacccttccacccaacacatcatacaggatatcccagcagctactaaggaagacgttgatctcgctgtcgctgccgccaaagctgccctctccccaacaagggcgccgattgggctccggcttccggctccgtt

SEQ ID NO: 15516 - DNA, 257 bp, Glycine max
  Clone ID: 700962850H1
atcgttttctccgttctttctcaaagccgcactcaactttctaaaaccaaatcggtttgaatcctcatttcccgcctctcactggaaagcagcaaaatcacctttctctactatctatctgttccttttgtactctgagtgggtagaagtcatggtaaggctcactgctgacttgatttggaaaagccctcatttcttcaacacgattaaagagcgtgagttagatctcagaggcaacaagatagctgtaattgaaa

SEQ ID NO: 15517 - DNA, 253 bp, Glycine max
  Clone ID: 700962851H1
aatcgataaatgtgtgagtaatagacagtcttgcttgaaatacatatgattttcatttacagttagaaataggcctgtgagtaactttatgctttatctcctgcacaagaaacttgatattagatattaatgtgaaagcactgatttcaggctagctatgctttttttttccctttcttatttactaatgccttgtattgatgtttccattctactatgactcagattgcagatgtgtggtcttgtggggtga

SEQ ID NO: 15518 - DNA, 252 bp, Glycine max
  Clone ID: 700962852H1
aattgatgacctgtttggggcatgatttgagtatctggctctctgtgtaactagcttctagacatagaaacccaagttaagacttgaggatggcttcaaattgcatactagctatgtcaaagcagttgatcttgtttgtgtccattcgccttgagattgatttgaatgtttgatttataaagcaatgggactttcatatatcaaaatgcttcgcgacttcagtcaatttatttctaaaatcatgtgaattga

SEQ ID NO: 15519 - DNA, 250 bp, Glycine max
  Clone ID: 700962855H1
gccagattacagcaatgacatagaagaagatatgattcgtgcagccattgaggcttctacgcaagaggctgaggagaattatagaaatcacaaacttgacaggcagattgacttaagtgaatcaggatcacagccaaggcaatcatatttggaagatcctgagcttgcccatgcagtttcattgtccctgaagacagcagagcaagacaaagcattgcgagtacacgggggagattctggatcaccaaca

SEQ ID NO: 15520 - DNA, 246 bp, Glycine max
  Clone ID: 700962856H1
agagtgagagagagagagagagagagagatactgagagaaattcgcaaaccctaatttcggaaagatcggcgatggctgcctccaaggatcgcgagaactgcgtctacatcgccaagctcgccgaacaggccgagcgatacgaagagatggtggaatcaatgaagaacgttgcgaatctcgacgttgaactgactgtggaggagcggaatttactttctgttgggtacaagaatgtgagtggtgct

SEQ ID NO: 15521 - DNA, 247 bp, Glycine max
  Clone ID: 700962857H1
aaagtttttgaaatgttgtcaccccttcttctatttctatgcctaactcttcctttgtttttgttgtccttcttcaaataccgtaaaaccttcaagaatccaccacttccaccaggtcctagaggccttcccataatagggaatcttcatcaactagatagtccttctcttcatgagcagctatggcatctctcaaagaaatatggtcctttattttcccttcaatttggattaaggccagccatag

SEQ ID NO: 15522 - DNA, 248 bp, Glycine max
  Clone ID: 700962858H1
atcttttctttattttctctctatgcatattgctccacatagttcaatggctatggagggagagctacaaccatcacaagttcaactcagggtaaactctaggcagtggaggaaagtggtaaatgtacattcaatggagatagacccatctttcacttcaaaagttgaacacagggaagtgaagcatttcaaggaatggtttccttggttgattcccttctttgtcattgccaatgttattgtgttca

SEQ ID NO: 15523 - DNA, 248 bp, Glycine max
  Clone ID: 700962859H1
ggaactgtttctgtatatgttgcaattaattctgggaggtgtgtgatatttggtgtgttgatttaggaagtggtctcggaataaatagcattgctgtaattggaattactgtattcgtttataaatatgcaattatatcttcaggtgtgatggtaattgtgaactaggtcaatcttttcagtatgtacgtgatttctgggcagaagtaaagaactactgaattgtgactggttctgtgaattacacgt

SEQ ID NO: 15524 - DNA, 251 bp, Glycine max
  Clone ID: 700962860H1
caggaattaatccactagatatcccaaagatattcactaagtttgcacaaaaccaatcgttaacaacaagaaatcctgctggaagtggacttggcctggcaatttgtaggaggtttgtaaatcttatggaaggacatatttgggttgaaagcgaaggtattgataaaggatgtacagtcacttttattgtaaaacttggaatcccagaccgatcaaatgaatttaagctaccttttgtacctaaagtaccg

SEQ ID NO: 15525 - DNA, 249 bp, Glycine max
  Clone ID: 700962861H1
ctccagggatacctgctggggaatccagcaacaactcgaaggcatgaaaactatcgaatatcctttgctcatggaatgggacttatttctgatgaactatacaggtcactgcaaaaaaattgtaaaggagagtacataaatgtagacaccaaaaatgtattatgttctagaaatatcgagacattcaatgaggttacatcaggacttagtatggtcaatattttggacccgtcatgtgattggcttgat

SEQ ID NO: 15526 - DNA, 251 bp, Glycine max
  Clone ID: 700962863H1
aaacactatagcaatagaaacatttgcttttgaaaatgccctcactcttcatcactacactagctacccacatacaatgtcgaccaaatttaaggtgtttcgtgaattcacaagcgatgactcattcctaaaccaagttaaccctgaaaacatcaccgaattccaagtgactctgtccctcgctagagactacgatggcaacaactcaaccaacggaaagttcattccttactgggacactgaaaaggtca

SEQ ID NO: 15527 - DNA, 262 bp, Glycine max
  Clone ID: 700962865H1
ctagggctttgagaaaacaacattgcccgaaggccaattacctaacacagggaagaaaacaagaaaagagaaaaaggtttcatcataatcataagctgttaggcatggcgactggattcgacaccgcccatgagaagaagaagaagattgccgttctgagcgtgtcttccatcctcctggtggcgatggtggttgcggcggccgtcggcataagagacggcgccgaagtggtcgaggaaggtggcgacacgatcgcgaaatc

SEQ ID NO: 15528 - DNA, 257 bp, Glycine max
  Clone ID: 700962866H1
atttagctctggagactcaggtggttctaacgtgtgcagctgaaacctccgtgtcccacgaaaaccttacaaaattgaattgtggtattacagtatccaacagcaccatgctggattctgccactccccatgacaaaatcaccacagcagcttctggcttcgtacttgaggatgttcctcatctatctgcttacatccctcacctccaaacatatcctgacccgttgcaagacaatccttcctattctgttgttgcg

SEQ ID NO: 15529 - DNA, 253 bp, Glycine max
  Clone ID: 700962867H1
ctctccctgttttccctgccaaagtaacctcgttagtgacaaacaaaaagctctctcacactgagtgaaagaaagagaacaattttgaggacaaagtgaagagagaaagaaaagaagagtgagttgtttcagacagtagtagtagttagatagagaaggtggaagtggaaaaagggtgtttgttgtattgtgaagtgaaacaaggggtgggggtggtgtgaaacaaaaaaaggtgtatagtgagagagaaaga

SEQ ID NO: 15530 - DNA, 253 bp, Glycine max
  Clone ID: 700962868H1
atttcattttcttgcacccaattggattttgatctgaacccagttaatcatttagtcactgtattgtgaggaagcttgtttgtcattgtttctaatttgaagtactgggtttgctacattaagtggggttttgagtggtgaatttgacattgaatgtctggtgaaacaggatccttttagcccgtaacagaacagtgaaagttgcagtttggatttgtactttcaactaataaatgtcgaggggatctgatgg

SEQ ID NO: 15531 - DNA, 254 bp, Glycine max
  Clone ID: 700962869H1
aaaaaattaggcgtctaaagggccaaagcttagaaagttgaagctttttctgttgaggtgaaagtgaaatggttggcaaggataatctgagggctgaggacttgaacttgtgctttaagaagcttatgatggtggccgggagtgggaacagtgagaaaggggtgaacttgaaggttggggtgatcaccgagtggaaggatattcctgtggagcttctgatgcaaattctgtcccttgtggatgatcagacggtg

SEQ ID NO: 15532 - DNA, 256 bp, Glycine max
  Clone ID: 700962870H1
ggaacaagaacaagaacaacaaagtaacgtgaaagagagagagatggaggcgattgttccagtggtggatttccagaggctttcagaggaagaggagcgcaagaagctgagaaaaacatgtgagaaaccagggtgtttcagaatcatcaaccactcaattccactaacactcatggctgacatgaagtcagtggttaaatacttgcatgaccttcccacggaaatcaaaatgcgcaacaaaccctccgtccctgag

SEQ ID NO: 15533 - DNA, 255 bp, Glycine max
  Clone ID: 700962871H1
ggaccaaaaatgattattttttgctggtacttaatcttagtaccacctagctcgcatttttgaatctggaatgatgtttagttagcatttttaatagatagaacgaattcggagtcataggaaacgtgatatttgttctttgcagatttatcataatgcatcttccaatgcgatttggagaggggtcatgaaggttggtctttgaccctgcaattaataattcaaattcgaaagcctgaattggccatcatggca

SEQ ID NO: 15534 - DNA, 254 bp, Glycine max
  Clone ID: 700962872H1
gcttgccagctttactcggcaatggtggcaacatatataggcagcaacccataaaatattattatgaaaaattgaaaattaacgtaaaggggttcattgcacatcctttttgctttcagggttggaagaatttttgcgataaaatattttttcacccaaaaaaaaatggtgttggatccaagactggtgctggtgctgttcatcggcacttgcattttggccatcaatggtgacacagatccaaatgacgttgc

SEQ ID NO: 15535 - DNA, 250 bp, Glycine max
  Clone ID: 700962873H1
cagtatttctctttagaagagattctgagagctgaatagaagagatgtttgatgtttgtgtgcataatggaatatcctagaccagaagaataacgagttatgtatgttaccatgcatattaatgttgtgctggtgcatatactcttatttgctcattaggggcaggtggtttttgttacaggagtggtggacatatgtctgtatgggaccatcagatcctcatcgaaattggcatcttggaatgcgaggt

SEQ ID NO: 15536 - DNA, 247 bp, Glycine max
  Clone ID: 700962874H1
agaaaactgtgactgccttcaagggtttcaggtttgccactctcttggtggtggaacaggttctggaatgggaacactgttgatctcgaagatcagggaagaataccctgaccgaatgatgcttacattctctgtgttcccatcccctaaggtttctgacacagttgttgagccttacaacgcaacattatcagtgcaccagctcgttgaaaatgcagatgaatgcatggttttggataacgaagct

SEQ ID NO: 15537 - DNA, 245 bp, Glycine max
  Clone ID: 700962875H1
aagacactaaaagcggatgatttggcttcttcggtggtaggaactcccaactatatgtgtcctgaacttcttgcagatattccttatggattcaaatctgatatttggtcactaggttgttgtatatatgagatggctgctcatcgcccagcttttaaagcttttgatatggcagggttgataagcaagataaaccgtgcctctattggccctttgcctccctgttattccccatctttgagaac

SEQ ID NO: 15538 - DNA, 252 bp, Glycine max
  Clone ID: 700962876H1
atcaacatcatcatcgacacatggacccggcgtggattcaggggcatttccctagtgggcccatgatgcctaaccctgcacctttcgtagagcatcagaaagccgttacaataaagaacgatgtcaacatcaggaaagagacccttaagcttgaacccgacgtagaaaattctggccacttccttgtttcgttttccttcgatgccaccgtttctggcagcatcaccatatatttctttgcgaaagaaggtg

SEQ ID NO: 15539 - DNA, 249 bp, Glycine max
  Clone ID: 700962878H1
gtgagattgaattgaggttgaagtgtgttgtgttgtggcaaagctcagaaaaagagagagagattgaagaagcgatttttttatatgaaattttgaagagtgaatgagaaatctcaatcccatggatgagcaattgaatttgagctgaatcggcgtcgtttcgatttctctcagtcacacactactgactcggccagattcaagtaaacgcttcttctcagcaaaccctagatattggagattgatgtg

SEQ ID NO: 15540 - DNA, 252 bp, Glycine max
  Clone ID: 700962847H1
caataagctttcagctgtttcaagagcacaaatttcagcaccgccaggattctctgtaccgaacagggcaccacctcctggtctctcttcagttgagagaatggggcaggcttttgactccctctctgggaattcagtgctggatccttctttctgactgagaaattcttatcaaacaccctcaaatggaaatattggtggtccaggtgacgttgaatttatggagcctgctattttggcagttagtagagg

SEQ ID NO: 15541 - DNA, 251 bp, Glycine max
  Clone ID: 700962814H1
actaaaaccccactctctttttccgagtcttccagtgaaagaaaggcagcgatggaagaagacttcgacatccccggcggcgaggaaatggatctcggcgaagacgaggtcggcgaggagagggagatcggctctggcggcctcaagaagaagctcctcaaggaaggtcaaggctgggaaacccccgaagtcggtgacgaagtccaagttcattacacggggactttgctcgacgggactaagttcgattc

SEQ ID NO: 15542 - DNA, 263 bp, Glycine max
  Clone ID: 700962817H1
gtccattaaagggtccaaaactgggtggcagcccatgtcaagaaactgggggcaaaactggcagagcaactcatacctcaatggacaatccctctcttttcaagtcaccaccagtgatggcagaactgtgacaagcttcaatgtggcaccagccaattggcaatttggccagaccttccaaggaggccaattctagagacattattgcaatgagggatagaaaatagtgcaaaacaaaaaaaatgttggtatacctatgatta

SEQ ID NO: 15543 - DNA, 258 bp, Glycine max
  Clone ID: 700962818H1
acgataactaggaagtttcctaaacatcccttctttcaaaaaaccaatggctttcaagaacttgtccgttcttactctctgtgtttcccttgtgctttccttctttgcaccgaattccatagctgctaacaaccgtgcagtggttcctccagaaaccatttgcaactccaccgtaaacccttccttctgcaaaaccgtgcttgctaatcaaaatggcagcatcgttgactacggtcgaatttctgtccgaaagtcctt

SEQ ID NO: 15544 - DNA, 256 bp, Glycine max
  Clone ID: 700962819H1
tgagaagggaaatattgacctgagccaactaaagtttcgtgtccttgatgaagccgatgaaatgctgaggatgggttttgttgaagatgttgaaatgattctaggcaaggtagaaaatgttaataaagttcagacacttcttttcagtgctactttgccagactgggttaagcaaattgctttaaaatttttgaagccagataagaaaactgctgaccttgttggaaatacaaaaatgaaggccagcaccaatgtt

SEQ ID NO: 15545 - DNA, 255 bp, Glycine max
  Clone ID: 700962821H1
ttccttgtttcccctattattatctcgctctcacaaaatcatggcattctctagtgctttgattctgtggtcgttgctagcaatcaacatggccctgccaaccctcgcaaccgtctacaccgtgggagatacttcaggttgggcaattagtactgattatagcacttggactggcgacaagatcttttcagtgggtgatagtctcgcgttcaactatggaactgggcacacagtggatgtagttaaagagagcga

SEQ ID NO: 15546 - DNA, 254 bp, Glycine max
  Clone ID: 700962822H1
atttggtagcatattttggggatagaacatttgcatggactgaagaatcccagctaaaaccttttaggacacatttctcctccattgaaaagcagagcacttcagaatcatttcagaatgctgtagattgtgctgtggatgaagtcacaagacgagtcgaatatgggctggcatgttcttgtctacctaacgatacctatgactcaattaaattccagacggtagaacacactgggattcgatcagaactaagt

SEQ ID NO: 15547 - DNA, 81 bp, Glycine max
  Clone ID: 700962823H1
gtaatttttaagcattatttttgttgtgaaaatgctaactagtcagacgtattttctttgcccgaaatcttgactaagttt

SEQ ID NO: 15548 - DNA, 255 bp, Glycine max
  Clone ID: 700962824H1
gcatcttgtgttgaaggatatccatgccaccttgaagaaatttggaagcaatataattttctcaaatggcctcttggatccatggagtggtggcggcgttttgcagaatatatctgaaagtgtggtttcacttgtcactgaagaaggtgcacaccacatagatttacgttcttcaacaaaaaatgatcctgattggttggtagagcagagggagactgagataaagctgatagaaggttggatcagtgactacca

SEQ ID NO: 15549 - DNA, 252 bp, Glycine max
  Clone ID: 700962825H1
caaagtttcttcctttctctgctctttgccttctctgacacatttggtgccttgtagagcgtgttttggcaggaaggtggtatggcgaaggacgttgaggttgctgagcgtggctccttctctgggaaggactaccaggaccctccaccagcaccactcattgatgctgaggagctcacaaagtggtccttttacagggctctcattgctgaattcattgccactttgctcttcctctacattactgtgctc

SEQ ID NO: 15550 - DNA, 249 bp, Glycine max
  Clone ID: 700962827H1
gatgagaaaaagatggaactggaacatgtgaccagcgtgtcaagaagagatcatgaaagaccaaatcccttttttcgagtgagagcagttagcttgggtggttggttggttactgaaggttggatcaaaccttctctcttcgatggcattccaaacaaagacttattggatggaactagtcttcggttcaagtctgtgtcaacagggaaatatctatgtgccaagtctggagggggaaatgtcctactt

SEQ ID NO: 15551 - DNA, 252 bp, Glycine max
  Clone ID: 700962828H1
cagcctcatacagaaacttcaattcccaaacttcttcctccactggccaatcactggacgccacggggcaggcaaagatccgttgggtgcaaaagaattacatgatttacaattattgcactgatatcagacgtttccctcaaggccttcctccagaatgctccattgcatgagaatatttaattcaatgttgcatatcattataaaatgatcctcatgaacgtgacacacatgtgttgcctattacgttaa

SEQ ID NO: 15552 - DNA, 253 bp, Glycine max
  Clone ID: 700962829H1
gatatttcgcggactaaattcatggtttattcaagaaaaaatgcatcattattaatgtattttgaaagctttctgaaattaaaagttatcatgcttatttatgtttttacttttttcctttcagtactgtttcccttttctacaagtaagaagtttaaacagggtcatcagtaagaaaatattttcagaaaagctatgtgaaagaccagtttactacttgctttcaccaaggttcacaaggattatgctgtgt

SEQ ID NO: 15553 - DNA, 250 bp, Glycine max
  Clone ID: 700962830H1
gtgaccttccacaagacccatgttcctgctggctccaagcaacgacttaaggttaatgttcattcctgcaaacacttgtccgttgtggaccagtttggggttcgaagaatcccaaccggtgaacatgaactccacattggtgatctcaaacattcaattaatgtccaaactacgcattgaatcaagcactaaaagatgattaatttaactgtcaagaaaatttgacagatacaactgaaagttttgcaaa

SEQ ID NO: 15554 - DNA, 256 bp, Glycine max
  Clone ID: 700962831H1
ctgctaacccaactcaaaaactggaacttgttggaagttaggtgggaaactgagattctgagaggaatcagcccttttccgtatactttacttgaacaagccgtttgagttcggcgtgtttaataactaacatcacaagacaacgttgtcttgcgcctgaaagtgttgtggagacaaaaccacaatacagttttagaatggagaagacagcagttaaagttcgatgccagaggattgggtgcgacgccatgttctc

SEQ ID NO: 15555 - DNA, 259 bp, Glycine max
  Clone ID: 700962834H1
gcaaacgatccaaactcttttttcatttgcagcatcaaaatgagtggtagcaacgatggtagcggcagctggagctctaggtttttgaaggtggctagtgcagctgccgctacagccgccgttgccggcggtttatatgccattctttcatcctcaacctctgctagctctgagatggaagtgccgtttggcagcgcacggcgtgagagcaaagaacgtgacgatggtggctccgggtctcatcctcgcgagggtgcca

SEQ ID NO: 15556 - DNA, 255 bp, Glycine max
  Clone ID: 700962835H1
caggtgggaaggaaggagttctcgtgatttggcggttagacacaaaaaagaattattgcttaccaagatttggatctccacttttgtattttgtagattctcctgatcgatcacttttctcaatatctcatgcagataatcaaatgcttatattgaagaagccttcaaagccaatggaaataatcagctgtatttctggtatcaagccccctttgtcttctcaagatatatgtgaaggtctttccagccgagttg

SEQ ID NO: 15557 - DNA, 256 bp, Glycine max
  Clone ID: 700962836H1
gaaacaggttcctcaagagttggtagcaaaagttggtgaaatatttgaggcaattttgcaggagacagataacataaggcaagaatccagtgaagacatgtctgtacttcgtggtctttcaatcgttttcgataggaagccagaactgaggttggaggggattgcttataaggtacttcagtggtatttatgtagactggagggctggtttgctgcagacactgatgctatttcactgaaaggatgggaccaggag

SEQ ID NO: 15558 - DNA, 255 bp, Glycine max
  Clone ID: 700962838H1
gtttccatccaaaaaatggctctatcgcgcgtggctcaatcgtcgccatcacagtcgaatcttttgaaacccctctcgtcgtacttatccctacgacgccgttcggtgtcgacctcgtcggagcccctcaccgtggagacctcggtgcccttcacctcccacaactgcgatgcgcctccacgcgccgtggagacgtcctcggcggagctcttctcgttcttccgtgacatggcgctgatgcggcggatggagatc

SEQ ID NO: 15559 - DNA, 230 bp, Glycine max
  Clone ID: 700962839H1
cagaacttgacttccaagttggaaaagagagatgtatacctgagtctgatataagtcagttaacataccttcaagctgtggtcaaagcaactttaagattatacccttcagtggctctctcatcacctcgtgaattcatcgcggcttgcactttaggtggctacaatgtctacgaaggaactcgtcgacttacaaatatgtcgaagatccacacagatcttagtgtttgg

SEQ ID NO: 15560 - DNA, 257 bp, Glycine max
  Clone ID: 700962840H1
tgaactcatcgaactgcaacagaaaactcgtcggagcgaggtttttctcgaaaggctacgaagccgcacttggacccatcgacacaaccacggagtcaaagtcagcgcgtgacgacgacgggcacgggagtcacacgttaaccaccgcggcgggctcggtcgtacccgaggctagcctcttcggcttggcatcgggcacggcacgtggaatggccacgcaagcgcgcgtggcggtttacaaagtgtgctggctaggc

SEQ ID NO: 15561 - DNA, 252 bp, Glycine max
  Clone ID: 700962841H1
ggaatgctccaatgcttatattattgtccggagggatgccttagatgagtgcctcttcattcttgaaatggaaaggctcagcatcgaggacgtcttgaaaatggagtggggtactctgaactcaaaaatcaaaagatggatttgggctgtgaaaatttttgttagggtgtatcttgcaagtgagaggtggctcagtgaccagctttttggggagggtgagcctgttggtctatcttgttttgtcgatgcatc

SEQ ID NO: 15562 - DNA, 252 bp, Glycine max
  Clone ID: 700962842H1
ctcgagccgaatcggctcgaggcccccactcctggtgagagcatcgcagtgctgcaacagatagagggacccctttcgccagctgagctagcagggattctacaaagaacattggaagaacaaggggtggcttttggaagtgatagggctaagcaggaagaaaagatccgagcagaccgtaggcttagagaagagcaagatgctgcatatcttgcagctttgcaaattgacaaggaaaaagacaaaccgaat

SEQ ID NO: 15563 - DNA, 250 bp, Glycine max
  Clone ID: 700962843H1
agtccccagagatccgcctctgcccctaacaacgcagtgtcgtttcttcgaccccaacaatttcttttctgctcagttcacaaccaatgtggtctacgagaataacaacaacaacaacgctgccatcgaatcacgattcgttaatagcagagtcgccgcagatccaccgaaacagaggttaaagaagagtttctacgactccgcggatttcttccccgagccgaaacacaccgtttcggtgtacggagag

SEQ ID NO: 15564 - DNA, 253 bp, Glycine max
  Clone ID: 700962844H1
gggaagtatccggtgctctgccaactacgttcctctcactccaatcagcttcttggaccgcgccgccgtcgtttaccgcgacagactgtctcttgtctccggtgacgttacctacacgtggacccagacacaccaacgctgcatcaaacttgcttcttccatttctcaacttggtgtcggtctttctcccctcgatgtggttgctgtattggcccctaatgttccagctatgtatgagctgcattttgctgtt

SEQ ID NO: 15565 - DNA, 255 bp, Glycine max
  Clone ID: 700962813H1
tgcaaaccgaaccaggcaggaagatgctctcaagaaaaataagcctgcaattgttgttggcacacctggtaggatagctgagctcagtgcatccgggaaacttcgcactcatggctgtcgatatttggtattagatgaagttgatgaactgttgtcattcaatttccgggaagacatgcaccggatattggagcatgtagggaggagatcaggtgcagacccaaactcagattctagaaaggccgaacgtcagtt

SEQ ID NO: 15566 - DNA, 254 bp, Glycine max
  Clone ID: 700962845H1
gagagaaacatttttagagagataaagtcagtgacaagcaccagaagaagtagctagcacccgacaaccacaccagattttggataaaaagtaagatccattgagtttgttcttgcacatcatgattttctctggttcaacaacgaagggtgtgaagagatgggtttgatcatgacccttttgatgagtcacatgcccacatagctcagtagttaaaatcgcgctcttttttgtgtgttttgtggaatttgttc

SEQ ID NO: 15567 - DNA, 133 bp, Glycine max
  Clone ID: 700962782H1
ggctcgagccgagttcggctcgagctttgaaaagcactccgctagaaggtgtaagcgaaatgctgcttctttttcattgcgtatagagagacatgggtggacataacaatgaccatgaacatcaacgaagctt

SEQ ID NO: 15568 - DNA, 260 bp, Glycine max
  Clone ID: 700962783H1
agtttgcaagctatcaagttagttagaaacaattttctgataagttagttgatggccaacatctaactgtttttaagtttttccattttggtagttttctctttgataacttattttcttgagtgctatataaacatagaagtatttccttatgggtatgttgcaacagtgaggtcccattcatgcaatcacaatgagtggaagatcaaagtgtgtcagaaagatagagtgacacttggggatccttgatgttgttatct

SEQ ID NO: 15569 - DNA, 244 bp, Glycine max
  Clone ID: 700962784H1
gtgaggtcgacgacaccaccggcctcatcctcaaactcaagtccttctgcctccgcatggacgcattcgggttcttcgccttcgtcagcgccaagaagaaggagctcgacggcctacgcgccgagatgcctgtggctctggcggagtgcgttgatccggcgaaattcgtgctggaggcgatctccgaggtgtttccggtcgacaagagaggggacaaggccggccacgacttgggctgggcttg

SEQ ID NO: 15570 - DNA, 127 bp, Glycine max
  Clone ID: 700962785H1
atttgatctctccaccttggtgaaagccttgtgacccataaggcttttacagaaggtgggattttgactagctaggtgtttggctgttgagtttatggagggccaagttccttgttgaacagtgttt

SEQ ID NO: 15571 - DNA, 255 bp, Glycine max
  Clone ID: 700962786H1
aaaggattctacccgccgctcgatgggaattgcgcttcaaggcgtctcgtagggctaatccgcctcacgagggtcaccaacggcacgcgcctttggggggccgaggccccctactgctggtcggcaaacggacggctggcgcacgcgtcgcttctagctcggattctgacttagaggcgttcagtcataatccaacgcaccgtagcttcgcgccagtggcttaccaaccaagcgcgatgaccaattgtgcgaatc

SEQ ID NO: 15572 - DNA, 258 bp, Glycine max
  Clone ID: 700962787H1
ctttctctcgttttttctcagaaccttctgaggttaaagcaaaaaacaacgagagagagagagagaaaatgatgaagccatcgatgctcagatctctccactccgccgccacccgcggcgcctctcatctcttccgccgtgggtacgcctccgagccggtgccggagcgcaaggtagccgttctcggcgccgccggcgggatcgggcagcctctctcccttctcatgaagctcaatcccctcgtttcgagcctctccc

SEQ ID NO: 15573 - DNA, 238 bp, Glycine max
  Clone ID: 700962789H1
caagcctctctcttaaccccacccctctccggtctcaaagccagcgaccgcgcctccgtgccatggaagcaaaactccagcctctccttctccagcccgaagcccctcaagttctccagaacaatcagagcagcagccgccgacgagaccacagaggcaccagcaaaagtagaggctgcaccggtcgggttcaccccaccagaacttgacccaaacaccccttccccgatcttcgggg

SEQ ID NO: 15574 - DNA, 256 bp, Glycine max
  Clone ID: 700962790H1
caacaatataaattggttaaagagaggactatatctggagattcatactatggctctcacgtgatgcagtatggtgatgtacggcttagcagtgatgttctcttccattatttgggtacagatcctgctaatgataatttcacttttgtggacgaaaactccttatggtcaccttcaaaaccagtcaaccaacgtgatgctgatctcatccatttttgggataagttccgcaaagctcctgagggttctctcagga

SEQ ID NO: 15575 - DNA, 222 bp, Glycine max
  Clone ID: 700962791H1
aatggcagcaactttcaaattcagacaaagatctttttccactcctggaatgctttacatctatatcacatgctctgggtactggtttcactcaatttgctgaacctgtatttaggaggtgcataaatataatccagacccaacaatttgctaaggctgatcctgccgccaccacaggggttcagtatgacaaggagtttattgtatgctctcttgatttgc

SEQ ID NO: 15576 - DNA, 238 bp, Glycine max
  Clone ID: 700962792H1
acaataaccactaattctcccaactcaatttttctctcaaccggcccaatttagcataagcccagcatggccaccgcaacagcagcagccacctcgtccttcatggggacgcgcctcctggaggcccactccggggcggggcgggtgcaggcccggttcgggtttggcaagaagaaagccgccgccccgaagaaagtttccagggggtcgggctctagctccgataggcccctgtggt

SEQ ID NO: 15577 - DNA, 249 bp, Glycine max
  Clone ID: 700962794H1
gaagaagaaaaatgtaggtttgttccattatatcctgatgcatttcagccggtcagaatcccctttcagaaaggagttggccagaaatttgctcagccttctggaacaggaattgacctaggcttctttgagttggatgatctttcaaagccctcacccggagaagatgtctttcctcttgtaatatgtgctgaaacaagtttgaaaactacctcagaagatgaaactcctggtgattccttgctagat

SEQ ID NO: 15578 - DNA, 259 bp, Glycine max
  Clone ID: 700962795H1
cttcaatggaatttggcaaaaagtagccatcgccccaacgatcccatttcccttgacttctctacgtgaagatccttgtgtcacatagagctagttaaaatgtccgagggaaatgcagggaaaggaaagagaatcgccatcattggcgtctcaaccttattgttggtggctatggttgtggcggtcacaattggggtcaatctcaatgagaatggttccaacaatgatatagaggacaacaagaaaaatcatgttgctt

SEQ ID NO: 15579 - DNA, 263 bp, Glycine max
  Clone ID: 700962796H1
caaacaggcaaatttctcggatctttttccctcccacgttttgccgcggtgatgcggcaaactcacggaaatatgtcacgcactcgtatcgccattcagcgcttccgccacacctacaccgcgttatcatcatcagctgcacttactcgctcccaattccaatgctctcaacaacatctcacgcgcgcacccctcctcttccacgctcctcgtcattattcatcttcccccaaacaagactatcccaccggagactttgattt

SEQ ID NO: 15580 - DNA, 265 bp, Glycine max
  Clone ID: 700962801H1
tggggttctgttttgttctgttctgtcaccatcattcttgaaccttcacaaaagccagccaaaaaaatggctccaaatttcttgcaccaagtggcattccttcttgtgctctcaactgcggtttccagtggctatgcttgggttggtgtgaactggggaaccatggcgacgcaccagcttcaacccgagaaggtggtgaagatgctgaaggaaaacgggttcagaaaactgaagctgtttgatgcagacgagttcattatgacgg

SEQ ID NO: 15581 - DNA, 259 bp, Glycine max
  Clone ID: 700962802H1
cacatactcaccatggaggctaagttggccaccaccataatacttattttctccgtaatttggcttatgagggtgaatggcatagacccttgtgcctctcaagcggataattccgacctgaacgtgattcccatctacagcaaatgctcaccgttcaaaccaccaaagtcagactcatcgtgggacaacagaattataaacatggcctcaaaagacccactccgattcaaatacttgtccaccttagtgggccaaaaga

SEQ ID NO: 15582 - DNA, 249 bp, Glycine max
  Clone ID: 700962803H1
gcttctcgctatccaatccctcatgaggttgctgagatgttaacgaagaggagcttaattgaagcagtaatactgattagagtagttttatggctgctggcaacaaggttgggaaccttgttgctctgtggtttcctctgtcttggtgaaaaatggccctatgtcaacaacttctcaaacatatctttggagaaaagagaaatggttatgcagaagtggctgaaacataggttcctcacacctattaga

SEQ ID NO: 15583 - DNA, 258 bp, Glycine max
  Clone ID: 700962804H1
ggttatcatcttcttcttcctctttcttagatctcttctttctctacgccgcacgccgaaaccatggccggaaaaggagagggtcctgctatcggaatcgatctcggaaccacctactcttgcgtcggtgtgtggcaacatgaccgcgttgaaatcatcgccaacgaccaagggaacagaaccacgccgtcttacgtcggattcactgacaccgagcgtctcatcggtgatgcggccaagaatcaagtcgccatgaac

SEQ ID NO: 15584 - DNA, 258 bp, Glycine max
  Clone ID: 700962805H1
gctcacaaaacatctctaaacgcttgtaaagatctccatctcccattgatccttctgaagtttttgtattcaaccatggctacctatagttggtcaactgagatattttcatttttggttctaacgttgttgtcgacaagcagtcacacaatggttgctggagcacgcaatcttctcgaatcaaccttgtcaaaaccagaagtgccaacacttcccaaacctcatgagttgccaccattgccggaagtccctgaattg

SEQ ID NO: 15585 - DNA, 256 bp, Glycine max
  Clone ID: 700962806H1
tgaagagcaagttgccgcaaaactttcaacacagggtaaaagcgggaggcagtagataggccattagcctgcaaatcttcccttgcagccctttaactgatttggatatttttattagtgctatgggattattttgaatgcgtcttgttggcagatctggtggtgttttgtctcgggaagaaattgtcattgctaatgtatcttgagacttaaatttatttagttttagaagtcgtgaactaagagctactggggt

SEQ ID NO: 15586 - DNA, 111 bp, Glycine max
  Clone ID: 700962807H1
aattttctgaatgctacaaccattgaaggcgcgaatttgatctgatttcacgaaggccgaatcgaaaacgcgacatggtagactccaaattgctgtttcaacacatgcaag

SEQ ID NO: 15587 - DNA, 259 bp, Glycine max
  Clone ID: 700962808H1
caatggttcctcaacctctgctaacccttttcctctttctctcccttctctcaattgtcaactcctctccttcccaacaccttcagatcgccaatgctgaacgcaggattgacttgacttctcacattattaaggtgtacttgacgttgaaggttgaaaatttggggacatctcctacttcagaagtacatattgccttttcacccactgaagtagaacatctagcaatagtcagagctgctgcaacttctgggaagag

SEQ ID NO: 15588 - DNA, 256 bp, Glycine max
  Clone ID: 700962809H1
agcttaccaagtacgagggaatctgaggtatagtagtgcatttggtgagtaccctgtgcttcatggacataaagttgagcattcccatagaagctttttgatgccaccaccaccatcaactcaatatgagagtcctcgttcaagagaactgttgtccaaaccaatatcaggaaaaccttgtgaggtttcaaaactgaaagacagtgactgtaagctatttggcatctcacttcttagtagccgccccattgcatca

SEQ ID NO: 15589 - DNA, 253 bp, Glycine max
  Clone ID: 700962810H1
attacaattactactttctctctctttgtaacttgtaagcatggagtcctcaaagatctatgcttacctcttcctttgcatgctcttcctctcctccgccactcccattctcggttgtggctactgtggcaaaccccccaaaaagcacaagcctggtacaacaccaaagacacccacagtacccgttgttaagccaccagtcacaatccctcccattgttcagccaccagtcacaatccctcccattgttaat

SEQ ID NO: 15590 - DNA, 252 bp, Glycine max
  Clone ID: 700962811H1
tgctgcagtttcaactagccagggaaccccagttcaaactagctctagcgacccttttaaacaacagcgagtcatggtcattggtggagatggatactgtggttgggcaactgccctccacctttctaacaagggttatgaggttgccattgttgacagccttgttcggcgcctttttgatcaccagcttggactggattctctaacaccaatttcttccatccagaatcgccttcagtgttggaaatctct

SEQ ID NO: 15591 - DNA, 268 bp, Glycine max
  Clone ID: 700962781H1
aaaaggtttgtccaaggatgataaggctcaaaaattagccctccaacattggctagaagctattgacccacgtcatcgctatggacacaatttgcacatgtattacgatatttggtttgagagccaaagcacccaaccatttttctactggttggatgttggagatggtaaagaaataaatcttgagaaatgcccaagatccatcctacaacgccagtgcattaaatatcttggaccaaaagaaagggaagagtatgaagtaattgtt

SEQ ID NO: 15592 - DNA, 254 bp, Glycine max
  Clone ID: 700962812H1
cagtgaaagagaatccgaggcgaagagaagagaaaaattaagatggaggggaaggagcaggatgtgtcgctgggagcgaacaagttcccggagagacagccgattgggacggcggcgcagagccaagacgacggcaaggactaccaggagccggcgccggcgccactggttgacccgacggagtttacgtcatggtccttttacagagcagggatagcagagtttgtggccacgtttctgtttctatacatcac

SEQ ID NO: 15593 - DNA, 270 bp, Glycine max
  Clone ID: 700962749H1
agtacatcttcacaatttctatttgatttggcaaacacggctacttttctccaaataagatggatcatttgtattgccggctttgtgcacaattatctacttgtaagaagtccaatttcgggcaacaacgtttgtaatgcagaaataggtcattagcattgtaaatctccaggcgataaatggaatatcaaatggaagacgccgcatagcttctggtgtgacgatatcattgtgttgggcaaagcttttcgaagaaattacgtggattta

SEQ ID NO: 15594 - DNA, 268 bp, Glycine max
  Clone ID: 700962750H1
tcttcactgggcatctgctggcagtgcttcacgtggtagtactgaggggatagttttgtcaaaccaagcaagttgatttgtgctccatttgtagttaagtaggttatattttgagggtgttcactaacaaagggaatctagctatgcaatctggaagcccttggtctttgtacttaggatggatgagattgtgtattttgaaaattggtggttgttagaatagggtgatctttccttcagggtatttgatcgaggaattcttgtaagt

SEQ ID NO: 15595 - DNA, 271 bp, Glycine max
  Clone ID: 700962751H1
gtcacgggctcgttggtgagccgccaccacacttccaccacaaattcatattcattccctgtgcttcattcagtcccttgagattgggaaccattggtggctagctaagcgaagtaaaaccaaactgcttcagcagtttgtctatgcttagcttcttcttctgcttttgctttctccaccatcacaaccaccatgtattctgccactgcctccaacactttcttccttctctcttgtttccttctcttctgtctcctctcagctccttcct

SEQ ID NO: 15596 - DNA, 250 bp, Glycine max
  Clone ID: 700962752H1
tggaatttggcaaaaagtagccatcggcccaacgatcccatttcccttgacttctctacgtgaagatccttgtgtcgcatagagctagttaaaatgtctgagggaaatgcagggaaaggaaagagaatcgccatcattggcgtctcagccttattgttggtggctatggttgtggcaatcacagttggggtcaatctcaatgagaatggttccaacaatgatacagaggacaacaagaaaaatcatgttg

SEQ ID NO: 15597 - DNA, 264 bp, Glycine max
  Clone ID: 700962753H1
agctacttcaccactccaaacccagcagaccaccattattcatatctcgttctctaacctttcactctgccttactcactctctactttgctcatcatcgtagatgggccaacacttctagtctctcttgactgagaaccatgtagaaatgagtcacctaatgaaaaatcagtagctccttgttgcgctatgaatagagtgtgtgttgagataaattcgtttgtttgtttggtattgttctcgtgttaacgaattagttgatgg

SEQ ID NO: 15598 - DNA, 261 bp, Glycine max
  Clone ID: 700962755H1
aacaaaacaaaatacaataaatttggtaaagggcagtggcactttaaagggaagaaagcaccacctcaaaccagaaggggaaagtgctcctaacattagattagaccctctaccatgttcctctgcctctgaagtctgaacctccccaggaatggcaatggagaatacaacattgtttgtgttgctgctgaatgtgcttcttgtgttcagtgcctctcttgtgtccgcagagcaacaaagtcaagcctcagctgtagggga

SEQ ID NO: 15599 - DNA, 191 bp, Glycine max
  Clone ID: 700962756H1
gcaaaggattctacccgccgctcgatgggaattgcgcttcaaggcgtctcgtagggctaatccgcctcacgagggtcaccaacggcacgtgcctttggtgggccgaggccccctactgctggtcggcaaacggacggcgggcgtacgcgtcgcttctagcccggattctgacttagaggcgttcagtccat

SEQ ID NO: 15600 - DNA, 263 bp, Glycine max
  Clone ID: 700962757H1
acaacacctttcataacttcctgtcttcctccttcttcttcgggttgtgagtgtatacgcatcacgcatggcagctttccttcgacgctggattccacgatggaagattttatcttctccaccctgacgggatagcaaatctttcatgaaattgagaattgctgctgctaataaacaagcttccattgagatgggggagttcaccgggagtggtgagtatgtgactatcggcgaatttccttcctccaggacaaatcactcaa

SEQ ID NO: 15601 - DNA, 262 bp, Glycine max
  Clone ID: 700962760H1
actgttcattgcagttccatgacaatgttaaagcctttgacttttttgtttttggcttggttctttcagtttcctgttgttaatggtgcacacgcagtgtcttccttgttgaggtgttactttttcttgtttttttctctccaagttttccctcaaccaaacagaatgagctaaaaaaatgtggaattttctctttcttcttccacttcaggtcttccggatgcttttattttgggtagttattttggtttttggatgagtg

SEQ ID NO: 15602 - DNA, 53 bp, Glycine max
  Clone ID: 700962761H1
caacacaaaaaaccacactttcaattgcatttctctctctttctcacaatttc

SEQ ID NO: 15603 - DNA, 121 bp, Glycine max
  Clone ID: 700962762H1
atcttgggtttgtaaggcttgtgatacacctgacgtcaagcgggagtgttctactttgtcctgtaaaaggtggtgctctaaagccgactgatgttgacacattgtggggtcatgtcacttg

SEQ ID NO: 15604 - DNA, 262 bp, Glycine max
  Clone ID: 700962763H1
gcaaagaggacccatgccgttgagaaggattgaagcctccgcttgctctctccatgaaatttcttcactttgcaaaaccaaaacagattgaattgctattatccaattcatctacttcttcttcttcttcatagccatgtacaggttttaattttaacgcctttttttattattagcctaacgaatcttcttataaaccctcaaacctcttgtgctgttcgcattccgataaacaaacacgcagatttgaaggaacgaaaga

SEQ ID NO: 15605 - DNA, 122 bp, Glycine max
  Clone ID: 700962764H1
aaataaccttgaggagatgttggtggtgataagagcggaagttgataaagcaaaggaagacgtggactctggtctggctatttttgcggcagacctggttggaattcttggagaaagtgcag

SEQ ID NO: 15606 - DNA, 271 bp, Glycine max
  Clone ID: 700962765H1
gccaaacggaaggtcattagtaagactttccgtcgcctgcttgaggtaagtgagaaacaaacatttactggtccaccggaaaatgtcagagatcatgttatggctgccacaagggttcttaacaagggagacttccagaaggcttttgacattattgtgtctcttgatgtgtggaaatttgtgagaaatcgagacaccgtacttgaaatgctgaaggacaaaatcaaggaggaggcattgaggacatacctctttaccttctcttcatctt

SEQ ID NO: 15607 - DNA, 267 bp, Glycine max
  Clone ID: 700962766H1
caaggcagaaagcaagctcatcctagagttttaaaaatggcagcagcctcctccatggctctctcttccccatccttggctggcaaggccgtgaagctgggcccatcagcccccgaagtcgggagggtcagcatgaggaagaccgtcaccaagcaggcctcctccggaagcccatggtacggcccagaccgcgtcaagtacttgggcccattctctggcgagcccccgtcctacctcactggcgagtcccacgtgactacggctggg

SEQ ID NO: 15608 - DNA, 253 bp, Glycine max
  Clone ID: 700962767H1
gttgaaatcggcaggggacggaaatatcgaaagagacagacagagcgacgtcggagaaagaaagaaaggaatgaatgaaagagggatggtaggagaaaaatgagaatggcgtgaatgtgaggagagaagagcctgaatattagaatcggatacccttaaagaagcggagataggagtgtgcgactccaaacccaaggggcttcgggagggctcttcatcggaggcggtgctatattcccctccggattccccc

SEQ ID NO: 15609 - DNA, 258 bp, Glycine max
  Clone ID: 700962768H1
gttctgaagatctacctgctaaatttctaaaattcattcattttccctgtctatattctctcctctccctcctcctgtgtctcagtttgctggctagatacgtagaattgctgctgcttcttcaatggctcaaattgcgcttattgctcctgcagcaactgttatacctattattactggtagggggatacaacaaaaactatcatatgctgcaagaagagacaaagtgagtttagcatcactggttcctagttggag

SEQ ID NO: 15610 - DNA, 263 bp, Glycine max
  Clone ID: 700962769H1
cgaagatctttgcttagattttactctccctggttatcctgaatacaccttgaagccaggagatgaaattgttgatatcaacaatttggaggagtatatatccttggtgatcgatgcaactgtcaagactggaatcatgcggcaaatagaagcatttagagcagggtttaaccaggtttttgatatctcatctttacaaattttgactcctcaagaactagataatttgctttgcggccgcagggagttgtgggaggctgaga

SEQ ID NO: 15611 - DNA, 119 bp, Glycine max
  Clone ID: 700962770H1
gaagttggaaaagttcgcttgcgatttgcccctgaaccaagtggttatcttcatattggacactcaaaagcagctatgttgtgcaaatattatgctgagcgatacaatggtcaggatat

SEQ ID NO: 15612 - DNA, 236 bp, Glycine max
  Clone ID: 700962771H1
aatatcatctagctagctagctagctagcaaatagcaatgttaaaaaaccaaccacaaccagattggcctgagcccattgtccgggttcagtccttatccgaaaactgcgtagattcaatccctgaaaggtacatcaagccttctactgatagaccatccatgaaaagttgtaattttggatgatgccaatattccaatcatcgaccttgggggactattcggtgctgacaaaaat

SEQ ID NO: 15613 - DNA, 262 bp, Glycine max
  Clone ID: 700962772H1
aagtttcttcctttctctgctctttgccttctctgacacatttggtgccttgtagagcgtgttttggcaggaaggtggtatggcgaaggacgttgaggttgctgagcgtggctccttctctgggaaggactaccaggaccctccaccagcaccactcattgatgctgaggagctcacaaagtggtccttttacagggctctcattgctgaattcagtggcactttgctcttcctctacattactgtgctcacagtcataggg

SEQ ID NO: 15614 - DNA, 263 bp, Glycine max
  Clone ID: 700962773H1
cagaaatcaaacatgaaacccttgagactctctgtttctgaccttccaatgttgtcatgtcactacatccaaaacggcgtgttactcaccgccccgccctcctcttttgacgacttaatactttcttttaaacacactctttctatcgcgctctctcactttcccgctctcgcgggaaggtttgagaccgattccaacggttacgttaatattgtatgcaacgacgctggcgttgattttattcatgctaaagcaaaacacct

SEQ ID NO: 15615 - DNA, 240 bp, Glycine max
  Clone ID: 700962774H1
catcaaattgtgcttgtgattgtctttgtatcacgaaaactatacgattcgattccttgttttcaatggacaccttcttcaattctcaatcttcttcttcttcgagaagccgctggagttacgatactctcaagaatttccgtgagatctctccgctggttcagaatcacatcaaacgggtttattttacgttatgttgcgctgtggtggctgctgctgttggagcttttcttcatgttc

SEQ ID NO: 15616 - DNA, 259 bp, Glycine max
  Clone ID: 700962776H1
atttttcttgaaagatgatggaactttgacaccattggccattgagttaagtaagccacatcctcagggtgaagaatatggtcctgttagcgaagtctacgtgcctgccagcgaaggagtggaagcttatatttggttactggcaaaggcttatgttgttgtgaatgatgcatgctaccatcaaatcattagccattggctaagcactcatgcaattgttgagccatttgtcatagcaacaaacaggcaactgagtgtg

SEQ ID NO: 15617 - DNA, 258 bp, Glycine max
  Clone ID: 700962777H1
ctgggtacaaaattgaaagcaaacaagttttggcttccaaaagtacaaggctactagtagataaggtagttattaattgatctctgttaacttctgttgcagttataattggttaagtagctcaaaggatacattttgatcttctgctgacatctgctgggtacaaaattgaaagcagacaagttttggcttccaaaagtacaaggctactagtagataaggcctgaagttgaaccaatggattgttcagctgctaga

SEQ ID NO: 15618 - DNA, 94 bp, Glycine max
  Clone ID: 700962748H1
ttcatgtaccgcacctccctgcctgatgctcgtgcagtctcaagacctttctccctctcttcgctccttctctcacaggcccatttctagaagc

SEQ ID NO: 15619 - DNA, 163 bp, Glycine max
  Clone ID: 700962779H1
tttccacatatctgacagaaaaaaatggagaactatcagtacccggcgtcgtaccctgactccggcgagtcctccccgcgctcgcgcgagatcgacttcgagaacccgccgccgtgggacgagcagcagaaccaaaactacaaggccaagttcatgtgcagct

SEQ ID NO: 15620 - DNA, 126 bp, Glycine max
  Clone ID: 700962780H1
caatttgtcactatactctatttgggaacagaactaggtgataacttttggtgtactgaatattggggtgtcagtttcctgtgaaagattctgaaggcaattgaagtaaatgccatggatcgtggg

SEQ ID NO: 15621 - DNA, 271 bp, Glycine max
  Clone ID: 700962716H1
cagaaacttcagtgtctgacctcaatgctagaagcatctgatgctaaattacctgatatcaaggcaaaattagagagtgagatgaaacgccttttggaggatgtgaacaaaatggttgaatcttcttcctaaataacgtatggaatactagcaattgtttagctagtaatcagggtaggtttatgatatgtcatttccatttagcgggactgtctttatttgaggatcatttatttgtctcatttctgagcctagctttaagaggtaaaat

SEQ ID NO: 15622 - DNA, 273 bp, Glycine max
  Clone ID: 700962718H1
gcaaggaggctgatataaaaagaagtgctgcgctttcggccaccaaatatgctgaagcttgtcaggagcttggcttacaggggaaaaatgtcagagtagaactcttggagacagcactattacttccgagcacgtttagcaaaattctggatgttgtaaacagtgacaacttgtcaagggcaattgagtattattccaattttgtcagggatgctcacattgaaaatgatagatctttgggagacgtactacaaaacttgaagaatatgcgcg

SEQ ID NO: 15623 - DNA, 245 bp, Glycine max
  Clone ID: 700962723H1
cctggcttggcctagcgcttattctctcgcattccgtggagatctagtgcttctgctgcaagacctcgctgaaaattagggtttcgattcggaggtagacgaagatgttcggaagggctccgaagaaaagcgacagctccaggtactacgaaatcctcggcgtttccaagaacgcttcgccggatgacttaaagaaggcttacaagatagccgccattaagaaccatcctgacaaaggcggggat

SEQ ID NO: 15624 - DNA, 260 bp, Glycine max
  Clone ID: 700962725H1
atcaatgatggctcagcttctccacactcccttcatcccctcctcctcctccgcgctccgccgcgccgccaccattccccaccgcaaaacgacttctcgcctcgtcgttcgggccaagatccgggagattttcatgccggcactgagctccaccatgaccgagggcaaaatcgtctcctggaccaaatccgagggcgacaagctctccaagggcgacacgtcgtcgtcgtcgagtccgacaaggccgacatggacttggg

SEQ ID NO: 15625 - DNA, 269 bp, Glycine max
  Clone ID: 700962726H1
acccacaccgctctctctctctccacaactctttctcaaacgctaggggttccttccatcgcatcttgatttcgcaacctcgtctagcaattctccatggagggtgctgggatggaagagaataatattattaatgatgataataagtctgatgcgcattttacttctgccgctgcttttgtggagggtggaattcaggatgcttgtgatgatgcttgcagcatatgccttgaagctttctgtgatagtgatccctccacggtgacaag

SEQ ID NO: 15626 - DNA, 266 bp, Glycine max
  Clone ID: 700962727H1
agatgagggaggtgtaagaaactggaaggagtaggtgttgttggcattctgacctaaagcttgtgtctttctgcttcgtttgtatcttctgctgcgtaaagaggatccctttctgattcttccgtaaatttcgtctctgaaactagggctaatacttcatctaccgatctctatattctggatgaaggtttgcttttgatccggcttgggagttttgatcgacttgattttaactccaacttttaagaaatgtcattccgcagcat

SEQ ID NO: 15627 - DNA, 266 bp, Glycine max
  Clone ID: 700962728H1
gttcattctctttgcgcagttccctacctctcctttcaagatgcagatcttcgtcaagaccctcaccggaaagaccatcacccttgaggtggaaagctctgacaccatcgacaacgtcaaggccaagatccaggacaaggaaggaattcccccggatcagcaacgtctcatcttcgccggaaagcagctcgaggacggccgtaccctcgccgactacaacatccagaaggagtcaacccttcaccttgtccttcgtctccgtggtg

SEQ ID NO: 15628 - DNA, 266 bp, Glycine max
  Clone ID: 700962729H1
caaccatctcaaaacgggagaaatggaaggcgagtggagacacagagagagacagatagagacagagaaacaatgagaagaagagagagagagagagatagagagagagagtaatgcatggctgggttactggcatgggctgtaggatgtcgcggaggaaaagaggcggagtacgacggcatcatcgcaatcctgttttctgcagatcagcaaaagtacgtcaacgagctcgatcagaaggcgagctctctccggcgttggatcca

SEQ ID NO: 15629 - DNA, 253 bp, Glycine max
  Clone ID: 700962730H1
cttcaccttcctgggttttacttttcatattcctacttcatttggggtagtttaaaattggaacttcaaagtacaagcttttgagatttggaggttagctctttgcaaggaattgaattgttgcacctcattaccatctgtgacatctgaaattcaggtttcttagtattatttgagaccaacacaatggtgtctgcttgtgtgaccttgaaagccaatacccatttagtaaaatcgagaaaagacaatactt

SEQ ID NO: 15630 - DNA, 269 bp, Glycine max
  Clone ID: 700962731H1
gattgacgccgtggtcattgccaccggcgttcataccttctttgggaaagctgctcaccttgttgataccactaatcaagttgggcactttcaaaaggtgttgactgcaattggaaacttctgcatatgttcaattgctgtggggatggttattgagattattgttatgtatcccattcaagatcgagaatatcgccctggaatcgataaccttcttgtgcttcttattggtggaattccaattgccatgcccactgtcctctcagtga

SEQ ID NO: 15631 - DNA, 266 bp, Glycine max
  Clone ID: 700962732H1
caaaactctcctcagttatccctccaacagaagatcacacatggttctagttgcaagtcatggcgaggaggaaaagggggcacaaggcattgctgctgttgattttcgaggtcaccctgtggacaagacaaaaactggaggatggctagcagcagggctcatcttaggtattgaactggcagaaagaatatgtgtaatgggcataagcatgaacttagtgaactacttggttggagttttgaatctccttcagctgattctgccac

SEQ ID NO: 15632 - DNA, 275 bp, Glycine max
  Clone ID: 700962733H1
gaccttccaatgttgtcatgtcactacatccaaaacggcgtgttactcaccgccccgccctcctcttttgacgacttaatactttcttttaaacacactctttctatcgcgctctctcactttcccgctctcgcgggaaggtttgagaccgattccaacggttacgttaatattgtatgcaacgacgctggcgttgattttattcatgctatatcaaaacacctaactttaaacgccgtcgtttcgccgtccctcgttgatgttcacccttgctt

SEQ ID NO: 15633 - DNA, 183 bp, Glycine max
  Clone ID: 700962734H1
tgtgcccttctttttttatttgatttggcaaacacggctacttgtctccatatatgatggaccacttgtactgccggctttgtgcacaattatctacttgtaagaagtccaatttcgggcaacaacgtctgtaatgcagacataggtcattagcattgtaaatctccatgcgatatatgggat

SEQ ID NO: 15634 - DNA, 235 bp, Glycine max
  Clone ID: 700962736H1
caattttgggaagtgggtttttgattttgtgtggggttgttgttgttggtgggaaaatgagggtagataggattgaagagatcaacaccaatcttctccgccatgccaacgtcgacaccttcatcgtcttccgatccctcacccctctcctcgtcgccctcgccgacaccgtcttccgcagacagtcctgcccctgcaacctcagcttcctctgcctcctcgtcatcctcgacgg

SEQ ID NO: 15635 - DNA, 261 bp, Glycine max
  Clone ID: 700962737H1
tctctctctctctctctcttttctctgtgtgtgtgcgtggattggtgaatttgagattggagaagatgatgcatgctggacccggcggcatggcccaacaagcgaaccagcaatacgcacagcaacagcaacaacaacaacaacaagcctacatgctcatgccgacgcaggcacagccccctcagatgtgggccccatcggtccagtctccgtcccaatcggtagctcctccgaaacccaccagcgccgatgaggtccgta

SEQ ID NO: 15636 - DNA, 269 bp, Glycine max
  Clone ID: 700962738H1
caaaggtctctgtcttaatggtgaaaattgcatggttgttcgataaaactgttgtgataatgtacaacacaattatcgataacttatgcaaaaataatgtttgtttctgaaatggttggtaagaaaatttctttccatatcatcacttacaattccttaatccattagaataacaagtgggtttgttgactgaaatagttgaaaaacctaatgttattacttatcattcttagatattttttaatggatgggtattgtttagttataat

SEQ ID NO: 15637 - DNA, 270 bp, Glycine max
  Clone ID: 700962739H1
cacaaagcacaaagcaaagctcatccttgagttaaaaaatggcagcagcttcttccatggctctctcatccccatccttggctggcaaggccgtgaagcttggcccatcagccccataagtgggaagggtgagcatgcggaagaccgtcaccaagcaggtctcctcaggaagcccatggtacggcccaaaccgagtcaagtatttgggcccattctctggcgagcccccgtcctacataaccggtgagttcacaggctactacggctggg

SEQ ID NO: 15638 - DNA, 269 bp, Glycine max
  Clone ID: 700962740H1
ctcagatgacgccaccaccaatgcgaacgatttggaatcggaggattttcaggagatttcgtcgacggtgaatttcgcggaagagttcgagccgccggaggagattattccggcgaacatcgaacggaaagcgaacagcgtggagcttccgttttcgctgaggataatcaagaagaagctgcagtggaaggaagggttcagggaggcaggggaatccgcgtattgctctgtcaagaaagcgttctctcctcaggtttttataatcaggg

SEQ ID NO: 15639 - DNA, 90 bp, Glycine max
  Clone ID: 700962741H1
gtagatatctagagatctcattaagatgctcccacgatgtatattgttttcttttatatatatatatatatatatatatatatatatata

SEQ ID NO: 15640 - DNA, 265 bp, Glycine max
  Clone ID: 700962742H1
agaaccaatcaggattcagtttcatggggtcatcagaacttgatggaatcacacaaggaagtcctaaaaagccaaggaaccatgaaattctacgctctccaaaccgtgtcccttcaatcaacatggatgtgaaagccaatgaggcaaacaatgagcaacaactctctatggcacttgaaaggcagaatagggatggctacactttcatgggggacgaacaaacttcattagtggttttggacaaaccctatgggggaaattggta

SEQ ID NO: 15641 - DNA, 264 bp, Glycine max
  Clone ID: 700962743H1
aaaggattctacccgccgctcgatgggaattgcgcttcaaggcgtctcgtagggctaatccgcctcacgagggtcaccaacggcacgtgcctttggggggccgaggccccctactgctggtcggcaaacggacggcgggcgcagcgtcgtttttgccccggtttctgacttagaggcgttcagtcataatccaacgcacggtagcttcgcgccactggctattcaaccaagcgcgatgaccaattgtgcgaatcaacggttcct

SEQ ID NO: 15642 - DNA, 263 bp, Glycine max
  Clone ID: 700962744H1
cttttccctcgttgaaatgaaaatgggttcttctttgtggactatgtgtctaattttggcttcactagcctcttctgcattctgtgcctttccacggaggccagtggatgttccattcggcagaaactacgttcccacttgggcttttgatcacatcaaatacttcaatggaggttctgagattcaacttcatcttgacaagtacactggtactggcttccagtccaaagggtcatacttgtttggtcacttcagcatgaaca

SEQ ID NO: 15643 - DNA, 259 bp, Glycine max
  Clone ID: 700962745H1
gtcaaaagcacagtttgacagtatcatgtcatgggcaactggtggtggaggttcaaaggaataacctttttgttgccaactttatttttatttaagcaccttggtttctccgtctttcttggagacacacacacgctctctcatgactctaaccaacttacccaccaactaataatctttttaattccaaaaaaccaaacaatgcctctttttctcacttcacaacttttatttctgtttgagttctccaatggcagct

SEQ ID NO: 15644 - DNA, 90 bp, Glycine max
  Clone ID: 700962746H1
caccttccctctcttctgttaccaatggctccctcatcaaactacatttgtttgcttttcctcaccagccttttgtgtgctcttcaaatg

SEQ ID NO: 15645 - DNA, 211 bp, Glycine max
  Clone ID: 700962747H1
tgctctctcacgagaagaatactactaactgtgttgtaatacctcagtggagaacaagatgaatccatggaacatgagaacttccaagttactctctcaacaacttgcttatcctccttatcgcttggtagaagagattccaaacatgggaaattccagttgtgtgagcaaggagccaagaggttcacagatgacaatcttttatggtggc

SEQ ID NO: 15646 - DNA, 273 bp, Glycine max
  Clone ID: 700962715H1
aatttatttacactcccgccgacaccggcaccggcaccggcaccggcaccaaattcatttaggcccgtgcttggtttgacctacatgatcgccgaatcagttgtcttgagattgcgggattgatttgtgtggttgcagtgatggaactcttgtttggtaccggaagaaaagaaggacaactttgatcatagagagaataaaagcatgggattaggtgtgattaagaaagtagcggtaatgatactactgataatgtttctcagctaccctgta

SEQ ID NO: 15647 - DNA, 87 bp, Glycine max
  Clone ID: 700962677H1
agagaaaaaaaaaaaaaacagaccaacacagaaactcaaaaccaaaatagagttattatggatcacattcatgggttacgttgtttt

SEQ ID NO: 15648 - DNA, 238 bp, Glycine max
  Clone ID: 700962679H1
gagagagtagagtggtgaaggggaaagtgctttcttctctgagggggttcaacaaccaactacttttttttttcttcttggccaacaaatgctgtttaatgaaccatcaattcatttatctctctctctctctctgtctctctggctgctttttttttctttctttctaggttttaaaatttaagagaggtaatcccacacgctttgatcaaacgaaacacaactaaagaagaagggt

SEQ ID NO: 15649 - DNA, 241 bp, Glycine max
  Clone ID: 700962680H1
cttacctcttggcatggccattcaaatgtcttcttttgtctttgtttctcttacaattttattttgcttctcttccttggagaagagttttgcctttcaaacaacaaaggaggccacagaaagcaacaatcttcatcaatatactcatcttgttcacctcagctcactccttccttcatcttcctgcagctcttctgccaaaggtttcaaaagaaaagcatcattagaagtggtacacaaa

SEQ ID NO: 15650 - DNA, 239 bp, Glycine max
  Clone ID: 700962681H1
gaactaagtgtgaaccactaccaagaaacaagcttttaagtccaattatttttcatgagggtaggtttgctcaaaggccaactcctctagctgccctcttgaccttcctatggctgccaatggcatcatactctccatcttaagggtctaccttaacatccctttgcctgaaagaattgcttggtacaactacaagctcttaggaatcagagttattgtgaagggtacccctccaccgc

SEQ ID NO: 15651 - DNA, 236 bp, Glycine max
  Clone ID: 700962682H1
tgaaaattgcaaccatgttaatggtgatatagtagattatgcagctgctgggcttgcacaagtggcagaatttgcaggagcagaaacaaatggagaggccataactggtgttgttgtgtcacagaataagaacagtgtttactttgatgagcaacaagatgatgaagttgatggagttcaaaatggtgatgctttttggtctgtccatccaacaaatctgggggggagagactttg

SEQ ID NO: 15652 - DNA, 216 bp, Glycine max
  Clone ID: 700962683H1
attccgttcccatcgcatctgtaacaatggaagcgcgccatgcaactcttggtcgacgaacgttggaggaaattcggcaaaagagggccgcggagagattgagcaaaacctcttcgggaccagatctcgggcaggttcccagcacctccgagacttcgggaatgagcaaatccgagagcgcaaataggctctctgagacagttcttgaggctcaat

SEQ ID NO: 15653 - DNA, 234 bp, Glycine max
  Clone ID: 700962684H1
acactgttaataattattctgattcacgaaaaacaggaaaaccccaaaactctctttgttcacaatgggcacagagacctcatcggtagatgtttcggaacccctgctcttggatcctacgggaacgaggaaaaggaagagtatttgcgcgaagaggttccggagtggaaggagcagataacgataagagggttggtggtgagtgctgtgttggggagcttgttctgcatcatc

SEQ ID NO: 15654 - DNA, 237 bp, Glycine max
  Clone ID: 700962685H1
caaccaccatggccaatttcaaaactttcttcatttcccaaaccctaaccctaaccctccttttctccaccctagtgactgccacttaccaccacaacatctctccaagtcttgtacgttctcgtgagaagctgacccaccttcacttctacttgcatgaaatttttactagcaaaaaaccctcgaacatcgtaatcgacccccccaaggtggtagccagctctccacttccatttg

SEQ ID NO: 15655 - DNA, 238 bp, Glycine max
  Clone ID: 700962686H1
aaaaaaccaatccgtctgtaactgtcacgtacacacgcagtgtgtctcgtctcggcttagcaggtatcgctgattcattcatggaaccctttcgatttcaattgatgccaaattccctgtgcttactcgtttgccgcttcaaatgacgattaaggataatcttattttctcaatctctgaatgtgatgtcctttgcaataagaccaaggttattgataacgttcttcatgtaatttaa

SEQ ID NO: 15656 - DNA, 84 bp, Glycine max
  Clone ID: 700962687H1
ctctctttgactgttctccaccccagggtaatgcccacactaagttattcccaaaccacaccaatgtcgacctcttcaccactc

SEQ ID NO: 15657 - DNA, 238 bp, Glycine max
  Clone ID: 700962688H1
caaaaagggttgcaaggagttcgatgagtatggcatttccttcaaatccaaacccggtgctcttcccactatcgttttgctcgatcgaggaaattgcttctttgctttgaaggtatggaatgcacagaaggctggagcttctgctgttcttgtttcggatgatattgaggaaaagttgataaccatggacactcctgaggaggatgggtcatctgcaaaatacatagagaacataaca

SEQ ID NO: 15658 - DNA, 235 bp, Glycine max
  Clone ID: 700962689H1
tcttgctgttgctggggctgaccctttggaaatggcagaggattggaaccgcacagcccttcttgtgatcgacatgcagaaagattttatagaagatgggggtcccatgctagtaaaaggagggaaagacattgtcccaaatgttattaaggctgtcgatgttgctaggcagcgtggaattctcatagtttgggtagtacgggaacatgatcccttaggaagagatgttgaactc

SEQ ID NO: 15659 - DNA, 236 bp, Glycine max
  Clone ID: 700962690H1
tattgttatccatcctattcctatccacttgaggaagaaatgcatcatatctgtgtttgctgcaagggcttgactcctctacctcctcctcctcctccgcttcaccaaagacgaaacactctagtcattacttttgcttcaaagtctggaggaggattttcacttaactcgttactgaaaagttgtaaaagttgcggaggaaagggggcaattgaatgtcctggatgtaaggggac

SEQ ID NO: 15660 - DNA, 79 bp, Glycine max
  Clone ID: 700962691H1
gttctagatcgcgggcagccgctcgcgcggctcgagctgtttttgatttccccagtagcattctccatcttctccacag

SEQ ID NO: 15661 - DNA, 235 bp, Glycine max
  Clone ID: 700962692H1
ttcttctcttgcggctagggttttagcgcagttgcttctagtttctttgcagatttaaggaagatgggtaaggaaaaggttcacatcagtattgtggttattggccatgttgactctgggaagtccactaccactggccacctgatctacaagcttggaggcattgacaagcgtgttattgagagatttgagaaggaagctgctgagatgaacaagaggtctttcaagtatgcct

SEQ ID NO: 15662 - DNA, 236 bp, Glycine max
  Clone ID: 700962693H1
caaagaggaagaagacacagaaggagaggttcaacatcttcttcatctatggcgacgccggattctgacgctaccactcagcctcaagattccgacactgctcccaattccagtcctccaacgccctcgtccccgccgctcccgccgtttgcctccttcgcttcgccaccgactccgccggcggcgctctcatgggctccgtctttggatacggtgctggattgtttaagaagaaa

SEQ ID NO: 15663 - DNA, 237 bp, Glycine max
  Clone ID: 700962694H1
cttagacttagatggagtcgcgtggacactcaaacccgcttctgacattttccagcttcatccatcaacactgcgtccgcttagggtccgacctcgcgactcgtttggatgacacgaagcgagccctagctcaatctcatcataatcttgtcttccccaaacacgccctcgcccacgccgccactgctaccctgggctcccagcacgtggctaagtccctcgtcggcacctccgttt

SEQ ID NO: 15664 - DNA, 240 bp, Glycine max
  unsure (1)..(240): unsure at all n locations
  Clone ID: 700962695H1
ctttgaaatcctttctcagttctgcgccaactgaaacgcagatcgaactccgccgtagccatcatcaccgatcgaacttcgcaagacagagatcagattctgattccgacacagtaacagtgagagcgtcatcgacattctaacccgagtcgattccatttgcaagaagtacgacaaatacgacgtcgataagcaccgcgatgctaatgtctctgnggacgatgcctttgccagactcta

SEQ ID NO: 15665 - DNA, 243 bp, Glycine max
  Clone ID: 700962696H1
ttgacatctccaggcagaagtcaaggctctatacatatgatgatgtggtggagaaagtggctcaacaacttggtttggaagatccatccataattaggcttacccctcataattgctactctcaacaacctaaaccccaacctattaagtatcgtggtgtggaccatttgtctgatatgctggttcactacaatcagacttcggatatattgtactatgaagtacttgacatccctctgccag

SEQ ID NO: 15666 - DNA, 235 bp, Glycine max
  Clone ID: 700962701H1
tagttctagatcgcgggcggccgccctttttttttttttttacaccaacaaaagtacagaatataacatacatcaaataaaatagacagtatttcatcaatctttaaaaagctgtaaaaggtagctttgatataaatttacagtggataaaatacacgggaactttaccaatgtagccgcaaattttaaacaactcaaagcgcactcaaaggcgtcatgtcattctagatcgcga

SEQ ID NO: 15667 - DNA, 292 bp, Glycine max
  Clone ID: 700962702H1
ttcggctcgagagaaatttgagtgaggagctagagaatgatgatgaagtctgctatgtgtgcagtcgtggttgtaggacttcttctactggcggaggtggcgcccatggctgatgctgtgacatgcaccccaacagagttgagtccgtgtcttccagcaatcacttccggtgctaaaccttccagtgcttgttgcgcgaagctgaagcagcaaaaaccatgcttatgtggctacctgcaaaaacgctagcttgacgcagtgtgttaggtctgctaatgcccgaaaaaccgtt

SEQ ID NO: 15668 - DNA, 260 bp, Glycine max
  Clone ID: 700962709H1
gagtgagcgagcgagcgaggtagggttttcgttgttcccccgtctttgaattcagttcgcgacgatggggtccatccccgatccaggcgagttgagcgagttgactcagccgagcttcgacgagttccagcgccaaacttcccccatgaccagctgcaccctcctctggaaggagctctccgaccagttctcctccctcgagcaagtcctcaaccacaaatccgaagcccgcaaacgcaagattcgcaccctcgacaaca

SEQ ID NO: 15669 - DNA, 273 bp, Glycine max
  Clone ID: 700962710H1
gccgctaagacatttacagaccagaaaaatttaatggataagcatgcagaagatcagacagaaacttctcgtgcttcttcaactcaggagcaattaccaagccaaaaggaagctaatgttgacaaagctatggctgatgatgattgttcgagtgcaaaccagacagataatatcagcctggataattcttgttcagatggtgctgatgccccaaaagggaggccaatgtctcctggaactttagcattgatgtgcgatgagcaagatacaatg

SEQ ID NO: 15670 - DNA, 271 bp, Glycine max
  Clone ID: 700962711H1
ctcgagccgcaagaagctgagagttttgagttttgagatttgactcacgagaggagagtacatgtgtgggaagtagaagtagaagtagaaggagagaagcaccactacgtcagcgattcctttgcctttttcttctttcttagactcgaagacaagtttgatcctattttgagaatcgcattcagatggaaagcgcatcagagcttgtggaattcccgttgttgctgacaccaatcgattccaactacagagcttgcaacattccttacag

SEQ ID NO: 15671 - DNA, 125 bp, Glycine max
  Clone ID: 700962712H1
ctgagatcaaccttgcatcagggttagggaatggctgctatcttagctcggaaatcactccttgctcttcgtgcgcgccaattggctgtaagcggtcaagggctgcacagctcccaaaactatgg

SEQ ID NO: 15672 - DNA, 263 bp, Glycine max
  Clone ID: 700962713H1
cattcttctatggtcacacctcaccaagaaagtgtatttatttgatcgtctatgttgatgacataattatcagaaaaaatgctgctgctgcaatttctcagctgaaaaaacatctattcaggcattttaagaccatagaccttggatgtctaaaagtctaaaatacttccttggtatagaggtagctcaatcaaacaaaggcattgttatctctcagaggaagtacgctttggatattcctaaatgaaactggcatgagtgga

SEQ ID NO: 15673 - DNA, 264 bp, Glycine max
  Clone ID: 700962714H1
agagcctttcttctcttcccccattttttcctctttcttcctcgcctagctagctccagaaaattaggatctgcttcagatctagtgtttccctgtcccaaatcacgagtccattgagtttgattttgtggatgaaaagcatagatagggcttttgcaaaactctccaatgtttcttgaaattatatgaccatgcgtcgaattcgtatgctgcactccttctccgtcgtgttcctctagtggttctacgtttactcatgaactc

SEQ ID NO: 15674 - DNA, 238 bp, Glycine max
  Clone ID: 700962676H1
ctcaaccggcccaatttagcataagcccagcatggccaccgcaacagcagcagccacctcgtccttcatggggacgcgcctcctggaggcccactccggggcggggcgggtgcaggcccggttcgggtttggcaagaagaaagccgccgccccgaagaaagtttccagggggtcgggctctagctccgataggcccctgtggtatccgggcgccaaggcgccgaggtacctggatggg

SEQ ID NO: 15675 - DNA, 244 bp, Glycine max
  Clone ID: 700962649H1
ccttgcttcgctttgcttgcatgcttccttccccattcaaatctctctcagttgtttgttatttaattgaatttaattttgtgatcggaatcggaatcggaatctgagtggatgtggattgggtggtgaaccggtgaaagatgcgacgacgggctgccgagtatcggcgcccggcacgacggaggttttcatattggatctggcttctccttgctttctcctccatcctcggattgctcctctt

SEQ ID NO: 15676 - DNA, 243 bp, Glycine max
  Clone ID: 700962650H1
gaaacgcatacgcgcaatttctgttgttcagagctcttcaggaagaaaagaaaaacagagaaaaccaaaccctaattagaaacgatttcggaatccctaattcgcaaatcgcaaccctagttgtgctgtgcgttgttgtagtggtttttggaagaggaggcttgagctaaacgctgcgtttcgacgacgatgatcgtgagccagaacatggtgacggaggcggaaattatttgcaagcagaac

SEQ ID NO: 15677 - DNA, 242 bp, Glycine max
  Clone ID: 700962651H1
gaacctcatgctaccctaccataacggcgccctcctcaaaggaaccattaccgttaacctcttatggtacggcagcttcaccccaatccaacgctccataatcctcgacttcattaactcgttaagttccaccgcgggggccccacttccctccgtagcatcgtggtggaagaccacggacaagtacagggggggatccactacaatcgtcctagggaaacaaatcctagaacaaacttatt

SEQ ID NO: 15678 - DNA, 240 bp, Glycine max
  Clone ID: 700962652H1
aaagaatatttcaagagatgaaatgttaagagaagctcaagtagtggcctcttgttcctacgaaaataacacaaattggggcacagaggtgggattctcatatggcatattactagagagttctattactggctgtattcttcacagcagaggatggaaatcagcatatctttacccgaaaacaccatgtttcttaggttgtgctcccactgacatcaaggaaggcatgcttcagttggt

SEQ ID NO: 15679 - DNA, 240 bp, Glycine max
  Clone ID: 700962653H1
cttttcttttctgttttcattttacctgtgtttttgggagatttaaataggcttccctctgctttatggagataatatctgttttttaataaagaaatacaaatgccctctagctgaaaccttatttttttctttgatttattatatctaacttcaatgccttttctcttttgttttatccaatatatatctttggttcccttttagaacaacttgacttttgattcaggattggtgaat

SEQ ID NO: 15680 - DNA, 241 bp, Glycine max
  Clone ID: 700962654H1
caaactcagggtagggcagagagagagagagagagagagagagagagagagagtgggagtgtgggatatcgcggtgcatggtggcgctggtgtcgaccctaatgtcccactcgagcgccaagaagaagcgacacaagttgtcacgcgctgtgtcaatgtgggagtctgtgctctgaattctagtgttcgcggcatagatgtcgtcgaacttgtggagagggaattggaaacgggtgctctg

SEQ ID NO: 15681 - DNA, 241 bp, Glycine max
  Clone ID: 700962655H1
cactgaactctcttgctaatcgagtttctcactctgcaaaaaccttcaacgatggccgctgaaacgattccgtaccagaatggcgtcgttgccaactccaacgactcctccgccgcggtcaagaaatcgagggagagcgaccgccgccgccgccgccggaagcagaagaagagcaacaaggcatctgaggacccggttcctaactccgctgaagagagtgacgatgcgaaagagaacgacg

SEQ ID NO: 15682 - DNA, 234 bp, Glycine max
  Clone ID: 700962656H1
tatcaaggaggctgctaaagagaagatggtgcagctcaaggtacatagatcagtgagaggtatgagggcgtctatttacaatgccatgcccttggctggggttgagaagttggtggctttcatgaaggattttcaggcaaggcatgcctaaaggagtaacctcaatctgaaacaaatacttgcattgcatgaacctaatgcctgaaggattttatgctaataaagtgtttgtct

SEQ ID NO: 15683 - DNA, 241 bp, Glycine max
  Clone ID: 700962657H1
cttgagaaaaccgaaaccctaatcacgactccgagaaccctaaattcgcccaatccaaagtcccaaacctctaaaatcaaaccatgaaaagcgtagaggtggcgaagacggtgctcgaggtcgcgacgtggcttggaccgccgttgaacacacccaccatctccgccaccgcagtcatcccgtccccgctgcccccgcagccgatgtctgcccatccgaccaagatttggagtctctgcga

SEQ ID NO: 15684 - DNA, 239 bp, Glycine max
  Clone ID: 700962658H1
gcgagttttgacttttaagcgtggtttgcttttcaattcagcattttgtcgcttcttctattaattctaccaagcttcgctgattgatccatcttcgtcgacgaattgtgcattcctgtgctgtgctggtgatgggtatggtttggatttcaaatgtctttcttctcgggtaatgagatgcatcaagttttgaagtacagtgagcagggatggacattgctgctcttttaacttctgct

SEQ ID NO: 15685 - DNA, 240 bp, Glycine max
  Clone ID: 700962659H1
tttgggtggactggccagaaagcagatgaattgatcctaccagtcttaaaggagtataacaagcgtgagactcaattgcggttggaagcattttacaattttaatgaaagatttgcaaaaattcgtagtaaaagaattaagaaagcggtaaaaggaatcactggtaagcagccttcagatttgatagatgattctgtagaagagttctccaagagtaggaagactgggagagaacctgag

SEQ ID NO: 15686 - DNA, 241 bp, Glycine max
  Clone ID: 700962660H1
cgaaataattaacccatcagagagagagaggtaataatgggagtgataaaggatggcacaatctcaggggttctaccggaacctcaaggatttatggtgcactatcctgcttatccatcatccatctctcgagctgttgatactcttgggggaattcaagccatccagaaggctcgctgttccaaatccaacaaattagagcttcgtttccgtcctgaagacccctattctcaccctgcat

SEQ ID NO: 15687 - DNA, 242 bp, Glycine max
  Clone ID: 700962661H1
tagagaaagaactattggaggaggaagagagaaaacagagggaggaggtttcaaggttagtggaggagcgtaggaaactgagagatgaaaaagtggaagctgaaaaagatcacagcagatcatgaaatgtcagtaaggagaaggaccgtcagaaggaagctgaaaagaagcgtcaggaaaaaagaaaagagaaagataaggggtctagtaagagcaactctgatgttgaagaattggaaaga

SEQ ID NO: 15688 - DNA, 240 bp, Glycine max
  Clone ID: 700962662H1
aaacccaaaaacacttgatttgtaattttcctcttctcaatcttgtcttgggtttctcttgccgtgagattgaacatccaccatatgccacaagttgtgtaaagagagagtgaaggatcaagcaatgcataagatagagcctgctgacagaagatagagagcatagctgaacatacccaacagggctttgtgtatgagcagttgttctctcttttcttctatcaacatatcagttcctgg

SEQ ID NO: 15689 - DNA, 242 bp, Glycine max
  Clone ID: 700962663H1
gttcacaatcactttctgcgcttcactcactcccttcgtgcggttttctttctttgtcgaactcgtgcgaaaatgcgtgagattcttcacatacagggagggcaatgcggaaaccagatcggagcacgttctgggaggtggtgtgcgcggacacgggatcgattccacggggaggtaccagggggacaacgagttgcaactcgagcgagtcaacgtctattacaatgaagcgagttgcggaa

SEQ ID NO: 15690 - DNA, 244 bp, Glycine max
  Clone ID: 700962664H1
caaaggactaacccttccttggatctctttctacctcttttctccgcgactggtttcaatttgaacctaaggcagagaagccagagagtctcctctgccttagagaaactctcacaatggcgtttcaggactttgatctcatctcagagaggagaaggaacgagaagaggcaaaatgcgatgaagaggatcatgattggcgtggtctcttccgttgtcctcgatgccatgataggtgcagtact

SEQ ID NO: 15691 - DNA, 242 bp, Glycine max
  Clone ID: 700962665H1
gctctcagtttctcatctaacaatagtccattgtcaaagctagagtcaaactcatatgtgttaaggccacagcattctcttgaaattgctagtggctcgcctgaggatgattcttatttgacgatgaccttgatgacctgacacataagataagagagctggaaactgctatgctaggacctaatgcagatatgctagatatctacagtaatgtaattccagaacctgattcatttttgtta

SEQ ID NO: 15692 - DNA, 240 bp, Glycine max
  Clone ID: 700962666H1
ccaacactttgctggtgccactctttctgacttctcttccaaaaacacttcctccaccaaccttaaaaaaacagaggaaagccatgagtcgcagaaacgaaagtggtccaaagcttgacttgaagctgaacctgtccccaccgagggctgatcggagactggagtcaccgacacgatcggcgacggcgtcgcaacgtcaccgccgagctcgtgcgtgtcgtcggagctgaaccaagagga

SEQ ID NO: 15693 - DNA, 237 bp, Glycine max
  Clone ID: 700962667H1
tctttgtctctgtctctgtttctactttgaggcctccgttgttggtgggtgggtctttcttctctcaaaatggccaccggagtgaacagaaaaatttctgctgcatcagctcgggcccacacagaagggcaaagaaaaccaattccctttccctcccatcgggaattcttggaacagcactagcagtgttgtttattgggtttttagcatgggcttatcaggttattcaacctcccg

SEQ ID NO: 15694 - DNA, 236 bp, Glycine max
  Clone ID: 700962668H1
cggaacaaacgaattggcaatactgatagcaaaattgtacactggctcccatgacatgatatctctaaggaattcttaccatgggaatggtggtggaacgatggggaccacagctcaaagcatttggaaatataatgttgtgcagagtggtgttcatcatgcggtgaatccagacccttatcgaggccttttcggttctgatggagagaagtatgtaagagatgttcaagaaatca

SEQ ID NO: 15695 - DNA, 236 bp, Glycine max
  Clone ID: 700962669H1
gggtgactgagagatggacgctcccctgctgctggccaaaggcgagggggacgcgctggtgacggagaacggcgactacgtggcggtgagggagctgaaggaggtgaagaaggtgttctggattgagacgaagagagtgtggcagattgcgatgcccattgttttcaacatatggtgtcagttcggtgtgaattccgtgaccagcatgttcgttggacacctcggcgacattcagc

SEQ ID NO: 15696 - DNA, 237 bp, Glycine max
  Clone ID: 700962670H1
aaagcagcgattttgaagtctctccaaaccattatggttgtcttcctgctgatagtactctttagcagcaacaccaaagcagaaaaagaaacaatccacgaccatgcaaacaaaaagacctacataatccacatggacgagaccaacatgcccttaaccttcaccgaccacctcagctggttcgacgcctccctcaaatcagcgtccccctccgcggagattctctacacttacaaa

SEQ ID NO: 15697 - DNA, 239 bp, Glycine max
  Clone ID: 700962671H1
aatacatcaagccggtcctgcctttgattacttagagaatgctcttggtagatttggtgatgggccattctttcttggtcaattcagctgggtggatattgcttatgttccatttgttgaaagattccagctcgtctttgctgatgtgttcaagcatgatataactgaaggaagacctaaacttgcaacatggattgaggaagtgaacaagattagtgcttatacacagacaagagctg

SEQ ID NO: 15698 - DNA, 239 bp, Glycine max
  Clone ID: 700962673H1
gtctcggtcagagtttctcacagagaaaacaggaaagcgagaaccttcttaccccttcacctcttctctcttttcctatttctttctctcacgtttcgctccatcatccctcacacctcacccaccctacccccaccccacccaccttcttctttctctctttcttcccttttccctttagttttcgtttgttcttcccttgtgggttctcttgtttctctctgatctcatgaagaaga

SEQ ID NO: 15699 - DNA, 237 bp, Glycine max
  Clone ID: 700962674H1
tggaaatcgaagtgaaaagaacggttgaaagtgaaagagtaagatgctattgcaattgcgctgctctcattctcaccacaaactgacacttgcctgcagttgaagaaagaatagaggatcgggtcgatggcgtctgctagccttggaagtggtggggtcggcagttcgaggtctgttaatggtggcttcaggggttcttccagttccgtcgattggcttggcagagagatgcttgag

SEQ ID NO: 15700 - DNA, 242 bp, Glycine max
  Clone ID: 700962675H1
tctcgagccgctgcgagcggctcgagcagtatttccatggatgctcctaaatatagtaagtttatttgctttctcagctttccaattttgagttcattttaaataatttctcagctttccaattgcgaagtatatgatctttgtttgcctagtgtagtcaatttgttctgaaactttgctgattatagtttatgaaacccattttttatccttcaatagtaccaaccattgatgggaagacc

SEQ ID NO: 15701 - DNA, 223 bp, Glycine max
  Clone ID: 700962648H1
ccaggaatacttgcatcggctggaggaggctaaaaagtatgatcacaggattttgggtgtgaaacaggagcttattcttcatcatgaatggagtcctggaagctggttttttcttccacatggcgctcggatctacaacaaactcatggacttcattcggaatcagtacagggacagaggctatcaagaggtcatatctccaaatgtatttaacatggatcta

SEQ ID NO: 15702 - DNA, 246 bp, Glycine max
  Clone ID: 700962618H1
cttatctgctgttctagtttattagcattgggatcagtaactgcaattcccaatgcaaattttcatcgggcgccaaggagcactagtgtgcttctggttgttgtctgtgttttttgtggtaacaggatcaacaatgaagagcacaggacagtggaggtagttggcctaggagaatgcgcagactgcaggcagaacaatattaagaataaccacgctttctcagggttacgtgtgacggtagattgc

SEQ ID NO: 15703 - DNA, 248 bp, Glycine max
  Clone ID: 700962619H1
gagggttctggtggattgaattgcattagcaatgggcgtgtcttcaaattcaaaggaatcgatggaactatgcatatttgatttgaggagaggccaacacgaaggccaagagctcgataagatgctcttgttcttccccgccggtttgcccttctcaaagcaactctccgtcattggcctcagcgaaggactcatcagtttcactagaatcttctctccagactctgcttgcgaggtcatcgaagctg

SEQ ID NO: 15704 - DNA, 210 bp, Glycine max
  Clone ID: 700962620H1
gcggtggcagggtgtaagttaatccaacgtatcaggcaaatgtgttttgagaaggttgtcaacatggaggttagttggtttgatgagcctggaaaactcaagtggtgccattggtgcaaggtctcaggagatgctgcttctgttcgtgcgcttgtcggcgatgcgctgggactattggttcacaatttcgcaactgtactggcacgtttg

SEQ ID NO: 15705 - DNA, 247 bp, Glycine max
  Clone ID: 700962622H1
aatccctcactcttgttcttcagtctcctcctattgtccgccaccgtagccgccgccgaacggatcgacgatgaagacgaccttctgatccgtcaagtggtgccggatgcggaggaccaccacctgctcaacgcggagcaccacttctccgccttcaagacaaagttcggcaagacctacgccacgcaggaggagcacgaccaccgcttccgtatcttcaagaacaacttgctccgcgccaagtcac

SEQ ID NO: 15706 - DNA, 237 bp, Glycine max
  Clone ID: 700962623H1
ggcaacattttttatggcacttggccattacttgtatatatggtggcttcatggcatgggtttccatctagtagatgcattcatatttctagatatgcgtgcattgcttagtgcaatagtagatcgcaaaaaggctttatcaggctaaggatagctctaggaacacttcatgcagctcttcctgatgcaacaactgaggagctaagagcatatgatgatgaatgtgctatttgtaga

SEQ ID NO: 15707 - DNA, 247 bp, Glycine max
  Clone ID: 700962624H1
ggttaatagagaaattgctcagaaggatgcaaagggtctttacaaagcaggggagaagaaactgggaactgatgaaaagacttttatccacatattcagtgaacggagtgcggcgcatttggctgccgtagttcttattaccatgacatgtatggtcattcactgaagaaggcagtaaagaatgaaacatctggggcctttgaacatgcacttttgacaataatccaatgtgctgttaatccaggaa

SEQ ID NO: 15708 - DNA, 246 bp, Glycine max
  Clone ID: 700962625H1
aagccttcgaatctctctgaaacttttctcttctctttgattcttctctatcagttaaacattagaatgagccgttcacaggatccacacccttcccgatctttcttcccttttggaaatccttttcggatgatatcacctaaaggctctcgcatgtctccacaacttcttgcagtgttgcaagcttttgaggcaacattggcagagaggctgaaaaatcttatgcctaaaagcaaggatgaaatc

SEQ ID NO: 15709 - DNA, 249 bp, Glycine max
  Clone ID: 700962627H1
tcgatctcgagcgaatcggctcgaggcttggaaaagctagtggtctgaatgaatctgatgcaatggatgatgatgacgatgacgatgatgtggatgatgatgttggtgtccctcctgtcattgctacaaagaaaaggatgcccttaaggaagaacccattgacaatagcccttcaaagccaacagcaacaggacctgctcgtggaacaccttcttcaaagtcttcaaaggggaagagaaaattaaatga

SEQ ID NO: 15710 - DNA, 242 bp, Glycine max
  Clone ID: 700962628H1
atgagggccttccatggcttccgcttgtgcttcctctgcaattacagctgttgccatctctacgccgagttccgggcagaagaatggatcaggaggttgttttcttagtggaaggaaattgagggtgaaaaaggagagagcagcaattggaggacgatcgatgggcactacagtgtgcgcagttgctgagcctgacagacctctatggttcccaggcagcacccctcctccatggcttgatg

SEQ ID NO: 15711 - DNA, 244 bp, Glycine max
  Clone ID: 700962629H1
ctctacctgagaaggaggatccctgtgctagctcgatcagagatcaaagatgtaggagcggactcgcagcattctgatttgtgatgaccttggcttccatctccattgctggctgcaatgcaggtggcttgcagcatgcataagggtaggcatggtaagcatggtcgtcatatgtctgctcgtaatgtgacttacgacggtaagtcactggttcattaacggaagtcgcgagatccttttttcc

SEQ ID NO: 15712 - DNA, 99 bp, Glycine max
  Clone ID: 700962630H1
actcgagccgaagtcggctcgaggacaagaaaaaaaaaacaggccaactcggaaactcaaacccagaatggagttggttatggctcacattcatgggtt

SEQ ID NO: 15713 - DNA, 248 bp, Glycine max
  Clone ID: 700962631H1
gcttttccctcgttgaaatgaaaatgggttcttctttgtggactttgtgtctaattttggcttcactagcctcttctgcattctgtgcctttccacggaggccagtggatgttccattcggcagaaactacgttcccacttgggcttttgatcacatcaaatacttcaatggaggttctgagattcaacttcatcttgacaagtacactggtactggcttccagtccaaagggtcatacttgtttggt

SEQ ID NO: 15714 - DNA, 249 bp, Glycine max
  Clone ID: 700962632H1
gaaaaagtgagaagagaaatcaaaattttaagattgttcatgcatcctcacattattcgactttatgaagtcatagaaactccaactgacatatatgttgtcatggagtatgtgaagtctgtagagcttttcgattacatagtagagaagggtaggttgcaggaagatgaagctcgtaatttttttcagcagataatctctggggtggagtactgtcacaggaatatggtggttcatagagatttgaag

SEQ ID NO: 15715 - DNA, 246 bp, Glycine max
  Clone ID: 700962634H1
gtagagtcacgcatcaaattcccatcacaaccatcttacttacacaataagcacctctcattaatttctgattttctctaacatggctatggtggtcctcacaccccttttggccatactcggtattctcctacttagactcatctgtgacagcctctcatgttactggctcacaccactacgcataaaaaagacgatggatatgcaaggtgtccgtggccctaaacctcgtttcttcaccggcaa

SEQ ID NO: 15716 - DNA, 245 bp, Glycine max
  Clone ID: 700962635H1
ttccttttcatcattctcatatcctcaatcaccccccctcgcactcgctcttcgcttcctctggtggcgacaatgtcgactcctgctaggaagaggctgatgacagacttcaagatgctgcaacaagacccgcctgcagggatcagtggtgccccccaggataacaacatagtgctgtggaatgctgtcatgtttggtcctgatgatactccatgggatggaggcacgttcaagttgacactcca

SEQ ID NO: 15717 - DNA, 242 bp, Glycine max
  Clone ID: 700962636H1
gaacagtctaatgcaacaccatattgcacttcctcctgataacatgggaaagattacctacattgcaccacctggccaatattccataaaggatactgtattggaacttgagtttcaaggtgtcaaaagaaattcaccatgcttcagacttggcccgtacgtacaccaaggcctgttgcatcaaaacttgcagctgatactcctcttcttactggtcagcgtgttcttgatgcccttttccc

SEQ ID NO: 15718 - DNA, 241 bp, Glycine max
  Clone ID: 700962637H1
ggggtatatttagggggaggaggatcaatcacttagattccacaaaaaagatatgtattgccagtttgaatgtgatgccaaatgatagagattttccaacagctgtcatgactttgtgtgaaactggtgttcacctaagcgcatggatgaagagttcattgaccaagatcaccatatggtgagtaggcattttgatggcaaagacactatttttgaccagacacatttgggtttactagta

SEQ ID NO: 15719 - DNA, 244 bp, Glycine max
  Clone ID: 700962638H1
cagttcagccgcacgacctcctcccaagtcccaaccctccctctccctcacgccttgctctctcagccaccgggaggtcagccgtcaaggaagaaagccatcgcgagcacatccagcatacgaccacgaagccactgcagtcagtcacttcgtcgggacgctaccgcttgtcacccatttacgagctcacaccgtcgcgattccaccgccgacagccagtgtgacccccagatgagtatcacta

SEQ ID NO: 15720 - DNA, 78 bp, Glycine max
  Clone ID: 700962639H1
ggcgaacatatttgattgctgttagtttcccaggttatgtagactatgtgacaatgcagcattgtttggatttgcccg

SEQ ID NO: 15721 - DNA, 242 bp, Glycine max
  Clone ID: 700962640H1
cttgggaagaacgctcgctcgcactgtccagatcttactcaatacgagtgagttttgtttttccagccatgacgccgcttatcctggatgctgggaaaaccgacaaaaattcttacaagacactcatcgcagccgagtatgctggcgtccaagttgattctgccgctaattttgagatgggtgtctccactaaaactcctgaatttctcaagatcggtcctattggcaaggttcctgtggtg

SEQ ID NO: 15722 - DNA, 245 bp, Glycine max
  Clone ID: 700962641H1
caccgatctctaggagaggatggattatcagtacattctaggagggattatggcttgtagttttgcttttttgtatgttgtgtacagttttggagcaaaggtcacagattcaagttcaatacatgtgaagagtaatgaatgtgcaaagatatcatcagagaatggaatatgctcacatgaggatgcaggaagtgctgacatcattattgtgggtgctggggttgctggttcagctcttgcttgca

SEQ ID NO: 15723 - DNA, 242 bp, Glycine max
  Clone ID: 700962642H1
aaacaactctttttcttcttcttactacttgtttttcttcttcaccattctcaattcttttcttcttcttcttcttctaacatgggaccctcttccaagcacactcctcgttcccccacgtacttgattccctgcgttatagctcttgctctattctccctcaccggactcctcctctacaaggtggacgacgttgcttctcgcaccggaacggggtgggtcacaacctagaaccgacgccg

SEQ ID NO: 15724 - DNA, 242 bp, Glycine max
  Clone ID: 700962643H1
gatcggtggatcaggaatggacctgaggagcaaagcaaggactctcccaggaccagttagcgacccttcaaagcttcccaagtggaactatgatggttccagcacaggccaagctcctggagaagcagtgaagtgattatatacccacaagccattttcagggatccattcagaaggggcaacaatatcttggttatctgtgatacttacactccagctggagaacccattcccactaacaa

SEQ ID NO: 15725 - DNA, 242 bp, Glycine max
  Clone ID: 700962644H1
gggcaatgcttggtgcccttggctgcaccttcccagagatccttgagaagaatggtgtcaaattcggcgaggccgtgtggttcaaggccggtgcacagatcttctcagagggaggccttgactacgtgggcaacccaaacctgatccatgctcagagcatccttgctatctgggctgttcaggttgtgctcatggggtttgttgaaggttacagagttggtggaggaccacttggtgaagga

SEQ ID NO: 15726 - DNA, 243 bp, Glycine max
  Clone ID: 700962646H1
aacacaacaccttttccttttcccttccgttggtgccattcgtgcagcaccggatcctctcatttctccggcgataactctcccttttccggcgaattcaccgcttcctcgatatgaatcccgagtatgactatctgttcaagctccttctgattggagactctggtgttggtaaatcatgccttcttctaagatttgctgatgattcatacattgagagctacataagcaccatcggagttg

SEQ ID NO: 15727 - DNA, 242 bp, Glycine max
  Clone ID: 700962647H1
gtggaaaactcagttccacgagtcttcaacaacaagaagtgtctttgaaccggcctccagctttaataaacgttcatttggtatgcagaagagaaacatctccatggctaccattaaaagaggttccttatcgggtttgggttcaatggagaaatttcgcgttcacaggtgctgtcaaggagatgctatgcgtcacctcagatctccccccacaccaggaaattggaatgccttctctctca

SEQ ID NO: 15728 - DNA, 253 bp, Glycine max
  Clone ID: 700962616H1
atccaaccatcaagtctaaaatcgacctgtctgacaaagatattagcaagaaaaatcaagcccggtttcagatcacagaagcactgaaggcaaagcgggctgaacgagtagagttgatttctcaggtcaagtctctaagaggcgacagtaggcaatttcagagtattgtggatgagaaattgaaagagattggacctctgcagcaagcactgggcaagctgcggactacaaatgatgccggccggggtggttt

SEQ ID NO: 15729 - DNA, 242 bp, Glycine max
  Clone ID: 700962576H1
gcaaagggtaggcattgacccctttgcacaaaggaaaagaggggtggtgttgtgttaaaaaaatattgaacttggttggttctaagtagaaacaaaaattgtcattttcccatttctgcatttttggtttgggagaggagaaaccaagaattaagaaatgggttgctccgtaagagtttgttgtgtcttatttttggtgttgttggtggcatgtgttagaggggaggacccttatagattct

SEQ ID NO: 15730 - DNA, 242 bp, Glycine max
  Clone ID: 700962577H1
agatggtcttgtctgtaccgctcgtaagccctggattgctgttgggatgcggaacgttgactataagagagcccgtcattttgaagttgatttgtctgctttccggaatgtacttgagatcgacaaagaacggatgattgcaagagttgagcccctagtcaacatgggtcagatcagcagggtgactgtacccatgaatctttcccttgctgtagttgcagagcttgatgatctaactgtcg

SEQ ID NO: 15731 - DNA, 245 bp, Glycine max
  Clone ID: 700962578H1
gatcaaccttggatcaggtttagggaatggctgcaatcttagctcgaaaatcactccttgctcttcgtgcgcgccaattggctgtaagcggtcaagggctgcacagctcccaatactatggccttcggttaagtgcacactccttctctaccaaaagagaggatgaggaaagggagcaactcgcaaaggacatttcaaggattggagttctgtctttgaacgtagcattaacactctctttctca

SEQ ID NO: 15732 - DNA, 248 bp, Glycine max
  Clone ID: 700962580H1
caagaatatcacattggtctcttgtcttcctcctcatctctacacttatccacatacagcccagcctctcaagcccaagcccaagcccaagcccaagcccggtcatgaaatccttctgcagcagcacccagtacccagccctctgcgtctcatccctctccgtctacgcctccagcatccaacaggaccctcaccaactggttcagacagcactctccctctccctgaaccgcacccaagcgaccaaa

SEQ ID NO: 15733 - DNA, 98 bp, Glycine max
  Clone ID: 700962581H1
gttgattaatcaggacaagaacaaatataacactccgaaataccgatttgttgttcgctttagcaacaaggacaattttgcacaaataatatctgcta

SEQ ID NO: 15734 - DNA, 244 bp, Glycine max
  Clone ID: 700962582H1
gcagacttaacaacagcacaaagcgggttactgtctgttcaagctaccatctctctctctctttcttagtgcctccttgccagaagttaaaatggcccaagaaactttcctattcacatctgaatcagtgaacgaggggcaccctgacaagctctgtgaccagatctccgatgctgtgctcgatgcatgcttggagcaggaccctgacagcaaggttgcctgtgaaacctgcaccaagaccaac

SEQ ID NO: 15735 - DNA, 245 bp, Glycine max
  Clone ID: 700962583H1
cgggtatgttggcttcattaatggaagtggtacggacaacagttgcctgtgaatgtgtttatgtacgagccatggtgatcaaggcattaatctggatgcaaggtccatttgactcatttgatgaactagaatttattattgcatcggaactttctgatccagcttggccagcagcactattgaatgatgtactactcactttgcatgtacgttttaaggcttctccagatatggctgttactctt

SEQ ID NO: 15736 - DNA, 244 bp, Glycine max
  Clone ID: 700962584H1
gtgctggagagttggaaagtggaaatgcaggagagccagcaaaactgatcagacagagataccgtgaagccgcagacatgatcaagaagggaaagatgtgtgctctcttcatcaacgatcttgatgcaggagctggtcgtcttggtggaactacacaatacactgtcaacaaccagatggtgaatgccaccctcatgaacattgctgataaccccaccaatgtgcagcttcctggtatgtacaa

SEQ ID NO: 15737 - DNA, 247 bp, Glycine max
  Clone ID: 700962585H1
gaaagcagcgattttgaagtctctccaaaccattatggttgtcttcctgctgatagtactctttagcagcaacaccaaagcagaaaaagaaacaatccacgaccatgcaaacaaaaagacctacataatccacatggacgagaccaccatgcccttaaccttcaccgaccacctcagctggttcgacgcctccctcaaatcagcgtccccctccgcggagattctctacacttacaaacacgtggcc

SEQ ID NO: 15738 - DNA, 209 bp, Glycine max
  Clone ID: 700962587H1
gggttattgatgttgccaaagatatgtgcaggctttttaagatggacccagagactagtataaaatttgtggagaacagaccatttaatgaccagagatactttcttgatgatgaaaagcttaagatcttgggttggtctgagaggaccacttgggaagagggcttgaagaaaaccatggactggtatatcaacaattctgattggtgg

SEQ ID NO: 15739 - DNA, 247 bp, Glycine max
  Clone ID: 700962588H1
cacaaatcttagccgccattgatttttcctcttccatttctcttactttctcagcctttttcgattacccatttggttatttcgccctaatggctcttgctccatccaaagtttccaccttttctggtttttctcccaaacccagtgttgggggtgctcagaaaaacccaacttgctctgtttctctgagctttttgaatgagaaacttggaagcagaaaccttagggtttgtgcctcaacggtgcc

SEQ ID NO: 15740 - DNA, 243 bp, Glycine max
  Clone ID: 700962589H1
tgagtagcagaagagaagagaagatgggatctgtatgtatctgagactgtgcatcaccccattccctgttgcggttgattcttgaggacaggcagagataggattaacttaatatgacgacacgacaccattgcaatttaccattctacatttaggcaatgccagccacccaatagataatagcaataagtctttcttcacttcaactcgcactggtatttaaacaagtctgatgggttcaag

SEQ ID NO: 15741 - DNA, 244 bp, Glycine max
  Clone ID: 700962593H1
gaaaagaaaaaaaaatgcattcgtgcattcctcagcaccttcacttggcttcttccctaaaccccaaggcgtgtaattctcccctacgcaatttgaggatccgtgctgtttcaaccacacataatcacataccagctgctccagtttttcttcccgatagaccatggaaccagattcctggtggagttactgctgcggagggattcaaagctgcgggaatgtacggaggtttacgtgccaaagg

SEQ ID NO: 15742 - DNA, 244 bp, Glycine max
  Clone ID: 700962595H1
atcaattatgaaaccatgttggtcttcttccattccatctactcttcgcatggcatgacctcatcttcgcgtgttgtggcttaacgtgcgccggaaatggaggaggagcagcagacttttgtgtccaaagcgagaaccgcctttcattccgccgcggccaaagcggagcgcgttctcttggatttcaaatccgatcgagatcacgataaacaatcgtcgcccaacaccttcaccggccaacaac

SEQ ID NO: 15743 - DNA, 256 bp, Glycine max
  Clone ID: 700962601H1
ccccaacgcgatttccaacttcaggatttcggaaccattgagggagaaattgaaggagaagggtatcgagtcgctgtttcccattcaggccatgaccttcgacaccgttctcgatggttctgatttggttggccgtgctcgcactggtcagggtaaaactctggcatttgtgttgcccatattagagtctttaataaatggtccagcaaaatctgccacaaagactggctacgggaggactccgagtgttctcgtg

SEQ ID NO: 15744 - DNA, 273 bp, Glycine max
  Clone ID: 700962602H1
gcacgcacgcgtacggaagcagctcactctctctagtcctgttatttgtcagcgcgtaaagcatggctttgttggtggagaaaaccacgagtggtcgcgagtacacggtgaaggacctttcccaggccgacttcggccgcctcgagatcgagctggccgaggttgagatgcccggcctcatggcctgtcggaccgagttcggcccctcccagcccttcaagggggcccgcatcaccgggtccctccacatgaccatccagaacgccgttctca

SEQ ID NO: 15745 - DNA, 250 bp, Glycine max
  Clone ID: 700962603H1
cgccaacactgcagaagggttcattgccaaggcaatgacattccagaacactgccggtgctgagggacaccaagccgttgcattcaggaaccaaggagacatgtccgctctcgttggttgccacatcttgggttaccaagacaccttgtacgtccagaccaacaggcaattctaccgcaactgcgtcatctccggcacagtcgacttcatcttcggcacctcctccaccgtgatccagcactccgttatc

SEQ ID NO: 15746 - DNA, 249 bp, Glycine max
  Clone ID: 700962604H1
gctgttgtctcttggcttcaagattgtattcttgtcaggaagatatcttgacaaaatggccgtaacagaagcaaacctaaagaaggctggcttccacacatgggagcagttaattctcaaggatccacatgctatcactccaaatgcactttcatacaaatcagcaatgagagagaatctgttgaggcagggatacagaattgttggaatcattggagaccaatggagcgatctgcttggagaccacag

SEQ ID NO: 15747 - DNA, 246 bp, Glycine max
  Clone ID: 700962605H1
gtggaatcagtttcttcatcacctataaggatttcagatgcagataagtttacagacaaggttattattgggaaagatgatcctcatgatattgctgctgtggatagtccaagaagatgctcagatcattgggatgatggtgggagtgatcgatctggaacagctaaggaggatgaatctttcaccattgcccataggtcagattttcgagacaagggtgttaatcacatgtctggtactaaactt

SEQ ID NO: 15748 - DNA, 91 bp, Glycine max
  Clone ID: 700962606H1
ctctttgactgttgtccaccccagggtaatgcccacactaagttattcccaaaccacaccagtgtcgacctcttcactactcttcctcgtc

SEQ ID NO: 15749 - DNA, 249 bp, Glycine max
  Clone ID: 700962607H1
gagaaaagttagggttcacaacttttgcttttccttttgcttgcgaatctgagtcaaataatcaatcatccattcattattcatcaagtcgtcggcgaagaaaatcacgctgaagagttcggacggcgaggtttcgaggtggaggaggcggtggcgctggagtcgcagacgataaagcacatgatcgaggacgactgcgccgacagcggcatccctctgccgaacgtgacgagcaagatcctggcgaag

SEQ ID NO: 15750 - DNA, 249 bp, Glycine max
  Clone ID: 700962609H1
tcttcctcggaaaatggacagggaccatctgcagatcgcaatgctggcatcccttcaactagtggggttgattctgatttaacttctgaagatgaagttgtccgtttgttgaactgctctgatcattatgcagcactgggattcacgcggtatcaaaatatagatgtttcaatactaaagcgggaatataggaaaaaggcaatgttggtacatcctgataaaaatatgggtaatgagaaggctgcagaa

SEQ ID NO: 15751 - DNA, 247 bp, Glycine max
  Clone ID: 700962610H1
attcatgaatcgaaaagttgggtctctagttgtcccagcaggatctctatcagcttttctcatcattaccattctcctctttacttccctaaatgagaaactcactgtgcccttagctcggaaactgaccacaatgcccaagggctcacaagtctccagagggttggaattggactcgttttctccagtgttgccatggcagttgctgcaattgttgagaaagaaaggagggcgaatgcagtaaaaa

SEQ ID NO: 15752 - DNA, 248 bp, Glycine max
  Clone ID: 700962611H1
atcacaaataactgcacctacacggtgtgggccgctgccgtgcccggcggcggcgcaaggcttaaccctggcgaatcgtggaacatcagcgtgacgaacggcacaacaggaggacgcatctggggtcgacaaactgacaccttcgacaacgcgggacgcgggaagtgcctcaccggcgactgcgagggtgttctggagtgcaacaaaacaggtacacccccgaacacggtcgttgatttcgcgttgaa

SEQ ID NO: 15753 - DNA, 248 bp, Glycine max
  Clone ID: 700962612H1
caatgctaaagatcacatctttggacttgttctgatgaatgactggagtgctcgagatattcaggcatgggaatatattcctcttggtccatttcttggacaagagttttggcacaacaatatcaccttggattgtgaccttggaagcattagaaccttttgccagtgaagccccaaaacaggatccttctccagttccatacttgactgagaaagaacccaaaatctatgatatttccctagaggct

SEQ ID NO: 15754 - DNA, 92 bp, Glycine max
  Clone ID: 700962613H1
atgtttattttagggtgatgtttagtaattgcgtttgtttgagtaatattgtatttagggtaagatttagtaatatgggtgatgttcagaat

SEQ ID NO: 15755 - DNA, 245 bp, Glycine max
  Clone ID: 700962575H1
gaaacttcaagtacgtaaacaccatcaaagcagcggttgagaaagaatgccccttgacggtttcatgcgctgacattgttgctctttctgctagagatggcattgccttgttgggaggaccaagcattgaaatgaagacagggcgaaaggatagcaaagaaagctatgcaacggaggtggaagccttgattccaaaccacaatgattccatgtcctcagtgctgtctcgttttcaagccattggc

SEQ ID NO: 15756 - DNA, 248 bp, Glycine max
  Clone ID: 700962614H1
gtcgacatggttgagaatcggcttgtaggtatgaagagccgtggagtgtacgaaactccaggaggaaccattctgtttgctgcagcacgcgagttggagtctttgacacttgatcgtgaaacaatacaagtcaaagattcattagcccttaaatatgcagagttagtgtatgctggcagatggtttgatccgcttcgggagtccatggatgcctttatgcagaagatcacggagaccacaacaggttc

SEQ ID NO: 15757 - DNA, 253 bp, Glycine max
  Clone ID: 700962537H1
ggaaattgatggtaggtttctgaacactggcctcctccttgtggccacaatccttgtagccaaactcatctcagctttcatagtgcccaagtccagaaagagggtacccccaattgtgaaggggtggcccttaattggagggctaatccgtttccttaaaggtccaatctttatgctccgtgaggagtaccctaagcttgggagtgtcttcaccctcaagctcttccacaagaacatcaccttgctcgttggc

SEQ ID NO: 15758 - DNA, 254 bp, Glycine max
  Clone ID: 700962538H1
atttctctctctctctttttctctgcaaaacaaaaatgtctcacttcggacgttcgggtcccccagacatttccgacacttactctcttctcgttctgaacatcaccttccgtaccaccgccgacgacctattccctctcttcgacaagtatgggaaggtcgtcgacatcttcatccccaaggatcgaaggactggtgaatcgaggggttttgcgttcgtgcgttacaagtatgctgatgaggctcagaaggcc

SEQ ID NO: 15759 - DNA, 251 bp, Glycine max
  Clone ID: 700962539H1
gttcttaagcattgaaatttgtcttgtagggtggctatgttgatttatgccgtggtgtttggaggatccagggatctcttgctgtgtctaggggaattggagatagacacctgaaacaatgggtgacagcagagcctgagaccaaagttctcagaattgaacctgaacatgacttgttaatcttagcttcagatggattatgggataaggtatagaacttgaccatttcacttcaatgttaatagtgtctt

SEQ ID NO: 15760 - DNA, 252 bp, Glycine max
  Clone ID: 700962540H1
acaaagcattgttagcgccagaggattctatagaagacgagagttgtagccttagtgaggtggaagaagcaaaagcagtactaaggctggttcctatttgggctacaactctggtttatgctgtggtgtttgctcaagttcctacgttctttaccaagcaagggattactatggagagaacaatatttcctggctttgacatacccgctgcttctcttcaaacgcttgtcactgtggccattgtcctgttca

SEQ ID NO: 15761 - DNA, 253 bp, Glycine max
  Clone ID: 700962541H1
aaccaagtggaatcaatagccatgaagatcgttcggaaagacctcgtacccaatggacctggcagcgttaagatggttgcagtggattcggatgatctctggtttgcgtataacctgatagctcccggagactctgtcatggccgttactgtcaggaaggttctaagagaagctgctagtggcggacgggaagcagaacgcgtcaagctcaaattggaaattaaagtccaagagcttgctgattatgacaaag

SEQ ID NO: 15762 - DNA, 249 bp, Glycine max
  Clone ID: 700962543H1
aaacattgtaagcgctgtaacagcaggtttcggaggcttttggggtagccgacgagacacagtggattccttaattctccatggatatggagatgaaagaaggtgaagcccccgtgttgtggttcgaaacctctgactctgtctgtcgtcgacaccagtttgaacccgatggtcaactctccgtagtgattgtcgatgattccaggcccttataccaaagggtggctggatctttcatgaataaatttt

SEQ ID NO: 15763 - DNA, 250 bp, Glycine max
  Clone ID: 700962546H1
aacacaacaccttttccttttcccttccgttggtgccattcgtgcagcaccggatcctctcatttctccggcgataactctcccttttccggcgaattcaccgcttcctcgatatgaatcccgagtatgactatctgttcaagctccttctgattggagactctggtgttggtaaatcatgccttcttctaagatttgctgatgattcatacattgagagctacataagcaccatcggagttgattttaa

SEQ ID NO: 15764 - DNA, 249 bp, Glycine max
  Clone ID: 700962547H1
ctcccctttgccgctgttgttgttgctgcaccaccgaacaacttcccctgtaaatcgcgtttcgtttgtgcaaggttttaaaagacggctgatgctgaggacattcaacctcttgttgttgataatggaactggaatggtcaaggctggttttgcaggtgatgatgctcctagggccgtgttccccagcattattgggagaccacgccatactggtgtaatggttgggatgggtcagaaggatgcttac

SEQ ID NO: 15765 - DNA, 209 bp, Glycine max
  Clone ID: 700962550H1
tgcataggagagaagaacatcaatggtgaggattgcttcatcttgaagctttgtactgaccctgaaacattgaaggctcggagtgagggtcctgctgagatcataaggcatgtcttgtttggctactttagccagaagactggacttcttgtacacattgaggactcccatctgacccgcatccagtctaatgggggcgatcaatttat

SEQ ID NO: 15766 - DNA, 247 bp, Glycine max
  Clone ID: 700962551H1
atatccccccctagctacagagcagccaaaggggaggaataataataagcctatattctaaggccggaaaaataaaaaaggaataacaaaaatgtctggaaaggtaattatctcggctgtttctttcatcctggtggttggagtggccataggtgtggtggtggccgtcaacaagaagggcgaggatcccacacttcaatctcagcaaaaatcagtaggggttatctgccaaaacactgatgaccag

SEQ ID NO: 15767 - DNA, 229 bp, Glycine max
  Clone ID: 700962552H1
ctcatcacttactggaagccttgttgtgagtaagagaaaaggcttcctgcaccgagcacaccaacttgatacctctgattctttctttgcttagaattccacagaatatggagactgttcttttcaatcactccccacctttggaattcaagggtttgagcaaggaggaggaagactcattgctagggcaagtggaaatatggaggtacatgacatgcttcacggactc

SEQ ID NO: 15768 - DNA, 251 bp, Glycine max
  Clone ID: 700962553H1
gagctatgccaaagcgtacagctatgaacttccagttgctgttgccattgttatttcgggcatgtatgaggatgatctggataatgctgaggatgttgtgtacactggtcaaggtgggcataatctgactggtgataagcgtcaatttcgggatcaaaagttggagcgtggtaacttggctctgaagaattgttctgagcaatgtgtgcctgttagagtcattcgtggtcatgaatcttcaagcagttaca

SEQ ID NO: 15769 - DNA, 251 bp, Glycine max
  Clone ID: 700962554H1
gaaatagcagagggcacatcacctaattgtccaggcttgtccaccttgattttatctcataatttgatcagtcatattcccaagtgttttttcagacacatgaatgctctaacactacttgatttatcatataattatgagttaacatctttgccaaagtctctgtctaagttgaggtctcttacttctttagtgctccgtcaatgttcaaaattgaaagatatacctccactgggagatctacaagcatt

SEQ ID NO: 15770 - DNA, 248 bp, Glycine max
  Clone ID: 700962555H1
ctaaaaagcgctgtttgatgagcctgcgtagtattaggtagttggtcaggtaaaggctgaccaagccaatgatgcttagctggtcttttcggatgatcagccacactgggactgagacacggcccggactcccacggggggcagcagtggggaatcttggacaatgggcgaaagccggatccagcaatatcgcgtgagtgaagaagggcaatgccgcttgtaaagctctttcgtcgagtgcgcgatca

SEQ ID NO: 15771 - DNA, 80 bp, Glycine max
  Clone ID: 700962556H1
gcaaagtgattgattccagttccaatggccttaggcacaagagccttgatcggaaggaaggttcttgtctcacccccaac

SEQ ID NO: 15772 - DNA, 247 bp, Glycine max
  Clone ID: 700962557H1
tatttttctcactgtctctccagagaacttgatagagagatggcagctgcaacatctggtgctgtgttaaatgggttgggatcttccttcttgagtggaggaaacaggagcctaacccttctgggcctctgctattggaggcaaagttggtgctgctgttactgttaatcccagaagactcattgtggtagctgctgctgcaccaaagaagtcatggctccctggtgttagaggtggtggcaatctc

SEQ ID NO: 15773 - DNA, 246 bp, Glycine max
  Clone ID: 700962558H1
ccgaaaccaagcattacaattcccaatttcatagaaacaccagaatcaataaaaacacataacaacaaaagcagtgaaaaatggcgagctcggtggagaaggagagtggcgcgagcgaggaaactttctctttggagctgcctgctccaccaggttggaagaagcagttcatcccaaagaaagctggtaccccaaagaaaaatgagattgtgttcactgcaccaacaggagaggagatcaataaca

SEQ ID NO: 15774 - DNA, 244 bp, Glycine max
  Clone ID: 700962559H1
acaagacataccttatagattggatcataatttgaacgtttgtgacataaattggatcaacattaacttgcaagttttgatgttttaaatgctcggagacagattttattgtatagtaatagtaattcttctcggattgcttgaggtagaagagaactttatttgtatggtaaatttttgtaggctcgatcaggattgtctctagtagaagatattaatatgcaagcggtggggaggcttggca

SEQ ID NO: 15775 - DNA, 246 bp, Glycine max
  Clone ID: 700962560H1
ggagattcaaagtctgtgttgttgtggaatgcgtgggaagaggagcaagagaaatggattgataggcatatgttagaagatgttgacttggataatcatagtgaggtaatgaatgaaactgctgacataccctctgatctgacaatgcctttacttagatatcaaaaggaatggttagcctgggctttgaaacaggaaagttctgcgagtaaaggtggaatacttgcagatgacatgggaatgggg

SEQ ID NO: 15776 - DNA, 248 bp, Glycine max
  Clone ID: 700962564H1
ctgttaccctagggctaggctagtagtatgaatggattatggatggtgaagattgattgattcaagatgactgcaactggagtggccgtgtcgttggggttggggacattctctaactgttactgttacccagtgcctgtaaaggaattgcttttttctacaacgcgcattcgcaatcggagtaggaagaagcgttttggttttggtcaaaaaaggttttgcgttggagctgcaaatgcaaatcatga

SEQ ID NO: 15777 - DNA, 251 bp, Glycine max
  Clone ID: 700962565H1
ttccaggcaaaatgcttggaaactggggaggcagtggcaattaaaaaggttttacaagacagaagatacaagaatcgtgaactaccagttaatgcgtgtgatggatcatccaaatgtgatctctttgaagcattgtttcttttccactacaagtactgtcaaactttttcttaatttggtgatggagtatgttccagagtacatgtatagagtcttaaagcactagagcaatgctaatcaaagaatgccta

SEQ ID NO: 15778 - DNA, 248 bp, Glycine max
  Clone ID: 700962566H1
ctcttaggcactttcttgttttctctctcaccctcatatccatcatcttccacacccatggagcgtcctctgagcaatcaataatcaagttacccacagaccaaccaagggtagagaaactgacccacttgcattttttctaccacgacatcttagagggcaagaacatcacggtggtgaaaatcatcgagccatcagcgagcgaggttcgtgaagcaactgggtttggaaccactttcatgatggac

SEQ ID NO: 15779 - DNA, 249 bp, Glycine max
  Clone ID: 700962569H1
gtctccgtcatagctgaacatattatttgatcatgtattcgttgacagtgaaacccttcttcacacctaatttagtttcttcttcttcaacttccacttcgtcctcttcgatttctctcgtgtcctttccatctcgttcggtctcatcaattagcttttccagaaatttaaagcccaaaggaagatttggtctcagagttgaagcatacgattcctccaataatgacaattccaacctcgccagtgctg

SEQ ID NO: 15780 - DNA, 249 bp, Glycine max
  Clone ID: 700962573H1
cactacgtcgctcgtcacggttccgtcagtgcttttccgccgccgacgcggttcaaacttgaaaagtttactccttaaaagggttagagataaataaaattagcgagttgccatctgcagttcaaaaggtgtgaaagcaaataagatgcagcatagaaatttgacttctggaaggccttctggaactgatggctccgattactcctaccgtatggtagtcgattcaaggtatcaactggttgcaaaggg

SEQ ID NO: 15781 - DNA, 252 bp, Glycine max
  Clone ID: 700962536H1
gattgatacacccttcttcgttcctcactcaccagccacagattctctcttctctattcagtaaacggctgttttgtatacgagctgtcccggtctcagcctctacatcccaaaacatcaaaacaactggttgggctccttgtatggcttcttcctcagttggtagaagagctacatattcaacacaatctgtatcgacaaatgagccagttgtatctgtagattggctttatgataacctgaaggagccag

SEQ ID NO: 15782 - DNA, 245 bp, Glycine max
  Clone ID: 700962574H1
gccaaacggaaggtcattagtaagactttccgtcgcctgcttgaggtaagtgagaaacaaacatttactggtccaccggaaaatgtcagagatcatgttatggctgccacaagggttcttaacaagggagacttccagaaggcttttgacattattgtgtctcttgatgtgtggaaatttgtgagaaatcgagacaccgtacttgaaatgctgaaggacaaaatcaaggaggaggcattgaggac

SEQ ID NO: 15783 - DNA, 269 bp, Glycine max
  Clone ID: 700962502H1
cggctcgaggttagccaataatgatacttaccgttttgtgtaataattttaataacgacaggaaaaaatagtagaaagtggtaagaatatgtattgtcagactgcttccgtccagataatcttctaggcttctttttctacctcaatgttaagttgattgtggctgagtgtgacattgaatgttaataatctagccatatttctttctcagacccggctcaagtattcacctgataacctactatattgcagtattttttaatttagat

SEQ ID NO: 15784 - DNA, 259 bp, Glycine max
  Clone ID: 700962503H1
gtttgaggcggagaatagctccaacagttcccaaattggaaccctagcattcgccattgccgccacctttccccacgcagcttttgttgtagcaaaagattgatattttcttcttcgtctataaaacccacacgtcaagtcacttctttttaactcaattttcggtcccgtagctctatattttctcattcgcagacaagaaaaatccaagcctgtggattagaaaggggttcattttgctgattctctagctatggct

SEQ ID NO: 15785 - DNA, 259 bp, Glycine max
  Clone ID: 700962505H1
cgcgcactttctctcttctctccgcatctccaactctctctctcacacacgcactctgaaacaaaaaaatagaaatagaaaaaaaaaacaaaagttaaaaaaaaaggttagttattcttcttcaaccacgccatggagggtcttccccaaggttaccgtcccaacgttggtgtctgtctcatcaactccgatgatcagatttttgtggcttctaggttgaatgtcccaggagcatggcaaatgcctcatgggggaattg

SEQ ID NO: 15786 - DNA, 253 bp, Glycine max
  Clone ID: 700962507H1
cttttggttaggtaggttcacgggtaggcatttttatttgcacgtttctctggtgagggcaagatcacagaattggtgtgagagagatgggttcgtccgtgaagctttcaaggagggccttggaaactgagatgcccggtatggttcagatgcaggaattgcaacgaggagctaagaatgccctgtctttggcccagggggtggtttactggcagcctcccaagcaaacgttggaaaaagtgaaagaacctgt

SEQ ID NO: 15787 - DNA, 236 bp, Glycine max
  Clone ID: 700962508H1
aaacatttaacaccagctcagccagaaaaacatgccaaaaatgtggtattaatatacagaacagaactattatgttacacatgtatctaagaataaaattaaagaagtaagtaaatgtgtgtatgttttagttttagatggtaagttgagggcgtataatattctcgctataagtatagagaagaagatatagccactttattatctccccggtatagaggcacatgaaggaaggg

SEQ ID NO: 15788 - DNA, 260 bp, Glycine max
  Clone ID: 700962509H1
gaaagcagcgattttgaagtctctccaaaccattatggttgtactcctgctgatagtactctttagcagcaacaccaaagcagaaaaagaaacaatccacgaccatgcaaacagaaagacctacataatccacatggacgagaccatgatgcccttaaccttcaccgaccacctcagctggttcgacgcctccctcaaatcagcgtccccctccgcggagattctctacacttacaaacagttggggcatggcttctccg

SEQ ID NO: 15789 - DNA, 253 bp, Glycine max
  Clone ID: 700962510H1
aagatgatcaacattattggagcacttgttctactctttgcatttctcttcctcagttgtgtgtatgcacaagacacaacaacccttgtgcctgcaatcataacttttggtgattctgctgtggatgtagggaacaatgactatcttcccacccttttcaaggctgattaccctccttatgggagggactttgttaaccaccaacctactgggaggttttgcaatggcaaattagctactgatttcactgctg

SEQ ID NO: 15790 - DNA, 252 bp, Glycine max
  Clone ID: 700962511H1
atcacaaataactgcacctacacggtgtgggccgctgccgtgcccggcggcggcgcaaggcttaaccctggcgaatcgtggaacatcagcgtgacgaacggcacaacacgaggacgcatctggggtcgaacaaactgcaacttcgacaacgcgggacgcgcgaagtgcctcaccggcgactgcgagggtattctggagtgcaacaaaacaggtacacccccgaacacggtcgttgatttcgcgttgaaccag

SEQ ID NO: 15791 - DNA, 253 bp, Glycine max
  Clone ID: 700962513H1
gcttcttcataattgagtctgaaaggggttctctattggcactgaatgatatagagagagaattatgagttggttgaataaaaataaaagtacttgtagtgatggtagtgccaataatgaatcttcttcaagtggaatagttggagaaagggataatcatcttgatcatgaaattgcacagctcacaaaacttaggtcaagtcctcatgagcttttgggtcgtgttgttcctggtaagatgaggttacctgca

SEQ ID NO: 15792 - DNA, 253 bp, Glycine max
  Clone ID: 700962515H1
gccatttgggagttaggttctgcacgctctgcttccagcgagtgttctttcttcgtttcaacaccttaatttgcacacgctgcttcttcagcttgagaaatggcacaagaaacctttctattcacatctgaatctgtaaacgagggtcaccccgacaagctgtgcgaccagatctctgatgcagtgctcgatgcgtgccttgaacaggaccctgacagcaaggttgcctgtgagacatgcaccaagaccaaca

SEQ ID NO: 15793 - DNA, 254 bp, Glycine max
  Clone ID: 700962516H1
tgctgttcaagtccttgactctgtgaatatcaccttgggtgctgaagatgaactaagacatgcagttgcatttgttcggccagttagtgtggcctttcaggtggtgaatgggttccatttctacgagaatggagttttcactagtgacacttgtggtagcacttcccaggatgtgaaccatgccgttcttgctgttggatatggagttgaaaatggtgtcccatattggctcataaaaaattcatggggagaaa

SEQ ID NO: 15794 - DNA, 261 bp, Glycine max
  Clone ID: 700962517H1
gtcagaaccaaaatcatttctctgaccctcaatccaatcacaacaaccttatccaattgcctcgtttctaccaatacaacacaatcaactccttttatttatttctacccatttttctttttccttacattatttcatcggaaaaaacaaaagatacgatcttatgatgaggggaagaacaagacatgaagaagatgagcaatctcgagctttgtaccagctctccgcgctcgttctcaacctccttcgctcgcctctgtg

SEQ ID NO: 15795 - DNA, 268 bp, Glycine max
  Clone ID: 700962518H1
attcggctcgaggtgctacatgcaaagctgccgaccgtgtcacgctactatgttagctgcctttcgtggagactgtatgttggcattggaagaggggagttgttgccatcaaaggatgtgcgccggttgttgttacagacatggctgctgcctctgatgaatgactacaactggctgcagcatggatgcaggtcatttgataggaaacttgtggaggaaggaattgggaggactattctcaccttgcctcttgaggatcaacaaagca

SEQ ID NO: 15796 - DNA, 206 bp, Glycine max
  Clone ID: 700962519H1
gtgcattaaatttcccgaaaggctaaaatatccattgcacctttctcttcctccgatggctaatctctcactcttgttcttcggtctcctcctattctccgctgccgtagccaccgtcgaacgaatcgacgatgaagacaaccttctgatgcgtcaagtggtgccggacgcggaggaacaacagctgctcaacgcggaagaccaat

SEQ ID NO: 15797 - DNA, 253 bp, Glycine max
  Clone ID: 700962520H1
gtggaatgaatagcaataccaccggcgctgcagcaatgaacgaccagctctccaacaccacctccatcttcggcctccgcctatgggtggttctcggggtgtgcgtgggcgccgccatcgtcctcatcctcttcctcatctctgtctggctcgccttcaagcgctcttccaaaaccaaccctgtttccatccccgacgtctccaaagagatccaagaaatcaggctcgacaccaaccccactctccaacccga

SEQ ID NO: 15798 - DNA, 253 bp, Glycine max
  Clone ID: 700962521H1
gtttatgcattggtgattactgattagctagcagtagcatcgtccccttctccaaagatcgtataaccttcaatccatcttcatctccggtgagtcaagttgcagctactttggcatcgtattttctgggtcagttctgtcgaattccttggtccaagactttgcagctgaaccagcagcatggcgggtcagtcctccaatgaaggctccagtactggaaacatttcagcagaatgttccgattcaactgttc

SEQ ID NO: 15799 - DNA, 257 bp, Glycine max
  Clone ID: 700962522H1
cttcttcctcctctaaccttacatttagcctttctttcttttctatgttctctctatctctcattctcatctcactttcttttctttttcttttcttttcccgaatctgaatttttccctacaaaatccactcactgtcctcaaagacagatccgaaagtggatgccaaatctatcacccctcgtcgcccgagattatcgtacccattagattcttcttccctcttccttctacactttcccaaattttcacactat

SEQ ID NO: 15800 - DNA, 254 bp, Glycine max
  Clone ID: 700962523H1
ggctcaaggctggaaagcaaagtcaaaaactttggaagaagttctggaatcaacttctaaaatggaaccaaaacttattggctatgatgagactcccattgatgtaacagataccaataaacacatagtggttaatgcagacccatacaacaagtctaacccagaaattcgccctatgcaagagacagatgaaatatgctctccatgtgtgaaacctttcggccaacggcttcaatcttctgctaagggaaagc

SEQ ID NO: 15801 - DNA, 256 bp, Glycine max
  Clone ID: 700962524H1
tctcaacttcctttcaattttcttatttccatcataatttcactgttgttctctgaaagcttctttggttcgttttttttttttcctcgcaacctcttgtttttggcttggcagcggttggatgtttcttctccttggttattatttatcctgtgaaagatttgatttttaaggtccgcaagagttctttttgtttaaaatacaagtgagtattctcaattttgtttctgattacttttttatgcctttctggctt

SEQ ID NO: 15802 - DNA, 250 bp, Glycine max
  Clone ID: 700962526H1
ggcgctcaacctacaggaactgttcaggacatttcaaaaagggctggtgtttttatggaacttagctcgaatcaacaaacgaaattccattaatgaaataaaaaaaagggggtgtggatgacttgtatatagatttctaaaactcttttctcttttatccccccgctctcttgttctattcatacctaatttttgctaattccttgtggttatataagatgataggatgtagtttctatacccagaaaag

SEQ ID NO: 15803 - DNA, 64 bp, Glycine max
  Clone ID: 700962527H1
cttctctcttgtgtactttgattccttgaaagatgagaaaatgaacgattttgcttccttgact

SEQ ID NO: 15804 - DNA, 252 bp, Glycine max
  Clone ID: 700962530H1
agagtgagttcggttatcttctttctatttcgtcattttcttcgcttctttcttcttctctgttaattcttttcttacatcttaaaaaacaatataaagaagggcgtggttttgttgtgagtactgagctgagaagagggagaagatgatcatccccgttcgttgttttacctgtggaaaggtaattggaaacaaatgggatacctatttggaccttctccaggcagattacagtgaaggagatgcactgga

SEQ ID NO: 15805 - DNA, 252 bp, Glycine max
  Clone ID: 700962531H1
ctcgagcggcggcgattgtcccttcaaatgttgaagacaagttgccttttacactggtcccacagtcggaggacttctgaatgctacatgtgggaatgttactgagctcataatagcaatatttgcccttagcagtaacaaaattgctgtggtcaagtattctctgttgggttctattctttcaaaccttcttctggttcttgggacctctctattatgtggtggcattgcaaaccttaaagtggaacaaaa

SEQ ID NO: 15806 - DNA, 254 bp, Glycine max
  Clone ID: 700962532H1
gtgtggttgaaagttaagaagtagcaaagatgtttccattcgggcgcaagggtcaaaagataaaggggcctatggtggttatgcagaagaatgtgttggatatcaacagcatcaccagtgttgacgggatcgtcggcaccggcttagacttcttaggcagtgcactcgatacagttacttttttagcctcctccatctccatccaacttatgatacctaccaaggctgatggtgggagaggataagttggaaag

SEQ ID NO: 15807 - DNA, 253 bp, Glycine max
  Clone ID: 700962535H1
cgttcttttgtgtttgactctctctctctctctctctctttcatatcatatcagtcatctctctctgtctcatacatacacataccactgtacctcgttctcacgaaaaccttcaactaggaatccatcgagccagagtgttgtgttgctagtgcaagaggcaccaacatagatagatacatacgtgcgtgcgtacgtaggaagggtacgtacgcggtagtacacaacacaccaacacaccgttttgcactct

SEQ ID NO: 15808 - DNA, 262 bp, Glycine max
  Clone ID: 700962501H1
tagtgttacccctttctctttttctctctttcttgaatttggcgcgtgcgtttcgattcttcttccgaatcagagggattctggatttcttgttgaagatgcgacgctcttctgcatccaaaaagtcgggtcaatccaattccactcccaacgccgccgatctcttccgctctgcttcaagtaaggcaagctcgaaggaatcagaacgaattgatagtctattctattcatatgccaatgggtctaccgggttgattgaccc

SEQ ID NO: 15809 - DNA, 243 bp, Glycine max
  Clone ID: 700962463H1
cagatgtcctgttcgagccattatttctattacaaaaacatcaccacataagctgggatttgatttgcataatcctccttcccctccagcatgtaatacaacttctggactgacctggattcaccctaatgtaaatagttcttccaattgcttggttaacacatcaacccatgtttctgatacaaaaccatcaccacataagcttgggtttgatttgcaaaatcctccttcccctcctgcttg

SEQ ID NO: 15810 - DNA, 234 bp, Glycine max
  Clone ID: 700962466H1
ctcgagccgcttgcgaagaatctacaatgaatcagcaactcttgattaatgagctccagaagcgagataacatgattgagcatttgcataaggcaaagttagaagaggctcagaaaagacagattgaggtaatcggttcgagaaggaactttatatgatgcaaagtcttgttgatggctacagaaaagccttgaaagaaacacggaaggcttttgctgaatatagagcacaatg

SEQ ID NO: 15811 - DNA, 232 bp, Glycine max
  Clone ID: 700962467H1
ggaagaagctgtgttatgtccaatttccacaaagatttgatggtattgatcgccacgatagatatgctaaccgaaacacagtgttctttgatatcaatatgaaagggcttgatgggattcaaggtccagatatgttggtactggaactgtgttcaacaggcaggcattgtatggctatgatccaccagtatctgagaaaaggccaaagatgacatgtgactgttggccatca

SEQ ID NO: 15812 - DNA, 230 bp, Glycine max
  Clone ID: 700962470H1
acagttattccgtagatttgaagaaagaccttttcctccaattgcagagtcaaagtttaaggcctaagttctctcaactctcattcaacccacttccaccatcaacttcttccttttcttcaccccgtacttcacaaccctggctctcttcatctctaagacataagccgctcctgctaagactaaggttacaaagccaaagcaaaaggttgaagatggtatctttggca

SEQ ID NO: 15813 - DNA, 234 bp, Glycine max
  Clone ID: 700962471H1
gctctctctctcaatttcccttcactctcacgcgccgccgtggtttccgccggcggccactccctatccgccgcgcatccatcccgcttccctctcctcgcttttctctaaaaaaaattaaaaatttctctgaagaccgtgttatcattatcgttccctgagttaggttttctgttcttcctagggtgtttttattgtgtccaataacaagaggagggggaagagaaacaagca

SEQ ID NO: 15814 - DNA, 231 bp, Glycine max
  Clone ID: 700962472H1
cctcctcattaagccgccactttctctctctttccttttcgtcttctttttcttcttcgttgggtttgttgccacttagtaagaaagagggtgtgaagagagtggggagaagatttggtgttgtggccatgcggagtctaagagtactgtgcttgttacgggagcgggtggtcgcacaggacaaatagtttacaaaaaattaagagagaggccaaaccaatatgtggctag

SEQ ID NO: 15815 - DNA, 236 bp, Glycine max
  Clone ID: 700962473H1
ctcgcccgcaccgtccagatcgtaatcaagagaagaggagcgagttctctttttccttgcagcccaagccatggcgcctctgatcctgcatggtggaaaaaccaacaaaaattcttacaagacactcattgcggcggagtatgccggcgtccaagttgactttgccccaaattttgagatgggtgtctccaataaaactcctgaatttctcaagatcaatcctattggcaaggttc

SEQ ID NO: 15816 - DNA, 235 bp, Glycine max
  Clone ID: 700962474H1
agtgagaagagaaaaatggcaatctccatacccagtagacaacttttcatagatggagagtggaaagtccctcttctcaacaatcggtttccgatcatcaaccccgctactgaagacatcatagggcatatccagccgctactaaggaagatgttgaccttgcggtggatgctgctaaaagagccttttcccataacaaaggcaaagattggtcttcagctcctggctctgttcg

SEQ ID NO: 15817 - DNA, 235 bp, Glycine max
  Clone ID: 700962475H1
tgtcactgaaatctgctacatctagagttcactgatatctttactaacaatcaaccggccacatgtattgcaaaaagcaattcaatttatgaatcaacaaaatagactgaaggaaaaagctgtcatcaaatgtaattcaatcaaatgctgatatagcacataatatcagctaccaattcctcttaccttgtctacagtttacttgtacttttattagtctacaattttttgctta

SEQ ID NO: 15818 - DNA, 237 bp, Glycine max
  Clone ID: 700962476H1
ctcgagccgctcgagccgttgcttttcttaccatctccttcaattctctctcactctctttattctctcaacaaaacctttcacccaatatcctcaaactactacttctgataaattgctaatttttataaactagctagagatgatggttcaaaaggaagatttgggtttgagtttaagcctcaacttccctcatcacaataccccaaatcctcaacatccgagtctcatgtcatc

SEQ ID NO: 15819 - DNA, 237 bp, Glycine max
  Clone ID: 700962477H1
ctcacttttttcagcttctctaaattctctgtctacttcaccaagcactttttgttgcagctttggttaatttccaatatggtgtttcctctcctatctatctttgctttactcaatctttcagtggtggcaaccatgcagaaaccttgccccctgaagtttactggaagtcgaagcttcccaccactccaatgccgaaagccattacagatatccttcacccagatttggcagaag

SEQ ID NO: 15820 - DNA, 241 bp, Glycine max
  Clone ID: 700962479H1
ggactgaatgaactaatggagtctaaaggtgggaaaaagaagtctagtagtagtagtagtaaatcattgttctacgaagctcccctcggatacagcattgaagacgttagaccaaacggtggaatcaagaaattcagatctgctgcttactccaactgcgctcgcaaaccttcctgatatccatccagattgatagttcattgcatgcaaccatagttttattaggttttttcttctttgt

SEQ ID NO: 15821 - DNA, 238 bp, Glycine max
  Clone ID: 700962480H1
aactaagtcttccaattttggaacgtgtgaagggacctctggagaaggcacttgctgaagcaggtcttaccgttgaaaatgtacacacagttgaggtggttggttcaggttctcgggtaccggccattaacaaatattgacagagtttttcaaaaaggagcctaggcggacaatgaatgctagtgagtgtgttgctaggggctgtgcgttggaatgcgcaattcttagtccaacgttc

SEQ ID NO: 15822 - DNA, 234 bp, Glycine max
  Clone ID: 700962481H1
tcgacggcgacgtaaagaaactcgcgtccgttcccggcggcgtcgacgtcgttttccatccccgtaacttgtacgattacgggaagaacggtggtggtgacgtggcagaggctggtggaatggtgtcgtgcttgagagtgggtccgggcacgaaagttgggtgagggttgagaagctggaattggggctgtgtgggaagagcaggcccgttttcttcagaggggtggcgactgt

SEQ ID NO: 15823 - DNA, 234 bp, Glycine max
  Clone ID: 700962482H1
atttgtaaaaagaagagaagaagaagagatatctgaaaaagggggttctggtggattgaattgcattagcaatgggcgtgtcttcaaattcaaaggaatcgatggaactatgcatatttgatttgaggagggccaacacgaaggccaagagctcgataagatcctcttcttcttccccgccggtttgcccttctcaaagcaactctccgtcattggcctcagcgaaggactcat

SEQ ID NO: 15824 - DNA, 230 bp, Glycine max
  Clone ID: 700962483H1
ctccatatggccactcttcttcttcccacgctcctccttctcatacccttcgccaccctcgtctccgcccgccctcacctcgccggagactttctccgactgccctccgaaaccgataacgatgacaacgccagggcacccgctgggccgtcctcctcgccggttccaatggctactggaattacagacatcaggctgatgtttgtcacgcctatcaaatactaaggaaa

SEQ ID NO: 15825 - DNA, 230 bp, Glycine max
  Clone ID: 700962484H1
gcaggaacagatttatcaaattctctatgttcatactgctctccagatcatggctctgggagtggtgggcacggaagctcaccacaccactctcaacatggaacaccctctcatcatggatctacatcactggaggtggtggaagtcacaatccaaccccatcaactcccccaggtggtggaagctatgatccaactccatcaccaccctcaggtggtggtggaagttac

SEQ ID NO: 15826 - DNA, 232 bp, Glycine max
  Clone ID: 700962486H1
atgaagctctcacctccatccttattgatgcctttgaggttggctacagacactttgatactgcttctctgtatgaaagtgaggagtctctaggcaaagctgtggcaaaggccttagagctaggcctcataatagcagagaggaattattcatcacatcaaaactatggtccactgatgctcatcctgaccttgttgttccagctcttaagacctccctgcagaagttggga

SEQ ID NO: 15827 - DNA, 234 bp, Glycine max
  Clone ID: 700962487H1
gtgacacaccaaatcaaagacacctgagccattcaattcccctcctttattgctttcaagtttcaacactaattttattatctgaaaaaatggctttcaaagtttcgtttttccttgcacttgttctagttccaatatcctcctccttgatacaacagctgctggacgcagcattggcgaaaactccaactcagaggaaaagaaagagcctgagttcttgttcaagcatgaagg

SEQ ID NO: 15828 - DNA, 235 bp, Glycine max
  Clone ID: 700962488H1
gcgacgacgatccaagtgatagacactcgtcgcgatggaacgtgtagctgaatccgagcgaactctgtacccatacgtgactggatcctctgtagtcgctatcaaatacaaagatgggattctaatggccgctgacatgggaggttcgtatggatctaccctgcggtacaagagtgttgagcgtatcaagcctattggaaagcattctcttcttggtgctagcggggagataagt

SEQ ID NO: 15829 - DNA, 234 bp, Glycine max
  Clone ID: 700962489H1
accaaagtagaacttaaatccaggttttcggagatgacatttaacactataatgaggatggtgtcagggaagaggtactatggtgaagactgtgatgtgagtgatgtacaggaagcaaggcaatttagaggatcattaaagagttggtgacgttaggaggggctaataaccctggggacttcttggctttgcttaggtggtttgattttgatggtttggagaagagactaaaga

SEQ ID NO: 15830 - DNA, 235 bp, Glycine max
  Clone ID: 700962490H1
caataaacccctttctctcaattttcattcaacaccatggcaagaagaaccaagtccattttcttcaccttcttattatgctcttgggtggtggtagtagtagcccaagaggtagcaattgcaaaatccgaagtgaagcattaggggaaccggaattagaaaaaagagaaacacttgaaatcatcattggtggtggtggtggtggtggttaccctgctccttctccttctccatc

SEQ ID NO: 15831 - DNA, 235 bp, Glycine max
  Clone ID: 700962491H1
ggtcctgattttgtactattatgtacactctctattggactttcagacatttctagctgtgggtgatgactctcattttcattaacactgtccttctcagcatcttcatcacacctgttaggctgttcagaaccccctgttgaactgtctgagaatctgacactacttcctcttcaattgatccttcagcttctacctcacgtttctgatcacaagaaattagttcatttcctgg

SEQ ID NO: 15832 - DNA, 241 bp, Glycine max
  Clone ID: 700962462H1
atgtttcacaaccttagcaaaaaagacatctatgataatcaatctagaactgcttttaagactatgtggcaaggcatggatggactaagaggtccaggtctttcaggcagcggcaattacttaagtagaagtgcttactatttggaagtccaaaccaaaaagacgactatctgaaggatgcacaaaagtactttggcaagtctaccgcatacattgaatcactgaaggccatccgtggaca

SEQ ID NO: 15833 - DNA, 234 bp, Glycine max
  Clone ID: 700962493H1
cttttcccttaattctctctctaaacatcacaatggagtatggaaggttggtaccctctgatcctggtggctcctcgcgcctcaacaacgttcctccgacatcttccgcctggaagaagattgtcttgctttactctttagcgtcttgttaatagccgcgtctgctgtaactgcagttgtcgtccgctctcgtattcaacaaaatacgagagcccatgagactaggctcggaaa

SEQ ID NO: 15834 - DNA, 237 bp, Glycine max
  Clone ID: 700962494H1
ttcaaacatcacaaacactttttaacgttgtttgattttggtgcaatctttacttcacaacttcctcgtacttctgagaatcatcatcaaaaaccccaaactcatgatcatgatgatgatgaataggttccttcactctttgtgttcgcattgttattcatgtggtcggttcacgcagacaatgctcctgccccttcacccaagtcatcaccctcgtcgccgacggccaaaccaccc

SEQ ID NO: 15835 - DNA, 240 bp, Glycine max
  Clone ID: 700962496H1
gtttgggattggagggattgacgctgcgtctcttcctcttctctttcgatccatccctcattcctaaccctccaatccaaccacctcagcctcacactcacatatacacatatctgaacgcgtatcgtccctccatggcttcaaagcgcatcctcaaggagctcaaggacttgcagaaaaccccaccaacttcttgcagcgctggtccagtagctgaggacatgttccattggcaagcaa

SEQ ID NO: 15836 - DNA, 239 bp, Glycine max
  Clone ID: 700962424H1
ccttaaaaaccaacacggttttctttttggtttggcaacatagcaccaaaaccctaaacccttcttctctgatatttaaaaacctatcttgtcaccacattcacctttctccatttcctttctgatcaatcaatccctcttctcttccggccatggcctccttgctccgctctctccgccgccgtgatgtcgcttccgcctccctctccgcctatcgctcgttaacgggcagcaccaag

SEQ ID NO: 15837 - DNA, 239 bp, Glycine max
  Clone ID: 700962425H1
ctttctttctttctctggctcttaaaaatgggcacaccaaacccaacccaacccgacgatgggccctgacccacttcgccggcaatgggaaagcccggagaacaccaccctctgccctcctactccgccgccgagatcagcggcggaatgcggcgcctccgccgggatgcgccgtcggactccgatgccttgtcgtcatgcttttctcggtcgcggttttcctctccccactcttctgg

SEQ ID NO: 15838 - DNA, 238 bp, Glycine max
  Clone ID: 700962426H1
ataaaaagaaaaaaacatcactcaaactcactcattttttttctcaacttctctttctttctttctctggctcttaaaaatgggcacaccaaacccaacccaacccgacgatgggccctgacccacttcgccggaatgggaaagcccggagaacaccaccctctgccctcctactccgccgccgaggatcagcggcggaatgcggcgcctccgccgggatgcgccgtcggactccgat

SEQ ID NO: 15839 - DNA, 238 bp, Glycine max
  Clone ID: 700962427H1
aagcttccctcttttttcttctctttctgtttgttctctccataaaattccagaatttaaactctcacacaaaaaatcataaacaccccaaagtagcagtacgtgttgcactagtaacatcttttttatgggaatatatgcttttttttcctgttgaataaaattaaacaagaagagggagcagatgcaattcagttaccctgacagttttcagatcaccacttctttttttggcttt

SEQ ID NO: 15840 - DNA, 243 bp, Glycine max
  Clone ID: 700962429H1
cttgttcttcttccttctcttcatctgtctctacccttctacgcaactttccttcatagtctattgagcttccaaatattctcacggcttgctatagtagttgcaccctccaaacacaaactgattcccttgtcttttcatctaattgcttggtctttaatggacgcgctttaactttacgcacggaaactgataaggttcaggtacttgtaagagaacatactgtaaaactaaaaggaaaaa

SEQ ID NO: 15841 - DNA, 242 bp, Glycine max
  Clone ID: 700962430H1
atgaaaatgggttcttctttgtggactttgtgtctaattttggcttcactagcctcttctgcattctgtgcctttccacggaggccagtggatgttccattcggcagaaactacgttcccacttgggcttttgatcacatcaaatacttcaatggaggttctgagattcaacttcatcttgacaagtacactggtactggcttccagtccaaagggtcatacttgtttggtcacttcagcat

SEQ ID NO: 15842 - DNA, 243 bp, Glycine max
  Clone ID: 700962432H1
ggctatttgaacacggctcctgttcgatcagcaattagttatattgatggtgatgaggggattcttagatatagaggctaccctattgaggagttggcagagaaaagcactttcacggaagtgtcctatctcataatgatggaagtttgccttctgaaagtcagttagcagaatgggagtatagaatatctcagcattcggctgttccacaaggaattttggatatcatacagtctatgcccc

SEQ ID NO: 15843 - DNA, 234 bp, Glycine max
  Clone ID: 700962433H1
gttgtctccttgaatgtaaataacttcacaaccacgccaaccttggctggtcaatgggacacaaaaataagcattgacaacccgaatgacaaacttgtcgcttatttttccaacttcaaggttgacgtggcgtacaggatggcgttatggcaattaatcatgcgcctgggtttgtgttgaatacaaatgatcatatggatgtgaacgtggcaggtttgtctaactaagggaatg

SEQ ID NO: 15844 - DNA, 229 bp, Glycine max
  Clone ID: 700962435H1
ctcgagccctcgagccgaatcggctcgagatttcaaaggaggctcagaatagctggtcgaaccgccagcacagatccacaaatcggaaagaatcagagcgccgtcaaaaaccgccgtccacggcgtgaaactcgccttcgaatccagagcctctctcggttcctcactcttctcacatcgagcgcaacgccaaaaaatcgaatttcacgatggaagagttggagcagtg

SEQ ID NO: 15845 - DNA, 233 bp, Glycine max
  Clone ID: 700962436H1
ctctctcagctcaggagtgtataatctgagcgatgtcagatcttgaggctcccttgcgccctaagaggaagaaggtttgggtggactatttcgttcagtttcgatggatccttgttatttttgtggtccttccatctccttcaccatttatttccttacataccttggggatgtaagatctgagtggaagtcctataagacgcgtcagaaggaacatgatgagaatgtgaaga

SEQ ID NO: 15846 - DNA, 228 bp, Glycine max
  Clone ID: 700962437H1
caggcaagccccactcaaccaccacacctctcctcgttcacgctacccctttctgctcttcttctacctttcaagttttaaaagtataaagatggcagagacattcctatttacctcagagtcggtgaacgaggacaccctgacaagctctgcgaccaaatctccgatgctgtcctcgacgcttgcatcgagcaggacccagacagcaaagttgcctgcgaaacatgc

SEQ ID NO: 15847 - DNA, 235 bp, Glycine max
  Clone ID: 700962438H1
aaaatgtcaatcaccttgcgaactccgccttctacaactctctcttctgctgcatcttccattcacagaacaagatccaccaccttctccttctcgctttgttccccaccaactcttcgcgtcaattcccacgctccctctctcttactcgcgcttccgcttcctctatcactaccgcttcgaccactgagctggacgctgtgtcctccttcagcgagatcgttcccgacaccgt

SEQ ID NO: 15848 - DNA, 235 bp, Glycine max
  Clone ID: 700962440H1
ccatattattactattaatattttttggggttgtttttatgcccatgatcttaaaggcccagttagtaacaggccgtttctatggtatcacgaaatgtttatggattttgttgggctgggcctggctgggatgaccgagccttgtctggcccaatctatcaactgaattcatgctcacttctgatgagttgcggacttgttaacacaaacaggcccattgagcattaccacgcta

SEQ ID NO: 15849 - DNA, 126 bp, Glycine max
  Clone ID: 700962443H1
gttcctcttgaacaaccatgttgatgttacctttcttctgttcctgtggctgtttggaattggatcctcatcagcttctatttacaacgctaattactgcccaaacaacacatcgtacaattccac

SEQ ID NO: 15850 - DNA, 239 bp, Glycine max
  Clone ID: 700962444H1
gcacaggaaaccttccgggaccgtcttcccgaaccggccagctcctcgacagatttgccggcagaaacttcgacgccaccgacgtggtcgcgctctccggcgctcacaccttcggacgggcccactgcgccacatcttcagccgcatcaaccagacggacccacccatcgaccctaccttgaacaacaacctcatcaaaacttgtccctcttcccagtcccccaacacggccgtgcttg

SEQ ID NO: 15851 - DNA, 240 bp, Glycine max
  Clone ID: 700962445H1
gggtggtgcctctcttccatctccccagccaaatcctctctcaagaaggccacattaggcccttctgtcttcgcaaccgttagcactccttcttctccttcttcttcttcttcttcttccttcccttctctcattaagacaggcctgtctttgctgcccctgcccccatcatcaccccaactgtgagagaggatatggcaaaggaatacgagcaagctattgaagaactccagaaattgt

SEQ ID NO: 15852 - DNA, 88 bp, Glycine max
  Clone ID: 700962446H1
actcggtatttctcttcctctaaagaccgagtccgactcggagggcgaagaaggcaaactcagtaacctttccttccacacaacatag

SEQ ID NO: 15853 - DNA, 242 bp, Glycine max
  Clone ID: 700962447H1
gggaatatccccaactcgatttcttccctggcgccgaaactgacgtacttggatcttgggcacaactcactttccgggaaaatccctgattttctgggaaaattcaaggcgcttgacacgcttgacctgtcatggacaagttttccggaacggtccctgcgagtttcaagaacctgacgaaaatcttcaacctgaacctctccaacaacctcctggtggacccgttccccgagatgaacgtg

SEQ ID NO: 15854 - DNA, 240 bp, Glycine max
  Clone ID: 700962448H1
gtaggttcgtataccaaaccagttgcaggtgccactccaggatatgcatcagaggtgatctttgctgatggaaccttcattgatgggagtacaagtgagctttcatgtgatggaccacttagagagccatttactgattttgccagggtggcacccattggactcaatggggactagtcctatgagaagttttgaaatcattatgatggaatataattttcaatcagaagtttatagaaa

SEQ ID NO: 15855 - DNA, 101 bp, Glycine max
  Clone ID: 700962451H1
gctacaatgtccaaactggtagtgctggagattggggtagctacttctactatggtggtcctggtagaaacccaaattgcccttgatcattcatgttaatc

SEQ ID NO: 15856 - DNA, 235 bp, Glycine max
  Clone ID: 700962452H1
cttggatagatacaaagatgttttttttaagggccaatttgtttacttcagttacatactatcaaagttagagaacgaaggaacttttgtactttctctggggtgtgtgtgtgtgcctgtctcacaccacaacactgaaagtacaatcttcttgtggttacaaaaactctgaaaaacacacacacacacacacttcttatgcctatggctggtgagcaaggtgatagattctcct

SEQ ID NO: 15857 - DNA, 235 bp, Glycine max
  Clone ID: 700962454H1
gaaggcttcggcaatgctcctcaagtacttgaaatggagaaattcatttgttccaaatggctctgtatctgtgtcagatgttcctaacgaacttgcacaagataaggtgttcatgcaaggacacgacaagataggtcgacctatacttatggtcttcggtggaagacattttcagaacaaggatggtcttgatgaattcaagcgatttgttgtttatgttcttgataaagtatgt

SEQ ID NO: 15858 - DNA, 234 bp, Glycine max
  Clone ID: 700962455H1
tggatagataacatcctatcattttgaatgcattgatgttgttttgttagctaggagcttctttgctttgatgtaaggtgtcaatggctttttgtgaatcaagactcaataaaatcattcagccaaaaaaaaaaaaaaaaaaaaaaaaaaaaaaaaaaaaggggggggcgccgcattggggactcctccccccgggaatttattccgggccgtgacttcggggggaaacatttt

SEQ ID NO: 15859 - DNA, 127 bp, Glycine max
  Clone ID: 700962423H1
tttctcccttattattattattattatttaattgggaaaacaaatcaaatttcttcatagcatcacttactttggttcagtgggaagcattctttcccttgtagcaatgtatcattcagttatccct

SEQ ID NO: 15860 - DNA, 238 bp, Glycine max
  Clone ID: 700962456H1
caattcttccccctccacccacccagcatatctctctattcctatttattagcacccctcacattaccttgtgtcaccaactactttgactcctttaccataccattacaataattatcaaacctaaccagtaaaatggtgaccgtggaggaaatccgcaacgctcagcgttcccatggacccgccaccatcttggccttcggcaccgccacgccgtccaactgcgtctcccaagccg

SEQ ID NO: 15861 - DNA, 238 bp, Glycine max
  Clone ID: 700962457H1
ggcatttttgttggttcgagtgagcgagggaagatgtactctagagattcatggggtggtccgttggagataaacgcgacggactcggcaacggaggacgagcggagccggaacctgcaggacgtggacagggcggcgctgtcgcgtcccttggacgagacgcagcagagctggctcctaggccccggcgagcagaagaagaagaagtacgtcgatctcggctgcatcatcgtcagcc

SEQ ID NO: 15862 - DNA, 236 bp, Glycine max
  Clone ID: 700962458H1
accaaaactgacgcttttgttattcttcgagtctctgagagagatgtgtggaggcgctatcatctctgacttcattctcctttttgagacttctaatatcctcagggttttttgggagaattggctaaaaaagggtctaccacagcgaaatctgtggcattccaagttcgagctgagaaatttgcaaataggaagaggaaaaatcagtataggggaatccgtcaacgcccttgggg

SEQ ID NO: 15863 - DNA, 240 bp, Glycine max
  Clone ID: 700962460H1
aaatgagggaatgaagactattagctcattctctgaatattctgacatccgccaccgccacgtgtcaacctaattgggatccacattcttcttccttcttcagctccacgcgccctctttccctttcctgtttcagctgttaccgacgtcaattgttactccgattatttattcttatttattttccccatctcactctccttcgattcgggatcactcacaacacaagtactactacct

SEQ ID NO: 15864 - DNA, 240 bp, Glycine max
  Clone ID: 700962461H1
atgctataggccttgatgttatttgggatgtggggttttgggaaaaacccaactgaaaaattgaatctttttctccaaactggtcctgagaaccttcacaaaggtatagaattagcggaagcagagacaaagaaagagtcacatgcatcattgcagatgctttagtaacctcttctctcctagtggctcagaccctcaatgttccttggattgcactttggcttcccaattcatgctcac

SEQ ID NO: 15865 - DNA, 251 bp, Glycine max
  Clone ID: 700962387H1
ctcgagccgagtcggctcgagatggcttctctagcaaccttggctgctgttcaaccagctacgatcaatggccttgctggacgttccctctctggaactaaactctctttcaagccctctcgccacagtgtcaaatccgagaacttcaggagtggtgccgtggtagcaaagtatggtgaccagagtgtgtactttgatttggatgatctgggcgacactacagggctgtgggacttgtctagctcagatgc

SEQ ID NO: 15866 - DNA, 241 bp, Glycine max
  Clone ID: 700962388H1
gtccactcttaacaactttgtttctgtaaatagaagaaatcgtgatagtgccattagagccttatctgaagtgcctgttcttagaaatcaagctcctcattgtcaattgaagactgcaaatactgaaacacaggacttgattacaagatcatcactttgttttgaccaaagtgatgaacctgctagggcgagtgagattgaatctttgaagcaacttaatcctgataatgtcttctacaaa

SEQ ID NO: 15867 - DNA, 246 bp, Glycine max
  Clone ID: 700962389H1
gcttcaacaagggtgtgatccaaggaggagacaatgtaaagaatagattattgttggagaccataatccgaatattacctttggatgtgggcagtgcctctttcagtttcttggggaagttattaagggtagctattcagttggaatgtgaagagttggagagatctaaactgattaggagaataggtatgtgccttgaggaggctaaggtgtctgatttattaattcgcgccccagttggtgatg

SEQ ID NO: 15868 - DNA, 250 bp, Glycine max
  Clone ID: 700962390H1
ctaatcttccctcttctctctccttctatttatccttccctccatcacagtaacaaccaccaccacctctgcaacacaacacacataacacgtaacaaagagaatgagagcgctaaattcgcacgtgctcctcgtagatcttcactcccaccatcacgtgcccagctcaaccctctcctacctcagaaactcccgcttcatatcatcactccgtcgacgctccccaagaaccggaatccgatgtacggcg

SEQ ID NO: 15869 - DNA, 251 bp, Glycine max
  Clone ID: 700962391H1
gccaatgataacaagcaaaacatagatgacaaagatgaagatcttgacggcaagaaatgcagttctaattatgaagcgatgcagaaaaacctgctatttgtagaaaataacgagggactgttaaccatagggcttggacaaggaaagcttaagactcatcgaacaggttttaaaccctacaaaagatgttccatggaggccaaggaaaatagggttggagcaagcagcaatcaaggtgaagagcaaggttg

SEQ ID NO: 15870 - DNA, 251 bp, Glycine max
  Clone ID: 700962392H1
cacaaaccctcccctcacactctccaaaccctagcggcactacacacgttatctctctctctctctctctctctccctctctccttccccaagatgtcgagcgccgatcccgagcaccgagaagaggaggaggcacccgccgtcggcgacgacgaggacaccggagcacacgtcgctcccatcgtcaagctcgaggaggttgctgtcaccaccggcgaggaggacgaagatgcaatcctagatctcaaatc

SEQ ID NO: 15871 - DNA, 252 bp, Glycine max
  Clone ID: 700962393H1
cgtttccttcccttccctaacgatctgaggaagacaccaagcttctctccacgcccttcttgggtaatctgaagtgcagcgatggcggatggattgcactcgcggcatccatcagtagttcagaagttatctggacagtcttatttgttgtctaggcttgcccctactcactcaagaaactattccacaactggtagttacctcaatggaggcttgcagtcttcgggtttggttccagtcatggcacatgca

SEQ ID NO: 15872 - DNA, 254 bp, Glycine max
  Clone ID: 700962394H1
gcaagataaataagaggagacaagaacaagcagctgaaaatggaatcattccccatttgatgctattcatcacatcaaattctcccttgaaacagtatgcattgcctctgctatgtgacatggctcatgcatctcgcaattcaagggagcaattaagggcccatggcggtttggatgtctatttgaaccttcttgaggatgagctttggtctgtgacagcactagactctattgctgtttgtttagcccacgac

SEQ ID NO: 15873 - DNA, 252 bp, Glycine max
  Clone ID: 700962395H1
ctctagtggtgctaaagtcgaacttaatcactctgtttctctcgataccgttctctatctatgcccatctcttcaggtaagcatttatttctgtttgttgtttatatgtcgttttacaccactttctgctctcatactcgttcatcgatgggtataaattagtgtgttgaaattgcaaaacagaaaatgaaaaactggtgttgtgaattgaggcatcgtaaattgactctttaagttgtcctcaatgaccaa

SEQ ID NO: 15874 - DNA, 126 bp, Glycine max
  Clone ID: 700962396H1
aacacatacattgtagtatcacttttgtctcggaatttgttcttttgagttatggcaagcttaaaggttgcatgtgtggttttgatgtgcatggctgtgatgagtagcaccacattagtggtgcaa

SEQ ID NO: 15875 - DNA, 238 bp, Glycine max
  Clone ID: 700962402H1
gacttcttccacgacgtcgtccacgtcatcttcttcctccgtggcttcgcctgcttccggatgctccaagcaaacgctcatggaagccgcatctgcaattgttgaaggtaaacacgatgttgcggcggagatcctaaccggttgaacggtgtgaaccggagtgataggttgacggattgcatggtttcggcgttgaaatcgaggatgaatccggtggagtatcctccgccggtggcgg

SEQ ID NO: 15876 - DNA, 237 bp, Glycine max
  Clone ID: 700962403H1
tttcgaactccactagtgtggctgaagtgttctccaggattgatcataagtttgacctcatgtatgcgaagagggccttcgtgcactggtatgtgggtgaaggtatggaagagggtgagttctcagaggctcgtgaggaccttgctgctcttgagaaggattatgaggaggttggtgccgagtctggtgatggagatgatgatggtgaaggagatgatgattattagagtgtctgaa

SEQ ID NO: 15877 - DNA, 235 bp, Glycine max
  Clone ID: 700962404H1
cgatgatggggaaggacccagcaaccgaacccataagcgacgcagggaagaggatgatgatgatgaagaagaagagcaacaacaacaacgaagctttgaaatggtggacccttcaattggaactcaggagcaagagatcacgctgctccaccccacgatggatcgaattctaacgcaaatggggctggaaccagtagcagggataggtccgttccaatcttcgtttccgaccctg

SEQ ID NO: 15878 - DNA, 237 bp, Glycine max
  Clone ID: 700962405H1
ttcatccacttagagagacattgtggttacccatagtctcatatagtgtcatacagcaaaaaaattcagcaacacaaaacaatgggttctcttatggcaggatggtattctacccacatggatcctcaatcagcacacttaaaaggaaccgctcactcactaaggatgaaattgatgcttactggaaatcaaagaagaagatagaggaagaacaccttagagctatttccaatgtgt

SEQ ID NO: 15879 - DNA, 234 bp, Glycine max
  Clone ID: 700962406H1
ttattattattacattgggttttggtgggaatcgctcgccatgaatggcgaggggagtgaagcaatgcaagtggagatggagattgagaaggagaggttggtgtacatgtggggttacctttccggagctctgcgcagaggacgccactgttgacgccggttctcgttagggttccgccctctggttactcttggaaggatgtttgcggtggtggttgtggattcgccatggct

SEQ ID NO: 15880 - DNA, 234 bp, Glycine max
  Clone ID: 700962407H1
ctttccacttgtctccgaattagttatcttgagaaacattattcccattgctatatattatggctagcatgaaggttacatgggtggttgtgatcatgtgcatggccgtggtgggtgcaccgatgatggcgcagcatgacatgcaatgatgtgacggtgaacatggcacagtgcctatcctacctgatgcagggaggaacaccttcaacactctgctgtcaccaccgttgacaa

SEQ ID NO: 15881 - DNA, 239 bp, Glycine max
  Clone ID: 700962409H1
ggcttctcaagttcttcttcaacaggcactgtttgcccccaagctaagtttcccttcttcttctcgtaacgtcgcgttaatttctagggttccttccaccccaatttcatggcgttgcactcctctcattgctaacctagtttcgctgtgagagctgactccaacgtcgaaggcgctggtgaagccaccgaggatgttccttcgtataatgttgatgaagtttcggaaggcgaaggaga

SEQ ID NO: 15882 - DNA, 240 bp, Glycine max
  Clone ID: 700962412H1
tagtactctcgttaatttttttgctaattgctaattgggcacaatggaaaagcttcatgctgtgtgcatcccatacccagcacaaggccacataaacccaatgctcaagctagcaaaactccttcatgttagaggttccacatcacctttgttaccacagaatacaaccacaaacgccttctcaaatcaagaggttctgattccctcaatagtgtcccatcatttcaatttgaaaccatc

SEQ ID NO: 15883 - DNA, 240 bp, Glycine max
  Clone ID: 700962413H1
gtggttgccactgctcctaagttcgatgggatcacccatgttggaggtgacatgttcgtgtccattcctagtgctgatgctatttacatgaagtggattctgcatgactggagcgacgagcactgcatcaagatctgaagaactgcaggaaggcaataccagagaagacaggaaaagtcataatcgtggatcacgttcttcgacccgaaggcaacgaactcttcacagacgttggcatcg

SEQ ID NO: 15884 - DNA, 241 bp, Glycine max
  Clone ID: 700962414H1
ctgcttaatcgaactattcagattctaaaaaatgagttggtggtgggctggagcaatcggtgctgccaagaagaaattcgaggaagaggaaccgccgcgaacttccagagcgtgggcctggtgatcggcgtgacggcatcgtgggcaacagcctcgccgagatcctccctctcgccgacacccccgccggtccatggaaggtctacggcgtcgcacgccgcccccgtccgccgtggaacgc

SEQ ID NO: 15885 - DNA, 243 bp, Glycine max
  Clone ID: 700962415H1
ctcatagtaatgacccatatgtagatgactattaccaccaagcttgtctggcaaaaaaacctaatgtggctaagttaaaacatccattttgcccaagccaaataagggaatatcctccacgatcccgtgctaatactagccacattcatttgttcagattgatgccctagggagggtttcattttcttctattcgctgtcctcgccctcttcttgaggttgaccctccaaacacttctagctc

SEQ ID NO: 15886 - DNA, 242 bp, Glycine max
  Clone ID: 700962416H1
aataattgtcggtggcaggatggaaatgcagccacatatttttatggatccttttgaagaaatggggatgggtgcaaggtttgccgagcaacatcgaagaagtgctgctgaaaaggaggcttctgaaaactccggaatgtggatttacgacattttgcattttatgcatttgctggtcgatctggtgttgaacgatggagcagaaaaaatgagaacattgaagtgcattcttcagatgcatc

SEQ ID NO: 15887 - DNA, 240 bp, Glycine max
  Clone ID: 700962417H1
gcttctgactccgtgccctagcttcttcttcctcctcctcctctgccattgcagcaaggcacacacctcaggctccaacccatttcacgagggatcggattcgctcgccatcatggggaagaagaagaagagagtttcctcgaaggtgtggtgttattactgcgatcgcgaattcgacgacgagaagatcttggtgcagcatcagaaagccaagcactttaagtgccatgtctgccacaa

SEQ ID NO: 15888 - DNA, 244 bp, Glycine max
  Clone ID: 700962418H1
gaggaaaagaagaggaaaaggagagtggagaggaagaaaaggattgaagttgttgctgtgagaaagagaaagagtgaaatcggagtttgggaaggaattgcaatcaatggatgtgataaagacgcagcaaatctcatctcgaccaatcgagaaggtggtggttcaccctctcgtgcttctcagcatcgtcgacaactacaacagagtcgccaaagacactcgcaagcgcgtcgtcggcgtcttg

SEQ ID NO: 15889 - DNA, 236 bp, Glycine max
  Clone ID: 700962421H1
atagatcgctgctgtgtttgtcttagtgtgtttgttattcactatcgtcattcctgttcctcaagctttgtagtgagcagatataatggctgttgaaaggtctggaattgccaaagatgttacggaagtgagttgtgtaccatgatgcccatttctgcatgctttttcattctgtgttttgcccctgatgatagtgtttctttctagattatgtactgttgtctgatgtgtgtttt

SEQ ID NO: 15890 - DNA, 255 bp, Glycine max
  Clone ID: 700962385H1
gaaccggaagaggaaaaactagaaaagatcccaacagtgagaagcccagtgattttgtttaccttccgagagatgaagcatttggtcacttgaagtcatcagattttctcgtatatggaatcagatcagtggctcaagacgtgttgcccgtgttgactgatgcgtttgatggcaatcttttgagccttgagtgtgataactttgctgaagtgcgcaaactctatgaaggtggagtcatactagttgaaagttttt

SEQ ID NO: 15891 - DNA, 235 bp, Glycine max
  Clone ID: 700962422H1
catcaatcaacttgagcaaatgcgacctgaccacatgaggaggcttaacccaactccatataaggttagtgttagtgcaaaattatacgacttcattcatttcctgtggctcaatgaggcaccagttggggagtacagtaaggcaaataaaatggcggcgtgccttcagaacccaatgggtatggcaaaaaaaatgttcagttcacgggaaatttctccatacagtatttttttt

SEQ ID NO: 15892 - DNA, 254 bp, Glycine max
  Clone ID: 700962346H1
ctcccctgataaacttgtgccactggtgaatatggctttgaatttcatgctcactgcattgatgaaagatccaaataatcacgtgaaggacacaactgcatggactctagggcgaatgttcgaatttttgcatggatcagctctggatactccgattattactccagcaaactgccaacagattattactgtgctgcttcagagcatgaaggatgttccaaatgttgctgagaaggcttgtggtgctctttatt

SEQ ID NO: 15893 - DNA, 259 bp, Glycine max
  Clone ID: 700962348H1
ctctgttctcttctgtcattgcttctcctccacacacgcacagagacacacacttttgcagtcacattgagaatggggcgtgttcgcacgaagacggtgaagaaatcctcgcggcaagtgatagagaggtactactcccgcatgacgctggacttccacacgaacaagaaggttctggaagaggtggccatcattccctccaagaggctccgcaacaagatcgcggggttctccacccatctcatgaagcggatccaga

SEQ ID NO: 15894 - DNA, 259 bp, Glycine max
  Clone ID: 700962349H1
caagcgtcaaccagctacaacttgaactgttcataacccaaaccaaaagttccacaccccaacccgaaaaatcacacacaccccctttggaattgggatccatcgccatatcactgattaggttagataaggttccctatgagcacttccattctcgaggccctgaacgtccgcgtggaaagttccggcgataagtacctgttcctggctcacggcttctgcacagaccaatccgcgtggcagcgcgtgctcccatact

SEQ ID NO: 15895 - DNA, 261 bp, Glycine max
  Clone ID: 700962350H1
attctcagccgcaaaacaattgctttgtgattccatcaccatcagtaggtgcatcacattccactcctgatcagcatgttatcttggccaatattggtgggttccaaaccggggttcatgatttcagtgcatggagggagtgtagaagtgagatgctagtcatacaaactatggatggacagaacttacaaggtcagggattatctcacagccttggaatccacatgaccctcaggagttcaaatgccttctatccatgat

SEQ ID NO: 15896 - DNA, 257 bp, Glycine max
  Clone ID: 700962352H1
agcagctgcagcccacaacgttcccctctgattgagaactcagtctcctctgcctgcttcatccttccttcctttcttcattcactggcacccttccgagtcaagcataagatcaaagggataccctttctgttccttgtctccccctgcatgcgaacatgccagattttcaatctcctccaaatgtttactccagcacgtggtgtgtccttccgtcaccctcctcatcattaaaaggttgtagtccttcgatctgg

SEQ ID NO: 15897 - DNA, 244 bp, Glycine max
  Clone ID: 700962353H1
aatgactaacgcatccttggatctctttctacctcttttcttcgcgactggttgcactttgaacctaaggcagagatgccacagagtctcctctgccttagagaaactctcacgatggcggttcaggactttgatctcatctcagagaggagaaggaacgagaagaggcaagaggcgaggtagaggatcctgaatagcgtggtctcttccgatgtgctcgattccatgataggtgcagtactct

SEQ ID NO: 15898 - DNA, 209 bp, Glycine max
  Clone ID: 700962354H1
tgcagcctatagttcagggtataggtttggataccgaggctgtcggtcatatcacattagtgatgattctgaatttctgtacttttgtgttcttactccatacattccattgcggtgggtgcccagaatccgccgcttcgcggtgctaccgcattttacagcgaaatatggcatctttagaggaggctgcttgccactctccttcttat

SEQ ID NO: 15899 - DNA, 253 bp, Glycine max
  Clone ID: 700962357H1
caggaaactctttctcttcttccgtttcctagtctcacacccaaacctcatggaaggctctgtcaacgaacgtcttgattttgggaagatgggatatgggtgcaatcattaccggagaagatgcaggattcgtgctccctgctgcaacgagatctactcatgccgtcactgtcataacgacgctgcgagcttgttgaagaatccctttgatcgccacgagctcgttcgccaagatgttaaacaagttgtttgt

SEQ ID NO: 15900 - DNA, 253 bp, Glycine max
  Clone ID: 700962358H1
gtcatggtgtgggagtgtggctaaagcaaactactcctcagtcctcactctgctccaacactcacagtcactgcacttgttctgatgaagaaactctcactcttaccttcggatttggacaccaaatgttccttcaccctctctttgatgagtatgatgggcttcttcgtcgcttccttcgtcctctgctctgtgattttctcactctccattgttcttcgagaccctccctcagatgccgccctgcacgaac

SEQ ID NO: 15901 - DNA, 240 bp, Glycine max
  Clone ID: 700962360H1
cgagatctgcgtttggcatgaggtgccaggacaaagatgaattcatatcaatcatacaagaaggtgtataagttgcagcaggttttaacataggagatttatttccttctgctaaatggcttcaacatgttactggtttgaggtctaagcttgagaagctgtttggacaaattgatcggatactatgagacatcatcaatgaacacaaagaggcaaagtcataatccagagaaggcacgg

SEQ ID NO: 15902 - DNA, 254 bp, Glycine max
  Clone ID: 700962363H1
cagcacaacacttttgcacaagcaattgcaacaaaccaacgttgaattgtgtctcactctcttttttgtttgggggtgtgtcacagtgtctctcttcttcttcaatcaagataagaaagaacacaccctgttaccatggaaggtggtgtaccagaagctgatatgtctgccttcagagaatgtttgtctctatcatggaagaatccttatgttcttcgccttgcttgctctgctggaattggaggccttctctt

SEQ ID NO: 15903 - DNA, 261 bp, Glycine max
  Clone ID: 700962364H1
aacacatacattgtagtatcacttttgtctcggaatttgttcttttgagttatggcaagcttaaaggttgcatgtgtggttttgatgtgcatggctgtgatgagtgcaccaatgatggtgcaagccgtgtcatgcaatgatgtttctgtgaacctagcaccgtgcctatcttacctgatgcagggtggagatgttccagaatcgtgctgtagcggagtgaggaacattctgggttctgccagcaccacctttgacaaacaa

SEQ ID NO: 15904 - DNA, 260 bp, Glycine max
  Clone ID: 700962366H1
gttggaccaagtgtctgctatgccactggacacatataagggacatggtttccgaactgaccttgttgaaatgctgacagctttgaaaccaagatttatcagatttccgggcggttgttttgttgaaggagaatggttaagaaatgcatttcgatggaaagcatctgttggaccatgggaggagagacctgggcactttggtgatgtttggatgtactggactgatgatggacttggctattatgagtttctccaacttg

SEQ ID NO: 15905 - DNA, 256 bp, Glycine max
  Clone ID: 700962367H1
cggaaaccgcgctcgacatcctcgaagacctcgcccctgtctctgacgcgcaacgccgcgcgtactgcgcagtcgccgtggagtgcaccgtcaagtacctcgctgcgtgccccgacgttatcgatggtgagtacgccggcgctgtacggcggatctggcgcggacgcgtggcggcgctgcaggcgcgccggagcgggctggtctctggggagttggtgcggtggcgcgatgagatagagaacgcgcttggggagga

SEQ ID NO: 15906 - DNA, 109 bp, Glycine max
  Clone ID: 700962370H1
ctcacttattattacatcaaggataaggctaattcatcattgtttggtgctcagaaaaagtaagaagacatttgtcgattgttatccctttctttaagtcctccctgtt

SEQ ID NO: 15907 - DNA, 241 bp, Glycine max
  Clone ID: 700962371H1
ggattttacattaacactttgctgggagcttctgtcacagcaagatgaaactgtcgtatggaagaaaactagtaaaaaaagttgctatgcatcaagagagtctggttctggcccttctttgtgtggtagaggtattgatgtggagactccctattatcgagaattgctaaactgcataggtggaacacagagcagccgttaggttccaattgaaaaaagggaaagattgccttcccgggct

SEQ ID NO: 15908 - DNA, 251 bp, Glycine max
  Clone ID: 700962373H1
ctggcagcaagtagtagtaacaatttaggattgtggtgtgttgttgttgttgtagctatcagtaggtgaatccaaaaccctagccctcactctcaccaccattttttcaattcttgagctatgtttcagggataatagggcagggatgtacaaagaacgagagcgaggtggtgtttccgtttccgcctctaaatccgaggatcggaagcgaatcaacgacgttctcgataagcacttggaacgatcctctc

SEQ ID NO: 15909 - DNA, 251 bp, Glycine max
  Clone ID: 700962374H1
gtctctgtgtttgcggctgaggattccgaacgagcgaccttcttcgtttctcgcaaagtttaagtcatcatgggtaaggaaaagactcacatcaacattgtcgtcattggacatgtcgactctgggaagtcaactaccactggtcatttgatctacaagcttggaggtattgacaagcgtgtgattgagaggttcgagaaggaggctgctgagatgaacaagaggtcattcaagtatgcctgggtgcttga

SEQ ID NO: 15910 - DNA, 249 bp, Glycine max
  Clone ID: 700962375H1
gcaaaacttcagggatctgaattaaaatatggtccatatgaaaatcttcctccattttcatacctgccaatagttattcactttgagaataaccaaccctttgctgttgctaaagagttggttcgagagatcgaaatttcccattggggcaatgtacagatcacagagcattacgatattatccatgctggttctcagagcaaaggagaattttctaggcttgactatcagaccaggccatttttaaga

SEQ ID NO: 15911 - DNA, 159 bp, Glycine max
  Clone ID: 700962376H1
gtctaaaggcccacccacctctctctctccctctctctctctttacacacccacgacacaacagccaaatcctatttttcttttttgttttatcaaacaaaacagagaaaaaaaaggttgtgaattttgcagttgcgtgcgtttctgttccacacaaca

SEQ ID NO: 15912 - DNA, 256 bp, Glycine max
  Clone ID: 700962379H1
gtgaagatgatgtccggaaaatatacgtcgattgacgcgcagagcttcatagatctgttcctgccgttccagattcacgacccgccaccgtcaatttcgcagattcaaatcttcagacatttcctccatctggtcctctgggcaagattactgctgcttccgggcctcctcgtgacgctgatgattcattttcaaaacctgtatctggttctgatgaaccccagcagggtggttggtttcagacttttacaattgc

SEQ ID NO: 15913 - DNA, 259 bp, Glycine max
  Clone ID: 700962380H1
atttagcaatctgagattccattttctccgttgctcacaatggaaatggattcccttcccaacggcaacaacacctccggaaccccgatctccgccaccgccaccgccaaccccgcgcagctccgtcgtcgaaccttccccaactgacggagtctctgaagctggagcaccagttcctcagggtccctttcgagtactacaagaaaaccctccgtgccaaccaccgcgccgtcgagaaggagatgtccgccgtcatctc

SEQ ID NO: 15914 - DNA, 250 bp, Glycine max
  Clone ID: 700962381H1
agctagtttagttatctactcttttctgcatgtttgttctctcaacgactcctccgcgatagtagattattcaatattttggttgggttgaatcccggggttgaagcgttgcagacatcacggctattctaagagtgtctcgctccctcattcatgtccgatctgtacgatggaggacgggtagttgcgtaactgccgttagcccatcgcttcgtcgtaggcgtagttctgtgccttctgaatgtggtag

SEQ ID NO: 15915 - DNA, 257 bp, Glycine max
  Clone ID: 700962345H1
tgaaaatgggaaagtttagttcaagttacagtacttctgattttgttcactttggagttctacttccctttcttctgttatcacagttgttctttcaacttgcatggtgtggctccatagtaaatctccttcctggattagagggaccccttccttttgttcttgaaaccgggtatgtgggagtgggtgaatcagaggatgtgcaggcattctactacttcattgagtcagagaacaatccaaaggaggatcctctc

SEQ ID NO: 15916 - DNA, 260 bp, Glycine max
  Clone ID: 700962382H1
aaaaaaaaacccgaacacatagaaacagagaaagtgtgagtatcgtcgccgtagccctaccctctcttcatattcttctattgcctttctttaactccctcactttttcagttttgaagcgcttccagtggcgtatttacggttatacccttcttgttatgatagcttccaatcggcgtcagcacagagccgaagctcttggcttccacacatattttcggtcttgtcgattgagatacaaagccgccaagccagccgat

SEQ ID NO: 15917 - DNA, 236 bp, Glycine max
  Clone ID: 700962384H1
cttttcttttattcctctctaatttctttttctttttcatggaccgcagatacagagactatcaccatcgtcctgctcatttggcacatgcttctccccctgaatactttgtaccgcctggagaacacaacttacaaagacgatctatatttaaggaagaggacaaggatgcgtcggtggctttgttcgtacttggtcaggttggaaggagtccttacccattcaatatgagaaat

SEQ ID NO: 15918 - DNA, 270 bp, Glycine max
  Clone ID: 700962317H1
gcagcatccaaaggcttctagggttttttttttttctctatcaatctttattagtgttttcaggtcctcctcttcatatctaagtagttcagcgtttttttgtttgtcctttttaattcaattgcgtttagttgcgaagtgcctatgatggtgttaaatatactccgagatttatttctatgacatcaacttcgttctgaggcactagcttatccttccttattttcgattggaagcacatgaaagtgctgtgagggttttgctatactt

SEQ ID NO: 15919 - DNA, 268 bp, Glycine max
  Clone ID: 700962318H1
gccggccataacagacaacggagggcgtttcacattgatcaacagaaacaggtcgtgccctttgtacgtcggtctcgaaaacaccgacacgccgcagggctacccgatgaaattcaccccttttgccaacaaggacgacgacgataacttgagggtgaacacggacttgaaagtgacactggtgcaagtttccacaacgtgtgtgcaatccaccgaatggaagttgggtgagaatgacacgaggagtggaaggaggctcatcgtcact

SEQ ID NO: 15920 - DNA, 265 bp, Glycine max
  Clone ID: 700962319H1
caatgctcctcagctgtcaacaagtgcagggcacagtagagaagcttctggtgaattaaatccagggccagaaactgctggtactacttctgtggcatcagtgcatagagaacctgagttcccactccgattggagacaaggtctcgaagtcaagccatttggaggcggccatcagagaggcatgttcctaggatagtatcttctcctgttgttgaaacaagagctgatctttctgctattgaaacccaggttcggaatttggtt

SEQ ID NO: 15921 - DNA, 262 bp, Glycine max
  Clone ID: 700962320H1
gttgcgttttaggcctaccagacaaagactatggagagattgttagtgcaatcgttgtgccagaggccgatgttaaacgaaaacaagatcaagaatcaaagcctgttctaagcctagaagaattatccaactgggccaaagacaaaattgcaccttacaagattccaactcagctaatcgtgtgggataaactccctcgcaatgccatggggaaggtaaataaaaaagagctgaagaagctgcttgtttcagaacagtgaac

SEQ ID NO: 15922 - DNA, 240 bp, Glycine max
  Clone ID: 700962321H1
tgtgtttgcattgagttgtgctgttccttcctcctgttgtctgtctcttaacaaatcaattcatttccgccgtcgtcgtctccgccgctgagagcgatgtcttccgtcgaaacggagattgagccactcacgtcgggggcgagcaaccgcataattccgcttcttaaagccctcagagcctccctcatcttcgtctacaccttcttcctttccttcctcctgtttattctccctcgccgg

SEQ ID NO: 15923 - DNA, 262 bp, Glycine max
  Clone ID: 700962322H1
ctcgagccggtttttgagagatcaactacttgatccgagttacacttgctgctcatgtgacttgccatcagaagctcatgttcattgttatactcatcagcaaggcagcctgacaatttccgttaagaaatcggagtttgctttaccaggggaacgagaaggtaaaatttggatgtggcacaggtgcctgaaatgtactcgcatacatggttttcctcgtgctacacgaagagtacttatgtctgatgctgcctggggctta

SEQ ID NO: 15924 - DNA, 248 bp, Glycine max
  Clone ID: 700962323H1
ctctttcaagctcaaggtcataagggcatatgctttgaacaaaacctgggtgataggttttctaatggatatatttggggcactgttgatgttaagggcattagctcttgcgcctgtctctgtcatccaaccagtttctggctgtggactggcaattctctcagtcttttctcatttttatctcaaagaagtcatgaatgttgttgattgggtgggcattaccttggcaggttttggcaccataggta

SEQ ID NO: 15925 - DNA, 260 bp, Glycine max
  Clone ID: 700962324H1
cagcaacccatcggaatattccctttcttcgttttgaatcactggacggcatggccactcccaatggcttcgtcgacggcacttctccggaatccgcattgatctttctcggcagcggttgttcgagcatggttcccaacgtcatgtgcctccttcagccttctgaccctccctgccccgtctgcgtccagtcattgtctatccctcccgaacgaaaccctaattacaggtgcaatacgtctctcttaattgattactgc

SEQ ID NO: 15926 - DNA, 258 bp, Glycine max
  Clone ID: 700962325H1
aaacaaactcgttttgttttgtttcacgttccgttctgggagttgaaagaaagaaaggaaggatgggagtgacaccgaacaattgctccttcgatgctctcttccgacttcgccaatttggcttccgaggctcagcgcatgctccacttcggcgccgattggctccacatggacatcatggatgggcattttgtccccaatttaactattggcgctccagttattgaaagtttgagaaagcacacaaagggatatttg

SEQ ID NO: 15927 - DNA, 257 bp, Glycine max
  Clone ID: 700962326H1
gaattctaagcagggcatccactgatcaaaccaatgttgatgtctttatccccttgttcatcaattttgtggtggctatgtacattacagtgatcagcatcttcataatcacgtgtcaaaattcttggccaacagctttcttgttaattcctcttgcttggttaaacatttggtaccggggttattttcttgcttcatctcgcgagttaactcgtctggattcaattacaaaagcaccagtgattcaccatttctct

SEQ ID NO: 15928 - DNA, 258 bp, Glycine max
  Clone ID: 700962327H1
aacactcataacacaaagcacaaagcaaagctcatccttgagttaaaaaatggcagcagcttcttccatggctctctcatccccatccttggctggcaaggccgtgaagctgggcccatcagccccagaagtgggaatggtgagcatgatgaagaccgtcaccaagcaggtctcctcagggagcccatggtacggcccagaccgagtcaagtacttgggcccattctctggcgagcccccgtcctacctaaccggtga

SEQ ID NO: 15929 - DNA, 258 bp, Glycine max
  Clone ID: 700962328H1
cacatatacaaattctctgtgttgtgttgtgtacttgtgttaattgtgttgttgttgtaggaaatttaagtgaagagagaatgatgatgaagtctgctatgtgtgcattggtgcttgtggcactggttgtggttgaagtggggcccatggctgaggctgcggtgacttgcattccaacacagttgactccttgtcttccggcaattaattcaggttctgcaccttcgagtgcttgttgccagaagctgaaggagcaaa

SEQ ID NO: 15930 - DNA, 260 bp, Glycine max
  Clone ID: 700962329H1
ctagtaacccttcttttctctctctctctctcgtgttctgagctgctagaagcaatggagaggaaaagaagccatgcttctttcaccatgtttgcaatgcttgttggattgctctctcagagccttatcattcctgtaatatccaccactgttgcagatcagaagaactactacaccccagatccacatgctggaagtccccccacaggctcacacaatagtagtcctccatctcatggccatgggagctctccaccctc

SEQ ID NO: 15931 - DNA, 261 bp, Glycine max
  Clone ID: 700962331H1
ggttattcttgtctttacttatcattattattattattattattattatatatatatatatacaggttagtcagcttggaacggttgctcaaaaataccagtcttttactcaaaatgcaacacccaatgtatctgttcccgaattacaaaataattgcaatatgtttgttgcatcagcccgtcagttggctaaagccttagaagtaccattggttaatgatttaggatacaaagagatacgtgcgctgcctacagatatca

SEQ ID NO: 15932 - DNA, 262 bp, Glycine max
  Clone ID: 700962332H1
aaaaaaaattaggcgtctaaagggccaaagcttagaaagttgaagctttttttgttgaggtgaaagtgaaatggttggcaaggataatctgagggctgaggacttgaacttgtgctttaagaagcttatgatggtggccgggagtgggaacagtgagaaaggggtgaacttgaaggttggggtgatcaccgagtggaaggatattcctgtggagcttctgatgcaaattctgtcccttgtggatgatcagacggtgatcata

SEQ ID NO: 15933 - DNA, 267 bp, Glycine max
  Clone ID: 700962333H1
gaacattattatattgaatgtcttgtcttgactgagtcagatgatgtgatttgcataatagaatgtgttgcttggttttttactcttttaagccatgtataatggcaaaacatgtgggctttttaacatggtgaattcttgtggcttcaaagaaattttggtattactgtggagggtgggtattgtatagtgcgttagaaagcatattttcaagtttttctgtacagttttggtacactgggtcaatcttatgccttccccaattaa

SEQ ID NO: 15934 - DNA, 263 bp, Glycine max
  Clone ID: 700962335H1
gataataataataataataacctagacgacgagtttcagactcaaaacggcacgcacaaacgatgtcgtagcatcggggatattttctccctctcggaactagccaacagcaagagcgtggtgaagctctgggacaccataggcttcggcctgggcttggacttcgatgattacgatggttactacgttggtaacgcggcggttccgacgagctccaccgcgtctccctcggtggttgtctcggcgggggaaggcgcgtgcgg

SEQ ID NO: 15935 - DNA, 259 bp, Glycine max
  Clone ID: 700962336H1
gtttcatcttctggtggcttatacacatacgggtggagcaaatatggccagctaggacatggaaattttgaggattctcttgtgcctcagaagcttcaagccttgagtgataagttaatctctcaggtatcaggtggttggaggcatagtatggcactcacgtctactggactactatttggatggggttggaataagtttggacaggttggagtcggtgacaatgttgatcactgctctcctgtgcaagtgaagttcc

SEQ ID NO: 15936 - DNA, 258 bp, Glycine max
  Clone ID: 700962337H1
cgcacgcagagggagatggagcttcacgataagaaccacgatggcttcgtttccttctccgagtacgatcctcccagttgggttcaaaatgcagataatgaatctttcggttatgatatgggttggtggaaagaagagcattttaatgcatcggatgctgatggagatggtgttctaaacttaactgaattcaatgactttctgcaccctgctgacagcaaaaatcccaagcttcatcaatggttgtgcaaggaggaa

SEQ ID NO: 15937 - DNA, 253 bp, Glycine max
  Clone ID: 700962338H1
cgaggcttcaggccaaataacttccttcactgtcgaaattgataatctcaaacatgatttggtgtctgtgcagaatgagaaacatgaattagaacagcagtgtgaaaagctgaagatggagctggattctacaaacaaccggaacgatgagattgaagagcagctgatagctaaagaccgtgagaacaccaaattgagaggggaaattttgggactgcagggaacaataactgcatggaggatgacattagct

SEQ ID NO: 15938 - DNA, 273 bp, Glycine max
  Clone ID: 700962339H1
gctcggctcgcgcctcaattcagcttaagagcccaatatcggccccagcagtaactggcctgcctctaatatctgtcttacgcaacaagctttgcttctagtccactttcaattgggcataagccaacctgagccgaattactactctaaaagctgcccacaagacgcagcgatcatacaccggaacaagtcacactgactatgtaacaaccatggacacactgccgcttcgtcgggtcgaaatctcttccacgactacgcggttaagtcatg

SEQ ID NO: 15939 - DNA, 92 bp, Glycine max
  Clone ID: 700962340H1
tgtttctctatctagatttctcacgcgtcttcatgcctctcattccctctgatttgttctcaccctttcagatctcgtctctctcactaccc

SEQ ID NO: 15940 - DNA, 153 bp, Glycine max
  Clone ID: 700962342H1
cgaaccgaagaggaggacaacctgctgaacgccgagcaccacttcgcgagcttcaaggccaagttcgccaagacctacgccaccaaggaggagcacgatcatcgcttcggcgtcttcaagtccaacctccgcagagccacggctcgcacgcca

SEQ ID NO: 15941 - DNA, 255 bp, Glycine max
  Clone ID: 700962314H1
atggaattttgcaaaaaggtagtcatcgcccgcaacgatcccatatcccttgacttctctacgtgaagatccttgtttcgcatagagctagttaaaatgtctgatggaaatgcagggaaaggaaagagaatcggcatcattggcgtctcagccttattgttggtggctatggttgtggcaatcacagttggggtcaatctcaatgagaatggttccaacaatgatacagagcacgacaagagaaatcatgtaggt

SEQ ID NO: 15942 - DNA, 253 bp, Glycine max
  Clone ID: 700962344H1
cttccccaaaatttcacccctttcattcaattcttccctcttctctgctactgatccatccctcgttttctccgaacaatggctgctggtgtcactgtcaagtccgaggttctagaatcttctcctcctgaaggagtttgttccaacacggtggaaaaccacctggtccagaccaatttgtctgatgggtcacccaacaagtctgtgccagcatctggacttgatgcagtgattcctagtgcaaatcagctta

SEQ ID NO: 15943 - DNA, 274 bp, Glycine max
  Clone ID: 700962279H1
cacagtggtggatgtggtcgggtacgagcactagagatgggaagctgcccgggacccatagagacacccgctcttctcctatctacctcgtaaagggcttcctcactttatctcccctgacctactcacttctctcccttcccccgattcccatctccttcaaatttctccactccactttttggaaggacttgcttcaaccactacatcaaaattaggagggcttcaccaaatgcttggtttgcaccaacatggaatggcggctgtagccagg

SEQ ID NO: 15944 - DNA, 125 bp, Glycine max
  Clone ID: 700962280H1
gtgcagggttgcgatccgaaatgggtcctggctgcccatagctgaagctatacaagctgcataatggcaagtccctcggaaaggaatgatcggatgcaattgccattgtgtccaactccacacag

SEQ ID NO: 15945 - DNA, 278 bp, Glycine max
  Clone ID: 700962281H1
agcaacttcacctgctccaacttcgagacatcaaatgatcatagtatttgaatgccatgtctgattgtctggctcattaagcatgcagacaaggataagacatgtgatagttttcctatgagtaactgtttctgccaattgattgtcaacattaccagatctgctatgcactcacagttgaactcagcaatgatgttgcacggatctctgaaacgtaattatgtatacatggtcacccacaaatggtgttcagacaagaattgagacagatccagcag

SEQ ID NO: 15946 - DNA, 274 bp, Glycine max
  Clone ID: 700962282H1
aaaatatcaggctcgtcaaaaaggacaaattgggatcactaatccaacacactactttttgccaaaatctcaaagtgctgcagattacaaggcagcaagtagagctctggacttcttccttggttggtattctgatccggttatctatggtgactatccggagagtatgaaatcttcagtaggttctaggctcccaaaattcacaaaagctgaatctgaaggtctaaaaaattccacagattttcttggtgtgaattactacaccacttattat

SEQ ID NO: 15947 - DNA, 269 bp, Glycine max
  Clone ID: 700962283H1
agcttacttcttcttcaccaaagacatcctccatgggaagaccatcgacgtctaccagacgccggaggggaagcaggtggcgcgtgactttacctacatcgacgacatcgtcaagggttgcctcggcgccctcgactccgcccagaagagcaccgggagcggcggcaagaagcggggccctgcccagctcagagtgtacaatctagggaacacgtcaccggtgccggtggggaccttggtgtccattctagaaggtttgctgaaaacca

SEQ ID NO: 15948 - DNA, 272 bp, Glycine max
  Clone ID: 700962284H1
acgctccctctacctcgctttctcccccgacgaggaaatcggtggccacgacggtgccgagaagttcgctgactcctctatcttccaaagtacgaacgttggcgttgttcttgacgaaggtctggcttctcccgacccccattaccggtctttctatgccgaaaggagtccctggtggttggtcatcaaggcctttggtgttcccggccatggcgccaagctttatgataactctgccatggagaatctctttaagagcattgaaagtatcc

SEQ ID NO: 15949 - DNA, 274 bp, Glycine max
  Clone ID: 700962285H1
aacagaatcttctaatattccctcttctctctccttctatttatccttccctccataacagtaacaaccaccaccacctctgcaacacaacacacataacaagtaacaaagagaatgagagcgctaaattcgtacgtgctcctcgtagatcttcactcccaccatcacgtgcccacctcaaccctctcctacctcagaaactcccgcttcatatcatccctacgtcgacgctccccaagaaccggaatccgatgtacggcgtcgcaggagattt

SEQ ID NO: 15950 - DNA, 267 bp, Glycine max
  Clone ID: 700962286H1
aagctcgaggacttctttggggaaatttcaattccttgagtaattagggttctcctgtttgattacatctaattagaggcattaattgtccgattcagccgtgtgccataaaatttgacggacactggttcaaggtaatcatggtgcacaagcgttcttttgatgctgaggaaatacttgaggggtctttcaaacacccaaaacatgcaggaccaagcactgagcttttttcattaccagaatctgttttccccgatgatgattgcc

SEQ ID NO: 15951 - DNA, 269 bp, Glycine max
  Clone ID: 700962289H1
taccgcggtcgcggttgcagaacggagaatcatcatcggaagctgcaggcaaacaggtatcatcacgggctcagtctggaggcttaaaaagtgcagatatttgtactccagagacagcacatgattttgaaaacccaaaggagtctgaatctcctcgttttcaagctatattgcgcgtcactagtgcacccagaaagaggtttccttcagatatcaaaagtttttcccacgagctgaattcgaaaggtgtctggccttttccattttcg

SEQ ID NO: 15952 - DNA, 267 bp, Glycine max
  Clone ID: 700962290H1
gtggacctggccaaggacattcttcaggcgaacccaaataactacgcggtggtggtgagcacggagatggtggggtacaactggtaccaggggaaggataggtctatgcttatcccgaatagcttcttccgcatggggtgttccgcggttctgctttccaaccgtcgaagggactacagccgcgcaaagtaccgccttgaacacattgttcgcacgcataacggtgccgatgaccgcagcttcaggtgtgtgcaccaagaggaagat

SEQ ID NO: 15953 - DNA, 264 bp, Glycine max
  Clone ID: 700962291H1
aatggtcaatgatactttggttcgccaggctgcaatggtactcaagtgtacattgttgatgtattacaagaacagcagaggccgaaattatcgtaagcagggtcaaatgctgactttagttgaatacctcctcctgctttaccgtgccttgttgccaacaccagtttggtatcgtttcttcctgaacaaagaatatggaagcctcttttcatcactgatgacaggactgtatctaacacttaaactcacgtctgttgttgaaaa

SEQ ID NO: 15954 - DNA, 268 bp, Glycine max
  Clone ID: 700962292H1
atttcattaacccaacagtgtcgctgcaggagaagaagatcgaatagaaacgaaacgcgaataagtttctttctctcttgctggacgaataatggttctgaggaggaagaagatggagcagcgcttcaccttcttctgctgatgttgatttcatggccacctcccagtcccagcatcgctgcgttttcgttgggaacataccgtatgatgccacagaggaacagcttattgaaatctgccacgaggttggcccagtagtctcattcag

SEQ ID NO: 15955 - DNA, 268 bp, Glycine max
  Clone ID: 700962293H1
aaaagactgatggggacctgtgtaatccctatgcctcagatggaattgtctagcaatgatgatgaagttggaaaggcaagtactgactgtagctgtgaagaccagggttccatgagatgtgtcagacaacatattgctgaagaaagagaaaaacatataaaaacatttggggttgagaaattcactgaattgggattcactaacatgggagaacaagtggcagaaaattggagtgctgaggatgaacagctatttcacgaggttgttt

SEQ ID NO: 15956 - DNA, 133 bp, Glycine max
  Clone ID: 700962295H1
taggatgaatatgggttcttcttcccgtcgggacactagcaagacactagagctagagcgatacaacagctacatccggagactcaacagcaacaagctcctcaacgcctcctccaaactcgtcttgcgcgcc

SEQ ID NO: 15957 - DNA, 275 bp, Glycine max
  Clone ID: 700962301H1
tgataacaaagttgaagaagaaaaggccttagtgctcagtgctagagaacttttttttgttttcttctttttttcttttttcatctcttacttccatgatttgttgtgggcttctcaacatcatacattgactctatcagtttcattcctgaatcaattagtttcttcactttcactttctaactgggaggatcaaagtgtgtgtctttgtcctcttggtgttgtttcttcttcttcttcaagtgtgcttcataaagcagtaggatttggaagca

SEQ ID NO: 15958 - DNA, 256 bp, Glycine max
  Clone ID: 700962302H1
gtacaaaaaagtgtcgtatctgagaagaatatacattaagcaagtcatgcaggttaattccccagatatttgtaacatctttgcttgttgacgtcttgacaactcacacactacagcactttacacggtgacacttcactcaatgttcttttgggttagaatcctctaccggtcaaaactcttcgtaagtagccccttctgaaactgccgataatccttcgccgcacggtgaggatcaatgattgtcaccacaaat

SEQ ID NO: 15959 - DNA, 266 bp, Glycine max
  Clone ID: 700962304H1
ctcaagagaactctcaagggatacatcgcagccggattcgccggaatcattctcgaagatcaggtttctcctaaagcgtgtgggcacacgcgcgggaggcgagtggtttctcgagaagaggcggtgatgaagattaaggcggccgttgatgcgaggagagagagcggttccgacattgtgattgtggcgcgcagtgatgctcggcaagctgtgtcgttggaggaagcgcttgttaggtcaagggcctttgcggatgctggagctga

SEQ ID NO: 15960 - DNA, 264 bp, Glycine max
  Clone ID: 700962306H1
gaaaaatctagactagttgaagaaagaaacgcttgtctttccctccgtcctcagtctggagcatcatcatgatccgttcccttccaatttaccccaaaaattaaaatatactatttcattccaatgtttcccaagaagcggcaacgcaccaccgcagcctgccgttcctcctccacactcgccaccatctcttccctctccgacgtaaacctaaccgaaatctcccataaccctcgaccttcctctcccatgcccgacgaccgt

SEQ ID NO: 15961 - DNA, 265 bp, Glycine max
  Clone ID: 700962307H1
agacaattcaacttaagagatcaatatggccaccaccactacccagcctccctctaatatctgttttttccttctgttgttgcttctagcacactttcatttgggcataagccaacttgagctgaattactactctaaaagctgcccaaaagctgaagagatcatcaaggaacaagtcacacaactatataacaagcatggaaacactgccgtttcgtgggtcagaaatctcttccacgattgcgtggttaagtcatgcgatgca

SEQ ID NO: 15962 - DNA, 258 bp, Glycine max
  Clone ID: 700962309H1
aagttctactgggcaccaacaagggatgaccgcattggtgtctgcactggaatttttcgcaccgattcaattcctgaacatgacgttgtcaagattgttgacaccttccctggccaatccattgatttctttggtgcactgagggccagagtatatgatgacgaagtgaggaagtggatttctggtgttggtgttgacggcattgggaagaaacttgtgaactcaaaagatggacttccaaccgttgagcagcccaag

SEQ ID NO: 15963 - DNA, 261 bp, Glycine max
  Clone ID: 700962310H1
ggaagaagagctaaattcaattattgtggaaatgagaaggaattgcacttctttacaagagaaattggtgaaggaagaatccgaaaaaacagcagcagcagaatctcatcttaaagagagagaagctaggcttaactttgagaggtcacagagtacactgcaggaggatcttggacgagcacaacgagagctccaaagtgcaaatcagaagatatcatctctcaatgacatgtataagcggttacaggattacataacaag

SEQ ID NO: 15964 - DNA, 257 bp, Glycine max
  Clone ID: 700962311H1
gtcagtatagtcagccaggctttgatatttgtaacccgttctcgaagctggtcctttattgaacgccctggaatgctgttagtttgcgctttcgttattgctcagctgattgctacaatcatagcagtatatgctgactggggctttgcaaaggtgaaaggaattggttggggttgggcaggagtcatctggctctacagtattgtcttctatattccacttgatgtcatgaagtttgccacccgttatgtattgag

SEQ ID NO: 15965 - DNA, 116 bp, Glycine max
  Clone ID: 700962312H1
cggctcgagtgctgcaagtgcaactccaagaagcgcagtggcaagccaccatgtttcaacattcaacagaagcgtttggccttccacttttctctttggatttggttcttctgctt

SEQ ID NO: 15966 - DNA, 260 bp, Glycine max
  Clone ID: 700962313H1
ggcaatcttcacagcacttgctttctctcagaagctgtctggtctcccaccagaaactgtgttccaaccacttcttaaagataacctagtggccaaagggctagttctgtcatttatgactgacttctttaaggagtatctgattgacaacagccttgatgatcttatttcaattctaaaacggggaaaagtagaggaggatcttttggacattttcccccctacaaaaagatccattgaagctttctctgagcatttca

SEQ ID NO: 15967 - DNA, 276 bp, Glycine max
  Clone ID: 700962278H1
cacaacaaaaccctctctctaaaaccctctctctgtctcccttccttctcatcttcaccaccaccaatggcgtcgccgccgccaccaccttgtgtcctcctcctcttcctcaccctcgtcgccgccacggcttcctccctcacctgcaccacccaaaagctcacggactccaagaacaacctctactccaactgcctggacctgcccgcgctcgattccttcctccactggactcacgaccccaccaacgcctccctctcggtggccttcgcggcg

SEQ ID NO: 15968 - DNA, 281 bp, Glycine max
  Clone ID: 700962250H1
gtgggaactcgaaccagtaggacatcataagagtccaattttgtgaaaattattaccattcattcttattcatcaacgtcaccccttctgtgcccacttccaaatcttctcctctcgctatgggttgtggctcctcccttccagatagggattcaaggcagttgggtcgacccaattccgagaatggtggagggcaggacgccaagaatctaagggtcaagcttgttctcttacgtgattctggcgttggcaaaagctgtattgttctacgatctgttcgc

SEQ ID NO: 15969 - DNA, 278 bp, Glycine max
  Clone ID: 700962251H1
aaggtcctcatgatcgtcatccctctccaggtcctcgccaacgttgcctccgtcgtcatcggcgaaaccggtcccttcatcaaggattgggttacttggaaccaggtcttcctgcttgttgacattatctgctgctgcgccatcattttccctattgtgtggtccatcaggtcgctcagggagacctccaagaccgacgggaaggcagccaggaacctggccaagttgaccctcttcaggcagttctacattgttgtcattgggtacttgtacttcac

SEQ ID NO: 15970 - DNA, 280 bp, Glycine max
  Clone ID: 700962252H1
gaggtcctttgcaaacatctgcaatgtagggacaaagaatgagcaaatggctgaggcctctgcacaagcttgtgtctctattccttccaatccttggagttctctgcaaaggggtttcagtgcataataattcctgtaatgtgcaccagtaaagaccaaagtatgattattgttacatctatgctatatgattgtacttgtacacacatattttgtcccgcctttgtaaatacaattgggacactactaggattgggaagaagggtctttacatttttag

SEQ ID NO: 15971 - DNA, 130 bp, Glycine max
  Clone ID: 700962253H1
gccgacgaaccaactcgctgccaccaccctcgacgacgttcccaaagccaatttctccgaccgcgtcgccattcgatccatcatctcccgccccgacggcggctcgggcctcgccggcagcaaggcgcgc

SEQ ID NO: 15972 - DNA, 279 bp, Glycine max
  Clone ID: 700962254H1
gtcaaaaagagaccctgctgcacagttcctcatcatcttcagaagcaaggacacaattggattgcgatcccttgctgctggtggaaaattattgcagatcaatagaagaatggagtttgtatttgctagtcatagttttgatgtttgggagaactggactctagaaggttccttacaggaatgcagactggtgaactgtagaaacccatcagctgttttggatgtacgcgttgagattttggcaactgtaggcgaagatggagttactcgttggcttga

SEQ ID NO: 15973 - DNA, 276 bp, Glycine max
  Clone ID: 700962255H1
cacgattgtttcagtcgaaccatgaaggatgaaggggtgattgctctttggagaggaaacactgctaatgttatcagatacttccctactcaggctctcaactttgcttttaaggattatttcaagaggcttttcaatttcaaaaaggacaaagatgggtactggaaatggtttgctgggaatttagcatctggtggggctgctggggcttcctctctgttgtttgtctactctttggactatgcccgaacacgtttagcaaatgatgcaaaggct

SEQ ID NO: 15974 - DNA, 277 bp, Glycine max
  Clone ID: 700962256H1
atttccttttcaagagcttgtatggtttcacagtcttcttctcaatgggtgaactactgatttttgtcactcaggctcctgtaaattatgtttctctccgttgtgtaaaacctagtttgaggccactgtctatggctatatctactgtttcaatccatgtctttggtgatgtgccttcctcaccacttgttggggtcctgcaggatcacatcaacgactggaggaaaacagcactttgtttaacatccattttctttcttgctgctgtaatatggtt

SEQ ID NO: 15975 - DNA, 272 bp, Glycine max
  Clone ID: 700962257H1
ttcaaagagagtgtgtaactagtaataactgtgtatttgtgtgtatgtttttatgatcatataataatagatatgtttttggcatgccagttatgagtgctactattactactactactaccttaaactagaacaatgaacaggggaattgaagttctttctccagcctcatacctccgaagttccaattggctgttccaagaaagcttggggaccaggtggactccacaggagaacaagctctttgagaatgctttggctgtgtttgacaa

SEQ ID NO: 15976 - DNA, 278 bp, Glycine max
  Clone ID: 700962258H1
atttcgaaccctttccttttccttccttctccgcctcaccaccctaacccaaccctctctctttctctctccaaaatctctctccctcccaccgttatttagggtttggcagatctcgatccgtcacaatggacgttcgcaagcgcggaaggcccgacgtcaacctctaacggcgccgttaagaagaccaagcaagaattggagtccttatcaagtggtgtacgaagcaaatcgaagccatgtaccaagtttttcagtactgctggctgcccatttgg

SEQ ID NO: 15977 - DNA, 276 bp, Glycine max
  Clone ID: 700962259H1
accaaggtttacaaagaaggtggggtgggatgccaagctagtaaatgaatcacatccatgggttgagaagcaaattgtccaccgtccaaagttttcaccttatcagagagcatttagagacagtcttctagactctggtgtgtcaccctttaatggcttcacctatgatcatctctatggaacaaaggttggtggaaccattttcgacagatttggccgccgtcacacggctgctgaactgcttgcttcagggaaccatgacaaacttactgtttt

SEQ ID NO: 15978 - DNA, 279 bp, Glycine max
  Clone ID: 700962260H1
aaggttgggtttcgctgctttgaccttatctatcttagcttccgtgcctcgtcaagcattggcatcgagccatggctttcatgctagaaagatctttccagttgaaccgtcatcatttaaaggtttatgctcctctgcgatcactattcatggctacgagtgtcaggaacttgaagttactaccatagatgggtacattcttagccttcaaaggatccctgaaggtcgatggaaggttagtggccgtgagactatgaaacagccagtgataatacagca

SEQ ID NO: 15979 - DNA, 275 bp, Glycine max
  Clone ID: 700962261H1
ttctagtgttcttttaagctctttgtgatatttatgtaatttgatttcatcttctttgtggtgtgcaatgaataatggtgatgaagaaatgaacttatggtaatgtgtttgcaaagacacaaatttagccactgtttcgtgtaaaattttctgcgaaaatttaggttcattcgtttttaaatgatatttgctacgcaatttgttatgtaacaaaatgtgatttcattggtagtacatgcaatgaaccagtactgtcctgtgctgtactttgcatt

SEQ ID NO: 15980 - DNA, 277 bp, Glycine max
  Clone ID: 700962264H1
gtttgctactatgggctctcttcatgacatattgcacggtagaaacggagttcaaggtgctcaacctgggccaactcttgattggatacagcgagttagaattgcagttgatgcagcaaggggattggaatatttacatgagaaagttcaaccgccgattatacacagagatatccgatcaaacaatgtgctaacatttgaagattacaaggccaagatagctgactttaacctttctaatcaggcccctgacatggctgcacgtcttcattcaact

SEQ ID NO: 15981 - DNA, 279 bp, Glycine max
  Clone ID: 700962265H1
cagaatttgacaggtgtggctgggagccctgcatatgttgcaccagaagtgttgtagggtagatattctgagaaggtggacatatggagttctggggtgctcctgcatgctttgttggttggtggtcttccatttaaaggagattcaccggaagcagtttttgaggaaattaagaatgtcaaactagattttcaaacaggggtgtgggaatcaacatctaaacctgcacgagatcttgttgggagaatgctgacaacggatgtttcagcaacgatagca

SEQ ID NO: 15982 - DNA, 278 bp, Glycine max
  Clone ID: 700962266H1
atatcttatgtctctgctagtggtgcattggcttcttccattttactcctttctatattttggaatggaaccattgatggcacaggatttcatgcaaagggaacaatttttagattgagtggaatacctgctgctgtcagtttatatgccttctgttatagtgctcatcctatccttcctactctctataattctatgagagacaaaagtcagttctccaaggtgctgtctgcatgctttaccgtatgcacccttggttatgcagcagcaggtgtttt

SEQ ID NO: 15983 - DNA, 278 bp, Glycine max
  Clone ID: 700962267H1
gacacctatcaatttcgtaggtttgtacatcttttggtttggggcgaaagttcagccttttcagatttgcatcaatttcaacagagaacaaccgtgatttgtggattgctgtaaagtgcattatttggccattagctaatggacaagggggtgcctcctagcctcttcgtcaatgatggttctttcatggagaggttcaagcaacttcaacaagagcaggataaagggaagaatgtcaaattggaggattctaaaccaattaagggtggttccagtgg

SEQ ID NO: 15984 - DNA, 276 bp, Glycine max
  Clone ID: 700962268H1
gaaaaggcgtcttcataaacgccgcccaaaacttctcatacccttttattcattccattcgtttctagggttttcttttctttgccgagaaaatgagagagtgcatttcgatccacattggccaggccggtatccaggttggaaacgcctgctgggaactctattgccttgaacacggcattcagcccgatggacagatgccgagtgacaagaccgttggcggaggagacgacgccttcaacacatttttcagcgagaccggcgccggaaagcacg

SEQ ID NO: 15985 - DNA, 277 bp, Glycine max
  Clone ID: 700962269H1
tccattttcgcttctcgtagcgttttcggaacagttatggcttccattgccggatccaactgcgtcgctctccgaaccgccaaccttcggcgcctccggtaaccggaaaatcggccagatccgccaatggtctccgattctcacgaatctccgtcccgtttccggtcttcgtcaccgatcgaatactccgtttagctcctccggtgtgagagcacaggttgctactctggacgaagcaagaaccggagcaactcagaaagtggaagcgccggttgca

SEQ ID NO: 15986 - DNA, 272 bp, Glycine max
  Clone ID: 700962271H1
cactccctcctttgctgaaaactaccgggttgtgctgtttgattggcccttttctggagctgtgaaggatccaagcctctatgaccctttgaagtatacctccttggaagcttttgcagatgagttgatcactcttatggatcagatggacctcaaagctgtcacctttgttggtcattccatgtctggcatgattggttgcttagcctccatcaagaggcctgaactctttaagaggcttattctccttggtgcttctcccaggtatatta

SEQ ID NO: 15987 - DNA, 126 bp, Glycine max
  Clone ID: 700962272H1
agcactttgtacataatacgcaggctttggcttcagagctaagaattttccaataaatataagcttttggcttcagtgctaagaactttccaataaacatcatatttgttaaatacattttgtcat

SEQ ID NO: 15988 - DNA, 270 bp, Glycine max
  Clone ID: 700962273H1
aacacttcacaatctctgtttcagctttctctcttttctacaatggcttgcaccaccgtcgtgttgacgctagtcgccgcattgttggtaacctccgtcgtggctcagtctccggcgtcctcaccagctctgtctccaaagcgcacccccgtcgccacacctcagaagtctccctcgccggcgatttctccctccgccgtgtcgccgtcgtcctctcctcccgctccggtggtgaacactccgtctccgtcaccaaactcagtcgactct

SEQ ID NO: 15989 - DNA, 269 bp, Glycine max
  Clone ID: 700962274H1
atgttttcatgttcttctctggaaatacgggagaagaacaagatgcaagagaaccacaaggcataatgcatttcgagattgacatagatgtcacgttgcatgacaagaaattagccagattgaatcctttttattgttgttgttggcttttcagaaaaggttaattgtttcctctcatgggaaattgctgtggaactcgttgcaaggttgatgacactttgaactccaaccacagttctgcagatgttaccaaagttcaccgtagaagc

SEQ ID NO: 15990 - DNA, 273 bp, Glycine max
  Clone ID: 700962276H1
ggccgacgaagccaaagccacaggcaacgcagccttctcctccggggactatcctgccgccatccaccacttctccgatgccatcgccctggctccctccaaccatgtcctctattccaaccgatccgccgcatacgcctccctcaaaaactaccgcagatgcattagcggatgccaaaaagacagttgaactcaagcccgactggtccaagggttacagccgtctcggtgccgcgcatcttggcctttcccaatacgatgatgctattttgg

SEQ ID NO: 15991 - DNA, 270 bp, Glycine max
  Clone ID: 700962248H1
aaataaagcacagaatagttgaagtgaatggcataaaaacgcatgttgcagagaaaggagagggtccagtggtgttgttcctccacggcttccctgagctctggtactcatggcgccaccagattctctctctcagctccctcggctaccgcgccgtcgctcccgatctccgtggctaaggtgacaccgaggcaccaccttcaatcagcagctacaactgcttccacatagtgggtgactacgttgcgcttattgactctctgggtgtcc

SEQ ID NO: 15992 - DNA, 289 bp, Glycine max
  Clone ID: 700962218H1
aggctcgagtgttagattagaagccggtttgtgatgttgcacttcactttttgcaggctggattccgattccaccatgctgaaccagattaccttgatgctcgtgaattggattcccaatacctcccgatacacttcctgcaaatgcttcgcaccgcgttgctgttggtgcttttgtcatgaatgccaatagggaggtgcttgtggttcaggagagcaatggcaggtttagtggccaaggaatctggaagttgcctaccggaggcgttgatgaaggtgaagatatttgt

SEQ ID NO: 15993 - DNA, 288 bp, Glycine max
  Clone ID: 700962219H1
aaaacctgttggtttgatctccaagaaatcttctatctcatgtaaatcaacaggagcaaacaacactgaagagaaagaaagtattacaacttatgatgatagggcacataccaaagatgagaaaaatgatcacactcttgttgttcatggcttggctgatgcttgtagattcgtttgtaatgatgcaaagtttctctcacgtggcataatgaggttggatgctcgtgcacgtcaagatgttgcttttcttgggactgaatttctcaaacttgatgctcgggcaagaga

SEQ ID NO: 15994 - DNA, 284 bp, Glycine max
  Clone ID: 700962220H1
attaatggaagccatttccaaccaaaaccacattcctctcttcaatgcaaatgaaaccctccctgaccaattctccctcctgtcaaaggtccttctttcaaaattctcaaatcttctttggccttgtaccttcttacttgtgcaaaaccgggaactaatgttccattttgtgctactatgtttcccccttgtttgtttcctggtgaagcatttcctctcaaagccctcacccatttaccttgtggacttctcatgtcttaaacctccaagccactgcagggtgc

SEQ ID NO: 15995 - DNA, 287 bp, Glycine max
  Clone ID: 700962221H1
ggagcagccatgtagtgggaaaaattagctcatggacagatttggactcagaggatgaaaccctcagggtagattctgaaaccactcttagacaagaaattgcttgggcttctcatctctctttacaggcctgccttcttcctgcccccaagggaacttcttgtgctaattatgctagatgtgtgaatcagattttacagggttcaaacaatatgcagttgtggcttaggcttccattggtgaagcctgatgatgactctatggatgcaaagtctgttgctttggtt

SEQ ID NO: 15996 - DNA, 285 bp, Glycine max
  Clone ID: 700962222H1
aaaaatactaagatgacaaacattggagcacttgttgtactctttgcatttctcttcctcagttgtgcctatgcacaagacacaacaacccttgtgcctgcaatcataacttttggtgactcagccgtggatgtagggaataatgactatcttcccacccttttcaaggctgattaccctccttatgggagggactttgctaaccaccaacctactgggaggttttgcaatggcaaattagctactgattttactgctgacactttgggttttaagacctatgct

SEQ ID NO: 15997 - DNA, 127 bp, Glycine max
  Clone ID: 700962224H1
tttcactgcagagtgttattttgagtatcagcatcaatggctccaattgcagtgggaaacgtgattccagacggcattttggcttacttggatgaagaaaacaaaccccaaactgtctccattcact

SEQ ID NO: 15998 - DNA, 226 bp, Glycine max
  Clone ID: 700962225H1
ggccagactcagttaaacttattgcaacttgtgctctagtgctcatagtggtcactgctttctttctacttcccaaaactcagggtctaattagtcaacaatgagaaagtactgattacattctcttagttgttggcagtgactaaaccaattggtctcaggttttctaagttttagatagtagacactagtaatagatttcttctctttcttagtctcttttgct

SEQ ID NO: 15999 - DNA, 281 bp, Glycine max
  Clone ID: 700962226H1
gacacaaagcacatagaagagaaagaaacaaaacaaagaggagaaagaaagtagttgaggaagatacaaacaatttttgcagattgttgagaatgcctttcaagaagcctcatcacacctcagacaagaactacataacaggggacgacggaggcaagttcgagatacaacctagaggactcaacattgtgtggggaaatgattctcgatactggaaaattccagaacaaggtcctgcggagctgatccaagtttcatggttggaggtatccggcgtggta

SEQ ID NO: 16000 - DNA, 283 bp, Glycine max
  Clone ID: 700962227H1
actacatcagtgatttctcctgatgtttcatatgcaagcagctcagcaacaacaaatgagatatatgaggttggagagttgtttgatttaagcatccaactaatatacttggtattgctattaggtttgctagggactggaactttctttgtgattagtcaagttcttgtccgcagagaacttgacctatctgccaaagagttgcaggagcaagtaagaagtggtgatgctggtgcaactgagctttttgaacttggtgcagtgatgctgcgcaggaaatttt

SEQ ID NO: 16001 - DNA, 284 bp, Glycine max
  Clone ID: 700962228H1
gaaatgttgaagcagaagaaccttgaaaaacaagctcaaaatggtgaaatcaatttagatagagaagtgaagactggagaatcttcagaagggtcacaggagcaaagtaaccatacaaagatactagctacttccaatgcctttgatgctactacccacaatgtcggctctcatttgccgggaaatttcatcgaaccatcatctgttccactgtttaaagagtttatgacgaagttcagatcatctttgagaagtcatagcaatctttctctgctccttattac

SEQ ID NO: 16002 - DNA, 284 bp, Glycine max
  Clone ID: 700962230H1
aactctttgaaatgttgtcaccccttcttctatttctacgcctaactcttcctgtgtttttgttgtcgttcttcaaataccgtaaaaccttcaagaatccaccacctccaccaggtcctagaggccttcccataatagggaatcttcatcaactagatagtccttctcttcatgagcagctatggcatctctcaaagaaatatggtcctttattttcccttcaatttggactaaggccagccatagttgtttcctctccaaaactggccaaagaggtaatgaaa

SEQ ID NO: 16003 - DNA, 277 bp, Glycine max
  Clone ID: 700962232H1
catttgctactatgggctctcttcatgacatattgcacggtagaaagggagttcaaggtgctcaacctgggccaactcttgattggatacagcgagttagaattgcagttgatgcagcaaggggattggaatatttacatgagaaagttcaaccgccgattatacacagagatatccgatcaaataatgtgctaatatttgaagatcacaaggccaagatagctgactttaacctttctaatcaggcccctgacatggctgcacgtcttcattcaac

SEQ ID NO: 16004 - DNA, 289 bp, Glycine max
  Clone ID: 700962233H1
gagaaagatgataaacctgaggactccaataactcattgtctagtgaagacagcaacagcaacgataaagatgggtccattgatgaggaaaggtcatcaccaattgcacatgctgttaaggttgagcatgacactgacactggaaacaggttgaaggaaaataaaaaccctgaagcatttacagaaggctcacgcatggacggcttggcttgtgagagtaatgaaacgcgtccgggtaaggatgaaggacaagcagatacacacacaatcagttgttcaatgcataaag

SEQ ID NO: 16005 - DNA, 292 bp, Glycine max
  Clone ID: 700962234H1
acgaaaacaaaatctctctttctctctcctccccagaaacaaatttgtcaagcttttctctctgtcaaaaccgaaacgcagaaaacaaaacaaacacacacaacacagcacaacccaaaagaatagccaacagcaaaacgcaaacactctcctcaaaacgacaaccgccacaaaacaacacaaccaccgcccctaaccgccttcatcttctctctctctctttagggtcgatggctgaactcggaaacaacaacaacaacggcgccaacacgacgtcgtcgaggttctcctt

SEQ ID NO: 16006 - DNA, 283 bp, Glycine max
  Clone ID: 700962235H1
aaaatgggttcttctttgtggactttgtgtctaattttggcttcactagcctcttctgcattctgtgcctttccacggaggccagtggatgttccattcggcagaaactacgttcccacttgggcttttgatcacatcaaatacttcaatggaggttctgagactcaacttcatcttgacaagtacactggtactggcttccagtccaaagggtcatacttgtttggtcacttcagcatgaacataaagatggttcctggcgattcagctggcacagtcactg

SEQ ID NO: 16007 - DNA, 282 bp, Glycine max
  Clone ID: 700962237H1
atcaggttgacgttattctcagcgatggaagcttccacagagccgccgtgctgagcggtgcttcaacaggtaaatgattgctgtttgtttgagagagaaaaagaaatgtgttcagtgagctgttagtgttatgctgcttaaagtgtcattatcctgcaaaacagagattgttgtgtttgaagtgtggtagttgattgtctatgagtggaaatgtggaatgcgtacgttttgcgtgttatattgatgttcattggctgcaaagtttgatttcatctggttatg

SEQ ID NO: 16008 - DNA, 277 bp, Glycine max
  Clone ID: 700962238H1
atcaatgatgtggatgtgggggacatgcttcttgttgatggtggtatgatgtctttggtggttaagtctaagacagaggattctgtgaaatgtgaagttgttgatggaggagagctcaagtcaaggagacatttgaatgttagaggaaaaagtgcaacacttccttccatcactgagaaggattgggatgacatcaaatttggagtggataacaaagttgacttctatgctgtttcttttgttaaagatgcacaagtagttcatgaactgaagaatt

SEQ ID NO: 16009 - DNA, 281 bp, Glycine max
  Clone ID: 700962239H1
tgagaacgaaaccctagagagaaagagagcgagggtgagaggttagaagagaaagacggtgcggcggcacggctgcggaggttattaacaaaatggagtacatgcaccggatggcacctccttcgttctggtacgacggaggacactttcccggtcaaacaagttacgctatggaggttcatccagggtatggtgctagtgctaacaatcattacgtggagccacggtacgtgaaccagggttatcctctgcagccacctctaccgtactacatgcacccg

SEQ ID NO: 16010 - DNA, 278 bp, Glycine max
  Clone ID: 700962243H1
atgatttgtaggctattttggtacatggatttcagttgcttgacatatggttgcatcattcagcttgcaatagcagtgatttccgaacacctaaacctgcttgacatgttaactgcaggttcattgttggaattgaagggaattctcattcggaacttgggatttttattagacatggcaacattttttatggcacttggccattacttgtacatatggcggcttcatggcatggctttccatctaatagatgcattgctacttctaaatacacgtgc

SEQ ID NO: 16011 - DNA, 278 bp, Glycine max
  Clone ID: 700962244H1
acttggtgaacactgtactgacaggctacttctttgtacttgggattgttgccctttcggcaacattattaccactttattaaacgttttctgccaaagcattggaatgaggacctcatagtctggcgttttccatatttccgttcattggagattgagtttacaaagtcacaggtcgttgctggaatccctgggacatttttttgtgcctggtatgctttgcagaagcattggctagcaaataatatattgggtcttgctttctgtactcagggaat

SEQ ID NO: 16012 - DNA, 279 bp, Glycine max
  Clone ID: 700962245H1
attccgtcattctactccccacgccttgattttatcggaaaattctcactttccgagaaagttcgtgtttttactgttgaatcgagaattcccaaatcggggtgtctgcaattcaaagctgttgttgcagttggcggctggggtcagtctctgtggaggtttgggtgtttcatgaggcagagcttattctcattttgctccaatggagatgcaggaccaaatagaaagcacaagatcaaccacatttggctcagctagtaacatccattccaatgctga

SEQ ID NO: 16013 - DNA, 280 bp, Glycine max
  Clone ID: 700962246H1
caccattctcacaaaacaactttcaaactctgagaaagaatggctgccaacacattgatgagtactgctatctcagccttcccatctctcctttcttcctcaaaatccagatttgccaccgcagttcctctttctagctttggtgtcaccaatgcctcttcttctcgctttcctatgagtgctgactggatgccaggccaccctagacgtccttaccttgatggttcagcacctggtgactttggattcgaccctcttcgtcttggtgaagtacaagaga

SEQ ID NO: 16014 - DNA, 148 bp, Glycine max
  Clone ID: 700962247H1
gctacacaggagcgactaaagaagaagcacaagatccaaaaagactcaggaccagtggaaaaagtgattcgccacttccctcaaacaaagcctatagttgctgatgccaaaaaaaacaaacctgagctctctgatgatatattggatg

SEQ ID NO: 16015 - DNA, 292 bp, Glycine max
  Clone ID: 700962217H1
aatcaaataagccaacattaccagagaagtcagagggatatatccaggtctttcttgatggaggtttgaaccaacaaaagatggggatatgtgatgcagttgctgttgcaaagacactgaatgctactctggtgatcccataccttgaactgaatcctgtatggcgagattcaagctccttcatggatatacttgatgtggatcatttcattgatgtattgaaggatgatatttctacagttaaagagttgcccaaagagttcgcctggagcacaagggagtattatggctt

SEQ ID NO: 16016 - DNA, 248 bp, Glycine max
  Clone ID: 700962182H1
catcaaactcatcaaaatgaatctgtaccactcctccaccaccaccaccaccaccaccatcttcaccgtcatattcctcctccttgcaatattattcactctcacaccccacaaggccaacggtgccacgtgtcaccctgaggaagaagcgggcctgttgggcttcaaatccggtatccgatccgacccgtccggcctgctcagtaactggatatcgggtacggactgctgcacatggaccggagtag

SEQ ID NO: 16017 - DNA, 246 bp, Glycine max
  Clone ID: 700962183H1
cggatgcaatgcattgtattgaatccggtggtcagtctcccaacttcaagttctttttctttgctcagaaagcagaagcagcatcaatgtatcttgtagagtgtataatcaacacatcgtcagccaagtcacagattaaaataaaagctgatgaccaaagttcatcccaggcattctctactttattccaatcagccttgtccaaatttggtttaccttgaatctttatggtgtcttcagagctta

SEQ ID NO: 16018 - DNA, 245 bp, Glycine max
  Clone ID: 700962185H1
tccgcagccactttcccaacccaaaacctctcttcagcccataaccatcatgtatctcccccgccaccacatcctcaccagactctccccttaccgccgtcacttctcccactccgccgccgccgtcctccgccccccggagccggagcccctcacctacctcgacggcttccctcgccccgatcccaagcacgacgagaccatcctcgccgtcccccgcgccgactccggcaagaacatctccg

SEQ ID NO: 16019 - DNA, 241 bp, Glycine max
  Clone ID: 700962186H1
aactagtcgtagtattatttcatcgattctctcccttctctttctctctgcgacaccagatgatggagacgacgttgaagcgaaacgctgtcgttgcgccaatcgcggcgttgttgttggtggtgctactcgcggcgagtgtggtggtggaggctcaggagaactcggacgtgaagacgctggtgaagcacatgcacgggaagaagtactgcgacaaaggatgggaatgtaagggctggtc

SEQ ID NO: 16020 - DNA, 247 bp, Glycine max
  Clone ID: 700962188H1
agtttcagtttttggtgttccatttttcttcctccatctttatcttaaacataacttgaactctccattccttaaattttagctacgagctagttccgacacagacaaagcactggcaaagaccgagttagaggtgactgttgagagcaagaacaaagacctcaagcacctggggtttgtgaggattgctgctattcaaacatttgtgattgtgtcaaatctgtatgagtacgcaaagcagaattct

SEQ ID NO: 16021 - DNA, 237 bp, Glycine max
  Clone ID: 700962189H1
gatcaacgtctactacaatgaggcctccggcggaaggtacgttccccgggccgtcctcatggatctggagcccggcaccatggacagcatcagatccggcccatacggcaagatcttcaggcccgacaacttcgtctttggccagtccggcgccggcaacaattgggccaagggccactacaccgaagtgccgagttgatcgattccgtcctcgacgtcgttcgcaaagaggccgag

SEQ ID NO: 16022 - DNA, 245 bp, Glycine max
  Clone ID: 700962192H1
gtgcaaaagagcgtcgtagtcgcaaccctaatcagaagaagcgcagtatcaagcgagtgacagccaccagccatgggtcgtatgcacagccgcggtaagggtatatcctcttctgctttgccctacaaaaggacacctcctagctggctcaagatctcttcgcaagatgtcgaagaaaatatctgcaagtttgcgaagaaaggtttgaccccgtctcagattggtgtcattctcagagattctca

SEQ ID NO: 16023 - DNA, 243 bp, Glycine max
  Clone ID: 700962193H1
gactgagaagcgtgggatagcttttgatcaattacttacaattcctgaacaagatgaatgtgtatacagtgatgggaaatcaacaacatgtgttgcctttattctttcaatgtataaagcggctggaatattcggccctatttctagctccattcaagtaactgaattcacaattcgtgatgcatacatgcttaggatttttgaggataaccaaacacgtctaccaagatggtgcaacaatga

SEQ ID NO: 16024 - DNA, 248 bp, Glycine max
  Clone ID: 700962195H1
caaagttgttgaacttcaagaagagcttgatattgatgttcttgttcatggagaaccagagagaaatgatatggttgagtacttcggtgagcaattgtcaggctttgccttcactgttaatgggtgggtgcaatcctatggttcccgttgtgtgaagccaccaatcatctatggtgatgtgagccgcccaaagccaatgactgtcttctggtcatctctggctcagagctttaccaagcgcccaatga

SEQ ID NO: 16025 - DNA, 252 bp, Glycine max
  Clone ID: 700962196H1
attccctttccaacttgttaattaattaagccttcttataattaaagtgtgggatatatatatatatagataaacagtttaatttatacacactttgatcctacaaagcatcttgacacaagcattcaataggatttcaccactttatcgcaacattttaacatgatgcggtaataaagtaaattcttgttgaatatttggataacgatgttatatactcatagtttgtgtgtataaattaaacttatattt

SEQ ID NO: 16026 - DNA, 146 bp, Glycine max
  Clone ID: 700962201H1
tgatagggtaggcacaacaacaaattattaccacaataagagagtatgttgcttgatcacatggctacaatttgtaagtgatgattaattaccaataatcgaatctttggtaatatatatttaaaaatcaatattacattatgtgt

SEQ ID NO: 16027 - DNA, 171 bp, Glycine max
  Clone ID: 700962202H1
gtaaactagacccgcaaatctatggtccacaggaatcaacaacaactagggaagtcattgagccacaaactatcacttatggaacaactgaagaggcccttaaagaaaagaagttgttcatgctggactaccatgatttattcttaccatatgtaagcaaagtgagaaaaa

SEQ ID NO: 16028 - DNA, 290 bp, Glycine max
  Clone ID: 700962203H1
gaaaagtgaagttcaatatagtctctggcacctcaatgtcatgccctcatgtgagtggcatagcagctttggtcaagtctaggcaccctgagtggagtcctgctgctataaaatctgctttgatgacaacagcttatgttcttgacaacaccaagaaaactctcagagatgcctcaactgctaaaccatcaagtccttatgatcatggtgctggacacattgaccctattagagctcttgaccctggtttggtctatgacattgtgccacaggactactttgaatttcta

SEQ ID NO: 16029 - DNA, 289 bp, Glycine max
  Clone ID: 700962205H1
ctcttctctgcatgtttgttctctcaacgactcctccgcgaaagagcattattcaatatcttggttgggttgaatcccggggttgaagcgttgcagacatcacggctactctaagagtgtctcgctccctcattcatgtccgatctgtacgacggaggacgggtagttgcgtaactgccgttaacccttcgtcgcacggtgggcgtggtgctttgccttctgaaggtggtagcccttcagacttgctcttcctcgctggtggtggtttcttctagtttcttcactcttt

SEQ ID NO: 16030 - DNA, 195 bp, Glycine max
  Clone ID: 700962206H1
ctattctcaaactttaaatacacacgacggcacggctgctatgccaagccgcgccatggaatcgagagctccaagtgggccatttttggtaagcagaactggcgatgcgggatgaaccggaagctgggttacagtgcccaactgcgcactaacctagaccccacaaagggtgttggtcgattaagacagcaggac

SEQ ID NO: 16031 - DNA, 287 bp, Glycine max
  Clone ID: 700962207H1
cacctcttctcttctcccagaatcggtgtaggttacaggtttaagggttttgttttcatttaggtcactaatccgatatcatgaagcccgatacgactagtctcgaatcgtttcccacactgattgcacctaaaaacgacgtcgccggagaactctccgccgctccgttctttgaccttccgaattccaatgacttcgatgggttcttgaaagacgctattcagatggtgaagcccgcgaagggcactacaactcttgcttccacacctaaagagggtgttatggta

SEQ ID NO: 16032 - DNA, 222 bp, Glycine max
  Clone ID: 700962208H1
gtaagattcatgacaaggttgctgtcgtgtacacagcaagaactttcagcctatcaaggttgtctggaggattgaacccctgaaatagatgggaatgttaccctctctgtttctattatttatatttatttatctacatgttccttacaagaataatcagtcatgttgaggtgtatgttatatttttttcccactgaacacaaacttgtttatgcgaatatt

SEQ ID NO: 16033 - DNA, 287 bp, Glycine max
  Clone ID: 700962209H1
gggactacattttttgtttaaagtaaattcatcgatctttcacttccactttcgtttttatcactctcaggacatcctgtattaacagtgaaaagtgcatctgaagagacagaatgcaaggacccgggggtggcagggatcgtttctttgattttggcgatccttttggtggttttggaggctttggttcctttggacctcccaggagtttaatctcaagcttttttgggggtacggacccatttaatgatcctttcttcgcccgaccttttggagggatgtttgag

SEQ ID NO: 16034 - DNA, 285 bp, Glycine max
  Clone ID: 700962210H1
agagtccgagaggcatcatggcgacactggattccgacgtgaccgtgtttccggccggcgaagctccagcagcgccggtccttcttcgtccaccaagaagccgaagcgtttcgagatcaagaagtggaatgcggtttccctctgggcttgggacattgtcgtggacaattgcgctatttgacggaaccatatcatggatctctgtactgagtgccaggccaacaaggctagcgccactagcgacgaatgcactgtagcttggggagtttgtaaccatgcttttca

SEQ ID NO: 16035 - DNA, 285 bp, Glycine max
  Clone ID: 700962211H1
atacactgtgggagagtaccttctcttggctgctgttagtgcactgcaagtcatatacatcaggcgcctcttcagcaagtcagtggcctacaatcgtgtttgagtccccttcatgattaacgttatggtttccttcattagcaacaggattaggtttattacatatgcgttctctattcaacagtacgattacaatcccttggtgaacactttttttcttttcaagagagactccacttgtatgttgatacccaacaagatatttaaattccttacaacttgaat

SEQ ID NO: 16036 - DNA, 284 bp, Glycine max
  Clone ID: 700962212H1
agccaaaccaatatgtggctagaggtctggttagaacagatgaaagcaaacagaacattggtgctgcagatgacgttattgttggggatataagagatgctgaaagtattgttcctgcaattcaaggtatagatgccctcataatcctcacaagtgcagttccacagataaagcctggttttgatccaaccaaaggacaaagaccagagttctattttgaggatggggcatatcctgaacaggttgactggattgggcagaaaaatcaaatagatgtcgccaag

SEQ ID NO: 16037 - DNA, 286 bp, Glycine max
  Clone ID: 700962213H1
cttgggtacaggggcgaaagactaatcgaaccgtctagtagctggttccctccgaagtttccctcaggatagctggagcccgcgggcgagttctatcgggtaaagccaatgattagaggcatcgggggcgcaacgccctcgacctattctcaaactttaaataggtaggacggtgcggctgctctgttgagccgcgccatggaatcgagagctccaagtgggccacttttggtaagcagaactggcgatgcgggatgaaccggaagctgggttacggtgcccaact

SEQ ID NO: 16038 - DNA, 286 bp, Glycine max
  Clone ID: 700962214H1
accttcttccctttctcacttaccactctcacccttctttccaaaacactccctttcactttctattcacttcccctacccttccgtgatgatgtagatagagaataaaaagagaccagtgtgcagtgagaaagagattgctcacttcttgtgtgggtttgttttgttctttgtgttggaatttgttcatgggtgaagaaggagaagaggtgtcaagagagaaggaacaatacatgggagtttatggaaatgagtggttgtattgtggttgctctgcaaattggcg

SEQ ID NO: 16039 - DNA, 282 bp, Glycine max
  Clone ID: 700962216H1
attctcttcccaaactctcttcttctattccaaagacccttttgaagtaatcgatggagtttcagtctctttccagattctacgttcttctttccttaaccattctcttccttgcaccctttcacgctcaagctaaaattaaagtcacttactgcgataagaaggcagactatcctgtgaaggtgtctggagttgaaatatcaccagaccctgtggagagtggcaagcctgctacctttaagatctcggctacttctagtaaagctatttatggtggagaag

SEQ ID NO: 16040 - DNA, 250 bp, Glycine max
  Clone ID: 700962181H1
agtttcagtttttggtgttccatttttcttcctccatctttatcttaaacataacttgaactctccattccttaaattttagctacgagctagttccgacacagacaaagcaatggcaaagaccgagttagaggtgactgttgagagcaagaacaaagacctcaagcacctggggtttgtgaggattgctgctattcaaacatttgtgattgtgtcaaatctgtatgagtacgcaaagcagaattctggg

SEQ ID NO: 16041 - DNA, 249 bp, Glycine max
  Clone ID: 700962144H1
acaggccccgtgtccctaacatggtcacgctccattgttggacgctccctccacattcagctccaccaaaaccccttagattccccaccctaccctaaccctaaccctaaccctaacccctccccctccaccaccctctccttccacctccacataagacccttcctcttctggaaaaaacacggttccaaaaaactcgcccccaacacccacctcttctggaacctctccagagccaaattcggcgcc

SEQ ID NO: 16042 - DNA, 251 bp, Glycine max
  Clone ID: 700962145H1
ggaatgtggaaaataataattttactgcctggataccacaacagttgaagaacataaacctacagaccggtggtaatgcatggagctcagggcctgcacgcccacctcctcctgggacacctccagcacctacaagcaaccagcaccacaactctggtggtggaagcaccaccccctcagatactgccactggcagcagctcaattgacgagggaagaaaatctggtagaggcagtggcgccatagccgga

SEQ ID NO: 16043 - DNA, 255 bp, Glycine max
  Clone ID: 700962147H1
caacttttaggttccgtttctgaagacttaggcttgatccaataccttcgccacatcgatctctccaacaatttccttaatggctctctacccaacactatcttcaactcttctcaacttcaagtactttccctctcaaacaatgttatctcaggcaaactacctgagctaattggcaaaatgacaaaccttaaacttctcaacctctctgacaatgccttttccggtttgatcccagaaaacctctctactcta

SEQ ID NO: 16044 - DNA, 254 bp, Glycine max
  Clone ID: 700962148H1
gagcaattgtggtttcacagaacgtgatcttatcaactatggcggagaaacacaacatcaagaacccagccgtgaagcggattctccaggaggtcaaggagatgcaatcaaacccttccgatgactacatgagcctccctcttgaggaaaatatatttgaatggcaatttgcgatcagggggcctcgtgatactgaatttgaaggtggtatttatcacggacggattcagctgccttcagaatatcccttcaaa

SEQ ID NO: 16045 - DNA, 254 bp, Glycine max
  Clone ID: 700962149H1
cggctcgagagaagatgctcatgaatttttgaggtgcgtggttgatacaatgcaatctatttgcctcaaggaagttggtgtttcaagtcctttggcagaagaaacaactctagttagttacacctttggaggttatcttcgatctaagataaagtgcttaagatgcctggggaaatctgagaggtacgagagaatgatggatcttactgttgaaattgatggggatattgggactttggaggaagctcttggac

SEQ ID NO: 16046 - DNA, 252 bp, Glycine max
  Clone ID: 700962150H1
gatcgagataactagaaacagtgtgatgaaaatgaaggtccttgttttcttcgttgctacaattttggtagcatggcaatgccatgcgtacgatatgttccctctccgaatgaacactggctatggtgcccgtactccggaggtgaaatgcgcaagttggaggcttgctgtggaagcacacaacatctttggctttgagaccattcctgaagagtgcgttgaagcaacaaaggaatacatccatggcgaaca

SEQ ID NO: 16047 - DNA, 246 bp, Glycine max
  Clone ID: 700962152H1
gtataatttgtccttgtcagcaactagggtagggttcttactaatggccattccctccgccaaacccaaagagtagaagaaacctacaaaaggaatcctctataaacaactccgtttgtcactcgtgtcttgcgagcgggaaacggcggctttagcaatcactccctcgtcgttttcccccgttttctctcccttttccccgttttgcgttttggattcatttctctctatcttctgctgatttat

SEQ ID NO: 16048 - DNA, 247 bp, Glycine max
  Clone ID: 700962154H1
ctttgcactcttccatgtgacatctctaattaaagttgcttttactactaaactcgaagtactttcttagtggcttcactgagaattttgaattctcagtctttttcttttcagatcacatctcagatccatttttattttacaaacttttgggtcctctcccccattgtcctaccacacctgctccacattactgaaattctttattctcatcataattcccatcaaaaaatcttttcttgcaatc

SEQ ID NO: 16049 - DNA, 250 bp, Glycine max
  Clone ID: 700962155H1
ggattatttcagtggcgtgaaacttccagaagaactcaaagtcactcctcttctgcttgccctctttcgcttcctgcaaatctttctgagaatcgagtcacagactagagctaaatcagcatagagatacaaaaatgccaaaagtaaagacaaatcgtgttaaatacccagagggctgggaattaattgagcctacactccgtgaacttcaagcaaagatgagggaagctgagaatgatccgcatgatgg

SEQ ID NO: 16050 - DNA, 248 bp, Glycine max
  Clone ID: 700962157H1
attttccattaccaattccataatgtggcagacagctgatcgaccactgatgtggaaacagtcaccagaacaaccaatcgttttccctcattgcccctacaaagcaaaggatatcactacccccgttgttcagtatcaccctttctgcttctgtggggtgaaaagcagcaggggcatggtgaggaagccgggtcccaagcaagggagcctcttctttggatgtggaaattggactgcgactagaggtg

SEQ ID NO: 16051 - DNA, 240 bp, Glycine max
  Clone ID: 700962158H1
aagacaaatgacgtccaatagaataataatataacaaaatcttacaaatttcattcactccatccaaggaagaacatcaactattgagtaatatacggttatggagaacttatgtaatatagattaacccacaatagcacatttattggaatttaaccagttcagcaccagcaacttaacaaaagaaaaatatggaaagatagccgagtatgtaattccaactcaaaacaaacaactggg

SEQ ID NO: 16052 - DNA, 249 bp, Glycine max
  Clone ID: 700962159H1
aacgcgcgttcgttccaataatgtctgaccccgctgccgaagaggctgctttcatcgagaagctctacgaatacggcgagcagctcaacaatgccaaggacaagtcgcagaatgtgcaggattaccagggaatcatagatgcggcgaagacgagtgtgaaggcgaacagctcgccgcgcactgattcccaagttcttcaagttcttccctgacctctcgagccctgctctcgacacgcatcttgatttg

SEQ ID NO: 16053 - DNA, 248 bp, Glycine max
  Clone ID: 700962160H1
gcagtttgttccactatggagcttgtaagatgtcagcatttcctcattgcgaggggtaaggggttcattcagccacagatgtcagcatttcaaatagttcttgactgaagttcttaaaatggttttattcaaggtgacctgaccttttgttgatgaatgacccttttgaaattcacggctaataggttgttgtcctttttttttttttttttcctggaaccaaatattttcagggctttatacaactg

SEQ ID NO: 16054 - DNA, 69 bp, Glycine max
  Clone ID: 700962162H1
ctcgagcgctccgaagccgctcacgttatccacacaacaacagtcacaaaaccctaaccaaccatggct

SEQ ID NO: 16055 - DNA, 253 bp, Glycine max
  Clone ID: 700962163H1
atcagactagagagagtaagagtaagagaagagatggaaagagtagcatcagtatctcggccactgaaaatatacttcctcccattcttctcaccggggcacctaatccctctggtccagctggctcgcttggtggcggcacgaggccagcacgtgaccatcatcaccacccccgccaacgctcaactcttcgaccagaacatcgacaaggacaccgcctccggccaccacatccgcgtccacatcatcaagt

SEQ ID NO: 16056 - DNA, 251 bp, Glycine max
  Clone ID: 700962164H1
ttgtgaagttccattttgcaaaagcagtccaggttcaggaggttcttgcactttggatcctacaaacttcggctaccctaatttgaaggaaatccatctgtatggttttcctttgaaggttgttggggacattaactcttttgactctacttcagagctaactgtgaatcaaagtttcgattactacactaaaaatgacagcagtaaggagtacaatggtccctatgacttaactatcaaagtttctgaaa

SEQ ID NO: 16057 - DNA, 252 bp, Glycine max
  Clone ID: 700962165H1
aaattagttaagactatagataagtaatgatttaaaattacctaataatttttcgtgtttgtgtgttttattttcaggtcaaattttaaaatccaaattccaaaataaaatgtattttggataaaataaggttgggttagttttctttatctgatgttaaaagacttttcttctgattttaagaataataaaaaatggtattctcattcttaaaaaaaaaaaaaaaaaaaaaaaaaaaaagggggggccccc

SEQ ID NO: 16058 - DNA, 246 bp, Glycine max
  Clone ID: 700962169H1
ggcggtttcggggttgagaagcggtggtttgcctctcttccaccatcaccaccacctccaccaccttcgcttccttcaatcccctccttcctttgccaagctcagttttcttggctccaagtcgtcgaagaaggggttcacagtcttctcccgctatgcgcaagcacgtgcaccttttctcctcgcgtagattccaagatagcatggagaagctgccgaacctggtggaggacattgtgcagacat

SEQ ID NO: 16059 - DNA, 247 bp, Glycine max
  Clone ID: 700962170H1
cgactgcgaagggagagcgaataaaaaaaggcaaatcaaattcgagagaaggagagaatttagagagggaaaggatgaagatcacggcgttgttggtgcttaaatgcacgggcgagggatccgatccggtgattctggcaaacgcttccgatgtcagccacttcggctacttccagcgttccagcgttaaggaattcatcgttttcgttggtcgtacagtcgccagtcgcactcctcagggccaacg

SEQ ID NO: 16060 - DNA, 246 bp, Glycine max
  Clone ID: 700962171H1
gatcttgtgggtaacagtgaaagatcgtttttttttccgtcgctttttcatcgaggatgtctctcaagatctgtctggggagtggagcttgatttgattattgatattaaggaataaaatctcattcaacacactaaacaatacggattttgcaaatgctaaattttggaaggtccagaagtcagtcaagggcagccagagctacaacaatgggaggcatggattatgcagaaaaaaaagaagggc

SEQ ID NO: 16061 - DNA, 245 bp, Glycine max
  Clone ID: 700962173H1
ctccctcagaagcgaagaagaagccacagagaactagtctcctactctcacccgcaagaaaaaaatggcatctcacatcgttggatacccccgtatgggtcccaagagagagctcaagttcgctctcgagtctttctgggatggcaagagcagcgccgaggatttgcagaaggtgtcttctgatctcagggcatccatctggaagcagatggctgatgctgggatcaagtacatccccagcaaca

SEQ ID NO: 16062 - DNA, 245 bp, Glycine max
  Clone ID: 700962174H1
gtgtgcaccattgtcgccttgcgtgcgccggttgcgcaccccctatcttgcgcatccccaatcacctcatcgaaactactaacaccttcacaatcgttcaccagccctacagaacccagatctcgggttccaatcgtcgagccatgtccaaggcacgcgtctacaccgatgtcaatgttcttcgccccaaagagtactgggattacgagtccctcaccgttcaatggggtgatcaagatgattat

SEQ ID NO: 16063 - DNA, 239 bp, Glycine max
  Clone ID: 700962175H1
gttggaccaagtgtctgctatgccactggacacatataagggacatggtttccgaactgaccttgttgaaatgctgacagctttgaaaccaagatttatcagatttccgggcggttgttttgttgaaggagaatggttaagaaatgcatttcgatggaaagcatctgttggaccatgggaggagagacctgggcactttggtgatgtttggatgtactggactgatgatggacttggct

SEQ ID NO: 16064 - DNA, 251 bp, Glycine max
  Clone ID: 700962143H1
atttcgtatctcactaaccgcgctgctgtctatttggaaatgggacagtatgaggaatgcataaaagattgtgacaaggctgttgaaagaggaagagaactaagatcagattttaagatgatagcaagagctttgacaaggaaaggaaatgccttggtgaaaatggcgaagtgctcgaaggattacgagtctgccattgagacttatcagaaagcactcactgagcaccgcaaccctgacactttgaagaa

SEQ ID NO: 16065 - DNA, 242 bp, Glycine max
  Clone ID: 700962176H1
ctttcctcttaagtggcacattgttaaggatgttcctaacaatatgttgaggcacattaccttggacaacaatgagaacaaacctgtcactaacagtagggatacacaagaggttatgttggagcctgggctgaaattaattaaaattttcaaggaatataccagcaagacatgcattttggatgattttggcttctatgaggctcgtcagaaaactattttggagaagaaagcaaagcaac

SEQ ID NO: 16066 - DNA, 134 bp, Glycine max
  Clone ID: 700962177H1
gtatcactccaagttataggtcacattgtcacaatgtggtcaccaattgttcttctgttgtgccttattcctcctgtgttcttgctattcttcttccaataccgtagaaccttcaagaactcaaaccttccaca

SEQ ID NO: 16067 - DNA, 246 bp, Glycine max
  Clone ID: 700962178H1
caccttatttatctcaaagatttctcctttctctccttttttctctctttgcccttctgggtgtttttgaaacgtgcttaaaccgtgatgggtgctgttgtggagtgctacccgccgcctcgcacggcggtgctgtccctcaacacgctgccgttagggttccgtttccgtcccaccgatgaggagcttattgactactacctgcgctcgaagatcaacggaaatagtgacgatgtttgggttatt

SEQ ID NO: 16068 - DNA, 254 bp, Glycine max
  Clone ID: 700962109H1
gtgggatcccgaggatttgcctgggcaatctatattgaaaacgggagataggcaatggttctttttctgtcacagagataggaaatatcctaatggtggaaggtctaaccgagcaaccagacgtgggtattggaaagcaacaggaaaggatcgtaacgtgatatgcaattctaggtcagttggagtgaaaaagaccctggttttctacgcaggcagagctcccagtggtgagcggactgattgggttatgcatg

SEQ ID NO: 16069 - DNA, 252 bp, Glycine max
  Clone ID: 700962110H1
gatgatttcagtgacatataaaaacaacaacaactactatataattagggaaatagcgaccttaaagctcctacggcatcccaacgttgttagattatatgaggtcttggctagcaaaacaaaaatttatatggtacttgagtacgtgaatggaggggagttatttgacataattgcatccaaaggtaaacacatcgaaggtgaaggtagaaagctgttccaacagttaattgatggggtgagctactgcca

SEQ ID NO: 16070 - DNA, 255 bp, Glycine max
  Clone ID: 700962111H1
ggaatgcacaagattagatcattggcaacaaaagatgccagagtggagacacctaaattatcacagattccttgcaagttgattgagaaagacttgcacaaaggtatgaatgcattaagagtactgtgcaggtttctggctcttaaaggagctgataactgtgtattatataggcagcaaaggtaatcatgatgtggaacagcctgctggctctctaaagtcatatttttcagtacgttttgtcacatccaagtg

SEQ ID NO: 16071 - DNA, 254 bp, Glycine max
  Clone ID: 700962112H1
cttcatggcctgagaatgggacaatccaattaattgatctgaaggtacgttacaaggaaaatcttcccgtggtgcttcacggagtatcctgcacatttcctggtgggaagaagattggaatagttggtcgtactggcagtggcaaatctaccttgattcaagcattatttcgattggttgaaccggaggcagggagtatccttatagacaacattaatatttcatcaattggtcttcatgatcttagaagtcat

SEQ ID NO: 16072 - DNA, 251 bp, Glycine max
  Clone ID: 700962113H1
aggctactttggctcctttaattggatcctctattcagtcagctactggggtagtgtataatattactggaggaaaggacataaccctgcaggaagtgaacagggtttctcaggttgtgactagtttggctgatccttctgctaatattatatttggggctgtcgttgatgatcgctacactggggagattcacgtgactatcattgcaactggcttctcacagtcttttcagaagaagttgctaacagat

SEQ ID NO: 16073 - DNA, 254 bp, Glycine max
  Clone ID: 700962114H1
ctgaatgtcgtcactgcatatgggtttgatttggtccgtggaacccatactcttgatttgatcaagggtggatttcccagtggaaaatacctctttgctggagtggttgatggaaggaacatctgggccaatgaccttgctgcttctctcactacattgcagggtcttgagggcattgtgggcaaagataagcttgttgtgtccacctcctcctcccttcttcacactgctgttgatcttgttaacgagaccaa

SEQ ID NO: 16074 - DNA, 256 bp, Glycine max
  Clone ID: 700962115H1
cacagagaaccagtctcctactctctctcacccacaagaaaaatggcatctcacatcgttggatacccccgcatgggtcccaagagagagctcaagttcgctctcgagtctttctgggatggcaagagcagcgccgaggatttgcagaaggtggctgctgatctcaggtcatccatctggaagcagatggctggtgctgggatcaagtacatccccagcaacactttctcgttctatgaccagctgctcgacgcca

SEQ ID NO: 16075 - DNA, 258 bp, Glycine max
  Clone ID: 700962117H1
cgagcaggatcatggatcatcgtcattggcgcttcttcattatgcttttcattaccgcagcagcaataggacttgtttcgtcgttagggataaactacggccaaatagcgaacaatcttccttcacaagacgacgccgttgcgttggtgaaatccatcggagcgacgaaggtgaagctctacgacgcagatccacgcgttttgaaagcgttcgcgaacaccggagtggaattaatggtaggtctgggaacgagtactt

SEQ ID NO: 16076 - DNA, 257 bp, Glycine max
  Clone ID: 700962118H1
cacaaacacatacattgtagtatcacttttgtctcggaatttgttcttttgagttatggcaagcttaaaggttgcatgtgtggttttgatgtgcatggctgtgatgagtgcaccaatgatggtgcaagccgtgtcatgcaatgatgtttctgtgaacctagcaccgtgcctatcttacctgatgcagggtggagatgttccagaatcgtgctgtagcggagtgaggaacattctgggttctgccagcaccacctttg

SEQ ID NO: 16077 - DNA, 253 bp, Glycine max
  Clone ID: 700962119H1
ggagaaggcgaacagctccggatgatgaccagcgagtcttttcacgacaccatgtatcactccgcgatcgcttctcgactggcctcagacttcaagtctcgctccgatctgtagcacttgaatagttaactattccttctttgttgtattttgcggattgtttgtagccaaatttttagggtttcaaatgtaaccgttgatgtataatagattagcatttagaataatttaggttatcaattgatgatacaat

SEQ ID NO: 16078 - DNA, 252 bp, Glycine max
  Clone ID: 700962120H1
aacgtattcagccaagggaaagggaacagagaacaacagttccatctatggttcgaccccaccaaggacttccacacatactccgtcctatggaatcctgcaagcatcatattctctgtggatgggacaccaataagggagttcaagaatttggagacaaaaggggttcctttcccaaagaaccaacccatgagaatatactctagcctttggaacgctgaggattgggccacaaggggtgggcttgtgaaa

SEQ ID NO: 16079 - DNA, 253 bp, Glycine max
  Clone ID: 700962122H1
atcaaagtctcttattcctctttgtattaattttttcctcttctcccttttcattttccggtggcaattcaaatcgcactctttgcgtttgtgctgatccactgtgaatgaaaaaaacaaaactaagagagagaagagagaaaaattacaacaacattattatttattgtaactaattagctaattaattggttattaaaaattataaggccatgtttggcgaaaccgttccgcgaccacagttcatgcaatc

SEQ ID NO: 16080 - DNA, 253 bp, Glycine max
  Clone ID: 700962125H1
caactgcgcggtgagtgagtgagagacggaaagtgcaaagccaccgtcttctcttctcagagcttggctttgcttatcgattctctctcctctcatctttctcattcaaggtttgtaaaagatggccgatgctgaggatattcaaccccttgtttgtgacaatggaactggaatggtcaaggctggatttgctggtgatgatgctcccagggctgtctttcccagtatttggccgacctcgacacactggtgt

SEQ ID NO: 16081 - DNA, 251 bp, Glycine max
  Clone ID: 700962126H1
ctggactgcataactctggatggtgatcaagtaagcaagaaaggcagtatgactggaggattttatgatcacagacgatcaagattgaggtttatgaatatcattaagcagaatgcagacactattcacattagagaggaggaattggagaaagttagatttaatctacaagatatcctttatgttaataaatgaatattctttttgtatttttcatttctcttaggcaaaaactcattataaaatgcata

SEQ ID NO: 16082 - DNA, 253 bp, Glycine max
  Clone ID: 700962128H1
ttccttttcttttcttcaaatcaaggagctcagctatgactaccagagaaatccttcaaaagatgaaggtaaaagttggtttgggttcatcagaccctgattcagggaaaggaaagagcaagatgtcaaagaacataactcatggctttcatttggtgaaaggaaaatcatatcatgacatggaggattacgttgtggctcaatttaggcaaatagataacaatgaattgggtttgtttgcaatatttgacgg

SEQ ID NO: 16083 - DNA, 254 bp, Glycine max
  Clone ID: 700962130H1
gaacattattagtactagcactgtacctttgcccgaaacttttcttgactcttcctgtttcgctcaaattctaccctcctcaaattgggaaggtggtgatttccaaagcctttacaacgttgcttttgatcaagggcgaacagcatcttttccccctcagccatttacaggtctagttgaagctagcaatctaaaaatggagatgtaaaccagataatccattattacaatatgttggattaggtcactcggaa

SEQ ID NO: 16084 - DNA, 257 bp, Glycine max
  Clone ID: 700962131H1
cacgggccaagtttcccatctctaaatccaaaacctgcctcttaagaaaaagcagagaaactcacacacacaatagataaacaaaccaacttatcctccttcttctcactctctggattcgattcaaaagaaaaagcttatcctctgtcactcatcttcttctgccaaaaccaatgccagcacccattctctactttctaacacactctatttcaacaaccatgtcactacacgacgccgctttcgtcgacacagag

SEQ ID NO: 16085 - DNA, 260 bp, Glycine max
  Clone ID: 700962132H1
tgaaatggaagcagcatcggccacaattctgctactgatactaattcttgctctgatatgctcatggaaggttctgaactggttatggctgagaccaaagagactagaaaaactgctaagagagcaaggttttcgtggcaatccatacacccttttctttggagactccaaggagtttctcaagatgagaaaggaagccgtatccaaacccatgaccctctctgatgacatagtgccacgtgtctctgcctatgtccaac

SEQ ID NO: 16086 - DNA, 257 bp, Glycine max
  Clone ID: 700962133H1
atacaaccaaaccctaacacacacccatttgattcagtttccatggctagcctcaaggttgcatttttggctgcagtgctctgcatggttgtggtgagtgcacccatggcacatgcagctatcacgtgcgggcaggtgacgaatagcctgatcaattgcatcggttacctccagaacggaggaacgccgccgtcgggatgctgcaacggagtgaagagcctcaatgccgccgccaagaccaccgccgaccgccagac

SEQ ID NO: 16087 - DNA, 251 bp, Glycine max
  Clone ID: 700962137H1
cccaattcttccccctccacccacccagcatatctctctattcctctttattagcacccctcacattaccttgtgtcaccaactactttgactcctttaccataccattacaataattatcaaacctaaccagtaaaaatggtgaccgtggaggaaatccgcaacgctcagcgttcccatggacccgccaccatcttggccttcggcaccgccacgccgtccaactgcgtctcccaagccgattaccctga

SEQ ID NO: 16088 - DNA, 250 bp, Glycine max
  Clone ID: 700962138H1
gccttttgtctctgtgttttcacatcgacaattctttacagatgaagagatgtcaagggaacttcttacttcccaaacagatcttcctacatctatatataaacactggtttatcaagaatacgcaagaaaagcattttgaattgttgattcattgccagagatggcttagaatcaatagttcattatctaatggatttttccgttctaatactctatctgagagttatcaatatttatcaaatctgttc

SEQ ID NO: 16089 - DNA, 250 bp, Glycine max
  Clone ID: 700962139H1
ggaacttccgtggagaacttgtaacttcttttgaggatcacctcttgtggcatcctgattgcaatacaaacaacatatatataaccagtgaccaggatcttatcatatcatattgcaaggccgattctgatgattcattgtccgaagaaatgcaggttctattaatgtcagcaacattttaactggcaagtgtcttgcaaagataagagcaagtaatggcttacccatggtgaaggaatgcagttgcagc

SEQ ID NO: 16090 - DNA, 244 bp, Glycine max
  Clone ID: 700962140H1
cagcttctctaaattctctgtctacttcaccaagcacttttggttgcagctttggttaatttccaatatggtgtttcctctcctatctatctttgctttactcaatcttgcagtggtggcaacccatgcagaaaccttgccccctgaagtttactggaagtcgaagcttcccaccactccaatgccgaaagccattacagatatccttcacccagatttggcagaagacaaaagcacctctgtg

SEQ ID NO: 16091 - DNA, 254 bp, Glycine max
  Clone ID: 700962106H1
ctcctcaaggagctaaactagcaaagaagcaagtgaaaatgttgggaaaattcttcagtttgagttttttttggggcttctttcaatggttctacactgctactgaccagtgtggatttcaagccttcccttcattggggcttaaagcatatgaaaacaagttcttttttgattttgctgcaatctatgttggagttggaatgatatgcccatatatcataaatatatcagtgcttcttggaggaattatttct

SEQ ID NO: 16092 - DNA, 251 bp, Glycine max
  Clone ID: 700962141H1
atttgtccaagaatatagtggaacgcctgtctgctcttagaacgcgtatagttgtaatggctggtcaagaaggtcctacaattacaagaacaaaaagaaaaactcagcatggaggttcaacactggctgaccttctgcaggctcttgaggattacttgcctgttgttctgggattagttaagaatggaagccatttacagtataaagtacaatttacttgggtgaatcaagaggatgacaaagaggaaaca

SEQ ID NO: 16093 - DNA, 244 bp, Glycine max
  Clone ID: 700962051H1
agcctttgtttttattaccttacttacacctctctatggtctagaccaaataaaaataaatgtctggaaggtaaaattaaatgaagaagcaagcagccagattatgatcaaatggtggcatgtgatcatttgttatacaaccggttctttgaatgattatttgtaggatggatgagatatctgcagctacaagtgtgcttaagctgacactctccgagtggagaacattcacaagtgagtgagg

SEQ ID NO: 16094 - DNA, 243 bp, Glycine max
  Clone ID: 700962052H1
caaatgacgaagcttggaacctctctattggttccttctgttcacgagctagctaagcaacccatgaccaaagttccagaacgatatgttcgtctaaaccaagatcctgttgtatctgacacaatctctctaccacaagtcccagtcattgatctgaacaaattgttttctgaagatggaactgaggtagagaagctaaaccaagcatgcaaagaatggggtttcttccagcttataaatcat

SEQ ID NO: 16095 - DNA, 223 bp, Glycine max
  Clone ID: 700962053H1
cttttcaacagttgacaagcctaaactccttagtcagttaacagcaatacttggtgagatgggactgaatattcaagaagctcatgcattttccactactgatggattttctctggatgtgtttgttgttgagggatggcctaatgaggaaactgaggagctgaaaagtgtgttggaaaaggaaattaacgaggttgaggagcgaaatatgtcaaatcagggt

SEQ ID NO: 16096 - DNA, 238 bp, Glycine max
  Clone ID: 700962054H1
gggagctttctatggggaggatcaaagacaaagaacaagaaaaaggaatcctcagaaggtgcagaagttgctgtggagtcagatcatcagggagttcataatccagtttcactgaatagcatctcacaaaatcaaaaccttcctccaactcccccatctctaagtccttggtcaacatcacgtccgttggacatgcgtaattcccatgtggacattgatttaatgcgtgggtgacaca

SEQ ID NO: 16097 - DNA, 238 bp, Glycine max
  Clone ID: 700962055H1
catctttctctggttctgttgttgcctaagaatgggaggaaattccagtttcagggatgaatataccttcgaacaaaggcttggagaatcgcgggatattgtggccatgtaccccgatcgagtccccgtgattgtggaaagatatgcgaaatgcgatctgcctgagttggagaagaaaaaataccttgttcctcgagacttgtctgttgggcatttcattcatattttgagttccaga

SEQ ID NO: 16098 - DNA, 237 bp, Glycine max
  Clone ID: 700962056H1
ccgacttcggcctcagcactttctccgagcagctccggcacgacggcctgctgcacactacgtgcggcacgccggcctatgtcgcgcccgaggtgattgggaaaagaggctacgacggcgccaaggccgatatttggtcttgtggcgtaatcctctacgtacttcttgctggatttttacccttccaggatgacaacctggtggccttgtacaagaaaatttaccgcggtgacttca

SEQ ID NO: 16099 - DNA, 230 bp, Glycine max
  Clone ID: 700962059H1
caaacggaaacctcgactccatgcatttcacattgttctgctgctctgctatctctacacccacaacagatagcagcacgcgttcaggggttatcgcccaacggcaacaacctccaaactgaaacctttcgtagagaaataataatggaaatatgttaccatgcccacatcgatcgcgagattgaatcgctcctagaaagaatacatcctcccagggtctgtatcgataa

SEQ ID NO: 16100 - DNA, 269 bp, Glycine max
  Clone ID: 700962065H1
gtcagctcggtcttcggctcgcgcgacaccaccgcggcttacacatagtacttttggtcgaaaaatcgatctgatttttttcgtacttttcgctcaatgatgacatgggtcagattctacaggaccaaaccaagtgggcgttccggcgtgatggtagcctcgccctgaagcgccgtaaataaaaatgcagtagccgagtcctgattccaaacgagaaaattcaaacttgattgaaaaggatctttctgattattgaagaatgggacaaa

SEQ ID NO: 16101 - DNA, 163 bp, Glycine max
  Clone ID: 700962066H1
tgcaaattgatattcaaaatagacattgttctaaaatattgtcttctcgttaaatggcagtttgtatgtttttattttattttatgccaagcagtctgtagaaggttctgaagatgtctattggattactcatcttagaggtgcatgtcaggatggttaatac

SEQ ID NO: 16102 - DNA, 241 bp, Glycine max
  Clone ID: 700962067H1
cagccaactaactcaacaattctgaacaatgtgtatagctttgtttctttggcaatgccacccactgtacccttttcttcttttgaataacagagatgaatatcacaataggcctacgaagccagtgtcttggtgggaagattgtgatattttggcaggaagggacgaaatagcaatgggaacatggttggcttgttccacacaaggaagggtggcttttctcaccaatgttttggagctt

SEQ ID NO: 16103 - DNA, 242 bp, Glycine max
  Clone ID: 700962068H1
tttcaattgaagtagcacgcacgtttcatcatccactcgcaatcgcgatcacccgttgccgatcccgaagcagagaaaacctaagccaacatgagtggcgacgccccaacccaaacccaaacccaagccaccgacaccaaaccagaagaaacccacacccacacccaaaccatcactaccaaaccggaagaatctcattctcaatctcagtctcagcctcagcctcacactgccgattatgc

SEQ ID NO: 16104 - DNA, 235 bp, Glycine max
  Clone ID: 700962071H1
tgaagaagtgaggggtgttctttgttggtgaatacacccactcacgcgttcgtggttgcaggctctaatcagatcccaaatgatcaactttgtgcttctcattagtcgccaagggaaggtgagactgacaaaatggtactcaccttattctcagaaagaaaggagtaaggtaatccgtgagctcagtggaatgattctttcccgtgctcccaagcaatgtaattttgtagaatgg

SEQ ID NO: 16105 - DNA, 219 bp, Glycine max
  Clone ID: 700962072H1
aaccaacaccatgaatccgacattcctcaacaccctcttgaccctctaaccatcctcgagttcaacaaggtccgcaccatccttttgaactattctctcttcaagtcctcatccagctacactctcaacttcgttgtcctttaagagccagacaaaaaacttctcctcaaatggaaaaagggtgatctaccctttcctaggatggcttccgtggttgca

SEQ ID NO: 16106 - DNA, 231 bp, Glycine max
  Clone ID: 700962074H1
gcgcagaacgccttggccgcggcctccaggcctcgcccctcggcctctaaccccttcggtgatgctttctctgggcctgagatgtgggcccgtctcaccgcagaccccaccactagggcttacctccaacagcctgatttcgtgaagatgatgcaggatatccagagagatcctaataacctcaacttgcacttgaaggaccagagaatcatgcaggccctaggagttttg

SEQ ID NO: 16107 - DNA, 226 bp, Glycine max
  Clone ID: 700962075H1
ggagatttgagagttagggtttagggtcatttgagtttgagttggtgatggtggtggtggaggaagagtgagggtggttttcttgtgatggtgtattggggtgtgaggttttgtttggatccgaggttattggctacatagggtgatggagagaaagttcatggccttaggtttcatttggtgggtggtggtggttcatccactatgcctgatttcagctaacatg

SEQ ID NO: 16108 - DNA, 228 bp, Glycine max
  Clone ID: 700962076H1
ctcacaccaggcgcacgttagcacaaactatcatggccacggcaacagcagctgccacctcgtcctttatggggacgcgtctcctggaggctcactccggagcggggcgagtgcacgcccgattcggcttcggcaagaaaaaggctcccgccccaaagaaagcctccaggggatcgggccgagacaccgacagacccctttggtatccgggcgccaaagcgcccgaat

SEQ ID NO: 16109 - DNA, 225 bp, Glycine max
  Clone ID: 700962078H1
atccctttcgaccgtcatcggatctttctgcggccaccgtctatcgcacttcgttgccgtcatcggcgccggaattctgaatcttaatgaagttgtgaagtgatgatgagtggaagagctatccaataacatgacatgaattccaaaattttctatacttgaaaattaagccagcttaaacaatacaaggatgttttcgttgttttatggactatggaagtactt

SEQ ID NO: 16110 - DNA, 257 bp, Glycine max
  Clone ID: 700962081H1
atttctcagtctccagtactcgtttatcaatctcatctccaatgtgttaacgttcttcactcgtccctgcttctgcttctgctcattcttctccgtccacagggatggcttatgttccacatggaaatgcaaattgcaactctttattccaaaaatttgcaaattcccatgtgggtatttctgctttgcccttcctgcaaccgggactaaaatcttgtacagttttcaacagaggaacactcattcccctgtgctta

SEQ ID NO: 16111 - DNA, 237 bp, Glycine max
  Clone ID: 700962083H1
aattgaatttggttagggcgccgctcccctcatggaatcccttccctggatcaatcacttcaaacacacacctagccgagaatggtttgaaacggatgcagttctgcgggttagcttggggaattttctgtttttcactattctagctgttctgatggttggtgtgaaaacccagagggatccccgggatagtatgcaccatggaggttggatgatgaaaattatctgctggtgcct

SEQ ID NO: 16112 - DNA, 238 bp, Glycine max
  Clone ID: 700962084H1
gtagatggtgggtgaaacggcggcaacggggaagtcggttggtttgggtttgggatgtgacccagtggtgggatccttggcttgttcgaagaagagagaatacagagtcaccaatcgccttcaagagggaaagcgccctctatacgccgtcattttcaacttcatcgactcccgctacttcaacgttttcgccactgttggcggcaatagggttactgtgcatcaatgtctcgaagga

SEQ ID NO: 16113 - DNA, 235 bp, Glycine max
  Clone ID: 700962085H1
gccaaggagaaaagactacaaaaaagaactggactccttcaattagtgcattgtttcttttcttcaaatggtagcaagacgcaattgttaatttgagcaatggcgagttacgaggctattaagaactttgatgatgatgatgatgatgatgatgatgtggagatggcactcccccatagccagatctctgaatcaagatctgccactgtttcttcccccattggccaaactaccc

SEQ ID NO: 16114 - DNA, 226 bp, Glycine max
  Clone ID: 700962091H1
aagaaataaaatgctttaaatcattttactcaaacttaaagaagtatttttttacaggtcccacaaaaattattttccttcctttctatttatcttcttaaacaaataataaaatttgatatttttatctcatttttcttgtttttgttttatgttattccatttcattttcaagaaggaaagtaagattatgtttgattttagaggagagaaatagaataaataa

SEQ ID NO: 16115 - DNA, 224 bp, Glycine max
  Clone ID: 700962092H1
tgcaggcagatatatgtcaagggccaaatttgtgagagtgatcatatttgttatgatgaacatggagatgcatgtgactgctccaatttccttgatgtggactggctttcttcttctggaaattcttgtgaagaggaattacttgaaaggtcaaccagcatctcctcagagaatattgcgaatgaactaataactactgagacatctgcaagtgaatctggatc

SEQ ID NO: 16116 - DNA, 217 bp, Glycine max
  Clone ID: 700962095H1
cattaacatatacaaattctctgtgttgtgttgtgtacttgtgttaattgtgttgttgttgtaggaaatttaagtgaagagagaatgatgatgaagtctgctatgtgtgcattggtgcttgtggcactggttgtggttgaagtggggcccatggctgaggctgcggtgacttgcaacccaacacagttgactccttgtcttccggcaattaattcag

SEQ ID NO: 16117 - DNA, 246 bp, Glycine max
  Clone ID: 700962050H1
ccatatttgctttagctttgttcactcttttgcttataggaagttctttagctcaactctctgagaacttctatgatagtaaatgtcccaaggttttctatgccgtaaaatccgttcttcaatctgctttgtctaaagaacctcgccagggagcatctatcgttcgcctcttctttcatgactgctttgtcaatggttgtgatggatcagtactacttgatggcccttcctcagagaagactgcac

SEQ ID NO: 16118 - DNA, 101 bp, Glycine max
  Clone ID: 700962102H1
cgggattcggctcgagaactccagaaagccaaggaaggaagacaaaccaaaccaaacatattccttatttcccacttgttcaacctgtggtttatttatcc

SEQ ID NO: 16119 - DNA, 266 bp, Glycine max
  Clone ID: 700962103H1
cggctcgaggcaaatttgcaatctctctctctctctctctctctatcccctttctgccgacgattttgtttgtcccctttggatcagttcgtgcccttgttgttggtttgtagcttttgctgaaatccagcaataatgaagaaggttattggtcaaactgttagggaccttaaaagagaagtaaataagaaagtgctgaaagttcctgggattgaacagaaggttcttgatgctaccagcaatgaaccatggggtcctcatggatc

SEQ ID NO: 16120 - DNA, 255 bp, Glycine max
  Clone ID: 700962105H1
ccaacttgaaccctctctcctctcctcatacccatttcttcattctctggcaccctatttttggccttgttccgcatctcctacccctctcctctgctgcatgcaaccatgaagattttcaacccctccaaatgctttctccagaacgtggtgtgtcctttcgacaccctcttcatcattaaaaggtttaagcccttcgatctgggtctctcccacctccaccaattccaattcctatcctactattgaaaccaa

SEQ ID NO: 16121 - DNA, 243 bp, Glycine max
  Clone ID: 700962009H1
ctcagtctctgttcacctgggtggagtaccctgtgaccctcttcacccaattgcgttcgatcccactctgaacaagccttgttcttccacctctctgttttggaactgcaagaggagaaggaagaggaaaaactccattatcatggcctctaatctcaggaccaacaatttcctgcgccatgtggaatcaatgaagcttcttccatcaggtgctggccacatttcgcacctgaacgctgtgat

SEQ ID NO: 16122 - DNA, 236 bp, Glycine max
  Clone ID: 700962011H1
atcgagcgaatcggctcgagcggctcgagagcaaaaaaaaagacagtaatatgggaagacgtagggttcagctgaagaggatagagaacaagatcaatcggcaggtaactttctccaaaaggagagctgggttactcaagaaagcacacgagatctctgtgctctgtgacgctgaggtcgctttgattgtcttctcccacaaaggaaagctctttgaatatgccaccgattcttgc

SEQ ID NO: 16123 - DNA, 226 bp, Glycine max
  Clone ID: 700962013H1
gcagcattgggagatagaaagagagagagaaagagagagagagaaagacccttacccttctctatcgctcgctttcctttgacgcttctgacccttgctttgtctgcgtcttccttctttctttctttctttctctgtgtgtcgtaatggctctcccagactcttcttcccgtcgcaactccctgatcccctccttcatctactcctcttcctccaaaacgctccc

SEQ ID NO: 16124 - DNA, 259 bp, Glycine max
  Clone ID: 700962017H1
tggcgacagcagaagagaagagtgcagcgcaagctatagaagagcaaagtgtgtagatgtggttggacattcagtcccaatcacatggcttcttcttctccttctcctccatcttatctcacacaccttcctcttcatccctctcaccaaggtgagagtgagaagcgcgtggatgacgatgaatcgcgcgttccgattcacatcgtgaccgcggcgacgcaacttcccgtcgaatttctggaaccctcgcctcaatcca

SEQ ID NO: 16125 - DNA, 248 bp, Glycine max
  Clone ID: 700962019H1
ctgttattttgatagcaaaggtttcttgtatgttgtagataggttgaaagagttgattaaatacaagggctaccaggttgctccggcagagctagaagagttactcctatctcattcagagataaatgatgctgcagttattccataccctgatgaagtagcaggccaagtgcccatggcgtttgtggtgagacaacctcaaagttcccttggcgcacagaagttattgattttgttgccaaacaggt

SEQ ID NO: 16126 - DNA, 235 bp, Glycine max
  Clone ID: 700962020H1
gctacaagcccaacaaacttggttttaattggtataggcgtgccaaggtcttgttaattttgagcgttaagtgctgcaactaatcagatcccaagaccttggcctaccttgccatacagagaaaaaaaaagcgaaaaagaagccaaggtttggagccaacaaaaatagacacaaagcacaagtcatggaaagaataatggttggaagtggacaaaggttggtttcaccctcttgg

SEQ ID NO: 16127 - DNA, 243 bp, Glycine max
  Clone ID: 700962024H1
gcttcaaatatcatcaggaacttctctttcatgccagataatgaagttataatggcccaacatcgccattgtttggaaacagccttccaatgcatagaagatcatcttgtagaggatgaggaacttgtaacaaatgctctagagacaattgttaacttagctccacttctggatcttcgaatatttagctcttccaaaccttcatttattaaaataacagaaaaacgtgcagttcaggccatc

SEQ ID NO: 16128 - DNA, 236 bp, Glycine max
  Clone ID: 700962025H1
tttctgcaccgtatggagaagaagacaaagggtgtctgagttggctaaacttgcaaccgagtcagagcgtcgtgttgctgtgtttcggaagcatgggaaggttctcgagggctcagttgaaggagatagctattgggttggagaagagtgagcaaaggttcttgtgggttgtgagaaccgagttgggtggtgctgatgactcggcggaggaactgagtctggacgagttgctgcca

SEQ ID NO: 16129 - DNA, 237 bp, Glycine max
  Clone ID: 700962026H1
gactggtctgaactcccaaaggacctcctacacaaaatatcacaactcctcctcgaaagccctctctacctcctccgcttccgatccgtctgctcctcatggcgttcttccactcccccctctcccttcaacccctcaatctccctcaccaacaccttctccctctcccaccgcaccctcctcctcctcaaccctaaccctaaccctaaccctaacccccgcccctggctcgtcaag

SEQ ID NO: 16130 - DNA, 232 bp, Glycine max
  Clone ID: 700962027H1
ctggagcatcaccaacgagcatgttctccttcagtccatggatctatactgttggtgctgcctctcatgaccgggtttatagcgactccatatgtcgttgaaataatgtgaccatacctggagttggtcttgcacctggcacagatgggagcagactttgtagactgattcatgcacatcatgctttgagcaatgacaccacagttgctgatgatatggatgttggttgagt

SEQ ID NO: 16131 - DNA, 234 bp, Glycine max
  Clone ID: 700962028H1
cacagatctgtcttccgaagcaggaactaaatatggctgacttgttggaatggtcaaagcaagataagaaacgaatgcttcatgtcgtctaccgtgttggtgaccttgatcgcaccatcaaattttacacagaatgtttaggaatgaagcttttgaggcaaagagatatcccagaggagaaatatgctaatgcttttcttggatttggccctgaagaatcccattttgttgttg

SEQ ID NO: 16132 - DNA, 233 bp, Glycine max
  Clone ID: 700962029H1
ccttcatccaattcaaaacgaaattgacacaaactcaacagatcgaaaatccataatgttgttgcgtaacaacaataaaaatctcccatttgtgttttcttctcttcacgcacaccaacaaaacctctctctcatcggaatctccaaaaagaatggacaacaaaacgcagcagtccgagagtaagcaaaacgacaacgacgaggaagttgcgccaaaacgacaagaccctaac

SEQ ID NO: 16133 - DNA, 230 bp, Glycine max
  Clone ID: 700962030H1
ggttcctccatcgcgaaattagggttcgctcacttgtcttcaatttcccagattcacctagcaccatccataaatccccctattaacgtgtctttcggaccgatttttctacgtgacgcatcgcaattcttcagcggtttcgtttagggaacccgcgaaaccgaatcagatagtgcggcacggaaactaggaattaaagcaatggcagaagatctggtgctggatactgc

SEQ ID NO: 16134 - DNA, 254 bp, Glycine max
  Clone ID: 700962033H1
ggctccctgacctctcttcctctgctgaaaatggtgtcaccactcacttccaatcccccgaaagcgtcacaaattcatggatgaagaagaggttctttggtggaaaccttggtgagtgttctgcctcctgagaaggattctgtcccatgcaacttcctccttcgccttctcagaaccgccaacatggttcgtgttgacgccacttatagaggtgagcttgagaaccggatttcgtggcagctagaccaagcttc

SEQ ID NO: 16135 - DNA, 250 bp, Glycine max
  Clone ID: 700962034H1
cgttgctacttctactgtttcttcctccgatccctcattgccgcaaatgactcctcctgctagtgttaggtgaattccctcgcttcacatgcatgatcgcaccttcaactctcttcttcttcttcttctccatggctttttttcaaggttttggcgccgtggagttcgttttgtagcatcaccgtatcatcagcttcagcttgctttcaccaaaacggctttactatttggtgtgttccatgtcacaaaa

SEQ ID NO: 16136 - DNA, 246 bp, Glycine max
  Clone ID: 700962035H1
cgcaatcagacacttgtcttctgcagctaaagagattactgtcacggaggctctgaactccgcactcgatgaggaaatgtcagctgatcctaaagtgttcttgatgggtgaataggttcgggaatatcacggtgcatacaaggttggttgcttccttagttgctttacttgtcttgccaccctctcctcttaagaacttcattaacttaactttcattttagatatccaaggggctgctcgacaag

SEQ ID NO: 16137 - DNA, 244 bp, Glycine max
  Clone ID: 700962036H1
gctgctgccacttttcgctgagttgcgtcgtctctctaacaaaacaaacagacaaaacaaatgatttctgcgatttcgtgggtgcccaaaggggtttcgaagtcggaacttgtcgtggctcaacctcctctcgaagaggaaattcaagagataatagccaaccacgcaaccaacagtggagacagtgacaatgaagacgctaacaactatgacgttgtggcacaagcattaactcgtagcagac

SEQ ID NO: 16138 - DNA, 243 bp, Glycine max
  Clone ID: 700962038H1
ctgcattgcctatcctcctctctggttgaagtcccaaaacaaacttgataaaatcttcaaattaatagtgccagaaacaccagtcaataatttccccaacttcgaaatcacgaattttgaaactgaagagaaaatattctcaaattgcgtttgaatatggctataagctgcaacaaacaagaattcttgctacgacccgtttttcacgctagagaatccaccacagcgtttctacctccacta

SEQ ID NO: 16139 - DNA, 240 bp, Glycine max
  Clone ID: 700962039H1
gtctcaaatctcttcgttccttcgattcgttccatttcttccaaaatggccaaagacccagttcgcgttctcgtcactggagctgcagggcaaattgggtatgctcttgtccctatgattgctaggggagtgatgttgggtcctgaccagcccgtgatcctccacatgcttgacattcctccggcagcagagtcattgaatggggttaaaatggaattggtggatgctgcattccctctt

SEQ ID NO: 16140 - DNA, 240 bp, Glycine max
  Clone ID: 700962040H1
gaaatattaggagctagtgctaggtgcgagtagtggagcaaaacgcgggtgtgtgtgactttcgttggagagagatgcagttccattcagaaactccaaacaaacatccctcgcgacaaccttaggaatctcgatcgccgaaaaaacctatgcagccccgaacacacacactctgcattccaacttgtttaaatcatgcctctcgattcacccttctctctcaataaatcttttggccta

SEQ ID NO: 16141 - DNA, 238 bp, Glycine max
  Clone ID: 700962041H1
aaagacaatacttttcgtcaagatagtggttttttaggtgagagaatcaaagggggtctgaattacagtccctggatcattaaccaattggcctcaagtttgagaacccaagagagggtgaagaaggccaaacctggtgttgtttctgctgttcttacatcaagtaacaccaaagaatcagtggcttttcaaatgccatcgtttctcagaagaaaggctgatccaaaaaatgttgttt

SEQ ID NO: 16142 - DNA, 236 bp, Glycine max
  Clone ID: 700962042H1
gaaacctatcttctggatacatacacagggacatagaattcgtgttacttctctcttgttctgctggcttccctcagatacttacaacagcaacttgcataaaagaaattctggagggattttccaaacagaaaaataatggataaatctatcaacaagtatctggtttctgttactctgctggagcggttacccctgtcatagaggttcaaatgggaagatgctccttccagaga

SEQ ID NO: 16143 - DNA, 233 bp, Glycine max
  Clone ID: 700962043H1
ggggcagttttaccatttggatccatggaattggagctagagaagagcaattcgactgaagcattcaggtctatcctggaaaagatagaaacagccaagctggagggtggtgaacttgatgttctatgccatcaactccaggaattaatttcttccctgaagccatcaaaagacataattcaaagcattgggagaatattcccaagcaatgcacgtttaattgttcgatccag

SEQ ID NO: 16144 - DNA, 232 bp, Glycine max
  Clone ID: 700962047H1
acttaatctatcaggtatcagatcatttacctttatcacttctcagtggtcagcattagatcccaacatgcatactaaaacaagtattctaaaggtaaaacaacaaaattctgaacttaattatactaactaaaccaacatggtcacatgtaagaagacaacattccttgactaatagaatgttgatcagccatgtagcatataatggaagaccaggaaacagcagataaac

SEQ ID NO: 16145 - DNA, 239 bp, Glycine max
  Clone ID: 700962007H1
ctccttgctcttagccctcctcctcttcgccgccgtggacaccgccgcgatggcgtggcgcgtccgacgccgacgacatcctgatccgtaggtggtgccagatgtggcaacgaagaggaggacaacctgctgaacgccgagcaacacttcgcgagcttcaaggccaagttcgccaagacctacgccaccaaggaggagcacgatcatcgcgtcggcgtcttcaagtccaacctccgcag

SEQ ID NO: 16146 - DNA, 232 bp, Glycine max
  Clone ID: 700962048H1
cctacccacaacaccccctttctccaattcctctcactcaccacaacaactcctttttttacctcttcacattctccatttcacagggttctgatcatgttggggaagaggccccggccaatgatcggaaagttgtcggagttgttggtctcgagaggccgcacggtggcatatttggacaccaccggaagccctagaggcccattagacatgaagatgatgcaatcatcac

SEQ ID NO: 16147 - DNA, 247 bp, Glycine max
  Clone ID: 700962049H1
gaaagaaactgttgaatcgcgtcgattaaggttttgagatttctaggctttcatctcagacagtgaaaaaatgatagatataagtacacttaatgctgcacagattactgtgctgggatctgccttttgtgctatgctttccatgcatttcacgtcgcagttactgtctcagcatctcttttattggaagaatccgatagagcaaaaggctattatcattatcatcctcagggttccaatctatgca

SEQ ID NO: 16148 - DNA, 244 bp, Glycine max
  Clone ID: 700961977H1
ggttagcaacatctccaaccagttcaactgattcggcacaagttgtatatgttgaaactgaccttgaaaccaaaagtaaaactcttgatgaggaaaataaagattcattttcaacagatgtaagttctgaaaagaagcatgttgtgcaaaatgctaatgaattatctgccagcagtgaaaatccggaagtagaagaaaagcaggaagatctcagccccccatctggttgtagtaaagaggataa

SEQ ID NO: 16149 - DNA, 172 bp, Glycine max
  Clone ID: 700961978H1
cttttattgttctactattaccatttgaacatcgaatggattttaataaatcactttgtatgcgtgcaaaatttgtgtgatgttgtctatgttaaaactaatcttgcgctgtgtttgctatttcaagcgtgttttattcttcagaccaatggacgtgtttttcactttttgt

SEQ ID NO: 16150 - DNA, 238 bp, Glycine max
  Clone ID: 700961979H1
gtccatacagaagcgtgatgatgctcgacagtttatgaagtttcttcatcctgatcttggcgttggtaattcaatccgattcttttttattagctctgaattggttagaattaattgattatgtatcagcgttgtatttgagatttgaaaacatttttggttagtcaaggataaagctgttttcttcagtttaaaaatgtgtaatttctatgtttgatcttggcagaacttccagaaa

SEQ ID NO: 16151 - DNA, 249 bp, Glycine max
  Clone ID: 700961980H1
gaccgagccagagcttcgtcttggccctcgattttgccctgtaaaactaatcccagtcacaacagaaataatcaatggcaccgaaacagaccaaggctgagaagaagatcgcttacgatgcgaactgtgcgacctaatggaggagtacggccaaatcctcgttgtaaactccgacaacgtgggatcgaaccagctccagaacattcgcaagggtctccgcggcgactctgttgtcctcatggggaagaa

SEQ ID NO: 16152 - DNA, 250 bp, Glycine max
  Clone ID: 700961981H1
gaaatcgaggtcgtagtatggtggtttagcgggtatggattggaagcagtaccggctcgtacccaagaacaagaacatggattatggcttcctgcttttgctcctcttcttccatatcttccttcctcactcctctggtaaacccagtggagtgtgtgtttctcaaggaggtcgttttcctcccttcaaatcagagggtagcactcccaaaaagggtcctaaagatttgactctttgccggatctttcgc

SEQ ID NO: 16153 - DNA, 213 bp, Glycine max
  Clone ID: 700961982H1
ctgaggtcctatgattcagtctcttctacaagaattacaacttgacattgtaacccctgttgtctactgtgataactacctaagtactgtcactggcttataatccattaattaactgttgtatgaactcatggttataaaatgatggttttcttgaaaaaaaaaaaagaggtggccccgcggcaatatgccttgtctagccgggattatttt

SEQ ID NO: 16154 - DNA, 239 bp, Glycine max
  Clone ID: 700961983H1
cagacttgaatagggaaaaggattttaaatttttcttgtgatctgtgtatctctagtggtatgaggcttttgttgttgttgttgcatctgtatttatgtgaatagcttgcgctgtttgggaacatttcatagtcctgtacttttaggaatttattttgttccactaaaccaaaccaaggacgacatatgtacggaagttaatacatctgcacacattttggtatataaaataaattctt

SEQ ID NO: 16155 - DNA, 243 bp, Glycine max
  Clone ID: 700961984H1
aaacaaccttcaacaaagacaaaaaccgctctcttctgttctgtccctcaccttataaaacaaagttccacttcatccgattcacctaaaccacaccattcgcatcacaacacttggttgtttgttaccatcttccaaaaatatcatgctcctaacgtaaaaatcctcggtttcacggtgccactgctatctctaaacattaccatggcatcactctcaggcattttctcctcttccccaact

SEQ ID NO: 16156 - DNA, 243 bp, Glycine max
  Clone ID: 700961985H1
cgaccatgttttgataaacttctctcataagttaaaaacaactactgcacctcagcttttgaataagtttgatgagagcttctataaaagttgaagtgcataagttgacctcaacttatggaaaaattatgtttttccattttattttcttctcctataagtatgatgtagaatttaggtgggaatcaaagtatatatggagaactttagccaaacaaggcttaaaaggacttggatctatat

SEQ ID NO: 16157 - DNA, 241 bp, Glycine max
  Clone ID: 700961986H1
ctttctcatcatcgaagcccgtcgcgagaagaagctgcttcgtcacggttcccaaaatcgcgtttcccaagctccgtttcaaacccgtcgctatggctacgctcggcgctcgcatggtggccgccgcacccaccgtcactccgccggcctcgctcgacttcgaaacctccgttttcaagaaggagaagattaacctcgctggacacgacgagtacatcgtgaaaggagggagggatttgtt

SEQ ID NO: 16158 - DNA, 239 bp, Glycine max
  Clone ID: 700961987H1
ggcctccccggcgtctgcatcgccatctccgggcctcaccgctgcaggagctgacccttttgcgcccagttgaagcccatgtctgtcgagggtgcatagttgcctcacgttggacggcgttcaatacgatgtgtcgaagaagatttgaggatcaagagtggactgcttctcaaatgccaagccagttcacaggaaggttccagtggttcttcagaatgagatgcccatagcagagtctc

SEQ ID NO: 16159 - DNA, 246 bp, Glycine max
  Clone ID: 700961988H1
gggagacgcaatgatgctgtcccccgtaacgagcactgacaggctttagtcttgtagccacagcgaactgggacgcagtgggcggtgagcatggctatcatcacagaagaacccgaaccagagcaaccaacacactcacgctcacagatctcacccagcaaacccaacaacaaccccttctccttctggttctacttcaccctctccgtctccctcttcactctcttcttcgtcttcacctcctcc

SEQ ID NO: 16160 - DNA, 208 bp, Glycine max
  Clone ID: 700961989H1
cacatctgttgctggattttctcgcgaacgtaatcgcacttgagacggtcattattaggcgcgtactacgatatggtctgtaagccgatcaccgttcgcttgaatacaggggattctgggatatgctccttatctctgcacgatggccgcaattttctccgtaatgtctactgcagaggagagaacatggaatggttaagggcgaggg

SEQ ID NO: 16161 - DNA, 233 bp, Glycine max
  Clone ID: 700961990H1
tttttggttcttaagccatggcatccacatcctctctgcatctatctcaggcccttctggcacgtgctgtgtaccttcatggctcttcttctgaccgtgtctcactctccttcccatcattctctggcctcaagtcacattctccatgcaaagcagcagccacgtcctcacgtagaaggggtgcttgcgcttccaccagcgttgttcttccatgctgcggttgacacactgga

SEQ ID NO: 16162 - DNA, 211 bp, Glycine max
  unsure (1)..(211): unsure at all n locations
  Clone ID: 700961991H1
cctggttctatcaattccagaaaatgattacactataggatatgcatcagtatcagactataatgctcaaaggtttccgcataaccaatgccaccatgagnagaatgttgttgcaactgttatggctcttccaagtcctggaacatcaggaacgatgctcttacctgtcgatgtggtcaatgagacttcaactagttctaaaagaaccacg

SEQ ID NO: 16163 - DNA, 244 bp, Glycine max
  Clone ID: 700961992H1
gtgctggaacattgcaaagaccctacaacacagcagaaagttatggatgaaattttaggtgcagttagcatgttagctcaggatcagtatggcaactacgttgttcagcatgtgctggaacatgggaagcctcatgagcgttcttgtataataaaggaattagcaggcaagatagttcaaatgagtcaacagaagtttgcctccaatgttgtagagaaatgtttgacctttggaggtccttctg

SEQ ID NO: 16164 - DNA, 237 bp, Glycine max
  Clone ID: 700961993H1
ctcgcatctcaatacccttttgatttgtgaaaggaaagcaaacatgcttgatcaggtccaacaccctacaatcatggacaaggttgctggccagctccatctccgttctggtgtttctggtattaggagttatgaaggagcctactgccaccccacaatgtaccaaagaccctcttttgggaattactcgaatgctgcattgcagtatcctgtgatgccctcatgcaaagctactat

SEQ ID NO: 16165 - DNA, 258 bp, Glycine max
  Clone ID: 700961994H1
tttgcaaaccctttccaacaattagcaaaacatttgttaaacgatggaagtaatgtgtggtgccaaagttggcaatatggtccataaggccaagccttatgtgttaactgtggggttgcaatttgggatggctgggacatacctcttcaccatggccagtttgaaccatggaatgagccgtttggtgttcattgtgtatcgcaatgccattgctgcattggcccttgctccctttgccttgatctttgaaaagaaagt

SEQ ID NO: 16166 - DNA, 246 bp, Glycine max
  Clone ID: 700961995H1
ctctggttcgaccccaccagaaacttccacacttactccatcatatggaagccccaacacatcatattcttggtggataacattcccataagggtgttcaagaatggtgagactattggcgttcctttcccaaagaagcaacccatgagaatctattctagcctgtggaacgctgatgactgggccaccagaggtggtttggtgaaaactgattggtccaaggcaccctttacagcctactaccgc

SEQ ID NO: 16167 - DNA, 245 bp, Glycine max
  Clone ID: 700961996H1
gttgcgtgaaagccgcgccagtttttttttttttttcagagcagggtcccctgatatctatatattcgggtgcaatgaaatcattttctgtccagaactaactacactggccttttgttctcgagtcaatttctaaatccaccaccagaccctctcttcaattctctattataattatctccaaacccttcaatctctctaactcttctctcgaatcttccaccgcaatggccaccgctgccgag

SEQ ID NO: 16168 - DNA, 260 bp, Glycine max
  Clone ID: 700962001H1
ttcgcttccccttaattcccaaccttacattattaacttcaccaactcatctccctctaccaaacaaaacgacacaacaaaaccctctctctaaaaccctctctctgtctcccttccttctcatcttcaccaccaccaatggcgtcgccgccgccaccaccttctctcctcctcctcttcctcaccctcgtcgccgccacggcttcctccctcacctgcaccacccaaaagctcacggactccaagaacaacctctactc

SEQ ID NO: 16169 - DNA, 243 bp, Glycine max
  Clone ID: 700962002H1
tagacgagaagttgctaacttcacttcgcacatctcgaagcctctctttccggcaactacgttaaagttcatcaatggcacgtcgtggcaaaaccctaggatccagcgccgccaagaaggccacctcaaggagcagcaaagccggcctccaattccccgtcggccgtatcgcccgtttcctcaaggccggaaaatacgccgagcgcgtcggcgccggtgctcccgtttacctcgccgctgtcc

SEQ ID NO: 16170 - DNA, 254 bp, Glycine max
  Clone ID: 700962003H1
ctcaattactcaactaaagcttcattcattcatcgtgtcgtgttgtgttctttgcaaccatgcttcttagaacagcgtcctctttctctctcttcaacgccaacggcgaccatatactactcccttcctctgttcgctactctcagggcaaacacttggttccatgcgctaccaagaactccaataaccggcccttaaccggcgtcgtatttgaaccctttgaagaggtcaagaaggagctcgaccttgttccc

SEQ ID NO: 16171 - DNA, 251 bp, Glycine max
  Clone ID: 700962004H1
tcggctcgagtgcaaacattagctatccctacaatactccttgtgatattcatatgggtggtacaaccaaagcaacgtcatgggaagattgcaccaggtcccaatgcgttgccaattattgagtaacctccacatgctagggagactcccgcaccgcaccctacaaacctttgcaagatagtatggacccataatgtccttgaagctagggctagtccgcgccatagtagtttcctgaccggaaatcgctg

SEQ ID NO: 16172 - DNA, 245 bp, Glycine max
  Clone ID: 700961976H1
ctcaactaaactcatattccaaaacgcagagccaacccatgtcgttccccttcaaccactctcacgccacccacacccaccaccgcagggacgacgacgacgacgaacgacccaccgtttaccctccgccgggaaactccttcagcaacccgccacctccgttctacggcgtccctcaaccaccaccccctcagccggagacccacgtgttccattccgctcacgtgacaccaggacacgtgtcc

SEQ ID NO: 16173 - DNA, 230 bp, Glycine max
  Clone ID: 700962005H1
ggggaatcaagtaaccagagcttcatgtgaatgaacacctgatttgaactgagaaaaacaaattatatatctctattcttcattttatgcaacaatgatgagtttcatgtttttccctgtaagctctggtcatatatgaatctcatcattgttgcataaaatgaagaatagagatatatatgaccagagcttacagggaaaaacatgaaactgagatggtggaatatgga

SEQ ID NO: 16174 - DNA, 248 bp, Glycine max
  Clone ID: 700962006H1
attcccttccttccatagaggacgctgacttcaccaatctcataaccggaaatgaccaaactgacatcgttttgcgcctcgacccgaaccaaaccatcgaggaccgcttccttggtgccacactctattggttcaaccaaaaaaccgaaccgaaccggatttccaccttcgttctccaaatcagaaaaaccgataaacgtcgcatccttcgccagtacctccgccacatcaacactgtcgccgacgag

SEQ ID NO: 16175 - DNA, 247 bp, Glycine max
  Clone ID: 700961946H1
ctcccatagtgcccatcatgccccgcccaggtcccaaaccttacgattgcatcaaaagagcttggcacagtgaaatacaccaacccatcagaggaactctcattcaagaaattttcagggttgtcaacgagatacatgggtcttctactaagaagaacacagagtaccaagagaagctaaacgctgttgtgctcagggcagaggacattatttactctaaagccaattccgcagctgaatacatgga

SEQ ID NO: 16176 - DNA, 254 bp, Glycine max
  Clone ID: 700961949H1
ataaagtgaaggtgtttgatttggaggatttgctgagggcttctgctgaggtgttggggaaaggaacttttgggactacctataaggcggttatggaggatgggcccgtggtggctgtgaagaggttgaaggatgtgactgtttcggagaaggagtttaaggagaagattgatgtggtgggagtgatggatcatgagaatttggtgcctctcagggcttactactatagcagggatgagaagcttcttgttcat

SEQ ID NO: 16177 - DNA, 245 bp, Glycine max
  Clone ID: 700961951H1
gatgtgagaatgcaaaatatcttgcatcattgttgtgttgtgggtcatagaattatataggagccgaacgtgatcaaactctaccatatgatacgatgatgtcttatctttttcccttagcttcttcctcttacactcattattccatcatcaataagacccgaactattgcatctgcatgtgctccttcctacatcatcaagaaagcgattggatttcacccttcaaacctccacaacaagtgt

SEQ ID NO: 16178 - DNA, 248 bp, Glycine max
  Clone ID: 700961952H1
gatgaatctgaataccaagctttctcactcataagttcccactccctctcttatcatttatcaaacaaatttttcatctttccccacttgttggattaatggctgcctcagctttgtcactaacatccccattccatttcagaaaaccccacaacagggtttcacctctcaatgctcattctctcattctcatccaaaagggtaaacaatctcttaaatcaaacttctcattctcaaccctgaatgct

SEQ ID NO: 16179 - DNA, 205 bp, Glycine max
  Clone ID: 700961953H1
ccttttcagtcattagtgtcagtgtgaggtggggttgatcttagtttgttgttctcggggtcagttattatctgcttgcgtgttgctatagttgttgcgtgttaagagttttcaaatcactagtggtgggtagccttttcaatcgtgtcaatgcctcctacatactttgccgcttcgttgggagagcactggggaccagtggtgg

SEQ ID NO: 16180 - DNA, 246 bp, Glycine max
  Clone ID: 700961954H1
ggcagaaccaaatagctcattagtgagtttttgagttcgtgtgtcctttctttgtgtgttgcaaggttacaagatggaggatcaaaatgcatcatctaatggattgggcaaggtgttccacaaggttaagccctaccttgctatgatgtcccttcagtttggctactccggaatgtacatcatcaccatggtttctttcaagcatggcatgagccattgggtactctccgtgtaccgtcatatagt

SEQ ID NO: 16181 - DNA, 236 bp, Glycine max
  Clone ID: 700961955H1
caccaaacaagcccagaaaatcctcgtcacggttcagtccaagatagactccgataaaacccgaaccggtttgctcgcgaagtccaccaccaacccggtttaccggctcagcgtattcgaaccgaagacgggttcatggtgcgagttacccctgggacccgaactcgctttcgggctccccatgttctgtcagatagcgggtgtcgggttcgaccttgtcgtaatgggcgggtggg

SEQ ID NO: 16182 - DNA, 249 bp, Glycine max
  Clone ID: 700961956H1
ggaacattacaagaaaaagaaaacgagtatggttttgtcattattaattatgccatgtaaaataattaatataagattattttaatcttgagtttcaatattttgtggtctacatcatgtaagacataaatgtgtgaaataatttgtttgagattattttaacttatttggtagtgttgaatttgagattttttaagatattttttttggaggcaattttttttagtcgaataaaattattataattgg

SEQ ID NO: 16183 - DNA, 247 bp, Glycine max
  Clone ID: 700961957H1
gatgttctggctccttttggctttctctcctctccaaccgatgcttttaatacagagattcatgtcaacaaattctccatggattattatgagagtggagaggtttcacagttccacaccgatctttcccttcgtaacatggatgggaaagaagtaatgaggaagacaatcagtgtaaatgatcctttaagatacggtggtatcaccatatatcagacagattgggagtatttccgctctgcaaatt

SEQ ID NO: 16184 - DNA, 249 bp, Glycine max
  Clone ID: 700961958H1
aaacttcttcttggaatgtcccttcctaaataaccctcaaacaaaagccaccttaacatctcttctctgaaaattctctttagagagatagagagatagagagagagagaaagaaattaagaaaaaatggcagcctgcactgtctactcaacacaatctctgagcacaaattgctccatctcaaccccatcaaagacacagctgagtttcttccaccaaaagcaggtagttttctggaggaacagcaac

SEQ ID NO: 16185 - DNA, 247 bp, Glycine max
  Clone ID: 700961959H1
agagagggagattctttgtttgctaccttctctcggaaaaatggttacgttcaggtttcaccagtaccaggtggttgggagggctcttcccacggaagcagatcagcaccccaagatctaccgaatgaagctctgggccaccaacgaggttcgcgccaagtgccaattctggtattttctgaggaaactgaaaaaggtgaagaagagcaatggccaagtgcttgccatcaacgagatttttgagaag

SEQ ID NO: 16186 - DNA, 247 bp, Glycine max
  Clone ID: 700961960H1
cttggttttaattggtataggcttgccaaggtcttgttgattgcacgttaagtgctttaactaatcaatcccaagaccttggtttaccttgccacacaaaaaaatatacaaaaaggcaaaataataataaaaaaaagagaaggcttggagccaagaaaataaacacaaagcagcagtcatggaaagaataatggttggaagtgcaacacaggttgctttcaacctcttggtcactttcgccattgtc

SEQ ID NO: 16187 - DNA, 248 bp, Glycine max
  Clone ID: 700961961H1
tctattcttttaaaccttagtctcccacggaagacttcaacagaagaaaaaggaagaattaatatcactcttccatggttgccgacgaagcttcaccattcgagaccagcgatatgctggcaacgctcctggcgtcgacgccgctgttgtcagagtcatggcggctgtgcaccaccgtggccgccaccgcgccgaggagtttcatgactgagcagcacggtggcggcggtgtggtgtacgtcgctttc

SEQ ID NO: 16188 - DNA, 245 bp, Glycine max
  Clone ID: 700961962H1
tacacaggtgaatccgtcgacattcattgcaatttgtgatcagcgaggaaagaaagcagggaggttctgttgtaggtgggtgagtaatagtatcggtcgtgttgtggatagatcggcatggcttcttcttcagcttctcctcgaccgagcgccgccgcggaacattcgaggaagatattagggtttatggcgcacgcgaagcaacggaaggacagcttcatccaattcttcgccatgacgggtat

SEQ ID NO: 16189 - DNA, 114 bp, Glycine max
  Clone ID: 700961963H1
gtgagcatttgcaaatgcgttgccacacccgaagctgaccctgcctacaagacaggggtcaatcgcaatcctaatatgtgggaaactatcaagctaggctagtctcttatcccg

SEQ ID NO: 16190 - DNA, 255 bp, Glycine max
  Clone ID: 700961964H1
ctcttcctccctttctcacagcaatggccgccgcagcacgccctctcgtcaccgtgcaggccctcgacggtgacatggcaaccgatgcctccgccaccgttcccatccctgacgtcatgaaggcctctatccgccccgacatcgtcaatttcgtacactcgaacatctccaagatcagccgccagccatacgccgtcagtcgtcgcgctggtcaccagacctccgccgaatcctggggtaccggccgagccgtct

SEQ ID NO: 16191 - DNA, 253 bp, Glycine max
  Clone ID: 700961965H1
gaggacttgaggaacaagagtcctcttctcctccaaatgaacccggttcacaagaagattccggttctcatccacaatggcaaacccatttgtgaatccctcattgctgttcagtacattgaggaggtttggaatgacagaaatcccttgttgccttctgacccttaccagagagctcaggctagattctgggctgattatgttgataagaagatatatgatcttggaaggaagatttggacatcaaaaggag

SEQ ID NO: 16192 - DNA, 253 bp, Glycine max
  Clone ID: 700961966H1
cttggttttaattggtataggcttgccaaggtcttgttgattgagcgttaagtgctttaactaatcaatcccaagaccttggtttaccttgccacacaaaaaaatatataaaaaggcaaaataataataaaaaaaagagaaggcttggagccaagaaaataaacacaaagcacaagtcatggaaagaataatggttggaagtgcaacaaaggttgctttcaacctcatggtcactttcgccattgtcattcca

SEQ ID NO: 16193 - DNA, 249 bp, Glycine max
  Clone ID: 700961967H1
ctttgttcactcttcttctcttgcggctagggttttagcgcactatcttctagatttaaggaagatgggtaaggaaaaggttcacatcagtattgtggtcattggccatgtcgactctgggaaatccactaccactggtcacctgatttacaagcttggaggcattgacaagcgtgttattgagaggtttgagaaggaagctgctgagatgaacaagaggtctttcaagtatgcctgggtgctggacaa

SEQ ID NO: 16194 - DNA, 243 bp, Glycine max
  Clone ID: 700961969H1
cgcaacaaaaagaaagaatcccaggcgaggagaaagatggaggggaaggagcaggatgtgtcgttgggagcgaacaagttccccgagagacagccgattgggacggcggcgcagagccaagacgacggcaaggactaccaggagccggcgccggcgccgctggttgacccgacggagtttacgtcatggtcgttttacagagcagggatagcagagtttgtggccacttttctgtttctctac

SEQ ID NO: 16195 - DNA, 242 bp, Glycine max
  Clone ID: 700961970H1
acacacttggctgaggaaggtcggaaaagaaaatggagttgttcttctacacggtgttcggtgcactggccgcggttgtggcagttatggagctgagcaagaacaacaaggatcgaatcaacacctcttccgcattcaattccttcgagaacaactacatcctcgtctattccctcatgatggctggagattggctacaaggtccatatgtctactacctttacagtacatatggatacggg

SEQ ID NO: 16196 - DNA, 232 bp, Glycine max
  Clone ID: 700961971H1
gatgtcgggtcgtggaaagggaggcaagggtttgggaaagggaggagccaagaggcacaggaaggtgcttcgtgacaacatccagggtatcaccaaacccgcaattcggcgtttggctcgcagaggtggtgttaagagaatcagtggtctcatctacgaggagacacgtggcgtcctcaagatcttcctcgagaacgttattcgcgacgctgttacctacaccgagcacgct

SEQ ID NO: 16197 - DNA, 201 bp, Glycine max
  Clone ID: 700961972H1
cattaaccttgctgcaaattgcgcacacgattctttgcattccttcgaaactctcccaaatcccactctctctctctctctctctcataaatacgccaccttttattttacgtaactgctctgcaccttagtcttctctctccaatctccaactccatttcttcgatctggagctctccgctattcaagctgtcaaatttc

SEQ ID NO: 16198 - DNA, 248 bp, Glycine max
  Clone ID: 700961973H1
acacaagatgtttccactttaccttactagagttctgactttcttcatgtatgcgtttatgtttctacttatttctgttcattgtattaccgttctcaaacaagttattatataattaagaccggtctcatttcaaaaaaaaaaaaaaaaaaaaaaaaaaaaaaaaaaaaaaaaaaaaaaaaaaaaaaaaaaaaaaaaaaaaaaaaaaacaaaaaaaggggggcccccccaccaagagaccccccccc

SEQ ID NO: 16199 - DNA, 239 bp, Glycine max
  Clone ID: 700961974H1
aaatgagaccatgcaaatgcaaatgcaatgttctctctgctctcattcttcttgtcacattcctttttattgcttcttccgtccactgtgaagacccatatcggtacctcacttggaaggtcacctatggtgacatctatcctcttggtgtcaagcaacaagggatcttaattaatgggcagtttccagggcctcaaatagatgctgttacaaatgacaacttgattatccatgtctat

SEQ ID NO: 16200 - DNA, 248 bp, Glycine max
  Clone ID: 700961945H1
gtcgaagtacaaaaaggagggagaatgcgctcacttctcaatttagaaaagagggaacgatctcttaattatgagggacctagacaagggatttctcatggaaggatatcatcagttcatgtgctccctttcagtgggttaaacagagagcacattctatatccactgagaaggctacagtttctgctaccgatgaagattccattgctgatgtgatggaacagcatgacgaatttcttagttcaatg

SEQ ID NO: 16201 - DNA, 245 bp, Glycine max
  Clone ID: 700961975H1
caaaggaagacaaggggaatattatgtgatggttatggacatgcttggtccaagcttgtgggatgtttggaattcctcaagccaggctatgactgcggaaatggttgcatgtatagcagtcgagtccctatcgatcctggagaagatgcatgcaagaggctatgtgcatggagatgtaaaaccagaaaactttttactaggtcaaccttctacaccacaagaaaagaaattatttcttgtagacc

SEQ ID NO: 16202 - DNA, 255 bp, Glycine max
  Clone ID: 700961909H1
aaaacatctctaaacgcttgtaaagatctccatctcccattgatcctcctgaagtttttgtattcaaccatggctacctatagttggtcaactgagatattttcatttttggttctaacgttgttgtcgacaagcagtcacacaatggttgctggagcacgcaatcttctcgaatcaaccttgtcaaaaccagaagtgccaacacttcccaaacctcatgagttgccaccattgccggaaatccctgaattgccc

SEQ ID NO: 16203 - DNA, 254 bp, Glycine max
  Clone ID: 700961911H1
gtaggaattccagggtctggccaacgaggaacccgtgatatgctggtccacaaaatgaatggtagagatatttttttgttgttacgcatccatagtcatatcctatttcattgcaacaaagcagccctggtaaaagtacttgggtagaaactataaactgggaactatggaaggaggagggacctggctgcaagacagtacctggatgcaatgctcagaactttattaatttgtcattgcaatttttttctttt

SEQ ID NO: 16204 - DNA, 255 bp, Glycine max
  Clone ID: 700961913H1
gagcagcggttgcaggaaaagccgtgtcagcgagcgtcgcattcacggcgatggcggagacggtgagacttcgcgtggtgttcgaggatcgtggcatgttgagcaagtcaaagaagaagcaagggctcaagcgttgctggtttctgcttaaaccccaacacaccaccatttccgatgttgcctctcatctactcaacactttccgcctccaccgcacctgtccccatggcatcgtcctatcgatggatggttttg

SEQ ID NO: 16205 - DNA, 255 bp, Glycine max
  Clone ID: 700961914H1
gtcatcatccgcagctgctgttattcgcaccgcaaacaaacagtgagccatggccgtcggaaagaacaagcgcatctccaaagggaaaaagggtggcaagaagaaggcagctgatccctttgccaagaaggattggtatgacattaaggccccttctctttttcaagtgaaaaatgttggcaaaaccctcgtctctcgtacgcagggtaccaagattgcttctgaaggacttaaacatagagtgtttgaggtctc

SEQ ID NO: 16206 - DNA, 254 bp, Glycine max
  Clone ID: 700961915H1
gacaacaactgaggagaaggatatcttgaatgggatcactggttctgtaaatccaggggaagttttggcattgatgggcccctcgggaagtggaaagacaactcttttaaaccttcttgggggaaggttaagccatcctataagtggtggttctatcacttacaatgaccaaccatattccaagttccttaagagcaggataggattcgtgacacaagatgatgttctgtttcctcacctaactgtgaaagaga

SEQ ID NO: 16207 - DNA, 255 bp, Glycine max
  unsure (1)..(255): unsure at all n locations
  Clone ID: 700961916H1
ctttcttccatcttcttcccttttcacgtcattatcctaaaaacttgcagattttcacattccacacaacatgcaactttggtctctgtttctgtcggtgctcctttgtgccacttttcatctctccttctctattatcgacggtttagttgccaacggcaactttgagttggngtccaaagtcctccgccctaaaaggaacagtggtggtgggcgggagctctcgatcccagaatgggagatctccggctttgt

SEQ ID NO: 16208 - DNA, 273 bp, Glycine max
  Clone ID: 700961917H1
attcaggtcgagcgtcattccgccgtcgtcgcaatcgcagggatccatcatcacaagttccgtggaatcaaatggtcgttttctctgtgaaacctttcttcagaattctcgttgtctccctctcactcctcttccttctcgcactgcaattgccttcttcccttttctctcaagttcagatttatagggaaccctccttacgggaggtggatatatggagtgttcggagactcatggaatggagaccttgcaattggtggctacaaggccgtc

SEQ ID NO: 16209 - DNA, 255 bp, Glycine max
  Clone ID: 700961919H1
ccaatttttacatgaatcagaactcgtagtataaattcgatgggtggcattagccccaatttcttcatctctgcatatgaataaatcgatttcaatctttgcagtatcgaacatctctgcacacttcattcccaaatcccactcgtttctctgttgtttctgcactgttttgaggaggttgaaggggaaaagtgggtatcaaagttggcatagcagaagtgcaatcagctctagtttcttctcttccaagcaaca

SEQ ID NO: 16210 - DNA, 227 bp, Glycine max
  Clone ID: 700961920H1
caagggcacttaattaactatgtactctcgttgattgccattgttaattttctagcttgtgcccctgctgtttatgtttcttattttccaacgtgcttgttgctaatgtaatggatcgtggcgtgcttgtttttgtttgttgttgttgttgtaacttgtaatagtgtgatttgtttgtttctctactttagttttggctaatattcctgttacgtacgtacatcttt

SEQ ID NO: 16211 - DNA, 154 bp, Glycine max
  Clone ID: 700961921H1
tggaatttgaatacaaatggcgaacatatttgattgctgctgcattgtcacataatctacagatccttgaaaactaacagcaatcaaatatgttcgccatttggaatttgattgctgttagttttcaaggttctgtagattatgtgacaatgca

SEQ ID NO: 16212 - DNA, 252 bp, Glycine max
  Clone ID: 700961922H1
gcaagtttcgatccccagaaggaaaataaaaatgcacgaaattagagaccctgcaattcggctcttcggtcagaagatccctttccctgaagatgttgacaaagaagaagagagtgctgaggatagagaacaagagatggaagaacatgaagacgaaggagacaaggatactagagttgaaaatgttactaaggaagagctagaagctgatcctcctctagatgctgaagagactaagatttcaggcacatc

SEQ ID NO: 16213 - DNA, 251 bp, Glycine max
  Clone ID: 700961923H1
caccattctatcgcttcacacagagtgagatatagaatcactgaagagcttccttcaatggcggtttcttctctctctgttactcctctttcgctctcaaattcttccccctctctatcttccaagccaaagtttccatctttgtgttttctctctggcaacaacaccacattgagggtaacatgcccaaaacctctgcactcatccactgttgttcatgttgctaccgaagcgttggattcatcccctga

SEQ ID NO: 16214 - DNA, 254 bp, Glycine max
  Clone ID: 700961924H1
ggcaggtttgtcattggtgggccgcatggtgatgctggtctcaccggtcgctagatgatcatcgacaccgatggcggacggggtcgcacatggatcgcgtgtgttcgctgcgaaggatcgtaccagtgtcgataggagtggtgcctacatgatgcggcgagtctgttggagcattgttgcctatggcactgtcaggctgggcaattgtgcaagcgtcctatgccattggtgggcccgagcccttgtctgtgttt

SEQ ID NO: 16215 - DNA, 253 bp, Glycine max
  Clone ID: 700961926H1
ctttggaatggaatgaaacctcttcttccctctctcctaattctctctcactacatccatcctcgtaaaacaaaacaacctcttacctccgttcaagtttcacacgttcttccactatgtcctggttgcgacacctctcctccaagttctcctccaccaccatcacaagcacgcgccgcttcacttccctgtcccggttcagtacctcgaccgctccggctcgtcatgcgggcctggggcccactcaggccca

SEQ ID NO: 16216 - DNA, 248 bp, Glycine max
  Clone ID: 700961927H1
gttggatagagcttcttgccttgtgttctacgttctgcattcttctcagcccgaaacaaggacctgtcatcaagatggtgaagttcacaactcacaggcttcggcacataatggactgcgaacacaatattcgtaacatgtctgttattgcacacgtcaatcatgccaagtctacgctcactgattctcttgtggctgcttctggtaatatccttgcacaagagggtgaagctgagcgtggcaacact

SEQ ID NO: 16217 - DNA, 252 bp, Glycine max
  Clone ID: 700961929H1
accatgtggaagagactcacacttgagggggagatgtattgggttacaagtgtgaggtgaagtcccacatcggatagaagtggaaaggttgagcaccatataagtgaggagaagacccataaacctgagccttaaggttttgggttagagtgttgtgtcaggtctccttatgtggtggcttgtggtccacaggtgtacttctcgaatctccccaacaggtggattggaaggggtattcaatccttgtcaagt

SEQ ID NO: 16218 - DNA, 252 bp, Glycine max
  Clone ID: 700961930H1
atccaaaatcagccatggtttcaaatggtaggatgctgtgttcaagcttgattacagcacctccgtcatcctccctctccagaactactccatcctacttctgctcatttccttctcgtagaatcatcttcacgccaagaattggatcatctccggccccggcccaggcccaggcccagcccaaggaagccaagctctggggtggcaggttcgaggagggcgtaaccgacgttgtggagaggttcaccgagt

SEQ ID NO: 16219 - DNA, 255 bp, Glycine max
  Clone ID: 700961935H1
gtgtgacacagaaattaagctagagcttcatagtttcttcttcttttctcaccttccttctctcccttcagacaaagggacaaaaaatcagtgtgtgagagagagagagagaaattccaaaaccatgtcccacagtcatctaagtttcgcctttgggattctaggtaacattgcctccttcgtgtgctttctggcaccactaccaacattttatagagtttgtaagaagaaatcaaccgaagggttccaatcaat

SEQ ID NO: 16220 - DNA, 248 bp, Glycine max
  Clone ID: 700961936H1
gtgctcctaacattagattagaccctctaccatgttcctctgcctctgaagtctgaacctccccaggaatggcaatggagaatacaacattgtttgtgtagttgctgaatgtgcttcttgtgttcagtgcctttcttgtgtccgcagagcaacaaagtcaatcctcagctgtaggggacccatgaatgcaaagagatggtttaagggtggcctttgaagcttggaacttctgcaatgaagttggtcaa

SEQ ID NO: 16221 - DNA, 249 bp, Glycine max
  Clone ID: 700961938H1
attctctcttctattctattctaaactcgaaacaatcttagagaaagaagcagaagaaaatgccgatttctagaattgccattggaaattcttcggagttgaaccaatctgatgcacttaaggctgcactagctgagttcatctcaatgctcatctttgtttttgccggggaaggctctggaatggcttataataagctgacaaacaatggttcagcaacaccagcagggttagtggcagcatcactgt

SEQ ID NO: 16222 - DNA, 248 bp, Glycine max
  Clone ID: 700961939H1
attctcaactgcgcggtgagtgagtgagagacggaaagtgcaaagccaccgtcttctcttctcagagcttggctttgcttatcgattctctctcctctcatctttctcattcaaggtttgtaaaagatggccgatgctgaggatattcaaccccttgtttgtgacaatggaactggaatggtcaaggctggatttgctggtgatgatgctcccagggctgtctttcccagtattgttggccgacctcg

SEQ ID NO: 16223 - DNA, 249 bp, Glycine max
  Clone ID: 700961940H1
ctcttcttccattttccttctcaatccaccactctaaccctcgcacgcttcgttcaattacaacaatggacagatcaactggccgtggtggtggtggaagtgtggacatgtttctccgaaattataagttgggaaaaacactcggcattgggtcctttggcaaggtgaaaattgctgagcatgtacggactggtcataaagttgctataaagatccttaaccgccacaagattaaaaacatggcaatgg

SEQ ID NO: 16224 - DNA, 248 bp, Glycine max
  Clone ID: 700961942H1
gcttgagggacttttccatttcccgagcatcagttgagtggggcattcctgttcctgatgacaagacccagactatatatgtatggtttgatgctttactaggctatatatcagcactatctgatgatcaggaacaacctgatttacttaaaactgtttcttcaggttggccagcttcactgcacttgatttgtaaggatattctacgcttccatgctgtttactggccagctatgctaatgtctgct

SEQ ID NO: 16225 - DNA, 244 bp, Glycine max
  Clone ID: 700961943H1
tggttctgaactaattgttataaataatacctaaaattttgagttgtcctaaacattgggggttagacaaatccaatctctcaatatataatcctatgatctcaccctcactctgattctgatttctcactctacgtgtctcgttcggttcatcagcgtgtgtctcagccatggcgtatctctacatgagagacgttgtcggatttatgatcataactgtacatattgagacttacttggatgt

SEQ ID NO: 16226 - DNA, 250 bp, Glycine max
  Clone ID: 700961944H1
ctcgcaagcaaaaagaaagaatcccaggcgaggagaaagatggaggggaaggagcaggatgtgtcgttgggagcgaacaagttccccgagagacagccgattgggacggcggcgcagagccaagacgacggcaaggactaccaggagccggcgccggcgccgctggttgacccgacggagtttacgtcatggtcgttttacagagcagggatagcagagtttgtggccacttttctgtttctctacatca

SEQ ID NO: 16227 - DNA, 255 bp, Glycine max
  Clone ID: 700961908H1
ttcgaatagattatcctaagtctttgggaatagtgctgcaatggcttcaagtcaggaggaggtgacccttttgggagctactggaagcccatttgtgtgcagggttcatattgccctcaagttgaagggagttcaatacaaatatgtcgaagaaaatttgaggaacaagagtgaactgcttctcaaatccaacccagttcacaagaaggttccagtgtttattcacaatgagaagcccatagcagagtctcttgt

SEQ ID NO: 16228 - DNA, 234 bp, Glycine max
  Clone ID: 700961875H1
ctcatatactactaacaccctcagaaccgttccccacttgcttttcaattttctttttttgcccttttcgccgccctcaaagagttcaaggatttatacaattaatagttttttaatttggaatggctggaatttgctgtggagttgttggagaatccggagagacttcttcctcttcaatcgaacccacctcgcgcccctccgctcgccggagtttggacattttgcctttga

SEQ ID NO: 16229 - DNA, 234 bp, Glycine max
  Clone ID: 700961876H1
gtaagctttgtgctaggaactgcttattcaatcaatgtgcctctgttgagatggaagaggtttgcagtgcttgcagcgatgtgcattctagctgttcgggcagtaatagttcaacttgcatttttccttcacatccagactcatgtatacaagaggccacctgtcttttcataatcattgatttttgctactgcattcatgagcttcttctctgtagttatagcactgtttaag

SEQ ID NO: 16230 - DNA, 234 bp, Glycine max
  Clone ID: 700961877H1
ataaaactaaacacacagttgtttcatcagcacacccgcaggtctcctaaacaagtcacattttattcatcatggacatgaagaaggtcacttgtgctgttctcatcgccgccgcctccgtgagcgctgtggtggctgccactgaggtcacagcccctgcccccggcccaagcagtggagcttcagctagcttgccccttattggctccttggttggtgcctcagtcttgtctt

SEQ ID NO: 16231 - DNA, 234 bp, Glycine max
  Clone ID: 700961878H1
gtggcttatgacaatatgagcccctccgtcttcctcctgtggcttgtcattatttctgtcctcgcccactctgccctagcttcaatccctctagcttatttcttagactgtgggggcacaaagaggtaacggtagacaatctcacatacattcctgatgaaagttacatcaaggtgggcaaaaccaccaccatcaacaagccagacttgttgccaatactctcaacattgcgat

SEQ ID NO: 16232 - DNA, 240 bp, Glycine max
  Clone ID: 700961879H1
gcagaggtgacggagtttcagttttgtaagtgcatgatcataataataaggtttttatagaaaagaaaagttgagaataagatgggggaagatggtaattcttggattaggaggacaaatttttcacacacagtgtgccatcgtttggatcctgctagattaggctctattcctatcagtgttcagtcagagcagaaatcaaggccttcctcaaaggctcagagacaccctatgacatac

SEQ ID NO: 16233 - DNA, 241 bp, Glycine max
  Clone ID: 700961880H1
gcagaattcaccaagtgttggattgttcacccaccaatagggaacgtgagctgggtttagaccgtcgtgagacaggttagttttaccctactgatgacagtgtcgcaatagtaattcaacctagtacgagaggaaccgttgattcgcacaattggtcatcgcgcttggttgaaaagccagtggcgcgaagctaccgtgcgttggattatgactgaacgcctctaagtcagaatccgggcta

SEQ ID NO: 16234 - DNA, 241 bp, Glycine max
  Clone ID: 700961881H1
ggcaagtaccatttttctcaaccttatcacccttttgcataaaagggccaccccttcttcttcttcccttctcaacttgtactacaatttctggattgaattatcttcaaaatgagagaaatccttcatgttcaagctggtcaatgtggaaaccaaattggaggcaagttttgggaggtgatgtgtgatgaacatgggattgatgccactggaaattacgtaggtaactttcatcttcaac

SEQ ID NO: 16235 - DNA, 188 bp, Glycine max
  unsure (1)..(188): unsure at all n locations
  Clone ID: 700961882H1
gctaaaaccttgacccagtctgaggtcaagaatggtaggttgtctntccagttcctaggaaagcttgcagagagatttttcgctcgtatggtctactcagcggtccctcctggtcatactatgcgtgtcatgcttggtcttggtgttgcatggaagtcctgatccatctatagggggatgtcgaggcg

SEQ ID NO: 16236 - DNA, 237 bp, Glycine max
  Clone ID: 700961884H1
gcgagaaccaaagaaaaaaaaagcttcttccattttccgaaatcgaagcattagggttagggttttttccgatctgagaaattcgcggcccaatggcggaggaaccggagagcaccgtcaccaccggcgccgccgacgaatcgctgctcgataagatcaccgagaagcttcacggccacgattcttcgtcctcttcatctcccgactccgactccgactccgaaaaaaccgttactt

SEQ ID NO: 16237 - DNA, 236 bp, Glycine max
  Clone ID: 700961885H1
gcacaatccattcattcagtgagcgagaaagtgagaagatgctggcaccaattttcattttcatataaaagaagaatcatcatctgtataccttactagttatttactaaacagacaaatgggtttcagagtattaggagtatctcttcttatcttcatctatctcattaatcttgctcctgcatatcctcttcaaaacaaattgttttcagaatttgtgcagaatagcaagtacg

SEQ ID NO: 16238 - DNA, 235 bp, Glycine max
  Clone ID: 700961886H1
aaaagaaagccaaaactacagttctttcaatgaagctcccagctttttcttcttctcctcctccagtacattattgttttctgccttcaacgacttttaagtcacttgtccgtttgacagtactattactagttgtttccagcaacaaaacaaagggtgctgtggaacttccaccaaatgtctcggttccagcagtgttggtatttggagattcgatcatggacactggcaacaa

SEQ ID NO: 16239 - DNA, 236 bp, Glycine max
  Clone ID: 700961887H1
gatctttctttcagcttcttgttctacaatgaaaagcctctgccttgggccgtttcttgctgctagtgccccagttggtagaagagcctatggaggccacttaagcagaaagtgctttcaaaagcaacttcacttccactcacgttgtgttgtgttctcttcattcatatgttctgcaactatatcagtgatgccagaattagaagagaagcaagtgtttgatggagagaaggcta

SEQ ID NO: 16240 - DNA, 234 bp, Glycine max
  Clone ID: 700961888H1
tcgaagttgatgccaacggcattctaaatgtgaaggcagaagacaagggcactggtaaatcagaaaagatcaccattacaaacgaaaagggacgtcttagccaggaagaaattgagagaatggttcgcgaacagaggagtttgcagaggaagacaagaaggtgaaggagaggatcgatgctcgcaacagtcttgaaacctatgtatacaacatgaagaaccagatcagtgacaa

SEQ ID NO: 16241 - DNA, 232 bp, Glycine max
  Clone ID: 700961889H1
attttcttttccttcactttcccgagaaaaaaataacacttttcactttcttcactacgttctcacttcgatatggctcgtacgaagcaaaccgctcgcaagtccaccggtggcaaggcgccacgtaagcagctcgccaccaaggccgctcggaagtccgctccggcgaccggaggagtgaagaagccccaccgcttcaggccgggaaccgtggcgctgagggaaatcagaa

SEQ ID NO: 16242 - DNA, 230 bp, Glycine max
  Clone ID: 700961890H1
cattttgcttgtcattgttattagtcagaagctagaaattcgtgttgagagttgagttgaggcagagattcaagagaatggagggtgtgagccccgagcccctgagatcagaattggattccaaatccaaacatgacacagcaaaagaagatgatgacgctttgaaagacagcactgaagccgaagtcaccaaaattcgtctcatgagagcctttgttgaaagccgagat

SEQ ID NO: 16243 - DNA, 232 bp, Glycine max
  Clone ID: 700961892H1
ccttcctggataacgttttcgggttcgagaaggcacttgtgttgtttttcgtacgaaatggagactaaacagagttcggtgacggttacgctcagttacggcgcgttgacgtgcgccgcggaatttctcgcgactttgctagcttctgctgtcgtcaaagcctcgcttttagccccggatctctaccggctgctattgatcaacacgcctactgccaaaggagagagcaaaa

SEQ ID NO: 16244 - DNA, 232 bp, Glycine max
  Clone ID: 700961893H1
gttttgatgcaacgctgtcactgagaaaggatctctatctacgaaggagcggaataaaacccttctctctgtgattaagagaatggcttcagatcggaaacttcacacttttgaggaggtggcaaagcacaaccagaccaaggattactggctcatcatttctggcaaggtgtatgatgtcacccctttcatggaggatcatcccggaggtgatgaggttttgttatctgca

SEQ ID NO: 16245 - DNA, 248 bp, Glycine max
  Clone ID: 700961894H1
tttgcaaaccctttccaacaattagcaaaacatttgttaaacgatggaagtaatgtgtggtgccaaagttggcaatatggtccataaggccaagccttatgtgttaactgtggggttgcaatttgggatggctgggacatacctcttcaccatggccagtttgaaccatggaatgagccgtttggtgttcattgtgtatcgcaatgccattgctgcattggcccttgctccctttgccttgatctttg

SEQ ID NO: 16246 - DNA, 238 bp, Glycine max
  Clone ID: 700961895H1
ctattttctcactcctgtctctgccaggtctcgccaattcactgacccccagtattgtcgttacctcatcaccgagtatcgtaaaattctcatgaggttgtatgagttgggtgctagaagggttcttgtgaccggaactggtccattgggctgtgttcctgctcagcttgctacaaggagtagtaacggagagtgcgtgcctgagttacaacaagctgcacaaattttcaacccactt

SEQ ID NO: 16247 - DNA, 243 bp, Glycine max
  Clone ID: 700961896H1
caggccgggtctggtctccgtagcggttaccccccaaagatgcctttacccagttcccatttcatctcttctcagacctctacctggctcctctaaaaagcaagccccacttctctccgatgcctctctggacaaccctgatctcggcccattccttctcaagctggcccgcgacaccattgcctctggcgatggccccgccaaggccctcgacttcgccatccgggcctccacttcctttga

SEQ ID NO: 16248 - DNA, 272 bp, Glycine max
  Clone ID: 700961902H1
atgcggctccagctatcatggctgagcatgatgctcgagatgtacaaaggcccctcgaccaatggagaagcagcaaagggggattcatggcttccatgtacattttagtcttgccagcattggataacatgggctttgaggcaaacatggtaagcatagtcctatacttttatggagtgatgcactttgatctagccagttcagccaacacactcacaggcttcatgggctcaacctagttgcgggaccttgctcgtggcttcatctcagat

SEQ ID NO: 16249 - DNA, 258 bp, Glycine max
  Clone ID: 700961903H1
gccttgctttgcagcttcagttcagtctctaactgtgttgaatttatctaacaactctattgtggggggactacctgcttgtattgcttcttttcaagctttgactcatttgaacctgtcagggaaccacttgaagtatagaatatatcctaggcttgtgttctcggagaaacttcttgttttggacttgagtaataatgctttgtctggtcctattccttgtaaaattgctgagacaactgagaaacttggccttgt

SEQ ID NO: 16250 - DNA, 255 bp, Glycine max
  Clone ID: 700961904H1
atccattctttgctccctcgaactgctgtttggtctcttcactcttatccatggcatcaacgtttctcaccctaccaactcccttcctacacaaaactaatgccatcactttctctgacaagagaccctcatttttgcagaggagctctctgaagatcaatgcaattaccaaaaaatgggaacccactaaggttgtacctcaggctgatagagttcttgttcgtttggaggagctatcagataaaacagttggtg

SEQ ID NO: 16251 - DNA, 253 bp, Glycine max
  Clone ID: 700961905H1
tgcaatggttcctcaacctctgctaacccttttcctctttctctccctcctctcaattgtcaactcctctccttcccaacaccttcagatcgcccatgctgaacgcaggattgacttgacttctcacattattaaggtgtacttgacgttgaaggttgaacatttggggacatctcctacttcagaagtacatattgccttttcacccactgaagtagaacatctagcaatagtcagagctgctgcaacttct

SEQ ID NO: 16252 - DNA, 232 bp, Glycine max
  Clone ID: 700961874H1
gggatattactactggccttaaaacatctgtctttggaggagagtttcagtctggacatactgcagatgtacttagtatctccattaatggatccaactcgagaatgtttgtatctggttcttgtgatgcaactgctcgattgtgggatactcgcgtggcaagtcgagcagtgcggacatttcatgggcatgagggagatgttaatgcagtcaaattctttcctgatggaaa

SEQ ID NO: 16253 - DNA, 252 bp, Glycine max
  Clone ID: 700961906H1
ggaatatgatgaataagaaaatggttaatggggggacagttaacaactggttctgcataaacttttcaaggaatgttcaagatagtgttgcccgtggtttttgctatgaacttgctcagatgtgttatatatctggaatggcatttacacctgagccagtagtccccccagtcagtgctcgccctgatcaagtggaaaaggttcttaaaactcggtatcatgatgccaagaacaaactgcaaggaagagagc

SEQ ID NO: 16254 - DNA, 242 bp, Glycine max
  Clone ID: 700961907H1
ctcgcgcgatatggtattgtccctttccatttcccattagcttcttctcctcacgcccgctcatgagccaccatcgcaacaaccacgctgcgctcactgtttcaaccggcgatgcgaatcccgatgactgtcaccaaccggtcgatgctcccctttccgcagcagaacagattagggttagggtttcatcggaggacaacgcggcacccgcatcctccaccgctgatcgcttcgaccgcatc

SEQ ID NO: 16255 - DNA, 241 bp, Glycine max
  Clone ID: 700961841H1
atggagaatacatgcctagctagtaaactcttacattcttcttgaaaggttatacggaaaataattattatttaattgatagtaatgtaaaacttttacacttaattaatattagttcataaaagaaaacaaaaaaaatatttgtaaccaatatgtttccttttacaacgtgattactctcattcctcccttacaaatatctctttctcgtcacacgaaccacccttcatggtatatttct

SEQ ID NO: 16256 - DNA, 235 bp, Glycine max
  Clone ID: 700961843H1
ggaccgtaaagttgagtttggccttcctgacttagagagtaggacgcagatattcacgatacacacaagaaccatgaactgcgaaagggatattcgatttgaacttctggctcggctttgcccaaattccactggagctgatataaggagtgtatgcacagaagccggtatgtatgctatccgtgcccggaggaagactgtaacagagaaagacttccttgatgcagtaaataaa

SEQ ID NO: 16257 - DNA, 238 bp, Glycine max
  Clone ID: 700961844H1
aaaacagtaaacaaaagcaaatgaggaaatgaaataattattttaattttgtaattcattgtttggttctgcttcacaggaatggtagatttgaggtgaaaaggttccacattggtcaggttcagatctcacaatggggaagtcaccaggaaaatggatcaaaactgtattgttttggaaaaagtcatccaaatcaaatatttcaaaaggcagagagaagcttgttaatcaagaagaa

SEQ ID NO: 16258 - DNA, 239 bp, Glycine max
  Clone ID: 700961845H1
gtgagaaccttggtagaggaacaaagataactttgtttcttaaggaagatcaacttgagtatcttgaggaacgccgtctgaaggatttgataaagaagcattctgaattcataagctatccaatttctctctggattgagaagactactgataaggagatttctgatgatgaggatgaggaagagaagaaggatgaggagggtaaagttgaagatgtggatgaagataaggagaaggag

SEQ ID NO: 16259 - DNA, 258 bp, Glycine max
  Clone ID: 700961846H1
cggcattcggctcgggtcgaggtggcttatgacgatatgaggccctccgtcttcctcctgtggcttgtcattacttctgtcctcgcgcactctgccctagcttccatctctctcagcttatgtcgtagactgtgggggcaccccagaggtaacggtagacaatctcacgcacattcctgatgagagttacatcaaggtgggcaaaaccatctccatcatcaagccagacttgttgccaatactctcaacattgcgata

SEQ ID NO: 16260 - DNA, 242 bp, Glycine max
  Clone ID: 700961847H1
atcgttgggatctccatacgccggatctgctaaaatacgcttgatccatatgggcctcctcgaccacttgtgggacgacaccgtcgccggcccaaggccgaaaacggtctcggcaagctccgaaaacaccacaccttcactttccgacctagctccggcaaggaaacggagggcgggagcgtgagatcgtacggagacgaatcgtcggatgaagcgacgagagtgacgcgtagtatcatgat

SEQ ID NO: 16261 - DNA, 242 bp, Glycine max
  Clone ID: 700961848H1
gggaaggaagagtgggtgttggtggttgtcctcctccctcctcatgggtatggcaaccctctcctcctctcttcctcttttccatcgctaccctaaccctaaccctaatccttcgctctttcgcccctccctttccctctccttctccttctctcgcactaaaccccgtcgtgccccctttctcgttctcgcttcctcttcccacgatttcacctccaactccaagatatcagtgctcactg

SEQ ID NO: 16262 - DNA, 244 bp, Glycine max
  Clone ID: 700961849H1
gagactgtggaatacaagaacattagcttcactgtttgggatgttggtggccaggacaagattcgtcccttgtggaggcactacttccagaacactcagggtcttatttttgttgtagacagcaatgatagggacagagttgttgaggccagagatgagttacataggatgttgaatgaggatgaactgagagatgccgtattgcttgtgtttgcaaacaaacaagatcttcctaatgcaatga

SEQ ID NO: 16263 - DNA, 241 bp, Glycine max
  Clone ID: 700961850H1
ggaggagtaagtgtggtggaggttcagggctgaagaaattaccttgtctttcagctcttgtaccatttagctaagatatttggctcgaattctcttaaattcggttctgcctagtagtactgattatcttttaatttgtatttgtgttgtgtttgactcctcctcctcctccatcgtgctctcgggacatattcatggagcctgtgtgttttccgcacgccactttgatatgttatacggg

SEQ ID NO: 16264 - DNA, 94 bp, Glycine max
  Clone ID: 700961852H1
ctctcttttcgtgtgtttctcatcatcatatctcaattctcaacgagttttagattaagagatgaaaccactagcgacattagcagacgtatgg

SEQ ID NO: 16265 - DNA, 240 bp, Glycine max
  Clone ID: 700961854H1
gatgaggatgatgaggattttaacagtgatgatagcaatgatgaaggaatggaaataattgcaaaagaatatggagttaaaaggtatggttggcttgtttacatggataagaaggctaaggaggaagaaaaaaggcaaaaagagttgatcaaaggtgatcctgcaattaggaagctgagtcgtaaggaaagaaggaaggcttctcagattgaaagggagagagagagagaagccacacgg

SEQ ID NO: 16266 - DNA, 241 bp, Glycine max
  Clone ID: 700961856H1
ctgttctaaaaatttctgaagtgtttgtacctgtgtcccccttcactttctttcgaggttgcatttactttccctttcgacttcgaaacgatccaaaatactacaaagcaaagcaaccagctaaaaagcaatcacgcccgaaaacgaaagcatctccctctcccctaagcaaacaactgcccttaaccctcaaaaacaagccacccaaacccatccacttcaacccccccccccaaaatca

SEQ ID NO: 16267 - DNA, 238 bp, Glycine max
  Clone ID: 700961857H1
cgaggccttcacagagagaaagagaaaacatttcaaaaaaaataaaaaaaaataagcctctttctctctctgaatttctaagcctctctcacaacaatggaggagccacaaccaggacccagcccgttacgcaaaatgattttggtgtcatcaatggcggccggtatccaattcgggtgggccctacagctctcccttctcaccccatatgttcaaaccctaggcgtcccgcacgctt

SEQ ID NO: 16268 - DNA, 233 bp, Glycine max
  Clone ID: 700961858H1
agcttttcagaggaacaatggcgggtagggtttcgacgtgcttcttcttcgtgtttgctctttctctccttcttccttttcagatctccgctgaggaatcatcggagaaagagttcgtactcacattggatcactctaactttcaccacactgtcagcaagcacgatttcatcgtcgtcgagttctacgctccatggtgtgcccactgtaagaatcttgctcccgagtatgag

SEQ ID NO: 16269 - DNA, 236 bp, Glycine max
  Clone ID: 700961860H1
acacttctcacattgctgtcaagtttgctgaactcatgaccaagattgacaggcgatccggcaaagagcttgagaaggagcccaagtttttgaagaacggtgatgctggttttgttaagatgattccaaccaaacccatggttgttgaaactttctccgagtatcctccacttgataggtttgctgttagggacatgcgtcaaactgttgctgtgggagtcatcaagaacgttgag

SEQ ID NO: 16270 - DNA, 238 bp, Glycine max
  Clone ID: 700961861H1
ccttcagtctccaacatggaaaacatgatgaggccaaagcgccaagtttcaaacatggatgaggaaacgttgtacccatcaaagaaataccttagttcctcttgcaacttccctactaacatcagcaaccaatacgagaacccacaatgaggctacctcatgaagcagtctttgatgaatcagcggttaatgcttggtcctcatcttcaatttcaaggataatccaaaaatatcaaaa

SEQ ID NO: 16271 - DNA, 239 bp, Glycine max
  Clone ID: 700961863H1
agtgcctcagctgctctcactgtagacccttcactccacttgtcaagagcttctagcattgtgatgttgattgcatatgtagtctacattgtctttcaactgtggacacacaggcagttatttgaagccgaagatgagggtgaggatggtgaggacggtgaagaagaacaagctgtgattggattatggagtggcattgcttggttggtagggatgactgtgttcattgctgtgttgtc

SEQ ID NO: 16272 - DNA, 247 bp, Glycine max
  Clone ID: 700961864H1
ggtttcgaaaatgttctccggctcccagttcgacgccaccaccgccttctccggcggcggtttcatgtcttctcagccgtctaccctcaacgattcctctcccgcgccgtcaaaaagccgcgaaactcagggtttggtgccagtgacagtgaagcagataagcgaggcctctcaatccggtgatgaaaagtcgaatttcgtgatcaacggtgtagatctgaacaatgtaacactgcttgggatggtg

SEQ ID NO: 16273 - DNA, 245 bp, Glycine max
  Clone ID: 700961865H1
tcttagtacagcggaataacgaagccgcctcggtcttctacttacaaccttcctctcactcaaaccgtacggtcgtttcttcctctctcctcaaccggagacatcgtcgccttcttttctgaatctcgcggtgttgtaagttctgcggcggttgtagttccggcggcgatgggacagcaatcgttgatctacagcttcgtcgctcgcggcaccgtgatcctagcggcatacaccgagttcaccgg

SEQ ID NO: 16274 - DNA, 242 bp, Glycine max
  Clone ID: 700961866H1
atcatattcttcaaaaaagaaaaaacagtcttagaaatgacacgatccttggtaatggcttcttcatcaatgtcatgtccgaagctggggaattgtgcagtgtcacatacaaagttccaagcttttcatctctcttcaatgttctctccactggatcgaggccttttctcaccttggagtggtttaaagcatctgggtatctcagctaaaccaaaacctcttcttcacatagatagaaaggg

SEQ ID NO: 16275 - DNA, 234 bp, Glycine max
  Clone ID: 700961867H1
tgaagctgagtggactgaaatcggtggagaacgcgcacgatgattcggtgtgggcggtcacatgggtacccgcaaccgccaaccggccaccgctcctcctaaccggttccctcgacgagaccgtcaggctctggcgctccgacgacctcgttttggagctcaccaacaccggccactgcctcggcgtcgcctccgtcgccgttcaacccctcggctccgtcgtcgcctcctcct

SEQ ID NO: 16276 - DNA, 238 bp, Glycine max
  Clone ID: 700961869H1
tgtttataagtggattagatgacagagaaaagattctgttggaggagtacacatcagttttagtgaactataaggatgtcaggctgaagctcaatgatgtggaaaagaaaaaccgtgacagcatttttgagttgactcttcagctaagggaaatgaagaacgctctttccacaaaggataaagagatacaggttttacatcagaagctggacaatccagatgcaaatcctgatgaaag

SEQ ID NO: 16277 - DNA, 238 bp, Glycine max
  Clone ID: 700961870H1
gctttacttaattagcaaatccaaatatggcactttcttcttcatcatcttcaacatccatatttgctttagctttgttcactcttttgcttataggaagttcttcagctcaactctctgagaacttctatgatagtaaatgtcccaaggttttctatgccgtaaaatccgttcttcaatctgctttggctaaagaacctcgccagggagcatctatcgttcgcctcttctttcatga

SEQ ID NO: 16278 - DNA, 237 bp, Glycine max
  Clone ID: 700961871H1
cttacaagctgaaactaaacaagtttgctgacatgaccaaccatgcatttaggagtacctatgctggctcaaaggttaatcaccacagaatgttccaaggcacgccacgtgggaacgggaccttcatgtatgagaaggttggtagtgttcctccttctgtggattggaggaagaatggtgctgtcactggtgtaaaagatcaaggccaatgtggtaagctaaatgatcactagtccc

SEQ ID NO: 16279 - DNA, 242 bp, Glycine max
  Clone ID: 700961840H1
ttccaacttccaaatctccaatttatctatctagaaaacaacaatctctcgggtcgaatacccgataacatcggtaaccttacccgattagatgtactcagtttaactggtaaccggttcatcggacccgtaccgagttcaataaccaagttgactcagctcactcagctcaaactcggtaacaattttctcaccggaacagttccccaaggaattgccaagctcgttaatttaacctattt

SEQ ID NO: 16280 - DNA, 237 bp, Glycine max
  Clone ID: 700961872H1
atttcatcaagcctgccatggcttcctcgtgtgcttcctctgccattgcagctgttgccatctccacaccaagttcccagaagaatggatcactcttgggaagcacaaaagcttcttttcttagtgggaggaaactgaaggtgaacagttttacagcaccagttggagcacgatccagcactacagtgtgtgcagttgctgagcctgataggcctctgtggttcccaggcagcaccc

SEQ ID NO: 16281 - DNA, 235 bp, Glycine max
  Clone ID: 700961873H1
ctttcattggtgtggcctagctgttttctcaatgagaaagccttcatctctgcaaagcgcacttttgcgatttggggttcccttgttgcttgttatcaccttctgttatgctacttctactgctgcagcaacaactcaagtttcagggaatgaagagctgccaaagacaaacctaaatgaccatgatgaagaagcaaaattcggattttttcatcataaaccaatattcaagaaa

SEQ ID NO: 16282 - DNA, 244 bp, Glycine max
  Clone ID: 700961806H1
ccgaaccctcgatcactctcacgcgctcctatattcgctcctccaccgtcgctctctcgaacaaccacaacaccatcttcatcacatggcaaacgcagcatctggtatggcagtccatgatgactgcaagttgaggtttttggagctgaaggcaaaaaggacacaccgtttcatagtttttaagattgaggagcagcagaagcaggtcattgtggagaagcttggtgagcctgcccagggctat

SEQ ID NO: 16283 - DNA, 243 bp, Glycine max
  Clone ID: 700961807H1
gagaaatgtaagaaatatgggagagcaatgcgcattgggacaaaccatggaagtctttctgatcgtataatgagctactatggagattcacctaggggaatggtagaatctgcttttgaatttgcaaggatatgccgaaagttggactatcacaattttgttttttctatgaaagcaagcaacccggttatcatggttcaggcataccgcttacttgtggctgaaatgtatgtccaaggctgg

SEQ ID NO: 16284 - DNA, 245 bp, Glycine max
  Clone ID: 700961808H1
ttcgaatagattatcctaagtctttgggaatagtgctgcaatggcttcaagtcaggaggaggtgacccttttgggagctactggaagcccatttgtgtgcagggttcatattgccctcaagttgaagggagttcaatacaaatatgtcgaagaaaatttgaacaacaagagtgaactgcttctcaaatccaacccagttcacaagaaggttccagtgtttattcacaatgagaagcccatagcag

SEQ ID NO: 16285 - DNA, 245 bp, Glycine max
  Clone ID: 700961809H1
aatcaaagcactcccttctatctccctcttttcctctctgtctggtttgcattagtatacatacatataaatattcatgtatttgtataaggtcaatccccagaagaagctgaaggtccttttttttctgttggtttctttggttggatctagagaagacaatcttagttgtgaaactcagacacacatgttgggagtaattattttgttgtaaattctgagccttttgcaggagaggttaaact

SEQ ID NO: 16286 - DNA, 241 bp, Glycine max
  Clone ID: 700961810H1
ctccctcactcatccgttccgttggttcagaatattcatcaccatcgggcccaacaccaaaccccttcccctctcccccaaattagggtttctctctgggaatgtgattcagcgcgcggcagcatcaatggcggagaagagattcggcgtgatagggtacgctctggcgccgaagaagcagaacagcttcatccgcgactcgctggtgagcctagcgaaatcgcgagggattgagctcgtg

SEQ ID NO: 16287 - DNA, 245 bp, Glycine max
  Clone ID: 700961814H1
attttaatgggactttattatacaggtactttttgatagtaacctaactctcccactctccttttctcaagacgtgtgaccagaccccacccccctactcacacaaaggagaaaagattgaacactaacatcaaacaacaaacaaaaaagaccatggtaatggtaaaccctctaaattattggggaagacaaaagaatgagaaagaaagctgccctttctctcgctactcctcctaccccaaaca

SEQ ID NO: 16288 - DNA, 246 bp, Glycine max
  Clone ID: 700961815H1
gagtgatttcagtgagtgatcggtgttcacttgatctcatcataatcgtcagcgtcaattgaagaagatgccgatcagaaacatcgccgtcggaaggcctgaagaggcgactcaccccgacacgttgaaggcggctttggctgagttcatctcaaccttcatcttcgtgttcgccggctcaggctccggcatcgcctacaacaagctcaccgacaacggcgctgccacccctgccggcctcatctc

SEQ ID NO: 16289 - DNA, 250 bp, Glycine max
  Clone ID: 700961816H1
gcatagagtgagaagtgagaagagaaaaatggcaatctccatacccagtagacaacttttcatagatggagagtggaaagtccctcttctcaacaatcggtttccgatcatcaaccccgctactgaagacatcatagggcatattccagccgctactaaggaagatgttgaccttgcggtggatgctgctaaaagagccttttcccataacaaaggcaaagattggtcttcagctcctggctctgttcgt

SEQ ID NO: 16290 - DNA, 247 bp, Glycine max
  Clone ID: 700961818H1
gttttgaccaaggagaccaggcatggccgttctgcacacagaatgtcctccacctctttgcgcaagaaatctagccgaactcttgtctcaaaggttccatgtgccactctcagaaactttctttcaaatttgcaagaggttattcttggcaccaagctttccattctcatccctgctattccagctgccatcgttgctgagtgctttggctttggaagaccttggatttttatattaagcttacttg

SEQ ID NO: 16291 - DNA, 199 bp, Glycine max
  unsure (1)..(199): unsure at all n locations
  Clone ID: 700961819H1
ttcattattcattctcagcttcttttcttctggggggcaaaaggggtcacttttcagatccgagattgagctcctttacccatcatcatcatggagctcctcgggtacctgaatcagggtcacccttctagaggaacaacacttgttattactctttcattggtgctttcgacacttgtgtncttcaccacttccacac

SEQ ID NO: 16292 - DNA, 242 bp, Glycine max
  Clone ID: 700961822H1
acctggccatgtttttgaccagcttgtgtccattgggaaattaattactgattttcaggaggttgtggatgttcccaatgggagttccgcgatggatggtgaggaggggcttgatgatgatgttggtgttgctgttgagtttgaggagaatgaggatgatgatgaggagagtgatttggatattgtgcaggatgaggaggaagatgatgaggatgtcgcggagccaaatggttccggggcta

SEQ ID NO: 16293 - DNA, 243 bp, Glycine max
  Clone ID: 700961823H1
gttatataccttcttcttcttcgaccttcgatttgggcccaacacaaacgcaccattggctccgatcactgcgcgacccaattccatggcggctggccctccaacaacatcaccctccgatcgacccaccatggtccctcccccaatgctcgtctccgactccttcgccaaggacgccatcctcgcctggttccgcggcgagttcgctgccgccaacgccatcatcgacgccctctgcgccca

SEQ ID NO: 16294 - DNA, 239 bp, Glycine max
  Clone ID: 700961824H1
ggcaggtttgtcattggagggccgcatggcgatgctggtctcaccggccgcaagatcatcatcgacacctatggaggatggggtgcacatggtggtggtgccttctctgggaaggatcctaccaaggttgataggagtggtgcctacattgtgaggcaagctgcaaagagcattgttgcaaatggacttgctaggagggcaattgtgcaagtttcctatgccattggtgtgcctgagcc

SEQ ID NO: 16295 - DNA, 241 bp, Glycine max
  Clone ID: 700961825H1
aaagtcactggttgctgctctaatacctctacagaaggattctgaggttccttctcatgtgttgatgggtatcccagatggtacagctgcttttcccctttcacctcttggagaagcttgtctacgaatggatctgactgccctgcatgaggtgatggagaaaattgggtataaagacgacgagggcgcacaactgagctttcattccaaatgtggacgaaccagatgcaggaaacgttga

SEQ ID NO: 16296 - DNA, 238 bp, Glycine max
  Clone ID: 700961826H1
caaatagtaatttgaatctatgatagcccacatgttacattgggtgcatccagacccaaaagcctttaaataaattgggcccagttgcataaaatctgatgttggcccggcaaatgttagcccactggtcagcaactgtaagattatttatgttattgcttttgagactatgtaatcatgaataaaaagtttggataaataactaaaaaaaaaaaaaaacaaaaaaaaaaagaaagag

SEQ ID NO: 16297 - DNA, 208 bp, Glycine max
  Clone ID: 700961827H1
atttgacaaaaaagtagccaatgccccaacgatcccatgtcccttgacttctctacgtgaagctccttgtgttgcataggagctagttgaaatgtccgagggaaatgcagtgaaaggaaagaaaatcgccatcattggtgtctcaaccttattgttggtggctatggttgtggcggtcacaattggggtcaagctcaatgacaatggg

SEQ ID NO: 16298 - DNA, 150 bp, Glycine max
  Clone ID: 700961829H1
tcaaaattgcattgcaatttgtaggagagaaacagagatgtttggtaggggaatggtgtggtcagtgtggaagcgcggcaaagaagcatgcaaaattcacaagctatgcctaagaggaacgcctttctcttcttcttccacacaacatac

SEQ ID NO: 16299 - DNA, 243 bp, Glycine max
  Clone ID: 700961830H1
atgaagatgaaggcgaagaagcatgcccacgctgaagaggagggagttgctccgcttccttcaccaacactatccgattccgactctgattacgaggactcttcagccgatgatcaccacgaatcttctgtctcgctggattctcaatcccaatcggaattagaagacgcttcacctgaaaatggtagctccggcgttgtagaatctgcagaaaatgaatcatctcaatacgaggacactgtt

SEQ ID NO: 16300 - DNA, 245 bp, Glycine max
  Clone ID: 700961831H1
gcaggaccagagaagcaccaagcagtggcactgagatcagactcagacctctctgtgttcttccgatgtgggatctttggttaccaagacagcctctacactcacaccatgcgccaattctacagagagtgcaaaatcagtggcacagtggacttcatcttcggtgatgccacagcaattttccaaaactgccacatctcagccaaaaaagggttaccaaatcaaaagaacacaatcacagcaca

SEQ ID NO: 16301 - DNA, 247 bp, Glycine max
  Clone ID: 700961832H1
cttcttcttctttcggatttcgttctctttctcttccttccttctccttctctcagagaacaacacctctctctctcaccgcctccttctcctctcacaccgccatgggcgagacttccgctcccgccgccgatgccggaatggacgccgtccagcgccgtctcatgttcgaagacgaatgcattttggtggacgagaatgaccgtgtggttggtcatgattccaaatacaattgtcacttgatgga

SEQ ID NO: 16302 - DNA, 256 bp, Glycine max
  Clone ID: 700961833H1
cttctttctgtttatcaatttccaaatcacgaaactcaagaagaccggagaagagggattcaatagaccagtaagagttgggcctcatcatctcaacccttcatcatccagccagccgaacgaatcatcctccctccatgcttcagcatgtgtggcgggggatagcgctgcttatcaaaggacatcgacattcggggacgatgttgtgatcgtggctgcttatcggactgctcattgcaaagctaaacgaggtggt

SEQ ID NO: 16303 - DNA, 243 bp, Glycine max
  Clone ID: 700961835H1
gagtttcacagagaaacatgccgcaagatcaaagcactccaccaatatgattgcttgcgagccaataaatcaacatttgcttggggtctagaagcccgtgtaccatttttggacaaggcatttatcaatactgcaatgagtattgaccctgagtcgaaaatgataaaaagagatgaaggacgaattgagaagtggattctgaggagagactttgatgatgaagagcatccttatctgccaaag

SEQ ID NO: 16304 - DNA, 240 bp, Glycine max
  Clone ID: 700961836H1
ctcttcctcaccgattgctagaatggaatttcgatgctcagtcatctcttttaccattctcttctctcttgctcttgcaggagagagccatgtccatgcatcgctacctgaggaagattattgggaagctgtttggccaaacactcccattcccactgcactgcgagagcttctaaagcctctccctgcaggtgttgacatcgatgaactccctaagcaaattgatgatacacagtaccc

SEQ ID NO: 16305 - DNA, 238 bp, Glycine max
  Clone ID: 700961837H1
caattctgaattgtcaaattcacccgctaccttttcccgtgtacgaacgaatccaatccaccaaatcggcggcgacgctccgctctgtctcgaaaccacagatctgcagcggaaccgcgtctccgactatctccgattgatcttccggtaaagtggaccggagatgccggttgccgcttccgccatttacttcctcaacctccgcggcgacgttctcatcaaccgcctctatcgcgac

SEQ ID NO: 16306 - DNA, 241 bp, Glycine max
  Clone ID: 700961838H1
acaattactactttctctctctttgtaacttgtaagcatgagtcctcaaagatctatgcttacctcttcctttgcatgctcttcctctcctccgccactcccattctcggttgtggctactgtggcaaaccccccaaaaagcacaagcctggtaaaacaccaaagacacccacagtacccgttgttaagccaccagtcacaatccctcccattgttaagccaccagtcacaatccctccca

SEQ ID NO: 16307 - DNA, 238 bp, Glycine max
  Clone ID: 700961839H1
ctttgtttcccagagatcctgccaagaaagagttcggagagcaattgatatcccatgttgatacattcagcagagacctgttcgtttcattgaaaggggatgctgtacagcaagccagtcccgcttttgaatacttggagaatgctcttggtaaatttgatgatgggccattcttgcttggtcaattcagtttggtggatattgcctatattccatttgctgaaagattccaaattgt

SEQ ID NO: 16308 - DNA, 236 bp, Glycine max
  Clone ID: 700961804H1
tagatcacaagttagagatgaatcatcttttttcatttagcatataatataaggttttttgtactaaaagatggagttcattttttaccttaaggccttttaaacttgtagtacttctggacgaaccaaattatgcctgtttgaataacgaaaaaaaaaaaaaaaaaaaaaaaaaaaaaaaaaggggggcccccagattttgaaccacttcacccgggaaataaattcggggcggt

SEQ ID NO: 16309 - DNA, 240 bp, Glycine max
  Clone ID: 700961762H1
tctcattctgtgactctgtgcttagttaacgttaacagtgacttaagatggcggattctgcagatgtcacccacgatgttgtgtccctcctctcttctcctcaaagggactttcttcttcgaaacaacggcgatccggttaaaattgacagcttgaagggtaagaaacttggtttgtatttttcggcatcctggtgtggtccatgtcaaacatttacgccaactttggtcgatgtgtaca

SEQ ID NO: 16310 - DNA, 241 bp, Glycine max
  Clone ID: 700961763H1
atgtggtgcattagaccttagtctttgtcatagtttcttccacaacaacttggtcagaactttccaaaaattgacataagggcaatagttctctccctagaaagtgatatgctatataagccgtcctttggagcaatatatccatcctcttcagtttagcagaaggtgtcgtgtattagaccatagtctttgtcattgttgtttcgcaacatcaaagtttagcctttgagcatcagcaatc

SEQ ID NO: 16311 - DNA, 254 bp, Glycine max
  Clone ID: 700961765H1
cttgacaatttgcgccactacgcaccagagaaggcttctaagaactcaagggatggccaagacaataattgatgctgttttgggcctcactcttgatgattctcccagcaatcttgcagctgcaacccttttgtacgtgttgaccagtgatggccaagatgatcacctccttgaatcacctggttctgttcaatttctgatgaagttgttaaaaccaattgtctccacagctattaaagacgaagcaccaaaat

SEQ ID NO: 16312 - DNA, 257 bp, Glycine max
  Clone ID: 700961766H1
cgacgtatcttacaccataaccttcgagagccaaaagaagaagggttgcgtcttacgtaaacaatcaaagctaacaagaaaagtcctaaccggagtaaccggagtagtgaaccccggagagttaacggcaatgctgggtccctccggcagcggcaagacgaccctcttgaccgccctggccggaagactcgccggaaaagtctccggcaccataacctacaacggccaaaccgaccccaccttcgtgaaacgcaagg

SEQ ID NO: 16313 - DNA, 247 bp, Glycine max
  Clone ID: 700961768H1
ctttcaggaaaatatatttgaatggcaatttgctataagggggcgtcgtgatactgaatttgaaggtggtatttatcacggacggattcagctgccttcagaatatcccttcaaacctccttcgtttatgttgctcacacctagtggccgttttgagacccaaaccaagatttgcttgagcatatcaaatcatcaccctgagcattggcaaccatcatggagcgtaaggactgctttagtcgcactg

SEQ ID NO: 16314 - DNA, 241 bp, Glycine max
  Clone ID: 700961772H1
ccagaacatggccccctccccattcggttttctttgcttgaacctgttggtttcatggtgtttgtttgggctgttgcagcaatgattgttattggtgcaccattttctcgtttggtgagtgccattcttttattttggggtatttggctgcttgtcagatcttctcaatcactcatgacactatgccttccaatattgggaatccttctgatggtgtggcatctctgctcaaggaaaagca

SEQ ID NO: 16315 - DNA, 226 bp, Glycine max
  Clone ID: 700961773H1
gatcggcttctgcttgtgtgtgattcagaattggcaagatcatatctggtctcagagatgcagaagtcgtgcactctggtggtccagctcgacaatggcacgccggcgctgtccaatgagatcaatgatgccctggaaggaaacgacgtcgctgcgaatatctacgcgctcaagaaggccatcatgatcctcctgatcggcgataccattccgcagcgcttcatca

SEQ ID NO: 16316 - DNA, 243 bp, Glycine max
  Clone ID: 700961774H1
tgagtgcttaaaagggttcacgccaaagtctccagagaaatggaactcaatggttaggacacaaggatgtggccttaagagtccattgacttgtaagtctgatggatttgctcaggttgatggtttgaaagtgccagatactacaaatacgtctgtgtatgagagtattgatcttgagaaatgcagaaccaagtgcttgagagattgttcctgcatggcatataccaattctaatataagtgg

SEQ ID NO: 16317 - DNA, 242 bp, Glycine max
  Clone ID: 700961775H1
gtgagctataagctagtttatcgtgaggagaatatgaagttgtttgttgtcgttgttgctgcagtagttttggtagcatggccatgccatggcgcaggctaccaaaggttccctctccgaatgaaaactggctatggtgagcgttcttcggaggtaaaatgcgcaagttttaggcttgctgtggaagcacacaacatccgagcgtttaaaaccattcctgaagagtgcgttgaaccaacaaa

SEQ ID NO: 16318 - DNA, 169 bp, Glycine max
  Clone ID: 700961776H1
attttaaggagtatcaaaaccgattgatgtgcgtcaattggagcttcagaggctacgaatttggtgaaacaagcactagtgctcatcactgtagggggcaatgattttgtaaacaactacttcttggtgcccaattcagcaaggtcccgccagtacccactacctcaat

SEQ ID NO: 16319 - DNA, 240 bp, Glycine max
  Clone ID: 700961779H1
gagtaccattgctccactgtcgccggccaccatgtctttctcggagttccgaccactcgacgacacgtccctcatcgaatacataaagtccgtccccgccctctcctccaaactcgccgacaacctcgacgacttatcagtcaaagaagtcggagatggcaatcttaacttcgtcttcattgtttccaaccccgcaggttcttttgtcatcaaacaggctctgccgtacgttcgttgcat

SEQ ID NO: 16320 - DNA, 241 bp, Glycine max
  Clone ID: 700961780H1
ttccccctgtggtgttctcgtgttgctggtaacaatatggttgttgacgctttgaatgaggatttgagaatcaacggagcagttgaaccgttgcctgaggactttgatgcaacagctgtaatcatagatcccgtgcctttggcagttgtagacaatggcattgtcaaggaggaggcgcagatcattaaaggaaaagagaaaagagaaatagtactgggaagaaatattcatacctcgtgtc

SEQ ID NO: 16321 - DNA, 287 bp, Glycine max
  Clone ID: 700961781H1
acgcacgcacgcgaacgcgagtccaggattcgcagagggcgtttcgtgatgatgcgtggaggaacattgtgcctggccttcctgctgttattctcaggtgtacgtgtaggctcgccaacgctgtctctgctggcaccattctcgcttctagacaggtgagaaggaagcttgtagaagattggttgccggttttggttgtatgcaaacataatgtttcaccaatatcacccagcaacaaatcgttgtatctggaactggaagaaacattcttgcgaatcatctccaca

SEQ ID NO: 16322 - DNA, 226 bp, Glycine max
  Clone ID: 700961782H1
cttcattcttctcctaaatcctaatccttcttcactttcagttctcagcatgggaagttctggaacaaccgactatggagcatacacataccaaaaccttgagagggaaccttactggccctctgaaaagctcagaatttccatcactggggctggtggtttcattgcctcacacattgctcgccgcctcaagaccgagggatattacatcattgcttcttattgg

SEQ ID NO: 16323 - DNA, 246 bp, Glycine max
  Clone ID: 700961783H1
cgagaagcccatgtatgaacaaggtttaattttacttccccatctagctactctaggttggggggtaggtcctgggggggaagttatagacacctttccatactttgtgtctggagtacttcacttaatttcctctgcagtattgggctttggcggtatttatcatgcacttttgggacctgagactcttgaagaatcttttccattcttcggttatgtatggaaagatagaaataaaatgactac

SEQ ID NO: 16324 - DNA, 245 bp, Glycine max
  Clone ID: 700961784H1
gaaaaaggtacattccaattgaggagatcccacttcactatggtggtttcaagagggaaaatgattctgagttctcttcccaagatggtgctgtttcagaactcattctcaaggctggatcaactgcaaccattgaggttcctgcattggaggtgccaactaatttcttagatgtttttggtgtagttctctgaccaaaattggagttttacagtgataataacatttaatgctgcagacctttc

SEQ ID NO: 16325 - DNA, 245 bp, Glycine max
  Clone ID: 700961786H1
aagcacctctctctcccctctcttttcctcaaaccaataaagcgaatcaccccccacaccacacttcactctctcttcccaaaacaaaacaaaaaatggctgaaactctaaacctcccattgctactctcagtctgcatcatcttcacaaccctctctcttacaacctctcgcacgatcacaaccccatcacacaccaatgttctcgatgtctcttcttctctgcaccaagcccaccaaatcctc

SEQ ID NO: 16326 - DNA, 238 bp, Glycine max
  Clone ID: 700961787H1
aactgaggttgtgatgattgtatgtcactcgtatagctgtaagctgtgtcattgtccagtgagatattctttgggaattaattaatttcagataaattctttgatcttgggggaattctgtatataatttagagctggactttcattcaaggggagcaacatctctactgattaggactgaaactgctgttttgagaacgggcttgccttcatgaaatgtgtttatttagtattaggg

SEQ ID NO: 16327 - DNA, 243 bp, Glycine max
  Clone ID: 700961789H1
caagattgtagtgattcagaatctcagagaactgctccaagggcatcatcatcttcaggcaaaagagattgttgtgactctgcttcttccgtgtcaagagaaggttggcatggaaaacactctaaaggaagtgcggattcacttcgtgctctccgcttgacaaccaagctccgtgacttacataaacttgccaaggttgattcagaatcccataaagaatttgaacactggaatgaaatgctt

SEQ ID NO: 16328 - DNA, 238 bp, Glycine max
  Clone ID: 700961792H1
cagggaaacattgatccatatagcatttatacaccagtatgcaatgatatagcagcaatcaaacgccgtttggggggtcgctatccatggttgtctcgagcatatgatccctgtactgagaggtactctaccttgtatttcaatcgtccagaagttcagaaggcacttcatgccaatgtaactgggattccttattcatgggcaggatgcaatgatggtaatgtggaaaattggggtg

SEQ ID NO: 16329 - DNA, 239 bp, Glycine max
  Clone ID: 700961794H1
gctacaagcccaacaaacttggttttaattggtataggcgtgccaaggtcttgttaattttgagcgttaagtgctgcaactaatcagatcccaagaccttggcctaccttgccatacagaaaaaaaaaaagcaaaaaaaaagccaaggtttggagccaacaaaaataaacacaaagcacaagtcatggaaagaataatggttggaagtgcaacaaaggttgctttcaccctcttggcca

SEQ ID NO: 16330 - DNA, 238 bp, Glycine max
  Clone ID: 700961795H1
attgaattggagcggacgacagagcatagagagaaaaaagtttattacagtggtgcgaaagaaaaagggggcacaaatataaagttccaaacaatcgccaccccaaaccaaagcactgtttctttcgctgtgcggattttccctcaaaatggcaattgctcgctagtcgccagcaaggacacacaaaaacaaacagaagaaaagaaaaagaaaatgcaaaacgagagtgtgaatgtga

SEQ ID NO: 16331 - DNA, 221 bp, Glycine max
  Clone ID: 700961796H1
tttgtttagtttttggatctcatttgcaaagtttaggactttattctcaagagcttttggttatggtcacaaagttgtgaagggtgattgcaatgcttggatctttgtttccttcaatggtttggtcacagttagttcttccatattctccctctgggccttttcttgggcttatttatgtgctccccccagttatcaatcattggggcggagtcatgccc

SEQ ID NO: 16332 - DNA, 253 bp, Glycine max
  Clone ID: 700961801H1
gggagagggatgtgaaaaatgagtttgtaagaaagaaaagaaggaacgtaagaagggaaattcaattcccttcttgttgttcccctagcacggccaattgatcttgcggtgaggggcaataattaaaacacatgaagcaaaaatcttaactcaatacaacgcaacacatgcatgtgagtttttgccaacaaacgtgatcattgccgcaacaacgaagactcaatattatcataggccattatgttcaccaaca

SEQ ID NO: 16333 - DNA, 248 bp, Glycine max
  Clone ID: 700961803H1
acttgaaagtcgaaattctctgttatgttgtcttggaacctacctctaaaacttctcttctttgtcccaaacaaacttcgttagtcattacaaatacattccctttctctctctcttctccaatttcaatgagatgagcaacaacaacagcaacagcatcctcgtcctcctcaacctgtaccttattattcacacactcttgtcacgcgcgcattagtgtctcaaatctcaattccgtttccccttcc

SEQ ID NO: 16334 - DNA, 242 bp, Glycine max
  Clone ID: 700961761H1
ccaccttctcctttctccttcttcctcctcctttctgcttcttcattctctccttgcctcttgagcttttctttttagcacggaacatgtgagtgccacaaagggtttgagactttttgaggctttctctcactctaataagtcctaacctcattcacctcttgggtggtgtggtctataatgtaatttatcatttgtgcaaattttttctcagatctatccaacttctcttttttgtcctt

SEQ ID NO: 16335 - DNA, 248 bp, Glycine max
  Clone ID: 700961732H1
cgccgccgtcgggatgctgcaacggagtgaagagcctcaatgccgccgccaagaccaccgccgaccgccagacggcgtgcaactgcctcaagtcggccgccagccaaatctccggcttcaaagccaacaacgccgcctcgctccccggcaaatgcggagtctccatcccctacaagatcagcacctccaccaactgcgctaccatcaaggtttgaagagaaagtcatggacgcaggaaaccggaaact

SEQ ID NO: 16336 - DNA, 261 bp, Glycine max
  Clone ID: 700961733H1
attgaatctcagaattctctaaaagagatctttttctgctctttgaagaaagaagggtctttgcttgattttggagatgtctctgctctcagatctcatcaaccttaacctctccgataccaccgagaaggtgatcgcagagtacatatggatcggtggatcaggaatggacctgaggagcaaagcaaggactctcccaggaccagttagcgacccttcagagcttcccaagtggaactatgatggttccagcacaggtcg

SEQ ID NO: 16337 - DNA, 253 bp, Glycine max
  Clone ID: 700961734H1
ctctttcttttcttctcgcagagcgaaatcccaatcccacacaaatggcatgctcagccacctctgcttctctcttctccgcaaaccccacacctctcttctctcccaaatcctccctctccctccctaacaactctctccacctcaaccctctccccacgcgcccttctctctccctcacgcgcccctcgcacactcgccgctccttcgtcgtcaaagcctcctccagcgagcttccgctagttggaaacac

SEQ ID NO: 16338 - DNA, 245 bp, Glycine max
  Clone ID: 700961735H1
ccgaaacgcagcgtctcatgcacgagcgcaaattgggaaaacctgtgtttcccaaggcaatcggcgaactccacggccattccggcatcgcgaggttgatgctgttctacgcaagaggcttgtgcggcatcgtcgaccaccgcagaggcgccggcgcagcagacgccggcctcgtcttcttcaacggaaaactcctcgccatgtcggaggatgatttcccctacgaactccgaatcaccgcctcc

SEQ ID NO: 16339 - DNA, 252 bp, Glycine max
  Clone ID: 700961736H1
ctaagagtttcaattccaaacatgaggtttctaagagccagaacactgctatggtttcagtttctaggccatcaacatcaccacttggtgtgaatgtgagaagccaatcaggattcagcttcatggggtcatcagagctagatgggatcacacaaggaagtcccaagaaaccaaggaaccatgagatgatgcattccccaaatagtgtcccttcaatgagcatggatgtgaagcccaatgatgaaaacaatg

SEQ ID NO: 16340 - DNA, 251 bp, Glycine max
  Clone ID: 700961737H1
cagcttcaccttcaccttcaccttccgaattgtatcaaacctcaaaaaatggatcatcaaaacaaacacgtagcagtctttgctttcccctttggcagccaccttatgcctctcttaaaccttgtcctcaaactagctcattcccttccagactgttcattctctttcattggcacacacaaatccaatgcaatccttttcccaaaaccccacatcccagataacatcaaggcctatagcataagtgatgg

SEQ ID NO: 16341 - DNA, 248 bp, Glycine max
  Clone ID: 700961738H1
ctttcttttctttgccaacactccttcgattaggggtttcgatgccaaattacaaattggtcgccatgaacgcaacctcatactctgctcttccttctacgttccgcagtctccatcatcggaatttctcagcgttttgttctgatatccaaaatcctggctatgttgattgccattcaaattgtaataagtctacatctcaagcgtctttgtttttgtgttccgactccaacagtagaagaaatggt

SEQ ID NO: 16342 - DNA, 248 bp, Glycine max
  Clone ID: 700961739H1
gtgcaaatagcgcgttgcatctgctcccaatcattcatattttcgccaaacagccgattccgttaagtgtttctaccgtagcgctcaggaaggaggcattggctggtggtgttggttgtggtggaggtggttttgccgatcagttgtggtagagggtaggaaagaaaaaaaaagtggaaaatgagttcagacagccgcagcaggagcaggagcagaagcaggagcccaatggaccgtaagatccgctc

SEQ ID NO: 16343 - DNA, 177 bp, Glycine max
  Clone ID: 700961740H1
ctttcaagtagtaccaattgggcactttgtttagtgtcttcatgttttttttcatcctcatcaaattaaccccctaaacatcatttagctagctagccaaattaattattaattaggcaaataatgggaaacccagaatccaatttgccacccggttttaggttccacacaacatac

SEQ ID NO: 16344 - DNA, 250 bp, Glycine max
  Clone ID: 700961741H1
ctctgatctcactcaccattcaccaacctgcttctctgttctcttctttcccttcccaagaagaagaagaagaagatgccttcttcagaatcatcaacaggcttctccgaaaccatttgtgtgaccggcgctggtggcttcatcgcctcttggatggtcaaactcctcttggagaaaggctacactgtccgaggaaccctcagaaacccagatgatcccaagaacgggcacttaaaagagtttgaaggag

SEQ ID NO: 16345 - DNA, 247 bp, Glycine max
  Clone ID: 700961742H1
cgctgatgtcgctggtgttgacgaggctaaggacgagctggaagagattgtggaatttcttcgcaatccagacagatatgtacgactaggagctcggcctccccgaggtgttctcttggtgggtcttcctgggacaggtaagactttactggcaaaggctgtggcaggggaagctgatgtgccatttataagttgttctgctagtgagtttgtagagttatatgttggtatgggtgcttcccgtgtg

SEQ ID NO: 16346 - DNA, 245 bp, Glycine max
  Clone ID: 700961743H1
caaaaagaaggttcgtttgggggttcctgctacacaatggatttcagtttacaatgcaagactgccaatgaagcaaaggtatcattacaatgtagcggatgcaagattagcgcaacatgtggagagagggattgcagatggccttctaattagttgtgtggcttcttgttccaatctctgggcccttattatggatgctggaactggcttttcaagtcaagtttataagttgtcaccatttttct

SEQ ID NO: 16347 - DNA, 239 bp, Glycine max
  Clone ID: 700961744H1
gggtagacataaggttatgtaggttggtccttgtttgctttcaaaagtgtgtttatttctgttcatggttggagtttagaagcggtgctgaaacctatgttcttgttgttgatggctgcatacgattgattttctggtttttgaattagatttagaggttttctgcttatctatattttccaggggaaatttgtcagctgaatggtatatgaatatgtagtttagtttagttggtgtgg

SEQ ID NO: 16348 - DNA, 245 bp, Glycine max
  Clone ID: 700961746H1
gtttcaacttcactcagatccattcaggggagaactaatggaagttcttgaaccttttatgaaaagtccttctcccaactatttcccttcctccccctccctccctaatctttactcaaacgggttatccagcaacacccaaagcttaattggcttcgggcaagcgcaacccacatctcttgtgggcctgaaccacctaaccccatctcagatctctcagatccaatcccaaatccatatccagg

SEQ ID NO: 16349 - DNA, 244 bp, Glycine max
  Clone ID: 700961747H1
aaattctcgacgaagcaaccctgaccataaccacactctctcaagtcccaagaaagaaccctctcacctagctagctatcaaactaccgattcatagcactcttctcttcctcacttatgcgaaacgccaacatggttctcgttctccttttccttatggcaatcttctccgccatgaccactccgtcaacctccgcgatcgacaccttcatcttcggcggctgctcccaggccaagttcacgc

SEQ ID NO: 16350 - DNA, 280 bp, Glycine max
  Clone ID: 700961748H1
gtcgcgtgtacgcgtactcgggatccagttctatcctgtctttcgagatccagacctcttcccaatgatgaacctctgtttcttcttcttctacttcttcaccttcttcgccgccgtcagatctgatccctcagatcaccgctacaaagaaggcgaccccgtccctctctacgccaacaaagttggccccttccacaaccctaccgaatgctaccgttacttcgacctgcccttttgtgaaccaggtgatttgaaagagaagaaggaggcgctcggggag

SEQ ID NO: 16351 - DNA, 264 bp, Glycine max
  Clone ID: 700961749H1
gatttggatcgagctttctccctcagaagcgaagaagaagccacagagaactagtctcgtactctcacccgcaagaaaaaaatggcatctcacatcgttggatacccccgtatgggtcccaagagagagctcaagttcgctctcgagtctttctgggatggcaagagcagcgccgaggatttgcagaaggtgtcttctgatctcagggcatccatctggaagcagatggctgatgctgggatcaagtacatccccagcaacact

SEQ ID NO: 16352 - DNA, 247 bp, Glycine max
  Clone ID: 700961750H1
gatttgttcattctttgttcactatgtttgtagtggaatccatacggctttgtagtgttgttaattcagataaagtttgcattgctatgctcctttccaatagtgtgatattgagaagtccttagtatcattgatttttgtagtttttctctaatatgaactcatttggacataggtctagatgcttcccatgtgtgctttgttgcctgattttgttggttgtaagatgttgcatctaaaattcatg

SEQ ID NO: 16353 - DNA, 251 bp, Glycine max
  Clone ID: 700961751H1
actttaccaactcctaacaatttctctctgtttccttcttcaccgcatcaatggagttggacggcgttctcctcggcatgtgcaaccctctcctcgacatctctgccgtcgtcgacgacgctttcttgcaaaaatacggtatcaagttgaacgatgcgattctcgctgaggataagcacaaacctatgtatgaagaattggctaacaatcctaatgtggagtacattgctggaggtgctactcagaattca

SEQ ID NO: 16354 - DNA, 249 bp, Glycine max
  Clone ID: 700961752H1
atcctaccttcgtgacacacttctgataaggttaattttcagttttggttttttgggcggctccaatggcaacctctcaaatcactgcatcattgaggaacttgcctgcatttgaaaggtttcaaccttcagcgcttcgattttgctctgctgggcacgtcagaattggaacactcacgcaaccctcgtttccctctttcgttgtcaaagccgccactgttgttgcccccaagcacaccactgttaagc

SEQ ID NO: 16355 - DNA, 247 bp, Glycine max
  Clone ID: 700961753H1
attgctgtcttgtctgaagttagttcagcaatttttgctgaagttatgcaaggaaagcctgaattcactgaccatttgactcataaactaaagcaccaccctggtcagattgaagctgctgctattatggaacacattttggaaggaactcctattggagtctccatggataatacacgtttggctcttgcttcaattggtaaactcatgtttgctcaattctctgagcttgtcaatgattattaca

SEQ ID NO: 16356 - DNA, 245 bp, Glycine max
  Clone ID: 700961754H1
gtcagctcaggagtttataatctgagagatgtcagatcttgaggctcccttgcgtcctaagacgtacaaggtttgggtggactatgtcgttcagtttcgatctatccttgttatggacgtggtcgttcccatctccttcgccatttgtttccgtgcgtacgttgggggtgtaagatctgagcggaggtcctatgatgctcgtcggatcgaacatgatgatagtgtgatgagggctatcgaacgcc

SEQ ID NO: 16357 - DNA, 241 bp, Glycine max
  Clone ID: 700961756H1
agagcgcggtgacagtgaagctttggctccctctcttcctttctctccaagctggaactcatggccgattcatcagatgtgtgtcccgctgaggatgctcttaaggcattcctagagtacttggttgatccagtgctgccagctagaccttctatacgagataattccccttcaccatctcaacaccagttagttgccaaacaggtatgtatgctcattcttctcttttattcttgtacaa

SEQ ID NO: 16358 - DNA, 246 bp, Glycine max
  Clone ID: 700961757H1
tctttgcgcagttccctacctctcctttcaagatgcagatcttcgtcaagaccctcaccggaaagaccatcacccttgaggtggaaagctctgacaccatcgacaacgtcaaggccaagatccaggacaaggaacgaattcccccggatcagcaacgtctcatcttcgccggaaagcagctcgaggacggccgtaccctcgccgactacaacatccagaaggagtcaacccttcaccttgtccttc

SEQ ID NO: 16359 - DNA, 241 bp, Glycine max
  Clone ID: 700961759H1
ctcgagccgctcgagccgcatttttggatccaccaacatttggatcgatcatgtttccctatctaactgagccgatggtcttatcgatatcatccaaggctccactgccatcaccatctcaaattgccacatgaccaaacataatgatgtgtttctctttggtgctagtgactcatacaacggagacaagatcatgcagatcacagtggcattcaaccacttcgggcaacgactggtccag

SEQ ID NO: 16360 - DNA, 247 bp, Glycine max
  Clone ID: 700961731H1
gtgtcgagccgattcggctcagcttacagaattcagcataagtaggatgcaatttcgggaatgcccaccaacttatatagaccatatgacaattttcatcccgagaattcgcatgtgttacctgctctcatgagaaggtttcatgaggcaaaggtcaatggtgctaaggaggtggttgtgtggggcaccggaagtccattgagggagttcttgcacgttgacgatttggcagacgcggttgtcttca

SEQ ID NO: 16361 - DNA, 259 bp, Glycine max
  Clone ID: 700961694H1
gagattgctaggatgctggctgatgagttcaggaagcgtgttgtaatagtggatacatctaatgaaattggaggtgatggagatgttcctcatgcaggaataggcagggccaggaggatgcaagttccaaatgtgaatatgcagcataatgttatgattgaagcagttgaaaatcacatgcctgaaaccattattattgatgaaattggaacggagcttgaggcattggcagccagtactattgctcaaagaggcattc

SEQ ID NO: 16362 - DNA, 264 bp, Glycine max
  Clone ID: 700961695H1
cacaatcaaagctatggagcctttcttcactgtagttctttctgcccttttactgggtgagatgcctactttctgggtggtttcttcccttgtaccagtagtaggtggagtggcactggcatcaatgactgaagtctctttcaattggattggattcactactgctatggcatctaacgttactaatcaatcgcggaacgttttgagcaaaaaactgatgactaatgaagaggcaactttggacaatatcaatctctactcagt

SEQ ID NO: 16363 - DNA, 265 bp, Glycine max
  unsure (1)..(265): unsure at all n locations
  Clone ID: 700961696H1
cggaggggaagaaagaagagttgctatggaagagatcaacaagaacccatcagggacttctcttttggtaccatcagtgctagagttggctaaagagaatttgactactgttccacaaagatacattgtcactcaacatcaagacatggtgctcatctctgaagaagatcatagtacccttgagattccagttattgacatgcacagattgcttcgaaaanccctgggagttcagaattggataagcttcacctggcgtgcaaag

SEQ ID NO: 16364 - DNA, 265 bp, Glycine max
  Clone ID: 700961701H1
gaagaagaagaagaagaagaagaagaagaatcaaatatccttgagccagacatgtacaggaacgctgcttcacgtcttagggtcatcagtgcccgttcgtgcagcagcagcaggatacctgccagtgccagatttgcaagttccgttgccacacaacaatcctcttctggtttgggtggtttatttggatggctcactggagaccgatccagttctttaccatctctggatttcccgcttccgggcgttacacttcccccttcat

SEQ ID NO: 16365 - DNA, 255 bp, Glycine max
  Clone ID: 700961702H1
cccactcaagtgttgtaggctcttcgtggtttgcttttgggcccggcccgatacggcttgtttttattatgtatctcacttattcactttgctgtttttattccgtaggctgaagttcaggagaaaactttatatatggaataataacaataattgtacatagaaaaagataatggtcgcatctgtatgtatgtatcataatggctttgaatctgaattatccaaaaaaaaaaaaaaaaaaaaaaaaaaaaagaa

SEQ ID NO: 16366 - DNA, 256 bp, Glycine max
  Clone ID: 700961705H1
gtttccatttgattaagagaacaaaagaaaacaagagaagagattataggaacaaaagcaattaatggacacattgagggtgcaaagcttagcttctcagtcgaaggaaacgattcctgcagagtttgttaggtcagagacagagcaaccaggcatcacaaccgttcatggaacccaacttggggttcctataatcgatttcagtaaccctgatgaagacaaggtgctgcatgaaattatggaagcaagtcgtgac

SEQ ID NO: 16367 - DNA, 255 bp, Glycine max
  Clone ID: 700961706H1
gacgaggtgcgggtgagaaaatctctctacaccgtaatcgctatttggcatcgctgcaacaatctgcgatactctttcctctctccgcttcgaatttcttctcacactctctgcttcgccgcaaacagtgactcactgaacaactttccgaagcattgagtagtagtgattgggtggtaacaaagagagagagagacagaaaaggatgaaccagaacccgcaatcgagtgaaggaaggaacgatgacgattctgc

SEQ ID NO: 16368 - DNA, 252 bp, Glycine max
  Clone ID: 700961707H1
aagctggaaatcgatgacgacctgaagcttcgagcattttgggacaagaggatctcccaggaggttcttggtgatgctctgggtgaggagtttaaaggatatgttttcaaaatcaccggtgggtgtgacaaacaaggattccctatgaagcagggagtgctgacccctggtcgtgttcgacttttgctccatagacgaactccttgtttccgtggatatggaaggcgcaatggagagcgtagaaggaagtct

SEQ ID NO: 16369 - DNA, 255 bp, Glycine max
  Clone ID: 700961709H1
aaattagttcattctctttgcgcagttccctacctctcctttcaagatgcagatcttcgtcaagaccctcaccggaaagaccatcacccttgaggtggaaagctctgacaccgtcgacaacgtcaaggccaagatccaggacaaggaaggaattcccccggatcagcaacgtctcatcttcgccggaaagcagctcgaggacggccgtaccctcgccgactacaacatccagaacgagtcaacccttcaccttgt

SEQ ID NO: 16370 - DNA, 262 bp, Glycine max
  Clone ID: 700961710H1
cggctcgagctctccgcagcagccttcttcgccgtttcagctcaacagccaccagcacgtaagatatggttaagcataacaacgttatccccaatgggcacttcaggaaacactggcaaaactatgtgaagacttggtttaatcaaccagcacggaagaccagaaggcgtttagctcggcagaagaaggctgtcaagattttcccaaggcctactgctggacctctcaggccaattgttcatggccagactctgaaatacaa

SEQ ID NO: 16371 - DNA, 250 bp, Glycine max
  Clone ID: 700961712H1
ttcatgaactcatgaagcatgtgatgattcatgaactcatgggagttgatcctggaactaaccctgtttgccatttccttggaagcaaggccattttatgggtacccaatttatctatggacactgcctatcagactaacgttgttgtttaattagtccatgcatctgcatcttgggcaccataagattgtatataagataaattatggtgtgttgtgtatgttgtgcaagacctggaacttcacctttc

SEQ ID NO: 16372 - DNA, 250 bp, Glycine max
  Clone ID: 700961713H1
cggctcgaggaaaatcctgtttcccgataaaaaccccgtccgtacatggtctggtcacgcggatcgggttgattgagatgcacaccgcgagcaggagcaacggcggcggcggcggcgtgctggcgtcgcggacgagttcgcggtcggtgacggagacggtgaacgggtcgcacaagttcgtgataaagggatactcgctggcgaacgggatcggagtccgaaaacacatcgcgagcgagacgttcacggt

SEQ ID NO: 16373 - DNA, 246 bp, Glycine max
  Clone ID: 700961715H1
ttcgagatgatttctggggagtgaatacttcctattaatattacttgcctgcatatatacctttgcagttaaacggtattgaaattttctgctctcataatgtgttttgttaccatttagtattagagtaggctattgttttagtttcttaaaattagaaaaatgtcaactaaatttctgaaattgaaatttattaatagtaactcactgttcgttccattatggactatgataatagtaagttat

SEQ ID NO: 16374 - DNA, 86 bp, Glycine max
  Clone ID: 700961716H1
ggatcgggtttgagactcttaagagagactttgctttttctttatgagtttccgaattaagtacttgtttcattttctctcgaagc

SEQ ID NO: 16375 - DNA, 81 bp, Glycine max
  Clone ID: 700961718H1
ctcatcttgcaaaagtctctgagctaattcgctattttcttgtagtaaacaaagcaagcaagcatatccatttcaacatgg

SEQ ID NO: 16376 - DNA, 256 bp, Glycine max
  Clone ID: 700961719H1
gccaaagcataaagtaaaataaccgcagaatattctttgctctgttgcacagattatcccttccttccttccttcttatcatttctctcattaattttctcttctccaaaacaaccaccatttaatccctaaacctaatccttatactttaaacccttactcaccaaactgttcatagttttgtgatttttttttccactaaaaattgtgttatggagcttctgacggtggtggatgatttttttgtcacggcttc

SEQ ID NO: 16377 - DNA, 253 bp, Glycine max
  Clone ID: 700961720H1
ttcttcttctcacttcattttataaactcactctgcagttagcgacaaaaccccaacccgattcggatccgattaggttctctcggatcctctccaccgcctcctccgattcccaaatccactccctcctcctgtcttcgctcgagatccgagctaagcacgggattcggatttccgtttccatcgctctctcttcaccagttttgcgcttaaatggcatcaagcgaggggtttctgaccgatggacacagag

SEQ ID NO: 16378 - DNA, 253 bp, Glycine max
  Clone ID: 700961721H1
tcattctcttcctcactacaacataaacaattttttcatttcaccaaacaaaacagtgacaccacacagcgatgacacacacggtgtacccatcggccaagcccgccgcggttaacggcgccgccgccaacccatctttcccggcgactaaggctcaactttacggcgccacacgccccacctaccgccctcagccccaccaccggcgccggagcaagcgccggtgctgctgcaccttcttcttctggctgat

SEQ ID NO: 16379 - DNA, 249 bp, Glycine max
  Clone ID: 700961723H1
tgatcttggtggtgggacctttgatgtcagtatcttgacaattgataacggtgtttttgaagttcttgctacaaatggagatactcatcttggaggtgaggattctgatcaaagaataatggagtacttcattaaattgatcaagaaaaagcatggaaaggatattagcaaggacaacagagcacttggaaagctgaggagagaggctgagcgtgcaaagagggctctcagcagccagcaccaggtccg

SEQ ID NO: 16380 - DNA, 250 bp, Glycine max
  Clone ID: 700961724H1
cgaagatggtgtctccattgctgctctcaacctcatgaaccaggacaaaatcctcatggaaagctggtactatttgaaagatgcagtccttgaagggggtattccatttaacaaagcatatggaatgacagcctttgaataccatggaacggatccaaggtttaacaaggttttcaacaaggggatggctgatcactctaccattacgatgaagaaaattcttgagacctacacaggatttaagtccctc

SEQ ID NO: 16381 - DNA, 224 bp, Glycine max
  Clone ID: 700961725H1
ataaaaagtcatggcgaagattaacaaatttgttgaacattaattattcctgaagcactaatgaagccttaccctttccatatctatactttccttgaactagtcagttaaagctgtgatatatgtgcagcctagtcactttgatttatcctgtttttgcttgagaaagatgtatggttaatattgattactgtctatagatatacgatattcacatctacctc

SEQ ID NO: 16382 - DNA, 183 bp, Glycine max
  Clone ID: 700961726H1
agaatgttggctaatgagcaaatgagttgctatttgggtcagaaactacattacattcttctgttgcacatagaaatgtaatgtagtttttgacccaaatagcaagtcattagttcattagccaacattttgtgcaaaatatttttggttttggggattcctccttcaattcaaatgcacaca

SEQ ID NO: 16383 - DNA, 249 bp, Glycine max
  Clone ID: 700961727H1
aggactttgaaaaattatacatacgtcactcaatttggatccttggaatattacaaccggtgggatttaggttcaaacaacagctacaggtacaatcatgatgtttatgatcgtttctggtatatctatggtgacaacaaggattggaaacaattaagtgcttctattcctgccgattccttaaaccagaacgattacaaaccgccagagattatcttgagtaccgcagttacaccagtaaatgcttct

SEQ ID NO: 16384 - DNA, 241 bp, Glycine max
  Clone ID: 700961728H1
cttcaaatgattcagagaagttgatccctgcatttgaagaagctgcaaaatctttcaagggaaagttgatctttgtatatgtggaaatggataacgaacatgttggaaagcctgtttcagaatactttggtatcagtgggaatgctccaaaagtacttgggtacactgggaatgatgatggaaaaaaatttgtgcttgatggagaggtgactgctgacaaaattaaagcatttgggggaga

SEQ ID NO: 16385 - DNA, 246 bp, Glycine max
  Clone ID: 700961729H1
gggacattgtaccttaaattaaaagatggaagtttcatgtagtttctttttcatcatccattgaactgaaccttaaattgattatagaaccatgtttgcgactaccaattcctccactttgtcacctttgttctctttcagtagaacaacagcgacctctctgccttccaaacccacattctgggatttggttccaatgagacgatcttcttctccggggcacttggccttagccttagacaatcc

SEQ ID NO: 16386 - DNA, 262 bp, Glycine max
  Clone ID: 700961693H1
agggaggtcaatatgctagagacttggattcaaccaagtctgtgattgaggattacttcaacagtgttagaccatcagatgatggtcttgatgtggtgttgatagacatagatggcatctttccaccaaatccccattcttccaatttatttaaaagcattaacaattttgtattagaggcaaagaatttaaagaggatgcttgttttaagattatacatgaaccttcaagctggtgggtggtccataattttgttatcaag

SEQ ID NO: 16387 - DNA, 247 bp, Glycine max
  Clone ID: 700961730H1
ctcccaggtaagtaagctcctcatcacatatctaaaacaaacccttccaaaaccaagacaatacttcaaaggttcattccaatggcatcctcgtcaagttttgttcatttggtaaatctaggtttagttttagtactacttggctttattgtccctagaagtgaagccaggccaagagcattctttgtgtttggacattcgcttgttgacaatggaaacaacaactatttgcaaaccattgctcgtg

SEQ ID NO: 16388 - DNA, 264 bp, Glycine max
  Clone ID: 700961654H1
gtgaaacaactgatgaggagccttatgcaccaaacaatcctaaaggttttgttggcaaagctcttggacaaccaggactgaaacgttcagtgagggttggggagacaggtttcagagaagttgcagcctaccttcttgaccatgatcattttgccaatgtaccctttactgcccttgtaaaggtcacacattctatttttactgttaatgacagggtcaatggtagtatgcatcataacaaaaagcaaataagcaagattgcat

SEQ ID NO: 16389 - DNA, 269 bp, Glycine max
  Clone ID: 700961656H1
gaagaacaaaattcaggtttccaacactaagaaaccccttttcttttacgtcaatcttgccaagaggtacatacagcaacgcgatgaggttgtgctttctgctcttggaatgggtactgtttctctaaaacttatattttcattcatcagtctttgaacataaaaatcaaattttcttccgtgtctaaattgcgggaaagttattataaatataaaactgaacatttttaattttttaatgctcatttactccatatcatgtagcagct

SEQ ID NO: 16390 - DNA, 266 bp, Glycine max
  Clone ID: 700961657H1
aaaatgggttcttctttgtggactttgtgtctaattttggcttcactagcctcttctgcattctgtgcctttccacggaggccagtggatgttccattcggcagaaactacgttcccacttgggcttttgatcacatcaaatacttcaatggaggttctgagattcaacttcatcttgacaagtacactggtactggcttccagtccaaagggtcatacttgtttggtcacttcagcatgaacataaagatggttcctggcgattc

SEQ ID NO: 16391 - DNA, 267 bp, Glycine max
  Clone ID: 700961658H1
gggaaagagggttgttttcctgaagcagctcccatctggattgcttcttgtaactggtccctttaagatcaatggggttcctctcagaagggtgaaccaatcgtatgtcattggtacatccacaaaggtggacatctctggtgttaatgttgataaatttgatgacaagtactttgccaaggaagccaagaaaaagaaaacaaagggcgaaggcgagttcttcgaggcagagaaggaggagaaaaatgtgcttccccaagaaaagaa

SEQ ID NO: 16392 - DNA, 264 bp, Glycine max
  Clone ID: 700961661H1
accgacctccacggcggaaaagtcgcattcgcccctgaaaacaacgacggcacactctcctctacgttcgtcacatcggtggaagaaatcccttacaacatctccgtaattcagatcagtaaggttctcccctctgccgcagcggcagcccctgcacccgcacccaccctacaaaacctccccaacattatgtcaaaacacggttgccaagtcttcgccgacactctctctgctcaacccgacgctctcaacaccttcaatgac

SEQ ID NO: 16393 - DNA, 266 bp, Glycine max
  Clone ID: 700961663H1
ttctctttggtgctagtgactcatacaacggagacaagatcatgcagatcacagtggcattcaaccacttcgggcaaggactggtccagaggatgccaaggtgcagatggggtttcgtgcacgtcctcaacaacgactacacccactggttgatgtatgcaatcggtgggagctcagggccaacaattctgagccaaggaaaccgtttcattgctccgaacaacgacaacgccaaggagatcactcacagggactacgccggaccc

SEQ ID NO: 16394 - DNA, 255 bp, Glycine max
  Clone ID: 700961664H1
gtgccctccctctttctagctatttccctctcttaacacaattaacaaagatatatcatatcatatcaactccaaatgatgaaaaatattgggttgtttcttcttgtggtggtggctacttttgtggtggcagccacagctggtagcttttaccaagactttgaaataacatggggtggtgagcgtgccaaaatctatgaaaatggaaatcttctcaccctctccctagacagagcctctggctctggctttcgt

SEQ ID NO: 16395 - DNA, 263 bp, Glycine max
  Clone ID: 700961667H1
gctttcatcgttcaacatatcctcaccatctcagtcatgggcctgctatcttgttttaggtctaccgtcctgagaaaatgttccaaaggaagctctggcatgtcaagattcctgtatacgaacaattttcaacgaaacttgatttcgcctggtggcaatgaatcgtattatgggtattttaacaggagatcatacacttcactttatatgggaactggaactgtgggtgggattacaagtgctagaatcagggtgccaaatgt

SEQ ID NO: 16396 - DNA, 265 bp, Glycine max
  Clone ID: 700961668H1
cataattcagtgctcttgcaacaattgcctcattgggctccttgttctattacacaagctctagagttactttctcctgcatacaagggtcatccacgggtcatggcatacattctaagggttctggaatcctatcctcctgaacgagtaactattttcatgccacagctggtgcagtcgttgcgacatgcatgcagggaaattggtttaagggtatctgcttagagctgctcagagacgtgacatatttgcccatattcttatc

SEQ ID NO: 16397 - DNA, 263 bp, Glycine max
  Clone ID: 700961669H1
cgaaaagttatggcaatggccacaggagaggcaccagctgaagctaccccaactgaggtgccagagattgtcaagactcttcaagaaacttgggacaaagttgatgataagtatgcagtgagttcacttgccttggttggggtgattgcattgtggggctcagttggattgatctcagcaattgataggcttcctttgattcctgggattcttgagattgtaggcattggatacactgggtggtttgtataccagaacatagt

SEQ ID NO: 16398 - DNA, 262 bp, Glycine max
  Clone ID: 700961672H1
cttctccctttttctctctgtctctctctctcggtctcgctcttcttctcatcaagcacagagttacagactcaccgatcttccgattctctttcgtcttggtttatgagctcgaaggagagacccactcttggtggcacgcggattaagacccgcaaacgaaatattgctgcgccgctggaccctgcagcattctcggatgcagtggtccagatttatttggataatgctggtgatctggaacttattgctaagagtattg

SEQ ID NO: 16399 - DNA, 266 bp, Glycine max
  Clone ID: 700961673H1
agttaacttgtgaagaggctattggtggaagttcctataaaacagcagcactatggctctgtttatgaagttctttaattcttcttcgacaagcttaatgctccgtttcatattatcgttagttctatcattcagagcgaaggctgtggtgaaactaccgccaaatattaccattcctgcagtgatagctttcggagattccatcgttgacccgggcaacaacaacaaggttaaaacactggtcaagtgcgatttccctccttacg

SEQ ID NO: 16400 - DNA, 264 bp, Glycine max
  Clone ID: 700961674H1
caaaagagccactaacaaaacagaccccgtgaaagcaaagcaccccaccgcgctctttgcctaaccgactcactcccatggaatccgatctaaacgacgccgtttttcccgaataagatctcgacgacgacgacgaaactccagaggatgaagaggaggaggaggacgacgacgtcttagatgacgatgaaaccgaaccccctccctccgtcatcgccgtcgcgccgcccgcttcccaaacgctcgacaccgcgttaattccga

SEQ ID NO: 16401 - DNA, 162 bp, Glycine max
  Clone ID: 700961677H1
cttcaaaaacatggctctaacacttcgttcttcaacttcttttattaatcagaaggaaaccaaagtcctcaaaacttctgacaatgcccctgccatagttagtttttcaaaattcaagccatcatcatcatcgttccggctccgggcaaaaaattccatgca

SEQ ID NO: 16402 - DNA, 142 bp, Glycine max
  Clone ID: 700961679H1
cggcaacggatatctcggctcttggatcgatgactaatgtagcgaaatgcgatacttggtgtgaattgcagaatcccgtgaaccatcgagtctttgaacgcaagttgcgcccgaagccattaggccgagggcacgcctgcct

SEQ ID NO: 16403 - DNA, 268 bp, Glycine max
  Clone ID: 700961680H1
caccaacgcgagacaagccctaaatctctcttctcttgtcttcttcttcctttaaccatgagaccgatcttgcacgttcagggaggccaatgcggtaaccaaatcggttccaagttctgggaggtgctctgcgacgagcacggcatcgatcccaccggaaagtacaacgaggaaggcaacagcagcatccaactcgagaggatcaatgtgtattacaacgaggcctctggcggaaggtacgttccccgtgccgtgcttatggatctcg

SEQ ID NO: 16404 - DNA, 261 bp, Glycine max
  Clone ID: 700961681H1
aaacgaatcatctgagtctggcccagtccatcgccacaggttccttagtgtatctgctattgtagcaatatctgcatcctttgtcattgtattaggagtgattgctgttagcctacttaatgtttctgtaaggagaaggctaacatttttggataatgctttggaaagcatgtgctcgagctcttcaagatcgggaagtccagccacaggaaagcttatcctgtttgattcccagtcctcacctgattggatcagcaatcc

SEQ ID NO: 16405 - DNA, 229 bp, Glycine max
  Clone ID: 700961683H1
gccctggaaagtagaacagataaatggatgccacttctataatgcatttgttgaagggcttttgtgatcacacacaattgaaatatgctggttttaggaagcttgaccaacatgttcctatgacgttgacctgggaaaatggttaccagaaaagagatgaggttaaggaaagtatgtggggtgacctcagtttcaaatccccagatgagttatattcttcaagcggtga

SEQ ID NO: 16406 - DNA, 261 bp, Glycine max
  Clone ID: 700961684H1
atccatctttgccttctgcatgttggttctctgtaaacagatactgcaaaagaagaataatattgaatatttggttgggttgaatccctgggttgaagcgttgcagacatcacggctattctaagagtgtctcgctctctcattcatgtcccaactgtacgacggaggacaggttgcgtttttgccaccaacccttcgccgcacggtgggcgtggtgctttgccttctgaaggtggtagcccttcagacttgctcttctta

SEQ ID NO: 16407 - DNA, 261 bp, Glycine max
  Clone ID: 700961685H1
aaaatatctaacaaccttaaagatctgatacataaccttagttataaaaggttaaatattctccttttaaaaggtaatcactttatgggggatataccaaagcaactatgccagttgatagatttaaacatgctagacctttctcataacaatttctctggtgttatccccaaatgcttaggtaaaatgccttttgagaataagaacccgaaggacttgttagcaagattttctatctttgatccagatctccatatccat

SEQ ID NO: 16408 - DNA, 258 bp, Glycine max
  Clone ID: 700961686H1
ggaaattgcaagaaaagaaatgggattggattggatgcttaggtctgatagtaagacgcctgtagttactgaaacagatgaaacattgtcagaggaggttcctgtcgaggagtcaaagaaggcaaatcctaaggaactgaatccatatctgaaggataatggaagtggttacccggaagaaagtggagctaaagttggtgctgaccaacttctatcttcttcccttgttggggatggaggagcaagttggagacttaa

SEQ ID NO: 16409 - DNA, 259 bp, Glycine max
  Clone ID: 700961688H1
ccaggcgtcttcataaacgcctttcttctccgtttccgtttcctcgttcgaattcgctttttgatctgcgaaaatgagagagtgcctctcgatccacattggtcaggctggtatccaggtcggaaatgcttgctgggagctctactgcctcgagcacggcatcgggcccgatgggcaaatgccaagtgacaagacagttggcggtggtgatgatgctttcaatactttcttcagcgagactggtgctggaaagcacgtg

SEQ ID NO: 16410 - DNA, 263 bp, Glycine max
  Clone ID: 700961690H1
caaaaaacagcctcgtctctcgtgccgattctccaggacaattcccttcacccaacctaattggcacttgcaattagtgtcgaagatgagtacgttggatgcaacaagggctgaacttggtcttcttgttttatatttgggcaaggctgaagcaagggacaaaatatgcagggcaatacaatatggttccaaatttttgagtaacggggaacctggtactgctcagaatgtcgacaaaacaaccagcttggcacgaaaagtct

SEQ ID NO: 16411 - DNA, 262 bp, Glycine max
  Clone ID: 700961692H1
gaacttgtcagccttatccttttatagcaaatctggatcaaaatgaatggccatcatcaaatgtcgcaaacatggccaatcatgcttaccattcctcacactttagtaagcaactttctctaagtctcgcaacatcgacaaccgcgggaatgtgctcggaggtgagttgctctaatgtgaccccatgcatgaatggaaccatgtcagggttggagcaagcctcttgcagtagtagtagggaactttctatgaatttgggtgg

SEQ ID NO: 16412 - DNA, 176 bp, Glycine max
  Clone ID: 700961652H1
caaacactccctcttcctcaattttcttcgatcaaacccaatttagccaccttcagcttttcacaatttccatagtttccttgatctcaattattgcatgccaaatcatgtaccatttagagaagccacaaagagatgataaacagtttctaactccctctttttcttccacacaa

SEQ ID NO: 16413 - DNA, 274 bp, Glycine max
  Clone ID: 700961609H1
gctttctagagctggtgctctgggaggagtagcgattcggcggttgaagatgcgaaggaaggcaccacactaagtaaggttgcgtgaatggaaagcattttagaggttgtttcctttttgtagcattttggtgttttttgtctctttattttgacctatttacaaaattcgttgttttgtgctttgttctgtgttcagagtgtcatgggggcacaaaaaaagttttatttttgttgatagagggttttactcgattgacacgtcgctgcttctg

SEQ ID NO: 16414 - DNA, 274 bp, Glycine max
  Clone ID: 700961610H1
gaggacatgttctgccatgaattccatcttgttgaccttagggtcatggataactgcttgacagttaccaagggtgtggaccatgttttcaatcttgctgctgatatgggtgggatgggttttatccagtccaaccactcagtcattatgtacaacaacaccatgattagcttcaacatgattgaggctgccaggatcaatggtgttaagaggtttttttatgcctctagtgcttgtatctatcctgaattcaaacagttggagacaaatgtga

SEQ ID NO: 16415 - DNA, 276 bp, Glycine max
  Clone ID: 700961611H1
aagccaccagtttacaagaaaccaccagtgtacaagcccaagcccaagccacccattcacaagcccaagccacccgtttacaagcccaagccacccgtttacaagaaacccccttatggtaagtacccaccagttcaagacaacgatcacttctaaaccatgcaacaaggcatgttaatgttaactatctactaaaataaagaggttcagttaacctactacgtacgttgctccttttaattcctaaatcgtaatttacaactttgtagggatgag

SEQ ID NO: 16416 - DNA, 275 bp, Glycine max
  Clone ID: 700961612H1
ctgactcactccacaataagtgtcgattttttcctaaataagtgaaagtgtagttacacctttttttgtgtgtttaccacttttgagtgccacagagttctgagtttcataggagaaaaaaaatgacagaagaacaaaccaaaacggttgagtcagaatcagtaacaccaccacctgctgctgctgctccttcacaggttcctcctgctgctgaggctgaacatgttcctgaggctccaaaggatgtgactgaggagaaatctgtaattccagtg

SEQ ID NO: 16417 - DNA, 271 bp, Glycine max
  Clone ID: 700961614H1
gggatcacgcgcgatgaggcgtgccataatttgttattcgccacgtgcttcaactccttcggcgtggtgaagctgttcttcccgaacgtgctgaagtggatcggacgcgcctgggtgaagctccacgcgcgcctggcggaggagattcgctccgccgtacgaggcgccggcggggagatcaccatggcggcgatggagaacatgccgctgatgaagtcggtggtgtacgaggcgttccgcatcgacccgccggtgccgttgcagttcggga

SEQ ID NO: 16418 - DNA, 273 bp, Glycine max
  Clone ID: 700961617H1
actccctcctcttcacacattttcttagctctctccaacaatccctctcgttcacactttcagattgtgtgaagatgggggctggtggccgaactgctgttcctcctgccaacaggaagtcagaggctgaccctttgaagcgggtaccatttgaaaaacctcagtttagtctcagccagattaagaaggccattccacctcactgtttccagcgctctgttctccgctcattctcctatgttgtttatgacctcaccatagccttctgcctct

SEQ ID NO: 16419 - DNA, 266 bp, Glycine max
  Clone ID: 700961618H1
cttcatcttctttaatttgatgagaaatttggtgcaattctgatgcagcttaggccttacttcttggttttcaacattatcttgtgattctcggtacaactgtgctaattcccactgctcttgttccccagatgggatgtggcaatgaggagaaggcaatagttatccaaactctactttttgtagctggaattaacacattgctgcaaactctgtttggcactcgattgcctgcagtaattggagggtcttatacttacgttgca

SEQ ID NO: 16420 - DNA, 267 bp, Glycine max
  Clone ID: 700961620H1
ccatggtgaacatcatgatcaaactgggcactcttgtcatgaagatgctccacttgttcgtaaagagcatgaccatcgccatattgatcacaatatggaagggatatttttgcatgttcttgctgacaccatggggagtgttggtgttgttatatctaccctgttgattaagtacaagggatggcttatcgctgatcctgcctgctcaatttttatttctattctaattgtatcttctgtgatacctttgctaaaaaattcagcaga

SEQ ID NO: 16421 - DNA, 270 bp, Glycine max
  Clone ID: 700961621H1
tgagaagtggctggaagaacatctaagaaagagaggtgaggagaaggacggtaaatgtgaaagcgacttcatggatgtgatgatatctgctttccaagaggaagaagagatttgtggttataagcgggagatggttatcaaagcaacatcagtgcttcttatccttactgcctcaggaagcacagccataacactaacatgggcactctccttgctcctaaaccatccaaaggtcctaaaagcagcccaaaaagaactggacacccattt

SEQ ID NO: 16422 - DNA, 269 bp, Glycine max
  Clone ID: 700961622H1
gctgataatccatattttcgattgggttacaacagtttgggtgcttttgcaaccattaaccatcttcacttccaggcttattatttggatctgcccttcccaattgagaatgcccccactaagaaaattgcaagtttaaatggtggggtgaagatatctgaactgttgaagtatccagttagaggtctcgtctttgagggtggcgatacgctggaagatttatcaaatgttgtttcagatgcctgtatatgtcttcagaacaacaacat

SEQ ID NO: 16423 - DNA, 88 bp, Glycine max
  Clone ID: 700961623H1
tgcaaatctctcccggacattcactgggaaaactcaacaatgatgtacaggatagcaagagagatcaaatgtcaagcagctctgattc

SEQ ID NO: 16424 - DNA, 269 bp, Glycine max
  Clone ID: 700961624H1
gggtgttgctctgactgtgtgcacaattcctggtcaagttgcatcagatcgtttgggaccaggaaagatggaacttggtcttggaattcatggagaacctggggcagctgtggctgatattcagcccgtaaatgtggtggtttctcatgttctgcagcaaattttgtccacggaaacaaactatgttccgataactcgaggagacagagtggtccttatggtcaatgggttgggtggcactcctacaatggaactaatgattacagctg

SEQ ID NO: 16425 - DNA, 120 bp, Glycine max
  Clone ID: 700961627H1
cttactttgtttcttgtctcggatttcataattgataattaattaatttcaccaacttgttggcttttttagttctataaattccccgcttgaatcacacagagtcctctcttccacaca

SEQ ID NO: 16426 - DNA, 258 bp, Glycine max
  Clone ID: 700961631H1
agccaatacgcattggaagacatgcttttggagaccaatatctggcaactgatacagctataaaaggcccaggaaagctaaaattggtttttgcacccagtggaaatgaaggcattaaagagctagaggtctataactttactggtgctggaggcatagctttgtccatgtataatactgatgagtccattcgagcttttgctgaggcttcaatgaactttgcttaccagaagaaatggcctctctatcttagcacta

SEQ ID NO: 16427 - DNA, 275 bp, Glycine max
  Clone ID: 700961632H1
ttaaaggtggtcatggctaatttgcttacagtgtttttgctaattgaggtgtttgcatatggctacagttacggacaatatggcttaaacacgaattactacttgatgagctcttgtccttttgttgaacctgttgttaagaacattgtcaacagagctttgcaggatgatcccaccctagcagctggtctgattagaatgcactttcacgactgcttcattgagggatgcgatggctctgttctgattgactccactaaggataatacagcaga

SEQ ID NO: 16428 - DNA, 272 bp, Glycine max
  Clone ID: 700961633H1
cgagctcagcatagcagccgcagagctgaatttcttcaaagggaatcacatgctaggcaacagcagtaccagcaaatcataagggatccttaccccggtggtggcatggcaccccgagaccctcatgcaccccgagatcctcatggttacaacaatgtgaatgattcaggtgcaggtggagaagtgcaacgaggctattctgccgatcactttgatccttaccgagagagagctcgatttcttgggggtggtagagatcaaggatttgaacc

SEQ ID NO: 16429 - DNA, 265 bp, Glycine max
  Clone ID: 700961634H1
gcagagttgtcgcgattaagaagatgaagcgagtggagtttatggggctggggctgttagtggtggtgatgatgggatgttgtgggtctgcgactgctgcggatgacttggcaaccaagtgttcggcggtgattcagaaggtaataccgtgtctgaacttcgcgacggggaaggaagaaatgcccaaaaaggaatgttgcgacgccgccacggccataaatgtgagcaacccatagtgcttgtgctacatcattcaagagaccca

SEQ ID NO: 16430 - DNA, 197 bp, Glycine max
  Clone ID: 700961636H1
aaaaaacttgtcttttaagttttaactctaagccatggctcttcccctgttcctcctctgcttcatgctctgcatttcactcacacaccatactattctgttacccctaacacactcaatttcgaaaacccatttcaacagtacccaccagcttctcaaatctacctccactcgctcagcctcacgcttccacagaa

SEQ ID NO: 16431 - DNA, 267 bp, Glycine max
  Clone ID: 700961638H1
atggaacaaacacttacagagctgccactgttgctattcaaggagattactttgtggccatcaatatggggtttgagaattctgctggaccacaaaagcatcaagcagtagcattaagagtccaagcagataagtccattttctacaattgctcaatggatgggtatcaggacactctttatgtacacaccatgcgtcaattctatagagattgcacgatttcaggtaccattgactttgtgtttggtaatgcacttgctattttcc

SEQ ID NO: 16432 - DNA, 269 bp, Glycine max
  unsure (1)..(269): unsure at all n locations
  Clone ID: 700961640H1
ggctccacacaacatctcatctcgtcanncaanaaaatggccctgcttctgataattcccatctcaatggtcacccactggctcggttacaccctataccagcgattaagattcaagctccctccgggtccacggccctggccggtagtcggtaacctctacgacataaaacccgtccgcttccggtgcttcgcggagtgggcgcagtcttacggccccataatatcggtttggttcggttcgaccctaaacgtcatcgtttcgaactc

SEQ ID NO: 16433 - DNA, 267 bp, Glycine max
  Clone ID: 700961643H1
tttcaaaaaacatacaatatactaagcctctttctctctctgaatttctaagcctctctcacaccaatggaggcgccacaacccggatccagcccgttacgcaaaatgattttggtgtcatcaatggcggccggtatccaattcgggtgggccctacagctctcccttctcaccccatatgttcacaccctaggcgtcccgcacccttgggcctcatttatttggctatgtggcccgatatctgggctgctggtgcagccattgtgg

SEQ ID NO: 16434 - DNA, 266 bp, Glycine max
  Clone ID: 700961644H1
cgttggcagatgctgatggcagaattgcatggcaaactaacactgccaacaagggtgttgtggccttcaggcttctttcaaatggtaacatggtccttcttgatgcacaaggcgggttcgtttggcagagttttgatcaccccacagatacccttttggttggtcaatatcttagagcaaaagggccatccaagttggttagtaggctctcagagaaggaaaatgttgatgggccttatagtttggtcttggagcctaaagggtta

SEQ ID NO: 16435 - DNA, 113 bp, Glycine max
  Clone ID: 700961646H1
aaaagtttttgaaatgttgtcaccccttcttctatttctatgcctaactcttcctttgttgtcgttgtccttctgcaaataccgtaaaaccttcaaggatccaccacttccac

SEQ ID NO: 16436 - DNA, 197 bp, Glycine max
  Clone ID: 700961647H1
tttcttttcgcattttcactttttggtcgcatattaataatcggatacggggagtgtagttttagagagagaaagattgagagagaggaaggagcgtgaaaagaccaaattgaccttggacttcgtctttcctctctctccctgtgaactctcgttccgattcgttttcgttggtcttctagaagcttcttccacac

SEQ ID NO: 16437 - DNA, 265 bp, Glycine max
  Clone ID: 700961648H1
gatgaattaattgagcatctgagtgcagccagaatagaggatcgtggtcgatggcgtctgctagccttggaagtggtggggtcggcagttcgaggtctgttaatggtggcttcaggggttcttccagttccgtcgattggcttggcagagagatgcttgagatgaggttgagagaccacgaagacgatagagatagtgagcctgacatcattgatggtgtgggtgctgagacaggtcacgtcataagaaccagcattggtggccg

SEQ ID NO: 16438 - DNA, 274 bp, Glycine max
  Clone ID: 700961608H1
ctaccaatcttcttccactactttcacttcgttccctctcactctcttcatttgtatgctttttgcgctagggttttctctgcaatctcttgtactcgaagttcgttccttcttccggatctcaatctatggatatccgcaagaggggaagacacgaaaccggcttcagcttaaatggaggattcaagagatccaagcaagaaatggagtccttatcaactggtgtaggaagcaaatcgaagccatgtaccaagtttttcagcactgctggttg

SEQ ID NO: 16439 - DNA, 238 bp, Glycine max
  unsure (1)..(238): unsure at all n locations
  Clone ID: 700961558H1
aaactatatccaatgctggatattggttgattgtgggtgacctagaggtcattgaaccaatccagtacaatgatggacttgatcattttcggctgtctccagcagaactccgtgctgagttcacaaggcgcaatgcagtcgctgtgtttgccttccagctccggatcctggtttcacaatggccacgctttgctaactcactgacacccgnaggcggcttcttgagatgggttataag

SEQ ID NO: 16440 - DNA, 239 bp, Glycine max
  Clone ID: 700961560H1
gtgcgttaggcataaaagatgtatgatcaactacaccatatgggctgtctcatcttcgagagaaaggaattggcttccaactatgagcaagttaaggcttcgattgattcatccgagtttatgtgtaagcatgattcaaccatgactttgtctgcactaattgaagcaaggaaacgggaagaaagcttgaagaaggcagtaggagtcacagaggcatatgaagcgcagaaaaaatcaac

SEQ ID NO: 16441 - DNA, 239 bp, Glycine max
  Clone ID: 700961562H1
aacctttgtcaatttctttcttgttcgactctgcttctttctccaacttcacacacacacacacacaaaaaaaaaaaaacttggcaaaggatagaacaattggtgtggctctggatttccccaaaagcagcaagaatgctctgaaatgggcacttgagaacttagccgataaaggtgaccccatttatgtcattcacattaactccaactctctagacgagtcccgaaacaagctatgg

SEQ ID NO: 16442 - DNA, 238 bp, Glycine max
  Clone ID: 700961564H1
cgcgagccgaattcagactcgagccggaatgttccattgcttgagaatgttcattattcaattcaatgttgcatgttattgtatataaaaaaaatggtccccatatacgtgacacgtgtatgcctattacgttgatttactttcttgtataaactaatgtaactaaaactatgattattgttggttggtttgtgctttaatttgttgagcactactccattgtttgtgatcacaaaag

SEQ ID NO: 16443 - DNA, 233 bp, Glycine max
  Clone ID: 700961567H1
ctttcattggtgtggcctagctgttttcgcaatgagacagccttcgtctctgcgaagcgcacttttgcgctttggggttcccttgttgcttgttatcaccttctgttatgctacttctactgctgcagcaacaactcgagtctcaggggatgtagagctgccaaagacaaacctaaatgggcatcatgaagaagcaaaattcggattttttcatcataaaccaatattcaaga

SEQ ID NO: 16444 - DNA, 228 bp, Glycine max
  Clone ID: 700961568H1
atcgttttcatctctgtttcagatctgagctctcgtatattccccagccatggccgaacaggtcaccataatgaggctcaaggttgatcttcagtgccacaaatgctacaagaaggtcaagaagattctctgcaaattccctcaaatccgtgacccggtgtacgccgagaagaataacatcgtgaccatcgcggtggtttgccataaccctgagaagctcagggacaa

SEQ ID NO: 16445 - DNA, 235 bp, Glycine max
  Clone ID: 700961569H1
ctctctttctctctttctagttcgtgttcttcgtcgcaaatccgaagtaggatctctcttgttttttctctaggtttttcgcgatggcgtcgaagcgaattttgaaggagcttaaggatttgcagaaggatcctccaacatcttgcagtgccggtcctgttcatgaagatatgtttcattggcaagctacaattatgggtcctccagacagtccctatgctggaggtgttttcct

SEQ ID NO: 16446 - DNA, 239 bp, Glycine max
  Clone ID: 700961570H1
ggaagaagctgctgccatggctctctcatccccagccaaggatggggatgagagagccatggaagaagctgctgccatggctctctcatccccatccttggctggcaaggccgtgaagctgggcccatcagccccgctagtgggaagggtgagcatgaggaagaccgtcaccaagcaggtctcctcaggaagcccatggtacggcccagaccgagtcaagtacttgggcccattctctg

SEQ ID NO: 16447 - DNA, 55 bp, Glycine max
  Clone ID: 700961573H1
cgcaaggaggtgcagaatggctgatgcaggtgcagaaggagcatcttcttccaca

SEQ ID NO: 16448 - DNA, 235 bp, Glycine max
  Clone ID: 700961574H1
ggttcatcttggcttcttccttctggggtgtttctccatgatctcatatgctaatggttatgtcagcaatgggggttggaccaatgcccatgctacattctatggtggaagtgatgcttctgggatcatgggtggggcttgtggttatggaaacttgtatagtcaaggatatgggactaacacagcagcacttagcactgccttgttcaacaatggcttgagttgtggctcatgc

SEQ ID NO: 16449 - DNA, 237 bp, Glycine max
  Clone ID: 700961575H1
caaatatctgtatatcacattgaaacagaactctagaagcaacttggaagacagggatcgccggcggcaccctccgaagacggagatacacccactcacaaccactttcccggaaaataaccaccgaccacaatttcttggaatttattttgcggtgaattcactttctgcctttaattttttcatcccctcgcgtgcggattttgttttccccttccgccgatagggttttgatga

SEQ ID NO: 16450 - DNA, 236 bp, Glycine max
  Clone ID: 700961576H1
ttttaattgtctctgcttttctcgtagaacgcgtttcttgccactccgaaaaacaagaggaaaaaattggaagttttcaaggatgttagaacagttactgatatttacaagaggagggttaatcctctggacttgtaaggaacttgggaacgctctgaaaggttcacctatcgataccttgatccgttcctgccttttggaggagcgatctggtgcggcacatacaattatgatgc

SEQ ID NO: 16451 - DNA, 233 bp, Glycine max
  Clone ID: 700961577H1
gacagagaaaccaatcggaggaaaatgaaactagtttggtccccagagacagcatccaaagcatacatcgaaacagttcaatcttgtcggattttccgggaatccggggtggcggactggtgtcggcgatggcggcggggtggaacgcgcactaatcgtggagacgtggtcggaggggggagtgatagcgacgagcgtgggtttagccgtggcgagaactcacacgtgcggga

SEQ ID NO: 16452 - DNA, 229 bp, Glycine max
  Clone ID: 700961581H1
cccatatgatgagtgtggtgatgggtgggtgagtccgaattgtgaaagtaagcaaagatggctttcacggaatcgtctctcctccttccttcggtttcaggaaccaacaagaacaagaacaaggttccagaagacaaatggtatttagcctacattgtgtattttaccctgggtctcggttaccttctcccatggaacgctttcatcaccgccgttgatgacttctcct

SEQ ID NO: 16453 - DNA, 113 bp, Glycine max
  Clone ID: 700961583H1
gaatctctgaaagattacgaggaggattttgaaaatcctgaaaagaagcccagaaggaacaagtacgctttcgcatgtgctattttggcttcaatgacttccacacaacatac

SEQ ID NO: 16454 - DNA, 236 bp, Glycine max
  Clone ID: 700961587H1
gaaaaaatttgcaaggcaacttggttgttgagaaattagatagcctaatggtgctggcatttttgcaccttgaatcctgtcaaagcagtggccgtttgactgaggtattcgatactctactagcttcatttcagagaaccgtattgaatgcgtacaagtcaaaatttacccagtatgtgatgttctatgcatgtgcactggaccctgaaggatgtggtgtgaaatttgacatggtt

SEQ ID NO: 16455 - DNA, 237 bp, Glycine max
  Clone ID: 700961588H1
gctactttggcttggctttctgaattttggtttttcagtgctgagagctgaacaagaagatggggggtggaaatcaagaggcagtcaagcagctgcagaccctgatggaaaatgtggatgatgagcagctgaagaatacattccagattatgcaccagggttatcaaacggaaacgttaatacggtttctcaaagctagggactggagtgttgccaaagcccataaaatgttaattg

SEQ ID NO: 16456 - DNA, 77 bp, Glycine max
  Clone ID: 700961589H1
tagatttgtattgttccttcctccttcatgagtcgtctcctaaacattttacttccttcttccaccgtatcgtagga

SEQ ID NO: 16457 - DNA, 113 bp, Glycine max
  Clone ID: 700961590H1
ctgaacaaggaaaacagctgcacttgcatcacagctcaagccttaaagctttagttctgaaaaatatagaaaaaaagaaagatggaaacacgagtgtcttccacacaacatac

SEQ ID NO: 16458 - DNA, 235 bp, Glycine max
  Clone ID: 700961591H1
aagaagccgagcgattttgtttaccttccaagagatgaagcatttggtcacttgaagtcatcagattttctcgcttatggaatcaaatctgtatcccaagatgtcttgcctgtcttgactgatgcattcgatggaaatattttgagccttgagtttgataattttgctgaagtgcacaaactctatgaaggtggagttacactacctacaaactttcttagcaagatcgccccta

SEQ ID NO: 16459 - DNA, 233 bp, Glycine max
  Clone ID: 700961592H1
aagaagaggaatgatgcgaagggtgcaaagatggcgatgcgtttggaactgtattgatcgcccgagtcagcagctgcgtctattgcacgagggccctgacaccgtagaagagcttctggagaggcatctcgttaaaaacaaaaacgaaaaccagttggagaatcagaggcaactcaccagcactcgccgcgaacgctctgtctctaccgtgacattcttcgggccacccgcct

SEQ ID NO: 16460 - DNA, 234 bp, Glycine max
  Clone ID: 700961594H1
ccactattcaattctctatatttaacctctttccctcattctcttctttcactttcacttcctcatggcatcaacaaagagcatgttcatgtccttcgccatcctcctcctcctcgctctcttctccgccaccgtgtccgctcagggctctccaacaccggctccggatgccggagcagctggatcagtctcgagctctgcctccgtcatcggtgctgcggttgtgttgtccat

SEQ ID NO: 16461 - DNA, 227 bp, Glycine max
  Clone ID: 700961595H1
aggcactatagtaaacaatcttctctatctaagatggagtttgttctaaattacctaaatgccactgccattggagttctttctataaccctcttcttttggtttttgtataatcccttcaaatttgcattaggtaaaaaagaggctcccaaagttgcaggtgcatggccaatacttggtcacctaccactattgagtggttcagagacacctgatgtaggtttggg

SEQ ID NO: 16462 - DNA, 233 bp, Glycine max
  Clone ID: 700961596H1
agaaaaagcgaaaagcgatcatagtttcacttcggccttatccagtttagggtttcggttctctaccctatctttcacgtatcgaaaccttaaatttacgatcaggtctgagcaatctggttggtagaacctttggtcttagtgagtcaagttttatgtctgaattagacgatcaaattcctactgccttcgatccttttgctgatgcaaatgctgatgactcgggtgctggg

SEQ ID NO: 16463 - DNA, 276 bp, Glycine max
  Clone ID: 700961601H1
gcgaagagaatggctcccaagggtttaatctttttggctgtgttatgcttctcagcactgtcactgagtcgttgtcttgcggaggataatggacttgttatgaacttctacaaggaatcatgccctcaggctgaagacatcatcaaagaacaagtcaagcttctctacaagcgccacaagaacactgctttctcctggctcagaaacatcttccatgactgtgctgttcagagttgtgatgcttcactgttgctggactccacaagaaggagcttg

SEQ ID NO: 16464 - DNA, 194 bp, Glycine max
  Clone ID: 700961602H1
gatttgtgcaaatgatgtctttgcagaggaccaagttgtttccttttttcattgtccttgtttccttcacatgtagtctctcccttgctatgtccagtaaccagttggagcagtttgcttcggaggaagaagtgtttcaactattccaagcgtggcagaaggagcataagcgtgaatatggcaaccaagaggag

SEQ ID NO: 16465 - DNA, 242 bp, Glycine max
  Clone ID: 700961556H1
gtgagtgtgggcacggtaagatgcagaccattgctaggcgcttagggcagcaatcgctgaggccatcgacgtcgctcaagtccatctatccaatttccgatcaccattatggaatggatcacgagcgttacgtttctaccctcgccaccaagggagttggtcacctcgttcgtaagggcactggtggacgatcctccgtcagtggcattattgctacagtatttggggcaactggattctta

SEQ ID NO: 16466 - DNA, 271 bp, Glycine max
  Clone ID: 700961603H1
gtcaaagatagatcctggtgatgaatctggtagcacactggacagcgttaagggagaaattgagcttcgtcatgtgagcttcaagtatccttctaggcctgatatacagatttttcgagacctcagcttgactatccattctggcaagacagtggctcttgttggtgaaagtggaagtggaaaatcgacagtgattgccttgttgccaagattttataatcctgattcagggccaatcacacttgatgggatagaaattcgtgagttacag

SEQ ID NO: 16467 - DNA, 267 bp, Glycine max
  Clone ID: 700961607H1
ctctttggaaatgtctgctgttatttacaaggactgggttttcactgatcaagcattgcctaatgatcttgtcaagagaggagttgcggttaaggatccatctgctccccatggagttcggcttttgattgaggactatccttatgcttctgatgggctagagatatgggatgccatcaagtcctgggtgcatgaatatgtctcattctactacaagtcagatgcagcaattcaacaagatcccgagctccaagcttggtggaaaga

SEQ ID NO: 16468 - DNA, 248 bp, Glycine max
  Clone ID: 700961506H1
atttattaacacattatgtgtctgaacttaaatcatcagttgttacagtgagtgtccacaaaactgatggattatgggaaagacctaaacgccgcttgcatattcaattattgctgggtgggggtgcaatgcttgatacatggggaactgatggagaagttctgcaactaattttgccttcggaagaatgaggtgttgaagctagtatctactagtgagaagaattacaaggaccgtttggaaaatgc

SEQ ID NO: 16469 - DNA, 247 bp, Glycine max
  Clone ID: 700961507H1
attttgaagacccatattcagtctccagcaacttcacttccagtgttagcgaactcacaattggcaagaaggatttacgaaggaacttgaagggaaaatatcgtggtgacggtccatgcatagccacaaaccccatcgacaggtgttggaggtgtgaccccaattgggccaacaatcgccagaagctcgcagattgcgtccaaggcttcggtagaaacaccgttggaggcaaaggtggaccattcta

SEQ ID NO: 16470 - DNA, 160 bp, Glycine max
  Clone ID: 700961508H1
cgttttgtttgtttcaatatgtttgcacttcccgcctcatagacaagtaaggacaaacaagaacgtggttcctcttcatcatcttcatcccatgatgaagcattaccatgtcttgtacatgtttttatttttcttaccaatttctacgttaagtctccac

SEQ ID NO: 16471 - DNA, 159 bp, Glycine max
  Clone ID: 700961510H1
cagagacattactttttggtagtagcaacaagcaaagggaggaaagaaggaaagaaagagagagaatcttcattcatttttttctgctcattttctgtgtacacctttatcgtttctctcactaactttggagtctgctttactccacacaacatacga

SEQ ID NO: 16472 - DNA, 244 bp, Glycine max
  Clone ID: 700961512H1
aaacaaatcaaagccatggccacctccaacttctctattgttctctccgtctccctagccttctttttggtgccacttaccaaggcacactcgaccgataccgtttctttcaccttcaacaagttccacccagtccaaccaaacattatgccccaaaaagatgctagtatttcatcctctggggtgttacaactcaccaaagttggcagcaacggcgtgcccacctcgggatctctcggtcgtg

SEQ ID NO: 16473 - DNA, 246 bp, Glycine max
  Clone ID: 700961513H1
ctctatggcatctgcgacgcgtctggtgcactgcgagctgcgctcggcgaggcccgcggttcggccgagggaaccggccggtccggttcaggttacgatccccaaacccaaacccaaagcggcggaggcggaaggcgcgaacatcgttttgcagccgcggttgatgcactctcagatcctacggttcggatcgagccggggtgcttatcaagactcgcaaggagggtgaccatgatgacgtgtcac

SEQ ID NO: 16474 - DNA, 246 bp, Glycine max
  Clone ID: 700961514H1
ctcgagccggttgaaatgaaaatgggttcttctttgtggactttgtgtctaattttggcttcactagcctcttctgcattctgtgcctttccacggaggccagtggatgttccattcggcagaaactacgttcccacttgggcttttgatcacatcaaatacttcaatggaggttctgagattcaacttcatcttgacaagtacactggtactggcttccagtccaaagggtcatacttgtttggt

SEQ ID NO: 16475 - DNA, 116 bp, Glycine max
  Clone ID: 700961515H1
ggttccgatccgattggctcgtcttcagtgtgaaattcctcgctcatcgcgttcggaatcttcctctcttgttatccagcaaccggtttggcggcgcggctttcgacacaacatac

SEQ ID NO: 16476 - DNA, 247 bp, Glycine max
  Clone ID: 700961517H1
gacaagatcccggaaaggcgtgccggcgtcagagactcatcagttctcactcgtacggcgttgtgctttgctttctcaccttcttcttcatttctttcatcatcatcatcatcacaatataaagttcgctcctttctcagttttcacccatacccagatgggtaacagcaccatctcggatctgtgtccctcctttaagtgaaaaaggttcaatctttggtctctgaggctgttgggttttcgtcat

SEQ ID NO: 16477 - DNA, 247 bp, Glycine max
  Clone ID: 700961519H1
gcgtttacagcactacagttccacacaacaaacaaaagaaaatataaataaatagagaacacgcgaaacacctgattcccctagccagacgcagcagagtcagagagagagattcactgaaacagagcgagtaagaaaatacataaactaatccagaaaatgagcagcggcgctggaaaggtggtgtgtgtcaccggcgcttccggttacattgcttcctggatagtcaaattcctcctcaatcgcg

SEQ ID NO: 16478 - DNA, 246 bp, Glycine max
  Clone ID: 700961522H1
ctaggcatatgtgtgtgcctaaaaaaaattgtctctattgtttagcgacagggtcttaaattgtagtggcattgctcttctgactagtaaaattgctgaaaattactgaggtaaatggattgtggtcacaatcccttacactatcgtttcactttgatcagaaaaaaaacaaaaacactaagtgacacgagcagtcatattcatcactgtgccacgttttactgattgcattggtagtaggtatct

SEQ ID NO: 16479 - DNA, 245 bp, Glycine max
  Clone ID: 700961523H1
taacagaggctccaatgtaattaaagggaaaggtcctagtggtggtaggggtgagaaaccaaaagaagagtttggaagtggggttcaagaacccgagaagaacaagttggttttcttgagggaagttcttataattttgatcttgaggatttgctgagagcttcggctgaagttctggggaagggtagttatggtactgcatataaggccatactggaggagtcaatgactgttgtggtgaaaag

SEQ ID NO: 16480 - DNA, 246 bp, Glycine max
  Clone ID: 700961524H1
gtaagagctcaattattgcacttatacaaagattctatgatccaacatctggtcgggtcatgattgatggcaaggacatcaggaaatacaacctcaagtccttaagaaggcacatttctgtggtacctcaggagccatgcttgtttgctactactatttatgaaaacatcgcttatgggcatgagtcagccactgaagctgagataattgtggctgcaactcttgccaatgcacacaagttcatat

SEQ ID NO: 16481 - DNA, 245 bp, Glycine max
  Clone ID: 700961525H1
ctaaaaggcctcaaggatacactccggacttaattacgttattttgttagggtcaccgtttcgagatattctaaacttgtactgaaaaatatggagggaaaagaagaggacgtaagagttggagccaacaggtacggagagaggcagccaatagggaccgctgctcaggctaaagactacagagagccaccgtcggcgcctctcttcgaaccgggagagttgtcatcgtggtctttctatagggc

SEQ ID NO: 16482 - DNA, 246 bp, Glycine max
  unsure (1)..(246): unsure at all n locations
  Clone ID: 700961527H1
taaaaaccttcccttctcttctcacccccacactcccatctcactctnccctcgcatccaacaatgtctctcaccattccctccaacctctccaaccacgccgccctccgccccaaactaagcccaaagctaaggtccgccgccacaaccaccatcgtctgcagcaccaccaacaacaacaacaacaacaacgtgtcctccgacctgaaggcgttctccgccgcgctggccctctcctccatcctc

SEQ ID NO: 16483 - DNA, 193 bp, Glycine max
  Clone ID: 700961528H1
cagctaccttcatcaacagggagtttatcatctcttaccacattacacttgcaatacaatcaactttctgggaccctttatgttttgcaagaccttcctctccaagatctgtacaattcttactaccaaaatactttatagatatataaatgaataatatgtatatcctgcaactgcatcaatccacacaaca

SEQ ID NO: 16484 - DNA, 104 bp, Glycine max
  Clone ID: 700961533H1
tctctctctctctctgaagatggcttcacgcaggctcgtatcttctctgattcgatcctcccttcgtagatctcaatcgaagccctcaatttccacacaacata

SEQ ID NO: 16485 - DNA, 75 bp, Glycine max
  Clone ID: 700961534H1
atttttgcgaagctgctccatttttatacgaagagcagattcaggtctctatcaccgggatccaacaacttctca

SEQ ID NO: 16486 - DNA, 197 bp, Glycine max
  Clone ID: 700961536H1
atggcttccaacgatgatgagtccgttctcgatccctgggccttcattttggagttgtctcacatatctccatcccaagaacaaatcttggccactgctccatttgtcggagcagtacaggacaccgccacctccgcctcccatgacatcgacatgctgccgttgccggactccgtccccgaagacgtattccacac

SEQ ID NO: 16487 - DNA, 243 bp, Glycine max
  Clone ID: 700961537H1
cagtttctctctcttagggttttctcctcccccattgacccaccgtccatcgcaaaggaagtcgcgcccaatttccatggtttgtagattaaatcttaaagcagtaagtcatcatggataaatcagagcagactcagcagcaacatcagcatgggatgggcgttgccacaggtgctagccaaatggcctattcttctcactacccgactgctcccatggtggcttctggcacgcctgctgtag

SEQ ID NO: 16488 - DNA, 241 bp, Glycine max
  Clone ID: 700961538H1
atcttcttatagcttcatcccaaaaagctcttttccttctaaatttgattccttagttcagcattctattattatatatggcttcttcaccttcctcagaaaacaaaaacctagagggagtagctggtggtgccggagagaaacccattccacttggtgagaacgttctgcagaagcatgctgcattctttgacttgaataaagatggtgtcatctacccatgggagacttttaaagggtt

SEQ ID NO: 16489 - DNA, 97 bp, Glycine max
  unsure (1)..(97): unsure at all n locations
  Clone ID: 700961539H1
gttcgataacaataagaacattgtcgtgagatactancttcaaataaccggtggagatccacggtgttatcctagtaccggttccgcagttttgctt

SEQ ID NO: 16490 - DNA, 245 bp, Glycine max
  Clone ID: 700961541H1
tggatcccaagggctcaaagcagcagcagccacaggaggtggtaccaaaattcctcagcctcccccaacaccactaccaacaacaagggaattccaacaacaacaacatgggagagaacaaaccatcagaggttaaggatttccagatagtggtagctgctgagaaggacgagagcaagaagcagcaacagttggacaaaacgggtgtttccaacaaggacaggcacaccaaggttgagggcagg

SEQ ID NO: 16491 - DNA, 117 bp, Glycine max
  Clone ID: 700961542H1
ccattcctgggtaccatctgcagcaccctgtctcgttcttcttcaatcagtggcagcgacctcaacatcactcttcttctccaatctccattgtctcaaccgtcaacctgtctcttc

SEQ ID NO: 16492 - DNA, 240 bp, Glycine max
  Clone ID: 700961544H1
gtttccatcttacataacaatagagctgttccttactggagaaagctatgcaggacactatatacctcaattaactaatgttttattggaccataatgctcgttcaactggttccaaattcaatattaaaggagttgctattggaaacccacttttgagacttgaccgggatgcacctgcaatttatgaatacttctggtcacatggaatgatttctgatgaaattggccttgccattat

SEQ ID NO: 16493 - DNA, 111 bp, Glycine max
  Clone ID: 700961547H1
atcgatctgaaggctgggtggtaagagcaaaaagaccaaaagaacagcagcaaagtccaatgacatctacctcaaattacttgtcaagctttatcgattcgttgttcgaag

SEQ ID NO: 16494 - DNA, 246 bp, Glycine max
  Clone ID: 700961505H1
atctcgttcttcctttcttctctcagattccccctttgcctccttcttcaaccccttttctttctctctctgtctttcgcactttcattctctcttaaaaatctaaatcccttttggtcttcatctttccctctcatccaggtatggcttcgatacgcatcctgaaggtgctcaaggatttgcagaaggatcctcctacgtcatgcagcgcaggtcctgtagctgaagacatgtttcactggcaag

SEQ ID NO: 16495 - DNA, 165 bp, Glycine max
  Clone ID: 700961549H1
tcgtgccaggagttcagactcgctacccttcatacgatcatcctcgtagtccagctggtattgaaggacagtatgttggccataacgtctacccccctggctccttctatcaacaaccgtttggatcgcctggttattatccagcttctctatcatatggagagt

SEQ ID NO: 16496 - DNA, 115 bp, Glycine max
  Clone ID: 700961550H1
ggctagtaaagcacggcaaggtgtacaaaacgctcggatagaaggagaagaggttccagatcttcaaggacaacctgcgattcatcgacgaccacaactcccaagaggaccgaat

SEQ ID NO: 16497 - DNA, 250 bp, Glycine max
  Clone ID: 700961553H1
ttcggctcgccgtcgcctgcttagattctgctttaactccacaagaactagttcaccttgcaatagactgcttacctacatcttcagaaaaagcacataatgaaacaaccccttcgttctctcgttggaccataatcgattattccagagcctacagttcgggagatataacaccactcatggctgcagcccgatttatagctgctattaatgaatcttcaaaacctccactccgaatgggattctttat

SEQ ID NO: 16498 - DNA, 226 bp, Glycine max
  Clone ID: 700961555H1
cttttacgttttcttaacatttttcgggaatgcgagctgaaatgtcaatcatcatgacatgagattggtcctctctatattgatcgcacaatgtatcagaggaaatataggaagagacgtagtggggtccagcacccatgtgccctcctcctgtctccaccagctgctgccgctcaatgatgagacccctgttccccttcaagttcaagttcaatttccacacaaa

SEQ ID NO: 16499 - DNA, 142 bp, Glycine max
  Clone ID: 700961468H1
gacttgacctaaacggagcaaaactcagcactaaagacggttgcaatttgcccctcacgggtctcgtcgacagcatacccgagttaacattcttccacgttaactccaacaccttctccttcaccggtggcttccacacaac

SEQ ID NO: 16500 - DNA, 250 bp, Glycine max
  Clone ID: 700961469H1
atgatgttcgttgcagcatgtggtacaaagcagagctatattccttcacttcccccgttgacaagatgcaaccgtgactcaaagttgatcaagttgtggaagaaagctagcccttgtggtgctaatatctcagagctagaacacatccatgaaggtcataatcctaggccatcaactagccgtggcacccagcgcctctatgttcgtctcaacaccttacactatctcctctctaacatcaacacccttg

SEQ ID NO: 16501 - DNA, 246 bp, Glycine max
  Clone ID: 700961470H1
ggcagggcatttgggagtgtcttgggatcccttcttgcgctgtaggatatgagtgcttgatgcggtgtcttcaaatcctgcaaggccagaggacgcaatcaactcaaacgacaccatgtctggaactatgtctccaaaaggttctttcaaggagagagcaatcaatgcctcaaacatgctggagggattctttgaccaggaagggtaggcgtgcagtaaggtcatgtccgttgaaagcgaggatgt

SEQ ID NO: 16502 - DNA, 93 bp, Glycine max
  Clone ID: 700961471H1
cgacatcgtccgggactataacggacttgccactttccagagaacgctggggacttggaaatattgaatctgtacgttgcctttgaattctgg

SEQ ID NO: 16503 - DNA, 253 bp, Glycine max
  Clone ID: 700961472H1
catatatccctcttgatatactcaaattcgcaatccgctatgttctgagtgggaaggcttgggataatcttttggagaacaagactgccttcactacaaagaaagactatggcaaagaagagagagaagcacagtgggcaactgcacagaggactcttcatggtcttcagccacctgaaacaaccaaccttttcaatgacaaggccagttacagggagctgtcagagattgctgagccagctaagagacgtgc

SEQ ID NO: 16504 - DNA, 248 bp, Glycine max
  Clone ID: 700961473H1
cttgctattgttctgtggccactggctgttgttggggcagttctggcatctgtgttagccagtttcgttcttggtggatatcgaggccttgggaagcaggatccttctttcatgtcaagaatatcattgctgtattcatcataaagggacacagctgcaacaatgtaccccaggcctcgatatcgaaaaattactgaattgaaattgtcaaggacaccttctcgttcaatttccctcccaaaaacaaa

SEQ ID NO: 16505 - DNA, 242 bp, Glycine max
  Clone ID: 700961474H1
aatatacttcaatatgctaatcatggaagtttcacttcgtggcttacttggatttgtcttcgttcttctgtggaggcaaaaatacaagagcagctaaatgtgcggatgtattctatttgaatgtagatagagctccgtcatctgtaaacattttacaatatattcttttgtttggcaatcattataggtgttattaaaattttgttggcatgtatgccccaaattaagcacattgagtaaga

SEQ ID NO: 16506 - DNA, 245 bp, Glycine max
  Clone ID: 700961475H1
gagatgtgttgatttggggttaagaactgtgcttatagtcacacctgtcaacgtgctacataattggcgtcaggagttcatcaaatggagaccttctgagttaaagccactcagggtcttcatgctggaagacgtatcgagagatagaagggcagaattgcttgcaaaatggagatctaaaggtggtgtctttttgattggttatgctgctttccgaaatttgtcttttgggaagcatgtgaaag

SEQ ID NO: 16507 - DNA, 246 bp, Glycine max
  Clone ID: 700961476H1
cacaggctctgcctgttgctttgatgattcatgataactcgtcggatcgcacggcctttgtgccggcgacgcatcattcaaatttctgccctatcaactttcgatggtaggatagtggcctaccatggtggtgacgggtgacggagaattagggttcgattccggagagggagcctgagaaacggctaccacatccaaggaaggcagcaggcgcgcaaattacccaatcctgacacggggaggtag

SEQ ID NO: 16508 - DNA, 247 bp, Glycine max
  Clone ID: 700961477H1
gcagagaggctgtgtcaaatggctcttgacattcatatagcaaataattcagctccatctcttgaagaggcagctgataggaggctcatgggccttatatgtgagacaaagggaaatcatgaaacagctcttgagcatcttgttttagcaagcatggcaatggtaagtaacgaccaagaagcagaagtggcatctgttgactgcagcattggagacacatacttatccttgtctcgatatgatgagg

SEQ ID NO: 16509 - DNA, 244 bp, Glycine max
  Clone ID: 700961480H1
gttgaaatgaaggtagctcccatcgtggtgttcttgttcagagatacagagggtttcgcctccaccatctcacaagcttttcgccccaagccttcctcctccttcacgcgccaagaggactcctttgagctctccttggaggcttatggaatcaaacacctcaaagcatctgggagcgtttctcacttcgttgatgatcacggcgcttacaaggtgacaattgtggctatggagcattatgagc

SEQ ID NO: 16510 - DNA, 246 bp, Glycine max
  Clone ID: 700961481H1
ccacttttcagcagagtctattgcagagctgaaagcaagggctaactctgagtccaaatccaaaaccagcgaaatctcttcgttccaatccttatcagcgcatgtttggagatccgtaacacgagcacggaagctgccaaatgatgagataacaagttgcaaattggccataagcaatcgatcaagattggaaccgcctcttccacacgagtattaatgcatacgcattgatgtggtgagcactgc

SEQ ID NO: 16511 - DNA, 243 bp, Glycine max
  Clone ID: 700961483H1
caaagatatacacatatagggagaggctgaaggaggggcatcagatccctactttgtataaatggggttgtctttctaaacaaccccatcacgtcattaagagggggggatcgatccttgatgtgtgaatttgcttgcattagcgggatcgtatatattcattcatatacacaattacatatcaagatcacatgtagtttggtgttcttgatctcataaacaacatggagggtcagaacaaga

SEQ ID NO: 16512 - DNA, 247 bp, Glycine max
  Clone ID: 700961484H1
cagattcgtgatttaccatttaccacaccaaaaccaatccgatcgtttcctctgcggagtcagaaatccatggatccctacaagaatcggccatcaagcgccttcaattctcccttctggactactaattccggtgctcccatctggaacaacaactcatcgctgactgttggatctagaggtccaattctgctggaagattaccatctggtggagaagcttgcaaactttgacagggaacggatcc

SEQ ID NO: 16513 - DNA, 240 bp, Glycine max
  Clone ID: 700961486H1
cttctctctcacactcactttctctctctataactctttctcacccgctagggtttccttttcatcgcatcttgagtttgcaacctcgtcttgtgatttccatggagggtgctgggatggaagagaataatattattaatgatgatgataataataacaagtctgaggcgcatttgacttctgccggtgcttttgtggagggtggaattcaagacgcttgtgatgatgctgcagtatatg

SEQ ID NO: 16514 - DNA, 241 bp, Glycine max
  Clone ID: 700961487H1
ctacgtctctctctctctctctctctgtgcatcgctattctatttctctcactccctcactgttcctccccaaatgctgaacctgaaccacacccactgatctacactgtggaagacattcccaagatttcagctttggcggaagaagagcagagcaagcggaaaccctcatgagagaggcaatgtgagggagggagaaggttccttctttttcctctttctcaggtttcggaaatggtgg

SEQ ID NO: 16515 - DNA, 249 bp, Glycine max
  Clone ID: 700961488H1
ctcaagtggaagagggaggtcggcgacggctgctacttcaatcggcgccgctaccgaggtctccgtcgcggcggaaaggggcatctccgctccactacggcggctattgactactatggttaattgcattaattgtacataaatagacctctaaatcaaagttatggaagattctgatcaacctgccaaatctgctgaaaaccagcaaactgaacaagtgtgtagttttttcagaaagccggttaataa

SEQ ID NO: 16516 - DNA, 244 bp, Glycine max
  Clone ID: 700961489H1
ggcatacccggcgccggcaatggaaacaacgcaaaggagggttgattttgcaaaagctgggccacccaatgtaatgttaatgcagcagatccctaggcaaaatcctgagtattcgttggtggagactagtccaccactggcggctcgtttgcgctatagaggaggaggaggaggggacaagatatccaccacctacgacttagtggaacagatgaattacttgtacgtgaatgtcgtcaaggct

SEQ ID NO: 16517 - DNA, 239 bp, Glycine max
  Clone ID: 700961490H1
ctcttcttctcttgcggctagggttttagcgcagttcttctagatttaaggaagatgggtaaggaaaaggttcacatcagtattgtggtcattggccatgtcgactctgggaaatccactaccactggtcaaccgatttacaagcttggaggcattgacaagcgtgttattgagaggtttgagaaggaagctgctgagatgaacaagaggtctttcaagtatgcctgggtgctggacaa

SEQ ID NO: 16518 - DNA, 218 bp, Glycine max
  Clone ID: 700961492H1
gaaaacccaaagtgcttctctcctctgtctttgtctctctcttgctatccttttggctagtggcactgctgcaagtgcaatgccaagaaggcgcagtgccaagccaccatgtttcaacattcaacagaagccttttgcctgcgactgttctctttggacttggttcttctgcttaccaggcagaaggagcagcaagtgtagatgggagaggaccaagc

SEQ ID NO: 16519 - DNA, 243 bp, Glycine max
  Clone ID: 700961493H1
ggggaagatgaggatttgagttgggatgttgaagacgatgagaatgacgatggtgggattagatgtgatgccaaacctgtgattatgaataaagaggttggtggtgaaaatgtggataatacccacttacatgttgatggcaatgaagagggaacaaagagattggatgtggaagaggagtctaaggaacaaaagaaagacaatttattggaaagtgaggaagttggcaacaaggtggataag

SEQ ID NO: 16520 - DNA, 240 bp, Glycine max
  Clone ID: 700961494H1
gtttctgcattttgtcaaacaaattgcggtgatgttagtccaaatgtacttggagctttttgtatagacactgaactaccttgtgacttcaatcatagtacatgtggaggaaagaatgaattatgctatggccgaggacctggttatccagatgaatttgaaagcacacgtattataggggagagacaatttaaaaaagcagtggagctattcaacggagcatctgaacagattaaaggg

SEQ ID NO: 16521 - DNA, 246 bp, Glycine max
  Clone ID: 700961496H1
ccgaaatcgaggcaaaggcagagacgaagaaggaatgagtgccacagtgactctaactctaaacctatgtcgttcttccatcgttgcttcttgtccacattataaccacaaaccaaaccctaatttcaatgccttgtttagcttctctttgtccctgtctctgtctcaccacagacgcatcgctatctgcaagaaaccattttcctcaagacggacgtggcttcatggacatatgaaaagagatcg

SEQ ID NO: 16522 - DNA, 254 bp, Glycine max
  unsure (1)..(254): unsure at all n locations
  Clone ID: 700961501H1
ctcgagccgattcggctcgagtctctatctatcgagcgtgtctgaggattccgtgtncttgacgagcgagggtgcgactatgacctgcgacttcgatctccggcaatccgcgtggaggttcgtccagtaaaacggcgccgtatagcgggatctgcgacgctgggcggagtggcaatggagggcgagaacgcgagcaacaaggtgatcgagttgacgaacgagatagccagcatctccgattacaggcctccggt

SEQ ID NO: 16523 - DNA, 250 bp, Glycine max
  Clone ID: 700961502H1
gtgaaatatctgatcaattaatggctcagtatttctttttgtttgttctggtgtttgccagccaactgatggctggattcaatgcaccgctagcgctaccatctccgtcatatggaaatcatacaaccattctcagcatagacggtggtggtatcaggggcattattcctgcgactgttcttgaatacttagacaaggctcttaaggctaaggatccaacaacatctttagcccattattttgatgtgat

SEQ ID NO: 16524 - DNA, 249 bp, Glycine max
  Clone ID: 700961504H1
gctatccatttgtttcgagaatgcggtctctctcagccaacccttccttactgcgacaagctgttccagttttggtcaaaccctacaaatccattctctctcgagcattcctcttcagctcccctgcctgaacatctcattctcacaatactcaatttcttagatccgtcacgtttttctctactacttctcttcgtaattttaattcacgctcaacccatctcaacgatgctggctctatcgactctc

SEQ ID NO: 16525 - DNA, 138 bp, Glycine max
  Clone ID: 700961467H1
gtcattcaccgagaaagtcgtactgattcctcttcatctttcgttaaagcgagtacttttcgttcttgatctgttggttacgatgtcgtattcaaggagatctaggtattctccttctccttctccttctccacacaa

SEQ ID NO: 16526 - DNA, 254 bp, Glycine max
  Clone ID: 700961430H1
gcatgacataatatctctctcttctccaacctctctcatatatgtaaagacaaaaccaaaaccgtgtttatgcttcagcccttcatcatatagatctgcctgaaaaaaacccttgcgatcagatccagcccaattaatctctctctctagaatgtcttcccagcgcgcagatctagagtgccggatcttcccggtcgcccgaaatcgaccacttcgaccggctaccggactcgctcctccttttggttttcaac

SEQ ID NO: 16527 - DNA, 253 bp, Glycine max
  Clone ID: 700961431H1
ctcgagccgctctgcgctctctctctctgtctcctacgattcgttttgccccttttgttgccctaatttcaaccatgcctcgccgtagctccggtggaagatctgcccgtcctgctcctcgggcagctcctcgtcctgctccagttcaccatgctcctcctccagcccctgctcagagtggtggtggatctatgcttggtggcattggttcaaccatagctcaaggtatggcttttggcaccggaagtgcagt

SEQ ID NO: 16528 - DNA, 253 bp, Glycine max
  Clone ID: 700961432H1
ggcgaggagaacgcgcgatgcatcgccgacgggaacgaggtcatacggtttcattgcttgggttttgccgaggacggtgtaccctacgacggtggtggctgtgcatggtcatttccggagaagaagggggcggcgatttgtactttctccggaagcggcggcgcgcatgagacagccggcggaggaaaggggagaagggccatgctggtttgtcgggtcgtggcgggtcgggtctcgaagcaactcgggtttc

SEQ ID NO: 16529 - DNA, 216 bp, Glycine max
  Clone ID: 700961434H1
cttctttctaaactaaccaactttttttcaaacaaattcgattatatcttcattattaacctaattttcttttcgatccaaaaaatggctttctcgcgcgttgttgctcaatcgtcgcaatcgaatcttctgaaacccctagcgtcgtacttatcactacgacgccgttcggtttcgacttcgtcagacccactcacgatagagacctcggtgccc

SEQ ID NO: 16530 - DNA, 167 bp, Glycine max
  Clone ID: 700961435H1
ccttgatatagctgttccttgcattgcactctcaaataatgactcatatgttatttctgcatgtggtggaaaggtttcgttatttaacatgatgacattcaaggtaatgacaatcttcatgccaccaccacccgcctctacctttctagcttcccaccctcaagata

SEQ ID NO: 16531 - DNA, 254 bp, Glycine max
  Clone ID: 700961437H1
ctagaaaaagactacataaagaatgtattaggggaacaagggcagcacatggctgtgaactactatccaccatgcccagaaccagaacttacctatggattgccagggcacactgacccaaatgcacttacaattctgcttcaagaccttcaagttgctggccttcaggttctcaaagatggcaagtggcttgccgttagtccccaacctaatgcctttgtcattaacattggcgatcaacttcaggctttgag

SEQ ID NO: 16532 - DNA, 252 bp, Glycine max
  Clone ID: 700961438H1
atttttcttgaaaaatgatggaactttgacgccattggccattgagttaagtaagccacatcctcagggtgaagcatatggtcctgttagtgaagtctacgtgccttcgagtgaaggagttgaagcttacatttggttactggcaaaggcttacgttgttgtgaatgatgcttgctaccatcaaatcattagccattggctaaacactcatgcggttgtggagccattcgtcatagcgacaaacaggcatct

SEQ ID NO: 16533 - DNA, 255 bp, Glycine max
  Clone ID: 700961439H1
tttaatttcctctcaaaccctaaccctaaccctaaccctccccgtcacaaaagaaaaccctctttgtccgatcatcgtcgtcaagatgttggaactccgtctcgtgcaaggctccctcctgaagaaggttttggaatccgtcaaggagctcgtgaacgacgcgaacttcgactgctcctccaccgggttctccctccaggccatggactccagccacgtcgccctcgtcgctctcctcctccgatccgagggctt

SEQ ID NO: 16534 - DNA, 255 bp, Glycine max
  Clone ID: 700961440H1
ttgcccctcgctctctctattggttcacgcgcggcaattggagattcacgcgccaccatggcctcaccaccgacactccctatctcctcccaatccagcgcctccggcggctccgcctcgcagtcccagcctccgatcgcaacgccggcgttccgcgccttcatctcccgcatctcctcgtccctccgtcacgcctttgcgcagcgccgcccgtgggcgagctcatcgaccggagctccatgtcccgacctgaca

SEQ ID NO: 16535 - DNA, 251 bp, Glycine max
  Clone ID: 700961441H1
cagctccttccgaaaggctccttctcgcacatcttcaatgaagaacaacaacattgctgagttgaaatcatttgagctgttggatgccttattcaaggaatgtttccgtgttggagaaaaattggtttctgaaggtataattacaagacaagacataaaagaagccaattctggtaacgggattagagttcatagtattggtttaccagcatattgcttagtccagggactctagcgctctgcaaaattaa

SEQ ID NO: 16536 - DNA, 248 bp, Glycine max
  Clone ID: 700961442H1
ccaagagttaaggttgttcatacatctgacaagatacatgggcatgtctacattcctgaaattaattggctactcatgatcctctgtattactgtgaccattggatttagggacacaaaacacatgggaaatgcttcagggttagcagtgatgaccgtgatgctggtgacaacatgccttacttctttagtaattgtagtttgttggcagaaaccccctataatagctctttgcttcctgttgttctt

SEQ ID NO: 16537 - DNA, 244 bp, Glycine max
  Clone ID: 700961443H1
caaacgggtatcatcagctgaagaaagttttgatagagcgctacaatacatgctctgggtgagaaagtttcagctggctgaatgatttgttagatggtttgccgagatgaagacagcatacaactagagcatgtattggtcaaacgggtatcatcagctgaagacagttttgatagagcgctacaatcattttcctcatgagtgtcgatgattgaatttctttcaagagttgaatggtgtgagg

SEQ ID NO: 16538 - DNA, 244 bp, Glycine max
  Clone ID: 700961445H1
aaaatttgcgggtgttcttgtctccgatgcctggcttcatagccagttcacgcaggttgagcttcgcagcctgaaatcaaaatttgtctctttaacgaatcagaatggtaaagttacctttggagatttgccgcctttgatggtgacgctaaacgcattcagagatatgtacagtgaggatgagattaggggtatcttgggtgaatcaggcactgattttaccaatgacattgattttgaagcc

SEQ ID NO: 16539 - DNA, 220 bp, Glycine max
  unsure (1)..(220): unsure at all n locations
  Clone ID: 700961446H1
caggcccatgtgttgtggnagaggagcatgtagcgagcgcgggtaccggtggttcccctgcgtcgtgttgtgtgagatcaaaccctagtttttagacactgcaacagtagcagcagcaaccatggcgagtaggaggtgcctgcgagcgttaactcaaacgagaccgtttctcttccgaaaagcatcctctcttcgctcactcgccgtgcttccatttccc

SEQ ID NO: 16540 - DNA, 255 bp, Glycine max
  Clone ID: 700961449H1
tttctcttttttttccacctacccttaactccataacccctagttagacgcactcaacactgaacacaaactaaaccatgacaagcgatgaatgagattacctaccctctttgcccacgtaatacccgcgtgcacccaaacgtgttataccccaaagtcgccactgttggacttcctcttcccatttttcactattcacagtccaaacaacacacctaaaccagccaaccagtcacgcacactaactcttaccca

SEQ ID NO: 16541 - DNA, 122 bp, Glycine max
  Clone ID: 700961451H1
cgacaagaggacgtaagagaccgcatctgttccgtgtaaggcgaagtcacaaaatttctcagctcctgcctgtatacttcacatggcctaatcccacagtcgcacactcttcgactctgcca

SEQ ID NO: 16542 - DNA, 251 bp, Glycine max
  Clone ID: 700961452H1
cgctgaagtcgacttcttctctcatactccgccacccaacatcgtcaagaaggaacttgatcaaacacctcttcacattaatactggtttacaactccttactgctaacaccaggagtgaccaatctaccgtggatgacgggctttcatcggatgcagaagataagcgagccaaaaccaccgagcttgcacagttgcaattggagcttcaacgcatgaacgctgagaacaagaagctgaaagagatgctca

SEQ ID NO: 16543 - DNA, 198 bp, Glycine max
  Clone ID: 700961453H1
gtactgttccgttcgtaattggcaatttggtgagattcttcattcttatgctgtgcgggtttcctcttcagattcatggcggcaacccaaccaccgcagggtccggatcgtaccaccgaagagataccggccgaaccagataacttgaaggagcagggtacaacaactcgaggtcatgcaagggagaccacaagtcaa

SEQ ID NO: 16544 - DNA, 253 bp, Glycine max
  Clone ID: 700961455H1
aaccccgttgtccggagccaccattttgcgctccggcaatgttcttcccggtggccatcgtcccttaaacccaccacacttcaaagtcatgggtattccatgggacgacgtcgttgtgatccagcaagggaaggatcacaatgagccctgcatcgtcaccgtcaattgccccgacaaggctggtctcggctgtgatctttgcagaatcatcctcgagttcggtctccgcattacccgtgctgatatttccacg

SEQ ID NO: 16545 - DNA, 249 bp, Glycine max
  Clone ID: 700961457H1
cgctgatgtcgctggtgttgacgaggctaaggaggagctggaagagattgtggaatttcttcgcaatccagacagatatgtacgactaggagctcggcctccccgaggtgttctcttggtgggtcttcctgggacaggtaagactttactggcaaaggctgtggcaggggaagctgatgtgccatttataagttgttctgctagtgagtttgtagagttatatgttggtatgggtgcttcccgtgtgag

SEQ ID NO: 16546 - DNA, 134 bp, Glycine max
  Clone ID: 700961458H1
ccgcaagctcctcggcaaagggagccacggctacgtctacaaagccgtcgtccgcggccgtcccgtggcggtgaagcgtccatcgcggccacaccataatgttccccgaccggtctcttcttccacacaacata

SEQ ID NO: 16547 - DNA, 245 bp, Glycine max
  Clone ID: 700961462H1
aagaaaactagtaatatggcttcaagaactatatgttttaccattcaagtgactcttgtagtagcttttctaacaacaaaggttgttttatctgatgacactgtgccaattcccgcgaacaaagcacaattaggtgaatggtataatactaatgtggggcctttagatcaaagaaagagcactgtggacccagcattggtgactgctgaagaaggcgctaaggttgtcaaggtgatgcaagatgg

SEQ ID NO: 16548 - DNA, 248 bp, Glycine max
  Clone ID: 700961463H1
cgacaagagaaaataaaaaaccgcatctgttccgtgtaaggagaagtcacaaaatttctcagctcctgcctgtatacttcacatggcctaatcccacagtcgcacactcttccaccctgccatcaccaatcatcaacacaacgcccattattatttaaaaatccttaatatattattattcttcgtccatcgctttttcttgaagactacttcatccttcttattagtttctttttatttcaatcttt

SEQ ID NO: 16549 - DNA, 243 bp, Glycine max
  Clone ID: 700961464H1
cagcgcgagctcaccgcgagactcccatctcacacacccctcgcatctacgaatgcctctcaccattccctccaacctctccaaccccgccgccctccgccccaaactaagcccaaagctcaggtccgccgccacaaccaccatcgtctgcagcaccaccaacaacaaccacaacaacaacgtgtcctccgacctgaaggcgttctccgccgcgctggccctctcctccatcctactctccgc

SEQ ID NO: 16550 - DNA, 249 bp, Glycine max
  Clone ID: 700961465H1
aaagaagttgtgcatgctggattaccatgatttattcttaccatatgtaagcaaagtgagaaaaattaagggcaccacattatatggatcacgaacattattcttcctcactgatcaagggacattaaagccattagctattgagctcactagaccacctatggatggaaatccacaatggaaacaagtcttccaaccttcttgtgattcaaccaaactctggctttggaggcttgctaaagctcatgt

SEQ ID NO: 16551 - DNA, 251 bp, Glycine max
  Clone ID: 700961466H1
aaacatggcacctcaaatttctagaggcagagtccctattgttgttttgctagcctctctagtcctccccctccttgcttcaagaatattcttcttcttctgtgttcattgcaagtgcatcagcttcagaatcagacgttgatctgttagaatttcccttaaatttagaatacttggaggctgagtttttcttatttggttccttgggtcatggattggatgtggttgctccaaatttaagtgagggagga

SEQ ID NO: 16552 - DNA, 251 bp, Glycine max
  Clone ID: 700961428H1
gctggtgttaatgtacctgttgtgggcggccatgcaggcattactattctgccactattttctcaagccacaccaaaagccaatcttgatgatgatgtcattaaggctcttacaaagaggacacaagatggagggacagaagttgtagaagctaaggctggaaagggttctgcaactttgtcaatggcctatgctggtgccctttttgctgatgcttgcctcaagggcctcaatggagtcccagatgttgt

SEQ ID NO: 16553 - DNA, 235 bp, Glycine max
  Clone ID: 700961379H1
aacaattgtatgtgacaggattgtctcctaggattaccaagagagaactggagaaacattttgctgctgaaggaaaagtgatagatgtccatctggtagttgatccttggacaagggaatcccgtgggtttggctttgtgacaatggagactcttgaggaggctgaacgatgtgtaaagtatctgaatcgctctgtacttgaagggcgtgtcatcacggtggagaaggctaaaag

SEQ ID NO: 16554 - DNA, 236 bp, Glycine max
  Clone ID: 700961380H1
gaaatcgctcttcaaccgcaacaaggacgcgatctcctcacacacggcgtcccgatcgacgtctttatccgtgcgttcacgcagcgtatggcggatgagctggagcaggtgttcaacaagttcgacgtgaacggcgacggcaagatctcggcgtcggagctggggtcgatcatggggagcctggggcagccggcgacggagctggagctggacaacatgatccgcgaggttgacgg

SEQ ID NO: 16555 - DNA, 229 bp, Glycine max
  Clone ID: 700961383H1
tgagtcgaatgggagagagattcatgttcatattttccccttcgtgcccgtcaagtttctgattctctttttcaattcctttctctttcaggtgattttttctccacgataaagttgcgatttcgccggtgtcgttttgccgcaagatggtgtcgttttcgggaatataaaatcagggttgaagttctttcttcagcattgaatcttggttactaggttggttttttag

SEQ ID NO: 16556 - DNA, 231 bp, Glycine max
  Clone ID: 700961384H1
actattcagataggtatgcaggagatgatatgcacccaaaggagaaaaggcgaacacctgcttggtgtgacaggattttgtggtacggagaaggtctccatcaattatcttacgtccgtggagaatcaaggttttcagaccacaggccggtttatggcatattttgggctgaggttgagtcaagtcatggaagactgaagaagagtatgagctgttctcggaacagaattg

SEQ ID NO: 16557 - DNA, 93 bp, Glycine max
  Clone ID: 700961385H1
gaatttgacaaaaaagtagctagtgctccagaggatcccattgtcccttaggccttcgctacgatgaagctcgcgtgtagtgcataggaggct

SEQ ID NO: 16558 - DNA, 232 bp, Glycine max
  Clone ID: 700961386H1
gccagttgaggcactgaagagggaactgatggtggcaaatgagagtagagatactgccttgatggaagtttctgagatgagatcttcacttggagaactgaaacaaaagttggagtacttggagagttactgtgaagagttgaagaaagctttgaggcaagcaatgctcaccaaagaaaccacattttcagaaaagctcaatagccctccccagagaggaacaccctttgat

SEQ ID NO: 16559 - DNA, 233 bp, Glycine max
  Clone ID: 700961387H1
agaactccacaccgcatcgctcgtggttccatcctttgtgtctgtctctctcttcggacacaaagcaacactttccatgtccatgtctctgtctctccttcgtatcttctcttcgccccacctttccacctctctcttctttccaactccaactctttcttccctctgcccttctttcctttccaaattaccaaatgccccctctcccctcattgttttatgccacagggacg

SEQ ID NO: 16560 - DNA, 230 bp, Glycine max
  Clone ID: 700961390H1
caagagagcgtcgccatcaaagtcatcaagaaagagaagctcaagaaagagcgactcgtgaagcagatcaagcgcgaggtgtcggtgatgagactcgtccgccatccccacatcgttgaactcaaggaagtcatggccacaaagggaaaaatcttcctcgtcatggaatacgttaaaggcggtgaactcttcgccaaagtcaacaaaggaaaactcaccgaagatctcgc

SEQ ID NO: 16561 - DNA, 230 bp, Glycine max
  Clone ID: 700961391H1
ctactccttccttcccttccctctcatctcttcttttctcttctcttctcttctttcttatcattctgtctctattccttctctctttctcctgcaacaacaaccatttaagggatttcgggatgcgtttctgcggtctgttgattgtgttggtttgttgagtgtggcgttaacgtaatttggttttgagtgaagatgattttgtgatgtggttgagtgagtggtttttg

SEQ ID NO: 16562 - DNA, 61 bp, Glycine max
  Clone ID: 700961393H1
cacgctgaatcctagctttatcttcccttcccttcaaaataatatctctgtgccacacaag

SEQ ID NO: 16563 - DNA, 236 bp, Glycine max
  Clone ID: 700961394H1
ggcttgtgaatcagcaccacattcacctgagctttttgtgaggattccaaagcatggcttcccttgcagcatccactgctgctgcttcccttggcatgtcagaaatgcttggaaaccccatcaacctcagtggtgccacaaggccagctccatctgcctctagccctgcctccttcaagactgtggctcttttctccaaaaagaaggctgcacctccaaaaaaagctgcagctgct

SEQ ID NO: 16564 - DNA, 235 bp, Glycine max
  Clone ID: 700961395H1
gagagttggaggcgtcgaggttggaagacgagatgtgggcccagttcaacgggaccgggttctggagaagcgcttctcagcgccaccaccaacaacaaactgatggggaatcatgccaagaactccaatgatttcggtacacgtgtcgcgtttccattcgacgacaactcaacgaacgcattcatttacctggattctatgcatgcgacaatgtttaatgtgctgtcatagacga

SEQ ID NO: 16565 - DNA, 261 bp, Glycine max
  Clone ID: 700961401H1
gttgaggacttgtggaagaacttttccagtgcagatactgctagacaggtggtcaagttgaaagcattttctaaatttgagaacacttcagaagctctagaggcagctactttacttattgatggaaaagctagcaagggtctgcgcaagttcctgcgtgttcattgtgaaaatgaaacactaggtgtggcagattcaaagcttgggaatgtgatcaaggagaaattgaaaattgactgtattcacaacaatgcagttatg

SEQ ID NO: 16566 - DNA, 258 bp, Glycine max
  Clone ID: 700961402H1
gccatttacaaaaatggtaaccattaaagcatcttacacagtccttcccaatgaaccaactccggagggccttttatggctatctgatattgatcaagtggcacgtctacgccacacacccaccatctacattttccatgcaaaacacaaccctgatacattaattgagcggatgagaaactctcttagcaagattttggttcactactatccaatagccggccgattgcgcaggatagaagggcgtggtcgattgga

SEQ ID NO: 16567 - DNA, 128 bp, Glycine max
  Clone ID: 700961407H1
gccatgtgtcaaactggtttatcagtgctcgcgttcggctttggaagccaatggttgacgaaatgtacttggaagaaatcaaggagcatgaactaggtaatgcctcagaaagcaccagctcaaaggat

SEQ ID NO: 16568 - DNA, 261 bp, Glycine max
  Clone ID: 700961408H1
gcttctctcctctgtctttttctctctcttgctatccttttggctagtggcactgctgcaagtgcaactccaagaagcgcagtgccaagccaccatgtttcaacattcaacagaagcctttttccttccacttttctctttggatttggttcttctgcttaccaggcagaaggagcagcaagtgtagatgggagaggactaagcatatgggacacctacactagacagcatactgaaaagatttgggatcatagcaccggt

SEQ ID NO: 16569 - DNA, 259 bp, Glycine max
  Clone ID: 700961409H1
tgaagagacaaaaaacaatggctgaaacaaagttgagcatgatgaaggacaaaagatggtcactccgtggaatgactgctctcgtcacaggagccacccgaggcatagggcatgccattgttgaagaattggcagactttggagcaactgttcatatatgtgcacgtaatcaagatgatattgataagtgtttagaagagtggaaaaacgagggacttaatgtgactggctcagtatgtgatttacaatgttctgacca

SEQ ID NO: 16570 - DNA, 255 bp, Glycine max
  Clone ID: 700961411H1
aaattggtggcaagtggcaagcggaaagccagagtgtgtggttccgtttgctgacctgacctcggaaatccaaagagggaaactcacggtgtttcgttgcgttgtgctctgctctgctcctttgggcctgggctgggctgggctgggctgggctgggcatggctattgcagcagcggccgtggtggtaccattgggcctgctcttcttcgcctccgacctccttgttaatctcattcaggcaatatgctatgtcg

SEQ ID NO: 16571 - DNA, 111 bp, Glycine max
  Clone ID: 700961414H1
cattggcatagcagctgggtcgcacagaaagggaaggagacaagtctactctctccaaaatccgttgcagtcagtaatggatcgtcaatggcgtcctgctcctccacccaa

SEQ ID NO: 16572 - DNA, 258 bp, Glycine max
  Clone ID: 700961416H1
ctcgagccgcacacacactcctcacacaataatggaagacgggcaaagaaaaacaacaacactacttctatgctcccacattgtggttcttcttttactctccctagtggccgagactagtgccaaggtttcagcagtgatcgtcttcggcgactcctccgtcgacgccggcaacaacaacttcatccccaccattgcacggagcaattttcagccatatgggcgtgactttgaaggtggaaaagccactgggaggtt

SEQ ID NO: 16573 - DNA, 248 bp, Glycine max
  Clone ID: 700961417H1
gctcaagcccacttcttcttgagagttctatattctattattcttatctcagctatgcagacaccaccacctattctaacagtaaaaccctcccaaaacccacactgtgctaaaccccttttagcactctgtttctctgcttaaccatgtcccaatcactgaagctaatccaggaatacgcctccaaccccaaactctggttggtcattggaataggagttgccggaatcgtggttctggtggagaca

SEQ ID NO: 16574 - DNA, 257 bp, Glycine max
  Clone ID: 700961419H1
ccatatccccccctagctacagagcagccaaaggggaggaataataataagcctatattctaaggccggaaaaataaaaaaggaataacaaaaatgtctggaaaggtaattatctcggctgtttctctcatctcggtggttggagtggccatagttgtggtggtggccgtcaacaagaagggcgaggatcccacacttcaatctcaacaaaaatcagtaggggttatctgccaaaacactgatgaccagaagctctg

SEQ ID NO: 16575 - DNA, 257 bp, Glycine max
  Clone ID: 700961422H1
cacaaattgcaactccttctcggcttttcctaatcagcacgaacacaaacacagagagagacatggattttgaactgagaagagcgagagagaagctagagaaagagcagagggagaggaaggaaagagcaagactgaaacttcagaaggaaaagaaggccaaagaagaggctcagaagcaaaaggacagccatcgaagctgttcaaagatctcgtcgtattgatgccgctcaagctcaactcaaggctgcccaaca

SEQ ID NO: 16576 - DNA, 256 bp, Glycine max
  Clone ID: 700961423H1
cttagaaagaaaaaaacttaaatcaaaatacttaatagcatggcgatacatttatacaaaacttctaccccaagcacacgcaatggagccgtggacagtcaagtcaaatccaatccacgaaatcatttgatcgatggacagcatcgttgtggtaaaggccgtaatgccagaggaatcattaccgcagggcatagagggggaggtcataagcgtctataccgtaaaattgattttcgacggaatgaaaaaaaacata

SEQ ID NO: 16577 - DNA, 203 bp, Glycine max
  Clone ID: 700961424H1
gagagagtgttggtacgaaaaatgtcgaagctgatcttcgtgttcctttcgcttattcctcttctctgcacctccttctccccagagagaccctcagatcgacgcgtcctcgttttgctcgatgacttcgccatcaaatcctctcattctctcttcttcaactccctcaaatctcgcggcttcgatctccaattccacacaac

SEQ ID NO: 16578 - DNA, 254 bp, Glycine max
  Clone ID: 700961425H1
ataccatttatcaactcactcatcaatctcgtttgttctcactaactattacttcatcatgtcgtcgagcacagttggtcaagtcatcaaatgcaaagctgcggtttcatgggaggcagggaagccacttgtgattgaagaagtagaggtggcaccaccacaagctggtgaagtgcgtttgaagatcctctacacctctctttgccacactgatgtttacttctgggaagccaagggccaaactccattgtttc

SEQ ID NO: 16579 - DNA, 116 bp, Glycine max
  Clone ID: 700961426H1
gctatttcttacctcttggcatggccattcaaatgtcttcttttgtctttgtttctcttacaattttattttgcttctcttccttggagaagagttttgccttccacacaacatac

SEQ ID NO: 16580 - DNA, 250 bp, Glycine max
  Clone ID: 700961427H1
ggtttttctttttctctgttgaggttgtcattgggagcactcaacctaaactattcaagttgtgaaagcacatcacaagaaaattcgcaagcgatggatccgaagctaaaagaggtttctcagctcttcgatcgctttaaggcttcgtttatcaggaacgactttgatacctgttccaatctcctttctcagctaaaggtgttacttacaggtttcagaagccttccaccgttgtttgcagatacaccta

SEQ ID NO: 16581 - DNA, 57 bp, Glycine max
  Clone ID: 700961377H1
aaaagtcagcgccttcttttgtcttttctctctctcaaaaaaattccacacaacata

SEQ ID NO: 16582 - DNA, 214 bp, Glycine max
  Clone ID: 700961328H1
cttcttcagtggttgtagctactagaacactagtttgttgagcacttcgatcaggcagtggacggttgcttccgctctccttcttctctggctcctctttctctgtgcagatcaaggtcgaaagtttcaggcgaatgtcgagtgagagtccgacgagcttgtagatcctccgaagttcgagtacaagatcggtgctgtgcctcatggccttgcc

SEQ ID NO: 16583 - DNA, 63 bp, Glycine max
  Clone ID: 700961329H1
gttgggttgttatgataaaaaccagaatttggatattccatttggggggtcactctaattgtc

SEQ ID NO: 16584 - DNA, 242 bp, Glycine max
  Clone ID: 700961330H1
tgagagatgaggtcgctgtcacagcagtcatggtgtacgtcaaggctcataaatcaaaagcctacgtcaagagatatcaagtcgagttcaagagaagatgagatggatgaaccgattaccgtgccaggatgcggttgattaatcaggacaagttcaaatataacactccgaaataccgatttgttgttcgctttagcaacaaggacattgttgcactaatactatctgctagcattgctggc

SEQ ID NO: 16585 - DNA, 240 bp, Glycine max
  Clone ID: 700961331H1
gaagaagatgaagaatctaccaaagggaatgagtatttttctaggcaaaggaatgtgatacagactcctggttccaacacaaaactgaacagaatcaactcagagccaccacctgagagactccgtgcagaatacatctgctccatttgatggccataagcagacataacttcaagctgtatctagtatctatccagaatccagttgaagtaacacctcccccttgtgtccagaaccaga

SEQ ID NO: 16586 - DNA, 238 bp, Glycine max
  Clone ID: 700961332H1
gaaatcgctcttcaaccgcaacaaggacgcgatctcctcccacacggcgtcccgatcgacgtctttatccgtgcgttcacgcacgcgtatggcggatgagctggagcaggtgttcaacaagttcgacgtgaacggcgacggcaagatctcggcgtcggagctggggtcgatcatggggagcctggggcagccggcgaccgagctggagctggacaacatgatccgcgaggttgacggc

SEQ ID NO: 16587 - DNA, 240 bp, Glycine max
  Clone ID: 700961333H1
agacggttgagttcagagttgaaacttgagagagtgtcgttgattccaatttacgacggaggcgtgaggaatcacaatctccaccggcgaaacctgtaactgttggcgacgctcaaaactcgcactacgccgatagtgatggagagtgcttttgcaagcgcctctgcgattactgaccagaggcagaagatagagcagtataagcaaatacttgctgctgtcatttcatctaatgacatt

SEQ ID NO: 16588 - DNA, 241 bp, Glycine max
  Clone ID: 700961334H1
atccaagatttccctcttgtaagagagagagataaaagaaaatcagcgtcctacagcaccccaccatgggaacccaccaagcacttgtttttatcatgtttttccatcctatatatgactcataagcacacacaagtgtcattcacagccattctttatctctcatttttttaggctcataaatcttttttatgggtttcagggtcactactatcctgtctctgctctccctgttttggct

SEQ ID NO: 16589 - DNA, 237 bp, Glycine max
  Clone ID: 700961336H1
gacaaagtgttgaaatggctggatgagcagccaggttcttctgttgtctttctttgttttgggagcatgggagggtttggtccttctcaaacaagggaaatagcactagcacttcagggtagtggggtaaggttcttgtgggctatgcgttctcccccaacctcagacaatgcagacagaaccttaccagaaggtttcttggaatggatggaggaaggtaaaggaatggtatgtgga

SEQ ID NO: 16590 - DNA, 109 bp, Glycine max
  Clone ID: 700961340H1
atacacgcacgcacagttcaaagctctctccatcatcatcaacgtagatttcctcttccattttcacgtgattcccaatctcacacctccaccgattccacacaacata

SEQ ID NO: 16591 - DNA, 242 bp, Glycine max
  Clone ID: 700961341H1
atctctagccacaccttctctaattccacacgccaattcaaataagcaggatcattccaatatgggcaacagaattgttatgggaaatccccttctctttatctctttcttcatcttcagctttagtttcttggaggctcaaaaggctccagcagtttatgtgtttggagactcacttgttgatgttggcaacaacaattacttgagtctctccattgaaaaggcaattcttcctcactatg

SEQ ID NO: 16592 - DNA, 241 bp, Glycine max
  Clone ID: 700961345H1
attgaaatgcatgccaagacagactcggaggtaacaagcctggatgcgtcgtccagcacaaggtctcctcggcgagcagtgtactacgttcagagcccttcccacgatggggagaaaacgacgacgtcgttgcactccacccctgttctcagccccatgggttcccctcctcactctcactcctcctccagccgcttctccgcttcacgccaccgcaataaccataataataaatcttgga

SEQ ID NO: 16593 - DNA, 241 bp, Glycine max
  Clone ID: 700961347H1
ctctctctctcccaattttctctcttattgaggctagcaaaagagagcaaaaaaactaaaaaatgcctgcggtcggaggtataaacaccggacggggcaaggagtaccctggaagcctcactctatttgtgacggtaacatgtatagttgcagccatgggtggtttaatcttcggttacgatatcggaatttcaggtggagtgacgtccatggatccgtttctgctcaagttttttccgtc

SEQ ID NO: 16594 - DNA, 244 bp, Glycine max
  Clone ID: 700961348H1
ctcctaaaacatctcaatgggttcttcttctattacaacatcgccctaaaccatgaccatggctgcgatcgtgctcctgttcacggtctttgccgtttcctccgccctagacatgtcgataatctcgtacgacagcgcccacgcggacaaggccgccacgttgcgcaccgaggaggagctgatgtccatgtacgagcagtggctcgtgaagcacgggaaggtgtacaacgcgctcggcgagaag

SEQ ID NO: 16595 - DNA, 238 bp, Glycine max
  Clone ID: 700961349H1
gaaaaggaaagaaaactctcaaaaaactattatagcaatggcagaacaaaaccaaaaccaaacaactgaagctggaaggcaccaagaggttggtcacaagagccttctccagagtgatgctctttaccagtatattctggagacaagtgtctacccaagagaacctgaatccatgaaagaactgagagagttgacagcaaaacacccatggaacatcatgacaacctctgcagacgaa

SEQ ID NO: 16596 - DNA, 233 bp, Glycine max
  Clone ID: 700961350H1
tgatgacagcgtcctcaataggtcgttgttcactaagttggtgcaagaggggtatatggtaggcgtgctgggtctcgtcaaaaggtgtactgtgaagcagatgaagtgcaggctgctattgtgacttgtgggggtctgtgtcctgggcttacactgtcattagggtattagtgtgtggcttacaccatatgtatggggtgaagtctgtcttggaatcaatggaggatatatgg

SEQ ID NO: 16597 - DNA, 91 bp, Glycine max
  Clone ID: 700961353H1
gcacatcttctattactccgggcacaatgtgcctcagtatggccgtgacattggctcagggtccatctcgctctcactcaccacaattatc

SEQ ID NO: 16598 - DNA, 232 bp, Glycine max
  Clone ID: 700961354H1
aacgaaaagagagcatgaagatgaattgctactggtggcatgccctgataatgagtggttgtgtgttgggcttgtgcgtgggcataggaggttgtgtatgtgtggtggagaacgagaatggaagaatcatcattgatattagtcacaggtaccatcctgatatgcctgcctgggaatccaaggatagccttgggcagtttgtgtggcttacaagaagcatggccaatggttc

SEQ ID NO: 16599 - DNA, 203 bp, Glycine max
  unsure (1)..(203): unsure at all n locations
  Clone ID: 700961357H1
ccaggaggatcaagacgtctttgtcacaattttatagttatagatcgatggctagngggtcttatcggcgtatggaactggtattgctgctaagacgctatagtcaattgggatcaatcgcaaagatgctcgagtggaagtagataatataattggaaggtgtagtggatttggggctgtgtgagagtccatgtattccccgg

SEQ ID NO: 16600 - DNA, 236 bp, Glycine max
  Clone ID: 700961359H1
gttgaatcctataaaaaatttcttggtgggacagcattattcgtgatctatgaattttgtttggaatgaggtctaggagaagggtgtgggggtttcatgatgacaaactcttcagttcttcatttgctaaccttttcatgaatcctttctgctttagaaaatactgagcaatcactgaattggagtactcgcctaaagatagctctcggttctgccaggggattggcttacttgca

SEQ ID NO: 16601 - DNA, 98 bp, Glycine max
  Clone ID: 700961362H1
ggatcttccatttgactcttgtactgaacgacttttcaagagaatcaaaccatggcagttcgagtatacggtccccactgtgcttccagacaacatgc

SEQ ID NO: 16602 - DNA, 243 bp, Glycine max
  Clone ID: 700961365H1
gctcgttctcttgcgaatcggccgacttcaatggaatttggcaaatagtatccatctctccaacgatcccatttcccttgacatctctacgtgaagatccttgtgtcgcatagagctagttaaaatgtctgagggaaatgcagggaaaggaaagagaatcgccatcattggcgtctcagccttattgttggtggctatggttgtggcaatcacagttggggtcaatctcaatgagaatggttc

SEQ ID NO: 16603 - DNA, 232 bp, Glycine max
  Clone ID: 700961367H1
cttgaagagaaaacaaagctcatggaagagcggtggggaaaggcacatggtcttcttgttgagggaggacttacatatgactcataagacaatcagttgctaatgccaacatagctttcagggaaggtgtttgtgaactttttgagtttttggagttgtaattttcaggaaagagatgctcctgtgttgatattctcagcagggcttgctgatatcattgaagaggtcctaa

SEQ ID NO: 16604 - DNA, 231 bp, Glycine max
  Clone ID: 700961368H1
ctgagcccttgtctgtgtttgttgacacttatggcactgggaagatccctgacaaggaaatcctcagcattgtgaaggagagttttgacttcaggcctggcatgatctccatcaaccttgatctcaagaggggtggaaatggcaggttcttgaagactgctgcatatggacactttggcagagatgaccctgacttcacatgggaagtggtgaagccactcaagggggaga

SEQ ID NO: 16605 - DNA, 121 bp, Glycine max
  Clone ID: 700961369H1
cctcgtgcgtgcgtgctccctcgcgtagatcggcaatggcggagaccgagacgtttgctttccaggctgagatcaagcagctcctcagtctcatcagcaacaccgtctactccaacaagga

SEQ ID NO: 16606 - DNA, 234 bp, Glycine max
  Clone ID: 700961370H1
cacttgtattgatgaccaaagaagcaaggcaaagggaaaagttaaagcttctggatttggtctggatgataattctagtaacacagaagagtatttgattggggtgatatctgacatgctaaaggaacttggcaaaggagatagtgtatctacttttgaatttatcggtagtggtgttgttgaagccttgctaaattattgtgcttgtgggtatttctctaaagatcgaatatc

SEQ ID NO: 16607 - DNA, 238 bp, Glycine max
  Clone ID: 700961372H1
gaatttgacaaaaagtagccactgccccaacgatcccatttcccttgacttctctacgtgaagctccttgttttgcataggagctagttgaaatgtccgagggaaatgcagggaaaggaaagaaaatcgccatcattggtgtctcaaccttattgttggtggctatggttgtggcggtcacaattggggtcaatctcaatgagaatggttccaacaatgatatagaggacaacaagaa

SEQ ID NO: 16608 - DNA, 234 bp, Glycine max
  Clone ID: 700961373H1
caagatctaagagagattttgctgctctttgaagaagggtgtttgcttgattttggagatgtcgctgctctcagatctcatcaaccttaacctctcagacactactgagaaggtgatcgcagagtacatatggatcggtggatcaggaatggacctgaggagcaaagcaaggactctcccaggaccagttagcgacccttcaaagcttcccaagtggaactatgatggttccag

SEQ ID NO: 16609 - DNA, 234 bp, Glycine max
  Clone ID: 700961325H1
cttttgactccaaaatttgggagttaacaaaatccaatgctggactgagcttcactaaagatgacttgattgcctcattgactctgaatgacaaaggtgatgctttgaatgctgcatattaccatgtagttaaccccttgaccaacactgctgttggtgctgaagtgacccatagattctcaactaatgagaacactctcacccttggtacccagcatcagttggatccattga

SEQ ID NO: 16610 - DNA, 233 bp, Glycine max
  Clone ID: 700961375H1
agataattgagcatactgaaaaggttttcttcaagaaaaccattgataatttgaggcatgttgcagatatatgttgtaaagagttgaaggatattccatacattatttgcccttataaaccagaagggtccatggctatgatggtgaaactaaacctttcacttctggaggatattagcgatgatattgatttctgtttcaagcttgctaaggcaggaatctgtatcattctc

SEQ ID NO: 16611 - DNA, 233 bp, Glycine max
  Clone ID: 700961376H1
cttggcaagaataaaacaactatatttgaacagcgaatggggaacattgacaatgctgttcctttctttggggatgaatttaacaaaatctatccacttattatggttatatacaccattttagttgcaagcaacttctttgataaagtatttgattttctgggaagttggaagagatatattttcaaaactgaagctgaagatatggatggttttgatccatctggattaat

SEQ ID NO: 16612 - DNA, 109 bp, Glycine max
  Clone ID: 700961277H1
ggtccatgtccagttcaagccatctttggcatgtgccacttggcctctgacacaaaaacttttcttttcggaaccaatcatttgtcatcaaacttccacacaacatacg

SEQ ID NO: 16613 - DNA, 260 bp, Glycine max
  Clone ID: 700961278H1
cctttctctctctgaaaccgtacgttacgtaaccgtaggcgatatcacaaattcacagcacacacagtccccactctctacaatgaccggtcaacgcagctcctacggcaagcgctcccactcgcactccgattccgacgccggctccaaaaacaagcgccgcaaccccgccgccgacgagtcctcctcctccctcatcaccgctgacgacaccgtcttccgctacctctgcccgtccgcaagatcggcagcgtcattgg

SEQ ID NO: 16614 - DNA, 110 bp, Glycine max
  Clone ID: 700961279H1
ggagaattaggtttttagggtttacaccgagcagcgacacctccctcccgcagtagccatggttctcaaaactgaactatgccgattcagtggtgccaagagctaccccg

SEQ ID NO: 16615 - DNA, 257 bp, Glycine max
  Clone ID: 700961281H1
gtttttgtagatagaagccatcagtcatggataggcttctatcatcgtcttcacccccttcttttacatttctcactcgattcgaatctgcaactgcaagattcaatttctctccgtcaacacgttctcactctcacttgaagcggctctcctcaatttgttgccagcatgcaaatccatctcctttttcctcttccactccctttctcgcttcttccaaccaccccattaattttccatccttttcctcttcttca

SEQ ID NO: 16616 - DNA, 256 bp, Glycine max
  Clone ID: 700961282H1
ctataacaaaaccaaaatcccggtggttacttttcgcatcttttcgttttgagctcaccgtggctcttctccattgtcgttttgcttctcccttcttccttcccattcaaaccctaatctgtccctcggatcccaaaattgccccaaattgagaacacgccatggccgcaacgttcgattcggttcgttccctcgcacttctcactcttgcatttgtgtgtagcgtcgcgaattcgatgcggttcgagcttcaatc

SEQ ID NO: 16617 - DNA, 251 bp, Glycine max
  Clone ID: 700961283H1
ggcaacagaaacaaaagtggaagtattaggtggcatcaccgaagtgcagggagctgccaacagcgtcgagatcaacaatctcgctcgctttgctgtagaggaacaaaacaaaagagagaattcagttctggagtttgtgagggtgattagtgcaaagcagcaagtggttgctggagtgaattactacataacattggaagcaaaagatggtgagattaataatgagtatgaagcgaaggtttgggagaggg

SEQ ID NO: 16618 - DNA, 242 bp, Glycine max
  Clone ID: 700961286H1
cacacacctccatttccccaactcgctccgagttgactcactcctttccctttcgagctcaaccgccaccgctacgcctccgcgctccgccgccactgcaacccccgcctcccttctccgtcaatgcaaaattcggcgtccattctcctcggaaccttcttccggtcttccttccccttcgggctttgacttttgtcttcttgcgattgcgatgtgtccctttcgccctttgttgtctcttc

SEQ ID NO: 16619 - DNA, 239 bp, Glycine max
  Clone ID: 700961287H1
tgatagttgggtaggttgtctttcaggtcctggagtaaggtattaataagatttatatggaatgggctagattttctttaacaacttaggtatgatgagatcagggacttgtatttgaggatgctttgttgattgtacaatattaatctttgactcatcaaatataaatttggtgattggaaagtttaaaggactattggaagcaaaaaatctttccagtgatggatttatctttttat

SEQ ID NO: 16620 - DNA, 83 bp, Glycine max
  Clone ID: 700961288H1
tcctcacatgcatgctgtctctgccaaagtgccaagtcacataacatttccattgttaccattctttctttccacacaacata

SEQ ID NO: 16621 - DNA, 213 bp, Glycine max
  Clone ID: 700961289H1
agggtcctcactcctcaatttagtccactggcatttccttttctcttgcctttccgataaccactttcaagtttcaagtgcagcttttctacattgcaaccccctcgacaaaacaaaaccatcaaaatcctcaggttgtgagtgagaaactgagaataatggtttctggatggagaaggacgtttcgcacatctaataccattccacacaaca

SEQ ID NO: 16622 - DNA, 93 bp, Glycine max
  Clone ID: 700961290H1
gtcatgataaaacaccaccaccagagtacttagataatataacccctttctcacaaacaccacttacggaagcaacgacagacactagctatt

SEQ ID NO: 16623 - DNA, 256 bp, Glycine max
  Clone ID: 700961293H1
agcaaacactcttctgagttctgagctagcgaggttgcaatggcgattatctccgatttcaacgaagaggagcagaaacccactcactcttcaccaccgcaaccccaatcctcttcctcttcctcttcctcttcgttcagtgctgcttttgaccggtcaaaccctatcgcttttctggagagagtcttccagttcgtctccgaacacagcgactttctggcgacggagagcgccgagaaggagatagcgttgctgg

SEQ ID NO: 16624 - DNA, 249 bp, Glycine max
  Clone ID: 700961301H1
aaaaaagtgattctgctcacagtcgtttcggggtagcattcttgcgcactcagttattctctctctctctctagagcgtcgtcgtttagttagggcagaaaaccccttttcggatcggtggagcgaacctcgccggcgagacccccgaggctgttcaatcggcgatcgagcaacggcgaaaagcgacgaagatgaaggttttcgtgaagactctcaagggcacgcacttcgaaattgaagtgaaccctt

SEQ ID NO: 16625 - DNA, 243 bp, Glycine max
  Clone ID: 700961302H1
gggagaagtttgttccccaaaattgataattctaacataaatagagcagaatctcaacaagacaacaatattgatggcttgaaggctgaatgggtagaacaatacgagctcggtgtttacatcacatttacaactttgccatgcgggaaaaaaggccttaagcgagtgagatttagtcgaaagcgattctcagagaaggaagctgaaaaatggtgggaagagaatcaagtgacggtgtatcac

SEQ ID NO: 16626 - DNA, 244 bp, Glycine max
  Clone ID: 700961303H1
tcgcctcttccttcatcagctatcttcatctgcttctgtcacatcaagcattctcataccgcttctcagtttctcattttcccaatcgcagctaaaaaatcctttgagccctttaacctattctcaataagcagaaattagggaacgcaacaatggctcaagcggttgaagaatggtataagcagatgcctgtcatcacgcgctcttatctcaccgctgctgttgtcaccaccatcggatgttc

SEQ ID NO: 16627 - DNA, 243 bp, Glycine max
  Clone ID: 700961305H1
attccttctcatcttctttttcttccctttaaaattattattccgtgcaaacacaacaacaacttcatcaccaacacgaagaacaagattagcgttatgggtctcttcctttctaggaatttggcttgcaaattcatatacccttttcttttttccaataaggtttcaaaggatttgttccccaagcagttggagaacatgatgtctctggtctctcctcgtactggcaggcatttgcagcgc

SEQ ID NO: 16628 - DNA, 108 bp, Glycine max
  Clone ID: 700961306H1
caatgccgaagtctcaatttcgaaccccatttctggtttctcttccccttttgttattcatcttcaacctcaccccttcgcacgcactctatggagcatcctcacccg

SEQ ID NO: 16629 - DNA, 247 bp, Glycine max
  Clone ID: 700961308H1
ctattctggtgctggatttggatctaagagcaaatatatgtttgggaaagtgaccatccagctcaagcttgtggagggtgactctgctggaactgtcactgctttctatatgtcatcagacggcccaactcacaacgaatttgatttcgagtttttgggcaacaccactggtgaaccttactcagtccaaaccaacgtgtatgtgaatggcgttggcaacagggagcaaagactcaacctctggttc

SEQ ID NO: 16630 - DNA, 245 bp, Glycine max
  Clone ID: 700961309H1
cgaacctcaaacccaaaatccgaacctccgcttcggatcctaatccagtaatccctgatgggaacggaatgctacacttacatggggcgcagtttgagcgaactccgcatcaacgacgattcctcttcctccgccttcagcgactgcaacagtgacagatctggcgaattcgccaccgcttcttcgcaaacgcggcggtttctcatcgcctgcgccaccgaaaattccgacgacttgatccgcca

SEQ ID NO: 16631 - DNA, 242 bp, Glycine max
  Clone ID: 700961312H1
aagcgataagcaatagaatcagagagagagagaaagagagtctcttgctctgtatctttgatttgatcattccaatcttcaatttttctatatatccatcaatccgctgagtgcaaagttctaatctttcgcctattgggttctactcctttctctcttcgtttccgatcgatccaattttcttcccatggctacgatcggacacaacaatctcaatgccaaattggttcttctcggggaca

SEQ ID NO: 16632 - DNA, 240 bp, Glycine max
  unsure (1)..(240): unsure at all n locations
  Clone ID: 700961313H1
ctcaaaactacaataatgggttcttcttctcctccggacactagcaagaccccaaagctagaccgatacaacagctanatcaggagactcaacagcaccaaactcctcaacgcctcctctaaactcctcttccgtgccactatcttagtcgcactcatcctcgtcttcctcttcaccttcaactaccctccgctcgccccagacttcatctcccaccgccaactccactcccactcccac

SEQ ID NO: 16633 - DNA, 229 bp, Glycine max
  Clone ID: 700961314H1
tgaactcagtttgacaactggaaatgctggtggaagattagcatgtggtaccaaaaaaaaaaatttaaattcgatcagttctcttcttttcatattcacctattcatccattccaacatgatgttatttggtttactctttgcctcaatgttctaagatgaactattttctataacatcatgatcaatttccgttttatgataaaaaaaagtacaacgatttccacaca

SEQ ID NO: 16634 - DNA, 245 bp, Glycine max
  Clone ID: 700961315H1
ctcgagcgtatcggctcatggtaggtactctttggaaatgactgctgttatttacacggactgggttttcactgatcaagcattgcctaatgatcttgtcaagagaggagttgcggttaaggatccatctgctccccatggagttcggcttttgattgaggactatccttatgcttctgatgggctagagatatgggatgccatcaagtcctgggtgcatgaatatgtctcattctactacaagt

SEQ ID NO: 16635 - DNA, 245 bp, Glycine max
  Clone ID: 700961317H1
gcacccttctacatttccgtcaaagagaaccttccagaacctcacttcaatggcgagcgtgttgagcctaagaatcccagaggtgtccttcacgggaagggtttggaggatgtcattcagtttttcaatagtggaagctataaccctagttataacacctctcttgaaggtcgtcggaagttgtttgctattactaaggaggaggtgttgttgttgaacaagcgaatgcccgacttggcaattgc

SEQ ID NO: 16636 - DNA, 242 bp, Glycine max
  Clone ID: 700961318H1
ggattttctttgggaaaagctgagtctgatcgactcaacctcaacctgcttcctgcattgctctctccaaatttctagggtttggttcagagagagaggaacctaaaatgtctcaaaacgggaagctgatgccaaatctagaccagcacagcaccaagcttctcaatctcactgttctccaacgaatcgaccccttcgttgaagaaatctcatcaccgccgcacatgtcaccttctacgagt

SEQ ID NO: 16637 - DNA, 238 bp, Glycine max
  Clone ID: 700961320H1
accaccgccgccgcagagagaacaacaacaacaacacgttccattctcgaggagagactggttgggttcgatggagaaggagttggtggaattgtacgaagcggcgaagaaggcggcggatgctgccatctccggcgacggcaaacatgaggaaagccgatgcatcgatgcgctcgagcagctcaagaagtttcccgttaattacaagattctcgtcaacacccaggtgggtaaacat

SEQ ID NO: 16638 - DNA, 119 bp, Glycine max
  Clone ID: 700961321H1
gtaaactcgtaattcttctcgagcatcatcaatgcatcaacatgtccatgacatttaaaacaactcatttattactatcactctcaacctaatccacctcaactctcttcttactctct

SEQ ID NO: 16639 - DNA, 240 bp, Glycine max
  Clone ID: 700961322H1
gtttagtttcgaaccctttccttttccttccttctccgcctcaccaccctaacccaagcctcgctctttctctctccaaaatctctctccctcccaccgttatttagggtttggcagatctcgatccgtcacaatggtcgttcgcaagcgcggtaggcccgacgtcaaccttaacggcgccgttcagaagaccaagcaagaattggagtccttatcaagtggtgtaggaagcaaatcgaa

SEQ ID NO: 16640 - DNA, 109 bp, Glycine max
  Clone ID: 700961323H1
ctgaaaactaaggggaaaaaaactcaactttgaaattcttaaaaccctaactggtccgaaccattggagccaccgtgcaatagttcctcctctcactctctcccgcaac

SEQ ID NO: 16641 - DNA, 246 bp, Glycine max
  Clone ID: 700961274H1
gtatgcttatgctttcgtttttaaatcatgagtggtgtggattggactgttgttgattctgaaaacacataaggaaatcctgttgtaactctggagctgaaggatggtccttatagttgtactgtgtgggatttcagcttccatgctttattcaaggtcacactaaatgctaaaagtctagcgactgagttaacagttaaaaatacagacaataaagcattctcatttagtaccaccttccacaca

SEQ ID NO: 16642 - DNA, 259 bp, Glycine max
  Clone ID: 700961226H1
gtcgctccgcaccagtttcaccgcacgaatatcttattgtttggagcgatccgagaaaaactctgtaaacatgttggtttaccaggacctccttacaggtgatgagcctctctctgactccttccgttacaaggaaattgagaatggaatgctgtgggaagttgaggggaagtgggttgttaaaggagcagttgatgtagacattggtgcaaacccttctgctgagggtggaggagaagatgagggagttgatgatgca

SEQ ID NO: 16643 - DNA, 254 bp, Glycine max
  Clone ID: 700961229H1
aatctttgttctttcttgttccattttcccaaacttccctcactctctgtttgctttctcaattttggaaaatgataacgtcgatagtggttaggaaggccgccggaaagcttgaaaatttgccagccgaggcgcccaaaacattgatggacacagttcttacgttagcagaagccataaggttcggttacgccgagacactgggcaaatggcacctcttggacttgccaagagccatcctttactctgtcatg

SEQ ID NO: 16644 - DNA, 264 bp, Glycine max
  Clone ID: 700961230H1
atttttctcactgtcttgtctctccagagaactgtatagacagagatggcagctgcaacatctggtgctgtgttaaatgggttgggatcttccttcttgagtggaggaaacaggagccaaacccttctggccactgctattggaggcaaagttggtgctgctgctgttactgttagtcctagaagactcattgtggtagctgctgctgcaccaaagaagtcatggctccctggtgtcagaggtggtggcaacctcgtcgaccca

SEQ ID NO: 16645 - DNA, 268 bp, Glycine max
  Clone ID: 700961231H1
cttcttctcttttcacgtcattatcctaaacttgcagattttcacatcccaagcaacatgaaggggaggttcatgtttctgtcggtgctcctttgtgccacctttcatgtctccttctccattactgacggcttagtagcaaacggcaacttcgagctgggtccgaagccctccgccctgaaagagaactgtggtgattggtggcagccactcgatcccagaatgggagatctctggcttcgtggagtacataaagtccggccagaag

SEQ ID NO: 16646 - DNA, 269 bp, Glycine max
  Clone ID: 700961232H1
aaaggcttatggtggatcacctaggcacccagagacgaggaagggcgtagtaagcgacgaaatgcttcggggagttgaaaataagcgtagatccggggattcccgatataggtcaacctttcgaactgctgctgaatccacgggcaggcaagagacaacctggtgaactgaaacatcttagtagccagaggaaaagaaagcaaaagcgattcccgtagtagcggcgagcgaaatgggagcagctaaaccgtgaaaacggggttgtggga

SEQ ID NO: 16647 - DNA, 264 bp, Glycine max
  Clone ID: 700961233H1
ctccaatcctttcgttattctcttattcatccttctcttctgaataatccagatctctttctgcccttttctccgtcacgcttttcgtgcccggatctgtatggatttgatcctgatctactcgccgatggtggctttggccgtgtctgtcatagatctggttcgtagaggctcagatctacggtaccgaggtgtgtgattcatgtgcgtcttgctttcggaatctgtttcgtagatagtcgtttggtcttgcatatggcatgg

SEQ ID NO: 16648 - DNA, 262 bp, Glycine max
  Clone ID: 700961234H1
gacaaatagtctaaaccatattaatcttaacccttatgcaaatcatgttttagtttttattaatttggctacagataagaatttttatctatatttagtcggaacctaaatcagggtaaataagtactattatactaatcactgtcattggctgtatttctggtaaaatgttcttccactccgtcttggttttgttgaacgtgaacttaagatgtgttggagcatatccgagtaattaaagtaagaaaaagtggcagaagtg

SEQ ID NO: 16649 - DNA, 264 bp, Glycine max
  Clone ID: 700961239H1
gctcttcatcaatgaactccaatggttaccctgcttcctccttcaaaatccccaccgtcaagttcaccaagctcttcatcaatggacattttgttgattcactttcaggagtagaatttgagacaatagacccaagaaccggagaggtgattgcaaggattgcagagggaaccaaagaagacattgaccttgccgtcaaagcgtctcgtctggctttcgaccatggtccatggcctcgtatgcctgccgtagaaagagcaagaa

SEQ ID NO: 16650 - DNA, 261 bp, Glycine max
  Clone ID: 700961240H1
caagcttggtggaaagaacttgtagaggtgggtcatggggatttgaaggataagccatggtggcaaaagatgcaaactcgtgaagagttggttgaagcttccgctaccctcatatggattgcttcagctcttcatgctgctgttaactttggacagtatccatatggaggtttaatcctgaataggccaactattagcaggagattcatgcctgagaaagggtctcctgaatatgatgcgttagctaagaaccctgagaag

SEQ ID NO: 16651 - DNA, 96 bp, Glycine max
  Clone ID: 700961242H1
gaactctgggacctgttaaaatggagcctcagcattctgatcaaccattatttttgcagcagcggcaacaacagcaacagcaacagtttctccaca

SEQ ID NO: 16652 - DNA, 260 bp, Glycine max
  Clone ID: 700961245H1
acaaacttttggttggaaacaagagtgatctgacagcaaatagagttgtctcatatgacacagctaaggaattcgcagatcaaattggcatacctttcatggaaacaagtgcaaaatatgctacaaatgtggaagatgctttcatggccatgtctgctgccatcaagaatagaatggctagtcagccttcagcaaacaatgcaaggcctccaacagtgcagatcagagggcaacctgttggacaaaaaagtggttgctgc

SEQ ID NO: 16653 - DNA, 265 bp, Glycine max
  Clone ID: 700961247H1
cacattcaaatccaaatggccctttacattacactaatatttgggcctcctagtagacactctagtactctataaatagcatttgcatgcaccttagtcttcaccaaaatactcctcttggcatcttgtgttgtgtccctcttttaagctatgtccttctcttaacacaattggttgtgccattgcatggttggccgaaccaattaacaaaggtatatatatcatcatatcatcaccaaatgagaaatattgggttgttgtgtct

SEQ ID NO: 16654 - DNA, 269 bp, Glycine max
  Clone ID: 700961248H1
agatgaagcttctattctatcactgcagatattgatgagaaagttcccatcccaattcggtggtttatcgcgttaagcaaaaaacccaatcaaaattctaagtctctttgtttacgttgttcgtttccctcattgctttgttctcttctctcttctctctcacattcaacttcaaaggcgtagagtgagatccgaacgatgaagagagtattcggcgtcaagaagaacaaggatcctcctccttccattcaggatgcttccgataggat

SEQ ID NO: 16655 - DNA, 260 bp, Glycine max
  Clone ID: 700961251H1
atcttcttctcttttcacgtcattatcctaaacttgcagattttcacatcccaagcaacatgaaggggaggttcatgtttctgtcggtgctcctttgtgccacctttcatgtctccttctccattactgacggcttagtagcaaacggcaacttcgagctgggtccgaagccctccgccctgaaaggaactgtggtgattggtggcagccactcgatcccagaatgggagatctctggcttcgtttagtacataaagtcc

SEQ ID NO: 16656 - DNA, 262 bp, Glycine max
  Clone ID: 700961253H1
gacagaacaaagggctgcagaaagaaagaagaaacttgatgaatagttcaatgctaatgaagcacaaaaagtgcagctgcataccaaactcaaggagaaatctgagaccgagattattagttaactacgccaaagcttgtgcttcaaagccaggccactgcctgatttttacaaggaaaggaaaacatcaacgaatgagacaaaaaaggatccactgacacattgtgaaacacctagagaccgtaggaaatccaccccgagt

SEQ ID NO: 16657 - DNA, 260 bp, Glycine max
  Clone ID: 700961256H1
cacctctctctcatcgcagtttcaagaatccataaaacacacaaaaactcagggtagggcagagagagagagagaaatgggaggttgggctatcgcggtgcatggtggcgctggtgtggaccctaatcttccactcgagcgtcaacacgaagcgaaacaacttctcacgcactgtctcaatcttggaatctctgctctaaattctaatcttcccgccatagatgtcgttgaacttgtgatgtgacaagtgtttgtgacag

SEQ ID NO: 16658 - DNA, 262 bp, Glycine max
  unsure (1)..(262): unsure at all n locations
  Clone ID: 700961257H1
ggcaagaactttgcagcataccagcatgagcatgaagctcttccagctcttctccctactcccattcttcctctacttctacacaatagaagcaatagttggcccattgcaactgacacacccactggaccccttaactcagcaagaaatcaccctcgtcaaaaccatagtcctaaaaaagtacccaggnccagccaaccgcgtcttcttccactacgtcggcctcgacgatcctgacaaggccgccgtcctcaaatggctc

SEQ ID NO: 16659 - DNA, 112 bp, Glycine max
  Clone ID: 700961258H1
ctttttctcccattcatttatctggattgtgtttttgcctccattcagtcctctggcttgagctgacactctcttttgcattcagcatattatcgtaacctgttccacacaa

SEQ ID NO: 16660 - DNA, 255 bp, Glycine max
  Clone ID: 700961259H1
gacgaggtcctggtgagaaaatctctctacaccgtaatcgctatttggcatcgctgcaacaatctgcgatactctttcctctctccgcttcgaatttcttctcacactctctgcttcgccgcaaacagtgactcacttaacaacttttcgaagcattgagtagtagtgattgggtggtaacaaagagagagagagagagaaaatgatgaaccagaacccgcaatcgagtgaaggaaggaactatgacgattctgc

SEQ ID NO: 16661 - DNA, 257 bp, Glycine max
  Clone ID: 700961260H1
tctcgagccgaatcggctcgagaagaaagacaaagcattccatagcctcccataaaaatgaacaatactatcttctctgctctctttctactttgtgccttcaccacctcatacctatcttcaaccaccgcggtggtcgataccgacggtgatattcttcagaatcctggcacatactttatcttgtccgtttttcgacccggcggcggataagaattcgccgccactggaaacgaaacttgccctctcactgtcgt

SEQ ID NO: 16662 - DNA, 263 bp, Glycine max
  Clone ID: 700961261H1
tagcactctctctttctctctctctacgcttcacttttccgtaataaacccttcaaaagcgaaacaggtttctcgtttttggaccttatctctctttctaaggttcgatttctgcgtactttgggaggaacagacacacatgaaggattcgaattcggatctgtttgacccggtcatggcgatggagtccgagtggtctcgcggcggcaccacctccgatgccgatttcgccttcgccttcaacgacagcaacttctccgaca

SEQ ID NO: 16663 - DNA, 164 bp, Glycine max
  Clone ID: 700961263H1
caatatcgtctagctagctagctagctagcaagtagcaatgttaaaggaccaaccacaaccagattggtcctgagcccattggtccgggttgcagtccttgatccgaagaactgtcgaagagttccaatccctgaatcggtcacatgcagagccttgctagcta

SEQ ID NO: 16664 - DNA, 258 bp, Glycine max
  Clone ID: 700961268H1
tcagaaacacaggcgagtgcaggtatcagaattggataagagaggggtagaagcaaaaattatataagcttttgtgctatcaaatagcaacaactatagcgcatagatcgttttgcagttttgtgtcatgatgatggattctgaaggattggagattgggattgaagagttgaaattgaaggaagagaagggtaatgcacatgcacagccatctggtcaattgcagatcactaccgtttctgaactcgtcaatgatgt

SEQ ID NO: 16665 - DNA, 216 bp, Glycine max
  Clone ID: 700961271H1
tggagactcatttggttttgttgcttgctttgatcttcactgtagttgccggcgttggagcccaaggcccatccacctctcccgcgcctcccacaccccagtcttcgcgagctcccatccagtcttctccgccacctgttccttcctcacctcctccggctcagtctccaccaccagcttccactcccccaccagccccctgcagctctcctcccc

SEQ ID NO: 16666 - DNA, 192 bp, Glycine max
  Clone ID: 700961272H1
aaaattgagaaactcattagtgaattgttaaaaaaaacgaaaactcgacctggcacccaattttgagaaagtgggttcataatatctgtgttgtctggctccatttgcccttccatttgcttgctggtcctgtatcaacaggaagctggtgtaagagaagagggagaaggattaggtactgtctctctcttt

SEQ ID NO: 16667 - DNA, 265 bp, Glycine max
  Clone ID: 700961225H1
caaaccaaaaccactcactcttctcattttttctgttgcataccaaatggaataagtttagattatgtccaattgttcatagcgttgaacaaaacaaacacgcagcaaaatgagcacacccttgttccatgaattcaaaaggcaagcttctttcttcttcaaggagaaaatcaagactgctagattagcactaacagatgtcacccctgcagaactgatgacagaagaggcaacaagtggaaatccatgggccccagatgccaga

SEQ ID NO: 16668 - DNA, 83 bp, Glycine max
  Clone ID: 700961182H1
catgttcatgggcttttcaatggtttaatggcccctctctatgcaggttccacagaagatacgacgcataaatttagtgtgag

SEQ ID NO: 16669 - DNA, 231 bp, Glycine max
  Clone ID: 700961183H1
caagcctgaaccatcttttgagattctgactaatcctgcaagggtggttcctgcacaggagaagtgtattaaatttttgcaggatagcagatatgttccggttaagttggcaccatcaggatttgtgcttctcagagacttgcatcctactgagccagaagtgcttgctctaactgacacgccctcatctaccagttctgctgctggtgggtcagcaacaggatgcagagt

SEQ ID NO: 16670 - DNA, 241 bp, Glycine max
  Clone ID: 700961185H1
ctcagctgtgatcatcgtgttatagatggtgcaattggtgccgaatggttaaaagcattcaaaggctatattgaaaatccagagaccatgttgttgtaagaataaatagaaggctcccatgacgtactaaattcctttcaagtcattctaggcaggggatgagattttgttacacctgggtatttctgtttgggcccattatgggttttgttagattgtatccctgaacagatttttgatg

SEQ ID NO: 16671 - DNA, 231 bp, Glycine max
  Clone ID: 700961187H1
tgtacgaagcgcggtgacgaacaggaagcgcacagcggggacgacgccgtttcggagaatgacagaaagcggaagaatatggtggcacgcaacatggacccggctgaggcgttggccttgacgcggcacgagttcggggagcacggtggcgtaaacatgtcgatcgaggcctcggcgacgttcacggtgatggagccggagaccctcggtcgcatgttcgccggcgagctg

SEQ ID NO: 16672 - DNA, 229 bp, Glycine max
  Clone ID: 700961188H1
cgagagtggtttcagtgagtgatcggtgttcacttgatccttcataagtcgtcatcatcatcatgatcatcaccgttgattgaagaagatgccgatcagaaacatcgccatcggaaggcctgaagaggctactcaccccgacacgttgaaggcggggttggctgagttcatctccgccttgatcttcgtgttcgccggttcaggttccggcatcgcctaaagaagctca

SEQ ID NO: 16673 - DNA, 230 bp, Glycine max
  Clone ID: 700961189H1
agttctagatcgcgagcggccgcccgcgatctagaactcattgatattgcatgttataaacccgatgacgaactcaaggtgtcaagggagcagttacatggaggtggcaaggaaatcaggcaagttcgacgaagcaagtctagagttccagaagaggatgctaatgtcctccggaatcggcgatgaaacctatataccgaaggccgtcatcgcctccacgagaacaccgc

SEQ ID NO: 16674 - DNA, 226 bp, Glycine max
  Clone ID: 700961190H1
ctctgagttctccacaggatcaggaaccgaagcgttggaatgggagaatatgatgataatggcgatgaatcgaatttccatttcctgatgtgaggaacaaagcatcaacaccttggctaggttcttgtagggtttgttgagaatcttatagtttttttttttctttctcgaattcttcttcgcttgatcgggaattggaattgtgagttagatcaggaaataagag

SEQ ID NO: 16675 - DNA, 224 bp, Glycine max
  Clone ID: 700961192H1
attttatatgtatatggggacagctgagtgcactgctattgatgcttttaagcatgctggggaaaatatggtgtttgcaagtggaagccctttcgaaaacgtagatcttggtaatggaattgtgggtcatgtaaatcaagcaaacaacatgtacctcttcccaggaattggtttgggaacccttctgtcaggtgctcaccttataacagatggatgttgcaggc

SEQ ID NO: 16676 - DNA, 229 bp, Glycine max
  Clone ID: 700961193H1
tggaccttcagttgatgaagtcaccactgaatcctcattgttttctctgcatgccaggagcagtgtgccatctcaaccgcttgtttctggacttagggtgagtactgctgagccagtcaacttctcttggcttccttccagtggcaacacctattctgctgtcacaatatcttcaattatgcctgatagaggggatcatcccttttcaattgttgcccaaatgggccac

SEQ ID NO: 16677 - DNA, 228 bp, Glycine max
  Clone ID: 700961194H1
ccttcaatggtttggtcacagttagttctttcatattcttcctcttggtcctttcttgggcttatttatatgcaattcccagttctcaatcattgattcggagtcatgagattcccaacaacagttctgactcatttgttcagagtcatgagattcccaacaacagttctgactcatttgttcagagtcatgagattcccaacaacagttctgacacattgttcagag

SEQ ID NO: 16678 - DNA, 231 bp, Glycine max
  Clone ID: 700961195H1
acagctgtgatcatcgtgttatagatggtgcaattggtgccgaatggttaaaagcattcaaaggctatattgaaaatccagagaccatgttgttgtaagaataaatagaaggctcccatgacgtactaaattcctttcaagtcattctaggcaggggatgagattttgttcacctgggtatttctgtttggcccatttgggttttgttgattgtatcccgaacaatttttg

SEQ ID NO: 16679 - DNA, 238 bp, Glycine max
  Clone ID: 700961196H1
gcagcagtggttcaggcttgccatgatatggttcctcctgatgcagttgaacccttgttcaaacaaatagtaaatcaatttgtacatgaccgttcacgtccagaggctattactgttggaataaatgcagtcagggagatatgcatgcgcatgccattgttaatgaatgaagacttgctacaagaccttgcgctatataagaagtcacgtgagaaggcagtttcaatagcagctcgat

SEQ ID NO: 16680 - DNA, 274 bp, Glycine max
  Clone ID: 700961201H1
gtttaaacctaattctcatttcttcatcgttcgattcttctcctcctaaagatgcagatcttcgtgaaaactttgaccggtaagaccatcacccttgaggtggagtcctccgacaccatcgataacgtgaaagctaagattcaagacaaggaagggatcccacctgaccagcagagacttatctttgcgggtaaacagcttgaggatggtcgaacccttgccgactacaacatccaaaaggaatccactctccacctcgtgcttcgcctcaggg

SEQ ID NO: 16681 - DNA, 271 bp, Glycine max
  Clone ID: 700961202H1
tcgagctcctgaaatgagcttagccacagtgcgagcttatatatggaagaaatcagatgacttggttctaaattacagactagttcaaggcagttgactacaaattgcatatgcatcagaggtgggcggtatttcttttttaactgatgtgaatgttgataaaagtgatcataggttattaataatttattctctttcagattggaggaaagtgagctttaaccatgtcagaatggtcattattggtatcacaagtaacttttgaatgatt

SEQ ID NO: 16682 - DNA, 269 bp, Glycine max
  Clone ID: 700961203H1
cacctactcaatcacgtttcttcctccctccattgaggcgagcaacagaggtcatatatcaccaactgtactggcaatggagaaaggaagtatggagaacaatgagaaacatgtgacagagaatgatcctaagattgactacagaggatggaaggccatgccctttatcataggaaatgaaacttttgagaaattgggagccattggcaccttagccaatctcttagtctatctcactactgtattcaacctgaagaacatcacagcca

SEQ ID NO: 16683 - DNA, 264 bp, Glycine max
  Clone ID: 700961205H1
ctagcattgattcttcgtccagacttccctgaagcaacttgcaatctccttcatacataccagtgtgtatgctgttgggaggatcgtgataaaatgttcaaggaagttgaagcgataatcaggaggcagattaatatgtccgttattcctagtgtccagccattccatgcaatagcatatccacttgacccaatgcttgctctggaaattagccgtaaatatgctgcacactgctcggtaattgcatctcgtttttctcttcct

SEQ ID NO: 16684 - DNA, 266 bp, Glycine max
  Clone ID: 700961207H1
atcgttgttgttctaaagcactcatccacacattctccgtcgccacgacaacaatggctccaaagaaaggtgcgaaaggtggagttgtagcagcaaagaagaaggttcaggagaaggtaacgaaccctttgttcgagaagcgtccgaagcagttcgggatcggaggcgcgctgccgccgaagcgggacctgacgcgcttcgtgaagtggccgaagaacgtccaaatccaacgcaagaagcgcatcctcaagcagaggctcaaggtc

SEQ ID NO: 16685 - DNA, 270 bp, Glycine max
  Clone ID: 700961208H1
cacaaacaccacgccactgttactttctcttctctcctccactcactttcacttcatggcgacggtgctagcgccaccgtccctctccgtgcgcgcttcctctagccgccggcataggaagaagcagcagcagaagcgagcatggggagacttcagccacttggctcaggtggttcgcaaggacatggaatgcctcaagagacgaatcgataacggcgttgcgtgggccaacgagaccttccgcattctcgaggctgccaagaaaatcga

SEQ ID NO: 16686 - DNA, 235 bp, Glycine max
  Clone ID: 700961209H1
ctgaacaaaacgacgacgtcgttttgtgggacgaggagtttcacgcactctgcatcctcaacgcgtacaaagacaatgcctttcacccctgggaaatcgctttctctctcttcaacggcttgaatcaaaggtcaaagactaaggttcctgtggttggaactgcgactttgaatctagctgaatttgcatctgtggttgatcaaaaggattttgatttgaacattccacacaacat

SEQ ID NO: 16687 - DNA, 269 bp, Glycine max
  Clone ID: 700961210H1
cgaaacaatttcatcaagcctgccatggcttcctcgtgtgcttcctctgccattgcagctgttgccatctccacaccaagttcccagaagaatggatcactcttgggaagcacaaaagcttcttttcttagtgggaggaaactgaaggtgaacagttttacagcaccagttggagcacgatccagcactacagtgtgtgcagttgctgagcctgataggcctctgtggttcccaggcagcacccctcctccatggctagatggcagttt

SEQ ID NO: 16688 - DNA, 264 bp, Glycine max
  Clone ID: 700961211H1
ctaaaaaatgatgtaatcattgcaaagagcctgccagaaagtatgatggaaaggagaagaagaaatgaatttcctacatttaagcccacaagttcagcttctctaaacttttacattaaagaaattttaccaaagctaaagaaatcaaaggttatcggattaattattgccaatggtggagctctgcagtcaatactcccacctagcatggctgagattcagaggctaagatgcagggttgctttccatgccctgcaatttcgt

SEQ ID NO: 16689 - DNA, 271 bp, Glycine max
  Clone ID: 700961216H1
gagaaatgcattggagtaccgatgtgtaccatgcatcagaatttagatatagtaatgtccatatcttaccaaaaacaagtcatttatggattttatcaggaaaatcatacaggtccggttcagtctctttttcaatccgaaaagatcaagatcaaatgaacattcattatctttctactggagaaagagatttttgtaaccttttagcaagtaaaaaaaaagtaagacataaattgtttcgtttcaatccttctgataaaaaagaaagaag

SEQ ID NO: 16690 - DNA, 261 bp, Glycine max
  Clone ID: 700961217H1
aaagtgtaataaaggacgaaagttaggctattctttcaaccgtaagtgtgacttggtagccacttctctgaaataacatatgttactttgtcattttccaaaagggagtagctggtggtgccggagagaaacccattccacttggtgagaacgttctgcagaagcatgctgcattctttgacttgaataaagatggtgtcatctacccatgggagacttttaaagggttccgtgatatcgggactggggttttgctgtccg

SEQ ID NO: 16691 - DNA, 263 bp, Glycine max
  Clone ID: 700961222H1
gaaagctctggatacatggcttggggtgatagtgctaattcaagttcttctttagttaattggggtccttcctgcaagagaaaggctcttgaaggtagttctaggcaactgtgttcttgaggaagctcaagcactcttgtacaatccgcaaatggttgctggcctactgatcctgttgatcttaatgcttccagcgacttaaatgattctacacctatagaagatcttcgtgttactagtcctccattatttcagaatgcgac

SEQ ID NO: 16692 - DNA, 268 bp, Glycine max
  Clone ID: 700961224H1
cttcactctgcccgctgcatgaatggcttcagagaagaaactttcgaacccaatgagggagataaaagtgcagaagctcgtcctcaatatctctgttggcgagagtggagatcgtctcaccagagcctccaaggtgttggaacaacttagtggccaaaccccagtgttttccaaagcaaggtacactgttcgttcctttgggattagaagaaatgagaagattgcatgctatgtcactgtcagaggtgacaaggcaatgcaacttttt

SEQ ID NO: 16693 - DNA, 237 bp, Glycine max
  Clone ID: 700961180H1
aacaatagtatcttttcgcttcaaatttcatttagatccaaaatttctgaatcagtgaagaatcttagattctgtgggaaaagcttctcaatctttgacgaagataaacaacaatgtcttcacttgcggctgctagagcagacaacttttactatcccccagaatgggaaccgaatcagggttcgctgaacaagtttcatggtcaacatgccttgcgagagagggcgagaaaattag

SEQ ID NO: 16694 - DNA, 229 bp, Glycine max
  Clone ID: 700961138H1
ttcttttctctctctctctctcgtgttctgagctgctagaagcaatggagaggaaaagaagccatgcttctttcaccatgtttgcaatgcttgttggattgctctctcagagccttgtcattcctgtaatatccaccactgttgcagatcagaagaactactacaccccagatccacatgctggaagtccctccacaggtttctccgattctctgtgctcacacaatag

SEQ ID NO: 16695 - DNA, 236 bp, Glycine max
  Clone ID: 700961140H1
gataattatatcaccacactttgtccacattctcattctcctcactcccatcatcttttccaatggcctccaacggcgacgcgttcatccccacccttccaaaaagatcaaactcttcagcaattccattaactcaactaattcctcgtttatcacccatgccgagatcgaatcggaattctcccaccaccaccccacggtggcgcgcctcaacaacggcgccttcgggtgctgcc

SEQ ID NO: 16696 - DNA, 237 bp, Glycine max
  Clone ID: 700961141H1
ttcatattcatcaaactcatcaaaatgaatctgtaccactcctccaccaccaccaccaccaccaccatcttcaccgtcatattcctcctccttgcaatattattcactctcacaccccacaaggccaacggtgccacgtgtcaccctgaggaagaagcgggcctgttgggcttcaaatccggtatccgatccgacccgtccggcctgctcagtaactggatatcgggtacggactgc

SEQ ID NO: 16697 - DNA, 229 bp, Glycine max
  Clone ID: 700961142H1
gaaaattggtggaaagtagcatcatcaaggagggcttacttgtagaggttttcaaagatgaggaagggtttaaagctgcatggttctcagccaatattttgactttgagggatgataaagcttatgtaggctacacttcacttgtagctgctgaaggtgcagggccattaaaggaatgggtttcacttgtatgtgatggagacaaacaccccagaatacgtctgctgtc

SEQ ID NO: 16698 - DNA, 233 bp, Glycine max
  Clone ID: 700961143H1
attgagaactccacgagatcctttcttttcctcagccaaagcacaaaaccaaaacagaaaccttttgatataatttctgttattcacttccttttagacaccacactaatccagattagacattgtacaaatgggttctctgttgttcttgcttttggttattgttcttccattgtgttattgtgttgatgctgcttgctctaatggaaactgcaaggtaaatgatgagtgct

SEQ ID NO: 16699 - DNA, 232 bp, Glycine max
  Clone ID: 700961145H1
gcacaatattatgagattgcagtagcagtgtttgctttgctcaagtctcagcgatatgatggcagacccagcaagtttcatagcaagctggttaactccttcttacctcttcatcttggtcaacctcgtcataggcaccatagccatcacttctcgcttcagttccacgcccaaaaaccaacaagcccaccacccccaaccactcagctccttcaataccatcatcaccaac

SEQ ID NO: 16700 - DNA, 240 bp, Glycine max
  Clone ID: 700961148H1
ctttgtgatcctgggaaactcatttcattagagtgagagagacgagagagagagagagagaggtatcacagtgaaacacagaagccctaactacgcacgcactcattcttgagaaagctcaatattcattcgtccatggcactctcttctcgtctcttttccaaatccaaattgatctatggctgtcaaatacttctgcaaaaggagcatgctattccagttcgtcacttgctaaagagt

SEQ ID NO: 16701 - DNA, 241 bp, Glycine max
  Clone ID: 700961150H1
cacaaacaaacctctctccctctcgattttaacaaccaactgccaaataattaataatacaataacctaaataaaccgaactctggttaatcattgtgacacgttattttaatttttggtagaaagtaaacaacaaaaaattaaatttgattgttgcttattaaagagagggggagggagacaagatacaccaaagtcgtcgctcatggaagacttactcggccttttaggattcacatca

SEQ ID NO: 16702 - DNA, 53 bp, Glycine max
  Clone ID: 700961151H1
caaaatgaatgacattatattgtgtcttaatccgtgtatcatttggccagtgt

SEQ ID NO: 16703 - DNA, 235 bp, Glycine max
  unsure (1)..(235): unsure at all n locations
  Clone ID: 700961152H1
gcgaaggactttaggttgggatttgggaattagggttattcgcgtggcgaagatgattgaggtggttttgaacgatcgattggggaagaaggtgcgcgtgaagtgcaacgancgatgataccatcggcgacctgaagaagcttgtggcggctcagactggcacaagagccgacaagatccgcatccagaagtggtacaccatctacaaggatcacatcactctcaagattacgag

SEQ ID NO: 16704 - DNA, 238 bp, Glycine max
  Clone ID: 700961153H1
accgaaacaggtttcctataaaatcccgcatgtgccgtagcagttgagctgaaaccgagaagaagaagatggagatgtatcagatctggagcaggagaatagcgttgggagcgttcgcgtttgttctgcttttcctatcggcctcagcagacgacgtcgttgtgctctctgaagataacttcgagaaggaagttggtcaggacagaggagctctcattgagttctagctccttggtgt

SEQ ID NO: 16705 - DNA, 238 bp, Glycine max
  Clone ID: 700961154H1
gggttcacaggtgagactcagattactccaacccatgtatctgatgcagaggcaaaccttttcgccatgcaactagccagtgcctcagtactccctatggttctcaaatcagctcttgagcttgatctgttggaaatcatagccaaggctggccctggtgttcacctttccccctccgacattgcttctcggctcccaacacacaaccctgatgcacccgttatgttggaccgtatat

SEQ ID NO: 16706 - DNA, 236 bp, Glycine max
  Clone ID: 700961156H1
cttcttgttactctctctctgtctctctctacgctttctcgttcgagatccctcaagggatccactaactgaaggagaaatggggttgacattcaccaagcttttcagccggcttttcgccaagaaggaaatgcgaattctgatggtgggtctcgatgcagctggtaagaccaccatcctgtacaagctcaaacttggagagatcgttaccacaattcccaccatgggttcaatgt

SEQ ID NO: 16707 - DNA, 232 bp, Glycine max
  Clone ID: 700961157H1
gttgcgcacttctaaaactgcacaagaagaagaagcttcaaccccacgaataagcacggtttctaaaatgttttgcaattttcacattattcttctaattgctcttgcacttttggtacaaatatcatctcagcttggctccaaggtagaagtgcttcctggctttgaaggccctcttccttttgaactggaaacagggtacgttggattaggagaaaaagtgatgacatgc

SEQ ID NO: 16708 - DNA, 232 bp, Glycine max
  Clone ID: 700961158H1
cgagaagatccccgaggctgaacaatgttgaacaacgacctccccctctgagacgatgtcccaggttgaacaacgagtcaagcgacaaaaaattgaaagacacgagagtgaagaagggcggtgaagctgaaacgaaggaaaatcgtgtcgtttcggacgagggtttcggtggaggaagaaagaagaagagaaacaggaagaggattgaagttgaaacgcaaaaaacggtgtc

SEQ ID NO: 16709 - DNA, 229 bp, Glycine max
  Clone ID: 700961160H1
cattgatcgaaattcgaatgatcgctttctctgatctaaactaactgtgactgtaccggaaaatcaaccacccccaccatcattttcattctcattctcctctctctgttttttctatttcctttctttcttatcgctccccatttacttgttttttcatttttgcagggtttcttttgctcatcaccaccttcttcatattccctctccaaccatggacgtgggatcg

SEQ ID NO: 16710 - DNA, 229 bp, Glycine max
  Clone ID: 700961161H1
gaggaaaaccctagctagtagtctcagttcgtttgagagagaaaaaatggcagagggtctcgttctccgcggaaccatgcgcgcccacaccgacgtcgtgacggcgattgccactcccatcgacaactccgacatgatcgtgacggcgtcgcgcgacaaatccatcattctctggcacctcaccaaggaggacaagacctacggtgtcccccgccgccgctcaccggac

SEQ ID NO: 16711 - DNA, 232 bp, Glycine max
  Clone ID: 700961162H1
acattgttaaaagtttctttatttcaagtgaagttagttagttatatttatatacacaatcatgtcaatgagatcaattggtacaagccttagccttatggtatggcttgtaattgcaacatcagcattagcaaaatctgataaccccccagtcctagacacacaaggcaaccctcttgagcctggcaaagattactacatcaaacctgccataaccgacgtggaggccgcg

SEQ ID NO: 16712 - DNA, 241 bp, Glycine max
  unsure (1)..(241): unsure at all n locations
  Clone ID: 700961164H1
agatgacttaaatcagttactggttgagctagatggattcaagcataatgagggcataattgtgattggtgctactaattttccacaatcattggataacgcattggtgagacctgggcggtttgatcgccatgttgttgttcccaatcctgatgtaaaaggaagacaacagattttggaatcacacatgtcaaaggttctgaaggctgatgatgttgatctaatgatcattgncccgagg

SEQ ID NO: 16713 - DNA, 146 bp, Glycine max
  Clone ID: 700961165H1
gctcgacgcatgaacgtaccctccaccttcaccaccaccacacccaacctcgtggtgtgtcccttccctgagccatgcttcttccgcaagtctacgcatctctacggcgcagcacgcgagatcaccttactatctctcgctctctc

SEQ ID NO: 16714 - DNA, 88 bp, Glycine max
  Clone ID: 700961166H1
gaagagttgattaaatctaacttaattattgatttgcctttgtgtttttagaaacaatgattggggaacagtcttttactatgttaaa

SEQ ID NO: 16715 - DNA, 237 bp, Glycine max
  Clone ID: 700961168H1
tagaggaatcagctttgctttcctgtggtaaattcacagttaatggggccagctggtgcggtttcatctcattacccccggccttatgatgttggccttacagaaggtagcaatagtggtagtgctgagaccagtagaaaatgggcaaggcagggtttagatcttaatgcgggacctggaggttcagacatggaggggagagacgacaattctcctcttccatctggcaactttctg

SEQ ID NO: 16716 - DNA, 127 bp, Glycine max
  Clone ID: 700961169H1
ggtcgttgagtgagtgagtgtggtttcacattggctggtcaaatcaagaatgacattctccctttcattcaccactctgctttcccttatctctgtcattctgcttcatgtcaatgccttccccgtt

SEQ ID NO: 16717 - DNA, 235 bp, Glycine max
  Clone ID: 700961170H1
cttgcttcttaatttcttgatcatgtcacttgctggtaaaatcaccattgaaattggggtgcatgcaagcgctgcaaagtggttcaacctctttgcaacgcaactccatcatgttcaaaaccttaccgaaagagtgcatgaaaccaagctacatcatggtgatgactggcatcacaacgaatcgatcaaacactggacttgtaccatagatggtaaggttacaaatatcacgaga

SEQ ID NO: 16718 - DNA, 236 bp, Glycine max
  Clone ID: 700961137H1
aaacattttgccttttcagctttcattgcccaaccttgtagtgtggccttgctgttttctcaatgagaaaggcttttactctgcaacgcgcacttttgcgcttctctgttgcgttgttgctggttgccagcttcacttgtgctacttctgttattgcaattcctgaagtttcagggaatgaagttaatacagatgggaatgctgtaaatgaagaactagcaaaaacagccaacaag

SEQ ID NO: 16719 - DNA, 232 bp, Glycine max
  Clone ID: 700961172H1
gtaggatcggtggatcaggaatggacctgaggagcaaagcaaggactctcccaggaccagttagcgacccttcaaagcttcccaagtggaactatgatggttccagcacaggccaagctcctggagaagacagtgaagtgattatatacccacaagccattttcagggatccattcagaaggggcaacaatatcttggttatctgtgatacttacactccagtggagaaccc

SEQ ID NO: 16720 - DNA, 163 bp, Glycine max
  Clone ID: 700961174H1
tcaatattttaccgttctttcctctaaagttaaaaattactcttccttcccccagtagatttaaatacatgacacttcatttttttcatgaattttctgttataattccgttaaaaaattattcttaaaacatcatttatactaccgctccacacaacatacg

SEQ ID NO: 16721 - DNA, 229 bp, Glycine max
  Clone ID: 700961175H1
atcaagccaaagaataggagaatcatgggtgctggagtccctgatgatgaggacaacaacaggtggccaccgtggctgaagcctctgctaaaagaaagtttctttgttcaatgcaagcttcacgctgattcgcacaagagcgagtgcaacatgtactgcttggattgtatgaacggtgctctctgctctctctgcctcgcttaccataaagatcatcggctattcagat

SEQ ID NO: 16722 - DNA, 82 bp, Glycine max
  Clone ID: 700961176H1
cggctcgagcggctcgagaatttcaatttaaaagcctctgttatttgtgatattgactcactggtcatccacattatacgta

SEQ ID NO: 16723 - DNA, 233 bp, Glycine max
  Clone ID: 700961178H1
ggcaagccccactcaaccaccacacatctcctcgttcacgctacccctttctgctcttcttctacctttcaagttttaaaagtataaagatggcagagacattcctatttacctcagagtcggtgaacgagggacaccctgacaagctctgcgaccaaatctccgatgctgtcctcgacgcttgcctcgagcaggacccagacagcaaagttgcctgcgaaacatgcaccaaa

SEQ ID NO: 16724 - DNA, 242 bp, Glycine max
  Clone ID: 700961094H1
ggaaaaccgggtgcagcagcactcttagtgaaggtcagcatggatggtgctccctatctgaggaaggtagatctaagaaattatacaatgtaccaggaactgtcttctgcccttgagaaaatgttcagctgtttcactctaggtcaatgtggttcccatggagctccaggaagagaaatgttgagtgagagcaagctgaaggacctcctgcatggttcagaatatgtactcacttatgaaga

SEQ ID NO: 16725 - DNA, 221 bp, Glycine max
  unsure (1)..(221): unsure at all n locations
  Clone ID: 700961095H1
agtgagtggacgtttgaagtttgaagtttgaagtttaaacatagagaaacgaaattgaatgcaacccaacaaaacacattaactcccatttccattcaatcaacgagaatagngattgggggatgaaaagattcttgctaacctcggagatcatgagggatagaatgaccggagtggacatggagcacgagggaggtggatgcgccggtggcgggaatcgg

SEQ ID NO: 16726 - DNA, 243 bp, Glycine max
  Clone ID: 700961096H1
cccatcccacccatgtctgcggcaagatgggttttatatagtctaaccactctgtcattatgtacaacaacacaatgattagcttcaacatgattgaggctgccaggattaacggcattaagaggtttttttatgcctctagtgcttgtatctaccctgaattcaaacagttggaaactaatgttagcttgaaggagtctgatgcatggccagctgagccacaagatgcatatgggctagaga

SEQ ID NO: 16727 - DNA, 252 bp, Glycine max
  unsure (1)..(252): unsure at all n locations
  Clone ID: 700961101H1
agtttttgaaatgttgtcaccccttcttctatttctatgcctaactcttcctttgtttttgttgtccttcttcaaataccgtaaaaccttcaagaatccaccacttccaccaggtcctagactttctcncataatagggaatcttcatcaactagatagtccttctcttcatgagcagctatggcatctctcaaagaaatatggtcctttatttcgccttcaatttggattaaggccagccatagttgtttc

SEQ ID NO: 16728 - DNA, 246 bp, Glycine max
  Clone ID: 700961102H1
ctgagccattcaattcccctcctttattgctttcaagtttcaacactaattttattatctgaaaaaatggctttcaaagtttcgtatttccttgcacttgttctagtttccaatatcctcctccttgatacaacagctgctggacgcagcattggcgaaaactccaactcagaggaaaagaaagagcctgagttcttgttcaagcatgaaggtggggtgtatattccagggattggacctgttgga

SEQ ID NO: 16729 - DNA, 246 bp, Glycine max
  Clone ID: 700961103H1
agaatgcatctgttagcatcatcctcttctctttctccttctctcccttcttcattccctcgcccttctctccatctccaccttcactttccttcccaaactacccagcttcgcctccataccccaccacccctttcttgctcccttaattcttcttcttcttcttcttacgtggaacaatctgcttcatcttctcagatgcagaatggcttgctgtactccagagcttattgggttgctgaatct

SEQ ID NO: 16730 - DNA, 243 bp, Glycine max
  Clone ID: 700961104H1
atcacaatcacatgtgccactttcgcccaagatgttctagaaggaagagcaaaggcttcacaagcacacgatcacaagcatcaaccactaatatttggaccggctagccttgtaaatggaaacataacaactgagagagaaagaatggcagctcaggtcttccaacctagtcataggatgccaactatgagcattgaggaagctgggctaaaagaaatggaaataatgaacaatggcaagaga

SEQ ID NO: 16731 - DNA, 77 bp, Glycine max
  Clone ID: 700961105H1
ggattgtacgcatgtattagccttttatgaaagttaccttttggttttttttttccggaccaaagggtaccttttaa

SEQ ID NO: 16732 - DNA, 244 bp, Glycine max
  Clone ID: 700961106H1
gagagctcagccttgattatggtgtagctgatgagtggacaggcaaactctctatatgtaactgaatggtccatgcacttcttgagttttaggcatggttttgtgaggtaaagcctagttctatcattctactttgttgcttttacaactatcttccttttgtttacatcttacttttgtctggtactctgcgctgtctccaatgtaaactctgtttaccatataccataatgagtgatagaca

SEQ ID NO: 16733 - DNA, 244 bp, Glycine max
  Clone ID: 700961107H1
catagccatggctacttcatcaaccacattattgctatcatcactcatacctgcaagcatcccatcattcaactctggaaaccattcagtttttttgcttcaaaaccgttctttgaatcgacccaagaagagagtttccttcgttgttcaagcagccaagccccctattggtgtggaaattccaaaggtgcagcctcaatttacgcctccgtttcttgggttcactaagactgcagaagtatgg

SEQ ID NO: 16734 - DNA, 241 bp, Glycine max
  Clone ID: 700961108H1
ccatttttggctatccacactgattctgccattaggaaagggcttatttccgaaaatgatcttaaccttgccttggccaaccttatttcggtccaaatgagattgggtatgttcgacggcgaaccgtcaacccaaccatacggaaacctaggcccaagagatgtgtgcacctcggcccatcaacaattggcccttgaagcagctagagagagtatagtcttactacaaacaaaggaaactc

SEQ ID NO: 16735 - DNA, 239 bp, Glycine max
  Clone ID: 700961109H1
cccagatcccggtggccttttccctctctttctctggaaaattcccccgattttctcgagaaagtgaaacgcaattatgagctttcaggacatcgaggctgggcggcccttcagttcgaggcgcgggttgatgaacgggaagcaagacccgacgcaagcggtggctgccggaatattccagatcaacaccgccgtctccaccttccagagactcgtcaacaccctcggaacccccaaag

SEQ ID NO: 16736 - DNA, 239 bp, Glycine max
  Clone ID: 700961110H1
cacggattcattgcatcaccgtcaccaccactttcatcatcataaaacatttttcatataaataaaatatattcattcattcacacatcgtaataatcattatctatcattctctctctttcaattttagacagaagactaaaagagtgaagagaacaaacagagcaatggaaggaggaggagctgctccgccggccgacaccgtgatgtccgacgcggcgcctccgcgcagcaagcga

SEQ ID NO: 16737 - DNA, 235 bp, Glycine max
  Clone ID: 700961113H1
atggaagctcgtgatccaccgcagctgccgatgattgtttgactttgatatcgaaattgctgggagatattcaacgtggatacttacttgtagtgcttagtttgagtctctattaatgaccctatcttgcatggcgcttttggggttaaagattacgattcttctccccattgtagtcttacctgagcagtttaaaattttgggagacgataacttttgtctttataccatgtgt

SEQ ID NO: 16738 - DNA, 88 bp, Glycine max
  Clone ID: 700961114H1
gcatgagagagaacttccctgcccttccatttccctctcgattgcttcgcctttgctttcgatcctttgctagaagagaaccttattc

SEQ ID NO: 16739 - DNA, 229 bp, Glycine max
  Clone ID: 700961117H1
agaaaaacaaatgatggagcaatgttgtttgagaaagtttgaagttaattttggtgaccaagttgaatgtgatgcgttaataagtgaaggtttctctgttagttttgtacaagtacgtataacttaaaaatgctttatgatccttatggtgaaaaaaaaaaaaaaaaaaaaaaaaaaaaggggggccccccaataattgacctcctcgcccggggatttattccgggcc

SEQ ID NO: 16740 - DNA, 245 bp, Glycine max
  Clone ID: 700961118H1
ataacccatgtaacacgacgagtgaaattggatatgagtgtatgagcaaagccaaagtgatcgtgtggcagagcaacgagagagaaagctcttcttgttctgatgtcggatcatcttccgcgagaagtggtaaccgacatcctctcccggttaccggcgaaatccctactccgattccggtcaacctcaaagtcatggaagtcactaatcgacagccagcacttcaactcggtcatctcagcaga

SEQ ID NO: 16741 - DNA, 241 bp, Glycine max
  Clone ID: 700961123H1
cagaaatagatcatctctctgtctagggtttcattctttttcagctttattagttctgtagatccatctagcttcggtgctgcaaatggacgtcgcagtcactgcctttcggtcaccgctgatcgtcctgggaagtccggtcaacgggtccgcctcagctcggtttcggttccacttttgggttctccagaaagctatgcttgacttcagtatttatcccgaagcaagttcgtagaagagg

SEQ ID NO: 16742 - DNA, 237 bp, Glycine max
  Clone ID: 700961124H1
acaaattaaacatcatttgaagccaaaggaaaggaaaatcattctctctctctctctctctctctctctctctcctccagcgcttgattgagagatttggagagggggagggactctgaggaataaaccatctctctacctctttctctgctgagtgctgacagtgttagagatgtgtgggtgtgagtgtttttggtggaacagtgttcctgaatcctacccttctgagcgagagcc

SEQ ID NO: 16743 - DNA, 236 bp, Glycine max
  Clone ID: 700961125H1
cgagtcagttgccatatgctagtctcaacgattaagccatgtatgtgtaattatgaactaattcagactgtgaaactgcgaatggctcattaaatcagttatagtttgtttgatggtatctactactcggataaccgtagtaattctagagctaatacgtgcaacaaaccccgacttctggaagggatgcatttattagataaaaggtcaacacaggctctgcctttgctttgatg

SEQ ID NO: 16744 - DNA, 234 bp, Glycine max
  Clone ID: 700961126H1
tctaaaaccaactttctctctcaagaaccatcaaatctcgatcatcccctctccctgcaagatccggtgatggttccgattgcgcagtagggtttggtctagggtcggccaaggctggcgagtatttgggtgaagtaaatggcggattcgagtggtgcgagcgtggtgttgcggcacggcggcggcgttgatagtgttacagtgcggtggcgattaatgttgtcttcaatttta

SEQ ID NO: 16745 - DNA, 128 bp, Glycine max
  Clone ID: 700961127H1
aaacggtgtagggaacacggcgtcgtggcgacggtgccgccgtcacgcggcgcgtcgttattcctaacgccgtcgcggggcttgaagcggaagataggttgcatcgacaaggccacgcagatggggcg

SEQ ID NO: 16746 - DNA, 233 bp, Glycine max
  Clone ID: 700961129H1
ctaaaacagcgtccgcaatcgcatctgggactttgctgggaacttttgaggataacaggtacaagtcagagtcgaagaaatcagtgcttagttcggtggatattattgggcttggaactggacctgaattggagaagaaacttaagtatgcagctgacatttcttctggaatcattctcggaagggagcttgtgaattctccggctaatgtgctcacgccagggtattggctg

SEQ ID NO: 16747 - DNA, 245 bp, Glycine max
  Clone ID: 700961093H1
attagctaacatatagaaagagagagagagagagagagagagagagagatcacatttcctgagctataggctatagccttccacaatcttataacaatggaggggaccaccagccaaagcacgtttaccttcatccctagcacaattgagacacctagtccaagcatccctgagatttcatcatcatcaccttcccctggcggctctcttgcaagagttgcacaaagttaccctcctggatttcc

SEQ ID NO: 16748 - DNA, 234 bp, Glycine max
  Clone ID: 700961131H1
cttgctcttagccctcctcctcttcgccgcagtgaccaccgccgcgatggcgtggcgcgtccgacgccgacgacatcctgatccgtcaggtggtgccagatgttggcgaagcgaagaggaggacaacctgctgaacgacgagcaccacttcgcgagcttcaaggccaagttcgccaagacctacgccaccaaggaggagcacgatcatcgcttcggcgtcttcaagtccaacct

SEQ ID NO: 16749 - DNA, 243 bp, Glycine max
  Clone ID: 700961133H1
ggttccgatccattggctcgtcttcagtgtgaaattcctcgctcatcgcgttccgaatcttcctctcttgttatccagcaaccggtttggcggcgcggcttttcacacgcgtctcacatttcgtccacgtttttgttttttttgttttttggataacgagaattctagatctcttgaacgcaccgtttttggcggttatagaggatcgggacgcgaggcggatgacggcgagaggttatcgga

SEQ ID NO: 16750 - DNA, 238 bp, Glycine max
  Clone ID: 700961135H1
accagtatgaatgatatagtagcaatcaaacgccgtttggggggtcgctatccatggttgtctcgagcttatgatccctgtactgagaggtactctaccttgtatttcaatcgtccagaagttcagaaggcacttcatgccaatgtaactgggattccttattcatgggcaggatgcaatgatgttattgtggaaaattggggtgattctccgctatctatgcttccaatatatcaag

SEQ ID NO: 16751 - DNA, 239 bp, Glycine max
  Clone ID: 700961136H1
taatcttcaatcgatttaaatttgttgcttcaaagggaatcaaacttggaccagcatttctcttgacaagacttacaggtggttcaattgtcggggacatggctccttaccaagcattttccattggagggcttggaagtgtgcgagggtatggagaaggagcagttggatctgggcgatcgtgtttagtggctaatagcgaactgacactccccttgaataagatgtggaaggtgcca

SEQ ID NO: 16752 - DNA, 260 bp, Glycine max
  Clone ID: 700961053H1
tagatttatctatagcaagtgcgtcaagagacacgtggtaccctagctagagtgccattctgtggtttctttctttctttctttctgcatcacatcacaatttgctctgcctcgtgtcctttttcttctttgctctccaaaaatctcacacacacaggtatctagcaaatgggttctcaccaataagaaccatggctattggagaatgggaaaccaagggttttgaccaaggagaccaggcatggccgttctgcacacag

SEQ ID NO: 16753 - DNA, 262 bp, Glycine max
  Clone ID: 700961056H1
gtgggatctaatctcccttatttacacttctggaactacatcaaactccaagggtgtgatctatagccacagaggtgcctatcttaattctctggctacggttcttcttaacgagatgaggtctatgccggtatatttatggtgtgttcccatgtttcactgcaatggttggtgcctcccttgggccattgctgctcagggtggcactaacgtctgccaaagaagtgtcaccgctgaagggatatttcacaatatttttagg

SEQ ID NO: 16754 - DNA, 237 bp, Glycine max
  Clone ID: 700961057H1
tgtttccatatcttcaagggacagttattgcattgatggtgagcttcgtcgcttagcgatagctggtgatggacttgaaccacatgatcctcaatggcgggggtaatcgtagcaactacatcggctgactgcgtagtaaaggctgaacttcactcaggtgtcaagctggacgtataatggaaatgagtcctgtttagatgcttggtagtctgcacaggatcggaccgtagagtgccc

SEQ ID NO: 16755 - DNA, 254 bp, Glycine max
  Clone ID: 700961058H1
ctgcagagacgcgctggagaagcagatagggctgcagctcgaagaagccacgcttgacgaccttctcgtgccgagctactcgtacctgaacgaaacgctttacgacgtcgattgcgtggagaggattttgagtcagttcttggaaggtttagaagcgagaaccgccgcggaaacgacggaagacgcggcggcgacgaggtcgccggcgcttatgctcgtcggaaaactcatcgacggttacctctccgagatag

SEQ ID NO: 16756 - DNA, 253 bp, Glycine max
  Clone ID: 700961060H1
gatctattctattcttcaatatcttagggttccgacagattccccatcaattcaaccacttgccgtgttagttgatccattcttataaaaagatcaaagactcattatttatagccaaaggccttctgggtcgtcgtgaatctatcttgtgtttgagagattaagacaaaactttttgctttgcaaatggctgctgcaactgctgcaactgcttcttggatgcgattcaaaggcggcaaggaaaggaagctaa

SEQ ID NO: 16757 - DNA, 248 bp, Glycine max
  Clone ID: 700961063H1
attcaacttaagagatcaatatggccaccaccactacccagcctccctctaatatctgttttttccttctgttgttgcttctagcacactttcatttgggcataagccaacttgagctgaattactactctaaaagctgcccaaaagctgaagagatcatcaaggaacaagtcacacaactatataacaagcatggaaacactgccgtttcgtgggtcagaaatctcttccacgattgcgtggttaag

SEQ ID NO: 16758 - DNA, 255 bp, Glycine max
  Clone ID: 700961065H1
catggatttctttgaagaaagatatgataatcaaattgagcttgaaccatctctgcatgataaagatcattctagcagttcaagtgtatgtgggggattgcctgagcaatcttttcaacagacagcattttcatgcgatcagcctaattaccagcttcaagatctaccgagattcgaaccgatgaatgacactttcttggattctgtacctgaaggtcttccatgtgttgacgttgaaaacctagacaaatccat

SEQ ID NO: 16759 - DNA, 254 bp, Glycine max
  Clone ID: 700961066H1
gtgtgtcgccgccatggccaccgtcaccacccaagcctccgccgcaattttccggccatgtacctcgaaatcgaggtttttgaccggctcttccggtaaacttaaccgggaagtgactatgcggccaatggggtgccctccttctgcctctttcaaggttgaagccaagaagggagagtggttacctggcttggcctccccaacttacctcaatggcactcttcctggtgacaatggatttgaccctctggggc

SEQ ID NO: 16760 - DNA, 254 bp, Glycine max
  Clone ID: 700961067H1
gagataactagaaacagtgtgatgaaaatgaaggtccttgttttcttcgttgctacaattttggtagcatggcaatgccatgcgtacgatatgttccctctccgaatgaacactggctatggtgcccgtactccggaggtgaaatgcgcaagttggaggcttgctgtggaagcacacaacatctttggctttgagaccattcctgaagagtgcgttgaagcaacaaaggaatacatccatggcgaacaatatag

SEQ ID NO: 16761 - DNA, 251 bp, Glycine max
  Clone ID: 700961069H1
accacgtcctcgtcccaatcaagtgaaagctcgatggctgaaatggaccagaacacgggcggtgagcatgaggcggaggaaacgattgagattgaggcggaagtgcacggtggtgaagaggcggttgttgcggagaagaagtggccggggtggcccggggagagtgtgtttcggatggtagttcctgcgcagaaggttgggggtatcattggacgcaaaggagagttcatcaagaaaattgtcgaggagac

SEQ ID NO: 16762 - DNA, 217 bp, Glycine max
  Clone ID: 700961071H1
gtgaaagagaatccgaggcgtagagaagagaaaaattaagatggaggggaaggagcaggatgtgtcgctgggagcgaacaagttcccggagagacagccgattgggacggcggcgcagagccaagacgacggcaaggactaccaggagccggcgccggcgccaccagttggacccgacggcagtttacgtcatgggccttgtaccgggcacggataa

SEQ ID NO: 16763 - DNA, 255 bp, Glycine max
  Clone ID: 700961072H1
gctgatatgataatgctgcctcctgggtggctgagtgaactcatatgaattggtcattattgctgcctggttcttaaagaaggccacatcatacaggcaggaaaatatgatgatctttgacaagccggaacagattttaaaactctagtttcagctcaccatgaagcaatagaggctatggatattcctaatcactcagaagattcagatgaaaatgtacccttggatgacactattatgaccagtaagacatcc

SEQ ID NO: 16764 - DNA, 237 bp, Glycine max
  Clone ID: 700961074H1
ttttgaagacgaagattgaatgggaaaaagcaaagaagcgttagagaagtgaacagaaaagtgtaaaataaattaagcggaaccctcgatttgtgcttttcaattttcttccctttctcttgctttgcgttgagttgagtaatactatcaactaagcacttttctgtttgcaatctggagctatgagttcgtcttcggcagatgtttttccagcaattctggaagttatgctggagt

SEQ ID NO: 16765 - DNA, 249 bp, Glycine max
  Clone ID: 700961075H1
cggaagattaaaaaaacaacggtggtacgtgatgccaccgaagttcgatccctcgcaggtggtggacgtgttcgtccgagtcaccggcggcgaggtcggcgcggcgagttctctcgccccgaagatcggtcccttgggactctccccaaagaagatcggagaggatattgcgaaggaaaccgcgaaggactggaagggcctccgcgtgacggtgaagctaaccgtgcagaaccgcgcagcgaaagtgac

SEQ ID NO: 16766 - DNA, 244 bp, Glycine max
  unsure (1)..(244): unsure at all n locations
  Clone ID: 700961079H1
caataacttccaaaaccttatattcttatgttttcttgaacattagttctaattcatttacaacactcagataacatcatntgattgatacaaacatttgtcttggagaaatttgtagctggttccattgaagattggaagtactaacacatttgaagtgaaaaatttcgtccngctaaatagatcgaagagattcaacaatgtcgtcaggcgcggtgaaaggcccggtgaaaggccaaatgaa

SEQ ID NO: 16767 - DNA, 241 bp, Glycine max
  Clone ID: 700961080H1
ccggcaagaccatcgaccttgaggtggaaagctctgacaccatcgacaacgtcaaggccttatccgtctcatggcaggatcaaacaccggaccaatcaaccttggaaacccaggtgaatttacaatgactgaacttgctgagacagttaaagagcttattaatccaggtgtggagatcaagatggtggagaacactcctgatgacccacgacaaagaaaaccagacatcacaaaagcaaag

SEQ ID NO: 16768 - DNA, 259 bp, Glycine max
  Clone ID: 700961081H1
tgaattttaaataattacagatccaaatcatcaatatgcttgaattgaatgaatcccactccataaacttgcactttcccctcactcacatcattctcttcttcacatgtatcaaactctctaaagctcaatcctccatggagccagttcccacctacatcacccaccacagctgggagccttccgtcgccatcaccgtcggcgccataatcatcgccctcctcttaatgggaatcatctcaatctaccttcgccgctg

SEQ ID NO: 16769 - DNA, 247 bp, Glycine max
  Clone ID: 700961084H1
caattatacaaacacattcttctcttctcttcctctcaaataaatttattttctttttttcatatttttcttctaattttccctttgcataatttctcgcgtaacggaaagccatgaaattcggaaagagcctgagcagccagatcgagaaaaccctgccggagtggcgtgacaagttcctctcctacaaggagctcaagaagaagctcaagcaattcgaccctcccgccggcggcgatgagcgccc

SEQ ID NO: 16770 - DNA, 248 bp, Glycine max
  Clone ID: 700961085H1
atccttaacacactgtccaacaagaatggctaattcatatgaaaacaacttcccccctcagaagcaagacactcagcctggcaaagagtacctcatgaatccaccaccccaatacaacagctcccaatacaagccatcaaataaacttcagggaaagatagctgtagtaaccgggggtgattctggaattggacgaagccgtgtgcaacttgttttcattagaaggtgctactgtgatcttcacctac

SEQ ID NO: 16771 - DNA, 236 bp, Glycine max
  Clone ID: 700961086H1
gaactttgacgccattggccattgagttaagtaagccgcatcctcaaggtgaagaatatggtcctgttagcgaagtctacgtgccttcgagcgaaggagttgaagcttatatttggttattggcaaaggcttatgttgttgtaaatgactcgtgctacaatcaactcgttagccattggctaaacactcatgcggttgttgagccaatcgtcatagcgactatgaggcagcgtgct

SEQ ID NO: 16772 - DNA, 247 bp, Glycine max
  Clone ID: 700961087H1
atacagctaaatttgcatgccaccaaaaagtatctgcaagtgaaggggctgttttcatttgtcaaacattttgaacacaccaatttttgtatgctttactgtttgttgttttggtttagttgtggttgagattcttgagaattgctaatatgttcaaatgttactaatattagatcctatcatgtggcttataaatataatgataagcatggtccacgaccaaaaaaaaaaaaaaagggcggccgcc

SEQ ID NO: 16773 - DNA, 254 bp, Glycine max
  Clone ID: 700961088H1
tttggcatccccgtggcttcaagaagagaatctcaatggaggcccaggagctgaagcgcgtgttccagatgttcgaccgcaacggcgacgggagaataacgaagaaggagctgaacgactcgctggagaacctgggcatcttcatctctgacaaggacctgagccaaatgatccagaggatcgacgtcaacggcgacggttgcgtggacatggacgagtttggggagctgtatcagaccatagcggacgagcgc

SEQ ID NO: 16774 - DNA, 251 bp, Glycine max
  Clone ID: 700961090H1
ttctcctcaagcaaaacctagagctcccacactcctccactacctagaatattaaaagccccttccttcatcaaggtactactgtttcatcttccctcaaagattggaacaacaacaggaacatgggtactctaacaactgttcctgtgctcccttctaagcttaacaagccttcgctttctccgcgtcacaattctctttttccctactacggaagacgcgtcgggaagaagaacaaagcaatggttcct

SEQ ID NO: 16775 - DNA, 245 bp, Glycine max
  Clone ID: 700961091H1
caaaccaaggtgggtgtgtccgagcagagcaggagcgaaggagaaaaagaccctcactctgttttttcttctttccttcctcaaccctaagcaaacagcatggttgtcttttcgcgaagtgcgacgacgacgacgacgacgacgacgacctatacgcgccacaacttaatacgacaaacgaaaacctgcgttggcaataataatagtttgtgttactctgctactaagaaggctcctccgcagag

SEQ ID NO: 16776 - DNA, 246 bp, Glycine max
  Clone ID: 700961092H1
cgaactgttgtttggtctcttctctcttatccatggcttgaacgtttctcaccctaccaactcccttcctacacaaaaccaatgccatcagtttctctaacaagagaccctcatttttgcagaggagctctctgaagattcatgcaattaccaaaaaatgggaacccacaaaggttgtgcctcaggctgatagagttcttattcgtttggaggagctttcagataaaacagttggtggagttttgc

SEQ ID NO: 16777 - DNA, 189 bp, Glycine max
  Clone ID: 700961050H1
cgattaaagacttgcttccaagatggttctgctctcagaagctctgggatgacgttgttgctggccctcaacctgagcgtggccttggcaagctcagaaaactcaccaccctcaaatctattgatgacggagacagtagcaagctgcagaagacgtcgtcgatgccgtcgactccgacaaccccgatga

SEQ ID NO: 16778 - DNA, 260 bp, Glycine max
  Clone ID: 700961014H1
cgcaagcaaaaagaaagaatcccaggcgaggagaaagatggaggggaaggagcaggatgtgtcgttgggagcgaacaagttccccgagagacagccgattgggacggcggcgcagagccaagacgacggcaaggactaccaggagccggcgccggcgccgctggttgacccgacggagtttacgtcatggtcgttttacagagcagggatagcagagtttgtggccacttttctgtttctctacatcaccgtcttaaccg

SEQ ID NO: 16779 - DNA, 265 bp, Glycine max
  Clone ID: 700961019H1
gcaaatattgcctattcggcaatatggcggaaaatggttcatgtgagctgaacaagtttgtgctgttttgtttgttgttgctaatacaagtggcagtttctgaaatcatttttgaagagcgatttgatgatggatggcgaagtaggtgggtgaaatcagactggaaaagcagtgagggcaaagcaggttcattcaagcacacagctggaaaatgggctggtgatccagatgacaaaggtattcaaacatccagtgatgccaaaca

SEQ ID NO: 16780 - DNA, 265 bp, Glycine max
  Clone ID: 700961020H1
aaaaccactgctttgagcttgcctggactcaaccttgcaacccttgcagctctccctagcaaatgcggggtcaacttgccctacaagatatcccccaccattgattgcaacacggtaaagcactgagcagttgcacgagggtttatgcttgttgactttaaacttgtttcgcagtaataatcagcaaagagagaacaaagatggtttaatttcttccattgtctggatcccactagggagtatactttatactaggatgatgatg

SEQ ID NO: 16781 - DNA, 273 bp, Glycine max
  Clone ID: 700961022H1
caaatctcagactttttaaggcgctttgggtggatagtgccagcatacaccatgcccccagatgctcaacatgtcacagtgcttcgtgttgtcatcagggaggacttctcaaggaccctcgcggagcgtctcgtgtccgatgtggagaaggtgctgcatgagcttgattcacttcctgcaagggtcatcagcagcaccactgtgacactcagtgcagaagaaaatggcaaggtagtggttgctaagaagaatcctatggagactcagagggaa

SEQ ID NO: 16782 - DNA, 269 bp, Glycine max
  Clone ID: 700961023H1
cttccctctcttctgttaccaatggctccctcatcaaactacatttctttccttttcctcaccacccttttgtgtgctcttcaaatcagtgcaagagacagccagttcttcagcaaagtcacccattttgacaaaaacagtgtcaaagagacagaacttcccaacaaagaagcaccagaagtgaacaagccagagcaacaaccacctttcattccggagactgaaaacagctatggcctatatggtcatcatgatgagtataaccaagt

SEQ ID NO: 16783 - DNA, 267 bp, Glycine max
  Clone ID: 700961024H1
ctcaccccgctgaactcatcacttactggaagccttgttgtgagtaagagaaaaggcttcctgcaccgagcacaccaacttgatacctctgattctttctttgcttagaattccacagaatatggagaagattcttttcaatcactccccacctttggaattcaagggtttgagcaaggaggaggaagactcattgctagggcaagtggaaatatggaggtacatgacatgcttcacggactccgtggccttgaaagctgtcataga

SEQ ID NO: 16784 - DNA, 266 bp, Glycine max
  Clone ID: 700961025H1
cctgccagtagtcatatgcttgtctcaaagattaagccatgcatgtgtaagtatgaactaattcagactgtgaaactgcgaatggctcattaaatcagttatagtttgtttgatggtatctactactcggataaccgtagtaattctagagctaatacgtgcaacaaaccccgacttctggaagggatgcatttattagataaaaggtcaacacaggctctgcctgttgctttgatgattcatgataactcgtcggatcgcacggc

SEQ ID NO: 16785 - DNA, 266 bp, Glycine max
  Clone ID: 700961026H1
aaagaaagaagttctaaggaagagggaatatgcagaatacaaggtgctagttgtctatttgcaataacaacatcagcgatccaaccttagtattcttcaacccagagagatttgtaataataaattacaacaacttaaacgatggcaggaggagcttatgtagattcgggaaatgcaaagcaatttgatgggaaggtcacggcattcgtattggttacatgctttgtggcagccatgggaggcttactcttcggttatgatcttgg

SEQ ID NO: 16786 - DNA, 258 bp, Glycine max
  Clone ID: 700961030H1
tgtcacccctccttcctttatggttcggatggccatgagattgtctagagcaagatggtttacctttttgagaagagtttttcattaccaaaatggatcaaggtccaaccttggctccaaccctttcaattctagcacttggatgatgctggagtttattgccttgattctccaaataacaattacaacgttcactttggccatttccaagagggagagacctatttggccgatgaggatttggatttctggatatga

SEQ ID NO: 16787 - DNA, 255 bp, Glycine max
  Clone ID: 700961031H1
cagtattgttcttgcgttgtttcggagggtcaattgtttggttgagcaaaaatctgaaattcaatttcatttgaaagcaaatggggaatcttttatgttgtgtgaaagttgatcaatctacggtggctatgagagaaggattttgacgatttgagaaggtacttcagccgggatgccattgcatgccatggttccttggaaaacaacttgctggtcatctctctcttcggctacagcaactggatcttcgttgtg

SEQ ID NO: 16788 - DNA, 262 bp, Glycine max
  Clone ID: 700961033H1
ttttgcccgcggtgccaaaaacaatactcttgttgataacggtgaagctccttctttaccttttccctttgtttgagaaccctaatcccgttaactcgtaaaaaaaccacagctcttctctttctctcaattctctcagattttgggttatcgtttgaaatggcatcggtatccagtcaaccacagttccgttacactcagccaccgtcaaaggttctccatttgatgaacttgccatgggagtgcacagaggaggaactga

SEQ ID NO: 16789 - DNA, 257 bp, Glycine max
  Clone ID: 700961034H1
ctttctcagtgttctaagcagtcagaaacaatggagaggaaaagacacagtcctatttctttcactatgttcacattgctacttggagtgcttgctcagaaccttgtcatccctgtaatatctaccactgccatcattgtggaccagaacttcaactctccagacccacatgcagacacagatttatcaaattctctatgttcatactgctctccagatcatggctctgggagtggtgggcacggaagctcaccaca

SEQ ID NO: 16790 - DNA, 255 bp, Glycine max
  Clone ID: 700961036H1
ctctcggcttcttcttcgttgcgctttttcccaaaaccaattgcatcactctcgtccgttaccgccgctgccctagaccaccgcaagcgacgtcgcacaccgccttcatccgttagggcaaaaatgagtcgaggaagtggaggtggatacgatcgtcacatcactattttctcccctgaaggacgtctctttcaagtggagtatgctttcaaggctgtgaaggctgcaggaatcacctcgattggtgtccgagga

SEQ ID NO: 16791 - DNA, 249 bp, Glycine max
  Clone ID: 700961037H1
ctgttctgtcccgcgggagcagacgacctgtcttcatcggcaaacaacctcaaaaacattcatcaacgttcactattaatccatccatcattaagtaagacaataaggttcgatttttttatccttgttttgcttctgatccatcatggaggtgccgaagtcctgggatgcccttcgcaaacaggcaagaaaacttgaagctcagttggatgagcagatgaattcttatcgtaaattggtttctaataa

SEQ ID NO: 16792 - DNA, 264 bp, Glycine max
  Clone ID: 700961038H1
gccgtccggacatttcttggttcctgaaatttcaaagaataccaatggctcacaggcgttgcctcttgataagagggaacctcatgaatcggaagtgccacccatctttcagttatgttctccatagcaatgaagggaaacgtgaatgccctgatgaaaagtcatcttcagctggcattagtaattctatccaaagaaggatgtttgggaactcagttgatggatcaatgcggtttgtttcctattctggtcaaagaatgcatt

SEQ ID NO: 16793 - DNA, 235 bp, Glycine max
  Clone ID: 700961039H1
aaagaggctttgaaacagttgaaggcgaaaggactcactagagaagaagggaaggacctaacttgcgtgggagtgcaatgctataaaatggcttttatcataatcacggcttcaacgttggttggttgtttagcttcggtcattttggcgctgaggactagaaagttttacaaaggggatatctatagagaatttagaatggaacatgaagcaatggagattaccaagactgcta

SEQ ID NO: 16794 - DNA, 257 bp, Glycine max
  Clone ID: 700961040H1
atttctccatttccattttctctctcacttttcaagaatcgtaagctatgggaaagtcttacccaactgtgagtgctgattaccagaaggccgttgagaaggcgaagaagaagctcagaggcttcatcgctgagaagagatgcgctcctctaatgctccgtttggcatggcactctgctggaacctttgacaagggcacgaagaccggtggacccttcggaatcatcaagcaccctgccgaactggctcatagcgct

SEQ ID NO: 16795 - DNA, 253 bp, Glycine max
  Clone ID: 700961041H1
ctcgagccgtccgattcaactcggacgagttgcctcatcgtacggttccttcctcggactctttcctcttcttccccttcctaatcaccgttcgcagggttttgctctctctctctctctgtctctcgcttcctttctagttcagatctcgcattggcttcagcttaaaccacgcggtctaatttcattcccttaaattagggactcatcttatgtcgatacacttgaactgcagatggtgtggttcttgtga

SEQ ID NO: 16796 - DNA, 260 bp, Glycine max
  Clone ID: 700961042H1
gtttgccgtgggagctatctgaatctaactggcgaaggggctttcgaaaaggtactgaaggagtggcatggaattcttgatcgtcattatttgatgctagaagcttgtgaattaaactctgtttctgaagaggactataatgacctgggaagagctggtttaggcagttgtttgcttggaggcctgccagattggctagtttcctatgcagctcgccttgtgagatttatcaattttgaacgaactaaacttcctgagga

SEQ ID NO: 16797 - DNA, 261 bp, Glycine max
  Clone ID: 700961043H1
cttacttgctatgaataaggtctcctttgttaaagttgtaacttacgtttctggagaagccctggatacaaaagttacaactttaacaaaggagtccttacttgctatgaataagcttaggcaagaggtggagtcggagaagagtagagcaaaactggatagccgtaattgtgagccagatttagagatgtgcattagagcaaaaaataatgcatgggttatttctcgagtcacaagagggaaggagctttacatggttct

SEQ ID NO: 16798 - DNA, 258 bp, Glycine max
  Clone ID: 700961044H1
agagaagagaggaagttttggggtttgaatctatagaatagaatcaaaccaaattgaaagaagatcgatcgatcgatcgatggctctggtcggagttgaagtgaagcatgcggcggagggcgcaccggaggagaattgctccgccaagcccaccaagcagggcgagggcctccgccactactattctcacaacatccacgatcatcagctccttctccgtcaaaagacgcataacctcaaccgtcttgaggctcagag

SEQ ID NO: 16799 - DNA, 253 bp, Glycine max
  Clone ID: 700961047H1
tcttcataaacgcctttattctccgtttccgtttccttcccggaattcgattcatcatctctgaaaatgagagagtgcatctcgatccacattggtcaggccggtatccaggtcggaaatgcttgctgggagctctactgtcttgagcacggcatcgggcccgatgggcaaatgccaagtgacaaaacagttggcggaggtgatgatgctttcaacactttcttcagtgagactggtgctggaaagcacgtgc

SEQ ID NO: 16800 - DNA, 256 bp, Glycine max
  Clone ID: 700961048H1
ttcggctcgaggcttctttcaccatgtttgcaacacttgttggattgctctctcagagccttgtcattcctgtaatatccaccactgttgcagatcagaagaactactacaccccagatccacatgctggaagtccccccacaggtttctccgattctctgtgctcacacaatagtagtctccatctcatggccatgggagctctccacctcacacaaatagtccaagtactccatcaaacctcaggtggaaatgg

SEQ ID NO: 16801 - DNA, 257 bp, Glycine max
  Clone ID: 700961049H1
cttctttctcgttattttctatcttcagcaagaagacagataagagatgtcttccatagtgaaaggcatactcataaggagcacagcggatgtgtgcaagaatagcatggttttgaagaagcagagcgaaattgtagggaggagaagcacaagagtgcagtggcagttgcatcttagatcaaaatcaaacacatggaagagaggtagtaggagatcatatcagcctccaatacgtggccaggccatccttaccccag

SEQ ID NO: 16802 - DNA, 263 bp, Glycine max
  Clone ID: 700961013H1
ctcgatacgcttctttgttgtgtcccgagctcagttccttccacccaacatacgacataactctctctctctctctggatatatcatatatcatatatcatgccaccttcccctattactactactactactgttgtgtgacctgagactggttccaagcacagcatttattattattcttctatataagtatactatataagaaagagggtatcaaagccatatcagaaaacacaaaggaataataatatattgcggggggt

SEQ ID NO: 16803 - DNA, 244 bp, Glycine max
  unsure (1)..(244): unsure at all n locations
  Clone ID: 700960981H1
gttccgtccgaagggactcggcttgagctagccaagccggttgtgaagtcacgactgaagcggctcctcgagcgccaattctctggcgttctcagaaattcggcgccggaaaagattgccggaggaatgaaccgcttaacggctccaatgatttcgagccgagctcggcgtgtttggcgaaaatggtgcagagtttcatcgaggagagtcacgatgangcatccgcttcacaccaccgcaaccg

SEQ ID NO: 16804 - DNA, 242 bp, Glycine max
  Clone ID: 700960982H1
gttttgacgatgaagcaaatcatctcttaatgcacaggaacttgcccgctgtcagatgggttggtggtgtacagttggaattgatagctatagcaactggtggaagaattgttcctaggttcaggagttatctccagaaaagttgggaaaggctggtatggttcgagaaaagtcctttggtacaacaaaagaccgaatgctgtacattgaacattgtgcaaattcaagggctgtaaccatat

SEQ ID NO: 16805 - DNA, 242 bp, Glycine max
  Clone ID: 700960983H1
ttttcattttcttataaatgaacaggtataacagtttgtctgcatatgggcagtcaaagcttgctaatgtgttgcataccaatgagctcgcaagacggctaaaggaggagggcacaaacatactgcaaactcagttagcccgggaccaattgccaccaatctatttcgttatcacagtttaatggaggtgtttgttggtatacttggtaaatatgcgatgaaaaatatacagcagggagcag

SEQ ID NO: 16806 - DNA, 243 bp, Glycine max
  Clone ID: 700960984H1
ttttaatccaaatggccctttacattacactaataattggcctcctagtaaacaccctagtactctataaatagcatttgcatgcaccttagtcttcaccaaaatactcctcttggcatcttgtgttgtgtccctcttttaagctatttccttctcttaacacaattggttgtgccaattgccatagtcaccaaccaattaacaaaggtatatatatcatcatatcatcaccaaatgaaaaat

SEQ ID NO: 16807 - DNA, 243 bp, Glycine max
  Clone ID: 700960985H1
cggctcgagccagttttgaatatatttttattccttctttgtttcttcactttcttccatacaccttacgatattatctcagactgttgtcctcaaagttggtatgtcatgtcaagggtgtgcggagcagtgaacagggttttgggaaaaatggaaggtgttgagtcatttgacattgatctgaaggagcagaaggtgacagtgaaaggaaatgtggagccagatgaagttctgcaagccgtt

SEQ ID NO: 16808 - DNA, 242 bp, Glycine max
  unsure (1)..(242): unsure at all n locations
  Clone ID: 700960987H1
tgcactgcaacttagccacttgaacccccttcgtaagcctcttcacatcttcacttcttcacttcttcttccgcactaatacgaaaatagagggaattcacaaaagaggttaccatgttggacgtgagagagaggagaaggagttggatctcacttctccggaagttgncaccaagtacaagatcgccgcggagattgttaacagggctttgcagttagttatttcagaatgtaaaccgaag

SEQ ID NO: 16809 - DNA, 245 bp, Glycine max
  Clone ID: 700960988H1
ctcgagccgataacaatatataatgtcggttgaggagatgcagtcacagaagaggaatgtgtttgacgcagaaacggcgtcgtccttggtgaaggagctgagggacaacttcggttcgggaaggatcggagttatgaatggagagtgtcacaagtgaaggctctgttgaaggcggtggttgataacgaggaacagatcgtcgacgctcttcgttccgacctagccaagcctccactcgaaaccat

SEQ ID NO: 16810 - DNA, 244 bp, Glycine max
  Clone ID: 700960989H1
atagcagctggaatgacagttaatgattggactgcattttgtggttccgacaccacagcaacagagctatctgtaatcgagagtgttttcaagctgagagaagcgcacctagcgcaattgtggatgagatgaggaaatctctcattgatacctatgtctgaactgtggtagtaatagtgttttgttttatgcaagatattgcactgctcattgttgagatcttctaagttaagttttggtgata

SEQ ID NO: 16811 - DNA, 208 bp, Glycine max
  Clone ID: 700960990H1
ggctcctccatatccctccctgctcattctcctatttttgttgacaagccaagttgattgttatggttcagagaaggaaaagagtaaaactttcataatccaagtccagcacgaagccaagcgtccatattcccaacccacaaacactggtacgactcctccctctcttccatctccaccaccgcttctgttatccacacctaccaca

SEQ ID NO: 16812 - DNA, 242 bp, Glycine max
  Clone ID: 700960991H1
caccgttcgttcatcaatggcggttccgctgcattcctagattgctctctttttcaccaattttcattcgttgcgtgtgtttgttcgctgagtgcgttagttattacagcaatggagttcgagaccccaccgcgacgcctctcaactccgccatgacctacgacgaagcctccatggagcgcacaagagcttcgtcaacgccttgcaggaacttaagaacctgaggcctcaactttattctg

SEQ ID NO: 16813 - DNA, 243 bp, Glycine max
  Clone ID: 700960992H1
ttggtgcttcgtttgagaggtggcatgcagattttcgtcaagactttgacaggaaagaccatcaccttggaggtggaaagttctgatacaattgataatgtgaaagccaagattcaggataagagggtattcccccagaccagcagaggcttatctttgccgggaagcagcttgaagatggaagaacccttgctgattataacatccagaaggaatctactttgcacttggtgttgcgacttc

SEQ ID NO: 16814 - DNA, 242 bp, Glycine max
  Clone ID: 700960993H1
gcatttccctcatgttaaaatgaaattaaaagtttggaggaaggacactgatggtgacaggtctcgcatattatctgttagattagagaagaccaattctagacgacactcttctagagcattgtacctcgatttccaaagataaaagaggaacaatggtggttggttcttggtaatacctctacgtctgagctatatgctttgaaaagagtttctgtttcagatcacttagttacctcaat

SEQ ID NO: 16815 - DNA, 240 bp, Glycine max
  Clone ID: 700960995H1
cagaaacagcaaaggttgcaactatgggcctccttatgagtggcaagtatacagcactctgaatggctgttatggcattccctgggttcattacaagggtcggcaaggagatttctacattttggtcatggacatgcttgggcccagtctttgggatgtatggaattctgttggtcaacaaatgtcaccaaatatggttgcgtgcattgcagtagaggcaatatcaattcttgagaagct

SEQ ID NO: 16816 - DNA, 243 bp, Glycine max
  Clone ID: 700960996H1
cgacccttgttaaaacctcatccacggattccgagcctttaagaaagaattctgcttactgtgtccaacctgcatgtattgagcccccttcctgcatccagccatcctgtgttgctcctactagtgcttttcaccccggctcttctctagcaaatcaaagaaagaccggaagccgaaaactgaaattggtaaccaagtgagtccgttacctgagctcattgcagagcctacggatgctcggtc

SEQ ID NO: 16817 - DNA, 271 bp, Glycine max
  Clone ID: 700961001H1
ctctccctgttttccctgccaaagtaacctcgttagtgacaaacaaaaagctctctcacactgagtgaaagaaagagaacaattttgaggacaaagtgaagagagaaagaaaagaagagtgagttgtttcagacagtagtagtagttagatagagaaggtggaagtggaaaaagggtgtttgttgtattgtgaagtgaaacaaggggtgggggtggtgtgaaacaaaaaaaggtgtatagtgagagagaaagagagagagagatggtgggc

SEQ ID NO: 16818 - DNA, 272 bp, Glycine max
  Clone ID: 700961002H1
gagtgaattttaaataattacagataaaataatcgatagctttgattttaaaaattaatcataatcatcggttaggttgcaacataatacttaattcgcttaattttttaactgcgcctcagagtattcataacatattctattaaattaataagctggtgatgtaattaatattaatatgtagttttggcaatcttattggcagaagatgctaggtggagttcatcaatattctggtaggtataatatcttcatgaatctaatataacgtt

SEQ ID NO: 16819 - DNA, 270 bp, Glycine max
  Clone ID: 700961003H1
ggacgatatctccgatcacttctggcagccgcctatccctgtctccgccgcccaaacttcctcccagatgagccgccgcgcctccgagtgggccttccaacgcttcctccaggaagcttccgcctccgcaccctctcctccgtcttcttcctccgccgccgacgtcgtattcgtcgagatcgaagatcaacctaaacccgcccctccccctccgtcaaacggcgccgttctccccaatgcccctggtcccgtcccccttgactccgacga

SEQ ID NO: 16820 - DNA, 270 bp, Glycine max
  Clone ID: 700961004H1
cgcgattatgggctgggaagaacattggaagtgataagtgataaaacagagtttcgttgaatctgcactaaaaccctacgcacacatcttggtgtaagtccaatcgatatagcagcaatgtctacgcttgaaattgaagctcgagatgtcatcaaaattgtgcttcagttttgcaaagagaattcgttgcatcagacttttcagatgctgcagaacgaatgccaggtttctctgaacactgttgacagcattgaaacctttgttgctgat

SEQ ID NO: 16821 - DNA, 271 bp, Glycine max
  Clone ID: 700961005H1
gaacgaagcaatcgcaagtcatctgttctgtcccgcgggagcagacgacctgtcttcatcgccaaacaacctcaaaaacattcatcaacgttcactattaatccatccatcattaagtaagaaaataaggttcgatttttttatctttgttttgcttctgatccatcatggaggtgccgagttcctgggatgcccttcgcaaacaggcaagaaaacttgaagctcagttggatgagcagatgaattcttatcgtaaattggtttctaataa

SEQ ID NO: 16822 - DNA, 267 bp, Glycine max
  Clone ID: 700961006H1
gtgggaagttgaggggaagtgggttgttaaaggagcagttgatgtagacattggtgcaaacccttctgctgagggtggaggagaagatgagggagttgatgatgcagctgttaaggttgttgacattgttgacacattcagacttcaggagcaacccgcattcgataagaagcagtttgttaccttcatgaagaggtttatcaagaatttgactcccaagctcgatgcagagcaacaggagttgtttaagaagcacatcgagggagc

SEQ ID NO: 16823 - DNA, 271 bp, Glycine max
  Clone ID: 700961007H1
gttctttgaagaagaacccttctctttgcgcgtgtcccgttctcttctccaatcctcctccatccccactgtgtgatctgatcctaaaccctatagccatgactaccatggaggttaagctatggaatgacaagcgcgagagagaaatgtatgacaactttggggagctttatgccattatcaaagccgctgagaggcttgagaaggcctatgttagagatataatctcaccccaggaatatgagttagagtgccagaagctcatagctca

SEQ ID NO: 16824 - DNA, 263 bp, Glycine max
  Clone ID: 700961008H1
cggctcgagcggctcgagatgattttgatgggaataactcatgaatagagattctcctccaagcctagaatgagtactatttacaatatggagggcaataggaacaaaatattaaaatgtcactggaaaagaactgatacttggaggagaatctctattcatgattttgatgggaataactcaccatttggtttactcttgtaactaagataaagtgattgtatacaaattccacgaccaaaaaaaaaaaaaaaagggcggcc

SEQ ID NO: 16825 - DNA, 269 bp, Glycine max
  Clone ID: 700961010H1
ctcccttcatttcgaattttcatatatcacattcccttcactttctattctttcttcttcttcacttcaagacagccaaatgaacgatcttatgaccaaatccttcaccagctacgtggacctgaagaaggctgcaatgaaagaagatgttgatttggaagctggtgttgttgtttcttctgctactcctcgcaacgtggaacttacctcttccacaacacacttggacaccgacatgggtctcttcctcgaagaggctgagaaggtga

SEQ ID NO: 16826 - DNA, 266 bp, Glycine max
  Clone ID: 700961012H1
ctctctttcttctcggtccagtgtctctttcaaagtgctgctgctgccagcattgacctgagctagagcagtaaccgtcatcaccactgccagtacggtaccatggctgtgcttcaatctttcgtttcggtccacccagattctcacttccccatacagaacctcccctacggagtgttcaagccccaatccgcttctcctcctcgtcccggcgtcgccatcggagacttcgtcctcgacctctccgaaatctcttccgctggtct

SEQ ID NO: 16827 - DNA, 271 bp, Glycine max
  Clone ID: 700960980H1
cggaattccgctcgacagctcgagctcaaaactgagaacaagaagaagaagaaagagagagagtgaaaacgggaaaagcaaaaagttgtttctgtgattgattctctgcaaccgaatcatcatcagccacttcttcccgtttcatctctccatttcttcttttcttccgctctggttcagtaaggcgaagagggttaacgttattcataatggttgcaacagccgctacggcgtcgtttcttcccgtgcctttgccagacgctggaaaagg

SEQ ID NO: 16828 - DNA, 256 bp, Glycine max
  Clone ID: 700960933H1
gtcttcgtcgaccccaacaacacaacaaagttcctcgtacccgccatgaagaacgtccacgcttctctaacaaagtacaacctcgacaaaaacattaaaatctcctcacccatcgcactctccgcgctccagaatcgttccccgcctcatccggttccttcaaaaccgaactcgtcgaaccggttatcaaacccatgctcgacctgctccgccaaaccggttcctacttaatggtgaatgcgtatccgtttttcgc

SEQ ID NO: 16829 - DNA, 248 bp, Glycine max
  Clone ID: 700960934H1
gcttttccctcgttgaaatgaaaatgggttcttctttgtggactttgtgtctaattttggcttcactagcctcttctgcattctgtgcctttccacggaggccagtggatgttccattcggcagaaactacttcccacttgggcttttgatcacatcaaatacttcaatggaggttctgagattcaacttcatcttgacaagtacactggtactggcttccagtccaaagggtcatacttgtttggtc

SEQ ID NO: 16830 - DNA, 75 bp, Glycine max
  Clone ID: 700960935H1
cttcgaaggaatttgtcaaagagtagccatcgccccaacgatcccgtgtcccttcacttctccacacaacatacg

SEQ ID NO: 16831 - DNA, 250 bp, Glycine max
  Clone ID: 700960937H1
atatattttcctttttagctttgattagagtggcctagttgttgtttttctcaatgagaagggcttccactatgcattgcgcatattggcgcttctgtgttcccttgttgctacttgctagcttcagttatgcaccttttgttttggcgacaactgaaatttcagggaatgaagtgagcactgatggaaaggttttaaatgaagagttagcaaaacctaatctacaaggacatgatgaagaagcaaagtt

SEQ ID NO: 16832 - DNA, 251 bp, Glycine max
  Clone ID: 700960939H1
atccgaggcgaagagaagagaaaaattaagatggaggggaaggagcaggatgtgtcgctgggagcgaacaagttcccggagagacagccgattgggacggcggcgcagagccaagacgacggcaaggactaccggagccggcgccggcgccactggttgacccgacggagtttacgtcatggtccttttacagagcagggatagcagagtttgtggccacttttctgtttctatacatcactgtcttaacc

SEQ ID NO: 16833 - DNA, 254 bp, Glycine max
  Clone ID: 700960940H1
ctcaagcaatggacaagctcggacaagccgaacgaatcatcgccgacatccgaatcggcgccgaccgcctcctcgaagcgctcttcgtcgcggcggcgcagcctcaccaaggcaacaagcctctccaagtcttctcaaagaagacgcatttatgcgtcagtatcttcaagaccttcggtcgcttggtaaggagctagaagagtctggagttctcagcgaatcagttcgatcgaggaaagacttttggggcttgc

SEQ ID NO: 16834 - DNA, 252 bp, Glycine max
  Clone ID: 700960941H1
tcagcctttgagtccattattagcaaaggtgggagagttgtggaaacagatttgcttaatctgattgagttattgatgaatcaattgcttaaattggatggtatagtggctgatggggatgtgaaactacagggaaaatgcaggtaaaaagaattcaaaagtatgttgaaacacttgatgtgctgaaggttaagaattctatgtctagtagcaatggagaccatgccacagtgcagcttcaacagaagcatt

SEQ ID NO: 16835 - DNA, 254 bp, Glycine max
  Clone ID: 700960943H1
gcaagtcgagcagtgcggacatttcatgggcatgagggagatgttaatgcagtcaaattctttcctgatggaaatagatttggaactggttcagatgatggaacctgcagattatttgacattaggactgggcaccaacttcaagtttattatcagcagcacagtgacaatgagatcccacctgtgacttccattgcattctctgcttcaggaagacttctctttgctggatacacaaatggagattgctatgt

SEQ ID NO: 16836 - DNA, 251 bp, Glycine max
  Clone ID: 700960944H1
ggacaaacttaaggctgagcgtgaaagaggaatcaccattgatattgctttgtggaagtttgaaacaacaaagtattattgcacagttattgatgcgcctggacatagggatttcattaagaatatgattatgggacatcccaagctgactgtgctgttcttatcattgattcgaccactggtggttttgaagctggtatttccaaggatggacagactcgtgaacatgctctgctttcattcacccttgg

SEQ ID NO: 16837 - DNA, 252 bp, Glycine max
  Clone ID: 700960948H1
aattaatcaaacatggctagggttagtgctttgtttcactctttgctcttgatttcttcccttgtattggcttctcaaatccatgtttcctctgggaaactagtccctggactatcatggaattactatttgttgacatgtcccaagcttgagaggattataaggaagcatcttgaggatgtcttcgagaaggacagtggagtagctcctggcatacttcgactcttcttccatgactgctttcctaatgga

SEQ ID NO: 16838 - DNA, 250 bp, Glycine max
  Clone ID: 700960949H1
cggtccaccacctagtaaatggaagggcacctgccaaacttctaaaaatttcacatgcaataataaaatcattggggctaagatttacaaagtagatggattttttagcaaggatgatccaaaatctgtgagggatatagatggtcatggcactcatgtagcatcaacagcggctgggaatccagttagcacagctagcatgttaggccttggtcagggaacatcaagaggtggcgtgacaaaagcacgc

SEQ ID NO: 16839 - DNA, 73 bp, Glycine max
  Clone ID: 700960952H1
ctgtcttagaactttacctttctgtcctcatggagtagtaaagaagtaactaatcaaccacaaacctaaacaa

SEQ ID NO: 16840 - DNA, 251 bp, Glycine max
  Clone ID: 700960953H1
ttcaagccttagaaaccgtaatggaccggttcagatgccttatactgtgcttcttcctaccagtgaggaaggccttactttcagaggaattcccaacagcatctctatctaaggccagagtgcgtttatgtgtggttctctttccaaacctacgttacctttctcgttgacgagtaaatatgcaagcttatgcatgcatataataattgtcttatgcattcttaagtgttgtatgtggacgttatctagtt

SEQ ID NO: 16841 - DNA, 107 bp, Glycine max
  Clone ID: 700960954H1
aactattctctctcgttctctgatttctgaaatccctcgcccatggcttcctcttccctctctctcgcactcgctctcaccctttgccttgtttccactctatgtaa

SEQ ID NO: 16842 - DNA, 248 bp, Glycine max
  Clone ID: 700960955H1
ctcattaattgcaagaatggcacttcgttgcttggtgatgtccctttctgttctcttcactcttggtcttgcgagagaaagccatgccagagacgaagatttttggcatgctgtttggccaaacactcccttccaagttcattgcgagatattctaaagcctggccctgcaagtgttgaaatcgatgatcaccctatgcaaattgaagaaacacagtacccgaaaaccttcttctataaagaagacct

SEQ ID NO: 16843 - DNA, 252 bp, Glycine max
  Clone ID: 700960956H1
ataccaggaaagtaaatcattctagaatgatacactacgaacaagtcactgcccgtttatccccttgtttgttttacctcgttttttgtattcgtttttctcgtttgtagttcagtgttaatttgactttgtagtttggcatgttgaaacaattaatgaagtatctgattcaaaagttgtgtttgggtttttgttttctcccactctaactcaattgcagagattgcaacctctaaaaactaatgaacaatc

SEQ ID NO: 16844 - DNA, 249 bp, Glycine max
  Clone ID: 700960959H1
tttttccctcaccaaagaagaaccaaaacaatggcggatcaactcaccgatgaacagatctccgagttcaaggaagccttcagcttgttcgataaggacggcgatggttgcatcacaaccaaggagcttggaactgttatgcgttcattggggcaaaacccaactgaggcagaactccaggacatgatcaatgaagtggatgctgatgggaatggtaccattgacttccctgagttcctaaacctcatg

SEQ ID NO: 16845 - DNA, 66 bp, Glycine max
  Clone ID: 700960962H1
cttagctcaaacctcacctcaataatctgtcgtgctagctagcttaatcatattccaattccacac

SEQ ID NO: 16846 - DNA, 245 bp, Glycine max
  Clone ID: 700960963H1
attcaacaacgccttaacccgtcgtcatgggcgaaaaagaaaatccttctgcagaatctgcaccaaccacaaccgttcccaccgtttccagaaccacaaaaaaacccaagaaactaaccctaatccctctgatattcctcatctacttcgagttcgcgggcgggccctatggcgagctacccgcggtgcaagccgcgggccccctcctagccctcctgggcttcctcgtcttccccttcatctgg

SEQ ID NO: 16847 - DNA, 247 bp, Glycine max
  Clone ID: 700960966H1
tctggtctcccgaatcagaaaccctaatcagtgtttgggatttcagataaagaaatttaaacagatgaagggtctcttcaagtctaagcctcgcactcctgcagatgtagtgcgccagaccagagacttctgctctttgttgatcgcagccccgaaacccgcgaaagcaaacgtgaggagaagcagatgtccgagctatttaaaaatatcagggagctaaagtcaatcctgtatggaaatagtgaat

SEQ ID NO: 16848 - DNA, 244 bp, Glycine max
  Clone ID: 700960970H1
gtctgaactctgaaacctgatacgctgaagctgagttggagtcacagttgttgttggtagccatggatgcagtagctacggcgaaaccgcttctgtcactgtcgtttttgcttttgctaccgtctttcttccgatcgccgtcgcttacagacccggcgacatcgttcccatgagccgcatgggtcaataccactcctcgcgaaccgtgtggcaggacctcattggccgtcactgccccatcttc

SEQ ID NO: 16849 - DNA, 246 bp, Glycine max
  Clone ID: 700960971H1
ggaactgcaggttatgcgaatgcttgaccatactaatgttctcagactaaaacactgtttctattcaactgctgagaaagatgatttgtaccttaacctagttttggagtatgtacctgaaactgttacagagtttcaaagcactatgtcagaatgcaccaacatatgcctatcattaatgtgcaactgtatacataccagatatgtcggggtttaaattatttgcatcatgtgattggagtctgc

SEQ ID NO: 16850 - DNA, 97 bp, Glycine max
  Clone ID: 700960973H1
ctagtgtaataaaggacgaaagttaggctattctttcaaccgtaagtgtgacttggtagccacttctctgaaataacatatgttactttgtcatttt

SEQ ID NO: 16851 - DNA, 88 bp, Glycine max
  Clone ID: 700960974H1
ctgctttcgagccgtctctcagtttcactattgctgggtgtgagttcatcagatacccttcagaatgtaggggcaattccacacaaca

SEQ ID NO: 16852 - DNA, 217 bp, Glycine max
  Clone ID: 700960975H1
agggttccatcccatctattctatctatttagataaaacacgaaatcccactcttaatcgcaagcaattcctctctctgagagaagttctcgaaattcttctgatactcgtagaattttaatggcttgttcatcatccgattcaaaaaaaccagtgacgtcgctgttgttcttttccttcctaattccgataccttccgattctctttccacacaac

SEQ ID NO: 16853 - DNA, 257 bp, Glycine max
  Clone ID: 700960932H1
gtgccggcgcgcgctgaagtttgctaggttcatgagcaggttcgggaagagttaccgaagcgaggaagagatgagggagaggtacgagatattctcgcaaaacctcaggttcatccgctcccacaacaagaaccgttgccctacactctctctgttaatcattttgctgattggacttgggaggagttcaaaagacacagactaggcgctgcccaaaattgctctgccactcttaacggcaaccacaagctcactga

SEQ ID NO: 16854 - DNA, 243 bp, Glycine max
  Clone ID: 700960976H1
gaggacatgttctgccatgaattccatcttgttgaccttagggtcatggataactgcttgacagttaccaagggtgtggaccatgttttcaatcttgctgctgatatgggtgggatgggttttatcagtccaaccactcagtcattatgtacaacaacaccatgattagcttcaacatgattgagggtgccaggatcaatggtgttaagaggtttttttatgcctctagtgcttgtatctatc

SEQ ID NO: 16855 - DNA, 237 bp, Glycine max
  unsure (1)..(237): unsure at all n locations
  Clone ID: 700960978H1
cagtaacaaggacacaactgacaacaaataagnaattgagcatgagtaggataatgtaaattattgtgtactggcttgggtggctaatcatgcaacattaatcaggtgggaagatacatcctggaattggcagggcaagagcatttaggacctctctgcccactgtatgtttttttaataggggtattgcatttttattcccaccaacttctgaagctagaaattcaatgtttgatg

SEQ ID NO: 16856 - DNA, 247 bp, Glycine max
  Clone ID: 700960979H1
ctcttcttcccccaacaatataaagcagaccataccattaagaaacaacacatctatctcagtccccaaaccaagaaaccctaaattaaattcatgtgctcctccaggtctaccagtgctgcaccacaagaccttgttacttggaacaaggccacggcttggcttccttaaaacacatggatgcgtgtcataatcgtgccaacaactttgtctctaggtccatgaccatgggttacggcacttccta

SEQ ID NO: 16857 - DNA, 111 bp, Glycine max
  Clone ID: 700960902H1
tccatatccctccctgctcattctcctatttttgttgacaagccaagttacttgttatggttcagagaaggaaaagagtaaaactttcataatccaagtccagcacgaagc

SEQ ID NO: 16858 - DNA, 257 bp, Glycine max
  Clone ID: 700960903H1
tgctaaccttcagagattttacttcgagaacaagcttgaaaatgctacaaaggacacaaataatatgaagttcaggaaccccaaatatttgtcaatattgaaccatttgaggttctacttgccagaaatgtatccaaactgcataaaattttgtttttggatgatgacatagtggttcagaaggacctaactgggctatggaagattgatatggatggcaaggtgaatggagctgtagaaacatgttttgggtcatt

SEQ ID NO: 16859 - DNA, 259 bp, Glycine max
  Clone ID: 700960904H1
ctgaaaaatcaaaagatagtcccggtggaccatggcaatttgttggtctgctaccattgtttgatcctcccaggcatgatagtgctgaaaccattcgaagagctcttaaccttggtgtcaatgttaagatgattactggggatcagcttgccattggaaaggaaacaggccgaaggcttggaatgggaacaaacatgtacccttcatcggcattgcttggccaagacaaggatgcttctatttcagctcttccagttga

SEQ ID NO: 16860 - DNA, 260 bp, Glycine max
  Clone ID: 700960906H1
aaaagatccaacatctgacatggctataatatctcgcaaaggatctactcttgttagagaaatccatgagaagcagagtatgaacaagtctcgccaacgcttttgggaacttgcaggctcaaaacttggtgatatcttgggtgttgaaaaaacagcagagcagattgatgcagacactgctgaagtgggtgaagatggtgaaattgattttaaggaggaagctaagttttcacagcatatgaagaagggagaagccgtga

SEQ ID NO: 16861 - DNA, 258 bp, Glycine max
  Clone ID: 700960907H1
actcaatggcttggcactcgttcctcttattagcgacggccattctcgccgttgtgtgctccgccgtgagcggttgctcgccatcggatagggcggcgctgctggccttccggaaggcgctgagcgagccctaccttggcctcttcaactcgtggacgggctccaactgctgcctcgactggtacggcatcagctgcgacgccaccaccggccgcgtcaccgacatcaacctccgcggggagtccgaagaccccatct

SEQ ID NO: 16862 - DNA, 260 bp, Glycine max
  Clone ID: 700960908H1
gtgatgttgtgaatctgagtgaacaggttggggagcttatatcgaatattgtgtgtagaatgatacttggccgcagtaaggatgatagattcgacctaaaggggcttgctcgtgaggttctgcgtttgactggagtgtcaatattgcagattatgttccttggacaggcttcttggatcttcagggactaaaaggaaaaatgaagaaaatgagtaaggcatttgacgaagtgtttgaacaaatcataaaagaccatgaag

SEQ ID NO: 16863 - DNA, 258 bp, Glycine max
  Clone ID: 700960910H1
gggtttagggttttgattcctcagtccaagccgctctccgcaggcgaggttctgggttgcactgcgcccaaggtatcgtcgaaattgctcggtgatgatggtgagagtagtgttttggtttttgtggcggatggaaggttcacttggaggcgttcatgattgcgaatccggggattagggcattcaggtatgacccttacatggggaagttgtttctggaggaatatgatcatttgggtatgaagaggtccaggaaaa

SEQ ID NO: 16864 - DNA, 261 bp, Glycine max
  Clone ID: 700960911H1
ccttcacaagattctcacaaacaactcttgagaaagaaagaatggctgccaacacattgatgagttctgccatctcagccttcccatctctcctttcctcctcaaaatccagatttgccgcagcagttcctctttccagctttgttgtcaccaatgcctcttcttctcgcttttccatgagtgctgactggatgcctggccagcctagacccccctaccttgatggttcagcacctggtgactttggattcgaccctcttc

SEQ ID NO: 16865 - DNA, 258 bp, Glycine max
  Clone ID: 700960912H1
gctgctgcatctattggttacataggtgttggaacggttgagttccttttggatgaaagaggttccttttactttatggagatgaacactcgtatccaggttgagcatccggtgacagaaatgatttcctcaacggattgatagaagagcaaattcgtgtagctatgggagaaaaacttcgatacaaacaggaggatcttgtcctcagaggacattctattgaatgccgtatcaatgcagaagatgcttttaagggat

SEQ ID NO: 16866 - DNA, 260 bp, Glycine max
  Clone ID: 700960913H1
ttgcgcatgctctctactcacctttgtagtcccggccgtcaaaatacccattcccatcgcctttctctctccttcttcctctgccccccaaaaaaatgaagcgcttcatgctcccaagaaaccctctcagcgacgcagagagcttccttcttcgccaagcccaaccccaactaccagctttgccaaactccgtccctcttctcacaaacacaaaccctccaaagagaacgaccttccctccgatcccaatctcgttactc

SEQ ID NO: 16867 - DNA, 261 bp, Glycine max
  Clone ID: 700960915H1
cctacttctacttccctttgttctcaaaccttatcccttatcctcccaaaaccaaaccatgtctacctccgcagcttctctcgcactcccaaccctcactctccgaactcgacaacctctctgttctccccaatgcttctcctcgtccctctccctcacccctaactccaaacccatttccatttccgccgttttcctcaaaacaacgctgtcgtcgtcgtcgccgttgtcgctgtcgtctcgcttcgttccccatgtctc

SEQ ID NO: 16868 - DNA, 243 bp, Glycine max
  Clone ID: 700960916H1
tttaatttccatagttaattaaagcttcaacgtttctgtctaaaaaaacacctctttcttccaggtgctcaacattcctaccaagattaacaagggtactgttgaaatcattacccctgtggagctcattaagaaggggacaaggttggatcttctgaagctgcattgcttgccaagctagggataaggcccttctcgtatgggcttgtggttctttctgtttatgataatggttcagtgttc

SEQ ID NO: 16869 - DNA, 257 bp, Glycine max
  Clone ID: 700960918H1
ctgttgtgtctgacagttggagtgttttctcgtttgctgtgctcagctccttatggagctctcactctctccaacttcacatcgagttccttccacaattcccactttgtattccgctaaactatcatccacctaagccaccaagtcacaacaacctttgttcttaagattttccaaacacttcaactcaattgggttgcaccatcacagtcacagatgctgctcaaatgctgttcccgagagaccccagagaccca

SEQ ID NO: 16870 - DNA, 256 bp, Glycine max
  Clone ID: 700960919H1
aaccaagcttctctgttaaaaaaaaattaggcgtctaaagggccaaagcttagaaagttgaagcttttttgttgaggtgaaagtgaaatggttggcaaggataatctgagggctgaggacttgaacttgtgctttaagaagcttatgatggtggccgggagtgggaacagtgagaaaggggtgaacttgaaggttggggtgatcaccgagtggaaggatattcctgtggagcttctgatgcaaattctgtcccttg

SEQ ID NO: 16871 - DNA, 256 bp, Glycine max
  Clone ID: 700960920H1
gtggctcatgatgggagtggacaggtgaagacaattcacgaggctcttaaattggtgcctaaaaagaacaagaagccttttgtcatttacgtcaaggccggtgtctaccaggagtatattatgatcaacaagcactgacccatgtcaccatgatcggagatggccccaccaagaccagaatctccggcagcaaaaactacgtcgatggcatcggaacttacaacaccgctaccttcggtgtgaacgctgctaactt

SEQ ID NO: 16872 - DNA, 256 bp, Glycine max
  Clone ID: 700960921H1
ctcgagcctttatcggctcgaggaggagatgaaagtatcttatcaatgggctagccctgtgacaagggagatggaaatttcatatcaatgggtcaatcatatgagaaggaagatggcaatttaatatctctgggcactcatataccaagggacatgagaactttataccagttggtccaacctatggtaaatcaggagaaaatttcataactgttgctccttatgacaagggtactgatcatattatatcactggg

SEQ ID NO: 16873 - DNA, 257 bp, Glycine max
  Clone ID: 700960922H1
cgccggaatgcagctcgaggacggccgtaccctcgccgactacaacatccagaaggagtcaacccttcacgttgtccttcgtctccgtggtggcatgcagatcttcgtcaagactctcactggcaaaaccataacctagaggtcgaaagctctgacaccattgacaacgtcaaggccaagatccaggacaaggagggaatccccccagaccagcaacgtctcatcttcgccggaaagcaacttgaggacgggcgcac

SEQ ID NO: 16874 - DNA, 257 bp, Glycine max
  Clone ID: 700960923H1
cgacctcctcactttctaccacttcaactgctcttccctcagcctcctcggtcgtgttcggctttcttcccgcggcgtcaatgtcaccgttggcggcaacttatcctctctcgagatccacatcgaagccctcttagcctacaactctctgtttcacgacactgatttcaagctcgccaattgtcatcagctcttaaacgacaaagtagcccaggaatgtggattcacttctctatctattcggatcgtcgatgaac

SEQ ID NO: 16875 - DNA, 258 bp, Glycine max
  Clone ID: 700960924H1
tggatcgtcttatgaagcagatcacaaatttcatgtctgatattgctgatgagttcaaaattgttgttgttgaagcaataagatcattgtgcctgaagtttcctttaaaatatcgatctctgatgaatttcctgagtaatattcttagggaggaaggtggttttgattacaagaaggcaattgtagattcaattgtgattctcattagagatatccctaatgcaaaggaagctgggttgcttcatctttgtgagttca

SEQ ID NO: 16876 - DNA, 256 bp, Glycine max
  Clone ID: 700960926H1
ctaccccaaagtgcaaaagacatttgaaagagtttcaggttactgtgagcagaatgacatacattctccatatataaccgttgaagaatctgtcacatactcagcatggttgcggttgccaacagaaattgattcgtcacgaaagggaaatttgttgaagaagtccttgaaacaattgaacttgatggtataaaggattgtttagttggcatccctcgccagagtggcttgtctaccgaacaacgtaaaagactaa

SEQ ID NO: 16877 - DNA, 257 bp, Glycine max
  Clone ID: 700960927H1
gggtgggctcaccgttgagcaggctatccagagcaagaagttgttcatcttagatcaccatgactatctcattccatatttgaggaaaataaatgcaactaccacaaagacttacgctgaaagaaccatatttttctgaaaagtgatggaaccttgacgccattggccattgagttaagtaagccgcatcctcagggtgaaggatatggtcctgttagcgaagtctacgtgccttcgagcgagggagttgaagctta

SEQ ID NO: 16878 - DNA, 250 bp, Glycine max
  Clone ID: 700960929H1
aaacaagctgaagaattggattcgaaaatcgtagcgtacgttggtgcgattgaacgatacgatgggaagaggaaaattcaagagcaagcccactggtcgccgccagttctccaccccggaagatatgtctgctggaacctctaaccgtcctcgaacttttagacagaaagaagctgcgcatgaagaggaagaacccgaggaagtatctggagatgaatctggagaagaatctgaagaagaaacttctaag

SEQ ID NO: 16879 - DNA, 256 bp, Glycine max
  Clone ID: 700960930H1
tgagcgtggaagaggaaagagcaagcagcaacagctcgtggcggttccgattatttattaagatcaatgttgcatgcagtatctgcccctagcttttgtttaagctatcccgggaaccttcattatcctccttctcagttcaaaaaacatgtttttctgttcgttgttcggtttcacagacaaaaaatggagctaaagtggaatatactccttggctcattattggcttgggcaatcctggtaacaaataccatgg

SEQ ID NO: 16880 - DNA, 255 bp, Glycine max
  Clone ID: 700960931H1
caatgttggtacatcctgataaaaatatgggtaatgagaaggctgcagaagcctttaagaaacttcaaaatgcatatgagattctaatggattcgttgaagcgaaaagcttatgatgatgagctaaggagagagggattttgagtgtatttcgtagatttcatgatgcttctcgtaagaatggtaggcatggattctttccttcaggatttgcacgatctgatgcagatggcaaggatccatttggtgattcaag

SEQ ID NO: 16881 - DNA, 262 bp, Glycine max
  Clone ID: 700960901H1
aatttcttatcttttctcattcccttctcttcttcctcaacacacacaaaacatttcttccaatttcaatttctcgtcgtccctcatcatggctcgtctcgcgatcgctgtcgccgccgtgctcctcgtggccctctccgcctccaccgcgacggcgcgtccctgcaggaccttcataatctcctcctactcgttccgcaaccctaactccaacaccttcgccaccatcaccgagatccgatccttcacccctctctacatc

SEQ ID NO: 16882 - DNA, 95 bp, Glycine max
  Clone ID: 700960861H1
cccacaccacacccatgagactcctcctgctccttattctcctctttcacgcggcggaagccaggggacagtggcagctcctccacacaacatac

SEQ ID NO: 16883 - DNA, 255 bp, Glycine max
  Clone ID: 700960862H1
ttcgaagaactcgccaagcacgacaactggcttcaatgccttgaggtttttagatggatgcaaaaacaccgatggtatattgctgataatgggatttactcaaaactcatatcagttatggggaaaaaagggcaaaccagaatggctatgtggcttttctcagagatgcgtaatactggttgtcgtcctgatacttctgtctacaatgcgctaattacagctcaccttcattcgcgggacaaaacaaaggctttg

SEQ ID NO: 16884 - DNA, 144 bp, Glycine max
  Clone ID: 700960863H1
agagaaacagtgtttcatcatttgggtttcgcagaagagagagaaacccatttctagagagagaaactcgcagtcgcagacatgtcttccttcgatgccttcgccgacgacttgaacgtcaactcttcttccacacaacatacg

SEQ ID NO: 16885 - DNA, 113 bp, Glycine max
  Clone ID: 700960865H1
atttcttacctcttggcatggccattcaaatgtcttcttttgtctttgtttctcttacaattttattttgcttctcttcgttggagaagagttttgccttccacacaacatac

SEQ ID NO: 16886 - DNA, 255 bp, Glycine max
  Clone ID: 700960868H1
ctctgaggaacacactgacatttgcaactggaaaggttgctagaaggaaggagaaagaagcagcagctgcacaaaaagaggcaaacattgctttatccaaacagttaggattgggagctgcttcaatgaacattgaagataaatataaattcatgattactgccacaaacactaaaagagagggagcagcagatagtgcctgggatgattaatgaagtattttgttcttctcatatttgattgatgacaactgct

SEQ ID NO: 16887 - DNA, 257 bp, Glycine max
  Clone ID: 700960870H1
ctttttctcgctgctcttcaaagcaatcgcaagcgcgttttgagtctcttttcatcgcagatcctctgcgtcgccaccagattcactcacgtttcgtgattcgaacgcggcgtcgtttagactcaagcttgcgggagaagagaaaaccctaatcagacatggggaagaagaagccgacggcgagggacgaagagaacgcggtacagcaaggcggcggcggtaaatcgaagaagaaggcagtgttaatcgacgacgac

SEQ ID NO: 16888 - DNA, 254 bp, Glycine max
  Clone ID: 700960871H1
ctagcacacaaaacttgctatagtcgtgagctataactcatttgaggctctgtgagaattgagaaatggctaaagatgttgaggttcaagagcaaggaggagagtactctgccaaagactaccatgaccctcctccagcacctttgttcgacccagaggagctcacacagtggtccttctatagagccctcatcgctgagttcatagcaacccttctcttcctttatgtcactgtgctcaccattattggctac

SEQ ID NO: 16889 - DNA, 243 bp, Glycine max
  Clone ID: 700960872H1
cagctgtctgctgttagatctgtacccgcctagccattgatttggaaaagtccaacttcaaggatgagtaagcttcagagtgatgctctaagagaagctatctcaggaatcatggctgattccaaggaaaagaacaggaaatttgtggagaccattgaactccaaattgggttgaaaattatgatccccagaaggacaagcgtttcagtggcttgttaagttgcccatatctcgccccaagat

SEQ ID NO: 16890 - DNA, 253 bp, Glycine max
  Clone ID: 700960873H1
gaaagagaatccgaggcgaagagaagagaaaaattaagatggaggggaaggagcaggatgtgtctctgggagcgaacaagttcccggagagacagccgattgggacggcggcgcagagccaagacgacggcaaggactaccaggagccggcgccggcgccactggttgacccgacggagtttacgtcatggtccttttacagagcagggatagcagagtttgtggccacttttctgtttctatacatcactgt

SEQ ID NO: 16891 - DNA, 254 bp, Glycine max
  Clone ID: 700960874H1
cttcaattctctttgttgttgtttaggactgtaagaagactttaccaactttgctatgcttaggaggctcattacaacctatcacgcgctctctttctgctcctcttgccccaggtggcgtggaaaagcttattgtcatggatgcctcctatgatatgcttcaagcctgtaaaaatgctcaccacaatgccaccgttgagacccactttcttgttgctgacgaagagtttcttcctatcaaagaaagctctgtg

SEQ ID NO: 16892 - DNA, 256 bp, Glycine max
  Clone ID: 700960875H1
cattcagttcataatttcttccaacaaattatatttttcttacaaaaaaagtggcaggtgaggtggtgaagaaggaagagtctctcaacctgaaagtcactaacaagagccatgttcaatcagaggagaaaattggaagaaaagagtaccaattggtcacttttgatcttccctacttggccttttactacaaccagaagctcttgttttacaagggtgaagatttcgagggcatggtccaaaaactcaaagttgg

SEQ ID NO: 16893 - DNA, 252 bp, Glycine max
  Clone ID: 700960876H1
caaaagtgtcagtattaggtggcatcaccgaagtgcagggagctgccaacagcgtcgagatcaacaatctcgctcgctttgctgtagaggaacaaaacaaaagagagaattcagttctggagtttgtgagggtgattagtgcaaagcagcaagtggttgctggagtgaattactacataacattggaagcaaaagatggtgagattaaaaatgagtataaagcgaaggtttgggagagggaatcccaagagt

SEQ ID NO: 16894 - DNA, 257 bp, Glycine max
  Clone ID: 700960877H1
gtctggaaaccctcccactcatccttcctactaagagatggtttaagatgcaattacctcgctgaaggagaataccggttcgagccaatacgcgattgcgaagttcatcgaggagaagcacaagctgcttccaccgaacttcaagatcaatcttctctaccatttgaagaagctcgtcgccgccggaaaactcgtcaaagtcaaaggctcgttcaagctcccacctaccagacctgctgcatgcatcttcttcttct

SEQ ID NO: 16895 - DNA, 257 bp, Glycine max
  Clone ID: 700960878H1
aggtcctcaaagatctatgcttacctcttcctttgcatgctcttcctctcctccgccactcccattctcggttgtggctactgtggcaaaccccccaaaaagcacaagcctggtaaaacaccaaagacacccacagtacccgttgttaagccaccagtcacagtccctcccattgttaagccaccagtcacaatccctcccattgttaatccaccagtcacaatccctcccattgttaatccaccagtcacaatccc

SEQ ID NO: 16896 - DNA, 254 bp, Glycine max
  Clone ID: 700960879H1
gaattaaaacatattttgttttcattgacgggtctaccgttatggttacatgatattccgggtatcgtattcagatctgacaatgagcaattcaagttccacatgcaaaggttcaccgcgaaaatagccaacttaatgaaatcagccaatctttttgcttcacaaggagggcctatcatactatctcagattgagaacgagtatgggaacgttgaaggggcatttcacgagaaaggactgtcctatattcgttg

SEQ ID NO: 16897 - DNA, 254 bp, Glycine max
  Clone ID: 700960880H1
ggcgcgcgcaccctctgttccagcgactcctaattaagttgggaaataaaaaagacttcaaatttcccagatggctgcagcctttgcttccagatgctctcgtgtgggccgttctctgttctggtggattaagcaacagttcccctggtttatttacctcatcacatggcatgacatgcaacaatttgttttctcagcaacaacgtaccttcatacagatgaggactgttctcaaggttgtcgataactcaggt

SEQ ID NO: 16898 - DNA, 257 bp, Glycine max
  Clone ID: 700960882H1
gcattccatagttctcagatagggcacgtctctcgcggcctcttctctccctcgcgccgcccacactaaaaggttattgctctattattgtttgacgatggctgatgctcatgggactgataagaacattgaggtgtggaaaatcaagaaattgatcaaagctcttgaggctgccagaggaaatgggacaagtatgatttcccttatcatgcctccacgtgacaaattatctcgtgtcaccaagatgcttggtgatg

SEQ ID NO: 16899 - DNA, 120 bp, Glycine max
  Clone ID: 700960884H1
gcaaagggcattttcaacaggagcgtggtcacatccgtataagacgatggtaaggatctcaggtgtggatgctaaatgttgggcgcactaatcccttgcaaaccatggctgagttaagaa

SEQ ID NO: 16900 - DNA, 255 bp, Glycine max
  Clone ID: 700960885H1
ggctttccctttgatcttgattggaggattgttccttctctcgagacgatccggagggatgggaggtcctggtgggcccggatttcctcttgcttttggtcaatccaaagccaagtttcaaatggaaccgaacaccggagtgacatttgatgatgttgctggggtggatgaagccaagcaggactttatggaggttgtggagtttctaaagaagcctgagaggttcactgctgttggggctcgcataccgaaaga

SEQ ID NO: 16901 - DNA, 236 bp, Glycine max
  Clone ID: 700960886H1
ctccctcctcctcctccttcttcttcatgacatggcctcatcaacaaggttttcccctctgccccaatccgaacctgatcgtgacaaccatgaagaccaattacccctctcaatttccgtggaatccacaaacactaggtctggcatttcgtccgaacattattacgccgaagaaatattcagcatcagcgcacgcacatgcgaaatgattcaagacctccttggcctcacgttgt

SEQ ID NO: 16902 - DNA, 100 bp, Glycine max
  Clone ID: 700960888H1
actcacaattacatgccactctttctctctctcccgccctctctctctctgtgcaatggcaatagcaatggatcagcaatgctgctacagagtctgagat

SEQ ID NO: 16903 - DNA, 252 bp, Glycine max
  Clone ID: 700960889H1
tttgcttatcttcgatagcagcttcttgaatctggaagatatatttggctattcaaggcattgtatggtcttctgatgtcgcttcctcaggtatctgcaaacaatttcttcttacctattgagaaattgttgaggcattgatttccttgtatgaacgggatgtgttcaaatatccttctttggagcaaagtgccgcctttaagatactaaaaacgcgtttaaaagctgtgccatcgtattcattcaatggcg

SEQ ID NO: 16904 - DNA, 203 bp, Glycine max
  Clone ID: 700960890H1
ttttgaggtagcaagtgctgacaagatatttgaaagcacatccaaggagcagttgagcagagtaggctcataagaggctcatctcactccataccaagaatgtgtatactttatttcccttggggaaatatattacaatttatacccagttgtattctggaagtttggatttcatacaattccaatcatgtggatgttgcatc

SEQ ID NO: 16905 - DNA, 123 bp, Glycine max
  Clone ID: 700960891H1
gagcataccatggtgatgtgcctgaccgtcctcgggccgtgtcagtggcaacgcaacgagcggacccgcgagagtcccaacttgccaccgcgccgagtcacacaacactggccccggcccaaa

SEQ ID NO: 16906 - DNA, 253 bp, Glycine max
  Clone ID: 700960860H1
tcgatttgttgtggattggatgatggaaaaaccagcaagcccctttcattgaaagtgtgcagtgaactgtaattgtgaaaaggttggaagatctggccaaagaaggtgatagccctgtagattcgttcccatggtttgatccttcccggtacaacgcggcgtgttcgaattctgatcgcttttacgcgagatagggggaccaccctctaagcctaagtattcctcaatgaccgatagcgtacaagtaccgtga

SEQ ID NO: 16907 - DNA, 254 bp, Glycine max
  Clone ID: 700960892H1
gcaaaattcctttgggccaacccgaggagtgatagccacatgctccaatcaagattagtctctaacccagcaccaaaaggcaaaaaaagaagagtcaattcttcaatgtgacaccaaacatctagactatggggagcatggcaccaagttggtctgatcaatggggaagtggagggtttgccagtgaccactatgagaaggaggaagaggagaagacgaagatgaagaagagtgggagcagcaagaagatggca

SEQ ID NO: 16908 - DNA, 254 bp, Glycine max
  Clone ID: 700960893H1
cttcctccctatcaacccacgtttctcttctattatggtgagagaccaagatggtagaatgaaatggaaaagggtacaagtgaagcctgaagagcatgtaaaggttcccaaatttcctgaatgcaattcacctgaattatatgaccaatattttggtgactacgtgacaaggattctaactgaacggacacctcaaaacaaaccactatgggaaatccatattattaattatccaacaagcaatgctgcaggca

SEQ ID NO: 16909 - DNA, 242 bp, Glycine max
  Clone ID: 700960894H1
ctaataaaaattattacttttggttatatcttgagcagtgaactgcatatatagcctgaatatcggatgtattaattaagaaattacaaaatgtttgtctttgacttttactaatgtttgctaccaaccttgtgtcccccttcccctggcccctgcacatcaagaatggaagatagaaaatacacatttttttttatattgatgtccaatattcagttatttaatgtccaaattttaacagt

SEQ ID NO: 16910 - DNA, 152 bp, Glycine max
  Clone ID: 700960895H1
gttggaaccgttcttcgtgttctccattcgctctctcagtccttgcatctacgtgaatcttcgcttccgttccttatcttgtgctttctttcctttacttgtgatcttgctcattgttgtgctcaataacagattgtttcgtgcttgtcttg

SEQ ID NO: 16911 - DNA, 262 bp, Glycine max
  Clone ID: 700960816H1
cgattccgaagccccacataccatttgttattcatataaaaactcgttttccttctccatttctcgtcgcaccttttcctcttctctctctttctctctttctagttcgtgttcttcgtcgcatatccgaagtaggatctctcttgttttttctctaggtttttcgcgatggcgtcgaagcgaattttgaaggagcttaaggatttgcagaaggatcctccaacatcttgcagtgccggtcctgttcatgaagatatgtttc

SEQ ID NO: 16912 - DNA, 266 bp, Glycine max
  Clone ID: 700960817H1
ttcgcacctctttctcaatcagcgaagagcggaggttcgcgtttcgagtggaggatacggaactgtgtcggcaccgaagtcagttgcgtctgatcctgatcagttgaagagcgccagagaccgtatcaaggagcttctcaactccaagttctgccatcctattctcattcgtttgggatggcatgatgctggtacttataataagaatattgaggagtggccacagagaggtggagctaatggtagcttaagatttgaaattgagc

SEQ ID NO: 16913 - DNA, 130 bp, Glycine max
  Clone ID: 700960818H1
ctttgccggtgccacaatccctctctctctccgacgtacatttccatctttttagggtttcatttcatggactccgattcctggatttccacgcgcctctcttcctcttcacgccgccaccattatcgat

SEQ ID NO: 16914 - DNA, 258 bp, Glycine max
  Clone ID: 700960821H1
ttgttgcgcgcccctcccattgttcgtaggcaacttcaacctcaccaaaggaactaagaatttcattgaggctacagaaagtggtgatcaatatgtcaaagaatccaaaagttttctttgatattctaattggaaagatgaaagctggacgagtagtgatggagttgtttgccgatgcaaccccaaaaacagctgaaaacttcagggctctctgcactggggaaaaggggattggatcatctgggaaacctttacact

SEQ ID NO: 16915 - DNA, 248 bp, Glycine max
  Clone ID: 700960822H1
gtgatttgcaagataagccatggtggcaaaagatgcaaactcgtgaagagttgattgacgcctcggctaccctcgtatggatcgcttcagcccttcatgcagctgttaactttggacagtatccatatggaggtttaatcctaaacaggccaaccattagcaggagattcatgcctgagaaagggtctgctgagtatgcagctttggctaagaaccctgagaaggagtttttgaagactaatactggc

SEQ ID NO: 16916 - DNA, 258 bp, Glycine max
  Clone ID: 700960824H1
attaaaaccgagcctcttccccaaaggagacacagtgcgagagagaatcgtaacataagcggtaaccggaataagttgtctctacgatttgagccatggcaacaacaacaccctcaaaccgatcatcagaggcgtttgctctcatggcaatcctcagcactctgctttgcacggcggtggcggcgaaggagagcgtgtacgagatactccccaagtacggcctcccgagcggtctgttaccggacaccgtcaccgact

SEQ ID NO: 16917 - DNA, 258 bp, Glycine max
  Clone ID: 700960825H1
ggatcttcagggctatgaatggcgctttaagcatatatttagaggtcagccacgtagacacttgctcacaactggatggtttaattttgtgacttccaagagattagttgctggagacacctttgtgtttctgagagggaacaatggagaattgcgggttggagtgaggcgcattgctcctgtgcagagcagcatgccatcatctgtgatttctagtcagagcatgcacctaggagttcttgcaactgcatctcatgc

SEQ ID NO: 16918 - DNA, 248 bp, Glycine max
  Clone ID: 700960827H1
agacctatcattaaaccaagcaacgctcggttctcttttctctttcaccatatccattgtcccttaagtctaaggtcatgtctcccctctgccttatacacaccaataatttgccaagaaaccgaacccaacccaaccgcaacaacaatttcgttccatgatttcgacatgatcaccgatacgcggagaaacgagcagaggctcaagatgaagaacatcttccacatcagcgtcgtctccgccgtcct

SEQ ID NO: 16919 - DNA, 164 bp, Glycine max
  unsure (1)..(164): unsure at all n locations
  Clone ID: 700960830H1
caacactttaggtaaacctaagagggtttaacctcgtttccttaatccattctttgctccctcgaactgctgtttggtctcttcactcttaaccatggcatcaacgtttctcaccctaacaaatcccttcctacacaaaactaatgtggntagtttctctgaca

SEQ ID NO: 16920 - DNA, 261 bp, Glycine max
  Clone ID: 700960832H1
aaacaaccttctttctttttctgtgagcctttctttcaggttcttaacttgatcagtgtgcagtgtccaaatcataagggtagttgcaaattgcaatggctaagcatgatgttgagggtggttccttctctgcaaaggactaccatgatcctcctccagcaccgttgattgatgctgaggaactcacacagtggtccttctacagggctttgattgctgagttcattgccacaatgctcttcctttacatcacagtgctca

SEQ ID NO: 16921 - DNA, 263 bp, Glycine max
  Clone ID: 700960833H1
gaaaacactaaagaaaaaaaatgggttcttctctgtggacctgtctgattgttatcacttgcttctgcttccttcgccgccaactcaagagtaccaattgatgtgccatttggcagaaactctgtgcctacctgggcctttgatcacatcaaatacctcaatggtggttctgagattcagcttcatcttgataagtacacaggtactggcttccaatcaaaagggtcctacttgtttggtcacttcagcatgtacataaaatt

SEQ ID NO: 16922 - DNA, 262 bp, Glycine max
  Clone ID: 700960834H1
ctcaaacccccctctctctactcaaactaaccactctgtttctcttgctctacttttaccctgtttccagtggaacaaatcttcatccaaattaggttttgttttggagaaatgtatgcagagactggtcttttcttcccatatttgcacaacgtctctcacggccttcatcagcttgaggagtactgcaaaacccagaagtccaatgcttcaatggatgaccttgttcagtcttctgccatgtcagagtatgatttggcag

SEQ ID NO: 16923 - DNA, 254 bp, Glycine max
  Clone ID: 700960836H1
atgacttagaaaagaatcaagttgcttattcaagaagtgttcacattccagatcacggtgatgctggtagcagtaatcttcttaatgagaatcactattcaagattaatagctttagaagggtgtagttgtagtgcagctgcccagctgcttaatgatcgttggacagctgcactacaatcctacaataatcccaaagattcatctgaaaagccagttatgtattcgagtgggacatcaggatggactccgttc

SEQ ID NO: 16924 - DNA, 131 bp, Glycine max
  Clone ID: 700960839H1
ttgcgtcgttccagacagcttcagcacccagcagagactcccttcgcatccaatgtctacgctcttcatcgccctccaatgctgccaatgctccaccatgcaggtgaagcagaagaagaagagcagcaaca

SEQ ID NO: 16925 - DNA, 121 bp, Glycine max
  Clone ID: 700960841H1
ccacaatctctctgttcagttttcatatggcgaacacactatataacggcgccacatgccgaatccctctccggaaccaatccctggccttctctcgccacgtttccagatccctctcttt

SEQ ID NO: 16926 - DNA, 52 bp, Glycine max
  Clone ID: 700960842H1
taacatttccaatcctcgagtagccttggagcatgcacagttttcaaagctg

SEQ ID NO: 16927 - DNA, 234 bp, Glycine max
  Clone ID: 700960844H1
tgtatatgccattgttgtgcatactggactttcttctacttcagggcattacttctgctatgttcgctcagctccatacacacgtcatactatggctggttcaatggcaactgaggtcgcagtagcaactgcactggctcaggatgcgcacagattgtgttacgcgcgtcagggtacgccagggggttcgcgccatctgcgtgagtacatacaacggattagaccgaagattct

SEQ ID NO: 16928 - DNA, 267 bp, Glycine max
  Clone ID: 700960845H1
gtcggaatcggtcgaggtgcgcggtctcgccgcattgtcgcctccgccgcacgaatccgcgacttctacatggagatttctttccatttcgagagctccgtcattcccttcattaggtcgcattgcgacttccgacacttaccgcatttggaagcgtgctctaatctccgcgcctccatgacccttgacggattcgacggcccgcgcatacagcgttcggactaaacttttttgttcctcggtagaggttatgcctccgataatggg

SEQ ID NO: 16929 - DNA, 256 bp, Glycine max
  Clone ID: 700960846H1
gttgtcgctgcgatggatcgcaagaggggaaggcatgaagctgccttcaatttcaatggcggcgccaagaaatcgaggcctgaaatggactcctttccaactggtttaggaagcaaatcgaagccatgcacatagtttttcagcacctctggctgtccatttggtgaaggatgccacttcctgcattatgttccaggtggattcaaagctgtctctcagctgatcaatgttggtagcaatcctgttattcctcaag

SEQ ID NO: 16930 - DNA, 253 bp, Glycine max
  Clone ID: 700960847H1
ctagttccctggtttatgcgtgttcaatatatattgttctgggaatattagtgttgaaaggtgcacaggcacagcgtgcgttctatctgtttggtcgttctcttgtggataatgggaccaacaactttttggcaactacagctcgagcagatgctcctccttatggcattgatttcccaaccggacgacccactcgccgtttctctaatggctacaacattcctgacttcatcagtccctcacttggggccga

SEQ ID NO: 16931 - DNA, 260 bp, Glycine max
  Clone ID: 700960850H1
ggaggaagcaaggctttttgtgagtcatcgcctgagatatcaacttcttctgagactgagagtgacatgtcattttcaaggtacactcccttaatgcctcatagacatctttttggagatatacaaagagagcgcttctttcatagtgaccatatttcctattctgggcatggaggttcattcagctcttccaactttgttgacctggattggctgtcttcaggaaattcatgtgaagaagagccatttgagaggttatc

SEQ ID NO: 16932 - DNA, 261 bp, Glycine max
  Clone ID: 700960851H1
ccaagggtgatggtcttggtgctgaccttgttggcactttcatccttgtttacaccgttttctccgccaccgatgccaaacgtagcgccagagactcccacgtccccattttggcacccttgccaattgggttcgctgtgttcttggttcacttggcaaccatccccatcaccggaactggtatcaaccctgctcgtagtcttggtgctgctatcatcttcaacaaggaccttggttgggatgaacactggatcttctggg

SEQ ID NO: 16933 - DNA, 261 bp, Glycine max
  Clone ID: 700960852H1
gcggcgatggcttttgcagttacgcccaagataataacggtgtcattcgataagcaaaaccagaggaggagtttcgaaggattgtttaggaaaaggtatcgggtaagggtgaagcgaagtcaagatcattcagtgaagtgtggtattgagcgaagcagcagcgatggaaagaaagggggcggaggaggaggcgtgtcaaattcgaactacgtggtgccgctggacaacatggcgaactcatcctgcataacacgtccttta

SEQ ID NO: 16934 - DNA, 256 bp, Glycine max
  Clone ID: 700960854H1
cttgttgccactgtcatctcaatgtttttggttgacaagtatggtagaagaaaattctttctggaagctggctttgaaatgatatgctgcatgattattacaggtgcagtcttggctgtgaactttgggcacggcaaagaaattgggaaaggagtgagtgcctttctggttgttgtgatcttcttgttcgttttggcatatgggagatcttggggtccccttgggtggttggttcccagtgagctcttcccattag

SEQ ID NO: 16935 - DNA, 257 bp, Glycine max
  Clone ID: 700960815H1
tcggcctctttcgcacatacccaaccctttaaatcaaaacctaagaatttgatatgagagaaagattgtatttccgttagtatatatactcgatttgttgcgtatctactatcttatccttagacataacaatatcatctagctagctagctagctagcaaatagcaatgttaaaaaaccaaccacaaccagattggcctgagcccattgtccgggttcagtccttatccgaaaactgcgaagattcaatccctgaa

SEQ ID NO: 16936 - DNA, 253 bp, Glycine max
  Clone ID: 700960856H1
ggcagcagagtgtgctcgtaatgctttgttggagaaggttgtggacaacaaagcagattctgagaaattcaggtcagacttattgaacattgcaatgactactttgagtcccaagattctctcacaggacaaggatcattttgcaaaattagctgtggatgctgtaatgagactaaagggaagcactaatttagaatctatccagattataaagaaacctggaggctcattaatggatccattcctagatgaa

SEQ ID NO: 16937 - DNA, 235 bp, Glycine max
  Clone ID: 700960857H1
gtaatatttcgagtccaagcttctcttggtgctctgtaagggaccaaaaaccaatttcatccactcgtaacatacccctatcggttttagaaaagccaagaaagtttgtgtccaccaacctctattttacacgagtctctcatactatgatactatagctacacttcccactgtgtctcagggtctgtgacacacacagactcacttcaagttcccagcttttgccatttttccc

SEQ ID NO: 16938 - DNA, 83 bp, Glycine max
  Clone ID: 700960766H1
attgaggtggaaagctctgacaccatcgacaacgtcaaggccaagatccaggacaaggaaggaatccccccggaccagcaacg

SEQ ID NO: 16939 - DNA, 205 bp, Glycine max
  Clone ID: 700960769H1
gtgaaagtacaagttgcagggatggcctcaacctcctcctccacactctctacatcctactcatccacccttgttgatgccaaggctccaagtccaagacaatccccacaatgtgtctccactacacctgttcactctccttggaagaccactgctttctgtcgcaggattgcaagcaacgttatggcaatggctaccaccagag

SEQ ID NO: 16940 - DNA, 214 bp, Glycine max
  Clone ID: 700960770H1
cggctcgagcgtcgctttgaagcagtgaccgaccgtgcatccctttgtagtttccagcgctcaacacgcgcaacgacgatgatgcaaaccaatatcaccaccacaatcctcatcgcgttctcttcggtcaattcctcgaatgttctaccttgagccatgtccaacctcgttcagattcgcgtcgccgccgacgcaggcgacggcttcgactctc

SEQ ID NO: 16941 - DNA, 206 bp, Glycine max
  Clone ID: 700960772H1
aaactgaaccaaatcatcacacacacatactacgaagcaacaattcttctacaatggatctcctcattctggacaagaccctcataggtctcttcctcgctgcggtggtcgccatcgccgtctccaccctccgcggccggaaattcaagctcccaccgggcccactccccgtcccaatcttcggcaactggctccaagtcggcgac

SEQ ID NO: 16942 - DNA, 203 bp, Glycine max
  Clone ID: 700960775H1
agcaattgacataccaagacatattggcactgccttgtgcatggcagctgcttctaagaaagaccatgaaaatgaggggagagaactggtgcggatactgcttgcagcaggagctgatccatctgctcaagattcccagaatgggaggaccactttgcatacagctgctatgaataatgacgtggacttggttaaggttattt

SEQ ID NO: 16943 - DNA, 204 bp, Glycine max
  Clone ID: 700960777H1
cgtgagcgcgcgatggaagaagaagattttgatttcgagaagaaggtttcgataaaggaatcgatgtcgatgtcgatgtcgacagagcttgatccagccaaagttcttcttctgcttcgtggtttcctccaaattcagcaacgcatggcccaagcacattctaagctcaaaagtgggttttctgactacatggcctctggaggg

SEQ ID NO: 16944 - DNA, 204 bp, Glycine max
  Clone ID: 700960779H1
gagggccattcactccgtcacagtggatggagcttgaacaccaagccttgatctacaaatacatcagttcaaccgcccctgcgccaacccatctcatacccattagaaaagcacttgattctttgggcttctgcaacttttcaactggactcctaaggcccaacgcattgggatggggaggtttccatctgggattctcgaaca

SEQ ID NO: 16945 - DNA, 203 bp, Glycine max
  Clone ID: 700960780H1
ggaaatgatgctctggcagatacaactgatttccagcacacactcaaggaattgccatccccaccggaagtggtttatcttgaaaactatggtcatgttgacttcactttaagcttgcaagcaaaacaagatctttatgaccctatgattagttttttcaagtcatccggaaaattcagtagtacgcaatgtttgcttccttc

SEQ ID NO: 16946 - DNA, 89 bp, Glycine max
  Clone ID: 700960781H1
atcgctatggccactgttttcagaacccccactttccggcgtcagcgtccgcctccgccgcgcgccaccaagtcgccgaagccctcgcg

SEQ ID NO: 16947 - DNA, 204 bp, Glycine max
  Clone ID: 700960783H1
agacttatgtagatacgataaccataaccataccatagcttacaaattaagctccgctcactctctttctctctagactcccatgcagccattggtatgaatggcgtaaaggttgggacgacgtcgtctcagacgtaccttgaaggcaaggcagtgaaggagacgagagcgttgatggctgaactgtgtcgccatttccacaca

SEQ ID NO: 16948 - DNA, 71 bp, Glycine max
  Clone ID: 700960784H1
caaacacactcttttttgttatttgctaacttcccttgttcgtttcactccaacaatggactcccactctc

SEQ ID NO: 16949 - DNA, 203 bp, Glycine max
  Clone ID: 700960788H1
actcttttcaaggatgtgatggaaaaaaatataataccacaggttccactctttaacatactacaagaagtttgatggtgaaactgtcacggaggtggtccgtcctcatatagcaaggatgcagtatcgtgttaccagattgcccaagtatatgattctacacatgcgtcggtttactaagaataatttttttgtcgaaaaga

SEQ ID NO: 16950 - DNA, 203 bp, Glycine max
  Clone ID: 700960789H1
cgtgaagtgttcggattgcggcgacgtgagcagttcgctgcccgcgacgttgtgagaagtccactgaaccttatcattcagaggaagtaaagtcgctggtaggatcatcatctctttgagttgccattgaagaagaagctcagatcggaaaaattcacctctccaatcccaatcccatcgttgcaaatggttccttcgttcat

SEQ ID NO: 16951 - DNA, 202 bp, Glycine max
  Clone ID: 700960790H1
cacctcttcaaaaatctagatctcgctcttcctcaatctacgttacgctttcagtgaccacacctgtatggatctgactcagatctacacgccgatggtggttttggcctggtctttcatagatctgatgcatggaggctcagatctactgtacagagatactgtagataatcgatgagaagacagcagatccagccgcttc

SEQ ID NO: 16952 - DNA, 202 bp, Glycine max
  Clone ID: 700960793H1
ctaacatgagtcacgcatggacattattgttgacccaaattcttctggtggcggaggcaaagaaaaatgtcccagcggtgattgttttcggagactcctctgtggattctgggaacaataacgtcatagccacggttttgaagagcaacttcaagccctatggtcgtgacttcgaaggtggtcgtcccacgggacggttttg

SEQ ID NO: 16953 - DNA, 200 bp, Glycine max
  Clone ID: 700960794H1
attacattatccgattcagaattgtgtggactggaaactcctctgtccccaaacaggacgatgaaggaactgggcttggtttcaatgatgctgatggcagagttgttggacgtgatcgtcaacactctaagcaaagcagccatgaagaagggcatgaatgactttgtattcatcatgtactccaatgccttcgctgcatg

SEQ ID NO: 16954 - DNA, 202 bp, Glycine max
  Clone ID: 700960795H1
ttttcaaaatgacttctagcttctttgtgtttccctacttttatctctcatacattcactcaagagagagagagaagcatgttcaccggcacaaagcaaatctgtctagttttctggtgtcgcattaatttaagattaagattttagggagataagatacctatgaaaatacatcactaacaaataagttggctaatcacag

SEQ ID NO: 16955 - DNA, 269 bp, Glycine max
  Clone ID: 700960801H1
ggccttcgtcgaagaccacttcgaactcgccgtggaccttctttctcaggccattcacctcgaacccaacaaagccgaactctacgccgaccgagcccaagccaacatcaaactcaacaacttcactgaggctgttgctgatgctaacaaagcaattgaattgaattcttctctaccaaaagcatatttgcggaaaggtactgcgtgcatgaagcttgaggaatatgagactgctaaggctgctctagaggtgggtgcatcattgtctc

SEQ ID NO: 16956 - DNA, 267 bp, Glycine max
  Clone ID: 700960802H1
gctgtttcgccacctggaggagatttctctgatcctgtgacatctgcaatcctgagcatagttcaggttttctgggttttggacaaaaagcttgctcagaggaagcactttccttctgtaaactggcttatttcttatgcaaaatactcaacggcacttgaaaccttttatgagcaatttgatccagattttatcaacattaggacaaaggctcgtgaagttctgcaaagggaagatgaccgcaatgaaattgtgcagcttgtgggc

SEQ ID NO: 16957 - DNA, 133 bp, Glycine max
  Clone ID: 700960804H1
gaaaatgggttcttctttgtggactttgtgtctaattttggcttcactagcctcttctgcattctgtgcctatccacggaggccagtggatgttccattcggcagaaactacgttcccacttgggcttttgat

SEQ ID NO: 16958 - DNA, 262 bp, Glycine max
  Clone ID: 700960805H1
acttgtccttctttgcgagattgaatcgtaagcagcggctaccctaatcctctcctcttcctctctactaatttcagctatggccgacgaagctgtggttgttccagatcccacccagatcgatgtcaagctctttaaccgctggagcttcgacgatattgagattactgacatttctctggctgattatatcggagtggcgacatccaagcacgccacgtatggccctcacaccgccggcaggtactcggtgaagcggttc

SEQ ID NO: 16959 - DNA, 135 bp, Glycine max
  Clone ID: 700960806H1
gcagatcttcgtcaagaccctcaccggaaagaccatcacccttgaggtggagagctctgacaccatcgacaacgtcaaggccaagatccaggacatggaaggaattcccccggatcagcaacgttctcatcttcg

SEQ ID NO: 16960 - DNA, 182 bp, Glycine max
  Clone ID: 700960807H1
ttggtaaagacggagatctgagctgaagatgctggaaggacatcccaatgttgtcacacttcatgcacatgccatcgttgatattagtaagacgaaagaagcattcgttgtgatggaattttgtgagaggtctctggttaatgttctggagtatcgaagagtcgattattttgatgagaaac

SEQ ID NO: 16961 - DNA, 260 bp, Glycine max
  Clone ID: 700960808H1
ccgatcgatccaattctcttcccatgtctacgatcggacacaacaatctcaatgccaaattggttcttctcggggacatgggtgctgggaaatccagcctcgttttgcgctttgtcaagggtcaatttctcgaatttcaggaatcaacaataggggcagcgttcttttcacagacgctggcagtaaatgatgcgacagtgaagtttgagatttgggacacagcaggacaagagaggtaccatagcttggctcccatgtat

SEQ ID NO: 16962 - DNA, 205 bp, Glycine max
  Clone ID: 700960765H1
caggaacacacgcatctacgaaggaattcctgcagaaaaggtgcgtgaaataatgttgattgcttctgtctctgctaagtctgctgaaatgaagagtgggatccgattgacttcactcattcccaaaagcccttcttcttcacagggaaactctactaatttgccttcaccccaatcagtcaagagttccattcgcaggctgcaa

SEQ ID NO: 16963 - DNA, 261 bp, Glycine max
  Clone ID: 700960809H1
ctcgagccgcaacagcacaaagcgggttactgtctgttcaagctaccatctctctctcactttcttagtgcctccttgccagaagttaaaatggcccaagaaactttcctattcacatctgaatcagtgaacgaggggcaccttcacaagctctgtgaccagatctccgatgctgtgctcgatgcatgcttggagcaggaccctgacagcaaggttgcctgtgaaaactgcaccaagaccaacatggtgatggttttcgga

SEQ ID NO: 16964 - DNA, 254 bp, Glycine max
  Clone ID: 700960810H1
tttctccctgccttgtttcagttctttctttggtcactcactgctctctaacctagttccacatttttccactcatcaagtctctttctttcatctcatatttctcttcattcacatcacttctctgatctgtctcttcactctctttgacccagatcaaattttttaccttttgttcttctctcttactctccgttaatgctttgcttcaaaccattctcagaaaaacaatgcttccatctaggtctaccctc

SEQ ID NO: 16965 - DNA, 259 bp, Glycine max
  Clone ID: 700960811H1
gtgcattgccggtagaaaaactgttgttgaattagacaattagttaggtcttgtatgcacaaacttttcaacaaatacttttagttataggataagaaaatgagaatgtaaaatgaatccaactttgtccacaagttaaaatcaacttattccccttaattttttgcagaagttaaatgattaaatgaaagaacttctaacatgacgtggtgcagaagttgtttttaacttctagcaggatttgagtcatttaggaatc

SEQ ID NO: 16966 - DNA, 260 bp, Glycine max
  Clone ID: 700960812H1
atcatggacacatacattgatgatttgattgacgctgatgggtatttgccatggcaaggaccagagggtccttctggtatggatacttgcttctatgccgagtaccacaacattggccccggttcagacaaatccaagcgtgtgaaatgggctgggatttggaacctcaattcaaaagctgcacgttggttctcaccatctaagttttttcatggaactgattggattgaggttactggaattccttgctttcctggcgt

SEQ ID NO: 16967 - DNA, 258 bp, Glycine max
  Clone ID: 700960813H1
cctggttggttgcaagtggagcgaagaaaactaacggagacttgtttggaagctagtctctggtgagagtgaaggcgcaccatcttcaccttgaagtcaacgatcatggcaaccattaacctttcttccgctactacgtctctcttccaatccaaacaccgaacgaaacgcattccacgcctccctacactccacagaataacaaaccacatcgaaggaactcatcttaactcccccaacggctctcccatccttggc

SEQ ID NO: 16968 - DNA, 213 bp, Glycine max
  Clone ID: 700960709H1
agaacagagaacaacagttccatctatggttcgaccccaccaaggacttccacacatactccgtcctatggaatcctgcaagcatcatattctctgtggacgggaccccaataagggagttcaagaatttggagacaaaaggggttccattcccaaagagccaacccatgagaatatactctagtctttggaacgctgaggattgggccacaa

SEQ ID NO: 16969 - DNA, 213 bp, Glycine max
  Clone ID: 700960711H1
ttctggcacccgcaatgcaacttctggctgggtcaaagatcattgaagtggacaacaatgtacgagaggaccgagcactgttaaacggagcacagaagcatacttggtactttgatagctgttggtgaggcagttgcctatgttctttcggggatgtatggtagtgtgggcacactcggagtaggaaatgctatcctcatcattatccagctc

SEQ ID NO: 16970 - DNA, 210 bp, Glycine max
  Clone ID: 700960712H1
caaagatcgtgtgatcgaaatcagtgcccgaatggaccctcattctgtggtggacctgactgaggataaagatgttgatgttgagttcatgtacactgcaaaatggaaggaaacagatacatcttttgagaagagaatggataaatactctcaatcttcttctttgccacatcacttggagattcactggttctcaatcataaactcctg

SEQ ID NO: 16971 - DNA, 197 bp, Glycine max
  Clone ID: 700960713H1
acagctgtcaatgttcggaacaagttggatgagagcctcctcattcattggtctgggattcagcaaaggaggagttcgtggcaagatggtgttctacgcacaaactgtcctattcctgcaaagtggaactggacttaccagtttcaggtgaaggatcaaattggaagctttttctacttcccttcccttcatcttca

SEQ ID NO: 16972 - DNA, 217 bp, Glycine max
  Clone ID: 700960715H1
cactcgagcacaatcgcgctcgagggcctatgcccgtccagttgcaggaatccatgtacttgctgacatgcaaaatatggatgttcttgaatttgaagatcgtaaacttgtcccccttccacctgctgatccaccacccccattatacttctggtgaaacccaaggaggagttgaccgaagtgatgtgaaacccttgcagattattcagcctgaagg

SEQ ID NO: 16973 - DNA, 212 bp, Glycine max
  Clone ID: 700960716H1
agcaacttggcacagcgtgtccatgggtcagactcacacccgcaagcaaaagaaatagctcagtctcattgagaaggagcaattgtggcccaaaatgttcggtgtcccaattggaattgaagagtgagagtgagagcaaaacgaagccgtatccagcagaggcatcgaggaccataatggagttggctaaggtgggcacgctgtgtacgttg

SEQ ID NO: 16974 - DNA, 209 bp, Glycine max
  Clone ID: 700960719H1
attcagtgcaagaggcattcacaggtttcactgacaaggaaagggaagacaaattcagaaaccgtgttaagcggtatgtgggcatatggtgttgtgtgccggatcacactcctggtcacatatattatgatatgtactgggatgagaaaccaggatggaaagcagttcctcctcaaacttctgaggatgatcatccaccttattgaaat

SEQ ID NO: 16975 - DNA, 209 bp, Glycine max
  Clone ID: 700960724H1
gaaagaaatgtgggagaagttgagaggtaaaaggctaatgtttgttggagattcactaaatagagggcaatggatatctatggtatgtttgttacaatcagtaattcctgctgataagagatcaatgtcaccaaatgcccatctcaccattttcagagcagaggagcacaatgcgactgtggaatttctctgggctcctcttcttgctg

SEQ ID NO: 16976 - DNA, 95 bp, Glycine max
  Clone ID: 700960725H1
gagcaatgatctagctcgtcctgttcttggagggtctagtgcctatccatatcctcgcaggggaagaaccagtagaaaaccaacaacaaaagact

SEQ ID NO: 16977 - DNA, 208 bp, Glycine max
  Clone ID: 700960729H1
ataaggaataccctttcaaaatggcttcttctgtgtcatccatggtttctaccaccctcctcctaattaccatctgcacactgtcatcacttctgtcagttgcatctgcagcaacagaggagggacgaacaaggccattcaaaagggcctatgcctttggagactctttcacagacactggcaacacccacaatgcagaaggtccaag

SEQ ID NO: 16978 - DNA, 209 bp, Glycine max
  Clone ID: 700960731H1
attttgcaaacaagttggtgcaattttttcagaaggtctgggaggagtcttctggtgaaagtctgctgcagatacagcttcttgttgctctgaggaactttgtggttgctcttggttaccagtcacccatttgctacaatatactactgccaattctggagaatgggattgatattaatagtccagatgaactcaatctcctagaagat

SEQ ID NO: 16979 - DNA, 208 bp, Glycine max
  Clone ID: 700960732H1
cagcgctctattagatatcttacgaaatgctcatgatcttctttcacaatgtgatataagacttcctgagattgaagctaacgagaactatgttgattcgggaccaccatttctcatccttctgcatcctgctctcggtcctctttgggaagtcactaagcaaaaattctatggtggttccatatcagagggctccgagttacaaata

SEQ ID NO: 16980 - DNA, 208 bp, Glycine max
  Clone ID: 700960734H1
ttcacagctttcttggccaaaaatgaaacctactgatgtgcagaagtatacaaaggtgtttatggaaccccctactcccacggataggaaaatcactggggagcaggcacgcagtatatttttaagctggagattacccatagatgtcttaaagaaggtgtgggacttgtctgatcaggacaatgatagcatgctttcattgaaggag

SEQ ID NO: 16981 - DNA, 207 bp, Glycine max
  Clone ID: 700960738H1
atgccgcagagtcccccgcactgtcgcatccgccgcacgaatccgcgacttctacatggagatttctttccacttcgagagctccgtcattcccttcattggtcgcattgcgccttccgacacttaccgcacttggaagcgcggctctaacctccgcgccgacatgacccttgcaggattcgacggcttccgcatacagcgttcgga

SEQ ID NO: 16982 - DNA, 208 bp, Glycine max
  Clone ID: 700960740H1
agcaaattttaggccgctgaaagctactctctctgggcttccagaccgggtttttatgaaattagtagtctgtgcaaaaacaaatgaagttctaggtttgcatatgtgcggagaagatgctcctgaaattgtgcaggggtttgcagttgctcttaaagctcgcttgaccaaggctgactttgatgccactgtaggcattcacccaagt

SEQ ID NO: 16983 - DNA, 206 bp, Glycine max
  Clone ID: 700960741H1
actctctctaagatccacaaattgcttgtgaatgctagaaaccctagacagattcgattgcatgcgccaccatttcacatcaagggcgagcgcattcggttcttgcaagcaagcctggtactaccgctgcctcggcctcgacccctgaatttgaaccattcatcaccacctttcttcattcattcacggttttccttttcgactcg

SEQ ID NO: 16984 - DNA, 207 bp, Glycine max
  Clone ID: 700960743H1
gcccttcagggtcctgttccttcgtttgagaaaggtgtgaagttcactctcgatgggatcaatagtttttgtctgaaagatgttggaccctgcgattctcgtatctccactttgcttgatatcactgcgggtttcgggtatccccttcagttggcgcgttcctggactgggaacgatccttgtgatgattggagttttgttgtgtgt

SEQ ID NO: 16985 - DNA, 209 bp, Glycine max
  Clone ID: 700960744H1
aaagcgcaaagcattctccactacgattcgctcttccagaagcttccagaaaactccagatcacgcgtacaaagcaaacagcccgtaagccgaccggcggcaaggctccccggaagcagctggcgactaaggccgcccgcaagtctgctccggcgaccggcggagtgaagaagccacacaggttcaggccaggaaccgtggccctgagg

SEQ ID NO: 16986 - DNA, 127 bp, Glycine max
  Clone ID: 700960746H1
tccctcgccactttcttcctaattctctcaataagggtttcacttttttgcttaaacccgcggccacggcgacgagggcagcagtggcggcgcgcgcgtttttcggcggtttttctgcacaaaataa

SEQ ID NO: 16987 - DNA, 206 bp, Glycine max
  Clone ID: 700960748H1
gcacaaagttggggattcagccatctcctgtggtggcagcgtttagctctagaggacccaactcgatcaccccgcagatccttaagccagatcttatcgcgccaggtgtcaacatcctagccgggtggtccaaggcggtgggacccaccgggttacacgttgataacaggcgcgtggatttcaacatcatttctggcacgtccatg

SEQ ID NO: 16988 - DNA, 204 bp, Glycine max
  Clone ID: 700960749H1
caaagaccacaatgagttccattatgtatcaaaagatgcagaggattcagatagaaataatgataccaagtggtggttgcctacacctaaggttcccgcaaacggtttatctgatgcagcaagaaggtttgttcagtatcagaaagattgtgtgaaccaagttcttaaagcagctatggccataaatgctcaaactctatcaga

SEQ ID NO: 16989 - DNA, 65 bp, Glycine max
  Clone ID: 700960750H1
ggtgtgcagcagggagctctgccgcctctaacaaaacagagttcagaacacaaaccctcgaaccg

SEQ ID NO: 16990 - DNA, 205 bp, Glycine max
  Clone ID: 700960751H1
ggtcaacgcatggagattgttgaactacctaaccatccttattttatcggtgctcaattccatcctgaatttaaacaaagaccaggaaaaccttctcctttgttcttaggattcattggagcagcatgtggacaattggatgctgtcttacagcgctcttcaattgttgataatggtctctcaaaaggagtcattaatgatatct

SEQ ID NO: 16991 - DNA, 207 bp, Glycine max
  Clone ID: 700960754H1
attctgttgttttttgcaaattcgcaacccacacagcaccccaccagccccctgagtgagtatggcgtctccattatcagctcaattggttcaatgtcagaactcaattccacctcttcagggtccacttagccaagatgtgtctaaggttcaaaggtcgcgtgtggtatgttacggtaccagatcaccgcttggttattatggtaa

SEQ ID NO: 16992 - DNA, 207 bp, Glycine max
  Clone ID: 700960756H1
attttcttcatagcactcacaaaacaacaactcatctcatcattattccctttctcactcagcacaccctaaacactaacaccatcaccaataataatggcatcatcctcatcaaccgttgctttgagaaccatctcctctttctctctgaaacctgccaccacaacaagatcattactcaacactagtacttcatccaccataacc

SEQ ID NO: 16993 - DNA, 65 bp, Glycine max
  Clone ID: 700960706H1
caagatactaaggctgcaacagcagggaagaatttgtacattagattcagttgcactaccgggga

SEQ ID NO: 16994 - DNA, 207 bp, Glycine max
  Clone ID: 700960757H1
cctaacaacaacaatccccaccacatgtcggtgccagagtgcgagcaccacaaggggacgccagcggcgatcttccggcaagtgttctggtagctagtggcgttgcttttcatcgtgcctggtcacaattcttttgatatgggcaacacttagacccaccaaacccaccttcacgctccaagacgccaccgtctacgccttcaacgc

SEQ ID NO: 16995 - DNA, 205 bp, Glycine max
  Clone ID: 700960758H1
cgaagatctaccactcaacatttcaagagaaatgttgcaacagaacaagatcttgaaggtcatcagaaagaacttggttaagaagtgccttgagctcttctttgaaatagcagagaacaaggaggattacaacaagttctatgaggctttctccaagaacttgaagctaggtatccatgaggattcacagaacaagggaaagatt

SEQ ID NO: 16996 - DNA, 205 bp, Glycine max
  Clone ID: 700960759H1
cgtggaagaggctcacaacgtgagaatagtagggaaggggaatgaaatcgtgattcttgctcatgggttcggcacggaccaatcggtgtggaagcaccttgtaccgcatctggtcgatgattaccaagtgatcttgtacgacaacatgggtgctggtaccacgaacccagactacttcgacttcgaacgttactacacgatcgat

SEQ ID NO: 16997 - DNA, 173 bp, Glycine max
  Clone ID: 700960761H1
ctctccttctacattactatctccctcctacaaatttctaatgcttccattgcttcatctgactccatcatcaatggctctgagactgaaccctatccccacccaaaccttctccctcccccaaatgcccagcctcagatctccccgcttccgcatggcttccaccctccgct

SEQ ID NO: 16998 - DNA, 205 bp, Glycine max
  Clone ID: 700960763H1
aaataaagcacagaacagtcacagtgaatggcataaaaatgcatgttgcagagaaaggagagggtccagtggtgttgttcctccacggcttccctgagctctggtactcatggcgccatcagattctctctctcagctccctcggctaccgcgccgtcgctcccgatctccgtggctacggtgacaccgaagcaccaccttcaat

SEQ ID NO: 16999 - DNA, 204 bp, Glycine max
  Clone ID: 700960764H1
atgagccattcaattcccctcctttattgctttcaagtttcaacactaatttcattatctgcaaaaacggctttcaaagtttcgtttttccttgcacttgttctagtttccaatatcctcctccttgatacaacagctgctggacgcagcattggcgaaaactccaactcagaggaaaagaaagagctgagttcttgttcaagc

SEQ ID NO: 17000 - DNA, 246 bp, Glycine max
  Clone ID: 700960658H1
ctaacaacaacaataaaagaccatgtcggtgaaggagtgcgagcaccacaaggggaagaagaggaagatcttccggcaagtgttctggtgcttagtggtgttccttttcatcgtgctggtcacaattcttttgatatgggcaatccttagacccaccaaacccaccttcacgctccaagacgtcaccgtctacgccttcaacgccaccgtggcgaacttcctgcattcgaattttcaggtcacgct

SEQ ID NO: 17001 - DNA, 144 bp, Glycine max
  Clone ID: 700960660H1
cttcaaactttcaatcgctagcgccgattttgatcacttttccggtatgaatcgtctgcaacaccccctttgttaatttagaaatgctagatctattcatcgtgtcacacgttcgatccaaaacctggttccacacaacatacg

SEQ ID NO: 17002 - DNA, 249 bp, Glycine max
  Clone ID: 700960663H1
gctggagtgggtaaatcggtactgattatggaattgatcaataacattgccaaagctcatggaggtgtatctgtatttggcggagtaggtgaacgtactcgtgagggaaatgatctttatatggaaatgaaagaatctggagtaattaatgaacaaaatattgcagaatcaaaagtagctctagtatatggtcaaatgaatgaaccgcccggagctcgtatgagagttggtttaactgccctgactatg

SEQ ID NO: 17003 - DNA, 247 bp, Glycine max
  Clone ID: 700960665H1
ctttattggcgttagtatgctacctactggagcaaaagagaaccaattacgtgagaacaacagccagaaggtccatcctcaaccaatggaagaggccatgaatcagaatccagaagcaatggaaaccctaatatctaaagtttttacaaatatctcttccttgaagtcagcttatatccagcttcaagctgctcatactccctacgaccctgataaaatccacactgctgataaacttgttattagt

SEQ ID NO: 17004 - DNA, 247 bp, Glycine max
  Clone ID: 700960666H1
cgtgcctctagggttatcatttctccatttccatgttctctctcacttttcaagaatcgtaagctatgggaaagtcttacccaactgtgagtgctgattaccagaaggccgttgagaaggcgaagaagaagctcagaggcttcatcgctgagaagagatgcgctcctctaatgctccgtttggcatggcactctgctggaacctttgacaagggcacgaagaccggtggacccttcggaaccatcaa

SEQ ID NO: 17005 - DNA, 246 bp, Glycine max
  Clone ID: 700960669H1
tgcacgcatggcatacattatgctcaggctcgactatgctggaattgcagccctgatatctacctctttctatcctccagtatattactcttttatgtgttacccctttttctgcaacctttacttgggatttatcactgtattgggcatctccaccatcttgttttctctactcccagtgttccaaaatccagaattccgcaccatatcgaaacatatctcctctggaatgggggtatctggcgc

SEQ ID NO: 17006 - DNA, 248 bp, Glycine max
  Clone ID: 700960672H1
cagcttttccctcgttgaaatgaaaatgggttcttctttgtggactttgtgtctaattttggcttcactagcctcttctgcattctgtgcctttccacgtaggctagtggatgattccattcggcagaaactatgttctcacttgggcttttgatcacatcaaatacttcaatggaggttctgagattcaacttcatcttgacaagttacactggtactggcttccagtccaaagggtcatacttgtt

SEQ ID NO: 17007 - DNA, 245 bp, Glycine max
  Clone ID: 700960673H1
gcagagaattctatttaatacttgttgaatttctattcataagaatagtgacagttactatttttctgttttaatggttctctattcaacaataggttggaatgtcaagctatgggataattttactctgaataggaaaaaggaaaaaagaaaagtagaaagaagtcttttattttaaaacacagttcagtcatgtaataagctcagtcaaatatattcacacatttgatcttgattcagtattt

SEQ ID NO: 17008 - DNA, 243 bp, Glycine max
  Clone ID: 700960675H1
attaaactcactttctctgtagccatagaaattcacattttatcttttgcattgtgcaacttcctcgcgccatggctgctaccatcatcacatgcaagctctcactgcttttaagccttctctcagtttcactattgctgggtgtgagttcatcagatacccttcagaatgtaggggcaattcccccaacatgcaagcgcatagagtgtcccagctatgatgtcattcactttggcaacggct

SEQ ID NO: 17009 - DNA, 239 bp, Glycine max
  Clone ID: 700960676H1
ttcccttttcagctttcattggtgtggcctagctgttttctcaatgagaaagccttcatctctgcaaagcgcacttttgcgctttggggttcccttgttgcttgttatcaccttctgttatgctacttctactgctgcagcaacaactcaagtttcagggaatgcagagctgccaaagacaaacctaaatgggcatgatgaagaagcaaaattcggattttttcatcataaaccaatat

SEQ ID NO: 17010 - DNA, 245 bp, Glycine max
  Clone ID: 700960677H1
gggaaaccaactaaggaataccctttcaaaatggcttcttctgtgtcatccatggtttctaccaccctcctcctaattaccatctgcacactgtcctcacttctgtcagttttatctgcagcaacagaggagggacgaacaaggccattcaaaagggtctatgcctttggagactctttcacagacactggcaactcccaaaatgcagaaggtccaagtggctttggccatgtttcaaactctcc

SEQ ID NO: 17011 - DNA, 246 bp, Glycine max
  Clone ID: 700960678H1
cgtgcctctagggttatcatttctccatttccattttctctctcacttttcaagaatcgtaagctatgggaaagtcttacccaactgtgagtgctgattaccagaaggccgttgagaaggcgaagaagaagctcagaggcttcatcgctgagaagagatgcgctcctctaatgctccgtttggcatggcactctgctggaacctttgacaagggcacgaagaccggtggacccttcggaaccatca

SEQ ID NO: 17012 - DNA, 247 bp, Glycine max
  Clone ID: 700960679H1
gttcaaactcactccctctcccccacctttcatttccaccttctctcccaattaaccaccgacaccaacctaccttctctcggccatgccaccgccgccctcaagctgcaaaaggtctaccggagttaccgtacccgccgcaggttggccgactccgccgttgtcgccgaggagctatggtggcaagccatagactatgtaagactaaaccacagcaccatctcgttctttaatttgccggaaactg

SEQ ID NO: 17013 - DNA, 246 bp, Glycine max
  Clone ID: 700960680H1
atcgaagggatgaacggccaaaaccttgacggccgtaacatcactgttaacgaagctcagtcccgtggtggcggtggcggcggaggcggtggaggtggtggatatggtggtggtcgcggtggtggatatggtggtggtggtcgcggtggtggagggggatacaaccgtagcggtggcggtggaggctatggcggcggcggtggatatggcggtggcggtggcggtggctatggcggtggcagagac

SEQ ID NO: 17014 - DNA, 245 bp, Glycine max
  Clone ID: 700960681H1
aatcaggagaatgaattgagctgtggcactgttcaatcatttgattagttgaatgaatcttttcttgttggcttttagatcaatatcagacgattttcgtatctgaaattttgagaatagcacatttatgactttgctaaatcttttttgctaaggttgaatttttttcgtttttacaagtatgagtggtatattttattacacaacattcccattatttatatgcgtactttctgttctgcaat

SEQ ID NO: 17015 - DNA, 244 bp, Glycine max
  Clone ID: 700960682H1
ctactttcagctcctaagagcacgcatcactgttgcacttcttactcgttctccctcttttttttcttcttcttcttcttcgctaaaccccccctttatttttcctatctcactaacatcgatgggagacgagaataagaccaagtcccctgcttccggcgtgtggtccaccatcaagcctttcgtcaatggcggacctccggcatgctcgccacctgcgtcattcaacccatcgatatgatcc

SEQ ID NO: 17016 - DNA, 245 bp, Glycine max
  Clone ID: 700960684H1
atcgattccggtcgaacatggatggtcaatcgccggagaaactaatactggtgaaccgcgagccaaacggcgtcgcactggtgacgattaaccgtcccggttcccttaactcgctgacccggcccatgatggtggacctggctcaggctttcaagaggctcgaccgggacgagttggtgcgggtcattatattaaccgggtcgggccggtcattctgttcgggcgtggatctcacggccgctgag

SEQ ID NO: 17017 - DNA, 229 bp, Glycine max
  Clone ID: 700960685H1
gccaaatgcatgcttttgagagccattattatccttatcctgttgagaacccacttcattatgttcctatttatatggttgctcacggttaccctcgtgagtattctcaggtctttcagtattttgttgtgatagactttgtggctacttgtgacaaagataaaaacccccatcctcaagacataattcagtttccatctgttatagtgagtagcatcactggccagct

SEQ ID NO: 17018 - DNA, 103 bp, Glycine max
  Clone ID: 700960687H1
aggacttggagctttcaaaacaaagttttaaggaagaaatgcaacagattatggaagaaaacaggactttgcatgaacttaacttctcttccacacaacatac

SEQ ID NO: 17019 - DNA, 241 bp, Glycine max
  Clone ID: 700960688H1
catgtgcaaatttgggcttttgaaaaatagtgctagactggttagggtttgcttgtagaagtttctttttcttttttgggaagggggttgccccgaagccgtttatcgttacaccctaaggtcacaataaggatctcccaattgttgaaacagttagagatgtgcttgaacagtgagacatatttgtcaatactaatcaatctttataaatttgtccttgtgccttccacgtatgccaaag

SEQ ID NO: 17020 - DNA, 242 bp, Glycine max
  Clone ID: 700960689H1
gtgacacaccagatcaaagacacctgagccattcaattcccctcctttattgctttcaagtttcaacactaattttattatctgaaaaaatggctttcaaagtttcgtttttccttgcacttgttctagtttccaatatcctcctccttgatacaacagctgctggacgcagcattggcgaaaactccaactcagaggaaaagaaagagcctgagttcttgttcaagcatgaaggtggggtg

SEQ ID NO: 17021 - DNA, 241 bp, Glycine max
  Clone ID: 700960691H1
catccctcttgatttgtagtttgttttgtgctttagataaaagttctgccaaatcaagaggggttttaagatcatagtgtgtgttttgcaacaatggctaagttctttgctgctatgatcttggcactctttgccatttccatacttcaaacagtggtaatggctgctaatgaacaaggaggccacttgtatgacaacaagagcaaatatggaagtggaagtgtcaagagttaccaatgcc

SEQ ID NO: 17022 - DNA, 85 bp, Glycine max
  Clone ID: 700960692H1
gccgaacccggcctttagggaaaaaagaaagaaagataaaaaaaaaacccttctttcccctccttctctcttccatagggttttt

SEQ ID NO: 17023 - DNA, 256 bp, Glycine max
  Clone ID: 700960695H1
ctcgagccgattcggctcgaggtctgctgtctttgttgcctctacgcttatggagaatggtggtgttcctcagtctgctactcctgaaactcttcttaaggaggctattcatgttatcagctgtggttatgaggataaaactgattggggaagtgagataggatggatttatggttctgtcacagaagatattcttaccggatttaagatgcatgcccgcggttggcggtctatatactgcatgcctaagcgccca

SEQ ID NO: 17024 - DNA, 247 bp, Glycine max
  Clone ID: 700960657H1
accgcctctgccactactcatacttctacgccgacggcacctacgccgagggcaacctcgtcagagaaaaactcaccttctccccttcccaaactacccctccacttattctaggctgcgccaccgagtccagcgacgccaggggcattcttggaatgaacctcggccgcttgtccttcccctcgcaagccaaagtcaccaaattctcgtactgtgtccccacccgacaagccgcgaacgacaacaa

SEQ ID NO: 17025 - DNA, 246 bp, Glycine max
  Clone ID: 700960696H1
cagacaacaatttcgggaatccgctggctatgactgcagttgtggtcgtcccattgggccttctcttcttcgcttccggcctcatcgttaacctcattcaggcaatatgctacgtggttgtgcggccggtgtcgaagaatctgtaccggcggatgaacagggtggtggcggagctgctctggctggagctcgtgtggattattgattggtgggccggtgttaaggttcaagtattcacagatcctg

SEQ ID NO: 17026 - DNA, 210 bp, Glycine max
  Clone ID: 700960701H1
atatattgtagcttaataatttctatttcaaacagtcaaatttattctaatttcatccaaataatcgtgttcgtgggtgcaagtcagttattctttcttatcttaatatacacgcaaaggcaagggaaattttttttcgaggaagcgcacagcagcagctataccacgttgcttgaagaaactgataaaaagcgctgccgttgtgtcttt

SEQ ID NO: 17027 - DNA, 211 bp, Glycine max
  Clone ID: 700960703H1
aactagcaacaattcacaaacacaaaaccgccaccaccaacacacaatggcacgccaagtgattgcaatcgccgctctactcatggtagccattgctggtgtggccctggccgatgaagccccatcagcatcacctaagtcagcaccaacaccatcatcattaccaaaagcaccaacatcatcaccgcagcaccggcaccatcatcctcca

SEQ ID NO: 17028 - DNA, 253 bp, Glycine max
  Clone ID: 700960620H1
atgacttagaaaagaatcaagttgcttattcaagaagtgttcacattccagatcacggagatgctggtagcagtaatcttcttaatgagaatcactattcaagattaatagctttagaagggtgtagttgtagtgcagctgcccagctgctcaatgatcgttggacagctgcactacaatcctacaataatcccaaagattcatctgaaaagccagttatgtattcgagtgggacatcaggatggactccgtt

SEQ ID NO: 17029 - DNA, 253 bp, Glycine max
  unsure (1)..(253): unsure at all n locations
  Clone ID: 700960621H1
agaagatcgatcatggcttctatatcctgtctatcctctttctccctctccaatttctctgcacctcttcccatttccatttgttcttcatcttccaccttcctaactacacacataccatgcaaanccancaaacgtagcaaaccaaaacgccaccacgtttcgaaagtgacatgcaacagttaccaaaacaccccaacaccaaacccagaagaagaaagtccatcatacaacattctaggaaaatatagaa

SEQ ID NO: 17030 - DNA, 252 bp, Glycine max
  Clone ID: 700960622H1
cttagtgtgctccaccctatttataaacttttgttgcctcactatcgtgacaccatgaacatctatggactcgcaagacaatcactcatcaatgctcgtggcattattgagcaatcatttctgcctgggccatttgctgtggagatgtcttcggcagtttacaaggggtgggttttcactgatcaagcccttcctgcggatcttatcaagagaggaatggcagtggaggatccatcctctccctatggcctt

SEQ ID NO: 17031 - DNA, 250 bp, Glycine max
  Clone ID: 700960624H1
ctcgagcgctcgagccgcaacttgaaccctctctcctctcctcatacccatttcttcattctctagcaccctatttttggccttgttccgcatctcctacccctcccctctgctgcctgcaaccatgaagattttcaacccctccaaatgctttctccagaacgtggtgtgtcctttcgacaccctcttcatcattaacaggtttaagcccttcgatctgggtctctcccacctccaccaattccaattc

SEQ ID NO: 17032 - DNA, 250 bp, Glycine max
  Clone ID: 700960626H1
ttcttattcttctgctttcactctctgactcaatcgttctaatccacaaaaaatgaccttaaattacaacattgccctcgccttctctgcggtgctcacgctgctcctctttcccctactgaccgtaggggagctcgtggaggagcagccactagtcctcaagtaccacaacggccagctcctgaagggccgcatcaccgtcaatctcatctggtacggcaccttcaccccgatccaacggtccataatc

SEQ ID NO: 17033 - DNA, 249 bp, Glycine max
  Clone ID: 700960627H1
atcttatcttagcaatagctacccctatcacaacaatactctattaggcaaaaacaccaaatgggagaggaaaaagagcagcctaagaatgaaaccgagaagaagcccgaggaggccgccgcagcccccaagaaagacgacggacccatccctgtcgtttacaaactcgacttgcattgcgagggatgcgtcaagaagatcaaacgcacatgtcgccacttccaaggtgtggaaaccgttaaggcagat

SEQ ID NO: 17034 - DNA, 247 bp, Glycine max
  Clone ID: 700960628H1
gtggatgtgttagagctgcatccgatactgcattacaggctattggacaatactgcaatcagctacaatctttgaaccttggatggtgtgataatgttggcgatgttggagtgactactttagcatatgggtgtcctgatcttaggatagttgacttgtgtggctgtgtccgtataacagatgacagtgtgattgctttggcgactagatgcccccatctgaggtccctaggactgtactactgcaa

SEQ ID NO: 17035 - DNA, 234 bp, Glycine max
  Clone ID: 700960629H1
gcaaaggctaaagtagattctattctcctcaagcaaaacctatagctcccccacactcctccagttcttgaataaaagctaaataaatattaaagcctttccttcatcaaggtactgtttgatctttgaatttcagtcctcaaagattggaacaacaggaacatgtgtactctcacaactgttcctgtgctcccttctaagcttaacaagccttcgctttctccgcaccacaat

SEQ ID NO: 17036 - DNA, 154 bp, Glycine max
  Clone ID: 700960630H1
gaaaaagatggaactggaacatgtgaccagcttgtcaagaagagatcatgaaagaccaaatcccttttttcgagtgagagcagttagcttgggtggttggttggttactgaaggttggatcaaaccttctctcttcgatggcattccacacaac

SEQ ID NO: 17037 - DNA, 251 bp, Glycine max
  Clone ID: 700960631H1
agggaaactccgaatacaggtctagatcgtttgtacagacagacttttagggtgctaacatccaaagtcgagagggaaacagcccagatcgtacgctaaggtccctaagcaatcacttagtgcaaaaggaagtgatcgagcgatgacaaccaggaggtgggcttggaagcagccatcctttgaagaaagcgtaatagctcactggtctagctccatggcaccgaaaatgtatcagggctcaagtgattcac

SEQ ID NO: 17038 - DNA, 279 bp, Glycine max
  unsure (1)..(279): unsure at all n locations
  Clone ID: 700960632H1
cgaacgtcagaactcagctcgacataatcggcctgctgtctttacttggtctggaaactctacaagtgcagaaaaccaggaacttcttgagaggatactggatttgataaagccaaatttacaatccaaaccacaaagggaagcttctgaatctgaacagttttgggattttttaggaggaaaatcagaatatcccagtcaaaagattcttagagagcctgaaagtggatctcacctattctcttgtcatttctcgantacgtaaggataattttttgc

SEQ ID NO: 17039 - DNA, 251 bp, Glycine max
  Clone ID: 700960635H1
agttaatggagcatagatatggtgcgaaggaatttgtgacaagcaaggacagtagccttttatctccgggcacattctatctcactgaagttgactccatgtatcggagattctattcaaagaaaactaaagaaagcagtttgactcacgctgagaacggtgtgattgctaatggcgttgctaatggccactgatgttgagcatgtacaatcagcagtcaacttcgcctagaatgaggaagggtattgtta

SEQ ID NO: 17040 - DNA, 231 bp, Glycine max
  Clone ID: 700960637H1
cttttctgctccccgttgagaaagatttgaatcccaaggagaaataacgctaatggctccacgagacagccgagcccccgcgctcattgggcccggcccaagcctatcaccggcccacaaagagatccgctccagaggcctcaggaaacgcccctcgggccgctacgccgccgagatccgcgatcccggcaagaaaacccgcgtctggctcggcactttcgacaccgccga

SEQ ID NO: 17041 - DNA, 249 bp, Glycine max
  Clone ID: 700960638H1
cacaaacacaagcacagttgaaaatggctctgcttaccctctcttcgctgcaatgaagaaacgtttgttcttcttctccgaagaagaaaaatggctctcggcgacgatgcgcacaccactctccctcgttcctcgatgcccttctctgcgaagagcgagaaaccttcgaggaagactttgatgagaacggttatgagcgtgagaccgaaaacaacgaaccctctgtgataaagtcgcaatctttgccct

SEQ ID NO: 17042 - DNA, 81 bp, Glycine max
  Clone ID: 700960640H1
aagatggggtctccaatggcgccatctcttactctcactattgcattaaccataatctctctcacgttcccatctcaaaca

SEQ ID NO: 17043 - DNA, 246 bp, Glycine max
  Clone ID: 700960642H1
gaaagtagtcaattaacccaggtctatggattttatgatgaatgccagatgaagtatggcaatgccaatgcttggcggtattgtacagatgtgtttgactatttaacactttctgcaattattgatggaactgtgctttgtgttcatgggggcctttctcctgacattcgaacaattgatcagataagggtcattgaccggaactgtgaaattcctcatgagggtcctttctgtgatctaatgtgg

SEQ ID NO: 17044 - DNA, 244 bp, Glycine max
  unsure (1)..(244): unsure at all n locations
  Clone ID: 700960644H1
agcggtcagagcatggcggcggaaccggtgagtgacggcggacccgngcggagaaattgatcagcgggagagaagaatttggtgattcgtccaacttgttcagcgcgattctagcaatggtgctgtggctgggagctattcatttcaacatcgccctgatcctcctcgccgtgttcttccttcctctctccaaatcgctcttggttttcggttttctctttgggtttatggtgcttccacacaa

SEQ ID NO: 17045 - DNA, 94 bp, Glycine max
  Clone ID: 700960645H1
ctttctctgcgttgccatgacggaaccaacggagccatgcacgtcatcttccttggcaagggacccaaccaccgtgatccacccaaggcgcgag

SEQ ID NO: 17046 - DNA, 252 bp, Glycine max
  Clone ID: 700960647H1
ggcttctgtgcctcaaccaaaaatctcccttctaaccttattcttcttctcgtccttcaccatcattgcgcatgcaattgttcctcaaaacgaaaccttcaaatttgagaactcaggtgaacttggaccctacatcgttgagtacggtgcagattacagaatgataagcatcttcaactctccattccaagttggtttctacaacaccaccccaaatgccttcactctagctttgcgtgtagggctccaacg

SEQ ID NO: 17047 - DNA, 93 bp, Glycine max
  Clone ID: 700960648H1
ggaaaagaagcggtgttcgaatttgaggggtgaatggatcaatcgttccttgtaatggtctcgaatctcctccagctccacaactccctggac

SEQ ID NO: 17048 - DNA, 220 bp, Glycine max
  Clone ID: 700960649H1
caaaaacaaaacatttcgtccgaaactaatataacgtgttcctccttggaagaagccatagccataacatagccaccagaaaacaaaacccaccttagttattaaaagaaaagaaaactacataaaattaagctttgttcggtggtgaccatggggagcaccgactcatcaagcggttcacaacaaccgaacctgccacctgggtttcggttccacacaa

SEQ ID NO: 17049 - DNA, 247 bp, Glycine max
  Clone ID: 700960650H1
gttgaaatgaaaatgggttcttctttgtggactttgtgtctaattttggcttcactagcctcttctgcattctgtgcctttccacggaggccagtggagactccattcggcagaaactacgttcccacttgggcttttgatcacatcaaatacttcaatggaggttctgagattcaacttcatcttgacaagtacactggtactggcttccagtccaaagggtcatacttgtttggtcacttcagca

SEQ ID NO: 17050 - DNA, 99 bp, Glycine max
  Clone ID: 700960651H1
ggagcctgcctcgaggaggtatcaatgtgacgcctcagatgcaagagcagaggggaaaaagtgctgcagctggaacagatctcaagccgcgtccagcag

SEQ ID NO: 17051 - DNA, 140 bp, Glycine max
  Clone ID: 700960652H1
gggccatcggcgatgggagacgacagtggcagcaaccggtcaaagccggagtggctgcagcagtatgatctaatagggaagattggagaaggcacctacggtctcgtcttcctcgctcgcatcaagtcttccacacaaca

SEQ ID NO: 17052 - DNA, 252 bp, Glycine max
  Clone ID: 700960619H1
gctaaccctgctagctatgctgattgtacgcattggtgtttgcctggacttccagatacttggaatgagcttttgtttgccaagttattttatccttgaaagtgaatcaaaataaaagatccttgttaactcggttccttgtgtggcatgacatgaaaaattgtaaatgggaggctacaacctacgagctttagaaatggtaaaagagaaagaatgaatgcaaagaggatttgtgtagaataatattacatt

SEQ ID NO: 17053 - DNA, 244 bp, Glycine max
  Clone ID: 700960653H1
atcgaaggaatgaacggccaaaaccttgacggccgtaacatcactgttaacgaagctcagtcccgtggtggcggttgcggcggttgcggtggaggtggtggataacgcggtggtcgcggtggtggatatggtggtggttgtcgcggtggtggagggggatacaaccgtagcggtggcggtggaggctatggcggcggcggtggatatggcggtggcggtggcggtggctatggcggtggcagag

SEQ ID NO: 17054 - DNA, 79 bp, Glycine max
  Clone ID: 700960654H1
gcactatgatacaagcccaacaaacatggttttaattggtataggcgtgcaaaggtcttgttaattttgagcgttaagt

SEQ ID NO: 17055 - DNA, 245 bp, Glycine max
  Clone ID: 700960655H1
ctggcagtggcaaatctaccttgattcaagcattatttcgattggttgaaccggaggcagggagtatccttatagacaacattaatatttcatcaattggtcttcatgatcttagaagtcatttgagtatcataccacaagatccaaccttatttgaaggcaccattcgaggcaatcttgatcctcttgatgagcactctgataaagagatttgggaggcccttgataagtcacaacttggagat

SEQ ID NO: 17056 - DNA, 241 bp, Glycine max
  Clone ID: 700960656H1
actagaagctccattattggcaacaagctagcagcagaggagaagaatcagaattcagaactgaagcagacacggccgaaggaagaaacgaagacaaagacacaaccatgaagcgccttcttctcataacaaactgtctcttactcaccatcggcacctacggtgggcccctcgtgatgcgtctctacttccttcacggcggccaccctgtctggctctccagcttcctcgaaaccgccgg

SEQ ID NO: 17057 - DNA, 64 bp, Glycine max
  Clone ID: 700960511H1
ctcactaattgcaagaatggcacttcgtcgcttggtcatgtccgtttctgttctctctcatctt

SEQ ID NO: 17058 - DNA, 66 bp, Glycine max
  Clone ID: 700960513H1
tcggacttcccccccccccaaactcatgcttcacgaaccccccgccccctctttccacctttcctt

SEQ ID NO: 17059 - DNA, 52 bp, Glycine max
  Clone ID: 700960514H1
gcggcaaattgggtatgctcttgtcctatgattgctaggggagtgatgttgg

SEQ ID NO: 17060 - DNA, 253 bp, Glycine max
  Clone ID: 700960518H1
aatttgtacatgctgagctgacacctacacaccctcccaatacaaattatggttactctcagggattctttgggtctgaaggaaagatgtgtggctgttgacactatatctgttgctgctcgaatactgaatagatctaaagctcatctccaatcaatggtcttgcacagtaattcaactatacttgaggatttctcacgttcatctggtggatgctgctacagatcttacagaacatgttcatcggactaca

SEQ ID NO: 17061 - DNA, 144 bp, Glycine max
  Clone ID: 700960519H1
ttactgacgctaatggaactacagctaatattggtgaacatgatactagcactaccaatggccatgatgatgatgatgccatgttattcacttgctgtcgacattaatcaacaactgaggcaagtgccaccaaagcataacgtg

SEQ ID NO: 17062 - DNA, 121 bp, Glycine max
  Clone ID: 700960528H1
cgtaccacctccaacttgccctagcagtaagctataactcatttgaggctctgtgagaactgagcaatggctaaagatgttgaggttcaagagcaacgagccgagtactctgcgacagact

SEQ ID NO: 17063 - DNA, 67 bp, Glycine max
  Clone ID: 700960529H1
cctccacccgcacctcaacctcccaattccgctccacgcacaacccaactccgactgatcacccaaa

SEQ ID NO: 17064 - DNA, 73 bp, Glycine max
  Clone ID: 700960531H1
cttgattagcctgacaagacatgcatgatatgttttaagctggaccaaacagaggcaaactcattcgttgttc

SEQ ID NO: 17065 - DNA, 239 bp, Glycine max
  Clone ID: 700960532H1
caggatctacaccttcagtttctctcgttgctcttcgctttcctgttcttcaatctcgattctttcgttacatccacacaagatctttcggagggcaccgaagaacagccacaatacgacgtactacgaaactctcggcgtctccaacaacgcttcgcacgatgatctcaagaagcgcttacaagaaagccgccattaagaatcaccccgacaacggcggtgatcccgagaagtttaaa

SEQ ID NO: 17066 - DNA, 156 bp, Glycine max
  unsure (1)..(156): unsure at all n locations
  Clone ID: 700960540H1
cacgcgacatctgaactgcttctctgattccagtttcatggccgcattccaaggtattgatctcttgccgacattcagcaatgaatttgcgccattgnagggaacggtcaaaagcttagttgcaacaacgtggctcaaggttgagcaaccaacacc

SEQ ID NO: 17067 - DNA, 220 bp, Glycine max
  Clone ID: 700960541H1
tttcactcgttgaaatgacaatgccgctcttctttgtggaatttgtgtctaattttggattcactaccctctctctgcattctgtgcctttccacggaggccactccctgcctcattcggcacaaactacgttctcacttgggcttttgatcacatcacatacttcaatgcacgttctgagattccacttcatcttgacaactacactggtactggcttc

SEQ ID NO: 17068 - DNA, 61 bp, Glycine max
  Clone ID: 700960543H1
ggacttaaatttctcatgtaagcttcacacagagactcgtgtgaagtgtgatgattttggg

SEQ ID NO: 17069 - DNA, 197 bp, Glycine max
  Clone ID: 700960545H1
ccaattactactctctgcctctttcgccactctctacccatccactgctcaaagctctctgcttccccctctgctctccacgctcttcctctcctccgcccactgccactctccgctccggctactctgccaccccccccaccacgcacaaccctgcgtacaacaccacagacacccacactacccgctgttaagcc

SEQ ID NO: 17070 - DNA, 154 bp, Glycine max
  Clone ID: 700960547H1
atccagcgacttcctctcactcgcctgtccacagaacttgccacctacatggcagctccaacatctggtgctgcgtcaaatgggttcggatcttccttctccagtggacgaccaggagccacacctttggccctgctattggaggcaaagttgg

SEQ ID NO: 17071 - DNA, 104 bp, Glycine max
  Clone ID: 700960549H1
atcacccttgaggtggacagtctgacaccatccacaacgtcaacgccaacatccaggacaacgaaggaatccccccgcaccaccaaagcctcatcttcgccggc

SEQ ID NO: 17072 - DNA, 137 bp, Glycine max
  Clone ID: 700960551H1
cacacaatttcttcaccacacgtttctccaacgcatgctccaactaactatcaacgatcgtgccttcttcttgattgatttacgcagtgagcatcggcactgcatcactgacaacgaccgacagcactaccgcgtac

SEQ ID NO: 17073 - DNA, 90 bp, Glycine max
  Clone ID: 700960572H1
tgaaaacttacagtgcttctgtcctctgtgtttctgtgtgtgttgctatccttttggctactggcactgctgcaagtcaaactccaagaa

SEQ ID NO: 17074 - DNA, 144 bp, Glycine max
  Clone ID: 700960574H1
gaagaaagcagcgattttgaagtctctgcaaacgattatggttgtgttcctgctgatagtactctttagcagcaacaccaaagcagaaaaagaaacaatccacgaccatgcaaacagaaagagctacataatccacatggacga

SEQ ID NO: 17075 - DNA, 106 bp, Glycine max
  Clone ID: 700960577H1
acagtagcgaacaaagaaaagagaagaattagtgtgaccctccacaaaccttgttgcatgaatgaatgatatcatcatcactactaccacaagtccacacaacata

SEQ ID NO: 17076 - DNA, 64 bp, Glycine max
  Clone ID: 700960578H1
tccgaattcggctccaggtctctctcactcaccaccttaccccccctgtttcttgtacacttta

SEQ ID NO: 17077 - DNA, 130 bp, Glycine max
  Clone ID: 700960580H1
atgatttcatatggtgtttccgaacattatcttctcccaacattccagccttccatgcacctgtggtgcctctctactgtagctgctgtcatgtccttcacctactcattcattggacttggccttggta

SEQ ID NO: 17078 - DNA, 149 bp, Glycine max
  Clone ID: 700960583H1
attcggtcgacgtcttagcgacaagacactgtctcccgagtgaacacacgttacagcaatggttcctctgctacaattggcaactcattacgacacacagcaaccacgcacgttagttcacgaactgcgatcacccccttcgttttctc

SEQ ID NO: 17079 - DNA, 107 bp, Glycine max
  Clone ID: 700960589H1
caacctcgcaattagcctccacgtcgccacaccaaatcaaacacacctgccccacttcaattcccctccttctactcgctcttctccgcttcaccactcaatttcat

SEQ ID NO: 17080 - DNA, 246 bp, Glycine max
  Clone ID: 700960593H1
cacttcaacttgttgtgactcagcacaactgtacgaaacgccagctttgcaaacgagctggcatctgcatatactcttgagactccactctccataatcttttgctgttgctgctcgtgatgatgttctgtattgggctccatctcttgcttatgaaactggccttgtagcagcgattatgagatcagacaaaaatagtggtattagacgaaggacctcatttgctttaactggttattaaacgag

SEQ ID NO: 17081 - DNA, 140 bp, Glycine max
  Clone ID: 700960594H1
catcgacaacaaccatcactccaccctccctcctgtctctgcccccctcctctacacccccacacattcactagcatcgccaaggtcaattttgtcaagaatggacgacctagattgcctccgcgggtctcgcctccacc

SEQ ID NO: 17082 - DNA, 171 bp, Glycine max
  Clone ID: 700960595H1
ccacgaagactcgtagtcacttcaacatcatgatggatcacaaaatctacacatgcgagcatctccaatcgcccttacagcgaagttcgcgttggtttccatgatacgtctgctagggacaatcatcaattgaattgtgcatatagaaacagctctgcagattatggtggt

SEQ ID NO: 17083 - DNA, 255 bp, Glycine max
  Clone ID: 700960602H1
attataacatcagcatttgctggcacccgaatttctaaatgggaagaaccaaacggagcaagaggttgttgggtcgtgtatagaacatttggtaacgagatgtttgagcttgtagcatatgagttgatgtcagccaatgatgcaccagaaagggatccactggactggattcttgaagggagcagtgatgacgggatcagctggcaagttttggacaagcaaacctctcagttctttgaagaccgtttccagcgt

SEQ ID NO: 17084 - DNA, 177 bp, Glycine max
  Clone ID: 700960508H1
acactgcaacagcaacagcttccaaatggcacacggacaacgtagagtttgtgtcacgggaggcactgggttcgttggttcacggaccatcaagagatccttgaacacggatatgctgttaacaccactactagatctgactcaggacgcaagagacacgttagcttcctcaccaac

SEQ ID NO: 17085 - DNA, 255 bp, Glycine max
  Clone ID: 700960605H1
ctgtgatgtcctcctaaaaaactctatccatgtctatgatgtctctcacaaccgtggctgcattcaagtccctcacaatggcggaatcgtgccttctatccctcccttccctcttctacgccaaaaacaataccctttctctctcaattcccaccaagcccctcaacctccatcttccatgctccaactcttcgctctttcccctcaccaccaaaacaacgcgccactcttctctcctcacattcgtggctcaga

SEQ ID NO: 17086 - DNA, 256 bp, Glycine max
  Clone ID: 700960606H1
agtccgaattgtgaaagtaagcaaagatggctttcacggaatcgtctctcctccttccttcggtttcaggaaccaacaagaacaagaacaaggttccagaagacaaatggtatttagcctacattgtgtattttaccctgggtctcggttaccttctcccatggaacgctttcatcaccgccgttgattacttctcctttctctaccctgacgccagcgttgaccgcatcttcgccgtggtttacatgatagtcgg

SEQ ID NO: 17087 - DNA, 252 bp, Glycine max
  Clone ID: 700960609H1
gtcagtcgttggaagaaacctgagattggttgggtgaagctgaacgtggatggttcacgcgacccatacaaaagttcctccgctggttgtggtggtgttctgagggacgcatcagcaaagtggctccgtggctttgctaaaaaactgaaccctacttatgcagtgcaccagacagagttagaagccattctcacgggcttgaaggtggcttcagagatgaatgttaagaaactaattgtggagtcagacagt

SEQ ID NO: 17088 - DNA, 250 bp, Glycine max
  Clone ID: 700960611H1
aataaagggtcaacaactttggcgaaaataagaacccaagtggtttcagagtgacacgcacaagagaagagataatggcaacaaaatctttgggcttcgctgtgtctgtgactcacctcttcggttccaagtcgccacccaagctttgcgtctttactctcagatgctctgctggcaatggagaaaggccttggaaaacttcaggcgctagacttatgttagaagatggatcaatctggaaagcaaagtc

SEQ ID NO: 17089 - DNA, 247 bp, Glycine max
  Clone ID: 700960612H1
gtcagtcgttggaagaaacctgagattggttgggtgaagctgaacgtggatggttcacgcgacccatacaaaagttcctccgctggttgtggtggtgttctgagggacgcatcagcaaagtggctccgtggctttgctaaaaaactgaaccctacttatgcagtgcaccagacagagttagaagccattctcacgggcttgaaggtggcttcagagatgaatgttaagaaactaattgtggagtcag

SEQ ID NO: 17090 - DNA, 250 bp, Glycine max
  Clone ID: 700960613H1
gcttccacttctgattcagaaactcttaggcattccacattctcaaccccgaaccctaagagcagagcgaaaatgacaaccaccttcgcgaccgtcgcaggactcggtggcgcattactgtcatccacctcatctcgtctcacctcagggtttgtgaaatccccagtgattgctaggaatcccttgaggcaagctgtggcaatgggaaatgggaggattacatgctttgagaggaattggctgcgggcag

SEQ ID NO: 17091 - DNA, 235 bp, Glycine max
  unsure (1)..(235): unsure at all n locations
  Clone ID: 700960615H1
cctctctcttcttcagtggtggaagctactagaacactagtttgttgagcactgcgatgaggaagtggacggttgcttccgctctccttcttctctctctcctctttctctttgcagatcaaggtcgtaagttttangcgaagcgcgagggagattccgacgagcttgtagatccacccaaggtggaggacaagatcggtgctgtgcctcatggcctttcaaccgattcagatgt

SEQ ID NO: 17092 - DNA, 71 bp, Glycine max
  Clone ID: 700960616H1
ggaatgcgactcgagcgcgcatgagaagaagaagaagattgccgatctgagcgagtcttccatcctacagg

SEQ ID NO: 17093 - DNA, 248 bp, Glycine max
  unsure (1)..(248): unsure at all n locations
  Clone ID: 700960618H1
cacaaactctgctatccctgctctgtttctctacatcaccgtctctcccgttatgggagtcgccggggctaagtctaagtgtagtaccgttgggattcaaggtatcgcttgggccttcggtggcatgatcttcgccctcgtttactgcaccgctggcatctcagggggacacataaacccggcggtcacatttgggctgtttttggcgaggaagttgtcgttgcccagggcgatttnctacatcgtga

SEQ ID NO: 17094 - DNA, 255 bp, Glycine max
  Clone ID: 700960473H1
agcaaatcagagaacgagcttgcagtgagcaattgaagcatttgaaagaagctcgtaatgaatatagagaagaggttattgattgtgttaggcattgtgcttggtaccgcatctctctattttctcgatggaagcagagaggaatgtatgcaatgtgcatgtgggttgtccagttgctactggttcttagcaatatggattcagtgtttatctacatccctgaatattatctggaagctttggttgattgctttc

SEQ ID NO: 17095 - DNA, 252 bp, Glycine max
  Clone ID: 700960474H1
ctcgagccgaatcggctcgagggtggcgtctcatgcccatacatcggtgggaagcatttgggtcatggggttcttctagtaggttatggtgaaggtgcatatgctcccattcgttttaagaacaaaccttactggatcattaagaattcatggggcgagagctggggagagaatggatattacaagatctgcagaggtcgaaatgtgtgtggagtagattccatggtctcaactgtagctgctatatatcca

SEQ ID NO: 17096 - DNA, 250 bp, Glycine max
  Clone ID: 700960475H1
cttcttcttcttcatcctccgacggtcatgaaggattgctcttttcttctgttatatatactcttggacacttttgctcaagtttggagacgatgattgtgtgtatgtgttgaagctcttccttcggtttcaattcacttctgcaacatctactacatattgcagggttcttgaggatgggacaagaattggagtttgatctgaatgacaagtcttgcgtgggtctcagtcctgatactgttcttccaca

SEQ ID NO: 17097 - DNA, 256 bp, Glycine max
  Clone ID: 700960476H1
cactcttcaaccatcaatcatccatcgccttcttcatttcaccaccgcgcgcacaattgcaattacatttccaccccccaaatttcctgttcagaagaaaaaaccaccaccacctcacctctgatccgtgcacctcacgtgcccatggctcctgctacctccgagcgcgtggagttggccaggctctgcgcctccaaggactggtccaaagccattcgaatcctcgattccctcgtttctcattccaacgcaattc

SEQ ID NO: 17098 - DNA, 98 bp, Glycine max
  Clone ID: 700960477H1
ccgacctctgttacagttaatctaaccgtttgattcgctgaggtcatggcgttttggcaccgaatccgaaatcccaacctcaaaaccctctgcatcca

SEQ ID NO: 17099 - DNA, 252 bp, Glycine max
  Clone ID: 700960478H1
gtccagccggaagtacttgctatgatgtgcaggttgatgtgcctcttccacttgagaaggatatgtctgcgttcttggcaagcactgagaggcacaaagatattgatacttttgatgaattgatctctgattcgataaagaagattcgtgaacatcataggagacgggcattctttctcggctttagtcagtccccagcagagtttattaatgccttgatagcttctcagagcaaggatctgaagctcgttg

SEQ ID NO: 17100 - DNA, 253 bp, Glycine max
  Clone ID: 700960479H1
aagaaaaagagaaagaaaaaggatacaacgatggctatgaatggatcacctcgacggtgggacgtgagattagttttgacattttctctacttttaatctcagcctctgtttctgctcttgaacatgtaaaccacaaaaagattgatcccaccaccgctgaaactagttttcttggcaaagtcatgaactttttgtggagctcatctgggtctggatacgaacatacttggccagaaatagaatttgggtgga

SEQ ID NO: 17101 - DNA, 263 bp, Glycine max
  Clone ID: 700960481H1
aatcgacaatcctaatggttccgacaaagctcgacctgagtgtgatctcatgatgtttctgctctaactatgtttgatttggatacccaacaacaaaaagagtgttgtcgtgttgttgtagttaatagtaataggactaagtaagagtagtggaaaacatgaacaacagcagtggcggaggaggacgaggaactttgatgggtttgagtaatgggtattgtgggaggtcgccattcacagtgtctcagtggcaggaactggag

SEQ ID NO: 17102 - DNA, 263 bp, Glycine max
  Clone ID: 700960482H1
cttgcagtcgcagaggaaaaccctagctagtagtctcagttcgtttgagagagaaaaaatggcagagggtctcgttctccgcggaaccatgcgcgcccacaccgacgtcgtgacggcgattgccactcccatcgacaactccgacatgatcgtgacggcgtcgcgcgacaaatccatcattctctggcacctcaccaaggaggacaagacctacggtgtcccccgccgccgcctcaccggacattctcacttcgtccaggacg

SEQ ID NO: 17103 - DNA, 261 bp, Glycine max
  Clone ID: 700960483H1
agcgaacgaacgaactaatcaatacaacgccatatctctgtgcatcgcttccttccctcgtcctcaattcgaatcaatttcctcaaagttgctcccagttttcttcgcatcacaattcggaaggtacagggagagggtttgacaaatgatgggtttattcctcagatattttcatctatgccagctctcaatgatgcagcttcttatcttgcacaaacaacatcattgataactggatgtttctctgattattcagaacct

SEQ ID NO: 17104 - DNA, 259 bp, Glycine max
  Clone ID: 700960484H1
cattactctctcttctcctaaaaatttctaatgcttccattgcttcatctgactcactcatcaatggctctgagactgaaccctatccccacccaaaccttctccctcccccaaatgcccagcctcagatctccccgcttccgcatggcttccaccctccgctccggttccaaagaggttgaaaatattaagaggccattcactcctcccagagaggtgcatgtgcaagtaacccactctatgcgtccccagaagattg

SEQ ID NO: 17105 - DNA, 259 bp, Glycine max
  Clone ID: 700960485H1
gttccctccaccacatgaagatggacagcttggctttcctttgggatcttctaatcatattgatccggatattgttccttctgatgtttctttcggttcaacctcatacaccttttcaaaggaaccattccaagcttggtcaggtcccattggtaatactgctagcattagtgtcacaaagcggaagaaacacactgcaggtgatgcactggatttatcaaaaccatataaaggtgccctcaaggataaggttaaagga

SEQ ID NO: 17106 - DNA, 258 bp, Glycine max
  Clone ID: 700960487H1
gctattcttacctcttggcatgaccattcaaatgtcttcttttctcttagcttctcttgctgttttctttttcttctcctccttggagaagagttttgcctttcaagcagcaagaaaggaggacacagaaagcaacaatcttcatcaatatactcatcttgttcacctcagctcactccttccttcatcttcttgcagctcttctaccaaaggtcgcagaacagaagcatcattagaagtggtacacaaacatgggcc

SEQ ID NO: 17107 - DNA, 256 bp, Glycine max
  Clone ID: 700960488H1
attttccttcttccatggtttgcctctctctctctctctctctctactctcctttcatttcagaaatcatggggaaataaacataattaatctccgaaataaacaaaacatttttcgtgacattcgatgaatgatatgaaggtgagaagtgggttgtgcgtgtggccaaatgtgagacaactttgctttagaaaaggcattctatatgggtttatgcgattgttttctactccgttgaaaacgctgcgtggagcta

SEQ ID NO: 17108 - DNA, 252 bp, Glycine max
  Clone ID: 700960489H1
gaagttctaaggaagacggaatatgcagaatacaaggtgctagttgtctatttgcaataacaacatcagcgatccaaccttagtattcttcaacccagagagatttgtaataataaattacaacaacttaaacgatggcaggaggagcttatgtagattcgggaaatgcaaagcaatttgatgggaaggtcacggcattcgtattggttacatgctttgtggcagccatgggaggcttactcttcggttatg

SEQ ID NO: 17109 - DNA, 253 bp, Glycine max
  Clone ID: 700960490H1
cgatgttcttctccttggtgatggcccctggccggaattcgtaaatagcgtatggtgcataaagatactttctcctcaggaagtgcagcagatgggcaacaatggccttgagctgttgaactcgtttccaattcaaaggctctctaatggcatctgtgatgactatgtgagccgtcaagacccaagaaatttaggcactgggataacaaccgtggggtctttagactactaaatagtcttcacttcttctatc

SEQ ID NO: 17110 - DNA, 253 bp, Glycine max
  Clone ID: 700960491H1
aaatttaaagaaatcaacacacacaaacacaacaacatatggaggtgctaagggtgcaaaccatagcttccaaatccaaagatgctgccatcccagccatgtttgttagggcagagacagagcaaccaggcatcacaaccgttcaaggggtgaaccttgaggtgccaattattgattttagtgacccagatgaagggaaagtggtgcatgagattttggaggcaagtagggactggggcatgttccaaattgt

SEQ ID NO: 17111 - DNA, 251 bp, Glycine max
  Clone ID: 700960492H1
cctttctgaacgagatctcagatctctggttgatgcttcaaagaaccctaatctcatggctattgtttcctgcacttccatcattgcttccaaatgaatgaatgaatgaatgaatatactactctgtctctctctatctctctctctctctcgctcactcactcactcgctatgccatgcttcttgctatgatatgtttctttctttttctttttatgcgacctctggggtccttcactcgctctcttatc

SEQ ID NO: 17112 - DNA, 180 bp, Glycine max
  unsure (1)..(180): unsure at all n locations
  Clone ID: 700960493H1
tctctctctctatatatctctctctcacactccaacaccaaaacccttcatcttctcaatccccttttctccctcacaattccacatatcncacctccaaacatcttcaattttaccgataaatatttcttcctctttacatttcacctctctctatcttcttttatccattacacacaa

SEQ ID NO: 17113 - DNA, 248 bp, Glycine max
  Clone ID: 700960494H1
gtagaaacagttcaatcattcttagccctaagcagacttcacatactcatccacttagtggcagtgttgtctctctgttactaccgcatcacccacttcttcctccaacctccaacaagaccatggcttctcatgactgctgcggacttcttctctcgctgctctggttcttcaaccaagccttccggtggcgaccggtgtcgcggacgtcattgactgagaagcttccgagtgaggagaagctgccg

SEQ ID NO: 17114 - DNA, 252 bp, Glycine max
  Clone ID: 700960495H1
tacaaacatggcaatgaagaagttcttgtgggttgttctgtccctttctttggtccttggagtggccaatagctttgattttcacgacaaggatttggagtccgaggaaagcctgtgggacttgtacgagagatggaggagtcaccacacggtttcgcgaagcttggtgacaagcacaagcggtttaacgtgttcaaagcgaatgtgatgcatgtccataacaccaacaaaatggataagccttacaagctg

SEQ ID NO: 17115 - DNA, 215 bp, Glycine max
  Clone ID: 700960496H1
tcgggatgcggctcgaggcgatatctcaggttacaaacagaagaattgcagtgagtgcacaagtatacacactcaatgattgtttactgctcaagagagaagatggataagagatatgtcctttgtccctaagagaaagtccaagcaaagtccacatcagaagaactctacaagacacaaccagcacacctaccacagttttccccacaagtcca

SEQ ID NO: 17116 - DNA, 279 bp, Glycine max
  Clone ID: 700960501H1
cgtaacctcgccactcggctcgacccacaacaaaacccccaactccccacccaccacctacgcgcacacccaccacaccaccccccaccaccaacaaccaccacacccccaccccaacgcccaaaccaccaagcacaactctgatctctccttcaagccaagctcacaggtaaagggcatcacatcttggagcgcacttcatagtgaactccttcacaatcagaagagcaagaccctcggagctcctcaacgttctttctttcccaccacacaacaaca

SEQ ID NO: 17117 - DNA, 246 bp, Glycine max
  Clone ID: 700960503H1
tccaggtcatccaagacaatccaacaacaatgttcagctcttcacctcaagctcccaagtcatgctgcctcatcctctcatccaatctcttcattcaaccaattcaactcttaatcgacgcattccaacatcacctagttccaaacttcttcattcagataacaacaatgatcgtagccaaccacacaacggtagtagtactactcgttcttgcagctctcatcgtggctcctctctgatgcaaac

SEQ ID NO: 17118 - DNA, 106 bp, Glycine max
  Clone ID: 700960505H1
cgcacgcaagctcggcaactaggctcgcaagtaatcgcaaaatctaggcgtttgtctcgttccgtcgttccgccaacaatcggcgctccagcagattctcacaacg

SEQ ID NO: 17119 - DNA, 160 bp, Glycine max
  Clone ID: 700960507H1
acaacaaaatggtgtgtgaacagttcggttcggacaacgatctagccaacagaatacggtgttttggccctcataccactgcgaccaccatcatggtggatgcatgtaacggagttcagtacctccatgccatgaaggacgctgttcttgctggctttca

SEQ ID NO: 17120 - DNA, 258 bp, Glycine max
  Clone ID: 700960472H1
tgcccttcctgattttgatcacctttctctctggaaccatttgttacttcatggttcgcctacaccctggcttctggcactacctcttctttgtgttgtgcctttatgccagtgtcacagtggttgaaagcttaatgatggcaattgctagcattgtccccaacttcctcatgggcatcattattggagcaggaattcagggcatattcatgttggtctcaggctattttaggctcccacatgatatcccaaagccag

SEQ ID NO: 17121 - DNA, 263 bp, Glycine max
  Clone ID: 700960440H1
cagatcgcagcaaaccagagattgaactccgacgatgcctcccgtcgctcctcgatccggcgatgccatattcgccaacgtcgaacgcgtcaatgcggagctgtttactttgacgtatggcgcaattgtgcgtcaattgctcacggatctggaagaggttgaggaggttaacgagcagcttgatcaaatgggttacaatattggaatccgattgattgatgagtttttagctaagtctaatgtctcaagatgcaacgatttca

SEQ ID NO: 17122 - DNA, 261 bp, Glycine max
  Clone ID: 700960441H1
tctggggtgcgtatagagagcagatgtggggcttgttcattgccaagaaaaattgagatgctttattgctatcatatgccttgttctagctatatttagttcctgtgtagccggaataattaattatctctatgtctgttttgttggtttaaaattcatagctttcgaactataatgatgatctgcggagaggagaacgctcttcgatttgaataacacaatggtaacttggcattggctgcgatgctaaaaaataatttc

SEQ ID NO: 17123 - DNA, 259 bp, Glycine max
  Clone ID: 700960442H1
cagcatgttacattattactccattctactttaggttgttgacgaattgagttattctgtcatccgttgaaattgtgttgagagaataaccaaatcgtttgacaatctggtggaggggagatatcaatttggaaaggaaaattgtactttgattaggttgttggtgatgttcttttaccattcttcctccttctgtaaatattagatctgatgaaacgtttagcagtttgtgaatacaggttgctacctgtaatgtaag

SEQ ID NO: 17124 - DNA, 260 bp, Glycine max
  Clone ID: 700960443H1
gaagaaagtaagatatgcctctcgcaaggctagggctgatgtcagaaagcgtgtgaagggccgatttgtcaaagctggtgatgtctatgactatgaccctttgaaccaaaccagaagctactgagtgtacaacttttaaccatgttctgtaaaaaggaaagaatcactctatagttgcaaaagaaaagtaactcttacctgaaaaaatggatgaaatttgatgcattctttctccatgcaatgacaagctgtctgatttt

SEQ ID NO: 17125 - DNA, 259 bp, Glycine max
  Clone ID: 700960444H1
agaccctagagaagataccacagtctttgagctcttcaggacggtttgactttcatataaagctgcctgctcctgcagcttctgagcgcagggctatgttgaagcatgaaatacagaggcgtcagttgcaatgtgatgatgacatcctgcttgatgtggctgtagaatgtgatggttatgatggttatgatctggaaatattagttgacagaactgtccatgctgctgtttgccgttttctgccatctaatgctgccat

SEQ ID NO: 17126 - DNA, 271 bp, Glycine max
  Clone ID: 700960449H1
tacagtttaccttttcttgctcaaaccaacgacgctaacgctgaaaacaatctctacccgtttgtttttctaaacgtcgatggcaacctttttatctttgccaacaaccgcgctatcttgttcgattacaataagaacagtgtcgtgagaacctaccctcaaatacccggtggagatccacggtgttatcctagcaccggttccgcagttttgcttcctcttcgagaacctaatgtggaggctgaggttctgatttgtggtggaccccgag

SEQ ID NO: 17127 - DNA, 267 bp, Glycine max
  Clone ID: 700960450H1
gtgcaatggctgacagatacatcacttgatgctgctcgtcaacgtatccaagaacagttaagtgctgtgacagctgatatggttatgctttctacagatgaaccagagaagaagaaaaaagcagcaagtaacggaaatggcggttctcagaatggtaactcaatgcactatgggaccctggttggggaagtgaaagctaatttgaagaaaggtattggagcgaatgaattgctgtcccatctttcagcacatcctgcacctgctcaa

SEQ ID NO: 17128 - DNA, 266 bp, Glycine max
  Clone ID: 700960451H1
taagaaagccagcttcttcttcttcagctgctgctgctgctgctgcttcaacttcccaacaaatatttcaacacactctctcattgcttcaatttccgttacgtaaagccactttctcaaacctcagtttcctgttgttgtggttgaagttggtgagagacgaatcttggggaattttggatctgtttgccgtgaaaccctaatttcttgcttgtgaggctttggaaattggggttctggttagatggaagctgaggatggaagta

SEQ ID NO: 17129 - DNA, 264 bp, Glycine max
  Clone ID: 700960453H1
acaggagtcgcctcgtgtttccgtttccgtttcaatttcctgctcacaggctttaacgttaccagctcgagataagacatggaccggatcaaaggcccatggagtccggaggaggacgaggctctgcagaagctggtggagaaacacgggcccaggaactggtctctgatcagcaagtccatcccgggccggtccggcaagtcctgcaggctccggtggtgcaacagctgtccccccaggtggagcaccgggccttcacggccg

SEQ ID NO: 17130 - DNA, 261 bp, Glycine max
  Clone ID: 700960455H1
aagagaaaggaaggaaaaatggagttgttcttctacgcggtgttcggcggtttgggagcggttgttgcagtgacggagctgagcaagagcaacaaggaccgaatcaacacctcttccgcattcaattccttcgagaacaactacgtcatcgtctattccctcatgatggctggagattggctacaaggtccatatgtctactacctttacagtacatatggatatgggaagggagacataggacaactcttcattgctggt

SEQ ID NO: 17131 - DNA, 258 bp, Glycine max
  Clone ID: 700960458H1
cagaaaccctaatttctcaaaatcttcagaggacacacagcacaaccaacacctccacagcctctcctacctcccggagccatggccgccgccgactcctccgccgctccatcgcaccagttgtcgcagagggagacggacatccagatgatgctcgccgccgacgttcacctcggcaccaaaaactgcgactttcagatggaacgctacgtcttcaagcgcagaaccgatggtatttacataattaaccttggcaag

SEQ ID NO: 17132 - DNA, 258 bp, Glycine max
  Clone ID: 700960459H1
ggatagatagagtgatacacatcacattttctcaaagtaatttattaattaataaataaatggcggcggcggcggcagtgacggtgctactcccacctaggattccgaccgccaccaacgttacccgctgctctgctttgccttctctgcctcctcgcggcaccaacactaaaaccactttgctcttatcttccctcaaccacttctcagtgtcccgaaaatcttctctgcttcagaccagagcttcttcagaggaat

SEQ ID NO: 17133 - DNA, 256 bp, Glycine max
  Clone ID: 700960460H1
atgagaatcacctaacatcggaccttaaaataagagaaagagaacaacgaagaagttgttgtgtcttaagaaagagagagatggcggcggagataccgtgctgtggaacaaagttttcactgtacgttttggtgatcataggtttggtctgcttcgcgggactaatggctggtctcactctcggactcatgtctttgggactcgtcgacctcgaagttctcatcaaatctggtcgtcctcaggatcgcatccacgc

SEQ ID NO: 17134 - DNA, 254 bp, Glycine max
  Clone ID: 700960461H1
agggattctcttttcaaccaccgtcatcagcgatcggattcggattcggactccgtctcgggaaaattcgagaagatttttcgaatttttcaccactgctttgtgcgcacgatcggtttcggattcgggctccgattttcgcctctcgcgaagagcttgggttcatttgcactaatggaggggaaggaggtttgcggggcggagtcggcggttgatggaagccgcgacgtttggagttcggagccctcgctcgc

SEQ ID NO: 17135 - DNA, 254 bp, Glycine max
  Clone ID: 700960462H1
cacggcgcagatccgaggagtttgggaaaccctaattcattcctctttgcttctatctctattaccctaacaccagtgatggcaggtttggctccagaaggatcgcagtttgatgctcggcagtatgactctaagatgaatgaattgctttccgctgatggacaagaatttttcacttcatatgatgaagtctatgatagttttgatgcaatgggccttcaagaaaatcttctcagaggcatatatgcttatgg

SEQ ID NO: 17136 - DNA, 97 bp, Glycine max
  Clone ID: 700960463H1
cgcgtacgcggactcgggattcagctcgacgtcatattcatggtaagctggcagatgggcataggatgtgtgatgattgtcttttgtccgtcactgc

SEQ ID NO: 17137 - DNA, 256 bp, Glycine max
  Clone ID: 700960464H1
gcgatatctcattttacaaacagaatagttgcattgattgcacaagtgtacacactcaatgattttttactgctcaagagagaagagggagaagagatatgtcctttgtccctaagagaaaatccaagcaaagtccacatcagaagaactctacaagacacaaccaacacacctaccacagttttccccacaaatccaacccggccttcacctgtaatcacacctccagatacaccagacatcatcacagttcctt

SEQ ID NO: 17138 - DNA, 266 bp, Glycine max
  Clone ID: 700960465H1
cggaaacttggaacaatggctgcatggtgatgtaggaccagttagccccttgacatgggatattcgaatgagaattgctattgggactgcaaaagggctagcctatctgcatgaaggtttagaacccaaagttgtgcaccgggatataaaatccagtaacattcttttggataaaaactggaatgccaaagtatcagattttggactagcgaactcttaggatctgagaaaacacacgtgactacgcgtgtaatgggaacatttgg

SEQ ID NO: 17139 - DNA, 268 bp, Glycine max
  Clone ID: 700960466H1
caataacagagcatagagtgagaagtgagaagagaaaaatggcaatctccatacccagtagacacggtttcatagatggagagtggaaagtccctcttctcaacaatcggtttccgatcatcaaccccgctactgaagacatgatagggcatattccagccgctactaaggaagatgttgaccttgcggtggatgctgctaaaagagccttttcccataacaaaggcaaagattggtcttcagctcctggctctgttcgtgctcgcta

SEQ ID NO: 17140 - DNA, 264 bp, Glycine max
  Clone ID: 700960467H1
gttttcatcatggacaactgtgaggagttgatgccagaatatcttagctttgttaagggtattgtggattctgaggatcttcctctcaacatttctagggaaatgctgcagcagaacaagatcctgaaagtcatcaggaagaacttggtcaagaagtgcattgagatgttctttgaaattgctgagaacaaggaagactataacaagttttatgaagccttctctaagaatctgaaacttggtattcatgaggattctcagaac

SEQ ID NO: 17141 - DNA, 259 bp, Glycine max
  Clone ID: 700960468H1
ttctcgtgtttttttctccatactctaataactaggcctcgagggtcaataatcactgaaacatttttgttcttgagctagtggtttggttggttcaagcgccttcctcttgccgtgccgttgaattcttagtgggtgttttcacgttttgactctttgcagcgattcttgcttcaagttccagaaatgggtgtggctcaaaacattcccgatgcggaggagggaaccttggagattggaatggaatacagaactgttt

SEQ ID NO: 17142 - DNA, 258 bp, Glycine max
  Clone ID: 700960469H1
gaaacataatggagaggtttttgctggttggaattcttggttctcatgtaacggttgcttcaaggccaacaattttgaatgctttgaagatgttagaaggggatattgaggtcccaccaattccagataggccactgagtcatgggaactatgtgttgtacagtggtgattgctctgggatgagctcaggatgtggatttgtgagctcatgaaaagttgaatgattcataaaatccatccttgatgagttggacaaga

SEQ ID NO: 17143 - DNA, 261 bp, Glycine max
  Clone ID: 700960470H1
cttaaaagagcctttgctttttctttaggcctttccgaattaagtacttgtttcattttctctcgaagcaagaaaaatgttcatcgagagtttcaaggttgagagtcctaacgtgaagtacacagagactgagattcagtccgtgtacaactatgaaaccactgaacttgttcacgagaacaagaatggcacttatcagtgggttgtcaagcccaaaactgtcaaatatgaatttaaaaccaacacccatgtccctaaact

SEQ ID NO: 17144 - DNA, 260 bp, Glycine max
  Clone ID: 700960471H1
cttcttcttactctcttacgttaattcttcgttgtctatgatggcgttggatatgattgatgttgttcccaggacgaggatggaagaagaaaatatagcaatacaagaagcagcttccgctgggttaaagagcatggagcatctcattcgtctcctttctccttcttcttctcttcacaacaaccttaagagtctcaatctcaaccacctcgactgctccgaaatcaccggcttcactgtctccaagttcaaacaagtca

SEQ ID NO: 17145 - DNA, 264 bp, Glycine max
  Clone ID: 700960437H1
actcactacccagaaactagggtttaccgtcacaccccaatcgtagccgtcgcactttgcgttttctgcgtcatctccgattccccgacaatggccacccaaatgagcaagaagagaaagttcgtagctgatggagtgttcttcgctgaactgaacgaggttctgacaagggagttagccgaggacggatactccggcgtggaagttagggttacgccgatgcgcaccgaaatcatcatcagagccaccagaacccaagccgtt

SEQ ID NO: 17146 - DNA, 264 bp, Glycine max
  Clone ID: 700960404H1
ggatgtcctaactcctaagacatggtgaggggatgtgaaggatgggctaaatgtgagtattagaactcatcggagaatgggaattgaactggtataaggtgcttcccggaaaattgtgtgctactaccactatgctacaaggccatcattggcacatatatcagttgttttacttgtattcatggtgtatagtagtcagcatgttataattattttctgaaaggtaattattactctgtggcagtcattgctttgtgatcccaa

SEQ ID NO: 17147 - DNA, 270 bp, Glycine max
  Clone ID: 700960406H1
taaaatttgcatgaagtattttccaaactttaatccaaatatagcctttgtcttttggcctctgcgttaatcttgaaaggtatatttgacggaatagggtgtggttgataatgtgatggacatggacagagttcgatttataaaatagctggagcaataccaagtttgatttatattatagcttagagaaattagatcatcacatgtctagattgatgatgtggttatatctgctatggtttctttatgccataagaaatatgatttgtg

SEQ ID NO: 17148 - DNA, 267 bp, Glycine max
  Clone ID: 700960407H1
ctcttcaaactagggttttacagaatataagctctctctatctttggttttcgtcattcaaatccaatccaatatcaaatatgagtcgtcatcccgaggttaagtgggctcagagacttgacaaggtctatatcacggtgcaattggctgattcaaaaaatgccaaggtggatcttacaccagatggtatttttaccttctctggtagtgctggtgctgaagaccatcagtatgagctaaaactggagctctttgacaaggttaatg

SEQ ID NO: 17149 - DNA, 268 bp, Glycine max
  Clone ID: 700960408H1
gatctttcattctcccctcttttctagctcccgtggagtctggaagcgttctcgagccttctcgctttccacgtgttttgcttttttccatttctctctctcccgtggagtttagaagtgtgcgttccggagccttttcgctttccatttctctctctcccgtgctttctagagttggtgctctgggaggagtaacgattcagcggttgaattgcgagaatggaaagcgttttagagagtgtcatgggggcacaaaaaaagttttatt

SEQ ID NO: 17150 - DNA, 269 bp, Glycine max
  Clone ID: 700960409H1
tgcttgcccaagttagatctcagatgctgcagcagcagcagcagcagccaccccaaacaattgaagctcagagcagtttacaatccaacacggtgcctccatcatccagcaacccggcatctgctgatgccgctgctgctgccgccacagctgcagcaacagctactgctgccgccgccaaggctaacagtgctccagtgggatcttagcaggacaagatgccggagatgggtagcaaacataactttgtacggccagattgaaatgtg

SEQ ID NO: 17151 - DNA, 265 bp, Glycine max
  Clone ID: 700960410H1
cagcaatcttgttgtggttcctgaaaagccttttgtttgtgcagatgagaattctccggctgagcttgtgttgaactttgctgagctggattctgttccctcagaaatgcacctaaataagatttttaggcgatttggacctctaaatgaatctgaaacagaagttgatagagggagcagccgggctagagtggtttttaagaagtgtactgatgcagaggttgctttcagtaatgctaaaaacttcaacatatttggatcagtt

SEQ ID NO: 17152 - DNA, 264 bp, Glycine max
  Clone ID: 700960411H1
ctctccctccctcctagggtttcacgtttccatgtgaaaacggattgagaatctctctctcattctctctctattttatattttctttcacgtcaattagggttgttttgctggcgtgattctgaaggcttggatctggatatcttctttgcttctttgctatggaagactcggattcagttgctacactgatagattctactacttctaagatacaacagctgcagaaggcatttgctgaacttgaaagttatcgggctgtta

SEQ ID NO: 17153 - DNA, 256 bp, Glycine max
  Clone ID: 700960412H1
atcacctaccactgataactccatcccttccttcctctttatcatcactgacattttcccttcatgtccctctaactcgaccacctttgtgtatgttcttcttcttcttcttcagatagctccaccccatcttagattcacactcacattttccacacatgggaatattgtgttacttatatagacacttgcttttgctgacacccccaagattcgggggtctcaaagatctggccttttgggtttgttcccttgt

SEQ ID NO: 17154 - DNA, 263 bp, Glycine max
  Clone ID: 700960415H1
taaaaaacgagaacgtcgatctggaacggattgcaatagaggaagtgtttgagcagctgaaatgttcaagagcaggtctaacatcagaggaaggggccaatcggctccaagtctttggagcaaacaaattggaagagaaaaaagagagcaagtttttgaagttcttgggctttatgtggaaccccttgtcttgggtcatggaagctgctgccataatggccattgctttggcaaacggaggaggaaggccaccggattggcag

SEQ ID NO: 17155 - DNA, 278 bp, Glycine max
  Clone ID: 700960417H1
ccgccaaagcaagcctgccctaaaaattgaacagggcagagagcaagggcaagcgagtgaacatgggaacctctgcgaacgctgtcgcaggtggtcgtggcggcgcccctgtccccaaagacgtcgactacgctaattacttctgcacctatgctttcctctaccatcagaaggagatgctctccgaccgcgttcgcatggacgcttacttcgacgccatttttcaaaacaaacgccacttcgctggcaagactgttttggatgtggggactggaagt

SEQ ID NO: 17156 - DNA, 272 bp, Glycine max
  Clone ID: 700960418H1
agaggagctccggaaggtgaatgttgatgcacctgttcttgagtataaggatgcagtacatgaatttgctacgctggacgtccttctgaaaagccctcaggcccaggtttgtgctgaggacattgccatatgggcgaagaaatatatctcacttcgaggtcatgaattctcatattgagtaggatatagcagatgatggttgacaggaagatatttacccaccccaactacaaaattagcttcagatcactcttttgctgctattgcatggg

SEQ ID NO: 17157 - DNA, 269 bp, Glycine max
  Clone ID: 700960419H1
atctggtgtcgtgtcccatttgaattgaattgcatcttgaaagatggcggaggaggagaagccaaatggagaagaacaagtgaaggacaacaacaacaacaacttatacgacgccgttcagcgtctgatcttggaaccttccaagatcaaggcctccctcatccctctcttccccgaagcttctagaacctactctcgccaactcctccactggtcccgtcaaggttctcccctccgacgcatcctcttcatctccattgggatagttg

SEQ ID NO: 17158 - DNA, 268 bp, Glycine max
  Clone ID: 700960420H1
gaagtgttggatgatggtgatgaaccaaaatataaacaacttgtgtactctgactatttcaagtatttcttcagcaaggctcatgatgggaagaaaactattgaatttgccatgatatgattggtgactgtatctatgaatatttggttttgactaagtctaatgacatcgtgggctctatgtagccgacctcacttaatagaataaggcttctgtaattgtatgatttgtgctcattgttggcagtatttaaggtgtttgaaatcca

SEQ ID NO: 17159 - DNA, 264 bp, Glycine max
  Clone ID: 700960422H1
gagaagaagaacaacaacgcaaagcggtgttcgttccgtacgcgctcgcgcacgcacgcacgcacgcacgaggccatgtcgggattcagagacactcacggttttgctcgtccaatcctcgctgtgaatctcgctctcgctcttctccacgccgccgttgcgagcctcgcgttctttcagttgctgagaattcacatgaggaatgcgcagttggttggactcggcaaaaggtgttccatgtattgattggctcttctaatttgg

SEQ ID NO: 17160 - DNA, 265 bp, Glycine max
  Clone ID: 700960424H1
aagtaaaacccaaacccaaacccctagaccttgggaatagtttgtgagttgtgttgaaaaagaatcggttcttgtctcgttttatttcagataagaaagtcttagattcagattcagttgttgacgctttgattcgttttcttctaattagatttgcgagtataggtgaagccctaggtcttatggataggtagtgagttttgttgttgaagaagaagaagaaaatgtctgtggaaaggtcgtttgaggcatgggaagaggtgca

SEQ ID NO: 17161 - DNA, 242 bp, Glycine max
  Clone ID: 700960425H1
gaaagttagtagtagtaattgtgtagttgggatttggcgaagtcggtttagggtggaaaaggataagaatgacggtgtgcgcggtgcgcctttccctcacacacactccctcctaattgcgatttaataaatccacctcactccttcatccattgaatgattctatcttccaatggatcctcctctcatcactgactccacattgtgccccgcttactctctcgccgagatttggcccggaa

SEQ ID NO: 17162 - DNA, 263 bp, Glycine max
  Clone ID: 700960426H1
tggacatttttgaagtaagagttggttatgttgaggactatggtgcttttgttcatttgcgcttccctgacgaatgaatgcaggtctttatcaccttactggactaatacacgtctcagaagtgtcatgggatctaattcaggatgtcagagatatcttaaaagtaggtgatgaagtgagggccaaagttgttggtattgattggggaaaatcaaggattaacctatcaattagacagctagaagaagatccactcttagaaa

SEQ ID NO: 17163 - DNA, 259 bp, Glycine max
  Clone ID: 700960429H1
tctagactcttctttttctctaagtctaaggggtgccctgagatcactttgagcaatggtgaaggctgtggcagttcttggcagcagcgagggtgtcactggaactattttcttcactcaggagggaaatggtccaaccaccgtaactggatctctggctggtcttaagcctggtctccatggcttccatgtccatgccttgggggacactaccaatggttgcctgtcaactggagcgcatttcaatcctaataacaac

SEQ ID NO: 17164 - DNA, 263 bp, Glycine max
  Clone ID: 700960431H1
caacacgaaagcatagccaaaaccttttttcgaagtctctgattttcgctaatggctccggcaaaggcagagaagaagccggcggagaagaagccagcggcggagaaggcaccggcggagaagaagccgaagcgtagaagaagatctcgaaggaaggagggagcgagaagaagaagaagcgcacgaagaagagcgtggagacctacaagatctacatcttcaaggtcctcaagcaggttcaccccgacattggtatttccagc

SEQ ID NO: 17165 - DNA, 264 bp, Glycine max
  Clone ID: 700960432H1
cattcagaacctggagacgattctcatgatcgcgagaggctcagagaaaaaagaggctcatcccgtcatggttcaaagtcccgagatggagacaaggacagaagctctgggggcattagggataggaagagggatagggacagagatcatgagaacaaggataggaagagagaccatggggacaaggatgtgaagagagatagggagagagacagagaccacggtcgtgaccaagaaagggacagaagggaccgtgggagtgag

SEQ ID NO: 17166 - DNA, 92 bp, Glycine max
  Clone ID: 700960433H1
gaagtttttatagctcggaacaatcagatggatgcaatccaaaccgataaaatctatgttgctgttggggatgatgtgcacgatggatataa

SEQ ID NO: 17167 - DNA, 272 bp, Glycine max
  Clone ID: 700960434H1
gataaaagcacacccatggcacaagatattccacaaaaagatgcctccggaagcaattgatcttgcatccaggcttttgcaatactccccaagtctccgatgcactgcgcttgaagcatgtgcacatcctttctttgatgaacttcgagaacccaatgctcgcctgccaaatggtcgtccatttcctcctttatttaacttcaagcaggaattatccgaagcttctccagagcttgtgaacaaagtgatacctgaccacatgaagcggcaaa

SEQ ID NO: 17168 - DNA, 267 bp, Glycine max
  Clone ID: 700960435H1
agcttccattatttacaagattacgtctgcgttggttcaacttatgagattactgttactaaagttgcctgcaagtttgagaatagaactactgatattctagttttttgtacggtatggtagttgacttatttttaaccttgttcctgtgagaaaacatatttagcctatgacttttggcagtttgaggattctgaagctgataccatgccacagattcaatcatttgggtctttttttgttgaagttaaattgtcttattgcgtg

SEQ ID NO: 17169 - DNA, 268 bp, Glycine max
  Clone ID: 700960436H1
ctcttaaaagagcctttgctttttctttaggcctttccgtcttaagtacttgtgtcattttctctcgaagcaagagaaatgttcatcgagagtttcaaggttgagagtcctaacgtgaagtacacagagactgagattcagtccgtgtacaactatgaaaccactgaacttgttcacgagaacaagaatggcacttatcagtgggttgtcaagcccaaaactgtcaaatatgaatttaagaccaacacccatgtccctaaactagggg

SEQ ID NO: 17170 - DNA, 271 bp, Glycine max
  Clone ID: 700960403H1
gtgcatacatagctatctagctagcaagtgggacaagagatatatatacgtggtaccctagagtgccattctgtagtttatttctgctcaccaaggcttatcacatcacaatttgtgcattgcctcgtgtcctttttcttctttgcttgccaaaaatcttacacacacaggtatctagcaaatgggttctcaccagcaagaaccatggctattggagaatgggaaaccgagggtgttgaccaaggagaataggcatggccgttctgcacac

SEQ ID NO: 17171 - DNA, 250 bp, Glycine max
  Clone ID: 700960363H1
gtttgaatggtgaatctgtttgttgattttttatgtgcggaaatttgtatcggtttgcaatatgattgtgtggctgattctgtattgggagtgctgtgtggtgtattggtggggtctgaatgtttcatgtggatgaatttagagcactgcgttgtattgctgtgctgtgccattttttagggatttctccaagtcaattggttaaagcttgaatagtcaatgaaataagactctgtactctggccttaaa

SEQ ID NO: 17172 - DNA, 252 bp, Glycine max
  Clone ID: 700960364H1
cctttctcttctcagttctcttgttagtattcttccaatctccgtcgatcaccactaacaccaccatgtcgtggctcctccgatccaccaagtcaaaactcctctcttcctcatcttcactttctagaaccttcccctctctctcacgctccggccccacacttgacctccctcagatcggagccatctctcccctccccgatctcttccaccgcaacaccgctaccatgcctttcgcgaaggaaaacgctt

SEQ ID NO: 17173 - DNA, 254 bp, Glycine max
  Clone ID: 700960366H1
gtcggacgaagagcaccatttcgagtccaaggcagacgccggtgcctccaaaacctaccctcagcaagccggtaccattcgcaagaacggctacatcgtcatcaaaggacgcccctgcaaggttgtggaagtttcgacttccaaaactggaaagcacggtcacgccaagtgccactttgttggaattgatattttcactgccaagaaacttgaggatattgtgccctcttctcacaactgtgatgttcctcatg

SEQ ID NO: 17174 - DNA, 249 bp, Glycine max
  Clone ID: 700960368H1
gaaactgtctacaaagtttcaaaacactatgttaggatgcaccaacacatgcctatcatttatgtgcaactttatacctaccagatatgtcgtgcgttaaattatttacatcaagtgattggtgtttgtcatcgtgacatcaaaccccagaacctattggtaaatccgcagacacatcagttaaagatatgtgattttgggagcgcaaaggtgttggttcctggtgaacccaacatatcgtacatttgc

SEQ ID NO: 17175 - DNA, 99 bp, Glycine max
  Clone ID: 700960369H1
atttgcaggaagctgtggtaagagaagagagagaagggttaggtttttctttctctctctttctctttgtgtttttgtcttctgtttttgacacaaaaa

SEQ ID NO: 17176 - DNA, 247 bp, Glycine max
  Clone ID: 700960370H1
gtactttgctctccgctggttgcgagttttatttggacgggaattttcactcagcaacctctttataatctgggatgaaatcttttcatcagataatagtaaattggaaaaacatgcagaggacaatgcagactctggttttaggatcttcaattcgtctcgcggagcatttatctcagctatggctgtagcaatgatgcttcatataagatcttcgttacttgcagctgaaaatcctacaacctgt

SEQ ID NO: 17177 - DNA, 251 bp, Glycine max
  Clone ID: 700960371H1
gttcttgaagcatatttcagagttttatcagagaacaaatgggttatattgggactcacggtgttgcagctctgcacagatataaatatagtggagtagatcattcctatgtggccaaatatgtactacaacccttttggagtcgctttgttaattttttccccctatggatgcctccaaacatgataactcttatgggatttatgttcttactactgtctgcattgcttggttatatatactccccacaa

SEQ ID NO: 17178 - DNA, 252 bp, Glycine max
  Clone ID: 700960372H1
aacgctcgctcgcactgtccagatcttaatcaagaggagtgagtcttgtttttccagccatgacgccgctgatcctgcatgctgggaaaaccaacaaaaattcttacaagacactcattgcagccgagtatgctggcgtccaagttgattttgcccctaattttgagatgggtgtctccaataaaactcctgaatttctcaagatcaatcctattggcaaggttcctgtgctggaaacccccgatggtccaa

SEQ ID NO: 17179 - DNA, 244 bp, Glycine max
  Clone ID: 700960373H1
ggaccgcggaggtcgcatatgagcctctaccgggatggccaaacacaagcaatcataaagagcctaaaaaatccaaggaaacgggatcaattcttgagaatgttcgttggaaagcacttggagttcttttcactgtctgggtccttatacttgcctccgagattgcaaaaagtcacacaacaacttgttcagtggaatattgggtacttaatctattacaggtccctgtggcattaggagcgac

SEQ ID NO: 17180 - DNA, 247 bp, Glycine max
  Clone ID: 700960375H1
gtgatactggatataaccaaggatgcaatggaggacttatggactatgcatttgagttcataatcaacaatggcggcattgattctgatgaggattacccataccgtggtgttgatggtagatgcgacacatataggaaaaatgctaaagtcgtttctattgatgactacgaagatgttcctgcctatgatgagttagccttgaaaaaggccgttgcaaatcagcccgtgagcgttgctattgaagg

SEQ ID NO: 17181 - DNA, 245 bp, Glycine max
  Clone ID: 700960376H1
gatttctactgtgtaaaaatctaatttgataaacggtgcattgttacaaactctaggcacactttacaagtttacatcaataacgattagttaaaggtgggctgtgattcacctcgaggccaataatgtagttagaatggggatctaatgggaatggccattaaataggaaataaaaattcattagtagacaagcactaaatcagcgttcacagtactacttcctgataattgctttctaaatgt

SEQ ID NO: 17182 - DNA, 83 bp, Glycine max
  Clone ID: 700960377H1
gttcgtccctcaccaataggtgctgattatgaacagaagcacggcaaagtgagctccagtcctgaaattggtgaattccatgg

SEQ ID NO: 17183 - DNA, 249 bp, Glycine max
  Clone ID: 700960379H1
aaaatatatattgatatatctcatatgtaatatgtatgtgttgtgtggatattaaaagcttaatatagaatatggtccctagttttgctggtttaatctaaaccttgttcttagaatttgtgatccccgcagaatattgtgtaatcagactagtcactaatctctttggttgacaataatagtcaaaataccagtgattgttgcacagaaaatttgcccatgtatttatacctcagcccaccatgaaat

SEQ ID NO: 17184 - DNA, 249 bp, Glycine max
  Clone ID: 700960380H1
aaaatgcccactttttttcttccaacgctcctcctcctcctcatagccttcgccacctctgtctccggccgccgtgacctcgtcggagactttctccggctgccctccgaaactgataacgacgacaacttcaagggcacccggtgggccgtcctcctcgccggttccaatggttactggaattacagacatcaggctgatgtttgtcacgcctatcaaatattgaggaaaggtggtctgaaagaagaa

SEQ ID NO: 17185 - DNA, 249 bp, Glycine max
  Clone ID: 700960383H1
accaaccacactcatagaactacagcaaagtgactcaccaattcacacacataataaacccactgctcttctctctacccctccgaaacccgacccgaaaatgcgatccaaatcggatcccccggtgccccctccctcctcctccggcggaagcgactcctcctccggcgcatccatcgatccgatcttccacctcctccgcgtcctccccttcagcttcctccgcccccctcgcctccgcctcaagct

SEQ ID NO: 17186 - DNA, 238 bp, Glycine max
  Clone ID: 700960385H1
cgaagacgcgcttcttccgccgccgtccgcgctgttcccgcacctgctgacgtggcagatcgtcttctgcgtcggcgagctcaccgagggccccgacgcgccggtagtgtgcctcgacgtcgtcgaggaggacgtcgccagatccagatctgtttactgtgatcagtgccgagttttcggttggagcggccatccggtgtgcgggaaacgttaccattttataatcaaagccgatggg

SEQ ID NO: 17187 - DNA, 248 bp, Glycine max
  Clone ID: 700960386H1
atcgctgtggttatcatcttcttcttcctctttcttagatctcttctttctctacgccgcacgccgaaaccatggccggaaaaggagagggtcctgctatcggaatcgatctcggaaccacctactcttgcgtcggtgtgtggcaacatgaccgcgttgaaatcatcgccaacgaccaagggaacagaaccacgccgtcttacgtcggattcactgacaccgagcgtctcatcggtgatgcggccaag

SEQ ID NO: 17188 - DNA, 249 bp, Glycine max
  Clone ID: 700960387H1
gggccatgctcggggccttgggctgcgtcttccccgaactgttgtcccgcaacggggtcaagtttggagaagctgtgtggttcaaggccgggtcccagatcttcagcgagggtgggctggactacttgggcaacccaagccttgtccacgcctagagcatcctcgccatctgggccacccaagttatcctaatgggtgctgttgagggttatcgtattgctggtgggcccctcggtgaggtcactgacc

SEQ ID NO: 17189 - DNA, 245 bp, Glycine max
  Clone ID: 700960389H1
tgatggaagtcggggacggagaccagtggcccatagattgagctttgttgagatggtggtcccatatggagatcctaatgatcctcactataggaaaaatgcttttgatgctggggaagatggcttgggtaaaaattctcattctctgaagaagggctgtgattgtttaggctatatcaaatactttgatgcgcatttcacaaacttctatggaggtgttgaaacaattgaaaactgtgtttgtt

SEQ ID NO: 17190 - DNA, 245 bp, Glycine max
  Clone ID: 700960392H1
gaaattgtggccatcaagaaagttctccaggacaaacgatacaagaatagagagttacaaattatgcaaatgctggatcatccaaatattgttgccctaaggcattgtttcttttcaacgactgacaaagaagaagtttacttgaatcttgtacttgaatatgttcctgaaactgtgaatcgcattgcgaggagctatagcaggattaaccagcgaatgcctttaatatatgtaaagctttatac

SEQ ID NO: 17191 - DNA, 247 bp, Glycine max
  Clone ID: 700960393H1
cccttctgagctttgattagtgtggcctagttgttgttttctcgatgagaaaggcttcttccactatgcattgcgcacttctgcgcttttgggttcccttgttgctgcttgctagcttcagctatgctccttctgtttcggccacaactgaaatttcagggattgagttgaccccagatgggaaggtgataaatgaagagttagcaaaaccaagtctaaaaggacatgatgaagaagcaaagttcaa

SEQ ID NO: 17192 - DNA, 247 bp, Glycine max
  Clone ID: 700960394H1
gcgagtgagtgtggcgttccggagaatatggaatggcagcggtgagtgagagtgaggtggtgcactctgtttggggatttgggaagttccatgacaagttcaatccattcctttcgcatgcatttctctcaaccttagagcactctgcttccgctgtcagggaaactggatgcatactacaccacatcgtttccaaatccaacaacaccaccattctcgccgttgtcccactctatgttaaaaccca

SEQ ID NO: 17193 - DNA, 247 bp, Glycine max
  Clone ID: 700960395H1
caaggatcccgaaggtctcttcccctgtattctcggccacgaagctgcagggattgtggagagtgttggagaaggtgttactaatgttcagcctggggatcatgtcattccctgttaccaggctgagtgtggggagtgcaagacttgcaaatcggggaagacaaacctctgtggcaaggttcgttccgccactggagttggggtcatgctcaatgatggaaagagccggttctccattaatgggaag

SEQ ID NO: 17194 - DNA, 247 bp, Glycine max
  Clone ID: 700960396H1
atcgagataactagaaacagtgtgatgaaaatgaaggtccttgttttcttcgttgctacaattttggtagcatggcaatgccatgcgtacgatatgttccctctccgaatgaacactggctatggtgcccgtactccggaggtgaaatgcgcaagttggaggcttgctgtggaagcacacaacatctttggctttgagaccattcctgaagagtgcgttgaagcaacaaaggaatacatccatggcg

SEQ ID NO: 17195 - DNA, 249 bp, Glycine max
  Clone ID: 700960361H1
gtggatgactgatgaggaatttgctagagaggtgattgccggtgtaaacccaaatgtgatccgtcgtcttcaagaattcccaccaaagagcacacttgatcccacactctatggtgatcaaaccagtaccataacaaaagaacaattggagattaacatgggaggggtcacagtagaagaggcacttagtactcagagattattcatattagattaccaagatgctattaagacatgggttcatgaata

SEQ ID NO: 17196 - DNA, 280 bp, Glycine max
  Clone ID: 700960401H1
gggaaagagaggaaaactgagaatgctggaggggagtattcaacacccactgcacacggcttcataactaaaccgccatcgctatcttcgactttctgcgccccaaagatgagaaaacgcaccgtttacgcatggcttgtagcacttctttgcttcctagttctcatgatcgtcaccccatccatcccccagtcccaagaataccatgatttcgccgaccaccgcaccttcctcggtattcctaatgcacttaacgtcatatccaatttcccttttctgg

SEQ ID NO: 17197 - DNA, 276 bp, Glycine max
  Clone ID: 700960402H1
agcgaacccaaaactagagctaccttcccttcaaaccttccactcttctctccttttccaatcaagggaataatatttcttagagatattccgaaaccatggctcacgccaatcctatgatttttgttgttggaattctaggtaaccttgtctccttctgttgctttctagcaccagtaccaacattctatcgagtttgtaagaagaaaaccacggaaggtttccaatcacttccttacgtggctgcactcttcacttcaatgctttggatatttt

SEQ ID NO: 17198 - DNA, 254 bp, Glycine max
  Clone ID: 700960331H1
cggaccgtttattaaagccttttggggtctagtgaggagaagttgcagtgcacagtgtgcttggaggatgttgaggttgggagtgaagcaaaggagatgccatgtaagcacaagttccatggtgattgcattgtctcatggctcaaacttcatggttcttgtccagtttgcaggtttcagatgccatctgaggattcaactcttgaagccaatgtgggagttggaaatggggacaatcagaacagtgagctggt

SEQ ID NO: 17199 - DNA, 255 bp, Glycine max
  Clone ID: 700960332H1
atttttactatggcagatgtttcttcttttgtcccgtgttaaaactgtgttgtcattgtgattaatggctgccataacattaaacatgaatgttttagctatttatgattactcccagatctggaagaagtgttaatatataaaaaaaatgtgaaagtcaaccaatgaatacttgttggtgacatgtttctgatgtttgctgctacatttttatatgaatggatcattactataagtctataataaattacatta

SEQ ID NO: 17200 - DNA, 262 bp, Glycine max
  Clone ID: 700960333H1
tgagctgcgggaggaggctcgtgatcatgcacgtttgcgcaatgcatattttgagcaggcacggcaagcctaccttgttggcaacaaggcccttgcaaaggagctaagtgttaaggggcaactgcacaacgtgcatatgaaagcagcacatggaaaagctcaagaatctatttatcgccagaggaatcctgttgctccagagaatggaagagcgccccaaagaatgatagacctacatggtctgcacgtaagtcgaagcgat

SEQ ID NO: 17201 - DNA, 259 bp, Glycine max
  Clone ID: 700960334H1
gtgattgataatgaggagcagaacaaatcaaattctgtttctgttccagcgccggcaacagttgccacccacaccagaacgattataattatacatccgcctccggacattaggaccattgttgataaaacctcccagttcgtcgccaagaatggtccagaatttgaaaagaggatcattgcaaataacacaggaaatgtcaagttcaatttcttgaactcatcagatccctatcacgcttattatcaacaccggttgt

SEQ ID NO: 17202 - DNA, 257 bp, Glycine max
  Clone ID: 700960335H1
ctcttgttccttctccttgtgatcttcttcaaccttcagagtgagaaaacacattcagaaaccacgtttctctcttcttcttcttcttcttctttttcttctctcgaggtcattattaagtattcaccatggaggcaccatctcccaccaaacccaacgaccaaacaaaaccttccaacacttccaccacccttagtctggaggccggcccggcccaagcgagcccactccgaaaaatgtttgccgtggcgtccatc

SEQ ID NO: 17203 - DNA, 255 bp, Glycine max
  Clone ID: 700960336H1
agaaagagagaattcgtaaaccctaatttcggaaagatcggcgatgactgcctccaaggatcgcgagaacttcgtctacatcgccaaactcgccgagcaggccgagcgttacgaagagatggtggaatcaatgaagaacgttgcgaatctcgacgttgaactgacggtggaggagcggaatttgctttctgttgggtacaagaatgtgattggtgctcgcagacgctcctggaggatcctgtcttccattgagca

SEQ ID NO: 17204 - DNA, 252 bp, Glycine max
  Clone ID: 700960337H1
gtcacgcctagtcctccgaggcgcgagaatgaagatctggaagattatagcaaacctgacgaaatttctgatcgaaacgacggcgccgggaagatcgatacggaggttaaagcaaaaacaaaagcaaaaccggaatcagaatctgattctgaatctgagaaatctgccagtagtgaatcagacgattcgcgttcgaggaagaagagaaggaagggttctgctggttcttcgaggaaatcatatagcgagagt

SEQ ID NO: 17205 - DNA, 249 bp, Glycine max
  Clone ID: 700960338H1
ctcgagcccattcatccaatttatcgatccacgtccatccccgtctttcttctcctattctctctctctctcttgttcttctttttttcccccaaaaaagtgagagaagaacaaagggaattgaaggaagagattgaaaaaaaaggggggatacccagataattaattcggtgaaatttcggattttgattagtgggtgtttctcttttcgtgtttttattacctcagtgcgtgaaggaaggggaaggg

SEQ ID NO: 17206 - DNA, 256 bp, Glycine max
  Clone ID: 700960339H1
aacagttgaagtgaatggcataaaaatgcatgttgcagagaaaggagagggtccagtggtgttgttcctccacggcttccctgagctctggtactcatggcgccatcagattctctctctcagctccctcggctaccgcgccgtcgctcccgatctccgtggctacggtgacaccgaagcaccaccttcaatcagcagctacaactgcttccacatagtgggtgatctcgttgcgcttattgactctctgggtgtc

SEQ ID NO: 17207 - DNA, 256 bp, Glycine max
  Clone ID: 700960340H1
ctacaaccagactcatgaaatctcctcctcaatagttaactaacacatccttaaaatattcctcttcaatctgctcaatcttccactcttgtgttgtcttgtgtgtgtttctccgcctagtcctagatctgtctccccaatggctggtttcttctctcttctaaggcgcctctatctctccctttacaattggaccgttttgtttggatggtgtcaagttctgtattttgttctcaagacattgaacgaatcgggt

SEQ ID NO: 17208 - DNA, 252 bp, Glycine max
  Clone ID: 700960342H1
ctcatgcctatgcaacagttccccgtagaaaacaaagtccataaagtgaaacataacatgctgctattttaaaaaccttaccttcaaacctaaatctcacagttccgagttctctaattcttgactccgttgggttcttaatccacttatatccccaactagaatcagaattactttcttttttcctttatcttgttcaattcattggcattcttctaaaatgattattatagcacgccttatgtttcttct

SEQ ID NO: 17209 - DNA, 250 bp, Glycine max
  Clone ID: 700960343H1
agggtctagaacaacacaacactacggattgaatattgaattaaacgacgctcatggctacggtgccggagaagaaagcgaaggaagcattcttcgacgacgaattcgctctggccgttgatctctactctgaagccatacgattggatcccaacgacgcaaatctcttcgcggacagagcccaagcccatatcaaactcaacgctttcactgaagccgtttccgatgccaacaaagccatccaattaaa

SEQ ID NO: 17210 - DNA, 251 bp, Glycine max
  Clone ID: 700960344H1
gggaaagcaaggaggatggacacaggagacaagaaaaggaaagagataggagctgggatacagtgtttgagagggataggagaagggaaaaggaaagagatagaagtagggacagaacaataggtggcaagagagatagagacccggagaatgaaagggatgataagaatcgggaaaggcgagatgatagatatgggcacaaagatagagacactgcaaatggtaaggataggcatctgcgtcatgaggat

SEQ ID NO: 17211 - DNA, 248 bp, Glycine max
  Clone ID: 700960346H1
tgcaacaatttctaatttcgggcttcactgtttagtgtaactctcaagccatgtctccgggtcccgttcttgacgccggcgccgaccaacaaatccccttcgtcgacgacgcatccctcaagaagaaacctcaccccctggaagatgacgctcctattgtcgaagacgtcaaggacgatgacaaagacgaaaccgaagacgaggacgaggacgacgatgacaaggaagatgacgcccaaggtgctgct

SEQ ID NO: 17212 - DNA, 253 bp, Glycine max
  Clone ID: 700960347H1
ctttctctttctctgccaacctgcacactcttcactcgatcaaacagaacatggcaaagaatgtggggatccttgccattgacatctacttccctcccgcttgcgttcagcaggaagcattggagactcatgatggtgccagtaaagggaagtataccattggtcttggacaagattgcatgtcattctgtaccgaagtagaagatgtcatctcaatgagtttgacagtggttacttctcttcttgagaaata

SEQ ID NO: 17213 - DNA, 254 bp, Glycine max
  Clone ID: 700960348H1
gaacaacaaaaggaaaccttccgggtcgggaaataaaaacccgaacttgaaaagaggcaaaactccgatccacgttgaggttggagcttggagtgagtcaaacacgaaggaagaagaatggcgtctctgaggagtggagcttcttcgttgttgaatcgcctttcgaaatcgcttcttcttcattccaacaaaaaccctaatcctcaatctcagttattactcccttctctctctagactccccggtgcgatttc

SEQ ID NO: 17214 - DNA, 251 bp, Glycine max
  Clone ID: 700960349H1
ctctctctctctctctctgaagatggcttcacgcaggctcgtatcttctctgattcgatcctcccttcgtagatctcaatcgaagccctcaatttccgcatcgaaatcgatatacacgtcatccaaccgtgcctcaccgcacggatacttgctgaaccgcgtcgccgagtacgccaccgccgcggctgctgctaccactcccctggatcctcctcctccggggaagaaggagctcggcggcggcgggaaga

SEQ ID NO: 17215 - DNA, 255 bp, Glycine max
  Clone ID: 700960350H1
ggcctaatagttttgaattagatgacaaagaaaagcagagggaaaagcgaaaaggtcttgatcttgctaccacgcttgaacgtattgagaaaaacttcgtcattactgatccaaggcttccagacaatcctataatttttgcatcggatagcttcttagagcttacagaatatagtcgtgaagaaatcttgggaaggaattgcaggtttctgcaaggacctgaaactgatccagcaactgtgaacaaaattagag

SEQ ID NO: 17216 - DNA, 252 bp, Glycine max
  Clone ID: 700960352H1
ctagtgcaagtaagatgggcaaggaacataaagctgataatgtattggcagatcaaatgcatgaaatgtggagggaaatctgagcgtcaagaaaggatgatggatctgacagtttacaagtgctgagactctggatggagaaaacaagtaccgatgtgtcaggtgtaaatcttatgagaaggccaagaagaaaatgacagttttggaggcacctaatgttcttactattgcattaaagagatttcagtccgg

SEQ ID NO: 17217 - DNA, 246 bp, Glycine max
  Clone ID: 700960353H1
gttggtgcgttgatcagtgatttaataatgtggaaagatgtttcaaaatcgaccctttggtttggtttggggtgtctttgtttcttgtcttcttgcttcactaaaggggtcaactttagcattttctcggccatatcgcgattggcaattctcttgttgggtgtttcattcttctcaaactcagtttgtcaaagaaaccaggttgagaaaaggagttttccaagctgaaagaagatgacattttac

SEQ ID NO: 17218 - DNA, 252 bp, Glycine max
  Clone ID: 700960354H1
aaatagccctcttggccttcaatttcgtccaattccaaatcatggctagctcttcagttttcacgtcttacattgttttgagtctagtgatggcactagcaattagcggtttcaatttcaaaggggcagaggcagcacgtgccttctttgtgtttggtgattctctcgttgacaatggcaacaacaactacttatccaccacagctagagagtgcgctccaccttatggcattgattatccaactcgcagac

SEQ ID NO: 17219 - DNA, 251 bp, Glycine max
  Clone ID: 700960357H1
ctttcttctctccaccatcgttgtgtagtgcgtgtctctccgtaacttgccttcgactgtgacaacacaccgatcgccatgaacatcttcaccaagaaacccacggccaaagaggctctccgtgatagtaaacgacaaatgacaaacgccactagaggaatagaaaaggaaattggagctctacaattggaagaaaaaaagcttgttgctgagataaagagaactgctaagacgggaaatgaggcagcaac

SEQ ID NO: 17220 - DNA, 76 bp, Glycine max
  Clone ID: 700960358H1
ctttgtggcccgggtttgtgaggttgagttagacttgaatatcaaattctaaggtgaacatagagcatattgtatt

SEQ ID NO: 17221 - DNA, 249 bp, Glycine max
  Clone ID: 700960359H1
ctcacactggtcttcgcttctcattcatcatttctcacctaaccttctcctcctctcagtctcagatcagaaacctcagccagccatggcagcgttccagaagatcaaggtcgtcaaccccatcgtcgagatggacggagatgaaatgactagggttatctggaagtcaatcaaggacaagctcattttgcccttcttggagttggacatcaagtattatgacttaggccttccttaccgtgatgagac

SEQ ID NO: 17222 - DNA, 256 bp, Glycine max
  Clone ID: 700960330H1
gaacaaagcacttagtgctattcaataattacgaaaaaccaacagcgagtgttgtttttgtttggtccaggctggaccagggaatgaatagagatgagaggctttcggttgaagagaactgagttaagcggcgaagcaaacgcagaatcggcggcagaaattgccaccggaagcacgtcgaagacgggtgaaccaaacacaaaattccatccaccacttctcgcttcaatccccaactcaaatctgtgaagaaaat

SEQ ID NO: 17223 - DNA, 245 bp, Glycine max
  Clone ID: 700960360H1
cttttccctcgttgaaatgaaaatgggttcttctttgtggactttgtgtctaattttggcttcactagcctcttctgcattctgtgcctttccacggaggccagtggatgttccattcggcagaaactacgttcccacttgggcttttgatcacatcaaatacttcaatggaggttctgagattcaacttcatcttgacaagtacactggtactggcttccagtccaaagggtcatacttgtttg

SEQ ID NO: 17224 - DNA, 262 bp, Glycine max
  Clone ID: 700960287H1
gaaaaagaaaaaactgtccgatacttttttccttaaacttatatgataatgctttgacatcatgttcttaatgttaatttgtaaagggtactcttaagtatacttatgcctcaacattgtgggatgtccatataatcctaaacatatgatatctgattggaacttttttttcttgatttatctgttctgaacttctagatgctaaaaagcgtaagagatgttcacgacctctggtattacataagaaaaagaggagattgtt

SEQ ID NO: 17225 - DNA, 264 bp, Glycine max
  Clone ID: 700960289H1
gttattgttgaatcagcctcattccacaaagaggctaacatcaatcctcccaaaaaaagtcctgttcctcccacttttgtgaaaactttcaccattgcatcccttcaacagtatacaaatagcttttctcaagacaatcttataggtttaggcatgctagggagtgtgtatagggcagagcttccagatggaaagatacttgctgtgaagaaactagacaagagagtttctgatcaccaaacagatgatgagtttcttgaattg

SEQ ID NO: 17226 - DNA, 264 bp, Glycine max
  Clone ID: 700960292H1
gagtactattgttttacgattgggaagacgtgcgcgtattccattccaacgagcattagcaacgcagagtaacaataataacactctggtgtttatccctctccctcgctgcctcagcgcaacgcggtcgtttcactttcagcgcaattcaccgtttggattctccagcgggcatgggcaacgcaggagcatgttcatccaaacgcagcccacgccaaatccctcgtctctcatgttttatcccggcaagcccgtcatggaagt

SEQ ID NO: 17227 - DNA, 264 bp, Glycine max
  Clone ID: 700960295H1
atcaagaatacaataacatagcatagagtgagaagtgagaagagaaaaatggcaatctccatacccagtagacaacttttcatagatggagagtggaaagtccctcttctcaacaatcggtttccgatcatcaaccccgctactgaagacatcatagggcatattccagccgctactaaggaagatgttgaccttgcggtggatgctgctaaaagagccttttcccataacaaaggcaaagattggtcttcagctcctggctct

SEQ ID NO: 17228 - DNA, 264 bp, Glycine max
  Clone ID: 700960302H1
ctctatctgtcatcgaccatatcactttggtcaccttcagatacattcgtcgcattcatccatttaacttccacaaattcctacaaattctaaccaaacccttcactactccaaatcccacaacttctctcttttttttccctccttcttttccctttttctgttgtccgatcttctgcctcctagatcttggtatttgggattgatcacctggagttggaaatggttaaaagttatggagtgttctgatttgcgaaagatatc

SEQ ID NO: 17229 - DNA, 260 bp, Glycine max
  Clone ID: 700960303H1
aatttttcgcatttcaattcttctttcgtttatattttctgttttagtggaatcgcatagtattctgcttctgttgtttgctctactgttccatgcgttatacataagaaaaatacaggggaagaagaaaaatggtgattataaaccttgtgaagaagaagaagaagagcgagagagaaggaatgcgacttgggaaatacgacttgggtagagaacttggtgagggcaattttggcaaagtcaagttcgctaggaacact

SEQ ID NO: 17230 - DNA, 259 bp, Glycine max
  Clone ID: 700960304H1
ctgaccccaatttctgtggcggctctctctctacttattttctcttctgagattgagatttggatccaccctcttccccttctttcggtctttgatttgatcttttccttacctttctttgggtttgggtctgggtcttcagcttcaacttcaacaacaacaaaaaacatgctatggttacccaacaacagccacagccacagcttcaggttcagcctcagcagtcgacaccaccctcttcacaagatgaggccttgaa

SEQ ID NO: 17231 - DNA, 255 bp, Glycine max
  Clone ID: 700960305H1
ggctgcgcggaggggctttcgccgccgctgagtccgtgcaggtcgccggtgctgcgggcggatctgtcggcggcgtgacaggcattcacggcggaggtggcggaggaggagtacgttgccggagggaaggaggagaaggggaaggggaaggagggagtgccggtgtttgtgatgatgcctttggacagcgtgacggcggggaacgcggtgaaccggaaaaaggcgatgaacgcggcgatggctgcgctgaagagc

SEQ ID NO: 17232 - DNA, 247 bp, Glycine max
  Clone ID: 700960306H1
agataatcgaaaacagaaaatcttgagaactattcgaaactcagaagaattacgggaaggggccattgaacagctggaaaaagcccaagcccgcttaaggaaagtcgaaacggaagcagatcgttttcgggtgaatggctattctgagatcgaacgagaaaaattgaatttaattaattcaatttatacgactttggaacaattagaaaattacaaaaacgaagccagttcattttgaacaacaaag

SEQ ID NO: 17233 - DNA, 131 bp, Glycine max
  Clone ID: 700960307H1
atcatttttcattcacttcagaatacagcacattgctgtctccttcggcaaatttggggttacaatcccctccaccgattcatccccttaatggtgtgttagaattagatgcggctttatgtagaacagat

SEQ ID NO: 17234 - DNA, 132 bp, Glycine max
  Clone ID: 700960308H1
atcagatcagaaagtaattaaggagaagaagaaagcaaaacgctcgagaaaaaaacagcttgttcaggaagaggagagggttagaggtagagtcagcatgaaggtgtacttgtcatacatggctgcagcata

SEQ ID NO: 17235 - DNA, 258 bp, Glycine max
  Clone ID: 700960309H1
attctctgtctctctctctctctctcgatcaatcatggctttgcccaatcagcaaaccgtcgattaccctagtttcaaactcgtcatcgtcggtgacggtggtacaggaaagacaacgttcgtgaaaaggcatcttaccggtgaatttgagaagaaatacgaaccgaccattggagtggaggttcacccattggatttcttcacaaactgtggaaagattcgcttctactgttgggatactgccggacaagagaagtt

SEQ ID NO: 17236 - DNA, 261 bp, Glycine max
  Clone ID: 700960310H1
gtgcagagtgcgaagattcggaagctacaattggaaactgaaggtgcaataagagaagcagaagagacgaggagaaaagttcaagagctgaagcaagaagttgaaaaatcaagggctgtggctgaagaagcagaggaaaaacttgagctcgttctggtggaggctaaagaggcaaaagcagcagaacaaagagccgttaaagagatgaagattttgtctgaagtgggtagagtcccgtactcaaaattcaatggcaagatc

SEQ ID NO: 17237 - DNA, 250 bp, Glycine max
  Clone ID: 700960312H1
aggctcataaatcttttttatgggtttcagggtcactactactctgtctctgctctccctgttttggctcttgtccctgcaccaagcaagagctgcaaagttccacaatgtgagtggcttgagagggaaaaagccagttgtagcaaatgggtgcaatttgttcctgggaagttgggtggttgacacgtcttatcctctctatgactcttcaacatgccccttcattgatcccgagtttgattgccaaaag

SEQ ID NO: 17238 - DNA, 261 bp, Glycine max
  Clone ID: 700960316H1
ttcggctcgaggaacagatgggatccgacaatccgagtttggctggtgacagcagtatagtagatctattctggaagaattttctcagtacttgttcaatgactctcaacatgcaactacctctgatgaacagcgtgtgatgtcaagggtgaactcactttactgccttctgcagaaggatccttcttcagcagaagacataaacacaatgacaaaaaatggcaatagtctgagagatgcaaatgctttgtcaagggtgaa

SEQ ID NO: 17239 - DNA, 263 bp, Glycine max
  Clone ID: 700960317H1
tcaaggtttggagatgggtggtgagtttgatgttagtggggttactgcccgtgtcaacaatgggtcgattcgtggtggagaagaacagcctgagagtgacatcgccggagaaaataagagggacacacgacagtgccattggcaacttcggaacacctcaatacggtggtagcatggccgggaacgtaatttaccctaaggataacaaaaagggttgcaaagagtcgatgagttcgggatttccttcaaataacccccggtgc

SEQ ID NO: 17240 - DNA, 259 bp, Glycine max
  Clone ID: 700960318H1
attgatgttgactctctcaagggcttgccttatctcagaacgttgagtttcatgaacaatgatttcgagggtgcatggccagagattcaacatttgattggtctcaagtctatttatctttccaacaacaagttttctatgggagattccttccagaacttttgaagggttgcagtggctgaagaaggttcatttgtccaacaaccatttcaccggtgctgttccaacttccctcgtgttgctgccgaggctcatagag

SEQ ID NO: 17241 - DNA, 254 bp, Glycine max
  Clone ID: 700960320H1
gaagatcagaatcagattaattatttcatgcagaaggggagtgacagaagaacaaatacccttcattgtttagagaaattgagttcaatagacgggtagccgcattccatcaggaaggaagcagaccttcctgagaagtcaagttaccaactgacgatcactagtggacataaaatgatatgatactagaaatttatgcaatagcagaatataaccaaatttcaaataacaaaacaaaaaaagggcggccgccg

SEQ ID NO: 17242 - DNA, 257 bp, Glycine max
  Clone ID: 700960322H1
agcaaaacaaattaaccaacaacaacaaaagcaacagatcgaaaacatcaaaagatggcaaacaaaaacgttgcgttgttgttgttggtgtgccttgtagtcgctgccggggttgaggcgaggaggccctacgccgttgtccgagatgaatgcttcggttattgctgacatggttgcatattcccctcatcatactgcaattggtggtgtgataaagtgtgcaaatacccaatagacttcggtgacgatggcctgaa

SEQ ID NO: 17243 - DNA, 257 bp, Glycine max
  Clone ID: 700960323H1
acgaaatgcagcgattaaggagttccttaaaaaaaagtatctcaattcacgggctgccattgaagatacttatttttccaccaaggatacttttgagagacatcgcgtggttttcaccgttggaacttccattgcttccgttgccactgcttggttcggttattccttgcgccatttacatgacaccaaagttgatcaaaggcttcaatctatcgaaaattctatgaaaaacaattccaatctccaacattcccaaa

SEQ ID NO: 17244 - DNA, 257 bp, Glycine max
  Clone ID: 700960324H1
ggcatctttagtacgtggttggaatgtgcaggaacacatagtttttttcatcataaatatgctttcacctccagttcctcctaaatattccgggacagaaagttatttgattagccatgctccttttttgaatgtctttctggtgggaatttcatctgtagacagtgttcagatattctccctacatggcgtggttccactacttgcagctggtttaatgccaatatgcgaagcttttggatcatctgttcctaatg

SEQ ID NO: 17245 - DNA, 216 bp, Glycine max
  Clone ID: 700960325H1
aaaatggcggggatgcagaagctgccatacggcgacgttgattccagtttgagggccttggccggtcgcgccgagggtttcggccgcctcgccattggtggcctccacggtcctctctatttcgtcaccactctttcagatgatggccctgggtcccttcgcgaaggttgtcgtagaaaggaaccgttgtggattgtgtttgaggtttcgggtacg

SEQ ID NO: 17246 - DNA, 255 bp, Glycine max
  Clone ID: 700960326H1
cgcggggaagagttagtttcttctctcttcgatggaaggcggggaagaggttctcccttcggccactgccacctccgccgccaccggcaatcccaccgcttcgcctcctccgctcgctgatcttgtcggtgctcccgatctcgctgctgcctcggacgacgtcgttacccaacctgaaattcacgcgctgatttcagacgaagagcacgatcacgagcatgaacatgacgatgacctcgagcacgagcacgatca

SEQ ID NO: 17247 - DNA, 253 bp, Glycine max
  Clone ID: 700960328H1
gaagaacacgattgtgaaccgtcccttggctgggacagctaaaagggcgaaaacacctgaagaagatgcaaggttagaagcaatactgctgagagatgaaaagcagtgtgcagagcatgtcatgttggttgatttgggacgcaatgatgttggaaaggtttgctatagatacattttaatggatattcctatttatttatcttgttcaaggtgtcttgaagcaatagcttgctcaattatattgtttatttaa

SEQ ID NO: 17248 - DNA, 261 bp, Glycine max
  Clone ID: 700960286H1
cagctttgcttacagttcctataatttttttttctccattagattaccaagctctgcaactttgcttctctccatggagtatcgtctcctacccatttttactttactcaatattgcactggtggcaacccatgctgctttaccccctgaagtttactggaagtcggtgcttcctactacgccaatgccaaaagccatcactgatatcctttactctgattgggtggaagagaaaagcagctcagtgcatgttggaggtgg

SEQ ID NO: 17249 - DNA, 256 bp, Glycine max
  Clone ID: 700960329H1
aacaacaacgtccaggccgtccataaccaacaggctgatttcaagaactggctcagcgctgtcatctcttaccaacaggcctgcacggagggttttgacgatgccaaagacggtgagaagaagatcaaggagcagttgcagacccagaccttggacaatgttcagaaactcactggcatcacccttgacattgtgagttctttgtcccacatcctcgagcagttcggcttaaagtttaatcttaaacccgcatctc

SEQ ID NO: 17250 - DNA, 269 bp, Glycine max
  Clone ID: 700960258H1
acctggtgacccaaaattcaatgcctaacatgtgtgtgatcacgtattaggcattgaattaaaccattccaagtggtgggacttagcagctctatttgtgattctcatatgttacagacttctcttctttactagttctcaagttcaaggagagagcatccccattatttcagacactctatgccaagagaaccatccaacagcttgaaaaaagaccctctttcaggaagatgccatctttcccttcacagaggcatcaatccctccat

SEQ ID NO: 17251 - DNA, 270 bp, Glycine max
  Clone ID: 700960259H1
gggttgttgagaaggggttttagaagtccacatttttcagatttgattcgcgttcctcttctctcttctcatcatcaatggcgacccccattcctccccctcctgccgccgccgccgccgccgccgccgacaccaaggtcgattacttgaaccttccatgtccgattcccttcgaagagctccatcgcgaagctatgatgtctttgaagccagatctttttgagggcatgcgttttgatttcaccaagatgctcaatcagaagttctccc

SEQ ID NO: 17252 - DNA, 249 bp, Glycine max
  Clone ID: 700960260H1
agaaaatataatatttatttattttaatatatattaatcatttaacagagggagaaaaagattaaccaattgccaaagttgaaggcagatctggcttaacaaaacatagcatactgatgctaattacggtaattatttagcattttacattcacttgctcaaaatcaaacacgctagtaatatatatttgagtcagcaacagagcaattaatttccgacgcataatggtagtagtagattcaaacgtgg

SEQ ID NO: 17253 - DNA, 266 bp, Glycine max
  Clone ID: 700960261H1
gtttgctggaggaggctttggaccttaaaacccaaatggtccacaaagggattaagcttgacgtctttacctacaccacccttttgtccggattcgagaaggccggtaaagatgactttgccatccaagtttttctggaaatgagagctgtgggatgcaagcccaatatttgcaccttcaatgcccttattaagatgcatggcaaccgaggaaagtttgccgagatgatgaaagtttttgatgatatcaagctctgcaattgctcc

SEQ ID NO: 17254 - DNA, 264 bp, Glycine max
  Clone ID: 700960262H1
tgaagattccgcaacagagagtagaaaagatggcgcggttgatcacagtggtgtggtgcgcggtggcggtgctactgtgcgccgcggcgggcgcgtcgtgggtggaggaggcggcgaacccgatacgaatggtggcgggggtggaggcggaggtggttcgggtgatagggcagtgccggcgcgcgctgaagtctgctaggttcatgagcaggttcgggaagagttaccgaagcgaggaagagatgagggagaggtacgagatat

SEQ ID NO: 17255 - DNA, 268 bp, Glycine max
  Clone ID: 700960263H1
attttaaactttcaaactaatcagtacctcaccttgaactggttgcaggtgggaccaatatgatgtgcaagtttcatcggtcgatatagacaatgcccgtgcagggatctgttggggtttttgttcaaccagttcaagctgaggttctgattttaaactttcaaactaatcagtacacctttccaaagttcctgaaagagatgagtaaactaaaagttctgacagtcatacatcatggtttccatccttctaaaatgaacaattttga

SEQ ID NO: 17256 - DNA, 265 bp, Glycine max
  Clone ID: 700960264H1
cataaatgtctttatttgattagtcagatttttatttttttttttgaatggcctcttgggtttgcttctggatcctgattttggggtacacacaatgtcatacattgctttctcccttttttcttgttctggaacacgatcacatgtttttgattgaaaagtggaagcagtgttagaaaatctcatgagaaataacacggctctgaaggcagccttgggagttttctcctttttgaagcttcttgcggcggagggagacaaagag

SEQ ID NO: 17257 - DNA, 272 bp, Glycine max
  Clone ID: 700960265H1
ctaaaactcgtcagtgcaatagtataatggacaacttcgaagatgctacagagccagtgagtcctagtggacgattcttcaacaccacggtgctatgtgcgtatgtttttggcttcttagaatcagaagttccaattgaattctctcaagccaagtatttgttcgaagatgtctttctacccgtcaatccacacttttcttccataatggtgagagatgaagaaggagaaatgaaatggaaaagggtagaggtgaagttcgaagatcacgta

SEQ ID NO: 17258 - DNA, 267 bp, Glycine max
  Clone ID: 700960266H1
gggtgcaagggaagagatcatataattgctttgcttatttgcgatgcttagatggaagaacatctcactccattggctgttacacatctccttcaacacactctcagaagtttgtgcatccatgacaattctcaatgggtctacgcagtcttctggaggatcttgcctagaaactaccctccacgcaagtgggaaggacaaggggcttatgctagatcaagaggaaacagaaggacttggatattggtgtgggaagatgggttctgc

SEQ ID NO: 17259 - DNA, 270 bp, Glycine max
  Clone ID: 700960267H1
agcttattaaattgatattaatattatttcattgaaagaagatgctaggtggtgttcatcaatattctgaaaggtaaaacgattttggtttttaatgataatataaccatgaatctaacatcagatattgaacgctacacatcaaaaataaatcgagccaacgcatttaattgtaagtgtcttcatattacctgtgttctgtcacatctttttgcataatattggcactaagtcttttttgatagaaattgtgaagatgtactgttatca

SEQ ID NO: 17260 - DNA, 269 bp, Glycine max
  Clone ID: 700960268H1
ctttggtttcggagggaaaactctaaaacctcaaaattttcagtctcaatcaacttaacatctgtgattccaatcgatcacattcaataccacccttcaggattaggtattaattctgttcccttaaataaataacatgagcaccacagtgcaaagaactccaagatccagtaggcagtctttatttttccaggatttggcttcacctgtttctgcccgtagaggaaaattttcgagtcccagtcaggcagctgcagtatcttcactat

SEQ ID NO: 17261 - DNA, 266 bp, Glycine max
  Clone ID: 700960270H1
cttaaagctcatctctctgaggatgcctttgttacttgtgcattactagacatgtatgctaaatgtggatgcatggaacaatctcagaacatttttgacagggtaaacgagaaggatgaagcagtatggaatgttataattgcaggatatgggattcatgggcatgggctgaaggctattgagctgtttgaattgatgcaaaataaaggcggcagaccagattcttttacatttctgggagtgctaattgcctgtaaccatgctgg

SEQ ID NO: 17262 - DNA, 93 bp, Glycine max
  Clone ID: 700960271H1
gttctcccacaccacacccatgacgctcctcctgctccttattctcctctgtcacgcggcggaagccaggggacagtggcagctcctccacac

SEQ ID NO: 17263 - DNA, 267 bp, Glycine max
  Clone ID: 700960273H1
attctcataagagacaatggggagcaagttgggatgagcaattttccatactattttggagaggaatcaaagaacggaggcatgactattttagctggttgagaatcacccaagttttatccactgctgtcatcttaggattactttggtggcaatcagatactaagaacccaaaagatctgcaagatcaggcaggattactattctttattgctgttttctggggattttttcctgttttcactgcaatattcacatttcctcaag

SEQ ID NO: 17264 - DNA, 267 bp, Glycine max
  Clone ID: 700960274H1
attttggtctgaaaatcgttgctttgcagagtataagatcttgctcccacgtctctgattacttgcaagcttcatctgcactcatggatcccaaccagcctgtgggtgaaaactacgccaatcccaggacttgcttctttcatgtcctcttcaaggctgcagccttggcattttacattctctcggccctctttattgataactttgtcatcattttcgtggtgactgtccttcttgccgcccttgatttttgggtagtcaagaatg

SEQ ID NO: 17265 - DNA, 267 bp, Glycine max
  Clone ID: 700960275H1
agacaatcccgatggtaacgccgctttggtgaactccttctgcgaaatcacttcctcttccaaggaagaagctcttttctttttggagagccacaatttcgacctagacgctgccgtttcgactttcctcgacaacgccaacatccccctcatccctctcaacgacgaccttgccattcccaaccccaacgccgtttcccctccctcagattctcactctccggacttcaacccttctcgctcgccgtctccgtctccttcgcccac

SEQ ID NO: 17266 - DNA, 268 bp, Glycine max
  Clone ID: 700960276H1
ctccctcaccatggccgagtcctgcctcctctcttctccctcctcactcttccacaccaaatccaaactccctctctttacacccccctccaaacccctcacactccaattttcatgcctcaactcctccgtctctctctccctcgccgcaccaactcacgtatctccccttgtaactttcgtggcccaaacttccgattgggctcaacaagaagaagaacagagcctcgctgaaaccgaagcgggcctggaaagttgggagcccaac

SEQ ID NO: 17267 - DNA, 264 bp, Glycine max
  Clone ID: 700960278H1
cacagttctgtataattctgatgacaatgtcttagttgctgctccaacaggtggcggtaagactatatgtgctgagtttgctattttgaggaatcatcaaaaagggcctgatagtgtcatgcgtgtcgtttatgttgcacccgttgaagctcttgtcaaggagcggtatcgtgattgggagaggaaattttgaggtggtcttaaattgagggtggttgaattgactggagaaactgcgaccgacttgaaactgcttgagaaagg

SEQ ID NO: 17268 - DNA, 265 bp, Glycine max
  Clone ID: 700960279H1
cttttcgtggttatcgactcgggtctgtggttttactgttctaaattttgataaattaaggcaaagacgatgactaagaagaagaatcccctggtgtttatggatgtgtcgatcgatggggatcctgttgaaaggatggtttttgagcttttctatgatgttgctcccaagactgcagaaaactttcgtgcattatgtacaggagaaaaaggcatcagtccaaatactggaaaatcactgcactacaagggttctttcttccatc

SEQ ID NO: 17269 - DNA, 264 bp, Glycine max
  Clone ID: 700960280H1
catttgcaaaggaatcattttccatttgccaatcaaccttcttcatccctctagatcgaaaggccaaatttttctttttcttttcctttttcattattatttcatatttttttccccttttcaattcttcaaaaaattctcgcgactaaattcacgtcagtacacggaaacataaaattcagtttttttttattaaaatttgttggcaaacaaaaacaaaaaaaaaattgaaattttgatccgttttgccgaattggaccgcgc

SEQ ID NO: 17270 - DNA, 269 bp, Glycine max
  Clone ID: 700960281H1
cttgttcacccttcttccctttctcacttaccactctcccccttctttccaaaacactccctttccctttctattcacttcccctacccttccgtgatgatgtagatagagaataaaaagagaccagtgtgcagtgagaaagagattgctcacttcttgtgtgggtttgttttgttctttgtgttggaatttgttcatgggtgaagaaggagaagaggtgtcaagagagaaggaacaatacatgggagtttatggaaatgagtggttgt

SEQ ID NO: 17271 - DNA, 265 bp, Glycine max
  Clone ID: 700960282H1
catcgacaatcctaatggttccgacaaagctcgacctgagtgtgatctcatgatgtttctgcactaactatgtttgatttggatacccaacaacaaaaagagtgttgtcgtgttgttgtagttaatagtaataggactaagtaagagtagtggaaaacatgaacaacagcagtggcggaggaggacgaggaactttgatgggtttgagtaatgggtattgtgggaggtcgccattcacagtgtctcagtggcaggaactggagca

SEQ ID NO: 17272 - DNA, 265 bp, Glycine max
  Clone ID: 700960283H1
attgtgccctccctctttctagctatttccctctcttaacacaattaacaaagatatatcatatcatatcaactccaaatgatgaaaaatattgggttgtttcttcttgtggtggtggctacttttgtggtggcagccacagctggtagcttttaccaagactttgaaataacatggggtggtgagcgtgccaaaatctatgaaaatggaaatcttctcaccctctccctagacagagcctctggctctggctttcgttccaaaa

SEQ ID NO: 17273 - DNA, 259 bp, Glycine max
  Clone ID: 700960284H1
aaacaaacgcagtttctctctctctctctcgtagttcaattcaattcaattcaatatgatgcagagactctcttctgccactactactacttcttctcgctctgccttgctgcgctacggtggcggcgcacttcgccgggacgtgcttgctcccatttcctcttctcacttagcagctaagtcacaggcgggtgaaaatgacaccaaagcagctagatggttttctattatgagctctgatagatccacatttgattcc

SEQ ID NO: 17274 - DNA, 271 bp, Glycine max
  Clone ID: 700960255H1
cgcatggccacctctgctattcagcaatcagcattcgcaggtcaaactgctctgaagcagctcaatgagttggtccgcaagaccggtggcgccggcaaaggtcgcaccaacatgcgccgtaccgtcaagagtgctcctcagagcatttggtatggccctgatcgtcccaagtacctgggtccattctcagagcagattccgtcatacctgaccggagaattccccggtgactacggatgggacactgctggactatcagctgacccggaaa

SEQ ID NO: 17275 - DNA, 276 bp, Glycine max
  Clone ID: 700960231H1
gagaacttcaactgagggtgagagtgacacaaatctagggagcactactctaaaagttctattagattcttcaaaacatgaccatgcatcgcgagtcttgggcttttgtcttcggcgttatgggcaacatcatctcctttggagtgttccttgctccattgccaaccttttaccaaatctacaagaagaaatccactgaagggttccagtcacttccttatgttgttgcactgttcagtgcaatgctttggatttactatgctttcgtcaaaaggg

SEQ ID NO: 17276 - DNA, 277 bp, Glycine max
  Clone ID: 700960232H1
atcaaatcaatccatccaacctacacatttctcatcttctccaaattaacaaaaatggtagctgggaaatacccttcccccacatacttcatcttcctgctcataaccataacacgtttgatctccacagtgggcaagacctcccaatggatgaaggccctaacgccgcctccggaactcgcctcggtctccctcgatgacaccatcttcagcaagctccgcaacgacccagaggccctccaggggagggcctccagggactacgggaacctcgtcc

SEQ ID NO: 17277 - DNA, 278 bp, Glycine max
  Clone ID: 700960233H1
gagcctcccctcccctctctctaagatccccaaattgcttgtgaatgctagaaaccctagacagattcgattggatgcgctcccatttcacatcaagggcgagcgcattcggttcttgcaagcaagcctggtactaccgctgcctcggcctcgacccctgaatttgaaccattcatcaccacctttcttcattcattcacggttttccttttcgactcgatttgctgtttttttagttttgtttccttgacgatgttgacgatgagcaagcagaagaa

SEQ ID NO: 17278 - DNA, 278 bp, Glycine max
  Clone ID: 700960234H1
cccttagaaatctaaaagcaaaatttgtcccttccaaagtattccaacacagagaaggctcaaccaccaacatgggaaagaaaatggaagaacatgtatccaaaaggcttgccaaagaggaaagaactaagctcctcagcgaggttgtggagctgaaggaaaaagaaatcaagcctattgaaaatgagaaagctccaggaggtaaggtaaaactgcatagtcatgtcagtcacaaatcacatgtaaatgaaactgttgataaaaaagctaaggtaaag

SEQ ID NO: 17279 - DNA, 180 bp, Glycine max
  Clone ID: 700960235H1
gcaatttatggtagtagaggttctataatttctgcatggtttttatcttttgtttgcataatgcagttataactgcgtgataaatttaccctttaggttttggctggtaacgttatttagtcttggcagatttctaaagtctgttttttgttgtaatatatgaaaattaaatgttttggt

SEQ ID NO: 17280 - DNA, 198 bp, Glycine max
  Clone ID: 700960236H1
ctttgacagcgcgattagcacgaagaaaaaaaggcattgaaagcaagaaaagaagcaaacattattctcgtgagtgcatgcctgagtaactgagtgagtgagtgagtgagtgagtgtaacatcgttttctcgtttgtgttttttcctttaaaatggaaaaccacatctacgccgcctcttacagcccttccacacaac

SEQ ID NO: 17281 - DNA, 271 bp, Glycine max
  Clone ID: 700960237H1
aaaaatacttgctctacctctgccactttctgagtacaatacaacactgccatggctgtctcagtctccactattggagctgtctacagagctccactgagcttgaacagctctgaagctggagattcggttcccagttcagccttctttggcacaagcttgaagaaggttactgcctcaagggtccctaacgtcaagatttcttctggaagtttcaaaatcgttgcggcggagaaagagattgatgagcaacaacagacaaacaaggaca

SEQ ID NO: 17282 - DNA, 272 bp, Glycine max
  Clone ID: 700960238H1
atatagcccaagccctatacaaccaaacccttacacacacccatttgattcagtttccatggctagcctcaaggttgcatttttggctgcagtgctctgcatggttgtggtgagtgcacccatggcacatgcagctatcacgtgcgggcaggtgacgaatagcctgatcaattgcatcggttacctccagaacggaggaacgccgccgtcgggatgctgcaacggagtgaagagcctcaatgccgccgccaagaccaccgccgaccgccaga

SEQ ID NO: 17283 - DNA, 272 bp, Glycine max
  Clone ID: 700960239H1
caaagttgcaagaactaagacaacagctgtctttgtcaaaaaagcatagtgaggaaatgctgtggaaactacaagatgctgttgatgaaactgagaaaagaaaaaagtcagaagcttctcaaataaaaattaatgaagagttggggatgaagatcttggaattggaggctgagttacaggctgtactttctgataaacgcaatttgttaaatgcttatgacctgctaaaggctgaaaaggagtgttcagtgataagccttgaatgttgtaaa

SEQ ID NO: 17284 - DNA, 272 bp, Glycine max
  Clone ID: 700960240H1
ctacaaaccacaatgtcatgagaggaattgacatgttatttattatattatatatctgtcaacattatatattatatattgcaactatttgatagttacccttaatagagagattaaacagactcactatacagctccaaaagatttgtattttgtttaataaacttagtaaagtaccatatgatcagcagttattagtaatttgggttagttattgtgctaatatgcatcttgcattttatggggaaagatagaggtaaggcttaagaatt

SEQ ID NO: 17285 - DNA, 272 bp, Glycine max
  Clone ID: 700960241H1
caagcttctctgttagaacaaaaaaaataagaaaaattggcgtcataagggccaaaggtgggaaagttgaagttttttgttgaggtgaaagtgaaatggttggcaaggatagtctgagggctgaggacttgaacttgtgctttgagaaacttatgatggtggctgggagtgggaacggtgagaaaggggtgaactcgaaggttggggtgatcaccgagtggaaggacattcctgtggagcttttgatgcagattctgtcccttgtggatgat

SEQ ID NO: 17286 - DNA, 269 bp, Glycine max
  Clone ID: 700960243H1
aataagaatattgaggagtggccactgagaggtggagctaatggtagcttaagatttgaagttgagctgaaacatggagccaatgctggacttttaaatgcattgaaacttcttcagccgatcaaagacaaatattctggtgtgacatatgcagacttatttcagttggctagtgctacggctgtggaggaagctggaggccccaaaatccctatgaaatatggaagagtggatgtatctggacctgaacaatgccctgaagaagggag

SEQ ID NO: 17287 - DNA, 228 bp, Glycine max
  Clone ID: 700960244H1
atgatcatgaagttctctttaaagttaaattattatcatcaaccatccaaggatttaagacgaaaggaacaagtacaaccctcgaaagtgaattaggaagaaaacacaaggaaggttgatgatcatgaagttctctttaaagttaaattattatcattttgtgcatgctctctctctctcacttggtccacaacaattgaattgaatgtagtatcattattcgggtct

SEQ ID NO: 17288 - DNA, 196 bp, Glycine max
  Clone ID: 700960245H1
tagatgggcgttcacaatggtaacttgggtgacccagacaaaccgaaatggctgtctctgtttccgagtctgcgtttgtgcttgtttcagagagagagagagagagagagagagagtgttgatttgttttttttttctcttgtttaaattaaaaaattaattcataaagggttccttcccttcctttgcgacacaa

SEQ ID NO: 17289 - DNA, 268 bp, Glycine max
  Clone ID: 700960246H1
tcgagacacagatcatagtgatcattttttaatttctcagatttatccgacgtcgctgcagatccaccaaccgttatggctgccttcagcggtgatgaaacggcaccgtttttcggcttccttggcgccgcagctgccctcgtcttctcctgtatgggagctgcctatggcacagcgaagagtggcgtgggcgtggcttccatgggtgtaatgagacctgagctggtgatgaagtcgattgttcctgttgtcatggctggagttttgg

SEQ ID NO: 17290 - DNA, 269 bp, Glycine max
  Clone ID: 700960247H1
atcacttactggaagccttgttgtgagtaagagaaaaggcttcctgcaccgagcacaccaacttgatacctctgattctttctttgcttagaattccacagaatatggagacgctccttttcaatcactccccacctttggaattcaagggtttgagccaggaggaggaagactcattgctagggcaagtggaaatatggagtcctttggacatgcttcacggactccgtggccttgaaagctgtcatagagcttcgtatagcggacat

SEQ ID NO: 17291 - DNA, 272 bp, Glycine max
  Clone ID: 700960248H1
gttacagccgcagcttgaaacagcgcagagcgaccttgaagagctatggctgtcggaaagaataagaggatttccaagggaaagaagggtggcaagaagaaagccgctgatccctttgccaagaaagactggtacgatatcaaggccccttccctcttccaggtcaagaatattggcaaaaccctcgtctctcgtacccagggaaccaagattgcatccgaaggactcaaacatcgggtttttgaggtctcattggctgatctccaagggga

SEQ ID NO: 17292 - DNA, 274 bp, Glycine max
  Clone ID: 700960249H1
attcaggggggtgaagcttttttcaggggtgtgttggaaagtatgcaatctgtttacttgaacagaaatcgtactgctaaggccatattggaccttgttcactctgctgagaataactcattatgctatgatcatcttgcattcaggacatttggggtgaatggttatggaattgattccatggctagtttttttctggattatggctatacacaaagggaagagttgaggtttccagccaaaaagttgagggctttgtggttttctcctcctg

SEQ ID NO: 17293 - DNA, 271 bp, Glycine max
  Clone ID: 700960250H1
acactttccacttgtctccgaattagttatcttgagaaacattattcccattgctatatattatggctagcatgaaggttacatgggtggttgtgatcatgtgcatggccgtggtgggtgcaccgatgatggcgcaaccatgacatgcaatgatgtgacggtgaacatggcacagtgcctatcctacctgatgcagggaggaacaccttcaacactttgctgcagcggagtcaagaacattcttggctctgctgtcaccaccgttgacaaa

SEQ ID NO: 17294 - DNA, 272 bp, Glycine max
  Clone ID: 700960251H1
cttagacactcatttttattagttttgttgctgagtgtgtgtgaaactgtgaaagagagttatggcaggaggtggtggagctccagcacctaagaatgatgagccacaacctcatcccccgaaggatcagttaccgaatgtttcttactgcattacgagtcgtcctccatggcctgaggccatacttcttggttttcaacattatcttgtgatgctcggtacaactgtgctaattcccactgctcttgttctcctgatgggaggtggcaatg

SEQ ID NO: 17295 - DNA, 269 bp, Glycine max
  Clone ID: 700960252H1
ctcatcctcggtgatggcttatacaactttgtcaagattttagtttcctcaatccttagcgtacatgaaaaaattaagaaccgtaaaaatgcttcaagtgcggatcaacagagagataacgctgaagagcttaaacaaaaagaagttttcctgagggacaacatttcgatgtggatcggaaccggcggatacatagttttgtcggtgatttccataattgtaatccctttaatgtttcctcagctgaagtggttctacgtggtggtcgc

SEQ ID NO: 17296 - DNA, 270 bp, Glycine max
  Clone ID: 700960253H1
caacggtggcggcaacgacgacgacgacgaaatcgaccccttggatgccttcatggaggggattcacgaggagatgcgggctgccccgccgccgaaggagaaggcggaggaccggtaccgcgacgacgaggacgacgatcccctggagagctttctgaaggcgaagaaggatttagggttgactctcgcgtccgacgcgctgcacgctgggtatgattccgacgaggaggtttatgctgctgccaaagctgtggatgctggtatgattga

SEQ ID NO: 17297 - DNA, 269 bp, Glycine max
  Clone ID: 700960254H1
ctgtcatcacatggacttgtctttctcttactctgacggggtccttccttttcttcttctccttcatattttctctctcaccattctcttcttcttctccctttcttagattctccctcttttctctctgccctccgccatgactgaggataaggagatgtcttcctctgtcaccaatggacgatgattccctcactggtcacatcatatctacaactattggaggcaaaaatggggaaccaaacagactattagttacatggcagaac

SEQ ID NO: 17298 - DNA, 277 bp, Glycine max
  unsure (1)..(277): unsure at all n locations
  Clone ID: 700960230H1
gcgacggctgaacctctttgttctctctgtctaagaagaagaagaagaagaagaagaagaagaagaatcaaatatccttgagccagacatgtacaggaacgctgcttcacgtcttagggtcatcagtgcccgttcgtgcagcagcagcaggatacctgccagtgccagatttgcaagttccgttgccacacaacaatctcatgcgccgnttgggtggtttatttggatggctcactggagaccgatccagttctttaccatctctggatttcccgct

SEQ ID NO: 17299 - DNA, 284 bp, Glycine max
  Clone ID: 700960203H1
gttactgtgccaacgcattgtgaggccacaagtacctaacacccaactaagcttttggaacttagagttaagcagttaccttcctccaactataatatctcaaccaatcaaaatcctttttctcaattctctctctctctctctctgactctctcgacaataagtgttgattttttcctaaataagtgaaagtgtagttacaccttattttagtgttttaccacttttgtgtgccagagttttctgagtctcataggaggaatatatgacagaagaacaaacca

SEQ ID NO: 17300 - DNA, 281 bp, Glycine max
  Clone ID: 700960205H1
atgagtggtcattggtgaacaagcagaagcctatttggatgaggaaacctgaagagatcacaaaagaagaatatgctgctttctacaagagtcttaccaatgattgggaagagcatttggctgttaagcacttttctgttgagggtcagctggagtttaaggctgtcctctttatccccaagagggcaccttttgatctttttgacactaagaagaagcctaacaacatcaaactgtatgtccgccgtgttttcatcatggacaactgtgaggagttgatg

SEQ ID NO: 17301 - DNA, 280 bp, Glycine max
  Clone ID: 700960206H1
tagcaaacgatccaaactcttttttcatttgcagcatcaaaatgagtggtagcaacgatggtagcggcagctggagctctaggtttttgaaggtggctagtgcagctgccgctacagccgccgttgccggcggtttatatgccattctttcatcctcaacctctgctagctctgagatggaagtgccgtttggcagcgcacggcgtgagagcaaagaacgtgacgatggtggctccgggtctcatcctcgcgagggtgccaccacggtcagtcgttggaa

SEQ ID NO: 17302 - DNA, 74 bp, Glycine max
  Clone ID: 700960207H1
ctcgatttgaaagtacccaacacaccacacaaacaaacccatgtccccccttttttttcttcatatcattccac

SEQ ID NO: 17303 - DNA, 266 bp, Glycine max
  Clone ID: 700960208H1
gtcgccggagaaaattttccggcaagttcgtgcaaccggaaactcatcggcgcgaggtggttctcaggcggatacgaagccacccacgggaagatgaacgagaccactgagttccgctcgccatgcgactccgacggccacggcacgcacactgcgtcgatcgccgccgggaggtacgtctctcaggcgtccacgttggggtacgcgaatggcgtcgccgccgtcatggcgccgaatcgggactcgcggtgtataaagtctgctgg

SEQ ID NO: 17304 - DNA, 99 bp, Glycine max
  Clone ID: 700960209H1
gcccgttcacgtcctcatctcgatgtgacgtcgtttcactcccaaacccagatgtttcccagaagcaccaccacgtattacacctcctattcgattcag

SEQ ID NO: 17305 - DNA, 280 bp, Glycine max
  Clone ID: 700960210H1
gctgaaactgcaactaactgccaccatccaggtgttaaagaaagccggtcgcccatctgaacgtctggtaagccatgagaattgcaaatttacaaagccagcagagcatgagtgtgttcatgttcaggagattacagaagcttctgggactgaagaagcagaagcagatgctgagtatgacaatgctctaaaagaagctattagaggtgtccaggatgctgtcatggccataaatgaacgtatggaagaagtcagatatgaaattgctgcccttgaagca

SEQ ID NO: 17306 - DNA, 281 bp, Glycine max
  Clone ID: 700960211H1
ctcgagccgaatcggctcgaggttctcttaggtctgggtgtagcaccgatgatgctggaaactgctctcaaactacttcagtatatgggtctaagcttagttcatgggttgagaatagtagtaattttaaacgtgaaagcagtgtttcaactggatactccaagcgaccagatgaagtttgcaaatcaaatcgtaaaagacttaaaccaggagagaaccctaggcctaggcctaaagatcgccaaatgattcaagatcgtgtgaaagagttgcgggaaatt

SEQ ID NO: 17307 - DNA, 280 bp, Glycine max
  Clone ID: 700960212H1
cacaaatattgtttttgaaaattgtgatcatcatccaagggtaaaatggatttagtttctgtaggctactgtttgtgataacattgagatatgacatggaaatccctcatttcctatgaattcataattctactgtaggagtgtagtgtccaattacgttctccttccatcttaatttaaaaaaaaaaaaaacattcttcttccatcttgattaaaatgctatatgttgtgacaagttgttggctctcactatgcacctgaaaaacaatgctatgagatg

SEQ ID NO: 17308 - DNA, 280 bp, Glycine max
  Clone ID: 700960213H1
caaaaaagtagccactgccccaacgatcccatttcccttgacttctctacctgaagctccttgtttcgcataggaggtagttgaaatgtccgagggaaatgcagggaaaggaaagaaaatcgccatcattggtgtctcaaccttattgttggtggctatggttgtggcggtcacaattggggtcaatctcaatgagaatggttccaacaatgatatagatgacaacaagaaagatcatgttgcttcttccataaaagccgtccaaaccctttgtcatccc

SEQ ID NO: 17309 - DNA, 279 bp, Glycine max
  Clone ID: 700960214H1
atacattacagcagcaaaggaaggttgtggtaagtaaatagtagtaacctaacccttgcgtttgcgagtgaggctgaggttgggtttggaaggcaaaggctggtgttgtcccaatccaagagagaagtaaagtaaagcaaaggaatggcgaacatagacatcgaagggatcttgaagcagcagcctgatgatgggcgcgttccgaagacgaaaatagtgtgtactttgggccccgcttctcgatccgtggaaatgactgagaagcttcttagggctggg

SEQ ID NO: 17310 - DNA, 78 bp, Glycine max
  Clone ID: 700960215H1
atcgatttccatacacttcagcacagagcacaccgcagtgggcttcggccaattcgggagtacgatccacaccaccga

SEQ ID NO: 17311 - DNA, 279 bp, Glycine max
  Clone ID: 700960216H1
ctctcctcagttatccctccaacagaagatagcacatggttctagttgcaagtcatggcgaggaggaaaagggggcagaaggcattgctgctgttgattttcgaggtcaccctgtggacaagacaaaaactggaggatggctagcagcagggctcatcttaggtactgaactggcagaaagaatatgtgtaatgggcataagcatgaacttagtgacctacttggttggagttttgaatctcccttcagctgattctgccaccatagttaccaatgtca

SEQ ID NO: 17312 - DNA, 282 bp, Glycine max
  Clone ID: 700960217H1
attattatttaaatgggtctcacattttttgtttgttgtgttattactttctaaaatgagagaaatcaaacctgaaggaataattttaccaagtttcaaaaattaaacattaataactgcgaaatttgagtttaattgatagtcaattttgattaagaataattaaaattcttttattttactattgtttttaatgaaataaatgagaattttaatatcattttaattcttaaccagcaagattcaaaagaagaaagattataagtactttgaagaaaaatt

SEQ ID NO: 17313 - DNA, 285 bp, Glycine max
  Clone ID: 700960218H1
ctcgagccgcgttaccttacatattccatttgtctctgatcttccaacaccttattcctcacgcgaagagacaaaatggatcaccatttcacttcagaaacctctctcattattcttctcctcatcacatccctctcctcccttgccaccgccaccaacatcaatatcctccaccacgacctccaatccgacatcaccgaattctgcaagaaaaccaccaaccccgccctctgtgccgagaccatccatccccacttcctcaagaacagaatcgatgccttcaag

SEQ ID NO: 17314 - DNA, 281 bp, Glycine max
  Clone ID: 700960219H1
aaaatgggttcttctttgtggactttgtgtctaattttggcttcactagcctcttctgcattctgtgcctttccacggaggccagtggatgttccattcggcagaaactacgttcccacttgggcttttgatcacatcaaatacttcaatggaggttctgagattcaacttcatcttgacaagtacactggtactggcttccagtccaaagggtcatacttgtttggtcacttcagcatgaacataaagatggttcctggcgattcagctggcacagtcac

SEQ ID NO: 17315 - DNA, 277 bp, Glycine max
  Clone ID: 700960220H1
gttcctcgtatcatattctgggtttatggttaatacgaaaagcacctctgaaactttcagcagcatttatctgtcataaagtaacttttggctcatagttttgtataataaagtcgtttggcagtatatatatagcgatcagcaatcattcaagtgcttcctcatcagatatatgctgataacgtagagcagatgaaagaggagatagagaagatggtggctagtaacagctcagatgatagcataggaacacctctagtaataaggggatctgata

SEQ ID NO: 17316 - DNA, 278 bp, Glycine max
  Clone ID: 700960221H1
tggaaatgggactgaaacaggacatataattgttactaccattggtggtaaaaatggccagccaaagcagacaataagctatatggctgagcgagttgttggaaatggatcatttggtgtagttttccaggcaaagtgcttggagacaggggaaactgtggctataaagaaggttcttcaagacaagagatacaagaaccgggaactgcaaaccatgcgtcttctggaccatcccaatgttgtaactttgaagcattgtttcttttcaacaactgaaa

SEQ ID NO: 17317 - DNA, 277 bp, Glycine max
  Clone ID: 700960222H1
aaagaaaagaaaaaaaaccgaagatgatacacagcgaaggaggggccgctaaaagccaaggttgtcggaattggatttgattcttcttcacttgcgcgatttctccgatcaaagttcctcactttctctccctcgatcgacacccaccacgcgttagagagagcaaaaaaaccccgagagatcggaaagatgggtacgcttcagtcttggagaagagcctacggtgcaatcaaggataccaccaaagtgggtcttgcccatgtcaatagcgattacg

SEQ ID NO: 17318 - DNA, 278 bp, Glycine max
  Clone ID: 700960224H1
ctcgcaaggaccttcttctagttatttgcggcttgctattactctcttcccttgttgcctttggagggtacagggcctccaacgcgccgcatgccgacgtggcatcggcaacatcgaacgatgagcaacgtagtccgacatcggtgccttctccgaaatggtacccggtttcgcgaggtgtttcttccggggtgtcagagaagtcatcaagcatgttgtttgcggttaaagatggagcttcgaaggcatttccatgggacaacagcatgttgtcttgg

SEQ ID NO: 17319 - DNA, 278 bp, Glycine max
  Clone ID: 700960225H1
ctccgttatgagaagctgaaccttcctctgcacaatctccttcaaaaagcttctcatccatggcgaaaacgctcatttcgtctcaatcgttcatcggcacaccgctcccctcactccctcgccaccacctcccccaccgcaccaggctcgtcgccaccaaagtcctcgtcagcctccacgaaattcccccaatccactccataagccgcaacattgacttcgccggaatcgtgactagagccgaagccttctctacacgctcgccgatgctgcggttg

SEQ ID NO: 17320 - DNA, 279 bp, Glycine max
  Clone ID: 700960227H1
cacatcctcaaccatggcagcaccatcttcagagacaatgtcaccatcatcctcgaacacgcagcttccgctgaaaccaatcccaggcagctacggaatgtcgttttttggagcaataagcgacagacacaactacttctaccaccaaggacgcgacaagttcttcgcgacgaggattgaaaaacacaactccaccgtgatccgaaccaacatgcctccggggcccttcatctcctcggaccctcgtgtcgtcgcgttgttggacggtgcctccttccc

SEQ ID NO: 17321 - DNA, 277 bp, Glycine max
  Clone ID: 700960228H1
tcttgacacagttcgttagccgcaaccctttggctcctccttccactctcactctcactttgttttcatcgtcctcaaccaacgccatgtgctcttagttagacctcccagaggttcttcgtagacaacacagaagaacgatttgttccgttgttttagtagctcttgaaatgaaaccacaaaccaatgggatgtctagagctcataaggcaaataataatacacagtttgaagggcctaactggcttatttttgctgctggtgctttgttgagtac

SEQ ID NO: 17322 - DNA, 275 bp, Glycine max
  Clone ID: 700960229H1
ctcatgttgaatttggaaagccgcaaaggaatcttcattgctgcctactcgtgccttgctcttggcttccttgggctgacttggactgctgttgtggaaagaaacttacgttcaatattgtttcttgtttgtgcaattatttgtggctatatatatcagtgtccaccattgcggttaagctaccaggggctaggagagcccttgtgctttgcagcatttggtccttttgccacttgtgctttttatttattacatgccagtgcaagggtgaagaa

SEQ ID NO: 17323 - DNA, 282 bp, Glycine max
  Clone ID: 700960201H1
ccgcacagcactcggaaatttctggcgatctctgcgttttcccctattttttctgaatcccacagaatggcatccaacaggggtcaaggtggaattcagcagttgttggctgctgaacaagaggcacaacggattgtgaatgctgcaaaaaatgaaaaattggctaggttgaaacaggccaaggaagaggctgaaaaggagattgctgaataccgagctcaactagaggctgagtttcaaaagaaagtgtcagacagtactggagattctggagctaatgtc

SEQ ID NO: 17324 - DNA, 258 bp, Glycine max
  Clone ID: 700960169H1
cactattcttcttcgcagcaatggcgcgagtggatctggacgggaaccccatgaaggcacttacgatctgcatgatcggcgctggcggcttcataggctcgcatctctgcgagaagctcatgtccgaaacccctcacaccgtcctcgccctcgacgtctacaacgacaagatcaaacacctcctcgaaccctccgattccccctgggccggccgcatcaccttccaccgcctcaacatctaacacgactctcgcctcg

SEQ ID NO: 17325 - DNA, 257 bp, Glycine max
  Clone ID: 700960170H1
aaatccatcaggtaatttcaaagcaatgcatcgacacatatccaaaggtacatggacattctcaatgcaggatcagggttggcaagtctctgactgcacagcagaaggattaaaggctgcacttctattgtcacaaatgtctcctgacctaataggcgagaaaatggaagatgagaggttctatgatgctgttgatgtgattttatctcttcagagcggcaatggcggcttccctgcttgggagcctcaaagagcgt

SEQ ID NO: 17326 - DNA, 256 bp, Glycine max
  Clone ID: 700960171H1
ctcttttttctctctcttgcaaaacctaattttcatttcttccctcaaatttcaaaatgcgtgagatccttcacatccagggtggccaatgcggcaaccagatcggcgccaagttctgggaggtggtttgcgcggacacgggatcgaccctaccggaaggtacggtggggactcggagttgcagctcgagaggatcaatgtctactacaacgaggccagttgcggtcggttcgtgccgcgcgcggttctcatggac

SEQ ID NO: 17327 - DNA, 258 bp, Glycine max
  Clone ID: 700960173H1
cgcagtcgcagtgagtgaaaaggaaaaccctaattgcggtattctcagtgccttcgagagaaagaaaaaatggcagataatcttgttctccgtggcaccatgcgcgcccacaccgacgttgtgacggcgattgccactcccatcgacaactccgacatgatcgtcaccgcctcacgcgacaaatccatcatcctctggcatcttaccaaggaggacaagacttacggtgtcccccgccgccgcctcaccggccattct

SEQ ID NO: 17328 - DNA, 257 bp, Glycine max
  Clone ID: 700960174H1
gctgacaattatcatggttcctggtggaaaagacatggtgttgttcttgatggtgagatagcagctgtggcttttaagcatggacattttgatcaagctgcaaagtcatatgagaaggtttgtgcactgtatgctggtgaaggatggcaggatttgttggctgaggtccttcccaatttagctgagtgtcagaagagtcttaatgatcaagctggctacttattatcttgtgtgaggttactttctcttgatgaagg

SEQ ID NO: 17329 - DNA, 255 bp, Glycine max
  Clone ID: 700960175H1
ccctccatccgtgtgctgctcttatctttctttttcattgctttgtcacttttttcctttggcaatgtcgaagccagtagaaaacttctggcaccaacattacccgatttggggaattctcttcctcgcctgatatttcctccatttccaccagtaacggactggccagagtataggttgcctcccccattgattcgcacgcttccacccttctcacctccttcagccacaactaccaatccttgagttgaatag

SEQ ID NO: 17330 - DNA, 246 bp, Glycine max
  Clone ID: 700960176H1
gttcatcatgatataaaaataaaaaataaaaaatcatccagaatcggatttcagtgaagaaagacccaaaacgatgaagaagggcgaaaataagggtcggactcggaccttcccggtggatccgaatgttccccgatgggtttgccagaactgccgcaaccctctctgcatcgtaggcgccgattcttacgccgacaagttcttcaacgatccttctcgctacgggatgcaagggtcgtccattca

SEQ ID NO: 17331 - DNA, 249 bp, Glycine max
  Clone ID: 700960177H1
agggactcgttgttcttctcccaggttatttagaaaagcaaaatggtgaagatttgctgcattggtgctggatatgtggggggtcctactatggcagtcattgcacttaagtgcccatccattgaagttgctgttgttgatatctctaaatcccgcattgcagcctggaacagtgaccagcttcctatctatgaacctggccttgatggtgttgtgaagcaatgccgtggcaagaacctcttcttcagc

SEQ ID NO: 17332 - DNA, 255 bp, Glycine max
  Clone ID: 700960178H1
gtctcagaccctttctcaccaccatcttctttctcacactcacagtgctcgaaggtttcagcatcatcctcagtgattttctacaacaagtgccagcacccagtgtggcccgggatccagcccagcgcaggaaagcccgttctggcccgcggaggcttcaagctcgccccaaaccgggcctactccctccagctccccgctctatggtccgggcgcttctggggccgccacggctgttccttcgacgccggcggc

SEQ ID NO: 17333 - DNA, 254 bp, Glycine max
  Clone ID: 700960179H1
cttggatcatatatttcaacctcctcagatttctttcttagcaaaccaattttcaaccacatgggtatccctcactttctcgttataccatatccagttctgggtcatgtgaatccccttatgcaattgtctgaggctctaaccaagcatggctgcaaaatcacatttctgaacacagagttcagccacaaaagagcaaacaacgctggtgctgaactagacaaccttaaggaatcaggaatcaagtttgtgac

SEQ ID NO: 17334 - DNA, 258 bp, Glycine max
  Clone ID: 700960180H1
atggccacctctgctattcagcaatcagcattcgcaggtcaaactgctctgaagcagctcaatgagttggtccgcaagaccggtggcgccggcaaaggtcgcaccaacatgcgccgtaccgtcaagagtgctcctcagagcatttggtatggccctgatcgtcccaagtacctgggtccattctcagagcagattccgtcatacctgaccggagaattccccggtgactacggatgggacactgctggactatcagct

SEQ ID NO: 17335 - DNA, 257 bp, Glycine max
  Clone ID: 700960183H1
atgggatggctgcatatgcagatagctggtggttttgagaaagcaacataattcaagggagattcatagggaatgacagatcaatcagtgtggttggttttacattgaaaaggaaaaaagtcacttgggctggttggttagcatggtctgctctattaacaacctagtcaattgatgcaaaatgttgtaaggtctgtatgttctttgtcatagtatgatatcgattgtaagaaatgcatctaatttcctcgcgcatc

SEQ ID NO: 17336 - DNA, 257 bp, Glycine max
  Clone ID: 700960184H1
cacagacacaaggtttagtcttgttaggttacctctgtgacatttgtgctgctagttcatatatttgcggctgacaccgagaaggaaagcaggaaaaaaacaaaaaggagcagatgggtagctcaggtttctcatggaaattggcggatcatccaaagcttccaaagggtaagactgtggctgttgtggtattggatggttggggagaggccacacccaatgagtacaactgcatccacaaggctgaaacaccctgc

SEQ ID NO: 17337 - DNA, 257 bp, Glycine max
  Clone ID: 700960185H1
caaatgagaagtgtgaagatggtaaaatgatctcaaactcggaccccgtagaaccagtcacggcaaccgccactgccggcgccgacgacgccaccgtctcaacaaccgcctcttcttccaatgaagatcagcctgcaccgccggcggcaccaaacattgtgatgtcctccaaggatcacgattctctcttcagcggtggcggcatcagctttctctctggaagccgaaatggaaggttcagctatggatattccagt

SEQ ID NO: 17338 - DNA, 254 bp, Glycine max
  Clone ID: 700960186H1
gggcgatcgattgttactctttaagaaaagggtgccactatgtttttcccctttcgcgatgttggattatgaagactttgcgtcatctggaaataattgtattgtcatttgaagagaaagcgaagagaaagatatagccttcatttacttgacttcattctgattttgcccaagatacattacctgtatttgtatgtacatctgtatctctgattgttggttttgcatttttgtgagtgctatttgtgttttca

SEQ ID NO: 17339 - DNA, 257 bp, Glycine max
  Clone ID: 700960187H1
ggatgatagcttgacatgtgaaactcagagatcaaaatcacagcgttagcaacccaacgacaaccgaaacagcgtcgctttgaaataaaccaaacctcgccacatttcttctcttcattcttcttctaagctttctagaatcttcacttcagaaccgaagccatggcggatcggttcttccccaacccgatgcccgagttcgtacccgaaacgacgccgtccactcctcaggaagaagaagaagccctcacagtggg

SEQ ID NO: 17340 - DNA, 256 bp, Glycine max
  Clone ID: 700960188H1
cttctcgcaagcggaccccaatttctccttcacgaaccctaattcactcttcccattcgaaatctcgatcaccttttcgattcaacctttctctcctcgctaatctcttcgttcgcctcgcacatcaaggtgagggattgaaattgaatcctcaagatgccagctacagcaggaagggttcgcatgcctgcgaacaatagggttcacagcagtgcagcgcttcaaacccatggtatatggcaaagtgccatcggct

SEQ ID NO: 17341 - DNA, 256 bp, Glycine max
  Clone ID: 700960189H1
aaaaagatgcaatcacttggtcaaaatgaggcatctctagcatgccctcaagggtgttgccctacttctttattgttcaaccctccaccaccaccaccacaatctcagaacacaacagccaaacctagaaacagttctgcagagtgtagacacagctttgcagccacaacagcatcctcaatcttcccaaacaccaaattcaccaaccatgagtcccttccttctctgcatgaatcattcagtgagttcaagaaag

SEQ ID NO: 17342 - DNA, 252 bp, Glycine max
  Clone ID: 700960190H1
tgatgatggagatggcgaacgaaacgctgtcgttgctgtactcgcggcgttggtgctactcgcggcgagtgtggcggtggatgctcaggagaactcggacgtgaagacgctggtgaagtacaagcacgggaagaagtactgcgacaaaggatgggaatgtaagggctggtcaatttactgttgtaacctcaccattaccgattatttccagacctaccagttcgagaatctgttctccaagcggaactcgcc

SEQ ID NO: 17343 - DNA, 250 bp, Glycine max
  Clone ID: 700960191H1
atttgtttatcctggttgggaaggttctgtcaccgactcacgagtgttaagggcagtccttgataacccagatcagaatttccctcaaatacctcaaggaaagtattaccttgttgacaagggatatttaaatacagaagggtttattgctccttaccaaggggttcggtaccagcattatgagtttagaggcgctaatcaattaccaagaaacgcaaaagagctgttcaatcacaggcattgttttctg

SEQ ID NO: 17344 - DNA, 236 bp, Glycine max
  Clone ID: 700960193H1
ggctcgagaattcaacttaagagatcaatatagccaccattaccaagcctccttctaatatatgtttcctccttctgttgcttctagcacacttccatttgggccaaagccaagttgagttgaattactactctaaaagctgcccaaaagctgaagagataatcaaggaacaagtcacacaactatacaacaagcatggaaacactgccgtttcgtgggtcagaaatctcttccac

SEQ ID NO: 17345 - DNA, 251 bp, Glycine max
  Clone ID: 700960194H1
acgtcgtccaagagcttttcagggacctcccaacgcagctctcgatcaagcccgatttggtgacttacaacaccatcatcaaggcgttttgtgaaaagggttcgtttgattcggcgttgtcggtgcttcgggagattgaggagaagggtttgagtcctgattccatcactttcaacactttgcttgatgggttgtactcaaaaggtcgttttgaggagggtgagaaggtgtgggagcaaatgagtgtgaat

SEQ ID NO: 17346 - DNA, 255 bp, Glycine max
  Clone ID: 700960195H1
ctcttataacacaacacaacccatggccaccacctccgcattcctcctccttccactcctcctgctgctccacctcgccatcgccgctcacggcatcggcatcaactacggcacgctcggcgacaaccttccaccgcccgcggcggtggcgaacttcctgaagacgaagacgaccatcgaccgcgtgaagatctacgacgtgaacccggacatcctgcgggccttcgccggcagcggcatctccgtgacggtgac

SEQ ID NO: 17347 - DNA, 254 bp, Glycine max
  Clone ID: 700960196H1
gggagaaagcctgctgctcaaaatgccaagaaggcacctgctgctgctgccaggaagagaaacgtaggtggcaagcaatctcagtttttgggtcagaaactcataactgatatgttggagagtacagggatatcaccagagaagaaagtgaggaagatgagggcgtctccatttaacaagaaaagcagttctgtattgggaagggttgctgctgctgacaaagatgaaagtgtaagtaaagacttgtctggtgg

SEQ ID NO: 17348 - DNA, 258 bp, Glycine max
  Clone ID: 700960168H1
atttaatttgccaaccgcgccagatcgccattactacaacaacatagacgagtgcggtgcattccctcgtttaccatgctttcctaagagaaagagaaaagtaaaacccctcactactgatagattttcattcctccgaggaaaaaaaaaacatgtcggatgctttgatcaatggattggccggagctggaggagggatcattgctcagctcatcacatacccacttcaaactgtaaacactcgccaacaaaccgagc

SEQ ID NO: 17349 - DNA, 265 bp, Glycine max
  Clone ID: 700960141H1
gcaacctagcaatggaggcgattaggaagagtaggattcttatatttggaggaactggttacatagggaagtatatggtgaaggcaagcgtcacgttaggccatccaacttttgtctacactcgccctcttgatgcacaaactccttcctctaaggcacagctttgcaaggagttcaactctatgggggtcacacttgtccatggagaacttgagcatgaccagattctggcagtgattaaacaagtagacattgtgatatgttc

SEQ ID NO: 17350 - DNA, 258 bp, Glycine max
  Clone ID: 700960144H1
cgacgaaatgccaagcaccaccacctctctcctccgccgcaaccggtggctcccctccagcatcaaactgaaaacaacccttttctcagaactctccggcgcggtgggtgacctaggcacctacatccccatagttctagccttatccttagtgaacaacttggacctcaccaccacactggtcttcactgctctctacaacatcgccactggtctcctcttcggcctccccatgccggtccagcccatgaagtccat

SEQ ID NO: 17351 - DNA, 258 bp, Glycine max
  Clone ID: 700960145H1
gcacaaggtttggtcttgttaggttacctctgtgacatttgtgttgttagttcgtagttgcggctgacacccagaaagaaagaaagcaggaaaaaaacaaaaaggcgcagatgggtagcacaggtttctcatggaaattggcggatcatccaaagcttccaaagggtaagactgtggctgtggtggtgttggatggttggggagaggccacacccaatgagtacaactgcatccacaaggctgaaacaccctgcatgg

SEQ ID NO: 17352 - DNA, 257 bp, Glycine max
  Clone ID: 700960146H1
ctccttctcgctctttcagctttgacttttgttggaaactaaggcctaatcaaaatggtgaagttcacagctgaagagctacgtcgtattatggactataagcataatatccgtaatatgtctgtcattgctcatgttgatcacggaaaatcaaccctcactgattctcttgtggctgctgctggtattattgctcaagaagttgccggtgatgtccgtatgactgatacccgtgcagatgaagctgagcgtggtat

SEQ ID NO: 17353 - DNA, 261 bp, Glycine max
  Clone ID: 700960147H1
ctcaaccaaagtgcttgacgcaaaggcgatgaagcaacaaaagcaattgttaaggttgtaacttgtatcatcattcatttcatctgtgttgtgttgtacgtgtgatttccattgccgccaccgattacccaccaactgatatacataacctcttcacctttccctccttccctaatttatcactaaaaaaacaaacaaataaaaaaaaagtccactaagttggggcacgtcacccatctcgcccttcccctcgctcatctc

SEQ ID NO: 17354 - DNA, 263 bp, Glycine max
  Clone ID: 700960148H1
cttgagggtggttccttcgctgcaaaggactaccatgatcctcctccagcaccattgattgatgctgaggaactcacacagtggtccttctacagggctttgattgctgagttcattgccacaatgctcttcctttacatcacagtgctcactgtgattggttacaagagccagagtgatgtaaaggctgggggtgatgtgtgtggtggagttggcattcttggcattgcttgggcctttggtggcatgatcttcattctggt

SEQ ID NO: 17355 - DNA, 265 bp, Glycine max
  Clone ID: 700960149H1
gtactaactcccatttcttatttattattgaattaaccgatcaacttgctttgttatcgaacatttctttttgatttcaaaaattttccggaaaaaatttgaatctatttttatatgcgaatcaatcctactacttctggtcctgaggtttctgcgcttgaaaaaaaaaaatctgggacgtatcgcccaaataattggtccggtactagatgtagcttttcccccaggtaagatgcctaatatttacaacgctctgatagttaag

SEQ ID NO: 17356 - DNA, 266 bp, Glycine max
  Clone ID: 700960150H1
aacgcactctcaactcttcacttgttaatgcttcctcctgaaagttctaaactcaacgcaatggagcttagcaaagtcacgttagagatcttttcaaaattggagcagcaatggctctcgcactacgaagcatcaaccaaaacgcgcattctcagcattgacggcggaggaaccaccgccattgtcgccggcgcctccctcgtccacctcgaagaccagatccgcgcccaaacctccgatcctcacacgcaaatcgccgattactt

SEQ ID NO: 17357 - DNA, 262 bp, Glycine max
  Clone ID: 700960151H1
cagcgcacggcgcctcaacatctcaactttcccttcgatctcattctcaggtgttgttgaagcttcctgtgttggcttggtatccctgcaagttctgctgtagcagattccaaggtgaaggtgtcacgttaaagtttctttcatgtttgaacaggctactatccatttgggagcaactgagctgcttggagagtatttttcttcctctaggaaaaattacagaccctcaccacagagacttagttgtatgaacggttggcca

SEQ ID NO: 17358 - DNA, 261 bp, Glycine max
  Clone ID: 700960152H1
gaagattctccctgtagatttaaagtgtgcttctacaaatcaaaagatatactatgatatgcttcaggcccctaatctcccttctttccaagttgaggaacatgtgcccattaatagtcaaatccctggttttgcccacgattgccttcttaaagatggtagtagtcaatctatgatgacaatggatcctaaacacaaactagattgtgctaaacctccatcgggtgatgacttgttcgatgttttaggggtggatttgaa

SEQ ID NO: 17359 - DNA, 262 bp, Glycine max
  Clone ID: 700960153H1
catagccacaaaccatcctcaatttctcatcaaatcaaaactcatacatacacaaataacacaaaaatgaaatacagtgagatatcccatttcagccacccacagcacaagctgagatttgagtactcagaattccccttcaaatgtgatggctgcaaggaagtaggcataggatcacgttacaagtgctccatctgtgacttcgaccttcacatgcactgtgccatgataacctcccccaccttgctccaccctttctaca

SEQ ID NO: 17360 - DNA, 261 bp, Glycine max
  Clone ID: 700960154H1
ggactttagagattcatatagatggaaatctgtccgaagttgtcttaactggattctggaagtgaaaccacatggagatcgggttggaccattggtagttattggtcttataaacgaatcatctatctctacaaaatggaaagtccctcctgccataaactatcaggagtacccgcctggtaatataattatacctatgggaagtaggacattaaggccttttcacacaacaaatttgacaggtgtttgcacctgaaaatg

SEQ ID NO: 17361 - DNA, 262 bp, Glycine max
  Clone ID: 700960155H1
acccgttccagtttccaagtgttcaaagaaggtgagtgatgagcatggagcatttgccacgagaattggtgtccaacgtgctctccaggttgccagcgaaggtgttgctgctatgcaagtgtgtgtgcaactcctggttcgatctcataaccgatcttcattttgtttccaattactatgttgtctacaacagtctccagagccaagaggagcatctcttggtgatccggagaccctttttctctggcctcaaaacttacat

SEQ ID NO: 17362 - DNA, 262 bp, Glycine max
  Clone ID: 700960156H1
cttattgcgttgatctggaagtttgattttgcacccttcatggttttgattattgccatactcaatgatggtaccattatgactatatccaaggatagagtgaaaccatcaccacttcctgatagctggaaactgagggagatatttgctactggcgttgtgctaggaagttacatggcactaatgacagtagtatttttctgggcaatgaaagataccaacttcttctcgaacaagtttggtgtgaggccattgagagata

SEQ ID NO: 17363 - DNA, 262 bp, Glycine max
  Clone ID: 700960157H1
ctccgacagcatcctttgttgaacgaaaacacctttctattctccagtttgacaaaaaacagtggcacccaaaccaaacggaacctcgtcggatacaaaattcccaacatatttgtttttcttcattttccaccttaataataatattaatacctcctgttgttgttattattaatattatttttcttttttgggtcggtttagattttagaatccttaccatgataaaaactcctacaaaatctcaccagtttcgaaccta

SEQ ID NO: 17364 - DNA, 257 bp, Glycine max
  Clone ID: 700960159H1
gttgaatgagaatcctcctctttgcatgtcgtaatcgatcgcatcaacatttcaattctctttcctttccttttcctccttttctcgatctctccgtcggtcatcatcatcagacccaaacaaattctctacgcagatcgaatcaaagctcctccatccaattccgagatcagcactggcgaccttctcagcatcgaacctctcgaacttaagttcttctttgagctcaagaagcagatatcatgctctcttatatt

SEQ ID NO: 17365 - DNA, 255 bp, Glycine max
  Clone ID: 700960160H1
aaccccaccaatgtgcagcttccaggtatgtacaacaaggaagagaacccccgtgttcccatcattgtcaccggtaacgatttctcaacactctatgcacctctcatccgtgatgggcgtatggagaagttctactgggcaccaacaagggaagaccgcattggtgtttgcaccggaattttccgcactgatggtattcctgaacaggacattgtcaagcttgttgacaccttccctggccaatccattgatttc

SEQ ID NO: 17366 - DNA, 256 bp, Glycine max
  Clone ID: 700960161H1
ctcattcaagattcagcaagtgcgttttggaagcagagaccgaaatacttcgagatggcccgtacaaagcaaactgctcgtaagtcaactggaggaaaagctcccaggaagcagcttgcaaccaaggctgcacgtaagtctgcaccaacaactggtggtgtgaagaagcctcatcgttatcgccctggaactgttgctcttcgtgagattaggaaataccagaagagcactgagctcctaatcaggaagcttcctt

SEQ ID NO: 17367 - DNA, 258 bp, Glycine max
  Clone ID: 700960162H1
aaaaaatcttcaaattctctgagtcagccatcgacaagatcaagtcaacggtcaacgagaaccctccatcggacggctcaaaaccattctcaacatttcaggctctttcctcccacgtttggcgccatgtaagccatgcacgtaacttgaagccggaggattataccgtgttcaccgtctttgccgattgccggaagcgggtggacccgccaatgccggagacttatttcggaaacttaattcaggctatttttaccg

SEQ ID NO: 17368 - DNA, 260 bp, Glycine max
  Clone ID: 700960163H1
caaaaatcatgcatacaatttctagcttttagatataacgaattatttggtagccacgtagctaagaattaatcaaacccgaaattacataaaagctaaaaaatcatgcatacaatttctagagggttgtggctttttcagacaatagtagcagaaacaagtgcctctgagatgcattttctttgagatgcattttatatttttagtgcatagcttgctcaaaagtatggaagctaaattggattatcattttctcagct

SEQ ID NO: 17369 - DNA, 262 bp, Glycine max
  Clone ID: 700960164H1
agggcagcacgcttgtccgggagcagagtagatgccatggaagaactggatagcgaagataaacgagtcttgagtcgaatcaagtgctggtttctatcacactcgcaacatctgaatttctttactattctagtgcttgcttcggttccaaatcctctatttgaccttgctggcattatgtgtggacaatttggcattccattttggaaattttttcttgcaaccttgattggaaaggcaatcattaaaactcacatacaga

SEQ ID NO: 17370 - DNA, 263 bp, Glycine max
  Clone ID: 700960165H1
gaagcgacgcgtgcgcccgccgtccgtttgccgaccagcagtacgtcgcctcggccccccaaaggcacgtgccgttggtgaccctcgtgaggcggattagccctacgagacgccttgaagcgcaattcccatcgagcggcgggtagaatcctttcctgagccaataaaacaatctctctgtcttcccttgaagaaggagaaatggggggaaattaaaagggaaaaaggcatataaccggaaacaatcgcgtttcgaattcaaa

SEQ ID NO: 17371 - DNA, 260 bp, Glycine max
  Clone ID: 700960167H1
cagaacagcaagggagaatcaattcctcatcgctgcaattcttctttcactctctagtttctcttctttctttcttccaacctcttctcttctatacccttcagaaaagaaattaaaaaacgtagcttcagattattctagctcttcatttttccatgtccaatattatgctgtaaatttctcaaactcactgtttcagccacattttggtctaaagatccgtgctttgacccttggcaggttcagcttttgaaggggtt

SEQ ID NO: 17372 - DNA, 267 bp, Glycine max
  unsure (1)..(267): unsure at all n locations
  Clone ID: 700960137H1
ttctaaagctagtaagtagtaagtagtaagccactatcgtttctctctaacagcaaaaaagttctaacctcaccaaacccacactaccatgggtagagagaatcgcgagcttcacgtattattcttccccttcccagctaatgggcacataataccaagcattgacttagccagagtctttgcttcaagaggaatcaaaaccaccgtagtcaccactcccctcaacgttccacacaactcaagaacgatangaaaagccaacatcat

SEQ ID NO: 17373 - DNA, 286 bp, Glycine max
  Clone ID: 700960102H1
attcggctcgagcacgtttcctttttatctctatctttcttcacatcttaaccttgttcttaccagatggctgcctcagttaaactcttatttttgtcctttctctcgttgttcatctctttctccatagctcaaacctctttcagaccaaaggcacttgttcttcctgtaaccaaagatgtttctgcctcagttcctcagtatgtcacacaaatcaaacaaagaaccccacttgtggcagtgaaactaactgttgatcttggtggtggctacttgtgggtgaatt

SEQ ID NO: 17374 - DNA, 271 bp, Glycine max
  Clone ID: 700960106H1
cgaattgtgagagcgtgtgctttttgcgttctctctctaaatccaacgtttggagtgtttctctctcactcctctctgcaagatccgcaccccaaaccctagcaaacccctaccacagagggagctgtgaagaacaacaacacgcaccgtcaccaccaccctcgctcgcttcttctgatccagttggactagcttttggaaacaattacaatggcaacttcagagcagcaagtccctccccaaactcctgcagctgatattgttggcaatg

SEQ ID NO: 17375 - DNA, 271 bp, Glycine max
  Clone ID: 700960107H1
atcgaactcgccaggaacggaactttctcagattgacacacaccatgaaggaaagtggtttcgagaataatgatacaaagcaagctgctgctgatgtgttgtttctatattcaaaatttgcaatggcatgcattggatgtaaggctcgtccatgtgatttgaggtttcatttgatgaaggagatttcaggtatgccctcttctctaaatagggagtcaccacagaatgcagcatctcctgatgcaatgggtgagtcatccagcacaggaac

SEQ ID NO: 17376 - DNA, 267 bp, Glycine max
  Clone ID: 700960110H1
aaaaaatgaacacttactaaggtctgggcaactgggaatgtgcaatgatccttattgtactacttgccctacctacttcaatgcttctcagcaaagaaatccaaaaccttcgactagatgggatccaaagttccataatgctctttatggggatgccaagagttttgtgagaaaacttctttctttctgctattcgtatgttcctggagttatgaaccctcatgctaaagtcgtacaaaaatggaacaaatttttggccattttttg

SEQ ID NO: 17377 - DNA, 268 bp, Glycine max
  Clone ID: 700960111H1
aaaatctggctcggacattgcagtttaaggaaacctggcatgggagttattactgtttctacctcagctgctaggactccattaagattgaatacaaggttgatcagtcatcagcaggtgcataaacgacccataattttagcttttaaaggaaataaatcgaataaaaccactttggtttcacctcaggagaaaattcctctacccctagaaacagcgaagaaacaccagaaaagagtaggaaagactagtgagtcactgaagagag

SEQ ID NO: 17378 - DNA, 276 bp, Glycine max
  Clone ID: 700960112H1
ttcggctcgatgtccatatcgcggttgatagcatagcatcggtcactaatggaagccttatctgttgtacctgtgcgcgcccctattataaatggagctttctgcattttctagctatctaagcagtttctgatgcttccttgttcccattttcttcgaatcaactttggtgccgatgctctcttcctcttcgtcgccgcgattatggtctctgttggagtcccaagtcaaaaccgtgttttcggatcagaatgtgctcggagaaagcttcgtcgt

SEQ ID NO: 17379 - DNA, 265 bp, Glycine max
  Clone ID: 700960114H1
caacactaaaatggcacttccatacccattttcctacctcctcttcctccttctaattctcttatcttctctcccaaacatttcccaagccacctctcgtgccccaaatcgcatgttagccttggttcaaaaccaaccgcttgtactaaaataccacaagggtcctcttctaaagggcaacatcaccctccatttgctatggtacggtacatttacccccacgcaacgatcaatagtcatcgatttccttgaatccctaacctcc

SEQ ID NO: 17380 - DNA, 104 bp, Glycine max
  Clone ID: 700960115H1
cagattcctcaattcactcacaaataatattccattctccattttccaggaatatgcatttcttgctctgtgctctttcctttactttatactatttatttcat

SEQ ID NO: 17381 - DNA, 269 bp, Glycine max
  Clone ID: 700960116H1
caaatccaattaatctctatagctcatagcaaattcagagcaacaacaattcagaaaatagccaaaaaatcaaccaaagaacatcgttgacgttaatggctcaaagggtttagagaagcctctgtggtatgcgaagacataaacgtacgccgagatgatttttccacagtgattgtgaatcacattcacggcgagatcaaggtgggagaggaaggtgtgaagggagggattgcggtcgccgctagcaacccagtcgggggtggagttga

SEQ ID NO: 17382 - DNA, 272 bp, Glycine max
  Clone ID: 700960117H1
ctttcaccacttgaagattctccttttcaaatttcaacctttttcccccaaaactaacaaacccctcttcttctcaatcattgcatggctcttcactgattctataataataatttcagattcgtttttcgttttttgttaccatggagttgatttcaggtctaccagaggacgtagcccgagactgtttgattagggttccctatgatcaattcccggcggttgcttcagtctgcaaaggctggagcgcggagattcactcgccggacttt

SEQ ID NO: 17383 - DNA, 270 bp, Glycine max
  Clone ID: 700960118H1
tggccgtgggacttcctaaacgtgctcctatagactccaacctactgaagttgctcattccggtggctgtgtgccatgcattaggccacgtgaccagcaatgtctcatttgctgcagttgctgtttctttcactcataccattaaagctcttgagccattcttcaatgctgctgcttcacagttcatacttggccaatcaatccccatcactttgtggctgtcactggctcctgttgttattggtgtgtccatggcatctttgaccgagc

SEQ ID NO: 17384 - DNA, 268 bp, Glycine max
  Clone ID: 700960119H1
aaaacgacacaatttttttctcctctctctctaaattcaattatggcgtttaagaaaacgctagcccagcggcttctcaacatcacaaaaatctccaattaccgcatttcctcctccgtagtccgttccccgaacccgacaaaacctgacattgctccggatcccggagacagccgcaggttcctccacaagagggcctccgtgctcccgccggagctccgcccgccgctgcccgccggcagcctcctccagaggctccgggaaatgg

SEQ ID NO: 17385 - DNA, 269 bp, Glycine max
  Clone ID: 700960120H1
catcatcatcacgtgcgtgcgattaatcgaaacgaaagtacaaaattgcaaactccctgttcaagtttgaggtcttactcagcttccaattcttacactgttatggattcttcttcttcttctacccagtttgaaaattttgtagcttccttggttgctcatgtaagtcacatataggagcaatttgtaactgaggttaccgagaattatgagacaacatgctggggttgtggactgcgtgttttgcttccatcatgtgcatctgcttt

SEQ ID NO: 17386 - DNA, 269 bp, Glycine max
  Clone ID: 700960121H1
gagaaggaaaagcacatgacgataaatttctaagggatgctgtgttcaatctatttgtggctggaagagataccataacttcagctctcacgtggttcttttggcttgttgctacaaacccctcagttgaagccaagattctcgaagagatgaaagagaagcttgggaccaaagaaaagtcgcttggggttttaagcgtggaggaagtgaaaaggctggtttatctgcatggtgctatatgtgaagcgttgcgtctctttcctcctata

SEQ ID NO: 17387 - DNA, 267 bp, Glycine max
  Clone ID: 700960122H1
caaaagagcaagctcatttcttagcacgagctgtgattgatgatgtattggctcctctgaatttagaggaaattagcagcaagttgcctccaaaatgcagtggtagtgaaactgtacggatggctagatcacttgttgctgctcgtcatgctggtgagagactattgagatgttgacgtggtgggactggatgggctgttgaagatgccaaggacaaaatcatgaagctcttggaggagtacgagagtggaggtgttgtgagtgaag

SEQ ID NO: 17388 - DNA, 268 bp, Glycine max
  Clone ID: 700960123H1
gttttgtttcaggagccacccgctcctgcagttttcttttgcagttggagtggaaggccattctcgcaacgtttgagttcagcagatccagaatttttcagaaaacaggtttaggagaatgaagaatacggaacgaattgccaatttggctttagcaggtttaaccttagcgcctcttgttgtgaaagtagatccgaatttaaatgttattttgactgcttccctcactgtgtttgtgggctgttaccgctccgttaaaccaacccca

SEQ ID NO: 17389 - DNA, 268 bp, Glycine max
  Clone ID: 700960125H1
agagttggggcgttgcctcaaatatttgatgaacctttttctccatcaccagcactgaaagaaaaagctcaagtcacagatttaaactctgtaagcttatcagagccaccagtattgagccaaggctcaaccgagcaattagcactgaaaaacaaggctcccagatggcatgagcagctacagtgctggtgtctaaacttcaagggtcgcgtttcagtggcttctgttaagaactttcaacttgtagctgctgttgatccatctcata

SEQ ID NO: 17390 - DNA, 261 bp, Glycine max
  Clone ID: 700960129H1
gaagaaaactaagattgattcttctacattattgtcagagaatatcttggagctgacaatagagcatgtgctcaactgtttagaaaaactatttggagctggtggcatcatgaaaaatcatgatggggattcatgtaatttgcagcctaccaatagaacaaatcaaaatcaaaattccagacaaaggccgagattatctcctacagatgcatgtcgccctagtaaccgtggatctacatacagtgaagccttacaagtata

SEQ ID NO: 17391 - DNA, 263 bp, Glycine max
  Clone ID: 700960130H1
cggtagcagagaaagagaaaatgaagaagtcttcgggaagcgcactgacaagaagagggtgcgacggtcctccgccctagatcccacctccgacgcccctccaaggaaacaagctgtcaagaaagatgtgttccgggtgtttgctgagaaggttagagaccataaagaattggtttcaagatgggctgttctacaggagacgcgtgttgagtattttagagggaaggatttcgtgagcttcttaaaaagccatccggagctca

SEQ ID NO: 17392 - DNA, 264 bp, Glycine max
  Clone ID: 700960131H1
ctttcatcgattctctcccttctctttctctctgcgacaccagatgatggtgacgacggcgaacgaaacgctgtcgttgcgccaatcgcggcgttgttgttggtggtgctactcgcggcgagtgtggtggtggaggctcaggagaactcggacgtgaagacgctggtgaagcacatgcacgggaagaagtactgcgacaaaggatgggaatgtaagggctggtcaatttactgttgtaacctcactattactgattatttccag

SEQ ID NO: 17393 - DNA, 268 bp, Glycine max
  Clone ID: 700960132H1
aaggaacagcggtgggtgagtgagagagggaggaaacatggctacggcgtcggcgtcggcgtcgtgggaggaactgacgctgaaagtgaaatggagcggcaacgaatacaccgtccgcgtctgctgcgacgacaccgtgggcgaactcaaacgtcgaatctgcgagctaaccaacgtcttaccccttcgccagaagctcttgtaccctaaactcgcttccaaactcagcgacgaccctctcttcctctcccagcttcccctcaactcc

SEQ ID NO: 17394 - DNA, 138 bp, Glycine max
  Clone ID: 700960133H1
gtgatttaagagtgatcaataaggaaccctcggaaataccagggaaagtttgttattattactagtttcacttgtggatttatcgtagcataatgttgtacaagaataatttaatatgaacaagatcgtgtgtttgtt

SEQ ID NO: 17395 - DNA, 268 bp, Glycine max
  Clone ID: 700960134H1
gtggagttagaacaatcttttatggaaggggcttacaatcgtgtcttgagtgcacggcagacagtgccacatgatacatacgtttatttcatggatcttttggcaaagactgtcagagatgaaatagcaggttgcagtgagaaggcctatgactatctttcaattaaggatgccaagcaaatgttgctgttctcctcagaccaggaactcctggaatatattaaagaggagcatcctgagtgggagattaagaatgatagtgtctttt

SEQ ID NO: 17396 - DNA, 265 bp, Glycine max
  Clone ID: 700960136H1
cttggtgaatgcatggtggctggccaacaaccctgcacactggaagaagccagaggagttccggcctgagaggttcttcgaggaggagtcgcttgttgaagccaatggcaatgactttaggtaccttccctttggtgttggcagaagaagctgccctggaatcattcttgcattgccaattcttggcatcactttgggacgtttggtccaaaactttgagctcttgcctccccctggccagtcacagattgacactagtgagaaa

SEQ ID NO: 17397 - DNA, 151 bp, Glycine max
  Clone ID: 700960093H1
ctctgtcacaagtctcaaaactctgttcttgggttgtctgattctctctgaaccacacagcgtgaccggcgatcttaatctcgccggaaaattgccctacgctcgccggaatctccaacttttccgatttgaactccgaattagattctgt

SEQ ID NO: 17398 - DNA, 251 bp, Glycine max
  Clone ID: 700960046H1
ctgtcctcacttctgtcagttgcatctgcagcaacagaggagggacgaacaaggccattcaaaagggtctatgcctttggagactctttcacagacactggcaacacccaaaatgcagaaggtccaagtggctttggccatgtttcaaactctccctatggaaccactttctttaaccactccaccaataggtactcagatggtaggcttgtgattgattttgtggctgaagcactttcactgccttactt

SEQ ID NO: 17399 - DNA, 205 bp, Glycine max
  Clone ID: 700960048H1
gtcacatataacccatgccacacaacatagaagttaggagactgaagtgattggctttctcttcccctacaacacaagacactgccattcagaaattaagtatctagcaattccacccatgtcttccttttcggcaaccttctacagggacaaattgtattttaggtactgaaaaaagtttgtgttttatgtagttctccattgg

SEQ ID NO: 17400 - DNA, 247 bp, Glycine max
  Clone ID: 700960050H1
gcctgtggattcacctcaacaacctatgacccttgtgtggatatttcacttaacttggataccaatgtctcttcaacagaaaagggtaaaaaacttaccaaacaaaatgaggatggcagtatgtctacactttttggttgtttagatttattcacaaggccagagacagttggggtcagaccagaaactttactgccggaattgtcgggaaaggcaggactcgttgaagcaaatgtctattagaaag

SEQ ID NO: 17401 - DNA, 244 bp, Glycine max
  Clone ID: 700960053H1
tctatctctcttttccttctcctaaccctctttcctattaagaggagaaggaataacaaaaacaatatacacaatggctttcgctttcactttcaccaaaaccctaattctcttcgtctccctctcctccctcctcctccaaacccacgcggcccgcggcccccgcaccgtccaggcccgcctctacagcctctgcaagcccaccaccaatgttgggctgtgctacaggaccatcctgccggag

SEQ ID NO: 17402 - DNA, 243 bp, Glycine max
  Clone ID: 700960055H1
caacagcacaaagcgggttactgtctgttcaagctaccatctctctctctctttcttagtgcctccttgccagaagttaaaatggcccaagaaactttcctattcacatctgaatcagtgaacgaggggcaccctgacaagctctgtgaccagatctccgatgctgtgctcgatgcatgcttggagcaggaccctgacagcaaggttgcctgtgaaacctgcaccaagaccaacatggtgatg

SEQ ID NO: 17403 - DNA, 241 bp, Glycine max
  Clone ID: 700960057H1
cagaagaagaagaagaagatggagaagtatcagatctggagcaggagaatagcgttggcagcgtttgcgtttgctctgctgttccaatcggcctcagcagacgacgtcgttgtgctctctgaagataagttcgagaaggaagttggtcaggacagaggagctctcgttgagttctatgctccttggtgtggacactgcaaaaagcttgctccagaatatgaaaagcttggtagcagcttca

SEQ ID NO: 17404 - DNA, 246 bp, Glycine max
  Clone ID: 700960058H1
cttcaattcttcttctcatcatttcttttcacacaaaaaggtaccacaggaagggagaatgggactgttgtttcttgttgtattaggtgctgcttgggcatgtgatgcaagggaactggctaactctgaaacttctgaactaagcataaaaccggatgtgtgtgcactttgtgaggaatatattaccaaggcacttgattatctacatgaaaacaagactgagacagagatcattagtatcctgca

SEQ ID NO: 17405 - DNA, 250 bp, Glycine max
  Clone ID: 700960063H1
tttcattttccctcactttctcgctcgccaaacgcccctctctctcctccaatggccgaccagctcaccgacgaccagatcgccgagttcaaggaggccttcagcctcttcgacaaggacggcgatggttgtattactactaaggaacttgggactgtgatgcggtcactagggcaaaacccaactgaggcagaactgcaggatatgactaatgaggttgatgctgatggcaatggaaccatcgacttcc

SEQ ID NO: 17406 - DNA, 248 bp, Glycine max
  Clone ID: 700960064H1
atctccagtgaacttcagttggctgggcctgaatacggacatttgcaggggttttcttctcttccaccagcttttgaatacacaaatttagttctgagctgttagacaagttgtctttgcatcctctcagccaagatatgacaacactgaagacacctactgttactgtggataactcactgagcccagttcataccctgcttcagatacaatgcgttgatcagaagggcttgtgttatgacattatg

SEQ ID NO: 17407 - DNA, 245 bp, Glycine max
  Clone ID: 700960066H1
agcaagtggacttgggcgttgcaagataaataatggaggctgttggcatgatgctcaaaatggacatgcattttctgcttgtttggataatggaggggtcaaatgccagtgtcccacagggtttagaggtgatggtgtaaaaaattgtcaagatatagatgaatgcaaagagaagaaggcttgtcagtgccctgactgtagctgcaagaatacttggggaagctatgactgcagttgtagtggag

SEQ ID NO: 17408 - DNA, 202 bp, Glycine max
  Clone ID: 700960068H1
cacaccaggcgcacgttagcacaaactatcatggccacggcaacagcagctgccacctcgtcctttatggggacgcgtctcctggaggctcactccggagcggggcgagtgcacgcccgattcggcttcggcaagaaaaaggctcccgccccaaagaaagcctccaggggatcgggccgagacaccgacagacccctttggt

SEQ ID NO: 17409 - DNA, 201 bp, Glycine max
  Clone ID: 700960069H1
accaactaacacaaaacctgaatcaatattctcaactagatatcatggtctcttctatttcctctctttctctccttctcccttctctcacaaccctcattctcctccaaattcaaacatgtgtctcttcatcacaaacacaaaaacccctcctactacctctcaaaacacaaacacaaacacctccacgcaagcttgcat

SEQ ID NO: 17410 - DNA, 242 bp, Glycine max
  Clone ID: 700960071H1
ccttttaattcaaccgcagcaatctccgtctctgccccacggcttacgttgagcgaggtagtggttagcattatatattttgggaacttgcagtatgtctcgtggatctgtgaatcggaaacatgttacacgtaaagatgttaagcgggtgcaggctcttattgagcactgtctgacacaaaatatgaataaggaagaagctgttgagttaataagtcaagtagaaatagagcctaatttca

SEQ ID NO: 17411 - DNA, 170 bp, Glycine max
  Clone ID: 700960072H1
cgattctcttagatcgaatttggcataacccacttcgtatctgattgaagcacccactgggttctgtctgagattcaacataagaacagatggagtcggatcttggcaagctcttcattgggggaatctcctgggacaccgatgacgaacgtctcaaagaatattttggg

SEQ ID NO: 17412 - DNA, 241 bp, Glycine max
  Clone ID: 700960074H1
agcgatggctgatgtttcagattcacgagaacaccccgttcttggttcagcgcaactgttggtggagctggaatctgcgctgggcggtgagaaaacggtgacggcgcaggcttcttcttcttccttaggcttggggattgaggttatcgacgaaacggcgttgctagactccgttgcgaagaagaacggaggaaccaagaacaatcaccagaagtctcagccctcaaataagattgggaac

SEQ ID NO: 17413 - DNA, 244 bp, Glycine max
  Clone ID: 700960076H1
gaaagtagcaaagatgtttcctttcgggcaaaagggtcaaaagataaaggggactatggtggttatgcagaagaatgtgttggatatcaacagcatcaccagtgttggagggatcgttgaccaaggcttaggcttcataggcagtgcagtcgatgcacttacttttgcagccaccaaaatctccatccagttgattagtgctaccaaggctgatggtgggaaaggataaattggaaagagtaca

SEQ ID NO: 17414 - DNA, 136 bp, Glycine max
  Clone ID: 700960077H1
gaagaaaccaacacccgtaaaggccaacaaagaacaaggaactccaaaattgttagtgacaaagtcattaccatcatctttatctaatcgagttttaaggactacaaaggtgaatcagtcgtcattggcaccaagc

SEQ ID NO: 17415 - DNA, 246 bp, Glycine max
  Clone ID: 700960078H1
ggacagtgtagtgtagtgccattgagaagcattaatgatactagttagccatatccaagctccttgcgtaggagccatgttttcaaagtgttgttctctattgtctctacccaaattgcatcactgttacaaacccaccaacgttttccaaccctgtacctaatttcatcactagaagaataagctccacaagaccctttcatctcacactcgccaaagcagagggaaacctcgattcagattcac

SEQ ID NO: 17416 - DNA, 119 bp, Glycine max
  Clone ID: 700960079H1
aaaatcttctctcttccctaggaaggttgaatgatttggaaaaatgggttctggcaatgtgaagccagaagaagaagccctagaaaaggagaatgtaggtgttcctgtccctgaaattt

SEQ ID NO: 17417 - DNA, 247 bp, Glycine max
  Clone ID: 700960080H1
gtcataactcgtaagataacaaagctcatcgaatcgaagtccttcattttcattctcttccttgtcactgatcgtcatgtacagagttgcagcatcatcattcagaaggcatctcaagggccatggaggtaacttgggatccactaggttttcaacttcagccgcggtagctgcaaggacttcatcaggtggtttgtttagctggcttactggagagcgttctagtgctcttcctcctctggacatg

SEQ ID NO: 17418 - DNA, 240 bp, Glycine max
  Clone ID: 700960081H1
cagttctactctacgctctaaaccctctctctctctctctctcgatctatcatggctttgcccaatcagcaaaccgtggattaccctagtttcaaactcgtcatcgtcggtgacggcggtacaggaaagacaacgttcgtgaaaaggcatcttaccggtgaattcgagaaaaaatacgaaccgaccattggagtggaggttcacccattggatttcttcacaaactgcggaaagattcgc

SEQ ID NO: 17419 - DNA, 240 bp, Glycine max
  Clone ID: 700960082H1
ggctcacggatcagattctcgccattgctcccggcgacgaggacgcgctccgatgcaaggtcgtcgcgctgataaaaaatgaccgcgtcgaggacacactctccgccattcggtcctctaagaagcagctcgatgattttcatttcctcaaggcatactaaacaaacagacaaaacaagttggatgaagctttggagtctttgaaaagacaagagagcaatgatgaaacaatgcttttgg

SEQ ID NO: 17420 - DNA, 98 bp, Glycine max
  Clone ID: 700960083H1
attcccttcgaatcaaagcaaaacttagcagtttgggttttggtcaccctctgagacacaacctcacctttctgacatatccgtcacaccaatcttcc

SEQ ID NO: 17421 - DNA, 94 bp, Glycine max
  Clone ID: 700960086H1
cggatcgacgatgaagacgaccttctgatccgtcaagtggtgccggatgcggaggaccaccacctgctcaacgcggagcaccacttctccgcct

SEQ ID NO: 17422 - DNA, 240 bp, Glycine max
  Clone ID: 700960087H1
tagggttatcatttctccatttccattttctctctcacttttcaagaatcgtaagctatgggaaagtcttacccaactgtgagtgctgattaccagaaggccgttgagaaggcgaagaagaagctcagaggcttcatcgctgagaagagatgcgctcctctaatgctccgtttggcatggcactctgctggaacctttgacaagggcacgaagaccggtggacccttcggaaccatcaag

SEQ ID NO: 17423 - DNA, 167 bp, Glycine max
  Clone ID: 700960088H1
acttatcaggtcctgtgactccagttaccggtggcatgtcacaagccgcaagtggtactaataatgatccaacaactacaacagtagataatggcactacttgggactttccatctacttcagtagggcagacaactgcatcacccaacaatactagtgtttggtca

SEQ ID NO: 17424 - DNA, 82 bp, Glycine max
  Clone ID: 700960090H1
atcggtgttcacatgatctcatcagaatcgtcagcgtcaattgaagaagatgccgctcagaaacatcgccgtcggaaggcct

SEQ ID NO: 17425 - DNA, 248 bp, Glycine max
  Clone ID: 700960044H1
aaagcttcagcaaacatgctagggaacttgttactcgccttcagaagattgacggtgacaactatccagagaccttgaatcgcatgttcatcatcaatgcaggttctggatttaggatactgtggaacaccgtaaaatcattccttgatcctaagaccacggcaaaaatcaatgttcttggcaacaagtatgacaccaaattgctagaaataattgatgcaagtgagttgcctgaatttttaggaggc

SEQ ID NO: 17426 - DNA, 241 bp, Glycine max
  Clone ID: 700960091H1
ttctcatcctcctctgtctctctctctccaccattgccatggattcttacaagctccggccatccagcgccttcaattctcccttctggactacaaattctggtgctcctgtttggaacaacaactcctctttaaccgttggagctagaggtccaattctgcttgaggattatcatcttgtggagaagcttgcaaactttgacagggaacgtatcccagaacgtgttgtccatgccagggg

SEQ ID NO: 17427 - DNA, 242 bp, Glycine max
  Clone ID: 700960092H1
cccttatctacctgccacaactgactcacttgctctcgcaactgaggccaaagacccatctgaggccatctccattctttatcgggtgcttgatgatccttcttcttcaccagatgctctgcgtatgaaagagcaagcaatcacaaacctcactaagcttctcactgatgagaataggggagaggatctgcgcaccttcttactcagttgaggccattcttctccttgatacctaaggcaaa

SEQ ID NO: 17428 - DNA, 103 bp, Glycine max
  Clone ID: 700960011H1
cgaggaacttatcttgagctccacaggatagctttcagagatatatgttcattcgctacctacttccactaaagggacttgagctggccaatactgcactttg

SEQ ID NO: 17429 - DNA, 251 bp, Glycine max
  Clone ID: 700960012H1
cggctgcatggtgggatgctgacttgcctaactacacgcccgtgttgtacaaacccgaggaccctaaagggttgaggtttacggtgcttaagccaagccaaattgcgagaatgtaccactccacttccacggtgcttcccagtggaaagatttgggtttctggaagcaacacccacaatacctatagggacgtggataagttcccaactgagacaagagttgaagctttctctcctccttatttggacgcc

SEQ ID NO: 17430 - DNA, 253 bp, Glycine max
  Clone ID: 700960013H1
catcaccaccttgcaataataataataatcatcatagttattattatggttcttcagctcttgcacctcttgcaccaccaccacaacatgtttatgatcaaacaccaccaccacaacaacaacccttgctatcatcatcagcacaagaagaagggtttccaaatctaatgcagtacgcgcacttctttggagtagggatgatgatgatctacagcgtattgcttcaggccttcatcaacatcatcatcacaat

SEQ ID NO: 17431 - DNA, 251 bp, Glycine max
  Clone ID: 700960014H1
caaagttagaaacaaggagaaagaaagaagatggcaggaaagaaaatcccagatgtgttgctgaattcaggacacaaaatgccagttataggcatgggaacttcagtggagaatcgtccatcaaatgagacccttgcttctatctatgttgaagccattgaggtgggttaccgtcattttgacactgctgcagtgtatggaacagaggaagccataggcctagccgtggccaaagccatagacaaaggcct

SEQ ID NO: 17432 - DNA, 252 bp, Glycine max
  Clone ID: 700960017H1
agataagaagcagagtggtaaacaaagagaaacaacaaaacccagaatctagagactaataacggctcttgctttgtgaatagcataccatagcaacaacaacaacacagaacacacaaagaaaaaaggtttcattggatcgtaactggggggcacttgtccaaattggaaaattcccgagtgattagggttttgatcggagggtgtgattgaaaggaagactgtgcttgttcattctctccgtgggggttg

SEQ ID NO: 17433 - DNA, 251 bp, Glycine max
  Clone ID: 700960018H1
cgcgcggattcaaaccttaattcttctattactctctttctctcatgcgttcttgctctcaacaacaatcacacaccgccatcgatgccttcgttcttttcttcttcgttctcctttttgctctcgttcgagggttctttcgtggggaacactgcagatttcaccacccgggtcttattcatccgtgcccatgtccaaagttctcggcttttccggagttgacgatctttgccctatgggatcaatatacg

SEQ ID NO: 17434 - DNA, 249 bp, Glycine max
  Clone ID: 700960020H1
caagaaaaaagatggcgaataacgagaaagacgcatgttcttccttcaccgatttcccagaggacattcaggtgtgcatcctctcgttcctgggcccaccggagatcgcaaccctagcctgcacttcgaagcgaatgggctctctctgcgccaccgactccaagctctggttctctatgtgcgagcgcaggtggggctcctacacccgcatcacccagtgggcccaaggaaaaaaccccactctctcct

SEQ ID NO: 17435 - DNA, 248 bp, Glycine max
  Clone ID: 700960021H1
ccagagcgaatatgtgtccgcacgagacaagcgccgcgaattcgtttccggcttcactggaagtgccggcttggcacttataacaaagaatgaagcactgctgtggacggatggacgatattttttgcaggctgagcaagaacttagtgctcagtggaagcttatgcgtattggtgaagatcctgctgtagatatctggatggccgataatttgccaaaagaggcatccattggggttgacccttggt

SEQ ID NO: 17436 - DNA, 247 bp, Glycine max
  Clone ID: 700960023H1
gccatttgggagttaggttctgcacgctctgcttccagcgagtgttctttcttcgtttcaacaccttaatttgcacacgctgcttcttcagcttgagaaatggcacaagaaacctttctattcacatctgaatctgtaaacgagggtcaccccgacaagctgtgcgaccagatctctgatgcagtgctcgatgcgtgccttgaacaggaccctgacagcaaggttgcctgtgagacatgcaccaaga

SEQ ID NO: 17437 - DNA, 249 bp, Glycine max
  Clone ID: 700960024H1
ttcccaaggccttgagaaatatgttcaagtgcacatttggtgaatattcagaaagggaagggtacaatggatctgaatatgctccaacttatgaagacaaggatggggattggatgctggttggagatgttccatggaacatgtttgtgtcatcctgcaagagactgagaattatgaaagcatcagaagcaaaggggttgggttgtttttgaccaaaataaaaaaacaaagcaggaccatcatgcatgc

SEQ ID NO: 17438 - DNA, 239 bp, Glycine max
  Clone ID: 700960025H1
aggaaagagagattcaaaaactgtggccaagaaggttctgattgaacagttgacatctaatccttggaacaatttgcttttcatgatttactacggattagttgttgaaggccaaccttgggtgaatgtgaaagctaaagttaagaaggattatccatcagtgcagtatacatcatggacggtctggcctgttgtggggtggataaatcacaaattcatgcctcttcatttccgtgttg

SEQ ID NO: 17439 - DNA, 249 bp, Glycine max
  Clone ID: 700960027H1
attactaatacctacagaagtctgggctcttttgaggagttcgtgttatccacttctgggtctcggagtttgccggctggggatccattctcatacacaaatgatttgcatgcaagagtttcttttactgatgatagctcccttggaaaagtgaaatatactgtaacttgctactatgcaaagagatttgaggctttaagaagaacttgttgcccttctgagttagattttgtgcggtcccttagtcgt

SEQ ID NO: 17440 - DNA, 114 bp, Glycine max
  Clone ID: 700960028H1
cttgttggtcttgtaaggcttgtcaatatatactacttatatatatatatatatataaacataaggaaattgttcgtgttttgtatgagaatactttttaagtcatctgtactc

SEQ ID NO: 17441 - DNA, 249 bp, Glycine max
  Clone ID: 700960029H1
tgatccgtggctctggttctggctctggctctgccctttttggttttctctcgttaccgaaaccagaagaaccatttgtggtggatatggatctggaccagtggatctccaaggtcaaagatggccagcatcttcttgaagacgagcttcaacttctctgcgaatttgtaaaagagatccttattgaggagtccaatgtgcagcctgtcaatagtccagtgactgtttgtggtgatattcatggtcaat

SEQ ID NO: 17442 - DNA, 252 bp, Glycine max
  Clone ID: 700960030H1
gtttttgaaatgttgtcaccccttcttctatttctatgcctaactcttcctttgtttttgttgtccttcttcaaataccgtaaaaccttcaagaatccaccacttccaccaggtcctagagacattcccataatagggaatcttcatcaactagatagtccttctcttcatgagcagctatggcatctctcaaagaaatatggtcctttattttcccttcaatttggattaaggccagccatagttgtttcc

SEQ ID NO: 17443 - DNA, 82 bp, Glycine max
  Clone ID: 700960031H1
aaaacagcatgcatctggcaagaaatttcaggagattcttgaagaagcaatagttcgcccccttcatattgaaggcgagtta

SEQ ID NO: 17444 - DNA, 254 bp, Glycine max
  Clone ID: 700960032H1
gagataactagaaacagtgtgatgaaaatgaaggtccttgttttcttcgttgctacaattttggtagcatggcaatgccatgcgtacgatatgttccctctccgaatgaacactggctatggtgcccgtactccggaggtgaaatgcgcaagttggaggcttgctgtggaaacacacaacatctttggctttgagaccaatcctgaagagtgcgttgaagcaacaaaggaatacatccatggcgaacaatatag

SEQ ID NO: 17445 - DNA, 249 bp, Glycine max
  Clone ID: 700960033H1
aagacaccaatcttctctccacgcccttcttgggtaaccgtctgaagtgcagcaatggcagatggattgcattcgcagcatccatcggtagttcagaagttatctggacagtcttatcttgtgtccaggcttgctcctaatcactccagaaactgttctaccactggtagttacttcaatggaggtttgcagtcttcaggtttggttccagtcacggcacacgcgccggctgagaaaggggtgtctgga

SEQ ID NO: 17446 - DNA, 249 bp, Glycine max
  Clone ID: 700960034H1
ataagagtgtctctgataatttgatctttgtttcttctctttctctcctttgagatttttcagcaccccaccaaggttttgtccgaaaagcttgaatttttcgcctaccctttacaatgatctcttcattgagacaacctgttgtagggatcagtggttctgatcttcttttgaggcaaagacatgcaaccctaattaaggcaaggtcctttttaccctctttgtcaagagaaaagggtcaaagatctc

SEQ ID NO: 17447 - DNA, 249 bp, Glycine max
  Clone ID: 700960035H1
atttttggtgcatgatcgtttagggtttgtgcttgttgttgccgccttagtgacaataatcgcgccaactcttgtatgatccatcactcagatccttccaattccgctgtctcgctttgaccgccgccacaccaaactagcatgttcttcagtgtttccctttcagatatttgatgcttggaaacgtagggaaagttgcccaatctattcttagaacccatagaagaagatatttggtcgcaagtagaa

SEQ ID NO: 17448 - DNA, 243 bp, Glycine max
  Clone ID: 700960036H1
cccactttaaagagttgatcctagagcatgcacctccacctccagcaatagcagagtatgctactgctaatttaattaagatgggtttcccacaacgatcagctgagggttctgtcgcaatatgcacatgtcatgaagaggccaagaccggagggggatacacttgtccaagatgcaaagttcgtgtctgtgagcttcccactgaatgtcgtgtgtgtggattgacccttatttcttcacccc

SEQ ID NO: 17449 - DNA, 247 bp, Glycine max
  Clone ID: 700960037H1
aaaaacttaaatcaaaatacttaatagcatggcgatacatttatacaaaacttctaccccaagcacacgcaatggagccgtagacagtcaagtaaaatccaatccacgaaatcatttgatctatggacagcatcgttgtggtaaaggccgtaatgccagaggaatcattaccgcagggcatagagggggaggtcataagcgtctataccgtaaaattgattttcgacggaatgaaaaaaacatatat

SEQ ID NO: 17450 - DNA, 130 bp, Glycine max
  Clone ID: 700960038H1
gttccaacatctatctcacttcttagttctttgtggctctttccatgatggcctctcctacatctccaagagttctcttcttgagtctctttgtaactctttccatgagtttacatttgagttcagccag

SEQ ID NO: 17451 - DNA, 246 bp, Glycine max
  Clone ID: 700960039H1
agatcccaaaaccaaaaggtggagggcgtgggcgagggatatctatcttcattttcgtcgtcgttcatttttttatttttattttctgttttccattcgcttcttctctcagaaaagctcgccaatcgatcttgctctcttctacgcttttcgaattccttccattccattatggacgcagattagattcacgttcacattcacttctcttcgtttgcttcaaccactctgctctgctctgctcta

SEQ ID NO: 17452 - DNA, 245 bp, Glycine max
  Clone ID: 700960040H1
caactagagaaaaaaaaaaagagaagaaaaaaaaacttggttttatcttctttgttattattatattcacttcttcaatatcttggttctttgatattattattcgattgagcaaaaaatgggagttccagagagagaccctcttgcacaattgagcttgcctcctggatttagattttatcccactgatgaggagcttttggttcagtacctttgccgcaaggttgctggccatcatttctctc

SEQ ID NO: 17453 - DNA, 242 bp, Glycine max
  Clone ID: 700960041H1
acttctcggtggagggataagagctgaagagatcaaagaactttgggcagagtatgaaaacaattcttctttagaggcaaatcttgtaaaggattttgacaaggttgagatgattctgcaagcgctggaatatgaaacagaacatggaaaagtgttggatgaattcttcctttcaactgcagggaagtttcaaactgaaatcggaaaaagttgggcggctgagatcatttcaagaagaaaat

SEQ ID NO: 17454 - DNA, 87 bp, Glycine max
  Clone ID: 700960042H1
tgctttggtgtttgcgttaattggggcgttgtggaacttgcagagggcagagggtatccgatttgtgatagacagagacgagtgttt

SEQ ID NO: 17455 - DNA, 247 bp, Glycine max
  Clone ID: 700960010H1
ccaggattgatcataagtttgacctcatgtatgcgaagagggccttcgtgcactggtatgtgggtgaaggtatggaagagggtgagttctcagaggctcgtgaggaccttgctgctcttgagaaggattatgaggaggttggtgccgagtctggtgatggagatgatgatggtgaaggagatgatgattattagagtgtctgaaatatcgtgtgtttgatgtctactttttcgtcttctgtcggaca

SEQ ID NO: 17456 - DNA, 251 bp, Glycine max
  Clone ID: 700959968H1
gtttgttgttgttgttggaagccaaaaccctagcagccggcgagaatggcagacgttgaggttgatgtggcggcggcggcggcggcggcggctgcagggcagccaaagaagagaacgttcaagaagttcagcttcaggggggtggatctggacgcgcttctggacatgtccactgacgaactcgtgaagatgttcagtgctcgcgcacgcagaaggttccagagaggtctcaccagaaagcccatggcctt

SEQ ID NO: 17457 - DNA, 248 bp, Glycine max
  Clone ID: 700959969H1
catgatgcttgtgaagaatcctgcacttttcgatgtactagtgatgcctaacctttatggtgatattatcagtgacctttgtgctggcttgattggaggattgggcttaacaccaagctgcaacattggtgagggcggtattgcacttgctgaggctgtacatggttcagcacctgatattgctggaaagaatttggctaatccaactgctttactgctgagtggtgttacaatgttgcgccatttgg

SEQ ID NO: 17458 - DNA, 246 bp, Glycine max
  Clone ID: 700959970H1
caagattcagcaagtgcgttttggaagcagagaccgaaatacttcgagatggcccgtacaaagcaaactgctcgtaagtcaactggaggaaaagctcccaggaagcagcttgcaaccaaggctgcacgtaagtctgcaccaacaactggtggtgtgaagaagcctcatcgttatcgccctggaactgttgctcttcgtgagattaggaaataccagaagagcactgagctcctaatcaggaagctt

SEQ ID NO: 17459 - DNA, 248 bp, Glycine max
  Clone ID: 700959971H1
atacactacaatggaaacatgaaaccgtggcttgagataagttttcccaagttccgaggttattggacaaagtatgttgactatgatcttgtgtatttgcgagaatgcaacatcaatccataatagatggatctcgtggcatgtgtagggcttgtaatttatattaaagcattatgacaatttttttatagattttcaaagtcaggttttaatttgggcatctctgtacttgtaaatgaaatgtgtct

SEQ ID NO: 17460 - DNA, 245 bp, Glycine max
  Clone ID: 700959972H1
gggactgtaactagccgcagcacgaggagcagcctcaggaggagaaggatgtctcacaggaagttcgagcacccaaggcacggttcactgggatttcttcccaggaagcgtgctgctcgtcacaggggaaaagtgaaggcattccccaaggatgacccatccaaggcacccaagctcactgcattcttgggttacaaggccggtatgactcacattgttagagaggtcgagaagccaggatcaaa

SEQ ID NO: 17461 - DNA, 253 bp, Glycine max
  Clone ID: 700959974H1
ccttatgctggcacattggaggaatggacagtggttcaacctgctcaaattgtgactgcagttgagcaactctgcaagtgattgctacaaaacactagcaattaggatatggtttttggtaaagctattgtgcttgtcaaattaagcttgaattttcatcatgactttcttttccttttatttctgaagtctatagcccgtaactttaaattgttgtttaatttctgataatctttgcaattttttttaaaga

SEQ ID NO: 17462 - DNA, 254 bp, Glycine max
  Clone ID: 700959977H1
atggacttgaaatatgggatgctattaagacatgggttcatgaatatgtctccttgtattacccaacagatgcagcagttcaacaagatactgaactacaagcatggtggaaggaagctgtggagaagggtcatggtgacttaaaagaaaagccttggtggcctaaaatgcagacaactgaagatctcattcaatcatgctctattatcgtttggacagcttcggctctccatgctgctgttaattttggacaa

SEQ ID NO: 17463 - DNA, 253 bp, Glycine max
  Clone ID: 700959978H1
ggcgctgcttcctctgttcactcttctgtttcctccgtcaactccgttaacagcagcagttaccgttccacaagccgtataagacaaaaagatctgatcccctccgacgccgtctacgacctccgctgcatcgccgagcgcatgctctcctccggctacctccgcgagtgcatccaggtctacggcagcgttcgaaaatcctccgtcgacgcgagcttccgcaagctccacatcgcaaagctcagcatcggag

SEQ ID NO: 17464 - DNA, 252 bp, Glycine max
  Clone ID: 700959981H1
ctgaatctctgaaagattacgaggaggattttgaaaatcctgaaaagaagcccagaaggaacaagtacgctttcgcatgtgctattttggcttcaatgacttccatcctactaggttaccatattggagtgatgagtggagcagcactgtacatacaaagagatctcaaggtatcggacgtgcaaattgatatcctgatcggtatcataaacctctactctcccgtcggttctttcatcgccggcagaactc

SEQ ID NO: 17465 - DNA, 251 bp, Glycine max
  Clone ID: 700959982H1
taaaccgtttcctctgatcgtgtcagaaatataaaagtttatttcctctgatcgtgtggtttctgagttctaagcactcacctctttcatacacgtttgttcgcttgttgagaagccatgggcgaggatttcgagttcccaagtgctggcaacatggaaatgcctgaggaggaagagtttgagagtccgatcctgaaggttggggaggagaaggagcttgggaaaatggggctgaagaagaaattgctcaa

SEQ ID NO: 17466 - DNA, 247 bp, Glycine max
  Clone ID: 700959983H1
tggagaagcatggagcaaagcttctgatggcccctatgcatgttaatcatgcacgtgaagtcccagagtatgaaatcaatcctaaagagcttgattttaccaacagtgtggagataacaaaggggactttctgtattgcactgtggcgtggaacagaggttgcagtaaaaaagcttggggaggatgtaattagtgatgaggagaaagtgaaggctttcagagatgagcttgctctgttccagaaaat

SEQ ID NO: 17467 - DNA, 93 bp, Glycine max
  Clone ID: 700959984H1
cagcaattgcatagcccttgcatctacagttaacggggcttgttgcccaagttgcaatcatccagctgagtgaactgtacagacttaaagcgc

SEQ ID NO: 17468 - DNA, 246 bp, Glycine max
  Clone ID: 700959985H1
gagagctacgccatgcccacaaaacaatggcagaagcatttcccaaccaagcacattacatgctgaccgatgattcgcagggtgttgaatcacacactccaggagtgccttgtccaaattattccgagtctgagcatgcagagaaagcagatagtgaagttcaaaccttgaggaaagccctggccaaaatacagtctgacaaggatgctatctttcttcagtatcagaagagtatggagaagttat

SEQ ID NO: 17469 - DNA, 95 bp, Glycine max
  Clone ID: 700959986H1
ggcaatttgacatgacaagttacatcatttgtactacaaatgctgtagcttgacgcgacatataggccaattgatgcttagaagttacaataagt

SEQ ID NO: 17470 - DNA, 246 bp, Glycine max
  Clone ID: 700959987H1
agcgactgttggagagtgtaaatgaacaattgactgagaaggatgtatacatatcataccttccacttgcacatatatttgatagggtcattgaggagacattcatatggcatggtgcttcaataggtttctggcgtggggatgtcaaattgttaattgaagatgttggcgaactaaaaccaactattttctgtgctgttccccgtgtgcttgatagagtgtactcaggtttgacgcagaagattt

SEQ ID NO: 17471 - DNA, 245 bp, Glycine max
  Clone ID: 700959988H1
gtgaaataataatgtaatacaaagataattttttaaatctttctctaatacttttattatttctgtttattatatgaaatagtaaatatcatctctgtttgagttatttctgttatatatttgaagaagtaaaaagacgagtatgatggtgtaaaacctaatctctgataatgggaagcgggaagtattagtggtgaggtttgagtccagtatgttctggaatgcgttggtaaatccgattcata

SEQ ID NO: 17472 - DNA, 250 bp, Glycine max
  Clone ID: 700959990H1
ccagataaaggatgaagtgaggactggcttgaatttcatcaattatgtctataagatatttggtttcacgtatgagctgaagctttcaacgaggccagagaaatacctaggagatattgcaacttgggacaaagctgaaagtgctcttaaagaagctttagatgattttggcaagccttggcagttgaatgaaggggatggtgcattctacggaccaaagatagacatcagtgtatctgatgcattgagt

SEQ ID NO: 17473 - DNA, 249 bp, Glycine max
  Clone ID: 700959991H1
gtgtattggtcactgatctatcttggaagagttttgaagtttaaaccttcaaacccttttgcctttagattctgattctgagtctctgctgctatatatggcgccacgcgtatttcttgtgttggggatgttgctgatggtgtgccttgttaaggtttcgtctgatccaaagagagaagaagaaatactggaagaagaactacattttcccgataacgagccacttattgtgagagacgggaacagaag

SEQ ID NO: 17474 - DNA, 253 bp, Glycine max
  Clone ID: 700959994H1
atacaagacaattctcttgttcatgttgccaagtctaatttgagtggaaaagtcttgccaactatcattggagataatgtcactgtaggtcatagtgctgtgttacaaggatgtacagttgaggatgaggcatttattggcatgggtgcaaccttgcttgatggtgtatatgttgagaaacatgccatggttgctgctggagctcttgtcaggcagaatacaaggatcccctatggagaggtttggggaggta

SEQ ID NO: 17475 - DNA, 259 bp, Glycine max
  Clone ID: 700959996H1
aaacattgtgacaacagtttcacctacttacgcccaagaagtgagaacttcagagggagggcatggtctccattcaacactctctgcccactccaaaaagttcattggtattcttaatggtattgatactgatgcatggaatcctgccaccgatgcatttcttccagtccagtacaatgcaactgatcttcaagggaaagcagagaataagcaagccttgagaaggaactaggtctttcatctacagatgttaggaggc

SEQ ID NO: 17476 - DNA, 256 bp, Glycine max
  Clone ID: 700960001H1
catggccacctctgctattcagcaatcagcattcgcaggtcaaactgctctgaagcagctcaatgagttggtccgcaagaccggtggcgccggcaaaggtcgcaccaacatgcgccgtaccgtcaagagtgctcctcagagcatttggtatggccctgatcgtcccaagtacctgggtccattctcagagcagattccgtcatacctgaccggagaattccccggtgactacggatgggacactgctggactatca

SEQ ID NO: 17477 - DNA, 268 bp, Glycine max
  Clone ID: 700960002H1
gtattcggctcgaggaaaaagcaaaaatcaatgctaggcagagcagagacaccaaccccaacttttcaaatcttcttttgcatcactaacttctttacagcataaagctaagcaaaaaagagactccctttgttatgcttgcccttctatttcaatttcaacgtgtaatcatggcttttgtaacctcaggtagacgaggatgagatttattggagacgcagaaaggaagatgaagagttggaatggacacctaattccactcacttaa

SEQ ID NO: 17478 - DNA, 251 bp, Glycine max
  Clone ID: 700960004H1
ccgcaatggagaagccatcgtcgtcgtcgtcgtcgcgaagaaaatcgagcacgaaggtgaaagcttcaaccgatgcgaacacgaacctgagcatgctcaacgaggaccttctccagaacattctagcgaggcttcctgctctgcatttcgcttccgcagcttgcgtcagcaaatcatggaactctctctgcaatcgcatcctcactcgccccaaactctcttccgcgatttctctcaacccttcgctcccc

SEQ ID NO: 17479 - DNA, 249 bp, Glycine max
  Clone ID: 700960005H1
gaaagtggtgttggctgagggagcagcggttaccgtcaaaggtgcaagatccgttagtcttcggcaacctcttgatttccctcttccgttaaaccgaacggagaatggttttgctaacggtcttttaactttggctgagcatcttcgccatgcttctagaacccagggttctccgattctctcgctgagaatcgttggtcccacatcgctcacagcagcgccttcttccgacataacaacctcaacctc

SEQ ID NO: 17480 - DNA, 249 bp, Glycine max
  Clone ID: 700960006H1
ggagatttttaattgtgagaaaatgaaggatgatgctacatctgctcttgattccttatatgatgaaatacggcctgccattgaagaacacgagagggatagccaagacagtgtatccacgactgtagcagagaagtggatacaggcttgctgcctgaaattaaaggcggagtttgacctttactcatccattgtcaaaaatgttgcttgcactgcgcaaagggcatctggccaagtaaaacctactga

SEQ ID NO: 17481 - DNA, 249 bp, Glycine max
  Clone ID: 700960007H1
accatattggtttcactttggtcttcttcaccctgttagggtttgcatcagattcccccaattcttgtttgattttgcgctttcactagtttttcttcgacatgactcaagatctcgagatgagggatcgctcaacgccttccaactctgtttctttgcctgctccatctactttgcagcatttgaaggagatagcgtctcttatcgagaccggttcgtactcgaaggaagttcgtagaattgctcgcg

SEQ ID NO: 17482 - DNA, 252 bp, Glycine max
  Clone ID: 700959967H1
tatgtaggggtttctttgtttgcagcccttggctttcttctctacggtggaagactattcttgatgctgcaacgctttcctgtggaatccaaaggtcgacgcaagaagctacaagaggttggctatgtgactaccatatgcttttcatgcttccttatcagatgtgttatgatgtgctttaatgcatttgataaagccgccgaccttgatgtcttggaccatcccattctgaattttatatattacctgttt

SEQ ID NO: 17483 - DNA, 254 bp, Glycine max
  Clone ID: 700959938H1
cctttctagtttctactatctgcttcttcttcttcaattagggttttccccttctccgagatcagcgccaacatcatgaacatgaatatcttcaagaagaaaacctcacccaaagaggctctgcggtcaagtaagagggaaatggctgttgcaaccagaggaattgaaagagagatagcatcacttcagatggaggaaaaaaaattggtggcagagattaaaagagaagcaaaaacaggaaatgaggctgccac

SEQ ID NO: 17484 - DNA, 249 bp, Glycine max
  Clone ID: 700959939H1
ctggttatttatttatcctaaacccaggctggaagaaacaagctaggtttaggataaataaataaccaggctttgagtaacatgatgatcatttattatgtttattaattgttgcagaagataggagtcgactgagtgtagctttaatctagctagtttgatttggcttgtagtgcctctttgtgttagcctttgtatgggatgtaaaacagtgtcctcttgaaggacagtaaaaaaatagttgttctc

SEQ ID NO: 17485 - DNA, 255 bp, Glycine max
  Clone ID: 700959942H1
ctttctggctgtgttaatatgcgtttcagcactgtcactgagtccttctgttgcgggggaagggcaaaataatggccttgttatgaacttctacaaggaatcatgccctcaggctgaagacatcatcacagaacaagtcaagcttctctacaagcgccacaagaacactgctttctcctggctcaggaacatcttccatgactgtgctgttcagagttgtgatgcttcactgttgctggactccacaagaaggag

SEQ ID NO: 17486 - DNA, 257 bp, Glycine max
  Clone ID: 700959944H1
acagttcctataattttttttctccattagattaccaagctctgcaactttgcttctcaacatggagtatcgtctcctacccatttttactttactcaatattgcactggtggcaacccatgctgctttaccccctgaagtttactggaagtcggtgcttcctactacgccaatgccaaaagccatcactgatatcctttactctgattgggtggaagagaaaagcagctcagtgcatgttggaggtggaggcgtga

SEQ ID NO: 17487 - DNA, 260 bp, Glycine max
  Clone ID: 700959945H1
ctgcgtccatggagttttggggtgttgaggtgaaaagtggagaatctctcaaggttgatccgggagatgacaagattatccacctttcaaatgcatgcctgggggatgtcactaaggataaagaaggtctaccagtagccctgtatgtcaagtttggtaaccaaaagcttgtacttggaacgcgttcttctgaagcttttcctcagatatcttatgatttggtatttgagaaggaatttgagctatcccataactggaaa

SEQ ID NO: 17488 - DNA, 256 bp, Glycine max
  Clone ID: 700959946H1
gccgtaggttcaggcttggggcaagagttgtggacaactttgatggtgttagaataagagaagcaaagacagaatcattcattgtcagtgatcacagaggagaattgtacaagaagcaccatcctcctggtctgtctgatgaagtttggagattggaaaaaataggcaaggatggagctttccacaagcgcttgagtcgggaaaagatcgttactgttagagagtttctcacacttctgaatctggatccagcaaa

SEQ ID NO: 17489 - DNA, 250 bp, Glycine max
  Clone ID: 700959947H1
actggttatttatttatcctaaacccaggctggaagaaacaagctaggtttaggataaataaataaccaggctttgagtaacatgatgatcatttattatgtttattaattgttgcagaagataggagtagtctgagtgtagctttaatctagctagtttgatttggcttgtagtgcctctttgtgttagcctttgtatgggatgtaaaacagtgtcctcttgaaggaaagaaaaaaaatagttgttctc

SEQ ID NO: 17490 - DNA, 258 bp, Glycine max
  Clone ID: 700959949H1
cacaattttcagttccatgtcttcccatgattttcaccctttttctctctctcactttctgtggacttttctgtggtttccttttcagtgaaataaaaaaaaaaccactctggcttattactgtctatatagattcttctgaatccagttctttctaaaccaaaccaaaaaaacattccctctccaaccaagttttgttttttttttttttccatgtaaaatttaaaatcgaaaccgcaatttaaacccttggtgttt

SEQ ID NO: 17491 - DNA, 254 bp, Glycine max
  Clone ID: 700959950H1
attcttttctacaattattgtaatctacccaatattttagtgtttcgacatattccccatcaattcaataacttgccgtgtaaattgatccattctaaacaatatctcccttcttagccaaaaagatcaaagtttcgttatttatagccaaaggctttctgggtcgttgtgagtcttgtgtttgagagattaagacctttttgcattgcaaatggctgctgcaactgctggagttgttggtggaaatggttcgt

SEQ ID NO: 17492 - DNA, 253 bp, Glycine max
  Clone ID: 700959951H1
caaggtcactgccgttttgcaacaagcttctagccatggcttaactgttgctagaacttgggctttcagtgatggaggttatagagcccttcaggtttctcctggttcctacgacgagaaagtattcaggggattggactttgtagtatcagaagcgggaaaatatggggtgcgtttgatactgagcttggtgaacaactggaaagattttggtggcaaaaatcagtacgtacagtgggtgaaggaacatgga

SEQ ID NO: 17493 - DNA, 251 bp, Glycine max
  Clone ID: 700959953H1
ctttaaagtctggttctgcagttggaccttggaactacaccaatgctgaatcgttaatacgatacacagtcagaaagaagtacaccattcatggttgggaacttggtaatgaattgtgtggaaatggaataggagcaagtgttgcagcagatcaatatgcttttgatgtaggtgctttaagaaacatagttgaaaatgcatatagagggtttgaacataataagccactagtcattgcacctggaggcttc

SEQ ID NO: 17494 - DNA, 251 bp, Glycine max
  Clone ID: 700959954H1
tggaagattaatctccctttcattttctctgcatctgtactctcctgaatgccgtccttagaggaggagctcttcccttcaaccccaggcaagttcaagatcgagcgggcccaccacatgaaccgccagctctaccgctgcttcgcctccaccagcaccatgttcctgtgggccctctctttaatcgccctcaccgcttcatatctcagcttccaaggcttcgttgattccggcagccgctacctctccgc

SEQ ID NO: 17495 - DNA, 251 bp, Glycine max
  Clone ID: 700959955H1
ggttttcaggaggaattgagatttatctttcagtgcttaccagaaaatcgacaaaacctgttcttttctgcaacaactacaagtaatctgcaaaagttgcgtgggcgttaccaagataagatgtatgtctatgaggcttatgaaggctttaaaacagttgaaacacttaagcaacaggctatattcatccctaaaaaggtgaaggatgtatatttgatgcatattttggataaaatggaagatatgggaat

SEQ ID NO: 17496 - DNA, 248 bp, Glycine max
  Clone ID: 700959956H1
ctggaattgaggtctattttgatatgatgagaagctttcggacagagtttgatgacctgtttgcagaaggtttgatttctgctgtggaggttggacttggagcatctggagagctaaaatatccttctttctcagaaagaatgggatggaggtatcctggtatcggtgagtttcagtgctatgataaatacctgcagcatagtctgcgcagagcagccaaattacgtggtcactctttctgggctaga

SEQ ID NO: 17497 - DNA, 255 bp, Glycine max
  Clone ID: 700959957H1
cagcagttgtcaaggcagatgcaaaaaccatccggtttagagaaaaagtcttaaagaagggtgggatctggaaagatatttatggaactgatgaaaagaaggttgctgacatggttagacaagatcaagttgatattttaatagaacttactggtcacactgcaaacaataagctgggaatgctggcatgccgacctgctccagttcaggtgacttggattggttatcccaatacaacaggattgcctacaattg

SEQ ID NO: 17498 - DNA, 256 bp, Glycine max
  Clone ID: 700959958H1
atggaattctgttggtcaacaaatgtcaccaaatatggttgcgtgcattgcagtagaggcaatatcaattcttgagaagctccacttgaaagggtttgtgcatggagatgtgaaacctgaaaactttttgcttggtcaacctggatcagctgaagataagaagttatatcttattgatcttggtctggcttctagatggaaggatgcatcatctggtctacatgttgattatgatcagagacctgatatattcagg

SEQ ID NO: 17499 - DNA, 255 bp, Glycine max
  Clone ID: 700959959H1
gcacaccacacaacataaaaaacaaaaagaacaactgttactcacacacgccatgggtaaatgaaaagtttttgagactcagcagttaaaagagaaaagggattcagcgaagatgacatcggttggtgtggcaccaacttcgggtttgagagaagccagtgggcatggagcagcagctgcggatagattgccagaggagatgaacgatatgaaaattagggatgatagagaaatggaagccacagttgttgatgg

SEQ ID NO: 17500 - DNA, 258 bp, Glycine max
  Clone ID: 700959960H1
atttttcagtttctcagtttcttattcgttaatcgttagatctcatcttacactcaccggcgagtccatctcgcgccaccgtcgactcagctccggccatcgccgttggttccctcactttctcactcttcttcttcttcttcttcttcttcttcttcttcttcttctcagcggaaatatgccttctcagaaggttgaaacgggtcatcaagacacggtccatgatgttgcaatggattactatggtaagaggctggc

SEQ ID NO: 17501 - DNA, 253 bp, Glycine max
  Clone ID: 700959961H1
gaaggcacaaaaaatggcactgctttctttaagtgccatggacatgagcaatttgagatgacgggtttggatcctgagtataataggttgttcaatgagggcatggtgtgcactgctagggttgtgtccaaggctgtgatcactggctacaaagatgggttcaaccagattaagtccttggttgatgttggaggtggcattggagggtctctttcggagattgttagggcttatcctcatatcaatgccatca

SEQ ID NO: 17502 - DNA, 100 bp, Glycine max
  Clone ID: 700959962H1
gccgcccttttataatttttatttttttaatatctttaataaagataacggaaaaaaacaacaaagggaaacccccccccctctcccccttcgggggaaa

SEQ ID NO: 17503 - DNA, 291 bp, Glycine max
  Clone ID: 700959963H1
tacgtaaactcaggctcggactccagctcgagcactttttttcttccaacgctcctcctcctactcatagccttcgccacctctgtctccggccgccgtgacctcgtcggagactttctccggctgacctccgaaactgataacgacgacaacttcaagggcacccggtgggccgtcctcctcgccggttccaatggttactggaattacagacatcaggctgatgtttgtcacgcctatcaaatattgaggaaaggtggtctgaaagaagaaaatattattgtttttatg

SEQ ID NO: 17504 - DNA, 265 bp, Glycine max
  Clone ID: 700959964H1
taaaattcctaatcagaaaaaaaaaaccctagtaatgccgccgatggggaggaagcgaaaggtagcacccaaatcttctctatccaccgagccacctctcaagcagcaacaaccaaaacccgaaaatccccctcaagaatacgaagaagtcgaagaggaagttgaggaagaagaggtagaggaagaggtcgacagaggaagaagaagaagaagaggaggacgaggaagaagaggaggaggaagatgatgaagaagtagtaaacga

SEQ ID NO: 17505 - DNA, 256 bp, Glycine max
  Clone ID: 700959965H1
acaaaaacaaagaaaaaaaaaaacccttagccaacacaaccatcatggccacctctgctattcagcaatcagcattcactggtcaaactgctctgaagcagctcaatgagttcgtccgcaagaccggtggcgccggcaaaggtcgcactaacatgcgccgcaccgtcaagagtgctcctcagagcatttggtatggccctgaccgtcccaagtacttgggtccattctcggagcagattccatcatacctgaccgg

SEQ ID NO: 17506 - DNA, 254 bp, Glycine max
  Clone ID: 700959966H1
tttctccagaacagcaagggagaatcaattcctcatcgttgcaatttttctttcactctctagattctcatctttcctctcttctaccccttcagaaaaaaccatgtcttcatattatatgtatatctagctcttcattttttcttgctcaagattatgctgtaaaattctgaaactcacagtttcagccacattttagacttaaagatctgcgcgttgacccttggcaggttcagcttttggagttgttcatc

SEQ ID NO: 17507 - DNA, 254 bp, Glycine max
  Clone ID: 700959937H1
gtgaggacacgacaatcaagaggtggaggatttcagactccaaatgcttggaatcaatccacgcccacgacgacgccgtgaacgccgtcgtgtgcggggacaggggcgtgatattatccggctcggcggacggcaccgtcaaagtgtagcagcgggagcccgaagggcaaggcctgacgcacgtgccgatgaagactctgctgaagcaggagtgcgcggtgacagcgctggcgatggacgcggcggaggggtcc

SEQ ID NO: 17508 - DNA, 258 bp, Glycine max
  Clone ID: 700959907H1
gaaagacgaaaggtttcatcgatctctgttgaacttcaaacactgaggaagaagagccacaaaattcttccttctgcagggtgcaaggtactgcttcaatgggaaattgctggggtcctccacctcacaaccccaccccaacaactaccggtaaccttagtagtagtacaggtacaacggggacatctcaggcgatcagcagcatcagctatactactactacgactactaattcctctggaagtgggagcagctcca

SEQ ID NO: 17509 - DNA, 255 bp, Glycine max
  Clone ID: 700959908H1
ccacgttcaagctcttcttgtgcagcttgcaagttcttgaagagaaggtgcatacccaattgcatatttgcaccttactttcgctctgacgagtgcaagaaattcgccaaggtgcacaaggtgttcggggcaagcaatgtgagcaagatcctcgttgaggttcctgaggaacagagagaggatacggtgaattcgcttgcttatgaggcggaagcacggcttcgggacccggtttatggatgcattggtgccata

SEQ ID NO: 17510 - DNA, 258 bp, Glycine max
  Clone ID: 700959909H1
ctctgtggacatggtgctatcaccaccctctgctattggccaatgtccttttcttcttcaatgtcaatttcctcttctggctcatcggcctaatccaatccagccactggatgattgacccgtattggacagtgatacctgtgatgcttgttcattactgttcaactcaccctttggcacagtatcagtggtggaggtcgaggatcgtaacgttgttgacttgggcgtggagtgttaggctgatccacaactacttca

SEQ ID NO: 17511 - DNA, 249 bp, Glycine max
  Clone ID: 700959911H1
tacactcattaattgcaagaatggcacttcgttgcttggtgatgtccctttctgttctcttcactcttggtcttgcgagagaaagccatgccagaaacgaagatttttggcatgctgtttggccaaacactcccattccaagttcattgcaagaacttctaaagcctggccctgcaagtattgaaatcgatgatcaccctatgtaaattgaagaaacacagtacccgaaaaccttcttctataaagaag

SEQ ID NO: 17512 - DNA, 249 bp, Glycine max
  Clone ID: 700959912H1
attgtgtttgtgagtgtgctataaatccttcgtggtttttggtgacactttgggttctatagtgagtgcaaggtaacccactttggattggaaggttgtcgcaatggggaaggttgtgttgttgtttctttgcatggtgttggtggtggtgtctttggcttgtgctgattcaattgagaagcttgaggttcagaagcacttgaagaacttgaatagacctcctgttaggtccatcaagagtcctgatgg

SEQ ID NO: 17513 - DNA, 251 bp, Glycine max
  Clone ID: 700959913H1
gaatagtcagcgatggcacagaagagattcatcatcgaggtcgagaaggcgaaggaggcgagcgaaggaaggccttcgagaggacctgtctatcgtagcctcttcgccaaggatggattccctgctcctatccaaggtctcaatagttgctgggacgtttttcgattgtctgttgagaaatatccatcaaatccaatgcttggtcgccgggaaattgtggatgggaagccgggcaagtacaagtggctaac

SEQ ID NO: 17514 - DNA, 261 bp, Glycine max
  Clone ID: 700959915H1
cggtgattcatttgggggaggaggatggaaagacagtgaataactttctggaaatggataggggggaaggagtgaatgatggtttttctggacctggaccaaatgattcacttattcctggtcttattgatgatgtagccttgaattgtcttgcttgggttagtggatctgattatgccgtgctatcgtgtattaataaaaggttcaataaactgatcaatagtgggtatctatatgggttgaggaaacaattgggggctg

SEQ ID NO: 17515 - DNA, 269 bp, Glycine max
  Clone ID: 700959916H1
aagttaatgccagagacagccaattcttcagcaaagtcacccctctcaacaacaacattaaagagactgaggttcccaaaaatgaaggccaagtaaacaagccagaacaacaaccagttttcaccccagaaacagaaaacagctatggtctatatggtcatgagactggtctgcaccctcccaccactacaataactaatgctgctccctacaccaccgccaccacctacaagccatacaaaactaccacagctgaagaggacactgcc

SEQ ID NO: 17516 - DNA, 257 bp, Glycine max
  Clone ID: 700959917H1
cttttcccccaggtaagatgcctaatatttacaacgctctgatagttaagggtcgagatactgttggtcaacaaattaatgtgacttgtgaagtacagcaattattaggaaataatcgaattagagctgtagctatgagtgcgacagaaggtctaatgagaggaatggaagtgattgacacaggagctgccctaagtgttccagtaggtggagcaactctaggacgaattttcaacgtgcttggagagcccactgat

SEQ ID NO: 17517 - DNA, 258 bp, Glycine max
  Clone ID: 700959918H1
ataatttcaaaagtctagttcaattgcaggggatagagaagaacctgaacagaaattgtaccagagcactgtactttccagacttgtgcttctttccacaatatgcgttgagatacatatcaacaccatattttatcttgaactctgcctatgatgtattccagcagttcactcatatattggtgccaccctctgctgatatgcgcggacactggaaacactgcaaggcaaacctggcagagtgtacaacagaacaaa

SEQ ID NO: 17518 - DNA, 256 bp, Glycine max
  Clone ID: 700959919H1
ctctttgacacctaaaatccttaaatgacaccacttttgtcttagcctcgtcttctcaacactctctctgctctctcaggttgcctgcccttgctatttggagaacacaaatcaggggtttcctttctagttaaacatgataaaacggtttccaagtaggaacaataggtccaaaggcatcaaggtaaagcatgttctgcaaattgttctgttgcttggtgtttgcttctggttgatctaccaggttaagcacaat

SEQ ID NO: 17519 - DNA, 106 bp, Glycine max
  Clone ID: 700959920H1
caatttccccccttcgttcttcagctcatgacgacgtcgttcggaggaccagccaccacctcagcgccgctcaaggacaccaagcttcagatcccaagcttccatt

SEQ ID NO: 17520 - DNA, 248 bp, Glycine max
  Clone ID: 700959921H1
attttatacctatcctcttgtatagattagataaccacgggtttatcttacaatagttgtaaagtatctatatattatagcatgtatctcagaacagttctttgtgtgataaaaaaaaaaaaaaaaaaaaaaaaaaaaaaaaaaaaaaaaaaagggggccccactaaaattggcctttccccccgggatttattttccggagggaacacttagagctacaatatttccccaaaggggaaccatttaac

SEQ ID NO: 17521 - DNA, 254 bp, Glycine max
  Clone ID: 700959922H1
agggactagggattgtttcacagaacacctctgaacttcaaatcccttttttttgtttgatattaatctatggtaggatatagaatctgaagctgaaaaaaggggttaattgttttgcagaatcagtataattgtagagagcgagatggatcactatggttcttctggaggaagctggacaatgatcccaacccacaattcccaatcccaatcgaaccaggaccctaacctctttctgcaacaacaacaacatt

SEQ ID NO: 17522 - DNA, 256 bp, Glycine max
  Clone ID: 700959923H1
ctcaaacttgcaagggatattaactaccagtttccacagcttgccggtgttaatctatctgctttgattccgtctgctagtgatgatgcaatcagccttattacatcactttgctcctgggatccctgcaagaggccaacagcttcagaggctcttcaacatcctttcttccagagttgcttttacattcctccatcccttcgcaacagagcagtagcaagaactcctccacctgctggaaccagaggagcactgg

SEQ ID NO: 17523 - DNA, 255 bp, Glycine max
  Clone ID: 700959924H1
aacggcgtctacctccgtaacggcgccaacccattgttcaagccaaaagcgggccaccacctcttcgacggcgacggaatggtccacgccgttaaattcaatgacggcaccgccagctacgcgtgccgcttcaccgaaacgcagcgtctcatgcaggagcgcaaattgggaaaacctgtgtttcccaaggcaatcggcgaactccacggccattccggcatcgcgaggttgatgctgttctacgcaagaggcttg

SEQ ID NO: 17524 - DNA, 247 bp, Glycine max
  Clone ID: 700959925H1
gagtaaccaaaaggagagtgcaataactcgttgtacattcctagtgtgtgggagagacatggctaagatgtgtgttttggtgttggttcttgctctggctgtggccacaagtgccagaaacgttcccaaccccaaggatgctggtcttaaggaccagaagaacttcatcagctatggtggagttggtggttattccgggattgggaacaatggactgccttttggaggagctggtgccggaataggt

SEQ ID NO: 17525 - DNA, 113 bp, Glycine max
  Clone ID: 700959926H1
ttcggcttcgagccttatgctggcaccttggaggaatggacagtggttcaacctgctcaaattgtgactgcagttgagcaactctgcaagtgcttgctacaagacactagcaa

SEQ ID NO: 17526 - DNA, 251 bp, Glycine max
  Clone ID: 700959927H1
ctggtagttgatcctctggacaagggaatcccgtgggtttggctttgtgacaatggagactcttgaggaggctgaacgatgtgtaaagtatctgaatcgctctgtacttgaagggcgtgtcatcacggtggagaaggtataatacttacctagcaatgccctattttgtggggcctggacttttattagctatgatttttttattcaactccaatgcatggaaattatatgggggatttcttctttagttc

SEQ ID NO: 17527 - DNA, 251 bp, Glycine max
  Clone ID: 700959928H1
tggggactagacagtagaaacacaaagagaagacgagtcctcgagattcctaaaccaactttgcaatcgcacctcgaatcaatcgacactcagcggaaaccctagaaagtaataataataataataacaatagaatgcgaatttattagagattgcaaaaggtgggaagaggaatggcgaacattcggtggcaatggcgaagaagcggtggctgataatgttggcggcattcctgtccgtctcaacagtga

SEQ ID NO: 17528 - DNA, 262 bp, Glycine max
  Clone ID: 700959931H1
atttaggttggagagaagaaaagatgccgttgaaggtgttagaggcgacagtgtcgagtttcgatgtggtttttgagaagttccgatcagaggctccacaaaacaaggccaatctcatcctcttcttggcggacaatgacccggctacctctctcagctggtgccctgattgtgtgagagcagaacctgtgatatacaagaagctggaggcttcacctgatgacattgcactattgagagcttatgttggagatagaccaac

SEQ ID NO: 17529 - DNA, 279 bp, Glycine max
  Clone ID: 700959932H1
ttcggctcgagcattttctacattgcaacaccgcgatatgaacgatgcaaaatagtttcagatacgtcgcgttgattgattgatatgaagtggttgactttctggaactgcatatctatcctcgtgttgtcttttgctttcttcttcttctattgtcacacatacacatctactcctttcctcatggctgagcaatcttccaagtccatttacgatttcacagtcaaggttcgtttttttgcttctaaaattgttgcctgctcatacccaactgttgtt

SEQ ID NO: 17530 - DNA, 256 bp, Glycine max
  Clone ID: 700959934H1
attattttctgcgtcaattttgctgaaaaccttaagtgggtatcctgaaaacactagattttcgattcgtttggtaagcggatttttaggtttgattattacgtttttctgttcttgttggatatggaggtttcggtgattggaagctctcaagcgaatctgggagcgtcggaattggcatctagggaagttggattttgcaatcttaagaacaatttaagggctttgaatgatagagttagttttggtaggaata

SEQ ID NO: 17531 - DNA, 253 bp, Glycine max
  Clone ID: 700959935H1
acgagattgcaaaatgaagttcaacattgcaaatcccaccactgggtgccagaagaagctggaaatcgatgacgacctgaagcttcgggcattttgggacaagaggatctcccaggaggtccttggtgacgccctgggtgaggagtttaaaggatatgttttcaaaatcactggtgggtgtgacaaacaaggattcccaatgaagcagggagtgttgacccctggtcgtgttcgactcttgctccatagagga

SEQ ID NO: 17532 - DNA, 255 bp, Glycine max
  Clone ID: 700959936H1
gaaacggggaatcattgtctgcgtctgtaaattgtaaattgcatcatccctgaagctgaacctcaaaaccctagctgtccgcctgtctgcaacggcgtcgttatgatcagttgagaatccaaaggaatcgagtcgaatcatctgaccggcgacagttatgtacagagagcgaggaggcgtcggatccaaatcggaggtaacttccgttgatcggaagcgaatcaacgacgtcctcgataaacagcttgaacgttc

SEQ ID NO: 17533 - DNA, 258 bp, Glycine max
  Clone ID: 700959906H1
ggcacccagctcatttaaggtgcttcaacagcatcatctgcatcaatatcatcgtccttaattgtggagacacaacatcatggattctcctttgttgtcacaagaccatgttttgcccaacaaacacacatggaagatgagcctttgtgctatcgtggctatcacaattgttggactagtagtcagaggcaacactagctatggaatactgtccggagcagaaaaatataatgatggaatcgcaaccaatcagggaga

SEQ ID NO: 17534 - DNA, 249 bp, Glycine max
  Clone ID: 700959863H1
agaagaagaagaagagaaggtggtaccgccttcaattctctttttctctctccatttctcatcctcatcatcttattattcctcttccatctctattctccataacacccaccacaccacttgtgaaacccctcattaatatcacacactgacatgtatctctgagctccaatccaatacaagaccacaccttgtcgtgtcggacgaaccttggtgtctgttttttttttttttttccataatttcccc

SEQ ID NO: 17535 - DNA, 251 bp, Glycine max
  Clone ID: 700959864H1
aaatgatgataatgaatcctcaatgtttccttcttccaagggatttagatatatactaaatgagcagcaggaactgtctcaacagcaccttaatggcaatacttttgctgataaattaaggttttccaattcaacctacaggaatgagccatcttcagcaagcattttgaactcatcagcaaagccttgggataggcaaatcaggaatactgatttgcatgttagcagtggtcaagaggcacttgtttatg

SEQ ID NO: 17536 - DNA, 246 bp, Glycine max
  Clone ID: 700959866H1
caacaagggatttccatggaagtctcaaaagaagaagctcgagtggcacccgcaccggccctagtggcgatgctgccatcccctggcatgggccacctaatcccaatgatcgagttcgcaaagcgagtggtgtgctaccataacctggcggtgagcttcgtgatccccactgacggcccaccttcaaaagcccaaaaggcagttctggaggcccttccggactcaatttcccacaccttcctccct

SEQ ID NO: 17537 - DNA, 246 bp, Glycine max
  Clone ID: 700959867H1
ccttcttgtgctcatatcaaacccagaagaatttctacctcaattcgggcaatgggttcctccgcttcttcccactcccagtcacaatatgcagacagcgttgaatctgaagcaggagctgatactattgactataaatctttaaccgatgaagagtggaagaagcggctcacaaatgaacagttctatattactcgtcagaagggaactgaaagagctttcactggggagtactggaatactaaa

SEQ ID NO: 17538 - DNA, 243 bp, Glycine max
  Clone ID: 700959869H1
gaattatcgtgttttgatcagaatctgaggagaaaatcacataatttcgaatttgagttttcgtgtagaaaaaggaagagaagaaaatggaatcggaggatttggtcaaacaggaattggaggaattgcagaaacaattggggaagaagcaaaagtttgaagcttctgtttcgtctcttaaaacccttctccaacgcacttacccatcagcttccccggcgcttcgtaaatccttttattcag

SEQ ID NO: 17539 - DNA, 222 bp, Glycine max
  Clone ID: 700959871H1
cttggcaatcgttcttcgtatatatatcacatgtaatatgaggttccagcagtgcagcctccaagacttggtgagtgtcactgctgaagagagaaccacgcagaactgacgcaatgggaagcacaagtttgcttcatctattacttggtgttgttttggctctgctgagtgtgtctcttgtggaaggagaagatgcatacaaatactacacgtggactgtga

SEQ ID NO: 17540 - DNA, 241 bp, Glycine max
  Clone ID: 700959875H1
cggctcgagctattccctatatccgcttccaatttgttaattttcattctgatacgattctgggtatcgccaaatttctcgattttccgcatattttggatttagaggggtttgaagaaataaccgaactttggaaggaaaaacacaaccccatatgatgcaacgcttggttgatcatgttcttgctgttactaaagagtcattgaaggcaattacttatgagtccttaaatattgtgagg

SEQ ID NO: 17541 - DNA, 245 bp, Glycine max
  Clone ID: 700959879H1
gtaggaagggttgcacgtacatctgtcggcacccggatttggcgttgtaaaaccgcatccttgtttgtctgcagaagcatgggctcataacagattcaagaataataatacacgagaaagacaaatctatgcatgatgatctaatttcttatttccctctcctctgttcctttctctgcatgcatacacagcagcagcatttattactaacaacaatgactatcatatacgcacaatgaagcatt

SEQ ID NO: 17542 - DNA, 265 bp, Glycine max
  unsure (1)..(265): unsure at all n locations
  Clone ID: 700959881H1
cggaattcggctcgaggcgaagagtactgatcaaaagccaaacacaccaagatcaaaacactctgcaacagaacagcggagaaggagcaaaattaatgacagattccaaatgctaagagagcttattccacacagtgaccaaacacagggacaaagcatcttttttattggaggtcgttgagtatattcattttttacaagagaaggtgcacaagtatgaaggttcatttcaagggtggagntaacgagccagaaaaattgatgc

SEQ ID NO: 17543 - DNA, 246 bp, Glycine max
  Clone ID: 700959882H1
attggtataggcttgccaaggtcttgttgattgagcgttaagtgctttaactaatcaatcccaagaccttggtttaccttgccacacaaaaaaatatataaaaaggcaaaataataataaaaaaaagagaaggcttggagccaagaaaataaactcaaagcccaagctgatgaagcacaaaaaattgctcttgaggcctatgtcccagtgccagaagatgtcaccgacgaactcaatttccatgtt

SEQ ID NO: 17544 - DNA, 241 bp, Glycine max
  Clone ID: 700959883H1
atattctttcatcttcttgggttagggttctacacttgcaatctcctttcacacccacccacccttcaaccatttcaattccttccctcacccaaaccgcactatcgttcttcgacacggtcctgtttattaagcggtttggataaaagaatagaagcgtaaaatggccttcgtagcacatcaacctcagggtttgtttgtgacatcttcctcgaggcgtttgccatggagcaaaaggctg

SEQ ID NO: 17545 - DNA, 240 bp, Glycine max
  Clone ID: 700959884H1
acaagtttgtacaacaacaacaacaatttctcttcacaccatcttcctaatactcaaaatcacaaacacacccacaaatttttatttcccagtcttgatttggttcactacttcacttaagtcattagtccatagtccatagagtcattattattgttattgttattttattatttgttacttgttccttgatagtcactattattgttgcataaaatagagcaacatgaagaacagaac

SEQ ID NO: 17546 - DNA, 240 bp, Glycine max
  Clone ID: 700959885H1
ctcacgcatttcctcgtttttttcttcccttttctctttctccggcgacgatctcagattccggccactcctctcgccggcgagcccttactcttccctcctccgtcgagccctctccgattcgaatcgttcccagcctcgcaccaccatgaatcccgaatacgattatttgttcaagcttttgctgattggagattctggtgtaggcaagtcatgtcttctcctgaggtttgctgatga

SEQ ID NO: 17547 - DNA, 81 bp, Glycine max
  Clone ID: 700959886H1
tgaactttgcttatttattctctgagtgagactggtggcaacaatcaagaatggaagaagggaattgggttctcttcctaa

SEQ ID NO: 17548 - DNA, 239 bp, Glycine max
  Clone ID: 700959888H1
tgccaatcaggcatttgtgaatctagttcttactctctgtgatccgggtgattctgtggttatgtttgctccttactacttcaatgcgtacatgtccttccagatgactggcattaccaatattctagttggtcctggtagctcagacacactccatcctgatgcagattggttggaaagaatattatcagaaaataaaccggctccaaagcttgttactgttgtaaatccaggcaatc

SEQ ID NO: 17549 - DNA, 238 bp, Glycine max
  Clone ID: 700959890H1
ctaaactcatattccaaaacgcagagccaaaccatgtcgttccccttcaaccactctcacgccacccacacccaccaccgcaggacgacgacgacgacgaacgacccaccgtttacactccgccgggaaactccttcagcaacccgccacctccgttctacggcgtccctcaaccaccaccccctcagccggagacccacgtgttccattcgcctcacgtgacaccaggacacgtgtc

SEQ ID NO: 17550 - DNA, 241 bp, Glycine max
  Clone ID: 700959891H1
ctaaactcatattccaaaacgcagagccaaaccatgtcgttccccttcaaccactctcacgccacccacacccaccaccgcagggacgacgacgacgacgaacgacccaccgtttaccctccgccgggaaactccttcagcaacccgccacctccgttctacggcgtccctcaaccaccaccccctcagccggagacccacgtgttccattccgctcacgtgacaccaggacacgtgtccc

SEQ ID NO: 17551 - DNA, 239 bp, Glycine max
  Clone ID: 700959892H1
ttctctctctctctctcgtgttctgagctgctagaagcaatggagaggaaaagaagccatgcttctttcaccatgtttgcaatgcttgttggattgctctctcagagccttgtcattcctgtaatatccaccactgttgcagatcagaagaactactacaccccagatccacatgatggaagtccccccacaggctcacacaatagtagtcctccatctcatggccatgggagcactcc

SEQ ID NO: 17552 - DNA, 240 bp, Glycine max
  Clone ID: 700959893H1
ctggacaacacatatttccggacacggagagatcattcagttgggtgttatccatcaatcaatcataacagttgttgttgttgttgtggttgttgttgttgttggggatgggatcgtgcctctcggtgtcgggggcatcggcctccgtagatgcttttgatgaatcatcttccaattccagttccagaactgcctctgattataacatggaaatgcggctccacagagttcctggcagat

SEQ ID NO: 17553 - DNA, 244 bp, Glycine max
  Clone ID: 700959895H1
gaagaattcttcccacttcggctggagtattatgagagaagaaagaaacatatactgaacaaccttgaacaacttctgttgatattggacaacaaagttaggtttatattaggggttgtgaatggagaaattgtcgtgagcaacaggaaaaaggctgaattgttgattgagctgcagcagaaaggttttactcccatgccaaggaaaggtaaatctgcagaaccccaagttgctggggcaaatg

SEQ ID NO: 17554 - DNA, 266 bp, Glycine max
  Clone ID: 700959901H1
gaatatgccaattgatattgatttacaagcacctgtaagtccagaaaacaaggagtgttctccacccagaggagaatctgatgaaaaccagcttgagatgctcttgcaattggcagggcaggagcaggagcaggaacaggaacaggagcaggatctggaagaacaagaagaccaaaccggaattgcagctgaggctttggtttccatatcaaaaactgtggcctatgatgacctccaaatgacaacttgtccatcatctgaatctt

SEQ ID NO: 17555 - DNA, 264 bp, Glycine max
  Clone ID: 700959902H1
gtggcacaccagtcaaattcagcatacctgggataagccctggaatcatctttacaggtactccacttgaaatcgagttcgcagagaaaccttattgtgctgaatcctccaaatgggtggcgtttgtggcacaatgaaatccaaaaggcatgtgtgggtattggtggtcctgaaggtcatcctggtcaacaaacatttagtggcacatttagcattcagaaatataaatttggatacaaacttgtgttctgtatcactggctca

SEQ ID NO: 17556 - DNA, 230 bp, Glycine max
  Clone ID: 700959903H1
ggaaaacgtggagtagatgctagacagaatagagaagctggtggcaagttctcagaccgaaggaagaggcgtaaccctcttgagagcatacaacaataatggaagaggacacccacacaagatccccccaagccgagggcatggtggaacacagtgtcatgagcattgtggaacgtcaggctacaagtcgagtttacactgccgatgcgtattaacgacgaggacgagca

SEQ ID NO: 17557 - DNA, 261 bp, Glycine max
  Clone ID: 700959904H1
gcaaaaaaaaatctcaaaataaaacaaccaaaccacacacctcacaccctcttcaacatcctcagcaagaacaagaagaagaagaagaaacaatgtcttgctccaatctgacaatgttggtgtcctcaaaaccttccctttccgacccctcgaacctctccttccgctctgtcctgaacccttttcagctccctacacaaaacccagcttcatgcaccccttcacgctcctcaagcacccaaattcagtgtggtctgagag

SEQ ID NO: 17558 - DNA, 259 bp, Glycine max
  Clone ID: 700959905H1
tgatgttggaacggctgctcttatgggcctctttaactcaattgcttatggtctcaattcttctgttcgtagagcaatttgtgaaagactggacaagttctggcctgagagattaaacagatggctccctaacagtttaaagtacaagaacctacagcaagaaagtgaactagttttgttcaaaactgaagatcaataacagtgaatggacaaattgtgatcctccatgccaagtgacatttcttattctagtttacta

SEQ ID NO: 17559 - DNA, 243 bp, Glycine max
  Clone ID: 700959861H1
gttctagataagaatggaaggcgtcccttactccaattactacatcctaatagttcacgttatttcagtcctgatgatcttgcttctctgaatttatctataccttctctgtctctcaaggatcagtcagaagcaagctctctgacagaaacttcgaaggtttcacttggtgacaaggaatccaaggatgacatagagttggcattgaacgaagtaataaagataaaacttctgtggatgatt

SEQ ID NO: 17560 - DNA, 251 bp, Glycine max
  Clone ID: 700959820H1
gagagaacaaagcacttagtgctattcaataattacgaaaaaccaacagcgagtgttgtttttgtttggtccaggcaggaccagggaatgaatagagatgagaggctttcggttgaagagaactgagttaagcggcgaagccaaacgcagaatcggcggcagaaattgccaccggaagcacgtcgaagacaggtgaaccaaacacaaaattccatccaccacttctcttttcaatccccaactcaaatctg

SEQ ID NO: 17561 - DNA, 82 bp, Glycine max
  Clone ID: 700959824H1
aacagttactagcaccatcaccagcaccaccatgtcccttgaagagtcgctaagatctctttctctggattacctcaacctc

SEQ ID NO: 17562 - DNA, 251 bp, Glycine max
  Clone ID: 700959825H1
caaaaattcgatccgaatgtattagatctcaaatcatttctactgaaaactacagctatcgaattccctgcaattaacataagcataacccctttccaacctttctcctcttcagatcggatcagatcagatccaccgccatggatttcatgaaggtcttcgatcaaaccgttcgagaaataaagagagaggtgaatctgaaggtgctcaagattccggaaatcgaacagaaggtgctggatgctactgat

SEQ ID NO: 17563 - DNA, 248 bp, Glycine max
  Clone ID: 700959826H1
gtggatgatcatgaatcacaggacctttcagaggaggaaataaatgtgcatcacttgttgagattggctaggaaactttggctgcctgcttttttctttcttaccgtttgtcaaacttggacgactcaattacaaatattattcattaaacttactctattcctcctcagtacaaagcccaaccctttctctgtctatgtatttgttgataagttgtgccaacgatatatgcaccaagaaactcgatt

SEQ ID NO: 17564 - DNA, 249 bp, Glycine max
  Clone ID: 700959829H1
cattactgaaaacctttcactttgtttttttaatccggattgccaatttatgtatatctttttgattcaattaattctcatcttgatgattgtatgagctagattttgttggagattctggtcaattgcattcgaagcgacttgatcaattttttgaaaaaaaaaaaattggggatgtagtttgtattgaatattcacacacccaataaaacaaataaagagttccagtaacagaaccttttaggcttt

SEQ ID NO: 17565 - DNA, 250 bp, Glycine max
  Clone ID: 700959830H1
ttcagttccaaacaaaacttatcaaaatctcatatactgattcagttctatacataaccatcgaaatttactatcaaaccaaaaattctcaaaatctcttcacctctgtgatgaccatggaatacagaaccttagaactcaacatcatatccgcaaaggacatcaagaacgttaacctcttctccaagatggacgtatacgccgtcgttacgctctccggcgaccctctccaccctcagggcgccaccac

SEQ ID NO: 17566 - DNA, 251 bp, Glycine max
  Clone ID: 700959831H1
accatgttttgtttgccgggaacaaggagtccagagttttttgatcaacaaagtataggtccatcattatctttctggtttcgtaacaagttccctgtcatggatctctgttttgttattggaccaatgggtaaggactctattttgtttagacccatcatgaccatcaatggcaacacaatggagacacagttaactgaaaagaggtgttgtttagacttccgagcattagattatcatatacttatcat

SEQ ID NO: 17567 - DNA, 255 bp, Glycine max
  Clone ID: 700959832H1
gctttgataaccctcccttcaattgggtcacacgtgtttacaataaccccgtcactgtccctcatgcatgttgctatgtcgtggaatagtttataactctgactcgcacggtcgcgcacttctttcggaagatctaaaaggtcaatttttggtaaccctgggatgcttaaatgcgtgttgaggtctttgatggattttgttgtggtttcgtgaatgactgggagttggagaaaggttgcaagagatgaagcgccg

SEQ ID NO: 17568 - DNA, 257 bp, Glycine max
  Clone ID: 700959833H1
agcctctgcatctcgaacctctacccactgatgaggttcatacagtgggacaagcccccaatcaattcattcagtggccaagaagacttgtgaagtctatgtcagccaaggctgttgtcgaatctagcaaagatgctccacacaaaaggttggaacctcaacttgatccgctcgaacgcttgttgataatagtaagcaaaattaggaaggatcatgtacaactaccttgggatccggatgtactaagcaagccctct

SEQ ID NO: 17569 - DNA, 253 bp, Glycine max
  Clone ID: 700959834H1
aagaaattggtgttctttaatgtgaaagggttggaacggtttttgattttaaccctgcaaagagccttcctttgcggtttttcttcttgagaagaagaaggctctttgttgttgttgattttgaagaaggaaagaaggaaggaagaaaatgttgaggctatggatttcttatctgcaattggtggaactttttgtgagttcattggttcatatgctttatgggttttacatatttagctccgctgtggctggg

SEQ ID NO: 17570 - DNA, 248 bp, Glycine max
  Clone ID: 700959836H1
caccaaccaaacctcactctccctttctcccctgaccctctccctgccatggtcatgggagcctttggccacttcgaaccggtctccaaatgcagcaccgagaaccggtctaaccaaaccgtggcctcggacttggacggcaccctcctggtgtcccccagcgcatttccttactacatgctggcagccatcgaagccggcagcttcctccgtggccttgtcctccttgcctccgtccctttcgtgta

SEQ ID NO: 17571 - DNA, 247 bp, Glycine max
  Clone ID: 700959837H1
caagatcatcatctccatgaaaaccctaaccctagaggtggtcccactcttcttcctcctccttaccaccaaacagctcctcacatgtcagccacagcattgctgcagaaagcagcccaaatgggtgcaacgatgagcaaaaccggctccatgattaggacccaccaacagcaggctcacgtgtctgccaatgctgctttgaatttgtcctcacgtgaccaccagatgaaccccactccccatgact

SEQ ID NO: 17572 - DNA, 73 bp, Glycine max
  Clone ID: 700959838H1
cttcttttgtagtacctcatgagagtggtgcctgtcattggcatgctacatgagaggaaagtgttcaaacctg

SEQ ID NO: 17573 - DNA, 246 bp, Glycine max
  Clone ID: 700959839H1
ctgatccggagcgatgagtgagagtgagaagcagagggtaacggggaaggtgaagtggttcgatgaccagaagggttttggcttcataaccaccgacgacagcggcgaggaattcttcgtccaccagtcctccatccgatccgacggcttccgcagcctcgccctcggcgagtccgtcgagttccttattgactccgatcccgaaggccgcaccaaggccgtcgacgtcaccggccctgacgaatc

SEQ ID NO: 17574 - DNA, 249 bp, Glycine max
  Clone ID: 700959840H1
cggctcgagatgactagctctagcttgttcttctcctcaccacccctctttctcaatccccacccacctcgctctttcctccccttcagacctctcaaaccactcttcaacccctctcttctcctccgccctccctccaaatctcgccacaaccctttcctaacccgcgccgacgatgacgacggcgacggcggcggccccgaccactacgagatggacgaggacgaaatggaggagctcgacaacaag

SEQ ID NO: 17575 - DNA, 248 bp, Glycine max
  Clone ID: 700959841H1
aagaactgcttcagatgcagccattgcaatggccttcttgcgataagcaattactcatccaccgaaggagttttgtactgcaaggtgcactttgagcagcttttcaaggaaactggaacctaccccaagaaatcccagtcgtctggaaagcctccactcgagctgaatagagcaccaagcaagctttctgccttcttctctgggactcaagagaaatgttcaaaatgcaagaaaaccgtatatccatt

SEQ ID NO: 17576 - DNA, 243 bp, Glycine max
  Clone ID: 700959843H1
gaacagatgatcaatgtgcaaaacaagaactcctcatactttgtcgagtggatacctaacaatgtgaagtccagcgtgtgtgatatcccacctaagggtcttaaaatggcatccacttttattggtaactcgacctcaatccaggagatgttcaggagagtcagtgagcagttcacggccatgttcaggcgcaaggctttcttgcactggtacaccggggaaggaatggacgaaatggaattc

SEQ ID NO: 17577 - DNA, 248 bp, Glycine max
  Clone ID: 700959846H1
aaagagtacttgttcggaaaaattgacatgcagctcaagcttgtgcctggtaactctgctggaacagtaactgcctattatttatcttctctggggcctactcatgacgaaatagactttgagtttttgggtaacttgagtggtgatccttacactctccacacgaacgtattcccccaagggaaagggaacagagaacaacagttccatctatggttcgaccccaccaaggacttccacacatactc

SEQ ID NO: 17578 - DNA, 108 bp, Glycine max
  Clone ID: 700959848H1
taagattatttggtgaagaaaaagatgcataacactgctaaagcattcatgacagaagggaaggtttctcctgatccagtagcaattgatactcctggaggttttctt

SEQ ID NO: 17579 - DNA, 251 bp, Glycine max
  Clone ID: 700959849H1
accaaaaattgatgtagtagggttttgctttcttgatcttgcgttaaactatgaacctccagagtcccttgtaaaatggcttgaagaaggagacaaacctatttacattggatttggtagcctgcctgttcaagaaccaaaaaagatgacacaaataattgtagatgctttggagatcactggacagaggggcatcatcaataaaggatggggaggtcttgggaatttggcagaaccaaaggactctatat

SEQ ID NO: 17580 - DNA, 248 bp, Glycine max
  Clone ID: 700959850H1
gattggatcacaacagggcattgggccaaatctctgaaagactgaccgttcaggtttctgatgtaaagaatgtcattatctggggcaatcactcatcaacccagtatcctgatgttaatcatgcaactgttgcaacctcagctggggagaagcccgtccgtgagcttatagctgatgatgcctggttgaatggggaattcattactactgttcaacaacgtggcgctgcaattatcaaagctagaaag

SEQ ID NO: 17581 - DNA, 79 bp, Glycine max
  Clone ID: 700959851H1
cttcattccatttcctctttctctttccattgttctactttttcagtcccaccacgaatggcactgcatgatctaccct

SEQ ID NO: 17582 - DNA, 244 bp, Glycine max
  Clone ID: 700959853H1
cacttgcgttattagggttttagttagacagtggcggggcagtgatacagtgtgggcataaaattttcgaagttgaagcgagaacttgccatttcaagggttttatggttagggttttctcatattgcaaggacatgggtttcaaccttcaaccatatgggattcaatccatgctcaaggaaggccataagcacctttctggcctcgacgaagcggttctcaagaacatcgacgcttgcaaaca

SEQ ID NO: 17583 - DNA, 244 bp, Glycine max
  Clone ID: 700959856H1
ctacttctgccggcaacatgcgccggcagcttcacggcggttccgctctcagcctctgccgtcgccgcccctcgtctcccgcaaccatttctcgcagcgaattccttgccctcattccctctcaatttgactctttcttcttcctcatttactaactctatcgctcgtcaaccatggacgaagcttcccttcaccgcaagcgcttcttcgcaagtatctccggctttcactccctccaacgacg

SEQ ID NO: 17584 - DNA, 245 bp, Glycine max
  Clone ID: 700959857H1
cgtggccccaccatggtcgccaacactctccacgccgccgctattgctctgacggagagtgatgactgggattggttcattaatctcagcgcctccgattaccccctcgttacccaagacgatctgctgcacgcgttctcgcatttgccacgcgatcttaacttcattgatcataccagtgacattggctggaaagatcatcaacgggcgaggcctataattattgatccggggttgtatatgac

SEQ ID NO: 17585 - DNA, 242 bp, Glycine max
  Clone ID: 700959858H1
aaagtcctcttatgggaaatttttcactggagactcctatgtgatcttaaagacaactgcctcaaaaagtggtgctctgcgccatgacatccattactggcttggtaaagacaccagtcaggatgaagcgggtgctgcagctatcaagacagttgagctggatgcagctcttggaggacgtgctgttcagtatcgtgaagtacaaggccatgaaactgaaaagtttctgtcttatttcaaac

SEQ ID NO: 17586 - DNA, 243 bp, Glycine max
  Clone ID: 700959860H1
cttcaattcttcttctcatcatttcttttcacacaaaaaggtaccatggaagggagaatgggactgttgtttcttgttgtattaggtgctgcttgggcatgtgatgcaagggaactggctaactctgaaacttctgaactaagcataaaaccggatgtgtgtgcactttgtgaggaatatattaccaaggcacttgattatctacatgaaaacaagacttagacagagatcattagtatcctg

SEQ ID NO: 17587 - DNA, 253 bp, Glycine max
  Clone ID: 700959819H1
cgtgaatgcgtataaaaggaaaataaagaaattagcgtcaaaatgttgggtgtgttcagcagctccatagtgtcgccgccggacgagctcgtggccgccggcagccgtactccgtcgccgaagatgacggcggcggcgctgcggaagcggttcgaggagaagaacccctccgccgtgtcggtggaggtcggagagcatgtccagctcgcttatacccaccacaacgagtcgccgtttcagcccagatcctttg

SEQ ID NO: 17588 - DNA, 251 bp, Glycine max
  Clone ID: 700959785H1
ataattgctgtggatgctagttccagctgcatgtccaaaatcaaattgtgactgcatgttaattgcaaaagagaggaatttctacacatgttgaaactaatatgctcttggtgggggttgggggaggatatatgatctcctttgcctttaaattattactctctccttttctttttatctttgtctcactggtttcattttatcttatttcaagatttttacgtaaaaattaaaaaaatgttataattttt

SEQ ID NO: 17589 - DNA, 261 bp, Glycine max
  Clone ID: 700959787H1
gttggaccatgggaggagagacctgggcactttggtgatgtttggatgtactggactgatgatggacttggctattatgagtttctccaacttgcggaggacttgggtactgcaccaatatgggtatttaataatggtgtcagtcataatgatcaagttgatacatctgcggtcttacctcttgtgcaagaagcccttgatggacttgagttcgcgagaggtgatcgcacttcaaaatggggctcccttagagctgctatg

SEQ ID NO: 17590 - DNA, 263 bp, Glycine max
  Clone ID: 700959788H1
aagatgatcaacattattggagcacttgttctactctttgcatttctcttcctcagttgtgtgtatgcacaagacacaacaacccttgtgcctgcaatcataacttttggtgattctgctgtggatgtagggaacaatgactatgcttcccacccttttcaaggctgattaccctccttatgggagggactttgttaaccaccaacctactgggaggttttgcaatggcaaattagctactgatttcactgctgacacattgg

SEQ ID NO: 17591 - DNA, 259 bp, Glycine max
  Clone ID: 700959789H1
cccaaagtgcttctctcctctgtctttttctctctcttgctatccttttggctagttgcactgctgcaagtgcaactccaagaagcgcagtgccaagccaccatgtttcaacattcaacagaagcctttttccttccacttttctctttggaattggttcttctgcttaccaggcagaaggagcagcaagtgtagatgggagaggaccaagcatatgggacacctacactagacagcatactgaaaagatttgggatca

SEQ ID NO: 17592 - DNA, 257 bp, Glycine max
  Clone ID: 700959790H1
gccaatttagatacttcaccaaaggctactaatcatgagatgaaccaagcaatttctgagaaccccgattccaacaaaatgaagggcagaaaacctgtagaccgttcctcatgtggttccaacacaacctctagcagtgaagagactgagttactagagaaggatgagaaagaaaaggaagagcccaaaacacctgatgcgaacgttttagataccgagcttagtaatcgtcgaagtagaagcattagcaaccttac

SEQ ID NO: 17593 - DNA, 255 bp, Glycine max
  Clone ID: 700959791H1
ggaatttggtgctgaatcatcagtcattgccacaagtagttcaaaagatgagatgcatgagggaaatagattgaaagctgcaatccaggcagctttgcttagaaggcctgaaatacacaagaggaaagaagctcctgaccaaactaatgagtttcctacatcaagcactggtttgaaacgagaagtcacttctcaaaagcaagtgttggtttccagcactttgaagaatggtatatctgctgaagaaagcaatat

SEQ ID NO: 17594 - DNA, 253 bp, Glycine max
  Clone ID: 700959792H1
cagaaattgcatagcccttgaatctgcagttaacggagcttgtggtccaacttgtaatcatccagctgattgaactgtacagaaagaaagcgcaaatgcaaggcaaagtagcgagacagttttttacttgatccattatttaatttattgagaatgagcccaattgtaaatgactatgtaccatatcaaccaacacaagctgcaattttaagggaaaatgcagcgacctgtggttactgcagctgaagctgct

SEQ ID NO: 17595 - DNA, 253 bp, Glycine max
  Clone ID: 700959793H1
gaaagattggagagaagtatggagtggagtattcggaagatgagatactgttcagatatagaagagcgtatggtcagccttggggaaaatctcgtctcagatatgttaatgatggtaggcccttttggcaatacatagttagttattctactggctgctcagatcctcaatactttgaagaactttataactattatacgacagacaaggcatggcacctcaatgatcctggcgcagaagaagtattcagagc

SEQ ID NO: 17596 - DNA, 256 bp, Glycine max
  Clone ID: 700959794H1
tctcctatctgaattcctcttattcaggaatttggagagactgttgatatagaaaggtaggataaaccagtggccaaggaatatatggcgttttctatggttttcattgttagcaacattatgctgcttttcagttcagcatttggccaaaactgctagtcctacctctctgagcccaactccagcaccagccccggcacccgactacgtgaacctcaccgagttgctcagtgttgctggtccatttcacaccttc

SEQ ID NO: 17597 - DNA, 253 bp, Glycine max
  Clone ID: 700959795H1
caacaactactactactactacctctaaccgtgccgtttgtcaggtgcaagattgtagggctgatcttagtaatgccaaggattaccaccgtcggcataaggtttgtgatgttcattctaaggccactatggcactagtgggaaatgttatgcaacgtttctgtcaacagtgtagcaggtttcatgttcttcaagagtttgatgaagggaagagaagttgtcgaaggcgtttggcaggccacaataggaggag

SEQ ID NO: 17598 - DNA, 259 bp, Glycine max
  Clone ID: 700959796H1
gtacaacatgttcttcagcttcacctctcgggaggcacggtcccacactatagcttctcgattgacatcccctgatgcaaacattgaaaggtctggggaataacgtatgacactaatagcacccctatgtttctcaaggacagcctcttctacaagagtatcgccagaaatagaatatatgtgcaatttgggaaatatttgttggatttcaaatttcttcctttagaaggcttctaaaagtcaagactggtgaggatgt

SEQ ID NO: 17599 - DNA, 260 bp, Glycine max
  Clone ID: 700959801H1
gttttatcttatgaagacagtgactcctaaatttcttgtctttttctatatgtttcttgtccatttcttaggctgctgagttgtccattttcatgaacgataggaggataagtactcaagtcaaagcctcagcacaagcgcgacaagtgggacgacaaatatccatatcaagtcctggatttatctatgaaccctatgaacctcgtgagaaaatcccattttggaagagatggttcactagaagtggttggagaagaaca

SEQ ID NO: 17600 - DNA, 102 bp, Glycine max
  Clone ID: 700959802H1
gcgtacggactctcggctttcggctctaagctgacaatgctagtgcttgtcttgcttgttgctacagttctggtagcatatgaatgccatggctcagactac

SEQ ID NO: 17601 - DNA, 74 bp, Glycine max
  Clone ID: 700959803H1
cactgggagaagttccctagcgctcctttcaagatggagatctgcgtcaagaccctcaccggaaagaccatcac

SEQ ID NO: 17602 - DNA, 249 bp, Glycine max
  Clone ID: 700959805H1
aactcactcaaatttattttttctcttcattttctcttcgtgttattgttgttgctgcctggattcaattgtttcaggttcgtgctttcgcccctgctgtgctggattcaattgtcacatttggattcgattgtttcaacccctttcaggtttgcagacacatcatgtagatatttgtagttctatgttcctcagtttttaaaatacaccagtgacaggtaaggaaccatgttttagctttatgtgtga

SEQ ID NO: 17603 - DNA, 253 bp, Glycine max
  Clone ID: 700959806H1
gaggaacgaagcaatcgcaagtcgtctgttctgtcccgcgggagcagacgacctgtcttcatcgccaaacaacctcaaaaatcattcatcaacgttcactattaatccatccatcattaagtaagaaaataaggttcgatttttttatctttgttttgcttctgatccatcatggaggtgccgagttcctgggatgcccttcgcaaacaggcaagaaaacttgaagctcagttggatgagcagatgaattctt

SEQ ID NO: 17604 - DNA, 251 bp, Glycine max
  Clone ID: 700959807H1
gagagttgaattttctctacgatccacacatcctgatctataataatcttttccattttaagatttttgcttctaagtgtgtgtatctaccgctcacttatagtttccattataagtaattatttcttctttttttttcttttctgttttgctgttttctcaatgaaatcttcccctcttcatgatctgtctcagctatatattgattttgctgtttgtttgtttgtgatcaaaattgggttgattccatt

SEQ ID NO: 17605 - DNA, 253 bp, Glycine max
  Clone ID: 700959808H1
gtttttctcttttatccacttggtaacttcggctattgtcgaatccgtaaggcgaaggagagcaatcaaggagggatatcttaacaatgccaatggtgtgttgcatatgtctgcaatgtggcttttcccacaactttgcttgggtggaatagctgaagcattcaatgcaataggccaaaatgagttctattacacagagtttcctaggaccatgtccagtgttgctgcttccctttctggactgggaatggct

SEQ ID NO: 17606 - DNA, 247 bp, Glycine max
  Clone ID: 700959811H1
gggaagacttacctacttagaatcatcaatgctgccctcgatgacgagcttttctttgccattggtggtcacaacttgacagtagtggaggttgatgcagtttacacaaaaccattcaccactcaaaccattctaattgcacctggtcaaaccacaaatgttctagtcaaggccaaccaagtagcaggaagatacttcatggctacaaggacctttatggatgcaccaataccagttgatagcaaag

SEQ ID NO: 17607 - DNA, 250 bp, Glycine max
  unsure (1)..(250): unsure at all n locations
  Clone ID: 700959813H1
cgaatgcgnaaaaaggtggtgaattagtttttggtggtgttgacccaaagcacttcaaaggaaaccacacttatgttccaattactgaaaaaggttactggcagattgaaatgggagattttttcgttggaggtgtttcaacaggtgtttgtgagggtggctgtgctgctattgtggattcaggaacatctttgcttgctggtccaactcctgttgtggctgaaatcaaccatgccattggagctgaagg

SEQ ID NO: 17608 - DNA, 255 bp, Glycine max
  Clone ID: 700959814H1
aaaattcctaatcagaaaaaaaaaaccctagtaatgccgccgatggggaggaagcgaaaggtagcacccaaatcttctctatccaccgagccacctctcaagcagcaacaaccaaaacccgaaaatccccctcaagaatacgaagaagtcgaagaggaagttgaggaagaagaggtagaggaagaggtcgaagaggaagaagaagaagaagaggaggacgaggaagaagaggaggaggaagaagaagaagaagaa

SEQ ID NO: 17609 - DNA, 253 bp, Glycine max
  Clone ID: 700959815H1
gaaatatgtaccgagaagaaaacgattctgtcagttgaagacatcattgctttgattggtgataagtgtgatggagttattggacagctgactgaagactggggagaacagttgttctctactttgagcaaagccggagcaaagctttcagtaacatggctgttggttataacaacgtggatgttgatgctgcaaacaagtatggtgttgctgttggaaatactcctggagtgctcactgagacaacagctga

SEQ ID NO: 17610 - DNA, 245 bp, Glycine max
  unsure (1)..(245): unsure at all n locations
  Clone ID: 700959816H1
gattatttagaatataatctatagaagaggcgtttaacagtaagaaaattgggggtttaaggtttaaggaggtgttggacatggcatggtagtactagtagaagcaactaggaagcactgaagcagttgatgatggtaaataaatgattatgattattccgtactctctctctctatctctctctgcatacttatgccgtgtctcccactccactctacactaattaagcgngctcacactgcca

SEQ ID NO: 17611 - DNA, 258 bp, Glycine max
  Clone ID: 700959817H1
cagaaaacagagatctatcattaacttcttggtgaattgtacagcagggacaatgttctataaatcaattgatccatccaattttgtgaaatctggtgaaaagacatttgagttgttggactctattgtggaagagattggggaggaaaaggttgtccaagttataacaggcaatggaagcaactatgttttggcaggtaaatttcttgaacgaaaaaggtcacatttatattggattccttgtgcagcccattgcat

SEQ ID NO: 17612 - DNA, 258 bp, Glycine max
  Clone ID: 700959818H1
actcgagccgaatcggctcgagcttgcagtcgcagaggaaaacccacagctagtagtctcagttcgtttgagagagaaaaaatggcagagggtctcgttctccgcggaaccatgcgcgcccacaccgacgtcgtgacggcgattgccactcccatcgacaactccgacatgatcgtgacggcgtcgcgcgacaaatccatcattctctggcacctcaccaaggaggacaagacctacggtgtcccccgccgccgcctc

SEQ ID NO: 17613 - DNA, 267 bp, Glycine max
  Clone ID: 700959784H1
gaattgtctacccttggtaaccaaatgtgtgatgttgcatatagctgtatgccttatattgcagatattggacctgaaaaagtacatgaaggtatagagcattttggattacctgagggaatcccttcattaccagaatatttggctgattactgctctttggcacgaagaaaatggcctgttgctgaatggaagttctatgttgccttttctttcttccgggcagcttcaatttatgcaggagtgtataatagatgggttaagggt

SEQ ID NO: 17614 - DNA, 264 bp, Glycine max
  Clone ID: 700959757H1
gagagagagaaagagaagtgtgtagttggtgaagtttttgagaagaatatggaacgaagtgacggaatggtaacggggtcgcatgaaaggaacgaacttgttagagttagacacggttctgacagtgggatttgtcaaatatgtggtgacaccattggattaacggctactggtgacctctttgttgcttgtcatgagtgtggcttcccactttgtcattcttgttacgagtatgagctgaaaaatgtgagccaatcttgtccc

SEQ ID NO: 17615 - DNA, 262 bp, Glycine max
  Clone ID: 700959758H1
gggtctgattctgatcgaaacccgcgccatggccatgttcgattccatcttcaacaaaggctttaaggctgccaaatgtaaaacactgctgaagttgacaattccacgtataaagcttctaagaaacagaagagagattcagttgaaaaacatgcggcgtgagattgccaagctgcttgagactggccaagaagccacggctcgaattagggtagaacatattataagagaggagaacatgatggctgctcaagaaatcatt

SEQ ID NO: 17616 - DNA, 262 bp, Glycine max
  Clone ID: 700959759H1
ccataacacaaggcagaaagcaagctcatcctagagttttaaaaatggcagcagcctcctccatggctctctcttccccatccttggctggcaaggccgtgaagctgggcccatcagcccccgaagtcgggagggtcagcatgaggaagaccgtcaccaagcaggcctcctccggaagcccatggtacggcccagaccgcgtcaagtacttgggcccattctctggcgagcccccgtcctacctcactggcgagttcccagg

SEQ ID NO: 17617 - DNA, 105 bp, Glycine max
  Clone ID: 700959760H1
cggcgagctctagtacttattccttaagtatgtgcaataattttgcccctatacaagacaaagggttggtctagttaatgtatagtagcaaagtgttacaattca

SEQ ID NO: 17618 - DNA, 260 bp, Glycine max
  Clone ID: 700959761H1
gccttgaagatcctgaacttcttgctagagagactgtgttcagtgtaagcgaaatagaagcactttacgagctcttcaaaaagattagcagtgctgtaatcgacgatgggttgattaacaaggaagagtttcagttggcattgttcaagacaaataaaaaagaaagtctgtttgctgatcgggtatttgatttatttgacacaaagcacaatgggatactaggttttgaagagtttgctcgtgctctctccgtttttcat

SEQ ID NO: 17619 - DNA, 260 bp, Glycine max
  Clone ID: 700959762H1
gtctatgctggaatcggttgggttatctggagaagcaaggaggacttgcctgaggaactcatctttcacatcaactatcttggtgctgatcaacccaccttcacccttaacttctccaaaggttctagccaagtcattgctcaatactaccaactaattcgccttggttttgagggatatagaaacgtgatggaaaactgcagagacaacatgttggtgctgaaagaaggactagagaaaacagggagattttcaattgt

SEQ ID NO: 17620 - DNA, 262 bp, Glycine max
  Clone ID: 700959763H1
aatatgtccaaaattgaacacactcagcattgaagcaccgtttatggtttcacttgagttgaaaggatgtggtgtactatctgaagcattcattaattgtccactcttagcatctctcgatgcttccttttgcagccaactaacggatggctgcttgtctgcaacaactgtctcatgcccactgattgaatcattgatattaatgtcatgctcatcaattggttcagagggtcttcgatctctgtattgtcttccaaatttg

SEQ ID NO: 17621 - DNA, 260 bp, Glycine max
  Clone ID: 700959764H1
aagatgtcgaagcgtggtcgtggtggttcggcggggaacaagttccgcatgtcgctgggtcttccagtggcggcgacggtgaactgcgccgacaacacgggggcgaagaacctctacatcatttcggtgaaagggatcaaaggccgtttagaaccgtcttccctcggcctgcgttggcgacatggtgatggccaccgtgaagaagggaaaacccgatctgaggaagaaggtcttgccagctgtcatcgttcgccagcgca

SEQ ID NO: 17622 - DNA, 278 bp, Glycine max
  Clone ID: 700959765H1
gtcgccaccttcaaagcccgcaagaacgacttgcccctcaagacgaaaatcaccgtgtgcgaggtgcgtgaggaggctggcttcctcgacggtgacgtgttgattttccccgacatgatcaaatacaggggtttggaggaatcaaatgttgatagctttttcgaagatgttttggtgaatggtaaaccatggactgctggagttccggaggtgtttcgtggttcacatgtttatgtgtgtgctcatggaagtcgtgacgtgagatgtggtgtttgtgg

SEQ ID NO: 17623 - DNA, 272 bp, Glycine max
  Clone ID: 700959767H1
agcaagtggacttgggcgttgcaagataaataatggaggctgttggcatgatgctcaaaatggacatgcattttctgcttgtttggataatggaggggtcaaatgccagtgtcccacagggtttagaggtgatggtgtaaaaaattgtcaagatatagatgaatgcaaagagaagaaggcttgtcagtgccctgactgtagctgcaagaatacttggggaagctatgactgcagttgtagtggagatcttctgtatatgagggaccacgata

SEQ ID NO: 17624 - DNA, 270 bp, Glycine max
  Clone ID: 700959769H1
gataaacattcataccaggaaaaagagatggagaagcaatctaaatctgaggttgttccgtctttgagccagagtcagagttttgcaactaaagtgcatcatccaaaccctgattcttctgctgcccttaaatttcgtgtcttggatgcaaccaatctggaggaactatcttgcttgaatatttccactgatatgaacaagcctaatgcaatgacacctgaaggaaaaggtggtcaaaacctggatagcttcatcaataattattttgtt

SEQ ID NO: 17625 - DNA, 270 bp, Glycine max
  Clone ID: 700959770H1
atgggaagaaagtgagaaggccaaagcagagaacagagctcaaaaacatctctcagctatcgatgcttgggaaaacagcaaaaaggcagctcttgaagctgagcttaaaaaattggaggaacaactggagaaaaagaaagcagaatatggtgaaaaaatgaagaacaaggtggccttagttcacaaggaagcagaggagaagagggcaatgattgaagccaagcgtggtgaagagattctgcagacagaggaaatggctgcaaaataccg

SEQ ID NO: 17626 - DNA, 267 bp, Glycine max
  Clone ID: 700959771H1
attgcatacccttttgagttttgattctctctcctcgcataactaggtgaaatcgaatatttttggggtgtgtcaaagtttgtgaaggaacttgaagaagtaaatgcatggatcgaggggaccaaatgacattacctggctctgcatcttgactatatgcagagaggaatacctggtgctggaaaccaacctgtactgcacaattcacctaatattggaccattgtctaaccctaatctaccatgtcaatcaagcattgggggtggt

SEQ ID NO: 17627 - DNA, 96 bp, Glycine max
  Clone ID: 700959772H1
gctattcaatcccaaagccacagaaatgatattattcagattttagagactgaaaacatcatggccaacctcgacctcgacccattccagacaagc

SEQ ID NO: 17628 - DNA, 257 bp, Glycine max
  Clone ID: 700959773H1
acttgctggagcaggataacccaaaccggaacagaagcaaaagcagaaacgaagatgggtggttccgttttcactcacttcctcgttctcccctcctcttctactccttctctttccactctcttcccatccaaattccccaccagacccatcaatgaatcttttcccttcacccttacctgcaaccaattcccttccaaactcactacttcgcggccttcccaattctcagctcctcctagttactcatgctctgt

SEQ ID NO: 17629 - DNA, 261 bp, Glycine max
  Clone ID: 700959774H1
ccctaaacgactctatctctcttcgttttgttcttccttgcgctcctcctcgttcgttcgttctccctcgcgtagatcggcaatggcggagaccgagacgtttgctttccaggctgagatcaaccagctcctcagtctcatcatcaacaccttctactccaacaaggaaatcttccttcgtgaactcatcagcaacgcctctgatgctttggacaagattagatttgagagtttgacggacaagagcaagctcgatgctca

SEQ ID NO: 17630 - DNA, 259 bp, Glycine max
  Clone ID: 700959775H1
gcacgcggcaccgttcgttgctgtctgagaacagcaactccccagttgcttctctagacaaagctgatggccttccttcttggatgaaccatgaggaccgaagggtattgaaggctatggataacaaacctgcacctaatcgtcaccgtggctaaagatggcagcggagacttcaaaaccatctctgaatgtttaaatgctgtccctcaaaattttgaaggacgttatgtgatttttgttaaagaaggagtatacgatg

SEQ ID NO: 17631 - DNA, 258 bp, Glycine max
  Clone ID: 700959776H1
ggaggatctgacagaggttataacatcagcagaatttcaccctacacattgtaatacattggcatatagcagttcaaagggttcaatccgtcttgttgacttgcggcaatcagcattatgtgattctcatgccaaactatttgaggaacaggaagctccagggtccagatcatttttcacggagattattgcttctatctcggacataaaatttgggaaggatggtagatacatacttagtcgtgattacatgacttt

SEQ ID NO: 17632 - DNA, 257 bp, Glycine max
  Clone ID: 700959777H1
attatagcacaccacacaaaaaagcaaacaagagagaacaactgttactcacacacgccatgggtaaatgaatggtttttgagcaacagcagttaaaagagaaaagggattcagcgaagatgacatcggttggtgtggcaccaacttcgggtttgagagaagccagtgggcatggagcagcagctgcggatagattgccagaggagatgaacgatatgaaaattagggatgatagagaaatggaagccacagttgtt

SEQ ID NO: 17633 - DNA, 254 bp, Glycine max
  Clone ID: 700959778H1
tataacaaagcattgcgatggtccctgcggatgttgacgcaatgtgatttctgcccagtgctctgaatgtcaaagtgaagaaattcaaccaagcgcgggtaaacggcgggagtaactatgactctcttaaggtagccaaatgcctcgtcgtctaattagtgacgcgcatgaatggattaacgagattcccactgtccctgtctactatccagcgaaaccacagccaagggaacgggcttggcggaatcagcggg

SEQ ID NO: 17634 - DNA, 260 bp, Glycine max
  Clone ID: 700959779H1
aaaatgcccactttttttcttccaacgctcctcctccttctcatagccttcgccacctctgtctccggccgccgtgacctcgtcggagactttctccggctgccctccgaaactgataacgacgacaacttcaagggcacccggtggggccgtcctcctcgccggttccaatggttactggaattacagacatcaggctgatgtttgacacgcctatcaaatattgaggaaaggtggtctgaaagaagaaaatattattg

SEQ ID NO: 17635 - DNA, 261 bp, Glycine max
  Clone ID: 700959780H1
cgcaacaaaaagaaagaatcccaggcgaggagaaagatggaggggaaggagcaggatgtgtcgttgggagcgaacaagttccccgagagacagccgattgggacggcggcgcagagccaagacgacggcaaggactaccaggagccggcgccggcgccgctggttgacccgacggagtttacgtcatggtcgttttacagagcagggatagcagagtttgtggccacttttctgtttctctacatcaccgtcttaaccgtt

SEQ ID NO: 17636 - DNA, 273 bp, Glycine max
  Clone ID: 700959781H1
atcaggcacaagcttgagctgcatgtcaattgtttgtgttctctggggcctactcatgacgaaatagagtttgagtttttgggtaacttgagtggtgatccttacactctccacacgaacgtattcatccaagggaaagggaacagagaacaacagttccatctatggttcgaccccaccaaggacttccacacatactccgtccactggaatcctgcaagcatcatattctctgtggacgggaccccactaagggagttcaagaatttggag

SEQ ID NO: 17637 - DNA, 270 bp, Glycine max
  Clone ID: 700959783H1
gagtgagcgagcgagcgaggtagggttttcgttgttcccccgtctttgaattcagttcgcgacgatggggtccatccccgatccaggcgagttgagcgagttgactcagccgagcttcgacgagttccagcgccaaacttccctcatgaccagctgcaccctcctctggaaggagctctccgaccacttctcctccctcgagcaagacctcaaccacaaatccgaagacctcaaacgcaagattcgcaccctcgacaacactacttccga

SEQ ID NO: 17638 - DNA, 270 bp, Glycine max
  Clone ID: 700959756H1
cgaaaattgaaacagaattaaaaaccaaacactaccctgttgctttggtgatagcttaaaactcaacaagtaaatgattagactaaatgtctactgttcgctaattccaagtgcaagacaagccagacctggcagcagctatggctccttgatgcatccataatcacaaagcttcaaaattttctcatcggatttccatcaaggctaaggccataaaagatgagatggacggagaaacaagcggatcttcaggacgtagctgggatcctg

SEQ ID NO: 17639 - DNA, 267 bp, Glycine max
  Clone ID: 700959726H1
aagatttccaaccgattggacaacactccttgtgtagtggtaacatcaaaatttggttggagtgctaacatggagagaatcatgcagtctcaaactttgtctgatgctagcaagcaagcatacatgcgcggcaagagggttcttgaggtcaatcctaggcaccctattatcaaggagctccgagagagagtagtaaagaaccctgaggatgagggtgtgaaacatacagcacagttgatgtaccagaccgcactcttcgaaagtggc

SEQ ID NO: 17640 - DNA, 265 bp, Glycine max
  Clone ID: 700959727H1
cggctcgagttcacacccaccattggatccaccaatctccaacctttcttctccactgttccgtttctctctccaacggtaactgcattgcccctttctctctctagagttctttcctatttcaatctgttgcatttgttttcatgttcattttttcctgtgtgattctgttgcattgcacgtggtcatgctaaaaatctgtttttgattggaattctgagggccccagaagctcatttgatctgggtttctcttgtttttgtgt

SEQ ID NO: 17641 - DNA, 264 bp, Glycine max
  Clone ID: 700959728H1
atttcccttctgagctttgattagtgtggcctagttgttgttttctcgatgagaaaggcttcttccactatgcattgcgcatctctgcgcttttgggttcccttgttgctgcttgctagcttcagctatgctccttctgtttcggccacaactgaaatttcagggaatgaagtgaacacagatgggaaggtgataaatgaagagttagcaaaaccaagtctaaaaggacatgatgaagaagcaaagttcaaaggattttttcca

SEQ ID NO: 17642 - DNA, 265 bp, Glycine max
  Clone ID: 700959729H1
gatcaacaatcggcggcgaaaatgccttcccacaagacgttcagaatcaagaagaagctcgcgaagaagatgaggcataacagacccatcccttattggatccgcatgagaaccgacaacactatcaggtacaatgctaagcgcaggcactgggcgccgcaccaagctcggattttaaggtccatgtcaacctccgactcgagatttttatattgtttttgttattctagaatgttactagcaatgtgtaaactggaaaggtttt

SEQ ID NO: 17643 - DNA, 266 bp, Glycine max
  Clone ID: 700959730H1
ctcttggcatcttgtgttgtgtccctcttttaagctatttccttctcttaacacaattggttgtgccaattgccatagtcaccaaccaattaacaaaggtatatatatcatcatatcatcaccaaatgaaaaatattgggttgttttttcttggtggtggtggctacttttgtggtggcagccacagctggtagcttttaccaagactttgaaataacgtggggtggtgagcgtgccaaaatctatgagaatggaaaccttctcac

SEQ ID NO: 17644 - DNA, 268 bp, Glycine max
  Clone ID: 700959732H1
attattatttctgttgtagatattgtaatgcagagctttttgactgatggttttatcccaggtcctacttcatttgcaccaatcgttgaaatggccatgacaatagttgagcagactggaggccagtaccatgttttggtgatagttgcggacggccaggtaacaagaagtattgacactgagcatgggagactaagtccacaggagcagagcactgtggatgccattgttgaggccagtaaatttcctctttcaatcatattggttg

SEQ ID NO: 17645 - DNA, 278 bp, Glycine max
  Clone ID: 700959734H1
cgtggggaccttcgattctcgaagaaggaaaaggtgagaagcttgagtgcggtcggaacgccgtcgtcgaccttccaaatggcttgtattaatgtctctgaacagcaaacacatgaaccttcttcgaccgtcatcgccaccaccaacagattccgtctacataagaatttttttaataactgcaacggtgcctctgttccacggaagctacgttccgtgacgaaaaaacggggtcgcgaatccatgttacttgattcagaaaagttgaagcatacgat

SEQ ID NO: 17646 - DNA, 280 bp, Glycine max
  Clone ID: 700959735H1
aacacacacatttctagtccccaaaccctaaactagaagagaaaaagagaaagtgcaacatcataacatcaaattcgtatgtgcttttgcttaccctaaaatctccatccctacaaaaagaagaagaaaaacaagaagaagtttaacatgtcagctgccgtggccgcttccgctgccgccgctaccatgtcgggttaccaccacaactcctcctcgagacaacaacaacacatagaccatgaattggccttaacaccacaacgagtgtgtgtctctccac

SEQ ID NO: 17647 - DNA, 277 bp, Glycine max
  Clone ID: 700959736H1
gttcaacaatcggcggcgaaaatgccttcccacaagacgttcagaatcaagaagaagctcgcgaagaagatgaggcagaacagacccatcccttattggatccgcatgagaaccgacaacactatcaggtacaatgctaagcgcaggcactggcgccgcaccaagctcggattttaaggtccatgtcaacctccgactcgagatttttatattgtttttgttattctagaatgttactagcaatgtgtaaactggaaaggttttagcttttggtcat

SEQ ID NO: 17648 - DNA, 275 bp, Glycine max
  Clone ID: 700959737H1
gcgggattgagagctgctattggactttcagaacacgggttcaatactgcttgtattaccaagctcttcccaactcgttcacacactgttgcagctcagggtggtataaatgctgctttgggaaatatgactgaagatgactggaggtggcacatgtatgacactgtcaagggaagtgattggctaggagaccaggatgccatccacctaatgtgtagggaagcaccaaaagcagtcattgagctagagaattacggattaccattttcccgaac

SEQ ID NO: 17649 - DNA, 271 bp, Glycine max
  Clone ID: 700959738H1
atccagtctctttagttagctcctgctccttttcttccagaagattcaaggaacaacaacgaacatgagacttggatttgcttcttggagattcatcctatgcaccctagttgtctttttgattctacaagacagtgtagctagaaagatagctacaacatctgggaatgaagttcaactgaaggcagtatcctatgatttgcaaaagcttgcaacagagggtcttgtacttgacagtattattcagcttgaaggcgctgatataaaaagg

SEQ ID NO: 17650 - DNA, 266 bp, Glycine max
  Clone ID: 700959739H1
atccctaacacaacagatgattgttcagcatgtacggaaagaataatcaaatcacaatagttgaattttcaaaaatcaaggaagtttgaagagagagaaattctggtggcatagtaaagaagcactaacttacattgctcatgcatatcttgattaagtccctgtgcaagaccttgtctggaatatcttgttcactggcctacattggctcatgttgagtgtcatttgtttttattattatacatctttgtggtcccctctcttct

SEQ ID NO: 17651 - DNA, 271 bp, Glycine max
  Clone ID: 700959740H1
gagacacctgatagggttttgggtgctttggctgataagtatggacccatattcaccatcaactatggtgtcaaaaaggctttggtaatcagcaactgggaaattgctaaggaatgcttcaccaaaaacgacatcgtcgtttcgtctcgccccaagcttcttgccattgaactcatgtgctacaaccaagccatgtttgggtttgcaccctatggtccttattggcgcgagccaagaaagattacaacgttagagatccttacatctcgca

SEQ ID NO: 17652 - DNA, 273 bp, Glycine max
  Clone ID: 700959741H1
tctcgagccgaatcggctcgagtgggcagtcgctgctgttgcggcacattggtgccaattttaggtgtacctgatgctcttgactcctgttgatcttccagtcagtcaaataaatctatttcctggggagacgactgctctttggatatccattgagtgttccaagttctcaacctccaggacaatatgaaggagagattgccattactgctataaaagcagatgcagaatctcctgttcaaattttaagcaaggttgagaaacatcagttgt

SEQ ID NO: 17653 - DNA, 262 bp, Glycine max
  Clone ID: 700959742H1
ttggcatcttgtgttgtgtccctcttttaagctatttccttctcttaacacaattggttgtgccaattgccatagtcaccaaccaattaacaaaggtatatatatcatcatatcatcaccaaatgaaaaatattgggttgttttttcttgtggtggtggctacttttgtggtggcagccacagctggtagcttttaccaagactttgaaataacgtggggtggtgagcgtgccaaaatctatgagaatggaaaccttctcac

SEQ ID NO: 17654 - DNA, 261 bp, Glycine max
  Clone ID: 700959744H1
gggagatgtgtagtagtagtagtgggtggtaacagagaagaaaatagggggtttggtttggtgagttacccaagagaaaggatgaagagggaacgcgagcagcttggttccatcgcagggacctcaagctgcggttattcaagcggaaaatcgaatctttgggaggatagaaggaggcatggacgagcttcttgcggtggtgggttacaaggttaggtcatcggacatggcggaagtggcgcagaagcttgagcgtctcga

SEQ ID NO: 17655 - DNA, 266 bp, Glycine max
  Clone ID: 700959748H1
attatgatgaggcatctgaaggcaatgcttggaggcttcttgcagaggtgtccctctctcaagagaggtttcaagaagtcaatgatcttatttttgaagccattggctgtggtgaattggaggatgtcaacgttgaaagtgtcaaagaagttgatgcagtcagcacaagcgaacaccctactgtggtggtagctggttcacaagaatgtgtgattctacactaacaaggctctaaaattatgaacaaattcagcaaatccgtagtg

SEQ ID NO: 17656 - DNA, 270 bp, Glycine max
  Clone ID: 700959749H1
gagaatggatgaagtctgctatgtgtgcagtggtggttgtagcacttcttcttctggcggaggtggggcccatggctgaggctgtgacatgcaccccaacagagttgagtccgtgtcttccagcaatcacttccggtgctaaaccttccaatgcttgttagcacgaagctgaagcagcaaaaaccatgcttatgtggctacctcaaaaacgctagcttcaagcagtatgttaactctcctaatgcccgaaaaaccgttgcttcttgtggg

SEQ ID NO: 17657 - DNA, 279 bp, Glycine max
  Clone ID: 700959750H1
gctcatcaagtccaagaaccaacctaccttttgcaatctcaattcaatggcgtcctctctcattgcgaacgcttcctctcctcttctctcctctccaggtccctccttcgccccgccgcttccgcttcccaccgctctttcaacaccaacgccatgggccagtatgacaaccgcgccgacgaccacagcaccgacatcgatcgtcactccgaacgctctttccctagcactgcgcgccgcgacgatatcttctcagatgtgttggatccattttttccg

SEQ ID NO: 17658 - DNA, 273 bp, Glycine max
  Clone ID: 700959751H1
cgcatccctccccaacccaaaacggaaccaggtgattttgatgacaagtcagatcctcctttatccgcacaaaatgacatacaagaatctgatatagagttggataatgctgatgttgttgaacctgataatgaccctcctcaaaagatgggagatccttctgctgaaataacggaagaacaaagggatgctgcacaactagcaaaatcaaaagcagtcgatgctatgtcacaaggtaatttggatgaagcactggcccaactgacagaagcc

SEQ ID NO: 17659 - DNA, 275 bp, Glycine max
  Clone ID: 700959752H1
ggcaaatcctgagttcgtcgtgagtcagagctatctaccttcacttcactcactctttcactttgtgtttcagattcagcagcaactctgcccgcatgcgtgcgtgaggtaagatgaaaactacttcaaatcaaggttgttgtacacacatatgtaaaatatcttgaattcgaagtgtgaaggatttgctgagtttcccaaagacatgtggtcagcctgttttcggcagaaatgaagaactcccagagcacacaagaattacagtccccggctca

SEQ ID NO: 17660 - DNA, 269 bp, Glycine max
  Clone ID: 700959754H1
gtggtaccagcagcagagcttgtatacgtcgccgcttcagcgtacaacatgatcattcccgagaagaaccgtaaagagatctgcaaatacctcttccaagagggagtttgctttgcgaagaaggacttcaatctggcgaacacccggagattgatgtgccgaatctgcaggtgataaagctgatgcagagcttcaaatccagagagtacgtgagggaaacatttgcgtggatgcactattactggttcctcaccaacgatggaattgag

SEQ ID NO: 17661 - DNA, 268 bp, Glycine max
  Clone ID: 700959755H1
agaagatggatgcaaccggggaagaaataatttgaactctgactaattagcctcaatattattaggaaaaatatcttgttaagtttaaggtccatttcccttcattagttgactatgttctgaaaaaagagtcaggagggagtgaaggagagattaataacatttgtgaaagaaaaggggaggagaaaggaaatgaaaaaaaaaatccaaaaaaactatacttgtttgtatgtagtgctctctcttcctctctctctttaacacttgt

SEQ ID NO: 17662 - DNA, 269 bp, Glycine max
  Clone ID: 700959725H1
ggtgaaacgattcaagatatttcaacaggacaacctgggacgccgtttgattacggtgccggacacgtcgatcccgtggccgctcttgatcctggtctcgtctacgatgccaacgtggacgattacttagggtttttctgcgcactaaactactcgtcatttcaaatcaagcttgctgcgaggagggactatacgtgtgacccgaagaaggattacagagtggaggattttaattatccttcttttgcggttcctatggatacagcttc

SEQ ID NO: 17663 - DNA, 226 bp, Glycine max
  Clone ID: 700959686H1
ctgcgttcctgtgaacagcggaagaatacaccgccacacgctgcaagccctttaccttgtgcttcctgcgttcctgtgagaacccacgttctctaacgcgcttctccttcaaagttcaaattcctatacatttgcgtaatcgcttctcaaatctcaacaaaagtattcccaaaaaaccctaattattattattaaacatgaggccgattctgatgaaaggccacga

SEQ ID NO: 17664 - DNA, 221 bp, Glycine max
  Clone ID: 700959687H1
ctaaaactttggaacccaaatgatgtcttccgaatctgttcttcctctccccgaaaatcccatcattgtggggtttggtggggttggagtcgattttcttgcagtagtggcatcttttcctaaacccgactccaagatcagaaccactgaattcacggtccaaggtggtggaaataatggaaatactatgacatgtgctgcccgtttgggcttaaagccaa

SEQ ID NO: 17665 - DNA, 222 bp, Glycine max
  Clone ID: 700959690H1
ctcacatacctcattgcctttgcattgttctctctctctctctctctctcttttctctgtgtgtgtgcgtggattggtgaatttgagattgaagaagatgatgcaggctggacccggcggcatggcccaacaagcgaaccagctatacgcacagcaacagcaacaacagcaacaacaggcctacatgatgatgccgccgcagcctcagccccctcagatgtg

SEQ ID NO: 17666 - DNA, 223 bp, Glycine max
  Clone ID: 700959691H1
ttcactttcaatctctttcccttcctttccttgtctttttatttttttacatcaaaattaaaataataacacccatcaaacaaaccacacttctccccctcactttgaaaacacctcaatcaatctcgatgatcatggcagcactcaattcaagcacttgtgccaaacctcaattccctcaccctctctcctcctctttctcttcttcttcatcattaacaag

SEQ ID NO: 17667 - DNA, 223 bp, Glycine max
  Clone ID: 700959694H1
gcttaggggctaatgggtaactgcctagattcttcagccaaagtagaagctgctcacagttccagaaccccttctggaatttcaaaaactagtccttcatctgttccttccaacttatctattctgtcatatagtgaagcaagtgatttctcaaatcttccaacaccaaggtctgagggcgaaatcttgtcttccccaaatcttaaggcctttaccttcaatg

SEQ ID NO: 17668 - DNA, 225 bp, Glycine max
  Clone ID: 700959695H1
atggcgtccatggccactttcttcacccaaacctccttcccctcccactctctctccaaaaccttcgatacccatttcgccccatccccgaaagtcaacgtatttgcgaacttcccggcgaggaggcacgtgggggttcgagtttcgaacgcgctgatcgaaccagacggagggaagctggtggagcttgtggtgagggataattcagaaagagacttgaagaag

SEQ ID NO: 17669 - DNA, 289 bp, Glycine max
  Clone ID: 700959701H1
aagaagaagggtgagctaaagtcaattttccttcctttcctttccactagtcacataatcccgctagtggacatggccagactcttcgccttgcacgacgtcgacgtcaccatcatcaccaccgcacataacgccaccgttttccaaaagtccatcgatttagatgcgagtcgcggtcgccccatcagaacgcacgttgtcaacttccccgccgcacaagtgggtctccccgttgggatcgaagccttcaacgtcgatacgcctcgggaaatgacccccagaatctaca

SEQ ID NO: 17670 - DNA, 283 bp, Glycine max
  Clone ID: 700959703H1
ctatgcaataccataaccttatctatcgcaaccacctcccaaatcactctcatccaacttcatctctctcttcccccagttgccagatctgaatcacaccttcactcttgcgatttaattactgagtagttgaggatggctccttttgcttttgcaacattgccctcttctcacatctgccgcctcccaaagcccacaaacttgaagtttcgagttcgctgctctactgccgcgtcttctccttcttcggtttccactagatcaaaagctgctggctttgatt

SEQ ID NO: 17671 - DNA, 278 bp, Glycine max
  Clone ID: 700959704H1
ttcaaaacatctctaaacgcttgtaaagatctccatctcccattgatcctcctgaagtttttgtattcaaccatggctacctatagttggtcaactgagatattttcatttttggttctaacgttgttgtcgacaagcagtcacacaatggttgctggagcacgcaatcttctcgaatcaaccttgtcaaaaccagaagtgccaacacttcccaaacctcatgagttgccaccattgccggaaatccctgaattgcccaagtttgagtcgcctaagat

SEQ ID NO: 17672 - DNA, 279 bp, Glycine max
  Clone ID: 700959705H1
cctccttctgatcccgtcgccttttttagggttcaagtcggtgtacaatctccccaagcaatcaccacttctcgactattactacgcagatttagtgatttcgtcaatctcttttctcaactgaaaaaggaatttcccataaaagatctgcctacacctccacccaaaaagataccaagaattaaaagtcacactgtgttggaagagcgacgccttttattagctgattggatggaaaagttgttatcggacgttgatgtatcaagaagtgccccggtg

SEQ ID NO: 17673 - DNA, 272 bp, Glycine max
  Clone ID: 700959706H1
agcggttctcattgttgtttctgagagtccttcagtctgtgttgtcgcttctggttcttcagcaattcttctcatcgtaggggaaaacatgaagttctgcaaaaagtatcaggaatacatgcaaggccaggagaagaaacttccatgtgtaggattcaagaagctcaagaagattctgaagaagtgcaggagaaactcttcatccctgaaaccccttaatgcatcccttgccgccaaaacctgccccgaccattgcccaggtaatcaaaatg

SEQ ID NO: 17674 - DNA, 259 bp, Glycine max
  unsure (1)..(259): unsure at all n locations
  Clone ID: 700959707H1
gaatgtgatctaggaattaggctgagggtccatcaacagggctacaaaaggagctgcaacgcctatcagttgaagattagaagtccatgctaaccccttcctttaaaatcttctaccctttatccattttctactaccccatctctctccctttcccatctacttctaaaccttcatcaaacataactctcttcctagagggacatanatatttttgtagcataggacttatttgattctcgttaattcacaccacaag

SEQ ID NO: 17675 - DNA, 272 bp, Glycine max
  Clone ID: 700959709H1
ctaatttctatcttcttctcttcgcgtacgcgtcgtcccccgcaacgacgtcgtttcatggtcgcgttgttgttgtgctggttctctatgcgaaaatcttctgagggcttctcggcgatgagtggagtaattcattctctggtgtttgattccgcatttccatttttaaatttctctgtctcccatgtaagaaatgtttgattggaacgacgaagagcttgctaacatagtatggggtgaggtgggtgagggtgatgatcatattgtgcctt

SEQ ID NO: 17676 - DNA, 271 bp, Glycine max
  Clone ID: 700959711H1
ctcgttttcaatatgcagatcttcgtcaaaaccctaaccggtaaaacgattacgctagaggtcgagtcctccgacacaatcgataacgtgaaagctaaaatccaagacaaggaaggcattccaccggatcagcagcgtttgatcttcgccggtaaacaactcgaagacggcagaactctcgccgattacaatatccagaaagaatcgacgctccacctcgtcctccgccttcgcggtggcatgcaaatcttcgtcaaaaccctaaccggta

SEQ ID NO: 17677 - DNA, 266 bp, Glycine max
  Clone ID: 700959712H1
ccgttttctaaatctcattcttcacctgcaactatttggattgctgatttttgttaataccatatttactgatattggcgcatttctttgagaaagttactaattcctagatagaggcaaaaatgttgggaattttcaaggagaagttggttaaagcacccaaagagctgaacagtccagcttcgttgaattcatgcactaagcctaagctaagtcacgaaatccttcaggatttcatgtcctgcaattcctccaatgctttctca

SEQ ID NO: 17678 - DNA, 265 bp, Glycine max
  Clone ID: 700959713H1
gagaaagagagagagagagagagaaactgagagaaattcgcaaaccctaatttcggaaagatcggcgatggctgcctccaaggatcgcgagaacttcgtctacatcgccaagctcgccgaacaggccgagcgatacgaagagatggtggaatcaatgaagaacgttgcgaatctcgacgttgaactgactgtggaggagcggaatttactttctgttgggtacaagaatgtgattggtgctcggagagcatcgtggaggatcctg

SEQ ID NO: 17679 - DNA, 263 bp, Glycine max
  Clone ID: 700959714H1
gccacgacacacaacacaaaacatcaagcattggtattcgttgagttggagaagcaaacatattgcgatcttaaagttctgaataacacagagaactacgttgcctttaaggtcaaaaccacttcaccaaagaagtactttgtacgacctaataccggtgttgtacatccatgggacctatgtatcatcagagtcaccctccaggctcaacaagaataccctccagacatgcaatgcatcgacaagtttctcttgcagagtac

SEQ ID NO: 17680 - DNA, 268 bp, Glycine max
  Clone ID: 700959715H1
ctcgagaaaaatcacgagccaactcctgaggaggttgccagaatacatagccaatttgttgaagcacttcaagatctatttgaacgacacaaagctcgagctggatatccaaaccttgagttgagaattgtttgatatggtcgtaacttcgacccatagtttcatgggggtaattacacttttcttctcttaggttaggctttatttgggagttttgaagatggagtggagtgattggttcatgattaattggatttgaatggggtga

SEQ ID NO: 17681 - DNA, 270 bp, Glycine max
  Clone ID: 700959716H1
gtaaacttctattatgtagattattgaaataaaactttaattttgatcaaataacaaggttataaggagcctaaagatttgtatgtaagttttgttcgttgctaaatagtaagttgtccaaacacaagggaaggacataccttttcaatatggtaatatattctattgtctttcactcccatatgagcgatcagccaaaagtaaaggaactccttgtatataatatggtgatgtcttgttgagttattactgagagatattttcaatgtg

SEQ ID NO: 17682 - DNA, 242 bp, Glycine max
  Clone ID: 700959718H1
ataaggcattacaaaaacagttgcttttaaattgtgagctggtatgcagtaattgctggtgggatatacgtgcctgttatattgaagtatcagcgtcatacccactgataccgtaatgctaacgatatgcctagatatgcattcaaggagtatcctccaatttgttacttatcttaaaattttattaactgatacatttggaatacaactgccttccaaaaaagagcaacccacttgggaat

SEQ ID NO: 17683 - DNA, 277 bp, Glycine max
  Clone ID: 700959720H1
ggaacataatggagaaccctgcttggtacactcagtatacaccttaccaggctgagatatctcaggggaggcttgagtcattgctgaattaccaaaccatgatcaccgacctcaccggcttgcctatgtcgaatgcttcattgcttgatgagggtactgctgctgctgaagcaatgtctatgtgtaataatattcagaaagggaagaagaagaccttccttattgcaagtaactgccaccctcagacaattgatatttgcaagacaagagctgatgg

SEQ ID NO: 17684 - DNA, 276 bp, Glycine max
  Clone ID: 700959721H1
ctttctccgatggctaatccctcactcttgttcttcagtctcctcctattatccgccaccgtagccgccgccgaacggatctacgatgaagacgaccttctgatccgtcaagtggtgccggatgcggaggaccaccacctgctcaacgcggagcaccacttctccgccttcaagacaaagttcggcaagacctacgccacgcaggaggagcacgaccaccgcttccgtatcttcaagaacaacttgctccgcgccaagtcacaccagaaattggat

SEQ ID NO: 17685 - DNA, 275 bp, Glycine max
  Clone ID: 700959722H1
ctggatgaatgcttgtttcactgatggtatccatttagcagctgagggaagcaaaattgtggttaaggagatattgagagtgcttaaggaagcagaatgggagccatgcctccactggaaatccatgcctactgaatttgcagaagactcaccatatgatcttgttgctgctgatgggaaaactacactgaatccttctgagtggactttttacagagagattcagtgggattaggttgttaggttatcaactttaatcataatcatttgctctg

SEQ ID NO: 17686 - DNA, 272 bp, Glycine max
  Clone ID: 700959724H1
tctcgctttctttcttcccaccttttctctgtctcttcttcttcttccattagttcctgctgatagtcctaacacaacaccacccttcttcatcttcttatgtttttgacttgtggccaccactgtgacccatttctgtatcttctggcaaggttctatccgtttcttcttttggatcacccttttcactgttcgactccttcttgctatctgcttcgtcaatctgattattcatgggtgaaaagctaatttgttcacttgaataggtgtac

SEQ ID NO: 17687 - DNA, 222 bp, Glycine max
  Clone ID: 700959684H1
ctctgtgaaaaagggggagtttcttattccttctagacgcttccattgatcggcgatttctgatacatggcggagatcacgaacacgaggaagtgaagggtgagtccttgttggagaagatttctgggaagatccacgaccacgattcctcgtcttcgtcggattccgacaacgacaaaaccagcgccactgattccttcaagtctaatgttttcaggcttt

SEQ ID NO: 17688 - DNA, 230 bp, Glycine max
  Clone ID: 700959641H1
ctcactctgtgactgtcgctggcagctcaggtgttccttgtatagatctgtggtttggttttcgggagggaacaaaaaaaaaaggaaaagatgaatagctacagctactatgggtaccaagagaagaacaccttgacaagctgtgaggagacgaggatggaatcagtgatttgccccaaacctcgccgattgggtctcataaaccactcttccatcaacacagaagtcgg

SEQ ID NO: 17689 - DNA, 227 bp, Glycine max
  Clone ID: 700959642H1
aacaccatctatctaaggcagtcaagagccatgaacccttttcaaggagttatgtatgattatatccgtttagaacgacctccattaacacagatttgattgtgtccaacttctagttgacaaagtcaaaacatatatgtagactttatgcatttcgttttattctttttcaaactagagttagtggaaaaacatgattagctagaaagaagttactgatatataga

SEQ ID NO: 17690 - DNA, 229 bp, Glycine max
  Clone ID: 700959643H1
taatggttccacgccaacggaagcgagcaaaccttcatcagcctctccagcatcatcgaacacttcaaagacagggaacgactatgatttttcctccttaacacaaggaatgtttgcaaaacactgattggcctttgcttaacatcacctgctatgtcatataccacagaagattagttaaaagttacagaaaagtgcactcttcttctttcccttgacccgtatactt

SEQ ID NO: 17691 - DNA, 227 bp, Glycine max
  Clone ID: 700959644H1
ttcacttttaagttaaatagtttttcattgtatcatttaatctacaatggctgcttcaacaatggctctctcttcatcatcattggctggccaagctatcaagcttgccccctccacccctcagcttggtgttggaagggttagcatgaggaaaacagcctccaagactgtttcttctggaagcccatggtacggcccagaccgtgtcaagtacttgggcccattct

SEQ ID NO: 17692 - DNA, 229 bp, Glycine max
  Clone ID: 700959646H1
aataggtttcacaccacactaaagccaattagtccctctcttctccctttccttttctctatccaataatagagccttagaagatagatagaaagccatgcaagcatgttcctcctcagacgctccactctccaagaggttagatggcaaagtagcactcataaccggcggagccagtggcatcggtgaagccaccgccaagcttttccttcgccacggtgccaaggtc

SEQ ID NO: 17693 - DNA, 224 bp, Glycine max
  Clone ID: 700959647H1
ctggattcaaagtatggaggatggaggggtctcgatgcagcaacaagcgacaataacgtctctttatggtggggagatctaaaattagctcttcaccatccccaacatgagattgttacaggagggttaacgtggaaggtggggaatggagccaaaatcaagttttgggaggatgtttggagctatggagacacaccgcttctggcaaaataccccagattgta

SEQ ID NO: 17694 - DNA, 238 bp, Glycine max
  Clone ID: 700959649H1
tatctcgagccgtatcggctcgagccaccattggatccaccaatctacaaccttcttctccaatgttccgtttctctctccaacgggaagaactttttttttgtgtgtgtttttggtggtgagtttgtaagaagcaatggcacgcaagaagatcagagagtatgactccaagagattgttgaaggagcactttaagagactctctggccaggacttgcccatcaagtccgcacaagtt

SEQ ID NO: 17695 - DNA, 232 bp, Glycine max
  Clone ID: 700959650H1
ctcgagccgttccctgccaagctttctggattttcctgaaaatggctctattgataataatcgggtagaaagtagtgcctgccctataatggcatctgaggagtattctaagcaaaatgattggcaggagtgggctgagaggctaatcagtgatgatgacactttgactactaattggaatgaccttcttgctgacaacattcaagatcttgagccaaagattccaggacat

SEQ ID NO: 17696 - DNA, 232 bp, Glycine max
  Clone ID: 700959651H1
atttgttattatcttctcacataaacaagtgctttcactagagttgcttgaagagtaactttaaaatattttctgtctttatgcttcatttttttaaagttatactaactaactcatctttgtctatcatattaaaaaaaaaaaaaaaaaaaaaaaaaaaaaaagggggggcccccgtaaagggggccgttgaaccggggatttatttcgggccgggcactggggggggaac

SEQ ID NO: 17697 - DNA, 230 bp, Glycine max
  Clone ID: 700959652H1
gattggaggagatagagaaatgggaatggaagcggaaacctctaattgagttgccattcccaccaccatttcccatggcctctgtttggacactgcactttcgctcgctttctcttcgtccatgcctctacattagtcgcagtaacagtagcactgccactagaaattgcattagcatcagaaatggaatctccaattggcgctctggcacccaacaactcaaacacgat

SEQ ID NO: 17698 - DNA, 230 bp, Glycine max
  Clone ID: 700959653H1
tcagttaccatgttgagccatgtgattcagactcatctggttcaaatcctctggacaacttactcaccaaggatagtgattttgatgtagagcaatcgtggccagtggtagccccgtcgcccctatttttcagcgggtcgacgccgagcagagctgctaaccctttgattcaggatgctcgatttagggatgcgaatttttgcccgctctcaccaccgtcgtaggtggtg

SEQ ID NO: 17699 - DNA, 226 bp, Glycine max
  Clone ID: 700959654H1
ggaagttaccactgccagagtctgatgaagaactttatgaggtctatgaagatgctacattggagaagattgcacacaccaaccaaatgaggtttctagatagagcaagcattcatcaggaaaacatcgagtcacagcaatggaaagtttgcacagtgacacaagttgaagaagtgaagatcctaaccagaatgttacctatactagccagtaccattataatgaa

SEQ ID NO: 17700 - DNA, 228 bp, Glycine max
  Clone ID: 700959656H1
gaactacatggacacaacacacacaaacagtgaatatgaagattggaagagcattgatatagcagattctatcttaagttatggtgaattgggagacatggaagaaaatgaatggcagatggtgcaaacgaaaggaaaccaatttgtggtgaacgaccaacctttctatgttaatggattcaacacatactggttgatggtatttgctgcggatgagtccacaagagg

SEQ ID NO: 17701 - DNA, 208 bp, Glycine max
  Clone ID: 700959658H1
ttcagatggtgatgtatttgatgtacagaaacgccaccccagtggcactagaggagccagtgaaggctcaagaattgaatgggcacatcattgacgttgtgaagataggaacaatggaaccgaatcacggtggtgctgttggcaaagtttgatatgatttcgtcattgagattatatgaatgtggagaaacaagggatcaatgacaag

SEQ ID NO: 17702 - DNA, 80 bp, Glycine max
  Clone ID: 700959660H1
caaaacagtgaaagagagaaaacaaaaacactgcacaaaacaatggctcggaatttgattcatcgaccatccactaaacc

SEQ ID NO: 17703 - DNA, 235 bp, Glycine max
  Clone ID: 700959665H1
ggtgctgggtgtaatttccattactcccaaggcccaagcagcagtgacatgcaaccaggtggtgagcaacctcaccccatgcatttcttatgtgctcaatggtggcaaaaccgtgcctggcccttgctgcaatgggatcaagaccctctttaacctcgctcactccacaccagaccgccaaaccgtttgcaagtgcataaagaacgctgttagtgcgttccattatggcaagtca

SEQ ID NO: 17704 - DNA, 232 bp, Glycine max
  Clone ID: 700959666H1
caagcatggcaacgaccccaagcaccacacagaatggtacagagttattaggaaaggagtctgatggaaaagatcgggtttctgccaaaagttcgaagggtgtgtctacaaacagtggttccaaagcaggagacaatggaaaggcaggctcaggttctggaaatgatggtgtctcacaaagctacaaacaagaaagggagttttaaccaaatgcttgttgatggagccaatg

SEQ ID NO: 17705 - DNA, 230 bp, Glycine max
  Clone ID: 700959668H1
caaagagatagctcgactgaagaaattgattggatattggaaggagcaagcaggaaggagaggagaggatgaagatttagaattttaaggagagatagtaacaagtattctttctcgttgaaggcatatatgttggaattatatcaagatacacttgtagatcttctgttaccgaagaatgcaaagcgtttaaaattggatattaagaaggattccaagggaatggtagc

SEQ ID NO: 17706 - DNA, 226 bp, Glycine max
  Clone ID: 700959670H1
ggatttcatagaagatgcttacagggggagaaacaagtttgataggccacccccaccggactgggataatagagatcgtggaagagatggcttctctgatgaagggaaaggatttgaaaggaggccactgtcaccccctccacctcttttgccatcacttcctcaccatcgtggtggtcgatgggctcgagatgttagacagagaagccgctctccaataagaggt

SEQ ID NO: 17707 - DNA, 220 bp, Glycine max
  Clone ID: 700959671H1
acttagtaagagaaacacaaagacattcattcttgtaccactggcaacagaagaagcacccatccacggcgatatcttagcggccatattctcgcacgtgccactcatccaccttgtgcccgcctctcacgtgtcgaattcctggaagcgtgcggtgtcctcctccctcgcccacgtcatacccatcaagccgtggttaattgtcctcacccagagcctc

SEQ ID NO: 17708 - DNA, 225 bp, Glycine max
  Clone ID: 700959672H1
gggcataaagtcgttgacagtgaaaaacaaactcctctcactcttccttccatctcttcttcaacattccaatccaatccaaaacgctgcgttttattttgtattcaattctatcaatcccaaaattcctcgccggagatagagaatcttaacaattccaccactttccggcgagacatggccgtcgccgtctccgtccccgtccgccagaagccgagctccgac

SEQ ID NO: 17709 - DNA, 226 bp, Glycine max
  Clone ID: 700959673H1
ctcacccagtcaccaaccccgttgtccggagccaccattttgcgctccggcaatgttcttcccggtggccatcgtcccttaaacccaccacacttcaaagtcatgggtattccatgggacgacgtcgttgtgatacagcaagggaaggatcacaatgagccctgcatcgtcaccgtcaattgccccgacaaggctggtctcggctgtgatctttgcagaatcatcc

SEQ ID NO: 17710 - DNA, 80 bp, Glycine max
  Clone ID: 700959674H1
ctcgagccgctcgagccgattcggctcgagagccataatagcattgggttctatctctaggctctgtcctaccacaaaaa

SEQ ID NO: 17711 - DNA, 223 bp, Glycine max
  Clone ID: 700959676H1
aaaggattttgggacatgtacgatccagagggatattctctgtggttctgtgattacaaatacaattgtgagaacacagtttcctttgttacgttaaacaaggttggtggatttcttcagaggatggatctggctcgcaagtatgcatttggaaagatgctggtgattggatcacaggcaccatttaaggtgaaggggttgtggcttttccgtggacaagaga

SEQ ID NO: 17712 - DNA, 214 bp, Glycine max
  Clone ID: 700959677H1
aatatgcctggatatatatgaggccatatagcaaaaacgttggtaccaaaaccaacatattagaagagagagcacttcattttagctagctagagaaaaaaaacaaagtgatagtgagaagatgttagctatggagggtaataagaagactaagcaatatggtcttgactctgccacttcttggtttggaagttgcatttcttcatgttcatca

SEQ ID NO: 17713 - DNA, 224 bp, Glycine max
  Clone ID: 700959678H1
atagaaagaaagacagtgcaacttcctctgttttgctcccctgtttaagccttatcataagcttagaatggcacacaaggaattttccattgccctagtgactctcattgttctctttgtcaacacgaacctccaaggtgccacggctgactatggtggtggttggcagagtgctcatgccactttctatggtgggggtgatgcttctggcacaatgggtggag

SEQ ID NO: 17714 - DNA, 226 bp, Glycine max
  Clone ID: 700959679H1
caagaagctgcctcaaaaagagttcatccaacattgcatttacctgcaaattcacagccctcaacccaagttgctgggttgtttttcagttctgggactcaagcagcattgcctgccccacagacagctgcatcaacttcatctttgtcatcaggaagtggattatctctttttagcacaccatcttctgctccatcatcttctatgttgtcatctctgtttgcaa

SEQ ID NO: 17715 - DNA, 229 bp, Glycine max
  Clone ID: 700959640H1
cttcctcacgcatttcctcgtttttttcttcccttttctctttctccggcgacgatctcagattccggccactcctctcgccggcgagcccttactcttccctcctccgtcgagccctctccgattcgaatcgttcccagcctcgcaccaccatgaatcccgaatacgattatttgttcaagcttttgctgattggagattctggtgtaggcaagtcatgtcttctcct

SEQ ID NO: 17716 - DNA, 185 bp, Glycine max
  Clone ID: 700959682H1
gtcggagctcggctcggctcgaagactgttaaaatctccccgattagaaagattgtatctgaagattcgggtactttatgagatgtagtgactgtgcctgttgagcaaactaatgtggaagattcaccaggaagaattcctgatgctgaaaatgaagcagagttgtcatttgctgttgtaaatga

SEQ ID NO: 17717 - DNA, 220 bp, Glycine max
  Clone ID: 700959603H1
gttgaaaatcaacaaaaacttatcaatctctctttttctctttctctctccggcacctcttgttaaaaaattgttcttttcaccgaaacccgtaaagggtcctgagctagcttcttctccatccatggtcctgatttttttcttcctcttgttttcagcttctatatgcaaaagggggtgggaccaatgcctgcaaatattgataatgtagttactcact

SEQ ID NO: 17718 - DNA, 237 bp, Glycine max
  Clone ID: 700959605H1
ttcttcttcaaggtgttgggagacatgcctagcaaacagacttatagcttttgcttctgacttccgccggcgtttcaggctccccgtgtcggaggccccgccggagataaggacccttttcgaccgttactccgatcagaatggcgtcatgacagccactcacctccgaagtttcctggctgaggtgcagagggaagacaatgccactgaggaggaagcacaaaccatcatcgatgg

SEQ ID NO: 17719 - DNA, 235 bp, Glycine max
  Clone ID: 700959606H1
gaaaaacgttgttgttaccatctcttcggacaaaggtctttgtggtggaatcaattccacgtctgtcaagataagcagggttttgtacaaattgaattctgggcctgataaagagacaaaatatgtcatattgggagagaaggctaaagctcaattgttgcgtgactcaaggaaacacattgtgctcagccttactgaattgcagaaaaatcccctgaattacactcaggtgtct

SEQ ID NO: 17720 - DNA, 236 bp, Glycine max
  Clone ID: 700959607H1
caacaacattcattcattcacagctgtcacgccgtgaacggaaaatggcaacggcgagacgcagtttcccgcctatcaccgaatgcaacggaacgacaccgtgcgagtctgtggccgccgacctcgacggtacgctcctcatctcccgtagctcgttcccgtacttcatgctcgtcgccgtcgaagccggcagcctcctccgcggcctcatcctcctcctctcccttccgttcgtc

SEQ ID NO: 17721 - DNA, 233 bp, Glycine max
  Clone ID: 700959608H1
cgcatttcctcctccgtagtccgttccccgaacccgacaaaacctgacattgctccggatcccggagacagccgcaggttcctccacaagagggcctccgtgctcccgccggagctccgcccgccgctgcccgccggcagcctcctccagaggctccgggaaatggacattgcgcggagcggatccggctagacggtctcgctccgccggagactgaacaaacggtggcgccg

SEQ ID NO: 17722 - DNA, 235 bp, Glycine max
  Clone ID: 700959609H1
ctcagttctccaactctctgatctcaacttccacttcagcttcaagaccaatggccaacgacgattgctgcgccacgcaactcatcgacggcgacggcgagttcaacgtcgccggcctcgacaactttatcagaaccgtcaatctcgcctcctgcggcctctcctatgccgtcgtcgcaatcatgggacctcagagtagcgggaagagcacgttaatgaatcatcttttccacac

SEQ ID NO: 17723 - DNA, 230 bp, Glycine max
  Clone ID: 700959611H1
gttatctactcttttctgcatgtttgttctctcaacgactcctccgcgaaagagtattattcaatattttggttgggttgaatcccggggttgaagcgttgcagacatcacggctattctaagagtgtctcgctccctcattcatgtccgatctgtacgacggaggacgggtagttgcgtaactgccgttaacccttcgccgcacggtgggcgtggtgctttgccttctg

SEQ ID NO: 17724 - DNA, 231 bp, Glycine max
  Clone ID: 700959612H1
tttgaacgattcggctacttccctcacgcgccgcccttctcgaatttctccgatgaattcgacgacgcgctcgaatccgccatcaaaacttaccagaagaacttcaacctgaacgtcactggcgtcctcgacgacgccaccgtgcagcagatcgtgctgcctcggtgcggcgtcgcgatataatcaacggcacaaccacgatgaacgccgccaaggagaacgagacggcgt

SEQ ID NO: 17725 - DNA, 233 bp, Glycine max
  Clone ID: 700959613H1
aaacacaacgcacaacattcgtcattcaccgccttgtcttgtcttcttctgtctatcaaatcacggaatctctctgaatcgcgggattaagagaggaatatgcaacagaggctaaagttgcagcaacaacaggccctcatgcagcaagctttgcttcaacagcagcagatgtaccaccctggcatgctcgccgctgctatgtctcagatggagcctgttccaagtggaaatgt

SEQ ID NO: 17726 - DNA, 232 bp, Glycine max
  Clone ID: 700959615H1
aaagagatcacatagcagaatggcttctactcaatgtttcttgcaccaccatgctcttaccacccctgccagatccccatcacaacgcatcatggttagcaccaagcctaaccagcttgtttgcaaggcacagaagcaagaggatattgatgtcagcccaatctctcgccggttagctctaaccgtgctcattggtgctgctgctgttggctccaaagtccaacctgctgat

SEQ ID NO: 17727 - DNA, 224 bp, Glycine max
  Clone ID: 700959617H1
acgtgagtcaaatgtttactcttcatggtggccttggttgttgttcaacatgtgaagtgtggggactcagctcgcatgttacttcagcacggtggcttcgttcaacgaattggcaccaacttcgttctgagtaacaggcatttctacttcaacggattcaacgcgtactggttaatgtacatggcatctggcccagccacaaggcccaaggtcactgccgtttt

SEQ ID NO: 17728 - DNA, 227 bp, Glycine max
  Clone ID: 700959618H1
gtttaaatttccaggtggagggaccatgttccctcacggagcagatgcatatattgatgaacttgcgtcagttattccaattgctgatggttctgtcagaacagcactggacactggttgtggggttgcaagctggggagcctacttgctaaagagaaatgtgctggctatgtccttcgctccaaaggacaaccatgatgcacaagttcagtttgctctagaacgag

SEQ ID NO: 17729 - DNA, 232 bp, Glycine max
  Clone ID: 700959621H1
tagaaacagtgtgatgaaaatgaaggtccttgttttcttcgttgctacaatttatgtagcatggcaatgccatgcgtacgatatgttccctctccgaatgaacactggctatggtgcccgtactccggaggtgaaatgcgcaagttggaggcttgctgaggaagcacacaacatctttggctttgagaccattcctgaagagtgcgttgaagcaacaaaggaatacatccat

SEQ ID NO: 17730 - DNA, 231 bp, Glycine max
  Clone ID: 700959622H1
cctaattctcatttcttcatcgttcgattcttctcctcctaaagatgcagatcttcgtgaaaactttgaccggtaagaccatcacccttgaggtggagtcctccgacaccatcgataatgtgaaagctaagattcaagacaaggaagggatcccacctgaccagcagagacttatctttgcgggtaaacagcttgaggatggtcgaacccttgccgactacaacatccaaa

SEQ ID NO: 17731 - DNA, 66 bp, Glycine max
  Clone ID: 700959623H1
gttctagatcgcgagccgccgcccttatgcagtcgttcttgtaccagtggcaaaaccggaacgggc

SEQ ID NO: 17732 - DNA, 231 bp, Glycine max
  Clone ID: 700959624H1
cttggaattccatgattgcgggaatgatgttaaataaagagagtgagagagctgttgatatgtttcaaaggctggaatctgaagggttgaagcctgattcagctacttggaattccatgatcagtgggtttgcacaactaggggagtgtggggaagcttttaagtactttgggcaaatgcagtctgttggtgtggctccatgtttgaaaattgttactagccttttgtcag

SEQ ID NO: 17733 - DNA, 231 bp, Glycine max
  Clone ID: 700959626H1
gttttgataaagctgacagaaagcgcctgttcactatgattaatgatttgcctacaatatttgaggttgtaactggatctgcaaagaaacagacaaaggagaagtcatcagagaacaatggcaacaaatcaaagtccagttcaaaagggcgaggatctgaacccccaaagtattcaaagctagtgaaggatgaggaggagggattggacgaagaagacgatgacgagcatg

SEQ ID NO: 17734 - DNA, 230 bp, Glycine max
  Clone ID: 700959627H1
aaacccgtgactcagcccactcttgctttgcttggctcaaccgctaaccaaaccaaagctctctcaatggcttcggagcaacacgacgccgttttccgcgaagaagacatggacgacgacgacgacgagtctcaggaggacgaagagtacgaagaagacgacgacgaagaaaacgtgccctctccctccaccgctctcgctgtcaccgtcgccgtccccggttccgccgt

SEQ ID NO: 17735 - DNA, 70 bp, Glycine max
  Clone ID: 700959628H1
cggctcgagcggctcgagggcaggaactggtttctccacctcctgtctttccacttccagacactaaggg

SEQ ID NO: 17736 - DNA, 230 bp, Glycine max
  Clone ID: 700959629H1
tgtccacaacacaagaaaaccaacctaattccgagaagaagaaaaacattcattgtttccataaaaaagaaaatggaacgctctacaaaactcttctcggcggcgttggttctctgcgtggttgtgatggcacaccagacagcagcacaggaactaaaaggaaataacctaatcaacaaggtttgcacaatcaccccgagcagagacctctgcgttgggatcctctcatc

SEQ ID NO: 17737 - DNA, 230 bp, Glycine max
  Clone ID: 700959630H1
cttcggacatgtaatgaaatgagacgtaaggaaacgaaaaccctcttgttgttcatcttatactgaacttggaattatgtgcatcaccgtcgccaagtctcaatgaacgctgtttggagtctcgaatttctcgggaaacaaacacaatcaatcgtccgaactcaaacctaaacgacaactaatcgtggcgaatggcggtttctgaagaagaatgctcttctgcgaattca

SEQ ID NO: 17738 - DNA, 231 bp, Glycine max
  Clone ID: 700959631H1
cgaaaccctaaccctacctcctcgcccccatgcccatggctaagaaacgaaagcttcgatcctccaacccagaacccaccaaacccgtcgagccacagcaacagaaccacgagactgttgaactcgaccaacagcaacccatccccgaaccaaccctagaagactccaacaccatggccatccgcgaaccaaaacatgaacaagaagaagaaccgcaaaacgccgaaagcg

SEQ ID NO: 17739 - DNA, 233 bp, Glycine max
  Clone ID: 700959632H1
attgcaatcaaattagttcattctctttgcgcagttccctacctctcctttcaagatgcagatcttcgtcaagaccctcaccggaaagaccatcacccttgaggtggaaagctctgacaccatcgacaacgtcaaggcaaagatccaggacaaggaaggaattcccccggatcagcaccgtctgatcttcgccggtaagcagctcgaggacggccgtaccctcgccgactaca

SEQ ID NO: 17740 - DNA, 59 bp, Glycine max
  Clone ID: 700959633H1
tgtccgtatgactgatacccgtgcagatgaagctgagcgtggtattaccatcaagtcta

SEQ ID NO: 17741 - DNA, 77 bp, Glycine max
  Clone ID: 700959634H1
atatttgttacttatattttcttcgttcagcatggactcgccgaagcggcaggggcagaactttctggtggcggtga

SEQ ID NO: 17742 - DNA, 237 bp, Glycine max
  Clone ID: 700959635H1
cagccacaggttggcatgcctcctcccccctctggacagaagcaccctaagttcatggacttcaatcagcagaagtagctaataatagttgtagcagtaaatgattgattacatgcaatattcatcacaagtaacatcctgtgcatatgaatgtataactaactggtgagacttgtgaaggatatattgtgcagttcagtgtctttagtcatgtgttgtttatctttagttctagga

SEQ ID NO: 17743 - DNA, 239 bp, Glycine max
  Clone ID: 700959601H1
gtccgtatgactgatacccgtgcagatgaagctgagcgtggtattaccatcaagtctacaggtatctcactctactatgaaatgactgatgaagctctcaagagttttaagggagagcgcaatgggaatgagtatcttatcaatctcattgactcccctgggcacgttgacttctcatctgaggttactgctgcactccgtattactgatggagctctagttgtggtcgattgtgtgga

SEQ ID NO: 17744 - DNA, 233 bp, Glycine max
  Clone ID: 700959636H1
gggtgttcaagaacagcaatgacttgggagtgaagttcccatttaaccaaccaatgaagatatacaacagtttgtggaatgctgatgactgggccacaaggggtggtttggagaaaacagattggtccaaagcccccttcatagcctcctacaagggcttccacattgatggttgtgaggcctcagtgaatgccaagttctgtgacacacaaggcaagaggtggtgggatcaa

SEQ ID NO: 17745 - DNA, 228 bp, Glycine max
  Clone ID: 700959638H1
gagaatggctcccaagggtctaacctttctggctgtgttaatatgcgtttcagcactgtcactgagtccttctgttgcgggggaagggcaaaataatggccttgttatgaacttctacaaggaatcatgccctcaggctgaagacatcatcacagaacaagtcaagcttctctacaagcgccacaagaacactgctttctcctggctcaggaacatcttccatgactg

SEQ ID NO: 17746 - DNA, 219 bp, Glycine max
  Clone ID: 700959639H1
atttgggagttacggtgtttgctcaaagatgattactaacccttcattgcatgcttcaacattgccaagtgctttatcttcatctctgattactctacatggaagttctgtaaagtgtatgccctgccttccatttagagccctaagaaaaatcaactggataagagctacatctgctgcagatggagggcctattgagtcatcgccagctttgggatc

SEQ ID NO: 17747 - DNA, 246 bp, Glycine max
  Clone ID: 700959557H1
ttctacatccctggctctgttccgtcgatgacgatggcgtttagggtgcgaaaccctgacctccgctttctcattcttctctctctcttgtccatcacttccgccaaggtcttcttcgaggagcgtttcgatgacggatggggaaatcgttcggttaaatcagattggaaaaaagatgagaacctggctggggagtggaaccacacctctggccaatggaatggagacgctaacgacaaaggtatt

SEQ ID NO: 17748 - DNA, 245 bp, Glycine max
  Clone ID: 700959558H1
cttttctctgtttctccctttctctctgtctctctctcgctcttcttctcatccagcaccgagtcacagactcaccgatcttccgattccctttcgtcttggtttattagctcgaaggagagacccactcttggtggcacgcggattaagacccgcaaacggaatattgctgcgccgctggaccctgcagcattctcggatgcagtggtccagatttatttggataatgctggtgatctggaact

SEQ ID NO: 17749 - DNA, 248 bp, Glycine max
  Clone ID: 700959560H1
caattgctgaatttgcacttcaacaggtaaaggctcttttgaaggatcggttaagtggaaaagcaacaggaggatctagtgaaaagacagaaaccagttcttcagtagaattaaactctggcaactttgatgaattggtgatcaaaagcaaagaactctggattgtggaatttttcgcacctcggtgtggacattgtaaaacattagctccagagtggaagaaagcatccaataatttgaaagggaag

SEQ ID NO: 17750 - DNA, 248 bp, Glycine max
  Clone ID: 700959561H1
gaggaagaatcagagctcagcgataagcagaaagtggagatcgcgcaatggttcctcctcaactctcctcccggagaaatccaatacgttgccaaagatgtgaaatcgattctcaacaacgacgatttgtacaaggaagccgcttccgaggcttttccctattacaacaaatcgcacttgatttccattccaatgcccaaccgaagcggagacgtactggttacttcgttcggtgagcttgagggtaa

SEQ ID NO: 17751 - DNA, 247 bp, Glycine max
  Clone ID: 700959562H1
caaaccctaatctcccaaaaccctacgcatggcgtcgtcgttaattcacctccgccgcaccgtcagagcactctccggcgtcgcccagtctttctctgtgcatgcggcatcgtattccgtccccattcggtgcggtgtttcatggagtttgcagtcaccgaagggtgtggttcagccccgttcattcaggtcaagctcaatttcacttctctcttttcgatcctcgcagcggcagagtcgcatcccc

SEQ ID NO: 17752 - DNA, 250 bp, Glycine max
  Clone ID: 700959563H1
atctttcaccattctcttattttctaaccatatttttgttttctcaatttccaagggacatttggattcttagttttcacttttataccatatttcttgaaaccttgtgttaaaaattgtgtccttttgaacttcaataacaatttggacttttttgtagtttcatacccacatacccgttgttggatttgcactggttttacttgctccatggctcttcacataagcagtggttgttttactgtgatgt

SEQ ID NO: 17753 - DNA, 250 bp, Glycine max
  Clone ID: 700959564H1
tctctttcaacaatgacaaacttgaagcctctaattctcttagccattattgttatgatttcaataccatcaagccactgcagaaccttgcttccagaaaatgaaaagctgatagagaacacttgcaggaagacccccaactacaacgtttgccttgagtctctgaaggcaagccctgggagctccagtgctgacgtcacagggctagctcaaatcatggtgaaagagatgaaggcaaaagctgactatg

SEQ ID NO: 17754 - DNA, 85 bp, Glycine max
  Clone ID: 700959565H1
aagacttgctctgcctctgccactctctgagtaggactacactgccatggctgcctcagtctccactgttggagctgtcaacgga

SEQ ID NO: 17755 - DNA, 118 bp, Glycine max
  Clone ID: 700959567H1
ccggagagtatgaaatcttcagtaggttctaggctcccaaaattcacaaaagctgaatctgaaggtctaaaaaattccatagattttcttggtgtgaattactacaccacttattatg

SEQ ID NO: 17756 - DNA, 249 bp, Glycine max
  unsure (1)..(249): unsure at all n locations
  Clone ID: 700959568H1
gttcctgctccttccanccttgagagcgagaaaccacgtttctctcttgaggttaattcttattattcattgagtattgagcatggaggcgccatctctcaccaaacccaacgacccaccaagaccttccaccacttccagcacccttagtctgcagggggggccgggcgaacgagcccactccgaaaaatgtttgcggtggcgtccatcgccgccggcatacagttcgggtgggctctgcagctgtct

SEQ ID NO: 17757 - DNA, 249 bp, Glycine max
  Clone ID: 700959569H1
gttcgagtatgtacttcagatgattcatgtagatatggaagagttactgagctttatgtgtatgacaaattcaatagggtccctgcaaataaggtggaggcaggagatatatgtgcagtatgtggaattactgatattcagatcggggagacaattgctgataaagtatctgggaaaccactaccttcaatcaaggtggaagaaccaacagtgaaaatgtctttctccataaacacttcaccttttgtt

SEQ ID NO: 17758 - DNA, 51 bp, Glycine max
  Clone ID: 700959570H1
aaaattagggaaacaaggaagcaaaatgacacaatagtccttcttccctgt

SEQ ID NO: 17759 - DNA, 248 bp, Glycine max
  Clone ID: 700959571H1
tggaccagaagaatacatcatagcttctttctcatttcacacacacaataacctccctcgagcatttcttcttcgtgttattttggttgttaaccatctgcggtgcctccatcttttacgtgacgtgtaggaaccatttggggtgctatgctatgctacctaagacatcatgaagatttcaagttccaagcaattggctgtgggatttgcacttggaaatgaaggataggcaacgttggagagctgaa

SEQ ID NO: 17760 - DNA, 106 bp, Glycine max
  Clone ID: 700959572H1
ctcgaagggggttttaggttgctcttcttcttcaaccttagccatggagtctctcccaaaaattcgtcattctcacatctcactcaatcactcactacttcaacga

SEQ ID NO: 17761 - DNA, 244 bp, Glycine max
  Clone ID: 700959573H1
tgggaatttgacaaaaaagtagccactgccccaacgatcccatttcccttgacttctctacgtgaacgtccttgttttgcataggagctagttgaaatgtccgagggaaatgcagggaaaggaaagaaaatcgccatcattggtgtctcaaccttattgttggtggctatggttgtggcggtcacaattggggtcaatctcaatgagaatggttccaccaatgatatagaggacaacaagaaag

SEQ ID NO: 17762 - DNA, 245 bp, Glycine max
  Clone ID: 700959574H1
cagttatccagaaacagaaaccgtagacaacccgaatcccttattaagcaggggtttcgcggcgcgagacggtgacactggcagagtggaatttccgccgccattcgaagctacagcgatggccataaccgccaccatttccgttcccttcacatcccccagtcgccgcactctcgcctccgtcaatagcctctctccgcgttctacccgatccactttgcccacaccgcaacgcactttcaaat

SEQ ID NO: 17763 - DNA, 242 bp, Glycine max
  Clone ID: 700959575H1
atttctcgattcatctctctcattgagctgcattgcaacactcactcaccaatggcactctgacccatcgacaacgctcttccaacaaccccagagagacctaaaaaacaacccaaagtcgctcttgcaacccaaaagcaacaagaccgtgctggcgtcaatggcgaaaacatagttccattgccctcatctggggatgccactgttgactatgtctcctccgacaaccttaagcccttgtc

SEQ ID NO: 17764 - DNA, 241 bp, Glycine max
  Clone ID: 700959576H1
gagaatgactgttactgatgagagcttggagtttctggctctcaaattccccaatttcaaagccctttcccttctcagttgtgatggattcagcactgatgggctggcttcaattgccactaattgcaagaatttgactgaacttgacatacaagagaatggtattgaggataagagtggcaattggttgagttgtttccctgacagcttcacatcattggaagtattgaactttgccaat

SEQ ID NO: 17765 - DNA, 245 bp, Glycine max
  Clone ID: 700959578H1
ggcgagacatcgattccaaaggtgcgtttctgctgtgctagggtttctgcatcttccacctccgtcgcgatgcaaccaggcttcatctgattccgatttcccttcgctccttctcctccttaacattcatcttcttcgattcctctacaaattatgattattattatgatgaactccatcttcgcctcgcataaccttcgcgtcttcggtcccggcttgaatcccttcgcaccttattgcatcgc

SEQ ID NO: 17766 - DNA, 65 bp, Glycine max
  Clone ID: 700959580H1
gcgagaatggaatttcgctgctcagtcaacgctgttaccattctcttctctcttgcggttgcagg

SEQ ID NO: 17767 - DNA, 66 bp, Glycine max
  Clone ID: 700959581H1
accgtcaccaagcaggcctcctccggaagcccatggtacggcccagaccgcgtcaagtacttgggc

SEQ ID NO: 17768 - DNA, 236 bp, Glycine max
  Clone ID: 700959583H1
cccttttcttttgttttctctcttactactacttaccgccgaatgagtaatgagtcactactactacgtaacattagttgagttgaggataaggttgcagatccttgaggtaccttcaagccaatcgtgcatcaccacctctcccggatcagaatgcagcctttcagaacttttcaaagatattgaaaaaacaaaaacccatttaagttagttttcttttctgcatacatagcata

SEQ ID NO: 17769 - DNA, 244 bp, Glycine max
  Clone ID: 700959585H1
agttgttggtggtggtggtggatttggagccggtggtggtggttttggagccggtggtggtggggttggtagtggtgaccctgctcaaattgtctccaaagccttgctctgtgtcaatgataagaatatttatcgcagctgcgaagagacgtgtagattgaacgagaatggaaacctgaatgtgcctgtagagaaaactgatacattctgccaaggaccatgtttgtcagagacaaacttggtc

SEQ ID NO: 17770 - DNA, 246 bp, Glycine max
  Clone ID: 700959586H1
ctaaatctctcacatctcttatctttctctctctctcttataatacaagaccctagtcctctctcacgccccaaccaccgccatcaccaaaccttcctctctcgatttcccttcaattcccttctgggctttgcaattcggccaattgggtccccaaatctgcaaccttttcctctgtctaacgcgaaacggaagagaaacacccacatagagaaagagaaaaaaacggagaggaagaaacaattt

SEQ ID NO: 17771 - DNA, 80 bp, Glycine max
  Clone ID: 700959588H1
gtggtgctggtgggctcaacaggacacacactgaatgggctcttgacaccatcaccacgaccacacccctcctcctccca

SEQ ID NO: 17772 - DNA, 132 bp, Glycine max
  Clone ID: 700959589H1
gacggtaggtattaacattacaacacctttttattattgcacctctctctctctctctctcattgccatagatctgagacacagatcacagggttaacgctttttgacccttctctccattggtcattccac

SEQ ID NO: 17773 - DNA, 242 bp, Glycine max
  Clone ID: 700959592H1
aacaaatccaagagatagcgccgagatgcatgctatttgcagatgacatagtcctccttggagagtcgagggaggagttgaatgagaggttggaaacttggagacgagctctagaaacacatggctttcgcctaagcagaagcaaatcggagtatatggaatgtaagttcaacaaaagtaggagggtatctaactcagaggtgaaaataggagaccatattatccctcaagtcacacggttt

SEQ ID NO: 17774 - DNA, 250 bp, Glycine max
  Clone ID: 700959556H1
tttctttccattttccttcgttttctctctctttctcagtttctcagtttcccagtcatcaccatcgcagcagcaagatgtggaaccaaccattcggaaaaaccgatttggaaagcggttctcggcctctgtatccgatgatgctcgagagccctgaactgcggtggtcgttcatcagaaaagtgtactccataatcgccatccagttgctcgtaaccatcgtcgtcggcgccgtcgtcgtcaccgtccg

SEQ ID NO: 17775 - DNA, 241 bp, Glycine max
  Clone ID: 700959593H1
cttgatcggtggtgtatttgacttttcaggtgctcatattcttatgatgatcatcaaactgcaaatatagtgagcccattaagctattactgaaatttgttgcagatttgaaattcttctaagatggatacttcttataggactggtggagtcaagtacgagtgcttgctttttgatatggatgacactctttacccattgagcttaggtctcaatttgttttgtcgcaagaacatacaag

SEQ ID NO: 17776 - DNA, 161 bp, Glycine max
  Clone ID: 700959594H1
tcttgtccgaactggagagctttataggctgaggcgacagatgggtatcatagagcattgggtttacttctcttgtaatctccctgaatgggaggcattcgatccaaacacccgtcgatggatgcgcttgcctagaatgccctctaatgaatgctttatct

SEQ ID NO: 17777 - DNA, 162 bp, Glycine max
  Clone ID: 700959595H1
aatcattgttcattcggcgaattatcctattcaaccactcattgcctttcgatctctctctctctcctgcgacacaacatctcattctaaattcccttcaatttcatctctcacacatccatacctcttcaaaccataaaaaaaaattaaaatgattcacct

SEQ ID NO: 17778 - DNA, 110 bp, Glycine max
  Clone ID: 700959596H1
gcaggaggctccttccacttagtcaactgccctgtcggtcagagcgttgaagctgtatcattctctgaacttgaagttggtgcagatgacagggctgttctggatcaaat

SEQ ID NO: 17779 - DNA, 120 bp, Glycine max
  Clone ID: 700959509H1
ctctacccacacccaaacccaaaccaagttctttctttctaattcccttgataatgtaaaatcacagaaaaacaaaaaaagctactcaaaacttggctccaattagcctttctttttttg

SEQ ID NO: 17780 - DNA, 257 bp, Glycine max
  Clone ID: 700959510H1
gagagacaggaaacaagaaaaaaaaaaaaacttagaaaagaagagggagagagaaagagaaaataataagaaaaagaaaacttgaaaactttgagggattgattagaaaaagggacatggagattctcatcttccaatgatcccttcaaccccacaaattttcccgtttggatttggtgtcacagcttgattctccattgctgcgattccaacatcaacagctaaaccaaacatctctttctttctctctctctctg

SEQ ID NO: 17781 - DNA, 250 bp, Glycine max
  Clone ID: 700959511H1
ggccaaactgatgctgagggtggttttgattccaatgctgtggcaactgcaaacatcttggagagttcaacgcctgtcattgatgggaaacagtactacagtttgactgtgttgacaaggacagctgatggagatgaaggtggcaagcaccagctgattgcagcaactgtgaaagatggcaaactatacatttgcaaggctcaagctggagacaagagatggtttaagggagcaagaagatttgtggaga

SEQ ID NO: 17782 - DNA, 253 bp, Glycine max
  Clone ID: 700959513H1
aaactaccagaggcacttcctgaagggaaagctttacattcatttctcagtggaatttcctgataccctgagtcttgatcaggtgaaagctttggaggctactctgccactaaagcctacatcgcagttgacagacatggagctggatgagtgtgaggagaccacactccatgatgtgaacatggaggaagagataaggaggaggcaacaagctcagcaggaggcatatgaggaggatgaggatatgcatggt

SEQ ID NO: 17783 - DNA, 257 bp, Glycine max
  Clone ID: 700959516H1
aagagaaggtgtagacaaacacaatctctaatggcactcaggatgtgggcttcttccactgccaatgcactcaaagtctcttctacctccagacctcatctcttgcatcctttttctttctccagatgcttgtcttccgtcttggatggacttaagtatgcagattcacacgaatgggtcaagcacgaaggctcagtcgccaccattggtatcactgaccatgcccaggaccatcttggagaggttgtgtatgtgga

SEQ ID NO: 17784 - DNA, 88 bp, Glycine max
  Clone ID: 700959518H1
ggctcgacggtgaattttgtgcttctccaaagctcaagcgatcctgctctgacctggaaagaagggatgtactaagggagacttgtca

SEQ ID NO: 17785 - DNA, 255 bp, Glycine max
  Clone ID: 700959519H1
tttcctttcaaatagtaacactagagaacaaaagctctagctagaactgataatgtatatacaagccatcattcagaacaattagtgcatcctctttcatctgaagaacttgtttagtttgctcctaaaatatgtgtctgaggatgtggtgcagaaatcctttacccttccttctttattaaagcttatagcatctgcaatcattaatttcttattccttcaaagtggcgatcacactatcattcagctgatttt

SEQ ID NO: 17786 - DNA, 256 bp, Glycine max
  Clone ID: 700959520H1
gctcctttggacggtgaatctgagtttgtgcagggtgctgctgatcagaatcagaagaagaacaacctgctggatatggcatctgtgcaagatgattctgcaaaaactctttctgaggagcttgcagacattgaatcccagctgaagttctttgagaccccttcttttcttgatgaagcctgggctgatgctgcattggcgtctttgctcagtgaagatgcatctcaggatgctgctggaaaccctatgaaccttt

SEQ ID NO: 17787 - DNA, 255 bp, Glycine max
  Clone ID: 700959521H1
attttcttcttctgcaggaccaaattgatatacaagatcattgttttagagagagagagagagagagagagagagagagagaggatgtttggttcagagaaaactcctctgagagatgctaaacctacctctgttgaccatgcccataacccctttgattctgatgaagatacaaaagataacaagtataattcttctaaggagactttgaccaacaccaacccctttgatgatgatcatgttaatgccactggc

SEQ ID NO: 17788 - DNA, 194 bp, Glycine max
  Clone ID: 700959522H1
ggaatcagaggcctttgcaggggagctttttgatgcgctttctaggaggaggggaattcaaggggattccattaacaaggccctgttgaaggacttctgggaccaggtttctgaccagagtttcgattctaggctcagaacattctttgacatggttgataaagatgcagatggaagaatcacggaggaagaaa

SEQ ID NO: 17789 - DNA, 255 bp, Glycine max
  Clone ID: 700959523H1
atcaacagctcccccgacggtgaggtcgacgacaccaccggcctcatcctcaaactcaagtccttctgcctccgcatggacgcattcgggttcttcgccttcgtcagcgccaagacgaaggagctcgacggcctacgcgccgagatgcctgtggctctggcggagtgcgttgatccggcgaaattcgtgctggaggcgatctccgaggtgtttccggtcgacaagagaggggacaaggccggccacgacttgggc

SEQ ID NO: 17790 - DNA, 253 bp, Glycine max
  Clone ID: 700959525H1
cgtttattctatagccctgaagatgtgaagtgaggataggaacaaaatcaaattgagaacttttcttttcctcctctgttcttctgatttgaagtttgtccatgaatatttcctgttatatctaccttgcaaacttgcccttgagactttagtaaccttgggatatagaggaggattcaaatgttgctgcttctgcaaatgtttcacttcaaatgaaagcagacttcttatagattatttcattggtctaccc

SEQ ID NO: 17791 - DNA, 250 bp, Glycine max
  Clone ID: 700959527H1
gaagaatgagcatatctgtggaaggcctttgggactcagatttgacaagaaaacaggtgatttgtatattgcagatgcatattttgggctcctgaaggtaggacccgagggtggtttagcaacatctcttgtaactgaggctgaagggattccattgagatttacgaatgatgttgatgttgatacggaagggaatgtttattttacggaaagcagtgctctttatccaaggaggaatttccttcagctg

SEQ ID NO: 17792 - DNA, 70 bp, Glycine max
  Clone ID: 700959528H1
tattactccttattcattcaccaccctatccaacatggctgacgagactccaaaccagacaaccacacca

SEQ ID NO: 17793 - DNA, 254 bp, Glycine max
  Clone ID: 700959530H1
cactcattaattgcaagaatggcacttcgttgcttggtgatgtccctttctgttctcttcactcttggtcttgcgagagaaagccatgccagagacgaagatttttggcatgctgtttggccaaacactcccattccaagttcattgcgagatcttctaaagcctggccctgcaagtgttgaaatcgatgatcaccctatgcaaattgaagaaacacagtacccgaaaaccttcttctataaagaagaccttca

SEQ ID NO: 17794 - DNA, 254 bp, Glycine max
  Clone ID: 700959531H1
tgtgaattaaaatatattcaattttgcgtttctctgcctaaaaggattgaaagatgggtcaagcattcggttgctaccaagtcgatcagtcaaatgtggctatcaaggagcattttggaaaatttgatgatgtcctagagcctggatgtcactgcctgccttggtgtcttgggtaccagattgctggtagtctgtcgctgcgagtgcagcaacttgatgttcgatgtgagacgaaaaccaaggacaatgtcttt

SEQ ID NO: 17795 - DNA, 259 bp, Glycine max
  Clone ID: 700959533H1
agattttatccaattgaaattttaaaaatgactgggataaacttaagacttcaattattgaaattgaataagtaaacaatttaattggattggtcgaatggtatcaaaaaaatggagtactaactcccatttcttatttattattgaattaaccgatcaacttgctttgttatcgaacatttctttttgatttcaaaaattttccggaaaaaatttgaatctatttttatatgcgaatcaatcctactacttctggtcc

SEQ ID NO: 17796 - DNA, 252 bp, Glycine max
  Clone ID: 700959538H1
cttttcaagtcttttctctctctctctctctataataagattcttccctctcccttctctctctctctctagaacttcgtcctccctctgcttctttctttcttagttgcagcgcgattgctgcatcgtcctccaataagagctcgctgctagtgaaccctaacacggcggcaacgagaggtgttcggttgaagctcagatcagcgatggcagcagcaacccgcacttctctgcggttcctcctctcagtct

SEQ ID NO: 17797 - DNA, 69 bp, Glycine max
  Clone ID: 700959539H1
gttcacaggttgtaaaaatatatccaaattctgacaactttcgtaaagaacacatattctctttaagtg

SEQ ID NO: 17798 - DNA, 141 bp, Glycine max
  Clone ID: 700959540H1
gattgatttggtgtgtttgtattgtgaggtgttgtgagtatatataaataggttactttctcagttgttgctgtttagggacactatcgagtttatagttcagatggggggtcaagaaaatgcaatgggggggtttccaca

SEQ ID NO: 17799 - DNA, 253 bp, Glycine max
  Clone ID: 700959541H1
atgaattaacacgcaagtatgagcgggtcagtgggggaacaagttctttcttttattattgtgaaagagatggtggccccgcaaattgaaaggaaaatgactgagcagttgcagcaggggtgattgatgatgatgatgatgatgatgggtcttgctcgatctaatctgaatatgaagcagcgattgttgagactttgttactattgggtctctctgattccgcaactattgcgtctcctccaaatgctttgct

SEQ ID NO: 17800 - DNA, 132 bp, Glycine max
  Clone ID: 700959542H1
ctaccaactattctctctcgttctctgatttctgaaatccctcagccatggcttcctcttccctctctctgtcactctctctcaccctttgccttgtttccactctctgctacgctcacacatcttccctaa

SEQ ID NO: 17801 - DNA, 65 bp, Glycine max
  Clone ID: 700959543H1
gtgacaccatgaacattaattcacttgcccgtgaatccttggtcaatgccgacggtattatagag

SEQ ID NO: 17802 - DNA, 250 bp, Glycine max
  Clone ID: 700959544H1
cacaaggcagaaagcaagctcatcctagagttttaaaaatggcagcagcctcctccatggctctctcttccccatccttggctggcaaggccgtgaagctgggcccatcagcccccgaagtcgggagggtcagcatgaggaagaccgtcaccaagcaggcctcctccggaagcccatggtacggcccagaccgcgtcaagtacttgggcccattctctggcgagcccccgtcctacctcactggcgagtt

SEQ ID NO: 17803 - DNA, 130 bp, Glycine max
  Clone ID: 700959546H1
acaagacgggatacgtccacatatgtttaaatccgtaatagctgccagccatcctgaattttcatctccgaggcaacaggacgccttagaatttttcctacattttcttgatcaagtcgagcgagctaat

SEQ ID NO: 17804 - DNA, 254 bp, Glycine max
  Clone ID: 700959548H1
aacaataataaggttgaaccctcaaccaagaagccatatggaagtattgtgaaggatcttgtcacaatcaagtcgtttgcatcaggaataatggtcccaaaagaatacatatggccagttaaaccagacaaatatctaggacttcccacaacacttgtggctgatgcccataaatcaggactagaagtttatgcttctggttttgctaatgacttctttactagttatagttatgactacgaccctgttgccga

SEQ ID NO: 17805 - DNA, 163 bp, Glycine max
  Clone ID: 700959549H1
tggagaggaaaattttgtcacacctgcttctagttccattaactcttttggggaatgtgatactacccaagttcaaaggtgtcccgagtatcatactcctcaagattcattaaccttcaatgaagctgcagtcttcaatgaggatgatattcacactagcaat

SEQ ID NO: 17806 - DNA, 206 bp, Glycine max
  Clone ID: 700959508H1
agagaagaaaaaaaaaaaagagagaaaagaaaaaatttgttttataactttttaacttattgttcacttcttcttcttcttcttcttcaatatcttggttctttgatattattctattgagcaaaaaatgggagttccagagagagaccctcttgcacaattgagtttgcctcctgggtttaggttttaccccacagatgaggagc

SEQ ID NO: 17807 - DNA, 161 bp, Glycine max
  Clone ID: 700959553H1
cttcaacagtgttagctgattgacaccattgttctctcttctcgagcaaaatagtgtcatcaaaggctctcatcattgctaagctactgattcaaaaaagcactccatgaataacaaactacattagactacaaatcagaagccaaggtgagactttttta

SEQ ID NO: 17808 - DNA, 140 bp, Glycine max
  Clone ID: 700959554H1
gctgagaagcatgctgccatagaaggtgatttagttgtgcagccatcagatgatcacttttggtttcaccggccccgtgttgtcctctttttgattcactttatccttttccaaaatgcttttgagatagcatttttttt

SEQ ID NO: 17809 - DNA, 250 bp, Glycine max
  Clone ID: 700959555H1
gaaacaaattagaagagtgtgttgtgttgtgttggagtagcaagctagcaaagatgtttggcatcttaggaggcaataaggggcacaagatcaagggtactgtggtattgatgagcaagaatgtgttggacttcaacgaaatagtgtccattactcagggtggtttggttggtgatgccaccggcatcttcggtgctgccaccggtattgttggtggagttgtcgatggtgctattttcatcttcagtcg

SEQ ID NO: 17810 - DNA, 250 bp, Glycine max
  Clone ID: 700959472H1
ggaggagtgacattgtggaagaaagactgaaggtgttcgcgatcggagactttgaaaccctcctttcacccatttatcccaagcattcaacaatgtctccgttatcgaagctctcgttgctgatactgatggtttcatctcctccgcgatggcctcctccgacgagagagtgagcgaattgctctccctgcaatccagatccaaatcgggcgtaatccggctgaacgaccaatccctcgcccgcttcctc

SEQ ID NO: 17811 - DNA, 257 bp, Glycine max
  Clone ID: 700959473H1
gaagatactgaggatgcttgcaaatacataagttggacgatacttgatgatcgtcccattcgagttgattttgattggggatttcaggaaggaagacaatggggtcgtgggaggagcggtggccaggtgcgggatagtaccgcactagattatgatcctggtagaggtggctacgggaagctggttcagaaagagttagaagtacaaaggcagcttgtagattatggtgctggttctttgggttcttttccaccagt

SEQ ID NO: 17812 - DNA, 255 bp, Glycine max
  Clone ID: 700959474H1
ggtgttatggagatctgattcttcaacgtcagcatcagcatcagcatcatcttcatcatcatcatcaccaccagaagtggcatgttctgacatgggtgagttggagctgctacccagtgacatcttgatgcacatctgagacttttgggtccaaaagaggctgcaaagttgagtgtggtttgcaaggctttgagatcccttgtgtctgataacagactttggattcactttcttcagacccatcaggctgagccc

SEQ ID NO: 17813 - DNA, 257 bp, Glycine max
  Clone ID: 700959475H1
ggcttctgtgttcaaggacgtaagataagtgatgtagggaaaatagatatttgaaggtttcaatgaagaggtatctgatgatttgtgtatttgatgagcttttatattaatttgctatagagattctataaccatttgattattttctacctgtttttagggtctgactcttttaggccagttttatgtgaacatggttgtcttggcagtggcaccaaatataatcagaactttgaatgttgattaaaaaaggatgt

SEQ ID NO: 17814 - DNA, 256 bp, Glycine max
  Clone ID: 700959477H1
ctttctaaaaaccagaaacaacaaacacaaaccgaaaaggcgaaaggggttttccgagtgagatctagggtttccatcgattcggagagaggatattgatagaacgacctcaacgagcaaggtcaggaggtggagtctagaacatggattcggtgccttcgaattcgcatggaaacctcgatgagcagatttctcagctcatgcagtgcaaacccttgtccgagcaagaggtaagggtcttgtgtgataaggcaaa

SEQ ID NO: 17815 - DNA, 258 bp, Glycine max
  Clone ID: 700959478H1
gcaaaattaagcacaaaagcccaaccctctctctcgctgctggtctcccccatttggcattcgcagatcgaatacgagtaatttcactgaatcttattgaagatgtttctcacaagatctgagtatgatcgatgtgtaacaccttttctcctgaaggccgtttatttcaggttgaatatgcaatcgaagccatcaagctgggatcaactgcgattggattgaagacgaaagagggtgttgtccttgcagttgaaaagc

SEQ ID NO: 17816 - DNA, 253 bp, Glycine max
  unsure (1)..(253): unsure at all n locations
  Clone ID: 700959479H1
gtttatcgtgcgtgtgtttaacattcacatttacaatgaactccatctcatcactgacccttgattctcacgcaatatgcaacttacagcgcnacatctccctccgccaagttcgccccaccactcgaaacgtcgtcggtgctccgcgaagcccgtcgcgcctccccccaccaagctcggtcgccgccgaaactccggctgccgcatcggcgaactgagccaggtctccggcgtgcttggctgccattgggga

SEQ ID NO: 17817 - DNA, 262 bp, Glycine max
  Clone ID: 700959480H1
ggaagccgaaccaacgaaccaaccccaaacccctctttttccagaactttcatgtccatcttgccctcacaaacccaagccgcatcttcgtcttcttcctctgcgccatctcctaaccctaattcccaacatggaatcggatccctattcctcaacccttcccttctctttccccctcaccaatcaacctcactttcggatctctccagatctccgataccccaggttcatcggcttcagctgctcaagattctggtggatc

SEQ ID NO: 17818 - DNA, 251 bp, Glycine max
  Clone ID: 700959481H1
ctgaaatctgattatcattggaggatctgatttctgacatctgattctgattatcattggagggaatctcaacccaaagtttagttttttatttttattattattattattgttgttatttctgccacaactttaggggtgcattgcaaatggcttccattgttgcaagcttgccgccaccattgctgctccctgctagaaaatatcatccgggcaacttcccaagttcccctttttctcttctttcaggg

SEQ ID NO: 17819 - DNA, 119 bp, Glycine max
  Clone ID: 700959482H1
gccgtttacattctcgctctgcactctctctttctcatcctattctcttcgcttctctgttcgtgccacttcttctcgagcagtggcatctcatattgttggttatccacacaacatac

SEQ ID NO: 17820 - DNA, 249 bp, Glycine max
  Clone ID: 700959483H1
ctagaagctaaagattccttggtgatagaactaaattcaagagtgagttccttaactattgagaacaataattttaggagtaaatgtgatgtcatggagaaggaatacaatgatctaaagttcagtgctgaaagaaggctgctttggactctaaggttttaagagaaaaagaagaggagcttcatcagctaaaggatcagtttgaacttgccctaggtgaagcaagcaaaagccagatcgtcattgctg

SEQ ID NO: 17821 - DNA, 247 bp, Glycine max
  Clone ID: 700959484H1
ctactgtgtaaatttcacccattaatatgaatactgtctaattgaatgtgttgcttgcttttaatttacagaaaagagatgatgagaaatggatgaaacatactttggggtaagtcatgtttcatttaaatgttatttacatcagtagacatttggatttagccggttctcttcatttctagtgggaatcctgacccttttagtgtatacaagctttttttttttcttaagtgcatcagagtttgag

SEQ ID NO: 17822 - DNA, 187 bp, Glycine max
  Clone ID: 700959485H1
aaacagtaccaaataaaaagcgttacagaagatcgatctgcaccataacataaaatttgacttattttgattttttatgattgatactagtgtgagcagttgataagagagatgatgatgaacgtgaaggatcgaccatggtgcggccggcggaggaggtggcgcggcgggtggtgtggaactccaa

SEQ ID NO: 17823 - DNA, 248 bp, Glycine max
  Clone ID: 700959487H1
agaaaactacaaagctatgggcaccatcatcgactcccatttcttggccttcactgcccttgtcactattgcctatcagtttttgtttttcgtcgtcactgcgctcctcaaattcgacaaagtcactgatttgctggaagtacgaatttcattataattgctgcattgaccctggtcatcaaaggctcctggtattttcgacagataatcctcactttgtttgttgggatatggggaattcgcctcgg

SEQ ID NO: 17824 - DNA, 252 bp, Glycine max
  Clone ID: 700959488H1
cggattggaaggacagggcgtgcgggatcaactggcttagctacttcattttacaccgatcgtgacatgttcctcatggcaaatataaggaaagcaatagctgatgctgaatctgggaacacactgacatttcaactggaaaggttgctagaaggaaggagaaagaagcagcagctgcacaaaaagaggcaaacattgctttatccaaacagttaggattgggagctgcttcaatgaacattgaagataaat

SEQ ID NO: 17825 - DNA, 252 bp, Glycine max
  Clone ID: 700959490H1
cgctctttcagctttgactttggtggaaactaaagactagtcaaaatggtgaagttcacagctgaagagctgcgtcgcattatggactataagcataatatccgtaatatgtctgtcattgctcatgttgatccggaaaatcaaccctgactgattctcttgtggctgctgctggtattattgctcaagaagttgcaggtgatgtccgtatgactgatacccgtgcagatgaagctgagcgtggtattacaa

SEQ ID NO: 17826 - DNA, 256 bp, Glycine max
  Clone ID: 700959491H1
tgatgcacccgttatgttggaccgtatattgcgcctattggcttgctacaatatcctctctttttctctccgcactctccctgatggcaaggttgagaggctctatggtctcgcccccgttgccaagtacttggtaagaacgaagatggtgtctccattgctgcgctcaacctcatgaaccaggacaaagtcctcatggaaagctggtactatttgaaagatgcagtccttgaaggaggcattccatttaacaagg

SEQ ID NO: 17827 - DNA, 257 bp, Glycine max
  Clone ID: 700959492H1
atcttatcttagctaccccatcacaacaaccacgatactatttctcatactctattaggcaaaaacaccaccaaatgggagaggaaaaggagcagcctaagaatgacaccgagaacaagcccgaggaggtagccccaagaaagacgacggacccatccctgtcgtttacaaactcgacttgcattgcgagggatgcgtcaagaagatcaaacgcacctgtcgccacttcgaaggtgtggaaaccgttaaggcggatc

SEQ ID NO: 17828 - DNA, 246 bp, Glycine max
  Clone ID: 700959494H1
ggctgcaacacccactccctcccctcccttcaatccctaattccgccactcacttccgctctcagctcagggtattacgtagtacgtggagaatgggaagtactgaaaagatcccaatcagcgctgaaagttcagaaccaccatcgagataaaaattaaaacattggattctcaaacttacaccctcagagtggataaacagatgccagtccctgctctgaaagaacagattgcttctgtaactgg

SEQ ID NO: 17829 - DNA, 194 bp, Glycine max
  Clone ID: 700959495H1
aataattcagaaatgttactgcaaacattagctatccctacaatactccttgtgatattcatatgggtggtacaaccaaagcaacgtcatgggaagattgcaccaggtcccaaggcgttgccaattattggtaaccccacatgctagggaaactcccgcaccgcacccttcaaacctttgcaagaaaatatggc

SEQ ID NO: 17830 - DNA, 259 bp, Glycine max
  Clone ID: 700959496H1
acagattgaaaataaagcaaaggatgctactgaatgtttggtacaagaaggagcacagtttgctactaggttgactggtattaaagagaatactaaatttcaaaagaaattacagaacaatgagcagatgtcaggtcgaagcatctagtacatggagcaaagcagcatcacaatgtgaaaaatgtatatgtatggcatgcactagctggttattggggtggagtgaagccagcagcaaccggcatggaacattatgaca

SEQ ID NO: 17831 - DNA, 264 bp, Glycine max
  Clone ID: 700959501H1
ggcatggcatgaaaggggcgaaaaggtcaagtcacgggtaatcctaattccccaccaagtcactacaaaccaaatattcttcgtcctcccgctcgctcttctcactcgtcatcttcgaattcgtctgcgccctaacaaaattcatttcaattccaactcctctgatcaaaatcctaggctcgttcttgaatccctaattcgatctcctcctcctcctccgaagaataaaaggaggatcgatgtgggcagcatcttgcctggcgt

SEQ ID NO: 17832 - DNA, 107 bp, Glycine max
  Clone ID: 700959502H1
attcggctcgagtttcaactcaatggttcttccctcaggttttgtttccatgttgatactttttggcatggttttggtagttggggtgaatattgtcccaggggttg

SEQ ID NO: 17833 - DNA, 83 bp, Glycine max
  Clone ID: 700959503H1
ggtttgggtttctcttcctcccttggagaaaaagaagagccaccgctgcgacgccgttcgtgcatttttgaggtgccgctgtc

SEQ ID NO: 17834 - DNA, 256 bp, Glycine max
  Clone ID: 700959504H1
aaacacgccgacatgtctaattggtatctcatggggagcagtgcgggggccacaatcgcctacttcgcgggtctacgcgcgaccgacacggcgagcgatctctcgccgttgaagatcagagggctgatattgcggcaggtgttttccggtgggacccagaggagcaaatccgaggttaggctggagaacgacgaggttcttccgctgtgtgtgacggatttgttgtgggagctggcgctgccggttggcgttgacc

SEQ ID NO: 17835 - DNA, 257 bp, Glycine max
  Clone ID: 700959507H1
caagattcaaactcactcttgaacctaaaaatcatagagaggttgcaactgtgtgctgcactgtggctagaactacatgttctgtggttcccttcatgctttgcactgtggctggctcctgttctgtcaattttcactctctgggggttcagtttgagttagctcaagataaagacatggattctcagaggtttctcatttgacaaaaattgtcttgtatttctttgagggaagaagaagtagatcaagttaaaaga

SEQ ID NO: 17836 - DNA, 253 bp, Glycine max
  Clone ID: 700959470H1
gaaatttcccgaaggaggaggaggttctgatcttctttcttttttgtctggttccctttcttccttcaaccaatttcgagatccgaaaccggcatcagatccgatccgaaatgtacggattcgaagctctcacttcaacatccacggcggcttcctagaggccatcgtccgcggccaccgcgccggcctcctcaccaccgccgattacaacaacctctgccaatgcgaaaccctcgacgacatcaagatgcac

SEQ ID NO: 17837 - DNA, 256 bp, Glycine max
  Clone ID: 700959439H1
gctgctgcgtcttcgaatcctcctcattgctctgcttctcatgttgtgcgccccattttcatcttcttccaaacccaaagaccccttcctcggcgtcgcccccgaagatgacgactattacaagtcttccgatgtaaaagttgtaaagatggatccggaaaattcaccaaggctcagttcaatgatgatttctgcgattgtgctgatggcaccgatgaacctggtacatcggcatgtcctggtggaaaattctatt

SEQ ID NO: 17838 - DNA, 255 bp, Glycine max
  Clone ID: 700959440H1
ctttagtactagagtttgcagactgagtggctcggtgagttagtgagcgaaaacgatagatagcattaccatgttggttggataactgaagtgagtgatgatttcaacttcaagcatggctttgctttctttactaccaaaacggcaccgcatgccctttccctcacaaacccttcctcttccactcccctcatcttacctttcagtttccaatgtttgcctcaccctcttccttctcctctctcttccctcaaa

SEQ ID NO: 17839 - DNA, 258 bp, Glycine max
  Clone ID: 700959441H1
gagacggaatttggacatggcaccgtataaaccgtctgtttaattggcttcctctagcagccctaattgagaaaaaaattatttgcatgcatgggggtattggtcgttcaataaatcatgtggaacaaattgagaatatcagcgtccaattacgatggaagcaggatcaattgtgcttatggatctattatggtctgatcctacagagaatgacagtgttgaaggactgcgaccaaatgctaggggtccaggattagt

SEQ ID NO: 17840 - DNA, 256 bp, Glycine max
  unsure (1)..(256): unsure at all n locations
  Clone ID: 700959442H1
caagcttcagaccagagccccaatcagcaaattcaagcagtactagtaccaataggcaactaaattcccctttccaaccctaatttttctgcttaattaattccatttaagtcctttaatatgcagaccctcaccccacctaccccaaccctctcaactatctcacggtngcgcgtcagtcggtcattcgggtggctcggacgcgtttcagagtcaaatgcggttgccggttcgaatccgggagtttctcgcaggg

SEQ ID NO: 17841 - DNA, 262 bp, Glycine max
  Clone ID: 700959443H1
atttaaatttaatcattatgtctgtttcttcaatcggaatcacgaacaacatggaagtgagaattgggcaaagggtttctcgcggaatgctccctatcctcgctctccacaccttcagcgagacaaaacgctccgaccacaacctccggtcaccgccgccctcatcgccgccaacaccctcatctacctccgcccctccttcctcgaccccctatgtccccccatcgaacaagtctggttcaaccctcacctcatcctcaag

SEQ ID NO: 17842 - DNA, 154 bp, Glycine max
  Clone ID: 700959445H1
gtttttacctatggtcttgtgttgtgcacttgtgcgtgtaactgtattctaaaataagggtcacttggatcagtggttgtaacgatatcaatgttttgcgagagttttaatttactcttacagttattagtgaaagattggcggtctcatcttc

SEQ ID NO: 17843 - DNA, 263 bp, Glycine max
  Clone ID: 700959446H1
cagaaattaagctagagcttcatagtttcttcttcttttctcaccttccttctctcccttcagacaaagggacaaaaaatcagtgtgtgagagagagagagagaaattccaaaaccatgtcccacagtcatctaagtttcgctttgggattctaggtaacattgcctccttcgtgtgctttctggcaccactaccaacattttatagagtttgtaagaagaaatcaaccgaagggttccaatcaattccatatgtggctgcac

SEQ ID NO: 17844 - DNA, 263 bp, Glycine max
  Clone ID: 700959447H1
gaaggggtcaatttcagtgtattgcatcaaccaccctagatgaatacagactttattttgagaaagacacggcattggctcgacggtttcaacctgtttgggttgatgagccgagtgaggatgacgcaatcaagatacttatggtctacgtgagaaatatgaggcacatcacaaatgcagatacactgcagaggctataaaggctgcagttgattgtcagcgagatacatagtgataggtaactacctgataaagctattgac

SEQ ID NO: 17845 - DNA, 269 bp, Glycine max
  unsure (1)..(269): unsure at all n locations
  Clone ID: 700959448H1
ctatttttgccttctccctcttctgcttctccctccactccactggagagatgagaagagaagagagagaaacacagattctttctttcccttccacacaacatacgatatcaatcgntctcttgccgattccgccatttctcattcggattcgagattgttgcaggtgcattgcttttgcctctcgatggtatgttcccgggaaagtgggagaatggaagtcatggccaggcttctcgctgctgagactttctctcacactgtagcag

SEQ ID NO: 17846 - DNA, 259 bp, Glycine max
  Clone ID: 700959449H1
atcttctctctcatccaagaaaaaacttcttcatcttctttactttctttttctttctgtccgagagttcttgaagttttgtattgaggctccagaaactttatgagttctgttgattgattttcaacttggcaattaatgaaagagcatttcatgtagattttcttcaccactatctgctctatgcacttcttgtgctttctgcagttctgaattattcaagtaactggttcagtttaacatatgatttagtataaaa

SEQ ID NO: 17847 - DNA, 250 bp, Glycine max
  Clone ID: 700959452H1
agcaaacatcagttgttctatattacattgttggagactattagggttacgatggattctgagaagtatgagtatgtagagaacgcagttgaaaaccctcaagctaagcacatggctaatggtggggacaaaagtggaaatctgaagagagaggagcgaatggtagttcaaagcataagggtgatgatgatgaggatgttgatctccatcccaagcattcaaaacctggacacgattctcatgatcgcga

SEQ ID NO: 17848 - DNA, 101 bp, Glycine max
  Clone ID: 700959453H1
ccaaattctccagccatggcagtttcttctgcatctgcttcctccaaacttatactattctcccatgcttcatcttcttcccttatctccacacccttccg

SEQ ID NO: 17849 - DNA, 255 bp, Glycine max
  Clone ID: 700959454H1
ccctgttcctctgtatcttcagcaaatgagagttcaataacaatgtctgtgccactgggaaatccatgtgccttcaaggagattacaccttccgtgaaagaggtaatagcacgagatgaaaaaactgaatctttttcactgttgaacctgaaaatgggaagttggagatcaatgatggaaaacagactaatggcactagtaaagactccaggttagaggattctgatgctttacatatgaaattggttcaaaatg

SEQ ID NO: 17850 - DNA, 256 bp, Glycine max
  Clone ID: 700959455H1
ccgatttctccagaacagcaagggagaatcaattcctcatcgctgcaattctcatctttcactctctagattctcatctatctttcttccaacctcttctcttctatacccttcagaaaaaaataatatagaaacatagcttcagattattctagctcttcattttttttccttgttcaatattatgctgtaaaattctcaaactcacagtttcagttcagccacattttggtctaaagatccgtgccttgaccct

SEQ ID NO: 17851 - DNA, 257 bp, Glycine max
  Clone ID: 700959456H1
cttttcttctctttacccgttgaaacatccttagttttcagattctgaaatcttgattctgaattcatcacaatgaattcgtcaactacagtgaggaagttgcaggtggtgtcccctgttcctgcggacatagacacgcaaactccgttgaaccagttcatatctcccagattgccaaagagctcaaccttagtcccaatcactatgacctttacggtaaatacaaggctaaggttttgttgtcggttcttgatgag

SEQ ID NO: 17852 - DNA, 259 bp, Glycine max
  Clone ID: 700959457H1
ctttttctctctactctcatttcctttcctccaagaacttgattttccatgcccccttcaaaggaaacaacaacaccaagcaattcactttttccaaagccgcaaatctcttgccgttgcagccacggttaaatgtctcttttcttcttcaaaggatgcaggctccagtgacaacacaccgtgcaacttttgcattattgaggggccagagacggttgaggattttatgcagatgcagctgcaggaaattcaagacaac

SEQ ID NO: 17853 - DNA, 77 bp, Glycine max
  Clone ID: 700959460H1
attttgaacagcatttccgccataaatatgaaaagctttgtaacagacggtgttttatattagtttgacatctattc

SEQ ID NO: 17854 - DNA, 260 bp, Glycine max
  Clone ID: 700959462H1
ctcgagccgtttttctctctcccttagtcaaagggattcatcgttcttcttcccaggttatttagaaaagcaaaatggtgaagatttgctgcattggtgctggatatgtggggggtcctactatggcagtcattgcactaagtgcccatccattgaagtcgctgttgttgatatctctaaatcccgcattgcagcctggaacagcgaccagcttcctatctatgaacctggccttgatggtgttgtgaagcaatgccgtg

SEQ ID NO: 17855 - DNA, 265 bp, Glycine max
  Clone ID: 700959463H1
aaacacaacaacactctctcttctcgctcttggcttttcgctcttcactcactctcattcattcatttccaccgttcatggatcctgtaagcgtgtggggtaacacgcccttggcgacggtggatcccgagatccatgactcatcgagaaggagaagcgccgtcaatgccgcggaatcgagctcatcgcctccgagaacttcacctccttcgccgtcatcgaggccctcggcagcgctctcacgaacaaatactccgagggcatg

SEQ ID NO: 17856 - DNA, 250 bp, Glycine max
  Clone ID: 700959464H1
agaccagatagaggcttgaggagttgatgttttaccctataaagtatgtcaatatcaagaagcttccctaccaaagttaaattggtgttcgcattacaaacttatattcagaaatcaaaaaaatgattgtggttatttccatcgttaaaagtttacttttggagtagatttattagaaagactttttagctgactctggcatgggccaggggagttttaaaattgcaatatcaatgagacaatgacttcc

SEQ ID NO: 17857 - DNA, 256 bp, Glycine max
  Clone ID: 700959465H1
gtttcaccgcacgaatatcttgttgtttggagcgatccgagaaaaactctgtaaacatgttggtttaccaggacctccttacaggtgatgagcttctctctgactccttccgttacaaggaaattgagaatggatgctgtgggaagttgaggggaagtgggttgttaaaggagcagttgatgtagacattggtgcaaacccttctgctgagggtggaggagaagatgagggagttgatgatgcagctgttaaggtt

SEQ ID NO: 17858 - DNA, 256 bp, Glycine max
  Clone ID: 700959466H1
atcttcttcaattccagcaaggatgtcacagcaaggcgaatcatcggacccgaaatcggggaagaaggacttctcgaccgcgattctggaacgtaaaaagtcgccgaaccggcttgttgtggatgaggctgtcacgacgacaactccgtagtgaccatgcacccccaaaccatggaaaagcttcagcttttccgaggggacactatccttatcaagggtaagaaacgaaaggatactatttgcatagctcttgctg

SEQ ID NO: 17859 - DNA, 253 bp, Glycine max
  Clone ID: 700959467H1
aattgattcatgggaatttggtaggattgaagacaaagctgtttgttatattcaattttgtttcattggatcttattcttgcatgatgtgctataggtaatgagttgagtgggaagggcattggggctagagtggtgctgcacagtatgggaaagacttgataaagcttaaagaaattttacgcacattatacaaaaactccacgttcaaaccttcccttgtagcacctggaggattctataataaggagtgg

SEQ ID NO: 17860 - DNA, 255 bp, Glycine max
  Clone ID: 700959468H1
gttctcgctctcttattcctttctctcttgtcttctctccgaatccacgtcctagatctgttgttctcttcccacagttctcactgaatcaggatccattttgataccaagttgctgtttagagatctgtttcttctagacaacggtctgtgctatctgttattttagttgaatcgaagctgcaacaaaatcttcctgatctttgctttgaggttatggcatcggcgggtgtagcacctgcttctgagggtaaga

SEQ ID NO: 17861 - DNA, 249 bp, Glycine max
  Clone ID: 700959469H1
gatcgagataactagaaacagtgtgatgaaaatgaaggtccttgttttcttcgttgctacaattttggtagcatggcaatgccatgcgtacgatatgttccctctccgaatgaacactggctatggtgcccgactccggaggtgaaatgcgcaagttggaggcttgctgtggaagcacacaacatctttggctttgagaccattcctgaagagtgcgttgaagcaacaaaggaatacatccatggcgaa

SEQ ID NO: 17862 - DNA, 254 bp, Glycine max
  Clone ID: 700959438H1
agattccacaacagtgggagagagatccaaaaagagagagtggaaaagatggcgcggttgatcacagtggtgtggtgcgcggtggcggtgctattatgcgccgcggccggtgcgtcgtgggtggaggaggcggcgaaccgatacgaatggtgtcacgcgtggaggcggaggtggttcgggtgatcggggagtgccggcgtgcgttgaagtttgctaggttcgtgagcaggttcgggaagagttaccaaagcgag

SEQ ID NO: 17863 - DNA, 267 bp, Glycine max
  Clone ID: 700959409H1
aataacaaaaaacgtccattcaacgatcacactcacactcctcgtcgtcgcttgcccaaatcgcttatcgctcttcaacaccatctccctcgtacgaaatccccttcactccctccgaccacggcctccctcccaacacggagacaccgactccatcccctaccacctcgtcattcgcctcatccaagcctccaccaccctccaaccagccttcaaaaccctcatccaaaacatcctcttccaaaaccaaaaacatcaacttttaat

SEQ ID NO: 17864 - DNA, 263 bp, Glycine max
  Clone ID: 700959410H1
taataacagcaacaaccatcaccaccttcagttctcacctgtctttgatggccgcttgcaactctgctatggcgatggaacaaggcattctgaccacaaggggaagggaaagaactaattaagttcccccgaggaacaccactttcttcctggaattttgttctgtgtttttgtaggagcaacaagctgtgtccccttcccttctgcaaaatggaggataagttgttgtcatcaagtgttggtgtttcttcttggatcattta

SEQ ID NO: 17865 - DNA, 264 bp, Glycine max
  Clone ID: 700959411H1
aaagatgttgctggttgtgatgaggcgaacatagaaattatggagtttgtccacttcctcaagaacccaaagaaatatgaagaactcggtgcaaagattccaaaaggtgctctcttggccggtcctccaggcacaggaaaaaccttttagcaaaagctacagcaggggagtctggtgtaccctttctttgtttatctggttctgatttcatggaaatgtttgttggtgttggaccatctagggtgagaaacttgtttcaggaag

SEQ ID NO: 17866 - DNA, 265 bp, Glycine max
  Clone ID: 700959412H1
cttggttttgcggaaaaacaaagtaacaccacaacacagcatccgatattacacacatattcttctttatcttcttcttctctctctctctctctctaaatatttttctctctcttcagcgaattcgtttttctcttcaagcttcgctatggcgtctggatcctcgggtcgcggaaactctgcctccaaaggcttcgatttcgcttccgatgacatcctctgctcctacgacgactacgccaaccgcgattccacttccaacggc

SEQ ID NO: 17867 - DNA, 267 bp, Glycine max
  Clone ID: 700959414H1
cggctcgagcaagagagaggaagaaaggtgagaagaagaagaagaagaagaaaagaaaacccactcacacacactctctgcccctgcacatgcacatgcaccattctcactaatcactagggtttattcatccatccatggagctaccgttttctctctcttcttcttcttcttcaccttccaccttccctcctgcttctcaggacaatcgagctccatggaatcagtgcctgatcttcagaacactatgtacgctcccatcgacgg

SEQ ID NO: 17868 - DNA, 179 bp, Glycine max
  Clone ID: 700959415H1
gtctcctcctttcgcctcttcaactttctctctctctccctagttgcatgtgttcccatgttcaataataataataattctgactaatctcaaccttgttcagtattcagtttgattaatgacaccaagatccaagcacaaagttgtttcttttttcatttatttgctgttctgcctgt

SEQ ID NO: 17869 - DNA, 280 bp, Glycine max
  Clone ID: 700959417H1
acgtaatttcggtcttgagctcgctgtttttcagaaatattagtatatatttatatgcatacaatgatgcaaacaaacaggaaccgtttggcagcttaatgcttcaagatctattatttgttacttcttccaatttatctgtaacttgtactcccctgcccttttaagaatacttatttacttattattttatttgcagtaatttcagctccttctgatgtcaaaaaacatgagcagaaagatgataaccttccagttgacatcaaattgcctgttaagc

SEQ ID NO: 17870 - DNA, 262 bp, Glycine max
  Clone ID: 700959418H1
agaacatcgaagcatctaggatgacactgcaccgctttggcaacacctctagcagcagcatttggtatgagttggcttacatggaagcaaaagagagtgtgagaagaggagaccgcgtttggcaactcgcatttggctcagcttcaagtgcaacagcgtggtttggcgcgccatgcgccgagttaccaagccttctaggaacccttggcttgattgcatcaacagatatcctgcacctctcaacaactgaagcaaaattcta

SEQ ID NO: 17871 - DNA, 259 bp, Glycine max
  Clone ID: 700959419H1
ggcattgttgggtatatttgcttagccttattgttctttccggtcacgagagggtcttcaattttgcggttcattggcttaacttcagagggaagcatcaagtatcatatctggctaggacacattgcaatgaccctctcacagcccatggtctaggttatattattttttggggaaagacacatcaaatcttggagatattcaaatggaacaaaattggcgtctcaaatgtggctggagctgtttctctgctagctgg

SEQ ID NO: 17872 - DNA, 257 bp, Glycine max
  Clone ID: 700959420H1
attttcagttaaatgtggagtaaggggtaacactggtccagcctgcaatgtggttggaatgattgatcgaatgatattgggtatacaacacctgtacaagagaccaatatatgcgcggatgcctgaatgcagtattaatctcccaactatggaccattacctcctgatgctcctgcttggtgtcaggccccttttgatcctgaaggactcctaagttcagtgatggctattgtcacctgcttgattgggttgcacta

SEQ ID NO: 17873 - DNA, 258 bp, Glycine max
  Clone ID: 700959421H1
gatgtctaataggtgcagcattttcctatcctggcaaatgtaaaaaaacaggtattggcaaacagaaacaccctttctagcatagggatttgatctctccaccttggtgaaagccttgtgacccattaggcttttacaaaggtgggattttgactagctgggtgtttggctgttgagtttatggagggccaagttccttgttgaacagtgtttgtgttgcctttatctgcagcttttaattgaaccaatcctaccctc

SEQ ID NO: 17874 - DNA, 258 bp, Glycine max
  Clone ID: 700959422H1
agtttttcttgtcagctcgctgcaatatggaccagcaaaatgcatctcattgctttgggcttttcttagcagtgcaattcaagggatcagtatctcttcatgttgactatgaatttgctgctagatcaaaatcgactgagagtatataagcaggtgcaagggagattatactttcacggcgggcaaggctgtagggtataggaacctgtttggtattccatggactgcattcatagcagacgatagccatttattcat

SEQ ID NO: 17875 - DNA, 258 bp, Glycine max
  Clone ID: 700959423H1
acacaaacacatacattgtagtatcacttttgtctcggaatttgttcttttgagttatggcaagcttaaaggttgcatgtgtggttttgatgtgcatggctgtgatgagtgcaccaatgatggtgcaagccgtgtcatcaatgatgtttctgtgaacctagcaccgtgcccatcctaccctattgcagggttgagatgttccagaatcgggctgtagcggagtgaggaacattctgggttctgccagcaccacctttt

SEQ ID NO: 17876 - DNA, 257 bp, Glycine max
  Clone ID: 700959424H1
ggaaacttaatcttgtccagagatcctgcaacccccctcatcaaattgagtggagagggtgacaatcaggaaaatcccattaatgttgattgaattggcatcagatatctgttgcatgatatgttccagaggtttgccgttggcattattcttcagatttcttctttcttcatggtccatacagctgaacaattttattgaacaggctagggctggaaggagtttgtatagtcttggactcgtgtacatatgctcat

SEQ ID NO: 17877 - DNA, 177 bp, Glycine max
  Clone ID: 700959425H1
ccagagaggttcacggcttcactttcacatcaccaaacacctctctcaaggctagctagcttcaatctctttccttctgcttctttttcctctcctcactgcatttattttcttttggacttttccactcatgcaccctcattcccctctatttaaccctctctatcttcttctcct

SEQ ID NO: 17878 - DNA, 177 bp, Glycine max
  Clone ID: 700959426H1
gaagattccaatcggagctcagaaaaaagaaacctaatcgtcgatcgcgtcgccgtcgcgccgaaagttcgttgttgtgctgtgaaattgccggttttaattgttcgttttgtgataattctgagaattagtaacaattatttggtttttttttctgttaggtaacgttgctgtggt

SEQ ID NO: 17879 - DNA, 178 bp, Glycine max
  Clone ID: 700959427H1
aaatcatgctgatgcggtgactagtgatttaagagtgatcaataaggaaccctcggaaataccagggaaagtttgttattattactagtttcacttgtggatttatcgtagcataatgttgtacaagaataatttaatatgacaagatcgtgtgtttgttattgattttttcaaagtt

SEQ ID NO: 17880 - DNA, 206 bp, Glycine max
  Clone ID: 700959428H1
aaatcatgctgatgcggtgactagtgatttaagagtgatcaataaggaaccctcggatcataccagggaaagtttgttattattactagtttcacttgtggatttatcgtagcataatgttgtacaagaataatttaatatgaaaagatcgtgtgtttgttattgattttttcaaagttatatagtccgtacttattcggcattgc

SEQ ID NO: 17881 - DNA, 258 bp, Glycine max
  Clone ID: 700959429H1
acaagctcaagcaagcatgcaccgcaagctctcacctttgaagccccaaattttaaaagatataactggcctgacagaaactgagaggatgacacgtaatagtgtttatccctctgcacttaactgtgatgacatcttgcatggatcctacttcgaataccaccaccaactatctccaacttaattatcgtatcaaaaatatggttgcgtgtgatatgcagtccttcatttcgtcaatgctacttgaggcaatgggga

SEQ ID NO: 17882 - DNA, 264 bp, Glycine max
  Clone ID: 700959430H1
cagttccctacctctcctttcaagatgcagatcttcgtcaagaccctcaccggaaagaccatcacccttgaggtggaaagctctgacaccatcgacaacgtcaaggccaagatccaggacaaggaaggaattcccccggatcagaacgtctcatcttcgccggaaagcagctcgaggacggccgtaccctcgccgactacaacatccagaaggagtcaacccttcaccttgtccttcgtctccgtggtggcatgcagatcttcg

SEQ ID NO: 17883 - DNA, 270 bp, Glycine max
  Clone ID: 700959432H1
ggcattgttccaaatgatcacttctgctgttctcttctaaatgttctgactcaaacaccaaaagaagagcttggtaagctaacagattgcattgagaaggctaatacaaagcttgggactgtggtaagatatttgatggaagagctgagggtgatgaagcctttagaaaggaagcattagaacttttaaattcaattgatgctgaagtaaagaagcctttatgcaattgtctaattgatctttgtgtcaagctgaatgtgcctgaaagag

SEQ ID NO: 17884 - DNA, 261 bp, Glycine max
  unsure (1)..(261): unsure at all n locations
  Clone ID: 700959434H1
caaatatctctccgttaatgctctcaccacaaacttcaatagattagccaaaagctaacaccaactataggccaaatcaccaataaatattatttcccgttcttttggcgtgttggccacccactgaacacatttgcatcacacatagaatgagagagaggccattggttggtttcagagatgggaagcatgcacatagaaaccccagaaacttttgctgatggtagcaaaaacttcgatgaganggggacgagctaaaag

SEQ ID NO: 17885 - DNA, 260 bp, Glycine max
  Clone ID: 700959435H1
ttccggtttctctctctctctctctctcatggcgaatctagcacacttctccaagagagccctaagaagcgcacacgcgctcgcaaggcaccacgtgcagccgcagctgctggcagcggaacgcgcttttgcgacggagcggcgaaatcgatatccccgtcggcggatcgcgtgaagtgggactaccgagggcagaggaagataatcccgttaggcagtggctccccaaagtggccgtggatgcttacgtagcacccaac

SEQ ID NO: 17886 - DNA, 255 bp, Glycine max
  Clone ID: 700959436H1
atcttgccaagaaaatctggtgctttggccctgagacccttggacccaacatggtggttgatatgtgcaagggagtccagtatttgaatgaaatcaaggattctgtggttgctggattccagtgggcatcaaaagaggtgctttggctgaagaaaacatgagagccatctgctttgaagtatgtgatgttgtgctgcacgctgatgctatccacagaggaggtggtcaaatcattcctactgccaggagagtctt

SEQ ID NO: 17887 - DNA, 123 bp, Glycine max
  Clone ID: 700959437H1
gtttcgtctgtcaaaatcttgacaatatatgtatctcagcatatgaacttactcaacttggtcagtgctgacttatgttaataattacttcagacttgtgtagtagtaaatgctcctaatgtc

SEQ ID NO: 17888 - DNA, 260 bp, Glycine max
  Clone ID: 700959408H1
ctttcccccctctgaattaaacagatttggacgacaccttgtacccgtcaagcaccggtattgacaagtgcgtcaagaaaaacatccaactctttctcatccagaaatgcggattctcagaatccgaagccttcaccctccggttgatctcttcaaaacctacggaagcacccttgccggtttaagagcactaggccatgatatcaccgcagaggagtaccatggtttcgtgcacggaaggctaccttacgactccatca

SEQ ID NO: 17889 - DNA, 72 bp, Glycine max
  Clone ID: 700959369H1
cggatatggcgaggaacacagctgacctcgtaacgcagctcaacgttgctcatcactttccacacaacatac

SEQ ID NO: 17890 - DNA, 247 bp, Glycine max
  Clone ID: 700959372H1
tttcgatgctcagtcatctcttttaccattctcttctctcttgctcttgcaggagagagccatgtccatgcatcgctacctgaggaagattattgggaagctgtttggccaaacactcccattcccactgcactgcgagagcttctaaagcctctccctgcaggtgttgaaatcgatgaactccctaagcaaattgatgatacacagtacccaaaaacattcttctataaagaagaccttcatccag

SEQ ID NO: 17891 - DNA, 248 bp, Glycine max
  Clone ID: 700959373H1
attcttgtgcctcaacctctatagtcaaattagtcattttcttatttttggggtgaaaattaaaatacatttttctcttgtcttattattttcattttcatggtctattaactttaaaatagttatctttaatatcttgaagtattcgttttatataaataacaaattggtttttccgttttaaccatgttaattttagatgatacaataacatttatatagtttgacttttttcataaattaatcaa

SEQ ID NO: 17892 - DNA, 242 bp, Glycine max
  Clone ID: 700959374H1
cgctcgagccgattcggctcgagcaagcttctaacgagggaagacagacgtcaatgggttttgtgtacgagcaatttatatgggcatttcttgttgggtgcacgttcattagtgtattatctcatcctgatgaagcagctccaaagtacacatttgtagaagaagctgcatctgctccagaaatcttaacttatgactacgtagtgattggtggaggaacatgtgggtgtccactagcagca

SEQ ID NO: 17893 - DNA, 248 bp, Glycine max
  Clone ID: 700959375H1
ggcagaatcacgcttcttggccactatccatcactgcttacaaactttacacttcccacaacactctccacctgaaagagacactcaacacacaaaacaaaaatttggaagagaaaaagagagagaagaatggagaaaaaggttctgatattgtgctgtgttgtggccttcttggggctgttgtcggctgcaactagcttcggtgctgaagcgacaaggattaaggtttctcaggttcattttgttgc

SEQ ID NO: 17894 - DNA, 244 bp, Glycine max
  Clone ID: 700959376H1
agagttggttaaaagtaggaaatgaaagtgagggagagagaatggaggaagaggcagggatctaccgtctagcggaggacagcctccggcagatattctgcaggctgccactgagggaaataatgatatgccgctcagtgtcaaaattcttcctgcagctgctctcaacaccttcgttcctccgggtcctctccagctcccatccgcccctccagctcctgggcctccgcaaccgccaccacac

SEQ ID NO: 17895 - DNA, 95 bp, Glycine max
  Clone ID: 700959377H1
ctaagataaaacctgattaggtacctgaacattataccagttgaatttatgtatttttcacttgttaattgctcaaacacaaacttggatactgt

SEQ ID NO: 17896 - DNA, 246 bp, Glycine max
  Clone ID: 700959379H1
caattgcaaagaaggagattatccaccgtttcctctgccctggctgagactgcagcgtcaatggcagtagctgtaactgtcgttggtgcagcagctacccttcttgtaaagagatccaaaacttctgagtcatcacaggttaataatttatctttattgtttgtattaattattaactcagcaatatgccagtgtgccactaaaaaatccaccttgtttttccgtgcaagagcatgaacatctttg

SEQ ID NO: 17897 - DNA, 267 bp, Glycine max
  Clone ID: 700959381H1
ctttatctctgttcgacgaaattgcgatcttggtcatcgagaaggactccacgcagatgtccgtgctagctctctatggttcaggtcttcgtgaagctcgtgaactaccagcacctcatgcccacgcgctacacgctcgacgtggatctaaaggacgctgttacccccgatgttctagccaccaaggacaagaaggttaccgctctcaaggagaccaagaagcgcctcgaggagaggttcaagaccggcaagaataggtggttcttc

SEQ ID NO: 17898 - DNA, 245 bp, Glycine max
  Clone ID: 700959382H1
ctcatcaaaatgaatctgtaccactcctccaccaccaccaccacctacaccatcttcaccgtcatattcctcctccttgcaatattattcactctcacaccccacaaggccaacggtgccacgtgtcaccctgaggaagaagcgggcctgttgggcttcaaatccggtatccgatccgacccgtccggcctgctcagtaactggatatcgggtacggactgctgcacatggaccggagtagaatg

SEQ ID NO: 17899 - DNA, 75 bp, Glycine max
  Clone ID: 700959384H1
ctcaccttctatctgccaattctcttctattaataacacccacctctttggttcctcttcccttcaattcatcac

SEQ ID NO: 17900 - DNA, 248 bp, Glycine max
  Clone ID: 700959385H1
gttgaagactttttcttgcttcctcaaattattgggaacttaatctggcatatcaattgcaaaccactcagaaaactatattttattggaatcactctggtcagacttcttcctcacatatatgactagcattcgagctccagtttcaaatccttacttttatgaggaatctgaatttgtcaatcctaatttggatttttactcaaaatttggggatattgccattcctgtgactgctatcgttcttg

SEQ ID NO: 17901 - DNA, 250 bp, Glycine max
  Clone ID: 700959386H1
gagtttatgtggttgcgcctctgcctgtaagagtgaaaaaaccttctcttttccttctctcaagtctcaagagatttcatcatggctccaaagaaggacaaggctccaccaccttcctccaagcccgccaaatctggcggtggcaagcagaagaagaagaagtggagcaagggaaagcaaaaggagaaggtgaataacatggtgctgtttgatcagggcacctatgataagctcctttctgaagctccca

SEQ ID NO: 17902 - DNA, 248 bp, Glycine max
  Clone ID: 700959388H1
tgtttttctaaaaccttgtttgggagtttttgaataactaaaatcatgaggtaggctatccagattttatggataaaggaaatctttagctgaatgttatccatcattgaagcggcatttggcatggtagaaacggaaagaacgtgattgctttttttttttttttctgttttggaaaaattgtccatgtattgaccccctgactgtttgatttgacgttttgtttttttgggtatcgacagagaaga

SEQ ID NO: 17903 - DNA, 243 bp, Glycine max
  Clone ID: 700959389H1
ctcttggcatcttgtgttgtgtccctcttttaagctatttccttctcttaacacaattggttgtgccaattgccatagtcaccaaccaattaacaaaggtatatatatcatcatatcatcaccaaatgaaaaatattgggttgttttttcttgtggtggtggctacttttgtggtggcagccacagctggtagcttttaccaagactttgaaataacgtggggtggtgagcgtgccaaaatct

SEQ ID NO: 17904 - DNA, 245 bp, Glycine max
  Clone ID: 700959391H1
ccactttcttctccctccgatttctccagaacagcaagggagaatcaattcctcatcgctgcaattctcatctttcactctctagattctcatctatctttcttccaacctcttctcttctatacccttcagaaaaaaataaaatagaaaccatagcttcagattattctagctcttcattttttttccttgttcaatattatgctgtaaaattctcaaactcacagtttcagttcagccacatt

SEQ ID NO: 17905 - DNA, 242 bp, Glycine max
  Clone ID: 700959392H1
cgaccgagtaattttcatctatgaattgatgtataggtgtaaattaatgtacaccatgcaatgtttgacgtgaataggataaaatataataattactgagtttatggaattgcaactaccattctataccagtgtcagaaatggaccacacggtaccagcatagttataacacttacacatgaagatgccaatttcaattgcagcagtacaatccaaccggtaatgaaattctagaaaaatt

SEQ ID NO: 17906 - DNA, 243 bp, Glycine max
  Clone ID: 700959393H1
aaaaaatagcaacaaaaacaagaaaaaaggttacctctttcaattttatcccttgttgtgagcttaattcaatttctgctcacacataatggcttgcacgctcgctgattcattactcctattcaagggttcttatcagaaaccagttctgaggagagacattgctgcccggtactccccgggtatatttagtctaaacagtaatgggcttatccagaaaaggttcaggcgtcaaaggaattt

SEQ ID NO: 17907 - DNA, 246 bp, Glycine max
  Clone ID: 700959395H1
cgggtcgacctggtggactcgactcgtttaaaaactactccgagggagagaatattccggtgaacgatttccggcgatatagtcgcgactccgccgggcataaagatggttttctgagctacggcacgaacggcaacgtggtgcagcagagcttccatacctacgccgccggagccaccggcggcaccggcgagttcaagcactacgccgacgaaaccaacgtcccgaacctcggcttcacctcct

SEQ ID NO: 17908 - DNA, 248 bp, Glycine max
  Clone ID: 700959396H1
gatggaatcaaggttggtcccagtatcgaacaccagttcattccgagcttcattgggcggtctccattgcataaaaacagcatacaggacagaactgcaacagagaacttgtcttcattgaggaataactgtgatgaagatttgtgtgtttcactgcagctgggtgacaatgaagcaaagagaaggcgttctgaagcctcaactagtactgaggaacctcagtgaaacagattatttgcataagctgg

SEQ ID NO: 17909 - DNA, 265 bp, Glycine max
  Clone ID: 700959401H1
taacttcaggaaaacaacactgaagcttgctcctattgcatacttcagtatgtaccgtggatcaatatctcatttaccgactagctacatgtggagtcctcatgttgttcccaaaccaagtgactggggccctttagttgatgtgttggttattgtttcttgagccttgcatcaaagtatcaaccccaggaagattttgtccaatggattcaaaaaggaccacctcctttatattttgggtttgggagcatcctcttgaagatcc

SEQ ID NO: 17910 - DNA, 275 bp, Glycine max
  Clone ID: 700959402H1
ttcggctcgagcaccaccattgcttgttgatgacgtgcaggatggggctctgaatggccttgaattgaaaaacgtaacttgcaaaacaactgctacagttggcgataaggcgtatgtcattggtggagctgatgatggaactttgtccattgagttcaaatttttgaccgtagtcttggagaatgggttcgtcccactgtgcggggcaccaaacctgtgtcgtgcaatggcctctcagctgtgcctttggaagaccgaatactgattcttaagaa

SEQ ID NO: 17911 - DNA, 265 bp, Glycine max
  Clone ID: 700959403H1
ccgactcggttgctatcagcgagtgagagtgagtgagtggttctcttgcagcaacaaggtttagtgacaccaaacagacgggaaatgggtcgtggggtcagtgctggtggtggacagagttccttggattatcacctttggcatggggtacctgccagcagtgcaaatggtgctcgcactcaaaatgcaagtgctccttcaccaccggttgataagcaaagtccagcaccagcaccagcaccagcacctgcacctgcagcagcag

SEQ ID NO: 17912 - DNA, 263 bp, Glycine max
  Clone ID: 700959404H1
gagagagaaacccatttctagagagagaaactcgcagtcgcagacatgtcttccttcgatgccttcgccgacgacttgaacgtcaactcttcttccactcgccagcacgaacatgacgaggacaacttctctggctacggcgctactcctccttcaccggaggattctccgccgacggagatgtcgccgtcgatcactccgcgcccgcgtcgccggagatctacggcttcactgattcgaatcgcgcttactctcagtctccc

SEQ ID NO: 17913 - DNA, 259 bp, Glycine max
  Clone ID: 700959406H1
cattttcttcccaaccactactactcgctcactgcagatctcaattgcatcgctgtccatggctaccatcgttagcatcaaggcccgccagatcttcgacagtcgtggcaatccaactgtcgaggtggatttgacttgctcgatggtacatttgccagagctgctgttccaagtggtgcatccactgggatttatgaggcccttgaattgagagatggaggatctgactaccttggaaagggtgtatcaaaggctgttg

SEQ ID NO: 17914 - DNA, 247 bp, Glycine max
  Clone ID: 700959368H1
ggagaagagagggtatgagctagttgaggagggtgatgatgtacagcaccatcttacacagacaaagaaacctaaactacccgttttagccagtgtgattgtggaagctttaaaggtggatagtatgcagagactttgctcatctttggaaccccttctcagaaaaattgtcagtgaagaagtggagcgtgctttggcaaaactcggccatgctaaactggctgaaagatctccaccaccaagatta

SEQ ID NO: 17915 - DNA, 261 bp, Glycine max
  Clone ID: 700959407H1
ggatatgttccgtctaatactgaaaagtatccccttggaggcatcatctctgccattgagaatgcttttcacgcatctcctcaaatagtttgctcgaaagattctgttgaggaacttcgcctatgcttttataaggacttcagccacgagattgtgctcttggatctgacattaaaatcaacatggttacttctaaaaaatcttgtcccaaatatgttagcttgccggagccggtatcagtgagtaagacaggcacaatgg

SEQ ID NO: 17916 - DNA, 256 bp, Glycine max
  Clone ID: 700959326H1
gaaacaagaagaggattgtccgtatattgatttggaggcaaatattgaaaatcaagaaacagttgctgcaagcaattttagtagggatcaaaattcagtaacaattgttgttgatgaagatcagcaaaggcccaagaggaaacagaaagatcgtcattatattgacttggaggcaacacttgaagatcaagaaacaggtgctgtaaccaatatatgtgaggataaaacttcagaaaaaatggacgttgaggaagat

SEQ ID NO: 17917 - DNA, 256 bp, Glycine max
  Clone ID: 700959327H1
ggagtttctgaaagagaacccgaacatgtgcgagtacatggcgccatcgctggacgtgagacaagacgtagtggtgatggaggtgccgaagctgggaaaacaagccgcaacgaaagcgattaaggagtggggtcaaccaaagtcaaagatcacacaccttgtgttctgcaccacttcaggcgtggacatgcccggagcagattaccagctcacgaagcttctcggcctgaggccctccgtgaagcgcctcatgatg

SEQ ID NO: 17918 - DNA, 251 bp, Glycine max
  Clone ID: 700959328H1
tgagaggtggacatcaagcacgggtaggttcactgtcttggaacaatcatattctcacaacaggagggatggatggtagaattgttaacaatgatgttagagtgagacatcatattggtgaatcttataggggacatcagcaggaggtttgtgggctcaggtggtctccctccggacaacaattggcaagtggaggcaacgataatgttattcacatatgggacagggctatggtttcctcaaattcaccg

SEQ ID NO: 17919 - DNA, 250 bp, Glycine max
  Clone ID: 700959330H1
agattttcttgtatatattcctagcattttggtttcagttgctttccataataattaagaagaatggtcgttctcatcgagcaatcagagctaacaagaccgcaagctgaggagaacaatgatgatttggtattggatggtggtttttccttgctcaaatcaccttcacatgttggatttacagtccctgatatcaattcatatggtcactccttcagaaattattatgatgaaagcgaaaggaataagt

SEQ ID NO: 17920 - DNA, 255 bp, Glycine max
  Clone ID: 700959331H1
attagttaccgtttgacttgcatgccagagaaccaactattataaattacgcttaaattgaacttttatttagacaccacaatgaatcaattatttaaattgcatgtgctgaaatttagtttttatttagaataacgaggacagtaaggattgattaaattaatattctaatatcatcttataaaactgattgagaaaactttaacactttggtgaaagcacataaatggttttatttataactttgtaagtttt

SEQ ID NO: 17921 - DNA, 258 bp, Glycine max
  Clone ID: 700959332H1
ctccaccagaaagaaaatatagtgtctggattggaggatcaatccttgcatccctcagcaccttccaacagatgtggatttctaaaggtgaatatgatgagtctggcccatccattgtccacaggaagtgcttctaacttctaagtacaaaatatgcttcaatggtgaaatatttttcgcaccagttgtttttatgggtctgtgtcatgtcatgttaacgatattgccatggataagaggtgaggaagtatcattaaa

SEQ ID NO: 17922 - DNA, 253 bp, Glycine max
  unsure (1)..(253): unsure at all n locations
  Clone ID: 700959335H1
gttgattctctctccaccacactccatagatttagnagcttncaacccatactctggaatggagaanactanactcactcttttaaatcttgtgcacaaaattataattataaattttaacattaaaaattgttcaaatctttttgactgtttgtacatgtgtacatgtacttctcgtatcgccacgtcctagaaccagatctcttcagcagccaacagacacaggatttacaagaccggtttttgctcctta

SEQ ID NO: 17923 - DNA, 253 bp, Glycine max
  Clone ID: 700959336H1
cgccaccattgccatagatctgaaacagagatcacagtgttagcgcttttattctccattggacgttcccccgaacaccccgcacctataatccagcaccaatccaacccgttttcgctcggatctaggacctcagtgtctaagtgaataaggttggggtttgcgatggctccgacgacgatccggaaggcgattggggtggtgaaggaccagaccagcataggaatagccaaggtcgcaagcaacatggcgc

SEQ ID NO: 17924 - DNA, 255 bp, Glycine max
  Clone ID: 700959337H1
gatttgtcgttggattgagttgcgcctttactagcgagaaagttattctggaagctgtcatattgactgctgtggtggtgattggtctgactctatacacattttgggctgcaaggagaggccatgatttcaacttccttggccccttcttgtttggtgctgtgctagttctcatggtctttgctctgattcaggttctgtttccactgggtaaattgtccgtgatgatctatggttgcttggcagccattatat

SEQ ID NO: 17925 - DNA, 203 bp, Glycine max
  Clone ID: 700959338H1
agaaggcccagatgaagacgatgtatggcctcatctcgacctacaagttgaaccgccaattcagatggatatcctctcagatgaaccgcgtgaggaacggagagctctaccgtgtcatctgtgacacaaggggtgcctttgtgcagcctgcagtttatgaggcctttgggttgactgtggttgaggccatgacttatgggtta

SEQ ID NO: 17926 - DNA, 256 bp, Glycine max
  Clone ID: 700959340H1
cagaaacacaaaatggctgagcagaggcaaaacaacgtccacgttcttgttctgccataccctgcccaaggccacatcaaccccctcctccaattcgcaaaaagattagcttcaaagggcgttaaagccacagttgccaccactcactacactgcccactccatcaattctcccaacatcacgacctatgccatctccgatggcttcgaccaagcgggcttcgcccaaacaaacaacaacatgcagctcttcctgg

SEQ ID NO: 17927 - DNA, 205 bp, Glycine max
  Clone ID: 700959341H1
atataaggcataacaagagatagatggattctctgaatatgttgaaaggttatggtaaagtagaacaccacctcgaagatcatcgtaaccccaaacccaaacctaaattctcaaaacccttcatcgccgcaatttccgtcttcgcaatcctcttccttactctcaccttcgcattcgccctagcatccatgctccaccacagtta

SEQ ID NO: 17928 - DNA, 248 bp, Glycine max
  Clone ID: 700959345H1
ccgaaacaggtttcctataaaatcccgcatgtgccgtagcagttgagctgaaaccgagaagaagaagatggagatgtatcagatctggagcaggagaatagcgttgggagcgttcgcgtttgttctgcttttcctatcggcctcagcagacgacgtcgttgtgctctctgaagataacttcgagaaggaagttggtcaggacagaggagctctcgttgagttctatgctccttggtgtggacactgca

SEQ ID NO: 17929 - DNA, 170 bp, Glycine max
  Clone ID: 700959347H1
gaatggttcaaaacaggatacaagccaacaacttttgtagaggaagaggatgtcaatgtagatgatgttgctgctgctttcaatgattctaaggtgaatcttgtgacagagagagcagagagaccagtgtcaatgaatgcttatgagctcatatctaggtcacaaagttt

SEQ ID NO: 17930 - DNA, 255 bp, Glycine max
  Clone ID: 700959348H1
atctcaatctggattaagggacacagcaaatgatggaactactcttgaggggcatactccgaagctgattgttaagatccaaaaccgaagtcgaagtcctgcacaaagtgccactgcaggttcttctgatgatcctgcaatcatgaacagtcgagcttcatctcctgttctttcagagaagcacgatcagtttgaccgctgctcaaaggaaaagagtgatttttatcgagctaatattggtgcagacatttatac

SEQ ID NO: 17931 - DNA, 255 bp, Glycine max
  Clone ID: 700959349H1
ataaaattatagtattttgagtactgtgtatgtgaagaaatcagattttggtgtggcggcgtgcatagcgacttccctggcagagaaattcaagagcccaagcaagcattaagcacgttgtcgcttcggtctcgtcggactctgtctttgttcattggagccgggaactgagcaatcaatgactggaaaggatttggaaattgaaggatacacagttggggggctgtccattggaggccatgaaacatgcgtcat

SEQ ID NO: 17932 - DNA, 251 bp, Glycine max
  Clone ID: 700959351H1
caagtgtacattaaattacacatgtcaatatggttttatgtgttacccctttgccacaccgtgtgtattgttgttggtcaaccttagctgctcgacttgctccagctgaaacaagcaatgcaattgtaggagcaggtgcagaagcgccatccattgttttcttccctttttcattcttactctttttttttttgcctttttcttcctttggtccttcccatctcatcccccccccccaaaccaattcatat

SEQ ID NO: 17933 - DNA, 251 bp, Glycine max
  Clone ID: 700959353H1
aagcaataagatgaaaatgaaagtgcttgttttgtttgttgctacagttttggtagcatatgaatgccatggctcagactaccagaagttccctctccaaatgaaaactgggtttggtgggcaatacagcaatgaggtggcatgtgccagttggaggcttggcgtggaagcaaacaacgtagtcaagtggcaaactgttcctgcagcttgcggagagtacatagctgactacgttctaggagaccaatata

SEQ ID NO: 17934 - DNA, 253 bp, Glycine max
  Clone ID: 700959355H1
tctcctcctcctctgtctctctctctctcttcacacttgaatgaatattctttcttgaattctcatctgggttcattccttttctcatgcgttgacaaaatcttcacactttcaaagttggtacctgataaaacttgaaaataaatcttccctttttgtgtcacaaccatgggttgttgtatgagtaaaaaagggtcagagccagaagaacacattgtttacagacatgttgcgggtgctgggggtgctggtg

SEQ ID NO: 17935 - DNA, 248 bp, Glycine max
  Clone ID: 700959359H1
gtcatctttgtcatattccaaaattaagcttgcattattcaccagaatggctaattcatatgaaaacaacttcccccctcagaagcaagacactcagcctggcaaagagtacctcatgaatccaccaccccaatacaagcagctcccaatacaagccatcaaataaacttcagggaaagatagctgtagtaaccgggggtgattctggaattggacgagccgtgtgcaacttgttttcattagaaggt

SEQ ID NO: 17936 - DNA, 242 bp, Glycine max
  Clone ID: 700959360H1
atgcgacgtaagggactatatacaaagatccagactatcttgagtttctcaaactaattgcaatccctcaagagcatcttcctagtgcagaggtacaattggcaagataagaagctgagcaagctggggctaacaaggaaacacgaattgtcacacccctgatggaatttgttcgtcagagacgtgctgttgacagtggtatgcaggcttcatcagcggtggcaaaagttagcagaagatcc

SEQ ID NO: 17937 - DNA, 246 bp, Glycine max
  unsure (1)..(246): unsure at all n locations
  Clone ID: 700959362H1
aaaactcagcgacagatcatatcatatcatgtgataagctagcttatatatacacacaacatacaatttataanggaaaactcnnncagaaaatagcttgactaagatatatactctataaacaattatgctttttccatctggtattctgaaatagcaattataatttatttgtggaaagagatataaagcaagtattaaacacatgggtaggggtaaggtggagctgaagaggattgagaacaa

SEQ ID NO: 17938 - DNA, 95 bp, Glycine max
  Clone ID: 700959363H1
cggctcgagctcgagcggaatcggctcgatcggactcgagcggctcgagggtcagcacagcacagcactcgtcaagcatcaatcatccatcgcct

SEQ ID NO: 17939 - DNA, 270 bp, Glycine max
  Clone ID: 700959364H1
attcggcattcggctcaagaaagctgtggatcatagcgtagaccttttgttctataaccacacctcattccatttccatcttctgccacctgtttctaactccccaacccaagaaatttccttttacccctttcccctctcctcttttcttattcatcaaaattcctctttggtgtcctctccctcggtcaactccgtttactataaatatgaccactcttttcttcctcttcttcaacttcaatactcacctttgaatggattctaatt

SEQ ID NO: 17940 - DNA, 247 bp, Glycine max
  Clone ID: 700959367H1
caatgtcgttcgcagtggcattgtgtacaacgtcgtcgttcttcccttcccgttttgaaattcgcaatccaaagcagcttcagcttccacctctcctttcaatgtcactgtcgtcgaagctaccgttgcatttctccggcaatgccatattcaaccgcaaccacccaaccatgttttctattcgagcctcaaactcttcatccaaactcgtcttattgagctccactatcgtcgtcacaacagcggt

SEQ ID NO: 17941 - DNA, 256 bp, Glycine max
  Clone ID: 700959325H1
ttcgatcccgctggtgctcacttcgatcccgttggcgctctcttcgattcagtttagcaggttgtgctgaggcttaattgacccttgaagcatatttcggagttttatcagagaacaaatgggatatattggggctcatggtgttgcagctctgcacagatataaatatagtggagtagatcattcctacgtggccaaatatgtactacaacccttttggagtcgctttgttaattttttccccctatggatgcct

SEQ ID NO: 17942 - DNA, 249 bp, Glycine max
  Clone ID: 700959289H1
ggaacctcctctggttacagcaaacactgttctttcaatcttagccatggattacccggttgataagatatcatgctacatttctgatgatggagcttcaatgtgtacatttgagtccttatcagaaactgcagagtttgctaggaagtgggtaccgttttgtaagaaattttccatagaacctcgggatcttgagatgtacttcagtgagaagattgactacctaaaggacaaagtgcaacccacctt

SEQ ID NO: 17943 - DNA, 247 bp, Glycine max
  Clone ID: 700959290H1
ggaactttgagttgtttttctacacccaccaattatatgtagtctttattgtctttttggccctgcatgttggtgactttgttttcactatggctgctgggggaatatttctctttgtgcttgatcgatttctgaggttctgccaatcacgaaggacagttaatgtgatctcatctagatgccttccatgtggcactgtggaattggttctgtctaaacctcaaagtttgagatacaatgcactaag

SEQ ID NO: 17944 - DNA, 248 bp, Glycine max
  Clone ID: 700959293H1
caataattatcaaacctaaccagtaaaaatggtgaccgtggaggaaatccgcaacgctcagcgttcccatggacccgccaccatcttggccttcggcaccgccacgccgtccaactgcgtctcccaagccgattaccctgactactacttccgcattaccaacaaactacacatgactgatctcaaagaaaagttcaagcgcatgtgtgaaaagtccatgataaagaagcgatacatgcacctgacgg

SEQ ID NO: 17945 - DNA, 106 bp, Glycine max
  Clone ID: 700959294H1
gcttctgctatctttgttgtagttgaagtcgctcccctcattcttctttcgttgctacttctactggttcttcctccgatccctcattgacgcaaatgactcctcc

SEQ ID NO: 17946 - DNA, 268 bp, Glycine max
  Clone ID: 700959301H1
ccttttgtgtctccccacaacatattagtgtcaacagtgaatggcactggatcattcattgaaatcatatacgtgttaatcttcatcgtattggcaccaaggaaggagaaggctaaaattcttggtctcttcaccttcgtgctctcggtgttctctgcagttgttttcgtgtccctttttgctcttcatggcaattccagaaagctcttctgtggcttcgctacagccatattttccattatcatgtatggctcgccactctcaatta

SEQ ID NO: 17947 - DNA, 256 bp, Glycine max
  Clone ID: 700959302H1
ctttgttccacgaaattgcgatattggaagtgaaatggaggccaggcacatctcattcttctcttgatatttctgatggcactcgctgcaaacaaagtttctagcagtcctattgtgactaaaagaacagctctttgcagatcacatgaaaaacactatttttcctacgtcaacaaggatcaatagaatacggttgtcaagacatagactggaacatggacatctgaactatagatgtctccacacacagagatca

SEQ ID NO: 17948 - DNA, 261 bp, Glycine max
  Clone ID: 700959303H1
ggaacagagaacaacagttccatctatggttcgaccccaccaaggacttccacacatactccgtccacatggaatcctgcaagcatcatattctctgtggacgggaccccaataagggagttcaagaatttggagacaaaaggggttccattcccaaagagccaacccatgagaatatactctagtctttggaacgctgaggattgggccacaaggggtgggcttgtgaaaacggattggagcaaggccccattcacagcc

SEQ ID NO: 17949 - DNA, 260 bp, Glycine max
  Clone ID: 700959304H1
atcttaaggaaattgcggagaagaatcttactacagcggttgtggattgttgcattggaatcccggtttattttactgatctgcagagaagggcggtgctggatgcggccacgattgctggtctgcacccacttcggttgattcaggaaatgactgccactgccttggcctatgggatttataaaacggaccttccagaaaacgatcagctcaatgttgcgtttgttgatgttgggcatgctagcatgcaagtgtgcatt

SEQ ID NO: 17950 - DNA, 261 bp, Glycine max
  Clone ID: 700959305H1
ggagaaaacaaggtcctcagaccaagttgttgtcttcctcgaccagcataaccctaaaccaccctccatggaatccgaaaaccatcaggacaaacccaaacatcccttaaaagtcagagctcttaaccgtctcagcttctcaaaacccaaatcccgaatcctagaatacaactataatgtcccccgcaacaaagttgctgaagagagtgacattattcaacccacctataagttctcttccaacgatgacgatgacgatga

SEQ ID NO: 17951 - DNA, 260 bp, Glycine max
  Clone ID: 700959306H1
cttactactactttcttctttctttctccacctgaagtagttctccacaacttggaaggtgatcatctccaattttccatcatggctactgagccttctgcatctgatcatgcttctactactgatgagcattatgtgaagaaggaaaaggacgagtccattgcacaaaagatcgcttctttagcaaatgaagatgaagtcaaacatgacaatactccttcatctaagacagaagaagatgtggtgaaggcagagcttgc

SEQ ID NO: 17952 - DNA, 180 bp, Glycine max
  Clone ID: 700959307H1
cacctctctctctctctccctcctctcgtctctgcaactcccggtggttgagaaaccctaaccaccgttgaaacgccgttgtttcactcccaaacctcgctattcacgcgcgtttcccgccaccgttccgaagagaagtgatttccacacaacatacgatgcacgattcttcttcaaccc

SEQ ID NO: 17953 - DNA, 266 bp, Glycine max
  Clone ID: 700959308H1
ccaccatttaagcctatgaagaaatctcaggttgctaagcttactaaagagcagcagaaagcatattttgaggagtacgattatcgggtgaaacttctacagaaaaagcaatggagagaggagttgagaaggatgagagagatgaagaaaaaaggtaacactaaagaaaatgactatggttacacggaagaagatgatcaagagaatggaagtccagcagcagtgccagttccattgcctgatatggccctgccaccatcctttga

SEQ ID NO: 17954 - DNA, 257 bp, Glycine max
  Clone ID: 700959310H1
tacagagccgccatagctgagttcatagcaacactcctttttctttacatcaccgtgttgaccattattggctacaagagacagagtgacaccaaaatccccggtaacaccgaatgtgacggcgttggcattttgggcatcgcttgggccttcggtggcatgatcttcatccttgtttactgcactgccggaatctctgggggacacatcaaccctgcggtgacattcgggttgttccttggacgcaaggtgtcttt

SEQ ID NO: 17955 - DNA, 259 bp, Glycine max
  unsure (1)..(259): unsure at all n locations
  Clone ID: 700959311H1
ctttatttctattgctacttactttttatttctatccaatcctccatcccnccagaannccaaacaccaacctccgctgaagaagtggtgcctgctcctgcggacacgccacccactacccaatcccaagctgaagctgaagttgaagcaaatgcagaaagcatcgaagaagtggtggcggaagcagagaaggcccagagtggtgtagaagacaagatttcccaatctgaagctgaagctgaagctgaagttgaagcaa

SEQ ID NO: 17956 - DNA, 256 bp, Glycine max
  Clone ID: 700959313H1
cagaaatgcttggaaaccccgtgagcctgagaggcgccaccaggtctgctccatcaccgtctacacctgttactttcaagaccgttgcgcttttctccaagaagaaggcagcaccacctcctccaaagaaaaagcctgctgctgtatcccccgccaatgaggaactcgccaagtggtatggtcctgacagaaggatcttcttgcctgagggtctcttggaccgatcagagatccccgagtacttgaccggagaagt

SEQ ID NO: 17957 - DNA, 256 bp, Glycine max
  Clone ID: 700959314H1
gtttcctctgcgtcgatggcttcgaattcgatcgacggcgacgccgttacggggtcgggactgtgcataaacgacgtgttaagggacgacgagctgcgttccatatctggggcgagtggagagcgagaaggacaaggaaacgttcgggttggtctgcaagcgatggcttcggttgcagagcacggaaaggaagaaactcgccgcacgtgcgggtccccacatgctccgaaaaatggccgataggttcacacgctta

SEQ ID NO: 17958 - DNA, 254 bp, Glycine max
  Clone ID: 700959315H1
gttccttcaactcctcgctggcaacaacagcagtactaccattagccgcgtttttcaaaagtgattttcgagaattagcgatgggaattgaaagaggaggcttcaagggattcaggagcgcctggagcgtgccgcccaagccgtgcgattcctgcaagctggcctcggcggcgcttttctgccgccccgattccgcgtttctctgcatcgcctgcgattccaacattcactgctcgaacaaactcgcgtcgcgc

SEQ ID NO: 17959 - DNA, 259 bp, Glycine max
  Clone ID: 700959316H1
gcctcttcgggtgttctccgatttggcctcaattccgccattcctttttttcttttcttttattcctcttttaatttctttttctttttcatggaccgcagatacagagactatcaccatcgtcctgctcatttggcacatgcttctccccctgaatactttgtccgcctggagaacacaacttacaaagacgatctatatttaaggaagaggacaaggatgcgtcggtggctttgttgtacttgtcaggtggaagagt

SEQ ID NO: 17960 - DNA, 263 bp, Glycine max
  Clone ID: 700959317H1
aggtgttacttacaggtttcagaagccttccaccgttgtttgcagatacacctaatgcagttcatgaattaacaatagcaagggatatatacgagcatgctgttgtccttagtgtgaaaaatgaggatcaagatgcttttgaaagggatttcttccagttgaagccttattatacagatgcctgcaatcgacttccaccatctcctcaggagtacccaattctgggtctcaacctgttgagattacttgtgcagaataggatt

SEQ ID NO: 17961 - DNA, 255 bp, Glycine max
  Clone ID: 700959319H1
gttatctactcttttctgcatgtttgttctctcaacgactcctccgcgaaagagtattattcaatattttggttgggttgaatcccggggttgaagcgttgcagacatcacggctattctaagagtgtctcgctccctcattcatgtccgatctgtacgacggaggacgggtagttgcgtaactgccgttaacccttcgccgcacggtgggcgtggtgctttgccttctgaaggtggtagcccttcagacttgct

SEQ ID NO: 17962 - DNA, 257 bp, Glycine max
  Clone ID: 700959320H1
ccaacgttgaaatgcgtgcttcttagttcttcatcactcttaacattcgaagacgtcgttttagtccaacgatcaaacccacaattcagaaacaaaagccctatttctctctctctctctctgattcagaccacatcctcagaattccattctgctgcatattccagtttctgttttttctttgactaaatggaggttcaaactcacaccttggacattcatcagccccaatttcggagctctgaatacccgaatcc

SEQ ID NO: 17963 - DNA, 258 bp, Glycine max
  Clone ID: 700959321H1
agcattttcagaggaaaatggcgggtacggtttcgacttgtttcttcttcgtgtttcttctttctctccttcttccttttcagatctccgctgaggaatcctcggagaaggagttcgtactcacattggatcactctaactttcacgacactgtcagcaagcacgatttcatcgtcgtcgagttctacgccccatggtgtggtcactgtaagtggcttgctccggagtatgagaaagctgcttctatcttgagtagtc

SEQ ID NO: 17964 - DNA, 259 bp, Glycine max
  Clone ID: 700959322H1
tctactttgaggcctccgttgttggtgggtgggtctttcttctctcaaaatggccaccggagtgaacagactgatttctgctgcatcagctcgggcccacaccagaagggcaaagaaaaccaattccgctttccctcccatcgggaattcttggaacagcactagcagtgttgtttattgggtttttagcatgggcttatcaggttattcaacctcccgctcccaagatatgtggcacttctgatggaacgcctataac

SEQ ID NO: 17965 - DNA, 261 bp, Glycine max
  Clone ID: 700959323H1
gagaaagataagaagtaaggaggtagtaggcagtgtgtttgtttgtgttgtgttgggcgttaaggatggtgttgaattgcaaaagcaaaaacatcctccttttagttttgttagccatagcaatagaaacgggatggtcatcagaagaagaaagcagcatcatatcacgattccagcaatacctgaaaatcaacactgcccaacccaccccgcgttaccacgaagccgccgatttcctgatatcccaaggtaaagccctct

SEQ ID NO: 17966 - DNA, 262 bp, Glycine max
  Clone ID: 700959324H1
caacacaccacttttgcacaagcaattgcaacataccaacgttgaatagtgtctctctctttttctttttcttatttttttctcatagtgtctctttttttctttctcttatttaactctcatagtgtctctcttgttcttcaatcaagagaagaaagaatacaccctgaagccatggaaggtggtgtgccagaagctgatatgtctgccttcagagaatgtttgtctctatcatggaagaatccttatgttcttcgccttg

SEQ ID NO: 17967 - DNA, 245 bp, Glycine max
  Clone ID: 700959288H1
gtgatgatggaattggaagtcgacgagaacgacttgaaagccgccggtgctgagctcttcgtcgacggtggtcggcgcggcattcgcatcaatggctgggtgatcgagactcggaggcactccatactcaactcttccacactccaagagtggaaacagaatctcgatacgtctcatttaccagaaatggtttttggggaaaacactttgattctaaaacacttgagcagtggcaccaacattca

SEQ ID NO: 17968 - DNA, 217 bp, Glycine max
  Clone ID: 700959253H1
gacctatcttggtagagcatttgaagtttaaaccttcaaattaatcaaaccattttaatttgcctatagattctgagtcactgctgctatggcgctacgcgtacttcttgtgtttcggatgttgctgatgttgtgccttgttaaggtttcatctgatccaaagatagaagaagaaatactggaagcagaagaagaactgcagtttcccgataacgag

SEQ ID NO: 17969 - DNA, 69 bp, Glycine max
  Clone ID: 700959254H1
caataacaatattattctcctcattccttcatttttaaacctagctccatctccctccacacaacatac

SEQ ID NO: 17970 - DNA, 254 bp, Glycine max
  Clone ID: 700959255H1
caagctcaaattctgcaagaaccactccagattgatcgctatcgacgatgacaaccttcgaactgtcgaactccctcctcgtatttctatccctaatgtccccaaatccatcaagtgcgataaaagtgaccgcatgagattgtgctccgatgtcctctcttttcagcagatgtcagagcagttcaaccaggacttgtcactgtctggtaagattccaacgggccatttcaacactgcctttggggttacaggag

SEQ ID NO: 17971 - DNA, 255 bp, Glycine max
  Clone ID: 700959256H1
gttctgtgatcctttttccatttctatggacgcaaaagaattattctccacaaatttgatagatggaaaaataaaaataacatgagggaacaacaatatagatgaggctcagttaccagttaccacgctcctttagacaaaaataacaagctcatgggtcccattatctgtttcatatgatacgagattctatttgtttgagttggtttgtctgtcaatttcagacttccatattgaaaggaaaagcactgttac

SEQ ID NO: 17972 - DNA, 254 bp, Glycine max
  Clone ID: 700959257H1
atctctctctctctctctcttgggagtatctgcaattcgtaatcctatccacttgttgaatctgaatatttccaattcaacattttccaaatggcatcctcgtcctctatgatctcaaacccggttccgaacacggaccggtcacgtgacgcgaaacggaggaagaagaaagcgcagctgaggcagcagcaacaacggcaagaggatcagagcaatcccaagtggaaatcccaagcgcacaacaaatctactcc

SEQ ID NO: 17973 - DNA, 213 bp, Glycine max
  Clone ID: 700959258H1
gagagagagaaaatatagcacgccgaaaaacacgctcccacttgtaacttagtataacgacctccaacaactgatacatacaatctcctttccttcgtgttggacaacaacaatggcggcgaaatctagttcgagttcgacaacaaacgtggtgactctgaaggcggcgtgggttctcccgcagcgcacgcagaacatccgtgaggtgtacga

SEQ ID NO: 17974 - DNA, 251 bp, Glycine max
  Clone ID: 700959260H1
cagaaaacactctctttctctctctttctttagattatactactatcataagatcgttgttttacttagaatctgaactcaactcgccggagccaacacatctcgccggaatattcctccgggaaatggggtttctgaaaaactactgagaattaacaaaaaatgggcgacgaagaagtattcgccggagcttcgggtctccggcgagcggtggagctaatcttttccgtgctctcactctcgcactcgat

SEQ ID NO: 17975 - DNA, 252 bp, Glycine max
  Clone ID: 700959262H1
aaggaatcgacgcttcatctggtgcttcgtctccgcggagggatgcagatcttcgtgaagacgctcaccggaaaaacgattactctggaggtggagagttctgatacgatcgataacgtgaaggcaaagattcaggataaggaggggattccaccggatcagcagcgtcttatcttcgcagggaagcagcttgaggatggacgcacgcttgcagattataatattcagaaggagtccacgcttcaccttgtc

SEQ ID NO: 17976 - DNA, 261 bp, Glycine max
  Clone ID: 700959265H1
gcgttggtgcaaagcatccttcgtttcaatttctctctctcagcgctttctgcaatcgaacctttcatctccaaagggatccacaggccgaaggagaaatggggctgacattcacaaagcttttcagtcggcttttcgcgaagaaggaaatgcgaattctgatggttggtcttgatgctgctggtaagaccactatcctgtacaagctcaagctcggagagatcgttaccacaattcctaccatcgggttcaatgttgaga

SEQ ID NO: 17977 - DNA, 259 bp, Glycine max
  Clone ID: 700959266H1
gcaggaactatgcattgttttgctgcaatatttgtacgaaagaggtttaggtattatggctagctgtgatgtagtaggtggtactattagcggcttacttacgacacgacacccttctgttgttactcgagccttgtgattctctgatttggcatccacttaaagggagacataattcatcaagggggatctatgcatcccataatatttccttaaatgtactactttatgtaatattatatacgcttctgtacgtgac

SEQ ID NO: 17978 - DNA, 80 bp, Glycine max
  Clone ID: 700959267H1
ctccttgccccttctcagaacgcctattctgttaagtcccaaaacacaaaccctaaccctaaccctaaccttagctattc

SEQ ID NO: 17979 - DNA, 255 bp, Glycine max
  Clone ID: 700959268H1
gtaacacctcacgtactggaccgttgggttgttcttcgagaccctctctgactcgccgggttgactcgctcgatcttgggggtttctgattcacccggggacggatctcaattttgtctcagactgttctttctaatttaagttaccatctttagctgcattcgtgtcacgctcctttgaatgcccgtcacctcaggaaaagcaaagggcatcatattactatgaaggcactaattcttgttggagggtttggaa

SEQ ID NO: 17980 - DNA, 254 bp, Glycine max
  Clone ID: 700959269H1
ctgggatctgcttccttctcttctctttctcaattctcattcataattctaattcattcctccgatctgcgactttctatttctccctcaacacaacacgagacacaatgttcctctttgactggttctatggcattctcgcttccctcggtctctggcagaaagaagccaaaattctcttccttggtctcgataatgccggcaaaaccaccctccttcacatgctcaaagacgagagattagttcagcaccag

SEQ ID NO: 17981 - DNA, 255 bp, Glycine max
  Clone ID: 700959270H1
gaggccttctgcaatccagcagaggggaattgttcctttctgcaatggtctggatgtgattcagcaggctcagtctggaactggaaagacagcaacgttctgttcaggaattttgcagcagcttgactatggattggttcagtgtcaggctttggttttggcaccaacaagggagcttgcacagcagattgagaaggttatgcgagctctaggtgattaccttggtgtcaaggttcatgcttgtgttggtgggac

SEQ ID NO: 17982 - DNA, 251 bp, Glycine max
  Clone ID: 700959271H1
gagataatgctgaggaagaggaccaggtcaatccagaaagatcaacaccacactggtcaaatggaaatctctgataccaattctgagtctcatgctttggggagcaatggcaaaagcaactcaattttcaattcccctcttctgtttgtgggcatgggtcataagggcttgttggattctgattcagttaagagccccacttcaccattagattttggtttcctttcaaacctaagcaacccctttagaac

SEQ ID NO: 17983 - DNA, 111 bp, Glycine max
  Clone ID: 700959273H1
cttacttgaagttgtgctattcaatcccaaagccacagaaataatattattcagattttagagactgaaaacatcatggccaacctcgacctcgacccattccagacaagc

SEQ ID NO: 17984 - DNA, 249 bp, Glycine max
  Clone ID: 700959275H1
aaataataacatcttaattttcattcaaaccgttttgttaggaaaaatgggtccgaaattggcgaaaacagggtctttccgtcacggtttggcggagaagaaggacaagcttctctctgcgtcggcgaagagtagtagtagttattctgagataggtattgacataaccacgcgagaggaagacgaagagcaatcgtggtggaacacgtttaagcgcgtggctgggaacgcattggaaatgggtcgctc

SEQ ID NO: 17985 - DNA, 250 bp, Glycine max
  Clone ID: 700959276H1
ctttaacctggaaaagaataaggaaagacacgtttatattttagatttagatttttagttcccaaaggccacacacaaatacgtagaatatcgtattttacattctctcttacggggaaagcaaagcaaacccaatcaataataataccaagaaccaatgccgtgtgggttgtggtcgtcctcatgactcatgtgagtcatgggggtatgttaaaaatgttaatgtgctatttcactttcttctttccca

SEQ ID NO: 17986 - DNA, 251 bp, Glycine max
  Clone ID: 700959277H1
gcagaaagcaagctcatcctagagttttaaaaatggcagcagcctcctccatggctctctcttccccatccttggctggcaaggccgtgaagctgggcccatcagcccccgaagtcgggagggtcagcatgaggaagaccgtcaccaagcaggcctcctccggaagcccatggtacggcccagaccgcgtcaagtacttgggcacattctctggcgagcccccgtcctacctcactggcgagttcccaggt

SEQ ID NO: 17987 - DNA, 249 bp, Glycine max
  Clone ID: 700959278H1
cgggcattgagaaggaaggatgctttcagaggcgaaaggccatggggagataccgtctgtgatccatggatctccgatcgggaaaccgtatccaagctccgcggctagtctgcgctctttggacttttaaaacttagcgaactgaaacatcttagtagctaaaggaagggaaaagcaaatacagaaaaaaagagtcaagcggcgagcaatggcgacatcgctggtgcgatcgggttttcttcgaagcgc

SEQ ID NO: 17988 - DNA, 214 bp, Glycine max
  Clone ID: 700959279H1
gtccctttccatttcccattagcttcttctcctcacgcccgctcatgcgccaccatcgcaacaaccacgctgcgctcactgtttcaaccggcgatgcgaatcccgatgactgtcaccaaccggtcgatgctcccctttccgcagcagaacagattagggttagggtttcatcggaggacaacgcggcacccgcatcctccaccgccgatcgctt

SEQ ID NO: 17989 - DNA, 235 bp, Glycine max
  Clone ID: 700959280H1
tgcggaagaaattggcaacgtatgctgtaacacttgttatcgttatcattaaaataaaagatagcgagtgtgactcgggttccactcatgtgagcctgttattgtattagtttctgtttcagatactctctagtctttgttgtttcggtgtgattaaatgtatcttagttgattgttgctcgcaacaattaatcacgtatttgatataataattccaagctactttgattgttgc

SEQ ID NO: 17990 - DNA, 258 bp, Glycine max
  Clone ID: 700959281H1
aaacaacaacaacaacaacaaaaaaaagccctagaaaagattttggagaagcaattcctcactcctgaaaatctcatcctcttcttttacatttgttttggataaaacattttgctgatattgaatttttattttctcttgttttcgtttcttttcgacattttcttcttcttcttctgcttcggtgttttcagggagatagggataggagtaacaaagggagagtgcaatcagtttggttcttcgcttcgggactcg

SEQ ID NO: 17991 - DNA, 256 bp, Glycine max
  Clone ID: 700959282H1
ttttattcccactcaccactcactcactaacctcaattttttcaaattaaagtttcctcctttcactgctccaatctccccctctttgatctctcacttcaaccacgagatgctcaaaacttccgcttttcaagtttgccactttcgttcgaattctcgagaaagcaaagtattttaaatttgtggagaggcttgtaatgctgaatgttgttgccaaccagtggagtagggatgaattctgcaatggatgatatga

SEQ ID NO: 17992 - DNA, 253 bp, Glycine max
  Clone ID: 700959284H1
attcactacttatgcggagaagaggattgtggaggctgtccaaggagaacaaagagccgcgttgaatattggaatcggttggaggggtttgaatgaggacgttgagaggttcaaggacaacttggagtttacaaagctcaaaaataatcaggaaggaattgaccctgataatgtctattctcaggttccctatgagaaaggttttcagttcttatggcgcattgagcgacaggttgggagacctgcatttgat

SEQ ID NO: 17993 - DNA, 77 bp, Glycine max
  Clone ID: 700959285H1
gaaatagagagtaagcctgagatcatggaaaaagttggtgtggctgtaaatagcaaaaatcaagaatccaaagcaac

SEQ ID NO: 17994 - DNA, 250 bp, Glycine max
  Clone ID: 700959287H1
cctctttctagctatttccctctcttaacacaattaacaaagatatatcatatcatatcaactccaaatgatgaaaaatattgggttgtttcttcttgtggtggtggctacttttgtggtggcagccacagctggtagcttttaccaagactttgaaataacatggggtggtgagcgtgccaaaatctatgaaaatggaaatcttctcaccctctccctagacagagcctctggctctggctttcgttcc

SEQ ID NO: 17995 - DNA, 259 bp, Glycine max
  Clone ID: 700959250H1
gttggacactattcaaggcctgaagtgcttagcttaattgtaaaggaccatccaacgaaccccgttacttttacatcaacatcgacaaaaattgaagacaagaccaagtagtttcttcctttcatggtcaacaacttccaaacctctagttctggaccttgtccatatacccttatttgaccccttgtatgttaactcctatctccatatatgaaaggttatttgggcttaccttatacaataagcggttgcattttgg

SEQ ID NO: 17996 - DNA, 260 bp, Glycine max
  Clone ID: 700959209H1
cgacacgacaccaaatattctcactcgtcgtcttcgtctgcgccctaaccaaattcaattcaaactcttctcatcaaaatccaaggctcgttcttgaaaccctaattcgatatcctcctcctcagaagaagaaggatcgatgtgggcagcttcttgcctggcgtcatgctgcgcggcctgcgcatgcgacgcctgcaggaccgtcgtatcgggaatcagccgccgttccgccaggatcgcctactgcggcctcttcgcct

SEQ ID NO: 17997 - DNA, 138 bp, Glycine max
  Clone ID: 700959211H1
caacgggactccagtggcagttaaaaagatactcaataacattggtcaagctgagaagatttagagtggaagttgagctattggtcatgcgcataaaaacttggtcgactttgggtactgcattgaggggatcacagt

SEQ ID NO: 17998 - DNA, 255 bp, Glycine max
  Clone ID: 700959213H1
tgcaaatccagcggtgtccaaaagaacttcttcaggtccagcagtgggttggcctccaattcgttccttcaggaagaacattgcaagtggaagcacttctaagttgccttctgggtcccaccagcaacatcaaaatgttgttccatacaaggttgctagccaaaaacctactgacaaatctggtaaaggcttgtttgtgaagatcaatatggatggtgtccccattgggagaaaagtggacatcaatgcttatga

SEQ ID NO: 17999 - DNA, 256 bp, Glycine max
  Clone ID: 700959214H1
aacttaagagatcaatatggccaccaccactacccagactccctctaatatctgttttttccttctgttgttgcttctagcacactttcatttgggcataagccaacttgagctgaattactactctaaaagctgcccaaaagctgaagagatcatcaaggaacaagtcacacaactatataaccagcatggaaacactgccgtttcgtgagtcagaaatctcttccacgattgcgtggttaagtcatgcgatgca

SEQ ID NO: 18000 - DNA, 256 bp, Glycine max
  Clone ID: 700959215H1
tgatgatggagatggcgaacgaaacgctgtcgttgcggcactcgcggcgttggtgctactcgcggcgagtgtggcggtggatgctcaggagaactcggacgtgaagacgctggtgaagtacaagcacgggaagaagtactgcgacaaaggatgggaatgtaagggctggtcaatttactgttgtaacctcaccattaccgattatttccagacctaccagttcgagaatctgttctccaagcggaactcgccggtg

SEQ ID NO: 18001 - DNA, 266 bp, Glycine max
  Clone ID: 700959216H1
actagttctagatcgcgagcagccgccctaaacagcaccaacgtcttcgccgccctcggaagcctcaagaagaagaagaagaagcccgagaaggaccaccagggcccgtccaagcccaaggacaagaaggacgtcttttgggcccccgcgcctctcacctccaagtcatgggccgatgttgacgacgaagatgacgacgactactacgccaccaccgctcctcccgaatctgtttgggccgcgccgaccgtcactcaaaacgacgc

SEQ ID NO: 18002 - DNA, 264 bp, Glycine max
  Clone ID: 700959217H1
tggggatgtaagatccgagtggaagtcctataagacgcgtcagaaggaacatgatgagaatgtgaagaaggttatcaaacgtctcaaacagaggaatccatcaaaagatggtcttgtctgtactgctcgtaagccctggattgctgttgggatgcgaaatgttgactataagagagcccgtcatttcgaagttgatttgtctgctttccggaatgtacttgagatcgacaaagaacggatgattgcaagagttgagcccctagt

SEQ ID NO: 18003 - DNA, 260 bp, Glycine max
  Clone ID: 700959220H1
agagagagaaactgagagaaattcgcaaaccctaatttcggaaagatcggcgatggctgcctccaaggatcgcgagaacttcgtctacatcgccaagctcgccgaacaggccgagcgatacgaagagatggtggaatcaatgaagaacgttgcgaatctcgacgttgaactgactgtggaggagcggaatttactttctgttgggtacaagaatgtgattggtgctcggagacatcgtggaggatcctgtcttccattga

SEQ ID NO: 18004 - DNA, 84 bp, Glycine max
  Clone ID: 700959222H1
cttacttgaagttgtgctattcaatcccaaagccacagaaataatatgagtcagattttagagactgaaaacatcacggccaac

SEQ ID NO: 18005 - DNA, 257 bp, Glycine max
  Clone ID: 700959225H1
ggacaagagcgtttacggcgggaagggtgttcttaacgccgttaggaacatcaacgaggtcttggctcccatactcgttggcgtcgacgttaggaatcaagctgatgttgatgctattatgcaggaaattgatggaactcctaacaaatcaaaactaggggctaatgcaatattgggagtttcgctgagtgtatgtagagctggtgcaggggcaaagggagtgcccttgtacaggcacatccaggagatttcaggaa

SEQ ID NO: 18006 - DNA, 256 bp, Glycine max
  Clone ID: 700959228H1
aatcacaccactcatcttacaatttacgagaagagttgtttactcaaccttatgatatagttaattggaataaagcgcgtcaccaatgtgtaaatcaagatctttactatccccatcctttgatacaagacctaatatgggatagtttatacatattcactgaaccgctacttactcgttggcctttcaacaagttgattagagaaaaggcccttcaagtaactatgaaacatattcattatgaagatgagactag

SEQ ID NO: 18007 - DNA, 114 bp, Glycine max
  Clone ID: 700959229H1
tgaaagttaagaagtagcaaagatgtttccattcgggcacaagggtcaaaagataaaggggactatggtggttatgcagaagaatgtgttggatatcaacagcatcaccagtgt

SEQ ID NO: 18008 - DNA, 255 bp, Glycine max
  Clone ID: 700959230H1
ctgcaacagttattttagtgtgaaggtgcagccatagctcagtcacttaattcatcgggtatagttagtgtgaatgacaaacagatttacattcagttgaaaatctcattataatgtgcactttggcaacaatataagcagaaagcatgatgactacaaaagtgagttccgacaacttccaatccttcgacaaatgcatcacagttttgaattcatgctatactacaccaggacaaatttgttttgaaatctctg

SEQ ID NO: 18009 - DNA, 261 bp, Glycine max
  Clone ID: 700959231H1
gaaacaaccttttccatgtgttcagttcattggaggggatggaggagatgttggattttacatgtttagatcagagaatgatgctaagaaaatgacagggtctagagagaccattcatgttccaaatgttgagcttctgagggtcacatatgaagtggagtctttgatgttcccttctaaccggaagatgatcaagtctttgtcattggaagcatcaggctcagatcggtttccagttattgatgttgcacgatgcacgcc

SEQ ID NO: 18010 - DNA, 266 bp, Glycine max
  Clone ID: 700959233H1
tattatttgacagagtaaatttggagaagctcaagcaaaagagcacaaggccaaacaagcacagttggcaaaggcaaaggctgctcctgatataaatcctaacttaatagaaataacagagagagttgtaattaaagaaaagcccaaggaccaaattccagagattgagtggtgggatgtgcctcttctgcattctggaaattatggtgatgttgataatggaatcataggcgaagataaactgaaaatagaaaaaatcaattttt

SEQ ID NO: 18011 - DNA, 264 bp, Glycine max
  Clone ID: 700959234H1
tatagcctctgctccccttttgctgggtccttcaatctcacttggggaacctccgtgcattaacccaaaagagttcatggacccttaattaaaaaatattttgcctagaaccaaaacctgcccttactctataacatttaccaaccgggaattcttcctggacgttttgttttttgattctagacacttggaagaagaatgagttgttttccttttttcaaagactaagagaaccaacagcaagagggagcagcaaggcattat

SEQ ID NO: 18012 - DNA, 259 bp, Glycine max
  Clone ID: 700959235H1
cactcttctccgccacttctgaatctattgaatcaacaatcatgtcggacgaagagcaccatttcgagtccaaggccgacgccggagcctccaaaacctaccctcaccaagccggtaccatccgcaagaacggctacatcgtcatcaaaggccgcccctgcaaggttgtggaagtttcgacttccaaaactggaaagcacggtcacgctaagtgtcactttgttggaattgatattttcactgccaagaaacttgagga

SEQ ID NO: 18013 - DNA, 258 bp, Glycine max
  Clone ID: 700959237H1
ctcagggaagcactcagtgatcctggtgattttctgctgagtgatttttcgaagtttgatcgcccacctctactgcatttagcattccaggctttggataagttcgttactgagatagatcgcttccctgttgctggttcagaggatgatgcacagaaacttatatctattgccagtaatattaatggtagcttaggtgatggaagattggaagatgtgaatccaaaacttctacagcaatttgccttaggcgctagg

SEQ ID NO: 18014 - DNA, 261 bp, Glycine max
  Clone ID: 700959238H1
gtgcagtatagaatgcacccccagattcgggatttcccttctaggtacttctatcacggacgccttactgctagtgaaagtgtggctaaattgcctgatgagccatactacaaggacccaagacttagaccatatatattctatgacatcagacatgggcgcgagtctcacagaggtggatcagtgtcttatcaaaacatacatgaagcacaattttgtctccgactgtatgagcatgttcagaaaacagtgaagtctttg

SEQ ID NO: 18015 - DNA, 253 bp, Glycine max
  Clone ID: 700959239H1
aaacacttcaactttaggctccatctcaaagaaatgggtggtttagctagcaatcttcctctaattgatatgctgggtctgcaaattcattatgcagcacttgctatattcacaagagccgctttgttagatggattgagtacgacggtctttgtagtgtacaggcaaggcatagccacttgggcattggcgcctatggttttctctcctaagcggagacaatcagtgaaagactctttgggattcaggagct

SEQ ID NO: 18016 - DNA, 255 bp, Glycine max
  Clone ID: 700959240H1
gttcttcatatttctggcattgaccatatacactgccatgaatcttaattcgctacagcagtttcctgacatgctcaagaaggccgacctgcacaaattacaatcagaaatcttgacgtgtctcccttccatgcctgatttgcacatactcagggagggaatctcaagttggcatattaaagaatatctgtacaattgtttgccagtaagattttccagtagcaatcatactgatgcatgtgttctgcatagtgt

SEQ ID NO: 18017 - DNA, 255 bp, Glycine max
  Clone ID: 700959241H1
aagtacttatgattatcatattatgtaataacagtcacatgcattaatatgaatatatagtttgagtttgagcacaagccaggttgagagatggagggaagtatccggtgctctgccaactacgttcctctcactccaatcagcttcttggaccgcgccgccgtcgtttaccgcgacagactttctcttgtctccggtgacgttacctacacgtggacccagacacaccaacgctgcatcaaacttgcttcttcc

SEQ ID NO: 18018 - DNA, 253 bp, Glycine max
  Clone ID: 700959243H1
catgaatgaaagccttgattcattctttggtgcacttttaaatgcccagacttctctcatggagttcattcctcgatatgaaagaggtctcgagcaacgccgtgaagaagaaagaaaagaggattttaatacttctaattttcaaccgattttgcaaactaaagaaccagtggaagaacaatttagaaagctttacactcttactgttttcaaaatatttcaaaaagagcttttgcagtgctttagctatctt

SEQ ID NO: 18019 - DNA, 253 bp, Glycine max
  Clone ID: 700959245H1
tatagcttcatcccaaaaagctcttttccttctaaatttgattccttagttcagcattctattattatatatggcttcttcaccttcctcagaaaacaaaaacctagagggagtagctggtggtgccggagagaaacccattccacttggtgagaacgtactgcagaagcatgctgcattctttgacttgaataaagatggtgtcatatacccatgggagacttttaaagggttgcgtgaaatcgggactggg

SEQ ID NO: 18020 - DNA, 262 bp, Glycine max
  Clone ID: 700959248H1
gcaacccatccttgccgagaagacggcgagacgcgggtttaagattaaacttcaacccgaacttctcgaggatgttggacaaaccactcacaatgtcaagggtgatgccagtgagtttctgaacattgtccaaggtctcggtatgaaactgctccttgatcttcttctcaccttctttgccatcgtcaaaaccctccatgcaggcctgttggtacgagataacagcgctgagccagttcttgaagtcagcctgttggttatg

SEQ ID NO: 18021 - DNA, 259 bp, Glycine max
  Clone ID: 700959208H1
agcaaataaagcacagaacagttgaagtgaatggcataaaaatgcatgttgcagagaaaggagagggtccagtggtgttgttcctccacggcttccctgagctctggtactcatggcgccatcagattctctctctcagctccctcggctaccgcgccgtcgctcccgatctccgtggctacggtgacaccgaagcaccaccttcaatcagcagctacaactgcttccacatagtgggtgatctcgttgcgcttattga

SEQ ID NO: 18022 - DNA, 128 bp, Glycine max
  Clone ID: 700959166H1
tgatcaaggccacgttcttgaggcgtgtaaagacagtctcaagaagcttcagttaacgtatctagatttatatcttgttcactttcctgttgccgtaaggcatactggggttgctaatacttctagtc

SEQ ID NO: 18023 - DNA, 75 bp, Glycine max
  Clone ID: 700959167H1
atcgttcttccatcatggttggcagaccggtgaagcggcggagcaaatggttgcagagattccatacaagatacg

SEQ ID NO: 18024 - DNA, 232 bp, Glycine max
  Clone ID: 700959168H1
ggaaaactgtcttggttgacaacgttgatttcttggaagaactgaagtgaagagcaagctttatatgaaataagtagtcctgctgcttttgtatgaataagttgtctcgcattttatcattgtgcgttttgtatcagtaccagtcatcaacttgttttcttgcttttatgagttcttttgttgacttaaaaccgcaattgaaacctcattctgcatgctacctatgattaat

SEQ ID NO: 18025 - DNA, 150 bp, Glycine max
  Clone ID: 700959169H1
aaccattgaagccaaattttctctctcttcttcttctctctgtctcttttcttttccttctctcaatcattctctgctacttttcactctctggggtcagggccaatcattgccacgctcttgctctgcacccttctctccatctctcta

SEQ ID NO: 18026 - DNA, 230 bp, Glycine max
  Clone ID: 700959170H1
gggaaagtctttataaggcggtaagactcaccgttaccacacgaaatgaattacagttgccattctcatcctcctctgtctctctctctccaccattgccatggatccttacaagctccggccatccagcgccttcaattctcccttctggactacaaattctggtgctcctgtttggaacaacaactcctctttaaccgttggagctagaggtccaattctgcttgagg

SEQ ID NO: 18027 - DNA, 232 bp, Glycine max
  Clone ID: 700959171H1
ctctctctctctatcccctttctgccgacgattttgtttgtcccctttggatcagttcgtgcccttgttgttggtttgtagcttttgctgaaatctagcaataatgaagaaggttattggtcaaactgttagggaccttaaaagagaagtaaataagaaagtgctgaaagttcctgggattgaacagaaggttcttgatgctaccagcaatgaaccatggggtcctcatgga

SEQ ID NO: 18028 - DNA, 233 bp, Glycine max
  Clone ID: 700959172H1
ctgatctaagatatgtctacatctgataagtcagaagtggtggaaaggggtgctaaggatgatgaaaagccaaaggaagaacatgagaagggtggatttcttgatacagtgaaggatttcattcaagacattggtgagaagattgagggagcagttgggtttgggaagccaactgcagatgtcactgggatacacattccatcaattaatcttgagaaggcagagctagttgt

SEQ ID NO: 18029 - DNA, 231 bp, Glycine max
  Clone ID: 700959173H1
gttgaaacattgatcacagtttgggctagccattattttgagccatgtgattcgtttggcggattggatcttaagcccaattaaaaagaaaagtttaaatttatattttggaatgaaatggaaagagctgggttgaatttgtgttaaggtgttgctaggtgcacctaacatttttttcaaaatgtcaaagttgtccctcatttgtgttgggtgtgcatgagaggttggttt

SEQ ID NO: 18030 - DNA, 86 bp, Glycine max
  Clone ID: 700959174H1
gacatttagagattggaatcatccgtgttcctctctctcatctctctttctctctgttccctcggtttccttactttgaagtttaa

SEQ ID NO: 18031 - DNA, 70 bp, Glycine max
  Clone ID: 700959175H1
ggcatcttgtgttgtgtcgctcttttaagctatttccttctcttaacacaattggttgtgccaattgcca

SEQ ID NO: 18032 - DNA, 149 bp, Glycine max
  Clone ID: 700959176H1
gttttctagagttcacaatagcgtccatcctgctatctggtataattttgtagggaggtggctccatgccactataatatagactatagaataattaaacttttttttttatgtattcatagttttattcaactagtctcttctgggtt

SEQ ID NO: 18033 - DNA, 118 bp, Glycine max
  Clone ID: 700959177H1
tgggtctccaaaatttcgaggactaccaggtttgtgctatcacagtgggtgtggttggtgatgtatgcagagccttggaggagaaaatactgccttattgtgatgggataatgaccca

SEQ ID NO: 18034 - DNA, 86 bp, Glycine max
  Clone ID: 700959178H1
cgaaaagactcttttgtccctctgttccgaaactgcctccaggagtcgttcgcggagattgaggaccagttgagtaaaaacaccat

SEQ ID NO: 18035 - DNA, 151 bp, Glycine max
  Clone ID: 700959179H1
cttctcttcttcaattcattctagttctggattccgactcgccgcatctgactcggtccgggttggggtcgactcagttcggtttttcattctctcgcgaatctaatctataggaaaagctaagggcacatcacaatgaaggcattgattc

SEQ ID NO: 18036 - DNA, 86 bp, Glycine max
  Clone ID: 700959181H1
cgcaagaagacattgttaatttgagagatggcgagttacgaggctattaagaactttgatgatgatgatgatgatgatgatgatgt

SEQ ID NO: 18037 - DNA, 229 bp, Glycine max
  Clone ID: 700959182H1
cgttttggaagaacaagggcatgtgagaaaaaacatactaatcagattaaacagcgaagaagagtttcaaatttattgcttcgaatctccagcttcgtcagggaaggaaaacagcataacgtgtggtctcgggggaaccaaaaactgtgaaattctgaagccactaggccttttaaaaaccaaactaaggaagacggtttagacagagagtacttcaagctaagaaaat

SEQ ID NO: 18038 - DNA, 227 bp, Glycine max
  Clone ID: 700959183H1
cctttacatactctgatctctctcagagcaatagcaacaatggcttccctcaccccaggcaccctgctgaaaatgctgcaggccatgaacaccaacacccgcgtcaccggcgaccaccgctccccgctcctccaggtcatcggcatcgtccccgccctcgccggctccgacgtctggtccaaccagggcttctatttaaacctctccgactccgtcaactccaccta

SEQ ID NO: 18039 - DNA, 148 bp, Glycine max
  Clone ID: 700959184H1
aaaataatcactgaagaatcacaaaacaactctggaagattgcaggtccaattgttattgctaatgagaacttgaatccaaatgatactaggcggaagacagttaattacttgcaaaaagctgccgtggcatatggtcctggaaagcc

SEQ ID NO: 18040 - DNA, 230 bp, Glycine max
  Clone ID: 700959185H1
gaatcatgtcaaaggagaaaagatgattctagtgtggaattttgcgagtcctcagatgccgatgatgtctggtataagaaaatggaggcctgcattactcccactcctaaagttactggcgggaatcttaaaccatttccaagcaggctatatgccattcctcccagaattgctagtggcttagttcctggactttcctctgagacataccaggatgataacaaaaagtg

SEQ ID NO: 18041 - DNA, 228 bp, Glycine max
  Clone ID: 700959186H1
gatcgagataactagaaacagtgtgatgaaaatgaaggtccttgttttcttcgttgctacaattttggtagcatggcaatgccatgcgtacgatatgttccctctccgaatgaacactggctatggtgcccgtactccggaggtgaaatgcgcaagttggaggcttgctgtggaagcacacaacatctttggctttgagaccattcctgaagagtgcgttgaagcaac

SEQ ID NO: 18042 - DNA, 230 bp, Glycine max
  Clone ID: 700959187H1
aatttatgttgcgcaccgagtatgactcgccaatcgcttctctgaacaattctggataatttcaggaaaggagtatttttggagagaaaatacagtgagcaggtacatttagaaagtaaggaggtgattttagcatttggagcccagtgttcacgaacccaacaacaacaataaacagagaaaaaaattaatttgccctatgtctagctttacgacatcgttttgctctt

SEQ ID NO: 18043 - DNA, 230 bp, Glycine max
  Clone ID: 700959189H1
aaagaagagggaactagtttctgcattctctgtttctggtgttgttcacttgttctcttcatttcaagtttcaaccttaatccttccgaaccaacacataaacatccaacactctcttcttcttcttctctctccgcgggttcaattgaacctcacaaaaccctctttctctctctctagatctgttcaaatcccgaatcatttccgctccaatttcaatttccccgaac

SEQ ID NO: 18044 - DNA, 229 bp, Glycine max
  Clone ID: 700959190H1
aacggagcacctctcttcaggtcgccatctagactgcaatcatggctgatggaccacagcatccatcagttgttcagaagctagctggacagtcttacctggtatccaggctaagccccaactttaactctgggaattattcctcgactggttcttacttcaatggaggactgcactcttctgggttggctgttgtgtcgcctggatctccagttactgtgcatgctcc

SEQ ID NO: 18045 - DNA, 217 bp, Glycine max
  Clone ID: 700959191H1
cctacttcatctcctggttacagcccatcatccccaggctatagtccctcatcacccgggtacagtcccacttcacccggatacagccccacgtcacccgggtacagtcccacgtcacctgggtacagtcccacctctccgacttatagtcctagctctccgggatatagtcctacaagtccagcttattcgcctaccagtccatcctactctccca

SEQ ID NO: 18046 - DNA, 206 bp, Glycine max
  Clone ID: 700959192H1
gaaaaaacagaagatcccccagtttgctcttttagcaatgaaactagagtcctaacaccagctccagaggatgagagtcagaggcatggtggctctggaagcagaagtataaatgctgagctgggaggagaacattgtgagaaatctgaatgtgattctcattggggaacgggatctgtacacagacccgttaatcctgagctgca

SEQ ID NO: 18047 - DNA, 231 bp, Glycine max
  Clone ID: 700959193H1
gtgagttttgtttatttgaaattaacaagtagcaaagatgtttggaatcatcggaggaaacaagggtcacaatataaaggggaacttggtgattatgcgaaagaatgtgttggatatcaacagcattaccagtgttaagggtgtcatcggaaccggcattaacatcattggaggagtcgtcgacaccgttactgctttggcgtcccacatctccatccagctcattagtgc

SEQ ID NO: 18048 - DNA, 154 bp, Glycine max
  Clone ID: 700959165H1
ttggcatcttgtgttgtgtccctcttttaagctatttccttctcttaacacaattggttgtgccaattgccatagtcaccaaccaattaacaaaggtatatatatcatcatatcatcaccaaatgacaaatattgggttgttttttcttgtggt

SEQ ID NO: 18049 - DNA, 84 bp, Glycine max
  Clone ID: 700959194H1
ctttaagaagctgcgtttgtgatattttctcctaccatttctgagcttgtttgaactttcactcgcagcttcttattcttgtga

SEQ ID NO: 18050 - DNA, 150 bp, Glycine max
  Clone ID: 700959195H1
ctcctcataatccatctctcaagtctcaactcaactcaaccctttaacacaccaaccaccacaacctcaaaaatggccattagaaaatcaaacaaacttccccaacacgcagtagttttgaagcaaatcctaaagaggtgttcgagccta

SEQ ID NO: 18051 - DNA, 226 bp, Glycine max
  Clone ID: 700959202H1
ctgaaacaagaaccaaaatggagaattcgaccgaagaatcccatctccgatcggaaaactccgtcacttacgagtccccttaccctatctacggcatgtcattctccccctcccacccccaccgcctcgccctcggcagcttcatcgaagaatacaacaaccgcgtcgacatcctctctttccaccctgacaccctttcggtaactccccacccttctctctcctt

SEQ ID NO: 18052 - DNA, 263 bp, Glycine max
  Clone ID: 700959204H1
ctctcgtgccgattctccaccactattcccttcaccccaatcacactttccgctattagtgtagaagatgagtacgctggatgcaacaagggctgaacttggtcttcttgttttatatttgggcaaggctgaagcaagggacaaaatatgcagggcaatacaatatggttccaaatttttgagtaatggggaacctggtactgctcagaatgtagacaaaacaaccagcttggcacgaaaagtcttccgtctctttaagtttg

SEQ ID NO: 18053 - DNA, 260 bp, Glycine max
  Clone ID: 700959205H1
attaattgcaagaatggcacttcgttgcttggtgatgtccctttctgttctcttcactcttggtcttgcgagagaaagccatgccagagacgaagatttttggcatgctgtttggccaaacactcccattccaagttcattgcgagatcttctaaagcctggccctgcaagtgttgaaatcgatgatcaccctatgcaaattgaagaaacacagtacccgaaaaccttcttctataaagaagaccttcatccaggcaaaa

SEQ ID NO: 18054 - DNA, 261 bp, Glycine max
  Clone ID: 700959207H1
cttgaactatcgtgtcttcttggctttctctgttcaggatcaacatggatattgtatcacgagctttgctatttccgttggctatacttgtgctcatattaagcacaccttgctcaggtgcttttgggaagagtggaactaatgtgaaaacagctatttttctgtcccccaagtttgaacttggaccaggatcggtagccaataaatatgattatgacgctgattttccaagaggtcatatagcacttaagagtttcaatg

SEQ ID NO: 18055 - DNA, 94 bp, Glycine max
  Clone ID: 700959119H1
gttccatgtgaacggcacttgcacatgggttagtcgatcctaagggacgggggaagcccgtctgatagcgctctgtgcgcgtactccgaaaggg

SEQ ID NO: 18056 - DNA, 94 bp, Glycine max
  Clone ID: 700959120H1
agacagaggaactgagagaaattcgcaaaccctaatttcggagagatcggcgatggctgcctccaaggatcgcgagaacttcgtctacatcgcc

SEQ ID NO: 18057 - DNA, 223 bp, Glycine max
  Clone ID: 700959121H1
gagagagggacattaaagatgatgtaggacccactatcttttataatttccaagaagagaatgtgttcaaaagagtgtattgttggcatttctgttgtataattgtaagagatttatgagaaattttctgtatcttctaagtgaattgttttgttgaataattgcagaaacaatagtgctttgttgaaaaacatattctcatcataaactgggataggtttgt

SEQ ID NO: 18058 - DNA, 240 bp, Glycine max
  Clone ID: 700959122H1
ggattagatgccagagaccaccaatttgatcttcaacttggaggcagaatgttctacaatactcaagacatgctgtggcggaggaagctggaggagcaggctgatttgcagcaagctcttgagctacaaagtaggaggctaatgggtctgcaacttcttgacatcaagaagcatcaccagcgtgcactctgcactggaagcccaattccttcccccacccattctcctaacatgttcaac

SEQ ID NO: 18059 - DNA, 240 bp, Glycine max
  Clone ID: 700959123H1
gaaaggctgtggttatccatgtcccctacagactaaggaaaggattccggaagattcatgtcaggcttgtgagagaacttgagaaaaagtttagtggaaaagatgtaatcttgattgccaccaggaggatagtaaggccaccaaagaaaggttctgctgttcagcgcccccgcaccagaacactcactgctgtacatgaggcaatgctggaagatattgtattgcctgctgagattgttg

SEQ ID NO: 18060 - DNA, 231 bp, Glycine max
  Clone ID: 700959124H1
cttcttcttcttcttctttctaacgccatgtctgggagccaccaagagcagccactgttagagaactcgttcatagaagaagacgagccgcaagaaacagcttatgattcgtcggagaagatagtggtggtcggagtcgacgagtccgatgacgaggagaattgggggagagtgccccgattctcgtggaagaagctatggctgttcaccgggccgggctttctgatgagc

SEQ ID NO: 18061 - DNA, 126 bp, Glycine max
  Clone ID: 700959125H1
gggcaagacaagataagaatataagacaacttgatatcggccagtagaataaaaatctagttttggttaaaaaaaaaaaaaaaaaacaaaaaaaaaaaaaaaaaaaaaaaaaaaaaaaaaaaacaa

SEQ ID NO: 18062 - DNA, 242 bp, Glycine max
  Clone ID: 700959126H1
gcaagatttctcgcagagtatagatttgatgtctcaaaattggagccagtggtggccaagcctcattctccggataatcgtgctttggcaagagagtgcaaggatgtgaaaagtaacagagtatacataggatcttgtacaggtggcaaaacagaggatttcatggctgcagcaaaagtttttctggcatcaggtaaacaggtcaaagttcctacatttcttgtgcctgcaacacaaaaggt

SEQ ID NO: 18063 - DNA, 158 bp, Glycine max
  Clone ID: 700959127H1
ccacattcaaatccaaatggccctttacattacactaataattggcctcctagtaaacaccctagtactctataaatagcatttgcatgcaccttagtcttcaccaaaatactcctcttggcatcttgtgttgtgtccctcttttaagctatttcctt

SEQ ID NO: 18064 - DNA, 241 bp, Glycine max
  Clone ID: 700959130H1
gttgaaacaatttgcactaagggcattggctagcacacttaatgaaggagagttgtctgatctaaaagatcagtttgatgcaatagatgtggacaaaaatggttctattagtcttgaggacatgagacaggctcttgctaaagatcaaccttggaagttgaaagaatcacgtgtgctagagatattgcaagcgatagacagcaacacagatgggctagtggatttcaccgagtttgtggca

SEQ ID NO: 18065 - DNA, 158 bp, Glycine max
  Clone ID: 700959131H1
agaatccataaaacacacaaaaactcagggtagggcagagagagagagagaaatgggaggttgggctatcgcggtgcatggtggcgctggtgtggaccctaatcttccactcgagcgtcaagaagaagcgaaacaacttctcacgcactgtctcaatc

SEQ ID NO: 18066 - DNA, 239 bp, Glycine max
  Clone ID: 700959132H1
tcggctcgagtacagattctctgtgttgtgttgtgtacttgtgttaattgtgttgttgttgtaggaaatttaagtgaagagagaatgatgatgaagtctgctatgtgtgcattggtgcttgtggcactggttgtggttgaagtggggcccatggctgaggctgcggtgacttgcaacccaacacagttgactccttgtcttccggcaattaattcaggttctgcaccttcgagtgcttg

SEQ ID NO: 18067 - DNA, 245 bp, Glycine max
  Clone ID: 700959133H1
cgactcgtacggactccgatcccccccgagtcacactcagccagcaccaccgcccgatccgacgatgtctcgcgcctcttccgccgcctccggcgagatcatgctgttcggggtcagagtcgtcgtcgattcgatgaggaagagcgtcagcatgaacaacctctcacagtacgaacatcctttagacgccaccaccaccaacaacaacaaagacgccgtcgccgccggctacgcctccgccgacg

SEQ ID NO: 18068 - DNA, 240 bp, Glycine max
  Clone ID: 700959134H1
ctttgcgcagttccctacctctcctttcaagatgcagatcttcgtcaagaccctcaccggaaagaccatcacccttgaggtggaaagctctgacaccatcgacaacgtcaaggccaagatccaggacaaggaaggaattcccccggatcagcaacgtctcatcttcgccggaaagcagctcgaggacggccgtaccctcgccgactacaacatccagaaggagtcaacccttcaccttgt

SEQ ID NO: 18069 - DNA, 90 bp, Glycine max
  Clone ID: 700959135H1
attagccacaacaaagatcacaacaattgttcgagaacattatataagccacctaacattcccgttcagaagcaggatcacagtcggaga

SEQ ID NO: 18070 - DNA, 89 bp, Glycine max
  Clone ID: 700959137H1
tgagtttcatgaacaatgatttcgagggtgcatggccagagattcaacatttgattggtctcaagtctatttatctttccaacaacaag

SEQ ID NO: 18071 - DNA, 238 bp, Glycine max
  Clone ID: 700959139H1
tctggtcagacatatgacagacctttcattcaaaaatggctaaatgctggaaataggacttgccctcgtacacatcaagtcctttcacacactgtgcttaataacaaatcatctaataagggaaatgattgagcaatggtctaaaaaccaggggattgaattgtcgaatactgttcaatatattgatgaggaaggtttaaacgaagccgaccgtgagcattttctttgtttgcttaag

SEQ ID NO: 18072 - DNA, 237 bp, Glycine max
  Clone ID: 700959141H1
ctctcattccccatttcctcacctccttcaaccgctgctaaattctagggttccgaaatggacgctggcggaaagatcaagaagggcgccggaggtagaaagggcggcggcccaaagaagaagccggtttcaaggtccgtcaaagccggtctccaattccccgtcggaagaattggccgttatttgaagaaaggaaggtacgctcagcgtgtcggtaccggtgctcccgtatacttg

SEQ ID NO: 18073 - DNA, 75 bp, Glycine max
  Clone ID: 700959143H1
tcgaggttagaacctttgagagggttggaaccaacatgtgtgctgctttcatcactaacaaccacaccatagagc

SEQ ID NO: 18074 - DNA, 67 bp, Glycine max
  Clone ID: 700959144H1
agcagcctccagttcgtgccactctcttcaacatggtcgttacctgctcgagtctccacacaggatg

SEQ ID NO: 18075 - DNA, 122 bp, Glycine max
  Clone ID: 700959146H1
ccgaatctcccagtctcaaacctcgccgacgcgtttgacttggcctcgaagctttccgcggaacggccatgaacgcgtcgccgtttatttggaaactaaaacgactcctcaacgtaggttcc

SEQ ID NO: 18076 - DNA, 238 bp, Glycine max
  Clone ID: 700959148H1
taccacaactgcgacgccgtttttgactgctacgcggagatacccgcgcactccccctcttgtccctgaagactgccacagtgactgcgactcttcctcctccgtcgttgacgacggcgacgacaacatcgtttcgtcgtcgtttcgacctcccttgccgtttgatctcaacgcgctgccgtttgatgatgctgccgcggatgatgatctacgccgcaccgcgctttgtctctgatga

SEQ ID NO: 18077 - DNA, 236 bp, Glycine max
  Clone ID: 700959149H1
gagattcttttttaatgaccaaaggaaacagaggcaccagaaaaagcaatcatgaagtgtttctccttatcctcaatttctcttttcattctcctctttctctgttccgagagtgtgtcctctcaaaatgtatccgagagtgagcagcagcaagctagcattcctccaagaggttggaactcctatgattccttttgctggacaatttctgaaggagaattcttacagagtgctga

SEQ ID NO: 18078 - DNA, 84 bp, Glycine max
  Clone ID: 700959150H1
cttcctcagtaagcaatgtcttctcccgcggagttttatcactctcttccgccaataacgaaggacaatggcaccgtttgcctg

SEQ ID NO: 18079 - DNA, 88 bp, Glycine max
  Clone ID: 700959151H1
gggaaaatgacttcgaggagggaaatcacttataccgtttcctcgagcatgaaccctttatccccatatgctttaattttcatggtac

SEQ ID NO: 18080 - DNA, 242 bp, Glycine max
  Clone ID: 700959118H1
ggagcagctcatgtggtggttgagattccaagcaatacgacggagagcaatacaaacgagaagaaaaatgagttatccactacctttgagattggaaaggctgaagtaatacgtggccaagggcactgtaagctttgtgacaagagaatttcttgcagaactgcagtaggcaggtctttggtatacagacctgcaatgctctcaatggtggcaatagccgctgtctgtgtctgtgtggccct

SEQ ID NO: 18081 - DNA, 235 bp, Glycine max
  Clone ID: 700959152H1
gaagaaaaaacaataaaacatgtcccattttggtcggaaactcagccgctcctccaccgtccggcgacggttccaccaccgcgtttccctgctccagcggtgcctcctccgcgtcctccaccgcatcctcctctgctccgggagcaaggccaccaatgccacgtatagcatgctgccgccggcattgccctctccgccgccgccggtgagctccgacggcgagcttggccgtgaa

SEQ ID NO: 18082 - DNA, 235 bp, Glycine max
  Clone ID: 700959154H1
caaaaatggaggtgggatgccagagggtaagaatggaaacagcaaaaataatggtggtggtggaattccaaataacaatgggaatggaggtaaaaagggtaataatggaatgggtgaaggtgttcaagctatgaacatgttcccaaacatgggtggtcataatcctagtatggttggggctaatatgggccccatgaataacatgagcatccctatgggcaacatgcccatgacc

SEQ ID NO: 18083 - DNA, 235 bp, Glycine max
  Clone ID: 700959155H1
atttctttccacctttccaaccatcattacttacaagagctagaggaggacctctgattccagctaaactccctccaagatgtgccaggcttgttgtttacagtaggaaaacaaatgagactagtatatggattgttgagttgtcgcaagtacatgcggtaactcgaggtggtcatcaccgagggaaagtaatttcatcacatgttgttcctgatgttcagcctccaatggatgc

SEQ ID NO: 18084 - DNA, 236 bp, Glycine max
  Clone ID: 700959156H1
ctgggatgggaaccaaaggtcaagttgcgtgatggccttcctcttatggaagaggatttccgtcagaggcttggggttcccaagagcaactaagcttgttttactccttcacttcatatcatataatcataatgaatattttgatagtaactgggatgaatctgtacagtgttaagatgatttatattgaaaattatgtagaggattgcttctccacccaacttctatggtaaata

SEQ ID NO: 18085 - DNA, 236 bp, Glycine max
  Clone ID: 700959157H1
ctcaaagtcctcctccaccatctcccactcctcatcctccctactactacaaatcccctccaccaccaacgtcgcatcctccaccttaccactatgtgagccctccaccaccttctccatctcctcctccaccataccattacacatcaccacctcctccttccccagctcccgctcccaagtacatttacaaatcacctccacctccagtttacatatatgcttccccacctcca

SEQ ID NO: 18086 - DNA, 89 bp, Glycine max
  Clone ID: 700959158H1
ttaaggaagaacattttaacaatggtttcaaatctatgccatagttcttatctccctataaataccaaatcccaatttctttctctcca

SEQ ID NO: 18087 - DNA, 119 bp, Glycine max
  Clone ID: 700959162H1
cttgggatagacttagcattagtcgtgagacgtatagacaaactagactagagcagtacaagaactatgaaaatatacctcattcaggcgaacggtcagaaaaggaatgcacaccaaca

SEQ ID NO: 18088 - DNA, 90 bp, Glycine max
  Clone ID: 700959163H1
gggtggacaagcgtacgaggcaatgaacaacgctggttttcttgacaccaatcttattataatcttaaacgacaatgaacaagtttccct

SEQ ID NO: 18089 - DNA, 155 bp, Glycine max
  Clone ID: 700959164H1
gccgtctccgcttcaaagctttgatgagttgaaatcaagatataactgtccttcatatttgttgcgcaatctgaaggaacttggatttagagaaccaacacctatccaaaggcaggctataccagtacttttacaaggtcgtgaatgctttgctt

SEQ ID NO: 18090 - DNA, 243 bp, Glycine max
  Clone ID: 700959075H1
gcactatgctacaagcccaacaaacttggttttaattggtataggcgtgccaaggtcttgttaattttgagcgttaagtgctgcaactaatcagatcccaagaccttggcctaccttgccatacagaaaaaaaaagagcattaaaaaggccagggtttggagccaccaaaattagccccaaggcacaagtcatggaaagaataatggttggaagtgcatcaaaggttgctttcaccctcttgg

SEQ ID NO: 18091 - DNA, 256 bp, Glycine max
  Clone ID: 700959077H1
gaacgccccattctttgcattaataattgtggcttctttggaagagcagctaccatgaacatgtgttccaagtgttacaaggacatgctgttgaagcaggagcaggacaaatttgcagcatcatccgttgaaaacattgtgaatggcagttccaatggcaatggaaagcaggttgtggctactggtgctgttgctgtacaagttgaagctgtggaggtcaagattgtctgtgctcagagttctgtggattcgtcct

SEQ ID NO: 18092 - DNA, 261 bp, Glycine max
  Clone ID: 700959078H1
ggttatctctaaggtcctaaacaatcctctttcaaaaacataccgagacaagtgtggaaatgacgacaccatcattggtagagtctctagttcttcaactccatgagatctcagctgtcaaatttggcaacttcaagctcaaatctggcatcttctcaccaatctacatagacctccgcctcatcatatcttacccttctctcctccaacagatctctcaaacccttatttcttcagtctcttccacttcctttgacctcg

SEQ ID NO: 18093 - DNA, 263 bp, Glycine max
  Clone ID: 700959079H1
gaagaatcagaagatgagtcaaccaataagaaagataagcttctcatgggaaaagaagcctggtgtctccaaagtaacaactactactcatggtgaaaatctgatcccaaaagaggaagagtttttggccaagttgccaccaccaccttgcacaccagaagaatcaagtgctactcatcatcacaaaaaccaccaccctcttcttgattttcaaattccacttcctccttgtgcttttcagcctcccttttatagaacttcct

SEQ ID NO: 18094 - DNA, 246 bp, Glycine max
  Clone ID: 700959080H1
tggtctcaaatcaaaattgtccgagcattggatggatgtctacaggacagctggaggcaaagatattagttcacctaaacagaagatatttttctccctttgcagcagttaccgggatatactttactgtaacaagaggcctttctatctcaaaggtcttgaagacacaagcatcatggatgcatacataatgcatctctcaaacatgtcttcagaactagagactgcgtgaaaaaaaatgattcc

SEQ ID NO: 18095 - DNA, 258 bp, Glycine max
  Clone ID: 700959081H1
acagtttggaggggttaacggcattgctttttatgcaagttctatattcatctctgctgggttttcgggaagtattggaatgatagcaatggttgctgttcagatcccaatgacagctttgggagtacttttgatggataaatctgggagacgaccacttctgctgatctctgcatcgggaacatgcttaggatgcttccttgcagccctatcattcaccttacaggacctacataaatggaaggtaggaagtcccat

SEQ ID NO: 18096 - DNA, 235 bp, Glycine max
  Clone ID: 700959084H1
ctctagtggtgctaaagtcgaacttaatcactctgtttctctcgttaccgttctctatctatgcccatctcttcaggtaagcaataatttctgtttgttgtttatatgtttttttacactactttctgctctcatactcgtttatcgatgggtataaattagtgtgttgaaattgcaaaacagaaaatgtaaaactggtgttgtgatttgtggcatcgtaaattgactctttaag

SEQ ID NO: 18097 - DNA, 251 bp, Glycine max
  Clone ID: 700959085H1
gtttctgctgatcctgacgtatttaacaaaagaaatgtctcagtaaataaaaatatatattctttgttgaattttgttgatggaagaaggttacaataactaaagaacggatgcagtactaagataaagaaccattgaggaaaattcattttcaggtttagtgttacaaaagtaacttagaagggtcagaaaaccactgggtggcgttcacagaattaatgccactgaagggttttttggctgcatatctc

SEQ ID NO: 18098 - DNA, 249 bp, Glycine max
  Clone ID: 700959086H1
tttaaatttaaaagacttgtcaatacagagatctcagactgatttgtaatgcttcatgcctccattttactctcttgattgtcagtattgaagaatttataccattgttgagggaccgcatgaatgtattgaatccatatgtccatcagtttttggtaggatggattactgtattggacagtgtcccggatattgacagcctggctttcttcctgattttcttgatggtttgtttaatatgttgagtga

SEQ ID NO: 18099 - DNA, 253 bp, Glycine max
  Clone ID: 700959087H1
gttattcccaaagccgatacttccttttcaagtcttttctctctctctctctctataataagattcttccctctcccttctctctctctctctagaacttcgtcctccctctgcttctttcttgcttagttgcagcgcgattgctgcatcgtcctccaataagagctcgctgctagtgaaccctaacacggcggcaacgagaggtgttcggttgaagctcagatcagcgatggcagcagcaacccgcacttct

SEQ ID NO: 18100 - DNA, 216 bp, Glycine max
  Clone ID: 700959089H1
ttttcctccatctgtttgcgattatgcatttggtttatagcatttcatcactatacctaattgtggtgtctttgatatccagtttggtccatgatctatcagataagctttggctatacccaaaaatcacaagcatgcagacttagtatttgcagactgattttcgtttcagatttcacttaatttgagatgttttgtcaaattttgggaaataaa

SEQ ID NO: 18101 - DNA, 256 bp, Glycine max
  Clone ID: 700959090H1
gttggctatggcactcgcatttgttgacgtgtcaagggatgctatggccttgtctccaccggatttcattgcggcctgtgagatgctcgagagggcgttgaagcttttgcaggaagaaggggcaaccagcctagctccagatttacaagcacaaatagatgagacgctagaagagataaccccacgttgtgttttggaacttttagccttgcctcttgatgacgaacatcgagcgcggagggaggcaggtcttctt

SEQ ID NO: 18102 - DNA, 257 bp, Glycine max
  Clone ID: 700959091H1
atcttaaagataaggtggaggcttcacaaaaagaacctctaattgggccatcttccatgacctctagaactcgagatctgaaagagaaaagagaaattactcatagaacaaccaggacctcagaatcttctcagagatcagtcgagtcaaatgctgccaagtatctaaagggacagtctttgaacagaagctggaatggatctgcggatacatctgtatccgtcaaatctcctacaaacgaggaagaagattcttct

SEQ ID NO: 18103 - DNA, 244 bp, Glycine max
  Clone ID: 700959092H1
cgaagaataccgcacaaagcttaggactttttttttggtctctggagttacaccacagccacggaggcacccaggagaggctttaatgaatggcggttctgcatctagtaacttaagggcagctctctcccattgcgtacaacaagtgcgaagttatgattatcatcactatctttgccttctcgagctgcctccgtctatgcggaaggctgcatttgcactccgtgccttgaatgttgaaaca

SEQ ID NO: 18104 - DNA, 259 bp, Glycine max
  Clone ID: 700959093H1
ataactagaaacagtgtgatgaaaatgaaggtccttgttttcttcgttgctacaattttggtagcatggcaatgccatgcgtacgatatgttccctctccgaatgaacactggctatggtgcccgtactccggaggtgaaatgcgcaagttggaggcttgctgtggaagcacacaacatctttggctttgagaccattcctgacgagtgcgttgaagcaacaaaggaatacatccatggcgaacaatatagatcagact

SEQ ID NO: 18105 - DNA, 261 bp, Glycine max
  Clone ID: 700959095H1
cagaaaatctgaatcatgtcgtggcaagcgtacgtggatgatcacctgctgtgtgaaatcgaaggtaaccacctcactcacgccgctattatcggccacgacggcagcgtttgggctcagagcgccaacttccctcagttcaaagctgaggaaataactgctatcatgaatgactttaacgagcctggatcacttgctccaactggattgtttctcgctgccaccaaatacatggtcatccagggcgagcctggtgccgtc

SEQ ID NO: 18106 - DNA, 236 bp, Glycine max
  Clone ID: 700959101H1
catgaatctcttacagaggcacatcctggtgacaatgtgggattcaatgttaagaatgttgctgttaaggttttgaagcgtggttatgttgcctcaaactcaaaggatgaccctgcaaaggaggctgctaacttcacagcccaagtcatcatcatgacccaccctggtcagattggaaatggctatgcccctgtcctcgactgccacacttctcacattgctgtcaagtttgctga

SEQ ID NO: 18107 - DNA, 102 bp, Glycine max
  Clone ID: 700959102H1
gacgatgaatggcaaaatggtggtaagcaaacctctgtatgtgactctagcccaacggaaagaagataggagagctagactgcaggctcagtttgctcaaat

SEQ ID NO: 18108 - DNA, 108 bp, Glycine max
  Clone ID: 700959103H1
attcggctcgagaaattaacatgggaaacgtgccaaatgtggttgtgttgtgtttctgtctctggaccctgttgtatcctcttgtgttctgtgcacccaacgatgggt

SEQ ID NO: 18109 - DNA, 240 bp, Glycine max
  Clone ID: 700959105H1
ggctcgaggtactcagctgggataacaagcttgctggtgctcaggttcttctgagtcgtttgaggttgttcttgagtcctgggtatccatatgaagaaattttgaggacctttcacaatcagacaagcataatcatgtgctcctatctaccagttttcacaagctttaacagaaccaaaggtggcttgattcaattaaaccatggtaggcctcagcctctccaatatgtggtcaatgcgg

SEQ ID NO: 18110 - DNA, 243 bp, Glycine max
  Clone ID: 700959108H1
acaaattctgcccttataatacagttctgttttctcatagtgatccatcaatcaatactgtgttgacagcaccaactgataaacctggagtggcattgcttgattttgtcattttcccacccagatggctggttgctgagcatactttccggcctccatattatcatcgcaattgcatgagtgaatttatgggcctcattcatggtggttatgaggccaaggctgatggatttcttcccggtg

SEQ ID NO: 18111 - DNA, 161 bp, Glycine max
  Clone ID: 700959110H1
tctcgctcttgcaattagtcctcttccaacaatccgcacctaaactctagggttctgacatggacactggtggaaagatcaagaagggcgccggaggaagaaagggcggcggcccaaagaagaagccggtttcaaggtccgtcaaggccggtctccaattc

SEQ ID NO: 18112 - DNA, 235 bp, Glycine max
  Clone ID: 700959111H1
tggaagaagcagaagaaaggaatgtgaagtgtgtttgttggacttggttggtgtgaagaaagagagatgggtggtgtaacttcttctatggcggcgaagatggcgtttttttccgcctagcccgccgtcgtacgaggtggtggaggaagcggcgacgggggcgttggtgttggaggcatttcctcggcgcgagaacgtgagggtggtgaaattcgggactcgacgtggaagtgag

SEQ ID NO: 18113 - DNA, 243 bp, Glycine max
  Clone ID: 700959112H1
cataaacgagaaattgagagagaatgtctcgtatctctacactctatcttctcgcttacaactcctttcaggccattggctggacgatttccttaactaagattttgtacaatcttctcgtcactgcatccatcaaaggaacctatgcttccgccgccagcttaatctgttttctgcaatgcgctgcattcttggaagttatacacggagccattggcattgtgcccagcggggttttgcttc

SEQ ID NO: 18114 - DNA, 257 bp, Glycine max
  Clone ID: 700959074H1
aaaccagagaaatctatgaagaatcctgtgaaattgaaattgaatgatagctaaatcaaaaaaatggatcaatcacagaatcagagaccagcgacatcaacaaccacaccctcgcgctctttccagttccacccccttcgtgactcaattttcgatctcttcaacctctacttaggactcggccgaaacagtcgccagaaacccgatgactcacttcgcgacccaccgaacaagagcactatacgcgtacacgccct

SEQ ID NO: 18115 - DNA, 98 bp, Glycine max
  Clone ID: 700959114H1
cgctcgtcaaccatggacgaagcttcccttcaccgcaagcgcttcttcgcaagtatctccggctttcactccctccaacgacgaatacaaaaaggcca

SEQ ID NO: 18116 - DNA, 247 bp, Glycine max
  Clone ID: 700959116H1
tgatatttctgaccagagtagcgagaagattcataggaagcagatcaagcatttgttccttgacctattcgttgcggggccggtggtggccgtgaagaggttgaaggatgtgacaatttccgagaaggaatttaaggagaagattgaggcggtgggagcgatggatcacgagagtttggtgcctctcagggcttactatttcagcagggatgagaagctccttgtctatgattatatgcccatggga

SEQ ID NO: 18117 - DNA, 97 bp, Glycine max
  Clone ID: 700959117H1
aatcaagctgatgttactaacatcacacttaaaccaaccactaatgcagttttaagcgcttaattagtaggctttggcctatttgttgtcccttcct

SEQ ID NO: 18118 - DNA, 265 bp, Glycine max
  Clone ID: 700959032H1
ctttgccattatctcttcccttgtccttcttcctactatactatattttctctctctaatcaatcatagttctgattttcatacacttaccctgaaacctccattctcagatcaagcttgcaccaaaatacatacatagctatggacaataatactagtgcctgtgcctacccccaacttgagtcagaagaagcatcttcagagcccaatcagaaactccaacattcaaggacaaggaaatgggttgagaaaacagttgtggcag

SEQ ID NO: 18119 - DNA, 260 bp, Glycine max
  Clone ID: 700959033H1
agaaaagcatggcatgttggtccaatgtttcttttcaacagggttaaagaagaaaaagcacatagaggaatggatgcatctattaatgatgagcatgagtgcttaaagtggcttgacacgaaggaaccgaattcagttgtttatgtgtgctttggaactacaacaaagttaactgattctcaacttgaggatattgccattggtctagaggcttcagggcaacaattcatctgggtcgtgaggaaaagcgaaaaagatgg

SEQ ID NO: 18120 - DNA, 260 bp, Glycine max
  Clone ID: 700959034H1
gagagagagagagagagaggagagagtattggcgcttcatcaagatgggtatttctagggattccatgcacaagaggcgtgccactggtggcaagaaaaaggcttggagaaagaagagaaagtatgagcttgggcgtcaggcagcaaacaccaagttatcaagcaacaagacaatcaggaggattcgtgttagaggtggcaatgttaaatggagggcattgaggctggatactggcaattactcatggggtagtgaagca

SEQ ID NO: 18121 - DNA, 257 bp, Glycine max
  Clone ID: 700959037H1
tctttttccaaactctataaatttttagttccacaataccaaaccaagctggcagcagcctcggcctcatccaccatgatatcaacaccagccttatctccaagcacaagcatccaaaagcaccatcatttgatgccatccatcgtgtgctttcaaggccttagacccctcactaggttcacaaccaaagtgatcagctcctcccatgagggttattccaaatggtggtgtcggtgttagagctgtactcatctccg

SEQ ID NO: 18122 - DNA, 257 bp, Glycine max
  Clone ID: 700959038H1
tgaagcgtgcgatatatgggtcctaattgccaaaattgtgaatggagggaatacgacaacatattcggagccgacaaataagtatgcaactcaacacatccttccacacggagaattcatcttcggtaggaagggcgtagatcattcagctatgagttcatcccagtagaaggccaaaggggcgagaaaccctactttttcccattcttatacgaaacgtcagacatagatgagaacaatctctacccttttgtgca

SEQ ID NO: 18123 - DNA, 254 bp, Glycine max
  Clone ID: 700959039H1
tgaaacttgcttttgttcccgattttctcaaattgctttcggttttcgttctgattctgcaaaatcatggagatggagcgcatcgttgaattccctcacacctacatggatcgacccccaagaaagagagcgcgtttgggctgggacatcgctgaggcccccaaggctcaggtaggattgttttgtggacaagaggttgagaatatttcaagctatgctccttcagaacatccccctagttctctgtttaaggg

SEQ ID NO: 18124 - DNA, 151 bp, Glycine max
  Clone ID: 700959042H1
ttcctttgtgtgatttcatttgactgaattgcattaacatttcccctcttgttctttttcttctggtcattgttgatatggcattggccattgccacccatgaaatgtgaatcattcaatcccaggatttagcattagcactagtgattgc

SEQ ID NO: 18125 - DNA, 260 bp, Glycine max
  Clone ID: 700959045H1
ccatagtaataatgatgttaatagtgaattatcattttgtacatcaaagcaatctgcaatggcctctgcaaaaaatcatgaagcttctattcacaatgtgcatactattaattcagaaggctatttgatggatcagctctctcttgtcagagaggacaaacaccattctttgagttcatcatcagggatatgtggtatgatgtcctcaaaaggtgtctcatctacatttcatagttcaaatagtggacagcttgaaaggt

SEQ ID NO: 18126 - DNA, 265 bp, Glycine max
  Clone ID: 700959047H1
gagactgagacagtgatatggcgtatctgagattctcacacgcagcaccacagccacacctcacactaggctttccttcaccacctcaatttctctctattgctgctccaaaattctctccctcgtcttctaccatcaggtgcaaaggttttagtagattgatagtgaatcagaggtggtgacctgtttttgcaacaaatcccaactctgtaggtgaaaaatcacccacagaaggatcagatgtaaatgaaactagcaatgctgc

SEQ ID NO: 18127 - DNA, 263 bp, Glycine max
  Clone ID: 700959048H1
tgaagggcaaaatcccaaatggaatgagaaaaaatttctataattagagtctcactctcatactcgttgtatgtatggctacgctctctctcactctcaactgttggagtaccgtggaacttgctcacaccagattttcttctaccttcacctccctcggtcgcaggagtagatatagcatatgttcttttgccaagaagtcattgaagaaatccagaagagatgtaacagaggcagctggagatctcttagatgataagttt

SEQ ID NO: 18128 - DNA, 257 bp, Glycine max
  Clone ID: 700959051H1
ggctgataagattgcactaaagttagttggaccaggtggatttgtagttactgaagctggttttggtgctgatattggagctgaaaagtttatgaacattaagtgtcgttatagtggtttgacacctcaatgtgcgattattgtggcaactatcagagcactaaaaatgcatggtggagggcctgcagttgttgctggaagacctcttgaccatgcatatttgactgacaatgttgccctggttgaggctggttgtg

SEQ ID NO: 18129 - DNA, 101 bp, Glycine max
  Clone ID: 700959052H1
gactatggaaaattactatgattctggctggcacatgggcaccagcaactgggctcaatgcagtgatcattcttcttcttcttcctttgcagtgcccacac

SEQ ID NO: 18130 - DNA, 147 bp, Glycine max
  Clone ID: 700959053H1
ggacattcctatgaatccagtggttggtcttattgtttgccctgctgtccacagggatttgggcccgctctgaacttcaatgctgaggtaaaccctcctgctgaccatgtaaaaacttttggggacaaaattggtccctatggtgaa

SEQ ID NO: 18131 - DNA, 254 bp, Glycine max
  Clone ID: 700959055H1
cttatctcacccttctttgactgttctcccacaccacatgcatgacactcctcctgctccttattctcctcttacacgcggcggaagctaagggccagtggcaggtcctctacaaaatcatctgtactgtcgccatgtacatactgcttctccacaacgaccgcgtcatcatcttctaccgctccgacttcggactctccaacctaacgctccacgcagaaatatgccgtaacgaggcatacgagttgctcgtc

SEQ ID NO: 18132 - DNA, 207 bp, Glycine max
  Clone ID: 700959057H1
ggtggctttgcggatattgaaacgagttacacgtgtgtcatgaagtttggcggctcctctgttgccaatgcagaaaggatgagagaggttgccaaccttattctgagcttcccggaagagaggcctataattgttctctctgccatgggaaagacaactaacatgctgttgctggctggagaaaaagctgtaagctgtggaataact

SEQ ID NO: 18133 - DNA, 261 bp, Glycine max
  Clone ID: 700959061H1
gtgaagttggggtcagaggtgtctaaacagatggagtgaagaaagacaatccagacagagaggatgagtctgtccgagctgaatagcagcgtagaagactaccctggctccgactaccgtccccaagacagaaaaaactggatgtcccatctcgaccctacagaaactccgcatcaaccaaatcggctggcccggcatccacgactccgcaaccaacaaaattggcatccctctcctcactcgccccttcgcgcagtgcca

SEQ ID NO: 18134 - DNA, 262 bp, Glycine max
  Clone ID: 700959062H1
accagttcggcattggttaggtcgatttcgtttttccggtttggatatggattcggaggatttccgatccattctggagagcgcgggcgtggacgtttgggccctcatggacgcggccatcgcggtggcctccgccgaccacgctcacgagttgacgcgccggagagatggaatcgttgagcgcctttacgcggccagttcaccgccgccgctgtgtcggaactgcgacgccggcgacgggggagaaatcaggacgcagagc

SEQ ID NO: 18135 - DNA, 263 bp, Glycine max
  Clone ID: 700959064H1
ctcagtgaaagagaatccgaggcgaagagaagagaaaaattaagatggaggggaaggagcaggatgtgtcgctgggagcgaacaagttcccggagagacagccgattgggacggcggcgcagagccaagacgacggcaaggactaccaggagccggcgccggcgccactggttgacccgacggagtttacgtcatggtccttttacagagcagggatagcagtttgtgggccacttttcctgtttctatacatcactgtctta

SEQ ID NO: 18136 - DNA, 257 bp, Glycine max
  Clone ID: 700959065H1
caaggagctcacatgcagtggagggaaatcagctattgaagttgcaaactacattcaaagggttcttgcagggactttgggatttgagtgcacaaatttgactaggaagagcaaatatgccatgcttgcaggcacagatgggacagttccatctaaggagaaggcttgaaaagggagagaaattaagttctcccttttgattattctgtattggtgcccaatgtgtttccaaaacacttagaattatgatagaaata

SEQ ID NO: 18137 - DNA, 257 bp, Glycine max
  Clone ID: 700959066H1
gcgaatgaaaattcgttaatccaaatttgtcttctatttaccatatttatatggtaaatagaagacaaattaatatctatatctatctatatagatagatatagatacataacataaataaagacacgcattatggtatggcattgatactaatgcactgatatataccttagataaaaaaagaatccacaaaattatgttttttttaagtataccattttttatggtgaatctataaaaaaagtctcctttatatc

SEQ ID NO: 18138 - DNA, 254 bp, Glycine max
  Clone ID: 700959067H1
gcaccaacgcatagccagaccatggtgaaagaactggtggtttttatgcttgcaatcgttatgaagcagctaaacaagaaggagtgtatgatgatactgaaagaagaagggaaatggcaaagaattcgctggagagatacactcattattatgagcggtgggccagcaatcaatcttcaaggcaaaaagctcttgcagatctacagcagatgcaaactgttcatattgagaagcttagtgacatacagtgtcag

SEQ ID NO: 18139 - DNA, 146 bp, Glycine max
  Clone ID: 700959068H1
gtcaattcggagcactattctcaatctcatcatgctgtggggcgaaacagcattaagggccactcaattttcaatggcccttgtctttttgtgggtctaggtccaaaaggcttgttggattctgatgcagttaggagccccacttc

SEQ ID NO: 18140 - DNA, 252 bp, Glycine max
  Clone ID: 700959069H1
gaagaaggtgtgttggagaatgaaaactgagacagagccaaatgaaaccgagtcagatttcagcgagttgactcgcgagtgcctcatcaacatcctctctcgactcagcgtcgaggatcgatggcgcggcaccatgctcgtttgcaagtcatggttcagcgtcttcaaggaaccctctcttcacttcgtcttcaacctcgaccctcaattcgactcgcccaccgaatcaactcgctggtggacccccgagtt

SEQ ID NO: 18141 - DNA, 254 bp, Glycine max
  Clone ID: 700959070H1
cagaggctttcagaggaagaggagcgcaagaagctgagaaaaacatgtgagacaccagggtgtttcagaatcatcaaccactcaattccactaacactcatggccgacatgaagtcagtggttaaatacttgcatgaccttcccacggaaatcaaaatgcgcaacaaaccctccgtccctgagagtggctatagggcggcaatgccaacaagtcctctatacgagggcatgggaatatatgacatgcatgcctc

SEQ ID NO: 18142 - DNA, 255 bp, Glycine max
  Clone ID: 700959073H1
cagaaaaaaaaaatgtcctaattgctctacaccctcttatatataaagatggtgattttaatctctaggccacaaaaatgaaccagatttgagaacatcccttgtattgaagaacaccctctttggatacccttttgttaaagccaagacttttctcagatttgagaagaagaagaaggtgggggaggagatagtaatagggaaaacatatgtgagagaaaaataaagcacaaacgtgaggccgttgttgaaaca

SEQ ID NO: 18143 - DNA, 267 bp, Glycine max
  Clone ID: 700959031H1
ctcgagccgcttggaggttcgtagagaacaagttgagttcttagttccaattatagaacaacgaagaagagcaatccaaaacccgggttcagatcacaccgccacaacgttttcctacctagacacactttttgatctcaaagttgaagggaagaaatcagcaccttctgatgcagaattggtttcactgtgctcagagtttctcaacggtggcacagacacaacagcaacagcggttgagtggggcatagcacagctcatagcaaa

SEQ ID NO: 18144 - DNA, 245 bp, Glycine max
  Clone ID: 700958996H1
ggccaacggctttcaagcttttcacaggttcggcatggatggcactgtcaaaatctttcattgattactgcatatggggatgggacaacctacctcgaaccgtactcatgtactattcaaatttcatatcttcccctgaaggatacttccacacagttatttgcaatgcacaagagttcaggaacacaactgtgaacagtgatttacatttcatttcttgggacaatcctcccaagcagcatcct

SEQ ID NO: 18145 - DNA, 268 bp, Glycine max
  Clone ID: 700959001H1
atcatattaagccatggccacctccaacttctcaattgttctctctctctccctagccttctttctagtgctactcaccaaggcaaactcaaccaacaccgtttctttcaccgtcagcaagttttccccacgccaacaaaaccttatcttccaaggagatgctgctatctcaccctccggggtgttacgactcaccaaggttgacagcaacgacgtgccaacgacgggatccctaggacgtgccctttatgctgccccaatccagatt

SEQ ID NO: 18146 - DNA, 267 bp, Glycine max
  Clone ID: 700959002H1
ctctcttgttcctttccctattcaagcattcccatgctgcaggaatcgctatctactggggccaaaacggtggagaaggcaccttagcagaagcttgcaacactagaaactaccaatatgtgaacatagccttcttgtccacttttggcaacggccaaactccacaactcaaccttgcaggtcattgtgaccccaacaacaatggctgcactgggttgagcagtgacatcaaaacttgccaagaccttggcatcaaagtgttgctct

SEQ ID NO: 18147 - DNA, 263 bp, Glycine max
  Clone ID: 700959003H1
agctcaactacattgagtccaaggggaggatgaagaagggtgatagggtgtggcagatagcgtttgggagtggctttaaatgcaacagtgctgtgtggaagtgcaacagaagcattaagacaccggttgatgggccttgggctgattgcattgatcgttacccggtcgatattcctgagatcgttaagctctaggatggagaattgttcaagaacaagaagataattgcttattttatgaaaaaaaaaaatagatgagttctc

SEQ ID NO: 18148 - DNA, 262 bp, Glycine max
  Clone ID: 700959004H1
tggtgagagaaacaggctttgatatttcagttgctagtgagattatggctgttttggcactgacaacatccttagctgatatgcgagagaggcttgggaaaatggttattgggaatagcaagagtggtgaccctgtaactgctgatgatctaggtgttggaggtgctttaacagttttaatgaaggatgccattcaccctacccttatgcagactctggaaggaactcctgttcttgttcatgcaggtccatttgcaaatat

SEQ ID NO: 18149 - DNA, 261 bp, Glycine max
  Clone ID: 700959006H1
agcttttcaattattcctcgaattattttgaaggaatcatccaaactgcttgaaatattcatcatcaacaacctcacgctgttatagatattctctctctctctctccctctctctctctctcacacacacacacacacagatccagacatggccgaagaacaccgatgccaagctcccgaaggtcacagactctgctccaacaactgcggtttctttggtagccccgccaccatgaatctctgttccaaatgctacagag

SEQ ID NO: 18150 - DNA, 263 bp, Glycine max
  Clone ID: 700959009H1
gaaaactgtacacaagagggattccaaaaccaagtgctgagaaaagggtgtcaaaatcttggcctcaaagttgactatgtgccaagaaactcctcagggaatcactactgtggctcatgtggttatggctgtccgaaaggagagaaacaagggactcaagctacatggcttgtagatgcagttgaaagagatgcagtaataataacaggatgcaaagctgagaggttcttgttggaaagcaacaggagtggaaatggcagaaa

SEQ ID NO: 18151 - DNA, 261 bp, Glycine max
  Clone ID: 700959010H1
gcttcatggatatacagtaagagcattatacagagcatttcaaacgtcagctgaacaggagactctagttcgagttacagtgtggtgcattggggagtatggtgacatgttagtcaatatggtgggattgctagacatagaagatccaataacagtgactgagtccgatgcagttgatgtcatagagattgctatgaaacgccatgcatcagatcttaccacaaaagcgatggctttggttgcactattaaagctctcttc

SEQ ID NO: 18152 - DNA, 264 bp, Glycine max
  unsure (1)..(264): unsure at all n locations
  Clone ID: 700959011H1
ctcgcacattaagttatataacacatatttgcttgcttagaaatactattattgaagatatggggagtgtagattatgagtaccctttgggcatgaacaactttgagagagtgcaccaagtcgaggttccaccgccacagccgtacttcaagtctctaaagtactctttgaaggagactttcttccctgatgaccctttgaggcagttcaagaacaagccagcttccaagaagttctgnttttggccttcagttcttcttcccc

SEQ ID NO: 18153 - DNA, 258 bp, Glycine max
  Clone ID: 700959012H1
gtgtcatcatgttatgtgtaaaaatgtcttcttcttcttcttctcctgctgttctctcaaaatgcaccgttttccctcaccggaactccactctgggggacctcaagctctctatctccgaccttaacatgtttttatctcactacatccaaaaaggctgtctcttcaccactccttcacttccctctcactctcacactctcatccctcacctcaaaaacgcgttttcccaaaccctctctctcttccctcccctcg

SEQ ID NO: 18154 - DNA, 269 bp, Glycine max
  Clone ID: 700959014H1
aatcaccggaattgccgtaaatgccgcctatgacaacacgctgcgaatcgacaaatcaaatgcctccgtggaccactcaggtcctctttcccatttccactcttcaattcaatcaatatctcacacacacacactctctctctcatacacacacaaagttccctctccaaacatggcggcaattttctcttcttcgctcttcgtttcttcgcctcttcccaaaccactttcttcctcctattcccgaatccataaagctccacaacttt

SEQ ID NO: 18155 - DNA, 269 bp, Glycine max
  Clone ID: 700959015H1
atcactttcttccccatcgtatgtgtgtccctgtcagagtatgatatgagaaactctataaattaactattttttctcccactttctgaatcaaacacaacacacacacgtaacttcatctgggtttcaggaaaaaagaaaaaggaaaacaatgggttccgataatcaccagaacttggagttcttgaaggagatcggtttgggctcttccaacattggctcttacattaatggccagtggaaagccactggttcttctgtcacttctg

SEQ ID NO: 18156 - DNA, 267 bp, Glycine max
  Clone ID: 700959016H1
tattcaacgagaacgatgcagttagtactaggaaagctccatatgaggattcttctggcatattttgggataatgacagtttatcagctttattggcattggaattaaaagctgatcttcttattttgttgagtgatgtagagggtctctatagtggccctccaagtgatccacgttcaaaacttattcatacatacattaagtccaagcatcaaagtgaaattacttttggagacaagtctagagtgggaagaggtggaatgactg

SEQ ID NO: 18157 - DNA, 264 bp, Glycine max
  Clone ID: 700959017H1
ctttaaacagcttgaagcttctaattgattattgcttctactaattttttttttagcaatgtgtagtgttttatgaagtctctttcagttatcgatatagattcataggtccatgcaggactaagtgaaaaagagaagataagtatctgtagtacactgaaccacgagaagctgtcagctgaacttttgaggcatcttactcgaagcttggtgtttccttcagacgcaaaaccaagagcttatgttactagacaaagccgaatg

SEQ ID NO: 18158 - DNA, 260 bp, Glycine max
  Clone ID: 700959019H1
cagctcttccagttgatgagttgattgagaaggctgatggatttgcaggagtatttcctgaacacaaatatgaaattgttaagaggctgcaagagaggaagcatatatgtggaatgacgggagatggtgtaaacgatgcccctgcattaaagaaagcagatattggaattgctgttgccgatgctacagatgctgctagaagcgcttctgatattgtcctcactgaacctggtctgagtgtcattattagtgcagtgctc

SEQ ID NO: 18159 - DNA, 255 bp, Glycine max
  Clone ID: 700959020H1
tccagatctggcagactagtatccgatcctctgtcctctcgaagctttcatcgttcaacatattctcaccatctcagtcatcggcctgctatcttgttttaggtctaccgtcctgtgaaaatgttccaaaggaagctctggcatgtcaagattcctgtatacgaacaatcttcaacgaaacttgatttcgtctggtggcaatgaatcgtattatgggtattttaacaggagatcatacacttcactttatatggg

SEQ ID NO: 18160 - DNA, 258 bp, Glycine max
  Clone ID: 700959022H1
ctcaatcaatcagttttagatacttgatacagcgctccgcatcttcagcagattccattgtaacaaaagcaaaaccacgagaaatctgctgaagatgcggagcgctgtatcaagtatctcaatcaatcagttttagagggtcgttacatcactgttgagcggtcacgaagaaaacgtgcaagaactccaaccccagggcaccatcttggactgaaaaacacaagggagtatggctatcgtggtgaccgaggtggtgac

SEQ ID NO: 18161 - DNA, 257 bp, Glycine max
  Clone ID: 700959023H1
ccatcttcttctcttttcacgtcattatcctaaacttgcagattttcacatcccaagcaacatgaaggggcggttcatgtttctgtcggtgctcctttgtgccacctttcatgtctccttctccattactgacggcttagtagcaaacggcaacttcgagctgggtccgaagccctccgccctgaaaggaactgtggtgattggtggcagccactcgatcccagaatgggagatctctggcttcgtggagtacataa

SEQ ID NO: 18162 - DNA, 260 bp, Glycine max
  Clone ID: 700959024H1
atgctttctcggagaaagctttttttctttctttgttgacttcacctagcaagcctcgaatccaaatcctttctactttctgctcttacgctatttcgtctttctatagaatacgaagagaggaccttctttcgggctgtctacgaacccttcttctcgtatgcaattttctattctttcttttaaccaaaagagaaagggaaaacactggccaatttcacactttctgaatgtgccatttgaccgaatgtgaaagcgaa

SEQ ID NO: 18163 - DNA, 232 bp, Glycine max
  Clone ID: 700959025H1
aattaactttctctctctctctctacaaaacttagctctgtttttaattattccttgcattctcttgtattaagatggaagcaactaccatcaccaatgggagccaaaacggttcgttttgcttgtccaattactaagggaagtagtgatccgttaaactggggagcggcggcagaggcgatgaaggggagccacctggacgaggtgaagcgcatggtggccgagtaccgca

SEQ ID NO: 18164 - DNA, 258 bp, Glycine max
  Clone ID: 700959026H1
gtgagctcaagagacaacttgaggattttaatgaatcttcttagagagtcaagcaagagcatacagattgaagcatttcatgttttcaagctatttgctgccaaccaacataagccagctgatatcgtcagtatatttgttggaacaacagtaagatgctgagactattggaagacttcaaaattgataaagaggatgaacaatttgaagccgacaaagctcaagtgatgagggaaattgaagctctttaaacaaggg

SEQ ID NO: 18165 - DNA, 262 bp, Glycine max
  Clone ID: 700959027H1
gagttcttcaaggatgcactgaataaagttctgccatatatggactacgtttttggtaatgagactgaagcaagaacattttctaaagctcaaggctgggagactgataatgttgaggaaatagctttgaagatttctcagttgccaaaggcatcggaaacacataaaaggattacggttatcacccaaggtgcagatcctgtttgcgttgccgaggatggaaaagtgaaaatttaccccgtgataccgttacctaaagaga

SEQ ID NO: 18166 - DNA, 258 bp, Glycine max
  Clone ID: 700959028H1
cttcctcttcccctctcattgctcctctgattcattcacccagttttttttttctgtcctctttacctctcagaggagcctctgagtctgctcaggtgttccttgtgaagagatccttttgtttttgaggtgtgaagggaaagataaaaaaaaaagatgaatcagtgtggttatctgcagaagaatgctttaacaatctgtgaggagatgaggatggaatcagtggtgtgccctaaaccacgaagattgggcctgttg

SEQ ID NO: 18167 - DNA, 268 bp, Glycine max
  unsure (1)..(268): unsure at all n locations
  Clone ID: 700959030H1
tcaaattggtctcttgtcttcctcctcatctctacactactccacatacagnccagcctctcaagcccaagcccaagcccaagcccaagcccgttcataaaatcctcctgcagcagcacccagtacccagccctctgcgtctcatccctctccgtctacgcctccagcatccaacaggaccctcaccaactggttcagacagcactctccctctccctgaaccgcacccaagccaccaaaaccttcgtggctaactgcaacaaattca

SEQ ID NO: 18168 - DNA, 243 bp, Glycine max
  unsure (1)..(243): unsure at all n locations
  Clone ID: 700958994H1
aagcattgcattctgctattcaattccactacgtacacaaaacaaaaactcaaagacaacaatggcaccaacagccaagactctgactcanctggcccaggagaaaaccctagaatcgagcttcgttcgggacgaggaggagcgtcccaaggttgcctacaacgaattcagcgacgagatcccagtgatttctcttgccggaatcgacgaggtggatggacgcagaagagagatttgtgagaa

SEQ ID NO: 18169 - DNA, 243 bp, Glycine max
  Clone ID: 700958942H1
cccatctccaccacccccagtctacaagtacaagtctccaccacccccagtttacaagtacaaatctcctcctccaccctataagtatccatctcctccaccaccaccatacaagtacccatcaccaccacccccagtttacaaatacaagtctcctcctcctcctgttcattcaccacctcccccagtttacatctatgcatcccctcctcctccatatcactactaggttatttctgaaga

SEQ ID NO: 18170 - DNA, 100 bp, Glycine max
  Clone ID: 700958944H1
gcttcaggggtgtagatcttctcctgtttttggagacttgagtgtttgagctagtagttgaagttgtacaattatttgttgtctatatttttctattaat

SEQ ID NO: 18171 - DNA, 248 bp, Glycine max
  Clone ID: 700958947H1
atggtacttttgatagagaaacttacaaaacattacttcaagctggacaatcaccaccatgccatcacacaccttcaaccagaggagttatcatcctcactgcttgcatttaaatcccatatgtccaaatcaattgaccaactagcatcggatttgaaacccggatcagagacccccctgtccttaacatggtttggaaagtgtttcggcctcttgcccttcatcaacaaggcttttggaaagcttgt

SEQ ID NO: 18172 - DNA, 243 bp, Glycine max
  Clone ID: 700958949H1
gttctttctctcgcaatcttcactacattcaccggttagataccctctctctctctctctggaaagcatttgcattcacattgaatatggctgagactacacaatctaatgctgagttgttggagtggcctaagaaagataagcgccgcttcctgcatgttgtgtatcgtgttggtgatcttgatcgcaccattaagttttatactgaatgttttgggatgaagcttttgaggaaaagagata

SEQ ID NO: 18173 - DNA, 239 bp, Glycine max
  Clone ID: 700958951H1
ctcatcaagggttgtgaaagcagagaagtgagatacactaagttatcctcataaatacactctaattaggtggcaagataagtgtctaaccttagtaacattgccacatattgtgttcattttggaattgtgccactaaaattctattcaattcatctatggctgcctcttcttatgctatgcaatcaatcctggcaaaccctttgatccgcatttccagcgggtctagggtgaaccaa

SEQ ID NO: 18174 - DNA, 238 bp, Glycine max
  Clone ID: 700958952H1
gtgagtgctgaatcgaatcgaatcgattctccgaacatggcggcgagcgatcgcacagtgttgcaattctcttcatcatcttcttcttcttcgcagatcttgtccgcgaaggtccaccctctggtcatcttcaacatctgcgattgctatgttcgacgccctgaccaagccgaccgcgtcatcggaaccctactcggctccgtccttcccgacggaaccgtcgatatccgaaattcct

SEQ ID NO: 18175 - DNA, 234 bp, Glycine max
  Clone ID: 700958953H1
gctcttgacccttcttcccacctttttctggtccctcctagaaatggcttccaattccattcttcttctttgtatctttcttgtggttgccacaaaggttttttcctatgatgaagatctcaagacagtggttcctgcacctgctccaccagtgaaggcaccaactcctgcctctccagtgaaatcaccatcttaccctccagggtcagtgaccacaccaactgttaaggtgcc

SEQ ID NO: 18176 - DNA, 225 bp, Glycine max
  Clone ID: 700958954H1
tctttgtttaagaaagagaagcatcttttttttttcttttttaaattaatacaaattttcttattgtctttttttttctatatcttccattgaacaatgacttttttactagaaaaaaaaaaaaaaaaaaaaaaaaaaaaaaaaaaaaaaaaaaaaaaaaaggggggggccccgcacaaggggtctcgcgccccggggaattattgcgggggggggctcgggggg

SEQ ID NO: 18177 - DNA, 240 bp, Glycine max
  Clone ID: 700958957H1
gtgagggtgttcctcgggttctggcatgctggggatgtaatctactcggtgtacagtccaacaagattgtcgctgaagggtaatcccagaggactggagtggacatgaatggtgctaatgacggtgtcttattgatcattgaaaatcccgtcacgggtaatggagatatctttaatgtgggataccctaacgatgaggttacagattggcagcttgctgaaatgatgactcaggtttatt

SEQ ID NO: 18178 - DNA, 240 bp, Glycine max
  Clone ID: 700958958H1
actccctcctcttcacacattttcttagctctctccaacaatccctctcgttcacactttcagattgtgtgaagatgggggctggtggccgaactgctgttcctcctgccaacaggaagtcagaggctgaccctttgaagcgggtaccttttgaaaaacctcagtttagtctcagccagattaagaaggccattccacctcactgtttccagcgctctgttctccgctcattctcctatg

SEQ ID NO: 18179 - DNA, 245 bp, Glycine max
  Clone ID: 700958963H1
cgagataactagaaacagtgtgatgaaaatgaaggtccttgttttcttcgttgctacaattttggtagcatggcaatgccatgcgtacgatatgttccctctccgaatgaacactggctatggtgcccgtactccggaggtgaaatgcgcaagttggaggcttgctgtggaagcacacaacatctttggctttgagaccattcctgaagagtgcgttgaagcaacaaaggaatacatccatggcg

SEQ ID NO: 18180 - DNA, 248 bp, Glycine max
  Clone ID: 700958964H1
cacaagacccagaagcaccaccgcgaccggcgaatccagccaccgtgtgcggcttcgaattgagtccgagaacgcagttagacaggctttatattgaaacttgagacttgaagggaagctgttataattggtcagtcttcccatggcgtatcccttctcagatttcaagtactcagatggcctcactgtagtgggtatctccttctgcacagctattgtctgtgaggctatctcatgggttcttatct

SEQ ID NO: 18181 - DNA, 239 bp, Glycine max
  Clone ID: 700958966H1
attcttcttccctccttgttggtggtggtggttcgtgtcccccgccgcctcctgtgccgcctcccaagccttccgtgacggggaacttgaatccgaggaggagtgtgtccgggagtttgaattccggcattgtgggatcctcgaggagggcgtggccggttgtttcggctaggacttcgcctgctgggtctaggccgtcttctcccaggtcacataatgaaagtgaggggtacaacagt

SEQ ID NO: 18182 - DNA, 181 bp, Glycine max
  Clone ID: 700958967H1
tattcttcaacccagagagatttgtaataataaattacaacaacttaaacgatggcaggaggagcttatgtagattcgggaaatgcaaagcaatttgatgggaaggtcacggcattcgtattggttacatgctttgtggcagccatgggaggcttactcttcggttatgatcttggaataa

SEQ ID NO: 18183 - DNA, 100 bp, Glycine max
  Clone ID: 700958969H1
caaacactcacactctctctttctttgcttcctgctgctacaatatggagcctctctcttccacacaacataagaaacaaaaagccaagccttcctccct

SEQ ID NO: 18184 - DNA, 236 bp, Glycine max
  Clone ID: 700958970H1
gtagagctctcttctgatggtgggactcaaatttcacatcgtgatattgaagctgagttgcgtgaaataaggttgagtttattgatggagatagagaagcggaagcaagttgaagaatcccttaacagcatgcaaagccagtgggagagacttaggcaacggttatctcttataggaattgtattgccttcagatcttactgctgagggtgggcagctgagttctgatcctatgga

SEQ ID NO: 18185 - DNA, 239 bp, Glycine max
  Clone ID: 700958972H1
gctggtgaatttcaactttttcaagtcctagttcagagattcatagagaatgagccatttcaaggccctaggctacagaactatgtcaagaaccgttgtgtgattcgcaacttgctccaagttccaggcattaaagatgatagtaaaggggatgaagaagaggatgctattgcaagtggaaagttggcagatatcatcaaggaatcaatgagggtgttctgggaatttgttcgagcaga

SEQ ID NO: 18186 - DNA, 239 bp, Glycine max
  Clone ID: 700958974H1
ctcacttgccttatttttggttttgagattgagctaaaggccaactcaaccatcgaatttgttggtgattgaaagagaaggaagaagaagcaggaaatggaagcagtgagagctggtcgagaaggagcaataggtctaggtcaaggtgatggcgtagctaaggacagcactgagactgaactcaccaaaatccgtctcctcagggcaattgttgaaacccgtgatccctcttccaagga

SEQ ID NO: 18187 - DNA, 238 bp, Glycine max
  Clone ID: 700958975H1
caaaaacctgattgaggtttttgccaagggtgttgagaaggactatgttatccttcttgctgcaagggcttctaggactgagcatcaggatgctatagatgctgcaattgttggtatgcttgctgatccaaaggaggcacgagctggtatcagggaggtccactttcttccattcattcctgtggagaagaggactgctctaacttacattgattctgatggaaattggcatcgatct

SEQ ID NO: 18188 - DNA, 241 bp, Glycine max
  Clone ID: 700958978H1
attagcaaagaaactccaactccactagtgaagtacagaaaagaagaattggaaaatctaagaggagatggaaaaggagagcgcaaggaatatgataggatctatgattatgatgtctataatgatttgggtaacccagacaagagcaatgatctagctcgtcctgttcttggagggccaagtgctaatccatatcctcgcaggggaagaactggtagaaaaccaccaccaaaagactcta

SEQ ID NO: 18189 - DNA, 245 bp, Glycine max
  Clone ID: 700958979H1
tctcattccatatttgaggaaaataaatgcaactaccacaaagacttacgcttaaagaaccatatttttcttgaaaagtgatggaaccttgacgccattggccattgagttaagtaagccgcatcctcagggtgaaggatatggtcctgttagcgaagtctacgtgccttcgagcgagggagttgaagcttacatttggttactggcaaaggcttatgttgttgtgaatgattcgtgctaccatc

SEQ ID NO: 18190 - DNA, 240 bp, Glycine max
  Clone ID: 700958981H1
aaaaccctctctccccaaaaacccaaacccttggcggctgcgagacccgttgtgttctctcttctctctctcttctttttttttctctttccctctcttcttcgctccttttagggttttctcaactcttcgatttggggcttaaaccctctccgattcagattcggatttagggcttccctttctctattccgcctccaaagaaaaatagatctcgtggttggttcgtcatggccaccg

SEQ ID NO: 18191 - DNA, 237 bp, Glycine max
  Clone ID: 700958984H1
cagctgtagttttctaccctgcacctctcataggtcacttagtctccaccatagaactatgccagttcatcctcactcaccaaccatccctctctattcacatcctcataaccatagcaccctacgacacatcctccacttcccactacatccccaccctctccaccaccctcccttccattactttccacaccctccccaccttcgacccccccacaaacccttctctcttcctca

SEQ ID NO: 18192 - DNA, 234 bp, Glycine max
  Clone ID: 700958987H1
ctcttggcatcttgtgttgtgtccctcttttaagctatttccttctcttaacacaattggttgtgccaattgccatagtcaccaaccaattaacaaaggtatatatatcatcatatcatcaccaaatgaaaaatattgggttgttttttcttgtggtggtggctacttttgtggtggcagccacagctggtagcttttaccaagactttgaaataacgtggggtggtgagcgtg

SEQ ID NO: 18193 - DNA, 239 bp, Glycine max
  Clone ID: 700958988H1
aacgaggagaacaacaaccactctcccccttctttccaaaacactccctttccctttctattcacttcccctacccttccgtgatgatgtagatagagaataaaaagagaccagtgtgcagtgagaaagagattgctcacttcttgtgtgggtttgttttgttctttgtgttggaatttgttcatgggtgaagaaggagaagaggtgtcaagagagaaggaacaatacatgggagttta

SEQ ID NO: 18194 - DNA, 235 bp, Glycine max
  Clone ID: 700958990H1
gtaatgctggggagcaattgacctcagagcaagtggaatctggtcatcctcctgatactgctggaccttacagagttcttcttaagcatcatgaatcagatgggaaaaatgaaccaacaaattgggagaattcagagacaaccaatgcaacacatgttgatggcaggggtcaaccaagaatgactgtttgggagaatgagcagagatcaaattacagaaagaatgaggaaaggga

SEQ ID NO: 18195 - DNA, 237 bp, Glycine max
  Clone ID: 700958991H1
gtgctgggattatttgaagataatagatacaaatcagaagcaaagaaatcaacactaaggtccattgactttattggtcttgggacaggacctgaactggagaagaaactgaagtacgcaggagatgtttcttccggaattatctttggaagggagcttgtaaattctcctgctaatgtgctcacaccaggggtgttggcagaagaggcagctaagattgcttccacctacagtgat

SEQ ID NO: 18196 - DNA, 232 bp, Glycine max
  Clone ID: 700958939H1
ggaaaagtgaagtaaaaacgtagtgtttcatctcttccatttcgctctatcgctcaacggatctaaggcttcagtgtagtctgtaatcatgtcaggcaagtatatcatttctgctattcttggatcatttggagttgcatgggtttgtgattattatgtttcagacaaaaagctatttggaggttctacccctggaactattacaaacaatgagtgggcagaagagactgac

SEQ ID NO: 18197 - DNA, 242 bp, Glycine max
  Clone ID: 700958895H1
cagacacaatgggcgcgaagaagaagaatggcaacaacaaggagaacgaagacaacaccaccaccaccgtcgtcttgaaggtccaaatgcattgcgacggttgcgcttccaaaatcatcaagcacctccgcgctttccaaggtgtggagacggtgaaggcggagagcgacgccgggaaggtgaccgtgaccgggaaagtggaccccacgaaagtgagggacaacctggcggagaagataagg

SEQ ID NO: 18198 - DNA, 240 bp, Glycine max
  Clone ID: 700958896H1
aaattattgtggaagttcaatttagacttagaggcaatttctgctagtagctctgaggtcccatcaatattagagttcctgcagcggcggaagttggaagctaacaaggctaaacaattgtgcttgggtataacacgtacacttattctagagcataggcctgtgcctgtggttgccaaggctgtaaatgtactagtcacctcatactcccattcaattaaaaccggtagctatcttaag

SEQ ID NO: 18199 - DNA, 251 bp, Glycine max
  Clone ID: 700958901H1
ctcgcaagcaaaaagaaagaatcccaggcgaggagaaagatggaggggaaggagcaggatgtgtcgttgggagcgaacaagttccccgagagacagccgattgggacggcggcgcagagccaagacgacggcaaggactaccaggagccggcgccggcgccgctggttgacccgacggagtttacgtcatggtcgttttacagagcagggatagcagagtttgtggccacttttctgtttctctacatcac

SEQ ID NO: 18200 - DNA, 246 bp, Glycine max
  Clone ID: 700958902H1
cacaataatcaatcctttcactaagtatgctgtactaatcaccccaatagctaatgctattgaggaaaaatggcttctctgcaaaagaaagcctattgccattttggttagaacaaccattttggtcagcaccgtgcttatggcactattcatgccgttgctcggttatgttatggcatttattggtgcattttttagcgtgacaatctcattgttgttcccttgcatctgttacttgaagatgaa

SEQ ID NO: 18201 - DNA, 245 bp, Glycine max
  Clone ID: 700958903H1
cacaaattagtactctcgttaattattttgctaattgctaattgggcacaatggaaaagcttcatgctgtgtgcatcccatacccagcacaaggccacataaacccaatgctcaagctagcaaaactccttcatgttagaggcttccacatcacctttgttaacacagaatacaaccacaaacgccttctcaaatcaagaggttctgattccctcaatagtgtcccatcatttcaatttgaaacc

SEQ ID NO: 18202 - DNA, 242 bp, Glycine max
  Clone ID: 700958904H1
atttaataagctggtaatgtaaaatactgctaatgttaatatgaagtttggatggtcttattggcagaagatgctaggtggtgttcatcaatattctgaaaggtaaaacgattttggtttttaatgataatataaccatgaatctaacatcagatattgaacgctacacatcaaaaataaatcgagccaacgcatttaattgtaagtgtcttcatattacctgtgttctgtcacatcttttt

SEQ ID NO: 18203 - DNA, 238 bp, Glycine max
  Clone ID: 700958905H1
agcttttccctcgttgaaatgaaaatgggttctcctttgtggactttgtgtctaattttggcttcactagcctcttctgcattctgtgcctttccacggaggccagtggatgttccattcggcagaaactacgttcccacttgggcttttgatcacatcaaatacttcaatggaggttctgagattcaacttcatcttgacaagtacactggtactggcttccagtccaaagggtcat

SEQ ID NO: 18204 - DNA, 241 bp, Glycine max
  Clone ID: 700958907H1
gaatgtgagtcttcttccattgtcagcctcagactcagggtttccactttccgctcacatggaaaattaaagagatccggtgtagaaatctcgtttctcagtcatcttaatctcaatggaatctattggtaaagaagaaaaaattgcttgtgtgatcggtgaccgatcaactagtgatgttgttgtgaggctacgcacacaggaaggtcgagatgattggctgtactgccattcagagatt

SEQ ID NO: 18205 - DNA, 245 bp, Glycine max
  Clone ID: 700958909H1
cctcttcctctcagggaatgggtggaagatggagaaccctctctttgatctataaccgcataaacacttcttcttcttccaaaccccactttccctccttctaccgctccctctctctcgccgccgcaacttctgaaatacccgacccggatccaatcgggttcggagccccggaactcgacccctgcgtcaaaatccccgtcaaagcttatttcctctccaccagtataaatttgaagggcatt

SEQ ID NO: 18206 - DNA, 245 bp, Glycine max
  Clone ID: 700958911H1
caagaaacatattccaattccagtatataaacctgtaacaaagccatttccagtgtataaacctataccaaagccagttccagttccagtgtacaagcacattccaaagccagtgtataagcctattccaaagccagttccagtgtacaagcctataccaaagccagttccagttccagtgtctaagcctattccaaagccagtgtacaagcctattccgaagccagtgtataagcctattccaa

SEQ ID NO: 18207 - DNA, 243 bp, Glycine max
  Clone ID: 700958912H1
ggaaacaatattgatggcccgaaatggaaggagcccaggtaatcaacaaattagatcacgcaatttcttcaacgaaatgcttacgtgtcgcacattgattggttgagatgacgaaagaaaagcgagactttctcatatatataaggacaatccccaacatcgtttattgtgtctcactcacatcacacacactctcatagctgtagcggcgacactaagatcggagaaagaatggcgaaaacg

SEQ ID NO: 18208 - DNA, 245 bp, Glycine max
  Clone ID: 700958913H1
tgctcgagcgaatcggctcacggctcgaggattgctagaatggaatttcgatgctcagtcatctcttttaccattcgcttctctcttgctcttgcaggagagagccatgtccatgcatcgctacctgaggaagattattgggaagctgtttggccaaacactcccattcccactgcactgcgagagcttctaaagcctctccctgcaggtgttgaaatcgatgaactccctaagcaaattgatga

SEQ ID NO: 18209 - DNA, 260 bp, Glycine max
  Clone ID: 700958917H1
attcggctcgacgtcttcttctcctttccttaccacagaagaatagtagcaatcagagactgaagacgagcttccccttgcgccgaagggccaccgatggttgaaaccgagatggatgcagaaactgttgcaaatgtggttccaccaaaggagactccaaatagtgtttccatttctcatcattcctcacaccctccccttaatgagaggattatttcatccatgaccaggagatctgttgctgcacacccatggcatga

SEQ ID NO: 18210 - DNA, 243 bp, Glycine max
  Clone ID: 700958918H1
gtaaccttcttttctctctctctctctcgtgttctgagctgctagaagcaatggagaggaaaagaagccatgcttctttcaccatgtttgcaatgcttgttggattgctctctcagagccttgtcattcctgtaatatccaccactgttgcagatcagaagaactactacaccccagatccacatgctggaagtccccccacaggctcacacaatagtagtcctccatctcatggccatggga

SEQ ID NO: 18211 - DNA, 240 bp, Glycine max
  Clone ID: 700958919H1
cacgatctcttttttctctgagaaatacttgtaccaatactatgtctcaatctgataattcctctccttttaccacacccagattggttttcaagaaggttttggccaaatctcaacatgaaggggatggagctgttgtcagaagaggcattggaaggagcgagttgaagaacttggatcccttcctaatgttggatcacttctcagtatctcccccagcaggatttcccgatcatccac

SEQ ID NO: 18212 - DNA, 103 bp, Glycine max
  Clone ID: 700958921H1
cgaatactctgagagcgaaagccagaagagagacgttagtattttggtaataataccttcaaaactagaaatcaaatttgtggttgtatgcactgcattgcag

SEQ ID NO: 18213 - DNA, 241 bp, Glycine max
  Clone ID: 700958924H1
cccatctaatgagattgattcgagaccatcaagctgacttccttcgcctgataaatgaacctgcagaaggtgctgaagggaacatattggggcagatggcttctgcgatgccacaagcagtaaccgtcactcctgaggagcggcaggcaattgaacgtcttgaagcaatgggttttgatcgtgcaatcgtattggaggtgtacttcgcttgtaacaaaaatgaggaattggctgccaacta

SEQ ID NO: 18214 - DNA, 243 bp, Glycine max
  Clone ID: 700958925H1
agccgcctcaacatctgaaacagactctatccctaatccctatcttcttctctgctctctccgcacgctttggctcctctgatctcagtttctggttttgaattgtaggtgttgttggcttggtatccgtgcaagttctgctgtagccgatttgaaggtgaaggtgtcaccttaaagtttctttcatgtttgatcaggctactatccatttgggagcaactgagctgcttggagagtattttt

SEQ ID NO: 18215 - DNA, 245 bp, Glycine max
  Clone ID: 700958927H1
cattctctctgtgtatttccctacctctcccttcaagatgcagatcttcgtcaagaccctcaccggcaagaccatcacccttgaggtggaaagctctgacaccatcgacaacgtcaaggccaagatccaggacaaggaaggaatccccccggaccagcaacgtctcattttcgccggaaagcaacttgaggaccgccgtacccttgctgactacaacattcagaaggagagtactcttcacctcg

SEQ ID NO: 18216 - DNA, 246 bp, Glycine max
  Clone ID: 700958928H1
tgctaagcttatagattttttagttgcccctcatgcaaccacaactgtgttacttgcagaaaaagagaagcccagtaagggaacaaagcgcaagcgtagttgtaaaatggggttcatcaagatctgggacaacttcaagacgttctgtgaagagtcagaagaaaaatgaagattctaccgtagtgcggagaaagagtgcatctgacacagatgagtcagaggaagacaagaaagatgaagaaaacg

SEQ ID NO: 18217 - DNA, 244 bp, Glycine max
  Clone ID: 700958930H1
caatcatcaagataggaaaagaatggaggccatttgttccaagcaccttatgacatcccttgtcataattcttgcttctagtttgaccttatcacagggtgccaagaaaggcagtgacagtgaaaggccataccaagaagcgagcacggtgttcattagaacatcttgcagctccacgacctatccaagactctgctacagctccttagtgaagcatgcagacttgatccaaacaaaccgtgtg

SEQ ID NO: 18218 - DNA, 252 bp, Glycine max
  Clone ID: 700958932H1
aaaatgccttgcagaaggtaaaggaccagcttattttgtctgaatcatgcaagaagcaagctcagcaagaagctgaggagtccaaggagcaactactagccctatctgcaaaacttgaagagccacaaaaacaagttctggatctttgttctactggagaagctcgcgttcttgagctccagaatatcgtagaagaacgtgatatggcatgccaatctgagcttgagtctgccataaagcagctctcagttg

SEQ ID NO: 18219 - DNA, 247 bp, Glycine max
  Clone ID: 700958933H1
gtttgtccaacgtggcaccgtggataacaactgtgggagcgggaactatcgaccgcgatttccctgcttacataaccctcggaacagggaaaacatacaccggagcttctctttatagcggtaaacccttgtcggattcgccgcttcctcttgtttacgctgggaacgcgagtaactcttctgtagggtatctatgtttgcaagattctctgattcctgagaaagtttcagggtcaattgttatatg

SEQ ID NO: 18220 - DNA, 245 bp, Glycine max
  Clone ID: 700958934H1
agctcgagcgattcggctcgagatccggtttcccagatctgctcacttcctcaccccacaggctgatactagactgtaacactcagaagtcagttgaagagcatgggtcgtggagttagcagtggtggtggtcaaagttccttgggttatctttttggcagtggagaggcccctgccgcaaaaccggcaacaaacaatgccccagcccaacctgaagtgcaggctgtaaataatgcgcctccttc

SEQ ID NO: 18221 - DNA, 243 bp, Glycine max
  Clone ID: 700958935H1
ttgaaagttaggccctaaaaccccattcggtgctgcctcaacccagacagcgtttctgctaccaacagctacaacagtttttcccaactccgaactaatcgaagaatatgactcgcggcataaaacaccgtcagaaagccaagagcaagaagaagggctcgaagaaagagggtggttcttcttcatctttggcgccagaaattccagcgaaggtgtggcaaccgggcgtggataagttagagg

SEQ ID NO: 18222 - DNA, 240 bp, Glycine max
  Clone ID: 700958936H1
atcaaattttagacgtgctagaagagtagtgcttgacatggctgaatgttgcccgttgtcaccacagtttgcatcttcactttctgcaattgctagttcatctagtagcatgcttgttgagagtggaatgcgatttatgcacatagttgaagagatattggaacagctaacgccaacggttagtttgcatttcggaggaaatgtactgaacagaatcttacaactatttgataaatacat

SEQ ID NO: 18223 - DNA, 118 bp, Glycine max
  Clone ID: 700958894H1
ctcacgaaaaagagaagaaaaaccagaaaccctttccccgtgaaaacatcagcctcaaaccctcttcatcaccctcaaaccatacccacctaaaccaaaccctagttcctttcacttt

SEQ ID NO: 18224 - DNA, 243 bp, Glycine max
  Clone ID: 700958855H1
gtcatcgcttgtgtgggaaaactgccttctattcatgtgcatcatcctgtattaaatatataacgttttaaggtggttgtgttatcgttcacatggagaaaatatacagtgggggttcttccatcagaaggcgttcattgagcatatcaagtcacataagccatcatacagacaatgatgatgatgctgaatgtgagagtgtttcagaggctggagacattggagatcgtgttactattcgaa

SEQ ID NO: 18225 - DNA, 245 bp, Glycine max
  Clone ID: 700958856H1
ttccctcactaaatgccagaaagaagaggattggttcattatcaatcagtctggtaaaccaggaaatgagaatcaaaaccgagatttcagcatgtttaatggcatttccaattcatcggcagctactgattcttttcatgtagagaagaacaagaaagacattatgactgatgactctttcatgattcaagctcgatcatcagaagatccattcaattctcagtcagcagctgatctaagtttgg

SEQ ID NO: 18226 - DNA, 241 bp, Glycine max
  Clone ID: 700958857H1
gacaaggagccaaaactcgcaggattcggccttagcatacagggaccgcaatttaattcgaagaagccgaaacaaattaatgcagatcatattatggatactcttggttacatgcctttggagtatgtcatgaatggttctgtcactgataaatgggatgttttctcatttggtttggttctgctacgagttgtgtgtggaatggattatttcataatggcagcagagaggaaacgtatgg

SEQ ID NO: 18227 - DNA, 241 bp, Glycine max
  Clone ID: 700958858H1
atcaagtcctgaatctggtgggcaaatatggagctttgttggcaaacatccatccatggttcttgaagaagcatggagataaaggggtgtgagagggtcctcaccactcacactcctccacttaaaacagtttgttttggcttagctttggcttctctaatcatcaagggatgtgttctaacattctctcttgagtggcagaagcagatatgcattctccaaaggaggagaggctttggct

SEQ ID NO: 18228 - DNA, 107 bp, Glycine max
  Clone ID: 700958859H1
attgcctgccgaccagtttatcaagggatgaattttctgtgaaagggctttatgcgaatactccaagttcaatgggagatgaagactgtacctttcctccactggat

SEQ ID NO: 18229 - DNA, 240 bp, Glycine max
  Clone ID: 700958860H1
gacagttgcagaaagcatttgtaacaggggtccccaagttgaatcggggagcgctggaaacagcctgtgaagatttcagcaatattattaatagtcttgatgaatgcaccgtatacaaaggaacactatccagtggagtcgagattgctgtcgattcaactattgttgcttctgccaatgattggtcaaagaacatggagacagcctatcgcagaaagattgctgcattgtcccgtgtta

SEQ ID NO: 18230 - DNA, 245 bp, Glycine max
  Clone ID: 700958863H1
cttttattctctctctctctctccttttcttcctctttacttctacactaaatatatcacaatccccaccccccatttctttgttgccagttcaggaaaacaaataaagttctcctttgaaacttctctgggctatgttattttgaaagaagttacttcgcatcaataatgggttcaggtgattggtttaagacaataattagcttaagaaaatcaaaagaaggcagatcaaagaaagcaaaggg

SEQ ID NO: 18231 - DNA, 242 bp, Glycine max
  Clone ID: 700958864H1
attagagaagggtgttcctccaccatggtggccaactgggaatgaagaatggtggcctcaaattggtctacctaaagatcaaagccctccaccttacaagaaaccacatgacctaaagaaggcatggaaggttggtgttctcactgcggtcatcaagcatatgtcccctgatattgccaaaattcgcaagcttgtgaggcagtctaagtgtcttcaagacaaaatgactgcaaaggaaagtg

SEQ ID NO: 18232 - DNA, 245 bp, Glycine max
  Clone ID: 700958870H1
agaaaacataataatgggttcacaaaattgtatggataggaagcactatgttctggtgcatggggcatgccatggagcttggtgttggtataagctcaagccacgcttggaatctgcaggccataaggtcacagtacttgaccttgcagcttctggaaccaacatgaagaaaattgatgatgttgatactttctcagagtattctgcgcctttgttgcagctaatggccacaattccctcaaatg

SEQ ID NO: 18233 - DNA, 240 bp, Glycine max
  Clone ID: 700958871H1
ctcaaatggcactcgatgttctcaggcttggtttcttgattgactttatgtcccatgcttccattgtcggattcatggatagagctgccattactattgcactacaacaacttaacgcttttcttggcataaaaacattcaccaagaacactgatattgtttctgtcatgcactcggttttcaatgcagcacatcatgggtagaattgcaagacaatagtcattgcagtagcattcttgg

SEQ ID NO: 18234 - DNA, 243 bp, Glycine max
  Clone ID: 700958872H1
tcggccacaactgaaatttcagggaatgaagtgaacacagatgggaaggtgataaatgaagagttagcaaaaccaagtctaaaaggacatgatgaagaagcaaagttcaaaggattttttccaaaaccaattcctatagttaaaccaattccaaagccaattcctattattaaacctattccaattccagtttataagcctattccaaaaccaattcctattgttaagcctattccaaagtca

SEQ ID NO: 18235 - DNA, 240 bp, Glycine max
  Clone ID: 700958873H1
gcaaatgttctctgttattgtcagctgtctggatcataatcaaggcaaccgttgaagtctatcatcacataactgaacacctgtttctcatgtgtatgttatcattaatatttatgtttcgtctgtcaaaatcttgacagtatatgtatctcagcatatgaacttattcagcttggtgagtgacttatgttaataatgactttgtcagacttgtctaataagtagttaatggccataatg

SEQ ID NO: 18236 - DNA, 235 bp, Glycine max
  Clone ID: 700958874H1
gggttggggagaaatcagctacagttattggtgccacttttcagtggtttttgagagatctaactggtatgcttggaggaatcttattcacattttaccagggatcaaatcttgatagcaatgcaaaaatgtggcgattggttgcagatcttatgaatgatctaggaatgctaatggacctcatttctccattgtttccatcagcttttgtatttgttgtttgcttaggaagcat

SEQ ID NO: 18237 - DNA, 239 bp, Glycine max
  Clone ID: 700958876H1
aactcacttgccttatttttggttttgagattgagctaaaggccaactcaaccatcgaatttgttggtgattgaaagagaaggaagaagaagcaggaaatggaagcagtgagagctggtcgagaaggagcaataggtctaggtcaaggtgatggcgtagccaaggacagcactgagactgaactcaccaaaatccgtctcctcagggcaattgttgaaacccgtgatccctcttccaag

SEQ ID NO: 18238 - DNA, 238 bp, Glycine max
  Clone ID: 700958877H1
gaaaaaggggagtttcttattctttctagacgcttccattgatcggcgatttcttagacatggcggacatcacgaacacgaggaagtgaagggtgagtccttgttggagaagatttctgggaagatccacgaccacgattcgtcatcttcgtcggattccgacaacgagaaaaccagcgcttctgactccttgaagtcaaaggttttcaggcttttcggcagagaaaagcccattcac

SEQ ID NO: 18239 - DNA, 241 bp, Glycine max
  Clone ID: 700958878H1
cagaaagcaagcctccaagcttcgagaacaggtcgctcgccagcaacaggctgtcctgaagcagtttgggggtggcggttatggaggttcagataatgtggttactgatggagtggagctccagctacacccgagacttgagaaactttatatatcgacacgtgcggggaagcattatcaaagggatattgttcgaggtgtagaaggttatattgttaccgggtccaagcaagtggaaata

SEQ ID NO: 18240 - DNA, 241 bp, Glycine max
  Clone ID: 700958880H1
tgaaacttgagagagtgtcgttgattccaatttacgacggaggagtgaggaatcacaatctccaccggcgaaacctgtaactgttggcgacgctcaacactcgcactacgccgatagtgatggagagtgcttttgcaagcgcctctgcgattactgaccagaggcagaagatagagcagtataagcaaatacttgctgctgtcatttcatctaatgacattgttcaggctaggaaattcat

SEQ ID NO: 18241 - DNA, 246 bp, Glycine max
  Clone ID: 700958882H1
atgatgcattgaagtctgcgttcaagttttcatctgctgaagcaagtccgttgaaaagtatatctgattataatatagacacaaatgaaaacatagaaggtctgccaattaatgacgggaacgttaaagcatctcctattgataaaaaattgaggtctccaatgaatgccaatcatgatggaattccttcttcactatcaacattccatgaatcagccatgaaatctggtaatgcagatgacttga

SEQ ID NO: 18242 - DNA, 244 bp, Glycine max
  Clone ID: 700958883H1
cttctttcatttttttcagcattttccacgagggaaaaagaaggaaaacatcgtgagaagatagaggaatcattagcagcagaagggtgtgtggatttggaacaaaatggcgagagaagcattcattttcaaggaaagcgccttgttatctctcagagcgttgaagagcttgttgatgttgatatttgcggttgctatgctgctgctgctgccattcagagggcggaggagggtgccaccggcc

SEQ ID NO: 18243 - DNA, 241 bp, Glycine max
  Clone ID: 700958884H1
tttgaagggaaacagacacgtggtgggttggaataaaatttgccatgtttacgacaagctctgtaggcatgttggtgcctccatagcagtggctttgtttggaagcgttgtgacagtcttgctcatttggctttcagcttacagcattcatagccgagtccccaagtagatggaaggaacatggatcatgcattctgcatatttgatcatacatcttcatttattgtttataaagttagtg

SEQ ID NO: 18244 - DNA, 239 bp, Glycine max
  Clone ID: 700958888H1
tctcgagccgaatcggctcgagcgcaaggaggtgcagaatggctgatgcaggtgcagaaggagcatcttcttccacggtaggccaaatttacgttttctggcacgaagggatgctgaagcatgacacgggcaatggcgtgtttgacacggggatggatccaggcttcttagaggtgttggagaagcaccctgaaaactcagacagagtgaaaaacctagtgtctattctcaaaaggggt

SEQ ID NO: 18245 - DNA, 237 bp, Glycine max
  Clone ID: 700958889H1
tatatagccaaccagaaaagggctgggtatttttgagtgtgtgagagagcgagcgagcgagcagtttcaaagagaggatttgggattgggaaggcgagggattgcgctgcgtctcttcctcttctctttcgattcatccctcattcataatcttccaatccaacaacctcagcctcacactcacacatacacacatctgaacgcgtatcgtccctcccatggcttcaaagcgcatcc

SEQ ID NO: 18246 - DNA, 237 bp, Glycine max
  Clone ID: 700958890H1
ctgcttctcactgatctccattcccattccatggcttccactgaatcatcccctttcaagaaaattcagattcaaagggatgacactacatttgacgcatatgtggttggaaaagaggatgctcctggaattgttgtgattcaggagtggtggggtgtggattacgaaattaagaaccatgccgtgaagatttctcagcttggtagtgggtttaaagctcttattccagatttatac

SEQ ID NO: 18247 - DNA, 236 bp, Glycine max
  unsure (1)..(236): unsure at all n locations
  Clone ID: 700958891H1
ctcttcttctcttgcggctacggttttagcgcacntcttctagatttaaggaagatgggtaaggaaaaggttcacatcagtattgtggtcattggccatgtcgactctgggaaatccactaccactggtcacctgatttacaagcttggaggcattgacaagcgtgttattgagaggtttgagaaggaagctgctgagatgaacaagaggtctttcaagtatgcctgggtgctgga

SEQ ID NO: 18248 - DNA, 237 bp, Glycine max
  Clone ID: 700958892H1
gcagaagagcgtcgcagttgtaaccctaatcagaagaagcgcagttgcaagcgagtgacagccaccagccatgggtcgtatgcacagccgcggtaagggtatatcctcttctgctttgccctacaaaaggacacctcctagctggctcaagatctcttcgcaagatgtcgaagaaaatatctgcaagtttgcgaagaaaggtttgaccccgtctcagattggtgtcattctcagaga

SEQ ID NO: 18249 - DNA, 234 bp, Glycine max
  Clone ID: 700958893H1
ctcttccttttctcttctctgtctaaggggtgccctgagatcacattgaacaatggtgaaggctgtggccgttcttggcagcagtgagggtgtcactggaactattcacttcgttcaggagggaagtggtccaaccaccgtaactggatctcttgctggtcttaagcctggtctccatggtttccatgtccatgccttgggggacactaccaatggttgcctctcaactggatc

SEQ ID NO: 18250 - DNA, 245 bp, Glycine max
  Clone ID: 700958854H1
tctcgcaagcggagcccaatttctccttcacgaaccctaattcactcttcccattcgaaatctcgatcaccttttcgattcaacctttctctcctcgctaatctcttcgttcgcctcgcacatcaaggtgagggattgaaattgaatcctcaagatgccagctacagcaggaagggttcgcatgcctgcgaacaatagggttcacagcagtgcagcgcttcaaacccatggtatatggcaaagtg

SEQ ID NO: 18251 - DNA, 246 bp, Glycine max
  Clone ID: 700958811H1
atactcttgatttttcgaaattcgcttttgatgcaatgttgtatgtgtggatattatgtgaattttgttgtttggtgtttcaattgtttagttttggatcttgatatggttggttaccttgttgactggtaatgaacattttgagggtgaattaggcaatttgcattgtcgatgtgttgttttgagtttaggccttttgtgttacgcaggttgctgagaagacataaaaaatggtaaagatttgct

SEQ ID NO: 18252 - DNA, 249 bp, Glycine max
  Clone ID: 700958812H1
cttataacacaacacaacccacggccccgacctccgcattcctcctccttcccctcctcctgctgctccacctcgccatcgccgctcacggcatcggcatcaactacggcacgctcggcgacaaccttccaccgcccgcggcgtgtccgaacttcctgaagacgaagacgaccatcgaccgcgtgaagatctacgacgtgaacccggacatcctgcgggccttcgccggcagcggcatctccgtgacgg

SEQ ID NO: 18253 - DNA, 246 bp, Glycine max
  Clone ID: 700958813H1
tgtgattcctccctccttttgtcttcgcttggttcaagttgttacagtgttaaatttgagggacatgaagaagtaagaaagggcagcgggtgttggtggctcatataaaacggccaacaacaatgcgtaatttcttttctgctcttcagagtcggcttcattttgtggttgctccctccttttctcttcgcttggcaagtaaatgatgaatgagcgagcgcatagtgcagtgaatttaagaggaaa

SEQ ID NO: 18254 - DNA, 252 bp, Glycine max
  Clone ID: 700958816H1
ggactgaatgatgtgagacagtttcaattttctggagtagaagatcatgaagagtatgggggaattgactcattttactcaaattttgggttcttcccagatgatccatcagaagaagggtaccttctatccactaatcaccaaaagtatcaccaaatatttgatgattatggactattggatgataaccttcagtttgacatggtatctccaccactccaatttgatgaacaatatagaaccatggttcca

SEQ ID NO: 18255 - DNA, 256 bp, Glycine max
  Clone ID: 700958817H1
attcattctagttctggattccgactagccgcgttgactcggttccgtttttcattctcgcggatctaatattaaggaatagcttaagggcacattacaatgaaggcattgattctggttgggggatttggaacaaggctgaggccactgacactcagtttccctaagcctcttgttgattttgctaacaagcctatgattttgcatcagatagaagcccttaaggccattggagtgactgaggtagtgctagcca

SEQ ID NO: 18256 - DNA, 256 bp, Glycine max
  Clone ID: 700958818H1
tggaacttctgatgcagttagttacagaacctttggcgtggcatggactcgtaatccagtcttgtctgagatcctgttttccatctggtaaaaagaaaaagaacagcggatcagcttatcagtctagtgcgaatctggctcatgcaatcacagattctgtcatgcatttatttcatgtgttagaggttgttttgaaatggataactgaatggaacaaaagacctgaagatgagcatctggagaacattcttttgct

SEQ ID NO: 18257 - DNA, 255 bp, Glycine max
  Clone ID: 700958819H1
cagaaagctaaaacagaagaagcaaagatgatattgcagttcttcgtgctttcacagagaggcgataacatcgtctaccgcgactatcgtggtgaagctcaaaaaggaagcgctgagacatttttccgaaaagtaaagttctggaaagaagatgctgagggagatgctccacctgtttttaatatagacggtgtgaactacttccacgtaaaggttgctggattgctatttgttgctactactagagtcaatgtc

SEQ ID NO: 18258 - DNA, 252 bp, Glycine max
  Clone ID: 700958820H1
aaccaagcttctctgttaaaaaaaaattaggcgtctaaagggccaaagcttagaaagttgaagctttttttgttgaggtgaaagtgaaatggttggcaaggataatctgagggctgaggacttgaacttgtgctttaagaagcttatgatggtggccgggagtgggaacagtgagaaaggggtgaacttgaaggttggggtgatcaccgagtggaaggatattcctgtggagcttctgatgcaaattctgtc

SEQ ID NO: 18259 - DNA, 250 bp, Glycine max
  Clone ID: 700958822H1
attaattaagcactctaaaacatatctttatttccttgtctacatatcttgaaaaactcaatcatggctagtgtttcttcggttttagctccatttagaaggcttgatgggaaggtggcgattatcactggtggtgcgagtggtctaggtgcagccactgcaagactcttctctaagcatggagcatatgtagtcatagctgatattcaagacgacttgggtctctctgttgccaaagagttagaatctg

SEQ ID NO: 18260 - DNA, 252 bp, Glycine max
  Clone ID: 700958823H1
ttccaatggaaaagtgagaagtgaagagaatgcgggttgtttgttgctccaattcaggcgtgagtgccactcttccatctttcccttgtcccagattccctccactcattgcaatttcttcgatccgctttctaaattccacacccctccgttcccctgcttcgccgcgacaagttacaagaatggcttcgaagaatgctcaacaagacacgcgcttagccagaatcgcctctgcgatccgagtcatccccg

SEQ ID NO: 18261 - DNA, 250 bp, Glycine max
  Clone ID: 700958824H1
gcagatcttcgtcaagaccctcaccggcgagaccatcacccttgaggtggaaagctctgacaccatcgacaacgtcaaggccaagatccaggacaaggaaggaatccccccggaccagcaacgtctcattttcgccggaaagcaacttgaggacggccgtacccttgctgactacaacattcagaaggagagtactcttcacctcgtcctccgtctccgtggtggcatgcagatcttcgttaagacactc

SEQ ID NO: 18262 - DNA, 248 bp, Glycine max
  Clone ID: 700958825H1
cttgtatgtggctgcagatatccaaagcttaaattcggtcctcgaatctttctgatcattggttgttttttattctttcaaatacattccaaaatctcttggaaattgcgagattcactgcttatcctagcagcagattttgggttctgacccaattattcattttccccaactgggtcttgtggatttttctgttggggttttaaatttcgtgttgctgggtttgaaagttatttcctttcttcccc

SEQ ID NO: 18263 - DNA, 244 bp, Glycine max
  Clone ID: 700958829H1
gcgaaacaatggcgacggtggagctctggtggatgacgtgctttctctaacaactgctcttagaaaagagagagagaatggcggtggagtacacatgctgctcaacggcgttcttcgttcacatagtggtaatcgtgctgctggtgctgttcgcgggcctcatgtcgggcctcaccttgggcctcatgtcgctcagcctcgttgatcttgaggttctcgctaagtccggcactcctcaggatcg

SEQ ID NO: 18264 - DNA, 250 bp, Glycine max
  Clone ID: 700958831H1
gagagaacaaagcacttagtgctattcgataattacgaaaaaccaacagcgagtgttgtttttgcttggtccaggctggaccagggaatgaatagagatgagaggctttcggttgaagagaactgagttaagcggcgaagctaaacgcagaatcggcggcagaaattgccaccggaagcacgtcgaagacgggtgaaccaaacacaaaattccatccaccacttctcttttcaatccccaactcaaatct

SEQ ID NO: 18265 - DNA, 247 bp, Glycine max
  Clone ID: 700958832H1
gaaaattgttgcctatgaagctgtgcaccctattagcaaccttctagatcttaagagaagactgggaattggccgtcgttgttttggatatttacatccagctattcctggtgaacccctaattttcattgaagttgcactactgaaggatgttgctcagactatacaggaagttttgtgggatagtcctcctatacctgaaggtgaggcaacatgtgccttgttctactccatatcatcaactcag

SEQ ID NO: 18266 - DNA, 255 bp, Glycine max
  Clone ID: 700958833H1
gcgagtgagagtgagtgagtggttctcttgcagcaacaaggtttagtgacaccaaacagacgggaaatgggtcgtggggtcagtgctggtggtggacagagttccttggattatctctttggcagtggggtacctgccagcagtgcaaatggtgctcgcactcaaaatgcaagtgctccttcaccaccggttgataagcaaagtccagcaccagcaccagcaccagcacctgcacctgcagcagcagcagcacca

SEQ ID NO: 18267 - DNA, 252 bp, Glycine max
  Clone ID: 700958835H1
caagtttttctgtggtgggaggctggtttttggtccggatgtagcttccctgtttcttacaacattcctaattgctggacctgcaattgcattttgtgtaaagatatatcttaaaatcaagaagaccgatggtcttattcatgattactggtttcctgtattgattgtgggttcaattctcactgttttggatttaatattcctccttttgacttctgggagagatcctggaattgtccccagaaattcaag

SEQ ID NO: 18268 - DNA, 246 bp, Glycine max
  Clone ID: 700958837H1
ctggagagaagatgttcttgtcctttcttgttctgacagattccttcggctatccttgcagcttccttctagatactcaagttggctgtcttctggactgactgctcgcaaaaaccataacacaagcactagccctgggtgtgaatgggccgtttcagctgtcatagatgactttatttttgttattcatgatataagatatttggaggagcaggttcatggtgattaccttcaacatgtgcttca

SEQ ID NO: 18269 - DNA, 250 bp, Glycine max
  Clone ID: 700958838H1
ggtcttagttgtggctcatgctatgagataaggtgtgtgaatgaccataggtggtgcctccctggctccattatggtcactgccaccaatttctgccctccaaacaatgccttacccaacaatgcaggaggctggtgcaaccctcctatgcaccattttgacctctctcagcctgtcttccttcgcattgcacaatacagagcaggaattgtgcctgtgtcctacagaagggtaccctgcaggagaaggg

SEQ ID NO: 18270 - DNA, 249 bp, Glycine max
  Clone ID: 700958839H1
accagtgcctggcgtcgcggacacagaacagagcttgcagaagcgatttctcatttctcattcttaacaacacacttcaacaatggccaaaaccttcaaatacatcatcctcggaggaggagtttccgctggttatgcggcgagggagtttgccaaacagggcgttaagccaggggagttggctatcatttccaaagaagcggtagcaccttatgaacgtcctgctctgagcaaggcttacctttttcc

SEQ ID NO: 18271 - DNA, 246 bp, Glycine max
  Clone ID: 700958841H1
caaactcacagatagattagcacttagcatttactaagataggataaaggaaggaacactttcgttacatttctccgcccattcctaccttgttcctccttttctccttttctttttcgtattcggggttgctgctttctttcgactctattgtcttcttaataaatacagaaagaaacaaaaaagaaaaaagtttataggtgcctagaagaacagacaatatagtgtggagcaattacgtttgat

SEQ ID NO: 18272 - DNA, 242 bp, Glycine max
  Clone ID: 700958842H1
gttacatcgaaggcatcggacgaggatggggactttgccgagctaatagtgtttaaatggacatcacttctcatccctcctacaacagtgcttattgtgaatttggttgggattgtggctggtgtatcctatgccataaacagtggttaccagtcttggggtccactatttggcaagctgttctttgctatctgggtcattgcccatctatacccattcttgaagggtctcttgggcaggca

SEQ ID NO: 18273 - DNA, 252 bp, Glycine max
  Clone ID: 700958849H1
ctcgagccgtttgatgtatgggtaggaaatgtgcgtggaacaggtggagccatgggcatatatctttattagagaagaaaaagcaattttgggattggagttggcaggaattagccctgtatgatgttgcagaaatgatcaattacattaattcagtaacaaactcaaagatatttgtagttgggcattcacaggggacaattatatcttttgctgccttcactcaaccggagatagtagaaaaggttgagg

SEQ ID NO: 18274 - DNA, 249 bp, Glycine max
  Clone ID: 700958850H1
ctggaagcttgttgtgagtaagggaaaggcttcctgcactgaagaccaagttgaaacctcttgattctttgcttagaattccacagaatatggagaagagtcttttcaatgactccccacctttggagttctagggtatgagcaaggaggaggaagactcattgctagggcaagttgaaatatggaggtacatgacatgcttcacggactccgtggccttgaaatccgtcatagagctgcgcatagccg

SEQ ID NO: 18275 - DNA, 247 bp, Glycine max
  Clone ID: 700958852H1
cggagctgtgtctggggaaatttgcgttgtttttcgcggtacagctcacacacactgaacggtaagtatggcggacaaggctgttacaatccgaacccgaaagttcatgaccaacaggcttctttccaggaagcagtttgtcgttgatgttcttcatccagggagggcaaatgtttccaaggctgaacttaaggagaagctagctaggatgtatgatgtgaaagaccctaatactgtatttgtcttc

SEQ ID NO: 18276 - DNA, 248 bp, Glycine max
  Clone ID: 700958810H1
ggaagactctgttagagaatgatcagttgtgtatagagcagaggcaaggtcgagtctttgaaggatggaatgaagggaaaatatattttcctccgacttataagtattcagacaattcagacagctatgcaggtgatgacagacgctcaaaacaaaagtgaagaactccagcatggtgtgatcgtatcttgtggtatggaaggggccttcaccaattatcatatgttcgtggggagtcaaggttttct

SEQ ID NO: 18277 - DNA, 241 bp, Glycine max
  Clone ID: 700958770H1
gcgcagagctttgctggcatacccaccgtgacgaaattaacctctctacgtaacagcacacagcgatttccccaaatcatcgaaactccaactcgcgattcccaatcgaaaccctaactcgggatggcgatttgctgggcgaaattcttcaatcgctggagctgtggctgaagctgatcaagaacccgcagccgcagccctacgtaaaccctaatctggaccccgttttgctggtgcccgg

SEQ ID NO: 18278 - DNA, 243 bp, Glycine max
  Clone ID: 700958772H1
tgaaacttgagagagtgtcgttgattccaatttacgacggaggagtgacgaatcacaatctccaccggcgaaacctgtaactgttggcgacgctcaacactcgcactacgccgatagtgatggagagtgctttgcaagcgcctctgcgattacttaccagaggcagaagatagagcagtataagcaaatacttgctgctgtcatttcatctaatgacattgttcaggctaggaaattcataga

SEQ ID NO: 18279 - DNA, 244 bp, Glycine max
  Clone ID: 700958773H1
gttacctttgtttatccagagaccgtgaagcttattctatctaaaggaaaccctcattttgtgtgtgatgcacgagtgcttgttaagccttacaaggagaagggcaaagtcccagacaagatgctgcagcagagcaggtagatagaggagatttttcaccatgtggtactcctactggattagatgccagagaccaccaatttgatcttcaacttggaggcagaatgttctacaatactcaaga

SEQ ID NO: 18280 - DNA, 242 bp, Glycine max
  Clone ID: 700958774H1
gaggcacaagccaagcctcccacagcgaaggggctatcatataacttctacgacaaaagctgtcctaagcttaaatctatcgttagatcagagctcaaaaaggtcttcaacaaggacattgctcaagctgctgcttgcttcgccttcacttccatgactgctttgttcagggttgtgatgggtcagtgttattggatggatcagcaagtgggccgggtgagaaagaagcaccaccaaacttg

SEQ ID NO: 18281 - DNA, 241 bp, Glycine max
  Clone ID: 700958778H1
atgcctcctaagaacatggaggcctgtttttccttgtgggggcattattaaacggcttcgccgtcaacattgaaatgatcatcatttggaagcccatgttaagtgcaaatcttatcaactatggaacttccaactagaaaacggatggagaatttctttgggtgtcggagctgttcctgccgtcttgttatgttttggagctcttttcttaggagacacacctaattccctgattgaaaga

SEQ ID NO: 18282 - DNA, 177 bp, Glycine max
  Clone ID: 700958779H1
cacaaaatgaacagacttgtcttgcaaaaacccattaattaaaagccctaaaaagttaggttcttataggatttgaacttcattttagaggttcaaatttaatcttttttttttttggttcaactcacaatatatgcaacctacattggagtcaaaaaaaaaaaaaaaaaaaaataa

SEQ ID NO: 18283 - DNA, 238 bp, Glycine max
  Clone ID: 700958781H1
ggaaaattaatctccctttcattttctctgcatctgtactctccaaaatgccgtccttagaggaggagctcttcccttcaaccccaggcacgttcaagatcgagcgggcccaccacatgaaccgccgctctaccgctgcttcgcctccaccagcaccatgttcctgtgggccctactttttaatcgccctcaccgcttcatatctcagcttccaaggcttcgttgattccggcagccg

SEQ ID NO: 18284 - DNA, 240 bp, Glycine max
  Clone ID: 700958785H1
cagactagagagagtaagagtaagagaagagatggaaagagtagcatcagtatctcggccactgaaaatatacttgctcccattcttctcaccggggcacctaatccctctggtccagctggctcgcttgtggcggcacgaggccagcacgtgaccatcatcaccacccccgccaacgctcaactcttcgaccagaacatcgacatggacaccgcctccggccaccacatccgcgtccac

SEQ ID NO: 18285 - DNA, 241 bp, Glycine max
  Clone ID: 700958787H1
aacaaaaacaacaaccaaggtggtggtgctggtgctggtgctggcgggttctttggccctggaggagggttcagcatacccggttttggaaacgggtttggaaatggcatcataggaggaggatacggatcgggtatggaggtccgaatggaggctcctctaaaggtggtatcattagaccaaccgttgtgtgcaaagacaaaggcccttgtttccaaaagaaggttacttgtccagccaa

SEQ ID NO: 18286 - DNA, 243 bp, Glycine max
  Clone ID: 700958788H1
gtgaaagagaatccgaggcgaagagaagagaaaaattaagatggaggggaaggagcaggatgtgtcgctgggagcgaacaagttcccggagagacagccgattgggacggcggcgcagagccaagacgacgcaaggactaccaggagccggcgccggcgccactggttgacccgacggagtttacgtcatggtccttttacagagcagggatagcagagtttgtggccacttttctgtttcta

SEQ ID NO: 18287 - DNA, 241 bp, Glycine max
  Clone ID: 700958789H1
gaaaaagctagatgggagatattatcaggtgagattgattatttgtaatgttgtaacaagagtttatgcattataggttttttatatgctgttttataatgcctgatttgagcctagaagtcacttcaagatgcaaccgatccttcattgacttctactttcagattaatgaattcatttgccaatagtatagttatttttttcttgtaagattaattctgacctgttatttatttattta

SEQ ID NO: 18288 - DNA, 241 bp, Glycine max
  Clone ID: 700958790H1
attttgtggggttgcagagatgattggacctgttgacttcaataaggacatggacttttggcagcaagataaatggagtgggagcttccctgtaaagtggcacatcataaaagatgtgccaaatgcaaatttaggcacattatactagagaacaatgagaacaaacctgtcactaatagcagagacacacaagagataatgtatagtaaaggtttggaaatgctgaaaatattcaaaaacc

SEQ ID NO: 18289 - DNA, 242 bp, Glycine max
  Clone ID: 700958791H1
gtttcctcggaaaataacaacagtgacctaatgcaagcacagtctgagccatctctcccagtgaaggaatcttccaagagtcaagcaaaaagggaaatggtaaaaaataagagtccttctgattcaagcacagaaaggaaactgaaagtaaaatcaattcaagcaaacagaaaaagacatctttcactggaggcaaggaaaaaccaactccaccaagtcttcccttgtccccaaaacacaat

SEQ ID NO: 18290 - DNA, 238 bp, Glycine max
  Clone ID: 700958793H1
aacaaaacagagcaaagagagagtgtgtgaaaagtgaaacaaaggacagaacaacaatggcgacacttaaggttcctcagcctcttccccccgttgcagatgattgtgagcagctccgaaaagccttctcagttggggaactaacgaggagctgattgtatcgatcttggctcataggaatgctgctcagaggaagcttatcagagaaacttatgcccagacctatggagaagatctc

SEQ ID NO: 18291 - DNA, 241 bp, Glycine max
  Clone ID: 700958795H1
ggaaaaactgtgcttattatggaacttattaacaatgttgcaaaagctcatggtggtttctctgtgtttgctggtgttggagaacgaacccgagagggtaatgacttgtacagagaaatgattgagagtgtgtcattaagcttgatgataagcagagtgaaagcaagtgtgctacttgtgtatggtcaaatgaatgagccccctggtgcccgtgcccgtgttggtcttactgggcttactg

SEQ ID NO: 18292 - DNA, 243 bp, Glycine max
  Clone ID: 700958796H1
tgacattcttcgaacaagaacaatgagggtcgatgctctatcaacaatgagtagccttaagcttctctaccttggatattggaacgttggcttcgaaatcaatttttcaggaacacttgctaagctttccatgaattaggatatcttagttgggaaaagtatccttttgagtgtttgccaccaagttttgaaccggacaaacttgttgagttgagactaccttacagcaacatcaaacaactt

SEQ ID NO: 18293 - DNA, 261 bp, Glycine max
  Clone ID: 700958801H1
ccagttggtattcatgatgatgtcattaagaaatcaggttctgctcttcatcctggttattttggaccaggtcctggatatgcgagacatcatatggatggtatagctccaagaagtcctgttagtgaatatgctgagatgtcctcccggagattggggctgcactctggcagtcttgttggtaagtcaggtatagatgattttgatgacagagttgcacgtcgttttggtgaattccgtgatagtcggtttcctcatttg

SEQ ID NO: 18294 - DNA, 258 bp, Glycine max
  Clone ID: 700958802H1
attcgtgaaaatgtggggcgagtgcttacattggactccattgttgctggaaatgcgtggaaaggcatggacatgctgattttcaactcgtggcattggtggacccacactggaaaatctcaggggtgggattatattagagatggacccaatcttgtgaagaacatggaccgtttggaggcctacaataaaggattaaccacttgggctaattgggttgatcagaatgttgatccctccaaaactaaagtcttcttt

SEQ ID NO: 18295 - DNA, 257 bp, Glycine max
  Clone ID: 700958803H1
aaaacgatgagggcaccaggtgggccgttttagttgccggttccaatggctactggaattacaggcaccagtctgatgtttgccatgcatatcaactactgaggaaaggtggtgtgaaagaggaaaatattgttgtatttatgtatgatgacattgctttcaatgaagagaacccacggcctggagtcattattaacagtccacacggaaatgatgtttacaagggagttcctaaggattacgttggtgaagatgtt

SEQ ID NO: 18296 - DNA, 254 bp, Glycine max
  Clone ID: 700958804H1
ctcgagccgtttgtcggaaaccaaaccccgagcaacctctctcgcccaccttcgcggtctgattcagctgagagtggttgggctctgcaaaaattagctgcatgagctggtttgggaaactccgtttattctccaatttcaatccctttcacttcattacttctttgttaatttttaccctccatttttcaccccaatcgcgcttttccctccaacccctgttattgatccacgctaaaaccaatctcaatcgt

SEQ ID NO: 18297 - DNA, 252 bp, Glycine max
  Clone ID: 700958805H1
gcgaatgtgagtcttcttccattgtcagcctcagactcagggtttccactttccgctcacaataaaaaataaagagatccggtgtagaaatctcgtttctcagtcatcttaatctcaatggaatctattggtaaagaagaaaaaattgcttgtgtgatcggtgaccgatcaactagtgatgttgttgttaggctacgcacacaggaaggtcgagatgattggctgtactgccattcagagattcttgtgaag

SEQ ID NO: 18298 - DNA, 255 bp, Glycine max
  Clone ID: 700958806H1
aagagttctttcaaaatgcaaacagccttaaccttcgctgcccccaacgttgtgccattggcacccacaaagagtgtctcccatattaccatctttcctaccaaattgaaagccccgcgctcctcacctcgttactctccgattagggttgcaaccgtggagcccgacacttcaactgtcgactacaactctgcgttctcagtgtttcctgcagaagcatgcgaaactgtaggaggggaagcctgcatggcggag

SEQ ID NO: 18299 - DNA, 248 bp, Glycine max
  Clone ID: 700958807H1
caatcacttaacagctgcctcccactgcccgtacatcttgtatctctcctttgtgggaattcactgtgagtagatgctactaacacatctttaaggagcatcattcatcattgttttttttttccttttgtgttcaatgtggaaaagtgctttaactaaacagctgtgaaggcttgtcactgaaataaagcactgcattaaggccaagccaccactctcctcttttccattggtggatctttttttct

SEQ ID NO: 18300 - DNA, 254 bp, Glycine max
  Clone ID: 700958808H1
gggttcttcttcccctccggacactagcaagagcataaagctagagcgatacaacagctacatccggagactcaacagcaccaagctcctcaacgcctcctccaaactcctcttccgcgccactctcttggtcgcactcatcctcgtcttcctcttcaccttcaactaccctcccctctccgccaccgactccacccaccgccacctccacgcccactcccactacttcctctcctcctcctccttcggcgcct

SEQ ID NO: 18301 - DNA, 249 bp, Glycine max
  Clone ID: 700958809H1
ctcagacgatgcatataccgtgggatgaagctgggtgtttatgccttgtgggtgacttgtttaattatgatgcacctggaatggagccatctggcattgaggatttagagcattttctatctaactcttccatccatgatactagcttattaaatggagataataatataatggtagatgcagaccaccttgattctcactcagagattaacagatggttggtttgaggaagatgttaatgcatattgc

SEQ ID NO: 18302 - DNA, 240 bp, Glycine max
  Clone ID: 700958768H1
ctcatcttacactagatggcattcccttgagagcccattggacccatcactgagggacgcattatacgccaatctaaatgagaaggagcctcagccaattatgcatgagcccagaagaaggaagatgagtcaaaccacaaacttgtgtttgactatgtcaatgctgcactattggaacttgttggttatgggtcagaaaagtgcttaaagagaagtaagagccactacagggtccaagtc

SEQ ID NO: 18303 - DNA, 246 bp, Glycine max
  Clone ID: 700958721H1
caagccccactcaaccaccacactactctctctgttcttcttctacctttcaagtttttaaagtattcagatggcagagacattcctatttacctcagagtcagtgaacgagggacaccctgacaagctctgcgacaaatctccgatgctgtcctcgacgcttgccttgaacaggacccagacagcaaggttgcctgcgaaacatgcaccaagaccaacttggtcatggtcttcggagagatcacc

SEQ ID NO: 18304 - DNA, 246 bp, Glycine max
  Clone ID: 700958723H1
cgagatatggcttcaactctgcttcccctggcaaccttcttcttagttctctccgcttcttatctccagattgctggggcgaaagcacaaccgttgactagtctcaagcttaactctccgatccttcaggagtctttgctaaagagatcaatgaaaatcctgaggcaggatgggaggctgctataaatcctcatttctccaattatacagttgaacaatttaagcgccttcttggagtcaaaccaa

SEQ ID NO: 18305 - DNA, 245 bp, Glycine max
  Clone ID: 700958724H1
ttttcgttctgttttggcttcttcgctgcaactctctaccttccctctttttccgaatctgaatagaaatggcttcggagactgagacgttcgcttttcaggccgagatcaaccagctcctcagtctaataatcacaccttctacagcaacaaggagatgtttcttcgtgagctcatcagcaatgcctctgacgctttggacaagattcgatttgagagtcttacagacaagagcaagcttgatg

SEQ ID NO: 18306 - DNA, 248 bp, Glycine max
  Clone ID: 700958725H1
atgaagcaattgtttacattttccgtcaaccaaaatgctacaaacgaaaccagagattcgtaattgcacattctcttttgttgtctccagctcatagaatattataaactcagattcattcagaatttcagattcactttttcttttcttctctaccttctttttcctctgacagctttttgcagaaagttgtgatttttccttgaaagatggcatctttgagcatgatccagatcagaattgggaat

SEQ ID NO: 18307 - DNA, 245 bp, Glycine max
  Clone ID: 700958726H1
ccgagaggcgtgtctcagagtcttggtgctgtgcactattttcctcaaggaggctgcggcttatggcctttgcctcgctgaaattggtgagatgatgactagggagttccgcagggtgaggaggagcccagtgacttgaagttgtttgtttggaggcaaggaagatagtggcggagagggacagggaggaactgtctcccggggctgagatgagagatgatgagtttctgtttgatatagattat

SEQ ID NO: 18308 - DNA, 248 bp, Glycine max
  Clone ID: 700958730H1
cggctcgagggatcatctgtcgaaggacaaagtgcccgcagaggtatagaaatcaaggaagatcaagaaaacataaatatcgtgctggaaatggaatgggccatggaagtacaccatcaactcatgctgccgaagcacgaagccaccccctggaccaagaatgccagatggaacacgtggcttcgcaataggacgaggtcggtttcctgtccctgcttcgaattagcaaagattggacgccacaaatg

SEQ ID NO: 18309 - DNA, 241 bp, Glycine max
  Clone ID: 700958733H1
ccctcttcttccccaccatcacaccaaccaaacctcactctccctgccatggtcatgggagcctttcgccacttcgaaccggtttccaaatgcagcaccgaaaaccggtttaaccaaaccgtggcctcggcttggacggcaccctcctggtgtcccctagcgcctttccttactacatgctcgtcgccatcgaagccggcagcttcctccgtggccttgtcctccttggatccgtcccttt

SEQ ID NO: 18310 - DNA, 241 bp, Glycine max
  Clone ID: 700958734H1
cacaattattccacaaaatttccctcacttatttctcaccatcatcaccccctttccttctctcaagaaaaaaaaaagttaatttcttgaacccaatggcttcagagacagaggtgccggatattatttctctgttttcgaaaggtttcaacaaaacagagacatgtctctgtttctgcccttcctcttcggcttctctgacgccaccccaggacgaaatagcgacgacccagatcacgaa

SEQ ID NO: 18311 - DNA, 238 bp, Glycine max
  Clone ID: 700958735H1
caaatacttctcttggcattttgtgtcccttctctctttctcttgctcgatattttccaaccaaaatatattttaaaaccaaacgtagctaggcaccactgctaggcatggcaagtgagatatttcttgccttctgatcacaacctttgtggttgcagcctctgctggtaacttcaaccaagactttgagataacatggggtgatggtcgtgccaaaatcctcaatagtggggaactt

SEQ ID NO: 18312 - DNA, 243 bp, Glycine max
  Clone ID: 700958739H1
ataaaattttcgaagttgaagcgagaacttgccatttcaagggttttagggttagggttttctcaaattgcaaggacatgggtttcaaccttcaaccatatgggattcaatccatgctcaaggaaggccataacacctttctggcctcgacgaagcggttctcaagaacatcgacgcttgcaaacaactttccactattactcgaaggcgcctcggtcccaatggaatgaataagatggttat

SEQ ID NO: 18313 - DNA, 246 bp, Glycine max
  Clone ID: 700958740H1
attcccaattcctaattgtttaaacctaattctcatttcttcatcgttcgattcttctcctcctaaagatgcagatcttcgtgaaaactttgaccggtaagaccatcacccttgaggtggagtcctccgacaccacgataacgtgaaagctaagattcaagacaaggaagggatcccacctgaccagcagagacttatctttgcgggtaaacagcttgaggatggtcgaacccttgccgactacaa

SEQ ID NO: 18314 - DNA, 246 bp, Glycine max
  Clone ID: 700958743H1
caaaaggttgaagaatttgacagagtgagagtgtaaggtagagtcagtcagagatatagaaatggcttcgtggtgcagtgttcgaagcttccaggttccggcgatggaaggcagcgcactgcgcaaccgtgcttcttggccgccagagtggggtgtttgtccgtggccggcacctccttctggcgttcctcttcgtcaccgaagcactctttgtcattcacatgcttgagcatttcttccgaaact

SEQ ID NO: 18315 - DNA, 175 bp, Glycine max
  Clone ID: 700958744H1
ggcaatttcgtgctagtgtggtagtgtggtacccttaccctgaggtgcaagacaaagtaacctaacggtgcttacaactattaacagcggaagaagtgaagggcccagacggccaccgtctagggtagggttaggttttaattttcgccacacaacatacgagatcgaaattgcc

SEQ ID NO: 18316 - DNA, 242 bp, Glycine max
  Clone ID: 700958745H1
gcaagagaaaatgaccaagatcttctttgtattgctgctatgtctaatcatagcatcttcttctgggtttgtgaattgctctgatgttgagaaggaggaaaagattggaatatttgagctcaagaaaggtgactttctttgagggtcaccaactggggtgcttcaattttgtccctggtgattcctgataagaatggaaagttgggtgatgttgttcttggatatgattctgttaaggatta

SEQ ID NO: 18317 - DNA, 247 bp, Glycine max
  Clone ID: 700958748H1
gtttaaatatgatattgctctttctctgtactctattttctcccaccgtcacacatggctacggctgcgtaggataacatctaacaaacctagcgcacgatagtcttccttcacccatgcttggagtactctgcgcactcgccccaaaccttggcttctctccctcgtccacgtccacgcttccctgcctcgcctacctcattcccctctatcaccttcagcctcgccgccgccccgtcgccgccat

SEQ ID NO: 18318 - DNA, 238 bp, Glycine max
  Clone ID: 700958749H1
gtggtttgtccaacatcctcgagaagttcgggttgaagtttaatcttaaacccgcgtctcgccgtcttctcggcaaggatgggttgcccacttggttctctgctgctgatcgtaagcttttgggtcgtgatggagatcacgtgtcaagcccaatgttgtggttgcccaggatggcactggtcagttcaaaaccgttgccgatgctattgcttcctaaccaaaggataacaaaggtaga

SEQ ID NO: 18319 - DNA, 237 bp, Glycine max
  Clone ID: 700958750H1
aatgcccactttttttcttccaacgctcctcctccttctcatagccttcgccacctctgtctccggccgccgtgacctcgtcggagactttctccggctgccctccgaaactgataacgacgacaactcaagggcacccggtgggccgtcctcctcgccggttccaatggttactggaattacagacatcaggctgatgttattcacgcctatcaaatattgaggaaaggtggtctg

SEQ ID NO: 18320 - DNA, 239 bp, Glycine max
  Clone ID: 700958754H1
gccgaactcggtcatgtaacacaaaatgaaataagtgccagaggtcagccagagccatctggatggttaattggtggcttacagaaccttgggtttgacaattttcatcttggagttttgtgcttgataggaactgcatttgcatggctgcatttctagccattcaggcatcggtattaaaaaaatatcctgcaaacctatctgtcacagcgtgttcatacttctttggagcttgactg

SEQ ID NO: 18321 - DNA, 240 bp, Glycine max
  Clone ID: 700958755H1
gcaaaacctctcttcttcttctgattgattccacctcgcgattgatctgttttcgtttgtttgcttctttttcggtttctgatctgaactcgattcgattcgctattgccggaaaatgagtcctccggcaaggtccggtgatgatcgctccctcgagaggttgttgaggttatcgttgttgttcttcgaagtcatggtttcgatctgaggttttggcgctctcgagttcgttttggtgag

SEQ ID NO: 18322 - DNA, 243 bp, Glycine max
  Clone ID: 700958756H1
gagaaagtcgtactgattcctcttcatctttcgttaaagcgagtacttttcgttcttgatctgttggttacgatgtcgtattcaaggagatctaggtattctccttctccttctccttctccatacaagcgatcggttggtctgtgtccaggtcattctcaatatcaagatccagaagccgttcaaggagtttatcaagagatgcagaaaatccaggaaacaatttgtatggtgacaggattg

SEQ ID NO: 18323 - DNA, 244 bp, Glycine max
  Clone ID: 700958759H1
gaagtagtgaagaaaatgaaagtcattgttttcttcgttgctataataattttaggtgcagaatggcaatgcaatgggtcagagcatgagcatgagcatggccacagctaccaaattttccctttgcgaatgaaaccggccccggtggccactacattccggaggtatcgtgcaaaagttggaggcttggtgtggaagcacacaacgtcattgactggagaaccattcctcaagattgcgaggg

SEQ ID NO: 18324 - DNA, 244 bp, Glycine max
  Clone ID: 700958761H1
aattgtggatggaatcaaccacgttatcctctcaatatttctctctctctctctctctctcctctgtaaccaaatcaaaaaataaaaaaaggagctaactaaacataattctgatatcgcagtaaagtatcaacaaaccaacaatccaacaccatgaaactctctgttttccaccatcagcaccatcctatgattctcaattgcccccttaccttgacaagaacacacaagagacttaacaaca

SEQ ID NO: 18325 - DNA, 244 bp, Glycine max
  Clone ID: 700958763H1
tgaatcgtgaaaatgttcagaaaccagtacgacacggacgtgacgacatggagcccggcggggaggctgttccaggtggagtacgcgatggaggcggtgaagcagggctcggcggcgatagggctccgatccagacccacgtggtcctcgcatgcgtcaacaaggctaactccgaactctcatcgcaccagaagaagatcttcaaggtcgacaaccacatcggcgtcgccatcgccggcctcac

SEQ ID NO: 18326 - DNA, 245 bp, Glycine max
  Clone ID: 700958764H1
attaattaaattttgtcttataacatcccactaacaaaaactagtaactaatatttgtgaataataaaaaaattgtcttatgacaatattcagcataagagctttatgatcccaggcctggggtttgtagtctatccacatatctttaccaatgccagtgcaaggaattcactgccagtgtcaagcataggactcaaccttgtaaataccaacttagattactaattgatttgttgtagttgatg

SEQ ID NO: 18327 - DNA, 239 bp, Glycine max
  Clone ID: 700958767H1
gtgctctattgagaaggcatctgatttataaagctaggtagatatattcagcgtcaagtgtcaactatattatggcaagccttctcatgattccttgccagcatctattgctaaagaagttgcaaaggattgtcatagaaaggcagcatcaaactccattaggagtgagaaaacttcctcattcagtttcagaagcaatgccaatgttccttttcatgaattgcctggggcttcctttg

SEQ ID NO: 18328 - DNA, 244 bp, Glycine max
  Clone ID: 700958720H1
ggcaacttgaatgagttgcaactgttgggatgtctagctggtgtggagatgatactgaaagatgtgggctatcctgtaaagcttggaagtgtgagttgctgctgccagtgcatacttacaggacactattccttgatcccttccaggatttgagtcacaagtcattcttgtctttacttcctttttttctgctctttcggaaattctgtaaaatatatattaccctcttttacactcctttgaa

SEQ ID NO: 18329 - DNA, 249 bp, Glycine max
  Clone ID: 700958675H1
gtttgtgttgaagaatttgacagagtgagaaatatagaaatggcgtcgtggtgcggtgctcggagcttccagattccggcgatggaagacagcgcactgcgcaaccgtgcttcattggccgccggagtaggtgtttgtcggtggccggcacctccttctggcgctcctcttcgtcaccgaagcgctctttgccattcacatgcttgagcatttcttccgatactcgtattaaggaaagtgttcaaactg

SEQ ID NO: 18330 - DNA, 250 bp, Glycine max
  Clone ID: 700958677H1
ttaacaacagcacaaagcgggttactgtctgttcaagctaccatctctctctctctttcttagtgcctccttgccagaagttaaaatggcccaagaaactttcctattcacatctgaatcagtgaacgaggggaccctgacaagctctgtgaccagatctccgatgctgtgctcgatgcatgcttggagcaggaccctgacagcaaggttgcctgtgaaacctgcaccaagaccaacatggtgatggttt

SEQ ID NO: 18331 - DNA, 253 bp, Glycine max
  Clone ID: 700958678H1
aaaggactcaccgatgcatcaaagatagccattttgaatgcaaactacatggcaaaacgattggagaattattacccgcttcttttccgtggagtcaatggaacagttgctcatgaattcatcattgacttgaaggctttaagaatactgctggaattgagcctgaagatgttgcaaagcgcctcatggactacggttttcatgcaccaacaatgtcatggcctgtgcctggcacactcatgattgagcctac

SEQ ID NO: 18332 - DNA, 255 bp, Glycine max
  Clone ID: 700958679H1
atcagtttttgtggagggtgttgcctttgcttacaatccttgtttcctttggagtgttcttctacttgcaggattcttacacagcacagttatttcctctcataaagttaccgcgggataagtgcagccttcttcccatcgccacttctggatatccagcaaacgtattgtgaccccacaagggatcatttctggttcagtggagataaatgatgggaaaataatatctgtcgttgagggacatgctattcaggg

SEQ ID NO: 18333 - DNA, 249 bp, Glycine max
  Clone ID: 700958684H1
ctcaatttgtggcttggacaggttgacgaagaatccaatttctcttgctattgtatgcatttcgttgagaaagagtgtttcagatcccgaaccgcatcgtacggtaccacaagtacgagttactgttatagtattggtagtagcgttagcgtgatcagatcagaattgtgatcgtggatcgaagcaatgttcaaattcttgaaagaggtggtgagtggatctggcacgggcctcaaagatctcccacac

SEQ ID NO: 18334 - DNA, 252 bp, Glycine max
  Clone ID: 700958685H1
caggaaacagaagccatgagaaggaaattgcaggctacgaagcagaacaagtttatgctggaagatgaagttaggtaatgtttttcatgcctcaaagtagtaggtggtttttcatagtttgcagtttattgtattcataaaatggttattgactgttcatagtttgcggtttgttgttatcctcaccactgtctctcttgtaagctgcagatttttgaggcaacgttacaattacttgctaaaacaccctat

SEQ ID NO: 18335 - DNA, 254 bp, Glycine max
  Clone ID: 700958687H1
agcagatgcagcagctggggacacttggctgacacccaccagcagaagaagccgaacccacatcgaacccaccactgaaccttagaaactcctgctgctgttggtgttcgtaactcctaaacatctcttgctgtccctcgccgccacagcggcagccaactgctgcgcctccaagatctgctgctgctgctgctgaggcgccggctgtgcgtcgcgaatcaccaactgcccgccgtgaacagcggccgtcgcag

SEQ ID NO: 18336 - DNA, 252 bp, Glycine max
  Clone ID: 700958688H1
tgcagatgcagcctatgatggcagcctactaccccaacaacgtcactactgatcacattcagcagtatctggatgagaacaagtccttaattctgaagattgttgaaagccagaattcaggcaagcttagcgatgtgccgagaaccaagcaaggcttcagagaaatctcatgtacttagctgcaatagctgattctcaaccccaaccacccaccatgcctggtcagtaccctccgagtgggatgatgcagca

SEQ ID NO: 18337 - DNA, 247 bp, Glycine max
  Clone ID: 700958690H1
gagagaagagtgagggtagtggaaatgacaattctttgaattctattggaaatgctgctgatagaggggcaaaattagagaatgctgttttgtcatggtcaaagggcatctctaaggacacacgcagggtggggctacagaaaaatccgatcagaatccaaatgctggtaaatttcctccattaaggagaagaaaacatctgtttgtcattgctgtggattgtgataccacttcaagccttcttgaa

SEQ ID NO: 18338 - DNA, 251 bp, Glycine max
  Clone ID: 700958691H1
acagaagcgtaaaaacaaaaggcttgactagagaaagagagagagagagcttcgaatcgaaactcagacgtagaaagaaacacaaatcacaatcgctatggctaggtacgaccgagcaatcaccgtgttctcccctgacggccatctcttccaggtcgagtacgccctcgaagccgtccgcaagggcaacgccgccgtcggcgtccgcggcaccgacaatgttgtcctcggcgtcgagaagaaatccaccg

SEQ ID NO: 18339 - DNA, 246 bp, Glycine max
  Clone ID: 700958692H1
gcgtgagtgaggggtagtgatagaaggataaggtgaggtgacgataaaccgtggaaagtggaaacggtggtgtagtctgtgagtgtcattgtgaagttggagacaatgttagcgccttctctctccttcctcattcttgttcatcttcctctttcttattgtcaatttcacttcctaatcccaaaccctctcattccctacctttcgtgctcgaagccaaagacaggacccgtagggaagacaggt

SEQ ID NO: 18340 - DNA, 251 bp, Glycine max
  Clone ID: 700958693H1
gtcacttttatacaaaatcaattagttaatgatgaggtgctttctaccttgctttcgtacttctaaacggaggaaccacttgcgttccgccgatgaagcccaaaaccatgtgggagaaggagctgttgaagactcattgattccatagcagagtcaaagtaagcaatccattcattcctttagtattgtgataatatatatttattatcctgtcatttacgctttcagaacaacaaatgaagagcaattga

SEQ ID NO: 18341 - DNA, 253 bp, Glycine max
  Clone ID: 700958694H1
ctttaaacagcttgaagcttctaattgattattgcttctactaattttttttttagcaatgtgtagtgttttatgaagtctctttcagttatcgatatagattcataggtccatgcaggactaagtgaaaaaggaagataagtatctgtagtacactgaaccacgagaagctgtcagctgaacttttgaggcatcttactcgaagcttggtgtttccttcagacgcaaaaccaagagcttatgttactagaca

SEQ ID NO: 18342 - DNA, 256 bp, Glycine max
  Clone ID: 700958695H1
catatttttttttttcactctcaaattaatgcacatgaacacctactctgaagccaccacatcacaaccaatgccacccaccatggatgaagatttggagaacaacacggaggattgcaataatgcaatgactcgatggtgagaaagaagtcagaactagttgtggtcacaaataatgactctcgtttccaaatgcttagaaatttcatgaccaatttgcaagaggtcatcttcggtactaagcttgtggtgcttt

SEQ ID NO: 18343 - DNA, 258 bp, Glycine max
  Clone ID: 700958696H1
gaaagctctcgtctccgccaccgacctctccggcatcaccaaaggaaaggttcgccacttccccgatactcctccctcctctaccgccacacgacgccacgacgctgctgcgtctagttccgttgtttttttctccgacgacattccttcttctcaatcccattctacaccgacaacaacctttacagtaacaaatattgacgatgttgccaagtcttcttccgacgcaaatcacgatttaaaggaggagaaaagtga

SEQ ID NO: 18344 - DNA, 244 bp, Glycine max
  Clone ID: 700958702H1
acaaaaacaaagaaaaaaaaaaacccttagccaacacaaccatcatctccacctctgctattcagcaatcagcattcactggtcaaactgctctgaagcagctcaatgagttcgtccgcaagaccggtggcgcggcaaaggtcgcactaacatgcgccgcaccgtcaagactgctcctcagagcatttggtatggccctgaccgtcccaagtacttgggtccattctcggagcagattccatca

SEQ ID NO: 18345 - DNA, 242 bp, Glycine max
  Clone ID: 700958703H1
cgaaacagacagagtggaagattcaaaacgagtacgtacgcgtcggttcatggtttcatcatcttcactgataataacaccaacagaatcgcacaactcaaccgtatctccacgctttctcaattgcgtcttcctgccactacttctacaaaacaacaaaaacaatctttgttttgtttcttcatttgtttttcctccaccaccttctgaggtcaccttgaaagtgatttcattggaagcaa

SEQ ID NO: 18346 - DNA, 206 bp, Glycine max
  Clone ID: 700958705H1
gtcttccaaatcaccaaaagctggaataatagccattgcggtcacatcataagcctcaaaccttgcctccccacattgaacgatagttgaattgattggtgttcatgaaatcaaattccttctggcaacaagaaaacgaatcataagcaccagccacctcatcctttttttaacaaatggaaaaatcattatgctccacacaacat

SEQ ID NO: 18347 - DNA, 249 bp, Glycine max
  Clone ID: 700958708H1
catagagatggcaaagctatttttgaaacaggcaaagcaatacgcagatgcaagaccaagctatcctccacaactcttccaattcattgcttccaagactccctctcactacctcgcttgggacgtcggcactgggacggccaagctgccaaatctttagctgcaatatacaagaatgtgatagccacagatgctagtgacaaacaacttgaatttgcagccaagctcccaaatgtgagataccaacac

SEQ ID NO: 18348 - DNA, 249 bp, Glycine max
  Clone ID: 700958709H1
ctcaaaccccaatcgttactcagtattcttcttcttgttcttgtttctgtttcgtcattttttatcttatgttccttgaatcaattgtgatgcttagaatttgttgcacttgcacgcgttgacggacaatgaagctcctgtgcgttacttgattgttattttgaccttcatctgcaccttggtttgctacatcgaacgagttgggttttccatcgcgtacacagttgctgctgacggtgccggagtgaa

SEQ ID NO: 18349 - DNA, 249 bp, Glycine max
  Clone ID: 700958711H1
gtcatgctttccttgtttgatggaaaaacaatttatggcatagatgcggataccatcatcaaatccaatttactgacaataatttcaggaggaactgaatcaatcactactactcttacatgggcagtatgtttgatatgagaaatcctattgtattggaaaaagttatagcagaacttgacttccaagttggaaaagagagatgtataactgagtctgatataagtcagttaacataccttcaagctg

SEQ ID NO: 18350 - DNA, 247 bp, Glycine max
  Clone ID: 700958713H1
cttatcttagctaccccatcacaacaaccacgttactatttctcatactctattaggcaaaaacaccaccaaatgggagaggaaaaggagcagcctaagaatgacaccgagaaaaagcccgaggaggtagcccccagaaagacgacggacccatccctgtcgtttacaaactcgacttgcattgcgagggatgcgtcaagaagatcaaacgcacctgtcgccacttcgaaggtgtggaaaccgttaa

SEQ ID NO: 18351 - DNA, 244 bp, Glycine max
  Clone ID: 700958714H1
aagcgaattagcgaagaagcataagatcgtcgatggatagtctcaagttcgcatctttgacgctgcctccttgttctcgacgctctgggatgctaggaaagaggttgaattcccctttacttattattgattcttcgcacagttttgctattgcaagactgatcttgctgccgcatcatcaagtattccactgccaaatatgagtttttcttgtagattttcaccaagtgtagcagcagaaaca

SEQ ID NO: 18352 - DNA, 249 bp, Glycine max
  Clone ID: 700958716H1
caagagcacctgtttcgcgattggcctgctcccggcgttgacgacgaccacaaaaatgcgttcttcgaccagctgactcgactagattcgagttaccctggcggtctggaagcatacatcacaaatgctaaacggctcttggctgattctaaggctggcagaaaccctttcgatggcttcacaccttccgttccaacgggtgagactttggcgtttggtgatgagaactacatcaaatttgaggaagca

SEQ ID NO: 18353 - DNA, 243 bp, Glycine max
  Clone ID: 700958717H1
cattgttttactgtcagtagctgagtccaaaaccattgatttaaaaaagaatatagaacagagaggaagagagacaaatgggtttgggaatgagaagagagtagaaacaaccgagagaaacacatagaaaaggaggcatagccaacctattcaaaccatgatgcaaggctgtgaggttgatgccattggcataaactacacgatccacacacacaaatcgacgctaccttttaaaatcttcag

SEQ ID NO: 18354 - DNA, 255 bp, Glycine max
  Clone ID: 700958671H1
tggagagaaatcgaaagacatcaggttccaagtctgatggatctgcaagacggatgaaggaagttgcatgtcccatttgcactgtccatctgcaggttcaggtgcctagctcgggttcagagacaattgagtgtgagtttgccagcacccatttcttgtgagcgctcattgagttcagataaacatgaatacggaagcggtgtctacgtgtttcataagtttaaaatgcatttgttctactgatctatctcttgc

SEQ ID NO: 18355 - DNA, 263 bp, Glycine max
  Clone ID: 700958616H1
tcgattccaaaagctgcttcctctcataaattctctttcaacgcataatcattccatttagttatcatctgtgacaccatcacactgcgatcatcatcctcattcctactttgcacacccttatgacaatgatgatgtcatgacttagattcattggtcacagtcacagactctgaagaagaaaaacaacagctttgaattgattacaatacaaccttaaacgatgtcgttgaaccgtggtggaggaggagaagaagatgaac

SEQ ID NO: 18356 - DNA, 258 bp, Glycine max
  Clone ID: 700958620H1
gatcgttggactgacgggtggaatagcgtctggaaagagcaccgtttccaatctgttcaagtcccatgatgtgcccattgtagatgctgacgttgtcgctcgcgaggtgttaatgaaagggagtggtggttggaagaaatcgttgcagcttttgtggacgaaattcttcttgaaaatggagaagtcaatagacccaggcttggccaaattgtcttctccgatccggataagcgtcaatttctcaaccgattgctagct

SEQ ID NO: 18357 - DNA, 258 bp, Glycine max
  Clone ID: 700958624H1
ctcgagccgtttgtcggaaaccaaaccccgaccaacctctctcccccaccttcgcgttctgcttcagctgagagtggttgggctctgcaaaaattagctgcatgagctggtttgggaaactccgtttattctccaatttaatccctttcacttcattacttctttgttaatttttaccctccatttttcaccccaatcgcgcttctccctccaacccctgttattgatccacgctaaaaccaatctcaatcgtaattt

SEQ ID NO: 18358 - DNA, 254 bp, Glycine max
  Clone ID: 700958626H1
gcatcctagtgatgacagaagacagtttcaaggtagcagggaaaggggatggttttctggcagccgagacttgaataggtcaacgtcaagagagagatggtgaacagcagttttgtgtggattaagagttatcttaacttttgatgaccagaacctaatactactattttattacttgtcttttctaatcgttttgttcattttactccaggcaattggagcaacaatcattgagtactggcactaaaactttt

SEQ ID NO: 18359 - DNA, 254 bp, Glycine max
  Clone ID: 700958627H1
ggcaaacagaaacaccctttctagcattgcgatttgatctctccaccttggtgaaagccttgtgaaacataaggcttttacagaaggtggaattttgactagaagggatgtttggctgttgagtttatggagggtcagctctttgttgaatagtgtttgtgttgcctttatctgcaacttttaattgaaccaatcctaccctttttatgaacatatgaaaagatcggttttttgtggttcctccactcattgtt

SEQ ID NO: 18360 - DNA, 254 bp, Glycine max
  Clone ID: 700958628H1
actgatgctaatccagttaagaagtctattgttagtcttggaaagtctccttcatacaaggaagtggccttagctcctccagggacaatctctaagtttcaggtctaacatcctcaaagtctgatttctgttagcatgagcatgatggtggaaaacatgaagaggaagatattgaagctgatagaaatgttaatgttgatccaaccccgacagaggtaaatgatatggttaaagagaagaatgatgattcttta

SEQ ID NO: 18361 - DNA, 258 bp, Glycine max
  Clone ID: 700958630H1
tctttctgtctctctccattgcaccttcccttcttccccttcttcttcttttctgtcatttgtgagattccttcacttgttttctctattccattggagtgtacagattcctagctaaaacacccagatgtcaatctcgtaattctatttgatttgtgggtgtttctgtgaaaaaaagaattttttttaaggactgtcaaacccaaaactttttttttgggtcttttggtttctgcttctttcatttttgcaaactgg

SEQ ID NO: 18362 - DNA, 259 bp, Glycine max
  Clone ID: 700958631H1
gtggattttatccatgctaaagcaaaacacctgactctgaacgccgtcgtttcaccgtctctcgttgatgttcacccttgctttaaggaggagtttttcgcttacgacatgacaatctcctacgccggccacaacaccccctcgccgccgtccaggtgacggaactcgccgacggcgtcttcgtcggctgcaccgtcaaccactccgtcaccgacggcacctcgttctggcacttcttcaacacgttcgccgccgtcac

SEQ ID NO: 18363 - DNA, 268 bp, Glycine max
  Clone ID: 700958633H1
gtgacacagaaattaagctagagcttcatagtttcttcttcttttctcaccttccttctctcccttcagacaaagggacaaaaaatcagtgtgtgagagagagagagagaaattccaaaaccatgtcccacagtcatctaagttcgcctttgggattctaggtaacattgcctccttcgtgtgctttctggcaccactaccaacattttatagagtttgtaagaagaaatcaaccgaagggttccaatcaattccatatgtggctgca

SEQ ID NO: 18364 - DNA, 262 bp, Glycine max
  Clone ID: 700958634H1
cataaataccgcggacacacattggatagggggcagagcttgaattgaatcatctcccacacccatcatccattggcatctccgatgagatgttcctttattaggcctatcgtgggcttttatttgttgggctctaagacttacctacgtgggcttttgttataggcccacagaagccggcccatggtgtaaggtgaaagccgtaattcaactttctcaggggtgggtggatgggtgtttgtttcaattcgattgcttctct

SEQ ID NO: 18365 - DNA, 259 bp, Glycine max
  Clone ID: 700958639H1
ctctgccttgctcatttacacacctctccaacctttcactttcagctttatttgaatccctctctctcctttccaaatggccagcgttgaggttgcacatcaaacaccaacaacagttccagaaaatgaaacaaccgagtaatcaagacccaggaaacaaccccggaaccagtaccagccactgaggctcctgcaacagaacaagcagcagctgaggttcctgctcaagaagaacaacaagcaactgaggttcctgccc

SEQ ID NO: 18366 - DNA, 261 bp, Glycine max
  Clone ID: 700958640H1
gagaccaagtaaggtataccatttgagaatggcttcttgtgtagcatccatgtcttctaccatcctcatcctaattgccatctgcacactgtcctcacttctgtcagctgcatctgcagcaacagaggagggacgaacaagcccttcaaaagggtctatgcctttggagactctttcacagacactggcaacaccaaaaatgccgaaggtccaagtggctttggtcatgtttcaaactctccctacggcaccactttcttc

SEQ ID NO: 18367 - DNA, 252 bp, Glycine max
  Clone ID: 700958641H1
ctcgagccgttatgatcgatgtttatgtgtgcatgtatgttcattttctttcgagggatatgatgtattatgcgtctcttatgctgagttacttgtcgctgtatggagatctgagtgagtgacctttcaccatgagatgaaaccatcgacgtgggacctgtcaagaaaatcaaatctcgagagatacaggtgttgccagcggaaatagatctggaagtatcagaggtgatgaagttttgttccgagatggca

SEQ ID NO: 18368 - DNA, 253 bp, Glycine max
  Clone ID: 700958642H1
aaaaaacacagttcagcccctagggttcagttggggtttagggttctctcatcacatcggtgttatcactgtcacggcgtgagcgcatctcatcgttgagtataataatggattcggacactgaagaaacaaaaccaagcatcccaagaaggagaagaaaaagaagaacaagaagaaagaggttgaggttgtccaacctcaatctgaacagattgaggttgaggtcgaggttgtccgtgagcaccccaataaa

SEQ ID NO: 18369 - DNA, 251 bp, Glycine max
  Clone ID: 700958643H1
ctttgaggaaactctcattgtgcaattataggattcgtagtgccttgaaatcatctggacttggacttgtgctcttgtagtttgatactattcagttttggtttcactatgtaattggtaaaaccattcatttgtttgttttattagcttgttgtttcaacattatttcttgttcctttcaaatattggcaattaacatattaggttttcagggtatgtgagagcccatcttatggcagactttctgctaa

SEQ ID NO: 18370 - DNA, 253 bp, Glycine max
  Clone ID: 700958644H1
gtctggtgcataaacctcaacaacacactcttcaattttctagggtttgagttttgctccctttttcttcgccttctccaatggccgcttcctcgctcctgagatccgcgcttctcgctccttcctcctgcgatgccccaaggtatataccaatgcctcaagttctaatttaaaatccaagggattacatagcagcatttttggtacttcaattcaatgtgactccttagtcttacaaaattgcaatggtcgt

SEQ ID NO: 18371 - DNA, 193 bp, Glycine max
  Clone ID: 700958649H1
cgcaaaacgcctatacttagtcctccaccacttgaagacgttggttataaacttgctatttatccaatttccttgattggggtttacatacgagcaatgcaggatgcactcactgctattaaaggaggcgctgttcctcctcgggaagcatgccatcttttgaagacatcaaggacatcgtaggtttcaactc

SEQ ID NO: 18372 - DNA, 253 bp, Glycine max
  Clone ID: 700958656H1
gtgccccttctgtaagtttgactgtggcattgttggtggcttgcgtgagaataagaagattttcttggccttggatggtaatgtgctcccagttgtgtttgagagagcataataaatgtgtatcttcaattaattgtgtttgtgttgtgtgcttgaaatttcttttcctgtaatgttggctaataattggagctaccgtatgtcgatgtataagaccaaggaaagatatacatgtctcttttttattttatta

SEQ ID NO: 18373 - DNA, 252 bp, Glycine max
  Clone ID: 700958657H1
gcaggtctggaagggccaaggatcaagaaagtggaaacatgcccagagtgatggtttctttgttcaatttgagtcaccttccctgcgaaagttgtggtttatacccagttcgaatgaaaagggacagacctggtgcaggtttctctcccacttttactcgcaacacttatttactgaatataagttttgtagtttatggagggtgatattgcgaggattgattgttcttttatcaaaatgaaaaacaaggag

SEQ ID NO: 18374 - DNA, 250 bp, Glycine max
  Clone ID: 700958658H1
caaaaacaaagtttcatactttacgacacccttttctgcaactgatgatcgaaggaagctgaaacagtgaaaaacagcaacaacgaccaccctgtctttgttttttgtttgttgagttgaaactttagagaaatgaatagtgatatggaggcaaagggtgtgcggttcttagcgtatcaatcaatattttcgagcgttggatctggggacttcgatggggtgaagaaactggtggaggaagtgaagaagg

SEQ ID NO: 18375 - DNA, 238 bp, Glycine max
  Clone ID: 700958661H1
gtcacttttatacaaaatcagttagtgaatgatgaggtgctttctaccgtgctttcgtacttctaaaccggggaaccactaccgtgccgccgatgaagcccaaaaccatgtgggagaaggagctgttgaagactcattgattccatagcagagtcaaagtaagcaatccattcattcctgtgagtattttgagaatatatatttattatcctgtcatttacgctttcagaacaacaaa

SEQ ID NO: 18376 - DNA, 262 bp, Glycine max
  Clone ID: 700958665H1
caaagggatttttagaagttagtttttcccttgctggaaattcttgttgagaaccccagcaaacagccaaccccaatatcttctatttgacctttcctattttcaaggtttcacttgtggttcgagttcaatttgcaattaattgataagtttctgttatctgctattgaggatgactaacggttttgtaatacaggaagtttagacgtggttcagcgaacacattaaaaaaatcgtgtttttattttatatttatactgta

SEQ ID NO: 18377 - DNA, 255 bp, Glycine max
  Clone ID: 700958666H1
acagggcatgaatctagtgtggatcgtcttatgaagcagatcataaatttcctgtctgatattgctgatgtcttcaaaattgttgttgttgaagcaataagatcattgtgcctgcagtatcctttaaaatatcgatctcgatgaacttcctgagtaatattcttcgggaagaatggggttttgattaccagaaggccattgtagcttcaattgtgattctcattatagatatccctgatgcacaggtcatggggt

SEQ ID NO: 18378 - DNA, 253 bp, Glycine max
  Clone ID: 700958668H1
ggaaggttgcttgtattggtgcctggcatcctgcaagagtttcattcactgttgccagggctggtcagaatggataccaccaccgaactgagttgaacaagaaggtttacaagcttggcaaagctggagatgaactcactctgctcttactgagtttgataggtaagtgttttgttgattatggttttgtgcaataaatttagcaggaagtattgtgtttgtaagtcaaactaacccctctacttgttttctg

SEQ ID NO: 18379 - DNA, 261 bp, Glycine max
  Clone ID: 700958615H1
ctcagacacacacacacaacgcagtgagagagagtgagggtttctattttaacgttttcgttgttattcctttacagctcaacctgcatttctctctcacacactcgcatctcagatcgaaatcgaggtcactgagtgagagtgtttacgttattctgcgctgttgatgttcatacaaactagatagctacatggtggagagagacatttttctcatatgacttctattagctatattattattgagcggtgttgctatgg

SEQ ID NO: 18380 - DNA, 229 bp, Glycine max
  Clone ID: 700958576H1
aaaagaaagaatatcttttatgtatccaccaaatttatcaacttttcataaaatgatggaaaccaaattttatctcttcacaaaagataaaatttcctatgatgaattgtctaattattggagctatactaatgaagaaaaaagaaacaaattgagcaatgaatttgtaaatagggcaaaagtaatggataaggaattaatttctctggatatattagaaaaccgaatt

SEQ ID NO: 18381 - DNA, 225 bp, Glycine max
  Clone ID: 700958577H1
ctcactcactagcttctgctctgttctcaccaatggcatcaacaatatcagcaatggccatgatcaacgccaaatgcgtcaacccaaagttccccagtcccaccaagctcgcaccatcgtaaccctcccttcagatcaaccgtccaaagggcctcatatcctcacccgaaagcactaaactttcccccgcgacagctatcgcaggagcaatattcacaaccctcg

SEQ ID NO: 18382 - DNA, 75 bp, Glycine max
  Clone ID: 700958578H1
actttttccttattcaccaaaacggcgtcgttttgatttggggggaaacagcacaacacgtcgaactaccctccg

SEQ ID NO: 18383 - DNA, 129 bp, Glycine max
  Clone ID: 700958579H1
ccctagggctttgagaaaaccacattgcccgaaggcagataagcaaacgcagggaagaaaaaaagataaaagagtttcataataatcataagctgttagagatgaagaatggactcgacaccacccatg

SEQ ID NO: 18384 - DNA, 238 bp, Glycine max
  Clone ID: 700958580H1
atgctgctgtcagatctccaaacactgatggcatcaacccagattctatgcacgaatgtgagaattgaaggtggcgaggtagtttctggggatgactgtgtggcggttaagagtggatgggatgagtatggcataaaatttgggtggcccaccaaacagctagtgctaagaaggctaacatgcatctcaccatacagtgcaaccattgccttgggaagtgagatgtcaggtggaatcc

SEQ ID NO: 18385 - DNA, 269 bp, Glycine max
  Clone ID: 700958581H1
tacgtaatctccgcgttcggctcctcggaatttcgctcgagaagtgctatctttactttatgtcccatggaaggtccttagttttctctctcttcatctcatagtttcactctcactcttcttcttcttcttcttcatcctttctgatctgtgctgttttttcagggtacaacaaaatttggtgctttcggttaaactgtgatgtctccgccagtgctgagcataggggatgacgtctgttatagcaatgtcacttcgttagtgtcctc

SEQ ID NO: 18386 - DNA, 208 bp, Glycine max
  Clone ID: 700958583H1
gttgaagaaagtggcgatgatgccgtaccccaaaaacacgaacgaggaagccaaagccaacaaagccagaaaacccaaaccaccaccgagtttcgtttctcgtttcaccaccactttctcctcgatggcgcgaaaactccttctgaagcaaaccctagctacgcactttctcttcttcgtgctttatgcaatcttcaacgccttcttc

SEQ ID NO: 18387 - DNA, 230 bp, Glycine max
  unsure (1)..(230): unsure at all n locations
  Clone ID: 700958584H1
cagtccccaaaagcgaaaggcntcttccagtgaacaaccgggccgttgtcgccgacaatggcggccacgccaccccctccgtctttctcgcttcattcaaacaaaccctctcactctcactctctgcttcgcctctcttccaacgaaaacagaacctttttctctttcaattcgaatctgaggtgcgagatcaaaggcttcgagagccaccgtggctggaccatcgagcg

SEQ ID NO: 18388 - DNA, 232 bp, Glycine max
  Clone ID: 700958585H1
tgatatcactcaaaaaaaacaaaaacagaaacaaaagatggttcatcagaggcaaaacaacatccatgttcttgttcttccataccctgcccaaggccacatcaacccccttgcccaattcgcaaaaagattagcttcaaagggtgtcaaagccacagttgccaccacccactacactgccaactccatcaatgcacccaacatcacggtcgaagccatctccgatggtttc

SEQ ID NO: 18389 - DNA, 228 bp, Glycine max
  Clone ID: 700958587H1
atttatattagatgctgagttgcttagccggaatccatcgccgttaatgttaacattttgcaaatatgtctctctctctttggggctgcttgcatatatttaggaaggataacagaaggatgtagattttgtatcatagctattttcccaagtattttgccagcaagctttagaattagaagcttggagcatattttgattgatttgctgcacaggtagctgctgatc

SEQ ID NO: 18390 - DNA, 231 bp, Glycine max
  Clone ID: 700958588H1
gtcgaggagtctttctctctctcccttgaaggctgctgcttctgagaacggcgtcgggaccgccgtggagcctccgccggagcaggccgtgccggtgccggagccttctctgcctccggtggacaatagttctgtggggaccaatgggtctgctgttgcggttgagagtgaggtggttaaggttcaaagtagtttcgtggatccgaggtgggttgcaggaacatgggattt

SEQ ID NO: 18391 - DNA, 225 bp, Glycine max
  Clone ID: 700958589H1
caaggcgcttggagtggataccattcccgtactcgttggccctgttacatacttgttgctctccaagcctgccaagggagtcgagaaatccttttctctcctctctctccttcccaaggttcttgctgtctacaaggaagttattgctgaccttaaggcagctggtgcttcatggattcaatttgatgagcctacccttgtcttggaccttgaatctcacaagtt

SEQ ID NO: 18392 - DNA, 229 bp, Glycine max
  Clone ID: 700958590H1
aatccatcatccaaacctttccgatccaatgacctctaaactaattgcttccaatctccgtcaccaaatcacaaaatcagctcaaaaccttcgccgccagcttctttccacggcggcggcggtggccggtgcctgaacacgatgggaacaactccaactcgtcgggaatgacgatgaagggcgttcgaatctccggaagacccctttacctggacgtgcaggcaacatc

SEQ ID NO: 18393 - DNA, 223 bp, Glycine max
  Clone ID: 700958591H1
caagtgataggttgcaaatatgggatggtggggagagtgatgctagaactccaactatggggagtgatttggatgaagatttgatggctttacgtgtagatgatggtagtgaaagtttgactcaactccaacctctgaaagcacccaagaaatcaaagaggcagggagagaccatatgcaaaggacacaaaaattatgagcttatgcttaatttgcagctggg

SEQ ID NO: 18394 - DNA, 70 bp, Glycine max
  Clone ID: 700958593H1
ctccatatccccccctagcttcagagcagctaaaggggaggaataataataagcctatattctaaggccg

SEQ ID NO: 18395 - DNA, 228 bp, Glycine max
  Clone ID: 700958594H1
ttaaacgatggcaggaggagcttatgtagattcgggaaatgcaaagcaatttgatgggaaggtcacggcattcgtattggttacatgctttgtggcagccatgggaggcttactcttcggttatgatcttggaataaccggaggagtgacttctatggaaccatttctcatcaaattctttcccggtgtttataaacaaatgcaagatgatgttggccatagaagcca

SEQ ID NO: 18396 - DNA, 236 bp, Glycine max
  Clone ID: 700958596H1
cttgtcctgcttttccatccatttatgtgacaaaggaaaaattgcctgagctggttcaatcactatggaatcctgcaattgtattgacccacaagtgccagctgatgacttattgatgaaataccaatatatctctgatttcttcattgcccttgcttatttctcaatccctttggagcttatctactttgttaagaaatcagcagtatttccatatagatgggtccttgttcagt

SEQ ID NO: 18397 - DNA, 272 bp, Glycine max
  Clone ID: 700958601H1
ctctcatttttttaggctcataaatcttttttatgggtttcagggtcactactactctgtctctgctctccctgttttggctcttgtccctgcaccaagcaagagctgcaaagttccacaatgtgagtggcttgagagggaaaaagcagttgtagcaaatgggtgcaatttgttcctgggaagttgggtggttgacacgtcttatcctctctatgactcttcaacatgccccttcattgatcccgagtttgattgccaaaagtatggaagac

SEQ ID NO: 18398 - DNA, 265 bp, Glycine max
  Clone ID: 700958603H1
gtttagttatctactcttttctgcatgtttgttctctcaacgactcctccgcgaaagagtattattcaatattttggttcggttgaatcccggggttgaagcgttgcagacatcacggctattctaagagtgtctcgctccctattcatgtccgatctgtacgacggatgacgggtagttgcgtaactgccgttaacccttcgccgcacggtgggcgtggtgctttgccttctgaaggtggtagcccttcagacttgctcttcct

SEQ ID NO: 18399 - DNA, 264 bp, Glycine max
  Clone ID: 700958604H1
tcaacacctcctccctcactcactcatcaatggcatcaacaatatcagcaatggccatgatcaacgccaaatgcgtcaacccaaagttccccaaccccaccaagctcgtaccatcaaaaccttcccttcaggtcaaccttccaagggcctaatagcctcacccgaaaacaccaaactttccactgcgacagaatcgcaggagcaatattcacaaccctcggaacctgcgacgccgctttcgccgttcaacaaatagccgacata

SEQ ID NO: 18400 - DNA, 271 bp, Glycine max
  Clone ID: 700958605H1
cagaattctgctcaattgtgtattggcacagataagtggatgattccgatgctattagagacatattctggacacatccagacgccattaaacttctgggtgctttcaacactgtattggtcattgatagtaacgataaaaccactaggtatcagtaccactacttgagatcgttggagttacttcaaccgagttaacattctctgctgcatttgcttttgtggagtctgagcgagctgaaaattttacttgtgcactaaaaagattaaga

SEQ ID NO: 18401 - DNA, 260 bp, Glycine max
  Clone ID: 700958608H1
ttctctttcgaggaatggggtggtggagaaggtggcaaatgacaattcaagtgaataatggagaacaactacaacaaccacaacctcatcgtccctaatcctcaagattcactgtggatgatgaatttgaggactggggaacaatggattctggatcttatccggagcgtccaggggagccggattgttcatattacatgagaacaggcctttgtagatttggtgcaacgtgtcgatttaatcatcctcctaacaggaag

SEQ ID NO: 18402 - DNA, 259 bp, Glycine max
  Clone ID: 700958609H1
gatggtaagagtggaacgaataaggcgtatgcaaagtgtgtttaacagagaaaggaataagtataaaagaagctatgagagctggaggggaagtggtcctggtgcatatcatcagcatttccaaagagaagattggtgcggaaggctgatacatcctttagagacaagaggactaattatcaagaaactccaagagagagtggaaactatgcattatcacatcattactcagttttgggtctcgacaggtactcacaga

SEQ ID NO: 18403 - DNA, 230 bp, Glycine max
  Clone ID: 700958574H1
cgagtttcgtttaatatttgttcctcacagatcttaacactttaaagttcaatctccccattttccatatcatacgctaacaaattaagaatatataaaagaagatgaggtcttcaatcatatttctttgcattctggtgtatctgaacgtgttagctgcggaattgtcagcttacgacgttcttgagaaatacgatctcccagttgggcttcttccaaaaggtgccaca

SEQ ID NO: 18404 - DNA, 255 bp, Glycine max
  Clone ID: 700958610H1
cgtaaaatcactattgctcctctggctattggaaatatcagatcatcgaaccaaccaaacgaaggcagaaacaggcaaagagctcatagaaattctcgtcctcttcctacataagtcttctcttatcataaacgcgtgtgctcggataaggttgtgctgcggtgattcactcgtactttgcttaatatggcggttgagaagttgagcattgcaaaagatgtgactgaattaattggcaaaactccattggtatat

SEQ ID NO: 18405 - DNA, 257 bp, Glycine max
  Clone ID: 700958612H1
cactcgtcttgtctcaaacaaatgcaacaaccacttattcttatagttactatggactaggaacaagatttgattctcattctgatatcagattcagatttttttaaaagagactcacgctggcggtgaagaacgttctgcggcggcggcggaggaggaggaacaggttaacatgactctgatttccaattccgacgtcgaaagccacgccgacgtccaaatccccgacaccgcgcatcaaattagcaccgattcat

SEQ ID NO: 18406 - DNA, 257 bp, Glycine max
  Clone ID: 700958613H1
aactactactcacactcactgcagatctcaatccatggctaccattgttagcatcaaggcccgccagatctttgacagtcgtggcaatccaaccgtcgaggtggatttgacatgctccgatggtacttttgctagagcgctgttccaagtggtgcatccactgggatttatgaggcccttgaattgagagatggaggatctgactaccttggaaagggtgtatcaaaggctgttgacaatgtgaacaccattattgc

SEQ ID NO: 18407 - DNA, 256 bp, Glycine max
  Clone ID: 700958614H1
atctcctgctacattcagagttcttcccctaaactggactgttgggatggttggaatactagcaggcactgttgaggacgcattcattgtttatgcagctatcagtggtgagattccatatcataaaaccttcagtgtacgaccaagataaatcttccacggctgagcttgacaaagtccatatctgacatcaagttagcaaaatacgggaagtggtttgatgattgcagtgatgatgtcagaatatgctgcacca

SEQ ID NO: 18408 - DNA, 239 bp, Glycine max
  Clone ID: 700958522H1
caaagagacaattcaacttaagagatcaatatggccaccaccactacccagcctccctctaatatctgttttttccttctgttgttgcttctagcacactttcatttgggcataagccaacttgagctgaattactactctaaaagctgcccaaaagctgaagagatcatcaaggaacaagtcacacaacagtataaccagcatggaaacactgccgtttcgtgggtcagaaatctctt

SEQ ID NO: 18409 - DNA, 239 bp, Glycine max
  Clone ID: 700958525H1
agaacctcctcctcacagctccaaagctacaagcctcctccgacctccccgaaggcaccaactggcgctacagcgagttcttgaacgccgtcaagaagggtaaagtcgagcgagtcaggttcagcaaagacggttccgccctccagctaaccgccattgacggccgtcgcgcctccgttattgtccccaatgacccggacctcatcgacatcctcgccatgaacggcgtcgacatttcc

SEQ ID NO: 18410 - DNA, 236 bp, Glycine max
  Clone ID: 700958526H1
gaaaaagactaaggaaaggaacatagcattgctcttaatatcctaactcctagattcccatctctggcttctcaccttgcataatggctacaaaagtgaaacgcaagactttttcaattgctgcagcaacatggatggtcttgtgtatcatcactatgatctgcaatgtcagtttagcagatagaattttgaaagaaaaagaattaggaaatgatgttccgaaagagagacaagga

SEQ ID NO: 18411 - DNA, 236 bp, Glycine max
  Clone ID: 700958527H1
tggttctgcagataaaatacttgagattatttggtacttaagttaacacagacagtgactgtgaatgatggatgttgctgaggttgaggaaaatctgtttgccgcaagtgatgccaagttacatggacagatgtgcaagactctttctataatctattgcaaagtactgtctgtatttccttctttagaagctgctaggcctaggagtaaatctggtattcaggcattatgttcat

SEQ ID NO: 18412 - DNA, 238 bp, Glycine max
  Clone ID: 700958530H1
gggagagggatgtgaaaaatgagtttgtaagacagaaaagaaggaacgtaagaagggaaattcaattcccttcttgttgttcccctagcacggccaattgatcttgcggtgaggggcaataattaaaacacatgaagcaaaaatcttaactcaatacaacgcaacacatgcatgtgagtttttgccaacaaacgtgatcattgccgcaacaacgaagactcaatattatcataggcca

SEQ ID NO: 18413 - DNA, 242 bp, Glycine max
  Clone ID: 700958533H1
caatcaatcttctgagagtgtttggttgaaagtagcaaagatgtttcctttcgggcaaaagggtcaaaatataaaggggactatggtggttatgcagaagaatgtgttggatatcaacagcatcaccagtgttggagggatcgttgaccaaagcttaggcttcataggcagtgcagtcgatgcacttacttttgcagccaccaaaatctccatccagttgattagtgctaccaaggctgatg

SEQ ID NO: 18414 - DNA, 240 bp, Glycine max
  Clone ID: 700958534H1
gaattttatcagcaattattgaaagaattttttgagacagttgatccttcatcgtctgagaaagcattttatgctttgaagagaatgcaaccaaagacaagaaaaattgttgatcgtcgtgcctcaaaaagtcggaagataaggtataatgttcacgaaaagatagtaaattttatggcaccactacctgccaatattcctcctatggctccgaagttgtttgagaatctgtttggattg

SEQ ID NO: 18415 - DNA, 77 bp, Glycine max
  Clone ID: 700958535H1
accatttcttcgtctggcgttgtagacgttcacagcatcatcctctgctctagaagatggttcctaccataggtggt

SEQ ID NO: 18416 - DNA, 237 bp, Glycine max
  Clone ID: 700958537H1
agctaatctcccctgcatcctccactggcgagaacgtgcagcacaacgccaccaccacttccaaggcggcctcatcagattccgagaattttgccgagtcagtgatcaaggggccaaagcaggcctctggggagcacaagaacaaaaggaagatcaaggtgactttctcatcaggtcaagagcagcagaatgcaccatcacaggcagttaggaaatgcttgcactgtgagataacca

SEQ ID NO: 18417 - DNA, 237 bp, Glycine max
  Clone ID: 700958538H1
ctcgagccgctccgcagcagccacacttcttcgccgtttcagctgaagagccatccgcaggtaagcaatggttaagcataataatgttatccccaatgggcacttccggaaacactggcaaaactatgtgaagacttggtttaatcaaccagcccgaaagaccagaagacggttggctcggcagaatcaggctgtcaagattttccccaggcctactgctggatctctcaggcctat

SEQ ID NO: 18418 - DNA, 235 bp, Glycine max
  Clone ID: 700958539H1
ccatccacccgtggtgatccacatggttaggaggctcatgcctcttgtatgttgtcgagcgagttggaacccggtacacttttctcattcgtgagccactctgtgcactaacacgtgatgcacgtgccgtcgactgggctacagtgtcgcttgagttacaccttggggttgagaaccttctggagcttcctctgctgataggagtagccacatctgctggcccatttgctcttac

SEQ ID NO: 18419 - DNA, 238 bp, Glycine max
  Clone ID: 700958540H1
gaaccttaaattaattatagaaccatgtttgcaactaccaattcctccactttgtcacctttattctctttcagtagaacaacagcaacctctcacccttccaaacccacattctggaatttggttccaatgaaacaatcttcttctccggggcacttggccttagccttagacaatccacgtagaacacttcacgtgtcttgtggctccacatcaccacatgcttcccagagatcat

SEQ ID NO: 18420 - DNA, 235 bp, Glycine max
  Clone ID: 700958541H1
cggagctttgctcaaggtactgatggctgctctcaagcaggacctgggatggtagtggcaaaattggcaataggacagtgaagcaataatcatgtacaggggttgagactgttgcacaatttggtgtagtgtttcttctctttgctttggggctggagttttccctggcaaagttaaaagctgtgggacctgttgctgttcttggagggctacttcaaattatcatttttatgtt

SEQ ID NO: 18421 - DNA, 236 bp, Glycine max
  Clone ID: 700958546H1
ccgcactttaccgcaccctgcgactccgcgtgggtttggcgaaaccttctagaattttcttccatggaggttatcagagttctaacggcggcgttcacggtggcggttcttgtgacggcgcttgccttgtagcgcctccactggtggcactgtcataatccggcgcgaagttgccccctcaacgtgggagagtgtcgctgaagaagttgtttcgggtacggctaagagatttctgg

SEQ ID NO: 18422 - DNA, 182 bp, Glycine max
  Clone ID: 700958547H1
cgtcatcatcatcatcatcatcagcgttgattgaagaagatgccgatcagaagcatcgccatcgtaaggcctgaagaggctactcaccccggaccgttcaaggcggggttggctgagtgcatctccaccgtgatcttcgtgttcgccggttcaggttccggcatcgcctacatcgagctcac

SEQ ID NO: 18423 - DNA, 235 bp, Glycine max
  Clone ID: 700958548H1
atgctcctgtcacatctccaaacactgatggcactggcaccatggagatactgtccaagatgttgaaaattgccgaagtgaaaccctatgtggtgggccagtttcacaatgactcattcacgggcgatgttcgagaacgtgtgatggatcattgcaaaggtcgggcatttgcctcttgcgtgcatcactgcatcagtccatgggctacctggtggctcagaacggcttgcagctg

SEQ ID NO: 18424 - DNA, 238 bp, Glycine max
  Clone ID: 700958549H1
aaagaaatataactaatattctttagaataatcaaaaagaatattaaattcaaataaattttagatagaaaaaagacttaaaaaggaggatttgaaatgcgagatctaaaaacatatctttccgtggcaccagtagtaagtactctatggttcggggctttggcgggtctcttgatagagatcaatcgtttttttccagatgcattgatattcccttttttttcattctagttattga

SEQ ID NO: 18425 - DNA, 234 bp, Glycine max
  Clone ID: 700958550H1
gaagagatttttttttcttttcaatttgaattatttattatctatgaaaagcccttgactgatgcgtcccaaatccaaaattgctatattttctgttcagttctggctagtggctacaaaatctttgtacaaatttctgaacagtttctaggtatggaaactctttcatatgggtcagcaccatgctgccaagttgtgaactcaaagtggaaattagttgaaaatagtttgagt

SEQ ID NO: 18426 - DNA, 234 bp, Glycine max
  Clone ID: 700958552H1
gcaacctagcaatggaggcgattaggaagagtttgattcttatagttggaggaactggttacatagggaagtatatggtgaaggcaagcgtcacgttaggccatccaacttttgtctacactcgccctcttgatgcacaaactccttcctctaaggcacagctttgcaaggagttcaactctatgggggtcacacttgtccatggagaacttgagcatgaccagattctggcag

SEQ ID NO: 18427 - DNA, 233 bp, Glycine max
  Clone ID: 700958555H1
cgccctcttcttgaggttgaccctccaaacacttctgctagctctgatcaaaagatttcagagaagccccttgagcaggaacctaggtttgctgcaagagtcacaattgaggatggtctttgtcttcttcttgatgtggatgatattgatcgttacctacagttgaatcagccacaagatagtggaacacatttaagacgaagaaggcaagtcctgttggaaggactagcaac

SEQ ID NO: 18428 - DNA, 233 bp, Glycine max
  Clone ID: 700958557H1
acgaaatatggcttcaactcatctgcttcccctagcaaccttcttcttacttctctccgcttcttatctccagattgctggggcggaagcacaaccgttgactagtctcaagcttaactctcatattcttcaggagtctactgctaaagagattaatgaaaatcccgaggcaggatgggaggctgctataaatcctcgtttctccaattatacagttgaacaatttaagcgcc

SEQ ID NO: 18429 - DNA, 225 bp, Glycine max
  Clone ID: 700958558H1
agtacttgtgttacttctccttggttgcaccatgtcttgctatttgtatcatcttgtgtaccttcttaagctttgagcaattcccttttacttttatttcactccatgatcatcactcacacatcaaatactattactagctccttgtatgagtgtcattccttctagctaaatctctctcttttggggtatggaattcaacaagttcagaatcagaagctatga

SEQ ID NO: 18430 - DNA, 230 bp, Glycine max
  Clone ID: 700958559H1
atttattggaccgtttaatttgtgattcacattaatttctcaagcaccagagtttttagattcactcttctgaatgtggttgtagtgagagagaaaaaaaagaggccaaaattgtttgtttgtttgtttgttgagtaagggttttgcgttgcgttatggctgaatcatcggcgtgtcttgttcgatccttctcctctcccgcagaaactacttgttacgagggtaacccc

SEQ ID NO: 18431 - DNA, 241 bp, Glycine max
  Clone ID: 700958518H1
aagaagttctaaggaagagggaatatgcagaatacaaggtgctagttgtctatttgcaataacaacatcagcgatccaaccttagtattcttcaacccagagagatttgtaataataaattacaacaacttaaacgatggcaggaggagcttatgtagattcgggaaatgcaaagcaatttgatgggaaggtcacggcattcgtattggttacatgctttgtggcagccatgggaggctta

SEQ ID NO: 18432 - DNA, 233 bp, Glycine max
  Clone ID: 700958562H1
ttcactttcacccttcggttctcgatgtcagcgtttgacaatgttgttggtgggaaattgaagttgaagggaaaagcactggatgtggctggtggagtgaagaagaagaaaaagaagaacaagagaaatcaggaacaacttctgcaagtcgccgaagatgaagtttcagcaggtggaaatacagaacaggccaaagatcctaatgatggagatataaatgatgtgagtgaatt

SEQ ID NO: 18433 - DNA, 231 bp, Glycine max
  Clone ID: 700958571H1
ggctcgaggtactcagctgggataacaagcttgctggtgctcaggttcttctgagtcgtttgaggttgttcttgagtcctgggtatccatatgaagaaattttgaggacctttcacaatcagacaagcataatcatgtgctcctatctaccagttttcacaagctttaacagaaccaaaggtggcttgattcaattaaaccatggtaggcctcagcctctccaatatgtgg

SEQ ID NO: 18434 - DNA, 82 bp, Glycine max
  Clone ID: 700958572H1
gcattccgcaatcgtccagatcggagtgtgaaatctatgagattgtagtgctggtttccttcggaatggctgccataggtca

SEQ ID NO: 18435 - DNA, 229 bp, Glycine max
  Clone ID: 700958573H1
actccgtgccctagcttcttcttcctcctcctcctctgccattgcagcaaggcacacacctcaggctccaacccatttcacgagtgatcggattcgctcgccatcatggggaagaagaagaagagagtttcctcgaaggtgtggtgttattactgcgatcgcgaattcgacgacgagaagatcttggtgcagcatcagaaagccaagcactttaagtgccatgtctgcc

SEQ ID NO: 18436 - DNA, 251 bp, Glycine max
  Clone ID: 700958479H1
ccaaaccccaaaacctctcttcaccttccgccgcctttctttccccaatctccgctctcctccacgacaactccgacgccctcgtccgccacctcccacccaccgccagtttactggaggctatagatgttatgcacgaaggggtgcagaacctggtgataccaatacaaatccagtttgaatctttgaactccaacaacgtgcaccacaatgacaacaccacctactgttggctaactcaagaggacgtg

SEQ ID NO: 18437 - DNA, 75 bp, Glycine max
  Clone ID: 700958480H1
aaaagaagtgcagttcccaaatggcaataatctttctttcaagctccgcaattcttcttccaagtcttgctttct

SEQ ID NO: 18438 - DNA, 248 bp, Glycine max
  Clone ID: 700958481H1
taaatatctcattcccgttgtgcgtttccaaccgatcaccggttaaatggttccggccaccggtgaccggcaacacccccactttgattccggggagcccttaccataaccctaaccactaacaagctcttttcatattcatggatcctccggattctcagtcccaggaacaggaagcgcccaagaagaacggcgtcgtttttgtcattctgcgatggatcctcgcgattctttttcctttcctcctc

SEQ ID NO: 18439 - DNA, 249 bp, Glycine max
  Clone ID: 700958482H1
cccaaatggactcaaagtggcctctgaaacatcaccgagtcccactgcgtcaataggtttatatgtagattgtggttcaatatatgagagtccgataagttttggggctacgcatctgcttgaacgaatggctttcaagaccactagaaaccggagtcactttcgggtagttcgtgaggtagaggcaattggtggcaatgtgcaggcctcagcttctagagagcagatgggttacacttttgatgcttt

SEQ ID NO: 18440 - DNA, 249 bp, Glycine max
  Clone ID: 700958483H1
cttaaaaaccccaaacgcataaaaaacacagagacagtgttcttagcgccgccgttgccctaccatcttcatattattctattgcctttctttcacgtttttctggtttttaagcccttccagtgccctatttacgcttatacccttctggttatgatagcttccattcggcgtcagcagcagagccgaagctcttggcttccacacatactttcggtgccgtcgattgagatacaaagcctccaagcc

SEQ ID NO: 18441 - DNA, 161 bp, Glycine max
  Clone ID: 700958484H1
tgtttcttcgtctttacaagaaaaaggagtaattaactgtgacacgttcactaaaaaaaaatccttttgtagcgaatcatttattaagaaaaataaataaacttaacacaaaagcggaaaaagatatattaataacttggtcaaaagcatctgccattata

SEQ ID NO: 18442 - DNA, 249 bp, Glycine max
  Clone ID: 700958485H1
attttcttgtgtcgaaaaaagagagcgagagcagaagagaagagtgcagcgcaagcttagaagagcaaagtgtgtgatgtggttggacattcagtcccaatcacatggcttcttcttctccttctcctccatcttatctcacacaccttcctcttcatccctctcaccaaggtgagagtgagaagcgcgtggaggacgatgaatcgcgcgttccgattcacatcgtgaccgcggcgacgcaacttcccg

SEQ ID NO: 18443 - DNA, 252 bp, Glycine max
  Clone ID: 700958486H1
tgatgttccatgatgagcagatagcatgattgagatgatagtgttcctcttccttgtcttgcttatatcccttatcttgagcagcagttccaataatagcctccagcttcccccaagcccaccaagcattcctctgctaggtcacctccaccacctcaccccttccctatacaaatccctctacaccctctcatccaagcacggtcccctcctcctcctccgcctcggcccctcccgccgcctcctcctcct

SEQ ID NO: 18444 - DNA, 253 bp, Glycine max
  Clone ID: 700958487H1
gattagtcgaaaatggaagccatttacaatacaaagtacaatttgattgggtgcatcaagaggatgacacagaggaaacaaccatgtctaatgcctggtatgaagtattgtcagttttgcacttgatggcaatgctattactgtcacaggctaatttattacttcttcccagaacatccactgatagtcatcagccaaaagtatcagaagctagcagacgagcttctgttgatatcttcttaaaggcagctgg

SEQ ID NO: 18445 - DNA, 254 bp, Glycine max
  Clone ID: 700958488H1
ccatcatcatcaactacctcaaaattctaagcacaatttctctgagttgttttgtgagataatagcacatagcataacaagggaaggagtattaacaaccgcaaacctgaagagaaaaagagcagcagaagaagaaacaccaacgatgggtgtggattactacaagatcttgcaggttgataggagcgccaaagacgatgacttgaagaaggcttataggaaacttgctatgaaatggcaccctgataagaacc

SEQ ID NO: 18446 - DNA, 244 bp, Glycine max
  Clone ID: 700958489H1
tgttgtgttatgttcagttcgttgcatgcaaaaacgattatgaagacgccaaaacgccactcgccgccgccaaattcttccctgcgagtggagtctgattccggcgaaatcgtcacgaggttcaagaacggtcgccggagaagaattaaaatcaagcgaatgaaatacacttgccagacgaagatccgcgtcaggaatgacgccggcgccggcggcgtgtctcaacttctggcggtggattctg

SEQ ID NO: 18447 - DNA, 247 bp, Glycine max
  Clone ID: 700958490H1
catctcactcccacgagtgacgttaactaaattggacttttgcttttagaaattgtgacagcccgccgtcctgttgagttgaagaaaactgttgcagagcgggttacactcagatgggccttcaggaagtataatgaaggaagtgtggtggaacttgtggatcctttaatggaagaagctgtaaacggagatgttctgatgaaaatgcttatcttggcgtttcaatgtgcagcccccattcgaacag

SEQ ID NO: 18448 - DNA, 249 bp, Glycine max
  Clone ID: 700958491H1
ctttctctctctctctctacaaaacttagctctctttttaattataccttgcattctcttgtattaagatggaagcaactaccatcaccaatgggagccaaaacggttcgttttgcttgtccactactaagggaagtagtgatccgttaaactggggagcggcggcagaggcgatgaaggggagccacctggacgaggtgaagcgcatggtggccgagtaccgcaagccggtggtccggctcggcggag

SEQ ID NO: 18449 - DNA, 252 bp, Glycine max
  Clone ID: 700958492H1
gtgttagatctgtacccgcctagcaattgatttggaaaagtccaagcttcaaagatgaggtattcattctctcatcttcaacttatctttgttcaaatttcttagtttgttcgtacgttttattgtgaaagcaatgttgttgattgtttttcgttgatagctgatgtgtactttgcgtggtcttactgtgtatgatgttaatgagaattgttcggtgaaaattgtgcatttggaaaatctatgttttgtgtt

SEQ ID NO: 18450 - DNA, 254 bp, Glycine max
  Clone ID: 700958493H1
ctcgagccgctcgagccggcagtttggactggggataacactgctgattgggatcacctaagagtttctatcccaatggttttgacccttggtcttactgggatgtcattctctggtgctgatattggtggattttttgggaatcctgaacctgagttattggttcggtggtatcagctaggagcttactatcctttctttagggcccacgcccatcacgacacaaaaagacgcaccccatggttgtttggaga

SEQ ID NO: 18451 - DNA, 253 bp, Glycine max
  Clone ID: 700958494H1
ctcgcaagcaaaaagaaagaatcccaggcgaggagaaagatggaggggaaggagcaggatgtgtcgttgggagcgaacaagttccccgagagacagccgattgggacggcggcgcagagccaagacgacggcaaggactaccaggagccggcgccggcgccgctggttgacccgacggagtttacgtcatggtcgttttacagagcagggatagcagagtttgtggccacttttctgtttctctacatcaccg

SEQ ID NO: 18452 - DNA, 239 bp, Glycine max
  Clone ID: 700958495H1
tgggtagaggagaagatcgagaaggggtcgcagtagccgggggcttcttctggtcctacacagacgaaccccatgccacacgacgtcgtcagatcctctccaaataccctcaaatcaaacaactctttggccccgaccactctgctttcttcaagattagtggagttgttctgcttcagcttgtacgggtgctttacttcatgatgctggctggctgaagatatttttagtagcatact

SEQ ID NO: 18453 - DNA, 255 bp, Glycine max
  Clone ID: 700958502H1
ttcggctcgagggaaaatcggtacaaggtgccatctttgtttgttatacatgaccatggccatgcccctgtttctgatgttccttcttctgcacatagcttgggtggcatcgtcggatctccgacctgggttttactcaaaaacatgtccaaaagcggaactcatagtccgagatgtgatgaagaaggcccttatgagggaacccagaagtgttgcctctgttatgcgcttccagttccatgattgctttgtcaa

SEQ ID NO: 18454 - DNA, 243 bp, Glycine max
  Clone ID: 700958503H1
tgcccgtaaaatacataacaggtgagttggacatggtatacaactcgctgaacttgaaggagtatatccacggcggagggttcaagcaagatgtgccaaatttagaacaagtgattgtgcagaaaggagtggctcacttcaataatcaagaagcagcagaggaaatcgataattacatatacgattttatcaacaagttctgatcttgtccaaaaacgaattcaaccagatataaagtcgcag

SEQ ID NO: 18455 - DNA, 233 bp, Glycine max
  Clone ID: 700958504H1
ataaaatattatttaacaattttaaattaaaaagaaggggaaaagcaaagaaacaaaaacaaggcaaaaacctgagttgcggaggaaagaaacataatctggaattcgagaagctaatcaatcgtttgcggttgctttgttcctcctctcgcagatggttaggggaggaaggtttagcggcaaacgcaatttcaggaaaagggttcggtcaaaggagggaggttctgatgatt

SEQ ID NO: 18456 - DNA, 242 bp, Glycine max
  Clone ID: 700958505H1
ctctctcatcactacctctgcatttttctctcgctctctgccttccatcaccctcgccatttcccttcccaagatagtagaagatggcagacgctgaggatattcaacctcttgtttgtgacaatggaacaggaatggttaaggctggttttgctggagatgatgccccacgtgctgtgtttcccagcattgtaggtcgtcctcgtcacactggtgtgatggttggcatgggccaaaaagat

SEQ ID NO: 18457 - DNA, 241 bp, Glycine max
  Clone ID: 700958506H1
ctctctctctctcttgtatcgtggcaaagtaaaagtctctccctcacgggacagtggttttagctgagctctctctcactgcaatgcaatctctctctggatttgtccttttcttcctctgagcgataatggcgaaagagcttctcctgcaacttcgtctgctgcttcttcttcccgaacaacggtgtcgatttgcacctcctctgccaatgctcaacaacttcgcattctccgctttgtg

SEQ ID NO: 18458 - DNA, 238 bp, Glycine max
  Clone ID: 700958509H1
atcggaacagcgatgggttgtgtaattgctcctctcacattctggatgttttggactgcctttgatattggctcacctgatggcccttacaaagcaccatacgctgttatattcagggaaatggccatacttggtgttcagggattctcagagcttccgaagtactgcctggaaatgtgtggtggtttctttttggcagccttagttatcaaccttctaagggatgtcactcctaaga

SEQ ID NO: 18459 - DNA, 237 bp, Glycine max
  Clone ID: 700958511H1
gatttttccttcccttttctccataaacgaggtgcttcagatttgctcataataggagggaatcgaatcgaatcgaatcgaaaggaaagtgcagaatggatgacatgccgttgccggcgctctttgagcaagcctgcaagatccacgccgcagccaccgattccggcgccgaccaggaggttgtgaagaaggggtgcgaggctctgcatagatgcgaggacatggtcaataatctag

SEQ ID NO: 18460 - DNA, 238 bp, Glycine max
  Clone ID: 700958515H1
ccagtgcatcaaattcaaagatcagcatccccataattgacctcacagtcatccatgatgatcctattttgagagatcatgttgtgggaaaagttagatatgcatgtgagaagtggggcttctttcagattatagccccaagcggcatatgaggtggatatcctttggtatatagttgaggttaatttcactgccactgcctacaaatcgaccaaatagcattgaccctgcattgaaa

SEQ ID NO: 18461 - DNA, 258 bp, Glycine max
  Clone ID: 700958478H1
aaccaaacttgccaaagtcttttatttccgtaatttggaaatatctatgtagttggtttcttaatttaattaaaggtggaatgaaaactctccctcacacgtcacaactttgtatgatagctcaaggtttgtatcttctggctcataaatttcaaggttgtctgcttcagcatgataagggaacaaggaaacacactgtacatggcttagcgttctacgctggtattcatccggaagaagtttggatagaacaagttc

SEQ ID NO: 18462 - DNA, 244 bp, Glycine max
  Clone ID: 700958517H1
tacaaagcaagacgcaagccactcatgaacatcaaaggttatgtactcgcgagcccagctgttgacgggtttcgagagcagaacatgaaagttttatatgcataccaaaggagtcttataccagaagcgctctacaagtcaatgaaagaaaattgtaacggggattatataaacattgatccagaaaacacaaagtgtgtctcagattatagtgtttatgttgagcttgttcgttacataaacg

SEQ ID NO: 18463 - DNA, 261 bp, Glycine max
  Clone ID: 700958445H1
aaaacttttcctcctcttggtaagcataaaaataggaccgggaaggaaaaaagtggtctcacttaaattctcaattttgtctaaattggacaaaaaaaaaagaagaaccacaacttaacttcttgtatggattataaagcaaatgcgaaggaaacaaaaagaatgagaagattgcatctaaaatgacaacatcatccatctcttacacgtttattgtgcaagaatgagaatgagaatgaaacaaaaagaaattcgaagata

SEQ ID NO: 18464 - DNA, 262 bp, Glycine max
  Clone ID: 700958446H1
acttggtcccataccctagaatccatttcatgctttcctcctatgcaccagttatctctgctgagaaggcctaccatgaacagctctcagtggcagaaattaccaacagtgcttttgagccatcgtccatgatggccaagtgtgatcctcgtcacggaaagtacatggcgtgttgcctgatgtaccgtggtgatgttgtgcccaaagatgtaaacgctgctgttgccaccatcaagaccaagaggaccattcagtttgtgga

SEQ ID NO: 18465 - DNA, 235 bp, Glycine max
  Clone ID: 700958447H1
agaatatgcaaagcttccaccagggcctcgtccatttcctatcataggaaacatcttggaacttggcacaaatccacacatagcactcagcgaattctcaaagatttatggacctcttatgacttttaaacttggcagaataaccaccatagttatctcctctcctcaagtagccaaagaagtactacttgaaaatggtcaagtcctttctagcagaacaattccacattcagtc

SEQ ID NO: 18466 - DNA, 197 bp, Glycine max
  Clone ID: 700958449H1
taaaaactgatattcagcaacgatatggctttcgtgtgtactatctgtctgctcagatcccacagatctgcatcttcttattcttcctttccatattgtgtgtgtgaattagaattctgcaagatcagatctctctctgcgagtacatcagatctccgatgtctcagtcatgcgctcaggtggtccacttcgacaac

SEQ ID NO: 18467 - DNA, 169 bp, Glycine max
  Clone ID: 700958451H1
caaaattaagtaccataatttcccttaatttagatgattttcaatccattgaggttgagctgccaaaattaaggatatatattatattgtttaaatatttgatgtaaaatcttttggttacatgtatgtggatatgaaaggaagattgaagacttcaatctcttttgtc

SEQ ID NO: 18468 - DNA, 254 bp, Glycine max
  Clone ID: 700958452H1
tgcaggcggttcgctacgacgcctacgggggaggtcctgccggcctcaagcacgttgaagttgccgttcccagtccaaaggcaaatgaggttttaatcaaactggaagcagttagcattaaccctattgattggaagattcagaagggtcttctccgtcctttatttctccccagaacctttccccacataccttgcactgatgtggctgtagaaatagttgagatcggaactcaagtcaaagatttcaaagtt

SEQ ID NO: 18469 - DNA, 253 bp, Glycine max
  Clone ID: 700958453H1
ctcgagccgggaccttttcatgaatggtgcaaagttcgtcacttcaggctcacccatcaagatgacatacaaaaagggtctcatcatgaagccaagagatggaactcatgtcagcaggttgacacgacatgctggtgccctaaactgcttcgttggcaagccttgttagagaacaacaaacattaatgttgttgttgttgttcgctttttctttttttttttggaaagaaaaaaaaaaccacattgcccagaa

SEQ ID NO: 18470 - DNA, 257 bp, Glycine max
  Clone ID: 700958455H1
agtaaattaactatgaagcctaccctactattatccctttccttcctgcctctctttgctttcctggctctttcagaagatgttgaacaagttgtggacataagtggcaaccccattttcccaggtggcacatattacattatgccatcaacttggggcgctgccggtggtggattgaaactaggccggacaggaaactcaaactgcccagttactgttttgcaagattactcagaaatcttccgtggcacaccagt

SEQ ID NO: 18471 - DNA, 256 bp, Glycine max
  Clone ID: 700958456H1
cccaccattactcagcactgccattcttcaatcacactactggctgtcaccttctcagatcttcacaccgaagagggcatcaaatccctcgatcaattcctttctgggaaaacctatatctctggggatcaattgacaaaggatgatatcaaagtgtatgcagctgttgtggaaaagccaggagactcttttcctaatgctgctaagtggtacgatgccgtctcttctcaacttgctccaagcttccctgggcacg

SEQ ID NO: 18472 - DNA, 192 bp, Glycine max
  Clone ID: 700958457H1
ctgcaatttagcttggcgtcccatgccatgatcgtctttgatttacaattcaatttctttgcaccacagatcaattgattttaacactgtttgacattgtaaatattactactcaaatgattccgagtgcaattcaaaactcaagccttaaacataaaaaaaaaaaaaaaaaaaaaaaaaaaaaaggggggg

SEQ ID NO: 18473 - DNA, 257 bp, Glycine max
  unsure (1)..(257): unsure at all n locations
  Clone ID: 700958458H1
gaatcggtggacgggcgtcgccgccgccatgtggatccagtggagctgcggcgcatcgtacaccttcagcatctactcctccgtgctcaagtccacgcagggctacgaccaatccacgctcgacaccgtccctgtcttcaaggacatcggcgccaacttcggcgttctctccggcctcctctactccgccgtcgccccctacacaacccaccgctcgtnnncctccaagtccatatggacctcctctcacgggccct

SEQ ID NO: 18474 - DNA, 255 bp, Glycine max
  Clone ID: 700958459H1
atttatctttttattttagcaaagctaaactattgtttctcgggaaatttaagataattcaattggataacatgaacgaaaatctcaattttgtgctgttgtcggagtgactcaggaaaatgcaatgcacgattccaacagcattgtttatgatacattttctgttgtccaaggttaattttcagttttggttttttgggcggctccaatggcaacctctcaaatcactgcatcattgaggaacttgcctgcatt

SEQ ID NO: 18475 - DNA, 230 bp, Glycine max
  Clone ID: 700958460H1
cacatcccttgatttccttccttcaccgcacccacttatatctcttaccttagttttccaatgcagaaagcagggtacggtggcgatggaatatacaggtctctaaggccttgtttggttctcccaaatgaccccaacctctccctcgtctcattcctcttccaaagcgtttcctctttcccatccaaaatcgccctcgtcgattcccactcttcccaaacacttacctt

SEQ ID NO: 18476 - DNA, 260 bp, Glycine max
  Clone ID: 700958462H1
cctcgagccgattcggctcgaggaggagttgagtgaacgagtcgacgagtggacaaagaatatgaatacgacgatgatgagtgcattaaacatctatggctatgtcgttgcggctgttgttgtgttccttatattattgctttggcagcggaacagatttttcttcgcttcatctccgtcgtctccatccgcttccttactgctttccgattctatcaattcaaactcaagctccagatgcagaacctcaaattttgtga

SEQ ID NO: 18477 - DNA, 260 bp, Glycine max
  Clone ID: 700958463H1
cggtgagttcccaggcgactacggctgggacactgctgggctttccgcagacccagaaaccttcgccaagaaccgtgaactcgaagtgatccactccaggtgggccatgctcggagccttgggctgcgtcttcccggagttgctgtcccgcaacggggtgaagttcggagaagccgtgtggttcaaggccgggtcccagatcttcagcgaggtgtgctcactacttgggcaaccaaggcctgatccacgcccagagcatc

SEQ ID NO: 18478 - DNA, 263 bp, Glycine max
  Clone ID: 700958464H1
cgaacatcaagcttcagaccagagccccaatcagcaaattcaagcagtactagtaccaataggcaactaaattcccctttccaaccctaatttttcttcttaattaattccatttaagtcctttaatatgcagaccctcaccccaccgtaccccaaacctctcaactatctcacgcgggcgcgtcactcggtcattacggtcgctccgacccgtttcacagtcaaatgcggtacaggcttcgaatccgcgagtttctcgcagg

SEQ ID NO: 18479 - DNA, 249 bp, Glycine max
  Clone ID: 700958465H1
aaaaactttaggaaatcacatgaagagagagaagatggcttgtgtttacccaggacagcttctcttgttgtgtctgatactgagcgtggttccaatagcagtttccgcaggcaatgacgcagcacccctgaccaaccatgggggacgcttgctgactggaaagttgaacgttggcatcttatggtacggcccaattccaaaggcccaaaagaaagcgattttgtccttcttcaggtccctgaacatgaa

SEQ ID NO: 18480 - DNA, 251 bp, Glycine max
  Clone ID: 700958466H1
aagaaccatgccaaatagaagcatgcctgcctcaccttatcccacaccaggtgcccttctaatgggagatgccttcaatatgcgtcaccctttaaccggaggaggaatgactgtggctttatctgacattgttgtgctaagggacttacttaaaccccttcatgatctccatgatgcttctgctctttgcagataccttgaatcattctacaccctacgcaagcctgtagcatctacaataaacacactag

SEQ ID NO: 18481 - DNA, 250 bp, Glycine max
  Clone ID: 700958467H1
cgctcgagccgattcggcccagcaattggaacgagggaagtgttcacgccatgggaatggagcgagtgcagtgtgcctatgcctctctggacgaagcgttcgaaatagggaaagaggcgtatcaggggcagcagtacagccagatttacttcgcgcgccttcatttgctgcgaacacttttatattccctcgttcctcattggaggcccaattttcccgtgtgcacagtgctgggattggaagaagggaa

SEQ ID NO: 18482 - DNA, 173 bp, Glycine max
  Clone ID: 700958470H1
cttatgtattacatggataagattaccaaaatataggtccctccaggtttcagcagtctgcaaagtaagaaaataggcataattagtgagaattttgaaatgaagtgtgtgactattaaaaacttctgttcaaaactgcagaaatttattctcagtacagtctatacaacata

SEQ ID NO: 18483 - DNA, 250 bp, Glycine max
  Clone ID: 700958471H1
aaacaaccaaaccacacacttcacaccctcttcaacatcctcagcaagtacaagaacaagaagaaacaatgtcttgctccaatctcacaatgttggtgtcctcaaaaccttccctttccgatccctccaatctctccttccgctctgtcctcaacccttttcagttcccttcacaaaacccaatttcatgcactccttcacgctcctaagacacccaatttcagtgtggtctgagagatctcagcccccg

SEQ ID NO: 18484 - DNA, 253 bp, Glycine max
  Clone ID: 700958472H1
ctgacttgtacaagaattctgatctatataggagacacaagcagcttatacaagaactgggtcagcccgctcccggttcaaaggatctttatttccctactcaatactctctgtcattcttggtccaatgccaagcttgcttatggaagcaacgttggtcatattggcgtaatccaccatacactgctgtgaggtttttcttcactactttcatagccctgatgtttggaacaatgttctgggacctcggaag

SEQ ID NO: 18485 - DNA, 252 bp, Glycine max
  Clone ID: 700958473H1
attcattcaagattcagcaagtgcgttttggaagcagagaccgaaatacttcgagatggcccgtacaaagcaaactgctcgtaagtcaactggaggaaaagctcccaggaagcagcttgcaaccaaggctgcacgtaagtctgcaccaacaactggtggtgtgaagaagcctcatcgttatcgccctggaactgttgctcttcgtgagattaggaaataccagaagagcactgagctcctaatcaggaagtt

SEQ ID NO: 18486 - DNA, 252 bp, Glycine max
  Clone ID: 700958475H1
ctcgagccgctcgagccgtgcaagttgagattttgattggtgtttggctcccaaattcccaaaacagtgaaggtctcaagtaaaagaaatgtttttggcaccaagggggaaatgggtatagatttcatggttttggtgttatcagtgtcatggttttgtttgactagtatatgtgtctctgctacaaaacaagcatacccgccaacaccacaaccgaaccagaacttaaggtttgaccaaaatggagaattc

SEQ ID NO: 18487 - DNA, 255 bp, Glycine max
  Clone ID: 700958477H1
gatggtttctgcgtggcgtcgttgtctttcttttgtttccaaatcagattcttgtgctatcttgttctggattttccatttgagtaaaaagcaagaactgttttcaattgttggtgcagtgtgttgttagttctgcatttgcctgttaaatttgaggaatcggtgttataccaagacagaaagagggaaacttagataaaaataagagctttctggggagcatagacacttcacatacatgtttccataagagaa

SEQ ID NO: 18488 - DNA, 250 bp, Glycine max
  Clone ID: 700958444H1
ccgtgatagagatggtagactgtgggtacgtgtagttaagctgagagaaatgccattgctcgtatccaattgcgctaaatcctttatcctctccacgctcccaaagtccaagcaaatgtcccgtcaagctcccggcgtcgtcaaaacgcgcctgatgggcgtcgttttcgacatggacggcaccctgaccgtcccggtgatcgattttccggcgatgtatatggcgatgctgggcgacgacgcatacctg

SEQ ID NO: 18489 - DNA, 266 bp, Glycine max
  Clone ID: 700958414H1
cgacacccttaacacttctcataataaaatgttgcgccccacctccaaggaacaagtggtggggtggccgccggtgagggcaagcaggaaaaatgctatgaagatgagttgcaagttggtgaaggtggcggtggatggagctccttatctaagaacagtggatcttgaaatgtacgagacttatgagcatttgatgagggaattagagaccatgttttgtggcttagccattcgtaatcatttgatgaatgagaggaaactgatgg

SEQ ID NO: 18490 - DNA, 267 bp, Glycine max
  Clone ID: 700958415H1
aaggatcagtggcagttagcatgtcaattgaaggaacaagtttttgttttgtagcagcacacctagcatctggggagaagaagggtgatgaagggagaaggaaccatcaggtagcagaaatttttaggagaacctctttttctaggaccacaaaagaccatcatcattttcctctaaccatcttaggccacgaccgtatattctggttcggggatctgaactataggctatacttggaggacaattttgcgaggcatttgataagaa

SEQ ID NO: 18491 - DNA, 182 bp, Glycine max
  Clone ID: 700958416H1
ggaagaacgctcgctcgcactgtccagatcttaatcaagaggagtgagttttgtttttccagccatgacgccgctggtgagtctaagcctttctctcagatttacgcttaacagagttacagtcactcagtaatctactccttttctagatcctgcatgctgggaaaccaacaaaaattctt

SEQ ID NO: 18492 - DNA, 270 bp, Glycine max
  Clone ID: 700958417H1
ttcggctcgagaaaatattattaagatgatcaacattattggagcacttgttctactctttgcatttctcttcctcagttgtgtgtatgcacaagacacaacaacccttgtgcctgcaatcataacttttggtgattctgctgtggatgtagggaacaatgactatcttcccacccttttcaaggctgattaccctccttatgggagggactttgttaaccaccaacctactgggaggttttgcaatggcaaattagctactgatttcac

SEQ ID NO: 18493 - DNA, 256 bp, Glycine max
  Clone ID: 700958418H1
gtgcatacatagctatctatttatctatagcaagtgcgtcaagagacacgtggtaccctagctagagtgccattctgtggtttctttctttctttctttctgcatcacatcacaatttgcattgcctcgtgtcctttttcttctttgctctccaaaaatctcacacacacaggtatctagcaaatgggttctcaccaacaagaaccatggctcattggagaatgggaaaccaagggttttgaccaaggagaccagg

SEQ ID NO: 18494 - DNA, 250 bp, Glycine max
  Clone ID: 700958419H1
gttccctacctctcctttcaagatgcagatcttcgtcaagaccctcaccggaaagaccatcacccttgaggtggaaagctctgacaccatcgacaacgtcaaggccaagatccaggacaaggaaggaattcccccggatcagcaacgtctcatcttcgccggaaagcagctcgaggacggccgtaccctcgccgactacaacatccagaaggagtcaacccttcaccttgtccttcgtctccgtggtggc

SEQ ID NO: 18495 - DNA, 257 bp, Glycine max
  Clone ID: 700958420H1
ggacaaagaaaatttttgtaggtggaattccttcaaatgtgactgaagatgaatttagagacttctttacacgctacggcgaagttaaagatcaccaaataatgcgggaccactccaccaaccgatctcgtggctttgggtttatcacatttgaatctgaagaagcagttgatgatcttctgtccatggggaacaaaattgactttgctggagctcaggtggaaatcaagaaggctgaaccaaagaagccgcactca

SEQ ID NO: 18496 - DNA, 259 bp, Glycine max
  Clone ID: 700958422H1
aacaaaacaaattaagtaataaattacttatcatagaaacatggcagccctcaaacaagtttcatccctcttgctattccctttgtttctcattttttccctattcaaatcctctcatgctggtgggattgcagtctattggggtcaaaacggcaatgaaggctccttggaagaagcttgcaactctgacaactaccaatatgtgaacataggtttcttgaacgtttttggcaacaaccaaatcccacaactaaacctt

SEQ ID NO: 18497 - DNA, 263 bp, Glycine max
  unsure (1)..(263): unsure at all n locations
  Clone ID: 700958424H1
ctaaaacatctcaatgggttcttcttctattacaacatcgccctccaancatgaccatggctgcgatcgtgctcctgttcacggtctttgccgtttcctccgccctagacatgtcgataatctcgtacgacagcgcccacgcggacaaggccgccacgttgcgccccgaggaggagctgatgtccatgtacgagcagtggctcgtgaagcacgggaaggtgtacaacgcgctcggcgagaaggagaagcgcttccagatcttc

SEQ ID NO: 18498 - DNA, 260 bp, Glycine max
  Clone ID: 700958425H1
ctttgtcgtcttcagggttgttgctctctaccattcgcaaaatccaattcagcgatctccgaagagctccatttgttgcactccaattggaaaaaagaagtgaacttgcgatctgggtatccaatttttgaactctttcgatggggaatgatgcagggtcaccgcagggtccggttacgtgtgggtcgtggattcggaggcccgagaattagaatttggtggtgttgggaaggtccagacgtggcagttcttgtccttct

SEQ ID NO: 18499 - DNA, 258 bp, Glycine max
  Clone ID: 700958426H1
ggaatactaataatgctgttgggaggtggctggtggctttgcaagatggggatgggaaggggaggggtattgagcttgtgatggaggaggagatggaggtcagtgggagagataggagtaattgtcagaggaggcatgtgtttgaggacattgatgtggatttggtggtgggagaggaggaacagaagaagcatgaggaggtagtgggtggagaggacgaagagaaagctagagttagcatatgtattcctcccaaga

SEQ ID NO: 18500 - DNA, 261 bp, Glycine max
  Clone ID: 700958427H1
ctgagccagaatagatttgagggaaatattccttcagatattggcaatctgaaatatcttacaagtcttgatctcagtggaaatttgctgagtggaacaataccacccacgcttggaggaataaaaggcttagaaagattgaatctctcacacaatagtctttcaggtggtctctctagcttggatgatatgataagtctgacatcttttgatatatcatacaatcagtttgagggtccacttccaaacattctagccctc

SEQ ID NO: 18501 - DNA, 258 bp, Glycine max
  Clone ID: 700958428H1
gacgaagcggacgcgtggggataaagagggacgaagcgtgccacaatcttgtgttcatgttatcgttcaacgcgcagggtgggttagtgaaccagtttccgattttgatcaagtggctaggactggctggggagggtttacacaagcagctcgcggaggagatcaggaccgttgttaaggacgaaggaggggtgagtctccgggcgttggatcagatgactttgaccaaatcagtggtgtatgaagtcctgaggatag

SEQ ID NO: 18502 - DNA, 263 bp, Glycine max
  Clone ID: 700958429H1
gaaagacaagacaaaacaagagagaatgagtggcggaggaggaggagaagaggaagcaactctggagttcactccgacgtgggttgtggccgccgtttgcacagtcatcgtcgccatatctctcgctgctgagcgcctccttcattatggcggaaagtttctcaaagccaaggaccagaagtcgctctacgaagctctccagaagatcaaagaagagctgatgcttctgggcttcatttccctgcttctcacggttacacaaa

SEQ ID NO: 18503 - DNA, 264 bp, Glycine max
  Clone ID: 700958430H1
caataataactgcaggcagctctgacttcactgcaagcatcaaaacaaaacattgcttcaattcagcgtttctgcaaattccaattttccaaaataaaaaacaaaaacgggcgtttgaaaaaaagctgttattaattcgggagcgatatggaggtcgtactcaaagagttgcacgccgatcttcaatctctgagccaatcgcttcccgatccatctcaccatgatttgctccgcaagattcaattgcgtgttgaggaccttgcg

SEQ ID NO: 18504 - DNA, 265 bp, Glycine max
  Clone ID: 700958431H1
aagtttgattgtcctagctttgagcaacatcatgaagatctccattctctttatcacaatcttttcttgtggttttcttggaaatcgttgtttcaaatgctagtcctcttccatatgaagctatttttaactttggtgactctataagtgatactggaaatgctgctcataaccacccacctatgcctggcaatagtccttatggttcaacatactttaaacatccttctggacgtatgtcaatggacgactaatcatagatttt

SEQ ID NO: 18505 - DNA, 260 bp, Glycine max
  Clone ID: 700958433H1
gaacatccacaccgcatcgctctgccgttccatcactttgtgtctgtctctctcttcggacacaaagcaacactttccatgtccatgtctctgtctcttcttcgtatcttctcttcgccccacctttccacctctctcttctttccaactccaactctttcttccctctgcccttctttcctttccaaattaccaaatgccccctctcccctcattgttttatgccacagggacgcctcagcttcgaagcaaggtcacct

SEQ ID NO: 18506 - DNA, 256 bp, Glycine max
  Clone ID: 700958435H1
cttcccaaaaaatatacagcaccatggaacaccaaaaagaggagcaactagaaccagtgagtcctgtgggacaatacttcaacagctctgtgctatgcatatacatcattggagttttagaattcgaagttccaatagatgacttgcaaacatatgctcttcttaaagatgttttccttcccatcaatccacgcttctcctccatgctggtccaagataaagatggagagaaaagatggaagcaagttgatgtaaa

SEQ ID NO: 18507 - DNA, 208 bp, Glycine max
  Clone ID: 700958436H1
gcctgctgggagctctactgcctcgaacacggcattcagcctggtgggcagatgccaagtgctaagactgttggtggaggtgatgatgctttcaacaccttcttcagtgaaactggggctggaaagcacgtgcctcgtgcgatttttgtagatctcgagcctactgtgattgatgaagttaggactgggacataccgccaactatttc

SEQ ID NO: 18508 - DNA, 255 bp, Glycine max
  Clone ID: 700958438H1
aaaaaagggttacttcagcttccacatatcttgaagaattgatcaatgggcaagtctgtagttgagaagctactttggatggcaattgtgtgcttggtgctgggtgtaatttccattactcccaaggcccaagcagcagtgacatgcaaccaggtggtgagcaacctcaccccatgcatttcctatgtgctcaatggtggcaaaaccgtgcctggcccttgctgcaatgggatcaagaccctctttaacctcgct

SEQ ID NO: 18509 - DNA, 254 bp, Glycine max
  Clone ID: 700958439H1
cgcacacgaggagcagcctcaggaggagaaggatgtctcacaggaagttcgagcacccaaggcacggttcactgggatttcttcccaggaagcgtgctgctcgtcacaggggaaaagtgaaggcattccccaaggatgacccatccaaggcacccaagctcactgcattcttgggttacaaggccggtatgactcacattgttagagaggtcgcaagccaggatcaaagcttcacaagaaggacacttgtgagc

SEQ ID NO: 18510 - DNA, 259 bp, Glycine max
  Clone ID: 700958440H1
cgtacgtaaactttttacgcaccgtgtgaaaggatcaatatatacgttagattaaatggacagcttagattttttttcctttttatattttttcttttcttcttttctgtctttccagatttgtccctaatctttctctcacattccaattcaaacaacttccctcaatacagcggagacggcgaggaagccgccgccgtaggtccggtggtttccgccagcgaggcggcgaatcactctcggcctctcggaagcccag

SEQ ID NO: 18511 - DNA, 257 bp, Glycine max
  Clone ID: 700958441H1
cacatccatctttgccttctgcatgttggttctctgtaaacagatactgcaaaagaagaataatattgaatatttggttgggttgactccctgggttgaagcgttgcagacatcacggctattctaagattgtctctttctctcattcatgtcccaactgtacgacggaggacaggttgcgtaactgccaccaacccttcgccgcacggtgggcgtggtgctttgccttctgaaggtggtagcccatcagacttgct

SEQ ID NO: 18512 - DNA, 257 bp, Glycine max
  Clone ID: 700958443H1
agaatacataaatgaactggtagaagttgataaagaaggggggaagcagctttgtggtgggacatttttgaaccctggatcatgggatgctgcacttcttgctgctgggactacactatctgcgatgaagcatttactgaatggggatggaaaagtttcctatgcattggttaggccccctggtcaccatgctcagccttctcaggccgatggctactgtttccttaacaatgcaggtctagctgtgcaattggctt

SEQ ID NO: 18513 - DNA, 262 bp, Glycine max
  Clone ID: 700958413H1
ccggcgttgactatctttctttgagagagtaacgcaatggaacaaccactcaccgaagccgtggaatccttatccgtctccgaccctgagatcccccaatcatccaatcccaatccaactcatctgttgacccccgatgagaagtttcaaattgtgaggagcgtcggagaagagtgcattcaggaagacgaactccttaacctcctcaccaaaaagcccgaacccgtttgctacgatggcttcgaaccctccggacgaatgc

SEQ ID NO: 18514 - DNA, 236 bp, Glycine max
  Clone ID: 700958374H1
caccttcagacccgaaccctaaccctagatcagagatatgaacccacaacacacgatcgagtactaccaactagggtatttgtcatggctagtttgcaaactagggttttcttgatggcccttctgtgcctgctggctcttggtgcaaccattattccaatggcacaaggggaagtgtcatgtggccaagttgtgagtaacctgaccccatgcatctcctatgtgctatatggtgg

SEQ ID NO: 18515 - DNA, 235 bp, Glycine max
  Clone ID: 700958375H1
ttacgttcttagttctccacgccaaatataacagaagtgctgattggccatatagctattggcatattcaattacctttttaaaagcaaagtccaatggccaaatagactagtgttgtttatcaatataccagcaaatcacaagttcggggtgagaattttgatcataagaaccttgtaataacaacagcagctgataatggaaagaaggagagtaatggagcacctaaagacat

SEQ ID NO: 18516 - DNA, 236 bp, Glycine max
  Clone ID: 700958377H1
gtcactccttgctcttagccctcctcctcttcgccgcagtggccaccgccgcgatggcggtggccgcgtccgacgccgacgacatcctgatccgtcaggtggtgccagatgttggcgaagcgcagaggaggacaacctgctgaacgccgagcaccgcttcgagagcttcaaggccaagttcgccaagacctacgccaccaaggaggagcacgatcatcgcttcggcgtcttcaagt

SEQ ID NO: 18517 - DNA, 235 bp, Glycine max
  Clone ID: 700958378H1
gttataaatgggcttttggtttggtggatgatagagggttatttttgttctaatgttggtcatacgatagagttccctattttactttctttcttgactttgtgaacattgattcgatttgggggtgtggatttttcttctgatttcttcgccaagttcgggttttgaccaattgggtcgctgattctcgcctcactttgatctgggtcgttcccttttcttcaatctcagttgt

SEQ ID NO: 18518 - DNA, 243 bp, Glycine max
  Clone ID: 700958379H1
aactcagtgaaagagaatccgaggcgaacagaatagactgattacgatggacgggaaggagcaggatgtgtcgatgggatcgaacaagttcccggagagacagccgattgggacggcggcgcagagccaagacgacggcaatgactaccaagagccggcgccggcgccactggttgacccgacggagtttacgtcatggtccttttacagagcagggatagcagagtttgtggccacttttct

SEQ ID NO: 18519 - DNA, 258 bp, Glycine max
  Clone ID: 700958381H1
tggaaacaagccgagaattcatctgtggtgtattttgtgtgttgatgttttattaaacttttgtactcttgctttgaaactagttggttaggcaagttttagttttctattttatttcagacttttcaggtgctcatattcttatgatgatcatcaaactgcaaatatagtgagcccattaagctattactgaaatttgttgcagatttgaaattcttctaagatggatacttcttataggactggtggagtcaagta

SEQ ID NO: 18520 - DNA, 243 bp, Glycine max
  Clone ID: 700958382H1
tggacatctgtctccttctcttaaagaatcatcttatgcatcaaacatggagagttcccatggtaatgactttggaggctgtggccttgaaaacaaaagagaatagagaaaagttgtataattgctgtgatggacccctaaatagtagtttcaaaaatgaaaatacaccaaatcaaatgccattttgcagtccgggttcagctcagcaagtaggtcatcattttgaaaatgaaaatgaaggtc

SEQ ID NO: 18521 - DNA, 239 bp, Glycine max
  Clone ID: 700958383H1
ctatcctatcgtagcaaagaaagaaagatagaaaaccctagcttaccttttcaactttcaagatgcaaatgtttgttaagacactcactggtaagacaatcacccttgaggtggagagttcagataccatagataatgtaaagtccaagattcaagacaaggaagggatcccaccagaccagcaacgtctcatttttgctggcaagcagcttgaggatggacgtacacttgctgattac

SEQ ID NO: 18522 - DNA, 239 bp, Glycine max
  Clone ID: 700958384H1
cttcttcaccctcttagggtttgcatcagattcccctaattcttgattgattttgcgctttcgctagattttcttcaaaatgactcaagatctagagatgaaggatcgctcaacgccttccaactccgtttcttcgcctgctccatctactctgcagcatttgaaggagatagcgtctcttatcgagaccggttcgtactcgaaggaagttcgtagaattgctcgcgctgttcgcctta

SEQ ID NO: 18523 - DNA, 63 bp, Glycine max
  Clone ID: 700958386H1
atatcatctagctagctagctagctagcaaatagcaatgttaaaaaaccaaccacaaccagat

SEQ ID NO: 18524 - DNA, 237 bp, Glycine max
  Clone ID: 700958388H1
gggtcctgcaaaaacatcagagatcccttggattgcattgatcggtcaatctgtttcaatagctacggcacagtctggatctgctggttctgaaaattcattagaaactgcatggagagcagagagtgaaagcctcaagtccatattgacaggagctgctccgagtaaacttggaaggattgctttagtggatgccctggcacaccagattcagaatcgtatgaagcttcggcttcc

SEQ ID NO: 18525 - DNA, 234 bp, Glycine max
  Clone ID: 700958389H1
cgtgattccgttagagagacttggatgcctcaaggtgaacaacttctccaattggagcgggagaagggaattgttatcagattcatgattggtcacagtgcaacttccaacagcattctagatcgagctattgattcagaagaagctcagcacaaagacttccttcgcctagaacatcttgaagggtatcatgagctgtctgcaaagataaagattttcttttccactgctgtt

SEQ ID NO: 18526 - DNA, 129 bp, Glycine max
  Clone ID: 700958390H1
cccatcttgatgttttggatctaagtttaaaccatttgagtggaccaattcctatgttcaaggtcactaaatttgcctcattatactatttggacctttccaacaatgaattgagtgggaagctttcat

SEQ ID NO: 18527 - DNA, 233 bp, Glycine max
  Clone ID: 700958393H1
acactctctctctctcttcttcttcttcttcttcttgcacgtattgttctaatccacaaaaataatggccttaaattacaacattgccctcgccttctctacggttctcacgctgcttctccttcccttaccaacccttggggagctcgtgcaggagcagccactagtcctcaagtaccacaacggccaactcctgaaggggcgcatcaccgtcaatctcatctggtacggca

SEQ ID NO: 18528 - DNA, 243 bp, Glycine max
  Clone ID: 700958395H1
cggctcgagaagaagaggactaacaggtccgcgaaattgaagcagtacaaaatcgatgcgcgccgcgagcaatggttatctcaaggtgcggtgaagagcaaggggtgcaaggacggagtggacgatgacggccacgcaccgccgccgtctccagcggtggtgaaacactcgttggagccgctgaacacgaggcgcagaggcgaagaggacgatggattgatccatcatgacagcgattcggag

SEQ ID NO: 18529 - DNA, 243 bp, Glycine max
  Clone ID: 700958396H1
atctcattgaggagaaagaagaagaaggatgtggcacgaggcgagaaggtcggagaagaaggtccacgacatgatggacgcggctcggaagagagcgcaacgacgcgccgtttacctcgccaagagacgcggcgatcctcagcaatccattcagctcgtcggctttcctagccgaacctatcgcgacgacgctctctaccaagcctcacaggatcagcagggcctgataccttggaatgggaa

SEQ ID NO: 18530 - DNA, 259 bp, Glycine max
  Clone ID: 700958401H1
tgagttccacctgcagtgcattcttgaatggtgtcagagaagctcccagtgtcctatgtgttggcaacctatcagcttgagggatgctaccagtcaagagctgcttgaggcagtagagctggagaggagcttgagagatactccatcaagaaatgctgcgatttttcatcatccaacacttggtgattttgaattgcagcatttacccatgggtgtgaatgaggccgatattgaagagcgaataattcaacattaactg

SEQ ID NO: 18531 - DNA, 257 bp, Glycine max
  Clone ID: 700958403H1
aacggggactgccagcttgttgagtttctaggtttgtgtgaatatttctgttcaatgaattgagaagaaatattcacacaaacctagaaactccacaaacggggactgccagcttgatttacttgacttgacccatatttcctcaatggactttgggccggaatcataccagttgcaaaatgatagggtagttcctggtgaaagtcacgacatggtgaatattccgtttcagacttcgatggggttaggtgttgcaa

SEQ ID NO: 18532 - DNA, 260 bp, Glycine max
  Clone ID: 700958404H1
cattctccctttcctctccgaaccctcgatcactctcacgcgctcctatattcgctcctccaccgtcgctctctcgaacaaccacaacaccatcttcatcacatggcaaacgcagcatctggtatggcagtccatgatgactgcaagttgaggtttttggagctgaaggcaaaaaggacacaccgtttcatagtttttaagattgaggagcagcagaagcaggtcattgtggagaagcttggtgagcctgcccagggcta

SEQ ID NO: 18533 - DNA, 127 bp, Glycine max
  Clone ID: 700958405H1
cgctctccgtttcgccatctctctctctcaacactctcttcttcgacaaagcgcttcctctatctcgtacctcacttctctctctccctctccccaaatccctcctctctctctccacgcgccgccg

SEQ ID NO: 18534 - DNA, 193 bp, Glycine max
  Clone ID: 700958406H1
ttcaacttccaaccaacagtagctgtagattctatggtctccaactacaacggaaagaagggaaaagtaattcactttccctttcaccaaccaaaggaaaaagtaaaagttagttaaagtcgaaaattttcagttagattccccctcactttgatttgatctctatgcccttcatctcatgctccgaaccttt

SEQ ID NO: 18535 - DNA, 174 bp, Glycine max
  Clone ID: 700958407H1
agaaccttctgaggttaaagcaaaaaacaaagagagagagagagagaaaatgatgaagccatcgatgctcagatctctccactccgccgccacccgcggcgcctctcatctcttccgccgtgggtacgcctccgagccggtgccggagcgcaaggtagccgttctcggcgccgc

SEQ ID NO: 18536 - DNA, 260 bp, Glycine max
  Clone ID: 700958408H1
caaaaccaagggatcttccagtacctgggcgggagctgtcaggagttcattttgctatggagtttcttcatgcaaatactaaaagcttgcttgatagcaatctccaggatggcaacttcatttctgccaagggaaagaaagttgtggtcattggtgggggtgacacgggcacagattgcatagggacatccattcggcatgggtgtagtagcattgtaaatctggaacttctccctcagccaccacaaactagagcccca

SEQ ID NO: 18537 - DNA, 205 bp, Glycine max
  Clone ID: 700958409H1
atcagactagagagagtaagagtaagagaagagatggaaagagtagcatcagtatctcggccactgaaaatatacttcctcccattcttctcaccggggcacctaatccctctggtccagctggctcgcttggtggcggcacgaggccagcacgtgaccatcatcaccacccccgccaacgctcaactcttcgaccagaacatcg

SEQ ID NO: 18538 - DNA, 262 bp, Glycine max
  Clone ID: 700958410H1
gataaggcaatgaatctgatgcaggcggttcgctacgacgcctacgggggtggtcctgccggcctcaagcacgttgaagttgccgttcccagtccaaaggcaaatgaggttttaatcaaactggaagcagttagcattaaccctattgattggaagattcagaagggtcttctccgtcctttatttctccccagaacctttccccacataccttgcactgatgtggctggagaaatagttgagatcggaactcaagtcaaag

SEQ ID NO: 18539 - DNA, 262 bp, Glycine max
  Clone ID: 700958411H1
gagaagcaatagtggatggccccgatttaggtcgaagtgtatgactactgaggaaattgagaatattcttagaatgcagcttgtagcaacacacagtaatgatccatatgttgatgactattaccaccaaggctgtcttgcgaaaaagtcatctggtgctaaattgaggcatcacttttctccagctcaaataaaggaactccctctacgaccctcttctaatgctgaaccacatgcttttcttcaggttgatgcactaggg

SEQ ID NO: 18540 - DNA, 238 bp, Glycine max
  Clone ID: 700958371H1
cgctcattgttctaccgattgaaagcacgtcgaataagcgcttttaggatttaaaggggaaaacttgaagtgcctctggataagtggtggagtttgtttgtttgattgattttgcaaatcagttgaatggtaggatccccaatcacccaacaagatcaggtgtgattgaaggaaaaaggggcataggggaagttgaagtgaaaaatgctgagtgatagagatgggaaagaggacatgg

SEQ ID NO: 18541 - DNA, 263 bp, Glycine max
  Clone ID: 700958412H1
gttccttttgtatgggagaagactcctggaagacctaagaatgacagcaaactacaaacaagggctgtcgaacggccttccgttgctccaaagcttccacccgggagggttttgaaagttgaacagcaatgttctgataaagttcctaaaggtgcatcagttactcaatccagaacaggaagcagtgtttcagattctccgcgtactgcatctctagataataaagtgacaaaacatgaaagcccccaagaagtaattgagga

SEQ ID NO: 18542 - DNA, 249 bp, Glycine max
  Clone ID: 700958331H1
gttcatcagcgtgtgtctcagccatggcgtttccctacatggaagccgttgtcggatttatgatattaatgtacatttttgaaacttacttggatgtgcgacaacatagggccctcaaacttcctactcttccaaagactttagaacgtgttatcagccaagagaaatttgagaaatctagagcctatagtcttgataaaagccacttccattttgttcacgagtttgtgacaatagtgacagactcta

SEQ ID NO: 18543 - DNA, 252 bp, Glycine max
  Clone ID: 700958332H1
atcaatggtggttgcatccattcggcttcttccttctccactcctctctttcgctcctcgtcgctctccatattcatattcatggcgctctcatccctctttaaccattcccttctcttccatccactccaaagcttctactaagggagatggtggagcagtggaattgggtggtgatcaaacagagcttatatttttggggactggaaccagtgaaggggttccacgtgtcagcggcttgactaacccttt

SEQ ID NO: 18544 - DNA, 252 bp, Glycine max
  Clone ID: 700958334H1
atccccttcttcaacccctctctctctctccaaaacgccaaaccaaaaaatggctcagaaggccgagaaaaacgacaccgactttaaggtccccgaaaccatcatcaccccctgcaccaccaccaccgccacctcgattaccgaaccttctagattcttcgacgcaaccacccccgccacgtcatcgcgctcccccaagcgatccctccccctcgacgacgaatctcagacggaccaaacggcgtcgtcgga

SEQ ID NO: 18545 - DNA, 246 bp, Glycine max
  Clone ID: 700958336H1
aataatttgtgacattgtacacaaactatatccatggcctctgcagcttccatttcctcatcacaaccagaagccgcaaaggttcatgcatctgatatttctagcatcaaagcctttgcagaatcaaagtgagcctctctgatcccttacacctaccactccatcacagagcgccatgatgatgatgtagcagatgagcttgctgcttccgtcccagtcatcgacttgtctctcctcacttcgcat

SEQ ID NO: 18546 - DNA, 242 bp, Glycine max
  Clone ID: 700958339H1
ggaaaccgttcaaaagagataccttacaatcgttttacaatgcagcataagaacaactaacagtagcacgctactctctttttctctcgtgtgtgtaatcctgcaagtaaatggcaagagcagcttgcaatcaccttcacttggttcccagtttagttcatcctctaaagtcaaccctcttcataaatcacactctttccaccacacgcactcgtcctgatggcattcaccgaaggttctct

SEQ ID NO: 18547 - DNA, 117 bp, Glycine max
  Clone ID: 700958340H1
gtaagggtccaagagtgcctcttcctccctatgcttatttagtacatgctttagctgaataagcgtagggaggaacaggcactcgtggacccttacgttgagcggttttcaacgcat

SEQ ID NO: 18548 - DNA, 240 bp, Glycine max
  Clone ID: 700958341H1
tgatggcgaagtttggcgagggcgacaagcggtggatcgtggcggacgtcccgacggcactaacgtgcacaactggcactgggcggagaccaactgcctcgagtggtccagaaccttcttcaagaacaatttcagtaacgtcgccgtcggtggcggcgacggcgatgccaccatcacgatcaagaaggtggagaagctcgatggcgaggcctacgtgaacgtccgcaaggggaaggtgat

SEQ ID NO: 18549 - DNA, 240 bp, Glycine max
  Clone ID: 700958342H1
tttttctaaagaaccctccgaaattcagcgtcgtccgtcatcatatcataatcatcaccaaaccaaaccaatcttttaattcaaagctcgcatttccggagacgccgtcgattcggcaacgccggcggcgcctcctacaccactacccatggccgccgcagttaaagcgaagtcctcgacggcgacgacgctctcgctcgccgtgagcgtcgttgttctggccatcgcctacatttacgt

SEQ ID NO: 18550 - DNA, 242 bp, Glycine max
  Clone ID: 700958346H1
cagacttaacaacagcacaaagcgggttactgtctgttcaagctaccatctctctctctctttcttagtgcctccttgccagaagttaaaatggcccaagaaactttcctattcacatctgaatcagtgaacgaggggcaccctgacaagctctgtgaccagatctccgatgctgtgctcgatgcatgcttggagcaggaccctgacatcaaggttgcctgtgagacctgcaccaagaccaa

SEQ ID NO: 18551 - DNA, 255 bp, Glycine max
  Clone ID: 700958348H1
attagagatccactcagccacttggaccgatccgccgtacgataccgcgacaggacttctcttgtctccggtgacgttacctacacgtggacccagacacaccaacgctgcatcaaacttgcttcttccatttctcaacttggtgtcggtctttctcccctcgatgtcgttgctgtattggcccctaatgttccagctatgtatgagctgcattttgctgttcccatgtcaggggctgttctctgcacgctaaat

SEQ ID NO: 18552 - DNA, 250 bp, Glycine max
  Clone ID: 700958349H1
cacagctaagcttttggaacttagagttaagcagttaccttcctccaactataatatctcatccaatcaaaacccttttctcaattgtctctctctctgactcactccacaataagtgtcgattttttcctaaataagtgaaagtgtagttacacctttttttgtgtgtttaccacttttgagtgccacagagttctgagtttcataggagaaaaaaaatgacagaagaacaaaccaaaacggttgagtc

SEQ ID NO: 18553 - DNA, 67 bp, Glycine max
  Clone ID: 700958350H1
caatggccatggttgagctctggtggattacgtgctttctctaactactgttttccacacaacatac

SEQ ID NO: 18554 - DNA, 242 bp, Glycine max
  Clone ID: 700958352H1
cccaccttcctctccttctttctttctgcttaaggtctacacaagttctctgcggcttctccccctattgacctttggtcatcacatgcgaaaacccacttctggatcttctggtgtaaaggccattagaagctttagaaattttctaattgagttggtgtatagtgttgaagggggtgaaatctggagcccagtttgttagttgttactcacttcatctgtaagctcataggttgaaccct

SEQ ID NO: 18555 - DNA, 243 bp, Glycine max
  Clone ID: 700958353H1
aaaccacaaacacttaatttctcatctcatcatttctaattctacctcttttctcttgcactaacaatccaagatgaataccaacaacgacaccgaaaaaaaccaatcatttccagaagcacaaggagcatcatcatcatcatcttctccacccaatgttgggactgagaattggggaactcacataatgggcacccctgctgttccaagcagccacccagataacaaaaaagcagctttaca

SEQ ID NO: 18556 - DNA, 242 bp, Glycine max
  Clone ID: 700958354H1
tcttatttccagagacgaggaaaacaaaaaccgatgactgaaccctaaggggaaaattgccgatgcggcaccgtcaataccatttcccaattctagcactgttggctggggcaaattcctcacccaaaacgacatcatgtttggggggccattttgatttgaggtgcgttgagacagaaaacattaggccaccatagttctcttctctctcgcaatttccatctggtctcaatttttctcgt

SEQ ID NO: 18557 - DNA, 241 bp, Glycine max
  Clone ID: 700958355H1
aaaccacaaaacacaactcgtcacatcacatcacatcacatctattttcattacttcatcattttcactgcaattttcacaccacacacacacgacaatcatggaagttgatagtaggtttctgatcactggcctcctccttgtggccacaatccttgtggtcaagctcatctcagccttcatagtgcccaaatccagaaagagggtacccccaattgtgaaggggtggcccttaattgga

SEQ ID NO: 18558 - DNA, 240 bp, Glycine max
  Clone ID: 700958356H1
tttatattctccggtggcggtaacgcgattgctaaccagcaaacacagtccatcaaaatgatcctaggtgaccggaacttgctggagttgactggtgaagatcacagccgagtcagaggtgcacttgtcccattcttgaagccagaatccttgaagagatatgtgggaaaaatggatgaagaagttaggaagcaccttgagatgcattggcaggggaaacagcagatcaaggtattgccc

SEQ ID NO: 18559 - DNA, 131 bp, Glycine max
  Clone ID: 700958358H1
cccgtcttggtgttttggaactaagtttaaaccatttgaatggaccaattcctctgttcaaggtcactaaatttgcctcattatactatttggacctttccaacaatgaattgagtgggaagctttcatag

SEQ ID NO: 18560 - DNA, 237 bp, Glycine max
  Clone ID: 700958359H1
aaacgacattcattcatctatggctaaccatattgctccgagcaaccactctccccaagaagacgctgaggctctcagaaaggctttcgtcggatgggggactgatgacaaaactgtcatagtaatattgcgccacgcaactgtttatcagaggcagcaaatcagaagagtctatgacgaaattttccaggaggatcttgtgaaacgcctagagtctgagatcaaaggagactttga

SEQ ID NO: 18561 - DNA, 238 bp, Glycine max
  Clone ID: 700958361H1
gcgagtgtgcccaacttctgcgaaatcagttttctacaatgggaaggaaaaagacagacgatgctggcccatctgcgaaggtaaaggctggtagcaaagatcctcctaagaaggaaaaaatttctgtgtctgccatgctggccagtatggatgaaaagcctgataaacctaaaaaggtcccttcttcctccagtaagccgaagcggaaatctgctccaaaagcttccacatacaccga

SEQ ID NO: 18562 - DNA, 243 bp, Glycine max
  Clone ID: 700958362H1
atccagttgggcctgcaatggttcacccatctgagaccgcttcaaaagggccaagttggaaagctcttcttgaaccaggggttaagcatgcattgattgttggagttggaatacaaatacttcagcagttttcagggataaatggggttctatattacacacctcaaatccttgaagaggctggtgttgaagttcttctttcagatataggcattggctcagagtctgcatcattccttatca

SEQ ID NO: 18563 - DNA, 245 bp, Glycine max
  Clone ID: 700958363H1
aaaaaatgggttcctctttgtggacttgtctgattttgttatcacttgcttctgcttccttcgccgccaacccaagaacaccaattgatgtgccatttggcagaaactatgtgcctacttgggcctttgatcacatcaaatacctcaatggtggttctgagattcagcttcatcttgataagtacactggtactggcttccaatccaaaggatcctacctgtttggtcacttcagcatgtacata

SEQ ID NO: 18564 - DNA, 255 bp, Glycine max
  Clone ID: 700958364H1
cggatcaacttttgaagatgaaccatctcaaaatggaagttcagtacatgctcctcaaaatggggtacataatagacctcagacagttgttaatcaaactatgtctatcttacctatatctaccacaagtgctcctggagcagttcctggtcccacaactaatttaaatataggaatggattattggggcacaccaacttcgtccaccattcctgcattgcatggaaaggttccttctactgcagttgctggagg

SEQ ID NO: 18565 - DNA, 249 bp, Glycine max
  Clone ID: 700958365H1
ccccaccctatctgtgccttttcctatgtgtgtgaatttaaatgataactgaagaaaactaaggaaggaaggaagagtgagcgtgaaagatgccttgggtgaggctttcagagtctccaaggctcgacgttgctattgacatgggtaatccatttctcaatctcactgttgatggtttccttaagatcggagctgtcgcagccacgcgatcagctgctgaagatacttatcatattatccaaaagggta

SEQ ID NO: 18566 - DNA, 242 bp, Glycine max
  unsure (1)..(242): unsure at all n locations
  Clone ID: 700958367H1
aaacgacattcattcatctatggctacccttattgctcccagcaaccactctccccaagaagaccgtgagngtctcagaaaggcttttgaaggatgggggactgatgagaaaactgtcatagtaatattgggtcatagaactgtttatcagaggcagcaaatcagaagagtctatgaggaaattttccaggaggatcttgtgaaacgcctagagtctgagatcaaaggagactttgagaaag

SEQ ID NO: 18567 - DNA, 244 bp, Glycine max
  Clone ID: 700958329H1
gcttgtttcaattcaagagaagataaaatgggctgatgcaatgagtgaaattgacaagaagcacaggaaggatgtggaagagaaggtagaagaagtaaagaagtccattttcaagaagttacacactgtaagcaggccgacatcgacttcagagggcatgaggagatctgctctgaatctggtggagtgatggattatgaagaagatcgaagccgaccaaagaggaggcggcatccaatttctt

SEQ ID NO: 18568 - DNA, 239 bp, Glycine max
  Clone ID: 700958369H1
gaatgcttgatgaattgacggatatataaatgatacctcattaatcgagactggtatatgtaatgtcattgactcattgtggttcttgtctacgtcaacactatgttacgaatggcagtgaatgagcacggtactatcgatatgtatgaatgaataatatatgtctggatgaagattcgttgaaagcaagcataaatattgctttcaaacgtataaacctaagaaaatgtactacttga

SEQ ID NO: 18569 - DNA, 238 bp, Glycine max
  Clone ID: 700958370H1
gtgtcgttcaccgataagatgtcgtattcaaggagatcaaggtattctcgttctccttctccatacaagcgatacagtaggtctgtgtccaggtctctctcaaggacaagctccagaagccgttcaaggagtttatcaagagatgcagaaaatccaggaaacaatttgtatgtgacaggattgtctcctaggatcaccaagagagaactggagaaacatttttctgctgagggaaaag

SEQ ID NO: 18570 - DNA, 247 bp, Glycine max
  Clone ID: 700958290H1
ggatttcttgcgcggtttatcatgggggatagtcagtattcgtattctctcaccacatttagcccttctggaaagcttgttcagattgagcatgctttgacggctgtcgggtctggacaaacgtctttgggaattaaagctgcaaatggagttgtcattgctaccgagaagaaattgccatctatattggttgatgaagcatcagtccagaaaattcagttattaacaccaaatataggtgtcgtat

SEQ ID NO: 18571 - DNA, 247 bp, Glycine max
  Clone ID: 700958294H1
gttctctcacacactcactctccttctctctcctattgcggctagggtttgggtttttcactttcagcctctccattccttcaaccttcttcttctctttgatctctgatggagacgttccgtgtttagtagcaagggttagttgaggccttgtgtttggaaacgtacggtgtcgttttggagttgggaaaacaaataattctgagagatggcaaccacgaacccttttgatttgttgggtgacgac

SEQ ID NO: 18572 - DNA, 262 bp, Glycine max
  Clone ID: 700958301H1
cgcgttggtgcaaagcatccttcgcttcaatctctctctctctctttgcgctttctgcaaaccgaacatttcatctccaaagggatcaacaggtcgaaggagaaatggggctgacattcacgaagcttttcagccggcttttcgcgaagaaggaaatgcgaattctgatggttggtcttgatgctgctggtaagaccactatcctctacaagctcaagctcggagagatcgttactacaattcctaccattgggttcaatgt

SEQ ID NO: 18573 - DNA, 261 bp, Glycine max
  Clone ID: 700958302H1
cgagggaaacagaaccgggcaaccttatatttcccaagatctcaaagtctatttcatcatgttctgagtttgtggatgataaatagaaagcagtgactgtgccagctgaatcaccagcaactcagaacatgatgaaatagactttgagttcttgggaaacagaaccgggcaaccttatattttgcaaacaaatgtgttcaccggtggcaagggtgacagagaacaaagaatctacctctggtttgacccgtcaagagaata

SEQ ID NO: 18574 - DNA, 262 bp, Glycine max
  Clone ID: 700958303H1
ttcggctcgaggcgattgtttcagtcgaaccatgaaggatgaaggggtgattgctctttggagaggaaacactgctaatgttatcacatacttccctactcaggctctcaactttgcttttaaggattatttcaagaggcttttcaatttcaaaaaggataaagatgggtactggaaatggtttgctgggaatttagcatctggtggggctgctggggcttcctctctgttgtttgtctattctttggactatgcccgaaca

SEQ ID NO: 18575 - DNA, 249 bp, Glycine max
  Clone ID: 700958304H1
cttcttttttagctatccctctcttgaaaaatctagatctcgtgcttccttgatctacgttacgcttttagtgaccggatacgtatggatctgaaccagatctacacgccgatggtggttttggcctggtctttcatagatctgatgcatggaggctcagatctactgtacagaggtgtgcgattcatgttcgtctctcttttggaatctgtttcgtagaaagtcgtttggtcttccatgtcgcatggc

SEQ ID NO: 18576 - DNA, 250 bp, Glycine max
  Clone ID: 700958305H1
tggggatcaatgagaaatctgtcaagtcaatgccttttgaacagcttgctcttctgattgaatcggcttctactcttcagactgtgtaaactttacttgaccggtttgagagccgccttaaagtgtctacagcagtggctcctgccaagaatttgtctagcttggataacatcgatcatcttcttaaacgggttgcttcccccaagaaaagggctactccccggagttctgtgagaagcaggcaggcaaa

SEQ ID NO: 18577 - DNA, 248 bp, Glycine max
  Clone ID: 700958307H1
ctcgagccgaaagaataatggttggaagtgcaacaaaggttgctttcaccctcttggccactttcgccattgtcattccatgccttgaggctggcattgctgagtttgacgattttctcaaagcccaagctgatgaagcccataaaattgctcttgattcctatgtcccagagccccacgatgtcgcccatgaactcaatttccatgttcatatggcactggaaaactccacaaggagggaactaagg

SEQ ID NO: 18578 - DNA, 250 bp, Glycine max
  Clone ID: 700958308H1
caacaaaataccttccaattttcatcacaaagctttcaatttattgcttcaaccgaccattcaccatggcatcatcagcaacaaacacttggattaaaaccacactcccttctcttccgacatcttctccgactaccttaaataataggtttccttcctatcctaattccaattccaattccaacaccatctcatgatcccttcaaacactccacttccccaaaaagtaccaacgaacctccacaaccac

SEQ ID NO: 18579 - DNA, 248 bp, Glycine max
  Clone ID: 700958309H1
cttctgctctctcacgagaagaatactactaactgtgttgtaatacctcagtggagaacaagatgaatccatggaacatgagaacttccaagttactctctcaacaacttgcttatcctccttatcgcttggtagaagagattccaaacatgggaaattccagttgtgtgagcaaggagccaagaggttcacagatgacaatcttttatggtggccaagttcttgtcttggatgatattcaagctgac

SEQ ID NO: 18580 - DNA, 144 bp, Glycine max
  Clone ID: 700958310H1
attcattcaagattcagcaagtgcgttttggaagcagagaccgaaatacttcgagatggcccgtacaaagcaaactgctcgtaagtcaactggaggaaaagctcccaggacagcagcttcgcaaccataggctcgcagcgtaag

SEQ ID NO: 18581 - DNA, 243 bp, Glycine max
  Clone ID: 700958311H1
ctagtaacccttcttttctctctctctctctcgtgttctgagctgttagaagcaatggagaggatcagaagccatgcttctttcaccatgtttgcaatgcttgttggattgctctctcagagccttgtcattcctgtaatatccaccactgttgcagatcagaagaactactacaccccagatccacatgctggaagtccccccacaggtttctccgattctctgtgctcacacaatagtagt

SEQ ID NO: 18582 - DNA, 244 bp, Glycine max
  Clone ID: 700958312H1
ccctggtcttgctatggctcgggcatttggagatttttgccttaaggactttggattgattgctgttccagatatctcgtatcaccgtcttaccgacaaggatgaatttgtcgtgttagcaacagatgggatttgggatgttttatcaaatgaagaagttgtggacattgtagcacctgctccacggtctagtgctgctagagcactggttgagtcagctgttcaggcatggaatacaaaattt

SEQ ID NO: 18583 - DNA, 244 bp, Glycine max
  Clone ID: 700958313H1
cggctcgaggagagcgagcagtttcagacacagagagaggggtttgggattggagggattgacgctgcgtctcttcctcttctctttcgatccatccctcattcctaatcctccaatccaaccacctcagcctcacactcacatatacacatatctgaacgcgtatcgtccctcctatggcttcaaagcgcatcctcaaggagctcaaggacttgcagaaagacccaccaacttcttgcagcgc

SEQ ID NO: 18584 - DNA, 247 bp, Glycine max
  Clone ID: 700958314H1
cttaacaacagcacaaagcgggttactgtctgttcaagctaccatctctctctctctttcttagtgcctccttgccagaagttaaaatggcccaagaaactttcctattcacatctgaatcagtgaacgaggggcaccctgacaagctctgtgaccagatctccgatgctgtgctcgatgcatgcttggagcaggaccctgacagcaaggttgcctgtgaaacctgcaccaagaccaacatggtgat

SEQ ID NO: 18585 - DNA, 248 bp, Glycine max
  Clone ID: 700958315H1
atcttgttctgattatggaacagctgaagccaagtgctgctaactcttcccctctcactcccctcggcttcttggacagagcagccaccgtccacggcgacgtcccttccgttgtttataacaacaccaccttcacgtggtcccagacgcgccgccgatgcctccagctggcctccgccctctcctcccttggtatccgccgcggcagcgtcgtctccgtcgtggcccccaacatccccgccatgtac

SEQ ID NO: 18586 - DNA, 254 bp, Glycine max
  Clone ID: 700958316H1
agtagagagaaacttgctgagctttatgaatctgagaagcaatggtcaaaagcagctcaaatgctcagtggtattgaccttgattcaggaatgagggtgattgatgatggattcaggttgtcaaagtgtgtccaaattgcttgtttatatcttgaggtattgactcttttctgcaatgaaatctatatttgattgaagtagcggctattgggagtcatagcaagccacacaagaacatgagtatccatatctat

SEQ ID NO: 18587 - DNA, 129 bp, Glycine max
  Clone ID: 700958318H1
aaagacacatgtcaaaaatggaacttcatgtaaaataaactatggaactggatcaatatctggtttcttcagtcaaggtaatgttaaagttggcagtgctgttgtcaagcatcaggatttcattgaggc

SEQ ID NO: 18588 - DNA, 247 bp, Glycine max
  Clone ID: 700958319H1
cggctcgagcttctgccttggcctgcagtaatggttttttcttggttgtgtcttcgtcaaagtctgctgctttgtacagtttgactacttctactactactgcatgtaaagagaattaagaatgtgaacacaggggatttgcactgctatcgcgagctacacttctgttgcataatgggtttgttttatgagatatgtgcttctacacttaacctatggggaccatgtgcgtgctgcctctgtgctg

SEQ ID NO: 18589 - DNA, 249 bp, Glycine max
  Clone ID: 700958320H1
cttgggagaagaggtcgagtttcacagcagcaatggtgtacgtcaaggctcagaaatcagaagcctacttcaagagatatcaagtcaagttgaagagaagaagagagggaaaaaccgattaccgtgccaggattcggttgattaatcaggacaagaacaaatataacactccgaaataccgatttgttgttcgctttagcaacaaggacattgttgcacaaataatatctgctagcattgctggcgata

SEQ ID NO: 18590 - DNA, 248 bp, Glycine max
  Clone ID: 700958321H1
aagaaatccatcattactacccccacctcttcctttccattcctctctccagaagtcctagccctacaatctcaaagacaaacccatcattcaaagtcataaccgatacctaaaatcctcattccaatcaaaaccaaccccaccatgcccacaaaattaagtcatcaaattaaagcaccgatgatcctcaatttgatccttgtgcttatttgtgtcactactccaatcaaaggtgagaaatcaaggaa

SEQ ID NO: 18591 - DNA, 245 bp, Glycine max
  Clone ID: 700958322H1
gatcctcttctcggtgatcctcaggtctatccagagaaaggaacagttgctttttctgctggtttgcacggctgggcttttaccctgactaactttgccaagatgtatgcatctgagtttggagttgatgaaggaaaaatgatggaaaggctctggggtgaaaacttctttgatccagccacaaagaaatcgtccggcaagaatcatggctctgctacctgcaagcgtgggtttgttcagttctg

SEQ ID NO: 18592 - DNA, 248 bp, Glycine max
  Clone ID: 700958324H1
ctcagtttctttcttcaacgtttccatcatacacagatccgaatcctctctcaagccctaatttcccctcatttccatggccacagaagaagacactgtcgcggtggaacccgctcccgaacctgcctccgccgatcctcccccggaggagaaggaggagaccaaacctgaagccaaggctaagaaaaccaaggagcccaaacctaaaaaggtttccagacctcgcaaccctcccactcatccttcct

SEQ ID NO: 18593 - DNA, 243 bp, Glycine max
  Clone ID: 700958325H1
cagttttgcacttgatggcaatgctattactgtcacaggctaatttattacttcttcccagaacatccactgatagtcatcagccaaaagtatcagaagaaagcagacgagcttctgttgatatcttcttaaaggcagctgggtatcttgactgtgctgtaaggcatgttcttccacagttgcctggcgaactgaggagaaacttaccagtggatctcacagaaggagttcttggagcactct

SEQ ID NO: 18594 - DNA, 166 bp, Glycine max
  Clone ID: 700958289H1
ctggcgactcagatcctctctcgcatcttccccaaaaccctatcccccttcctctcccgttctctctccaccgccccctctcctccctccctctccgcgctctccttcctccgccgcatctccgttgccgccaacccctccctccaccgcgccctcctccccaact

SEQ ID NO: 18595 - DNA, 242 bp, Glycine max
  Clone ID: 700958327H1
caaaaacccattttttcctcttctttgcatcatcattctcattccttctttctaaactaaccaactttttttcaaacaaattcgattctttcttcatttttaacctaattttcttttcgatccaaaaaatggctctctcgcgcgttgttgctcaatcgtcgcaatcgaatcttctgaaacccctagcgtcgtacttatcactacgacgccgttcggtttcgacttcgtcagacccactcacg

SEQ ID NO: 18596 - DNA, 243 bp, Glycine max
  Clone ID: 700958328H1
caaccaacaagtagagacaaaccccagctacataaacatatgggtctttttatgaagctcccttttcctcctcatcttgcagcttcctcactgctccatttcatattattattattattattgatttttgatattgtgtgtaaaacaagggcagttgtgaaaattccaccaaatgtttcagttccagcagtgttggtgtttggagattcgatcgtggacactggcaacaacaacaacaacttg

SEQ ID NO: 18597 - DNA, 258 bp, Glycine max
  Clone ID: 700958249H1
cacttataaaaccctcttttctgcttcttcgtccattggcattggctttcaatggcgaagtgcatgaccagttcttcttcttcttcctatgcactgcttctctttttcttctgctttctacaactggaggctattttggaccctgctgatttcctcgctctgcaaaacattcgtaaagctctgcaagacatgcctgcttccgatttcttctcttcctgggatttcaccgcagacccatgcaacttcgccggcgtttac

SEQ ID NO: 18598 - DNA, 253 bp, Glycine max
  Clone ID: 700958254H1
cagcaagaagccatgaataaagtggtagaagttttgagtgtagcaccaattttggaatcagaagagttaccaactcaaacatcgcttcccctcaccttctttgatatactatggttaaggttaccacctgttcaacgcatcttcttctatgaatttcctcacccaacccatctcttctttgatacccttcttcccaaactcaaacactctctttctcttgcacttgcctactttttccctcttgctggacacc

SEQ ID NO: 18599 - DNA, 250 bp, Glycine max
  Clone ID: 700958257H1
acattattctcgaattagggttttccactgatctccgagcatacaccactactctgttcctcagattcaacaccaccttgcgtgtcgccaatgggaaaagccttcgacatcggagccgttccgttcaacgccgacgggtggggtccgccggacaacgcgacctcaggcagcaacaacaacaacctccctctgaacgtccccttcgcccccttctcccgctccgacaaattgggccgcatcgccgactgga

SEQ ID NO: 18600 - DNA, 251 bp, Glycine max
  Clone ID: 700958258H1
cttttgctatgacagaaaattgatggtggattttgctggaccagcaggaacctgttaatattttatacgcctctgagcatcatctacatgagataaatgccatttatccttagtgtttttgttttcatttgttgaataaaggaagtgctgctttgtgttccacgggaacaatggagaggtacaagttaattaaggaagttggtgatgggacttttgggagtgtctggagagctattaataagcaaaccggt

SEQ ID NO: 18601 - DNA, 253 bp, Glycine max
  Clone ID: 700958259H1
cttttgagatttttccaacctgaagactccctcttcttggttggttttttctcctacacaaccaaccaatcaagaaccatgcacatctttttctctgcataacttctcccgcccctgccaacatgacttgcatgcatgtgtgtgttaactcttcttcacttttacatgcatgcttgaggttttgaggtttcaacattagatgggcttataaagtcatcatatacacactcacatatatatatatatggttaat

SEQ ID NO: 18602 - DNA, 253 bp, Glycine max
  Clone ID: 700958262H1
ggccagcacaagcatattgtgggttcctttggggcatcaatggttgctccttggttggctgctcatggaaatccttcaaggtgtgttcttcttggcgtgagttgcggtgcaaatattgcagaccatgtggctcgaaaagctgtagaagcaggcaaacttctggaccctgttaaggtggtggcacaggtcctgatgtatccattttttattggaagtgtgcccactcgttctgaaataaagttggcaaattctt

SEQ ID NO: 18603 - DNA, 254 bp, Glycine max
  Clone ID: 700958263H1
gaaaaattacctgtataccagagtattgcaagtgtaaaaaggtcttaaaattatgataatttcaggaaccatgaaaaattacctgtgtaccagtgtattgcagtgtaaaaaggtcttaaaaccatgataatttcaggaaatgacaaactatgtgccaattactccattaatcaggtaactggtggaaatttatttccttgatatgtaaattctactattgctgcatcagattttgatttttcagaatgtgagaa

SEQ ID NO: 18604 - DNA, 267 bp, Glycine max
  Clone ID: 700958264H1
gttcggctcgagggaaatttagttcaaggaactggtgtgagtgctgggacctatgagcatacttccatttcacaagaggctttaaaacccgaaccccctgaaattgctcaggaaaatcagtattcatttccatcacattctcatggatttaattatgaaaatgcccaacagccggaggtcccatttcctgtttcacagaccagctcacagaatcagaatcttgctcccttctctggtgtaatgcaggcacatacaaattctttgccc

SEQ ID NO: 18605 - DNA, 258 bp, Glycine max
  Clone ID: 700958265H1
gccagtgtgtcaccaccatggccaccgtcacaacccaagcctccgccgcgattttccggccatgtgcctcgaaatcgaggtttctgaccggctcttccggtaaactcaaccgggaagtgactatgaggccaatggggtgccctccttctgcctctttcaaggttgaagccaagaagggagagtggttacctggcttggcctccccaacttacctcaatggcactcttcctggtgacaatggatttgaccctctgggac

SEQ ID NO: 18606 - DNA, 255 bp, Glycine max
  unsure (1)..(255): unsure at all n locations
  Clone ID: 700958268H1
ccttttccccaccacattatttttccttctcctacttccacaaaatcggcattctatcncacaaccactattgcgtagctccaaatttttatatctagctctttcttatgctagaatttgattcctcttcattcttcaacaactccaatgtattccttagcccaacacaagtacataccacgcttccacctccaagcttgcaagaaccacccaccccaccacccatcgtctccagtgttttgttccaccacaacc

SEQ ID NO: 18607 - DNA, 245 bp, Glycine max
  Clone ID: 700958269H1
gtcatctcgtcgagtattggctagtttggataagaaacccgaaaccaccgatgttttatcagcctcaaatgaatcccatttttatgttctcatcactttggaggcagtcgtggacaagcttggtggatttttaaatccatatctcacaaatatcatggagcttctggtgctttatcctgaatatgtttcaggagtagatgcaaaagtggagtctagagctcatggagtacgaaagcttcttgctg

SEQ ID NO: 18608 - DNA, 251 bp, Glycine max
  Clone ID: 700958270H1
catatccccccctagctacagagcagccaaaggggaggaataataataagcctatattctaaggccggaaaaataaaaaaggaataacaaaaatgtctggaaaggtaattatctcggctgtttctctcatcctggtggttggagtggccataggtgtggtggtggccgtcaacaagaagggcgaggatcccacacttcaatctcaacaaaaatcagtaggggttatctgccaaaacactgatgaccagaag

SEQ ID NO: 18609 - DNA, 251 bp, Glycine max
  Clone ID: 700958271H1
gacctctgttttgtttaacacaaaatctaaaaggaaaaaaaaaaaaaaaaaaactatttcaccgattctcgggatctttggcctcgaatcgactcgaatcgattcgagaggtaaaagatccaaccccgcctggcctctgttttgtgatcgaaagccataaaaagttgttttcgatcacaacctcaatcgtattaagctgttgttgtcccccgtcgtcaatttcgaatattgaaaggttttagttgttgatt

SEQ ID NO: 18610 - DNA, 251 bp, Glycine max
  Clone ID: 700958272H1
ctgctatcaccttttccgtttcttgcgattcgacgatggccgatcaaaagctttcagaaccggcgcttaaacgtgagcagcttgatgaattcgtgagtagtctatattttgaacaacgaattcttgaactccgacttcttcaagacctcgagaacaatgatgaatgtaggaaaaatgggagcctgaaaaggttaaatgaccagagtgatgtctgtggatttagaagttgcttcaaaaatcattatgattcg

SEQ ID NO: 18611 - DNA, 251 bp, Glycine max
  Clone ID: 700958274H1
caccttcaaacccgaaccctaaccctagaagaaagaaaaaaacccacaacacacaatcagtactaccaactagggtttttgtcatggctagtttgcaaactagggttttcttgatggcccttctgtgcctgctggctcttggtgtcaaccattattccaatggcacaaggggaagtgtcatgtggccaagttgtgagtaacctgaccccatgcatctcctatgtgctatatggtggagccacggttcctgc

SEQ ID NO: 18612 - DNA, 253 bp, Glycine max
  unsure (1)..(253): unsure at all n locations
  Clone ID: 700958275H1
gtgagttgcaggcagtgtcatctctcctttgacgacaagatgagcatcccaattccccatcggcagttattcatagacggagactggaaagtccccgtcctcaagaatcggattcccatcatcaacccttccacccaacacatgatacagggntatcccagcagctactaaggaagacgttgatctcgctgtcgctgccgccaaagctgccctctcccgcaacaagggcgccgattgggctngggcttccggc

SEQ ID NO: 18613 - DNA, 250 bp, Glycine max
  Clone ID: 700958276H1
gacgggcatcgtgggcaacagcctcgccgagatcctccctctcgccgacacccccgccggtccatggaaggtctacggcgtcgcacgccgcccccgtccgccgtggaacgccgaccatcctgtcgagtacatccagtgcgacgtctccgatcccgccgacgccgaagccaaactctccgccctaaccgacgtcactcacgtcttcttcgtgtcgtggaccaaccgctccaccgaagcagaaaactgcgaa

SEQ ID NO: 18614 - DNA, 250 bp, Glycine max
  Clone ID: 700958277H1
ctacacatccctagctctgtcgttccgtcgttgacgatggcgtttcgggtgcgaaccctgacctccgctctctctttcttctctctctcttgtccatcgctttcgccaatgtcttcttctaagagcgtttcgatgacgggtgggaaaatcgatgggttaaatcagattggaaaaaagatgagaacgtggctggggagtggaaccacacctctggtcaatggaatggagacgctaatgacaaaggtattca

SEQ ID NO: 18615 - DNA, 249 bp, Glycine max
  Clone ID: 700958278H1
ctctgctcgtgcctctagggttatcatatctccatttccatttcctctctctcagtttccaagaatcttaagctatgggaaagtcttacccaaccgtgagcgctgattaccagaaggccgttgagaaggcgaagaagaagctcagaggcttcatcgctgagaagagatgcgctcctctaatgctccgtttggcatggcactctgctggaacttacgacgtgagctcgaagaccggtggtcccttcggaa

SEQ ID NO: 18616 - DNA, 254 bp, Glycine max
  Clone ID: 700958281H1
aagcatttgcccaagagcgcgttttttattctcaatatccttcttcttgttattattattattgttattgttccttgttgttaacatatattaataactctttcttaaacccaaatcttgtgacatcacaaaccgtaccctttttgtttatttcctttgtgggttttcaattcgtgcaaatttctgcgacacccagatggattttgcgctgaatccgtgtcctttgcgatcttctacgttcgtgaatttcgtcg

SEQ ID NO: 18617 - DNA, 252 bp, Glycine max
  Clone ID: 700958282H1
gaaagaaagaagttctaaggaagagggaatatgcagaatacaaggtgctagttgtctatttgcaataacaacatcagcgatccaaccttagtattcttcaacccagagagatttgtaataataaattacaacaacttaaacgatggcaggaggagcttatgtagattcgggaaatgcaaagcaatttgatgggaaggtcacggcattcgtattggttacatgctttgtggcagccatgggaggcttactctt

SEQ ID NO: 18618 - DNA, 253 bp, Glycine max
  Clone ID: 700958283H1
ctctttctctagtcctgttatttctcagcgcgtaaagcatggctttgttggtggagaaaaccacgagtggtcgcgagtacaaggtcaaggacctttcccaggccgacttcggccgcctcgagatcgagctggccgaggttgagatgtccggcctcatggcctgtcggaccgagttcggcccctcccagcccttcaagggggcccgcatcaccggctccctccacatgaccatccagaacgccgttctcattga

SEQ ID NO: 18619 - DNA, 248 bp, Glycine max
  Clone ID: 700958285H1
gaaatcctcaagcttcaatttgctttgtgctcactcatctatctattataaccaaacactcttcttcatattcttcttcttcttcttgttcttgttctatctgtgacgagcatcatggcctcgagagcagtgctattgttggctatgtgtgtgcttccggccatggttgtggccattcgcccagcaaagaaccctttttgcgtgaagggtcgcgtctactgtgacccttgccgtgctggttttgagac

SEQ ID NO: 18620 - DNA, 246 bp, Glycine max
  unsure (1)..(246): unsure at all n locations
  Clone ID: 700958286H1
tttccccactcactctctcatctttctcctaaaacatctccagtgggttcttcttcttctattacaacaacgtcacacaagaccatgaccatggccatggccacgatcctgctcctgttcacggtcttcgcggtttcatcggccctagacatgtcgataatctcgtacgacaacgcccacgccgccacgtcgcgcagactnaggagctgatgtccatgtacgagcagtggctagtaaagcacggca

SEQ ID NO: 18621 - DNA, 123 bp, Glycine max
  Clone ID: 700958287H1
ttcaaaagtttttgaaatgttgtcaccccttcttctatttctatgcctaactcttcctttgtttttgttgtccttcgtcaaataccgtaaaaccttcaagaatccaccacttccaccaggtcc

SEQ ID NO: 18622 - DNA, 256 bp, Glycine max
  Clone ID: 700958248H1
cacagcctcacaagtaacaaacttataacacacactctctctctctctctctgcaatggctggaatggttcccctttgcattgcatcattggtcactctttttgttgcaacaagtgctagaattcctggggttttcaatggtggtgcatggcagggtgcccacgccactttctacggtggaaatgatgcctctggaacaatgggtggggcatgtgggtacgggaacctatacagccaagggtatggcgtgaacacc

SEQ ID NO: 18623 - DNA, 260 bp, Glycine max
  Clone ID: 700958212H1
gtgggaggagagtcacaactcacaactaccagtccttgctttgcatcgtgtgagtttgggagaggaaggaagctactcggaaagtgattccttcctcggcgaaaaaaaaccaaaccattcctttataaccataaagtgccttcttttttcttcaccaccactccattactctcttcacactccacacacacacacatacacacctctagcttgtgtttgagattgaggaatataagaaaatgaaaatgggtaaagggatg

SEQ ID NO: 18624 - DNA, 259 bp, Glycine max
  Clone ID: 700958214H1
gcgattcagatcttagggtttcaatttttttttctgtggagccccattggccatagccgccagccagagaagagtagaagccttcgatcctaggttttctttccccccctttctctcaaatcggacctttttcgcttctcgattcgcttccgtagccgggcgatttgaggacccagaaaagaacgaaccgaacgttttatattttttcggataatcaatcgaagatgtctcgttgcttccctttcccccctcctgggta

SEQ ID NO: 18625 - DNA, 261 bp, Glycine max
  Clone ID: 700958216H1
caaggactactttaatgattaaaaacattcctaacaagtatacgtcgaagatgctgcttgctgcaattgatgagaatcaccagggtacttatgacttcctctacttgccaattgacttcaagaataagtgtaatgtgggttatgcttttatcaatatggtgtctccttcacacatcatcgccttctacaaggcctttaatgggaaaaagtgggagaagttcaacagtgaaaaggttgcttcactggcatatgcacggatac

SEQ ID NO: 18626 - DNA, 261 bp, Glycine max
  Clone ID: 700958219H1
aacgaagacgaaataattaacccatcagagagagagaggtaataatgggagtgataaaggatggcacaatctcaggggttctaccggaacctcaaggatttatggtgcactatcctgcttatccatcatccatctctcgagctgttgatactcttgggggaattcaagccatccagaaggctcgctgttccaaatccaacaaattacagcttcgtttccgtcctgaagacccctattctcaccctgcatttggggagcttc

SEQ ID NO: 18627 - DNA, 256 bp, Glycine max
  Clone ID: 700958222H1
cgactctgtcagccaggaggttcattattggaactgggaaacatcatggggttggagtgagtgaaacttaacataaaaaagacttttttattcatagtgctctgtgttaatatgatttttttttaatatacgtgacctttttgttttatgagaattaatggtaaataatattttttatggacctaaaggtttagctttaataatcttaacttttggccgacctcttttaattgcatacactcgtacattatatgtg

SEQ ID NO: 18628 - DNA, 258 bp, Glycine max
  unsure (1)..(258): unsure at all n locations
  Clone ID: 700958223H1
ctctcactctcacactctctcactcacactcacactcacatcattgtatagnagattagagagagagaaccctaaactaaaaccctaaaattccattgcagcaagcaaaggcattgatcgatctgcatgggtcacgtaggttccagcaaggacggcaccgaggctgggccttccgccgccgcgatgggcatcgacgacgacgaagacatcgacctcggcgacgtcgatctcgacccgaccaacgccgaaatcctcgaa

SEQ ID NO: 18629 - DNA, 258 bp, Glycine max
  Clone ID: 700958225H1
gcaaaacgcgttcgtaacagaagaaagaaagaaaagagtaactgacaactgtaccagtagaaaaatcatcgacgcgactcgctgaagcggtgaattaaacaaaccgaagcgtgaagagaaggttctggaagaagcggatgggaaaatcgacgaataataacagagactggacgcagatgtacgcgatctacggaatggagcaatggcagaccctaattttcctcttgtgtcaggcgatgctgttttcagtgttgtctg

SEQ ID NO: 18630 - DNA, 254 bp, Glycine max
  Clone ID: 700958226H1
atttcaccagaatatacctatcttaattgatgcggaaaggcctagggaaggattgaatgacctcctgagtttggctgattatgttgtatgttcagaaaattttccacgggcctggacagaggcatcatctattccaagagcactagtttcaattattttaagattgccaagacttaaatttgctattgtaactttgggaaaagatggctgcataatgcttgagcgatgtgtggatgatgaaggttctcacatag

SEQ ID NO: 18631 - DNA, 256 bp, Glycine max
  Clone ID: 700958227H1
cgaccagctatgtggaggcatctgatagtttgatagttatggttttctggtaactacaagctttacttgtgtactcttacaaaacaggaatttgcttaaagtttaaggttgtgtttctgcttttgttttttcttggttttctttttaaggaccaaagttatactttagaggaaattatgttagatgtggatgcttggttgttagtattttatgcaagagccttgtacttttcccgggtaaccacttgtcactgatc

SEQ ID NO: 18632 - DNA, 257 bp, Glycine max
  Clone ID: 700958228H1
aagaacagttggtgctcttattgggctctatgaacgagcagtaggaatttatgcttcccttgtcaacataaatgcttatcatcaacctggtttaggcaatatggcttgtgggagaggtatgctgaattgtatccaaatgaagacctagtttacactgttggcattagtgactacagaaaagattggttctttgcacaggttaacaggaagaaagacaatggcactgacataggaaccacatggcaaattaatttcaa

SEQ ID NO: 18633 - DNA, 254 bp, Glycine max
  Clone ID: 700958229H1
ggcatcttgtgttgtgtccctcttttaagctatttccttctcttaacacaattggttgtgccaattgccatagtcaccaaccaattaacaaaggtatatatatcatcatatcatcaccaaatgaaaaatattgggttgttttttcttgtggtggtggctacttttgtggtggcagccacagctggtagcttttaccaagactttgaaataacgtggggtggtgagcgtgccaaaatctatgagaatggaaacct

SEQ ID NO: 18634 - DNA, 255 bp, Glycine max
  Clone ID: 700958230H1
caaccatgacatgtctgcagtagctgacatcatcgttgtcactgcggattggctaaactacagagctgtatgccgttgtgacaggtgctggtaatggaattggcttagagttagttatacaattagcttacacctggagtcaacgtggtgctcactgcactagatgcctcgacaggtatccaagcactgcacgcactcaaggactacgggtctatctgagcttgtactgaatcatcaagctgatgtggctgatgc

SEQ ID NO: 18635 - DNA, 259 bp, Glycine max
  Clone ID: 700958231H1
gcttcttgcaagaagtttctgagcttttatatcctctatatatagttctctggcaattaaggtctcatccaaataagcacaaatgggtagccagagttacttcaaggctttgattatttgccttatagcactaattggatcaactcaagctcaattgcagcttggtttctatgccaaaagttgtccaaaggctgagcaaataattctgaagtacgttgttgagcatatccacaacgctccatcactagcagctgctctc

SEQ ID NO: 18636 - DNA, 259 bp, Glycine max
  Clone ID: 700958232H1
gtggaattaacactgctatggaacgacagataacattgctacatgaactgatgtccactgttaaggatatgttacgcaacacagaggttgctgttcgttcctttatgatgctacgccctaggttccttcatccgagtgggggtacatcaagtgccactgccccatcacagactcctggtgcaactatagcacctagttcgagtagccaaccaacaactgcttctatagtgcctgtttttgatttctacagtggtcttcc

SEQ ID NO: 18637 - DNA, 259 bp, Glycine max
  Clone ID: 700958234H1
aaatctcatgtctgttcaaagctttcttattcttcgtattcatcatacaccacgccaaatcacaatacccttcaggaacaccgatgtcaccaatttcacatcttgtgggttttagttggatgttttcaagggtttgattctagggttacttatgcagtttttgggaattttggctcagttgagatctctgtgaaacgggtttggaaaattttttgatcttgaggtttatgagattttaactgtggaagaaagatggtgg

SEQ ID NO: 18638 - DNA, 256 bp, Glycine max
  Clone ID: 700958235H1
gaggaatcaagatagctcctttgaattttctatcagaatctgaggacccataatctagggttttctgttcttctctggggatctgaagacatgcagtccaagtctgaaactgcaaatcggctgaggtcagatcctcattcctttcaacctggcggtgtttattctgagccttggtggcgtggtattgggtacaatcccatggcccaaacaatggctggggcaaatgcgtccaattcgtcatctcttgaatgcccta

SEQ ID NO: 18639 - DNA, 255 bp, Glycine max
  Clone ID: 700958237H1
ttcatccattcctaatccttgcttggccactttgcgcatttcaattcttctttcggttttttcctgttttgggaaattgcataatattctccttctgttctttcatttcatctactgtgccacgcgttatacgtaaacgaaatacgggggaacgagtgaaagaagaagaagaagaagaagaatggtgattataaaccttgggaagaagaagagcgagagagaaggaatgcgacttgggaaatacgagttgggtag

SEQ ID NO: 18640 - DNA, 129 bp, Glycine max
  Clone ID: 700958239H1
cacagactcccaagtctgttgaagatgacttctttactacagccactgatgcattcagccatgctcatgttgatgccgagtccaatgtaattgatttcagttaccttgaaccacctccacacaacatac

SEQ ID NO: 18641 - DNA, 256 bp, Glycine max
  Clone ID: 700958241H1
gtaactttttgcattgtaaacccatgagttgcaaacaaagtgaatggttccatgatttggaatgtcttcaagagtgacaaaagggatcgcattttctttgctaataagacatatcttccaaatgaaactccaactccactagtgaagtacagaaaagaagaattggaaaatctaagaggagatggaaaaggagagcgcaaggaatatgataggatctatgattatgatgtctataatgatttgggtaacccagaca

SEQ ID NO: 18642 - DNA, 255 bp, Glycine max
  Clone ID: 700958242H1
cttactcgttacactactttccccccttttcgccttgcagcagtggatcgagatgctgggaaagacgaggaaggtttctgcgcgtggcgaatccgtggcggcgaactacgccttcggtccctccgaagatgacgtaatcatcaagcacaggcttctcacgcgcaccaccaccaccaggggcgaccctcccttgaagaagcttcagaagaagttcacctcgttcgtctccgaagtggacaaggacgaagacaacaa

SEQ ID NO: 18643 - DNA, 253 bp, Glycine max
  Clone ID: 700958243H1
cttggatatattagcaaggttaagatacttcatcttctgcaaggagctaccagtggtgttgaaggccgtcgttcacggcgatgaaaacctattcaacagctacccagaattgcaagatgccttggtttgggtctactttcactcaatcattccagaattcaacaaggtggaatgttggggcccactgaaggaagcgtcacacccacaggtggggtccaggaggaggggttggcaattccacagccatgccaag

SEQ ID NO: 18644 - DNA, 254 bp, Glycine max
  Clone ID: 700958245H1
gaaaattaatctccctttcattttctctgcatctgtactctccaaaatgccgtccttagaggaggagctcttcccttcaaccccaggcaagttcaagatcgagcgggcccaccacatgaaccgccagctctaccgctgcttcgcctccaccagcaccatgttcctgtgggccctctttttaatcgccctcaccgcttcatatctcagcttccaaggcttcgttgattccggcagccgctacctctccgcctcct

SEQ ID NO: 18645 - DNA, 254 bp, Glycine max
  Clone ID: 700958246H1
ggagatgttacttgatgcagcaacatgatgatctttgggctaagattctgcattctaagtatggaggttggagggctctagatgaaggaacatcagtcaccaatgaatccatatggtggcaggatttaaggtcagtcatccatgaacaaggtgtgcaggccttgcttcaatctgcaatagagtggaaagtggggtgtggggatgaagtaaggttttgggaggactgctggcttacagatcaggaatccctaagg

SEQ ID NO: 18646 - DNA, 255 bp, Glycine max
  Clone ID: 700958247H1
gttcccactatctctattacttggtcgctggacgcacgtgccaatccttcccaggtgagcacggtggggcgctccgcatcggataaaccgccgcagaggtcgctgttttcgagattttccttttggtaccctttggaatctctctggcctcgggggaacaacagcaggtacaaggggttggccctcgacgacgccgttttgtcggacaacaacgccgaagcgaaggccgttggagatgacggaacggaacggcag

SEQ ID NO: 18647 - DNA, 258 bp, Glycine max
  Clone ID: 700958211H1
aaaaaagaaaaaagaagacagaggaaagaaaggagagctggaatcacatggacttgtctttctctttctgggtctccattaaatttttcttctctcccttctttctctctctctctctctgaccattctcttcttcttctttttcttctcctctctctctctcccctccgccatggctgaggataaggagatgtctacctctgtcatcaatgggaatgattccctaactggtcacatcatatctacaactattggagg

SEQ ID NO: 18648 - DNA, 150 bp, Glycine max
  Clone ID: 700958177H1
tctctgtctctctctctctctatcgatcaatcatggctgtgcccaatcagcaaaccggcgattaccctagtttcaaactcgtcatcgtctgtgacggtggtacaggagagataacgttcgtaaaaaggcatcttaccggtgaatatgaga

SEQ ID NO: 18649 - DNA, 258 bp, Glycine max
  Clone ID: 700958178H1
cactccctcctcttcacacattttcttacccctctccaacaatccctctcgttcacactttcagattgtatgaagatgggggctggtggccgaactgctgttcctcctgccaacaggaagtcagaggctgaccctttgaagcgggtaccatttgaaaaacctcagtttagtctcagccagattaagaaggccattccacctcactgtttccagcgctctgttctccgctcattctcctatgttgtttatgacctcacc

SEQ ID NO: 18650 - DNA, 255 bp, Glycine max
  Clone ID: 700958179H1
agcgaaccggtgatactatcgacgatggagagactcggactgggttcaccacacctgccatggaagtcaccacattcaatcgaaccactttcaccgatgctgctgactttcccgtttgggaaaagattggtgctgtcgtcagactcagttatggcctcgggatttatggtgccatggcagttgcggggagttttatatgttcaatcacgggaattgactctctggggggtttccatctatcgttagatgccattt

SEQ ID NO: 18651 - DNA, 261 bp, Glycine max
  Clone ID: 700958180H1
cagcggagtgcttcgccttccgttacggccccgtgccaccgttcctcacctacttccgtttcgacggtaacggcaaaaaacacgaggacgttcctattttctccatgctaacaccttcgttcctccacgatttcgccattacgaagaaatacgcgatcttctgtgatattcagctcggattgaaccctcttgacatgatctccggtggctcccccgtcggctccgtcgcctccaaggtcccaaggatcggaatcctccctc

SEQ ID NO: 18652 - DNA, 257 bp, Glycine max
  Clone ID: 700958181H1
gtgttatttgttggtatggctggcctgctaaatttcaatggattatgcatagaagagattttgcttctgtctttagttaaattgctcaaatgttttgatgactccaaaaccttctttgttggatgggttgttgtggacagtggctctgtctttatgcttttaattcttaaggaaattttgtactattgtatggtgttggtcctagcagcctttctttttatccttcttctccaatatgatttacagttaataccttc

SEQ ID NO: 18653 - DNA, 259 bp, Glycine max
  Clone ID: 700958182H1
gcctttccttacactacttcatttcgtggcatagataataagggggagtaggtattgcacacatgattcaaaagattgaaaacaaagagtacatgggatttggagacctttgcagatatatgaaggactccaaagtctattaggaaagccacttatagtgggtgcgaacaatctaacatggacattggtgaagtttatcaactctgagagttgtgatgttggtagtactaagaatgacttattggcagagaaatacagc

SEQ ID NO: 18654 - DNA, 260 bp, Glycine max
  Clone ID: 700958184H1
cttaacaccaacacacccaaaatctcaatcttgttcagatccctcacaccctttttccattcaaactaagggtgtgagaagatgagtgaggtcttcgaagggtacgagcgccagtactgtgaactctctgctaatctctctcgcaaatgcagttctgcctctcttgtttctgaccaagaacagaagccgcagaagttgtctgagatcaaagcggggctagatgatgctgatgttctgattcggaaaatggaccttgaagc

SEQ ID NO: 18655 - DNA, 258 bp, Glycine max
  Clone ID: 700958185H1
ccgcgctctctttgtccaaaccaatgtctggtcctcctccggttcggtctctcccgacggaacattagtccaaaccggtggcttcaacgacggctaccgtgcggtcagaaccttcaccccgtgccgctcgtgcgactgggcagaagttcagcatggactcgcggcgcagagatggtacgccaccaatcacatcttgccagatggacgtcaaataattatcggaggaagacgacaattcaactacgagttttaccccaa

SEQ ID NO: 18656 - DNA, 257 bp, Glycine max
  Clone ID: 700958186H1
gctgaagtttcggtgtctttgggaggaggtccttcatggaacgtactactaggaagaagggacggtttgattgcaaaccaatctagtgcgaacacatccattcccaatccaacagaaagccaggccaatgtcactgccaaatttgctgccgttggcctaaacataactgatctcgttgcattatctggtgcacatagttttggtcatgcgcagtgtagatttttcaaccagagactgttcaacttcagcggcacagg

SEQ ID NO: 18657 - DNA, 256 bp, Glycine max
  Clone ID: 700958187H1
cttgtttcagttctttctttggtcactgctctctaacctagttccacattttcactcaccaagtctcatctttaagttcatatttctcttcattcacatcacttctctgatctgtctcttcacactctttgaccccgatcaaaattttgacccttttttctctctctgttaatgctttccatcaagccattcacagaaaaacccctgtttccatctgggtctaccctctttctggatttttgttatctgattttgt

SEQ ID NO: 18658 - DNA, 255 bp, Glycine max
  Clone ID: 700958189H1
caactcactcccaagagtgacgtttattcatttggaattttgcttttagaaattgtgacagcccgccgtcctgttgagttgaagaaaactgtcgcagagcgggttacactcagatgggccttcaggaagtataatgaaggaagtgtggtggaacttgtggatcctttaatggaagaagctgtaaacggagatgttctgatgaaaatgcttgatttggcgtttcaatgtgcagcccccattcgaacagatagacct

SEQ ID NO: 18659 - DNA, 253 bp, Glycine max
  Clone ID: 700958190H1
aagaagagggggtcagagtgagaaagagaaagagagaattcgtaaaccctaatttcggaaagatcggcgatgactgcatccaaggatcgcaagaacttcgtctacatcgccaaactcgccgagcaggccgagcattacgaagagatggtggaatcaatgaagaacgttgcgaatctcgacgttgaactgacggtggaggagcggagattgctttctgttgggtacaagaatgtgattggagctcgcaggcgtc

SEQ ID NO: 18660 - DNA, 253 bp, Glycine max
  Clone ID: 700958191H1
gattgatggtggtgtgcatgagtatgagatgggagattacaatcaccctgaggcggaggaaatatttgtcgaattggctgaggtgatggataagataagaaaagaagggtatgatcccagagtttcggaggtcttgcttgagatggatgatgaggaaaaggccgttcagttgcttcaccatagtgagaagctggctcttgcttatggtctaatcaggataggtcatgggtctacaatctggattgtgaaaaac

SEQ ID NO: 18661 - DNA, 208 bp, Glycine max
  Clone ID: 700958192H1
ggaggtgtattggtccattatccgttgttaatggtaatggaagtggaagtagcacttccattttccaatttccaatttccagtggagtagaacacattcattcaattgcacttttttataatttcatatatcctccaatattgctggtggttagcactcacaagagacaggctcaactaccatacaaattttccattcccggcatctc

SEQ ID NO: 18662 - DNA, 252 bp, Glycine max
  Clone ID: 700958193H1
cttcaactcaacaacccttctcttctcaaactcattcttgcctttctttttgttcatacttttattcttattgctacttactttttatttctatccaatcatccatgcccgaggaaccccaaacaccagcctccgctgaagaagtggtgcctgttcctgcggacacgccaccaactacccaatctgaagctgaagctgaagttgaagcaaatgcagaaagcatcgaagaagtggtggcggaagcagagcagg

SEQ ID NO: 18663 - DNA, 255 bp, Glycine max
  Clone ID: 700958194H1
cgctactctttcttcttcttccttttttattgatcctctctgcgatcacgaattttcccattttctccgtttcctcggcgaccaaacggaggagaagaacgcattctgaaaacgattggaaaatgctgggaactgcactgcaattcagcgtcgttcgcggcgaggatcggttttacattccggtgaaggcgaggaagaaccagaatcagcggaaacagagtcacagagccaagaacaacgaacctgaaaacgcgg

SEQ ID NO: 18664 - DNA, 272 bp, Glycine max
  Clone ID: 700958201H1
tctcacggcaattttataggtcctccaagaaagagagagagagagagtgaaacgataccaagggagaaaaacaaccaccgtccaaaccaccaccaacaacgtacgtcttacgttgttacatggccactcgtgttatcccaccaagaatcctaaggaagcttcgctacaacaccgccacaaaacccctcaactcctctcaccctcctctctccccgtctctctctccttctctctgcctcctacctgctccgcttgtcgtcccccgccgtgct

SEQ ID NO: 18665 - DNA, 264 bp, Glycine max
  Clone ID: 700958202H1
ccaccacacaatttcatttcatttttccttttcacttcactttcccccaattttctttctcaacaatggccgcagcaacacaactccacttaccccctggattccgattccaccccaccgatgaagaactcgtcgttcactatctctgccgcaaatgcgcttcgcaagaaatcgcagttccaataatcgccgaaatcgatctctacaagtacgacccatgggaccttccaggaatggctttgtacggagagaaagagtggtatt

SEQ ID NO: 18666 - DNA, 263 bp, Glycine max
  Clone ID: 700958203H1
gagaaaacagagctggctgctcctgtggatttgtctatgtatgcagcgaacgcatccaagcagaataccggggaaactgctgaaatcaagaagttaggaggtttaaccctaaaggggtctgctgattccatgagcattaaaagtggttctggtgcttcctcatctgttctcgacaaagtagttcatgctgctaatgagaacataggctcacaggaaagctctattgatcttgacaaaaagacgtcggaagatggaagtgtgaa

SEQ ID NO: 18667 - DNA, 262 bp, Glycine max
  Clone ID: 700958204H1
gttttcttcagatatttttctttttttcgttttttctgtcgtttcaccccaaacagatattttggtatccaaacagacctcatctctacattttttctttaccagcagaacagaagaaacacgttcgtttcgtttcgttcccatggcggtctccgtttccgcgtcctccgcgattgcttctttgaactccgaactctccacgcgcttgccaccctcactcgcctccgcatcttcttccgccaagcaatcctttctgcaattc

SEQ ID NO: 18668 - DNA, 260 bp, Glycine max
  Clone ID: 700958206H1
cttagaagcagatgaaggaagagatcctggtagcaatggttcgcgtctataatgcgccttcctataatggttcatctgctcctacaacttcacaaccacttgcagatttggcatttccaagtactggcatatctggtcaagctcctgcttctagcttggcaattgatgatctgcttggtttagattttccagttgagactgcagccatgccttcacctcctccattgaacctaaacccaaaagctgtactggatcctggc

SEQ ID NO: 18669 - DNA, 259 bp, Glycine max
  Clone ID: 700958207H1
cggaaaccaaaccccgaccaacctctctcccccaccttcgcgttctgattcagctgagagtggttgggctctgcaaaaattagctgcatgagctggtttgggaaactccgtttattctccaatttcaatccctttcatctcattacttctttgttaatttttaccctccatttttcaccccaatcgcgcttttccctccaacccctgttattgatccacgctaaaaccaatcccaatcgtaatttccggttttcgtcac

SEQ ID NO: 18670 - DNA, 256 bp, Glycine max
  Clone ID: 700958208H1
aatactttataataataataacaacgagaagttgatacaaacgataaaataaataagtatcatcgtctcctccgttattggacatatttgagtcttcttcgattcacgctgtaaccatcatctgtgatcgattctaaaatcttcatcaagaagatgcagctacaagatggttctgttggtaaagtcattaataacctctcacaagttctggcaagggtggtgggagaccagagcatctttccccacctacacaaaa

SEQ ID NO: 18671 - DNA, 260 bp, Glycine max
  Clone ID: 700958209H1
cctaattctcatttcttcatcgttcgattcttctcctcctaaagatgcagatctacgtgaaaactttgaccggtaagaccatcacccttgaggtggagtcctccgacaccatcgataacgtgaaagctaagattcaagacaaggaagggatcccacctgaccagcagagacttatctttgcgggtaaacagcttgaggatggtcgaacccttgccgactacaacatccaaaaggaatccactctccacctcgtgcttcgc

SEQ ID NO: 18672 - DNA, 258 bp, Glycine max
  Clone ID: 700958176H1
catctcacaattcattcaccttttaattcatctcactcacaaatcacaatgctcttcctttcttccttaataataataccataataatctgttacgttacggggcccaaatgtctgttacggagctcaaggagcgtcactctgctgccaccgacaccgtcaacaatctcagacaccgtttaaagcagaagcgcctttcgttgctcgacacagatatttctgggtatgcaaggtctcagggtagaacgcctgtgacctt

SEQ ID NO: 18673 - DNA, 261 bp, Glycine max
  Clone ID: 700958143H1
tgaaggagttgaagcttacatttggttactggcaaaggcttacgttgttgtgaatgatgcttgctaccatcaaatcattagccattggctaaacactcatgcggttgtggagccattcgtcatagcgacaaacaggcatctgagcgtggttcaccctatttacaaacttctgtttcctcactatcgtgacaccatgaacattaattcacttgcccgcaaatccttggtcaatgccgacggtattatagagaaaacattctt

SEQ ID NO: 18674 - DNA, 80 bp, Glycine max
  Clone ID: 700958144H1
tccagacacgataaaggcagtcataaagtgagaatggatctgtgtgctgctcatgcgaagaaccttttccacacaaattc

SEQ ID NO: 18675 - DNA, 259 bp, Glycine max
  Clone ID: 700958146H1
ctttaatttgtctcaacgttgaagtgaattgcttcaagtccaaaaatggagcagtatgaaattcttgaacagattggaagacgttcctttgcttcagctctacttgtcaggcacaggcacgaaaacagaaggtatgtccttaagaagatacgtcttgcacgccagactgatagaactcgtagatctgctcaccaggagatggagcttatctctaaagttcgcaatccatttatcgtagagtataaagattcctgggtgg

SEQ ID NO: 18676 - DNA, 260 bp, Glycine max
  Clone ID: 700958147H1
ctttcaatcaccccatattcaaaaatgctcctcattgttcacacacattcttgaaaggtacctgtttttccaaccaccccatttcttaaaaaaactatttttccttcaagttccttcatcatttcttgtagttttgagtctttggttattggggtggttgcacttgcactatggaaacttgcacggctctgttgtttttaacggccatcacagcatacttgatatggttcacgttcatctcacggtcgctgaagggtcca

SEQ ID NO: 18677 - DNA, 273 bp, Glycine max
  Clone ID: 700958148H1
cggatcgagctcaatatgatcaagttcaaggttgtatctctaggctttactttatgttttttttcttcattcttctcccattccatcttcacttccttcctttttccttgtcattttggattttagatattttctgcttggctggaccagtaatattatcttgtggtgcttgtgattttagattagatattttctgtttatcagttaccatgactactttagttgtaactgtgcctctattctgccattgtcactatattaccgctatctttg

SEQ ID NO: 18678 - DNA, 243 bp, Glycine max
  Clone ID: 700958149H1
gcaagaacatgaataacttggtcctatctcttgttcctaaattcgcaaaactgcaaactctaatcctccgtcaagacaagcctcaactagaggataatgctgttgagactattgcaaaatgctgtcatgaactgcagatcctggacctcagcaaaagtttcaagctaactgatcgttcactctatgagctcgcccttggttgtcgcgatcttacaaaactcaacatcagcgggtgttcagcat

SEQ ID NO: 18679 - DNA, 264 bp, Glycine max
  Clone ID: 700958151H1
aatgaatattgcctcgttgtacacctgcatagggatcactcacattgctgctagcctgaggataaaacattgatagcaatggatttcttgctgccatgttattgttcgcatccaaattcctgttagcagaatctatattagacatgttcttcttgagcagttgttccaaggtattactgtttgatccattgctctcatagtgccatggctgagtgtaggatcctggaatgtgatctagaacactgtttctattcatcaagtggc

SEQ ID NO: 18680 - DNA, 263 bp, Glycine max
  Clone ID: 700958152H1
ctcttacattagcaaaaaccaaaacccgaaaaaacgcacagcacagcatcgagcacagcaacacctgaaaaaggaagggttagtgagtgtgtgtgtggaaattgtcatcgctcgcaagagcaacaacaactagtacttaaagagacagagagtgtgcacatcaatgtctgctcaggtcggtgtcaggacacgagcccaagccgcattagccatggaagctgttagttctgctgaaccatcatccaagagaaagaagatcagca

SEQ ID NO: 18681 - DNA, 230 bp, Glycine max
  unsure (1)..(230): unsure at all n locations
  Clone ID: 700958155H1
ctaaaaaactcttagttcggtctaaaaccctgaactgctgaagaacacaaggcaaaaagaggcacaaaatttacatattatgaagtgagaaaatcctaagagatgtttgttacatcccttgcttgctcttacttcacttatcccacccttttgcattctttttgttccacatttacttcgtgccgtnagcagtgcacgttgctgcagctcaatagacacagtcagaaata

SEQ ID NO: 18682 - DNA, 262 bp, Glycine max
  Clone ID: 700958156H1
cagcatcttgcatgcccccatgtctttctttgacaccacgccatctgggagaattctaagcagggcatccactgatcaaaccaatgttgatgtctttatccccttgttcatcaattttgtggtggctatgtacattacagtgatcagcatcttcataatcacgtgtcaaaattcttggccaacagctttcttgttaattcctcttgcttggttaaacatttggtaccggggttattttcttgcttcatctcgcgagttaact

SEQ ID NO: 18683 - DNA, 261 bp, Glycine max
  Clone ID: 700958157H1
aagattctcaaaaactcttcatagtttacaacatcatttaaatctattgagcacaatggggattcatgattgcctaggatttgtactctttcaagttgagactcttgacaaatgaagagcaacaacaattactgaagttacttcctgtggttgatactgctaaactccctgatagccttgtcgtcatgttcagtagctctcagttcaaggagaacttcacttagttgcagcagctgctagcgggaggagtctctgatatct

SEQ ID NO: 18684 - DNA, 207 bp, Glycine max
  Clone ID: 700958158H1
cacgtttcctttttatctctatctttcttcagatcttaaccttattcttaccagatggatggctcagttaaactcttatttttgtcctttctctcgttgatcatctctttctccatagctcaaacctgctttcagaccataggcacttgttcttcctgtaaccaaagatgtttctgcctcagttcctcagtatgtcagacaaatcaa

SEQ ID NO: 18685 - DNA, 260 bp, Glycine max
  Clone ID: 700958161H1
caagtttggtgtgaggccattgagacatagccccgatgaaatgatggcagccttataccttcaagtcagcataattagccaggctctaatcttcgtcacaaggtcccgcagctggtcttttgttgaaagacctggtcttctcctactaggtgcattttttattgctcagttggtggcaacttttatagcagtgtatgctaactggggctttgcaagaataaagggaatgggatgaggttgggctggtgtaatctggctgt

SEQ ID NO: 18686 - DNA, 256 bp, Glycine max
  Clone ID: 700958162H1
taaagtgttgtcttttttgggggatttgcaacgcaaaggttgtttgttgttgccccaggaaatcatagagagcgaggcataaacatcaatctctctgtgaaaaaaatggggacgacgaagaacaacaacaacaacttcaattctacctcaaaatctgataacagtgccaatgacaacaaaaacaacacacgtgtggtgttgaatgtctacgacctcacccctctcaacaattacctttattggtttgggtttggaa

SEQ ID NO: 18687 - DNA, 261 bp, Glycine max
  Clone ID: 700958163H1
aacaactgtgaaatctgtggaatcaaaggggcaagctgagaagtgtgccaagagaaagaggaagaaccagtatcgcggaatccgccagcgtccatggggaaagtgggctgctgagattcgcgacccaagaaagggggttcgtgtttggcttggaactctcagcactgctgaagaagctgcaagagcttacgatgctgaagcaaggaggatccgtggcaagaaagccaaggtgaatttccctgatgagccttcaggcgctgc

SEQ ID NO: 18688 - DNA, 263 bp, Glycine max
  Clone ID: 700958164H1
tacgcgtgcttggacttcggctcgagagcaaacgatccaaactcttttttcatttgcagcatcaaaatgagtggtagcaacgatggtagcggcagtggagctctaggtttttgaaggtggctagtgcagctgccgctacaaccgccgttgccggcggtttatatgccattctttcatcctcaacctctgctagctctgagatggaagtgccgtttggcagcgcacggcgtgagagcaaagaacgtgacgatggtggctccggg

SEQ ID NO: 18689 - DNA, 260 bp, Glycine max
  Clone ID: 700958165H1
gtagtattatttcattgatttctccctcttcgctctctctcagtgaccagagacagatgatgatggagatggcgaacgaaacgctgtcgttgcggcactcgcggcgttggtgctactcgcggcgagtgtggcggtggatgctcaggagaactcggacgtgaagacgctagtgaagtacaagcacgggaagaagtactgcgacaaaggtgggaatgtaagggctggtcaatttactgttgtaacctcaccattaccgatta

SEQ ID NO: 18690 - DNA, 77 bp, Glycine max
  Clone ID: 700958166H1
ccgaggccgtgctggtggagggtttggaaaaggtggtggcattggaggaggtgctggtggtggctttggcaatggtg

SEQ ID NO: 18691 - DNA, 263 bp, Glycine max
  Clone ID: 700958167H1
ctttttctgagcaaaacattcaccttttggaattattaggttatctttgcatccgattttcaatggagaccccatcatccaccagaagagtaacaagatcacaggctttgtctgcttccaatgatgccctcatcacagtttccagaaagattgaagattctgaaaagaacgcatcaaagtcaaaatcaagggtgcaacaacaagaccaatccgcactaatagacataccaaatgattccccaatcgtgggacttgcgaatggg

SEQ ID NO: 18692 - DNA, 260 bp, Glycine max
  Clone ID: 700958169H1
atatatggatggtgccaacatgaatgctcaggtgggactcacaagcccaggttggataggagcagatgtatgccatctcaatctccacaagacattttgcacccctcatggaggaggtggccctggcatgggtcctataggtgtacagaaacacttggcaccatttttaccatcacaccctgtgatagcaactggtggaattcctgcccctgacaaacctcaaccacttggtaccatcgctgccgcaccatggggctcag

SEQ ID NO: 18693 - DNA, 260 bp, Glycine max
  Clone ID: 700958170H1
atgaaagaaaaaaaataatagtactgtaattagtttgggatgcgaaaagaaaagaaaaggtggggtaaaagggatccaatccagtggtagatgagatgaggtgaaatgagactggatcatagcattgtgatagttgagagtgagtgagttaatatgttatcattgttatggtgaaagtgaaaccaaacaccgaagctgttgagtgattttcattgatccagatcgtgtctgttctacgtacgatgtacagcggctccagc

SEQ ID NO: 18694 - DNA, 253 bp, Glycine max
  Clone ID: 700958171H1
acaacttacggctaaattctcaaagatttaaactttgtctcagagtttccaaattcacccaaccccagagacaaaatgtctctaatcccaaatttcttcggtggcagaaggagctacgttttcgatcctttttccctcgacgtctgggaccccttcaaggattttcctttcccaaacactctttcttcagcttcctttcctgaattttctcgggaaaattctgcattcgtgagcactcgtgtggattggaagg

SEQ ID NO: 18695 - DNA, 258 bp, Glycine max
  Clone ID: 700958172H1
gaatcttctcatgaaacctcccacgcaacactcgatttcctcagaatcaggttcgattccctaaccctccacaaatcccctttctcttctttgcagtttctccatggagggctctgcagaggatctcggagcccccgagtcatgggaggtcgctgatttggacgagtccatgaaccgcttgaacctcatggtcttttccaacaacgattctaagcaagctcaccagcgtctcgccgattatcatgacgatgatgctcc

SEQ ID NO: 18696 - DNA, 259 bp, Glycine max
  Clone ID: 700958173H1
cacagagaataagctactggatttaatggacccatctctttgtgaaacatgcaacgaaaatgaattcattaagtgtgcagtcattggactcttatgcgtacaagatgaaccaagtgatcgacccactatgtcaaatgttttgttcatgctcgacatagaggcagcaagcatgccaattcccacgcagccaaccttttttgtgaaaaagcatctttctagctcagcttcctcttcgagcaaaccagatataggtcagtat

SEQ ID NO: 18697 - DNA, 259 bp, Glycine max
  Clone ID: 700958175H1
ccccgttgtccggagccaccattttgcgccccggcaatgttcttcccggtggccatcgtcccttaaacccagcacatcttcagagtcattcggtattccatgggacaacgtcgttgtgatccagcaagggaaggatcacaatgagccctgcatcgtcaccgtcaattgccccgacaaggctggtctcggctgtgatctttgcagaatcatcctcgagttcggtctccgcattacccgtgctgatatttccacggatgga

SEQ ID NO: 18698 - DNA, 260 bp, Glycine max
  Clone ID: 700958142H1
atataacgcaccttcttcttgttcacttctctctctctctctctctctcactttttctcttgacacggagagaaacaacatctgaattctgatgggttacccagtggggtactcggagctcctcttcccgaagcttctccttcacatcctctgactattgggcctcctcaggaagctgatttgcagcctcctccgcttcatgggcctccacgacttcctcgagcccgacattgcctgggccgaaacccagacccgagtgc

SEQ ID NO: 18699 - DNA, 269 bp, Glycine max
  Clone ID: 700958110H1
cttctccgagaccagacccatgccactcctcctgctccttattctcctctttcacgcggcggcagcaatgggatagtggcagctcctccacagaacgcatcggcactgtcgccatgcacatgcagcttctccagaacgaccgcgtcctactcttcgatcgcaccgacttcggactctccaacctgaagctcgccgacggaagatgctgcaacaaccaaacgagttggtcgtcgaacgcgactgcaccgcgcactcgatcgaatacgacg

SEQ ID NO: 18700 - DNA, 264 bp, Glycine max
  Clone ID: 700958111H1
tgagtggtagggtgaggatctcttcaatagtcttgttgaccaagagaccgttgagatggacgcgctagggttgttgagatcggtcaccccgaagacggtagagtccagggaagctgacgcagcgatgatggcggaggacgaagcactggagaaagtggatatcgcagtgatggtggccatggtggaagcggtaactgcggtagcataggagagtcgacgcgcacgagtctcacgcgggtgaagggaaacagagaaagatggatg

SEQ ID NO: 18701 - DNA, 267 bp, Glycine max
  Clone ID: 700958112H1
caaattacatagcctcagtaatctgagagagaaacaaaaacaatgaaggtttccattgccaagttccactcccttcccctatgttttttcactctcttggccttcaacacaaaacccctcctagcagcagaaccagagccagtggttgataagcaagggaaccctttggagccaggagtagggtactacgtgtggccactttgggctgatgaaggaggcctcacactaggccaaacaaggaacaagacatgccctctttatgttatc

SEQ ID NO: 18702 - DNA, 265 bp, Glycine max
  Clone ID: 700958113H1
ggaaggagaagtttagggctgatgctaagcaggttatggaagttcttatgtcccttcaagtatctcaaatggagacagatgatccaacaacaagttacatgctacaggcatgggctagactctgcaaatgtctgggacaagattttcttccttacatggagtttgtcatgcctccactacttcaatctgccgcacttaagcccgatgtaaccattacatcagcagattcagacatcgtcattgaggattctgatgatgaaagtat

SEQ ID NO: 18703 - DNA, 263 bp, Glycine max
  Clone ID: 700958114H1
cttttctgcatgtttgttctctcaacgactcctccgcgatagagtattattcaatattttggttgggttgaatcccggggttgaagcgttgcagacatcacggctattacaagagtgtctcgctccctcattcatgtccgatctgtacgacggacgacgggtagttgcgtaactgccgttaacccttcgccgcacggtgggcgtggtgctttgccttctgaaggtggtagcccttcagacttgctcttcctcgctggtggtgg

SEQ ID NO: 18704 - DNA, 272 bp, Glycine max
  Clone ID: 700958117H1
agcacatttgcaaagtgttatttttctttttttctcatttgcactgcaaattgcaatggcttccaacaaggttattgccaccatcatggtgctttctctccttgcctactcaacatcattcaccaatgcatgtggcacatgccacccaaaacctaccccttctcctcctcctccatcaggaaagtgccctaaggacacattgaagctaggggtgtgtgcagatattctaggtcttgttactggttgttgttggctccctgtctccagcaatg

SEQ ID NO: 18705 - DNA, 267 bp, Glycine max
  Clone ID: 700958118H1
agatgatgtcttcatcacttgtggatgcacacaagccattgatgtttcggtggcgatgcttgctcgccctggtgcaaacatcttgcttccaaggccaggcttcccaatctatgaactttgtgctgcatttagaggggttgaagtgaggcattatgatctgcttccagagaaaggttgggaggttgatctagatgctgttgaagctcttgctgatcagaacacagtggcgttggcgatcataaaccctgggaatccttgtgggaatgt

SEQ ID NO: 18706 - DNA, 267 bp, Glycine max
  Clone ID: 700958119H1
aatattatgtggaggaatttgctgatacaggcaatgtaccaagtgtctgtcatgcttgtgctcaatttccgaggcataagcatactgggtctgagccatgacagaaaagctcatgcaatcaaagtgaagaatactttgatattcaatgcatttgttctctgtcaaatctttaatgaatttaatgctcgaaagccagatgaattcaacatattcaaaggagtcacaagaaactacctctttatgggtatcattggattaacggttgtg

SEQ ID NO: 18707 - DNA, 265 bp, Glycine max
  Clone ID: 700958120H1
gagacagcagagcagagatctagcgtattctctcgctctttctttcactgtcacagagccacatccatgggcttcccagccaacggcgcctctgcggcccagcccctaaacttcctcatctacagccgcacaggctggattggcggcctcctcggctccctctgccgggcccagggcatctccttccattacggctcgggccgcctcgagaaccgggcctccctcgaaaccgacatagccctcctcaagccctcccaggtcttca

SEQ ID NO: 18708 - DNA, 267 bp, Glycine max
  Clone ID: 700958121H1
atttattttatagcttctgctgtgcagggtccttcaatctcacttgggggaacatccgtcatggagccttaattagatttttcatgctctcaatattgaatgaagatattgcttagtatcaaaacctgaacatacatactatatctaccaaccgggaatcctcttcctggacgtgttgtgtatatattctagacactcagaaaaatgaattgttttccgtgtttttcaaagactaagagaaccaacagcaagagtgagcaacaaggc

SEQ ID NO: 18709 - DNA, 264 bp, Glycine max
  Clone ID: 700958122H1
cgtggcgcatgcacacaccactttttttatgatctctctctctctatatatatgcactatcacacgttatagagggacacataagccaccacagtctcacgttgtagagctacattcatagttatagggagctcaaatctcaatggccctgaaaaggaaccaagggtggtgtgagaggagcacattcaatgaatgaagctttttggtttttgagtttctgggagtggatcaagttggcccccagatcttcaatttgtttgattg

SEQ ID NO: 18710 - DNA, 266 bp, Glycine max
  Clone ID: 700958123H1
gaaactacttctgtatggctagaggtatctgaagtcaaagggcaagatgttgtttgtattataaagaacacagctacattggctgggtcattgttcactttgcatgcctctcaaattcatattgatttgcctactctcactgagaaagacaaggaggttataagcacctggggtgttaaaaacaaaattgattttctgtcactgtcatatactcggcacgctaaagacgttcgccaggctcgcgaatttctttccaagttaggtga

SEQ ID NO: 18711 - DNA, 265 bp, Glycine max
  Clone ID: 700958124H1
aaaaaaaccaggaacagggcttatgatattctcgtcgaaattgcccgtgcatttgcggatgaagagagtggtgggaacagagaaagcttgaataatttttttcagatggttgctggacactttactggggaaactccacatatgataagtgcagcagccaaagggttagcccgtttggcttatgagttctctgatcttgttttaacttccttcaaattgctccctggcacacttactctcctgaggagtgataacaaagagataa

SEQ ID NO: 18712 - DNA, 264 bp, Glycine max
  Clone ID: 700958128H1
cctgctttcagagtcggatcttcaagcatggattttgcaatcacctttacagatttcatgttctttatatgcaggaatcggaatagcggttagcttcttcattcaatcctggtgcatctcagaaagaggtcccctgtactgtgcaatgttcaaccctttggcaacagtcatcactgctttgataagtgcaactttcctagaggaagaggtgtacgttggaagtttggtaggggctgttggagttattgccggtttatatgttgt

SEQ ID NO: 18713 - DNA, 263 bp, Glycine max
  Clone ID: 700958129H1
accaaaaggagagtgcaataactcgttgtacattcctagtgtgtgggagagacatggctaagatgtgtgttttggtgttggttcttgctctggctgtggccacaagtgccagaaacgttcccaaccccaaggatgctggtcttaaggaccagaagaacttcatcagctatggtggagttggtggttattccgggattgggaacaatggactgccttttggaggagctggtgccggaataggtggtggttttggcggaggtggt

SEQ ID NO: 18714 - DNA, 155 bp, Glycine max
  Clone ID: 700958131H1
cgcattcttcctttccccttctgttctctcttactcgttgcagtgcacgtcgattatctctagaagcttccccattatctggtcggcccagaccgtaaaatcgggtctgaagtggctcgagtcgcgtcaggtcgatgaagggtatctccaccggc

SEQ ID NO: 18715 - DNA, 265 bp, Glycine max
  Clone ID: 700958132H1
gctcgcgcaggcgcaggagtgcgtcttcgagaacaccattgccaaagggagcactcccggtgtctgtgccaagatctctaggcaggttgggatatattatgaggaagctttagctgcgctcaatgttgcacccttgagccagcattttgataagtcctggatagttcacgtgcagttcaaggcggcactgttttatgcggcacttgttataggtatggattggagctgcatgataaagaggagatagcagaggagattgcacgac

SEQ ID NO: 18716 - DNA, 268 bp, Glycine max
  Clone ID: 700958135H1
cagaaaaagaccctcactctgttttttcttctttccttcctcaaccctaagcaagcggcatggttgtcttttcgcgaagtgcgacgacgacgacgacgacgacgacgacctatacgcgccacaacttaatacgacaaacgagaacctgcgttggcaataataatagtttgtgttactgctgctactaagaaggctcctccgcagaggattcttggtggtgcacgtggcagtagagtgattcttggctgccagccctcccaccgaagac

SEQ ID NO: 18717 - DNA, 265 bp, Glycine max
  Clone ID: 700958137H1
gtaatactgaacataagttcctgtactgatttggaagagataccagattctattgtaaaactttctaagctaagacttcttgacctctcaaactgcataagcctttcaagtttaccagaggacattggtgatctatgtaatctcaggaatctcaatatgacaagctgtgcaaggtgtgaattgccatactcagtaaccaatcttgagaatttgaaggtggtggtcatgtgatgaagagacagctgcttcatgggaagcattcgaa

SEQ ID NO: 18718 - DNA, 264 bp, Glycine max
  Clone ID: 700958138H1
tgcaggtggaatctcaatggccacgcttagcttcggcatcgccacgacatgtctgagtgctgccgctgattatcgtagaagaagcaactggaaatggagcagacccagaattgtgtgtgttggatgggacccggaaggcgtgcttggtccaccccaaactgggcacctcgccaggttcgagtttaagaagcgcctcgagagagacgcagatgcccgcgaagcttccaacgtcaagtccgtgaagagaaagaacgccgtcaatcc

SEQ ID NO: 18719 - DNA, 263 bp, Glycine max
  Clone ID: 700958139H1
tgcaacttcacttttagttctctctctccctggtcctttgagcttcaagaagttgttcctgtttgttgtagcagttcctgtccttaatttcttcaaccttctcaacacataaccaccttcgtctgtgtttgtttgtgtgtgcttattacttggtctcttcatattgtacatataaaaattatggatgatgaatatgccaagcttattagaaggatgaacccaccaagggttgtgattgacaacaatgcctgtgaaaacgccat

SEQ ID NO: 18720 - DNA, 264 bp, Glycine max
  Clone ID: 700958140H1
caaaggattctacccgccgctcgatgggaattgcgcttcaagacgtctcgtagggctaatccgcctcacgagggtcaccaacggcacgtccctttggggggccgaagccccctactgctggtcggcaaacggacggcgggcgcacgcgtcgcttctagcccggattctgacttagaggcgttcagtcataatccaacgcacggtagcttcgcgccactagcttttcaaccaagcgcgatgaccaattgtgcgaatcaacggttc

SEQ ID NO: 18721 - DNA, 262 bp, Glycine max
  Clone ID: 700958141H1
gtgcccaaagcggacagcaggctctgatcttaccacttaccctttacttttctagtacgcaagcttaagcagctcgatctcttcatcaatcagaaataccacattcactcaaatttcaataagaatatgacttgtgatcgatatcttaagttatgcacccgtacgtgcagtttgtacttaaccacaaaacaatctcacgaatcttctcttctcggtcgatcgcatatatgcatgtgtgaattattcagttgcaactgatgaa

SEQ ID NO: 18722 - DNA, 268 bp, Glycine max
  Clone ID: 700958108H1
caataagctgtcggagggcaaatatctcaacactcaggagctctggttcgaccaaaccctcgatcacttctctccctatgatcaccgacaattccggcaacgttactatgagtttctagactatttccggattcccgatggaccaatttttttggtaataggtggtgaaggtatattgaatggggtagcaaatgactatcttgctgtactggcaaagaagtttggagcagctatggttactcttgaacatcgctactacggaaagagt

SEQ ID NO: 18723 - DNA, 232 bp, Glycine max
  Clone ID: 700958075H1
actagatcgcgaggagccacccttgtttaatttttttcagaatccctagtctgaatcccaatgccattgatgtgaattggtgcaaagcaatgatttcgaatccggaattgatccactacgcctgcatcgatcgatcggagactatcctggggcagcaccagagcgagaaggagcccaacatggaggacttggaggcccaatgcgtggcccaaacacctcccaaccactccct

SEQ ID NO: 18724 - DNA, 220 bp, Glycine max
  Clone ID: 700958076H1
acacaggcagataccgtgtacaatttcatcaggaccagatccatttcttggttgtacatgaaacacagcatgccatttatgaagcaacaaagctagaatgtttaaagcagtggttcccacgggattcatcagcaccaatatcacatgcaactttctcatagtgatagccagctcatatatgccagctttttagatgcaacattctgtgtattgagtgttt

SEQ ID NO: 18725 - DNA, 233 bp, Glycine max
  Clone ID: 700958077H1
atctgaacccattctgaagctaacgatgaacctgttaaagtggtagttgggaacagtcttgaggacattgttttcaaatctgggaagaatgttctgcaggagttttatgctccctggtgtggtcattgcaaacagttggctccaatattggacgaagttgctatctcatatcaaagtgatgctgatgttgttattgcaaaactggatgcaaatgccaacgatatcccaagtga

SEQ ID NO: 18726 - DNA, 83 bp, Glycine max
  Clone ID: 700958078H1
caagcaccttgcgtgctctttgtcccattgttagtgcgctttattgatttctgggtcagtgtggttttgtcctgttccacgag

SEQ ID NO: 18727 - DNA, 238 bp, Glycine max
  Clone ID: 700958079H1
aaagaagaaaaaaaccttagccaacacaaccatcatggccacctctgctattcagcaatcagcattcactggtcaaactgctctgaagcagctcaatgagttcgtccgcaagaccggtggcgccggcaaaggtcgcactaacatgcgccgcaccgtcaagagtgctcctcagagcatttggtatggccctgaccgtcccaggtacttgtatccattctcggagcagattccatcatac

SEQ ID NO: 18728 - DNA, 241 bp, Glycine max
  Clone ID: 700958080H1
tcggcgtcgcctcccgcgcctccctcgacgagctctccgacgacgagatcatcctcaatgaagactcccgcgccccgggcccgtgctgcagggcgctggtcggactcctgctcactccccaacaacaaaatccaagaccaattccctctgccacccagggctgtccacagtttggcgaaggaaaaacaacatattccttcgccaccacaagtggacagtcctgtctctgtctcagtctcgg

SEQ ID NO: 18729 - DNA, 233 bp, Glycine max
  Clone ID: 700958081H1
acacaattaagctaccttgtatctgccgacatggcacatgcactacacccaaattacatggacaagcatgaagcaaaccatcagcccaaactacatggaggacttgtcattaaaaccaatgcaagccaacgctatgcaaccaatgttgtcacatccttcatattcagggagatagcatcaaaacataaacttcccgttcaggactttgtggtgcgcaatgacatgtcatgtgg

SEQ ID NO: 18730 - DNA, 200 bp, Glycine max
  Clone ID: 700958082H1
attgtcgtcacaacaaaatcaacatagttattgattaatggtcctgtgtttgttgttttgtgtgtccaagtctatcaaaatcattctttggttttgtgttctattgtagattgtaggtactgcttcaatacatctttcaatcaccgagatcttggattcttcagtttcaagacaataattgaagttcaaggccattagtt

SEQ ID NO: 18731 - DNA, 230 bp, Glycine max
  Clone ID: 700958084H1
cgggaaatgtggtaatacaagacaatctgcagtttccaagtggtgctggtggcggttgcggcggcggcggtgctggcggagagatccaccagccccaccactaccgcccgcaatggtttgttgatgagagggatggacttattggttggctgcgaagtgaattcgcagctgccaatgccatcatagactccctttgtcaccaattacgtgttgttggtgatcctggggag

SEQ ID NO: 18732 - DNA, 231 bp, Glycine max
  Clone ID: 700958085H1
aggatacctaggtctcctcgtcgatgggtaacattgcccccattcctgtagaagccaaagcaactgatgaagtcaccactctgctcacaggattctgagatttaaattgtagcataatggaattttcgtgatctctttttataagatatggatttgtcttgcaatgcttttgactatgaagttgattgctaaatcattgaatcagtgttttgcagaatatttgtaatcatt

SEQ ID NO: 18733 - DNA, 231 bp, Glycine max
  Clone ID: 700958086H1
attacaaggactgggttttcactgatcaagcattgcctaatgatcttgtcaagataggagttgcggttaaggatacatctgctccccatggagttcggcttttgattgaggactatccttatgcttctgatgggctagagatatgggatgccatcaagtcctgggtgcatgaatatgtatcattctactacaagtcagatgcagcaattcaacaagatcccgagctccaag

SEQ ID NO: 18734 - DNA, 234 bp, Glycine max
  Clone ID: 700958087H1
atccttggttatgagtttgacaatgacgagtttcatgcttacgtgcatggaaggttaccatacgagaaactgaagcctgatccagtattaaggaaccttctgctttccatgcctcagcgtaaaataatattcaccaatgcagatcatgcacatgcagttaaagttctcaacagattgggtttggaagattgttttgagggcatcatatgctttgaaacgcttaatcctcccaaa

SEQ ID NO: 18735 - DNA, 233 bp, Glycine max
  Clone ID: 700958089H1
aatgtttggacatcaaattgaagttagtttgttttcatacagttttcctatgcatcactattatcaggtacggaccattccctccaacattttagcacttctaatgtctccgctgattacagcattatggtgtatttgctgctacttgaccattttgcggggagaccaaactatcagagcaagttctatgcaccaaaccacagacttcggctctgtatttctgaataaaatgg

SEQ ID NO: 18736 - DNA, 231 bp, Glycine max
  Clone ID: 700958090H1
aaacaacaaccctaacaccttcacctacgaacccacctcggtcctcgacctatgccggagcccaagccccgaaaagaagctcactgttcccaagccagaaccacaacacaacaaccagctagacctggatgatcatgttctgcctaattctgattggtgggagtccatcatgaaggacttaaccctacccggagactctcccactccccttttgaaaaccaatccatcatg

SEQ ID NO: 18737 - DNA, 231 bp, Glycine max
  Clone ID: 700958091H1
aatagtgcgtagtgagccgagctttgaatatcatgtctagcttcagcaagttgcagatcgagcacgccagcattgatgcatcaggtataggcactggcactgtgcagagaaatgggagtcagggacttcgattcattctctggtctgttctcgttgcatcacgtggtcgatgtcggaggttagtagggaacttaagactattaggtagaagtatttctacttgaatacgtt

SEQ ID NO: 18738 - DNA, 229 bp, Glycine max
  Clone ID: 700958092H1
gcaactagagaaaaaaaaaagagaagaaaaaaaaacttggttttatcttcttggttattattatattcacttcttcaatatcttggttctttgatattattattcgattgagcaaaaaatgggagttccagagagagaccctcttgcacaattgagcttgcctcctggatttagattttatcccactgatgaggagcttttggttcagtacctttgccgcaaggttgct

SEQ ID NO: 18739 - DNA, 182 bp, Glycine max
  Clone ID: 700958093H1
ccaaagcatccccccaagctacaagcacccaaaggggaggaataataataagcctaacttctaaggccaaaaataagaaaaaaaattaccaaatatgtcaggaaagttcattatctcggctgttcctctcatcctggtggtgggtttggaaatcggcgtggtggccccgttaacaagaaggg

SEQ ID NO: 18740 - DNA, 234 bp, Glycine max
  Clone ID: 700958094H1
aaatcattcttcctccaaaccagacacacgcattctttcctcccaagaaagcgggatcaccctttctccattcgtcaaccgcatttcttcaacttcaaggtttatgtctcattggatgattgatccaagggagaaggtgcttgacattggagggaggggaagagagtgcttggtggtggtgttttgaattgaaaaacgagaggatatcgcagatttttttcttatcgtttactt

SEQ ID NO: 18741 - DNA, 236 bp, Glycine max
  Clone ID: 700958095H1
attttgtccgaaagcttgaatttttcgcctaccctttacaatgatctcttcatttagacaacctgttgtagggatcagtggttcatatcttctttagaggcaaagacatgcaaccctaattaaggcaaggtccaatttacactctttgtcaagagaaaagggtcaaagatctcttgtttcagttcaaaagccacttcacattgctgcttctcttggtgttggaaattttgtgtcag

SEQ ID NO: 18742 - DNA, 237 bp, Glycine max
  Clone ID: 700958096H1
aacaagttctgtggtatcaaccaaaacacggtcatagggcagttggactttttccttagagagtgtcccaaagggatgaaaacaatgagcacgggattgttcttgagcacactctctttggggtttttctttagcaccttgttagtgtctatagtgaacaaaatgacagcacatggtaggccatggctcgcaaataatcttaaccaagggaggctctatgacttttactggctcttg

SEQ ID NO: 18743 - DNA, 272 bp, Glycine max
  Clone ID: 700958101H1
aaacactagtaaagggaaggaaccgtaccttcctcaataaaactttctctccgatttggcttctcagtttcggttgtcatcgtcggggagaaacaaaaaaaaaacccacaaaaagattataacccaaaaaaccagaaatagaataaaatatgaaaggtaaagtactaggatccactgtttctcttatcatagtggtggatgtcgtaattggcgtggttgctgaagtcaaaggtccaaagggggtaaaaaacagcaatggaggagaattaaaa

SEQ ID NO: 18744 - DNA, 265 bp, Glycine max
  Clone ID: 700958102H1
cggctcgagacccagtcaccaaccccgttgtccggagccaccattttgcgctccggcaatgttcttcccggtggccatcgtcccttaaacccaccacacttcaaagtcatgggtattccatgggacgacgtcgttgtgatccagcaagggaaggatcacaatgagccctgcatcgtcaccgtcaattgccccgacaaggctggtctcggctgtgatctttgcagaatcatcctcgagttcggtctccgcattacccgtgctgata

SEQ ID NO: 18745 - DNA, 269 bp, Glycine max
  Clone ID: 700958103H1
ctcttttttctctctcttgcaaaacctaattttcatttcttccctcaaatttcaaaatgcgtgagatccttcacatccagggtggccaatgcggcaaccagatcggcgccaagttctgggaggtggtttgcgcggagcacgggatcgaccctaccggaaggtacggtggggactcggagttgcagctcgagaggatcaatgtctactacaacgaggccagttgcggtcggttcgtgccgcgcgcggttctcatggacctcgaaccgggc

SEQ ID NO: 18746 - DNA, 272 bp, Glycine max
  Clone ID: 700958104H1
gttttccccttctctctctctctctctctcttccaaccttttctctgtttcttctaaaagtctcagcacagcataacataacccttcttcatcttcttcttatgtgattgacttgtgtccaccacggtgacccatttctgtatcttctcgtgaaaagctaatttgttcactctaataggtgtacagtgctaaagggtaaactttgaaacctagcttcctagttgaatcatcagaagcttataagtcgaatccatatttttctggacgtttag

SEQ ID NO: 18747 - DNA, 268 bp, Glycine max
  Clone ID: 700958106H1
ggcccttgatgattgcaaggacctcttgcaatccgctatcgagagcctccaactcagcattgacatggttcacaacaacaacttgcaggccgtgcataaccaacaggctgacttcaagaactggctcagcgctgttatctcgtaccaacaggcctgcatggagggttttgacgatggcaaagaaggtgagaagaagatcaaggagcagtttcataccgagaccttggacaatgttcagaaactcactggcatcacccttgacattgtg

SEQ ID NO: 18748 - DNA, 269 bp, Glycine max
  Clone ID: 700958107H1
gagaaacagttttccgcggaagagatatcctccatggttcttatgaagatgaaggagattgcggaggcgtatctaggttccaccataaagaatgcgcttgtcactgtgcctgcttacttcaacgactcacaacgtcaagccaccaaggacgctggtgtcatttctgggctcaacgtgatgcgaattatcaacgagcctaccgcggctgccattgcttatgggctcgacaaaaaggccactagctctggggagaagaatgttctcatttt

SEQ ID NO: 18749 - DNA, 232 bp, Glycine max
  Clone ID: 700958074H1
cgaaattgcggctgacctcaaggagcatgtgatcaagcctgtgatcccggagaagtaccttgacgagaagaccattttccacttgaacccctctggccgttttgtcattggaggtcctcacggtgatgctggtctcaccggccgcaagatcatcatcgatacttatggaggatggggtgctcatggtggtggtgccttctccgggaaggatcccaccaaggttgataggagt

SEQ ID NO: 18750 - DNA, 197 bp, Glycine max
  Clone ID: 700958033H1
gctcccggtattatttcgagacgttccgtatatgagcctctccaaacaggacttattgatattgattcgatgatccccataggacgtggccaacgagaattaattattggagacagacaaacgggtaaaacagcagtagccacagatactattctcaatcaacagggacaaaatgtaatatgtggttatgtagctat

SEQ ID NO: 18751 - DNA, 108 bp, Glycine max
  Clone ID: 700958034H1
ctcaaactcactctttctaagttttttctatctctttctctctctctctgtctgccatggttctctccaaaaccacctccgaatccgacgtctctgtccacacaacat

SEQ ID NO: 18752 - DNA, 221 bp, Glycine max
  Clone ID: 700958035H1
atcatggccctcctcgtgattgagaaaatccattaaccgttccttgaaagaaagataaccgagctttgagaaggtaggaaatgaatgattgtaagaatcttgtttatgtaagtaggatttggtttcatcacataacctcattttcttttatttttctttccttgtcttttgcagttaaacctgccctgttttttaatgttttgattgtggtgactaagaat

SEQ ID NO: 18753 - DNA, 73 bp, Glycine max
  Clone ID: 700958036H1
ggccacatggtgccagccgccgacatggccaaattatttgccgagaagggtgtgaaggccactataatcacca

SEQ ID NO: 18754 - DNA, 236 bp, Glycine max
  Clone ID: 700958038H1
acaacacaaggagtggtctggtgtgaaccatagccatggctacttcatcatccacttcactgtatcatcactcatacctgcaagcatcccatcattcaactatggaaaccatttagtttttttgctacaaaaccgttctttgaatcgtcccaagaagagagtttccttcgttgttcaagcagccaagccccctaatggtgtggaaattccaaaggtgaagcctcgatttaagcctc

SEQ ID NO: 18755 - DNA, 240 bp, Glycine max
  Clone ID: 700958039H1
gatggatccagacgcgttggcaaaggcattcgtggagcactactacagcaccttcgacaccaacaggaacggcttagcgaatctctaccaggagggttccatgctcactttcgaagggcagaagatccaaggcgcttccaacatcgttgccaagctcacctccctcccttttcagcagtgccaccactcaatctccaccgtcgactgccagccctccggcgtcaacgccggcatgctcgt

SEQ ID NO: 18756 - DNA, 240 bp, Glycine max
  Clone ID: 700958040H1
aattgatgctgctatacatgtatggaggctgaaggaccataagaaacatctaagttcagcaaaatccagacggtcttggggtggaaaggtgaagggacttgttgctgatggtgagaagaacaagaacaactttcttgcccaacgggctgagacgcttctagaaagcttgaaacacagatttccagggctccctcagactgcactagatatggccaaaattcaatataataaggatgttgg

SEQ ID NO: 18757 - DNA, 191 bp, Glycine max
  Clone ID: 700958041H1
ggagaaaagaagtagtacggtttacgtgcctagagacgaaagcttctcggaagttaagcaactaacgttttcgacaaagacgttatcgtcggggttgaaagcgatcgtgccggcgctgaagacattgatagttgacaagaatctagggtttcctgtgttctcggacatagatgaccttttcgatgaaggcc

SEQ ID NO: 18758 - DNA, 238 bp, Glycine max
  Clone ID: 700958042H1
ctctcaggaactttctttcaaatttgcaagacggtattcttggcaccaagctttccattctcatccctgctattccagctgccatcgttgcatagtgctttggctttggaagaccttggatttttatattaagcttacttggacttacaccacttgctgaacgtgtgagcttcattacagaacaagttgccttttacactggtcccacagttggaggacttctgggtgctacatgtgg

SEQ ID NO: 18759 - DNA, 235 bp, Glycine max
  Clone ID: 700958043H1
aggaatagtaatccaaggcggatccattgtgtctgatcctgaattctactcagtgagatttgagaacaaggcttacctagctcgtccatggaagaattactctaggaccattatcatggacacatacattgatgatttgattgacgcggatgggtatttgccatggcaaggactagagggtccttctggtatggatacttgcttctatgccgagtaccacaacattggccctggt

SEQ ID NO: 18760 - DNA, 235 bp, Glycine max
  Clone ID: 700958044H1
actcgagccgaatcggctcgagggttgttcggattgcttgactcactgactctgcgagcccagcgccctctgtcaagaatatcgtgagcttcaacaccgtggatttgacatgattattgggtggcatggaaatgtcgagcaacgaagtcggggagtagccatgactgctacaacagctccatcagtcgaaaatggcatgagccgttgaatagtatgcagttctgtaactaagaca

SEQ ID NO: 18761 - DNA, 235 bp, Glycine max
  Clone ID: 700958046H1
aattaatcatatttttcaattttattgcaggattgtggagacggataagatgagagaaaagtgatgaagctcgtgatttaccctgtcatcattagttactttgattccttgttttcttatcttttagcacagaaaaagttcaattaatcatatttttcaatttttattgcaggattgtggagacggataagatgagagaaaagtgatgaagctcgtgatttaccctgtcatcatt

SEQ ID NO: 18762 - DNA, 208 bp, Glycine max
  Clone ID: 700958047H1
gcagtacagggcaccagaacagttgaaagacaaggtgatgttgtagagcaacagactgactctgcatatgggaatattagtaaagtttttaaagatttggacaatgtgtctggatcagcaaatgaattgaaatctgagaaagttgaagcagatctgagtccaacagaggttggaaataagcaaaatagtgaagatccgcactatatga

SEQ ID NO: 18763 - DNA, 244 bp, Glycine max
  Clone ID: 700958048H1
ccactctgaagccatccgccacttctccaaaatcctcgagggccgccgcggcgcccctcaggtcttcctcgcagagtgctacaagcacagagtctccgcaaatcgctccgccgggcgaatcgccgactcaatcgccgactgcaaccgtaccctcgccctggaccccaccagcatccaagccctcgaaacccgagcctcactcttcgaatccattcgctgcttcccagactccctccacgacctc

SEQ ID NO: 18764 - DNA, 232 bp, Glycine max
  Clone ID: 700958050H1
aaaacatacaagacattgatgtcactatcccagacatagaagcaatgcgcctagcacattacttaacaattggatcagagtgttccacttggtttgattctattggagaaaaacattttgcagaatttggatgggacgcaagggtagcacttagtatctacggtgctttcagtggcaaggagtacattaaagctcagaaactgaggaatcgccatttgcaatttcacatgaa

SEQ ID NO: 18765 - DNA, 74 bp, Glycine max
  Clone ID: 700958051H1
cttggttatccagcgctcgtcaggtcaattcccgctcttcatcaattggaaatagttcaccctgccgcccccac

SEQ ID NO: 18766 - DNA, 240 bp, Glycine max
  Clone ID: 700958054H1
agatactcgatcggttcggctcgagccatgaaaggacaggtctgcatcacgcttgaggcaagaagagacgtagaaactgtattgactatgggaatcatggaagatggtagcattattccccatccagctggtacagagaaggttgatttggtgatgaatgtggtggaaagtcccagtggaaggttttatgctggtgggtgggatatcaagtgggattacaaatggtccactaagagggct

SEQ ID NO: 18767 - DNA, 239 bp, Glycine max
  Clone ID: 700958055H1
gctgcctatccccttgcgatcgaacagaacagaagagagatgggggacggaagtgggagccggtggagcagggcggagtgggtgcagcagtacgatctcttaggaaaaatcggcgaaggcacttacggcctcgtcttcctcgcccgaaccaaatcccccgttggcactccctccaaatccattgccataaaaaagttcaagcaatccaaggacggcgacggcgtctcccccaccgccat

SEQ ID NO: 18768 - DNA, 115 bp, Glycine max
  Clone ID: 700958058H1
aaaaaagacgacgcagagagaagcgtcttaatagacgctcttctctgaatagcctgatttcttctcttgattctcgtctcattcgtttcgatcttcgatctctgaaaatgagaga

SEQ ID NO: 18769 - DNA, 114 bp, Glycine max
  Clone ID: 700958059H1
tcaataggtcctggacggagaattcagtgtcagattggaacaaagccggagatactatcaaacatatgtgaattactatggcttttgtgtcctacatcatccacacaacatacg

SEQ ID NO: 18770 - DNA, 236 bp, Glycine max
  Clone ID: 700958060H1
caccgtggatcgttgagcgtgaggctgtttccggtaacctctcccggcggcgctgagtggtgatcaaggatatgggtcagactctgagttgcgtgcaacagcacgaggaccatggtgtgctcttccctgcacttgcaagtggagaattggaggttgttgacgccatagtggatgaagaccccactgtgttggaacacaccattggctgtgacaggctttctcctctgcatgtcgct

SEQ ID NO: 18771 - DNA, 225 bp, Glycine max
  Clone ID: 700958062H1
atcccttgggggttcatcaactttaaactttactgttaagggtcccttgggggttccttagttgcaagcttttatagattatattttgttacttaaggattagctcatcctcaacttcacttgttaatggtaaaatgctgttaaaatatgattatcatattagcatcaaattaactcaatttggtgcttagtaatgtaagaattagtgttgccaatgtactgatt

SEQ ID NO: 18772 - DNA, 126 bp, Glycine max
  Clone ID: 700958063H1
atctgttctttctctggaaccagaacaagaggaattaaagttcattcatttaaaaaagaaagtaaagatagaaatagcatgcacaacaacatgagcactctgtctttcttcatccttctttcaaca

SEQ ID NO: 18773 - DNA, 161 bp, Glycine max
  Clone ID: 700958064H1
gttcggatcgagtggagtaacggggtgggttcactagatcagtgagaggcttgacagtattggtggacatcctcatacagatacttatgatcgtagtctactagtagtctccgaaggcaggagatcactatccagggcagtctcactttctcccttcaatg

SEQ ID NO: 18774 - DNA, 228 bp, Glycine max
  Clone ID: 700958067H1
ctggaacaagtagcttctaaacatggcgtatcgatcgcaactgttgctgtgaagtatatactagatcagcctgcagtagcaggatcaatggttggtgttagacttggcttggcagaacatattcaagataccaatgctatcttttcacttgttctcgatgaagatgacgtgaacagcataagagaagccacagcgaaaggaaaggatctgcttaaagtgattggtgat

SEQ ID NO: 18775 - DNA, 233 bp, Glycine max
  unsure (1)..(233): unsure at all n locations
  Clone ID: 700958068H1
caaagaaacaaactttgagtggatatgaatatgataggtgtcctttatcaaaagtaaaatcatatagctaagccagcggtgngactgaaggcatattttgtatgcccggaatatatgtaaatattttatgtcgtttgcttttgtaaagtatctttctggtgagtagcagacacggaaatttggggtttgcccaggtgcatttctattgttttgttgtagatctaatgatgccg

SEQ ID NO: 18776 - DNA, 233 bp, Glycine max
  Clone ID: 700958069H1
atatttccctacctctcccttcaagatgcagatattcgtcaagaccctcaccggcaagaccatcacccttgacgtggaaagctctgacaccatcgacaacgtcaaggccaagatccaggacaaggaaggaatccccccggaccagcaacgtctcattttcgccggatagcaacttgaggacggccgtaccctggctgactagaacattcagaatgagagtactcttcacctcg

SEQ ID NO: 18777 - DNA, 223 bp, Glycine max
  Clone ID: 700958071H1
gataatctaatatgtcaaagcgagaaaaaatggggtccgcaaaatttgctttgataataacaattgttattatctcaatgtgtagcatttcctaggcacagaattcgcccaaagatttccttgacgcgcacaatgcagctcgtgcagaggttggtgttgagccactcgcatgggacgacaccgtcgcatcctacgctcagcaatatgcggactcgaggatcaa

SEQ ID NO: 18778 - DNA, 244 bp, Glycine max
  Clone ID: 700958032H1
cacaatgtctgaagtgaatgcgaccctgaaattcctcaaagcaacaccatctacatcagcaacctcaacgagaaaattaagattgatgagttgaagaagtctctgaacgctgttttcactcagttcgggaagatacttgaggtgttagcattcaaaaccctaaagcacaaaggtcaagcttgggtggtctttgaagatgcatcttctgcttccaacgccctaaggcaaatgcaagagaatacag

SEQ ID NO: 18779 - DNA, 236 bp, Glycine max
  Clone ID: 700958072H1
aaaaagattaacacaatggcttcctcaccatcaatagccagccagctgtcaatggggaaaagtcagattctcctactgttggctggggtggaccaggcgggtatgtttaccagaaggcatatgtagagttcttctgctctaaggaaaagctggatgcacttgttgataaatgcaaggatcggacatctttaacttatatggctgtggataaagacgggagctggaaatctaatgtg

SEQ ID NO: 18780 - DNA, 237 bp, Glycine max
  Clone ID: 700958073H1
ctccaacggcagttccagcggaagcaagagttgggacatcgacggcgacctcgccggcttcggctatagagtccggtcatcggagctgcaacacgtggcagaaaacatggagcgtttagagaacgtgatggacattgtgaactcatcaaccaacaacaatatatctcagcttgcctccgtcacaatcttctacagcccctccgacataggttcctggatcgacacgctcctctcggg

SEQ ID NO: 18781 - DNA, 255 bp, Glycine max
  Clone ID: 700957987H1
tgttgaatgatccaactatatatatatattgatgtttcccagctggcacatatggttgatgtgtcatccggtatgcatgttgaaacagcttatgacatgctatttttagtattagtatactgggcagtatataccattgttaaaagctcaaacagctgatgacatgctatttttagtattagtatgcaattttgtatatagttagctactacaaattgttatttaattataagttatgcaaattcttatttaatt

SEQ ID NO: 18782 - DNA, 253 bp, Glycine max
  Clone ID: 700957988H1
gcagaggctgcgcagagtttgaactttgaacgttgaaggaacatagaggcagaggtttttcttctctcaccgtagaatcgaatcgagttcactttgatcgtgtgtgtctccgatcttcaaatccgcaacaaccatggtgaggggattgctcaacaagctcgtctctcgctccctctccgtcgccggaaaatggcagcacaaccaactccgccgcctcaacatccacgagtaccagggcgctgaattgatgagc

SEQ ID NO: 18783 - DNA, 252 bp, Glycine max
  Clone ID: 700957989H1
tcaaatctcaccatccacacagaaaaacacataaccaaaccctaatctgaaaccatcgttccctctctttctttctctctctttacattctttctctctctatcaacctccaaactccgatcccgtatttctctcctcgctacccgatccagaggcttcaatcctttccccgtcgagatcttgcttcacgcgcctccaacgctggaccacgcgcctgtttccgcctccatcatggtcgtgagcggagggaag

SEQ ID NO: 18784 - DNA, 250 bp, Glycine max
  Clone ID: 700957991H1
tgacccttttgggagctactggaagcccatttgtgtgcagggttcatattgccctcaagttgaagggagttcaatacaaatatgtcgaagaaaatttgaggaacaagagtgaactgcttctcaaatccaacatagttcacaagaaggttccagtgtttattcacaatgagaagcccatagcagagtctcttgtgattgttgaatacattgatgagacatggaagaacaaccccatcttgccttctgatcc

SEQ ID NO: 18785 - DNA, 249 bp, Glycine max
  Clone ID: 700957992H1
cgaagttctgattctgtatctgaaattggggatgaccttaacaaaactccagcctcagcacgacacaaaagaggctgtaattgcaagaaatcaagctgcctaaagaaatattgtgaatgctatcagggtggtgttggttgctccgtaagctgtagatgtgaaggatgcaagaacacatatggtagaaaggatggttctgttccttctggattagaagccgaacctgaagaagaaacagaagcatgcgaa

SEQ ID NO: 18786 - DNA, 251 bp, Glycine max
  Clone ID: 700957993H1
atcttcacaaccatatcatccccaaaacaaaaaaaatccacgtatttgaaatccgacgctcgtttttgatggatttagcgtgcaacgatgaaccacctaccgcgaatattcggcaatagaaagaagcaagcctccgacatggacccgacgaagaagaagaagaagagtaagaggaattcgacgaagagccgaaggagaaggagaaagaggaagtggaaattgcagtattagagagcgaggatcgagctagg

SEQ ID NO: 18787 - DNA, 247 bp, Glycine max
  Clone ID: 700957995H1
gatttttagggtggaagaaaaatcagagtgagagaaaaaatcgatggagatggaagtagacatcgagaagaagcaacaagacgtggtgaaagagaaagacttgttcaaagctgcagaagagggcgaggcatcaacgttcgaagctctctcttctgaaatcctctccaaagccctctctctcagaaacgaagacgctcgttcccttctccacgtcgcagcttcttccggtcactcccaggtagtgaag

SEQ ID NO: 18788 - DNA, 173 bp, Glycine max
  Clone ID: 700958001H1
aaataatctgtagcagcatccagagcaataggatttcgaataataaaaccatttcttctcctatgctagcaataacatatattgcacccatcgcactttgatgagaatggccacgttctttgcagtaatcagaggctcagagactaactcatccttctccattaattttatta

SEQ ID NO: 18789 - DNA, 202 bp, Glycine max
  Clone ID: 700958002H1
aagaattgcaaagaggagaggcaacgaaaagaggaggaagagagacaagctgcaaaagctgctttacaacagaagaaggtgaaagagaaagagaaaaaactcttgcgtaaggagcgagcacgtcttcggactctttcaggacctattttatcacagcatttacttgatatttctgatgatgatgtagaaaggctttgcatgt

SEQ ID NO: 18790 - DNA, 171 bp, Glycine max
  Clone ID: 700958003H1
tctcaagttggctgatgctcttgacatagctgtgaaatctgtgaggtacactcgtggaagcttcattttccctggggcacagtcttttcctcaccgcagtttttccgaggaggtttctgttcttgacagctatttcagcaaccttggttctggtagcaaagcatatgttat

SEQ ID NO: 18791 - DNA, 241 bp, Glycine max
  Clone ID: 700958006H1
gtcaggatttgttctatgctagactactcgatctggtatttcagattgttcctgcaaaacggaaaaagagattgctaaattggtattacaagtccaagccagttactattcaaaagagataggtaatttagaagcattgtaagtccaagcctctctggttattcaaaaatgtgtatctgtacagcaatatattgattgccataggtttctagtataaaatagctctctaggtattcaaaaa

SEQ ID NO: 18792 - DNA, 82 bp, Glycine max
  Clone ID: 700958007H1
ctttaattgtactactcatgagagagacttggcagttcggatacactgggtgctctcatgacgatttgtccaccaacagacg

SEQ ID NO: 18793 - DNA, 228 bp, Glycine max
  Clone ID: 700958008H1
ggcaagatgagtttgttaaaaagaggattggaagaatcctttgagtgtgggaaaatgagtatgtacggtagggatccgtggggaggcccgctggagattcacgccaccgactccgccacggacgacgagcgcaccggaatctccaggagctggaccgaggcgctttagacgagacccaacagagctgggctcttgggcgccggagaacagaaagagagcaataaaacc

SEQ ID NO: 18794 - DNA, 245 bp, Glycine max
  Clone ID: 700958009H1
gcaagagtaataattctgctcctgaagaattaaacatggaaatgagtgccagcaattgtgaacacagtgccgtgttttcctcattgccactggttctcaaatggcttagggacacggtgcaacaaaaccagtcaactcgttttcaggtccttgttactggttctatacatcttattggtgacatgttgaaattagtcaagaagtgattcgttgggctacttgaaagattggctttcattcagatt

SEQ ID NO: 18795 - DNA, 243 bp, Glycine max
  Clone ID: 700958010H1
catgttcccaccgtctagtaaacctagcaaagcaacaaaacggcgtcatgcttaggaagtagcatgcaatggtaatactagaaataggagggacatactgatcggccttggaggactctatggtgctacaacaagtctcacaagtaacaacactggttctgcatttggtgcttcattgtcgcctccagatccaactaactgcgttcaaccggacccagaagaagaccctttttgcacaccacc

SEQ ID NO: 18796 - DNA, 228 bp, Glycine max
  Clone ID: 700958011H1
acacactgtaagtaaatagaatcgaaatttagacaagacatcatgggtggggtaacatcgttactaatgttgctatgtctcttcgcaggggctatgtcccctgtgaagggtgaagacccttacttctttttcacatggaatgtcacctatggcaccctttctccagccggtgtgccccagcaggttattctaatcaacaatgaattccctggacccaacataaattcc

SEQ ID NO: 18797 - DNA, 236 bp, Glycine max
  Clone ID: 700958012H1
gttaaccatgaagtttatgtatctgcattcctacttctatttgttttctctagccaattcttgcttggaggagcagatgcttcccccagacaagtgattgacacagaaggcaagaaagttcgagctggcgtagattactatatccgaccggtcccaacaaccccatgtgatgggcgtgggccgtgtgtggttggaagtggctatgttctcatagcaaggtcatccaacaacacttg

SEQ ID NO: 18798 - DNA, 233 bp, Glycine max
  Clone ID: 700958017H1
agctcgagttcacagcagtttgagcatgatattcctgagcagtttcatcatgatgttcccgtgcttagttttacgcctgaacagacaaaggaggcccttgatgttgcaaggaatagcattgagcttctttccactgtgttgtcgtcttcaccacaacaagatgctttacaggatgatttgaccaccacacttgtgcagcagtgtcgtcggtcacagactactgtccagcgaat

SEQ ID NO: 18799 - DNA, 185 bp, Glycine max
  Clone ID: 700958018H1
aacaggaagaacgaacctgtgtaattcccccaaatccgaagttgatcctgaaaccctaaatagaccttaacgttgtgtctatgattgtgaattatggacgcgaaggatatcctgggattgcccaaaaactcattcccaactctcgagaagaagtctcgtcctcccaaagagtctcaaagaaaacc

SEQ ID NO: 18800 - DNA, 211 bp, Glycine max
  Clone ID: 700958019H1
caccactgaagctgctggaatcagtttgcttgcaggggcagtgggtcgttcccagttaagttacaaggggtgcagttgtcttccagcgatcagagaaaaattgaggaagtttcagtgtgaaattccagttttcaaattccaaccttgaggacaaggttgatttttaggaagggtgttgataagcataagcataagccacacatcaccaagg

SEQ ID NO: 18801 - DNA, 239 bp, Glycine max
  Clone ID: 700958020H1
agctatttctttgttttcttgcttggaggcattcttgactgaagaacctcttggaccagatgacatgtggtactgccctagatgcaaggaacacagacaagctacaaagaagcttgacttgtggaaattgccggagattcttgtttttcacttaaaacgattctcatacagcagatacctgaaaaacaaacttgacacttttgtaaattttcccattcacaatctggatttaaccaaat

SEQ ID NO: 18802 - DNA, 237 bp, Glycine max
  Clone ID: 700958021H1
aagccttgctttcaattttcccttacaaaaaaatcctatcccttctctagtccccataactagcaaaaagagccaatagaaaactgttccatatagtttcccattcaaacttgttttgattttcattttaactcaatggagaatagaacaagctctgtactcccacctggcttcaggtttcaccccactgatgaggaactaattgtgtactacctttgcaaccaagcctcatcaagg

SEQ ID NO: 18803 - DNA, 176 bp, Glycine max
  Clone ID: 700958022H1
gatctaccgccttggtctatcagtattcttcctgattgcaaaactgttgtttacaacacaacaaaggttggttacggctggctgaaaaagatgactcctgtaaacagtgcatttgcttggcagtcatacaatgaagaacctgcctcatccagtcaagctgattccattgcagcata

SEQ ID NO: 18804 - DNA, 238 bp, Glycine max
  Clone ID: 700958023H1
aggtggagctgcttttgggttccagagactcctgaagatgctgccagagtggggcttgtcagtgggaaggataatataatagatcgtagtattcaagatgcttatgttaatgccattcgacgtgcgaaaaatttcatctatattgagaatcagtatttccttggaagcagttatgattggagtgctgatggaattaagcctgaagccatcgatgctttgcatattatcccgagagagc

SEQ ID NO: 18805 - DNA, 255 bp, Glycine max
  Clone ID: 700957986H1
atctcattaacttgagtagagatctgttgtagacctgtagtttactagtgaaaaagtggaagatgggttcgaagatagcaatagtttctatgctggccatgctccttttgatctcctcggaggtgttagagttagctactgcgggtggtgggggcaaccttggtgttggtggtggattatcaggtgctggtcgtggtggctcccctcgtggtcgtggaggcttccctggtggtggtagttttcctgctggtgatg

SEQ ID NO: 18806 - DNA, 237 bp, Glycine max
  Clone ID: 700958025H1
gattaacaagctatgtgccccatatattgataccgttgggtatcgggtgttcttgggcttgaaccagtactttgttgcttcagatgttggccatgggaagatgcagtggtatgctttccatggggaacccccttcaagtgaccctttcccagaaggtaagaagaagaggcttttggatctctttggtaattggtgcgatgaagtgattgcactcatatcagaaattcagaacatatg

SEQ ID NO: 18807 - DNA, 122 bp, Glycine max
  Clone ID: 700958026H1
aacacgttcccattcctctctcgctaacctcaccggcagcgccttcacggtcatcgtagccgacaccccccctccctgtcttaatggcatcaatcccagtcgcgtgttccacacaacatagg

SEQ ID NO: 18808 - DNA, 240 bp, Glycine max
  Clone ID: 700958028H1
tggcgttggagcaagcagtatcatcgtcatcaagcacattgaggaacgttatcaccttccccagaaccctaatttacagaccccaattccaagtcgctgcttctcactcatggaaaacacagcggcgttgggggaacttgaagtgctccatgacgacaacgccaacataccctaagccctcggagattccgtggcagaaggagctctgcaactccgtcaacctcatcggcaatgtcgcgg

SEQ ID NO: 18809 - DNA, 253 bp, Glycine max
  Clone ID: 700957947H1
cttcgagtaacaaagcaccagtttcttcatcattggatggtctctcatctctttcactttcgacaaaatcaacttcaaatgctgctcctatgatgaatttattggatggttttgcccccagcccgccaacagaaaacaatggatcggtttatccatcagtaactgcatttgagagcagctccttgaggttgacattcaatttctcaaaacaaccaggaaacccacaaacaacagttatccaggctacttttat

SEQ ID NO: 18810 - DNA, 250 bp, Glycine max
  Clone ID: 700957948H1
cttttgtgccaatgatgctttcacctactcaaggagtttctacccaaagttctgattggaatggatatcaggcatctgtctacttacctgagaggagcattcatccaccttctacatttgtcatgaacaacccagcaattgatacaaatgtttacatgcaccatcaaaagcagatgcctgttgatgagtttccagaaaggcctggtgaacctgaatgcagcttcttcttaaaaactggggattgcaagtt

SEQ ID NO: 18811 - DNA, 261 bp, Glycine max
  Clone ID: 700957952H1
atttggatcactttccaatagcagtgctgggagcagtccaaggggggcagagaacaacaaagaaggtgccaccttgtgcaatgccttagaaagtacttcatacaagaagaagaagccccttgccctttgaaatatgatgaagccatgttggaggaggaagaagatgaaaaggactttgttcttttgacttcaattattagtgaagtttatatatatatggtaatgttagaatttggaaagatgtgttcgtgttcatgttca

SEQ ID NO: 18812 - DNA, 171 bp, Glycine max
  Clone ID: 700957954H1
ttgcatacaacatcggcaatttattttcatgacaatcattccgcttttgcctattatacaagtaactaaaagctttatcccaatgaggtcagttacattggatagctacgtagattgcattaatgcaattgagtttgaataaagaccaaaatttcaagaatactatttact

SEQ ID NO: 18813 - DNA, 249 bp, Glycine max
  Clone ID: 700957956H1
ctatttttgtttttctttgttcacagctctgcgagatcttcattcgccgattttaaaagatgggtaagcttcagagtgatgctttgcgtgaagccatttcaggaatcatggccgattccaaggagaagaatcgcaaatttgtggagaccatcgaactccaaatcgggttgaaaaactacgatccacagaaggacaagcgtttcagtggctctgtcaagctgccccacatccctcgccccaagatgaaat

SEQ ID NO: 18814 - DNA, 257 bp, Glycine max
  Clone ID: 700957957H1
tgcaactacaacaacattcattcattcacagctgtcacgccgtgaacggaaaatggcaacggcgagacgcagtttcccgcctatcaccgaatgcaacggaacgacaccgtgcgagtctgtggccgccgacctcgacggtacgctcctcatctcacgtagctcgttcccgtacttcatgctcgtcgccgtcgaagccggcagcctcctccgcggcctcatcctcctcctaatacatccgttcgtcatcatcgcctacc

SEQ ID NO: 18815 - DNA, 254 bp, Glycine max
  Clone ID: 700957958H1
cacaagtcatcagaggagagaaagctggagcttaggcttggtccacctggtgaagagtagatcaatgaaagcatcagaaaaagcaacagagaaagaaatgaatcacaattcactcttggttgcttctcaactcaaaatttttttacttctgacaagcaaggtccaggtgggactacgttgccctctgcatggccttccacatcctatcatcatgaacaccaggctaaagctaaagcttcatcatttcttcagct

SEQ ID NO: 18816 - DNA, 130 bp, Glycine max
  Clone ID: 700957959H1
atgaaatatctgattcagcactaaaagatgatcaaatggaatctctgttggaggaattaggttctgtttctgtcatgaattccaatcagagtgatctcgatttaaaactaggtacagttccacacaacat

SEQ ID NO: 18817 - DNA, 167 bp, Glycine max
  Clone ID: 700957960H1
tccgcatccgctagctcgcgcaggcaccagcaggtcagctccaagggtttcttttgttcttttctccttatccatccatatcccttaccaataatatcctattgttttgctttgttcggaaacgaaaccctaattttgggatcacaggtgaggttattgtgatttga

SEQ ID NO: 18818 - DNA, 253 bp, Glycine max
  Clone ID: 700957961H1
gcgaaaggcggactaggaggattatcattcatttcttcacatgtcctccaccttttcaagtctatgggtctctaccttgctgcaaaaccctgcagcccatgctgcagcgagttttgctgctacattttggccatatgcaaatgcagaaacttctgcagattctcccgtgtgcactccagattttccatcaagacaaattggctcgcctccaagtgtgacagctattgcagctgctacagtagctgctgcaact

SEQ ID NO: 18819 - DNA, 249 bp, Glycine max
  Clone ID: 700957963H1
ggatgagtacgtttaccatggtacatcatactgcaccgcatataccattcaaatactcagaagagtggaatgctgcgcaacacagcttaatggaactgttcattgtgattatcctaaatggatcgagatcctatgtcacgatattaatgtccatattccacaccacatatccccagaggataccaagctataatttaagagcagcccataagtctctccaagaaaactggggacagtatctgaatgagg

SEQ ID NO: 18820 - DNA, 250 bp, Glycine max
  Clone ID: 700957964H1
gagaatttgaattctgattttgtcggggattggtcttgccatttttgtggcagtgctttggtgaattacaggtgccattgagtattttgtaatctttctttgattataattattaaattaaagctggaggaggaagagaaaagtccgtaatactttcgtcactgttatattgatgtgggcctgttgtacataaaggatgagcaaattttggcctttttacatggataggatatctgaggcatttcctgaa

SEQ ID NO: 18821 - DNA, 255 bp, Glycine max
  Clone ID: 700957967H1
ctaagagcaagtgttccactgtgggtatccaaggcattgcttgggcttttgggggaatgatctttgctcttgtttattccactgctggaatctcagggggtcatattaacccagcagtgacgtttgggctgttcttggcacgcaagctctctctgacaagggcaattttttacataatcatgcagtgcttgggagctatatgtggtgctggtgtagttaaggggttcgagccacacctctatgagaggcttggtg

SEQ ID NO: 18822 - DNA, 262 bp, Glycine max
  Clone ID: 700957969H1
cggctcgagcgcaacaaaaagaaagaatcccaggcgaggagaaagatggaggggaaggagcaggatgtgtcgttgggagcgaacaagttccccgagagacagccgattgggacggcggcgcagagccaagacgacggcaaggactaccaggagccggcgccggcgccgctggttgacccgacggagtttacgtcatggtcgttttacagagcagggatagcagagtttgtggccacttttctgtttctctacatcaccgtct

SEQ ID NO: 18823 - DNA, 258 bp, Glycine max
  Clone ID: 700957970H1
caacggtgcacaggctggtttgacgtattggagtcctaatgtgaacattttccgtgacccgcggtggggctgtggccaagagactcccggcgaggacccgacattggccgcaaaatacgccgccagctatgtcaaaggactccaaggcgatggtgccggaaatcgcctcaaggttgctgcttgttgtaaacactacactgcctatgatcttgataattggaatggtgtggacaggtttcatttcaacgccaaggtgag

SEQ ID NO: 18824 - DNA, 258 bp, Glycine max
  Clone ID: 700957972H1
caaagaaagaaagaaagaaaaccctagcttaccttttcaactttcaagatgcaaatctttgttaagacactcactggtaagacaatcacccttgaggtggagagttcagataccatagataatgtaaagtccaagattcaagacaaggaagggatcccaccagaccagcaacgtctcatttttgctggcaagcagcttgaggatggacgtacacttgctgattacaacattcaaaaggagtccactctacacttggtg

SEQ ID NO: 18825 - DNA, 255 bp, Glycine max
  Clone ID: 700957973H1
gtcggttgtgctgcaagacaaaacttgcagtgtagtcatcactctccgtgagtgcaaaacaaccccacactgttccttttttatgcggcttgatgcattgctaggaaacaaaacaacaccttcattctatgccctcataaattaacattcagaattcccacttgtctctcttattctctgccaaaacttgttacaagtctttaatttccaggtcttctctttctctcatactacttcaaagttttgctgtgcaat

SEQ ID NO: 18826 - DNA, 252 bp, Glycine max
  Clone ID: 700957975H1
caaatcttagccgcagaggcagaggaggagatggagacgatgatgatgagttgcgtatcgattccgagttcaattccaaaatcaagaccttctattagcttgggtttgggaactcccaagttgttcaattcagtttcagtaagggtagccgtgaacgtgaatggtcggggaagaaacaaaggtttgagttgcaacgccatgttcggtctgggcgtgcctgaactggtcgttattgccggcgtggccgccctc

SEQ ID NO: 18827 - DNA, 251 bp, Glycine max
  Clone ID: 700957976H1
gtgagagagagagcgagcagtttctgacacagagagaggggtttgggattggagggattgacgctgcgtctcttcctcttctctttcgatccatccctcattcctaatcctccaatccaaccacctcagcctcacactcacatatacacatatctgaacgcgtatcgtccctcctatggcttcaaagcgcatcctcaaggagctcaaggacttgcagaaagacccaccaacttcttgcagcgctggtccag

SEQ ID NO: 18828 - DNA, 250 bp, Glycine max
  Clone ID: 700957977H1
atcaaacaaagtttcagtttttggtgttccatttttcttcctccatctttatcttaaacataacttgaactctccattccttaaattttagctacgagctagttccgacacagacaaagcaagaggcaaagaccgagttagaggtgactgttgagagcaagaacaaagacctcaagcacctggggtttgtgaggattgctgctattcaaacatttgtgattgtgtcaaatctgtatgagtacgcaaagca

SEQ ID NO: 18829 - DNA, 251 bp, Glycine max
  Clone ID: 700957978H1
cttcagttgccttcatcctcaagctgttcgcgtcggccatgtggtggtctcacacccaatgatgggtcgcacccaattccccttattaacgctcctactgtggaagaacaacaaagtgtggaaattgaagaagaagaagagaaagaaagggaaagggagagggatcagctttctattttgacccttttgattgctacgttcaggaaatctttgattgggtgcagcactactatatcttcttcttcttcaat

SEQ ID NO: 18830 - DNA, 146 bp, Glycine max
  Clone ID: 700957980H1
cacaagttctgtggtatcaaccaaaacacggtcatagggcagttggactttttccttagagagtgtcccaaagggatgaaaacaatgagcacgggattgttcttgagcacactctctttggggtctttctttagcaccttgttagt

SEQ ID NO: 18831 - DNA, 160 bp, Glycine max
  Clone ID: 700957981H1
gaaaccctttaatcccatttattgttgctttcttttgttccttcgcttagaaatttttattgatatattaagatgcaggagaagaggtaaccgtgtttgttcattcacctttcctaatcctagaacaaacaaacgaacgaacgaagacactgcaatctag

SEQ ID NO: 18832 - DNA, 73 bp, Glycine max
  Clone ID: 700957982H1
aaatgtctatcacttccctcaccatggccgagtcctgcctcctctcttctccctcctcagtcttccacaccaa

SEQ ID NO: 18833 - DNA, 258 bp, Glycine max
  Clone ID: 700957983H1
catttacaaacccatccccgacctcgtatttgtttttccaagcatggacctttccatcaacacacgcacatgatacacgctgcatcatcatcgctccgccggttgagatgttcccgccgccgccgcagacgaccctcccctccctgccggatctactcctcacggccctctccgtctgcttcctagtctcgtcctcgaagccccacatcggcggctccacccgctgccccttcccgcgtcgcttcctcaaaatccccg

SEQ ID NO: 18834 - DNA, 256 bp, Glycine max
  Clone ID: 700957985H1
cgcaacaaaaagacagaatcccaggcgaggagaaagatggaggggaaggagcaggatgtgtcgttgggagcgaacaagttccccgagagacagccgattgggacggcggcgcagagccaagacgacggcaaggactaccaggagccggcgccggcgccgctggttgacccgacggagtttacgtcatggtcgttttacagagcagggatagcagagtctgtggccacttttctgcttctctacatcaccgtcttaa

SEQ ID NO: 18835 - DNA, 255 bp, Glycine max
  Clone ID: 700957946H1
attgggagctctcgttgtttcggagttagggaccttacgcagccatggccactgctacgaatgccgccgccgccccaccacgccagctctcccagaaggaagctgacatccagatgatgttggccgccgacgtccacctcggcaccaagaactgcgacttccaaatggaacgttacatcttcaagcgccgcaacgacgggatttacattattaaccttgggaagacgtgggagaagcttcagctagcagctaggg

SEQ ID NO: 18836 - DNA, 263 bp, Glycine max
  Clone ID: 700957909H1
ataaactaagagaagctaatccaggaaatgcccttcttgagttgcgtggaaatgcaggaagccacgatcttgctttatctgttgaaactctactggctttaaccaaattgacaagagaagttgctaaaggcggattgcctgttgatgatgcagtctgcattcaatgggagaggtgatcgtgctgatccttcaaggtggccagaagttgaaggcccgatgacggttgtgttgttcgaaggttggatgcttggtttcaagcccct

SEQ ID NO: 18837 - DNA, 259 bp, Glycine max
  Clone ID: 700957910H1
cttcaactcatctgcttcccctagcaaccttcttcttactactctccgcttcttatctccagattgctggggcgcaagcacaaccgttgactagtctcaagcttaactctcatattcttcaggagtctactgctaaagagattaatgaaaatcccgaggcaggatgggaggctgctataaatcctcgtttctccaattatacagttgaacaatttaagcgccttcttggagtcaaaccaatgcctaagaaggaacttag

SEQ ID NO: 18838 - DNA, 260 bp, Glycine max
  Clone ID: 700957911H1
caatataattcgcttcaaggaggtggttttgacccccacccatttggccatagtgatggagtatgcggctggaggagagctctttgagaggatatgcaatgctggcaggttcagtgaagatgaggctagatatttctttcagcagctgatttctggtgtacattactgtcatgccatgcaaatatgtcacagagatttgaagctagaaaatacccttttagatggaagccctgcaccccgcctgaaaatttgtgactttg

SEQ ID NO: 18839 - DNA, 258 bp, Glycine max
  Clone ID: 700957912H1
accaccaccaccacctttgttttgtagagatcgaaataatcaacaacaaggatttaaaaaaccatcggcaaccgtgatttgagttataacatcaatttttttcaactgtcctcaaccacaattgaaatcacatcgggttgcatttgttcgtaatttatcacgatatcaataaacccaaccaaaccgttatgcaactgtaaccgatcaacaagttaagagagggggaaatgagggtatttaaaagagccagtggagcca

SEQ ID NO: 18840 - DNA, 253 bp, Glycine max
  Clone ID: 700957913H1
actcaagttacttagaaaattccatcgattgggtaccacgcatcaaagaaattcgattaaaggacttgcctagcttcatgagaaccacaaacccacaagatctcatgatcatggatttcatatatagccagtgtgagagagctcaaaaagcttcagcaatcattgtgaacacgtttgatgcattagagcatgacgttttggatgcattctcatccatattgttgcctcctatctattccattggccccttaaa

SEQ ID NO: 18841 - DNA, 258 bp, Glycine max
  Clone ID: 700957914H1
ccttgggctttgtcaagggtattgtggattccgaagatctaccactcaacatttcaagcgaaatgttgcaacagaacaagatcttgaaggtcatcagaaagaacttggttaagaagtgccttgagctcttctttgaaattgcagagaacaaggaggattacaacaagttctatgaggctttctccaagaacttgaagccaggtatccatgaggattcacagaacaagggaaagattgctgaattgctcaggtaccact

SEQ ID NO: 18842 - DNA, 266 bp, Glycine max
  Clone ID: 700957918H1
cgacgaaccaggtgacgaagaagagttcaggaggcgcacccgaagtgcgtcaggggggtggaggtgcaaggagagggctatgcgaggcagaagcttctgtgagaggcattttctgtaccagcagcagagaaataggagtgcgaagaagaaacgtgcttctgggggtgttggtgtgccccagaaaagaggaatgaaacaaagaaaaaaacctgaaggtgatttggaaaatggggttgtgggtgctggagttgttggcgccgatggtg

SEQ ID NO: 18843 - DNA, 265 bp, Glycine max
  Clone ID: 700957919H1
attttatgttctcattccataggataagaacgatgaaacagattttatattaattaatgtattttatttgttgaattaatttttggaattgagttaaataagaagtcatattcacatataaaacttggatacaattaattcaataagtagggccaggttatttaattatatttgtgcatatacgatacgtgtgcgtatacgtatacgcgcgtgcagaacatctttatagcaggaacagacccgagttccgcgacaatagtttggg

SEQ ID NO: 18844 - DNA, 87 bp, Glycine max
  Clone ID: 700957920H1
atcgcgtttggcgatcgataacagcttcctcacacttcattacagcttcgatttcatcgttactcgttttgattccacacaacatac

SEQ ID NO: 18845 - DNA, 220 bp, Glycine max
  Clone ID: 700957921H1
gagaaaaaaagaggaaagttctgaaaaaattgaactccgacaattgcttttctcagcaactcttacttcatagaaaatatagctatagaggaagttggccaacggttaacttccctccgaacctagagagagtagtagtctcttgtaatcaaagcaaagttcagtagtcgattcttggtcaccttctgagactctaacttcaccttcctgacataccctt

SEQ ID NO: 18846 - DNA, 263 bp, Glycine max
  Clone ID: 700957922H1
caaatttaaagaaatcaacacacacaaacacatcaacatatggatatagtaagggtgcaaaccatagcttccaaatccaaagatgctgccatcccagccatgtttgttagggcagagacagagcaaccaggcatcacaaccgttcaaggggtgaaccttgaggtgccaattattgattttagtgacccagatgaagggaaagtggtgcatgagattttggaggcaagtagggactggggcatgttccaaattgtgaaccatga

SEQ ID NO: 18847 - DNA, 263 bp, Glycine max
  Clone ID: 700957923H1
cttccctccaaaccttgtgagtcccttcgaatcaaagcaaaacttagcagttcgattcttggtcaccctctgagacacaacctctgcttcctgacatatccttcacgccaatcttcccttcctcctcagactatatacacttcatcatctctatcccctcttcatattttttctattcttaacctttctctacagtatgtgtttgctgaaaggatcatgttattgaagctttttgtgatatttgtctgattatgttgctagga

SEQ ID NO: 18848 - DNA, 264 bp, Glycine max
  Clone ID: 700957924H1
atttcaatccccagtttcttcttcaacgtcctcttacgagcagatcccaattctccttcccagtttcaaaccctaattccctcattcccatggcctcagaagagcccactgtcgcggtggaacccgctcccgaacctgccaccgccgagcctcccccggaggagaaggaggagcccaaacctgaagccaaggctaagaaaaccaaggaacccaaacctaaaaaggtttccagaccacgcaaccctcccactcatccttcctacg

SEQ ID NO: 18849 - DNA, 224 bp, Glycine max
  Clone ID: 700957925H1
cacaaactctctctgactagtgatatctatccatggaggccaagaacttgtggcgcttcctggttctttcaatcggtgtggtactagttttacttgtcacttggctgcccaacaaggaggctctagactgcaacctttactctggatggtgcacctcaaagaaccggttctactcttcagcacatcctaataatccgattaagaaaccatcattttccacacaa

SEQ ID NO: 18850 - DNA, 256 bp, Glycine max
  Clone ID: 700957926H1
cagggttctcagcagccacagttggtgcttgccgagaagctattccttctccgacaacccgttgaagtcattgacaaggttcgctacaaggaggatgttttcactcacatcaaggaatacgagatggtccctttgtacgagaccctagtcgccgattccgtgttggacttggatcgtgcccttttggacttcatgcgcgctaaaattgaagacgagctcaccaagctcgacgaaaagattgctgatgctgaggaaa

SEQ ID NO: 18851 - DNA, 258 bp, Glycine max
  Clone ID: 700957927H1
gggagctttgtgctagaattgcagcagagggctattgaattcagttcgattatttcaaagcatcaaaatattaggtctacacttgtagaaaggctgccagttttggatgaggcaacttacattggtaggagggctgggttgctgccaggcgcagcttcaactccaactgcaccttcatttaatcttccaaatggagtagccaaacctgtggctcctcttgtagatctacttgatctaagttcagatgatgctcctgct

SEQ ID NO: 18852 - DNA, 94 bp, Glycine max
  Clone ID: 700957930H1
gtcttcaatcgaaaagctcctagaaagtggtcgtcccttccttcgcggtgatctggagtccatgcgacaagaacttacctcggctggttggcgt

SEQ ID NO: 18853 - DNA, 252 bp, Glycine max
  Clone ID: 700957931H1
gtgtattggtcactgacctatcttggaagagttttgaagtttaaaccttcaaacccttttgcctttagattctgattctgagtctctgctgctatatatggcgccacgcgtatttcttgtgttggggatgttgctgatggtgtgccttgttaaggtttcgtctgatccaaagagagaagaagaaatactggaagaagaactacattttcccgataacgagccacttattgtgagagacgggaacagaaggct

SEQ ID NO: 18854 - DNA, 217 bp, Glycine max
  Clone ID: 700957932H1
cacacaaactctctctgactagtgatatctatccatggaggccaagaacttgtggcgcttcctggttctttcaatcggtgtggtactagttttacttgtcacttggctgcccaacaaggaggctctagactgcaacctttactctggatggtgcacctcaaagaaccggttctactcttcagcacatcctaataatccgattaagaaaccatcattt

SEQ ID NO: 18855 - DNA, 175 bp, Glycine max
  Clone ID: 700957933H1
cttccatcagatatattttagacaaaaacaatggcaggcgaggtggtgaagaaggaagactctctcaacctgaaagtcactaacaagagtcatgttcaacctgaggagaaaattggaaggaaagagtaccagctggtcacttttgatcttccctacttggccttctactacaacc

SEQ ID NO: 18856 - DNA, 263 bp, Glycine max
  Clone ID: 700957934H1
tgcgtctttcattttcacactcaaccctttcttcatccttttatctcgtctctgccaaaacgatgccgtttgctctggagaataacggaggagttacgatcggacggtcctccttcgcttactgcgtcgcgatctgcgatcgtgattttccggaggatgattccgactccagctccgactcctccatcggaaggaacagcatctcgtcggaagattcctccgaccgggaagacgccgtcgaagttgaggttcagagttccttc

SEQ ID NO: 18857 - DNA, 261 bp, Glycine max
  Clone ID: 700957936H1
cagttagtacaaaaaagggttacttcagcttccacatatcttgaagaatagatcaatgggcaagtctgtagttgagaagctactttggatggcaattgtgtgcttggtgctgggtgtaatttccattatccccaaggcccaagcagcagtgacatgcaaccaggtggtgagcaacctcaccccatgcatttcttatgtgctcaatggtggcaaaaccgtgcctggcccttgctgcaatgggatcaagaccctctttaacct

SEQ ID NO: 18858 - DNA, 262 bp, Glycine max
  Clone ID: 700957937H1
actcaacaagcttcgaaccaaatcttattgagaaaatgtctggtcgtggaaagggtggaaagggtttgggaaagggaggtgccaagaggcacaggaaggttcttcgtgacaacatccagggcatcacgaaacctgcgattcgtaggttagcgagaagaggtggcgtgaagaggatcagtggtttgatctacgaggaaaccagaggagttctgaagatattcttggagaacgtgattcgcgatgctgtgacctacactgagca

SEQ ID NO: 18859 - DNA, 261 bp, Glycine max
  Clone ID: 700957938H1
ctgccttatctgctgttctagtttattggcattgggatcagtaactgcaattcccaatgcaaattttcaacgggcgccaaggagcactagtgtgcttctggttgttgtctgtgttttctgtggtaacaggattcaaccatgaagagcacaggacagtggaggtagttggcctaggagaatgcgcagactgcaggcagaacaatattaagaataaccacgctttctcagggttacgtgtgacggtagattgctagtcacgac

SEQ ID NO: 18860 - DNA, 261 bp, Glycine max
  Clone ID: 700957939H1
tgataagagtgttgagagtttcaatgggaaaaaactcactcctacaggctctaggtattttggtggttccatatcagggcaatttgattgtgaaagagatccaaagcagtttggctcctcagttgtcaatatgagaaaagatgtcagaagtgagattgatgtgcttccacacgtcagaaaaaagaaaaagcaggcatcaatgtctgtcagaagcatatcgactagagaaaatatccacaccttactaaggcgagccaaggt

SEQ ID NO: 18861 - DNA, 260 bp, Glycine max
  unsure (1)..(260): unsure at all n locations
  Clone ID: 700957941H1
cctcactcgcatttgaagacgcagcaatctttcccgtgaaaagggaccatggaggcaaattcaggtgccagcgaccgaatttcgagaatcgccggccacctccgcccccagagagaggatgatgtttgtttgaagcgtacgngttgccgtgcaaaaggtggggtctccggattcaaggtggccatattgggtgccgcaggaggcatagggcaacctctggcgatgttgatgaagatgaatccactcgtttcacttctcca

SEQ ID NO: 18862 - DNA, 166 bp, Glycine max
  Clone ID: 700957908H1
agaagattgagactttgatgtgtatagtttaaatgtagcaaactcgagctaaaatctgcaattctttgactcgtaggttttcttgatcgtcagttcataaatttaattttgttgggaatgaattgattgtaaatctcacaaaagtgattggatgcattgttgatgt

SEQ ID NO: 18863 - DNA, 248 bp, Glycine max
  Clone ID: 700957867H1
aagagattagatagcctcaactcaagtaaggactagctctttgagaaaatcgtatcttacaccttttggtgaccactttgagtgagagaagagaaattaagagagatactcaaattagattcaagagagatggccatcaaccatgaaacttgggctttcattttcggtcttctaggcaacgtgatctcctttatggtgttcctcgctccattaccaactttttaccaaatctagaagaaaaaatctac

SEQ ID NO: 18864 - DNA, 204 bp, Glycine max
  Clone ID: 700957868H1
cagaaactttggatgaacctgatggaaagctttcttatcaggaacttggaattgcgaactttctggttttcgtgaatggcttgctctccatccaatcattgcagaatcagagaatgcttcaaaaatgataatttttgctcatcaccacaaagttcttgacggagtacaggtgtttttatgtgagaaagggataagttttgtgcg

SEQ ID NO: 18865 - DNA, 247 bp, Glycine max
  Clone ID: 700957869H1
cttctgcacaaatttgcgccatcgtccagagaagcgtgagacacttcgcgtttatgatgagagctaagatagtttagttgtcaagtcataaatcagtatcatcactttaaatttcattagaagctgtcaaaatgtcacggaagggtttgatggagcaagacctgagtaagttggatgtaacaaagttgcatccactttctccagaagtcatatctcggcaggctactattaatatgggcactatagg

SEQ ID NO: 18866 - DNA, 205 bp, Glycine max
  Clone ID: 700957870H1
ccgcagtttctccactccatgcctcccatgggctacaatgccaggaggggaagacttcacgtcttcttctcatccaagggttgagattgttggtggaagtgaagctcctccagtgcatgctctagttgttgaggttgccatagccatggcctcaggtgttcatcctatacccctcccaagtggcctaggtggtgcctatgttttc

SEQ ID NO: 18867 - DNA, 247 bp, Glycine max
  Clone ID: 700957871H1
atcacagcttagcccgtgctgatttcattttctgttagagtatacttatatcttgaccaaaattgcttaaaccataaacatttaacagcctcattttggataaattattagggttttagcatgtctctctaaatatttgattgtttcttggcgtactgttggttttttagttcatttttggatggtttattgggtactttgatagtggtcactaaaatttggagcattaatggttttcctctcacct

SEQ ID NO: 18868 - DNA, 204 bp, Glycine max
  Clone ID: 700957872H1
aggaaatatatttattaagaatttggatagggcaattgaccacaaggcattgcatgataccttttctacatttggaaatatcctttcgtgcaaggtagctacggattcatctgggcaatcaaaaggctatggctttgttcaatttgataatgaggaatctgcccaaaaagctatagagaagctgaatggtatgctgttgaatga

SEQ ID NO: 18869 - DNA, 247 bp, Glycine max
  Clone ID: 700957873H1
gtggaaagaaatgtgaggcaggcgtctcgagctctgaagcaagggaagactttaattgtatctggtttagctgaatcaaagaaagaacatggagttgaactgcttaacaagctggaagctggtatagatgagcttgaactgatagtacaggataggaatcgagatgcagttgcaccaaaacagaaagagcttcttcaatatgttggaggctgagatgttcctggggcattgcatttctgcagtgttg

SEQ ID NO: 18870 - DNA, 203 bp, Glycine max
  Clone ID: 700957875H1
agagagtgctggaacactgcaaagaccctacaacacaacagaaagttatggatgaaattttaggagcagttagcatgttggctcaggatcaatatggcaactacgttgttcagcatgttctggaacatgggaagcctcatgagcgttcttctataataaaggaattagcagacaagatagttcaaatgagtcaacagaagttt

SEQ ID NO: 18871 - DNA, 206 bp, Glycine max
  Clone ID: 700957876H1
actgaatcatgtggaaggataccttgaattgtcagcaaagacaaaaacctactttgccactgctgtgaacttatgggatgctgatttctatgtcaaagttgatgatgatgttcatgtaaatatagcaacactgggacaaactctagttagacatcgatcaaaaccacggatatacattggatgcatgaaatctgggcctgtcctat

SEQ ID NO: 18872 - DNA, 247 bp, Glycine max
  Clone ID: 700957877H1
atttctccatttccattttcactctcactcttcaagaatcgtaagctataggaaagtcttacccaactgtgagtgctgattaccagaaggccgttgagaaggcgaagaagaagctcagaggcttcatcgctgagaagagatgcgctcctctaatgctccgtttggcatggcactctgctggaacctttgacaagggcacgaagaccggtggacccttcggaaccatcaagcaccctaacgaactggc

SEQ ID NO: 18873 - DNA, 79 bp, Glycine max
  unsure (1)..(79): unsure at all n locations
  Clone ID: 700957878H1
aatgggtttcctctcaatctcttcttcctcccacacacgacaaaatacaanatcctctcctcggattccccgtcaaact

SEQ ID NO: 18874 - DNA, 252 bp, Glycine max
  Clone ID: 700957879H1
gcaagctcatcctagagttttaaaaatggcagcagcctcctccatggctctctcttccccatccttggctggcaaggccgtgaagctgggcccatcagcccccgaagtcgggagggtcagcatgaggaagaccgtcaccaagcaggcctcctccggaagcccatggtacggcccagaccgcgtcaagtacttgggcccattctctggcgagcccccgtcctacctcactggcgagttcccaggtgactacgg

SEQ ID NO: 18875 - DNA, 255 bp, Glycine max
  Clone ID: 700957880H1
aaacaacccgatcttcacgcaaacctctgatcaatccacgattgattttcattttcaatgttattctcctttgaaacacttgccccgtagctgcaaaagctaaaacacttagtgaatgagagcaataatgggcgctggaaatatacgaccttcttcttccggctgctctcacttgtctatctccgagctccgcgagaagcaccattgggagctagaaaatctgacactaacctcacaacctttcaaaacattgaa

SEQ ID NO: 18876 - DNA, 249 bp, Glycine max
  Clone ID: 700957881H1
agaagaagcagaaagagaagcattagcaaaagcaagaagaactagtctaagcagaaatggcctcttcagtgatggcatctgtggccctcaaacctgcccctttcactgttgagaagtcctcagttagaggccttccctccctctcaaggaactcctcttcattcagagttgtggccagtggtggcaagaagatcaagactgacaagccttatggaattaatggtggcatggctttgaggcaaggagttg

SEQ ID NO: 18877 - DNA, 72 bp, Glycine max
  Clone ID: 700957883H1
tatactacaacgagagcaaagcttcgtagcatagcagcagccagcagcactgggagttccaagttcggcgtc

SEQ ID NO: 18878 - DNA, 243 bp, Glycine max
  Clone ID: 700957884H1
aaggccatgtcggaggtttacttagggaagcaaatctgcaacgtggtggcgtgcgagggaatggaccgcgtggaaaggcacgagacgctgaaccagtggcggaaccggttcggttcgaccgggttttctccggttcacttgggttcgaacgcgtacaagcaggccagcatgttgctatcgcttttcgggggtggggatgggtatagagtggaagagaacaatgggtgtctcatgttgggatgg

SEQ ID NO: 18879 - DNA, 245 bp, Glycine max
  Clone ID: 700957885H1
cgcgtgcatagcagagtcagagacagagacgcagccatgaggcggagacctgcgaggtgttataggcaaattaagaacaagccataccccaagtcacgtttctgccgtggtgttcctgatcccaagatcaggatttatgatgttggtatgaagaagaagggtgttgatgagtttcctttctgtgtccatctggttagttgggagaaggaaaatgtttcaagtgaggccctggaagctgctcgcat

SEQ ID NO: 18880 - DNA, 205 bp, Glycine max
  Clone ID: 700957888H1
acactcttttaagatatttttgttacatagtttatggtctacgagagccctgcctctgtagagtgtagaccaacctccttttctttgctttgagctcgctcgatcttcttccatttcatgtcttgttttattttattttatttatttaagccttttaaatgcccaacatttcgttcttgatgtttgagattgatgtattcaattc

SEQ ID NO: 18881 - DNA, 245 bp, Glycine max
  Clone ID: 700957889H1
attgctgatggctacaacaatggtactgctttgggtgctgagattattggtaccttcgttcttgtctacactgtcttctctgccactgaccctaagaggaacgctagggattcccatgttcctgtactggcgccacttcctattggatttgccgtgttcatggttcacttggctacaatcccaattactggtactggcattaacccagcaaggagtttcggagcagctgtaatctacaacgaaga

SEQ ID NO: 18882 - DNA, 245 bp, Glycine max
  Clone ID: 700957891H1
attgagtttggtaagctagagcttgaggctgtgctcttcgacatacgggcaattttggatgatgtattgtctctattttctgagaagtctcaaggaaaaagagtagagttggcagtttatgtgtcagatcatgttcctgaattacttataggtgatccaggaagatttcgacaaataattaccaatctcatgggtaactcaattaagttcacggacaaaggacatatttttgtcacaatccatct

SEQ ID NO: 18883 - DNA, 246 bp, Glycine max
  Clone ID: 700957892H1
ctcactcacaaacgcacactgaattcaaaaacatcgaaagagagaggcatggccgagcaaaccttcatcatgatcaagccagatggcgttcaaagaggccttattggcgagattattagcagatttgagaggaagggtttttacttgaaagggttgaaactcgttactgtggaccgtccttttgctgagaagcactatgctgatttgtctgcaaagcctttctttagtggtttggtggattacatt

SEQ ID NO: 18884 - DNA, 60 bp, Glycine max
  Clone ID: 700957893H1
ggaagaataaaataaaaccgtactctgatccaaccttttttctcccttctttcttcataa

SEQ ID NO: 18885 - DNA, 78 bp, Glycine max
  unsure (1)..(78): unsure at all n locations
  Clone ID: 700957894H1
agagcataacaacaacaggtcagggagcgggttttcttcttccacccttttttaatttctnctctctcttctctgaag

SEQ ID NO: 18886 - DNA, 252 bp, Glycine max
  Clone ID: 700957895H1
actttggtgagggatccaacacccatcagcgtaatacttctccaactccacttatctgtgcggtgcccccaactcaacatgctgttgttagtctttcttccttcctcatttgctacgaatagacttttcatgtcttcatctttcatctagttttcttgtctttcctgttacgttgttttaggtctcaacacctcaaagcaaagtaggtagaagaaactggaccttggtttaattaaacttggcttctgcaag

SEQ ID NO: 18887 - DNA, 269 bp, Glycine max
  Clone ID: 700957902H1
gaagagaggaagttttggcgtttgaatctatagaatagaatcaaaccaaattgaaagaagatcgatcgatcgatcgatggctctggtcggagttgaagtgaagcatgcggcggagggcgcaccggaggagaattgctccgccaagcccaccaagcagggcgagggcctccgccactactattctcacaacatccacgagcatcagctccttctccgtcaaaagacgcataacctcaaccgtcttgaggctcagagaaacgagctcaatt

SEQ ID NO: 18888 - DNA, 202 bp, Glycine max
  unsure (1)..(202): unsure at all n locations
  Clone ID: 700957903H1
gaaaacctgagcaaaaaacaaaacaaaacagtaagctaagcttcactgccatgccttcaacgccattctcgtgttcgatcctcactcttctancgctcttcaactcctacgttaaccccatcttccgttcactcaccttccaactctcttcttcgctgctcccattcaatgccaacttctccagcgtcagactccactcttc

SEQ ID NO: 18889 - DNA, 264 bp, Glycine max
  Clone ID: 700957906H1
cattaatttgatattggacatgaaggggaattactatccacttaaactggctgcacgatgatgtacctggattatattttggatctaatgtaggatttcaaagaagccatagcaatctaccctgacttgagtaacgtaagattgaaagatttggaattactacttcaagatgttgtagctgctaaatagaagatttgcttgtgccttggaaatgttgctattttagctgccctgcagtggtttctatcgggaaaatggattgac

SEQ ID NO: 18890 - DNA, 264 bp, Glycine max
  Clone ID: 700957907H1
atccaattgaaattttaaaaatgactgggataaacttaagaattcaattattgaaattgaataagtagacaatttaattggattggtcgaatggtatcaaaaaaatggagtactaactcccatttcttatttattattgaattaaccgatcaacttgctttgttatcgaacatttctttttgatttcaaaaattttccggaaaaaatttgaatctatttttatatgcgaatcaatcctactacttctggtcctgaggtttctgc

SEQ ID NO: 18891 - DNA, 243 bp, Glycine max
  Clone ID: 700957866H1
ctataaataagcaaccttacaactcttctcaatcccatcaaatcgaaccctttttaaacgctctaatacaaatttctggcaccaaatccttcccactctcctcaattccattcatttcaactcaacaatttctcagatccgtcaaacaaaataaaaaagatcgaaaaccctagttctataaatatataaaggaaaaaaggtctgatagatacccattgtcaatatgatctaattcttcacaca

SEQ ID NO: 18892 - DNA, 255 bp, Glycine max
  Clone ID: 700957830H1
aaggcaatgaatctgatgcaggcggttcgctacgacgcctacgggggaggtcctgccggcctcaagcacgttgaagttgccgttcccagtccaaaggcaaatgaggttttaatcaaactggaagcagttagcattaaccctattgattggaagattcagaagggtcttctccgtcctttatttctccccagaacctttccccacataccttgcacagatgtggctggagaaatagttgagatcggaactcaagtc

SEQ ID NO: 18893 - DNA, 136 bp, Glycine max
  Clone ID: 700957831H1
cgaataccaatatgtaaacccgaagacatctcatcagggaattggattactgttagatcaggctgaacacctgcaagtgttaatgtagatagacaattcaaatgtacagctttcagtaggaaacaaatagcttgtc

SEQ ID NO: 18894 - DNA, 262 bp, Glycine max
  Clone ID: 700957832H1
attttcatttgcaaaggaatcattttccatttgccaatcaaccttcttcatccctctagatcgaaaggccaaatttttctttttcttttcttttttcattattatttcatatttttttccccttttcaattcttcaaaaaattctcgcgactaaattcacgtcagtacacggaaacataaaattcagtttttttttattaaaatttgttggcaaacaaaaacaaaaaaaaaattgaaattttgatccgttttgccgaattgg

SEQ ID NO: 18895 - DNA, 256 bp, Glycine max
  Clone ID: 700957833H1
cgaggaggaatatttggcaagagtcaattggatgcatggaaatattctcactgctcagatcttgaacaggcaccacactaaaataaagattgttaagtttgatattagaacaggtcaaaggaaaaatatattggtggaagaaaacagcagttggatcaatatacatgactgtttcacacctcttgataaaggagttaccaaattttcgggtggatttatctgggctagtgagaaaacaggatttagacacctttat

SEQ ID NO: 18896 - DNA, 256 bp, Glycine max
  Clone ID: 700957834H1
cagtgcagcatctgagaaactaaaccccacaagaatcctcgcccctgcctcaccgtatacggctcagccactgcaacaggaagcatagttcgccgctactccgcgaccctaccctatcaattttcgtacttcttttcgtaattgcagcgaagaatggcgaagaggaaggagcggattcagaacccggagccattcgatccgtacggcgccgatcccgcgaagacgaagaagcgttcgaagccgccgaagcggtacc

SEQ ID NO: 18897 - DNA, 251 bp, Glycine max
  Clone ID: 700957836H1
aaggctttcgacattattgtgtctcttgatgtgtggaaatttgtgagaaatcgagacaccgtacttgaaatgctgaaggacaaaatcaaggaggaggcattgaggacatacctctttaccttctcttcatcttatgaatcgttgagcctggatcaactcacaaaattttttgatctctctgtttgtcgcactcatagcattgtcagtaggatgatgatcaatgaggagcttcatgcaagctgggatcagcc

SEQ ID NO: 18898 - DNA, 252 bp, Glycine max
  Clone ID: 700957838H1
ctaaacgactctatctctcttcgttttgttcttccttgcgctcctcctcgttcgttcgttctccctcgcgtagatcggcaatggcgcagaccgagacgtttgctttccaggctgagatcaaccagctcctcagtctcatcatcaacaccttctactccaacaaggaaaccttccttcgtgaactcatcagcaacgcctctgatgctttggacaagattagatttgagagtttgacggacaagagcaagctcg

SEQ ID NO: 18899 - DNA, 252 bp, Glycine max
  Clone ID: 700957840H1
caactagaaacagtgtgatgaaaatgaaggtccttgttttcttcgttgctacaattttggtagcatggcaatgccatgcgtacgatatgttccctctccgaatgaacactggctatggtgcccgtactccggaggtgaaatgcgcaagttggaggcttgctgtggaagcacacaacatctttggctttgagaccattcctgaagagtgcgttgaagcaacaaaggaatacatccatggcgaacaatatagat

SEQ ID NO: 18900 - DNA, 252 bp, Glycine max
  Clone ID: 700957841H1
aaggcttttgacattattgtgtctcttgatgtgtggaaatttgtgagaaatcgagacaccgtacttgaaatgctgaaggacaaaatcaaggaggaggcattgaggacatacctctttaccttctcttcatcttatgaatcgttgagcctggatcaactcacaaaattttttgatctctctgtttgtcgcactcatagcattgtcagtaggatgatgatcaatgaggagcttcatgcaagctgggatcagcca

SEQ ID NO: 18901 - DNA, 253 bp, Glycine max
  Clone ID: 700957842H1
ctttttctctattgaggttgtcattgggagcactcaacctaaccattcaagttataaaaccacatcgcaagaaaattcacaagcgatggatccgaagctgaaagaggtttctcagctcttcgatcgcttcaagacttcgtttctccggaacgacttcgataactgttccaatctcctttctcagctaaaggtgttacttacaggtttcagaagcctgccaccgttgtttgcagatacacctaatgcagttcat

SEQ ID NO: 18902 - DNA, 251 bp, Glycine max
  unsure (1)..(251): unsure at all n locations
  Clone ID: 700957844H1
attccctgcacgagcttcttaatatagtaggattatgtcttccttcatcacactagacaagcatatagaagnccatcactgaactaacaaagcaaccctatgtcgaaggtggtttgtgtcaccggagccagcggcgccatcggatcatgggtggtcctactcctcctccagcgtggttacaccgtccatgccaccgtccaagatatcaaggatgaaaatgagacgaaacatttggaggaaatggaaggagc

SEQ ID NO: 18903 - DNA, 233 bp, Glycine max
  Clone ID: 700957845H1
ggctcgagcgaatctcgacgttgaactgaacgtggaggagcggaaaccgctttctgttgggtacaagaatgtgattggtgctcgcagaggtcctggaggatcctgtcttccattgagcagaaggaagaaacaaaagggaacgagttgaatgcgaacggattaaggagtacagacagaaggttgaattggagctatcgaacatctgtaatgatgttatgagagtgattgatgag

SEQ ID NO: 18904 - DNA, 115 bp, Glycine max
  Clone ID: 700957846H1
ctgcgactctctttccttccctctttttccgaatctgaatcgaaatggcttcggagactgagacgtttgcttttcaggccgagatcaaccagctcctcagtctaatcatcaacac

SEQ ID NO: 18905 - DNA, 257 bp, Glycine max
  Clone ID: 700957847H1
aggagatctgcggcctccttgagcagcagatttcgcattcttcttccgccgataaggctcagatttggcaacaccttcagcgctactcgcacctcactgacttcaacaattacctcgccttcatcttctcccgtgccgagggaaaatcagtggaggttcggcaggctgcggggttatatctgaagaataacctcagaaacatgttcaaatctatgcagcctgcataccaacagtatgtgaaatcagagttgctgcct

SEQ ID NO: 18906 - DNA, 258 bp, Glycine max
  Clone ID: 700957848H1
acttgatctctttggtgatgagacagaggaggataagaaggcagcagaggaaagggaggctgctaaaaagcctgccaagaaaaaagagagtggcaagtcttctgtccttctcgatgttaagccttgggacgatgagaccgacatgaagaagctggaagaggctgtccgtagtattgagatgcctggtttattgtggggagcatccaaactagttcccgtgggatatggtatcaagaagttgcagatcatgatgactat

SEQ ID NO: 18907 - DNA, 252 bp, Glycine max
  Clone ID: 700957850H1
ctcggttttaccaagcatggagcttcctacaactgatgtggaaccttagcctaagaagattgaacctgagaaaaacgaaggtcccttgttccattgtgatttttgtgatacagaagtagttcacaagctggctcaaatgttcctgccaggactagcctgtgcctgtgttgataacaccacaggcggtcccttcaagacccctggttcagtggctgttgatctgagaaaggtaatgatagaatttgtcaccca

SEQ ID NO: 18908 - DNA, 249 bp, Glycine max
  Clone ID: 700957853H1
caaagatgtctttgtcttggacgttgacgacactactctctctaatctccagtattttgctaaccatggatttcgtgtggaaccacacaatacgacggcgtttaagaactgggttcttgatggcgaggcattcgcactgccagagactcttaaaatgtacaacaaactgttggctctcggcatcaagattgtattcttatcagaaagaccactgagtctaggggatgtaacagccaagaacttaaagga

SEQ ID NO: 18909 - DNA, 249 bp, Glycine max
  Clone ID: 700957856H1
cgagctctgcggcggaaggagtatcaatggacgatgattacgaaaccttgattgcaaccaccgacgtggagcttctgaagagagcgtggcgcaacgagaaggcggccccagagattctccgctacgaatctaaattggtttcccgcgtcaacaaagtcattcaactcatggaagaaattgtggaggaaaaatccagtggcggtactgatcctctttcggtgtctctatatcagatggacttggatagaa

SEQ ID NO: 18910 - DNA, 250 bp, Glycine max
  Clone ID: 700957857H1
ctggaaagaaatgtgaggcaggcgtctcgagctctgaagcaagggaagactttaattgtatctggtttagctgaatcaaagaaagaacatggagttgaactgcttaacaagctggaagctggtatagatgagcttgaactgatagtacaggataggaatcgagatgcagttgcaccaaaacagaaagagcttcttcaatatgttggaggctgagatgttcctggggcattgcatttctgcagtgttgaag

SEQ ID NO: 18911 - DNA, 250 bp, Glycine max
  Clone ID: 700957859H1
agagagtgctggaacactgcaaagaccctacaacacaacagaaagttatggatgaaattttaggagcagttagcatgttggctcaggatcaatatggcaactacgttgttcagcatgttctggaacatgggaagcctcatgagcgttcttctataataaaggaattagcagacaagatagttcaaatgagtcaacagaagtttgcctccaatgttgtggagaaatgtttgacctttggaggtccttctga

SEQ ID NO: 18912 - DNA, 247 bp, Glycine max
  Clone ID: 700957860H1
actgaatcatgtggaaggataccttgaattgtcagcaaagacaaaaacctactttgccactgctgtgaacttatgggatgctgatttctatgtcaaagttgatgatgatgttcatgtaaatatagcaacactgggacaaactctagttagacatcgatcaaaaccacggatatacattggatgcatgaaatctgggcctgtcctatcccaaaaaggggtaaggtaccatgaacctgagtactggaag

SEQ ID NO: 18913 - DNA, 250 bp, Glycine max
  Clone ID: 700957861H1
atttctccatttccattttcactctcactcttcaagaatcgtaagctatcggaaagtcttacccaactgtgagtgctgattaccagaaggccgttgagaaggcgaagaagaagctcagaggcttcatcgctgagaagagatgcgctcctctaatgctccgtttggcatggcactctgctggaacctttgacaagggcacgaagaccggtggacccttcggaaccatcaagcaccctaacgaactggctca

SEQ ID NO: 18914 - DNA, 253 bp, Glycine max
  Clone ID: 700957863H1
gcaagctcatcctagagttttaaaaatggcagcagcctcctccatggctctctcttccccatccttggctggcaaggccgtgaagctgggcccatcagcccccgaagtcgggagggtcagcatgaggaagaccgtcaccaagcaggcctcctccggaagcccatggtacggcccagaccgcgtcaagtacttgggcccattctctggcgagcccccgtcctacctcactggcgagttcccaggtgactacggc

SEQ ID NO: 18915 - DNA, 245 bp, Glycine max
  Clone ID: 700957829H1
acggggttgtttgagcctttcgtgactcatctcaaattcctcaaagattagatctgtataggtggatactcaattaagcttctgcctcccaaccacggtggcttctggttcaccagagccacgtttgagagatttgtgcgctttgtcagcacaccggctattctggagatgtttgttagccttgaaaatgaaattctgcagatcagaagttcatttcaagctaatgtcttttgcaatgtccgttg

SEQ ID NO: 18916 - DNA, 258 bp, Glycine max
  Clone ID: 700957864H1
aaacaacccgatcttcacgcaaacctctgatcaatccacgattgattttcattttcaatgttattctcctttgaaacacttgccccgtagctgcaaaagctaaaacacttagtgaatgagagcaataatgggatctggaaatatacgaccttcttcttccggctgctctcacttgtctatctccgagctccgcgagaagcaccattgggagctagaaaatctgacactaacctcacaacctttcaaaacattgaaatt

SEQ ID NO: 18917 - DNA, 250 bp, Glycine max
  Clone ID: 700957865H1
cagaaaggtgctgttatgaaagctatctgtgctggttttgaagaaactactgaaccagctgtttgtttgagcagtgatgtggagacaaatgagtgtttggagaataatggtggttgttggcaggataaagtagctaacatcaccgcatgcaaggatacgttccgtgggagagtatgtgaatgccccctggtggatggtgtgcaatttaaaggagatggttatacaatctgtgcagctagtggacctgggc

SEQ ID NO: 18918 - DNA, 258 bp, Glycine max
  Clone ID: 700957783H1
cgataattatgacagggagttggaggatgtaatagataagcttattggtgagtgtgataggaaaattggcagggctctaaagcggctcgaggacgacgatgcgaaagcggctattgcaatttcggtctctgaagttactcaaacagatgaggtgcttgagttgtcgaagcaaatcaaagagaaattgaaagaagctgatcaatatgatcttgaaggcaagtcagatctcaagattcgagctttagaggttgtagagga

SEQ ID NO: 18919 - DNA, 260 bp, Glycine max
  Clone ID: 700957784H1
tggttttgttgttggtgggtttcagcgttccgcttcaacttcaaattctcagtgaaaccaattcagttcagtccaaatcccaaatccgaagtgagatttgcgatggagaggcttcagcgaatgttcgcaggtgcaggtggagctctagggcaccctcccccagattccccaactctcgattcctccgagcaggtctacatctcctcactcgctctcctcaagatgctgaagcacggaagggctggggttcccatggaagt

SEQ ID NO: 18920 - DNA, 214 bp, Glycine max
  Clone ID: 700957787H1
ctgaacttatcgcttcttcccggtttgaatttgggtgtttccgtttcaatggatgacggcgagcttgatttctccaaccatgaagtgttttcgagtcccaacatgggtgagcttcccagcagcggttcaatggacagtttcttcgacgagcttctcaaggacacgcacgcctgcacccacacccacacctgtaaccctcccggccccgatttct

SEQ ID NO: 18921 - DNA, 259 bp, Glycine max
  Clone ID: 700957788H1
tggccactctcctctgagaaagcctccagcctctcctccaaagtcccctgcggttcgttcggttattcttcgaaccgttgtctgaagtttacaactcaaaacttcaccgaacgcatttcattcaccaattcgtccaagtctcgtatcaatcaatcagcctatccgtcttgcggttggagagatcggaggggagagcagccatggcgcatcgagtagaccacgactatgactatctgttcaagatcgtattgatcggaga

SEQ ID NO: 18922 - DNA, 253 bp, Glycine max
  Clone ID: 700957791H1
agcgaagagaatggctcccaaggatttaatctttttggctgtgttatgcttctcagcactgtcactgagtcgttgtcttgcggaggataatggacttgttatgaacttctacaaggaatcatgccctcaggctgaagacatcatcaaagaacaagtcaagcttctctacaagcgccacaagaacactgctttctcctggctcagaaacatcttccatgactgtgctgttcagagttgtgatgcttcactgttg

SEQ ID NO: 18923 - DNA, 253 bp, Glycine max
  Clone ID: 700957792H1
cgatccccttctccttctctctctctttttcgcctcattccattttcatctatcaatggctccagtagcagcagcatcttcagattcaatcaagccaagagatgtttgcatcgttggtgttgcacgtacaccaatgggtggatttcttggtactctgtcatctctatctgccaccaagctaggctctatagctattgaagctgctcttaaaagggccaatgttgatccatcccttgtggaagaagtatttttt

SEQ ID NO: 18924 - DNA, 258 bp, Glycine max
  Clone ID: 700957795H1
cttgtcccattcaagcacttgatttctagttacataacaactatatgcatcttgtaactacttaaaccgtttcctacgatttgactctacttttgattccctttccagccaccaaatcaaaccaatacctcactgtttcatagcttttttcttcaacccaacttcgtggtcaacaatgatggattcagaaggagcactgccccaggttcaggaaatagagcaagaaggtgtcggtggagggactaacaagaagatgga

SEQ ID NO: 18925 - DNA, 253 bp, Glycine max
  Clone ID: 700957796H1
acctgctcaacactcttcagatccaaagcccataaaaagagaataagttgtggtctctgaggatctaggccagagggcttttcaatcactggctcctgctgtcggtagccatacatctactcctgttgcagttgtggtccctgttgggaatgtgccaataactactattgaaaagtcagttgtgtctgtatctcctcttgctgatcaatccagaaatgatcagaatgttgagaagaggattatgtcagatgag

SEQ ID NO: 18926 - DNA, 68 bp, Glycine max
  Clone ID: 700957805H1
gccacatagagggaagcttggttatggtattggtgtctcgggattgtgataaatctgttgatgacttt

SEQ ID NO: 18927 - DNA, 254 bp, Glycine max
  Clone ID: 700957807H1
gttcctggctcatcaagaagctactggccaagggctacacagttcatgcaactctcagagacttgaagaatgagtcaaaggttggcctcttaaagagccttccacaatcagaaggaaaactggtgctgtttgaagctgatatttacaacccaaatgattttgaccttgcaattgaaggctgcaagtttgtgtttcatgttgctactcccatgatccatgaacctggctcccagtacaaggatactagtgaagcg

SEQ ID NO: 18928 - DNA, 257 bp, Glycine max
  Clone ID: 700957808H1
gtttctctctcttcggtcagaaacatgaatttggaaacgcaaccaggaacggcgtcgtattggtgctacagctgcacccgtttcgtgcacctctctgtccaaagcaccatcgcctgcccccactgtcaaagcggtttcgtcgaagagatccgtgccggcgccggagccgaagcctcgccacgccatcgactaagtcctttccccgatgatcctcttttgctccggcgacagggcttccgccgccgtaggagagaagc

SEQ ID NO: 18929 - DNA, 252 bp, Glycine max
  Clone ID: 700957810H1
cgacactgtcagcaagcacgatttcatcgtcgtcgagttctacgccccatggtgtgatcactgtaagaagcttgctccggagtatgagaaagctgcttctatcttgagtagtcatgatcctcctattgttttggctaaagtagatgccaatgaggagaagaacaaagaccttgcatcacaatatgatgttaagggattcccaacaattaatattctgagaaatgggggaaagaatgttcaggaatacaaagg

SEQ ID NO: 18930 - DNA, 255 bp, Glycine max
  Clone ID: 700957811H1
ctgaggactgggacgaaagagccaaaatcccggacccaagtgctgtgaagccagatgactgggatgaggatgcacccatggaaattttagatgaagaagcagagaaacctgaaggatggttggatgacgagccagaggaaattgatgacccagaggcgacaaaacccgaagactgggatgatgaggaggatggtgaatgggaagccccaaagattgaaaacccgaagtgtgaggcagcccctggttgtggtgaat

SEQ ID NO: 18931 - DNA, 85 bp, Glycine max
  Clone ID: 700957812H1
gtgtttcgctgtctctcccatcctttcgcattctcaataccctttagatttgtgaaaggaaagcaaacatggttgagcaggtcca

SEQ ID NO: 18932 - DNA, 255 bp, Glycine max
  Clone ID: 700957813H1
gtgcaagaagaggaagaagttgagttgagttgaggttggagctgaaagaaaattgagtgagaattcaatgacacagaatctgaagcataccgtggatttggaatgcagtgataatagcaggccgtcaaagatatcaaaaatcgagtatccgagtgacagtgacattgacgaagaagaagaaggaatgagccaaaaccctaggaatgggattcagcgctatttggttgcaatcgagtatattgggactctcttctc

SEQ ID NO: 18933 - DNA, 258 bp, Glycine max
  Clone ID: 700957815H1
cgtaataagttctatcattgaggaagtttcctgtgcatcgtctccgaaaatgaacgacgcagatgtctcaaagcaaatccagcagatggtgcagttcatccgccaggaagctgaggaaaaggccaacgagatctctgtctccgccgaagaggaattcaatatcgagaagctgcagttggtcgaagccgacaagaagaagatcaggcaagaatacgaacgcaaagagcgccaagttgaaattcgcaagaagattgagta

SEQ ID NO: 18934 - DNA, 262 bp, Glycine max
  Clone ID: 700957816H1
gtacttgttggtggttccaccagaattcccaaggtgcaacaactcctgcaagatttctttaatgggaaggagctctgcaagagcatcaatcctgatgaggctgtggcatatggtgctgcagttcaagctgctatcttgagtggtgagggtaatgagaaggttcaggatcttctccttcttgatgtcacccctctctctcttgggctggaaactgctggtggggtgatgacagtcttgatccccaggaacactactatcccaa

SEQ ID NO: 18935 - DNA, 257 bp, Glycine max
  Clone ID: 700957817H1
attttcttcacctggagagcagcatttcatcttctgagttggctcaaatttttctgaacttaaggtgtaagaatctttcatgtcgaagtcagttgcctgtggacgaatgtgattgcaaggtttgtgcaaagaagaatggtttttgcagggagtgtatgtgccttgtgtgttcaaagtttgataatgcctcaaatacatgtagttgggttggatgtgatgtttgccttcactggtgccatactgactgtggattacgg

SEQ ID NO: 18936 - DNA, 256 bp, Glycine max
  Clone ID: 700957818H1
aaaaattccttctgacttaatagttgaacaattgggtattaaggagtatttgcctgcatatttggatccgaatctcaaatctagtgatcttgttaccggcgtctgctttgcctccggtgcttcaggatacgatcctttgacacccaaaataacgtcagttctatcgttatctactcaactagacatgttcagggaatacataggaaagctgaaaggcattgttggagagagcagaacaaactacatcctatccaat

SEQ ID NO: 18937 - DNA, 212 bp, Glycine max
  Clone ID: 700957819H1
ctatgatcaaacagatggtgctgatggctatgtttctgttgaactatctcccaggctcgctgatgacactgagggaaccatagaagctgcaaaatggcttcataaagtggttgatcgccccaatgtgtatattaagattcctgctacagaggcatgtgtgccttcaattaaggaagttattgctaatgggataagtgtgaatgtgacgctga

SEQ ID NO: 18938 - DNA, 253 bp, Glycine max
  Clone ID: 700957820H1
tatgtctctatttcttttctctctctataaataagcagccttacaactcttcttaatcccatcaaatcgaaccctttttaaacgctcaaatacaaatttctggcaccaaatccttcccactctcctcaattccattcatttcaactcaacaatctctcctatccgtcaaacaaaatataaaagatagaaaaccctagttctgtaaatatataaaggaaaaaaggtctgatagatacccattgtcaataagatc

SEQ ID NO: 18939 - DNA, 256 bp, Glycine max
  Clone ID: 700957824H1
ctcctctgaacctcaaacaccaaaacaaagcattacaattctcaatttcacataaacaccagaaatgataaaaacacataacaaaaaaaaaaagtgaaaaatggcgagcgcagtggagaaggagggtggcgcgagccaggaaactttgtctttggagcttcctgctccacctggttggaagaagcagttcattccaaagaaagctggtaccccaaagaaaaacgagattgtgttcactgcaccaacaggagaggag

SEQ ID NO: 18940 - DNA, 251 bp, Glycine max
  Clone ID: 700957825H1
gaagaaccctaaccatctccgcagcgcaagtcctcattgcaacccaccaaactatcaactgggatcgtaaccgctctctcgccctcgctagatttgattggatcggcttcctgcattcttggactcgggaatttggaccaaaaacagttccccaaatcttgctttttgtcttgttcttgtttctaagtcgttaatgtcagtgcagcgaagtaatctctggcaagttgattgtggcaggggagaggagggtt

SEQ ID NO: 18941 - DNA, 251 bp, Glycine max
  Clone ID: 700957827H1
agacaaggagttgtacagcaagacgtttttggacgaggaaaagaggaacaagttcataaggtggaggattcagtcgttggagaagagcgttagaagccttgacttctctccgaatgggatatcgacaatagttcaggtgaacgaccttaagaactctcccggactgggcaagagggaactgaggcaggccaccaatcaggcccttcaactgcttcaggacaactaccctgagttcgttgccaagcagatat

SEQ ID NO: 18942 - DNA, 255 bp, Glycine max
  Clone ID: 700957828H1
cattcagacttcccactttccagtatggcatgctgcataatcgtcaggctcaagactcaacctgatatggttcgcgctgctcttcgttgtcggattgttaacgattctcaaattggctttcgttgttttcagatgggtctacgtcaatttcctccgaccaccgaagaatctcaaaaagtacggatcttgggcagtggttactggacccactgacggcattggaaagagcttcgctttcgagctcgctcgcaaggg

SEQ ID NO: 18943 - DNA, 262 bp, Glycine max
  Clone ID: 700957782H1
caagattgacgagactgttggagatgcagctaatgcagctgttgaggatataaagagctttgctagttctgttgttgtcaacaaggactccgtaattcctaataataataaattcctgacggcctatacaaatattgtgccaaagctaaaaaatgctaacctctcagtttttgtagaaacattcagcaatgagtttgtgtctcaagcatgggatttcttctcagatccaactgttgagatcaactcgtatattgagggagca

SEQ ID NO: 18944 - DNA, 262 bp, Glycine max
  Clone ID: 700957754H1
cttttattctacctaacaccacatggatacgttgacagaggcttgtgtttcctacattctgtcttagacatctgcaccagacgcatgtcgcctctctatggtctcttcatccctacgctcttccgctgactctgaccttctctggcgagctttctccccttctgattactctgacattgtctcaagggctctcagccgcctctcgcttaattcctgttcttcatacaaacacctatgctatgctctgtgtcatccactcctc

SEQ ID NO: 18945 - DNA, 218 bp, Glycine max
  Clone ID: 700957755H1
agcaaacgcagcattgggagatagaaagagagagagaaagagagagagagaaagacccttacccttctctatcgctcgctttcctttgacgcttctgacccttgctttgtctgcgtcttccttctttctttctttctgtctctgtgtgtcgtaatggctctcccagactcttcttcccgtcgcaactccctgatcccctccttcatctactcgtcttc

SEQ ID NO: 18946 - DNA, 263 bp, Glycine max
  Clone ID: 700957756H1
gctcgtcactccttgctcttagccctcctcctcttcgccgccgtccccaccgccgcgatggcggtggccgcgtgccgacgccgacgacatcctgatccgtcaggtggtgccagatgttggcgaaccgaagaggaggacaacctgctgaacgccgagcaccacttcgcgcgcttcaaggccaagttcgccaagacctacgccaccaaggaggagcacgatcatcgcttcggcgtcttcaagtccaacctccgcagagccaggct

SEQ ID NO: 18947 - DNA, 261 bp, Glycine max
  Clone ID: 700957758H1
attacatagcctcagtaatctgagagagaaacaaaaacaatgtaaggtttccattgccaagttccactcccttcccctatgttttttccttctcttggccttcaacacaaaacccctcctagcagcagaaccagagccagtggttgataagcaagggaaccctttggagccaggagtagggtactacgtgtggccactttgggctgatgaaggaggcctcacactaggccaaacaaggaacaagacatgccctctttatgt

SEQ ID NO: 18948 - DNA, 257 bp, Glycine max
  Clone ID: 700957759H1
tcataagcgaagaagaagccacagagaactagtcttctactctcacccgcaatagagaaatcccatctcacatcgttggatacccccgtatgggtcccaagagagagctcaagttcgctctcgagtctttctgggatggcaagagcagcgccgaggatttgcagaaggtgtcttctgatctcagggcatccatctggaagcagatggctgatgctgggatcaagtacatccccagcaacactttctctcactatgac

SEQ ID NO: 18949 - DNA, 259 bp, Glycine max
  Clone ID: 700957760H1
atatggatcaatttccaatagaaaataagggagcagtccaagggtcgcagagaacaacaaagaaggtgccaccttgtgcaatgccttgtaaagtacttcatacaagaagaagaagccccttgccctttgaaatatgatgaagccatgttggaggaggaagaagatgaaaaggactttgttcttttgacttcaattattagtgaagtttatatatatatggtaatgttagaatttggaaagatgtgttcgtgttcatgtt

SEQ ID NO: 18950 - DNA, 257 bp, Glycine max
  Clone ID: 700957761H1
ctgcgactcactctagtgacagaaagaagaagcgaagaaaaaaaacacacacacacaaacacaagcacagttgaaaatggctctgcttaccctctcttcgctgcaatgaagacacgtttgtctttcttctccgaagaagaaaaatggctctcggcgacgatgcgcacaccactctccctcgttcctcgatgcccttctctgcgaagagcgagaaaccttcgaggaagactttgatgagaacggttatgagcgtgaga

SEQ ID NO: 18951 - DNA, 259 bp, Glycine max
  Clone ID: 700957762H1
tttctctctttgatcaaattcccttcccatggtctctctctcttcaattaattccatttagctttccccaaatcccaaaccccttttcgcttagatcccaatccaattgggttatggacatggcttccagtccccgcaccgtagaagacatcttcaaggattacagcgccagaagaacctctgttattcgcgctctcactcacgacgttgatgaattttacggcctctgtgatccagataaggataacctgtgcctcta

SEQ ID NO: 18952 - DNA, 261 bp, Glycine max
  Clone ID: 700957763H1
ggaagaacccgtcatggaacaacaaccctccgctgctgcctctgggaacactgccagacccaggcttcagaagtacgcactccgatctgccaataagttgaaggaagagaagtcagaaactcccaattgctccattcctacttctgaaaccatgagggggagaagtgtaggtgcttcaagtgtaagtaaaagtgtgagtgttcttgatttttctggcaaggacaagtctggtagtgccaagccacccagaaggctctcaat

SEQ ID NO: 18953 - DNA, 261 bp, Glycine max
  Clone ID: 700957764H1
cctttctccgccgtcgcatcgttgctgtcatacaccgctgcccccgcccatgttgcacctccttcctccatttttcagtttttctccactgtgcatcagaatccacttttcatgtattctagagcgttcaatttgaagagttgcatttgagaaatggcatcggctttgatctcgcgttcttcgcgtaggtttctcaaaccttgttcttcttcggtatctctttaccctgccatcttcaatcctgtgatttcttctcaacaa

SEQ ID NO: 18954 - DNA, 266 bp, Glycine max
  Clone ID: 700957765H1
tggagatatcagaagtgagaatgctgacatgagtaacgataaatcctgtgaaaaacacgatcgcctgccagtggaaggctttctgcgttcagtcaatctacgcagagtgaatcggtccctaaggaagccccgaccccgaaagggctgccgtccgatgggtacacgaaagtgacgaagttgctttgactacagaaccatgcctgtctgttggagtgaattggatgatcgggccgagggctgccccctcttcccctcactctcctttc

SEQ ID NO: 18955 - DNA, 262 bp, Glycine max
  Clone ID: 700957767H1
gtttgattggaggagatgactttaagagtggtcagaccaaaatgaaatctgtgttggtggatttccttgtgggggccggcatcaagccaacatctatagtgagttacaaccatctgggcaacaatgatggcatgaatctctcagcccctcaaaccttccgctctaaggaaatctccaagagcaatgttgttgacgatatggtcaacagcaacgccatcctctatgagcccggtgaacatccagaccatgtggttgtcattaa

SEQ ID NO: 18956 - DNA, 119 bp, Glycine max
  Clone ID: 700957769H1
tgagaattgctctgttggtcctgggcatgaatcgtcatccttaactgaagtcttcgaaaatgattttgctgcatcactggctctcatggataaaaccaatgatctcgttgattctatcc

SEQ ID NO: 18957 - DNA, 260 bp, Glycine max
  Clone ID: 700957770H1
ctccaagtctttctgttcattatgttattactaaagggttcatgacattcgtttgaaaccttggtttgtatcaattgtagcactagtttgattttggtgccaagttcttgagctgcggtggtgctgaccctgaaaagttctccaagtccgacatgagataaggctgctgctgctgctgcttttcaaagatgttggagctggtttcaattagtagacaaatttggttgctgaatttcgtgttcatgtgtcttcaatagatg

SEQ ID NO: 18958 - DNA, 69 bp, Glycine max
  Clone ID: 700957771H1
caccaacttcacccattcacctcactcactctttgcttctccattaaccctctgttcgacgccaaaacg

SEQ ID NO: 18959 - DNA, 261 bp, Glycine max
  Clone ID: 700957772H1
gataatccaatatatcaaagcaagaaaaaatggggtccgcaaaatttgctttgatattaacaattgttattatctcaatgtgtagcatttccttggcacaaaattcgcccaaagatttccttgacgcgcacaatgcagctcgtgcagaggttggtgttgagccactcgcatgggacgacaccgtcgcagcctacgctcagcaatatgcggactcgaggatcaaagagtgccaagtagtgcactctcaggggccttatgggg

SEQ ID NO: 18960 - DNA, 259 bp, Glycine max
  Clone ID: 700957773H1
tttaatccctcgcctatatcttcagaaaattagatctgcttcagatctagggtttcccttttccaaatcacgagtccgttgagtttgattttgtggatgaaagcatagggatagggcttttgcaaacctctccaatgtttctcgaaattatatgaccatgcgtcgaattcgtatgctgcactccttctccgtcgtgttcctctactggttctacgttttctcatgaactccctctcaaatccgtaattaattagatcga

SEQ ID NO: 18961 - DNA, 258 bp, Glycine max
  Clone ID: 700957774H1
agccattgagaggatatgttcttgtggcccgtgaaactagtttcgatgcctccgtgttagaatctcctgctctggaaaagccacttaactactcgttaatatggagcctggattcacatgatgagtgtgtttacttttggttgccaaaccctccaacaggttataaagccatgggcatagtagttactagcagtcctaaggaacctgaagttgaagaagttagatgcgtgcgagatgatctcacagaaacttgtgaga

SEQ ID NO: 18962 - DNA, 258 bp, Glycine max
  Clone ID: 700957775H1
attcctaattgtttaaacctaattctcatttcttcatcgttcgattcttctcctcctaaagatgcagatcttcgtgaaaactttgaccggtaagaccatcacccttgaggtggagtcctccgacaccatcgataacctgaaagctaagattcaagacaaggaagggatcccacctgaccagcagagacttatctttgcgggtaaacagcttgaggatggtcgaacccttgccgactacaacatccaaaaggaatccac

SEQ ID NO: 18963 - DNA, 256 bp, Glycine max
  Clone ID: 700957776H1
cttggttttaattggtataggcttgccaaggtcttgttgattgagcgttaagtgctttaactaatcaatcccaagaccttggtttaccttgccacacaaaaaaatatataaaaaggcaaaataataataaaaaaaagagaaggcttggagccaagaaaataaacacaaagcagcagtcatggaaagaataatggttggaagtgcaacaaaggttgctttcaacctcttggtcactttcgccattgtcattccatgc

SEQ ID NO: 18964 - DNA, 251 bp, Glycine max
  Clone ID: 700957777H1
gctttttgaagttgaaactgataaaaatcacgcatctaatctcgaggtactgatacaaaaactcctggagtgaaaaatgggaaagtttcaagtaaagaggcaaagtctaaggctctaaatgcatctcttgggaaaagcaaatctgatatgacgtcaagaagcaaagcatcccctggaagcaaaactagagttacaaagagcaaatctgagaaggaagaggaaaatagaaagaataaggaggaactgatgat

SEQ ID NO: 18965 - DNA, 256 bp, Glycine max
  Clone ID: 700957778H1
gttgaaatgaaaatgggttcttctttgtggactttgtgtctaattttggcttcactagcctcttctgcattctgtgcctttccacggaggccagtggacgttccattcggcagaaactacgttcccacttgggcttttgatcacatcaaatacttcaatggaggttctgagattcaacttcatcttgacaagtacactggtactggcttccagtccaaagggtcatacttgtttggtcacttcagcatgaacataa

SEQ ID NO: 18966 - DNA, 258 bp, Glycine max
  Clone ID: 700957779H1
ctgtggcacaggcaaactagaggttgcagtgttatgcaacccttaggatgccacttgttccaatgcttcggaatatgtcttttgggatagttatcatccaacagaaggagtttacagaaagctcgtaaattatgttcttgaaaagtacatagatcgattgttttgagctcgattaagtttgcctacgggaagtaatatcaattattagttatgttgatgtcaacgaagacaatgagtattttgatttgtcgagttttg

SEQ ID NO: 18967 - DNA, 269 bp, Glycine max
  Clone ID: 700957780H1
gtatggttctgcggctttgcttgtcaacttcactgccattatcacaatcttatttggagcctttgttgtgttatctgctctagctgatgctcccccagcccctgcagcagatgactatgaagccatatagacacttgtaagtttgtatcatatttttattttatggaataatctcatgtctgctataaaagtttgtattgggagttggaggaaggaaataatttgttgtttgtattctcggatctaaagcttgtatttaatcatcaatt

SEQ ID NO: 18968 - DNA, 261 bp, Glycine max
  Clone ID: 700957781H1
gtgggatgcagaaggaacaatgcatcttgtaaatcaaaccttgaatgcatctactgtaaattcaaatgaccagagcttaggggaaaggggttacgttgtgatgcgagcagcggctagaaaaaatactgctcaggaaggagatctctctgtgaatgtggatatggcttcaggcattggtcttgatcctgtagcaaaaatgcctcccagaacgggcaaatcaaagacaaaaattatagtccagagattgatacgcacactgcg

SEQ ID NO: 18969 - DNA, 164 bp, Glycine max
  Clone ID: 700957752H1
caaatatcttcataagaagacctctgtccaagattttgtcaaacagtatgaagcaatcttgcaagacaggtatgaagaggaagcaaaagcagattctgatacatggaataaagtggcaaccttaaaaactccttctcctttggagaagagtgttgcagggattt

SEQ ID NO: 18970 - DNA, 263 bp, Glycine max
  Clone ID: 700957712H1
caaccagcttgcagaagcagatgagtttgaggacaaaatgaaggaattggaaagcatctgcaatccaatcattgccaagatgtaccaaggtggtgctggtccagacgtgggtggtgctggtgcagcagaggatgagtatgctgctcctccttctggtggaagtggtgctggccccaagattgaggaagtggactaaatgtagttgctttcctccagatacctgttttaaaaacttattttactttatgcttttttaattggat

SEQ ID NO: 18971 - DNA, 264 bp, Glycine max
  Clone ID: 700957715H1
ggactgtggttgagaagtatctgttgtgatggacatggcaatgtggtcagttcagttgcctttggtggttgtcttccattggatctcttaatttgtactttttattcacgtgcatttaccaagaattggaagagattttcccgaatgcattacaggtgaaccttagctatggaattttggctgtaactttttgttcgtaaacacaaaaggaacaatagtttaggttaatgtttgtttttcctcacttttaatgaggcattctac

SEQ ID NO: 18972 - DNA, 265 bp, Glycine max
  Clone ID: 700957716H1
agagaacttcaactgagggtgagagtgacacaaatctagggagcactactctaaaagttctattagattcttcaaaacatgaccatgcatcgcgagtcttgggcttttgtcttcggcgttatgggcaacatcatctcctttggagtgttccttgctccattgccaaccttttaccaaatctacaagaagaaatccactgaagggttccagtcacttccttatgttgttgcactgttcagtgcaatgctttggatttactatgctt

SEQ ID NO: 18973 - DNA, 271 bp, Glycine max
  Clone ID: 700957719H1
gagagtggtttcagtgagtgatcggtgttcacttgatccttcataagtcgtcatcatcatcatcatcatcaccgttgattgaagaagatgccgatcagaaacatcgccatcggaaggcctgaagaggctactcaccccgacacgttgaaggcggggttggctgagttcatctccaccttgatcttcgtgttcgccggttcaggttccggcatcgcctacaacaagctcaccgacaacggcgccgccactcccgccggcctcatctccgctt

SEQ ID NO: 18974 - DNA, 267 bp, Glycine max
  Clone ID: 700957720H1
ctcgagcccaagaaaaaaaatgaacaaacaaattggggtttgaaaagaagccggtgctgactccttgttctccatcgtaagatataactaattatttttatatcttcatcaagatgcgccgagggagaaccgccgccgccgctgccgccgttgtggatcccacgccggaccaggccaaggagacgacgcggttccgtggcgtgaggaagcggccgtgggggcgattcgcggcggagattcgagatccgtggaagaagcagcgctttg

SEQ ID NO: 18975 - DNA, 252 bp, Glycine max
  Clone ID: 700957723H1
cgagttaactgataaacttgaaaaaaatgagaaaagtcttgaagaaacggagcggtcattatttgatcttgaggagagacacacacaaggcaaatgcaactattatggcgaaggaatttctaatatcgaatctactgaaatctgaaaaagcacttgtggagcatgcaattgagctacgagctgatctatagaatgctgcatctgatgtgtcaaacctgttttctaaaattgagcggaaggataagattgaag

SEQ ID NO: 18976 - DNA, 265 bp, Glycine max
  Clone ID: 700957726H1
atacacacactctgcacaccacattcccagtaacatcgtcaacaacacaacaaacacaaaccctctctctctctctctctctctcccgctctgtttctctccacaggagcagagaattcatcgcttcatcatcctcaccattctcctttccctggcactctcagatggaggttccattggagttaactacggtcgtatagcgaacaacctcccctccgcggtgaaggtcgttcaactcctcaaatcccaaggactgacacgtgtc

SEQ ID NO: 18977 - DNA, 262 bp, Glycine max
  Clone ID: 700957728H1
atttggaacaaacaacaatacatgggttgtggtgctctgtgtgctgcaatttccttttgagcttgtgtttgattcatcaaatcatcaaagatgactgtaggggcaggaatatctgttgcagatgggaacttgatggtgttggggaacaaagtgctgagccatgtccatgacaaggttcttgttacccctgcatgtggtggtgctttgctcaatggggcattcattggggttcaatcccatcacaagggtagccgcacagtct

SEQ ID NO: 18978 - DNA, 110 bp, Glycine max
  Clone ID: 700957729H1
cgtgaaactcactcttcaatcatcgattttttggtttctgggtttgtgttttcctgtgatttagggtctgattctgatcgatacccgcgccatggccatgttcgattcca

SEQ ID NO: 18979 - DNA, 262 bp, Glycine max
  Clone ID: 700957730H1
tggggaaagcatatcagggttgttctagatgttggctgtggtgttgctagctttggtggctatctgctggacaaaaatgttattactatgtcatttgccccaaaagatgaacatgaagctcagatacaatttgctttggaaagaggaattcctgcaacactttctgtcattggaacacaaaagttgacttttcctgataatgggtttgatttgatccattgtgcacgatgcagggttcactgggatgcagatggtgggaagc

SEQ ID NO: 18980 - DNA, 88 bp, Glycine max
  Clone ID: 700957731H1
cacactcacactcctcccaaaaacccaaagccctaactctcgttcgcacactttctcacgacacgctgcagccctgagttgctccatc

SEQ ID NO: 18981 - DNA, 266 bp, Glycine max
  Clone ID: 700957732H1
ctccatcttcgcctcgcataaccttcgcgtcttcggtcccggcttgaatcccttcgcaccttattgcatcgccaatcactcccttttcctttccctttcctctcgctaaattacaattccctttctttttcctctccaacttctccttctccgtttctacgaacatgtaaattcggaggacaccgtctttaattcggtctatttttttgggggttactttacttcggttacgcgtcgtcgttttgcttttctttgtcgtcgttttt

SEQ ID NO: 18982 - DNA, 171 bp, Glycine max
  Clone ID: 700957733H1
tgggggttgggtttcaagatccaaacctcttcccaatgaagaacctctctttcttcctcatcaccaccctatccgccgccttctccgccgtcagatctgatccctcagatcaccgctacaaagaaggcgactccgtccctctctacgccaacaaagttggccccttccaca

SEQ ID NO: 18983 - DNA, 156 bp, Glycine max
  Clone ID: 700957734H1
cgacaggcgaaagacatggggaggatgtttggggtgcatttttctggtgtaattcacagaaaggtgggatgcgcattgtacctgcatctcgcattcctgacagtagtggggcagcctctcatccagatggacctcaagtgattgggttgaccagtc

SEQ ID NO: 18984 - DNA, 187 bp, Glycine max
  Clone ID: 700957735H1
cgacctaacacgagaggagtagagagaagagaggaagttttgggcgttgaatctatagaatagaatcagaccaaattgaaagaagatcgatcgatcgatcgatggctctggtcggagttgagatgaaacatgcggcggagggcgcacgggggaagaattgctccgccaggcccaccaggcagggcga

SEQ ID NO: 18985 - DNA, 266 bp, Glycine max
  Clone ID: 700957737H1
cttcgttccttcgattcattccatttcttccaaaatggccaaagacccagttcgcgttctcgtcactggagccgcagggcaaattggatatgctcttgtccctatgattgctaggggagtgatgctgggtcctgaccagcccgtgatcctccacatgcttgacattcctccagcagcagagtacttgaatggggttaaaatggaattggtggatgctgcattccctcttcttaaaggtgttgttgctacaaccgatgtggttgagg

SEQ ID NO: 18986 - DNA, 265 bp, Glycine max
  Clone ID: 700957738H1
cactcataacacaaagcacaaagcaaagctcatccttgagttaaaaaatggcagcagcttcttccatggctctctcatccccatccttggctggcaagcccgtgaagctgggcccatcagccccagaagtgggaagggtgagcatgaggaagaccgtcaccaagcaggtctcctcaggaagcccatggtacggcccagaccgagtcaagtacttgggcccattctctggcgagcccccgtcctacctaaccggtgagttcccagg

SEQ ID NO: 18987 - DNA, 264 bp, Glycine max
  Clone ID: 700957740H1
agaacactaccctgaacatagtaaagaagccagtgctaggatttgttagtgaagcaatggctcaaaccatgttgctcatgtctagtgtctctagcagttattccgtggatttgaagaaagaccttttcctccaattgcagagtcaaagtttaaggcctaagttctctcagctctcattcaacccacttccatcatcaacttcttccttttcttcaccccgtacattcacaactctggccctcttcagatctaagaccaaagccg

SEQ ID NO: 18988 - DNA, 264 bp, Glycine max
  Clone ID: 700957741H1
gcactacgcagcatagctgttatcttcttccccttcccctctcgtggcaaacgcgccgcaaatgacagaacgagcaactccaaggatccatcgacacagataaaagagtattccctcgctccctccacagttctagggttcacttttgaacacacgttgccaaaccccggttcatccaaatccaaagtcataagaacaagaagatgggtgtgggcatatcatttctgatagcactaaaagcaacaatcctcttcttatgcttcg

SEQ ID NO: 18989 - DNA, 261 bp, Glycine max
  Clone ID: 700957744H1
agctaattaacagaacaaattaggtaataaattacttatcatagaaacatggcagccctcaaacaagtttcatccctcttgctattccctttgtttctcatttttgccctattcaaatcctctcatgctggtgggattgcagtctatctggggtcaaaacggcaatgaaggctccttggaagaagcttgcaacactgacaactaccaatatgtgaacataggtttcttgaacgtttttggcaacaaccaaatcccacaact

SEQ ID NO: 18990 - DNA, 260 bp, Glycine max
  Clone ID: 700957745H1
caggaggagagatatgaggatagcgtttagtgtcagtgcaaaagagaccgtgacatttaaatttcgactgaatagatattttagtccgtgatatttaaatttctcattcactttattattttcgcttctcttttcatttttatcaccctgccacacattcacatttccacttcctatgtacaattttatataattatatcctatcatgtcagtttctccttgaattattaattatttaatatgaccaaaataattattca

SEQ ID NO: 18991 - DNA, 260 bp, Glycine max
  Clone ID: 700957746H1
gccggcgccgctggttgacccgacggagtttacgtcatggtcgttttacagagcagggatagcagagtttgtggccacttttctgtttctctacatcaccgtcttaaccgttatgggagtcgccggggctaagtctaagtgtagtaccgttgggattcaaggaatcgcttgggccttcggtggcatgatcttcgccctcgtttactgcaccgctggcatctcagggggactcataaacccggcggtgacatttgggctgt

SEQ ID NO: 18992 - DNA, 261 bp, Glycine max
  Clone ID: 700957747H1
ctctgtcccaattccctataattcacttctctctctctctcgcttaacctctcctccacggtggctcttccgcattctgccaccgcctccgccgtcgccgataatcactaatcaatagatggatgattcggcgttcaaacgagacggtcactttaactgaacttactcctgctcttctcagagagatgtccgttacagctgtggcacttgtggttatgagctgaacctgtcctcctcgaaccggaacactgcatccattgg

SEQ ID NO: 18993 - DNA, 71 bp, Glycine max
  Clone ID: 700957748H1
cttttaactctcagatcaagtcctcccgctatagactggatccacctgtaggtaggtccaaaacacctaaa

SEQ ID NO: 18994 - DNA, 267 bp, Glycine max
  Clone ID: 700957749H1
gaaacggtggcaagggacttggagaggaaagcagcagccgtgggatgcatctgtgagttgactgtactgtgcaatttttcttgaaattggagattagaatataacctataaaaggcttggctgcaagttatgccatgtacttttgtttcaggatcatcttcacaccctctggcctcgtgcttagtggggtcaattatgttactgaatgatgtaaacgtcccttatatgttcatatgatcaagaaatacttcattcagcgttctagaa

SEQ ID NO: 18995 - DNA, 263 bp, Glycine max
  Clone ID: 700957751H1
gagggttctgtgaaaggaggagaaggtgctatatacctgtgggcaaagctcccagacttagacgctcacgatgattttgatgttgttcgctggctagctaacaagcatggggttgcagtaatcccaggaaaagcatgtggttgtcccagcaatcttagaatttcatttggaggcttgacggagaatgactgcagagctgccgcagaaagactgaagaaaggcttagaagaattggttagagacggactgcgggagtaactgaa

SEQ ID NO: 18996 - DNA, 268 bp, Glycine max
  Clone ID: 700957711H1
cttctcttcgtcgtctattgcatatcttataattttcccaaactcccctttcttactatacttttctttcctcgtacaacccaccacattcaccaaatccttcaatattaacatattcacctccaacttctatacttgtagtttttatttcatttccctttcactctttttgcttatttgtttccagagagaggaacattaatatatacaaactaaacatggtgttggcttccccaaactcaataaggcgcgaagggattctacccag

SEQ ID NO: 18997 - DNA, 232 bp, Glycine max
  Clone ID: 700957646H1
cagaagcagcaaaagcagctgagaaaaatgctcttgaccatattacagttttaactgaaaggactactgctgcacgtgcatcaacatctgaatctggtgctgtgattacgatctcaaaggaggagtttgactcactaagccataaagttgaggagtcagataaattagcagatatgtaagtggctgctgccaaggcacaggttgaagctgtgacggctagtgcaaatgaggc

SEQ ID NO: 18998 - DNA, 243 bp, Glycine max
  Clone ID: 700957647H1
caaattctttgagttgaacacaggggccaagattccttctcttgggttagggacttggcaagctgaacctggtgttgtagctgaagctctcaccacagccattcaggttggatacaggcatattgactgtgctagtgcgtataagaatcaagcagagattggttctgctcttaagaagctttttgatgatggtgtggtgaagcgtgaggaacttatggatcacgtccacactctggtgttcag

SEQ ID NO: 18999 - DNA, 124 bp, Glycine max
  Clone ID: 700957648H1
ataaaatgtcaaagacaagtttccttgacttccaatacaacctctcaaggagaaaatacctgaggaagccatcgcgcctgttctcccgggacaggcagaactctgggcttaagggtgtgtttct

SEQ ID NO: 19000 - DNA, 207 bp, Glycine max
  Clone ID: 700957649H1
caatgtcattaatggtggatcacatgctggaaacaaacttgctatgcaggagtttatggttcttcccgtgggagcttcctctttcaaggaagccatgaagatgggtgtagaagtatatcacaatttgaagtctgtgattaagaagaaatatggtcaagatgcagtaaatgttggtgacgaaggtggctttgcccctaacatccagga

SEQ ID NO: 19001 - DNA, 151 bp, Glycine max
  Clone ID: 700957651H1
ctcctctctctctaaattcaattatgtcgtttaagaaaacgctagcccagcggcttctcaacatcacaaaaatctccaattaccgcatttcctcctccgtagtccgttccccgaacccgacaaaacctgacattgctccggatcccggaga

SEQ ID NO: 19002 - DNA, 135 bp, Glycine max
  Clone ID: 700957656H1
cgcggttttagttgtgatcaataagtcgatagttagaacaatagtcttggtataaggaccttgccaataattttttagttctgattcacagagctaagacagttccgtcttagactttaaaagttttgatattta

SEQ ID NO: 19003 - DNA, 236 bp, Glycine max
  Clone ID: 700957660H1
cagttagtacaaaaaagggttacttcagcttccacatatcttgaagaagtgatcaatgggcaagtctgtagttgagaagctactttggatggcaattgtgtgcttggtgctgggtgtaatttccattactcccaaggcccaagcagcagtgacatgcaaccaggtggtgagcaacctcaccccatgcatttcttatgtgctcaatggtggcaaaaccgtgcctggcccttgctgca

SEQ ID NO: 19004 - DNA, 118 bp, Glycine max
  Clone ID: 700957663H1
ctttgcaacacaacaaaaaagggcaacacagagagaagcgtcttaataaacgctcttctctgaaaaacctgatttcttctcttcttctcttctctttcgtttcgatcttcgatctctg

SEQ ID NO: 19005 - DNA, 262 bp, Glycine max
  Clone ID: 700957665H1
ggatggcttcggtgtcaacacctacacccttatcaacaaggccggcaaagcactctatgtcaaatttcattggaagaccacctctggcgaaaagtctcttttggacgacgaggccatcagggttggaggatccaaccacagtcatgccacccaggacctttacgattcaattgctgctggaaactatcctgagtggaaactctacatccaaacattggatcccgaaaacgaagacaggcttgactttgacccccttgatgtt

SEQ ID NO: 19006 - DNA, 100 bp, Glycine max
  Clone ID: 700957667H1
ataatttcagatctcgtcgatcttgagcttcaacaatggcgaaaccaaggtactctcgtcttccacctcgcaagtcatcgtcgtcttccacgctgattct

SEQ ID NO: 19007 - DNA, 238 bp, Glycine max
  Clone ID: 700957671H1
caaaaaccgtacaacaaggttgtttttattttgttttgtgttttctctctaatcattcgactggccaaagaaggacctaactgggacgggttgctgaaatggagcattgctcactccgatgggactagccctactcgcaatttaagtgaggaggatcgaaaatggtttatggaagcgatgcaagcacagaccattgatgttgtaaaacgtatgaaagagatcacacttgtgatgcaaa

SEQ ID NO: 19008 - DNA, 235 bp, Glycine max
  Clone ID: 700957673H1
gatggttaggactctgtaggctgatgtagacaacactcataccgttggaaagaaggatgctgctggccatgttgcttaatttagttcttgcttcctttgtcttcttgagttttatcagagacgggagtgcagggatcactagctctttcattcggtcagagtggccggcagttgacatcccccttgatcatgaagcatttgcagttccaaagggttataatgcacctcaacaagt

SEQ ID NO: 19009 - DNA, 231 bp, Glycine max
  Clone ID: 700957674H1
gtgacacaaatctagggagcgctactctaaaagttctattagattcttcaaaacatggccatgcatcgcgagtcttgggcttttgtcttcggcgttatgggcaacatcatctcctttggagtgttccttgctccattgccaaccttttaccaaatctacaagaagaaatccactgaagggttccagtcacttccttatgttgttgcactgttcagtgcaatgctttggatt

SEQ ID NO: 19010 - DNA, 231 bp, Glycine max
  Clone ID: 700957678H1
tagacagcagatagagagtatgaacgaatcaaggaaaataataggagtgaacttgaaagaattgatcaagagaggaatagtgacttcctaagcatgctgcgagggtttgttgcaaatcaagcaggctatgcagagaagacagcaactgtgtgggagaagcttgcggaagaaacggctgcttacttgagagacagcagctaaaatgtacttggctgtaaattcttatttttg

SEQ ID NO: 19011 - DNA, 232 bp, Glycine max
  Clone ID: 700957680H1
taagaagaaagagaagagaataatatgaagagccatgtctcagaaagggttcagccttttgccaagtgcctccagagttgagatcacctcggaataaaacttggagaattattacaattttcaaggtgacaaaagtgcatgtcagatttttttatccttataaaatcgaagacaagtatggtaatttacaacagcctgctcaatcaagacctcctggtaaaggagatgtcat

SEQ ID NO: 19012 - DNA, 237 bp, Glycine max
  Clone ID: 700957683H1
ggtggagctgccacagctttaacgtacgatgaagccctgggacaacctttgagcctccctggtgctggggactttgatgtgaacggttttgtggagagtgtcactggctttgcagctgaaaaccctgcaattcttgctgggggagtagctgttttggcagtgccattggttttgtctcaggttcttttcaagaagcctaaggcttgcgggtgttgagtctgccaagaatgcttatgc

SEQ ID NO: 19013 - DNA, 237 bp, Glycine max
  Clone ID: 700957684H1
ctgaaaaactctgttgtcatgataatctgtctgcaacggttgaagaggagcaacgggaagatggctccgaaggcagcaacaactattctcctgaagatagatgtctaagtcaaaacacaagtagtgaggaaaactcacctgtgatttcttgcccagctagtcctcctaatgaggccaatgatcacaaagatgactcccagaacagtagtgttgggtctaatatatcgcttgatataa

SEQ ID NO: 19014 - DNA, 109 bp, Glycine max
  Clone ID: 700957687H1
gaaaaacaaaaccctcactgagcgctgctgctttgagagagagatggctccgaaccttgaatgtcgtatgtacgaagcgaagtacccggaggtggacatggcggtgatg

SEQ ID NO: 19015 - DNA, 227 bp, Glycine max
  Clone ID: 700957689H1
cctcattctacttaaaactcccaccagtgatggcaggtttggctccagagggaacacaattcgatggtcgccaatatgatgctaagatgagtgaattgctttccactgatgggcaagaagtcttcacctcttatgatgaagtgtatgacagctttgatgcaatgggattgcaagagaatcttctgcgaggcatatatgcttatggttttgagaggccttctgctata

SEQ ID NO: 19016 - DNA, 225 bp, Glycine max
  Clone ID: 700957690H1
accaactgcaacattgatatggaaagtttaatctctgaccagaacagaagcgttgctacccttgctattactacacttttgaaaacaggaaatgaatctagtgtggatcgtcttatgaagcagatcacaaatttcatgtctgatattgctgatgagttcaaaattgttgttgttgaagcaataagatcattgtgcctgaagtttcctttaaaatatcgatctctg

SEQ ID NO: 19017 - DNA, 62 bp, Glycine max
  Clone ID: 700957691H1
caaatgagtgtgaagaaagagacctgaaagtgctgttgagccggtgtgttgctcagacaaaa

SEQ ID NO: 19018 - DNA, 161 bp, Glycine max
  Clone ID: 700957694H1
caatgattgtgattagtggcaatatgagaagtatctggcctgtgctgctgttcagtttgtctaagaaaatagaatgtttaactgcaagatgtatgttgaagtctaagcttgtatggttcttgagaaggtggatttgttaatatttggggttagcaaattga

SEQ ID NO: 19019 - DNA, 227 bp, Glycine max
  Clone ID: 700957695H1
cacccagagacgaggaagggcgtagtaagcgacgaaatgcttcggggagttgaaaataagcgtagatccggggattcccgatataggtcaacctttcgaactgctgctgaatccacgggcaggcaagagacaacctggtgaactgaaacatcttagtagccagaggaaaagaaagcaaaagcgattcccgtagtagcggcgagcgaaatgggagcagcctaaaccgt

SEQ ID NO: 19020 - DNA, 141 bp, Glycine max
  Clone ID: 700957696H1
ttcattctcatctttcgctcttctctctccacccaaaccctaactcccgaccctgttcccctctcgtatccgtcatgaaaggaggaaagtccaagaccgaatctaagagagccgatcccaaacttgctgtgaataagaagg

SEQ ID NO: 19021 - DNA, 273 bp, Glycine max
  Clone ID: 700957701H1
cagatattgtgtttgtcgtttgcctttgtgcaagatttcagtcttatccaaaaatttctcatgttactgcagttaaaaggatcttaagatatcttgttggaactactaatcattgtctatggtttaagaaaaggtctgagtttgatcttttaggatattgtgatgtttattttgctggtgataaagtagaaaggaagagcactagtagaaatggatgacccgttgtggcgagtgtctctaaacttcaagtctttagctttgtagattgttgtg

SEQ ID NO: 19022 - DNA, 155 bp, Glycine max
  Clone ID: 700957645H1
tcttgtgttgtgtccctcttttaagctatttccttctcttaacacaattggttgtgccaattgccatagtcaccaaccaattaacaaaggtatatatatcatcatatcatcaccaaatgaaaagtattgggttgttttttcttgtggtggtggct

SEQ ID NO: 19023 - DNA, 132 bp, Glycine max
  Clone ID: 700957704H1
ttgaattagagttagtatttgaatatgcacatgttcttttgcaaggttttataaacctctacttcttacttcgttttttatttcctctctttttttaattttttatttgggtcttttcgatcactttgattg

SEQ ID NO: 19024 - DNA, 271 bp, Glycine max
  Clone ID: 700957705H1
cagtaccttgccgtttattatcacacaagacagcattacccttctattgttatcatcgacattcttaactcttaagaactgattcaccaacgacccctctgaatttcagaaactatcaatgaagggggaagtgcagcttcagcctccagcggttatgcaaaaccctagtgattcggaccctttgctccataaccaggaggaggaggaggaggatgagtcaccgggaagctctggtgagatcaagaatgaggaagaagacgttgaggctgga

SEQ ID NO: 19025 - DNA, 265 bp, Glycine max
  Clone ID: 700957706H1
gcacttagtgctattcaataattacgaaaaaccaacagcgagtgttgtttttgtttggtccaggctggaccagggaatgaatagagatgagaggctttcggttgaagagaactgagttaagcggcgaagcaaacgcagaatcggcggcagaaattgccaccggaagcacgtcgaagacgggtgaaccaaacacaaaattccatccaccacttctctcttcaatccccaactcaaatctgtgaagaaaatctcaatttctaaattg

SEQ ID NO: 19026 - DNA, 266 bp, Glycine max
  Clone ID: 700957708H1
tgatctttctgacggtgaaagtgatggggctggccaccatttctcacatgctcaatcaatggatcgagagtgatgaggacctgttactttgtacaatgagcagaggaggcattatgatagcataattctggaaagggtgtatttctcttgtattatcacataaagattattaccctctctaacagtttatagctgtaggcatggttcttgtggattaggcattatgtaggatggcaaatattgtagtttggtaataattatttatt

SEQ ID NO: 19027 - DNA, 221 bp, Glycine max
  unsure (1)..(221): unsure at all n locations
  Clone ID: 700957709H1
gtagagtggacaccctcattgacaaggcccttgagnaaattggcaccccagtggcccttaatctacgcgggaaggcagcggtagcccaagcagcattggcttaccagctctaccaaaggaaattttctggtccaaggtgggaagctctagttaaaaagggggccaagaagcaaaggctcctctgggcctcaaccagtgtaaagaatcctgcctattctgac

SEQ ID NO: 19028 - DNA, 267 bp, Glycine max
  Clone ID: 700957601H1
ttaaaatataagagatagaattaactcgactgcaagtgcaacaagaacacaggatagaaaatttgaatggagagtggtgaagactattccctgtttgagactaggaaagacaaaggaaggcacattcgaaggatctatgcaatctctttgtttgtggccatatgcttcatctgggcttacagattgagccacatacccgcatatggcaaatgggcttggcttggtttgtttgctgcagaactctggtccggtttctattggctcttt

SEQ ID NO: 19029 - DNA, 259 bp, Glycine max
  Clone ID: 700957603H1
gagttctcagtgcatggtagtgatgaagagattgacgatcaaccagaggtgggcagtgatgaggatttcagtgatgatggcgacaaacatgcccttgaagaggtagacttgtgttttcatgttttataactgatttacctatctgaatatgtaatgaaattccccctaaagaagaatttcaagtcttttgggttgcgtttggtgttgcccatgctagcaacggcaatgaatctgcaatgagtgtgtttggactggtgtt

SEQ ID NO: 19030 - DNA, 268 bp, Glycine max
  Clone ID: 700957604H1
tcgaggaagcatggaccaaactgctactaccgaaacagggcagagtgatcttttgtctattatacgtccaatgcttgtttatacaggcttgattgaacagttacaacgtttcttcaaggtcaagaaatcaactagtgcaacaccacctgcaaggactgaaggggcttcatctactatagaaggggaagatgaaagtggaaatctggaaggctgggaagtggtaatgaaagagcgactcttgaatgtaaaagaactgctcgagttcccc

SEQ ID NO: 19031 - DNA, 266 bp, Glycine max
  Clone ID: 700957605H1
ctcgagcctgcttgggcgagtgaagaggtgaaagcttgagagcatataaagcttgaggcctgatttctgcgtttctcggagaatttgtcttcaaaaaagaagggcaaccagtggatttatgtcgtctgggtttattctggcagtgattggggctccgttgaagctcttcattgtatatgctttcgtttctttcttcttgactctctttgtttgctactgttgctgtatgctacactgcattctgagccacaatactgtgaacctac

SEQ ID NO: 19032 - DNA, 179 bp, Glycine max
  Clone ID: 700957606H1
gctcgagcttctcaatgctacagcaaaggcatttattgcacactttcagcttgaaactcgctgatcatacttgcaagcaagcccccatccaatagcaatgccacctcaaatcaaccttttagcatctccaagtccttcactatttattttatttatgttctctttgctttgattgcctt

SEQ ID NO: 19033 - DNA, 259 bp, Glycine max
  Clone ID: 700957607H1
ttgattcagaatggcaggatagaacaaccagcgatccaattcgcgaatgcttcctcttcttcttcctcctcgctttctctctcctccttttcctcttctctctctctcctctccgcaccccttcttctccttcccccacccatttccacgttcccattgccgaaacctcgttcgtggcctccctcgaccacttcctcgcccacgctcaaacgtccctcaaagaccacacagcgcgcgacgtcacgaagctcgacgacgc

SEQ ID NO: 19034 - DNA, 143 bp, Glycine max
  Clone ID: 700957608H1
cggctcgagtttcccttttcagctttcattggtgtggcctagctgttttctcaatgagaaagccttcatctctgcgaagcgcacttttgcgtttggggttcccttgttgcttgttatcaccttctgttatgctacttctactg

SEQ ID NO: 19035 - DNA, 230 bp, Glycine max
  Clone ID: 700957610H1
gggggttactgtctgttcaagctaccatctctctctctctttcttagtgcctccttgccagaagttaaaatggcccaagaaactttcctattcacatctgaatcagtgaacgaggggcaccctgacaagctctgtgaccagatctccgatgctgtgctcgatgcatgcttggagcaggaccctgacagcaaggttgcctgtgaaacctgcaccaagaccaacatggtgat

SEQ ID NO: 19036 - DNA, 256 bp, Glycine max
  Clone ID: 700957611H1
tcgaggaagaattaaaaggaattgaagaagatccaagataggttcatatggagaggtataccatgctgactggaatggcacggaggttgctgtgaagaaatttttggatcaggatttttcaggcgctgcattatcagaattcaaaagagaagtgcggataatgcgtaggctacgtcatccgaatattgttctttttatgggtgctgttactcgtcctcccaatctgtcaatcatttcagagtatctaccaagagga

SEQ ID NO: 19037 - DNA, 102 bp, Glycine max
  Clone ID: 700957612H1
tcgagacgttttcaaatttgaagtcaaacacgttcaactgtcgtctttgtaattcattcccatatcgtcaaaggtggggaaatttgcttccacacaacatac

SEQ ID NO: 19038 - DNA, 265 bp, Glycine max
  Clone ID: 700957615H1
aattcggctcgaagttgattaaggcaaagggtgtgatgagattaattttgagaagaaaccagcaatcggcgattaggagtgagagtgatatggagggaattgcaggaaatagcagcagatacagtctgaaaccctcgcgaatttgcaacgaagatattctgatctgcgtcgacgtcgatcctcagtgcctcgtcgaaatgcaaggtgccaccggtcccaatggcagacccctcacccgtgtggactccatcaaacaagccatcgt

SEQ ID NO: 19039 - DNA, 261 bp, Glycine max
  Clone ID: 700957616H1
cggtccgaattcggctcgtgatcctatcatcatggtggccaactgggaatgcagaatagaggcctcaaattggtctacctaaagatcaaagccctccaccttacacgagaccagatgacctcaagacggcatggaaggttggtgttctcactgcggtcatcaagcatatgtcccctgatattgccaaaattcgcaagcttgtgaggcagtctacgtgtcttcaagacaaaatgactgcaaaggctagtgctacctggcttg

SEQ ID NO: 19040 - DNA, 183 bp, Glycine max
  Clone ID: 700957617H1
gcaagaatggcacttcgttgcttggtgatgtccctttctgttctcttcactcttggtcttgcgagagaaagccatgccagagacgaagatttttggcatgctgtttggccaaacactcccattccaagttcattgcgagatcttctaaagcctggccctgcaagtgttgcaatcgatgatcac

SEQ ID NO: 19041 - DNA, 201 bp, Glycine max
  Clone ID: 700957620H1
gaatttatgggttttgactctgcgagaaatattgcttggatctcgtcattattctacgccagttgatgtttggtcagtgggatgtatatttgcagagatggtaaaccgacgacctctattccctggggactctgagattgatgaattatttaaaatattcagaatcttgggtaccccaaatgaagacacatggcctggtgt

SEQ ID NO: 19042 - DNA, 207 bp, Glycine max
  Clone ID: 700957621H1
gctcgagcttaagcagcttcagagtctgagaagtgagaagcggaagaagaagcgatgcgtttttgcccgtgttttggatccgaggaggccaagggggtggcggatcgcgacccggtcctgctggtttcgggcatgggcggctccattgtcaattccaagcccaagaaattcgggttcaccactcgggtttgggtcagactcctcctc

SEQ ID NO: 19043 - DNA, 254 bp, Glycine max
  Clone ID: 700957622H1
gtttgtgagaaaatggaagctgcgatgggactgatgcggaggattcctccgaaacacacagaaacagctctgtcagcgcttctgagccttatgcctgacaactcctccgatctcctctctcaagtcgatcagcccctccaggttctgtgcgatgtggaatgcggcaaggagttcattttgtgcgaatacaatcgagatgccgactcttacagatcaccttggtccaataaataccatccaccattagaagatgg

SEQ ID NO: 19044 - DNA, 251 bp, Glycine max
  Clone ID: 700957623H1
tcattttccattcgtagacgccaagaaccctaacaggagaatgcagtggacctggataatttgtgaggatatttaacatcgtgtacattgtgctcctttaattattttcatcagttggtgttgtgatggatggtgataatggtcttaacatacgtaattggggttactatgaacccgctacgtcgtttaagagccacctggggctgcagctgatgtcatccttgccggaaaaacctttaattggagggcgc

SEQ ID NO: 19045 - DNA, 196 bp, Glycine max
  Clone ID: 700957625H1
atacagcataatacttaataccatcggcaacagcggaaaaaggcagaaaccgaaatgcaatgttcttccatcttttatcctcagacacataaaatatggtgctttaagccaagtctttcagtaacgccaccgccacaacaacaacaacaacaacgaacctctcacgaagaaaaaccgaagccgataaccagtgttt

SEQ ID NO: 19046 - DNA, 248 bp, Glycine max
  Clone ID: 700957626H1
ccctaacacaacaccggcaatgcagacgctacttctgccggcaacacgcgccggcagcttcacggcagttcctctgtcagcctccgccgtcgcctcccctccactccctcaaccatttctcagcccgaattccttcccctcactccttctcaatcgggctcgttcatcttcctcttttagttcctccatcgctcgtcaaccatggaagaagcttcccttcaccgcaagcgcttcttcgcaagtgtctc

SEQ ID NO: 19047 - DNA, 140 bp, Glycine max
  Clone ID: 700957627H1
acattggtgagaagaaattgaagagagagagagagagagagagagagagagagagggttggattggttttcttcttccttttctctaaagggaatctaatctcaatcctcattacagatttcttcattcctctctcagtc

SEQ ID NO: 19048 - DNA, 247 bp, Glycine max
  Clone ID: 700957628H1
acggacgtgacgacatggagcccggcggggaggctgttccaggtggagtacgcgatggtggcggtgaagcagggctcggctgcgatagggctccgatccaagacccacgtggtcctcgcatgcgtcaacaaggctaactccgaactttcatcgcaccagaagaagatcttcaaggtcgacaaccacatcggcgtcgccatcgccggcctcaccgccgacggccgcgtcctctcccgctacatgcgat

SEQ ID NO: 19049 - DNA, 173 bp, Glycine max
  Clone ID: 700957630H1
attcggctcgaggaaagtgcttgtgttgtttgttgctacagttttggtagcatatgaatgccatggctcagactaccagaagttccctctccaaatgaaaactgggtttggtgggcaatacagcaatgaggtggcatgtgccagttggaggcttggcgtggaagcaaacaacg

SEQ ID NO: 19050 - DNA, 245 bp, Glycine max
  Clone ID: 700957631H1
gttctttggaagctgtactgttatgtgttcctgttgattatcaatgtgtggatctgtctttgtacaaggatagtcaaatcgtcctgttactaaacaaagctactaatacatctgaaagtgctggagatggttgtatgatgattctgcaagtaagtgatctaccatatgtctctatgtcaagatctgcttgtatagatgtttggaggttaccagaactaaaggattctgtcgcttacctgaatatt

SEQ ID NO: 19051 - DNA, 96 bp, Glycine max
  Clone ID: 700957632H1
aaaatggctaggggactaaagaagcatttgaaaaggctcaatgctcctaagcattggatgcttgacaaactgggtggtgcatttgcgcctaaaccc

SEQ ID NO: 19052 - DNA, 163 bp, Glycine max
  Clone ID: 700957637H1
gtatagtgcgggagacagtagcaaatagaaccaagccaacaatgggtaccgacaagccaaaccgggtcgggtcgtttatatacatcactgatccgattcgtgttttcctctccggcgcgtcgaaagacgcgactctctccgacgagcttcgacgaacatcctc

SEQ ID NO: 19053 - DNA, 132 bp, Glycine max
  Clone ID: 700957595H1
atttctctctctctctctctctctaacacggagtgatggctgtgcagctgtgggaaaccctgaaggaagccatcgtagcctacactggcttctctccttccaccttcttcacggtgctggcgcttctttttg

SEQ ID NO: 19054 - DNA, 130 bp, Glycine max
  Clone ID: 700957638H1
aaagaatcaagcgtttcgtgaattggattctctgcaaatcaggatctgctgcttcagggcttcactgtttgtcttgtagcttcttctggaggtttctatggagagtagtggcaagatggaagactatgaa

SEQ ID NO: 19055 - DNA, 247 bp, Glycine max
  Clone ID: 700957639H1
cttagaaatcttgatgaggccaaggttgcttttccttgatgaaccaaccagtggacttgacagtgcttcagctttctttgtgacgcagacactacgtgccttggcaagggatggaagaaccgtgatagcctctattcatcagccaagcagtgaagtgtttgagctatttgaccaattatacttgctctctagtggcaaaactgtttattttgggcaagcttccgaggcatatgagttctttgcacaa

SEQ ID NO: 19056 - DNA, 239 bp, Glycine max
  Clone ID: 700957643H1
ggaaagggtgtgagaagagaatggagagtaaagaggaagatgttaacgttggagcaaacaagttctcagaaaggcaaccaattggtacagcagctcagggtggtggtgacaaggactacaaggaggcacccccagctcctttgtttgaacctggtgagctcaaatcatggtccttctacagagctggaattgctgagtttgtggcaactttcttgttcctctacattaccatcttaact

SEQ ID NO: 19057 - DNA, 124 bp, Glycine max
  Clone ID: 700957644H1
caaaacaaataaagctatgtatagcttgcaggaaaggcctcctgggtctcttttgtggtttctattattagcaattaattgcgcacacaaatgtgggtcatgtgacgggatggattctagctat

SEQ ID NO: 19058 - DNA, 145 bp, Glycine max
  Clone ID: 700957545H1
atggctcctaagggtttaacctttctggctgtgttaatatgcgtttcagcactgtcactgagtgcttctgttgcgggggaagggcaaaataatggccttgttatgaacttctacaagggatcatgccctcaggctgtagacatca

SEQ ID NO: 19059 - DNA, 117 bp, Glycine max
  Clone ID: 700957547H1
tctctccatcactcactcactattatagtactcttcctccaaacaattaaggttataataatcttcttccaaaaccccccccaaaaaaagagaagaaaaaatcatgcaaagcaggga

SEQ ID NO: 19060 - DNA, 172 bp, Glycine max
  Clone ID: 700957548H1
attcggctcgagattagcgactatggtcttccagtgttacattgaaggtccagatgagtacttatcacgctcaagttctacaaatagggttgctcctaaattagatgtatcacaatatacatcttgcagtaatgatgttgtgaagattctgctgcagtgtacatcaccgttg

SEQ ID NO: 19061 - DNA, 125 bp, Glycine max
  Clone ID: 700957549H1
attccccttagctttctctcttctctctccccgcccaaaccctaactccctaccctattccgctttctctcatccatcatgaaaggaggaaagtccaagaccgaatctaagagagccgatgccaa

SEQ ID NO: 19062 - DNA, 245 bp, Glycine max
  Clone ID: 700957550H1
attttatctattctctctctttcttttgtgttctaagcagctagaagcaatggagaggaaaagaagccatgcctctttcaccatgtttgcaatgcttgttggagtgatctctcagagccttgtcagacctgtagtatccaccactgttgaagatcagaagaactactacaccccagatccacatgctggaagtcccccctcagggtcacacagtagtactcctccatctcatggccatggaagct

SEQ ID NO: 19063 - DNA, 144 bp, Glycine max
  Clone ID: 700957552H1
gtgggaacattatggagcccagattcgtaatctccgcatcggaggccgaatcccaatctatctccaaactcctcccttccctcgtttcctcttctcagtccctcgcccgtccttccatctccaactttcccgtcgccgccgtcg

SEQ ID NO: 19064 - DNA, 143 bp, Glycine max
  Clone ID: 700957554H1
catggccacctctgctattcagcaatcagcattcgcaggtcaaactgctctgaagcagctcaatgagttggtccgcaagaccggtggcgccggcaaaggtcgcaccaacatgcgccgtaccgtcaagagtgctcctcagagca

SEQ ID NO: 19065 - DNA, 148 bp, Glycine max
  Clone ID: 700957556H1
gagaatcacttggaaacaaccgcgctaaggttggaacttggaggaacttgtgtctgtgtgtccttttttccagagtcatggctatggctttgagtctctcccaattccctgttcgtgggtctgtttctttgcccaaaagaagactacc

SEQ ID NO: 19066 - DNA, 237 bp, Glycine max
  Clone ID: 700957557H1
cgcagagaagaacagagagagatccatccatcaattccaatggccgatcagctcaccgacgaacagatctccgagttcaaggaagccttcagcctcttcgacaaggacggggatggttgtattaccaccaaggaacttgggaccgtgatgcggtcacttggccagaacccaactgaggcagagctgcaggacatgataaatgaggttgatgctgatgggaatggtaccattgatttc

SEQ ID NO: 19067 - DNA, 97 bp, Glycine max
  Clone ID: 700957558H1
tgtttgtgtgtttcattgtcccatttatatgtccaatcccaaatattattgaaggtttgttgtttaacggtttgatcatcaatgcaagaagaggatt

SEQ ID NO: 19068 - DNA, 237 bp, Glycine max
  Clone ID: 700957559H1
cgacgagacatactcgctggggaagtcactaaccggcaagaacctcgtccagctggcttccaaaggcggacagaggaactccatcaacgttgttctgacatccgctgatgtggcggtcgaaggtttctgtatgagccgatgtgggacccacggctcttccgcttctcatctgaagaagaacagcaagagctacaagttcgcctacatctgggtgggaaactccgaaacccaatgccc

SEQ ID NO: 19069 - DNA, 237 bp, Glycine max
  Clone ID: 700957561H1
ggaggaggcggtggaggagatgatgaggattcacagatcccttcgagcccggccagggatagacgaagtcgaagtggctagaggtttgatcgggaatgttgagaaagaagaccaggcgatgctccaagccatagcgcggcagagcaagggcgttcatgtgccccaagagctcttcatggtgctccacgagatgcagaggaacttcctttggtcaccagagcaaggagcagataagag

SEQ ID NO: 19070 - DNA, 148 bp, Glycine max
  Clone ID: 700957563H1
cgcaactcaatttttctctcaaccggcccaatttagcataagcccagcatggccaccgcaacagcagcagccacctcgtccttcatggggacgcgcctcctggaggcccactccggggcggggcgggtgcaggcccggttcgggtttg

SEQ ID NO: 19071 - DNA, 235 bp, Glycine max
  Clone ID: 700957565H1
ccaaccccaagcatcatagaatctgaccaagagctccaagtctggtggaaacaaatcaaaacagtgggtcatggagacaaatctgaagaaccatggtggccaaatcttaacacatcaaaagatcttattgacatcataaccacaatagcttgggtagcatctggtcatcatgcagctgtgaacttttctcaatatgcttatggaggctatttccctaaccgacccacaattgcaa

SEQ ID NO: 19072 - DNA, 155 bp, Glycine max
  Clone ID: 700957567H1
cattggtgagactctcgaacagcgtgaagctggtccaacaacggctgttgtttctgagcaaacaaaagcaattgcagctaaaatatcaaattgggacaatgttgttttggcctacgcgccagtttgggccattggaacaggcaaggttgctactc

SEQ ID NO: 19073 - DNA, 102 bp, Glycine max
  Clone ID: 700957568H1
gctcttcttggatttcttctgggacttttcttaatggtcactcatgtctaggggtatggttttggaggttggaccaatgcacatgccaccttctatggaggt

SEQ ID NO: 19074 - DNA, 254 bp, Glycine max
  Clone ID: 700957570H1
caagcctcttaccggatcacctcgcacagaaacatcaatcattaatggaacttataggggatttatggaagttatactgcagaacaatgatactaagatgcatacttatcacatgagtggatatgcattttttgtagtcgggatggattttggtgattggtctgagaatagcaggggtacatataacaagtgggatggaatagctcgcactacagtacaggtctatcccggagcatggacagcaatttggtttc

SEQ ID NO: 19075 - DNA, 256 bp, Glycine max
  Clone ID: 700957571H1
attgaacttagccatcattccctgacatgaagcaaaatctggtttggtcatccatagatacctctgaaaaccaaattagactcttgcaccgcaataatggcaataaaatactagcataatttatttgtgagtctcaaaaccttagcacactatatatacactgcatagccttggggtcttcaaaatcatcaattcaatggcttccctcatgagcaccatcctcatgcaaaggtcttcttctacttcacttgctgct

SEQ ID NO: 19076 - DNA, 103 bp, Glycine max
  Clone ID: 700957572H1
gagggtcattactgttagactggcaacggtagatagtatttctgcgtatcttgagagtgttcaggatgaagtggccgctgtactcattgctaaaagaaccctg

SEQ ID NO: 19077 - DNA, 134 bp, Glycine max
  Clone ID: 700957573H1
ttcatctacttcaagaagatgaaataaactttcttaataatgcacaatcatatctttttgtgggacttatcttattcgcaagagggcaagtgtcataaattaaatgcaactatggtttgtacactctaaaagga

SEQ ID NO: 19078 - DNA, 229 bp, Glycine max
  Clone ID: 700957577H1
aatttgattagtcaagaacaacaacttgaaggaacatttaggttcatgcatgaaagactttgtactcatgctgaatctgttgctttctttgggggtggtgctcgagaaaaagctatggtcgagtctagattcagggagcttctcacccactccgagtaccttttaaaaaagaagtggctgtatggcatcctggatgattttatcacaaagcaacttccacataatgtga

SEQ ID NO: 19079 - DNA, 228 bp, Glycine max
  Clone ID: 700957578H1
aaagctttgtattttctgcgataattttccattgggtggaagaaagtctcaacctttattcgaaagagcaaggatctgagttgagttgagtgatcatgtgtggtggtgcgattatctccgacttcataccggcaggtcccgccagcggggcgcggcgcgtgaccgccgacatcctgtggccgagtttgaggaagcgcttctcgaagccgctgctggacgatgatttcg

SEQ ID NO: 19080 - DNA, 170 bp, Glycine max
  Clone ID: 700957579H1
ggtctttaatgatttcatctctgttctctattaccagaatatgaatgtctctaatttggggtatttttatatttaagcttgatatatataacttgtatctaaaatttagccatagcagttatctgctatcccactatagtgttttttgggttggcctctcgtcactgtta

SEQ ID NO: 19081 - DNA, 97 bp, Glycine max
  Clone ID: 700957582H1
gcaatagcagcagaacagagagagcaaaaccctagagcatccatcacaagcagaggaagaagatggtgaagttcctgaagcctaacaaggcagtgat

SEQ ID NO: 19082 - DNA, 262 bp, Glycine max
  Clone ID: 700957585H1
cgagtgcaattgaagttgaagtcttgcccttctctcttcaactccaaacacaagacatcatcatccatggctgcctccgtctccactgtcggagctgtcaacagagctcttttgaacctgaatgggtctggacctggggtttcagctcccagttcatccttctttgggagcagcttgaagaaggttattggctcaagggtccccaacacaaagatttcctctggaagcttcaagattgttgctgtagaagagaagaaagaga

SEQ ID NO: 19083 - DNA, 258 bp, Glycine max
  Clone ID: 700957586H1
gttggatttatatctgctttgctgtttaagtatgcaggattggatattgacaaccttcagaacttggaaagttgtctctttgtccttttcccatatttctcgtatatgcttgccgaaggccttggtctgtctggtattgtgtcaatcctgttcacaggaatagtcatgaaacattatacgtattccaatttatcgcaaagttctcaacggtttgcctctgcttttttcgagttgatatcatctttagctgaaacattt

SEQ ID NO: 19084 - DNA, 242 bp, Glycine max
  Clone ID: 700957544H1
cagaaactctgtacagttaatcaagcccaacctcacctcgactcacctcacaggttttagttgttaattaaatatatagatagaaatccaaggaagaagatgaagcagtttgccgtccaaaacgtcgtcgctccatcccacgatgagattagcgtggtttgccccaagccccgccgcctcggcctcttcaacttccccgtgaacgatccccctgttagacccttctactggcatctcagttg

SEQ ID NO: 19085 - DNA, 257 bp, Glycine max
  Clone ID: 700957587H1
gcagaaagaccactgagtctaggggatgtaacagccaagaacttaaaggaggttggattcaacacatgggagaagttaattctcagggatccatctgagtactctggtaagttatcatttgaatacaaatcagctgagagagagaagctggagaaggagggatacagaatcattggaaacgttggagaccaatggagtgacctcctgggaagcaacaaagggactaggacttttaagctgcctaatcccttgtacta

SEQ ID NO: 19086 - DNA, 109 bp, Glycine max
  Clone ID: 700957588H1
gtgagaaactaggctagttagtcccattggaatttttttttttgtggctgaagaaggtgaaaagggggcaagtttcactcttcaaggagtttgaagggtgtcaacttgt

SEQ ID NO: 19087 - DNA, 226 bp, Glycine max
  Clone ID: 700957589H1
attcagcctcctccaggcataaaatacaagtgcccacaagcagtagttgcagcgcgggcagctatcgcacgcactgcatttgcaaagaacctccgtcctcagtccctgcctacgaaggtcctcgtgattgggatgctgggcatggcggctaatgttcccttgggtatatggcgagaacatactaagaaattttcgccaacatggtttgctgcagtccatgcagctg

SEQ ID NO: 19088 - DNA, 229 bp, Glycine max
  Clone ID: 700957590H1
gaaatccgagtctctcatctctcttgttggtcttactctgcatcatctctctcatccttgccttggctcaggcagattcagattctcatttcgaaggctttgaagccgaagacgacgatgacgacttggaagactcttccatccatccagcctctctccgatcagcccccctctccgaccctactcccactccccagcctccaccttcggatctccccaaattccctcc

SEQ ID NO: 19089 - DNA, 61 bp, Glycine max
  Clone ID: 700957592H1
ctttctcgtcactagctctgtgcattcttctctcgctctctgccttccatcacactcggca

SEQ ID NO: 19090 - DNA, 225 bp, Glycine max
  Clone ID: 700957593H1
gaatcttgtttggagtgacaccctactccatgaagtgattaagtgaatattggtgacaagattgacaagattgttgtgaggagggggggagagcatatgcttgcaagttacatacagtatgtatatcacttggtatattgctaaatcttaatgtcttctacctttcactcctgactaatttttagtgtatgtgtagggatactgttaaaatttgtttatatgcga

SEQ ID NO: 19091 - DNA, 229 bp, Glycine max
  Clone ID: 700957594H1
gtagtgaagaaaatgaaagtccttgttttctttgttgctatagttctagcagcatggcattgccatggctcagaccatgaccatgaccatggccacacctaccaaattttccctctgagaatgaaaactggccatggtggccactacattccggaggtatcatgccaaagttggaggcttggtgtggaagcacacaacgtcattgactggaaaaccgttcctcaagatt

SEQ ID NO: 19092 - DNA, 227 bp, Glycine max
  Clone ID: 700957493H1
ctggaattgctccattcagtgagcctgaaagtcaaattatgcggaaacttgccatatcttttgaaccgaatctatgggtcaacgtgcactctggaatggagctctttttatgccttatgatcataaaaatacaacaccagatggattgccattgcaacggatgaaatcattgcttgaagaagtaaaacatcttcattgccaagagcgctgcatgattgggtctggag

SEQ ID NO: 19093 - DNA, 241 bp, Glycine max
  Clone ID: 700957494H1
gtaaattaagagcatggctgcacaagctcttgtatcatcatcatctcttaccttctcagccgaggctacaagacaaagtcttggaccaagatcactccaatcccatttggcttctcaagaaaagcctcctttcttgttaaggcagctgctactccccctgtcaagcaaggatcagacagacctttgtggtttgcatcaaagcacagtctttcctacttggatggcagcttccgggtgacta

SEQ ID NO: 19094 - DNA, 247 bp, Glycine max
  Clone ID: 700957495H1
cgcaaaaatggcacctgcaacactgtctctgtctctcctcctcctgttctcactcagcatcgccgtaaccgttagatcgagcgactacgactacgattgtgtgacactgcatacgttagaaccggttcggtgttgaagggcggaacggactctaagatcgggctgaagctgtacgacaagtacggctactacatctacattaaaaacctcgaagcatggggcggcttgatgggcaagggctacgact

SEQ ID NO: 19095 - DNA, 240 bp, Glycine max
  Clone ID: 700957496H1
ctccagcctctgtctgtggttggtcttatcttttgctgaaacttgaaattgaatctctctcaagcttcctttcttaaaaggttaggaatttgaagcagaagtagaactaggaagagatgggagtggatttgagacaagtggtggcaggtgtcctcaccctcacaatgtttgtcatgcttggaaatatgatcaaaagagaccacttcgataattcacttcaagaaaagcttccaggaggat

SEQ ID NO: 19096 - DNA, 267 bp, Glycine max
  Clone ID: 700957501H1
tagagatactgttggtcgttgtatggatgtaagcaaaggtttcacattttctgaaataaattctgtacgtgcaagcactaacaaagttgtctgttgccatttctcatctgatgggaaattgcttgctagcggtggccatgacaaaaaggctgttttatggttcacagattctctaaaacagaaagccactcttgaagagcatgcatatttaatcactgatgtccgtttcagtccaagcatgcctcgtcttgcaacatcttcatatga

SEQ ID NO: 19097 - DNA, 175 bp, Glycine max
  Clone ID: 700957502H1
tgcagtcagcagtcataagcaacgcaacaattccatttccagtttctgattcgtcacgtcagacaaaggaaggggttagggtgtgacctgagatcaaaatgttgcggaggcttctctcttctcacctcaaaaccctagcctcctccgccgccgccgccgccaccgccactccccg

SEQ ID NO: 19098 - DNA, 161 bp, Glycine max
  Clone ID: 700957505H1
caacactgacatatctggtgttagaatgcattcttgaaaagctccctccagcttcactttgtcaaatggccggggtttgccgctccctaagagagagctgtgtgagtgatcacctttgggagagacacatgaaacagaaatggggtagaattattggtcaa

SEQ ID NO: 19099 - DNA, 250 bp, Glycine max
  Clone ID: 700957507H1
cgttaagctagtggcgatcggatccagctacagcatagagatcaaggaaggaaggaaggaagatgttgggtgttataaggcacaagagtattcgccctgccttctccgcaatcagacacttgtcttctgcagctaaagagattactgtcagggaggctctgaactccgcactcgatgaggaaatgtcagctgatcctaaagtgttcttgatgggtgaagaggttggggaatatcagggtgcatacaagat

SEQ ID NO: 19100 - DNA, 247 bp, Glycine max
  Clone ID: 700957508H1
tcgagccgctcgagccgattcggctcgagtcccgagctcatacccttgagccatgtcagtgccacgacgctcggtgccaagctcaccgaggttcggaagaacgggacatgcccttggctgagacctgatggcaagacccaagtcactgttgagtactacaatgacaagggtgccatggttccaatccgcgtccacactgtgctcatctccacacagcatgatgagcctgtcacaaatgatgagattg

SEQ ID NO: 19101 - DNA, 256 bp, Glycine max
  Clone ID: 700957509H1
gcgcgatcctcgtgactcgcgacccctcgggtttaaatcccctgcgacgcagcacaggctactacttcaccatcgccggataaaatggtcgacgacggagcaacctcggcggcgacgagccggagaaagccgtcgtggagagaaagagaaaacaacaggagaagagaacggaggagaagagcaatagctgcgaaaatatactctggacttcgagctcaggggaacttcaacttgccaaagcactgcgacaacaacg

SEQ ID NO: 19102 - DNA, 256 bp, Glycine max
  Clone ID: 700957510H1
ttcttgctcttggctgttctgcgtgtgtttggcccatatattacactgttagcactgcttatcagaaagcattcgactcaggattatcatacgatagcccagcatcagttctagggcttcttttcgtggtgaatagcattatcttcatgacactgggtttggccattggctacccagttgcttcagcttcagttaaggtgcttcaaggtctgtggaggaatgatttagcagcactaaagggttcttgtccaaattg

SEQ ID NO: 19103 - DNA, 259 bp, Glycine max
  Clone ID: 700957511H1
cgagcaacaatcggttactggtttcccaaatgtcgacgattccaatagttactggattgtaagacctgagccaggaacttctgctaaacaaggtgaccccattaaaagtggcacaatcattagattgcagcacatgagaacaaggaagtggctgcacagccatttgcatgcatccccgatatcaggcaatcttgaggtcagttgttttggaggagaatccgaatctgacaccggggactattggaagcttataatagaa

SEQ ID NO: 19104 - DNA, 257 bp, Glycine max
  Clone ID: 700957514H1
gatttatctatcttggttctctctctcaatctaacgatttcgccattcaacagcgatctttccgtctccatcatcgtcatcaacgctcccatttcctaaacctcagagagggatccagctaacagttgtttcccgctgaaaagttgcttccccacagaactgtaaagcaaacggttagatgcaccaacacaagcaccactaacgaaccattggttcagttcaatatataacgaatccgatactcttttcatctcaca

SEQ ID NO: 19105 - DNA, 141 bp, Glycine max
  Clone ID: 700957515H1
ctcgtgctacataaattaacggagactgtagacgggggtcggtatttgaattggaggtggatgtatgacgtgatcaatctatgcttggcggcggagtaaggtggttgcgctcctcggagcgattcaagtttctgacaacgt

SEQ ID NO: 19106 - DNA, 176 bp, Glycine max
  Clone ID: 700957523H1
aaactcaagtcatcaactgataactttacttccacaaaagtgcaaaaatgctaatgcaaacactgctgacttgcaaatggtggataggggaatcccgtattttcctctagcaaacagtcctttaaaatatggccagtagcaaactaccaaatacgtactacagatgaattccccaa

SEQ ID NO: 19107 - DNA, 166 bp, Glycine max
  Clone ID: 700957524H1
ttggaagtggaatcgcaccgatccggattttcacaaatcaaggatggcaagaacatcaatgtctcctactactgcttataatccacctgaagattctttaagtcaagatgtgattgcgactgtagagaagagtatgaaaaaatatgctgacaacctaatgcggttt

SEQ ID NO: 19108 - DNA, 264 bp, Glycine max
  Clone ID: 700957525H1
attcggctcgagctggaatttgctgtggtgttgtcggagaaggtgacactccggctccactcgagccaactactcgcccctccaggcgccggagtttggacatcttacccttaaaatacatcgctgacatggcggtgccgccgtcggatggttcacggaaacgtcccaagctggatctcagggaccgcgataacgtagttcaaaattgcgacgaatccactggacacaaggtggtgacaaaagaagccaaagtggaaatccacg

SEQ ID NO: 19109 - DNA, 253 bp, Glycine max; identical to SEQ ID NO: 18451
  Clone ID: 700957526H1

SEQ ID NO: 19110 - DNA, 253 bp, Glycine max
  Clone ID: 700957527H1
ggaacatgcttagaaaactgccaagcccacccatattctctcataactttcaaccatgaactgaacaacaacaacaacaacaacaggtcctaccgtacagacccacctccaaagagatcatttttattaccaattttccgatttcacagagaaaattctttgtgggcatctcttcaaaaatgtcaagcttccccaagccggtggcggaaggccgcacgtccggcaaggcaccggtcaaatccaccttttctca

SEQ ID NO: 19111 - DNA, 253 bp, Glycine max
  Clone ID: 700957528H1
ataaagggtatggaatagggttgggagggatcaaaacccacaacactacacggcactgagttattagtaattgtgttgtgttgtgttgagcagagagtaggatcaagaaaggataagaagatagagggaatagggttagggttagggttagggttaggttgaggatgccgaagaacaagggaaagggaggtaagaacaggaagaggggaaagaacgaggcggacgacgagaagcgagagctggtgttcaagga

SEQ ID NO: 19112 - DNA, 195 bp, Glycine max
  Clone ID: 700957529H1
attcggctcgagtagggttatcatttctccatttccattttctctctcactgttcaagaatcgtaagctatgggaaagtcttacccaactgtgagtgctgattaccagaaggccgttgagaaggcgaagaagaagctcagaggcttcatcgctgagaagagatgcgctcctctaatgctccgtttggcatggcac

SEQ ID NO: 19113 - DNA, 255 bp, Glycine max
  Clone ID: 700957531H1
gtcaaaaccaccactaccgttgatgaagctctggaggctcttgtaaactacagaatcagtggtcttccggtaatcgatgaggtctggaatctggttggagttgtatctgattatgacttgttagctattgattcgatatcaggaggtcctcaaagtgatgcaaacttgttccccaatgttgatagtacttggaaaacattcaatgagttacaaaaactgcttagtaagactaatggccaagttgtcggtgacttg

SEQ ID NO: 19114 - DNA, 238 bp, Glycine max
  Clone ID: 700957533H1
atccaaccccaagcatcatagaatctgaccaagagctccaagcatggtggagagaaatcaaaacagtgggtcatggagacaaatctgaagaaccatggtggccaaatcttaacacatcaaaagatcttattgacatcataaccacaatagcttgggtagcatctggtcatcatgcagctgtgaacttttctcaatatgcttatggaggctatttccctaaccgacccacaattgcaag

SEQ ID NO: 19115 - DNA, 98 bp, Glycine max
  Clone ID: 700957534H1
aaccaagttccacaggaagtgacaggatagatggagctgatggtgataaaccaagttccacaggaagtggcaagatgaggaggaggacatgctatgag

SEQ ID NO: 19116 - DNA, 242 bp, Glycine max
  Clone ID: 700957492H1
ctcaattttccttctctttcagccatgaatccttctgagcaatttgtggaacatggaatgtctcagcagaatttaaagagaacatcttgtgcaactgtgccactctagcataccaaagtcttggaatagtttatggtgacctcagcacttctcctctttatgtttacaagaccacgttctcagggaaattgaggctcaaagaagatgaagaggaaatttttggcgtgctttcatttatcttc

SEQ ID NO: 19117 - DNA, 72 bp, Glycine max
  Clone ID: 700957538H1
ctgaagtatactactagggaagcatcagattttcatgctcctcctttcattaaattgaagtgcagaacagtt

SEQ ID NO: 19118 - DNA, 243 bp, Glycine max
  Clone ID: 700957541H1
cttctattctattctaaactcgaaacaatcttagagaaagaagcagaagaaaatgccgatttctagaattgccattggaaattcttcggagttgaaccaatctgatgcacttaaggctgcactagctgagttcatctcaatgctcatctttgtttttgccggggaaggctctggaatggcttataataagctgacaaacaatggctcagcaacaccagcagggttagtggcagcatcactgtc

SEQ ID NO: 19119 - DNA, 187 bp, Glycine max
  Clone ID: 700957542H1
atggaaccttactattatttaagaatgaaactacgctgatgcttccactagagaaaaaaagtcatgtaggtggggttgagtgaataatagttaataatttaaaattcacatcataatggaaccttagcatcgaaggacaaattatagaatgttgtgtgtgtataaattccaccaaagccaccccacc

SEQ ID NO: 19120 - DNA, 157 bp, Glycine max
  Clone ID: 700957543H1
catcacattacattagattggtggtaatggcagcgtcactacaagcagcagctactttcatgcaacccaccaagttgagcaggagcaacactttgcagcaaaagtctactcagtccatttccaaggcttttggtttggaacctgttggagctaaaaa

SEQ ID NO: 19121 - DNA, 254 bp, Glycine max
  Clone ID: 700957450H1
attgctcacaggatctgttcaccctacaagggatgaaaatggcaacttactcgtgactgagtttggattgtgcaaatacaaagatcatcaaactttgtccattcaagagttcccgagaattctgctcctggtcaactcccaagaacagtggatgtcattgcagaagacgatcttgttgattcttgcaagcctggagatcgagtggcaattgtggggatatataaggctcttgcagggaaaagcaaaggcagtgt

SEQ ID NO: 19122 - DNA, 158 bp, Glycine max
  Clone ID: 700957451H1
cgtacaatttgtgggtctcttaccaactagaacaaccaaccaagcatggctatactactatagaacaacaacttcacttctcaaactgtcagaataatatttcataccatcccaatccaattattcaccctcttcctatttcactccctcattctctc

SEQ ID NO: 19123 - DNA, 134 bp, Glycine max
  Clone ID: 700957453H1
aaaaatgctaacccaaagtgcttctctcctctgtctttttctctctcttgctatccttttggctagtggcactgctgcaagtggaactccaagaagcgcagtgccaagcaccatgtttcaacattcaacagaag

SEQ ID NO: 19124 - DNA, 253 bp, Glycine max
  Clone ID: 700957456H1
ggagcggcagagtctgaaataaagaaaaagtataggcgactttctattcaataccatccagataaaaacccagatccagaggcacacaagtacttcgttgagtacattgcaaagcttatcaagctcttacagatccaacagctcgtgaaaattatgaaaaatatggccatcctgatggcaggcagggattccaaatgggtatagctcttcctcaattcctgctaaatattgatggggcatctggtggaatact

SEQ ID NO: 19125 - DNA, 245 bp, Glycine max
  Clone ID: 700957458H1
gtagaaccttcactctgctatcccccatattcctgtgtttcctttgaaaaaaaaagaagaagaaaaaacatgtctaggttttttggattcttctttgtgggtctacgttgatgttggtcggtgtggcaaatgctatggctaactcttccaacaaatttgatcaactcttccaaccaagttgggcttttgaccactttattcatgaaagggatcttctcaaactcaaacttgacaaattttccggg

SEQ ID NO: 19126 - DNA, 244 bp, Glycine max
  Clone ID: 700957459H1
aatagaacaaccactcaccccctctccgatctaatggccaccgtaatcgacggcaaagccgttgcgcaaatcatccgatctgaaatcgccgacgaggtgcgcctctctctcaaaaatacggcaaggttccgggactagcagttgtgatagtagggaacagaaaggattcacaaagctacgtgggaatgaagagaaaggcatgcgccgaattgggaatcaaatccttcgatgtggaccttcccga

SEQ ID NO: 19127 - DNA, 169 bp, Glycine max
  Clone ID: 700957464H1
accaaacattttttttccatgaactttgcatctacactatcatcacatccatggccacagttgtgaagctccacgttttcccagaaagtttgaaccaacacaaaacgagttgctcaggagaggctttggctcatgcccttcacctggggtgcttggttttggccataaa

SEQ ID NO: 19128 - DNA, 249 bp, Glycine max
  Clone ID: 700957465H1
tcgggtcgatgacaaaatacttataaggaataagtgatggagagaaggaggcaggaattgcatgtgcttggtaaccaaaaccaaacaaagccttaagagttcatttttgggatgatgcgtttctcggagacagcatcaaaatccaaaactgttatttttttttcgtgatctcttacttttctgaacgccacacagatccaatggtcgagctgctactaatcacatgcatctcactacttttcctcattc

SEQ ID NO: 19129 - DNA, 251 bp, Glycine max
  Clone ID: 700957468H1
acacacgatacaacttggactacctgcgacagttaaagttgctgcaaaccttgtccggcttctcgcatataacaataagaatttcttacagaccgggttaattgttgtggttgggataaatatgaaggtggacaaatttatggagttcctctgggtggaacaatagtacagcaaccttttgctatcggaggatctgggtccagttacttgtatggtttctttgaccaagcctggaaagagggaatgaccaa

SEQ ID NO: 19130 - DNA, 251 bp, Glycine max
  Clone ID: 700957470H1
gaaaccctaatttgttacacctacaccttcttctctcattttctcatcatcaccaatcaacaacaacactgctcttttgcaaggagggcctgactttgacaaaatctccacttcctctccattcgcatccttgctttcatcaatgaaggctcttcctccctctcaagtgcattcatgaacgagccatggtcatggggcataagcattcccattagtttgtacgtgaaatttgcacttgagatccacactca

SEQ ID NO: 19131 - DNA, 251 bp, Glycine max
  Clone ID: 700957471H1
catgaatccaaaccgatctgtctgaaacaaacaaaaaaggaagatgcatatgtcgattccagtggcaaatgttgcgttcctctgaatgaatactgacccacaaaaacactaccttggtgccaccccttttcctaccttctccacctttcagggttcctgaataattaaagatgggactggctctgggttgtcttcaagtggagcaatcaacggtagctatcaaagaagtgtttggaaaatttgatgatgtg

SEQ ID NO: 19132 - DNA, 251 bp, Glycine max
  Clone ID: 700957472H1
cctgcacccaggggtgttcctcagattacagtgtgctttgacattgatgccaatggtatcttgaatgtctctgccgaagataaaaccactggccagaaaaataagatactatcaccaatgacaagggtagattgtcaaaggaagatattgagaagatggttcaagaggctgagaagtacaagtctgaggatgaagagcacaagaagaaggttgaggccaaaaacgctttggaaaactatgcatacaacatg

SEQ ID NO: 19133 - DNA, 244 bp, Glycine max
  Clone ID: 700957474H1
atctttcaatacaatattgctctctaagctttgattcttcttaattcatacgcttcccacactcattcattgttgtgcgtctggttttctgcctgaaatggagacatgaaccagagaccaaaatatgattgccttctttttgatttagatgatactttgtatccactaagcactggtcttgcaaaagcatgtggccaaaacattaaagactatatggccgaaaagcttggcatagagaaaagca

SEQ ID NO: 19134 - DNA, 245 bp, Glycine max
  Clone ID: 700957475H1
ctcttggctataaaataccagaatttaatgagttagtataccaaaattttgcggcatgaagcattagagaggcttcttgaaacaaataactttccagagtttatggtcgggtgtgcccagcaccttgtgaaggttcttgtgttcttggtattattgagaatcccgtatccattaaaagcattgaatgtgccatcatagacaaggcttttgaggagggttggatggtgccacgacctcctgtccag

SEQ ID NO: 19135 - DNA, 245 bp, Glycine max
  Clone ID: 700957476H1
cagctttgaacgccgaagaaggttcatccaatccccgaagtccttcaccgcattgccaccatgtcgaggagaaaggtcagagagccaaaggaagaaaacgtgctctgggcccagctgttagagatggtgaacatgtctttggcgtcgctcgcatctttgcctccttcaatgataccttcattcatgtcactgatttgtctgggagggaaacgcttgtccgcatcactggtggaatgaaggttaag

SEQ ID NO: 19136 - DNA, 235 bp, Glycine max
  Clone ID: 700957477H1
cggctcgagcaccccacttactattattattgtacaacacacccaggtctacaaatgcctgttagagagagaaagagtaataataataaagtggaagacaaaaattaggagagtgaaacaagaagaagaagaagaagaagaagacgaagaagaattgagaagatggtgtttgaggaaactgagctgaggctgggactgggactatgtctccctggaaatggaaccacggcaacaa

SEQ ID NO: 19137 - DNA, 172 bp, Glycine max
  Clone ID: 700957478H1
gcaatagctagctgttagaaatgaaccactactgtgaaagatgttgaatcatacgtacgtgtgttctatcagagaagctgcttttgatcttgtgttactacggagatgccaaatgagtggccgttgttcttgtttgagtttgctttagtaagaatccctttttcagttacaa

SEQ ID NO: 19138 - DNA, 187 bp, Glycine max
  Clone ID: 700957479H1
gaaattcaagaggaacggaacagaaaagtttagtacgaacagcatcgcaacatgtacaacgccaacttcgagaaccagacccgggccatgaacacctacaaggccaattcgaggcccattacgcgcagtcagaagacttcgaacaaacaataacctaaaaagctcgtcgcgcggttgctgctgctac

SEQ ID NO: 19139 - DNA, 249 bp, Glycine max
  Clone ID: 700957480H1
gagaatctgaaagacatgcctctgtctttgggggttatatagggtttttggctgagtagcaatttgttgttgttgcaaccaatttttgaagaaaagatgggggaacagcagcttccaatcctgctttgcaagtgtctgtttcatttggtagatttgagaatgattccttgtcttgggagaaatggtctgctttctcaccaaacaagtacttggaagaagttgagaagtgcgccactcctggatcagttg

SEQ ID NO: 19140 - DNA, 126 bp, Glycine max
  Clone ID: 700957481H1
ctcgtggcttcaagaagagaatctcaatggaggcccaggagctgaagcgcgtgttccagatgttcgaccgcaacggcgacgggagaataacgaagaaggagctgaagactcgctggagaacctggg

SEQ ID NO: 19141 - DNA, 250 bp, Glycine max
  Clone ID: 700957482H1
agagaggaaagtagtagaagaatacagggcagagctgcagccaacaccacccatggctgaatccgtttcagtggacatggagatgatctttctcggcggaaaggacatcatattcaaactggctgtggttctgtatctgtaatagtctgtggggatcaagaaaaaccagctctgatcacttatccagatatagcgctaaattatatgtcatgtttccaaggattatttttctgtccagaggcaacttctt

SEQ ID NO: 19142 - DNA, 243 bp, Glycine max
  unsure (1)..(243): unsure at all n locations
  Clone ID: 700957484H1
cgtttggttccttgtgatcgattagggttattattctttgtggttgcggaacgaagcatgctgttgctgttcgagaatggatgagttgaacggcgccatgacgaggagaatagcaatgcggaggtggttcgatgggagaggtttctgccgcggatggtgctcagagtgctgcttgtagaagctgatcattccacacaacatagacgcgaanatctgagcaccatccgcggcagaaactctcca

SEQ ID NO: 19143 - DNA, 124 bp, Glycine max
  Clone ID: 700957485H1
agcagaatagaaagcattaccaaacgttcggaaaaaatcggagagagggcatcgttcccaccggaaccttagcctacagcctccgtcgtccatggcgttatcgtctccgcctccgttgccacgc

SEQ ID NO: 19144 - DNA, 165 bp, Glycine max
  Clone ID: 700957486H1
ctttgtggtaacaaggttgatgtcaagaacaggcaagtgaaggcaaagcaggttaccttccacaggaagaagaatttgcagtattatgagatttcagcgaagagaactacaatttcgagaagcctttcctctatttgaacttcctgcaagtttcctggccaaata

SEQ ID NO: 19145 - DNA, 248 bp, Glycine max
  Clone ID: 700957488H1
tctctgtctggggagttcttagcaccaccaccagcttctgcagtagctttaagctacgaaagattttccttgaccatggggcaaaagcatttagtgacggtgttcgtttatgggctttaacatgttcccttcttccatctttctcctttggaattctgagaattggtttgaagaagagacctctagatcttgatagtattaatgctgctagaaaggcaagagaaggtctaagatctgtaagaccaatg

SEQ ID NO: 19146 - DNA, 150 bp, Glycine max
  Clone ID: 700957449H1
tgtttttgttctgcccttgctgaggcatatcaaggatcagccatctgttgttgctggagatggacctattgggctcattatggcccctacaagggaactagttcaacagatcacagtgctataaagaaatttgctaaggtactgggtctg

SEQ ID NO: 19147 - DNA, 215 bp, Glycine max
  Clone ID: 700957489H1
cttcaatgacgtccatggccactttcttcgcccaaacctccttcccctcccactctctctccaaaaccttcgatacccatttcgcccctgccccgaaagtcacgtctttgtgaacttcagggcgaggaggcacgttggggtgcgagtttcgaacgcgctgatcgaaccagatggagggaagctcgtggagcttgtggtgagcgattttgagaggg

SEQ ID NO: 19148 - DNA, 240 bp, Glycine max
  Clone ID: 700957490H1
cgaccaatccacttcggcgagtgcatataatagtaggtttatagaattcttttcaaaattaaagaattcttttaatcctaagtctgaagaactaaaatcaaagatataaagaagctcccgagcgtcgaatttttgaagaagaaacatgacggagttaaggacttctctcaagaagctatcctgaaactaccaattatacactggccgttcccgataccaaaaataccaaaaaacttctgg

SEQ ID NO: 19149 - DNA, 239 bp, Glycine max
  Clone ID: 700957491H1
cacaatcatcagttgttgcggactgagtggtgtgtcgcgttgttgacattagaatttgatcgatttggggttggggcggaagaaagtggaaacgacgccgtggaaggtgggaagaagatgagttcgcagcaaatgcaaatgcaaattcaaatccaaaacagtggtggtggcagtggcaacaacaacagcagcaacatcccagtgagcgaggttttctggactctcgtcgacaaagccga

SEQ ID NO: 19150 - DNA, 258 bp, Glycine max
  Clone ID: 700957407H1
gctgggacaacgatgaggagaacgacaacgacaacaacgacgacgaggagttcgaggaacacgaggaggcggaggatcgctccggcaacgaggatccgcacggaagagacgacaggatctgagaagaaggaggcgcgagctgcttcggcttcggattagggatttggcgacgcgcacgaggagcatgcggaaccggatcttggattgggccgagattctgatgggccttgaggacaattccatcgagttccgcctcca

SEQ ID NO: 19151 - DNA, 120 bp, Glycine max
  Clone ID: 700957409H1
ctcacggcaattttataggtcctccaagaaagagagagagagagaggtaaacgtaaccaagggagagaaacaaccatcgtccaaaccaccaccaacatcgtacgtgctacgttgtacatg

SEQ ID NO: 19152 - DNA, 255 bp, Glycine max
  Clone ID: 700957410H1
cttgcacttttgcacaagactcttatgcccttaacctcgaattatatgtatttaattacatgacctgctagtacttttcatttaactatgttcttatccctccccctcctcctccatgttgaaagcttgctaagctttcagcttgtccggaaaggaaacccaaacttacaacccattcatttgtacactttttaagaaaatggtgcattttaaatgtaaaaatgttttgttatttgaaaatattttttttttaaa

SEQ ID NO: 19153 - DNA, 251 bp, Glycine max
  Clone ID: 700957411H1
gagcacactgcacagatctgagtggtgactctttcatttctcatcactattattattaggtctgaaggctcattgccattatcatgtcaaggaggccagtaaatccttcggtcggctaggtgatggtggaagtataccatttgttgcatgaatccagtccaaatctcaaaactctcccctactatctattgggcttgtcattgtgggtgcaatcctcctgattggttattgttacagcaattcaggtggag

SEQ ID NO: 19154 - DNA, 252 bp, Glycine max
  Clone ID: 700957413H1
gaaaactgggcagcctcgtggattcgggtttataacatatgcggatccctctgtggtcgataaagtgattgaggcacctctggtcatcaatggcaaacaagttgagattagcggacgataccgaggggagctgttggctctaaggattttaggacaaagaaaatttttgtaggtggaattccttcaaatgtgactgaagatgaatttagagacttctttacacgctacggcgaagttaaagatcaccaaata

SEQ ID NO: 19155 - DNA, 251 bp, Glycine max
  Clone ID: 700957414H1
gttatgaactctttagtccactacaagccgaaggaatatggaggtttctattacagatgaaattgcaggcactatggagctcaaccctgataggctgggtgagctcaaagctttgatgacacaaaagctggtgtgaaaggccttgttgatgaaggggtcgcaaagatcccaagattatttcatcatccacctgatgaatttgtcatggcttcaaagttaggcgacacagaatacactatacctgttataga

SEQ ID NO: 19156 - DNA, 256 bp, Glycine max
  Clone ID: 700957415H1
ttcaattcttcttctcatcacttctttttccacaaaaaagaaaacacgagaagggagaacgggactcttgtttcttgttgtattaggtgctgcttgggcatgtgattcaaggaactgactaactctggtacttccgaactaagcataaagccggatgtgtgtgcactttgtgaggaatatattaccaaggcacttgattatctacatgaaaacaagaccgagacagagatcattaatatcctgcacaacacttgcc

SEQ ID NO: 19157 - DNA, 255 bp, Glycine max
  unsure (1)..(255): unsure at all n locations
  Clone ID: 700957416H1
ctgttttgaaaaaaaagacgcacaccaacctttcctaattcacactgcacacttcatttctgaacaaaaaaaataaaaattattcctgttttagtgcttctttcttatccatgcgagtctgcttcggaacgctaacacatccctcctcaaacgttctctcttccactccgacaactcctcanacttttgctttaaaccgggagtgttgggcacgtctcaagttttaagcttttcaactcgtaaaaggaggtctaa

SEQ ID NO: 19158 - DNA, 173 bp, Glycine max
  Clone ID: 700957418H1
aggccttgagggctcaccagatttgaaggctgcaaaagaagttgctgactatctaggcactgtccaccatgagtttaccttcactgttcaggatggaatagatgccattgagatgttatctaccatgttgaaacatatgatgtgactacaattagagctagcacacccatgtt

SEQ ID NO: 19159 - DNA, 257 bp, Glycine max
  Clone ID: 700957420H1
cttgaaaaagaagtctctttggtccagaactttggaagagatagttgaaaagcttgtagatattgttacctatatacatcaagcaatttatgagttcgctggaaatcatggacagctgcaaccaagcacagtgagggttctgaaagactaggagaagctggtcttgcactgcactatgctaacatcatcaatcagataaatatggttgcatctcgcccaactgctcttcctccaaacaccagaggccgcctgtatca

SEQ ID NO: 19160 - DNA, 153 bp, Glycine max
  Clone ID: 700957421H1
ggatgaacgaatcaaaggatgcgttcgaagcagcgttcgaggaatcgccgccagaatccccaacggctacggagatagaggcagagacgcaaaaccctactcctcctcctcgtacacgcctcctccttcttctttttctggtgttgctgtagt

SEQ ID NO: 19161 - DNA, 256 bp, Glycine max
  Clone ID: 700957422H1
gtcagagtgacatctactacatcaccggtgaaagcaagaaggctgttgagaactccccattcttggagaagttgaagaagaaagggtatgaggttcttttcatggttgatgcattgatgaatatgctgttggccagctcaaggaatttgagggcaagaagcttgtctctgccaccaaggagggtctcaaacttgacgagagtgaagatgagaagaagaagcaagaggagttgaaggagaagtttgacaacctatgc

SEQ ID NO: 19162 - DNA, 256 bp, Glycine max
  Clone ID: 700957423H1
atcctgtatgggttggaaagcagctgtgaaactcattaggcactggaaaattctcagaggagataatgttatgataacaaggggcaaagataagggtgagaccgggattctaagcgtgtcattcgctctcaaaatcgtgtcattgtagagagtaaaaacctggtaaagaagcatataaagcaagggcaaggtcatgaagggggcatctttacagtggaagccccactgcatgcctccaatgtgcaagttcttgacc

SEQ ID NO: 19163 - DNA, 259 bp, Glycine max
  Clone ID: 700957424H1
ctctattctctattctcttctgcatcaccatttcaccactgagagaacaacacaacacatcaaacgagcctctcggtttccaatgtgaagagagccaacatggctacaatcgtgccaggattctcggttccaactcaaggccagcggtcgcgctccgccgcttgcggtggccggcgtactcctccgcctccgcggtggtggcggagcgagagaccacggaggtgaaggactacgccgattaccgccgctccctgtacgg

SEQ ID NO: 19164 - DNA, 252 bp, Glycine max
  Clone ID: 700957425H1
gaagaagattaaatgggttcctctatgcagacttgtctgattttgttatcacttgcttctgcttccttcgccgccaacccaagaacaccaattgatgtgccatttggcagaactatgtgcctacttgggcctttgatcacatcaaatacctcaatggtggttctgagattcagcttcatcttgataagtacactggtactggcttccaatccaaaggatcctacctgtttggtcacttcagcatgtacataa

SEQ ID NO: 19165 - DNA, 252 bp, Glycine max
  Clone ID: 700957426H1
tggtcagcatagaaagactccctctcagttccgacgaggcggcgactctgcattcccatccacctaacttctctctctttctctctctagggtttcgccatttatccctattaagctaatttcaatttcatttttaaggctgtgtttgaaagtgtgttcaatgggtactccggaattcccagatctgggaaagcactgtgctgtctcggattgcaagctcatcgatttcttgcccttcacctgcgattgctg

SEQ ID NO: 19166 - DNA, 249 bp, Glycine max
  Clone ID: 700957429H1
ctactgttactgttgcgtgggaagctttgtcaagggtcattatttcagtacccaaggtggtgctgccttcttatataatgcctgtccgtgatgccgtgtcaagatccgctatatggaatggaggaagaagaagggaggaccaattctcatacctggattttgtcttccaaaagcacttcagcctatattgccaatttttctccaaggtctcataagtgggtctgctgaattgatgctaaggctgctctg

SEQ ID NO: 19167 - DNA, 252 bp, Glycine max
  Clone ID: 700957431H1
catttctacattttcccctctttggagaaatcaaaagaggggaacccatgattcctcctccatcttcctttctcttccagttcctcctcctctttcctctcttactctccattccgattccgattccggtcaccccgtgctcccgcgcccgctgatcgtggagtacccggagttcgacgcggtgctgcggtgcggcgcgtggcgcgtggcgggggaggcgaacaacctaggcgcgtgggcgataattcccga

SEQ ID NO: 19168 - DNA, 252 bp, Glycine max
  Clone ID: 700957432H1
ctccgacgccactccggccaccgcagagtgaacaaggtcgtggaagatgagcaacgtgttcgagggttacgaacgccaatactgcgagctctcggcgaatctagcgaaaagtgcactgccgctggtgctcttaatggagagcaaaagaaacagaaagtttctgaagtaaaggctggaattgatgaagcagaagctttgattagaaaaatggaccttgaggcaagaagtttacagccaaacatcaggtgtgtt

SEQ ID NO: 19169 - DNA, 260 bp, Glycine max
  Clone ID: 700957433H1
ccctcctttcttttactagcacctagctaggactcaattctttggttacttaatagtagttcctttttaactatctttcttcaatggctgactcagcctcagcctcagcctctcttccagaatgtggtgctccatccccgaaaggtttcagctgcatgcggccatgttggccctgcagtttggctatgccggcttccatgttgtctcaagagctgcccttaacatgggcattagcaaacttgttttcccagtctaccgca

SEQ ID NO: 19170 - DNA, 238 bp, Glycine max
  Clone ID: 700957434H1
ctacaccgaaacaggtttcctataaaatcccgcacgtgccgttgcagatgagctgaaatcgagaagaagaagaagaagaagatggagaagtatcagatctggagcaggagatagcgttggcagcgtttgcgtttgctctgctgttccaatcggcctcagcagacgacgtcgttgtgctctctgaagataacttcgagaaggaagttggtcaggacagaggactccccgtgaagtccaa

SEQ ID NO: 19171 - DNA, 89 bp, Glycine max
  Clone ID: 700957437H1
gttctcccacaccacacccatgagactcttcctgctccttattctcctctttcacgcggcggaagtacagggacagtggcagctcctcc

SEQ ID NO: 19172 - DNA, 256 bp, Glycine max
  Clone ID: 700957440H1
gaaaggaacattttggtagggtaaaaaagtatctttgtaaagttggatgcactttctagtttggtttgagaaaaggggatatgctaccaacctggaagtattatagcattatttcaccacttcagtatgtgatctattttttcagtggtgcatttaataataaacatattgatgttatgatataagaagaaaaatggagcatgttttggagaaaagatttcctcttaattcagaagattacaagttatatgaagaa

SEQ ID NO: 19173 - DNA, 250 bp, Glycine max
  unsure (1)..(250): unsure at all n locations
  Clone ID: 700957442H1
cctttctcctaaaacatctccagtgggttcttcttcttctattacaactacgacatcaaagaccatgaccatggccatggccacgatcctgctcctgttcacggtctcgcggtttcatcggccctagacatgtcgataatctcgtagnacaacgcccacgccgccacgtcgcgcaggagtagcgagctgatgtccatgtacgagcagtggctagtaaagcacggcaaggtgtacaacgcgctcggagaga

SEQ ID NO: 19174 - DNA, 248 bp, Glycine max
  Clone ID: 700957445H1
gagtaatgataggcagatatatataaaatggccatttaataaagtattcaaagtgtgaatacctgaaagttaaatattaaatgaccatgtcttttgaaggaactacattgaaagttaggcactaattagttttggccttttggggtgcacctaagccaaaatcccctgccaaattcataaacttgttgtctcatgtgtgaacaattgggcatttttgtaacaagaacacagttaatagcccccagttt

SEQ ID NO: 19175 - DNA, 259 bp, Glycine max
  Clone ID: 700957406H1
atcaaagtttcttcctttctctgctctttgccttctctgacacatttggtgccttgtagagcgtgttttggcaggaaggtggtatggcgaaggacgttgaggttgctgagcgtgctccttctctgggaaggactaccaggacctctccaccagcaccactcattgatgctgaggagctcacaaagtggtccttttacagggctctcattgctgaattcattgccactttgctcttcctctacattactgtgctcacagt

SEQ ID NO: 19176 - DNA, 236 bp, Glycine max
  Clone ID: 700957446H1
tgtgaagcatccaatgcaccgtttaaaagagcttcgcttgcgcaaagttaatgatggtgaacgtctctgtcagattctgtacagaatgccaaatctagaaaagttatcttgtcgggcgctaaatatttgcttaaagagtcgtcggagtcacgtttgggaaccgtattacagctgaaggaattggatttgtggtggtcggagataaaggatataggatttgaacgagaaccagttcc

SEQ ID NO: 19177 - DNA, 252 bp, Glycine max
  Clone ID: 700957359H1
ctcttcttcgtctcaaacttctttgtcccttcgattcattccatttcttccaaaatggccaaagacccagttcgcgttctcgtcactggagccgcagggcaaattggatatgctcttgtccctatgattgctaggggagtgatgctgggtcctgaccagcccgtgatcctccacatgcttgacattcctccagcagcagagctcatgaatggggttaaaatggaattggtggatgctgcattccctcttctt

SEQ ID NO: 19178 - DNA, 251 bp, Glycine max
  Clone ID: 700957361H1
ctcattctccatacctcaacgaagatgctaaagagacggcaacactttgctgtccgccttgaccgagcagagcttcgtcttggccctcgattttgccctaaagtactctcagtcacaacagacaccgtcgtcgtcgtcgtcgtcatcaatggcaccgaagcagaccaaggctgagaagaagatcgcttacgatgcgaactgtgcgacctaatggaggagtacggccagatcctcgttgtgaactccgataa

SEQ ID NO: 19179 - DNA, 252 bp, Glycine max
  Clone ID: 700957364H1
tgcgaatccctctctctatctctcacacacactttctctctctctctctctcacccagatcttgtagcaatggcgagcgctcccactccacgcgaagagttcgtgtacatggcgaactggcggacaggccgagcgctacgaggagatggtggagttcatggagaaggtctccgcctccgccgagagcgaggagctgaccgtggaggagcgtaacctcctctccgtcgcctacaagaacgtgatcggcgctcg

SEQ ID NO: 19180 - DNA, 255 bp, Glycine max
  Clone ID: 700957365H1
cactatagtaaaaaaaggacattcattcatctatggctacccttattgctcccagcaaccactctccccaagaagatgctgaagctctcagaaaggcttttgaaggatggggaactgatgagaacactgtcatagtaattttgggtcatagaactgtgtatcagaggcagcaaatcagaagagtttatgaggaaatttaccaggaggatcttgtgaagcgcctagagtctgagatcaaaggagactttgagaaag

SEQ ID NO: 19181 - DNA, 253 bp, Glycine max
  Clone ID: 700957366H1
ggtagaaaaaaaatagaggaacacactcttattgttttgaatttattgaaaaccacaaaaatgtgtgatgctcttgaatcctgattttgtaatttccaataaattctaaccagtagcaaagagtgagttagagagtatgttcctagcactcctcaaaaaattaaagtgcaaaatgacacaaaacatggtctcaagcagtcaagccaaataagaccatgataacacaccgagtactcaagctctgaatattaac

SEQ ID NO: 19182 - DNA, 255 bp, Glycine max
  Clone ID: 700957368H1
gtaatctgataccggcattaacgtttgtaattgcagcaattgcgggatttgagaaagttgacataagcttaagaagcacggccaagatattagggacagtttgttgcgtggctggagccttaaccatggcattggtcaaaggacagaagctgttacacacggagttccttccttctatacatctcaccggcagtcaaggtgatgattggctgctgggttgcctattgctcttagcaagcagtgttttttggtcat

SEQ ID NO: 19183 - DNA, 245 bp, Glycine max
  Clone ID: 700957371H1
ggttctagatgttaagggaagatattgtaaccatgaatgttgacgaagaggttcagcgtctcagccaagaaatcaagaggcttggtaaggtccaagcagatggttcttacaaggtaacatttggaacactatttaacgatgatgaatgcgcaaatatatttgaagcacttgttggaccactaagagcagcgaaaaagcgtaaagtactgacatacgagggtgagctactgctgcaaggagtccat

SEQ ID NO: 19184 - DNA, 254 bp, Glycine max
  Clone ID: 700957374H1
gttgttgttctaaagcactcatccacacattctccgtcgccacgacaacaatggctccaaagaaaggtgcgaaaggtggagttgtagcagcaaagaagaaggttcaggagaaggtaacgaaccctttgttcgagaagcgtccgaagcagttcgggatcggaggcgcgctgccgccgaagcgggacctgacgcgcttcgtgaagtggccgaagaacgtccaaatccaacgcaagaagcgcatcctcaagcagagg

SEQ ID NO: 19185 - DNA, 250 bp, Glycine max
  Clone ID: 700957375H1
gtgaatgtttcaacgacgaaaccggatttacaaggaggagcagcgcaaactaagggctgctaccaggaaaggccaggaggatggggttaatgaacatcatcattagaacctggagttaattttcaatctaagcttctgaacaattattttgataaaatgtttgtgatttgcttggatcggtattcctgcatgttctgtgagcccatattttatacttttgatgttgcgggcttcttttccctgtgcaata

SEQ ID NO: 19186 - DNA, 247 bp, Glycine max
  Clone ID: 700957376H1
ggtgcaaaaaatattaagatgataaacattggagcacttgttgtactctttgcatttctcttcctcagttgtgcctatgtcacaagacacaacaacccttgtgcctgcaatcataacttttggtgactcagccgtggatgtagggaataatgactatcttcccacccttttcaaggctgattaccctccttatgggagggactttgctaaccaccaacctactgggaggttttgcaatggcaaatta

SEQ ID NO: 19187 - DNA, 249 bp, Glycine max
  Clone ID: 700957378H1
ctctagtaacccttcttttctctctctctctctcgtgttctgcgctgctagaagcaatggagaggaaaagaagccatgcttctttcaccatgtttgcaatgcttgttggattgctctctcagagccttgtcattcctgtaatatccaccactgttgcagatcagaagaactactacaccccagatccacatgctggaagtccccccacaggctcacacaatagtagtctcccatctcatggccatggga

SEQ ID NO: 19188 - DNA, 255 bp, Glycine max
  Clone ID: 700957381H1
tacacaggctttcgtttgttgttgcttctctagttccttaaactctctgttccaaaatccttagaaaaggtaaaaaatttataaaaaaaaaaaattaaaaatggtggctgtggtttcccaagaaaatgttgtggcattggtttctcgtaccggtagggagttgcaacgttatagaaaaggtcgtcgccaagttgtgggatgcataccgtacagatttaagattggggagaagacttgcttggatgtttctgatga

SEQ ID NO: 19189 - DNA, 254 bp, Glycine max
  Clone ID: 700957382H1
atttagttctctggtagggcagagaattagaacatatattggaggcacccgttgagatgtattgctactcatagctttcagaactgtttcaattgcaggaagcaaaaaagctacactttttccagtgccagttttagctttgactaaagcatccatcccctcaaggcaaataggtaggctagcctcttgtatgcgggtcatttgaacatatgttctaattctctgccctaccagagaacttgctagtcaaattg

SEQ ID NO: 19190 - DNA, 254 bp, Glycine max
  Clone ID: 700957384H1
gcttgacattcctccagcagcagagtctttgaatggggttaaaatggaattggtggatgctgcattccctcttcttaaaggtgttgttgctacaaccgatgtggttgaggcatgcactggggtcaatattgcagtgatggttggtggattccctagaaaagaaggtatggagaggaaggatgtgatgactaagaacgtctccatttacaagtcccaggcttctgcccttgaaaagcatgctgctgccaactgca

SEQ ID NO: 19191 - DNA, 258 bp, Glycine max
  Clone ID: 700957385H1
caagaatatcaaattggtctcttgtcttcctcctcatctctacactactccacatcgccgcccagcctctcaagcccaagcccaagcccaagcccaagcccgttcataaaatcctcctgcagcagcacccagtacccagccctctgcgtctcatccctctccgtctacgcctccagcatccaacaggaccctcaccaactggttcagacagcactctccctctccctgaaccgcacccaagccaccaaaaccttcgtg

SEQ ID NO: 19192 - DNA, 121 bp, Glycine max
  Clone ID: 700957386H1
ctctttctccgagaacaacaaaaaaaacgtgattcgctcttcacttcgaataaaccacaaaaccaacaaacgagaagaggagtgagagaagatggggttgtcgttcacggcgctgttcagc

SEQ ID NO: 19193 - DNA, 251 bp, Glycine max
  Clone ID: 700957387H1
cttttgctcatttcctttgactcctcattatcaaagaaaatggctctcattgggttgctcttgatgggttttctcacaatgttctcctctgctcatgcctatggtggagggtggactaatgctcatgccaccttctatggagggagtgatgcatctgggacaatgggtggggcatgtgggtatgggaatctctacagccaagggtatggaacaaacactgctgctctaagcactgcactgttcaacaatgg

SEQ ID NO: 19194 - DNA, 252 bp, Glycine max
  Clone ID: 700957388H1
ggaatgcatctgcacaacatgctgctctcaactttggccagtacccttatggtggctatgtgcctaatcgtccaccactgatgagaaggttaataccagaagagggtgatccagaatatgcaagtttccatgctgaccctcagaagtattttctgaatgcattgcctagcttgctgcaagccacaaagttcatggctgtggttgacacactctccactcactcacctgatgaggagtacttgggggagaggc

SEQ ID NO: 19195 - DNA, 252 bp, Glycine max
  Clone ID: 700957389H1
cctgcatgctcctccaagccaccaccaaccgctacctatagtttctagtatatatacacaaaacaacacaccccacaaacatcacagacacagacacacaaaagtcaaaagggtcgcgatggagcaaggagtcgtagaaggaggtggcatgaataagatacctcgggattcaagagtgaaggagataagacaaggtgatgcacaaattcaggttcaggctcctcagcaaccccaaaagtgtcctcgatgcga

SEQ ID NO: 19196 - DNA, 249 bp, Glycine max
  Clone ID: 700957390H1
ctcttggtcctttctctaatccaaatatctctccgttaatgctcttcccacaaacttcaatagactagccaaaagctaacaccaactataggccaaatcaccaataaatattatttcccgttcttttggcgtgttggccacccactgaacacatttgcactcacacatagaccgcgagagaggccattggttggtttcagagatgggaagcatgcacatagaaaccccagaaacttttgctgatggtag

SEQ ID NO: 19197 - DNA, 245 bp, Glycine max
  Clone ID: 700957392H1
gctggtcatgcatacacaaattgggctgcaaagatggccgttggattagccacaggtgtcccctgggtgatgtgcaagcaagatgatgccccagatccagtgataaatacatgtaatggattttattgtgattatttctctccaaataaaccatacaagcctagcctttggactgagtcttggagtggctggtttacagaatttggtggtccaatttatcagcgaccagttcaagatctagcatt

SEQ ID NO: 19198 - DNA, 248 bp, Glycine max
  Clone ID: 700957393H1
agagagagagagagagagaaccgacaagcaaacgaaaagtaaatcaatcaatcgttggaatctctcaacttatcgcttcttcctgatttgggggtttccgtttcaatggacgacggcgagctggatttctcgaaccatgaagtgttttcgagtccgaacatgggggagcttccgagcagcggttcaatggacagtttcttcgacgagcttctcaaggacacgcacgcgtgcacccacacccacacgtg

SEQ ID NO: 19199 - DNA, 192 bp, Glycine max
  Clone ID: 700957402H1
tcgtacgttaggtccgaattcagactcaggttggtgagagagggatacaactctcaggagggcaaaagcaaaggattgcaatatctcgtgcaatcgtgaagaatccatcaatccttttgttggacgaagcgagagtgcactggatgctgagtctgagaagagtgtacaagaggctcttgatcgtgtcatggt

SEQ ID NO: 19200 - DNA, 252 bp, Glycine max
  Clone ID: 700957357H1
gcgcaccgtatcgtgttttcattagacgctgcaatcgttcttctcttgagtttggtcgtctgggatcagatctgctctctccgtttggattcaattcgacactttcctcgccttaaagattatgcgaacaacatggttgtccttgctgcatccattgtgagcaaatctgggaaagtgctagtttctagacagtttgtggatatgactcgcataagaattgaaggtcttctagcagcatttcccaagttggta

SEQ ID NO: 19201 - DNA, 254 bp, Glycine max
  Clone ID: 700957404H1
attgaattgtgcatacagaaacagttctgcagattatggtggtggtcccaatttccatgctactgaggataagccagtcatattcccccagtcctttgttcaacccaacactaaacacagtctgcaagtttggttgcaccttcatttgatctaactggtcttggagttccggaggatggacagaaaatgattagtgaccttatgacaatctatgatacgaatgttgtaggaaacaagacttaagttcctccaac

SEQ ID NO: 19202 - DNA, 259 bp, Glycine max
  Clone ID: 700957405H1
ctaaaacagaagaagcaaagatgatattgcagttcttcgtgctttcacagagaggcgataacatcgtctaccgcgactatcgtggtgaagctcaaaaaggaagcgctacgacattttccgaaaagtaaagttctggaaagaagatgctgagggagatgctccacctgtttttaatatagacggtgtgaactacttccacgtaaaggttgctgcattgctatttgttgctactactagagtcaatgtctccccttctctt

SEQ ID NO: 19203 - DNA, 261 bp, Glycine max
  Clone ID: 700957320H1
tgcacgttgtaggctctttgtacgttttacacgtcagctcttcaaaacgacgcctccatcagatctctgcagccccaaagggtgccgttttgttgcgttgcactcgcggaagcggagaaaaccaaagaatcaagcttcgtcaaagtgtctgtcacacacagtctttaatttctggaagcgcttctcacttgctcacaataagaatttccctcaaatttcaatttttcatttgaaaataataaaaccctaaaagaggggttg

SEQ ID NO: 19204 - DNA, 259 bp, Glycine max
  Clone ID: 700957322H1
caattatctacttgtaagaagtccaatttcgggcaacaacgtttgtaatgcagaaataggtcattagcattgtaaatctccaggcgataaatggaatatcaaatggaagacgccgcatagcttctggtgtgacaatatcattgtgttgggcaaagcattttcgaagaaattacgtggatttaggaagattctgattattcttctacatctacaattattaaggtgaagataatttcggctctttacaagtaaagaatga

SEQ ID NO: 19205 - DNA, 262 bp, Glycine max
  Clone ID: 700957324H1
cgcccctataccagtggtcaaggaaatttttcgaactgatggcgaacagttcctcaagtatccaccacctaaagtgatgcaggtggataagtctgcatggatgactgatgaagaatttgctagagaaacgattgctggtgttaatccaaatgtcattaagattcttgaggagttcccaccacgtagcaagctagattctcaagcctacggtgatcatacctctataataacaaaacaacacttggagcctaacttgggtggg

SEQ ID NO: 19206 - DNA, 256 bp, Glycine max
  Clone ID: 700957325H1
ggaagttggaagtcatggcagcaacattgatggcagcaacaacaagttctggtactcttaaagcaactcctttccttggccaaggcaagggtgccaatgccaatgctcttagggatgttgtctccatgggaactgggaagtacaccatgggcaatgatttgtggtatggaccagacagagtgaaatacttgggacccttctcagctcagaccccttcatacttgaaaggagaattccctggggattatggatggga

SEQ ID NO: 19207 - DNA, 257 bp, Glycine max
  Clone ID: 700957326H1
tgggagacgaggttctgatgtgaaggtaattttattgggcctgttagttaatctacaactaattaattgggcctgttatttgaccgacccttaacctaaacaacaaaagcccagtcacaaaacccattagggttttccacgatataatagaaactgaaagcctcttacggttgcagcaacagcagcattcactgaaagcactcagtagggtttgcggtttcagagtttgtgacgcacgcatccatggccaccaccac

SEQ ID NO: 19208 - DNA, 256 bp, Glycine max
  Clone ID: 700957327H1
tgataacccataaccgaccgtaccaccgttttcctttgctttgcgttctacaatgtcgaaaacctcagagattcttacatgcaaagctgctatttgctggggaataggaaaacctgtgactgtggaagagatacaagtagaccctcccaaagccaccgaagttcgagtttagatgctttgtgccagtatatgctccacagacatctctactccgaaaaggattcccacataccaattttcctatagcacttggaca

SEQ ID NO: 19209 - DNA, 251 bp, Glycine max
  unsure (1)..(251): unsure at all n locations
  Clone ID: 700957328H1
attgattccgaagagaaaagaaaagatgtttgagccacaacagctatacacccgcgcgaagaccgaggacttcgacctcgaatcaggagaaaccctctacccagggctgagcgtcggcgagaaccagctccgatggggtttcatccgcaaggtctacggcatcctctccgcgcagatcgtcctccgcancctcgtccccgtcancancgttttctatactccaatcaatgacctcctcaagggcaattcca

SEQ ID NO: 19210 - DNA, 254 bp, Glycine max
  Clone ID: 700957329H1
gaaaccggtaaagggttgtggcttgattcgtcatcagagtgggttttggaaaaattgccgccacctctgaagcctaaacaaagtgtagatactgaaaggacactggtttcataagcaatggacagtgaagtagaaaatggagtcattctctttgttacacttccatataactttgcccgtgagaagttggctgctgagtatatttgtagagaactacgtgaggcagatgaaacaaatttgcttcaggaagaacg

SEQ ID NO: 19211 - DNA, 101 bp, Glycine max
  Clone ID: 700957330H1
gaagtgagggcctccgtcacactcacagtcagcatcgaagatcggaggcgaggcatgagttgtgtgctaactactactcttcaaaccaaacacgcatcgcc

SEQ ID NO: 19212 - DNA, 255 bp, Glycine max
  Clone ID: 700957331H1
aaaatacttggtgagcttatgcattgtaatttgaagcatggcaggttgctcaaataatgcgaccactattttgagtgtgaactggatatgaagcttgccttaggtttttaaaacactcatacctagacgaaatcccttgattcccaaaatatagaaactttggatacatgtattactgtctcttgcagggtagctaataacattctagaatctctaaccttggatatcttcatcactacaccaatgataccactt

SEQ ID NO: 19213 - DNA, 256 bp, Glycine max
  Clone ID: 700957332H1
gtaacatactaacatgttaatgcagatatttgtcagttgtaccatcttttagtttatgaactcgagcaggttgtccttgcatttggtgctgaaagtgatagaagtcttggtattccaggggagaacttgaaagggatacattcagctagagagtttgtttggtggtataatgggcacccatatggacaaaatcttgagccagacctaaagagcactgatacagctgtaatccttggccagggaaatgttgctttag

SEQ ID NO: 19214 - DNA, 262 bp, Glycine max
  Clone ID: 700957333H1
cgctttgagaaatcagacggcggagagaatgggtttatcactcttacggtgggttctgccgctgactctgttgctcacctgcgccctaggtttccaatcggacgaggcttctcctcgacgacgaagagttcggcatcgaaggaggacgaacctcctttgattccgattcgcatccaccttccaccgcctccacctcgaggaagaggctttccgactcctcctccgattccaagatccagttccctctccaacacgctttcgg

SEQ ID NO: 19215 - DNA, 259 bp, Glycine max
  Clone ID: 700957337H1
ctcaatggcatcatcatttgtgggtactttattacccaaccacttcacacaaaccaaacactcagctgttcctgcaagtagatcaggtgctccaagaaggaggagagtgcacttagcaacaacaagagcagagaccatgactactgtcatagaaaaactgggcattaagattgagaggaaccctcctgagtccaagctcactcaactgggtgttaggcaatggcccaaatggggttgccctccaagtaagttcccatgg

SEQ ID NO: 19216 - DNA, 88 bp, Glycine max
  Clone ID: 700957338H1
caacgaaacgcaacacaacacatcgtagtacggcattccgttcattgtttctttcaactcaactcaactctgtctcgcccaccacaca

SEQ ID NO: 19217 - DNA, 258 bp, Glycine max
  Clone ID: 700957340H1
tgcggatcttcacagcacttgctttctctcagaagctgtctggtctcccaccagaaactgtgttccaaccacttcttaaagataaccttgtggccaaagggctagttctgtcatttatgactgacttctttaaggagtatctgattgacaacagccttgatgatcttatttcaattctaaaacggggaaaagtagaggaggatcttttggacattttcccccctacaaaaagatccattgaagctttctctgagcatt

SEQ ID NO: 19218 - DNA, 257 bp, Glycine max
  Clone ID: 700957341H1
gtttttcatttcatcgtgcattcaatggccaccacagcagctctatccggaaccatggtgagcacctccttcatgaggaggcaacctatgaccaccacaagcctaaagacattccccaacgttggtgaagctctttttggtctgaaaagtggacgaggtggtcgtgtcacttgcatggcctcgtacaaggtgaagctcataaccccagaaggagaagtggagtttgaatgcccagatgatgttttcattgttgacaa

SEQ ID NO: 19219 - DNA, 255 bp, Glycine max
  Clone ID: 700957342H1
gaattatcaaaggtgaaacgaagaagccctaactacgcacgcattcgtgagataactcaatattcgtcgctcatggcactctcttctcgtctcttttccaaatccaaattgatctatggcagtcaaatacttctacaaaaggagcatgctattccagttcgtcactttgctaaagagtctgcccctcctgcccttaagggagacgagatgctgaagaacatttttgtggaggtgaagaacaaatttgagaccgcc

SEQ ID NO: 19220 - DNA, 252 bp, Glycine max
  Clone ID: 700957343H1
cgttcactcttcttccatcctttcctctctctctcaccctctgcatttcccaagcagagctgatattagaagatggcagacgctgaggatattcaaccccttgtttgcgacaatggaactggaatggtgaaggcaggatttgcaggagacgatgccccacgtgcagtgtttcctagcattgttggtcgtcctcgtcacactggtgtgatggttggtatgggccagaaagatgcatatgttggtgatgaggca

SEQ ID NO: 19221 - DNA, 248 bp, Glycine max
  Clone ID: 700957345H1
gtccctaatcctcaagattcactgtggatgatgaatttgaggactggggaatcaatggattctggatcttatctggagcgtccaggggagccggattgttcttattacatgagaacaggcctttgtagatttggtgcaacgtgtcgatttaatcatcctcctaacaggaagcttgctattgcctctgcaaggatgatatgcgagttcccagaaagaatagggcaaccagaatgccagtactatctgaa

SEQ ID NO: 19222 - DNA, 254 bp, Glycine max
  Clone ID: 700957346H1
ggcaatagtgcaattggctgcgttgcaggtttttgttatttttttgagtggtggtgctgattacataccgccttcaaggttggatgggttcgtctaccaaaatgggtacttagatttggatactgttttgatagaagcgttttatgatccggtgtgcccatacagcagggattcatggcctccactcaaacaagctctccatcactattcttctcgggtttcgttcctccttcatctcctccctttaccttacc

SEQ ID NO: 19223 - DNA, 254 bp, Glycine max
  Clone ID: 700957347H1
ttggaatccaaaaatgagagtaatcatcagcattcacataggtcaggccgggatccaggttggcaactcctgctgggaactctactgcctggaacatggcatccagcccgatggcatgatgccaagtgactcctccttcggtgtagcccacgacgccttcaacaccttcttcagctcgaccggatccggcaagcacgtccctcgcgccgtcttcgtcgatctcgagcccaccgtcatcgacgaattccgttgtg

SEQ ID NO: 19224 - DNA, 256 bp, Glycine max
  Clone ID: 700957349H1
cgggtttgtaagagaaagagaaaagaggcgcaagatgagtggtagggtttctgggaaggtgaagtggttcaacgatcagaaggggtttggattcataacccctgacgatggcagcgaggaactcttcgttcaccaatctcagatcaaatctgacggtttccgaagcctagctgaaggagagtccgttgagttcgctattgaatctgaatctgacggacgcgccaaggctgttgatgtcactggccccgacggcgcc

SEQ ID NO: 19225 - DNA, 255 bp, Glycine max
  Clone ID: 700957350H1
tggagggtgagctaaacccagatgggaccagagtaaatcaatggagacttgtcagcatccaacaagtagaagaggttaaatgcttagcaagaattatcccaatttgggcagcagggattcttagtctcatttccatgactcaacaaggaacatttactgtgtcacaagcaatgaaaatgttccgtggaacaacccaagcttgtttcacagctcagcaacaatggcttctatcccatgcatcacccaccaccatca

SEQ ID NO: 19226 - DNA, 254 bp, Glycine max
  Clone ID: 700957317H1
cttccaacgctcctcctgcttctcatagccttcgccacctctgtctccggccgccgtgacctcgtcggagactttctccggctgccctccgaaactgataacgacgacaacttcaagggcacccggtgggccgtcctcctcgccggttccaatggttactggaattacagacatcaggctgatgtttgtcacgcctatcaaatattgaggaaaggtggtctgaaagaagaaaatattattgtttttatgtatga

SEQ ID NO: 19227 - DNA, 254 bp, Glycine max
  Clone ID: 700957351H1
atcaatgtaagcagggcatggaagagatacaatttgagcttaggtcttggactgaacaaagttgctgggaaggttttcagaattggacatcttggcaacttgaatgagttgcaactgttgggatgtctagctggtgtggagatgatactgaaagatgtgggctatcctgtaaagcttggaagtggagttgctgctgccagtgcatacttacaggacactattcctatgatcccttccaggatttgagtcacaag

SEQ ID NO: 19228 - DNA, 104 bp, Glycine max
  Clone ID: 700957354H1
tacatttatttgttttacatatctccttgttgtgacctgcatagttcacatgaattttaaagttacaaatatatagatgtcattgtaatcttagtccacacaac

SEQ ID NO: 19229 - DNA, 255 bp, Glycine max
  Clone ID: 700957356H1
aaaatgcttgttcgcgaccctagaaggcggctgactgcacatcaagtattatgtcatccttggattcaagttgatggtgtagctcctgacaaaccacttgattctgctgtattaagtcgcttaaagcaattttctgctatgaacaagctcaagaaaatggcccttataattatcgcagagagcttatctgaagaagaaatagctggcttaaaagaaatgttcaagatgatagatgcagacaacagtggtcaaatc

SEQ ID NO: 19230 - DNA, 245 bp, Glycine max
  Clone ID: 700957261H1
tccagcacaggttgagatcctaaatgtgaacagagacacaatctacagcgtagttggagagagggaccctgcgaacgtgaattcatgggtgtctaggaggggcaatttccatcctgtagtgaatcagttggagcagcagcttcgatggcgtgtgcaactgggaaaaggatagtggcagtggagttcgcaagctttggaaaccccagtggttattgcggagactttgcaatgggaagctgcaatgc

SEQ ID NO: 19231 - DNA, 242 bp, Glycine max
  Clone ID: 700957262H1
taactagaaacagtgtgatgaaaatgaaggtccttactttcttcgttgctacaattttgctagcatggcaatgccatgcgtacgatatgttccctctccgaatgaacactggctatggtgcccgactccggaggtgaaatgcgcaagttggaggcttgctgtggaagcacacaacatctttggctttgagaccattcctgaagagtgcgttgaagctccaaaggaatacatccatggcgaac

SEQ ID NO: 19232 - DNA, 244 bp, Glycine max
  Clone ID: 700957263H1
caaaagagagaaaacgggatggatactcatcataggtcatagttggtggctaattgataagaagcctacatgtgcttctatatgttatgttgagatatggcttgccatttccgtaatttgatcggtaatcatggtcatttctttagcatagagttgataaatatcatcaagacagaactagtttagtgttttacgagtaagttaagataagatgaagaagatggtggttgcaatgatgcttata

SEQ ID NO: 19233 - DNA, 247 bp, Glycine max
  Clone ID: 700957264H1
aaaacggttggtggcttccaatcatctggcaatggccaaatttgatctaacgcatgtacagcggcccttgctatcatttggtccaaaaacttccatgaagctcagtacttgccccgttaatgtttcaaggaaattcggttgagttctcatcttattagtgattttagctatgagagttctgcaatgacaattgatggtgcctttagtacagcttggcttaggaatttacaaaagccgacgggttctc

SEQ ID NO: 19234 - DNA, 102 bp, Glycine max
  Clone ID: 700957265H1
cgcagcgctgatagccgtcagcacaggtctatggtatacacatgaaattcacgccttcctccaaattcttaggcctttcaaatcacttccactcccttctcg

SEQ ID NO: 19235 - DNA, 83 bp, Glycine max
  Clone ID: 700957270H1
attaggttctgcgtgcacaggcgacaaccctaatcctgaggcactcaaagtgtgagtatggcaagagtcatttcctcttcctg

SEQ ID NO: 19236 - DNA, 245 bp, Glycine max
  Clone ID: 700957271H1
cgctcatccactaactgctactcgctcatcccgtggaggtttcgctctctcagtttcttttccccaaattggtttttcatctaacaatttactttgcagaaccgtaaccctaaccccttccccaccttgtaaccttcctttcgatccttcacctcgcagataatgggagaaacaatgacgaagcatacgaggaagagcttctcgattacgaggaggaagacgaaaaggcccccgactccgccgga

SEQ ID NO: 19237 - DNA, 81 bp, Glycine max
  Clone ID: 700957272H1
acctaatgaaggaggtttcctttccatcagtttcagttccaccaaaattcaaaaatcactcggcatggggtgcgtgtcttc

SEQ ID NO: 19238 - DNA, 242 bp, Glycine max
  Clone ID: 700957273H1
caggagccaaaaccgatcactgggaaagcgaaaattgttaccacgaagattctgttgtcgaaggaggagacggaggaggaggaggatggtttgcaaagcctgttggctgagtgggtggagctttgcaacctagcagggtggaatggatggatttgctcgacaaattaaaagagcataatcctggtttgtactttaaggtggctgaaatggtattgactgaagattctttccaaacacatgta

SEQ ID NO: 19239 - DNA, 239 bp, Glycine max
  Clone ID: 700957274H1
ccgagtcgaaccatcatgctcgcaaactctgctccttatatcaatggccagcagaggtacgccgtcaacggtgtctcatacaatgcaccagataccccattgaaacttgctgactacttcaactcccgggagttttctacgttggaagcattcctacctatcctaacgggggcaataatgcctatctcccaacttctgtcatgggggctaatttccatgaattcgtggagattgtgttc

SEQ ID NO: 19240 - DNA, 246 bp, Glycine max
  Clone ID: 700957279H1
gatagcctcaactcaagtaagggttttctctttgagaaaatcgtatcttacaccttttggtgagcacttggcgtgagagaagagaaattaagagagatactcaaattagattcaagagagatgccatcaaccatgaaacttgggctttcattttcggtcttctaggcaacgtgatctcctttatggtgttcctacgctccattaccaactttttaccaaatctacaagagaaaatctacggatggg

SEQ ID NO: 19241 - DNA, 241 bp, Glycine max
  Clone ID: 700957283H1
cctgttcctgctgatggtaaaactgttggtgagattgtgatgcggggtaattctgtgatgaaaggctacttaaagaaccctaaagctaacgaggagacctttgcaaatggatggtttcatccggggatcttgctgtgaagcatccagatgggtatatagaaattaaagacagatcaaaggacatcataatctctggtgctgaaaacatcagcagtgtagagatagagaatactctttactc

SEQ ID NO: 19242 - DNA, 79 bp, Glycine max
  Clone ID: 700957284H1
ctgtgaagaggctccattggatgttgacatcaagggtggtggcagggttgtggtgttgaacaccaagaatcttcccttg

SEQ ID NO: 19243 - DNA, 240 bp, Glycine max
  Clone ID: 700957287H1
gaacaattggacatatagcaccagagtacctctcaactggaaagtcttcagagaagactgatgtttttggatatggtgtgatgcttcttgaactaataactggacaaagggcttttgatctactcgacttgccaatgatgatgatgtcatgttgctcgattgggttaaaggacttctcaaagacaggaaattggaaacactggtagatgcagatttacagggcaactataatgatgagga

SEQ ID NO: 19244 - DNA, 240 bp, Glycine max
  Clone ID: 700957293H1
gaagattctggtgaatgcgtagaaaaggaaaataaagaaattagcgtgaaaaatgttgggtgtgttcagcagctccatagtgtcgccgccggaggagctcgttgccgccggcagccgtacacgtcgccgaagatgacggcggcggcgctgcggaagtggttcgaggagaagaacccctccgcagtgtcggtggaggtcggagagcatgtccagctcgcttatacccaccagaacgagtcg

SEQ ID NO: 19245 - DNA, 171 bp, Glycine max
  Clone ID: 700957294H1
cttaacattcatcttcttcgattcctctacaaattatgattaatattatgatgaactccatcttcgcctcgcataaccttcgcgtcttcggtcccggcttgaatcccttcgcaccttattgatcgccaatcactcccttttcctttccctttcctctcgctaaattacaat

SEQ ID NO: 19246 - DNA, 242 bp, Glycine max
  Clone ID: 700957295H1
ggttcttgaaaatctaatcccatgtcagtggataataaagatggtgcagagcgagaacaatggataaactgtcccttcttgaaggccaagttggctatgaggtgcatagaagtcttggcttattggtgacatgatgagaactagattgggacagggatggggcaagggccagagctagatcatggatagatagttccccaggtgatgatctgtttggtgagtctgctttcctagagcaagat

SEQ ID NO: 19247 - DNA, 244 bp, Glycine max
  Clone ID: 700957296H1
agcgcggttatggtctggtttcgaggaccagtgcctccaggagaagagaagtagtaagagaacgaaatcaagaatcgggattcttgtctcccttgctaccagcagcaatcttgcagcatcattttcaggatcaggattatcaaacgtaatccttaaggtcaaagaaaagttctttgctttcttgctctttgcactgagttatcaaaacgagacaactacttgggtgttgcaggtgaaaggaaca

SEQ ID NO: 19248 - DNA, 265 bp, Glycine max
  Clone ID: 700957301H1
cttttgggggaaaccatcaacgacaacgacagcatcaaaaggaagagaaagacccagaaacgggaacggctttcagaaactcacaagcttttcaaaaagagcttcaaagtgaaggaaaaaagtgccctttgattcttggtcaccacaacgccaagacaaacaacaaacaaagcaaaacacacacacacacacaagcaaactagaggagccaccgcaacatgttttctgtaaccgaatgctataattcaagggagttggtggtggt

SEQ ID NO: 19249 - DNA, 262 bp, Glycine max
  Clone ID: 700957302H1
aactgcaactacaacaacattcattcattcacagctgtcacgccgtgaacggaaaatggcaacggcgagacgcagtttcccgcctatcaccgaatgcaacggaacgacaccgtgcgagtctgtggccgccgacctcgacggtacgctcctcatctcccgtagctcgttcccgtacttcatgctcgtcgccgtcgaagccggcagcctcctccgcggcctcatcctcctcctctcccttccgttcgtcatcatcgcctacctc

SEQ ID NO: 19250 - DNA, 263 bp, Glycine max
  Clone ID: 700957303H1
aaaaaaaatcgtctccttttctctctgcatttgagcaaagccaaaccacgtctgagtgagtgagttccgttggatggcgacgagcaccaccagcagcggtggcggcggcaccggcacccaaacattcaagccgtaccgtcacctgaaaaccctaaaagaccacgagaacgcggtatcgtgcgtgaagttctcgaacgacggaaccctcctagcctcggcctccctggacaaaaccctaatcatatggtcctccgccaccctca

SEQ ID NO: 19251 - DNA, 261 bp, Glycine max
  Clone ID: 700957307H1
attcttatcacatcttaattgattgtttttgctcttaatctttttcaatggaggctgaggttttaagagctaccatgtcaccaccaccttttcctctgtctggttcttcaacaaaaactcacagggcttgctttcccttcaaccccatctcatggaatggcaaaacattgggtctttctcttcaggcatttcccccatcatcctctggacatgtgccatcagagaaaagtgatgatggaagtgaaaacctgacccttgaaa

SEQ ID NO: 19252 - DNA, 262 bp, Glycine max
  Clone ID: 700957308H1
gagagagagagagatggaggagaagacggagaaggtgaagtctgaggcagttcagataattgaagcgtttgaggttctgccaaagctcgtggttttcgatctcgattacactctctggcctttctactgtgagtgtcgatcgaagcgcgagattccttctctgtatccccacgccaaaggcatattgttagctctcaaagagaaaggcatcgacattgccatcgcttctcgctcgccaacggcagacatcgcaaccgctttc

SEQ ID NO: 19253 - DNA, 246 bp, Glycine max
  Clone ID: 700957257H1
aagcccctcaggcttccccttcaggatgtgtacaagattggaggtattggaactgtgccagtgggacgtgttgagaccggtgtcttgaagcctggaatggtggtgacttttgcaccaactggacgacaactgaagtcaagtctgtggagatgcaccatgaatctcttacagaggcacatcctggtgacaatgtgggattcaatgttaagaatgttgctgttaaggatttgaagcgtggttatgttg

SEQ ID NO: 19254 - DNA, 263 bp, Glycine max
  Clone ID: 700957309H1
ggaatccaatccatgcatccaaattgatagcacgtggattgattacaagatgccaacgtctaaacctcttttccccaaagagaagaaaacataatagatatctcattctcatcttcatctgcatctgcccatgtttcttgtttctgtctgcaattttcaattccaactctctctcacatgcaattctccatccaacaaaagtttctcatcatttctgtttcccataagcaattaattaaaatactgaatttggtataatttct

SEQ ID NO: 19255 - DNA, 257 bp, Glycine max
  Clone ID: 700957311H1
gaaaaactgaagcaaaagaaattagtggcgttattggagaagttagttagcaaagaatggccaacagctaagctttatctctatggatcatgtgctaattcgtttggtgtttctaaaagtgacattgatgtttgccttgctattgaggaagcagacatggaaaaatctaagattataatgagattggcggatattttgcaatcagataatctgcagaatgtgcaggcattgacgcgtgcacgtgttcccatagtaaa

SEQ ID NO: 19256 - DNA, 256 bp, Glycine max
  Clone ID: 700957312H1
cgaccagggccttacgcgtgccgagatgctcgctcttcccaccggtcccaaggagcgttccgccgatgaaatgccgttcaaccgccttggcggcggtttctcctcctatgaccgctccggcggtcgctcgcgcgaccgagacggcggcaacaacgaaggttcgtggggcggaggaggcagaagatcctacggcggattcgacgaggagcgcaggggtccgaatcctagggtttcggaactcgatcagccgtccagg

SEQ ID NO: 19257 - DNA, 257 bp, Glycine max
  Clone ID: 700957314H1
ctatgattgacgatgacggagatgaagatgctgattatgcttttgattacaatgatgatgatatctatgaagatgattattcaagtatgcaggaccaatttgacaatgtggatttgccccctggggtggaggcatcactgccttggttgaaggacatttcttctagtgaatgcaagcaggctattgctttttcccgtacagaatctagttccaaggcaaaagtggatgaaactgatgatatagtcatgcaaaagttt

SEQ ID NO: 19258 - DNA, 249 bp, Glycine max
  Clone ID: 700957203H1
gacaaatgcaaggtgttggtcaacattgagcaacagagcccggatatcgcccagggtgtgcacggccacttcaccaagcgcccagaggaggttggtgctggtgaccagggtcacatgtccaggtatgcaccgatgacacccccgagtacatgcccctcagccatgtccttgcaaccaaacttggtgctcgcctcacagaggttagggagaattggcacctgtgcttggttgaggcaagatggtaagaca

SEQ ID NO: 19259 - DNA, 247 bp, Glycine max
  Clone ID: 700957205H1
ctctgaataggaaaggaagcaatactctcgttacacatcatccttttcttcttctttcactgcttcgatgctctgatatctctctctcattcagggtagtgagctggttgttcatggctctttcctgaaacatccacacctgttcaaccatattaggacttttgtgaatgtgaaggtgaaatgggtccaagacccatatcttgataatgcagtcctgaaagagaaagatctcaaacagacaatttcc

SEQ ID NO: 19260 - DNA, 249 bp, Glycine max
  Clone ID: 700957206H1
atcaccattgtgtcttcttcactccaccttcttcattcccacccaattgtctccccattaaacaataacatgaataatattaggaatggatacagagaagcaaaatcattctgctatttccaccccaacaggtacttgttggggtgtgtcccctgtgcttgaatgagaggctcctcatactgtttgcaaaacaaggtcgccaccacaaccgttcttcttcttcatccatatcttcacacaggcttcaaa

SEQ ID NO: 19261 - DNA, 249 bp, Glycine max
  Clone ID: 700957207H1
gtgatcagggaaatgacgtggagtcaactaatatactggaattcattgaccaatgtacaaacacaatgcagctaaagcaaatacatgctcacatgctccgcacatcccgcttttgtgatccatatactccagcaaattgctgactgcttatgctatctcatcatgctcttgcctcatatatgctaaaaatgtgtttaatcaaatcccgcaaccaaatctctattgttggaacacccttattcgtggata

SEQ ID NO: 19262 - DNA, 249 bp, Glycine max
  Clone ID: 700957208H1
ctctacttcaatgtttatgttaatgggaaagtggcaatcaataacttggatttatcagccatcactggtgccttgtcaacaccatactacaaagacattgtggtgaatgcaacattgatgtctgagggctaacggttcaggttggtccagcaaatgctgatggtggaaatgccaatgcaattatgaatggcatagaggtcttgaagatgagcaactctgtcaacagtttggatggggaatttggtgttg

SEQ ID NO: 19263 - DNA, 250 bp, Glycine max
  Clone ID: 700957210H1
ctccgaaagaggatgactatgattatctcaaggaaggaaggaagcagagtgaagtaaagttcaaaaaggccctttcacgggtgaagtccatggttcagtatccagaggcacgggctcaataccggcggggctaaatgtagttgaggacttccgtcaaaccaagggaggtaatttgaatttgataaattcggaagagacagttgatggtgtggaggatttgattgatattgacatgcttttagatgatgaa

SEQ ID NO: 19264 - DNA, 248 bp, Glycine max
  Clone ID: 700957211H1
ctgagaatgagaagagaaagcggaaagaaagtagtgatgttagaagcaaaaagaagaatcagcagagaagcgaagatgaagaggcgacgaagcagttgcgtttctttgagtcggcgatgggtattgagcttcttcgctggagttggaatcccacaaagataataagtgcattttggaggtatcagaagccgctgattcagacgtgacagtattgggcaaaactattagggcagcgtttggcgctcttg

SEQ ID NO: 19265 - DNA, 249 bp, Glycine max
  Clone ID: 700957215H1
gccttctgttgcctctgctgtcggttttgttggccctggagccgctgtggtgttacctgttgttgaggccgatttgagaaaaacagctgccaaaatcactgaacgtgctacagaactatgcaagaagaatccgtaaatgacgtagcagtggaagtgctagaaggtgatcctagaaatgttctttgcgaggcagtggaaaagcaccaagcttcaatgttggttgtgggtagtcatggttatgggacttta

SEQ ID NO: 19266 - DNA, 247 bp, Glycine max
  Clone ID: 700957217H1
gcaggttcctaagtttcttagaaggtggataactccacgcgaacctccagatagtcatgtggttctggcattgggagccttacatcgaatagattttgcttcacttcgcagtgctgccattacatggaagatgtgtttgcaaatgttccaaggccattgctcgtggtcaacattggaggaccatcaagaaactgtcggtatggtgtcgaccttgcaaagcagttagcaacatgtttgctcagtgttc

SEQ ID NO: 19267 - DNA, 227 bp, Glycine max
  Clone ID: 700957218H1
ggtgaatgatttcgttatcagcacagattggtgattggtaatgtataactaggatgcaatggaggacttatggactatgcgtttgagttcattatcaacaatggcggcattgattctaagaggattacccttaccgtggtgttgatggtagatgtgacacatataggaaaaatgctaaggttgtttctattgatgactacgaagatgttcctgcctatgatgagtta

SEQ ID NO: 19268 - DNA, 246 bp, Glycine max
  Clone ID: 700957220H1
taatcagagacttaatggcaacaattatggattcataaatttggagaaataaggtaatagaaggctagctatatgcttaacacagctagttcgaaaacgagccatcgaagtatctaactgcgcatttagctaatctgtctgagccatctcttttgaaggtatgacacctgctaggttgaccgcgccccgagggagactatggtaaggtcggatagatcgagtcttttgatactcttattcttagga

SEQ ID NO: 19269 - DNA, 249 bp, Glycine max
  Clone ID: 700957222H1
gccaagtgaaagagagaagaaaagtcaaagacaatgtcagggatcattcacaagattgaggagacccttcatgtgggaggccacaagaaggaggaggagcacaagggtgagcagcaccatggtggagatacaaaggggagcatcatggtgaacacagtactgaacccaaaggagagcatcatgttggtgagcacaagccggagcaccatggaggagaagagcacaaagaggggttcctagacaagatca

SEQ ID NO: 19270 - DNA, 247 bp, Glycine max
  Clone ID: 700957223H1
ctttttctctatcttttgttctgctcagctcgatctacctaccttggttcttctctgttctgttatttcagtgcagcagcagaaaatgaccatcctcattgagcaacctgcccttgagttacaagttaaggcaacaatgtgcatgctgaagaaaccaatgagcttgtattggatggtggatttccattgccaaaggatggatatatggccccagaaatcaattcatttggccactccttcagagaat

SEQ ID NO: 19271 - DNA, 251 bp, Glycine max
  Clone ID: 700957224H1
gacgaaggtggctttgcccctaacatccaggaaaacaaggaaggcttggaattgctgaaatctgccatcgccaaagctggttacacaggcaaagttgtcattggaatggatgttgcagcttctgaatttacaaggaagacaaaacatacgatttgaacttcaaggaagataacaatgatggctcccagaggatctctggagatgctttgaaagatctgtacaagtcatttgtgtcagagtacccaattgtt

SEQ ID NO: 19272 - DNA, 249 bp, Glycine max
  Clone ID: 700957225H1
gcacaaactaccacattcaatgtgttagacaaagtctagaaacaaagactaacaaagtcatgcttggtgaccattgtccaacaacccgtaaccaaagttagaatctttgtgacaaaagctcacatggggcctctctttcagcatagtagtacttttggaagatttttgctccaaaattggaaatgagtttctctcatctcctccttcatctatgtttgttggttgcatttaatccacagctactagttc

SEQ ID NO: 19273 - DNA, 248 bp, Glycine max
  Clone ID: 700957226H1
cttttacaatggagatatggaatagttggtgggttttgcaaattatgcaatttctgggtttttttagtttttggatttcatttgcaaagtttaggactttattctcaagagcttttggttatggccaaaggttgtgaagggtgactgcagtacttggatctttgtttccttcaatgggttggtcacagttgtctctttcatattcttcctcttggtcctttcctgggcttatttatacgcatttccca

SEQ ID NO: 19274 - DNA, 247 bp, Glycine max
  Clone ID: 700957227H1
aattaatcctttccagatttttgaggctgggttactattgctataaacgcaaggcttatagtactcatacatcagatgttattgtgatgttggcggtgcccttgatgcttcttggcataccttggcctttacgcgtgaacaagtggtagtagttgaagaaaagaagacgaattggtcagctttgatcacaccaatactagtactactcatcctgcttttgctgtcgcttattggaactccaaggagg

SEQ ID NO: 19275 - DNA, 250 bp, Glycine max
  Clone ID: 700957231H1
ttctctctctgtctttcgcactttcattctctcttaaaaatctaaatcccttttgggcttcatctgggggtctgacccaggtatggcttcgaaacgcatcctgaaggtgctcaaggatttgcagaagatcctcctacgtcatgcagcgcaggtcctgtggctgaagacatgtttcactggcaagccacaatcatgggacctgctgatagcccatatgcaggtggtgttttcttagtttcaattcattttc

SEQ ID NO: 19276 - DNA, 244 bp, Glycine max
  Clone ID: 700957233H1
cagattgttcatattagatcaccatgatgcattcatcgcatatctgaggaagatcaatgaccttcccactgcaaagtcttatgccacaaggaccatccttttcttgaacgatgatggcaccttaagccattggccatcgaattaagtttgccacatcctaggggagatgagtttggtgccgtttctagagtcgtcttgcccgcagaccaaggtgctgaaagtacaatttggctaattgccaagg

SEQ ID NO: 19277 - DNA, 248 bp, Glycine max
  Clone ID: 700957240H1
caaaataaaaagacttccttttttgcaattgtcatttgtcaccaaacaattgttgttagctctcacaagcaagcttcagcaacgacaatgaagaaagtagtcttacagttggacttacatggtgataaatcaagcaaaaagctatgaaaacagcatctggcctttcaggggttgaatcagtttctgttgatatgaaagacatgaaaatgatcgtgttgggggacattgatccagtgagtgcagtgtcg

SEQ ID NO: 19278 - DNA, 247 bp, Glycine max
  Clone ID: 700957242H1
ggcgagagtgtggcttgggacattcgacactgccgaggctgcggccagagcctacgatgaagccgcattgaggttcagaggtaacagagcaaaacttaatttccccgaaaacgttgtaccggttcacctcctcctccggttcccgatttaccggcaagtgcggtagccggttccgattccatttccggttccggttcagtggtggcaggtttttcgccgacgctgatgcagggagcgccgtttcagg

SEQ ID NO: 19279 - DNA, 247 bp, Glycine max
  Clone ID: 700957246H1
caaggtcggtgaaagcgagactcaaaccaaaaagtttattgctattaatatatggctttgttttccagtgtcaaattgcattattacaataatcaaatgcactaaccacactccatcacccccattataccccttctcctctcacactaattaacactctcatcaaaaaacccttctttctttcaggttcattacttgatcagtgtcaaaagggtagttgcaaattgcaatggctaagcctgatgtt

SEQ ID NO: 19280 - DNA, 243 bp, Glycine max
  Clone ID: 700957247H1
gcgaagaatatgtattctagagattcatggggtggaccgttggagataaacgcgacggactcggcgacggaggacgagcggagcggaacctgcaggacgtcgacagggcagcgctgtcgcgtccttggatgagacgcagcagagctggctccttggccccggcgagcagaagaagaagaagtacgtcgatctcggctgcatcatcgtcagccgcaagatcttcaagtggaccctcggcacaat

SEQ ID NO: 19281 - DNA, 247 bp, Glycine max
  Clone ID: 700957255H1
caaaaaccagacatgtccgagtcggaagtagcaggtcagaggtaccgtgtgggctatgctctccaaggcaagaaagtcgaaagcttcattcaaccctcactcctcgatcacgccaaacaacacagatctatctcgtccaaatcgaccccaccgcacccttacaacaacaaggtgctttccactgcatcattcacttactccacacccaacactgctccaactagctccaacaattctcatccaaaca

SEQ ID NO: 19282 - DNA, 246 bp, Glycine max
  Clone ID: 700957256H1
cccagagatggtaccatgtacctcgatcttggttgaagccagatcataacctgttagttgtttttgaggaacttgggggagatccttcaaaaatttcacttgtaaagagatcagtgagcagtgtcttgctgatgtgtctgagtaccacccaaacattaggaattggcacattgatagctacggaaaatcagaagagttccatcctccaaaagttcacttgcattgtagtcctggccagaccatttc

SEQ ID NO: 19283 - DNA, 246 bp, Glycine max
  Clone ID: 700957202H1
caccagcagtggcgcttcgcgtacaaggtgaccgttcggccttcttcgactgtgccatacatggttaccaggacacactatacgcccacgctcaccgtcagttctaccgtaactgcgaaatctccggacagtggacttcattttcggctacgggacaaccttgatccaaagctccaaactcatagtgaggaagcctgacccgtatcaacagaacatagtggtggccgatggcacggaccagaagaa

SEQ ID NO: 19284 - DNA, 254 bp, Glycine max
  unsure (1)..(254): unsure at all n locations
  Clone ID: 700957148H1
attcggctagagcgatgatgatggagtgccaggctctcctttgcatgagaatcatgagactgacactttnatgacaaatgatgatgttttggtcgatgagattcctaatgatcagcaagatgcatttcgtcagttctgctttcaaacactcaaactaggtgttggggccagagggcacatgcaattcccagggtcacatccagtttctttaaacagggagaatttacaactgttacgacagcgttattattatg

SEQ ID NO: 19285 - DNA, 250 bp, Glycine max
  Clone ID: 700957149H1
attggtttctctctctagcttggacgagtgaattagattcatcatcaagatgtcgtctctgatagcagaagatgtgaagagcagatcagaggtgtaccacggggacgaaatgtgccaagtgaagtccaaggagcttctcaaggaaatcgccctccccaacggccttcttcccctcaaggacatggaggagtgcggctacgacagacaaaccggcttcgtctggctcaaacaaaagaagagttacacccac

SEQ ID NO: 19286 - DNA, 250 bp, Glycine max
  Clone ID: 700957150H1
ctccactgttactaaatacaggcgtcacctttgaggataaacctcaccagttccctggttgaaacgaagcgaaatttccacctgcatcatcttcaaacctgcgcttcttttgaaccgatttgtgctgttttgttagtgaagcacatcgagtgcaaactgtcgaacaggcatggcaagcctgttgacaacatcagccatcacctattctcctctgcacaatggcttcaaggatttcagaaagtcagggaat

SEQ ID NO: 19287 - DNA, 246 bp, Glycine max
  Clone ID: 700957151H1
caaaaagattcaatttcaaggtttgtagtggaagttatgatgatggttatgtgattggtgaagaggaagcaagggatatttcagggttagaggaccctgtaacaaccaaggttctgattccaggtctgcttgatgattcaaaaggtgaatctggtgctccaataagtagttgtttttggggatggaaacctaaactcaatgtgcactatgagaaggccgggtgcgataacgtcaatgatttgcctc

SEQ ID NO: 19288 - DNA, 245 bp, Glycine max
  Clone ID: 700957153H1
aactgttcttctcagttgtgccttcctatacgacatcttctgggtgtttgtctctaaatggtggttccatgagagtgtgatgatagtggtagctcgaggtgataggagtggagaagatggtatccctatgctactcaagataccacgtatgtttgatccttggggtggttacagcatcattggttttggggacatcatcttaccagggcttctagtagcattttcactaaggtatgattggttgg

SEQ ID NO: 19289 - DNA, 245 bp, Glycine max
  Clone ID: 700957155H1
gcttgttgaagaatgggcagttcccttgaaaagcattgaagatatatatgagaggtttagactgtattgtcttggaaagttgagaagcaatccttggtcagaactagatggtcttcagccagagacaaagataataaatgagctgctggaaaagattcacacaaagggcttcctcaccatcaatagccagccagctgtcaatggggaaaagtcagattctcctactgttggctggggtggaccag

SEQ ID NO: 19290 - DNA, 244 bp, Glycine max
  Clone ID: 700957156H1
atgggaatggattttagggatgcctgctggtccttacttatatgcggatgatctgattgaagtcttgaagaaaaaacatgcttctggaacgtataaaaacctagtattttatctggaggcatgtgaatctgggagtatctttgaaggtcttcttcccgaagatatcaatatttatgcaaccacagcttccaatgcagaagaaagtagttggggaacatattgccctggggagtatcctagtcct

SEQ ID NO: 19291 - DNA, 240 bp, Glycine max
  Clone ID: 700957161H1
ttaaaagttaaaaaggccaaggtcctggctctcacagagacagagagaatgagtacggtgggagaagggaaggtgagtagtaatggtcgtggatgttgcaaatcagggccaggctatgcttccccactggaagccatttctggtcccagagagtctctcatttatgtaacctctgtctacacagggaccggaatagagaagccagactatttggcgacagtggatgtggatccacactct

SEQ ID NO: 19292 - DNA, 84 bp, Glycine max
  Clone ID: 700957163H1
ggattttgctgcagtttaactctcatggctcatctgtttcttctcaatctggtattggcattggggtccagtccacaagtcttg

SEQ ID NO: 19293 - DNA, 247 bp, Glycine max
  Clone ID: 700957167H1
cgcagagagagagagatccatcgatcaattaatttccaatggccgatcagctcaccgacgaacagatctctgagttcaaggaagcctttagcctcttcgacaaggacggcgatggttgtattaccaccaaggaacttgggactgtgatgcggtcgcttgggcagaacccaactgaggctgagctgcaggacatgataaatgaggttgatgctgatgggaatggttccattgatttcccagaattcct

SEQ ID NO: 19294 - DNA, 81 bp, Glycine max
  Clone ID: 700957170H1
ggctcgagcttgctatttgtatcatcttgtgtaccttcttaagctttgagcaattcccttttacttttatttcactccatg

SEQ ID NO: 19295 - DNA, 244 bp, Glycine max
  Clone ID: 700957171H1
ctagcacgcaacctgtttgttcgtaaattcggccactccaaagtatatgcaccacaaacaacaacaccctcttaatcttctccacacaacacacaactctcaaaaattacataaattcctagcccaaaaacttgatcagtaaacaaacatgggaaactccgtgcgtgtaaaagaagcatctgtggttacacttactgagcccactccatcgagtgtgttggctctatcagctcttgattcgcaa

SEQ ID NO: 19296 - DNA, 241 bp, Glycine max
  Clone ID: 700957172H1
ctttctccgatggctaatccctcactcttgttcttcagtctccacctattatccgccaccgtagccgccgccgaacggatcgacgatgaagacgaccttctgatccgtcaagtggtgccggatgcggaggaccaccacctgctcaacgcggagcaccacttctccgccttcaagacaaagttcggcaagacctacgccacgcaggaggagcacgaccaccgcttccgtatcttcaagaaca

SEQ ID NO: 19297 - DNA, 242 bp, Glycine max
  Clone ID: 700957173H1
caattcttccccctccacccacccagcatatttctctattcctatttattagcacccctcacattaccttgtgtcaccaactactttgactcctttaccataccattacaataattatcaaacctaaccagtaaaaatggtgaccgtggaggaaatccgcaacgctcagcgttcccatggacccgccaccatcttggccttcggcaccgccacgccgtccaactgcgtctcccaagccgatt

SEQ ID NO: 19298 - DNA, 239 bp, Glycine max
  Clone ID: 700957174H1
cccctccaagcaatgcaggcgggtaccctccgagcaatgcaggctatgcccctccgagcaatgcaggctatgcccctgcaaatacagctggatattcttctccgaacgccgcaggaggttaccctcctaatgcaggtggtggctatggtcctggtggtggtgtgcctcagaataactacgcagggaacatgggagggccaccatcaaaccagaacatgggagggtttcaacaaaattca

SEQ ID NO: 19299 - DNA, 246 bp, Glycine max
  Clone ID: 700957181H1
acggtggattacctccagaagccaactacttgtttttgtggggattatgtggatcgagggaagcaaagtttagaaacaatttgccttctccttgcttataaaataaaatatcctgagaactttttcctgttaaggggaaaccatgaatgtgcttctataaaccggatatatggattttatgatgagtgcaagagaaggttcaatgtaaggttatggaagacatttacagactgcttcaattgcctg

SEQ ID NO: 19300 - DNA, 117 bp, Glycine max
  Clone ID: 700957183H1
gattgacagagagagagaggaaggagcgcgaaaagactaaattgaccttggatcttcgtctttcctctctctccgattcgtttttcgttggtcttctaaaagcttcttccacacaac

SEQ ID NO: 19301 - DNA, 244 bp, Glycine max
  Clone ID: 700957184H1
tcgacacagaagaagcatatccctacaccggaaaagatggtgtctgcaaatttacagctaaaaacgttgctgttcgagtcattgactctatcaatatcactttgggtgctgaggatgaattgaaacaagcggttgcttttgttcggccagttagtgtggcatttgaggtagcgaaggacttccgattctacaataatggagtttacactagtaccatttgtggtagcacgcccatggatgtaaa

SEQ ID NO: 19302 - DNA, 223 bp, Glycine max
  Clone ID: 700957186H1
gcagcattgggagatagaaagagagagagaaagagagagagagaaagacccttacccttctctatcgctcgctttcctttgacgcttctgacccttgctttgtctgcgtcttccttctttctttctttctttctctgtgtgtcgtaatggctctcccagactcttcttcccgtcgcaactccctgatcccctccttcatctactcctcttcctccaaaacgct

SEQ ID NO: 19303 - DNA, 241 bp, Glycine max
  Clone ID: 700957187H1
caccaggcgcacgttagcacaaactatcatggccacggcaacagcagctgccacctcgtcctttatggggacgcgtctcctggaggctcactccggagcggggcgagtgcacgcccgattcggcttcggcaagaaaaaggctcccgccccaaagaaagcctccaggggatcgggccgagacaccgacagacccctttggtatccgggcgccaaagcgcccgaatacctcgatgggagtctt

SEQ ID NO: 19304 - DNA, 241 bp, Glycine max
  Clone ID: 700957188H1
gttttctctctagattctgctcttaaacgccgtcgttttcaaactctttttttccccttcgcttctctgtctttgtaaccgaaaggggggaaaatataattaacaccgatttcgcgaccaattcttcttctgcgttgaattgggacaacgagaaattggatctcagtttttggcaggaaataaaaattgcatttgagtgtaaaataacagagtatagtgtagggccttgttcttgatactg

SEQ ID NO: 19305 - DNA, 236 bp, Glycine max
  Clone ID: 700957190H1
gttcagttcacatgtggcaatattcactaccttgagtcaatcctataaccaaatatgcattgatgcttactccagtcataaatgctgtaaaaaacaaagtttcatggcattacaacaaaaggttcacacatatgtttgtcagtacttccatgctcattagcactcttattgtagccgtggcaattcccttgtttggatatctcatgtcactcattggggcattactaagtgtctca

SEQ ID NO: 19306 - DNA, 238 bp, Glycine max
  Clone ID: 700957191H1
gtgttgtgtccctcttttaagctatttccttctcttaacacaattggttgtgccaattgctctagtcaccaaccaattaacaaaggtatatatatcatcatatcatcaccaaatgaaaaatattgggttgttttttcttgtggtggtggctacttttgtggtggcagccacagctggtagcttttaccaagactttgaaataacgtggggtggtgagcgtgccaaaatctatgagaat

SEQ ID NO: 19307 - DNA, 238 bp, Glycine max
  Clone ID: 700957192H1
cacccattgatgacaagcaaccccattgcatggaagcctaagaggaggagaagacgaagaggacaagggtaactgaatcgccgcttctgcagcttcgttctttcgtttttgtttcatctttttagcttcagtgggtaaataaaaaatggaggttttggtgggtcccgctttcaccatcgacgttccctcgtctccgccgcagcatgccggttccgatgatcggatctttcttaacgtg

SEQ ID NO: 19308 - DNA, 237 bp, Glycine max
  Clone ID: 700957194H1
agtaaaggaggtacataaaattactgttttggacataagactggcaaatgcagataggcatgctgggaatattttgatcagcaaagaggaggacaacaaccagtctgttctgattccaattgatcatggatactgcttgcccacaagttgtgaagattgcacctttgaatggctttactggcctcaagctcgccagccatactcctcaggaactattgactacataaagtcactgga

SEQ ID NO: 19309 - DNA, 123 bp, Glycine max
  Clone ID: 700957147H1
gatttggctctcctccggttagggggatggaggataaaaaaccactgctctctttgttttcacttttgagatttttccaacctgaagactccctcttcttggttggttttttctccaaacaaa

SEQ ID NO: 19310 - DNA, 236 bp, Glycine max
  Clone ID: 700957196H1
ctttcttcttcttcttctcttcttcttcaagattgcgacgacgatccaagtgatagacactcgttgcgatggaacttgtagctgaatccgagcgaactctgtacccatacgtgactggatcctctgtagtcgctatcaaatacaaagatgggattctaatggccgctgacatgggaggttcgtatggatctaccctgcggtataagagtgttgagcgtatcaagcctattggaaag

SEQ ID NO: 19311 - DNA, 249 bp, Glycine max
  Clone ID: 700957201H1
ggcttatggtggatacctaggcacccagagacgaggaagggcgtagtaagcgacgaaatgcttcggggagttgaaaataagcgtagatccggggattcccgatataggtcaacctttcgaactgctgtgaatccacgggcaggcaagagacaacctggtgaactgaaacatcttagtagccagaggaaaagaaagcaaaagcgattcccgtagtagcggcgagcgaaatgggagcagcctaaaccgtga

SEQ ID NO: 19312 - DNA, 261 bp, Glycine max
  Clone ID: 700957094H1
gcaaggtgatagattctcctccgttaccataccccttctcgatgatgaaaaattgcaccaagtgaatgggtcagattatgctttggtgtccaaaacttgtgttctgcacacagctcatgtgggtaatacctcctttttcatgacctgcttccatctcattaatgccttctcaggagttggtattatttccatgccttatgcactggcatctgggggatggttaagcatatccctactatttgtgattgccattgcttgttg

SEQ ID NO: 19313 - DNA, 261 bp, Glycine max
  Clone ID: 700957095H1
gctacaagcactccttggaagaagatgttgcagctcatacctctggccatctacgccagcttttagtggggttggtgacctcatataggtatgttggtgatgagatcaatccaaaattggcacaaactgaggctgaaattcttcatgatgctgtgaaagagaagaagggtagctatgaagagaccattagggtcttgaccacaaggagcaggacccaacttgttgcaactttcaaccgctacagagagatccatggcactt

SEQ ID NO: 19314 - DNA, 260 bp, Glycine max
  Clone ID: 700957101H1
atttcttacctcttggcatggccattcaaatgtcttcttttgtctttgtttctcttacaattttattttgcttctcttccttggagaagagttttgcctttcaaacaacaaaggagtccacagaaagcaacaatcttcatcaatatactcatcttgttcacctcagctcactccttccttcatcttcctgcagctcttctgccaaaggtctcaaaagaaaagcatcattagaagtggtacacaaacatgggccatgctcc

SEQ ID NO: 19315 - DNA, 253 bp, Glycine max
  Clone ID: 700957102H1
cctcttagtcccaattttctagggttttattcattttccgatggcttctgcagatgttgagtaccgttgctttgtcggtgggctcgcttgggccactgacgaccatgccctcgagagagccttctctcagtacggcgaaatcgttgaaacgaaggtctgtttgttgcaggcatcacatctgatctcacacgattcggattcggaattttctcgatcccgttctgatctgtgatctctgatctgtttgcgttac

SEQ ID NO: 19316 - DNA, 255 bp, Glycine max
  Clone ID: 700957103H1
ggcatcccggctgctcttttcaaagtctcgttaccataaagtgtgatatcccatgaaaccttcccaaccctccacaccttatattcatggcaccactctagtagagcaacattagaatcatatttgccagctccaactccaaatatcctagacatctggagcaaatggatcaataaattctgggatgaggattctgaatgttggctgctgtgattaatggccttttatcccctagcttggaaacggatgtgaata

SEQ ID NO: 19317 - DNA, 253 bp, Glycine max
  Clone ID: 700957104H1
cttatgatgttgatctcttgggccactgggattgctgaagccccaaagactgatcctgagttttggaagtctttgttccctgttgctgttgcacatacaattggacatgtagcggcaacagttagcatgtcaaccgttgcggtatcattcacacacattatcaagcgtggtgaacctgcttttagtgttctggtttcaagatttcttttgggtgagagctttcctgtgccagtctatctgtctttaattccaa

SEQ ID NO: 19318 - DNA, 252 bp, Glycine max
  Clone ID: 700957105H1
gctgttttgactatacaaatgctttagctgacttagtggttggatatatgggagtgccaaaatattctggaatcggcatgacacaacatccacaatatgtaacagtaaggaatgaacgtggaagagagatgttgagtcttatagagaacttactggagattactccaacaattagtactggggataggcgaccatttgtcatggagactgttaaggctgatgatgaagctaagttaggaagaggtccttctc

SEQ ID NO: 19319 - DNA, 252 bp, Glycine max
  Clone ID: 700957106H1
catcaaactcatcaaaatgaatctgtaccactcctccaccaccaccaccacccgcaccatcttcaccgtcatattcctcctccttgcaatattattcactctcacaccccacaaggccaacggtgccacgtgtcaccctgaggaagaagcgggcctgttgggcttcaaatccggtatccgatccgacccgtccggcctgctcagtaactggatatcgggtacggactgctgcacatggaccggagtagaatg

SEQ ID NO: 19320 - DNA, 248 bp, Glycine max
  Clone ID: 700957107H1
gattgctgaaactgcaaaacgggttggaacaattgtgattgctgatgaagtttatggccatcttgcatttgcgggcaagccttttgtgccaatgggagtttttggctctattgttcctgttctgactcttggctcattttctaagagatggatagttcctggatggaggcttggttggtttgtgacaaatgatccatctggcacttttagaaatccaaaggtagatgagcgcttcaaaaagtactttg

SEQ ID NO: 19321 - DNA, 120 bp, Glycine max
  Clone ID: 700957113H1
gagagcgaggaggtttagcgtggtgggcgagctagcccccctccccatcaattcaaactaaaatgtctatgctagcttcccccttccagctcctggaactgaacatcatatccgcccaag

SEQ ID NO: 19322 - DNA, 246 bp, Glycine max
  Clone ID: 700957115H1
gttctatgctgaccttgctgaaaaattggacgcacagcaaaaggctcatgtgtctcttcccatggacacattcaagagttatgttcttaaggagccgattggagtcgttgctttaataactccttggaattatctctctgttgatggctacgtggaaggttgctcctgctctggcggccggctgtgctgcaatattgaagccctctgagttggcatctgtgacatgtttggagctcgctgaaattt

SEQ ID NO: 19323 - DNA, 251 bp, Glycine max
  Clone ID: 700957119H1
aattaatcctttccagatttttgaggatgggttactattgctataaacgcaaggcttatagtactcatacatcagatgttattgtgatgttggcggtggccttgatgcttcttggcataccttggctctttacgcgtgaacaagtggtagtagttgaagaaaagaagacgaattggtcagctttgatcacaccaatactagtactactcatcctgcttttgctgtcgctttctggaactccaaggagggtc

SEQ ID NO: 19324 - DNA, 250 bp, Glycine max
  Clone ID: 700957121H1
gtgcttgcagtgagcttaaggataagttagaggattatcatgccttggaagaaaaattagaggaaaaagaggctgagatttcatcaatgcacaatgctttgttggcaaaagaagaaaactccctctttccagcatctcaaatgagtgatctctttgacaagatagataggatcaaaatccctattgtagagtccaaagaagatgatttggagccacatacttcagccactctgagaaaactcttttatat

SEQ ID NO: 19325 - DNA, 250 bp, Glycine max
  Clone ID: 700957122H1
cttttcttcaccagattgatagccagaaagagttttttgatactctgaaaattctactctttcaagtgaagcttcagaatactttccttccacatcagttagaagagcctctagagaactttttgatcttataaagtctgtttcctcaaagtcactgcatactagcttcaaggcctgaacaacttctcccatgaaaggacgttgggagacttctggttgcacacacatggatgcaattgctgcaactttt

SEQ ID NO: 19326 - DNA, 152 bp, Glycine max
  Clone ID: 700957123H1
caataataacccttctaagggcattggggcctcttcctcatcctttggtaattctggagtaccctccaattctataccttcaaaccctggattttcacagtccatggacaggcccagattcctgttggttatcaaggacagtttccactgtc

SEQ ID NO: 19327 - DNA, 250 bp, Glycine max
  Clone ID: 700957124H1
gtttgttgttgccccaggaaatcatagagagcgaggcataaacatcaatctctctgtgaaaaaaatggggacgacgaagaacaacaacaacaacttcaattctacctcaaaatctgataacagtgccaatgacaacaaaaacaacacacgtgtggtgttgaatgtctacgacctcacccctctcaacaattacctttattggtttgggtttggaatctttcactccggcattgaagtgcacggtaaggag

SEQ ID NO: 19328 - DNA, 247 bp, Glycine max
  Clone ID: 700957125H1
cttaatgacactggaattcagtttataaacgtaatcagcatgtataggcagctacaatattttaaagagtaccaaaaccgagtgagagctataattggagcttcacagactaagagcttagtgaatcaagcactagtactcatcactgtaggtggcaatgattttgtaaacaactacttcttggtgcccaattcagcaaggtctcgccaatacccattacctcaatatgtcaagtatctcatttctg

SEQ ID NO: 19329 - DNA, 246 bp, Glycine max
  Clone ID: 700957127H1
aattaatcctttccagatttttgaggatgggttactattgctataaacgcaaggcttatagtactcatacatcagatgttattgtgatgttggcggtggccttgatcgcttcttggcataccttggctctttacgcgtgaacaagtggtagtagttgaagaaaagaagacgaattggtcagctttgatcacaccaatactagtactactcatcctgcttttgctgtcgcttattggaactccaagg

SEQ ID NO: 19330 - DNA, 245 bp, Glycine max
  Clone ID: 700957131H1
tttaaatcaagggttgattgaggaatatgattcaccaaagaaactgcttaagaacaagtcttcatctctagctcaactagttgaagaatacacaaggaggtcaaattctggttttggaaattaaattgaaaatgaattagtattaacctcgaaccagacatgtctatatatatatatatatatatggtcaccgttacacttcatgtagtgttctaccttactggactatggtagagattttactc

SEQ ID NO: 19331 - DNA, 254 bp, Glycine max
  Clone ID: 700957133H1
cgccgttccgccccttgaaatctctatcaacgattctagccagctcacgctctcgtttcgcggccaagtctatgtcttcgacgctgttacacctgataaggttcaagcagtgttgttgctgttgggaggaaatgaactaacttcgggttcgcaatgtgcggagctatcatctcaaaatcagactggtgaggaggaatatcctgcaaaatgtagtctaccacagcgagcagcgtcattgaataggtttcgtcaga

SEQ ID NO: 19332 - DNA, 248 bp, Glycine max
  Clone ID: 700957134H1
tggtgatggatttggtgagatggagagcgggcgactacacaaggaagatttagaagtggatggagattcaaaaggagagaaggatctacaagttggggtcactccctccctttttgctggctttcggtggtaatgttgaggccattgaacatagatggaaccaacatggtcttggaggggataatgtaagaaatagttgtaggactctgcatcctggtccagttagtttgctacattggagtggtaaa

SEQ ID NO: 19333 - DNA, 246 bp, Glycine max
  Clone ID: 700957138H1
aactaactcactcgcgccatggctgctaccatcatcaccacatgcaagctctcattgcttttgagtcttctctcagtttcacgtttgctgggtgtgaggtctgataccctacagaatgtcggcgcaattccccccacatgcaagcgcatatagtgtcccagctatgatgtcattcacgtaggcaacggctacgaaatccgtcgctataattcacccgtttggatttcaaacagccccattcaggac

SEQ ID NO: 19334 - DNA, 248 bp, Glycine max
  Clone ID: 700957139H1
gatcaatatggccaccaccactacccagcctccctctaatatctgttttttccttctgttgttgcttctagcacactttcatttgggcataagccaacttgagctgaattactactctaaaagctgcccaaaagctgaagagatcatcaaggaacaagtcacacaactatataacaagcatggaaacactgccgtttcgtgggtcagaaatctcttccacgattgcgtggttaagtcatgcgatgcat

SEQ ID NO: 19335 - DNA, 248 bp, Glycine max
  Clone ID: 700957140H1
ttcttttcatctttgctcttctatccttcacttcccatgcttctaatgtcaatgacttctgtgtggcagacctgaagggtccagatagccctactggctatcactgcaagccacctaaaacagtaacatcacatgactttgtgttccatttaggccctggaaccacttcaaacgtgttcaagtccgcaataacctctgcatttgtcaaagattttcctgctgtcaacggtcttagcctttctgtagca

SEQ ID NO: 19336 - DNA, 124 bp, Glycine max
  Clone ID: 700957142H1
gaagctgggatctttgctctccatgcatggatgttacgaacatcttaaaaaagctagtggtgataaggttgggaatgtagatggagatgcagaacaaggaatttatgaagcttctacaccccca

SEQ ID NO: 19337 - DNA, 251 bp, Glycine max
  Clone ID: 700957093H1
tagaaatggagggtatcatgatttggagatgccggaccgcgaggtgaatgagtcggtgaatggaaactcaggtgagggaaacgatgcaatggaagtgggggaagagtttgatagagggataatgtctaaagagcaggtggtggatgtatcagatggggtgaactacagtgtggctggattgttgagtggaggtcagaagtgtggcggcaatgatgatataggcttggtgttggatccatctggttggggat

SEQ ID NO: 19338 - DNA, 243 bp, Glycine max
  Clone ID: 700957145H1
cacccttacaacgcaacaacataacgttgctaattgctttgcactcctcttatggttgcttcctttgtttctcattagctgttttggtttttgtcttagttctacacctttcctcatttccgcagtagcaacctgctaaccaatctctctgagaaaaaaaaaatggcgtcgaacgggaatggcagcgttgcgaacgggaacgggaccgctaggaacggactggcgaagattcagacgcacaag

SEQ ID NO: 19339 - DNA, 263 bp, Glycine max
  Clone ID: 700957053H1
gaaaaggtatcaaaaagatttctccaactggtgtggcgagtgcaatcgtgagaaaaaggaaaggcagcgctccacagttgctgctaccaaattggatttgttcaggaggcaaggtgaatccactgcataatctgttttgctcagtggatgattgtaaaatgtacctgcaatcatttgtcaatacaaataagctatgattcctgatccaggtgtatgtacaaggtgctctattgagatagttttcttcaagtaagctttggatt

SEQ ID NO: 19340 - DNA, 165 bp, Glycine max
  Clone ID: 700957054H1
catcatcatagtggtgtcctttctctgctctttgcactctctgacacatttggtgccttgtagagcgtgttttggcaggaaggtggtatggcgaaggacgttgaggttgctgagcgtggctccttctctgggatggactaccaggagcctccaccagcaccactc

SEQ ID NO: 19341 - DNA, 262 bp, Glycine max
  Clone ID: 700957055H1
ggggctacccgctgagtttaagcatatcaataagcggaggaaaagaaactaacaaggattcccttagtaacggcgagcgaaccgggcaaagcccaccatgaaaatcggtcgccctcggcgtccgaattgtagtctggagaaggcgctaaaggagttgaaagccaaggcgcaacagaagggaagctttggaggttctgggctcaagaaaagtggaaagaaataagggctctttatcatgattgtatacatccaatattgagcc

SEQ ID NO: 19342 - DNA, 262 bp, Glycine max
  Clone ID: 700957056H1
cactgctttctcctggctcagaaacatcttccatgactgtgctgttcagagttgtgatgcttcactgttgctggactccacaagaaggagcttgtctgagaaggaaacagatagaagctttgggttgagaaatttcaggtacattgagaccatcaaagaagctttggaaagggaatgcccaggagttgtttcctgtgctgatatcctcgttctctctgccagagatggcattgtttcgctaggaggtcccatatccctctta

SEQ ID NO: 19343 - DNA, 147 bp, Glycine max
  Clone ID: 700957058H1
gttcgatgctgatatggggtttcgaagaaaagtccatgccgttttgtgcagtcacatgtgcaatatgacatgccaaacatttactttgggatgaaatatagtattatatgtatgtttacctcatcaatgatgcaaaatgtgaattac

SEQ ID NO: 19344 - DNA, 262 bp, Glycine max
  Clone ID: 700957059H1
cctttctcctaccttcttcctctatcccctgacttaactttgctaccaaacaggcaacaaggctcaaggaactagtattgtttctatcatgggagtttgtttgagcacccaaattaaagctgggttaaattcaaagcatgttagtgccgatgcaaaagatcacagcagtccaattagcaataaaattacaaaagatgtcagcacaccaatcagtacagtctcagaggtatcagtgcctcagactcctcggattgagggtgag

SEQ ID NO: 19345 - DNA, 238 bp, Glycine max
  Clone ID: 700957061H1
gctgctgcatctctacatgagaaaaacaagtgggctagcttaaagtctgtaactatatcaactgcattcatcggtttgtctctcatgtctgtcattaactttgctacagcagagattggggctttacttattgtcccgatttgtctgatggctagaccattgaaacttgatattcaagctaggagctggagtaccttactaagggcctcttgcaatatggctatgaggtttattgtgt

SEQ ID NO: 19346 - DNA, 263 bp, Glycine max
  Clone ID: 700957062H1
atgatattggagagtcttgtgtctgagccgcataacagaagtttgctgctagcatatgagaatgcttttgcagagatagttttcactgatggaagatattccgatacatttgcgaggatattgtatgaactaacatctagaccaagtaacaaagtggcagcggctcgtggcatatggggtatgtaaacatcaaactgtgaaatgactttgattagtgatcagtgctatatatagttttgcgacttggatggcttttggacgac

SEQ ID NO: 19347 - DNA, 258 bp, Glycine max
  Clone ID: 700957064H1
caatgaaatactaattggaggctggaatgagctaaaaaacctggatgagtctggtaaacttgatgagaaggttgactttcttattactgaagcaccattatttgaagccccatcaccacctctctctggagaggatgatgtgtccagtagtggaccacttgatgaattggcaattattgtccgtaaaatgaaagaatctattgctgtgaaggatcggctgtataaaatgcgcaggttcactaactcttttctcagctc

SEQ ID NO: 19348 - DNA, 260 bp, Glycine max
  Clone ID: 700957065H1
cactggaagatggaattcgtgagattttttgattgctggaatgattttcaagaaaaggccacaacccaagtcttgattgttttggacaagcatgagaaccgcgatacttatgtggtagctttccgaggaacggaaccctttgatgcagatgcatggtgcactgaccttgacatctcatggtacgggattcccggcattggaaaaatgcatggtggcttcatgaaagccttagggctacagaaaaatgtggggtggcctaa

SEQ ID NO: 19349 - DNA, 265 bp, Glycine max
  Clone ID: 700957066H1
gttgagtggaaacgtgaaattagggttcatcgaggaggaagaagaagaagaagatgtcgtacctgttgcctcacttgcactctggatgggccgtcgatcaagcaatcctcgccgaagatgagcgtctcgtcgtcatccgtttcggccacgactgggacgaaacctgcatgcagatggacgaggtgttggcgtcagtggcggagacgataaagaactttgcggtgatatacctggtggacatcacggcagtgccggatttcaacac

SEQ ID NO: 19350 - DNA, 265 bp, Glycine max
  Clone ID: 700957067H1
tttttaaataatgtttttgtgtctctctccgtatatcatgaacacaataatagacaacccctgttaaattaaatcaactttaggacaaaacttgtcccttaaaaagagatagtaactccaactccaagtcacatcggtgacaaagttagaaacaaggagaaagaaagaagatggcaggaaagaaaatcccagatgtgttgctgaattcaggacacaaaatgccagttataggcatgggaacttcagtggagaatcgtccatcaaa

SEQ ID NO: 19351 - DNA, 258 bp, Glycine max
  Clone ID: 700957069H1
ctagcacataaaacttgctacgcgcagtaagctataactcatttgaggctctgggagaattgagaaatggcttgagatgttgaggttcaatagcaaggaggagagtactctgccaaagactaccatgaccctcctccagcacctttgttcgacccagaggagctcacacagtggtccttctatagagctctcatcgctgagttcatagcaagccttctcttcctttatgtcactgtgctcaccattattggctacaaa

SEQ ID NO: 19352 - DNA, 260 bp, Glycine max
  unsure (1)..(260): unsure at all n locations
  Clone ID: 700957071H1
gttcttgctctgggtgggtaaagatggtatgtngtagtagagtcttatgcttgtttctggcggcatttttgtggtttattgctcaacatgcttttgtaagttgtgctttgacatttgagttgcaaagcaaaattgctaaagccaaccaagagggaccttacctaggtttaatcataccaaattcttttgaactagaccctcttcttcagaatcctggctacacagctagtgacaccatcatagacttcgctggaaggaga

SEQ ID NO: 19353 - DNA, 130 bp, Glycine max
  Clone ID: 700957072H1
cggacagcaacacatgggagtttatggaaatgagtggtggtttagtagtttctgtgcaaattggcgccgtttaagacaccagaattcctgttctatgcctccttttgagtgaaaaagaagagacatcaaa

SEQ ID NO: 19354 - DNA, 255 bp, Glycine max
  Clone ID: 700957074H1
ctcgagccgttaaagcgcaaaaaccattctccttcggtgctcttgaaaacatgggaaaacagagcacagaattctctgccctcaactgcatcgacctctccaaccctgacatcaaccaatccgtcaatttactcaaacaggcatgtttggattccggttttttctacgttgtcaatcatggaataagccaggaattcatggaagaggtttttgcacagagcaagaaattcttctctcttcctcacaaggagaaga

SEQ ID NO: 19355 - DNA, 260 bp, Glycine max
  Clone ID: 700957075H1
ggcagactagtatccgatcctctgtcctctcgaagctttcatcgttcaacatattctcatcatctcagtcatgggcctgctatcttgttttaggtctaccgtcctgagaaaatgttccaaaggaagctctggcatgtcaagattcctgtatacgaacaattttcaacgaaacttgatttcgtctggtggcaatgaatcgtattatgggtattttaacaggagatcatacacttcactttatatgggaactggaactgtgg

SEQ ID NO: 19356 - DNA, 264 bp, Glycine max
  Clone ID: 700957080H1
ggaatatcaacatcactgacttctattacgcaatacagtgtacacccatttcaacttgcaaaatggtattgctctcgagccgaatcggctcgtgatttggttattatcttcatagctcaatgagaaagtcgacatgaaccaagagtagcactacattactactatccattgagccaatcaatctctctaccattgatgcaatacaacctccgattctgaatagaatatcccatgatcacgatttacaacagagattgagaggca

SEQ ID NO: 19357 - DNA, 264 bp, Glycine max
  Clone ID: 700957081H1
gtgtttctgtaaccatggcatccaccactctatcccctacaaccccttctcagctatgaccaggaaaaagtgggattttcagttcctcacaggcacttcttgtgaagccagtgaagaggcagatgatggggaagagcaagggattgagaattgcatgccaagccaccagcatttccgctgatagagtccctgacatgggcaaaagacagctcatgaatcttcttcttcttggtgccatttcactccccactgctggaatgctta

SEQ ID NO: 19358 - DNA, 260 bp, Glycine max
  Clone ID: 700957082H1
gtgatgcttttacattctatatagtgttgaagaagttaaatcacatattcttgagctaagatggacaaatcatccaactttgatgaaaattctgatgtggggtatcacccttcttcaccttccaatactcctgctttttccccaatgagtagagaaccttttgcatattgcccaacatggacaagctcagagtctgagactgtagacgagagcagctatgccagtgaaccttcaccttctcggtggagagttaaacagga

SEQ ID NO: 19359 - DNA, 258 bp, Glycine max
  Clone ID: 700957084H1
gttccagctacagcctctgagttgtttggtttgagaaactttggtgctttgtacaatttcattactatagcaaaccctgcaggaacactggttttctctagtctcattgccagcaccatctatgatgctgaagcagagaaacaacatcgccaaaatatgatgttgcgtgtgctgaatgctagtgagcctctaaagtgcgaaggttccgtatgtttcttcctaacttccatgatcatggcaggattatgcgtggttgga

SEQ ID NO: 19360 - DNA, 87 bp, Glycine max
  Clone ID: 700957085H1
tttctctctcatgttgcgaagaggaggcaccatgacaagcactgttctgtcttggcttgtcatgctctactcccttctcagtccatc

SEQ ID NO: 19361 - DNA, 124 bp, Glycine max
  Clone ID: 700957086H1
atacgatacaaattttgaatgacacaatgacttctgaattcccgatgcatttaccataaagaacttcatgcaagttcagttctatctcaaatctctaactctcgaacacattccaaaccaccca

SEQ ID NO: 19362 - DNA, 263 bp, Glycine max
  Clone ID: 700957052H1
ggcggggctaccgtgagtttaagcatatcaataagcggaggaaaagaaactaacaaggattccctcagtaacggcgagcgaaccgggaaaagcccaccatgaaaatcggtcgccctcggcgtccgaattgtagtctggagaagcgtcctcagtggcggaccgggcccaagtcccctggaagggggcgccagagagggtgagagccccgtcgtgcccggaccctgtcgcaccacgaggcgctgtcggcgagtcgggttgtttgg

SEQ ID NO: 19363 - DNA, 220 bp, Glycine max
  Clone ID: 700957087H1
gtaagggcattcttgctgctgatgagtcaacatggacaatttgcaagcgtttggtcagtatcgatgtagagtatgttttctccaataggcgtggtcttagggactatgcatttcacggatcgctgtgctcttaaatatcacagtggtggcatcctctctgttgatactctgtaccagtgtacagtggcaggtactctctacagttctgactatcctcatt

SEQ ID NO: 19364 - DNA, 191 bp, Glycine max
  Clone ID: 700957088H1
ttagagacccaaacccttggcgtcttcgagacccgttgtgttctctcttctctctctcttcttttgtgtttgcgctttccctctcttcttcgttccttttagggttttctcaactcttcgatttggggcttaaaccctcgccgattcagattgcggatttagggcttcccgttctctattccgcctccaaa

SEQ ID NO: 19365 - DNA, 256 bp, Glycine max
  Clone ID: 700957089H1
ggcaaggagagtgaggctagaaagaaagagtaaaagtaagagctagagagagagggtaccctctgcttaatttgcactgggtttgtgtctgttacagcacttttaggagttcttctattctagtaacctctgccaagcaacaagacaagtctgaaaatatgatagagatgctgcctccttgctggcgatcgttcgggaagaaacagtaatgctactggcatgggaaagaaggggatttttgtttctgcgatcaaaa

SEQ ID NO: 19366 - DNA, 53 bp, Glycine max
  Clone ID: 700957092H1
tgaagtatcatatcaaaattggaactctgcagtgtcctaaaacttgcatactc

SEQ ID NO: 19367 - DNA, 269 bp, Glycine max
  Clone ID: 700957009H1
ctcaattcaaaagcagcacgttggttctcaccatctaagttttttcatggaactgattggattgaggttactggaattccttactttcctggcgtgccgaaacaccataggcacaaaaagacaatacttaattggcaataaaagtaatgagttgcgaaagcaagcaatataaattaattaaaaagtaatgattgtgcttctttattctttaattatgtttatttcattacttaactttagagttagctacattttgttatctcaaggaa

SEQ ID NO: 19368 - DNA, 226 bp, Glycine max
  Clone ID: 700957010H1
attgtagcaacagttttcacttttgttccattattagttcttatagaaatatttcttcagcaattatggctagcttgaatgttgcatgtgtggctgtaatgtgcatggctatggtgagtgcaccattgatggtgcaagccgtcacatgcaacgtgcctatcttaccctgatgcagggtggatcggtaacgatcggattcgtgctgtggcggagtgaggaacattct

SEQ ID NO: 19369 - DNA, 267 bp, Glycine max
  Clone ID: 700957012H1
agaaaaactatatcagcgattctcgtgatcttcggcctcgaatcgagaggtaaaagacccaactccgcctctgtttttgtgatcgaaaaccataaaaaagttgtttccgatcactgccttaatcggattcagctgttgttcctcctcctcaatttcgaatattgaaaggctttagttgttgattttggtcaagtctctagtcaacctgtgaattttttattcaagtttaaaaatatatagagcaatgagtgttgttttcgaggaaca

SEQ ID NO: 19370 - DNA, 250 bp, Glycine max
  Clone ID: 700957014H1
caatgtgaatgctgagattgatcctcagaagctggttgaattcttcaagcagtttggggaggttgatgatggtcctcttggtttggataagaacactgggaaacctaagggttttgcgctttttgtgtacaagtctgtggagagtgccaagaaggctttggaagagcctcataagaactatgaggggcatactttgtattgtcagaatgctgttgatggtcctaatgggagcaaggggtatcatcatcag

SEQ ID NO: 19371 - DNA, 172 bp, Glycine max
  Clone ID: 700957015H1
gaattattaaattcaaccgccattacataacactacattcttttgattcactcaatccgttctctgctctctttcttcttctacacccacaccggaggagagaaaaccaatatcactcttcaccgttagggttagggtttcggtttccccctaatccaatcgcgcagagcag

SEQ ID NO: 19372 - DNA, 272 bp, Glycine max
  Clone ID: 700957017H1
actacttcctcttgcttgttctcgtcggtgcaactacagcttctggggctgaactatgtgcagacttttactcatgcacctgcccaaacttgttgcctatagtgaagaaaggagtggccaaagccattcagaaagaaccacgcatgggcgcttccttactccgattgcatttccatgactgctttgtaaacggttgtgatgcatctatactgttggatgatacaagcaacttcattggggagcaaacagcagcagctaacaaccaatcagct

SEQ ID NO: 19373 - DNA, 269 bp, Glycine max
  Clone ID: 700957018H1
gcagcctacagccatgaatgcatttgagttaatctccatgtccaaaggactgaaccttgaaaacttgtttgatactgagcagggatttaaaagggaaacaagattcacctcaaaatcccctgcggatgagataatcaacaagattgaggaagccgcaaaacctcttggctttgatgtgcagaagaaaaattacaagatgaggcttgcaaatgtgaaagctggaaggaagggaaaccttaatgttgccacagagatatttcaagtggcac

SEQ ID NO: 19374 - DNA, 266 bp, Glycine max
  Clone ID: 700957019H1
agctactctgatcaaaacaaggggacatctttgtttgtgatgagcatgaacatgaacatggctctgtgtctgatgttccttgttctgcacatagcttggcttgtagcatcatcggatctccgagctggcttttactcaaaaacatgtccaaaagcggaagtcatagtccgagatgtgatgaagaaagcccttattagggaagccagaagtgttgcctctgtcatgcgcttccagttccatgattgctttgtgaatgggtgtgatgg

SEQ ID NO: 19375 - DNA, 263 bp, Glycine max
  unsure (1)..(263): unsure at all n locations
  Clone ID: 700957022H1
actgatcatatacttttggtagaagacagatagaatttcaaatatagtggattacgtnatttcggaaaatgaatggaagcatgtagtggtctctattgatatttgatttcaaatggaacccaatagaaccatttgttgtgcaaattggactccatgtaatcaagccaaaaagtagcatggtttataaggatcagtgaatcgaatatcatccatgctactttttaaagaaaaacatattgttggacatgggagtttcgcagaga

SEQ ID NO: 19376 - DNA, 265 bp, Glycine max
  Clone ID: 700957023H1
gcctctttgtggaattttccagataccctcatttgtggacataatcactgacctcgccatgttcattactccgctatggattgcgtttatcgtcggcgtcgtcgttggctgggcgtgggaagcccaaatgggtctttcaccccagagacgctcttctcaagtgtctctctcctcgccctcccaatccccataacgacaccgcttttacctaatccggcaccagttcctccgcgcgtgtgaaagacgcgagtaggattcctgtggt

SEQ ID NO: 19377 - DNA, 266 bp, Glycine max
  Clone ID: 700957025H1
tccaaatcctaggacgtacattggctctggcaaggtttctgaaattaagagtgcaattcatgcattgggcgttgaaactgttatctttgatgatgagctgtcagctgggcaattgcgcaacttggagaagatttttggtggagatgtgagagtttgtgatcgaactgctctcatccttgatatatttaatcaacgagcagcaacacatgaagcgtctttacaggtttcattagcacaaatggaataccaactacctcgtctaacta

SEQ ID NO: 19378 - DNA, 266 bp, Glycine max
  Clone ID: 700957026H1
taacaattcaaacagaggagggtcccctaggcttcaaggttcttggtaacattattggtaactcctaagatgaaccggtatgctactttgcttgctgatacaatctcagtagcataccggttcctcttaggagttaccaataatgttactaataatgttaaaaatggtcctgagacccctaacaattcatacagaggagggtcccctaggcttcaaggttcttggttgagaaatattattactggtggtgcaaaaccgtctactag

SEQ ID NO: 19379 - DNA, 267 bp, Glycine max
  Clone ID: 700957028H1
cttcttatagcttcatcccaaaaagctcttttccttctaaatttgattccttagttcagcattctattattatatatggcttcttcaccttcctcagaaaacaaaaacctagagggagtagctggtggtgccggagagaaacccattccacttggtgagaacgttctgcagaagcatgctgcattctttgacttgaataaagatggtgtcatctacccatgggagacttttaaagggttgcgtgaaatcgggactggggttttgctg

SEQ ID NO: 19380 - DNA, 272 bp, Glycine max
  unsure (1)..(272): unsure at all n locations
  Clone ID: 700957030H1
gttcatttgcatttccatttttcacactctctctgctgtggncatgtggacacttcgtcgagcttctcttcgtctcagtacgagccaaggacttaacgcgggagctacccgtgcttcggctgtcaaattagtgccaatcactgttgaagaaaatgaggctggtatccctcagtctcgtcaaatcactcacagtagatttctgtccgctgacacattttgccgcacgggtcgggtgtccctgaaatttgctgtgggcacgcgtgaactttcct

SEQ ID NO: 19381 - DNA, 93 bp, Glycine max
  unsure (1)..(93): unsure at all n locations
  Clone ID: 700957031H1
atcccacacgagacccatgaagntcgtcctgctccttattagtgtctttcacgaggcggaagataagggacagtggcagctcctccacaaaaa

SEQ ID NO: 19382 - DNA, 270 bp, Glycine max
  Clone ID: 700957032H1
gcttttccctcgttgaaatgaaaatgggttcttctttgtggactttgtgtctaattttggcttcactagcctcttctgcattctgtgcctttccacggaggccagtggatgttccattcggcagaaactacgttcccacttgggcttttgatcacatcaaatacttcaatggaggttctgagattcaacttcatcttgacaagtacactggtactggcttccagtccaaagggtcatacttgtttggtcacttcagcatgaacataaaga

SEQ ID NO: 19383 - DNA, 79 bp, Glycine max
  Clone ID: 700957033H1
tttccttcttaaggtcgaaaaagggctgtttcttttgtagcttcaaatgactcttatacaatgtgatagttttggcact

SEQ ID NO: 19384 - DNA, 269 bp, Glycine max
  Clone ID: 700957034H1
caagaagctcaactcagctgcaacgagtcttcaaaagcaacttcctggtcttaagattgcggttttcgacatttacaagcctctctatgaccttgttcaatccccttcaaaatctggttttgtggaggcaaacagaggatgctgtggtaccgggactgtagagacaacatccttgttgtgtaatccaaaatcaccaggaacttgttctaatgccacacagtatgtgttttgggacagtgtccatccttcacaagctgctaaccaagttc

SEQ ID NO: 19385 - DNA, 127 bp, Glycine max
  Clone ID: 700957035H1
tcaagatccgcagaaagctggtctccaattccccgttggaagaatcgctcgattccttaaggctgggaaatacgctgagcgtgttggtgctggtgctcctgtgtacctctctgcagtgctcgagtat

SEQ ID NO: 19386 - DNA, 265 bp, Glycine max
  unsure (1)..(265): unsure at all n locations
  Clone ID: 700957038H1
cccaattgcagtgttcgcttttcactctctttccacacaacatacgaaagagnnagctnncgnactaacgcttcatanattcgaaggtnactcacctgcatttaaactactatacactcacagaagcctctgcgccacagtctgcatgcctcagcaaaatgcacttgtcactgagggaaattgcattgacacttcattgataacttctagccaaagctcttttatgagaaaatgatttaacgtctttaattttctccagacaaag

SEQ ID NO: 19387 - DNA, 123 bp, Glycine max
  Clone ID: 700957040H1
gttgctcaggcatctgtgtcagattccagaattaagctggcagcatgcaccagaggggccagtgcagaggagaacaacttccccccacagaggcaagacactcagcctggcaaagagtacggc

SEQ ID NO: 19388 - DNA, 264 bp, Glycine max
  Clone ID: 700957041H1
acttatgaacctgaggatcccttatttcacccttcaaccaagatcaccacattcctcacttccaaatccaatgcaactttcaagtctgataacagtgttgtgagaactggggaggatttcatggctgctaatgaaactgcgtttggctccattatcaactcaactgatgttgacaacttggctagtgcggaaattattgatgccggcgatgcagctgcggctactcagtgtgatgtgagtggccctattgattgtaaggaccct

SEQ ID NO: 19389 - DNA, 263 bp, Glycine max
  Clone ID: 700957042H1
gatatttcccttctgagctttgattagtgtggcctagttgttgttttctcgatgagaaaggcttcttccactatgcattgcgcatttctgcgcttttgggttcccttgttgctgcttgctagcttcagctatgctccttctgtttcggccacaactgaaatttcagggaatgaagtgaacacagatgggaaggtgataaatgaagagttagcaaaaccaagtctaaaaggacatgatgaagaagcaaagttcaaaggattttt

SEQ ID NO: 19390 - DNA, 199 bp, Glycine max
  Clone ID: 700957045H1
ctcgagcgaatcggctgagattttgaatcagttctggattcctaatcttaagctgattgtaggagctatagagctcagattgactgtagttgcctcaaccagactcatctgtgagtctccagttcttttggatcctgcagcttctgtgtcctggggtaagatggtggacatcatagtcacactcctttctcgggcagtg

SEQ ID NO: 19391 - DNA, 270 bp, Glycine max
  Clone ID: 700957008H1
gcagactgagcgtgtgactcagtgtgggaaaacgatagataccattaccatgttggttggataactgagagatgatgatgatttcaacttcaaccatggctttggcttctttactacccaaaacggcaccgcatgtcctttccctcacaaccccttccgcttccactcccttcatcttacctttcagtttccactgtttgcctcaccctcctcttctctctgccctcaaagctagttcctccggtggcgacgatttacgcggcaagccct

SEQ ID NO: 19392 - DNA, 95 bp, Glycine max
  Clone ID: 700957048H1
atggcctccattttcaagctctcaacgcgatcgcgagctgcttccttatcagaagcgcttggccccagagattctcgcttcctgtccttcagtcc

SEQ ID NO: 19393 - DNA, 266 bp, Glycine max
  Clone ID: 700957049H1
tagattagcacttagcatttactaagaaaggataaaggaaggaacactttcgttacatttctctcggccattcctaccttgttcctccttttctccttttctttttcgtattcggggttgctgctttctttcgactctattgtcttcttaataaatacagaaagaaacaaaaaagaaaaaagtttataggtgcctagaagaaaagacaatatagtgtggagcaattacgcttgatcacaagggaaattaaaggtgcaacggttttg

SEQ ID NO: 19394 - DNA, 153 bp, Glycine max
  Clone ID: 700957050H1
ctttctgccttgagcctcacctcttgtgatatgcagcattctagactttccagtaaaaaagaaagaggagaattctgcgcaatccgaggaggtagcgacacttaggccaaaagacaccaacaaacaaatccagcaccgcttccacgttttctt

SEQ ID NO: 19395 - DNA, 133 bp, Glycine max
  Clone ID: 700956957H1
ggcgctttaactattcggcaaccacttgtttgccaatactatattactccttcatcccttcactttatctccttaaagccattcccgtgtttccaaagatgtctagcccatggttcatacctttcgcatatgt

SEQ ID NO: 19396 - DNA, 85 bp, Glycine max
  Clone ID: 700956958H1
ctacaaacaagaagcaaaatgagttatccactatctttgagattggaaagcctgaagtaaggcgtggccaagggcactgtaagct

SEQ ID NO: 19397 - DNA, 172 bp, Glycine max
  Clone ID: 700956963H1
caaagatcccgaggctaaacaaccagaagattgggatgacaaagaatttattcctgatcccgaggataagaaaccagaggggtatgatgacatcccaaaagagctcccagatcctaaagccaagaagcctgaagattgggatgatgaggaagatggtgagtggacaccccta

SEQ ID NO: 19398 - DNA, 272 bp, Glycine max
  Clone ID: 700956964H1
ggatgaagctcaagaaacatttcgtcaaaggaagacttgatattgctcgccaaaagctgattgatgagcttctaacctttagcatgcttagagaggtcaaaatcgttgttgtctttgatgcaatgatgtctggactccccactcacaaggaagacttcgctggtcttgatatcatattctcaggtgaaacatgtgctgacacatggcttgaaaaagaggttgccagcttaaaggaggatggttgccccaaagtctgggtagtcacttctggt

SEQ ID NO: 19399 - DNA, 273 bp, Glycine max
  Clone ID: 700956965H1
atgaaaggaggaaagtccaagaccgaatctaagagagccgatgccaaacttgctgtgaataagaagggcgccgccaccaagactaggaaacccgccggaaaggggaaggcagcgaaagatcctaacaagccaaagaggcctccaagtgctttcttcgttttcatggaggaattcaggaaggtgttcaacaaggaacatcccgacaacaaagcagtgtctgctgtgggcaaagctgctggagcaaaatggaagacgatgtctgatgctgaaaaa

SEQ ID NO: 19400 - DNA, 87 bp, Glycine max
  Clone ID: 700956966H1
gaagatcgatcatggcttctagatcctgtctatcctctttctccctctccaatttctctgcacctcttcacatttccatttgttctt

SEQ ID NO: 19401 - DNA, 263 bp, Glycine max
  Clone ID: 700956973H1
gccgatctcgctgagagtctcgaatcgcaccggtgaccggaggagatggtgaattccatggtggaacgcgccacgagcgacatgctcatagggcctgattgggccatgaacatcgagatctgcgacatgctcaatcatgaccctgggcaagcaaaggatgttgttaaaggtatacagaagcggattggaagtacaaattcgaaagttcaacttcttgcactaactttgttggacgaaatcatacagacatgtggagatattgt

SEQ ID NO: 19402 - DNA, 80 bp, Glycine max
  Clone ID: 700956974H1
cggtcttgatcctgaatatgtggaagagaattcaggtacaaaagaggtttgtgaccaagatgcaggagcaggacagatac

SEQ ID NO: 19403 - DNA, 75 bp, Glycine max
  Clone ID: 700956975H1
aatttatagtatagctcatacaagggtgaacaatggcacctaacaagaggttggaatactagttgatttgatagc

SEQ ID NO: 19404 - DNA, 266 bp, Glycine max
  Clone ID: 700956976H1
cgaagttcacatctgtttggaataagcttcttttccatacaattgactatgtcaaattatggctcagttattgtcaccagtatgcatggaggctctgcaaatccacaatccatcattgcctctttgttcaagaagctcatggcggatgctggtgaagggtgcaagtccttgcacctttctgacacacagtggtagtaagcgaagagggtttggcaaagtaagagttactgctgaagactcagtttctccctctgagaccattgcag

SEQ ID NO: 19405 - DNA, 264 bp, Glycine max
  Clone ID: 700956977H1
gtggagaggatctgatagaacagataaaagcagggttcatggagtttgataaactaattgcttctccagatatgatgcctaaggttgctagcctagggaagattctgggaccaagaggactgatgccaaacccaaaagctggcactgtaacaccaaatattccccaagctatagcagaattcaagcaggggaaagttgaatacagggcagacaaaactggaatcgtgcacttaccttttggaaaagctgactttccagaagagg

SEQ ID NO: 19406 - DNA, 269 bp, Glycine max
  Clone ID: 700956978H1
gtcaaatacaagtttgcttgatttccaatacagcctctcaaggaaaaaatacctgaggaagccatcacgtctgttctcctgggaccggcagaactcggggtcgaagaatgtatttcctcagcctaaggctgatgagatgaagcaggtgtttgacaagtttgattccaataaagatgggaaaatttctcaacaggagtacaaagccaccatgaaggctctaggcatgggggactcggttcatgaagtgccgaatattttcagggtggttg

SEQ ID NO: 19407 - DNA, 210 bp, Glycine max
  Clone ID: 700956980H1
gattctccaccatctccctaaagagccatcaaactttataaaaagaaaaaacataaaagcatttgaacgccatggttttctcctctattccagtctttgtagatcctcccaattggcagcagcaaccaaataaccatcctcaagcaaataataatggtggtgacaacactcagcttcttccacctttgccaccacatcaatctcatgtgg

SEQ ID NO: 19408 - DNA, 187 bp, Glycine max
  Clone ID: 700956985H1
gtctggaattgccgcttgtttgaaaatgtctctctttgctgcattttccatttgtaaagttgccaaggatgcagctggagttgcaggaaatgtgtttgcttttgggttgtttgtgtctcccatatccacatttaggaggattctcagaaatgggtcaacagagatgttctcagggttgccatatatt

SEQ ID NO: 19409 - DNA, 269 bp, Glycine max
  Clone ID: 700956988H1
ctcattctgggcggcgatagttttatcgttctctatctccaagatggtcggagaacacggtacgatgtcacttgcctccgatgatcagaaaacaccacttcttcccgtgcacgagccaatggaaggaacacgcaccagcgtctccttcagcatcaaaacaattctaacactggaaaacttgtacgtgattctgggacctatgctgtctcttttcatatgcctcttcgtgaagctcgacgcgccacccacaagccagaaaatgcttggtg

SEQ ID NO: 19410 - DNA, 264 bp, Glycine max
  Clone ID: 700956990H1
attctccaattctccttctccttccaagttaatcatgggtttcaaatccctttttaacatgaagaagaagaaacttctgaagacgatgtcgtcttcgtcctcattgccccacgcgccaccggtatcgttgcattcatcacgcgcctccgtgatggaggaccttgaatatgtcttcaaaaagttcgacgcaaacggcgacggaaaaatctccgcttcggaactcggctccctgatgaagagcctgggccagcccgcgaccgaaga

SEQ ID NO: 19411 - DNA, 265 bp, Glycine max
  Clone ID: 700956991H1
gcaaattaatcaaacatggctagggttagtgctttgtttcactctttgctcttgatttcttcccttgtattggcttctcaaatccatgtttcctctgggaaactagtccctggactatcatggaattactatttgttgacatgtcccaagcttgagaggattataaggaagcatcttgaggatgtcttcgagaaggacagtggagtagctcctggcatacttcgactcttcttccatgactgctttcctaatggatgcgatgcgt

SEQ ID NO: 19412 - DNA, 265 bp, Glycine max
  Clone ID: 700956992H1
gtcagaaggaagagataaatccatcgatgagtcacatgataaaacctttgatattaattcttctccaccacattccaatcagaggtttagcactggagcatcaattaactcacccactaatcaaaacatcagttctcaccctcgtggatactttcagcattccgaacaaattggttcagagttctcaacagttccccttacatcatcagatagtaaaactactagttcaagacttcctagatactaaatatacatttttttccat

SEQ ID NO: 19413 - DNA, 182 bp, Glycine max
  Clone ID: 700956993H1
catagaattttcgagagagagaaaaatcaagaactcggaatcagggtattctctcagattcgtgaaaatctcgaacgaggaatacgatttaagccttaggtcgattcccttaagatcaaagcctaaatctaatattcgcccgtcccaatttagttcagagataagagggatttaaggtttcg

SEQ ID NO: 19414 - DNA, 141 bp, Glycine max
  Clone ID: 700956994H1
cgcttatggtggatacctaggcatccagagacgaggaatcgcgtagttcgcgacgaaatgcttcggggagtgcgaaataagcgtatatccggggattcccgctataggtcagacctttcgaactgctgctgacatccacgg

SEQ ID NO: 19415 - DNA, 261 bp, Glycine max
  Clone ID: 700956995H1
gaacaacagccatgcggcggatgcaccggcggacggaccatccgacgacgacgctgattcggaagatcagaaggctgcggatgaagacagcaatggagtaagcggattgcacgtgagattcttcatggtcttcttcagtttaattatggcttttttggctctatgatacacccacatggattatggagtgtcgctactatacacttgtttcaattaagattcttttctttctttaatatatgtcaaggaaataaaacgctg

SEQ ID NO: 19416 - DNA, 238 bp, Glycine max
  Clone ID: 700956996H1
gccagaaagacttgcttggtacaactacaagcttcttggaataagggtcattaggaagggtatccctccacccccagcaaagaagggccaaagtggagtcctatttgtatgcaaccacaggacagttttagaccctgtggttacagctgttgcattaggaaggaaaattagctgtgtcacatatagcataagcaaattcactgaaataatttcaccaatcaaagctgtggcactctct

SEQ ID NO: 19417 - DNA, 271 bp, Glycine max
  Clone ID: 700957001H1
ggttccgatactctgaagaccgtgaagtactctagggttttgactaacgtgggagctccgggaacgtacaaagcttcggtgatgtcgttgggggattcgaatgtgaagactgtggtggaaccgaatacgttgagtttcacggaattgtacgagaagaaggactatacggtgtcgtttacatacacttcgatgccgtctgggacgaccagcttcgcacgtttggaatggacggatgggaagcataaggttggtagtccaattgcgttcagct

SEQ ID NO: 19418 - DNA, 273 bp, Glycine max
  Clone ID: 700957003H1
aatttctcagttctcacactcattccgtgctctaaatctcaaattctagggttagggttcccaatttctccgccaatcagaagatgagttccaccggtggttctaccaagggcggaaggggcaagcccaaagcctccaaatccgtttcaagatcgcagaaagctggtctccaattccccgttggaagaatcgctcgattccttaaggctgggaaatacgctgagcgtgttggtgctggtgctcctgtgtacctctctgcagtgctcgagtatc

SEQ ID NO: 19419 - DNA, 270 bp, Glycine max
  Clone ID: 700957005H1
acaaattctcaaatccaaatccaattccaattccaattcccaatcttctcaaaccctaattcctcatcttgaaaatgacagaaatcttgcacatccagggagggcaatgcgggaaccagatcggagcgaagttctgggaggtgatatgcgacgagcacggcatcgaccacaccggaaagtacagtggcgactctgaactccaattggaacgcatcaatgtttattacaacgaagcgagtggcggaaggtacgttccacgcgccgtcctca

SEQ ID NO: 19420 - DNA, 273 bp, Glycine max
  Clone ID: 700956956H1
aaaatttaaagaaatcaacacacacaaacacaacaacatatggaggcgctaagggtgcaaaccatagcttccaaatccaaagatgctgccatcccagccatgtttgttagggcagagacagagcaaccaggcatcacaaccgttcaaggggtgaaccttgaggtgccaattattgattttagtgacccagatgaagggaaagtggtgcatgagattttggaggcaagtagggactggggcatgttccaaattgtgaaccatgacatacctagt

SEQ ID NO: 19421 - DNA, 273 bp, Glycine max
  Clone ID: 700957006H1
gggtaacccattaaagaagcatgtgattagcatttttttttcaagtttgtatattcagatatcttgcgtcctaacgcttcataaattcgaaggtactcatattgcatttaaactactatacactcacagaagcctctgcgccacagtctgcatgcctcagcaaaatgcacttgtcactgagggaaattgcattgacacttcattgataacttctagccaaagctcttttatgagaaaatgatttaacgtctttaattttctccaaacaaagta

SEQ ID NO: 19422 - DNA, 270 bp, Glycine max
  Clone ID: 700957007H1
agaccatttaaaagacttgggttgtgctgcatggactgtttttcactttgccattactaccctgcatgccctgaaccagatttaactttttgaaccacaaagcattctgataattgtttcctcacagtgcttctccaggatcatattggtggcctgcaggttctttaccagaacatgtggattgatataaccccagaacctggggctcttgttgttaacattggtgatcttctacagcttataacaaatgacagattcaagagcgtagaa

SEQ ID NO: 19423 - DNA, 86 bp, Glycine max
  Clone ID: 700956912H1
tgcatcgtggcaggtgtggtatccggcgtcgttttgatctcactcatcatccttttcctcatcgtcttcttccgacgcaagacaat

SEQ ID NO: 19424 - DNA, 121 bp, Glycine max
  Clone ID: 700956913H1
gtaaaatccaaaccaaaatggcggaaaaagaagccgttgaagaagctcagagcaagttccgatcagagttccttcaagtcctgcgtagtaggcgacccgctcaagttccactaaaagtcgg

SEQ ID NO: 19425 - DNA, 276 bp, Glycine max
  Clone ID: 700956914H1
cagcatcatcacatgcacccgcgattcctacgatcccttcccatggtctcttctctgcaccctcgctttaccttctagaaccttccctcagatctcaattccccttccgctttctcctttcatggaaatggcttccactccccgcaccgtcccagagatcttcaaggactacaccgcccgcagaaccgccatcgttcgcgctctctctcaagatgtggatgaattctacggactctgcgatccagataaggagaattgtgcctctatggacatccg

SEQ ID NO: 19426 - DNA, 228 bp, Glycine max
  Clone ID: 700956916H1
acaaggcagaaagcaagctcatcctagagttttaaaaatggcagcagcctcctccatggctctctcttccccatccttggctggcaaggccgtgaagctgggcccatcagcccccgaagtcgggagggtcagcatgaggaagaccgtcaccaagcaggcctcctccggaagcccatggtacggcccagaccgcgtcaagtacttggggcccatctctggcgaagcccc

SEQ ID NO: 19427 - DNA, 280 bp, Glycine max
  Clone ID: 700956917H1
aattcagttgcatcacatgttcctcaatcacatgttggccattttcacccagtgccgtcaatgtcacctgtgcagcagtggcaaaatcatcagtctgtgtcagagggttcacaggtacctgtacaggaacattcttcaccatctcaaactgatcaacatttgatgagatcagatgctaagtttagctatgaaatgtctgttaatgggaaaactcttcatagagactatctggatgctcacatccagcaaggtgaggaggcacaaaccatgattttttcag

SEQ ID NO: 19428 - DNA, 275 bp, Glycine max
  Clone ID: 700956920H1
gtcagcctgagatcatggcgaaagttcgcgtggctgtagatagaccatatcactcctccgaatcaagttcctgcattaccattctgggcttctctagcgttctaatgtagggtgtagatgagaatggtgatggtagcatgagagttatttctctgggtatcggtgactctactctcatcacttattttcgcatctcatatgtagctgaaaaagcagttgcagaagcacttcagtcacacaggtttcgtggctatgctcccactgcaggtcttcca

SEQ ID NO: 19429 - DNA, 274 bp, Glycine max
  Clone ID: 700956922H1
attctctcgcatctcaatacccttttgatttgtgaaaggatcgcaaacatgcttgatcaggtccaacaccctacaatcatggacaaggttgctggccagctccatctccgttctggtgtttctggtattaggagttatgaaggagcctactgccaccccacaatgtaccatcctcctcttttgggaattactcgaatgctgcattgcagtatcctgtgatgccctcatgcaaagctactatggatttgtctgctgctgcaacaactgcctcccc

SEQ ID NO: 19430 - DNA, 277 bp, Glycine max
  Clone ID: 700956924H1
agaacaccacaaaaacatcaccctattctctattgtgtaatcaaatatcattaaccatccatggcacaaagaagcaagtcatttcgttttaggatcccatggctatcagtaccatctgaatcattcgctcgtcgtacaagagaaagaccaaaatcccctccccactcagacacaagtgtgcctattcatagaccatctaagccttctgtgatagccccttcagagttatctcctcttagtcccacgaaaactgaggaagccccaagagctgaacctc

SEQ ID NO: 19431 - DNA, 276 bp, Glycine max
  Clone ID: 700956925H1
atcatcttcttcgtctttcctttgtctctcttctttcccctctctttcgagggtttttctttttcttttttcccttttgttatttttcctttattttgtttgtttctttctcttgtgtttcagttttgcgtccatgtcctttgaatccccatttattcttcttcttctgcgaccctaaccctagaattgaagatgcagcctcagaggttaaggcagcaagccatgatgcaaccatctctctaccaccaccctgctctacttactcctcctcagata

SEQ ID NO: 19432 - DNA, 86 bp, Glycine max
  Clone ID: 700956926H1
cttgagtggtgcactcgcatcagcgcagaggcacctgcagagttgcgattgcgctctttccagatctcgtagattccacacaacat

SEQ ID NO: 19433 - DNA, 275 bp, Glycine max
  Clone ID: 700956929H1
gtcgtggaagatgagcaacgtgttcgagggttacgaacgccaatactgcgagctctcggcgaatctagcgaaaaagtgcactgccgctggtgctcttaatggagagcaaaagaaacagaaagtttctgaagtaaaggctggaattgatgaagcagaagctttgattagaaaaatggaccttgaggcaagaagtttacagccaaacatcaagggtgtgcttcttgctaagttgcgagagtataactcggatctcaacaatcttagaagtgaagtta

SEQ ID NO: 19434 - DNA, 118 bp, Glycine max
  Clone ID: 700956930H1
gtttagttatctactctgttctgcatgtttgttctctcaacgactcctccgcgaaagagcatgatgcaataaattggtgaggttgaatcccggggttgaagcgttgcagacatcacgg

SEQ ID NO: 19435 - DNA, 116 bp, Glycine max
  Clone ID: 700956931H1
acataatccacatggacgagaacaagatgcccttaaccttcacagaccacctcagctggttcgacgactcactcaaatcagcgtccccatccgcggagattctctacacttaaaaa

SEQ ID NO: 19436 - DNA, 222 bp, Glycine max
  Clone ID: 700956932H1
gtgatttcagtgagtgatcggtgttcacttgatctcatcataatcgtcagcgtcaattgaagaagatgccgatcagaaacatcgccgtcggaaggcctgaagaggcgactcaccccgacacgttgaaggcggctttggctgagttcatctcaaccttcatcttcgtgttcgccggctcaggctccggcatcgcctacaaaaagctcaccgacaacggcgctg

SEQ ID NO: 19437 - DNA, 276 bp, Glycine max
  Clone ID: 700956934H1
acataaacaaaaaaaataaactggggagaagcatgttgttgatgttgggactatgcttcctattgttctctgcatttccacttgcgttctctgacagatgccacccacaagacacgaaagcgttgctccaactccagaaggacctcggcaacccttatcacatcatatcctggaacgcaaaggaggattgctgcgagtggttctgctgcgttaagtgtgacgagaaaacaaaccgcgtcattagcgttgccttatcatccccttttccagacacca

SEQ ID NO: 19438 - DNA, 274 bp, Glycine max
  Clone ID: 700956935H1
ggtttggttgcgatgcggtgtgttgcgaatcactgtccaatcccgatcgcttgatccagacagtgaatcagactcagaatcagaatcagaatcagagagaaacgatgagggcagtaagtgcgttaatggtggctcggatgttgacgcgggaccactcgctccctgtccttggcaacgaaagcatacccttcggatcggtgtggtggttcgcctatgccggcgtctcctgtttcctcgtcctcttcgctggcatcatgtccggtctcaccctcgg

SEQ ID NO: 19439 - DNA, 151 bp, Glycine max
  unsure (1)..(151): unsure at all n locations
  Clone ID: 700956936H1
gaaagctctcagtcctgactcaaaggagaataaagaanagaaatcaagtatttctaagaagaaatggtttgggaagcaaaaattggagacttcagtctcatactcagaagctcataaagcaccaccaccaccgcgatctattcctcaagac

SEQ ID NO: 19440 - DNA, 273 bp, Glycine max
  Clone ID: 700956939H1
aggctacagagttgaggcttggtcttcccggattccaatcgcctgaaacggtaccggatcttttctctttaagctcaccaaagcttgatgagaagccactcttccctttgcttcctactaaagacgggatttgctcgtcggggcagaaagctgttgtttctggcaacaaaagaggttttgctgataccatggatgggttttctcaggggaagtttgctggtaatacagggatgaacgcggtgctatcacctagaccttctggagctcaacctt

SEQ ID NO: 19441 - DNA, 273 bp, Glycine max
  Clone ID: 700956941H1
aagatcgtgactatcttctctctccaactggggctcaggtgaaagtttctgatcttgaagggaaagtagtgggtctattattcgctgcgaattggtacccaccttgccgtggattcacccaagtcctagctggaatctacgaggagctaaaaagcagagtccctcaatttgagattgtgtatgtgtcctcagatgaggacttgaatgcctttaatagcttctatggaagcatgccctggattgcaattccgttctctgatttggaaacaaaga

SEQ ID NO: 19442 - DNA, 274 bp, Glycine max
  Clone ID: 700956942H1
gcttcttccgcatggggtgttccgcggttctgctttccaaccgtcgaagggactatagccgcgcaaagtaccgccttgaacacattgttcgcacgcataaccgtgccgatgaccgcagcttcaggtgtgtgtaccaagaggcagatgagcaaaaactaaagggactaaagatcagcaaagacttaattgaacttcgtggtgatgctctaaaaaccaacatcaccacactaggacccttggtgctacccttttctgagcagcttctcttctttag

SEQ ID NO: 19443 - DNA, 267 bp, Glycine max
  Clone ID: 700956945H1
caaacaacagagtttatttctttttggttccttggttcacgctggctgcaaggcttgtgtttggtgggagcagcttctcaccgtgacgctgctctacgaagacgacgacaacctcgtgttccaacatcaaataatgggaaaaggaaacatggaactcgagacaaacaaggtctatgactacgaggatgcacgaggggacgttgaagtcccagataccgctcatcagataagcactgattcatggtttcaagtggcttttatccacac

SEQ ID NO: 19444 - DNA, 269 bp, Glycine max
  Clone ID: 700956946H1
ctcgagcgaatcggctcgagaaaatttctcttccgttcgccggaaacaaaaaacctctgtcggctccaattcgaaggcggttcaatgtcattgctatggctccccctaaacccggtgggaaggccaagaaagtggttggacttataaagctggctcttgaagctgggaaggctacacctgctcctcccgttggccctgctcttggttccaagggtgtcaatattatggctttctgtaaggattacaacgctagaaccgccgacaagccc

SEQ ID NO: 19445 - DNA, 136 bp, Glycine max
  Clone ID: 700956947H1
aagccagattatgcgtacctcaaaaggatatttcgtgacctgtttatccgtgaaggattccagtttgattatgtctttgactggaccattttgcagtatcagcaatcacagctagccactcctccaacacgggcca

SEQ ID NO: 19446 - DNA, 273 bp, Glycine max
  Clone ID: 700956950H1
ggcggagttaggtgcgagtgagtatgaacaatgaaatgaataatttggaccactctctggtcaagatcaaaccatacaacttctctctcaatctaaatcgtcaagggaccatgcaaacatctttaaccagaaggcctctaacaattcaagctacgtatagtgatggtggaaggcccagcagtgctagtgtatttgttggtgggtttctcttgggaggattaatagttggtactcttggttgcgtgtatgcacctcagatcagcaaggccctag

SEQ ID NO: 19447 - DNA, 124 bp, Glycine max
  Clone ID: 700956953H1
cggaatcatcggaatctgacagtgacaacaactcctcaaaaaccaacaattgtcaaaccctcaatgaaacggcgctgtttcttgactacgctcttgcgcaggcccagctttaccacaaggcctt

SEQ ID NO: 19448 - DNA, 274 bp, Glycine max
  Clone ID: 700956954H1
ctttgcgcagttccctacctctcctctacctcctgcagatcttcgtcaagaccctcaccggaaagaccatcaccctcgaggtggaaagctctgacaccatcgacaacgtcaaggccaagatccaggacaaggacggaattcccccggatcagcaacgtctcatcttcgctcgaaagcagctcgaggacggccgtaccctcgccgactacaacatccagaaggagtcaacccttcaccttgtccttcgtctccgtggtggcatgcagatcttcgt

SEQ ID NO: 19449 - DNA, 136 bp, Glycine max
  Clone ID: 700956911H1
ctagattctgctcttaaacgccgtcgttttcaaactctttttttccccttcgcttctctgtctttgtaaccgaaaggggggaaaatataattaacaccgatttcgcgaccaattcttcttctgcgttgaattggga

SEQ ID NO: 19450 - DNA, 265 bp, Glycine max
  Clone ID: 700956955H1
taagatccaatcaggattcagtttcatggggtcatcagaacttgactcggtcacataagtgagtcttcaagagttgaggaactctgccctcctacgctctgcagtgcgtgtgactcatgtcaattgtgacgactcattcgatacggcattccacgttgacgtgctctccgtaggctcaatggatgggactcagagccttctcatattctcgggagcacccccgggacactggtcacagattagacagttggtgaccttccacaag

SEQ ID NO: 19451 - DNA, 254 bp, Glycine max
  Clone ID: 700956859H1
agagaatccaaaagtctctcaaaaaataaccatgatgatgcatgtcctttgcttctcagtgttcctagcagcagcaatgcaaggaacactggcggttgaatacagtgtcaccaacaacgccctctcaacccctggtggtgttcgtttccgtgatgcaataggggacgaatacgccaaacaaacacttgactcagccacccaatgcatatggggggtcttccagcaaaacgctcctgctgatagaaaagatatac

SEQ ID NO: 19452 - DNA, 256 bp, Glycine max
  Clone ID: 700956861H1
gagattggatcacatatactatctgattctagggttaaattttaattcactctactctcttactctctcgctcacgcctcacacgttttctgtctcttgctcactctactcagttcccttcccaatcgccgctcagccatcaccgtcgccactcacggggagactcgccctcctcgaccgacgttccctccacatccttcaacaaagtttccggcgtctgttcgagcatgtgaatcataggaagaggaggcgaatt

SEQ ID NO: 19453 - DNA, 260 bp, Glycine max
  Clone ID: 700956865H1
ctcaacttcttttcaattctcgcatttcggaatcagatatggaagaacccgtcatggaaccacaaccctccgctgctgcttcctctgggaacaccaccagactcaggcttcagaagtatgcgctccgatctgtcaataaatcgaaggaagacaagtcagaaactcccaattgctccaatcctacttctgaaaccaagagggggagaagtgtaggtgcttcaagtgtaagtaaaagtgtgagtgttcttgatttttctggc

SEQ ID NO: 19454 - DNA, 256 bp, Glycine max
  Clone ID: 700956866H1
gccaacaacgtgatcaagggcacaaagcaagagcaagttcagcaaatcatcgaagacatcaaggcgtttaaggaagccaccaaagtggacaaggtggttgtcctgtggactgccaacacagagaggtatagcaatttggttgtaggccttaatgacaccatggagaatctcttggctgctgtggacagaaatgaggctgagatttctccttccaccttgtatgctattgcctgtgtgatggaaaatgttcctttca

SEQ ID NO: 19455 - DNA, 110 bp, Glycine max
  Clone ID: 700956869H1
gaaaataaagacttcctttctttctatgttttcctctaatgtattagtcctcttgaaaacaaaaagtgtaaaacgcatatttaaatatgatggtgtacaagttgctcact

SEQ ID NO: 19456 - DNA, 75 bp, Glycine max
  Clone ID: 700956871H1
gtccgtagcgtaagagaggtagcttaaaaccctttcgctgcgcgtcaacccatcctaaaaccttatctctaagtt

SEQ ID NO: 19457 - DNA, 253 bp, Glycine max
  Clone ID: 700956873H1
ggaatcattaattctttccgttccagtagtagcagtttagtttatttcctcaactcaaactaaaatgctcaaaatgggactcaaaaacctgttcttcttcaaaacatcaccttcgccaccttcctcttctcccacaagaaccttctcctattcactaatggacgaaaacatcgaaaccgctcgctccatcatttccaaatgggaacttatttccccttcttaccaaaccgcccctctattcagcaacacacgc

SEQ ID NO: 19458 - DNA, 63 bp, Glycine max
  Clone ID: 700956879H1
gcataatcccttctggaccagctgagatatctgaccaacgaaagcagctgaaggccatcattg

SEQ ID NO: 19459 - DNA, 273 bp, Glycine max
  unsure (1)..(273): unsure at all n locations
  Clone ID: 700956881H1
gtcttatctcggatctacgcaatgcactgtgtatctgtaataagaacagggttcccatttcgcaaccatcggacctacnnactcttgttctcaagggatacgantttctctgcactcacttctagggtttcctctgcgctatcagcaatcatggccgacgaaacaccaaatgagatgaaggaggaggttccagaaattgttcctatctctcctaccaagaagaagaagaagaagaagattacaattgtagatcctgctgatgaccctgtggag

SEQ ID NO: 19460 - DNA, 126 bp, Glycine max
  Clone ID: 700956882H1
ctattctttctctgaaaaccaaaacaagaggaattaaagttcattcatgtaaaaaagaaagtaaagataaaaataacatgcacaacaacatgagcactctctctttcttcatccttctttcaacac

SEQ ID NO: 19461 - DNA, 252 bp, Glycine max
  Clone ID: 700956883H1
aagcaagctcatcctagagttttaaaaatgagagcagcctcctccatggctctctcttccccatccttggctggcaaggccgtgaagctgggcccatcagcccccgaagtcgggagggtcagcatgaggaagaccgtcaccaagcaggcctcctccggaagcccatggtacggcccagaccgcgtcaagtacttgggcccattctctggcgagcccccgtcctacctcactggcgagttcccaggtgactac

SEQ ID NO: 19462 - DNA, 123 bp, Glycine max
  Clone ID: 700956884H1
atcgagccgaatcggctcgagccaaactcaaccgacttttgacgtagcttccttctccctcgttccctctctctctctctcgctctccgtgttatttaatctatttcgtgttaacgaccacat

SEQ ID NO: 19463 - DNA, 262 bp, Glycine max
  Clone ID: 700956886H1
aggaaccaaatgtttctagaaattgctgtgagaatagcgatgcaacagctgaagcgaaccatgtagagaaagaaacttctgcctatagaaatttttctgatgggctgtacggcacttcagataatggacagttgggtggtgaggaacatacattggtttcaccgaaatcctccccagagatggccgtaaatggatcttaagattttcaaaccatacagaggaaggcagattgtttgtgttatttgacctatggatttgttgg

SEQ ID NO: 19464 - DNA, 249 bp, Glycine max
  Clone ID: 700956889H1
attagcagaaagttcaaaaccccacagagctgttttcaaataaattctgttctttttatcccattcaagtcaacttaacacaaaaaggtttagtctttggaattggggttctgggatttttctatatatgaattgaagtggagatgatattggtgtagttggtgagatgaagggtgttctttccatcagtttcttgttttgttgtgtgctgctgcttttggattcttcaatttcacttcctctatgtgt

SEQ ID NO: 19465 - DNA, 253 bp, Glycine max
  Clone ID: 700956892H1
ccggaattgaatagaaatagaatcgtcgattttctctttctctgactctagggtttcattattttcttctgtagatccatctatctagcttcggagctgcaaatggacgtcgcagtcactgccttccggtcaccgctgatcatcctccgaagaccggtcaacgagtctgcctcagctcggttcggttccacttttgggttttccagaaagcaacggttagattcagtatgtatccccaaacacaagcacaagc

SEQ ID NO: 19466 - DNA, 251 bp, Glycine max
  Clone ID: 700956893H1
ctcgagccgctcgagccgttggttttaattggtataggcgtgccaaggtcttgttaattttgagtgttaagtgctgcaactaatcagatcccaagaccttggcctaccttgccatacagaaaaaaaaaaagcaaaaaaaaagccaaggtttggagccaacaaaaataaacacaaagcacaagtcatggaaagaataatggttggaagtgcaacaaaggttgctttcaccctcttggccactttcgccattg

SEQ ID NO: 19467 - DNA, 250 bp, Glycine max
  Clone ID: 700956894H1
tgccttatctgctgttctagtttattggcattgggatcagtaactgcaattcccaatgcaaattttcatcgggcgccaaggagcactagtgtgcttctggttgttgtctgtgttttttgtggtaacaggattcaacaatgaagagcacaggacagtggaggtagttggcctaggagaatgcgcagactgcaggcagaacaatattaagaataaccacgctttctcagggttacgtgtgacggtagattgc

SEQ ID NO: 19468 - DNA, 257 bp, Glycine max
  Clone ID: 700956895H1
acaaaaacaaagaagaaaaaaaacccttagccaacacaaccatcatggccacctctgctattcagcaatcagcattcactggtcaaactgctctgaagcagctcaatgagttcgtccgcaagaccggtggcgccggcaaaggtcgcactaacatgcgccgcaccgtcaagagtgctcctcagagcatttggtatggccctgaccgtcccaagtacttgggtccattctcggagcagattccatcatacctgaccgga

SEQ ID NO: 19469 - DNA, 108 bp, Glycine max
  Clone ID: 700956896H1
gggaaagaaatttctgaccctaaccgcgtgtcgttaaaatcctcaaacgcagagtagacatagaattatcaaaaagcggggaaagggagattgaattcgatcctggga

SEQ ID NO: 19470 - DNA, 283 bp, Glycine max
  Clone ID: 700956901H1
aacactcattaattgcaagaatggcacttcgttgcttggtgatgtccctttctgttctcttcactcttggtcttgcgagagaaagccatgccagagacgaagatttttggcatgctgtttggccaaacactcccattccaagttcattgcgagatcttctaaagcctggccctgcaagtgttgaaatcgatgatcaccctatgcaaattgaagaaacacagtacccgaaaaccttcttctataaagcagaccttcatccaggcaaaacaatgaaagtacaatt

SEQ ID NO: 19471 - DNA, 277 bp, Glycine max
  Clone ID: 700956902H1
agagagtgagagagtgagtgagatagagagagacgcttcgcaaatctcaatcgaatctcagaaaaatgagagaaatcatcagcattcacataggtcaggccgggatccaggtcggaaactcctgctgggaactctactgcctcgaacatggcatccagcccgacggcatgatgccttctgactccaccttcggtgtagcccacgacgccttcaacaccttcttcagcgaaaccggatctggcaagcacgtcccccgtgctgtcttcgtcgacctcga

SEQ ID NO: 19472 - DNA, 277 bp, Glycine max
  Clone ID: 700956903H1
acgtcaaggaccaaggggcgtgtggttcgtgttggtctttcagtacgacgggagcgttggaaggagctcattatctggccactggtgagctcgtgagccttagcgagcaacagcttgtggattgcgatcacgtgtgtgatccagaagaatatggagcgtgtgactcaggctgtaatggtgggttgatgaacaacgcatttgagtacatacttcagtctgggggagtacagaaagaaaaggactatccatacaccgggagagatggcacctgcaaatt

SEQ ID NO: 19473 - DNA, 279 bp, Glycine max
  Clone ID: 700956904H1
aaaatttaaagaaatcaacacacacaaacacaacaacatatggaggtgctaagggtgcaaaccatagcttccaaatccaaagatgctgccatcccagccatgtttgttagggcagagacagagcaaccaggcatcacaaccgttcaaggggtgaaccttgaggtgccaattattgattttagtgacccagatgaagggaaagtggtgcatgagattttggaggcaagtagggactggggcatgttccaaattgtgaaccatgacatacctagtgatgtt

SEQ ID NO: 19474 - DNA, 279 bp, Glycine max
  Clone ID: 700956906H1
agatagagaaaaaaaagcaaagcaaagaaggttcacgttcacgttctgttctgttctggttcacactttcacgagccgcatcaccgactctctgcacctgcaactgcaacttccaacttcaacttcaaccactgcaagcttagctctgaaagaaaagaaaagaaaaagaaaatatctccatttggtttggttggtgaaagttgaaaccttttcacgagctcaagttggtagtaacttttttaacttggcggtctctttttttctacatcgactctcgtt

SEQ ID NO: 19475 - DNA, 275 bp, Glycine max
  Clone ID: 700956907H1
atttgctggtcctcttcctcctcactatctgcgcccctcttcctcccctgtttcgttccactgagcaacacgcttctcagttgcatgacataatacagagtgttcaattagagcataatgggatccaaaaatgctcatgggaagaaccacaaggacaaaaggaacaaatttaaggataatttgagttctagttattcatcacccagtgatgccaaggttatcctcatcagtgatcctcgatattcaaaggctcacacggatcctcggttccgtga

SEQ ID NO: 19476 - DNA, 278 bp, Glycine max
  Clone ID: 700956908H1
agggcagcacgcttgtccgggagcagagtagatgccatggaagaactggatagcgaagataaacgagtcttgagtcgaatcaagtgctggtttctatcacactcgcaacatctgaatttctttactattctagtgcttgcttcggttccaaatcctctatttgaccttgctggcattatgtgtggacaatttggcattccattttggaaattttttcttgcaaccttgattggaaaggcaatcattaaaactcacatacagacgatattcatcatctc

SEQ ID NO: 19477 - DNA, 277 bp, Glycine max
  Clone ID: 700956909H1
catgatgcttgtgaagaatcctgcacttttcgatgtactagtgatgcctaacctttatggtgatattatcagtgacctttgtgctggcttgattggaggattgggcttaacaccaagctgcaacattggtgagggcggtattgcacttgctgaggctgtacatggttcagcacctgatattgctggaaagaatttggctaatccaactgctttactgctgagtggtgttacaatgttgcgccatttggacctccacgacaaagcagaacagattcag

SEQ ID NO: 19478 - DNA, 254 bp, Glycine max
  Clone ID: 700956858H1
cggtggactctcggatgatgagattgaaaagatggtcaaagaagcagaattgcatgctcagaaagaccaagagagaaaggctctcattgacattagagacagtgctgacactaccatctatagcattgagaagagtttaggtgaatacagagagaagattcccagtgaagtggccaaagaaattgaggatgcagtttcggatttgagacaggcgatgtcaggggataatgttgatgaaatcaagtcaaagcttg

SEQ ID NO: 19479 - DNA, 269 bp, Glycine max
  Clone ID: 700956816H1
ttactatcttgcctctcttcttctgctactgctgctcaacccacacaccaccctgggagcgcagaacctcatgctaccctaccataacggcgccctcctcaaaggaaccattaccgttaacctcttatggtacggcagcttcaccccaatccaacgctccataatcctcgacttcattaactcgttaagttccaccgcgggggccccacttccctccgtagcatcgtggtggaagaccacggacaagtacagggggggatccactacaa

SEQ ID NO: 19480 - DNA, 286 bp, Glycine max
  Clone ID: 700956817H1
gcgtacgtttcctctcgatgcttgtaagaatttctggtattgtgatacgttgttcagatgttaaaccattgatgaaagtggctgtatacacatgcgaggattgtggatttgaaatttaccaggaagtaactgctcgggtcttcatgcccttgtttgaatgcccatcaaagcgctgtgatacaaacagaagaaaggggaatgttatccttcaactaagagcatcaaaatttttgagatttcaagaggccaaaattcaagaattagctgaacatgtccccaaaggcca

SEQ ID NO: 19481 - DNA, 266 bp, Glycine max
  Clone ID: 700956818H1
tcaaaatgtcctccatggcttcctccaccgctttcttcacacccctccatgatttcactcaagccagaacaaccccatcaccccctttgcctttcatcaaatcctcctttgcttcctccaagtcaaccttttttcaccctgccctttgcctacaaacctcttccaactttcccaggctttttggaaagcctaagtttttctctgttcatgcaagggctgccacagaaaaaaccatttatgattttactgtcaaggatattgacaga

SEQ ID NO: 19482 - DNA, 263 bp, Glycine max
  Clone ID: 700956820H1
gttatctagtgagtgtggtggcacttctggtgttgctcaacaatggcgtcgcgttgcagttatggctacaagcagcgacagcaggtggtctatggcttccttgcgctctgctttgccctctcattctcctcctgtttcctcttcattgcgcttccctgtattgccatcttcaccgtcttcttcttcaacgaaactccgaatttctcgaagcaaaaccctaatccctctttcttcctcttcctcagtagtgcgattttcgattc

SEQ ID NO: 19483 - DNA, 261 bp, Glycine max
  Clone ID: 700956821H1
gcagaaagcaagctcatcctagagttttaaaaatggcagcagcctcctccatggctctctcttccccatccttggctggcgaggccgtgaagctgggcccatcagcccccgaagtcgggagggtcagcatgaggaagaccgtcaccaagcaggcctcctccggaagcccatggtacggcccagaccgcgtcaagtacttgggcccattctctggcgagcccccgtcctacctcactggcgagttcccaggtgactacggct

SEQ ID NO: 19484 - DNA, 258 bp, Glycine max
  Clone ID: 700956822H1
aaggccgttgcgaaactaggatacctcctttctgtgacaatggttctaaacagtgttcaaccagtggtttcaggtgttgctattggaggtgggtggcaagccctggtggcctacatcaacataggttgttattacttatttgggcttccactggggttcgttcttggttatacagcaaatttgggggttgagggactttggggtggtatgatatgtggaattgttctccagaccttgctgctcttgttgatactttac

SEQ ID NO: 19485 - DNA, 259 bp, Glycine max
  Clone ID: 700956823H1
cagacagaggcatgtgggaatctgttgtgttgacggtagctgccaccgccggcaacaacatcggaaagatccttcagaagaagggcactatcattcttccacctctctctttcaaactcaaggtcataaggtcttatgctttaaacaaaacctgggtggtaggttttctaatggatatattaggggcattattgatgttaagggcattgtctctggctccagtgtctgtcatccaaccagtttctggctgtggactagc

SEQ ID NO: 19486 - DNA, 258 bp, Glycine max
  Clone ID: 700956824H1
cgtttgcgtaatcagcagctaccttccttccttccttctctcttcctcctaccataccacgggtcggaaggtttctttcatggatgatggtccttgggaaataaaggttattcgtgatcacttttgatttccaacatctggtgtagaatctcttgaggacggaacgccttctattacaaaacctggaactgctaaattctttgagggaggtattgcatcctggtggaaaaggggaaagaaaccaatgatcagaaagtc

SEQ ID NO: 19487 - DNA, 260 bp, Glycine max
  Clone ID: 700956825H1
gaaaaaccccactctctgaagtaaccaacgcaacccatcactctttctttcttcctcttccccccacatactaatatctcaaatctagggtttcctctgcgtctagggtttcttccttctgcaaccatcaatggcggcaatcacagctccccagcaccgatcctcgaagacggagtcctacgttgacaacaagcgcaaggatgacatccgccacgccaacatcgtggccgcacgctccgtcgccaacgcggttcgcacca

SEQ ID NO: 19488 - DNA, 260 bp, Glycine max
  Clone ID: 700956826H1
tcacttcaaaccatcccaaaaggccatcatcaccgatttcgttacctcactgtcatccccatcgtctcagagcagccagccatctgttgccacgtggaaaaccacggagaagtactaccacctgagtcccaagaacaagaaggctgcttcttctctttctctatcactgggcgatcagtttctcgacgagggtttctcgctggggaagtcactaaccagcaagaacctcgtcgagctggcatccaaagggggacagagga

SEQ ID NO: 19489 - DNA, 263 bp, Glycine max
  Clone ID: 700956830H1
ggaggttgcaatggacactagtattagtattagttaaagaaaaccccattgcattccatttggcaactattcctatccaattttaaatgctcttccacctcacgagatctccgtggccctagcctaccactactcacttcttcaatgtcctactcctcttcgatatgagtcaactcggcgccgtgttgcggactcagagggagcccaggaggagtaccattctgggtttgttgacggagcaaatggacggcgttgatagtggg

SEQ ID NO: 19490 - DNA, 257 bp, Glycine max
  Clone ID: 700956832H1
gggttgtgaaagcagagaagtgagatacactaagttatcctcataaatacactctaattaggtggcaagataagtgtctaaccttagtaacattgccacatattgtgttcattctggaattgtgccactaaaattctattcaattcatctatggctgcctcttcttatgctatgcaatcaatcctggcaaaccctttgatccgcatttccagcgggtctagggtgaaccaatttggcgttcctgctttgcacatgag

SEQ ID NO: 19491 - DNA, 260 bp, Glycine max
  Clone ID: 700956833H1
caattgcgatgaaggactcaacatcttgacaccaccccatttcctaagtttgctcctttctctgctccttcttattggttttcatttttgtcttctggggttccctttgttcttttcacgtgtgatgtgttcatgattcatagctccacattttgcatctattaatcagtcatgtcagttgatttggattagtcgtgttggacctggatgctgctgctaatacagttgatccacaaatgagattccgtattgcattgttt

SEQ ID NO: 19492 - DNA, 259 bp, Glycine max
  Clone ID: 700956837H1
ctcgagccgaatcggctcgagatgtttgcaagattctctgattgctgagaaagtttcagggaaaattgttatatgtgagacgaggtgggaatccgagagtggaaaagggtttggtggttaagcttgctggaggtgctggaatgatattggcgaatagtgaagcctacggagaagagttagttgctgactctcatcttcttcctgctgcgtctttgggacaaaaatcaagcgagattttgaagaactatgtttcatcttc

SEQ ID NO: 19493 - DNA, 90 bp, Glycine max
  Clone ID: 700956838H1
cggttacacgttaggttagtgagtggctgtcgtccccaaacccccccactaccttaaaccaaacgatcacatcccctcaaaacaaaacca

SEQ ID NO: 19494 - DNA, 249 bp, Glycine max
  Clone ID: 700956839H1
gcgaggtgaaatattagggtggaatccatgacttgccggggttaccagctggagtgaagtttgacccagatgaccaagaaatattaggacatttggaggcaaaagtggcgtctgatgaatgcaagcttcatccccttattgaagagttcataccattcgcttgaaggcgaaaatgggatctgttatacacacccataaaagctaccaagtgttagctcagatagacagatccgccacttcagtcacagg

SEQ ID NO: 19495 - DNA, 255 bp, Glycine max
  unsure (1)..(255): unsure at all n locations
  Clone ID: 700956841H1
gatttgatcagcagatagagattgaacatttgcagcgaaaaggganagatagagaaaatcatgtcaacagcagaagctcctccttctttccaagaagcagcgcgatgcgttgtctgcaattgcagtttcaacactttcagaagaaggcaccactgtcgatcctgtgggagaacattgtgtaatgaacattcatcaaatcaaatggctttaccacaatttggcctttactcaaatgtccgagtatgtgctgattgt

SEQ ID NO: 19496 - DNA, 253 bp, Glycine max
  Clone ID: 700956842H1
aatttttcatatcaggtctagcaggggatgacataatactcaactgtgttttggaagcactatacaggcgtattttgcaagcccacaaagatcagaaagattttagagttataattgtgatgcccctcttgcctggtttccagggtggtctggatgatggtggtgctgctactgtaagagccttaacacactggcagtatcgaacaatttctagagataatcactccatattagacaatcttgaagctatact

SEQ ID NO: 19497 - DNA, 259 bp, Glycine max
  Clone ID: 700956846H1
ttctctttttctctctctacactctattcaaccgttcacattttctctcttctttatcttagattacttttccatggaggaaagcaagaaacgagtccgggacgagtccagctactcacccgagtcccaaactcagctggtcgactctcccgagtctgaaagtcagcgggtcgactcacctgagtctaagattcgtcgagttgactcgtccgagtctcaactcgactcggtccttgactcggaggtgcgtctacaagac

SEQ ID NO: 19498 - DNA, 260 bp, Glycine max
  Clone ID: 700956848H1
tggagattcattggtggtgtccactgaccttcaatccgataaacaggaggacgatcagtccgaggattcatcagattctggtgttcagctatccaatgaacagcagatggagcatgaggtgtaaggggatttgttggatgccagtgaccagcagcaacttgaagatcaggaagaacatcatggtggggattcatcagattccagttctctgttgccctgcattaactgggacaactcaattgcttgtctcagccactgtt

SEQ ID NO: 19499 - DNA, 261 bp, Glycine max
  Clone ID: 700956849H1
atctgaattagggtttcttttccccttttggcaatgatgaacggaggaggaagacgacgaatcgtgctgataactggagtcggaaaaggactcggaagagccctggctcttgaactcgcccatcgtggtcacactataattggctgctcccgttctcaagataacctcaattccctccaatcccaactctctttttcttcttccaaccatttgttactcaacgccgacgtgagctccaatgagaacgttcaagaaatggcc

SEQ ID NO: 19500 - DNA, 256 bp, Glycine max
  Clone ID: 700956852H1
ctatatttggccatgcaagtcttgataattctaatgagctttggtcctctaaagatgtgagtaaaaatgcagcacctttaccattggacacaccaagttcatcaggtgctttaaggaacagaactgagcctttggaaatcaaagatgaatatgctcaatgtagtgatgaatcattggaactcaacaatgagaagattgggggtcctgcatcccaggttatagaaaatgcatgcacaatcacagctatagtgggaaa

SEQ ID NO: 19501 - DNA, 256 bp, Glycine max
  Clone ID: 700956856H1
cgcaaaactgcaaactctaatcctccgtcaagacaagcctcaactagaggataatgctgttgagactattgcaaaatgctgttatgaactgcagatcctggacctcagcaaaagtttcaagctaactgatcgttcactctatgagctcgcccttggttgtcgcgatcttacaaaactcaacatcagcgggtgttcagcatttagtgacaatgctctggcttaccttgccagcttctgcagaaaactgaaagttcta

SEQ ID NO: 19502 - DNA, 254 bp, Glycine max
  Clone ID: 700956857H1
gtcctttctctgtcctctctctctctctatctgcgaatttaaactccaatttccatttccattgataggaaggaggaaggaacgaagcggaagcgcaagcgaaatcgctttgtctctatattgagccactttgaatctgtcgccgcaacggtagatcaaatcgagtttcacctgaatgctctttctggatgcgatttaggttgttgaaggaaacaacaagtgaaaacatgattcttctcaaagacattgtgcct

SEQ ID NO: 19503 - DNA, 267 bp, Glycine max
  Clone ID: 700956815H1
gttctccaatactgagcttgggctattaaatatgcaagtgcctgaagcatctggctccatgctcagacaatacaaaagtagtgtggacaatgctaaggatccgattgtgaattcagtttcatttcctacaccattgactaatactctttccatggagctctctgaagattgcagaacatccatgaacagaaaccatactcttatgactgcttcaactgatttgtctaatgctagatgaaacaatgtttacctgaatacaagcactgt

SEQ ID NO: 19504 - DNA, 234 bp, Glycine max
  Clone ID: 700956776H1
gttggactcctcgtagcttgaggtgccgcgctgtgacgtggcgccgtccatgagagcgggtggtggggctggccctggtggactccgctttgttgtgagcggatctggagcggcgccgacgcaccgtccagtggaggttgaggcagggcggcggaggcggagagcggtgtaggcggatgagaaggtctacgaccagggagtcgtctgccatggcgaccttgacccagtgatcgt

SEQ ID NO: 19505 - DNA, 245 bp, Glycine max
  Clone ID: 700956777H1
acaaagagttggtatcggattgtttcaagtgttgcaccgaagactccaacgatgccactaccaaggttacttactctggagctgtgttggaagtctgcatgaggaaacttgttttctatcctgaagttgtaagctttattgaagatgaaaaagatcaatttccatcagttaaagttcaatatgtttttaactctccaccaaagctaattatgctggatgatgcgggtcagcaaaaagaaacaatc

SEQ ID NO: 19506 - DNA, 247 bp, Glycine max
  Clone ID: 700956778H1
gccgttgtcaagaagtatgacattctttttattgcagatgaggtaatatgtgcctttggaaggcttgggataatgtttgactgtgacaagtacaacattaagccagaccttgtatccctggctaaggcactatcttctgcatatttgccaattggagctgtccttgtaagcccggaaatatcagaagttatacatgatcaaagcaacaaactaggttcattttctcatggttttacttattctggac

SEQ ID NO: 19507 - DNA, 253 bp, Glycine max
  Clone ID: 700956780H1
tgaattacaagtgaactacaataatgaccgttcaagggacttcacaaacccaaatctccccacagagcagaaaggcagaccttcacaacctggatatggtgatgcaggaaacatgtatgctgcccagggttcaggagccagggcagttggatttccacagatggcaaatgccgcagccattgcagctgcctttgggggaggtctgcctcctggaataactgggacaaatgacaggtgtacagttcttgtatca

SEQ ID NO: 19508 - DNA, 276 bp, Glycine max
  Clone ID: 700956781H1
tcggctcgagtgcaattccaaatctctcttctttctcagccaagcatttccccctttttcgtttcgaatctccccttagatcacaccgatttcgccttcttctttctctttaaactttaggctcgctagggttagggttagggttagggttaggttttcggtgaggcgagagagtatgaggttgagggaggacttgccgtgtaaaaacgatgacgtttgtgagaaagaggaagtgatgatagagaatgatgtaaccgtggcccaaaatcattggtg

SEQ ID NO: 19509 - DNA, 266 bp, Glycine max
  unsure (1)..(266): unsure at all n locations
  Clone ID: 700956782H1
gggcgttcagtgttcaccacagtttacacacgagtacccattttctcttctcaatttctcagagtgtgcagagaaaatcatggtggacgcagcagaacgtaggtacttggaggatgacgattcatcactcatgaaaactattaagggggcaacaactggtttagttgctggcactatctgggggaccgtagttgccacctggtatgatgtccctcgtgtagagagaaattgttgctcttccacgggctnngagttaggactttcaa

SEQ ID NO: 19510 - DNA, 259 bp, Glycine max
  Clone ID: 700956783H1
gaactactttcacttcttcaaaatggctcactcgttgattagaaaatgcataaaacctgcaaccctcaacttcctgacaccactcgcagcccctgagattcggcggcggctagcgtcggtggcggcagctgcggacgaggaccctccgcaatcgccgtcgtcgttcactttctcgtcggagggggagaaggtgtacgtgaagccgccggcggggaagtggaagccgtcgccgtcgtcgacggttacgatgccgatgtcg

SEQ ID NO: 19511 - DNA, 256 bp, Glycine max
  Clone ID: 700956784H1
gtggcactgcagaaatacttcaactttgagatattgcatgctcggtgggctatgcttgcatccgtcggtgctctgattcctgaaatattagacctattgggagcctttcactttgtagaaccagtgtggtggcgtgttggatattgcaaagctcaagggagatactctagattaccttggtatccaaggtcttcactttgctggaagtcagggagtggtcgtgattgctatttgccaagcactccttatggttgga

SEQ ID NO: 19512 - DNA, 255 bp, Glycine max
  Clone ID: 700956785H1
aagaaaatataccccagagagaagaggagggggcttttattccgttaatttgcccctttggtgacgcgttgtatttcttagccgcttcttcaaccagctctgtgcttccttcttctaccgtctccatttccatttccgcctgcaacattcattcagagctaggttcagtttccgccattgatcaatgctccctactctctgtttccaggttccaacctcgatcttgtatctcccccttgcctttcgtacgatcct

SEQ ID NO: 19513 - DNA, 250 bp, Glycine max
  Clone ID: 700956786H1
tcgcaagcaaaaagaaagaatcccaggcgaggagaaagatggaggggaaggagcaggatgtgtcgttgggagcgaacaagttccccgagagacagccgattgggacggcggcgcagagccaagacgacggcaaggactaccaggagccggcgccggcgccgctggttgacccgacggagtttacgtcatggtcgttttacagagcagggatagcagagtttgtggccacttttctgtttctctacatcac

SEQ ID NO: 19514 - DNA, 239 bp, Glycine max
  Clone ID: 700956791H1
gagagcttcctttgatggattcttgcttgtattgcttgctggaggtccctcacgtgcttttacccggaaggactctcagatcatagaggatgatttcaaatttctcaaggagttgttttgggcaaatggggatggcttgccttctgaactaatagataaattttcaactactgcaaggtctatccttcccctcttcagaaccgacacagagaccctcattgagcagttcagacggttga

SEQ ID NO: 19515 - DNA, 244 bp, Glycine max
  Clone ID: 700956793H1
gtgaatgctaatgtctcattgaccttgggtatggagctaattagtagaagaacaaatgtggataatgtatcaggacttactgctactccatcaagacctggtaatatttctggtgagggaggacttggtttaccttcattagagggtgctgattctacaagaccagttacatccacaaatggggccatcaatgaggacactaaagttcacagatatcatgaagaagttggacacttcaaaagtg

SEQ ID NO: 19516 - DNA, 246 bp, Glycine max
  Clone ID: 700956794H1
aagtgaaagaaatatttctgatgagagtaatgatgtgccaagctgactatctgaactggttctgggtgcagagatgctagactctccaggggaagttgctagcagagaatgaggttcttgtaaatgaatttcttcacgagcatcactatagtgttactgatgaatttgatgtctctgatcacattcaaaacagtgttgaggggaaaataaagcagacaatggagaaggccttttgggatggtatca

SEQ ID NO: 19517 - DNA, 249 bp, Glycine max
  Clone ID: 700956795H1
aaaaaagaatctgagacacctgtgtcctagagctaaaaactttttcttttgtgtatatattatataagccgagaaccgtagggagtatttaaggagtaatccaagggagaaagtgatgtgaaattccatcagacttgtgtccataatctgtccctgtgatttactttttggagtcaatggaaatatagatcaaggtggcaactgtagttcttggtgtttctgctaaaaaaaaaaaaaaagggggggcgg

SEQ ID NO: 19518 - DNA, 251 bp, Glycine max
  Clone ID: 700956796H1
gggagaagggaaggtgagtagtaatggtcatggatgttgcaaatcagggccaggctatgcttccccactggcagccatttctggtcccagagagtctctcatttatgtaacctctgtctacacagggaccggaatagagaagccagactatttggcgacagtggatgtggatccaaactctccaacttattccaaagtcatccataggcttcctgttccttatttaggtgacgaattgcatcacacaggct

SEQ ID NO: 19519 - DNA, 90 bp, Glycine max
  Clone ID: 700956801H1
ggccggtaacgtcacacaaacccaaaatcacaatggcgttctcatcgtccctatggtcttccctcttcgttgcaaacccaaacagaaccg

SEQ ID NO: 19520 - DNA, 263 bp, Glycine max
  Clone ID: 700956804H1
cgctattatccccagacgccaccgccgcagcaccagaagaagaagaagagtgatggctgagtacgacctaactccgcggatggcgccgaatctcgacaggcaccttgtgttccctctcctggagttcctgcaggagcggcagctctacgacgacgaccacatcctgaaggcgaagatcgaccttctcaacaacaccaacatggttgactacgctatggacatccacaagagcctctaccacaccgaggacgtcccgaacgata

SEQ ID NO: 19521 - DNA, 260 bp, Glycine max
  Clone ID: 700956805H1
ttactatcttgcctctcttcttctgctactgctgctcaacccacacaccaccctgggagcgcagaacctcatgctaccctaccataacggcgccctcctcaaaggaaccattaccgttaacctcttatggtacggcagcttcaccccaatccaacgctccataatcctcgacttcattaactcgttaagttccaccgcgggggcaccacttccctccgtagcatcgtggtggaagaccacggacaagtacagggggggat

SEQ ID NO: 19522 - DNA, 264 bp, Glycine max
  unsure (1)..(264): unsure at all n locations
  Clone ID: 700956807H1
gttcactcttcttctcttgcggctagggttttagcgcacntcttctagatttaaggaagatgggtaaggaaaaggttcacatcagtattgtggttattggccatgttgactctgggaagtccactaccactggccacgcgatctacaagcttggaggcattgacaagcgtgttattgagagatttgagaaggaagctgctgagatgaacaagaggtctttcaagtatgcctgggtgcttgataagcttaaggctgagcgtgaaa

SEQ ID NO: 19523 - DNA, 262 bp, Glycine max
  Clone ID: 700956808H1
attcaaagacattgttggaagtgcatattacattgctcctgaggtcttgaagaggaaatatgggccagaagttgacatatggagtgttggtgtcatgctatacattcttctaagtggtgtccctccgttttgggcagaatccgaacatggtatattcaatgccatcttaagaggtcacattgattttacaagcgatccatggccttcaatatccaatgcagcaaaggatcttgtaaggaaaatgttgactacagaccccaaa

SEQ ID NO: 19524 - DNA, 262 bp, Glycine max
  Clone ID: 700956809H1
tcttggtcctttctctaatccaaatatctctccgttaatgctctcaccacaaacttcaatagactagccaaaagctaacaccaactataggccaaatcaccaataaatattatttcccgttcttttggcgtgttggccacccactgaacacatttgcactcacacatagaaacacagagaggccattggttggtttcagagatgggaagcatgcacatagaaaccccagaaacttttgctgatggtagcaaaaacttcgatg

SEQ ID NO: 19525 - DNA, 220 bp, Glycine max
  Clone ID: 700956810H1
acgctcgtcccaaatccaggtgcaacaggaataccacagttgtacacggcgacgaagatgagatttatcctccacaatcacggcggccagtgcggcaaccagatcgctacgacgaactgggacctcatctgcgatgatcacggcatcgaacacaccggacagtacagcggcgactccgaactccaatatcaacgcgtgaatgtctactacaacgaggcca

SEQ ID NO: 19526 - DNA, 263 bp, Glycine max
  Clone ID: 700956811H1
cacatccatcactctgcatgtcttgttgtatctataaattaaattccttacatcatgccttgccacagtgattcactctaagagctgagacaacaagtcccttcccttctcttcttcttcttctccaaaggcaaaggtctttgagatggaagtcttaaacccgattgaaggcaagacctacaagctcccagttggatacagatttgatccaagtgatgaaattcttgctggttactatctcaggaagaggatcatggcccaac

SEQ ID NO: 19527 - DNA, 260 bp, Glycine max
  unsure (1)..(260): unsure at all n locations
  Clone ID: 700956812H1
gaagggtctcgntgtgtctaatgataattacaccgcttctctggcgaggaaacagaacaaccttgaaggatcacgctaaggggaacgatgaatcgatggagtctctgatgaagtgtgatttttttgatggagagtgggttaaggatgatgcatatcctctctataagccagattcttgctctttgattgatgaacagttcaattgtattaggaatctaangcctgataaggattatcagaaatatatgtggaagccaaag

SEQ ID NO: 19528 - DNA, 88 bp, Glycine max
  Clone ID: 700956813H1
caacattgtggtgaatcggtggtaaggtaacaaaaaacaaaaggcgcggctgtgttgtgtgttcctgtttaatttaacctcgaaagga

SEQ ID NO: 19529 - DNA, 243 bp, Glycine max
  Clone ID: 700956775H1
cagaatagtagtacccatggtgaattatgagtttgatacatcaactggatcattgaaaatattaaatggtaatgagcattttgtgtctaatttatccttgctgttgcgttggtcaccatattcatcagaagcagatcttctgaaacaagtcagttttctatattttccctttcatccatgataatttgctggctttgttagaatatacttaatggttggcatatttattctttcccccccatt

SEQ ID NO: 19530 - DNA, 253 bp, Glycine max
  Clone ID: 700956718H1
accgaaacaaaaggcagagcggtacatttaaagggagaaccggtgccgtgaagcgttatcttatcactcaaatttagcttcggcaccgtctgtgtttctctcatctcagccatttcactttccctgtgatggacgccgatcctcctcaacttgatgatcatttggaacctttcagggtttctgtgaatcaaattctcaccacagtcaacaagcttgagaagcaagtgactgaggttgaacagttctatgaatc

SEQ ID NO: 19531 - DNA, 236 bp, Glycine max
  Clone ID: 700956723H1
gatggaattggaagttgacgagaacgacttgaaagccgccggcgctgaactcttcgccgaaggtggccggcgaggcattcgtatcaatggctggttgatcgagactcggaggcactccatactgaactcttccacattccaagagtgagaacagaaactcgatacgtctcatttaccagaaatggtttttggggaaaacactttgattctaaaacacttgagcagtggaaccaaca

SEQ ID NO: 19532 - DNA, 248 bp, Glycine max
  Clone ID: 700956724H1
atgaagaatttgcaaactcaaagaaatgcaactagcacttctcggacatggctgaccttaattttctgatgtgcaaggccatagagaatccaggcttgacaccatcgtcgtcgttgagaacgtcgatcatgtcggtgttcgaggacaccgtaatcgacaacggtggcaagaatcaaagggaggttggtgtggaggactacatgggatgcgcctccgtgcatggggtgggatcctctatcgccattttt

SEQ ID NO: 19533 - DNA, 249 bp, Glycine max
  Clone ID: 700956726H1
ttccaattccactgtctcgtctttataaccgccaccaaactagcatgttcttccgtgcttccctttgagatatttgatgcttggaaacgtagggaaagttgcccaatctattctcagaacccatggaagaagatatttggaagcgagtagaaatgaggcctttaactcagttggaccaaatattaagcactgcaagatgtacatgcaatataagtttccaagtgaaggacgtagttcattcttgtggca

SEQ ID NO: 19534 - DNA, 250 bp, Glycine max
  Clone ID: 700956727H1
gaaacatcgtgtgcacagtaccccagaagatcgaacaaggatctccacgaagacaaacctctgttctcaactgtgtttctttacctctcacctactttcagaccataccagattgactaggctgagaagatgcagcagacaccgcctatgattcctatgatgccttcgttcccacctacgaacataaccaccgagcagattcaaaaataccttgatgagaacaagaagctgattctggcaatattggaca

SEQ ID NO: 19535 - DNA, 128 bp, Glycine max
  Clone ID: 700956731H1
ggcttggaggttgagtccttctgtaagtgcaattccctcaccattctgtgctgctcccatttgtgtaagaactttctcttttcagttttcaacttctccctacactcgtccaaagcctctagttccta

SEQ ID NO: 19536 - DNA, 258 bp, Glycine max
  Clone ID: 700956733H1
ggtagctatttctacttcccatctcttggaatgcacaaagctgctggagcatttggtggcatcagaatttggagccggcctcaaattcctgtcccttttccttctcctgccggggacattaccatacttgctggagattggttcaagcttgaccaccgaagactgagacgactcctagagaatggtcataatctccccttccctgatggccttcttatcaatggacgtggttggaatggaaacaccttcactgttgat

SEQ ID NO: 19537 - DNA, 76 bp, Glycine max
  Clone ID: 700956734H1
aaaaagaaaaaaaaaaaagaaaaaaaaaaaaaaaaaaaagaaaaaaaaaaaaaaaaaaaaatgcaaggaaaaaaat

SEQ ID NO: 19538 - DNA, 247 bp, Glycine max
  Clone ID: 700956739H1
ggagcatacttagaaacagcaactatgtctctcatgcagcttactagctcccctgttggctcactggtccgtttcattgtaatatttgctttatggtacagaaccatggctttggccaagttgccaccaaacccttcatcagttccagcagttttagcgtttggagattccatcgtggacccaggcaacaaccacaacatgaaaacattgatcaagtgcaacttcccaccttatggaaaggattttc

SEQ ID NO: 19539 - DNA, 246 bp, Glycine max
  Clone ID: 700956740H1
gagataactagaaacagtgtgatgaaaatgaaggtccttgttttcttcgttgctacaattttggtagcatggcaatgccatgcgtacgatatgttccctctccgaatgaacactggctatggtgcccgtactccggaggtgaaatgcgcaagttggaggcttgctgtggaagcacacaacatctttggctttgagaccattcctgaagagtgcgttgaagcaacaaaggaatacatccatggcgaa

SEQ ID NO: 19540 - DNA, 249 bp, Glycine max
  Clone ID: 700956742H1
cttctcagttctctcgttagtattcttccaatctccgtcgatcaccactaacaccaccatgtcgtggctcctccgatccaccaagtcaaaactcctctcttcctcatcttcactttctagaaccttcccctctctctcacgctccggccccacacttgacctccctcagatcggagccatctctcccctccccgatctcttccaccgcaacaccgcatccatgcctttcgcgaaggaaaacgcttccgg

SEQ ID NO: 19541 - DNA, 246 bp, Glycine max
  Clone ID: 700956744H1
cggctcgagaaacgatccaaactcttttttcatttgcagcatcaaaatgagtggtagcaacgatggtagcggcagtggagctctaggtttttgaaggtggctagtgcagctgccgctacagccgccgttgccggcggtttatatgccattctttcatcctcaacctctgctagctctgagatggaagtgccgtttggcagcgcacggcgtgagagcaaagaacgtgacgatggtggctccgggtct

SEQ ID NO: 19542 - DNA, 221 bp, Glycine max
  Clone ID: 700956745H1
cgctcgccatgcttcgacacacaagagcatcagcggcaccggcatccgggcgaggtggcttcgctacggctcttgtcgctaggaagaagtctgcgaacgggtctgatgcggagttcgctgatcgtcgacagcagttcggaatcggaagggagttgcctccgatgagagactttcctcggttcctgaagtggactaagcatgtccagggtcagatgcggaag

SEQ ID NO: 19543 - DNA, 253 bp, Glycine max
  Clone ID: 700956747H1
ggaaggcatagtacacaggacagttgaagtgaatggcataaaaatgcatgttgctgagaaaggtgaaggtcccgtggtcttgttcctccacggcttcccggagctctggtactcctggcgccaccagattctggctctcagcaatctcggctattgcgccgtggctccagatctccgcggctacggagacaccgaggcaccagcttcaatcagcagctacaccatcctccacttagtttctgacatcgtcgcg

SEQ ID NO: 19544 - DNA, 67 bp, Glycine max
  Clone ID: 700956749H1
ctttctctgtcacttttttgtgtctctttctctttctttccctatcacaacaccacttcacttaaca

SEQ ID NO: 19545 - DNA, 245 bp, Glycine max
  Clone ID: 700956750H1
gcaagaggttattcttggcaccaagctttccattctcatccctgctattccagctgccatcgttgccgagtgctttggctttggaagaccttggatttttatattaagcttacttggacttacaccacttgctgaacgtgtgagcttcattacagaacaagttgccttttacactggtcccacagttggaggacttctgaatgctacatgtgggaatgttactgagctcataatagcaatatttg

SEQ ID NO: 19546 - DNA, 69 bp, Glycine max
  Clone ID: 700956751H1
ctttaacgttcacaacggaggtagcatccagcttcctcggcctcgcttatcactatcccaaacccttca

SEQ ID NO: 19547 - DNA, 246 bp, Glycine max
  unsure (1)..(246): unsure at all n locations
  Clone ID: 700956752H1
cttcggttagaccttgctggccgtgatttaacagagtacttggtgaaaatccttaccgagagaggatactccttcagcacctctgccgacaaggcaattgtccgtgctgtgaaggagaaattgggatacgtggcccttgatttcgagcaagacatggagactactaattgtagntctgcagtgganaagtctaangaanngnctgatggacaggtcattacaataggatctgagagattccgttgt

SEQ ID NO: 19548 - DNA, 246 bp, Glycine max
  Clone ID: 700956755H1
acagaaattaagctagagctacatagtttttttcttttctcaccttccttctctcccttcagacaagggacgaaaaatcagagagagagagagagagagagagagaaattccaaaactctgtcgtctcacagtcatctaagttttcccttaggggctctaggtaacatcgcctccttcgtgtgctttctggcaccactaccgacattttatagagtttgtaagaagaaatcaaccgaagggttcca

SEQ ID NO: 19549 - DNA, 245 bp, Glycine max
  Clone ID: 700956758H1
gtcggagactacgggttcgatccgcgtgggctagggaagcccgcggagtacctgcagttcgagctggactcgctggaccagaaccttgcgaagaacgtggctggggacatcattggaaccaggaccgagctcgcggacgtgaagtccacgccgtttcagccctacagcgaggtgtttgggctccacaggttccgtgagtgcgaactcatccatggaaggtgggccatgctcgccactctcggagc

SEQ ID NO: 19550 - DNA, 66 bp, Glycine max
  Clone ID: 700956762H1
accaccgccgccgcagccaccgtggatttcacccatcaccaccactctcaccccgcaaccccacca

SEQ ID NO: 19551 - DNA, 253 bp, Glycine max
  Clone ID: 700956763H1
gtgctccactacgcctacggccacgtcaagaaagccatcgaggcctacgtggtgcgcgccggaggaccgttatcgaagtccccctccccttccccgtcacctccaacgacgacgtagtcaccgaattccgaaaagcccttgagcggggcaagtcccgaggcaacagaattcgcttagcggttatcgaccacgtgacttccatgcccagcgtggtcatccccgttaaggacttggttaaaatctgcagagaggg

SEQ ID NO: 19552 - DNA, 256 bp, Glycine max
  Clone ID: 700956764H1
caccttccctctcttctgttaccaatggctccctcatcaaactacatttctttccttttcctcaccacccttttgatagctcttcaaatcagtgcaagagacagccagttcttcagcaaagtcacccattttgacaaaaacagtgtcaaagagacagaacttcccaacaaagaagcaccagaagtgaacaagccagagcaacaaccacctttcattccggagactgaaaacagctatggcctatatggtcatcatg

SEQ ID NO: 19553 - DNA, 258 bp, Glycine max
  Clone ID: 700956717H1
tggagactgagaaaacagaactatacaaaatggaagatacactttctgcgttgaggtctttgatgctttctcagtctccaccgcttgatgccttagttgttccttctgaagattatcaccggagcgaatatgtgtccgcacgagacaagcgccgcgaattcgtttccggcttcactggaagtgccggcttggcacttataacaaagaatgaagcactgctgtggacggatggacgatattttttgcaggctgagcaag

SEQ ID NO: 19554 - DNA, 258 bp, Glycine max
  Clone ID: 700956765H1
aaatgcccttgacaattcttctctaaactcggaagcaaaacaaaaagccatagctatgagtggtgaagcgcgatcctgtgactactgtggccactccacagcacttctttactgcagagccgattcagccaaactctgtttctcgtgcgatcgcgaggttcactccaccaaccagctcttctcgaaacacacgcgcacgctgctctgcgacgcatgcgatcattcccctgccaccatactctgttccaccgacacctc

SEQ ID NO: 19555 - DNA, 253 bp, Glycine max
  Clone ID: 700956771H1
gaacatctttgcttgctggtccaactcctgttgtggctgaaatcaaccatgctattggagctgaaggagttctcagtgtagaatgtaaggaagttgtttctcaatatggagagttgatatgggatctcttggtatcaggggtgaagcctgattacatatgttcacaagttggtttatgttcttccaaaaggcatgaatctaagagtgctggaattgaaatggtgactgaaaaggagcagggagagttgacggc

SEQ ID NO: 19556 - DNA, 221 bp, Glycine max
  Clone ID: 700956772H1
tggagaaatcaattgggatgaccagatcttgttcaatgggatcatattttatataggttatatgttagttccagagagttctcacattaacttgtggagaacagatggtgtacttatcactgctcttatacatgctggaccagtggagtttctttattactggttacatagggcacttcatcaccacttcctctattcccgctatcattctcatcaccatt

SEQ ID NO: 19557 - DNA, 247 bp, Glycine max
  Clone ID: 700956773H1
cccagagtggtgtagaagacaagatttcccagtcggtttcgttcaaggaggagaccaacgtggttggcgacctccccgaggcgcagaagaaagcccttgatgagctcaagacgcttgttcaagaagcgctcaacaaccatgagctaactgctcccaagccagaaccggagaagacgaaaccagcagcagagaagaaggaggaagttgaagtgacagaagggaagaaggaagctgaagtcatagaaga

SEQ ID NO: 19558 - DNA, 244 bp, Glycine max
  Clone ID: 700956774H1
caataaaccacctccgcgcgagcaccttacccagtgaaccctaccgcaccgaaacaaaaccctcgcaaaccctaaacctaatctcataggaacatggacggcgacgacgagacctcgggtccgatgatcgacgaaatctacgccaacggcggtggcgtcggcgacgacggagacaagcggagccgccgcgcaatcatgagcggcgaccagctcgacatcgaggcgtacgcggcgctatactcgg

SEQ ID NO: 19559 - DNA, 77 bp, Glycine max
  Clone ID: 700956679H1
cttcatcatgcacaagagctcttcagattccacataaggtacgactacactggacctctcacaggccttcttcaggg

SEQ ID NO: 19560 - DNA, 164 bp, Glycine max
  Clone ID: 700956680H1
atgatcatgaagttctctttaaagttaaattattatcatcaaccatccaaggatttaagacgaaaggaacaagtacaaccctcgaaagtgaattaggaagaaaacacaaggaaggttgatgatcatgaagttctctttaaagttaaattattatcattttgtgc

SEQ ID NO: 19561 - DNA, 265 bp, Glycine max
  Clone ID: 700956681H1
gcttacttgatccgtaggtcaaaggctcttcgtgcccttagagaactggccattgcaaaatctaaattaaaggaaatcagagcccagttcaataacttttcctaccgacgtcatgtagcttgtaatgcggaggaacgccagcgattttctgagaaaataattgtcttgctccttactgttgatgccattgagggagctgatattatggtaagatctgccaagaggtcaatggtggatgagctggaagcaatgcttgatgtggtag

SEQ ID NO: 19562 - DNA, 263 bp, Glycine max
  Clone ID: 700956682H1
gctacggctgcgtaggataacatctaacaaacctagcgcacgatagtcttccttcacccatgcttggagtactctgcgccactcgccccaaaccttggcttctctccctcgtccacgtccacgcttccctgcctcgcctacctcattcccctctatcaccttcagcctcgccgccgccccgtcgccgccattccaccgcctgcaaactttttctctccggcggcgctgccgcctccatatggcacgctatcatgccccgaggt

SEQ ID NO: 19563 - DNA, 260 bp, Glycine max
  Clone ID: 700956683H1
cttttaaaatatacgagtggcatatttatcttctaattttataaagtttcccatgaaagtatcttgtcatgcatcataacagtcctacaactgcttaacaagtggaaactatatgttcaattaataaccagtcactaactctatctgaaatagtattatgttgtatgtatatcatgggagagcttagtgcctttttctttcttctaatatgtaatttgatattctagcttcccattgtattgcttcagaagatcaggcta

SEQ ID NO: 19564 - DNA, 257 bp, Glycine max
  Clone ID: 700956684H1
cctcgagccgattcggctcgagcataaacccggcggtgacgttcggactgtttttggcgaggaaggtgtcgctgacaagagctgttgggtacatggtggctcaggtgttgggggccataagtggggtggggcttgtgaaggctttgcagaagagctactacaacaggtacaaaggtggcgtgaacatgctcgctgatggttacagcaaaggaaccggtttgggcgctgagattattggcacctttattcttgtctac

SEQ ID NO: 19565 - DNA, 256 bp, Glycine max
  Clone ID: 700956685H1
ctctcactcgctctttcagcttcgactttggtggaaactaaagactagtcaaaatggtgaagttcacagctgcagagctgcgtcgcattatggactataagcataatatccgtaatatgtctgtcattgctcatgttgatcacggataatcaaccctgactgattctcttgtggctgctgctggtatcattgctcaagaagttgcaggtgatgtccgtatgactgatacccgtgcagatgacgctgagcgtggtat

SEQ ID NO: 19566 - DNA, 258 bp, Glycine max
  Clone ID: 700956686H1
agaaagttcatccaatctccgaagcccttcaccgcattgcaaccatgtcgagaagaaaggttagagagccaaaggaagaaaacacgactctgggcccagctgttagagatggcgaacatgtctttggcgtcgctcgcatctttgcctccttcaatgataccttcattcatgtcactgatctgtccgggagggaaacacttgtccgcatcacaggtggaatgaaggttaaggctgacagagatgaatcgtctccctatg

SEQ ID NO: 19567 - DNA, 256 bp, Glycine max
  Clone ID: 700956687H1
ctagaatcttctctttctcttatcctctccgtaaccgttaccgttacgcccgtcccggtttgaagttctgacccgactgtgatttttttaaacggaagggtggatgatctgatctaaactagggggtgaaatgtttaaaggtttggagtagcgtatgggccgtgaggctatgattatgtatcatgtaacttgtaacatatttcttgggttgtttattaaaacattaaaataaaatttagggtttatatacttgtaa

SEQ ID NO: 19568 - DNA, 256 bp, Glycine max
  Clone ID: 700956689H1
ccaaaaccgaaattaacaaaactcatttttccaatggggtgtgccagtttttccttcctccttaaaattattccttccccctttcaatccctttgaccctttctgcatttcagatctaagaccataagacaacacaacccatttaggttcatcactctctacagaacaaggaactccaattgggtaccactagattataaagatttcatttttattattcttcttattattaaatatttaagggtgggggcgagag

SEQ ID NO: 19569 - DNA, 252 bp, Glycine max
  Clone ID: 700956690H1
gtcctttctctaatccagatatctctccgttaatgctctcaccacaaacttcaatacactagccaaaagctaacaccaactataggccaaatcaccaataaatattatttcccgttcttttggcgtgttggccacccactgaacacatttgcactcacacatagatcccgagagaggccattggttggtttcagagatgggaagcatgcacatagaaaccccagaaacttttgctgatggtagcaaaaactt

SEQ ID NO: 19570 - DNA, 251 bp, Glycine max
  Clone ID: 700956691H1
agaagacaaaccaatctcatatgaaaaagcaaagaaatactttgctcaagatccttcccaaaagtgggcagcatatgttgcaggggcagttttggtcttaatgactgaaatgggtgttcaatttgaagacagtatcagcatgctggtttcatctgcagtcccagaaggaaaaggcgtatcatcttctgcatctgtggaggttgctagtatgtatgctattgcagctgctcatggattaaatatcagcccaa

SEQ ID NO: 19571 - DNA, 249 bp, Glycine max
  Clone ID: 700956692H1
cacggaatttgtaaatcaaacgaattcgttgattccatatcgattcgcatttgcgtacacccctgaccccttgatttctctcagttccgttctgcatcatagagtatggccagccacgatcttcgattcttcgagttgaacacaggcgctaagataccttccgttggtttgggaacgtggctcgctgaacctggcgttgttgctcgcgccttggccactgcaataaacgttggatatcggcatatagat

SEQ ID NO: 19572 - DNA, 251 bp, Glycine max
  Clone ID: 700956694H1
gccgttcgttcacagcgtagctctgctctcgaagatggctcctcccagaggtggtggtgggttcaggggtggtaggggtgacagaggtagaggaaggggtggcggtggaggaagaggaggagacaggggtacgccgttcaaagctagaggcggtggccgtggtggccgcggaggaggcaggggtggtggccgtggcggcggcagaggtggaatgaagggaggtagcaaggttgtggttcagccccataggc

SEQ ID NO: 19573 - DNA, 253 bp, Glycine max
  Clone ID: 700956695H1
gtgaaagaaaggcagcgatggaagaagacttcgacatccccggcggcgaggaaatggatctcggcgaagacgaggtcggcgaggagagggagatcggctctggcggcctcaagaagaagctcctcaaggaaggtcaaggctgggaaacccccgaagtcggtgacgaagtccaagttcattacacggggactttgctcgacgggactaagttcgattcgagccgcgacagggattctcccttcagcttcacgct

SEQ ID NO: 19574 - DNA, 255 bp, Glycine max
  Clone ID: 700956696H1
attgggaaggatctttctggagtttgtctccctgtttattttaacgaacctctgtcttcattgcaaaagtgttttgaagacctagagtattcatacctggttgatagagcattggagtggggaaagcaggggaatgacttgatgagaattctaaacattgcagcttttgctgtgtctagctatgcgtcaactgaaggtcgacaatgtaaaccttttaatcctttacttggggagacctacgaagctgactatcca

SEQ ID NO: 19575 - DNA, 266 bp, Glycine max
  Clone ID: 700956701H1
cgatgtggatgctgatgctggtcacagctgtgaactgggtggggtggtttccttacttccttttcgacactgactggatgggtcgtgaggtctacggtggaactgctggggaggacgcgtacggaagggagtgcgcgtgggatcgttagggctgatggtaaacgccgtcgtgttgggcttcatgtcgttggcggtggagccgttggggaagatggttgggggagtgaagaggctttgggcgattgtgaactttattctcgcgattg

SEQ ID NO: 19576 - DNA, 257 bp, Glycine max
  Clone ID: 700956702H1
aaaatccagaaagaaccaggagaggaaagtctttcagtctttctagttccacccaccataagaaatcaccaatactaataataatattattattattctcacgggtaaatacataaataaaatggtgcgtgcatagtaataggctaatagggtagtattttcttcatgttgggtagttggaactccttaagcagcttcagagtctgagaagtgagaagcggaagaagaagcgatgcgtttttgcccgtgttttggat

SEQ ID NO: 19577 - DNA, 255 bp, Glycine max
  Clone ID: 700956703H1
gagtactcgaatgaagattgctgttggagctgctcgtggccttgaatatctccattgtaaagcagatccacctgatatatacagggacttgaaatctgcgaacatcttgttagataatgaattcaacccaaaactgtcagattttgggcttgctaaacttggacctgttggagacaatacccatgtttcaaccagagtgatgggaacatatggttactgtgcaccagagtatgccatgagcggcaaattaactct

SEQ ID NO: 19578 - DNA, 73 bp, Glycine max
  Clone ID: 700956707H1
ttcatccattcctaatccttgcttggccactttgcgcatttcaattcttctttcggttttttcctgttttggg

SEQ ID NO: 19579 - DNA, 252 bp, Glycine max
  Clone ID: 700956708H1
aacgacatctgtttctggctttgcgggctgaacaatggccggaaaacatgtcggcggcgagggcttagcggcgaacctcgccggaatgtcgaagaatcagctctacgatatcatgtctcagatgaagaatctaatcgaacagaaccagcaacaggccaggcagatcctcatacaaaatcctatattaaccaaagcgcttttccaggcacaaattatgcttggaatggtgcaagcacctcaagtggtttcaaa

SEQ ID NO: 19580 - DNA, 255 bp, Glycine max
  Clone ID: 700956709H1
ggaaagttttggttagaataaaatggtaccctgtctgcaatgcttcttgggtgagtggcacagccccgtttggcacggattttgcacggaacagaatctgaaaactgcagaaacttctcaatggcagctatttcagctgaagtatttggcaaactcaactgatgggccaaaggagcatgagtctgtcctgtttcattctgatgaacaacaaaaattcatgtcaatgcgaggcacatccataaattctgggtcctc

SEQ ID NO: 19581 - DNA, 210 bp, Glycine max
  Clone ID: 700956711H1
gagtatgcaaaaagcccaagcagtcgtcttggtgctgccgattggtcaaaatatataaatccatttgttgaaatttgttactgtattgcattgcgtttgctgcacccattaatggcaggcgtttctctcaagtgcggtgactgcggtgctctgctgagaaccgtagaagaagcgcaagagcacgctgaactcacctcccactccaacttc

SEQ ID NO: 19582 - DNA, 248 bp, Glycine max
  Clone ID: 700956712H1
ctttttcccaattttcgaatctctctcctccatggacccaacttcgctccctccccctccggccaccaccgtccccttcactgtcgaacccagcaatcacgtgacccccgccgacaacaccaacaccaaccagcctacttacgatgcgatgatatacacagcaatcggggctctgaaggagaaagatggttcgagcaagcgagccataggaaagtacatggaacaagtgtataaggaccttccaccca

SEQ ID NO: 19583 - DNA, 255 bp, Glycine max
  Clone ID: 700956714H1
atcagaaccaagaatatttacaccaagatttccatgagcaagaaatccttagcaacatccaataggcagtgattcagaatggtatgacattcctgggattgatgaactttatgctcaagtgatatctcaagatctgtcagcaaggtgacttatcctatcagatagttaaaactcattttttcaataaaggagggccgtttgtcatgtactgtaatttttatttatttatttttatgatgtgtttggaaggatcag

SEQ ID NO: 19584 - DNA, 256 bp, Glycine max
  Clone ID: 700956678H1
tgctcatttgctcattattcatctcttccctctctactacttctcttgctcttattttctgatacacaagagatggaagatgatgaatctcctcagatcaaaggagttgttataatctcccttccacccccagataacccctcttttcgcaaaaccatcactgcttttactttctcttacccttctcctcaaccttctattcaaccccaccaacaccaaagtcaaccaacacaccctaatgctcaacacaacactg

SEQ ID NO: 19585 - DNA, 251 bp, Glycine max
  Clone ID: 700956715H1
attgcaacacaacttcctcaagctgttggagctgcttattcccttaaaatggatgggaaaagtgcatgtgcagtcactttttgtggggatggtgccaccagtgagggagattttcatgctgctatgaattttgcagcagtaatggaggcccctgttgtttttatctgtcgtaataatggatgggcaatcagtacacctgtggaagaccaatttcgaagtgatggtattgtagttaagggtaaagcttatgg

SEQ ID NO: 19586 - DNA, 275 bp, Glycine max
  Clone ID: 700956633H1
cttggaagcccttaagtccctgtgttggagatgcaagggtattcaagtggaggaggcacaacttatctgtctagactcccttggttttgatctaagagtttgttctggaactcagattcaaacactgagatttacattcaagaacagggccacttccgagtacagtgctgagagacaactcaacgatatactatttccaagaattcacccaaagcagcaaaaaatgaagcaaacacatcaaaatgaatgctaaaatcatctgagtgtcatcatac

SEQ ID NO: 19587 - DNA, 271 bp, Glycine max
  Clone ID: 700956634H1
aacagcacaaagcgggttactgtctgttcaagctaccatctctctctctctttcttagtgcctccttgccaggtgctgccactctctctttctctctcttcatccttctgttgggttggttgtggagtgttgttttctgttgtgcacgtgttgtcattttttaccctcgccacagatctgaagtgttcaagtttggattttgtgcttctggaagttaaaatggcccaagaaactttcctattcacatctgaatcagtgaacgaggggcacc

SEQ ID NO: 19588 - DNA, 267 bp, Glycine max
  Clone ID: 700956635H1
aaatatcctagtccttatcagcttcactatttcgattgaactcgccgaagaaggtattgacgtcgatgatgaaaatgaaattggtgaaaacattactgcttctcctttgtgtgaaactcttctgttatgcagtgattggtgctcctcaaacttgtcctgctaacaatgaggataaatgcggcgattcagatgaatggaaaggggagtttttccctgacattcccaaaattaaatatgagggtccgtcaagtaagaatgtgctttcat

SEQ ID NO: 19589 - DNA, 269 bp, Glycine max
  Clone ID: 700956636H1
gctcgtcactccttgctcttagccctcctcctcttcgccgccgtcccaaccgccgcgatggcggtggccgcgtccgacgccgacgacatcctgatccgtcaggtggtgccagatgttggcgaagcgacagaggaggacaacctgctgaacgccgagcaccacttcgcgaccttcaaggccaagttcgccaagacctacgccaccaaggaggagcacgatcatcgcttcagcgtcttcaagtccaacctccgcagagccaggctgcacgc

SEQ ID NO: 19590 - DNA, 267 bp, Glycine max
  Clone ID: 700956637H1
cccagtcataaatgttcacatatggtttgacagacaactgaagaacacatatgatcaccttctctttagcagaagtccccttctgagtgtatatgctgacatgtcagtaacttgcaaggaatattatagcccaaaccagtcaatgttagagttggtttttgcaccagccgaagaatggatttcacgtagtgacgatgatattattcaagccacgatgactgagcttgccaaactctttcctgatgaaatttctgcagaccaaagcaa

SEQ ID NO: 19591 - DNA, 266 bp, Glycine max
  Clone ID: 700956639H1
tggaaagcctctccattacaaaggtagctcattccatagaattattcctagatttatgcttcaaggaggtgattttacacaaggaaatggaatgggtggagaatcaatttacggagagaagtttgctgatgagaacttcaagttaaagcatactggaccaggacttctatcaatggcaaatgctggtcctaataccaatggttcacaatttttcattacaactgtgacaactagctggttggacggaaggcatgttgtttttggta

SEQ ID NO: 19592 - DNA, 262 bp, Glycine max
  Clone ID: 700956640H1
cttctctatctaaaatggagtttgttctaaattacctaaatgccactgccattggagttctttctataaccctcttctttttgtttttgtataatcccttcaaatttgcattaggtatcaaagaggctcccaaagttgcaggtgcatggccaatacttggtcacctaccactattgagtggttcagagacacctgatagggttttgggtgctttggctgataagtatggacccatattcaccatcaactatggtgtcaaaaa

SEQ ID NO: 19593 - DNA, 264 bp, Glycine max
  Clone ID: 700956641H1
tggaaatgtcatcaatgctcaaccttggggttctggaggtgacaaccgagaactgtggaatggtagaaaaaccggagaaatcaagcctgatgtaaaaggagctgagcctgagaaaggttcagaaaggttctggaaactgctgagtaagcctttggaaggctaccaaggaggtaacaatgaagtgattgagcgtagaaacccattagccttagctcatttcgccaatcaccctccaaaaggggtgcaaccaaatgtcatgatttg

SEQ ID NO: 19594 - DNA, 254 bp, Glycine max
  Clone ID: 700956644H1
gttgaaatgaaaatgggttcttctttgtggactttgtgtctaatttaggcttcactagcctcttctgcattctgtgcctttccacggaggccagtggaagttccattcggcagaaactacgttcccacttgggcttttgatcacatcaaatacatcagtggaggttctgagattcaacttcatcttgacaagtacactggtactggcttccagtccatagggtcatacttgtttggtcacttcagcatgaacat

SEQ ID NO: 19595 - DNA, 279 bp, Glycine max
  unsure (1)..(279): unsure at all n locations
  Clone ID: 700956648H1
tcggagttcggcacgaggcatctttaccatttcagtcctaaaaccctattcttcttcgctcattcatcagcactgccatcagccccaacctccccacaaggtcacaggccacanagaggtgtaccaccatgtcggacgatgaccgggaggagaaggagttggatctctcttctgcagaagttgtaaccaaatacaaaaccgcggctgcgatcgttaacaaggccttgaagctagttatttcagaatgtaaaccagaggcgaagattgtggatatttgtg

SEQ ID NO: 19596 - DNA, 264 bp, Glycine max
  Clone ID: 700956651H1
atactcactagtcactatagctcacccttgaagaagtgcaatttcatcctctaactcttccaaatcatggctagctcactgcttgtcatgaaggttacaagctgcatggttgcggtgttgatggttagttttggacacataattcccttggcagaagctgaaattccatgtggcagggtgcaaatcacagtggctccatgcatagggtacctaaggggtcctggtggaggtgtccctgcagcatgctgcaatggggttaggagc

SEQ ID NO: 19597 - DNA, 85 bp, Glycine max
  Clone ID: 700956654H1
atagatcgaattcggatatggcgaggaacacagctgacctcgtaacgcagctcaacgttgctcatcactttccacacaacatacg

SEQ ID NO: 19598 - DNA, 261 bp, Glycine max
  Clone ID: 700956655H1
ctcactttccaccttcctaatgagcacctctttcttactttatggattattcaacgatgatgcttttatttatgtgccaaatgggataggaactattttgggaatgatacagttgatattatacttctacttcgagagtaaatctagagagagctccagagaacctctgatagtatcatatgcatgatgagttctgctgaaaaggctgaagaatcagagtcaggaacgaccttttgctgctggttgctggctgagactgga

SEQ ID NO: 19599 - DNA, 262 bp, Glycine max
  Clone ID: 700956656H1
gtttttatcagaagcttgtgatttagtttttgatgcagcaagtgagggaaaacaattcttaattgttggtacaaaaaaaaaagcagcggatttagtagcacgggctgcaataagagctcggtgtcattatgttaataaaaagtggctcggcggtatgttaacgaattggtatactacagaaacacgacttcaaaagttcagggacttgagaatgcaacaaaagacggggagactcaatagttttccaaaaagagatgccgct

SEQ ID NO: 19600 - DNA, 261 bp, Glycine max
  Clone ID: 700956657H1
tgccgattacaacatccaaaaggaatcaaccctccatctcgtgcttcgcctcaggggtggcatgcaaatctttgtcaagactttgaccgggaagaccatcacccttgaggtggaatcctcggacaccattgataatgttaaggccaagatccaggacaaagagggcatccccccagatcagcagaggctgatttttgccggtaaacaacttgaggatggaagaacccttgctgattacaacattcagaaggaatccaccct

SEQ ID NO: 19601 - DNA, 256 bp, Glycine max
  Clone ID: 700956659H1
gtgcaatccggtgtgggcatttcaatccataaagtcccaaaaacactgacagcgagaccaactcaaccacctcttccagttgcagacttgagttccttatgatgggaaccgcacgtatcccaactactaatgttgttctcaaacctcaaaacttatctgggaatttctctaccctctgtgataactttcggtgtctgaggttcctcactccgaaaccgccccacctgcgatcctctcactctaagttgggaaatag

SEQ ID NO: 19602 - DNA, 257 bp, Glycine max
  Clone ID: 700956663H1
attaaattcaacatctctctaattctctcattctctctctacttctcaaagatgcacgcatagttctataaccctaatcgggtatgtagaaagagagctttgtagcacgtgcttaaggtatgttttaaacattgcttgtttagttggttccttttgatgtcatggtggcattgtgatgcaaaatgtgtgtgagctcatactgagaaggagctcatctgctaagtccatttgaagaggatgtatggcagggcatcatc

SEQ ID NO: 19603 - DNA, 267 bp, Glycine max
  Clone ID: 700956665H1
gtttgttccatttcttgcttcttaatttcttgatcatgtcacttgctggtaaaatcagcattgaaattggggtgcatgcaagcgctgcaaagtggttcaacctctttgcaacgcaactccatcatgttcaaaaccttaccgaaagagtgcatgaaaccaagctacatcatggtgatgactggcatcacaacgaatcgatcaaacactggacttgtaccatagatggtaaggttacaacatatcacgagagtaacgaatccgttgatg

SEQ ID NO: 19604 - DNA, 265 bp, Glycine max
  Clone ID: 700956666H1
gattttaagtacagaagcattgatggtgatcttgttggtgttgttggagactcatgggtgttggaaaccaatgctattcctgtgacatggtattctaacaaaggtgtggacaaagagtcttatggcgagattgtctcggcgcttgttaaggatgttcgagcgctgaattcttcagcaataggaacaaattcatcttatttctatgggaagcaggttggaagggcggcgaggttggtgttgatagcggaagaagtgtcgtatccta

SEQ ID NO: 19605 - DNA, 261 bp, Glycine max
  Clone ID: 700956669H1
agaagaagaaaaaaaccacaaccaccaccatctagggtttttctttttctcatggctagtttgtcaactaggattttcttcatcatgtcccttgtgtgcctggctctcggtccaatggcacaaggggaaatgacatgtggccaggttgtgagcaacctgaccccatgcatctcctatgtggtgtatggtggaaccaatgttcctgaacagtgctgcaatgggataagaaatctctatggcatggctcagaccaaaccagac

SEQ ID NO: 19606 - DNA, 259 bp, Glycine max
  Clone ID: 700956671H1
accggcgctgccggcttcgtcggctcccacgtctccctctcgttaaaacgacgcggagacggcgtcgtcggactcgacaacttcaacgactactacgatccgtctctgaaaaaagcccgcaagtccctcctcgccaagcatgacgtcttcatcgtcgatggcgacctcaacgacgccaagctcttggcaaagctcttcgatgtggtcgctttcacccacgtgatgcacctcgcggcgcaggccggggttcgctacgcca

SEQ ID NO: 19607 - DNA, 232 bp, Glycine max
  Clone ID: 700956672H1
gcactcttagaaggcattactgatacacttggaaccgaactactcgaaagcttgttaaaaatggcaccaagcaaggaggaagaacgcaaattgaaggaacataaagatgattctccaaccaaacttggtcctgctgagaaatttttgaaggcagtgcttgatgtacctttcgcatttaaaagggtggaagcaatgctttacatagccaattttcactccgaagtggagtatc

SEQ ID NO: 19608 - DNA, 254 bp, Glycine max
  Clone ID: 700956674H1
atttaatcctatcctatcgtagcaaagaaagaaagaaagaaaaccctagcttaccttttcaactttcaagatgcaaatctttgttaagacactcactggtaagacaatcacccttgaggtggagagttcagataccatagataatgtaaagtccaagattcaagacaaggaagggatcccaccagaccagcaacgtctcatttttgctggcaagcagcttgaggatggacgtacacttgctgattacaacattc

SEQ ID NO: 19609 - DNA, 252 bp, Glycine max
  Clone ID: 700956677H1
gggcttactattgggcacatgatgagaagcttctcatcagtgatcacatctccaatggcaatttgactcatgcccttagagggagacatggccaaccatctacaaatcattcatggtccaccaggctgagaatcaccaaaggaacagcgaggggcctggcctatctccacgaatgcagtccaaaaaaattcgtccatggcgatatcaagccctccaacattcttcttgacaacgacttccaaacctacatat

SEQ ID NO: 19610 - DNA, 265 bp, Glycine max
  Clone ID: 700956632H1
gttaggatgctgcacaacatgctcggttccttgatcaacaactttgactggaagcttgagaacaacattgaccccatcgacatggacttggatcagtccctcagggctatccctgttctcgtaaatgccaactaattcaacatcatctgtatgttggcatgccatcccatgtacctttttctcagaaacagcaaacagaagcttgattctttggtttgaatgtttctcgtatgtgctagctttgatccagcttgtttcttccagc

SEQ ID NO: 19611 - DNA, 274 bp, Glycine max
  Clone ID: 700956603H1
gtttctctttcttctctctgtgctttcaaccaagttctcaaatcactcttcttcttcacccttctgatctactaattctcaaggtattcaaaattgggtggttttcgattgaactgtgatgtccaagccactgctaggcatagcggaagaggaaggtcaaagcaatgtcactttgttggtttcttcctcagccaccatggaaagtgtgtgcctgaatagctcaaaactgaaagagcgcaactacatggggttatctgattgttcatctgtggac

SEQ ID NO: 19612 - DNA, 271 bp, Glycine max
  Clone ID: 700956605H1
gtttggggtaggaataatatcttacacggtgcctgtgtacatagctgagatatcacctccaaacttgagggggggtttggtttcagttaaccagctctctgtcaccattggaattatgctggcatatctgctggggatttttgttgaatggagaatccttgcaattataggaattttaccctgtacaatattgatacctggcctatttttcattcccgagtcccctagatggctggcaaaaatgggaatgacagaagaatttgaaacttcc

SEQ ID NO: 19613 - DNA, 268 bp, Glycine max
  Clone ID: 700956606H1
ctcttctttcttcttcttccatctctttttttctgattaaggtctacaaaagttctcttcttcttctcctcctattgaactttggtcatcacacgagaaaacccacgtctggatcttctggtgtaaaggccattagaagccttttagaaattttcaaattgagttggtgtatagtgttgaagggggtgaaatttggagcccagtttgttacttcatttgaaaggtcatagtttgaaccctctttttctggagatttacctgggaaaag

SEQ ID NO: 19614 - DNA, 268 bp, Glycine max
  Clone ID: 700956607H1
ctcttcaggtcaccatcttgactgcaatcatggctgatggaccacagcatccatcagttgttcagaagctagctggacagtcttacctggtgtccaggcttagccccaactttttctctaggaattattctgcaactggttcttacctcaatggcggaatgcactcgcctgggttggctgttgtgtcacctgtatctccagttactgtgcatgctccagcagagaaaggagtgcgtggatttctagtggattttctgatgggtggagt

SEQ ID NO: 19615 - DNA, 250 bp, Glycine max
  Clone ID: 700956608H1
ccttgtgaagttgaagggacacctcacccacccgaaacaccatccattctcagccaccaccctctctctcaaacccttagtttccattctcaagagtgaaactcttccaactatctatacataaacatatctcttcagaacccactccctcacttctggaatctagccataaaaatcataaatttccctctttcacccgaatctctataccgtatccatctgaatccaacaaattttcacacaacatacg

SEQ ID NO: 19616 - DNA, 268 bp, Glycine max
  Clone ID: 700956609H1
gtttcctttcatatgctactcctctaaaccatttttctcacaaatggctacctattcttctttcagttttgtacccttttgcatgttcttcttccttgtgtgcctcactagtcctgcttatgtttcttcacttcctctttccctgagaaggcaagcatcaatccttgtatctatgaagcaagatttttgagttgcaaactcttctctgaggagctgggacatgtcacattacatgtccctttgcagcacttggtatggcattcagtgt

SEQ ID NO: 19617 - DNA, 246 bp, Glycine max
  Clone ID: 700956610H1
attaccctagtttttctccattttcttcataattgaaccgtttctcctcgatcccatatgtgttgatagtgaaaggcatcgtcctcatcatcatctatcatggcatggtttagagctggagcaagcatagcaaaacatgcaattaggagaactctttctaagggtggatccacacaccttgtgtcaaaggcaagggtccttccatcgataccatcatcacatagcagaagcttccacacaacatac

SEQ ID NO: 19618 - DNA, 278 bp, Glycine max
  Clone ID: 700956611H1
gaatacggctctcggtattcagctcaggatcagggcatatccatggcagaaccaccaaagggggatgaggaggacggcggagctgctttcgttctccaatccaaaggtgaatggtggcatgcggggtttcacttaacgaccgcaattgttggacccacgatactaaccctgccatacgcgttcaggggattgaggtggggacttggatttatgtgcttgacggtgatggggatcgtcaccttctactcttacttcctcatgtccaaagtgctcgatca

SEQ ID NO: 19619 - DNA, 263 bp, Glycine max
  Clone ID: 700956612H1
aactcaagtagcaactacattgataaaatctgttccaacaactccaacatttatggcacctcctcaggcagacctatggaagattggcgcagaaggctttgctctgatagacaagttctatggtccatcaagggggaacagtgccaatgatgcattccatgggccaaggggagaacattgttgggtggtttataatgtgtccaatgatgtgatggaagaatctgctgtagacccatgaaattctaagctttttggcttatgca

SEQ ID NO: 19620 - DNA, 261 bp, Glycine max
  unsure (1)..(261): unsure at all n locations
  Clone ID: 700956613H1
cttcgtctcaaacctcttcgttccttcgattcattccatttcttccaaaatggccaaagacccagttcgcgttctcgtcactggagccgcagggcaaattggatatgctcttgtccctatgattgctaggggagtgatgctgggtcctgaccagcccgtgatcctccacatgcttgacattcctccagcagtagagttctagantggggttaaaatggaattggtggatgctgcattccctcttcttaaaggtgttgttgc

SEQ ID NO: 19621 - DNA, 263 bp, Glycine max
  Clone ID: 700956614H1
aggcgttcgggttctactacaaaaagacaccactgaagcgaagaaaggggcgtacggttctgttgtggttggagatccgaattttgattatcgaatcgcaaaattctgaatcaatcaatcaatcaatcagtaatcagagccatcaacgactgcaatggtctgcgagaagtgtgagaagaaattatcgaaggtgatagtaccagacaagtggaaagaaggggccagcaatactaccgagggtggtggccgcaagatcaacgaga

SEQ ID NO: 19622 - DNA, 264 bp, Glycine max
  Clone ID: 700956615H1
ctcaagccctccgcctccgtcgcactccaccgccactccaacgcgctcgtcgacgttcttccgccggagccgactccagcatctcgctcctcagccagtccgagaagcctgacgtcacttataatgacattggaggatgtgatatacagaaacaggaaatccgtgaggctgtggagctaccccttacacatcatgaactatacaaacaaattggtattgatcctccccgtggtgttttactgtatggaccccctggcactggca

SEQ ID NO: 19623 - DNA, 266 bp, Glycine max
  unsure (1)..(266): unsure at all n locations
  Clone ID: 700956616H1
attcaaaagtttttgaaatgttgtcaccccttcttctatttctatgcctaactcttcctttgtttttgttgtccttcttcaaataccgtaaaaccttcaagaatccaccacttccaccaggtcctagagtccatcncataatagggaatcttcatcaactagatagtccttctcttcatgagcagctatggcatctctcaaagaaatatggtcctttattttcacttcaatttggattaaggccagccatagttgtttcctctcca

SEQ ID NO: 19624 - DNA, 277 bp, Glycine max
  Clone ID: 700956617H1
cagcagttttcccaactccgaacttatcgaagaagatgactcgcggcataaaacaccgtcagaaagccaagagcaagaagaaggtctcgaagaaagagagtgggtcttcttcatctttggcgccagaaattcccgcgaaggtgtggcaaccgggtgtggataagttggaggaaggtgaagagcttcagtgtgatccttctgcttacaattctcttcatgcctttcacattggatggccatgtttgagctttgatattttacgtgactctttgggctt

SEQ ID NO: 19625 - DNA, 271 bp, Glycine max
  Clone ID: 700956618H1
ccattttgttgaaggaagcagaagcacatggcagtgatatgtccgccaagccagggacaaacttggcttccccatggccccaattctaattaccacttcttctcaagaggaggagttggaaggcgcagtcgttcttattgtactttcagctcaccaaagaccaaaacgaatgcgtttacggtcagaggctgcggccaggactcggtggaagaccatcactttgtgaaggctctgagggaatcccaaccttacatttccgttcataggggca

SEQ ID NO: 19626 - DNA, 268 bp, Glycine max
  Clone ID: 700956619H1
caaaaccttgagaaaactgagcatggcggagagtggcggaggaaatcgccggagagaaccgcttctggtgtcgccggaggaagaggctgcaaaagcatcgtggaggcttaacgtcaaagagtttcgtttgccaagccaaacgaatgatcatcaaaatcaacgatccttcactttccatggccttcttcgtaaacccaggaagcaacgcaaagtggcagaatattacaagaatcaggagagactccttgaaggatttaatgagatggag

SEQ ID NO: 19627 - DNA, 269 bp, Glycine max
  Clone ID: 700956621H1
cttaaatctctaataaaaaaccactggaagatgtaattcgtgagattttttgattgctggaatgattttcaagaaaaggccacaacccaagtcttgattgttttggacaagcatgagaaccgcgatacttatgtggtagctttccgaggaacggaaccctttgatgcagatgcatggtgcactgaccttgacatctcatggtacgggattcccggcattggagaaatgcatggtggcttcatgatagccttagggctacagaaaaatgt

SEQ ID NO: 19628 - DNA, 260 bp, Glycine max
  Clone ID: 700956622H1
agaatatgtatgctcagttgttgcctcttgctttgcccgcaccaccaatgcctggaatgggaggaggctttgcgcctccccctccaatgggtgcattggggatgcctccaatgcctccttttggaatgccacccatgggcagctactgacatataagttctcggcaatgaactcaagtgtataccgagagcagcgtagcaacttgggagttttcaaacattttcttctggggttttaatgcagtattctttccttgcttc

SEQ ID NO: 19629 - DNA, 264 bp, Glycine max
  Clone ID: 700956623H1
aaaaaaatgggttcttctctgtggacctgtctgattttgttatcacttgcttctgcttccttcgccgccaacacaagagaaacaattgatgtgccatttggcagaaactatgtgcctacctgggcctttgatcacatcaaatacctcaatggtggttctgagattcagcttcatcttgataaatacacaggtactggcttccaatcaaaagggtcctacttgtttggtcacttcagcatgtacataaaattggttgctggtgat

SEQ ID NO: 19630 - DNA, 265 bp, Glycine max
  Clone ID: 700956624H1
cgtttcgttcaactttcaacgccagttcacactctctgcttcgcgtgtaccaacaagtgcaagttcgaatcaatggccagcgctcagctcacagcaatagcgtcatcgatctctacggcgtcgtttgaagggcttcgaccttccgctgttcagtttgcttccacgggcagaattagaattggcaatctctcccaaaggtccttccggggcttggttgtcaaagccgccaccgttgttgcccccaaatacactgcgataaagcctc

SEQ ID NO: 19631 - DNA, 263 bp, Glycine max
  Clone ID: 700956626H1
ggaacttactcatcttgaagtgaatggatgccacaatattggaactttggggctagaatctgttggaaaatcctgccaacatctctctgagttagcattgctttactgccaaagaattggtgatgctggtcttgtccaggttggacagggatgcaaattcttgcaagcacttcaattggtagattgttcaagcattggagatgaagccatgtgtggcatagctagtggctgtaggaatctaaagaaacttcatattcgtcgct

SEQ ID NO: 19632 - DNA, 86 bp, Glycine max
  Clone ID: 700956627H1
ttttggttggaacccctcttctttttttctcttgtcttttcttttgttctcatcatcgtctcaacaacgagttaaaggacaaagga

SEQ ID NO: 19633 - DNA, 83 bp, Glycine max
  Clone ID: 700956630H1
ggcaacagcacgacgtggatgaacactgccgttttggcaacatccattcggcactaccgttcaaacagcggccccgcgtcggg

SEQ ID NO: 19634 - DNA, 274 bp, Glycine max
  Clone ID: 700956602H1
cctccgagcttcaattcaggcgtaataggaagactactgctgtacacaacaacaagaagagatttaatttgaaccaccccttgaattattaagccattattatcactaggtctaatagaaccctcttttgtccttatgtatgttagccattttcttttcttacccttttcatgattttaatttttaatcatcaggggcagttcttttcattattttttttacaacctattcactgtaaaatctttaggaccgattctgtattctctttggtgca

SEQ ID NO: 19635 - DNA, 263 bp, Glycine max
  Clone ID: 700956631H1
caacaacagagaacacgagtttgcagccataaaaaaaccccacacattcagacatcgttgtgttgtgtaatgctatctccgatggctctctctgcgcatatttgccgtttccccgccacacgcgctgacacttctttgccggagagtctcaccagaatccggtgccggaaacctctctccgtccgatgctccggcgattccacttccggctctgtgggttcggagttcgatccgaaggtgtttcggaagaaccttactcggag

SEQ ID NO: 19636 - DNA, 133 bp, Glycine max
  Clone ID: 700956554H1
aagaatgccacaaatttctccataattatgggaacttccattatcgacgccctgaacgttcgcgtggaaggttccggagacaagtagattgtcctggcccacggcttcggcacggaccaatccgagtggcagc

SEQ ID NO: 19637 - DNA, 255 bp, Glycine max
  Clone ID: 700956556H1
ggttcaagctgctcgtgatgaaatgcaatggggtgaggagggcccacctccattgctggtaaaaatagctccagatttgtcagaagaagaccttgaagatattgctgcagtcgccttggctcttcacttggatggactgattatatcgaacacacccatttcaagaccagatcctaccagttggaatccattggcttcagaaactggttgcttgagtcggaagcctctcttcaatctcgccaccaacatcttgca

SEQ ID NO: 19638 - DNA, 271 bp, Glycine max
  Clone ID: 700956558H1
aattctgctcgatggatgttagacttgggtttgcatcatctaattctgatactgctggtgcttatgctacctggctgctagaatacccatcagcacttacatctcttgatcatatcacaaactatacaagagggaaaagaattgcgtgctttatggattatgatggaactctttcaccgattgtggataatcctgactgtgctttcatgtccgacaatatgcgtgctgctgttaagaaggtggcacaatattttccaacggcaataattag

SEQ ID NO: 19639 - DNA, 248 bp, Glycine max
  Clone ID: 700956560H1
cggcacagaggggaagaagaagatggtgtccttgaagcttcagaagcgactcgccgctagcgtacaaaagtgcggcaagggcatcgtctggcttgatccaaatgaagtcaatgaaatctccatggccaattctcgacaaaacataaggaagttggttaaggatgggtttattatcaggaagccgactaagattcactctcgctcccgtgctcgtcgaatgaaggaggccaagagaaaggggcgtcact

SEQ ID NO: 19640 - DNA, 76 bp, Glycine max
  Clone ID: 700956562H1
gcggcgtccgagccgctcgcatcgcagccaactacggcgataccatcacaaactgcgaacagccacactacacaca

SEQ ID NO: 19641 - DNA, 275 bp, Glycine max
  Clone ID: 700956564H1
acgcgtacgcggaatccggattcggctcgaggtcatattgactaatcaatttgacacagtatcatgagatcaaagtaccttgtgagtaaattaacatgtggacactacgaatgaacacggtactttgctctcatgatactgtgtcatattgactaatcaattttctttgcccttgcttcttaagcaagtgtaactgatggaaacaaaagtctctgtattgtgtaaaaccgtcgttgtagcttcgttcccccacccccttctatgcctttgtccca

SEQ ID NO: 19642 - DNA, 227 bp, Glycine max
  Clone ID: 700956565H1
cacttgtccccggcgagaaaatcgacataatgctgtagatgcatagcagcttgtctggcaccctcatcaaagccaagatcttggtcgtgatctgcggtgagcagaggatcttctacaccgaaaagatatattccatactccggagtcacaatgagaggagtggcatatgtcgttctcggacacgccgtgaagaacgctggtgtaactgtccctgcgtagctcaacga

SEQ ID NO: 19643 - DNA, 216 bp, Glycine max
  Clone ID: 700956566H1
atctattcaatggcatttttcattgttgctgtgtaaatggaagcagttgttattgaacgatttttccaagtatatcagatatttgctggggattaagtgaaaaagactcaatggtaaaaccaaaagtgtctactcaaccaaaaatatgctacaggcctattcgaccttctgacctggacattttagagcatatccatggcagattatttcccatca

SEQ ID NO: 19644 - DNA, 248 bp, Glycine max
  Clone ID: 700956567H1
tcagaagtaactactggagttacaagaattggggactatgaacttcgcgatcttgtattgctagataataatagcattggtgatgtaatacgtgtagaaagtgacgcatttcaggttcttaaggggattcctgacagacctgaagttgtgcttatgaaattaagagagatcaaatgcaagatagatatggtgataagtgtgcaggataggtttaagtctacagtatcgtcaaaggctgttgtgcggat

SEQ ID NO: 19645 - DNA, 251 bp, Glycine max
  Clone ID: 700956568H1
ggccatttgtattgcgggggctttgtataattgtacaattatctacttgtaagaagttcagattcgggcgacaacatttgtaatgcagaattaggtcattaacattgtaaatcttctggcgatgattggaatatcaatgtgaagacgctatatgacttctgctatgacaatatcattgtggttgtcaaggtatttttgaagaaatatcgtggatttacaaagaatctggttaggcttctacaattctttaa

SEQ ID NO: 19646 - DNA, 254 bp, Glycine max
  Clone ID: 700956569H1
ctcaaatactcaactcattagcccttatcttgcccttattcctcttcatgattctgatcctaaaactagggagaaaactcaagagaactgaattgtctctaaacataccccgaggaccatggaaactgcctattataggaaatttacaccagcttgttacatcgacaccacaccgaaaattaagagacctggccaaaatatacggacccatgatgcaattgcaaattggggagatcttcacaatcgttgtttcc

SEQ ID NO: 19647 - DNA, 81 bp, Glycine max
  Clone ID: 700956571H1
gtgcagcctatacttgagtttctatctagccataacttgtagtttacttcaaacttctaagcaacatggtggaccacacaa

SEQ ID NO: 19648 - DNA, 78 bp, Glycine max
  Clone ID: 700956572H1
gggatttccatggaagtctcatgagaagcagctctagtggcgctcgctccggcgctagtggagatgcttcaattccct

SEQ ID NO: 19649 - DNA, 254 bp, Glycine max
  Clone ID: 700956573H1
aaaggttgggaggttgatctagatgctgttgaagctcttgctgatcagaacactgttgctttggtgattataaatcctgggaatccttgtgggaatgtgtacagttaccatcatttggagaagattgctgaaactgcaaaacgggttggaacaattgtgattgctgatgaagtttatggccatcttgcatttgcgggcacgacttttgtgccaatgggagtttttggctctattgttcctgttctgactcttgg

SEQ ID NO: 19650 - DNA, 241 bp, Glycine max
  Clone ID: 700956574H1
atcgcgtttgggagaagaaacagcaaaatcgctgtgaaaatgagcggaacggtgaagaaagttagcgatgtagcattcaaggtgggaaggaacatcgattgggatggaatggcgaagttctggtctccgatgaggctcgcaaggagttctccaatctccgtcgcgctttcgacgatgttaactcccaaatccaaaccaagtttagccaggaacctgagcccattgattgggattactatag

SEQ ID NO: 19651 - DNA, 246 bp, Glycine max
  Clone ID: 700956575H1
gtaaatcaaacgaattcgttgattccatatcgattcgcatttgcgtacacccctgaccccttgatttctctcagttccgttctgcatcatagagtatgtccagccactatcttcgattcttcgagttgaacacaggcgctaagataccttccgttggtttgggaacgtggctcgctgaacctggcgttgttgctcgcgccttggccactgcaataaacgttggatatcggcatatagattgtgcgc

SEQ ID NO: 19652 - DNA, 248 bp, Glycine max
  Clone ID: 700956578H1
accattttgtgcttctttctgtgtgcaagaaaggtaaaagctttcacacaccaagactcgtagccatggctgcttgctcaagaatttctcttttgctccttttctttctctttggattctccgcagctaaggaactattggttggaggcaaaatagatgcttggtagattccatcttctgaatcagattccctcaatcaatgggctgaaaggtctcgtttcagagtcgacgatcatcttgtgtggaaa

SEQ ID NO: 19653 - DNA, 236 bp, Glycine max
  Clone ID: 700956579H1
atcatcactcaaacattaagataagcttatgcctcagccatcgtttctactcgctagagcgtaacattgggcactcagagaagcaaacccagttgtaccatcgttgcgatctttctagcattttgttgtattgtatcttcttcgaaagcacagcttgagagtctccaacatgcgcccatagctgatgggtctctaagcttcttggtggttagagatggggtagaaaaggtgcttat

SEQ ID NO: 19654 - DNA, 249 bp, Glycine max
  Clone ID: 700956581H1
gcgtttcggaagcagacacagatggctcgtacgaagcaaaccgctcgtaagtccacaggaggaaaggctcctaggaagcagcttgcaaccaaggctgcacgtaagtctgcaccaactactggtggtgtgaagaagccccaccgttatcgtcctggtaccgttgctcttcgtgagattaggaaataccagaagagtaccgagcttttgatccggaagctccccttccagaggctggttcgtgaaattgct

SEQ ID NO: 19655 - DNA, 281 bp, Glycine max
  Clone ID: 700956582H1
cacgcctacgaattcgcgctcgacttttggagcagaatcacttatatacatctctccttgcctagtagtcgtagctccatattcccaaggtacctcacctctccatttgtccatggtccgacaggagattagacctcctgtgatgtctgtgccacaatttggtgggtgggaccaaaatgaaccatgagctatcgactatacagtgattgtcactcaaactcgtgaagacaaagagcatccaatcgccaaactgattgcgatacgtaggcaaattttcggga

SEQ ID NO: 19656 - DNA, 248 bp, Glycine max
  Clone ID: 700956583H1
caaccatatctatctattgagaaacatgatgaaggtttcacccttggcattttccattctctttttggccttcaccatagaacatattattggcattgctgcagcagcaccagaagcagtgcttgacacctcaggccagaagctgagaacaggtgtcaagtactacattctgccagtgttcagaggcaaaggtggaggcctaacagtttcaagcagtggcaacaacacatgccccctctttgtggtgc

SEQ ID NO: 19657 - DNA, 245 bp, Glycine max
  Clone ID: 700956585H1
tttctactcatacttgcacttcaatactatgtttctttcaaactcatgaatcgtcactgttagatcagtaatcatgaatcctcttatgatcaagagctgcactgcatatcagtttagctagcagtttgaaccgtattatctgtgaattaccgtaacagcccttcatcacaggaggaatcaactggctggtctaacaatcactctatgcagttttatgttaagattgagattattcgtccaaaaat

SEQ ID NO: 19658 - DNA, 248 bp, Glycine max
  Clone ID: 700956586H1
caggaatttactgcataaaattctgattcgataatctttacctctttgtgttgaattcctatctgaaggattgatttggggattggacctcattgatcgcctgagatcttctccggagctcatgattgtttcgggtcttgatcatagaatggttgatcttcatgattctgaggattggtccctttttaggctcaatgccctttgggaagcccattatcgccatgattctctgctggtgttctcaactg

SEQ ID NO: 19659 - DNA, 253 bp, Glycine max
  Clone ID: 700956588H1
gtggaggggaacggatctgctgggtgggactagataaagtgaagcaagctgacaagactaagggaagattggatggtggaaatggaatcggcagctgaaaaccctaattacccggcggtggactacaagcgaccttccatcttgtcatttcctcggaggcccgccctcagagttacatccgagttcgatagtgaaagcgcagtcttcttccataagatttcctgcaagttgttggacagccttgccaagttca

SEQ ID NO: 19660 - DNA, 71 bp, Glycine max
  Clone ID: 700956553H1
ttaaaattacactaaaacaatgtgcaaaagacaaggcgatttgcgtaattgtcaaccaccacacaacatac

SEQ ID NO: 19661 - DNA, 249 bp, Glycine max
  Clone ID: 700956589H1
ctttctctctcttgatcaacacccaccacgcgttagagagagaaaaccacgagagatcggaaaatgggtacgcttcagtcttggagaagagcctacggtgccatcaaggacaccaccaaagtgggtctggcccatgtcaatagcgattacgcggatttggacgttgccattgtcaaagccacgaaccacgtcgagtgtccccccaaagagaggcacctcagaaagattctgtttgccacgtctgctgtg

SEQ ID NO: 19662 - DNA, 235 bp, Glycine max
  Clone ID: 700956590H1
atttatcacaaaatttaataatatcacaccttccaacaacccctgcaaacataatcttgggctccagaggaagaagaagatgaacgtggatctggaatcattggcagaggcaacttccggggccataggatcactgatcagcaccactattctctacccccttgacacctgcaagaccaagtaccaggctgaggcacgttcctcaggtcgaacaaaatacaggaatctcactgat

SEQ ID NO: 19663 - DNA, 77 bp, Glycine max
  Clone ID: 700956592H1
ctttttctgaggccctagctttgaaaagccaaggagagtatgatatcgcgtgtgagcatgatcactcatgctgtgtc

SEQ ID NO: 19664 - DNA, 78 bp, Glycine max
  Clone ID: 700956593H1
ctgcccagtttcttctccatctaccacttggctttcacgtttaccttcgcaacgcatcttctctctgaaccctaattt

SEQ ID NO: 19665 - DNA, 52 bp, Glycine max
  Clone ID: 700956594H1
gcgagagagagagagttagggtcgctttaaggcacagaagctttaaatgcga

SEQ ID NO: 19666 - DNA, 250 bp, Glycine max
  Clone ID: 700956518H1
aaatagttgagttgacggaagttgaaaattttggttgagcaagagccttctctttgttccgttccgcgaccatgtcttatgagacatgcccttccgtaaagaacttccttcttttggattctgatgggaaacgtgtcgcagtcaaatacttctctgaagactgggcaacgaatagtgccaaggaaaattttgagaaagttgtcttcaacaagactcagaagaccaatgcccgcacagaagcggaaatagc

SEQ ID NO: 19667 - DNA, 258 bp, Glycine max
  Clone ID: 700956519H1
gggagagttcagttccagcaggaggtggaagtgctgagttgcataaggcatccaaacatggttcttctgctgggtgcgtgtccagagtatatgtgtctggtgtacgagtacatggccaatggaagcttggacgactgtctgttcccaagaggaaaatcacggccacctctcccatggcagctgaggttccaaatcgctgcagagatagccacaggtctccttttccttcatcagactaaaccggagccactggtccac

SEQ ID NO: 19668 - DNA, 256 bp, Glycine max
  Clone ID: 700956520H1
atcagagctgattttcgcggctgttaccggtcaccggagattctatcctaaatcgttttccgatgacgataaaaactgttaaagtcagtaacgtttccttgggagcaactgagcaagacattaaggagttcttttcattttctggtgatattgcatatgttgaactacggagccatgatgaacgatctcaaatagcttatattaccttcaaggattcacagggagctgagactgcactactgctttcaggggcaac

SEQ ID NO: 19669 - DNA, 222 bp, Glycine max
  Clone ID: 700956521H1
attataagaacttctatcccaaggataagaaggaagttccgaagaggaatgacaagaaacatgagtacaaaggtagaacatcaaacacttttgtgcacaccctatttttttctaaattaggaagctttcatggcaaattgttggaatatggtggtggctactggtgtaatgagtaaactggaggtttgagcatgcctagagttaccattttccacacaacat

SEQ ID NO: 19670 - DNA, 76 bp, Glycine max
  Clone ID: 700956523H1
ttcttgtgtttattgtgtctctcaatgagagactgtaatggaaaaggatcatcaaagtcagtccacagaacatagg

SEQ ID NO: 19671 - DNA, 220 bp, Glycine max
  Clone ID: 700956524H1
gccaagtgaaagtgagataaaataaaaatcaaagagcataatgtcagggatcattcacaagattggggagacccttcatgtgggagggcacaagaaggaggaggagcataagggtgagcaccatgctggagaatacaaaggggagcaccatggtgaacaccgttttgagttcaaaggctatcattatggttcccacagagctggaaagtaccattgtgag

SEQ ID NO: 19672 - DNA, 261 bp, Glycine max
  Clone ID: 700956526H1
tggatgttggtcttgggtttgcatcattagattctgatactgctggtgcttattttagctggctgctaaaatacccatcagcacttacatcttttgatcaaatcacaaactatgcaaaagggaaaagaattgcgttgtttatggattatgatggaactctttcaccgattgtggatacatcctgactgtgctttcatgtccgacaatatgcgtgctgctgttaagaaggtggcagaatattttccaacggcaataattagt

SEQ ID NO: 19673 - DNA, 259 bp, Glycine max
  Clone ID: 700956527H1
ggggtagatacatttcttctatttctatgcctatctcttcccttgtttttgtcgtccttcttcaaataccgtacaaccttcaagaatccaccacttccagcaggacctagaggacattcccataatagggaatcttcatcagctagatagtccttctcttcatgagcagctatggcatctctcaaagtaatatggtcctttattttcccgtcaatttggattaaggccagtcatagttgtttcctctccaaaattggcc

SEQ ID NO: 19674 - DNA, 250 bp, Glycine max
  unsure (1)..(250): unsure at all n locations
  Clone ID: 700956528H1
cttcatctgaaacctgccagggtaagatcttacttgagaatagcactgcttgcacagaagttacaatatgatcacacaagnacatgaagaacgaactagaacgaagtttantgaatttagtggctgttgtggcattgggtctggatataatgctgggcgttaaggacatagttaagaacaggaggaatgctgctaagtagaatagttcagtggatgtagagtgcacatggcaagggtaagaagaagcaat

SEQ ID NO: 19675 - DNA, 248 bp, Glycine max
  unsure (1)..(248): unsure at all n locations
  Clone ID: 700956530H1
ctacattttgtgcgtccgtctgtgtgcaaacaaggtaacatctttcacacaccaagaatcttagccatggctgcttgctcangtattctcttttgctccttttctttctctttggattctccgcagctaatgaactattggttggaggcaaaatagatgcttggaagattccatcttctgaatcagattccctcaatcaatgggctgaaaggtctcgtttcagagtcggcgatcatcttgtgtggaaa

SEQ ID NO: 19676 - DNA, 114 bp, Glycine max
  unsure (1)..(114): unsure at all n locations
  Clone ID: 700956531H1
tcgcacgcgngtacgtgcgctcggaacgccgcgcggggtcacgactcgaacatcacgatcggctcacggctcagtcgacgtgaccactcgctagcgcgtaggacagggcgggca

SEQ ID NO: 19677 - DNA, 265 bp, Glycine max
  Clone ID: 700956532H1
attcggctccagcggctcgaggatctttgtttcaacaaatctacatttcatgctgtaattgtagtttcccatttcacccttatctctctctctatccatagtacctttcctcctttcctcatccctcgctctctgtaataaataataattattaccaactcttccgccattggatctgctcttccttccccttctggcaaaaagggtcagtctgctactgggattacatttttccttataattttggaggcgtgctgctgcttgg

SEQ ID NO: 19678 - DNA, 184 bp, Glycine max
  Clone ID: 700956533H1
cagactcttcagttcaaaacgacaagaagctgtggccgtttaagatcgtggctggccctggcgacaagcccatgatcgtggtaaattacaaaggcgaggagaagagattctccgtcgaagagatatctgccatggtgttgggcacgatgtggaaagtcgcaaaggcgattctatgggacgccgt

SEQ ID NO: 19679 - DNA, 253 bp, Glycine max
  Clone ID: 700956534H1
ctttgttcactcttcttctcatgcggctagggtattagcgcacgtcttctagatttaaggaagatgggtaaggaaaaggttcacatcagtattgtggtcattggccatgtcgactctgggaaatccactaccactggtcacctgatttacaagcttggaggcattgacaagcgtgttattgagaggtttgagaaggaagctgctgagatgaacaagaggtctttcaagtatgcctgggtgctggacaaactta

SEQ ID NO: 19680 - DNA, 254 bp, Glycine max
  Clone ID: 700956535H1
ccatgaagcagctatctctttatcggacgatttcaagcctatgcttcccaatctaaagatagatacttgttccttaattattgttaacctgaattggtttcattcaatctcttcctaatatcatgtagttcaggttgtcttttcaaggtgtgaattaccattctcagttgataatcttgagaatttaaaggtggtgataggcgatgaagagacagctgcttcatgcgaagatttcaagcctatgcttcccaatc

SEQ ID NO: 19681 - DNA, 256 bp, Glycine max
  Clone ID: 700956540H1
cgcataactcgcccaacggaatccaggggcttcttcagtactttaacctagtggagggatgcctaacgatgataaaatcacaccaacagaagaaaaacttcacgtacgattggataatccgaacacgtgttgacgggtactggaacgcaccgttgggttccgtaaacttcgttccgggaaagtacctggtcccagcgggctcctcgtacggtggactcaacgaccgtttaggaatcggcgacctaacagcctcgac

SEQ ID NO: 19682 - DNA, 258 bp, Glycine max
  Clone ID: 700956541H1
ctaattctatataagcaaccttctccagcaattcttctaccacatcaactcatcaagggttgtgaaagcagagaagtgagatacactaagttatcctcataaatacactctaattaggtggcaagataagtgtctaaccttagtaacattgccacatattgtgttcattttggaattgtgccactaaaattctattcaattcatccatggctgcctcttcttatgctatgcaatcaatcctggcaaaccctttgatcc

SEQ ID NO: 19683 - DNA, 257 bp, Glycine max
  unsure (1)..(257): unsure at all n locations
  Clone ID: 700956542H1
tccacttccacattgcatatgacccacnanatcttcgactatagctatctttcattctctctctagctacttacaaccactgtatattctacgcgcgcgctttcgatcgatgctattatagtgttccctacctaccttatggctcctctcttcatctcaatgcaaatgcttcttctggatttcacttgcatattattgcatgtcacatgcccagattaccacgacaggacccccaatacagtgccttctacaaactc

SEQ ID NO: 19684 - DNA, 253 bp, Glycine max
  Clone ID: 700956544H1
agagaacattcttgtggggtaggtactctttggaaatgtctgctgttatttacaaggattgggcttacaccgatcaagcattgcctaatgatcttgtcaagagaggagttgctgttaaggatccatctgctccccatggagttcgacttttgatcgaggactatccttatgcttctgatgggctagagatatgggatgctatcaagtcttgggtggaagaatatgtctcattctactacaagtcagatgagga

SEQ ID NO: 19685 - DNA, 254 bp, Glycine max
  Clone ID: 700956545H1
agatgactacccttatgctgttgatggactagagatatggagtgctatccagacatgggtcaacgtctacgtctccttgtactatgccacggatgatgcagttaagaaagactcagatctccaatcttggtggaaggaagctgttgagtacggtcacggtgacttgtaaagacaagccatggtggcctaagttgaactctctctcaagatctgattcacatttgctgcattattatatggactgcttcagcact

SEQ ID NO: 19686 - DNA, 252 bp, Glycine max
  Clone ID: 700956546H1
cttgtatggtgggagtcatgaaattaattttgtgatttttatataagctttatacgtgtaacattgaagtgtgtgtaaaatcctttatttcgttatgatgatgtattgagattgaaattatgaggtgcatgtaattaaagcccttcatatgttggaattgctttgaagtagtgaagttcttcctctcactttaaaaaaaatcaaaaaaatgggaggccgcggattagtgtatacgatgacccgggatttaat

SEQ ID NO: 19687 - DNA, 123 bp, Glycine max
  Clone ID: 700956547H1
atcacttcgctctccatctctccggatcccactttgcgaacacaattcttcgattcattcagatcataatttcggtcgctaagcaaatgatcccatatcgataacccgatttcaatctcaatc

SEQ ID NO: 19688 - DNA, 265 bp, Glycine max
  Clone ID: 700956548H1
tcggacttcggcttcggctcgagctccggcgtcgatctcagagtccggccactcctctcgccggcgatcccttatacctccgtcctccgttcgagtcctttccgattcgattcgttcccagccttctgcgaccacgaatcccgtctacgtttacatgttcatagctatgctgcttggagattctggtgtaggcaagtcatgtcttctcctgaggtttgctgatgattcataccttgacagctatatcagtaccattggagtggac

SEQ ID NO: 19689 - DNA, 208 bp, Glycine max
  Clone ID: 700956549H1
taaagtttatgggattttcaagtcgaaaagatgaaatctcattggctaaatgtttaattcatctaatcaagggaaagcctccaaagataaagacttcagatgggaattgcttggatgcagtgtttgtgcagtgattttagatttcttcaacgttttcaaaagctagtccaattcaacaatctgtttttattttagatttcttcaacgt

SEQ ID NO: 19690 - DNA, 241 bp, Glycine max
  Clone ID: 700956550H1
cacaaacccgtccctcacactctccaaaccctagcggcactacacactagttctatcgctatctccccaagatgtcgagcgccgatcccgagcacagagaagaggaggaggcacccgccgttggcgacgacgaggacaccggagctcacgtcgctccaatcgtcaagctcgatgaggttgctgtcaccaccggcgaggaggacgacgatgcaatcctggatctcaaatcgacgctttaccg

SEQ ID NO: 19691 - DNA, 77 bp, Glycine max
  Clone ID: 700956551H1
gtccaaagcagttagaggcaatcaattgggaagagaagtgcatgttgcgctactccaaccgcgcaattttccacaca

SEQ ID NO: 19692 - DNA, 255 bp, Glycine max
  Clone ID: 700956552H1
ccggttatggaatgttcatactggaatatgcattttaatatttgtcggagctggaggacatcgtaatgaagttttaagtgttgattttcacccatcagatatatatcgtattgctagttgtggcatggataatactgtaaaaatatggtctatgaaggagttctggacatatgtagaaagatcatttacatggactgatcttccctctaagtttcccacaaaatatgttcagtttcctgttatacaatgcttcag

SEQ ID NO: 19693 - DNA, 259 bp, Glycine max
  Clone ID: 700956516H1
gtcaacacaacagttgcatatcaccgtttatcctatcccagcaagaactatatcatgcattttctgacaaattcaaccaatctgaattaaattcacattcacatcacgctgcattctttatttctccaaattttcaattttaataatagctaactaaatgaccagaagatgagtttaggacatattttgtatcattaaattccaacattatattacttttccttacttatctaatagtaattgtgtttcaacaacttca

SEQ ID NO: 19694 - DNA, 251 bp, Glycine max
  Clone ID: 700956478H1
gcattagcaaaagcaagaagaactagtctaagcagaaatggcctcttcagtgatggcatctgtggccctcaaacctgcccctttcactgttgagaagtcctcagttagaggccttccctccctctcaaggaactcctcttcattcagagttgtggccagtggtggcaagaagatcaagactgacaagccttatggaattaatggtggcatggctttgagggaaggagttgatgcatctggcaggaaaggaa

SEQ ID NO: 19695 - DNA, 257 bp, Glycine max
  Clone ID: 700956480H1
ccagtagccgagattccgtgagttgcaaaaatgaagacgattctttccaccgagaccatgaacatcccggacggcgtgagcatcaaagttcatgccaaggtcatcgaagttgagggcccccgcggaaaattggtgcgagacttcaagcatttgaatctcgattttcagctcattactgacgaaaacggtaaaagaaagctgaaaatcgacgcgtggtttggttctcggaaaacatccgccgccattcgcaccgcctt

SEQ ID NO: 19696 - DNA, 263 bp, Glycine max
  Clone ID: 700956482H1
gttggaaagctcacaggcttggcactcgatgtcgtgtcagggattacacacattctccagtccttggacttggaccttgctctcaagcccgcctctcgtcgccttcttgacgttgatgatgatggcttccccacttgggtctcctctgctgatcgcaagctcttggccaacgatcctgttttgccccatgctactgttggcaaggatggtagtggtcaatttcatactgttttggacgctattaactcctaccccaagcatca

SEQ ID NO: 19697 - DNA, 258 bp, Glycine max
  Clone ID: 700956483H1
tcccaatttatgtaggtcccatccatcgagtgtggatgccagataatatttaaggcgcgtttatataaaaaaaaaaaaaaaaaaaaaaaaaaaaaaaaaaaaaaaaaaaaactaaaaaaacaaaaaaaagaggggggcccccccctttttggcctcccccccccgggtttttttttcggggggttttttggggggggccattttttcccctaggggggtttttttatgtctgggggtcttcctgggcattattttttt

SEQ ID NO: 19698 - DNA, 260 bp, Glycine max
  Clone ID: 700956484H1
gtgagtttgttgatcgagataactagaaacagtgtgatgaaaatgaaggtccttgttttcttcgttgctacaattttggtagcatggcaatgccatgcgtacgatatgttccctctccgaatgaacactggctatggtgcccgtactccggaggtgaaatgcgcaagttggaggcttgctgtggaagcacacaacatctttggctttgagaccattcctgaagagtgcgttgaagcaacaaaggaatacatccatggcga

SEQ ID NO: 19699 - DNA, 259 bp, Glycine max
  Clone ID: 700956485H1
ttccgtctgccttcttggatgctataatggatgatgttctcaactctgcagatgccattacctgcatcccccagtgtttggatgccttatgcttaaatagtaatggcctgcaggctgtgaaagatagaaactctctgaggtgttttgtgaaagtgtttacttctagaacatatttgcgtgctcttgcaggggacacacctgcatctttgtctagtggactggatgaattaatgcgccatgcttcctcattgcgtggccc

SEQ ID NO: 19700 - DNA, 257 bp, Glycine max
  Clone ID: 700956486H1
ctcccgagtatgtaaaagctggtcaactcaccttgaaatcagacgtatacagtttcggagttgtcttgctagagctcataactggacgaagagccattgacacctcaaagccaaacgaagagcagaatcttgtttcatgggcaacacccttgttcagggaccccaagagatatcctgaaatggcagatccacttcttaataagaacttcccagaaaaagatctgtctcaagttgttgcaatagcatccatgtgctta

SEQ ID NO: 19701 - DNA, 247 bp, Glycine max
  Clone ID: 700956489H1
gaagaggtcctcttccaatttgaagctagcgaggatggacaagtccagttctttccaaatgctccagttgatgttgacaattctcccagctttgttgccatcaatgtcagtcctattgagtatgggcatgttttgctgattccgcgcattttcgagtgtttgcctcaaaggattgaccgtgagagcttcctccttgcacttcacatggcagtggaagctgataatccatattttcgattgggttaca

SEQ ID NO: 19702 - DNA, 250 bp, Glycine max
  Clone ID: 700956490H1
cagagatggtagctattggctttggagcccctccttctccacttccgtttcatcttcgcctggcttcctctccttctcctttggccttcccaataatccacaaattccaaaacgcaggcaagtcagtgataacaatctgttcaaagaaaaatgcaaaatcaagggtggtcactctctgctctgcacctgtgcaagagcaggaggttcgtgatattactttgagagagagaagtgtttcggttgtcctatt

SEQ ID NO: 19703 - DNA, 249 bp, Glycine max
  Clone ID: 700956491H1
cgtgagtccttaagaaaagccctgaatcatcctgacggcaacagcgttgggagcaaagatcagcagaagctctacgagcttcagcagaagatcttttggcagaagcaagaggtgaaggatctaaaagaaagatctttatggagcagaagcttcgacaatgttgttgtactcctcgtaaggttcagcttcaccgttttagcaaggattaaggttgtcttcggaatcggtcaccacatgccttgtctgtct

SEQ ID NO: 19704 - DNA, 251 bp, Glycine max
  Clone ID: 700956493H1
ctgtaaccatggcatccaccactctatcccctacaaccccttctcagctatgctcaggaaagagtgggattttcagtccctcacaggcacttcttgtgaagccagtgaagaggcagatgatggggaagagcaagggaatgagaattgcatgccaagccaccagcattcctgctgatagagtccctgacatgggcaaaagacagctcatgaatctgcttcttcttggtgccatttcactcccctctgctgga

SEQ ID NO: 19705 - DNA, 253 bp, Glycine max
  Clone ID: 700956494H1
ctcaatcatccatagacatggccaccgtcacttctgcagcagtttctattccctcattcactggcctcaaggcaagcgcaggcaaagtgagtgccgccgcagttaaagtctcagctccccaagccacaaggttctgcggcatcaaggcttccctcaaagacgttggagtcgctgttgtggccactgctgcgagcgcagttctagctagcaacgccatggccattgaagtgttactgggcactgatgacgggtc

SEQ ID NO: 19706 - DNA, 255 bp, Glycine max
  Clone ID: 700956495H1
gttgttttcaagtcaactcaatggcacttccctcaggtttagtttccatgttgatagtactttttggtatggttttggtagttggggttgaggcaaaggcaagggctttctttgtatttggagactcactggttgacagtggtaacaacaattacttagcgaccactgcacgggctgattcccctccttatggcactcactatccaactcgtagaccaaccggtcgtttctccaatggcctcaacattcccgatc

SEQ ID NO: 19707 - DNA, 258 bp, Glycine max
  Clone ID: 700956496H1
taacccaccattcctttcacttccacaccccaacactctctaattccataaccaaccttctcataatccacgcaacaacgttcttctgccacttccctcacggtctcaacgctgctacattcgagccataagtgacgcaactgtggaacctgaaatttctaagaaagaacaaaacgagtcacctaaagattggaagattaaaatgctctatgacggagattgccccctctgcatgcgcgaggtgaatatgctaagaga

SEQ ID NO: 19708 - DNA, 257 bp, Glycine max
  Clone ID: 700956501H1
caaagccttgaccatgaaagcaacccctttagtgctcttcctcctcttcaccatagccaaagggcttcacaaccccaaatgtgatgctacccatcaacatgaccatgatggctcaaccctccaagtgttccatgtgttcagcccatgttccccatttaggccctcaaagccaatgtcatgggaagagagtgtcctaaagctacaagccaaggaccaagccacgatgcagtacctttctagcttggtggctaggaggt

SEQ ID NO: 19709 - DNA, 246 bp, Glycine max
  Clone ID: 700956502H1
tgcgaccttcccaccatcccctttccatattccgttattattatcgttttctctcatgttctgacaatttctcttgtgctttctctaatggcggttgcagccttcaaatcctcttcgcgaagagcaaactagtcttccgcaccttcgaacgcgtctccgaacacgacgtcgtcctctggcagatcctccaccatagctccggactcgactcgcatgtcgacgagcgctgacgcgttctccaggggc

SEQ ID NO: 19710 - DNA, 242 bp, Glycine max
  Clone ID: 700956503H1
ttttgaagaagaatcagtaataaacatcttaatttgcatagtagtcgcagctccatattcccaatgtccctcacctctccatttgtccatggaacgacaggagatcagacctcctgtgatgtctgtgccataatttggtgggcgggaccaagatgaaccaggaactctcgactatacagcgagggacactcaagctcgtgataagagatcgcatcacaacgccaatctgcgtggaattcgaa

SEQ ID NO: 19711 - DNA, 257 bp, Glycine max
  Clone ID: 700956505H1
acttttcctgtgaggaaaagaatgttcggtcgtgcttggcccctacgagctctcatgagagatggaattgtaccaacttggccacaactgatgaatagtaaatctgctccaccatgcacggacgatgaggttgcaaattcatggttaaacaatgaagcagtcaggacagcaattcatactgcacagaaaagtgtggtcagtagttgggatttatgcactgacagaatttacttcgatcatgatgcttggagcatgat

SEQ ID NO: 19712 - DNA, 243 bp, Glycine max
  Clone ID: 700956506H1
aactcacttcaatttctttaccttatatatatctatccaattaaccactcttatatttagaatccaaaaatctctcgtcgttcaagaaagaagcaccacaaattaattctcgtttcccattcccatccctatgccaactattttgcataggattttccttctttacaacctcgtacatacattcctcctctgtgtggtccccaagatggtgcgtcgctgcctcatgccttcttggtaccaaat

SEQ ID NO: 19713 - DNA, 261 bp, Glycine max
  Clone ID: 700956508H1
attatcctaagtctttgggaatagtgctgcaatggcttcaagtcaggaggaggtgacccttttgggagctactggaagcccatttgtgtgcagggttcatattgccctcaagttgaagggagttcaatacaaatatgtcgaagaaaatttgaggaacaagagtgaactgcttctcaaatccaacccagttcacaagacggttccagtgtgtattcacaatgagaagcccatagcagagtctcttgtgacagttgaatacat

SEQ ID NO: 19714 - DNA, 180 bp, Glycine max
  Clone ID: 700956509H1
gtaaactgttacaattcttaccaaaaagaagcatgtttttccctatcatgctttaagtgtttaataatcctatcatgctaagtgtttaataatgtaaagatttttacattgttgactaataagaaattatcctacatatgactcttaaaataattattacaaaagtcaataattttcaat

SEQ ID NO: 19715 - DNA, 262 bp, Glycine max
  Clone ID: 700956510H1
gttgaaagtcattaactatgggaatgatagaggaggttgaaaacgaaaacggagacctaaacgacgccgttcttgttccaccccctaacttctccatggtcgaggactgcattttccgatccggcctccccaacccttccaatttcccctttctccaaaccctaaaccttcgttccatcatatacctgtgccctgagccttatccggaagaaaatctggacttccttcgttcgcagaatattcgcctttttcaatttggaat

SEQ ID NO: 19716 - DNA, 261 bp, Glycine max
  Clone ID: 700956511H1
gaaggaagagacttcaacttcagttcagttgtgttgtctgacaaaacgaacagcaattgcgagcagatgcaagatccatcttcaaaccctaattccaatccaaatcccaatcctcacaacgccaatgccgcatcccagttaccgcgtccgccgcaggacacggcgtccaccgccgtcgccggcgccttctcgtcctctctattcgcgcgctccggcggacctcaccaccggcgagcccactcggagatgagtttccggctg

SEQ ID NO: 19717 - DNA, 235 bp, Glycine max
  Clone ID: 700956512H1
gtaaaattgagccacttgtgagtagaagcaagggtgagaggaagactcactatggtaagggtggaagtgatgggctgaggaagagattttcgttgagactgcggccaaggttacggttattggctatgagaatgaaaagggcttccattaggtccattttgaatgaagtggggatctttattcgtaagaacattagagcagtgacattttctgcttcaatttctaccgtgttctg

SEQ ID NO: 19718 - DNA, 60 bp, Glycine max
  Clone ID: 700956513H1
gttactccgtctctcgtggattcggatctcgagtctgatctcacgcttcagatctcggtg

SEQ ID NO: 19719 - DNA, 72 bp, Glycine max
  Clone ID: 700956515H1
ggcccgtcttctatttcaacttctcgcgcgatagattgcgctgttctccttcgctcttccctttccgattcc

SEQ ID NO: 19720 - DNA, 251 bp, Glycine max
  Clone ID: 700956475H1
gatggatcagtttttgtggagggtgttgcctttgcttacaatccttgtttcctttggagtgttcttctacttgcaggattcttacacagcacagttatcttcctctcataaagttaccgcgggataagtgcagccttcttccccatcgccacttctggatatccagcaaacgtattgtgaccccacaagggatcatttctggttcgctggagataaatgatgggaaaataatatctgttcgttgagggaca

SEQ ID NO: 19721 - DNA, 251 bp, Glycine max
  Clone ID: 700956441H1
cccatccaatcctcacatgcatgctgtctctgccaaagtgccaagtcacataccatttccattgttaccatactgtctttccacactacatacgaccccagctcaatcagccacacttaaaaggaaccgctcactcaccaaggatgaaattgatgcttactggaaatcaaagaagaagatagaggagagcaccttagagctatttccaccttgtcagagactattcaggctagcaaaagcacagaacctga

SEQ ID NO: 19722 - DNA, 108 bp, Glycine max
  Clone ID: 700956442H1
atttatctatcttggttctctctctcaatctaacgatttcgccattcgacagcgatcttctccgtctccactcatcgctcatcaacgctacccatttgcgctaaacct

SEQ ID NO: 19723 - DNA, 253 bp, Glycine max
  Clone ID: 700956443H1
ggtttagagagaagaaaacgttggtcggagaacattaccggaaagagaatctttgttgattccagaaatgtctagcatcgcttcctcacaccaaagcttcctcaccaacgcccttattccactaacgcacaacccaaagttcaggaccactgttactttcccttcttcactcaaaactgtctcttgcagttccccacaacatgaacatcgccaatctccaaggaagaagaatgagaacaagttagcaaagttg

SEQ ID NO: 19724 - DNA, 256 bp, Glycine max
  Clone ID: 700956444H1
tgttgttgttgttgtttctgttccttctcttgttccttaaactctttgtttcaaacatccttagaaaaggtaaaaatttaaaaaaaagaaaagaaaatggtggctgtggtttcccaagaaaatgttgcggcattggtttctcgtaccggtagggagttgcaacgttatagaaaaggtcgtcgccaagttgtgggatgcataccgatacagactttaagattgtggacgagaagtactttcccttgagactgttgtt

SEQ ID NO: 19725 - DNA, 147 bp, Glycine max
  Clone ID: 700956445H1
taaaccggatttcattgctcccggtgtcaacatcctcgccgcctggacccaagctgtcggcccgaccggtttggactccgataccaggagaaccgagttcaacatcttgtctggacacttccatgagacttgccctcacgtacagtg

SEQ ID NO: 19726 - DNA, 250 bp, Glycine max
  Clone ID: 700956446H1
cttgcatgtcgctgttggtactgttgccggtggctatggaggtggtggaggcagcggcggtggtggcgcggtagaacatggtggacgtggatatgaagaccgagctggaggacgtgcatgtgctggtgctggatacgcttcattcagaggtgtagacagtggtggcaacaagagcaatactgacaagccttatggtattaatggtggcatggctttaagggaaagagctgatgcaacttgcaggagaaga

SEQ ID NO: 19727 - DNA, 80 bp, Glycine max
  Clone ID: 700956448H1
cagatccattaggtgcgtgttgtgaattgtgtgagccaaagagagagaaagagacgaagacgaagaagaagaagacgctc

SEQ ID NO: 19728 - DNA, 256 bp, Glycine max
  Clone ID: 700956449H1
agttgctaaagctggtgcactcgtctcttacaaactgggcactggtttggttgttgctcgaagctcagatggatcatggtctgcaccgtcagcaatattctccctgggtttaggatggggtgctcagattggtggtgaacttatggattttatagttgttcttcgtgatatgaaagctgtaaagacattctgcagtcatatgcatttttctcttggtgctggttgtagtgctgcagcagggcctgttgggagagtg

SEQ ID NO: 19729 - DNA, 257 bp, Glycine max
  Clone ID: 700956450H1
cggctcgagaatctgataagcaggttctaatggatcaatatttctgcttgatgaaaaaacatgatgacatcagcaatattctcagtcacagtgaatttacatggaatgaaaccctacaaacgttaaatgctgaggatgatgtctgggatgcatacattaaggaccacccagatgccatctcatataaaaacaaatgtttgtatcttttccatgatttatgcaagatttttggaaacaaattaatggaagtatcagat

SEQ ID NO: 19730 - DNA, 256 bp, Glycine max
  Clone ID: 700956451H1
cgctcgagcgaatcggctcatcacattctctttctctcttcaacatcttcccctctcactcttcctttgccttgtctccgtgtgaaagatcacaactccaccgtcaccgatttccaaggttgagttatttgctggtctaacttaaccatactgtctattttgactcctgagattgctagtgagtcatggggcatagacatttatatagctcatctccaatgtttgagggtgaacctgaccagaactggaatcatat

SEQ ID NO: 19731 - DNA, 255 bp, Glycine max
  Clone ID: 700956452H1
gaaaaagctactgatttttcttctcatcgaggttgttttctttgctgccgttgctcttataacaatgctggcattgcatggcactcgccaaaggtcgttagtggttggtgttctctctgatatcttcaatgttatgatgtatgtctcccctcttacaattatggcaaaggttataaaaactaagagtgtgaaatacatgccattctggctctctctggctaacttccttaatggtgcgtgttggacaacatatgc

SEQ ID NO: 19732 - DNA, 253 bp, Glycine max
  Clone ID: 700956453H1
aaattctacaacaatgtcatcgttgagatcctagcaaatggtttaaaaccttttgtcactctttttcattgggactttccacaagctcttgaagatgagtatggaggattccgtagtcctaaagtagtggcggattttcgtggctacgcaaacttctgcttcaagacctttggagacagagtcaaatattgggtcactttgaatgaacccttatcatttagtctcaatggctacaatggtggcacctttgcac

SEQ ID NO: 19733 - DNA, 252 bp, Glycine max
  Clone ID: 700956454H1
gaaaaaaagaaaaagaagatcaaggaagtgtcacatgaatggtccttggtgaacaagcagaagcctatttggatgaggaagcctgaggagatcacaaaagaggagtattctgctttctacaagagtcttaccaatgactgggaagagcatttggctgtcaagcacttctctgttgagggtcagttggagtttaaggctatactctttgttcccaagagggcaccttttgacctctttgacacaaggaagaag

SEQ ID NO: 19734 - DNA, 251 bp, Glycine max
  Clone ID: 700956455H1
ataataatgggttcacaaaattgtatggataggaagcactatgttctggtgcatggggcatgccatggagcttggtgttggtataagctcaagccacgcttggaatctgcaggccataaggtcacagtacttgaccttgcagcttctggaaccaacatgaagaaaattgaagatgttgatactttctcagagtattctgcgcctttgttgcagctaatggccacaattccctcaaatgagaagttagttct

SEQ ID NO: 19735 - DNA, 259 bp, Glycine max
  Clone ID: 700956457H1
ttcggctcgaggaagaggtcctcttccaatttgaagctagcgaggatagacaagtccagttctttccaaatgctccagttgatgttgacaattcttccagctttgttgccatcaatgtcagtcctattgagtatgggcatgttttgctgattccgcgcattttcgagtgtttgcctcaaaggattgaccgtgagagcttcctccttgcacttcacatggcagtggaagctgataatccatattttcgattgggttacaa

SEQ ID NO: 19736 - DNA, 251 bp, Glycine max
  Clone ID: 700956458H1
ctcgatggcaaggtccttcaagttatgcgcccttaattctacctcagggagtggtttcagtgcctgggtggtgtgcatacagtggtcaaatggggtcaatctctacttcagacagtccacagcaagcaatgagaaacggtcaaacatatggaacttctcgtcaaggtgagcttgcaggatcacaaggggcatattctcaattccgttctggcaccgttcctgtagggttttatacattgcagagggagaac

SEQ ID NO: 19737 - DNA, 251 bp, Glycine max
  Clone ID: 700956459H1
gctctatcttcccaaaatcatataattctctttcatctgaattttccctttcaaatctcttcctttgaagttttcgtagttctctgcatcatggagatggaacgcgtcttcgagtttcctcacactcacatggatcggcgcccgagaaagagagcgagattgggctgggacatccctgaggtccccaaggctcaggtaggattgttttgtggacaagatgttgggactatttcaagctttgctccttcaag

SEQ ID NO: 19738 - DNA, 248 bp, Glycine max
  unsure (1)..(248): unsure at all n locations
  Clone ID: 700956460H1
cacagatgttggtaacataatagtgccctacggtaaccatataagcatactcagnattaaccttctgcttcatttccataacaaaaagagcatctcggtctgaacaaccatatggaacaatagttgtctctattgtgtgatcttgctttgctcttgtgaagtacattggtgcggtggacgagtcgatgccggctatggcaatgaagaagtcggttaatgctgagaatgcttatatggttaccatggga

SEQ ID NO: 19739 - DNA, 252 bp, Glycine max
  Clone ID: 700956462H1
atttttgaaggttcatcacccggtgctggaaaatttgggtacctaaaaatacgtcgtcgagctaccccaaaaaaggctaacgccatcaaggatgatggtgcactcacctcagaaaaggctaacgctagcaaggatgatggtgcagtcacgatgaagaataatagttaatcatggcttatatttaaccactttaagagttctacctttgttgtctttccccagaacatgtatagtatggttaaattttgaacc

SEQ ID NO: 19740 - DNA, 66 bp, Glycine max
  Clone ID: 700956463H1
cttttctaacttaaaaaacactaaaaaagggcggccgcgatacttgcgctgttggcccggggaatt

SEQ ID NO: 19741 - DNA, 280 bp, Glycine max
  Clone ID: 700956465H1
cgcacttcggctcgagcacgcttgtttacacaacgcaagccattgtccgttgtattcgatggactacgatttcagaagcacgttccggcccaacacctcacctgtaccgtccgccaccgccaccgtcaccgatgtaccgtccatcaccgtatcaacagaatcctactccttcttcaggacttggcgttagggttggtataaagccggaatataggatcacaccgccgcctcatttatcatcacttgctggagataatccacggagcaacttccaatttga

SEQ ID NO: 19742 - DNA, 81 bp, Glycine max
  Clone ID: 700956466H1
gtgatccggtgcgtccctccaaaattgaggcagaaagaggatagaagtgatatgaggtcctcttttatccatccatccaca

SEQ ID NO: 19743 - DNA, 86 bp, Glycine max
  Clone ID: 700956468H1
caacaccagaggcagaggcagagagaaacagagagagaaaggagtaacaaatagttgattatttcaaagacaatgaacaataaaga

SEQ ID NO: 19744 - DNA, 259 bp, Glycine max
  Clone ID: 700956469H1
cttattttatctattctctctctttcttttgtgttctaagcagctagaagcaatggagaggaaaagaagccatgcctctttcaccatgtttgcacatgcttgttggagtgatctttcagagccttgtcattcctgtagtatccaccactgttgaagatcagaagaactactacaccccagatccacatgctggaagtcccccctcaggctcacacagtagtactcctccatctcatggccatggaagctctccaccctc

SEQ ID NO: 19745 - DNA, 257 bp, Glycine max
  Clone ID: 700956470H1
ctttctctcttctctctccacccaaaccctaactcccgaccctgttcccctctcgtatccgtcatgaaaggaggaaagtccaagaccgaatctaagagagccgatcccaaacttgctgtgaataagaagggagccgccaccaaggctaggaaacccgccggcaaggggaaggcagcgaaagaccctaacaagccaaagaggcctccaagtgctttcttcgttttcatggaggagttcaggaaggtattcaacaaaga

SEQ ID NO: 19746 - DNA, 255 bp, Glycine max
  Clone ID: 700956471H1
atgaaactctgaaatgagatcaaaataacataacacaaaacgcaaaaccctaatctctgcaattcctgtgcgtggaaaggttcgagaatggtttcgctggaggaatctcgctcgaattcgagccgtttccccttggcgaggagttaccagtaccactcctcggtttcgtccaaaacgcagcgtcaaattggaaggtccatgcgcactatacgctccaatttcttccaagacgacaacagttctagctgctccttc

SEQ ID NO: 19747 - DNA, 245 bp, Glycine max
  Clone ID: 700956474H1
atgatttggaaaggctttctgtctctgattacaacaatgttaatggttttctatcatatactggttcaaattcaacatctgatgctcagcggtcattttttgactttgaggattcccaggatcaagtcttctcaccacctttgctaatggactcatcacttttcacagatccatttgaagacttgctggcccctctctccgagactgaaacggccttgatagaccattgaaaattttctgggcaa

SEQ ID NO: 19748 - DNA, 252 bp, Glycine max
  Clone ID: 700956439H1
gtaagctcccaagcagtgggaggaggctcgggactctgaccgcgtgcctgttgaagaatgagccggcgactcataggcagtggcttggttaagggaaaccaccggagccgtagcgaaagcgtgtcttcacagggcaattgtcactgcttatggacccgaacctgggtgatctatccatgaccaggatgaagcttgggtgaaactaagtggaggtccgaaccgactgatgttgaagattcagcggatgagttg

SEQ ID NO: 19749 - DNA, 255 bp, Glycine max
  Clone ID: 700956404H1
cctcgagcctatcggctcacgaagatgtttcctcaggaaactcatagtaacggctctcagcaggggccgggggtgggttacagtctcagagagcgagtccgtcgtggcactcgctggtcacgtgcctccacttcctccgttagggtttacgaccagcaccaaccgcaacatcgacctccttgcactgatttcgacgtcgcctatttccattcctacgctcaccttggcatccaccaagagatgatcaaggatcgt

SEQ ID NO: 19750 - DNA, 256 bp, Glycine max
  Clone ID: 700956405H1
gtgaaaaagggggagtttcttattccttctagacgcttccattgatcggcgatttctgatacatggcggagatcacgaacacgaggaagtgaagggtgagtccttgttggagaagatttctgggaagatccacgaccacgattcctcgtcttcgtcggattccgacaacgacaaaaccagcgccactgattccttcaagtctaatgttttcaggcttttcggcagagaaaagcccattcatcatgttcttggcggt

SEQ ID NO: 19751 - DNA, 254 bp, Glycine max
  Clone ID: 700956407H1
gcaaaatcttatcttagctaccccatcacaacaaccacgtcactatttctgatactctattaggcaaaaacaccaccaaatgggagaggaaaaggagcagcctaagaatgacaccgagaaaaagcccgaggaggtagcccccaagaaagacgacggacccatccctgtcgtttacaaactcgacttgcattgcgagggatgcgtcaagaagatcaaacgcacctgtcgccacttcgaaggtctggaaaccgtta

SEQ ID NO: 19752 - DNA, 259 bp, Glycine max
  Clone ID: 700956409H1
ggagagaacaagcacagcctcttagaaaagcttcaccgatctgacagcagctctagctcttcaagtgaggaggaaggagaagatggagagaaaaggaagaagaagaagaaggaaaagaaagggctgaaagagaagatcgaggagaaaatagagggtgatcatcatcatcacaaggatgaggacacaagtgtccctgttgagaaagttgaggttgttgaaacagcacatgctgaggaaaagaaggggttcctcgacaaga

SEQ ID NO: 19753 - DNA, 255 bp, Glycine max
  Clone ID: 700956410H1
cagaaagcaagctcatcctagagttttaaaaatggcagcagcctcctccatggctctctcttccccatccttggctggcaaggccgtgaagctgggcccatcagcccccgaagtcgggagggtcagcatgaggaagaccgtcaccaagcaggcctcctccggatgcccatggtacggcccagaccgcgtcaagtacttgggcccattctctggcgagcccccgtcctacctcactggcgagttcccaggtgacta

SEQ ID NO: 19754 - DNA, 255 bp, Glycine max
  Clone ID: 700956411H1
ggagtcatgattttaacaagtggattctatcgacttccaaatgatcttcccaaaccagtgtggaaattccctttctactacatttccttcctcacctatgctttccaaggactgttaaaaaatgaatttgaagacttgccattttcttcggaagttctagctgacacttggcacgtgcaaatgggtcactctaagtgggttgatcttgctctcatgtttgccatgattgttctgtatcgagttctattcttggcc

SEQ ID NO: 19755 - DNA, 256 bp, Glycine max
  Clone ID: 700956414H1
gtggtctgcaactatgagcaaggattatctaatcatactttctctccttctttccacggtgcttgcaacttcaagttcttcttcttcttcttcctccctctatcttgggaagggcttctcccatcgcaaattgtctcccagttatcacattcacaaaaccattgacgaatcctatgcagttatcttcgatgctggtagcacgggaagccgtgtacatgtctatcgttttaaccaacaattagatctccttcgcatt

SEQ ID NO: 19756 - DNA, 258 bp, Glycine max
  Clone ID: 700956415H1
cttctcgccactcccctcaattcacccccattctagaggcgcgtgcatttgacgacttgagtggccatgacattataacccactccagaagctcccaccctccaacccccattgtccacaagcacactaaatccaatcacaacaaccacaagaaaaagagatcagattccgaggaagatggctccgtctcttgcaacaagtgcagacctcactcccgcgacaaaatcttcatccttcccttggatcactcctccacca

SEQ ID NO: 19757 - DNA, 283 bp, Glycine max
  Clone ID: 700956416H1
cgtaagctcggccaaaaataacaaagcagaatcatcaacctatcgtgcagatgaagacggatttcaactgccaagagtcgtatacatggcacgcgaaaaacgacacaactaccctcaccacttcaaagtcggagcggttaatgcattgatacgagtgtcttccgagataagcaacgcccctttcattctcaacttggattgtgatatgtactccaataatgcaaatacaattcaagaagtattatgcttcttcttggatgaaacaaaaggccacgatatagct

SEQ ID NO: 19758 - DNA, 61 bp, Glycine max
  Clone ID: 700956417H1
ccatggttgagctctggtggattacgtgctttctctaactactgttttccacacaacatac

SEQ ID NO: 19759 - DNA, 252 bp, Glycine max
  Clone ID: 700956418H1
atttgatctgcgagtggagaagagaatcgtgatgggaggaggacacggtcacggcaccacctacaaaggagttaccgttcatcacccaaagccatggcacactatcaccggcaagggtttgtgcgcggtcatgtggttttgggtattctacagggcaaagcaagacggtcctgttgtattgggctggaggcatccttgggagggtcatcacgatgatcatggcaagggccattaagcattccttaggcatga

SEQ ID NO: 19760 - DNA, 258 bp, Glycine max
  Clone ID: 700956419H1
ctaaattcatgttatttcaattaagtttgaagtatcaatatcaaattatagagcttttgatcacgtttggttgaaaatatataaactaaaaacatatttttcacttaaattaattatcgattcatatcataatactaaacaataacttctcattcagaggggttagactagaactttataacatgcatcatcattgccatctctcttataaacttatgcattgctagtattattggactgcttataccaatacaattg

SEQ ID NO: 19761 - DNA, 250 bp, Glycine max
  Clone ID: 700956420H1
gagttttcactctctaaagaaagctttcttctctctcttttcttggcatgagaaatagtcttcaagggagtagataaagacacaaacactaaggagggaactgtttcaaatgatgttcatgttagctagccactattcaaattcaaaccaaagccattaaaaaggtgttggggaaatttaccataggttgttgagtttagatggacagttcatccaactttgagaaactctgattggggtacaaccttca

SEQ ID NO: 19762 - DNA, 257 bp, Glycine max
  Clone ID: 700956421H1
caccactccccaaaaccaccggagccatcgtcatcggcgcgggcctcgccggactcgccgccgccacccacctgaactcccagaacatccccttcctcctcctggaagcctccgacgccgtcgaggccgcgtgcgcatcgacattgtcgacggcttcctcctcgaccgcggcttccaaatcttcatcaccgcctacccggtagcgcaaaagctcctcaattattaatccctcaagctccagaagttctactccggcg

SEQ ID NO: 19763 - DNA, 255 bp, Glycine max
  Clone ID: 700956422H1
ggaagatgttaacgttggagcaaacaagttctcagaaaggcaaccaattggtacagcagctcagggtggtggtgacaaggactacaaggaggcacccccagctcctttgtttgaacctggtgagctcaaatcatggtccttctacagagctggaattgctgagtttgtggcaactttcttgttcctctacattaccatcttaactgtcatgggtgtcaacaggtcaccctccaagtgtgcctctgttggcattca

SEQ ID NO: 19764 - DNA, 253 bp, Glycine max
  Clone ID: 700956423H1
caaagctcgactgttgcaatttgtgacaggcacatccaaggtgcctttggaaggctttagcgctcttcaaggaatttcaggctcccagaagtttcagatacacaaagcatatggaagtcctgatcacttgccttctgctcatacttgcttcaatcaattagatttgccggagtatccatctaaacaccatttagaagagaggttactgctggcaattcacgaagcaagtgagggttttggctttggttgagaa

SEQ ID NO: 19765 - DNA, 252 bp, Glycine max
  Clone ID: 700956428H1
gaaatgatagcagagtccttaataaatgaccccatctttgtactgttaggatagctgagtttcctttgtcttctcagctttgaccacttggcacgctacgctacgttgcattttcaaccatcactcttttgtgttcaactagtactatataatagtggacacctcggttgttcacttgtttttgttttctcgtgtatatctcagtgttgatcttaaaggggaaaatgagttacttgggtttgggtgttagtc

SEQ ID NO: 19766 - DNA, 91 bp, Glycine max
  Clone ID: 700956429H1
gaggttgttgctggaatactatggatctaatccacaaccatggacgcaaaacgcgaactcgaagtggaagactgggaactgctaccaccca

SEQ ID NO: 19767 - DNA, 255 bp, Glycine max
  Clone ID: 700956430H1
ttttaacacaacacaagcaccaactttctttttctctttcttttagggtccttcctcactctgaatccgccattgggctgcgatggcgaagaagcgaaagtcggtggcaacgcgccttgacgaagtggatcgaacgatgtactccactttctgcagcaccgccaactccctctctcatctctacacccacgccatgaaccaacaaaaactctcatttcaggccggtgaacgacacgctcttgagaaattgtatca

SEQ ID NO: 19768 - DNA, 246 bp, Glycine max
  Clone ID: 700956432H1
gatggcggatctcctttagtcctttgtctccgttccgtcgtcaacgctacctttagatctgcgtttggccttcaggttttgaagtccgaaggagataatagaagagattcctgacatcgtaatcatttttggtgtcgtaaggcgaagggttgcttctggaagctcgtctccttggttactatgtcagtcagctcagaaaatccggtctggatccatcagtttgctgctatagtgtcttacattgtg

SEQ ID NO: 19769 - DNA, 250 bp, Glycine max
  Clone ID: 700956433H1
actagttctagatcgcgagctgccgcccttttttttttttttcttgtaggggtttctagcgttttgtttatagtgaaaggtcaaaaagaattggaaagggctgaaaaagtagaattaggacccctgtgaaatatttgatggtgcattgttcaaaagaatggcgtgtagcaaattaagcaaggctctttttcacccttagttagggggatgatttttggtaaggacttatagggtttggtttctagggtaa

SEQ ID NO: 19770 - DNA, 259 bp, Glycine max
  Clone ID: 700956434H1
tgctgatatgagaaatattgtggacattgaacaagaaagaagcttctacttgtatgatgatatgagggtagtgtttcctcaacgtcattgcgattctgatgagggcaagttacatgtggaatatcatttcccttcaaatccaaaatacttcgacatcagctgctgaaatgccgctgtctctcagtgatttttgtatatatagttgtaaatgttgtacgtatacaattcatttctttcaattctggggtgatgtgcctcc

SEQ ID NO: 19771 - DNA, 257 bp, Glycine max
  Clone ID: 700956435H1
ctgactgactacctcagggtctgcaaagtttcactaaagattagaatgtttatttgaattttgaagttttgtttgtgttgatggaagaagataatagtgaccatgaaggaagtagaaagaggaaattcactttcaaatgtagtgttacatgagtagcttaggaagctcacaaaaccactgggtggcttgcccatagtttcaaactatagcttcacattccagtccttgcataatgagtaaatgttctgtttttcttc

SEQ ID NO: 19772 - DNA, 255 bp, Glycine max
  Clone ID: 700956437H1
ctgaatttatctgagagctgaagagagggaacgagtttgtgaagtaaagttgactcagtggaaactcggttgaactcgaaatggcgaaacttgaagcgaagtagtgaatgatcgtggactcggtggggcagttcttctccggcaaagaccatcttccttattgtgactctgacgtcgtcgctggatgtgaaagagaggtattggaggctgaaaaacaatcatctgaagagcatatgcaggactgtctcctgcgtt

SEQ ID NO: 19773 - DNA, 255 bp, Glycine max
  Clone ID: 700956438H1
cttcaactctgcttcccctggcaaccttcttcttagttctctaccgcttcttatctccagattgctggggcgaaagcacaaccgttgactagtctcaagcttaactctccgatccttcaggagtctattgctaaagagatcaatgaaaatcctgaggcaggatgggaggctgctataaatcctcatttctccaattatacagttgaacaatttaagcgccttcttggagtcaaaccaacgcctaagaaggaactg

SEQ ID NO: 19774 - DNA, 260 bp, Glycine max
  Clone ID: 700956403H1
gagcggcgggtagaatcctttgcagacgaatcaaagcgacaagggctgaatctcagtggatcgctttcagtccctacagcaattcacctctatgatctccaagataggcttggactcaaccaaccaagcaaggttgttgattggttgctcaatgcagcaaaacatgaaattgatgaacttccaccacttcctattccttcaggtaacttcacccttggttatccctctcttgtttcttgtaatgaagttagcacctctcg

SEQ ID NO: 19775 - DNA, 219 bp, Glycine max
  Clone ID: 700956361H1
cttcagtaccacgactccaaggtcctggaacatgcctctgtttgtttgacacgaatagctgaagcatttgcatcatctccagacaaattagatgaattgtgcaatcatggactggtaacacaagctgcctctctcatttctaccagcagttctggaggtgggcaggcttctctcagcactccaacatatactggtttgatccgccttctttccacacaa

SEQ ID NO: 19776 - DNA, 217 bp, Glycine max
  Clone ID: 700956362H1
gtgatattttcccttctactttttcgttttctactattcaatgatcctttctcaccaacacaatgttcatcatatttaattaatccgtgttctaaagggaatattcagatagttcaactgcatattttattagtcacttcctgcgtcttcttcagtcattctctaaatttccggcatgggatctttttggtgccccttttacactcttccacacaac

SEQ ID NO: 19777 - DNA, 236 bp, Glycine max
  Clone ID: 700956363H1
gtttctcacaagacccctgcactgattccaatgccccaacctcaacctcttccaccttagttgtagatcactactgtgactacgacaagctcaaattcaaaacctttctcagaaaaatgttctgggaattcggtctcgcctgtgtggccaacccttcccagcaccggagaagctccggcgacggcaaaaagacgaacatggagaacaacaaggcgtggctgcttgcggagtctggt

SEQ ID NO: 19778 - DNA, 239 bp, Glycine max
  Clone ID: 700956364H1
agtttgggtctatatcacctgaccttgggaagctagagaatctgagggttcttgctcttcataacaacaacttctatgggtcaattccaccagagttgggaaaatgcactgaattggagggaatatttttacagggtaattaccttagtggagcgattccaagtgaaataggaaacctttcacagcttcaaaatttggatatatcaagcaattccctcagtgggaatattcctgcatca

SEQ ID NO: 19779 - DNA, 230 bp, Glycine max
  Clone ID: 700956367H1
caatcacattaagaaattaacttgctttcatagttttcacatatttgacgtgacatcatgaatatggaggggcagaagaaaaacaagagggtggctgttttggtgggttgcaattaccccaacactagcaatgaattgcatggttgcataaacgatgtgttggcaatgaaggacacgctggagaagcgctttgggtttgatccctctaacattgagcttctcactgatgc

SEQ ID NO: 19780 - DNA, 233 bp, Glycine max
  Clone ID: 700956368H1
ctcaagtccaacctacccctttttcttctcccaccaacttcaccgtcatcttcctcgatcatgtctcacttcaagggcaagtaccatgatgagcttattgccaatgctgcttacattggcactcctggaaagggtattcttgctgctgatgagtcaacagggacaattggcaagcgtttggccagcatcagtgtagagaatgttgaatccaacaggcgtgctcttagggagct

SEQ ID NO: 19781 - DNA, 233 bp, Glycine max
  Clone ID: 700956369H1
aaatgtgcattgactgcttcattttagtgaaggagacagagatctaacgaccggctctcgcaacagctctgccgtatttcctcaagatgatttcatggatatagatgatcagcatgatgcaggaattcccagaattccatcactacttccagcactagcagcaaatgttaatccatttactcttcttgatccaacaattgggagaggtatatttggtacacgttttgattcaa

SEQ ID NO: 19782 - DNA, 231 bp, Glycine max
  Clone ID: 700956371H1
aaaatgctcactttttttcttccaacgctccgcctccttctcatagccttcgccagctctgtcaccggccgccgtgacctcgtcggagactcgctccggctgaccgtcgcaactgataacgacgccaacttcacgagcagcccgtgggccgtcctcctcgccggttccaatggttactggaataactgagatcaggctgatgtttgtcacggctatcaaatagcgagggaa

SEQ ID NO: 19783 - DNA, 222 bp, Glycine max
  Clone ID: 700956374H1
atctgcatttgcatttgctctctgtcagtttgtaagaatcttaagctatgggaaagtcttagtcaagcgtgagcgctgattactagaaggccgttgagaaggcgaagatgaagttcagaggcttcatcgctgagaaattgagcgctcctctaatgctccgtttggcatggcactctgctggaacttacgacgtgagctcgaagaccggtggtcccttcggaa

SEQ ID NO: 19784 - DNA, 229 bp, Glycine max
  Clone ID: 700956376H1
caatgactcagttgaaagcatctcctgcgtctgcgtgttcgttccttgccattgctccttcctttcatcatgcatcactaacaacagggcaccttctgcgccatcaattctccaaggcaaagcctttgtcactcaaagagctggggctaaaaacaagcgttggtgccaataaacttcaagttattaaagcagctgcacgcattgatacagaggtagtttctgaaaccac

SEQ ID NO: 19785 - DNA, 230 bp, Glycine max
  Clone ID: 700956377H1
actcgagccgaatcggctcgaggtggtgggacctttgatgtcaacatcttgacaattgataacggtgtttttgaagttcttgctacaaatggagatactcatcttggaggtgaggattttgatcaaagaataatggagtacttcattaaattgatcaagaaaaagcatggaaaggatattagcaaggacaacagagcacttggaaagctgaggagagaggctgagcgtgc

SEQ ID NO: 19786 - DNA, 234 bp, Glycine max
  Clone ID: 700956380H1
caattttctagggtttatacaattttcgatggcttcttcagatgttgagtaccgttgctttgtcggtgggctcgcttgggccactgacgaccaagctctcgagagagccttctctcagtacggcgaaatcgttgaaacgaagattatcaacgatcgtgagactggaagatccaggggttttggatttgtgaccttcgcctcggagcagtccatgaaagacgccatcgaagggat

SEQ ID NO: 19787 - DNA, 230 bp, Glycine max
  Clone ID: 700956382H1
aaagtatttgctgatgctttttctgatcgcatatttaaatctccactgcttgatcttctgatcaaatctgggcgaaatggcaaaaacaatgggaaagggtactacatttatgaaaaggctggcaagccaaaacctgatccttcataactaccaatcattgaggagtctagaagactttgcaatattatgcccaatggaaagcctatatctgttactgaccaagagatcgt

SEQ ID NO: 19788 - DNA, 231 bp, Glycine max
  Clone ID: 700956383H1
ggcacttccttcccaaggggcattccggcctgaacttacccaaattatgaaccaactggttcagtttctcaactcaaatggttccccatttgttgttaatatctacccctttcttagcctttataacaatggagatttcccccaagagtatgcgttctttgagggaactacccatgccgtccaagatggttccaatgttgacactaatgcatttgatggaaactatgacac

SEQ ID NO: 19789 - DNA, 231 bp, Glycine max
  Clone ID: 700956384H1
cagatatctaccgagagggttaaacacttagcatctgctgagggtaccttggtagacaccacactacccataatatggtcgaaaacaacaacccaagggtttttggttcttctatgtttctatgtatgcttgtgttgatgatttggaacaagattgttgttgttgttccacaagccgaggctcgagcattttttgtttttggtgattcgctagttgacaatggcaacaata

SEQ ID NO: 19790 - DNA, 232 bp, Glycine max
  Clone ID: 700956385H1
ctgatgcagcaaagcataggcaatcccaagagcaggcaaggagaaaaaagatgtcaagagcccaagatggaatactgaagtacatgctgaagatgatggaggtttgcaaggcacaatggtttgtttatgggataattcctgagaaggggaagccagtgaccggagcatcagataatcttcgcgaatggtggaaggataaagtcaggtttgatcgaaatggtcctgctgccat

SEQ ID NO: 19791 - DNA, 232 bp, Glycine max
  Clone ID: 700956386H1
tctcgagccgattcggctcgagcaaggtctcatacaacaagctcaccccctacacctcttagattccaattactgtatacatttgcttgagaaatttcagtcagcggcttcggaatttctctttaaccctctttgcgtggcttggcaagattactttggagacatacatttcccagtttcatatttggttaaggtctaacatgccaaacggacagcccaagtggcttctttc

SEQ ID NO: 19792 - DNA, 235 bp, Glycine max
  Clone ID: 700956387H1
ctctctctttctctacctttctgtgaatttctattgcattaattttctctacagaaagagaaaaaaaaagagcttccacaatggtgagcgctgcaattgctcgtaacgtcgtcggcgtaataggcaatatcatctcctttggcttgttcttttcacctgctccaacactctattaaatcgtaaagaagaagacggtggaggagttcaagccagatccttacatagcaacggtgtt

SEQ ID NO: 19793 - DNA, 227 bp, Glycine max
  Clone ID: 700956388H1
tgaaaatacacttatcacaaaattttttggtctgcacaggattaaaccttcaagtggtcaaaagtttcgctttgttgtaataggaaatatgttctgcacagacttaaggatccatcggaggtttgatttaaaaggttcttcccttggaagatcatcagacaagatagaaattgatgagagtactacgctcaaagatttggatctgaactacagcttctacctggaac

SEQ ID NO: 19794 - DNA, 228 bp, Glycine max
  Clone ID: 700956389H1
gcacaccacacaaaaaagcaaaacagagagaacaactgttactcacacacgccatgggtaaatgaatggtttttgagcaacagcagttaaaagagaaaagggattcagcgaagatgacatcggttggtgtggcaccaacttcgggtttgagagaagccagtgggcatggagcagcagctgcggatagattgccagaggagatgaacgatatgaaaattagggatgata

SEQ ID NO: 19795 - DNA, 225 bp, Glycine max
  Clone ID: 700956390H1
ctccgctgttcctcctcccctattcgcctctctctcccttctctcatcgaccaccttcgccctctcttccctcatatggatgaccaggtcctcgagagagcgctccaagaatgtggcaacgacctagatgcggccatcaagagcctccacggcctctgtttgggatctgctgatgataattctcaacctgctccacaacctgaccaccctaacctcgtcgtcgac

SEQ ID NO: 19796 - DNA, 224 bp, Glycine max
  Clone ID: 700956391H1
gtcactaactcgctgtcattctgcacttctcatttcctccatatgacttccatagcctctccattttgtacgtgcctggttgccacttggaggaaccacctggttgccacttggaggaagcaccttcccaactccaaccttgtgaagcattgcaatcttgtgcctcgttcaggtaaagcgatggttgtagctttgcaacctactcaagacgctacaataatgag

SEQ ID NO: 19797 - DNA, 226 bp, Glycine max
  Clone ID: 700956392H1
gagatccaagaaaatcaggtaaagcatgagagcagttctaacaattcagaagaaccgagagaattcggtgacctcaatgatcttgaagcattgttggacgaagatattttcatgcctacagcaacttaaaatttcattgttaaggggtgatttagaatttcacagctgagttaggtgatcaactgtctcactttgattgttatagtaaattagtaatcttaattct

SEQ ID NO: 19798 - DNA, 231 bp, Glycine max
  Clone ID: 700956393H1
caagatactgtaattcttactcttattcaccgatttcccccaaatcttccatccaagaattttaatattttctcttccagatttcccccaatcttctccgcctctcttccttttcctttacatttctctctgattgaaacgccacacccatttgagaggatcttttttctagagaagccaacccaaagtgtgttttcatggggttgttgtgatcttgagaaactagagagt

SEQ ID NO: 19799 - DNA, 230 bp, Glycine max
  Clone ID: 700956394H1
ggagtctatgacagtagatcgtgtgaataggcttcccaacattaacccaaaggtagagacctttgcagaagcccgggattgtcttcttccaatgggaatcacttctgagaatgtagcacaacgttatggtgtgacaaggctagagcaagatcaggctgctcttgagtctcacaagcgagctgcagctgcaacagcagctggcaagttcaaagaagaaatccttccagttt

SEQ ID NO: 19800 - DNA, 231 bp, Glycine max
  Clone ID: 700956360H1
acaagccataatagcattgggttcttctctagtctctgtcctaccacaaaaatggtcccaacaccaatcttagtcacaacaccaccgccggcaacttctgcaccctctccactgctcaacgcagaaacacccctcaaaacagaagaaaaaccccaaacacaaaccctaaaaacccccaccaccaccactcaaaaagctataaccaaaccaagcccatcatcatccaccacc

SEQ ID NO: 19801 - DNA, 233 bp, Glycine max
  Clone ID: 700956395H1
gtgccggcgcgcgctgaagtttgctaggttcatgagcaggttcgggaagagttaccgaagcgatgaagagatgagggagaggtacgagatattctcgcaaaacctcaggttcatccgctcccacaacaagaaccgcttgccctacactctctctgttaatcattttgctgattggacttgggaggagttcaaaagacacagactaggcgctgcccaaaattgctctgccactc

SEQ ID NO: 19802 - DNA, 236 bp, Glycine max
  Clone ID: 700956396H1
cttttccaaggtcgtccatttgatatgcttgatgctgctttatacagatacagttgccaaattccctgttgatatccagccatttaaagatatgatagatggaatgagactggatcttaagaagccaagatacaaaaactttgatgaactatatctttactgttactatgttgctgggacagttggtataatgagtgttccaatcatgggcatttcaccaaattcccaagccacaa

SEQ ID NO: 19803 - DNA, 236 bp, Glycine max
  Clone ID: 700956320H1
ctggttatacttacacaataaagtcactgactacatggaagtttcataacactcagttcatttcgaaaccaaagcttctgcttttgtgatggaactagagagctgagaggcctaaacctctgtttgctctctcaccctttttggtgcagatcttgaacttgagctgcattttcatagaaaaccagcaccaagaaatggaacataccatgttacctgccattggatctgttttccct

SEQ ID NO: 19804 - DNA, 238 bp, Glycine max
  Clone ID: 700956323H1
ctccttcacattctccattccacaacatcaaggttcacaatcatgtcggggaagaggccccggccaatgatcggaaagttgtcggagttgttggtctcgagaggccgcacggtggcacttttggacaccactggaagcccaagaggcccattagacatgaagatgatgcaatcaccaagaggcttaaaaaattatgatcttggtggcgttggtcttggaattgtggtggctcttgata

SEQ ID NO: 19805 - DNA, 236 bp, Glycine max
  Clone ID: 700956324H1
gaagaaccttacaaagggcttttgaattttcgtgttttgatcagaatcagaggaaaaaatcacataatttcgaattcaaaatttgaattttcgtgtataaaacgaagagaagagaatggaatcggaggatttggtgaagcaggaattggaggaattgcagaaacaattggggaagaagctaaaatttgaagcctctatttcgtctctaaaatctcttctccaacgcacttacccat

SEQ ID NO: 19806 - DNA, 231 bp, Glycine max
  Clone ID: 700956326H1
ctagctagctagctagctagcaaatagcaatgttaaaaaaccaaccacaaccagattggcctgagcccattgtcagggttcagtccttatccgaaaactgcgaagattcaatccctgaaaggtacatcaagccttctactgatcaaccatccataaaaagttgtaattttgatgatgccaatattccaatcatcgaccttgggggactatttggtgctgaccaacatgtct

SEQ ID NO: 19807 - DNA, 234 bp, Glycine max
  Clone ID: 700956328H1
tttagccgagagaccaatcaacggatatgctttttgaatgttagtcctgatgaagttataagaagtctgttttataacaaaaataacgactcacttatcacagtttctgtatatgcttcagacagttacagttctttgaagtgcagaagcacaaggattgaatatataaggaggggtacaccagatgctggctttgctctttttgaatccgagtctctgaagtggccaggtttt

SEQ ID NO: 19808 - DNA, 226 bp, Glycine max
  Clone ID: 700956329H1
ctgccagtagtcatatgcttgtctcaaagattaagccatgcatgtgtaagtatgaactaattcagactgtgaaactgcgaatggctcattaaatcagttatagtttgtttgatggtatcttctactcggataaccgtagtaattctagagctaatacgtgcaacaaaccccgacttctggaagggatgcatttattagataaaaggtcaacacaggctctgcctgt

SEQ ID NO: 19809 - DNA, 239 bp, Glycine max
  Clone ID: 700956330H1
cgaccgcgttcttttctacggagcctcgaccaagaagaatcgcagagagaagagggtcagagtgagaaagagagagagagagagagaaactgagagaaattcgcaaaccctaatttcggaaagatcggcgatggctgcctccaaggatcgcgagaacttcgtctacatcgccaagctcgccgaacaggccgagcgatacgaagagatggtggaatcaatgaagaacgttacgaatctcg

SEQ ID NO: 19810 - DNA, 240 bp, Glycine max
  Clone ID: 700956331H1
cgcaattgcgaaatctctggaacaattgatttcattttcggatactccaccaccttgatccaaaactcgaagatcttggtgaggaagcccatggcaaatcagcagaacatagtggtggcagatggcacagggcagaagaacatgcccacaggaatagtcctccataagcgcgagatcatgccggaccctaccctcttggcagaccgcttgagcgtgaagacttacttggccaggccatgg

SEQ ID NO: 19811 - DNA, 227 bp, Glycine max
  Clone ID: 700956333H1
ggggcatcgtatttgattggtcggtcatagcaattagcaactccacccttcaaacttgaaaggaaaaaaggactttggttatccacgcaacataagacatacattaactaaactttctagaatcttcttctctcgccatggcagcgtcgtcgtcctccgccgcggcaaacatcatgctggcgatctccgagaagaagacgaacagtgtagatctgtatcgccctctt

SEQ ID NO: 19812 - DNA, 165 bp, Glycine max
  Clone ID: 700956335H1
gcgagccaagtagggttttcagtgatcccctcttatgtgttcgaacgcgacgaaggggtccaaccccgatccaggcgaattgagcgaattaactcagccgagcttcgacgagttccaacgccacaactatcacatatccatctgatggctccacaagcaagatct

SEQ ID NO: 19813 - DNA, 234 bp, Glycine max
  Clone ID: 700956336H1
catgactatttcaaaagatcgagtaaaaccatcacatctgccggatagctgtaagctagctgagatatttacaactagcgttgtgcttggcagttacttggcaatgatgacagtcatattcgtttgggcagcatagaaaaccaatttcttcccgcgagtatatggagattctactcttgagagaactgctcatcatgagttccgactacttgcctctgcaatctagcttcaagt

SEQ ID NO: 19814 - DNA, 236 bp, Glycine max
  Clone ID: 700956337H1
gtgctttgaaacaaaactaaagaagaaatgctgagacaagtgttgcgacaatgttactcacttcatcgtcccgcagtgaatgtgtacgcagtgccgcggttttatcggagaaggctttgttcttcttcttcttcttcagagtccactgccgctacatcctccatcgaccgttcttccctttacaatccacctgagcattctcaccaccccacttctgattccgaactcgtcaaaca

SEQ ID NO: 19815 - DNA, 233 bp, Glycine max
  Clone ID: 700956339H1
agaaacttgacaccgattagattaggggcttcgaacaaggagccccgaaacccaaaccctaatctgattcgctttcgattatggcgtctgagagcgcttctcgatcgagttccgcggccgattcgtacattgggagcttgataagcttgacctctaagagtgagatcagatacgaaggtattctctacaacatcagcatagaagagtccagtattggcctcagtaacgtgcgg

SEQ ID NO: 19816 - DNA, 234 bp, Glycine max
  Clone ID: 700956341H1
aaaagatgaagggaataaggaaaagaaggacaaagaaaaaggagacggtgatggtgaagagaagaaggaaaagaaagataaagagaaggagaagaaaaaggaaaagaaggataaagatgaagaaacagacacattaaaggaaaagggaaaaaatgatgaaggtgaggatgatgaaggaaataagaaaaagaaaaaggataagaaggagaaagagaaggatcacaaaaaggaaaa

SEQ ID NO: 19817 - DNA, 229 bp, Glycine max
  Clone ID: 700956342H1
caattctcctaattgctggctataatgtgtttgatcttgttggcaagtgtctgactgcagtttacctcctacacaatgcaaaagttgccataggtggttgcatagcaagattgttgtttttccctctcttcttaggttgcatgcatggtcccaaattcttccggactgagattcccgtgacaatactgacttgcctgttagggcttactaatggctacctaaccagtgc

SEQ ID NO: 19818 - DNA, 232 bp, Glycine max
  Clone ID: 700956343H1
cgaaaagacttttcatttaagagttgcagctattcttggtgaaattgaagctgagatggtctcagatagacagaagaaagaatctgctcctccagtaggtatttctgagaatggctcagagaaaacaatgtacttcttggctgaagcaacacatcccttcagtgctgaatcagaaaaggagctgagtttttcgaagggtgattttgttgttgtgcgaaaggtgagcccatca

SEQ ID NO: 19819 - DNA, 230 bp, Glycine max
  Clone ID: 700956344H1
atcgagcgaatcggctcgagagaagactcattttctatatgagccgggtacgtttggactcaattttggacgattaacaactggccagacaacagaaagaggaagataagagacgacatagggaccttaagaagatgcaagatctactcctaaatcaaaaggaagccatgtatggttctaaacctagtccaagaaaaaataacagctttagaaagactaatagttaccgt

SEQ ID NO: 19820 - DNA, 234 bp, Glycine max
  Clone ID: 700956345H1
cccacagttagtacaaaaaagggttacttcagcttccacatatcttgaagaattgatcaatgggcaagtctgtagttgagaagctactttggatggcaattgtgtgcttggtgctgggtgtaatttccattactcccaaggctcaagcagcagtgacatgcaaccaggtggtgagcaacctcaccccatgcatttcttatgtgctcaatggtggcaaaaccgtgcctggccctt

SEQ ID NO: 19821 - DNA, 237 bp, Glycine max
  Clone ID: 700956347H1
gttggtaagaatacgatcaaaacacttgtgtaaacatggcttaaggggataagatcttttggttttcagatgtggaatttgctagggagactttggcaggtgtcaacccatatagcatccaattggttaaggaatggcctttaacaagtaaactagacccgcaaatatatggtccacaggaatcaacaataactagggaagtcattgagccacaaattatcacttatggaacaattg

SEQ ID NO: 19822 - DNA, 240 bp, Glycine max
  Clone ID: 700956348H1
gatcatgcacattctttagccgatctttccataggaatatccatccttgctggaattgtactctttcttcttgtggagaagttagtgaggtatgttgaagaaaactcaggaagagctaattcatggacacatggacaccaccaccatcaccacaatagcaaggaaaaattgaaagatgataacagttctactgccaactttcagtcagaatttaataatgcaaaagaagagagattgata

SEQ ID NO: 19823 - DNA, 235 bp, Glycine max
  Clone ID: 700956349H1
cagcacagcacaacacaacacaaaaccctttcccaaaaaaataaaaaataaaaaatggaggaatccaaattcggccaaaccgacaagcgaaagcgcgtacgcaacgagtaggactcggccctcaactcgcccgactcgttaaagcatccccgagccgagtctaactcgttcgagtctctccgagttgactcggacgagtttgaactcgcccggatcgacccggttcttcacaaca

SEQ ID NO: 19824 - DNA, 234 bp, Glycine max
  Clone ID: 700956351H1
ggttggtaaggtggactttactattaggcatctctcttcatccacaacatcatttcctagcacatggacattcagtagtggtcaaccttgtattggaagtgatgcccatcagtgttcagcattctctgctagtccttcatcagagaaaacatggaccatgcgtactacctttccagaatatgttgttgcacttgctactattgttggatctgtgctttttgctatatttggtgg

SEQ ID NO: 19825 - DNA, 233 bp, Glycine max
  Clone ID: 700956354H1
gaaaaaattcaggattgaagtttttgatatatgggaggacaggttggataggggggttgttgggaaagctttgcgaagaagagagaattgattgggaatatgggagaggaagattggaagataggaaatcacttatgaaggatatgagaagggtaatgccaacccatgtgttgagtgcagctggtgttactggaaggcctaatgttgattggtgtgaatcacacaaggttgaa

SEQ ID NO: 19826 - DNA, 235 bp, Glycine max
  Clone ID: 700956355H1
ctctctctttctctacctttctgtgaatttctattgcattaattttctctacagaaagagaaaaaaaaagagcttccacaatggtgagcgctgcaattgctcgtaacgtcgtcggcgtaataggcaatatcatctcctttggcttgttcttttcacctgctccaactttctatggaatcgtaaagaagaagacggtggaggagttcaagccagatccttacatagcaacggtgtt

SEQ ID NO: 19827 - DNA, 214 bp, Glycine max
  Clone ID: 700956356H1
cacccttgaggtggagagctctgacaccattgacaatgttaaggccaagattcaggacaaagagggtatcccaccagatcaacagacggtgatctttgctgggaagcaacttgaggatggccggactcttgctgactacaacatccctcatcgagtacactcttcaccttgtactccgtcttcgtggtgggatttaaaagtctgagaacgctct

SEQ ID NO: 19828 - DNA, 238 bp, Glycine max
  Clone ID: 700956319H1
cattgattcccaaaaccctaattgaagttctctcctccacactatatattgcagattttgagtgagtctatcccttaaaggctctctcttgcagtcgcagaggaaaaccctagctagtagtctcagttcgtttgagagagaaaaaatggcagagggtctcgttctccgcggaaccatgcgcgcccacaccgacgtcgtgacggcgattgccactcccatcgacaactccgacatgatc

SEQ ID NO: 19829 - DNA, 231 bp, Glycine max
  Clone ID: 700956357H1
acgagttccgagttgcgagttgcagagagagcaatgagtcaggaatcgtttatacatagcttcgtggctcgggggacgatggtgttagccgagtacaccgagttcactgggaacttccctgcaattgcagctcagtgcctccagaaactaccctcttccaataacaagttcacctacaattgcgaccaccacaccttcaattttctcgtcgaagacggttacgcttactgt

SEQ ID NO: 19830 - DNA, 210 bp, Glycine max
  Clone ID: 700956278H1
tctcgagcggatcggctcgactaggaacaagagtttatttcagattagctcggttcttcaaaaggcctcatcactttaagggttagctatttatatatatatacttctgtgacctcaaaattgagctgagttgtataactgcaatgggtgtttcgtggtggaagctgttttttgctgctcttgctgggattctactctcaacccaacata

SEQ ID NO: 19831 - DNA, 124 bp, Glycine max
  Clone ID: 700956279H1
ttcccaaatcaggaaacactttctcatcttccctttcccagtttcacaccctatatcatagaaagctctgtcaacgaacgtcttcattttgggaagattggatatggatgcgatcattacagga

SEQ ID NO: 19832 - DNA, 76 bp, Glycine max
  Clone ID: 700956281H1
ggttgaactccaagaacctcataaaacctggactctctctggcatcactcgctctctctgtctctctctctctcta

SEQ ID NO: 19833 - DNA, 242 bp, Glycine max
  Clone ID: 700956282H1
gttttcatgacataaactatcatcaactgttgctttccattttggctataattccacaaaatgtgccattctttgcaagtgtaatattactagcatttccatatatcagtccatggcctccttaatgctcaatggagctcatcaaaatccaaacctcattagtggcatagctccaaatggccttaactttcacaacaagtgtttattccaaaagggtgtgctgtctcatggtaacaagttaa

SEQ ID NO: 19834 - DNA, 253 bp, Glycine max
  Clone ID: 700956284H1
aggataaggaaggtattccaccggatcagcaacgtcttgtcttcgccggaaagcagttggaagacggcagaaccctcgccgattacaatattcaaaaggaatcgacgcttcatctggtgcttcgtctccgcggagggatgcagatcttcgtgaagacgctcaccggaaaaacgattactctggaggtggagagttctgatacgatcgataacgtgaaggcaaagattcaggataaggaggggattccaccgga

SEQ ID NO: 19835 - DNA, 180 bp, Glycine max
  Clone ID: 700956285H1
tagaatataatcattcactctgtttctattcttctttctaccatagcataactaagatatgaacaccatataataattaacaacaataatttaataatactctcttcattgtaaattccatcttcacttcacttttcttctctgttctgtggagtatttaatcatttccacacaacatac

SEQ ID NO: 19836 - DNA, 66 bp, Glycine max
  Clone ID: 700956286H1
accgattccactcactcaacaatcgtaagattaaggcgttttgagctcatagaacaaccacctttc

SEQ ID NO: 19837 - DNA, 243 bp, Glycine max
  Clone ID: 700956287H1
cttgttcccatttcagaagagattagccttgtcagcagactaatcaatgcaattgcaaacaatgcatgcaaagaacagctcaccactggtttgcaaaaactggaccacagcttcccttctaaaaccacctcaaacatggaacctgaaacaccctcagaatggtgggggaaatctctcaatgttcttagtcttgatttctttcaaagagttttgtctgcagtgaagtcaaagggattaaaacaa

SEQ ID NO: 19838 - DNA, 243 bp, Glycine max
  Clone ID: 700956288H1
ttcgagctgcatatttatcacaatctgctaagcagaaagtcagtctgctggttccatggctttgtaaatcagatcaagaactagtttatcccagcaatgtcacttttacttcgccagaagaacaggaagcttatatacgtagctggcttgaggaaaggattggtttcaaggcagacttcaaaatttctttttatcccgggaagttttcgaaagcaagacggagtataatacctgctggagata

SEQ ID NO: 19839 - DNA, 88 bp, Glycine max
  Clone ID: 700956289H1
gagcaaattctcgaacttctgttgcaaattcccttacctgcggaccagccgctttcacagtgtcgtctaagttctccactccacacag

SEQ ID NO: 19840 - DNA, 246 bp, Glycine max
  Clone ID: 700956291H1
cctgacccgaaccaagttcccaaggagttcacctgccccatttccggctcactaatgtccgaccctgtcgtcgtagcctcgggccaaaccttcgaacgcctcgccgttcaactctgcaaagacctcaacttctccccgaagctggacgacggcacccgacccgacttctccaccataatccccaacctcgccatcaaaacgacgatcctccactggtgcgacaattcccgcacccaacccccgctc

SEQ ID NO: 19841 - DNA, 244 bp, Glycine max
  Clone ID: 700956292H1
attttatttcttggcaaatttacaacaacagtgaggcttaattggaagcagtggctcatctctgtcgttattggattgattggttggcctcttgctgtgattgggaaattgataccagtgccaacaactcccatcaacaatgttttttcaaaatttcgaatttctagaaaggatcatgaggaatctcaatagatttggcgttgtgctgtttcaaacaattctgctgtttcttttgttctctgac

SEQ ID NO: 19842 - DNA, 244 bp, Glycine max
  unsure (1)..(244): unsure at all n locations
  Clone ID: 700956293H1
atctcattttccctccaatttccttctgggttttgcaatttggccaattgggtccccaaagctgtgaccttttcctctgatcaacgcgaagganagagaaacacccagagagagaaagagaaaaagaaaagttgttgttttcttttgttctttgggggtgttggtttaaaacccggggttgaagcattgcagacatcatggctattcaaggagttcgccactctctttctcatgcccgttgtgt

SEQ ID NO: 19843 - DNA, 244 bp, Glycine max
  Clone ID: 700956294H1
gtattaggctactccatcttcatgggcttgtctgtgtcacagtacttcaatgagtacacagcaattaatggttatggtccagttcacaccaaagcaagatggttcaatgatataatcaatgtcccattccaatcaaaagcatttgttgcgggttgtgtggcatatttcttggacaacacactacacaagaaggaagctgctattaggaaagatagaggaaaacattggtgggacaagtaccgtt

SEQ ID NO: 19844 - DNA, 245 bp, Glycine max
  Clone ID: 700956295H1
ataaatcctgcaatgtctggtggttatcctcaacaaggttaccaatctcgaccaccctctgattgggctccccctgccccaatgcagcaagctggttatggctatgtgcaacctggagcatactctggtccatcaccccagtataacatgcctcagtaaccatatgcaggctatcctgcccagcaacctggtggatattccaccaattgggaccagtctactgcaccacctccaccagcagtcta

SEQ ID NO: 19845 - DNA, 247 bp, Glycine max
  Clone ID: 700956296H1
tgctcccttcgctttcccttcattcacatttcgcagggcgcttctttctcattgctggcaaaatggcaaatgtagcgtccggaatggctgtgcacgatgattgcaaactgaggtttcaagagcttaaatcaaagaggagctacaggttcattgtgttcaaaattgaagaacagcaagtggtggttgagaaattaggggaccccacggaaagttatgaggactttagtggccagttttccagctaatg

SEQ ID NO: 19846 - DNA, 240 bp, Glycine max
  Clone ID: 700956301H1
gctagaagcaataagatgaaaatgaaagtgcttgtattgtttgttgctacagttttggtagcatatgaatgccatggctcagactaccagaagttccctctctcaatgaaaactgggtttggtgggcaatacagcaatgaggtggcatgtgccagttggaggcttggcgtggaagcaaacaacgtagtcaagtggcaaactgttcctgcagcttgcggagagtacatagctgactacgtt

SEQ ID NO: 19847 - DNA, 249 bp, Glycine max
  Clone ID: 700956302H1
ttcggctcgaggctcctctcatggagattgtaaatattcttttgatgccagtggattgacatcatacagcttctgctctagtgatcgaaaccatggtggctttgactgtagcattgaaattgtatcacataaagggcatatactacaatcaatttatctcatttaatcaaatgctgcagccatacttcctgcctattggtcccttcggcagaaggcatttgcagaatgggttttgtacacatccagtgg

SEQ ID NO: 19848 - DNA, 240 bp, Glycine max
  Clone ID: 700956303H1
caccctcatccgtgaaacccttcttgtgtgacacaccaaactccaccactgatgaaagcactcacaagctcttgttccaagaccgttgtcgacaccctaggacccttttctcccagagtttgccttcgtgtttcttatagacccgaattctgctccacccttcgttccaaaaatgagaaaaagagttgcaattcattgctcctgaaactggttcggaacaagggtgttgtttacccggtt

SEQ ID NO: 19849 - DNA, 238 bp, Glycine max
  Clone ID: 700956304H1
tattagcttcagctggaatcaaggtggtgctcactgcaagaacatgaagagaggggtatccaagcactgcaaacactcaaggactcgggtctatctcaccttgtactgtttcatcaagttgatgtggctgatgcaacaagcgtagcttctctggcagattttatcaaatctaaatttggaaaacttgatattctggttaacaatgcagggattcttggagctgtaattaaagacactg

SEQ ID NO: 19850 - DNA, 239 bp, Glycine max
  Clone ID: 700956309H1
gcacaagagtctccaatcccaactctctctctctctccacttgccaaaggaaaaaggctaaagagaaacccacacacacacacacacacagaaatatgtcttccccaagcaagcgccgagagatggacttgatgaaactgatgatgagtgattacaaggtcgagatgattaatgatggaatgcaagaattttatgtgcaattccatggacccaatgacagtccttatcatggtggtgtg

SEQ ID NO: 19851 - DNA, 234 bp, Glycine max
  Clone ID: 700956310H1
ggagataagatattgaagtagtgctaagtgcctaacacctgcagtgaacaatggcctctgcatcagcatctcttctcaagtcttcacttgttcttgataagtctgagtgggtgaagggacaaacacttcgccaaccttctgctgcatcagttgtgagatgcaaccccaccaccccatcaggcctcaccatcagagctggttcctatgctgatgagctcgttaagaccgcgaaaa

SEQ ID NO: 19852 - DNA, 236 bp, Glycine max
  Clone ID: 700956311H1
caaactttgtaacttcaaaacatactcctctgttctctctgtttctcttcaatcttcctgaaaaaaacaaaaacacgaaaaatcatccaccctctcacattctctctctctctcctttcaactaatatggaaattgaaaaccaagacaacactgtcagagaaatcaagccaaagaacaggagaatcatgggtgctggaggccctgatgatgacgacaataggtggccaccgtggtt

SEQ ID NO: 19853 - DNA, 237 bp, Glycine max
  Clone ID: 700956313H1
ggcaagatgtcgaagagaggacgcggtggttcggcggggaacaagttccggatgtcgctgggtctgccggtggcggcgacggtgaactgcgccgacaatacgggggcgaagaacctctacatcatatcggtgaaagggatcaaagggcgtttgaaccgtctcccctcggcttgcgttggcgacatggtgatggccaccgtgaagaaggggaaacccgatctgaggaagaaggttttg

SEQ ID NO: 19854 - DNA, 239 bp, Glycine max
  unsure (1)..(239): unsure at all n locations
  Clone ID: 700956314H1
cttatggtatctattctctctctttctttngtgttctaagcagctagaagcaatggagaggaaaagaagctatgcctctttcatcatgtttgcaatgcttgttggagtgatctttcagagccttgtctatcctgtagtatccaccactgttgaagatcagaagaactactacaccccagatccacatgctggaagtcccccctcaggctcacacagtagtactcctccatctcatggcc

SEQ ID NO: 19855 - DNA, 240 bp, Glycine max
  Clone ID: 700956315H1
aaaaataacccaaactctcttttaaaaaaaaacccgaacacatagaaacagagaaagtttttgaagcgcttccagtggcgtatttacggttatacccttcttgttatgatagcttccaatcggcgtcagcacagagccgaagctcttggcttccacacatattttcggtcctgtcgattgagatacaaagccgccaagccagccgagccaatcttcaaattccaactttacccctaccgg

SEQ ID NO: 19856 - DNA, 228 bp, Glycine max
  Clone ID: 700956316H1
tggtgcttgtgcgagctgatctttgctaaggtcatgagcaggttgctggagagttactgttgcgtggtagagaacagggagaggtacgagatattctcgcaatacctcaggttcatccgctcccacaacaagaaccgcttgccctacactctctctgtggatcatttggcagatggtaattgtgctgatgtcaactttcagtgagtatgcgctgctcaaaattgctct

SEQ ID NO: 19857 - DNA, 225 bp, Glycine max
  Clone ID: 700956317H1
gctagagcatatatccttgtaaaaatatgtaagaaaatttagactcagaaaagaaaaatatttgaaggacaaattttagtttcacaacagaataggcatctttattattaccaagaaaaaggagaaattgtccttggcttattaaaccctgtttgatgcttgttccaaacttgagaaatatttggatattgagatttgaaatacaagattagtgttcagtttgat

SEQ ID NO: 19858 - DNA, 246 bp, Glycine max
  Clone ID: 700956277H1
cagtcacaatggtttcttctaattgctactatcttgcattggtatgctgctgtgttctgctgctgctgaaccccaccgtgggggagcaggacgagcagaacttggtgctccagtaccacaaaggcgcgctcctcaaggggaggatcaccgttaacctgttatggtacggcagcttcaagccaatccaacgctccacaatcgttgacttcataaagtcgttaagctcctccccgggggccccacttc

SEQ ID NO: 19859 - DNA, 138 bp, Glycine max
  Clone ID: 700956245H1
cttcttcgctgcaactctctaccttccctctttttccgaatctgaatagaaatggcttcggagactgagacgttcgcttttcaggccgagatcaaccagctcctcagtctaataatcaacaccttccacacaacatag

SEQ ID NO: 19860 - DNA, 250 bp, Glycine max
  unsure (1)..(250): unsure at all n locations
  Clone ID: 700956246H1
agctncaccgaatcggctcgaggcaccacaccactgtccaataagtccaacatggctcaagtgggttctctatcttccgaaatggagacactgaatcatgtcctagccctagtggaggcattccgagcatttggcgcggacaacgatggccgaatcacgcaggcagagctaggaggaatcttggggtcactcgggtacaaccctagcgagcaagaagttagggcaatgattgaacacggcgacaagaaca

SEQ ID NO: 19861 - DNA, 251 bp, Glycine max
  Clone ID: 700956247H1
atatagcccaagccctatacaaccaaaccctaacacacacccatttgattcagtttccatggctagcctcaaggttgcatttttggctgcagtgctctgcatggttgtggtgagtgcacccatggcacatgcagctatcacgtgcgggcaggtgacgaatagcctgatcaattgcatcggttacctccagaacggaggaacgccgccgtcgggatgctgcaacggagtgaagagcctcaatgccgccgcca

SEQ ID NO: 19862 - DNA, 252 bp, Glycine max
  Clone ID: 700956248H1
cagattttcatgctcctcctttcattaaattaaagaacagtttctaggtatggaaactctttcatatgggtcagcaccatgctgccaagttgtgaactcaaagtggaaattagttgaaaagagtttgagttcacgtcaatcaagagtttcctctataggaaaacttggagtttattacacaggtactatttctgcatgtgcgcctgtgagattttatgagatgggtactagggtgcagctaagaagctcaaa

SEQ ID NO: 19863 - DNA, 255 bp, Glycine max
  Clone ID: 700956249H1
tgatgagtttttgaaacctaggattgcagattttggacttgctaaggttattcaggccaacgttgtcaaggattcctccactcatgtcattgccggaacccacggatacattgctcctgaatatggctacacgtacaaagtgaatgagaagagtgatgtgtacagctttggagtggtgttgatggaactagtaactgggaaaaggccaactgaaccagaatttggggaaaataaggacatagtgagctgggttca

SEQ ID NO: 19864 - DNA, 247 bp, Glycine max
  Clone ID: 700956250H1
gtgcttttgacagttaagccacaatatggatttggtgagaaggggaagccagaacaaggggatgaaggtgcagtgccaccaaatgcaacattgcagattactcttgaattagtttcatggaaaactgtttcagaagtaagtgatgacaagaaggtcataaagaagatcctcaaggaaggggaaggatatgagcgtccaaatgagggggccattgttaaagtgaaactaattggtaagctacaagatg

SEQ ID NO: 19865 - DNA, 250 bp, Glycine max
  Clone ID: 700956251H1
gtgcccacagacaataaccctttataataaataaaaaaatctcggtctgttttttttctcttctttttatctctctctctcacaaatttctttcccttttgttcactcaaaagagcagatagggacaagatcccggaaaggcgagccaacgtcagagagactcatcagttctcactcgtacggcgcttttgctttgctttgcttcattcctttcatcgtcatcataaagttcgttcctttctcagttttc

SEQ ID NO: 19866 - DNA, 245 bp, Glycine max
  Clone ID: 700956252H1
atctgatccaaaatggcgacgatgacgagcttgattggtctcatcaataagatccaacgagcttgcaccgttttgggagatcacggtggcgagggcttgtcgctctgggaggctcttccctctgtcgccgtcgtcggtggacagagttcagggaaatcgtcggtgctagaaagtgttgtcgggagagattttctgcctcgtggatctggtattgttacacggaggccactagtgctgcaacttca

SEQ ID NO: 19867 - DNA, 247 bp, Glycine max
  Clone ID: 700956253H1
caaagagacaattcaacttaagagatcaatatggccaccaccactacccagcctccctctaatatctgttttttccttctgttgttgcttctagcacactttcatttgggcataagccaacttgagctgaattactactctaaaagctgcccaaaagctgaagagatcatcaaggaacaagtcacacaactatataacaagcatggaaacactgccgtttcgtgggtcagaaatctcttccacgatt

SEQ ID NO: 19868 - DNA, 251 bp, Glycine max
  Clone ID: 700956254H1
gggagactgaatccagaaacctacaaattttttgatgcggttgagaagcattatggaattcacattgagtacatgttccctgatgcggttgaggttcaggcattagtaagaactaaagggctcttctcattttacgaggatgggcatcaagagtgctgccgagtaaggaaggtgaggcccttgaggagagcccttaagggtctcaaagcatggatcactggacagagaaaagatcagtctcctggtactag

SEQ ID NO: 19869 - DNA, 176 bp, Glycine max
  Clone ID: 700956255H1
ctcgcagcagctgatatctcatgttgttcttgttcctaacaaagtagcatctaaaaccatggcatcttcaccggacaccagcaaaaccataaagctgatgcgttacaacagctacctccgcagactcaacagcttcaaactccttaagacatccttcatcctcctcctcctcgtct

SEQ ID NO: 19870 - DNA, 130 bp, Glycine max
  Clone ID: 700956258H1
gatcgctccatgaagctcattgcggagcttccagaatgcagcacgcttcgagttcctaagatttacacgatttttggtgttgttgggatgttgaagctgttggctggatcatatttgctggttataactg

SEQ ID NO: 19871 - DNA, 246 bp, Glycine max
  Clone ID: 700956259H1
caagacacttacttccaaagatcgatttgagatgtggggagatggattgcaaacaagatccttcaccttcattgatgagtgtgttgaaggtgtactgagattgactaaatcagacttccgggagccagtgaatattggaagtgatgaaatggtcagtatgaatgagatggcagagattgttcttagctttgaggataagaatataccaatataccatattcctggcccagaaggtgttcggggccg

SEQ ID NO: 19872 - DNA, 247 bp, Glycine max
  Clone ID: 700956260H1
ctgatcgctccctgagagagctcgtcgcggcggttgcagaagaagattgcaagatgaagttcaacatcgcgaatcccaccactggatgccagaagaagctcgagatcgacgacgatctgaaactgcgagcattttgggacaagaggatctcacaggaggtcatcggagatgcactcggtgaggaatttaagggctatgtcttcaaaattaccggaggttcgtcacaaacaaggatttccaatgaagc

SEQ ID NO: 19873 - DNA, 248 bp, Glycine max
  Clone ID: 700956261H1
aaaaatgaaagcccaaagtgcttctctcctctgtctttttctctctcttgctatccttttggctagtggcactgctgcaagtgcaactccaagaagcgcagtgccaagccaccatgtttcaacattcaacagaagcctttttccttccacttttctctttggagttggttcttctgcttaccaggcagaaggagcagcaagtgtagatgggagaggaccaagcatatgggacacctacactagacagc

SEQ ID NO: 19874 - DNA, 246 bp, Glycine max
  Clone ID: 700956262H1
ggaatgcaggacattctcctgtttacttgttttcatctagagtgaacgacggaatttgtgattgctgtgatggaaccgatgaatacgatggtcaagtaaagtgtccaaatacctgctgggaggctggtaaagttgctagagacagactgaaaaaaaagattgccacttatcaagagggtgtcaaattgcgaaagcaagaaattgaacaagctaaagtagctatggagaaggatgaggccgaacttt

SEQ ID NO: 19875 - DNA, 246 bp, Glycine max
  Clone ID: 700956264H1
tggccactttcttcacccaaacctccttcccctcccactctctctccaaaactttcgatacccatttcgcaccatccacgaaagtcaacgtatttgcgaacttcccggcgaggaggcacgtgggggttcgagtttcgaacgcgctgatcgaaccagacggagggaagctggtggagcttgtggtgagggataattcagaaagagacttgaagaagggtgaggctctttcgttgccgaggatcaagc

SEQ ID NO: 19876 - DNA, 245 bp, Glycine max
  Clone ID: 700956265H1
ctagagcgagaaagtgagaggagagagaaagtagcagatcctccatggcctccaccaaggaacgtgaaaacttcgtctacgtcgccaagctcgccgaacaagccgaacgctatgaagaaatggtggaagcaatgaagaatgtggcgaactaaacgtggaattgacggtagatgagcggaaccttctgtcggttgggtacaagaacgtggtgggtgctcgtaggccttcgtggaggattctttcct

SEQ ID NO: 19877 - DNA, 250 bp, Glycine max
  Clone ID: 700956266H1
gccgaggagcatgtgtttagccaccactggatccgcatgattaattctgttttcgataacgtagcgaagaagagaaaaagggtaagtaggaggacgaaacgatgggttagaggatcttatgggacggaattttttattgcatgttgtagcgatgagtattgagacagagggagcatttactgtggtgccggagcatcaatggaaaacgacaaaaacgttgattggtgggtcctttcttcttcaattcaat

SEQ ID NO: 19878 - DNA, 248 bp, Glycine max
  Clone ID: 700956267H1
aattcaacgtcctttggaacgcgtgtgattcgtataaaacaaacacacatatcacataatgttcccgcagagttttaacattagtggcggtggtgccgggcttgaacaactgttgcagcctcatcacttcccatctccaatggaacaacaacaacaacgttccaggtggaaacccagcgtcgaggtggcacccaattgccctcgctgcgcctccaccaacaccaaattctgttactacgacaactaca

SEQ ID NO: 19879 - DNA, 263 bp, Glycine max
  Clone ID: 700956268H1
gtccagattagtaccacaaaaatggagaaatagaataactgaatatcgtatagctcaaaataaagatttaaccaaatgcaattcatatgaaaaaagcagattaattctttacaaagaacaacaagtgaaacgcattaaaaaacaaaaattatgaaaacaatatcagagtacgatctttctatcctcataattttgatcaattgatgcagatcaagagaagagctcatacgatttacatggataatagatccctatttacaagt

SEQ ID NO: 19880 - DNA, 221 bp, Glycine max
  Clone ID: 700956269H1
agaggatcaaaagtcaaaatcataatcaactacaacccaccaacaccaccatgcagaggtggaagtggaacagaaagaaaccccccattttccctttgcttgtgcttattttattgtttttcatggattcgttgtatggtctgatcactggggagggttgatgaggctatgaaaatcaatatcatgagcacaagcaaagggagaatcgggggttacttttg

SEQ ID NO: 19881 - DNA, 244 bp, Glycine max
  Clone ID: 700956270H1
caattccgctcccttttcctaacctcaccggcgggtgctcgtactgctactgtcgatgcctagaagggcggcggtcatcgtgtcggcggcgacggcggagacccgaagaagaagggcgaatcgaaacggttcgtggaagagatgaggttcgtggcgatgaggctgcacacgagggaccaggccagggagggcgagaaggaggtcaagcagcccgaggagaaagccgttaccaagtgggacccat

SEQ ID NO: 19882 - DNA, 110 bp, Glycine max
  Clone ID: 700956272H1
attcattccaaggagggatctctctctctctctctttctctcctctcacacccccaaaagcttcttctgttccgtgcaggcaatttttactctggtttcggcttgcatct

SEQ ID NO: 19883 - DNA, 55 bp, Glycine max
  Clone ID: 700956273H1
ggaaatttccatctaggattgatcgtcctgtggctagtttggttgtttccacacc

SEQ ID NO: 19884 - DNA, 245 bp, Glycine max
  Clone ID: 700956274H1
aaagaatgtaactggcatctaccactactggcaggaaaagaacatagaccgaacattgtggaaactcggtaccttgccacctggactgctgacattttatggattaactgagcccttggatccatcatggcatgttttgggttttggctacaccaatgttgatcctcagttgatagagaggggagctgtattacacttcaatgggaactccaaaccctggttgaagattgggattgagaagtaca

SEQ ID NO: 19885 - DNA, 246 bp, Glycine max
  Clone ID: 700956275H1
ctttttctcacccaaatccacgcttcccttacaccgcgtttggatctccgttatacaaactcattaaaatgttgcgagagaaaaacaaaacagaaaaaaaattcagttaattattaaattttgttatggctttccacgaccatctccagcacgagatagcgttccagcgtttcacggaggagcaagagttgaacgagaatagagacatgcaacagaggctcccacctccgacatggctcaacaacg

SEQ ID NO: 19886 - DNA, 138 bp, Glycine max
  Clone ID: 700956244H1
cttccagatagtcagcttcaaataaaaaataatttgcaagccaaataacagaacgtgttgcacgcattagttacttatgggatgagacttgcctcactaaaatgcattgaaccacctaaattggatgctaatagaata

SEQ ID NO: 19887 - DNA, 252 bp, Glycine max
  Clone ID: 700956207H1
gaaagtttgtggcggatggagtgttcttcgccgaactgaacgaggttctgacacgtgagttggcggaggacggttactccggcgtggaggttatggttacgccgatgcgcaccgagattatcatcagagccaccagaacccaagccgttctcggtgagaagggaaggagaattagggaacttacctcagtggtgcagaagaggttcaaatttcccgagaacagtgtcgagctttatgctgagaaggtcaaca

SEQ ID NO: 19888 - DNA, 254 bp, Glycine max
  Clone ID: 700956208H1
tcaattataagcatgggtttgtggaacacaacgaatgcagtgtcttgccgctttcacaagtttggtgatgaccaaaagaatctggtcttccaaggtgatgccacgtcttcttccaggggcatagtactcacaaagttagtacggtggaggaataccagtgggtggcagtgtggggagagtgttatactcttctccagtgcacctttgggaaagctctacagtggtcgcaagctttgaaaccgacttcacctttt

SEQ ID NO: 19889 - DNA, 253 bp, Glycine max
  Clone ID: 700956209H1
gaagaagaagaagcactgtgattctgattctctctccgtcgttgcaactggtgcctccgtcgttttcatccctaaccccacaccttcgacgccctattatgatatgatcgcagattagtgggcaagggctgtgggtgaggatgaatttgcaacaaattgggcagcctaaatcatctaatggatatggtcatcagaaatctgaaaaagaaggggcaactaagtctgataataagctcccatctgtaaagtcaaa

SEQ ID NO: 19890 - DNA, 89 bp, Glycine max
  Clone ID: 700956210H1
gagcaaattctcgaacttctgttgcaaattccattacctgcggaccagccgctttcacagtgtcgtctaagttctccactccacacagc

SEQ ID NO: 19891 - DNA, 254 bp, Glycine max
  unsure (1)..(254): unsure at all n locations
  Clone ID: 700956211H1
cgaacaactcatctccggcaaggaagatgccgccaacaactttgccagaggccactacaccgttggcaaagagatcgtagatctgtgcttggatcgcgtccgaaagctcgcagacaacggcactggtctccagggctntctcgtcttcaacgctgtcggcggtggcaccggttccggtctcggatctctcttgttagagcgtctctccgtcgattacggcaaaaagtccaaattagggttcaccatttaccctt

SEQ ID NO: 19892 - DNA, 254 bp, Glycine max
  Clone ID: 700956212H1
attcagatcttagggtttcaatttttttttctgtggagccccattggccatagccgccagccagagaagagtagaagccttcgatcctaggttttctttccccccctttctcccaaatcggacctttttcgcttctcgattcgcttccgtagccgggcgatttgaggacccagaaaagaacgaaccgaacgttttatattttttcggataatcaatcgaagatgtctcgttgcttccctttcccccctcctggg

SEQ ID NO: 19893 - DNA, 254 bp, Glycine max
  Clone ID: 700956213H1
cttgcttccacttctgattcagaaactcttaggcattccacattctcaaccccggaccctatgagcagagcgaaaatgacaaccaccttcgcgaccgtcgcaggactcggtggcgcattactgtcatccacctcatctcgtctcagctcagggtttgtgaaatccccagtgattgctaggaatcccttgaggcaagctgtggcaatgggaaatgggaggattacatgctttgagaggaattggctgcgggcaga

SEQ ID NO: 19894 - DNA, 254 bp, Glycine max
  Clone ID: 700956214H1
cccaatctcaatctcattcattcctccaactccaaaccagattcccccctctctctctctctctctactgaacaaaaagaaaaagtgagagttcagaatttttaaatctcacctatttaactacctcgcataaaaattcacgtaacattctcttctgtgtcctaatcggaactcgcacaaattttgttatagtgatgtgatgtcattttagggtttttgaattgcgatgggtctgggaaacgatgacgatgacg

SEQ ID NO: 19895 - DNA, 252 bp, Glycine max
  Clone ID: 700956215H1
ctcgagcgaatcggctcagggcgtaccgtgtacgtatctgcagaaagtgaatgaaaggtaatgggggaagaagggtgcaaggtatgtgttacaggaggcagtggttacattggttcctggctcatcaagaagctactggccaagggctacacagttcatgcaactctcagagacttgagagaatgagtcaaatgttggcctcttaaagagccttccacaatcagaaggaaagatggtgctgtttgaagctga

SEQ ID NO: 19896 - DNA, 255 bp, Glycine max
  Clone ID: 700956216H1
ctttctctcttctctctccacccaaaccctaactcccgaccctgttcccctctcgtatccgtcatgaaaggaggaaagtccaagaccgaatctaagagagccgatcccaaacttgctgtgaataagaagggagccgccaccaaggctaggaaacccgccggcaaggggaaggcagcgaaagaccctaacaagccaaagaggcctccaagtgctttcttcgttttcatggaggagttcaggaaggtattcaacaaa

SEQ ID NO: 19897 - DNA, 77 bp, Glycine max
  Clone ID: 700956217H1
ctcgagccgattagaagtataacatgagtgatttgtagccttatggcaaggttggatatgaaggcttcctcatattc

SEQ ID NO: 19898 - DNA, 252 bp, Glycine max
  Clone ID: 700956218H1
ctttctcttttgcattctctctgaattcgtatgccatggagacacccggtaacgagcatgtggtgggtggcgcagaacccaacgacgtcgttacgcccttttcccacagagaagaaccggacaattcccaacccctcaccggcgacggtgccagtcccggaaagatatttataggtggtttagcgagagaaacgaccattgcccaatttatcaagcactttggtaagtatggtgagatcacggattcagtta

SEQ ID NO: 19899 - DNA, 252 bp, Glycine max
  Clone ID: 700956219H1
ggaaagtcaaggtagaggccggtttcttggatctgtacacggacagggagccagggtgcgggtactgtaagtactctgcgagggaacaggttttgggagaggtgaagcggttgatggagaagtatgcggacgaggaggttagtgttacgatagccggacatagccttgggagtgcgatggcggtattgagtgcctttgatattgttgaaactggggtgaatgtggggaaggatgggagaaaagcgcatgttt

SEQ ID NO: 19900 - DNA, 98 bp, Glycine max
  Clone ID: 700956220H1
gaaatgtggaagggcaacaatggagcccattgaatccgaatcagttagttcctccgccaaagaccacgaagtgggtgaacctgcttccactgttcacc

SEQ ID NO: 19901 - DNA, 251 bp, Glycine max
  Clone ID: 700956221H1
ggtgtttttgaaacgtgcttaaaccgtgatgggtgctgttgtggagtgctacgcgccgcctcgcacggcggtgctgtccctcaacacgctgccgttagggttccgtttccgtcccaccgatgaggagcttattgactactacctgcgctcgaagatcaacggaaatagtgacgatgtttgggttattcgtgagattgatgtctgcaaatgggagccttgggacttgcctgatttgtcagtggtacggaaca

SEQ ID NO: 19902 - DNA, 231 bp, Glycine max
  Clone ID: 700956222H1
ggagtgtccaattgagggtgaacaatgctgaattggctcaaagatctgcaccagcaatggaacatggtgggaagttacctagagtctcaagcagtccattgctcaaaacacttggatctcaaatgggtgcccaagagaacaagaattcagcaattcatcaggaacaaggagaaattggaaggggcaaatccccaggaggatccacaatttccgggccaaccccaaattggg

SEQ ID NO: 19903 - DNA, 103 bp, Glycine max
  Clone ID: 700956223H1
gtttttaacatggtcaatttaagttgcatgtgcccatgatgcattagcaccatgcatgtatgtttaatttaaacataataatatatgctatattgaggtttta

SEQ ID NO: 19904 - DNA, 251 bp, Glycine max
  unsure (1)..(251): unsure at all n locations
  Clone ID: 700956224H1
cgtcacgnagacatcttcgcgagcgactcgatcgagctgttgcgccagtgcggaatcgacttcaagaagaacagcgagaatggaatcgacgtgaaccggttcggggagctcctcatgtcctccgggatcgtgttgaacgactccgtgcgctgggttaccttccacagcggctacgatttcggctacctcctgaagctgttgacatgccggagcttgccggacacgcaggccgggttcttcgatctgatcaa

SEQ ID NO: 19905 - DNA, 252 bp, Glycine max
  Clone ID: 700956226H1
gtggggaagagttagtttctcttctcttcgatggaaggcggggaagaggttctcccttcggccactgccacctccgccgccaccggcaatcccaccgcttcgcctcctccgctcgcttttcttctcggtgctccccctctcgctgctgcctcggacgacgtcgttacccaacctgaaattcacgcgctgatttcagacgaagagcacgatcacgagcatgaacatgacgatgacctcgagcacgagcacgat

SEQ ID NO: 19906 - DNA, 252 bp, Glycine max
  Clone ID: 700956228H1
cgcaagtattcctccaatctccgtcgatcaccaccaccatgtcgtggctcctccgatccaccaagtctaagctcctctcttcctcttcctcttcttctctttctagaaccttcccctctctccctcgccctcagatcggagccatctctcccctccccgatcttttccaccgcaacaccgccattatgcctttcgcgaaggaaaacgcttccggtggaaacttgaccggtcttcccaaagttcccgcgaata

SEQ ID NO: 19907 - DNA, 252 bp, Glycine max
  Clone ID: 700956230H1
ggcgagtagggaagagcgaagagtgaggagaatggctcccaagggtttaacctttctggctgtgttaatatgcgtttcagcactgtcactgagtgcttctgttgcgggggaagggcaaaataatggccttgttatgaacttctacaaggaatcatgccgtcaggatgaagacatcatcacagaacaagtcaagcttctctacaagcgccacaagaacactgctttctcctggctcaggaacatcttccatga

SEQ ID NO: 19908 - DNA, 112 bp, Glycine max
  Clone ID: 700956231H1
cttaagttagaaggacttgagttgttataattaacggaaggaacccatatacaactaagaagaagatgaagaagaagaaggtctctcaatcaaagtgattgaaaagacccaa

SEQ ID NO: 19909 - DNA, 180 bp, Glycine max
  Clone ID: 700956233H1
tcacattcaccctttgttcttttggtctaccctgtaaatggaggaggagaaacagagaggcaaagggcacagactattgctgatgccatcaccattacaaggccacataacaccatttctccacctcggtgacatcctcttctcaaagggcttctccatcaccattctccacaccacata

SEQ ID NO: 19910 - DNA, 250 bp, Glycine max
  Clone ID: 700956238H1
ggatccccctgtgggttgcaccgccgaccgaccctgatcttctgtgaagggttcgagtgagagcatacctgtcgggacccgaaagatggtgaactatgcctgagcggggcgaagcagaggaaactctggtggaggcccgcagcgatactgacgtgcaaatcgttcgtctgacttgggtatagggggcaaagactaatcgaaccgtgcagtagctggttccctccgaagtttccctgaggatagctggagc

SEQ ID NO: 19911 - DNA, 225 bp, Glycine max
  Clone ID: 700956239H1
tcgccgaactgaacgaggttctgacacgtgagttggcggaggacggttactccggcgtggaggttagggttactccgatgcgcaccgagactatcatcagagccaccagaacccaagccgttctcggtgagaagggaaggagaattagggaacttacctcagtggtgcagaagaggttcaaatttcccgagaacagtgtcgagctttatgctgagaaggtcaaca

SEQ ID NO: 19912 - DNA, 118 bp, Glycine max
  Clone ID: 700956240H1
ggataggattggggagagaggataagacattaacagcaacactgagctctaactcgaatggcggttgcactaacgagttgcatttcctcatcctcggctctagtctccacagttgaat

SEQ ID NO: 19913 - DNA, 252 bp, Glycine max
  Clone ID: 700956204H1
cgggaatggaagagggtgacagtgaggccatttttggtgctcttaatctgaacccgcaactcttctgtaacgaagttctcaacattgtcgacgatgtgctcgacgaagctttcaatttcttctaccaggacgcatccacgaagctcaacatcgaaggcacccaaaggtcccaggatctgaaaaagggtgttgattgcgttcggctgaatgttcaatctgtttgcgacaaacaacttgctgcttgggagagtt

SEQ ID NO: 19914 - DNA, 250 bp, Glycine max
  Clone ID: 700956241H1
ctgaaaatgattcttctttacagtaaatggcattcagtatgctaagagattatgacaattacgtgttattatactggcaaataatagaattgcaggctaacaaacttatatattgttagcattacataaaaaataactgatggtaaggcagggggatttataagatattatttgccagtataataacacgtaattgtcataatttcttagcatttgaaatgccatttactgaaaatgattcttctttaca

SEQ ID NO: 19915 - DNA, 250 bp, Glycine max
  Clone ID: 700956243H1
attattattagggtttggcgattcagagagaaagagaaatgggagaacgataaggaatcccaattgctctggggctcttggcgatgctcctcttcttcattgcttcttcctcttcctctcacctcgttcgtagattccgatgacgccgacgacgcgatcttctacgagtcattcgtcgaggattttgacggacggtggattgtgtccgacaaggacgattactacggtgtctggaagcatgctaagagtg

SEQ ID NO: 19916 - DNA, 260 bp, Glycine max
  Clone ID: 700956162H1
caactagggtagggttccctccgccaaacccaaagaaagagtagaagaaacctacaaaactcatctctataaacaactccgtttgtcactccggcggctttagcaatcactccctccgttttgcgttttggattcatttatctgctgctttatcttaaaggccaagcgataaataacctctctctctctctctctctgtgagattgagaatccgatccttcgtttccgaaattctcgcgagatggacgagaacctgctcg

SEQ ID NO: 19917 - DNA, 257 bp, Glycine max
  Clone ID: 700956163H1
ctcgccatgttccttatcaagacatggagacagacggctttcggtgtttttgggtacctgaatttcaccaaagctggcttccttgatcattctaagaaattcaacccagaggacatggaattacgaataccagggaagaattgcattgttactggagctaactctggaattggctatgcaacggctgagggtcttgcaaagcgtggcgcaactgtctatcttgtatgtcgtaataaggagagaggagaggctgctct

SEQ ID NO: 19918 - DNA, 260 bp, Glycine max
  Clone ID: 700956164H1
agcgggtttggtttcatctaatactctcagggagaataatttccatcactttgagtatatgtgtaccaagaaagatccatttttttctgttaacaagactgcaatttcactcttttctgaaaattatgagaagcctgatcaactgaaatccgagattaatagttcaactaaattgattgttactgggcatggtcttggaggagcagttgtttctctctttactatatcgctattaaatagcattggttctggaaagaatc

SEQ ID NO: 19919 - DNA, 137 bp, Glycine max
  Clone ID: 700956167H1
atttgttctccgaaaatggttgatttacattggaaatcaaagatgccaagttccgacatgccttccaaaactctaaaactctctctctccgacaacaagtccttaccctctttggaactacccttccgcaccacaga

SEQ ID NO: 19920 - DNA, 258 bp, Glycine max
  Clone ID: 700956168H1
aaggagcaggaactcaaagcgcttgaagctcgaagggcgaaggctattgaggaattggagcaaaagaaagcggaacgcaaggagagggctcggaaaaggaaattgggcttgctagaggatgaagataactccaaattgagtgacatggatattttaaaagagagtaatgattttgctactgttgggaagactagagatagctcagatagggccttttacaaagatttggttaaggtcattgaagcctctgatgtctta

SEQ ID NO: 19921 - DNA, 259 bp, Glycine max
  Clone ID: 700956169H1
gagaatggctcccaagggtttaacctttctggctgtgttaatatgcgtttcagcactgtcactgagtccttctgttgcgggggaagggcaaaataatggccttgttatgaacttctacaaggaatcatgccctcaggctgaagacatcatcacagaacaagtcaagcttctctacaagcgccacaagaacactgctttctcctggctcaggaacatcttccatgactgtgctgttcagagttgtgatgcttcactgttg

SEQ ID NO: 19922 - DNA, 259 bp, Glycine max
  Clone ID: 700956171H1
tgctatcctggcgttagttcaaatgccattcatctgctctggaaatggcagcgaaatgaccgtaattcaactggcaaggccactgccagtgtgcaaccccagttgtggcaaccttctagtggcatccttatgactaatgacattactgataacaataccgaggatgccgtcccctgctttgctctgtcgaaaaatgattcttatgtaatgtcagcatcaggagggaagatttctctgttcaatatgatgacttttaaga

SEQ ID NO: 19923 - DNA, 178 bp, Glycine max
  Clone ID: 700956173H1
atcatatcgcaaattcgccaagaaactggcgtgaaacttaggatcgaggaagctgttcccgggtgtgatgaaagggttatcactatctcaggttctgaaaaagagactgaagaagataacactgaacagggaaaggaggttaatgataatgatgatggtggaagcgaggggaaggatc

SEQ ID NO: 19924 - DNA, 256 bp, Glycine max
  Clone ID: 700956174H1
cgtaacctctgtaactgtggagaacgtgacattccctcccaccgtgaagcctccctgctcccccaacaccttcttcctcgccggcgccggcgtcaggggcctccaaattcatcacgctttcgttaaattcactgccatctgcatttacctccaatacgacgccctttccttcctctccgttaagtggaaaaccaagtctgctcaccagttaacggaatccgaccaattcttctcagatatcgttacaggtccattc

SEQ ID NO: 19925 - DNA, 257 bp, Glycine max
  Clone ID: 700956177H1
cccacttgaattgatggtgtggaaaacagtgagtacgttggtgttggtgcaagatttggccctacattggaatcaaaagaaaaacgggccaatctttctagagttgtcatggctgatccgcctgattgctgtacaaagcctaagaataagctcaccaacgagatcattttggtgcaccgaggaaaatgtagtttcacaaccaaggcaaatatagctgaagaagctggtgcttcagccatcccattaataaactaccg

SEQ ID NO: 19926 - DNA, 256 bp, Glycine max
  Clone ID: 700956178H1
cgggaggttgtgaagaaggggtgcgaggctctgcatagatgcgaggacatggtcaataacctaggtttgttctctcccaacgagaccaaagaagatatcagcaccaccaatctcaagtacattctggtgccattttatcttgcggagttgacagaaaaattagcacaggatgacaggatacatattctaaaggcttcccaggcaaaactaaaggagtttatttcattttgcgaacaatggagctggtcccaaaaga

SEQ ID NO: 19927 - DNA, 256 bp, Glycine max
  Clone ID: 700956180H1
caatcttgcaaggactattgggacctgatcacaataaccaaacccaacaacaatctatgagttttccatatcatacaacaatttatggattaaactctaatgaattggttccttcttggtccaaagttcctcaattcttgagagcttcccctcctaaaccaccacccaataaccagttgcatttcactaaccccgcaaccttttggaatgcttctgaggctgcaaacatcaaagatgttcgccccagcttcttccc

SEQ ID NO: 19928 - DNA, 217 bp, Glycine max
  Clone ID: 700956182H1
ctcgagccgctcgagccgcgcgggtgaggtagaacccttccacggtggtgactgcgcgatgggtgcctacaagtatgtttcagagctatggcgcaagaagcagtctgatgtcatgcgcttcttgcagcgggtgaggtgctgggagtataggcagcaaccttccattgttcgcttgacaaggtcgacccgccctgacaaggctcgtcggttgggcttc

SEQ ID NO: 19929 - DNA, 258 bp, Glycine max
  Clone ID: 700956183H1
agaaaatgaagaacaatgccattgtttgcaacattggtcactttgacaatgagatcgacatgctggggctggagaactaccccggcgtgaagcgcatcaccatcaagccccaaaccgacagatgggtcttccccgagaccaatgtcggcatcattgtcttggccgagggtcgtttgatgaacttgggatgcgccacaggacaccctagttttgtgatgtcctgctccttcaccaaccaggtcattgctcagcttgagt

SEQ ID NO: 19930 - DNA, 237 bp, Glycine max
  Clone ID: 700956184H1
gaaaaagctactgatttttcttctcatcgaggttgttttctttgctgccgttgctcttataacaatgctggcattgcatggcactcgccaaaggtcgttagtggttggtgttctctctgatatcttcaatgttatgatgtatgtctcccctcttacaattatggcaaaggttataaaaactaagagtgtgaaatacatgccaatctggctctctctgggtaacttccttaatggtgc

SEQ ID NO: 19931 - DNA, 258 bp, Glycine max
  Clone ID: 700956185H1
ggatttcgcacgtagctagctacagaagacaaaggagccttgagtctcgagatcttgtcagatcggaacgcaacctcaacttccaccgagattgctttgtgtgttctgggaagggaagttactggcatacaggttatggaaaagaagccaaatggtgccatagcggcttcaaatggcagtttaagtgatagaatgcgtgtttctcccaaaattgcagcaatggttcaagcaatggatcatgagataaaggaatctgct

SEQ ID NO: 19932 - DNA, 189 bp, Glycine max
  Clone ID: 700956186H1
aaaagaagaaggtgtgggggagggaagaaatttgaagcaacagcaaagaaagtttccaatttgatgcttattttttaccatatggcaatgtgagtccatgtcacttgcctaggccatcacctaccactgataattccatgccttgttattaacccaaccacaccatttccctcttctcacaatttcatg

SEQ ID NO: 19933 - DNA, 270 bp, Glycine max
  Clone ID: 700956187H1
agtggactttatattcaacaagttttctgtcaaacccgggtcagaggaggctcagatcatgaagaatactattagtgagtgtgaagagggtggaatcaaaggagaggaaaagtactgtgccacttcgcttgaatccatggttgatttcagcacttccaagcttggaaataatgttgaggttgtgtccacagaagtggacaaggaaacgggattgcagaaatacaccgtagcaccgggagtgaagaagttatcaggggacaaggctgttgt

SEQ ID NO: 19934 - DNA, 261 bp, Glycine max
  Clone ID: 700956188H1
cccttctcttatattcaaaatcacgttcacctttctcccttcactcatctcacaaaccatgagcacaatccaccaaacacacactcgttgcgaaggtgaagacaaagagttcagtttctggggctcatcaaacatcataccttctgaaaatgattgtgatcaaccacaaggtaatgaatcaaggctcaaaaaggaagcatactttggagaaacacaccaaagaaaaagccttaaatatgagtattcacggttttgttcaac

SEQ ID NO: 19935 - DNA, 256 bp, Glycine max
  Clone ID: 700956189H1
gttttcaagtggaaaaaacctggagatccccacgagtttgagcaatgagatttggatgcgcggttttagttgtgatcaataagtcgatagttagaacaatagtcttggtataaggaccttgccaataattttttagttctgattcacagagctaagacagttccgtcttagactttaaaagttttgatatttagctttaatacttgaagtttacttccaattttatggggtatccccaaaacatttcatactcttt

SEQ ID NO: 19936 - DNA, 254 bp, Glycine max
  Clone ID: 700956190H1
atctgatttgatttcggagctgtgggttttattgaaagaaaaaaattagaagcaaaaatgatgcagtcgttgatgagcatgaaggcttacgtgggtacgaggttaccgattttaacgaattccgagacgagtacgaggaagcagcgcgtgaattgtccgaaccgtaggaatgtgatggtttcgtgcggttcggagaggaatgggaacgaaggaataggttcgaactcaggttcgtttatgtctccgagccataa

SEQ ID NO: 19937 - DNA, 95 bp, Glycine max
  Clone ID: 700956192H1
tgaaaaataagggtgctgttgctttcttgatttttttgtgtgcagttggaaatttttggattagtttatcttgtggatcactctagctttttgct

SEQ ID NO: 19938 - DNA, 254 bp, Glycine max
  Clone ID: 700956194H1
ggtacagtcaagtacaaaacgcaataccctaatttgtttctctgtctctgtctctgtctctctctccattcgtgctttcagctccggcaacctctcttccggcgccgccgctatctcggccgcgcaccaatcttcaatttgattacttgggtcaacgatttctgtcattctcaatcatggcaactagacttcagtttgaaaataattgtgaagttggagtcttctctaaacttaccaatgcctactgtttggtt

SEQ ID NO: 19939 - DNA, 252 bp, Glycine max
  Clone ID: 700956195H1
ccactattgcacttcttcctcgttctccctctttttcttcttcttcgctaaacccttttttctatctcactaacacaacaatgggagacgagaagaagggcaagcctgctgcttccggcgtgtggtccaccatcaagcctttcgtcaatggtggagcctccggcatgctcgccacctgcgtcattcaacccatcgatatgatcaaggtgaggattcaacttgggcaaggatcagctgcgcaggtcacttcca

SEQ ID NO: 19940 - DNA, 261 bp, Glycine max
  Clone ID: 700956160H1
ctggatatcgggtacggactgctgcacatggaccggagtagaatgccactataacagcacccgggtccaaagattattcttaacgggtcaaaaacccgaaaccatcttatcgggtaccatctcacccaccctctcaaaactcaaactcctcgatggactctacctcataaacctcatcaacatttcgggtcccttcccaaattttcttttccaacttccaaatctccaatttatctatctagaaaacaacaatctctcggg

SEQ ID NO: 19941 - DNA, 254 bp, Glycine max
  Clone ID: 700956196H1
ccaaaacaatttgctcacaaaggaggaaaaatggcacctttcgtttccctctctttgttgcttctctttctcaaccaccccctcctttccctctcaaccaaccctgaagggaacgctctgcatgctttgagaagcaggctttctgatcccaacaatatgttgcagagttgggacccaacactggttaatccctgtacttggtttcatgttacctgtgactccaacaatcatgtgattcgcttagacttgggcaa

SEQ ID NO: 19942 - DNA, 181 bp, Glycine max
  Clone ID: 700956201H1
tcacattcaccctttgttcttttggtctaccctgtaaatggaggaggagaaacagagaggcaaagggcacagactattgctgatgccatcaccattacaaggccacataacaccatttctccacctcggtgacatcctcttctcaaagggcttctccatcaccattctccacaccatatac

SEQ ID NO: 19943 - DNA, 267 bp, Glycine max
  Clone ID: 700956122H1
gtttccaactttccttcttcttcttccttccttcctcgtttcgttaaccttctaattcaattcattcctcacttccttttccaaccgaaccttttctccgataatcagagagagataataatggattggggaaacgtaaccgcggaggatctgatcgacgcgctccgtgaggtggattggtcgtcgccgccgcgccctctgtcggaattcttctcgcgattcaccgttcccaggtcttcctccaaatggaacagccgcctcaaatgc

SEQ ID NO: 19944 - DNA, 265 bp, Glycine max
  Clone ID: 700956124H1
aaacaccaggctttcatcgtggaaggtgaccttaacgacacccccctgcttgagaagctcttcgacgttgtccccttcacccacatcctccacctcgccgctcaggctggcgtccgctacgccatgcagaacccccaatcctacgtcaccgccaacattgctggcttcgtcatccctcctcgaggctgccaaatccgccaatccccaacccgccatagtctgggcttcatccagctccgtctacggcctcaacacccaaaaccct

SEQ ID NO: 19945 - DNA, 266 bp, Glycine max
  Clone ID: 700956125H1
atagtataatactaccccctcttgtgtggtgttcatattcttcaaagtccaaagtagcttctcactgcagattctttcctctttttttatagtacagtactaggcatttgatgaggacataacggaagggcttatataagtttatgtttcaaatggcagtattgataggataaagattgagttttcgttaattgttaccaggtgatacctaaatggtaagctgacctaagcgaaaatttgttccattctttccaatttcttaaaag

SEQ ID NO: 19946 - DNA, 263 bp, Glycine max
  Clone ID: 700956126H1
ctttttacttcccctatggctcgtcactccttgctcttagacctcctcctcttcgccgccgtggccaccgccgcgatggcggggccgcgtccgacgccgacgacatcctgatccgtcaggtggtgccagatgttggcgaagccgaagaggaggacaacctgctgaacgccgagcaccacttcgcgagcttcaaggccaagttcgccaagacctacgccaccaaggaggagcacgatcatcgcttcggcgtcttcaagtccaac

SEQ ID NO: 19947 - DNA, 262 bp, Glycine max
  Clone ID: 700956128H1
cagtttcatcattttttctttttttctctcttttggtacattggaaagaaagaaaggaagcttcaatttcttccaataaagcgtgtttttgaacgtgcttttaaggtatatatatatatacataactacatataccaaaaaactgatttgcagctgaaattgctttcgttcattagtatttagtttttcacaatctagggaagacatgggagaagtggctgatgaaggtcaatatttcagatcagaaatagctctattgaat

SEQ ID NO: 19948 - DNA, 264 bp, Glycine max
  Clone ID: 700956131H1
gaaatttaactcgaccttgtatgatgaatgggttaacaagggcaatgcaccggcactgcccgagactcttaagaattacaacaagctggtgtctcttggcttcaagattatattcttgtcaggaagaacactggacaaacaggccgtaacagaagcaaacttaaagaaggctggctaccacacatgggaaaaattaattctcaaggatccacaagatccttccactccaaatgcagtttcatacaaaacagcagcgagagagaa

SEQ ID NO: 19949 - DNA, 263 bp, Glycine max
  Clone ID: 700956132H1
ggaacacaccaaagttttctcccaaaccaaaacattcaattaggaagagggttggacattggtgaaccaaaccagtttggtgcattgaataattccacttctcactcttcagcagcatttgagagcatcaacatgcagaacccaaagaggtttgctgcacaattgctaccagactttgtggcctaaataagacattgaagaggggataagatcatagttggtgacattggttatatgggtctctcatattttcttctaatcca

SEQ ID NO: 19950 - DNA, 263 bp, Glycine max
  Clone ID: 700956133H1
ttctgtgtctgtgtttgcggatgaggattccgagcgagcgacctacttcgtttctcggaactattgagtcatcatgggtaaggaaaagactcacatcaacatcttcgtcattggacatgtcgactctgggcagtcaactaccactggtcatttgatctacaagcttggaggtattgacacgcgtgtgattgagaggttcgagaaggaggctgctgagatgaacaagaggtcattcaagtatgcctgggtgcttgacaagctca

SEQ ID NO: 19951 - DNA, 242 bp, Glycine max
  Clone ID: 700956136H1
gtcatggtttcgatctgaggttttggcgctctcgagttcgttttgtagcatcatcatcatcaccataccttgttcagattctgctcactttcaccacaacggctttactatttaccgcgtttcgttttcgtgtcaccgcaaataatgaaaggaggtgttccctgtatccactcctcgtcagggaagatctgaagcagtgctagctgctcacgtcctgtaatggacgtgaggttctagatcgc

SEQ ID NO: 19952 - DNA, 261 bp, Glycine max
  Clone ID: 700956137H1
atggcaacagaaacaaaagtggcagtattaggtggcatcaccgaagtgcagggagctgccaacagcgtcgagatcaacaatctcgctcgctttgctgtagaggaacaaaacaaaagagagaattcagttctggagtttgtgagggtgattagtgcaaagcagcaagtggttgctggagtgaattactacataacattggaagcaaaagatggtgagattaaaaatgagtataaagcgaaggtttgggagagggaatcccaa

SEQ ID NO: 19953 - DNA, 137 bp, Glycine max
  Clone ID: 700956138H1
gtttttaacatggtcaatttaagttgcatgtgcccatgatgcattagcaccatgcatgtatgtttaatttaaacataataatatatgctatattgaggttttgaaaaaaaacaaaaaaaaaaaaaaaaaaaaacaaa

SEQ ID NO: 19954 - DNA, 265 bp, Glycine max
  Clone ID: 700956139H1
gcatttccatatatcagtccatgtcctccttaatgctcaatggagctcatcaaaatccaaacctcattagtggcatagctccaaatggccttaactttcacaacaagtgtttattccaaaagggtgtgctgtctcatggtaacaagttaagggtggtcagaaaaaacttcactcccaaaggcagcatgtcagcatcatcatcatcatcatctaggcctggttctcagccaaggttcatccagcacaagaaggaggcattttggtt

SEQ ID NO: 19955 - DNA, 153 bp, Glycine max
  Clone ID: 700956140H1
cacacagcattagtatgtatcagcaacaagggtcagatccagcaaagcagtcaccggcaaccggttttccggtgagctatagcagttcaacaacgtgttcggccaacgaggcttcctacgctccagtcccacctccccagcccaaacctcttg

SEQ ID NO: 19956 - DNA, 184 bp, Glycine max
  Clone ID: 700956141H1
gtcggaaaccaaaccccgactaacctctctcccccaccttcgcgttctgattcagctgagagtggttgggctctgcaaaaattagctgcatgagctggtttgggaaactccgtttattctccaatttcaatccctttcacttcattacttctttgttaatttttaccctccatttttcacccca

SEQ ID NO: 19957 - DNA, 261 bp, Glycine max
  Clone ID: 700956142H1
gttttgatccatgccactgtccaaaagattgtttttgatacaaaaggaaaaagaccaaaagctacaggggttattttcaaggatgaaaatgggaagcagcatgaggcatatctaggaaatgacaggcagagtgaggtgattgtgtccagtggggcacttgggactcctcaattgctattgctgagtggaattggcccaaaagcagagcttcagaaattgaacatccctgttgtgcttgataatcaatttgttgggaaaggc

SEQ ID NO: 19958 - DNA, 262 bp, Glycine max
  Clone ID: 700956144H1
ccaagtgttgctatcaacggaggagcgcccacactggaaaaaaaaatctccggcgattgttccaccgaacctcttccgttctccgccccgatcctggattcaatcgtcgattccagtttctcattctagttgatcgagttcgtaggtttttatggtgcttcgttggacacacggtggcgatttgcattactcagtgggtggtggtggcaccgtgaattattgagtctgattacactcgctttgaaaaatcgaagagagaaat

SEQ ID NO: 19959 - DNA, 261 bp, Glycine max
  Clone ID: 700956145H1
ggcaatggcaatggcagggaggagaatgatgtggcgggggagagctgccgccaccgtcagtccccgaggcggtcgtctcagggaaggagaaggactccaagtagggaaagagaccaatccaatggcagagaaagggaagtgagtagatctcctggtagaagatcatctgacaccaccaatactacaaatgcaagcaacaacaacaacaacacaagttctaggcctgggaaaatggtgtctgttccagccactgtttcatct

SEQ ID NO: 19960 - DNA, 123 bp, Glycine max
  Clone ID: 700956146H1
gtttgtgttgctctgttatgctgctcctccctgtttgatttcaaggtatttgcccgaatcttctttctcgaagggtaaaggataaagggatgatctacacagcaattgacacgttccacacaa

SEQ ID NO: 19961 - DNA, 247 bp, Glycine max
  Clone ID: 700956147H1
cgcaaattaaagcgcaaaaaccattctccttcggtgctcttgaaaacatgggaaaacagagcacagaattctctgccctcaactgcatcgacctctccaaccctgacatcaaccaatccgtcaatttactcaaacaggcatgtttggattccggttttttctacgttgtcaatcatggaataagccaggaattcatggaagaggtttttgcacagagcaagaaattcttctctcttcctcacaagga

SEQ ID NO: 19962 - DNA, 264 bp, Glycine max
  Clone ID: 700956149H1
ttcagagaggtccttaacttgattaagcctgttgcatctgttaaaaagttatcactcacttcacatgtagcctcagatttgccaatgtatgccattggtgatgaaaaacgtctcatgcaaactattctgaatgttgttggtaatgctgtgaagttctcaaaagagggttgcatttccatcactgctttcgttgcaaagcctgaatcctttagagatgctagaattcctgactttcttccagtgccaagtgataaccacttttat

SEQ ID NO: 19963 - DNA, 263 bp, Glycine max
  Clone ID: 700956150H1
ttcttcctctttcaaactccatcgcagattcttcgctcctttccattgattcaaaacatggctaccactcctgccagatctttcctccaagtcgccgcaacggaggaggctgcgccgcctctcagagtcgtccagattgaaggactggttatcctgaagataattaagcattgtaaggaccactcgccttctttagtcactggacaacttcttgggttggatgttggcagtgttcttgaagttaccaactgcttcccctttcc

SEQ ID NO: 19964 - DNA, 264 bp, Glycine max
  Clone ID: 700956154H1
gcaatgtgaaactgacaggttaactcacttctacacattcattctcatgccagatgccacatacagtgtcctggttgacaatagagagagagattccggaagcatgtatacagattgggatattcttcctccacgaaaaatcaaagatgtcaaggccaaaaagcctaaagactgggaagaaagagaatacattgaagaccctaatgatgtcaaacctgagggatatgattcgatcccaagagaaattcctgacccaaatgctaa

SEQ ID NO: 19965 - DNA, 259 bp, Glycine max
  Clone ID: 700956155H1
gcccgtgagagtttaacgtcgaatcagaggcgtagagtgtagggtgaatgcgagatggacgctcccctgctgctggacaaaggcgagggaggcggcgctggtgacggagaacggcgactacgtggcggtgagggagctgaaggaggtgaagaaggtgttctggattgagacgaagagagtgtggcagattgcgatgcccattgttttcaacatatggtgtcagttcggtgtgaattccgtgaccacaatgttcgttgga

SEQ ID NO: 19966 - DNA, 129 bp, Glycine max
  Clone ID: 700956157H1
ctcctccgcaatgcgccaccgccgacgaagagttacttcaaataactggtggaattttggctgttaagaaagcgctgatttctgtatctcattgtcttcaagattgtccgccattatgcaaagttccag

SEQ ID NO: 19967 - DNA, 260 bp, Glycine max
  Clone ID: 700956159H1
tgagaatcttatggagcttctcataatgattgatgcctgcaggagggcttcagccaaaaatattactgctgtcattccatattttggatatgccagagctgatagaaagacccaaggacgtgaatccattgctgccaagcttgtagcaaatttaattacagaagcaggtgcaaatcgtgtacttgcttgtgacctccattctgggcagtccatgggctattttgatattccagttgatcatgtgtatggccagcctgtta

SEQ ID NO: 19968 - DNA, 266 bp, Glycine max
  Clone ID: 700956121H1
attacatgtttgaggagagtgtgtgcctgctacttcgggcctcatggttcacacctttatctgttgaagaacatgtggttcatgaagatgcatatgaagacctagaagattattatcagtacgaggatgatgatgatgatgatgatatggatgaagtttactatggtggttcgtccagtcttcgggttattggcaaccgtagatggggagataatggttatgtcagggctggtcgtcaagaagctcggccagtccatcgtccaaac

SEQ ID NO: 19969 - DNA, 249 bp, Glycine max
  Clone ID: 700956083H1
atcacaatttgtgcattgcctcgtgtcctttttcttctttgcttgccaaaaatcttacacacacaggtatctagcaaatgggttctcaccagcaagaaccatggctattggagaatgggaaaccgcgggtgttgaccaaggagaataggcatggccgttctgcacacagcatgtcctccacgtctttgcgcaagaagtctagccgaactcttgtctccaagcttccatgtgccacactcagaagcatcc

SEQ ID NO: 19970 - DNA, 240 bp, Glycine max
  Clone ID: 700956084H1
gaaaaatattaaataaaaccgccacaaatttctccatagttatgggcacttccattctcgacgccctgaacgttcgcgtggaaggttccggcgacaagtaccttgtcctggcccacggcttcggcacggaccaatccgcgtggcagcgcgtgctcccttacttcacccgcaactacagcgtcattctctacgacctcgtctgcgccggcagcgtcaaccccgaccacttcgactaccgcc

SEQ ID NO: 19971 - DNA, 250 bp, Glycine max
  Clone ID: 700956085H1
ctttgtttaatcacgtggaccattagagttggtgaactcttcatttcctcacactacttaggataaaccgtccttcacacttatcattattgtcatcctttcttcttgtagaaggtcaatgtcatggatgatggtcctgcaaaattaaaattcatccctgatcattttcaagttccaacatcaagtatagaatctcctgagagcagaacatcatctattacagaacctggaactgatcaatctccaagtt

SEQ ID NO: 19972 - DNA, 250 bp, Glycine max
  Clone ID: 700956086H1
caacaacattcattcattcacagctgtcacgccgtgaacggcacatggcaacggcgagacgcagtttcccgcctatcaccgtatgcaacgggacgacaccgtgcgagtctgtggccgccgacctcgacggtatgctcctcatctcccgttgctcgtttccgtacttcatgctcgtcgccgtcgaagtcgtcagcctcctccgcggcctcatcctcgtcctctcacttgcgttcgtcatcatcgcctatct

SEQ ID NO: 19973 - DNA, 250 bp, Glycine max
  Clone ID: 700956087H1
catcgttaccatggtcaacaagaatgaaaattgcagctggagctgcaaagggtctagcctttctacatgaagcaaagaaaccagtcatctatagagattttaaagcttcaaacatcttgttagactcggattataatgcacaactttccgattttggcttggccaaagatggtcctgaaggagatgacacacacgtttcaactagagtcatgggcacacaaggctatgcggccccagaatacatcatgac

SEQ ID NO: 19974 - DNA, 210 bp, Glycine max
  Clone ID: 700956088H1
gtgctatgttttttttctgctttcgtatgacaagtgtataattctcctgaatacccagcagaagctatcaacaaaagccagaccatgtctggacccctgtctccaaagacatctcttgaaaagagtgaccgtgttggttcattgaagaaaatgctgcggaattctctaacaaggagtacgaagcgagcagcagcaaggtcatgtcggttg

SEQ ID NO: 19975 - DNA, 249 bp, Glycine max
  Clone ID: 700956089H1
gacaaactctattctgtattgtgaactacaatctacatttcttgggtgtggcttcttggaattttgtttgaaaaagatgtgactcgtgagtacttggcgagttggcatggctcctatttgcttttaggtgccacccccagaagtagcctaggccatcctatgtaaattgcgaacttgtttttactttttagcccttatttcaaaattccacacacttctctttcagaatcttacccaatgctataaatt

SEQ ID NO: 19976 - DNA, 250 bp, Glycine max
  Clone ID: 700956090H1
aacgggcccaaatgattgaaactggggaagatattgactggggatttgcagaggcgcttgcttatgctaccttgcttattgaaggtaaccatgttcgattaagtggtcaggatgttgaaagaggaacttttagtcaccgccatgctgtagttcacgatcagacaacaggagagaaatattgtcccctggacaatgttataatgaaccaagatgaagagatgtttaccgttagcaatagttcactttctga

SEQ ID NO: 19977 - DNA, 245 bp, Glycine max
  Clone ID: 700956091H1
ccaaagttgaggtgcgccaaagacgaaagatggtcgctccatgacagccagctctagtgacaggaggcactcgaagcataggtgagagcgcttctccatccagagatagaaaggttttttctacatcatcaaccccaaagagtccagtattggcctctgaaacggacagaaagctcacacaagcttgcttgcttactgtaatgtaatggttatagagagttagtatctattaaattgatggaagc

SEQ ID NO: 19978 - DNA, 250 bp, Glycine max
  Clone ID: 700956092H1
ctcctctctctgcatcgctgcgttttccgaatcgaaaggtgaggttagtaagtaacaatggtggagaaggccaagggtaggaaggaggaggttgtcactcgagagtacaccatcaacctccacaaacgcttgcatggctgcacatttaagaagaaggctcctaaagcaattaaggagataaggaagtttgctcagaaagcgatggggacgaatgatgtaagagtggatgtgaagctcaacaaggctgtgt

SEQ ID NO: 19979 - DNA, 253 bp, Glycine max
  Clone ID: 700956094H1
gacaattcaactacgagttttaccccaagacacaagccaagaatacttacagtttaccttttcttgctcaaaccaacgacgctaacgctgaaaacaatctctacccgtttgtttttctaaacgtcgatggcaacctttttatctttgccaacaaccgcgctatcttgttcgattacaataagaacagtgtcgtgagaacctaccctcaaatacccggtggagatccatggtgttatcctagcaccggttccgc

SEQ ID NO: 19980 - DNA, 257 bp, Glycine max
  Clone ID: 700956095H1
ctcaactcagctcgctcttgttcttcttctccattatcaaacgaagtatagatatcatatcattgcagcttcattttcatccaccaattaactaacaatggcgcacacatcccttttcactccctcttcctctcttaggttcaaccctcttcttcttacctccaccccctcttcttcttcttcttctcgctccaacaacctttctttccccgctctctccaggaacctaaggtaatcggtagaagatagaaagatta

SEQ ID NO: 19981 - DNA, 236 bp, Glycine max
  Clone ID: 700956096H1
aaactccattaaacaaagccaaggcaaacataagcaaaacggcatgtcgtgtaatgtaatgaaacgaatgaaatgataggtaggtggaggattgagagagtgcggtgttggttcaccatgaggaagtttggtgcttgaacttgaacccgaacattgcgattcagacatagagaatggccatggcccgaagagtccctcgttatgttttaggatcggtccaaaggaacatgtccttc

SEQ ID NO: 19982 - DNA, 269 bp, Glycine max
  Clone ID: 700956102H1
tggactgatgatggacttggttattatgagtttctccaacttgcagaggacttgggtgcttcaccaatatgggtatttaataatggtgtcagtcataatgatcaagttgatacatcggcggtcttacctcttgtgcaagaagcccttgatggaattgagttcgcgagaggtgatcccacttcaaaatggggttcccttagagctgctatgggacatcctgagccatttgacctcagatatgttgctgttgggaatgaagattgtggaaa

SEQ ID NO: 19983 - DNA, 268 bp, Glycine max
  Clone ID: 700956104H1
tgcaaatgttggggactccagagctgttatatgcaggggtggaaatgccattgctgtttctcgggatcacaagccagatcaaactgatgagaggcgaaggattgaagatgcaggtggctttgttatgtgggctggaacttggagagttggtggagttcttgctgtttcacgtgcatttggtgatagactcctgaagcagtatgttgttgctgatccagaaatccaggaagaaaaggttgatagctctcttgagtttcttatattggct

SEQ ID NO: 19984 - DNA, 267 bp, Glycine max
  Clone ID: 700956106H1
accttaaattaattatagaaccatgtttgcaactaccaattcctccacttggtcacctttattctctttcagtagaacaacagcaacctctctgccttccaaacccacattctgctatttggttccaatgaaacaatcttcttctccggggcacttgtgcttagccttagacaatccacgtagaacacttcacgtgtcttgtggctccacatcaccacatgcttcccagagatcatcaattcaggggggtgaagcttttttcagggg

SEQ ID NO: 19985 - DNA, 270 bp, Glycine max
  Clone ID: 700956109H1
gcagatcttcgtcaagaccctcaccggaaagaccatcacccttgaggtggaaagctctgacaccatcgacaacgtcaaggccaagatccaggacaaggaaggaattcccccggatcagcaacgtctcatcttcgccggaaagcagctcgaggacggccgtaccctcgccgactacaacatccagaaggagtcaacccttcaccttgtgcttcgtctccgtggtggcatgcagatcttcgtcaagactctcactggcaaaaccataaccct

SEQ ID NO: 19986 - DNA, 160 bp, Glycine max
  Clone ID: 700956110H1
gacggtagtaggccaagtgttttgcataggccgtgactgatcatcagaggcaatggcgagcaggtactgggcagtgtctcttcccgtccacaactcggcatcattacagctctggaaccaattgcaggaacgaatctccaagcattccttccacacaaca

SEQ ID NO: 19987 - DNA, 267 bp, Glycine max
  Clone ID: 700956111H1
gctagccacaatgcagatattcgtgaaaaacctaacggggaagacgataaccctagaggtagagtcatcggacacaatcgacaatgtgaaggcgaagatccaggacaaggagggcatcccgccggaccagcagcgcctgatcttcgccggtaagcagctggaggacggccgcaccctcgccgactacaacatccagaaggagtccacgcttcacctcgtcctccgcctccgcggcggcgccaagaagcgcaagaagaagacctacac

SEQ ID NO: 19988 - DNA, 267 bp, Glycine max
  Clone ID: 700956112H1
atcgttttggaagaacaagggcatgtgagaaaaaacatactaatcaaattaaacagcgaagaagagtttcaaatttattgcttcgaatctccagcttcgtcagggaaggaaaacagcataacgtgtggtctcgggggaaccaaaaactgtgaaattctgaagccactaggccttttaaaaaccaaactaaggaagacggtttagacagagagtacttcaagctaagaaaatggaaagtggggttgtggctgtgaacaacaacatcaa

SEQ ID NO: 19989 - DNA, 265 bp, Glycine max
  Clone ID: 700956114H1
actgaggaggcacaccttcaggagcagtcatggttctcaaaaccgagctgtgccgattcagcggtgccaagatctacccagggaaaggcatcagatttgttcgtggtgattctcaggttttcctgtttgctaactcaaaatgtaagaggtatttccacaacaggttgaagccgtcaaagctcacgtggactgcaatgtaccgaaagcagcataagaaggatattgctcaagaagctgtgaagaagagaagacgtgctaccaaaaa

SEQ ID NO: 19990 - DNA, 136 bp, Glycine max
  Clone ID: 700956116H1
gcaagatcattatctcggctgtttctctcatcctggtggtgggtgttccgatcggcgtggtggtcgccgtgaacaagaagggcgatgatcctgcagttgaatccgaccacaaatacgtagtggtcatatgccaaaa

SEQ ID NO: 19991 - DNA, 263 bp, Glycine max
  Clone ID: 700956117H1
gtcaaagcatatttccttgtaaaaatatgtaagaaaatttagactcagaaaagaaaaatatttgaaggacaaattttagtttcacaacagaataggcatctttattattaccaagaaaaaggagaaattgtccttggcttattaaaccctgtttgatgcttgttccaaacttgagaaatatttggatattgagatttgaaataaaagattagtgttcagtttgaaaaaaaaaaaaaaaaaaaagggggggccgccgattattg

SEQ ID NO: 19992 - DNA, 268 bp, Glycine max
  Clone ID: 700956118H1
cgaacaactcatctccggcaaggaagatgccgccaacaactttgccagaggccactacaccgttggcaaagagatcgtagatctgtgcttggatcgcgtccgaaagctcgcagacaatctgcactggtctccagggcttcctcgtcttcaacgctgtcggcggtggcaccggttccggtctcggatctctcttgttagagcgtctctccgtcgattacggcaaaaagtccaaattagggttcaccatttacccttcccctcaggtttc

SEQ ID NO: 19993 - DNA, 133 bp, Glycine max
  Clone ID: 700956120H1
gcaggcagtgtcatctctcctttgacgacaagatgagcatcccaattccccatcggcagttattcatagacggagactggaaagtccccgtcctcaagaatcggattcccatcatcaacccttccacacaaca

SEQ ID NO: 19994 - DNA, 254 bp, Glycine max
  Clone ID: 700956082H1
ctcttgaccctttggtgcatagtagcaaaagggggtggttgcataaagcagaaaagttggtaaatggcatggtatatctttaacagttgagccttttacgggttgaatattctgaaaaagttaagttgaaggtgaaaagttgaaagtttagcacttgggagtttagttgttgttgttgttaggaaaaggtgaaaaaggttggaaggagtgaggataataatatgccaactgtgtggttctctttgaagagatct

SEQ ID NO: 19995 - DNA, 251 bp, Glycine max
  Clone ID: 700956038H1
gatgctgcaactagtactggagctcctttctggtctgcaccaaaaagattccctcgtccactacaattctcagcctctgatttgggtcatctaaattttgtgtcgtcagcttctattttacgggcagcaacatttggtatcccaatccctgactggggtaagaaccctaggaagatggctgaagctgttgatagggtgatagtacctgactttcagcctaagaaagatgtgaaaatagtgacagatgagaa

SEQ ID NO: 19996 - DNA, 254 bp, Glycine max
  Clone ID: 700956039H1
ggttcctctccgtgaacacccaaagccaaacaaacaaacattaaccttaaacaaacaaaccctaattttttatctgcccctaattgtttgttcccttctcatccattcctaaataaattctagatcatttttttgccatatttcccaaataaaattccccgattaaccttcgtgctacccacgaaatctatttgtcttcccatttgtttctgagcatttagctgtcgcttctttttgtttgttcatgtcatcct

SEQ ID NO: 19997 - DNA, 253 bp, Glycine max
  Clone ID: 700956040H1
tcactttccattctcttcaacctaacgcagcatcgctatactcttcattccatggctttgcccaatcagcaaaccgtggattaccctagtttcaaactcgttatcgtcggtgatggtggcacaggaaagacaacctttgtgaaaaggcatctcaccggagaattcgagaagaaatatgagccaaccatcggtgtggaggttcacccattggattttttcacaaactgtggaaagattcgattctactgctggg

SEQ ID NO: 19998 - DNA, 251 bp, Glycine max
  Clone ID: 700956043H1
ctcgagccgctcgagccgattcggctcgaggttaagatcaccgtttcttcttcttcttactcttcttactcttctactactactactactactactcctccacaaaatgatgctcagaatcaagagggttcccactgtcgtttccaactaccaaaaagacgacgctgcagactctcctcgtcccgtcggaggttgtggtcggaattgcctcaaagcttgttgccttccagatgcaaagctgcctttgtatg

SEQ ID NO: 19999 - DNA, 248 bp, Glycine max
  Clone ID: 700956044H1
ctgggccaaggggcactacacggagggcgccgagctcatcgactccgtccttgacgtcgtgcgcaaggaggccgagaactgcgactgcctccaggggttccaggtctgccactcgctcggcggaggaaccggctccgggatggggacgcttttgatttccaagaacagagaggagtaccctgacagaatgatgctcaccttctccgtttttccttcccccaaggtctctgatactgtggttgagcctt

SEQ ID NO: 20000 - DNA, 253 bp, Glycine max
  Clone ID: 700956046H1
atgggtgtttctgcattatcaacataaagaaggactaataatattttttaacttatggtttttctggtgatttgaattaaagtgagtatttttctgttgggggttgattagtttattctggtatctgtgtgggatttccaggcatttacggaaggtgggggatttgactttgttggtgacaggtgtcagctaaggaggttacggaaggtcaagtttgtttgtttgattgattggagtttctgttacctctaca

SEQ ID NO: 20001 - DNA, 255 bp, Glycine max
  Clone ID: 700956047H1
gagggtgttctgtgtttcctcccttccctccccttccccggtcagcggtgttgttttgttcggaatctgaaatcggaaatcggaagaatagtcttcacttcagaggcagaagagaagggaaaatcgatgagtaggaacgattccaagtacttttccaccaccaagaagggtgaaatccctgagctcaaagaagagctcaattctcagtaacaggaccaaagaaaagatgctgtcaaaaaggttattgctgcaatg

SEQ ID NO: 20002 - DNA, 254 bp, Glycine max
  Clone ID: 700956049H1
gaacataatggagaaccctgcttggtacactcagtacacaccttaccaggctgagatatctcaggggaggcttgagtcattgctgaattaccaaaccatgatcaccgacctcaccggcttgcctatgtcgaatgcttcattgcttgatgagggtactgctgctgctgaagcaatgtctatgtgtaataatattcagaaagggaagaagaagaccttcattattgcaagtaactgccaccctcagacaattgata

SEQ ID NO: 20003 - DNA, 256 bp, Glycine max
  Clone ID: 700956050H1
cgccgccagatctcagacgagactcagtcacactttctctctttctcttccacaatgcagctcctccgggcggtgctcgcggcggcgctgctcctcctcgccactctctccgacgcccacaacatcacaaccatcctctcctagcaccctgagttctccaccttcaaccactacctgaccctgacccacctggccccggaaatcaacggcaaaaccaccatcaccgtctgcgccgtggacaacgccgccatgtcgg

SEQ ID NO: 20004 - DNA, 249 bp, Glycine max
  Clone ID: 700956051H1
caagggtgcgagggtgctcgttgtctgctccgagataaccgccgtgacgttccgcggcccctcggacacgcacctcgactcgctcgtgggacaggcactgttcggagatggcgccgcagcgttgatcatcggatcagaccccgacccagcagtggagcggccgatattcgagatgatatcggccgcccagacaatcctgcccgactctgacggtgctatagatgggcaccttcgggaggtgggactcac

SEQ ID NO: 20005 - DNA, 156 bp, Glycine max
  Clone ID: 700956053H1
ggccgccctttttttttttttggttggtttaatttatttcctgggggaaaaggtgtttaaaatggtttttaggaggaaaatggaaaggtttccggggaaaaggggttctgctgtaaatccttggaaccaataatgggtttgggtgattaaaagtga

SEQ ID NO: 20006 - DNA, 251 bp, Glycine max
  Clone ID: 700956054H1
atggtcctaaggggagcaaggggtatcatcatcaacagcattctcattctcatcatcaccatcaccaccatcagcctcattatcagaggaaggagaagaacaagtattcctccggtggtggtggaccatcacatggaagtggtcatttgatggcgccctcgggctctgctgtggggggtttcaaccctggtgtgccggcccaggggttgaatccggtgcttggacaggcgttgactgcattgattaatcag

SEQ ID NO: 20007 - DNA, 251 bp, Glycine max
  Clone ID: 700956055H1
tgggcactgtgctcctgtaacttgccttggtctttcacctgatagtaattacctagttacaggatcccgagacacaacagtattactctggagaatacatagggcactttcatctcactcaagtgccgtatcagaacactccactgggacaggcacattgtcttcaaccagtaatagttcatcgcacttgatagaaaaagaccggagacgtcgaatcgagggtcctatacaggtacttcgggggcaccaca

SEQ ID NO: 20008 - DNA, 252 bp, Glycine max
  Clone ID: 700956056H1
caaaccatggcttccgaaacaaaccagtccaagaatgtgtgtgtaattggagctggaccctcggggctattggcagcgagggagctgagaaaagaaggtcacaaggtggttgtgttggagcagaaccatgatattggaggtcaatggctatatgacccaaatgtacaagaggaggatcccttaggaagagacccttggctaaaggtgcatagcagcatctatgagtctttaaggttcatgtctcccagagag

SEQ ID NO: 20009 - DNA, 236 bp, Glycine max
  Clone ID: 700956057H1
cgcagagcagagagagagaaaacgcaaaggcattatttggtcttggatccctttcgatccgacgacttcgttcgttccttctccttccaagttctaaccatttcccactgtcttcgattttagggcattaaatctgccatggcagcagcacccgctagagctcgtgccgattacgattacctcatcaagcttcttcttatcggcgacagcggtgtggggaagagttgtctactttt

SEQ ID NO: 20010 - DNA, 247 bp, Glycine max
  Clone ID: 700956060H1
catcaacctcctttttttttaattaattttttgtttccgttttgctgatttgtttaattggttgcttgattctcagggtaatgcttgtgggttggggtggaaacaacggctcaaccctcaccggtggtgttattgctaaccgagagggcatttcatgggctacaaaggacaagattcaacaagccaattactttggctccctcacccaagcctcagctatccgagttgggtccttccagggagagga

SEQ ID NO: 20011 - DNA, 249 bp, Glycine max
  Clone ID: 700956061H1
ttataattggagaagctctaaatgcttatgcctcaagaaggatgcctggtttcaacaagggtgtgatccaaggagatattgtaagaaatagattactgttggagaccataatccgaatattacccttggacgtgggcagtgtctctttcagtttcttggtgaagttattaagggtagctattcagttggaacgtgaagagttggagagatctgaactgattaggagaataggtatgtgccttgaggagg

SEQ ID NO: 20012 - DNA, 110 bp, Glycine max
  Clone ID: 700956062H1
gttttatcaaattttttgtcggatttacaaggaaagctatccataaaatgtttttattagacaagtcacggagacaatcttgaaaacattttatggatagctttccttgt

SEQ ID NO: 20013 - DNA, 259 bp, Glycine max
  Clone ID: 700956063H1
agtccaaaaataaataaataaaattgtagcaatcacaacacaaccaaggctacgacttaaagcaaccgcaatcttttggccaaaagtcacacacacattactacacgcatctaaacactcctccgaactataatacagttttcttattttcattgttgaagctcacaagcaaaggctaaagtagattctattctcctcaagcaaaacctatagctcccccacactcctccagtacttgaataaaagctaaataaatatt

SEQ ID NO: 20014 - DNA, 254 bp, Glycine max
  Clone ID: 700956065H1
ccaatttctcgtcacttctccgcaaatcctcgccgccgccgtcccaccaacacccgcaaattacagaccttagcgtgccaaacaaaccccaaccttgatcaaaaggatacccctaccacggatgaagaaaaacttgtggtcgagcccagcacgagtacaacaacaagttctcttcctcaattgccgaccaaaaacatcaacaacaaaatcgcacttgtttctaccttagcggccttggggcttttcttatctgc

SEQ ID NO: 20015 - DNA, 249 bp, Glycine max
  Clone ID: 700956067H1
caaaacttgaaattggtttagaaattcaagatgtttgtggagtgacagggaaaaagagagttgtcgttattgtaattcttgtgaattacatgctgcaactatgatttcctcatattattcttcacagaagcaattttctattgtggtgttggggtattcctttatctactagaccatgtaagaagacccttgctagtggatacagttgctaacaatagtgatactctacccccacaattgggacagaga

SEQ ID NO: 20016 - DNA, 125 bp, Glycine max
  Clone ID: 700956069H1
gtgaaaatggctttatcatcgcgctctctgagtgttcaccggacagaggtgtcaaccggagctggtggctcctgctaaacccagtcctcgcggagttacacccctctccgagatagatgaccaat

SEQ ID NO: 20017 - DNA, 247 bp, Glycine max
  Clone ID: 700956071H1
ccaaaacctgatttcatattcaccccactggatgactctcaagtccaagcagcagtggtttgtgcaaaaaagcttggtattcacatgagagtgcgaagtggagggcatgactatgaagggctctcttatgtttccctcattgagaagcctttcatgatcctagacttggccaaacttcgtgcagtgaatgttgatattgcgcgaaacacggcttggatccaagccggtgctactattggtgaagttt

SEQ ID NO: 20018 - DNA, 246 bp, Glycine max
  Clone ID: 700956073H1
ctgtcatcgtgtcgttcaccgataagatgtcgtattcaaggagatcaaggtattctcgttctccttctccatacaagcgatacagtaagtctgtgtccaggtctctctcaaggacaagctccagaagccgttcaaggagtttatcaagagatgctgaaaatccaggaaacaatttgtatgtgacaggattgtctcctaggatcaccaagagagaactggagaaacatttttctgctgagggaaaag

SEQ ID NO: 20019 - DNA, 254 bp, Glycine max
  Clone ID: 700956079H1
ctcactttgtatattcctcccatacgcagtttcaacctcttcgtccacaccctccagatctttctgcaagatttctctctcttctcctttcgcccttttcttcgcatcagactcgccatctctcgcatcttcaactccatcatccacgtaacctggtagatcacatcctctctctctctgttcttttttctctctctttgattggatccaaaaagaatttgaaactttaggggtttgctgtgtaacaatttgtt

SEQ ID NO: 20020 - DNA, 255 bp, Glycine max
  Clone ID: 700956081H1
catattcaaagctacttaatcagggacgtagcaaccttcagcccttttgtccaccaaaacctgatgacattgcaaccatttgctacacaagtggtacaactggaaccccaaaaggtgctatcttgacccatggaaactttattgcaagtgttgctgggagtactatggacgagaaattcggtccttctgatgtttatatatcctatctccctttggcacacatttatgagcgagcaaaccaggtcatgacagtac

SEQ ID NO: 20021 - DNA, 253 bp, Glycine max
  Clone ID: 700956037H1
agaatccaaaagcaatcccatctgtgtgtttgcacatcggaagggagggctatcaaactctaaggattgctctgaatcggtttcgtcttcttcgtttttcttcaaaatcctcgtgacagatctaatctaatcagccttttgggggtgtttcagacattgcatgcatatgggagcagtggttgtgttggatgctataaaaggccttcactgagtcccacagtggatgtgccatcaaaagggttggcaacacaaa

SEQ ID NO: 20022 - DNA, 258 bp, Glycine max
  unsure (1)..(258): unsure at all n locations
  Clone ID: 700956002H1
gaagatgtggtgcattagaccttagtctttgtcatagtttcttccacaacaacttggtcctanatttccaaaaattcacataagagcaatagttctctccctagaaactgatatgctatataagccgtcctttggagcaatatatccatcctcttcagtttagcagaaggtgtcgtgtattagaccatagtctttgtcattgttgtttcgcaacatcaaagtttagcctttgagcatcagcaatcacatggtgatcag

SEQ ID NO: 20023 - DNA, 258 bp, Glycine max
  Clone ID: 700956003H1
ctcgagcgattcggctcaggccgagcgctacgaggagatgagtggagttcatggagacatgtctccgcctccgccgagtgcgaggagctgaccgtggaggagcgcaacctcctctccgtcgcctacaagaacgtaatcggcgctcgccgcgcctcctggcgcatcatctcctccattgagcagaaggaggagagccgcggcaacgaggaccacgtcgccgtcatccgtgactaccgctccaagatcgaggccgagctc

SEQ ID NO: 20024 - DNA, 159 bp, Glycine max
  Clone ID: 700956004H1
ttttcattcattttcaggtttagagagaccctaacacacttagcgtgatcaagatcaacaatggcggaaaacccttccgaaacggtgtcgtccagttcccaacctcctcctcctcctcctccttcttcttcttcttcttctcagaaatcgccccaagat

SEQ ID NO: 20025 - DNA, 258 bp, Glycine max
  Clone ID: 700956005H1
cagccatggccactctaagcttcaaccctgttagaataaaatccccaacgttcaaacattccaaactcaccactccatcaaaacgcatcacaattccatgcaccactccctccaacagccaccccaaactgctccacttccgaccccgttcggtgtccgaaagcacccagaaagaagcacccgaagcggttctcggagaagaagaagaagaagaagaagatgatgatgatgacccatctgcggaactgagctacgtgg

SEQ ID NO: 20026 - DNA, 253 bp, Glycine max
  Clone ID: 700956006H1
acccttctttgactgttctcccacaccacacccatgatactcctcctgctccttattctcctctttcacgcggcggaaccaacgggacagtggcagctcctccacaaaaacatcggcattgtcgcgatgcacatgcagcttctccacaacgaccgcgtcatcatcttcgaccgcaccgacttcggactctccaacctaaccctccccgacggaagatgccgcaacaacccactcgagttggtcgtcaaacgcg

SEQ ID NO: 20027 - DNA, 254 bp, Glycine max
  Clone ID: 700956007H1
ttcacggtgaagcacctaagccacttctccaccctagacgtcctcttgaaaccctactacagcaccacacttccccctctcaattcatctctctctcgatttacattccagagatagaagaagaaagagagcaatgacagcaacaacagagagcgagaagaagaagcgagaagaagaagaggaaccagaacaagttgtgaacccatgggaagtttcagccataggtaaaatcgattacgacaaactcatagatc

SEQ ID NO: 20028 - DNA, 255 bp, Glycine max
  Clone ID: 700956009H1
ctccgttacattactttcccatttcattattcgatccccaatacctctcccacgcagaagaatcatcaccccaaaacccaaattaaaaaaaaaacccaaataatacaactgaagttattttaattttcttagtaaaaaaaaaaaagagaagaaaaatgacttcgattcatttgataaacactctcgctgctccgcttcgttctttttctcctccgtcgctttttccgcaatgccattctcctctccgttcttccg

SEQ ID NO: 20029 - DNA, 159 bp, Glycine max
  Clone ID: 700956010H1
ttcattggtgtggcctagctgttttctcaatgagaaagccttcatctctgcaaagcgcacttttgcgctttggggttcccttgttgcttgtgatcaccttctgttatgctacttctactgctgcagcaacaactcaagtttcagggaatgaagagctgc

SEQ ID NO: 20030 - DNA, 160 bp, Glycine max
  Clone ID: 700956013H1
tcagacacagtcctatttctttcactatgttcacattgctacttggagtgcttgctcagaaccttgtcatccctgtaatatctaccactgccatcattgtggaccagaacttcaactctccagacccacatgcaggaacagatttatcatattctctatg

SEQ ID NO: 20031 - DNA, 255 bp, Glycine max
  Clone ID: 700956014H1
gtcaaacccttttcacttctctctagggttttagcactctctctctctctcgttttcgttcttcctttctgcctctctcagtcacacaccttctcgatgaccaacgacaacatcgccgtgacagatctcacttctgccctcaatgaagataatcgcgccgacctagtcaatgctctcaagagcaagattcagagtctggctggggcgcattctgatgttctagagactctatccccgaatgtcaggaagcgtgtt

SEQ ID NO: 20032 - DNA, 162 bp, Glycine max
  Clone ID: 700956015H1
ccatgttcccccgtcgttgcctgagcaaggacaagttccagtggataatgggagtaagaccagtagttcaagcagctccagcagtgattcaggctcttcatcaagtgattctgatagtgatagttcctcagcctctgggtctgatgcagggtcaccaaaaac

SEQ ID NO: 20033 - DNA, 261 bp, Glycine max
  Clone ID: 700956016H1
aacaaagacggcaccgcaattaggaagctccagagcggtgtgaacaagctcgcggatctggttggggtcacgcttggtcccaagggaaggaatgttgttctcgaaagcaagtacggctcgccgaaaatcgttaacgacggtgtcaccgtcgccaaagaggttgagttggaggatccggttgagaatattggcgccaagttggtgagacaagcagctgccaagacaaacgacttggctggtgatggaaccacgacttcggtt

SEQ ID NO: 20034 - DNA, 260 bp, Glycine max
  Clone ID: 700956017H1
attacttgcaagactggcacttcgttgcttggtgatgtccctttctgttctcttcactcttggtcttgcgagagaaagccatgccagagacgaagatttttggcatgctgtttggccaaacactcccattccaagttcattgcgagatcttctaaagcctggccctgcaagtgctgaaatcgatgatcaccctatgcaaattgaagaaacacagtacccgaaaaccttctactataaagaagaccttcatccaggcaaaa

SEQ ID NO: 20035 - DNA, 250 bp, Glycine max
  Clone ID: 700956019H1
tcatcacatggacttgtctttctcttactctgacggggtccttccttttcttcttctccttcatattttctctctcaccattctcttcttcttctccctttcttagattctccctcttttctctctgccctccgccatgactgaggataaggagatgtcttcctctgtcaccaatggcgatgattccctcactggtcacatcatatctacaactattggaggcaaaaatggggaaccaaacagactatta

SEQ ID NO: 20036 - DNA, 252 bp, Glycine max
  Clone ID: 700956020H1
gttaatctcattcacacattcacagttatactctctctctctttgtcgcttggatcactgatctcatctcaattttcagatatgtcgacatctgataagccagaagtggtggaaaggggtagcaaggatgaaaaacacaaggaagatgatcaagaggaggggaagggtggattcattgagaaggtgaaggatttcattcatgacattggtgagaagattgaggaagctattgggtttgggaagccaactgct

SEQ ID NO: 20037 - DNA, 157 bp, Glycine max
  Clone ID: 700956021H1
ggaaaaatggagttgttcttctacgcggtgttcggcggtttgggagcggttgttgcagtgacggagctgagcaagagcaacaaggaccgactcaacacctcttccgcattcaattccttcaagaacaactacctcatcgtctattccctcatgatgg

SEQ ID NO: 20038 - DNA, 159 bp, Glycine max
  Clone ID: 700956023H1
aacagaaatcgcatataaaatgcgaaaagaaatgaattcaatgttcggagatctgcacaggatctctctccgtgtccgttgaactttctttacgccctcctcgtaacataaaaattcagatcccgccaactctgaagacctctattctctttccctccc

SEQ ID NO: 20039 - DNA, 133 bp, Glycine max
  Clone ID: 700956024H1
ctattatagtgtctccattaatctaccaaagaaaggtttgaatctgggttgatggagaatatgatgtcttaagattggctctgggttcttgtaggactatttctaataatacggatttaaatgatctctcttg

SEQ ID NO: 20040 - DNA, 156 bp, Glycine max
  Clone ID: 700956025H1
ctgtgtcccccttcactttctttcgaggttgcatttactttccctttcgacttcgaaacgatccaaatactacaaagcaaagcaaccagctagaaagcaatcacgcccgatgacggaagcatctccctctcccttaagcaaacaactgcccttaac

SEQ ID NO: 20041 - DNA, 251 bp, Glycine max
  Clone ID: 700956027H1
ggagcatcttccgcgtcgatttaaccgattccgaactttcagaatctcgaaactcgccgattcgcgtcacgccgccggggttgcactgtttcactccggctgctttccacgacggaaagcgcgtcgcggtcgcaactcgccggagagaaagcaatttaaggcacgtcgaaatcttcgatctcgaatcgcaaacgttccaacgaatcaccgaagacataaaccctaactttaaccattacaacccgttcgtc

SEQ ID NO: 20042 - DNA, 253 bp, Glycine max
  Clone ID: 700956028H1
agtggtttcagtgagtgatcggtgttcacttgatccttcataagtcgtcatcatcatcatcatcatcaccgttgattgaagaagatgccgatcagaaacatcgccatcggaaggcctgaagaggctactcaccccgacacgttgaaggcggggttggctgagttcatctccaccttgatcttcgtgttcgccggttcaggttccggcatcgcctacaacaagctcaccgacaacggcgccgccactcccgccg

SEQ ID NO: 20043 - DNA, 252 bp, Glycine max
  Clone ID: 700956029H1
tagcggttcttccatttgactcttgttctgaacgacttttcaagagaatcaaaccatggcagtgaaagtatacggtccccactgtgcttccaccaagcgggtgctggtttgtctggttgagaaggaagtcgaatttgaggttgtccctgttgatgtcactaagggggagcagaaggatcctgagtacctcaaactacagccatttggagttgttcctgtcatcaaagatggagattataccttatatgaatc

SEQ ID NO: 20044 - DNA, 252 bp, Glycine max
  Clone ID: 700956030H1
gcacttagaaggttgaggactgcttgtgagagggccaagagaacattgtcatccactgcccagaccaccattgaaattgattctctctatgagggaattgatttctactccactgttactcgtgccagattcgaggaactgaacatggatctctttaggaagtgtatggagccggtggagaaatgtttgagggatgctaaaatggacaaaagaagtgttgatgatgttgtccttgttggtggttctaccaga

SEQ ID NO: 20045 - DNA, 264 bp, Glycine max
  Clone ID: 700956031H1
tcttctcgacgttgtaacctctctcttcaaccctaacttagggtttatgttctaaaacccttttcaggttgattggaggagataaaaatgctcgtgttgtttgaaacccctgcgggttatgccctgtttaaagtgctggatgaaggcaagctttctaaagttgaggacttgtggaagaacttttccagtgcagatactgctagacaggtggtcaagttgaaagcattttctaaatttgagaacacttcagaagctctagaggca

SEQ ID NO: 20046 - DNA, 123 bp, Glycine max
  Clone ID: 700956032H1
tagaattatgcgtgtcgatttactttcgattgttgtcagacattcaacatgaaaattatagtttgctgaactggttatgatttcatcaaggtttttgaaaaaattagcttcaatttggtttac

SEQ ID NO: 20047 - DNA, 193 bp, Glycine max
  Clone ID: 700956033H1
atttaatgtgaaaaacatataagagcataaaatactttctccttttagttccttaatcattactctaacaacattgattagcaagacctaaaggagaaagtatttaatgtgaaaaacatataagagcataaaaaaaaagttatggacaacataattttatgcatttcaataaaatttctccttttagtttttt

SEQ ID NO: 20048 - DNA, 264 bp, Glycine max
  Clone ID: 700956001H1
caagttttgaagttttaaagagcagggcaaaaccagagcctgacttccttgttttgtgtgtctgtgtctcccaagattctgctgaggccttaagggagtatattacatatctccatgtgcggtgtttccaaggggaaaccttctcaaattgatttgatcatggaggagaagtatgcaaaagaagggatgcatcataagatttctgctttgcttgagttttcagcgacggatgatctaattggtttcaaagatgctgtggaaaag

SEQ ID NO: 20049 - DNA, 77 bp, Glycine max
  Clone ID: 700956035H1
aacataggttaggaatgcaggggtggcgccggcggtacaatacaatgataatatgaattaaatatgtttagtttctc

SEQ ID NO: 20050 - DNA, 154 bp, Glycine max
  Clone ID: 700956036H1
ggcatcttgtgttgtgtccctcttttaagctatttccttctcttaacacaattggttgtgccaattgccatagtcaccaaccaattaacaaaggtatatatatcatcatatcatcaccaaatgaaaaatattgggttgttttttcttgtggtgg

SEQ ID NO: 20051 - DNA, 263 bp, Glycine max
  Clone ID: 700955965H1
cttctctatttctccaactctttctgcttcttccaccaaagtggcatcagaaaaccaaaaatggggtgtggcaatttattcttcacaattctgataactttctcagtggcactcataacatacaatatcataatctcagccaatgcccctctcaagcaggacttcccggggccctcacgcccttccatcaaggtggatcctctcatcaagatgccactgcctctgactctgtctacaacacgtggcagtgcagggtgatgtac

SEQ ID NO: 20052 - DNA, 265 bp, Glycine max
  Clone ID: 700955966H1
cacaaacacggtaataaaataataccactgtttatatatataaacccaccctccctcgagtttgagttcatcgcaaaatcagaacccaactaaccaaaccagctatggcggcgatgcagaggccactcaagagaaccattgcaatcgccaagctacgcgcgtgcttttcctctctccgacccgccgccgccgccgacatcgtcgcgtctcctccgccgcagctcccgccgttcgatcaccagccgcacccttacaacggtccctt

SEQ ID NO: 20053 - DNA, 262 bp, Glycine max
  Clone ID: 700955967H1
cttacattagcctttctttctttctatgttctctctatctcactcacatctcactttcttttcttttcttttctttttccgaatctgaaatttttcctacaaaatccactccctgtcctcaaagacagatccgaaagtggatgccaaatttattacccctcttcgcccgagattatcgtacccattagattcctcttctttcatccttctacactttcctaatttttcacagtattcgatgctgtagagcacaatatagttt

SEQ ID NO: 20054 - DNA, 262 bp, Glycine max
  Clone ID: 700955968H1
ctccgtttgcagcgtcactacttgctacaacacgagccatgaaacccaccttcccaatccactccaattcaaatttctcactataaaccacttcttcaaacttccctccgcaattcttaattcattcgaaccatggcagcgtcctcgctctgttcctctttcacctccaaaacatggaacccgcaccggccgcactcatgctatcaccacaaaaccccaagcccgccgtattccacctttcttcgcggcgacgttcagctcc

SEQ ID NO: 20055 - DNA, 257 bp, Glycine max
  Clone ID: 700955969H1
gcaaattctggtgcccgtttaggtgtagctgaagaagtcaaatcctgtttcagagttggttggtctgaggaatctaatcctgagaatggctttcagtatgtatatttaacacctgaggataatgctcggattggatcatcggtgatagcacatgagttaaagcttgagagtggagaaaccagatgggttatagataccattgttggcaaggaggatggccttggcgttgaaaacttgagtggaagtggggctattgc

SEQ ID NO: 20056 - DNA, 258 bp, Glycine max
  Clone ID: 700955970H1
tttcctttctataacctatctgaaggctcaatctctgccacagaatccttagcagtcatagcatcaattctcatattactttgcttctgtttcagatcttcaagtatctaccttcttgactatgtttgttatatgcctcctgataatctgcgccttccttactctcatattgtagaacactttgaattgtgcaattttgaccctgaactcataggctttgaattgaaagtattggaaagatccggtattggcgtggag

SEQ ID NO: 20057 - DNA, 256 bp, Glycine max
  Clone ID: 700955971H1
gcagaaaattctaatcctgcagcagcaaaaacctatattttcctgcatttgcctcaggaatctgaggttaagggcaaaccacgcattggtgctactggcagaaagtagagatgatcctgctgtgtgatactgttctattatgtaaatagttggcttgtcctggtatatggtagaggcaaggtattagttgatatcaaaatatagaagttgaatgggctggtcgtacttggaagatttttttttttttttgtgcgcc

SEQ ID NO: 20058 - DNA, 255 bp, Glycine max
  Clone ID: 700955974H1
tagaaccaaaagattcataataactaacattagaaactaggtgaaagtaactgcacagacacacaacacatcttccttaatttctccgtccatttccctcccataaataaatctttcatttccatctttcttgggtgatccaatggcgacccttttccagggattgggagttgtgaacccatcattggcttcttcaaactccaacaagttccatcttccttctcgtacatccctctcagagaggaaagatggcat

SEQ ID NO: 20059 - DNA, 253 bp, Glycine max
  Clone ID: 700955975H1
cttcgatcacctcgaagcgtcgtcgtttactagcaatgattgcttgcgtgggaaccccttgaagacttgctagttatagtgggtgacccgggatccgaatacgtacccggatagatacccgatttgtttacaaggtgtggtgtaataattttattttattttgttgttaagtggtgtaagtgtaatataacgttttagtgagaaagttgaaagagagaaaggaaaagaagtgagggcataggcatctgcgtgc

SEQ ID NO: 20060 - DNA, 252 bp, Glycine max
  Clone ID: 700955976H1
tgcatttcaatccacatcggtcaggccggtattcaggtcggaaacgcctgctgggagctctactgcctcgaacacggcattcagcctgatgggcagatgccaagtgataagactgttggtggaggtgatgatgctttcaacaccttcttcagtgaaactggggctggaaagcacgtgcctcgtgcgatttttgtagatctcgagcctactgtgattgatgaagttaggactgggacataccgccaactattt

SEQ ID NO: 20061 - DNA, 250 bp, Glycine max
  Clone ID: 700955978H1
gcaccgtcaaccactccgtcaccgacggcacctcgttttggcacttcttcaacacctttgccgccgtcaccaaaggcggcgccgccaaaaaagtcctccgagcaccggactttactcgcgacaccgtcttcaactccgccgccgtcctcaccgtcccctccggcggccccgccgtcacgtttgacgtaaagcagccactccgggaacgcgtcttccacttctcccgcgaacaattcagaaactcaagcaa

SEQ ID NO: 20062 - DNA, 252 bp, Glycine max
  Clone ID: 700955980H1
aaagaagttctaaggaagagggaatatgcagaatacaaggtgctagttgtctatttgcaataacaacatcagcgatccaaccttagtattcttcaacccagagagatttgtaataataaattacaacaacttaaacgatggcaggaggagcttatgtagattcgggaaatgcaaagcaatttgatgggaaggtcacggcattcgtattggttacatgctttgtggcagccatgggaggcttactcttcggtt

SEQ ID NO: 20063 - DNA, 260 bp, Glycine max
  Clone ID: 700955981H1
gcaatgtagaggttaaaccacagggtgttagcaagggactagtggccacacgcctactttctgccatggaagaaaaggggatgtgccctgattttgttttgtgtataggcgatgacaggtctgatgaagacatgtttgaggtaatcaccagttcgatggggagtccgatcgcggcaaaggccgaggtattcgcgtgcacggtttgtcgaaaacccagtaaggctaagtactacctggatgatacaactgaaatagtgaga

SEQ ID NO: 20064 - DNA, 262 bp, Glycine max
  Clone ID: 700955982H1
cgcagaagaagatcggcaaccgcatgacagcgtgccagctggcatccatcggaccggttagcaacccgccgccgacgccgatggcgccttcagcggctccgtcgtcgtcggtttcggagtacacacagaagaagatctacgtgagcaacgtcggtgcggacctggatccgcagaagcttctcgcgtttttttcacggttcggggagattgaggaagggccgttggggcttgacaaggccaccggaaaacctaaggggttctg

SEQ ID NO: 20065 - DNA, 258 bp, Glycine max
  Clone ID: 700955983H1
gtgaagtgttcggattgcggcgacgtgagcggttcgctgcccgcgacgtagtgagaagtccactgaaccttatcatttagaggaagaagaatacatccagcctgctccagttttggctgctaatgatattgaggtccctgttgcttgaaaagttatacactggagaagtaattcatagtagctgagtgcctagtttttcttgtgtgcaatgtttgttgtcaaagacatgttcaaaattttgtagtttcttgaattttg

SEQ ID NO: 20066 - DNA, 261 bp, Glycine max
  Clone ID: 700955984H1
cctcgagccgaatcggctcgaggcggaaacggcaacaacaaggagaacgaagacagcaccatcaccgtcgtcttgaaggtcgaaatgcactgcgacggttgcgcttccaaaatcatcaaacacctccgctgtttccaaggtgtggaaacggtgaaggctgatagcgacgccgggaaggtgaccgtgaccggaaaagtggaccccacgaaagtgagggataacctggcggagaagataaggaagaaggtggaactggtgtct

SEQ ID NO: 20067 - DNA, 253 bp, Glycine max
  Clone ID: 700955985H1
caaaaggagagtgcaataactcgttgtacattcctagtgtgtgggagagacatggctaagatgtgtgttttggtgttggttcttgctctggctgtggccacaagtgccagaaacgttcccaaccccaaggatgctggtcttaaggaccagaagaacttcatcagctatggtggagttggtggttattccgggattgggaacaatggactgccttttggaggagctggtgccggaataggtggtggttttggcg

SEQ ID NO: 20068 - DNA, 256 bp, Glycine max
  Clone ID: 700955986H1
cgcgattgttctgttgtgcgactgaaagaagagagatcgaaaatggcgttggctttcgacgagttcggaaggcctttcataatcctgaaggaacaggagcagaagagcagacttcgaggtttggacgctcagaaagccaacatctccgccggcaaagccgtcgctcgcatcctccgaacctccctcggccccaaaggcatggacaagatgctccagagccccgacggcgacgtcactatcacgaacgacggtgcca

SEQ ID NO: 20069 - DNA, 256 bp, Glycine max
  Clone ID: 700955988H1
tgcctcttcctctcagattcagcaattttctattttctcctctcatggcttcagattccaaaaaggatttccctgctgatgacaaagctggaacagaagagagtaaaacatccaaagatgagacttcatctaaagattctccagcagaacaaagagcgacagctacttttggacctagacctggacctgctgggcatccaggcaacccttttgatctctcagcaatgtctggtctgctcaatgatccaagtatcaa

SEQ ID NO: 20070 - DNA, 251 bp, Glycine max
  Clone ID: 700955989H1
tgttggggatgcaattgtgagaaggttggagaagaattgcttgagtagcagcactaatgtcaatggcttaccaggtcttggagggtgctctaagtgcttaaataccctctatttgcttaacaagaagacttcaaattcaagcaaagcagaagacaggaccaccaagatccacaacaaagattgtgagcttatgggcttgacatggcttctggctaaaaataggacagcttatatgcacacggtttctgcgg

SEQ ID NO: 20071 - DNA, 252 bp, Glycine max
  Clone ID: 700955990H1
ggagcttctgatgcaaattctgtcccttgtggatgatcagacggtgatcatagcttctggagtttgtcgtggatggagagatgctatttactttggccttgctcgtttatcactctcatggtatattgttttctctcttgatgtcttgaggatccttttctgtttctctccaattggggattttgttatggtgggagttttctttgttctttttgcttgtttgtgtgagttgattttgctatgctgtaattt

SEQ ID NO: 20072 - DNA, 248 bp, Glycine max
  Clone ID: 700955993H1
gagaatccgaaaaacacgttaaagaaagtcccattcccactaccgaagcaaattaagaagatgaagcagcagagagtggagtttatgggcatgggcatgggcatgggcatgggcctgggccttttggtggtgatgatggcatgtgggtcggcgagtggtgcggatgatttggcaaccaagtgttcagcggtgattcagaaggtaataccgtgtttggatttcgcgaaggggaaggaagaaacgccgaa

SEQ ID NO: 20073 - DNA, 248 bp, Glycine max
  Clone ID: 700955995H1
gatcaaacgcacacagttacgctcttcaaatcaatctcttctcagaaatgggtgtggctcaaaacattcccgatgcggaggagggaaccttggagattggaatggaatacagaactgtgtctggagttgctgggccattggtcattcttgataaagttaagggacctaagtttcaagagattgttaatattcgcttgggagatggaactactcggcgtggacaagtgctagaagttgatggtgaaaag

SEQ ID NO: 20074 - DNA, 252 bp, Glycine max
  Clone ID: 700955996H1
gttccaagtctgccttatctgctgttctagtttattggcattgggatcagtaactgcaattcccaatgcaaattttcatcgggcgccaaggagcactagtgtgcttctggttgttgtctgtgttttttgtggtaacaggattcaacaatgaagagcacaggacagtggaggtagttggcctaggagaatgcgcagactgcaggcagaacaatattaagaataaccacgctttctcagggttacgtgtgacgg

SEQ ID NO: 20075 - DNA, 255 bp, Glycine max
  Clone ID: 700955964H1
ctcctatggtatgggaggtgctgctgtacatgtacatcctctactctccagattggcattaccgcagtacaatgcccatcttcctcttcgtgtatggtgctctttttgcagttgcccattcagtgtttcattttggtattggcttcaaagtgcattatatcattctcattcttctctgcgttccgagaatgtacaagtattacatttacacacaagatgtttctgccaagcggcttgcaaagttatttttaggta

SEQ ID NO: 20076 - DNA, 256 bp, Glycine max
  Clone ID: 700955923H1
ctaacactatagtactactctttttttcttgcctgaagtgaaggactaatggacagatttcatgaggaagaaattgaagagccagtgagtccaacagggcaatacttgacaagctcttcactaagtgtgtacattcttggtgtcttggaaagtgaggttcccattgatgactctcaaaccgtgccacttcttcagaatctcttccttcccatcaactcacgtttctcctccatcatgattagggacaaaaatgggg

SEQ ID NO: 20077 - DNA, 263 bp, Glycine max
  Clone ID: 700955924H1
cacacaaacaccctttgagttcattaacctcttcagaaaaaacaacaacaacaacaaaaaaaaacatcatcatcaaaaaaacttccgagagtttaatggcaacacgcgtgatccctccaagaatcctcaagaagctccgttacaacacaacaaccaagccactcaacgctgcccacccctcaatctctccagtcatcgccccaccgtcactcttcgagaggtcgccgtcccctgtcgcggatgctgtttcaacaacatccacg

SEQ ID NO: 20078 - DNA, 260 bp, Glycine max
  Clone ID: 700955925H1
ccataggtgtggtggtggccgtcaacaagaacggcgacgatcccacacttcaaatctcaggaaaaatcagtaggggttatctgccaaaacactgatgaccagaagctctgccacggaaccctaagctccgtgaagggcatggacaccgctgatccaaaggcttacatcgccaaggcggtgaaagccaccatggacagcgtgaccagggccttcaacatgagtgataggctcagtaccgagtacggagggcaacgataacg

SEQ ID NO: 20079 - DNA, 236 bp, Glycine max
  Clone ID: 700955926H1
ggaaggggatcacgttattattggtcaatgcaggcctctctctaagacagtgaggttcaatgtcttgaaagtgatcccagctggatcttctagtggtgcaaagaaggcttttactggaatgtgagcttcgatttccagtttttattgaagaaaaatgttaccttgttatttagtagatctgatttcttttctggaaggtgacatattaaaaccttatcaattttggattttctttg

SEQ ID NO: 20080 - DNA, 257 bp, Glycine max
  Clone ID: 700955927H1
gtttctttctcttctcttcctgcaaattcaaaacccaatctcaatcttttcctttcgttccatttccttcatttgaaattgaccacacccacgcagatcccaaatttccaactcgtaaattatccgccttttttcccattccgaggaaagaagccaatccacgaccgatccaatgccgctttgaatcgcgtgccgtcctccttccctgggaacatctttttgctttttgaattcgatatttggagcagttgggtcga

SEQ ID NO: 20081 - DNA, 257 bp, Glycine max
  Clone ID: 700955928H1
cacacacatactaagaagcaacaattcttctacaatggatctcctccttctggaaaagaccctcataggtctcttcctcgctgcggtggtcgccatcgccgtctccaccctccgcggccggaaattcaagctcccaccgggcccactccccgtcccaatcttcggcaactggctccaagtcggcgacgacctcaaccaccgcaacctcaccgatttggccaaaaaattcggtgacatcttcctcctccgcatggggc

SEQ ID NO: 20082 - DNA, 256 bp, Glycine max
  Clone ID: 700955932H1
gcacttagaaggttgaggactgcttgtgagagggccaagagaacattgtcatccactgcccagaccaccattgaaattgattctctctatgagggaattgatttctactccactgttactcgtgccagattcgaggaactgaacatggatctctttaggaagtgtatggagccggtggagaaatgtttgagggatgctaaaatggacaaaagaagtgttgatgatgttgtccttgttggtggttctaccagaattc

SEQ ID NO: 20083 - DNA, 269 bp, Glycine max
  Clone ID: 700955933H1
tttcttacctcttggcatggccattcaaatgtcttcttttgtctttgtttctcttacaattttattttgcttctcttccttggagaagagttttgcctttcaaacaacaaaggaggtcacagaaagcaacaatcttcatcaatatactcatcttgttcacctcagctcactccttccttcatcttcctgcagctcttctgccaaaggtccttaaagaaaagcatcattagaagtggtacacaaacatgggccatgctcccaactgaata

SEQ ID NO: 20084 - DNA, 262 bp, Glycine max
  Clone ID: 700955935H1
cgctgttaggcttttggagccactcaaagcggagtttcctattttgagctacgccgatttctaccagttggctggcgttgttgccgttgaggtcaccggtggacctgaagttcccttccatcctggaagagaggacaaacctgagccaccaccagagggtcgcttgcccgatgccactaagggttctgaccatttgagagatgtgtttggcaaagctatggggcttagtgaccgagatatcgttgctctgtctgggggtcac

SEQ ID NO: 20085 - DNA, 262 bp, Glycine max
  Clone ID: 700955936H1
caaagatatacacatatagggagaggctgaaggaggggcatcagatccctactttgtataaatggggttgtctttctaaacaaccccatcacatcattaagagggggggatcgatccttgatttgtgaatttgcttgcattagcaagatcatatatattcattcatatacacaattacatatcaagatcacattttttttggtgttctcgatctcataaacaacatggagggtcagaacaagaagtacatctcatctgagga

SEQ ID NO: 20086 - DNA, 231 bp, Glycine max
  Clone ID: 700955937H1
aatgttaaaatggtgtaggtttatcatggctgaaatttttgggaatcaaagttataaggaaagtggttgttgtgggtagtggttgaggttgtggttggtaaaaaaaaaaatggattctgcgagaagttggttacaaaaatttcaaccacgtgataaattgagggcctctacaaggaacaaagatgatactaatggcacaaatgaaattccaaatgtgcctatggctgatac

SEQ ID NO: 20087 - DNA, 262 bp, Glycine max
  Clone ID: 700955938H1
tgctgctctggcttcaaggaagtcttctccaagagtgaccaacgaggctgttcagaaggctgctgctgcattgaagggttcagatcatcgccgtgcaacaaatgtcagtgccagactggattctcaacaaaagaagctcaaccttccaatcctgccaaccaccactattggatccttccctcagactgtagaactgaggagggtacgccgtgaattcaaggctaacaagatctccgaggaagagtatgtaaagtcaattaag

SEQ ID NO: 20088 - DNA, 260 bp, Glycine max
  Clone ID: 700955939H1
cgacaattgtccaaatggcagggttccatgctaatgaattggctcttcttctatcccttatagttgccggcatgaatgcagccggaacaattcttggcatttaccttatcgaccatgctggacgaaaaaaattagctctttctagtctgggaggagtaattgtatctttggtcatcttggcctttgcattttataagcaatcatccacgtcaaatgagttgtatggatggcttgcagttgtaggcttagccttgtatatt

SEQ ID NO: 20089 - DNA, 256 bp, Glycine max
  Clone ID: 700955941H1
cgggtttgacgttgttcacaatcactttctgcgcttcactcactcccttcgtgcggttttctttctttgtcgaactcgtgcgaaaatgcgtgagattcttcacatacagggagggcaatgcggaaaccagatcggagcgaagttctgggaggtggtgtgcgcggagcacgggatcgattccacggggaggtaccagggggacaacgagttgcaactcgagcgagtcaacgtctattacaatgaagcgagttgcgga

SEQ ID NO: 20090 - DNA, 258 bp, Glycine max
  Clone ID: 700955942H1
ggagaaaggagatactttatgatgaagaggatgaggatgaggattctaggaagagatggcgcagaagtgtgatagaggagaagagaaagaagaggctgcgtgagaaggaagatgacctggttgaccgacaaaaagaagaggaagaaattgctgaggccaaaaagaaggctgaggaggaacaaaagcgacaaagagatgcattaaagcttttatctgagcatgtggtaaatggtggtaaggaaaatatgattactgaag

SEQ ID NO: 20091 - DNA, 255 bp, Glycine max
  Clone ID: 700955944H1
gagctttccagttctgtaagcaatataagcggacaacagagttccgcagactgtgcgaaatcattagaaatcatttggctaatcttaataaatatcgtgaccaacgagaccgacctgatctttcagctcctgaaagcttgcaactgtatcttgatacaagatttgagcagctgaaaattgctactgaacttggactctggcaggaagccttcagatcagtggaggatatacatggactgatgtgcttagtcaaga

SEQ ID NO: 20092 - DNA, 253 bp, Glycine max
  Clone ID: 700955947H1
ggtggattctgatttttatgattttgacaaagatagagttggaagaagctttaagaaaggccaagtgtgggcggtgtatgatgatgatgatggaatgccgaggaattatgccttgattgatgaaactgtctcggtgaatccttttggagtgaggataagttggttggatgtacagaacagtggggatgggaggattgttagtagggagaaaatggggtttcatataccttgtgggagatttaaggttgccagg

SEQ ID NO: 20093 - DNA, 266 bp, Glycine max
  Clone ID: 700955949H1
ggaacaatggcgggtagggtttcgacgtgcttcttcttcgtgtttgctctttctctccttcttccttttcagatctccgctgaggaatcatcggagaaagagttcgtactcacattggatcactctaactttcacgacactgtcagcaagcacgatttcatcgtcgtcgagttctacgctccatggtgtggccactgtaagaagcttgctcccgagtatgagaaagctgcttctatcttgagtagtcatgatcctccggttgtttt

SEQ ID NO: 20094 - DNA, 263 bp, Glycine max
  Clone ID: 700955950H1
aaatgttccgaagattgcagaaccacagccaggaaactctaagctaatctgacgccaactttcatccaattggaatattattaaatctctttttaagatttcacattttgattcttctcaattttatctgcgattctcgcttggtacctttgttttgtttttaatattttagttttcctggatttttattttttttattttttattgtttttagtctttggtcaattttcactgtctcctgatgatcattttaccatgtgggg

SEQ ID NO: 20095 - DNA, 262 bp, Glycine max
  Clone ID: 700955951H1
cggagttccccaacaaagcgttaacgagcacgcgtttttccgacctgaatccaccactctctgaaccggttctccaagccctatcacactctggcttcgagttctgcacccctgtccaagctgccactattcctctgctctgcagcttcaaggacgtcgccgtcgacgccgccaccggttccggcaaaactctagcttttgtcgttcctctcgtcgagattctacgccgctcctcttctcatcccaagcctcaccaggtgct

SEQ ID NO: 20096 - DNA, 258 bp, Glycine max
  Clone ID: 700955953H1
attagctaacatatagaaagagagagagagagagagagagagagagagatcacatttcctgagctataggctatagccttccataatcttataacaatggaggggaccaccagccaaagcacgtttaccttcatccctagcacaattgagacacctagtccaagcatccctgagatttcatcatcatcaccttcccctggcggctctcttgcaagagttgcacaaagttaccctcctggatttcccagaaaggtattt

SEQ ID NO: 20097 - DNA, 257 bp, Glycine max
  Clone ID: 700955955H1
catccttctacctttgcctatggaggctttctccgtacaatcactcaccgccaccaccattccctcctctctgtcacgtagaggtgccactgacaaaccttctgccacctcccatgttaacctttcccatttcatgaggtacccttgtaccacaagatcaacaaaacaaaaaattctttgcaccagagctcaagcttcaggttcaacgaaatctagtacgggtagtgcagaggggatttctgagaaaacagattcca

SEQ ID NO: 20098 - DNA, 257 bp, Glycine max
  Clone ID: 700955956H1
ggtcaatgtggcatgctttcatccttttgctgggggaggactagtttatggaacaaaggaaggaaagcttagggtcctccagtatgacggtgctcatgcagtgaatggcactggaccaagttactttcctgaggagaccatcgttggtgtcagtcagtgagcaaggtttagacgaatgattggacatgtaattcaaacatctgcttcacattacttactgtacaactcatatgctgtctctgctgatgatctgcaca

SEQ ID NO: 20099 - DNA, 257 bp, Glycine max
  Clone ID: 700955957H1
ccataggtgtggtggtggccgtcaacgagaagggcgaggatcccacacttccatctcagcaaaaatcagtaggggttatctggcaaaacactgatggccagaagctctgccacgaaaccctaagctccgtgaagggcatggacaccgctgatccaaaggcttacatcgccaaggcggtgaaagccaccatggacagcgtggccagggccttcgacgtgagtcgtacgctcagtaccgagtacggaggccacgataac

SEQ ID NO: 20100 - DNA, 252 bp, Glycine max
  Clone ID: 700955922H1
gatcatgaaattgacatggtagctgctctcctagctgagattgagtctggccacatccatcaatccagcagggatttcctttggtggaagcctgaccctaatggtctattttcaacaaagtttgcctacaaagtgttgcaggaggctcataataatgctaatgaagacagggcctccaagattatgtggagactgaaaattcccccaagagcgagtgctttttcttggagactattcaagaacaggctccct

SEQ ID NO: 20101 - DNA, 242 bp, Glycine max
  Clone ID: 700955889H1
gagcaacacaacacaaccagacccatcgttatcttatctccttctccatggcttccttacccagttttactccttttgtatttctattgcttgtcattggatgcaatgcaaggcctttgtatccacttcccagcaaaggtgatgatggaaataggaagcccctacaaacttttcgcccttataacattgctcatcgcggttcaaacggagagcttcctgaggaaactcatcctgcatacttg

SEQ ID NO: 20102 - DNA, 242 bp, Glycine max
  Clone ID: 700955890H1
tacctctgcatttttctctcgctctctgccttccatcaccctcgccatttcccttcccaagatagtagaagatggcagacgctgaggatattcaacctcttgtttgtgacaatggaacaggaatggttaaggctggttttacctggagatgatgccccacgtgctgtgtttcccagcattgtaggtcgtcctcgtcacactggtgtgatggttggcatgggccaaaaagatgcatatgttgg

SEQ ID NO: 20103 - DNA, 239 bp, Glycine max
  Clone ID: 700955892H1
aatcagatagcaaaagcaaaagaagaagctttaagccgaaaagatatattggacaaggttgagaaatggatgtcagcatgtgaagaagagagttggcttgaagactataaccgggtacttaaaatctcgcttcggctttatttctctttcttagtttgaataattggttgtgcacagccgtggatagagaggtgaagtagtagtattatgatcagaacatttactatcatgttaacaaa

SEQ ID NO: 20104 - DNA, 244 bp, Glycine max
  Clone ID: 700955896H1
ctacaatgtggagggggataatgggaggaagtaccttgttcctgctctgtatgatccttctacatcgtcttgctcaacgcccgtctgagaaggaggattattatggtgatgccgatcgttcagttctcactgctgctgctagcctgctactacgatgatgttagaaaccacggattagggagtgtacaaaacttctaataacccattttgtaggattatttcattgatttgtttgtttatatca

SEQ ID NO: 20105 - DNA, 273 bp, Glycine max
  Clone ID: 700955901H1
cttttgaaggatgtgaaccaagggagtaagctttatcaggctttgcggaggaatgatacagcagataagttccaaaaagtaactgaaaaaattgaagctgtgctcagtgaaattccttactgcaaacttgagatatcagaggaagttccgagaacagattgaactggtgcatgctcaattcaaaagagccaaagctcaaacagaatttgctgatatacaactagacctagatatggcagtggcgcaaaaagaaaaggaccctgatcctgctgt

SEQ ID NO: 20106 - DNA, 251 bp, Glycine max
  Clone ID: 700955902H1
gttacaagtcaacaaggatacagatgatgaagtagcccttgaagcctgtgaattttggtctgcttattgtgatgctcaactgccacctgaaaacttaagagaattcttgccccgtcttattccagtattggtgtcaaacatggcttatgcagatgatgatgaatcagttattgaagctgaggaagatggttctcatcctgatcgagatcaggatcttaaacctcgattgcacgtatcaaggtttcatggat

SEQ ID NO: 20107 - DNA, 268 bp, Glycine max
  Clone ID: 700955903H1
aattgacctatttgtatatacaatatgatgagtttgataatgctgcaactaccatcatgaaccattcacctgaagcatgggatcacatgcaattcaaagatgttgttgttaaagttgccaatgtggagttgtactacaaggctgttcacttctacttggaagagcatccagatcttatcaatgatgttctgaacgtccttgcacttcgtgtggaccatgcacgtgttgttgacatcatgcggaaggctggtcacctcggtcttgtgaa

SEQ ID NO: 20108 - DNA, 267 bp, Glycine max
  Clone ID: 700955904H1
caatggcaatggcatttccgtccgtaacctctgtaactgtggagaacgtgacattccctcccaccgtgaagcctccctgctcccccaacaccttcttcctcgccggcgccggcgtcaggggcctccaaattcatcacgctttcgttaaattcactgccatctgcatttacctccaatacgacgccctttccttcctctccgttaagtggaaaaccaagtctgctcaccagttaacggaatccgaccaattcttctcagatatcgtta

SEQ ID NO: 20109 - DNA, 265 bp, Glycine max
  Clone ID: 700955905H1
agagaacaaacaacgacaacaacaacaacaacaagctcaattgatgaaatgaaaaggatactgaagagtctgaatcattatgatgcccttggatttagccgccacaagaagattgatgctgcagttttgaaaaaggaatacaggaaaaaggctatgcttgtgcatcctgataaaaatatgggaagttctttggcaagtgaatcatttaagaagcttcaatgcgcatatgaggttctttctgactctgtgaagaagcgagattatg

SEQ ID NO: 20110 - DNA, 261 bp, Glycine max
  Clone ID: 700955906H1
agaaaacactaagagactctgcagtggctgcaaagtcgtttgcaccatagcttgttttgcctgtgacaagtatgatttgactctttgtgcgaggtgttatgttcgtggcaattatcgagttggtgtgaactcttcggattttaggcgagtggagataagtgaggagacaaagacggattggaacgaaaaggagaccacgaatcttctggaagctattacgcattacagtgatgattggaagagggtttctcagcatgttcc

SEQ ID NO: 20111 - DNA, 267 bp, Glycine max
  Clone ID: 700955907H1
tctcttctttctcttcttcttcctcttcttagcctccgccgccgccagcgtccccgcccacaacatcacccgcatgcttgccaaacaccccggcttctccaccttcaaccactatctctccctcacccacctcgccgaagagatcaaccgccgccagaccatcaccgtcctggccctcgacaatgccgccatgtcctccctcctcgacaagcacctctccctccccaccatcaaaaacgtcctctccctccacgtcctcgtcgacta

SEQ ID NO: 20112 - DNA, 263 bp, Glycine max
  Clone ID: 700955908H1
caaaatggccgtgacggaggaaaccggcggcgccaccgtgatcgacgagacctacgagttctccgcgccgcgattcttcgatttcgtcaaaggagagtctgatgaggaatcgcgtaaggctgagctctggttcgactccgctctctcctacgctccttcgccattcatgcctaaaatcaagaccggtagatctattactgtggataccttgtgtgattttagtgaagctgacaaaatgcagaagatgtttgttagtgttgata

SEQ ID NO: 20113 - DNA, 261 bp, Glycine max
  Clone ID: 700955909H1
caagacctcttgcttcggctcacttttgacaacatatgcggcttggctttcggccaagacccgcaaaccctagccgtggggctcccagataacgctttcgctctctccttcgatcgagccaccgaggccactctacaacgctttattttacccgagatcttgtggaagctgaagcgatggctcaggctcggaatggaagtgagcctgagccggagcctgaaacacatcgacaattacctctcccacatcatcaagaaccgc

SEQ ID NO: 20114 - DNA, 261 bp, Glycine max
  Clone ID: 700955911H1
ccaaaacgctccatactcgatatagcttacaccacttgggccatcaaaccccaaccaattctaaccatttcttttcgttccgatcagtttttcgtctctctctgttttccgaaaccttaatctcttgcccgataagggaaaattatgaatcccgataagttcacccacaagacaaacgaagctctggtgagtgcccacgaaatagcaacaagcaacggtcacgcgcagttcacccctcttcacctggcgtcctctctgatt

SEQ ID NO: 20115 - DNA, 258 bp, Glycine max
  Clone ID: 700955912H1
ataggattctcttctttattccttttgtaatttcattcattcttaatctttgtgaaaaataatgttcatcgagaattttaaggttgagtgtcctaatgtgaagtacaccgagactgagattcagtccgtgtacaactacgaaaccaccgaacttgttcacgagaacaggaatggcacctatcagtggattgtcaaacccaaatctgtcaaatacgaatttaaaaccaacatccatgttcctaaattaggggtaatgct

SEQ ID NO: 20116 - DNA, 258 bp, Glycine max
  Clone ID: 700955913H1
cacatcctctctctcttcataacatttccaatccatccaacatattcttcagttagctcccccaacctatacacttcaccaccacaccacaaccctaccctctctctctgtcatggtcattggaggagccttccctcgtttcgacccaatcaccaaatgtagcacccaagaccgctccaaccagaccatcgcctcggacctcgatggcaccctccttgtctcccggagtgccttcccctactacttcctcgtcgccct

SEQ ID NO: 20117 - DNA, 253 bp, Glycine max
  Clone ID: 700955914H1
gagaaaatgagttcccagattgtggcccgcatattggtcaaggctctcatggcaatgccggcgccagatttcagcctttgtctctttttgattccagaacgcgtgcaaatggaggagcagttcaagactttgattgtcctgtctcactatttggagacaggaagatttcggcagttctgggatgaagcagcaaaaagtcgtcatatagttgaagctgtgccaggatttgagcaggcaatccaaggatatgcaa

SEQ ID NO: 20118 - DNA, 255 bp, Glycine max
  Clone ID: 700955915H1
tatgactttgactatgatgactttaacaggtaaattgcctctacacatttttattttttattttctattttggtcattcattttgttggttctgctccctgttcctctactagtagaacctgcaagatcaatacaaaaacagaaaacacagcaaagcaacaagcaaggatctacaccatgagtttatgtggttcagcaatgtgcctacatacatgagaaatgacagctcatcatcatcacattgatcatgaaaca

SEQ ID NO: 20119 - DNA, 256 bp, Glycine max
  Clone ID: 700955916H1
cgtatctattctttgcgtttggtttttggttgattgaaggcattcacagcgtaattcgttgctgcattttaatcgatttatctaaccaggactgaatgacctaatggagtctaaaggtgggaaaaagaagtctagtagtagtagtagtaaatcaattttttacgaagctcccctcggatacagcattgaagacgttagaccaaacggtggaatcaagaaattcagatctgctgcttactctaactgttctcgcaaa

SEQ ID NO: 20120 - DNA, 266 bp, Glycine max
  Clone ID: 700955917H1
cggcttatcaatatgatcaatgaactggcatcaatatttgaagttgttactggtgcagcaaagaagccagttaaggaagagtcttcagtttcacaccgcagtggcagcaagtctaagtcgagctctaagcgagcttcggaatctcatggtagacagccagagccattgcgatcataagatgaggatgaagaactggacgatcaagatgacgatgaacatggagagaccttgtgtggggcatgtggtgaacattatggcactgatga

SEQ ID NO: 20121 - DNA, 266 bp, Glycine max
  Clone ID: 700955918H1
acaagtgtcgtgctgctaggcgaacagcagagaatgctgcaccctagatggcgagagtccagtagccgaaagcatcactagcttacgctctgacccgagtagcatggggcacgtggaatcccgtgtgaatcagcaaggaccaccttgcaaggctaaatactcctgggtgaccgatagtgaagtagtaccgtgagggaagggtgaaaagaacccccatcggggagtgaaatagaacatgaaaccgtaagctcccaagcagtgggagg

SEQ ID NO: 20122 - DNA, 265 bp, Glycine max
  Clone ID: 700955919H1
atgaatatggagcgctacacgctacccgcaccacccattaatattattctcgaggaagaagaagaagaagagaacattgccattgccatgggtgcccctcttatcccttcctttaaatccatgcttcaacaccaacaacaacaacctgactcttacttcaacttcaactttaactcttcaattagttctgctaccataccctttgttcctaacatggaatcttttccttctcttgaccctttctccccttcactttcatcacttc

SEQ ID NO: 20123 - DNA, 259 bp, Glycine max
  Clone ID: 700955920H1
actaaatgcaaggaggttcaaaaaattgtatgctgacaaggaagatatctttgttcctgatgttttctgggactatacaagtgctaaagtactaacaatggattgggttgatggggtcaaactaaatgagcaagaagcaattgagagacaaggattaaaagtcttggatctggtaaatgcaggcatacagtgcagtctcagacagttactcgagtacggatattttcatgcggatcctcatcctgggaatcttttggca

SEQ ID NO: 20124 - DNA, 264 bp, Glycine max
  Clone ID: 700955921H1
cttaagagatcaatatggccaccaccactacccagcctccctctaatatctgttttttccttctgttgttgcttctagcacactttcatttgggcataagccaacttgagctgaattactactctaaaagctgcccaaaagctgaagagatcatcaaggaacaagtcacacaactatataacaagcatggaaacactgccgtttcgtgggtcagaaatctcttccacgattgcgtggttaagtcatgcgatgcatcattactgt

SEQ ID NO: 20125 - DNA, 239 bp, Glycine max
  Clone ID: 700955888H1
cacgcaagaaaacgattatgaacgacatcatcgcgtgtgctgctgctgcagctaactcttctcttccaacctctgtgttgggtgttcttcactttctccactcccgaggaagatcctcctcttgtgttcacactccctctgaacttctaagggactttgccacaagagagttcaatgcgtttctgtggctatgtctcgttgctgtcaccacccttttgctcagaagactcttcaatctc

SEQ ID NO: 20126 - DNA, 245 bp, Glycine max
  Clone ID: 700955850H1
caatctctcactccccgttttcatatacttatattatccggtggctacgttactgcatcctaaatggttcgagaaaaagatgtctgttgggaatatgctgagaaattagatggaaacaaggtaaggtgtaaattttgccaaagagttctgaatggtggcataagtaggttgaagcatcatttatctcgattcccaagtaaaggggtaaatccttgtagcaaggtcagagatgatgttacagatag

SEQ ID NO: 20127 - DNA, 245 bp, Glycine max
  Clone ID: 700955851H1
gggacaaatggaagccagttggcatctgtggcattctccagactacaaaaagagattgctaaagatggtagagaaccgaatgtgatttccaagggggtgcctaacaaatcgatttctagaaaaggttctgatgcaggagcctctgccacaacaggagaggagagtgctctatcacaattttgtgtggatctcactgcccgtgcgagtgaaggaagaattgatccagttgttggccgagaagttga

SEQ ID NO: 20128 - DNA, 249 bp, Glycine max
  Clone ID: 700955852H1
agacactgcaccaaacaccaacaacgctttagctctctctcttctctccataaccgccaccggcgatctggcactaacagatcgccgctgctacatctgaacccgatccagccaacagatctctccaattcaaatggagaatctaatctctttggtcaacaaaatccagagagcttgcaccgccttaggtgaccacggcgaaaacagtgcactccccacactatgggactctctccccgccatcgccgt

SEQ ID NO: 20129 - DNA, 246 bp, Glycine max
  Clone ID: 700955853H1
gcagcattgggagatagaaagagagagagaaagagagagagagaaagacccttacccttctctatcgctcgctttcctttgacgcttctgacccttgctttgtctgcgtcttccttctttctttctttctttctctgtgtgtcgtaatggctctcccagactcttcttcccgtcgcaactccctgatcccctccttcatctactcctcttcctccaaaacgctccctctccaccacatgctcaaca

SEQ ID NO: 20130 - DNA, 243 bp, Glycine max
  Clone ID: 700955854H1
cagctaactattagtgactataatcgatcaattttcaattttcaattgtgcccatcttcgttgctgccaccatgcataggatcaacaccgcaaggtccattttttctgctgttttcagaagcaaatctcggcctcactctgctgctttctccacctccttgctcttcgacgaaactcagacacagtttaaggaaagtgttgctcaatttgcaacggaaaatattgcccctcatgcttcgaaaa

SEQ ID NO: 20131 - DNA, 242 bp, Glycine max
  Clone ID: 700955858H1
ctgcgggcacaagtcccaaggcaacccccatggtatatatagatttaacgccaggggtgaacatggaattggatcatgcagctgcttccagtttctctctctaaaactcgcaaaagcgaattactgaaaccctagcctctgtttctgtgtttatttacttcgattctacgcatcgaattcaattctctgtgatctgaacccgtgaaatcaatgtgcctctttcggaatcgcagagcgagcaa

SEQ ID NO: 20132 - DNA, 228 bp, Glycine max
  Clone ID: 700955860H1
gtcacctgtgcatgtttcagggacctgtcagatttagttaacgtttttacatcatcactgtgtgaagataatatagatatggaaatctcccatgacatcaagatcaaggatgacaagctaggtggtgtgaaggaagagaagattaaggtagaagttgaactgaagaataaatcagttgagaaagagcatacaaaaagtaaagaagagaagaaacataaagatgaagat

SEQ ID NO: 20133 - DNA, 241 bp, Glycine max
  Clone ID: 700955862H1
cttctattctgtgctgttgctgaatcagaatggatggtgctgtgttggcatgtacagatggagcagttcttcccgtcagtcaagtgtttgatgcaattagagagcttgggaatggagggcttgagcaatgggatcctcttgttcttacttctgcctcactcttaagcaagttgcctgtggattcttcctctgttgattttgtgattttaatctggctgtcaattgattgtcctgtggatca

SEQ ID NO: 20134 - DNA, 247 bp, Glycine max
  Clone ID: 700955863H1
ctgagtttgtgttgtagagagaagttacgttctgagaggccaagatggattttaccttcgttcttgagcgtccctggggacttcctttgtgatatttctggttttgatgattgtgtttgcgtttctgtcaagtaggccagggaacaatgtggtgtactaccccaacaggatcttgaaggggttggatccgttggtaggagggtacaagagccgcaaccctttctcttggatcaaggaggctttgact

SEQ ID NO: 20135 - DNA, 131 bp, Glycine max
  Clone ID: 700955865H1
ctctcttctgccctctgcacctcccctcacacccttcctcattcgcaggaggtgaagatgtcgaccccggcaaggaagagactgatgagggattttaaaagattgcaacaagatcctcctgctggcatcag

SEQ ID NO: 20136 - DNA, 245 bp, Glycine max
  Clone ID: 700955866H1
attagttcttgttattcattattcattctcagcttcttttcttctggggggcaaaaggggtcacttttcagatccgagattgagctcctttacccatcatcatcatggagctcctcgggtacctgaatcagggtcacccttctagaggaacaacacttgttattactctttcattggtgctttcgacacttgtgtccttctccactttcacacatgccttctcttcttctgcgtttccggaactg

SEQ ID NO: 20137 - DNA, 247 bp, Glycine max
  Clone ID: 700955868H1
ggcctgggtgactctggtcccgccaacgaacccatcaaaaccttattcacttcttcccaattcagagacaccaaatggtccttcccttctgccccttccgcccctgtcacttgcaactatggttctgtaatgccttcatggtttgacattcttgagattcccgtggcagctgattctccaaatgacgagagtagtttacttaaagctgttcgaaatgtgcatgctactatagacaaggaaatagctg

SEQ ID NO: 20138 - DNA, 244 bp, Glycine max
  Clone ID: 700955870H1
cggcacagccattcccaaagagagagataagacaaaaaccacggttgcattgttgcattttgcatttaatggttgcaaccacaatccgttagtagattggaatggggaatggtgaatggtgaacggtgaaaagtgaattccagaaagcagagaatggcaagtagcggtgctgcaacagcggcgttgcagagcgatgcaagtagtagaatggaatgctggttgtaccttatacgcttcaaccgta

SEQ ID NO: 20139 - DNA, 243 bp, Glycine max
  Clone ID: 700955872H1
tggagaagaagaagggtgagctaaagtcaattttccttcctttcctttccactagtcacataatcccgctagtggacatggccagactcttcgccttgcacgacgtcgacgtcaccatcatcaccaccgcacataacgccaccgttttccaaaagtccatcgatttagatgcgagtcgcggtcgccccatcagaacgcacgttgtcaacttccccgccgcacaagtgggtctccccgttggga

SEQ ID NO: 20140 - DNA, 240 bp, Glycine max
  Clone ID: 700955873H1
atactcagtactccccattggggtataatagggacacgaggttgatgcggtggagctaagaaaatgaagcccttttgcacattcttcattcttctttcgctgcttgttattctcgttgaatcttcatgcaaaaacgaagaccaggagatggtgtccaaggccttccaatctgtgtctggattcaactcttcctggttcgaaacaggttccaactgttcaaatgctgagattaaagggata

SEQ ID NO: 20141 - DNA, 239 bp, Glycine max
  Clone ID: 700955875H1
ggaaaggtttggcttgaccccaatgaagtcaacgaaatctccatggccaattctcggcaaaacatcaggaagttggttaaggatgggtttatcatcaggaagccaaccaagattcactcccgctcacgtgctcgtaggatgaaggaggcaaagaggaagggccgccactccggttatggtaaacgtaagggtacaagggaggcaaggcttcccaccaagatactctggatgagaaggat

SEQ ID NO: 20142 - DNA, 130 bp, Glycine max
  Clone ID: 700955877H1
caaaaccacaatctaagtaagtgttgagagaagagtgcgtttgtctgtttgaaattaagtagtaaagatgtttggaatcatcggaggaaacaatggtcacaagataaaggggaacttggtgattatgcgg

SEQ ID NO: 20143 - DNA, 242 bp, Glycine max
  Clone ID: 700955878H1
aaaatcctcttacagcagcatttgtaattgtcttgttttcctaccctcaaaattcgttcgttcttctgtttttccttgtgtgtttctttcaatcttgtctaaagatagtgtccactgtttgtgtatctcagtgattaaatgtaactgcaatctcttcatcttgttcttcttctttgctttacttgaatctgttcttgttccttttttaaggttccttgcagaaaaatgtaattttggtttca

SEQ ID NO: 20144 - DNA, 242 bp, Glycine max
  Clone ID: 700955879H1
ctctctctctctctctctctgaagatggcttcacgcaggctcgtatcttctctgattcgatcctcccttcgtagatctcaatcgaagccctcaatttccgcatcgacatcgatatacacgtcatccaaccgtgcctcaccgcacggatacttgctgaaccgcgtcgccgagtacgccaccgccgcggctgctgctaccactcctccctctcctcctcctccggggaagaaggagctcggcgg

SEQ ID NO: 20145 - DNA, 246 bp, Glycine max
  Clone ID: 700955880H1
attcacaatccctcttcaggtttcgttattttttggattcttcgcctgattttgtgtcatataaatcgtgttactacagtgaagatatgacagaggatatgaaaattgatcatattgtggaagttcctgataccccagatagaacaactgtaaggcacgattatcagaaatatttaggtaatcctgataagagggggagagcttttaatgctgctgatgaaaataataaccacagtaactatatat

SEQ ID NO: 20146 - DNA, 248 bp, Glycine max
  Clone ID: 700955881H1
ctcttcttcacatcttcctccattaatacccttccctctctctcccatggagttgatctacctactctatctggttccaacgttgtacgcgtgtttcctcatatggaagatgttggacgagagaagggacagggagtgttacatcttaaactaccaatgctacaagccccccaacgacagaatgctcggcaccgagttctgtggcaagcttatcagacgcaccgaaaacctgggccccagcgagtacc

SEQ ID NO: 20147 - DNA, 245 bp, Glycine max
  Clone ID: 700955882H1
ctagactcttccttttctcttctctgtctaaggggtgccctgagatcacattgaacaatggtgaaggctgtggccgttcttggcagcagtgagggtgtcactggaactattcacttcgttcaggagggaagtggtccaaccaccgtaactggatctcttgctggtcttaagcctggtctccatggtttccatgtccatgccttgggggacactaccaatggttgcctctcaactggatcacattt

SEQ ID NO: 20148 - DNA, 105 bp, Glycine max
  Clone ID: 700955883H1
gttgtcccctttcacacactgatcttgatcagttgagaaagggaatcagaggagagaaaaaaaaaaaacatttgcgctctcttctccctttccatctctttatag

SEQ ID NO: 20149 - DNA, 246 bp, Glycine max
  Clone ID: 700955884H1
gagagcaaacaatgttgccaagatcaaagttgtggttcggaagagaccactaaataagaaggaaatagcaaagaaagaggaagacattatttacatagattcaaattttctttcatgcactgtgagaaaactcaaggttgacttaacagaatatattgagaaacatgagtttgtttttgatgctgtgctgaatgaagatgtttcaaatgatgaagtgtatgctgagactgtggagccgattgttcc

SEQ ID NO: 20150 - DNA, 243 bp, Glycine max
  Clone ID: 700955885H1
agaagttctaaggaagagggaatatgcagaatacaaggtgctagttgtctatttgcaataacaacatcagcgatccaaccttagtattcttcaacccagagagatttgtaataataaattacaacaacttaaacgatggcaggaggagcttatgtagattcgggaaatgcaaagcaatttgatgggaaggtcacggcattcgtattggttacatgctttgtggcagccatgggaggcttactc

SEQ ID NO: 20151 - DNA, 240 bp, Glycine max
  Clone ID: 700955886H1
gcaagagagagaaactaagacagaaagagagagaaagagtggttgaaagcgtccattgaaggtatagagagagaggttttgtgaattggtgctgcttcgtgtctgtttatttcctcgcgaggtttgaattccggaacagtgaagagaaacggaggttccgatcctgcgatgtgatatatgagagatctgtgaggaaattgaactggaaaaaaaaaatggcgacgtcggaggtatccatca

SEQ ID NO: 20152 - DNA, 240 bp, Glycine max
  Clone ID: 700955887H1
agaaatcacagctgaaagagggtactatcaataaaacagcgctacagatattgttcagaaatttctgtaccaaaaaagtaaacattgaatttattgcactggctcaacccccctcttcctttctggctcacatgcacttctttttctttctttgaagttcatctatccacacatacatatccctttagcctttattacaagcctcagatataactacttcacttgttgtgactaagctca

SEQ ID NO: 20153 - DNA, 250 bp, Glycine max
  Clone ID: 700955849H1
gttggggttctcacgatttcgattcaccctttctcccacacactccgattctccttgtaaacagcggtgccagaagttgatataggatgggggcaatgatgtcgagattctggttcatgttattccctgcaaaagagtataagattgttgttgttggattggataacgctggaaaaaccactaccctttataaattgcatctgggtgaggttgtaactaccaaccctactgttggtagcaacgtcgaaga

SEQ ID NO: 20154 - DNA, 243 bp, Glycine max
  Clone ID: 700955812H1
cagaaatagagagtaagcctgagatcatggaaaaagttggtgtggctgtaaatagcaaaaatcaagaatccaaagcaacttccaccattaccattaagggtttcatgagccttctaatgaaaagtgtagatgagaatggtgatggtagcaagagagttatttctctgggtatgggtgacccaactctcaccacttattttcccatctcaaatgtagctgaaaaagctgttgctgaagcacttc

SEQ ID NO: 20155 - DNA, 242 bp, Glycine max
  Clone ID: 700955813H1
cgttcttcttctttttctctctctagaattttttttttctctctctctctcccatctctcggaaaatttttcagagcttcctaaagcctttagaattctctggaacctttttgttcgtccgccgaggatcgcaattcctccaaatcgtcgtcactcgtcgcttagttcggttctaactgcatgaactggttcgggaagctggattcatcatcgtcgaacttgaacttcaatcacttcgttac

SEQ ID NO: 20156 - DNA, 246 bp, Glycine max
  Clone ID: 700955814H1
ctcatcacaatgatgtagaaattgtcgaacctgctgagccaaaagctaaagagttcaagccgtgtgatgtgaaatatactgattatacaccttgccaagagcaagaccgagcaatgacatttcccagagagaatatgatctatagagaaaggcattgtcccgctgaaaaggagaaattgcgctgcctcattccagcccccgaagggtacacaactccttttccgtggcctaaaagccgtgattatg

SEQ ID NO: 20157 - DNA, 243 bp, Glycine max
  Clone ID: 700955815H1
cctcatcatagttttgctaacacaagtacattcattctcaaaaggtttaatttcatcctttctttccctctcttttcattggtgtgcactttcacttgtggagctagctgcaccaacagcagtggaaattgccttgttcttgagatgtctggtgttcttctttgggtgagttctggacccaaagagaacatcaactccttggtgagtttttcatgcaggagtggtggtggtggtgaaagaaca

SEQ ID NO: 20158 - DNA, 244 bp, Glycine max
  Clone ID: 700955816H1
ctctagactctgctctcaaacgccgtcgttttggaactctttttcttttccctttgattcttctctgtctttgtaaccgaaagaggggaaaatataattaataccgatttcgcaaccaattcttctcttgcgttgaattgggacaacgagaaattttggatctcagtttttggcaggaaaaaaaattgcatttgagtaaaaataacagagtgtagtgtagggtcttgttcttgatactgtgcta

SEQ ID NO: 20159 - DNA, 261 bp, Glycine max
  Clone ID: 700955817H1
cggctcgactgacaaccaagatgccattgatgcatcaattgttggaatgttagatgaccgtaaggaggcaagagcaggaatcaccgaggtgcatttcttgccttttaatcctgtggacaagcgcactgctattacgttcattgacaacaatggtgactggcacagaagcagcaaaggtgctcctgaggaaatcattgaactttgtggcctcaagggagagactctgaaaaaggcccacaaggttattgatgagtttgctaa

SEQ ID NO: 20160 - DNA, 247 bp, Glycine max
  Clone ID: 700955821H1
gagcatgcatgtgaagctgctgcctctgttgagtctaataatttaaagtcaaaacctgaagcagactgcgtgcatgttgagaaactggctgataaggacccttctgttccagaagattctaaacatttagttgatcaattcagcttcttgcctgagttgattgcttctgtaaaaaaggctgcattagaagatgccgaggaattgaaagctgcagctgatgagcctgccaattctcagaatcacaatt

SEQ ID NO: 20161 - DNA, 244 bp, Glycine max
  Clone ID: 700955822H1
catctttctctcttctctctccacccaaaccctaactcccgaccctgttcccctctcgtatccgtcatgaaaggaggaaagtccaagaccgaatctaagagagccgatcccaaacttgctgtgaataagaagggagccgccaccaaggctaggaaacccgccggcaaggggaaggcagcgaaagaccctaacaagccaaagaggcctccaagtgctttcttcgttttcatggaggagttcagga

SEQ ID NO: 20162 - DNA, 245 bp, Glycine max
  Clone ID: 700955823H1
ctcgagccgaatcggctcgagctggtttggtcccatatgatggacaggttcatctccaacaagacgaagacccacttactaccgtcactccgaatcggcgaagggggtgatagtgtgccatcgccaccaatcctcggaagcaacgaaggcgaagtgggtggagatcgatggagtgaagctgttggaggagcacgtccagcgtgttatggtgaagaaggccacacccgattggcttcccttcctcc

SEQ ID NO: 20163 - DNA, 245 bp, Glycine max
  Clone ID: 700955826H1
ggaacaattgacttcatcttcggctactccaccaccttgatccagaactcaaagatcttggtgaggaaacccatgccaaatcaacagaatatagtggtggctgatggcacaggccagaagaacatgcccactggagtagtcctccaaaactgcgcgatcatgcctgacgcttccctcttcgctgaccgcatgatcgtgaagacttacttggccaggccatggaaggcattctcaagggcagtgtt

SEQ ID NO: 20164 - DNA, 243 bp, Glycine max
  Clone ID: 700955828H1
gttccggaagaaaaactccgacaaaacggtgaaccagtactgccaatacgacagccagacactgacgatgttcacgtcgtccttgtacctcgccgctttgctgtcgtcgttggttgccgccaccgtcacgcgtaaattcggccggaaactctccatgcttttcggaggcttgcttttcctcgtcggtgccctcatcaacggtttcgcccaacacgtttggatgttaatcgtgggtcggatctt

SEQ ID NO: 20165 - DNA, 246 bp, Glycine max
  Clone ID: 700955829H1
cggctcgaggcagaaagcaagctcatcctagagttttaaaaatggcagcagcctcctccatggctctctcttccccatccttggctggcaaggccgtgaagctgggcccatcagcccccgaagtcgggagggtcagcatgaggaagaccgtcaccaagcaggcctcctccggaagcccatggtacggcccagaccgcgtcaagtacttgggcccattctctggcgagcccccgtcctacctcactg

SEQ ID NO: 20166 - DNA, 243 bp, Glycine max
  Clone ID: 700955830H1
gcgtcttggtttgtgagagagacagaggcacagagagaaaatggtttcggggtcaggaatctgcgcgaagagggtagttgtggacgcgcggcaccacatgctggggaggctggcatcgatcgtggcgaaggaacttctgaatgggcagaaggtggtggtggtgcgctgcgaggagatttgcatctccggtgggctcgtcaggcagaagatgaagtacttgcgtttcctccgcaagcgcatgaa

SEQ ID NO: 20167 - DNA, 223 bp, Glycine max
  Clone ID: 700955831H1
ggagaatgctaggtcagtggtcgatgccagcatctacttctcatagactagtgcattaccaaatgtattattatcgtttgaatgtttggacaatgacataatgttgttcttttcttgcatgcgtatgtaggttacaattgtacaaattctcaagtccccctcttcgcataccatttcatgaaaagaatatgcatgtttcctaactaagagccatcatgttgac

SEQ ID NO: 20168 - DNA, 248 bp, Glycine max
  Clone ID: 700955832H1
gtgaggcttaagcaaagaataacaacatcgcagaaggatgtaaaccgtgattttctacgtctccaaataattaggtgtcatagtgaactaaagttagataaagccttctccaatttcaccaatgattcgtggaaaaaagcttggcacttttactgtgagtttgggactaagggagttatgtttgactatcgtcgtcatggtggtaactgtctaagaggaagtagcctgctagatactgtgtcgttccg

SEQ ID NO: 20169 - DNA, 252 bp, Glycine max
  Clone ID: 700955833H1
atgaaactgatgtttctgtggtttctttggatgaacaactggaagactggactgacaaagaaattagtgatttttcttctttgataggtgggtcatatgctcctgatgcccttgagccattaaatggagtgcttaccattccattggcaaatggtgcctcagtgaatctccatatgtcaaagaaagcagaaaggaagttcatcgtaggtcttatgtctctcacacataatgtccaaagagcaattcaaatgc

SEQ ID NO: 20170 - DNA, 246 bp, Glycine max
  Clone ID: 700955835H1
ggaaagctttgagatttgttggacattttagagtggtgagaggatggtgggtgttatttcgttggtaacaggaatggctggtccaagtgggtttggatcagcttcaactgcagaacaggttactgaaggagttgatgccagcaacctcactgcaattatcacaggaggagcaagtggtataggattggagacagcacgagtgttggctcttcgaaaggtccatgtcatcattgcagtacgaaacat

SEQ ID NO: 20171 - DNA, 242 bp, Glycine max
  Clone ID: 700955838H1
cttccatgtctaaacactgaaatggcgtccatctctacgtgcatcactgtgacccccacttgtaggcttgctcggcggctactttccttcacctcgaagcaggcaatagcattcccttccgtgcagcaaaacccggtaattgggggagtcacgaaaagggtatgggattctagggttttggtggcggggccgggtggcgcagtggaaaccgacaagttgccttctgatgtgagaaagcgaac

SEQ ID NO: 20172 - DNA, 119 bp, Glycine max
  Clone ID: 700955839H1
cacaaccttgaagattgaaaagaattctgaaaaaaaaaattaaactaagaggttccctttcgcagttagtggcactgcatgtggtaaggaatcactcagtttaactttatatatgcata

SEQ ID NO: 20173 - DNA, 242 bp, Glycine max
  Clone ID: 700955840H1
gtcacgattctcgaggagccccaagggtttccaaaaattccgtatctttttgggtacccatttgagaagagatcactgggtttcagcctgaaattattggagttacatgggtttcccttgatctcagccgagaatcggtgtcactattgtcgatggaactcaactggggtggttgtgttgtgtgtgccaacctgaatgctgctgattagggaaaaacaaaaaagaaagaaagaaaagaataa

SEQ ID NO: 20174 - DNA, 245 bp, Glycine max
  Clone ID: 700955841H1
gcgttcgaacaaaattagggttttctcaaccctagggtttaccttctcttcccctgttcgaaattaggcaaatcaaaacagaaacacgactacaaaaagaagaaaagaagaaaaagaatcaatcattcattgatcgctgaaacgatacgatgacagggaaggcgaacgatagaagcacacggcgaaggagatcgcggcgaaggtggacgcggcgaccacgaaccgcggcggcgggaaggcgggta

SEQ ID NO: 20175 - DNA, 244 bp, Glycine max
  Clone ID: 700955842H1
ccatttttcttcatcccccaaagtttcaatctttgtattcaattcaccctttctctctctccatggccacttgtgttgatgccccaacccctctttctcggaagcctaacgggtcccaatccgatgatcattccttcaattacatgaaattctgccgacccactttctctgatcgcgttccctgcatacccatttgcaagaatcgtgacactgccttcacacgcgtggaggagtttgacacatg

SEQ ID NO: 20176 - DNA, 242 bp, Glycine max
  Clone ID: 700955844H1
cacaggaatagtcctccataactgcgagatcatgccggaccctaccctcttggcagaccgcttgagcgtgaagacttacttggccaggccatggaaggcattctcaagggcagtgttcatcgagaatgttatcggggacttgattcagccagatggttatattccatggaacccaattgaaccaaacacacaggattgctacttcgctgagtttggcaacactggaccaggttccgttgctc

SEQ ID NO: 20177 - DNA, 243 bp, Glycine max
  Clone ID: 700955845H1
agagaatacaccaaaacccaacatgaaaacccttaacaaagcctcacttattttattccctctcttgttcctttccctattcaagcattcccatgctgcaggaatcgctatctactggggccaaaacggtggagaaggcaccttagcagaagcttgcaacactagaaactaccaatatgtgaacatagccttcttgtccacttttggcaacggccaaactccacaactcaaccttgcaggtca

SEQ ID NO: 20178 - DNA, 245 bp, Glycine max
  Clone ID: 700955847H1
gtgagtgatcggtgttcacttgatccttcataagtcgtcatcatcatcatcatcatcaccgttgattgaagaagatgccgatcagaaacatcgccatcggaaggcctgaagaggctactcaccccgacacgttgaaggcggggttggctgagttcatctccaccttgatcttcgtgttcgccggttcaggttccggcatcgcctacaacaagctcaccgacaacggcgccgccactcccgccggc

SEQ ID NO: 20179 - DNA, 243 bp, Glycine max
  Clone ID: 700955848H1
gtgatgtcaatgcctgctttacctcacagtggtagttcttcaaagccattaatgatgtttagtgctgatggctctggaactctgacatcaccttcaaaccaattggctgatgtggaccgttttgtggaggatggatctcttgatgataatgtggagtcttttttatcccatgatgatacagaccctagagatactgttggtcgttgtatggatgtaagcaaaggtttcacattttctgaaata

SEQ ID NO: 20180 - DNA, 245 bp, Glycine max
  Clone ID: 700955811H1
gctgaagtgtctgcttcttccgattccggcacgcccccatcaccatggtgaacgttccgaaaacaaagaagacatactgcaagagtaaggagtgcaggaagcacaccctgcacaaggttacccaatacaagaagggtaaagatagcattgctgcccaaggaaaacgccgttacgatcgcaaacaatctggttatggcggacaaactaagcccgtcttccacaagaaggctaagaccaccaagaag

SEQ ID NO: 20181 - DNA, 237 bp, Glycine max
  Clone ID: 700955773H1
gattctagaatcatttgtagtaaaaaaggaaacatagaagctgttgctcttgtatttgctcaggacagggacaggtctttgggaactattaggtttcatgttgcattgtcaaatggtgtttcaactgtgggtcccagatacaaggcagcctcagttaaatcaaacaatgctgattgttcaacatggctcactgctaggagggaagggcaacaggaaaatcttgacggtcagagtatt

SEQ ID NO: 20182 - DNA, 238 bp, Glycine max
  Clone ID: 700955774H1
tgtcggaacataaggcggggaagagttagtttctactctcttcgatggcaggcggggaagaggttctcccttcggccactgccacctccgccgccaccggcaatcccaccgcttcgcctcctccgctcgctgatcttgtcggtgctcccgatctcgctgctgcctcggacgacgtcgttacccaacctgaaattcacgcgctgatttcagacgaagagcacgatcacgagcatgaaca

SEQ ID NO: 20183 - DNA, 222 bp, Glycine max
  Clone ID: 700955776H1
gcgttcattctgttttcgtaagtactgttgtttttctcttctatttctttctttgtttgtgttgtttttgtttcttccttatcgttgttctgtctctcctctgtttcggtgctctgttcaccacttccacgtgagaatgatcttgcttctgtgcatgttcattctctcgtgacctatggatcagactccatgttctgatccagggtctctctcgaacgcctg

SEQ ID NO: 20184 - DNA, 238 bp, Glycine max
  Clone ID: 700955778H1
agagaacaaagcacttagtgctattcaataattacgaaaaaccaacagcgagtgttgtttttgtttggtccaggctggaccagggaatgaatagagatgagaggctttcggttgaagagaactgagttaagcggcgaagccaaacgcagaatcggcggcagaaattgccaccggaagcacgtcgaagacgggtgaaccaaacacaaaattccatccaccacttctcttttcaatcccc

SEQ ID NO: 20185 - DNA, 240 bp, Glycine max
  Clone ID: 700955779H1
catttctctaacatcgtaagttactagaaagtgagagtcattaataagaatggtgtggcctttgaaggagagaggacgcaagctagggtggacaagaagcactttgtagtccctatctgcaactcctggccatagttggcgtgcgtcgtcatgtttttgttatatgttccacgtcttcctcttggtcttgcccctcgtggttccattttttggaggcacgagagtaccaacgagaagctg

SEQ ID NO: 20186 - DNA, 239 bp, Glycine max
  Clone ID: 700955780H1
ctttctcgtcactagctctgtgcattcttctctcgctctctgccttccatcacactcggcatttcctttcccaagatagtagaagatggcagacactgaggatattcaacctcttgtttgtgacaatggaacaggaatggttaacgctggattttctggagatgatgccccacgtgctgtgtttcccagcattgtaggtcgtcctcgtcacactggtgtgatggttggcatgggccaaa

SEQ ID NO: 20187 - DNA, 244 bp, Glycine max
  Clone ID: 700955781H1
cttctatggaaccatttctcatcaaattctttcccggtgtttataaacaaatgcaagatgatgttggccatagaagccaatattgcaaatttgacaacgagctccttacactcttcacctcttccttgtatcttgctgcattagtagcttctttctttgcttccaccactacaaggatgatgggacgcaaggcctccatgttcttaggaggcttgtttttccttgtgggggcattattaaacgg

SEQ ID NO: 20188 - DNA, 240 bp, Glycine max
  Clone ID: 700955783H1
caatttcatcaagcctgccatggcttcctcgtgtgcttcctctgccattgcagctgttgccatctccacaccaagttcccagaagaatggatcactcttgggaagcacaaaagcttcttttcttagtgggaggaaactgaaggtgaacagttttacagcaccagttggagcacgatccagcactacagtgtgtgcagttgctgagcctgataggcctctgtggttcccaggcagcacccc

SEQ ID NO: 20189 - DNA, 239 bp, Glycine max
  Clone ID: 700955785H1
tgctgacttcctctttgttttctgatctatggcttccaaggagttctctggtctttgctccttggctccttcactatctgagagcattttgtgcactactgggttgaaaatgtatatgctggagagcaaaggaggtgccatagcatgcatgttcttgtctcttttcttcttggggacatggcctgctcttttgactatgttagagaggcgtggtcgtcttcctcagcatacctaccttg

SEQ ID NO: 20190 - DNA, 238 bp, Glycine max
  Clone ID: 700955786H1
ctttttgaaaacactttagtttcgcaaagttgattctttctctctgtatctttctttccccaatttgtgagtgttactgttgaatcgattggattggcattaggttgatctgaaatacgcaattgacatggcgagcgcgatggtagaggacgcgaacttcgaagatgaccaactagccaatatgaccaccgacgacatcgtcagagcttctcgtcttctcgacaacgagattcgcatc

SEQ ID NO: 20191 - DNA, 239 bp, Glycine max
  Clone ID: 700955787H1
gaaaaactaaccgagacagaaagtgatcgcaatgttgcgacacttgggcgttcacgcgccgcgtttggccttcaacttcaagtcgagtttaattcacggtggcagaggcaaaacattaaccacacgcgcattctcgtcctccgccgccgtatcgccgccgtcgaaggcgatcgtgtacgaggcgcacggggaaccggacacggtgacgaagttggtggaggttccagcggtggaagtga

SEQ ID NO: 20192 - DNA, 239 bp, Glycine max
  Clone ID: 700955788H1
ctttcaatggcgaagtgcatgaccagttcttcttcttcttcctatgcactgcttctctttttcttctgctttctacaactggaggctattttggaccctgctgatttcctcgctctgcaaaacattcgtaaagctctgcaagacatgcctgcttccgatttcttctcttcctgggatttcaccgcagacccatgcaacttcgccggcgtttactgcgactccgacaaggtcatcgcgct

SEQ ID NO: 20193 - DNA, 237 bp, Glycine max
  Clone ID: 700955789H1
agctgctactggagggtctaatattctggccaggatagaagagtacaaaactatggtggtgcaagctaacgaagcgaatgacatgcattctggagaagtttatggggaaaaagcaattctcacaactgaactgaaggaacttcaatcacgcttgctcggcttgtctgatgaaagggacaggtctcttgcaattctcgatgagatccgccacattcttgaagtgcgactagctgcagc

SEQ ID NO: 20194 - DNA, 231 bp, Glycine max
  Clone ID: 700955791H1
gatgtctgcaagctcttttgtcgtaaaatgctcgagtggggaatgtttctttacgagatttaaactatattaaatgttgttgactgggctgtgtacgaagggctcctgaggttgtattttgataaatgaggatttggttctttcagatgcagattctatggagggtacgataatatcgaattattgtactgtggaaagactcggagaattcctatcattgtaatgttgttg

SEQ ID NO: 20195 - DNA, 233 bp, Glycine max
  Clone ID: 700955792H1
ctaccgtcttctgcctcggattcacgactcgctgagtctccgcaactcggaacgattccaccgaacgccgattctcaccgcaattcggtttgttcggatccgatgggtagcatcgtggaagacgccgacacagacacggtgtatgtggcggtcggaaagaacgccgagaagacgcagcaactgttgcattggacggttaagaatttctccggcaaagaaatctgccttcttca

SEQ ID NO: 20196 - DNA, 237 bp, Glycine max
  Clone ID: 700955794H1
gaataagagaatccaaaagtctctcaaaaaataaccatgatgatgcatgtcctttgcttctcagtgttcctagcagcagcaatgcaaggaacactggcggttgaatacagtgtcaccaacaacgccctctcaacccctggtggtgttcgtttccgtgatgcaataggggacgaatacgccaaacaaacacttgactcagccacccaattcatatgacgggtcttccagcaaaacgct

SEQ ID NO: 20197 - DNA, 238 bp, Glycine max
  Clone ID: 700955795H1
ctgggatgacatggaaaagatctggcatcacacattttataatgaacttcgtgttgctcctgaggagcacccagtgcttctcactgaggctcctctcaacccaaaggccaacagagaaaagatgacccaaatcatgtttgagaccttcaatgtgcctgccatgtatgtggccatccaggctgttctctccttgtatgccagtggtcgcacaactggtattgtgttggactctggtgat

SEQ ID NO: 20198 - DNA, 240 bp, Glycine max
  Clone ID: 700955796H1
gaaagatcacagaaagagaattcatctttctttgcgaacagctaaaaacctcaaagggaaagaaggcatgaatagaggtgttcttcagagctcaccagtgcaacaaatgatgactggaaaccctaactggtggaacatcaatatcaatagcatggctccacaagctcctcctttcttgtccactcctaacaactttcctatcccttgtgctcccacttctcttccctttccttcttggca

SEQ ID NO: 20199 - DNA, 250 bp, Glycine max
  Clone ID: 700955802H1
atttctttcacttcccttcaattttccaacgcaaaagttccttcaagctcagagcaaggttaaggttattgcatggattgggttggtggctttaattctgcacattggaatgctctggttcttaatttatgtgttagattttggcttagctggtgcagctttggcatttgatatcacgagttgggggatcacagtggctcaacttgtttatgttgtgatctggtgtaaggatggatggaatggattgtca

SEQ ID NO: 20200 - DNA, 246 bp, Glycine max
  Clone ID: 700955803H1
ataatagagtacatcttgagaatgcaattgttagggccagtgctgtgagcacactggcaaaatttggtgctgctgttgatgcgctaaagccccgcatatttgttctgctaaggcgatgcctttttgacagtgatgatgaggttcgtgatagggcaacactttacctgaacacacttggaggtgatggttcagttgttgagactgataaagatgtaaaggacttcctgtttgggccatttgatgtcc

SEQ ID NO: 20201 - DNA, 248 bp, Glycine max
  Clone ID: 700955804H1
gtagagaaccttcgtgtgaggtaactatacttatagctaaaatccacacgacttcttcctctcttcccgtctttctctctttctctctctccctcgatctaattcctcatgttatggtttgtaggtcaacagtaacaataccatgacccctttttgaatcctccatattcattccaatatggcttgtctttctttagggtttggatttggaggcttgtggtcaactaagaaggcaccaactgttttaa

SEQ ID NO: 20202 - DNA, 247 bp, Glycine max
  Clone ID: 700955805H1
agaatccacacaaactcagggtagggcagagagagagagagagagagagagagagagagagaatgggagggtgggctatcgcggtgcatggtggcgctggtgtcgaccctaatctcccactcgagcgccaagaagaagcgaaacaacttctcacgcgctgtctcaatcttggaatctctgctctaaattctaatcttcccgccatagatgtcgtcgaacttgtggtgagggaattgagacacggatc

SEQ ID NO: 20203 - DNA, 247 bp, Glycine max
  Clone ID: 700955806H1
cacgcacgtctctctctctctctcgccatggctatggctatgcaaagcggaatcggagtctccaagatcctcatcatagcaggagcaggttacaccggcaccgtcctcatcaaaaacggaaaactctcggatttaatcggcgagcttcagttgctggtgaagggattggaaaaatctggggagcatgctgaaggtgaaggtgaatatgctgatgccatagctgctcaggtgcgtcgcctggcgaatg

SEQ ID NO: 20204 - DNA, 128 bp, Glycine max
  Clone ID: 700955807H1
cttctgataacacatttggccagataaataacatcaaatagtggcttctgggctatctggagttgttttcttttcaaatgttggatgtctaagagatgattgaagttaattgggaattgagataagta

SEQ ID NO: 20205 - DNA, 247 bp, Glycine max
  Clone ID: 700955809H1
gtctcgctcttcttctcatcaagcacagagttacagactcaccgatcttccgattctctttcgtcttggtttatgagctcgaaggagagacccactcttggtggcacgcggattaagacccgcaaacgaaatattgctgcgccgctggaccctgcagcattctcggatgcagtggtccagatttatttggataatgctggtgatctggaacttattgctaagagtattgaatcttcagaccttaact

SEQ ID NO: 20206 - DNA, 246 bp, Glycine max
  Clone ID: 700955810H1
cggcttttcaacatgatcaatgaactgccaacaatatttgaagttgttactggtgcagcaaagaagcaagttaaggagaagtcttcagtttcaaaccacagtggcagcaagtctaagtccagctctaagcgagcttcggaatctcaggctagactgccaaagccattgcaatcaaaagaagaggatgaagaactggacgatcaagatgacgatgaacatggagagaccttgtgtggggcatgtggt

SEQ ID NO: 20207 - DNA, 240 bp, Glycine max
  Clone ID: 700955772H1
cggctcgagatcacagtgaagcagatgctcctgggaaaagacttgctaaaccactcatattttgtcgatccgagagtgactgtcctatggaaaatggctatgcccgacctgttgagggtatctatgttcttgttgatatgcaaaacatggtggtgttagagtttgaagatcgtaaacttgttcccctcccaccggttgatcccttgaggaactatactcctggtgaaacccgaggtggct

SEQ ID NO: 20208 - DNA, 250 bp, Glycine max
  Clone ID: 700955732H1
ttcggctcgaggtgatttggagtttggagcgactgaactaatcattaatttgcactcgctgtttcagcttcatcacccttcttttgcatcatttatatctcttgagaaatggcacaagaaacctttctattcacatctgaatctgtaaacgagggtcaccccgacaagctgtgcgaccagatctctgatgcagtacttgatgcgtgccttgaacaggaccctgacagcaaggttgcctgtgagacatgca

SEQ ID NO: 20209 - DNA, 254 bp, Glycine max
  Clone ID: 700955733H1
gagagagagagagagagagagagtcctgaaacttgggtgcgattccttcactcacaacaacaacacatcactatggctcttctgagtcgagcctcttcacgcttccctcagctggtttcccctcaaagggtagtttcactccacacaacgctcccatctctgaacgcatccccatccacagccacgcctacaccatatgccccgccaccgcctccgtccgcttcctctcccgccggcgtttcgaaggcggcgga

SEQ ID NO: 20210 - DNA, 248 bp, Glycine max
  Clone ID: 700955734H1
gccaagtgaaagagagaagaaaagtcaaagacaatgtcagggatcattcacaagattgaggagacccttcatgtgggaggccacaagaaggaggaggagcacaagggtgagcagcaccatggtggagaatacaaaggggagcatcatggtgaacacagtactgaatacaaaggagagcatcatgttggtgagcacaagccggagcaccatggcggagaagagcacaaagaggggttcctagacaagat

SEQ ID NO: 20211 - DNA, 245 bp, Glycine max
  Clone ID: 700955735H1
aaagggtaaaatgcaggtcggtgcccattattttgaggaaggaaatgtgcagttagatgcaaaacatgaatgcaaagatgcaactctttttcaggcccctgaagattgtgcacttgccataacaagcattattcgtcaccatgaaacagagtaccttgcttctcttgaggcatcatatctaaaccttcctgattctactttcaaggatcttcggagaaagcttcctgtcacccgcacgttatttc

SEQ ID NO: 20212 - DNA, 245 bp, Glycine max
  Clone ID: 700955736H1
ctttctcatttcaaactccttcaagcaataatgaattctcgaatcaaagttcttctctgaagcagcagattctggagctagctaatagtcccagaacggtgaaatggatgaagagaataaggagggaaatccatgagcacccagaacttgcatatgaagagttcagaacaagtgctatcataaggcgtgagcttgacctgttgggtgttggttacaagtggcctgtggctgggactggtgtggtg

SEQ ID NO: 20213 - DNA, 243 bp, Glycine max
  Clone ID: 700955737H1
tctctctctgtgtgactaacataaaataattagagagagagagagagagagaggatatgggttcgaagaggtatgcgctattgatgtgcggtgaggattcggagtacttggtgaagatgcacggaggcacctatggggtattcatgaagttgctccaagagcaagaggaaaagtgggacctctacaagctcgtccaaggagagttcccggagcagcatgacttgcctctctacgatggctttg

SEQ ID NO: 20214 - DNA, 242 bp, Glycine max
  Clone ID: 700955739H1
ctccggtttatcattctttttcaatcaggtcaagtttgaacctgttaaaatttcgcttaaggattgtttggcatgcagtggatgcgtcacatcagcagagacagttatgctggagaagcaaagtttggatgagtttctgaacaatattaattcaggaaaggccgtgattgtgtctctttctccccagtcaagggcttctattgcttttcattttggcatttctccaattcaggctttcaaaa

SEQ ID NO: 20215 - DNA, 237 bp, Glycine max
  Clone ID: 700955743H1
cagaaaccgtctttttcttcttcctcctggttgcggcacaacaatggagcctggtcggtgacaagagttgcagcggaagagtcggtttccttcacagtgtattctgtgttgcttccttccttcctttgtgtatcagttgacgccaccatgccgtcagtgcaacggggaagcttctccaatcgccaaacccaattctccgagcggaggcagaagattatacaacagaggaagtctctt

SEQ ID NO: 20216 - DNA, 236 bp, Glycine max
  Clone ID: 700955744H1
aatatgctatagtcaaagaacttgccgagtctgtcagtcttaaggatggaacagttgttcttcagtttgagactcgccttcagaatggcctcgaatgtggtggtgcatatattaaatatcttcgaccccaggagagcggatggaaaccaaaggaatttgacaacgaatctccatattctatcatgtttggtcctgataagtgtggtgctacaaacaaggttcacttcattttcaag

SEQ ID NO: 20217 - DNA, 238 bp, Glycine max
  Clone ID: 700955745H1
gagataaagaattgcaatataacttcaaggagtatagaacaatcacttgacaattccaattcacgtctcatgttaaattataaggatgatgattccagagttgcacgcaaatcttttgatgatgttgaattcttatgcaaagatttctgtccatcttctctggatgacattgccgacatgagttggccactatgtcaagaatcagctcccacttctcactcgatgagattcactagaa

SEQ ID NO: 20218 - DNA, 248 bp, Glycine max
  Clone ID: 700955749H1
tttcctttctataacctatctgaaggctcaatctctgccacagaatccttagcagtcatagcatcaattctcatattactttgcttctgtttcagatcttcaagtatctaccttcttgactatgtttgttatatgcctcctgataatctgcgccttccttactctcatattgtagaacactttgaattgtgcaattttgaccctgaactcataggctttgaattgaaagtattggaaagatccggtat

SEQ ID NO: 20219 - DNA, 245 bp, Glycine max
  Clone ID: 700955750H1
cttttggatatatacttttagtcaaaatcaatatagtttctcccaccattcctataaatatatattttatgaacatgcttgaatcatagacaatagaaattgccattgcactcaccaagtatgcagttggcttcatatttgaattttcagtctgtgcattttctaattttgccccatctactagtttcagaccatgtttacaaagcttcacgagaacatggtattataattttattttcaatcac

SEQ ID NO: 20220 - DNA, 244 bp, Glycine max
  Clone ID: 700955751H1
cttatcttagctaccccatcacaacaaccacgatactatttctcatactctattaggcaaaaacaccaccaaatgggagaggaaaaggagcagcctaagaatgacaccgagaaaaagcccgaggaggtagcccccaagaaagacgacggacccatccctgtcgtttacaaactcgacttgcattgcgagggatgcgtcaagaagatcaaacgcacctgtcgccacttcgaaggtgtggaaaccg

SEQ ID NO: 20221 - DNA, 241 bp, Glycine max
  Clone ID: 700955755H1
ccacatcaacagccatgaaaaccacactcttctcactctctcccttattcctgttcctactcttctccctagtcgaaggactcacccccaaatgtgacacccaagaccatggctcaacccttgaagttttccatgtgttcagcccctgttccccatttaggccaccaaagccactttcatgggcagagagtgtccttcagctgcaggccaaggaccaagccaggctgcagttccttgccag

SEQ ID NO: 20222 - DNA, 241 bp, Glycine max
  Clone ID: 700955757H1
cttcttcccaaccactactactcactcactgcagatctcaattgcatcgctgtccatggctaccatcgttagcatcaaggcccgctagcatcttcgacagtcgtggcaatccaactgtcgacgtggatctgacttgctccgatggtacttttgccagagctgctgttccaagtggtgcatccactcggatttatgacgcccttgaattcagagatggcggatctgcactaccttcgaaagg

SEQ ID NO: 20223 - DNA, 74 bp, Glycine max
  Clone ID: 700955759H1
caaagtacaaattatatccttgaaatgatagatttcaagagagtaagcatcattggacacgatacgatattaat

SEQ ID NO: 20224 - DNA, 234 bp, Glycine max
  Clone ID: 700955760H1
cactttacaaagatacccaagtggaacttacagcaggcagttacccagattaacagagctgcacgccaacatttggagttcaaatttaaatcaatgaaatatcttatgcggtagaggtggtgcggccagccaaagctagcatgattgcacatcatttagatacaattttgtagtgattagaagtgagaatagttaaaatttctaatatgtgctgtatttgtgttcattcttatt

SEQ ID NO: 20225 - DNA, 237 bp, Glycine max
  Clone ID: 700955761H1
attgaatctcagaattctctaaaagagatctttttctgctctttgaagaaagaagggtctttgcttgattttggagatgtctctgctctcagatctcatcaaccttaacctctccgataccaccgagaaggtgatcgcagagtacatatggatcggtggatcaggaatggacctgaggagcaaagcaaggactctcccaggaccagttagcgacccttcagagcttcccaagtggaa

SEQ ID NO: 20226 - DNA, 239 bp, Glycine max
  Clone ID: 700955763H1
tcccaactcgccctcgactcacatccttgtccgattccgcgaacgagtcgagtgaatcgggttggtaagatctattctgtttcttcgtcatggcaaccggacaactattctcgcgtactacacaggctttgttttacaactacaagcaacttcccatccagcggatgcttgattttgacttcctttgcggcagggaaacaccatcagttgctggaataattaaccctggttctgaggga

SEQ ID NO: 20227 - DNA, 256 bp, Glycine max
  Clone ID: 700955764H1
attctgctccacgtgatatagagcaaagttgtttgactgataccagtttattgattttgatatccgaacacacattctttcagcaaataagtacggatatatatatgtaaaaaaatgaacaaaaaagctttgtccattttgatgcgcgccagaatgaagcccaacgatcgtacaagcctttctctctctcctattcctctaacaaacgcgaacagtcaaatgcagcagcagaattcccgccaaaacggatcgccag

SEQ ID NO: 20228 - DNA, 247 bp, Glycine max
  Clone ID: 700955766H1
ttgtactcactactgtgttcaccatggtgagcacaagccagagcacaaagaggggttcctagacaaagtcaaggacaagatccatggtgagggcggcgccgccgagggcgagaagaagaagaaggagaagaagaagaaggagcatggccatgagcatggccatgacagcagcagcagcagtgacagtgattaaactgctgcatcacctatatatttaaaaggtttatgggaccatagtagcgagggc

SEQ ID NO: 20229 - DNA, 239 bp, Glycine max
  Clone ID: 700955767H1
gtcaagtacagagaagaagaattgaagaatgtaagaggggatggaactggtgagcgcaaggaatgggataggatctatgattatgatgtctacaatgacttgggcgatccagataagggtgaaaagtatgcacgccccgttcttggaggttctgccttaccttaccctcgcagaggaagaaccggaagaggaaaaactagaaaagatcccaacagtgagaagcccagtgattttgttta

SEQ ID NO: 20230 - DNA, 242 bp, Glycine max
  Clone ID: 700955768H1
atcgaaatggaaatagacgggaatagagtggtaatcctaggaggtggcgttgcgggatccgtcgtcgctaaatctcttcaattccatgcccatgtcacactcgttgatccgaaggaatattttgagattacatgggcgagtttgaggtcaatggttgagccatcttttgcagagaggtcagtgatcaatcacagagattactttaccaatggcgacatcgttacgtccaatgccgtcaatgt

SEQ ID NO: 20231 - DNA, 234 bp, Glycine max
  Clone ID: 700955769H1
ctggccgccgggaccatggccggcgctgttgatctgtctttcagctcttccgcgaatctcgagatattcaagctcgatttccagtccgacgatcaggcactgcctcttgtcgcggagtgcccgagctccgaccgtttcaaccgtctctcgtgggggaagaacggttccggctccgaagacttcgctctcggcctcgttgccggtggaatggttgatggcaacattgacatctgg

SEQ ID NO: 20232 - DNA, 242 bp, Glycine max
  Clone ID: 700955770H1
aacaatttcccatgatcctgcaaatccttctgctaaggaaacaaagctcaagcctcaacagaattctgaagacaacaatgttcgagtacggaaaagcacaccttctagatcagccaaggatcctgctaggattccaggtagagagagtccgaggagatcaaatatggaaaataatttatcaaaacttgcaactccaactacttggtcagctagcaaatccaccaaagaagtttctaaaagtg

SEQ ID NO: 20233 - DNA, 235 bp, Glycine max
  Clone ID: 700955730H1
caaaacggcagcaatgaaaaagatgtcttctgctactagatcgctcaaaattgatgaaatggaagaactagatgaagaagactctgatgtgacagcagaagattatgatgcatcggattagttcagttaaatatttgcttaacatgatacatctaatgatctttacgttgctagcatcatgttgttgtattgtttgattacttagattgcaggttctgtacagaaagagcgcatc

SEQ ID NO: 20234 - DNA, 239 bp, Glycine max
  Clone ID: 700955771H1
tttgaaagtgagtgtggcgtaccgtgtacgtatctgcagaaagtgaatgaatggtaatgggggaagaagggtgcaaggtatgtgttacaggaggcagtggttacattggttcctggctcatcaagaagctactggccaagggctacacagttcatgcaactctcagagacttgaagaatgagtcaaaggttggcctcttaaagagccttccacaatcagaaggaaaactggtgctgttt

SEQ ID NO: 20235 - DNA, 245 bp, Glycine max
  Clone ID: 700955692H1
gttgcatgcaagcaaacagaaggtcactgctattgaaagcatgcttaggggtttggatttgtttgataagcatggttcatctgctctccggtcatcgagcttggatctagtgcaggagttgaccctccctcatctcgtgatccaccattccctgctgctgtcacagcatctaatcatctaactagctctttaacgacagaatcaactgcatctggtgccaataaagctagtaaccgatatggtgg

SEQ ID NO: 20236 - DNA, 246 bp, Glycine max
  Clone ID: 700955693H1
agggtatgtagctccagaagtatggaatagaaattttggcggaatttcgcagaaatctgatgtttacagctatggaatgatgctactagaaatggtgggagtgaagaagaatattaatggaaaagccagtcagacaagtgagtacttcccagattggatatacaacaggctagagcagggcatagatttgacaactgatggggtgatagccacacaagagaaagagatagcaaggagaatgactat

SEQ ID NO: 20237 - DNA, 246 bp, Glycine max
  Clone ID: 700955694H1
gccaccaaggctgagactccagtggctgcaaaagcttaggaattgaattgaacctgccataataatatatatacatatcgaccgagcgacgcagtcaaattgcattagttctcatcaaaatcatcattttctttcttctttcatgttttccacaatttcactgtgtttcatgtgattttgtctattgttattaggctgttctgcatcataattaatgataaaaacacatatgtatgtatgtatgta

SEQ ID NO: 20238 - DNA, 245 bp, Glycine max
  Clone ID: 700955695H1
tcaaggtgtagattgtctaaaactttctttatgtgaaagaatctttggatttaggatttttactctgtggactatagttggaatctgagtttgatgagatctatagtggagactggagaaggaaggaacttgacatgatttccacctgatgtcttcattctggaactgagcaaatgggctgttgtgtttcaacaagcagtcagagtacttgtagcagcgggagcaatggagacacgatcgctcca

SEQ ID NO: 20239 - DNA, 254 bp, Glycine max
  Clone ID: 700955701H1
agaaccggaagaggaaaaactagaaaagatcccaacagtgagaagccgagcgattttgtttaccttccaagagatgaagcatctgatgacttcaagtgaccaaatgcttcatctcttggagtcatcagattttctcgcttttggaatcaaatctgtatcccaagatgtcttgcctgtcttgactgatgcattcgatggaaatattttgagccttgagtttgataattttgctgaagtgcgcaaactctatgaag

SEQ ID NO: 20240 - DNA, 246 bp, Glycine max
  Clone ID: 700955702H1
acctagcaggacctaaggatggcatagccttaaagttaagggcgaggttcaaacgaagaaaggcttatggtggatacctaggcacccagagacgaggaagggcgtagtaagcgacgaaatgcttcggggagttgaaaataagcgtagatccggggattcccgatataggtcaacctttcgaactgctgctgaatccacgggcaggcaagagacaacctggtgaactgaaacatcttagtagccaga

SEQ ID NO: 20241 - DNA, 256 bp, Glycine max
  Clone ID: 700955703H1
cggctcgagagacagcacaattagagagaacacgcggcaaaggagtgccatatgatggtcaatcgtctaggagaagctcaaaggatcaccaagaatttaaggatgtatttgaggtctcagagattccaaaggtagagagccataggtatccatcacaggggtgtgcagacttgatgaccactgatgccggtatctcattcattgaacagaagttcatggatgccaaacgacttgcaactcatcaagacttacagtc

SEQ ID NO: 20242 - DNA, 244 bp, Glycine max
  Clone ID: 700955704H1
gagaatccgaggcgaagagaagagaaaaattaagatggaggggaaggagcaggatgtgtcgctgggagcgaacaagttcccggagagacagccgattgggacggcggcgcagagccaagacgacggcaaggactaccaggagccggcgccggcgccactggttgacccgacggagtttacgtcatggtccttttacagagcagggatagcagagtttgtggccacttttctgtttctatacatc

SEQ ID NO: 20243 - DNA, 245 bp, Glycine max
  Clone ID: 700955705H1
ctctctctctctctcttcgttcttttggagtgtgtgtgcacccattgatgacaagcaaccccattgcatggaagcctaagaggaggagaagacgaagaggacaagggtaactgaatcgccgcttctgcagcttcgttctttcgtttttgtttcatctttttagcttcagagggtaaataaaaaatggaggttttggtgggtcccgctttcaccatcgacgttccctcgtctccgccgcagcatgc

SEQ ID NO: 20244 - DNA, 242 bp, Glycine max
  Clone ID: 700955708H1
cgtccatcaaatgagacccttgcttctatctatgttgaagccattgaggtgggttaccgtcattttgacactgctgcagtgtatggaacagaggaagccataggcctagccgtggccaaagccatagacaaaggccttataaagagtagagatgaagttttcatcacttcaaagccttggaacacagatgcacaccgtgaccttattgtcccagctcttaagaccacattaaagtacatata

SEQ ID NO: 20245 - DNA, 242 bp, Glycine max
  Clone ID: 700955709H1
atagagttgcttttccaggatgggaggttcaggtggggtagacttgaaaacctgctagcccaggggagaatggacagggatttctctgcaaaagaggctttgcaacctgtcctgaaggtattattgagtccagatggtgaagaaatcagaaccctagttattaaggaagctgttcgtgtaactgaagcttttactcttagcacaatttctgatacatacaagtcagttcccgattttatgag

SEQ ID NO: 20246 - DNA, 239 bp, Glycine max
  Clone ID: 700955711H1
gcagagcagagatctagcgtattctctcgctctttctttcactgtcacagagccacatccatgggcttcccagccaacggcgcctctgcggcccagcccctaaacttcctcatctacggccgcacgggctggattggcggcctcctcggctccctctgccgggcccagggcatctccttccattacggctcgggccgcctcgagaaccgggcctccctcgaaaccgacatagccctcct

SEQ ID NO: 20247 - DNA, 239 bp, Glycine max
  Clone ID: 700955712H1
aaaaaagaaagcaaagggtaggcattgacccctttgcacaaaggaaaagaggggtggtgttgtgttaaaaaaatattgaacttggttggttctaagtagaaacaaaacttgtcattttcccatttctgcatttttggtttgggagaggagaaaccaagaattaagaaatgggttgctccgtaagagtttgttgtgtcttatttttggtgttgttggtggcatgtgttagaggggaggac

SEQ ID NO: 20248 - DNA, 240 bp, Glycine max
  Clone ID: 700955713H1
gaagaagaaagatccgtaaattaacattctctccctcccttcgctataatagcaagcttttcaagcatatttctggggtttggtcccttttccttgtttggggttttcttgggaaaaaagaagtaattaggtataataatagtataactaaagcaaaaaaaaagacagtaatatgggaaggggtagggttcagctgaagaggatagagaacaagatcaatcggcaggtaactttctccaa

SEQ ID NO: 20249 - DNA, 175 bp, Glycine max
  Clone ID: 700955715H1
ctcgagccgttgaattatgcgaccatgcatttccttggttggactttatttgatctgtttgttttagtatataagtgtttgatccatttagtctcggaataataaatgtgtcgtaagactaacattggagacaatcatgtatccaaatccttcatatatgagagaatattttgat

SEQ ID NO: 20250 - DNA, 252 bp, Glycine max
  Clone ID: 700955717H1
gtggttgaaagttaagaagtagcaaagatgtttccattcacgcacaagggtcaaaagataaaggggactatggtggttatgcagaagaatgtgttggatatcaacagcatcaccagtgttgacgggatcgtcggcaccggcttagacttcttaggcagtgcactcgatacagttacttttttagcctcctccatctccatccaacttattagtgctaccaaggctgatggtgggaaaggaaaagttggaaag

SEQ ID NO: 20251 - DNA, 247 bp, Glycine max
  Clone ID: 700955719H1
attaattctcgtttcccattcccatccccatgccaactattttgcataggattttccttctttacaacctcgtacactcattcctcctctgtctggtccccaagaaggtgcgtcccttcctccccccttcttggttccaaaccaaaaccatcactgcaccttcttcttcttcttcttcttcttccagtgcccgcatcatcaagagaacaacaatggaccccaacgagctgaagcgcgtgttccagat

SEQ ID NO: 20252 - DNA, 247 bp, Glycine max
  Clone ID: 700955720H1
caacacagagagaagcgtcttaataaacgctcttctctgaaaaacctgatttcttctcttcttctcttctctttcgtttcgatcttcgatctctgaaaatgagagagtgcatttcaatccacatcggtcaggccggtattcaggtcggaaacgcctgctgggagctctactgcctcgaacacggcattcagcctgatgggcagatgccaagtgataagactgttggtggaggtgatgatgctttcaa

SEQ ID NO: 20253 - DNA, 242 bp, Glycine max
  Clone ID: 700955721H1
taaggattaaggaggcataaaggaccaattgctttggaatattcactcatgacaaggcacaaggtcatgcgtgtatgccaacacatagtaatgatgtgtgtttttattcagtaggcaactggcagatcgggttttcccttgtcacttttgtataattattttggaagaatttatgatgtcaaagttattgtttaatattaatggcgacattgtatttattatttgtaaaatattcggactca

SEQ ID NO: 20254 - DNA, 243 bp, Glycine max
  Clone ID: 700955723H1
cacacaaacaccctttgagttcattaacctcttcagaaaaaacaacaacaacaacaaaaaaaaacatcatcatcaaaaaaacttccgagagtttaatggcaacacgcgtgatccctccaagaatcctcaagaagctccgttacaacacaacaaccaagccactcaacgctgcccacccctcaatctctccagtcatcgccccaccgtcactcttcgagaggtcgccgtcccctgtcgcggatg

SEQ ID NO: 20255 - DNA, 241 bp, Glycine max
  Clone ID: 700955725H1
ggggttcatagatttagggaatcgattactatactagtaataaattgtacaaaaaataaaaatataaataatataaatataaaaagaacaaacacaaattttatgtgattagtcgcggtatttaaaataaaaaatgaaagtagacaaataaaaaaggaaaggagatgtttgaataaaaataattccccttcaagttcttattttttgagaggacaggacaatatgaatgttttattatgct

SEQ ID NO: 20256 - DNA, 240 bp, Glycine max
  Clone ID: 700955726H1
cttttaagaacctagactagactagactacatcatcacctaatacccagaccatctcgccgcacacagcgcactgcagcgttgtgtcttcgcacgccgccgtcgacgtcgtccgccatcgtcacatctcgccggagcgtcgcgtcgctggctaagtgccaagtgctgctgctgattttgtggcttgttgataaaaatgagacttcataacacataacatgctgtcatcgaacataaaggg

SEQ ID NO: 20257 - DNA, 239 bp, Glycine max
  Clone ID: 700955727H1
gaagaaacataagagggagttataagatattcacagaagcagcaaaaatgcttatgcaacaagttcatgtatcaaatccaagttcatcttgtctcatccttcaaaagccatgcctccgtgacattactcacccttcttttcagctttggtcaaggccatcatcgttcccaaaccaaaggaagcaaaaaagggtttcttatggatgcaggagtaatggcaacaaaatcaaagctgtggct

SEQ ID NO: 20258 - DNA, 239 bp, Glycine max
  Clone ID: 700955728H1
attgcctttaccatctcagtctcaactctctccaacaaccacaatggctctcttgggcgccgcctcctcctccgctcgcatcattccctccgtctcactctcttcctcttctcgctccttcttctcactctcatcctcttcttccaaactccaatgcttgcgctcctctcctcgtatttcgcacctctttctcaatcagcgaagagcggaggttcgcgtttcgagtggaggatacggaa

SEQ ID NO: 20259 - DNA, 236 bp, Glycine max
  Clone ID: 700955729H1
gaaattctcgtcctcttcctacataagtcttctcttatcataaacgcgtgttgctcggataaggttgtgctgcggtgattcactcgtactttgcttaatatggcggttgagaagttgagcattgcaaaagatgtgactgaattaattggcaaaactccattggtatatctcaaccgcatcgtggatggctgtgttgccaaagttgctgcgaactagaaatgatggaaccttgctcc

SEQ ID NO: 20260 - DNA, 245 bp, Glycine max
  Clone ID: 700955691H1
gcccttgcacagagaaaagaagacagaagagcaaggttacaggctcagttttcacagatgaggcctgttgcaataacgccttctgttgcgccccgtatgcctctctaccctcctggtgctcctggtcttggacaacaatttttgtatgggcaaggacccccagccatgatgcctccacaagctggatttggataccagcagcaactagttcctggaatgagacctggtggtggtcccatgccaag

SEQ ID NO: 20261 - DNA, 250 bp, Glycine max
  unsure (1)..(250): unsure at all n locations
  Clone ID: 700955657H1
ctagggtaagagctttggcgagggaaaaaaaaagacgagaaattcacaagactacataccgaaaaaccctatttattgattcagagagggcagagcggacgccgatagagaggagctgccaacagagagcattgaggttccgcacaccacagcgaggaantgaccttcactgcttcaattttacaccctctctctgtttggtgatagattttgaatcaaattatgatattgctgcctctgccaacttcat

SEQ ID NO: 20262 - DNA, 250 bp, Glycine max
  Clone ID: 700955658H1
atggggtcagaggtgtctaaacagatggagcgaagaaagacaatccagacagagaagaagagtctgtccgatctgaaaagcagcggagaagactaccctggctccgactaccgtccccaagacagaaaaaactggatgtcccatctcgaccctcagaaactccgcatcaaccaaatcgtctggcccggcacccacgactccgcaaccaacaaaattggcatccctctcctcactcgccccttcgcccagt

SEQ ID NO: 20263 - DNA, 249 bp, Glycine max
  Clone ID: 700955659H1
caacaacttctccttcaccggtggcttccccaacaacatcacgaccttccctttcttcttcgagcttgacctaagtaacaacaaagtcagtggccagttccccacgcaagcgattcagaacaaccagttagtcttcctggacctcaggttcaaccagcttaccgggccgatagacccgaaactcttccagagggacctcgatgtgatctttgtcaacgataaccagttcaccgggtgcctcccggagaa

SEQ ID NO: 20264 - DNA, 246 bp, Glycine max
  Clone ID: 700955660H1
ctggttttgttttaggagaagactgaaagaagaagaagaagaaaattgagggaggatgtggctcgagattatcttcggtttggtcatttacagattgttccggcgcttcttctacgacgacgacgttttggacatcgaaggatcggattcttctgctcttttctccgtcgcggataggcttaaaaaactttacggagcaaatgtgtatgtgggtcttcggattcccgatgccgatactgcttctcg

SEQ ID NO: 20265 - DNA, 249 bp, Glycine max
  Clone ID: 700955661H1
caactactactactataggtacttactactttgcctagctcctctttctctctcttcccttttgcactgaacttcactctctcttctatatcaagggttgatcacataacctcaatatatttctaataataattgatatagtttgagttattgtttcgagacacacagatagagagagagagagagaatgggtagagggagagttgagttgaagatgatagagcacaagatcaaccgccaagtaacttt

SEQ ID NO: 20266 - DNA, 240 bp, Glycine max
  Clone ID: 700955663H1
gtgcatattcctgcgaactgcaaccacaacatactctacggaaacaatatacgtcgcgtcaagttctgggacccttacttcttcttcatgagacctaagcctgtgtacgaagttaccttccttgatccttatgccggatcagatatctgttaaggctgcgaggtactcgtccatttaagtcgccaaccacgtcgcatcaagtacttgatgatctgtaagggtataagtacacctggctca

SEQ ID NO: 20267 - DNA, 252 bp, Glycine max
  Clone ID: 700955664H1
atcaaagctgagaagtgtaatgtacaaagggttcacctctgagctatttgtgccatacatggatcccacacaagattggtactttaagacatacatggatgctggtgagtatggatttgggttgcaggcaatgccactagaccccttgaatgattgccccaagaatgcttactacatggatggtgtctttgcctcttccgatggaacaccatatctccaacccaacatgatttgcatttttgagagttatgc

SEQ ID NO: 20268 - DNA, 253 bp, Glycine max
  Clone ID: 700955665H1
agataataaactcaaacaaggtaagctatgtagttgccctccattcttccaccacctattttgaaacattctctctctctcctccaccacattttagggagcacccgcgcttctttctgcgacccacatcgctgttgtttatttgttcatttttggggttgtttatttgctggttccgtttttgttctttttcgtggttttacccttaaaaatcgcgcctttaccaaaaatttgacggataatttgtgggggc

SEQ ID NO: 20269 - DNA, 255 bp, Glycine max
  Clone ID: 700955666H1
aacttaccttatctcacccttctttgactgttctcccacaccacacccatgacactcctcctgctccttattctcctctttcacgcggcggaagccaagggacagtggcagctcctccacaaaaacatcggcattgtcgccatgcacatgcagcttctccacaacgaccgcgtcatcatcttcgaccgcaccgacttcggactctccaacctaaccctccccgacggaagatgccgcaacaacccaaacgagttg

SEQ ID NO: 20270 - DNA, 249 bp, Glycine max
  Clone ID: 700955667H1
ccatatccccccctagctacagagcagccaaaggggaggaataataataagcctatattctaaggccggaaaaataaaaaaggaataacaaaaatgtctggaaaggtaattatctcggctgtttctctcatcctggtggttggagtggccataggtgtggtggtggccgtcaacaagaagggcgaggatcccacacttcaatctcaacaaaaatcagtaggggttatctgccaaaacactgatgaccag

SEQ ID NO: 20271 - DNA, 247 bp, Glycine max
  Clone ID: 700955672H1
ccagacttcgaggttgttgataaaggggttgaggttcaagagacgaaagaattatatgacggagaagaatctgagaaatccatagaagtgaagtcagctacaagtgaggtcgtcaaggaaataatgcatgatcagttgcgcctgactagattaacagagcttgattcaattgccaagcagataaaggctctagagtccatcatggtagaagataacaagttcacaaaaggtgaggaagctgagtcac

SEQ ID NO: 20272 - DNA, 247 bp, Glycine max
  Clone ID: 700955673H1
attacactcacactctttgtgaaaaaggggagtttcttattctttctagacgcttccattgatcggcgatttcttagacatggcggacatcacgaacacgaggaagtgaagggtgagtccttgttggagaagatttctgggaagatccacgaccacgattcgtcatcttcgtcggattccgacaacgagaaaaccagcgcttctgactccttgaagtcaaaggttttcaggcttttcggcagagaaa

SEQ ID NO: 20273 - DNA, 244 bp, Glycine max
  Clone ID: 700955675H1
gcaaaaggagcaccgcaccgcacagcggatgcagagaaaaacctaaagtggcggaagatgacggaggtggcgagatcagtggtgcacgacgttttggggcaaagggtggtcgacgtggaccagccaatcgtcgattacatcgtaaacgtcctcgccgacgatgacttcgatttcggcctcgacggccaaggcgccttcgaagccctcggcgagctcctcgtcgccgccggctgcgtcgacgatt

SEQ ID NO: 20274 - DNA, 244 bp, Glycine max
  Clone ID: 700955677H1
ctctttcctatcacactttctagatagctagcctgtaagatatatatatagatatttcatatatatcctatggtccgtgagtgcccttgttctgtaccaaccctttcttccacatgttgagtttcagcatcgtcctctcttgagtccccatatcaaatacccaccgaattcaaccccccatataacaaatctcctcccatcccatttttcagcaccaaagtttgaaacttttctcaattgggtt

SEQ ID NO: 20275 - DNA, 246 bp, Glycine max
  Clone ID: 700955678H1
cgtcgtacggcgtcccggcgaaaaggcggtggaaagggctcgtagttgcggtgctcggtctcgtcattctctccatgctcgtccctctcgtcttcctgctcggtctccacaacggtttccactcttccggatatatatatgaacagaagagtactccttcgaatgagaaaagtcttgaaagatatgatagacatgatgttggccataatgagtctgaggaaggacaatcaaatcatgtggaggatc

SEQ ID NO: 20276 - DNA, 248 bp, Glycine max
  Clone ID: 700955679H1
caatttttctctcaaccggcccaatttagcataagcccagcatggccaccgcaacagcagcagccacctcgtccttcatggggacgcgcctcctggaggcccactacggggcggggcgggtgcaggcccggttcgggtttggcaagaagaaagccgccgccccgaagaaagtttccagggggtcgggcttcagctccgataggcccctgtggtatccgggcgccaaggcgcccgagtacctggatggg

SEQ ID NO: 20277 - DNA, 248 bp, Glycine max
  Clone ID: 700955680H1
tcctgccagtagtcatatgcttgtctcaaagattaagccatgcatgtgtaagtatgaactaattcagactgtgaaactgcgaatggctcattaaatcagttatagtttgtttgatggtatctactactcggataaccgtagtaattctagagctaatacgtgtaacaaaccccgacttctggaagggatgcatttattagataaaaggtcaacacaggctctgcctgttgctttgatgattcatgata

SEQ ID NO: 20278 - DNA, 255 bp, Glycine max
  Clone ID: 700955681H1
aaaagttattaagagcttttgcttttctttctgcgcgcttttcccaattaagtagttcttccttttctcaaagcaaaaaaaatgttcatcgagagtttcaaggttgagagtcctaacgtgaagtacacagagactgagattcagtccgtgtacaactatgaaaccactgaacttgttcacgagaacaataatggcacttatcagtgggttgtcaagcccaaaactgtcaaatatgaatttaaaaccaacacccat

SEQ ID NO: 20279 - DNA, 253 bp, Glycine max
  Clone ID: 700955682H1
gacggaataaaagatgaccctttcggaaatcagtgggtggctgtatttgagtacatagtgcggggcatggcaggacttcaagggcctttctattgcggaacaaacaccttccatagaagaaaagctatttatggtgtttatcctgatgaaactggaagcaggagaaatggaaaattagaagaaaagatattgatacaacaatttggaagtttagaggagtttgtcaaatcagcagctcatgctatggaaggga

SEQ ID NO: 20280 - DNA, 251 bp, Glycine max
  Clone ID: 700955683H1
tggtcaagttgcatcagatcgtttggggccaggaaagatggaacttggtcttggaattcatggagaacctggggcagctgtggctgatattcagcccgtaaatgtggtggtttctcatgttctacagcaaatattgtccacggaaacaaactatgtaccgataactcgaggagaaagagtggtccttatggtcaatgggttaggtgccactcctacaatggaactaatgattatagctggaaaaacagttc

SEQ ID NO: 20281 - DNA, 251 bp, Glycine max
  Clone ID: 700955684H1
cgccgtcgcacacattcggcgactcctcgacatcgtggcctgcaccacctccttcgcctccgcctccgccgccgcagcagcaaaaccccccgccggaaagtccaaagaccccaacgaacccggttcagaaaatggacccgaaacaaacccgaaacccaaacccgtggatccgaattcggacctggtcaatgccaaaagcgacaaagctgacgctgacatctctatgtgtccacctcccaggcttggacagt

SEQ ID NO: 20282 - DNA, 241 bp, Glycine max
  Clone ID: 700955685H1
tttcccctagattcagccacagtttcggaggagaagaaaatagtcgttcgagatggcccgtacgaagcaaactgctcgtaagtccacaggaggaaaggctcctaggaagcagcttgcaaccaaggctgcacgtaagtctgcaccaactactggtggtgtgaagaagccacatcgttaccgtcctggtaccgttgctcttcgtgagattaggaaataccagaagagtaccgagcttttgatc

SEQ ID NO: 20283 - DNA, 250 bp, Glycine max
  Clone ID: 700955686H1
ctcgagccgatcttgcacacacgggtacttcctccaaaccaacattatgaaccctactcttttcactaaaccctcttcttcacttctccctctttcaattcccagttagttccaaccgcttccttcgcaaaggttttcgaataatggttagtggagctctcaaaacgactgagaacagtcttcacaagcaagcttctcaggtttccgatgccaatgatgcagttgctgaccctgatattcctgcaaagag

SEQ ID NO: 20284 - DNA, 247 bp, Glycine max
  Clone ID: 700955687H1
gttccatcaatgattattgatgaatcaccacaaaaaacagaacgaggagagattaaaccacaaaatcctcctctgcaagatcagataccggatccagaacactcggaagctcaacattcagctcctaagtcaccagctgtttcttcatccaaatctgaggataggggagatgccaatttagatacttcaccaaaggctactaatcatgagatgaaccaagcaatttctgagaaccccgattccaaca

SEQ ID NO: 20285 - DNA, 251 bp, Glycine max
  Clone ID: 700955656H1
aaaaaaccttcatatacttgaaataatattttatccttgtgtcttatattggacttacattgccatttgacatatctgcctgaaatttgcccattgtgaagcactttaattttatccatttttaaatcgtagttgtttcaactaacaagttatgttgttcaaggtttctgttatattctgttgtttctgacgtgtgtaatgggttgtacatttcttatgtgttttgcttttctgtattcttattcttgtgt

SEQ ID NO: 20286 - DNA, 250 bp, Glycine max
  Clone ID: 700955688H1
atggccacctctgctattcagcaatcagcattcgcaggtcaaactgctctgaagcagctcaatgagttggtccgcaagaccggtggcgccggcaaaggtcgcaccaacatgcgccgtaccgtcaagagtgctcctcagagcatttggtatggccctgatcgtcccaagtacctgggtctattctcagagcagattccgtcatacctgaccggagaattccccggtgactacggatgggacactgctggac

SEQ ID NO: 20287 - DNA, 251 bp, Glycine max
  Clone ID: 700955614H1
atcgaatttctcattccgcagaaaccttcaacgatggccgctgaaacgattccctaccagaacggcgtcgttgccagctccaacgattccaccgccacgggcaagaaatcgcgggagaacgaccgccgccgccgccgccggaagcagaagaagaacaacaaggcatctgaggccccggttcctaactcttccgaagagagtgacgatgcgaaagagaacaacgattcaaaacagcttgttgaacaaattga

SEQ ID NO: 20288 - DNA, 248 bp, Glycine max
  unsure (1)..(248): unsure at all n locations
  Clone ID: 700955615H1
acggagccctctcttcaggtcaccatctagactgcaatcatggctgatggaccacagcatccatcagttgttcagaagctagctggacagtcttacctggtgtccaggcttagccccaactttaactctaggaattattctgcaactggttcttacgtcaatggcggactgcactcgcctgggttggctgttggctcacctgtatctccagttactntgcatgctncagcagagaaaggagtgagtgg

SEQ ID NO: 20289 - DNA, 236 bp, Glycine max
  Clone ID: 700955616H1
gaaatatttgaaaaaggccaagaatccttagcaccaaatataactcgcaatatttgtttttccactgaccaacaatggtgttgttgtgccctttgtttggaagacaatattgaatcttttaaagaaaactaaattatttttaatagaaagttgaaaaagggtttcaaccattgtgtataagatgaaaaacaattgttgtctattaaattaatcttaattttggtatatatatattt

SEQ ID NO: 20290 - DNA, 141 bp, Glycine max
  Clone ID: 700955619H1
gttgtggttagttactgtatgctgctttaatggataggaagatagacaaccatcgtttcagttagtgcaaacaactcgtgttgttgtattttgtaggctggtaatttgggaaaaccatacatgaacaaataaatcccttac

SEQ ID NO: 20291 - DNA, 255 bp, Glycine max
  Clone ID: 700955620H1
aaggcttatggtggatacctaggcacccagagacgaggaagggcgtagtaagcgacgaaatgcttcggggagttgaaaataagcgtagatccggggattcccgatataggtcaacctttcgaactgctgctgaatccacgggcaggcaagagacaacctggtgaactgaaacatcttagtagccagaggaaaagaaagcaaaagcgattcccgtagtagcggcgagcgaaatgggagcagcctaaaccgtgaaaa

SEQ ID NO: 20292 - DNA, 253 bp, Glycine max
  Clone ID: 700955621H1
ctcgagccgaatcggctcgaggcgacgacgatccaagtgatagacactcgtcgcgatggaaagtgtagctgaatccgagcgagctctgtacccatacgtgactggatcctctgtagtcgctatcaaatacaaagatgggattctaatggccgctgacatgggaggttcgtatggatctaccctgcggtacaagagtgttgagcgtatcaagcctattggaaagcattctcttcttggtgctagcggggagata

SEQ ID NO: 20293 - DNA, 252 bp, Glycine max
  Clone ID: 700955623H1
atcactttaatcacgcactatcagtacaacaactcactcactaagctaaacaatttcatcaagcctgccatggcttcctcgtgtgcttcctctgccattgcagctgttgccatctccacaccaagttcccagaagaatggatcactcttgggaagcacaaaagcttcttttcttagtgggaggaaactgaaggtgaacagttttacagcaccagttggagcacgatccagcactacagtgtgtgcagttgct

SEQ ID NO: 20294 - DNA, 240 bp, Glycine max
  Clone ID: 700955624H1
ttgcgagttgcagagagagcaatgagtcaggaatcgtttatatagagcttcgtggctcgggggacgatggtgttagccgagtacaccgagttcactgggaacttccctgcaattgcagctcagtgcctccagaaactaccctcttccaataacaagttcacctacaattgcgaccaccacaccttcaattttctcgtcgaagaggttacgcttactgtgttgttgccaaggaatctgtta

SEQ ID NO: 20295 - DNA, 252 bp, Glycine max
  Clone ID: 700955625H1
ctcgagtcaaaggttaatgagaccaaggccatggtgaagttccagcttaagaaggtgctttgcatgggagtagccgtggggaatgttagcatggaggaaaagcaaatcttccaaaatgtacaactgagtgttaacttccttgtctctttgttgaaaaagaattggcagaacgttcgctgcctgtatctgaagagtaccatggggaaatcgtaccgtgtcttttgaggagttgttcttaaattcagtgaattt

SEQ ID NO: 20296 - DNA, 250 bp, Glycine max
  Clone ID: 700955626H1
gcgatttctccgatcaaagttcctcactttctctcccttgatcgacacccaccacgcgttagagagagaaaaaaaaccccgagagatcggaaagatgggtacgcttcagtcttggagaagagcctacggtgccatcaaggataccaccaaagtgggtcttgcccatgtcaatagcgattacgcggatttggacgttgccatagtcaaagccacgaaccacgtcgagtgtccccccaaagagaggcacctc

SEQ ID NO: 20297 - DNA, 248 bp, Glycine max
  Clone ID: 700955628H1
ccgacagaatttgaaaacaaaggctgaaatttgaagaaactgagatcattgggtgtgaaatatatggcagaggttgtcttgctagtcgatgatttgaaactactttctgcgattcctcgctgtagaatttgtcatgaagaagagtttgaaagcgtagaaaccttggaagcaccttgtgcttgttctggaaccgttaagtttgctcatagagattgcatacagagatggtgcaacgaaaaaggaaatac

SEQ ID NO: 20298 - DNA, 250 bp, Glycine max
  Clone ID: 700955629H1
atttgctttgtgctcactcatctatctattataaccaaacactcttcttcatattcttcttcttcttcttgttcttgttctatctgtgacgagcatcatggcctcgagagcagtgctattgttggctatgtgtgtgcttccggccatggttgtggccattcgcccagcaaagaaccctttttgcgtgaagggtcgcgtctactgtgacccttgccgtgctggttttgagacctcagcaaccacctacatt

SEQ ID NO: 20299 - DNA, 249 bp, Glycine max
  Clone ID: 700955630H1
ggaattgtagttaatattccaactagattgacaggagatggacacagtgttggggagagtggtaccgggctgagggacgagtacaaaagcaggggtttcaatccggttcgagtcactcctttgtggaatttccggggtcactctggaattgctcttgtggaattcaacaaagactggtcaggcttggataatgcgttggcatttgaaagggaatatgaattagatcatcatgggaaaaaggactggttt

SEQ ID NO: 20300 - DNA, 253 bp, Glycine max
  Clone ID: 700955632H1
gatgaaatcaactccaatggaaatgcaacgaaaatcaagagtcttgatgagcttgatcctaagatacagaacattgtattgctaagtgacgcttatggggctgaaggtgaactgggtgtggttttatctgacaagttcattgaacatgatgcttactgtatgtttgatgctttaatgaatggggcacgtggttcaattgcaatggctgatttcttctcttattctcctttgcctgggtcccatactggcttgc

SEQ ID NO: 20301 - DNA, 257 bp, Glycine max
  Clone ID: 700955633H1
gttgaatattgttgtctggtatatataagattaattcatgtcatgttttgtaggtacttgcagtctcctcctctagttgcatggtctaaatgcacattacttattggcgctgttcagtgttctttgtaaaatttgtgagttatttggaatttcattgttgaacgtagcgcaaatctgaatgatctgatcttgagcttgagcttagagtaagtactagtgtgtagttgaattgtataaggtacatttggagtttgcat

SEQ ID NO: 20302 - DNA, 251 bp, Glycine max
  Clone ID: 700955635H1
ctcgagccgttctagagccgtgctggctgttaaggatggaaaccgcgttgttgctgaggacatgtcctctgatcagacaccatttaggagagatgagtatgagagagtgaagctttgtggggcgagggtgttaagtgttgatcaggtggaagggcacaaggatccagatattcagacatggggtgatgaagagaatcagggtgatgatcctcctaggttgtgggttcagaatggaaagcttcctggagctg

SEQ ID NO: 20303 - DNA, 252 bp, Glycine max
  Clone ID: 700955637H1
gtttacatttcagcgcgcatcactttctctctccgaaatgaagcagtctcttctgctgagaggcgaaagcagtgaccagagttaccagtcgcggggaatattccggcgctccgatgctatcgcctacggctccaactacgagaaagccgctgcgttcatcgatctggctgaagatggtgttggtctccctgaggaaattctcgactcaccaaacttccaaaattacataagattttattttatattcactaa

SEQ ID NO: 20304 - DNA, 249 bp, Glycine max
  Clone ID: 700955640H1
cggagttaatgttccgagaggcgtggctgtttcctctgttgaagaggtcagaaaggccatcaaggaccttttccctaatgaaaatgagttggtggttaagagtcaaattttagccggtggaagaggtttgggaactttcaaaagcggccttaagggaggagtgcacattgttaagactgaccaggttgaagacatagctgggaagatgcttgggcagatactagttaccaaacagactggtcctcaggg

SEQ ID NO: 20305 - DNA, 250 bp, Glycine max
  Clone ID: 700955641H1
gaagatgctgataaaagtgaagacgaagaaaaaaagcccaagacaaagacggtgaaggaaacaacttatgaatgggaacttttaaatgatgtgaaagctatatggctgaggaatccaaaggaggttacagaagaagaatacaccaaattctaccactctcttgccaaggatttcagtgatgagaaacctttagcatggagtcatttcactgctgagggcgatgtcgagttcaaggcagtcctgtttgtac

SEQ ID NO: 20306 - DNA, 250 bp, Glycine max
  Clone ID: 700955643H1
cgaaaagaaaaggggaaaagaaaaatgaaaaatagcacaaggccaaaaatatcacctgatctgaaacttggacacgaaagaaaggctcgtatgcgcgacttctctctcttgcattgattcaacgttgtccattctccgaaacatcacaaagaaacccaactgagagagtgaagaataagaagaataaaaagaagaagaagggacgacaacaatggggggtttcgcaatgggttctgccttcgattccaaa

SEQ ID NO: 20307 - DNA, 251 bp, Glycine max
  Clone ID: 700955648H1
tattattcaagccacgatgactgagcttgccaaactctttcctgatgaaatttctgcagaccaaagcaaagctaagattctcaagtaccatgttgttaaaacaccaaggtcggtttacaaaactgttccaaattgtgaaccttgtcgacccattcaaagatctcctatagaaggtttctatttagctggagattacacaaaacaaaaatatttagcttcaatggaaggcgctgttctttctgggaagcttt

SEQ ID NO: 20308 - DNA, 258 bp, Glycine max
  Clone ID: 700955649H1
caaagttttcttctttcaaaacatttctcaaaccatccaacttcaattcaacaaccaccccttgcaaatttggctcaaagggggttcttttctctttctctgtcaccgctttccttcgtcgtaagtcaccgcgtgcgcttcgcatcacccgcttctctctgcaaatgtacatgtactgctttggcacccttttgtttggtttttcaggaaaaggctttagtgtgcaattcagcttgagcatgcggagtcataactgtt

SEQ ID NO: 20309 - DNA, 253 bp, Glycine max
  Clone ID: 700955651H1
gtgggcaaaaattgaagatagggatcagtgacagagagagataacaaacgaggtgaaatccctcacgttgaattgttctttcactccacttccctttttttgtgaatcccttcgaaattttcctttttttttttttgtataattgacgtgggttttggtcctgttgctatgctacggttctgattttcgattttcttgaaaaaaatgaattttagggattttactgagtaatggtaattgtagtctctacatg

SEQ ID NO: 20310 - DNA, 253 bp, Glycine max
  Clone ID: 700955652H1
aagattctgaacataagagttcatagaagagcatctcattggcaggtatggttgaatttattgggttgatcaaggtcaatgtggttaaaggcactaaccttgctatccgtgatgtaatgagtagtgacccttatgtcatcatatctcttggtcaccaatcagtgaagacacgtgtcgtaaagagtagtttaaatccaaattggaatgatagcttaatgttgtcaattcctgcatcacattccacctcttaaag

SEQ ID NO: 20311 - DNA, 251 bp, Glycine max
  Clone ID: 700955653H1
gctagaaaaagtacgttgagcaaatttggaagtagtactgctcagattgttgaaggggtcgacttcaatgtccaattatgaattctgatgtgattcatggatgcaatttaatttaaagttgtgctgttttaggattttatatattttgtggttctacgcttgattgattttgaacctactaatgtctgttccatatgtatggtcaatgattgtagttcatgacaagtgaaaggaattattgtgagttttaa

SEQ ID NO: 20312 - DNA, 249 bp, Glycine max
  Clone ID: 700955613H1
ggagcagaagaaggcaaagatagtggcagagctccaagctgtgaagcacaacagtggcaagtcctacaatcagttagcggaggagactggactcaccaacgtctatgttgctcagcttctcaggagacaggctcagctcaatccccaaactgcccctctacttcgggcagcgctgcccgacctgccccaagaccttgtttctgagatgatgagaccccctttgaggtcttatgaccctaatctcatcca

SEQ ID NO: 20313 - DNA, 250 bp, Glycine max
  Clone ID: 700955572H1
cattaattcacatagtttgtttcttgtcccattaccgatattcaaaagatgggcatccaacatgtgctggttttgccatttcctgctcaagggcatgtcaatcctctgatgctcttgtcaaaaaaaactagctgaacatggcttcaaagtcacttttgtcaacacagatttcaaccacaagagagtgttgagtgcaacaaatgaggagggatcagcagtgagattaatctcaatcccagatggtttaggc

SEQ ID NO: 20314 - DNA, 246 bp, Glycine max
  Clone ID: 700955574H1
ttttgttatctcttcttccacaaactttcggagttttctttcgttaattaataaaatctttgcttaattaatttgtccttcctggaggggcaattaattaattaatctctggtgagtatttataaatatggagagcctggaagaaagagtgtttatgttcatggatgaacaatattatttttccaattccaatgaatcagagctgcatatgcatcatcatccctctgtgtctgtggagaacatatc

SEQ ID NO: 20315 - DNA, 246 bp, Glycine max
  Clone ID: 700955575H1
caaaaggaatcaaccctccatctcgtgcttcgcctcaggggtggcatgcaaatctttgtcaagactttgaccgggaagaccatcacccttgaggtggaatcctcggacaccattgataatgttaaggccaagatccaggacaaagagggcatccccccagatcagcagaggctgattttgcccggtaaacaacttgaggatggaagaacccttgctgattacaacattcagaaggaatccaccctt

SEQ ID NO: 20316 - DNA, 244 bp, Glycine max
  Clone ID: 700955578H1
gcagaggccactcaagagaaccattgcaatcgccaagcaacgcgcgtgcttttcctctctcctaccctccgccgctgccgccgccgccgccgataccgtcgcgcctccgcagctccccccgttcgatcaccagccgcacccttacaacggtccctccgccgatgaagtcttcgccaagcgcaaaacgttcctcggtccttccgtcttccactactataagaaacctctgaatatcgtggaaggg

SEQ ID NO: 20317 - DNA, 241 bp, Glycine max
  Clone ID: 700955579H1
gtcagtagtatgtggaagttgaagatagcagaaggaggagatgggttaatctctgtgaacaatttcattggacgtcaacactgggagtttgatcctaatgctggaactccacaagaacgtgctcaagttgaaagggtacgagaggaatacaaaaagaaccggttttgcattaagcaaagcggtgacctactcatgagaatgcagctcacaaaggagaaccgtgtgggcccattctagcaag

SEQ ID NO: 20318 - DNA, 252 bp, Glycine max
  Clone ID: 700955580H1
gttgagtagttcttcatcatagtcttaaacattaaaccttagcaaaactcaacaatgctagacatcaaaggctacctcgtactcttcttcctatggttcatatcaaccattctgatacgttccatcttcaagaaaccacagcgtctaagactcccaccgggtcctccaatttcaatacccttgctgggacacgcgccatatctccgttcactgctccaccaagcattgtacaagctatcactgcgctatgga

SEQ ID NO: 20319 - DNA, 266 bp, Glycine max
  Clone ID: 700955581H1
atccgcagctgcttttattcgcaccgcaaacagtgagccatggccgtcggaaagaacaagcgcatctccaaggggaagaagggtggcaagaagaaggcagctgatccctttgccaagaaggattggtatgacattaaggctccttctgtttttcaagtgaaaaatgttggcaaaaccctcgtctctcgtactcagggtaccaagattgcttctgaaggactcaagcatagagtgtttgaggtctccttggctgatcttcaagggga

SEQ ID NO: 20320 - DNA, 252 bp, Glycine max
  Clone ID: 700955582H1
gggagctcattgaagagacaaaaaacaatggctgaaacaaagttgagcatgatgaaggacaaaagatggtcactccgtggaatgactgctctcgtcacaggagccacccgaggcatagggcatgccattgttgaagaattggcagactttggagcaactgttcatatatgtgcacgtaatcaagatgatattgataagtgtttagaagagtggaaaaacgagggacttaatgtgactggctcagtatgtgat

SEQ ID NO: 20321 - DNA, 257 bp, Glycine max
  Clone ID: 700955583H1
ctttactgacctttttgatttctttccgttgactgcattggttgagtccgaaatattttgtttgcatggtgggctttcaccttcaattgagactcttgataacataaggaacttcgatcgtgttcaagaggttcctcatgaagggcccatgtgcgatctgttgtggtctgatccagatgataggtgtggctggggaatttctcctcgtggtgctggatatacatttggccaggatatatccgaacaatttaatcaca

SEQ ID NO: 20322 - DNA, 254 bp, Glycine max
  Clone ID: 700955584H1
ggaatcaatcaatccctcatctcattgctgagatctgcaagctggctatggactacgaaccctacgacagtagcggaactgatgatgaccttccaccaacccatcaaaacagaatttccaggggaggaggaggacgtctcgctgggaatgggagatctgctgttggttcaattccttacccaaggatgtatggtgaaattgatatggagacccaaattcatcagcttgagcaagaagcatacagttcagttcta

SEQ ID NO: 20323 - DNA, 246 bp, Glycine max
  Clone ID: 700955589H1
cgaggagtgagaccggatcagcaattggttaagattgtacatgatgaacttgtacgattgatgggtggagaagtttctgaactggtttttgccaaatctgggcccactgtcattttattggctggacttcagggagttgggaagacaacggtttgcgcaaagttggcaaattatctcaagaaacagggaaaaagttgcatgctagttgctggggatgtttacagacctgctgctattgaccagctt

SEQ ID NO: 20324 - DNA, 246 bp, Glycine max
  Clone ID: 700955590H1
caaatcttgatgttttcagcaacatttcctgttactgtaaaggatttcaaagataggtatcttcgaaaaccttatgtcatcaaccttatggatgagctaactctgaagggtattactcaattttatgcattcgtggaagagagacagaaagtccactgcctaaatactctattttctaagctgcaaataaaccagtctatcatcttctgcaattcagtgaatcgggttgaacttcttgccaagaaa

SEQ ID NO: 20325 - DNA, 244 bp, Glycine max
  Clone ID: 700955591H1
ggactaatcataagagggtgggcgcctcaagtgttgattcttgaacaccaagcgattggcacgtttgtgacacattgtggatggaattcaacgttggaagcagtgactgcaggggttcccatggtcacttggcctattttcgccgaccaatttttcaatgagaagttggtgattgaggtccttaaaattggggtacctgttggtgctaaaacatggcttggaatgcagggagatagtatttcat

SEQ ID NO: 20326 - DNA, 246 bp, Glycine max
  Clone ID: 700955593H1
tgggtgctctggatcacatctctgagctctttgactgctcccataccagctccaagctcaagaagaagcgcaaacaattccagacggtggaggtgaaagtgaagatggactgcgaagggtgtgagagaaaggtgaagaaatcggtggagggaatgaaaggggtgacagaggtggaggtggatagaaaggccagcaaggtaactgtttccggctatgtggaaccctcaaaggtggtttctcgcatcg

SEQ ID NO: 20327 - DNA, 244 bp, Glycine max
  Clone ID: 700955594H1
tgataagcctatggcggtggtaaaggccgttgtcgttcctcacgcccttatggttttgtaaatcaccggcatcgcgtctattacagctacatgcttatgaatggcgtggcgcgagcttggaaagaagagaatatagatgaatttgactagagctttgtcgacaacaccatttagacatgtggcaggatcaaattttgcatccatctttactgtgcaatctgtttgtgcatcagcaagatgtgtg

SEQ ID NO: 20328 - DNA, 74 bp, Glycine max
  Clone ID: 700955595H1
cacaaactttaaagatgcaaaggggaaaactaggctagctaaagatttctagcatttgtttgtatgactagttg

SEQ ID NO: 20329 - DNA, 259 bp, Glycine max
  Clone ID: 700955602H1
cccgaaactcatcaacagcccaagaggatgtgaagctaggcacttgctgaggaggaattttcgcagaaacttgttgtgcactcctattaggaggctccgagtgacttttttcattgtctttgaatcacctgagaaaaaggaatctctgcagtttggagagctggaatggcttacagatgtgggtattttcggcgaacaatttgctcaggaagccttggctgcagctgaagtacctcagcttcccgaaactcataacagt

SEQ ID NO: 20330 - DNA, 256 bp, Glycine max
  Clone ID: 700955603H1
ctttcgcaaacctaattactgctattacgagacgacgcagatttagttcggattgttcgattgcgatggctaggaagatgcttatcgatggtgaagctgaattggctcaaggtggtggagaagaagtgtcgaattttgacttcgacttgtttattattggggctggaagtggtggcgttcgtgccgctagattttcatccaattttggagctaaggtggggatttgtgagcttccatttcatccaattagttcaga

SEQ ID NO: 20331 - DNA, 256 bp, Glycine max
  Clone ID: 700955604H1
ttaaaaatgaaaaatatttactgttttttgtaatttttttattctgtttaaattttaaaagtattgcctccacaaggtgaaaattcaaaaaaacctggggctgctcataatgttcgactatattcaattgcttccacaaggtatggggacttttttgatggaaaaactgccagcttgtgtgtgcgtcgtgctgtttattatgatcctgtgacaggaaaggaagatccttccaagaatggcatttgtagcaattttt

SEQ ID NO: 20332 - DNA, 253 bp, Glycine max
  Clone ID: 700955606H1
gagaaattcaaattcaatgcaaagaaattagatttttgaacgaaagctacgaactttaagttcatggaccgcttgcgtcctaggaatcgagcggtcttttctggatttacaaatgccgagattgagaaaatggagaaattgttaagggaacctacagggggatcattgggcagggaattttaccaaaaactggctcgaagtttcaactattcctctggtcgtgctgggaagcctatcataaaatggacagaga

SEQ ID NO: 20333 - DNA, 252 bp, Glycine max
  Clone ID: 700955608H1
cttctttcataaactaaaattagcttatgcacaagttaaaaccagatttgggagaagctaataggagagtttttacaaattagcttatgcaaaagctaattttagctcatgagaaaacttattttatttttcattcttattttcttctcttaaataagtgttcatggagaagtttatccaaaaaaggttctgctctgtttattttctgaatttctgttaaagcaagcaaatagttctaattgcactgcttat

SEQ ID NO: 20334 - DNA, 247 bp, Glycine max
  Clone ID: 700955609H1
tttttgaagtagatcaggaagagttcctggtgtgggcctggtacatctcccactttccttattacctgggccatttcctgaaagtcattggaagcaagggtgcgaattagctcctatatttaatgaacttgttgatcgggtgagtttggatgggaaatttctccaggaatctctctccagaactaagaatgcggatgaatttacctcaagacttttagatattcattctaagatgctacagattaac

SEQ ID NO: 20335 - DNA, 252 bp, Glycine max
  Clone ID: 700955610H1
catcatacaacattctaggaaaatatagaagggatgttctccttggcattgggggcctttacggtgcatctgctcttagcaacaccaaccctttagccatggctgcagctcctattcttcaacctgacctagaacattgttgtataactgatgatgtaccacctaaaggggtcatcgaggcacaagtctattgttgcccaccaagatcttcttgccctcctatagatttcaagttgcctaaaggaacacccc

SEQ ID NO: 20336 - DNA, 249 bp, Glycine max
  Clone ID: 700955611H1
gggaaagcactgtgaagttccctggcatttctgttagagggggtggtattaacctgcctcataacacactggcaccttgtaccacaccaacagagattggtggtaactgatctaagttgtatcttttatctttttctttgttgtatcattttcttgtgtgaataccagttgtcttcaaatagcaatgagaggagcagcacttcaattctttgaatgtgaactgtaacttactaggatactaatactcat

SEQ ID NO: 20337 - DNA, 249 bp, Glycine max
  Clone ID: 700955612H1
ggtgtgcagaagagcgtcgcagttgtaaccctaatcagaagaagcgcacttcaagcgagtgacagccaccagccatgggtcgtatgcacagccgcggtaagggtatatcctcttctgctttgccctacaaaaggacacctcctagctggctcaagatctcttcgcaagatgtcgaagaaaatatctgcaagtttgcgaagaaaggtttgaccccgtctcagattggtgtcattctcagagattctcacg

SEQ ID NO: 20338 - DNA, 250 bp, Glycine max
  Clone ID: 700955569H1
ggcgttagtcaagaatccggtgtgctcctcgatttggcatcccacgtgaaccgcttcgccttcgattccttccgttccgactacaacaacagcaacacccttctctccaatttctcgcaattcaacaacacaagaaccggagaagcggcagtcaaacgcagcgtttcgctggggctgaaggttgggggagcgagtgtgcggtttaggaacattctcaatgacttcaacagagccgttaggtttcactgcg

SEQ ID NO: 20339 - DNA, 78 bp, Glycine max
  Clone ID: 700955534H1
ggcagaggcaggttcttctgcattagagaacaaggggtataggattctcatcattcaaccaaatgaccgtttgaggct

SEQ ID NO: 20340 - DNA, 263 bp, Glycine max
  Clone ID: 700955535H1
gtccgtcacattcattattcctggttccgtttcttcccaccaaacgaacaacgatgacgacggcgtttgagcgtcacgcgcttcctctgtttctgtttctgtttctgactccgattatcaatgcctccattcacgactactccaacgaacccttcactcatcgctccgacgccttcttcttccacggcggcagcgaggccctcttcgccaaatccttcatcaggttcgaaacggtgacgtttgcgcgtcctcgcgagtccgcg

SEQ ID NO: 20341 - DNA, 260 bp, Glycine max
  Clone ID: 700955536H1
ggtggacaatgtcttgatacatgaggtagctgaaacagatgagcacacctttgcaagccactatcccatggagaggcttcaggacgtggagaaagacgaagaaggggaagaaagtccgaatcctgttcctatccccttgtcagatattaatacagcaacaacaaaccctgcagtgtctgaagagcaatcaactatcaagtcctgcatgtatagagatgggaacattcccaagaacaaaagaaaacgcggggagcgcaaag

SEQ ID NO: 20342 - DNA, 255 bp, Glycine max
  Clone ID: 700955537H1
gtctcaactttccttcattttctctcttcctctcaccgagtcacgcactcggcttgactcgtacgaactccgatccccccccgagtcacactcaaccagcaccaccgcccgatccgacgatgtctcgcgcctcctccgccgcagattccgccgcctccggtgagatcatactgttcggagtcagagtcgtcgtcgattccatgaggaagagcgtcacatgagcaacctctcacagtacgagcatcctcaagacgg

SEQ ID NO: 20343 - DNA, 251 bp, Glycine max
  Clone ID: 700955540H1
ctctttctccggcgacgatctcagattccggtcactcctctcgccggcgatcccttattcctccggcctccgtcgagtcctttccgattcgaatcgttcccagccttgtgccaccatgaatcccgaatacgattatttgttcaagcttttgctgattggagattctggtgtaggcaagtcatgtcttctcctgaggtttgctgatgattcataccttgacagctatatcagtaccattggagtggacttta

SEQ ID NO: 20344 - DNA, 247 bp, Glycine max
  Clone ID: 700955542H1
atcgtagcaaagaaagaaagatagaaaaccctagcttaccttttcaactttcaagaacttggggcatgtattgtgtattgtatacagatgcaaatcttcgttaagacactcactggtaagacaatcacccttgaggtggagagttcagataccatagataatgtaaagtccaagattcaagacaaggaagggatcccaccagaccagcaacgtctcatttttgctagcaagcagcttgaggatagac

SEQ ID NO: 20345 - DNA, 247 bp, Glycine max
  Clone ID: 700955543H1
atggaactggagagcgcaaggaatgggataggatctatgattatgatgtctacaatgacttgggcaacccggatagcggtgataaatatgcacgccccgttcttggtggttcagccttaccttaccctcgcagaggaagaaccggaagaggaaaaactagaaaagatcccaacagtgagaagccgagcgattttgtttaccttccaagagatgaagcatttggtcacttgaagtcatcagattttct

SEQ ID NO: 20346 - DNA, 247 bp, Glycine max
  Clone ID: 700955544H1
atccacacaaactcagggtagggcagagagagagagagagagagagagagagagagagaatgggagggtgggctatcgcggtgcatagtggcgctggtgtcgaccctaatctcccactcgagcgacaagaagaagcgaaacaacttctcacgcgctctctcaatctgggaatctctgctctaaattctaatcttcgcgacatagatgtcgtcgaacttgtggtgagggaattggaaacggatccgct

SEQ ID NO: 20347 - DNA, 247 bp, Glycine max
  Clone ID: 700955545H1
cagtactgtatataaggcacgggatgtgattaaccaaaagtttgtagcattgaagaaagtacgctttgacaatctggatcccgagagtgtcaagtttatggcaagggaaatccatgttctgcgtaggcttgaccatccaaacataattaaattggagggcttgattacatcacgaatgtctcgcagcctgtaccttgtttttgagtatatggagcatgatcttacgggacttgcatcaaatcctgat

SEQ ID NO: 20348 - DNA, 247 bp, Glycine max
  Clone ID: 700955547H1
atcagagagaagggcaaagaaagggaaggaaatgttgtaaaacctggtgcacaagttgttgattctgagaccgtcaacaagaagtgtttctctgctgatctagagccagagctgcctggttctctctcaatgaatgttccagacccagatttccatgattttgatggagaccgtactgaaaatgcttttggtgagaaccaggtatgggctgcatatgataatgatgatggcatgccgcgttactatt

SEQ ID NO: 20349 - DNA, 152 bp, Glycine max
  Clone ID: 700955548H1
acgcgtatgtgctctcaatattcggctcgagtaaaaaatggcacctgcaacacagagtctctctctcctcctcctgttctcactctgcatcgccgcaaccgttagatcgagcgacacgtctacgattgtgtgtacacggcctacgttagaac

SEQ ID NO: 20350 - DNA, 236 bp, Glycine max
  Clone ID: 700955549H1
gaacttcgtcctccctctgcttctttctttcttagttgcagcgcgattgctgcatcgtcctccaataagagctcgctgctagtgaaccctaacacggcggcaacgagaggtgttcggttgaagctcagatcagcgatggcagcagcaacccgcacttctctgcggttcctcctctcagtctccgtaaccctaactctcgctcacctcgccgcctcaaattccgaagcgacgctctc

SEQ ID NO: 20351 - DNA, 258 bp, Glycine max
  Clone ID: 700955550H1
tccgcatccgctagctcgcgcaggcaccagcaggtgaggttattgtgatttgaatggagggaagtggaggtggcggtgcttcaccgtctgcaccgttgaagcaatacttacaggaattctcgaagctgtttcagtactatctggataaatccactccccatcccccctacaggtggattgggactttcgtcattgcatccatctacgttttgcgtgttgtttatgtgcaagaggtttacatggtccttagggcctcgg

SEQ ID NO: 20352 - DNA, 258 bp, Glycine max
  Clone ID: 700955551H1
gtctaagagtccagtgtctctatatctatctaccatatatcttccttccaaaatccatcctctgcgagtgagtgtttcgttggagtcagaggcgatgatgtcttcaattagattcctatggatcctggtggtgtgtttgacggcatcatgcgcgctaagccaaccgcagaagctatcagcgtacgatgttctcatggagtacggcttcccggtgggtcttcttccgaagggagccatagggtattcactgaacagaga

SEQ ID NO: 20353 - DNA, 257 bp, Glycine max
  Clone ID: 700955552H1
ggaaaaggcgtcttcataaacgccgcccaaaacttctcatacccttttattcattccattcgtttctagggttttcttttctttgccgagaaaatgagagagtgcatttcgatccacattggccaggccggtatccaggttggaaacgcctgctgggaactctattgccttgaacacggcattcagcccgatcgacagatgccgagtgacaagaccgttggcggaggagacgacgccttcaacacatttttcagcga

SEQ ID NO: 20354 - DNA, 255 bp, Glycine max
  Clone ID: 700955553H1
gcaaaaagaaagaatcccaggcgaggagaaagatggaggggaaggagcaggatgtgtcgttgggagcgaacaagttccccgagagacagccgattgggacggcggcgcagagccaagacgacggcaaggactaccaggagccggcgccggcgccgctggttgacccgacggagtttacgtcatggtcgttttacagagcagggatagcagagtttgtggccacttttctgtttctctacatcaccgtcttaaccg

SEQ ID NO: 20355 - DNA, 252 bp, Glycine max
  Clone ID: 700955554H1
ctgaaacaaagaagtgaaaataacagcaaaaagtaggagctgcagcagctcccccgaagcttatctcagcggcagactctgaaagctgtttgagtagcctcaacccggagaatagcaccaatgggagaggaggaaaacaaaccagaggaacccatggcaaaggagaaaaacccagaggaagaagcaacccaagagaaaaaaccggagcaagagtccaaagaggaagttgctgctgctgctgctgctccgcca

SEQ ID NO: 20356 - DNA, 252 bp, Glycine max
  Clone ID: 700955555H1
cggctcgagcaagacctcaacaacgagaaaactcaagaaacattcaactttcacttataatgtttacaggttcacactcggggttaattaccattgtaactcactctggctcataagtgtgcttcattacgatccgtataacttcgagtccttgtgggtcagggagcattcaagtagcgaggtcctaattattaacccgttttacttttctggaatacaaggcagtttaaccatgcagaccccaaagacaag

SEQ ID NO: 20357 - DNA, 252 bp, Glycine max
  Clone ID: 700955556H1
ctttaattactacttccccgttcgagttcacccactcacccaaacacgccactttccagttatcatcatcatgctttcgttttccactctcagaagatcctcacccttcctcgcccgacgcttctcaacccaacggtcccagatccgccacgcgtcaacctcctcctcctcctcctcctcactccacaacaccgcgaacccggttcgaacctggttcggtcgaaacgcactctcgaccgtcctcgccggcgc

SEQ ID NO: 20358 - DNA, 250 bp, Glycine max
  Clone ID: 700955557H1
gtccgaattgtgaaagtaagcaaagatggctttcacggaatcgtctctcctccttcctatcggtttcaggaaccaacaagaacaagaacaaggttccagaagacaaatggtatttagcctacattgtgtattttaccctgggtctcggttaccttctcccatggaacgctttcatcaccgccgttgattacttctcctttctctaccctgacgccagcgttgaccgcatcttcgccgtggtttacatgat

SEQ ID NO: 20359 - DNA, 246 bp, Glycine max
  Clone ID: 700955560H1
gtcaacgggcgagtaaacccgtaaggcgcaaggaagctgattggtgggatccccctgtgggttgcaccgccgaccgaccctgatcttctgtgaagggttcgagtgagagcatacctgtcgggacccgaaagatggtgaactatgcctgagcggggcgaagccagatgaaactctggtggaggcccgtaacgatactgacgtgcaaatcgttcgtctgacttgggtataggggcgaaacactaatcg

SEQ ID NO: 20360 - DNA, 73 bp, Glycine max
  Clone ID: 700955563H1
aaaaaggtttccagaccacgcaaccctcccactcatccttcctacgaggagatgattaaagacgcaattacct

SEQ ID NO: 20361 - DNA, 261 bp, Glycine max
  Clone ID: 700955565H1
gtaatatttcatgcttctctatcactcttgtcaaattccacaaaaaccaagtactacaagggaagaagaacttagctacaagctaaggaaggatcaaagagaatggctcaagcaatggcatcaatgactagcttacgtggttcctctcaggctgtgttggaaggtagccttggctccacacgcttgaatgtggggagtggaagcagggtggcctcagtcacacgtgcagggttcacagttagagcacagcaacaacaagtg

SEQ ID NO: 20362 - DNA, 260 bp, Glycine max
  Clone ID: 700955566H1
attgctcaatagtttcaactgtagattttggaaaggtggcatttgttgcaattggagctacaatggttggtagcattacttttacaaagaaaaagggcgactatgttaagaagggagatgagtttggatatttctcattcggtggaagcactgtaatttgcgtttttgaagagaattcaattgcaattgatgaagaccttttagcaaatagcgccagatcactggagaccttggtgtctgtagggatgagattgggtgtc

SEQ ID NO: 20363 - DNA, 259 bp, Glycine max
  Clone ID: 700955567H1
ataacacacataataaacatattacaacttcttcttcttcttccattgaccattgttgttgttgttgcttttgttcgttctcgccatgccaatgttgtcttcgagaggcttcatcgcttatctcgtatctgctttctcttgtgctgttctgtctgcgctttttctcaccaaccacatccatcatgatgataacaagccaattactttgttagcctctcgtgtgtctgaaactcttaaagtttggccagacttggagcca

SEQ ID NO: 20364 - DNA, 253 bp, Glycine max
  Clone ID: 700955568H1
attaacactaataacagcaaactaaaggtgaagtttgccagaaacaagatgggaaggaaccattttcagcagcaacactgtgctgatgggagcatgtggatggagagtcagggtcagcaacagagctatgccttccaagaagagtcttggagccctgataacaactatggccacaaccacaagcaattcccaggcatgcacatgaacatgaacaacaacaacaacaacaaaaggcttggtgcttttgctgctg

SEQ ID NO: 20365 - DNA, 257 bp, Glycine max
  Clone ID: 700955532H1
acttcactctcaagcttcaaacatgactcctttttacttcctcctatttgccttcatccttttcctctccataaacttcttgatccaaacaagaaggttcaaaaaccttcctccgggaccattttctttccctataatcggaaacctccaccaactcaagcaacccctccaccgcacgttccatgccttctcacaaaaatatggccctattttctccctctggttcggctcccgttttgtcgtcgtcgtttcgtcgc

SEQ ID NO: 20366 - DNA, 258 bp, Glycine max
  Clone ID: 700955492H1
gtggcctgcaagattttttgagggagcaagagcctgaatttgtaacaagccttgttcgtacccggattttgccactgtatgcaatagctgtgtccctaccatacctagttgctagtgcaaactgggtacttgagaactaggctcctgtctaccagaagagatgagtactgatgaatatcctcaatggcccatggctttggccatgccgattaggcagggccctcctggcaaccctgaggggttctctggctcggggga

SEQ ID NO: 20367 - DNA, 250 bp, Glycine max
  Clone ID: 700955493H1
gtttctttctgtgttgttcacttgtttggtctctttctttcaaccttaacccttccaaaccaacacatataaaaatcaaccctctcttcttcttctctctccgcgggttgagttgaacttcaagaacctcaaaaaccctttctctctctctctctctagatctgttcaaatccgaaaccatttccgctctaatttccaagagcaaaccctaatccgctctctctgtatgatactagatttcccctcctca

SEQ ID NO: 20368 - DNA, 260 bp, Glycine max
  Clone ID: 700955494H1
ttttgatatctccaccatcctacgtcttcccttctcttctcaccttgttcttgcctttatcaccaggaggacagaaagggaacaataaatcgaataaaaagcaccccatatccaagataggagctttctttcctgtttattctgagtcacgcataccgtgattctcctattagatcggcctttttccatttccatttcattcgggggtcgcaaatttctgggactaatcaattgacaatgctgcattagtgggattggta

SEQ ID NO: 20369 - DNA, 257 bp, Glycine max
  Clone ID: 700955495H1
aaagaactggacacccatttaggaaaagaaagatgggtccaagaatctgacatagaaaacctcacttatctacaagccattatcaaagagacccttcgtttgtaccctccagcacctttaactgggataaggaagttatggaggattgttgtgtggccgggtaccatgtcccaaagggaacacgtttgcttattaacctatggaacttgcaaagggatccaaaagtttggcccaaccctaataagtttgaacccgag

SEQ ID NO: 20370 - DNA, 273 bp, Glycine max
  Clone ID: 700955501H1
gtgggagatggagaagccacaaaacggagaagaaaaggaagaaaccacggcctctttctgcggttacgattctcttcaccgtcttctcaaggataatcttaacccccatcacttccaggaagtcagccgtttgcttactgggcttaattgtggaaaagcacttgaagcagtttctctcccagaatctgcaacttccctctctgcggaacatggttttgacatccaggccttttccttttgtgctgacaaggaactattaagagaacctcggat

SEQ ID NO: 20371 - DNA, 241 bp, Glycine max
  Clone ID: 700955502H1
gttctcctgttgttgttgtagcgctgattgaggtagcgctgattcgatcgcatcagaacattcattcacattcatatcctctctctccgatcccaatggcggatgagagccccaaaccagagaccttcgaactcaacaatggaagcatgcaggtcctcctcaccaatctcggctgcaccatcatctccttatccgtacctggacaagatggtgtgttatctgacgttgttctgggccttaa

SEQ ID NO: 20372 - DNA, 261 bp, Glycine max
  Clone ID: 700955503H1
tctgcttctaaatctgaactcaacggttctgtgaaatcaaaatccgcggcagttcagcattctagggtgatattttcatggatggagatggtagcagtgaaagcccaatcgaaactaagaaagccaagtcaaaaacccctcgaaaacctaaagaaaccattctgaagcaaaaatcccctgccgaattcttcgcagaaaataagaacattgcaggatttgataaccctggaaaatctctttatactactgttagagagcttg

SEQ ID NO: 20373 - DNA, 259 bp, Glycine max
  Clone ID: 700955504H1
attgtatccaaccaccaaagaatctcgtgtctgaaacattccccgtagcggcggcgctgtctcttttgcagccgctactacgtttcctttttccccgcccaaagcaacaagtttagttatttgtgtctccaatatgatccatcgtgattaaacacatacatccatggataataacaacaacaactactccgggtttgttcccaataatgatactgatgatgactgtacatttctccaaaccttgttggaattggacccc

SEQ ID NO: 20374 - DNA, 258 bp, Glycine max
  Clone ID: 700955505H1
tttctctaatccaaatatctctccgttaatgctctcaccacaaacttcaatagactagccaaaagctaacaccaactataggccaaatcaccaataaatattatttcccgttcttttggcgtgttggccacccactgaacacatttgcactcacacatagaagcagagagaggccattggttggtttcagagatgggaagcatgcacatagaaaccccagaaacttttgctgatggtagcaaaaacttcgatgatgat

SEQ ID NO: 20375 - DNA, 124 bp, Glycine max
  Clone ID: 700955507H1
cggataattgtgttggaagatacaaaagagtacattagttatgtctcaaaggaagaggctaaaactcaagatagaagaccttttgatcttttggtatgtttagatgtggcgacaaggagattat

SEQ ID NO: 20376 - DNA, 248 bp, Glycine max
  Clone ID: 700955508H1
aaggcagagaagagaaggagagaggcttgtacctggagagaaaagaggagacaataatacatggggaagcagggtctaaacacggtggagcaacaatctgtggcaccgacagcatccaagtttccgttgagcttttgggaagccacggtggcttcaacggtggcgctggtttttgcggtgggtcttctcggcgtgtacctcaccatgcccgattccgattacagttccttaaatccctcgtaccctcg

SEQ ID NO: 20377 - DNA, 250 bp, Glycine max
  Clone ID: 700955510H1
cgcaacaaaaagaaagaatcccaggcgaggagaaagatggaggggaaggagcaggatgtgtcgttgggagcgaacaagttccccgagagacagccgattgggacggcggcgcagagccaagacgacggcaaggactaccaggagccggcgccggcgccgctggttgacccgacggagtttacgtcatggtcgttttacagagcagggatagcagagtttgtggccacttttctgtttctctacatcaccg

SEQ ID NO: 20378 - DNA, 249 bp, Glycine max
  Clone ID: 700955511H1
tctgtctattgcacaatggatgcagatgcagctcctttgcacatagcaatgtatccatggtttgctatggggcacctcaccccatttctccaccttgccaacaagttagccaaaaggggacacaaaatctccttcttcatacccagaagaacacaagccaagttagaagacctcaatcttcacccaaacctcatcacctttgtccccatcaatgttcctcacgttgatggtcttccttatgatgcagaa

SEQ ID NO: 20379 - DNA, 249 bp, Glycine max
  Clone ID: 700955512H1
tctgtctctgtgtttgcggctgaggattccgaacgagcgaccttcttcgtttctcgcaaagtttaagtcatcatgggtaaggaaaagactcacatcaacattgtcgtcattggacatgtcgactctgggaagtcaactaccactggtcatttgatctacaagcttggaggtattgacaagcgtgtgattgagaggttcgagaaggaggctgctgagatgaacaagaggtcattcaagtatgcctgggtg

SEQ ID NO: 20380 - DNA, 85 bp, Glycine max
  Clone ID: 700955513H1
ggagattagagtgtgaagtccaaactctgaaaccctcaactcaaatccaatcctttggttggtttcgaattcgactccaaccaaa

SEQ ID NO: 20381 - DNA, 248 bp, Glycine max
  Clone ID: 700955514H1
cgttttcttcttctgctatctatctatctagggctcaattccgattccgattccgattcatactcataaccctttcaatgctttattgaactaacgaggttttcttcacgcaccttgttttctctgcattgtttcgaattccatggaggagtcttcgtacaccggtcttcccactagccacttgctcggttcagttcctgctgtcataactgaagaaaataatgccacgaaacatgtggccaccggtg

SEQ ID NO: 20382 - DNA, 248 bp, Glycine max
  Clone ID: 700955515H1
ggcggggataagattaaagattcaacaatggcctctgcttctgctactcttctcaagtcatctcctgttcttgacaagtgcgagtgggtcaaaggccagacccttcgccaacctctcgtgagatgtaacccttcctcagcatcagctctcaccatcaaagctgcttcctatgctgacgagctcgtcaaaaccgccaaaacagtggcctcaccggggcgtgtttttttggcaatggataactcaccccc

SEQ ID NO: 20383 - DNA, 81 bp, Glycine max
  Clone ID: 700955516H1
attgaacccaaaaagagagaactttttttcttggtttgtgttttcattttgttgtggttttctaaagcgaagtgaaaaatt

SEQ ID NO: 20384 - DNA, 216 bp, Glycine max
  Clone ID: 700955517H1
gtttgggtgacaacaaacctacttacatggaacctgttcaaccaggtggtctttttggactcattaccaaagaattcttgcctccagcagaggctccgcttccacccttgacagaatctgaagtggcagagtcacctttgcctcctgttgctaaaatagccccagcttccagcccgaatgccagaaccaaatttccacagggaaattcacagccta

SEQ ID NO: 20385 - DNA, 255 bp, Glycine max
  Clone ID: 700955519H1
gtgatgtccgtcccggtggatttggctatggtgtaaaggcaaccaggttgcgtaactacgtgatgtcctttgatggtgatacactacaaagatatgcaacaattagatccaaagaggctgtcagcatcatcgagaagcacacagaagcattgtttggaagacctgaaattgttgtaacacctgagggggcagtctctaaggatgagaacatcaaaattagctttggtggtttaaagaagcttgttttagaggctg

SEQ ID NO: 20386 - DNA, 254 bp, Glycine max
  Clone ID: 700955522H1
tggaagttgatagtaggtttctgaacactggcctcctccttgtggccacaatccttgtggtcaagctcatctcagccttcatagtgcccaaatccagaaagagggtacccccaattgtgaaggggtggcccttaattggaggactcatccgtttcctcaaaggtccaatctttatgctccgtgacgagtaccctaagcttggaagtgtcttcactctcaaactcttccacaagaacatcaccttcctcattggc

SEQ ID NO: 20387 - DNA, 253 bp, Glycine max
  Clone ID: 700955524H1
ccagcctcgacctcgccatgagcctccacgtcctcgccgccatctactgcagcctcggacgcttcgcagaagccgtccccgtcctcgaacgcgccatcctggtccccgacgtcgaccgcggccccgatcacgccctcgcctcgttctccggctacatgcagctcggcgacaccttctccatgctcggtcaggttgaccgatccatctcctgctacgaccaaggcctccagatccagatccaagccctcggtga

SEQ ID NO: 20388 - DNA, 249 bp, Glycine max
  Clone ID: 700955526H1
ctttctatcactctgttgagtgagtaagcaaatggaggaatagcgatctgaattttcggattctttaattgcttctctcgctttcaccgtccgaactcaatttatagatactccgtcaacctcaatcccaactaactacctctcttcttcctttttgttggttggttggttgaataaagagagaaaatcgtttttgttgcttcttatttaacaggttccttttcgcagcttcaccatatctccgaaatg

SEQ ID NO: 20389 - DNA, 248 bp, Glycine max
  Clone ID: 700955527H1
aaattcgcaaaactgcaaactctaatcctccgtcaagacaagcctcaactagaggataatgctgttgagactattgcaaaatgctgtcatgaactgcagatcctggacctcagcaaaagtttcaagctaactgatcgttcactctatgagctcgcccttggttgtcgcgatcttacaaaacttcgcatcagcgggtgttcagcatttagtgacaatgctctggcttaccttgccagcttctgcagaaa

SEQ ID NO: 20390 - DNA, 247 bp, Glycine max
  Clone ID: 700955528H1
ctgggcttcttggtgatggctttggttccacgccagaaatgtgcaaaaagaacttgatatgggtggttactcggatgcaggttgtggtggaacgctatcctacatggggtgacatagttcaagtggacacttgggtttctggatcagggaagaatggtatgcgccgtgattggcttttacgtgactgcaaaactggtgaaatcttgacaagagcttccagtgtttgggtcatgatgaataagctaac

SEQ ID NO: 20391 - DNA, 247 bp, Glycine max
  Clone ID: 700955529H1
cgaatggtgtaggaaacctggcttcatctgtgatcacaggttctgcacttgatttttcaaactggacaaaggtggagaagatactggttgccaaggcaacagatcataactcaagacttcaattaacaaccaccaccaaaggtgtgatatggttggaccaagtgtctgctatgccactggacacatataagggacatggtttccgaactgaccttgttgaaatgctgacagctttgaaaccaagatt

SEQ ID NO: 20392 - DNA, 260 bp, Glycine max
  Clone ID: 700955491H1
gttcattaaacttgttttttgctagaagcaggaagagaagcgaaacaaacaaacaacaaaataatcaattgagccacttaccatcagatttagatctcccaacagagagtttctcaaaattgccaagtaccctttcaggatcaaggaagagaatcaagaaccaccaaaaggtgttgttctttgttgtagttgtttgtaactgtagcaacatgaagatggttagaaagttggttgtggtgaggcttgtgttggccatatct

SEQ ID NO: 20393 - DNA, 260 bp, Glycine max
  Clone ID: 700955459H1
cggctcgaggagaagttgaagcagttagacaagagttacaagaagagcgagaacatgctcaacgacttaaggagaattttcatagagatgttatattttctgaatccagagctacctttgctgaggcaaaactcagtgatctttataggaaaatcagaatgtcagattataaggtctgttctatatgcctttccaatgacagggacttggcctttggatgtgggcacatgacttgtagagactgtggatcgaagttatca

SEQ ID NO: 20394 - DNA, 261 bp, Glycine max
  Clone ID: 700955460H1
atctcaatgagaagtatattgtagggtatggtgcctctagtactgtgtacaagtgtgttttaaagaattcccggccaattgcaattaaacgactatacaaccagcatccacacagctcaagggagtttgagaagaacttgaaactattggcagtatcagacacaggaatcttgtcactttgcatggttatgctctaactcctaatggaaatcttcttttctatgactatatggagaatggctctctgtgggatcttcttca

SEQ ID NO: 20395 - DNA, 261 bp, Glycine max
  Clone ID: 700955461H1
ctaagtttccttctcgctcccgtctctgaaatttcgagggtttcatcgttgctgaatcaacaattcggaaccagttagcaatgttcagattctggggatcacaagagcaacaatcacaggatggttcttcgcatcacagtcgtggtatccgccgtcggtggtgagttcaccaacttcgtcgaggcctgttacaccgactgcatcttcttcttcattatcacagaggccttcgtctcatgttccaccttctgaagctgctgc

SEQ ID NO: 20396 - DNA, 259 bp, Glycine max
  Clone ID: 700955463H1
ctccccaatcgcaaaattcaatcgcttcttcttcagcttacactacaggatcgcctctttcaaatcaatatccattcacaatttattagaatatcctttttcaataattccgcgatccacacttccccaaagtcacgccctacgattctttctgaattgaattatttatccacgttttattttttcttagattgagcgttacgaaatcgagattgaatttatgagagggaatagaagaagaataattagggaggatgca

SEQ ID NO: 20397 - DNA, 266 bp, Glycine max
  Clone ID: 700955464H1
aggcagatgatgaaaaatctcagtgtaagtatgctggtaactgccaaggtttgctgaatctgtattcgctcaagtatcgacgcaacaggtgacttcaattcatcttagatgacagaaacaatggcaatgcaaggtgttattgtcacgtctatacgaagttggcaactcaaagaagaacactggacaatcttagtttttcaggctcaatttcggttaaaaaattgtcaaagaatgaaaggaccacagggaacaatcaatttcatagg

SEQ ID NO: 20398 - DNA, 265 bp, Glycine max
  Clone ID: 700955465H1
atttatagtttactattgaaagatgggtttgaaaatggcaatactgatcctaggcctgctggccatgttccttttggtctcctcagaggtggcatccacgaattcaaaagaggtgacaaatggagttgaagatgcaaatatcctggtggaggctatggtgggggttacccaggcaatggcggtggtggctatcctggccgtggtggtggctaccctggtcgtggtggtggctatccaggtcgcggtggtggttaccctggtcgtg

SEQ ID NO: 20399 - DNA, 262 bp, Glycine max
  Clone ID: 700955468H1
agaggagaagagaaagttagagagagaaaaaagaaaagaaggaatcaggttagagaaaaggaggagaaaaagtaagaagaggaagaagaaagggctacggtgccaagacccaatgcccaaaaatcatttccacggttaccagagtttgtaggccaaagaagagaaggtgcaaaaagctgctgatgaactcgcttagcgaggcagattggctaagcgagtctcattcgcttagcgaggcagccagctcgcttagcggatggga

SEQ ID NO: 20400 - DNA, 259 bp, Glycine max
  Clone ID: 700955469H1
atcctccatggttcttatgaagatgaaggagattgcggaggcgtatctaggttccaccataaagaatgcggttgtcactgtgcctgcttacttcaacgactcacaacgtcaagccaccaaggacgctggtgtctttctgggctcaacgtgatgcgaattatcaacgagcctaccgcggctgccattgcttatgggctcgacaaaaaggccactagctctggggagaagaatgttctcatttttgatctcggtggtggga

SEQ ID NO: 20401 - DNA, 260 bp, Glycine max
  Clone ID: 700955470H1
tggaattgtcatcgcccttgaagagcaaagagattgaaccattttcgagggttgatcttgagggtgaagcccccacggtgcttactccgacccagtttgcgacattgtggcctcttgcttcgcttaatgggtcgaatgctaacttgttggggtttgagaaactcttacattctgtgttgggggctaaggctgagaagaaaggttcctttaggttgttgaaggctgatgtttctgctcagacttacgtgaagatgggtttt

SEQ ID NO: 20402 - DNA, 279 bp, Glycine max
  Clone ID: 700955471H1
gtccatctgataaccctttcctgattctctttcgtggttgttgctattctgagtgatgggtatgccctgccgctgttcccacacctcccacatcactgaaatcatcatcaccagctgtcttccgccacaagtactagatcaacaattatccgatcaattcattaccacaaaccaccttcaagagacctttgtccaaatgagcccacttaaagatcgaaacttgagtcggacgtaaacatgcgcgaggtacgtggaagtagccttattccaacatcacta

SEQ ID NO: 20403 - DNA, 260 bp, Glycine max
  unsure (1)..(260): unsure at all n locations
  Clone ID: 700955472H1
gcgcctcatgatgtatcagcagggctgcttcgccggcggcaccgtactccgcctcgcgaagganctcgccgagaacaacaagggtgcgagggtgctcgttgtctgctccgagataaccgccgtgacgttccgcgcccctcggacacgcacctcgactcgctcgtgggacaggcactgttcggagatggcgccgcagcgttgatcatcggatcagaccccgacccagcagtggagcggccgatattcgagatgatatcggc

SEQ ID NO: 20404 - DNA, 261 bp, Glycine max
  Clone ID: 700955473H1
ggttgattggtcccattgattccgaagagaaaagaaaagatgtttgagccacaacagctatacactcgcgcgaagaccgaggaattcgacctcgaatcaggagaaaccctctacccagggctgagcgtcggcggaaccagctccgatggggtttcatccgcaaggtctacggcatcctctccgcgcagatcgtcctcaccaccctcgtctccgtcaccaccgttttctatactccaatcaatgacctcctcaagggcaatt

SEQ ID NO: 20405 - DNA, 262 bp, Glycine max
  Clone ID: 700955475H1
cacctctaaagaaggatatagttttgaagagatatgcatcaagaaagaagcgtttgagggagaagagaagttttgtgcaaaatccttgggaacagtaattggttttgccatttcaaagctgggaaagaacattcaagtactttcaagttcctttgtcaataagcaagagcaatacactgtggaaggagtgcagaatcttggagacaaagcagtgatgtgtcatgggctaaatttcagaactgcagtattttactgccataaa

SEQ ID NO: 20406 - DNA, 260 bp, Glycine max
  Clone ID: 700955476H1
cctcctcttgttaaccttgttctgtttctctcttcccccttctctccgtctctctctcactcaatattttgaggtaatttgcaatggctgaaccttccaaggtcattcacgttcgaaatgtggggcatgagtatctgaaaatgatttgcttcaactatttcagccttttggagtaataacaaagcttgtgatgttgcgtgccaaaaatcaggctcttcttcaaatgcaagatattccttctgcagttaatgctttacaat

SEQ ID NO: 20407 - DNA, 258 bp, Glycine max
  Clone ID: 700955478H1
gaaagataaagcattccatagcctcccataaaaatgaagaatactatcttctctgctctctttctactttgtgccttcaccacctcatacctaccttcaaccaccgcggtggtcgataccgacggtgatattttcagaatcctggcacatactttatcttgtccgtttttcgacccggcggcggagtagaattcgccgccactggaaacgaaattgccctctcactgtcgtgcagactctcttcgggaggggctttcc

SEQ ID NO: 20408 - DNA, 264 bp, Glycine max
  Clone ID: 700955480H1
gcaaaaaaaatatggcatacatcgccaccacggttggtgcaagcagtgtcaccacagtggattgccagaaacaagtgagatcatggaggctcctacgttccctggtggaacttctaatccccacttgcaactgaccttcgtagaagaagaagaaaaccaatcaccacaaaagtgtctccaaaatcatccacaacaacaacaactcatgatgacaacttcaaccacaatcactggcaccatctttggataccgcaaaggaaaggt

SEQ ID NO: 20409 - DNA, 279 bp, Glycine max
  unsure (1)..(279): unsure at all n locations
  Clone ID: 700955481H1
atccgcagctgcttttattcgcaccgcaaacagtgagccatggccgtcggaaagaacaagcgcatctccaaggggaagaagggtggcaagaagaaggcagctgatccctttgccaagaaggattggtatgacattaaggctccttctgtttattcaagttgaaaaatgcttggcaaatacccacgtacactgcgtactcaggggtaccaagattgacttcgtgaagggactcatagcatagagtgtnttgagggtctccttgagctgatcttcaagggg

SEQ ID NO: 20410 - DNA, 256 bp, Glycine max
  Clone ID: 700955482H1
ctctcacacactcaaccaaagacgaaggaagaagaagaattacaaagtaccaccaaacaggctgcgacgacgtcgttctttgcaacttccagttcttgttcttgatgaatatgacaccagtttgccctttgtcaaagctgctcgccccgatgataacaatgcctctaagaaatctggcgaaaactctatgaaacatcaggctgagtctgagagtaaggtgaagaaagaggttaatgactcagctagtacctcacca

SEQ ID NO: 20411 - DNA, 260 bp, Glycine max
  Clone ID: 700955483H1
gaggaactttgcaacaagcatggagacagcctcagactatggagcattcacagagaaattcactttaccaccaaattctgcaccagctcttcctctcaaatcactcacctttgcagtgaaagagatgtatgtcttcacttttctttttgtaccacaatattctgattgtcaaaaactctcctttgctgacatcaaagtcgtcaactagtctttgaatccatgcttctgcatcttgaacttgttttggaagtgtttgtgtc

SEQ ID NO: 20412 - DNA, 260 bp, Glycine max
  Clone ID: 700955484H1
ataatctccaactccaaaacaaaacctttttacacgacacatgtgtatgtgcaagataaattctctttcagtttgaggtgcaaatccaacttggtcatcactggttccgagtgatcttgcttcagatcaggtttttgctgagaacaactcagattttcagtacactgctactgccaagcagaagttaaattagtgtggataatgattgccacgcttgaagactagaagcaataattcagcagtgtttgtgtcaagatcct

SEQ ID NO: 20413 - DNA, 259 bp, Glycine max
  Clone ID: 700955485H1
cttttctcttctttcttcttcttccatctctttttttctgcttaaggtctacaaaagttctcttcttcttctcctcctattgaactttggtcatcacacgagaaaacccacgtctggatcttctggtgtaaggccattagaagccttttagaaattttcaaattgagttggtgtatagtgttgaagggggtgaaatttggagcccagtttgttacttcatttgaacggtcatagtttgaaccctctttttctggagatt

SEQ ID NO: 20414 - DNA, 261 bp, Glycine max
  Clone ID: 700955486H1
caacaacaaaagcttatactacaaaggagtaaacggttgtttctttgtgaccaagcttcactccatcaacatcaagtgatggccctcaacacctcttgctccaaggccattgttgacatgctaggaactcatgttcctaaatgtgctattgatgtttccaacacacccagattttccttgtcccagaatgacaaaaagggctgcaacttgggattccccaaacttgttcaaaacaagggccttttcccacttcatgctgtg

SEQ ID NO: 20415 - DNA, 260 bp, Glycine max
  Clone ID: 700955488H1
attcaatactacaacttctgaatcacttagttgaattgaattatcttcaaaatgagagaaatccttcatgttcaagctggtcaatgtggcaaccaaattggaggcaagttttgggaggtgatgtgtgatgaaatgggattgatgccactggaaattacgtaggcaattcccatcttcaacttgagagggttaacgtgtactacaatgaagcaagtggaggacgctatgttcctcgagctgtgcttatggaccttgaacca

SEQ ID NO: 20416 - DNA, 261 bp, Glycine max
  Clone ID: 700955458H1
caacatcgccaccggtctcctcttcggcctccccatgccggtccagcccatgaagtccatcgccgccgtcgccatctccgcagttctccccctcaccatcccccaaatctcggccgctggcctctccgtcgccgcgtgctcctcctcctcggtgccaccggcctcatgtccgtcctctaccgctacctccccctccccgtcgtccgcggcgtccaactctcccaaggcctctccttcgccttctccgccgtcaaatacatt

SEQ ID NO: 20417 - DNA, 261 bp, Glycine max
  Clone ID: 700955429H1
gcctttctgactcggcctggcccggtcgccctacgcgactggcgcttcaaaaggtagttgacttgcttactcgttagagtaggggtcgcgagagagcagagcgtaccgccctgccatagtcgcgagtctgtttaagtcgcgactgttgtcatagtcaacaaggttgaaacttccaggaaaaaacttcgaattgggagggcgatcctcccggtgaactgaccgtaccccaaaccgacacaggtgaacaagtagagtatacta

SEQ ID NO: 20418 - DNA, 263 bp, Glycine max
  Clone ID: 700955430H1
acctcccttaatttcaccttcaatttcttattagtatatattttaaactttgctagattgtttcctaaacacacaacactctcttattttcccctctgcttgtagaaagcagaagggcgaaatatttcgttaattagttaattatttccctttcgttctccaaagtccataacctctctctccacataacacgatggctgaaaattctatgatcattagcattgaccaaaaagcaatggttacccctcatgaagaacctaatt

SEQ ID NO: 20419 - DNA, 266 bp, Glycine max
  Clone ID: 700955432H1
caaggggtgttttgaaaagatggagcagaaagaaaatcatgctagaaggaaaaagggagggctcatcacaatgcccttcatctttggtaatgaggtttgtgagaagctggctgtggtaggtttcaacacaaacatgttagctacttgacaacacagcttcacatgccattgaccaaagcagctaacaccctcactaactttggtggaactgcaagcttgacaccattgcttggtgctttcattgctgattcttatgccggaaagtt

SEQ ID NO: 20420 - DNA, 269 bp, Glycine max
  Clone ID: 700955433H1
gtttgatctaaaaccataaacctctgtctcgttagatctccttcttccgttctctaaacctctcctccgatccgatctgatccaaaatggcgacgatgacgagcttgattggtctcatcaataagatccaacgagcctgcaccgttttgggagatcacggtggcgagggcttgtcgctctgggaggctcttccctctgtcgccgtcgtcggtggacagagttcagggaaatcgtcggtgctagaaagtgttgtcgggagagattttctc

SEQ ID NO: 20421 - DNA, 264 bp, Glycine max
  Clone ID: 700955434H1
gttaaggttacgcaagagtccattcacgttgttgtgcttggcttttcctctgcgattatatctgagaaagatatcagggaagagttcgtgtgcaaaacgaaacgagggcaagaggtgtatgtgagcaggtctcacagcggcatgtgataaaggtcgggaccatgatacggtttttagtcaagagttttgatgaagaaatacttcatgtttatggatctctggttcctgatcacacaggcagcatttattggttggataagaatt

SEQ ID NO: 20422 - DNA, 264 bp, Glycine max
  Clone ID: 700955435H1
ctcattaattgcaagaatggcacttcgttgcttggtgatgtccctttctgttctcttcactcttggtcttgcgagagaaagccatgccagagacgaagatttttggcatgctgtttggccaaacactcccattccagttcattgcgagatcttctaaagcctggccctgcaagtgttgaaatcgatgatcaccctatgcaaattgaagaaacacagtacccgaaaaccttcttctataaagaagaccttcatccaggcaaaaca

SEQ ID NO: 20423 - DNA, 262 bp, Glycine max
  Clone ID: 700955436H1
tacaagcattcttgacaacaacaagtctgattttgagagagtgataagtgttaacttggttggtccttttctgggaacaaagcatgctgcaagggtcatgattcctgctaaaaagggatgcataatcaacacagtagtgttgctggatgcataggtggaggtgctacacatgcctacacaagttcaaagcacgcactaattggactgacaaaaaacactgcggtggagcttggacaacatggtattagggtaaattgtttgt

SEQ ID NO: 20424 - DNA, 145 bp, Glycine max
  Clone ID: 700955437H1
cattttcatcatctacaaattgttctgagaaaatggtataggaaccggttcatcttacttgcaaaggcagcatcctcagtctcatcaattgatgaactggacacggctacctcagactgggtaaattacgtctaaccatgccgat

SEQ ID NO: 20425 - DNA, 262 bp, Glycine max
  Clone ID: 700955438H1
cgtcgagccgaatcggctcgagaaacctcactctctgattcagtgcctctgatctctctcgctctctctctctctctctctctgtgaaaggactaagatgggttcagtttctctgaaaataggagatggaacagcagattccaaagagcaacactgtgttcttcagctgttaacattctcatgatattctctgtcatcaccaccaacctctttgctctctatgccttcaccgcttccccaaatcaaccccaacactctctcc

SEQ ID NO: 20426 - DNA, 260 bp, Glycine max
  Clone ID: 700955440H1
gcacgaagcacactatgggttggaaaggaggtctcaaaaacgtggtcacaatgtttactttcatggtggccttggttgttgttcaacatgtgaagtgtggggactcagctcgcatgttacttcagcacggtggctcgttcaacgaagtggcaccaacttcgttctgagtaacaggcatttctacttcaacggattcaacgcgtactggttaatgtacatggcatctgacccagccacaaggcccaaggtcactgccgttt

SEQ ID NO: 20427 - DNA, 249 bp, Glycine max
  Clone ID: 700955443H1
ctcttttttctctctcttgcaaaacctaattttcatttcttccctcaaatttcaaaatgcgtgagatccttcacatccagggtggccaatgcggcaaccagatcggcgccaagttctgggaggtggtttgcgcgagcacgggatcgaccctaccggaaggtacggtggggactcggagttgcagctcgagacgatccatgtctactacaaagaggccagttgcggacggttcatgcgcacgcagtactc

SEQ ID NO: 20428 - DNA, 261 bp, Glycine max
  Clone ID: 700955445H1
gtgaacacatgcaatgatcagcagagttgtaagttgctatagttggtctactattttttttcccaatagctttctgtaggagtaaacaactataacccttgatttaatttctggatatgcttggcttcttctgagatgcatttcggggaatatacaaaaatagacccaaggatggggaatatactttgccattgatccatgtttatggattctccaaagcacgagatccagaatttgattttcacgagagaataagaattg

SEQ ID NO: 20429 - DNA, 264 bp, Glycine max
  Clone ID: 700955446H1
aaattttctctctttcacttatttattgactccccaaaagcttttcaaatatctctgttcctctctcacgtaccttctccctatctttcactccacttcttaacaccacaaaacagaacaacggccgagcaaaaacaagaaaaatggtgttgttgtccaaagcaacaacagaacaatactcctacattaagaactgcatgccaaccaaattttcctcaacaattcccatagtgaacctctccaaacctgatgcaaagaccctta

SEQ ID NO: 20430 - DNA, 263 bp, Glycine max
  Clone ID: 700955447H1
ccttgttcttctttctctattgtctatagtcatctccattgttctcttcattacccacacacacaaaagaaacaacactccaagaggaccaccaggtcctccacctcttcctctcatcggcaaccttcaccaacccacaactcatccccacatctctgcctatggcaactcgccaaactccacggtcctctcatgtcgtttcgcctcggcgccgtgcaaaccgtcgtggtttcatcggccagaatcgccgaacaaatcttgaa

SEQ ID NO: 20431 - DNA, 264 bp, Glycine max
  Clone ID: 700955448H1
gtgcctgttgctgtgaactgcaagcagaacatgttctttggaaccaccgttcgtggcgtcaagttctgggacccttacttcttcttcatgaaccctaggcctgtgtacgaggttaccttccttgatcctttgccgaggagatgtcggttaaggctggggggaagtcgtccattgaggtggccaaccacgtgcagaaggtgctgggggatgtgttagggtttgagtgcaccgggttgactaggaaggataagtatatgttgttgg

SEQ ID NO: 20432 - DNA, 264 bp, Glycine max
  Clone ID: 700955449H1
ctctctctcacaataaccactaattctcccaactcaatttttctctcaaccggcccaatttagcataagcccagcatggccaccgcaacagcagcagccacctcgtccttcatggggacgcgcctcctggaggcccatccggggcggggcgggtgcaggcccggttcgggtttggcaagacgaaagccgccgccccgaagacagtttccagggggtcgggctctagctccgataggcccctgtggtatccgggcgccaaggcgc

SEQ ID NO: 20433 - DNA, 263 bp, Glycine max
  Clone ID: 700955450H1
ccgagaaccgccactacgcccacgtcgactgccccggccacgccgactacgtcaagaacatgatcaccggcgctgcccagatggacggcgccatcctcgtcgtctccggcgccgacggcccaatgccccaaaccaagaacacattcttttggccaaacaagtcggcgttcccaacattgtcgtcttcctcaacaaacaggaccaggttgatgacgcggagcttcttcagttagtagaattggaggtccgggagcttctttcca

SEQ ID NO: 20434 - DNA, 261 bp, Glycine max
  Clone ID: 700955451H1
gagatatagaggagactgctacaagacactcagaacttcaattgttgcacgagtctctgacgagagattcagaacagaaactccaagaagctatagaaaaattcaacaacaaggattctgaggttcagtccctgttgagaaaattaagattttggaggaacagatagcaaaggctggggaacagtctacatccttgaagaatgaatttgaagagagtttgagcaaactgacttcattggaaagtgaaaatgaagatttgaa

SEQ ID NO: 20435 - DNA, 263 bp, Glycine max
  Clone ID: 700955452H1
atcttcgtgaaaaccctaaccggcaaaacgattacgctagaggtagagtcctctgacacaatcgataacgtgaaagcgaagatccaggataaggaaggtattccaccggatcagcaacgtcttatcttcgccggaaagcagttaggaagacggcagaaccctcgccgattacaatattcaaaaggaatcgacgcttcatctggtgcttcgtctccgcggagggatgcagatcttcgtgaagacgctcaccggaaaaacgatta

SEQ ID NO: 20436 - DNA, 261 bp, Glycine max
  Clone ID: 700955453H1
gagaaaggagagggtccagtggtgttgttcctccacggcttccctgagctctggtactcatggcgccatcagattctctctctcagctccctcggctaccgcgccgtcgctcccgatctccgtggctacggtgacaccaaagcaccaccttcaatcagcagctacaactgcttccacatagtgggtgatctcgttgcgcttattgactctctgggtgtccaacaagtgttccttgtggctcatgactggggagccatcata

SEQ ID NO: 20437 - DNA, 261 bp, Glycine max
  Clone ID: 700955454H1
attgaaaatgtcactcacattgttactaagactactaaaagctataaaagactaaagaaaataagataaaattctgatttcattcattggtccatcaagagggtgcaaagcttacattaaataataaccctaagaatgataaccctccacttgtcatcatctagtattttaggaaattaaaataaaaactactattaaaaggataatacctaagtcatctaatatttaaactacctatttgggcctctctaagcccatcct

SEQ ID NO: 20438 - DNA, 261 bp, Glycine max
  Clone ID: 700955455H1
tcctgatatcagaaaaagaaaaaagaaaaaaatgtctctagtgactgcagagatcaaagccaaagcagaggtgtatcatggagatgaactctgccaagagaagtcaaagttgctgctaaaggaggtagggctactaatgggcttttgccattgaaggacattgaggaatgtgggtatgagagggatagtgggtttgtgtggctgaagcagaagaagagcacaaaccacaagtttgagaagattgggaagctggtttcctat

SEQ ID NO: 20439 - DNA, 145 bp, Glycine max
  Clone ID: 700955456H1
gcaaaccagaatgggaactgccctaccctctttactttaattcagtcacaacaagggcagaaaaaaaaagaaggcaaaaaaagaatgagcaagtcttctggtgctgtttttctcgcgcgcgctaagcgtgcgatgtttggtttcc

SEQ ID NO: 20440 - DNA, 260 bp, Glycine max
  Clone ID: 700955457H1
tctatttctcagtctctgtgtttgcggctgaggattccgaacgagtgaccttcttcgtttctcgcaaagtttaagtaatcatgggtaaggaaaaggttcacatcaacattgtcgtcattggacatgtcgactcgggaagtcaactaccactggtcacttgatctacaagcttggaggtattgacaagcgtgtgattgagaggttcgagaaggaggctgccgagatgaacaagaggtcattcaagtatgcctgggtgctcg

SEQ ID NO: 20441 - DNA, 263 bp, Glycine max
  Clone ID: 700955428H1
gcgcaagtgaggaacaagcaagtgcttctaaaggactatgttaccggttttcccaaagaatccgacatgaatattgtcgaaagtaccataacattgaagcttccacaaggttccaatgatgtcttgctcaaaaattgtacttgtcttgtgatccgtatatgaggaatctcatgaacaagcccgaaggccctcccaatagtcgtgcttacactcctggctctccattaataggatatggtgtgtctaaagtcctggcatctggg

SEQ ID NO: 20442 - DNA, 257 bp, Glycine max
  Clone ID: 700955390H1
ccttactgacggagaaagagaatgacagaggtactcctgctctatctgaggtttgggaaatcaattcagcattagagcccttgtggcatgagcttagctgttgcataagcaagatagaatcctactcagagtctgcatctgagatttcgacatcttctagtacctttgtgtctaaaccatctggtgtaatgcctccacttcctgctggctctcaaaatatcttaccatacattgaatctttctttgtggtttgtgag

SEQ ID NO: 20443 - DNA, 260 bp, Glycine max
  Clone ID: 700955391H1
ctgtaattgcatagggaaacaacatctctatagctatatgcagctaggagactcaagtgtgttggagatctcctcccataccgagcccgagatggcggtggtgtcgccaccagaagaagcaccacatgaaggcggccacaacagtggtggtggtggtggtagtgatgagatgattgggatggatttggatgcaaattcaggtgaaggaaatgaaggtaacaagatgagctttggagggaaccggtggccccgtcaagaaa

SEQ ID NO: 20444 - DNA, 265 bp, Glycine max
  Clone ID: 700955392H1
gaaattccaaaaccatgtcgtcccacagtcatctaagtttcgcctttggggttctaggtaacatcgcctccttcgtgtgctttctggcaccactaccgacattttatagagtttgtaagaagaaatcaaccgaagggttccaatcaattccatatgtggctgcactcttcagtgcaatgctttggatcttttatgcctatgtgaagaccggagaaatgcttcttatcaccatcaatgcattcggttgcgtgattgagaccattta

SEQ ID NO: 20445 - DNA, 270 bp, Glycine max
  Clone ID: 700955393H1
cctcgagccgaatcggctcgaggaagtgagggcaagaactttgcagactaccagcatgagcaagaagctcctccagctcttcagcctactcccattcttcctctacttctacacaatagaagcagacgttggcccattgcaactgacacacccactggaccccttaactcagcaagaaatcaccctcgtcaaaaccatagtcctacaaaagtaccccaagccagccaaccgcgtcttcttccactacgtcggcctcgacgatcctgacaa

SEQ ID NO: 20446 - DNA, 268 bp, Glycine max
  unsure (1)..(268): unsure at all n locations
  Clone ID: 700955394H1
gagacaggagaacggaattgaaagcanacatagcgaactgtcctgtgtacatgcagctatttctttcaatgctgcatgtacccgtgacagaaatagctgatttggtgcatcttgcagccttgcgactatctccaatagttatccagaaaatgccgagtgtcttcagtaaggacactgagattgtcacgtatgtcgagaatatgttgaggctggagagtggtgcaattggagaaactgttggttctaccatgctgcctgctcttgtggg

SEQ ID NO: 20447 - DNA, 250 bp, Glycine max
  Clone ID: 700955395H1
ctagcatcaagatatcaaaaattcctattatctgcatttgcaatgaccgttacagccagaaactgaaaagccttgtgaactactgtttgcttctaagttttcggaagcctacaaagcaacagatggcaaagaggttgatggatgtttcaaaggctgaaagacttcaagttaacgagattgcacttgaggaactagcagaaagagttaatggagatatgcgaatggcactaaaccagttacagtatatgag

SEQ ID NO: 20448 - DNA, 272 bp, Glycine max
  Clone ID: 700955396H1
ggcttccctccctcctttgaagaaacaaattagaagagtgtgttgtgttgtgttgaagtagcaagctagcaaagatgtttggcatcttaggaggcaataaggggcacaagatcaagggtactgtggtgttgatgagcaagaatgtgttggacttcaacgaaatagtgtccactactcagggtggtttggttggtgctgccaccggcatcttcggtgctgccaccggtattgttggtggagttgtcgatggtgctactgccatcttcagtcgc

SEQ ID NO: 20449 - DNA, 290 bp, Glycine max
  Clone ID: 700955402H1
gactggcattcggctcgagctcgagatctcgacgatgcaagcaacccctttagtgctcttcctcctcttcaccatagccaaagggcttcacaaccccaaatgtgatgctacccatcaacatgaccatgatggctcaaccctccaagtgttccatgtgttagcccatgttccccatttaggccctcaaagccaatgtcatgggaagagagtgtcctaaagctacaagccaaggaccaagccaggatgcagtacctttctagcttggtggctaggaggtccattgtcccaat

SEQ ID NO: 20450 - DNA, 266 bp, Glycine max
  Clone ID: 700955403H1
atcaccagaaagtcatgtatatggcccattgcctgattggatcgacacgtcaggcgcatatttaatttcaccagaaatgggttcacactttgtaatgtacctagctaagttgaaagaaaaatcaaaatcaggactaccctgcctggtgtggagagatttatctttgtgctccaaggtgctgtcaccctcactaatgctgctggtgttagccaactactgaaggttgattcttatgcttattttcctccaaattttgaacattcaat

SEQ ID NO: 20451 - DNA, 249 bp, Glycine max
  Clone ID: 700955404H1
aaatattaagatgctaaacattggaacacttgttgtactctttgaatttctcatacacaattatacctatgacacaagacacaacaacccttgtacctgcaatcataacttttagtaactcaaccgtagatgtagaaataatagactatcttcccacccttttcaaaactgattaacctacttatgaaaaggactttagctaacaccaacctactgagaagttttgcaatggaaaattaactactgatt

SEQ ID NO: 20452 - DNA, 263 bp, Glycine max
  Clone ID: 700955406H1
agcattataaagaatgcctgtccatggcagttgataatcttcctgttcttgatgggaagactccagtccaagtgtaccagagtttctgtgagagcttcaagtcttcattctctccattcatgggctctacaatcagagcatttccatgggtttaggaccagatggtgagctacgttatccatctcaccactggctgccgagtaatggtaaaactcaaggtgctggggaattccagtgttatgaccaaaacatgctcagctttc

SEQ ID NO: 20453 - DNA, 263 bp, Glycine max
  Clone ID: 700955408H1
atttcttacctcttggcatggccattcaaatgtcttcttttgtctttgtttctcttacaattttattttgcttctcttccttggagaagagttttgcctttcaaacaacaaaggaggacacagaaagcaacaatctcatcaatatactcatcttgttcacctcagctcactccttccttcatcttcctgcagctcttctgccaaaggtcctaaaagaaaagcatcattagaagtggtacacaaacatgggccatgctcccaac

SEQ ID NO: 20454 - DNA, 263 bp, Glycine max
  Clone ID: 700955410H1
gaagtgcaaaaacagtgtaacaaaaagaaaaagaaaaacaatatgaagttcactataatcacaatatttttctctttatttctacttgactttggttttgcacaacagggggatcttgacatatcaagatttggagaaaaccaaatacaaatataggccaggctttcttaagtgcctggactcaagcatgtgcatcaccaactgctgtcaaaattgtgattccagctggcacataccaaatgggtgcagttgatgtcaaaggt

SEQ ID NO: 20455 - DNA, 261 bp, Glycine max
  Clone ID: 700955411H1
cttctccctttttctctctgtctctctctctcggtctcgctctacttctcatcaagcacagagttacagactcaccgatcttccgattctctttcgtcttggtttatgagctcgaaggagagacccactcttggtgcacgcggattaagacccgcaaacgaaatattgctgcgccgctggaccctgcagcattctcggatgcagtggtccagatttatttggataatgctggtgatctggaacttattgctaagagtattg

SEQ ID NO: 20456 - DNA, 263 bp, Glycine max
  Clone ID: 700955413H1
acttactcctcacactttctctatctttttcatctctgtttcagatctgagctctcgtatattccccagccatggccgaaaaggtcaccataatgaggctcaaggttgatcttcagtgccacaaatgctacaagaggtcaagaagattctctgcaaattccctcaaatccgagaccaggtgtacgacgagaagaataacatcgtgaccatcgcggtggtttgctgtaaccctgagaagctcagggacaaaatttgctgcaaag

SEQ ID NO: 20457 - DNA, 265 bp, Glycine max
  Clone ID: 700955414H1
gggcttctgaattatcgtgttttgatcagaatctgaggagaaaatcacataatttcgaatttgagttttcgtgtagaaaaaggaagagaagaaaatggaatcggaggatttggtcaaacaggaattggaggaattgcagaaacaattggggaagaagcaaaagtttgaagcttctgtttcgtctcttaaaacccttctccaacgcacttacccatcagcttccccggcgcttcgtaaatccttttaatcagttctatgccgagtt

SEQ ID NO: 20458 - DNA, 279 bp, Glycine max
  Clone ID: 700955415H1
gctttcggctcgaggcttttgaaatgttgtcaccccttcttctatttctatgcctaactcttcctttgtttttgttgtccttcttcaaataccgtaaaaccttcaagaatccaccacttccaccaggtcctagaggccttcccataatacggaatcttcatcaactagatagtccttctcttcatgagcagctatggcatctctcaaagaaatatggtcctttattttcccttcaatttggattaaggccagccatagttgtttcctctccaaaattgg

SEQ ID NO: 20459 - DNA, 246 bp, Glycine max
  Clone ID: 700955419H1
ggcgttccttatactattggtttcaccaaatagggcatcatactgcagcctaatcttgggaagattttttttgttattttgtgtgcaaattaatgtgtctatgtagaataaataaattagctttgttttcagcacattgttgtgattcttcttccaagctagggtggaatcatatcatatcttgtacaaattaaacatgagaaaactgtacagctaatacatgtgaaatttttatattgttttttg

SEQ ID NO: 20460 - DNA, 263 bp, Glycine max
  Clone ID: 700955422H1
atttgaggccaggcaagccccactcaaccaccacacctctcctcgttcacgctacccctttctgctcttcttctacctttcaagttttaaaagtataaagatggcagagacattcctatttacctcagagtcggtaacgagggacaccctgacaagctctgcgaccaaatctccgatgctgtcctcgacgcttgcctcgagcaggacccagacagcaaagttgcctgcgaaacatgcaccaaaaccaacttggtcatggtctt

SEQ ID NO: 20461 - DNA, 244 bp, Glycine max
  Clone ID: 700955423H1
ggtcgaaagagaattaaacgtttgccccttgagcattatttgtagtcatgttcatcagaataagacagatctccaacatataacacaccctctcctccactctccaaataatgctcaagggtcgaaagagaattattggagagtggaggagaggctgtgttatatgttggagatctttcttattctgatgaacatgactacaaagatgctgggtttacggtgggatacatggggccgatttgct

SEQ ID NO: 20462 - DNA, 263 bp, Glycine max
  Clone ID: 700955424H1
gtcgtaatatacctcatgctgaactgccttccaagattcagatgtatttctttcttgtattctttgcccaaattgtcctacaatataaagcaaattcatgcccaattaatcactaatggcctgaaatctcccacctctgggccaagttaattgagcattattgtggctcaccagatcaacacattgccagtaatgcacatttggtgttccagtactttgacaagccagatttgtttctcttcaatactttgataagatgtgtg

SEQ ID NO: 20463 - DNA, 262 bp, Glycine max
  Clone ID: 700955425H1
ggacactttaccgtgatatttccaagtacaatcaattagagactcaggaggcagctcaggaagagtcagggtggaaacttgtccatggagatgttttcaggcctccttcaaactcggatttactctgtgtatatgtggaactggtgttcagttttttgggatgattcttgtcaccatgatttttgctgcacttggattcctctccccctcaaatagaggggggttgatgactgccatgctcttgctctgggtccttatggga

SEQ ID NO: 20464 - DNA, 261 bp, Glycine max
  Clone ID: 700955427H1
atcatacacatatactaaactgaacgaagttgtctaagaagagaagaacaatggctgctggcatgggcttccgcagtcacaaatctttgttaacaattcttttcggttttcttggattgttctcctttacagttgagcagccacaaaaaaataccaatttgatattcaagtaaagaatgtgagtagattatgtcatgcaaaacccattgtaacagtaaatgggaggtttccagggccaacaatttatgttagagaaggaga

SEQ ID NO: 20465 - DNA, 263 bp, Glycine max
  Clone ID: 700955389H1
gtgtttcctttcgccgaaaccctcgctcgcaacttctacagaatccctttcaccatggatattgaggaggacatccgttctttacagctcgattcagcagaagacaataatggggtggtaaatgcagaggatggaaggccagaagaagttgagaaatctgataagatggatgaagatccaaagcaggatgttgaggctgagccaaaggctgttgaggctgagccaaaagtgaaggataaggaggttccttctgttcaagatga

SEQ ID NO: 20466 - DNA, 267 bp, Glycine max
  Clone ID: 700955361H1
cttacattctgacccagcttggctttcatacttgttttgtgtggcatagcaagagagagcgcaatggaaggtatctcagtgggtttgaagaagtactggagaagaagcattaggggataccaaagattacacgtctcggatcggcgaaagaaggaaacggttcagcttggaggcagccagagaaggaggagatggcgcataaagttagctcgtaagatcagaattcccaaaatctcttctccagagaattggtgctgtgggtcagag

SEQ ID NO: 20467 - DNA, 272 bp, Glycine max
  Clone ID: 700955362H1
gaattcacatttcaacaaccatagccatggctttctccttctccaaagcacttgtccttgcctgctccttctgcttatttgcgtctttggcttttggacgcgatttctccattgtgggctattcatcggaggacttaaagtccatggataagctcattgaactctttgaatcatggatgtcaaaacatggcaagatttaccaaagcattgaggagaagcttcttaggttcgagattttcaaggataacctaaagcacattgatgagagaaac

SEQ ID NO: 20468 - DNA, 265 bp, Glycine max
  Clone ID: 700955363H1
tgacgttctctgacgaggttccgccgttggcgcgtcacggcgtcccgggctgggtcagatatcgccggcgggattcgcctccttgctgttgggaatatcgctggcgttgatgctttgtggatcggtgacgttcttcatcgggttcgtgttgatgccgtgggttctgggattggtcatgctcttctacgtcgccggaatcctctccagcctctccgtcttcggccgctccattctctgctacgccaccgctccaccctcgccacgt

SEQ ID NO: 20469 - DNA, 275 bp, Glycine max
  Clone ID: 700955364H1
gcaaccctaatccaccccaacccaaccctattgaattgaattgggggaagaagaacatagaaagaagaagaaaaatctgcacaattgttgtaattgaacgatgtctgctgcggtgtgcggaagcaagagatctttgttcgaagagcttcccccttccccgccagtatccaagaggctccgctgttcctcctcccctattcgcctctctctcccttctctcatcgaccacttcgcctctcttccctcatatggatgacaggtctcgagagagcgct

SEQ ID NO: 20470 - DNA, 269 bp, Glycine max
  Clone ID: 700955365H1
atagcccaaaccctaaacgccgttggttattcccgccggcaaccatttcagtggcttcttccgccgtcgccgctcattgccagtgctccattttctgatcaggaagaatgaggcctacaatgatgcttagggctctaaccaagcagtttcttggaattgtaggcgatgcagcaaacactgttgctaagaagccccccctgcctcctcctctggtgtcacgcaaacctgctttcattgatgcattcttgtacaagatgaagaagaaccca

SEQ ID NO: 20471 - DNA, 270 bp, Glycine max
  Clone ID: 700955366H1
cgaaaaagttgttggtatcaggaagcagcttaaccaagcagcagaagccacagatccatctcagcctacttctgttcaatcttctgtatcatatgctcctttccaaactactgaagatgataacaagaaggcagcagcagctgccgttgctgctaagcttgctgcctctgcatcctctgcccagatgcttacatccgttctttcttctcttgttgcggaagaagctgcctccttgaatggtagcttaaattctacaggattttcatcagt

SEQ ID NO: 20472 - DNA, 264 bp, Glycine max
  Clone ID: 700955367H1
aaccaagcttctctgttaaaaaaaaattaggcgtctaaagggccaaagcttagaaagttgaagctttttttgttgaggtgaaagtgaaatggttggcaaggataatctgagggctgaggacttgaacttgtgctttaagaagcttatgatggtggccgggagtgggaacagtgagaaaggggtgaacttgaaggttggggtgatcaccgagtggaaggatattcctgtggagcttctgatgcaaatctgtccctgtggatgatc

SEQ ID NO: 20473 - DNA, 261 bp, Glycine max
  Clone ID: 700955369H1
actcgagccgaatcggctcgaggtgagaggagtgaatgtggtattagttgatggaagattgacgagtgttccagcaggagaacggaagaagaaaccggtgcggtggagataacgaatggcttgaaggatgtaacgacagcgcgtggcgtcgtccgaggaggttcttgaacggaggctggtggtgttgaggggacaggattcagatctgaatgtcgagcagtctcaaactcgtcgatctccagcctctccgccaatgaggtt

SEQ ID NO: 20474 - DNA, 268 bp, Glycine max
  Clone ID: 700955370H1
caaccaacacttgtttcttcagccatggccagtcaacctgaatcatctgacgcaaagggcacaaaaagggattttagcaccgccatattagagcgtaagaaggctccgaatcggctcgtggttgatgaagctgtcaacgacgacaactctgttgtcgcgcttcatcctgataccatggagaaacttcagctttttcgtggtgacaccatcttgatcaaggggaaaaaaagaaaggatacaatatgtatcgcacttgctgatgagacat

SEQ ID NO: 20475 - DNA, 266 bp, Glycine max
  Clone ID: 700955371H1
taagaacgggcacttaaaagagtttgaaggagcttcccagagactaactctgcataaggttgacctccttcatcttgactccgttagatctgttattaacggctgtcatggtgtctttcacactgcttctcccgtcaccgataaccccgaagaaatggtggagcctgcggtgaatggagctaagaatgtgatcatagcagctgcagaggctaaagttagacgcgtggtgttcacctcatccattggtgccgtttacatggacccca

SEQ ID NO: 20476 - DNA, 261 bp, Glycine max
  Clone ID: 700955372H1
cctttgcctccttttcatggtggtccccaatctcagccatatgccattccatctcgcggggcagttcatggacccgttggggcagttcctcatgttccatctccagggagtcgaggttttggggctgggagatgtaattctggtgctccaatctgcaatcatctagcacatcaacatggcacccaacagcctattgggagtattggatctacatttgacttccccgctgtagagattcccaacatacagccatctgttggt

SEQ ID NO: 20477 - DNA, 244 bp, Glycine max
  Clone ID: 700955373H1
cataattgtgttagccaagaaatgaagaaatcccagcaaaacgttgttgaagggagagttccctctccgaaacaacaaaaccttgtcgccgtcaccgtcgctagaaccaccactaccacgagaaccaccaccaccagcagctatgtctttgaataagggttcggggaaactgtctgccaaagagaaatatgctctgattcccgataacttcaccaccctagaacaggttacaattgccttgagg

SEQ ID NO: 20478 - DNA, 266 bp, Glycine max
  Clone ID: 700955374H1
caaaaatggcacctgcaacactgtctctgtctctcctcctcctgttctcactcagcatcgccgtaaccgttagatcgagcgactacgactacgattgtgtgtacactgcatacgttagaaccggttcggtgttgaagggcggaacggactctaagatcgggctgaagctgtacgacaagtacggctactacatctacattaaaaacctcgaagcatggggcggcttgatgggcaagggctacgactacttcgagcgcggcaacctc

SEQ ID NO: 20479 - DNA, 266 bp, Glycine max
  Clone ID: 700955375H1
agaatttcacattttatcttttgcattgagcaactaactcactcgcgccatggctgctaccatcatcaccacatgcaagctctcactgcttttgagtcttctctcagtttcacttttgctgggtgtgaggtctgatacccttcagaatgtaggcgcaattccccccacatgcaagcgcatagagtgtcccagctatgatgtcattcacgtaggcaacggctacgaaatccgtcgctataattcacccgtttggatttcaaacagcc

SEQ ID NO: 20480 - DNA, 90 bp, Glycine max
  Clone ID: 700955376H1
agtggtttcagtgagtgatcggtgttcacttgatccttcataagtcgtcatcatcatcatcatcatcaccgttgattgtagaggatgccg

SEQ ID NO: 20481 - DNA, 270 bp, Glycine max
  Clone ID: 700955377H1
tggttaatgcttttggcaactcaatgcaacatgtgcagtattctggaaaagataccgcaatggtgccaccacattgtaactcggacacccaaaatcctattctatttggggtcaacatcgattcatctggtcttctgctccctacgactgtcccgcgttatactactgcatcagcggatagtgatgcatcagcaatgccattaggagagtctggattccagtctcctttatatccttgtggtcaagattcatcagagttggtgcaaagtg

SEQ ID NO: 20482 - DNA, 272 bp, Glycine max
  Clone ID: 700955379H1
tagctatctatttatctatagcaagtgcgtcaagagacacgtggtaccctagctagagtgccattctgtggtttctttctttctttctttctgcatcacatcacaatttgcattgcctcgtgtcctttttcttctttgctctccaaaaatctcacacacacaggtatctagcaaatgggttctcaccaacaagaaccatggctattggagaatgggaaaccaagggttttgaccaaggagaccaggcatggccgttctgcacacagaatgtc

SEQ ID NO: 20483 - DNA, 273 bp, Glycine max
  Clone ID: 700955380H1
acggatcgaagagatgcattgcattgccgcgctttgaaaattgagcctgcaccttccttttcggtggggcagaaatttcaatttgatgatattatagaagctcaacagtttgatagagatattctcagtgccatttttgaagttgcacggaatatggagaacgttgaaaaggattctcctggtagccagattttaaagggttttcttatggccaccctattttatgagccttctactagaactagactttcatttgagtctgccatgagaaga

SEQ ID NO: 20484 - DNA, 268 bp, Glycine max
  Clone ID: 700955383H1
acctactgcagtagatgatgaaaagatggatgtttctacttcaaggaagtatggttcagagagctggatgtcaatggggaggaatgagcctacatattcggatcttctttcaggctttgggaccagtggggatccttctcattcatccctgaaggatcaaatgagccctgcttattctgctagaaagcaatcattggatcatgaaggcaaacttcacatgcctcatccgtggcctgtaatgccctctagtctgtcactgaacatcttg

SEQ ID NO: 20485 - DNA, 265 bp, Glycine max
  Clone ID: 700955384H1
attaagattttaagcgattctcgttcggctcgggatggctggccgctgaaccggaccggttcggcttggagagatcttgttgggctcggaaacacgcatttgcggcggtgatgagagggagctgctgctgctggaaccgtcggacagagcagcggttccgcctccaccgcgatctccaccgttaaatcactcaagatcaagcttctcctcttttgctgcgtcgccttcacgcttctcgccttttccaccagcgcttcttccttcg

SEQ ID NO: 20486 - DNA, 260 bp, Glycine max
  Clone ID: 700955385H1
cctactcattctccatacctcaacgaagaggttaaagagacggcaacactttgctgtccgccttgaccgagcagagcttcgtcttggccctcgattttgccctaaagtactctcagtcacaacagacaccgtcgtcgtcgtcgtcgtcatcaatggcaccgaagcagaccaaggctgagaagaagatcgcttacgatgcgaagtgtgcgacctaatggaggagtacggccagatcctcgttgtgaactccgataacgtgg

SEQ ID NO: 20487 - DNA, 265 bp, Glycine max
  Clone ID: 700955386H1
ggtttacaagcttggcaaagctggagatgaatctcactctgctcttactgagtttgataggaccgagaaagacattaccccaataggtggtttccctcactatggtgttgttaaggatgattatatcatggtcaagggatgctgcgttggtcccaagaaaagggttattacattgcgccaatccctccttaagcagacttctcgtgttgctctggaggagatcaagctcaagtttatcgacacctcttcaaagtttgggcatggt

SEQ ID NO: 20488 - DNA, 255 bp, Glycine max
  Clone ID: 700955387H1
gcagtagcattaagagtccaagcagataagtccattttctacaattgctcaatggatgggtatcaggacactctttatgtccacaccatgcgtcaattctatagagatcgcacgattatcaggtaccattgacttcgtgtctggtaatgcacttgctattttccaaaattgcactttcgtggtccgctagccattggcgaaccaacaatgcattgtgactgcacaaggtagaacagagatacaacaaccatctgg

SEQ ID NO: 20489 - DNA, 263 bp, Glycine max
  Clone ID: 700955388H1
gtccactttaaggatgtagcattggcacatattttggtgtatgagaacaaatcagcggctggtaggcatttgtgtgttgaagctatctctcactatggtgactttgtggcaaaagttgctgaactctatccagagtataatgtgcctaagatgcaacgagatacccagccgggattattgagaacaaaggatggagcaaagaaactgatggatttgggtttgcaattcattccaatggagaagattattaaggatgctgtaga

SEQ ID NO: 20490 - DNA, 269 bp, Glycine max
  Clone ID: 700955360H1
actcgagccgaatcggctcgagcaggaaagggaccaaacatggagaccatggccaacttacaattctcttcacttttaagtacaatagtttttcattgtttcatttaatctacaatggctgcttcaacaatggctctctcttcatcatcattggctggccaagctatcaagcttgccccctccacccctcagcttggtgttggaagggttagcatgaggaaaacagcctccaagactgtttcttctggaagcccatggtacggcccaga

SEQ ID NO: 20491 - DNA, 256 bp, Glycine max
  Clone ID: 700955332H1
cttcagttcggtggagggagggagccgtagcagcggaagctctagcttgggtagcgaatcacaatggcgagaggattaaagaagcatctgaagaggcttaatcgcccaaagcattggatgcttgacaaactgggtggtgcatttgctcctaagccctcatctggaccacacagatcagggaaatgctgccactcatactcattttgcgtaaccggctgaagtatgctctaacataccgtgaagtcattgctattct

SEQ ID NO: 20492 - DNA, 276 bp, Glycine max
  Clone ID: 700955333H1
tcttgtggggttcccttctgcttcataagatagactccttcaaacacttagagggaagaagaaaaaaaaaacgtctagaatcaacataaagtcaggcatctggagattctgattccaagggaaggaagtgattgatggagaacaagtataggctaaacaggcagaggagtggaatatggaattgcttgagagatggagactttgaagaagaagaagtttgggctgttttcaaggaaaaacctgattacaacatttctggagttcacaagacaaggg

SEQ ID NO: 20493 - DNA, 134 bp, Glycine max
  Clone ID: 700955334H1
aagatattaacaagcttatattatttttatattgattgtacttgtaattagtactcaacaactttttacttggactaaaaaattattctctctatttaacaccagtccatcacaaagagtaaacatacattttt

SEQ ID NO: 20494 - DNA, 272 bp, Glycine max
  Clone ID: 700955335H1
agagaatcccatgaagactcctcttccttacataatcatatttggtatgtcaactccttttgtaatcttggccattgcttttgcaaatggttggattaaggtgcctgttcgatgagacaacactttacttctcattctcaaacttcaccagagaaattctttactttttcacatatgttatggctcgttttaatgaacaaagttcacttatgaatgtcggattgaggaaagcataaatgaggtttcttgtttcaagaatagcacgttggtga

SEQ ID NO: 20495 - DNA, 271 bp, Glycine max
  Clone ID: 700955337H1
gttgcttgcggtgccctagattttctctatcctttcaatcgttcccgaattccctcccgctagggtttcccatggattccgaggacgatatgcacgacgccaacgatgtggagtcccttgacgacgatttctacagtggcgagaccgaggacgctcccatggattactacagtgactacgacgacgaagctgacgattacttcgacgatgctgacgattctgaccgggttgagtctcgccgccctgagcaaaactttacaatattgaggga

SEQ ID NO: 20496 - DNA, 269 bp, Glycine max
  Clone ID: 700955338H1
cggctcgaggtgaaacggtgttctgatgtgagttgcgcaattcgggcgcgggctttgtcgaatttagcgcagtgcgtggggtttttgtctcgtggtgagaggactagtgcggttctgaaggagtttacggggtttgggagggttggtgatgggaatgttggaggtggaatgaatgatatgctgaggaggaggtgtatggatgataaggcagctgtgaggaaagctgcattgcttttggttactaacttgacttctctcttggaggtgca

SEQ ID NO: 20497 - DNA, 265 bp, Glycine max
  Clone ID: 700955339H1
ccagcctgagatggcggtgacggcagcagtgttgccaccagaagaagtagcccatgatggcagcgacaacagtggtgatggtggtggtggtgagatgattgggatggacttggatgcaaattcaggtgaaggaaatgaaggtaataataagatgagctttggagggaacggtggccccgccaagaaactttggctctcttgaagataaggtcggatatggatacagtttttcgagattcaagtcttgaaggtccactttgggaag

SEQ ID NO: 20498 - DNA, 270 bp, Glycine max
  Clone ID: 700955340H1
gaagttagttacaaattatccaagaaatgcgggtgtgaagaaaggcagcagcagagtggttaggtgtgaattgtgattttttctctccctctgaatattccctgtgtttcatccttatttgtcttttctgccatttttcatattggaattgtactagtcctcactggttgagagtggaatttgcatttagcagagcaataaaacagcacaatcttatttccatctttcctctgtcgcattgcataccttacatacccttctactccatgg

SEQ ID NO: 20499 - DNA, 270 bp, Glycine max
  Clone ID: 700955342H1
catttatgctggtccacttggccctaaatcttgtgaacttattagttatttcgaggcaatcgaaggagttccaaagatcaggtctggatataaccctgctacgtggatgctggaggctacttcttcagttgaagaaaacagactgggagtggactttgcagaaatctaccgaaaatcaagtttatatcaatataacctagagttggttgaaaggttgagcaagcctagtggtaattcaaaagaattgcattttccaacaaagtattgccg

SEQ ID NO: 20500 - DNA, 272 bp, Glycine max
  Clone ID: 700955343H1
tgtttagctacttacctcaatctttctcatgggaaagtttgccctagccaatatcctcttggtccttctcttgaacttgagcactttgctcaatgttcttgcttgtccctattgcccatacccttctcccaagcctccaaaaaagcctcccgttgtgaaaccaccggttcacaaaccaccaaaaccatgtccaccacccaagtcatctccaaaaccaccccatgtacaccctccctatgttccaaaacctcctcactagcctaaaccaccag

SEQ ID NO: 20501 - DNA, 272 bp, Glycine max
  Clone ID: 700955344H1
aatctaaccaatactataataatgctttgctttgttttgctacccctcctcctcctcctcctcctctcatagcctctctccatcaaatgatcaatcacttaacagctgcctcccactgcccgtacatcttgtttctctcctttgtgggaattcactgtgtctagatgctactaacacatttttaaggagcatcattcatcattgtttttgtgttcaatgcggataagtgctttaactaaccagctgtgaaggcttgtcggttgtgtagtagt

SEQ ID NO: 20502 - DNA, 242 bp, Glycine max
  Clone ID: 700955345H1
tgagatcatcgttgattgactgtcatgtttcccccgctggcatctcgttctcattctcattctcatcatttactgcaaaacttctgatcagaaccattttttaagaaagaatgatagcaatcaggtctaaaaaatccttcctcatatatctgcattatctagtagtctataaactttggaaggatcgtacagaattaactgcaataaatatgtgattcgtcatcgagccatttcatttattg

SEQ ID NO: 20503 - DNA, 255 bp, Glycine max
  Clone ID: 700955346H1
caaacacaacaacatatggaggtgctaagggtgcaaaccatagcttccaaatccaaagatgctgccatcccagccatgtttgttagggcagagacagagcaaccaggcatcacaaccgttcaaggggtgaaccttgaggtgccaattattgattttagtgacccagatgaagggaaagtggtgcatgagattttggaggcaagtagggactggggcatgttccaaattgtgaaccatgacatacctagtgatgtt

SEQ ID NO: 20504 - DNA, 275 bp, Glycine max
  Clone ID: 700955347H1
gattccctgcaaagaatctaaatgactaaatccaaatccaggatataaagatatcacacctatcatcatttcatttgtttcttctccccttccatgaacactactttctccctcttcttccatatcttttgattaattctagctatcatagttttaaaaaattcaaccatgcgcctcttctctttcccacactacaaatccttttggagatcttcaattgcatttgcatttttcttaacatttctcactctccaaacccaatccactccaatccc

SEQ ID NO: 20505 - DNA, 275 bp, Glycine max
  Clone ID: 700955348H1
ctctttttagcaactgttgctctgctctacgttaaggacaagcaagttgaagcaattcctctggatgatgccactcaaccctcttgtttctttcagcttttcggtgctctgaaagagctcaagagaccgatgtggatgctgatgctggtcacagctgtgaactgggtggggtggtttcttacttccttttcgacactgactggatgggtcgtgaggtctacggtggaactgctggggaggacgcgtacgcgaagggagtgcgcgtgggatcgtta

SEQ ID NO: 20506 - DNA, 275 bp, Glycine max
  Clone ID: 700955350H1
attgtttcctaccaagttctctgtctggggagttcttggcaccaccaccagcttatgcagtagctttaagctacgaaagattttccttgaccatggggcaaaagcatttagtgacggtgttctgtttatgggctttaacatgttcccttcttccatctttctcctttggaattctgagaattggtttgaagaagagacctctagatcttgatagtattaatgctgctagaaaggcaagagaaggtctaagatctgtaagaccaatgatgggtgca

SEQ ID NO: 20507 - DNA, 271 bp, Glycine max
  Clone ID: 700955352H1
tgagtttaaccaaatcatattaagccatggccacctccaacttctcaattgttctctctctctccctagccttctttctagtgctactcaccaaggcaaactcaaccaacaccgtttctttcaccgtcagcaagttttccccacgccaacaaaaccttatcttccaaggagatgctgctatctcaccctccggggtgttacgactcaccaaggttgacagcaacgacgtgccaacgacgggatccctaggacgtgccctttatgctgcccc

SEQ ID NO: 20508 - DNA, 251 bp, Glycine max
  Clone ID: 700955353H1
ctcttttaaagttctggcccgaaccctttctttcgtcacaatcacaacttggtaaaggtagtccgtgcaagaaagatgaagctcgagttcgcaaatgtgctacttctgtgccttgtccttagctcttctttcttggaaatctcaatggctggttctcgtaagccctctctccctccctccctcgatgatcactgcatgcaaatacagttactgcttgatttaatttgttgatatgctactaatgaagtgat

SEQ ID NO: 20509 - DNA, 251 bp, Glycine max
  Clone ID: 700955354H1
ggaaaatcttctctcttccctagttgaatgaattggaaacatgagttctggcaatgtgaagccagaagaagaagccctagaacaggagaatgtaggtgatcctgaccctgacatttcagaaccacaagagcagaaggctggcagtaactgcaagggcattgagcagattcctttgtctggggaaaatgaagaggatgtgctagttaatataactgggagtgggaccatagttcactggtggcagtgcagtg

SEQ ID NO: 20510 - DNA, 171 bp, Glycine max
  Clone ID: 700955355H1
tcggttcagtagcgtccgaacgaacttcaccactcagtctgttgcttgtgctgatgcattgcgccgtgaaccctcgctagctcactctccgctcagatccaagtttgtgttgattctccgatccgcaatgacgccgaggaagaacagaggcaaggcttcgtgttttcctct

SEQ ID NO: 20511 - DNA, 92 bp, Glycine max
  Clone ID: 700955356H1
gtattcgccctcttttctcatctcgaacatcttcgtcgtcacggaggctagtcttcctgttatcacaaacaatgtctgacggtcaagaatca

SEQ ID NO: 20512 - DNA, 269 bp, Glycine max
  Clone ID: 700955357H1
tcaacctgtaagatccgcgagctaaaactcccacactccacagcttttcttgttttcctttcctcagatcagatcttcacgccgttatgcttagaacattagctagggtgttcaagcgagccacccttgccaatgacttgcttcaaaaacgcagcagattctatgcaaccacggttggtggaagaagtgacaggttagaaggaaaagtggcactcataactggatcagcaagtggactcggcaaggccacggcccatgagtttgtccag

SEQ ID NO: 20513 - DNA, 265 bp, Glycine max
  Clone ID: 700955358H1
aatttacacaatattttaagacgcacataaacttcctctgtcactacccactcctctctctgtctccgcctttcgcattgcaagcactctctttctttgcttttacttccccctttcagtttcttcaacgctgcaactatccatggcaatctgctggctcatatccgatgtgtatccactgttcgctgcggttggtgccgctgttgggatctgtggattccaattggttcgtaatatctgcatcaaccctgaagtcagggtgaac

SEQ ID NO: 20514 - DNA, 246 bp, Glycine max
  Clone ID: 700955359H1
ggctcgagggcagttttgacttttcaccccactcctgctcttctatgacctaacgtgaagatcacaagagttccaagacgaggaagcttctgttctgtctaagcaaaggtcacatatgtgggcaagcatttatgaaagccttaagcaagtggtcccatggagacgcaagcaacagacgcagaaaaaatttgcttccaaatttgacactgtttgagtttttactcttgtcaaatggagttatttaaa

SEQ ID NO: 20515 - DNA, 273 bp, Glycine max
  Clone ID: 700955331H1
caagtgtatcgtttctggttagggcgcaaccgtctctgtcatcggatatcagcaattcagtgttccaaaccgacccgtttttcttcctcttcttcaaattccccacttttcaattggttccagaaaacaacaggttttgacgtgttggattcgaacaatggacacccgaagtggtgaagacactgttgatattgatcttggaggtgtttcatccagtggagaagcgattggggatatgggtgatgacattgtcacagtgctcactgggctgga

SEQ ID NO: 20516 - DNA, 247 bp, Glycine max
  Clone ID: 700955294H1
cccaatacctactctccgctcccaagagcacgcaccaccactattgcacttcttcctcgttctccctctttttcttcttcttcgctaaacccttttttctatctcactaacacaacaatgggagacgagaagaagggcaagcctgctgcttccggcgtgtggtccaccatcaagcctttcgtcaatggtggagcctccggcatgctcgccacctgcgtcattcaacccatcgatatgatcaaggtga

SEQ ID NO: 20517 - DNA, 254 bp, Glycine max
  Clone ID: 700955295H1
gcctgccttccccttctcataggagcttctatcactgagcaactatttctcaaggggtttggaggagactatggccatgcttactctagagcaacttctttggctcgtgaagctattgccaacattcgtaccgttgctgcttttggcgcagaagatcgagtctcaacccagtttgcatctgaactgaacaaacccaacaaacaagcacttctacgtggccacatatcaggttttggctatggcataacacagct

SEQ ID NO: 20518 - DNA, 277 bp, Glycine max
  Clone ID: 700955301H1
catggtgtcacatactctttaactgaggaatttgtgagtgcttatagaatacactcactcttgcctgataacttgcaattgagagacatatctgctaccccaggacctaacaaatctccaccattaatcaaagagattcctatgaaaaatttgattggagtgcaaggagacgaagcattgacaaaaataggagttgaaaggcaacttgtgtcaatgggtcatcaagcttgtggggccctagagctttggaactatccattgtggctcagagatcttg

SEQ ID NO: 20519 - DNA, 76 bp, Glycine max
  Clone ID: 700955304H1
ccaagccccactcaaccaccacaccagtctctctgctcttcttctagctttcaagtttttagggtcttaagacggc

SEQ ID NO: 20520 - DNA, 266 bp, Glycine max
  Clone ID: 700955308H1
cttctttcataaactaaaattagcttatgcacaagttaataccagatttgggagaagctaataggagagtttttacaaattagcttatgcaaaagctagttttagctcatgagaaaacttattttatttgtcattcttattttcttctcttaaataagtgttcatggagaagtttatccagaaaaggtactgctctgtttattttctgagtttctgttaaagcaagcaaatagttctaattgcactgcatatgagattgtagtagt

SEQ ID NO: 20521 - DNA, 245 bp, Glycine max
  Clone ID: 700955310H1
agggttccatcccatctattctatctatttagataaaacacgaaatcccaatcttaatcgcaagcaattcctctctctgagagaagctctcggaattcttctgatactcgtagacattttaatggcttgttcatcatccgattcaaaaaaaccagtgacgtcgctgttgttctcttccttcctaattccgataccttccgattctctttacgccctacgcatactcgatacttgtccatctctct

SEQ ID NO: 20522 - DNA, 265 bp, Glycine max
  Clone ID: 700955311H1
ccgagctagaagccactttggtttctttgcctttctcaatacattttcttttccatggaggtaggaagtgttcttaactttcttcaggacaagaccattttaattgttggagccactggctttctagccaaaatttttctggagaaaatattgagggttcaaccaaatgttaagaagctttttcttcttttaagagcttcggatgccaaatcagctaattatcgattgcacaatgagatcatagcgaaggacttatttattgtgc

SEQ ID NO: 20523 - DNA, 274 bp, Glycine max
  Clone ID: 700955312H1
ctcttattttcctttgtaatggaaagttagaaaccctcatcgtcaaagcacgcgttttttttaatctctctctctcaacaaatatttgtgggtagattcaattcaccatgtcgagctcatcggagtactctgaattttccggccagaaaccggcgaggtcgccggagaaatcgagcttctctcagacttgcagtctgttgagtcaatacatcaaggagaagggtagcttcggagatcttaccctcggaatgacatcatgtgggtcacctgagac

SEQ ID NO: 20524 - DNA, 270 bp, Glycine max
  Clone ID: 700955313H1
gaagacattcccttttgttgtcactgaaggacctgatggatatccattaattcatgcacggtacttgggtgaagctagaacatttacacccacccaagtatttggaatgatgttatcaaaccttaaagaaatagccgagaaaaatctgaatgctgccgttgttgattgctgcattggaattccactttattttactgatcttcagaggagggccgtcttggatgctgctactattgctggtttgcatccacttcgtctgtttcatgaaac

SEQ ID NO: 20525 - DNA, 278 bp, Glycine max
  Clone ID: 700955314H1
tctcgagccgaatcggctcgagccaaatcaaagacacctgagccattcaattcccctccttaattgctttcaagtttcaaacctaattttattatctgaaaaaatggctttcaaagtttcgtttttccttgcacttgttctagtttccaatatcctcctccttgatacaacagctgctggacgcagcattggcgaaaactccaactcagaggaaaagaaagagcctgagttcttgttcaagcatgaaggtggggtgtatattccagggattggacctg

SEQ ID NO: 20526 - DNA, 279 bp, Glycine max
  Clone ID: 700955315H1
ctcctccctctctcttccaaacacacatccacaaccatggcagcaccatcttcagagacaaagtcaccatcatcctccaacacgcagcttccgctgaaaccaatcccaggcagctacggaatgccgttttttggagcaataagcgacagacacaactacttctaccaccaaggacgcgacaagttcttcgcgacgaggattgaaaaacacaactccaccgtgatccgaaccaacatgcctccggggcccttcatctcctcggacgctcgtgtcgtcgcg

SEQ ID NO: 20527 - DNA, 279 bp, Glycine max
  Clone ID: 700955316H1
ccattttcaagctctcaacgccatctccagctgcttccttatcagaagcgcttcgccccagagattctcgcttcctctccttcaatccttcttccaacgctattaattacaaaattaacctctccgcttccctccgatccattcactccctccctcttaaaacctccttgcggatcaaatgctcccaaacagatgggaatggaagtcctgcaaagaggacagtgcttcatgatctttatgagaaagacgggcagagtccatggtatgatcatctctgca

SEQ ID NO: 20528 - DNA, 275 bp, Glycine max
  Clone ID: 700955317H1
gccaactccaatatgcatatccaagccgaacattcattgacacaggctcctgcagctgcttccaatacaactcaacagctgatgccacctctaacttctgactcttgggctgcaatgactgaatccattgatcattctcactcagaacaaagattgcaatcatcattgttgaatgttgataagcctgcagatgatggctacaactggaggaagtatgggcagaaacaggtcaagggtagtgagtttcctcgaagttattacaagtgcacgaatcc

SEQ ID NO: 20529 - DNA, 277 bp, Glycine max
  Clone ID: 700955318H1
aaaatattaggatcaagctccgagtatgtccaaagcaatataagccggtatttctctgatccccaatactactttcaagtgaatgaccactatgttaagaacaaattaaaggttgtgttgttcccattcttgcaccggggtcattggactaggattactgaaccagtgggaggtaggctctcttataaaccaccaatttacgacataaatgctcctgacttgtacattccattaatggcatttggtacctatgttgttcttgctggcatctcattgg

SEQ ID NO: 20530 - DNA, 273 bp, Glycine max
  Clone ID: 700955319H1
gcataacgtaaaaatacaaacaaatcaatgccctgtagggagtacagaaaggtttgttggtatattgtaagcatttatgcaaatattttctatttatgtaaagggcaatttggttcttgaggctcccacctatgtatcacatatgcagtaacacagacttatcctggtaagtgaagagccaatttttaaggattgaatgtgacctaggtcacaagcaaagcagcaaccttactggtgatgggttgcactcacgtgtttctagttgtgtatcac

SEQ ID NO: 20531 - DNA, 272 bp, Glycine max
  Clone ID: 700955320H1
aaggatttcaactttaggctccatctaaaaaaaatggctggtttggctagcaatcttcctctaattgttatgataggtctgcaaattcattatgcagcacttgccatattcacaagagccgctctcttagatgggttgagtacaacggtgtttgtagtatacaggcaaggcatagccactttggctttggcgcctatatttttctctcctaagaggagacaatcagtgaaagattctttgggattcaggagttctttttgctgtttgtgacc

SEQ ID NO: 20532 - DNA, 270 bp, Glycine max
  Clone ID: 700955321H1
atcaacacttgttctgaagtttcgcctgaagtgtgggcattaggaggatctgtagttgagtttgttttctccaactttgctcttttctttagcaacaacttctgtgatcttcttggcaatattgcatgtgtacctgctgaactggggtttcctagtgttggttgcaagagggtgcttgcttcatataatgaagctattttgtctaaagattggcctctagcttggagttgtgctcccattctatccaaacaacacactgttcctccagag

SEQ ID NO: 20533 - DNA, 273 bp, Glycine max
  Clone ID: 700955322H1
gtctttgaaatgttgtcaccccttcttctatttctatgcctaactcttcctttgtttttgttgtccttcttcaaataccgtaaaaccttcaagaatccaccacttccaccaggtcctagaggccttcccataatagggaatcttcatcaactagatagtccttctcttcatgagcagctatggcatctctcaaagaaatatggtcctttattttcccttcaatttggattaaggccagccatagttgtttcctctccaaaattggccagagag

SEQ ID NO: 20534 - DNA, 267 bp, Glycine max
  Clone ID: 700955324H1
atcagcaatggaacctgcattatgcagtgcacttgctctttcacccaaccaagtattcaacgcagcaaatcctggagatccgaaatgttcctttgacatatagcatacatcggagtgtcgtagtgacagtggcagccactggactattagggacaggtggtgggtcgtctgagaggtcaaccatagcagacaacagcatctggtcgggaatctgaactagacttgatgacatcgcggaaaacatccccaccctaccgagtcttgctg

SEQ ID NO: 20535 - DNA, 270 bp, Glycine max
  Clone ID: 700955325H1
cagaattgaagttagagtacctgagtatggctggactacgcagaaaatttttcatctcatgaacttcattgtcaacggagttcgtgctgtggtgtttggattgcacaagctagtttttcttttgcatcctacggtgttgatttcggtgctattagatctgccaggactactttttttctcaacatatacacttcttgtccttttctgggcagaaatttatcacaggcaaggggtttacaactgataagcccaagatagtctatatttcag

SEQ ID NO: 20536 - DNA, 267 bp, Glycine max
  Clone ID: 700955326H1
accaaacattttttttccatgaactttgcatctttctatcatcacatccatggccacagttgtgaagctccacgttttcccagaaagtttgaaccaacacaaaacgaggttgctcaggagaggctttggctcatgcccttcacctggggtgcttggttttggccataaaaattatgatcagttctctgtgaaagtgtgcagggcttttaggactgcagatggtggggatgtgaaggagaaaaagttcgaatttgaagaaaatgaaga

SEQ ID NO: 20537 - DNA, 268 bp, Glycine max
  Clone ID: 700955327H1
tttgtcacctttattctctttcagtagaacaacagcaacctctctgccttccaaacccacattctggaatttggttccaatgaaacaatcttcttctccggggcacttggccttagccttagacaatccacgtagaacacttcacgtgtcttgtggctccacatcaccacatgcttcccagagatcatcaattcaggggggtgaagcttttttcaggggtgtgttggcaagtatgcaatctgtttacttgaacagaatcgtactgcta

SEQ ID NO: 20538 - DNA, 230 bp, Glycine max
  Clone ID: 700955328H1
acgacgtcgtcttcgtatccgaaagcaccgggtcgccccgcttctacattacaaaacccgacactaaaccccagcctttaccctttctgcccaacgctctcttccacgatcgcccaatcgttaaaaacggaaagctctacttcgtttccacgcacgaagaaaacaccgccgttttcactagctggagcgccgtttactccaccgccatagatgactccaccgccacgtca

SEQ ID NO: 20539 - DNA, 272 bp, Glycine max
  Clone ID: 700955329H1
gagtcattgaactttgactatatttttcagagttcagattattcttctcttttgaattttgattttgggggtttaagtttctgagagaaaaaaaaaaatgataaaggtcgttctttttttgttctgctttgcctctgcactgaccctttcagtatcggagtccaaatctgcttctgtgcaatctcatgcagctgaatctttctctgttggatatattcagatgaaagatgcagcgaactgttcttacctggtagttatatctacgagttgtt

SEQ ID NO: 20540 - DNA, 253 bp, Glycine max
  Clone ID: 700955293H1
cctgagcagactgccggtgataagccggaggaaggtgaggatgacgtcaagtcatcatgccccttatgccctgggcgacacacgtgctacaatggacgggacaaaggatcgcgatcccgcgagggtgagctaactccaaaaacccgtcctcagttcggattgtaggctgcaactcgcctgcatgaagccggaatcgctagtaatcgccggtcagccatacggcggtgaattcgttcccgggccttgtacacac

SEQ ID NO: 20541 - DNA, 251 bp, Glycine max
  Clone ID: 700955260H1
agaaactgattcttcatctcagtcttctatgagcagaagaggaagtcttaatcaggggtggtcacttgagtttaatggtaaggatgataaattggattccagatctcataatcaacttgccaggttttcttcaatggaatccttgaaacaagtggacagcagatcttcaaagaaaaacaaaaaattggaattcaacagtagccgtgtctcacctgctccaaatggtggttcccagtggggagcaatgaata

SEQ ID NO: 20542 - DNA, 255 bp, Glycine max
  Clone ID: 700955261H1
cgacaatgcattaggtgaaaaaggtgttagagcatttggagcacttttgaaatcgcagaaatgcttggaggagctttatctgatgaacgatggaatctcaaaggaagctgctcgagcagtttgcgagttgattcctttcacagagaaactcaaagttcttcattttcataataatatgactggagatgaaggggcactagctatagccgaggttgtgaagcgttctcctttgttggaagattttcgctgttcctc

SEQ ID NO: 20543 - DNA, 258 bp, Glycine max
  Clone ID: 700955262H1
cagggccattcccttcaagtccaagtgattcaatcaaacggttcatgcttaatcaagttgggaacaacaacaacaacaaaaatcaagccaatgtttgtgggttttggtttcatttcattaagatgatctgtttatctcttttcttctttttaaaatttaaagtctttgtattttgtatgtaaagatgtaaaattatgattattaggtggtgcatgtgtcgcgtcatgggccaatgttatcctctgcttttaagttgga

SEQ ID NO: 20544 - DNA, 267 bp, Glycine max
  Clone ID: 700955265H1
caagtccctcacaatggcggaatcgtgccttctatccctcccttccctcttctacgccaaaaacaataccctttctctctcaattcccaccaagcccctcaacctccatcttccatgctccaactcttcgctctttcccctcaccaccaaaacaacgcgccactcttctctcctcacattcgtggctcagacatcggattgggccaaagaagaagaggaagaagaaacctcgtgggagaaccaaggcgacaccgcgtggggaactga

SEQ ID NO: 20545 - DNA, 252 bp, Glycine max
  Clone ID: 700955266H1
gcaaagtcgatcatgtcctcgagcgacccaacgcagcgttttgtctcgccgcggctcggtgcacgctcgcactccgccaaggaatcacgcatcatcttctgcatggaaccgttatccgaagccttgaaaactggctgtcaactcatcaattttcgaaaccgaaaacggtaatttcgataggaatactccgggggaaaaacgacctttctgggagtgtatcttgtatgtcgggcatcggcatcaccgtcgctt

SEQ ID NO: 20546 - DNA, 261 bp, Glycine max
  Clone ID: 700955267H1
caaactctcacactgcctcttcctctcagattcagcaattttctattttctcctctcatggcttcagattccaaaaaggatttccctgctgatgacaaagctggaccagaagagagtaaaacatccaaagatgagacttcatctaaagattctccagcagaacaaagagcgacagctacttttggacctagacctggacctgctgggcatccaggcaacccttttgatctctcagcaatgtctggtctgctcaatgatcca

SEQ ID NO: 20547 - DNA, 255 bp, Glycine max
  Clone ID: 700955268H1
ctagaacgccgcttattatatcaggacctgcagagaaacccagtgatcgatattataaggctgcaaagattgcagaagcctttgaacgagacatacattacactgtagacgaaaaacaaaaatcagttctactttctgagcaaggttatgaagattctgaagaaattttagctgtcaaagatttatatgatcctcgagaacagtgggcttcatatatcctaaatgcaataaaagcaaaagaactatttcttcgag

SEQ ID NO: 20548 - DNA, 250 bp, Glycine max
  Clone ID: 700955270H1
gagaaacctcaactggttatattctattattgtagttcatgcagaaaatgacatttccttattacagaactcttacggtgtcatcttttgagttgaaatgcatgatggactccaattttgaagaactgaagtctgaaaccttcaagagatggggtacacaagtttatttttgtatttgtaattcataccttgacaggtttacttttgactgatccatttcatgctcaagtgtccattaaattctatagga

SEQ ID NO: 20549 - DNA, 249 bp, Glycine max
  Clone ID: 700955271H1
catttttcgataatatgagtgctatggataatattcaatacatatacaaaagtcgggtaggtcaactgcaagccttaaacaattcaaatggcccacttgttttagttggtaagacaggcatctattcttactgtttgtttgacactgcactagatgtttcaccgttataaacctaaatttttaaaatccttgtatgcataaattaactttatcctcttcttgatgaaaaattattaggtagttcaggac

SEQ ID NO: 20550 - DNA, 251 bp, Glycine max
  Clone ID: 700955272H1
gcttgtgttacaactttgttggctgtgtcgtacatatacacagatatcttattatgttatgaataaaaacaaccaatatcccaatgttccacaataataattaaaaatataatttgtaattttgttctcaaagaaagaagactctgtccctgtgtctctgtatctgtctttgtctctgttcgtctcgctgaaggaatcgctaaggatcacattctttgcaggtttagtttctgcttctggccacctctcaa

SEQ ID NO: 20551 - DNA, 252 bp, Glycine max
  Clone ID: 700955273H1
ggacgaagttggcggcaagtttcgaagagagagagagaagaagcagtgggtggtcgaggtatcactttcttctccgcccccgccacgccctagaccgccgcgggcgttgccagcacgtcgctggaaggcggtggcttgttggcggcggagcttcgcgagattaggttcggatcgctcggtctcgctaggtcaccgctgacgagaatttgaacttctcgtcactactaagccgctatttagcttgtgttggga

SEQ ID NO: 20552 - DNA, 251 bp, Glycine max
  Clone ID: 700955274H1
gtatgtgcatgtgcatgtgcatacacacagtcctaatgtaaaacatgctgtttactctatttttcttttcaagttaaaatgatattaatgtgacttgctatattttacatatatgtctaaaagttctatgttttacttttaacaataaaatctatctcatgaatgttttatatgggtatcatctttgaatggttaaggcatttcagtttccaagtataaatgccaatatattgatgatgtacttgatgtta

SEQ ID NO: 20553 - DNA, 249 bp, Glycine max
  Clone ID: 700955275H1
aaggaacaaaaatattattaagatgatcaacattattggagcacttgttctactctttgcatttctcttcctcagttgtgtgtatgcacaagacacaacaacccttgtgcctgcaatcataacttttggtgattctgctgtggatgtagggaacaatgactatcttcccacccttttcaaggctgattaccctccttatgggagggactttgttaaccaccaacctactgggaggttttgcaatggcaa

SEQ ID NO: 20554 - DNA, 253 bp, Glycine max
  Clone ID: 700955276H1
ataaaaataatactatatataacatgttaattgcttaatatgtgctttaagagtaaagaataacatcgtgaaatcaaattacccctttttcaatacgtgttgaatcatcgatcttggtttgtaatttggttgtatattcacaaaattaataagtatattgtgatgtgattaattcccttctctgttatggtgtacttgccttccctgtattgtccatctccatcgtctgtctattaataagaattcttatgtg

SEQ ID NO: 20555 - DNA, 253 bp, Glycine max
  Clone ID: 700955278H1
gtcaaattggctgatgaagccgtttgcatcggggaagcgccgagtagccagtcctacttgctgatcccgaatgttctgtcagctgctattagccgcagatgcaccatgttgcatcctggctatggttttcttgcggagaatgcagtgtttgttgaaatgtgcagagaacatggaatcaactttattgggcctaaccctgacagtattcgggttatgggtgacaaagcaactgccagagagacaatgaagaaag

SEQ ID NO: 20556 - DNA, 255 bp, Glycine max
  Clone ID: 700955279H1
gcggcgggtactactgcggacgaggtgggctccgtcggcatcatcacatcagccttgtttgtttgtttgtttagtgattcttgctaaagtgggttctcaatagcacaaattcatatcaagcacttgagcatctatgggtataatcaggagtggcttctctttcatagcagggacagtatgtggagtttacttggctcagaattatcaagttcctaacgtcacaaagttagctgacactgccttgtttatggtaaa

SEQ ID NO: 20557 - DNA, 260 bp, Glycine max
  Clone ID: 700955281H1
attctattcctattcattcagctcactgatttcaattacaaagtcaattttgtaaatcagaggcagagagagttgtaaagagcctctgaattttgatcacaccacacccttcttctcatctccaccagaaatggctaccggagctgctgtgccaactacgttttctaccctcaagacatgggattccagtttggggtttgcaaaaaacatagattttgtgagagtttccgatatgaagagcatgaaatcttctgcgagga

SEQ ID NO: 20558 - DNA, 254 bp, Glycine max
  Clone ID: 700955283H1
gacagagagagagagagagagaaagaggggggcatgacacacaaagcagttggcacaaattagcagaaagttcaacaccccatagagctgttttcaaataaattctgttcctttttgtcccatcaagtcaacttaagacaaaagtttgcgtctttggaattgaggttctgggattttgctatatatgaattgaagtggagatgatattggtgtagtgggcttttcaactggtttggtgagatgaagggtgttct

SEQ ID NO: 20559 - DNA, 251 bp, Glycine max
  Clone ID: 700955284H1
cttttagtttctccactttcattctcactcatcgcaccctcttgcacagttaccatgaatttcttcaactgggttcatactttcatcgtttttcatgtctttgctgcaacaccccacttcttcttattagcagattcctccgaacaactccccaccaactttctagatgctgccaagaagcctgaggtatttgattggatggtcagaatcagaaggaagattcatgagaatcctgaattgggttatgaaga

SEQ ID NO: 20560 - DNA, 253 bp, Glycine max
  Clone ID: 700955285H1
aaaaaaaaagaaaaaggaaggagataggaaagggttaattgaatccaaaaaaaagaagagaaaaacaaaatgggcagggtttggacttcgatgatagcattgttgctttgcctgatgacatcatcggttcggggcgaggacccttacatttactacacatggaacgtgacctacggcaccattgccccattgggtgtcccccaacagggtatcctcatcaatggtcagtttcccggccccgaaatcaactcca

SEQ ID NO: 20561 - DNA, 253 bp, Glycine max
  Clone ID: 700955287H1
gtttctcaaacaatcattttttttttcttctgccccctttctctctctgaagcgaaaccctagaaattcatcatctttcagaatctgacaagtttcctcaaccgaacctaaattctctcaccaaatcctcacttatccaaattcgatactccaatccccacccaaattccccgcatcgactcccctccccaaaattcccccatcgtcggcgtctcccgtggccgaacgcatcacatcgccgattcggctacgg

SEQ ID NO: 20562 - DNA, 250 bp, Glycine max
  Clone ID: 700955289H1
gttttgtcttgtgattatccttgcaacacacattgtcttgtcggcaaaatcttccaccaacaacacacagtcatggcaggctcaaacattctttctcactctccttcccttcccaaaacctacagccactccttaaaccaaaacgcgttatcccaaaagcttttttttctgcccctcaaattcaaagccaccacaaaaccacgtgctctcagagcggttctctcgcagaacgctgtcaaaacctcggtgg

SEQ ID NO: 20563 - DNA, 251 bp, Glycine max
  Clone ID: 700955290H1
ctgagtccgaaaccattgatttaaaaaaaaatatagaacagagaggaagagagccaaatgggtttgggaatgagaagagagtagaaacaaccgagagagaaacacatagaaaaaggaagcatagccaacctgttcaaaaccatgatgcaaggctgtgaggttgaggccataggcataagctacacgatccacacacacaaatcggagaacccttttaaaatcttgagcaaatctgcacaagaacaacttga

SEQ ID NO: 20564 - DNA, 248 bp, Glycine max
  Clone ID: 700955292H1
tttctttctgcttaaggtctacacaagttctctgcttcttctccccctattgacctttggtcatcacaagcgaaaacccacttctggatcttctggtgtaaaggccattagaagctttagaaattttctaattgagttggtgtatagtgttgaagggggtgaaatctggagcccagtttgttagttgttactcacttcatctgtaagctcataggttgaaccctctttttttggagacttacctggga

SEQ ID NO: 20565 - DNA, 253 bp, Glycine max
  Clone ID: 700955259H1
atggagcaggaggtggaaggggatttgttggatgccagtgaccagcagccacttgaagatcaggaagaacatcatggtggggattcatcagattccagttctcttttgccctgcatgaactgggacaactcaattgcttgtctcagccactgttccaggtctgattatggctctctggcctcactgaataggagcttttggaacacaatccgaagtggtgagctgtacaggtggagaagactgaatggcataa

SEQ ID NO: 20566 - DNA, 254 bp, Glycine max
  Clone ID: 700955225H1
gcaaagatgacaggtgggatgtttggaaggaaggggcaaaagataaaggggacagtggtgttgatgccaaagaatgtgttggacttcaacgccataacctccgtcggaaaatgcagtgctaaggacaccgccaccgatttcttgggcaaaggcttggacgcattaggtcatgcagttgatgctctcactgccttcgctggccatagcatctccttgcagcttatcagtgctactcagactgatggtagtggaaa

SEQ ID NO: 20567 - DNA, 254 bp, Glycine max
  Clone ID: 700955227H1
gtttcatccacatatccccgtccatatgttatgagtcttccaggtggtacaagtaatgtgattcctgacagcagaaaatgggcaagtcaaagtctggatcttaattcgggccctggtggtatggatacagaacggagagatgatagattgccttcaggattgaggcaaatgtctgtccccaattcacaagcctcgatggaggaccacttgaagatgtttcagatggctggtgcattgaaaagaaaagaacctga

SEQ ID NO: 20568 - DNA, 259 bp, Glycine max
  Clone ID: 700955229H1
ttggtgtcttagctcaaacctcacctcaataatctttcgtgctagctagcttaatcatattccaattccaacagaaccaaattctgctagctagctagtacgtcaaaggaaataaaataatatggcattcagcgggacccaacagaaatgcaaggcttgcgacaaaactgttcacttggtcgaaggtttatctgtcgatggggctgcttatcacaagaattgcttcagatgcagccattgcaatggccttcttgcgata

SEQ ID NO: 20569 - DNA, 258 bp, Glycine max
  Clone ID: 700955230H1
cttctcttctcttctcttcgagggtacccctcctcgcagatccgatccgcacccttcactaaacccattattattgattattgattgataataacatttgggtttcattttcattccaagttgttgcatttttcaacatgtctttagctcactgctgaaccccttttctttctttctttgcccccttttgtccaaacccccaaaacaaaaacaaaaaaaatgatgatcaacaaaacgctttttctcacttatgtctac

SEQ ID NO: 20570 - DNA, 263 bp, Glycine max
  Clone ID: 700955232H1
tgcaatctctgaaccagacgttatctttgttcatcatcgcctcatatacacatacataccctttagaaagttctttgactcttcctagacatcgccactgcacttttgcgccacttcatagaactcaacaagctaggatttcctgttctgttgcaccaaatgaagtgcaggtgccaactgtgaaaacccaggatcccaagagtaagcctgagtgctatggtgtcttctgccttacctatgatttgagggctgaagaagagaca

SEQ ID NO: 20571 - DNA, 266 bp, Glycine max
  Clone ID: 700955233H1
gaacaagtgaaaaagttgtttaccaagttgtcaacggatcccactaccacatctcaattagttgctaaagagccagctatttttactggttctgaggttagaatgcttgatgatgatattcccctagcacaatatgctgtggcttttgaaggggcatcttggaaggatcccgattcaattcctctcatggtcatgcaagctattttgggttcttggaataagacagcaggaggtggaaaacacatgggttcggagttagcacagcg

SEQ ID NO: 20572 - DNA, 265 bp, Glycine max
  Clone ID: 700955234H1
gtcaattctatagagattgcaccatttcaggtaccatcgactttgtgttcggtaatgcactagctgtttttcaaaattgcactttcgtggtccgaaagccaatggagaaccaacaatgcattgtgactgcacaaggtagaaaagagatacaacaaccatctggaatagtaatccaagggggatccattgtgtctgatcctgaattctactcagtgagatttgagaacaaggcttacctagctcgtccatggaagaattactctag

SEQ ID NO: 20573 - DNA, 263 bp, Glycine max
  Clone ID: 700955235H1
tacactttcgagttcgaactaaagaaaaaacagtaaagaaagaagaagaaaaaaaaaaaagatggtttcgtcagtttcgtgggtgagaggcaagtgcgtcggtaagggcgcgtttggggttgtcaacgtggcggtttcgaaaagagataatcgcgttttcgcggtgaagtccgtggattgcggaagggggctttctggtcaggtggaggcgttggagaacgagattgggattctgaaacgagttacctcgccgcacgtggtgg

SEQ ID NO: 20574 - DNA, 256 bp, Glycine max
  Clone ID: 700955237H1
cttttatttgcgagtacaggtaaaagattcaggatcaggaattaatccacaagatatcccgaagttattcactaagtgtgcacaaaaccaatcattaacaagaaatcctgctggaagtggacttggcctggcaatttgtaggaggttcgtaaatcttatggaagggcatatttgggttgaaagcgaaggtattggtaaaggatgtacagtcacttttattgtaaaacttggaatcccagaccgatcaaatgaattt

SEQ ID NO: 20575 - DNA, 254 bp, Glycine max
  Clone ID: 700955238H1
cgagcttcctgatgggcaagttatcaccattggagctgagagattccgatgccctgaagttcttttccagccttctatgattggaatggaagctgctggaattcacgagaccacctacaactccatcatgaagtgtgatgtggatattaggaaggatctgtatggtaacattgttcttagtggtggctcaactatgttccctggtattgctgaccgtatgagcaaagaaatcactgcacttgctcctagcagca

SEQ ID NO: 20576 - DNA, 256 bp, Glycine max
  Clone ID: 700955239H1
tgcattcacgccatggactcactttaaccttctctcacactcaccgctgccaccaccgccttccaccatggactccgttccgtttcgcgatggtaacatacacaccattctcgactcccgttatcttcactctccactggatgttaatcatagtttgcacactcattcctcgctgattcggaggctttctcaagaaagggagttagagggccacactggctgtgtcaatgcggtggcttggaattccaaaggttcg

SEQ ID NO: 20577 - DNA, 255 bp, Glycine max
  Clone ID: 700955240H1
cgaggagaactggatcgattgaagaagagagtggaaaatggagctcgtatcagtatgtgggtggaaccggttctgtgaggccaacttcttcattggctggaactgaggtgagtgtggatgaaattcgatctgctgctgctgcttctggttactatcccccttcccttcatggagccttggttggttcacctgagcctgatcctacagagcaagctcttgtttatcagggtggatatggaggagattatggtggac

SEQ ID NO: 20578 - DNA, 245 bp, Glycine max
  Clone ID: 700955242H1
gaagaataaaaataaattttgtattgagaaaaaagtacaatttaatgttgattgcccttccaacttatgtacaaaaatataccctcagcatacggggtaaggtggcaaaatcaaattacaaaatttgtatgagcagaagaaacattcagtcctcacatgagaagaaaaggttgaccaccaaagcccgtgtaatttcacttctcttgtaaaattaaaagcaaaaacaatgtaaaatttggtcattt

SEQ ID NO: 20579 - DNA, 254 bp, Glycine max
  Clone ID: 700955244H1
gttaggtcgaatcttaatcctgtagctgatcgttttgtatccatgcttgctcagtgtggattttatcctctcctccataattttccaacaaaatctcaaacataataaataaaaattacatttttattcacaaaaatatcgggattcatcttgttctcattttgcccccttttttcttctgctctcccgaatcagaaaccctaatcattgtttgggatttcagaggaaagaaatttaaacagagcacgaagatg

SEQ ID NO: 20580 - DNA, 256 bp, Glycine max
  Clone ID: 700955245H1
ttggttcccctccaagcgttgcagctattgcagctgccactgtagctgctgcaactgcatggtgggcagctcatggattgcttcctttgtgtgctcctcttcatacttcttttgcctgttctcctgcatcggtgactgcagttccatcaatgaatacgggtgaagcaccggcactgaaggcagagcaagaaaagactactctacaaaatcctcctcttcaagatcagatgctggatccagaatactcggaagctca

SEQ ID NO: 20581 - DNA, 191 bp, Glycine max
  unsure (1)..(191): unsure at all n locations
  Clone ID: 700955246H1
ctttgagatgagagtcttgatgaacagtaccattctgatgtattgctttccttgaaagttaatgcatcagaatggtactgttcatcaagactctcacaaacactcacactctctctttcttctcttacctgctagctacaatattggagcctctgctgcttccactcaaactcaancaactgaatctctcc

SEQ ID NO: 20582 - DNA, 258 bp, Glycine max
  Clone ID: 700955247H1
ggaccattcaaattttacaccggattccctgtctattgtgttaggattgctcctcatgtgatgatgacatgcaatttctgtatctggttcaggaattgcagaaatcctacgggttgtagtttgtagttctccgtggtaacggatattttctgttgaattcaagctttttgagcatattgaataatttgttggctgggttgtagccctttttggcaactaaacaccaatggagctgatcattttttaagtttaattaat

SEQ ID NO: 20583 - DNA, 255 bp, Glycine max
  Clone ID: 700955248H1
ctcgagccgatgaatttgaatgctaagtctaacacaatcatttggttctctgttgttattagattaggtcatggtagagttatatcagttaaattgactatttagattcatccgtagttaatagttgccattgaagtggtgatttgatttgcttagttactgttcatttctatggcaggggttttcttttgagcagtttgttaaatatggtaaccattgagcattgcttagagattattctttagtcaaagaaac

SEQ ID NO: 20584 - DNA, 221 bp, Glycine max
  Clone ID: 700955249H1
ctcagactctcgcgcaacccccctctcgtggacgcgttgttgcagatcctcgttcgttctcgctctctcgcgtgagtttttgaatttgttggtctatgtgcaggaccagccccgaactcctgctcaatccctgtggatcagcttgcatcgatttatccctggaagaaagtaaacaaaatcctgtagaataagctctttgtggcttttaatttgattcgagg

SEQ ID NO: 20585 - DNA, 265 bp, Glycine max
  Clone ID: 700955250H1
gcaaaaccatggcgctaacggagttcttccacggcgagatctcgtcggagctatggaaaatgctggtttcaatttcccgaaaagccctccgctgcaagtcgagcgccgagagcctcatcacctacgtccgcgagctccttccgacgatcgaagagatcaaatattccggcgtggagctgccggcgccgcgccagtctcagctcgaccgcctctcggagatcctccgctccggcgtcgagctctcgcacaaggccctctcctcctc

SEQ ID NO: 20586 - DNA, 244 bp, Glycine max
  Clone ID: 700955252H1
ttctgtggctttgtttgtgggtgtctttatcttgaaaagagggtaaaggaagattgatgttcgtggaggttttaagtgatttcggaatggaatggtcgtaaaatgatggattgttatgacttatgagattgaggtcataggggcattggagatgattttaatgttgggttttggggcttctattggcacccaacatttttctctttgcattgctccttttttttttatataaatatctttattg

SEQ ID NO: 20587 - DNA, 76 bp, Glycine max
  Clone ID: 700955253H1
gttaagttccctccaaaccttgtggttccctgcgaagcaaagcaaaacttagcagtttgatttttggtcaccctcg

SEQ ID NO: 20588 - DNA, 254 bp, Glycine max
  Clone ID: 700955255H1
tgactataagagagcccgtcattttgaagttgatttgtctgctttccggaatgtacttgagatcgacaaagaacggatgattgcaagagttgagcccctagtcaacatgggtcagatcagcagggtgactgtacccatgaatctttcccttgctgtagttgcagagcttgatgatctaactgtcggtggtctcattaacggctatggtatagaaggaagctcccacaaatatggtttgttcgctgatactgttg

SEQ ID NO: 20589 - DNA, 251 bp, Glycine max
  Clone ID: 700955256H1
ctcaccacaaatccctccacgttatcaccaatcccaccgttggatctcgatccatccatcctttgtcaacctttccaaaaagtctttccttacaaagtgcttttccaaacttcttcttccttcctccttctctctctcaccctttctcccccactccctagtcagctagctcctgcaacaacaaccactcctcttctttttctcacccaaatccacgcttcccttacaccgcgtttggatctccgttatac

SEQ ID NO: 20590 - DNA, 254 bp, Glycine max
  Clone ID: 700955258H1
ggaagacgaaggtggtgtgaatgaagaagaaaaagaagaacaagagaaatcaggaacaacttctgcaagtcgccgaagatgaagtttcagcaggtggaaatacagaacaggccaaagatcctaatgatggagatataaatgatgtgagtgaattaagcgggaaagggaagacagcccattatgatgatcatcttacaccggcggagaggcgatacatagagcagagggagcaacttgatgttcacagattggct

SEQ ID NO: 20591 - DNA, 257 bp, Glycine max
  Clone ID: 700955224H1
gcatcactgaactaacaaagcaaccctatgtcgaaggtggtttgtgtcaccggagccagcggcgccagcggatcatgggtggtcctactcctcctccagcgtggttacaccgtccatgccaccgtccaagatatcaaggatgaaaatgagacgaaacatttggaggaaatggaaggagcaaagagtcatctccatttttttgaaatggatcttcttgacatcgactccattgccgctgccataaagggttgttccgg

SEQ ID NO: 20592 - DNA, 248 bp, Glycine max
  Clone ID: 700955193H1
gcatggaaatgcaagagaatcgccatcattggcgtctcagccttattgttggtggctatggttgtggcaatcacagttggggacaatctcaatgagaatggttccaacaatgatccagaggacaacaagagaaatcgtgttgtctcgtctataaaagccgtccaaaccctttgtcatcccacaaattataagagagaatgcgaggaaagccttatagctggggctggaaataccacagatccaaaaga

SEQ ID NO: 20593 - DNA, 250 bp, Glycine max
  Clone ID: 700955194H1
cgctcagtcaggatgcacgctgagaaaaccggaaacaacgcctatctcaaccttatcccgctccttgttggcaatgtgggattgattttcaccaaaggtgacctgaaggaggtcagtgaggaggttgccaagtacaaggttggagctcctgctcgtgttggtttggttgccccaattgatgttgttgttcctcctggcaacacagggctcgatccctcccagacctctttcttccaggtgctcaactttc

SEQ ID NO: 20594 - DNA, 197 bp, Glycine max
  Clone ID: 700955195H1
cttggccttgcaatcttggagagaagggcttcaatctgaggcagccgaggccattgcaaatttgtctgtcaatgccaatgtggccaaagctgttgcagaagagggtgggattcagattcttgctggtttggctaggtcaatgaacaagctggtggcggaagaggctgctgggggattatggaatctctctgttggag

SEQ ID NO: 20595 - DNA, 256 bp, Glycine max
  Clone ID: 700955196H1
caaaactgttcactttgtcgaaggtttatctgccgatggagctgcttatcacaagaagtgcttcagatgcagccattgcaatggccttcttgcgataagcaattactcatccaccgaacgagttttgtactgcaaggtgcactttgagcagcttttcaaggaaactggaacctaccccaagaaatcccagtcgtctggaaagcctccagtcgagctgaatagagcaccaagcaagctttctgccttcttctctggg

SEQ ID NO: 20596 - DNA, 271 bp, Glycine max
  Clone ID: 700955201H1
caacaccaacacaaaatctcagaatgtgaatgtgaaagctgttgtgactattgaacaaagtgatggtggacttgtgccaaatctcattaattcagcggtagatgggatcaaagagttagctgggaaaacacttgttttggagcttgttagtgatgagcttgatccaaaaacaaatatagagaagaagacaccaaaaagttcggttcaaaatataggaaaaaaggaggatgagatacggtatgaggctcaatttgagttatccacggatttt

SEQ ID NO: 20597 - DNA, 263 bp, Glycine max
  Clone ID: 700955202H1
ttttcaaccactgaaaaggatgaactatacctcaatttggtacttgaatatgttcctgaaacagttaatcgtgtgatcaaacattacaacaagttaaaccacaggatgccgctgatatatgtgaaactctatacataccagatctttagggcgttatcttatattcatcgttgtattggagtctgccatcgggatatcaagcctcataatctactggtcaatccacacactcagcaggttaaattatgcgactttggaagtgc

SEQ ID NO: 20598 - DNA, 264 bp, Glycine max
  Clone ID: 700955203H1
cttagctgaaccctcacctcaatcttgcgtgctagctagctttattccaattcctacagaaccaaattattctgctagctagctagtacgtcaaataaaataaaataatcaaatatggcattcagcgggacccaacagaaatgcaaggcttgcgacaaaactgttcactttgtcgaaggtttatctgccgatggagctgcttatcacaagaactgcttcagatgcagccattgcaatggccttcttgcgataagcaattactca

SEQ ID NO: 20599 - DNA, 260 bp, Glycine max
  Clone ID: 700955204H1
gtgatttcagtgagtgatcggtgttcacttgatctcatcataatcgtcagcgtcaattgaagaagatgccgatcagaaacatcgccgtcggaaggcctgaagaggcgactcaccccgacacgttgaaggcggctttggctgagttcatctcaaccttcatcttcgtgttcgccggctcaggctccggcatcgcctacaacaagctcaccgacaacggcgctgccacccctgccggcctcatctccgcctccatcgcccat

SEQ ID NO: 20600 - DNA, 258 bp, Glycine max
  Clone ID: 700955205H1
cttcttctcttcgcgtagcgcgtcgtcccccgcaacgacgtcgtttcatggtcgcgttgttgttgtgctggttctctatgcgaaaatcttctgagggcttctcggcgatgagtggagtaattcattctctggtgtttgattccgcatttccatttttagatttctctgtctcccatgtgagaaatgtttgattggaacgacgaagagcttgctaacatagtatggggtgatgtgggtgagggtgatgatcatattgtg

SEQ ID NO: 20601 - DNA, 257 bp, Glycine max
  Clone ID: 700955206H1
aattcagaaatgttactgcaaacattagctatccctacaatactccttgtgatattcatatgggtggtacaaccaaagcaacgtcatgggaagattgcaccaggtcccaaggcgttgccaattattggtaacctccacatgctagggaaactcccgcaccgcacccttcaaacctttgcaagaaaatatggacccataatgtccttgaagctagggcaagtccaagccatagtggtttcctcccctgaaaccgctga

SEQ ID NO: 20602 - DNA, 257 bp, Glycine max
  Clone ID: 700955207H1
cgaaacaatggttttggttgccctattaaagctgtcttcacggtttccttcttgttcagagagaatcagggaaataattgttcagtgcaaagggaaccttgtattagaattgcagcaaagatccatagaattcaatttgattattgcaaagcatcaaaatattaggcctacacttgtagagaggatgccagttttggatgaggtgactttcattgctaggagggctggatcttttccaggtgcaggtttaacatcga

SEQ ID NO: 20603 - DNA, 258 bp, Glycine max
  Clone ID: 700955208H1
ttgaaattagaatagacggtgagaaagccaggcacacacaacacaggaacgggtgagtgagcgagtccccactccacactccaatcaatcaaccatttatttcaaaacaaaaccctagctagggttcgatccatcgatcatggcggacgaggtcccttctccttcagcagcatctactgctactgctcctcttggttcgagtgtgatctccctggtgaaccgccttcaggacatcttcgcccgcgtcggaagccaatc

SEQ ID NO: 20604 - DNA, 256 bp, Glycine max
  Clone ID: 700955209H1
gatgaatggcctcaaaacgctttgtcgtttgtggttattgagtcctgagtgatcttgtcatccgacctttgccatgacaggtgcgcttgcatggcaggtcaaaaaatgttaataaaaaaagttttattggtttggggagagatcgcacgggggttgcccggggtctcttcctcttgtgtggtgtggtgtttgctgtgctctccttttcgttatgcctactattattacctatctgtcgctccactccgtattacga

SEQ ID NO: 20605 - DNA, 256 bp, Glycine max
  Clone ID: 700955210H1
gaactcgctgactgaaactcgcaaaaattagggttttgcagtgatggcactgtccaaccgcgtccgatcgggaatctctctcttcaccaaatccacgttcctcacttccgagcgatccactctccaacgattcctcgttgccccttccatttccttcgcctccagaaattacgccaacgtgccggggcaaaaggaaaacaaagttaaggtccctctggctttgtttggaggttcaggaaactatgcctctgctttg

SEQ ID NO: 20606 - DNA, 254 bp, Glycine max
  Clone ID: 700955211H1
attcaaattgctatgacatgaagtctgcaaaaaatattaacttgaatgagatactttcaaatgcttcatccaacaacttagtttcccagtcaggtctgggaatcatggatggagaacagaagcatgaggagcagcttgcagtgttgccttggcttagagccaagacaacatgtaagaatgtggcacaaaatgctggaggtttaaatgttttccaagtttcttcttcatctaacaaagaagaaactggaaagggg

SEQ ID NO: 20607 - DNA, 256 bp, Glycine max
  Clone ID: 700955213H1
ggcgctactagaccatgatcccggtttgattaagacgtttgcgcagtcaaatgcaactcctctaatctctgcggctacacgagggcatgcagatgtcgttgaagagttgttgtctagggatcctactcagttggagatgactaggtccaacgggaaaaatgcgctacatttagctgcacgccagggacatgtgagtgttgtaaagatactactacggaaggatcaacaacttgctcgaaggactgataagaaagga

SEQ ID NO: 20608 - DNA, 257 bp, Glycine max
  Clone ID: 700955214H1
tttggctggagcataactcttatgtttatggatgcttctttggtacataacttgatctgtagataagattaggcatttagcatgtatggtgtgaagctcgtggtctttttagtggggtttcgtcaactgctaattattttggtttatttatacttgctaggtgaagtttttcagtgttaatgataaaaatgttccttgacgcagatttgatattccagttccttcaatcaagaattattttacatggtttaagtttt

SEQ ID NO: 20609 - DNA, 252 bp, Glycine max
  Clone ID: 700955215H1
ctaacatggaagcaagttaacactcccacaattccttaaccaaaaccactgatcaactcatccccacaatcagaaacgggtctctaccacaccacaaacgatcttctcaacatttccactatagagaagctagaattccacttcccatatcatgctgccaaatgacatcaccatcaccaattgatgatgatgaaaaatctaccctaagaggtgattggcgatctttacgaacaaaactggtggctggagaac

SEQ ID NO: 20610 - DNA, 262 bp, Glycine max
  Clone ID: 700955216H1
ctcatctgtatgcctatgcttgtttatcattttcttactttcctctcacgctctgccacaaaactccgtctccgcaataacggaataaaaaaacaagtttaattactattatggcgccgagggatcataagacaagcaacgctaaggctaacggtaacggtaacagcggggtgaaggaggtgcattttcgtggagtgagaaagaggccgtgggggagatacgccgcggagatcagagatcccggcaagaagagccgcgtctg

SEQ ID NO: 20611 - DNA, 266 bp, Glycine max
  Clone ID: 700955218H1
tggatgctgtgtggaagacaaccacaggattttggtatatggctatcttgagaacaacagcctagcacaaacacttattggttcaggccatagtagcatccaattaagttggcctgtaaggaggaacatttgcataggtgttgcccggggccttgcattccttcatgaggaggttcggccacgcattatccatagagacataaaagcaagcaatgtactacttgacaaagatctccagcccaaaatttcagattttggccttgcaa

SEQ ID NO: 20612 - DNA, 224 bp, Glycine max
  Clone ID: 700955220H1
ctaatttgtaatgtatggaaattgaactttattggagttgaccaacaactcactaccacatgagtcgtgtattaccttactcataactcgtttttatctgggaaatgtttgtttgtcttgtgttattatttggttataatgtgagtagttataggtactgtggtgagaaacttctatccacgctatacctatggataatttttttcttaaaaaaaaaacaaaaa

SEQ ID NO: 20613 - DNA, 257 bp, Glycine max
  Clone ID: 700955221H1
cccgaacctgaaccagaatcatcacgcgttccaggctcggccgccgtaccaccaccattaacaacagccgcagtatgtgcaggcatttgttgcagccgccgccgccgcagcagcagcagcagtggctgagaagggatgccaatgccgtcgacgaggtcgagaagaccgtgcagtccgaacccatggattcgagttcccaagattcgtaagcaagactaaagattccaccagctgatactcgctataggacagaggat

SEQ ID NO: 20614 - DNA, 256 bp, Glycine max
  Clone ID: 700955222H1
atgaaatgtttgattggaacgacgaagagctagctaacataatatggggtgaaggaggtgagagtgttgatcatattgtgccatatccagaggtaaatgaagatgttagcaacataaaagagtggaatcaagaagctgctgcgactaagctcaccaagctgaagaggccagaggctaaaactgattttcatgaaagaaagctaggaagcagttccaaccttgataatagtggagaactactaacctcaggatatgg

SEQ ID NO: 20615 - DNA, 257 bp, Glycine max
  Clone ID: 700955223H1
ccttccccttctccttacttctcactctctttccaaaacactccctttctctttccccttacccttcttctgtgtgtgatgatgtagatagagaataaaaagagaccagtgtgcagtgagaaagaggttggtcacttcttgtgtggctttgttttgttctttgtgttggaatttgttgatgggtgaagagggagaagaggtgtcaagagataaggaacagcaacacatgggagtttatggaaatgagtggttgttta

SEQ ID NO: 20616 - DNA, 244 bp, Glycine max
  Clone ID: 700955192H1
ctctcttccaacaacgattctaagcaacctcaccaacgtgtcgccgatgatgacgatgctatgccgcctcctattccgcctccttcgtccagtggcgacgaggtttccgatgacgtcatcaatcaggttgatcagttccttcgcgaactattcagaaccctcgcgaacggctttcaatcttgaggatggagcaagatgttgagaattttattcgtgatcctactcaacagcagcttgaatttaa

SEQ ID NO: 20617 - DNA, 254 bp, Glycine max
  Clone ID: 700955148H1
tcggctcgagctcgagatcgagatctggactagcgcttctcactactcacactactcttcctcttccaagccaaagaaggagtttccattagccctttgcaattgatcacacacccacttgaccccttaacgaagcaagagatcaccctacgtccaagccacagtcctaaagagataccccacaccacccaaccatgtcttcttccactacgtcggcctcgacgatcccgacaagaccacgtcctagagtgggc

SEQ ID NO: 20618 - DNA, 254 bp, Glycine max
  Clone ID: 700955152H1
cctatttatatagaagtgagggttttgtgaagtggatccaagccaagcacccgatccattcggctgcatccacgggcatgtgggagtgcccgggtttttatcccgtttctttgaaagggaaaaacgggttagacatatccgtagttgggagtagtagtattaagcatgttctcaagaatagccttgaccttactaggtatgagtactacacaatggaacatacttcagaaatgaggataagtatattccggata

SEQ ID NO: 20619 - DNA, 251 bp, Glycine max
  Clone ID: 700955156H1
gtatagcccaagccctatacaaccagaccctaacgcacacccatatgattcagtttccatggctagcctcaaggttgcatctttggctgcagagctctgcgtggttgtgtgtgagtgcacccatggcacgtgcaactatcacgtgcgggcatgttacgaatagcctgaacaattgcatctgttgcctccataacgtgaggaacgccgccgtctggatgctgcaacggtatgaagagcctcaatgccgccgc

SEQ ID NO: 20620 - DNA, 244 bp, Glycine max
  Clone ID: 700955157H1
gcgagagagagagaggaacaaagcagcacccatttggatcctctcttctcttctttgatctccgttacccttcttgttgtctcgacagagagagagagagagaatctttcgaagttcgtgtgcgtgtgttgtgtggtcgctacaccgatatcagcaccacatgtgagagcacgtgtcgattacgattacctcgtcaagcttcttcttctgagcgatacggtgtgtgagagagagtctcttttgc

SEQ ID NO: 20621 - DNA, 250 bp, Glycine max
  Clone ID: 700955159H1
acaccttcaatacaccacactcttctagcaccttgcagtggctgactcggatcgctcttctagtgaagtaactacacgttctactgattcatggaagcgacggtcgtccacagttgaattatctgcagatgaggagactcttctcatcaggatgtataaactggtatgggagaggtggtctttaatagctggaaggattcctggaagaacagcagcagagatatagaagtattggactacaagattctcc

SEQ ID NO: 20622 - DNA, 254 bp, Glycine max
  Clone ID: 700955161H1
ctcgagcaccactctagcgttgttgcattgcagcagcgtctccatcatcttccacgatggccgcgcgaggcctgttgatcagaaaaaccctatacaccgttctccgcgacgacgacgagcacataatctgagctggcatagctgcagctacacatcactcgcgggttgcacgtgtacacgctctccgatctcgattacgacaatagcgctctctagccaccatcatcggcgagatcatgcagctgcaccaccag

SEQ ID NO: 20623 - DNA, 260 bp, Glycine max
  Clone ID: 700955163H1
cgcaggaagcgacgacggtggtgataatcggtgccggagcttctggtatcgtcaccgccggttgcttaacgacgcaatcaataacttacatcatgatcgagagaagagactgtttcgcttcgctgtgtcagaaatatacctatgatcgtctccaccttcatatgaggaagcaagtttgcgagttatcgcactaatcgtgtctcaagtcttcacctcactacgtgcgtcggaagcagttcatcagactacttgggagacta

SEQ ID NO: 20624 - DNA, 253 bp, Glycine max
  Clone ID: 700955164H1
ggaagaacgtcgaggacaatgctacctacgagtcgctcttcatcgcgctggccagcgaaggcaccgacgttagggcagttttcgagttgatccttcttcgatcacagtgtgaaggagaggcacacgtgcatagccatatctagaggactcttgagagcgcggcttataccttgaagtatcgtggtagtatgtggggttacaagcgctgtgtcacgagagcactctatagacgtcagactaccttaaagatgat

SEQ ID NO: 20625 - DNA, 259 bp, Glycine max
  Clone ID: 700955165H1
ctcaaaaccagatctagggtttattttccttatcttttagaatttgaacaagttttgcgtcttcaaagggaataggatgggagaattgaaggacactgaggcttacgaggaagagctcatcgactacgaagaagaagaagaaaaagctcccgattccgctaaacccgttagtgaatctggcaagaagggttatgttggcatccatagttcgggatttcgagacttcctgttgaaaccagagcttcttcgagccgttgta

SEQ ID NO: 20626 - DNA, 200 bp, Glycine max
  Clone ID: 700955166H1
tttgaagagaagagtctagaaacaacacaacacaacgcgaatggctacggcgctggagaagaaagcgaaggaggcattcttcgacgacgaattcggtctggccgacgaactctactctgaagccatacgattggatccgaacgacgccaatctcttcgcggacagagcccaagcccatatgcaactcaacgctttcactg

SEQ ID NO: 20627 - DNA, 254 bp, Glycine max
  Clone ID: 700955167H1
ttttgataaaatggtatccaataagtggattggatatggaaattttctgataattgatcacttaaacactaacatctggcaatttctacatgggagctatataattgtcttcgttttatgtcttttgactttttatcctatgtgcttaattagctaaccccacatctagcagtaaagcttttttctgctgttcacagttagtggccatcacgtatatgctttcctctatggcagattttacctgtcgttgagtg

SEQ ID NO: 20628 - DNA, 236 bp, Glycine max
  Clone ID: 700955169H1
agcatggttaggcggactacattgaatgatagcaaagagaatgtttgttgtaataacattaaaggaggcgtgtttggagttgttgaattgccgagtttagctgcagaaggtagagagagagagagatggagagcatagagcacagaacggtggaagtgaacggcataaagatgcatgttgcagagaaaagaggaggagcagtggtgttgtgcttgcgacgcttcccagaactctgg

SEQ ID NO: 20629 - DNA, 245 bp, Glycine max
  Clone ID: 700955172H1
cggaatatgagaggtgggggataagggtactatgtgttgggtggatcttgctatcttgtgttgtgtgtgtgaagggtgtggagccaaaagcctcacccacttgtacatttccggcagtttgcggactttggggagtcaaactcagacactggaggcatatcagcttcatttgtgccaattcctgcaccttatggcgagggcttcatcacaagccttctggaagggactgtgatggccgtctcatt

SEQ ID NO: 20630 - DNA, 247 bp, Glycine max
  Clone ID: 700955174H1
ctcaatctttcccagcttttttatttaccagacacactcactactacccttttcacacccaactatctctctccctctctcctcaactccaacccaatcaacccacttcattaatcactccaattgttgtcccactttgtcacattgctactactactcctttaactcctctcccttgtttcctaatataattcccaaaatcacatcattttgcttcaggttccagagacatatacatgataaacct

SEQ ID NO: 20631 - DNA, 79 bp, Glycine max
  Clone ID: 700955175H1
gttttccgcacgccactttgatatgttatacgggtgcattactgtattttgagtgattatttcaataatgggtggtact

SEQ ID NO: 20632 - DNA, 245 bp, Glycine max
  Clone ID: 700955176H1
caccaacaatggtgaagcattacagacccccggggaagaaaaaggagggaaatgctgccaaatttgttattaggtcacaggcactcaagcagcttcaaatcagtttaccccttttcaggaaactatgtattttgaaaggtgtaactccccgggagcccaagaaaaagttcaagggaactcatcagacttattaccatgtcaaggagtttccttccttcatcacgagcctttggttgaaatacata

SEQ ID NO: 20633 - DNA, 249 bp, Glycine max
  Clone ID: 700955177H1
caaggatttggcgtccgaggaaagcttttgggacttgtacgagagatggaggagtcaccacacggtttcgcgaagcctcggtgacaagcacaagcggtttaacgtgtttaaagcaaatgtgatgcatgtccataacactaacaagatggataagccttacaagctgaaactaaacaagtttgctgacatgaccaaccatgaatttgagagtacctatgctggctcaaaggttaatcaccacagaatgtt

SEQ ID NO: 20634 - DNA, 254 bp, Glycine max
  Clone ID: 700955182H1
gttagtagagtcgtcttgcccgcagaccaaggtgctgaaagtacaatttggctaattgccaaggcatatgttgttgtcgatgactcctgctatcatcgactcatgagccactggttaaatactcatgctgtgattgaaccatttgtcgtagcaacagacaggcatcttagtgtgctccaccctatttataagattttgttgcctcactatcgtgacaccatgaacatcgatggactcgcaagacaatcactcat

SEQ ID NO: 20635 - DNA, 252 bp, Glycine max
  Clone ID: 700955183H1
ctcttcccttctatttgagtcacgccttcacactgtctctatcaccgatcccttatatcccccctccacttagcataccataattcaccgtcgatttccccattgatgatccatttggcatttcatcgtatttcgccacttgtcctactccacttggataatttcctaacgtatagttttcggaagtccttgttcttcatgagcttagtatttatgagtcctacgatttttggcgattcagcgacactatag

SEQ ID NO: 20636 - DNA, 248 bp, Glycine max
  Clone ID: 700955184H1
ctggaaagacatcttggaatatccttggaaatgctattgaaactggtcagaatatttggttcagtaatctattcaactgtatcagctacacaacctgttggtgtcgatatcgaggcagagaacaggctagagcgttgcaacctctgcttcacagagcttgaaaaagtcaaacgttttttaccttctctctcaagaagaggaggatcattgcaaaatctgcacaagagttgaatctggctttgcaggat

SEQ ID NO: 20637 - DNA, 245 bp, Glycine max
  Clone ID: 700955185H1
gttccacgttgttgttcgctctgtgtctctcactctctctatatttgcatcattcatcggaaatggctctcgaggttgctgttaaggctgctgttggggctccaaatgttctcggagattgtccattttcccaaagggtcctcttaactttggaggagaagaaaatcccttacgaactccacctcatcgatctcagtaacaaaccgaatggtttttgggtgtgaatcctgaagggaaggtgccat

SEQ ID NO: 20638 - DNA, 241 bp, Glycine max
  Clone ID: 700955188H1
cttcttctcttgcggctagggttttagcgcagttcttctagatttgaggaagatgggtaaggaaaaggttcacatcagtattgtggtcattggccatgtcgactctgggaaatccactaccactggtcacctgatttacaagcttggaggcattgacaagcgtgttattgagaggtttgagaaggaagctgctgagatgaacagaggtctttcaagtatgcctgggtgctggacaaactta

SEQ ID NO: 20639 - DNA, 244 bp, Glycine max
  Clone ID: 700955189H1
aactcgaagtgatccactccaggtgggccatgctcggagccttgggctgcgtcttcccggagttgctgtcccgcaacggggtgaagttcggagaagccgtgtggttcaaggccgggtcccagatcttcagcgagggtgggctcgactacttgggcaacccaagcctgatccacgcccagagcatcctcgccatctgggccacaaagttatcctaatgggtgccgttgaaggttaccgtattgct

SEQ ID NO: 20640 - DNA, 244 bp, Glycine max
  Clone ID: 700955190H1
cgaataatcaacaaaacactttctcagattcatatcccatcttctcttctcccacttcttaaaaccacggatggagagtgatagagatagagagaacgtgcttaacatagcaatggcaatggccaacaatgagagggagaagaagttcttctttgtagggtcactagtaaactacgcagctgaactaaagcttcttctcgcaatctcttccttctttgtggtgttgccactctccttcaattcc

SEQ ID NO: 20641 - DNA, 260 bp, Glycine max
  Clone ID: 700955147H1
cgagacacagaaaaaaaggtttcttcttcttcttctactttttcttcttcttctatgactcattcttcttcttcttcttcttcccatgtcgaaatcgaaattcatcacttcaaatttcacatccctttggtgctttcttcgtagatcccactctccgcttcatcgtgatacctcactctcagatggccgcaaattctgggaatatctcgtttgcgtctctcagtctagttcacagattcatgggagcactgatactgtcc

SEQ ID NO: 20642 - DNA, 240 bp, Glycine max
  Clone ID: 700955191H1
tttttctcccttttcgctaacctcaaagagagttcagtatttatacaaataagagttttttctttttttatttctggttttcgttttggaatggctgggatttgctgtggagttgttggagaagccgccgagacttcttctcccatcgaacccacctcacgcccttccgcacgccggagtttggaccttttgcccttgaagtacatagctgctgacgtgtcagtcccgccgctggagaac

SEQ ID NO: 20643 - DNA, 264 bp, Glycine max
  Clone ID: 700955117H1
agtgatatggcttcaagaactatatgttttaccattcaagtgactcttgtagtagcttttctaacaacaaaggttgttttatctgatgacactgtgccaattcccgcgaacaaagcacaattaggtgaatggtataatactaatgtggggcctttagatcaaagaaagagcaccgtggacccagcattggtgactgctgaagaaggcgctaaggttgtaaaggtgagcaagatggcagtggggaattcaagaccatcactgatg

SEQ ID NO: 20644 - DNA, 266 bp, Glycine max
  Clone ID: 700955118H1
ggctcgagccgaatcggctcgactttttcttcccatttcagccctcgtctttccttgtttccggtgagggccaaccacaacatgtgttaaacaaggaacaacctccaaaacataacatcctacgccaaacaaaactttgacctccttcagatctatacccttctctctctctctcttctattttcggattctacatcatgggcacggaggttctacggccacggaatgtttcacccaacgcatcggtgtcccaccgcctgggtttt

SEQ ID NO: 20645 - DNA, 265 bp, Glycine max
  Clone ID: 700955119H1
ccctaaacgactctatctctcttcgttttgttcttccttgcgctcctcctcgttcgttcgttctccctcgcgtagatcggcaatggcggagaccgagacgtttgctttccaggctgagatcaaccagctcctcagtctcatcatcaacaccttctactccaacaaggaaatcttccttcgtgaactcatcagcaacgcctctgatgctttggacgagattaatttgagagtttgacggacaagagcaagctcgatgctcagccag

SEQ ID NO: 20646 - DNA, 253 bp, Glycine max
  Clone ID: 700955120H1
cccaagcgcgccgtgagctcttcgacccgaaatccgaacccgaattcggtttcaatctcagagagagagagagagagggagagagcgaaacactgacctagctcgcagaatcgacaaccacttctcactcttcaatcgcgactgtgtctttgatgggtccgaggtatgcgccaccagacccaacactccctaaaccatggcggggtcttgtggatggcaagactgggtatctttagttttggaatcctgagac

SEQ ID NO: 20647 - DNA, 257 bp, Glycine max
  Clone ID: 700955122H1
tgcgcattcaacctaccttcgctattgcatggtcaaatcttgctggtctgttcatggagtctggtgatttcaacagagcccttcagtattacaaggaagcagtaaaactaaaaccttccttccctgatgcatatctgaaccttgggaatgtatacaaggctttagggatgcctcaagaagctattgcatgttatcaacatgctcttcagacacggcaaactatggcatggcttatggtaatttggccagtatatatt

SEQ ID NO: 20648 - DNA, 256 bp, Glycine max
  Clone ID: 700955123H1
gtaggcggatctcctttagtcctttgtctccgttccgtcgtcaaccctacctttggatctgcgtttggccttcaggttttgaagtccgaaggaggagaagaagagattcctgacagcgtaatcatgtttggtgtcgtaaggcgaagggttgcttctggcagcccgtctccttggttgctaggtcagtcagctcagaaaatccggtctggcccatcagtttctgctagagcttcttccattgtggaaaaagagattg

SEQ ID NO: 20649 - DNA, 255 bp, Glycine max
  Clone ID: 700955124H1
agcgcggcgaaaaccaatgggttgataaaatttacgagctcatggaagctgtggatgactacattcccatccctcagcgccaaactgaacttccctttttgctggccattgaggatgttttcaccatcaccggtcgtggaaccgtcgccaccggaagggttgagagaggtactattagggttggagagactgttgatattgttggtgtgaaggagataggaacaccactgtgactggggtggaaatgtttcagaa

SEQ ID NO: 20650 - DNA, 256 bp, Glycine max
  Clone ID: 700955125H1
ccataaccctctctttctctctttaatcttaaaccccgttacgacgtcgtacggcttgggctctttctccctctacccgaaccgaacaacaatcgtgaaagagggagaacagagtaccttcattctctctctctcttactttctctattgcgacgcgtttgattctctcgcttataatatatttctccgctggcgctctcttactggccggcgattgtttcggatcgatcgccgacgccgtcgagttcactcgctc

SEQ ID NO: 20651 - DNA, 253 bp, Glycine max
  Clone ID: 700955127H1
gttgggttttgtggtcatgtccatgactgtgagagagtatgccccatttatcagaatcagtgtgtgaatgaagaaaagcatcactactctggcactgtgaatggaacagttcatgtggttgttggtggagggggaagtcacctgtcagacttcacaccatcaccccctatttggagtctttatagggacgttgactatgggtttggcaaattgactgctttcaatcattcatatctcttgtttgagtacaaga

SEQ ID NO: 20652 - DNA, 257 bp, Glycine max
  Clone ID: 700955128H1
ggctacctttccctcccctccttcaccatcttcttcttcttcaattccgtctccaagatctagaatgttttactatgctggaggtgaagaccactatgaggagcctcacttcctccaagcttgttttctttgcagaaaaccactaggccaaagtcgtgacatcttcatgtacagagggaacacaccattttgtagcaaagagtgcagacaggagcaaatagagattgatgaggcaaaggagaaaagttggaagcttt

SEQ ID NO: 20653 - DNA, 265 bp, Glycine max
  Clone ID: 700955131H1
cataaacaaaaaagataaactggggagaagcatgttgttgatgttgggactatgcttcctattgttctctgcatttccacttgcgttctctgagagatgccacccacaagacaagaaagcgttgctccaactccagaaggacctcggcaacccttatcacatcatatcctggaacgcaaaggaggattgctgcgagtggttctgctgcgttaagtgtgacgagaaaacaaaccgcgtcattagcgatgccttatcatcccctttt

SEQ ID NO: 20654 - DNA, 256 bp, Glycine max
  Clone ID: 700955133H1
caaggagggatctctctctctctctctttctctcctctcacacccccaaaagcttcttctgttccgtgcaggcaatttttctttggtttggttgcatcttttgatctgatcaacaagtttgagaattcagtttgggaaaggccattcctctttagtacaaaacagattgagggtgcctttgtgctgatggccactaatgaaaatcttccaccaaatgtaattgagcaacttgccaaggagttgagaagtcttgatg

SEQ ID NO: 20655 - DNA, 217 bp, Glycine max
  Clone ID: 700955134H1
attcaacttaagagatcaatatggccaccaccactacccagcctccctctaatatctgttttttccttctgttgttgcttctagcacactttcatttgggcataagccaacttgagctgaattactactctaaaagctgcccaaaagctgaagagatcatcaaggaacaagtcacacaactatataacaagcatggaaacactgccgtttcgtgggt

SEQ ID NO: 20656 - DNA, 262 bp, Glycine max
  Clone ID: 700955135H1
gaaaaagatgggtgaaggcgtagttgagagagctctgaacagcttaggaaagggcttcgacttgacctcagatttcaggctcaagttctgcaaaggcgaagagcgtttggttcttctcaacgaaacagagaaacgggagctcacggtgccaggtttcggacccatcagagatgtctccgttgacatcaaatgcgacaagggcgatcgcacccgctaccaatccgacatccttaccttcacccaaatgtcagagctcttcaac

SEQ ID NO: 20657 - DNA, 261 bp, Glycine max
  Clone ID: 700955136H1
ccattctctctgtgtatttccctacctctcccttcaagatgcagatcttcgtcaagaccctcaccggcaagaccatcacccttgaggtggaaagctctgacaccatcgacaacgtcaaggccaagatccaggacaaggaaggaatccccccggaccagcaacgtctcattttcgccggaaagcaacttgaggacggccgtacccttgctgactacaacttcagaaggagagtactcttcacctcgtcctccgtctccgtgg

SEQ ID NO: 20658 - DNA, 257 bp, Glycine max
  Clone ID: 700955137H1
ctgggttgcagggaaagagaaaaatgaaatgggttccgatagtagcaacttggagttcttgaaggagatcggtttgggctcctccaacattggttcttacattaatggccgatggaaagccactggttcttctgtcacttctgttaatccttctaacgatcggagcatggctcaagtgactgaagcgactttgcgagattatgaggagggattgaagcttgcagtgaagcagccaagacatggatgactattccggc

SEQ ID NO: 20659 - DNA, 254 bp, Glycine max
  Clone ID: 700955138H1
tggggttatgggctgcgatatgaatatgggctgtttcgtcagatcatagtggatggctttcaacatgagcaacctgattattggctgaactatggaaacccttgggagatagaacggattcatgtaacatatgaagtgaagttctatgggactgttgaagaggttgagatgaatggagaaaaacatcaagtttgggtccctggagagacggtaaagctgtggcttatgacaacccaatacctggttacgggaca

SEQ ID NO: 20660 - DNA, 252 bp, Glycine max
  Clone ID: 700955139H1
ggagggcttggtggtgcccccgttaaccagggggggccgcctgctccatatgcgaatcaacctgctatggggtatgggaaccagccagcaatgcaacccggataccagagtcctcaaatgggacagagcagtggtgtgagacctcatcctggtgctggtgctccttacatgggtcattaggtgagtggctcatgaatttttattctgaattttgttaatacatattctgccctatctttatgatttatgagt

SEQ ID NO: 20661 - DNA, 253 bp, Glycine max
  Clone ID: 700955140H1
cccttgctcgcgttcgcgggtttgttcttcctcttccggagagctcaaggcgggcccggtgggctggcgggatgggtgggcccatggactttggacggaacaagtccaagttccaggaagtccccgaaaccggtgtgagcttcgctgacgttgcgggcgcggaccaagcgaagcttgagctccaagaggttgttgatttcttgaagaatccgataagtacaccgcgttgggcgcgaagattccgaaggggtgt

SEQ ID NO: 20662 - DNA, 246 bp, Glycine max
  Clone ID: 700955141H1
gggaggtggcaataatgagaaggcaagagttatcgaaaccctgctttttgtagccggtattaacacattgttgcaaacgatgtttgggactcgactgcctgcagtgattggagggtcttacacctttgttccaaccacaatctcaattatccttgctggccgattcagtgatgaaccagatcctatagagagattcaagagggtaatgagatgatccaaggtgctcttattgttgcttcgactctt

SEQ ID NO: 20663 - DNA, 251 bp, Glycine max
  Clone ID: 700955143H1
catctttgccttctgcatgttggttctctgtaaacagatactgcaaaagaagaataatattgaatatttggttgggttgaatccctgggttgaagcgttgcagacatcacggctattctaagagtgtctcgctctctcattcatgtcccaactgtacgacggaggacaggttgcgtaactgccaccaacccttcgccgcacggtgggcgtggtgctttgccttctgaaggtggtagcccttcagacttgct

SEQ ID NO: 20664 - DNA, 241 bp, Glycine max
  Clone ID: 700955144H1
ctcaacccagcattttcttcacagataagtcagggttgagattcaccaatttgggatacccatttaggtagagggatatcccaaattggtgaatctcaacggggcattttcttcacagataagtcaggacagcattatgaagaatgcttgtgcctggcagttgataatctacctgttattgatgggaagggtccagtccaagtgtaccagatttctgtgagagcttcaagtcttcattctc

SEQ ID NO: 20665 - DNA, 254 bp, Glycine max
  Clone ID: 700955145H1
caaaaatattaagatgataaacattggagcacttgttgtactctttgcatttctcttcctcagttgtgcctatgcacaagacacaacaacccttgtgcctgcaatcataacttttggtgactcagccgtggatgtagggaataatgactatcttcccacccttttcaaggctgattaccctccttatgggagggactttgctaaccaccaactactgggaggttttgcaatggcaaattagctactgattttac

SEQ ID NO: 20666 - DNA, 254 bp, Glycine max
  Clone ID: 700955146H1
tcgttacacatttctcacctaactttctattcttctcagtctcagatcagaaccttagccatggcagcgttccagaagatcaaggtcgccaaccccatcgtcgagatggacggagatgaaatgactagggttatctggaagtcaatcaaggacaagctcattttgcccttcttggagttggacatcaagtattatgacttaggccttccttaccgtgatgagaccgatgataaagttacaattgacagtgcgga

SEQ ID NO: 20667 - DNA, 278 bp, Glycine max
  Clone ID: 700955116H1
ttcggctcgagagagagatcgcgatctggaatagggtttagctgaaaggtcgagttgaaatgggtttctttggtaccattttggggtttttgggatttggggttgggatttcgattggtctcgtgtctgggtactttctcttcatctacttccaacccaccaatgttgaggatcctgaaatcaagccattgtcggagcaagagcaagagactctgcaacgaatgtttccagagatcctctttggataaagaatccggattttgatcggcttgattggc

SEQ ID NO: 20668 - DNA, 250 bp, Glycine max
  Clone ID: 700955083H1
cttgcgtgtgtggttgtaacttgtaaaattattttgtatcccacaaaacattgtcaatttgatttgatcccatcttactccattcgagttgacaagaaaaaaaatattgtattttggccacaatttccagccaagagaagaaggagagcggaaagtaatagacggtcatcgtctgtgcacccgtcatgatttgacttcaatatgttatgggattaaactgattcttgtctcatatttgagggggcaaaag

SEQ ID NO: 20669 - DNA, 246 bp, Glycine max
  Clone ID: 700955084H1
gggtaagcggatttagggaaggaaaatggagaaacattagattagattgttggcatccacgtttggctctgcattgctgtctgtttagatcttttattatttggagagaggaaagtagagttatactctagatcttccctgtccccttctggatcatttcttcttttcattgcttcttctgccgagccattcagtgggtgttaacactttttttctcctcaaccaagacatttgacgtgttatatt

SEQ ID NO: 20670 - DNA, 248 bp, Glycine max
  Clone ID: 700955085H1
gtgaagatgaaggggaaaagccaaagccaaaggattggaaaaaagagtagaaaaatgaagggcgcgttgagtaccactaccaacaccactagacacttgcagcttcagctaggtcaagtgtccctcattccactccaacaaccgtcttctactactgctactacttcttccgcagtttcttgcttccagaaccttctagatgcagaagctcccaatgcgtcttcctctcgcgtggcgctcatcgacaa

SEQ ID NO: 20671 - DNA, 243 bp, Glycine max
  Clone ID: 700955088H1
ggcgtaacaaaagttgcgtagcatactctgattcattagtgaagaaaaatggcaaccatcatcgccggcatcccaactacatcgatcactcgcgcaggtcttgtgctcaaacgacctgttggagcctcgtcctctaccgttcttggattgccagcaatggctaaggcagggaaagtgaggtgctccatggaggaaaagccttcaagcagctcaaatatagggatgggggcatccttgttagca

SEQ ID NO: 20672 - DNA, 243 bp, Glycine max
  Clone ID: 700955089H1
ctctctcaatggcttgcttctctttaaacctctcagctcttcacatgttcagaccatgcgtatatattcctcaaatcgttgcaaatccattgcagcatcagaatcgtaaaatcaagatcttagcttgccaagctaatcaaaatcttgaccaatcgtccacaacggaaaaatctgttgctgagcttggcaatagcaaaggaacaagttccccaaatggtgttccccctaaattcccaagcaagg

SEQ ID NO: 20673 - DNA, 245 bp, Glycine max
  Clone ID: 700955090H1
ctattattctcgttttcaatatgcagatcttcgtcaaaaccctaaccggtaaaacgattacgctagaggtcgagtcctccgacacaatcgataacgtgaaagctaaaatccaagacaaggaaggcattccaccggatcagcagcgtttgatcttcgccggtaaacaactcgaagacggcagaactctcgccgattacaatatccagaaagaatcgacgctccacctcgtcctccgccttcgcggt

SEQ ID NO: 20674 - DNA, 243 bp, Glycine max
  Clone ID: 700955091H1
atcattcaccaatgcatgtggcacatgccacccaaaacctaccccttctcctcctcctccatcaggaaagtgccctaaggacacattgaagctaggggtgtgtgcagatattctaggtcttgttactgttgttgttggctcccctgtctccagcaagtgttgtgcattgcttgaaggtttggctgatttggaggctgcactttgcctttgcactgctattaaggccaatgttcttggaatcaa

SEQ ID NO: 20675 - DNA, 241 bp, Glycine max
  Clone ID: 700955093H1
tgatggaagaggtgtcgatgtttacattgccaagggtgctggcatcacggtgcagtttgtgaagaacatcatcatccatgggatcaaggtctttgacatcgtgattcgtgagggtgggatgatcagagattctgagacacattatggtttcaggactaagagtgatggtgatggcatttccatctttggtagcagcaatgtttggattgaccatgtttccatgagaaattgtagtgatgga

SEQ ID NO: 20676 - DNA, 241 bp, Glycine max
  Clone ID: 700955094H1
aatttattctagtaatacatttctgggttttgtttgccttgtgtgtatctttctattgacgagaataatggaatgttcccaattctctgtttttttgcttttgtccatttttgtgggaatttgtttagcttctactgaggaacaggaaagggacaggattgccaagctgccaggacaaccagaaaatgtgctatttgcacactactcaggctatgtgactgtgatgaagaagctgggagag

SEQ ID NO: 20677 - DNA, 251 bp, Glycine max
  Clone ID: 700955096H1
ctttcattggtgtggcctagctgttttctcaatgagaaagccttcatctctgcaaagcgcacttttgcgctttggggttcccttgttgcttgttatcaccttctgttatgctacttctactgctgcagcaaaactcaagtttcagggaatgaagagctgccaaagacaaacctaaatgggcatgatgaagaagcaaaattcggattttttcatcataaaccaatattcaagaaacatattccaattccagt

SEQ ID NO: 20678 - DNA, 265 bp, Glycine max
  Clone ID: 700955101H1
ctctcctcggcgacgacggcggagccatgggcaacatcaatttctccggctacgtgttgcagaatggagtcaaatcaggcagcttcttctatggaagttgagactgtcccatctgaagccaaacttttgccaccaaagccaaagtttgagcctttgaagcctcatgagatgtctgatggtcaggtacagttccgcaaggtgaatgttccacctcatcgtaatacccctctgagaaagcttggatggacatctatgctcccatatg

SEQ ID NO: 20679 - DNA, 255 bp, Glycine max
  Clone ID: 700955102H1
cgtacgtgaggtcgggctatgggacttttgtctacactcgccctcttgatgcacaagctccttcctctaaggcacagctttgcgaggagttcgactctatgggggtcgcacttgtccatggagaacttgagcatgaccagattctggcagtgattaggcaagtagacattgtgatatgttctcttccataccctcaagtgatggagcaactcgaaattatagatgctatcacagttgctggtaatatggggggat

SEQ ID NO: 20680 - DNA, 269 bp, Glycine max
  Clone ID: 700955103H1
gtgatgtggagacaaatgagtgtttggagaataatggtggttgttggcaggataaagtagctaacatcaccgcatgcaaggatacgttccgtgggagagtatgtgaatgccccctggtggatggtgtgcaatttaaaggagacggatatacaacctgtgcagctagtggacctgggcattgcaagataaacaatggaggttgttggcatgaagctaggaatggactgcatattctgcttgttcggatgatggaggggttaaatgcaagt

SEQ ID NO: 20681 - DNA, 266 bp, Glycine max
  Clone ID: 700955104H1
caagctttccattctcatccctgctattccagctgccatcgttgctgagtgctttggctttggaagaccttggatttttatattaagcttacttggacttacaccacttgctgaacgtgtgagcttcattacagaacaagttgccttttacactggtcccacagttggaggacttctgaatgctacatgtgggaatgttactgagctcataatagcaatatttgcccttagcagtaacaaaattgccgtggtcaagtattctctgt

SEQ ID NO: 20682 - DNA, 266 bp, Glycine max
  Clone ID: 700955106H1
aaggccccttctgccctcccaacccatatacttaaaaaaacccaaaaaaccaaaaataccataaaatttttcagcttctccgccgccgtacagccaccacctccgttcggatctccggcggacctactatccctagtactctatttacacggaagaacaaaaaaactatcccacaaaagaaattccaaaagcggttcggttagggtttagttttgtttttatacgtttcgtgtatctaattttgcatcggtaatattatttttggg

SEQ ID NO: 20683 - DNA, 253 bp, Glycine max
  Clone ID: 700955107H1
tctgtacagaacttgcatcatatcttcccagccgtcgtgaattcttagcggccgtcctttttatttttcctttttttttttcaatagtgaatatttgtgtacaaacaagcttgcttgctaaggctttgtatattttttgactatggcaacagtaagtttatttagaagcactcgttttgttcgagtaaaaaagagaaacaacaaagaggaaaaagaaaaaacaaaaaagagcctaacgccgaatttgaaggag

SEQ ID NO: 20684 - DNA, 259 bp, Glycine max
  Clone ID: 700955108H1
attcttcaaaaaattctcgcgactaaattcacgtcagtacacggaaacataaaattcagtttttttttattaaaatttgttggcaaacaaaaacaaaaaaaaaattgaaattttgatccgttttgccgaattggaccgcgcgttcaattgggttgtcgaattcgaggcaaaggaatcgtgggtgtacgaggaatttcgactgtgttgttgaactttggtgattgtcagcaaacggtgtcgattggtttgagagaagctg

SEQ ID NO: 20685 - DNA, 260 bp, Glycine max
  Clone ID: 700955109H1
cttgtttgcagtttactggaggctatagatgttatgcacgaaggggtgcagaacctggtgataccaatacaaatccagtttgaatctttgaactccaacaacgtgcaccacaatgacaacaccacctactgttggctaactccagaggacgtgttccgctacctccttaactcaattggtgtgttttccccaacaccggggaaccccatcaacaccttaggcgtcattgacacacaaaacctttttgcagtgtgctatga

SEQ ID NO: 20686 - DNA, 261 bp, Glycine max
  Clone ID: 700955110H1
catgactctttctcacttttccgctgccattttcatctctttccttctcctcactctccaccaccacgccgaatcaactcagcctccctattcctgcgactcgtcctccaactcaccctactacccattctgcaacaccaggctccccatcagcaaaagagcccaagacctcgtctcgcggctcactctcgacgagaaactcgcccaactcgtcaacaggcaccggcgattccccggctcggcatcccgagttaccagtgg

SEQ ID NO: 20687 - DNA, 254 bp, Glycine max
  Clone ID: 700955111H1
aaattgagcaatgaatttgtaaatagggcaaaagtaatggataaggaattaatttctctggatatattagaaaaccgaattcgattgtctaatgatgaaactaaaacaaaatatttaactaaaatatatgatcctttcctgaacggacgctttcgtggacaaatcgaaaatgttttttcaacctcaatccaatatgaaaaaaatgaaaaaaaaaataccattttgataaataaaattcatggtatccttatttc

SEQ ID NO: 20688 - DNA, 258 bp, Glycine max
  Clone ID: 700955112H1
tgaagagacaacacacacaataggattgtctgttcttgtctgatggaaacctttcattataagtcccatagaagggcatagttttcgtgacatcgtgtgttgttttgaggacgaataccagacatcatgggggaagaaaatggcgaaggaagatccttagctgaaacccccacatatgccgtggcaactgtgatcactgtcttggtttctcttagttttttgttccaaggcacgttaaaagaattggtaaagtggttg

SEQ ID NO: 20689 - DNA, 258 bp, Glycine max
  Clone ID: 700955113H1
gttccctcttcatccattctcagcctcaaggaaattcatttggtgggaaaatccaagaagagggtggaatttcaagccagggaagatggattatttcaatgcaccaggaagaaaccatctctttgttccggggccggttaacatcccggaccagatcattcgggccatgaacagaaacaatgaggactaccgttctccagcaattccagctatgaccaaacactgcttgaggatgtcaagaagattttcaagaccata

SEQ ID NO: 20690 - DNA, 262 bp, Glycine max
  Clone ID: 700955114H1
gatgccatgacaaggcattctgaggccacggacttcagagattggtgtgagaatgagtgcgttaggcttattgggacaagagatacaagtttccttgaattttgcttgaagcaatctagatcagaagctgagatgcttcttatagaaaaccttggatcatatgatcctgaccatcaattcattgataaattcctcaattacaaggagttgttaccgtcagacgttttggacatagcttttcagagtaggaatgataagagag

SEQ ID NO: 20691 - DNA, 265 bp, Glycine max
  Clone ID: 700955115H1
gttagttcattctctttgcgcagttccctacctctcctttcaagatgcagatcttcgtcaagaccctcaccggaaagaccatcacccttgaggtggaaagctctgacaccatcgacaacgtcaaggccaagatccaggacaaggaaggaattgccccggatcagcaacgtctcatcttcgccggaaagcagctcgaggacggccgtaccctcgccgactacacatccagaaggagtcaacccttcaccttgtccttcgtctccgt

SEQ ID NO: 20692 - DNA, 250 bp, Glycine max
  Clone ID: 700955082H1
gctggatgcgcccagaggacatggactatgaccgccctgtgactgaatgccatagttgttctgatcttgcagctgagatggctgctgccttggcatctgcttccattgttttcaaggacaacaaggcctattcgaagaaactagttcatggtgctaccacgctgttcaagttttctagggagcagagaggcaggtacagtgcagggagttcggaagcttctatattttacaattctaccagttactggga

SEQ ID NO: 20693 - DNA, 252 bp, Glycine max
  Clone ID: 700955051H1
agcaaatgttgtacaatcaagtgtgctgcctgctatgtttagggacacatataatgcgatcacccaagggaatcccatgtggaataatttatctgttccaactggcactctttatgcttgggaccctacatcaacttatattcatgagccaccttattttagagatatgagcatgtctcccccaggctctcatggagtgaaagatgcttactgtttgctcaactttggagacagtatcacaactgaccacat

SEQ ID NO: 20694 - DNA, 251 bp, Glycine max
  Clone ID: 700955052H1
atcgttactccgcatatgaacactgggctaagattgaggttccaaaggacaaggaggagcttgcagccctccaagcaaggctaagaaagcggtttcctgtggatgcatacaataaagcaagaaaggaattggaccccaataggatcctttcgaacaacatgttggaaaagctcttcccacaatcagacaccatataattttgtgttggttgtgtctatattgtccatattttttatgtttactatatattc

SEQ ID NO: 20695 - DNA, 254 bp, Glycine max
  Clone ID: 700955053H1
gaggctgtactttgcttcttctttctttatccgttccttcttcatcatcatcgtcgtcattctttaatcctggcaaaaaaaaattacgctactttcgttgcgatcgtttccaatttcatgcgctttcttgtgtggggtggattggtggtgggttggttgattttaggtttgggaaagaacgcgtgactttgatgattacgaggattaaattgcatcaacaagtctctatgatatggatcaaatgagtcaacaaa

SEQ ID NO: 20696 - DNA, 250 bp, Glycine max
  Clone ID: 700955054H1
agaatattggagattaatgcagatcacccaattatcaaagacttaagtgctgcctgcaagaatgcacctgacagcagcgaagctaagcgagcagttgacctcttatacgacacggctctaatttctagtggattttctcctgacagccctgctgagttaggaaataagatttacgaaatgatggccttggccttgggaggaagatggggtagatcagaagaagaggagggagatgcttctgttgaagctg

SEQ ID NO: 20697 - DNA, 250 bp, Glycine max
  Clone ID: 700955055H1
gtagtattagcagcagcatatgttgttgtttgtggtcatcccttacagcagtgttgatcagaagaagactatataatagcctttgctccaatcacttcctcttgttcatgccataaactaaaccctttctacagttacaaatctatgctactccacaaagactctttttgcatgagacatcctctctcttaaaaaaccccttcttcagtcaaacctccccaatcatacttttaccatttcaccactcaca

SEQ ID NO: 20698 - DNA, 248 bp, Glycine max
  Clone ID: 700955057H1
gtccaaattctcctcccacccagaatggatgcaagggcatcatcttcttcaatgtccatgattcttttcattacagctattgtggctgcagcttattttcattcatcagaagcagctgtgtcaaaaggatcttttgaggacaatttcagcataatgtggtctgaggaccattttactacctctaaagatggacagatctggtatctctcactagacaaagacacaggatgtgggtttcaaacaaaaca

SEQ ID NO: 20699 - DNA, 248 bp, Glycine max
  Clone ID: 700955058H1
accaagcttctctccacgcccttcttgggtaatctgaagtgcagcgatggcggatggattgcactcgcggcatccatcagtagttcagaagttatctggacagtcttatttgttgtctaggcttgcccctactcactcaagaaactattccacaactggtagttacttcaatggaggcttgcagtcttcgggtttggttccagtcatggcacatgcaccggctgagaaaggagtgtctggatttttgt

SEQ ID NO: 20700 - DNA, 243 bp, Glycine max
  Clone ID: 700955060H1
ggaagaggaatgttagtatagaagagaggcttagtcagattcctgaggaggaagttaggatcatgagggaggaggtcattggtttgatccctagattggtgtacgcagatcctcgatccaaacttgagactcttgaggatgcatttgatgtttcggtgcaggctgtgattgacaaggttaccaacttgaggaaggacattatggaaggtcgcacggacgagaacttcattgaggagaacagtt

SEQ ID NO: 20701 - DNA, 247 bp, Glycine max
  Clone ID: 700955061H1
gcactttggctttggttctcgcgattctgatctctttgcagggaaccccccacgttagatccgatgcctccgatcatcgttacaaggacggagactccgttcctctttacgccaacaaagtcggtccctttcacaaccccagtgaaacgtatcggtactttgacctgccattctgtgtaacaggtcatgagaaagataagactgaagccctcggtgaggtgttaaatggcgatcgccttgttagtgc

SEQ ID NO: 20702 - DNA, 250 bp, Glycine max
  Clone ID: 700955063H1
aatctttgcgccctgataacatcaggatgtttgtattggatgaggcagatgagatgctctctcgaggtttcaaggatcagatctatgatatttttcagctgctgccacctaagatccaggttggggttttctctgccacaatgcctcctgaagccctggaaatcacaaggaagtttatgaacaaacctgtgaggattcttgtaaaacgtgatgagcttaccttggaggggatcaagcaattttttgtcaa

SEQ ID NO: 20703 - DNA, 253 bp, Glycine max
  Clone ID: 700955064H1
catatagagaacttcctcttcgtttcgctgattttggggttttgcatcggaatgaggctagtggcgccctgagtggattaacacgtgttaggagattccagcaggacgatgcacatattttctgcagggagtctcagataaaggatgaagtgaggaacagcttgaattcatcaattatgtctataagatatttggtttcacatatgagctgaagctttcaacgaggccagaaaaatacctaggagatattgca

SEQ ID NO: 20704 - DNA, 255 bp, Glycine max
  Clone ID: 700955065H1
cttcattctttctccttccccgtgactcacccgcgcgggaagagatcactccctccccaacccattcatttcgatctccattctccctgatactcctctctctctctctctctctctctctctctctgtgtgcgagttctagggttttgcggatagaaggataacacacttacacggcgtcgtttgatttgaggggggcgcaatatgccggggcaccgctcgaaatcggagaagcatggcggcggcggcgagaag

SEQ ID NO: 20705 - DNA, 253 bp, Glycine max
  Clone ID: 700955066H1
gtggcactgctgcaagtgcaactccaagaagcgcagtgccaagccaccatgtttcaacattcaacagaagcctttttccttccacttttctctttggaattggttcttctgcttaccaggcagaaggagcagcaagtgtagatgggagaggaccaagcatatgggacacctacactagacagcatactgaaaagatttgggatcatagcaccggtgacatgggagctgatttttatcatcgatacaagggtga

SEQ ID NO: 20706 - DNA, 253 bp, Glycine max
  Clone ID: 700955067H1
caaacctttgcttcactccttcaacgccgtactatcgtttccgagaaccatctctttttttctcgccgctcttccccgcaatcgcaacgcgcgttttgcttctccttttatcgcagattctctgcgtcgtcaccagactcacttccgtgattcgaacgcggcgtggggaagagaaaaccctaatccgacatggggaagaagaagccgacggcgagggacgaagagaacgcgtcgcagcaaggcggcggcggga

SEQ ID NO: 20707 - DNA, 252 bp, Glycine max
  Clone ID: 700955068H1
cccggaatctgctacggccagctcggagacaaccttccaccgccgcgagaatctgtctccctcataacctccgtccatgcgaagcgcgtgaagctctacgacgcgaacccatccatcctccacgcgcttcaagacacgcgcctgcaagtttccatcatggtccccaacgacctcatcttgaacatctccacgaaccaaaccctgtccgaccagtgggtctccgacaacgtcgtaccctaccacccccgcacc

SEQ ID NO: 20708 - DNA, 250 bp, Glycine max
  Clone ID: 700955069H1
ctccaattcaaccatggcttcgagactcacggtaacagccttggtgctgatagctttggcaacagtttctctccaaacctcagcttcatcagtgggtaaattcatcgacgaaaccatcacttcccacaagatcgtcattttttccaagacctattgcccgtactgtagaagggcaaaagctgttttcaaagagttgaaccaagttccacatgttgttgagctcgacgagagagaggatggttcaaagatt

SEQ ID NO: 20709 - DNA, 248 bp, Glycine max
  Clone ID: 700955071H1
ctgggacaaattggaaggacaaggattagcagcatacgaactcaacaaattctgtatctgcgcagaaacagaatttgttgagttcgtatgctgctaaccctgggacaaattggaaggacaaggattgtgctatttacttggtggtttctcttgcaaccaagaaggctggggctagtgatgtctccacggaactcgttgatgttcagagcttttgtgagtctgtgattgtccccgagctgcaaagtgca

SEQ ID NO: 20710 - DNA, 248 bp, Glycine max
  Clone ID: 700955072H1
gaaatagaaaaagcaaaactggtttctcgcatttcctccgaaacaaaccgtttcgctcgtttctcggatctgcaatggaagccccacccaaaggcgctgctggaagaagaggtgacaggaagaagtccgtttccaaatccatcaaagctggcctccaattccccgtcagccgcgtcgccaggtacttgaagaaaggccgttactctcgccgccttggcaccggcgctcccatttatctcgccgccgtt

SEQ ID NO: 20711 - DNA, 246 bp, Glycine max
  Clone ID: 700955073H1
ctgtcatgttggttcccctgctgaaaccctaaaggggagagatcggccaagaagcaacgagtaaccatggatggtgtgtattctaaaccagaaatggtgcttccacatcagatactggagtcaagcatgtcatcataccagcaacctaacactgtttttcttggccaagagcaatttgatccttctttggatatatctaccaaaagtgatgaggaattggttaagattggtggcggtaatctgtga

SEQ ID NO: 20712 - DNA, 246 bp, Glycine max
  Clone ID: 700955074H1
cagagatcagcactctaaaactcctagcttaatatttgagtatgtcaacagtacagattttaaagttttgtatccaaccgtgactgattatgacatacgctattacatatatgagcttcttaaggccttagattactgtcattctcaaggcataatgcatagagatgtcaagcctcataatgttatgatagatcatgaattacggaaacttcgcttgatagattggggtcttgctgaattttatca

SEQ ID NO: 20713 - DNA, 244 bp, Glycine max
  Clone ID: 700955075H1
gaacttttggaccacctagacaaccctgtggccaacaatgcttgggtctatgccactaagttttccccagggtcttaaaatgtatatgacttcttcttccctaatccctatgatcccatccctcgtgcttacctttgtgatttatgtgtagattatatgatcacaataattgttggattagtgtacttcttaaggactaaggttcaatttaaacctcggatgtctcttgtttgttaatatagtt

SEQ ID NO: 20714 - DNA, 246 bp, Glycine max
  Clone ID: 700955078H1
caatgttgcaatttccattcttcctaatccgacctacccactgttgcttccccattcaataattcaattcctgcactgcaccaatggagcttttgaagcctttgcaccctcaccatgcacccattttgcgaattccctttcacgctgtcccctcttcatcttcttctcaatctcagtctcaggttcccctccctatgatttctaaggttcatgtcgctgttgggaaatcgctcgacaaagttgttc

SEQ ID NO: 20715 - DNA, 251 bp, Glycine max
  Clone ID: 700955079H1
agacacaacacaacaaggttgcaaagtgaagaaggattaagccatgaaagctctaattttaatcctcacgctatgcatcattgctgtcaccttctcatcacaagcagcaacctccataggtcactgcaaccccaacccaacgaatttttcaagctcaacccagaccaagccacagaatgatggtagttcctgtagttacacggtgagcataaaaacaagctgcagttctccctcctacaccagagattaca

SEQ ID NO: 20716 - DNA, 245 bp, Glycine max
  Clone ID: 700955080H1
cctgccacaacactacactagcaagcacacacctttagcacaatcaccaatggcttcttccgacagcaagcttcccctgagacccatccctgggagctacgggcttcctttctttggacccatgattgacagacatgactatttctacaaccaaggacgcgacaagttctttgccgaacgaattaaaaagtacaactctacggttatacgaccaacaagccaccgggtcctgtcatttcctctaa

SEQ ID NO: 20717 - DNA, 252 bp, Glycine max
  Clone ID: 700955081H1
gaacaatccagcaaaatatgttgggctcaaaggttatggtttgacaatttccggtaggatcccattggtatcacttatcacaaaagagaacaagcgatacttggagaccaaacgtgtgaaaatgggtcacgtatatggctcggaatttaacagcaaattgaactatcaagacagtggcaatggtaaagtcaatagtgatgatgattctaatgctgctcctggcttataaagctgcttctcttctgccagata

SEQ ID NO: 20718 - DNA, 252 bp, Glycine max
  Clone ID: 700955050H1
gtggaacctctggatctctctctctctgcgatggagtttcgcgtttccgtcatttggagccttctcctcattgtctctttcttctctcctcaaatcaagggtgaggcttctggttccgtcttcttcgtcgatagctccagtaatcaattcattcgcgccagatcatccaactatgagcaaccttcactgttgctagaagaagctggtgctgttgtgtcagtcttgcttggttttgctcctccttccaccctt

SEQ ID NO: 20719 - DNA, 253 bp, Glycine max
  Clone ID: 700955014H1
ctcgagcgcttaaaagagcctttgctttttctttaggcctttccgaattaagtacttcgttcattttctctcgaagcaagaaaaatgttcatcgagagtttcaaggttgagagtcctaacgtgaagtacacagagactgagattcagtccgtgtacaactatgaaaccactgaacttgttcacgagaacaagaatggcacttatcagtgggttgtcaagcccaaaactgtcaaatatgaatttaaaaccaaca

SEQ ID NO: 20720 - DNA, 255 bp, Glycine max
  Clone ID: 700955015H1
gatcactcttcttccatcctttcctctctctctctccctctgcatttcccaagagcagatattagaagatggcagacgctgaggatattcaaccccttgtttgcgacaatggaactggaatggtgaaggcaggatttgcaggagacgatgccccacgtgcagtgtttcctagcattgttggtggcctcgtcacactggtgtgatggttggtatgggccagaaagatgcatatgttggtgatgaggcacaatctaa

SEQ ID NO: 20721 - DNA, 257 bp, Glycine max
  Clone ID: 700955016H1
tgttagtgaagcaatggctcaaaccatgttgctcatgtctagtgtctctagcagttattccgtggatttgaagaaagaccttttcctccaattgcagagtcaaagtttaaggcctaagttctctcagctctcattcaacccacttcatcatcaacttcttccttttcttcaccccgtacattcacaactctggccctcttcaaatctaagaccaaagccgctcctgctaagactaaggttacaaagccaaagcaaaa

SEQ ID NO: 20722 - DNA, 262 bp, Glycine max
  Clone ID: 700955017H1
aacaaaggcattgttatttctcaaaggaagtacgctttggatattctaaatgaaactggcatgagtggacattgacagtcccatgaattcaaatcaaaagttgatggctgaacagggtgaacccctctcagatcctgagaggtaaggagactagttgggaaactcatttatctcacaatcaccagacctgacatctcttatgcagttggagcagtgagtcaatttatgcagaatccttacactaatcattggaatgctgtca

SEQ ID NO: 20723 - DNA, 257 bp, Glycine max
  Clone ID: 700955018H1
cgcttcttcatcgaacttgccggttgtcattgacctctctttctttccctttcctttttctccatctctcgcaactcttcacctcaccgcgtcattcgcacgctgagacagcaacctccgaacactgaatcgtgattcgcagtgtatgacgagcgcttcggagctatttcactccagaaggcatcgattgggacgaagtgctctcgatctagggctcgacaccgaactcaacgccgccgattctctccgccgccact

SEQ ID NO: 20724 - DNA, 257 bp, Glycine max
  Clone ID: 700955019H1
ggtatgtttatttattttgacatttccaattggaatttccacacttttctttatatacatttttactttgttatttcatggtcaaggaattccttaatgctaatgaaataattttgacatactcaggtgatttgttcactttgtgggactgaacaagaggttcagcaaaactgtataaattgtggtgtttgtatgggaaaatacttctgtggaacatgcaagctttttgatgatgatgtaagtaaataattctggaa

SEQ ID NO: 20725 - DNA, 256 bp, Glycine max
  Clone ID: 700955020H1
gttattcccaaagccgatacttccttttcaagtcttttctctctctctctctctataataagattcttccctctcccttctctctctctctctagaacttcgtcctccctctgcttctttctttcttagttgcagcgcgattgctgcatcgtcctccaataagagctcgctgctagtgaaccctaacacggcggcaacgagaggtgttcggttgaagctcagatcagcgatggcagcagcaacccgcacttctctg

SEQ ID NO: 20726 - DNA, 256 bp, Glycine max
  Clone ID: 700955021H1
cgatttagcaaaagttttcttattttattttattttataataattgattatattcttatgaaattttgctaggaggatcatcaacaataaatacctcactctagctcacaaataccctgcatctacctccgaaaatgaagaaagcagcgattttgaagtctctccaaaccattatggttgtcttcctgctgatagtactctttagcagcaacaccaaagcagaaaaagaaacaatccacgaccatgcaaacaaaaa

SEQ ID NO: 20727 - DNA, 255 bp, Glycine max
  Clone ID: 700955023H1
attctctattctcttctgcatcaccatttcaccactgagagaacaacacaacacatcaaacgagcctctcggtttccaatgtgaagagagccaacatggctacaatcgctgccaggattctcggttccaactcaaggccagcggtcgcgctccgccgcttgcggtggccggcgtactcctccgcctccgcggtggtggcggagccggagaccacggaggtgaaggactacgccgattaccgccgctccctgtacg

SEQ ID NO: 20728 - DNA, 250 bp, Glycine max
  Clone ID: 700955027H1
gacaaatgctccactggaggaagtgcgcaagaatatttggttggtggactcaaagggattgattgtcagttcccgcaaagattcgctccaacattttaagaagccctgggctcatgagcatgaacctgttagaaatcttgtagatgctgttaataaaattaagccaacagtgttgattggaacatcgggacaaggaagaacatttactaaagaggtgattgaggcaatggcttctattaacgagagacct

SEQ ID NO: 20729 - DNA, 250 bp, Glycine max
  Clone ID: 700955028H1
ggtagtcaaggcctaagatcagaaaacagtgctgaccagaataaaaggcttggtaaaaaaaggaaggaccaaagtgatgaagaagaagaaggtggggaagagaatgaagatgatgaggacccctcagcacagaagaaagctcgtgtggtttggtctgttgagctgcatagaaaatttgttgctgcagttaatcaactgggcctagataaggctgttcccaagaaaatacttgacctaatgaatgttgaag

SEQ ID NO: 20730 - DNA, 251 bp, Glycine max
  Clone ID: 700955029H1
ctgaatctgcgtgtgtttgtgaattgttgttgagatctgaatcaaaatcagaaacgataatggctacaccggaccacctcttcaacctccgcaacaacttctacctcggcgcttaccaagccgccatcaacagcagcgacgttgccaacctctcccaagaagataccctcgagcgcgacaccctcgtccaccgctgctacatcgccctcggccagctccagttcgtcatctccgagatccacgacgatgct

SEQ ID NO: 20731 - DNA, 256 bp, Glycine max
  Clone ID: 700955031H1
gtctcaatcactcactgttggccatggaaaaccaaaaccgtctcaaacttcgaatctctcgcatgttccgatcctcattcgggtcgtgcaggactcgtaacctaaccgatgtaatggaacaagcggtgtttgcaccacccaaccccatcgaagtcgaaccaccctccctcaaaaccatcaacaacacttgcatcctgtcgtttaaggattctcttcccaggcgcaaaatctcggagtggtcatcaccttttgtctt

SEQ ID NO: 20732 - DNA, 272 bp, Glycine max
  Clone ID: 700955032H1
gaagtcgaattcggtcgaactcgagcgattcggctcagatccccccctagctacagagcagccaaaggggaggaataataataagcctatattctaaggccggaaaaatagaaaaggaataacaaaaatgtctggaaaggtaattatctcggctgtttctctcatcctggtggttggagtggccataggtgtggtggtggccgtcaacaagaaggcgatgatcccacacttcaatctcaacaaaaatcagtaggggttatctgccagaacac

SEQ ID NO: 20733 - DNA, 256 bp, Glycine max
  Clone ID: 700955034H1
ctttcttttctttgccaacactcctcctttggttaggggtttagatccgaaattccaaatcgccacgccatgaacgcaaccttatactctgctgcttttcctaccacgtttcgcagtctcgatcatcgcaattactcagcgttatgttcggatatccaaaatcctggctatgttgattaccattcaaattctaataagtctacatctcatgcgtctttcatcttccgttctgattccaccaatagaagcaatgtcg

SEQ ID NO: 20734 - DNA, 258 bp, Glycine max
  Clone ID: 700955035H1
ctctaacccaaatctcaaagaaacaaaacaaaaccctaactgcattaaacccgaacacacatcactctgagttccatccatggcgtcgcaaatggcgatcctcttccgcacgcgcaccctcctcttctccaaacccaccaccaccctcatcaaaaccattaccacattccccttcctctcacaagatccccaattagtggttcccatcccatccccctcttcctcttcaacccctctccctcccaaccccgcctccgg

SEQ ID NO: 20735 - DNA, 252 bp, Glycine max
  Clone ID: 700955036H1
ggggttcctaattactgtgcagagcttgtagccatggcattcatagagaaagctgtgtttttcttgatgatgatgatgacagctttccaagtttcacatgcagctgtgcacaaggttggggactctgctggttggaccatcattggtaatatagattacaagaagtgggctgctactaagaacttccaagttggtgacactatcatttttgaatataatgcgaagttccacaacgtgatgcgagtgacgcat

SEQ ID NO: 20736 - DNA, 251 bp, Glycine max
  Clone ID: 700955038H1
aaagaaaaataaaaacccttagccaacacaaccatcatggccacctctgctattcagcaatcagcattcactggtcaaactgctctgaagcagctcaatgagttcgtccgcaagaccggtggcgccggcaaaggtcgcactaacatgcgccgcaccgtcaagagtgctcctcagagcatttggtatggccctgaccgtcccaagtacttgggtccattctcggagcagattccatcatacctgaccggaga

SEQ ID NO: 20737 - DNA, 252 bp, Glycine max
  Clone ID: 700955039H1
agatattataccactgttggagaaaaccactcagttgagagctcctttgcttatcattgctgaggatgtcactggtgaggctttggccacccttgttgtgaataagctacgtggtatccttaacgttgctgccatcaaagctcctggctttggtgagcggcgaaaggccctgcttcaagacattgctatattgactggtgctgagttccaagctagtgatctgggtctgcttgttgaaaacacctcagtgga

SEQ ID NO: 20738 - DNA, 251 bp, Glycine max
  Clone ID: 700955040H1
aacctatttgtttttttgttgcttttgctttgttgtgttctcttcggaagcggaatcgatcaatccctcacctcattgctgagatctgcaaactggctatggactacgaaccctacgacagtagcggaactgatgatgaccttccaccaacccatcaaaatagaatttccaggggaggaggaggacgtctggctgggaatgggagatctgctgttgcttcaattccttacccaaggatgtacggtgaaatt

SEQ ID NO: 20739 - DNA, 252 bp, Glycine max
  Clone ID: 700955041H1
cttctacatcacatccatccttttggtccctcctgaacctgtctgcatccattcccatttcttcttccgtatgcatgttcccaccgtctaaaaaacctagcaaagcaacaaaacggcgtcatgcttgggaagtagcatgcaatggtaaccctagaaataggagggacattctgatcggccttggaggactctatggtgctacaacaagtctcacaagtaacaacactggttctgcatttggtgcttcattgt

SEQ ID NO: 20740 - DNA, 248 bp, Glycine max
  Clone ID: 700955043H1
acaagattcacgccgagaacaattctctctacaacaccccaccgtgctacgggatttacatgtgtgggttggtttttgaggacttgttggagcagggtgggttgggtgaggttgagaagaagaatgtgaagaaagctgaggttttgtataacacaattgatggaagcaatggtttttataagtgtccggtggagaagtcggtgaggtcgttgatgaatgtgccgtttacgttggagaagccggagctg

SEQ ID NO: 20741 - DNA, 250 bp, Glycine max
  Clone ID: 700955046H1
cttcttcttcttcccttttcattgaccttttccttccttcgtgctccaatggcgactgttccgcacccattatccctcgcaagtgtaggttttgctaaccgaacctcctccatctccagatccactctcaaatgctgcgctcaatctccttctccttcactagttgacaacgcccagaagtttctcgaagcttccaagaaggggaacgtcattcctctcttccgctgcatattttccgatcacctcactc

SEQ ID NO: 20742 - DNA, 273 bp, Glycine max
  Clone ID: 700955048H1
ggatcgtgagttcggctcgagtgggtatattgtttcggactgtgactcggttggagttttctttgacaatcaacactacacaagaacacctgaggaggcagctgctgaggccatcaaagctggcctggacttggattgtggcccattcttgggctatccacactgattctgccattaggaagggactcatttcagaaaatgatcttaaccttgcattggccaaccttattacagtccaaatgagattgggtatgtcacggtgaaccatcaacc

SEQ ID NO: 20743 - DNA, 251 bp, Glycine max
  Clone ID: 700955013H1
ctctctctctctctctcttctctctctctctttcttcctttctttaatacttattaattcatcttttttatctttctttctttctttccccttttgtatttctgggttcgatattgttatcggttatttgtgcactgcttccgccggggctattcaggaatcatggctagggttttggctcagtctgttaatgtccctggtctagtggctgagcataggcatggtcagcaaaagggatcaggaaaattaaa

SEQ ID NO: 20744 - DNA, 240 bp, Glycine max
  Clone ID: 700954966H1
tgcagatctcaaacgaagcccttttctctctctcttcaatttcacccttttagcatttgtacattcctttcccttccttgaatcgttcttaattgcgagatgggatatcggagaagttgattggcctcccattaattgcaggtctgaatgatctgatggagtctaaagttgggaagaagaatcgtctagtagtaagtcccttttgtacgaagctcctctcgattacaccattgatgacgt

SEQ ID NO: 20745 - DNA, 248 bp, Glycine max
  Clone ID: 700954971H1
gatcaatgcacttccatttccacctcttctacctctagggtttctcactttcttccacgcatccttctaacttattcaattccccttacattcaactctcctatgccgaatctgcaacaattacactaaatgaattgctaacaacacgcacacaaactctccgtctttttttctttttcttctctctttctctaagaagagcgcgctttctcgtctctcctcgttttaacaggaagcgcatcgcattc

SEQ ID NO: 20746 - DNA, 246 bp, Glycine max
  Clone ID: 700954972H1
gaaaaaatgggttttcttcttctatgtggacggtgtgtgtgattttggcatcactggcctctgcagcactctgtgccaacccacgcaggccagtggatgtacaatttggccgaaactacgtgcccacatgggcctttgatcacatcaaatatttcaatggtggttctgacattcagcttcatcttgacaagtacactggtactgtcttccagtccaaagggtcttacttgtttggtcacttcagca

SEQ ID NO: 20747 - DNA, 250 bp, Glycine max
  Clone ID: 700954974H1
actcggtaaaattggattagggtttcattttcttcttcttcaccccactgtcactgcgcaaatccagttctccccttaccctctccctcggtcctgatcttttcccgccatttcccgcgtttcttttacccagattttgaatactagccgttggatctgccatttttttcaatttttttcgaccgttgctctcgccggagtgaacgggaaatgtctgcgtccgaagcggagaagaaggtcgaggaggaat

SEQ ID NO: 20748 - DNA, 245 bp, Glycine max
  Clone ID: 700954975H1
ctggactgccaaggtgttctgtgaagaggagctagttgaagcaattgccacagccacaggacccaagatagactccttatgcttcattgaggtgattgttcataaggatgacaccagtaaagaattgcttgaatggggctcaagggtttctgctgccaatagccgtcctcccaatcctcagtaatcttcagaatttatcctatgactaaattgctgcagttgccctttagctctatgaaagtgag

SEQ ID NO: 20749 - DNA, 133 bp, Glycine max
  Clone ID: 700954977H1
gcaaaattcaatatcctatttatctagtcttctagacaaggaagataggtctgtacgaattgctgctggtgaagcactggctctaatttttgaacttggagttatagataaattttctgccaagtcagacagt

SEQ ID NO: 20750 - DNA, 249 bp, Glycine max
  Clone ID: 700954978H1
aattaatgcccctttcattttctctgcatctgtagtatctatcaccaatcaattccactcttcttcccatcaaacaacaaaaaatcaatctgggaaacaaaaacaaaatgccgtcattagaggaggaactcttcccatcaaccccaggaaagttcaagatcgagcggtcccaccacatgaaccgccaactctatcgctgtttcgcctccaccagcaccatgttcctgtgggccctcttcttaatcgccc

SEQ ID NO: 20751 - DNA, 248 bp, Glycine max
  Clone ID: 700954979H1
caacagcacaaagcgggttactgtctgttcaagctaccatctctctctctctttcttagtgcctccttgccagaagttaaaatggcccaagaaactttcctattcacatctgaatcagtgaacgaggggcaccctgacaagctctgtgaccagatctccgatgctgtgctcgatgcatgcttggagcaggaccctgacagcaaggttgcctgtgaaacctgcaccaagaccaacatggtgatggtttt

SEQ ID NO: 20752 - DNA, 247 bp, Glycine max
  Clone ID: 700954980H1
gccccttctgccctcccaacccatatacttaaaaaaacccaaaaaaccagaaatagcataaaatttttcagcttctccgccgccgtacagccaccacctccgttcggatctccggcggacctactatccctactactctatttacacggaagaacaaaaaaactatcccacaaaaaaaattcaaaagcggttcggttagggtttagtttggttgtgatattatttcgtgtatctaatttttcatcag

SEQ ID NO: 20753 - DNA, 246 bp, Glycine max
  Clone ID: 700954981H1
gttccaaggcacagatgggaatcttggaccgaaagaatgcattcttttacttggatggcgccctgaggctgtagaaatgattcaagagtatgataactatcttggtcctggaagtgttttggaagtgttatcagacacaccattagatgacaggatcaataaggcaagcaacatccatggtcataacaaactcaggaatgtccgagtttcacatcggattggaaatcccatggactatgacacctt

SEQ ID NO: 20754 - DNA, 245 bp, Glycine max
  Clone ID: 700954982H1
cggctcgagcgtgaaactctcccaagtgaagtcccaacccaatataaatccttctgaaagcaaaagggagagaaaggcttttatttgcacccctaccccgcgatgatggacactttgtctatctagacaacacctttctaccttccttctcagcttcatctcaagtttataactcccctatatccatttattaattgaacaaaatgtgtcactgagtgagagagagagagagagagacatcatag

SEQ ID NO: 20755 - DNA, 130 bp, Glycine max
  Clone ID: 700954984H1
gttcaaattgctgaagtcaagatggaacagcatcaatgaaaacgatatttgtcagtgaaactgtgacgtttctgctgatactgagtgcaaatgtctgagtctcctggtgttggcttcttgtaatcgcaat

SEQ ID NO: 20756 - DNA, 247 bp, Glycine max
  Clone ID: 700954985H1
cggcgtagatcaccttcccctgggcgccgacgtagatcaccttcccccgggcctcgacacagatcaccttctcccgggcctcgacacaaatcaccttctcctgggcgccatcatagatcaccatcacctcttggacgacgaaggtcactctcacctagacgacgaagatcagttgttactcggcataggtcaccttcactagtacgccgaataccaccaaccaatgtgcggagaagatcagactccc

SEQ ID NO: 20757 - DNA, 244 bp, Glycine max
  Clone ID: 700954987H1
ggttcatccgctcccacaacaagaaccgcttgccctacactctctctgttaatcattttgctgattggacttgggaggagttcaaaagacacagactaggcgctgcccaaaattgctctgccactcttaacggcaaccacaagctcactgatgctgttcttcctcccacgaaagactggaggaaagaaggaatagtgagtgatgttaaagatcaaggcagctgcggatcatgctggacattcag

SEQ ID NO: 20758 - DNA, 237 bp, Glycine max
  Clone ID: 700954988H1
agagtgtgcaagtagaataatacccgaactgaatgaagttgtccaggtcactaaggaaaaacatcaaaagaatcgatatacatatatatatatatatatgttccttaatttaattatatagtttgttcctttaactatatatataaagtttgattttgctaccacgactctaggagttaacagtcaacaggagtacttgaagctgaaggcacgttatgagtccctacaacggtccca

SEQ ID NO: 20759 - DNA, 248 bp, Glycine max
  Clone ID: 700954989H1
gaaaaccaaaaaccttactctttttcacgcgacgccctagttcatttttcttctccgttctcttctctctctgttcttcactcactctcattcattcaccatgacgaaacaacatgccaattggtctccttacgataacaacggaggatcatgtgttgcgattgctggagcagattactgcgttatcgccgcagatacgagaatgtccaccggttacaacatcctcactcgcgattactccaaaatct

SEQ ID NO: 20760 - DNA, 242 bp, Glycine max
  Clone ID: 700954991H1
gcatcatggagccatatctaagatacttgtatacatatgtttctatatctggtccacacttaggttatatgtatagttcgaactctatattcaattcaggattgtggctcttgaagaagatcaagggcacacaatgcatccatcaactaactttcacagatgatcatgatcttgagataccttcatctacaatctttcaaagaagaagacacttgcaaacttcaagaatgtgattctgttat

SEQ ID NO: 20761 - DNA, 248 bp, Glycine max
  Clone ID: 700954993H1
ctttctcctaaaacatctccagtgggttcttcttcttctattacaacaacgtcgtccaagaccatgaccatggccatggccacgatcctgctcctgttcacggtcttcgcggtttcatcggccctagacatgtcgataatctcgtacgacaacgcccacgccgccacgtcgcgcagcacgaggagctgatgtccatgtacgagcagtggctagtaaagcacggcaaggtgtacaacgcgctcggagag

SEQ ID NO: 20762 - DNA, 249 bp, Glycine max
  Clone ID: 700954994H1
agaaaatcaaactacaatcttccaccaggaccctctcttctcaccatcattagaaactctaaacaactctataaaaagccacagcagacaatggccaagcttgccaaaacctatggccccataatgcgtttcaccataggccaatcaaccaccatagtaatctcctcaatagaagccaccaagaggttctccaaacccatgactcattattctcggacagaacaaaccccgacatcacaacctcgtaca

SEQ ID NO: 20763 - DNA, 249 bp, Glycine max
  Clone ID: 700954995H1
gccaacccccaaactcctccttctcaagtagtctcatccctcacaccaaacataaaactcccaaacaacccctcatgggttgatttttgaattttattcattgatcaatctccatgccgccccaccgcgatcgcgaccatgaccacgacgacgatcacgtggctgagcaccaccaccactaccaccacagacccatcagaagaaaattggtgaacactcaccacagcggcaaaacacaccctcttatct

SEQ ID NO: 20764 - DNA, 245 bp, Glycine max
  Clone ID: 700954996H1
gtaaagtttcctcttctcatttcattactccaactgatgatcacaatgataatttggacttggatgactggaatacgaggaacaaagctgtggaagacccttttgttactgatgaagtaaacactcagagaaacaatatggaaacaagttcttataatgatactactgttgtatttgatgattctggatcagaggatgatgatcataagtttgatgttgataaaaagtacaatggtgagggatct

SEQ ID NO: 20765 - DNA, 261 bp, Glycine max
  Clone ID: 700955002H1
gaaacagatgaaagagaaattgggtattggagtgctgagttgtatagcctcaattcaaactcttggagaaaacttgatccctctcttctccctcttccaattgaaatctgggggtcttctcgggttttcacttatgccaacaattgctgccactggtggggctttgtggaagattctggtgcaacacaagatattgttcttgcatttgacatggtcaaagaatcgtttaggaagataagggtaccaaaagttcgtgattct

SEQ ID NO: 20766 - DNA, 257 bp, Glycine max
  Clone ID: 700955004H1
ctcgccagctcgcgaacgttggcgtcgatgtcatcgaaggaagctttccttcagcgtcgcaggaagacttcaatgctgtcaagatgatagcacaagaagttggcaacaactgtgatgctgatggctatgttcccgtcattgccgccctctgtaggtgcaatgagaaggacattgccacagcgtgggaggctctgaaatacgccaagaggccgaggcttatgcctttcatagcagtgagccccattcacatggagtac

SEQ ID NO: 20767 - DNA, 257 bp, Glycine max
  Clone ID: 700955005H1
cagaggttcaagatgatgagaattctcaactgcaatcagaagaaaagaagagggaagaagtatttttgaaggacaggatacccacctggtttgcagcttctggatatgtgggcttggctgcgatatccatagcaacaataccaattatcttccctcctctcaaatggtacttggttctgtgctcttacatcctcgcccctgcccttgccttctgcaactcttacggtactggcctcacagactggagtctggcatcc

SEQ ID NO: 20768 - DNA, 253 bp, Glycine max
  Clone ID: 700955007H1
cctgctacctactgcaccagttcctagctcgcttcttctctgttctctctcatctcctcagatcgatcaagcatcagggggctttgagggttgattctctggtgtggtagcaatcagcacaatagaaaatgttttttgacggatatggatatcatgggacatcatttgagcagatatatcgatgctacccagcttcctttattgaaaagccccaaattgaaagtggtgacaaaattatcatgcctccatcagc

SEQ ID NO: 20769 - DNA, 250 bp, Glycine max
  Clone ID: 700954965H1
cttagctcaaacctcacctcaataatctttcgtgctagctagcttaatcatattccaattccaacagaaccaaattctgctagctagctagtacgtcaaaggaaataaaataatatggcattcagcgggacccaacagaaatgcgaggcttgcgacaaaactggtcacttggtcgaaagttatctgtcgatggggctgcttatcacaagaattgcttcagatgcagccattgcaatgggcttcttgcgag

SEQ ID NO: 20770 - DNA, 255 bp, Glycine max
  Clone ID: 700955009H1
tctagatcagggtcactgtggttcttgttgggcatttggtgctgttgaatcattgtcagatcgcttttgcattcattttgatgttaatatctctctctctgttaatgaccttcttgcatgctgtggctttctgtgtggatctggctgtgatggaggatatcccttatatgcatggcgatacttagcccaccatggtgttgtcactgaagagtgtgacccatattttgatcaaattggctgttctcatcctggttg

SEQ ID NO: 20771 - DNA, 260 bp, Glycine max
  Clone ID: 700954908H1
agaaactggtgtctccgtttgcagcgtcactacttgctacaacacgagccatgaaacccaccttcccaatccactccaattcaaatttctcactataaaccacttcttcaaacttccctccgcaattcttaattcattcgaaccatggcagcgtcctcgctctgttcctctttcacctccaaaacatggaacccgcaccggccgcactcatgctatcaccacaaaaccccaagcccgccgtattccacctttcttcgcgg

SEQ ID NO: 20772 - DNA, 257 bp, Glycine max
  Clone ID: 700954909H1
agtggctataacactacttgcattgagttagactttgatagtttgattagctctaataaggttaaggaccagagaaagagagaaagaaacagaatttggaagaaaaaaagcacaagatgggttattggaagtctaaggttcttcccaagatcaagaaggtttttgagaagatagcaccaagaaagctgcgctgctgaggccaccaagtcctttgatgagtcaaaggaggaatacaacaaagcctttgaagaaaagaa

SEQ ID NO: 20773 - DNA, 258 bp, Glycine max
  Clone ID: 700954910H1
aaaaaagaagggagagtgtacgagcgaattatctctctctatatatagatagataaatgataaaagcctcgagggtccgtcccatccctgaaaatgctatgaggtgttgggaaatggttgaagtagttgaataggaggatcgctatgactatagctcttggtaaatttaccaaagatgaaaatgatttatgtgatattatggatgactggttgcggagggaccgtttcgtttttgtaggttggtccggtctattactc

SEQ ID NO: 20774 - DNA, 83 bp, Glycine max
  Clone ID: 700954912H1
gcgtgccaaggtcttgtgaattttgagcgttaagtgctgcaactaatcagatcccaagacccttggcctaccttgccatacag

SEQ ID NO: 20775 - DNA, 258 bp, Glycine max
  Clone ID: 700954913H1
agcacaagccaggttgagagatggagggaagtatccggtgctctgccaactacgttcctctcactccaatcagcttcttggaccgcgccgccgtcgtttaccgcgacagactttctcttgtctccggtgacgttacctacacgtggacccagacacaccaacgctgcatcaaacttgcttcttccatttctcaacttggtgtcggtctttctcccctcgatgtggttgctctattggcccctaatgttccagctatgt

SEQ ID NO: 20776 - DNA, 259 bp, Glycine max
  Clone ID: 700954915H1
gtgttattttgagtatcagcatcaatggctccaattgcagtgggaaacgtgattccagacggcattttggcttacttggatgaagaaaacaaaccccaaactgtctccattcactctctcgccaccggcaagaaagtcatcatctttggggttcccggtgccttcactcctacttgcagcttgaagcacgtcctggcttcattgagagagcagaagagctgaaagggaagggtgtggacgaaataatctgtatcagtgt

SEQ ID NO: 20777 - DNA, 259 bp, Glycine max
  Clone ID: 700954916H1
ccaagctccctgcactagctgagcttctcaattgagagggtgcatcagacgatgtgcatgttagcattgcatgccacctgcttgcaacggaaacaatattttgagctctgtgagaaattcttgtcgcagcatgcagacaaataatgatgcccaccacctgaacaagtgtggatacctaaaagaaacaacatacaaaaagaaatggtgaaatgacaggaattagttccttcaatctaaatgcgtattaatactttgaaca

SEQ ID NO: 20778 - DNA, 255 bp, Glycine max
  Clone ID: 700954917H1
gagaaaatctggcatcacactttctacaacgagctgcgtgtggccccggaagagcaccctgttctcctcacagaagcaccacttaatcctaaggccaaccgtgagaaaatgacacagattatgtttgagaccttcaacactccagctatgtatgttgccatccaagcagtgctttctctttatgctagtggccgtacaactggtattgttctggattctggtgatggtgtcagccacacagttccaatctatgaa

SEQ ID NO: 20779 - DNA, 139 bp, Glycine max
  Clone ID: 700954919H1
atcaaacacaaaatggaaaagaatgtggggattctcgccattgacatctacttccctcccgcttgcgttcagcaggaagcattggagactcatgatggtgccagtgaagggaagtataccattggacttggccaagact

SEQ ID NO: 20780 - DNA, 249 bp, Glycine max
  Clone ID: 700954921H1
agaagaaacagaagagagtcgaaaacggcagtcccctccctcattggaagggaggaacacagccagccacgacagggctactccctgggatcgggttctgtcttcttcattgcagcagatctcactacactgcatgcatatgggtggttgtcttggaccctttaaaaagccccactaattgctactcagatgttccgccaaaaggattgaggaaacaaggtaaggcagcaaagaaacctagcacatcag

SEQ ID NO: 20781 - DNA, 253 bp, Glycine max
  Clone ID: 700954923H1
ctcatttttttaggctcataaatcttttttatgggtttcagggtcactactactctgtctctgctctccctgttttggctcttgtccctgcaccaagcaagagctgcaaagttccacaatgtgagtggcttgagagggaaaagccagttgtagcaaatgggtgcaatttgttcctgggaagttgggtggttgacacgtcttatcctctctatgactcttcaacatgccccttcattgatcccgagtttgattg

SEQ ID NO: 20782 - DNA, 254 bp, Glycine max
  Clone ID: 700954924H1
gaagtaatggcgaacatagacatcgaagggatcttgaagcagcagcagccttatgatgggcgcgttccgaagacgaagatagtgtgtactttgggccctgcttctcgatccgtagaaatgaccgagaagcttctgagggcagggatgaacgttgctcgtttcaatttctctcatggcacccacgactatcaccaggaaaccctcaacaatctcaagactgccatgcacaacactggcatactctgtgccgtcat

SEQ ID NO: 20783 - DNA, 140 bp, Glycine max
  Clone ID: 700954925H1
cgataacacgtcctatcactttccacgtaagtctccaggtacagaaccactcatttcaatggaaattgacggcaacgttctcgcggcgaagtcgctggttcacttcggcgtgcaccacatgttcggcgtcgtggggattc

SEQ ID NO: 20784 - DNA, 257 bp, Glycine max
  Clone ID: 700954931H1
gggaagtatccggtgctctgccaactacgttcctctcactccaatcagcttcttggaccgcgccgccgtcgtttaccgcgacagactttctcttgtctccggtgacgttacctacacgtggacccagacacaccaacgctgcatcaaacttgcttcttccatttctcaacttggtgtcggtctttctccctcgatgtggttgctgtattggcccctaatgttccagctatgtatgagatgcattttgctgttcccat

SEQ ID NO: 20785 - DNA, 257 bp, Glycine max
  Clone ID: 700954932H1
ctcgagccgattcggctcgaggcacggtcgccgaagaagtaagaacaccaatgccagagaacgaaagcgcggcggcggcgacggtggaggaggagaacaacaccgccctgttcggaaaatacgaggttggaaggctcctaggatgcggcgcgttcgcgaaggtgtaccacgcgcgcaacaccgagactgggcagagcgtggcggttaaagtcataagcaaaaagaaactaaactcgtcagggttagcttccaacgtg

SEQ ID NO: 20786 - DNA, 135 bp, Glycine max
  Clone ID: 700954933H1
cacactaacaccaccacttcatcaactttacttgacaacaatattgtaaaactcagaatctagtttcatacttggggggttcttcttgagatggctctccaggctgcttctgtggttcctgcttctgtctcggtt

SEQ ID NO: 20787 - DNA, 253 bp, Glycine max
  Clone ID: 700954934H1
cattctctctgtgtatttgctacctctcccttcaagatgcagatcttcgtcaagaccctcaccggcaagaccatcacccttgaggtggaaagctctgacaccatcgacaacgtcaaggccaagatccaggacaaggaaggtatccccccggaccagcaacgtctcattttcgccggatagcaacttgaggacggccgtacccttgctgactacaacattcagaaggagagtactcttcacctcgtcctccgtc

SEQ ID NO: 20788 - DNA, 137 bp, Glycine max
  Clone ID: 700954939H1
ggaaatatatactttctggcctcagtgacaagagcatttgcatgtgggatttagatgggaaagaactggagtcttggaaaggacaaagaacccttaagatttctgatttggaaataacaggtgatggggaacacatg

SEQ ID NO: 20789 - DNA, 254 bp, Glycine max
  Clone ID: 700954940H1
aaaagccccttccttcatcaaggtactactgtttcatcttccctcaaagattggaacaacaacaggaacatgggtactctaacaactgttcctgtgctcccttctaagcttaacaagccttcgctttctccgcgtcacaattctctttttccctactacggaagacgcgtcgggaagaagaacaagcaatggttcctgttgctaggttgttcgggccagccatatttgaagcctcaaagcttaaggttttattc

SEQ ID NO: 20790 - DNA, 135 bp, Glycine max
  Clone ID: 700954941H1
aaaccctgaaggaagccatcgtagcctacactggcttctgtccttccaccttcttcacggtgctggcgcttctgtgtgccgttgactacgtcgtcacgggtctctgtggctcctccgacgatcaccatcaccggc

SEQ ID NO: 20791 - DNA, 253 bp, Glycine max
  Clone ID: 700954947H1
gttcaagactatttgatcaagaggatggaagagagtcacagagggaaaacagatttggttgtgctctgcaatgaaggctctcaagctgttaaaaatgtagacaagacacaatctgaaggggaagttttatccaatcttatcagttgtgtggaggaatctggtgcaaaatatgccgttctttatgtgtcggatccctccaggtcaatccagtatccttcttacagggatctgcaaagatttctagcagaaagta

SEQ ID NO: 20792 - DNA, 254 bp, Glycine max
  Clone ID: 700954948H1
gccaagtgaaagtgagaaacaataaaaatcaaagagcataatgtcagggatcattcacaagattggggagacccttcatgtgggagggcacaagaaggaggaggagcataagggtgagcaccatgctggagaatacaaaggggagcaccatggtgaacacagtagtgagtacaaaggagagcatcaggtgaacacaaagctggagagtaccatggtgagcacaagccagagcacaaagaggggttcctagacaa

SEQ ID NO: 20793 - DNA, 132 bp, Glycine max
  Clone ID: 700954949H1
ggcttcttctacatcacatccatccttttggtccctcctgaacctgtctgcgtccattcccatttgttcttccgtatgcatgttcccaccgtctaagaaacctagcagagcaacaaaacggcgtcatgcttg

SEQ ID NO: 20794 - DNA, 250 bp, Glycine max
  Clone ID: 700954956H1
ggactgaacatccaagaagcacatgcattttctacaactgatggtttctcattagatgtgtttgttgttgaaggatggccctatgaggaaacagaaaagcttaaagcagctttggaaagtgaagtcttgaagaagattgagagacaggtgaggtctagtccacaatccgtatcttcagttgacgagcctgatcaagcaaagttgtacagtgaactggatcatgtgacaataccaaatgatgggacagatg

SEQ ID NO: 20795 - DNA, 258 bp, Glycine max
  Clone ID: 700954907H1
ggatgctcttgtcaaggctgggattgaaattgacgaggaagagcttgctcgctttgtggagcatgttgacaaggataataatggaattatcacttttgaagagtggagagattttcttctactttatcctcatgaagcgactattgaaaacatatatcatcattgggagagggtgtgccttgttgacattggagaacaagctgttattcccgaaggcatcagcaagcatgtgcacaggagcagatattttattgcagg

SEQ ID NO: 20796 - DNA, 251 bp, Glycine max
  Clone ID: 700954957H1
tggaagccctcactcttccctcttttctttctttcatccccaaatcaaaacctaaattcccaccttcaactttctcccccaaatcgaccaccaccactgtcaagcccattcatttatattttattcgtatatatacatacagagagtgagtgagagagagagtgggtagaatggattcggatcaagcaagcttttcatcggtgggatttcatgggatacgacggatgacaagctcaaggagcatttcggta

SEQ ID NO: 20797 - DNA, 251 bp, Glycine max
  Clone ID: 700954958H1
aagaaaatgggtagaggagaagatcgagaaggggtcgcagcagccgggggctttttctggtcctacaccgacgaaccccatgccacacgacgtcgtctgatcctctccaaataccctcaaatcaaacaactctttggccccgaccactccgcttttttcaagattagtggagttgttttgcttcagcttggtactggtgctttactccatgatgctggctggctgaagatttttttagtagcatacttttt

SEQ ID NO: 20798 - DNA, 126 bp, Glycine max
  Clone ID: 700954963H1
tgacaagcgagctgatgatagacttatccacactaggtggtatcaccttgaagaatccatatcatctgtgctggatggggaacaaggaaaaaaggagaaagataaattttttagtagaattcacct

SEQ ID NO: 20799 - DNA, 241 bp, Glycine max
  Clone ID: 700954964H1
acgtaagcttatgtctattttagggtgatgtttagtaattgtgtttgtttgagtaatattgtatttagggtaagatttagtaatatgggtgatgttcagaatgctaattaataaataagctctttagcaaactactagcttgtgattgcagttgacagggaattgtttcttctcccttcagctgttttaagttctattctatatttgagcattgtagtatttgcactgtgttattggtgtc

SEQ ID NO: 20800 - DNA, 261 bp, Glycine max
  Clone ID: 700954878H1
ggaaccaaagaatatggttccttgctctgggagcaatcttctggttagagttggacgattgctcccagagccaggaaccaaagcatatggtgaacttaccagtaatcatcaaaaggcttatttgagaacaattacaggaaagactgaggccctactggacctaacagtgatagagatattgtcaaggcatgcttctgatgaggtctaccttggcagagggacaatccaaattggactgatgacacaaaggcaattcaagcc

SEQ ID NO: 20801 - DNA, 263 bp, Glycine max
  Clone ID: 700954879H1
aacctgattcatgtgccatacccaggttcgatggtgcggctttcctgaacagttggaggggtaagaagataatgtttgtgggtgactcactgagtctcaacatgtgggaatcactgtcctgtatgattcacgcgtcggtgccaaatgccaagaccggctttttgagaaaagaatcactgtccactgtgaccttccaggactatggagtaactaacagctataccgcacaccgtatttggtagacataattcgtgaaaatgtgg

SEQ ID NO: 20802 - DNA, 265 bp, Glycine max
  Clone ID: 700954880H1
aattccttcgttctaccgtcatcaactagaagaagaagcttcaatttctgcaaaatggatccgtctgcggcattgctgtttaaccacctcaaaggtgcagacccgttcttcctgctagcgggtcctaatgtgattgaatcagaggagcacattctgcggatggctaagaacatcaagactattgcatctgaagttggaataccgttggttttcagtcaagctttgacaaagctaaccgaacatcatcaaaatcatttcgtggccc

SEQ ID NO: 20803 - DNA, 259 bp, Glycine max
  Clone ID: 700954881H1
ctcacgcatttcctcgtttttttcttcccttttctctttctccggcgacgatctcagattccggccactcctctcgccggcgagcccttactcttccctcctccgtcgagccctctccgattcgaatcgttcccagcctcgcaccaccatgaatcccgaatacgattatttgttcaagcttttgctgattggagattctggtgtaggcagtcatgtcttctcctgaggtttgctgatgattcataccttgacagctata

SEQ ID NO: 20804 - DNA, 269 bp, Glycine max
  Clone ID: 700954882H1
gtttttgcctacctgagtggcttgatgatccttatttcgagtggctgcactggccacaagcctctattcctttctctgagtatgaaattgactacatttccaagcttgatccttttagggatgctgaggctttgagaaacgagcttccttcgtcgttgagggagtcatccattcgcgttcttattgtttgcaccatcttgttgaagcaagctgccgctgcggcctttgtcttgctgaaatagggcaaatgatgactaggaagttttgtg

SEQ ID NO: 20805 - DNA, 266 bp, Glycine max
  Clone ID: 700954883H1
gcagaaagcaagctcatcctagagttttaaaaatggcagcagcctcctccatggctctctcttccccatccttggctggcaaggccgtgaagctgggcccatcagcccccgaagtcgggagggtcagcatgaggaagaccgtcaccaagcaggcctcctccggaagcccatggtacggcccagaccgcgtcaagtacttgggcccattctctggcgagccccgtcctacctcactggcgagttcccaggtgactacggctgggaca

SEQ ID NO: 20806 - DNA, 267 bp, Glycine max
  Clone ID: 700954884H1
aagtttgattgtcctagctttgagcaacatcatgaagatctccattctctttatcacaatcttttcttgtggttttcttggaaatgttgtttcaaatgctagtcctcttccatatgaagctatttttaactttggtgactctataagtgatactggaaatgctgctcataaccacccacctatgcctggcaatagtccttatggttcaacatactttactatccttctggacgtatgtcaaatggacgactaatcatagattttata

SEQ ID NO: 20807 - DNA, 268 bp, Glycine max
  Clone ID: 700954885H1
gagaagtgcaggaggggtgggaatgattctcactaacactgaagccaatggggaagaactggttgcagattctcacctccttccagcagtagcgataggagagaaagaaggaaaagaactcaaaagttatgtcctatcaagtaaaactgctactgcagctctagcttttaaaggtacaatattaggaataaaaccatctcctgtagtggcagcattttcacaagagggcctaattttctcagccttgaaattctgaagcctgacttag

SEQ ID NO: 20808 - DNA, 251 bp, Glycine max
  Clone ID: 700954886H1
cgcactttcattctctcttaaaaatctaaatcccttttaggtcttcatcttagcctctgatgcaggtatgggttcgaaacgcatcctgaaggtgctcaaggatttgcagaaggatcctcctacgtcatgcagcgcaggtcatgtggctgaagacatgtttcactggcaagccacgatcatgggacctgctgatagcgcatatgcatgtgtgtattcttagtgtcaattcattttcctcctgactatgcctt

SEQ ID NO: 20809 - DNA, 256 bp, Glycine max
  Clone ID: 700954887H1
tcgtcttcaatttttgtttctcttcttacaaaaccttaggtcagatttctgggtttgtcttttctgataatctggagtggagctaagtcaagatgccgtgggtttccttgtttgtggatcacaaaagaaattgtgttcgcttggtggtgttttttcgtgtgattctgtaatttaattgctcaggtgtagtcccattaggttgcaaagactcttttcattagctgttctccttttcatttccaaagctgttaggggg

SEQ ID NO: 20810 - DNA, 259 bp, Glycine max
  Clone ID: 700954888H1
gacactttggtgggattaactaccctcttgggggtgttggtgggatagcaaagtccttagcaaaaggtctcgttgatcagggtagcgagatagtttacaaagcaaatgtcaccagtattataattgagcagggcaaagctgtaggtgtgaggctttcaaatggcagagagttctttgccaaaactataatatcaaatgctaccagatgggtacatttggaaagttactgaagggcgttccacttccgaaagaagaagag

SEQ ID NO: 20811 - DNA, 258 bp, Glycine max
  Clone ID: 700954889H1
ctttcttcctttgtaatagaaagcacgcgtttctctctctccctctctcaacgaatatttgtgtacttcctcttttgtgggtagattcaatttaccatgtcgagttcatcggaatactctcaattttccggccagaaaccggcgaggtcgccggagaaatcgagcttctctcagacttgtagcctgttgagtcaatacatcaaggagaaggtagcttcggagatcttaccctcggaatgacatcatgtgggtcacctg

SEQ ID NO: 20812 - DNA, 257 bp, Glycine max
  Clone ID: 700954891H1
aaggcattgcgttttagaaagcgataccgtgagagacaacaatgcatcgcgctagggtttgattatattacgcagatcgaaactccccccaacggtgtgttgaagcgcattttgcaatttcaataaataaataaatgggagaaaaatcgaggtccaaaggagggtgctgcggttggttcatcgcgttcgtcattctggctctcgtcgtcgtgccattgtttttaccgttaagaagaaatttagtcactccggttccg

SEQ ID NO: 20813 - DNA, 259 bp, Glycine max
  Clone ID: 700954892H1
gcaaaactgcaggctgctgaacagaagaggttgagcatcttgactaaggcccaaatgcgtttagcaagactggatgaattgcgtcaagcagctaaaagtggagtagaaatgcgctatgagaatgaacgtgtgaggcttggaacaaaagttgaatcacgggttcagcaggcagaggctaataggatgcttattctcaaggctctcaggcaagaagggcttctcatagagaaaggtcatctcagacattgatgagaaggat

SEQ ID NO: 20814 - DNA, 258 bp, Glycine max
  Clone ID: 700954893H1
gtccattctgtgcagtggagctcgcatagtgaggtcgcccctgccgtgacctgtctgccatctcgaagaagtgttatctgctgtgcgccttaggtcatcgtaccggaaaatgagtgacatgttaacaacatttacgaagaagaaagaggtggataccatcatcagagacacctttgataaagttgtggtcctccgctttggtcgtgcctcgaccttgtctgtctccagcaagatcacattctttctaaagcagcaagg

SEQ ID NO: 20815 - DNA, 262 bp, Glycine max
  Clone ID: 700954894H1
caataacatagcatagagtgagaagtgagaagagaaaaatggcaatctccatacccagtagacaacttttcatagatggagagtggaaagtccctcttctcaacaatcggtttccgatcatcaaccccgctactgaagacatcatagggcatattccagccgctactaaggaagatgttgaccttgcggtggatgctgctaaaagagcctttcccataacaaaggcaaagattggtcttcagctcctggctctgttcgtgct

SEQ ID NO: 20816 - DNA, 260 bp, Glycine max
  Clone ID: 700954895H1
gaaagatttcactgttctccagttaatgatctattgtgtctttggtgttctggctggtgtagttggtggcatgttgggactaggaggaggattcgttatgggtccactttttctggagttgggagtcccacctcaggtgtcaagcgcaacagccacctttgcaatgaccttctcctcatctatgtctgtcatagaatactacctgttgagagttttccagttccttatgctctttacttcattcttgtggctactattgc

SEQ ID NO: 20817 - DNA, 207 bp, Glycine max
  Clone ID: 700954896H1
gagagtggtttcagtgagtgatcggtgttcacttgatccttcataagtcgtcatcatcatcatcatcatcaccgttgattgaagaagatgccgatcagaaacatcgccatcggaaggcctgaagaggctactcaccccgacacgttgaaggcggggttggctgagttcatctccaccttgatcttcgtgttcgccggttcaggttcg

SEQ ID NO: 20818 - DNA, 259 bp, Glycine max
  Clone ID: 700954901H1
caaggaacatgcttagaaaactgccaagcccacccatattctctcaaaactttcaaccatgaactgaacaacaacaacaacaacaacagggccacccgtacagacccacctccaaagagatcatttttattaccaattttccgatttcacagagaaaattctttgtgggcatctcttcaaaaatgtcaagcttcccaacacggtggcggaaggccgcagtccggcaaggcaccggaaaatccacttttctcagacttgc

SEQ ID NO: 20819 - DNA, 259 bp, Glycine max
  Clone ID: 700954902H1
caagagatctctttgaggtttctcatcaaacacctttagccaacaacaatggcacctttgaacaaagttcttttgctcctcaccttattgttccttgcggtggatgccaaatacaaaaacaagaaagacaagaagaacagtgtttttcataagattcccaaatttccaaaatttccagttcctatcattggaggtgaccagaaagttgttgtggatggtggtaataatgccattgccaagcccgattttggaaacaaac

SEQ ID NO: 20820 - DNA, 255 bp, Glycine max
  Clone ID: 700954903H1
attagcacttcttcttttcacactgccgctgcaacaatggcttcagagaagaaactttcgaacccaatgagggagataaaagtgcagaagctcgttctcaatatctctgttggcgagagtggagatcgtctcaccagagccgccaaggttcacttcactcattgctcccgcttttttttttttttaatttaaatttctgtttttcttcttgcaggtgttggaacaacttagtggccaaaccccagtgttttccaa

SEQ ID NO: 20821 - DNA, 256 bp, Glycine max
  Clone ID: 700954904H1
caaaacaaaacttgatttgtaactttcaccgtatttccactcatatcccacaagcaccaccatgactccacctaaagaaatttcgaccgtcatttatcacaatggtcacataccagacaacccagttcagggatcggtgtacacatgtgcaaacctaatatttatttacgttagtcgttctattacgttaacataattgattcggaaaattaacaactgtctccctactcgagcaactgaaaaagtttctcaatta

SEQ ID NO: 20822 - DNA, 250 bp, Glycine max
  Clone ID: 700954905H1
agaagtaaacataaagagacattgtatgtgccatgaataaatttataagaagtaaagtatttcggttatccttcacaatcatctctttagtctttatcaaatggaatattcatttaaaaatggaatatttactaaaaaaatttactaaaatggaatatttttttaaaaaaatttatcaaatgagatagattttgaaaaaatattcatttaaaaataaatcgtaaattgaaccacgactgtgtacatatag

SEQ ID NO: 20823 - DNA, 257 bp, Glycine max
  Clone ID: 700954906H1
tagctatttccctctcttaacacaattaacaaagatatatcatatcatatcaactccaaatgatgaaaaatattgggttgtttcttcttgtggtggtggctacttttgtggtggcagccacagctggtagcctttaccaagactttgaaataacatggggtggtgagcgtgccaaaatctatgaaaatggaaatcttctcaccctctccctagacagagcctctggctctggctttcgttccaaaaaagaatacttg

SEQ ID NO: 20824 - DNA, 261 bp, Glycine max
  Clone ID: 700954877H1
caagtctcacttttttcagcttctctaaattctctgtctacttcaccaagcacttttggttgcagctttggttaatttccaatatggtgtttcctctcctatctatctttgctttactcaatcttgcagtggtggcaacccatgcagaaaccttgccccctgaagtttactggaagtcgaagcttcccaccactccaatgtcgaaagccattcagatatccttcacccagatttggcagaagacaaaagcacctctgtggc

SEQ ID NO: 20825 - DNA, 269 bp, Glycine max
  Clone ID: 700954847H1
tctccgaacaccgcccccgacgttatctttagccccgaagacgacgatttccacccctttcacatgtttccttcctcctcggaacccgctaataactgtttgtctgattggaactacaaagaccccacgcgtctcttaaccctaattcagtacttgatggatcaatatgtgctttatcagatgaagctcgtcggagaagttgacgacgaccggttgacttcgaaatcagtactatcttgtccagggagggaatagaaatgcatatgagt

SEQ ID NO: 20826 - DNA, 252 bp, Glycine max
  Clone ID: 700954849H1
gatcttgtaaatgaggaaattagagtaagattttcaagtgggagatttactatattgaatgagttggaagtagttgattcctctgtgaaggaattatatcctattatccagggcattgcagataccattgagacagaatcacttgcgaagattgttggggaattaagcagagcaacagagaagctttcacaaggactagatcttcttacaaaggagtcgatagctttttccaagtggtcttgaccggtcgtg

SEQ ID NO: 20827 - DNA, 257 bp, Glycine max
  Clone ID: 700954850H1
gcagaatatgacaatcttgtagtgctaagggactacaattatccctcgagcagcacctgttaccgatgtggaggacgggaatcatggtgagactgataccattccagctcccgtagttataattgaccgagactctgatcctggtgctaccgtggtggagataacttttggtgatcggcttggagcacttcttgacacaatgaatgcataaaaaacttaggtctcaatgttgttaaggcaaatgtctttctggattc

SEQ ID NO: 20828 - DNA, 251 bp, Glycine max
  Clone ID: 700954851H1
tatcagtgccaatctttccatcttacttctttcatcctttgttctgtcttggttggtagaagtgtgaatcgagctgcaatcctaacatggataatgatttcgttcttgaatattgataacctagtcccctggagtagtgttaatattctttttggcagtgaacagatagtccactgtcaagttacctagttaatgatgtgaaaggtttatttgatccaaaggaatctaccaaagtgctgatagtgtggagt

SEQ ID NO: 20829 - DNA, 115 bp, Glycine max
  Clone ID: 700954852H1
ccttccttgacatagatcacgaatgagtctacaacgagtacgacgatgtttcccaagatatgacccatgttgtgatgattggtgagccaggactccttaccatcatcaccaatca

SEQ ID NO: 20830 - DNA, 258 bp, Glycine max
  Clone ID: 700954853H1
cgtgtgaagaacaacccccccttattcgaaaaagtgaatttgagattcaatgcccaccaaacgccattcaatttgcctccctcccaatcccacagcgctccctccaccgtgacaatcactcactctccactcatcatgataagacagacgcgtgagatacattcctctcagagcgcgtggaaacaccccctctcgcagcagcaacccttccgtcgtgccctgtcccttcagaaccaaactcttccttctctcaacttg

SEQ ID NO: 20831 - DNA, 254 bp, Glycine max
  Clone ID: 700954855H1
gtttctccctttctctctgtctctctctcgctcttcttctcatccagcaccgagtcacagactcaccgatcttccgattccctttcgtcttggtttatgagctcgaaggagagacccactcttagtggcacgcggattaagacccgcaaacggaatattgactgcgccgctggaccctgcagcattctcggatgcagtggtctagatttatctgataatgctggtgatctggaacttattgctaatagcgattg

SEQ ID NO: 20832 - DNA, 259 bp, Glycine max
  Clone ID: 700954856H1
gcgagttactcatggcgaacgcggcgcttcggaacgtgaaggtgctcccgaactcggcgaatatggaggaaacgcgtcaccgagtcttcgaattcttcagaacggcctgcagattgttaccctccgatatggcaatctacaacctctacgacgtcgtttccgtctccgaactccgctcctccgtcgcctcccagatccgcaacaacatccacgtaccgatcccaaagtgatcgatatgctgcttttccaggggatggac

SEQ ID NO: 20833 - DNA, 265 bp, Glycine max
  Clone ID: 700954857H1
tctcgagccgaatcggctcgagccaggcatgctcattatggtctaaccttatcggatctccacctcagtaaattgcaatcaactctatcttcggctggtttcccgcctcttgatcacgctgctacgccaatgaaggtctcaaataacaagacattgcaaaagcctagcatcagtgagaacgtctcttgcttactatctatgacaaattctactcgtcttcaaagaaattggatgctgggaagacaccttcgctcatgctttttgg

SEQ ID NO: 20834 - DNA, 262 bp, Glycine max
  Clone ID: 700954858H1
cactgtcacaggtgtagcggcgaaactgaggtcgtagaaagaatggcgaaaacgacgtcgttgttgctctttacactgctcctcttcggaaccttagctctcatccaggcgaagaaatcgaaggaggatttgaaggaagtgacccacaaggtttactttgatgttgagattaatggaaaagtagcaggtcgtattgtgatgggtctttttggaaggctgttccaaaaactgcagaaaactttcgagctctttgcactgggga

SEQ ID NO: 20835 - DNA, 260 bp, Glycine max
  Clone ID: 700954859H1
cagtcaaactgtagtcaagtttgtcggtggattgggtctatcatggcaattatcttttggaattctagtccttctctacttttactctcattacttctttgcaagtggagctgctcatattggtgccatgtttactgcatttttgtctgttgccactgctctggggactccgccattctttggagccatagtgctgtccttcctctccaacctatgggtggccttacgcattatggaattggatcagctcctgtgttttt

SEQ ID NO: 20836 - DNA, 264 bp, Glycine max
  Clone ID: 700954860H1
tcttcttggagtgtacatccgaagcaaaacccaaatttcgaagcttcagttccatggtgcagactcttgtctcagtctgcgcagaatccgaatgttttaatttgcacacccaactttactattggctcaagtaggagttgcaattttgtgttgaaggatcagactataagtgcaaatttgtgcaagatcaagcacacgcagcgcgagggaagtgcgtggctgtgctagaaagtatgggtagcaaaggatcggtggtagtgaatg

SEQ ID NO: 20837 - DNA, 265 bp, Glycine max
  Clone ID: 700954861H1
gttttcccttcttgtccattcatatatatcacaatttcaactgcaaattttgaacaaaacttaattaagaaatccttctccggagccatggcagatctcaagtccacattcttgaacgtctattctgttctcaaatctgaactcctccacgaccctgcttttgagttctccgatgattctcgtaattgggtcgaccggatgctggactacaatgtccgggaggaaagttgaaccggggactgtcagtaattgatagctacagatt

SEQ ID NO: 20838 - DNA, 263 bp, Glycine max
  Clone ID: 700954862H1
cttttgctcatttcctttgactcctcattatcaaagaaaatggctctcattgggttgctcttgatgggttttctcacaatgttctcctctgctcatgcctatggtggagggtggactaatgctcatgccaccttctatggagggagtgatgcatctgggacaatgggtggggcatgtgggtatgggaatctctacagccaagggtatggaacaacactgctgctctaagcactgcactgttcaacaatggcttgagctgtggc

SEQ ID NO: 20839 - DNA, 266 bp, Glycine max
  Clone ID: 700954863H1
atttcttacctcttggcatggccattcaaatgtcttcttttgtctttgtttctcttacaattttattttgcttctcttccttggagaagagttttgcctttcaaacaacaaaggaggacacagaaagcaacaatcttcatcaatatactcatcttgttcacctcagctcactccttccttcatcttcctgcagctcttctgccaaaggtcctaaaagaaagcatcattagaagtggtacacaaacatgggccatgctcccaactga

SEQ ID NO: 20840 - DNA, 257 bp, Glycine max
  Clone ID: 700954865H1
tgcgcatcacagatggcaaagctacatatgtttcccgttttatgagaacttactcgccttaaacaagaagaatactttggaggctccaaatttatgaagattggagatctcaaaggtctattcggacttttaatggttaacatacatatgctgagaactaaatggaaagtgctggatgcttcttatggaactggaacagctaatactgctctctatatcaccatgggaaacttctagcactctcagaagcagataaa

SEQ ID NO: 20841 - DNA, 267 bp, Glycine max
  Clone ID: 700954866H1
gtttcaggtactttgaccgtgatgttgaatgcatctttaagtttttcaggaaaaggttcaatctttcttttcaagaaagcatagatgataatgatgattctgatgaagggagagatgaagctggaaaaccctgtttttcttcaatagaaagaagtgctggttttctagatagggaacttgcttactatggctttactagaaagaatgaagaagatattaaaggttcattgaaggcggggccagaagtgatacaaattcagatagtga

SEQ ID NO: 20842 - DNA, 267 bp, Glycine max
  Clone ID: 700954867H1
ccgacacggaaaccacgcccgaacaaccctccactccgccgcaaacggaggctccgccgcagcccgacccctccgccgccgtctccttcagcatatggccccccactcagcgcacccgcgacgccgtcgtcaaacgcttgatcgagaccctctccgccccctccggtcctctccaagcgctacggcactctctcctccgacgaagcctccgccgccgccgacagatcgaggacgaggccttctgcgccgccaccgcagcctccgctt

SEQ ID NO: 20843 - DNA, 265 bp, Glycine max
  Clone ID: 700954868H1
caaaaacagtgtaacaaaaagaaaaagaaaaaaaatatgaagttcgctataatcacaatattgttctctttatttcttcttgactttggttttgcacaacagggggatcttgacatatcaagatttggaggaaaaccaaatacaaatataggccaggctttcttaagtgcctggactcaagcatgtgcatcaccaactgctgtcaaaattgtgattcagctggcacataccaaatgggtgcagttgatgtcaaaggtccttgcaa

SEQ ID NO: 20844 - DNA, 266 bp, Glycine max
  Clone ID: 700954869H1
ctgctgaaagccttgtgactttggttagctggctgtgttcttggattatatcatattcttttaacttcctcatgagttggagttcagcaggtatgttatcatttaatcttggtcctgagggtaaaaataaaaaggaaaagttaagaatttttaagaaactagggaagtctaatagaaacgtaaggagtccttattttacatatggaataagatttacttatgttatgtttgggctagagacttcttaatgttctctagcatatgtg

SEQ ID NO: 20845 - DNA, 253 bp, Glycine max
  Clone ID: 700954871H1
ctctcctcagttatccctccaacaggagatgaaacatggttctagttgcaagtcatggcgaggaggaaacagggggcaagaggcattgctgctgttgattttcgaggtcaccctgttgacatgatcaaaactggaggactgctcacagcagggctcatcttaggtactgacctagcagaaagcatatgtgtaatgggcattagcatgaactaatgacctacttcgttggtactttgactcttccttcagctga

SEQ ID NO: 20846 - DNA, 258 bp, Glycine max
  Clone ID: 700954872H1
gcaacattcacactctgcggagctcccaaagcaagcactaatctaacaaacgcaatttaaaaaccgcaacaaacttttctctctttcgttcacacacttattctctggcttctttttcttcttccattttcgcttctcgtagcattttcggaacactcatggcttccattgccggatccagctgcgtcgctctccgaaccgccaatttcgcccctccgataaccggaaaatcggtcagatccggcaatggtctccaat

SEQ ID NO: 20847 - DNA, 240 bp, Glycine max
  Clone ID: 700954874H1
aagagagagaaagagataacagagagaaagaatgaatgagtaaaataatcattcactctgtttctattcttctttctaccatagcataactatgatatgaacaccatataataattaacaacaataatttaataatactctcttcattgtaaattccatcttcacttcacttctcttctctgttctgtggagtatttaatcatttcgtaacacatacttttcttttcattctctcaaatt

SEQ ID NO: 20848 - DNA, 253 bp, Glycine max
  Clone ID: 700954875H1
gggttattgagtgcggcggtccaaacactcttctctgcagcttttgcctacaactcccttcaccatggctgaacaaaccgagaaagcttttctgaagcaaccaaaagtgtttctcagcacaaagaagactgggaagggaaagagacctggaaaaggtgggaaccgctttatggaagtccattgggcttggatttaagactcccatggaagcctcgaaggaacctatattgacaagaagtgcgccttcactggc

SEQ ID NO: 20849 - DNA, 268 bp, Glycine max
  Clone ID: 700954846H1
ctcagcccccgaagtcgggagggtcagcatgaggaagaccgtcaccaagcaggcctcctccggaagcccatggtacggcccagaccgcgtcaagtacttgggcccattctctggcgagcccccgtcctacctcactggcgagttcccaggtgactacggctgggacactgctgggctttcggccgacccagaaaccttcgccagaaaccgtgagctcaagtgatccactccaggtgggccatgctcggggccttgggctgcgtcttcc

SEQ ID NO: 20850 - DNA, 268 bp, Glycine max
  Clone ID: 700954811H1
gttgctcttcaacagccatgttgatgttactgtaacctttcttcttcttctgttcctatctctatttggaattggatcatcctcagcagcacccttttacatcgatacttactgcccaaagaacgcatcgtacaattccaacgtaacattcgaaaccaatctcaaagtcctcctcgcaactctcgtctccaacgtttccatgtccggcttctactacacctcatgggcttgggaaccacaagcgtcgccaacggccagttcctctgcc

SEQ ID NO: 20851 - DNA, 181 bp, Glycine max
  Clone ID: 700954814H1
ttcttacataagagtggtgattcgtcctacggcatcgggaatctccctactgggcagatatagtataggccatcgcgccaggctggctcttccagtaccaaccatgaagttatcatctacctcttctgggtcagcaaaccaagctgggtcatctatccccaagaccaattgtagaagggtc

SEQ ID NO: 20852 - DNA, 273 bp, Glycine max
  Clone ID: 700954816H1
cgcaaacttcaacttgtaatcaagggagagagaaaatttcaagcacaaaaaatggcggagaagaaagtggtgatcctaggaggtggtgttgccggtgccaaccttgcaaaaactatacaacgtcaagccaacgtcacccttattgatccgaaggaatattttgagattccatgggcaagtttgaggggattggttgagccaacttttgctgaaaggatagtgacaaccatagagagtacttcaaaaagggtaaccttgttgtatccagtgctg

SEQ ID NO: 20853 - DNA, 268 bp, Glycine max
  Clone ID: 700954817H1
attcttccccctccacccacccagcatatctctctactcctatttattagcacccctcacattaccttgtgtcaccaactactttgactcctttaccataccattacaataattatcaaacctaaccagtaaaaatggtgaccgtggaggaaatccgcaacgctcagcgttcccatggacccgccaccatcttggccttcggcaccgccacgccgtccaaagcgtctcccaagccgattaccctgactactacttccgcattaccaac

SEQ ID NO: 20854 - DNA, 258 bp, Glycine max
  Clone ID: 700954821H1
agaagacaggttcaaaccggagcaaaaaaacttgttacgatggtttcttccgacaaggatccacgacatgaagtccttcaaacatggtacatggatgatagtgatgaagatcaaagactcccccaccacaaagaacccaaggagtttgtctcgttggaccaacttgctgagcttggagtccttagctggaaattagatgctgataaccatgaaatgatccagagctgagaaagattcgtgaagagcgtggctacacct

SEQ ID NO: 20855 - DNA, 268 bp, Glycine max
  Clone ID: 700954822H1
aggttgcacagatagtcactactcactcacgagcatgcacgtcatctaataatgcactcattgatggtactccaccaccttagctttcaacacgggttcgacagaggcactgtgggaactgggtggctgagattagactcccgaagaaccggaccatgctatcgctgggaaccttcgacaccgccgaggaagccgctactggcgtacgacaaggccgcgtcaagctccgaggtgacttcgccaggctcaacttccccaacctccgaca

SEQ ID NO: 20856 - DNA, 263 bp, Glycine max
  Clone ID: 700954823H1
ttagaattaaaaagcgtgaaggacagtgataggtttggtttggaaggaagaagaaaatgaaggccatagtgataacgaggccaggaggtcccgaagtgctccaacttgaggaagtggaagatcccctagtcggagacgacgagcttctcatcggagtccacgccacttcccttaacagagccgatacctttcagaggaaaggctcctaccctcccccaagggcgccagccttacctcggtctcgaatgttccggaactgtcct

SEQ ID NO: 20857 - DNA, 267 bp, Glycine max
  Clone ID: 700954824H1
cagactcagctcctatctcttgttttaaaataattagcatttgtgaagattattttcccctaattgtggagagaatagccccctaggcattggactcgtgtgtcagtgttgcaaccaagcaaccttagctatgtctctccttgttaattctcctctgctgccactgcaaagtactcggtggttgaaaccgaagcaagaagctaggtttttgtcacacggccaaccataataggaggaggaatgagcacaaacatctttggaactgcg

SEQ ID NO: 20858 - DNA, 268 bp, Glycine max
  Clone ID: 700954825H1
cagcaacaagatgtggaaccaaccattgggaaaaaccgatttggaaagcggttctcgcccgctgtatccgatgatgcttgagagccccgaactgcgctggtctttcatcagaaaagtatactccataatcgccatacagttgctcgtaaccatcgtcgtcggcgccgtcgtcgtcaccgtccgcccaatcagcgtcttcttcgccaccaccggcgccgattggctctctacatcgtcctcatctttgtccccttcatcacattgtgtc

SEQ ID NO: 20859 - DNA, 268 bp, Glycine max
  Clone ID: 700954826H1
gaaatgcatgccaagacagactcggaggtaacaagcctggatgcgtcgtccagcacaaggtctcctcggcgagcagtgtactacgttcagagcccttcccacgatggggagaaaacgacgacgtcgttgcactccacccctgttctcagccccatgggttcccctcctcactctcactcctcctccagccgcttctccgcttcacgccaccgcaataacataataataaatcttggaagggcatcgacgtcatcgaagaagagggtct

SEQ ID NO: 20860 - DNA, 267 bp, Glycine max
  Clone ID: 700954827H1
gtttttcttttggttgcatgttcaactcgaatacaacatacatacagatacctcttcttcttcttcttcttcttcttagaaagtcaaaccaatacaatgagtagaagcagaggacacacgatcatggaggttggacctgacggggttgccatcatcaccatcgttaaccctcccgtcaattctctctcctatgatgtattgcgcagttttaaggagattttgatcaggctctacagagagacgatgtcaaggcaattgttgttacag

SEQ ID NO: 20861 - DNA, 267 bp, Glycine max
  Clone ID: 700954830H1
tctcaaagaaaagttcaagcgcatgtgtgaaaagtccatgataaagaagcgatacatgcacctgacggaggagtttctgaaagagaacccgaacatgtgcgagtacatggcgccatcgctggacgtgagacaagacgtagtggtgatggaggtgccgaagctgggaaaacaagccgcaacgaaagcgattaaggagtggggtcaaccaaagtcaaagatacacaccttgtgttctgcaccacttcaggcgtggacatgcccggagca

SEQ ID NO: 20862 - DNA, 270 bp, Glycine max
  Clone ID: 700954831H1
cggcgatctccggcgggttcgacggggaagagaagcggaacgggccagtgcacgtcgacgggattcctgtggggttgccaaggttgcacacgcttcgtgaaggaaaatcatctcaatctggttcctttaagagaagtcttttaagaccaacttctcccaagtcccctgttgcaagtgccagtgcctttgaaagtgtagaaggatcagacgatgaagataaatgacaggcgaagttaaactggatactacgtatctgcacacaaatgggac

SEQ ID NO: 20863 - DNA, 265 bp, Glycine max
  Clone ID: 700954832H1
gatgggtaccgttgattcatgcgcgatacatgggtgaggccaagacatttacgcctacccaagtgtttggaatgatgctgtcgaatcttaaggaaattgcggagaagaatctcactacggcagttgttgattgttgcattggaatcccggtttatttcactgatctgcagagaagggcggtgttggatgcggccacaattgctggtctgcacccgcttcgttgattcacgaaatgactgccactgccttggcctatgggatttat

SEQ ID NO: 20864 - DNA, 266 bp, Glycine max
  Clone ID: 700954833H1
ctcacttttttcagcttctctaaattctctgtctacttcaccaagcacttttggttgcagctttggttaatttccaatatggtgtttcctctcctatctatctttgctttactcaatcttgcagtggtggcaacccatgcagaaaccttgccccctgaagtttactggaagtcgaagcttcccaccactccaatgccgaaagccattacagatatcatcacccagatttggcagaagacaaaagcacctctgtggccgtaggaaag

SEQ ID NO: 20865 - DNA, 259 bp, Glycine max
  Clone ID: 700954834H1
cgcaatgaagagacaagcgacggggatcacaagggtaacatcaccagcaagaaaaagaagtagggcaagatggtaattggtggaggatggagtggtaagaacgacttggagagtttgaaggagatcatggatgagttcatgaggcagcagatgcgaatggaggcacagtggatggaagcctttgaggcaagagagaatgagaggaggctgccgagatggcgtggaggcagaccatggaggctttggagaatgacaggtt

SEQ ID NO: 20866 - DNA, 243 bp, Glycine max
  Clone ID: 700954835H1
ctcgagacgctcgagccgccatatttatgatcattacttttttgagcagtcaacagatatggttgattaaacacctgttatgtataggttatgtacagataacagtgattcttacttcttcctcaacaaggtaacatcccatttcccaattccatctggcaacaacagcaactacttcacttgttgttagatactcatttcatttgaagttggtctagaatggatggagtggacctttgtatg

SEQ ID NO: 20867 - DNA, 255 bp, Glycine max
  Clone ID: 700954837H1
aaaacagagtaaaagagacagagcaataacacacacacaaaaacacaaacacagacaccttttaagtattaaggtgtctctttctctccccggaaagtttctccgtcggcggtggtgattgaccggagtgccatggagtctggacggattttctttggtgcctctgcttcaagcggcaacaacatgctctttctcggcaacactgaacttcttatcgagggagatcgattatgagcatggatgaagcctcgaaga

SEQ ID NO: 20868 - DNA, 255 bp, Glycine max
  Clone ID: 700954838H1
ctgcctcttcaatgatgcagaaacgtgcatgtggaaagtctatggggctactgatgacccttaaagacggtacctggcgtgatgcatgtgatggcctcggcatttccttgttgctgacatcaatccctggatttcagtatacggtgttgtagcagctgagtcaacgatcactgagtgaatatacaccccaatgctgctacatgctcatctgagcatcgctttccgcgtatatggtcattcctttacgtgcaattt

SEQ ID NO: 20869 - DNA, 255 bp, Glycine max
  Clone ID: 700954839H1
caaacgatggcgtttcgtggtctcggtgtgttgttggtgttgtcgactgtgattggcgcgggcgccgacgatgccaaacgcgacgacgacatggctcccgagtcgggatcctacaataaccccttacaactggtgaaagtggacaactaggtggatggtgaggaagggcatatgtatactggcgtcagtgcaagatttgggtctgtgttgccgggaaacctgacaacagtgtgaaaactccatcaatattcgctg

SEQ ID NO: 20870 - DNA, 267 bp, Glycine max
  Clone ID: 700954841H1
cattcagctgcacaaagaatcccaaagtagagaaacagcacactctcacctcactcacttgtccttgttatatttgttttatatcttgtcacaatctgtgactgttcgagttatccgaggcccctcttttatatggtcgttgataaaatggcttcgacccttttaacaaagatgcttttgggtcaccgattgatacacccttcttcgttcctcactcccagccacagattctctcttctctattcagtaaacggctgttttgtatac

SEQ ID NO: 20871 - DNA, 265 bp, Glycine max
  Clone ID: 700954842H1
aattaaattagtggttaaggttgttggaggagctctaacaagagatggagacacaaaattggttcgaaagagtgaagcctttagcagctgtggtatcaatgcagtttggatatgcagctatggatgttctatccaaggctgcaatgaacaaagggatgagcaactatgtgtttgtcgtttatcgtcatgctgttgcattctttgttatggccctttggcatggttttttgacaagaaagtaaggccaaagatgacattatcaatt

SEQ ID NO: 20872 - DNA, 267 bp, Glycine max
  Clone ID: 700954844H1
cttttcctgtgtctttctctctctctctctctctctctatatatatatatatatgtatgtattttctttacaccgtctggaatcatccattgatttcaatccaaagcaccaaatccccaaagcaaaagtgctactgtcttagaaagagagagagagagactgcgtttgacgccaagagagagaaaaaatggtgaacttcatgttgatgattagtgcgaccttgagaacctcaccaatctccaaccccaaggtggctgcgacgaccct

SEQ ID NO: 20873 - DNA, 270 bp, Glycine max
  Clone ID: 700954810H1
tgctttggcaagtcctcaacccccctccccccagcataaagagctatagttcccttctcagccacaatatggctttgtaaaatgggaaggactccttgctgcagtcacgaggaattgagaaaaggggcatggacggttcaagaagaccagaaactaattacttacattcagaaacatggcacaggaagctggcgtaccttgccacagaaagcaggtcttaaagatgtggaaagagttgcaggctgagatggtttaactaccttagacctg

SEQ ID NO: 20874 - DNA, 256 bp, Glycine max
  Clone ID: 700954773H1
acacaatctcatagcaccaaaaacatagtactatacagccccactttctctttctctttctcttcactctaaagtctaagcatccatggccatggcgtctgcaaagctcaacaccttgtcttcccagtggatcgcccacaattccttctctcctcgccgtggatcctcttctcgccgagtctctcttccgatccgcgcttcttcttaccaacacgaactcgtccaaaccgccaaatctattgcatctcccggtcgt

SEQ ID NO: 20875 - DNA, 85 bp, Glycine max
  Clone ID: 700954774H1
gaactagtctcctactctcacccggaagaaaaaaatggcgtctcacatcgttgggtacccccgtatgggtcccaagagagagctc

SEQ ID NO: 20876 - DNA, 250 bp, Glycine max
  Clone ID: 700954776H1
aattcaacttaagagatcaatatggccaccaccactacccagcctcctctaatatctgttttttccttctgttgttgcttctagcacactttcatttgggcataagccaacttgagctgaattactactctaaaagctgcccaaaagctgaagagatcatcaaggaacaagtcacacaactatataacaagcatggaaacactgccgtttcgtgggtcagaaatctcttccacgattgcgtggttaagtc

SEQ ID NO: 20877 - DNA, 250 bp, Glycine max
  Clone ID: 700954777H1
gtttcctaggaccatgtccagtgttgctgcttccctttctggactgggaatggctgcaggaaacttggtgtctagttttgtcttcagcgttgtacaaaatgctacttcaagaggggggaaagaaggttgggttttggataacattaacaagggtcgttatgacaagtactactgggttatttctggactcagtgctcttaatatagtgtattatctaatatgcagttgggcttatggacctaccgttgag

SEQ ID NO: 20878 - DNA, 247 bp, Glycine max
  Clone ID: 700954778H1
cttcccctatggctcgtcactccttgctcttagccctcctcctcttcgccgccgtggccaccgccgcgatggcggtggccgcgtccgacgccgacgacatcctgatccgtcaggtggtgccagatgttggcgaaccgaagaggaggacaacctgctgaacgccgagcaccacttcgcgagcttcaaggccaaactcgccaagacctacgccaccaaggaggagcacgatcatcgcttcggcgtcttc

SEQ ID NO: 20879 - DNA, 224 bp, Glycine max
  Clone ID: 700954779H1
tttcactgcgttatataaaaaggcgtggctttggtcggaagtaaagggcagaaaggtgtatatataatatcatatcaaagcatcaatcaaataaatggcaactgaacatgaagacgatttcaaggatgagaagaatccccgccccctcgacgaggatgacatcgcccttctcaaaacctatggtttggggccttattccaccagcataaaaaaagccgagaagg

SEQ ID NO: 20880 - DNA, 251 bp, Glycine max
  Clone ID: 700954780H1
ctcgtgccagttctatctctttctcctccaaaataattggagttatgtaaagttatcatcttttctctaaattggtttctgggtaatccttgttcatagcttttggattttcccatcaagcctccttttttgttgctagggcttcaaccacacattggtggcagtgctgatttatcactatttttattaagctatgaactctccaattcatgccccttcttcatcggcatcttcttcctcctatatgcttc

SEQ ID NO: 20881 - DNA, 264 bp, Glycine max
  Clone ID: 700954781H1
cattattgttaacattgttattactgtcctcagttttctcaattgcctcatcaagaagaagacattccaacaacagcaacatagattggtggtgcaaccaaaccccataccccgagccatgcagatactacataaaacacagccactaccaacacaaacaactcaaacacaaatccgaattccgcacaattctagttcccttggccttggagagagcagtgatcatgcgaaggaaagcacgtgagttggggggaaacggtgtca

SEQ ID NO: 20882 - DNA, 260 bp, Glycine max
  Clone ID: 700954782H1
ctggaggcgcatgacatgatatctctctcttctccaacctctctcatatatgtaaagacaaaaccaaaaccgtgtttatgcttcagcccttcatcatatagatctgcctgaaaaaaacccttgcgatcagatccagcccaattaatctctctctctagaatgtcttcccagcgcgcagatctagagtgccggatcttcccggagcccgaaatcgaccacttcgaccggctaccggactcgctcctccttttggttttcaa

SEQ ID NO: 20883 - DNA, 258 bp, Glycine max
  unsure (1)..(258): unsure at all n locations
  Clone ID: 700954783H1
cacgtgtcaagcccaatgttgtggttgcccaggatggcactggtcagttcaaaaccgttgccgatgctattgcttcctacccaaaggataacaaaggtagatacattatctacgttaaggctggtgtctatgacgagtacatcaccgttcccaagagttcaaagaacattctcatgtacggtgatggccctgctaagaccatcatcaccggtcgcaagaacttcgtcgatggtgtcaagaccatgcaaactgncactt

SEQ ID NO: 20884 - DNA, 256 bp, Glycine max
  Clone ID: 700954787H1
gttgaatcgcgtctaataagcaggttctgagatttataagctttcatctcagacagggtgtacataatatctgatggatataagtactctcaatgctgtacagattactgtgctgggatccgcgttttgtgttatgctttccatgcatttcacgacgcagttaatgtctcagcatctcttctattggaagtgtccgccagagctagaggctattatcattatcatccttatggctcctatctatggagctgtctcc

SEQ ID NO: 20885 - DNA, 256 bp, Glycine max
  Clone ID: 700954788H1
gctagaagcaataagatgataatgaaagtgcttgctttgtatgttgctacagtcttggtagcatatgaatgccatggctcagactaccagaagttccctctccagatgaaaactgggtttggtgggcaatacagcaatgaggtggcatgtgccagttggaggcttgacgtggaagcaaacaacgtagtcaagtggcaaactgttcctgcagcttgcggagagtacatagctgactacgttctatgataccaatata

SEQ ID NO: 20886 - DNA, 252 bp, Glycine max
  Clone ID: 700954790H1
cctcagcagcctaccgacactgaaaaccagagaaaagaaaagcaccttttttccgccattattgacccttcttgaaaactggtcatcaatggtgatgaaggactcatcttgacaccaccccacttccaaattgatttggattagttgtgttggacttggatgctgctgctcatacagttgatccacaaatgagattccaccttgcattgtttctctttttggcttctcttcaagccactttaagtcaagata

SEQ ID NO: 20887 - DNA, 253 bp, Glycine max
  Clone ID: 700954791H1
cttttctaaccgccacttcatcacggcaagcatatgccttctaatattctaggaaaccttcgctaataaattcccctcttaaccccctccccccctttttttgtaccttcatcatcatcatatttcatatcacaccaacccattttaatttgcatttgatcttcttcatagacatatatacactatcataatattagtttcttccttaaattttggttgtttttaacgttatgaagtttgggaagagactcaa

SEQ ID NO: 20888 - DNA, 252 bp, Glycine max
  Clone ID: 700954792H1
ggattggtgtggatgaaggacaatgtgatggttgcataaaatctggtgggagatgtggacacaacgtatctaaggatgcatttacgtgcctctgtcctaatcagcaatcttatgatgaggtttgtagcaaaagccaaacaagttctcccttagcagcaccaacgcctaaaccaacaccagaacaggaactgtcacccccttttggtccaaaatttcaagaaaagtctccacatgctccgaatccgcggaagt

SEQ ID NO: 20889 - DNA, 252 bp, Glycine max
  Clone ID: 700954794H1
ctccccggtatctgccgcagccaacatccaaagtccaacaaacatttggcggagtttacaacaaaactcttcaaaacccacatccaaatcgtcgtaaagttcaaatctttgatacctcatttcgatttagacctatattgttcccagcaacaggcttccattaacttctctctgcggcgatggtcttgaagtcaatggttgcttccgcgagcgatctaagtctcgtgtctgttgcagggaactctccccttg

SEQ ID NO: 20890 - DNA, 271 bp, Glycine max
  Clone ID: 700954801H1
aatgaaaccaattctcactcctcaaatctcaaacaccctctccaacccctctacatgaaaacctgtcaccaccacttcacagcctttccttcactcagttcacaccagcaagcccgaaaatggtgctgacatgctcattcaagctctccaacgccatggtggtgggattaccaatgtctttgcctactcgggcggttgctccatagatatccatcaagcgctaaacactccaatatcagaatcattgtcccgtggcactgacaaggcaaag

SEQ ID NO: 20891 - DNA, 265 bp, Glycine max
  Clone ID: 700954802H1
agttcatcagatacccttcagaatgtaggggcaattcccccaacatgcaagcgcatagagtgtcccagctatgatgtcattcactttggcaacggctacgaaatccgtcgctataattcacccgtttggatttcgaacagccccattctagacatttctctggttgaagccacaagaaccggcttcaggaggctatttgattatattcaaggtaagaaaactacaagcagaaaattgagatgacagcgcctgtgatcagtgaagt

SEQ ID NO: 20892 - DNA, 266 bp, Glycine max
  Clone ID: 700954803H1
agatgaacaagtccaacgacaacgattggttccgtatctccgccgccaatccggaaggcactcgctggaccggtaaatgctggtacgttcacaacctcctcaagtacgaattcgacctccaattcgatgtccccgtcacttacccttccaccgcccccgaactcgaactccctcaattggatggcaaaacccaaaagatgtataggggtggaaagactgcttgactgtgcacttcaagcctctctgggccaaaaattgccccagat

SEQ ID NO: 20893 - DNA, 263 bp, Glycine max
  Clone ID: 700954804H1
aacaaaacagagcaaagagagagtgtgtgaaaagtgaaacaaaaaacagaacaacaatggcgacacttaaggttcctcagcctcttccccccgttgcagatgattgtgagcagctccgaaaagccttctcaggttggggaactaacgaggagctgattgtatcgatcttggctcataggaatgctgctcagaggaagcttatcagagaaacttatcccagacctatggagaagatctcctcaaggccttggacaaagaactca

SEQ ID NO: 20894 - DNA, 265 bp, Glycine max
  Clone ID: 700954805H1
ttggaaactcacttcaggtgtatattattgtcacggattaacaaaaatccagcaagtgactgtcactgtttacatctgatccaaaaataataggttccgcaacaaacaatagaagcacaaaaaatataaggtgacactattggcgaattgcaaatgtgcaatcctcaaatcttactccaagacaaagctccccacgatgccgccttgcatgtacttgcaatcccctcgatgcacgtcttcctcctgagcatctaaatctttccaa

SEQ ID NO: 20895 - DNA, 263 bp, Glycine max
  Clone ID: 700954806H1
ctctctcagtccaactccaaccacagagacaacatatacaacatcgttgtttccatggcaatggaatctgcgcttacagcttctaactggatccgttctttgattcggattcgcctcactaagccacgcttcggtgctattcgtcccacagcaatacgatcctccatcgactcgtatctcgtgtccaaactcactccctctgagcctcacatcctacgagacgactccgcatcgacttctcttccatttgcggcgttgttaat

SEQ ID NO: 20896 - DNA, 260 bp, Glycine max
  Clone ID: 700954807H1
ctcgttcttgctacaagcaacaagatgctatctttgatccatcaaagtctacatcatattccaatattacatgcacatctacgctttgcacccagctctctactgctacagggaatgagccgggatgttcagcctccacaaaagcatgcatatacggcatccagtacggtgacagttcgttctccgttggctacttcagccgcgagcggctctccgtgacgccaccgacatcgtcgacaacttcctcttcggttgcggcc

SEQ ID NO: 20897 - DNA, 238 bp, Glycine max
  Clone ID: 700954808H1
atttcatttgagtatatctattatagttgactactcaactaagatggactcgaagagggagatagcattacttatttcaggccttctggccatgctcattttaatctcctcagatgtggcagccagagaattgaaagaggtcactggtgctggcttgtctggtggtcgtggggtcaactatggtggctttggtggtggctcccctagctttggtggtggtcccaggctatggaggtgg

SEQ ID NO: 20898 - DNA, 254 bp, Glycine max
  Clone ID: 700954771H1
aacactattcttcttcgcagcaatggcgcgagtggatctggacgggaaccccatgaaggcacttacgatctgcatgatcggcgctggcggcttcataggctcgcatctctgcgagaagctcatgtccgaaacccctcacaccgtcctcgccctcgacgtctacaacgacaagatcaaacacctcctcgaaccctccgattccccctgggccggccgcatcaccttccaccgcctcaacatcaaacacgactctc

SEQ ID NO: 20899 - DNA, 260 bp, Glycine max
  Clone ID: 700954736H1
tagcgggtgaaggtttttgcgccgcgccttatatcacaccgtcgtccgaaagcgtcgttgccgtgaaaccctagaaagaaacgacgacgtaaatggaggtggagcccgtggagccgcagtcgctgaagaagctaagcttcaagtctctgaagcgcgctctcgatctcttctctcccatccacggacacctcgctactcccgatgccgaaagcaagaaaatacgcactagccacaaggtgagcgtggagtatggtggaatc

SEQ ID NO: 20900 - DNA, 260 bp, Glycine max
  Clone ID: 700954737H1
ttactccacagaggaaatacaatctgatctggctgttgttgcaggatcgccgtcacaagttacagaagatgataagcatcagtcaatgatccctgcacactctgaggaagcaatatccaatgttgtaaccccggttgatcgccgtactgatggatatgatgcttgtgatgcacaaaatcaaattgagttaccaactgcggaggagtttcaaccattgaactttgatatatattatgacccaagaagcgagctactggatg

SEQ ID NO: 20901 - DNA, 256 bp, Glycine max
  Clone ID: 700954739H1
aacaagacaagcacaacaagcattctgaaattctcttatttgttagtatcaggactagtaacaattaaccttgaaaataaagcttcatctagttttatcttccataggtagaaaagtgatcaagagaatacacaagtcaccaggtgggaatgtaccatcatcaccaacaccaaggaaaaaacattcattcttcttccagaatgccaatcccctctgagaggcacatgttccttcaaacaggaaatggatctggtga

SEQ ID NO: 20902 - DNA, 257 bp, Glycine max
  Clone ID: 700954740H1
gataactagaaacagtgtgatgaaaatgaaggtccttgttttcttcgttgctacaattttggtagcatggcaatgccatgcgtacgatatgttccctctccgaatgaacactggctatggtgcccgtactccggaggtgaaatgcgcaagttggaggcttgctgtggaagcacacaacatctttggctttgagaccattcctgaagagtgcgttgaagcaacaaaggaatacatccatggcgaacaatatagatcag

SEQ ID NO: 20903 - DNA, 258 bp, Glycine max
  Clone ID: 700954741H1
agaagatgaaaggagagcaagaattagaagatgaagaaagcttctcgcgtgctatgctgctttgcagctccgttgtggtttccatggcgctgcaatcggcaacggagctgggcgtatttgacgtgttgcaagaagcgggggctaagctctctgcgaaagagatagcatccaagctttcctgcgacaacaaccctgaagcagactcaatgctggatcgccttctagcccttctagcctctcactccattcttaactgtt

SEQ ID NO: 20904 - DNA, 256 bp, Glycine max
  Clone ID: 700954742H1
acagcatcgacttgaatttgagtgatgaatttgttgttgaagcttcactttggaaattttgaatgttacgagacacaagtttctccaacttgctgggtcccacacagtttcttcctctgtctatttccctcgcagatctcaaccaattcttatatataaacccctttcgagatctgcttcaagctctgtccccttcttccacttccaccctcctctcaggtttttgtggataagagtgagctataatggctgccag

SEQ ID NO: 20905 - DNA, 254 bp, Glycine max
  Clone ID: 700954743H1
cttctgctctctcattacgctctttcctccgatctcaggtgttgtataagcttcctgtgttggcttggtatccttgcaagttcttctgtagcagattccaaggtgaaggtgtcacgttaaagtttctttcatgtttgaacaggctactatccatttgggagcaactgagctgcttggattgtatttttcttcttctagaaaaaattacagaccctcaccacccagacttagttgtatgaacggttggccacctt

SEQ ID NO: 20906 - DNA, 255 bp, Glycine max
  Clone ID: 700954744H1
tcctctttttttcatttctcttcaacttcctcttctttcaattctcttcagtctctctccgccttcccaaaatggtgaaccctagatgcttcctcgacgtcagcatcggcggcgagttagaaggccggatcgttgtggagctcttccacgacgtcgttcccaaaactgccgagaatttccgcgccctctgcaccggcgaaaagggcatcggtcccaacaccggcgtccccctccactacaaaggcgtgtgtttca

SEQ ID NO: 20907 - DNA, 253 bp, Glycine max
  Clone ID: 700954747H1
tggatgaagcaatgaaagtgagagagtccaattatgcgaacgctttgtgatgcttgtgagagtgcggcggctatagttttctgcgccgctgatgaggctgcactttgtcgtgcctgtgatgagaaggttcacatgtgcaataagctagctagtaggcatgtgagggttggtcttgcaagtccaagtgatgtgccacggtgtgacatatgtgagaatgcaccagctttcttctattgcgagacagatggaagtt

SEQ ID NO: 20908 - DNA, 266 bp, Glycine max
  unsure (1)..(266): unsure at all n locations
  Clone ID: 700954749H1
gccatggcgcttcaaccaattccgttaaattgttcttcttccacaccgcgtagctattcctnctgtgcatattctcaaattcagagtttctggtgcgaaccagacatcggaacttgacactccacaacgagtgaaggtagcggagaagacacaaaacagcagccacaggccaagcttccttcatcaaattcgagatagatggtcactcaaattagggtcccaaagggagaagttcccatggcaagaacgggaacacgaggtggtcc

SEQ ID NO: 20909 - DNA, 261 bp, Glycine max
  Clone ID: 700954751H1
attgctccaactatggccgtggacctcatgacgaccggttacacccgaaacgacaacatcagtagtttcacaaccaaagccgaggaaaatgccgtccaagaagccgcttctggtctagagagcgtcgagaagctcatcagactcctctcccaaacccaagcccaagcccaagcccaccatcaattcaacaacaacaatagctctagtaatgaaatcgccatcgccatggactgcaaagccgtcgctgacgtggcagtctcc

SEQ ID NO: 20910 - DNA, 259 bp, Glycine max
  Clone ID: 700954752H1
attcaaccttcctcgcctttgcctccgtttccgtgactgagatggctggaggtgttattcagcagatattgaggaggaaactccaccctcggtttactaactctcccttgttgtcacccatcgtagcaaaaaaagatgatgctggctctactggcagtcagtccttaagagcacttgcattaattggagctggtttgtcaggtcttttcagtttttcaacaatggcagcagctgatgaagctgaacatggcctggcatg

SEQ ID NO: 20911 - DNA, 260 bp, Glycine max
  Clone ID: 700954753H1
aaaatactacaaatttttttcagtttctccgccgccgcacaaccaccacctcctccgttcggatctccggcggacctactatccctactactactctactctatttacacggaagaacaaaaaactatccccctcccccaaaaaaaaccccaaagcggctcggttagggtttagttttgtaccatttcgtgtaatctaatttttcatccgtaaaaatctaattttgaggcggcgagatggcggagattcaggtgcagcat

SEQ ID NO: 20912 - DNA, 257 bp, Glycine max
  Clone ID: 700954755H1
agttatgttgcatatgctttgaccaagcatgcacaattgaggtaagaccctgtggccatcaaatgtgtgctcattgcaccctagcgctatgctgtcacaaaaagcttgatcctgctactaccggcctttctggaccagtttgtccattttgccgtggatccattcttcaattactggttgctaagattaacaaaatcagtgatacagaagtggaatctagccctatgaagccaaggagatcacggaaatcaaatttc

SEQ ID NO: 20913 - DNA, 258 bp, Glycine max
  Clone ID: 700954756H1
gtcgggagatccatacaagacattgtttgtggctaaactcagttacgagaccactgagagcagaatcaaaagggagtttgagtcatatggtccaatcaaacgggttcgattagttgctgacaaagatataaataagcccaggggttatgctttcattgagtatctgcatacaagagacatgaaagctgcttataaacaagctgatggtaggaaaattgatggtagaagggtgcttgtggatgttgagcgtgggaggac

SEQ ID NO: 20914 - DNA, 256 bp, Glycine max
  Clone ID: 700954758H1
gaagccgcaaaacaagcttacaagccgaaccccatgaaagttaccgctgagttcaatacacatgtcatcagggcaatgagaggctccaacaactcaagaaggggcttatcaaaccaatacgatggtccatgcaaggcgacaaaccccattgacaaatgttggagatgtgaccccaattgggagaaaaaccgcaagaggctagcagattgtgccctaggctttggccatggcacaacagggggcaaagatggcaaaa

SEQ ID NO: 20915 - DNA, 252 bp, Glycine max
  Clone ID: 700954760H1
aacccgtgtgtttggatgagttggccacgcaaacccaacagctaattttcgttgcacttcgtttcctcttcctgtataacatttataacctgatgcattttcacaatattcaatttcacttcatcccttgtgtttcatcttcttatgtgtctattcattttcctcagaatttccggttttgttgaatatcacaaagcttcaatctcatggcctcgtttgatgaacaacaaggaaagcctttacccaagtttg

SEQ ID NO: 20916 - DNA, 253 bp, Glycine max
  Clone ID: 700954761H1
caccaatctcacccatttcaaaaaaaggccgttagtgttactattcgtacaatggccactcttgttctttaccaattctttctcaaactcttgctcctaatttcagtctttcagctttcctttgctgctaggagactcaaccagctggttcaggaccagtcacagttactccattaccacaacggtcctcttctatacggcaaaatcgccgtgaacctaatctggtatggtcacttcaaaccatcccaaaagg

SEQ ID NO: 20917 - DNA, 253 bp, Glycine max
  Clone ID: 700954763H1
caatatattccattctctctgtgtatttccctacctctcccttcaagatgcagatcttcgtcaagaccctcaccggcaagaccatcacccttgaggtggaaagctctgacaccatcgacaacgtcaaggccaagatccaggacaaggaaggaatccccccggaccagcaacgtctcattttcgccggaaagcaacttgaggacggccgtacccttgctgactacaacattcagaaggagagtactcttcacct

SEQ ID NO: 20918 - DNA, 53 bp, Glycine max
  Clone ID: 700954764H1
gccactcctccacccctcgccgcaccaacggcgtcaccgtcctcgtcaccggc

SEQ ID NO: 20919 - DNA, 260 bp, Glycine max
  Clone ID: 700954766H1
ctttccaaactctcttcttcccttccaagacccttttgaagcaaccgatggaatttcagtttcttcccagattctaccttcttgtttccttatccattctgttccttgcaccctttcacgctcaagctaaaattaaagtgacttactgcgataagaaggcagactatgctgtgaaggtgtctggagttgaaatatcaccaaaccctgtggtgagtggccaggcggctacctttaagatctcagcaacttctggtaaagct

SEQ ID NO: 20920 - DNA, 258 bp, Glycine max
  Clone ID: 700954767H1
agaggaaaggaaaagtggcaaaaaaagcgagtcatttattagagtcgcgagctagaaaattcttcttagaccaaattgctaagaaaattgactcaagtaatggtagggagaggcggaagggtctaaagatgttgagaaatgtgacaaatggtttcattgatgtgtatgaaggtgggagttctgatggtctacctggtttgcaaatttatacattgctgatgaattcaactgatacacagcacgagattttgcatgaac

SEQ ID NO: 20921 - DNA, 258 bp, Glycine max
  Clone ID: 700954768H1
ctcacaaacacacactgaactaaaaaacatcaaaagagacatggctgagcaaaccttcatcatgatcaagcctgatggcgtccaaagaggccttattggcgagatcattagcagatttgagaagaaaggtttctacttgaaaggtttgaaacttgttactgtggaccgtccttttgctgagaagcactatgctgatttgtctgccaagcctttctttagtggtttggtggattacattatctctggccctgttgttgc

SEQ ID NO: 20922 - DNA, 252 bp, Glycine max
  Clone ID: 700954770H1
tcatggtgcaaggatatgatccagttataaaagttcttgcaaaagatattgacatacgcttgaaccacagggtgaaaaagatatctagtggttacaacaaggtaatggtgacggtcgaggatggcaggaactttgttgctgatgctgctatcataactgttcctattggaatcctaaaagcgaatttgattgaatttgaaccaaaacttcctgattggaaggtttcagcaatttcagatcttggtgtgggca

SEQ ID NO: 20923 - DNA, 261 bp, Glycine max
  Clone ID: 700954735H1
tggcagtgtctcttccctggcttggtttatgtcaaatcaagaaacaagctttgtcacaattggtcaaagagttcttgcaagaccactgaaggtgcgattccactatggtcatccagatgtttttgatagaatttttcacataactcgaggaggaatcagcaaggcatcttgtggcatcaatctgagcgaggatatttttgctggattcaactcaacactaagacgcggaaatattactcatcatgaatatatccaatgcgg

SEQ ID NO: 20924 - DNA, 248 bp, Glycine max
  Clone ID: 700954686H1
gggctttgagtcactttctatttccacaaaggaaagtgttcattcccagctacccttatataatccataattctctctctcctcttcctggtttggactttgtttaatcaagtggaccattagagttggtgaactcttcttttcctcacactacttagaaggtcaatgtcatggatgatggtcctgcaaaattaaaattcatccctgatcattttcaagttccaacatcaagtatagaatctcctgag

SEQ ID NO: 20925 - DNA, 248 bp, Glycine max
  Clone ID: 700954688H1
gtaaaagggaagacgaaggactaaagcaccagctggatgcacttcccccttcttcacataatgctgcacgtaacataaagatctttaccattttattatgatacaaaatagataatgttctgtatcaaatttcagtcagacattggctctgtacatagggttatattatcgatgcactgtatttgtattcaaattccaaatggcgaacatatttgattgctgttagttttcaaggttctgtagattat

SEQ ID NO: 20926 - DNA, 247 bp, Glycine max
  Clone ID: 700954689H1
tcctaagccaatagctttaaacaaacagagagacagagaaagcagtgaaagggtaatacatacacagaagaataagaagtagttgtagatgttttcgaaaccctgcacccaactctaacaagagaagaagccttcttcagttcatcaccaatggatccgtgtcccttcctgcgtcttatgatagactctctggctctcaatcttccctccgccaccaaaccgccacctgtctccggcgtccaccctt

SEQ ID NO: 20927 - DNA, 244 bp, Glycine max
  Clone ID: 700954690H1
gggtttgaagttttggcgctgaaaaaaaatggcggaagagtacgaagaggagggcggtgagattgaacaagagttctccgtttggaagaagaacactcctctcttgtacgatttcttcatttctcaccctcttcaatggccttctctcaccgttcactggcttccttcctctccccatccccactcccacccttccttcaatctccacaaacttcttctcgccactcacacttccgacggcgaa

SEQ ID NO: 20928 - DNA, 244 bp, Glycine max
  Clone ID: 700954692H1
atccgtcaacgcccttggggaaaatgggcagctgagattcgggatccaagaaagggggttcgtgtctggcttggaaccttcaacactgctgaagaagctgcaagagcttatgatgctgaagcacggaggattcgtggcaagaaagccaaggtgaattttcctgaggcaccaggtacttcttctgtaaaacgttccaaggtaaatccacaggaaaatcttaagactgttcagcccaatctgggtc

SEQ ID NO: 20929 - DNA, 223 bp, Glycine max
  Clone ID: 700954694H1
gttttgccattgtctgaggtatccaatttggtgagggatgttgacatctcatacaagagttcgaatcatctatccaattataatcttccacaagctgatcccatgcaatttctatgtaaccaattttcttcgctcagactgagggacataaattggaatcaatagtatactactcacctcacttaaattttgtttctgttacacaaatctctcctctgtttag

SEQ ID NO: 20930 - DNA, 262 bp, Glycine max
  Clone ID: 700954705H1
aagttactcaacaacacctcacgctctcggaaaatgctgcaggcatgaaaccattcattccaaccttcaactccttcttccaaacctctccttcacttgttagatttgttcacattgcaaagagatttttgttgctatggggttgatcgatctgaacaccacggaagatgatgaagctgctccattatctgcttcttctccagcttcatattcttcttcttcttctcactcggggataagcacttctgcttcaaccttggtt

SEQ ID NO: 20931 - DNA, 261 bp, Glycine max
  Clone ID: 700954706H1
caaccagtctggcaagggaaatggttaccaaatatggcatgggcaatgaagttggactagtcactcacgattacaaagatgatggtaggagcatgagctcagagactaggcttcttattgagaaagaggtgaagcaattcctggagagggcctacaacaatgcaaaaactattctgaccactcacaacaaggagcttcatgcacttgcaaatgcccttctggagcacgagacactttcaggaactcagataaagacattgc

SEQ ID NO: 20932 - DNA, 259 bp, Glycine max
  Clone ID: 700954708H1
cgcgtcgctccgcaccagtttcaccgcacgaatatcttgctgtgtggagcgatccgagaaaaactctgtaaacatgttggtttaccaggacctccttacaggtgatgagcttctctctgactccttccgttacaaggaaattgagaatggaatgctgtgggaagttgaggggaagtgggttgttaaaggagcagttgatgtagacattggtgcaaacccttctgctgagggtggaggagaagatgagggagttgatgat

SEQ ID NO: 20933 - DNA, 260 bp, Glycine max
  Clone ID: 700954709H1
caatggggagcacggcggtggagaagacggaggaagaactccgcaacgagatcgatgagcttcttcgccaacagcgcgagattacggagaggcttcgagatcctcgaggtcttcgcagaggttccttggcgggtcctgctctcccctctaacggtgctcgccaacgaccctttattcgtcctgttactggagacaggaatgattctgaagatcaacctcctgctaaacgtcgactttcatctgctgtcgttaaggtggat

SEQ ID NO: 20934 - DNA, 256 bp, Glycine max
  Clone ID: 700954710H1
atggcttagcagatgaagtacaagttatcagaattgttggttctgtggtagttatctgtgtactttggtgacactagttttgtccacaatggactttcttggcaaaatcccttggtttaatgctcaagtgaacacagatttggcgactaattcaattcctatcgaaacattcactgaacaacctaaacaagaacttgggaatgatcccaaattgcccttcctttcattgtttccttggggaaatcgtgctggagag

SEQ ID NO: 20935 - DNA, 256 bp, Glycine max
  Clone ID: 700954712H1
cacccagatctcaattttctgcaatttcactcagaccaggaaattaaccatggctcaacctgcaagcctcacaagaataggccttgctggcctggctgtgatgggccaaaaccttgctctcaacattgctgagaaaggctttcccatttctgtctacaaccggaccgcgtccaaggttgatgagacagttgaaagagcaaaacaagaaggaaaccttcctgtgtatggctaccataaccctaaattctttgtccaa

SEQ ID NO: 20936 - DNA, 254 bp, Glycine max
  Clone ID: 700954714H1
ggaaaaaactaccgtaatagtcctgccttgcgtaaagcttgcaaatttttgttgtcaaagcagcttcctaatggaggatggggtgagagttacttgtcaagccaaaacaaggtatatatattattgcttgaatagcacactagactctgaaaaaagaggtcagtgttaataaatttctatctacacaaatatatcggatgctttctttgccaaacaggtttacacaaatctaaaaggcaacagggcaaacttag

SEQ ID NO: 20937 - DNA, 255 bp, Glycine max
  unsure (1)..(255): unsure at all n locations
  Clone ID: 700954716H1
agaagggttcttcaattttctcgnttttttctttgtcgtggccgggttaaacttcaattaatgattatttggagtccaaaccttggcagctggcatcaataccggccaccaacaaagaaaaaaactaaacaatattatggcgaactgtcagcaatattattttcttttgctttctctggcaatttttattcctaccctgaatgccaattcctctgagaaagatgagtattggcagagccatgtctatgagtttga

SEQ ID NO: 20938 - DNA, 263 bp, Glycine max
  Clone ID: 700954718H1
cattgcttctgattggaagaagaatgagcacatgactgaggacatgttctgccatgaattccatcttgttgaccttagggtcatggataactgcttgacagttaccaagggtgtggaccatgttttcaatcttgctgctgatatgggtgggatgggttttatccagtccaaccactcagtcattatgtacaacaacaccatgattagcttcaacatgattgaggctgccaggatcaatggtgttaagaggtttttttatgcct

SEQ ID NO: 20939 - DNA, 262 bp, Glycine max
  Clone ID: 700954719H1
atttgaggccaggcaagccccactcaaccaccacacctctcctcgttcacgctacccctttctgctcttcttctacctttcaagttttaaaagtataaagatggcagagacattcctatttacctcagagtcggtgaacgagggacaccctgacaagctctgcgaccaaatctccgatgctgtcctcgacgcttgcctcgagcaggacccagacagcaaagttgcctgcgaaacatgcaccaaaaccaacttggtcatggtc

SEQ ID NO: 20940 - DNA, 262 bp, Glycine max
  Clone ID: 700954721H1
gcaactccaccacagttgcagaacagcacaaacacaagacagtgccaaggaaaaatactcagattcagcgttagtgtgtgattgtgaggctgttgagtgttgagtagggaagaaaagtgaagacctcaaaacaacgagctaaatcaggctcttgaggacaaccaagagaagaagaagagtgaagaagatgactggaatgacgaagaatcaaccgtcacagtggtggtggcttgatagccacaccacttctaatcgatcccct

SEQ ID NO: 20941 - DNA, 258 bp, Glycine max
  Clone ID: 700954722H1
attcatctggccttctgcttcctacgactgttcctcgttatactactgcatcagctgaaattgatgcatcagcaatgccaataggagagtctggattccagtctcctctatatccttgcgtgcaagattcatcagagttggtgcaaagtgcagggcaagtcgaccctcaaaaccagacacgaacattcgtcaaggtttacaaatcagggtcagtagggcgctcacttgacatctcccggttcagcagttatcatgagc

SEQ ID NO: 20942 - DNA, 259 bp, Glycine max
  Clone ID: 700954724H1
ctttgtatacaagatacgttatgatcaatacctctcctctttgtaggagactatagaccagatgctgtggaagtatctcccacaaagaggagaggtattgatcataactcattcatggtacattttcttatagactttatgatttttagaatttgtgggggaaaaaacttttcatataagaatgtggcctaaaacagtatgagttcaccaacaactcgttagtttgagtagaactgggctcggttcccttaaataagca

SEQ ID NO: 20943 - DNA, 260 bp, Glycine max
  Clone ID: 700954725H1
tgattattacattacactcatatctatcaccacttttaagaccgatatagtcatagtacaatggccctccccaccaatctcaagttcttctgtgtgtttctcctagtgcttattctctattcctcatccttccttgcatcagctgttgatcctaaggctgaagatgaagaatttaccttcgctgaaggaagtatcaaagggccaaagaattgggggcagatcaacccaaaatggaaagtatgtggagatggaaaactaca

SEQ ID NO: 20944 - DNA, 258 bp, Glycine max
  Clone ID: 700954726H1
ctatgatccaactccatcaccaccctcaggtggtggtggaagttacaatccaaccccatcaactcctccaagtggtggaagctatgatccaactccatcaccaccctcaggtactggtggaagttacaatccaactccatcaagtcctccagttggtggaagccatgatccaactccttcaccaccctcaggtggtggtggaagttacaatccaactccatcaactcccccaggtggtggaagctatgatccaacccc

SEQ ID NO: 20945 - DNA, 256 bp, Glycine max
  Clone ID: 700954729H1
gaaaaaagccactgagtgcgattcaataattgcgaaaaaccacggggagtgttgtttgtttcggtcccggctggaccagggaatgaatagagatgagaggctttcggcttaagaaaactgagttaagcggccaagccaaacgcagaatcggcggcagaaattgccaccggaagcacgtcgaagacgggtgaactaaaaagaagaatctcatccaccacttatcctttcaatgccccaaccccaaaaaaatcacaac

SEQ ID NO: 20946 - DNA, 257 bp, Glycine max
  Clone ID: 700954731H1
cttggttttaattggtataggcgtgccaaggtcttgttaattttgagcgttaagtgctgcaactaatcagatcccaagaccttggcctaccttgccatacagaaaaaaaaaaagcaaaaaaaaagccaaggtttggagccaacaaaaataaacacaaagcacaagtcatggaaagacataatggttggaagtgcaacaaaggttgctttcaccctcttggccactttcgccattgtcattccatgccttgaggctgg

SEQ ID NO: 20947 - DNA, 82 bp, Glycine max
  Clone ID: 700954732H1
ctcgtgccagttctatctctttctcctccagaataattggagttatgtaaagttatcatcttttcactaaattggtttctgg

SEQ ID NO: 20948 - DNA, 250 bp, Glycine max
  Clone ID: 700954685H1
ctttgctgggagaagaagtctgagaattctgaaattgccatttggcaaaaaactctagacactgaatcatgtcgtagcagacaagaagaatctagtgtaaaattctgtgaatcgacagatgctaatgatgtctggtataagaaaatggaggtctgcgttactccaagtcctaaagtttctggtgattataagccatttccagagaggctatatgccatccctcctagaattgctagtggctctgttcctg

SEQ ID NO: 20949 - DNA, 265 bp, Glycine max
  Clone ID: 700954734H1
cacagatatattttttttttttgtctccatcattttctcgagagctttcagtttgtgtggttcatcttccttcttctccttccctcccccctctgtaaaaccccgcttctctgaatccctttctgttaatcatctgtctttcaagctaagattttcgggtttgtctattaattcaccaagaagcaaacttagaaggatttttcgaaagccaggtgttttcagaaacgagatccaggttttattgtcgaatttcgctagtcaaatt

SEQ ID NO: 20950 - DNA, 203 bp, Glycine max
  Clone ID: 700954654H1
gccagatctagaatgtggcctatcagaaaaagtagaagactttcctgccgatgaacctggcctttcaatggctttctgcccaaaacgaactttgtcgtccaaatcacggataagaagttccagctccttttctttctgttgtaatattgcatgtgtactggtttggtctccaccagcctcatccacagattccttgtttgaat

SEQ ID NO: 20951 - DNA, 250 bp, Glycine max
  Clone ID: 700954655H1
ctcgagccgcggctcctcccttccagataggggctcaaggcagttgggtcgacccaattcagagaatggtggagggcaggacgccaagaatctgagggtcaagcttgttctcttaggtgattctggtgttggtaaaagctgtattgttctacgatttgttcgtggtcagtttgatccaacatctaaggtaactgttggagcttcttttttgtcgcaaacaatagctctgcaagactctacaacagtcaag

SEQ ID NO: 20952 - DNA, 248 bp, Glycine max
  Clone ID: 700954656H1
cctcgagccgaatcggctcgagcaataattatcaaacctaaccagtaaaaatggtgaccgtgaaggaaatccgcaacgctcaacgttcccatggacccgccaccatcttggccttcggcaccgccacgccgtccaactgcgtctcccaagccgattaccctgactactacttccgcattaccaacagcgaacacatgactgatctcaaagaaaagttcaagcgcatgtgtgaaaagtccatgataaag

SEQ ID NO: 20953 - DNA, 248 bp, Glycine max
  Clone ID: 700954657H1
cttcttcttccttttttgtccctttgaaaagctaaggaattgctgaattggggtattacatgaaaccttctgcaagtggttcataagtttcctcttctctgttcttcttagaacaagtattctctgatgacccttttcattatccaacacgctactgtgttctgaccccatattccaaaggggtttttgtcttctgatcaaaagctcttttctttgttaaaatattggctagttgttattattgtgtt

SEQ ID NO: 20954 - DNA, 248 bp, Glycine max
  Clone ID: 700954658H1
ccttgctcttgtgctctgattggcctagccagtagtagccaatttgttggagctggttgggaatggcgtcgaaaccgaaatcaaatggaaattccaaatgcaacaaaggattcgctgacagctatatgctgttgaatcctgaagacgctcatttcttcgatcttgttcatgtgctgtattcccgtaacttgggaaaccgaaaatttgtggacagcaatgctgagggatcttatgagggaagcttccgc

SEQ ID NO: 20955 - DNA, 248 bp, Glycine max
  Clone ID: 700954659H1
cttagccgaggtcacgaggagcactagctagtttcacaatttccaaatggctaggggattgaagaagcatctcaagaggctcaatgctcctaagcattggatgcttgacaaactgggtggtgcatttgcgcccaaaccctcatctggaccacacaaatctagggagtgccttcccctgcatactcatcctacgaaaccggctaaagtatgctctgacttaccgtgaagtcatcgctattctgatgcag

SEQ ID NO: 20956 - DNA, 246 bp, Glycine max
  Clone ID: 700954660H1
gttgaacaaggaaagaaggaagaggttgttgtgtctgtcgtggtacttgagctgaggtaggttttttgtgttactgtggttgacttgggagattgtaagtgttggtggcggctattctgattggactgaattggaatcatggttgcgtgggtttgctatttttggggctgttggggggtgaagtaaggttaaatgattgtgagtgattccgttttgttgatttcgtactggtaactggaattttag

SEQ ID NO: 20957 - DNA, 247 bp, Glycine max
  Clone ID: 700954661H1
ctttaccaccattctagatatcagagaactttgcagctctcttaggtttttaaaaaacaccacgcaaacagcaagatggccacttccgacagtaacatgctactaaattatgttccagtttatgtgatgctcccactcggagttgtcaatgttgacaatgtttttgaagacccagatggccttaaagaacagctcttgcagcttcgagctgcgggtgttgacggggttatggttgatgtgtggtggg

SEQ ID NO: 20958 - DNA, 200 bp, Glycine max
  Clone ID: 700954662H1
tctcattctccccaaaacctctgctagtttttggttttgcttcaacaccctcgtcctccttcttcttcacactcccccagaaatcccaattttgcccctaccctcttccccaatttacctacgatgtacagcaacatgctggtcaactgctccaactgccgcacccctctgcagctgccacctggcgcgggatccatccg

SEQ ID NO: 20959 - DNA, 201 bp, Glycine max
  Clone ID: 700954663H1
cctatgcatattatgaagacggattcaattgcttcagtgaagctgagaattcaaaccttcaagggattttttgttaaaaagcagaaactggtttttgaagggaaggaattggctcgtaacagatcttgtatccgtgattatggtgttggtgatgggaatgttttgcacctggtgctgaggctttctgatctcaaagctatt

SEQ ID NO: 20960 - DNA, 251 bp, Glycine max
  Clone ID: 700954664H1
gtgaaaaagcaactaagcatagtgtgtaagaaagggagaaaaacaagtgctgtgtagagagaaaaatggctaggtggtgcatgatcttggtggttcttgctcttgccgtggttgcaagtgccagaaacatgcccaatgacgctggtttggaggaccagaagaacttccttgggtatgggttttcgggagttggcaacaatggccttccctttggtggagtgggttctgggtttgatggtaatatgggtggg

SEQ ID NO: 20961 - DNA, 254 bp, Glycine max
  Clone ID: 700954665H1
aataagatgaaaatgaaagtgcttgtcttgtttgttgctacagttttggtagcatatgaatgccatggctcagactaccagaagttccctctccaaatgaaaactgggtttggtgggcaatacagcaatgaggtggcatgtgccagttggaggcttggcgtggaagcaaacaacgtagtcaagtggcaaactgttcctgcagcttgcggagagtacatagctgactacgttctaggagaccaatatagatcaga

SEQ ID NO: 20962 - DNA, 252 bp, Glycine max
  Clone ID: 700954666H1
cacgcggcgacggctaatcgaatgaaacattttagattagatacgtagtgctgtagggaatccgaaaccggcacgcggagacgtcacgtgcgtcgtttaaccgtttgggaccgattcccagaagtttctcagaagtcagaggaaaacgatactttctaatcctttattcttcgctatcacttttttatttatattatatattcgttaaattggacttggactgtagctttgccattgagggtagtgttgaat

SEQ ID NO: 20963 - DNA, 254 bp, Glycine max
  Clone ID: 700954667H1
gagcagttccggggggaaccagcgaattgtcaaagaagaagacaaaggcttctcaaatttctcctttcaaacccaacaaggacctcctgcttcatccacagcaacatatcagtcttcaaatgtcacagttcaaacacaacagccatggagttatcaggagaccacaaagcaggataatttttcttcaggaaagagcatgatgaaaactgaaaaatcttcatccatgcaaagtttttcccctgagattgctagtg

SEQ ID NO: 20964 - DNA, 250 bp, Glycine max
  Clone ID: 700954669H1
caaagtttcttcctttctctgctctttgccttctctgacacatttggtgccttgtagagcgtgttttggcaggaaggtggtatggcgaaggacgttgaggttgctgagcgtggctccttctctgggaaggactaccaggaccctccaccagcaccactcattgatgctgaggagctcacaaagtggtccttttacagggctctcattgctgaattcattgccactttgctcttcctctacattactgtgc

SEQ ID NO: 20965 - DNA, 248 bp, Glycine max
  Clone ID: 700954670H1
atgagttgaaaatgaatggagaaaaaaagacgaagcggtgaagaagctgagcgaattgcaatatgaaattgaaagcggttccatggtggcataattggttagtggtaaaagcaggatcaagtcacagcagcctcatggtacgcaagaagcagactcaggattctgaatccactcctccaagaatcacatccaacgtcaaacaaaacctccgcttcctaaagctatggaagagcttccagaatagaaat

SEQ ID NO: 20966 - DNA, 73 bp, Glycine max
  Clone ID: 700954671H1
tggcaagcgccctttagaccccgatggggaggaagaaccccagtcaaggatggctaataggatagtggattct

SEQ ID NO: 20967 - DNA, 249 bp, Glycine max
  Clone ID: 700954672H1
actcgagccgattcggctcgaggggagaatatgaacatttggtttgaaaattaaccccgcggcacctgcaatgattattgtcaaaccaacaatagagaatccgactcaccccgttgtatttgccctttttttgtcttgaaaaggtgaagttcaagtcttcagttcaatccaagtctaactatagagtagctatctaagagctttggagctggttcttcttttggactgaaataaagattacctgttttt

SEQ ID NO: 20968 - DNA, 247 bp, Glycine max
  Clone ID: 700954674H1
ggattctcaaatactcaactcattagaccttatcttggccttattcctcttcatgattctgatcctaaaactagggagacgactcaagagtactgaattggctctaaacatatcccgaggaccatggaaactggctattataggaaatttactccagcttgttacatcgccaccacaccgaaaattaagagacctggccacaatatacggacccatgatgcatctccaacttggggagatcttcaca

SEQ ID NO: 20969 - DNA, 240 bp, Glycine max
  Clone ID: 700954675H1
ctccctccttaaaccctaccctaccctacccgtcgcccatggcttccgagaacgtaagcaccgatacggtgtcgaaagccgtcgacgctctcctgaaatggcgtcgctcccacatctgaaaccctaaaaccaaaactcttcgacgaagacgaggaatatgtgtacctgatcctgacgctgaagaagatcccttcaaaatcccgcgtgaagcctgcacaagatccctctcgccgactccct

SEQ ID NO: 20970 - DNA, 247 bp, Glycine max
  Clone ID: 700954676H1
gattaacacaccaacccactagaaacatgaaaacccctaacaaagcctcattactcttattccctctcttgtccctttccttatttatcaaccattcccatgcagcaggaatcgctgtgtactggggccaaaacggtggagaaggcaccttagcagaagcttgcaacacaggaaactaccaatatgtgaacatagccttcttgtccacttttggaaatggccaaaccccacaactcaaccttgctgg

SEQ ID NO: 20971 - DNA, 244 bp, Glycine max
  Clone ID: 700954678H1
ctccgagccggtgccggagcgcaaggtagccgttctcggcgccgcagcgggaccgggcagcctctctcccttctcatgaagctcaatcccctcgtttcgagcctctccctttacgatatcgccggaactcccggcgtcgcgccgatatcagccacataaacaccagatctgaggtagtggggtaccaaggtgatgaagagcttggaaaagctttggagggtgccgatgttgttataattcctgc

SEQ ID NO: 20972 - DNA, 247 bp, Glycine max
  Clone ID: 700954679H1
cagaactctctagaacctctctcacacaatagcaaagaagggaagactaaaactaaaaccccactctctttttccgagtcttccagtgaaagaaaggcagcgatggaagaagacttcgacatccccggcggcgaggaaatggatctcggcgaagacgaggtcggcgaggagagggagatcggctctggcggcctcaagaagaagctcctcaaggaaggtcaaggctgggaaacccccgaagtcggtg

SEQ ID NO: 20973 - DNA, 249 bp, Glycine max
  Clone ID: 700954680H1
attcacctgagctttttgtgaggattccaaagcatggcttcccttgcagcatccactgctgctgcttcccttggcatgtcagaaatgcttggaaaccccatcaacctcagtggtgccacaaggccagctccatctgcctctagccctgcctccttcaagactgtggctcttttctccaaaaagaaggctgcacctccaaaaaaagctgcagctgctgctcctgccaatgatgagcttgccaagtggtat

SEQ ID NO: 20974 - DNA, 251 bp, Glycine max
  Clone ID: 700954683H1
ggaaaatctccgaacccgctacttcctatcctttcaaaagagtgtgactgtaatagtgagctaaacaacatcggcagctagatcgtcgaagaaaacgaaaaagaaaagctttgaaaatggctcaggagtcactctcagaaacccccgatatctcgcccccttcgtctactgcacaatcgcagccagatccatctctttcaaggaacgtttcttttagccggctcaacgcacaggcaccagaatttgtgccc

SEQ ID NO: 20975 - DNA, 204 bp, Glycine max
  Clone ID: 700954653H1
ttgctttgcagagtataagatcttgctcccacgtctctgattacttggaagcatcatctgcactcatggatcccaaccagcctgtgggtgaaaactacgccaatcccaggacttgcttctttcatgtcctcttcaaggctgcagccttggcattttacattctctcggccctctttattgataactttgtcatcattttcgtgg

SEQ ID NO: 20976 - DNA, 250 bp, Glycine max
  Clone ID: 700954684H1
cttcaacttcaacagcacttgatcacattcactgtctagtgatccaccttcacttcccgtttccaataatttaaatcacactctaatcagttctcaggattcctgtttgcatcatattcacaattggaacttcaaagtacaagcttttgagatttggaggttagctctttgcaaggaattgaattgttgcacctcattaccatctgtgacatctgaaattcaggtttcttagtattatttgagaccaaca

SEQ ID NO: 20977 - DNA, 255 bp, Glycine max
  Clone ID: 700954607H1
ggatcccacgagacattggttgtagccgtcaaccggcgaagtattctggcaaggtgtatttgaaagagagagaagcttaaggcacaaggagaaggaaaagaggaagcagaagagtatagaaaaacaaaacagaataaggaagcgtcatcgccaacaagtgatagggaaatatattaagcccccaccagacgaagaaagctctaattcatctattgcagtaacagcatcatgatgattttaaaaccattgttttga

SEQ ID NO: 20978 - DNA, 251 bp, Glycine max
  Clone ID: 700954608H1
atcattgttggctattcattcattcgtgttcctcaggagagagagggtgcgtgtgattcggattcgaattcgaattagggttttgcgcatcgtcatcgaatttttctcttatgcaaggaaggttttccttctccgatttgaatttgattgaacgagtagtgttaagattatgatattttttgagaagcttcgtttctctcctcacttgagccgcttcattgccggcatcctcctgttaatcttctgcaatt

SEQ ID NO: 20979 - DNA, 79 bp, Glycine max
  Clone ID: 700954611H1
attacagaccccccttaattgatggtgctctgtatcccctttttcttctgcaagaactacaccaactaaaacctccttc

SEQ ID NO: 20980 - DNA, 249 bp, Glycine max
  Clone ID: 700954612H1
gcagtgggaggaggctcgggactctgaccgcgtgcctgttgaagaatgagccggcgactcataggcagtggcttggttaagggaaaccaccggagccgtagcgaaagcgagtcttcacagggcaattgtcactgcttatggacccgaacctgggtgatctatccatgaccaggatgaagcttgggtgaaactaagtggaggtccgaaccgactgatgttgaagaatcagcggatgagttgtggttaggg

SEQ ID NO: 20981 - DNA, 249 bp, Glycine max
  Clone ID: 700954613H1
tggagttgtttctctgatcctcctcttgtacttgtttttgcgtggtggttcatggaagagtggggaagagggtcctccaacagttgcaggtgcatggccaataattggtcacctcccattgttgcttggttcaaagacacctcataaaacattgggtgacttggctgacaagtatggacccatattctcgatcaagattggtgccaaaaacgcagtggttgttagcaactgggaaatggctaaagaatg

SEQ ID NO: 20982 - DNA, 253 bp, Glycine max
  Clone ID: 700954616H1
actagttctagatcgcgagcggcaaagagggacttaggagtgcggtggattcgagaattccggagatgtatacagaggaagcttgcaaggtgttgagaacagcagtgctgtgcacggggactcttccggctttgagaccaaccatgagagctgtggttcaaaagcttgaggatgccgagccttgtaaattggttgggattgttattaccaaagatgacagtgaaaagaaaataggagtcaacgacaagtaatg

SEQ ID NO: 20983 - DNA, 258 bp, Glycine max
  Clone ID: 700954618H1
caaaagtgattttcgagaattagcgatgggaattgaaagaggaggcttcaagggattcaggagcgcctggagcgtgccgcccaagccgtgcgattcctgcaagctggcctcggcggcgcttttctgccgccccgattccgcgtttctctgcatcgcctgcgattccaacattcactgctcgtacaaactcgcgtcgcgccacgagcgcgtgtggatgtgtgaggtgtgcgagcaggcacccgctgctgtcacgtgcaa

SEQ ID NO: 20984 - DNA, 257 bp, Glycine max
  Clone ID: 700954619H1
cataagccaacttgagctgaattactactctaaaagctgcccaaaagctgaagagatcatcaaggaacaagtcacacaactatataacaagcatggaaacactgccgtttcgtgggtcagaaatctcttccacgattgcgtggttaagtcatgcgatgcatcattactgttagcgacggtgagcgatgtagtgtcggagcagacatcggatagaagttttgggatgagaaacttcaagtacgtaaacactatcaaag

SEQ ID NO: 20985 - DNA, 206 bp, Glycine max
  Clone ID: 700954621H1
gtctcatcactctccaaccacaatggctgtcttgggcggcgccgcctccgctcgcatcattccctccgtctcactctccacctcttctcgctccttcttctccttatcatcctcttccaaactcaaatgcttgcgctcctctcctcgcatttcgcacctctttctcaatcagcaaagagcggaggttcgcgtttcgagtggaggat

SEQ ID NO: 20986 - DNA, 254 bp, Glycine max
  Clone ID: 700954622H1
cttagatgctcagagtgactacactctatggaggttaaaggcttatgtaaaagattcactagaagagcaagtaaaggtcaatgcaggcgcaggtattaatcctaatgataaccctgatgacaagaaaaacaagaagaggcgagattctggtgattcttcgggcaagacaaacccaaaaaggaagaaactatctacattgtgattcattagttgcaacataagagacattagtttagtgtgattgagttaaagtt

SEQ ID NO: 20987 - DNA, 253 bp, Glycine max
  Clone ID: 700954624H1
gtcaagcgacgccgtttgggtcctcttccacctcgccttcttctcccaatgccttccctccgcctgggcccactcggcgatcctcctcccgggtcaactcgcccgtgactcaccgcagagctgccccgcccctgaccccaacctctactacaagccagtcatcggaatcgtcagccatcccggcgacggcgcctccggccgcctcagcaacgccaccggcgcctcctacatcgccgcctcctatgtcaaattc

SEQ ID NO: 20988 - DNA, 250 bp, Glycine max
  Clone ID: 700954625H1
gcttcgcactcgatccgttacgtttcccatgcgcgactgaatctaccataaccaaacgacgcgcaggtttcggaattgtgttctaggttttgagtttcggttccgatcgaccgacgatgctgtccaatcatttccaaaacggcatcgaaacggcgaggctcgtttggtcgcggattcctaattcggaagaatcgcagctcctcgacgacgccgttggcatccttaagaagaacgacggaggcggtgtcga

SEQ ID NO: 20989 - DNA, 202 bp, Glycine max
  Clone ID: 700954627H1
gagaaataaataacattacaaaacgctaaaccctaatcttctgcaattcgtgtgcgtggaaaggttcgagaatggtttcgctggaggaatctcgctctaattcgagccgtttccccttggcgaggagttaccagtaccactcctcggtttcgtccaaaacgcagcgtcacatcggaaggtccatgcgcacgatacgctccag

SEQ ID NO: 20990 - DNA, 250 bp, Glycine max
  Clone ID: 700954629H1
gaacttggtgctgctcgagtgaacaaggatggggcagatgtcaaagagctcaaagaacagatagcctgcctcaaagcagcattggcaagaaaggaaggtgaatcagaacattctttatcaggcagctctgaaaaatataggacaatggctagtgagctatcaccttatcatgcaaaccaacagggtgctgatattgtgagcccagggtgccggcaaccaatgcttgatgtaggcaatatagagcttcaca

SEQ ID NO: 20991 - DNA, 251 bp, Glycine max
  Clone ID: 700954630H1
gccgcgagggtcactacactgaactagtctgaaccaccatcaaaaccccattctcctcttcgcaatcaacctccaaatccaaattttctctctctgccttcacattccaatttcaaacaccatccgaatccaatccaatcaaaacaaactcgtctcttccagcgtttttgaaaaccctctcgatgccccgacccagacccattaattcatgagtcacgagatggaggcactggcagaaaacccaggtaggt

SEQ ID NO: 20992 - DNA, 250 bp, Glycine max
  Clone ID: 700954631H1
gttgaattgagcaagaagctctgcattaagcccgtgattgggcttcgtgcgaagcttagaaccaagcattctgggcatttcggtgggacttcaggagagaaggggaagtttgggctcaccaccgcacagattctgagggttgtgaagaagctggcccacgcaggcatgctggattgcttgcaactgctgcattttcatattggttctcagattccctcaaccgcgttgcttgctgatggcgtgggagagg

SEQ ID NO: 20993 - DNA, 259 bp, Glycine max
  Clone ID: 700954633H1
gagaacaacagttccatctatggttcgaccccaccaaggacttccacacatactccgtccacatggaatcctgcaagcatcatattctctgtggacgggaccccaataagggagttcaagaatttggagacaaaaggggttccattcccaaagagccaacccatgagaatatactctagtctttggaacgctgaggattgggccacaaggggtgggcttgtgaaaacggattggagcaaggccccattcacagcctcat

SEQ ID NO: 20994 - DNA, 256 bp, Glycine max
  Clone ID: 700954634H1
gtgctccaagagagattgaaactgagctgtcaactgctgacatcagctcacagtcgtttggagtgccaaacatgcctttcaagccaggttgctcaagtgatgttggcatcaatgatactggggttttaaataataataatggcttgcgggctaaccaaactccacgaatgcgaacatatactaaggttcaaaagcgtggctctgttggaagatgtattgatgttacccgttacaagggatatgatgaactccggca

SEQ ID NO: 20995 - DNA, 253 bp, Glycine max
  Clone ID: 700954636H1
caacaccatcacaccctccctcaggaggaggtgggtactataactcaccaccaacttatggaggtggtagccccccaacaccaatcactgtgagcccaccttcaaccccaattgaccccggcacccccactatcccctccacacccccttaccttccttccccaactcccttcacaggtacatgcaactactggaacactcacccaggaatcatttggggattgctaggctggtggggaaccttaggccatgc

SEQ ID NO: 20996 - DNA, 251 bp, Glycine max
  Clone ID: 700954638H1
caaaaaccctaggtagagagctcttcctccctttctcacagcaatggccgccgcagcacgccctctcgtcaccgtgcaggccctcgacggtgacatggcaaccgatgcctccgccaccgttcccatccctgacgtcatgaaggcctctatccgccccgacatcgtcaatttcgtacactcgaacatctccaagaacagccgccagccatacgccgtcagtcgtcgcgctggtcaccagacctccgccgaat

SEQ ID NO: 20997 - DNA, 61 bp, Glycine max
  Clone ID: 700954639H1
ctttatgctaatgtgcaaaaaggatttgacagagaattcaacacaaatcaataaaggtcag

SEQ ID NO: 20998 - DNA, 250 bp, Glycine max
  Clone ID: 700954641H1
tgtagggtgaaaccgtacctttcaaaccttatacccaccgttaccatgttccttataaagcatctcaaagtacttcacccttctggtattctatcaagagagcttcagcacacatcattgttttggcctcatattcagcatatggtaatgctagatatgtcttttgcatgatacatacttatgtagagaacactggctgattatatgatttcagatgaacatgattctgtttgtaataatttcaccttag

SEQ ID NO: 20999 - DNA, 245 bp, Glycine max
  Clone ID: 700954642H1
aaaacccaatccatatggaatttgatagaatcctacgtgggaagaatggcctaatttgtgagagtgttcttacggaatttaaggagttagtatcaatgtgtggagggcccaatgagaaactgagagctgactggttaataaattgtctcagggttgttcctgatactccctcagaacgcatgatgggcctcccatcaactaggaagctggcattgaaaaacaaggttgtctttggcactggtgac

SEQ ID NO: 21000 - DNA, 249 bp, Glycine max
  Clone ID: 700954643H1
tatcttccttgtcactgcccgtgtgtcgccgccatggccaccgtcaccacccaagcctccgccgcaattttccggccatgtacctcgaaatcgaggtttttgaccggctcttccggtaaacttaaccgggaagtgactatgcggccaatggggtgccctccttctgcctctttcaaggttgaagccaagaagggagagtggttacctggcttagcctccccaacttacctcaatggcactcttcctggt

SEQ ID NO: 21001 - DNA, 248 bp, Glycine max
  Clone ID: 700954647H1
gcaagaatggcacttcgttgcttggtgatgtccctttctgttctcttcactcttggtcttgcgagagaaagccatgccagagacgaagatttttggcatgctgtttggccaaacactcccattccaagttcattgcgagatcttctaaagcctggccctgcaagtgttgaaatcgatgatcaccctatgcaaattgaagaaacacagtacccgaaaaccttcttctataaagaagaccttcatccagg

SEQ ID NO: 21002 - DNA, 251 bp, Glycine max
  Clone ID: 700954648H1
gtgccacactagttttttttctacacatacatatatcacaagaaaaattaagcaacgattcaagaagaaaatgggttctgaacttgaagctcccattcacgtcctcatggtgtcctatccagcacaaggacacataaaccctttgctcagactaggtaagtgccttgctgcaaagggcttatttgtaaccttcaccacctcagagaccgctggtaaaaacatgcgaaccgccaataacatcactgacaaat

SEQ ID NO: 21003 - DNA, 204 bp, Glycine max
  Clone ID: 700954606H1
cttctcttaaaagagcctttgctttttctttaggcctttccgaattaagtacttgtttcattttctctcgaagcaagaaaaatgttcatcgagagtttcaaggttgagagtcctaacgtgaagtacacagagactgagattcagtccgtgtacaactatgaaaccactgaacttgttcacgagaacaagaatggcacttatcag

SEQ ID NO: 21004 - DNA, 307 bp, Glycine max
  Clone ID: 700954573H1
ctcttattagcgacggccattctcgccgttgtgtgctccgccgtgagcggttgctcgccatcggatggggcggcgctgctggcgttccggaaggcgctgagcgagccctaccttggcctcttcaactcgtggacgggctccaactgctgcctcgactggtacggcatcagctgcgacgccaccaccggccgcgtcaccgacatcaacctccgcggggagtccgaagaccccatcttcgagaaagccggtcgctccggctacatgaccggaaaactctcagaggcgatctgcggcatcgcaccctcac

SEQ ID NO: 21005 - DNA, 308 bp, Glycine max
  Clone ID: 700954574H1
gtggagtgtgcagaagagcgtcgcagtcgcaaccctaatcagaagaagcgcagttgcaagcgagtgacagccaccagccatgggtcgtatgcacagccgcggtaagggtatatcctcttctgctttgccctacaaaaggacacctcctagctggctcaagatctcttcgcaagatgtcgaagaaaatatctgcaagtttgcgaagaaaggtttgaccccgtctcagattggtgtcattctcagagattctcacggtattgctcaggtcaatagcgtcactggcagcaaaatccttcgctcctcaaagc

SEQ ID NO: 21006 - DNA, 271 bp, Glycine max
  Clone ID: 700954575H1
attagattatctcccactgctgcatcacctatatatcttataaggtgtatgggaccatagtagtgagggctgtgtctttctctttttttcctacttgtcatttatatttatgagcgagagaaatagtgcgtgtatctggttgctaattcgagtgctattagtctgtggtttcgttggtttgtaacccctctgctttggttatgctggattgtatattatccttaaagaaatgaaagattaaattatcaaaaaaaaaaaaaaaaagggcggc

SEQ ID NO: 21007 - DNA, 186 bp, Glycine max
  Clone ID: 700954576H1
ctcattaattgcaagaatggcacttcgttgcttggtgatgtccctttctgttctcttcactcttggtcttgcgagagaaagccatgccagagacgaagatttttggcatgctgtttggccaaacactcccattccaagttcattgcgagatcttctagagcctggccctgcaagtgttgaaatcga

SEQ ID NO: 21008 - DNA, 310 bp, Glycine max
  Clone ID: 700954578H1
gcaagacctacttggaagtgaaggggacaggaacagcaaaccagtgtccaacaattgatggtggattggagtcatttgccttcaagcaagggaaatacaatgccaagaagttctgccttgagccaacttcattcacagtgaaggcagagggtgtggccaagaacgctccccctgagttccaaaacacaaagctcatgacacgtttgacctacactcttgatgagattgagggaccctttgaggtgtcttctgatggcactgtgaagtttgaggagaaagatggaattgactatgcggccgcacagtccag

SEQ ID NO: 21009 - DNA, 217 bp, Glycine max
  Clone ID: 700954579H1
aattaatcatcttacttatttattctccgaaaatggttgatttacattggaaatcaaagatgccaagttccgacatgccttccaaaactctaaaactctctctctccgacaacaagtccttaccctctttgcaactacccttccgcaccacagatatctctcacgccgcaccttctgtttgctccacttacgactactatctccggcttcctcaact

SEQ ID NO: 21010 - DNA, 139 bp, Glycine max
  Clone ID: 700954580H1
acaacccaaagatgttagagaaaaagtggctttctactgctttgaatgttagaagccaaggattaggaagtgaaacaatagtctttgctcatggctatggaacagaccagtccatctgggacaagatcactccttcctt

SEQ ID NO: 21011 - DNA, 310 bp, Glycine max
  Clone ID: 700954581H1
ctctttttcttagacaggctctgctcctccgcgtttgcttccacaactaccaacgcttcaccgccggaggtacgccgcacgtcaccggctgtggtgcagcgcagcgccaacctaccgtcagacgaagcggagaagaaaacaaactccggcggcatcagcaacagctcctttgcacggaaagctcagtatcctccgtcaagtgaagcgcggtgggaggacgaccccgattaccgcaaatggaaggacaaataaaaggagattctcagcgacattgaacctatcgttgttctcgccaagggatatctccact

SEQ ID NO: 21012 - DNA, 286 bp, Glycine max
  Clone ID: 700954582H1
cacccttctttgactgttctcccacaccacacccatgaacctcctcctgctccttattctcctctttcacgcggcggaagcaagggacagtggcagctcctccacaaaaacatcggcattgtcgccatgcacatgcagcttctccacaacgaccgcgtgcatcatcttcgaccgcaccgacttcggactctccaacctaaccctccccgacggaagatgccgcaaaaaccaaacgagttggtcgtcaaacgccgatgcaccgggcactccatcgaatacgacgtcg

SEQ ID NO: 21013 - DNA, 287 bp, Glycine max
  Clone ID: 700954583H1
atctcatcaccaccaccaccacgcaataaagttacatcaaaccacaacaactttttcacatcttacacaacactgtctctctctcttctctttctctgcgtttctctgaaaaaccagaacaagctctggagaaaccgccacaaaaaaaagaaaagaaaacgcaaacctaaccgcaaacggtaaccccattatgccatgcttcacaccacacccctctcttctcttccttcttctcacccttctctctatttccttcttctctccttccaccgctgcaagaacctctt

SEQ ID NO: 21014 - DNA, 313 bp, Glycine max
  Clone ID: 700954584H1
tgataaacttcaccatgacagtccttggacatgccctaagtacagagtgacctttgatgcatcagttatatggggtctgattggaccaaagaggctatttggacctggtgggctgtacaggaaccttgtgtggttattcctgattggagcagtgctgccagttcccatttgggtgttgagcaaaatcttccctgagaagaaatggataccactgatcaacataccagttataacctacggctttgctggaatgccaccagcaactccagccaatattgcaagctggctagtgactggaatgacttcaattact

SEQ ID NO: 21015 - DNA, 303 bp, Glycine max
  Clone ID: 700954585H1
gcgatttcgcatcaacaatggaggagctattcgtggcagttctatcgatgcttctcgtagcagcgttgatcgcactctacctatggaaacgccgccaggattcgaaacctccccctccccaccgcgacgaagctcctcaggctccgcggagagaaacggtggcccgcgccaccgccactcgtcgcatgcgtcgccgacctaccgcgtctggagctagtacttcggcagatccacctgcgacgcaagaagaatctgctggtgagagtgacgatgaagctgctggtaggagggtattatgaggct

SEQ ID NO: 21016 - DNA, 303 bp, Glycine max
  Clone ID: 700954586H1
agtttctgaggagagcagctttcttgaagcacaatctttgggtcactccttatgttcccggcgaaatgcatcccggaggggagtttcctaatcagaatccacgcgttggagagggtttggctacttgggttcagaagaatagatcattggaagaagccgatatagttctttggtacgtgtttggtataacacacattccccgattggaagactggccagttatgccagtggaacgcattggctttatgcttatggtattccactcaaagttagcgtatttcattgccattctttctgtgcaaa

SEQ ID NO: 21017 - DNA, 310 bp, Glycine max
  Clone ID: 700954587H1
ctagtctcaagcttaactctcatattcttcaggagtctactgctaaagagattaatgaaaatcccgaggcaggatgggaggctgctataaatcctcgtttctccaattatacagttgaacaatttaagcgccttcttggagtcaaaccaatgcctaagaaggaacttagaagtacacctgctatatctcacccaaagacgttgaaattgccaaagaattttgatgcgaggacagcttggtcgcagtgtagcactattggaagaattctagatcagggtcactgtggttcttgttgggcattggtgctgtt

SEQ ID NO: 21018 - DNA, 311 bp, Glycine max
  Clone ID: 700954588H1
agaatggaacaaattccattgtttaatgagaaaatgaaattggctcagaaagcagccatggctaaacgatgggaagacttcaagaaaataatgaaggacgaccaggagaacttgctcaagcagtttgatctgtttgagaacagtgccatccatgttgcaactcgctctaacagcccacgactcctcagagaattgatagagatgttaccaaaagaagaaaggtggcaagctttgtgcaaggaaaatcgcgaagggaacacggttttacacgaggttgtgttttgtaagaagaagaaaatggctgatgttgt

SEQ ID NO: 21019 - DNA, 304 bp, Glycine max
  Clone ID: 700954589H1
cttagctcaaacctcacctcaataatctttcgtgctagctagcttaatcatattccaattccaacagaaccaaattctgctagctagctagtacgtcaaaggaaataaaataatatggcattcagcgggacccaacagaaatgcaaggcttgcgacaaaactgttcacttggtcgaaggtttatctgtcgatggggctgcttatcacaagaattgcttcagatgcagccattgcaatggccttcttgcgataagcaactactcatccaccgaagggttttgtactgcaaggtgcacttgagcag

SEQ ID NO: 21020 - DNA, 304 bp, Glycine max
  Clone ID: 700954590H1
ggaaatcttccgcactgatggtgaacaagtcctcaagtttccaccacctcatgtcatcaaagttagtaagtctgcatggatgactgatgaagaatttggaagagagatgcttgctggtgttaatccatgcctaattgagtgccttcaagtgttccctccaaagagcaagctagatcccacagtgtatggtgatcaaactagtacaataaccaaagaacacttagagatcaaccttggtggactctctgtggaacaggcactgagtggtaacagattgttcatattagatcaccatgatgcattc

SEQ ID NO: 21021 - DNA, 304 bp, Glycine max
  Clone ID: 700954593H1
gtgccattctactgttgtttctgggtggttctcagcttctcaaacttgctctgggaaatctgggaaagctgtttatttcaacaacccaatgtggccaggagaagcccattcaatcaaagtagaaaagatcttatacaaggaaaagtcggagtaccaagaggtcttggtttttgagtcatcaatgtatgggaatgtgcttgtacttgatggaatagttcaattgactgagagggatgaatgtgcttaccaggagatgatagctcatcttcccctctgttcaattcattcgcccaaaaagttttag

SEQ ID NO: 21022 - DNA, 308 bp, Glycine max
  Clone ID: 700954595H1
atcagatatgttttctgagttcgagatttttgcagtggtgacacattcggggacactcgagtctggccattatgtttctttagtgcgtgtaaggaatcaatggtacagatgcaatgatgcttggataactgtggttgatgaggctacagtcagagcttcacagtgttacatgattttttatgtgcaaaaaactctgcacaataaagcaaatgaagacctgagtcacgtgccaaattcccctggaagagacctatttcttcctattgctggatgttgctagaaaagaggattatattgtaaaggagtac

SEQ ID NO: 21023 - DNA, 286 bp, Glycine max
  Clone ID: 700954596H1
ccaaaaaggccttgctagtggtgtcacaggtatggctggtcttggcagaactaaagtttctcttccttctcaatttgcctcagctttcagctttcatagaaaatttgccatttgcttgagttcttctactatgacaaatggtgtaatgttctttggtgatggcccttacaattttggttatttgaactcggatctctccaaggttctaactttcacccctctcatttcaaaccctgttagcactgctccaagttatttccaaggggaggcctcagtggaatacttt

SEQ ID NO: 21024 - DNA, 255 bp, Glycine max
  Clone ID: 700954601H1
gttatggacactagtgtctctccctctctcctactttctctcctcttctttgcaagagtcttagggcttgcagtggcagtgcttgtcctcatatgggcccttgccttcaaatccagcttcctcactacctcactctcccaacaagacctcatctatgcagttcttcatcctctgctcatggtcattggctttatcctcttaagtggagaagctattttggtgcatagatggttacctggatcaagggggttaaag

SEQ ID NO: 21025 - DNA, 226 bp, Glycine max
  Clone ID: 700954602H1
gttgaaggctaaaataaattaaacaaaaataggaggaacaaacaaagccatggaagcttgtgctggccatttatataggtgttgatgtgtgttctcaaattttaggtcaacttgaaaatttcttgcataaattttttttatagtggcttgttatatattgattttctgataaagcgccaaatggctatagagaaatgaaaatgaaggtgaaatgaagttgtgcatg

SEQ ID NO: 21026 - DNA, 311 bp, Glycine max
  Clone ID: 700954572H1
gaaaagaaagccaaaactacagttctttcaatgaagctcccagctttttcttcttctcctcctccagtacattattgttttctgccttcaacgacttttaagtcacttgtccgtttgacagtactattactagttgtttccagcaacagaacaaagggtgctgtggaacttccaccaaatgtctcggttccagcagtgttggtatttggagattcgatcatggacactggcaacaacaacaacaacttgataacatcagctcggtgcaacttctcaccatatggccaagattttatgggaggatcctactg

SEQ ID NO: 21027 - DNA, 312 bp, Glycine max
  Clone ID: 700954545H1
gcaaaatgcggagtgcgaaacctaactaaaacagaagaaatggcggagaagtcgggagcagcagaagagagctctaatccgatggcttttcaccatacgacgacgaagcttgtcgttttggcagaccttaacgtcgaagccgaagccgaagccgaagaagacgattcttctctcgtccctcctccactaattaccattttggcaaatgacgaaaacagtcaagataaaagttcgttgtccaaagacactgatagcattgaagctgaaagtaaaaagttgaacaaactgagcaaatcccgctcagaaagacag

SEQ ID NO: 21028 - DNA, 311 bp, Glycine max
  Clone ID: 700954546H1
gaaaagcaagtagctaaggaaaacaaaaacatcatcacagaaactcacaaaggaaaaacaaacaaacaaacaaaatgtcttctccaagcaagcggcgagaaatggacttgatgaaactgatgatgagtgactacaaggtggagatgattaatgatggaatgcaagagttttatgtgcacttccatggacccaatgagagtaaattctcctttgtttttatctttgttacatgttttgaagctttttgtgaattgttttttgtgaaaaaagttgggttgctattgtgggtatgtggtaattaacatatattg

SEQ ID NO: 21029 - DNA, 309 bp, Glycine max
  Clone ID: 700954547H1
gttgcgagttgagaccgggcctttgcattttcttgcgcagccatacagactctgcgccctgtgctgcgtgtgtgtgtgtgcgagagagagagacaacgaccccagacgcttgcagtctttctttggcggcggcgtcgttttctctacgctttacccattcattcattcattctcaggttcggggcatttcattctgattcactatggccaatggtccagcaccgttttctgagattgggaaaagggcaaaagaccttttatacaaggattacaacttcgatcacaagtttagcctctcaattcagactc

SEQ ID NO: 21030 - DNA, 271 bp, Glycine max
  Clone ID: 700954548H1
acaacccaaagatgttagatagaaagtggctttctactgctttgaatgttagaagccaaggattaggaagtgaaacaatagtctttgctcatggctatggaacagaccaatccatctgggacaagatcactccttcctttgctgaaaactaccgggttgtgctgtttgattggcctttttctggagctgtgaaggatccaagcctctatgaccctttgaagtatacctccttggaagcttttgcagatgagtttatcactcttatggatca

SEQ ID NO: 21031 - DNA, 322 bp, Glycine max
  unsure (1)..(322): unsure at all n locations
  Clone ID: 700954550H1
ccctccaccatgcaacactgcatgcagaatgcttccaagtatggataatagttgcccatgtatgtcggatattacgcagatcattaggaaagctctcattccatgctattgtttgtattttccttgcatcttctgtgtctccccaaatgaaagagcgacattgcacactaacacacaggttgtagcaatggcgagcgctcccactccacgcgaagagttcgtgtacatggcgaagctggcggagcaggccgagcgctacgaggagatggtggagttcatggagaaggtctccgcctccgccgagagcgangagtgaccgtgg

SEQ ID NO: 21032 - DNA, 305 bp, Glycine max
  Clone ID: 700954551H1
gagagagagagatggtgatgcattcacgggtcagaagcgtcgccggaaacatcaaatgcgcagcgagactcttctgttcatcttcgacgaccacgccgccggctgcgccgttgcagttcccgcagactctggcggggctccgggcgcggctggcggaggagtcgccgtcgctgtcggacttcctcgcgttaaaatcggagagcgcgtactcggtggaggtcgggactaagaagaagccgcttccgaagccgaagtggatgaaggaggccgttcccggcggcgagaagtacgtgcagatcaagaag

SEQ ID NO: 21033 - DNA, 302 bp, Glycine max
  Clone ID: 700954552H1
ccttcccaatatagtatattctcttctctggcgtccaagctagtcgttctctctgtctcgtttatagtgttttggtatattatattgttctggttgcacgaagcacactatgggttggaaatgaggtctcaaaaacgttgtcacaatgtttactttcatggtggccttggttgttgttcaacatgtgaagtgtggggactcaggtcgcatgttagttcagcacggtggcttcgttcaacgaagtgacaccaacttcgttctgagtaacatgcatttctacttcaacggattcaacgcgtact

SEQ ID NO: 21034 - DNA, 242 bp, Glycine max
  Clone ID: 700954553H1
ggcttatcacatcacaatttgtgcattgcctcgtgtcctttttcttctctgcttgccagaaatcttacacacacaggtatctagcaaatgggttctcaccagcaagaaccatggctattggagaatgggaaaccgagggtgttgaccaaggagaataggcatggccgttctgcacacagcatgtcctccacgtctttgcgcaagaagtctagccgatctcttgtgctccaagcttccatgtg

SEQ ID NO: 21035 - DNA, 295 bp, Glycine max
  Clone ID: 700954554H1
ctttcctttcctgctgcgttcattccaaattccaaacccaccataatatctagcttcttgtgaaggctgttagtttgatttagaagttgatattgataatttgctgtgatgggtggccaaaggagtggttatggtaagcgtccccactctcaatctgaccatgataatgggccaaataaaaggaggaatcatggtgatgacagagagcagtttgtgattgatttggaggatactgtgtatcgttacgtgtgcccgggtcgaaagattggcagtgttattggtaggggaggtgaga

SEQ ID NO: 21036 - DNA, 312 bp, Glycine max
  Clone ID: 700954555H1
aaaaaagagtggctctatgttaaggaaagcaacctatggagtttatctggcgatgcaaactctataatgcctatgctgagactgagttacttgaacttaccgataaaacacctaaggtacttgagatcttctgaaggtagctttgaaactcttccagaatcgctatgtgcattgtggaatttgcaaatattgaactttcagcttttttagatgtctaaaaaatttgccttacagtttgatgcgcttaaaagctcttcaggagctatctttgattgagtgctcaacactatcaagcttggctcccagataggg

SEQ ID NO: 21037 - DNA, 282 bp, Glycine max
  Clone ID: 700954556H1
aaacagtctctgcacactacactgaactccattcacaaaggaaaaaaaaaaagcagaagcataaagaagaagaagaagaagaagaagaagaagaagaagaaagaaatggcgcattctcggcaacagaacaaggctggcttcacgctctccagcaagatcaacaacaatgggagcttctctacgggtactggtagtaagagcatatacgacgacgtttacggaggcccactgaagttcggggtttggggcctctcccctcgtttcgaagactacggggggatt

SEQ ID NO: 21038 - DNA, 306 bp, Glycine max
  Clone ID: 700954557H1
aattacatagcctcagtaatctgagagagaaacaaaaacaatgaaggtttccattgccaagttccactcccttcccctatgttttttccttctcttggccttcaacacaaaacccctcctagcagcagaaccagagccagtggttgataagcaagggaaccctttggagccaggagtagggtactacgtgtggccactttgggctgatgaaggaggcctcacactaggccaaacaaggaacaagacatgccctctttatgttatccgtgacccttcattcattggcaccccagtttcatcttagca

SEQ ID NO: 21039 - DNA, 294 bp, Glycine max
  Clone ID: 700954558H1
cttagaacgttatcccattctatttccaatatagctacgtttgtactaaaacatcaacggggtttctgtagaaatcctatcgtactcttgtgcattgtattagaatatatgcagttcatttgcctcaataatcttctcagcattgccgttgtaaattgatttgtatgtattattccaagaatagaactaattctctatttttggtttaaataatatttgtatttcctttcaaaaaaaaaaaaaaaaaaaaaaaaaaaaacaaaaaaaaaaaaaaaaaaaagagggggcccccca

SEQ ID NO: 21040 - DNA, 310 bp, Glycine max
  Clone ID: 700954561H1
ggaaatcttgtcatgggttccggtgaaggatctcctgcggttcaggtgcgtcgccaagtggctgcgagccctcatctccgatcctacattcgtcaaactgcatcttctccacatgtcctccagaaacgcacacatcctactaacgttttacgacaaacactaccctggagacaagtattccgcaccccgcaggtactgcgccccctgctctgtgcacgctttactccacaacccatcttccaccatcgagggtttccgccccttcgacataaacgtttacagagtcttgggtgtctgcaaggcttggttt

SEQ ID NO: 21041 - DNA, 311 bp, Glycine max
  Clone ID: 700954562H1
ctgtgaggcttcaatttccaattagggtttcgcttagagtaaccaattaccatgggagtcttcacctttgtcgttcgcaaatccggcgccgaatggagcgccaagcaacattccggcgacatcgaggcctccgccgactccacctacgatctccaaaggaagctcgtgcaagccgctctcgccgttgattcctccggtggagtccagtcctccttctctcccgtgtctcctacctccgctgtgttccaggtgatagtgggtggtgctgtattcgttggaggtggcggtggtgctgttgcagtgcacctgca

SEQ ID NO: 21042 - DNA, 308 bp, Glycine max
  Clone ID: 700954563H1
attagaaaacaaagcctttccgtttcatctcgaattgtgaattgaatattcaatgactaaaaaaatggaataaaaaaacgaagaattcaaagaatgattccaaattgaaggtaggataagaacaaaggttctacatattcacaaaaaaaaactatgtatgtaggtagagacgaaaaaataaatctcgaagtaattcgtagagttcaataactattattattttcaattcggaattcttattaattactttaaaccgaataaatcttgataattgaaaaattgagtcataatttaatggttggttatac

SEQ ID NO: 21043 - DNA, 168 bp, Glycine max
  Clone ID: 700954566H1
actccctctacctgagaaggaggatccctgtgctagctcgatcaaagatcaaagatggaggagcggactcgcagcattctgattttgatgaccttgctttccatctccattgctggcggcaatgcaggtggcttgcagcatcataagggtaggcatggtcagcatggt

SEQ ID NO: 21044 - DNA, 315 bp, Glycine max
  Clone ID: 700954567H1
ataatctttccctctttgtgttgaattcctatctgaaggattgatttggggattggacctcatggatcgcctaaaatcttctccgcagctcatgattgtttcggatcttgatcacacaatggttgatcatcatgattctgagaattggtccctttttaggttcaatgccctttgggaagcccattatcgccaagattctctgctggtgttctcaactggaaggtcacctacactctacaaacaactgaggaaggaaaagcctctgataactcctgatatagccattatgtctgtggggactgagattcttatggg

SEQ ID NO: 21045 - DNA, 316 bp, Glycine max
  Clone ID: 700954568H1
cttcattctaatgttgctgaggcaattgaggatcatggggttgctgcatacccattcacccctgaaaagtttgctgagcttgatgaaatactgaaggccaaagaggcagctcaaacccttgagtcaattttggtgtctgacgatcaagattttgtcattgggaaagatggggtgaagattccagtgtcagaattgaaggggaaggttgtcctcctctacttctcaggtcactggtgtcctccatgccgtgcattccttccaaaacttattgatgcatatgataagattaaggaatagggcaatgcatagaagttgt

SEQ ID NO: 21046 - DNA, 309 bp, Glycine max
  Clone ID: 700954569H1
acagcacagaatggggcgcaaagagaagcagaacgcgaaggcaatagatgaggaacacgacgtagtaaattttaacggcgcttcaacgccgtccctcgttttcagcagcgacgacgatgaagccaaccaagatctcagcctcaagatcgtcgaaaaggccatgcgaatgcgcgccgccaaacacgccccaaacgacgacgtttcttctccgttttcgcagaaatccgaactcgcagtgcccctaaacgacgtcgtttcggatttgcgcagcgcaatcgctgattccgaagtgacggataagaagaaacg

SEQ ID NO: 21047 - DNA, 264 bp, Glycine max
  Clone ID: 700954570H1
atgaaaatgcttgatttggcgtttcaatgtgcagcccccattcgaacagatagacctgacatgaaatcagtgggcgagcaattgtgggcaataagggcagattacctcaagagtgcaaggagataataagttgtggtattttgtgatgatattgtgaggtggcaaccaattgaagctgtctcagaatacaagacctgaataaaagtaacaaacttagacaaaaaaaaaaatggtacaccgaggagcttccttatcttgccactg

SEQ ID NO: 21048 - DNA, 308 bp, Glycine max
  Clone ID: 700954543H1
ccagcttagccttcttcgggaatcgtctcttcgcgcttggcgaatccgacctcccttacgtcgttaacgtaacccctgacggcgacatcgaaaccctcggccgtcacgactttgacggaaaactcacgttcagcatgacggcgcaccctaagatagaccccgacacagcggagtgcttcgccttccgttacggccccgtgccaccgttcctcacctgacttccgtttcgacggtaacggcaaaaaacacgaggacgttcctattttctccatgctaacaccttcgttcctccacgatttcgcattacg

SEQ ID NO: 21049 - DNA, 292 bp, Glycine max
  Clone ID: 700954522H1
agaaaaaatgggttcttcttcttctatgtggacggtgtgtgtgattttggcatcactggcctctgcagcactctgtgccaacccacgcaggccagtggatgtacaatttggccgaaactacgtgcccacatgggcctttgatcacatcaaatatttcaatggtggttctgacattcagcttcatcttgacaagtacactggtactggcttccagtccaaagggtcttacttgtttggtcacttcagcatgtacataaagatggttcctggagattctgctggcacagtcact

SEQ ID NO: 21050 - DNA, 315 bp, Glycine max
  Clone ID: 700954523H1
gcttcatccccagaataaatcacaccccccattgcaatgacccccagcaacaactcttctgcatcttcaaactcccttttggcttttctaagtgctgtgattctttctttcatctttttcttcaggtcctaaagcatacttgtgatttcctccattatttcctttgagatttggacagtagttggtcatacacccaattctaaattagagttgggatgtctggaggagtagtttgatacagtgatgcatctccacagatacttgagtaaagctatatgctgtggtgtagatttttactatggagtaaatgcaagt

SEQ ID NO: 21051 - DNA, 308 bp, Glycine max
  Clone ID: 700954524H1
ccctcctcctcttcagagtagcattgttcattcacactccctctctggctttcattctttggcattgcgaaaaaacgagaactcagaaaaccgcaacaaactcacactcactcacaagaagtagtaacaacatcaacaactctctcatcatcatggcagttgaggctcctccgcacaacatgaatctcttcccctcgcagttactaacctccagagaaatgatgaaaccgaatctcggcttctacaccgcgcagaaacggaaggcggcggtggcgcgcgccgccatgcctattcttccgtcatcaaag

SEQ ID NO: 21052 - DNA, 313 bp, Glycine max
  Clone ID: 700954525H1
gcaaatcacgcgaacacaatagttgtagagtatagagtctgtcgagatctcattcatgatcggtgataattgttgaagagagagagacagagagagagagagaggatgggttgttgccaatcatcgatgttgctgagagtgggagagagggagactcaccctgaaaaggagaaggaaagggaaaaggaaaaagagcaagcgtacggaaaccaccagaggcagtctgagggaggagagggcgacggcgagaaagaggtggttgatttctcgttctcggagttctcgctggcggactcgaaggcgccaccaacaa

SEQ ID NO: 21053 - DNA, 313 bp, Glycine max
  Clone ID: 700954526H1
accctactcattctccatacctcaacgaagaggttaaagagacggcaacactttgctgtccgccttgaccgagcagagcttcgtcttggccctcgattttgccctaaagtactctcagtcacaacagacaccgtcgtcgtcgtcgtcgtcatcaatggcaccgaagcagaccaaggctgagaagaagatcgcttacgatgcgaagtggtgcgacctaatggaggagtacggccagatcctcgttgtgaactccgataacgtgggatcgaaccagctccagaacattcgcaagggtctccgtggcactccgtcg

SEQ ID NO: 21054 - DNA, 315 bp, Glycine max
  Clone ID: 700954527H1
ctccacccacccagcatatctctctattcctatttattagcacccctcacattaccttgtgtcaccaactactttgactcctttaccataccattacaataattatcaaacctaaccagtaaaaatggtgaccgtggaggaaatccgcaacgctcagcgttcccatggacccgccaccatcttggccttcggcaccgccacgccgtccaactgcgtctcccaagccgattaccctgactactacttccgcattaccaacagcgaacacatgactgatctcaaagaaaagttcaagcgcatgtgtgaaaagtccat

SEQ ID NO: 21055 - DNA, 310 bp, Glycine max
  Clone ID: 700954528H1
ggcagtggtagttgccaaactagtagcaagaagtaagtcacgtttttctccgttttcattcatcacaatattaaagcttttagtttccttcagtatgggggacacttacgttttggccacaccgaagcgcaaccgttccgatgacgtggacggcggcgaggcgaagaagctgctgttgcagcagggcgaggcagacccggcggcggcgctggcgagcgcgcggcacgagttcggggagcacggcggggtgaacatgtcgatcgaggcgtcggcgacgttcacggtgatggagccggagacgagcggcgca

SEQ ID NO: 21056 - DNA, 311 bp, Glycine max
  Clone ID: 700954529H1
gatggaacatcaaccaaaacacattatgtaagatttgcctcagtcttatgaggacctatgtatcacacctgttttttttggcaatattaagttggaactgaaactaattgatcataatagtgaattcattacttaaatttattttaatatgttgaaattggttaggatgattgtacctggttagtcatcagttttcaagtttttatttacttgttagcttctcagtatgtcagatcaaactttttcacaggttgacctgcatatatgctgcctgtaaaatagaagaaaatcatgtgtcagctgggagcttg

SEQ ID NO: 21057 - DNA, 311 bp, Glycine max
  Clone ID: 700954531H1
ttcagtttggtctatttaaaaaataataattcaatcatttattttcactctaagaatataattcttttgaaacaataattgtttttgaatttgggacacgaatagaaccattttttttattaattatatttgatacgtgaaaacttgtttcatttcttggaaagccaaaggataatatattatagatcataaaagaccatgatatttgacacaagatgtatcaaacatcaggccaaattaaaaagataaatagtgacccatagtatcccacatggacttaaacggacccaacatacccaataaatgtacag

SEQ ID NO: 21058 - DNA, 301 bp, Glycine max
  Clone ID: 700954532H1
ctcgagaaaagcagcatagtgagatactacgtatactacgtagtactacacatttcatttgcctcttgtagtagccatggttttccaaacaaacattaatcctcacttcgtattgtttcctctcatggctcaaggccacatgatccccatgatggacattgcaagactattggcacggcgtggtgtgattgtttccatattcaccaccccaaaaaatgcatcacgattcaattctgttctttctcgtgatgtttcatcagggctccaatccgggtagtacaactccattttccatcccaag

SEQ ID NO: 21059 - DNA, 209 bp, Glycine max
  Clone ID: 700954533H1
cttaattgaaggaagcagtttagcttctgttgattctagtgggttgtctgatccctatgtggtgtttacgtgcaatggaagaacaagaactagttcaatcaagttccagaagtctagtcttacatggaatggtgagtgtcatgtcatgatttattattgtctgttttacaacttggatcaaacctctgaaaccggtgatctaatcaaca

SEQ ID NO: 21060 - DNA, 290 bp, Glycine max
  Clone ID: 700954534H1
catgcttcacggactccgtggccttgaaagctgtcatagagcttcgtatagcggacatactagaccgttatggtaaaccactatccttgtcgcaaattgtggagaacatagaagacgcaccctccccagatgcctctcttctccagagagtcctgagagtgatggtgcgcagaaagatcttcagtgcacaagaatcagagacaggagaaaccctcttcggcttgacacgagcctcgaagtggatccttcgcgacacgaaaatgaccctagcacccatgttgctgctggag

SEQ ID NO: 21061 - DNA, 315 bp, Glycine max
  Clone ID: 700954535H1
gatttacctgttgaaggtttggtgtgttgatcaaaaaggattgctacatgatattaatgaaatcctgtacaaccttgaacttattattcagtgataaagaacatgtctaacacccttccatctggggttggcatcgctttgactctctgaataataagttcaaggttgcacaggatttcagtggatgccgatgtgagggatgtaagaatgtccatggcaagaaagaagattatgttgcatttggacatacttcgagtaaagaaagggtgagcagtattgttgaagaaggatcagactgcactattcacaataact

SEQ ID NO: 21062 - DNA, 319 bp, Glycine max
  Clone ID: 700954536H1
gcttttccttttctcattattcttctctctctctccaaagtccatactttttgatttgtggaattactcttgttcctacctggttcagcacagcctcctcaatctcctcctcttgtattttctctttttgtttttttataataaaaagattcagtttttttgtgttgtcgctgatacctatttgcattttgtgttctgggtcaatgctgtcatgttctctgcaaattagggcttcaatccgtgctctggggtaattgattctggttcgtgtgttgataagtaatgtagctggagaagatgtgtgtattcgaataacaag

SEQ ID NO: 21063 - DNA, 305 bp, Glycine max
  Clone ID: 700954537H1
ctttttatttatcttcgttctctctctctccaacgatttcgccattcaacagcgatccttccgtcaccatcatcgtcatcaacgctcccattttcggaaccccagggccattgactattaaggatgtctcctgcatcccgatccaagtctaaagacaggaagcctagcaaggaagctcagaaggcttctgcaaagcctacaggatctggtaatgtagcagctggagttccagccagtgcatataaccccttattaggaacattccatactctggacatgtcaccaacacctagctcaccaataca

SEQ ID NO: 21064 - DNA, 310 bp, Glycine max
  Clone ID: 700954538H1
catttttcttctctctacttcttctgcgtcatcttagggttttggtttgtgctcttctcactgattttctggagatggcttctttcgggccaaatggaactgaaaatgaggattcgttgcctcccccacctcccgttgtaccatcagatgttgtacctgttaaagctgagccggagaagaaaaaggcttcaaggtttccaatagccaggcgtggccttgcttcaaaagggacgaagctgcaacttctcaccaatcactacagagtgaacgttgcaaacactgatgggcatttttatcagtatagtgtgct

SEQ ID NO: 21065 - DNA, 298 bp, Glycine max
  Clone ID: 700954539H1
ctttctcacttacactcacacaatctctctcttctatgtgtctatctctttccagcttggtaatattagtacaagtagagtagtagtagctcctggtggtgttgttgttgtgttgtgatctattagaaggttagatatttatgccacattttgatgtttatgcttagtacccaattgggtgaaaaaaattggtttatagctagctaggcatttgatgctcccgtcagagaaacccccctgcaaagggaaactctgctaaaataaattctgtctctttcagtcatcgcaggatttttga

SEQ ID NO: 21066 - DNA, 295 bp, Glycine max
  Clone ID: 700954540H1
ccaagcttctctgttaaaaaaaaattaggcgtctaaagggccaaagcttagaaagttgaagcttttttgttgaggtgaaagtgaaatggttggcaaggataatctgagggctgaggacttgaacttgtgctttaagaagcttatgatggtggccgggagtgggaacagtgagaaaggggtgaacttgaaggttggggtgatcaccgagtggaaggatattcctgtggagcttctgatgcaaattctgtcccttgtggatgatcagacggtgatcatagcttctggaggttgtcgt

SEQ ID NO: 21067 - DNA, 306 bp, Glycine max
  Clone ID: 700954541H1
gttttcttcttcttcttcccctccatgtcgttattgtatataattttatatgcataatcctttaggcttcatcatcaatcatatattgtctccttgagattcctggcttgttcaagagcaagccagaggtcattcattggatatcatttattttgaatgaaatattgagactactagactattttgagctatgttgtgttgtggaggtgcagaagaggattttggcattccacctggaaatcaatataatgcatcacctaaaaagggtaatgcatataatggtggaggaggaggtgacagagcgag

SEQ ID NO: 21068 - DNA, 310 bp, Glycine max
  Clone ID: 700954542H1
tctccatccaacatcgaaacgaggtcgttttgtgttccgccgaaggaccggaggttgtagcaggctagcagctatggatttggcatccaatctcggtggcaagattgacaaagccgaagttctctctgccgttcagaagtatgagaagtatcatgtttgctatggaggtcaagaggaagagaggaaagctaattataccgatatggttaataaatactacgatcttgttaccagcttttatgagtttggctggggggaatctttccattttgcacccagatggaaaggggaatctcttcgaagagcatca

SEQ ID NO: 21069 - DNA, 314 bp, Glycine max
  Clone ID: 700954521H1
gagcacttgatgaccgaaaaggaagagcttcttggacaagtccatcatttgagaaccgaactcgcttcgcttagggctgccaaagacaaccaggttgccgattatcagaggcttttggctgaggaaacccgcaaaaatgaagctcttgccgaagaagttgagaaattgctgaagcttcgccaggaaggagcatgtcatgatttgaattataacagtaagatcatgactgtagatggtcagtttaaggctaactctaacagctcatctataagaatgacaagaaaacgtacaaggcaaaatactttggagaaaga

SEQ ID NO: 21070 - DNA, 240 bp, Glycine max
  Clone ID: 700954492H1
gtgttgtgtgtcttcccttggtgttccagtttttatttgcagccgccatgtgcggaatcctcgcagtgttgggttgcgtcgacaactctcagaccaagcgcgctcgcatcatcgaattgtctcgcaggttgcggcatagaggtcctgattggagtggcatacattgctatgaggattgttaccttgctcatcaacgccttgctattgttgaccctacttcgggggatcaactttgtacaa

SEQ ID NO: 21071 - DNA, 240 bp, Glycine max
  Clone ID: 700954494H1
ctcactggaagccttgttgtgagtaagggaaaggcttcctgcactgagcaccaagttgaaacctcttgattctttgcttagaattccacagaatatggagactgttcttttcaatgactccccacctttggagttcaagggtatgagcaaggaggaggaagactcattgctagggcaagttgaaatatggaggtacatgacatgcttcacggactccgtggccttgaaatccgtcataga

SEQ ID NO: 21072 - DNA, 244 bp, Glycine max
  Clone ID: 700954495H1
cttttctaatgcccattgaagatgtattttcaattcagggacgaggaacagtagccactggacgtgttgaacaagggatcattaaagttggtgatgaagtggaggtgttgggtctaatgcagggtggtcctctgaaaacaacagtaactggagttgagatgttcaagaagattttggatcaaggacaagctggtgataacgttggtcttcttctccgtggtctgaagcgtgaagatattcaacg

SEQ ID NO: 21073 - DNA, 247 bp, Glycine max
  Clone ID: 700954496H1
cctcgagccgaatcggctcgagcttttcttcattttctctcttccactcaccgagtcacgcactcgcctcgactcgtacggactccgatcccccccgagtcacactcagccagcaccaccgcccgatccgacgatgtctcgcgcctcttccgccgcctccggcgagatcatgctgttcggggtcagagtcgtcgtcgattcgatgaggaagagcgtcacagtgaacaacctctcacagtacgaacat

SEQ ID NO: 21074 - DNA, 329 bp, Glycine max
  Clone ID: 700954501H1
gcaaaggattctacccgccgctcgatgggaattgcgcttcaaggcgtctcgtagggctaatccgcctcacgagggtcaccaacggcacgtgcctttggggggccgaggcccctactgctggtcggcaaacggacggcgggcgcacgcgtcgcttctagcccggattctgacttagaggcgttcagtcataatccaacgcacggtagcttcgcgccactggcttttcaaccaagcgcgatgaccaattgtgcgaatcaacggttcctctcgtactaggttgaattactattgcgacactgtcatcagtagggtaaaactaactgctcacg

SEQ ID NO: 21075 - DNA, 326 bp, Glycine max
  Clone ID: 700954502H1
ggctcgaggccgagtgttacattccttttgaaattgacaccacgcaagatggtggaagtgatgaagatagttgtctgcaaggtggagtctacactgttgatggggatgagactgtgccagttctaagttcaggctacatgtgtgctaaaggctggcgcggaaaaacaagattcaacccgtctggtatgcgcacctacgttagagaatatgatcattctcctccagccaaccttctagagggaaggggcacacaaagtggtgctcatgttgacatcatgggaaactttgcattgattgaggatgttataagagtggctgcggagcca

SEQ ID NO: 21076 - DNA, 295 bp, Glycine max
  Clone ID: 700954503H1
gctacaagcccaacaaacttggttttaattggtataggcgtgccaaggtcttgttaattttgagcgttaagtgctgcaactaatcagatcccaagaccttggcctaccttgccatacagaaaaaaaaaaagcaaaaaaaaagccaaggtttggagccaacaaaaataaacacaaagcacaagtcatggaaagaataatggttggaagtgcaacaaaggttgcttacaccctcttggccactttcgccattgtcattccatgccttgaggctggcattgccgagtttgacgatttt

SEQ ID NO: 21077 - DNA, 297 bp, Glycine max
  Clone ID: 700954504H1
aagaattcgctatcgctgggacagtttttgtttgacagcacagcactcggaaatttctggcgatctctgcgttttcccctattttttctgaatctaacaacaaacattcctctggcaacaatcaatactattaataagagttccttccttcactctcacccaagccaaagaaaggaacaagaacaagaccaacaaagtaacgtgaaagagaaagagatggaggaaattgttccagtggtggatttccagaggctttcagaggaagaggagcgcaagaagctgaggaaaacatgtgag

SEQ ID NO: 21078 - DNA, 323 bp, Glycine max
  Clone ID: 700954505H1
ctcaaacacaggttgatagcaaagaatagcacagaggaaaaatgaaacttaaaccagaacaatatggaggaaataataataatatagaatcaaacgaagtagctttggtgcatctttaagggaagaggcattcagaattttgcaatcaaaatgcaatttaaaatagtacattagtgtcaaaactcaaaagcttctggttccaatgatcataaacattgctatcgagctttaataccttatactaaaatcagggtacaaaaaatgagaataatagaagatggatgttcgcctatacaagaataaaagaatagagtgaagcgcca

SEQ ID NO: 21079 - DNA, 287 bp, Glycine max
  Clone ID: 700954506H1
aagtctcaatttcgaaccccatttcttgtttctttttctcttttgttattcatcttcaacctcaccccttcatacgcactctatggagcatccacacccgtgcttcaactcactccctctaacttcaagtccaaggttctgaattcaaatggagttgttcttgttgaattctttgctccatggtgtggacactgtcaggctctgactcctatatgggagaaggcagctactgtgttgaagggtgttgttactgtggcagcaattgatgctgatgctcacccgtcttt

SEQ ID NO: 21080 - DNA, 317 bp, Glycine max
  Clone ID: 700954507H1
ttttcccttttcagctttcattggtgtggcctagctgttttctcaatgagaaagccttcatctctacaaagcgcacttttgcgctttggggttcccttgttgcttgttatcaccttctgttatgctacttctactgctgcagcaacaactcaagtttcagggaatgaagagctgccaaagacaaacctaaatgggcatgatgaagaagcaaaattcggattttttcatcataaaccaatattcaagaaacatattccaattccagtatatgaacctgtaacaaagccatttccagtgtataaacctatacaaagcca

SEQ ID NO: 21081 - DNA, 309 bp, Glycine max
  Clone ID: 700954508H1
tgcgaaaagaagagagtgcagcgccaaggcaatgggaaggagcactttggctttggttctcgcgattctgatctctttgcagggaaccccccacgttagatccgatgcctccgatcatcgttacaaggacggagactccgttcctctttacgccaacaaagtcggtccctttcacaaccccagtgaaacgtatcggtactttgacctgccattctgtgtaacaggtcatgagaaagataagactgatgccctcggtgaagtgttaaatggcgatcgccttgttagtgctccttatgaacttagttcaag

SEQ ID NO: 21082 - DNA, 314 bp, Glycine max
  Clone ID: 700954509H1
ctttttctctctctagaattttttttttctctctctctctcccatctctcggaaaatttttcagagcttcctaaagcctttagaattctctggaacctttttgttcgtccgccgaggatcgcaattcctccaaatcgtcgtcactcgtcgcttagttcggttctaactgcatgaactggttcgggaagctggattcatcatcgtcgaacttgaacttcaatcacttcgttacttgtctgttgatttttatcctccatttttcgcctcaatcgctctcttccaccttcgatagtaacactaatctcgatttaatt

SEQ ID NO: 21083 - DNA, 311 bp, Glycine max
  Clone ID: 700954510H1
gcaaattctggtgcccgtttaggtgtagctgaagaagtcaaatcctgtttcagagttggttggtctgaggaatctaatcctgagaatggctttcagtatgtatatgtaacacctgaggataatgctcggattggatcatcggtgatagcacatgagttaaagcttgagagtggagaaaccagatgggttatagataccattgttggcaaggaggatggccttcgcgttgaaaacttgagtggaagtggggctattgctggtgcttattcaagggcatacaaggaaacttttacactgacatatggactggt

SEQ ID NO: 21084 - DNA, 313 bp, Glycine max
  Clone ID: 700954512H1
ctttctttttcaaaaccctcgctctcaccgtcgcgccggaatcttccccggcaatgtcggcgccggcggaggctccttccttcactgcctctcctccgtcagagactactccctcacctaactccactgccctctctcctccgcctccctccaccatcaatgccaccgtttctcctccgccgccggaggccctcccctccgaccagtaccgttaacagcgggttgtcgacgggtacagtgagcggaatagttataggggccgtgttaggttcggtgggtatgcttatcattgggggcattttctctgcttcta

SEQ ID NO: 21085 - DNA, 314 bp, Glycine max
  Clone ID: 700954513H1
gttttcttcatatcttccttgtcactgcccgtgtgtcgccgccatggccaccgtcaccacccaagcctccgccgcaattttccggccatgtacctcgaaatcgaggtttttgaccggctcttccggtaaacttaaccgggaagtgactatgcggccaatggggtgccctccttctgcctctttcaaggttgaagccaagaagggagagtggttacctggcttggcgtccccaacttacctcaatggcactcttcctggtgacaatggatttgaccctctggggctagctgaggacccagagaactgaggtggta

SEQ ID NO: 21086 - DNA, 305 bp, Glycine max
  Clone ID: 700954514H1
cagcaatagagtttctaagttcatttcttgtgctgatgttcttctaccctttttgccactcactcgacaacaccataaccataaaccaccccattagagacggcgacgttttggtctccaacggtttaggaaactttgcgctcggtttcttcagcccgcgaaactccacaaaccgttacgttgggatttggtacaacaaaatctcggaacaaacggttgtgtgggttgccaacagagacactcctcttaacgacacttccggtgttctcaaaataagcaacaacggaaaccttgtactccacgac

SEQ ID NO: 21087 - DNA, 209 bp, Glycine max
  Clone ID: 700954516H1
gttctatggagaatggtgttgatgggaagtttctgaccatgatttttccggaggatgaaatggtgaagcttaaatctgagctcaagataattggtcttttgcttgagaataattaagttttaatgagattaaaagcatgtttgactttccgttcatcttgttagcacgaatttcaattttaaattcaatggtcaaccgtatattaacgc

SEQ ID NO: 21088 - DNA, 325 bp, Glycine max
  Clone ID: 700954517H1
ctctgggcctcttcgggtgttctccgatttggcctcaattccgccattcctttttttgcttttcttttattcctcttttaatttctttttctttttcatggaccgcagatacagagactatcaccatcgtcctgctcatttggcacatgcttctccccctgaatactttgtccgcctggagaacacaacttacaaagacgatctatatttaaggaagaggacaaggatgcgtcggtggctttgttgtacttgtcaggtggaagagtcttacccatcaaatgagaatgaacacctgaaaagcccaaggaattatggagatgcaacc

SEQ ID NO: 21089 - DNA, 317 bp, Glycine max
  Clone ID: 700954519H1
ttggatctctcactagttttagagagagagagagattcagaggaagagaaaaacgtgtggttatgtgattgtggaagagagaactgagacggcattgccaattctcccttgatctatgaaactgaccctgcaaatctgaggccacaatcggtagagattgtttcattttcatgacaaaaaaaaaaagcacatttcagctctaagcctctaaccttatgagttttgagctggtttggtaaactgtgtttctcttccaatctattccctttgattccattggttcatctcaacaaacccttttggatgtctaccctctg

SEQ ID NO: 21090 - DNA, 310 bp, Glycine max
  Clone ID: 700954520H1
gggagaagcatgaaaatcggagacaggaagaagaagaagagcatccccagcgacgaatgaatgggcaattgcggaagcagagaggaatctgccgtagtttccaaggctcaagttgttcagcagcttcaccatgcgacgtcgttgggcgccagtgccaggaccgacaagaagcacgctcacaggcacaatctcagcgagtgcgcttcggatctcagcgagtcctgttccacaccgcgcggtaacagtagcagcaacacgctgctctacacgcacgtcatcgctttcacgctctacgagttggagaccataa

SEQ ID NO: 21091 - DNA, 241 bp, Glycine max
  Clone ID: 700954491H1
gcaataattcacaaacacaaaaccgccaccaccaacacacaatggcacgccaagtgattgtcatcgccgctctactcatggtagccattgttggtgtggccctggccgatgaagccccatcagcatcacctaagtcagcaccaacaccatcatcattaccaaaagcaccaacatcatcaccgaaggcaccggcaccatcatcctccaaggcatcaccaccaacctcatctcctccgacaat

SEQ ID NO: 21092 - DNA, 243 bp, Glycine max
  Clone ID: 700954459H1
tatagcccaagccctatacaaccaaaccctaacacacacccatttgattcagtttccatggctagcctcaaggttgcatttttggctgcagtgctctgcatggttgtggtgagtgcacccatggcacatgcagctatcacgtgcgggcaggtgacgaatagcctgatcaattgcatcggttacctccagaacggaggaacgccgccgtcgggatgctgcaacggagtgaagagcctcaatgcc

SEQ ID NO: 21093 - DNA, 243 bp, Glycine max
  Clone ID: 700954460H1
cctcaagtcaaccttggttctggaccacacatcgtaacatcatcgagtgtctgatctcgttcgcaccctgcttcttagtcctctctctcaccatttaacaattacactggaagaaaaatgggaggttgtctatcatcgaagcctaaggcagtagataatggctcagcttccggcaataccaactgtttcatgctgtatgcaagagcactctcaatcacatggggagaaactccagaatattgg

SEQ ID NO: 21094 - DNA, 243 bp, Glycine max
  Clone ID: 700954462H1
agaagatggagatgtatcagatctggagcaggagaatagcgttgggagcgttcgcgtttgttctgcttttcctatcggcctcagcagacgacgtcgttgtgctctctgaagataacttcgagaaggaagttggtcaggacagaggagctctcgttgagttctatgctccttggtgtggacactgcaaaaagcttgctccagaatatgaaaagcttggtagcagcttcaagaaagccaaatctg

SEQ ID NO: 21095 - DNA, 247 bp, Glycine max
  Clone ID: 700954463H1
tgaattatgaacatcaactttaagttctatacatattacactttccatattcacaaatgtatgaaacatgcacaaaacaccttcttcgtcaataatttgaattgacctatattgaacttgaccattgaattcatatacaagacaacgataccatagtgcagtaattataaacataacatcatttttgtaattgatgattgtattgcggtgattatgtttgacagcgttattgttggattcaagagta

SEQ ID NO: 21096 - DNA, 249 bp, Glycine max
  Clone ID: 700954464H1
catcatcatggccacctctgctattcagcaatcagcattcgcaggtcaaactgctctgaagcagctcaatgagttggtccgcaagaccggtggcgccggcaaaggtcgcaccaacatgcgccgtaccgtcaagagtgctcctcagagcatttggtatggccctgatcgtcccaagtacctgggtccattctcagagcagattccgtcatacctgaccggagaattccccggtgactacggatgggacac

SEQ ID NO: 21097 - DNA, 248 bp, Glycine max
  Clone ID: 700954465H1
ctggaggccttgattgaattacacaatatgactgggacctttgcaaggaatattcagcacttattttctgtttctgatgtccggtttttaatggatgtgcttaaatctgtgtacttgccttatgaatcgtttaaacagagatatggacaaatggagcgtgccatcctttctgctgagattgcaggagtagatttaagaggagctgttattcgagggttgggagcccaaggtgttgaactcagtgaaac

SEQ ID NO: 21098 - DNA, 249 bp, Glycine max
  Clone ID: 700954466H1
ctgaaaaggccgtggaattggtggatgagaacactatttgtgttgctgctatccttggttccacactaaatggagagtttgaagatgtcaaacgcttaaatgatctcctaattgaaaagaacaaaataactgggtgggacactcctattcatgttgatgcagccagcggtgggttcatagccccatttatttacccagagcttgagtgggacttccggttacaactagtgaagagcatcaatgttagtg

SEQ ID NO: 21099 - DNA, 243 bp, Glycine max
  Clone ID: 700954467H1
ctgatttacaaaaggttacaaacttctcttgcataaagaatggcatcagcaacaataaggaatgcagttgtcacgggagcaaacaaagggataggatttggaatatgcaagcaattggtttctaatggcatcacagtggtgctaacagcaagggatgagaaaaggggtcttgaagctgttgaaaagctgaaagagtttggtgtgtctgatcaagtggtgtttcatcagcttgatgtgactgac

SEQ ID NO: 21100 - DNA, 69 bp, Glycine max
  Clone ID: 700954469H1
cccttttgtctgaggtgtgtgcattcttgtttaactcctctttgtacctcagacatcccagaagggaac

SEQ ID NO: 21101 - DNA, 242 bp, Glycine max
  Clone ID: 700954470H1
gaaagggcttcgcataagcgaggaaagagtggttgttgattcatctcctgagatgcctgttgattcaatccaggtacagatatccagtgtggactccaaatttgcgagtgctgtatcagagagtggtcagatcagcattgacggaagagtgaagtttggagaaccccacctgacatgtgtggggtcttcctatgtggatgtgagcttataagggaatctaatcctgtgccggcaggtggatc

SEQ ID NO: 21102 - DNA, 244 bp, Glycine max
  Clone ID: 700954471H1
tcacaactgagagaaatagcaaatgggttggagaagagtggccacagtttcttatgggtagtgaagaggccaacacaagacgaaaaaacaaagcagattcacgacacaacaacaacaacaacaacaatggatttcgatttgagttcggtgttgccaagtgggttcatcgagagaaccaaggacaggggcctggtggtgagctcgtgggccccacaagtggaggtgctgagccgcggctcggtgg
